United States Patent Application Publication US 2005/0221354 A1 - sequence listing, part 3

SEQ ID NO: 51861 - DNA, 25 bp, probe
gaagatgaagatgaggaggaggagg

SEQ ID NO: 51862 - DNA, 25 bp, probe
agctgaagatgaagatgaggaggag

SEQ ID NO: 51863 - DNA, 25 bp, probe
gctgaagatgaagatgaggaggagg

SEQ ID NO: 51864 - DNA, 25 bp, probe
ctcagtgtagctgaagatgaagatg

SEQ ID NO: 51865 - DNA, 25 bp, probe
tcagtgtagctgaagatgaagatga

SEQ ID NO: 51866 - DNA, 25 bp, probe
caactacgggcatctagaaattgtc

SEQ ID NO: 51867 - DNA, 25 bp, probe
aagatgaagatgaggaggaggaggc

SEQ ID NO: 51868 - DNA, 25 bp, probe
aactacgggcatctagaaattgtcc

SEQ ID NO: 51869 - DNA, 25 bp, probe
gctcagtgtagctgaagatgaagat

SEQ ID NO: 51870 - DNA, 25 bp, probe
gcaactacgggcatctagaaattgt

SEQ ID NO: 51871 - DNA, 25 bp, probe
catctagaaattgtccgcttcctgc

SEQ ID NO: 51872 - DNA, 25 bp, probe
gcatctagaaattgtccgcttcctg

SEQ ID NO: 51873 - DNA, 25 bp, probe
atctagaaattgtccgcttcctgct

SEQ ID NO: 51874 - DNA, 25 bp, probe
ctgcaactacgggcatctagaaatt

SEQ ID NO: 51875 - DNA, 25 bp, probe
agctcagtgtagctgaagatgaaga

SEQ ID NO: 51876 - DNA, 25 bp, probe
tgcaactacgggcatctagaaattg

SEQ ID NO: 51877 - DNA, 25 bp, probe
tctagaaattgtccgcttcctgctg

SEQ ID NO: 51878 - DNA, 25 bp, probe
ggcatctagaaattgtccgcttcct

SEQ ID NO: 51879 - DNA, 25 bp, probe
cctgcaactacgggcatctagaaat

SEQ ID NO: 51880 - DNA, 25 bp, probe
actacgggcatctagaaattgtccg

SEQ ID NO: 51881 - DNA, 25 bp, probe
gagctcagtgtagctgaagatgaag

SEQ ID NO: 51882 - DNA, 25 bp, probe
ggagctcagtgtagctgaagatgaa

SEQ ID NO: 51883 - DNA, 25 bp, probe
caatatgaaggatgttatggaaggc

SEQ ID NO: 51884 - DNA, 25 bp, probe
gcaatatgaaggatgttatggaagg

SEQ ID NO: 51885 - DNA, 25 bp, probe
cagcaatatgaaggatgttatggaa

SEQ ID NO: 51886 - DNA, 25 bp, probe
aatatgaaggatgttatggaaggcg

SEQ ID NO: 51887 - DNA, 25 bp, probe
agcaatatgaaggatgttatggaag

SEQ ID NO: 51888 - DNA, 25 bp, probe
tcagcaatatgaaggatgttatgga

SEQ ID NO: 51889 - DNA, 25 bp, probe
gtcagcaatatgaaggatgttatgg

SEQ ID NO: 51890 - DNA, 25 bp, probe
tgtcagcaatatgaaggatgttatg

SEQ ID NO: 51891 - DNA, 25 bp, probe
atatgaaggatgttatggaaggcgt

SEQ ID NO: 51892 - DNA, 25 bp, probe
ctcacacatagatcaagagagacac

SEQ ID NO: 51893 - DNA, 25 bp, probe
atgtcagcaatatgaaggatgttat

SEQ ID NO: 51894 - DNA, 25 bp, probe
actcacacatagatcaagagagaca

SEQ ID NO: 51895 - DNA, 25 bp, probe
tactcacacatagatcaagagagac

SEQ ID NO: 51896 - DNA, 25 bp, probe
catgtcagcaatatgaaggatgtta

SEQ ID NO: 51897 - DNA, 25 bp, probe
tcttggtcactctgaagcacaatat

SEQ ID NO: 51898 - DNA, 25 bp, probe
atcttggtcactctgaagcacaata

SEQ ID NO: 51899 - DNA, 25 bp, probe
tatcttggtcactctgaagcacaat

SEQ ID NO: 51900 - DNA, 25 bp, probe
atatcttggtcactctgaagcacaa

SEQ ID NO: 51901 - DNA, 25 bp, probe
tcacacatagatcaagagagacacg

SEQ ID NO: 51902 - DNA, 25 bp, probe
tatgaaggatgttatggaaggcgtg

SEQ ID NO: 51903 - DNA, 25 bp, probe
ttactcacacatagatcaagagaga

SEQ ID NO: 51904 - DNA, 25 bp, probe
ccatgtcagcaatatgaaggatgtt

SEQ ID NO: 51905 - DNA, 25 bp, probe
cttggtcactctgaagcacaatatt

SEQ ID NO: 51906 - DNA, 25 bp, probe
catatcttggtcactctgaagcaca

SEQ ID NO: 51907 - DNA, 25 bp, probe
aaacactgtcttctttcatcttcac

SEQ ID NO: 51908 - DNA, 25 bp, probe
gactagaatgttcacaccacgatct

SEQ ID NO: 51909 - DNA, 25 bp, probe
caccatgtcagcaatatgaaggatg

SEQ ID NO: 51910 - DNA, 25 bp, probe
tcaccatgtcagcaatatgaaggat

SEQ ID NO: 51911 - DNA, 25 bp, probe
ataccgacaacatctgaaaggacta

SEQ ID NO: 51912 - DNA, 25 bp, probe
cttcctacaaagactcctccaaatc

SEQ ID NO: 51913 - DNA, 25 bp, probe
gttctctagttctacgggtttgatt

SEQ ID NO: 51914 - DNA, 25 bp, probe
ctaagaggactttcataccgacaac

SEQ ID NO: 51915 - DNA, 25 bp, probe
aagactttgttctgtgtgtttcaag

SEQ ID NO: 51916 - DNA, 25 bp, probe
cacacatagatcaagagagacacgg

SEQ ID NO: 51917 - DNA, 25 bp, probe
attactcacacatagatcaagagag

SEQ ID NO: 51918 - DNA, 25 bp, probe
gattactcacacatagatcaagaga

SEQ ID NO: 51919 - DNA, 25 bp, probe
actagaatgttcacaccacgatctg

SEQ ID NO: 51920 - DNA, 25 bp, probe
ttcctacaaagactcctccaaatct

SEQ ID NO: 51921 - DNA, 25 bp, probe
ttctctagttctacgggtttgatta

SEQ ID NO: 51922 - DNA, 25 bp, probe
accatgtcagcaatatgaaggatgt

SEQ ID NO: 51923 - DNA, 25 bp, probe
agactttgttctgtgtgtttcaaga

SEQ ID NO: 51924 - DNA, 25 bp, probe
taagaggactttcataccgacaaca

SEQ ID NO: 51925 - DNA, 25 bp, probe
gacaacatctgaaaggactagaatg

SEQ ID NO: 51926 - DNA, 25 bp, probe
cgacaacatctgaaaggactagaat

SEQ ID NO: 51927 - DNA, 25 bp, probe
ttggactgattctgacatcttatgc

SEQ ID NO: 51928 - DNA, 25 bp, probe
gatctataccatgaggaacaaggag

SEQ ID NO: 51929 - DNA, 25 bp, probe
tgatctataccatgaggaacaagga

SEQ ID NO: 51930 - DNA, 25 bp, probe
gtgatctataccatgaggaacaagg

SEQ ID NO: 51931 - DNA, 25 bp, probe
caactctcattctgtctgtgttctg

SEQ ID NO: 51932 - DNA, 25 bp, probe
cacttcggaagattctctgtatcaa

SEQ ID NO: 51933 - DNA, 25 bp, probe
atctataccatgaggaacaaggagg

SEQ ID NO: 51934 - DNA, 25 bp, probe
ctcttcaatcctgtgatctatacca

SEQ ID NO: 51935 - DNA, 25 bp, probe
tctcttcaatcctgtgatctatacc

SEQ ID NO: 51936 - DNA, 25 bp, probe
tcaatcctgtgatctataccatgag

SEQ ID NO: 51937 - DNA, 25 bp, probe
cctctcttcaatcctgtgatctata

SEQ ID NO: 51938 - DNA, 25 bp, probe
tcttcaatcctgtgatctataccat

SEQ ID NO: 51939 - DNA, 25 bp, probe
gactgattctgacatcttatgccag

SEQ ID NO: 51940 - DNA, 25 bp, probe
tgtgatctataccatgaggaacaag

SEQ ID NO: 51941 - DNA, 25 bp, probe
ctgtgatctataccatgaggaacaa

SEQ ID NO: 51942 - DNA, 25 bp, probe
ttcaatcctgtgatctataccatga

SEQ ID NO: 51943 - DNA, 25 bp, probe
ggactgattctgacatcttatgcca

SEQ ID NO: 51944 - DNA, 25 bp, probe
tggactgattctgacatcttatgcc

SEQ ID NO: 51945 - DNA, 25 bp, probe
cttcaatcctgtgatctataccatg

SEQ ID NO: 51946 - DNA, 25 bp, probe
acaactctcattctgtctgtgttct

SEQ ID NO: 51947 - DNA, 25 bp, probe
caatcctgtgatctataccatgagg

SEQ ID NO: 51948 - DNA, 25 bp, probe
ctgtagtgaccacattctatggaac

SEQ ID NO: 51949 - DNA, 25 bp, probe
ctctcttcaatcctgtgatctatac

SEQ ID NO: 51950 - DNA, 25 bp, probe
ctagctgtagtgaccacattctatg

SEQ ID NO: 51951 - DNA, 25 bp, probe
cctgtgatctataccatgaggaaca

SEQ ID NO: 51952 - DNA, 25 bp, probe
gcacttcggaagattctctgtatca

SEQ ID NO: 51953 - DNA, 25 bp, probe
tttggactgattctgacatcttatg

SEQ ID NO: 51954 - DNA, 25 bp, probe
caaacaaactgaaacacttgattga

SEQ ID NO: 51955 - DNA, 25 bp, probe
aactctcattctgtctgtgttctgc

SEQ ID NO: 51956 - DNA, 25 bp, probe
ctgacatcttatgccagaattgtgg

SEQ ID NO: 51957 - DNA, 25 bp, probe
cctagctgtagtgaccacattctat

SEQ ID NO: 51958 - DNA, 25 bp, probe
tcggaagattctctgtatcaaacaa

SEQ ID NO: 51959 - DNA, 25 bp, probe
ttcggaagattctctgtatcaaaca

SEQ ID NO: 51960 - DNA, 25 bp, probe
cggaagattctctgtatcaaacaaa

SEQ ID NO: 51961 - DNA, 25 bp, probe
acttcggaagattctctgtatcaaa

SEQ ID NO: 51962 - DNA, 25 bp, probe
gacatcttatgccagaattgtggtg

SEQ ID NO: 51963 - DNA, 25 bp, probe
cttcggaagattctctgtatcaaac

SEQ ID NO: 51964 - DNA, 25 bp, probe
tctgtatcaaacaaactgaaacact

SEQ ID NO: 51965 - DNA, 25 bp, probe
tgtagtgaccacattctatggaacg

SEQ ID NO: 51966 - DNA, 25 bp, probe
gctgtagtgaccacattctatggaa

SEQ ID NO: 51967 - DNA, 25 bp, probe
ctctgtatcaaacaaactgaaacac

SEQ ID NO: 51968 - DNA, 25 bp, probe
tgacatcttatgccagaattgtggt

SEQ ID NO: 51969 - DNA, 25 bp, probe
tctctgtatcaaacaaactgaaaca

SEQ ID NO: 51970 - DNA, 25 bp, probe
ggcacttcggaagattctctgtatc

SEQ ID NO: 51971 - DNA, 25 bp, probe
ccattcagatgttcttctccttcat

SEQ ID NO: 51972 - DNA, 25 bp, probe
ttcagatgttcttctccttcatgtt

SEQ ID NO: 51973 - DNA, 25 bp, probe
attcagatgttcttctccttcatgt

SEQ ID NO: 51974 - DNA, 25 bp, probe
cattcagatgttcttctccttcatg

SEQ ID NO: 51975 - DNA, 25 bp, probe
cttgtgccattcagatgttcttctc

SEQ ID NO: 51976 - DNA, 25 bp, probe
ctaaggaacaaggagctgaagaatg

SEQ ID NO: 51977 - DNA, 25 bp, probe
atcatcctctcctttgtcttcattg

SEQ ID NO: 51978 - DNA, 25 bp, probe
catcatcctctcctttgtcttcatt

SEQ ID NO: 51979 - DNA, 25 bp, probe
tctaaggaacaaggagctgaagaat

SEQ ID NO: 51980 - DNA, 25 bp, probe
gccattcagatgttcttctccttca

SEQ ID NO: 51981 - DNA, 25 bp, probe
tgccattcagatgttcttctccttc

SEQ ID NO: 51982 - DNA, 25 bp, probe
tcatcatcctctcctttgtcttcat

SEQ ID NO: 51983 - DNA, 25 bp, probe
atctgaatttatcctctctggcttc

SEQ ID NO: 51984 - DNA, 25 bp, probe
tatctgaatttatcctctctggctt

SEQ ID NO: 51985 - DNA, 25 bp, probe
cttcactcactccttccttctcatg

SEQ ID NO: 51986 - DNA, 25 bp, probe
ctgaatttatcctctctggcttctc

SEQ ID NO: 51987 - DNA, 25 bp, probe
catatctgaatttatcctctctggc

SEQ ID NO: 51988 - DNA, 25 bp, probe
atatctgaatttatcctctctggct

SEQ ID NO: 51989 - DNA, 25 bp, probe
tctgaatttatcctctctggcttct

SEQ ID NO: 51990 - DNA, 25 bp, probe
gtgccattcagatgttcttctcctt

SEQ ID NO: 51991 - DNA, 25 bp, probe
catcctctcctttgtcttcattgtg

SEQ ID NO: 51992 - DNA, 25 bp, probe
tcatcctctcctttgtcttcattgt

SEQ ID NO: 51993 - DNA, 25 bp, probe
tttgttcctcatcatcctctccttt

SEQ ID NO: 51994 - DNA, 25 bp, probe
gagattctgttcactgttgccatca

SEQ ID NO: 51995 - DNA, 25 bp, probe
ctcatcatcctctcctttgtcttca

SEQ ID NO: 51996 - DNA, 25 bp, probe
ttgtgccattcagatgttcttctcc

SEQ ID NO: 51997 - DNA, 25 bp, probe
gtctaaggaacaaggagctgaagaa

SEQ ID NO: 51998 - DNA, 25 bp, probe
tgaatttatcctctctggcttctca

SEQ ID NO: 51999 - DNA, 25 bp, probe
cagatgttcttctccttcatgtttg

SEQ ID NO: 52000 - DNA, 25 bp, probe
tcagatgttcttctccttcatgttt

SEQ ID NO: 52001 - DNA, 25 bp, probe
tgagattctgttcactgttgccatc

SEQ ID NO: 52002 - DNA, 25 bp, probe
ctgagattctgttcactgttgccat

SEQ ID NO: 52003 - DNA, 25 bp, probe
tctctgagattctgttcactgttgc

SEQ ID NO: 52004 - DNA, 25 bp, probe
gaatttatcctctctggcttctcag

SEQ ID NO: 52005 - DNA, 25 bp, probe
ttgttcctcatcatcctctcctttg

SEQ ID NO: 52006 - DNA, 25 bp, probe
gtttgttcctcatcatcctctcctt

SEQ ID NO: 52007 - DNA, 25 bp, probe
ctcccttatctacctcaaacccaag

SEQ ID NO: 52008 - DNA, 25 bp, probe
agattctgttcactgttgccatcac

SEQ ID NO: 52009 - DNA, 25 bp, probe
aacaaggagctgaagaatgccataa

SEQ ID NO: 52010 - DNA, 25 bp, probe
agatgttcttctccttcatgtttgg

SEQ ID NO: 52011 - DNA, 25 bp, probe
atcctctcctttgtcttcattgtgg

SEQ ID NO: 52012 - DNA, 25 bp, probe
cctcatcatcctctcctttgtcttc

SEQ ID NO: 52013 - DNA, 25 bp, probe
ggagctgaagaatgccataaataaa

SEQ ID NO: 52014 - DNA, 25 bp, probe
aggagctgaagaatgccataaataa

SEQ ID NO: 52015 - DNA, 25 bp, probe
gtcttatccagtgtgaacagcaatt

SEQ ID NO: 52016 - DNA, 25 bp, probe
gcctacatacagctattcacatcat

SEQ ID NO: 52017 - DNA, 25 bp, probe
tacatacagctattcacatcattgc

SEQ ID NO: 52018 - DNA, 25 bp, probe
cctatatgatctgcctacatacagc

SEQ ID NO: 52019 - DNA, 25 bp, probe
gcctatatgatctgcctacatacag

SEQ ID NO: 52020 - DNA, 25 bp, probe
atatggtcttatccagtgtgaacag

SEQ ID NO: 52021 - DNA, 25 bp, probe
gatatggtcttatccagtgtgaaca

SEQ ID NO: 52022 - DNA, 25 bp, probe
tgatatggtcttatccagtgtgaac

SEQ ID NO: 52023 - DNA, 25 bp, probe
ttgatatggtcttatccagtgtgaa

SEQ ID NO: 52024 - DNA, 25 bp, probe
catacagctattcacatcattgcac

SEQ ID NO: 52025 - DNA, 25 bp, probe
cctacatacagctattcacatcatt

SEQ ID NO: 52026 - DNA, 25 bp, probe
atacagctattcacatcattgcaca

SEQ ID NO: 52027 - DNA, 25 bp, probe
acatacagctattcacatcattgca

SEQ ID NO: 52028 - DNA, 25 bp, probe
tgcctacatacagctattcacatca

SEQ ID NO: 52029 - DNA, 25 bp, probe
ctccattctctccagcctatctcat

SEQ ID NO: 52030 - DNA, 25 bp, probe
gccgacaaatactactacacaagaa

SEQ ID NO: 52031 - DNA, 25 bp, probe
cttatccagtgtgaacagcaattta

SEQ ID NO: 52032 - DNA, 25 bp, probe
acacctgtttaactttgactgctat

SEQ ID NO: 52033 - DNA, 25 bp, probe
ccgacaaatactactacacaagaaa

SEQ ID NO: 52034 - DNA, 25 bp, probe
cacctgtttaactttgactgctata

SEQ ID NO: 52035 - DNA, 25 bp, probe
atgatctgcctacatacagctattc

SEQ ID NO: 52036 - DNA, 25 bp, probe
tcttatccagtgtgaacagcaattt

SEQ ID NO: 52037 - DNA, 25 bp, probe
tccagtgtgaacagcaatttattat

SEQ ID NO: 52038 - DNA, 25 bp, probe
atccagtgtgaacagcaatttatta

SEQ ID NO: 52039 - DNA, 25 bp, probe
tatccagtgtgaacagcaatttatt

SEQ ID NO: 52040 - DNA, 25 bp, probe
ttatccagtgtgaacagcaatttat

SEQ ID NO: 52041 - DNA, 25 bp, probe
ggtcttatccagtgtgaacagcaat

SEQ ID NO: 52042 - DNA, 25 bp, probe
gatctgcctacatacagctattcac

SEQ ID NO: 52043 - DNA, 25 bp, probe
ctatatgatctgcctacatacagct

SEQ ID NO: 52044 - DNA, 25 bp, probe
cacacctgtttaactttgactgcta

SEQ ID NO: 52045 - DNA, 25 bp, probe
tacagctattcacatcattgcacac

SEQ ID NO: 52046 - DNA, 25 bp, probe
ctgcctacatacagctattcacatc

SEQ ID NO: 52047 - DNA, 25 bp, probe
tgatctgcctacatacagctattca

SEQ ID NO: 52048 - DNA, 25 bp, probe
tctgcctacatacagctattcacat

SEQ ID NO: 52049 - DNA, 25 bp, probe
atctgcctacatacagctattcaca

SEQ ID NO: 52050 - DNA, 25 bp, probe
ccagtgtgaacagcaatttattatt

SEQ ID NO: 52051 - DNA, 25 bp, probe
ctacatacagctattcacatcattg

SEQ ID NO: 52052 - DNA, 25 bp, probe
tatgatctgcctacatacagctatt

SEQ ID NO: 52053 - DNA, 25 bp, probe
atatgatctgcctacatacagctat

SEQ ID NO: 52054 - DNA, 25 bp, probe
tttgtttctggttgtttggttaggg

SEQ ID NO: 52055 - DNA, 25 bp, probe
tatggtcttatccagtgtgaacagc

SEQ ID NO: 52056 - DNA, 25 bp, probe
tatatgatctgcctacatacagcta

SEQ ID NO: 52057 - DNA, 25 bp, probe
ctattcacatcattgcacacctgtt

SEQ ID NO: 52058 - DNA, 25 bp, probe
gttgtttggttagggctgaatgttt

SEQ ID NO: 52059 - DNA, 25 bp, probe
tataggaataaggacggtaatctgc

SEQ ID NO: 52060 - DNA, 25 bp, probe
tgagttataggaataaggacggtaa

SEQ ID NO: 52061 - DNA, 25 bp, probe
ttgagttataggaataaggacggta

SEQ ID NO: 52062 - DNA, 25 bp, probe
ttaggataagaatgtgcctctcaag

SEQ ID NO: 52063 - DNA, 25 bp, probe
tcgaacaacaatattcaccaattcc

SEQ ID NO: 52064 - DNA, 25 bp, probe
ttataggaataaggacggtaatctg

SEQ ID NO: 52065 - DNA, 25 bp, probe
gttataggaataaggacggtaatct

SEQ ID NO: 52066 - DNA, 25 bp, probe
agttataggaataaggacggtaatc

SEQ ID NO: 52067 - DNA, 25 bp, probe
gagttataggaataaggacggtaat

SEQ ID NO: 52068 - DNA, 25 bp, probe
taatttacttggtctcgtcaggttt

SEQ ID NO: 52069 - DNA, 25 bp, probe
taggaataaggacggtaatctgcat

SEQ ID NO: 52070 - DNA, 25 bp, probe
ataggaataaggacggtaatctgca

SEQ ID NO: 52071 - DNA, 25 bp, probe
gataagaatgtgcctctcaagcctt

SEQ ID NO: 52072 - DNA, 25 bp, probe
agcagtcactttaggataagaatgt

SEQ ID NO: 52073 - DNA, 25 bp, probe
cctttgcttctatcttgaaatccat

SEQ ID NO: 52074 - DNA, 25 bp, probe
taggataagaatgtgcctctcaagc

SEQ ID NO: 52075 - DNA, 25 bp, probe
gagcagtcactttaggataagaatg

SEQ ID NO: 52076 - DNA, 25 bp, probe
ttgcttctatcttgaaatccatctg

SEQ ID NO: 52077 - DNA, 25 bp, probe
gtaatttacttggtctcgtcaggtt

SEQ ID NO: 52078 - DNA, 25 bp, probe
tttgagttataggaataaggacggt

SEQ ID NO: 52079 - DNA, 25 bp, probe
ccctttgcttctatcttgaaatcca

SEQ ID NO: 52080 - DNA, 25 bp, probe
ttgagcagtcactttaggataagaa

SEQ ID NO: 52081 - DNA, 25 bp, probe
tttgagcagtcactttaggataaga

SEQ ID NO: 52082 - DNA, 25 bp, probe
gtttgagcagtcactttaggataag

SEQ ID NO: 52083 - DNA, 25 bp, probe
tgagcagtcactttaggataagaat

SEQ ID NO: 52084 - DNA, 25 bp, probe
gcttctatcttgaaatccatctggt

SEQ ID NO: 52085 - DNA, 25 bp, probe
tgcttctatcttgaaatccatctgg

SEQ ID NO: 52086 - DNA, 25 bp, probe
ggtttgagcagtcactttaggataa

SEQ ID NO: 52087 - DNA, 25 bp, probe
aatttacttggtctcgtcaggtttg

SEQ ID NO: 52088 - DNA, 25 bp, probe
aggaataaggacggtaatctgcatt

SEQ ID NO: 52089 - DNA, 25 bp, probe
tttgcttctatcttgaaatccatct

SEQ ID NO: 52090 - DNA, 25 bp, probe
tctatcttgaaatccatctggtaca

SEQ ID NO: 52091 - DNA, 25 bp, probe
aggttcaattctacttcaacaaaga

SEQ ID NO: 52092 - DNA, 25 bp, probe
ctttgcttctatcttgaaatccatc

SEQ ID NO: 52093 - DNA, 25 bp, probe
ttgaaatccatctggtacaaattcc

SEQ ID NO: 52094 - DNA, 25 bp, probe
aggtttgagcagtcactttaggata

SEQ ID NO: 52095 - DNA, 25 bp, probe
aacaacaatattcaccaattcccag

SEQ ID NO: 52096 - DNA, 25 bp, probe
acaatattcaccaattcccaggatt

SEQ ID NO: 52097 - DNA, 25 bp, probe
aacaatattcaccaattcccaggat

SEQ ID NO: 52098 - DNA, 25 bp, probe
ctttaggataagaatgtgcctctca

SEQ ID NO: 52099 - DNA, 25 bp, probe
actttaggataagaatgtgcctctc

SEQ ID NO: 52100 - DNA, 25 bp, probe
tttaggataagaatgtgcctctcaa

SEQ ID NO: 52101 - DNA, 25 bp, probe
cactttaggataagaatgtgcctct

SEQ ID NO: 52102 - DNA, 25 bp, probe
tcactttaggataagaatgtgcctc

SEQ ID NO: 52103 - DNA, 25 bp, probe
taataaggaagaagacaccaggaag

SEQ ID NO: 52104 - DNA, 25 bp, probe
ttaataaggaagaagacaccaggaa

SEQ ID NO: 52105 - DNA, 25 bp, probe
taagataaggctacttgacaaccag

SEQ ID NO: 52106 - DNA, 25 bp, probe
ataagataaggctacttgacaacca

SEQ ID NO: 52107 - DNA, 25 bp, probe
atcctctcaagaagttgtatgaacc

SEQ ID NO: 52108 - DNA, 25 bp, probe
ccaatcctctcaagaagttgtatga

SEQ ID NO: 52109 - DNA, 25 bp, probe
aataaggaagaagacaccaggaagg

SEQ ID NO: 52110 - DNA, 25 bp, probe
aatcctctcaagaagttgtatgaac

SEQ ID NO: 52111 - DNA, 25 bp, probe
caatcctctcaagaagttgtatgaa

SEQ ID NO: 52112 - DNA, 25 bp, probe
gccaatcctctcaagaagttgtatg

SEQ ID NO: 52113 - DNA, 25 bp, probe
agccaatcctctcaagaagttgtat

SEQ ID NO: 52114 - DNA, 25 bp, probe
aagccaatcctctcaagaagttgta

SEQ ID NO: 52115 - DNA, 25 bp, probe
tataagataaggctacttgacaacc

SEQ ID NO: 52116 - DNA, 25 bp, probe
ataaggaagaagacaccaggaagga

SEQ ID NO: 52117 - DNA, 25 bp, probe
ttcacaagctaccatctcagatata

SEQ ID NO: 52118 - DNA, 25 bp, probe
agtatgaaagcaatgatggaagaga

SEQ ID NO: 52119 - DNA, 25 bp, probe
tgtcgcaaagccaaataaatatcaa

SEQ ID NO: 52120 - DNA, 25 bp, probe
tcacaagctaccatctcagatatat

SEQ ID NO: 52121 - DNA, 25 bp, probe
gtatgaaagcaatgatggaagagaa

SEQ ID NO: 52122 - DNA, 25 bp, probe
atgatgaaactccgtctctactaaa

SEQ ID NO: 52123 - DNA, 25 bp, probe
atgaaagcaatgatggaagagaagt

SEQ ID NO: 52124 - DNA, 25 bp, probe
gtgtcgcaaagccaaataaatatca

SEQ ID NO: 52125 - DNA, 25 bp, probe
gattcaccaaattagccattccatt

SEQ ID NO: 52126 - DNA, 25 bp, probe
tgaaagcaatgatggaagagaagtt

SEQ ID NO: 52127 - DNA, 25 bp, probe
tatgaaagcaatgatggaagagaag

SEQ ID NO: 52128 - DNA, 25 bp, probe
tttaataaggaagaagacaccagga

SEQ ID NO: 52129 - DNA, 25 bp, probe
gacttgtcaattactaccctttcac

SEQ ID NO: 52130 - DNA, 25 bp, probe
gaaagaggtgctgctattattcaaa

SEQ ID NO: 52131 - DNA, 25 bp, probe
gaaagcaatgatggaagagaagttc

SEQ ID NO: 52132 - DNA, 25 bp, probe
gtcgcaaagccaaataaatatcaat

SEQ ID NO: 52133 - DNA, 25 bp, probe
tagtatgaaagcaatgatggaagag

SEQ ID NO: 52134 - DNA, 25 bp, probe
aagtacatgatgaaggtgaccaagg

SEQ ID NO: 52135 - DNA, 25 bp, probe
ggaaagaggtgctgctattattcaa

SEQ ID NO: 52136 - DNA, 25 bp, probe
agaggaaagaggtgctgctattatt

SEQ ID NO: 52137 - DNA, 25 bp, probe
aagaggaaagaggtgctgctattat

SEQ ID NO: 52138 - DNA, 25 bp, probe
gaggaaagaggtgctgctattattc

SEQ ID NO: 52139 - DNA, 25 bp, probe
gaagccaatcctctcaagaagttgt

SEQ ID NO: 52140 - DNA, 25 bp, probe
aacctagaggcacaatcttgacttg

SEQ ID NO: 52141 - DNA, 25 bp, probe
ctctcaagaagttgtatgaacccat

SEQ ID NO: 52142 - DNA, 25 bp, probe
cgtgtcgcaaagccaaataaatatc

SEQ ID NO: 52143 - DNA, 25 bp, probe
tttaggattggaatagttcaagccg

SEQ ID NO: 52144 - DNA, 25 bp, probe
aaagcaatgatggaagagaagttca

SEQ ID NO: 52145 - DNA, 25 bp, probe
tcgcaaagccaaataaatatcaatt

SEQ ID NO: 52146 - DNA, 25 bp, probe
catgatgaaactccgtctctactaa

SEQ ID NO: 52147 - DNA, 25 bp, probe
tacaccacaggacactactaatcta

SEQ ID NO: 52148 - DNA, 25 bp, probe
atacaccacaggacactactaatct

SEQ ID NO: 52149 - DNA, 25 bp, probe
catacaccacaggacactactaatc

SEQ ID NO: 52150 - DNA, 25 bp, probe
caactaattgactaacaccaccaac

SEQ ID NO: 52151 - DNA, 25 bp, probe
caaccaactaattgactaacaccac

SEQ ID NO: 52152 - DNA, 25 bp, probe
aacaaccaactaattgactaacacc

SEQ ID NO: 52153 - DNA, 25 bp, probe
ccatacaccacaggacactactaat

SEQ ID NO: 52154 - DNA, 25 bp, probe
acaaccaactaattgactaacacca

SEQ ID NO: 52155 - DNA, 25 bp, probe
acaccacaggacactactaatctag

SEQ ID NO: 52156 - DNA, 25 bp, probe
ccaactaattgactaacaccaccaa

SEQ ID NO: 52157 - DNA, 25 bp, probe
aaccaactaattgactaacaccacc

SEQ ID NO: 52158 - DNA, 25 bp, probe
aactaattgactaacaccaccaacg

SEQ ID NO: 52159 - DNA, 25 bp, probe
accaactaattgactaacaccacca

SEQ ID NO: 52160 - DNA, 25 bp, probe
accacaggacactactaatctagtc

SEQ ID NO: 52161 - DNA, 25 bp, probe
caccacaggacactactaatctagt

SEQ ID NO: 52162 - DNA, 25 bp, probe
agggaaacaaccaactaattgacta

SEQ ID NO: 52163 - DNA, 25 bp, probe
tagggaaacaaccaactaattgact

SEQ ID NO: 52164 - DNA, 25 bp, probe
gtagggaaacaaccaactaattgac

SEQ ID NO: 52165 - DNA, 25 bp, probe
aaacacacacacacactcacattta

SEQ ID NO: 52166 - DNA, 25 bp, probe
gggaaacaaccaactaattgactaa

SEQ ID NO: 52167 - DNA, 25 bp, probe
gggctacaattctttgagttcttaa

SEQ ID NO: 52168 - DNA, 25 bp, probe
ctcgttcaatgcgtagaaatgattt

SEQ ID NO: 52169 - DNA, 25 bp, probe
atccatacaccacaggacactacta

SEQ ID NO: 52170 - DNA, 25 bp, probe
tcgttcaatgcgtagaaatgatttg

SEQ ID NO: 52171 - DNA, 25 bp, probe
cgggctacaattctttgagttctta

SEQ ID NO: 52172 - DNA, 25 bp, probe
ttagcccatgtcatttaattgtcag

SEQ ID NO: 52173 - DNA, 25 bp, probe
gcccatgtcatttaattgtcagttt

SEQ ID NO: 52174 - DNA, 25 bp, probe
tagcccatgtcatttaattgtcagt

SEQ ID NO: 52175 - DNA, 25 bp, probe
aacacacacacacactcacatttag

SEQ ID NO: 52176 - DNA, 25 bp, probe
tccatacaccacaggacactactaa

SEQ ID NO: 52177 - DNA, 25 bp, probe
ggaaacaaccaactaattgactaac

SEQ ID NO: 52178 - DNA, 25 bp, probe
tttagcccatgtcatttaattgtca

SEQ ID NO: 52179 - DNA, 25 bp, probe
cccatgtcatttaattgtcagtttc

SEQ ID NO: 52180 - DNA, 25 bp, probe
agcccatgtcatttaattgtcagtt

SEQ ID NO: 52181 - DNA, 25 bp, probe
aaacaaccaactaattgactaacac

SEQ ID NO: 52182 - DNA, 25 bp, probe
gaaacaaccaactaattgactaaca

SEQ ID NO: 52183 - DNA, 25 bp, probe
catttagcccatgtcatttaattgt

SEQ ID NO: 52184 - DNA, 25 bp, probe
cttacattagttaagctaagcagca

SEQ ID NO: 52185 - DNA, 25 bp, probe
ggctacaattctttgagttcttaaa

SEQ ID NO: 52186 - DNA, 25 bp, probe
cgttcaatgcgtagaaatgatttgc

SEQ ID NO: 52187 - DNA, 25 bp, probe
ccatgtcatttaattgtcagtttct

SEQ ID NO: 52188 - DNA, 25 bp, probe
atttagcccatgtcatttaattgtc

SEQ ID NO: 52189 - DNA, 25 bp, probe
tcttacattagttaagctaagcagc

SEQ ID NO: 52190 - DNA, 25 bp, probe
ttacattagttaagctaagcagcaa

SEQ ID NO: 52191 - DNA, 25 bp, probe
cctcggttctaagatacaatggatt

SEQ ID NO: 52192 - DNA, 25 bp, probe
attctgtcattgctgctactctaac

SEQ ID NO: 52193 - DNA, 25 bp, probe
cattctgtcattgctgctactctaa

SEQ ID NO: 52194 - DNA, 25 bp, probe
ctcggttctaagatacaatggattc

SEQ ID NO: 52195 - DNA, 25 bp, probe
tcggttctaagatacaatggattcc

SEQ ID NO: 52196 - DNA, 25 bp, probe
tcattctgtcattgctgctactcta

SEQ ID NO: 52197 - DNA, 25 bp, probe
gcttatgtcaattcattggaagtca

SEQ ID NO: 52198 - DNA, 25 bp, probe
ggcttatgtcaattcattggaagtc

SEQ ID NO: 52199 - DNA, 25 bp, probe
ctactctaacactgagcaacactct

SEQ ID NO: 52200 - DNA, 25 bp, probe
tatcattccaagaggagcattcatc

SEQ ID NO: 52201 - DNA, 25 bp, probe
tactctaacactgagcaacactctc

SEQ ID NO: 52202 - DNA, 25 bp, probe
gtatcattccaagaggagcattcat

SEQ ID NO: 52203 - DNA, 25 bp, probe
ttctgtcattgctgctactctaaca

SEQ ID NO: 52204 - DNA, 25 bp, probe
ctgtatcattccaagaggagcattc

SEQ ID NO: 52205 - DNA, 25 bp, probe
tcaatgcactaactcaataccaaga

SEQ ID NO: 52206 - DNA, 25 bp, probe
gtcaatgcactaactcaataccaag

SEQ ID NO: 52207 - DNA, 25 bp, probe
gtcattctgtcattgctgctactct

SEQ ID NO: 52208 - DNA, 25 bp, probe
aatgcactaactcaataccaagatg

SEQ ID NO: 52209 - DNA, 25 bp, probe
caatgcactaactcaataccaagat

SEQ ID NO: 52210 - DNA, 25 bp, probe
atcaacaatctaaacaaatccctcg

SEQ ID NO: 52211 - DNA, 25 bp, probe
cttatgtcaattcattggaagtcaa

SEQ ID NO: 52212 - DNA, 25 bp, probe
tcattgctgctactctaacactgag

SEQ ID NO: 52213 - DNA, 25 bp, probe
atgatttcccttctgtaactcccta

SEQ ID NO: 52214 - DNA, 25 bp, probe
ccatcctaaactatactaaagccct

SEQ ID NO: 52215 - DNA, 25 bp, probe
tccatcctaaactatactaaagccc

SEQ ID NO: 52216 - DNA, 25 bp, probe
aatccctcggttctaagatacaatg

SEQ ID NO: 52217 - DNA, 25 bp, probe
caaatccctcggttctaagatacaa

SEQ ID NO: 52218 - DNA, 25 bp, probe
tagaagtcttaatatgggctgttgc

SEQ ID NO: 52219 - DNA, 25 bp, probe
aaatccctcggttctaagatacaat

SEQ ID NO: 52220 - DNA, 25 bp, probe
aagagatgaaatgtggttgtatgag

SEQ ID NO: 52221 - DNA, 25 bp, probe
gacaatctcgccatctttaatttct

SEQ ID NO: 52222 - DNA, 25 bp, probe
atctcgccatctttaatttcttagc

SEQ ID NO: 52223 - DNA, 25 bp, probe
tgtatcattccaagaggagcattca

SEQ ID NO: 52224 - DNA, 25 bp, probe
acacacatccatcctaaactatact

SEQ ID NO: 52225 - DNA, 25 bp, probe
aatgagacacgttacagaacctatg

SEQ ID NO: 52226 - DNA, 25 bp, probe
caatgagacacgttacagaacctat

SEQ ID NO: 52227 - DNA, 25 bp, probe
agagatgaaatgtggttgtatgagc

SEQ ID NO: 52228 - DNA, 25 bp, probe
acaatctcgccatctttaatttctt

SEQ ID NO: 52229 - DNA, 25 bp, probe
gtcattgctgctactctaacactga

SEQ ID NO: 52230 - DNA, 25 bp, probe
aagatgatttcccttctgtaactcc

SEQ ID NO: 52231 - DNA, 25 bp, probe
tgtcagaaataaaccaaggctctaa

SEQ ID NO: 52232 - DNA, 25 bp, probe
aacaaatccctcggttctaagatac

SEQ ID NO: 52233 - DNA, 25 bp, probe
aaacaaatccctcggttctaagata

SEQ ID NO: 52234 - DNA, 25 bp, probe
taaacaaatccctcggttctaagat

SEQ ID NO: 52235 - DNA, 25 bp, probe
ctacctaactgagcctagatatgga

SEQ ID NO: 52236 - DNA, 25 bp, probe
tacctaactgagcctagatatggac

SEQ ID NO: 52237 - DNA, 25 bp, probe
tctgtcagtgccttatcttatgaag

SEQ ID NO: 52238 - DNA, 25 bp, probe
ttctgtcagtgccttatcttatgaa

SEQ ID NO: 52239 - DNA, 25 bp, probe
taactgagcctagatatggaccatt

SEQ ID NO: 52240 - DNA, 25 bp, probe
tcatggtcatctatcatcaagagaa

SEQ ID NO: 52241 - DNA, 25 bp, probe
ctaactgagcctagatatggaccat

SEQ ID NO: 52242 - DNA, 25 bp, probe
catcatggtcatctatcatcaagag

SEQ ID NO: 52243 - DNA, 25 bp, probe
ttgatgagtggaatgacaagcaatg

SEQ ID NO: 52244 - DNA, 25 bp, probe
atcatggtcatctatcatcaagaga

SEQ ID NO: 52245 - DNA, 25 bp, probe
ggtctacctaactgagcctagatat

SEQ ID NO: 52246 - DNA, 25 bp, probe
tctacctaactgagcctagatatgg

SEQ ID NO: 52247 - DNA, 25 bp, probe
gtctacctaactgagcctagatatg

SEQ ID NO: 52248 - DNA, 25 bp, probe
catggtcatctatcatcaagagaat

SEQ ID NO: 52249 - DNA, 25 bp, probe
ctttctttctgatgatgcttgttga

SEQ ID NO: 52250 - DNA, 25 bp, probe
tctcccatttgaataccataccttg

SEQ ID NO: 52251 - DNA, 25 bp, probe
actttctttctgatgatgcttgttg

SEQ ID NO: 52252 - DNA, 25 bp, probe
cactttctttctgatgatgcttgtt

SEQ ID NO: 52253 - DNA, 25 bp, probe
atggtcatctatcatcaagagaatt

SEQ ID NO: 52254 - DNA, 25 bp, probe
cctaactgagcctagatatggacca

SEQ ID NO: 52255 - DNA, 25 bp, probe
acctaactgagcctagatatggacc

SEQ ID NO: 52256 - DNA, 25 bp, probe
gatgatgcccgaagatgaaatagat

SEQ ID NO: 52257 - DNA, 25 bp, probe
ccgaagatgaaatagatgccaaatt

SEQ ID NO: 52258 - DNA, 25 bp, probe
gttctcccatttgaataccatacct

SEQ ID NO: 52259 - DNA, 25 bp, probe
agttctcccatttgaataccatacc

SEQ ID NO: 52260 - DNA, 25 bp, probe
ccagttctcccatttgaataccata

SEQ ID NO: 52261 - DNA, 25 bp, probe
tttctttctgatgatgcttgttgaa

SEQ ID NO: 52262 - DNA, 25 bp, probe
atgatgcccgaagatgaaatagatg

SEQ ID NO: 52263 - DNA, 25 bp, probe
ttctcccatttgaataccatacctt

SEQ ID NO: 52264 - DNA, 25 bp, probe
ttctttctgatgatgcttgttgaac

SEQ ID NO: 52265 - DNA, 25 bp, probe
cagttctcccatttgaataccatac

SEQ ID NO: 52266 - DNA, 25 bp, probe
ctctctttccctaatgtgccataag

SEQ ID NO: 52267 - DNA, 25 bp, probe
ccatcatggtcatctatcatcaaga

SEQ ID NO: 52268 - DNA, 25 bp, probe
tttctttgatgagtggaatgacaag

SEQ ID NO: 52269 - DNA, 25 bp, probe
ctttctttgatgagtggaatgacaa

SEQ ID NO: 52270 - DNA, 25 bp, probe
cccgaagatgaaatagatgccaaat

SEQ ID NO: 52271 - DNA, 25 bp, probe
ctgtcagtgccttatcttatgaaga

SEQ ID NO: 52272 - DNA, 25 bp, probe
tgtcagtgccttatcttatgaagaa

SEQ ID NO: 52273 - DNA, 25 bp, probe
tctctctttccctaatgtgccataa

SEQ ID NO: 52274 - DNA, 25 bp, probe
tatgaagaaacagaacctctctagc

SEQ ID NO: 52275 - DNA, 25 bp, probe
actttctttgatgagtggaatgaca

SEQ ID NO: 52276 - DNA, 25 bp, probe
tttctgtcagtgccttatcttatga

SEQ ID NO: 52277 - DNA, 25 bp, probe
ctcccatttgaataccataccttgc

SEQ ID NO: 52278 - DNA, 25 bp, probe
gtgatgatgcccgaagatgaaatag

SEQ ID NO: 52279 - DNA, 25 bp, probe
atcgtaattcatccgttgtatcaga

SEQ ID NO: 52280 - DNA, 25 bp, probe
gcagagtataatcgtaattcatccg

SEQ ID NO: 52281 - DNA, 25 bp, probe
aatcgtaattcatccgttgtatcag

SEQ ID NO: 52282 - DNA, 25 bp, probe
tcgtaattcatccgttgtatcagaa

SEQ ID NO: 52283 - DNA, 25 bp, probe
ctacaatacacactggaacaactgg

SEQ ID NO: 52284 - DNA, 25 bp, probe
atgagatcagatggaacagacaatg

SEQ ID NO: 52285 - DNA, 25 bp, probe
cagagtataatcgtaattcatccgt

SEQ ID NO: 52286 - DNA, 25 bp, probe
atcagatggaacagacaatgcctat

SEQ ID NO: 52287 - DNA, 25 bp, probe
taatcgtaattcatccgttgtatca

SEQ ID NO: 52288 - DNA, 25 bp, probe
agtataatcgtaattcatccgttgt

SEQ ID NO: 52289 - DNA, 25 bp, probe
tacaatacacactggaacaactggt

SEQ ID NO: 52290 - DNA, 25 bp, probe
ggatataactgtaatgccaccacaa

SEQ ID NO: 52291 - DNA, 25 bp, probe
gctacaatacacactggaacaactg

SEQ ID NO: 52292 - DNA, 25 bp, probe
catgagatcagatggaacagacaat

SEQ ID NO: 52293 - DNA, 25 bp, probe
aaggctacaatacacactggaacaa

SEQ ID NO: 52294 - DNA, 25 bp, probe
gagtataatcgtaattcatccgttg

SEQ ID NO: 52295 - DNA, 25 bp, probe
agagtataatcgtaattcatccgtt

SEQ ID NO: 52296 - DNA, 25 bp, probe
tcagatggaacagacaatgcctatg

SEQ ID NO: 52297 - DNA, 25 bp, probe
gaccatgtatgtgtatctatagcca

SEQ ID NO: 52298 - DNA, 25 bp, probe
cagagagaatgcagagtataatcgt

SEQ ID NO: 52299 - DNA, 25 bp, probe
acagagagaatgcagagtataatcg

SEQ ID NO: 52300 - DNA, 25 bp, probe
gatcagatggaacagacaatgccta

SEQ ID NO: 52301 - DNA, 25 bp, probe
atgtaacagagagaatgcagagtat

SEQ ID NO: 52302 - DNA, 25 bp, probe
taatattgcacagaacttccatagc

SEQ ID NO: 52303 - DNA, 25 bp, probe
aatcatgtaacagagagaatgcaga

SEQ ID NO: 52304 - DNA, 25 bp, probe
catgtaacagagagaatgcagagta

SEQ ID NO: 52305 - DNA, 25 bp, probe
gacgctcaatctacagtttattcat

SEQ ID NO: 52306 - DNA, 25 bp, probe
atcatgtaacagagagaatgcagag

SEQ ID NO: 52307 - DNA, 25 bp, probe
ggctacaatacacactggaacaact

SEQ ID NO: 52308 - DNA, 25 bp, probe
aggctacaatacacactggaacaac

SEQ ID NO: 52309 - DNA, 25 bp, probe
acattaatattgcacagaacttcca

SEQ ID NO: 52310 - DNA, 25 bp, probe
ataatcgtaattcatccgttgtatc

SEQ ID NO: 52311 - DNA, 25 bp, probe
acaatacacactggaacaactggtt

SEQ ID NO: 52312 - DNA, 25 bp, probe
cctccagattgtaaattccagtttg

SEQ ID NO: 52313 - DNA, 25 bp, probe
tagacctccagattgtaaattccag

SEQ ID NO: 52314 - DNA, 25 bp, probe
acctccagattgtaaattccagttt

SEQ ID NO: 52315 - DNA, 25 bp, probe
agaccatgtatgtgtatctatagcc

SEQ ID NO: 52316 - DNA, 25 bp, probe
tgtaacagagagaatgcagagtata

SEQ ID NO: 52317 - DNA, 25 bp, probe
gacctccagattgtaaattccagtt

SEQ ID NO: 52318 - DNA, 25 bp, probe
atacacactggaacaactggtttat

SEQ ID NO: 52319 - DNA, 25 bp, probe
atagacctccagattgtaaattcca

SEQ ID NO: 52320 - DNA, 25 bp, probe
agagagaatgcagagtataatcgta

SEQ ID NO: 52321 - DNA, 25 bp, probe
tacacactggaacaactggtttatt

SEQ ID NO: 52322 - DNA, 25 bp, probe
aatacacactggaacaactggttta

SEQ ID NO: 52323 - DNA, 25 bp, probe
tattctgtaggatggaagtcttgtc

SEQ ID NO: 52324 - DNA, 25 bp, probe
atattctgtaggatggaagtcttgt

SEQ ID NO: 52325 - DNA, 25 bp, probe
agtcaatattctgtaggatggaagt

SEQ ID NO: 52326 - DNA, 25 bp, probe
gtcaatattctgtaggatggaagtc

SEQ ID NO: 52327 - DNA, 25 bp, probe
tcaatattctgtaggatggaagtct

SEQ ID NO: 52328 - DNA, 25 bp, probe
cgacaagtcaatattctgtaggatg

SEQ ID NO: 52329 - DNA, 25 bp, probe
gcgacaagtcaatattctgtaggat

SEQ ID NO: 52330 - DNA, 25 bp, probe
acaagtcaatattctgtaggatgga

SEQ ID NO: 52331 - DNA, 25 bp, probe
caagtcaatattctgtaggatggaa

SEQ ID NO: 52332 - DNA, 25 bp, probe
aaggcgacaagtcaatattctgtag

SEQ ID NO: 52333 - DNA, 25 bp, probe
gacaagtcaatattctgtaggatgg

SEQ ID NO: 52334 - DNA, 25 bp, probe
caaggcgacaagtcaatattctgta

SEQ ID NO: 52335 - DNA, 25 bp, probe
attctgtaggatggaagtcttgtcc

SEQ ID NO: 52336 - DNA, 25 bp, probe
aaagaccagaaaccaaagaatccaa

SEQ ID NO: 52337 - DNA, 25 bp, probe
aatattctgtaggatggaagtcttg

SEQ ID NO: 52338 - DNA, 25 bp, probe
caatattctgtaggatggaagtctt

SEQ ID NO: 52339 - DNA, 25 bp, probe
aagtcaatattctgtaggatggaag

SEQ ID NO: 52340 - DNA, 25 bp, probe
aagaccagaaaccaaagaatccaag

SEQ ID NO: 52341 - DNA, 25 bp, probe
gaccagaaaccaaagaatccaagag

SEQ ID NO: 52342 - DNA, 25 bp, probe
gaaagagatgctcggaaagttctaa

SEQ ID NO: 52343 - DNA, 25 bp, probe
agaccagaaaccaaagaatccaaga

SEQ ID NO: 52344 - DNA, 25 bp, probe
ttgatgagatgcggaagaaagagat

SEQ ID NO: 52345 - DNA, 25 bp, probe
attgatgagatgcggaagaaagaga

SEQ ID NO: 52346 - DNA, 25 bp, probe
cattgatgagatgcggaagaaagag

SEQ ID NO: 52347 - DNA, 25 bp, probe
ggcgacaagtcaatattctgtagga

SEQ ID NO: 52348 - DNA, 25 bp, probe
aggcgacaagtcaatattctgtagg

SEQ ID NO: 52349 - DNA, 25 bp, probe
gaagaaagagatgctcggaaagttc

SEQ ID NO: 52350 - DNA, 25 bp, probe
tgatgagatgcggaagaaagagatg

SEQ ID NO: 52351 - DNA, 25 bp, probe
aaacatctcagatccctccaagaag

SEQ ID NO: 52352 - DNA, 25 bp, probe
gaaacatctcagatccctccaagaa

SEQ ID NO: 52353 - DNA, 25 bp, probe
tcattgatgagatgcggaagaaaga

SEQ ID NO: 52354 - DNA, 25 bp, probe
aacatctcagatccctccaagaaga

SEQ ID NO: 52355 - DNA, 25 bp, probe
ccaaggcgacaagtcaatattctgt

SEQ ID NO: 52356 - DNA, 25 bp, probe
tgaaaagaccagaaaccaaagaatc

SEQ ID NO: 52357 - DNA, 25 bp, probe
cctatgaaaagaccagaaaccaaag

SEQ ID NO: 52358 - DNA, 25 bp, probe
gaaaagaccagaaaccaaagaatcc

SEQ ID NO: 52359 - DNA, 25 bp, probe
atgaaaagaccagaaaccaaagaat

SEQ ID NO: 52360 - DNA, 25 bp, probe
accagaaaccaaagaatccaagagc

SEQ ID NO: 52361 - DNA, 25 bp, probe
ctatgaaaagaccagaaaccaaaga

SEQ ID NO: 52362 - DNA, 25 bp, probe
ggaagaaagagatgctcggaaagtt

SEQ ID NO: 52363 - DNA, 25 bp, probe
aaaagaccagaaaccaaagaatcca

SEQ ID NO: 52364 - DNA, 25 bp, probe
ccctatgaaaagaccagaaaccaaa

SEQ ID NO: 52365 - DNA, 25 bp, probe
agaaagagatgctcggaaagttcta

SEQ ID NO: 52366 - DNA, 25 bp, probe
tatgaaaagaccagaaaccaaagaa

SEQ ID NO: 52367 - DNA, 25 bp, probe
ctttatgggagagattagacactgg

SEQ ID NO: 52368 - DNA, 25 bp, probe
tttatgggagagattagacactgga

SEQ ID NO: 52369 - DNA, 25 bp, probe
actttatgggagagattagacactg

SEQ ID NO: 52370 - DNA, 25 bp, probe
gactttatgggagagattagacact

SEQ ID NO: 52371 - DNA, 25 bp, probe
agactttatgggagagattagacac

SEQ ID NO: 52372 - DNA, 25 bp, probe
ttatgggagagattagacactggag

SEQ ID NO: 52373 - DNA, 25 bp, probe
acactggaattacaaatgagaagag

SEQ ID NO: 52374 - DNA, 25 bp, probe
aagactttatgggagagattagaca

SEQ ID NO: 52375 - DNA, 25 bp, probe
aacactggaattacaaatgagaaga

SEQ ID NO: 52376 - DNA, 25 bp, probe
cactggaattacaaatgagaagagt

SEQ ID NO: 52377 - DNA, 25 bp, probe
ctggaattacaaatgagaagagtct

SEQ ID NO: 52378 - DNA, 25 bp, probe
actggaattacaaatgagaagagtc

SEQ ID NO: 52379 - DNA, 25 bp, probe
aaacactggaattacaaatgagaag

SEQ ID NO: 52380 - DNA, 25 bp, probe
tatgggagagattagacactggagg

SEQ ID NO: 52381 - DNA, 25 bp, probe
ctcagacgttagacctcttgatgtt

SEQ ID NO: 52382 - DNA, 25 bp, probe
atctttctcctctccttctgtgact

SEQ ID NO: 52383 - DNA, 25 bp, probe
gatctttctcctctccttctgtgac

SEQ ID NO: 52384 - DNA, 25 bp, probe
ctgatctttctcctctccttctgtg

SEQ ID NO: 52385 - DNA, 25 bp, probe
cactgatctttctcctctccttctg

SEQ ID NO: 52386 - DNA, 25 bp, probe
gactcagacgttagacctcttgatg

SEQ ID NO: 52387 - DNA, 25 bp, probe
tgatctttctcctctccttctgtga

SEQ ID NO: 52388 - DNA, 25 bp, probe
actgatctttctcctctccttctgt

SEQ ID NO: 52389 - DNA, 25 bp, probe
tctttctcctctccttctgtgactc

SEQ ID NO: 52390 - DNA, 25 bp, probe
tggaattacaaatgagaagagtcta

SEQ ID NO: 52391 - DNA, 25 bp, probe
taagactttatgggagagattagac

SEQ ID NO: 52392 - DNA, 25 bp, probe
tgactcagacgttagacctcttgat

SEQ ID NO: 52393 - DNA, 25 bp, probe
ggaattacaaatgagaagagtctac

SEQ ID NO: 52394 - DNA, 25 bp, probe
actcagacgttagacctcttgatgt

SEQ ID NO: 52395 - DNA, 25 bp, probe
gggagagattagacactggaggttt

SEQ ID NO: 52396 - DNA, 25 bp, probe
tttcttgcactgatctttctcctct

SEQ ID NO: 52397 - DNA, 25 bp, probe
tcagacgttagacctcttgatgttt

SEQ ID NO: 52398 - DNA, 25 bp, probe
ttcttgcactgatctttctcctctc

SEQ ID NO: 52399 - DNA, 25 bp, probe
agtgactcagacgttagacctcttg

SEQ ID NO: 52400 - DNA, 25 bp, probe
cagtgactcagacgttagacctctt

SEQ ID NO: 52401 - DNA, 25 bp, probe
gaattacaaatgagaagagtctaca

SEQ ID NO: 52402 - DNA, 25 bp, probe
ttaagactttatgggagagattaga

SEQ ID NO: 52403 - DNA, 25 bp, probe
ttagacctcttgatgttttcccact

SEQ ID NO: 52404 - DNA, 25 bp, probe
gttagacctcttgatgttttcccac

SEQ ID NO: 52405 - DNA, 25 bp, probe
ctttctcctctccttctgtgactcc

SEQ ID NO: 52406 - DNA, 25 bp, probe
gtgactcagacgttagacctcttga

SEQ ID NO: 52407 - DNA, 25 bp, probe
ggagagattagacactggaggtttt

SEQ ID NO: 52408 - DNA, 25 bp, probe
ctgtcagttttattgagatgggaaa

SEQ ID NO: 52409 - DNA, 25 bp, probe
caaaacactggaattacaaatgaga

SEQ ID NO: 52410 - DNA, 25 bp, probe
gcactgatctttctcctctccttct

SEQ ID NO: 52411 - DNA, 25 bp, probe
aacatcacactaatcttggaggaat

SEQ ID NO: 52412 - DNA, 25 bp, probe
acatcacactaatcttggaggaata

SEQ ID NO: 52413 - DNA, 25 bp, probe
catcacactaatcttggaggaataa

SEQ ID NO: 52414 - DNA, 25 bp, probe
atcacactaatcttggaggaataag

SEQ ID NO: 52415 - DNA, 25 bp, probe
aaacatcacactaatcttggaggaa

SEQ ID NO: 52416 - DNA, 25 bp, probe
tcacactaatcttggaggaataaga

SEQ ID NO: 52417 - DNA, 25 bp, probe
cacactaatcttggaggaataagaa

SEQ ID NO: 52418 - DNA, 25 bp, probe
ctctcgactcaagaaggttaacatt

SEQ ID NO: 52419 - DNA, 25 bp, probe
ttaataggataaaccaggttgcgaa

SEQ ID NO: 52420 - DNA, 25 bp, probe
attaataggataaaccaggttgcga

SEQ ID NO: 52421 - DNA, 25 bp, probe
taattactggcatggttaaagtggt

SEQ ID NO: 52422 - DNA, 25 bp, probe
aattaataggataaaccaggttgcg

SEQ ID NO: 52423 - DNA, 25 bp, probe
ttaattactggcatggttaaagtgg

SEQ ID NO: 52424 - DNA, 25 bp, probe
taataggataaaccaggttgcgaac

SEQ ID NO: 52425 - DNA, 25 bp, probe
attactggcatggttaaagtggttt

SEQ ID NO: 52426 - DNA, 25 bp, probe
aattactggcatggttaaagtggtt

SEQ ID NO: 52427 - DNA, 25 bp, probe
cctgagaacctttgcatgaatttaa

SEQ ID NO: 52428 - DNA, 25 bp, probe
tctctttcctagattagcttctgaa

SEQ ID NO: 52429 - DNA, 25 bp, probe
ttcaagaggaacatatgcctgagaa

SEQ ID NO: 52430 - DNA, 25 bp, probe
ttgtggatctctttcctagattagc

SEQ ID NO: 52431 - DNA, 25 bp, probe
ctgagaacctttgcatgaatttaaa

SEQ ID NO: 52432 - DNA, 25 bp, probe
aataggataaaccaggttgcgaact

SEQ ID NO: 52433 - DNA, 25 bp, probe
gattgtaaagaaatatctccgaagt

SEQ ID NO: 52434 - DNA, 25 bp, probe
tgattgtaaagaaatatctccgaag

SEQ ID NO: 52435 - DNA, 25 bp, probe
attaattactggcatggttaaagtg

SEQ ID NO: 52436 - DNA, 25 bp, probe
aaaacatcacactaatcttggagga

SEQ ID NO: 52437 - DNA, 25 bp, probe
aaattaataggataaaccaggttgc

SEQ ID NO: 52438 - DNA, 25 bp, probe
gatgattgtaaagaaatatctccga

SEQ ID NO: 52439 - DNA, 25 bp, probe
tcaagaggaacatatgcctgagaac

SEQ ID NO: 52440 - DNA, 25 bp, probe
aagaaggaagatgattgtaaagaaa

SEQ ID NO: 52441 - DNA, 25 bp, probe
gcctgagaacctttgcatgaattta

SEQ ID NO: 52442 - DNA, 25 bp, probe
gctctcgactcaagaaggttaacat

SEQ ID NO: 52443 - DNA, 25 bp, probe
ttgctctcgactcaagaaggttaac

SEQ ID NO: 52444 - DNA, 25 bp, probe
tctcgactcaagaaggttaacattt

SEQ ID NO: 52445 - DNA, 25 bp, probe
agaaggaagatgattgtaaagaaat

SEQ ID NO: 52446 - DNA, 25 bp, probe
tgtcaaattacaatcacagttaaga

SEQ ID NO: 52447 - DNA, 25 bp, probe
gtggatctctttcctagattagctt

SEQ ID NO: 52448 - DNA, 25 bp, probe
tgtggatctctttcctagattagct

SEQ ID NO: 52449 - DNA, 25 bp, probe
tggatctctttcctagattagcttc

SEQ ID NO: 52450 - DNA, 25 bp, probe
attgtaaagaaatatctccgaagtt

SEQ ID NO: 52451 - DNA, 25 bp, probe
tcatgttagactttgaagagactaa

SEQ ID NO: 52452 - DNA, 25 bp, probe
ggatctctttcctagattagcttct

SEQ ID NO: 52453 - DNA, 25 bp, probe
atgattgtaaagaaatatctccgaa

SEQ ID NO: 52454 - DNA, 25 bp, probe
tttgtggatctctttcctagattag

SEQ ID NO: 52455 - DNA, 25 bp, probe
tctgttatctgtgtatattgttgct

SEQ ID NO: 52456 - DNA, 25 bp, probe
ttctgttatctgtgtatattgttgc

SEQ ID NO: 52457 - DNA, 25 bp, probe
ctgttatctgtgtatattgttgctt

SEQ ID NO: 52458 - DNA, 25 bp, probe
tctgtgtatattgttgcttattgtt

SEQ ID NO: 52459 - DNA, 25 bp, probe
atctgtgtatattgttgcttattgt

SEQ ID NO: 52460 - DNA, 25 bp, probe
tgttatctgtgtatattgttgctta

SEQ ID NO: 52461 - DNA, 25 bp, probe
gttctgttatctgtgtatattgttg

SEQ ID NO: 52462 - DNA, 25 bp, probe
cttctcagagtcaacctcctgtgat

SEQ ID NO: 52463 - DNA, 25 bp, probe
agttctgttatctgtgtatattgtt

SEQ ID NO: 52464 - DNA, 25 bp, probe
aagttctgttatctgtgtatattgt

SEQ ID NO: 52465 - DNA, 25 bp, probe
ttctcagagtcaacctcctgtgatg

SEQ ID NO: 52466 - DNA, 25 bp, probe
gaagttctgttatctgtgtatattg

SEQ ID NO: 52467 - DNA, 25 bp, probe
aagcagcaagatgttcaaactccat

SEQ ID NO: 52468 - DNA, 25 bp, probe
ctgtgtatattgttgcttattgttt

SEQ ID NO: 52469 - DNA, 25 bp, probe
aaagcagcaagatgttcaaactcca

SEQ ID NO: 52470 - DNA, 25 bp, probe
tatctgtgtatattgttgcttattg

SEQ ID NO: 52471 - DNA, 25 bp, probe
gttatctgtgtatattgttgcttat

SEQ ID NO: 52472 - DNA, 25 bp, probe
agaagttctgttatctgtgtatatt

SEQ ID NO: 52473 - DNA, 25 bp, probe
aagaagttctgttatctgtgtatat

SEQ ID NO: 52474 - DNA, 25 bp, probe
atgttgtctttatcgactttgtaaa

SEQ ID NO: 52475 - DNA, 25 bp, probe
gtgatgccttctcagagtcaacctc

SEQ ID NO: 52476 - DNA, 25 bp, probe
attatgttgtctttatcgactttgt

SEQ ID NO: 52477 - DNA, 25 bp, probe
aaaagcagcaagatgttcaaactcc

SEQ ID NO: 52478 - DNA, 25 bp, probe
ttcaaactccatctgcaaaagaaga

SEQ ID NO: 52479 - DNA, 25 bp, probe
gttcaaactccatctgcaaaagaag

SEQ ID NO: 52480 - DNA, 25 bp, probe
tatgttgtctttatcgactttgtaa

SEQ ID NO: 52481 - DNA, 25 bp, probe
ttatgttgtctttatcgactttgta

SEQ ID NO: 52482 - DNA, 25 bp, probe
atgttcaaactccatctgcaaaaga

SEQ ID NO: 52483 - DNA, 25 bp, probe
aaagaagttctgttatctgtgtata

SEQ ID NO: 52484 - DNA, 25 bp, probe
tgttcaaactccatctgcaaaagaa

SEQ ID NO: 52485 - DNA, 25 bp, probe
ctcatgtgacaccttaccggagtaa

SEQ ID NO: 52486 - DNA, 25 bp, probe
gagtcaacctcatgtgacaccttac

SEQ ID NO: 52487 - DNA, 25 bp, probe
tcaaactccatctgcaaaagaagag

SEQ ID NO: 52488 - DNA, 25 bp, probe
agagtcaacctcatgtgacacctta

SEQ ID NO: 52489 - DNA, 25 bp, probe
ctccatctgcaaaagaagaggaaaa

SEQ ID NO: 52490 - DNA, 25 bp, probe
caaactccatctgcaaaagaagagg

SEQ ID NO: 52491 - DNA, 25 bp, probe
tgttgtctttatcgactttgtaaaa

SEQ ID NO: 52492 - DNA, 25 bp, probe
aaaagaagttctgttatctgtgtat

SEQ ID NO: 52493 - DNA, 25 bp, probe
tgtatattgttgcttattgttttgt

SEQ ID NO: 52494 - DNA, 25 bp, probe
tgtgtatattgttgcttattgtttt

SEQ ID NO: 52495 - DNA, 25 bp, probe
agcagcaagatgttcaaactccatc

SEQ ID NO: 52496 - DNA, 25 bp, probe
gtgtatattgttgcttattgttttg

SEQ ID NO: 52497 - DNA, 25 bp, probe
tcatgtgacaccttaccggagtaaa

SEQ ID NO: 52498 - DNA, 25 bp, probe
actccatctgcaaaagaagaggaaa

SEQ ID NO: 52499 - DNA, 25 bp, probe
ccacactgacttatttccctaaact

SEQ ID NO: 52500 - DNA, 25 bp, probe
accacactgacttatttccctaaac

SEQ ID NO: 52501 - DNA, 25 bp, probe
caccacactgacttatttccctaaa

SEQ ID NO: 52502 - DNA, 25 bp, probe
tagggcaatttcattaactctgact

SEQ ID NO: 52503 - DNA, 25 bp, probe
gtagggcaatttcattaactctgac

SEQ ID NO: 52504 - DNA, 25 bp, probe
agtagggcaatttcattaactctga

SEQ ID NO: 52505 - DNA, 25 bp, probe
ggcaatttcattaactctgactctt

SEQ ID NO: 52506 - DNA, 25 bp, probe
aagtagggcaatttcattaactctg

SEQ ID NO: 52507 - DNA, 25 bp, probe
cacactgacttatttccctaaacta

SEQ ID NO: 52508 - DNA, 25 bp, probe
gggcaatttcattaactctgactct

SEQ ID NO: 52509 - DNA, 25 bp, probe
agggcaatttcattaactctgactc

SEQ ID NO: 52510 - DNA, 25 bp, probe
tcaccacactgacttatttccctaa

SEQ ID NO: 52511 - DNA, 25 bp, probe
aaagtagggcaatttcattaactct

SEQ ID NO: 52512 - DNA, 25 bp, probe
ctcaccacactgacttatttcccta

SEQ ID NO: 52513 - DNA, 25 bp, probe
acactgacttatttccctaaactat

SEQ ID NO: 52514 - DNA, 25 bp, probe
cactgacttatttccctaaactatt

SEQ ID NO: 52515 - DNA, 25 bp, probe
ctttaggactgggtggatggagaag

SEQ ID NO: 52516 - DNA, 25 bp, probe
aaaagtagggcaatttcattaactc

SEQ ID NO: 52517 - DNA, 25 bp, probe
cctcaccacactgacttatttccct

SEQ ID NO: 52518 - DNA, 25 bp, probe
gatggagaagacaccttgtgctcat

SEQ ID NO: 52519 - DNA, 25 bp, probe
actgacttatttccctaaactattt

SEQ ID NO: 52520 - DNA, 25 bp, probe
tttaggactgggtggatggagaaga

SEQ ID NO: 52521 - DNA, 25 bp, probe
atggagaagacaccttgtgctcatg

SEQ ID NO: 52522 - DNA, 25 bp, probe
ttaggactgggtggatggagaagac

SEQ ID NO: 52523 - DNA, 25 bp, probe
ccctcaccacactgacttatttccc

SEQ ID NO: 52524 - DNA, 25 bp, probe
gggtttggaagtttgcttctctgag

SEQ ID NO: 52525 - DNA, 25 bp, probe
agcctcagttctccatctgtgagat

SEQ ID NO: 52526 - DNA, 25 bp, probe
gtttggaagtttgcttctctgagcc

SEQ ID NO: 52527 - DNA, 25 bp, probe
ggtttggaagtttgcttctctgagc

SEQ ID NO: 52528 - DNA, 25 bp, probe
cttctctgagcctcagttctccatc

SEQ ID NO: 52529 - DNA, 25 bp, probe
tttggaagtttgcttctctgagcct

SEQ ID NO: 52530 - DNA, 25 bp, probe
cccctcaccacactgacttatttcc

SEQ ID NO: 52531 - DNA, 25 bp, probe
ttctctgagcctcagttctccatct

SEQ ID NO: 52532 - DNA, 25 bp, probe
ttggaagtttgcttctctgagcctc

SEQ ID NO: 52533 - DNA, 25 bp, probe
tctctgagcctcagttctccatctg

SEQ ID NO: 52534 - DNA, 25 bp, probe
aagtttgcttctctgagcctcagtt

SEQ ID NO: 52535 - DNA, 25 bp, probe
tttgcttctctgagcctcagttctc

SEQ ID NO: 52536 - DNA, 25 bp, probe
gtttgcttctctgagcctcagttct

SEQ ID NO: 52537 - DNA, 25 bp, probe
agtttgcttctctgagcctcagttc

SEQ ID NO: 52538 - DNA, 25 bp, probe
gaagtttgcttctctgagcctcagt

SEQ ID NO: 52539 - DNA, 25 bp, probe
aatgagcaagaatcagacatcacag

SEQ ID NO: 52540 - DNA, 25 bp, probe
tgagcaagaatcagacatcacagat

SEQ ID NO: 52541 - DNA, 25 bp, probe
atgagcaagaatcagacatcacaga

SEQ ID NO: 52542 - DNA, 25 bp, probe
aatacatcttggcacaatgagtgtc

SEQ ID NO: 52543 - DNA, 25 bp, probe
gtggagataatgaagttggctttac

SEQ ID NO: 52544 - DNA, 25 bp, probe
agtggagataatgaagttggcttta

SEQ ID NO: 52545 - DNA, 25 bp, probe
tggagataatgaagttggctttaca

SEQ ID NO: 52546 - DNA, 25 bp, probe
ggtataagttcaatgttcccatcac

SEQ ID NO: 52547 - DNA, 25 bp, probe
aggtataagttcaatgttcccatca

SEQ ID NO: 52548 - DNA, 25 bp, probe
ggagataatgaagttggctttacat

SEQ ID NO: 52549 - DNA, 25 bp, probe
tttcgtgaacacattcttggtaaag

SEQ ID NO: 52550 - DNA, 25 bp, probe
ctttcgtgaacacattcttggtaaa

SEQ ID NO: 52551 - DNA, 25 bp, probe
caacttcttgtaatgggagatgaga

SEQ ID NO: 52552 - DNA, 25 bp, probe
atacatcttggcacaatgagtgtct

SEQ ID NO: 52553 - DNA, 25 bp, probe
tcttgtaatgggagatgagaatgta

SEQ ID NO: 52554 - DNA, 25 bp, probe
atcacagatgcaacttcttgtaatg

SEQ ID NO: 52555 - DNA, 25 bp, probe
cagtggagataatgaagttggcttt

SEQ ID NO: 52556 - DNA, 25 bp, probe
ttgtaatgggagatgagaatgtacg

SEQ ID NO: 52557 - DNA, 25 bp, probe
aaatgagcaagaatcagacatcaca

SEQ ID NO: 52558 - DNA, 25 bp, probe
ataagttcaatgttcccatcactcg

SEQ ID NO: 52559 - DNA, 25 bp, probe
aactgatgaaccagaatccttggaa

SEQ ID NO: 52560 - DNA, 25 bp, probe
cttgtaatgggagatgagaatgtac

SEQ ID NO: 52561 - DNA, 25 bp, probe
gtataagttcaatgttcccatcact

SEQ ID NO: 52562 - DNA, 25 bp, probe
gcttcaagaacagaatttgggaatt

SEQ ID NO: 52563 - DNA, 25 bp, probe
gaccaactgatgaaccagaatcctt

SEQ ID NO: 52564 - DNA, 25 bp, probe
tgcttcaagaacagaatttgggaat

SEQ ID NO: 52565 - DNA, 25 bp, probe
caagaacagaatttgggaattaggt

SEQ ID NO: 52566 - DNA, 25 bp, probe
gcagtggagataatgaagttggctt

SEQ ID NO: 52567 - DNA, 25 bp, probe
ctggcagtggagataatgaagttgg

SEQ ID NO: 52568 - DNA, 25 bp, probe
aatgaagttggctttacatggaatc

SEQ ID NO: 52569 - DNA, 25 bp, probe
ttacatggaatcatcagccttggtc

SEQ ID NO: 52570 - DNA, 25 bp, probe
tcaagaacagaatttgggaattagg

SEQ ID NO: 52571 - DNA, 25 bp, probe
tataagttcaatgttcccatcactc

SEQ ID NO: 52572 - DNA, 25 bp, probe
gcaacttcttgtaatgggagatgag

SEQ ID NO: 52573 - DNA, 25 bp, probe
gaagttggctttacatggaatcatc

SEQ ID NO: 52574 - DNA, 25 bp, probe
gataatgaagttggctttacatgga

SEQ ID NO: 52575 - DNA, 25 bp, probe
taggtataagttcaatgttcccatc

SEQ ID NO: 52576 - DNA, 25 bp, probe
cctttcgtgaacacattcttggtaa

SEQ ID NO: 52577 - DNA, 25 bp, probe
agataatgaagttggctttacatgg

SEQ ID NO: 52578 - DNA, 25 bp, probe
gaactggcagtggagataatgaagt

SEQ ID NO: 52579 - DNA, 25 bp, probe
actgatgaaccagaatccttggaag

SEQ ID NO: 52580 - DNA, 25 bp, probe
tcacagatgcaacttcttgtaatgg

SEQ ID NO: 52581 - DNA, 25 bp, probe
accaactgatgaaccagaatccttg

SEQ ID NO: 52582 - DNA, 25 bp, probe
aagttggctttacatggaatcatca

SEQ ID NO: 52583 - DNA, 25 bp, probe
gattcaagcaggacaataacaagag

SEQ ID NO: 52584 - DNA, 25 bp, probe
gagattcaagcaggacaataacaag

SEQ ID NO: 52585 - DNA, 25 bp, probe
agattcaagcaggacaataacaaga

SEQ ID NO: 52586 - DNA, 25 bp, probe
attcatccagacatattacagccag

SEQ ID NO: 52587 - DNA, 25 bp, probe
aattcatccagacatattacagcca

SEQ ID NO: 52588 - DNA, 25 bp, probe
attcaagcaggacaataacaagagg

SEQ ID NO: 52589 - DNA, 25 bp, probe
attgtcctgtgcctcctaatatcat

SEQ ID NO: 52590 - DNA, 25 bp, probe
ttgtcctgtgcctcctaatatcatt

SEQ ID NO: 52591 - DNA, 25 bp, probe
tcatccagacatattacagccagtt

SEQ ID NO: 52592 - DNA, 25 bp, probe
ttcatccagacatattacagccagt

SEQ ID NO: 52593 - DNA, 25 bp, probe
tgagattcaagcaggacaataacaa

SEQ ID NO: 52594 - DNA, 25 bp, probe
gtgagattcaagcaggacaataaca

SEQ ID NO: 52595 - DNA, 25 bp, probe
tacataacctatatacctccagcag

SEQ ID NO: 52596 - DNA, 25 bp, probe
ctacataacctatatacctccagca

SEQ ID NO: 52597 - DNA, 25 bp, probe
cattgtcctgtgcctcctaatatca

SEQ ID NO: 52598 - DNA, 25 bp, probe
acataacctatatacctccagcagc

SEQ ID NO: 52599 - DNA, 25 bp, probe
agataagtaagtaccatacacacct

SEQ ID NO: 52600 - DNA, 25 bp, probe
ggtgagattcaagcaggacaataac

SEQ ID NO: 52601 - DNA, 25 bp, probe
gccttcactacactgccttacataa

SEQ ID NO: 52602 - DNA, 25 bp, probe
cttaatcaagagctggagttcaatg

SEQ ID NO: 52603 - DNA, 25 bp, probe
ttcaatgagtcctagacagtgagag

SEQ ID NO: 52604 - DNA, 25 bp, probe
gttcaatgagtcctagacagtgaga

SEQ ID NO: 52605 - DNA, 25 bp, probe
agttcaatgagtcctagacagtgag

SEQ ID NO: 52606 - DNA, 25 bp, probe
gagttcaatgagtcctagacagtga

SEQ ID NO: 52607 - DNA, 25 bp, probe
cataacctatatacctccagcagct

SEQ ID NO: 52608 - DNA, 25 bp, probe
ccattgtcctgtgcctcctaatatc

SEQ ID NO: 52609 - DNA, 25 bp, probe
aagataagtaagtaccatacacacc

SEQ ID NO: 52610 - DNA, 25 bp, probe
ctagctcctgactgaacactataga

SEQ ID NO: 52611 - DNA, 25 bp, probe
ttaatcaagagctggagttcaatga

SEQ ID NO: 52612 - DNA, 25 bp, probe
ctgccttacataaaccaaatcacaa

SEQ ID NO: 52613 - DNA, 25 bp, probe
gggcaagaggaaagataagtaagta

SEQ ID NO: 52614 - DNA, 25 bp, probe
ctcctgactgaacactatagacttc

SEQ ID NO: 52615 - DNA, 25 bp, probe
cttcactacactgccttacataaac

SEQ ID NO: 52616 - DNA, 25 bp, probe
cctgtgcctcctaatatcatttgta

SEQ ID NO: 52617 - DNA, 25 bp, probe
tagctcctgactgaacactatagac

SEQ ID NO: 52618 - DNA, 25 bp, probe
actacactgccttacataaaccaaa

SEQ ID NO: 52619 - DNA, 25 bp, probe
taatcaagagctggagttcaatgag

SEQ ID NO: 52620 - DNA, 25 bp, probe
ccttcactacactgccttacataaa

SEQ ID NO: 52621 - DNA, 25 bp, probe
tgccttacataaaccaaatcacaat

SEQ ID NO: 52622 - DNA, 25 bp, probe
cactgccttacataaaccaaatcac

SEQ ID NO: 52623 - DNA, 25 bp, probe
ccctccatcttaacctatcaacttt

SEQ ID NO: 52624 - DNA, 25 bp, probe
tacttccctccatcttaacctatca

SEQ ID NO: 52625 - DNA, 25 bp, probe
catcttaacctatcaactttctgcc

SEQ ID NO: 52626 - DNA, 25 bp, probe
ccatcttaacctatcaactttctgc

SEQ ID NO: 52627 - DNA, 25 bp, probe
tgcttcattccacttacaattccta

SEQ ID NO: 52628 - DNA, 25 bp, probe
gcttcattccacttacaattcctaa

SEQ ID NO: 52629 - DNA, 25 bp, probe
ttctcattgctacagtgtattggtt

SEQ ID NO: 52630 - DNA, 25 bp, probe
ccacttacaattcctaatcttgagc

SEQ ID NO: 52631 - DNA, 25 bp, probe
ctgcttcattccacttacaattcct

SEQ ID NO: 52632 - DNA, 25 bp, probe
cacttacaattcctaatcttgagca

SEQ ID NO: 52633 - DNA, 25 bp, probe
acttacaattcctaatcttgagcaa

SEQ ID NO: 52634 - DNA, 25 bp, probe
tgctgcttcattccacttacaattc

SEQ ID NO: 52635 - DNA, 25 bp, probe
tccacttacaattcctaatcttgag

SEQ ID NO: 52636 - DNA, 25 bp, probe
tcattccacttacaattcctaatct

SEQ ID NO: 52637 - DNA, 25 bp, probe
ttccacttacaattcctaatcttga

SEQ ID NO: 52638 - DNA, 25 bp, probe
gctgcttcattccacttacaattcc

SEQ ID NO: 52639 - DNA, 25 bp, probe
tggctatactgatgtttgtgttact

SEQ ID NO: 52640 - DNA, 25 bp, probe
ggctatactgatgtttgtgttactc

SEQ ID NO: 52641 - DNA, 25 bp, probe
ttggctatactgatgtttgtgttac

SEQ ID NO: 52642 - DNA, 25 bp, probe
atttggctatactgatgtttgtgtt

SEQ ID NO: 52643 - DNA, 25 bp, probe
catttggctatactgatgtttgtgt

SEQ ID NO: 52644 - DNA, 25 bp, probe
cattccacttacaattcctaatctt

SEQ ID NO: 52645 - DNA, 25 bp, probe
ttcattccacttacaattcctaatc

SEQ ID NO: 52646 - DNA, 25 bp, probe
cttcattccacttacaattcctaat

SEQ ID NO: 52647 - DNA, 25 bp, probe
gaacagaaagaactcaggacatatt

SEQ ID NO: 52648 - DNA, 25 bp, probe
tttggctatactgatgtttgtgtta

SEQ ID NO: 52649 - DNA, 25 bp, probe
tctcattgctacagtgtattggttt

SEQ ID NO: 52650 - DNA, 25 bp, probe
tttctcattgctacagtgtattggt

SEQ ID NO: 52651 - DNA, 25 bp, probe
ttatgaacagaaagaactcaggaca

SEQ ID NO: 52652 - DNA, 25 bp, probe
tgaacagaaagaactcaggacatat

SEQ ID NO: 52653 - DNA, 25 bp, probe
atgaacagaaagaactcaggacata

SEQ ID NO: 52654 - DNA, 25 bp, probe
tatgaacagaaagaactcaggacat

SEQ ID NO: 52655 - DNA, 25 bp, probe
gtgctgcttcattccacttacaatt

SEQ ID NO: 52656 - DNA, 25 bp, probe
attccacttacaattcctaatcttg

SEQ ID NO: 52657 - DNA, 25 bp, probe
ctcattgctacagtgtattggttta

SEQ ID NO: 52658 - DNA, 25 bp, probe
tccctggttatactttgtcaatagt

SEQ ID NO: 52659 - DNA, 25 bp, probe
tttatgaacagaaagaactcaggac

SEQ ID NO: 52660 - DNA, 25 bp, probe
ttccctggttatactttgtcaatag

SEQ ID NO: 52661 - DNA, 25 bp, probe
gctatactgatgtttgtgttactca

SEQ ID NO: 52662 - DNA, 25 bp, probe
tcattgctacagtgtattggtttaa

SEQ ID NO: 52663 - DNA, 25 bp, probe
ccctggttatactttgtcaatagtt

SEQ ID NO: 52664 - DNA, 25 bp, probe
tgagatttcactgacaactttaaga

SEQ ID NO: 52665 - DNA, 25 bp, probe
tctgagatttcactgacaactttaa

SEQ ID NO: 52666 - DNA, 25 bp, probe
ctgagatttcactgacaactttaag

SEQ ID NO: 52667 - DNA, 25 bp, probe
ttgctacagtgtattggtttaattg

SEQ ID NO: 52668 - DNA, 25 bp, probe
ttgaagggctataccagttattaaa

SEQ ID NO: 52669 - DNA, 25 bp, probe
tttgaagggctataccagttattaa

SEQ ID NO: 52670 - DNA, 25 bp, probe
acagtgtattggtttaattgtcaca

SEQ ID NO: 52671 - DNA, 25 bp, probe
acattcatcataacaacacaattcc

SEQ ID NO: 52672 - DNA, 25 bp, probe
cattcatcataacaacacaattcct

SEQ ID NO: 52673 - DNA, 25 bp, probe
tcataacaacacaattcctagacat

SEQ ID NO: 52674 - DNA, 25 bp, probe
atcataacaacacaattcctagaca

SEQ ID NO: 52675 - DNA, 25 bp, probe
catcataacaacacaattcctagac

SEQ ID NO: 52676 - DNA, 25 bp, probe
tcatcataacaacacaattcctaga

SEQ ID NO: 52677 - DNA, 25 bp, probe
actgagtgtagtatgtggagcataa

SEQ ID NO: 52678 - DNA, 25 bp, probe
aactgagtgtagtatgtggagcata

SEQ ID NO: 52679 - DNA, 25 bp, probe
cataacaacacaattcctagacatt

SEQ ID NO: 52680 - DNA, 25 bp, probe
ttgacattcatcataacaacacaat

SEQ ID NO: 52681 - DNA, 25 bp, probe
caactgagtgtagtatgtggagcat

SEQ ID NO: 52682 - DNA, 25 bp, probe
tgacattcatcataacaacacaatt

SEQ ID NO: 52683 - DNA, 25 bp, probe
gacattcatcataacaacacaattc

SEQ ID NO: 52684 - DNA, 25 bp, probe
ttcatcataacaacacaattcctag

SEQ ID NO: 52685 - DNA, 25 bp, probe
gggtaaatagcaaatgttcaaactt

SEQ ID NO: 52686 - DNA, 25 bp, probe
tgagtttacacaaagacttcaacaa

SEQ ID NO: 52687 - DNA, 25 bp, probe
caaatgaactgatctctgtatccca

SEQ ID NO: 52688 - DNA, 25 bp, probe
atgagtttacacaaagacttcaaca

SEQ ID NO: 52689 - DNA, 25 bp, probe
cattctcccaactgagtgtagtatg

SEQ ID NO: 52690 - DNA, 25 bp, probe
tcattctcccaactgagtgtagtat

SEQ ID NO: 52691 - DNA, 25 bp, probe
aaatgaactgatctctgtatcccat

SEQ ID NO: 52692 - DNA, 25 bp, probe
attctcccaactgagtgtagtatgt

SEQ ID NO: 52693 - DNA, 25 bp, probe
ttcattctcccaactgagtgtagta

SEQ ID NO: 52694 - DNA, 25 bp, probe
gcagtacatgagtttacacaaagac

SEQ ID NO: 52695 - DNA, 25 bp, probe
attcatcataacaacacaattccta

SEQ ID NO: 52696 - DNA, 25 bp, probe
tgtctctttatggatgtattgttca

SEQ ID NO: 52697 - DNA, 25 bp, probe
atcttcattctcccaactgagtgta

SEQ ID NO: 52698 - DNA, 25 bp, probe
tgaactgatctctgtatcccattat

SEQ ID NO: 52699 - DNA, 25 bp, probe
tatttgatgggcagagattatatcc

SEQ ID NO: 52700 - DNA, 25 bp, probe
atgaactgatctctgtatcccatta

SEQ ID NO: 52701 - DNA, 25 bp, probe
atggatgtattgttcacattatggc

SEQ ID NO: 52702 - DNA, 25 bp, probe
gtctctttatggatgtattgttcac

SEQ ID NO: 52703 - DNA, 25 bp, probe
ggatgtattgttcacattatggctt

SEQ ID NO: 52704 - DNA, 25 bp, probe
tggatgtattgttcacattatggct

SEQ ID NO: 52705 - DNA, 25 bp, probe
ctgagtgtagtatgtggagcataaa

SEQ ID NO: 52706 - DNA, 25 bp, probe
aaagtgaggtagtgaacatcctaaa

SEQ ID NO: 52707 - DNA, 25 bp, probe
agtgaggtagtgaacatcctaaatt

SEQ ID NO: 52708 - DNA, 25 bp, probe
aagtgaggtagtgaacatcctaaat

SEQ ID NO: 52709 - DNA, 25 bp, probe
acaaatgaactgatctctgtatccc

SEQ ID NO: 52710 - DNA, 25 bp, probe
gagtttacacaaagacttcaacaat

SEQ ID NO: 52711 - DNA, 25 bp, probe
cacaaatgaactgatctctgtatcc

SEQ ID NO: 52712 - DNA, 25 bp, probe
ggtcacaaatgaactgatctctgta

SEQ ID NO: 52713 - DNA, 25 bp, probe
ttctcccaactgagtgtagtatgtg

SEQ ID NO: 52714 - DNA, 25 bp, probe
tcttcattctcccaactgagtgtag

SEQ ID NO: 52715 - DNA, 25 bp, probe
gtattcagcaagccaatcctatctt

SEQ ID NO: 52716 - DNA, 25 bp, probe
gctgaatatgttcttggcaattatt

SEQ ID NO: 52717 - DNA, 25 bp, probe
tataagaacttcaagaagcctaagc

SEQ ID NO: 52718 - DNA, 25 bp, probe
ggtattcagcaagccaatcctatct

SEQ ID NO: 52719 - DNA, 25 bp, probe
ttggaactggctagaattgctactt

SEQ ID NO: 52720 - DNA, 25 bp, probe
tagcttcaaggaatacaactgactt

SEQ ID NO: 52721 - DNA, 25 bp, probe
cgatgatagcttcaaggaatacaac

SEQ ID NO: 52722 - DNA, 25 bp, probe
acgatgatagcttcaaggaatacaa

SEQ ID NO: 52723 - DNA, 25 bp, probe
atagcttcaaggaatacaactgact

SEQ ID NO: 52724 - DNA, 25 bp, probe
tgatagcttcaaggaatacaactga

SEQ ID NO: 52725 - DNA, 25 bp, probe
gatagcttcaaggaatacaactgac

SEQ ID NO: 52726 - DNA, 25 bp, probe
tatgcccagttaggatttcttgttt

SEQ ID NO: 52727 - DNA, 25 bp, probe
ttatgcccagttaggatttcttgtt

SEQ ID NO: 52728 - DNA, 25 bp, probe
cacgatgatagcttcaaggaataca

SEQ ID NO: 52729 - DNA, 25 bp, probe
acacgatgatagcttcaaggaatac

SEQ ID NO: 52730 - DNA, 25 bp, probe
cacacgatgatagcttcaaggaata

SEQ ID NO: 52731 - DNA, 25 bp, probe
aagacatagtaggatttgccatcat

SEQ ID NO: 52732 - DNA, 25 bp, probe
aaagacatagtaggatttgccatca

SEQ ID NO: 52733 - DNA, 25 bp, probe
acccatttacttcatcactttcatc

SEQ ID NO: 52734 - DNA, 25 bp, probe
gacccatttacttcatcactttcat

SEQ ID NO: 52735 - DNA, 25 bp, probe
aagtacacacgatgatagcttcaag

SEQ ID NO: 52736 - DNA, 25 bp, probe
cttatgcccagttaggatttcttgt

SEQ ID NO: 52737 - DNA, 25 bp, probe
tattctttgcttatgcccagttagg

SEQ ID NO: 52738 - DNA, 25 bp, probe
atattctttgcttatgcccagttag

SEQ ID NO: 52739 - DNA, 25 bp, probe
atgatagcttcaaggaatacaactg

SEQ ID NO: 52740 - DNA, 25 bp, probe
ctttgtcctgctgaatatgttcttg

SEQ ID NO: 52741 - DNA, 25 bp, probe
tctttgtcctgctgaatatgttctt

SEQ ID NO: 52742 - DNA, 25 bp, probe
ttctttgtcctgctgaatatgttct

SEQ ID NO: 52743 - DNA, 25 bp, probe
gttctttgtcctgctgaatatgttc

SEQ ID NO: 52744 - DNA, 25 bp, probe
cccatttacttcatcactttcatct

SEQ ID NO: 52745 - DNA, 25 bp, probe
ggacccatttacttcatcactttca

SEQ ID NO: 52746 - DNA, 25 bp, probe
caagtacacacgatgatagcttcaa

SEQ ID NO: 52747 - DNA, 25 bp, probe
gatgatagcttcaaggaatacaact

SEQ ID NO: 52748 - DNA, 25 bp, probe
tatttggaactggctagaattgcta

SEQ ID NO: 52749 - DNA, 25 bp, probe
tgttctttgtcctgctgaatatgtt

SEQ ID NO: 52750 - DNA, 25 bp, probe
ttgtgttctttgtcctgctgaatat

SEQ ID NO: 52751 - DNA, 25 bp, probe
ctgtgaagctcctcagatatgttag

SEQ ID NO: 52752 - DNA, 25 bp, probe
aagctgactattcaataggcagaag

SEQ ID NO: 52753 - DNA, 25 bp, probe
gttaaagacatagtaggatttgcca

SEQ ID NO: 52754 - DNA, 25 bp, probe
tttgtgttctttgtcctgctgaata

SEQ ID NO: 52755 - DNA, 25 bp, probe
tttgcttatgcccagttaggatttc

SEQ ID NO: 52756 - DNA, 25 bp, probe
ctttgcttatgcccagttaggattt

SEQ ID NO: 52757 - DNA, 25 bp, probe
atgatacctattctgaagtgaaagc

SEQ ID NO: 52758 - DNA, 25 bp, probe
aattcaagatgactaccagcctgtc

SEQ ID NO: 52759 - DNA, 25 bp, probe
gtcagcctcttcttcatgttcattg

SEQ ID NO: 52760 - DNA, 25 bp, probe
ctttgtctctggcatcttctttatc

SEQ ID NO: 52761 - DNA, 25 bp, probe
tttgtctctggcatcttctttatcc

SEQ ID NO: 52762 - DNA, 25 bp, probe
cctttgtctctggcatcttctttat

SEQ ID NO: 52763 - DNA, 25 bp, probe
tctctggcatcttctttatcctctc

SEQ ID NO: 52764 - DNA, 25 bp, probe
atgcagagacctacttcaactacaa

SEQ ID NO: 52765 - DNA, 25 bp, probe
aatgtgtcactgtcttacctttctg

SEQ ID NO: 52766 - DNA, 25 bp, probe
cattgggtttatcctgaacaacatc

SEQ ID NO: 52767 - DNA, 25 bp, probe
ttgtctctggcatcttctttatcct

SEQ ID NO: 52768 - DNA, 25 bp, probe
gaatgtgtcactgtcttacctttct

SEQ ID NO: 52769 - DNA, 25 bp, probe
ccagaatgtgtcactgtcttacctt

SEQ ID NO: 52770 - DNA, 25 bp, probe
agaatgtgtcactgtcttacctttc

SEQ ID NO: 52771 - DNA, 25 bp, probe
ctctggcatcttctttatcctctca

SEQ ID NO: 52772 - DNA, 25 bp, probe
gtctctggcatcttctttatcctct

SEQ ID NO: 52773 - DNA, 25 bp, probe
tcattgggtttatcctgaacaacat

SEQ ID NO: 52774 - DNA, 25 bp, probe
ttatcctgaacaacatcggacacat

SEQ ID NO: 52775 - DNA, 25 bp, probe
gatgcagagacctacttcaactaca

SEQ ID NO: 52776 - DNA, 25 bp, probe
tgtctctggcatcttctttatcctc

SEQ ID NO: 52777 - DNA, 25 bp, probe
cttcatgttcattgggtttatcctg

SEQ ID NO: 52778 - DNA, 25 bp, probe
tcttcatgttcattgggtttatcct

SEQ ID NO: 52779 - DNA, 25 bp, probe
ttcttcatgttcattgggtttatcc

SEQ ID NO: 52780 - DNA, 25 bp, probe
ctcttcttcatgttcattgggttta

SEQ ID NO: 52781 - DNA, 25 bp, probe
attgggtttatcctgaacaacatcg

SEQ ID NO: 52782 - DNA, 25 bp, probe
tgcagagacctacttcaactacaag

SEQ ID NO: 52783 - DNA, 25 bp, probe
tcagcctcttcttcatgttcattgg

SEQ ID NO: 52784 - DNA, 25 bp, probe
ggtcagcctcttcttcatgttcatt

SEQ ID NO: 52785 - DNA, 25 bp, probe
tatcctgaacaacatcggacacatc

SEQ ID NO: 52786 - DNA, 25 bp, probe
cagaatgtgtcactgtcttaccttt

SEQ ID NO: 52787 - DNA, 25 bp, probe
ttcatgttcattgggtttatcctga

SEQ ID NO: 52788 - DNA, 25 bp, probe
tcttcttcatgttcattgggtttat

SEQ ID NO: 52789 - DNA, 25 bp, probe
cctcttcttcatgttcattgggttt

SEQ ID NO: 52790 - DNA, 25 bp, probe
ggatgcagagacctacttcaactac

SEQ ID NO: 52791 - DNA, 25 bp, probe
cttcttcatgttcattgggtttatc

SEQ ID NO: 52792 - DNA, 25 bp, probe
atgtgtcactgtcttacctttctgg

SEQ ID NO: 52793 - DNA, 25 bp, probe
tctggcatcttctttatcctctcag

SEQ ID NO: 52794 - DNA, 25 bp, probe
gcagagacctacttcaactacaagt

SEQ ID NO: 52795 - DNA, 25 bp, probe
atcccagaatgtgtcactgtcttac

SEQ ID NO: 52796 - DNA, 25 bp, probe
catcccagaatgtgtcactgtctta

SEQ ID NO: 52797 - DNA, 25 bp, probe
aggatgcagagacctacttcaacta

SEQ ID NO: 52798 - DNA, 25 bp, probe
ctacttcccttcctcatcccagaat

SEQ ID NO: 52799 - DNA, 25 bp, probe
gtttatcctgaacaacatcggacac

SEQ ID NO: 52800 - DNA, 25 bp, probe
aactacaagtatgggtggtcgtttg

SEQ ID NO: 52801 - DNA, 25 bp, probe
caactacaagtatgggtggtcgttt

SEQ ID NO: 52802 - DNA, 25 bp, probe
ctggcatcttctttatcctctcagg

SEQ ID NO: 52803 - DNA, 25 bp, probe
gtaacatcatcggtatcatcgtcta

SEQ ID NO: 52804 - DNA, 25 bp, probe
taacatcatcggtatcatcgtctac

SEQ ID NO: 52805 - DNA, 25 bp, probe
catcatcggtatcatcgtctacatt

SEQ ID NO: 52806 - DNA, 25 bp, probe
cctcagtaacatcatcggtatcatc

SEQ ID NO: 52807 - DNA, 25 bp, probe
ctcagtaacatcatcggtatcatcg

SEQ ID NO: 52808 - DNA, 25 bp, probe
agtaacatcatcggtatcatcgtct

SEQ ID NO: 52809 - DNA, 25 bp, probe
cagtaacatcatcggtatcatcgtc

SEQ ID NO: 52810 - DNA, 25 bp, probe
acatcatcggtatcatcgtctacat

SEQ ID NO: 52811 - DNA, 25 bp, probe
tcagtaacatcatcggtatcatcgt

SEQ ID NO: 52812 - DNA, 25 bp, probe
aacatcatcggtatcatcgtctaca

SEQ ID NO: 52813 - DNA, 25 bp, probe
gcctcagtaacatcatcggtatcat

SEQ ID NO: 52814 - DNA, 25 bp, probe
atcatcggtatcatcgtctacattt

SEQ ID NO: 52815 - DNA, 25 bp, probe
tcatcggtatcatcgtctacatttc

SEQ ID NO: 52816 - DNA, 25 bp, probe
tatcatcgtctacatttccagcaac

SEQ ID NO: 52817 - DNA, 25 bp, probe
gtatcatcgtctacatttccagcaa

SEQ ID NO: 52818 - DNA, 25 bp, probe
catcggtatcatcgtctacatttcc

SEQ ID NO: 52819 - DNA, 25 bp, probe
atcggtatcatcgtctacatttcca

SEQ ID NO: 52820 - DNA, 25 bp, probe
tcggtatcatcgtctacatttccag

SEQ ID NO: 52821 - DNA, 25 bp, probe
ggtatcatcgtctacatttccagca

SEQ ID NO: 52822 - DNA, 25 bp, probe
atcatcgtctacatttccagcaaca

SEQ ID NO: 52823 - DNA, 25 bp, probe
taaagagttgaggtttaagaccaaa

SEQ ID NO: 52824 - DNA, 25 bp, probe
aaagagttgaggtttaagaccaaac

SEQ ID NO: 52825 - DNA, 25 bp, probe
ataaagagttgaggtttaagaccaa

SEQ ID NO: 52826 - DNA, 25 bp, probe
aataaagagttgaggtttaagacca

SEQ ID NO: 52827 - DNA, 25 bp, probe
atcgtctacatttccagcaacacag

SEQ ID NO: 52828 - DNA, 25 bp, probe
tcatcgtctacatttccagcaacac

SEQ ID NO: 52829 - DNA, 25 bp, probe
cggtatcatcgtctacatttccagc

SEQ ID NO: 52830 - DNA, 25 bp, probe
cgtcttcctcttctccttatgccag

SEQ ID NO: 52831 - DNA, 25 bp, probe
aagagttgaggtttaagaccaaacg

SEQ ID NO: 52832 - DNA, 25 bp, probe
catcgtctacatttccagcaacaca

SEQ ID NO: 52833 - DNA, 25 bp, probe
gatctacagccgcaagaacaacatc

SEQ ID NO: 52834 - DNA, 25 bp, probe
gtcttcctcttctccttatgccagg

SEQ ID NO: 52835 - DNA, 25 bp, probe
aaaagaaccattacaactacggctg

SEQ ID NO: 52836 - DNA, 25 bp, probe
aaataaagagttgaggtttaagacc

SEQ ID NO: 52837 - DNA, 25 bp, probe
tgaggtttaagaccaaacgggaatt

SEQ ID NO: 52838 - DNA, 25 bp, probe
ttgaggtttaagaccaaacgggaat

SEQ ID NO: 52839 - DNA, 25 bp, probe
aaagaaccattacaactacggctgg

SEQ ID NO: 52840 - DNA, 25 bp, probe
ctacatttccagcaacacaggtgac

SEQ ID NO: 52841 - DNA, 25 bp, probe
gtctacatttccagcaacacaggtg

SEQ ID NO: 52842 - DNA, 25 bp, probe
tctacatttccagcaacacaggtga

SEQ ID NO: 52843 - DNA, 25 bp, probe
agagttgaggtttaagaccaaacgg

SEQ ID NO: 52844 - DNA, 25 bp, probe
ggcctcagtaacatcatcggtatca

SEQ ID NO: 52845 - DNA, 25 bp, probe
gttgaggtttaagaccaaacgggaa

SEQ ID NO: 52846 - DNA, 25 bp, probe
gaggtttaagaccaaacgggaattc

SEQ ID NO: 52847 - DNA, 25 bp, probe
gtcaatgtatccaatcagcagtatg

SEQ ID NO: 52848 - DNA, 25 bp, probe
ggtcaatgtatccaatcagcagtat

SEQ ID NO: 52849 - DNA, 25 bp, probe
tcaatacaggtagttccaaggattc

SEQ ID NO: 52850 - DNA, 25 bp, probe
caatacaggtagttccaaggattca

SEQ ID NO: 52851 - DNA, 25 bp, probe
ttcaatacaggtagttccaaggatt

SEQ ID NO: 52852 - DNA, 25 bp, probe
aattcaatacaggtagttccaagga

SEQ ID NO: 52853 - DNA, 25 bp, probe
aatacaggtagttccaaggattcat

SEQ ID NO: 52854 - DNA, 25 bp, probe
attcaatacaggtagttccaaggat

SEQ ID NO: 52855 - DNA, 25 bp, probe
cctatctgaagactgtcctgatgta

SEQ ID NO: 52856 - DNA, 25 bp, probe
ctatctgaagactgtcctgatgtac

SEQ ID NO: 52857 - DNA, 25 bp, probe
atacaggtagttccaaggattcatg

SEQ ID NO: 52858 - DNA, 25 bp, probe
taattcaatacaggtagttccaagg

SEQ ID NO: 52859 - DNA, 25 bp, probe
tatctgaagactgtcctgatgtacc

SEQ ID NO: 52860 - DNA, 25 bp, probe
ctgagagttctaacttcattggcta

SEQ ID NO: 52861 - DNA, 25 bp, probe
tgagagttctaacttcattggctac

SEQ ID NO: 52862 - DNA, 25 bp, probe
atacagacctaactgagccttactt

SEQ ID NO: 52863 - DNA, 25 bp, probe
agtgctgagagttctaacttcattg

SEQ ID NO: 52864 - DNA, 25 bp, probe
gatacagacctaactgagccttact

SEQ ID NO: 52865 - DNA, 25 bp, probe
agatacagacctaactgagccttac

SEQ ID NO: 52866 - DNA, 25 bp, probe
cagatacagacctaactgagcctta

SEQ ID NO: 52867 - DNA, 25 bp, probe
cacctatctgaagactgtcctgatg

SEQ ID NO: 52868 - DNA, 25 bp, probe
gagagttctaacttcattggctacg

SEQ ID NO: 52869 - DNA, 25 bp, probe
gtgctgagagttctaacttcattgg

SEQ ID NO: 52870 - DNA, 25 bp, probe
acctatctgaagactgtcctgatgt

SEQ ID NO: 52871 - DNA, 25 bp, probe
tcaatgtatccaatcagcagtatgg

SEQ ID NO: 52872 - DNA, 25 bp, probe
gcatcctatatccagtaagtagaat

SEQ ID NO: 52873 - DNA, 25 bp, probe
tcacctatctgaagactgtcctgat

SEQ ID NO: 52874 - DNA, 25 bp, probe
acaagatgaaacaatgatgacagac

SEQ ID NO: 52875 - DNA, 25 bp, probe
caagatgaaacaatgatgacagact

SEQ ID NO: 52876 - DNA, 25 bp, probe
ccaaacaagatgaaacaatgatgac

SEQ ID NO: 52877 - DNA, 25 bp, probe
tccaaacaagatgaaacaatgatga

SEQ ID NO: 52878 - DNA, 25 bp, probe
aacaagatgaaacaatgatgacaga

SEQ ID NO: 52879 - DNA, 25 bp, probe
atctgaagactgtcctgatgtacct

SEQ ID NO: 52880 - DNA, 25 bp, probe
aaacaattactaagatgctgaaggc

SEQ ID NO: 52881 - DNA, 25 bp, probe
agaatttatacaacctgccaaccta

SEQ ID NO: 52882 - DNA, 25 bp, probe
ctgaaggcaatagaagatttaccaa

SEQ ID NO: 52883 - DNA, 25 bp, probe
atgagaatttatacaacctgccaac

SEQ ID NO: 52884 - DNA, 25 bp, probe
gctgaaggcaatagaagatttacca

SEQ ID NO: 52885 - DNA, 25 bp, probe
caaacaagatgaaacaatgatgaca

SEQ ID NO: 52886 - DNA, 25 bp, probe
gaattatctcttcatctgggacctg

SEQ ID NO: 52887 - DNA, 25 bp, probe
gaatttatacaacctgccaacctag

SEQ ID NO: 52888 - DNA, 25 bp, probe
ccttcctctaatttcacactcaaga

SEQ ID NO: 52889 - DNA, 25 bp, probe
attctgccttcctctaatttcacac

SEQ ID NO: 52890 - DNA, 25 bp, probe
cattctgccttcctctaatttcaca

SEQ ID NO: 52891 - DNA, 25 bp, probe
gtattaaagtctgaagtgttgccat

SEQ ID NO: 52892 - DNA, 25 bp, probe
atgtattaaagtctgaagtgttgcc

SEQ ID NO: 52893 - DNA, 25 bp, probe
tgtattaaagtctgaagtgttgcca

SEQ ID NO: 52894 - DNA, 25 bp, probe
tattaaagtctgaagtgttgccatg

SEQ ID NO: 52895 - DNA, 25 bp, probe
tatgtattaaagtctgaagtgttgc

SEQ ID NO: 52896 - DNA, 25 bp, probe
ccctagcaatatgtattaaagtctg

SEQ ID NO: 52897 - DNA, 25 bp, probe
ccatcacccctagcaatatgtatta

SEQ ID NO: 52898 - DNA, 25 bp, probe
gcaatatgtattaaagtctgaagtg

SEQ ID NO: 52899 - DNA, 25 bp, probe
agcaatatgtattaaagtctgaagt

SEQ ID NO: 52900 - DNA, 25 bp, probe
tccatcacccctagcaatatgtatt

SEQ ID NO: 52901 - DNA, 25 bp, probe
ttccatcacccctagcaatatgtat

SEQ ID NO: 52902 - DNA, 25 bp, probe
cacccctagcaatatgtattaaagt

SEQ ID NO: 52903 - DNA, 25 bp, probe
cttccatcacccctagcaatatgta

SEQ ID NO: 52904 - DNA, 25 bp, probe
cctagcaatatgtattaaagtctga

SEQ ID NO: 52905 - DNA, 25 bp, probe
acccctagcaatatgtattaaagtc

SEQ ID NO: 52906 - DNA, 25 bp, probe
tcacccctagcaatatgtattaaag

SEQ ID NO: 52907 - DNA, 25 bp, probe
catcacccctagcaatatgtattaa

SEQ ID NO: 52908 - DNA, 25 bp, probe
agaggagaaagcctgagtgagtaac

SEQ ID NO: 52909 - DNA, 25 bp, probe
cagaggagaaagcctgagtgagtaa

SEQ ID NO: 52910 - DNA, 25 bp, probe
cccctagcaatatgtattaaagtct

SEQ ID NO: 52911 - DNA, 25 bp, probe
ctgagtgagtaacacctcattctgg

SEQ ID NO: 52912 - DNA, 25 bp, probe
cctgagtgagtaacacctcattctg

SEQ ID NO: 52913 - DNA, 25 bp, probe
atcacccctagcaatatgtattaaa

SEQ ID NO: 52914 - DNA, 25 bp, probe
gaggagaaagcctgagtgagtaaca

SEQ ID NO: 52915 - DNA, 25 bp, probe
agaaagcctgagtgagtaacacctc

SEQ ID NO: 52916 - DNA, 25 bp, probe
gagaaagcctgagtgagtaacacct

SEQ ID NO: 52917 - DNA, 25 bp, probe
aggagaaagcctgagtgagtaacac

SEQ ID NO: 52918 - DNA, 25 bp, probe
atatgtattaaagtctgaagtgttg

SEQ ID NO: 52919 - DNA, 25 bp, probe
caatatgtattaaagtctgaagtgt

SEQ ID NO: 52920 - DNA, 25 bp, probe
aagcctgagtgagtaacacctcatt

SEQ ID NO: 52921 - DNA, 25 bp, probe
ctctctcccatccaagtgaccagat

SEQ ID NO: 52922 - DNA, 25 bp, probe
gcctgagtgagtaacacctcattct

SEQ ID NO: 52923 - DNA, 25 bp, probe
agcctgagtgagtaacacctcattc

SEQ ID NO: 52924 - DNA, 25 bp, probe
ggagaaagcctgagtgagtaacacc

SEQ ID NO: 52925 - DNA, 25 bp, probe
attaaagtctgaagtgttgccatgg

SEQ ID NO: 52926 - DNA, 25 bp, probe
tgagtgagtaacacctcattctggc

SEQ ID NO: 52927 - DNA, 25 bp, probe
taacacctcattctggccgagagta

SEQ ID NO: 52928 - DNA, 25 bp, probe
ccgttggacttcctttgggactaag

SEQ ID NO: 52929 - DNA, 25 bp, probe
aaagcctgagtgagtaacacctcat

SEQ ID NO: 52930 - DNA, 25 bp, probe
gaaagcctgagtgagtaacacctca

SEQ ID NO: 52931 - DNA, 25 bp, probe
tcagaggagaaagcctgagtgagta

SEQ ID NO: 52932 - DNA, 25 bp, probe
caattcttggagagtggggttctgg

SEQ ID NO: 52933 - DNA, 25 bp, probe
gcttccatcacccctagcaatatgt

SEQ ID NO: 52934 - DNA, 25 bp, probe
agcttccatcacccctagcaatatg

SEQ ID NO: 52935 - DNA, 25 bp, probe
aatatgacattcttggtgacagtgg

SEQ ID NO: 52936 - DNA, 25 bp, probe
caatatgacattcttggtgacagtg

SEQ ID NO: 52937 - DNA, 25 bp, probe
tagcaatatgacattcttggtgaca

SEQ ID NO: 52938 - DNA, 25 bp, probe
ttagcaatatgacattcttggtgac

SEQ ID NO: 52939 - DNA, 25 bp, probe
atatgacattcttggtgacagtgga

SEQ ID NO: 52940 - DNA, 25 bp, probe
agcaatatgacattcttggtgacag

SEQ ID NO: 52941 - DNA, 25 bp, probe
tatcaatgttctcctccatacagag

SEQ ID NO: 52942 - DNA, 25 bp, probe
ctatcaatgttctcctccatacaga

SEQ ID NO: 52943 - DNA, 25 bp, probe
tctatcaatgttctcctccatacag

SEQ ID NO: 52944 - DNA, 25 bp, probe
gcaatatgacattcttggtgacagt

SEQ ID NO: 52945 - DNA, 25 bp, probe
tatgacattcttggtgacagtggaa

SEQ ID NO: 52946 - DNA, 25 bp, probe
atcaatgttctcctccatacagagt

SEQ ID NO: 52947 - DNA, 25 bp, probe
atctatcaatgttctcctccataca

SEQ ID NO: 52948 - DNA, 25 bp, probe
aatgttctcctccatacagagtctc

SEQ ID NO: 52949 - DNA, 25 bp, probe
caatgttctcctccatacagagtct

SEQ ID NO: 52950 - DNA, 25 bp, probe
tcaatgttctcctccatacagagtc

SEQ ID NO: 52951 - DNA, 25 bp, probe
gatctatcaatgttctcctccatac

SEQ ID NO: 52952 - DNA, 25 bp, probe
gttctcctccatacagagtctcttc

SEQ ID NO: 52953 - DNA, 25 bp, probe
ggatctatcaatgttctcctccata

SEQ ID NO: 52954 - DNA, 25 bp, probe
accagcacaaataaagaatcagaaa

SEQ ID NO: 52955 - DNA, 25 bp, probe
ccaacgaaactgagataatgaaaga

SEQ ID NO: 52956 - DNA, 25 bp, probe
tccaacgaaactgagataatgaaag

SEQ ID NO: 52957 - DNA, 25 bp, probe
cttccaacgaaactgagataatgaa

SEQ ID NO: 52958 - DNA, 25 bp, probe
tcttccaacgaaactgagataatga

SEQ ID NO: 52959 - DNA, 25 bp, probe
aatctttgtctcttcaccgtgttaa

SEQ ID NO: 52960 - DNA, 25 bp, probe
taccagcacaaataaagaatcagaa

SEQ ID NO: 52961 - DNA, 25 bp, probe
ttaccagcacaaataaagaatcaga

SEQ ID NO: 52962 - DNA, 25 bp, probe
gttaccagcacaaataaagaatcag

SEQ ID NO: 52963 - DNA, 25 bp, probe
atgttctcctccatacagagtctct

SEQ ID NO: 52964 - DNA, 25 bp, probe
ttccaacgaaactgagataatgaaa

SEQ ID NO: 52965 - DNA, 25 bp, probe
tgttctcctccatacagagtctctt

SEQ ID NO: 52966 - DNA, 25 bp, probe
gaatctttgtctcttcaccgtgtta

SEQ ID NO: 52967 - DNA, 25 bp, probe
ctcttccaacgaaactgagataatg

SEQ ID NO: 52968 - DNA, 25 bp, probe
gtttagcaatatgacattcttggtg

SEQ ID NO: 52969 - DNA, 25 bp, probe
tttagcaatatgacattcttggtga

SEQ ID NO: 52970 - DNA, 25 bp, probe
agtttagcaatatgacattcttggt

SEQ ID NO: 52971 - DNA, 25 bp, probe
ttctcctccatacagagtctcttcc

SEQ ID NO: 52972 - DNA, 25 bp, probe
gccataatgcaagtccatgaagatt

SEQ ID NO: 52973 - DNA, 25 bp, probe
tgttaccagcacaaataaagaatca

SEQ ID NO: 52974 - DNA, 25 bp, probe
acattcttggtgacagtggaatctt

SEQ ID NO: 52975 - DNA, 25 bp, probe
caacgaaactgagataatgaaagaa

SEQ ID NO: 52976 - DNA, 25 bp, probe
tccatacagagtctcttccaacgaa

SEQ ID NO: 52977 - DNA, 25 bp, probe
atgacattcttggtgacagtggaat

SEQ ID NO: 52978 - DNA, 25 bp, probe
ctcctccatacagagtctcttccaa

SEQ ID NO: 52979 - DNA, 25 bp, probe
cctatacacacatctccttcatcat

SEQ ID NO: 52980 - DNA, 25 bp, probe
atacacacatctccttcatcatcat

SEQ ID NO: 52981 - DNA, 25 bp, probe
acacacatctccttcatcatcatat

SEQ ID NO: 52982 - DNA, 25 bp, probe
tcctatacacacatctccttcatca

SEQ ID NO: 52983 - DNA, 25 bp, probe
atcctatacacacatctccttcatc

SEQ ID NO: 52984 - DNA, 25 bp, probe
tacacacatctccttcatcatcata

SEQ ID NO: 52985 - DNA, 25 bp, probe
tatacacacatctccttcatcatca

SEQ ID NO: 52986 - DNA, 25 bp, probe
ctatacacacatctccttcatcatc

SEQ ID NO: 52987 - DNA, 25 bp, probe
atgttattcctctgtgttcacttcg

SEQ ID NO: 52988 - DNA, 25 bp, probe
atgtgatgaacctactcaatgtgat

SEQ ID NO: 52989 - DNA, 25 bp, probe
tgtgatgaacctactcaatgtgata

SEQ ID NO: 52990 - DNA, 25 bp, probe
gatgtgatgaacctactcaatgtga

SEQ ID NO: 52991 - DNA, 25 bp, probe
caagaaccaagaactctaactgtcc

SEQ ID NO: 52992 - DNA, 25 bp, probe
ggacaagaaccaagaactctaactg

SEQ ID NO: 52993 - DNA, 25 bp, probe
caggacaagaaccaagaactctaac

SEQ ID NO: 52994 - DNA, 25 bp, probe
tatcctatacacacatctccttcat

SEQ ID NO: 52995 - DNA, 25 bp, probe
tgatgtgatgaacctactcaatgtg

SEQ ID NO: 52996 - DNA, 25 bp, probe
tatgttattcctctgtgttcacttc

SEQ ID NO: 52997 - DNA, 25 bp, probe
aggacaagaaccaagaactctaact

SEQ ID NO: 52998 - DNA, 25 bp, probe
atatcctatacacacatctccttca

SEQ ID NO: 52999 - DNA, 25 bp, probe
ttgagaagtctacattgcttacatt

SEQ ID NO: 53000 - DNA, 25 bp, probe
acaagaaccaagaactctaactgtc

SEQ ID NO: 53001 - DNA, 25 bp, probe
gacaagaaccaagaactctaactgt

SEQ ID NO: 53002 - DNA, 25 bp, probe
cacacatctccttcatcatcatata

SEQ ID NO: 53003 - DNA, 25 bp, probe
gaataatgtggctcttgtaggagtg

SEQ ID NO: 53004 - DNA, 25 bp, probe
agaataatgtggctcttgtaggagt

SEQ ID NO: 53005 - DNA, 25 bp, probe
ataatgtggctcttgtaggagtgat

SEQ ID NO: 53006 - DNA, 25 bp, probe
ttatgttattcctctgtgttcactt

SEQ ID NO: 53007 - DNA, 25 bp, probe
aataatgtggctcttgtaggagtga

SEQ ID NO: 53008 - DNA, 25 bp, probe
gtgatgaacctactcaatgtgatat

SEQ ID NO: 53009 - DNA, 25 bp, probe
gcagttgtgtgatgaatcagtatct

SEQ ID NO: 53010 - DNA, 25 bp, probe
ccaggacaagaaccaagaactctaa

SEQ ID NO: 53011 - DNA, 25 bp, probe
cagttgtgtgatgaatcagtatctg

SEQ ID NO: 53012 - DNA, 25 bp, probe
taatgtggctcttgtaggagtgatg

SEQ ID NO: 53013 - DNA, 25 bp, probe
tggtctttcacttgtcattctactt

SEQ ID NO: 53014 - DNA, 25 bp, probe
ggcagttgtgtgatgaatcagtatc

SEQ ID NO: 53015 - DNA, 25 bp, probe
gtaggtatggaaatctggtctgatg

SEQ ID NO: 53016 - DNA, 25 bp, probe
ggtctttcacttgtcattctacttt

SEQ ID NO: 53017 - DNA, 25 bp, probe
atggtctttcacttgtcattctact

SEQ ID NO: 53018 - DNA, 25 bp, probe
cagtcttccatcaaatcaccttaaa

SEQ ID NO: 53019 - DNA, 25 bp, probe
tttgtgtttgatgtgatgaacctac

SEQ ID NO: 53020 - DNA, 25 bp, probe
ttatcagtccaggaaacaggtaaac

SEQ ID NO: 53021 - DNA, 25 bp, probe
ctttgtgtttgatgtgatgaaccta

SEQ ID NO: 53022 - DNA, 25 bp, probe
ttgtgtttgatgtgatgaacctact

SEQ ID NO: 53023 - DNA, 25 bp, probe
aactactatatccttgagacagcca

SEQ ID NO: 53024 - DNA, 25 bp, probe
actactatatccttgagacagccac

SEQ ID NO: 53025 - DNA, 25 bp, probe
ctactatatccttgagacagccacc

SEQ ID NO: 53026 - DNA, 25 bp, probe
tactatatccttgagacagccacca

SEQ ID NO: 53027 - DNA, 25 bp, probe
aaggagagtggttcatcaatgattg

SEQ ID NO: 53028 - DNA, 25 bp, probe
caaggagagtggttcatcaatgatt

SEQ ID NO: 53029 - DNA, 25 bp, probe
ctatatccttgagacagccaccaat

SEQ ID NO: 53030 - DNA, 25 bp, probe
gagtggttcatcaatgattggctaa

SEQ ID NO: 53031 - DNA, 25 bp, probe
tatatccttgagacagccaccaatg

SEQ ID NO: 53032 - DNA, 25 bp, probe
catctgcttcactccctatcatatt

SEQ ID NO: 53033 - DNA, 25 bp, probe
agagtggttcatcaatgattggcta

SEQ ID NO: 53034 - DNA, 25 bp, probe
aaactactatatccttgagacagcc

SEQ ID NO: 53035 - DNA, 25 bp, probe
tcatctgcttcactccctatcatat

SEQ ID NO: 53036 - DNA, 25 bp, probe
ttcatctgcttcactccctatcata

SEQ ID NO: 53037 - DNA, 25 bp, probe
tgcttcactccctatcatattaact

SEQ ID NO: 53038 - DNA, 25 bp, probe
cttaaacaacaacaagtcctgcttt

SEQ ID NO: 53039 - DNA, 25 bp, probe
aagcacagacttaaacaacaacaag

SEQ ID NO: 53040 - DNA, 25 bp, probe
taaaggaaaccatcattagcagttg

SEQ ID NO: 53041 - DNA, 25 bp, probe
gtaaaggaaaccatcattagcagtt

SEQ ID NO: 53042 - DNA, 25 bp, probe
gaagcacagacttaaacaacaacaa

SEQ ID NO: 53043 - DNA, 25 bp, probe
gagaagcacagacttaaacaacaac

SEQ ID NO: 53044 - DNA, 25 bp, probe
ctgcttcactccctatcatattaac

SEQ ID NO: 53045 - DNA, 25 bp, probe
tctgcttcactccctatcatattaa

SEQ ID NO: 53046 - DNA, 25 bp, probe
atctgcttcactccctatcatatta

SEQ ID NO: 53047 - DNA, 25 bp, probe
tgagaagcacagacttaaacaacaa

SEQ ID NO: 53048 - DNA, 25 bp, probe
actatatccttgagacagccaccaa

SEQ ID NO: 53049 - DNA, 25 bp, probe
aggagagtggttcatcaatgattgg

SEQ ID NO: 53050 - DNA, 25 bp, probe
ttactttatggcttcagagtttcgt

SEQ ID NO: 53051 - DNA, 25 bp, probe
aaaggaaaccatcattagcagttgt

SEQ ID NO: 53052 - DNA, 25 bp, probe
ttaaacaacaacaagtcctgctttg

SEQ ID NO: 53053 - DNA, 25 bp, probe
attactttatggcttcagagtttcg

SEQ ID NO: 53054 - DNA, 25 bp, probe
agaagcacagacttaaacaacaaca

SEQ ID NO: 53055 - DNA, 25 bp, probe
ttcttcatctgcttcactccctatc

SEQ ID NO: 53056 - DNA, 25 bp, probe
cttcttcatctgcttcactccctat

SEQ ID NO: 53057 - DNA, 25 bp, probe
tactttatggcttcagagtttcgtg

SEQ ID NO: 53058 - DNA, 25 bp, probe
aaggaaaccatcattagcagttgtc

SEQ ID NO: 53059 - DNA, 25 bp, probe
gcttcactccctatcatattaactt

SEQ ID NO: 53060 - DNA, 25 bp, probe
cttcatctgcttcactccctatcat

SEQ ID NO: 53061 - DNA, 25 bp, probe
gagagtggttcatcaatgattggct

SEQ ID NO: 53062 - DNA, 25 bp, probe
gcaaggagagtggttcatcaatgat

SEQ ID NO: 53063 - DNA, 25 bp, probe
gagcaaggagagtggttcatcaatg

SEQ ID NO: 53064 - DNA, 25 bp, probe
cagtcttcttcatctgcttcactcc

SEQ ID NO: 53065 - DNA, 25 bp, probe
ctgagaagcacagacttaaacaaca

SEQ ID NO: 53066 - DNA, 25 bp, probe
ctttatggcttcagagtttcgtgac

SEQ ID NO: 53067 - DNA, 25 bp, probe
catttgcttctgctaggttaaactt

SEQ ID NO: 53068 - DNA, 25 bp, probe
ctcatttgcttctgctaggttaaac

SEQ ID NO: 53069 - DNA, 25 bp, probe
tctcatttgcttctgctaggttaaa

SEQ ID NO: 53070 - DNA, 25 bp, probe
atttgcttctgctaggttaaacttt

SEQ ID NO: 53071 - DNA, 25 bp, probe
tcatttgcttctgctaggttaaact

SEQ ID NO: 53072 - DNA, 25 bp, probe
ttatgcttagaacaccagggtttaa

SEQ ID NO: 53073 - DNA, 25 bp, probe
tttatgcttagaacaccagggttta

SEQ ID NO: 53074 - DNA, 25 bp, probe
gtctcatttgcttctgctaggttaa

SEQ ID NO: 53075 - DNA, 25 bp, probe
gatcttagctgtatggagtaactat

SEQ ID NO: 53076 - DNA, 25 bp, probe
gctgtatggagtaactatttcagaa

SEQ ID NO: 53077 - DNA, 25 bp, probe
tatgcttagaacaccagggtttaaa

SEQ ID NO: 53078 - DNA, 25 bp, probe
ggtctcatttgcttctgctaggtta

SEQ ID NO: 53079 - DNA, 25 bp, probe
atcttagctgtatggagtaactatt

SEQ ID NO: 53080 - DNA, 25 bp, probe
agatcttagctgtatggagtaacta

SEQ ID NO: 53081 - DNA, 25 bp, probe
acaactggaagacttggaacctcaa

SEQ ID NO: 53082 - DNA, 25 bp, probe
aactggaagacttggaacctcaaag

SEQ ID NO: 53083 - DNA, 25 bp, probe
cttgtagaaagcaaagtacagaagc

SEQ ID NO: 53084 - DNA, 25 bp, probe
agctgtatggagtaactatttcaga

SEQ ID NO: 53085 - DNA, 25 bp, probe
cttgtattccatctgctgtagcaat

SEQ ID NO: 53086 - DNA, 25 bp, probe
caactggaagacttggaacctcaaa

SEQ ID NO: 53087 - DNA, 25 bp, probe
ttgtattccatctgctgtagcaatg

SEQ ID NO: 53088 - DNA, 25 bp, probe
acaaaccattatgatttatgctact

SEQ ID NO: 53089 - DNA, 25 bp, probe
tgcttctgctaggttaaacttttac

SEQ ID NO: 53090 - DNA, 25 bp, probe
tttgcttctgctaggttaaactttt

SEQ ID NO: 53091 - DNA, 25 bp, probe
gcttctgctaggttaaacttttact

SEQ ID NO: 53092 - DNA, 25 bp, probe
tggagtaactatttcagaaaaccct

SEQ ID NO: 53093 - DNA, 25 bp, probe
ttgcttctgctaggttaaactttta

SEQ ID NO: 53094 - DNA, 25 bp, probe
atctgggtctcatttgcttctgcta

SEQ ID NO: 53095 - DNA, 25 bp, probe
ttagctgtatggagtaactatttca

SEQ ID NO: 53096 - DNA, 25 bp, probe
ttttatgcttagaacaccagggttt

SEQ ID NO: 53097 - DNA, 25 bp, probe
gtggtctgtgttattttctatttcc

SEQ ID NO: 53098 - DNA, 25 bp, probe
cacaactggaagacttggaacctca

SEQ ID NO: 53099 - DNA, 25 bp, probe
ttgtagaaagcaaagtacagaagct

SEQ ID NO: 53100 - DNA, 25 bp, probe
atggagtaactatttcagaaaaccc

SEQ ID NO: 53101 - DNA, 25 bp, probe
tgctaggttaaacttttacttgaca

SEQ ID NO: 53102 - DNA, 25 bp, probe
tggtctgtgttattttctatttcct

SEQ ID NO: 53103 - DNA, 25 bp, probe
tagctgtatggagtaactatttcag

SEQ ID NO: 53104 - DNA, 25 bp, probe
tcttagctgtatggagtaactattt

SEQ ID NO: 53105 - DNA, 25 bp, probe
ttacttgacaacaaggattcctgct

SEQ ID NO: 53106 - DNA, 25 bp, probe
tgtagaaagcaaagtacagaagctg

SEQ ID NO: 53107 - DNA, 25 bp, probe
ctgctaggttaaacttttacttgac

SEQ ID NO: 53108 - DNA, 25 bp, probe
cttagctgtatggagtaactatttc

SEQ ID NO: 53109 - DNA, 25 bp, probe
tctgctaggttaaacttttacttga

SEQ ID NO: 53110 - DNA, 25 bp, probe
agagtggtctgtgttattttctatt

SEQ ID NO: 53111 - DNA, 25 bp, probe
aagacagaccaatcaacttcacaca

SEQ ID NO: 53112 - DNA, 25 bp, probe
caatcaacttcacacagcaacacat

SEQ ID NO: 53113 - DNA, 25 bp, probe
attaccaaagacagaccaatcaact

SEQ ID NO: 53114 - DNA, 25 bp, probe
gaccattacacgcaaagatattcaa

SEQ ID NO: 53115 - DNA, 25 bp, probe
ctgaccattacacgcaaagatattc

SEQ ID NO: 53116 - DNA, 25 bp, probe
gcaatacctaaagcaagaaagcatt

SEQ ID NO: 53117 - DNA, 25 bp, probe
accattacacgcaaagatattcaaa

SEQ ID NO: 53118 - DNA, 25 bp, probe
agacagaccaatcaacttcacacag

SEQ ID NO: 53119 - DNA, 25 bp, probe
ccattacacgcaaagatattcaaac

SEQ ID NO: 53120 - DNA, 25 bp, probe
tattaccaaagacagaccaatcaac

SEQ ID NO: 53121 - DNA, 25 bp, probe
gtattaccaaagacagaccaatcaa

SEQ ID NO: 53122 - DNA, 25 bp, probe
ttaccaaagacagaccaatcaactt

SEQ ID NO: 53123 - DNA, 25 bp, probe
taccaaagacagaccaatcaacttc

SEQ ID NO: 53124 - DNA, 25 bp, probe
taaagcaagaaagcattgacaagaa

SEQ ID NO: 53125 - DNA, 25 bp, probe
atacctaaagcaagaaagcattgac

SEQ ID NO: 53126 - DNA, 25 bp, probe
atatgctgactgtattaccaaagac

SEQ ID NO: 53127 - DNA, 25 bp, probe
ctaaagcaagaaagcattgacaaga

SEQ ID NO: 53128 - DNA, 25 bp, probe
aaagcaagaaagcattgacaagaaa

SEQ ID NO: 53129 - DNA, 25 bp, probe
cctgaccattacacgcaaagatatt

SEQ ID NO: 53130 - DNA, 25 bp, probe
acacgcaaagatattcaaactctaa

SEQ ID NO: 53131 - DNA, 25 bp, probe
ttacacgcaaagatattcaaactct

SEQ ID NO: 53132 - DNA, 25 bp, probe
aatacctaaagcaagaaagcattga

SEQ ID NO: 53133 - DNA, 25 bp, probe
cattacacgcaaagatattcaaact

SEQ ID NO: 53134 - DNA, 25 bp, probe
tacctaaagcaagaaagcattgaca

SEQ ID NO: 53135 - DNA, 25 bp, probe
cgcaaagatattcaaactctaaacc

SEQ ID NO: 53136 - DNA, 25 bp, probe
aatcaacttcacacagcaacacatg

SEQ ID NO: 53137 - DNA, 25 bp, probe
tgaccattacacgcaaagatattca

SEQ ID NO: 53138 - DNA, 25 bp, probe
cctaaagcaagaaagcattgacaag

SEQ ID NO: 53139 - DNA, 25 bp, probe
attacacgcaaagatattcaaactc

SEQ ID NO: 53140 - DNA, 25 bp, probe
ctgttgtggactttagaaagaagaa

SEQ ID NO: 53141 - DNA, 25 bp, probe
aaagacagaccaatcaacttcacac

SEQ ID NO: 53142 - DNA, 25 bp, probe
caaagacagaccaatcaacttcaca

SEQ ID NO: 53143 - DNA, 25 bp, probe
tgtattaccaaagacagaccaatca

SEQ ID NO: 53144 - DNA, 25 bp, probe
tatgctgactgtattaccaaagaca

SEQ ID NO: 53145 - DNA, 25 bp, probe
gctgttgtggactttagaaagaaga

SEQ ID NO: 53146 - DNA, 25 bp, probe
tacacgcaaagatattcaaactcta

SEQ ID NO: 53147 - DNA, 25 bp, probe
ttctacatgaatatgctgatggagc

SEQ ID NO: 53148 - DNA, 25 bp, probe
acctaaagcaagaaagcattgacaa

SEQ ID NO: 53149 - DNA, 25 bp, probe
cgttggacaaagaaagtagatgtat

SEQ ID NO: 53150 - DNA, 25 bp, probe
tgttgtggactttagaaagaagaat

SEQ ID NO: 53151 - DNA, 25 bp, probe
acgcaaagatattcaaactctaaac

SEQ ID NO: 53152 - DNA, 25 bp, probe
cacgcaaagatattcaaactctaaa

SEQ ID NO: 53153 - DNA, 25 bp, probe
aatatgctgactgtattaccaaaga

SEQ ID NO: 53154 - DNA, 25 bp, probe
ccaaagacagaccaatcaacttcac

SEQ ID NO: 53155 - DNA, 25 bp, probe
agaacttcctgagcaagatggagaa

SEQ ID NO: 53156 - DNA, 25 bp, probe
tggagtcacagatcaactactgctc

SEQ ID NO: 53157 - DNA, 25 bp, probe
ctggagtcacagatcaactactgct

SEQ ID NO: 53158 - DNA, 25 bp, probe
gagaacttcctgagcaagatggaga

SEQ ID NO: 53159 - DNA, 25 bp, probe
gaacttcctgagcaagatggagaag

SEQ ID NO: 53160 - DNA, 25 bp, probe
gtctggagtcacagatcaactactg

SEQ ID NO: 53161 - DNA, 25 bp, probe
cagagtggacttcattgccaagtac

SEQ ID NO: 53162 - DNA, 25 bp, probe
tgtctggagtcacagatcaactact

SEQ ID NO: 53163 - DNA, 25 bp, probe
gtgtctggagtcacagatcaactac

SEQ ID NO: 53164 - DNA, 25 bp, probe
agtgtctggagtcacagatcaacta

SEQ ID NO: 53165 - DNA, 25 bp, probe
ggagaacttcctgagcaagatggag

SEQ ID NO: 53166 - DNA, 25 bp, probe
catcaagtgtctggagtcacagatc

SEQ ID NO: 53167 - DNA, 25 bp, probe
gagtcacagatcaactactgctcgg

SEQ ID NO: 53168 - DNA, 25 bp, probe
ggagtcacagatcaactactgctcg

SEQ ID NO: 53169 - DNA, 25 bp, probe
acagagtggacttcattgccaagta

SEQ ID NO: 53170 - DNA, 25 bp, probe
atcaagtgtctggagtcacagatca

SEQ ID NO: 53171 - DNA, 25 bp, probe
caagtgtctggagtcacagatcaac

SEQ ID NO: 53172 - DNA, 25 bp, probe
aagtgtctggagtcacagatcaact

SEQ ID NO: 53173 - DNA, 25 bp, probe
tcaagtgtctggagtcacagatcaa

SEQ ID NO: 53174 - DNA, 25 bp, probe
gagacagtccagaaggagaacttcc

SEQ ID NO: 53175 - DNA, 25 bp, probe
ggagacagtccagaaggagaacttc

SEQ ID NO: 53176 - DNA, 25 bp, probe
gaaggagaacttcctgagcaagatg

SEQ ID NO: 53177 - DNA, 25 bp, probe
agaaggagaacttcctgagcaagat

SEQ ID NO: 53178 - DNA, 25 bp, probe
agtggacttcattgccaagtacctc

SEQ ID NO: 53179 - DNA, 25 bp, probe
gagtggacttcattgccaagtacct

SEQ ID NO: 53180 - DNA, 25 bp, probe
agagtggacttcattgccaagtacc

SEQ ID NO: 53181 - DNA, 25 bp, probe
tctggagtcacagatcaactactgc

SEQ ID NO: 53182 - DNA, 25 bp, probe
gctacaacctgattgtggagtacca

SEQ ID NO: 53183 - DNA, 25 bp, probe
aacttcctgagcaagatggagaagc

SEQ ID NO: 53184 - DNA, 25 bp, probe
cagaaggagaacttcctgagcaaga

SEQ ID NO: 53185 - DNA, 25 bp, probe
cagtccagaaggagaacttcctgag

SEQ ID NO: 53186 - DNA, 25 bp, probe
gcatcaagtgtctggagtcacagat

SEQ ID NO: 53187 - DNA, 25 bp, probe
aaggagaacttcctgagcaagatgg

SEQ ID NO: 53188 - DNA, 25 bp, probe
gacagtccagaaggagaacttcctg

SEQ ID NO: 53189 - DNA, 25 bp, probe
agacagtccagaaggagaacttcct

SEQ ID NO: 53190 - DNA, 25 bp, probe
acagtccagaaggagaacttcctga

SEQ ID NO: 53191 - DNA, 25 bp, probe
ccagaaggagaacttcctgagcaag

SEQ ID NO: 53192 - DNA, 25 bp, probe
aggagaacttcctgagcaagatgga

SEQ ID NO: 53193 - DNA, 25 bp, probe
tccagaaggagaacttcctgagcaa

SEQ ID NO: 53194 - DNA, 25 bp, probe
caacgcagacatgttctggaagttc

SEQ ID NO: 53195 - DNA, 25 bp, probe
gagagagcaagaaaagcgcatcaag

SEQ ID NO: 53196 - DNA, 25 bp, probe
caagaaaagcgcatcaagtgtctgg

SEQ ID NO: 53197 - DNA, 25 bp, probe
ctattccagtcattaaaagattgct

SEQ ID NO: 53198 - DNA, 25 bp, probe
actattccagtcattaaaagattgc

SEQ ID NO: 53199 - DNA, 25 bp, probe
tattccagtcattaaaagattgcta

SEQ ID NO: 53200 - DNA, 25 bp, probe
accaaaataactattccagtcatta

SEQ ID NO: 53201 - DNA, 25 bp, probe
aactattccagtcattaaaagattg

SEQ ID NO: 53202 - DNA, 25 bp, probe
ccaaaataactattccagtcattaa

SEQ ID NO: 53203 - DNA, 25 bp, probe
gctataagatacttgttgcttgctt

SEQ ID NO: 53204 - DNA, 25 bp, probe
aagatacttgttgcttgcttcaatt

SEQ ID NO: 53205 - DNA, 25 bp, probe
taagatacttgttgcttgcttcaat

SEQ ID NO: 53206 - DNA, 25 bp, probe
ataagatacttgttgcttgcttcaa

SEQ ID NO: 53207 - DNA, 25 bp, probe
tataagatacttgttgcttgcttca

SEQ ID NO: 53208 - DNA, 25 bp, probe
ctataagatacttgttgcttgcttc

SEQ ID NO: 53209 - DNA, 25 bp, probe
gcattcaagtacatagtgtcaggaa

SEQ ID NO: 53210 - DNA, 25 bp, probe
aagcattcaagtacatagtgtcagg

SEQ ID NO: 53211 - DNA, 25 bp, probe
agcattcaagtacatagtgtcagga

SEQ ID NO: 53212 - DNA, 25 bp, probe
agactactccactcccatactaata

SEQ ID NO: 53213 - DNA, 25 bp, probe
tagactactccactcccatactaat

SEQ ID NO: 53214 - DNA, 25 bp, probe
cttcaatttctgtgcccttactttc

SEQ ID NO: 53215 - DNA, 25 bp, probe
ctagactactccactcccatactaa

SEQ ID NO: 53216 - DNA, 25 bp, probe
gtgcccttactttcaacaaattctg

SEQ ID NO: 53217 - DNA, 25 bp, probe
caatttctgtgcccttactttcaac

SEQ ID NO: 53218 - DNA, 25 bp, probe
tgattgacccatacctagactactc

SEQ ID NO: 53219 - DNA, 25 bp, probe
ctgattgacccatacctagactact

SEQ ID NO: 53220 - DNA, 25 bp, probe
tcaatttctgtgcccttactttcaa

SEQ ID NO: 53221 - DNA, 25 bp, probe
ttcaatttctgtgcccttactttca

SEQ ID NO: 53222 - DNA, 25 bp, probe
atgcagagctataagatacttgttg

SEQ ID NO: 53223 - DNA, 25 bp, probe
atacctagactactccactcccata

SEQ ID NO: 53224 - DNA, 25 bp, probe
atacttgttgcttgcttcaatttct

SEQ ID NO: 53225 - DNA, 25 bp, probe
agatacttgttgcttgcttcaattt

SEQ ID NO: 53226 - DNA, 25 bp, probe
gatacttgttgcttgcttcaatttc

SEQ ID NO: 53227 - DNA, 25 bp, probe
ttctgattgacccatacctagacta

SEQ ID NO: 53228 - DNA, 25 bp, probe
gactactccactcccatactaatat

SEQ ID NO: 53229 - DNA, 25 bp, probe
tacttgttgcttgcttcaatttctg

SEQ ID NO: 53230 - DNA, 25 bp, probe
tctgattgacccatacctagactac

SEQ ID NO: 53231 - DNA, 25 bp, probe
gattgacccatacctagactactcc

SEQ ID NO: 53232 - DNA, 25 bp, probe
aatctttatcgtttccaaacagcat

SEQ ID NO: 53233 - DNA, 25 bp, probe
aaatctttatcgtttccaaacagca

SEQ ID NO: 53234 - DNA, 25 bp, probe
ggtttcagaaagcattcaagtacat

SEQ ID NO: 53235 - DNA, 25 bp, probe
atggtttcagaaagcattcaagtac

SEQ ID NO: 53236 - DNA, 25 bp, probe
cctagactactccactcccatacta

SEQ ID NO: 53237 - DNA, 25 bp, probe
tacctagactactccactcccatac

SEQ ID NO: 53238 - DNA, 25 bp, probe
cggtatgcagagctataagatactt

SEQ ID NO: 53239 - DNA, 25 bp, probe
tcagaaagcattcaagtacatagtg

SEQ ID NO: 53240 - DNA, 25 bp, probe
catggtttcagaaagcattcaagta

SEQ ID NO: 53241 - DNA, 25 bp, probe
gttctgattgacccatacctagact

SEQ ID NO: 53242 - DNA, 25 bp, probe
ctgttctgattgacccatacctaga

SEQ ID NO: 53243 - DNA, 25 bp, probe
tgcccttactttcaacaaattctgg

SEQ ID NO: 53244 - DNA, 25 bp, probe
tggtttcagaaagcattcaagtaca

SEQ ID NO: 53245 - DNA, 25 bp, probe
attgacccatacctagactactcca

SEQ ID NO: 53246 - DNA, 25 bp, probe
ctgtgcccttactttcaacaaattc

SEQ ID NO: 53247 - DNA, 25 bp, probe
ctataagttccgttaccaccagcag

SEQ ID NO: 53248 - DNA, 25 bp, probe
cccacaataaagtctgtcaatgttt

SEQ ID NO: 53249 - DNA, 25 bp, probe
cactataagttccgttaccaccagc

SEQ ID NO: 53250 - DNA, 25 bp, probe
gcactataagttccgttaccaccag

SEQ ID NO: 53251 - DNA, 25 bp, probe
cagcactataagttccgttaccacc

SEQ ID NO: 53252 - DNA, 25 bp, probe
ccagcactataagttccgttaccac

SEQ ID NO: 53253 - DNA, 25 bp, probe
acaataaagtctgtcaatgtttgga

SEQ ID NO: 53254 - DNA, 25 bp, probe
cacaataaagtctgtcaatgtttgg

SEQ ID NO: 53255 - DNA, 25 bp, probe
ccacaataaagtctgtcaatgtttg

SEQ ID NO: 53256 - DNA, 25 bp, probe
gactcagacatctctcctttagtgg

SEQ ID NO: 53257 - DNA, 25 bp, probe
actataagttccgttaccaccagca

SEQ ID NO: 53258 - DNA, 25 bp, probe
agcactataagttccgttaccacca

SEQ ID NO: 53259 - DNA, 25 bp, probe
ttgccagcactataagttccgttac

SEQ ID NO: 53260 - DNA, 25 bp, probe
gttgccagcactataagttccgtta

SEQ ID NO: 53261 - DNA, 25 bp, probe
gacatctctcctttagtggaatgag

SEQ ID NO: 53262 - DNA, 25 bp, probe
catctctcctttagtggaatgagtg

SEQ ID NO: 53263 - DNA, 25 bp, probe
agacatctctcctttagtggaatga

SEQ ID NO: 53264 - DNA, 25 bp, probe
cagacatctctcctttagtggaatg

SEQ ID NO: 53265 - DNA, 25 bp, probe
tcagacatctctcctttagtggaat

SEQ ID NO: 53266 - DNA, 25 bp, probe
acatctctcctttagtggaatgagt

SEQ ID NO: 53267 - DNA, 25 bp, probe
cgactcagacatctctcctttagtg

SEQ ID NO: 53268 - DNA, 25 bp, probe
catggatgactttgatgtagtggac

SEQ ID NO: 53269 - DNA, 25 bp, probe
ctcagacatctctcctttagtggaa

SEQ ID NO: 53270 - DNA, 25 bp, probe
atctctcctttagtggaatgagtgg

SEQ ID NO: 53271 - DNA, 25 bp, probe
tataagttccgttaccaccagcagg

SEQ ID NO: 53272 - DNA, 25 bp, probe
atggatgactttgatgtagtggacg

SEQ ID NO: 53273 - DNA, 25 bp, probe
ctatatgttccgcatggatgacttt

SEQ ID NO: 53274 - DNA, 25 bp, probe
ctgtgatgaggaagaggatgaggtg

SEQ ID NO: 53275 - DNA, 25 bp, probe
gctatatgttccgcatggatgactt

SEQ ID NO: 53276 - DNA, 25 bp, probe
tatatgttccgcatggatgactttg

SEQ ID NO: 53277 - DNA, 25 bp, probe
actcagacatctctcctttagtgga

SEQ ID NO: 53278 - DNA, 25 bp, probe
ccgactcagacatctctcctttagt

SEQ ID NO: 53279 - DNA, 25 bp, probe
gcatggatgactttgatgtagtgga

SEQ ID NO: 53280 - DNA, 25 bp, probe
atccccagatgataaagagaaccag

SEQ ID NO: 53281 - DNA, 25 bp, probe
cacctgtgatgaggaagaggatgag

SEQ ID NO: 53282 - DNA, 25 bp, probe
cccgactcagacatctctcctttag

SEQ ID NO: 53283 - DNA, 25 bp, probe
gccagcactataagttccgttacca

SEQ ID NO: 53284 - DNA, 25 bp, probe
tatgttccgcatggatgactttgat

SEQ ID NO: 53285 - DNA, 25 bp, probe
atatgttccgcatggatgactttga

SEQ ID NO: 53286 - DNA, 25 bp, probe
tctctcctttagtggaatgagtggg

SEQ ID NO: 53287 - DNA, 25 bp, probe
ccccacaataaagtctgtcaatgtt

SEQ ID NO: 53288 - DNA, 25 bp, probe
tgccagcactataagttccgttacc

SEQ ID NO: 53289 - DNA, 25 bp, probe
gtggagaactctgatcgagaaagtg

SEQ ID NO: 53290 - DNA, 25 bp, probe
ttccgcatggatgactttgatgtag

SEQ ID NO: 53291 - DNA, 25 bp, probe
tgctattaactggctagaagacatt

SEQ ID NO: 53292 - DNA, 25 bp, probe
ctgctattaactggctagaagacat

SEQ ID NO: 53293 - DNA, 25 bp, probe
gctattaactggctagaagacattc

SEQ ID NO: 53294 - DNA, 25 bp, probe
ttaactggctagaagacattcatct

SEQ ID NO: 53295 - DNA, 25 bp, probe
ctctgctattaactggctagaagac

SEQ ID NO: 53296 - DNA, 25 bp, probe
tctctgctattaactggctagaaga

SEQ ID NO: 53297 - DNA, 25 bp, probe
tctgctattaactggctagaagaca

SEQ ID NO: 53298 - DNA, 25 bp, probe
attaactggctagaagacattcatc

SEQ ID NO: 53299 - DNA, 25 bp, probe
ctattaactggctagaagacattca

SEQ ID NO: 53300 - DNA, 25 bp, probe
atacggttactgacttatgagctac

SEQ ID NO: 53301 - DNA, 25 bp, probe
aatatcatctctagcactgccatcc

SEQ ID NO: 53302 - DNA, 25 bp, probe
acatggcatacggttactgacttat

SEQ ID NO: 53303 - DNA, 25 bp, probe
actggctagaagacattcatctatt

SEQ ID NO: 53304 - DNA, 25 bp, probe
aactggctagaagacattcatctat

SEQ ID NO: 53305 - DNA, 25 bp, probe
atggcatacggttactgacttatga

SEQ ID NO: 53306 - DNA, 25 bp, probe
taactggctagaagacattcatcta

SEQ ID NO: 53307 - DNA, 25 bp, probe
agccgtttagggaaatcttatgtaa

SEQ ID NO: 53308 - DNA, 25 bp, probe
actcaggcatcttctttctctaaat

SEQ ID NO: 53309 - DNA, 25 bp, probe
cataatcaaagacaactcactcagg

SEQ ID NO: 53310 - DNA, 25 bp, probe
aattcactctgctactatctgctgc

SEQ ID NO: 53311 - DNA, 25 bp, probe
cactcaggcatcttctttctctaaa

SEQ ID NO: 53312 - DNA, 25 bp, probe
tgtgccctcatcataaatatcatct

SEQ ID NO: 53313 - DNA, 25 bp, probe
tatttatttctttctatgccagccg

SEQ ID NO: 53314 - DNA, 25 bp, probe
attctttctctgctattaactggct

SEQ ID NO: 53315 - DNA, 25 bp, probe
tatttctttctatgccagccgttta

SEQ ID NO: 53316 - DNA, 25 bp, probe
aggcatcttctttctctaaatacca

SEQ ID NO: 53317 - DNA, 25 bp, probe
cagccgtttagggaaatcttatgta

SEQ ID NO: 53318 - DNA, 25 bp, probe
ttctttctctgctattaactggcta

SEQ ID NO: 53319 - DNA, 25 bp, probe
tattaactggctagaagacattcat

SEQ ID NO: 53320 - DNA, 25 bp, probe
ggcatcttctttctctaaataccag

SEQ ID NO: 53321 - DNA, 25 bp, probe
caggcatcttctttctctaaatacc

SEQ ID NO: 53322 - DNA, 25 bp, probe
gtgccctcatcataaatatcatctc

SEQ ID NO: 53323 - DNA, 25 bp, probe
acataatcaaagacaactcactcag

SEQ ID NO: 53324 - DNA, 25 bp, probe
acacaacataatcaaagacaactca

SEQ ID NO: 53325 - DNA, 25 bp, probe
tgccctcatcataaatatcatctct

SEQ ID NO: 53326 - DNA, 25 bp, probe
aattctttctctgctattaactggc

SEQ ID NO: 53327 - DNA, 25 bp, probe
ataatcaaagacaactcactcaggc

SEQ ID NO: 53328 - DNA, 25 bp, probe
tcaataagatatgtgccctcatcat

SEQ ID NO: 53329 - DNA, 25 bp, probe
atcaataagatatgtgccctcatca

SEQ ID NO: 53330 - DNA, 25 bp, probe
aatattggcatacgttatcagcaac

SEQ ID NO: 53331 - DNA, 25 bp, probe
cttaaagactaacttgaaagcaggc

SEQ ID NO: 53332 - DNA, 25 bp, probe
acaacataatcaaagacaactcact

SEQ ID NO: 53333 - DNA, 25 bp, probe
cacaacataatcaaagacaactcac

SEQ ID NO: 53334 - DNA, 25 bp, probe
atttatttctttctatgccagccgt

SEQ ID NO: 53335 - DNA, 25 bp, probe
atattatgtcattgagtgtcgccaa

SEQ ID NO: 53336 - DNA, 25 bp, probe
ggtgataatatgaggtgttcagtga

SEQ ID NO: 53337 - DNA, 25 bp, probe
tggtgataatatgaggtgttcagtg

SEQ ID NO: 53338 - DNA, 25 bp, probe
atggtgataatatgaggtgttcagt

SEQ ID NO: 53339 - DNA, 25 bp, probe
aatggtgataatatgaggtgttcag

SEQ ID NO: 53340 - DNA, 25 bp, probe
gaatattatgtcattgagtgtcgcc

SEQ ID NO: 53341 - DNA, 25 bp, probe
ataatatgaggtgttcagtgaatgc

SEQ ID NO: 53342 - DNA, 25 bp, probe
aatattatgtcattgagtgtcgcca

SEQ ID NO: 53343 - DNA, 25 bp, probe
agaatattatgtcattgagtgtcgc

SEQ ID NO: 53344 - DNA, 25 bp, probe
taatatgaggtgttcagtgaatgcg

SEQ ID NO: 53345 - DNA, 25 bp, probe
aatacacctccaagctgaatatgaa

SEQ ID NO: 53346 - DNA, 25 bp, probe
caatacacctccaagctgaatatga

SEQ ID NO: 53347 - DNA, 25 bp, probe
gacaatacacctccaagctgaatat

SEQ ID NO: 53348 - DNA, 25 bp, probe
gtgataatatgaggtgttcagtgaa

SEQ ID NO: 53349 - DNA, 25 bp, probe
acaatacacctccaagctgaatatg

SEQ ID NO: 53350 - DNA, 25 bp, probe
agacaatacacctccaagctgaata

SEQ ID NO: 53351 - DNA, 25 bp, probe
aaactttctgtcttctcaaccgtag

SEQ ID NO: 53352 - DNA, 25 bp, probe
tgataatatgaggtgttcagtgaat

SEQ ID NO: 53353 - DNA, 25 bp, probe
caaactttctgtcttctcaaccgta

SEQ ID NO: 53354 - DNA, 25 bp, probe
atatttaacaacccgtgctttgaag

SEQ ID NO: 53355 - DNA, 25 bp, probe
gataatatgaggtgttcagtgaatg

SEQ ID NO: 53356 - DNA, 25 bp, probe
tattatgtcattgagtgtcgccaaa

SEQ ID NO: 53357 - DNA, 25 bp, probe
tttactcttacagggacccaaatac

SEQ ID NO: 53358 - DNA, 25 bp, probe
ttacagggacccaaatacaatagag

SEQ ID NO: 53359 - DNA, 25 bp, probe
cttacagggacccaaatacaataga

SEQ ID NO: 53360 - DNA, 25 bp, probe
tcttacagggacccaaatacaatag

SEQ ID NO: 53361 - DNA, 25 bp, probe
ctcttacagggacccaaatacaata

SEQ ID NO: 53362 - DNA, 25 bp, probe
ctttactcttacagggacccaaata

SEQ ID NO: 53363 - DNA, 25 bp, probe
ctttctgtcttctcaaccgtagatg

SEQ ID NO: 53364 - DNA, 25 bp, probe
tacagggacccaaatacaatagaga

SEQ ID NO: 53365 - DNA, 25 bp, probe
aatatgaggtgttcagtgaatgcga

SEQ ID NO: 53366 - DNA, 25 bp, probe
tactcttacagggacccaaatacaa

SEQ ID NO: 53367 - DNA, 25 bp, probe
ttactcttacagggacccaaataca

SEQ ID NO: 53368 - DNA, 25 bp, probe
tatttaacaacccgtgctttgaaga

SEQ ID NO: 53369 - DNA, 25 bp, probe
actttctgtcttctcaaccgtagat

SEQ ID NO: 53370 - DNA, 25 bp, probe
aactttctgtcttctcaaccgtaga

SEQ ID NO: 53371 - DNA, 25 bp, probe
ccaggaagaggttcattgaaataat

SEQ ID NO: 53372 - DNA, 25 bp, probe
aagaatattatgtcattgagtgtcg

SEQ ID NO: 53373 - DNA, 25 bp, probe
actcttacagggacccaaatacaat

SEQ ID NO: 53374 - DNA, 25 bp, probe
aagccaaactttctgtcttctcaac

SEQ ID NO: 53375 - DNA, 25 bp, probe
atttaacaacccgtgctttgaagaa

SEQ ID NO: 53376 - DNA, 25 bp, probe
ttctgtcttctcaaccgtagatgct

SEQ ID NO: 53377 - DNA, 25 bp, probe
attatgtcattgagtgtcgccaaag

SEQ ID NO: 53378 - DNA, 25 bp, probe
acagggacccaaatacaatagagac

SEQ ID NO: 53379 - DNA, 25 bp, probe
tcttactccttcctctctcctcctc

SEQ ID NO: 53380 - DNA, 25 bp, probe
ctcttactccttcctctctcctcct

SEQ ID NO: 53381 - DNA, 25 bp, probe
tgaagggaaatgagggctttagttt

SEQ ID NO: 53382 - DNA, 25 bp, probe
ttgaactttctctgaagctcctttc

SEQ ID NO: 53383 - DNA, 25 bp, probe
gttgaactttctctgaagctccttt

SEQ ID NO: 53384 - DNA, 25 bp, probe
ttaaaggttgaactttctctgaagc

SEQ ID NO: 53385 - DNA, 25 bp, probe
gtgaagggaaatgagggctttagtt

SEQ ID NO: 53386 - DNA, 25 bp, probe
cttactccttcctctctcctcctcc

SEQ ID NO: 53387 - DNA, 25 bp, probe
cctcttactccttcctctctcctcc

SEQ ID NO: 53388 - DNA, 25 bp, probe
gaagggaaatgagggctttagtttc

SEQ ID NO: 53389 - DNA, 25 bp, probe
taaaggttgaactttctctgaagct

SEQ ID NO: 53390 - DNA, 25 bp, probe
tggtttaaaggttgaactttctctg

SEQ ID NO: 53391 - DNA, 25 bp, probe
gtggtttaaaggttgaactttctct

SEQ ID NO: 53392 - DNA, 25 bp, probe
ggtggtttaaaggttgaactttctc

SEQ ID NO: 53393 - DNA, 25 bp, probe
tactccttcctctctcctcctcctt

SEQ ID NO: 53394 - DNA, 25 bp, probe
ttactccttcctctctcctcctcct

SEQ ID NO: 53395 - DNA, 25 bp, probe
tgaactttctctgaagctcctttcc

SEQ ID NO: 53396 - DNA, 25 bp, probe
ggtttaaaggttgaactttctctga

SEQ ID NO: 53397 - DNA, 25 bp, probe
ctggtggtttaaaggttgaactttc

SEQ ID NO: 53398 - DNA, 25 bp, probe
tggtggtttaaaggttgaactttct

SEQ ID NO: 53399 - DNA, 25 bp, probe
ggttgaactttctctgaagctcctt

SEQ ID NO: 53400 - DNA, 25 bp, probe
aaggttgaactttctctgaagctcc

SEQ ID NO: 53401 - DNA, 25 bp, probe
aaaggttgaactttctctgaagctc

SEQ ID NO: 53402 - DNA, 25 bp, probe
tgtgaagggaaatgagggctttagt

SEQ ID NO: 53403 - DNA, 25 bp, probe
ctccttccccattgctgtaaatatt

SEQ ID NO: 53404 - DNA, 25 bp, probe
cctccttccccattgctgtaaatat

SEQ ID NO: 53405 - DNA, 25 bp, probe
gaactttctctgaagctcctttccc

SEQ ID NO: 53406 - DNA, 25 bp, probe
cccattgctgtaaatatttcaacga

SEQ ID NO: 53407 - DNA, 25 bp, probe
gtttaaaggttgaactttctctgaa

SEQ ID NO: 53408 - DNA, 25 bp, probe
tttaaaggttgaactttctctgaag

SEQ ID NO: 53409 - DNA, 25 bp, probe
gctggtggtttaaaggttgaacttt

SEQ ID NO: 53410 - DNA, 25 bp, probe
ccctcttactccttcctctctcctc

SEQ ID NO: 53411 - DNA, 25 bp, probe
ccattgctgtaaatatttcaacgaa

SEQ ID NO: 53412 - DNA, 25 bp, probe
tcctccttccccattgctgtaaata

SEQ ID NO: 53413 - DNA, 25 bp, probe
gaaatgagggctttagtttcctggg

SEQ ID NO: 53414 - DNA, 25 bp, probe
ggctggtggtttaaaggttgaactt

SEQ ID NO: 53415 - DNA, 25 bp, probe
aggttgaactttctctgaagctcct

SEQ ID NO: 53416 - DNA, 25 bp, probe
ccttccccattgctgtaaatatttc

SEQ ID NO: 53417 - DNA, 25 bp, probe
cttccccattgctgtaaatatttca

SEQ ID NO: 53418 - DNA, 25 bp, probe
tccttccccattgctgtaaatattt

SEQ ID NO: 53419 - DNA, 25 bp, probe
gtggctggtggtttaaaggttgaac

SEQ ID NO: 53420 - DNA, 25 bp, probe
tccccattgctgtaaatatttcaac

SEQ ID NO: 53421 - DNA, 25 bp, probe
ctcctccttccccattgctgtaaat

SEQ ID NO: 53422 - DNA, 25 bp, probe
ttccccattgctgtaaatatttcaa

SEQ ID NO: 53423 - DNA, 25 bp, probe
caccttcactgtcagatccacttaa

SEQ ID NO: 53424 - DNA, 25 bp, probe
ttaaatgctgtccagaggttagaat

SEQ ID NO: 53425 - DNA, 25 bp, probe
cgacgactttgaattgactcctata

SEQ ID NO: 53426 - DNA, 25 bp, probe
taaatgctgtccagaggttagaatg

SEQ ID NO: 53427 - DNA, 25 bp, probe
ttaacggatcatatctcctggatgg

SEQ ID NO: 53428 - DNA, 25 bp, probe
ttcattacagagctgcaagaacatt

SEQ ID NO: 53429 - DNA, 25 bp, probe
gatgccgaagtatacaatgtaccat

SEQ ID NO: 53430 - DNA, 25 bp, probe
ctggatgccgaagtatacaatgtac

SEQ ID NO: 53431 - DNA, 25 bp, probe
ttcactgtcagatccacttaaagag

SEQ ID NO: 53432 - DNA, 25 bp, probe
gaacttgatcctgccacctataaat

SEQ ID NO: 53433 - DNA, 25 bp, probe
gacgactttgaattgactcctatat

SEQ ID NO: 53434 - DNA, 25 bp, probe
cttgatcctgccacctataaatcta

SEQ ID NO: 53435 - DNA, 25 bp, probe
gatcctgccacctataaatctatca

SEQ ID NO: 53436 - DNA, 25 bp, probe
tgatcctgccacctataaatctatc

SEQ ID NO: 53437 - DNA, 25 bp, probe
aacttgatcctgccacctataaatc

SEQ ID NO: 53438 - DNA, 25 bp, probe
aagaacattggcaaatcaaacactg

SEQ ID NO: 53439 - DNA, 25 bp, probe
caagaacattggcaaatcaaacact

SEQ ID NO: 53440 - DNA, 25 bp, probe
ttaacgacgactttgaattgactcc

SEQ ID NO: 53441 - DNA, 25 bp, probe
cttcactgtcagatccacttaaaga

SEQ ID NO: 53442 - DNA, 25 bp, probe
ttgatcctgccacctataaatctat

SEQ ID NO: 53443 - DNA, 25 bp, probe
taacggatcatatctcctggatgga

SEQ ID NO: 53444 - DNA, 25 bp, probe
tctatcagcatttacgaaatccagg

SEQ ID NO: 53445 - DNA, 25 bp, probe
ttaatgaggcaacaacatgaagctg

SEQ ID NO: 53446 - DNA, 25 bp, probe
acttgatcctgccacctataaatct

SEQ ID NO: 53447 - DNA, 25 bp, probe
atctatcagcatttacgaaatccag

SEQ ID NO: 53448 - DNA, 25 bp, probe
tcattacagagctgcaagaacattg

SEQ ID NO: 53449 - DNA, 25 bp, probe
ccttcactgtcagatccacttaaag

SEQ ID NO: 53450 - DNA, 25 bp, probe
tatcagcatttacgaaatccaggag

SEQ ID NO: 53451 - DNA, 25 bp, probe
ctatcagcatttacgaaatccagga

SEQ ID NO: 53452 - DNA, 25 bp, probe
gccacctataaatctatcagcattt

SEQ ID NO: 53453 - DNA, 25 bp, probe
atcctgccacctataaatctatcag

SEQ ID NO: 53454 - DNA, 25 bp, probe
acgacgactttgaattgactcctat

SEQ ID NO: 53455 - DNA, 25 bp, probe
tgacgaatatgtaacatttaacgga

SEQ ID NO: 53456 - DNA, 25 bp, probe
accttcactgtcagatccacttaaa

SEQ ID NO: 53457 - DNA, 25 bp, probe
aatctatcagcatttacgaaatcca

SEQ ID NO: 53458 - DNA, 25 bp, probe
aacgacgactttgaattgactccta

SEQ ID NO: 53459 - DNA, 25 bp, probe
taacgacgactttgaattgactcct

SEQ ID NO: 53460 - DNA, 25 bp, probe
tttaaatgctgtccagaggttagaa

SEQ ID NO: 53461 - DNA, 25 bp, probe
ctttaaatgctgtccagaggttaga

SEQ ID NO: 53462 - DNA, 25 bp, probe
ttggttacaagatgtggatgataaa

SEQ ID NO: 53463 - DNA, 25 bp, probe
ctgtcagatccacttaaagagcttt

SEQ ID NO: 53464 - DNA, 25 bp, probe
ggatgccgaagtatacaatgtacca

SEQ ID NO: 53465 - DNA, 25 bp, probe
tggatgccgaagtatacaatgtacc

SEQ ID NO: 53466 - DNA, 25 bp, probe
tggttacaagatgtggatgataaat

SEQ ID NO: 53467 - DNA, 25 bp, probe
ccttcagatggagacttcattatgt

SEQ ID NO: 53468 - DNA, 25 bp, probe
gccttgttgaattatgttgtgtatg

SEQ ID NO: 53469 - DNA, 25 bp, probe
cttcagatggagacttcattatgtt

SEQ ID NO: 53470 - DNA, 25 bp, probe
ccttgttgaattatgttgtgtatgt

SEQ ID NO: 53471 - DNA, 25 bp, probe
ttcagatggagacttcattatgtta

SEQ ID NO: 53472 - DNA, 25 bp, probe
tcagatggagacttcattatgttaa

SEQ ID NO: 53473 - DNA, 25 bp, probe
ttccttcctttcttctctttcttca

SEQ ID NO: 53474 - DNA, 25 bp, probe
agtttccttcctttcttctctttct

SEQ ID NO: 53475 - DNA, 25 bp, probe
caaacaaacataagagcaaagcaaa

SEQ ID NO: 53476 - DNA, 25 bp, probe
tccttcctttcttctctttcttcat

SEQ ID NO: 53477 - DNA, 25 bp, probe
acaaacaaacataagagcaaagcaa

SEQ ID NO: 53478 - DNA, 25 bp, probe
catatagtctgctttctgttcctcc

SEQ ID NO: 53479 - DNA, 25 bp, probe
gtttccttcctttcttctctttctt

SEQ ID NO: 53480 - DNA, 25 bp, probe
atatagtctgctttctgttcctcca

SEQ ID NO: 53481 - DNA, 25 bp, probe
ccttcctttcttctctttcttcatt

SEQ ID NO: 53482 - DNA, 25 bp, probe
tttccttcctttcttctctttcttc

SEQ ID NO: 53483 - DNA, 25 bp, probe
ctaccagtaagagagcaaagtttcc

SEQ ID NO: 53484 - DNA, 25 bp, probe
tctaccagtaagagagcaaagtttc

SEQ ID NO: 53485 - DNA, 25 bp, probe
cccttcagatggagacttcattatg

SEQ ID NO: 53486 - DNA, 25 bp, probe
cacaaacaaacataagagcaaagca

SEQ ID NO: 53487 - DNA, 25 bp, probe
gtctaccagtaagagagcaaagttt

SEQ ID NO: 53488 - DNA, 25 bp, probe
aagtttccttcctttcttctctttc

SEQ ID NO: 53489 - DNA, 25 bp, probe
gtaagagagcaaagtttccttcctt

SEQ ID NO: 53490 - DNA, 25 bp, probe
taccagtaagagagcaaagtttcct

SEQ ID NO: 53491 - DNA, 25 bp, probe
tttgccaaccaataaacaactgatt

SEQ ID NO: 53492 - DNA, 25 bp, probe
gtacagatactagcattgcacatat

SEQ ID NO: 53493 - DNA, 25 bp, probe
aaattagacttccttccctcactat

SEQ ID NO: 53494 - DNA, 25 bp, probe
cgtaagcattggaaggtcaaattat

SEQ ID NO: 53495 - DNA, 25 bp, probe
tcgtaagcattggaaggtcaaatta

SEQ ID NO: 53496 - DNA, 25 bp, probe
caagtttgtctaccagtaagagagc

SEQ ID NO: 53497 - DNA, 25 bp, probe
gcaagtttgtctaccagtaagagag

SEQ ID NO: 53498 - DNA, 25 bp, probe
acagatactagcattgcacatatag

SEQ ID NO: 53499 - DNA, 25 bp, probe
tgtctaccagtaagagagcaaagtt

SEQ ID NO: 53500 - DNA, 25 bp, probe
aagtttgtctaccagtaagagagca

SEQ ID NO: 53501 - DNA, 25 bp, probe
cagtaagagagcaaagtttccttcc

SEQ ID NO: 53502 - DNA, 25 bp, probe
ccagtaagagagcaaagtttccttc

SEQ ID NO: 53503 - DNA, 25 bp, probe
ttgtctaccagtaagagagcaaagt

SEQ ID NO: 53504 - DNA, 25 bp, probe
agtttgtctaccagtaagagagcaa

SEQ ID NO: 53505 - DNA, 25 bp, probe
agtaagagagcaaagtttccttcct

SEQ ID NO: 53506 - DNA, 25 bp, probe
acatatagtctgctttctgttcctc

SEQ ID NO: 53507 - DNA, 25 bp, probe
tgtctgaaattagtaacaatgctgc

SEQ ID NO: 53508 - DNA, 25 bp, probe
cacatatagtctgctttctgttcct

SEQ ID NO: 53509 - DNA, 25 bp, probe
tgaaacttgtttgccaaccaataaa

SEQ ID NO: 53510 - DNA, 25 bp, probe
aagttggatgacctcattactaata

SEQ ID NO: 53511 - DNA, 25 bp, probe
gtgaagacgaatatgatctgtgctg

SEQ ID NO: 53512 - DNA, 25 bp, probe
tgaagacgaatatgatctgtgctgg

SEQ ID NO: 53513 - DNA, 25 bp, probe
ccaactacaacgactggatcaattc

SEQ ID NO: 53514 - DNA, 25 bp, probe
ctactactacaagccctccatcttc

SEQ ID NO: 53515 - DNA, 25 bp, probe
gtcagtgtctctaagattgtggtgc

SEQ ID NO: 53516 - DNA, 25 bp, probe
caactactactacaagccctccatc

SEQ ID NO: 53517 - DNA, 25 bp, probe
aactactactacaagccctccatct

SEQ ID NO: 53518 - DNA, 25 bp, probe
tactactacaagccctccatcttca

SEQ ID NO: 53519 - DNA, 25 bp, probe
actactactacaagccctccatctt

SEQ ID NO: 53520 - DNA, 25 bp, probe
caactacaacgactggatcaattcg

SEQ ID NO: 53521 - DNA, 25 bp, probe
tggaaaggtcacagaaggaaaataa

SEQ ID NO: 53522 - DNA, 25 bp, probe
ttggaaaggtcacagaaggaaaata

SEQ ID NO: 53523 - DNA, 25 bp, probe
ttcagacttggaaaggtcacagaag

SEQ ID NO: 53524 - DNA, 25 bp, probe
ggaaaggtcacagaaggaaaataat

SEQ ID NO: 53525 - DNA, 25 bp, probe
gacttggaaaggtcacagaaggaaa

SEQ ID NO: 53526 - DNA, 25 bp, probe
accgtgaagacgaatatgatctgtg

SEQ ID NO: 53527 - DNA, 25 bp, probe
caccgtgaagacgaatatgatctgt

SEQ ID NO: 53528 - DNA, 25 bp, probe
aactacaacgactggatcaattcgg

SEQ ID NO: 53529 - DNA, 25 bp, probe
actactacaagccctccatcttcac

SEQ ID NO: 53530 - DNA, 25 bp, probe
tcagtgtctctaagattgtggtgca

SEQ ID NO: 53531 - DNA, 25 bp, probe
cttggaaaggtcacagaaggaaaat

SEQ ID NO: 53532 - DNA, 25 bp, probe
tttcagacttggaaaggtcacagaa

SEQ ID NO: 53533 - DNA, 25 bp, probe
gaagacgaatatgatctgtgctggg

SEQ ID NO: 53534 - DNA, 25 bp, probe
cgtgaagacgaatatgatctgtgct

SEQ ID NO: 53535 - DNA, 25 bp, probe
aataactaaccaaaagaagtccctg

SEQ ID NO: 53536 - DNA, 25 bp, probe
gcaaataactaaccaaaagaagtcc

SEQ ID NO: 53537 - DNA, 25 bp, probe
gcaactactactacaagccctccat

SEQ ID NO: 53538 - DNA, 25 bp, probe
caaataactaaccaaaagaagtccc

SEQ ID NO: 53539 - DNA, 25 bp, probe
aaataactaaccaaaagaagtccct

SEQ ID NO: 53540 - DNA, 25 bp, probe
ctacaacgactggatcaattcggtg

SEQ ID NO: 53541 - DNA, 25 bp, probe
agacttggaaaggtcacagaaggaa

SEQ ID NO: 53542 - DNA, 25 bp, probe
gtttcagacttggaaaggtcacaga

SEQ ID NO: 53543 - DNA, 25 bp, probe
gactgtttcagacttggaaaggtca

SEQ ID NO: 53544 - DNA, 25 bp, probe
aacgactggatcaattcggtgattg

SEQ ID NO: 53545 - DNA, 25 bp, probe
caacgactggatcaattcggtgatt

SEQ ID NO: 53546 - DNA, 25 bp, probe
acttggaaaggtcacagaaggaaaa

SEQ ID NO: 53547 - DNA, 25 bp, probe
actgtttcagacttggaaaggtcac

SEQ ID NO: 53548 - DNA, 25 bp, probe
ataactaaccaaaagaagtccctgg

SEQ ID NO: 53549 - DNA, 25 bp, probe
tgtttcagacttggaaaggtcacag

SEQ ID NO: 53550 - DNA, 25 bp, probe
ctgtttcagacttggaaaggtcaca

SEQ ID NO: 53551 - DNA, 25 bp, probe
tacaacgactggatcaattcggtga

SEQ ID NO: 53552 - DNA, 25 bp, probe
actacaacgactggatcaattcggt

SEQ ID NO: 53553 - DNA, 25 bp, probe
ccgtgaagacgaatatgatctgtgc

SEQ ID NO: 53554 - DNA, 25 bp, probe
gcaccgtgaagacgaatatgatctg

SEQ ID NO: 53555 - DNA, 25 bp, probe
tattcttcctcctcttcttcctctt

SEQ ID NO: 53556 - DNA, 25 bp, probe
ttattcttcctcctcttcttcctct

SEQ ID NO: 53557 - DNA, 25 bp, probe
cttattcttcctcctcttcttcctc

SEQ ID NO: 53558 - DNA, 25 bp, probe
tcttattcttcctcctcttcttcct

SEQ ID NO: 53559 - DNA, 25 bp, probe
cctcttcttattcttcctcctcttc

SEQ ID NO: 53560 - DNA, 25 bp, probe
cttcttcatcttcttcctcttcctc

SEQ ID NO: 53561 - DNA, 25 bp, probe
ctcttcttcatcttcttcctcttcc

SEQ ID NO: 53562 - DNA, 25 bp, probe
cctcttcttcatcttcttcctcttc

SEQ ID NO: 53563 - DNA, 25 bp, probe
cttcctcttcttcatcttcttcctc

SEQ ID NO: 53564 - DNA, 25 bp, probe
ctcttcctcttcttcatcttcttcc

SEQ ID NO: 53565 - DNA, 25 bp, probe
cctcttcctcttcttcatcttcttc

SEQ ID NO: 53566 - DNA, 25 bp, probe
cttcctcttcctcttcttcatcttc

SEQ ID NO: 53567 - DNA, 25 bp, probe
cttcttcctcttcctcttcttcatc

SEQ ID NO: 53568 - DNA, 25 bp, probe
ttcttattcttcctcctcttcttcc

SEQ ID NO: 53569 - DNA, 25 bp, probe
tcttcttcatcttcttcctcttcct

SEQ ID NO: 53570 - DNA, 25 bp, probe
tcctcttcttcatcttcttcctctt

SEQ ID NO: 53571 - DNA, 25 bp, probe
ttcctcttcttcatcttcttcctct

SEQ ID NO: 53572 - DNA, 25 bp, probe
tcttcctcttcttcatcttcttcct

SEQ ID NO: 53573 - DNA, 25 bp, probe
tcctcttcctcttcttcatcttctt

SEQ ID NO: 53574 - DNA, 25 bp, probe
ttcctcttcctcttcttcatcttct

SEQ ID NO: 53575 - DNA, 25 bp, probe
tcttcctcttcctcttcttcatctt

SEQ ID NO: 53576 - DNA, 25 bp, probe
ttcttcctcttcctcttcttcatct

SEQ ID NO: 53577 - DNA, 25 bp, probe
tcttcttcctcttcctcttcttcat

SEQ ID NO: 53578 - DNA, 25 bp, probe
ctcttcttattcttcctcctcttct

SEQ ID NO: 53579 - DNA, 25 bp, probe
ctcttcttcctcttcctcttcttca

SEQ ID NO: 53580 - DNA, 25 bp, probe
attcttcctcctcttcttcctcttc

SEQ ID NO: 53581 - DNA, 25 bp, probe
tcttcttattcttcctcctcttctt

SEQ ID NO: 53582 - DNA, 25 bp, probe
cttcttattcttcctcctcttcttc

SEQ ID NO: 53583 - DNA, 25 bp, probe
tagatggttcaactgaatgctgtaa

SEQ ID NO: 53584 - DNA, 25 bp, probe
ttcttcatcttcttcctcttcctcg

SEQ ID NO: 53585 - DNA, 25 bp, probe
cctcttcttcctcttcctcttcttc

SEQ ID NO: 53586 - DNA, 25 bp, probe
cttcttcctcttcctcctcttcttc

SEQ ID NO: 53587 - DNA, 25 bp, probe
ccacctcagattgatatgttatacg

SEQ ID NO: 53588 - DNA, 25 bp, probe
ctagatggttcaactgaatgctgta

SEQ ID NO: 53589 - DNA, 25 bp, probe
tcctcttcttcctcttcctcttctt

SEQ ID NO: 53590 - DNA, 25 bp, probe
tcttcttcctcttcctcctcttctt

SEQ ID NO: 53591 - DNA, 25 bp, probe
ggttcaactgaatgctgtaacaatc

SEQ ID NO: 53592 - DNA, 25 bp, probe
ttcaactgaatgctgtaacaatcac

SEQ ID NO: 53593 - DNA, 25 bp, probe
gttcaactgaatgctgtaacaatca

SEQ ID NO: 53594 - DNA, 25 bp, probe
aacgactagatggttcaactgaatg

SEQ ID NO: 53595 - DNA, 25 bp, probe
tcaactgaatgctgtaacaatcaca

SEQ ID NO: 53596 - DNA, 25 bp, probe
tggttcaactgaatgctgtaacaat

SEQ ID NO: 53597 - DNA, 25 bp, probe
atggttcaactgaatgctgtaacaa

SEQ ID NO: 53598 - DNA, 25 bp, probe
agatggttcaactgaatgctgtaac

SEQ ID NO: 53599 - DNA, 25 bp, probe
cacctatgtcttcttcgtcttcttc

SEQ ID NO: 53600 - DNA, 25 bp, probe
tcacctatgtcttcttcgtcttctt

SEQ ID NO: 53601 - DNA, 25 bp, probe
ctatgtcttcttcgtcttcttcgtg

SEQ ID NO: 53602 - DNA, 25 bp, probe
gcctggatcaagatattcaagtaca

SEQ ID NO: 53603 - DNA, 25 bp, probe
ttgtcacctatgtcttcttcgtctt

SEQ ID NO: 53604 - DNA, 25 bp, probe
gtcacctatgtcttcttcgtcttct

SEQ ID NO: 53605 - DNA, 25 bp, probe
cagacacagtacaacaacatgaatg

SEQ ID NO: 53606 - DNA, 25 bp, probe
tgtcacctatgtcttcttcgtcttc

SEQ ID NO: 53607 - DNA, 25 bp, probe
tcatcaatgacacatattcagaggt

SEQ ID NO: 53608 - DNA, 25 bp, probe
gccatcatcaatgacacatattcag

SEQ ID NO: 53609 - DNA, 25 bp, probe
cgcctggatcaagatattcaagtac

SEQ ID NO: 53610 - DNA, 25 bp, probe
tcgcctggatcaagatattcaagta

SEQ ID NO: 53611 - DNA, 25 bp, probe
cctatgtcttcttcgtcttcttcgt

SEQ ID NO: 53612 - DNA, 25 bp, probe
acctatgtcttcttcgtcttcttcg

SEQ ID NO: 53613 - DNA, 25 bp, probe
catcaatgacacatattcagaggtc

SEQ ID NO: 53614 - DNA, 25 bp, probe
cacatattcagaggtcaaggaggag

SEQ ID NO: 53615 - DNA, 25 bp, probe
ccatcatcaatgacacatattcaga

SEQ ID NO: 53616 - DNA, 25 bp, probe
cttcgcctggatcaagatattcaag

SEQ ID NO: 53617 - DNA, 25 bp, probe
atcatcaatgacacatattcagagg

SEQ ID NO: 53618 - DNA, 25 bp, probe
cctggatcaagatattcaagtacat

SEQ ID NO: 53619 - DNA, 25 bp, probe
ttcgcctggatcaagatattcaagt

SEQ ID NO: 53620 - DNA, 25 bp, probe
acacatattcagaggtcaaggagga

SEQ ID NO: 53621 - DNA, 25 bp, probe
gacacagtacaacaacatgaatgct

SEQ ID NO: 53622 - DNA, 25 bp, probe
agacacagtacaacaacatgaatgc

SEQ ID NO: 53623 - DNA, 25 bp, probe
gcagacacagtacaacaacatgaat

SEQ ID NO: 53624 - DNA, 25 bp, probe
ggttctgacattattcttccataag

SEQ ID NO: 53625 - DNA, 25 bp, probe
ctacaacaagaccctactaagactg

SEQ ID NO: 53626 - DNA, 25 bp, probe
cctactttgtcacctatgtcttctt

SEQ ID NO: 53627 - DNA, 25 bp, probe
tactttgtcacctatgtcttcttcg

SEQ ID NO: 53628 - DNA, 25 bp, probe
gatcaagatattcaagtacatcagc

SEQ ID NO: 53629 - DNA, 25 bp, probe
gtacaacaacatgaatgctgtcaac

SEQ ID NO: 53630 - DNA, 25 bp, probe
agtacaacaacatgaatgctgtcaa

SEQ ID NO: 53631 - DNA, 25 bp, probe
tattcaagtacatcagcttcaacaa

SEQ ID NO: 53632 - DNA, 25 bp, probe
catcatcaatgacacatattcagag

SEQ ID NO: 53633 - DNA, 25 bp, probe
tatgtcttcttcgtcttcttcgtgc

SEQ ID NO: 53634 - DNA, 25 bp, probe
attctacatgctcacaaggagagtt

SEQ ID NO: 53635 - DNA, 25 bp, probe
aattctacatgctcacaaggagagt

SEQ ID NO: 53636 - DNA, 25 bp, probe
atattcaagtacatcagcttcaaca

SEQ ID NO: 53637 - DNA, 25 bp, probe
gtttgacagagatgggaatcgtatt

SEQ ID NO: 53638 - DNA, 25 bp, probe
ctactttgtcacctatgtcttcttc

SEQ ID NO: 53639 - DNA, 25 bp, probe
tggatcaagatattcaagtacatca

SEQ ID NO: 53640 - DNA, 25 bp, probe
catgaatgctgtcaacctcttcttc

SEQ ID NO: 53641 - DNA, 25 bp, probe
ctttgtcacctatgtcttcttcgtc

SEQ ID NO: 53642 - DNA, 25 bp, probe
gacacatattcagaggtcaaggagg

SEQ ID NO: 53643 - DNA, 25 bp, probe
gccattagaagaacattacacaaca

SEQ ID NO: 53644 - DNA, 25 bp, probe
tgccattagaagaacattacacaac

SEQ ID NO: 53645 - DNA, 25 bp, probe
gaacattacacaacagatgccatag

SEQ ID NO: 53646 - DNA, 25 bp, probe
aacattacacaacagatgccataga

SEQ ID NO: 53647 - DNA, 25 bp, probe
agaacattacacaacagatgccata

SEQ ID NO: 53648 - DNA, 25 bp, probe
tagaagaacattacacaacagatgc

SEQ ID NO: 53649 - DNA, 25 bp, probe
acattacacaacagatgccatagag

SEQ ID NO: 53650 - DNA, 25 bp, probe
gaagttgtagtcaatgcctatgaac

SEQ ID NO: 53651 - DNA, 25 bp, probe
tgaagttgtagtcaatgcctatgaa

SEQ ID NO: 53652 - DNA, 25 bp, probe
aagaacattacacaacagatgccat

SEQ ID NO: 53653 - DNA, 25 bp, probe
tagtcaatgcctatgaacacatcag

SEQ ID NO: 53654 - DNA, 25 bp, probe
gtagtcaatgcctatgaacacatca

SEQ ID NO: 53655 - DNA, 25 bp, probe
agaagaacattacacaacagatgcc

SEQ ID NO: 53656 - DNA, 25 bp, probe
ccattagaagaacattacacaacag

SEQ ID NO: 53657 - DNA, 25 bp, probe
aagttgtagtcaatgcctatgaaca

SEQ ID NO: 53658 - DNA, 25 bp, probe
gtcaatgcctatgaacacatcagat

SEQ ID NO: 53659 - DNA, 25 bp, probe
ttgtagtcaatgcctatgaacacat

SEQ ID NO: 53660 - DNA, 25 bp, probe
gaagaacattacacaacagatgcca

SEQ ID NO: 53661 - DNA, 25 bp, probe
tgtagtcaatgcctatgaacacatc

SEQ ID NO: 53662 - DNA, 25 bp, probe
agttgtagtcaatgcctatgaacac

SEQ ID NO: 53663 - DNA, 25 bp, probe
tatgaacacatcagatggaacacaa

SEQ ID NO: 53664 - DNA, 25 bp, probe
cattacacaacagatgccatagagc

SEQ ID NO: 53665 - DNA, 25 bp, probe
gtgccattagaagaacattacacaa

SEQ ID NO: 53666 - DNA, 25 bp, probe
gttgtagtcaatgcctatgaacaca

SEQ ID NO: 53667 - DNA, 25 bp, probe
ctatgaacacatcagatggaacaca

SEQ ID NO: 53668 - DNA, 25 bp, probe
tcaatgcctatgaacacatcagatg

SEQ ID NO: 53669 - DNA, 25 bp, probe
agtcaatgcctatgaacacatcaga

SEQ ID NO: 53670 - DNA, 25 bp, probe
cctatgaacacatcagatggaacac

SEQ ID NO: 53671 - DNA, 25 bp, probe
ttatcgagatgtgccattagaagaa

SEQ ID NO: 53672 - DNA, 25 bp, probe
cttatcgagatgtgccattagaaga

SEQ ID NO: 53673 - DNA, 25 bp, probe
tatcgagatgtgccattagaagaac

SEQ ID NO: 53674 - DNA, 25 bp, probe
acttatcgagatgtgccattagaag

SEQ ID NO: 53675 - DNA, 25 bp, probe
cattagaagaacattacacaacaga

SEQ ID NO: 53676 - DNA, 25 bp, probe
ctgtaactctccaaggactctcatg

SEQ ID NO: 53677 - DNA, 25 bp, probe
gatgacttggagaaatactgggatt

SEQ ID NO: 53678 - DNA, 25 bp, probe
aatataccctccacagttccataag

SEQ ID NO: 53679 - DNA, 25 bp, probe
ttagaagaacattacacaacagatg

SEQ ID NO: 53680 - DNA, 25 bp, probe
tccacagttccataaggtgatacag

SEQ ID NO: 53681 - DNA, 25 bp, probe
ctccacagttccataaggtgataca

SEQ ID NO: 53682 - DNA, 25 bp, probe
atgcctatgaacacatcagatggaa

SEQ ID NO: 53683 - DNA, 25 bp, probe
aatgcctatgaacacatcagatgga

SEQ ID NO: 53684 - DNA, 25 bp, probe
caatgcctatgaacacatcagatgg

SEQ ID NO: 53685 - DNA, 25 bp, probe
gatgatgacttggagaaatactggg

SEQ ID NO: 53686 - DNA, 25 bp, probe
gaatataccctccacagttccataa

SEQ ID NO: 53687 - DNA, 25 bp, probe
acatgacctctccctgctttgtaaa

SEQ ID NO: 53688 - DNA, 25 bp, probe
aacatgacctctccctgctttgtaa

SEQ ID NO: 53689 - DNA, 25 bp, probe
ctagtgagggactgtgttgactgac

SEQ ID NO: 53690 - DNA, 25 bp, probe
catgacctctccctgctttgtaaaa

SEQ ID NO: 53691 - DNA, 25 bp, probe
caacatgacctctccctgctttgta

SEQ ID NO: 53692 - DNA, 25 bp, probe
caccaataccaagaagttatgagga

SEQ ID NO: 53693 - DNA, 25 bp, probe
aagacatcaccaataccaagaagtt

SEQ ID NO: 53694 - DNA, 25 bp, probe
accaataccaagaagttatgaggaa

SEQ ID NO: 53695 - DNA, 25 bp, probe
agacatcaccaataccaagaagtta

SEQ ID NO: 53696 - DNA, 25 bp, probe
agaagacatcaccaataccaagaag

SEQ ID NO: 53697 - DNA, 25 bp, probe
gagaagacatcaccaataccaagaa

SEQ ID NO: 53698 - DNA, 25 bp, probe
aatgtcatctctctggttgttctac

SEQ ID NO: 53699 - DNA, 25 bp, probe
gaagacatcaccaataccaagaagt

SEQ ID NO: 53700 - DNA, 25 bp, probe
agattgtgatacttgaaggaggaag

SEQ ID NO: 53701 - DNA, 25 bp, probe
atgtcatctctctggttgttctact

SEQ ID NO: 53702 - DNA, 25 bp, probe
aagattgtgatacttgaaggaggaa

SEQ ID NO: 53703 - DNA, 25 bp, probe
gagtgatagcgaaggtaatagcaag

SEQ ID NO: 53704 - DNA, 25 bp, probe
gacatcaccaataccaagaagttat

SEQ ID NO: 53705 - DNA, 25 bp, probe
caataccaagaagttatgaggaacc

SEQ ID NO: 53706 - DNA, 25 bp, probe
ccaataccaagaagttatgaggaac

SEQ ID NO: 53707 - DNA, 25 bp, probe
acatcaccaataccaagaagttatg

SEQ ID NO: 53708 - DNA, 25 bp, probe
caatgtcatctctctggttgttcta

SEQ ID NO: 53709 - DNA, 25 bp, probe
agagtgatagcgaaggtaatagcaa

SEQ ID NO: 53710 - DNA, 25 bp, probe
aagagtgatagcgaaggtaatagca

SEQ ID NO: 53711 - DNA, 25 bp, probe
ataccaagaagttatgaggaacctg

SEQ ID NO: 53712 - DNA, 25 bp, probe
tcaccaataccaagaagttatgagg

SEQ ID NO: 53713 - DNA, 25 bp, probe
gtcatctctctggttgttctactca

SEQ ID NO: 53714 - DNA, 25 bp, probe
tgtcatctctctggttgttctactc

SEQ ID NO: 53715 - DNA, 25 bp, probe
aataccaagaagttatgaggaacct

SEQ ID NO: 53716 - DNA, 25 bp, probe
atgtgtgttagtagaccatagagaa

SEQ ID NO: 53717 - DNA, 25 bp, probe
aatgtgtgttagtagaccatagaga

SEQ ID NO: 53718 - DNA, 25 bp, probe
caatgtgtgttagtagaccatagag

SEQ ID NO: 53719 - DNA, 25 bp, probe
taattcttaccaactgattgctgac

SEQ ID NO: 53720 - DNA, 25 bp, probe
tcatctctctggttgttctactcaa

SEQ ID NO: 53721 - DNA, 25 bp, probe
ttgagaagacatcaccaataccaag

SEQ ID NO: 53722 - DNA, 25 bp, probe
cttgagaagacatcaccaataccaa

SEQ ID NO: 53723 - DNA, 25 bp, probe
aacttgagaagacatcaccaatacc

SEQ ID NO: 53724 - DNA, 25 bp, probe
gattgtgatacttgaaggaggaagc

SEQ ID NO: 53725 - DNA, 25 bp, probe
atagcgaaggtaatagcaaggacaa

SEQ ID NO: 53726 - DNA, 25 bp, probe
catcaccaataccaagaagttatga

SEQ ID NO: 53727 - DNA, 25 bp, probe
gataacttgagaagacatcaccaat

SEQ ID NO: 53728 - DNA, 25 bp, probe
gctgctgataacttgagaagacatc

SEQ ID NO: 53729 - DNA, 25 bp, probe
acaatgtgtgttagtagaccataga

SEQ ID NO: 53730 - DNA, 25 bp, probe
atcaccaataccaagaagttatgag

SEQ ID NO: 53731 - DNA, 25 bp, probe
tgagaagacatcaccaataccaaga

SEQ ID NO: 53732 - DNA, 25 bp, probe
taacttgagaagacatcaccaatac

SEQ ID NO: 53733 - DNA, 25 bp, probe
aattcttaccaactgattgctgacc

SEQ ID NO: 53734 - DNA, 25 bp, probe
ataattcttaccaactgattgctga

SEQ ID NO: 53735 - DNA, 25 bp, probe
aagaagttatgaggaacctggtgaa

SEQ ID NO: 53736 - DNA, 25 bp, probe
cttgctctaatgtctatggtgagaa

SEQ ID NO: 53737 - DNA, 25 bp, probe
ttgctctaatgtctatggtgagaac

SEQ ID NO: 53738 - DNA, 25 bp, probe
ctcttgctctaatgtctatggtgag

SEQ ID NO: 53739 - DNA, 25 bp, probe
tcttgctctaatgtctatggtgaga

SEQ ID NO: 53740 - DNA, 25 bp, probe
gctcttgctctaatgtctatggtga

SEQ ID NO: 53741 - DNA, 25 bp, probe
tgctctaatgtctatggtgagaaca

SEQ ID NO: 53742 - DNA, 25 bp, probe
tctaatgtctatggtgagaacacag

SEQ ID NO: 53743 - DNA, 25 bp, probe
ctctaatgtctatggtgagaacaca

SEQ ID NO: 53744 - DNA, 25 bp, probe
cagatactctaatcactacattgct

SEQ ID NO: 53745 - DNA, 25 bp, probe
ctaatgtctatggtgagaacacagg

SEQ ID NO: 53746 - DNA, 25 bp, probe
gctctaatgtctatggtgagaacac

SEQ ID NO: 53747 - DNA, 25 bp, probe
taacctgacggcatggaatgtataa

SEQ ID NO: 53748 - DNA, 25 bp, probe
ttaacctgacggcatggaatgtata

SEQ ID NO: 53749 - DNA, 25 bp, probe
cgtaataccagaccaacctcaatcc

SEQ ID NO: 53750 - DNA, 25 bp, probe
agatactctaatcactacattgctt

SEQ ID NO: 53751 - DNA, 25 bp, probe
aactacccataagcctttaaccttt

SEQ ID NO: 53752 - DNA, 25 bp, probe
aaactacccataagcctttaacctt

SEQ ID NO: 53753 - DNA, 25 bp, probe
cttcccttgtagagccatagaaata

SEQ ID NO: 53754 - DNA, 25 bp, probe
ggctcttgctctaatgtctatggtg

SEQ ID NO: 53755 - DNA, 25 bp, probe
actacccataagcctttaaccttta

SEQ ID NO: 53756 - DNA, 25 bp, probe
ttcccttgtagagccatagaaatat

SEQ ID NO: 53757 - DNA, 25 bp, probe
atggaatgtataaatgagggtgggt

SEQ ID NO: 53758 - DNA, 25 bp, probe
tgtatctccaaatcctctcccaatt

SEQ ID NO: 53759 - DNA, 25 bp, probe
ctgagcaagtcattcctttgttatt

SEQ ID NO: 53760 - DNA, 25 bp, probe
gcaagtcattcctttgttatttagc

SEQ ID NO: 53761 - DNA, 25 bp, probe
taatgtctatggtgagaacacaggc

SEQ ID NO: 53762 - DNA, 25 bp, probe
tgagcaagtcattcctttgttattt

SEQ ID NO: 53763 - DNA, 25 bp, probe
gcaaatagtattaggctcactggaa

SEQ ID NO: 53764 - DNA, 25 bp, probe
gtgtatctccaaatcctctcccaat

SEQ ID NO: 53765 - DNA, 25 bp, probe
gtatctccaaatcctctcccaattt

SEQ ID NO: 53766 - DNA, 25 bp, probe
ctacccataagcctttaacctttaa

SEQ ID NO: 53767 - DNA, 25 bp, probe
tgcagatactctaatcactacattg

SEQ ID NO: 53768 - DNA, 25 bp, probe
cctgagcaagtcattcctttgttat

SEQ ID NO: 53769 - DNA, 25 bp, probe
tggaatgtataaatgagggtgggtc

SEQ ID NO: 53770 - DNA, 25 bp, probe
ccttcccttgtagagccatagaaat

SEQ ID NO: 53771 - DNA, 25 bp, probe
caaatagtattaggctcactggaaa

SEQ ID NO: 53772 - DNA, 25 bp, probe
gcagatactctaatcactacattgc

SEQ ID NO: 53773 - DNA, 25 bp, probe
acgtaataccagaccaacctcaatc

SEQ ID NO: 53774 - DNA, 25 bp, probe
caagtcattcctttgttatttagca

SEQ ID NO: 53775 - DNA, 25 bp, probe
catggaatgtataaatgagggtggg

SEQ ID NO: 53776 - DNA, 25 bp, probe
tgacggcatggaatgtataaatgag

SEQ ID NO: 53777 - DNA, 25 bp, probe
ctgacggcatggaatgtataaatga

SEQ ID NO: 53778 - DNA, 25 bp, probe
tcccttgtagagccatagaaatatt

SEQ ID NO: 53779 - DNA, 25 bp, probe
cattcctttgttatttagcatttcg

SEQ ID NO: 53780 - DNA, 25 bp, probe
ctaactcaagacaatactcagcaga

SEQ ID NO: 53781 - DNA, 25 bp, probe
aactaactcaagacaatactcagca

SEQ ID NO: 53782 - DNA, 25 bp, probe
actaactcaagacaatactcagcag

SEQ ID NO: 53783 - DNA, 25 bp, probe
gaactaactcaagacaatactcagc

SEQ ID NO: 53784 - DNA, 25 bp, probe
ttagaataccgcaccataatcactg

SEQ ID NO: 53785 - DNA, 25 bp, probe
ataatcactgaagtccttggagaac

SEQ ID NO: 53786 - DNA, 25 bp, probe
cataatcactgaagtccttggagaa

SEQ ID NO: 53787 - DNA, 25 bp, probe
ctctctctagcatactcttcctcta

SEQ ID NO: 53788 - DNA, 25 bp, probe
tctctctagcatactcttcctctat

SEQ ID NO: 53789 - DNA, 25 bp, probe
tagaataccgcaccataatcactga

SEQ ID NO: 53790 - DNA, 25 bp, probe
taactcaagacaatactcagcagag

SEQ ID NO: 53791 - DNA, 25 bp, probe
ttcaccttcatagcatactccttcc

SEQ ID NO: 53792 - DNA, 25 bp, probe
agaactaactcaagacaatactcag

SEQ ID NO: 53793 - DNA, 25 bp, probe
gaataccgcaccataatcactgaag

SEQ ID NO: 53794 - DNA, 25 bp, probe
ctctctagcatactcttcctctatt

SEQ ID NO: 53795 - DNA, 25 bp, probe
taatcactgaagtccttggagaact

SEQ ID NO: 53796 - DNA, 25 bp, probe
ggagaactaactcaagacaatactc

SEQ ID NO: 53797 - DNA, 25 bp, probe
aactcaagacaatactcagcagaga

SEQ ID NO: 53798 - DNA, 25 bp, probe
agaataccgcaccataatcactgaa

SEQ ID NO: 53799 - DNA, 25 bp, probe
aataccgcaccataatcactgaagt

SEQ ID NO: 53800 - DNA, 25 bp, probe
actcaagacaatactcagcagagag

SEQ ID NO: 53801 - DNA, 25 bp, probe
gagaactaactcaagacaatactca

SEQ ID NO: 53802 - DNA, 25 bp, probe
ataccgcaccataatcactgaagtc

SEQ ID NO: 53803 - DNA, 25 bp, probe
tttagaataccgcaccataatcact

SEQ ID NO: 53804 - DNA, 25 bp, probe
ctttagaataccgcaccataatcac

SEQ ID NO: 53805 - DNA, 25 bp, probe
atccgaatgagtatgcctttagaat

SEQ ID NO: 53806 - DNA, 25 bp, probe
tttcaccttcatagcatactccttc

SEQ ID NO: 53807 - DNA, 25 bp, probe
ttaagcctactacagactgttagag

SEQ ID NO: 53808 - DNA, 25 bp, probe
tccgaatgagtatgcctttagaata

SEQ ID NO: 53809 - DNA, 25 bp, probe
catactcttcctctatttggctcac

SEQ ID NO: 53810 - DNA, 25 bp, probe
cctttagaataccgcaccataatca

SEQ ID NO: 53811 - DNA, 25 bp, probe
aagacaatactcagcagagagcatc

SEQ ID NO: 53812 - DNA, 25 bp, probe
taagcctactacagactgttagagg

SEQ ID NO: 53813 - DNA, 25 bp, probe
aatcactgaagtccttggagaactg

SEQ ID NO: 53814 - DNA, 25 bp, probe
gtgatactatgaccatgagtagcat

SEQ ID NO: 53815 - DNA, 25 bp, probe
caggtgatactatgaccatgagtag

SEQ ID NO: 53816 - DNA, 25 bp, probe
tcaggtgatactatgaccatgagta

SEQ ID NO: 53817 - DNA, 25 bp, probe
atactcttcctctatttggctcaca

SEQ ID NO: 53818 - DNA, 25 bp, probe
atactatgaccatgagtagcatcag

SEQ ID NO: 53819 - DNA, 25 bp, probe
gatactatgaccatgagtagcatca

SEQ ID NO: 53820 - DNA, 25 bp, probe
tgatactatgaccatgagtagcatc

SEQ ID NO: 53821 - DNA, 25 bp, probe
caagacaatactcagcagagagcat

SEQ ID NO: 53822 - DNA, 25 bp, probe
ctagcatactcttcctctatttggc

SEQ ID NO: 53823 - DNA, 25 bp, probe
ccataatcactgaagtccttggaga

SEQ ID NO: 53824 - DNA, 25 bp, probe
ggcaagcatgatatgttgttagaac

SEQ ID NO: 53825 - DNA, 25 bp, probe
ccactttgaaggtataacaggttcc

SEQ ID NO: 53826 - DNA, 25 bp, probe
cccactttgaaggtataacaggttc

SEQ ID NO: 53827 - DNA, 25 bp, probe
atgggaaacataaagcagaattggg

SEQ ID NO: 53828 - DNA, 25 bp, probe
catgggaaacataaagcagaattgg

SEQ ID NO: 53829 - DNA, 25 bp, probe
gaaacataaagcagaattgggaggg

SEQ ID NO: 53830 - DNA, 25 bp, probe
ggaaacataaagcagaattgggagg

SEQ ID NO: 53831 - DNA, 25 bp, probe
gggaaacataaagcagaattgggag

SEQ ID NO: 53832 - DNA, 25 bp, probe
cactttgaaggtataacaggttcct

SEQ ID NO: 53833 - DNA, 25 bp, probe
gtgaaggtaaggaatgagggaagag

SEQ ID NO: 53834 - DNA, 25 bp, probe
gcatgggaaacataaagcagaattg

SEQ ID NO: 53835 - DNA, 25 bp, probe
aaacataaagcagaattgggaggga

SEQ ID NO: 53836 - DNA, 25 bp, probe
tgtttgggtgaaggtaaggaatgag

SEQ ID NO: 53837 - DNA, 25 bp, probe
gggcaagcatgatatgttgttagaa

SEQ ID NO: 53838 - DNA, 25 bp, probe
tgggaaacataaagcagaattggga

SEQ ID NO: 53839 - DNA, 25 bp, probe
agcatgatatgttgttagaacagga

SEQ ID NO: 53840 - DNA, 25 bp, probe
atgatatgttgttagaacaggagcc

SEQ ID NO: 53841 - DNA, 25 bp, probe
catgatatgttgttagaacaggagc

SEQ ID NO: 53842 - DNA, 25 bp, probe
gcatgatatgttgttagaacaggag

SEQ ID NO: 53843 - DNA, 25 bp, probe
gcaagcatgatatgttgttagaaca

SEQ ID NO: 53844 - DNA, 25 bp, probe
aagcatgatatgttgttagaacagg

SEQ ID NO: 53845 - DNA, 25 bp, probe
aaggtaaggaatgagggaagaggag

SEQ ID NO: 53846 - DNA, 25 bp, probe
gaaggtaaggaatgagggaagagga

SEQ ID NO: 53847 - DNA, 25 bp, probe
gtgtttgggtgaaggtaaggaatga

SEQ ID NO: 53848 - DNA, 25 bp, probe
gcccactttgaaggtataacaggtt

SEQ ID NO: 53849 - DNA, 25 bp, probe
cataaagcagaattgggagggactt

SEQ ID NO: 53850 - DNA, 25 bp, probe
ctctaggagttgaaatgggtcagac

SEQ ID NO: 53851 - DNA, 25 bp, probe
gagcccactttgaaggtataacagg

SEQ ID NO: 53852 - DNA, 25 bp, probe
ggagcccactttgaaggtataacag

SEQ ID NO: 53853 - DNA, 25 bp, probe
caggagcccactttgaaggtataac

SEQ ID NO: 53854 - DNA, 25 bp, probe
aacataaagcagaattgggagggac

SEQ ID NO: 53855 - DNA, 25 bp, probe
caagcatgatatgttgttagaacag

SEQ ID NO: 53856 - DNA, 25 bp, probe
actttgaaggtataacaggttcctg

SEQ ID NO: 53857 - DNA, 25 bp, probe
tgaaggtaaggaatgagggaagagg

SEQ ID NO: 53858 - DNA, 25 bp, probe
gtttgggtgaaggtaaggaatgagg

SEQ ID NO: 53859 - DNA, 25 bp, probe
tataacaggttcctgccagtgagaa

SEQ ID NO: 53860 - DNA, 25 bp, probe
aggagcccactttgaaggtataaca

SEQ ID NO: 53861 - DNA, 25 bp, probe
acaggagcccactttgaaggtataa

SEQ ID NO: 53862 - DNA, 25 bp, probe
aacaggagcccactttgaaggtata

SEQ ID NO: 53863 - DNA, 25 bp, probe
ggtgaaggtaaggaatgagggaaga

SEQ ID NO: 53864 - DNA, 25 bp, probe
ctttgaaggtataacaggttcctgc

SEQ ID NO: 53865 - DNA, 25 bp, probe
gttagaacaggagcccactttgaag

SEQ ID NO: 53866 - DNA, 25 bp, probe
agcccactttgaaggtataacaggt

SEQ ID NO: 53867 - DNA, 25 bp, probe
ggctggacttgaaaggaagaagaag

SEQ ID NO: 53868 - DNA, 25 bp, probe
ggagtttcacatctggttaccattt

SEQ ID NO: 53869 - DNA, 25 bp, probe
gaagcggagtttcacatctggttac

SEQ ID NO: 53870 - DNA, 25 bp, probe
cggagtttcacatctggttaccatt

SEQ ID NO: 53871 - DNA, 25 bp, probe
gtttcacatctggttaccattttct

SEQ ID NO: 53872 - DNA, 25 bp, probe
agtttcacatctggttaccattttc

SEQ ID NO: 53873 - DNA, 25 bp, probe
gagtttcacatctggttaccatttt

SEQ ID NO: 53874 - DNA, 25 bp, probe
tcacatctggttaccattttctttt

SEQ ID NO: 53875 - DNA, 25 bp, probe
ttcacatctggttaccattttcttt

SEQ ID NO: 53876 - DNA, 25 bp, probe
tttcacatctggttaccattttctt

SEQ ID NO: 53877 - DNA, 25 bp, probe
ggaagcggagtttcacatctggtta

SEQ ID NO: 53878 - DNA, 25 bp, probe
aagcggagtttcacatctggttacc

SEQ ID NO: 53879 - DNA, 25 bp, probe
gcggagtttcacatctggttaccat

SEQ ID NO: 53880 - DNA, 25 bp, probe
ccaagttcctaagtagagcaagaat

SEQ ID NO: 53881 - DNA, 25 bp, probe
actacagttcttactcctctcttcc

SEQ ID NO: 53882 - DNA, 25 bp, probe
caagttcctaagtagagcaagaatt

SEQ ID NO: 53883 - DNA, 25 bp, probe
tactacagttcttactcctctcttc

SEQ ID NO: 53884 - DNA, 25 bp, probe
gatactacagttcttactcctctct

SEQ ID NO: 53885 - DNA, 25 bp, probe
agatactacagttcttactcctctc

SEQ ID NO: 53886 - DNA, 25 bp, probe
atactacagttcttactcctctctt

SEQ ID NO: 53887 - DNA, 25 bp, probe
tcttactcctctcttccctttgtta

SEQ ID NO: 53888 - DNA, 25 bp, probe
ctctcttccctttgttattcagtgt

SEQ ID NO: 53889 - DNA, 25 bp, probe
tactcctctcttccctttgttattc

SEQ ID NO: 53890 - DNA, 25 bp, probe
cttactcctctcttccctttgttat

SEQ ID NO: 53891 - DNA, 25 bp, probe
ctcctctcttccctttgttattcag

SEQ ID NO: 53892 - DNA, 25 bp, probe
tttgtaaatcttaacctcctgccta

SEQ ID NO: 53893 - DNA, 25 bp, probe
tctcttccctttgttattcagtgtg

SEQ ID NO: 53894 - DNA, 25 bp, probe
tttcctttaatttctcgcagtcttc

SEQ ID NO: 53895 - DNA, 25 bp, probe
tttgtgtgtgtgtgtctgtctattt

SEQ ID NO: 53896 - DNA, 25 bp, probe
catcttacaggtcctaaatcactca

SEQ ID NO: 53897 - DNA, 25 bp, probe
cctctcttccctttgttattcagtg

SEQ ID NO: 53898 - DNA, 25 bp, probe
ttactcctctcttccctttgttatt

SEQ ID NO: 53899 - DNA, 25 bp, probe
ttcttactcctctcttccctttgtt

SEQ ID NO: 53900 - DNA, 25 bp, probe
gattctctaccctcattcacatcta

SEQ ID NO: 53901 - DNA, 25 bp, probe
tcttacaggtcctaaatcactcatc

SEQ ID NO: 53902 - DNA, 25 bp, probe
tcatcttacaggtcctaaatcactc

SEQ ID NO: 53903 - DNA, 25 bp, probe
tcctctcttccctttgttattcagt

SEQ ID NO: 53904 - DNA, 25 bp, probe
actcctctcttccctttgttattca

SEQ ID NO: 53905 - DNA, 25 bp, probe
cttacaggtcctaaatcactcatct

SEQ ID NO: 53906 - DNA, 25 bp, probe
ctcatcttacaggtcctaaatcact

SEQ ID NO: 53907 - DNA, 25 bp, probe
atttcctttaatttctcgcagtctt

SEQ ID NO: 53908 - DNA, 25 bp, probe
ttgtaaatcttaacctcctgcctag

SEQ ID NO: 53909 - DNA, 25 bp, probe
atgtttgtaaatcttaacctcctgc

SEQ ID NO: 53910 - DNA, 25 bp, probe
atcttacaggtcctaaatcactcat

SEQ ID NO: 53911 - DNA, 25 bp, probe
tagatactacagttcttactcctct

SEQ ID NO: 53912 - DNA, 25 bp, probe
gtgggtctcaaagatgatgtagaat

SEQ ID NO: 53913 - DNA, 25 bp, probe
gtttgtaaatcttaacctcctgcct

SEQ ID NO: 53914 - DNA, 25 bp, probe
ttcctttaatttctcgcagtcttcc

SEQ ID NO: 53915 - DNA, 25 bp, probe
attctctaccctcattcacatctag

SEQ ID NO: 53916 - DNA, 25 bp, probe
gttcttactcctctcttccctttgt

SEQ ID NO: 53917 - DNA, 25 bp, probe
tgggtctcaaagatgatgtagaatt

SEQ ID NO: 53918 - DNA, 25 bp, probe
ctcttccctttgttattcagtgtga

SEQ ID NO: 53919 - DNA, 25 bp, probe
tgattctctaccctcattcacatct

SEQ ID NO: 53920 - DNA, 25 bp, probe
tgtttgtaaatcttaacctcctgcc

SEQ ID NO: 53921 - DNA, 25 bp, probe
gtttgtgtgtgtgtgtctgtctatt

SEQ ID NO: 53922 - DNA, 25 bp, probe
tcttccctttgttattcagtgtgac

SEQ ID NO: 53923 - DNA, 25 bp, probe
ttaggtgggtctcaaagatgatgta

SEQ ID NO: 53924 - DNA, 25 bp, probe
gtggatggactgaagtgtgtatatt

SEQ ID NO: 53925 - DNA, 25 bp, probe
cttcttcttcctggtctactctctg

SEQ ID NO: 53926 - DNA, 25 bp, probe
ggtggatggactgaagtgtgtatat

SEQ ID NO: 53927 - DNA, 25 bp, probe
ttcttcttcctggtctactctctgg

SEQ ID NO: 53928 - DNA, 25 bp, probe
tggatggactgaagtgtgtatattt

SEQ ID NO: 53929 - DNA, 25 bp, probe
caactgttgctgataagatcctgtg

SEQ ID NO: 53930 - DNA, 25 bp, probe
tggtggatggactgaagtgtgtata

SEQ ID NO: 53931 - DNA, 25 bp, probe
gcttcttcttcctggtctactctct

SEQ ID NO: 53932 - DNA, 25 bp, probe
tgcttcttcttcctggtctactctc

SEQ ID NO: 53933 - DNA, 25 bp, probe
ctgcttcttcttcctggtctactct

SEQ ID NO: 53934 - DNA, 25 bp, probe
aactgttgctgataagatcctgtgg

SEQ ID NO: 53935 - DNA, 25 bp, probe
atggtggatggactgaagtgtgtat

SEQ ID NO: 53936 - DNA, 25 bp, probe
cttcttcctggtctactctctggtg

SEQ ID NO: 53937 - DNA, 25 bp, probe
gtctactctctggtggtcatccttc

SEQ ID NO: 53938 - DNA, 25 bp, probe
tcttcttcctggtctactctctggt

SEQ ID NO: 53939 - DNA, 25 bp, probe
agctgaggactttaatatctatggc

SEQ ID NO: 53940 - DNA, 25 bp, probe
atcctcttctcctacaaatgccaag

SEQ ID NO: 53941 - DNA, 25 bp, probe
aaccttcctgtacttcagcttcttc

SEQ ID NO: 53942 - DNA, 25 bp, probe
gatcctcttctcctacaaatgccaa

SEQ ID NO: 53943 - DNA, 25 bp, probe
caaccttcctgtacttcagcttctt

SEQ ID NO: 53944 - DNA, 25 bp, probe
cctgcttcttcttcctggtctactc

SEQ ID NO: 53945 - DNA, 25 bp, probe
ctcctgcttcttcttcctggtctac

SEQ ID NO: 53946 - DNA, 25 bp, probe
tagatgccacaaccttcctgtactt

SEQ ID NO: 53947 - DNA, 25 bp, probe
tcctgcttcttcttcctggtctact

SEQ ID NO: 53948 - DNA, 25 bp, probe
ccaagatcctcttctcctacaaatg

SEQ ID NO: 53949 - DNA, 25 bp, probe
cctcttctcctacaaatgccaagtg

SEQ ID NO: 53950 - DNA, 25 bp, probe
agatcctcttctcctacaaatgcca

SEQ ID NO: 53951 - DNA, 25 bp, probe
ctgctctcatactgctcagtgacat

SEQ ID NO: 53952 - DNA, 25 bp, probe
caagatcctcttctcctacaaatgc

SEQ ID NO: 53953 - DNA, 25 bp, probe
tgctctcatactgctcagtgacatg

SEQ ID NO: 53954 - DNA, 25 bp, probe
tcctcttctcctacaaatgccaagt

SEQ ID NO: 53955 - DNA, 25 bp, probe
tctactctctggtggtcatccttcc

SEQ ID NO: 53956 - DNA, 25 bp, probe
ggatggactgaagtgtgtatatttt

SEQ ID NO: 53957 - DNA, 25 bp, probe
cccaagatcctcttctcctacaaat

SEQ ID NO: 53958 - DNA, 25 bp, probe
ctcttctcctacaaatgccaagtgg

SEQ ID NO: 53959 - DNA, 25 bp, probe
ttcttcctggtctactctctggtgg

SEQ ID NO: 53960 - DNA, 25 bp, probe
gtagatgccacaaccttcctgtact

SEQ ID NO: 53961 - DNA, 25 bp, probe
gctgaggactttaatatctatggcc

SEQ ID NO: 53962 - DNA, 25 bp, probe
acaaccttcctgtacttcagcttct

SEQ ID NO: 53963 - DNA, 25 bp, probe
cacaaccttcctgtacttcagcttc

SEQ ID NO: 53964 - DNA, 25 bp, probe
catggtggatggactgaagtgtgta

SEQ ID NO: 53965 - DNA, 25 bp, probe
ggtctactctctggtggtcatcctt

SEQ ID NO: 53966 - DNA, 25 bp, probe
aagatcctcttctcctacaaatgcc

SEQ ID NO: 53967 - DNA, 25 bp, probe
gtgtagatgccacaaccttcctgta

SEQ ID NO: 53968 - DNA, 25 bp, probe
gggcatcaaatattcgtttacatca

SEQ ID NO: 53969 - DNA, 25 bp, probe
tgggcatcaaatattcgtttacatc

SEQ ID NO: 53970 - DNA, 25 bp, probe
ttgggcatcaaatattcgtttacat

SEQ ID NO: 53971 - DNA, 25 bp, probe
ggcatcaaatattcgtttacatcaa

SEQ ID NO: 53972 - DNA, 25 bp, probe
cataatcgaatgtggagaaagaacc

SEQ ID NO: 53973 - DNA, 25 bp, probe
ataatcgaatgtggagaaagaaccg

SEQ ID NO: 53974 - DNA, 25 bp, probe
ggttcataggccataatcgaatgtg

SEQ ID NO: 53975 - DNA, 25 bp, probe
atcttattcaacagcagatttccaa

SEQ ID NO: 53976 - DNA, 25 bp, probe
gatcttattcaacagcagatttcca

SEQ ID NO: 53977 - DNA, 25 bp, probe
atattcgtttacatcaaacccacct

SEQ ID NO: 53978 - DNA, 25 bp, probe
tttacatcaaacccacctgtagaga

SEQ ID NO: 53979 - DNA, 25 bp, probe
taatcgaatgtggagaaagaaccgt

SEQ ID NO: 53980 - DNA, 25 bp, probe
gtttacatcaaacccacctgtagag

SEQ ID NO: 53981 - DNA, 25 bp, probe
tattcgtttacatcaaacccacctg

SEQ ID NO: 53982 - DNA, 25 bp, probe
ccataatcgaatgtggagaaagaac

SEQ ID NO: 53983 - DNA, 25 bp, probe
aatattcgtttacatcaaacccacc

SEQ ID NO: 53984 - DNA, 25 bp, probe
ataggccataatcgaatgtggagaa

SEQ ID NO: 53985 - DNA, 25 bp, probe
gcatcaaatattcgtttacatcaaa

SEQ ID NO: 53986 - DNA, 25 bp, probe
gccataatcgaatgtggagaaagaa

SEQ ID NO: 53987 - DNA, 25 bp, probe
gttcataggccataatcgaatgtgg

SEQ ID NO: 53988 - DNA, 25 bp, probe
gtggttcataggccataatcgaatg

SEQ ID NO: 53989 - DNA, 25 bp, probe
agttcgtgctattgagaaaattagt

SEQ ID NO: 53990 - DNA, 25 bp, probe
ttcataggccataatcgaatgtgga

SEQ ID NO: 53991 - DNA, 25 bp, probe
cagttcgtgctattgagaaaattag

SEQ ID NO: 53992 - DNA, 25 bp, probe
tggttcataggccataatcgaatgt

SEQ ID NO: 53993 - DNA, 25 bp, probe
tgtggttcataggccataatcgaat

SEQ ID NO: 53994 - DNA, 25 bp, probe
aaatattcgtttacatcaaacccac

SEQ ID NO: 53995 - DNA, 25 bp, probe
caaatattcgtttacatcaaaccca

SEQ ID NO: 53996 - DNA, 25 bp, probe
cataggccataatcgaatgtggaga

SEQ ID NO: 53997 - DNA, 25 bp, probe
tcataggccataatcgaatgtggag

SEQ ID NO: 53998 - DNA, 25 bp, probe
ttcgtttacatcaaacccacctgta

SEQ ID NO: 53999 - DNA, 25 bp, probe
ttgtggttcataggccataatcgaa

SEQ ID NO: 54000 - DNA, 25 bp, probe
tcaaatattcgtttacatcaaaccc

SEQ ID NO: 54001 - DNA, 25 bp, probe
tcgacaatgtgaaagcccatttaaa

SEQ ID NO: 54002 - DNA, 25 bp, probe
aacatatgagattgttctctggcag

SEQ ID NO: 54003 - DNA, 25 bp, probe
caacatatgagattgttctctggca

SEQ ID NO: 54004 - DNA, 25 bp, probe
acaacatatgagattgttctctggc

SEQ ID NO: 54005 - DNA, 25 bp, probe
cttgtggttcataggccataatcga

SEQ ID NO: 54006 - DNA, 25 bp, probe
cgtttacatcaaacccacctgtaga

SEQ ID NO: 54007 - DNA, 25 bp, probe
tcgtttacatcaaacccacctgtag

SEQ ID NO: 54008 - DNA, 25 bp, probe
tacaacatatgagattgttctctgg

SEQ ID NO: 54009 - DNA, 25 bp, probe
attcgtttacatcaaacccacctgt

SEQ ID NO: 54010 - DNA, 25 bp, probe
gttcgtgctattgagaaaattagta

SEQ ID NO: 54011 - DNA, 25 bp, probe
tgcttgtggttcataggccataatc

SEQ ID NO: 54012 - DNA, 25 bp, probe
tgtattccttgctcacttgctacta

SEQ ID NO: 54013 - DNA, 25 bp, probe
gtattccttgctcacttgctactag

SEQ ID NO: 54014 - DNA, 25 bp, probe
ctatccatccttccatccagttctc

SEQ ID NO: 54015 - DNA, 25 bp, probe
caagtagagaatatggagaggatca

SEQ ID NO: 54016 - DNA, 25 bp, probe
acaagtagagaatatggagaggatc

SEQ ID NO: 54017 - DNA, 25 bp, probe
gttgtattccttgctcacttgctac

SEQ ID NO: 54018 - DNA, 25 bp, probe
tatccatccttccatccagttctct

SEQ ID NO: 54019 - DNA, 25 bp, probe
ttgtattccttgctcacttgctact

SEQ ID NO: 54020 - DNA, 25 bp, probe
tacaagtagagaatatggagaggat

SEQ ID NO: 54021 - DNA, 25 bp, probe
atacaagtagagaatatggagagga

SEQ ID NO: 54022 - DNA, 25 bp, probe
gatacaagtagagaatatggagagg

SEQ ID NO: 54023 - DNA, 25 bp, probe
agagaatatggagaggatcattaca

SEQ ID NO: 54024 - DNA, 25 bp, probe
agtagagaatatggagaggatcatt

SEQ ID NO: 54025 - DNA, 25 bp, probe
aagtagagaatatggagaggatcat

SEQ ID NO: 54026 - DNA, 25 bp, probe
ttcctatccatccttccatccagtt

SEQ ID NO: 54027 - DNA, 25 bp, probe
atccttccatccagttctctgaatc

SEQ ID NO: 54028 - DNA, 25 bp, probe
cttaggaaataatgatgttggcacc

SEQ ID NO: 54029 - DNA, 25 bp, probe
cgacttaggaaataatgatgttggc

SEQ ID NO: 54030 - DNA, 25 bp, probe
gcgacttaggaaataatgatgttgg

SEQ ID NO: 54031 - DNA, 25 bp, probe
ggcgacttaggaaataatgatgttg

SEQ ID NO: 54032 - DNA, 25 bp, probe
aggcgacttaggaaataatgatgtt

SEQ ID NO: 54033 - DNA, 25 bp, probe
acttaggaaataatgatgttggcac

SEQ ID NO: 54034 - DNA, 25 bp, probe
gacttaggaaataatgatgttggca

SEQ ID NO: 54035 - DNA, 25 bp, probe
ccttccatccagttctctgaatctt

SEQ ID NO: 54036 - DNA, 25 bp, probe
catccttccatccagttctctgaat

SEQ ID NO: 54037 - DNA, 25 bp, probe
caggcgacttaggaaataatgatgt

SEQ ID NO: 54038 - DNA, 25 bp, probe
attcctttcctatccatccttccat

SEQ ID NO: 54039 - DNA, 25 bp, probe
aagattcctttcctatccatccttc

SEQ ID NO: 54040 - DNA, 25 bp, probe
gccagaacatttacttcaactctac

SEQ ID NO: 54041 - DNA, 25 bp, probe
agccagaacatttacttcaactcta

SEQ ID NO: 54042 - DNA, 25 bp, probe
tagccagaacatttacttcaactct

SEQ ID NO: 54043 - DNA, 25 bp, probe
ttccttactaacccagagacttcag

SEQ ID NO: 54044 - DNA, 25 bp, probe
tattagttcattgcctgcacttact

SEQ ID NO: 54045 - DNA, 25 bp, probe
ccagaacatttacttcaactctacc

SEQ ID NO: 54046 - DNA, 25 bp, probe
ttattagttcattgcctgcacttac

SEQ ID NO: 54047 - DNA, 25 bp, probe
gagaatatggagaggatcattacat

SEQ ID NO: 54048 - DNA, 25 bp, probe
atagccagaacatttacttcaactc

SEQ ID NO: 54049 - DNA, 25 bp, probe
cctatccatccttccatccagttct

SEQ ID NO: 54050 - DNA, 25 bp, probe
tcctatccatccttccatccagttc

SEQ ID NO: 54051 - DNA, 25 bp, probe
ttaggaaataatgatgttggcacca

SEQ ID NO: 54052 - DNA, 25 bp, probe
agattcctttcctatccatccttcc

SEQ ID NO: 54053 - DNA, 25 bp, probe
ttcctttcctatccatccttccatc

SEQ ID NO: 54054 - DNA, 25 bp, probe
taggaaataatgatgttggcaccag

SEQ ID NO: 54055 - DNA, 25 bp, probe
tagcaggcgacttaggaaataatga

SEQ ID NO: 54056 - DNA, 25 bp, probe
attgtgacgatgagttagaagaggt

SEQ ID NO: 54057 - DNA, 25 bp, probe
cattgtgacgatgagttagaagagg

SEQ ID NO: 54058 - DNA, 25 bp, probe
ccattgtgacgatgagttagaagag

SEQ ID NO: 54059 - DNA, 25 bp, probe
ttgtgacgatgagttagaagaggtt

SEQ ID NO: 54060 - DNA, 25 bp, probe
cctattctcacacatgatcttcaga

SEQ ID NO: 54061 - DNA, 25 bp, probe
tgtgacgatgagttagaagaggttg

SEQ ID NO: 54062 - DNA, 25 bp, probe
tattctcacacatgatcttcagagt

SEQ ID NO: 54063 - DNA, 25 bp, probe
gagcctattctcacacatgatcttc

SEQ ID NO: 54064 - DNA, 25 bp, probe
gcctattctcacacatgatcttcag

SEQ ID NO: 54065 - DNA, 25 bp, probe
ctattctcacacatgatcttcagag

SEQ ID NO: 54066 - DNA, 25 bp, probe
agagcctattctcacacatgatctt

SEQ ID NO: 54067 - DNA, 25 bp, probe
agcctattctcacacatgatcttca

SEQ ID NO: 54068 - DNA, 25 bp, probe
attctcacacatgatcttcagagtg

SEQ ID NO: 54069 - DNA, 25 bp, probe
gtgacgatgagttagaagaggttgg

SEQ ID NO: 54070 - DNA, 25 bp, probe
cagaaggctgtaggactcttgaatt

SEQ ID NO: 54071 - DNA, 25 bp, probe
atgagttagaagaggttgggaagag

SEQ ID NO: 54072 - DNA, 25 bp, probe
gatgagttagaagaggttgggaaga

SEQ ID NO: 54073 - DNA, 25 bp, probe
cctaaatcatactttgggtgtggtg

SEQ ID NO: 54074 - DNA, 25 bp, probe
ctaaatcatactttgggtgtggtga

SEQ ID NO: 54075 - DNA, 25 bp, probe
aatcattcaactgcctccatctgtg

SEQ ID NO: 54076 - DNA, 25 bp, probe
taaatcatactttgggtgtggtgac

SEQ ID NO: 54077 - DNA, 25 bp, probe
gaatcattcaactgcctccatctgt

SEQ ID NO: 54078 - DNA, 25 bp, probe
aaggagacctaaatcatactttggg

SEQ ID NO: 54079 - DNA, 25 bp, probe
ccgaaggagacctaaatcatacttt

SEQ ID NO: 54080 - DNA, 25 bp, probe
tgtgttcataaattcccatctaaga

SEQ ID NO: 54081 - DNA, 25 bp, probe
cgaaggagacctaaatcatactttg

SEQ ID NO: 54082 - DNA, 25 bp, probe
aacccattgtgacgatgagttagaa

SEQ ID NO: 54083 - DNA, 25 bp, probe
cccattgtgacgatgagttagaaga

SEQ ID NO: 54084 - DNA, 25 bp, probe
gaaggagacctaaatcatactttgg

SEQ ID NO: 54085 - DNA, 25 bp, probe
cgatgagttagaagaggttgggaag

SEQ ID NO: 54086 - DNA, 25 bp, probe
gagacctaaatcatactttgggtgt

SEQ ID NO: 54087 - DNA, 25 bp, probe
agacctaaatcatactttgggtgtg

SEQ ID NO: 54088 - DNA, 25 bp, probe
acccattgtgacgatgagttagaag

SEQ ID NO: 54089 - DNA, 25 bp, probe
ttctcacacatgatcttcagagtgc

SEQ ID NO: 54090 - DNA, 25 bp, probe
gaacccattgtgacgatgagttaga

SEQ ID NO: 54091 - DNA, 25 bp, probe
ggagacctaaatcatactttgggtg

SEQ ID NO: 54092 - DNA, 25 bp, probe
aggagacctaaatcatactttgggt

SEQ ID NO: 54093 - DNA, 25 bp, probe
cccgaaggagacctaaatcatactt

SEQ ID NO: 54094 - DNA, 25 bp, probe
atcccgaaggagacctaaatcatac

SEQ ID NO: 54095 - DNA, 25 bp, probe
catcccgaaggagacctaaatcata

SEQ ID NO: 54096 - DNA, 25 bp, probe
gacctaaatcatactttgggtgtgg

SEQ ID NO: 54097 - DNA, 25 bp, probe
taaattcccatctaagaaacactgg

SEQ ID NO: 54098 - DNA, 25 bp, probe
agaaggctgtaggactcttgaattc

SEQ ID NO: 54099 - DNA, 25 bp, probe
tgagttagaagaggttgggaagagg

SEQ ID NO: 54100 - DNA, 25 bp, probe
gtaaagaggtgaaaggatgaaggag

SEQ ID NO: 54101 - DNA, 25 bp, probe
taaagaggtgaaaggatgaaggagg

SEQ ID NO: 54102 - DNA, 25 bp, probe
ggtaaagaggtgaaaggatgaagga

SEQ ID NO: 54103 - DNA, 25 bp, probe
cggtaaagaggtgaaaggatgaagg

SEQ ID NO: 54104 - DNA, 25 bp, probe
ctggagcatcctcatcaagttcaac

SEQ ID NO: 54105 - DNA, 25 bp, probe
ttgtcctgtccttcttcctgtgttg

SEQ ID NO: 54106 - DNA, 25 bp, probe
gttgtcctgtccttcttcctgtgtt

SEQ ID NO: 54107 - DNA, 25 bp, probe
gcggtaaagaggtgaaaggatgaag

SEQ ID NO: 54108 - DNA, 25 bp, probe
aaagaggtgaaaggatgaaggaggg

SEQ ID NO: 54109 - DNA, 25 bp, probe
catcgttgtcctgtccttcttcctg

SEQ ID NO: 54110 - DNA, 25 bp, probe
cctggagcatcctcatcaagttcaa

SEQ ID NO: 54111 - DNA, 25 bp, probe
aatcagtgaccatcgttgtcctgtc

SEQ ID NO: 54112 - DNA, 25 bp, probe
caaatcagtgaccatcgttgtcctg

SEQ ID NO: 54113 - DNA, 25 bp, probe
gaccatcgttgtcctgtccttcttc

SEQ ID NO: 54114 - DNA, 25 bp, probe
ggcggtaaagaggtgaaaggatgaa

SEQ ID NO: 54115 - DNA, 25 bp, probe
tggagcatcctcatcaagttcaacg

SEQ ID NO: 54116 - DNA, 25 bp, probe
caccaaatcagtgaccatcgttgtc

SEQ ID NO: 54117 - DNA, 25 bp, probe
aaatcagtgaccatcgttgtcctgt

SEQ ID NO: 54118 - DNA, 25 bp, probe
ccaaatcagtgaccatcgttgtcct

SEQ ID NO: 54119 - DNA, 25 bp, probe
agactgtcgaaggtcaccaaatcag

SEQ ID NO: 54120 - DNA, 25 bp, probe
gagactgtcgaaggtcaccaaatca

SEQ ID NO: 54121 - DNA, 25 bp, probe
ggagactgtcgaaggtcaccaaatc

SEQ ID NO: 54122 - DNA, 25 bp, probe
aggagtatttcctgtgccaggtata

SEQ ID NO: 54123 - DNA, 25 bp, probe
ggagtatttcctgtgccaggtatac

SEQ ID NO: 54124 - DNA, 25 bp, probe
gagtatttcctgtgccaggtatacg

SEQ ID NO: 54125 - DNA, 25 bp, probe
tcaccaaatcagtgaccatcgttgt

SEQ ID NO: 54126 - DNA, 25 bp, probe
ctgtcgaaggtcaccaaatcagtga

SEQ ID NO: 54127 - DNA, 25 bp, probe
gactgtcgaaggtcaccaaatcagt

SEQ ID NO: 54128 - DNA, 25 bp, probe
actgtcgaaggtcaccaaatcagtg

SEQ ID NO: 54129 - DNA, 25 bp, probe
agtatttcctgtgccaggtatacgc

SEQ ID NO: 54130 - DNA, 25 bp, probe
actacttccactccatctcttacaa

SEQ ID NO: 54131 - DNA, 25 bp, probe
ctacttccactccatctcttacaag

SEQ ID NO: 54132 - DNA, 25 bp, probe
cactacttccactccatctcttaca

SEQ ID NO: 54133 - DNA, 25 bp, probe
tacttccactccatctcttacaaga

SEQ ID NO: 54134 - DNA, 25 bp, probe
ccactacttccactccatctcttac

SEQ ID NO: 54135 - DNA, 25 bp, probe
ctactactactgcttcatcacgttg

SEQ ID NO: 54136 - DNA, 25 bp, probe
cttccactccatctcttacaagatc

SEQ ID NO: 54137 - DNA, 25 bp, probe
acttccactccatctcttacaagat

SEQ ID NO: 54138 - DNA, 25 bp, probe
tactactgcttcatcacgttgacta

SEQ ID NO: 54139 - DNA, 25 bp, probe
tactactactgcttcatcacgttga

SEQ ID NO: 54140 - DNA, 25 bp, probe
cctactactactgcttcatcacgtt

SEQ ID NO: 54141 - DNA, 25 bp, probe
ttcttgaccatgaacagtgaggatg

SEQ ID NO: 54142 - DNA, 25 bp, probe
ttccactccatctcttacaagatcg

SEQ ID NO: 54143 - DNA, 25 bp, probe
cttgaccatgaacagtgaggatgag

SEQ ID NO: 54144 - DNA, 25 bp, probe
ttagctttatgtatatcctggtggg

SEQ ID NO: 54145 - DNA, 25 bp, probe
gcctttagctttatgtatatcctgg

SEQ ID NO: 54146 - DNA, 25 bp, probe
ctactactgcttcatcacgttgact

SEQ ID NO: 54147 - DNA, 25 bp, probe
cccactacttccactccatctctta

SEQ ID NO: 54148 - DNA, 25 bp, probe
acgcctactactactgcttcatcac

SEQ ID NO: 54149 - DNA, 25 bp, probe
cacgcctactactactgcttcatca

SEQ ID NO: 54150 - DNA, 25 bp, probe
tcttgaccatgaacagtgaggatga

SEQ ID NO: 54151 - DNA, 25 bp, probe
actactgcttcatcacgttgactac

SEQ ID NO: 54152 - DNA, 25 bp, probe
actactactgcttcatcacgttgac

SEQ ID NO: 54153 - DNA, 25 bp, probe
tttagctttatgtatatcctggtgg

SEQ ID NO: 54154 - DNA, 25 bp, probe
cctttagctttatgtatatcctggt

SEQ ID NO: 54155 - DNA, 25 bp, probe
cactccatctcttacaagatcgagg

SEQ ID NO: 54156 - DNA, 25 bp, probe
ccactccatctcttacaagatcgag

SEQ ID NO: 54157 - DNA, 25 bp, probe
actccatctcttacaagatcgagga

SEQ ID NO: 54158 - DNA, 25 bp, probe
ccacgcctactactactgcttcatc

SEQ ID NO: 54159 - DNA, 25 bp, probe
cttccacgcctactactactgcttc

SEQ ID NO: 54160 - DNA, 25 bp, probe
cttcttccacgcctactactactgc

SEQ ID NO: 54161 - DNA, 25 bp, probe
gcttcttccacgcctactactactg

SEQ ID NO: 54162 - DNA, 25 bp, probe
tccactccatctcttacaagatcga

SEQ ID NO: 54163 - DNA, 25 bp, probe
ctactgcttcatcacgttgactacc

SEQ ID NO: 54164 - DNA, 25 bp, probe
ctgcttcatcacgttgactaccatt

SEQ ID NO: 54165 - DNA, 25 bp, probe
acgtggcctttagctttatgtatat

SEQ ID NO: 54166 - DNA, 25 bp, probe
cgtggcctttagctttatgtatatc

SEQ ID NO: 54167 - DNA, 25 bp, probe
tacgtggcctttagctttatgtata

SEQ ID NO: 54168 - DNA, 25 bp, probe
tggcctttagctttatgtatatcct

SEQ ID NO: 54169 - DNA, 25 bp, probe
gtggcctttagctttatgtatatcc

SEQ ID NO: 54170 - DNA, 25 bp, probe
ctacgtggcctttagctttatgtat

SEQ ID NO: 54171 - DNA, 25 bp, probe
ggcctttagctttatgtatatcctg

SEQ ID NO: 54172 - DNA, 25 bp, probe
tgcttcatcacgttgactaccattg

SEQ ID NO: 54173 - DNA, 25 bp, probe
tattagctccatctctcctgggtta

SEQ ID NO: 54174 - DNA, 25 bp, probe
gccttgccacattaaattgataaca

SEQ ID NO: 54175 - DNA, 25 bp, probe
tgccttgccacattaaattgataac

SEQ ID NO: 54176 - DNA, 25 bp, probe
ccttgccacattaaattgataacat

SEQ ID NO: 54177 - DNA, 25 bp, probe
gtgccttgccacattaaattgataa

SEQ ID NO: 54178 - DNA, 25 bp, probe
tgccacattaaattgataacatgga

SEQ ID NO: 54179 - DNA, 25 bp, probe
cttgccacattaaattgataacatg

SEQ ID NO: 54180 - DNA, 25 bp, probe
ttgccacattaaattgataacatgg

SEQ ID NO: 54181 - DNA, 25 bp, probe
gccacattaaattgataacatggaa

SEQ ID NO: 54182 - DNA, 25 bp, probe
ccacattaaattgataacatggaaa

SEQ ID NO: 54183 - DNA, 25 bp, probe
ctgagaaagaggcagggacctaaag

SEQ ID NO: 54184 - DNA, 25 bp, probe
tgtgccttgccacattaaattgata

SEQ ID NO: 54185 - DNA, 25 bp, probe
actgagaaagaggcagggacctaaa

SEQ ID NO: 54186 - DNA, 25 bp, probe
cagggacctaaagggactacctctg

SEQ ID NO: 54187 - DNA, 25 bp, probe
ctgtgccttgccacattaaattgat

SEQ ID NO: 54188 - DNA, 25 bp, probe
ctctgtgccttgccacattaaattg

SEQ ID NO: 54189 - DNA, 25 bp, probe
tctgtgccttgccacattaaattga

SEQ ID NO: 54190 - DNA, 25 bp, probe
gacaactagggctgcgaatctagag

SEQ ID NO: 54191 - DNA, 25 bp, probe
ctaaagggactacctctgtgccttg

SEQ ID NO: 54192 - DNA, 25 bp, probe
ctacctctgtgccttgccacattaa

SEQ ID NO: 54193 - DNA, 25 bp, probe
cctctgtgccttgccacattaaatt

SEQ ID NO: 54194 - DNA, 25 bp, probe
tacctctgtgccttgccacattaaa

SEQ ID NO: 54195 - DNA, 25 bp, probe
acctctgtgccttgccacattaaat

SEQ ID NO: 54196 - DNA, 25 bp, probe
tcttcctcaatgtcatcactcaata

SEQ ID NO: 54197 - DNA, 25 bp, probe
gtcttcctcaatgtcatcactcaat

SEQ ID NO: 54198 - DNA, 25 bp, probe
cttcctcaatgtcatcactcaatat

SEQ ID NO: 54199 - DNA, 25 bp, probe
agtcttcctcaatgtcatcactcaa

SEQ ID NO: 54200 - DNA, 25 bp, probe
aagtcttcctcaatgtcatcactca

SEQ ID NO: 54201 - DNA, 25 bp, probe
ttcctcaatgtcatcactcaatatt

SEQ ID NO: 54202 - DNA, 25 bp, probe
aaagtcttcctcaatgtcatcactc

SEQ ID NO: 54203 - DNA, 25 bp, probe
ctgatggaactcatggagaatgaag

SEQ ID NO: 54204 - DNA, 25 bp, probe
cgagtggaatttgagtcctaaagaa

SEQ ID NO: 54205 - DNA, 25 bp, probe
gagtggaatttgagtcctaaagaaa

SEQ ID NO: 54206 - DNA, 25 bp, probe
cttccctcacttccatccatctcta

SEQ ID NO: 54207 - DNA, 25 bp, probe
agtggaatttgagtcctaaagaaat

SEQ ID NO: 54208 - DNA, 25 bp, probe
atccgagtggaatttgagtcctaaa

SEQ ID NO: 54209 - DNA, 25 bp, probe
tcaaagcctgcatcaataaatgaaa

SEQ ID NO: 54210 - DNA, 25 bp, probe
ttccctcacttccatccatctctag

SEQ ID NO: 54211 - DNA, 25 bp, probe
ctcaaagcctgcatcaataaatgaa

SEQ ID NO: 54212 - DNA, 25 bp, probe
cctgatggaactcatggagaatgaa

SEQ ID NO: 54213 - DNA, 25 bp, probe
ccgagtggaatttgagtcctaaaga

SEQ ID NO: 54214 - DNA, 25 bp, probe
tccgagtggaatttgagtcctaaag

SEQ ID NO: 54215 - DNA, 25 bp, probe
catggagaatgaagctctggaaatc

SEQ ID NO: 54216 - DNA, 25 bp, probe
catccgagtggaatttgagtcctaa

SEQ ID NO: 54217 - DNA, 25 bp, probe
gaaaagtcttcctcaatgtcatcac

SEQ ID NO: 54218 - DNA, 25 bp, probe
tgatggaactcatggagaatgaagc

SEQ ID NO: 54219 - DNA, 25 bp, probe
cctcaaagcctgcatcaataaatga

SEQ ID NO: 54220 - DNA, 25 bp, probe
aaaagtcttcctcaatgtcatcact

SEQ ID NO: 54221 - DNA, 25 bp, probe
gagaatgaagctctggaaatcctca

SEQ ID NO: 54222 - DNA, 25 bp, probe
cgaaaagtcttcctcaatgtcatca

SEQ ID NO: 54223 - DNA, 25 bp, probe
atggaactcatggagaatgaagctc

SEQ ID NO: 54224 - DNA, 25 bp, probe
gatggaactcatggagaatgaagct

SEQ ID NO: 54225 - DNA, 25 bp, probe
agaatgaagctctggaaatcctcac

SEQ ID NO: 54226 - DNA, 25 bp, probe
gtggaatttgagtcctaaagaaata

SEQ ID NO: 54227 - DNA, 25 bp, probe
ccgaaaagtcttcctcaatgtcatc

SEQ ID NO: 54228 - DNA, 25 bp, probe
cctcacttccatccatctctagacc

SEQ ID NO: 54229 - DNA, 25 bp, probe
gaactcatggagaatgaagctctgg

SEQ ID NO: 54230 - DNA, 25 bp, probe
ggaactcatggagaatgaagctctg

SEQ ID NO: 54231 - DNA, 25 bp, probe
gagtcctaaagaaataaaagagtcg

SEQ ID NO: 54232 - DNA, 25 bp, probe
aatgtcatcactcaatattgcgaag

SEQ ID NO: 54233 - DNA, 25 bp, probe
atggagaatgaagctctggaaatcc

SEQ ID NO: 54234 - DNA, 25 bp, probe
gagcaagaggctgtacgtgaattaa

SEQ ID NO: 54235 - DNA, 25 bp, probe
gaatgaagctctggaaatcctcacc

SEQ ID NO: 54236 - DNA, 25 bp, probe
gcctcaaagcctgcatcaataaatg

SEQ ID NO: 54237 - DNA, 25 bp, probe
actcatggagaatgaagctctggaa

SEQ ID NO: 54238 - DNA, 25 bp, probe
aactcatggagaatgaagctctgga

SEQ ID NO: 54239 - DNA, 25 bp, probe
tggaactcatggagaatgaagctct

SEQ ID NO: 54240 - DNA, 25 bp, probe
ctgattcaactgtagcctgtaatgg

SEQ ID NO: 54241 - DNA, 25 bp, probe
cctgattcaactgtagcctgtaatg

SEQ ID NO: 54242 - DNA, 25 bp, probe
ttgcttaggagtagttgtttcagag

SEQ ID NO: 54243 - DNA, 25 bp, probe
cttgcttaggagtagttgtttcaga

SEQ ID NO: 54244 - DNA, 25 bp, probe
cttaggagtagttgtttcagaggtg

SEQ ID NO: 54245 - DNA, 25 bp, probe
gcctgattcaactgtagcctgtaat

SEQ ID NO: 54246 - DNA, 25 bp, probe
tttgcttgcttaggagtagttgttt

SEQ ID NO: 54247 - DNA, 25 bp, probe
attcaactgtagcctgtaatgggta

SEQ ID NO: 54248 - DNA, 25 bp, probe
ggagtagttgtttcagaggtgatta

SEQ ID NO: 54249 - DNA, 25 bp, probe
ttgcttgcttaggagtagttgtttc

SEQ ID NO: 54250 - DNA, 25 bp, probe
tcatagaacaccttaggaagaaagt

SEQ ID NO: 54251 - DNA, 25 bp, probe
tcaactgtagcctgtaatgggtaaa

SEQ ID NO: 54252 - DNA, 25 bp, probe
ttcaactgtagcctgtaatgggtaa

SEQ ID NO: 54253 - DNA, 25 bp, probe
taggagtagttgtttcagaggtgat

SEQ ID NO: 54254 - DNA, 25 bp, probe
catagaacaccttaggaagaaagtc

SEQ ID NO: 54255 - DNA, 25 bp, probe
gagtagttgtttcagaggtgattac

SEQ ID NO: 54256 - DNA, 25 bp, probe
ttaggagtagttgtttcagaggtga

SEQ ID NO: 54257 - DNA, 25 bp, probe
gtttgcttgcttaggagtagttgtt

SEQ ID NO: 54258 - DNA, 25 bp, probe
gcttgcttaggagtagttgtttcag

SEQ ID NO: 54259 - DNA, 25 bp, probe
tagttgtttcagaggtgattacagg

SEQ ID NO: 54260 - DNA, 25 bp, probe
agtagttgtttcagaggtgattaca

SEQ ID NO: 54261 - DNA, 25 bp, probe
gcttaggagtagttgtttcagaggt

SEQ ID NO: 54262 - DNA, 25 bp, probe
tgcttaggagtagttgtttcagagg

SEQ ID NO: 54263 - DNA, 25 bp, probe
gtagttgtttcagaggtgattacag

SEQ ID NO: 54264 - DNA, 25 bp, probe
aggagtagttgtttcagaggtgatt

SEQ ID NO: 54265 - DNA, 25 bp, probe
tgcttgcttaggagtagttgtttca

SEQ ID NO: 54266 - DNA, 25 bp, probe
ttcctacaatctgactcaactgcca

SEQ ID NO: 54267 - DNA, 25 bp, probe
atcatagaacaccttaggaagaaag

SEQ ID NO: 54268 - DNA, 25 bp, probe
atagaacaccttaggaagaaagtcc

SEQ ID NO: 54269 - DNA, 25 bp, probe
gattcaactgtagcctgtaatgggt

SEQ ID NO: 54270 - DNA, 25 bp, probe
tagaacaccttaggaagaaagtcca

SEQ ID NO: 54271 - DNA, 25 bp, probe
tgattcaactgtagcctgtaatggg

SEQ ID NO: 54272 - DNA, 25 bp, probe
gatcatagaacaccttaggaagaaa

SEQ ID NO: 54273 - DNA, 25 bp, probe
agaacaccttaggaagaaagtccat

SEQ ID NO: 54274 - DNA, 25 bp, probe
tttcctacaatctgactcaactgcc

SEQ ID NO: 54275 - DNA, 25 bp, probe
tgcctgattcaactgtagcctgtaa

SEQ ID NO: 54276 - DNA, 25 bp, probe
ccttctctcatgatctaagtcttgg

SEQ ID NO: 54277 - DNA, 25 bp, probe
ggcatcatgtaactgctaaccttac

SEQ ID NO: 54278 - DNA, 25 bp, probe
gtttgactgtgcttaccaatgagtg

SEQ ID NO: 54279 - DNA, 25 bp, probe
gtctgatcatagaacaccttaggaa

SEQ ID NO: 54280 - DNA, 25 bp, probe
ctgatcatagaacaccttaggaaga

SEQ ID NO: 54281 - DNA, 25 bp, probe
cttctctcatgatctaagtcttgga

SEQ ID NO: 54282 - DNA, 25 bp, probe
gccttctctcatgatctaagtcttg

SEQ ID NO: 54283 - DNA, 25 bp, probe
tctgatcatagaacaccttaggaag

SEQ ID NO: 54284 - DNA, 25 bp, probe
ctaagatgattggcgaagtaatgac

SEQ ID NO: 54285 - DNA, 25 bp, probe
taagatgattggcgaagtaatgaca

SEQ ID NO: 54286 - DNA, 25 bp, probe
gctaagatgattggcgaagtaatga

SEQ ID NO: 54287 - DNA, 25 bp, probe
aagatgattggcgaagtaatgacaa

SEQ ID NO: 54288 - DNA, 25 bp, probe
ggctaagatgattggcgaagtaatg

SEQ ID NO: 54289 - DNA, 25 bp, probe
aagaagaggagtgagtattatctga

SEQ ID NO: 54290 - DNA, 25 bp, probe
tggctaagatgattggcgaagtaat

SEQ ID NO: 54291 - DNA, 25 bp, probe
atggctaagatgattggcgaagtaa

SEQ ID NO: 54292 - DNA, 25 bp, probe
agaagaggagtgagtattatctgat

SEQ ID NO: 54293 - DNA, 25 bp, probe
agaggagtgagtattatctgatcca

SEQ ID NO: 54294 - DNA, 25 bp, probe
gatggctaagatgattggcgaagta

SEQ ID NO: 54295 - DNA, 25 bp, probe
gtgagtattatctgatccatgttct

SEQ ID NO: 54296 - DNA, 25 bp, probe
agtgagtattatctgatccatgttc

SEQ ID NO: 54297 - DNA, 25 bp, probe
gagtgagtattatctgatccatgtt

SEQ ID NO: 54298 - DNA, 25 bp, probe
tcctttccttcttctttctcttctt

SEQ ID NO: 54299 - DNA, 25 bp, probe
tcatcctttccttcttctttctctt

SEQ ID NO: 54300 - DNA, 25 bp, probe
atcatcctttccttcttctttctct

SEQ ID NO: 54301 - DNA, 25 bp, probe
atcctttccttcttctttctcttct

SEQ ID NO: 54302 - DNA, 25 bp, probe
catcctttccttcttctttctcttc

SEQ ID NO: 54303 - DNA, 25 bp, probe
gaagaggagtgagtattatctgatc

SEQ ID NO: 54304 - DNA, 25 bp, probe
ggagtgagtattatctgatccatgt

SEQ ID NO: 54305 - DNA, 25 bp, probe
gaggagtgagtattatctgatccat

SEQ ID NO: 54306 - DNA, 25 bp, probe
aagaggagtgagtattatctgatcc

SEQ ID NO: 54307 - DNA, 25 bp, probe
aggagtgagtattatctgatccatg

SEQ ID NO: 54308 - DNA, 25 bp, probe
aatcatcctttccttcttctttctc

SEQ ID NO: 54309 - DNA, 25 bp, probe
agatgattggcgaagtaatgacaat

SEQ ID NO: 54310 - DNA, 25 bp, probe
gatgattggcgaagtaatgacaatg

SEQ ID NO: 54311 - DNA, 25 bp, probe
aagatggctaagatgattggcgaag

SEQ ID NO: 54312 - DNA, 25 bp, probe
gaatcatcctttccttcttctttct

SEQ ID NO: 54313 - DNA, 25 bp, probe
atgattggcgaagtaatgacaatgt

SEQ ID NO: 54314 - DNA, 25 bp, probe
tgagtattatctgatccatgttctt

SEQ ID NO: 54315 - DNA, 25 bp, probe
ttcagaaagaagaggagtgagtatt

SEQ ID NO: 54316 - DNA, 25 bp, probe
cctttccttcttctttctcttctta

SEQ ID NO: 54317 - DNA, 25 bp, probe
gagtttctagggtgatggtatggat

SEQ ID NO: 54318 - DNA, 25 bp, probe
tgattggcgaagtaatgacaatgtt

SEQ ID NO: 54319 - DNA, 25 bp, probe
cactgctcttatcctgtggtagtac

SEQ ID NO: 54320 - DNA, 25 bp, probe
gagtattatctgatccatgttcttg

SEQ ID NO: 54321 - DNA, 25 bp, probe
agtttctagggtgatggtatggatg

SEQ ID NO: 54322 - DNA, 25 bp, probe
tctcttcttactttactttcttgct

SEQ ID NO: 54323 - DNA, 25 bp, probe
ctcctactctttgctcatcttctcc

SEQ ID NO: 54324 - DNA, 25 bp, probe
cctcctactctttgctcatcttctc

SEQ ID NO: 54325 - DNA, 25 bp, probe
agtattatctgatccatgttcttgg

SEQ ID NO: 54326 - DNA, 25 bp, probe
tcagaaagaagaggagtgagtatta

SEQ ID NO: 54327 - DNA, 25 bp, probe
caagatggctaagatgattggcgaa

SEQ ID NO: 54328 - DNA, 25 bp, probe
cctctacattccatattcagttgct

SEQ ID NO: 54329 - DNA, 25 bp, probe
tcctctacattccatattcagttgc

SEQ ID NO: 54330 - DNA, 25 bp, probe
cctcatcctctacattccatattca

SEQ ID NO: 54331 - DNA, 25 bp, probe
gctcatctctccagttcatcattaa

SEQ ID NO: 54332 - DNA, 25 bp, probe
ctacattccatattcagttgctacc

SEQ ID NO: 54333 - DNA, 25 bp, probe
tcctcatcctctacattccatattc

SEQ ID NO: 54334 - DNA, 25 bp, probe
ttgaggagacatatacagaagatgc

SEQ ID NO: 54335 - DNA, 25 bp, probe
tcatcctctacattccatattcagt

SEQ ID NO: 54336 - DNA, 25 bp, probe
ttcctcatcctctacattccatatt

SEQ ID NO: 54337 - DNA, 25 bp, probe
cttctgcttccttgctaatacactc

SEQ ID NO: 54338 - DNA, 25 bp, probe
ccttgaggagacatatacagaagat

SEQ ID NO: 54339 - DNA, 25 bp, probe
tctacattccatattcagttgctac

SEQ ID NO: 54340 - DNA, 25 bp, probe
agattactaacttccaacactcagt

SEQ ID NO: 54341 - DNA, 25 bp, probe
gacttctgcttccttgctaatacac

SEQ ID NO: 54342 - DNA, 25 bp, probe
gtgacttctgcttccttgctaatac

SEQ ID NO: 54343 - DNA, 25 bp, probe
ctcatcctctacattccatattcag

SEQ ID NO: 54344 - DNA, 25 bp, probe
aagattactaacttccaacactcag

SEQ ID NO: 54345 - DNA, 25 bp, probe
ctctacattccatattcagttgcta

SEQ ID NO: 54346 - DNA, 25 bp, probe
cttccttgctaatacactccttgag

SEQ ID NO: 54347 - DNA, 25 bp, probe
acttctgcttccttgctaatacact

SEQ ID NO: 54348 - DNA, 25 bp, probe
tgacttctgcttccttgctaataca

SEQ ID NO: 54349 - DNA, 25 bp, probe
tgtgacttctgcttccttgctaata

SEQ ID NO: 54350 - DNA, 25 bp, probe
taatgtgacttctgcttccttgcta

SEQ ID NO: 54351 - DNA, 25 bp, probe
atcctctacattccatattcagttg

SEQ ID NO: 54352 - DNA, 25 bp, probe
catcctctacattccatattcagtt

SEQ ID NO: 54353 - DNA, 25 bp, probe
cttgaggagacatatacagaagatg

SEQ ID NO: 54354 - DNA, 25 bp, probe
gctcaatatcttgtactgtgtgaag

SEQ ID NO: 54355 - DNA, 25 bp, probe
tgctcaatatcttgtactgtgtgaa

SEQ ID NO: 54356 - DNA, 25 bp, probe
ttgctcaatatcttgtactgtgtga

SEQ ID NO: 54357 - DNA, 25 bp, probe
ctccaggacattctgttctcattat

SEQ ID NO: 54358 - DNA, 25 bp, probe
tccaggacattctgttctcattatt

SEQ ID NO: 54359 - DNA, 25 bp, probe
tctccaggacattctgttctcatta

SEQ ID NO: 54360 - DNA, 25 bp, probe
atgtgacttctgcttccttgctaat

SEQ ID NO: 54361 - DNA, 25 bp, probe
gcttccttgctaatacactccttga

SEQ ID NO: 54362 - DNA, 25 bp, probe
ctgcttccttgctaatacactcctt

SEQ ID NO: 54363 - DNA, 25 bp, probe
ttctgcttccttgctaatacactcc

SEQ ID NO: 54364 - DNA, 25 bp, probe
aatgtgacttctgcttccttgctaa

SEQ ID NO: 54365 - DNA, 25 bp, probe
ttactctccaggacattctgttctc

SEQ ID NO: 54366 - DNA, 25 bp, probe
agctcatctctccagttcatcatta

SEQ ID NO: 54367 - DNA, 25 bp, probe
ccaggacattctgttctcattatta

SEQ ID NO: 54368 - DNA, 25 bp, probe
ttaatgtgacttctgcttccttgct

SEQ ID NO: 54369 - DNA, 25 bp, probe
tggtctatttcctcatcctctacat

SEQ ID NO: 54370 - DNA, 25 bp, probe
tgcttccttgctaatacactccttg

SEQ ID NO: 54371 - DNA, 25 bp, probe
ctttagtggtttctttggtcttgag

SEQ ID NO: 54372 - DNA, 25 bp, probe
caagcagatacaacatcatagcact

SEQ ID NO: 54373 - DNA, 25 bp, probe
gatacaacatcatagcactggtcac

SEQ ID NO: 54374 - DNA, 25 bp, probe
agatacaacatcatagcactggtca

SEQ ID NO: 54375 - DNA, 25 bp, probe
tgaccaagcagatacaacatcatag

SEQ ID NO: 54376 - DNA, 25 bp, probe
catcagtatcagttccaggctcata

SEQ ID NO: 54377 - DNA, 25 bp, probe
atacaacatcatagcactggtcact

SEQ ID NO: 54378 - DNA, 25 bp, probe
gaccaagcagatacaacatcatagc

SEQ ID NO: 54379 - DNA, 25 bp, probe
ccaagcagatacaacatcatagcac

SEQ ID NO: 54380 - DNA, 25 bp, probe
tatcagttccaggctcatacagttg

SEQ ID NO: 54381 - DNA, 25 bp, probe
ctgaccaagcagatacaacatcata

SEQ ID NO: 54382 - DNA, 25 bp, probe
aagcagatacaacatcatagcactg

SEQ ID NO: 54383 - DNA, 25 bp, probe
accaagcagatacaacatcatagca

SEQ ID NO: 54384 - DNA, 25 bp, probe
cagatacaacatcatagcactggtc

SEQ ID NO: 54385 - DNA, 25 bp, probe
tacaacatcatagcactggtcactg

SEQ ID NO: 54386 - DNA, 25 bp, probe
taaccatactcatcaccattatagg

SEQ ID NO: 54387 - DNA, 25 bp, probe
atcagtatcagttccaggctcatac

SEQ ID NO: 54388 - DNA, 25 bp, probe
catacagttgcattggttattcctt

SEQ ID NO: 54389 - DNA, 25 bp, probe
ctcatacagttgcattggttattcc

SEQ ID NO: 54390 - DNA, 25 bp, probe
aaccatactcatcaccattataggt

SEQ ID NO: 54391 - DNA, 25 bp, probe
ttctaaccatactcatcaccattat

SEQ ID NO: 54392 - DNA, 25 bp, probe
tgccgtcttatttattgtgtttacc

SEQ ID NO: 54393 - DNA, 25 bp, probe
tcatacagttgcattggttattcct

SEQ ID NO: 54394 - DNA, 25 bp, probe
ggttctctgatgattacttgtgtaa

SEQ ID NO: 54395 - DNA, 25 bp, probe
tactgggttctctgatgattacttg

SEQ ID NO: 54396 - DNA, 25 bp, probe
ccttgccgtcttatttattgtgttt

SEQ ID NO: 54397 - DNA, 25 bp, probe
gggttctctgatgattacttgtgta

SEQ ID NO: 54398 - DNA, 25 bp, probe
gccgtcttatttattgtgtttacct

SEQ ID NO: 54399 - DNA, 25 bp, probe
ctggatattactgggttctctgatg

SEQ ID NO: 54400 - DNA, 25 bp, probe
cattggttattcctttcatcctgtt

SEQ ID NO: 54401 - DNA, 25 bp, probe
actttctaaccatactcatcaccat

SEQ ID NO: 54402 - DNA, 25 bp, probe
tggatattactgggttctctgatga

SEQ ID NO: 54403 - DNA, 25 bp, probe
gctcatacagttgcattggttattc

SEQ ID NO: 54404 - DNA, 25 bp, probe
attggttattcctttcatcctgttc

SEQ ID NO: 54405 - DNA, 25 bp, probe
ggatattactgggttctctgatgat

SEQ ID NO: 54406 - DNA, 25 bp, probe
ttggttattcctttcatcctgttcc

SEQ ID NO: 54407 - DNA, 25 bp, probe
ttactgggttctctgatgattactt

SEQ ID NO: 54408 - DNA, 25 bp, probe
aaaggattctaaagggaaagtgcta

SEQ ID NO: 54409 - DNA, 25 bp, probe
ttctttcacccatcacatctttctc

SEQ ID NO: 54410 - DNA, 25 bp, probe
cttctttcacccatcacatctttct

SEQ ID NO: 54411 - DNA, 25 bp, probe
tcttctttcacccatcacatctttc

SEQ ID NO: 54412 - DNA, 25 bp, probe
ctcttctttcacccatcacatcttt

SEQ ID NO: 54413 - DNA, 25 bp, probe
tactttctaaccatactcatcacca

SEQ ID NO: 54414 - DNA, 25 bp, probe
tcatcagtatcagttccaggctcat

SEQ ID NO: 54415 - DNA, 25 bp, probe
ctgggttctctgatgattacttgtg

SEQ ID NO: 54416 - DNA, 25 bp, probe
acttctcagatgaacagtaggactt

SEQ ID NO: 54417 - DNA, 25 bp, probe
agttgtgagataacattctggtagc

SEQ ID NO: 54418 - DNA, 25 bp, probe
tacttctcagatgaacagtaggact

SEQ ID NO: 54419 - DNA, 25 bp, probe
ttacttctcagatgaacagtaggac

SEQ ID NO: 54420 - DNA, 25 bp, probe
ggtttggattagcagtggaataaag

SEQ ID NO: 54421 - DNA, 25 bp, probe
attagcagtggaataaagagatggg

SEQ ID NO: 54422 - DNA, 25 bp, probe
ttggattagcagtggaataaagaga

SEQ ID NO: 54423 - DNA, 25 bp, probe
agagatattcagggtttggattagc

SEQ ID NO: 54424 - DNA, 25 bp, probe
tagttgtgagataacattctggtag

SEQ ID NO: 54425 - DNA, 25 bp, probe
agatattcagggtttggattagcag

SEQ ID NO: 54426 - DNA, 25 bp, probe
tggattagcagtggaataaagagat

SEQ ID NO: 54427 - DNA, 25 bp, probe
gagatattcagggtttggattagca

SEQ ID NO: 54428 - DNA, 25 bp, probe
gcagagatattcagggtttggatta

SEQ ID NO: 54429 - DNA, 25 bp, probe
gattagcagtggaataaagagatgg

SEQ ID NO: 54430 - DNA, 25 bp, probe
ggattagcagtggaataaagagatg

SEQ ID NO: 54431 - DNA, 25 bp, probe
gatattcagggtttggattagcagt

SEQ ID NO: 54432 - DNA, 25 bp, probe
gtttggattagcagtggaataaaga

SEQ ID NO: 54433 - DNA, 25 bp, probe
atattcagggtttggattagcagtg

SEQ ID NO: 54434 - DNA, 25 bp, probe
tttggattagcagtggaataaagag

SEQ ID NO: 54435 - DNA, 25 bp, probe
ttgtgagataacattctggtagctc

SEQ ID NO: 54436 - DNA, 25 bp, probe
ctagttgtgagataacattctggta

SEQ ID NO: 54437 - DNA, 25 bp, probe
gaataaagagatgggcattgtttcc

SEQ ID NO: 54438 - DNA, 25 bp, probe
ggaataaagagatgggcattgtttc

SEQ ID NO: 54439 - DNA, 25 bp, probe
tggaataaagagatgggcattgttt

SEQ ID NO: 54440 - DNA, 25 bp, probe
gttgtgagataacattctggtagct

SEQ ID NO: 54441 - DNA, 25 bp, probe
gagataacattctggtagctcagtt

SEQ ID NO: 54442 - DNA, 25 bp, probe
gggtttggattagcagtggaataaa

SEQ ID NO: 54443 - DNA, 25 bp, probe
caaggtttacttctcagatgaacag

SEQ ID NO: 54444 - DNA, 25 bp, probe
cagagatattcagggtttggattag

SEQ ID NO: 54445 - DNA, 25 bp, probe
cttctcagatgaacagtaggacttt

SEQ ID NO: 54446 - DNA, 25 bp, probe
ttctcagatgaacagtaggactttg

SEQ ID NO: 54447 - DNA, 25 bp, probe
aaggtttacttctcagatgaacagt

SEQ ID NO: 54448 - DNA, 25 bp, probe
taaatgtgtggtgactgctttgtag

SEQ ID NO: 54449 - DNA, 25 bp, probe
ctaaatgtgtggtgactgctttgta

SEQ ID NO: 54450 - DNA, 25 bp, probe
gtggaataaagagatgggcattgtt

SEQ ID NO: 54451 - DNA, 25 bp, probe
gcaaggtttacttctcagatgaaca

SEQ ID NO: 54452 - DNA, 25 bp, probe
cagatgaacagtaggactttgtagt

SEQ ID NO: 54453 - DNA, 25 bp, probe
tcagatgaacagtaggactttgtag

SEQ ID NO: 54454 - DNA, 25 bp, probe
ctcagatgaacagtaggactttgta

SEQ ID NO: 54455 - DNA, 25 bp, probe
agggtttggattagcagtggaataa

SEQ ID NO: 54456 - DNA, 25 bp, probe
agataacattctggtagctcagtta

SEQ ID NO: 54457 - DNA, 25 bp, probe
cagtggaataaagagatgggcattg

SEQ ID NO: 54458 - DNA, 25 bp, probe
agatgaacagtaggactttgtagtt

SEQ ID NO: 54459 - DNA, 25 bp, probe
tgtggaggcatgtaataagataaac

SEQ ID NO: 54460 - DNA, 25 bp, probe
tattatacaactgctgtgaccagac

SEQ ID NO: 54461 - DNA, 25 bp, probe
ttacatgaagatggagtgctaatgg

SEQ ID NO: 54462 - DNA, 25 bp, probe
gtattatacaactgctgtgaccaga

SEQ ID NO: 54463 - DNA, 25 bp, probe
agtattatacaactgctgtgaccag

SEQ ID NO: 54464 - DNA, 25 bp, probe
ctggatctacggagtcttctaagag

SEQ ID NO: 54465 - DNA, 25 bp, probe
ggtcttgcttcaatgactccaatat

SEQ ID NO: 54466 - DNA, 25 bp, probe
tggatctacggagtcttctaagaga

SEQ ID NO: 54467 - DNA, 25 bp, probe
tacatgaagatggagtgctaatgga

SEQ ID NO: 54468 - DNA, 25 bp, probe
ttattgagcatctcttctccataag

SEQ ID NO: 54469 - DNA, 25 bp, probe
attatacaactgctgtgaccagact

SEQ ID NO: 54470 - DNA, 25 bp, probe
gattaaggaccagatcactgatgtg

SEQ ID NO: 54471 - DNA, 25 bp, probe
ttatacaactgctgtgaccagactt

SEQ ID NO: 54472 - DNA, 25 bp, probe
atgaagatggagtgctaatggaaat

SEQ ID NO: 54473 - DNA, 25 bp, probe
acatgaagatggagtgctaatggaa

SEQ ID NO: 54474 - DNA, 25 bp, probe
gtcttgcttcaatgactccaatatt

SEQ ID NO: 54475 - DNA, 25 bp, probe
gcaagacattagccctttagttatg

SEQ ID NO: 54476 - DNA, 25 bp, probe
agacattagccctttagttatgagc

SEQ ID NO: 54477 - DNA, 25 bp, probe
cctggatctacggagtcttctaaga

SEQ ID NO: 54478 - DNA, 25 bp, probe
tgaagatggagtgctaatggaaatg

SEQ ID NO: 54479 - DNA, 25 bp, probe
ggatctacggagtcttctaagagat

SEQ ID NO: 54480 - DNA, 25 bp, probe
attagccctttagttatgagcctgt

SEQ ID NO: 54481 - DNA, 25 bp, probe
gcatctcttctccataagatagtgt

SEQ ID NO: 54482 - DNA, 25 bp, probe
cattagccctttagttatgagcctg

SEQ ID NO: 54483 - DNA, 25 bp, probe
gacattagccctttagttatgagcc

SEQ ID NO: 54484 - DNA, 25 bp, probe
tacctacggaaatcctaactaccac

SEQ ID NO: 54485 - DNA, 25 bp, probe
agcatctcttctccataagatagtg

SEQ ID NO: 54486 - DNA, 25 bp, probe
caactgctgtgaccagacttgtata

SEQ ID NO: 54487 - DNA, 25 bp, probe
tatacaactgctgtgaccagacttg

SEQ ID NO: 54488 - DNA, 25 bp, probe
gtgtacctacggaaatcctaactac

SEQ ID NO: 54489 - DNA, 25 bp, probe
attgagcatctcttctccataagat

SEQ ID NO: 54490 - DNA, 25 bp, probe
gatctacggagtcttctaagagatt

SEQ ID NO: 54491 - DNA, 25 bp, probe
gagcatctcttctccataagatagt

SEQ ID NO: 54492 - DNA, 25 bp, probe
tgagcatctcttctccataagatag

SEQ ID NO: 54493 - DNA, 25 bp, probe
caagacattagccctttagttatga

SEQ ID NO: 54494 - DNA, 25 bp, probe
tacctcaaactctggaacctgatta

SEQ ID NO: 54495 - DNA, 25 bp, probe
acattagccctttagttatgagcct

SEQ ID NO: 54496 - DNA, 25 bp, probe
cctcaaactctggaacctgattaag

SEQ ID NO: 54497 - DNA, 25 bp, probe
ttcctggatctacggagtcttctaa

SEQ ID NO: 54498 - DNA, 25 bp, probe
agacttgtatactggctgaatatca

SEQ ID NO: 54499 - DNA, 25 bp, probe
ttgagcatctcttctccataagata

SEQ ID NO: 54500 - DNA, 25 bp, probe
tattgagcatctcttctccataaga

SEQ ID NO: 54501 - DNA, 25 bp, probe
aagacattagccctttagttatgag

SEQ ID NO: 54502 - DNA, 25 bp, probe
gtacctacggaaatcctaactacca

SEQ ID NO: 54503 - DNA, 25 bp, probe
tgtacctacggaaatcctaactacc

SEQ ID NO: 54504 - DNA, 25 bp, probe
gaactccttcgtcaacgacatcttc

SEQ ID NO: 54505 - DNA, 25 bp, probe
gtatacgtgtacaaggtgctgaagc

SEQ ID NO: 54506 - DNA, 25 bp, probe
catgaactccttcgtcaacgacatc

SEQ ID NO: 54507 - DNA, 25 bp, probe
atgaactccttcgtcaacgacatct

SEQ ID NO: 54508 - DNA, 25 bp, probe
tgaactccttcgtcaacgacatctt

SEQ ID NO: 54509 - DNA, 25 bp, probe
gaatcatgaactccttcgtcaacga

SEQ ID NO: 54510 - DNA, 25 bp, probe
aatcatgaactccttcgtcaacgac

SEQ ID NO: 54511 - DNA, 25 bp, probe
ggaatcatgaactccttcgtcaacg

SEQ ID NO: 54512 - DNA, 25 bp, probe
aactccttcgtcaacgacatcttcg

SEQ ID NO: 54513 - DNA, 25 bp, probe
gggaatcatgaactccttcgtcaac

SEQ ID NO: 54514 - DNA, 25 bp, probe
tcatgaactccttcgtcaacgacat

SEQ ID NO: 54515 - DNA, 25 bp, probe
atcatgaactccttcgtcaacgaca

SEQ ID NO: 54516 - DNA, 25 bp, probe
tatacgtgtacaaggtgctgaagca

SEQ ID NO: 54517 - DNA, 25 bp, probe
atgggaatcatgaactccttcgtca

SEQ ID NO: 54518 - DNA, 25 bp, probe
tgggaatcatgaactccttcgtcaa

SEQ ID NO: 54519 - DNA, 25 bp, probe
catgggaatcatgaactccttcgtc

SEQ ID NO: 54520 - DNA, 25 bp, probe
atacgtgtacaaggtgctgaagcag

SEQ ID NO: 54521 - DNA, 25 bp, probe
catctcctctaaggccatgggaatc

SEQ ID NO: 54522 - DNA, 25 bp, probe
ctaaggccatgggaatcatgaactc

SEQ ID NO: 54523 - DNA, 25 bp, probe
ctctaaggccatgggaatcatgaac

SEQ ID NO: 54524 - DNA, 25 bp, probe
tctcctctaaggccatgggaatcat

SEQ ID NO: 54525 - DNA, 25 bp, probe
atctcctctaaggccatgggaatca

SEQ ID NO: 54526 - DNA, 25 bp, probe
tctaaggccatgggaatcatgaact

SEQ ID NO: 54527 - DNA, 25 bp, probe
cctctaaggccatgggaatcatgaa

SEQ ID NO: 54528 - DNA, 25 bp, probe
ctccttcgtcaacgacatcttcgaa

SEQ ID NO: 54529 - DNA, 25 bp, probe
taaggccatgggaatcatgaactcc

SEQ ID NO: 54530 - DNA, 25 bp, probe
tccttcgtcaacgacatcttcgaac

SEQ ID NO: 54531 - DNA, 25 bp, probe
ctcctctaaggccatgggaatcatg

SEQ ID NO: 54532 - DNA, 25 bp, probe
ccatgggaatcatgaactccttcgt

SEQ ID NO: 54533 - DNA, 25 bp, probe
tcctctaaggccatgggaatcatga

SEQ ID NO: 54534 - DNA, 25 bp, probe
atcagcattatctcggacacatctt

SEQ ID NO: 54535 - DNA, 25 bp, probe
aacatcagcattatctcggacacat

SEQ ID NO: 54536 - DNA, 25 bp, probe
catcagcattatctcggacacatct

SEQ ID NO: 54537 - DNA, 25 bp, probe
tcagcattatctcggacacatcttg

SEQ ID NO: 54538 - DNA, 25 bp, probe
acatcagcattatctcggacacatc

SEQ ID NO: 54539 - DNA, 25 bp, probe
caacatcagcattatctcggacaca

SEQ ID NO: 54540 - DNA, 25 bp, probe
cagcattatctcggacacatcttgt

SEQ ID NO: 54541 - DNA, 25 bp, probe
gtctataccaaagtctgccactact

SEQ ID NO: 54542 - DNA, 25 bp, probe
tgtctataccaaagtctgccactac

SEQ ID NO: 54543 - DNA, 25 bp, probe
ccaacatcagcattatctcggacac

SEQ ID NO: 54544 - DNA, 25 bp, probe
gtgtctataccaaagtctgccacta

SEQ ID NO: 54545 - DNA, 25 bp, probe
attgtgccaacatcagcattatctc

SEQ ID NO: 54546 - DNA, 25 bp, probe
cattgtgccaacatcagcattatct

SEQ ID NO: 54547 - DNA, 25 bp, probe
ctataccaaagtctgccactacttg

SEQ ID NO: 54548 - DNA, 25 bp, probe
tctataccaaagtctgccactactt

SEQ ID NO: 54549 - DNA, 25 bp, probe
gatcagggaaaccatgaagaggaac

SEQ ID NO: 54550 - DNA, 25 bp, probe
atcagggaaaccatgaagaggaact

SEQ ID NO: 54551 - DNA, 25 bp, probe
gcattgtgccaacatcagcattatc

SEQ ID NO: 54552 - DNA, 25 bp, probe
actacttggagtggatcagggaaac

SEQ ID NO: 54553 - DNA, 25 bp, probe
cattatctcggacacatcttgtgac

SEQ ID NO: 54554 - DNA, 25 bp, probe
ttgtgccaacatcagcattatctcg

SEQ ID NO: 54555 - DNA, 25 bp, probe
ggatcagggaaaccatgaagaggaa

SEQ ID NO: 54556 - DNA, 25 bp, probe
attatctcggacacatcttgtgaca

SEQ ID NO: 54557 - DNA, 25 bp, probe
ttatctcggacacatcttgtgacaa

SEQ ID NO: 54558 - DNA, 25 bp, probe
ctacttggagtggatcagggaaacc

SEQ ID NO: 54559 - DNA, 25 bp, probe
ggtgtctataccaaagtctgccact

SEQ ID NO: 54560 - DNA, 25 bp, probe
cagggaaaccatgaagaggaactga

SEQ ID NO: 54561 - DNA, 25 bp, probe
tcagggaaaccatgaagaggaactg

SEQ ID NO: 54562 - DNA, 25 bp, probe
agtggatcagggaaaccatgaagag

SEQ ID NO: 54563 - DNA, 25 bp, probe
gagtggatcagggaaaccatgaaga

SEQ ID NO: 54564 - DNA, 25 bp, probe
tataccaaagtctgccactacttgg

SEQ ID NO: 54565 - DNA, 25 bp, probe
tgcattgtgccaacatcagcattat

SEQ ID NO: 54566 - DNA, 25 bp, probe
gcattatctcggacacatcttgtga

SEQ ID NO: 54567 - DNA, 25 bp, probe
agcattatctcggacacatcttgtg

SEQ ID NO: 54568 - DNA, 25 bp, probe
tatctcggacacatcttgtgacaag

SEQ ID NO: 54569 - DNA, 25 bp, probe
ttgcattgtgccaacatcagcatta

SEQ ID NO: 54570 - DNA, 25 bp, probe
gagtctcccagatacgttgcattgt

SEQ ID NO: 54571 - DNA, 25 bp, probe
tgagtctcccagatacgttgcattg

SEQ ID NO: 54572 - DNA, 25 bp, probe
gtgagtctcccagatacgttgcatt

SEQ ID NO: 54573 - DNA, 25 bp, probe
tacttggagtggatcagggaaacca

SEQ ID NO: 54574 - DNA, 25 bp, probe
agtctcccagatacgttgcattgtg

SEQ ID NO: 54575 - DNA, 25 bp, probe
gtggatcagggaaaccatgaagagg

SEQ ID NO: 54576 - DNA, 25 bp, probe
ggagtggatcagggaaaccatgaag

SEQ ID NO: 54577 - DNA, 25 bp, probe
tggatcagggaaaccatgaagagga

SEQ ID NO: 54578 - DNA, 25 bp, probe
aagagcggattagtcacagatattg

SEQ ID NO: 54579 - DNA, 25 bp, probe
caagagcggattagtcacagatatt

SEQ ID NO: 54580 - DNA, 25 bp, probe
tgtgatctattccaatgttcttcca

SEQ ID NO: 54581 - DNA, 25 bp, probe
ctgtgatctattccaatgttcttcc

SEQ ID NO: 54582 - DNA, 25 bp, probe
cctgtgatctattccaatgttcttc

SEQ ID NO: 54583 - DNA, 25 bp, probe
gtgatctattccaatgttcttccaa

SEQ ID NO: 54584 - DNA, 25 bp, probe
tgatctattccaatgttcttccaag

SEQ ID NO: 54585 - DNA, 25 bp, probe
agagcggattagtcacagatattgg

SEQ ID NO: 54586 - DNA, 25 bp, probe
catagaccgattcttcatgtggatt

SEQ ID NO: 54587 - DNA, 25 bp, probe
gatctattccaatgttcttccaaga

SEQ ID NO: 54588 - DNA, 25 bp, probe
tcatagaccgattcttcatgtggat

SEQ ID NO: 54589 - DNA, 25 bp, probe
gcaagagcggattagtcacagatat

SEQ ID NO: 54590 - DNA, 25 bp, probe
tctattccaatgttcttccaagatt

SEQ ID NO: 54591 - DNA, 25 bp, probe
atcatagcaagagcggattagtcac

SEQ ID NO: 54592 - DNA, 25 bp, probe
aagtcatagaccgattcttcatgtg

SEQ ID NO: 54593 - DNA, 25 bp, probe
ggaagatggaagaaatagggaaaga

SEQ ID NO: 54594 - DNA, 25 bp, probe
aggaagatggaagaaatagggaaag

SEQ ID NO: 54595 - DNA, 25 bp, probe
caagggtaggaagatggaagaaata

SEQ ID NO: 54596 - DNA, 25 bp, probe
ttagtcacagatattggctttgcta

SEQ ID NO: 54597 - DNA, 25 bp, probe
tagtcacagatattggctttgctat

SEQ ID NO: 54598 - DNA, 25 bp, probe
gattagtcacagatattggctttgc

SEQ ID NO: 54599 - DNA, 25 bp, probe
ggattagtcacagatattggctttg

SEQ ID NO: 54600 - DNA, 25 bp, probe
aagatggaagaaatagggaaagagc

SEQ ID NO: 54601 - DNA, 25 bp, probe
gtaggaagatggaagaaatagggaa

SEQ ID NO: 54602 - DNA, 25 bp, probe
aagggtaggaagatggaagaaatag

SEQ ID NO: 54603 - DNA, 25 bp, probe
gatcatagcaagagcggattagtca

SEQ ID NO: 54604 - DNA, 25 bp, probe
attagtcacagatattggctttgct

SEQ ID NO: 54605 - DNA, 25 bp, probe
gcggattagtcacagatattggctt

SEQ ID NO: 54606 - DNA, 25 bp, probe
cggattagtcacagatattggcttt

SEQ ID NO: 54607 - DNA, 25 bp, probe
ggtaggaagatggaagaaataggga

SEQ ID NO: 54608 - DNA, 25 bp, probe
agggtaggaagatggaagaaatagg

SEQ ID NO: 54609 - DNA, 25 bp, probe
gaagatggaagaaatagggaaagag

SEQ ID NO: 54610 - DNA, 25 bp, probe
tcaagggtaggaagatggaagaaat

SEQ ID NO: 54611 - DNA, 25 bp, probe
taggaagatggaagaaatagggaaa

SEQ ID NO: 54612 - DNA, 25 bp, probe
ggaatattgagtacatcgccaagtg

SEQ ID NO: 54613 - DNA, 25 bp, probe
aatttcaagggtaggaagatggaag

SEQ ID NO: 54614 - DNA, 25 bp, probe
atttcaagggtaggaagatggaaga

SEQ ID NO: 54615 - DNA, 25 bp, probe
ggctttgctatctgggtagaaatta

SEQ ID NO: 54616 - DNA, 25 bp, probe
ttcaagggtaggaagatggaagaaa

SEQ ID NO: 54617 - DNA, 25 bp, probe
tttcaagggtaggaagatggaagaa

SEQ ID NO: 54618 - DNA, 25 bp, probe
attccctgtgatctattccaatgtt

SEQ ID NO: 54619 - DNA, 25 bp, probe
aattccctgtgatctattccaatgt

SEQ ID NO: 54620 - DNA, 25 bp, probe
gctttgctatctgggtagaaattaa

SEQ ID NO: 54621 - DNA, 25 bp, probe
caattccctgtgatctattccaatg

SEQ ID NO: 54622 - DNA, 25 bp, probe
ataaagcacaggcaccacaaataaa

SEQ ID NO: 54623 - DNA, 25 bp, probe
gataaagcacaggcaccacaaataa

SEQ ID NO: 54624 - DNA, 25 bp, probe
tgtgactcttacagacctgaaggag

SEQ ID NO: 54625 - DNA, 25 bp, probe
agataaagcacaggcaccacaaata

SEQ ID NO: 54626 - DNA, 25 bp, probe
gtgtgactcttacagacctgaagga

SEQ ID NO: 54627 - DNA, 25 bp, probe
gtatatagggtccatgtgcaatagg

SEQ ID NO: 54628 - DNA, 25 bp, probe
tgtatatagggtccatgtgcaatag

SEQ ID NO: 54629 - DNA, 25 bp, probe
ctgtatatagggtccatgtgcaata

SEQ ID NO: 54630 - DNA, 25 bp, probe
tatatagggtccatgtgcaataggg

SEQ ID NO: 54631 - DNA, 25 bp, probe
gaccaagaagtgcaaggatcagtag

SEQ ID NO: 54632 - DNA, 25 bp, probe
gtgactcttacagacctgaaggagg

SEQ ID NO: 54633 - DNA, 25 bp, probe
ctttcccgcacccgtatttatacag

SEQ ID NO: 54634 - DNA, 25 bp, probe
gactttcccgcacccgtatttatac

SEQ ID NO: 54635 - DNA, 25 bp, probe
gagataaagcacaggcaccacaaat

SEQ ID NO: 54636 - DNA, 25 bp, probe
taaagcacaggcaccacaaataaaa

SEQ ID NO: 54637 - DNA, 25 bp, probe
cctgtatatagggtccatgtgcaat

SEQ ID NO: 54638 - DNA, 25 bp, probe
caggaaggaactgaggaccaagaag

SEQ ID NO: 54639 - DNA, 25 bp, probe
accacaaataaaagtcgtgaagttg

SEQ ID NO: 54640 - DNA, 25 bp, probe
caccacaaataaaagtcgtgaagtt

SEQ ID NO: 54641 - DNA, 25 bp, probe
acaaataaaagtcgtgaagttgcca

SEQ ID NO: 54642 - DNA, 25 bp, probe
ggaaggaactgaggaccaagaagtg

SEQ ID NO: 54643 - DNA, 25 bp, probe
ggtgtgactcttacagacctgaagg

SEQ ID NO: 54644 - DNA, 25 bp, probe
actttcccgcacccgtatttataca

SEQ ID NO: 54645 - DNA, 25 bp, probe
ggaccaagaagtgcaaggatcagta

SEQ ID NO: 54646 - DNA, 25 bp, probe
aggaaggaactgaggaccaagaagt

SEQ ID NO: 54647 - DNA, 25 bp, probe
aaggtattttcgagataaagcacag

SEQ ID NO: 54648 - DNA, 25 bp, probe
ggggagaaggtattttcgagataaa

SEQ ID NO: 54649 - DNA, 25 bp, probe
aggtattttcgagataaagcacagg

SEQ ID NO: 54650 - DNA, 25 bp, probe
ggagaaggtattttcgagataaagc

SEQ ID NO: 54651 - DNA, 25 bp, probe
gaaggtattttcgagataaagcaca

SEQ ID NO: 54652 - DNA, 25 bp, probe
ttacagacctgaaggaggcagagaa

SEQ ID NO: 54653 - DNA, 25 bp, probe
aaataaaagtcgtgaagttgccact

SEQ ID NO: 54654 - DNA, 25 bp, probe
caaataaaagtcgtgaagttgccac

SEQ ID NO: 54655 - DNA, 25 bp, probe
cacaaataaaagtcgtgaagttgcc

SEQ ID NO: 54656 - DNA, 25 bp, probe
ccacaaataaaagtcgtgaagttgc

SEQ ID NO: 54657 - DNA, 25 bp, probe
agaaggtattttcgagataaagcac

SEQ ID NO: 54658 - DNA, 25 bp, probe
gagaaggtattttcgagataaagca

SEQ ID NO: 54659 - DNA, 25 bp, probe
gggagaaggtattttcgagataaag

SEQ ID NO: 54660 - DNA, 25 bp, probe
atatagggtccatgtgcaataggga

SEQ ID NO: 54661 - DNA, 25 bp, probe
aaagcacaggcaccacaaataaaag

SEQ ID NO: 54662 - DNA, 25 bp, probe
aataaaagtcgtgaagttgccactc

SEQ ID NO: 54663 - DNA, 25 bp, probe
aagaagtgcaaggatcagtagccag

SEQ ID NO: 54664 - DNA, 25 bp, probe
tattttcgagataaagcacaggcac

SEQ ID NO: 54665 - DNA, 25 bp, probe
gtattttcgagataaagcacaggca

SEQ ID NO: 54666 - DNA, 25 bp, probe
accagtgttctaagagtgttactaa

SEQ ID NO: 54667 - DNA, 25 bp, probe
aaccagtgttctaagagtgttacta

SEQ ID NO: 54668 - DNA, 25 bp, probe
ccagtgttctaagagtgttactaac

SEQ ID NO: 54669 - DNA, 25 bp, probe
aatactgtcaccagatattgccatt

SEQ ID NO: 54670 - DNA, 25 bp, probe
ttaatactgtcaccagatattgcca

SEQ ID NO: 54671 - DNA, 25 bp, probe
taatactgtcaccagatattgccat

SEQ ID NO: 54672 - DNA, 25 bp, probe
caacttgaacgaatgtcacaacttg

SEQ ID NO: 54673 - DNA, 25 bp, probe
gataacctgtactatggacactacc

SEQ ID NO: 54674 - DNA, 25 bp, probe
ggataacctgtactatggacactac

SEQ ID NO: 54675 - DNA, 25 bp, probe
cttgaacgaatgtcacaacttgtac

SEQ ID NO: 54676 - DNA, 25 bp, probe
tgaacgaatgtcacaacttgtactt

SEQ ID NO: 54677 - DNA, 25 bp, probe
ttgaacgaatgtcacaacttgtact

SEQ ID NO: 54678 - DNA, 25 bp, probe
acttgaacgaatgtcacaacttgta

SEQ ID NO: 54679 - DNA, 25 bp, probe
ttgtgtgaagaagagaatgtttgtc

SEQ ID NO: 54680 - DNA, 25 bp, probe
gtgatttgtgtgaagaagagaatgt

SEQ ID NO: 54681 - DNA, 25 bp, probe
ttattccacacttcctacttggtct

SEQ ID NO: 54682 - DNA, 25 bp, probe
ataacctgtactatggacactacca

SEQ ID NO: 54683 - DNA, 25 bp, probe
tttgtgtgaagaagagaatgtttgt

SEQ ID NO: 54684 - DNA, 25 bp, probe
agtgatttgtgtgaagaagagaatg

SEQ ID NO: 54685 - DNA, 25 bp, probe
cagtgatttgtgtgaagaagagaat

SEQ ID NO: 54686 - DNA, 25 bp, probe
tgatttgtgtgaagaagagaatgtt

SEQ ID NO: 54687 - DNA, 25 bp, probe
actatttgtagaaactgtcaggtca

SEQ ID NO: 54688 - DNA, 25 bp, probe
tcactatttgtagaaactgtcaggt

SEQ ID NO: 54689 - DNA, 25 bp, probe
taacctgtactatggacactaccac

SEQ ID NO: 54690 - DNA, 25 bp, probe
caaaccagtgttctaagagtgttac

SEQ ID NO: 54691 - DNA, 25 bp, probe
cactatttgtagaaactgtcaggtc

SEQ ID NO: 54692 - DNA, 25 bp, probe
tattccacacttcctacttggtctc

SEQ ID NO: 54693 - DNA, 25 bp, probe
aacttgaacgaatgtcacaacttgt

SEQ ID NO: 54694 - DNA, 25 bp, probe
tgtgtgaagaagagaatgtttgtct

SEQ ID NO: 54695 - DNA, 25 bp, probe
aggtgcctggtaatttatctctttg

SEQ ID NO: 54696 - DNA, 25 bp, probe
atttgtgtgaagaagagaatgtttg

SEQ ID NO: 54697 - DNA, 25 bp, probe
aaaccagtgttctaagagtgttact

SEQ ID NO: 54698 - DNA, 25 bp, probe
atcactatttgtagaaactgtcagg

SEQ ID NO: 54699 - DNA, 25 bp, probe
gatttgtgtgaagaagagaatgttt

SEQ ID NO: 54700 - DNA, 25 bp, probe
gcagtgatttgtgtgaagaagagaa

SEQ ID NO: 54701 - DNA, 25 bp, probe
gcaacttgaacgaatgtcacaactt

SEQ ID NO: 54702 - DNA, 25 bp, probe
acaaaccagtgttctaagagtgtta

SEQ ID NO: 54703 - DNA, 25 bp, probe
aaatgtcaaatgaacaaaccagtgt

SEQ ID NO: 54704 - DNA, 25 bp, probe
cttaatgatgaagatcactgccttg

SEQ ID NO: 54705 - DNA, 25 bp, probe
ctatttgtagaaactgtcaggtcaa

SEQ ID NO: 54706 - DNA, 25 bp, probe
ccttaatgatgaagatcactgcctt

SEQ ID NO: 54707 - DNA, 25 bp, probe
gtggtccctccttaatgatgaagat

SEQ ID NO: 54708 - DNA, 25 bp, probe
atactgtcaccagatattgccattt

SEQ ID NO: 54709 - DNA, 25 bp, probe
ctgatgccaatctcaacattgtctt

SEQ ID NO: 54710 - DNA, 25 bp, probe
actggtcattgggaattgtgtaaac

SEQ ID NO: 54711 - DNA, 25 bp, probe
ctctctgaagtgtctcctgttgtga

SEQ ID NO: 54712 - DNA, 25 bp, probe
ggataagctgaggtgactaaatgat

SEQ ID NO: 54713 - DNA, 25 bp, probe
ctggtcattgggaattgtgtaaaca

SEQ ID NO: 54714 - DNA, 25 bp, probe
ttccttccaggttctgttactcaca

SEQ ID NO: 54715 - DNA, 25 bp, probe
cactggtcattgggaattgtgtaaa

SEQ ID NO: 54716 - DNA, 25 bp, probe
tctctgaagtgtctcctgttgtgag

SEQ ID NO: 54717 - DNA, 25 bp, probe
gggataagctgaggtgactaaatga

SEQ ID NO: 54718 - DNA, 25 bp, probe
gataagctgaggtgactaaatgata

SEQ ID NO: 54719 - DNA, 25 bp, probe
tttccttccaggttctgttactcac

SEQ ID NO: 54720 - DNA, 25 bp, probe
attgggaattgtgtaaacacctctg

SEQ ID NO: 54721 - DNA, 25 bp, probe
cattgggaattgtgtaaacacctct

SEQ ID NO: 54722 - DNA, 25 bp, probe
tcattgggaattgtgtaaacacctc

SEQ ID NO: 54723 - DNA, 25 bp, probe
gtcattgggaattgtgtaaacacct

SEQ ID NO: 54724 - DNA, 25 bp, probe
cctctctgaagtgtctcctgttgtg

SEQ ID NO: 54725 - DNA, 25 bp, probe
tggtcattgggaattgtgtaaacac

SEQ ID NO: 54726 - DNA, 25 bp, probe
agctgaggtgactaaatgatatatt

SEQ ID NO: 54727 - DNA, 25 bp, probe
aagctgaggtgactaaatgatatat

SEQ ID NO: 54728 - DNA, 25 bp, probe
ataagctgaggtgactaaatgatat

SEQ ID NO: 54729 - DNA, 25 bp, probe
gattaaactgactttcttggcctta

SEQ ID NO: 54730 - DNA, 25 bp, probe
gacctctctgaagtgtctcctgttg

SEQ ID NO: 54731 - DNA, 25 bp, probe
agattaaactgactttcttggcctt

SEQ ID NO: 54732 - DNA, 25 bp, probe
ttaaactgactttcttggccttaaa

SEQ ID NO: 54733 - DNA, 25 bp, probe
acctctctgaagtgtctcctgttgt

SEQ ID NO: 54734 - DNA, 25 bp, probe
attaaactgactttcttggccttaa

SEQ ID NO: 54735 - DNA, 25 bp, probe
ataagattaaactgactttcttggc

SEQ ID NO: 54736 - DNA, 25 bp, probe
taagctgaggtgactaaatgatata

SEQ ID NO: 54737 - DNA, 25 bp, probe
ggtcattgggaattgtgtaaacacc

SEQ ID NO: 54738 - DNA, 25 bp, probe
gctgaggtgactaaatgatatattt

SEQ ID NO: 54739 - DNA, 25 bp, probe
ctctgaagtgtctcctgttgtgagg

SEQ ID NO: 54740 - DNA, 25 bp, probe
cttttccttccaggttctgttactc

SEQ ID NO: 54741 - DNA, 25 bp, probe
ttgggaattgtgtaaacacctctgg

SEQ ID NO: 54742 - DNA, 25 bp, probe
gcactggtcattgggaattgtgtaa

SEQ ID NO: 54743 - DNA, 25 bp, probe
ttttccttccaggttctgttactca

SEQ ID NO: 54744 - DNA, 25 bp, probe
aagattaaactgactttcttggcct

SEQ ID NO: 54745 - DNA, 25 bp, probe
ccttttccttccaggttctgttact

SEQ ID NO: 54746 - DNA, 25 bp, probe
taagattaaactgactttcttggcc

SEQ ID NO: 54747 - DNA, 25 bp, probe
attgtgtaaacacctctggggataa

SEQ ID NO: 54748 - DNA, 25 bp, probe
aattgtgtaaacacctctggggata

SEQ ID NO: 54749 - DNA, 25 bp, probe
ggggataagctgaggtgactaaatg

SEQ ID NO: 54750 - DNA, 25 bp, probe
ttgtgtaaacacctctggggataag

SEQ ID NO: 54751 - DNA, 25 bp, probe
taaactgactttcttggccttaaaa

SEQ ID NO: 54752 - DNA, 25 bp, probe
tggggataagctgaggtgactaaat

SEQ ID NO: 54753 - DNA, 25 bp, probe
cccttttccttccaggttctgttac

SEQ ID NO: 54754 - DNA, 25 bp, probe
aatatagtccaaccatcagcatctc

SEQ ID NO: 54755 - DNA, 25 bp, probe
gaatatagtccaaccatcagcatct

SEQ ID NO: 54756 - DNA, 25 bp, probe
atgatgagactgtgaattgttacct

SEQ ID NO: 54757 - DNA, 25 bp, probe
gatgatgagactgtgaattgttacc

SEQ ID NO: 54758 - DNA, 25 bp, probe
tgtgatgatgagactgtgaattgtt

SEQ ID NO: 54759 - DNA, 25 bp, probe
tatagtccaaccatcagcatctcat

SEQ ID NO: 54760 - DNA, 25 bp, probe
atatagtccaaccatcagcatctca

SEQ ID NO: 54761 - DNA, 25 bp, probe
tgatgatgagactgtgaattgttac

SEQ ID NO: 54762 - DNA, 25 bp, probe
gtgatgatgagactgtgaattgtta

SEQ ID NO: 54763 - DNA, 25 bp, probe
ctgtgatgatgagactgtgaattgt

SEQ ID NO: 54764 - DNA, 25 bp, probe
atgaatatagtccaaccatcagcat

SEQ ID NO: 54765 - DNA, 25 bp, probe
tgaatatagtccaaccatcagcatc

SEQ ID NO: 54766 - DNA, 25 bp, probe
gactgtgaattgttacctcatagac

SEQ ID NO: 54767 - DNA, 25 bp, probe
agactgtgaattgttacctcataga

SEQ ID NO: 54768 - DNA, 25 bp, probe
tgatgagactgtgaattgttacctc

SEQ ID NO: 54769 - DNA, 25 bp, probe
actgtgaattgttacctcatagaca

SEQ ID NO: 54770 - DNA, 25 bp, probe
cctggagccttgtgatactgaatat

SEQ ID NO: 54771 - DNA, 25 bp, probe
gagactgtgaattgttacctcatag

SEQ ID NO: 54772 - DNA, 25 bp, probe
gatccttataatgccttcctctctg

SEQ ID NO: 54773 - DNA, 25 bp, probe
ctggagccttgtgatactgaatatc

SEQ ID NO: 54774 - DNA, 25 bp, probe
ccttgtgatactgaatatccagcat

SEQ ID NO: 54775 - DNA, 25 bp, probe
atagtccaaccatcagcatctcatc

SEQ ID NO: 54776 - DNA, 25 bp, probe
gagccttgtgatactgaatatccag

SEQ ID NO: 54777 - DNA, 25 bp, probe
cttgtgatactgaatatccagcatt

SEQ ID NO: 54778 - DNA, 25 bp, probe
gcaacatacgagacatgaatatagt

SEQ ID NO: 54779 - DNA, 25 bp, probe
gctgtgatgatgagactgtgaattg

SEQ ID NO: 54780 - DNA, 25 bp, probe
catgaatatagtccaaccatcagca

SEQ ID NO: 54781 - DNA, 25 bp, probe
acatgaatatagtccaaccatcagc

SEQ ID NO: 54782 - DNA, 25 bp, probe
cgagacatgaatatagtccaaccat

SEQ ID NO: 54783 - DNA, 25 bp, probe
tacgagacatgaatatagtccaacc

SEQ ID NO: 54784 - DNA, 25 bp, probe
atactgaatatccagcattcgtctc

SEQ ID NO: 54785 - DNA, 25 bp, probe
gatactgaatatccagcattcgtct

SEQ ID NO: 54786 - DNA, 25 bp, probe
tgatactgaatatccagcattcgtc

SEQ ID NO: 54787 - DNA, 25 bp, probe
agacatgaatatagtccaaccatca

SEQ ID NO: 54788 - DNA, 25 bp, probe
gtgatactgaatatccagcattcgt

SEQ ID NO: 54789 - DNA, 25 bp, probe
tgtgatactgaatatccagcattcg

SEQ ID NO: 54790 - DNA, 25 bp, probe
gacatgaatatagtccaaccatcag

SEQ ID NO: 54791 - DNA, 25 bp, probe
atccttataatgccttcctctctgc

SEQ ID NO: 54792 - DNA, 25 bp, probe
ttgtgatactgaatatccagcattc

SEQ ID NO: 54793 - DNA, 25 bp, probe
acatacgagacatgaatatagtcca

SEQ ID NO: 54794 - DNA, 25 bp, probe
tactgaatatccagcattcgtctct

SEQ ID NO: 54795 - DNA, 25 bp, probe
gagacatgaatatagtccaaccatc

SEQ ID NO: 54796 - DNA, 25 bp, probe
acgagacatgaatatagtccaacca

SEQ ID NO: 54797 - DNA, 25 bp, probe
ctaaagcccagaaattgaaacagac

SEQ ID NO: 54798 - DNA, 25 bp, probe
attcattcatccatacatccacctg

SEQ ID NO: 54799 - DNA, 25 bp, probe
cattcattcatccatacatccacct

SEQ ID NO: 54800 - DNA, 25 bp, probe
gcatccattgttctgttcattcatt

SEQ ID NO: 54801 - DNA, 25 bp, probe
tcattcattcatccatacatccacc

SEQ ID NO: 54802 - DNA, 25 bp, probe
ttcattcattcatccatacatccac

SEQ ID NO: 54803 - DNA, 25 bp, probe
gttcattcattcatccatacatcca

SEQ ID NO: 54804 - DNA, 25 bp, probe
ttgttctgttcattcattcatccat

SEQ ID NO: 54805 - DNA, 25 bp, probe
attgttctgttcattcattcatcca

SEQ ID NO: 54806 - DNA, 25 bp, probe
tccattgttctgttcattcattcat

SEQ ID NO: 54807 - DNA, 25 bp, probe
atccattgttctgttcattcattca

SEQ ID NO: 54808 - DNA, 25 bp, probe
cattgttctgttcattcattcatcc

SEQ ID NO: 54809 - DNA, 25 bp, probe
ccattgttctgttcattcattcatc

SEQ ID NO: 54810 - DNA, 25 bp, probe
catccattgttctgttcattcattc

SEQ ID NO: 54811 - DNA, 25 bp, probe
tgttctgttcattcattcatccata

SEQ ID NO: 54812 - DNA, 25 bp, probe
gttctgttcattcattcatccatac

SEQ ID NO: 54813 - DNA, 25 bp, probe
tgttcattcattcatccatacatcc

SEQ ID NO: 54814 - DNA, 25 bp, probe
ttctgttcattcattcatccataca

SEQ ID NO: 54815 - DNA, 25 bp, probe
tctgttcattcattcatccatacat

SEQ ID NO: 54816 - DNA, 25 bp, probe
ctgttcattcattcatccatacatc

SEQ ID NO: 54817 - DNA, 25 bp, probe
ttcattcatccatacatccacctgc

SEQ ID NO: 54818 - DNA, 25 bp, probe
taccagtggaggaatagaacaggag

SEQ ID NO: 54819 - DNA, 25 bp, probe
ccatctgagaacaaggagaactctg

SEQ ID NO: 54820 - DNA, 25 bp, probe
ataagactctgccagaactgagaag

SEQ ID NO: 54821 - DNA, 25 bp, probe
gaatagaacaggagcagtgtgacat

SEQ ID NO: 54822 - DNA, 25 bp, probe
tgcatccattgttctgttcattcat

SEQ ID NO: 54823 - DNA, 25 bp, probe
cataagactctgccagaactgagaa

SEQ ID NO: 54824 - DNA, 25 bp, probe
catcgagatgatatattgctacaga

SEQ ID NO: 54825 - DNA, 25 bp, probe
gtaccagtggaggaatagaacagga

SEQ ID NO: 54826 - DNA, 25 bp, probe
catctgagaacaaggagaactctgc

SEQ ID NO: 54827 - DNA, 25 bp, probe
atcgagatgatatattgctacagaa

SEQ ID NO: 54828 - DNA, 25 bp, probe
aatagaacaggagcagtgtgacatg

SEQ ID NO: 54829 - DNA, 25 bp, probe
atcagacctctacgcaccataagac

SEQ ID NO: 54830 - DNA, 25 bp, probe
catcagacctctacgcaccataaga

SEQ ID NO: 54831 - DNA, 25 bp, probe
atgttcagcaatgtcaatggcatca

SEQ ID NO: 54832 - DNA, 25 bp, probe
tatattgctacagaaaggtctcaaa

SEQ ID NO: 54833 - DNA, 25 bp, probe
catgttcagcaatgtcaatggcatc

SEQ ID NO: 54834 - DNA, 25 bp, probe
gatatattgctacagaaaggtctca

SEQ ID NO: 54835 - DNA, 25 bp, probe
tgatatattgctacagaaaggtctc

SEQ ID NO: 54836 - DNA, 25 bp, probe
ctccctaactccatcagacctctac

SEQ ID NO: 54837 - DNA, 25 bp, probe
ctgctcatcgagatgatatattgct

SEQ ID NO: 54838 - DNA, 25 bp, probe
attcatccatacatccacctgcctc

SEQ ID NO: 54839 - DNA, 25 bp, probe
tgctcatcgagatgatatattgcta

SEQ ID NO: 54840 - DNA, 25 bp, probe
gaggaatagaacaggagcagtgtga

SEQ ID NO: 54841 - DNA, 25 bp, probe
gctcatcgagatgatatattgctac

SEQ ID NO: 54842 - DNA, 25 bp, probe
ttattccttccttcattcaacagat

SEQ ID NO: 54843 - DNA, 25 bp, probe
attccttccttcattcaacagatat

SEQ ID NO: 54844 - DNA, 25 bp, probe
tattccttccttcattcaacagata

SEQ ID NO: 54845 - DNA, 25 bp, probe
gtgggtgtgtatcttcttatctcat

SEQ ID NO: 54846 - DNA, 25 bp, probe
ttgtgggtgtgtatcttcttatctc

SEQ ID NO: 54847 - DNA, 25 bp, probe
cattgtgggtgtgtatcttcttatc

SEQ ID NO: 54848 - DNA, 25 bp, probe
attgtgggtgtgtatcttcttatct

SEQ ID NO: 54849 - DNA, 25 bp, probe
tgggtgtgtatcttcttatctcatt

SEQ ID NO: 54850 - DNA, 25 bp, probe
tccttccttcattcaacagatatcc

SEQ ID NO: 54851 - DNA, 25 bp, probe
ccttccttcattcaacagatatcca

SEQ ID NO: 54852 - DNA, 25 bp, probe
tgtgggtgtgtatcttcttatctca

SEQ ID NO: 54853 - DNA, 25 bp, probe
attcaacagatatccatcatgcact

SEQ ID NO: 54854 - DNA, 25 bp, probe
ttcaacagatatccatcatgcactt

SEQ ID NO: 54855 - DNA, 25 bp, probe
tccttcattcaacagatatccatca

SEQ ID NO: 54856 - DNA, 25 bp, probe
ttatctcatttcacaagactggctt

SEQ ID NO: 54857 - DNA, 25 bp, probe
cagatatccatcatgcacttgctat

SEQ ID NO: 54858 - DNA, 25 bp, probe
cattcaacagatatccatcatgcac

SEQ ID NO: 54859 - DNA, 25 bp, probe
tcattcaacagatatccatcatgca

SEQ ID NO: 54860 - DNA, 25 bp, probe
ttcattcaacagatatccatcatgc

SEQ ID NO: 54861 - DNA, 25 bp, probe
tatctcatttcacaagactggcttc

SEQ ID NO: 54862 - DNA, 25 bp, probe
cttatctcatttcacaagactggct

SEQ ID NO: 54863 - DNA, 25 bp, probe
agatatccatcatgcacttgctatg

SEQ ID NO: 54864 - DNA, 25 bp, probe
gatatccatcatgcacttgctatgt

SEQ ID NO: 54865 - DNA, 25 bp, probe
ccttcattcaacagatatccatcat

SEQ ID NO: 54866 - DNA, 25 bp, probe
cttccttcattcaacagatatccat

SEQ ID NO: 54867 - DNA, 25 bp, probe
ttccttccttcattcaacagatatc

SEQ ID NO: 54868 - DNA, 25 bp, probe
ttccttcattcaacagatatccatc

SEQ ID NO: 54869 - DNA, 25 bp, probe
tttattccttccttcattcaacaga

SEQ ID NO: 54870 - DNA, 25 bp, probe
gggtgtgtatcttcttatctcattt

SEQ ID NO: 54871 - DNA, 25 bp, probe
acattgtgggtgtgtatcttcttat

SEQ ID NO: 54872 - DNA, 25 bp, probe
tcaacagatatccatcatgcacttg

SEQ ID NO: 54873 - DNA, 25 bp, probe
gacattgtgggtgtgtatcttctta

SEQ ID NO: 54874 - DNA, 25 bp, probe
acagatatccatcatgcacttgcta

SEQ ID NO: 54875 - DNA, 25 bp, probe
atatccatcatgcacttgctatgtg

SEQ ID NO: 54876 - DNA, 25 bp, probe
cttcattcaacagatatccatcatg

SEQ ID NO: 54877 - DNA, 25 bp, probe
tcaatcccatgctcttcctgtattt

SEQ ID NO: 54878 - DNA, 25 bp, probe
atctcatttcacaagactggcttca

SEQ ID NO: 54879 - DNA, 25 bp, probe
agacattgtgggtgtgtatcttctt

SEQ ID NO: 54880 - DNA, 25 bp, probe
ggtgtgtatcttcttatctcatttc

SEQ ID NO: 54881 - DNA, 25 bp, probe
aacagatatccatcatgcacttgct

SEQ ID NO: 54882 - DNA, 25 bp, probe
caacagatatccatcatgcacttgc

SEQ ID NO: 54883 - DNA, 25 bp, probe
gagacattgtgggtgtgtatcttct

SEQ ID NO: 54884 - DNA, 25 bp, probe
agagacattgtgggtgtgtatcttc

SEQ ID NO: 54885 - DNA, 25 bp, probe
gagagacattgtgggtgtgtatctt

SEQ ID NO: 54886 - DNA, 25 bp, probe
gtgggaaggatttatttacagtgtg

SEQ ID NO: 54887 - DNA, 25 bp, probe
tggcttctgttcatttcgtttaatt

SEQ ID NO: 54888 - DNA, 25 bp, probe
gtggcttctgttcatttcgtttaat

SEQ ID NO: 54889 - DNA, 25 bp, probe
gtagcagactgttaaattgtggttt

SEQ ID NO: 54890 - DNA, 25 bp, probe
tgtggcttctgttcatttcgtttaa

SEQ ID NO: 54891 - DNA, 25 bp, probe
atgtggcttctgttcatttcgttta

SEQ ID NO: 54892 - DNA, 25 bp, probe
agtagcagactgttaaattgtggtt

SEQ ID NO: 54893 - DNA, 25 bp, probe
agcagactgttaaattgtggtttat

SEQ ID NO: 54894 - DNA, 25 bp, probe
tgggaaggatttatttacagtgtgt

SEQ ID NO: 54895 - DNA, 25 bp, probe
tgtgggaaggatttatttacagtgt

SEQ ID NO: 54896 - DNA, 25 bp, probe
agtgttaatctttgtgctatatggt

SEQ ID NO: 54897 - DNA, 25 bp, probe
gggaaggatttatttacagtgtgtt

SEQ ID NO: 54898 - DNA, 25 bp, probe
tagcagactgttaaattgtggttta

SEQ ID NO: 54899 - DNA, 25 bp, probe
atgtgggaaggatttatttacagtg

SEQ ID NO: 54900 - DNA, 25 bp, probe
aatcataacttggtaagaaactcct

SEQ ID NO: 54901 - DNA, 25 bp, probe
ggaaggatttatttacagtgtgttg

SEQ ID NO: 54902 - DNA, 25 bp, probe
aatgtgggaaggatttatttacagt

SEQ ID NO: 54903 - DNA, 25 bp, probe
gcagactgttaaattgtggtttata

SEQ ID NO: 54904 - DNA, 25 bp, probe
ggcttctgttcatttcgtttaatta

SEQ ID NO: 54905 - DNA, 25 bp, probe
aagtgttaatctttgtgctatatgg

SEQ ID NO: 54906 - DNA, 25 bp, probe
tcataacttggtaagaaactcctaa

SEQ ID NO: 54907 - DNA, 25 bp, probe
aaatcataacttggtaagaaactcc

SEQ ID NO: 54908 - DNA, 25 bp, probe
gaaggatttatttacagtgtgttgt

SEQ ID NO: 54909 - DNA, 25 bp, probe
gtgttaatctttgtgctatatggta

SEQ ID NO: 54910 - DNA, 25 bp, probe
atcataacttggtaagaaactccta

SEQ ID NO: 54911 - DNA, 25 bp, probe
aaatgtgggaaggatttatttacag

SEQ ID NO: 54912 - DNA, 25 bp, probe
tccagctagattgcagtttaataat

SEQ ID NO: 54913 - DNA, 25 bp, probe
atccagctagattgcagtttaataa

SEQ ID NO: 54914 - DNA, 25 bp, probe
gcattgtaaatagtctttgttgtac

SEQ ID NO: 54915 - DNA, 25 bp, probe
ttgcattgtaaatagtctttgttgt

SEQ ID NO: 54916 - DNA, 25 bp, probe
aatctttgtgctatatggtatgaaa

SEQ ID NO: 54917 - DNA, 25 bp, probe
ccagctagattgcagtttaataatt

SEQ ID NO: 54918 - DNA, 25 bp, probe
cataacttggtaagaaactcctaat

SEQ ID NO: 54919 - DNA, 25 bp, probe
aatgtggcttctgttcatttcgttt

SEQ ID NO: 54920 - DNA, 25 bp, probe
agtttgtataaaatgtgggaaggat

SEQ ID NO: 54921 - DNA, 25 bp, probe
atctttgtgctatatggtatgaaat

SEQ ID NO: 54922 - DNA, 25 bp, probe
aaatccagctagattgcagtttaat

SEQ ID NO: 54923 - DNA, 25 bp, probe
acagtgtgttgtaattttgtaaggc

SEQ ID NO: 54924 - DNA, 25 bp, probe
ttttagaacacaagttgggaaatgt

SEQ ID NO: 54925 - DNA, 25 bp, probe
aagttgggaaatgtggcttctgttc

SEQ ID NO: 54926 - DNA, 25 bp, probe
gtagtttgtataaaatgtgggaagg

SEQ ID NO: 54927 - DNA, 25 bp, probe
tgcattgtaaatagtctttgttgta

SEQ ID NO: 54928 - DNA, 25 bp, probe
tgttaatctttgtgctatatggtat

SEQ ID NO: 54929 - DNA, 25 bp, probe
gtttgtataaaatgtgggaaggatt

SEQ ID NO: 54930 - DNA, 25 bp, probe
tgatgacagtattattcctaccgaa

SEQ ID NO: 54931 - DNA, 25 bp, probe
ggagcaattcaagtgtgatactaac

SEQ ID NO: 54932 - DNA, 25 bp, probe
aggagcaattcaagtgtgatactaa

SEQ ID NO: 54933 - DNA, 25 bp, probe
aaggagcaattcaagtgtgatacta

SEQ ID NO: 54934 - DNA, 25 bp, probe
taaggagcaattcaagtgtgatact

SEQ ID NO: 54935 - DNA, 25 bp, probe
cattaaggagcaattcaagtgtgat

SEQ ID NO: 54936 - DNA, 25 bp, probe
ttaaggagcaattcaagtgtgatac

SEQ ID NO: 54937 - DNA, 25 bp, probe
gcaattcaagtgtgatactaacagt

SEQ ID NO: 54938 - DNA, 25 bp, probe
agcaattcaagtgtgatactaacag

SEQ ID NO: 54939 - DNA, 25 bp, probe
gagcaattcaagtgtgatactaaca

SEQ ID NO: 54940 - DNA, 25 bp, probe
ttccaggctgatgacagtattattc

SEQ ID NO: 54941 - DNA, 25 bp, probe
atgaccatgaagattccaatgagag

SEQ ID NO: 54942 - DNA, 25 bp, probe
ctgatgacagtattattcctaccga

SEQ ID NO: 54943 - DNA, 25 bp, probe
ggctgatgacagtattattcctacc

SEQ ID NO: 54944 - DNA, 25 bp, probe
attaaggagcaattcaagtgtgata

SEQ ID NO: 54945 - DNA, 25 bp, probe
ccattaaggagcaattcaagtgtga

SEQ ID NO: 54946 - DNA, 25 bp, probe
catgaccatgaagattccaatgaga

SEQ ID NO: 54947 - DNA, 25 bp, probe
gctgatgacagtattattcctaccg

SEQ ID NO: 54948 - DNA, 25 bp, probe
aggctgatgacagtattattcctac

SEQ ID NO: 54949 - DNA, 25 bp, probe
caggctgatgacagtattattccta

SEQ ID NO: 54950 - DNA, 25 bp, probe
ccatgaccatgaagattccaatgag

SEQ ID NO: 54951 - DNA, 25 bp, probe
tccaggctgatgacagtattattcc

SEQ ID NO: 54952 - DNA, 25 bp, probe
tcaagtgtgatactaacagtacctg

SEQ ID NO: 54953 - DNA, 25 bp, probe
atgaagattccaatgagagcttgag

SEQ ID NO: 54954 - DNA, 25 bp, probe
caagtgtgatactaacagtacctgg

SEQ ID NO: 54955 - DNA, 25 bp, probe
catgaagattccaatgagagcttga

SEQ ID NO: 54956 - DNA, 25 bp, probe
ccaggctgatgacagtattattcct

SEQ ID NO: 54957 - DNA, 25 bp, probe
ctatggtgttcgctttaatggtttc

SEQ ID NO: 54958 - DNA, 25 bp, probe
ttcaagtgtgatactaacagtacct

SEQ ID NO: 54959 - DNA, 25 bp, probe
acagtattattcctaccgaaatccg

SEQ ID NO: 54960 - DNA, 25 bp, probe
gccattaaggagcaattcaagtgtg

SEQ ID NO: 54961 - DNA, 25 bp, probe
tattattcctaccgaaatccgcaac

SEQ ID NO: 54962 - DNA, 25 bp, probe
gtattattcctaccgaaatccgcaa

SEQ ID NO: 54963 - DNA, 25 bp, probe
gacagtattattcctaccgaaatcc

SEQ ID NO: 54964 - DNA, 25 bp, probe
cagtattattcctaccgaaatccgc

SEQ ID NO: 54965 - DNA, 25 bp, probe
attcaagtgtgatactaacagtacc

SEQ ID NO: 54966 - DNA, 25 bp, probe
ccatgaagattccaatgagagcttg

SEQ ID NO: 54967 - DNA, 25 bp, probe
agtattattcctaccgaaatccgca

SEQ ID NO: 54968 - DNA, 25 bp, probe
accatgaagattccaatgagagctt

SEQ ID NO: 54969 - DNA, 25 bp, probe
tatggtgttcgctttaatggtttcc

SEQ ID NO: 54970 - DNA, 25 bp, probe
ttgatgacaacaatgacaagagcga

SEQ ID NO: 54971 - DNA, 25 bp, probe
tgaccatgaagattccaatgagagc

SEQ ID NO: 54972 - DNA, 25 bp, probe
tgacagtattattcctaccgaaatc

SEQ ID NO: 54973 - DNA, 25 bp, probe
gatgacagtattattcctaccgaaa

SEQ ID NO: 54974 - DNA, 25 bp, probe
ggtagaggtcatcatcaatacagag

SEQ ID NO: 54975 - DNA, 25 bp, probe
tagaggtcatcatcaatacagagtg

SEQ ID NO: 54976 - DNA, 25 bp, probe
tggtagaggtcatcatcaatacaga

SEQ ID NO: 54977 - DNA, 25 bp, probe
gtagaggtcatcatcaatacagagt

SEQ ID NO: 54978 - DNA, 25 bp, probe
agaggtcatcatcaatacagagtgg

SEQ ID NO: 54979 - DNA, 25 bp, probe
ctggtagaggtcatcatcaatacag

SEQ ID NO: 54980 - DNA, 25 bp, probe
cctggtagaggtcatcatcaataca

SEQ ID NO: 54981 - DNA, 25 bp, probe
gggtgcctaataaatacatttctgc

SEQ ID NO: 54982 - DNA, 25 bp, probe
ggtgcctaataaatacatttctgct

SEQ ID NO: 54983 - DNA, 25 bp, probe
gaggtcatcatcaatacagagtggc

SEQ ID NO: 54984 - DNA, 25 bp, probe
ggtgtggatcgtcatgtatacttac

SEQ ID NO: 54985 - DNA, 25 bp, probe
tggtgtggatcgtcatgtatactta

SEQ ID NO: 54986 - DNA, 25 bp, probe
gtcatcatcaatacagagtggctga

SEQ ID NO: 54987 - DNA, 25 bp, probe
aggtcatcatcaatacagagtggct

SEQ ID NO: 54988 - DNA, 25 bp, probe
gaggaacaagggtgcctaataaata

SEQ ID NO: 54989 - DNA, 25 bp, probe
gtgcctaataaatacatttctgctt

SEQ ID NO: 54990 - DNA, 25 bp, probe
aggaacaagggtgcctaataaatac

SEQ ID NO: 54991 - DNA, 25 bp, probe
catcatcaatacagagtggctgatc

SEQ ID NO: 54992 - DNA, 25 bp, probe
ggaacaagggtgcctaataaataca

SEQ ID NO: 54993 - DNA, 25 bp, probe
gaacaagggtgcctaataaatacat

SEQ ID NO: 54994 - DNA, 25 bp, probe
tcatcatcaatacagagtggctgat

SEQ ID NO: 54995 - DNA, 25 bp, probe
agggtgcctaataaatacatttctg

SEQ ID NO: 54996 - DNA, 25 bp, probe
gtggtgtggatcgtcatgtatactt

SEQ ID NO: 54997 - DNA, 25 bp, probe
ggtcatcatcaatacagagtggctg

SEQ ID NO: 54998 - DNA, 25 bp, probe
acaagggtgcctaataaatacattt

SEQ ID NO: 54999 - DNA, 25 bp, probe
aacaagggtgcctaataaatacatt

SEQ ID NO: 55000 - DNA, 25 bp, probe
tgcctaataaatacatttctgcttt

SEQ ID NO: 55001 - DNA, 25 bp, probe
aagggtgcctaataaatacatttct

SEQ ID NO: 55002 - DNA, 25 bp, probe
caagggtgcctaataaatacatttc

SEQ ID NO: 55003 - DNA, 25 bp, probe
tgaggaacaagggtgcctaataaat

SEQ ID NO: 55004 - DNA, 25 bp, probe
ccctggtagaggtcatcatcaatac

SEQ ID NO: 55005 - DNA, 25 bp, probe
catgtatacttacggcaacaagcag

SEQ ID NO: 55006 - DNA, 25 bp, probe
gtcatgtatacttacggcaacaagc

SEQ ID NO: 55007 - DNA, 25 bp, probe
agaactctcaggtctttagaaaccc

SEQ ID NO: 55008 - DNA, 25 bp, probe
tcatgtatacttacggcaacaagca

SEQ ID NO: 55009 - DNA, 25 bp, probe
ctatgagaccatcctgaaagagcag

SEQ ID NO: 55010 - DNA, 25 bp, probe
aagaactctcaggtctttagaaacc

SEQ ID NO: 55011 - DNA, 25 bp, probe
caagaactctcaggtctttagaaac

SEQ ID NO: 55012 - DNA, 25 bp, probe
gcaagaactctcaggtctttagaaa

SEQ ID NO: 55013 - DNA, 25 bp, probe
gattcctgcaacctcaagagacttc

SEQ ID NO: 55014 - DNA, 25 bp, probe
tatgagaccatcctgaaagagcaga

SEQ ID NO: 55015 - DNA, 25 bp, probe
accctggtagaggtcatcatcaata

SEQ ID NO: 55016 - DNA, 25 bp, probe
gtgtggatcgtcatgtatacttacg

SEQ ID NO: 55017 - DNA, 25 bp, probe
gtgaggaacaagggtgcctaataaa

SEQ ID NO: 55018 - DNA, 25 bp, probe
cagttatgtatgcttcttgtcttgg

SEQ ID NO: 55019 - DNA, 25 bp, probe
agttatgtatgcttcttgtcttggt

SEQ ID NO: 55020 - DNA, 25 bp, probe
tatgcttcttgtcttggttactgta

SEQ ID NO: 55021 - DNA, 25 bp, probe
atgtatgcttcttgtcttggttact

SEQ ID NO: 55022 - DNA, 25 bp, probe
gttatgtatgcttcttgtcttggtt

SEQ ID NO: 55023 - DNA, 25 bp, probe
gtatgcttcttgtcttggttactgt

SEQ ID NO: 55024 - DNA, 25 bp, probe
tgtatgcttcttgtcttggttactg

SEQ ID NO: 55025 - DNA, 25 bp, probe
tatgtatgcttcttgtcttggttac

SEQ ID NO: 55026 - DNA, 25 bp, probe
ttatgtatgcttcttgtcttggtta

SEQ ID NO: 55027 - DNA, 25 bp, probe
atgcttcttgtcttggttactgtac

SEQ ID NO: 55028 - DNA, 25 bp, probe
gcacagtaagtggataatctgagta

SEQ ID NO: 55029 - DNA, 25 bp, probe
taggtataggtagatagagtgcctt

SEQ ID NO: 55030 - DNA, 25 bp, probe
tataggtataggtagatagagtgcc

SEQ ID NO: 55031 - DNA, 25 bp, probe
ataggtataggtagatagagtgcct

SEQ ID NO: 55032 - DNA, 25 bp, probe
acagtaagtggataatctgagtaca

SEQ ID NO: 55033 - DNA, 25 bp, probe
aagtggataatctgagtacaatgaa

SEQ ID NO: 55034 - DNA, 25 bp, probe
tttcatttcatcttgctttgctttg

SEQ ID NO: 55035 - DNA, 25 bp, probe
gtttcatttcatcttgctttgcttt

SEQ ID NO: 55036 - DNA, 25 bp, probe
tagtttcatttcatcttgctttgct

SEQ ID NO: 55037 - DNA, 25 bp, probe
atggataagagatttgttcaggtca

SEQ ID NO: 55038 - DNA, 25 bp, probe
agtttcatttcatcttgctttgctt

SEQ ID NO: 55039 - DNA, 25 bp, probe
gagatatttatttgtgcccagaagc

SEQ ID NO: 55040 - DNA, 25 bp, probe
ggagatatttatttgtgcccagaag

SEQ ID NO: 55041 - DNA, 25 bp, probe
catttcatcttgctttgctttgttg

SEQ ID NO: 55042 - DNA, 25 bp, probe
tcatttcatcttgctttgctttgtt

SEQ ID NO: 55043 - DNA, 25 bp, probe
ttcatttcatcttgctttgctttgt

SEQ ID NO: 55044 - DNA, 25 bp, probe
aatctttctttctcttctctctcca

SEQ ID NO: 55045 - DNA, 25 bp, probe
cacagtaagtggataatctgagtac

SEQ ID NO: 55046 - DNA, 25 bp, probe
atctttctttctcttctctctccat

SEQ ID NO: 55047 - DNA, 25 bp, probe
agatagagtgcctttctgtttcttt

SEQ ID NO: 55048 - DNA, 25 bp, probe
gtagatagagtgcctttctgtttct

SEQ ID NO: 55049 - DNA, 25 bp, probe
tagatagagtgcctttctgtttctt

SEQ ID NO: 55050 - DNA, 25 bp, probe
gatgtttgccttgtcaatatcagaa

SEQ ID NO: 55051 - DNA, 25 bp, probe
tggataagagatttgttcaggtcaa

SEQ ID NO: 55052 - DNA, 25 bp, probe
ctagtttcatttcatcttgctttgc

SEQ ID NO: 55053 - DNA, 25 bp, probe
ggtagatagagtgcctttctgtttc

SEQ ID NO: 55054 - DNA, 25 bp, probe
atgtttgccttgtcaatatcagaat

SEQ ID NO: 55055 - DNA, 25 bp, probe
atgattactttaagcccacatccac

SEQ ID NO: 55056 - DNA, 25 bp, probe
cagtaagtggataatctgagtacaa

SEQ ID NO: 55057 - DNA, 25 bp, probe
atttcatcttgctttgctttgttga

SEQ ID NO: 55058 - DNA, 25 bp, probe
gattactttaagcccacatccactg

SEQ ID NO: 55059 - DNA, 25 bp, probe
gtaagtggataatctgagtacaatg

SEQ ID NO: 55060 - DNA, 25 bp, probe
acatctagtttcatttcatcttgct

SEQ ID NO: 55061 - DNA, 25 bp, probe
aaatctttctttctcttctctctcc

SEQ ID NO: 55062 - DNA, 25 bp, probe
aatatgttagattgccaaccagttc

SEQ ID NO: 55063 - DNA, 25 bp, probe
tatgttagattgccaaccagttcat

SEQ ID NO: 55064 - DNA, 25 bp, probe
atatgttagattgccaaccagttca

SEQ ID NO: 55065 - DNA, 25 bp, probe
gtgagttccaggtcaatatgttaga

SEQ ID NO: 55066 - DNA, 25 bp, probe
agtgagttccaggtcaatatgttag

SEQ ID NO: 55067 - DNA, 25 bp, probe
tgagttccaggtcaatatgttagat

SEQ ID NO: 55068 - DNA, 25 bp, probe
gagttccaggtcaatatgttagatt

SEQ ID NO: 55069 - DNA, 25 bp, probe
ctagtgagttccaggtcaatatgtt

SEQ ID NO: 55070 - DNA, 25 bp, probe
ttctagtgagttccaggtcaatatg

SEQ ID NO: 55071 - DNA, 25 bp, probe
tagtgagttccaggtcaatatgtta

SEQ ID NO: 55072 - DNA, 25 bp, probe
cttctagtgagttccaggtcaatat

SEQ ID NO: 55073 - DNA, 25 bp, probe
tctagtgagttccaggtcaatatgt

SEQ ID NO: 55074 - DNA, 25 bp, probe
acttatgtagatcaggcatgtagag

SEQ ID NO: 55075 - DNA, 25 bp, probe
cttatgtagatcaggcatgtagagc

SEQ ID NO: 55076 - DNA, 25 bp, probe
aacttatgtagatcaggcatgtaga

SEQ ID NO: 55077 - DNA, 25 bp, probe
ccttctagtgagttccaggtcaata

SEQ ID NO: 55078 - DNA, 25 bp, probe
ttatgtagatcaggcatgtagagct

SEQ ID NO: 55079 - DNA, 25 bp, probe
atgttagattgccaaccagttcatg

SEQ ID NO: 55080 - DNA, 25 bp, probe
aaacaaacaacatttcttcaaccag

SEQ ID NO: 55081 - DNA, 25 bp, probe
ccttaatatggaatggaaatgctgt

SEQ ID NO: 55082 - DNA, 25 bp, probe
accttaatatggaatggaaatgctg

SEQ ID NO: 55083 - DNA, 25 bp, probe
caccttaatatggaatggaaatgct

SEQ ID NO: 55084 - DNA, 25 bp, probe
caatatgttagattgccaaccagtt

SEQ ID NO: 55085 - DNA, 25 bp, probe
gtcaatatgttagattgccaaccag

SEQ ID NO: 55086 - DNA, 25 bp, probe
caggtcaatatgttagattgccaac

SEQ ID NO: 55087 - DNA, 25 bp, probe
gttccaggtcaatatgttagattgc

SEQ ID NO: 55088 - DNA, 25 bp, probe
aacaaacaacatttcttcaaccaga

SEQ ID NO: 55089 - DNA, 25 bp, probe
tcaatatgttagattgccaaccagt

SEQ ID NO: 55090 - DNA, 25 bp, probe
ttccaggtcaatatgttagattgcc

SEQ ID NO: 55091 - DNA, 25 bp, probe
aactacagttcttgttgtgaccagt

SEQ ID NO: 55092 - DNA, 25 bp, probe
aggtcaatatgttagattgccaacc

SEQ ID NO: 55093 - DNA, 25 bp, probe
ccaggtcaatatgttagattgccaa

SEQ ID NO: 55094 - DNA, 25 bp, probe
ggtcaatatgttagattgccaacca

SEQ ID NO: 55095 - DNA, 25 bp, probe
agttccaggtcaatatgttagattg

SEQ ID NO: 55096 - DNA, 25 bp, probe
ttgacacattgccttctagtgagtt

SEQ ID NO: 55097 - DNA, 25 bp, probe
actacagttcttgttgtgaccagtg

SEQ ID NO: 55098 - DNA, 25 bp, probe
tatgtagatcaggcatgtagagctg

SEQ ID NO: 55099 - DNA, 25 bp, probe
tccaggtcaatatgttagattgcca

SEQ ID NO: 55100 - DNA, 25 bp, probe
cttaatatggaatggaaatgctgtt

SEQ ID NO: 55101 - DNA, 25 bp, probe
tgacacattgccttctagtgagttc

SEQ ID NO: 55102 - DNA, 25 bp, probe
ttaatatggaatggaaatgctgttt

SEQ ID NO: 55103 - DNA, 25 bp, probe
aaacttatgtagatcaggcatgtag

SEQ ID NO: 55104 - DNA, 25 bp, probe
ccaccttaatatggaatggaaatgc

SEQ ID NO: 55105 - DNA, 25 bp, probe
gccaccttaatatggaatggaaatg

SEQ ID NO: 55106 - DNA, 25 bp, probe
aagttccatatagacaccaaggagg

SEQ ID NO: 55107 - DNA, 25 bp, probe
attgaatctagtatatgcgggatgt

SEQ ID NO: 55108 - DNA, 25 bp, probe
tttgtgactgaagagacttgtttcc

SEQ ID NO: 55109 - DNA, 25 bp, probe
tgaatctagtatatgcgggatgtac

SEQ ID NO: 55110 - DNA, 25 bp, probe
ttgaatctagtatatgcgggatgta

SEQ ID NO: 55111 - DNA, 25 bp, probe
gaatctagtatatgcgggatgtacg

SEQ ID NO: 55112 - DNA, 25 bp, probe
aatctagtatatgcgggatgtacga

SEQ ID NO: 55113 - DNA, 25 bp, probe
gtctagttatattccctcttcttgc

SEQ ID NO: 55114 - DNA, 25 bp, probe
aattgaatctagtatatgcgggatg

SEQ ID NO: 55115 - DNA, 25 bp, probe
atctagtatatgcgggatgtacgac

SEQ ID NO: 55116 - DNA, 25 bp, probe
tgtgactgaagagacttgtttcctt

SEQ ID NO: 55117 - DNA, 25 bp, probe
ttgtgactgaagagacttgtttcct

SEQ ID NO: 55118 - DNA, 25 bp, probe
caaagaaagatgtgctgagtctctc

SEQ ID NO: 55119 - DNA, 25 bp, probe
aaagttccatatagacaccaaggag

SEQ ID NO: 55120 - DNA, 25 bp, probe
acagtctagttatattccctcttct

SEQ ID NO: 55121 - DNA, 25 bp, probe
ttaattgaatctagtatatgcggga

SEQ ID NO: 55122 - DNA, 25 bp, probe
tacgtttgtgcagaatctctatgta

SEQ ID NO: 55123 - DNA, 25 bp, probe
acgtttgtgcagaatctctatgtat

SEQ ID NO: 55124 - DNA, 25 bp, probe
atacgtttgtgcagaatctctatgt

SEQ ID NO: 55125 - DNA, 25 bp, probe
aatacgtttgtgcagaatctctatg

SEQ ID NO: 55126 - DNA, 25 bp, probe
ccaaagaaagatgtgctgagtctct

SEQ ID NO: 55127 - DNA, 25 bp, probe
aaagaaagatgtgctgagtctctcc

SEQ ID NO: 55128 - DNA, 25 bp, probe
tctagttatattccctcttcttgca

SEQ ID NO: 55129 - DNA, 25 bp, probe
caatacgtttgtgcagaatctctat

SEQ ID NO: 55130 - DNA, 25 bp, probe
taattgaatctagtatatgcgggat

SEQ ID NO: 55131 - DNA, 25 bp, probe
aacagtctagttatattccctcttc

SEQ ID NO: 55132 - DNA, 25 bp, probe
agtctagttatattccctcttcttg

SEQ ID NO: 55133 - DNA, 25 bp, probe
cagtctagttatattccctcttctt

SEQ ID NO: 55134 - DNA, 25 bp, probe
cgtttgtgcagaatctctatgtata

SEQ ID NO: 55135 - DNA, 25 bp, probe
agttccatatagacaccaaggaggc

SEQ ID NO: 55136 - DNA, 25 bp, probe
tgacaaaagttccatatagacacca

SEQ ID NO: 55137 - DNA, 25 bp, probe
caaaagttccatatagacaccaagg

SEQ ID NO: 55138 - DNA, 25 bp, probe
ctgacaaaagttccatatagacacc

SEQ ID NO: 55139 - DNA, 25 bp, probe
cctgacaaaagttccatatagacac

SEQ ID NO: 55140 - DNA, 25 bp, probe
tcctgacaaaagttccatatagaca

SEQ ID NO: 55141 - DNA, 25 bp, probe
gtctgtctcttggctattttaacct

SEQ ID NO: 55142 - DNA, 25 bp, probe
tctagtatatgcgggatgtacgaca

SEQ ID NO: 55143 - DNA, 25 bp, probe
ggctatattcctgacaaaagttcca

SEQ ID NO: 55144 - DNA, 25 bp, probe
tgggctatattcctgacaaaagttc

SEQ ID NO: 55145 - DNA, 25 bp, probe
ctgggctatattcctgacaaaagtt

SEQ ID NO: 55146 - DNA, 25 bp, probe
ttttgtgactgaagagacttgtttc

SEQ ID NO: 55147 - DNA, 25 bp, probe
cattttgtgactgaagagacttgtt

SEQ ID NO: 55148 - DNA, 25 bp, probe
tctgtctcttggctattttaaccta

SEQ ID NO: 55149 - DNA, 25 bp, probe
gctatattcctgacaaaagttccat

SEQ ID NO: 55150 - DNA, 25 bp, probe
ctgctcaacaaggacctcaagaagt

SEQ ID NO: 55151 - DNA, 25 bp, probe
tgctcaacaaggacctcaagaagtg

SEQ ID NO: 55152 - DNA, 25 bp, probe
cttcatgcttatgttggctgtgctc

SEQ ID NO: 55153 - DNA, 25 bp, probe
cagagaaccctactgtgtcatgtga

SEQ ID NO: 55154 - DNA, 25 bp, probe
tcatgcttatgttggctgtgctcat

SEQ ID NO: 55155 - DNA, 25 bp, probe
atctttgagcatcgctacttcaagg

SEQ ID NO: 55156 - DNA, 25 bp, probe
aattgtctgcttcctgctcaacaag

SEQ ID NO: 55157 - DNA, 25 bp, probe
ccagagaaccctactgtgtcatgtg

SEQ ID NO: 55158 - DNA, 25 bp, probe
ctcccagagaaccctactgtgtcat

SEQ ID NO: 55159 - DNA, 25 bp, probe
catgcttatgttggctgtgctcatg

SEQ ID NO: 55160 - DNA, 25 bp, probe
caattgtctgcttcctgctcaacaa

SEQ ID NO: 55161 - DNA, 25 bp, probe
atcagccagaactggacattccatg

SEQ ID NO: 55162 - DNA, 25 bp, probe
catcagccagaactggacattccat

SEQ ID NO: 55163 - DNA, 25 bp, probe
tggaagaattcaagacggagaagag

SEQ ID NO: 55164 - DNA, 25 bp, probe
ctggaagaattcaagacggagaaga

SEQ ID NO: 55165 - DNA, 25 bp, probe
ggaagaattcaagacggagaagagg

SEQ ID NO: 55166 - DNA, 25 bp, probe
gaagaggctgtgcaagatgttctac

SEQ ID NO: 55167 - DNA, 25 bp, probe
aattcaagacggagaagaggctgtg

SEQ ID NO: 55168 - DNA, 25 bp, probe
gaagaattcaagacggagaagaggc

SEQ ID NO: 55169 - DNA, 25 bp, probe
gctggaagaattcaagacggagaag

SEQ ID NO: 55170 - DNA, 25 bp, probe
aagaattcaagacggagaagaggct

SEQ ID NO: 55171 - DNA, 25 bp, probe
cgacctgaaaggcattggtttatga

SEQ ID NO: 55172 - DNA, 25 bp, probe
agaagaggctgtgcaagatgttcta

SEQ ID NO: 55173 - DNA, 25 bp, probe
tgctggaagaattcaagacggagaa

SEQ ID NO: 55174 - DNA, 25 bp, probe
agaattcaagacggagaagaggctg

SEQ ID NO: 55175 - DNA, 25 bp, probe
gaattcaagacggagaagaggctgt

SEQ ID NO: 55176 - DNA, 25 bp, probe
aagaggctgtgcaagatgttctacg

SEQ ID NO: 55177 - DNA, 25 bp, probe
gtgctggaagaattcaagacggaga

SEQ ID NO: 55178 - DNA, 25 bp, probe
ctcctcgtgctggaagaattcaaga

SEQ ID NO: 55179 - DNA, 25 bp, probe
gcgacctgaaaggcattggtttatg

SEQ ID NO: 55180 - DNA, 25 bp, probe
gagaagaggctgtgcaagatgttct

SEQ ID NO: 55181 - DNA, 25 bp, probe
tcctcgtgctggaagaattcaagac

SEQ ID NO: 55182 - DNA, 25 bp, probe
tatacacaccacaagaagatgaagg

SEQ ID NO: 55183 - DNA, 25 bp, probe
ttggcttaacattctatcatcctcc

SEQ ID NO: 55184 - DNA, 25 bp, probe
cctatccttctcttcattctctcat

SEQ ID NO: 55185 - DNA, 25 bp, probe
agcctatccttctcttcattctctc

SEQ ID NO: 55186 - DNA, 25 bp, probe
gcctatccttctcttcattctctca

SEQ ID NO: 55187 - DNA, 25 bp, probe
cagcctatccttctcttcattctct

SEQ ID NO: 55188 - DNA, 25 bp, probe
attggcttaacattctatcatcctc

SEQ ID NO: 55189 - DNA, 25 bp, probe
ttctccatcacctccaagacttatc

SEQ ID NO: 55190 - DNA, 25 bp, probe
cttctccatcacctccaagacttat

SEQ ID NO: 55191 - DNA, 25 bp, probe
aattggcttaacattctatcatcct

SEQ ID NO: 55192 - DNA, 25 bp, probe
tccttctcttcattctctcatattg

SEQ ID NO: 55193 - DNA, 25 bp, probe
ctccaagacttatcctcctgatctc

SEQ ID NO: 55194 - DNA, 25 bp, probe
ccttctcttcattctctcatattga

SEQ ID NO: 55195 - DNA, 25 bp, probe
caagacttatcctcctgatctcacc

SEQ ID NO: 55196 - DNA, 25 bp, probe
ccaagacttatcctcctgatctcac

SEQ ID NO: 55197 - DNA, 25 bp, probe
tccaagacttatcctcctgatctca

SEQ ID NO: 55198 - DNA, 25 bp, probe
gcagcctatccttctcttcattctc

SEQ ID NO: 55199 - DNA, 25 bp, probe
ctttagtggtgtttcttgtttcctc

SEQ ID NO: 55200 - DNA, 25 bp, probe
tatttgcctttagtggtgtttcttg

SEQ ID NO: 55201 - DNA, 25 bp, probe
gttatttgcctttagtggtgtttct

SEQ ID NO: 55202 - DNA, 25 bp, probe
agttatttgcctttagtggtgtttc

SEQ ID NO: 55203 - DNA, 25 bp, probe
gggatgctgattgtctctttgtata

SEQ ID NO: 55204 - DNA, 25 bp, probe
tttagtggtgtttcttgtttcctct

SEQ ID NO: 55205 - DNA, 25 bp, probe
ttatttgcctttagtggtgtttctt

SEQ ID NO: 55206 - DNA, 25 bp, probe
aagacttatcctcctgatctcacca

SEQ ID NO: 55207 - DNA, 25 bp, probe
gaagttatttgcctttagtggtgtt

SEQ ID NO: 55208 - DNA, 25 bp, probe
gtatacacaccacaagaagatgaag

SEQ ID NO: 55209 - DNA, 25 bp, probe
aagttatttgcctttagtggtgttt

SEQ ID NO: 55210 - DNA, 25 bp, probe
ttagtggtgtttcttgtttcctctg

SEQ ID NO: 55211 - DNA, 25 bp, probe
atccttctcttcattctctcatatt

SEQ ID NO: 55212 - DNA, 25 bp, probe
atcacctccaagacttatcctcctg

SEQ ID NO: 55213 - DNA, 25 bp, probe
catcacctccaagacttatcctcct

SEQ ID NO: 55214 - DNA, 25 bp, probe
tccatcacctccaagacttatcctc

SEQ ID NO: 55215 - DNA, 25 bp, probe
ctccatcacctccaagacttatcct

SEQ ID NO: 55216 - DNA, 25 bp, probe
cttcctcttacttcacctggtttat

SEQ ID NO: 55217 - DNA, 25 bp, probe
cacctccaagacttatcctcctgat

SEQ ID NO: 55218 - DNA, 25 bp, probe
cctttagtggtgtttcttgtttcct

SEQ ID NO: 55219 - DNA, 25 bp, probe
ctatccttctcttcattctctcata

SEQ ID NO: 55220 - DNA, 25 bp, probe
cctccaagacttatcctcctgatct

SEQ ID NO: 55221 - DNA, 25 bp, probe
atttgcctttagtggtgtttcttgt

SEQ ID NO: 55222 - DNA, 25 bp, probe
tctccatcacctccaagacttatcc

SEQ ID NO: 55223 - DNA, 25 bp, probe
atacacaccacaagaagatgaaggt

SEQ ID NO: 55224 - DNA, 25 bp, probe
acctccaagacttatcctcctgatc

SEQ ID NO: 55225 - DNA, 25 bp, probe
ttcctcttacttcacctggtttata

SEQ ID NO: 55226 - DNA, 25 bp, probe
tataaggaagccattaaggtcactc

SEQ ID NO: 55227 - DNA, 25 bp, probe
agatggattatggacttacctcaat

SEQ ID NO: 55228 - DNA, 25 bp, probe
gaagatggattatggacttacctca

SEQ ID NO: 55229 - DNA, 25 bp, probe
agaagatggattatggacttacctc

SEQ ID NO: 55230 - DNA, 25 bp, probe
aagatggattatggacttacctcaa

SEQ ID NO: 55231 - DNA, 25 bp, probe
ggcaaccatcactattacatattct

SEQ ID NO: 55232 - DNA, 25 bp, probe
aagaagatggattatggacttacct

SEQ ID NO: 55233 - DNA, 25 bp, probe
tggtatgaggctggattatatatgg

SEQ ID NO: 55234 - DNA, 25 bp, probe
ggtatgaggctggattatatatgga

SEQ ID NO: 55235 - DNA, 25 bp, probe
ttataaggaagccattaaggtcact

SEQ ID NO: 55236 - DNA, 25 bp, probe
ggacttcaattcagattcttggctt

SEQ ID NO: 55237 - DNA, 25 bp, probe
tgaggctggattatatatggatctt

SEQ ID NO: 55238 - DNA, 25 bp, probe
atgaggctggattatatatggatct

SEQ ID NO: 55239 - DNA, 25 bp, probe
aaggatgtcttctagtaacactgtt

SEQ ID NO: 55240 - DNA, 25 bp, probe
tggtagattggacatcacagtacac

SEQ ID NO: 55241 - DNA, 25 bp, probe
agacaccatacaatcttggattcat

SEQ ID NO: 55242 - DNA, 25 bp, probe
tggattatggacttacctcaatcag

SEQ ID NO: 55243 - DNA, 25 bp, probe
ggattatggacttacctcaatcaga

SEQ ID NO: 55244 - DNA, 25 bp, probe
atggattatggacttacctcaatca

SEQ ID NO: 55245 - DNA, 25 bp, probe
attatggacttacctcaatcagatt

SEQ ID NO: 55246 - DNA, 25 bp, probe
gcaaccatcactattacatattctt

SEQ ID NO: 55247 - DNA, 25 bp, probe
tggcaaccatcactattacatattc

SEQ ID NO: 55248 - DNA, 25 bp, probe
gatggattatggacttacctcaatc

SEQ ID NO: 55249 - DNA, 25 bp, probe
ttcatctatttgtccagtcattgtg

SEQ ID NO: 55250 - DNA, 25 bp, probe
atggtatgaggctggattatatatg

SEQ ID NO: 55251 - DNA, 25 bp, probe
ccctgtagtttgaaagtgaagtaaa

SEQ ID NO: 55252 - DNA, 25 bp, probe
gacaccatacaatcttggattcatg

SEQ ID NO: 55253 - DNA, 25 bp, probe
ttggcaaccatcactattacatatt

SEQ ID NO: 55254 - DNA, 25 bp, probe
tttctataagacttgggcaactgat

SEQ ID NO: 55255 - DNA, 25 bp, probe
gccctgtagtttgaaagtgaagtaa

SEQ ID NO: 55256 - DNA, 25 bp, probe
tagattggacatcacagtacaccat

SEQ ID NO: 55257 - DNA, 25 bp, probe
tcatctatttgtccagtcattgtgc

SEQ ID NO: 55258 - DNA, 25 bp, probe
tttcatctatttgtccagtcattgt

SEQ ID NO: 55259 - DNA, 25 bp, probe
catggtatgaggctggattatatat

SEQ ID NO: 55260 - DNA, 25 bp, probe
atcaactctttcagattgcctttct

SEQ ID NO: 55261 - DNA, 25 bp, probe
ataaggaagccattaaggtcactcc

SEQ ID NO: 55262 - DNA, 25 bp, probe
gacttcaattcagattcttggcttt

SEQ ID NO: 55263 - DNA, 25 bp, probe
aagacaccatacaatcttggattca

SEQ ID NO: 55264 - DNA, 25 bp, probe
gaagacaccatacaatcttggattc

SEQ ID NO: 55265 - DNA, 25 bp, probe
gtatgaggctggattatatatggat

SEQ ID NO: 55266 - DNA, 25 bp, probe
gtggtagattggacatcacagtaca

SEQ ID NO: 55267 - DNA, 25 bp, probe
ggaagacaccatacaatcttggatt

SEQ ID NO: 55268 - DNA, 25 bp, probe
ctttcatctatttgtccagtcattg

SEQ ID NO: 55269 - DNA, 25 bp, probe
tctttcatctatttgtccagtcatt

SEQ ID NO: 55270 - DNA, 25 bp, probe
acttctcgtcaatcactcattatca

SEQ ID NO: 55271 - DNA, 25 bp, probe
cttctcgtcaatcactcattatcag

SEQ ID NO: 55272 - DNA, 25 bp, probe
ctcgtcaatcactcattatcagcat

SEQ ID NO: 55273 - DNA, 25 bp, probe
ttctcgtcaatcactcattatcagc

SEQ ID NO: 55274 - DNA, 25 bp, probe
aactatgaaggaattggcactacta

SEQ ID NO: 55275 - DNA, 25 bp, probe
actatgaaggaattggcactactag

SEQ ID NO: 55276 - DNA, 25 bp, probe
atgaaggaattggcactactagatg

SEQ ID NO: 55277 - DNA, 25 bp, probe
ctatgaaggaattggcactactaga

SEQ ID NO: 55278 - DNA, 25 bp, probe
aattggtcagatgagagatgtgatt

SEQ ID NO: 55279 - DNA, 25 bp, probe
attggtcagatgagagatgtgattg

SEQ ID NO: 55280 - DNA, 25 bp, probe
tatgaaggaattggcactactagat

SEQ ID NO: 55281 - DNA, 25 bp, probe
ttaattggtcagatgagagatgtga

SEQ ID NO: 55282 - DNA, 25 bp, probe
taattggtcagatgagagatgtgat

SEQ ID NO: 55283 - DNA, 25 bp, probe
tctcgtcaatcactcattatcagca

SEQ ID NO: 55284 - DNA, 25 bp, probe
cgagttcggacttggtatgaatata

SEQ ID NO: 55285 - DNA, 25 bp, probe
gcctacatgaacaattactccattc

SEQ ID NO: 55286 - DNA, 25 bp, probe
tgtatatcatcaagcatggagaagt

SEQ ID NO: 55287 - DNA, 25 bp, probe
ggacttctcgtcaatcactcattat

SEQ ID NO: 55288 - DNA, 25 bp, probe
tgcctacatgaacaattactccatt

SEQ ID NO: 55289 - DNA, 25 bp, probe
cctacatgaacaattactccattcc

SEQ ID NO: 55290 - DNA, 25 bp, probe
gacttctcgtcaatcactcattatc

SEQ ID NO: 55291 - DNA, 25 bp, probe
gtatatcatcaagcatggagaagtc

SEQ ID NO: 55292 - DNA, 25 bp, probe
ttgcctacatgaacaattactccat

SEQ ID NO: 55293 - DNA, 25 bp, probe
agttcggacttggtatgaatataca

SEQ ID NO: 55294 - DNA, 25 bp, probe
tgaaggaattggcactactagatgg

SEQ ID NO: 55295 - DNA, 25 bp, probe
tcgtcaatcactcattatcagcatg

SEQ ID NO: 55296 - DNA, 25 bp, probe
ctacatgaacaattactccattcct

SEQ ID NO: 55297 - DNA, 25 bp, probe
gagttcggacttggtatgaatatac

SEQ ID NO: 55298 - DNA, 25 bp, probe
atgtatatcatcaagcatggagaag

SEQ ID NO: 55299 - DNA, 25 bp, probe
gttcggacttggtatgaatatacat

SEQ ID NO: 55300 - DNA, 25 bp, probe
acatgaacaattactccattcctaa

SEQ ID NO: 55301 - DNA, 25 bp, probe
tcggacttggtatgaatatacatgg

SEQ ID NO: 55302 - DNA, 25 bp, probe
ttggtcagatgagagatgtgattgg

SEQ ID NO: 55303 - DNA, 25 bp, probe
aatgtatatcatcaagcatggagaa

SEQ ID NO: 55304 - DNA, 25 bp, probe
aaagataaaggaagagagccagaag

SEQ ID NO: 55305 - DNA, 25 bp, probe
ggtcagatgagagatgtgattggag

SEQ ID NO: 55306 - DNA, 25 bp, probe
ccttccagaaccacaaactttattt

SEQ ID NO: 55307 - DNA, 25 bp, probe
tatatcatcaagcatggagaagtcc

SEQ ID NO: 55308 - DNA, 25 bp, probe
cgtcaatcactcattatcagcatgg

SEQ ID NO: 55309 - DNA, 25 bp, probe
aaactatgaaggaattggcactact

SEQ ID NO: 55310 - DNA, 25 bp, probe
ataaaggaagagagccagaagagaa

SEQ ID NO: 55311 - DNA, 25 bp, probe
aagataaaggaagagagccagaaga

SEQ ID NO: 55312 - DNA, 25 bp, probe
taaagataaaggaagagagccagaa

SEQ ID NO: 55313 - DNA, 25 bp, probe
gcaaggaaatgtatatcatcaagca

SEQ ID NO: 55314 - DNA, 25 bp, probe
cttctggacactctctcatcttaat

SEQ ID NO: 55315 - DNA, 25 bp, probe
ttctggacactctctcatcttaatt

SEQ ID NO: 55316 - DNA, 25 bp, probe
ccttctggacactctctcatcttaa

SEQ ID NO: 55317 - DNA, 25 bp, probe
tgttcttcatccttgtgattggtat

SEQ ID NO: 55318 - DNA, 25 bp, probe
ctgttcttcatccttgtgattggta

SEQ ID NO: 55319 - DNA, 25 bp, probe
ttctgttcttcatccttgtgattgg

SEQ ID NO: 55320 - DNA, 25 bp, probe
gttcttcatccttgtgattggtata

SEQ ID NO: 55321 - DNA, 25 bp, probe
gttctcagtgccattgcttatcttc

SEQ ID NO: 55322 - DNA, 25 bp, probe
agaagatacactggctatacagatt

SEQ ID NO: 55323 - DNA, 25 bp, probe
aagaagatacactggctatacagat

SEQ ID NO: 55324 - DNA, 25 bp, probe
agttctcagtgccattgcttatctt

SEQ ID NO: 55325 - DNA, 25 bp, probe
ctatcctgtccttcctgatcctcta

SEQ ID NO: 55326 - DNA, 25 bp, probe
tctgttcttcatccttgtgattggt

SEQ ID NO: 55327 - DNA, 25 bp, probe
tatcctgtccttcctgatcctctac

SEQ ID NO: 55328 - DNA, 25 bp, probe
ttcttcatccttgtgattggtatat

SEQ ID NO: 55329 - DNA, 25 bp, probe
catctttctgttcttcatccttgtg

SEQ ID NO: 55330 - DNA, 25 bp, probe
tcatctttctgttcttcatccttgt

SEQ ID NO: 55331 - DNA, 25 bp, probe
ttcatctttctgttcttcatccttg

SEQ ID NO: 55332 - DNA, 25 bp, probe
gttcatctttctgttcttcatcctt

SEQ ID NO: 55333 - DNA, 25 bp, probe
ggttcatctttctgttcttcatcct

SEQ ID NO: 55334 - DNA, 25 bp, probe
aggttcatctttctgttcttcatcc

SEQ ID NO: 55335 - DNA, 25 bp, probe
gagttctcagtgccattgcttatct

SEQ ID NO: 55336 - DNA, 25 bp, probe
aaagtttcacatcagaaggttcatc

SEQ ID NO: 55337 - DNA, 25 bp, probe
tgtccttcctgatcctctacttctc

SEQ ID NO: 55338 - DNA, 25 bp, probe
ctgtccttcctgatcctctacttct

SEQ ID NO: 55339 - DNA, 25 bp, probe
ctcagtgccattgcttatcttcctt

SEQ ID NO: 55340 - DNA, 25 bp, probe
ttctcagtgccattgcttatcttcc

SEQ ID NO: 55341 - DNA, 25 bp, probe
tctggacactctctcatcttaattt

SEQ ID NO: 55342 - DNA, 25 bp, probe
aaggttcatctttctgttcttcatc

SEQ ID NO: 55343 - DNA, 25 bp, probe
gtttcacatcagaaggttcatcttt

SEQ ID NO: 55344 - DNA, 25 bp, probe
agtttcacatcagaaggttcatctt

SEQ ID NO: 55345 - DNA, 25 bp, probe
aagtttcacatcagaaggttcatct

SEQ ID NO: 55346 - DNA, 25 bp, probe
tctctaaagtttcacatcagaaggt

SEQ ID NO: 55347 - DNA, 25 bp, probe
tttcacatcagaaggttcatctttc

SEQ ID NO: 55348 - DNA, 25 bp, probe
ctaaagtttcacatcagaaggttca

SEQ ID NO: 55349 - DNA, 25 bp, probe
ggtctctgctatatgtatctatgat

SEQ ID NO: 55350 - DNA, 25 bp, probe
tctttctgttcttcatccttgtgat

SEQ ID NO: 55351 - DNA, 25 bp, probe
atctttctgttcttcatccttgtga

SEQ ID NO: 55352 - DNA, 25 bp, probe
tctaaagtttcacatcagaaggttc

SEQ ID NO: 55353 - DNA, 25 bp, probe
ctctaaagtttcacatcagaaggtt

SEQ ID NO: 55354 - DNA, 25 bp, probe
tatatacccttctggacactctctc

SEQ ID NO: 55355 - DNA, 25 bp, probe
tttctgttcttcatccttgtgattg

SEQ ID NO: 55356 - DNA, 25 bp, probe
gggtctctgctatatgtatctatga

SEQ ID NO: 55357 - DNA, 25 bp, probe
ctttctgttcttcatccttgtgatt

SEQ ID NO: 55358 - DNA, 25 bp, probe
catcagactctctaaggactggaag

SEQ ID NO: 55359 - DNA, 25 bp, probe
agcagttctttagccatacatatca

SEQ ID NO: 55360 - DNA, 25 bp, probe
gcagttctttagccatacatatcat

SEQ ID NO: 55361 - DNA, 25 bp, probe
gcatagcagttctttagccatacat

SEQ ID NO: 55362 - DNA, 25 bp, probe
catagcagttctttagccatacata

SEQ ID NO: 55363 - DNA, 25 bp, probe
gaaattatgggagtaaacaccttca

SEQ ID NO: 55364 - DNA, 25 bp, probe
tgaaattatgggagtaaacaccttc

SEQ ID NO: 55365 - DNA, 25 bp, probe
attatgggagtaaacaccttcaaat

SEQ ID NO: 55366 - DNA, 25 bp, probe
ctttccaggcatagcagttctttag

SEQ ID NO: 55367 - DNA, 25 bp, probe
ttatgggagtaaacaccttcaaatt

SEQ ID NO: 55368 - DNA, 25 bp, probe
aattatgggagtaaacaccttcaaa

SEQ ID NO: 55369 - DNA, 25 bp, probe
aaattatgggagtaaacaccttcaa

SEQ ID NO: 55370 - DNA, 25 bp, probe
ttgaaattatgggagtaaacacctt

SEQ ID NO: 55371 - DNA, 25 bp, probe
atcagactctctaaggactggaagg

SEQ ID NO: 55372 - DNA, 25 bp, probe
tttgaaattatgggagtaaacacct

SEQ ID NO: 55373 - DNA, 25 bp, probe
gttctttagccatacatatcattgc

SEQ ID NO: 55374 - DNA, 25 bp, probe
tagcagttctttagccatacatatc

SEQ ID NO: 55375 - DNA, 25 bp, probe
cgacattaacccactcatttagtaa

SEQ ID NO: 55376 - DNA, 25 bp, probe
acgatcatctcagagcatttgtaag

SEQ ID NO: 55377 - DNA, 25 bp, probe
tctttccaggcatagcagttcttta

SEQ ID NO: 55378 - DNA, 25 bp, probe
cacgatcatctcagagcatttgtaa

SEQ ID NO: 55379 - DNA, 25 bp, probe
aattccaaggtgcatcgacattaac

SEQ ID NO: 55380 - DNA, 25 bp, probe
agcatttgtaaggcaggagaaagta

SEQ ID NO: 55381 - DNA, 25 bp, probe
tgtcaagtttaggtcatttagaaga

SEQ ID NO: 55382 - DNA, 25 bp, probe
ggaagaacatgaaaggcagtttata

SEQ ID NO: 55383 - DNA, 25 bp, probe
agaacatgaaaggcagtttataagc

SEQ ID NO: 55384 - DNA, 25 bp, probe
cgatcatctcagagcatttgtaagg

SEQ ID NO: 55385 - DNA, 25 bp, probe
ttgcctcatgtcaaactgaaataag

SEQ ID NO: 55386 - DNA, 25 bp, probe
cttgcctcatgtcaaactgaaataa

SEQ ID NO: 55387 - DNA, 25 bp, probe
gatcatctcagagcatttgtaaggc

SEQ ID NO: 55388 - DNA, 25 bp, probe
tcacgatcatctcagagcatttgta

SEQ ID NO: 55389 - DNA, 25 bp, probe
atagcagttctttagccatacatat

SEQ ID NO: 55390 - DNA, 25 bp, probe
atcatctcagagcatttgtaaggca

SEQ ID NO: 55391 - DNA, 25 bp, probe
tgcctcatgtcaaactgaaataagt

SEQ ID NO: 55392 - DNA, 25 bp, probe
catcgacattaacccactcatttag

SEQ ID NO: 55393 - DNA, 25 bp, probe
gggaagaacatgaaaggcagtttat

SEQ ID NO: 55394 - DNA, 25 bp, probe
ttctttccaggcatagcagttcttt

SEQ ID NO: 55395 - DNA, 25 bp, probe
tttctttccaggcatagcagttctt

SEQ ID NO: 55396 - DNA, 25 bp, probe
catttctgctttgtgactaaataca

SEQ ID NO: 55397 - DNA, 25 bp, probe
gcatttgtaaggcaggagaaagtac

SEQ ID NO: 55398 - DNA, 25 bp, probe
gggagtaaacaccttcaaatttcag

SEQ ID NO: 55399 - DNA, 25 bp, probe
atgggagtaaacaccttcaaatttc

SEQ ID NO: 55400 - DNA, 25 bp, probe
cagactctctaaggactggaaggtc

SEQ ID NO: 55401 - DNA, 25 bp, probe
gcatcagactctctaaggactggaa

SEQ ID NO: 55402 - DNA, 25 bp, probe
caacacctttagggagattctctgt

SEQ ID NO: 55403 - DNA, 25 bp, probe
aacacctttagggagattctctgtg

SEQ ID NO: 55404 - DNA, 25 bp, probe
gcaacacctttagggagattctctg

SEQ ID NO: 55405 - DNA, 25 bp, probe
cttcaacacctacctggtcctcatc

SEQ ID NO: 55406 - DNA, 25 bp, probe
acacctttagggagattctctgtgg

SEQ ID NO: 55407 - DNA, 25 bp, probe
cattgtgtgcctcatcaccatgttc

SEQ ID NO: 55408 - DNA, 25 bp, probe
tcaacacctacctggtcctcatcat

SEQ ID NO: 55409 - DNA, 25 bp, probe
attgtgtgcctcatcaccatgttct

SEQ ID NO: 55410 - DNA, 25 bp, probe
caacacctacctggtcctcatcatg

SEQ ID NO: 55411 - DNA, 25 bp, probe
gttcatcgtctactcggagagcaaa

SEQ ID NO: 55412 - DNA, 25 bp, probe
aaatggtcattgtgtgcctcatcac

SEQ ID NO: 55413 - DNA, 25 bp, probe
ttcaacacctacctggtcctcatca

SEQ ID NO: 55414 - DNA, 25 bp, probe
acttcaacacctacctggtcctcat

SEQ ID NO: 55415 - DNA, 25 bp, probe
ttgtgtgcctcatcaccatgttctt

SEQ ID NO: 55416 - DNA, 25 bp, probe
ctactcggagagcaaaatggtcatt

SEQ ID NO: 55417 - DNA, 25 bp, probe
cgcaacacctttagggagattctct

SEQ ID NO: 55418 - DNA, 25 bp, probe
tcattgtgtgcctcatcaccatgtt

SEQ ID NO: 55419 - DNA, 25 bp, probe
caaaatggtcattgtgtgcctcatc

SEQ ID NO: 55420 - DNA, 25 bp, probe
ctacactgcccacttcaacacctac

SEQ ID NO: 55421 - DNA, 25 bp, probe
cctttagggagattctctgtggctg

SEQ ID NO: 55422 - DNA, 25 bp, probe
tactcggagagcaaaatggtcattg

SEQ ID NO: 55423 - DNA, 25 bp, probe
aacacctacctggtcctcatcatgt

SEQ ID NO: 55424 - DNA, 25 bp, probe
aaaatggtcattgtgtgcctcatca

SEQ ID NO: 55425 - DNA, 25 bp, probe
tctactcggagagcaaaatggtcat

SEQ ID NO: 55426 - DNA, 25 bp, probe
catcgtctactcggagagcaaaatg

SEQ ID NO: 55427 - DNA, 25 bp, probe
acctttagggagattctctgtggct

SEQ ID NO: 55428 - DNA, 25 bp, probe
tcatcgtctactcggagagcaaaat

SEQ ID NO: 55429 - DNA, 25 bp, probe
ttcatcgtctactcggagagcaaaa

SEQ ID NO: 55430 - DNA, 25 bp, probe
cacctttagggagattctctgtggc

SEQ ID NO: 55431 - DNA, 25 bp, probe
ctttagggagattctctgtggctgc

SEQ ID NO: 55432 - DNA, 25 bp, probe
tcatcaccatgttcttcgccatgat

SEQ ID NO: 55433 - DNA, 25 bp, probe
gtctactcggagagcaaaatggtca

SEQ ID NO: 55434 - DNA, 25 bp, probe
atcgtctactcggagagcaaaatgg

SEQ ID NO: 55435 - DNA, 25 bp, probe
ctcggagagcaaaatggtcattgtg

SEQ ID NO: 55436 - DNA, 25 bp, probe
cgacaggtacgtcaccatcttttac

SEQ ID NO: 55437 - DNA, 25 bp, probe
actcggagagcaaaatggtcattgt

SEQ ID NO: 55438 - DNA, 25 bp, probe
tcgacaggtacgtcaccatctttta

SEQ ID NO: 55439 - DNA, 25 bp, probe
cggagagcaaaatggtcattgtgtg

SEQ ID NO: 55440 - DNA, 25 bp, probe
tcggagagcaaaatggtcattgtgt

SEQ ID NO: 55441 - DNA, 25 bp, probe
gacaggtacgtcaccatcttttacg

SEQ ID NO: 55442 - DNA, 25 bp, probe
gcaaaatggtcattgtgtgcctcat

SEQ ID NO: 55443 - DNA, 25 bp, probe
gagcaaaatggtcattgtgtgcctc

SEQ ID NO: 55444 - DNA, 25 bp, probe
gagagcaaaatggtcattgtgtgcc

SEQ ID NO: 55445 - DNA, 25 bp, probe
ggagagcaaaatggtcattgtgtgc

SEQ ID NO: 55446 - DNA, 25 bp, probe
acaggtacgtcaccatcttttacgc

SEQ ID NO: 55447 - DNA, 25 bp, probe
ctatgtcttcatcatcaccaccatc

SEQ ID NO: 55448 - DNA, 25 bp, probe
ttctcctatgtcttcatcatcacca

SEQ ID NO: 55449 - DNA, 25 bp, probe
tctcctatgtcttcatcatcaccac

SEQ ID NO: 55450 - DNA, 25 bp, probe
tatgtcttcatcatcaccaccatcc

SEQ ID NO: 55451 - DNA, 25 bp, probe
cctatgtcttcatcatcaccaccat

SEQ ID NO: 55452 - DNA, 25 bp, probe
ctcctatgtcttcatcatcaccacc

SEQ ID NO: 55453 - DNA, 25 bp, probe
ggttctgttcatctctttctcctat

SEQ ID NO: 55454 - DNA, 25 bp, probe
tcttctacgggaccttattcttcat

SEQ ID NO: 55455 - DNA, 25 bp, probe
tttctcctatgtcttcatcatcacc

SEQ ID NO: 55456 - DNA, 25 bp, probe
ctgttcatctctttctcctatgtct

SEQ ID NO: 55457 - DNA, 25 bp, probe
tctgttcatctctttctcctatgtc

SEQ ID NO: 55458 - DNA, 25 bp, probe
catcatctatagcctgaggaacaag

SEQ ID NO: 55459 - DNA, 25 bp, probe
tcctatgtcttcatcatcaccacca

SEQ ID NO: 55460 - DNA, 25 bp, probe
tgttcatctctttctcctatgtctt

SEQ ID NO: 55461 - DNA, 25 bp, probe
ttctgttcatctctttctcctatgt

SEQ ID NO: 55462 - DNA, 25 bp, probe
ctttctcctatgtcttcatcatcac

SEQ ID NO: 55463 - DNA, 25 bp, probe
tctttctcctatgtcttcatcatca

SEQ ID NO: 55464 - DNA, 25 bp, probe
gttctgttcatctctttctcctatg

SEQ ID NO: 55465 - DNA, 25 bp, probe
ttcatctctttctcctatgtcttca

SEQ ID NO: 55466 - DNA, 25 bp, probe
tgagattctggctgttctaaagttg

SEQ ID NO: 55467 - DNA, 25 bp, probe
gtgagattctggctgttctaaagtt

SEQ ID NO: 55468 - DNA, 25 bp, probe
tctctttctcctatgtcttcatcat

SEQ ID NO: 55469 - DNA, 25 bp, probe
atctctttctcctatgtcttcatca

SEQ ID NO: 55470 - DNA, 25 bp, probe
tcatctctttctcctatgtcttcat

SEQ ID NO: 55471 - DNA, 25 bp, probe
gttcatctctttctcctatgtcttc

SEQ ID NO: 55472 - DNA, 25 bp, probe
ctctttctcctatgtcttcatcatc

SEQ ID NO: 55473 - DNA, 25 bp, probe
catctctttctcctatgtcttcatc

SEQ ID NO: 55474 - DNA, 25 bp, probe
cttctgtggagacaatgtcatcaac

SEQ ID NO: 55475 - DNA, 25 bp, probe
ctgtgagattctggctgttctaaag

SEQ ID NO: 55476 - DNA, 25 bp, probe
cggttctgttcatctctttctccta

SEQ ID NO: 55477 - DNA, 25 bp, probe
tacgggaccttattcttcatgtatg

SEQ ID NO: 55478 - DNA, 25 bp, probe
ctacgggaccttattcttcatgtat

SEQ ID NO: 55479 - DNA, 25 bp, probe
ccatcatctatagcctgaggaacaa

SEQ ID NO: 55480 - DNA, 25 bp, probe
catgtatgggaagcctaagtctaag

SEQ ID NO: 55481 - DNA, 25 bp, probe
tctacgggaccttattcttcatgta

SEQ ID NO: 55482 - DNA, 25 bp, probe
gagattctggctgttctaaagttgg

SEQ ID NO: 55483 - DNA, 25 bp, probe
tcatgtatgggaagcctaagtctaa

SEQ ID NO: 55484 - DNA, 25 bp, probe
cttctacgggaccttattcttcatg

SEQ ID NO: 55485 - DNA, 25 bp, probe
caatgtcatcaaccacttcacctgt

SEQ ID NO: 55486 - DNA, 25 bp, probe
ggaccttattcttcatgtatgggaa

SEQ ID NO: 55487 - DNA, 25 bp, probe
gagacaatgtcatcaaccacttcac

SEQ ID NO: 55488 - DNA, 25 bp, probe
acaatgtcatcaaccacttcacctg

SEQ ID NO: 55489 - DNA, 25 bp, probe
ttcatgtatgggaagcctaagtcta

SEQ ID NO: 55490 - DNA, 25 bp, probe
agaggatctttcagacaaactcatc

SEQ ID NO: 55491 - DNA, 25 bp, probe
ccttgacgcttatgaacctctactt

SEQ ID NO: 55492 - DNA, 25 bp, probe
cttgacgcttatgaacctctacttt

SEQ ID NO: 55493 - DNA, 25 bp, probe
ttgacgcttatgaacctctactttg

SEQ ID NO: 55494 - DNA, 25 bp, probe
caccttgacgcttatgaacctctac

SEQ ID NO: 55495 - DNA, 25 bp, probe
accttgacgcttatgaacctctact

SEQ ID NO: 55496 - DNA, 25 bp, probe
cagttcttcaccttgacgcttatga

SEQ ID NO: 55497 - DNA, 25 bp, probe
tcaccttgacgcttatgaacctcta

SEQ ID NO: 55498 - DNA, 25 bp, probe
taccaccctcttctccttctacttc

SEQ ID NO: 55499 - DNA, 25 bp, probe
ctcttctccttctacttccgagata

SEQ ID NO: 55500 - DNA, 25 bp, probe
ttctccttctacttccgagatactc

SEQ ID NO: 55501 - DNA, 25 bp, probe
cttctccttctacttccgagatact

SEQ ID NO: 55502 - DNA, 25 bp, probe
tcttctccttctacttccgagatac

SEQ ID NO: 55503 - DNA, 25 bp, probe
tgacgcttatgaacctctactttgc

SEQ ID NO: 55504 - DNA, 25 bp, probe
gtaccaccctcttctccttctactt

SEQ ID NO: 55505 - DNA, 25 bp, probe
agttcttcaccttgacgcttatgaa

SEQ ID NO: 55506 - DNA, 25 bp, probe
gcttatgaacctctactttgcccag

SEQ ID NO: 55507 - DNA, 25 bp, probe
ctccttctacttccgagatactccc

SEQ ID NO: 55508 - DNA, 25 bp, probe
cttatgaacctctactttgcccagg

SEQ ID NO: 55509 - DNA, 25 bp, probe
gcagttcttcaccttgacgcttatg

SEQ ID NO: 55510 - DNA, 25 bp, probe
tctccttctacttccgagatactcc

SEQ ID NO: 55511 - DNA, 25 bp, probe
gacgcttatgaacctctactttgcc

SEQ ID NO: 55512 - DNA, 25 bp, probe
gttcttcaccttgacgcttatgaac

SEQ ID NO: 55513 - DNA, 25 bp, probe
ttcttcaccttgacgcttatgaacc

SEQ ID NO: 55514 - DNA, 25 bp, probe
cctcttctccttctacttccgagat

SEQ ID NO: 55515 - DNA, 25 bp, probe
cttcaccttgacgcttatgaacctc

SEQ ID NO: 55516 - DNA, 25 bp, probe
ttcaccttgacgcttatgaacctct

SEQ ID NO: 55517 - DNA, 25 bp, probe
tcttcaccttgacgcttatgaacct

SEQ ID NO: 55518 - DNA, 25 bp, probe
accaccctcttctccttctacttcc

SEQ ID NO: 55519 - DNA, 25 bp, probe
caccctcttctccttctacttccga

SEQ ID NO: 55520 - DNA, 25 bp, probe
cgtaccaccctcttctccttctact

SEQ ID NO: 55521 - DNA, 25 bp, probe
cgcttatgaacctctactttgccca

SEQ ID NO: 55522 - DNA, 25 bp, probe
acgcttatgaacctctactttgccc

SEQ ID NO: 55523 - DNA, 25 bp, probe
accctcttctccttctacttccgag

SEQ ID NO: 55524 - DNA, 25 bp, probe
tgcagttcttcaccttgacgcttat

SEQ ID NO: 55525 - DNA, 25 bp, probe
tccttctacttccgagatactcccc

SEQ ID NO: 55526 - DNA, 25 bp, probe
ccctcttctccttctacttccgaga

SEQ ID NO: 55527 - DNA, 25 bp, probe
ttatgaacctctactttgcccaggt

SEQ ID NO: 55528 - DNA, 25 bp, probe
tatgaacctctactttgcccaggtg

SEQ ID NO: 55529 - DNA, 25 bp, probe
atctcttacattctagttctggtgc

SEQ ID NO: 55530 - DNA, 25 bp, probe
tacattctagttctggtgctctcta

SEQ ID NO: 55531 - DNA, 25 bp, probe
attctagttctggtgctctctatct

SEQ ID NO: 55532 - DNA, 25 bp, probe
cattctagttctggtgctctctatc

SEQ ID NO: 55533 - DNA, 25 bp, probe
acattctagttctggtgctctctat

SEQ ID NO: 55534 - DNA, 25 bp, probe
cttacattctagttctggtgctctc

SEQ ID NO: 55535 - DNA, 25 bp, probe
ctcttacattctagttctggtgctc

SEQ ID NO: 55536 - DNA, 25 bp, probe
ttacattctagttctggtgctctct

SEQ ID NO: 55537 - DNA, 25 bp, probe
tcttacattctagttctggtgctct

SEQ ID NO: 55538 - DNA, 25 bp, probe
tctcttacattctagttctggtgct

SEQ ID NO: 55539 - DNA, 25 bp, probe
ttctagttctggtgctctctatctg

SEQ ID NO: 55540 - DNA, 25 bp, probe
atgactgtcgtactggatgtaacta

SEQ ID NO: 55541 - DNA, 25 bp, probe
ctagttctggtgctctctatctgtt

SEQ ID NO: 55542 - DNA, 25 bp, probe
catctcttacattctagttctggtg

SEQ ID NO: 55543 - DNA, 25 bp, probe
tcatctcttacattctagttctggt

SEQ ID NO: 55544 - DNA, 25 bp, probe
gtcatctcttacattctagttctgg

SEQ ID NO: 55545 - DNA, 25 bp, probe
ggtcatctcttacattctagttctg

SEQ ID NO: 55546 - DNA, 25 bp, probe
aggtcatctcttacattctagttct

SEQ ID NO: 55547 - DNA, 25 bp, probe
tgactgtcgtactggatgtaactag

SEQ ID NO: 55548 - DNA, 25 bp, probe
tcacatctgaagtcaacatgaagtt

SEQ ID NO: 55549 - DNA, 25 bp, probe
tctagttctggtgctctctatctgt

SEQ ID NO: 55550 - DNA, 25 bp, probe
ctcacatctgaagtcaacatgaagt

SEQ ID NO: 55551 - DNA, 25 bp, probe
ctagatcactcactgttgtagcttc

SEQ ID NO: 55552 - DNA, 25 bp, probe
ttggctagatcactcactgttgtag

SEQ ID NO: 55553 - DNA, 25 bp, probe
cttggctagatcactcactgttgta

SEQ ID NO: 55554 - DNA, 25 bp, probe
atactagctcacatctgaagtcaac

SEQ ID NO: 55555 - DNA, 25 bp, probe
tagatcactcactgttgtagcttct

SEQ ID NO: 55556 - DNA, 25 bp, probe
cacacatcaagagaaagttaccatt

SEQ ID NO: 55557 - DNA, 25 bp, probe
ttctggtgctctctatctgtttaag

SEQ ID NO: 55558 - DNA, 25 bp, probe
gttctggtgctctctatctgtttaa

SEQ ID NO: 55559 - DNA, 25 bp, probe
ctatactagctcacatctgaagtca

SEQ ID NO: 55560 - DNA, 25 bp, probe
catgactgtcgtactggatgtaact

SEQ ID NO: 55561 - DNA, 25 bp, probe
agttctggtgctctctatctgttta

SEQ ID NO: 55562 - DNA, 25 bp, probe
tagttctggtgctctctatctgttt

SEQ ID NO: 55563 - DNA, 25 bp, probe
tcaagagaaagttaccattcagagg

SEQ ID NO: 55564 - DNA, 25 bp, probe
tactagctcacatctgaagtcaaca

SEQ ID NO: 55565 - DNA, 25 bp, probe
tatactagctcacatctgaagtcaa

SEQ ID NO: 55566 - DNA, 25 bp, probe
cacatcaagagaaagttaccattca

SEQ ID NO: 55567 - DNA, 25 bp, probe
acacatcaagagaaagttaccattc

SEQ ID NO: 55568 - DNA, 25 bp, probe
gctcacatctgaagtcaacatgaag

SEQ ID NO: 55569 - DNA, 25 bp, probe
ctagctcacatctgaagtcaacatg

SEQ ID NO: 55570 - DNA, 25 bp, probe
ctggtgctctctatctgtttaagac

SEQ ID NO: 55571 - DNA, 25 bp, probe
tctggtgctctctatctgtttaaga

SEQ ID NO: 55572 - DNA, 25 bp, probe
acatcaagagaaagttaccattcag

SEQ ID NO: 55573 - DNA, 25 bp, probe
aattggcatcagtgaagagattatg

SEQ ID NO: 55574 - DNA, 25 bp, probe
attggcatcagtgaagagattatgg

SEQ ID NO: 55575 - DNA, 25 bp, probe
gatcttatcaccagtgtcatagtgg

SEQ ID NO: 55576 - DNA, 25 bp, probe
aatttgaggagagatggattcacac

SEQ ID NO: 55577 - DNA, 25 bp, probe
tggtgaatttgaggagagatggatt

SEQ ID NO: 55578 - DNA, 25 bp, probe
ttggtgaatttgaggagagatggat

SEQ ID NO: 55579 - DNA, 25 bp, probe
atcttatcaccagtgtcatagtggc

SEQ ID NO: 55580 - DNA, 25 bp, probe
tgatcttatcaccagtgtcatagtg

SEQ ID NO: 55581 - DNA, 25 bp, probe
cctgatcttatcaccagtgtcatag

SEQ ID NO: 55582 - DNA, 25 bp, probe
ctgatcttatcaccagtgtcatagt

SEQ ID NO: 55583 - DNA, 25 bp, probe
atttgaggagagatggattcacact

SEQ ID NO: 55584 - DNA, 25 bp, probe
cttggtgaatttgaggagagatgga

SEQ ID NO: 55585 - DNA, 25 bp, probe
acaattggcatcagtgaagagatta

SEQ ID NO: 55586 - DNA, 25 bp, probe
gtacaccgtcattcacagattccag

SEQ ID NO: 55587 - DNA, 25 bp, probe
caattggcatcagtgaagagattat

SEQ ID NO: 55588 - DNA, 25 bp, probe
gagcgttctcctagaagacagaatt

SEQ ID NO: 55589 - DNA, 25 bp, probe
tttgaggagagatggattcacactg

SEQ ID NO: 55590 - DNA, 25 bp, probe
gaatttgaggagagatggattcaca

SEQ ID NO: 55591 - DNA, 25 bp, probe
ccttctcttcatcatgctgctcttc

SEQ ID NO: 55592 - DNA, 25 bp, probe
ttggcatcagtgaagagattatggg

SEQ ID NO: 55593 - DNA, 25 bp, probe
ttgaggagagatggattcacactgg

SEQ ID NO: 55594 - DNA, 25 bp, probe
ctgctcttcgtcatcctctctatcg

SEQ ID NO: 55595 - DNA, 25 bp, probe
ggtgaatttgaggagagatggattc

SEQ ID NO: 55596 - DNA, 25 bp, probe
catcgtccttctcttcatcatgctg

SEQ ID NO: 55597 - DNA, 25 bp, probe
gacaattggcatcagtgaagagatt

SEQ ID NO: 55598 - DNA, 25 bp, probe
cttctcttcatcatgctgctcttcg

SEQ ID NO: 55599 - DNA, 25 bp, probe
tccttctcttcatcatgctgctctt

SEQ ID NO: 55600 - DNA, 25 bp, probe
gctgctcttcgtcatcctctctatc

SEQ ID NO: 55601 - DNA, 25 bp, probe
agacaattggcatcagtgaagagat

SEQ ID NO: 55602 - DNA, 25 bp, probe
tgagcgttctcctagaagacagaat

SEQ ID NO: 55603 - DNA, 25 bp, probe
cttcatcatgctgctcttcgtcatc

SEQ ID NO: 55604 - DNA, 25 bp, probe
ccctgatcttatcaccagtgtcata

SEQ ID NO: 55605 - DNA, 25 bp, probe
gtgccatcgtccttctcttcatcat

SEQ ID NO: 55606 - DNA, 25 bp, probe
gagacaattggcatcagtgaagaga

SEQ ID NO: 55607 - DNA, 25 bp, probe
agagacaattggcatcagtgaagag

SEQ ID NO: 55608 - DNA, 25 bp, probe
gagagacaattggcatcagtgaaga

SEQ ID NO: 55609 - DNA, 25 bp, probe
atctagcaggaaaagccatatcttg

SEQ ID NO: 55610 - DNA, 25 bp, probe
catctagcaggaaaagccatatctt

SEQ ID NO: 55611 - DNA, 25 bp, probe
ccttggtgaatttgaggagagatgg

SEQ ID NO: 55612 - DNA, 25 bp, probe
ttctcttcatcatgctgctcttcgt

SEQ ID NO: 55613 - DNA, 25 bp, probe
gtccttctcttcatcatgctgctct

SEQ ID NO: 55614 - DNA, 25 bp, probe
cttcatcatgtttggcctctacttt

SEQ ID NO: 55615 - DNA, 25 bp, probe
tcttcatcatgctgctcttcgtcat

SEQ ID NO: 55616 - DNA, 25 bp, probe
ttcatcatgtttggcctctactttg

SEQ ID NO: 55617 - DNA, 25 bp, probe
gccaggtaataggagaataggtgaa

SEQ ID NO: 55618 - DNA, 25 bp, probe
ttccataggctccattagaactgtg

SEQ ID NO: 55619 - DNA, 25 bp, probe
cataggctccattagaactgtgacc

SEQ ID NO: 55620 - DNA, 25 bp, probe
ccataggctccattagaactgtgac

SEQ ID NO: 55621 - DNA, 25 bp, probe
tccataggctccattagaactgtga

SEQ ID NO: 55622 - DNA, 25 bp, probe
ccaggtaataggagaataggtgaaa

SEQ ID NO: 55623 - DNA, 25 bp, probe
ctcagcagtgttggcatcttctatt

SEQ ID NO: 55624 - DNA, 25 bp, probe
gtttccataggctccattagaactg

SEQ ID NO: 55625 - DNA, 25 bp, probe
tttccataggctccattagaactgt

SEQ ID NO: 55626 - DNA, 25 bp, probe
tcagcagtgttggcatcttctattg

SEQ ID NO: 55627 - DNA, 25 bp, probe
gagtttccataggctccattagaac

SEQ ID NO: 55628 - DNA, 25 bp, probe
tagactgcccaaggagtattattaa

SEQ ID NO: 55629 - DNA, 25 bp, probe
ctagactgcccaaggagtattatta

SEQ ID NO: 55630 - DNA, 25 bp, probe
caggtaataggagaataggtgaaat

SEQ ID NO: 55631 - DNA, 25 bp, probe
cttcttgctgctcaacattctggat

SEQ ID NO: 55632 - DNA, 25 bp, probe
agactgcccaaggagtattattaat

SEQ ID NO: 55633 - DNA, 25 bp, probe
cctagactgcccaaggagtattatt

SEQ ID NO: 55634 - DNA, 25 bp, probe
ttcttgctgctcaacattctggatg

SEQ ID NO: 55635 - DNA, 25 bp, probe
ctcccaaatcaagtctctccatcac

SEQ ID NO: 55636 - DNA, 25 bp, probe
ctccattagaactgtgaccctagtc

SEQ ID NO: 55637 - DNA, 25 bp, probe
gactgcccaaggagtattattaatt

SEQ ID NO: 55638 - DNA, 25 bp, probe
aggagaataggtgaaataacacatg

SEQ ID NO: 55639 - DNA, 25 bp, probe
tcccaaatcaagtctctccatcact

SEQ ID NO: 55640 - DNA, 25 bp, probe
ataggctccattagaactgtgaccc

SEQ ID NO: 55641 - DNA, 25 bp, probe
actgcccaaggagtattattaatta

SEQ ID NO: 55642 - DNA, 25 bp, probe
taggagaataggtgaaataacacat

SEQ ID NO: 55643 - DNA, 25 bp, probe
ataggagaataggtgaaataacaca

SEQ ID NO: 55644 - DNA, 25 bp, probe
ggccaggtaataggagaataggtga

SEQ ID NO: 55645 - DNA, 25 bp, probe
ctctggcctatttatatcctggtac

SEQ ID NO: 55646 - DNA, 25 bp, probe
cctctggcctatttatatcctggta

SEQ ID NO: 55647 - DNA, 25 bp, probe
ccctagactgcccaaggagtattat

SEQ ID NO: 55648 - DNA, 25 bp, probe
cctcccaaatcaagtctctccatca

SEQ ID NO: 55649 - DNA, 25 bp, probe
cagccaattaaaggagccagaagag

SEQ ID NO: 55650 - DNA, 25 bp, probe
agtttccataggctccattagaact

SEQ ID NO: 55651 - DNA, 25 bp, probe
aggtaataggagaataggtgaaata

SEQ ID NO: 55652 - DNA, 25 bp, probe
ctccaattctgtctccatcctgacc

SEQ ID NO: 55653 - DNA, 25 bp, probe
cctccaattctgtctccatcctgac

SEQ ID NO: 55654 - DNA, 25 bp, probe
cattttcacaacaatctctccccag

SEQ ID NO: 55655 - DNA, 25 bp, probe
ggagaccagatcaacagcaagagag

SEQ ID NO: 55656 - DNA, 25 bp, probe
gctccattagaactgtgaccctagt

SEQ ID NO: 55657 - DNA, 25 bp, probe
catcctcatgggcatctactttgtg

SEQ ID NO: 55658 - DNA, 25 bp, probe
ttatatcctggtacctgtagtctgc

SEQ ID NO: 55659 - DNA, 25 bp, probe
ccagatcaacagcaagagagctaag

SEQ ID NO: 55660 - DNA, 25 bp, probe
gaatttgggaaggtgactcgaatgt

SEQ ID NO: 55661 - DNA, 25 bp, probe
aaggctaaggatactaccaactact

SEQ ID NO: 55662 - DNA, 25 bp, probe
caaggctaaggatactaccaactac

SEQ ID NO: 55663 - DNA, 25 bp, probe
acaaggctaaggatactaccaacta

SEQ ID NO: 55664 - DNA, 25 bp, probe
aggctaaggatactaccaactacta

SEQ ID NO: 55665 - DNA, 25 bp, probe
aacaaggctaaggatactaccaact

SEQ ID NO: 55666 - DNA, 25 bp, probe
ggctaaggatactaccaactactat

SEQ ID NO: 55667 - DNA, 25 bp, probe
aggatactaccaactactatcacca

SEQ ID NO: 55668 - DNA, 25 bp, probe
ggatactaccaactactatcaccat

SEQ ID NO: 55669 - DNA, 25 bp, probe
aaggatactaccaactactatcacc

SEQ ID NO: 55670 - DNA, 25 bp, probe
tactatcaccatgaccattgtactg

SEQ ID NO: 55671 - DNA, 25 bp, probe
actactatcaccatgaccattgtac

SEQ ID NO: 55672 - DNA, 25 bp, probe
ctactatcaccatgaccattgtact

SEQ ID NO: 55673 - DNA, 25 bp, probe
caactactatcaccatgaccattgt

SEQ ID NO: 55674 - DNA, 25 bp, probe
taccaactactatcaccatgaccat

SEQ ID NO: 55675 - DNA, 25 bp, probe
aactactatcaccatgaccattgta

SEQ ID NO: 55676 - DNA, 25 bp, probe
tactaccaactactatcaccatgac

SEQ ID NO: 55677 - DNA, 25 bp, probe
ctatcaccatgaccattgtactgac

SEQ ID NO: 55678 - DNA, 25 bp, probe
actatcaccatgaccattgtactga

SEQ ID NO: 55679 - DNA, 25 bp, probe
ccaactactatcaccatgaccattg

SEQ ID NO: 55680 - DNA, 25 bp, probe
ctaccaactactatcaccatgacca

SEQ ID NO: 55681 - DNA, 25 bp, probe
actaccaactactatcaccatgacc

SEQ ID NO: 55682 - DNA, 25 bp, probe
accaactactatcaccatgaccatt

SEQ ID NO: 55683 - DNA, 25 bp, probe
gaaacaaggctaaggatactaccaa

SEQ ID NO: 55684 - DNA, 25 bp, probe
tatcaccatgaccattgtactgaca

SEQ ID NO: 55685 - DNA, 25 bp, probe
aaacaaggctaaggatactaccaac

SEQ ID NO: 55686 - DNA, 25 bp, probe
aggtgatatggcattctgaaagtag

SEQ ID NO: 55687 - DNA, 25 bp, probe
gaggtgatatggcattctgaaagta

SEQ ID NO: 55688 - DNA, 25 bp, probe
atactaccaactactatcaccatga

SEQ ID NO: 55689 - DNA, 25 bp, probe
gatatggcattctgaaagtagggag

SEQ ID NO: 55690 - DNA, 25 bp, probe
ttaacatttccgcagaagatgagta

SEQ ID NO: 55691 - DNA, 25 bp, probe
tgaaacaaggctaaggatactacca

SEQ ID NO: 55692 - DNA, 25 bp, probe
aggaagattggttgaaagtctgaat

SEQ ID NO: 55693 - DNA, 25 bp, probe
taacatttccgcagaagatgagtag

SEQ ID NO: 55694 - DNA, 25 bp, probe
gctaaggatactaccaactactatc

SEQ ID NO: 55695 - DNA, 25 bp, probe
ctagatagtgtgagaggttcctttc

SEQ ID NO: 55696 - DNA, 25 bp, probe
tgatatggcattctgaaagtaggga

SEQ ID NO: 55697 - DNA, 25 bp, probe
gtgatatggcattctgaaagtaggg

SEQ ID NO: 55698 - DNA, 25 bp, probe
ggtgatatggcattctgaaagtagg

SEQ ID NO: 55699 - DNA, 25 bp, probe
attaacatttccgcagaagatgagt

SEQ ID NO: 55700 - DNA, 25 bp, probe
tattaacatttccgcagaagatgag

SEQ ID NO: 55701 - DNA, 25 bp, probe
ctattaacatttccgcagaagatga

SEQ ID NO: 55702 - DNA, 25 bp, probe
tacagtaaagggtggaggtgatatg

SEQ ID NO: 55703 - DNA, 25 bp, probe
ttgaaacaaggctaaggatactacc

SEQ ID NO: 55704 - DNA, 25 bp, probe
gatactaccaactactatcaccatg

SEQ ID NO: 55705 - DNA, 25 bp, probe
cataatgagaatcaagatgtgcctc

SEQ ID NO: 55706 - DNA, 25 bp, probe
tcataatgagaatcaagatgtgcct

SEQ ID NO: 55707 - DNA, 25 bp, probe
actttgatgaaggaagaactctacc

SEQ ID NO: 55708 - DNA, 25 bp, probe
aaagaacttaaacaaagaccacctg

SEQ ID NO: 55709 - DNA, 25 bp, probe
gaaagaacttaaacaaagaccacct

SEQ ID NO: 55710 - DNA, 25 bp, probe
ggaaagaacttaaacaaagaccacc

SEQ ID NO: 55711 - DNA, 25 bp, probe
aagaacttaaacaaagaccacctga

SEQ ID NO: 55712 - DNA, 25 bp, probe
aaactctggctgtcttactttgatg

SEQ ID NO: 55713 - DNA, 25 bp, probe
tctagtgccaagtcctaaatcattt

SEQ ID NO: 55714 - DNA, 25 bp, probe
attccaaattcaagaagactcgcta

SEQ ID NO: 55715 - DNA, 25 bp, probe
atctagtgccaagtcctaaatcatt

SEQ ID NO: 55716 - DNA, 25 bp, probe
aatctagtgccaagtcctaaatcat

SEQ ID NO: 55717 - DNA, 25 bp, probe
agaacttaaacaaagaccacctgag

SEQ ID NO: 55718 - DNA, 25 bp, probe
ttgatgaaggaagaactctacctgc

SEQ ID NO: 55719 - DNA, 25 bp, probe
taatctagtgccaagtcctaaatca

SEQ ID NO: 55720 - DNA, 25 bp, probe
ctctggctgtcttactttgatgaag

SEQ ID NO: 55721 - DNA, 25 bp, probe
gatgaaggaagaactctacctgctc

SEQ ID NO: 55722 - DNA, 25 bp, probe
ttccaaattcaagaagactcgctac

SEQ ID NO: 55723 - DNA, 25 bp, probe
cttactttgatgaaggaagaactct

SEQ ID NO: 55724 - DNA, 25 bp, probe
ggctgtcttactttgatgaaggaag

SEQ ID NO: 55725 - DNA, 25 bp, probe
actctggctgtcttactttgatgaa

SEQ ID NO: 55726 - DNA, 25 bp, probe
aactctggctgtcttactttgatga

SEQ ID NO: 55727 - DNA, 25 bp, probe
ttaatctagtgccaagtcctaaatc

SEQ ID NO: 55728 - DNA, 25 bp, probe
caaattcaagaagactcgctaccag

SEQ ID NO: 55729 - DNA, 25 bp, probe
gaacttaaacaaagaccacctgagg

SEQ ID NO: 55730 - DNA, 25 bp, probe
aattccaaattcaagaagactcgct

SEQ ID NO: 55731 - DNA, 25 bp, probe
ctttgatgaaggaagaactctacct

SEQ ID NO: 55732 - DNA, 25 bp, probe
tactttgatgaaggaagaactctac

SEQ ID NO: 55733 - DNA, 25 bp, probe
tttgatgaaggaagaactctacctg

SEQ ID NO: 55734 - DNA, 25 bp, probe
tggctgtcttactttgatgaaggaa

SEQ ID NO: 55735 - DNA, 25 bp, probe
tgatgaaggaagaactctacctgct

SEQ ID NO: 55736 - DNA, 25 bp, probe
ctaatagccatgataaacaactcct

SEQ ID NO: 55737 - DNA, 25 bp, probe
ggtgaacaagggcaaagacatttag

SEQ ID NO: 55738 - DNA, 25 bp, probe
tggaaagaacttaaacaaagaccac

SEQ ID NO: 55739 - DNA, 25 bp, probe
ctggctgtcttactttgatgaagga

SEQ ID NO: 55740 - DNA, 25 bp, probe
tctggctgtcttactttgatgaagg

SEQ ID NO: 55741 - DNA, 25 bp, probe
tttaatctagtgccaagtcctaaat

SEQ ID NO: 55742 - DNA, 25 bp, probe
ttggaaagaacttaaacaaagacca

SEQ ID NO: 55743 - DNA, 25 bp, probe
ttactttgatgaaggaagaactcta

SEQ ID NO: 55744 - DNA, 25 bp, probe
aaattcaagaagactcgctaccagg

SEQ ID NO: 55745 - DNA, 25 bp, probe
tccaaattcaagaagactcgctacc

SEQ ID NO: 55746 - DNA, 25 bp, probe
atagccatgataaacaactcctatc

SEQ ID NO: 55747 - DNA, 25 bp, probe
aacttaaacaaagaccacctgaggg

SEQ ID NO: 55748 - DNA, 25 bp, probe
ccaaattcaagaagactcgctacca

SEQ ID NO: 55749 - DNA, 25 bp, probe
ctaagatcctgagacacttgacttc

SEQ ID NO: 55750 - DNA, 25 bp, probe
taagatcctgagacacttgacttca

SEQ ID NO: 55751 - DNA, 25 bp, probe
cctaagatcctgagacacttgactt

SEQ ID NO: 55752 - DNA, 25 bp, probe
atcctgagacacttgacttcacaat

SEQ ID NO: 55753 - DNA, 25 bp, probe
tcctaagatcctgagacacttgact

SEQ ID NO: 55754 - DNA, 25 bp, probe
caacagcactcaccatccttatcat

SEQ ID NO: 55755 - DNA, 25 bp, probe
tcctgagacacttgacttcacaatc

SEQ ID NO: 55756 - DNA, 25 bp, probe
agacacttgacttcacaatccacaa

SEQ ID NO: 55757 - DNA, 25 bp, probe
ctcctaagatcctgagacacttgac

SEQ ID NO: 55758 - DNA, 25 bp, probe
aagatcctgagacacttgacttcac

SEQ ID NO: 55759 - DNA, 25 bp, probe
ctgagacacttgacttcacaatcca

SEQ ID NO: 55760 - DNA, 25 bp, probe
ctcaacagcactcaccatccttatc

SEQ ID NO: 55761 - DNA, 25 bp, probe
gatcctgagacacttgacttcacaa

SEQ ID NO: 55762 - DNA, 25 bp, probe
cccaaatccctgactcaataaagta

SEQ ID NO: 55763 - DNA, 25 bp, probe
gagacacttgacttcacaatccaca

SEQ ID NO: 55764 - DNA, 25 bp, probe
taatgagaaactgaactgtactgct

SEQ ID NO: 55765 - DNA, 25 bp, probe
cctgactcaataaagtaagcgtgta

SEQ ID NO: 55766 - DNA, 25 bp, probe
ataaagtaagcgtgtacctagcaaa

SEQ ID NO: 55767 - DNA, 25 bp, probe
aataaagtaagcgtgtacctagcaa

SEQ ID NO: 55768 - DNA, 25 bp, probe
tgagacacttgacttcacaatccac

SEQ ID NO: 55769 - DNA, 25 bp, probe
aatccctgactcaataaagtaagcg

SEQ ID NO: 55770 - DNA, 25 bp, probe
aaatccctgactcaataaagtaagc

SEQ ID NO: 55771 - DNA, 25 bp, probe
tcaataaagtaagcgtgtacctagc

SEQ ID NO: 55772 - DNA, 25 bp, probe
ataatgagaaactgaactgtactgc

SEQ ID NO: 55773 - DNA, 25 bp, probe
caataaagtaagcgtgtacctagca

SEQ ID NO: 55774 - DNA, 25 bp, probe
ctcaataaagtaagcgtgtacctag

SEQ ID NO: 55775 - DNA, 25 bp, probe
ctcattgtctacacaccctaactaa

SEQ ID NO: 55776 - DNA, 25 bp, probe
tctcaacagcactcaccatccttat

SEQ ID NO: 55777 - DNA, 25 bp, probe
actcattgtctacacaccctaacta

SEQ ID NO: 55778 - DNA, 25 bp, probe
ccaaatccctgactcaataaagtaa

SEQ ID NO: 55779 - DNA, 25 bp, probe
aatgagaaactgaactgtactgctg

SEQ ID NO: 55780 - DNA, 25 bp, probe
tcattgtctacacaccctaactaaa

SEQ ID NO: 55781 - DNA, 25 bp, probe
aacagcactcaccatccttatcatg

SEQ ID NO: 55782 - DNA, 25 bp, probe
ctgactcaataaagtaagcgtgtac

SEQ ID NO: 55783 - DNA, 25 bp, probe
cattgtctacacaccctaactaaag

SEQ ID NO: 55784 - DNA, 25 bp, probe
actcaataaagtaagcgtgtaccta

SEQ ID NO: 55785 - DNA, 25 bp, probe
gactcaataaagtaagcgtgtacct

SEQ ID NO: 55786 - DNA, 25 bp, probe
cctgagacacttgacttcacaatcc

SEQ ID NO: 55787 - DNA, 25 bp, probe
agatcacagagtacagtcttggagg

SEQ ID NO: 55788 - DNA, 25 bp, probe
gagcacatgggttataatgagaaac

SEQ ID NO: 55789 - DNA, 25 bp, probe
aagatcacagagtacagtcttggag

SEQ ID NO: 55790 - DNA, 25 bp, probe
attgtctacacaccctaactaaagg

SEQ ID NO: 55791 - DNA, 25 bp, probe
tgactcaataaagtaagcgtgtacc

SEQ ID NO: 55792 - DNA, 25 bp, probe
gcacatgggttataatgagaaactg

SEQ ID NO: 55793 - DNA, 25 bp, probe
ctgaccttcttccacaactacaata

SEQ ID NO: 55794 - DNA, 25 bp, probe
ccttcttccacaactacaatatcct

SEQ ID NO: 55795 - DNA, 25 bp, probe
accttcttccacaactacaatatcc

SEQ ID NO: 55796 - DNA, 25 bp, probe
ttccacaactacaatatcctcatcg

SEQ ID NO: 55797 - DNA, 25 bp, probe
tgaccttcttccacaactacaatat

SEQ ID NO: 55798 - DNA, 25 bp, probe
ttcttccacaactacaatatcctca

SEQ ID NO: 55799 - DNA, 25 bp, probe
tcttccacaactacaatatcctcat

SEQ ID NO: 55800 - DNA, 25 bp, probe
gaccttcttccacaactacaatatc

SEQ ID NO: 55801 - DNA, 25 bp, probe
cttccacaactacaatatcctcatc

SEQ ID NO: 55802 - DNA, 25 bp, probe
cttcttccacaactacaatatcctc

SEQ ID NO: 55803 - DNA, 25 bp, probe
taacctccagagcctcatcaataat

SEQ ID NO: 55804 - DNA, 25 bp, probe
attaacctccagagcctcatcaata

SEQ ID NO: 55805 - DNA, 25 bp, probe
ttaacctccagagcctcatcaataa

SEQ ID NO: 55806 - DNA, 25 bp, probe
ttactccttcatcagcctcttcatc

SEQ ID NO: 55807 - DNA, 25 bp, probe
ccttcatcagcctcttcatctacat

SEQ ID NO: 55808 - DNA, 25 bp, probe
ctccttcatcagcctcttcatctac

SEQ ID NO: 55809 - DNA, 25 bp, probe
cttcatcagcctcttcatctacatg

SEQ ID NO: 55810 - DNA, 25 bp, probe
ctacctgaccttcttccacaactac

SEQ ID NO: 55811 - DNA, 25 bp, probe
cctgaccttcttccacaactacaat

SEQ ID NO: 55812 - DNA, 25 bp, probe
tccacaactacaatatcctcatcgc

SEQ ID NO: 55813 - DNA, 25 bp, probe
cattaacctccagagcctcatcaat

SEQ ID NO: 55814 - DNA, 25 bp, probe
actccttcatcagcctcttcatcta

SEQ ID NO: 55815 - DNA, 25 bp, probe
tactccttcatcagcctcttcatct

SEQ ID NO: 55816 - DNA, 25 bp, probe
aacctccagagcctcatcaataatg

SEQ ID NO: 55817 - DNA, 25 bp, probe
tccttcatcagcctcttcatctaca

SEQ ID NO: 55818 - DNA, 25 bp, probe
aactacaatatcctcatcgccacac

SEQ ID NO: 55819 - DNA, 25 bp, probe
caactacaatatcctcatcgccaca

SEQ ID NO: 55820 - DNA, 25 bp, probe
acaactacaatatcctcatcgccac

SEQ ID NO: 55821 - DNA, 25 bp, probe
cacaactacaatatcctcatcgcca

SEQ ID NO: 55822 - DNA, 25 bp, probe
cgcttatttatttgtagggtttgct

SEQ ID NO: 55823 - DNA, 25 bp, probe
tacctgaccttcttccacaactaca

SEQ ID NO: 55824 - DNA, 25 bp, probe
ttcatcagcctcttcatctacatgg

SEQ ID NO: 55825 - DNA, 25 bp, probe
ccgcttatttatttgtagggtttgc

SEQ ID NO: 55826 - DNA, 25 bp, probe
ctacaatatcctcatcgccacactg

SEQ ID NO: 55827 - DNA, 25 bp, probe
tttactccttcatcagcctcttcat

SEQ ID NO: 55828 - DNA, 25 bp, probe
ccacaactacaatatcctcatcgcc

SEQ ID NO: 55829 - DNA, 25 bp, probe
gcttatttatttgtagggtttgctt

SEQ ID NO: 55830 - DNA, 25 bp, probe
actacaatatcctcatcgccacact

SEQ ID NO: 55831 - DNA, 25 bp, probe
ctttactccttcatcagcctcttca

SEQ ID NO: 55832 - DNA, 25 bp, probe
ctacctttactccttcatcagcctc

SEQ ID NO: 55833 - DNA, 25 bp, probe
ctctacctttactccttcatcagcc

SEQ ID NO: 55834 - DNA, 25 bp, probe
acctgaccttcttccacaactacaa

SEQ ID NO: 55835 - DNA, 25 bp, probe
catcagcctcttcatctacatggtg

SEQ ID NO: 55836 - DNA, 25 bp, probe
ttacaagaacctcacgctcaaattc

SEQ ID NO: 55837 - DNA, 25 bp, probe
atctgttcttctattagtgaatggc

SEQ ID NO: 55838 - DNA, 25 bp, probe
aggtggatggagatcaagattagat

SEQ ID NO: 55839 - DNA, 25 bp, probe
ttattgacttctgttgtctcctctg

SEQ ID NO: 55840 - DNA, 25 bp, probe
caggtggatggagatcaagattaga

SEQ ID NO: 55841 - DNA, 25 bp, probe
gcatctgttcttctattagtgaatg

SEQ ID NO: 55842 - DNA, 25 bp, probe
tgatactcatatctctcagttctgt

SEQ ID NO: 55843 - DNA, 25 bp, probe
gtgatactcatatctctcagttctg

SEQ ID NO: 55844 - DNA, 25 bp, probe
agtgatactcatatctctcagttct

SEQ ID NO: 55845 - DNA, 25 bp, probe
cactctttcctaatctggttgtcat

SEQ ID NO: 55846 - DNA, 25 bp, probe
catctgttcttctattagtgaatgg

SEQ ID NO: 55847 - DNA, 25 bp, probe
cttcttcctctacagacacaagcag

SEQ ID NO: 55848 - DNA, 25 bp, probe
tattgacttctgttgtctcctctgc

SEQ ID NO: 55849 - DNA, 25 bp, probe
gcaggtggatggagatcaagattag

SEQ ID NO: 55850 - DNA, 25 bp, probe
gatactcatatctctcagttctgtt

SEQ ID NO: 55851 - DNA, 25 bp, probe
tcttcttcctctacagacacaagca

SEQ ID NO: 55852 - DNA, 25 bp, probe
aaacactctttcctaatctggttgt

SEQ ID NO: 55853 - DNA, 25 bp, probe
tttctgacaatttggacaactgtag

SEQ ID NO: 55854 - DNA, 25 bp, probe
ttacaaagcatcaaagagatttagc

SEQ ID NO: 55855 - DNA, 25 bp, probe
tggatactgttcttacaaagcatca

SEQ ID NO: 55856 - DNA, 25 bp, probe
actctttcctaatctggttgtcatg

SEQ ID NO: 55857 - DNA, 25 bp, probe
ttctgacaatttggacaactgtagt

SEQ ID NO: 55858 - DNA, 25 bp, probe
cccaaggtttattgacttctgttgt

SEQ ID NO: 55859 - DNA, 25 bp, probe
aacactctttcctaatctggttgtc

SEQ ID NO: 55860 - DNA, 25 bp, probe
ggatactgttcttacaaagcatcaa

SEQ ID NO: 55861 - DNA, 25 bp, probe
aacacaatcacagcaacagactctc

SEQ ID NO: 55862 - DNA, 25 bp, probe
agctcattacatgcagtcttatatt

SEQ ID NO: 55863 - DNA, 25 bp, probe
atggatactgttcttacaaagcatc

SEQ ID NO: 55864 - DNA, 25 bp, probe
ccaaggtttattgacttctgttgtc

SEQ ID NO: 55865 - DNA, 25 bp, probe
tttattgacttctgttgtctcctct

SEQ ID NO: 55866 - DNA, 25 bp, probe
gtttattgacttctgttgtctcctc

SEQ ID NO: 55867 - DNA, 25 bp, probe
tgcatctgttcttctattagtgaat

SEQ ID NO: 55868 - DNA, 25 bp, probe
caaggtttattgacttctgttgtct

SEQ ID NO: 55869 - DNA, 25 bp, probe
ggtttattgacttctgttgtctcct

SEQ ID NO: 55870 - DNA, 25 bp, probe
aggtttattgacttctgttgtctcc

SEQ ID NO: 55871 - DNA, 25 bp, probe
aaggtttattgacttctgttgtctc

SEQ ID NO: 55872 - DNA, 25 bp, probe
ggtggatggagatcaagattagatc

SEQ ID NO: 55873 - DNA, 25 bp, probe
caacacaatcacagcaacagactct

SEQ ID NO: 55874 - DNA, 25 bp, probe
tctgacaatttggacaactgtagtt

SEQ ID NO: 55875 - DNA, 25 bp, probe
tctgttcttctattagtgaatggcc

SEQ ID NO: 55876 - DNA, 25 bp, probe
ctctttcctaatctggttgtcatgc

SEQ ID NO: 55877 - DNA, 25 bp, probe
acactctttcctaatctggttgtca

SEQ ID NO: 55878 - DNA, 25 bp, probe
ttagctcattacatgcagtcttata

SEQ ID NO: 55879 - DNA, 25 bp, probe
ttatggatactgttcttacaaagca

SEQ ID NO: 55880 - DNA, 25 bp, probe
tagctcattacatgcagtcttatat

SEQ ID NO: 55881 - DNA, 25 bp, probe
tggtttgtttgcttaatttccttct

SEQ ID NO: 55882 - DNA, 25 bp, probe
actggtttgtttgcttaatttcctt

SEQ ID NO: 55883 - DNA, 25 bp, probe
ggtttgtttgcttaatttccttctg

SEQ ID NO: 55884 - DNA, 25 bp, probe
ctggtttgtttgcttaatttccttc

SEQ ID NO: 55885 - DNA, 25 bp, probe
gactggtttgtttgcttaatttcct

SEQ ID NO: 55886 - DNA, 25 bp, probe
agactggtttgtttgcttaatttcc

SEQ ID NO: 55887 - DNA, 25 bp, probe
gggaagaatttaatggactgtgaat

SEQ ID NO: 55888 - DNA, 25 bp, probe
tctcctcctcagtcatagagcaatt

SEQ ID NO: 55889 - DNA, 25 bp, probe
gtttgtttgcttaatttccttctgt

SEQ ID NO: 55890 - DNA, 25 bp, probe
aagactggtttgtttgcttaatttc

SEQ ID NO: 55891 - DNA, 25 bp, probe
tttgtttgcttaatttccttctgtt

SEQ ID NO: 55892 - DNA, 25 bp, probe
aaagactggtttgtttgcttaattt

SEQ ID NO: 55893 - DNA, 25 bp, probe
gtctcagtgtgctttggaagaatac

SEQ ID NO: 55894 - DNA, 25 bp, probe
gtctcctcctcagtcatagagcaat

SEQ ID NO: 55895 - DNA, 25 bp, probe
agtctcagtgtgctttggaagaata

SEQ ID NO: 55896 - DNA, 25 bp, probe
gaagaatacgttaggagccagtacc

SEQ ID NO: 55897 - DNA, 25 bp, probe
ggaagaatacgttaggagccagtac

SEQ ID NO: 55898 - DNA, 25 bp, probe
ttgtttgcttaatttccttctgtta

SEQ ID NO: 55899 - DNA, 25 bp, probe
aacatcatgggtatcgagaacattt

SEQ ID NO: 55900 - DNA, 25 bp, probe
ctttatggaccacatacggatcttc

SEQ ID NO: 55901 - DNA, 25 bp, probe
tgtttgcttaatttccttctgttaa

SEQ ID NO: 55902 - DNA, 25 bp, probe
aagtctcagtgtgctttggaagaat

SEQ ID NO: 55903 - DNA, 25 bp, probe
ggaagaatttaatggactgtgaatt

SEQ ID NO: 55904 - DNA, 25 bp, probe
acatcatgggtatcgagaacatttg

SEQ ID NO: 55905 - DNA, 25 bp, probe
caacatcatgggtatcgagaacatt

SEQ ID NO: 55906 - DNA, 25 bp, probe
gatgcctgtggtctctctgatgtag

SEQ ID NO: 55907 - DNA, 25 bp, probe
agtgtgctttggaagaatacgttag

SEQ ID NO: 55908 - DNA, 25 bp, probe
tctcagtgtgctttggaagaatacg

SEQ ID NO: 55909 - DNA, 25 bp, probe
caacaacatcatgggtatcgagaac

SEQ ID NO: 55910 - DNA, 25 bp, probe
cagtgtgctttggaagaatacgtta

SEQ ID NO: 55911 - DNA, 25 bp, probe
cctttatggaccacatacggatctt

SEQ ID NO: 55912 - DNA, 25 bp, probe
aaacagagaaagaaaaggcaaaaga

SEQ ID NO: 55913 - DNA, 25 bp, probe
tgaaacagagaaagaaaaggcaaaa

SEQ ID NO: 55914 - DNA, 25 bp, probe
catacggatcttccaagagcaagtg

SEQ ID NO: 55915 - DNA, 25 bp, probe
cacatacggatcttccaagagcaag

SEQ ID NO: 55916 - DNA, 25 bp, probe
acaacatcatgggtatcgagaacat

SEQ ID NO: 55917 - DNA, 25 bp, probe
aacagagaaagaaaaggcaaaagac

SEQ ID NO: 55918 - DNA, 25 bp, probe
aacaacatcatgggtatcgagaaca

SEQ ID NO: 55919 - DNA, 25 bp, probe
gaaacagagaaagaaaaggcaaaag

SEQ ID NO: 55920 - DNA, 25 bp, probe
gtgctttggaagaatacgttaggag

SEQ ID NO: 55921 - DNA, 25 bp, probe
gtgaaacagagaaagaaaaggcaaa

SEQ ID NO: 55922 - DNA, 25 bp, probe
gaagagaggggaagaatttaatgga

SEQ ID NO: 55923 - DNA, 25 bp, probe
agaagagaggggaagaatttaatgg

SEQ ID NO: 55924 - DNA, 25 bp, probe
gaaagaaaaggcaaaagactggttt

SEQ ID NO: 55925 - DNA, 25 bp, probe
gcttgattactaggaatggaggtgg

SEQ ID NO: 55926 - DNA, 25 bp, probe
ggcttgattactaggaatggaggtg

SEQ ID NO: 55927 - DNA, 25 bp, probe
atccagagaacttcctgtgtgagat

SEQ ID NO: 55928 - DNA, 25 bp, probe
acagcgtctctttaatcatcaagga

SEQ ID NO: 55929 - DNA, 25 bp, probe
cgtctctttaatcatcaaggactcc

SEQ ID NO: 55930 - DNA, 25 bp, probe
cttgattactaggaatggaggtggg

SEQ ID NO: 55931 - DNA, 25 bp, probe
gcgtctctttaatcatcaaggactc

SEQ ID NO: 55932 - DNA, 25 bp, probe
cagcgtctctttaatcatcaaggac

SEQ ID NO: 55933 - DNA, 25 bp, probe
gacagcgtctctttaatcatcaagg

SEQ ID NO: 55934 - DNA, 25 bp, probe
ggacagcgtctctttaatcatcaag

SEQ ID NO: 55935 - DNA, 25 bp, probe
ttgattactaggaatggaggtggga

SEQ ID NO: 55936 - DNA, 25 bp, probe
agcgtctctttaatcatcaaggact

SEQ ID NO: 55937 - DNA, 25 bp, probe
gtctctttaatcatcaaggactcct

SEQ ID NO: 55938 - DNA, 25 bp, probe
tggacagcgtctctttaatcatcaa

SEQ ID NO: 55939 - DNA, 25 bp, probe
tgattactaggaatggaggtgggag

SEQ ID NO: 55940 - DNA, 25 bp, probe
agagaacttcctgtgtgagatggag

SEQ ID NO: 55941 - DNA, 25 bp, probe
gatccagagaacttcctgtgtgaga

SEQ ID NO: 55942 - DNA, 25 bp, probe
tccagagaacttcctgtgtgagatg

SEQ ID NO: 55943 - DNA, 25 bp, probe
ctggacagcgtctctttaatcatca

SEQ ID NO: 55944 - DNA, 25 bp, probe
gcaggagggatgataaccaaaataa

SEQ ID NO: 55945 - DNA, 25 bp, probe
cagagaacttcctgtgtgagatgga

SEQ ID NO: 55946 - DNA, 25 bp, probe
caggagggatgataaccaaaataaa

SEQ ID NO: 55947 - DNA, 25 bp, probe
gattactaggaatggaggtgggagg

SEQ ID NO: 55948 - DNA, 25 bp, probe
gggcttgattactaggaatggaggt

SEQ ID NO: 55949 - DNA, 25 bp, probe
gagaacttcctgtgtgagatggagg

SEQ ID NO: 55950 - DNA, 25 bp, probe
ccagagaacttcctgtgtgagatgg

SEQ ID NO: 55951 - DNA, 25 bp, probe
tgcaggagggatgataaccaaaata

SEQ ID NO: 55952 - DNA, 25 bp, probe
attactaggaatggaggtgggaggg

SEQ ID NO: 55953 - DNA, 25 bp, probe
gaatgcttcttccccttgtcctcta

SEQ ID NO: 55954 - DNA, 25 bp, probe
tctctttaatcatcaaggactcctt

SEQ ID NO: 55955 - DNA, 25 bp, probe
aatgcttcttccccttgtcctctac

SEQ ID NO: 55956 - DNA, 25 bp, probe
gtgcaggagggatgataaccaaaat

SEQ ID NO: 55957 - DNA, 25 bp, probe
cttcctgtgtgagatggaggagatc

SEQ ID NO: 55958 - DNA, 25 bp, probe
ggggcttgattactaggaatggagg

SEQ ID NO: 55959 - DNA, 25 bp, probe
gctggacagcgtctctttaatcatc

SEQ ID NO: 55960 - DNA, 25 bp, probe
tgagatggaggagatcccattcaac

SEQ ID NO: 55961 - DNA, 25 bp, probe
gtgagatggaggagatcccattcaa

SEQ ID NO: 55962 - DNA, 25 bp, probe
gaacttcctgtgtgagatggaggag

SEQ ID NO: 55963 - DNA, 25 bp, probe
actgtttagtgctgagagtgagctg

SEQ ID NO: 55964 - DNA, 25 bp, probe
acttcctgtgtgagatggaggagat

SEQ ID NO: 55965 - DNA, 25 bp, probe
aacttcctgtgtgagatggaggaga

SEQ ID NO: 55966 - DNA, 25 bp, probe
agaacttcctgtgtgagatggagga

SEQ ID NO: 55967 - DNA, 25 bp, probe
gagatggaggagatcccattcaacc

SEQ ID NO: 55968 - DNA, 25 bp, probe
gtgtgagatggaggagatcccattc

SEQ ID NO: 55969 - DNA, 25 bp, probe
aatgtcaccttcactcacagtctga

SEQ ID NO: 55970 - DNA, 25 bp, probe
caatgtcaccttcactcacagtctg

SEQ ID NO: 55971 - DNA, 25 bp, probe
ccaatgtcaccttcactcacagtct

SEQ ID NO: 55972 - DNA, 25 bp, probe
atgtcaccttcactcacagtctgag

SEQ ID NO: 55973 - DNA, 25 bp, probe
ttgacaagtggacgactaagattaa

SEQ ID NO: 55974 - DNA, 25 bp, probe
ggacgactaagattaatgaatgtgt

SEQ ID NO: 55975 - DNA, 25 bp, probe
tggacgactaagattaatgaatgtg

SEQ ID NO: 55976 - DNA, 25 bp, probe
gtggacgactaagattaatgaatgt

SEQ ID NO: 55977 - DNA, 25 bp, probe
acaagtggacgactaagattaatga

SEQ ID NO: 55978 - DNA, 25 bp, probe
tgacaagtggacgactaagattaat

SEQ ID NO: 55979 - DNA, 25 bp, probe
gacaagtggacgactaagattaatg

SEQ ID NO: 55980 - DNA, 25 bp, probe
taaggacctcattcatcgtctcttc

SEQ ID NO: 55981 - DNA, 25 bp, probe
ctaaggacctcattcatcgtctctt

SEQ ID NO: 55982 - DNA, 25 bp, probe
ctcattcatcgtctcttccatcctg

SEQ ID NO: 55983 - DNA, 25 bp, probe
aactaaggacctcattcatcgtctc

SEQ ID NO: 55984 - DNA, 25 bp, probe
caagtggacgactaagattaatgaa

SEQ ID NO: 55985 - DNA, 25 bp, probe
agtggacgactaagattaatgaatg

SEQ ID NO: 55986 - DNA, 25 bp, probe
atttgggagaacacattgatgaaga

SEQ ID NO: 55987 - DNA, 25 bp, probe
aatttgggagaacacattgatgaag

SEQ ID NO: 55988 - DNA, 25 bp, probe
gaatttgggagaacacattgatgaa

SEQ ID NO: 55989 - DNA, 25 bp, probe
ttgggagaacacattgatgaagaaa

SEQ ID NO: 55990 - DNA, 25 bp, probe
tttgggagaacacattgatgaagaa

SEQ ID NO: 55991 - DNA, 25 bp, probe
tttgacaagtggacgactaagatta

SEQ ID NO: 55992 - DNA, 25 bp, probe
aagtggacgactaagattaatgaat

SEQ ID NO: 55993 - DNA, 25 bp, probe
actaaggacctcattcatcgtctct

SEQ ID NO: 55994 - DNA, 25 bp, probe
ggaatttgggagaacacattgatga

SEQ ID NO: 55995 - DNA, 25 bp, probe
acagaacacagaatatagaaagcat

SEQ ID NO: 55996 - DNA, 25 bp, probe
gacgactaagattaatgaatgtgtt

SEQ ID NO: 55997 - DNA, 25 bp, probe
gacctcattcatcgtctcttccatc

SEQ ID NO: 55998 - DNA, 25 bp, probe
aagtaatgaagaggtggttcaactt

SEQ ID NO: 55999 - DNA, 25 bp, probe
gatctggtgatctatgtctacacaa

SEQ ID NO: 56000 - DNA, 25 bp, probe
tacagaacacagaatatagaaagca

SEQ ID NO: 56001 - DNA, 25 bp, probe
cctcattcatcgtctcttccatcct

SEQ ID NO: 56002 - DNA, 25 bp, probe
gaaactaaggacctcattcatcgtc

SEQ ID NO: 56003 - DNA, 25 bp, probe
gctcaaagtaatgaagaggtggttc

SEQ ID NO: 56004 - DNA, 25 bp, probe
acctcattcatcgtctcttccatcc

SEQ ID NO: 56005 - DNA, 25 bp, probe
aaactaaggacctcattcatcgtct

SEQ ID NO: 56006 - DNA, 25 bp, probe
cagaacacagaatatagaaagcatt

SEQ ID NO: 56007 - DNA, 25 bp, probe
ggaaactaaggacctcattcatcgt

SEQ ID NO: 56008 - DNA, 25 bp, probe
atctggtgatctatgtctacacaaa

SEQ ID NO: 56009 - DNA, 25 bp, probe
ctacagaacacagaatatagaaagc

SEQ ID NO: 56010 - DNA, 25 bp, probe
cggaatttgggagaacacattgatg

SEQ ID NO: 56011 - DNA, 25 bp, probe
ttctccagatgaggaaactaaggac

SEQ ID NO: 56012 - DNA, 25 bp, probe
actttctccagatgaggaaactaag

SEQ ID NO: 56013 - DNA, 25 bp, probe
caactttctccagatgaggaaacta

SEQ ID NO: 56014 - DNA, 25 bp, probe
aactttctccagatgaggaaactaa

SEQ ID NO: 56015 - DNA, 25 bp, probe
aaattggagacccttccctgtattt

SEQ ID NO: 56016 - DNA, 25 bp, probe
ctttctccagatgaggaaactaagg

SEQ ID NO: 56017 - DNA, 25 bp, probe
ttagtggagtcgtagtaatatgtgc

SEQ ID NO: 56018 - DNA, 25 bp, probe
aggaatcagagaacaagaacttcat

SEQ ID NO: 56019 - DNA, 25 bp, probe
aaggaatcagagaacaagaacttca

SEQ ID NO: 56020 - DNA, 25 bp, probe
ggaatcagagaacaagaacttcatt

SEQ ID NO: 56021 - DNA, 25 bp, probe
cattcagtgcatcatacctagtctt

SEQ ID NO: 56022 - DNA, 25 bp, probe
tagtggagtcgtagtaatatgtgca

SEQ ID NO: 56023 - DNA, 25 bp, probe
gataccaaccattcagtgcatcata

SEQ ID NO: 56024 - DNA, 25 bp, probe
agaacttcatttcagatagcaaacg

SEQ ID NO: 56025 - DNA, 25 bp, probe
ataccaaccattcagtgcatcatac

SEQ ID NO: 56026 - DNA, 25 bp, probe
tttctatgctccaaatgaatgtctg

SEQ ID NO: 56027 - DNA, 25 bp, probe
gtctttctatgctccaaatgaatgt

SEQ ID NO: 56028 - DNA, 25 bp, probe
ttctatgctccaaatgaatgtctgt

SEQ ID NO: 56029 - DNA, 25 bp, probe
tctatgctccaaatgaatgtctgtg

SEQ ID NO: 56030 - DNA, 25 bp, probe
ctttctatgctccaaatgaatgtct

SEQ ID NO: 56031 - DNA, 25 bp, probe
tctttctatgctccaaatgaatgtc

SEQ ID NO: 56032 - DNA, 25 bp, probe
agtctttctatgctccaaatgaatg

SEQ ID NO: 56033 - DNA, 25 bp, probe
cagagaacaagaacttcatttcaga

SEQ ID NO: 56034 - DNA, 25 bp, probe
tcagagaacaagaacttcatttcag

SEQ ID NO: 56035 - DNA, 25 bp, probe
aaaggaatcagagaacaagaacttc

SEQ ID NO: 56036 - DNA, 25 bp, probe
cctagtctttctatgctccaaatga

SEQ ID NO: 56037 - DNA, 25 bp, probe
acctagtctttctatgctccaaatg

SEQ ID NO: 56038 - DNA, 25 bp, probe
caaccattcagtgcatcatacctag

SEQ ID NO: 56039 - DNA, 25 bp, probe
acaagaacttcatttcagatagcaa

SEQ ID NO: 56040 - DNA, 25 bp, probe
aacaagaacttcatttcagatagca

SEQ ID NO: 56041 - DNA, 25 bp, probe
gaacttcatttcagatagcaaacgc

SEQ ID NO: 56042 - DNA, 25 bp, probe
tacctagtctttctatgctccaaat

SEQ ID NO: 56043 - DNA, 25 bp, probe
atacctagtctttctatgctccaaa

SEQ ID NO: 56044 - DNA, 25 bp, probe
aaccattcagtgcatcatacctagt

SEQ ID NO: 56045 - DNA, 25 bp, probe
atcagagaacaagaacttcatttca

SEQ ID NO: 56046 - DNA, 25 bp, probe
gaacaagaacttcatttcagatagc

SEQ ID NO: 56047 - DNA, 25 bp, probe
aacttcatttcagatagcaaacgca

SEQ ID NO: 56048 - DNA, 25 bp, probe
ccattcagtgcatcatacctagtct

SEQ ID NO: 56049 - DNA, 25 bp, probe
agagaacaagaacttcatttcagat

SEQ ID NO: 56050 - DNA, 25 bp, probe
tatttcactgtgccataaacaactg

SEQ ID NO: 56051 - DNA, 25 bp, probe
accattcagtgcatcatacctagtc

SEQ ID NO: 56052 - DNA, 25 bp, probe
tttagtggagtcgtagtaatatgtg

SEQ ID NO: 56053 - DNA, 25 bp, probe
ctagtctttctatgctccaaatgaa

SEQ ID NO: 56054 - DNA, 25 bp, probe
atatttcactgtgccataaacaact

SEQ ID NO: 56055 - DNA, 25 bp, probe
acttcatttcagatagcaaacgcag

SEQ ID NO: 56056 - DNA, 25 bp, probe
aagaacttcatttcagatagcaaac

SEQ ID NO: 56057 - DNA, 25 bp, probe
caagaacttcatttcagatagcaaa

SEQ ID NO: 56058 - DNA, 25 bp, probe
tagtctttctatgctccaaatgaat

SEQ ID NO: 56059 - DNA, 25 bp, probe
ggttatgtgtaactagcgttggagt

SEQ ID NO: 56060 - DNA, 25 bp, probe
tggttatgtgtaactagcgttggag

SEQ ID NO: 56061 - DNA, 25 bp, probe
cctatggttctaatcagcgttatcc

SEQ ID NO: 56062 - DNA, 25 bp, probe
gtctgcttacttactggaattatgg

SEQ ID NO: 56063 - DNA, 25 bp, probe
ctatggttctaatcagcgttatccg

SEQ ID NO: 56064 - DNA, 25 bp, probe
agaagcattggagcacttaataaga

SEQ ID NO: 56065 - DNA, 25 bp, probe
gaagcattggagcacttaataagat

SEQ ID NO: 56066 - DNA, 25 bp, probe
ggagtctgcttacttactggaatta

SEQ ID NO: 56067 - DNA, 25 bp, probe
tagaagcattggagcacttaataag

SEQ ID NO: 56068 - DNA, 25 bp, probe
aaggagtctgcttacttactggaat

SEQ ID NO: 56069 - DNA, 25 bp, probe
ctagaagcattggagcacttaataa

SEQ ID NO: 56070 - DNA, 25 bp, probe
aggagtctgcttacttactggaatt

SEQ ID NO: 56071 - DNA, 25 bp, probe
gatgttactagcaacttccttggag

SEQ ID NO: 56072 - DNA, 25 bp, probe
atctcattatggataattgccgcat

SEQ ID NO: 56073 - DNA, 25 bp, probe
gtatctcattatggataattgccgc

SEQ ID NO: 56074 - DNA, 25 bp, probe
agcattggagcacttaataagataa

SEQ ID NO: 56075 - DNA, 25 bp, probe
aagcattggagcacttaataagata

SEQ ID NO: 56076 - DNA, 25 bp, probe
agtctgcttacttactggaattatg

SEQ ID NO: 56077 - DNA, 25 bp, probe
tatctcattatggataattgccgca

SEQ ID NO: 56078 - DNA, 25 bp, probe
gagtctgcttacttactggaattat

SEQ ID NO: 56079 - DNA, 25 bp, probe
agtatctcattatggataattgccg

SEQ ID NO: 56080 - DNA, 25 bp, probe
gaagacttcgagaagaggattgtta

SEQ ID NO: 56081 - DNA, 25 bp, probe
tctcattatggataattgccgcatg

SEQ ID NO: 56082 - DNA, 25 bp, probe
aagacttcgagaagaggattgttac

SEQ ID NO: 56083 - DNA, 25 bp, probe
cctgcaagctattcatcaattaaga

SEQ ID NO: 56084 - DNA, 25 bp, probe
tcctgcaagctattcatcaattaag

SEQ ID NO: 56085 - DNA, 25 bp, probe
gactttaatgactatatgcccagga

SEQ ID NO: 56086 - DNA, 25 bp, probe
agactttaatgactatatgcccagg

SEQ ID NO: 56087 - DNA, 25 bp, probe
tttaatgactatatgcccaggaact

SEQ ID NO: 56088 - DNA, 25 bp, probe
actttaatgactatatgcccaggaa

SEQ ID NO: 56089 - DNA, 25 bp, probe
ccctatggttctaatcagcgttatc

SEQ ID NO: 56090 - DNA, 25 bp, probe
agattgttcctcctgtaatttcact

SEQ ID NO: 56091 - DNA, 25 bp, probe
ttcctgcaagctattcatcaattaa

SEQ ID NO: 56092 - DNA, 25 bp, probe
tctgcttacttactggaattatggg

SEQ ID NO: 56093 - DNA, 25 bp, probe
cttacttactggaattatgggtgct

SEQ ID NO: 56094 - DNA, 25 bp, probe
ctgcttacttactggaattatgggt

SEQ ID NO: 56095 - DNA, 25 bp, probe
ctttaatgactatatgcccaggaac

SEQ ID NO: 56096 - DNA, 25 bp, probe
ttacttactggaattatgggtgctg

SEQ ID NO: 56097 - DNA, 25 bp, probe
tgcttacttactggaattatgggtg

SEQ ID NO: 56098 - DNA, 25 bp, probe
caccaccaacttcatcagagagtag

SEQ ID NO: 56099 - DNA, 25 bp, probe
attcctgcaagctattcatcaatta

SEQ ID NO: 56100 - DNA, 25 bp, probe
gaaatactggtgtgtgctattcatc

SEQ ID NO: 56101 - DNA, 25 bp, probe
aaactagagactttgattggtagca

SEQ ID NO: 56102 - DNA, 25 bp, probe
aactagagactttgattggtagcat

SEQ ID NO: 56103 - DNA, 25 bp, probe
actagagactttgattggtagcatc

SEQ ID NO: 56104 - DNA, 25 bp, probe
tgttcctcctgtaatttcactaact

SEQ ID NO: 56105 - DNA, 25 bp, probe
tataggcacaagacaccacaataat

SEQ ID NO: 56106 - DNA, 25 bp, probe
attataggcacaagacaccacaata

SEQ ID NO: 56107 - DNA, 25 bp, probe
ataggcacaagacaccacaataatt

SEQ ID NO: 56108 - DNA, 25 bp, probe
tacattgttactgctcagaggtatt

SEQ ID NO: 56109 - DNA, 25 bp, probe
ttacattgttactgctcagaggtat

SEQ ID NO: 56110 - DNA, 25 bp, probe
gattataggcacaagacaccacaat

SEQ ID NO: 56111 - DNA, 25 bp, probe
ttataggcacaagacaccacaataa

SEQ ID NO: 56112 - DNA, 25 bp, probe
acattgttactgctcagaggtattc

SEQ ID NO: 56113 - DNA, 25 bp, probe
cattgttactgctcagaggtattcc

SEQ ID NO: 56114 - DNA, 25 bp, probe
taggcacaagacaccacaataatta

SEQ ID NO: 56115 - DNA, 25 bp, probe
attgttactgctcagaggtattcct

SEQ ID NO: 56116 - DNA, 25 bp, probe
ttgttactgctcagaggtattcctt

SEQ ID NO: 56117 - DNA, 25 bp, probe
ggattataggcacaagacaccacaa

SEQ ID NO: 56118 - DNA, 25 bp, probe
cataggttatactttgctgacgatt

SEQ ID NO: 56119 - DNA, 25 bp, probe
tttacattgttactgctcagaggta

SEQ ID NO: 56120 - DNA, 25 bp, probe
taaattgttgcctttcttgaagtgt

SEQ ID NO: 56121 - DNA, 25 bp, probe
ataggttatactttgctgacgattc

SEQ ID NO: 56122 - DNA, 25 bp, probe
aaattgttgcctttcttgaagtgtt

SEQ ID NO: 56123 - DNA, 25 bp, probe
gtagtaatgcaatcatagctcactg

SEQ ID NO: 56124 - DNA, 25 bp, probe
tgtggttagcataggttatactttg

SEQ ID NO: 56125 - DNA, 25 bp, probe
cgtagtaatgcaatcatagctcact

SEQ ID NO: 56126 - DNA, 25 bp, probe
aattgttgcctttcttgaagtgttc

SEQ ID NO: 56127 - DNA, 25 bp, probe
gttatactttgctgacgattcacat

SEQ ID NO: 56128 - DNA, 25 bp, probe
taggttatactttgctgacgattca

SEQ ID NO: 56129 - DNA, 25 bp, probe
ttaaattgttgcctttcttgaagtg

SEQ ID NO: 56130 - DNA, 25 bp, probe
ctggagcgtagtaatgcaatcatag

SEQ ID NO: 56131 - DNA, 25 bp, probe
tatactttgctgacgattcacattt

SEQ ID NO: 56132 - DNA, 25 bp, probe
ttatactttgctgacgattcacatt

SEQ ID NO: 56133 - DNA, 25 bp, probe
attgttgcctttcttgaagtgttct

SEQ ID NO: 56134 - DNA, 25 bp, probe
aggttatactttgctgacgattcac

SEQ ID NO: 56135 - DNA, 25 bp, probe
ggttatactttgctgacgattcaca

SEQ ID NO: 56136 - DNA, 25 bp, probe
tgccttacattaaagtccaatatga

SEQ ID NO: 56137 - DNA, 25 bp, probe
tctcatagttaatttcatctctccg

SEQ ID NO: 56138 - DNA, 25 bp, probe
aggcacaagacaccacaataattat

SEQ ID NO: 56139 - DNA, 25 bp, probe
gttactgctcagaggtattccttta

SEQ ID NO: 56140 - DNA, 25 bp, probe
ttgttgcctttcttgaagtgttctc

SEQ ID NO: 56141 - DNA, 25 bp, probe
gcgtagtaatgcaatcatagctcac

SEQ ID NO: 56142 - DNA, 25 bp, probe
gccttacattaaagtccaatatgag

SEQ ID NO: 56143 - DNA, 25 bp, probe
actgctcagaggtattcctttatta

SEQ ID NO: 56144 - DNA, 25 bp, probe
tactgctcagaggtattcctttatt

SEQ ID NO: 56145 - DNA, 25 bp, probe
ttactgctcagaggtattcctttat

SEQ ID NO: 56146 - DNA, 25 bp, probe
atgtggttagcataggttatacttt

SEQ ID NO: 56147 - DNA, 25 bp, probe
tatgtggttagcataggttatactt

SEQ ID NO: 56148 - DNA, 25 bp, probe
ttatgtggttagcataggttatact

SEQ ID NO: 56149 - DNA, 25 bp, probe
gcaagaatgagacctaccagtatta

SEQ ID NO: 56150 - DNA, 25 bp, probe
ggcaagaatgagacctaccagtatt

SEQ ID NO: 56151 - DNA, 25 bp, probe
aagaatgagacctaccagtattatg

SEQ ID NO: 56152 - DNA, 25 bp, probe
caagaatgagacctaccagtattat

SEQ ID NO: 56153 - DNA, 25 bp, probe
gaatgagacctaccagtattatggc

SEQ ID NO: 56154 - DNA, 25 bp, probe
atgagacctaccagtattatggctt

SEQ ID NO: 56155 - DNA, 25 bp, probe
aatgagacctaccagtattatggct

SEQ ID NO: 56156 - DNA, 25 bp, probe
agaatgagacctaccagtattatgg

SEQ ID NO: 56157 - DNA, 25 bp, probe
agacctaccagtattatggcttctc

SEQ ID NO: 56158 - DNA, 25 bp, probe
gagacctaccagtattatggcttct

SEQ ID NO: 56159 - DNA, 25 bp, probe
taccagtattatggcttctcgcata

SEQ ID NO: 56160 - DNA, 25 bp, probe
tgagacctaccagtattatggcttc

SEQ ID NO: 56161 - DNA, 25 bp, probe
ctaccagtattatggcttctcgcat

SEQ ID NO: 56162 - DNA, 25 bp, probe
gacctaccagtattatggcttctcg

SEQ ID NO: 56163 - DNA, 25 bp, probe
accagtattatggcttctcgcatac

SEQ ID NO: 56164 - DNA, 25 bp, probe
ccagtattatggcttctcgcatacc

SEQ ID NO: 56165 - DNA, 25 bp, probe
cagtattatggcttctcgcataccg

SEQ ID NO: 56166 - DNA, 25 bp, probe
cttctctgcccactcatttctagtc

SEQ ID NO: 56167 - DNA, 25 bp, probe
gtattatggcttctcgcataccgtg

SEQ ID NO: 56168 - DNA, 25 bp, probe
agtattatggcttctcgcataccgt

SEQ ID NO: 56169 - DNA, 25 bp, probe
gggcaagaatgagacctaccagtat

SEQ ID NO: 56170 - DNA, 25 bp, probe
gtggaactgaacaagaactcgaacc

SEQ ID NO: 56171 - DNA, 25 bp, probe
ggtggaactgaacaagaactcgaac

SEQ ID NO: 56172 - DNA, 25 bp, probe
cctaccagtattatggcttctcgca

SEQ ID NO: 56173 - DNA, 25 bp, probe
acctaccagtattatggcttctcgc

SEQ ID NO: 56174 - DNA, 25 bp, probe
tggtggaactgaacaagaactcgaa

SEQ ID NO: 56175 - DNA, 25 bp, probe
ctcatttctagtccagccgcatttc

SEQ ID NO: 56176 - DNA, 25 bp, probe
ttctctgcccactcatttctagtcc

SEQ ID NO: 56177 - DNA, 25 bp, probe
tattatggcttctcgcataccgtgg

SEQ ID NO: 56178 - DNA, 25 bp, probe
catttctagtccagccgcatttcag

SEQ ID NO: 56179 - DNA, 25 bp, probe
gcttctctgcccactcatttctagt

SEQ ID NO: 56180 - DNA, 25 bp, probe
gtggtggaactgaacaagaactcga

SEQ ID NO: 56181 - DNA, 25 bp, probe
tcatttctagtccagccgcatttca

SEQ ID NO: 56182 - DNA, 25 bp, probe
agcttctctgcccactcatttctag

SEQ ID NO: 56183 - DNA, 25 bp, probe
tcttgctcctatggagtcacataag

SEQ ID NO: 56184 - DNA, 25 bp, probe
gtcttgctcctatggagtcacataa

SEQ ID NO: 56185 - DNA, 25 bp, probe
ctctgcccactcatttctagtccag

SEQ ID NO: 56186 - DNA, 25 bp, probe
actcatttctagtccagccgcattt

SEQ ID NO: 56187 - DNA, 25 bp, probe
tctctgcccactcatttctagtcca

SEQ ID NO: 56188 - DNA, 25 bp, probe
gaaccagaacttgggcatcatcaac

SEQ ID NO: 56189 - DNA, 25 bp, probe
tgtcttgctcctatggagtcacata

SEQ ID NO: 56190 - DNA, 25 bp, probe
cagcttctctgcccactcatttcta

SEQ ID NO: 56191 - DNA, 25 bp, probe
cttgctcctatggagtcacataagc

SEQ ID NO: 56192 - DNA, 25 bp, probe
tggaactgaacaagaactcgaaccc

SEQ ID NO: 56193 - DNA, 25 bp, probe
tcaacgagactcaattcctattcat

SEQ ID NO: 56194 - DNA, 25 bp, probe
atcaacgagactcaattcctattca

SEQ ID NO: 56195 - DNA, 25 bp, probe
tcaatcaacgagactcaattcctat

SEQ ID NO: 56196 - DNA, 25 bp, probe
ccaattctctatactctgaccacaa

SEQ ID NO: 56197 - DNA, 25 bp, probe
caatcaacgagactcaattcctatt

SEQ ID NO: 56198 - DNA, 25 bp, probe
tctatactctgaccacaagaccatt

SEQ ID NO: 56199 - DNA, 25 bp, probe
attctctatactctgaccacaagac

SEQ ID NO: 56200 - DNA, 25 bp, probe
aatcaacgagactcaattcctattc

SEQ ID NO: 56201 - DNA, 25 bp, probe
ttctctatactctgaccacaagacc

SEQ ID NO: 56202 - DNA, 25 bp, probe
caattctctatactctgaccacaag

SEQ ID NO: 56203 - DNA, 25 bp, probe
ctctatactctgaccacaagaccat

SEQ ID NO: 56204 - DNA, 25 bp, probe
ctcaatcaacgagactcaattccta

SEQ ID NO: 56205 - DNA, 25 bp, probe
caacgagactcaattcctattcatg

SEQ ID NO: 56206 - DNA, 25 bp, probe
aattctctatactctgaccacaaga

SEQ ID NO: 56207 - DNA, 25 bp, probe
tctctatactctgaccacaagacca

SEQ ID NO: 56208 - DNA, 25 bp, probe
aacccaattctctatactctgacca

SEQ ID NO: 56209 - DNA, 25 bp, probe
tttatagtgttcatcaaagtgccat

SEQ ID NO: 56210 - DNA, 25 bp, probe
ctatactctgaccacaagaccattt

SEQ ID NO: 56211 - DNA, 25 bp, probe
gaacccaattctctatactctgacc

SEQ ID NO: 56212 - DNA, 25 bp, probe
atagtgttcatcaaagtgccataac

SEQ ID NO: 56213 - DNA, 25 bp, probe
atactctgaccacaagaccatttaa

SEQ ID NO: 56214 - DNA, 25 bp, probe
tgaacccaattctctatactctgac

SEQ ID NO: 56215 - DNA, 25 bp, probe
tgctttgaacccaattctctatact

SEQ ID NO: 56216 - DNA, 25 bp, probe
gtgctttgaacccaattctctatac

SEQ ID NO: 56217 - DNA, 25 bp, probe
agtgctttgaacccaattctctata

SEQ ID NO: 56218 - DNA, 25 bp, probe
ggagatgccacctgagttaatgaag

SEQ ID NO: 56219 - DNA, 25 bp, probe
gctttgaacccaattctctatactc

SEQ ID NO: 56220 - DNA, 25 bp, probe
attaacagtgctttgaacccaattc

SEQ ID NO: 56221 - DNA, 25 bp, probe
cccaattctctatactctgaccaca

SEQ ID NO: 56222 - DNA, 25 bp, probe
acccaattctctatactctgaccac

SEQ ID NO: 56223 - DNA, 25 bp, probe
tatactctgaccacaagaccattta

SEQ ID NO: 56224 - DNA, 25 bp, probe
cattaacagtgctttgaacccaatt

SEQ ID NO: 56225 - DNA, 25 bp, probe
tatagtgttcatcaaagtgccataa

SEQ ID NO: 56226 - DNA, 25 bp, probe
ttatagtgttcatcaaagtgccata

SEQ ID NO: 56227 - DNA, 25 bp, probe
agtatgcttccctcttcattcagaa

SEQ ID NO: 56228 - DNA, 25 bp, probe
ttgaacccaattctctatactctga

SEQ ID NO: 56229 - DNA, 25 bp, probe
cagtgctttgaacccaattctctat

SEQ ID NO: 56230 - DNA, 25 bp, probe
ttaacagtgctttgaacccaattct

SEQ ID NO: 56231 - DNA, 25 bp, probe
cataacagcaactgaaatacggaat

SEQ ID NO: 56232 - DNA, 25 bp, probe
ataacagcaactgaaatacggaatc

SEQ ID NO: 56233 - DNA, 25 bp, probe
aatttctttcactgcttcaggtaga

SEQ ID NO: 56234 - DNA, 25 bp, probe
taacagcaactgaaatacggaatca

SEQ ID NO: 56235 - DNA, 25 bp, probe
tttgaacccaattctctatactctg

SEQ ID NO: 56236 - DNA, 25 bp, probe
taacagtgctttgaacccaattctc

SEQ ID NO: 56237 - DNA, 25 bp, probe
aacaatgtaagagcctaactccatc

SEQ ID NO: 56238 - DNA, 25 bp, probe
acaatgtaagagcctaactccatcc

SEQ ID NO: 56239 - DNA, 25 bp, probe
agatgagagatgctaaatgtggaaa

SEQ ID NO: 56240 - DNA, 25 bp, probe
gagatgagagatgctaaatgtggaa

SEQ ID NO: 56241 - DNA, 25 bp, probe
tgaaacaaactggagaagaaggtag

SEQ ID NO: 56242 - DNA, 25 bp, probe
caacttaatgctctgatatggcttt

SEQ ID NO: 56243 - DNA, 25 bp, probe
aaatgcgagatgagagatgctaaat

SEQ ID NO: 56244 - DNA, 25 bp, probe
aaactggagaagaaggtaggagaaa

SEQ ID NO: 56245 - DNA, 25 bp, probe
tcaccaacccttcatttaacaagta

SEQ ID NO: 56246 - DNA, 25 bp, probe
caccaacccttcatttaacaagtaa

SEQ ID NO: 56247 - DNA, 25 bp, probe
atgacaacagacacaacacagttct

SEQ ID NO: 56248 - DNA, 25 bp, probe
accaacccttcatttaacaagtaag

SEQ ID NO: 56249 - DNA, 25 bp, probe
gaaacaaactggagaagaaggtagg

SEQ ID NO: 56250 - DNA, 25 bp, probe
ccaacccttcatttaacaagtaaga

SEQ ID NO: 56251 - DNA, 25 bp, probe
aatgcgagatgagagatgctaaatg

SEQ ID NO: 56252 - DNA, 25 bp, probe
ttgaaacaaactggagaagaaggta

SEQ ID NO: 56253 - DNA, 25 bp, probe
aactggagaagaaggtaggagaaag

SEQ ID NO: 56254 - DNA, 25 bp, probe
cattgaaacaaactggagaagaagg

SEQ ID NO: 56255 - DNA, 25 bp, probe
aaacaaactggagaagaaggtagga

SEQ ID NO: 56256 - DNA, 25 bp, probe
attgaaacaaactggagaagaaggt

SEQ ID NO: 56257 - DNA, 25 bp, probe
caaatgcgagatgagagatgctaaa

SEQ ID NO: 56258 - DNA, 25 bp, probe
gagtcaccaacccttcatttaacaa

SEQ ID NO: 56259 - DNA, 25 bp, probe
caaactggagaagaaggtaggagaa

SEQ ID NO: 56260 - DNA, 25 bp, probe
aaacaatgtaagagcctaactccat

SEQ ID NO: 56261 - DNA, 25 bp, probe
gcattgaaacaaactggagaagaag

SEQ ID NO: 56262 - DNA, 25 bp, probe
agtcaccaacccttcatttaacaag

SEQ ID NO: 56263 - DNA, 25 bp, probe
aatctgcctgaatcgtcaatgtcaa

SEQ ID NO: 56264 - DNA, 25 bp, probe
aaactgaatggcattgaaacaaact

SEQ ID NO: 56265 - DNA, 25 bp, probe
caaactgaatggcattgaaacaaac

SEQ ID NO: 56266 - DNA, 25 bp, probe
gtcaccaacccttcatttaacaagt

SEQ ID NO: 56267 - DNA, 25 bp, probe
cagagtcaccaacccttcatttaac

SEQ ID NO: 56268 - DNA, 25 bp, probe
aacaaactggagaagaaggtaggag

SEQ ID NO: 56269 - DNA, 25 bp, probe
catgacaacagacacaacacagttc

SEQ ID NO: 56270 - DNA, 25 bp, probe
tgacaacagacacaacacagttctc

SEQ ID NO: 56271 - DNA, 25 bp, probe
agagtcaccaacccttcatttaaca

SEQ ID NO: 56272 - DNA, 25 bp, probe
acagagtcaccaacccttcatttaa

SEQ ID NO: 56273 - DNA, 25 bp, probe
aactgaatggcattgaaacaaactg

SEQ ID NO: 56274 - DNA, 25 bp, probe
tttaatttatcagagaccctgccac

SEQ ID NO: 56275 - DNA, 25 bp, probe
cgagatgagagatgctaaatgtgga

SEQ ID NO: 56276 - DNA, 25 bp, probe
atgcgagatgagagatgctaaatgt

SEQ ID NO: 56277 - DNA, 25 bp, probe
ggcattgaaacaaactggagaagaa

SEQ ID NO: 56278 - DNA, 25 bp, probe
acaaactggagaagaaggtaggaga

SEQ ID NO: 56279 - DNA, 25 bp, probe
caacccttcatttaacaagtaagaa

SEQ ID NO: 56280 - DNA, 25 bp, probe
aatggcattgaaacaaactggagaa

SEQ ID NO: 56281 - DNA, 25 bp, probe
cctgtggcttctttcaactttagta

SEQ ID NO: 56282 - DNA, 25 bp, probe
ttcctgtggcttctttcaactttag

SEQ ID NO: 56283 - DNA, 25 bp, probe
cttcctgtggcttctttcaacttta

SEQ ID NO: 56284 - DNA, 25 bp, probe
ctgtggcttctttcaactttagtac

SEQ ID NO: 56285 - DNA, 25 bp, probe
ttgagcagtaaagaaggcactattt

SEQ ID NO: 56286 - DNA, 25 bp, probe
cttgagcagtaaagaaggcactatt

SEQ ID NO: 56287 - DNA, 25 bp, probe
ctatttgctcaggaaatggagtttg

SEQ ID NO: 56288 - DNA, 25 bp, probe
actatttgctcaggaaatggagttt

SEQ ID NO: 56289 - DNA, 25 bp, probe
tgagcagtaaagaaggcactatttg

SEQ ID NO: 56290 - DNA, 25 bp, probe
cactatttgctcaggaaatggagtt

SEQ ID NO: 56291 - DNA, 25 bp, probe
tcctgtggcttctttcaactttagt

SEQ ID NO: 56292 - DNA, 25 bp, probe
aaactatcgagaacagaggtcaaat

SEQ ID NO: 56293 - DNA, 25 bp, probe
aactatcgagaacagaggtcaaatg

SEQ ID NO: 56294 - DNA, 25 bp, probe
tcttcctgtggcttctttcaacttt

SEQ ID NO: 56295 - DNA, 25 bp, probe
tatttgctcaggaaatggagtttgc

SEQ ID NO: 56296 - DNA, 25 bp, probe
tcaggaaatggagtttgcagtaatg

SEQ ID NO: 56297 - DNA, 25 bp, probe
actatcgagaacagaggtcaaatgg

SEQ ID NO: 56298 - DNA, 25 bp, probe
gtcttcctgtggcttctttcaactt

SEQ ID NO: 56299 - DNA, 25 bp, probe
ctcaggaaatggagtttgcagtaat

SEQ ID NO: 56300 - DNA, 25 bp, probe
tgtggcttctttcaactttagtact

SEQ ID NO: 56301 - DNA, 25 bp, probe
gtggcttctttcaactttagtactt

SEQ ID NO: 56302 - DNA, 25 bp, probe
gcttgagcagtaaagaaggcactat

SEQ ID NO: 56303 - DNA, 25 bp, probe
ctatcgagaacagaggtcaaatggg

SEQ ID NO: 56304 - DNA, 25 bp, probe
agtaaagaaggcactatttgctcag

SEQ ID NO: 56305 - DNA, 25 bp, probe
cagtaaagaaggcactatttgctca

SEQ ID NO: 56306 - DNA, 25 bp, probe
gcttctttcaactttagtacttgct

SEQ ID NO: 56307 - DNA, 25 bp, probe
tggcttctttcaactttagtacttg

SEQ ID NO: 56308 - DNA, 25 bp, probe
ggcttctttcaactttagtacttgc

SEQ ID NO: 56309 - DNA, 25 bp, probe
taaagaaggcactatttgctcagga

SEQ ID NO: 56310 - DNA, 25 bp, probe
gtaaagaaggcactatttgctcagg

SEQ ID NO: 56311 - DNA, 25 bp, probe
aaaactatcgagaacagaggtcaaa

SEQ ID NO: 56312 - DNA, 25 bp, probe
tgtcttcctgtggcttctttcaact

SEQ ID NO: 56313 - DNA, 25 bp, probe
gtgtcttcctgtggcttctttcaac

SEQ ID NO: 56314 - DNA, 25 bp, probe
ttctttcaactttagtacttgcttg

SEQ ID NO: 56315 - DNA, 25 bp, probe
gaaggcactatttgctcaggaaatg

SEQ ID NO: 56316 - DNA, 25 bp, probe
agaaggcactatttgctcaggaaat

SEQ ID NO: 56317 - DNA, 25 bp, probe
gcagtaaagaaggcactatttgctc

SEQ ID NO: 56318 - DNA, 25 bp, probe
gagcagtaaagaaggcactatttgc

SEQ ID NO: 56319 - DNA, 25 bp, probe
aagaaggcactatttgctcaggaaa

SEQ ID NO: 56320 - DNA, 25 bp, probe
aaagaaggcactatttgctcaggaa

SEQ ID NO: 56321 - DNA, 25 bp, probe
cttctttcaactttagtacttgctt

SEQ ID NO: 56322 - DNA, 25 bp, probe
gtacttgcttgagcagtaaagaagg

SEQ ID NO: 56323 - DNA, 25 bp, probe
gtgcttagaacacaggtgtcttcct

SEQ ID NO: 56324 - DNA, 25 bp, probe
gctcaggaaatggagtttgcagtaa

SEQ ID NO: 56325 - DNA, 25 bp, probe
tcaacttttacttcagacaatacga

SEQ ID NO: 56326 - DNA, 25 bp, probe
tttacttcagacaatacgaagaccc

SEQ ID NO: 56327 - DNA, 25 bp, probe
ttacttcagacaatacgaagaccct

SEQ ID NO: 56328 - DNA, 25 bp, probe
ttcaacttttacttcagacaatacg

SEQ ID NO: 56329 - DNA, 25 bp, probe
caacttttacttcagacaatacgaa

SEQ ID NO: 56330 - DNA, 25 bp, probe
tacttcagacaatacgaagaccctc

SEQ ID NO: 56331 - DNA, 25 bp, probe
catcgaaaactgtttacttcaactt

SEQ ID NO: 56332 - DNA, 25 bp, probe
acatcgaaaactgtttacttcaact

SEQ ID NO: 56333 - DNA, 25 bp, probe
ttacttcaacttttacttcagacaa

SEQ ID NO: 56334 - DNA, 25 bp, probe
tttacttcaacttttacttcagaca

SEQ ID NO: 56335 - DNA, 25 bp, probe
actgtttacttcaacttttacttca

SEQ ID NO: 56336 - DNA, 25 bp, probe
tgtgatacatcgaaaactgtttact

SEQ ID NO: 56337 - DNA, 25 bp, probe
acttcagacaatacgaagaccctct

SEQ ID NO: 56338 - DNA, 25 bp, probe
tgtttacttcaacttttacttcaga

SEQ ID NO: 56339 - DNA, 25 bp, probe
acttcaacttttacttcagacaata

SEQ ID NO: 56340 - DNA, 25 bp, probe
tacttcaacttttacttcagacaat

SEQ ID NO: 56341 - DNA, 25 bp, probe
atcgaaaactgtttacttcaacttt

SEQ ID NO: 56342 - DNA, 25 bp, probe
gtttacttcaacttttacttcagac

SEQ ID NO: 56343 - DNA, 25 bp, probe
cttcaacttttacttcagacaatac

SEQ ID NO: 56344 - DNA, 25 bp, probe
tacatcgaaaactgtttacttcaac

SEQ ID NO: 56345 - DNA, 25 bp, probe
gtgatacatcgaaaactgtttactt

SEQ ID NO: 56346 - DNA, 25 bp, probe
tcgaaaactgtttacttcaactttt

SEQ ID NO: 56347 - DNA, 25 bp, probe
gatacatcgaaaactgtttacttca

SEQ ID NO: 56348 - DNA, 25 bp, probe
tgatacatcgaaaactgtttacttc

SEQ ID NO: 56349 - DNA, 25 bp, probe
ttttacttcagacaatacgaagacc

SEQ ID NO: 56350 - DNA, 25 bp, probe
aactgtttacttcaacttttacttc

SEQ ID NO: 56351 - DNA, 25 bp, probe
ctgtttacttcaacttttacttcag

SEQ ID NO: 56352 - DNA, 25 bp, probe
cgaaaactgtttacttcaactttta

SEQ ID NO: 56353 - DNA, 25 bp, probe
atacatcgaaaactgtttacttcaa

SEQ ID NO: 56354 - DNA, 25 bp, probe
acttttacttcagacaatacgaaga

SEQ ID NO: 56355 - DNA, 25 bp, probe
cttttacttcagacaatacgaagac

SEQ ID NO: 56356 - DNA, 25 bp, probe
aacttttacttcagacaatacgaag

SEQ ID NO: 56357 - DNA, 25 bp, probe
atgtgatacatcgaaaactgtttac

SEQ ID NO: 56358 - DNA, 25 bp, probe
aaactgtttacttcaacttttactt

SEQ ID NO: 56359 - DNA, 25 bp, probe
aaaactgtttacttcaacttttact

SEQ ID NO: 56360 - DNA, 25 bp, probe
gaaaactgtttacttcaacttttac

SEQ ID NO: 56361 - DNA, 25 bp, probe
ttcctgtctcaaatccaatagttca

SEQ ID NO: 56362 - DNA, 25 bp, probe
tgttcctgtctcaaatccaatagtt

SEQ ID NO: 56363 - DNA, 25 bp, probe
ttctgttcctgtctcaaatccaata

SEQ ID NO: 56364 - DNA, 25 bp, probe
tctgttcctgtctcaaatccaatag

SEQ ID NO: 56365 - DNA, 25 bp, probe
gttcctgtctcaaatccaatagttc

SEQ ID NO: 56366 - DNA, 25 bp, probe
tcctgtctcaaatccaatagttcac

SEQ ID NO: 56367 - DNA, 25 bp, probe
ctgttcctgtctcaaatccaatagt

SEQ ID NO: 56368 - DNA, 25 bp, probe
gttctgttcctgtctcaaatccaat

SEQ ID NO: 56369 - DNA, 25 bp, probe
ctctgatttgttctgttcctgtctc

SEQ ID NO: 56370 - DNA, 25 bp, probe
ctgatttgttctgttcctgtctcaa

SEQ ID NO: 56371 - DNA, 25 bp, probe
cctgtctcaaatccaatagttcaca

SEQ ID NO: 56372 - DNA, 25 bp, probe
tgtctcaaatccaatagttcacagc

SEQ ID NO: 56373 - DNA, 25 bp, probe
tgttctgttcctgtctcaaatccaa

SEQ ID NO: 56374 - DNA, 25 bp, probe
tctgatttgttctgttcctgtctca

SEQ ID NO: 56375 - DNA, 25 bp, probe
cctctgatttgttctgttcctgtct

SEQ ID NO: 56376 - DNA, 25 bp, probe
cttcttgtaaatacctgcctccctc

SEQ ID NO: 56377 - DNA, 25 bp, probe
gtctcaaatccaatagttcacagct

SEQ ID NO: 56378 - DNA, 25 bp, probe
ttgttctgttcctgtctcaaatcca

SEQ ID NO: 56379 - DNA, 25 bp, probe
ccctgagccttcttgtaaatacctg

SEQ ID NO: 56380 - DNA, 25 bp, probe
gaatcgaactctgcacttctctctc

SEQ ID NO: 56381 - DNA, 25 bp, probe
ccctctgatttgttctgttcctgtc

SEQ ID NO: 56382 - DNA, 25 bp, probe
ctgagccttcttgtaaatacctgcc

SEQ ID NO: 56383 - DNA, 25 bp, probe
cctgagccttcttgtaaatacctgc

SEQ ID NO: 56384 - DNA, 25 bp, probe
ccctatttaaaccactctgtctccc

SEQ ID NO: 56385 - DNA, 25 bp, probe
gaactctgcacttctctctccttta

SEQ ID NO: 56386 - DNA, 25 bp, probe
gaaaaggaaaagcaaaccagaatct

SEQ ID NO: 56387 - DNA, 25 bp, probe
aactctgcacttctctctcctttac

SEQ ID NO: 56388 - DNA, 25 bp, probe
tgatttgttctgttcctgtctcaaa

SEQ ID NO: 56389 - DNA, 25 bp, probe
aaaaggaaaagcaaaccagaatctt

SEQ ID NO: 56390 - DNA, 25 bp, probe
gagccttcttgtaaatacctgcctc

SEQ ID NO: 56391 - DNA, 25 bp, probe
aaaggaaaagcaaaccagaatctta

SEQ ID NO: 56392 - DNA, 25 bp, probe
aggaaaagcaaaccagaatcttatt

SEQ ID NO: 56393 - DNA, 25 bp, probe
aaggaaaagcaaaccagaatcttat

SEQ ID NO: 56394 - DNA, 25 bp, probe
tttgttctgttcctgtctcaaatcc

SEQ ID NO: 56395 - DNA, 25 bp, probe
cgaaaaggaaaagcaaaccagaatc

SEQ ID NO: 56396 - DNA, 25 bp, probe
ttcttgtaaatacctgcctccctcc

SEQ ID NO: 56397 - DNA, 25 bp, probe
ccttcttgtaaatacctgcctccct

SEQ ID NO: 56398 - DNA, 25 bp, probe
tgagccttcttgtaaatacctgcct

SEQ ID NO: 56399 - DNA, 25 bp, probe
ttacgagacgaaaaggaaaagcaaa

SEQ ID NO: 56400 - DNA, 25 bp, probe
tttacgagacgaaaaggaaaagcaa

SEQ ID NO: 56401 - DNA, 25 bp, probe
ggaaaagcaaaccagaatcttattt

SEQ ID NO: 56402 - DNA, 25 bp, probe
acgaaaaggaaaagcaaaccagaat

SEQ ID NO: 56403 - DNA, 25 bp, probe
tacgagacgaaaaggaaaagcaaac

SEQ ID NO: 56404 - DNA, 25 bp, probe
aatcgaactctgcacttctctctcc

SEQ ID NO: 56405 - DNA, 25 bp, probe
accattctgtcctatccttcttaga

SEQ ID NO: 56406 - DNA, 25 bp, probe
cacagcgataatcttcttagagttg

SEQ ID NO: 56407 - DNA, 25 bp, probe
ccacagcgataatcttcttagagtt

SEQ ID NO: 56408 - DNA, 25 bp, probe
ttgtcctgatgatagattccaagtc

SEQ ID NO: 56409 - DNA, 25 bp, probe
caatgtgttctccttattctgttgg

SEQ ID NO: 56410 - DNA, 25 bp, probe
gaccacagcgataatcttcttagag

SEQ ID NO: 56411 - DNA, 25 bp, probe
attgtcctgatgatagattccaagt

SEQ ID NO: 56412 - DNA, 25 bp, probe
ggtaattgtcctgatgatagattcc

SEQ ID NO: 56413 - DNA, 25 bp, probe
gtcctgatgatagattccaagtcaa

SEQ ID NO: 56414 - DNA, 25 bp, probe
acagcgataatcttcttagagttgc

SEQ ID NO: 56415 - DNA, 25 bp, probe
aatgtgttctccttattctgttggc

SEQ ID NO: 56416 - DNA, 25 bp, probe
cctgatgatagattccaagtcaatg

SEQ ID NO: 56417 - DNA, 25 bp, probe
tcctgatgatagattccaagtcaat

SEQ ID NO: 56418 - DNA, 25 bp, probe
accacagcgataatcttcttagagt

SEQ ID NO: 56419 - DNA, 25 bp, probe
tctggtaattgtcctgatgatagat

SEQ ID NO: 56420 - DNA, 25 bp, probe
atctggtaattgtcctgatgataga

SEQ ID NO: 56421 - DNA, 25 bp, probe
tgtcctgatgatagattccaagtca

SEQ ID NO: 56422 - DNA, 25 bp, probe
ccttctacaatatgtgtgatggaca

SEQ ID NO: 56423 - DNA, 25 bp, probe
tgtccttctacaatatgtgtgatgg

SEQ ID NO: 56424 - DNA, 25 bp, probe
aagtgtccttctacaatatgtgtga

SEQ ID NO: 56425 - DNA, 25 bp, probe
caagtgtccttctacaatatgtgtg

SEQ ID NO: 56426 - DNA, 25 bp, probe
gtgtccttctacaatatgtgtgatg

SEQ ID NO: 56427 - DNA, 25 bp, probe
agtgtccttctacaatatgtgtgat

SEQ ID NO: 56428 - DNA, 25 bp, probe
aggaccacagcgataatcttcttag

SEQ ID NO: 56429 - DNA, 25 bp, probe
acaatgtgttctccttattctgttg

SEQ ID NO: 56430 - DNA, 25 bp, probe
gtaattgtcctgatgatagattcca

SEQ ID NO: 56431 - DNA, 25 bp, probe
tggtaattgtcctgatgatagattc

SEQ ID NO: 56432 - DNA, 25 bp, probe
aattgtcctgatgatagattccaag

SEQ ID NO: 56433 - DNA, 25 bp, probe
gaccattctgtcctatccttcttag

SEQ ID NO: 56434 - DNA, 25 bp, probe
agaccattctgtcctatccttctta

SEQ ID NO: 56435 - DNA, 25 bp, probe
ctggtaattgtcctgatgatagatt

SEQ ID NO: 56436 - DNA, 25 bp, probe
caggaccacagcgataatcttctta

SEQ ID NO: 56437 - DNA, 25 bp, probe
aatctggtaattgtcctgatgatag

SEQ ID NO: 56438 - DNA, 25 bp, probe
cttctacaatatgtgtgatggacaa

SEQ ID NO: 56439 - DNA, 25 bp, probe
gcaagtgtccttctacaatatgtgt

SEQ ID NO: 56440 - DNA, 25 bp, probe
gatggctaattatgtcaacatgctt

SEQ ID NO: 56441 - DNA, 25 bp, probe
ggaccacagcgataatcttcttaga

SEQ ID NO: 56442 - DNA, 25 bp, probe
gagatggctaattatgtcaacatgc

SEQ ID NO: 56443 - DNA, 25 bp, probe
aggtacaatgagaatcaagatgaga

SEQ ID NO: 56444 - DNA, 25 bp, probe
agatggctaattatgtcaacatgct

SEQ ID NO: 56445 - DNA, 25 bp, probe
ctacaatgtgttctccttattctgt

SEQ ID NO: 56446 - DNA, 25 bp, probe
tgtctacaatgtgttctccttattc

SEQ ID NO: 56447 - DNA, 25 bp, probe
tccttctacaatatgtgtgatggac

SEQ ID NO: 56448 - DNA, 25 bp, probe
gtccttctacaatatgtgtgatgga

SEQ ID NO: 56449 - DNA, 25 bp, probe
gacaggaagaatctaaagcaaacat

SEQ ID NO: 56450 - DNA, 25 bp, probe
acaggaagaatctaaagcaaacatt

SEQ ID NO: 56451 - DNA, 25 bp, probe
gtccatcataatgtttcgccttatt

SEQ ID NO: 56452 - DNA, 25 bp, probe
tgtccatcataatgtttcgccttat

SEQ ID NO: 56453 - DNA, 25 bp, probe
ggacaggaagaatctaaagcaaaca

SEQ ID NO: 56454 - DNA, 25 bp, probe
tggacaggaagaatctaaagcaaac

SEQ ID NO: 56455 - DNA, 25 bp, probe
gtatgataaatgatggcacctcctg

SEQ ID NO: 56456 - DNA, 25 bp, probe
aaacattgaaagtaaacgacccaaa

SEQ ID NO: 56457 - DNA, 25 bp, probe
aaagcaaacattgaaagtaaacgac

SEQ ID NO: 56458 - DNA, 25 bp, probe
aacattgaaagtaaacgacccaaag

SEQ ID NO: 56459 - DNA, 25 bp, probe
tccatcataatgtttcgccttattt

SEQ ID NO: 56460 - DNA, 25 bp, probe
caaacattgaaagtaaacgacccaa

SEQ ID NO: 56461 - DNA, 25 bp, probe
tatgataaatgatggcacctcctgt

SEQ ID NO: 56462 - DNA, 25 bp, probe
aagcaaacattgaaagtaaacgacc

SEQ ID NO: 56463 - DNA, 25 bp, probe
gtgtccatcataatgtttcgcctta

SEQ ID NO: 56464 - DNA, 25 bp, probe
aggaagaatctaaagcaaacattga

SEQ ID NO: 56465 - DNA, 25 bp, probe
caggaagaatctaaagcaaacattg

SEQ ID NO: 56466 - DNA, 25 bp, probe
aaagcaaagagtgtcaagaaacaaa

SEQ ID NO: 56467 - DNA, 25 bp, probe
caaagcaaagagtgtcaagaaacaa

SEQ ID NO: 56468 - DNA, 25 bp, probe
ggaagaatctaaagcaaacattgaa

SEQ ID NO: 56469 - DNA, 25 bp, probe
aaagtaaacgacccaaagcaaagag

SEQ ID NO: 56470 - DNA, 25 bp, probe
gaaagtaaacgacccaaagcaaaga

SEQ ID NO: 56471 - DNA, 25 bp, probe
attgaaagtaaacgacccaaagcaa

SEQ ID NO: 56472 - DNA, 25 bp, probe
taaagcaaacattgaaagtaaacga

SEQ ID NO: 56473 - DNA, 25 bp, probe
ttgaaagtaaacgacccaaagcaaa

SEQ ID NO: 56474 - DNA, 25 bp, probe
ctaaagcaaacattgaaagtaaacg

SEQ ID NO: 56475 - DNA, 25 bp, probe
tgaaagtaaacgacccaaagcaaag

SEQ ID NO: 56476 - DNA, 25 bp, probe
gggttgtgtccatcataatgtttcg

SEQ ID NO: 56477 - DNA, 25 bp, probe
agtttgactgtttgcctgagaaatg

SEQ ID NO: 56478 - DNA, 25 bp, probe
aatttgggttgtgtccatcataatg

SEQ ID NO: 56479 - DNA, 25 bp, probe
caatttgggttgtgtccatcataat

SEQ ID NO: 56480 - DNA, 25 bp, probe
agaatctaaagcaaacattgaaagt

SEQ ID NO: 56481 - DNA, 25 bp, probe
atttgggttgtgtccatcataatgt

SEQ ID NO: 56482 - DNA, 25 bp, probe
tcaatttgggttgtgtccatcataa

SEQ ID NO: 56483 - DNA, 25 bp, probe
cattgaaagtaaacgacccaaagca

SEQ ID NO: 56484 - DNA, 25 bp, probe
acattgaaagtaaacgacccaaagc

SEQ ID NO: 56485 - DNA, 25 bp, probe
agcaaacattgaaagtaaacgaccc

SEQ ID NO: 56486 - DNA, 25 bp, probe
ttgggttgtgtccatcataatgttt

SEQ ID NO: 56487 - DNA, 25 bp, probe
tttgggttgtgtccatcataatgtt

SEQ ID NO: 56488 - DNA, 25 bp, probe
cccaaagcaaagagtgtcaagaaac

SEQ ID NO: 56489 - DNA, 25 bp, probe
ccaaagcaaagagtgtcaagaaaca

SEQ ID NO: 56490 - DNA, 25 bp, probe
aagtaaacgacccaaagcaaagagt

SEQ ID NO: 56491 - DNA, 25 bp, probe
gcaaacattgaaagtaaacgaccca

SEQ ID NO: 56492 - DNA, 25 bp, probe
tgggttgtgtccatcataatgtttc

SEQ ID NO: 56493 - DNA, 25 bp, probe
atattgataacaggcactgactagg

SEQ ID NO: 56494 - DNA, 25 bp, probe
tatattgataacaggcactgactag

SEQ ID NO: 56495 - DNA, 25 bp, probe
ttatattgataacaggcactgacta

SEQ ID NO: 56496 - DNA, 25 bp, probe
tattgataacaggcactgactaggg

SEQ ID NO: 56497 - DNA, 25 bp, probe
tttatattgataacaggcactgact

SEQ ID NO: 56498 - DNA, 25 bp, probe
gataacaggcactgactagggaaat

SEQ ID NO: 56499 - DNA, 25 bp, probe
ataacaggcactgactagggaaatg

SEQ ID NO: 56500 - DNA, 25 bp, probe
attgataacaggcactgactaggga

SEQ ID NO: 56501 - DNA, 25 bp, probe
taacaggcactgactagggaaatga

SEQ ID NO: 56502 - DNA, 25 bp, probe
tgataacaggcactgactagggaaa

SEQ ID NO: 56503 - DNA, 25 bp, probe
ttgataacaggcactgactagggaa

SEQ ID NO: 56504 - DNA, 25 bp, probe
aacaggcactgactagggaaatgat

SEQ ID NO: 56505 - DNA, 25 bp, probe
acaggcactgactagggaaatgatc

SEQ ID NO: 56506 - DNA, 25 bp, probe
ttttatattgataacaggcactgac

SEQ ID NO: 56507 - DNA, 25 bp, probe
cttttatattgataacaggcactga

SEQ ID NO: 56508 - DNA, 25 bp, probe
tcttttatattgataacaggcactg

SEQ ID NO: 56509 - DNA, 25 bp, probe
atcttttatattgataacaggcact

SEQ ID NO: 56510 - DNA, 25 bp, probe
aatcttttatattgataacaggcac

SEQ ID NO: 56511 - DNA, 25 bp, probe
caggcactgactagggaaatgatca

SEQ ID NO: 56512 - DNA, 25 bp, probe
aggcactgactagggaaatgatcag

SEQ ID NO: 56513 - DNA, 25 bp, probe
cgtctattggctttactatgtgaac

SEQ ID NO: 56514 - DNA, 25 bp, probe
tcgtctattggctttactatgtgaa

SEQ ID NO: 56515 - DNA, 25 bp, probe
atcgtctattggctttactatgtga

SEQ ID NO: 56516 - DNA, 25 bp, probe
ggactaccaattacgatttctctct

SEQ ID NO: 56517 - DNA, 25 bp, probe
actaccaattacgatttctctctgt

SEQ ID NO: 56518 - DNA, 25 bp, probe
catcgtctattggctttactatgtg

SEQ ID NO: 56519 - DNA, 25 bp, probe
gactaccaattacgatttctctctg

SEQ ID NO: 56520 - DNA, 25 bp, probe
tcaacatcgtctattggctttacta

SEQ ID NO: 56521 - DNA, 25 bp, probe
cttcaacatcgtctattggctttac

SEQ ID NO: 56522 - DNA, 25 bp, probe
aacatcgtctattggctttactatg

SEQ ID NO: 56523 - DNA, 25 bp, probe
cggactaccaattacgatttctctc

SEQ ID NO: 56524 - DNA, 25 bp, probe
gtctattggctttactatgtgaact

SEQ ID NO: 56525 - DNA, 25 bp, probe
ttcaacatcgtctattggctttact

SEQ ID NO: 56526 - DNA, 25 bp, probe
gacggactaccaattacgatttctc

SEQ ID NO: 56527 - DNA, 25 bp, probe
caacatcgtctattggctttactat

SEQ ID NO: 56528 - DNA, 25 bp, probe
acggactaccaattacgatttctct

SEQ ID NO: 56529 - DNA, 25 bp, probe
ctaccaattacgatttctctctgta

SEQ ID NO: 56530 - DNA, 25 bp, probe
ttggctttactatgtgaactaaaca

SEQ ID NO: 56531 - DNA, 25 bp, probe
attggctttactatgtgaactaaac

SEQ ID NO: 56532 - DNA, 25 bp, probe
tctattggctttactatgtgaacta

SEQ ID NO: 56533 - DNA, 25 bp, probe
accaattacgatttctctctgtata

SEQ ID NO: 56534 - DNA, 25 bp, probe
taccaattacgatttctctctgtat

SEQ ID NO: 56535 - DNA, 25 bp, probe
gatttctctctgtatacgatggacc

SEQ ID NO: 56536 - DNA, 25 bp, probe
tacgatttctctctgtatacgatgg

SEQ ID NO: 56537 - DNA, 25 bp, probe
cgatttctctctgtatacgatggac

SEQ ID NO: 56538 - DNA, 25 bp, probe
acgatttctctctgtatacgatgga

SEQ ID NO: 56539 - DNA, 25 bp, probe
atttctctctgtatacgatggaccc

SEQ ID NO: 56540 - DNA, 25 bp, probe
ctattggctttactatgtgaactaa

SEQ ID NO: 56541 - DNA, 25 bp, probe
ttacgatttctctctgtatacgatg

SEQ ID NO: 56542 - DNA, 25 bp, probe
acatcgtctattggctttactatgt

SEQ ID NO: 56543 - DNA, 25 bp, probe
caattacgatttctctctgtatacg

SEQ ID NO: 56544 - DNA, 25 bp, probe
aattacgatttctctctgtatacga

SEQ ID NO: 56545 - DNA, 25 bp, probe
tggctttactatgtgaactaaacat

SEQ ID NO: 56546 - DNA, 25 bp, probe
attacgatttctctctgtatacgat

SEQ ID NO: 56547 - DNA, 25 bp, probe
tattggctttactatgtgaactaaa

SEQ ID NO: 56548 - DNA, 25 bp, probe
ctttactatgtgaactaaacatggc

SEQ ID NO: 56549 - DNA, 25 bp, probe
gctttactatgtgaactaaacatgg

SEQ ID NO: 56550 - DNA, 25 bp, probe
ggctttactatgtgaactaaacatg

SEQ ID NO: 56551 - DNA, 25 bp, probe
ccaattacgatttctctctgtatac

SEQ ID NO: 56552 - DNA, 25 bp, probe
ttactatgtgaactaaacatggcct

SEQ ID NO: 56553 - DNA, 25 bp, probe
tactatgtgaactaaacatggcctc

SEQ ID NO: 56554 - DNA, 25 bp, probe
tttactatgtgaactaaacatggcc

SEQ ID NO: 56555 - DNA, 25 bp, probe
actatgtgaactaaacatggcctcc

SEQ ID NO: 56556 - DNA, 25 bp, probe
tttctctctgtatacgatggacccc

SEQ ID NO: 56557 - DNA, 25 bp, probe
agacacacacatatatacatacgca

SEQ ID NO: 56558 - DNA, 25 bp, probe
cagacacacacatatatacatacgc

SEQ ID NO: 56559 - DNA, 25 bp, probe
gcagacacacacatatatacatacg

SEQ ID NO: 56560 - DNA, 25 bp, probe
agcagacacacacatatatacatac

SEQ ID NO: 56561 - DNA, 25 bp, probe
acaagcagacacacacatatataca

SEQ ID NO: 56562 - DNA, 25 bp, probe
acacaagcagacacacacatatata

SEQ ID NO: 56563 - DNA, 25 bp, probe
atacctgatctaaccgatgtgaatg

SEQ ID NO: 56564 - DNA, 25 bp, probe
cacaagcagacacacacatatatac

SEQ ID NO: 56565 - DNA, 25 bp, probe
aatacctgatctaaccgatgtgaat

SEQ ID NO: 56566 - DNA, 25 bp, probe
gacacacacatatatacatacgcaa

SEQ ID NO: 56567 - DNA, 25 bp, probe
caagcagacacacacatatatacat

SEQ ID NO: 56568 - DNA, 25 bp, probe
cacacaagcagacacacacatatat

SEQ ID NO: 56569 - DNA, 25 bp, probe
acacacacatatatacatacgcaat

SEQ ID NO: 56570 - DNA, 25 bp, probe
gatctaaccgatgtgaatgccatag

SEQ ID NO: 56571 - DNA, 25 bp, probe
acacacaagcagacacacacatata

SEQ ID NO: 56572 - DNA, 25 bp, probe
atattctgttgacatcgctggaagt

SEQ ID NO: 56573 - DNA, 25 bp, probe
tgatctaaccgatgtgaatgccata

SEQ ID NO: 56574 - DNA, 25 bp, probe
aatattctgttgacatcgctggaag

SEQ ID NO: 56575 - DNA, 25 bp, probe
tattctgttgacatcgctggaagtt

SEQ ID NO: 56576 - DNA, 25 bp, probe
cacacacatatatacatacgcaatt

SEQ ID NO: 56577 - DNA, 25 bp, probe
atctaaccgatgtgaatgccataga

SEQ ID NO: 56578 - DNA, 25 bp, probe
aagcagacacacacatatatacata

SEQ ID NO: 56579 - DNA, 25 bp, probe
tacctgatctaaccgatgtgaatgc

SEQ ID NO: 56580 - DNA, 25 bp, probe
ttgacaactcaggaatccagtacag

SEQ ID NO: 56581 - DNA, 25 bp, probe
attcagcaatatcctttgacaactc

SEQ ID NO: 56582 - DNA, 25 bp, probe
ttcagcaatatcctttgacaactca

SEQ ID NO: 56583 - DNA, 25 bp, probe
aaatacctgatctaaccgatgtgaa

SEQ ID NO: 56584 - DNA, 25 bp, probe
taaccgatgtgaatgccatagacag

SEQ ID NO: 56585 - DNA, 25 bp, probe
ctaaccgatgtgaatgccatagaca

SEQ ID NO: 56586 - DNA, 25 bp, probe
aattcagcaatatcctttgacaact

SEQ ID NO: 56587 - DNA, 25 bp, probe
tcagcaatatcctttgacaactcag

SEQ ID NO: 56588 - DNA, 25 bp, probe
tctaaccgatgtgaatgccatagac

SEQ ID NO: 56589 - DNA, 25 bp, probe
ctgatctaaccgatgtgaatgccat

SEQ ID NO: 56590 - DNA, 25 bp, probe
tactggctgtactatgttaactgag

SEQ ID NO: 56591 - DNA, 25 bp, probe
tttcaacttagtttactggctgtac

SEQ ID NO: 56592 - DNA, 25 bp, probe
tcaaagacttcatttaacactgagt

SEQ ID NO: 56593 - DNA, 25 bp, probe
ttcaacttagtttactggctgtact

SEQ ID NO: 56594 - DNA, 25 bp, probe
gacacacaagcagacacacacatat

SEQ ID NO: 56595 - DNA, 25 bp, probe
ttactggctgtactatgttaactga

SEQ ID NO: 56596 - DNA, 25 bp, probe
cacaatgaaatgaatgaggtctcag

SEQ ID NO: 56597 - DNA, 25 bp, probe
ggatgctcatggaaatattctgttg

SEQ ID NO: 56598 - DNA, 25 bp, probe
tcacaatgaaatgaatgaggtctca

SEQ ID NO: 56599 - DNA, 25 bp, probe
tggatgctcatggaaatattctgtt

SEQ ID NO: 56600 - DNA, 25 bp, probe
gctgtactatgttaactgagtgact

SEQ ID NO: 56601 - DNA, 25 bp, probe
catactcaagaagattctgctggag

SEQ ID NO: 56602 - DNA, 25 bp, probe
atactcaagaagattctgctggagg

SEQ ID NO: 56603 - DNA, 25 bp, probe
tactcaagaagattctgctggagga

SEQ ID NO: 56604 - DNA, 25 bp, probe
cttaggctgcttattggaccagaag

SEQ ID NO: 56605 - DNA, 25 bp, probe
cttctttcgccctatcattggagat

SEQ ID NO: 56606 - DNA, 25 bp, probe
gtatagacagcacttggctccttag

SEQ ID NO: 56607 - DNA, 25 bp, probe
ttctttcgccctatcattggagatg

SEQ ID NO: 56608 - DNA, 25 bp, probe
tcctatcgactttatacagaactga

SEQ ID NO: 56609 - DNA, 25 bp, probe
ctttcgccctatcattggagatgtt

SEQ ID NO: 56610 - DNA, 25 bp, probe
actcaagaagattctgctggaggag

SEQ ID NO: 56611 - DNA, 25 bp, probe
gacctcttctttcgccctatcattg

SEQ ID NO: 56612 - DNA, 25 bp, probe
cctatcgactttatacagaactgaa

SEQ ID NO: 56613 - DNA, 25 bp, probe
tttcgccctatcattggagatgttg

SEQ ID NO: 56614 - DNA, 25 bp, probe
ttaggctgcttattggaccagaagt

SEQ ID NO: 56615 - DNA, 25 bp, probe
cttcaatgctgtctggagtccttct

SEQ ID NO: 56616 - DNA, 25 bp, probe
gccctatcattggagatgttgacat

SEQ ID NO: 56617 - DNA, 25 bp, probe
tgtatagacagcacttggctcctta

SEQ ID NO: 56618 - DNA, 25 bp, probe
gcatactcaagaagattctgctgga

SEQ ID NO: 56619 - DNA, 25 bp, probe
gtcctatcgactttatacagaactg

SEQ ID NO: 56620 - DNA, 25 bp, probe
ctcttctttcgccctatcattggag

SEQ ID NO: 56621 - DNA, 25 bp, probe
tcttctttcgccctatcattggaga

SEQ ID NO: 56622 - DNA, 25 bp, probe
ttcaatgctgtctggagtccttctg

SEQ ID NO: 56623 - DNA, 25 bp, probe
taggctgcttattggaccagaagtc

SEQ ID NO: 56624 - DNA, 25 bp, probe
cctatcattggagatgttgacatcg

SEQ ID NO: 56625 - DNA, 25 bp, probe
tatagacagcacttggctccttagg

SEQ ID NO: 56626 - DNA, 25 bp, probe
tctttcgccctatcattggagatgt

SEQ ID NO: 56627 - DNA, 25 bp, probe
tccttaggaacagctcttcactcag

SEQ ID NO: 56628 - DNA, 25 bp, probe
ctccttaggaacagctcttcactca

SEQ ID NO: 56629 - DNA, 25 bp, probe
gaagtgagagcagatccctaaccat

SEQ ID NO: 56630 - DNA, 25 bp, probe
ctatcattggagatgttgacatcgc

SEQ ID NO: 56631 - DNA, 25 bp, probe
tatcattggagatgttgacatcgct

SEQ ID NO: 56632 - DNA, 25 bp, probe
ttcgccctatcattggagatgttga

SEQ ID NO: 56633 - DNA, 25 bp, probe
cctcttctttcgccctatcattgga

SEQ ID NO: 56634 - DNA, 25 bp, probe
ggacctcttctttcgccctatcatt

SEQ ID NO: 56635 - DNA, 25 bp, probe
gcccagcatactcaagaagattctg

SEQ ID NO: 56636 - DNA, 25 bp, probe
aagtgagagcagatccctaaccatg

SEQ ID NO: 56637 - DNA, 25 bp, probe
cgactttatacagaactgaattaag

SEQ ID NO: 56638 - DNA, 25 bp, probe
acctcttctttcgccctatcattgg

SEQ ID NO: 56639 - DNA, 25 bp, probe
tcttgggatgagaatgaaagcttag

SEQ ID NO: 56640 - DNA, 25 bp, probe
ctatcgactttatacagaactgaat

SEQ ID NO: 56641 - DNA, 25 bp, probe
gcttaggctgcttattggaccagaa

SEQ ID NO: 56642 - DNA, 25 bp, probe
ccctatcattggagatgttgacatc

SEQ ID NO: 56643 - DNA, 25 bp, probe
gtgagagcagatccctaaccatgag

SEQ ID NO: 56644 - DNA, 25 bp, probe
cttgggatgagaatgaaagcttagg

SEQ ID NO: 56645 - DNA, 25 bp, probe
gagggcaatcattctgtttaatcca

SEQ ID NO: 56646 - DNA, 25 bp, probe
ctgagggcaatcattctgtttaatc

SEQ ID NO: 56647 - DNA, 25 bp, probe
gaaccaagaacataaaccctccaag

SEQ ID NO: 56648 - DNA, 25 bp, probe
tgagggcaatcattctgtttaatcc

SEQ ID NO: 56649 - DNA, 25 bp, probe
agaaccaagaacataaaccctccaa

SEQ ID NO: 56650 - DNA, 25 bp, probe
tacagggcagaaccaagaacataaa

SEQ ID NO: 56651 - DNA, 25 bp, probe
cctgagggcaatcattctgtttaat

SEQ ID NO: 56652 - DNA, 25 bp, probe
agggcaatcattctgtttaatccag

SEQ ID NO: 56653 - DNA, 25 bp, probe
cagaaccaagaacataaaccctcca

SEQ ID NO: 56654 - DNA, 25 bp, probe
gtacagggcagaaccaagaacataa

SEQ ID NO: 56655 - DNA, 25 bp, probe
tgacatgaggatggacaagacagag

SEQ ID NO: 56656 - DNA, 25 bp, probe
gccttaagtgtctagagcatctgtt

SEQ ID NO: 56657 - DNA, 25 bp, probe
attggccttaagtgtctagagcatc

SEQ ID NO: 56658 - DNA, 25 bp, probe
acagggcagaaccaagaacataaac

SEQ ID NO: 56659 - DNA, 25 bp, probe
cattggccttaagtgtctagagcat

SEQ ID NO: 56660 - DNA, 25 bp, probe
gtccattggccttaagtgtctagag

SEQ ID NO: 56661 - DNA, 25 bp, probe
gtgacatgaggatggacaagacaga

SEQ ID NO: 56662 - DNA, 25 bp, probe
ccttaagtgtctagagcatctgttt

SEQ ID NO: 56663 - DNA, 25 bp, probe
aaccaagaacataaaccctccaagg

SEQ ID NO: 56664 - DNA, 25 bp, probe
gcagaaccaagaacataaaccctcc

SEQ ID NO: 56665 - DNA, 25 bp, probe
ggcagaaccaagaacataaaccctc

SEQ ID NO: 56666 - DNA, 25 bp, probe
ctgtgaggactggttgtctctcttc

SEQ ID NO: 56667 - DNA, 25 bp, probe
agtacagggcagaaccaagaacata

SEQ ID NO: 56668 - DNA, 25 bp, probe
gatacctgtgaggactggttgtctc

SEQ ID NO: 56669 - DNA, 25 bp, probe
cagggcagaaccaagaacataaacc

SEQ ID NO: 56670 - DNA, 25 bp, probe
ttggccttaagtgtctagagcatct

SEQ ID NO: 56671 - DNA, 25 bp, probe
catgaggatggacaagacagagctt

SEQ ID NO: 56672 - DNA, 25 bp, probe
atacctgtgaggactggttgtctct

SEQ ID NO: 56673 - DNA, 25 bp, probe
agatacctgtgaggactggttgtct

SEQ ID NO: 56674 - DNA, 25 bp, probe
cagatacctgtgaggactggttgtc

SEQ ID NO: 56675 - DNA, 25 bp, probe
cattctgtttaatccagatgccaag

SEQ ID NO: 56676 - DNA, 25 bp, probe
aatcattctgtttaatccagatgcc

SEQ ID NO: 56677 - DNA, 25 bp, probe
ggcaatcattctgtttaatccagat

SEQ ID NO: 56678 - DNA, 25 bp, probe
atcattctgtttaatccagatgcca

SEQ ID NO: 56679 - DNA, 25 bp, probe
ggtccattggccttaagtgtctaga

SEQ ID NO: 56680 - DNA, 25 bp, probe
tcattctgtttaatccagatgccaa

SEQ ID NO: 56681 - DNA, 25 bp, probe
aagtacagggcagaaccaagaacat

SEQ ID NO: 56682 - DNA, 25 bp, probe
gagaagtacagggcagaaccaagaa

SEQ ID NO: 56683 - DNA, 25 bp, probe
gacatgaggatggacaagacagagc

SEQ ID NO: 56684 - DNA, 25 bp, probe
caatcattctgtttaatccagatgc

SEQ ID NO: 56685 - DNA, 25 bp, probe
gcaatcattctgtttaatccagatg

SEQ ID NO: 56686 - DNA, 25 bp, probe
attctgtttaatccagatgccaagg

SEQ ID NO: 56687 - DNA, 25 bp, probe
gggcaatcattctgtttaatccaga

SEQ ID NO: 56688 - DNA, 25 bp, probe
ggccttaagtgtctagagcatctgt

SEQ ID NO: 56689 - DNA, 25 bp, probe
tgacttcagtgtgtgtattgtgtaa

SEQ ID NO: 56690 - DNA, 25 bp, probe
gtgacttcagtgtgtgtattgtgta

SEQ ID NO: 56691 - DNA, 25 bp, probe
agaacatacactgtgaactcaatct

SEQ ID NO: 56692 - DNA, 25 bp, probe
gaacatacactgtgaactcaatctc

SEQ ID NO: 56693 - DNA, 25 bp, probe
aacatacactgtgaactcaatctcc

SEQ ID NO: 56694 - DNA, 25 bp, probe
cagaacatacactgtgaactcaatc

SEQ ID NO: 56695 - DNA, 25 bp, probe
ccagaacatacactgtgaactcaat

SEQ ID NO: 56696 - DNA, 25 bp, probe
catacactgtgaactcaatctccag

SEQ ID NO: 56697 - DNA, 25 bp, probe
acatacactgtgaactcaatctcca

SEQ ID NO: 56698 - DNA, 25 bp, probe
cagtgtgtgtattgtgtaaatgagt

SEQ ID NO: 56699 - DNA, 25 bp, probe
atacactgtgaactcaatctccagg

SEQ ID NO: 56700 - DNA, 25 bp, probe
gacttcagtgtgtgtattgtgtaaa

SEQ ID NO: 56701 - DNA, 25 bp, probe
aggtgacttcagtgtgtgtattgtg

SEQ ID NO: 56702 - DNA, 25 bp, probe
caggtgacttcagtgtgtgtattgt

SEQ ID NO: 56703 - DNA, 25 bp, probe
cttcagtgtgtgtattgtgtaaatg

SEQ ID NO: 56704 - DNA, 25 bp, probe
acttcagtgtgtgtattgtgtaaat

SEQ ID NO: 56705 - DNA, 25 bp, probe
ggtgacttcagtgtgtgtattgtgt

SEQ ID NO: 56706 - DNA, 25 bp, probe
tcagtgtgtgtattgtgtaaatgag

SEQ ID NO: 56707 - DNA, 25 bp, probe
agtgtgtgtattgtgtaaatgagta

SEQ ID NO: 56708 - DNA, 25 bp, probe
ttcagtgtgtgtattgtgtaaatga

SEQ ID NO: 56709 - DNA, 25 bp, probe
ccaggtgacttcagtgtgtgtattg

SEQ ID NO: 56710 - DNA, 25 bp, probe
gtgtgtgtattgtgtaaatgagtaa

SEQ ID NO: 56711 - DNA, 25 bp, probe
tgtgtgtattgtgtaaatgagtaaa

SEQ ID NO: 56712 - DNA, 25 bp, probe
cccagaacatacactgtgaactcaa

SEQ ID NO: 56713 - DNA, 25 bp, probe
atcaaagagaacactggggtatagg

SEQ ID NO: 56714 - DNA, 25 bp, probe
gatcaaagagaacactggggtatag

SEQ ID NO: 56715 - DNA, 25 bp, probe
ggatcaaagagaacactggggtata

SEQ ID NO: 56716 - DNA, 25 bp, probe
gtttcgggactggatcaaagagaac

SEQ ID NO: 56717 - DNA, 25 bp, probe
tttcgggactggatcaaagagaaca

SEQ ID NO: 56718 - DNA, 25 bp, probe
tgtttcgggactggatcaaagagaa

SEQ ID NO: 56719 - DNA, 25 bp, probe
tatatctgcctcccctgtctgtaag

SEQ ID NO: 56720 - DNA, 25 bp, probe
tacactgtgaactcaatctccaggg

SEQ ID NO: 56721 - DNA, 25 bp, probe
tccaaatctgcctagaaaacctctc

SEQ ID NO: 56722 - DNA, 25 bp, probe
ctccaaatctgcctagaaaacctct

SEQ ID NO: 56723 - DNA, 25 bp, probe
gtatatctgcctcccctgtctgtaa

SEQ ID NO: 56724 - DNA, 25 bp, probe
cccaggtgacttcagtgtgtgtatt

SEQ ID NO: 56725 - DNA, 25 bp, probe
gggtctgagactgaaaatggtttac

SEQ ID NO: 56726 - DNA, 25 bp, probe
aactcaatctccagggctccaaatc

SEQ ID NO: 56727 - DNA, 25 bp, probe
gaactcaatctccagggctccaaat

SEQ ID NO: 56728 - DNA, 25 bp, probe
ctgtttcgggactggatcaaagaga

SEQ ID NO: 56729 - DNA, 25 bp, probe
tcaaagagaacactggggtataggg

SEQ ID NO: 56730 - DNA, 25 bp, probe
tctgtttcgggactggatcaaagag

SEQ ID NO: 56731 - DNA, 25 bp, probe
ctctgtttcgggactggatcaaaga

SEQ ID NO: 56732 - DNA, 25 bp, probe
ggtctgagactgaaaatggtttacc

SEQ ID NO: 56733 - DNA, 25 bp, probe
gcattctgactacttaccacatcaa

SEQ ID NO: 56734 - DNA, 25 bp, probe
agcattctgactacttaccacatca

SEQ ID NO: 56735 - DNA, 25 bp, probe
cagcattctgactacttaccacatc

SEQ ID NO: 56736 - DNA, 25 bp, probe
caggacattaggaccacttgttgta

SEQ ID NO: 56737 - DNA, 25 bp, probe
gaggtttgtcatattcatctttggt

SEQ ID NO: 56738 - DNA, 25 bp, probe
cagttcaaatgggaaagtgttctaa

SEQ ID NO: 56739 - DNA, 25 bp, probe
aggtttgtcatattcatctttggtt

SEQ ID NO: 56740 - DNA, 25 bp, probe
agttcaaatgggaaagtgttctaaa

SEQ ID NO: 56741 - DNA, 25 bp, probe
aggacattaggaccacttgttgtac

SEQ ID NO: 56742 - DNA, 25 bp, probe
gcaccatttctctcttactaacagt

SEQ ID NO: 56743 - DNA, 25 bp, probe
tgaggtttgtcatattcatctttgg

SEQ ID NO: 56744 - DNA, 25 bp, probe
ctgactacttaccacatcaaatctg

SEQ ID NO: 56745 - DNA, 25 bp, probe
tctgactacttaccacatcaaatct

SEQ ID NO: 56746 - DNA, 25 bp, probe
ggtttgtcatattcatctttggttt

SEQ ID NO: 56747 - DNA, 25 bp, probe
cattctgactacttaccacatcaaa

SEQ ID NO: 56748 - DNA, 25 bp, probe
acagttcaaatgggaaagtgttcta

SEQ ID NO: 56749 - DNA, 25 bp, probe
ttctgactacttaccacatcaaatc

SEQ ID NO: 56750 - DNA, 25 bp, probe
caccatttctctcttactaacagtt

SEQ ID NO: 56751 - DNA, 25 bp, probe
actcagtcatatatagtgaacagtt

SEQ ID NO: 56752 - DNA, 25 bp, probe
aactcagtcatatatagtgaacagt

SEQ ID NO: 56753 - DNA, 25 bp, probe
attctgactacttaccacatcaaat

SEQ ID NO: 56754 - DNA, 25 bp, probe
tgactacttaccacatcaaatctgg

SEQ ID NO: 56755 - DNA, 25 bp, probe
accatttctctcttactaacagttt

SEQ ID NO: 56756 - DNA, 25 bp, probe
ttgaggtttgtcatattcatctttg

SEQ ID NO: 56757 - DNA, 25 bp, probe
aatatgttcatcaccaacaatcagc

SEQ ID NO: 56758 - DNA, 25 bp, probe
gactacttaccacatcaaatctggg

SEQ ID NO: 56759 - DNA, 25 bp, probe
tgcaccatttctctcttactaacag

SEQ ID NO: 56760 - DNA, 25 bp, probe
atgcaccatttctctcttactaaca

SEQ ID NO: 56761 - DNA, 25 bp, probe
catgcaccatttctctcttactaac

SEQ ID NO: 56762 - DNA, 25 bp, probe
gaaggaggtataataaactcagtca

SEQ ID NO: 56763 - DNA, 25 bp, probe
tgaaggaggtataataaactcagtc

SEQ ID NO: 56764 - DNA, 25 bp, probe
ctcagtcatatatagtgaacagttc

SEQ ID NO: 56765 - DNA, 25 bp, probe
tctctcttactaacagtttcatctg

SEQ ID NO: 56766 - DNA, 25 bp, probe
ccatttctctcttactaacagtttc

SEQ ID NO: 56767 - DNA, 25 bp, probe
tgttgaaggaggtataataaactca

SEQ ID NO: 56768 - DNA, 25 bp, probe
ttaccacgacatttaacatcaatat

SEQ ID NO: 56769 - DNA, 25 bp, probe
attaccacgacatttaacatcaata

SEQ ID NO: 56770 - DNA, 25 bp, probe
tattaccacgacatttaacatcaat

SEQ ID NO: 56771 - DNA, 25 bp, probe
atattaccacgacatttaacatcaa

SEQ ID NO: 56772 - DNA, 25 bp, probe
tttgaggtttgtcatattcatcttt

SEQ ID NO: 56773 - DNA, 25 bp, probe
ttctctcttactaacagtttcatct

SEQ ID NO: 56774 - DNA, 25 bp, probe
ggaccacttgttgtacatctgaata

SEQ ID NO: 56775 - DNA, 25 bp, probe
attaggaccacttgttgtacatctg

SEQ ID NO: 56776 - DNA, 25 bp, probe
cattaggaccacttgttgtacatct

SEQ ID NO: 56777 - DNA, 25 bp, probe
ctactccttgttcaatgtcatctct

SEQ ID NO: 56778 - DNA, 25 bp, probe
ccttgttcaatgtcatctctatcct

SEQ ID NO: 56779 - DNA, 25 bp, probe
tccttgttcaatgtcatctctatcc

SEQ ID NO: 56780 - DNA, 25 bp, probe
tctactccttgttcaatgtcatctc

SEQ ID NO: 56781 - DNA, 25 bp, probe
ttgttcaatgtcatctctatcctca

SEQ ID NO: 56782 - DNA, 25 bp, probe
actccttgttcaatgtcatctctat

SEQ ID NO: 56783 - DNA, 25 bp, probe
atctactccttgttcaatgtcatct

SEQ ID NO: 56784 - DNA, 25 bp, probe
catctactccttgttcaatgtcatc

SEQ ID NO: 56785 - DNA, 25 bp, probe
cttgttcaatgtcatctctatcctc

SEQ ID NO: 56786 - DNA, 25 bp, probe
ctccttgttcaatgtcatctctatc

SEQ ID NO: 56787 - DNA, 25 bp, probe
tgttcaatgtcatctctatcctcat

SEQ ID NO: 56788 - DNA, 25 bp, probe
tactccttgttcaatgtcatctcta

SEQ ID NO: 56789 - DNA, 25 bp, probe
tcaatgtcatctctatcctcatcaa

SEQ ID NO: 56790 - DNA, 25 bp, probe
ttcaatgtcatctctatcctcatca

SEQ ID NO: 56791 - DNA, 25 bp, probe
gcatctactccttgttcaatgtcat

SEQ ID NO: 56792 - DNA, 25 bp, probe
gttcaatgtcatctctatcctcatc

SEQ ID NO: 56793 - DNA, 25 bp, probe
gtcatctctatcctcatcaaacagt

SEQ ID NO: 56794 - DNA, 25 bp, probe
tcatctctatcctcatcaaacagtc

SEQ ID NO: 56795 - DNA, 25 bp, probe
catctctatcctcatcaaacagtcc

SEQ ID NO: 56796 - DNA, 25 bp, probe
actttgactcactctacttctgttt

SEQ ID NO: 56797 - DNA, 25 bp, probe
ctactttgactcactctacttctgt

SEQ ID NO: 56798 - DNA, 25 bp, probe
gctactttgactcactctacttctg

SEQ ID NO: 56799 - DNA, 25 bp, probe
tactttgactcactctacttctgtt

SEQ ID NO: 56800 - DNA, 25 bp, probe
atctctatcctcatcaaacagtccc

SEQ ID NO: 56801 - DNA, 25 bp, probe
ctctatcctcatcaaacagtccctt

SEQ ID NO: 56802 - DNA, 25 bp, probe
ctgcatctactccttgttcaatgtc

SEQ ID NO: 56803 - DNA, 25 bp, probe
tgtcatctctatcctcatcaaacag

SEQ ID NO: 56804 - DNA, 25 bp, probe
aatgtcatctctatcctcatcaaac

SEQ ID NO: 56805 - DNA, 25 bp, probe
caatgtcatctctatcctcatcaaa

SEQ ID NO: 56806 - DNA, 25 bp, probe
atgtcatctctatcctcatcaaaca

SEQ ID NO: 56807 - DNA, 25 bp, probe
tctatcctcatcaaacagtcccttg

SEQ ID NO: 56808 - DNA, 25 bp, probe
tctctatcctcatcaaacagtccct

SEQ ID NO: 56809 - DNA, 25 bp, probe
tgcatctactccttgttcaatgtca

SEQ ID NO: 56810 - DNA, 25 bp, probe
agctactttgactcactctacttct

SEQ ID NO: 56811 - DNA, 25 bp, probe
gagctactttgactcactctacttc

SEQ ID NO: 56812 - DNA, 25 bp, probe
ctgctgcatctactccttgttcaat

SEQ ID NO: 56813 - DNA, 25 bp, probe
ggagctactttgactcactctactt

SEQ ID NO: 56814 - DNA, 25 bp, probe
gatgatctccatgaaggacttgctg

SEQ ID NO: 56815 - DNA, 25 bp, probe
agatgatctccatgaaggacttgct

SEQ ID NO: 56816 - DNA, 25 bp, probe
gctgcatctactccttgttcaatgt

SEQ ID NO: 56817 - DNA, 25 bp, probe
tgctgcatctactccttgttcaatg

SEQ ID NO: 56818 - DNA, 25 bp, probe
ttgactcactctacttctgttttgt

SEQ ID NO: 56819 - DNA, 25 bp, probe
ttgccaacttcgtcttcatcctcat

SEQ ID NO: 56820 - DNA, 25 bp, probe
tttgactcactctacttctgttttg

SEQ ID NO: 56821 - DNA, 25 bp, probe
ccagcctgcttattgaagatacatt

SEQ ID NO: 56822 - DNA, 25 bp, probe
cttgaagacctaagtcatagcagtt

SEQ ID NO: 56823 - DNA, 25 bp, probe
ttgaagacctaagtcatagcagtta

SEQ ID NO: 56824 - DNA, 25 bp, probe
tgaagacctaagtcatagcagttat

SEQ ID NO: 56825 - DNA, 25 bp, probe
atccatacaccaagaacttgttacc

SEQ ID NO: 56826 - DNA, 25 bp, probe
aatccatacaccaagaacttgttac

SEQ ID NO: 56827 - DNA, 25 bp, probe
caatccatacaccaagaacttgtta

SEQ ID NO: 56828 - DNA, 25 bp, probe
ccaggtctacaccattatgcttatt

SEQ ID NO: 56829 - DNA, 25 bp, probe
taccaggtctacaccattatgctta

SEQ ID NO: 56830 - DNA, 25 bp, probe
ccatacaccaagaacttgttaccaa

SEQ ID NO: 56831 - DNA, 25 bp, probe
ccttgaagacctaagtcatagcagt

SEQ ID NO: 56832 - DNA, 25 bp, probe
aagcaatccatacaccaagaacttg

SEQ ID NO: 56833 - DNA, 25 bp, probe
gaagacctaagtcatagcagttatt

SEQ ID NO: 56834 - DNA, 25 bp, probe
atatttccatcaaagccaaagcaat

SEQ ID NO: 56835 - DNA, 25 bp, probe
accaggtctacaccattatgcttat

SEQ ID NO: 56836 - DNA, 25 bp, probe
tatttccatcaaagccaaagcaatc

SEQ ID NO: 56837 - DNA, 25 bp, probe
tagatatttccatcaaagccaaagc

SEQ ID NO: 56838 - DNA, 25 bp, probe
gatatttccatcaaagccaaagcaa

SEQ ID NO: 56839 - DNA, 25 bp, probe
ttaccaggtctacaccattatgctt

SEQ ID NO: 56840 - DNA, 25 bp, probe
aatttgtagggtaggctatcaggaa

SEQ ID NO: 56841 - DNA, 25 bp, probe
gatagatagccctagccctagatag

SEQ ID NO: 56842 - DNA, 25 bp, probe
gcctgcttattgaagatacatttct

SEQ ID NO: 56843 - DNA, 25 bp, probe
tccatacaccaagaacttgttacca

SEQ ID NO: 56844 - DNA, 25 bp, probe
atttgtagggtaggctatcaggaag

SEQ ID NO: 56845 - DNA, 25 bp, probe
agatagccctagccctagatagata

SEQ ID NO: 56846 - DNA, 25 bp, probe
tagatagccctagccctagatagat

SEQ ID NO: 56847 - DNA, 25 bp, probe
atagatagccctagccctagataga

SEQ ID NO: 56848 - DNA, 25 bp, probe
agatagatagccctagccctagata

SEQ ID NO: 56849 - DNA, 25 bp, probe
tagatagatagccctagccctagat

SEQ ID NO: 56850 - DNA, 25 bp, probe
cacaagtggaatttcttcttcatca

SEQ ID NO: 56851 - DNA, 25 bp, probe
gctagaaaggcagatagacagatat

SEQ ID NO: 56852 - DNA, 25 bp, probe
agatatttccatcaaagccaaagca

SEQ ID NO: 56853 - DNA, 25 bp, probe
aaagcaatccatacaccaagaactt

SEQ ID NO: 56854 - DNA, 25 bp, probe
caggtctacaccattatgcttatta

SEQ ID NO: 56855 - DNA, 25 bp, probe
aaccacatcagagggaaagaaagta

SEQ ID NO: 56856 - DNA, 25 bp, probe
gcaatccatacaccaagaacttgtt

SEQ ID NO: 56857 - DNA, 25 bp, probe
ttcagaagaacatcacagagaaagc

SEQ ID NO: 56858 - DNA, 25 bp, probe
atcagagggaaagaaagtacagaag

SEQ ID NO: 56859 - DNA, 25 bp, probe
catcagagggaaagaaagtacagaa

SEQ ID NO: 56860 - DNA, 25 bp, probe
acaagtggaatttcttcttcatcat

SEQ ID NO: 56861 - DNA, 25 bp, probe
agtagatatttccatcaaagccaaa

SEQ ID NO: 56862 - DNA, 25 bp, probe
aagtagatatttccatcaaagccaa

SEQ ID NO: 56863 - DNA, 25 bp, probe
aaagtagatatttccatcaaagcca

SEQ ID NO: 56864 - DNA, 25 bp, probe
gggaaagaaagtacagaagggtaat

SEQ ID NO: 56865 - DNA, 25 bp, probe
catcatctacggctacttcaacgag

SEQ ID NO: 56866 - DNA, 25 bp, probe
atcatctacggctacttcaacgaga

SEQ ID NO: 56867 - DNA, 25 bp, probe
ctacggctacttcaacgagaacttc

SEQ ID NO: 56868 - DNA, 25 bp, probe
catctacggctacttcaacgagaac

SEQ ID NO: 56869 - DNA, 25 bp, probe
atctacggctacttcaacgagaact

SEQ ID NO: 56870 - DNA, 25 bp, probe
tcatctacggctacttcaacgagaa

SEQ ID NO: 56871 - DNA, 25 bp, probe
tctacggctacttcaacgagaactt

SEQ ID NO: 56872 - DNA, 25 bp, probe
ccatcatctacggctacttcaacga

SEQ ID NO: 56873 - DNA, 25 bp, probe
tacggctacttcaacgagaacttcc

SEQ ID NO: 56874 - DNA, 25 bp, probe
cccatcatctacggctacttcaacg

SEQ ID NO: 56875 - DNA, 25 bp, probe
ccccatcatctacggctacttcaac

SEQ ID NO: 56876 - DNA, 25 bp, probe
caaccccatcatctacggctacttc

SEQ ID NO: 56877 - DNA, 25 bp, probe
accccatcatctacggctacttcaa

SEQ ID NO: 56878 - DNA, 25 bp, probe
aaccccatcatctacggctacttca

SEQ ID NO: 56879 - DNA, 25 bp, probe
ctactgatgggaatgattaagggag

SEQ ID NO: 56880 - DNA, 25 bp, probe
atgctactgatgggaatgattaagg

SEQ ID NO: 56881 - DNA, 25 bp, probe
ggatgctactgatgggaatgattaa

SEQ ID NO: 56882 - DNA, 25 bp, probe
tttgtaaacaccctcttgcttaatc

SEQ ID NO: 56883 - DNA, 25 bp, probe
ctttgtaaacaccctcttgcttaat

SEQ ID NO: 56884 - DNA, 25 bp, probe
gatgctactgatgggaatgattaag

SEQ ID NO: 56885 - DNA, 25 bp, probe
actttgtaaacaccctcttgcttaa

SEQ ID NO: 56886 - DNA, 25 bp, probe
gtaaacaccctcttgcttaatcctc

SEQ ID NO: 56887 - DNA, 25 bp, probe
ttgtaaacaccctcttgcttaatcc

SEQ ID NO: 56888 - DNA, 25 bp, probe
ttaggtggtgctggtttatgttcta

SEQ ID NO: 56889 - DNA, 25 bp, probe
cactttgtaaacaccctcttgctta

SEQ ID NO: 56890 - DNA, 25 bp, probe
gggatgctactgatgggaatgatta

SEQ ID NO: 56891 - DNA, 25 bp, probe
tgtaaacaccctcttgcttaatcct

SEQ ID NO: 56892 - DNA, 25 bp, probe
tactgatgggaatgattaagggagc

SEQ ID NO: 56893 - DNA, 25 bp, probe
gctactgatgggaatgattaaggga

SEQ ID NO: 56894 - DNA, 25 bp, probe
tgctactgatgggaatgattaaggg

SEQ ID NO: 56895 - DNA, 25 bp, probe
taaacaccctcttgcttaatcctcc

SEQ ID NO: 56896 - DNA, 25 bp, probe
tttaggtggtgctggtttatgttct

SEQ ID NO: 56897 - DNA, 25 bp, probe
gtttaggtggtgctggtttatgttc

SEQ ID NO: 56898 - DNA, 25 bp, probe
taggtggtgctggtttatgttctag

SEQ ID NO: 56899 - DNA, 25 bp, probe
aatgattaagggagctgctgtttag

SEQ ID NO: 56900 - DNA, 25 bp, probe
gaatgattaagggagctgctgttta

SEQ ID NO: 56901 - DNA, 25 bp, probe
tgtttaggtggtgctggtttatgtt

SEQ ID NO: 56902 - DNA, 25 bp, probe
gtggtgctggtttatgttctaggaa

SEQ ID NO: 56903 - DNA, 25 bp, probe
atgagcactttgtaaacaccctctt

SEQ ID NO: 56904 - DNA, 25 bp, probe
ctgtttaggtggtgctggtttatgt

SEQ ID NO: 56905 - DNA, 25 bp, probe
cattaaaattctcagaggacttggc

SEQ ID NO: 56906 - DNA, 25 bp, probe
agcacattaaaattctcagaggact

SEQ ID NO: 56907 - DNA, 25 bp, probe
ttctaggaactcttcatgagcactt

SEQ ID NO: 56908 - DNA, 25 bp, probe
attaaaattctcagaggacttggca

SEQ ID NO: 56909 - DNA, 25 bp, probe
gcacattaaaattctcagaggactt

SEQ ID NO: 56910 - DNA, 25 bp, probe
ttaaaattctcagaggacttggcaa

SEQ ID NO: 56911 - DNA, 25 bp, probe
acattaaaattctcagaggacttgg

SEQ ID NO: 56912 - DNA, 25 bp, probe
atgattaagggagctgctgtttagg

SEQ ID NO: 56913 - DNA, 25 bp, probe
gagcacattaaaattctcagaggac

SEQ ID NO: 56914 - DNA, 25 bp, probe
tgagcactttgtaaacaccctcttg

SEQ ID NO: 56915 - DNA, 25 bp, probe
ctgatgggaatgattaagggagctg

SEQ ID NO: 56916 - DNA, 25 bp, probe
aaggagcacattaaaattctcagag

SEQ ID NO: 56917 - DNA, 25 bp, probe
ggagcacattaaaattctcagagga

SEQ ID NO: 56918 - DNA, 25 bp, probe
aggagcacattaaaattctcagagg

SEQ ID NO: 56919 - DNA, 25 bp, probe
cacattaaaattctcagaggacttg

SEQ ID NO: 56920 - DNA, 25 bp, probe
aaaggagcacattaaaattctcaga

SEQ ID NO: 56921 - DNA, 25 bp, probe
catgagcactttgtaaacaccctct

SEQ ID NO: 56922 - DNA, 25 bp, probe
taaaattctcagaggacttggcaag

SEQ ID NO: 56923 - DNA, 25 bp, probe
ttctcattactgtctgtggctaagt

SEQ ID NO: 56924 - DNA, 25 bp, probe
tctcattactgtctgtggctaagtc

SEQ ID NO: 56925 - DNA, 25 bp, probe
tttctcattactgtctgtggctaag

SEQ ID NO: 56926 - DNA, 25 bp, probe
gtttctcattactgtctgtggctaa

SEQ ID NO: 56927 - DNA, 25 bp, probe
ctcattactgtctgtggctaagtcc

SEQ ID NO: 56928 - DNA, 25 bp, probe
agcaagtttctcattactgtctgtg

SEQ ID NO: 56929 - DNA, 25 bp, probe
gagcaagtttctcattactgtctgt

SEQ ID NO: 56930 - DNA, 25 bp, probe
agtttctcattactgtctgtggcta

SEQ ID NO: 56931 - DNA, 25 bp, probe
cgagcaagtttctcattactgtctg

SEQ ID NO: 56932 - DNA, 25 bp, probe
aagtttctcattactgtctgtggct

SEQ ID NO: 56933 - DNA, 25 bp, probe
caagtttctcattactgtctgtggc

SEQ ID NO: 56934 - DNA, 25 bp, probe
gcaagtttctcattactgtctgtgg

SEQ ID NO: 56935 - DNA, 25 bp, probe
acgagcaagtttctcattactgtct

SEQ ID NO: 56936 - DNA, 25 bp, probe
cacgagcaagtttctcattactgtc

SEQ ID NO: 56937 - DNA, 25 bp, probe
cttcagcttcctctacatcctcctg

SEQ ID NO: 56938 - DNA, 25 bp, probe
tcattactgtctgtggctaagtccc

SEQ ID NO: 56939 - DNA, 25 bp, probe
gcacgagcaagtttctcattactgt

SEQ ID NO: 56940 - DNA, 25 bp, probe
ccttcagcttcctctacatcctcct

SEQ ID NO: 56941 - DNA, 25 bp, probe
taagtcccctcccttctttccaaaa

SEQ ID NO: 56942 - DNA, 25 bp, probe
ctaagtcccctcccttctttccaaa

SEQ ID NO: 56943 - DNA, 25 bp, probe
ttcagcttcctctacatcctcctgg

SEQ ID NO: 56944 - DNA, 25 bp, probe
ttctgcacgagcaagtttctcatta

SEQ ID NO: 56945 - DNA, 25 bp, probe
ctgcacgagcaagtttctcattact

SEQ ID NO: 56946 - DNA, 25 bp, probe
tctgcacgagcaagtttctcattac

SEQ ID NO: 56947 - DNA, 25 bp, probe
tgcacgagcaagtttctcattactg

SEQ ID NO: 56948 - DNA, 25 bp, probe
cattactgtctgtggctaagtcccc

SEQ ID NO: 56949 - DNA, 25 bp, probe
cttctgcacgagcaagtttctcatt

SEQ ID NO: 56950 - DNA, 25 bp, probe
attactgtctgtggctaagtcccct

SEQ ID NO: 56951 - DNA, 25 bp, probe
tcttctgcacgagcaagtttctcat

SEQ ID NO: 56952 - DNA, 25 bp, probe
aatatattacagtcaccccataaaa

SEQ ID NO: 56953 - DNA, 25 bp, probe
aaatatattacagtcaccccataaa

SEQ ID NO: 56954 - DNA, 25 bp, probe
aaaatatattacagtcaccccataa

SEQ ID NO: 56955 - DNA, 25 bp, probe
agcacaagacctatgaagaattatc

SEQ ID NO: 56956 - DNA, 25 bp, probe
gcacaagacctatgaagaattatct

SEQ ID NO: 56957 - DNA, 25 bp, probe
aagcacaagacctatgaagaattat

SEQ ID NO: 56958 - DNA, 25 bp, probe
gagacactctatctgtaatccaaga

SEQ ID NO: 56959 - DNA, 25 bp, probe
ggagacactctatctgtaatccaag

SEQ ID NO: 56960 - DNA, 25 bp, probe
cactctatctgtaatccaagatggt

SEQ ID NO: 56961 - DNA, 25 bp, probe
acactctatctgtaatccaagatgg

SEQ ID NO: 56962 - DNA, 25 bp, probe
tattcttcgtcgtgagatgtttgtt

SEQ ID NO: 56963 - DNA, 25 bp, probe
actctatctgtaatccaagatggtt

SEQ ID NO: 56964 - DNA, 25 bp, probe
tccatcacatactaacaaagaacaa

SEQ ID NO: 56965 - DNA, 25 bp, probe
ctctatctgtaatccaagatggttg

SEQ ID NO: 56966 - DNA, 25 bp, probe
ctattcttcgtcgtgagatgtttgt

SEQ ID NO: 56967 - DNA, 25 bp, probe
gacactctatctgtaatccaagatg

SEQ ID NO: 56968 - DNA, 25 bp, probe
cacatactaacaaagaacaatcagg

SEQ ID NO: 56969 - DNA, 25 bp, probe
aaagcacaagacctatgaagaatta

SEQ ID NO: 56970 - DNA, 25 bp, probe
agacactctatctgtaatccaagat

SEQ ID NO: 56971 - DNA, 25 bp, probe
ttccatcacatactaacaaagaaca

SEQ ID NO: 56972 - DNA, 25 bp, probe
gaagggagacactctatctgtaatc

SEQ ID NO: 56973 - DNA, 25 bp, probe
tgaagggagacactctatctgtaat

SEQ ID NO: 56974 - DNA, 25 bp, probe
attcttcgtcgtgagatgtttgttt

SEQ ID NO: 56975 - DNA, 25 bp, probe
acatactaacaaagaacaatcagga

SEQ ID NO: 56976 - DNA, 25 bp, probe
cttccatcacatactaacaaagaac

SEQ ID NO: 56977 - DNA, 25 bp, probe
ctgtgatgggaactttaacactcta

SEQ ID NO: 56978 - DNA, 25 bp, probe
ttaacactctagctattcttcgtcg

SEQ ID NO: 56979 - DNA, 25 bp, probe
atctgtgatgggaactttaacactc

SEQ ID NO: 56980 - DNA, 25 bp, probe
tgtgatgggaactttaacactctag

SEQ ID NO: 56981 - DNA, 25 bp, probe
ccatcacatactaacaaagaacaat

SEQ ID NO: 56982 - DNA, 25 bp, probe
gtgaagggagacactctatctgtaa

SEQ ID NO: 56983 - DNA, 25 bp, probe
gaaacaacagggtgatggatggata

SEQ ID NO: 56984 - DNA, 25 bp, probe
taacactctagctattcttcgtcgt

SEQ ID NO: 56985 - DNA, 25 bp, probe
aagggagacactctatctgtaatcc

SEQ ID NO: 56986 - DNA, 25 bp, probe
gctattcttcgtcgtgagatgtttg

SEQ ID NO: 56987 - DNA, 25 bp, probe
gggagacactctatctgtaatccaa

SEQ ID NO: 56988 - DNA, 25 bp, probe
tggctctacaaataccattggaaat

SEQ ID NO: 56989 - DNA, 25 bp, probe
ttggctctacaaataccattggaaa

SEQ ID NO: 56990 - DNA, 25 bp, probe
catactaacaaagaacaatcaggaa

SEQ ID NO: 56991 - DNA, 25 bp, probe
tcacatactaacaaagaacaatcag

SEQ ID NO: 56992 - DNA, 25 bp, probe
aaacaacagggtgatggatggatac

SEQ ID NO: 56993 - DNA, 25 bp, probe
gtgatgggaactttaacactctagc

SEQ ID NO: 56994 - DNA, 25 bp, probe
acccaatgcaaattacttacttctg

SEQ ID NO: 56995 - DNA, 25 bp, probe
tctgtgatgggaactttaacactct

SEQ ID NO: 56996 - DNA, 25 bp, probe
tgatgggaactttaacactctagct

SEQ ID NO: 56997 - DNA, 25 bp, probe
aaacaccaaataccgagggatcaat

SEQ ID NO: 56998 - DNA, 25 bp, probe
ggatacccaatgcaaattacttact

SEQ ID NO: 56999 - DNA, 25 bp, probe
cttcttgtggtctggactgaacttc

SEQ ID NO: 57000 - DNA, 25 bp, probe
gcttcatgtgaaaggtgattcttag

SEQ ID NO: 57001 - DNA, 25 bp, probe
cttcatgtgaaaggtgattcttaga

SEQ ID NO: 57002 - DNA, 25 bp, probe
cagaggctatgatgagcagtagtac

SEQ ID NO: 57003 - DNA, 25 bp, probe
gtacagaggctatgatgagcagtag

SEQ ID NO: 57004 - DNA, 25 bp, probe
ggcttcatgtgaaaggtgattctta

SEQ ID NO: 57005 - DNA, 25 bp, probe
aattcatgcttcttgtggtctggac

SEQ ID NO: 57006 - DNA, 25 bp, probe
acagaggctatgatgagcagtagta

SEQ ID NO: 57007 - DNA, 25 bp, probe
tacagaggctatgatgagcagtagt

SEQ ID NO: 57008 - DNA, 25 bp, probe
caaggaagtgcattagtagaagcca

SEQ ID NO: 57009 - DNA, 25 bp, probe
ttcatgtgaaaggtgattcttagaa

SEQ ID NO: 57010 - DNA, 25 bp, probe
attcttagaatcctgagctgtggtg

SEQ ID NO: 57011 - DNA, 25 bp, probe
caattcatgcttcttgtggtctgga

SEQ ID NO: 57012 - DNA, 25 bp, probe
tttggcttcatgtgaaaggtgattc

SEQ ID NO: 57013 - DNA, 25 bp, probe
ggtcagaaagggatgagtgaagaag

SEQ ID NO: 57014 - DNA, 25 bp, probe
ctgtattccacgaggcattgagaaa

SEQ ID NO: 57015 - DNA, 25 bp, probe
agaggctatgatgagcagtagtacc

SEQ ID NO: 57016 - DNA, 25 bp, probe
caggttgttgtgaagagcaaggaag

SEQ ID NO: 57017 - DNA, 25 bp, probe
aaggaagtgcattagtagaagccac

SEQ ID NO: 57018 - DNA, 25 bp, probe
gagcaaggaagtgcattagtagaag

SEQ ID NO: 57019 - DNA, 25 bp, probe
gaagagcaaggaagtgcattagtag

SEQ ID NO: 57020 - DNA, 25 bp, probe
aggtcagaaagggatgagtgaagaa

SEQ ID NO: 57021 - DNA, 25 bp, probe
atcaggtcagaaagggatgagtgaa

SEQ ID NO: 57022 - DNA, 25 bp, probe
aatcaggtcagaaagggatgagtga

SEQ ID NO: 57023 - DNA, 25 bp, probe
caatcaggtcagaaagggatgagtg

SEQ ID NO: 57024 - DNA, 25 bp, probe
catcaggttgttgtgaagagcaagg

SEQ ID NO: 57025 - DNA, 25 bp, probe
ccatcaggttgttgtgaagagcaag

SEQ ID NO: 57026 - DNA, 25 bp, probe
aggctatgatgagcagtagtaccag

SEQ ID NO: 57027 - DNA, 25 bp, probe
attcatgcttcttgtggtctggact

SEQ ID NO: 57028 - DNA, 25 bp, probe
attgagaaaactatggactgtgctg

SEQ ID NO: 57029 - DNA, 25 bp, probe
agagcaaggaagtgcattagtagaa

SEQ ID NO: 57030 - DNA, 25 bp, probe
aagagcaaggaagtgcattagtaga

SEQ ID NO: 57031 - DNA, 25 bp, probe
atcaggttgttgtgaagagcaagga

SEQ ID NO: 57032 - DNA, 25 bp, probe
gaggctatgatgagcagtagtacca

SEQ ID NO: 57033 - DNA, 25 bp, probe
tggcttcatgtgaaaggtgattctt

SEQ ID NO: 57034 - DNA, 25 bp, probe
ttggcttcatgtgaaaggtgattct

SEQ ID NO: 57035 - DNA, 25 bp, probe
gtcagaaagggatgagtgaagaagc

SEQ ID NO: 57036 - DNA, 25 bp, probe
ggttgttgtgaagagcaaggaagtg

SEQ ID NO: 57037 - DNA, 25 bp, probe
tgaagagcaaggaagtgcattagta

SEQ ID NO: 57038 - DNA, 25 bp, probe
cattgagaaaactatggactgtgct

SEQ ID NO: 57039 - DNA, 25 bp, probe
agagttgagaaaacaaagcaattca

SEQ ID NO: 57040 - DNA, 25 bp, probe
tcatgtgaaaggtgattcttagaat

SEQ ID NO: 57041 - DNA, 25 bp, probe
aggttgttgtgaagagcaaggaagt

SEQ ID NO: 57042 - DNA, 25 bp, probe
gaggcattgagaaaactatggactg

SEQ ID NO: 57043 - DNA, 25 bp, probe
ataatataccataggaggcacaagc

SEQ ID NO: 57044 - DNA, 25 bp, probe
cacaattcacataacactactgctt

SEQ ID NO: 57045 - DNA, 25 bp, probe
acaataatataccataggaggcaca

SEQ ID NO: 57046 - DNA, 25 bp, probe
ttccacaattcacataacactactg

SEQ ID NO: 57047 - DNA, 25 bp, probe
taatataccataggaggcacaagca

SEQ ID NO: 57048 - DNA, 25 bp, probe
ccacaattcacataacactactgct

SEQ ID NO: 57049 - DNA, 25 bp, probe
tccacaattcacataacactactgc

SEQ ID NO: 57050 - DNA, 25 bp, probe
ataggaggcacaagcaccattatta

SEQ ID NO: 57051 - DNA, 25 bp, probe
ctggtacacttggaagactcttatc

SEQ ID NO: 57052 - DNA, 25 bp, probe
caataatataccataggaggcacaa

SEQ ID NO: 57053 - DNA, 25 bp, probe
ttcaagtgtgagaatgctgtgttaa

SEQ ID NO: 57054 - DNA, 25 bp, probe
ctctgtatgctgtcacacctatatt

SEQ ID NO: 57055 - DNA, 25 bp, probe
taggaggcacaagcaccattattaa

SEQ ID NO: 57056 - DNA, 25 bp, probe
aataatataccataggaggcacaag

SEQ ID NO: 57057 - DNA, 25 bp, probe
tctgtatgctgtcacacctatatta

SEQ ID NO: 57058 - DNA, 25 bp, probe
cacaagcaccattattaagccactt

SEQ ID NO: 57059 - DNA, 25 bp, probe
cctctgtatgctgtcacacctatat

SEQ ID NO: 57060 - DNA, 25 bp, probe
cctggtacacttggaagactcttat

SEQ ID NO: 57061 - DNA, 25 bp, probe
cttgaagagtctgaggaactgaagt

SEQ ID NO: 57062 - DNA, 25 bp, probe
acttgaagagtctgaggaactgaag

SEQ ID NO: 57063 - DNA, 25 bp, probe
aatataccataggaggcacaagcac

SEQ ID NO: 57064 - DNA, 25 bp, probe
tacaataatataccataggaggcac

SEQ ID NO: 57065 - DNA, 25 bp, probe
agctacttatccatctcttgaactt

SEQ ID NO: 57066 - DNA, 25 bp, probe
ctatgttgtcatcacttggtccatg

SEQ ID NO: 57067 - DNA, 25 bp, probe
ttgaagagtctgaggaactgaagtg

SEQ ID NO: 57068 - DNA, 25 bp, probe
ctgtatgctgtcacacctatattat

SEQ ID NO: 57069 - DNA, 25 bp, probe
attcaagtgtgagaatgctgtgtta

SEQ ID NO: 57070 - DNA, 25 bp, probe
tacaattcaagtgtgagaatgctgt

SEQ ID NO: 57071 - DNA, 25 bp, probe
tatctcccataatacgacctacagt

SEQ ID NO: 57072 - DNA, 25 bp, probe
acccacaatcagtaacatccatatt

SEQ ID NO: 57073 - DNA, 25 bp, probe
ctatattcttgactgcatccgctaa

SEQ ID NO: 57074 - DNA, 25 bp, probe
aaatacttctactgtttgggtgtgt

SEQ ID NO: 57075 - DNA, 25 bp, probe
caaacagcctctttcacattacaat

SEQ ID NO: 57076 - DNA, 25 bp, probe
ttacaaacagcctctttcacattac

SEQ ID NO: 57077 - DNA, 25 bp, probe
acttcctgacctttgtatctactct

SEQ ID NO: 57078 - DNA, 25 bp, probe
ctcttatccatctgtgaaaccctat

SEQ ID NO: 57079 - DNA, 25 bp, probe
ccctgcttgtatttatttaccttgg

SEQ ID NO: 57080 - DNA, 25 bp, probe
tgaccctgcttgtatttatttacct

SEQ ID NO: 57081 - DNA, 25 bp, probe
gtgaccctgcttgtatttatttacc

SEQ ID NO: 57082 - DNA, 25 bp, probe
cttcctgacctttgtatctactctt

SEQ ID NO: 57083 - DNA, 25 bp, probe
gacccacaatcagtaacatccatat

SEQ ID NO: 57084 - DNA, 25 bp, probe
actcttatccatctgtgaaacccta

SEQ ID NO: 57085 - DNA, 25 bp, probe
tacaaacagcctctttcacattaca

SEQ ID NO: 57086 - DNA, 25 bp, probe
cctatgttgtcatcacttggtccat

SEQ ID NO: 57087 - DNA, 25 bp, probe
gttacatagccatatccaggtacat

SEQ ID NO: 57088 - DNA, 25 bp, probe
ttacatagccatatccaggtacatc

SEQ ID NO: 57089 - DNA, 25 bp, probe
tgatcggatgttacatagccatatc

SEQ ID NO: 57090 - DNA, 25 bp, probe
ctgatcggatgttacatagccatat

SEQ ID NO: 57091 - DNA, 25 bp, probe
ggtgattctgatcggatgttacata

SEQ ID NO: 57092 - DNA, 25 bp, probe
atgttacatagccatatccaggtac

SEQ ID NO: 57093 - DNA, 25 bp, probe
agaagatcggaagttcgcatatatt

SEQ ID NO: 57094 - DNA, 25 bp, probe
gatgttacatagccatatccaggta

SEQ ID NO: 57095 - DNA, 25 bp, probe
tgattctgatcggatgttacatagc

SEQ ID NO: 57096 - DNA, 25 bp, probe
gagaagatcggaagttcgcatatat

SEQ ID NO: 57097 - DNA, 25 bp, probe
tacatagccatatccaggtacatcc

SEQ ID NO: 57098 - DNA, 25 bp, probe
gtgattctgatcggatgttacatag

SEQ ID NO: 57099 - DNA, 25 bp, probe
caattcataagtcagtcaagccgaa

SEQ ID NO: 57100 - DNA, 25 bp, probe
tctgatcggatgttacatagccata

SEQ ID NO: 57101 - DNA, 25 bp, probe
gattctgatcggatgttacatagcc

SEQ ID NO: 57102 - DNA, 25 bp, probe
gaagatcggaagttcgcatatatta

SEQ ID NO: 57103 - DNA, 25 bp, probe
tgagaagatcggaagttcgcatata

SEQ ID NO: 57104 - DNA, 25 bp, probe
ttctgatcggatgttacatagccat

SEQ ID NO: 57105 - DNA, 25 bp, probe
attctgatcggatgttacatagcca

SEQ ID NO: 57106 - DNA, 25 bp, probe
tgttacatagccatatccaggtaca

SEQ ID NO: 57107 - DNA, 25 bp, probe
aagatcggaagttcgcatatattat

SEQ ID NO: 57108 - DNA, 25 bp, probe
caggcaattcataagtcagtcaagc

SEQ ID NO: 57109 - DNA, 25 bp, probe
gcaggcaattcataagtcagtcaag

SEQ ID NO: 57110 - DNA, 25 bp, probe
tggtgattctgatcggatgttacat

SEQ ID NO: 57111 - DNA, 25 bp, probe
catagccatatccaggtacatccac

SEQ ID NO: 57112 - DNA, 25 bp, probe
tacctgctttctaccatatcacttg

SEQ ID NO: 57113 - DNA, 25 bp, probe
agcaggcaattcataagtcagtcaa

SEQ ID NO: 57114 - DNA, 25 bp, probe
aatccagcaggcaattcataagtca

SEQ ID NO: 57115 - DNA, 25 bp, probe
gatcggaagttcgcatatattatga

SEQ ID NO: 57116 - DNA, 25 bp, probe
ttacctgctttctaccatatcactt

SEQ ID NO: 57117 - DNA, 25 bp, probe
tttacctgctttctaccatatcact

SEQ ID NO: 57118 - DNA, 25 bp, probe
agatcggaagttcgcatatattatg

SEQ ID NO: 57119 - DNA, 25 bp, probe
tctaccatatcacttgtgcagaatt

SEQ ID NO: 57120 - DNA, 25 bp, probe
ctggtgattctgatcggatgttaca

SEQ ID NO: 57121 - DNA, 25 bp, probe
aaatcaaatatcagaaccaggagtg

SEQ ID NO: 57122 - DNA, 25 bp, probe
atagccatatccaggtacatccaca

SEQ ID NO: 57123 - DNA, 25 bp, probe
acatagccatatccaggtacatcca

SEQ ID NO: 57124 - DNA, 25 bp, probe
caacagaggacaatatccatgactg

SEQ ID NO: 57125 - DNA, 25 bp, probe
atgtatacttccatcgtgttccttg

SEQ ID NO: 57126 - DNA, 25 bp, probe
catgtatacttccatcgtgttcctt

SEQ ID NO: 57127 - DNA, 25 bp, probe
ctcattatatttgtggcaagcatct

SEQ ID NO: 57128 - DNA, 25 bp, probe
tctcattatatttgtggcaagcatc

SEQ ID NO: 57129 - DNA, 25 bp, probe
tcggaagttcgcatatattatgatt

SEQ ID NO: 57130 - DNA, 25 bp, probe
gaaagaaatcaaaccaggaataacc

SEQ ID NO: 57131 - DNA, 25 bp, probe
ccatcaagccattcattcattctaa

SEQ ID NO: 57132 - DNA, 25 bp, probe
ttgatgattggtgacatagtaactg

SEQ ID NO: 57133 - DNA, 25 bp, probe
gttgatgattggtgacatagtaact

SEQ ID NO: 57134 - DNA, 25 bp, probe
ctagttagacacaccaagcagattc

SEQ ID NO: 57135 - DNA, 25 bp, probe
tgatgattggtgacatagtaactgt

SEQ ID NO: 57136 - DNA, 25 bp, probe
agtgttgatgattggtgacatagta

SEQ ID NO: 57137 - DNA, 25 bp, probe
tagtgttgatgattggtgacatagt

SEQ ID NO: 57138 - DNA, 25 bp, probe
catcaagccattcattcattctaat

SEQ ID NO: 57139 - DNA, 25 bp, probe
tgttgatgattggtgacatagtaac

SEQ ID NO: 57140 - DNA, 25 bp, probe
gtgttgatgattggtgacatagtaa

SEQ ID NO: 57141 - DNA, 25 bp, probe
aattagtgttgatgattggtgacat

SEQ ID NO: 57142 - DNA, 25 bp, probe
ttagtgttgatgattggtgacatag

SEQ ID NO: 57143 - DNA, 25 bp, probe
attagtgttgatgattggtgacata

SEQ ID NO: 57144 - DNA, 25 bp, probe
cctagttagacacaccaagcagatt

SEQ ID NO: 57145 - DNA, 25 bp, probe
tagttagacacaccaagcagattcg

SEQ ID NO: 57146 - DNA, 25 bp, probe
atcaagccattcattcattctaatt

SEQ ID NO: 57147 - DNA, 25 bp, probe
tgtgaagtgtttccttagaagaaga

SEQ ID NO: 57148 - DNA, 25 bp, probe
attatgggaaatagcaagttgaggg

SEQ ID NO: 57149 - DNA, 25 bp, probe
aattatgggaaatagcaagttgagg

SEQ ID NO: 57150 - DNA, 25 bp, probe
cccatcaagccattcattcattcta

SEQ ID NO: 57151 - DNA, 25 bp, probe
ttgtgaagtgtttccttagaagaag

SEQ ID NO: 57152 - DNA, 25 bp, probe
tttcccatcaagccattcattcatt

SEQ ID NO: 57153 - DNA, 25 bp, probe
gtgaagtgtttccttagaagaagaa

SEQ ID NO: 57154 - DNA, 25 bp, probe
tgttaagatttgtgaagtgtttcct

SEQ ID NO: 57155 - DNA, 25 bp, probe
tttgtgaagtgtttccttagaagaa

SEQ ID NO: 57156 - DNA, 25 bp, probe
atttgtgaagtgtttccttagaaga

SEQ ID NO: 57157 - DNA, 25 bp, probe
agatttgtgaagtgtttccttagaa

SEQ ID NO: 57158 - DNA, 25 bp, probe
aagatttgtgaagtgtttccttaga

SEQ ID NO: 57159 - DNA, 25 bp, probe
tatgggaaatagcaagttgagggaa

SEQ ID NO: 57160 - DNA, 25 bp, probe
ttatgggaaatagcaagttgaggga

SEQ ID NO: 57161 - DNA, 25 bp, probe
gtgttccaaagaatgatgatatgtg

SEQ ID NO: 57162 - DNA, 25 bp, probe
agtgttccaaagaatgatgatatgt

SEQ ID NO: 57163 - DNA, 25 bp, probe
ttcccatcaagccattcattcattc

SEQ ID NO: 57164 - DNA, 25 bp, probe
ctttatcctttgcctgatctcattt

SEQ ID NO: 57165 - DNA, 25 bp, probe
cctttatcctttgcctgatctcatt

SEQ ID NO: 57166 - DNA, 25 bp, probe
gatttgtgaagtgtttccttagaag

SEQ ID NO: 57167 - DNA, 25 bp, probe
tactacccagtctttcttgttatga

SEQ ID NO: 57168 - DNA, 25 bp, probe
aaattagtgttgatgattggtgaca

SEQ ID NO: 57169 - DNA, 25 bp, probe
actacccagtctttcttgttatgac

SEQ ID NO: 57170 - DNA, 25 bp, probe
gttaagatttgtgaagtgtttcctt

SEQ ID NO: 57171 - DNA, 25 bp, probe
atgttaagatttgtgaagtgtttcc

SEQ ID NO: 57172 - DNA, 25 bp, probe
ccagtctttcttgttatgacctcta

SEQ ID NO: 57173 - DNA, 25 bp, probe
gtgtactacccagtctttcttgtta

SEQ ID NO: 57174 - DNA, 25 bp, probe
ctacccagtctttcttgttatgacc

SEQ ID NO: 57175 - DNA, 25 bp, probe
actggattgactggattaagaagaa

SEQ ID NO: 57176 - DNA, 25 bp, probe
aactggattgactggattaagaaga

SEQ ID NO: 57177 - DNA, 25 bp, probe
taccacctgccttaatgtcttctat

SEQ ID NO: 57178 - DNA, 25 bp, probe
ttaccacctgccttaatgtcttcta

SEQ ID NO: 57179 - DNA, 25 bp, probe
caactggattgactggattaagaag

SEQ ID NO: 57180 - DNA, 25 bp, probe
acagttgactacatccttaccaatt

SEQ ID NO: 57181 - DNA, 25 bp, probe
cacagttgactacatccttaccaat

SEQ ID NO: 57182 - DNA, 25 bp, probe
accacctgccttaatgtcttctatt

SEQ ID NO: 57183 - DNA, 25 bp, probe
gattaccacctgccttaatgtcttc

SEQ ID NO: 57184 - DNA, 25 bp, probe
ggtcagccttatagcagcaatagta

SEQ ID NO: 57185 - DNA, 25 bp, probe
gtcagccttatagcagcaatagtac

SEQ ID NO: 57186 - DNA, 25 bp, probe
ttccacagttgactacatccttacc

SEQ ID NO: 57187 - DNA, 25 bp, probe
attaccacctgccttaatgtcttct

SEQ ID NO: 57188 - DNA, 25 bp, probe
cagaagttcatgtgagagccattaa

SEQ ID NO: 57189 - DNA, 25 bp, probe
ccacagttgactacatccttaccaa

SEQ ID NO: 57190 - DNA, 25 bp, probe
ggattaccacctgccttaatgtctt

SEQ ID NO: 57191 - DNA, 25 bp, probe
atactttgaacccttgactctcttt

SEQ ID NO: 57192 - DNA, 25 bp, probe
ataccatactttgaacccttgactc

SEQ ID NO: 57193 - DNA, 25 bp, probe
aataccatactttgaacccttgact

SEQ ID NO: 57194 - DNA, 25 bp, probe
catactttgaacccttgactctctt

SEQ ID NO: 57195 - DNA, 25 bp, probe
actttgaacccttgactctctttaa

SEQ ID NO: 57196 - DNA, 25 bp, probe
ctttgaacccttgactctctttaac

SEQ ID NO: 57197 - DNA, 25 bp, probe
tactttgaacccttgactctcttta

SEQ ID NO: 57198 - DNA, 25 bp, probe
tccacagttgactacatccttacca

SEQ ID NO: 57199 - DNA, 25 bp, probe
ttggtcagccttatagcagcaatag

SEQ ID NO: 57200 - DNA, 25 bp, probe
atttccttgttggtcagccttatag

SEQ ID NO: 57201 - DNA, 25 bp, probe
atttccacagttgactacatcctta

SEQ ID NO: 57202 - DNA, 25 bp, probe
aaataccatactttgaacccttgac

SEQ ID NO: 57203 - DNA, 25 bp, probe
atccttaccaatttagttatcgcca

SEQ ID NO: 57204 - DNA, 25 bp, probe
catccttaccaatttagttatcgcc

SEQ ID NO: 57205 - DNA, 25 bp, probe
tttccacagttgactacatccttac

SEQ ID NO: 57206 - DNA, 25 bp, probe
atcagtgtaatggttgtaaatggca

SEQ ID NO: 57207 - DNA, 25 bp, probe
tttgaacccttgactctctttaacc

SEQ ID NO: 57208 - DNA, 25 bp, probe
ccacctgccttaatgtcttctattt

SEQ ID NO: 57209 - DNA, 25 bp, probe
tgtcccatttattgtgtcactgata

SEQ ID NO: 57210 - DNA, 25 bp, probe
aattgtcccatttattgtgtcactg

SEQ ID NO: 57211 - DNA, 25 bp, probe
catttccttgttggtcagccttata

SEQ ID NO: 57212 - DNA, 25 bp, probe
ccttaccaatttagttatcgccaga

SEQ ID NO: 57213 - DNA, 25 bp, probe
tccttaccaatttagttatcgccag

SEQ ID NO: 57214 - DNA, 25 bp, probe
taccatactttgaacccttgactct

SEQ ID NO: 57215 - DNA, 25 bp, probe
ttagttatcgccagaatttgtttga

SEQ ID NO: 57216 - DNA, 25 bp, probe
gatttccacagttgactacatcctt

SEQ ID NO: 57217 - DNA, 25 bp, probe
aagatttccacagttgactacatcc

SEQ ID NO: 57218 - DNA, 25 bp, probe
aaagatttccacagttgactacatc

SEQ ID NO: 57219 - DNA, 25 bp, probe
ctcaacatgcttctaccaagttatt

SEQ ID NO: 57220 - DNA, 25 bp, probe
actcaacatgcttctaccaagttat

SEQ ID NO: 57221 - DNA, 25 bp, probe
ctctggatgaagtggagaattgaca

SEQ ID NO: 57222 - DNA, 25 bp, probe
tactatttgtcctttctcattgcca

SEQ ID NO: 57223 - DNA, 25 bp, probe
tgcctactatttgtcctttctcatt

SEQ ID NO: 57224 - DNA, 25 bp, probe
ttgcctactatttgtcctttctcat

SEQ ID NO: 57225 - DNA, 25 bp, probe
attgcctactatttgtcctttctca

SEQ ID NO: 57226 - DNA, 25 bp, probe
tccttctcctctttattgcctacta

SEQ ID NO: 57227 - DNA, 25 bp, probe
gtcatttccttccttctcctcttta

SEQ ID NO: 57228 - DNA, 25 bp, probe
ctactatttgtcctttctcattgcc

SEQ ID NO: 57229 - DNA, 25 bp, probe
cctactatttgtcctttctcattgc

SEQ ID NO: 57230 - DNA, 25 bp, probe
gcctactatttgtcctttctcattg

SEQ ID NO: 57231 - DNA, 25 bp, probe
ttctctctgtgtttattagccttcc

SEQ ID NO: 57232 - DNA, 25 bp, probe
ggttctctctgtgtttattagcctt

SEQ ID NO: 57233 - DNA, 25 bp, probe
gcatctctaaaggtgatttggaaag

SEQ ID NO: 57234 - DNA, 25 bp, probe
cttccttctcctctttattgcctac

SEQ ID NO: 57235 - DNA, 25 bp, probe
gttctctctgtgtttattagccttc

SEQ ID NO: 57236 - DNA, 25 bp, probe
ccttctcctctttattgcctactat

SEQ ID NO: 57237 - DNA, 25 bp, probe
tttccttccttctcctctttattgc

SEQ ID NO: 57238 - DNA, 25 bp, probe
cctctttattgcctactatttgtcc

SEQ ID NO: 57239 - DNA, 25 bp, probe
tactttatgccagagacggaattag

SEQ ID NO: 57240 - DNA, 25 bp, probe
ctactttatgccagagacggaatta

SEQ ID NO: 57241 - DNA, 25 bp, probe
ttccttctcctctttattgcctact

SEQ ID NO: 57242 - DNA, 25 bp, probe
tcatttccttccttctcctctttat

SEQ ID NO: 57243 - DNA, 25 bp, probe
tctctctgtgtttattagccttcca

SEQ ID NO: 57244 - DNA, 25 bp, probe
gcttctaccaagttatttctcaacc

SEQ ID NO: 57245 - DNA, 25 bp, probe
tctggatgaagtggagaattgacag

SEQ ID NO: 57246 - DNA, 25 bp, probe
catctctaaaggtgatttggaaagt

SEQ ID NO: 57247 - DNA, 25 bp, probe
aaaggtgatttggaaagtaatgtct

SEQ ID NO: 57248 - DNA, 25 bp, probe
tgcttctaccaagttatttctcaac

SEQ ID NO: 57249 - DNA, 25 bp, probe
tggttctctctgtgtttattagcct

SEQ ID NO: 57250 - DNA, 25 bp, probe
gtggttctctctgtgtttattagcc

SEQ ID NO: 57251 - DNA, 25 bp, probe
actatttgtcctttctcattgccac

SEQ ID NO: 57252 - DNA, 25 bp, probe
ccttccttctcctctttattgccta

SEQ ID NO: 57253 - DNA, 25 bp, probe
atttccttccttctcctctttattg

SEQ ID NO: 57254 - DNA, 25 bp, probe
catttccttccttctcctctttatt

SEQ ID NO: 57255 - DNA, 25 bp, probe
tgtcatttccttccttctcctcttt

SEQ ID NO: 57256 - DNA, 25 bp, probe
tattgcctactatttgtcctttctc

SEQ ID NO: 57257 - DNA, 25 bp, probe
tcctctttattgcctactatttgtc

SEQ ID NO: 57258 - DNA, 25 bp, probe
ccctcaagtcattcatttatcctaa

SEQ ID NO: 57259 - DNA, 25 bp, probe
ctctttattgcctactatttgtcct

SEQ ID NO: 57260 - DNA, 25 bp, probe
ctcctctttattgcctactatttgt

SEQ ID NO: 57261 - DNA, 25 bp, probe
cactgagaatttgaacgctgatttc

SEQ ID NO: 57262 - DNA, 25 bp, probe
cgtggttctctctgtgtttattagc

SEQ ID NO: 57263 - DNA, 25 bp, probe
tgattctgatgatactgctaggaac

SEQ ID NO: 57264 - DNA, 25 bp, probe
gtgattctgatgatactgctaggaa

SEQ ID NO: 57265 - DNA, 25 bp, probe
gattctgatgatactgctaggaacc

SEQ ID NO: 57266 - DNA, 25 bp, probe
attctgatgatactgctaggaacct

SEQ ID NO: 57267 - DNA, 25 bp, probe
ttctgatgatactgctaggaacctt

SEQ ID NO: 57268 - DNA, 25 bp, probe
aagtgattctgatgatactgctagg

SEQ ID NO: 57269 - DNA, 25 bp, probe
agtgattctgatgatactgctagga

SEQ ID NO: 57270 - DNA, 25 bp, probe
tctgatgatactgctaggaaccttg

SEQ ID NO: 57271 - DNA, 25 bp, probe
tgctaggaaccttggtcttcttatt

SEQ ID NO: 57272 - DNA, 25 bp, probe
ctgctaggaaccttggtcttcttat

SEQ ID NO: 57273 - DNA, 25 bp, probe
gatgatactgctaggaaccttggtc

SEQ ID NO: 57274 - DNA, 25 bp, probe
ctgatgatactgctaggaaccttgg

SEQ ID NO: 57275 - DNA, 25 bp, probe
tgaagtggagagtaaacaaagtgat

SEQ ID NO: 57276 - DNA, 25 bp, probe
gatactgctaggaaccttggtcttc

SEQ ID NO: 57277 - DNA, 25 bp, probe
aagtggagagtaaacaaagtgattc

SEQ ID NO: 57278 - DNA, 25 bp, probe
gaagtggagagtaaacaaagtgatt

SEQ ID NO: 57279 - DNA, 25 bp, probe
tcagaacacagtgatctacatgctt

SEQ ID NO: 57280 - DNA, 25 bp, probe
gaccgatatgaaagaaacacaactt

SEQ ID NO: 57281 - DNA, 25 bp, probe
accgatatgaaagaaacacaacttg

SEQ ID NO: 57282 - DNA, 25 bp, probe
atgatactgctaggaaccttggtct

SEQ ID NO: 57283 - DNA, 25 bp, probe
cgatatgaaagaaacacaacttgga

SEQ ID NO: 57284 - DNA, 25 bp, probe
atactgctaggaaccttggtcttct

SEQ ID NO: 57285 - DNA, 25 bp, probe
tggagagtaaacaaagtgattctga

SEQ ID NO: 57286 - DNA, 25 bp, probe
gtggagagtaaacaaagtgattctg

SEQ ID NO: 57287 - DNA, 25 bp, probe
agtggagagtaaacaaagtgattct

SEQ ID NO: 57288 - DNA, 25 bp, probe
ccgatatgaaagaaacacaacttgg

SEQ ID NO: 57289 - DNA, 25 bp, probe
ggaccgatatgaaagaaacacaact

SEQ ID NO: 57290 - DNA, 25 bp, probe
ctggaccgatatgaaagaaacacaa

SEQ ID NO: 57291 - DNA, 25 bp, probe
ttgaagtggagagtaaacaaagtga

SEQ ID NO: 57292 - DNA, 25 bp, probe
tgatactgctaggaaccttggtctt

SEQ ID NO: 57293 - DNA, 25 bp, probe
tgatgatactgctaggaaccttggt

SEQ ID NO: 57294 - DNA, 25 bp, probe
tcttctgattctaggaaacgctaag

SEQ ID NO: 57295 - DNA, 25 bp, probe
actgctaggaaccttggtcttctta

SEQ ID NO: 57296 - DNA, 25 bp, probe
tactgctaggaaccttggtcttctt

SEQ ID NO: 57297 - DNA, 25 bp, probe
acaaagtgattctgatgatactgct

SEQ ID NO: 57298 - DNA, 25 bp, probe
ttcttctgattctaggaaacgctaa

SEQ ID NO: 57299 - DNA, 25 bp, probe
tggaccgatatgaaagaaacacaac

SEQ ID NO: 57300 - DNA, 25 bp, probe
aacaaagtgattctgatgatactgc

SEQ ID NO: 57301 - DNA, 25 bp, probe
cttctgattctaggaaacgctaagt

SEQ ID NO: 57302 - DNA, 25 bp, probe
acttggaatttcagtatgagtgact

SEQ ID NO: 57303 - DNA, 25 bp, probe
tctaggaaacgctaagttaagacag

SEQ ID NO: 57304 - DNA, 25 bp, probe
ttctgattctaggaaacgctaagtt

SEQ ID NO: 57305 - DNA, 25 bp, probe
gctaggaaccttggtcttcttattt

SEQ ID NO: 57306 - DNA, 25 bp, probe
ttctaggaaacgctaagttaagaca

SEQ ID NO: 57307 - DNA, 25 bp, probe
gttgaagagcagaacaaatatggtt

SEQ ID NO: 57308 - DNA, 25 bp, probe
atcttaattctaggaaacagcaagc

SEQ ID NO: 57309 - DNA, 25 bp, probe
cgaatgtgacaggattgagagactc

SEQ ID NO: 57310 - DNA, 25 bp, probe
ggttgaagagcagaacaaatatggt

SEQ ID NO: 57311 - DNA, 25 bp, probe
tggttgaagagcagaacaaatatgg

SEQ ID NO: 57312 - DNA, 25 bp, probe
ctggttgaagagcagaacaaatatg

SEQ ID NO: 57313 - DNA, 25 bp, probe
atcgaatgtgacaggattgagagac

SEQ ID NO: 57314 - DNA, 25 bp, probe
gaatgacaaccacagccatctatcc

SEQ ID NO: 57315 - DNA, 25 bp, probe
ggaatgacaaccacagccatctatc

SEQ ID NO: 57316 - DNA, 25 bp, probe
aacaaatatggttcttcccttcatg

SEQ ID NO: 57317 - DNA, 25 bp, probe
gaatgtgacaggattgagagactcc

SEQ ID NO: 57318 - DNA, 25 bp, probe
tctttcatcatcctctttatcttgt

SEQ ID NO: 57319 - DNA, 25 bp, probe
gcatacattgcgaagattcttaatg

SEQ ID NO: 57320 - DNA, 25 bp, probe
gattgagagactccaacacagaagc

SEQ ID NO: 57321 - DNA, 25 bp, probe
ggattgagagactccaacacagaag

SEQ ID NO: 57322 - DNA, 25 bp, probe
taatcatttccctttggagacacaa

SEQ ID NO: 57323 - DNA, 25 bp, probe
ttaatcatttccctttggagacaca

SEQ ID NO: 57324 - DNA, 25 bp, probe
tttaatcatttccctttggagacac

SEQ ID NO: 57325 - DNA, 25 bp, probe
catacattgcgaagattcttaatga

SEQ ID NO: 57326 - DNA, 25 bp, probe
aactgctgcttatgtttggaatgac

SEQ ID NO: 57327 - DNA, 25 bp, probe
tcttaattctaggaaacagcaagct

SEQ ID NO: 57328 - DNA, 25 bp, probe
aattctaggaaacagcaagctaaag

SEQ ID NO: 57329 - DNA, 25 bp, probe
aactacatatttctctggttgaaga

SEQ ID NO: 57330 - DNA, 25 bp, probe
cttatgtttggaatgacaaccacag

SEQ ID NO: 57331 - DNA, 25 bp, probe
aatcgaatgtgacaggattgagaga

SEQ ID NO: 57332 - DNA, 25 bp, probe
aggattgagagactccaacacagaa

SEQ ID NO: 57333 - DNA, 25 bp, probe
atgtgacaggattgagagactccaa

SEQ ID NO: 57334 - DNA, 25 bp, probe
aatgtgacaggattgagagactcca

SEQ ID NO: 57335 - DNA, 25 bp, probe
cttaattctaggaaacagcaagcta

SEQ ID NO: 57336 - DNA, 25 bp, probe
tcgaatgtgacaggattgagagact

SEQ ID NO: 57337 - DNA, 25 bp, probe
ctgctgcttatgtttggaatgacaa

SEQ ID NO: 57338 - DNA, 25 bp, probe
aatcatttccctttggagacacaac

SEQ ID NO: 57339 - DNA, 25 bp, probe
attctaggaaacagcaagctaaagc

SEQ ID NO: 57340 - DNA, 25 bp, probe
taattctaggaaacagcaagctaaa

SEQ ID NO: 57341 - DNA, 25 bp, probe
ttaattctaggaaacagcaagctaa

SEQ ID NO: 57342 - DNA, 25 bp, probe
acattgcgaagattcttaatgatta

SEQ ID NO: 57343 - DNA, 25 bp, probe
tacattgcgaagattcttaatgatt

SEQ ID NO: 57344 - DNA, 25 bp, probe
tgctgcttatgtttggaatgacaac

SEQ ID NO: 57345 - DNA, 25 bp, probe
ttgcatacattgcgaagattcttaa

SEQ ID NO: 57346 - DNA, 25 bp, probe
tgcatacattgcgaagattcttaat

SEQ ID NO: 57347 - DNA, 25 bp, probe
atacattgcgaagattcttaatgat

SEQ ID NO: 57348 - DNA, 25 bp, probe
tttccaactacatatttctctggtt

SEQ ID NO: 57349 - DNA, 25 bp, probe
ctgcttatgtttggaatgacaacca

SEQ ID NO: 57350 - DNA, 25 bp, probe
atctttcatcatcctctttatcttg

SEQ ID NO: 57351 - DNA, 25 bp, probe
ccagtcttattgtattaaccagcac

SEQ ID NO: 57352 - DNA, 25 bp, probe
tccagtcttattgtattaaccagca

SEQ ID NO: 57353 - DNA, 25 bp, probe
cttattgtattaaccagcactgtgt

SEQ ID NO: 57354 - DNA, 25 bp, probe
gtcttattgtattaaccagcactgt

SEQ ID NO: 57355 - DNA, 25 bp, probe
ttccagtcttattgtattaaccagc

SEQ ID NO: 57356 - DNA, 25 bp, probe
tcttattgtattaaccagcactgtg

SEQ ID NO: 57357 - DNA, 25 bp, probe
tattgtattaaccagcactgtgttc

SEQ ID NO: 57358 - DNA, 25 bp, probe
tgtattaaccagcactgtgttcatt

SEQ ID NO: 57359 - DNA, 25 bp, probe
ttgtattaaccagcactgtgttcat

SEQ ID NO: 57360 - DNA, 25 bp, probe
attgtattaaccagcactgtgttca

SEQ ID NO: 57361 - DNA, 25 bp, probe
ttattgtattaaccagcactgtgtt

SEQ ID NO: 57362 - DNA, 25 bp, probe
cagtcttattgtattaaccagcact

SEQ ID NO: 57363 - DNA, 25 bp, probe
agtcttattgtattaaccagcactg

SEQ ID NO: 57364 - DNA, 25 bp, probe
gaatggcttatccttcatgtcactc

SEQ ID NO: 57365 - DNA, 25 bp, probe
atggcttatccttcatgtcactcat

SEQ ID NO: 57366 - DNA, 25 bp, probe
ttcttctcctcatcttctccatgtg

SEQ ID NO: 57367 - DNA, 25 bp, probe
atgtcactcatgtgttctgattctt

SEQ ID NO: 57368 - DNA, 25 bp, probe
aatggcttatccttcatgtcactca

SEQ ID NO: 57369 - DNA, 25 bp, probe
actttcttcctactctatgccattt

SEQ ID NO: 57370 - DNA, 25 bp, probe
cactttcttcctactctatgccatt

SEQ ID NO: 57371 - DNA, 25 bp, probe
tttcataccctttactttgtccctg

SEQ ID NO: 57372 - DNA, 25 bp, probe
aatgtttcttctcctcatcttctcc

SEQ ID NO: 57373 - DNA, 25 bp, probe
cactcatgtgttctgattcttggaa

SEQ ID NO: 57374 - DNA, 25 bp, probe
tgtcactcatgtgttctgattcttg

SEQ ID NO: 57375 - DNA, 25 bp, probe
atcactttcttcctactctatgcca

SEQ ID NO: 57376 - DNA, 25 bp, probe
caatggatacagaagaaacaagact

SEQ ID NO: 57377 - DNA, 25 bp, probe
tcaatggatacagaagaaacaagac

SEQ ID NO: 57378 - DNA, 25 bp, probe
tcactttcttcctactctatgccat

SEQ ID NO: 57379 - DNA, 25 bp, probe
tgtttcttctcctcatcttctccat

SEQ ID NO: 57380 - DNA, 25 bp, probe
caatgtttcttctcctcatcttctc

SEQ ID NO: 57381 - DNA, 25 bp, probe
gcaatgtttcttctcctcatcttct

SEQ ID NO: 57382 - DNA, 25 bp, probe
gtattaaccagcactgtgttcattt

SEQ ID NO: 57383 - DNA, 25 bp, probe
atgtttcttctcctcatcttctcca

SEQ ID NO: 57384 - DNA, 25 bp, probe
ttcttgtgacttcggtcttcttgtt

SEQ ID NO: 57385 - DNA, 25 bp, probe
gtcactcatgtgttctgattcttgg

SEQ ID NO: 57386 - DNA, 25 bp, probe
gatcactttcttcctactctatgcc

SEQ ID NO: 57387 - DNA, 25 bp, probe
tcactcatgtgttctgattcttgga

SEQ ID NO: 57388 - DNA, 25 bp, probe
aacaagacttgcagttctgattcaa

SEQ ID NO: 57389 - DNA, 25 bp, probe
cctcaggtcacaaagaatttagaga

SEQ ID NO: 57390 - DNA, 25 bp, probe
aatggatacagaagaaacaagactt

SEQ ID NO: 57391 - DNA, 25 bp, probe
atcaatggatacagaagaaacaaga

SEQ ID NO: 57392 - DNA, 25 bp, probe
aggtcacaaagaatttagagaatca

SEQ ID NO: 57393 - DNA, 25 bp, probe
tcaggtcacaaagaatttagagaat

SEQ ID NO: 57394 - DNA, 25 bp, probe
ccctcaggtcacaaagaatttagag

SEQ ID NO: 57395 - DNA, 25 bp, probe
tatacggctttcaacaagaactaca

SEQ ID NO: 57396 - DNA, 25 bp, probe
ctatacggctttcaacaagaactac

SEQ ID NO: 57397 - DNA, 25 bp, probe
tctatacggctttcaacaagaacta

SEQ ID NO: 57398 - DNA, 25 bp, probe
atctatacggctttcaacaagaact

SEQ ID NO: 57399 - DNA, 25 bp, probe
atacggctttcaacaagaactacaa

SEQ ID NO: 57400 - DNA, 25 bp, probe
gatctatacggctttcaacaagaac

SEQ ID NO: 57401 - DNA, 25 bp, probe
tacggctttcaacaagaactacaac

SEQ ID NO: 57402 - DNA, 25 bp, probe
tgatctatacggctttcaacaagaa

SEQ ID NO: 57403 - DNA, 25 bp, probe
ctgatctatacggctttcaacaaga

SEQ ID NO: 57404 - DNA, 25 bp, probe
cctgatctatacggctttcaacaag

SEQ ID NO: 57405 - DNA, 25 bp, probe
gctactccaactccttctttaaccc

SEQ ID NO: 57406 - DNA, 25 bp, probe
ggctactccaactccttctttaacc

SEQ ID NO: 57407 - DNA, 25 bp, probe
cggctttcaacaagaactacaacag

SEQ ID NO: 57408 - DNA, 25 bp, probe
ccctgatctatacggctttcaacaa

SEQ ID NO: 57409 - DNA, 25 bp, probe
tggctactccaactccttctttaac

SEQ ID NO: 57410 - DNA, 25 bp, probe
acggctttcaacaagaactacaaca

SEQ ID NO: 57411 - DNA, 25 bp, probe
gaacttcttttctaggcaacactga

SEQ ID NO: 57412 - DNA, 25 bp, probe
ttcgtgtactggaagatctacaagg

SEQ ID NO: 57413 - DNA, 25 bp, probe
ctactccaactccttctttaacccc

SEQ ID NO: 57414 - DNA, 25 bp, probe
aatagcgtctcacccatatccgaag

SEQ ID NO: 57415 - DNA, 25 bp, probe
cttcgtgtactggaagatctacaag

SEQ ID NO: 57416 - DNA, 25 bp, probe
caatagcgtctcacccatatccgaa

SEQ ID NO: 57417 - DNA, 25 bp, probe
gaagatctacaaggctgccaagttc

SEQ ID NO: 57418 - DNA, 25 bp, probe
gtgtactggaagatctacaaggctg

SEQ ID NO: 57419 - DNA, 25 bp, probe
ggctttcaacaagaactacaacagc

SEQ ID NO: 57420 - DNA, 25 bp, probe
gctttcaacaagaactacaacagcg

SEQ ID NO: 57421 - DNA, 25 bp, probe
agaacttcttttctaggcaacactg

SEQ ID NO: 57422 - DNA, 25 bp, probe
ttggctactccaactccttctttaa

SEQ ID NO: 57423 - DNA, 25 bp, probe
ttcaagaacttcttttctaggcaac

SEQ ID NO: 57424 - DNA, 25 bp, probe
gaccaatagcgtctcacccatatcc

SEQ ID NO: 57425 - DNA, 25 bp, probe
aagaacttcttttctaggcaacact

SEQ ID NO: 57426 - DNA, 25 bp, probe
caagaacttcttttctaggcaacac

SEQ ID NO: 57427 - DNA, 25 bp, probe
tcaagaacttcttttctaggcaaca

SEQ ID NO: 57428 - DNA, 25 bp, probe
cttcaagaacttcttttctaggcaa

SEQ ID NO: 57429 - DNA, 25 bp, probe
ccttcaagaacttcttttctaggca

SEQ ID NO: 57430 - DNA, 25 bp, probe
cttggctactccaactccttcttta

SEQ ID NO: 57431 - DNA, 25 bp, probe
gtactggaagatctacaaggctgcc

SEQ ID NO: 57432 - DNA, 25 bp, probe
cgtgtactggaagatctacaaggct

SEQ ID NO: 57433 - DNA, 25 bp, probe
tcgtgtactggaagatctacaaggc

SEQ ID NO: 57434 - DNA, 25 bp, probe
catatccgaagctgtggaggtgaag

SEQ ID NO: 57435 - DNA, 25 bp, probe
aagatctacaaggctgccaagttcc

SEQ ID NO: 57436 - DNA, 25 bp, probe
ggaagatctacaaggctgccaagtt

SEQ ID NO: 57437 - DNA, 25 bp, probe
cgccttcaagaacttcttttctagg

SEQ ID NO: 57438 - DNA, 25 bp, probe
tgtactggaagatctacaaggctgc

SEQ ID NO: 57439 - DNA, 25 bp, probe
gtcacaacaataacctccatagcac

SEQ ID NO: 57440 - DNA, 25 bp, probe
atgtcacaacaataacctccatagc

SEQ ID NO: 57441 - DNA, 25 bp, probe
acaacaataacctccatagcacctc

SEQ ID NO: 57442 - DNA, 25 bp, probe
catgtcacaacaataacctccatag

SEQ ID NO: 57443 - DNA, 25 bp, probe
cacaacaataacctccatagcacct

SEQ ID NO: 57444 - DNA, 25 bp, probe
tcacaacaataacctccatagcacc

SEQ ID NO: 57445 - DNA, 25 bp, probe
tgtcacaacaataacctccatagca

SEQ ID NO: 57446 - DNA, 25 bp, probe
ttctgtttattgcttacctggcttt

SEQ ID NO: 57447 - DNA, 25 bp, probe
tttctgtttattgcttacctggctt

SEQ ID NO: 57448 - DNA, 25 bp, probe
caacaataacctccatagcacctcc

SEQ ID NO: 57449 - DNA, 25 bp, probe
tttagggaaggagtcaacagtgtaa

SEQ ID NO: 57450 - DNA, 25 bp, probe
ggaaggagtcaacagtgtaactaaa

SEQ ID NO: 57451 - DNA, 25 bp, probe
ctttagggaaggagtcaacagtgta

SEQ ID NO: 57452 - DNA, 25 bp, probe
gaaggagtcaacagtgtaactaaat

SEQ ID NO: 57453 - DNA, 25 bp, probe
ttagggaaggagtcaacagtgtaac

SEQ ID NO: 57454 - DNA, 25 bp, probe
aaggagtcaacagtgtaactaaatt

SEQ ID NO: 57455 - DNA, 25 bp, probe
gggaaggagtcaacagtgtaactaa

SEQ ID NO: 57456 - DNA, 25 bp, probe
gtacttaaataatgtgtgtgtggtt

SEQ ID NO: 57457 - DNA, 25 bp, probe
tgagacagaagaatcgcttgaacct

SEQ ID NO: 57458 - DNA, 25 bp, probe
tacttaaataatgtgtgtgtggttt

SEQ ID NO: 57459 - DNA, 25 bp, probe
agggaaggagtcaacagtgtaacta

SEQ ID NO: 57460 - DNA, 25 bp, probe
tagggaaggagtcaacagtgtaact

SEQ ID NO: 57461 - DNA, 25 bp, probe
gagacagaagaatcgcttgaacctg

SEQ ID NO: 57462 - DNA, 25 bp, probe
ctgagacagaagaatcgcttgaacc

SEQ ID NO: 57463 - DNA, 25 bp, probe
cagaagaatcgcttgaacctgtgag

SEQ ID NO: 57464 - DNA, 25 bp, probe
aataatgtgtgtgtggttttccttt

SEQ ID NO: 57465 - DNA, 25 bp, probe
aaataatgtgtgtgtggttttcctt

SEQ ID NO: 57466 - DNA, 25 bp, probe
tgttttctgtttattgcttacctgg

SEQ ID NO: 57467 - DNA, 25 bp, probe
aatccctcacttttgttttctgttt

SEQ ID NO: 57468 - DNA, 25 bp, probe
ataatgtgtgtgtggttttcctttg

SEQ ID NO: 57469 - DNA, 25 bp, probe
aaatccctcacttttgttttctgtt

SEQ ID NO: 57470 - DNA, 25 bp, probe
tatgatgaaaccccgtctctactaa

SEQ ID NO: 57471 - DNA, 25 bp, probe
atatgatgaaaccccgtctctacta

SEQ ID NO: 57472 - DNA, 25 bp, probe
taaataatgtgtgtgtggttttcct

SEQ ID NO: 57473 - DNA, 25 bp, probe
aggagtcaacagtgtaactaaattt

SEQ ID NO: 57474 - DNA, 25 bp, probe
tccctcacttttgttttctgtttat

SEQ ID NO: 57475 - DNA, 25 bp, probe
atccctcacttttgttttctgttta

SEQ ID NO: 57476 - DNA, 25 bp, probe
aatatgatgaaaccccgtctctact

SEQ ID NO: 57477 - DNA, 25 bp, probe
caatatgatgaaaccccgtctctac

SEQ ID NO: 57478 - DNA, 25 bp, probe
ggagtcaacagtgtaactaaatttc

SEQ ID NO: 57479 - DNA, 25 bp, probe
tctgtttattgcttacctggctttt

SEQ ID NO: 57480 - DNA, 25 bp, probe
ttttctgtttattgcttacctggct

SEQ ID NO: 57481 - DNA, 25 bp, probe
gttttctgtttattgcttacctggc

SEQ ID NO: 57482 - DNA, 25 bp, probe
atgatgaaaccccgtctctactaaa

SEQ ID NO: 57483 - DNA, 25 bp, probe
ctcctcttctacctgaacttccttg

SEQ ID NO: 57484 - DNA, 25 bp, probe
cctcttctacctgaacttccttgtc

SEQ ID NO: 57485 - DNA, 25 bp, probe
tcctcttctacctgaacttccttgt

SEQ ID NO: 57486 - DNA, 25 bp, probe
ctcttctacctgaacttccttgtcg

SEQ ID NO: 57487 - DNA, 25 bp, probe
cttctacctgaacttccttgtcgtg

SEQ ID NO: 57488 - DNA, 25 bp, probe
tcttctacctgaacttccttgtcgt

SEQ ID NO: 57489 - DNA, 25 bp, probe
gctcctcttctacctgaacttcctt

SEQ ID NO: 57490 - DNA, 25 bp, probe
ctcaactgtctgcatctggttatca

SEQ ID NO: 57491 - DNA, 25 bp, probe
gaatttctccttgccacgttaataa

SEQ ID NO: 57492 - DNA, 25 bp, probe
gggacctatggtgtctatgagatag

SEQ ID NO: 57493 - DNA, 25 bp, probe
aatttctccttgccacgttaataaa

SEQ ID NO: 57494 - DNA, 25 bp, probe
tgaatttctccttgccacgttaata

SEQ ID NO: 57495 - DNA, 25 bp, probe
atttctccttgccacgttaataaag

SEQ ID NO: 57496 - DNA, 25 bp, probe
ctgctcctcttctacctgaacttcc

SEQ ID NO: 57497 - DNA, 25 bp, probe
cctgctcctcttctacctgaacttc

SEQ ID NO: 57498 - DNA, 25 bp, probe
tcaactgtctgcatctggttatcag

SEQ ID NO: 57499 - DNA, 25 bp, probe
ttgaatttctccttgccacgttaat

SEQ ID NO: 57500 - DNA, 25 bp, probe
ttctacctgaacttccttgtcgtgg

SEQ ID NO: 57501 - DNA, 25 bp, probe
tttgaatttctccttgccacgttaa

SEQ ID NO: 57502 - DNA, 25 bp, probe
cctcaactgtctgcatctggttatc

SEQ ID NO: 57503 - DNA, 25 bp, probe
tgctcctcttctacctgaacttcct

SEQ ID NO: 57504 - DNA, 25 bp, probe
cacaaacagaattcgagacatactt

SEQ ID NO: 57505 - DNA, 25 bp, probe
tttctccttgccacgttaataaagc

SEQ ID NO: 57506 - DNA, 25 bp, probe
ctatggtgtctatgagataggcggc

SEQ ID NO: 57507 - DNA, 25 bp, probe
ccacaaacagaattcgagacatact

SEQ ID NO: 57508 - DNA, 25 bp, probe
ggttccagagagaagctagaagtcc

SEQ ID NO: 57509 - DNA, 25 bp, probe
aaagggttccagagagaagctagaa

SEQ ID NO: 57510 - DNA, 25 bp, probe
acaaacagaattcgagacatactta

SEQ ID NO: 57511 - DNA, 25 bp, probe
taattttgaatttctccttgccacg

SEQ ID NO: 57512 - DNA, 25 bp, probe
ttaattttgaatttctccttgccac

SEQ ID NO: 57513 - DNA, 25 bp, probe
cttaattttgaatttctccttgcca

SEQ ID NO: 57514 - DNA, 25 bp, probe
acttaattttgaatttctccttgcc

SEQ ID NO: 57515 - DNA, 25 bp, probe
aagggttccagagagaagctagaag

SEQ ID NO: 57516 - DNA, 25 bp, probe
gccacaaacagaattcgagacatac

SEQ ID NO: 57517 - DNA, 25 bp, probe
aacagaattcgagacatacttaatt

SEQ ID NO: 57518 - DNA, 25 bp, probe
caaagggttccagagagaagctaga

SEQ ID NO: 57519 - DNA, 25 bp, probe
caactgtctgcatctggttatcagc

SEQ ID NO: 57520 - DNA, 25 bp, probe
caaacagaattcgagacatacttaa

SEQ ID NO: 57521 - DNA, 25 bp, probe
tgccacaaacagaattcgagacata

SEQ ID NO: 57522 - DNA, 25 bp, probe
aatttggagtgattcacctgaaaag

SEQ ID NO: 57523 - DNA, 25 bp, probe
acaaagggttccagagagaagctag

SEQ ID NO: 57524 - DNA, 25 bp, probe
gacaaagggttccagagagaagcta

SEQ ID NO: 57525 - DNA, 25 bp, probe
atcatcttcaacatcctcgtgggtg

SEQ ID NO: 57526 - DNA, 25 bp, probe
catcatcttcaacatcctcgtgggt

SEQ ID NO: 57527 - DNA, 25 bp, probe
ttcagcaactacaggagatatgatg

SEQ ID NO: 57528 - DNA, 25 bp, probe
cttcagcaactacaggagatatgat

SEQ ID NO: 57529 - DNA, 25 bp, probe
aagaagtgattgagccacaagtata

SEQ ID NO: 57530 - DNA, 25 bp, probe
taagaagtgattgagccacaagtat

SEQ ID NO: 57531 - DNA, 25 bp, probe
ataagaagtgattgagccacaagta

SEQ ID NO: 57532 - DNA, 25 bp, probe
cataagaagtgattgagccacaagt

SEQ ID NO: 57533 - DNA, 25 bp, probe
gtgaatgtcatctcaacaacctcag

SEQ ID NO: 57534 - DNA, 25 bp, probe
ctgtgaatgtcatctcaacaacctc

SEQ ID NO: 57535 - DNA, 25 bp, probe
aacagcataagaagtgattgagcca

SEQ ID NO: 57536 - DNA, 25 bp, probe
caactacaggagatatgatgcctca

SEQ ID NO: 57537 - DNA, 25 bp, probe
ccttcagcaactacaggagatatga

SEQ ID NO: 57538 - DNA, 25 bp, probe
ctcatttctttcttcaccttcactg

SEQ ID NO: 57539 - DNA, 25 bp, probe
gaagagataaatcaccagtcacaga

SEQ ID NO: 57540 - DNA, 25 bp, probe
gagttgtggtgtgaagagataaatc

SEQ ID NO: 57541 - DNA, 25 bp, probe
tgtgaatgtcatctcaacaacctca

SEQ ID NO: 57542 - DNA, 25 bp, probe
ctttccaaacagcataagaagtgat

SEQ ID NO: 57543 - DNA, 25 bp, probe
cgagttgtggtgtgaagagataaat

SEQ ID NO: 57544 - DNA, 25 bp, probe
tttccaaacagcataagaagtgatt

SEQ ID NO: 57545 - DNA, 25 bp, probe
ttccaaacagcataagaagtgattg

SEQ ID NO: 57546 - DNA, 25 bp, probe
ccaaacagcataagaagtgattgag

SEQ ID NO: 57547 - DNA, 25 bp, probe
ccagtagtcattgtttacagcaaat

SEQ ID NO: 57548 - DNA, 25 bp, probe
gctcatttctttcttcaccttcact

SEQ ID NO: 57549 - DNA, 25 bp, probe
agttgtggtgtgaagagataaatca

SEQ ID NO: 57550 - DNA, 25 bp, probe
tccaaacagcataagaagtgattga

SEQ ID NO: 57551 - DNA, 25 bp, probe
catttctttcttcaccttcactgac

SEQ ID NO: 57552 - DNA, 25 bp, probe
tcatttctttcttcaccttcactga

SEQ ID NO: 57553 - DNA, 25 bp, probe
tgaagagataaatcaccagtcacag

SEQ ID NO: 57554 - DNA, 25 bp, probe
caaacagcataagaagtgattgagc

SEQ ID NO: 57555 - DNA, 25 bp, probe
attcatcttctgctatatactccaa

SEQ ID NO: 57556 - DNA, 25 bp, probe
aattcatcttctgctatatactcca

SEQ ID NO: 57557 - DNA, 25 bp, probe
gcataagaagtgattgagccacaag

SEQ ID NO: 57558 - DNA, 25 bp, probe
tgacctatagagattccaaggagaa

SEQ ID NO: 57559 - DNA, 25 bp, probe
aaacagcataagaagtgattgagcc

SEQ ID NO: 57560 - DNA, 25 bp, probe
ttcaggtgacctatagagattccaa

SEQ ID NO: 57561 - DNA, 25 bp, probe
gtgacctatagagattccaaggaga

SEQ ID NO: 57562 - DNA, 25 bp, probe
tcaggtgacctatagagattccaag

SEQ ID NO: 57563 - DNA, 25 bp, probe
cttcaggtgacctatagagattcca

SEQ ID NO: 57564 - DNA, 25 bp, probe
cccagtagtcattgtttacagcaaa

SEQ ID NO: 57565 - DNA, 25 bp, probe
aactacaggagatatgatgcctcat

SEQ ID NO: 57566 - DNA, 25 bp, probe
aagagataaatcaccagtcacagac

SEQ ID NO: 57567 - DNA, 25 bp, probe
atttctttcttcaccttcactgacg

SEQ ID NO: 57568 - DNA, 25 bp, probe
agcataagaagtgattgagccacaa

SEQ ID NO: 57569 - DNA, 25 bp, probe
aagctgtgaatgtcatctcaacaac

SEQ ID NO: 57570 - DNA, 25 bp, probe
caagctgtgaatgtcatctcaacaa

SEQ ID NO: 57571 - DNA, 25 bp, probe
cagatcaagtccagatgccaagatc

SEQ ID NO: 57572 - DNA, 25 bp, probe
atcaagtccagatgccaagatcctg

SEQ ID NO: 57573 - DNA, 25 bp, probe
aatagcaaccataactgccactgtg

SEQ ID NO: 57574 - DNA, 25 bp, probe
caatagcaaccataactgccactgt

SEQ ID NO: 57575 - DNA, 25 bp, probe
gatcaagtccagatgccaagatcct

SEQ ID NO: 57576 - DNA, 25 bp, probe
agatcaagtccagatgccaagatcc

SEQ ID NO: 57577 - DNA, 25 bp, probe
gcaatagcaaccataactgccactg

SEQ ID NO: 57578 - DNA, 25 bp, probe
gcagatcaagtccagatgccaagat

SEQ ID NO: 57579 - DNA, 25 bp, probe
aagcagatcaagtccagatgccaag

SEQ ID NO: 57580 - DNA, 25 bp, probe
tgcaatagcaaccataactgccact

SEQ ID NO: 57581 - DNA, 25 bp, probe
gggtttgcaatagcaaccataactg

SEQ ID NO: 57582 - DNA, 25 bp, probe
ttgcaatagcaaccataactgccac

SEQ ID NO: 57583 - DNA, 25 bp, probe
gtttgcaatagcaaccataactgcc

SEQ ID NO: 57584 - DNA, 25 bp, probe
ggtttgcaatagcaaccataactgc

SEQ ID NO: 57585 - DNA, 25 bp, probe
tttgcaatagcaaccataactgcca

SEQ ID NO: 57586 - DNA, 25 bp, probe
ggggtttgcaatagcaaccataact

SEQ ID NO: 57587 - DNA, 25 bp, probe
cggggtttgcaatagcaaccataac

SEQ ID NO: 57588 - DNA, 25 bp, probe
ctgaactccaagataaagacaccat

SEQ ID NO: 57589 - DNA, 25 bp, probe
cactgaactccaagataaagacacc

SEQ ID NO: 57590 - DNA, 25 bp, probe
ccactgaactccaagataaagacac

SEQ ID NO: 57591 - DNA, 25 bp, probe
actgaactccaagataaagacacca

SEQ ID NO: 57592 - DNA, 25 bp, probe
gaactccaagataaagacaccatga

SEQ ID NO: 57593 - DNA, 25 bp, probe
tgaactccaagataaagacaccatg

SEQ ID NO: 57594 - DNA, 25 bp, probe
ctggaagtacaaggactcatctgtg

SEQ ID NO: 57595 - DNA, 25 bp, probe
gaagtacaaggactcatctgtggtc

SEQ ID NO: 57596 - DNA, 25 bp, probe
aactccaagataaagacaccatgag

SEQ ID NO: 57597 - DNA, 25 bp, probe
gccactgaactccaagataaagaca

SEQ ID NO: 57598 - DNA, 25 bp, probe
actccaagataaagacaccatgagg

SEQ ID NO: 57599 - DNA, 25 bp, probe
cctggaagtacaaggactcatctgt

SEQ ID NO: 57600 - DNA, 25 bp, probe
ggaagtacaaggactcatctgtggt

SEQ ID NO: 57601 - DNA, 25 bp, probe
tggaagtacaaggactcatctgtgg

SEQ ID NO: 57602 - DNA, 25 bp, probe
tgaaaccccacctctactaaaatta

SEQ ID NO: 57603 - DNA, 25 bp, probe
ctccaagataaagacaccatgaggg

SEQ ID NO: 57604 - DNA, 25 bp, probe
gaaaccccacctctactaaaattaa

SEQ ID NO: 57605 - DNA, 25 bp, probe
aaccccacctctactaaaattaaaa

SEQ ID NO: 57606 - DNA, 25 bp, probe
aaaccccacctctactaaaattaaa

SEQ ID NO: 57607 - DNA, 25 bp, probe
gtgaaaccccacctctactaaaatt

SEQ ID NO: 57608 - DNA, 25 bp, probe
gcaaggtgagagttaaggatcttgg

SEQ ID NO: 57609 - DNA, 25 bp, probe
ggcaaggtgagagttaaggatcttg

SEQ ID NO: 57610 - DNA, 25 bp, probe
gggcaaggtgagagttaaggatctt

SEQ ID NO: 57611 - DNA, 25 bp, probe
gacttccagagacatggctcagatc

SEQ ID NO: 57612 - DNA, 25 bp, probe
agagacatggctcagatcctggatt

SEQ ID NO: 57613 - DNA, 25 bp, probe
caagataaagacaccatgaggggac

SEQ ID NO: 57614 - DNA, 25 bp, probe
ccctggaagtacaaggactcatctg

SEQ ID NO: 57615 - DNA, 25 bp, probe
aagataaagacaccatgaggggact

SEQ ID NO: 57616 - DNA, 25 bp, probe
caaggtgagagttaaggatcttggg

SEQ ID NO: 57617 - DNA, 25 bp, probe
gagacatggctcagatcctggattt

SEQ ID NO: 57618 - DNA, 25 bp, probe
ggccactgaactccaagataaagac

SEQ ID NO: 57619 - DNA, 25 bp, probe
ataaagacaccatgaggggactgaa

SEQ ID NO: 57620 - DNA, 25 bp, probe
gaaggtgggcaaggtgagagttaag

SEQ ID NO: 57621 - DNA, 25 bp, probe
agacatggctcagatcctggatttg

SEQ ID NO: 57622 - DNA, 25 bp, probe
gtgggcaaggtgagagttaaggatc

SEQ ID NO: 57623 - DNA, 25 bp, probe
gtgacagagtgagactccaactcaa

SEQ ID NO: 57624 - DNA, 25 bp, probe
aaggtgagagttaaggatcttgggg

SEQ ID NO: 57625 - DNA, 25 bp, probe
gataaagacaccatgaggggactga

SEQ ID NO: 57626 - DNA, 25 bp, probe
agataaagacaccatgaggggactg

SEQ ID NO: 57627 - DNA, 25 bp, probe
tgggcaaggtgagagttaaggatct

SEQ ID NO: 57628 - DNA, 25 bp, probe
taaagacaccatgaggggactgaag

SEQ ID NO: 57629 - DNA, 25 bp, probe
ccaagataaagacaccatgagggga

SEQ ID NO: 57630 - DNA, 25 bp, probe
tccaagataaagacaccatgagggg

SEQ ID NO: 57631 - DNA, 25 bp, probe
gagagttaaggatcttggggaggtg

SEQ ID NO: 57632 - DNA, 25 bp, probe
tgtatgtatgtgtgtgagcagtgta

SEQ ID NO: 57633 - DNA, 25 bp, probe
gtatgtatgtgtgtgagcagtgtaa

SEQ ID NO: 57634 - DNA, 25 bp, probe
gctgatctactactggaggattaag

SEQ ID NO: 57635 - DNA, 25 bp, probe
cattgaatccgctgatctactactg

SEQ ID NO: 57636 - DNA, 25 bp, probe
cgctgatctactactggaggattaa

SEQ ID NO: 57637 - DNA, 25 bp, probe
gtgtatgtatgtgtgtgagcagtgt

SEQ ID NO: 57638 - DNA, 25 bp, probe
tgtgtatgtatgtgtgtgagcagtg

SEQ ID NO: 57639 - DNA, 25 bp, probe
ttgtgtatgtatgtgtgtgagcagt

SEQ ID NO: 57640 - DNA, 25 bp, probe
ctgatctactactggaggattaaga

SEQ ID NO: 57641 - DNA, 25 bp, probe
attgaatccgctgatctactactgg

SEQ ID NO: 57642 - DNA, 25 bp, probe
gtgaatattggaactggctgacatt

SEQ ID NO: 57643 - DNA, 25 bp, probe
tgagcagtgtaaagaaagaatggta

SEQ ID NO: 57644 - DNA, 25 bp, probe
tatgtatgtgtgtgagcagtgtaaa

SEQ ID NO: 57645 - DNA, 25 bp, probe
atagggtttgtgtatgtatgtgtgt

SEQ ID NO: 57646 - DNA, 25 bp, probe
ctttctcatagcctctccactttat

SEQ ID NO: 57647 - DNA, 25 bp, probe
tgatctactactggaggattaagaa

SEQ ID NO: 57648 - DNA, 25 bp, probe
tttgggtgatgcttgttctttattg

SEQ ID NO: 57649 - DNA, 25 bp, probe
gtgtgagcagtgtaaagaaagaatg

SEQ ID NO: 57650 - DNA, 25 bp, probe
tatgtgtgtgagcagtgtaaagaaa

SEQ ID NO: 57651 - DNA, 25 bp, probe
ttctcatagcctctccactttattt

SEQ ID NO: 57652 - DNA, 25 bp, probe
tttctcatagcctctccactttatt

SEQ ID NO: 57653 - DNA, 25 bp, probe
gagcagtgtaaagaaagaatggtaa

SEQ ID NO: 57654 - DNA, 25 bp, probe
tctttctcatagcctctccacttta

SEQ ID NO: 57655 - DNA, 25 bp, probe
tagggtttgtgtatgtatgtgtgtg

SEQ ID NO: 57656 - DNA, 25 bp, probe
tgtgtgagcagtgtaaagaaagaat

SEQ ID NO: 57657 - DNA, 25 bp, probe
gcagttacattgaattgtaggtgtt

SEQ ID NO: 57658 - DNA, 25 bp, probe
ttgggtgatgcttgttctttattga

SEQ ID NO: 57659 - DNA, 25 bp, probe
gcattgaatccgctgatctactact

SEQ ID NO: 57660 - DNA, 25 bp, probe
agcagtgtaaagaaagaatggtaat

SEQ ID NO: 57661 - DNA, 25 bp, probe
gtatgtgtgtgagcagtgtaaagaa

SEQ ID NO: 57662 - DNA, 25 bp, probe
atgtatgtgtgtgagcagtgtaaag

SEQ ID NO: 57663 - DNA, 25 bp, probe
aattctctttctcatagcctctcca

SEQ ID NO: 57664 - DNA, 25 bp, probe
acatgatgcctaagtccttcaagtt

SEQ ID NO: 57665 - DNA, 25 bp, probe
gtgagcagtgtaaagaaagaatggt

SEQ ID NO: 57666 - DNA, 25 bp, probe
tgtgagcagtgtaaagaaagaatgg

SEQ ID NO: 57667 - DNA, 25 bp, probe
tttgtgtatgtatgtgtgtgagcag

SEQ ID NO: 57668 - DNA, 25 bp, probe
ccgctgatctactactggaggatta

SEQ ID NO: 57669 - DNA, 25 bp, probe
tatagggtttgtgtatgtatgtgtg

SEQ ID NO: 57670 - DNA, 25 bp, probe
attctctttctcatagcctctccac

SEQ ID NO: 57671 - DNA, 25 bp, probe
cattgaattgtaggtgtttcgtgtg

SEQ ID NO: 57672 - DNA, 25 bp, probe
tttcatagtgggaatcaggattgtg

SEQ ID NO: 57673 - DNA, 25 bp, probe
gtgtgtgagcagtgtaaagaaagaa

SEQ ID NO: 57674 - DNA, 25 bp, probe
atgtgtgtgagcagtgtaaagaaag

SEQ ID NO: 57675 - DNA, 25 bp, probe
tgggtgatgcttgttctttattgac

SEQ ID NO: 57676 - DNA, 25 bp, probe
ttacacattgaggaataaggacatc

SEQ ID NO: 57677 - DNA, 25 bp, probe
tacacattgaggaataaggacatca

SEQ ID NO: 57678 - DNA, 25 bp, probe
cagttattctgagcaaggttctatg

SEQ ID NO: 57679 - DNA, 25 bp, probe
cataatctccaccatcttgaggatc

SEQ ID NO: 57680 - DNA, 25 bp, probe
aagataggttggtttcagtgttgta

SEQ ID NO: 57681 - DNA, 25 bp, probe
gtggcaacaatcagattaattactt

SEQ ID NO: 57682 - DNA, 25 bp, probe
tgtggcaacaatcagattaattact

SEQ ID NO: 57683 - DNA, 25 bp, probe
aaagataggttggtttcagtgttgt

SEQ ID NO: 57684 - DNA, 25 bp, probe
gcccatctcaacttactcattaaag

SEQ ID NO: 57685 - DNA, 25 bp, probe
tggcaacaatcagattaattacttc

SEQ ID NO: 57686 - DNA, 25 bp, probe
ctgtggcaacaatcagattaattac

SEQ ID NO: 57687 - DNA, 25 bp, probe
actcctttcctttgtatcgtacttt

SEQ ID NO: 57688 - DNA, 25 bp, probe
gactcctttcctttgtatcgtactt

SEQ ID NO: 57689 - DNA, 25 bp, probe
tgaggaataaggacatcaaagaagc

SEQ ID NO: 57690 - DNA, 25 bp, probe
gcataatctccaccatcttgaggat

SEQ ID NO: 57691 - DNA, 25 bp, probe
cctttcctttgtatcgtactttcct

SEQ ID NO: 57692 - DNA, 25 bp, probe
tcctttcctttgtatcgtactttcc

SEQ ID NO: 57693 - DNA, 25 bp, probe
ctcctttcctttgtatcgtactttc

SEQ ID NO: 57694 - DNA, 25 bp, probe
agataggttggtttcagtgttgtac

SEQ ID NO: 57695 - DNA, 25 bp, probe
tttacacattgaggaataaggacat

SEQ ID NO: 57696 - DNA, 25 bp, probe
atttacacattgaggaataaggaca

SEQ ID NO: 57697 - DNA, 25 bp, probe
ggcaacaatcagattaattacttct

SEQ ID NO: 57698 - DNA, 25 bp, probe
cccatctcaacttactcattaaaga

SEQ ID NO: 57699 - DNA, 25 bp, probe
tttcctttgtatcgtactttcctac

SEQ ID NO: 57700 - DNA, 25 bp, probe
acacattgaggaataaggacatcaa

SEQ ID NO: 57701 - DNA, 25 bp, probe
actcattaaagaaagataggttggt

SEQ ID NO: 57702 - DNA, 25 bp, probe
ctttcctttgtatcgtactttccta

SEQ ID NO: 57703 - DNA, 25 bp, probe
agttattctgagcaaggttctatgc

SEQ ID NO: 57704 - DNA, 25 bp, probe
ttccttaactcagtggtgcatacag

SEQ ID NO: 57705 - DNA, 25 bp, probe
gaggaataaggacatcaaagaagct

SEQ ID NO: 57706 - DNA, 25 bp, probe
tggaaacacttctgtcaatgagttg

SEQ ID NO: 57707 - DNA, 25 bp, probe
ctttgctgatcttgtcttgtggaaa

SEQ ID NO: 57708 - DNA, 25 bp, probe
ttaattacttcttctgtgacatccc

SEQ ID NO: 57709 - DNA, 25 bp, probe
aggaataaggacatcaaagaagctg

SEQ ID NO: 57710 - DNA, 25 bp, probe
attaattacttcttctgtgacatcc

SEQ ID NO: 57711 - DNA, 25 bp, probe
tcctctttggatagtaaactcactt

SEQ ID NO: 57712 - DNA, 25 bp, probe
ttcctctttggatagtaaactcact

SEQ ID NO: 57713 - DNA, 25 bp, probe
cccatgctaaaccctataatttaca

SEQ ID NO: 57714 - DNA, 25 bp, probe
ttaactcagtggtgcatacagtgtt

SEQ ID NO: 57715 - DNA, 25 bp, probe
atcttgtcttgtggaaacacttctg

SEQ ID NO: 57716 - DNA, 25 bp, probe
cctctttggatagtaaactcactta

SEQ ID NO: 57717 - DNA, 25 bp, probe
tttgctgatcttgtcttgtggaaac

SEQ ID NO: 57718 - DNA, 25 bp, probe
tacatttgcataatctccaccatct

SEQ ID NO: 57719 - DNA, 25 bp, probe
ctacatttgcataatctccaccatc

SEQ ID NO: 57720 - DNA, 25 bp, probe
ccttgattcatcttgtgttacttct

SEQ ID NO: 57721 - DNA, 25 bp, probe
tccttgattcatcttgtgttacttc

SEQ ID NO: 57722 - DNA, 25 bp, probe
tgtagtcttaggaactcagaagtga

SEQ ID NO: 57723 - DNA, 25 bp, probe
tgattcatcttgtgttacttctacc

SEQ ID NO: 57724 - DNA, 25 bp, probe
gtagtcttaggaactcagaagtgaa

SEQ ID NO: 57725 - DNA, 25 bp, probe
tagtcttaggaactcagaagtgaag

SEQ ID NO: 57726 - DNA, 25 bp, probe
gattcatcttgtgttacttctacct

SEQ ID NO: 57727 - DNA, 25 bp, probe
atccttgattcatcttgtgttactt

SEQ ID NO: 57728 - DNA, 25 bp, probe
taggaactcagaagtgaagaatact

SEQ ID NO: 57729 - DNA, 25 bp, probe
ctgtagtcttaggaactcagaagtg

SEQ ID NO: 57730 - DNA, 25 bp, probe
attcatcttgtgttacttctacctt

SEQ ID NO: 57731 - DNA, 25 bp, probe
gtgctatccttcagatccaatcaag

SEQ ID NO: 57732 - DNA, 25 bp, probe
tgtgctatccttcagatccaatcaa

SEQ ID NO: 57733 - DNA, 25 bp, probe
tatccttgattcatcttgtgttact

SEQ ID NO: 57734 - DNA, 25 bp, probe
ttaggaactcagaagtgaagaatac

SEQ ID NO: 57735 - DNA, 25 bp, probe
ccttatctgtagtcttaggaactca

SEQ ID NO: 57736 - DNA, 25 bp, probe
cttaggaactcagaagtgaagaata

SEQ ID NO: 57737 - DNA, 25 bp, probe
ggtggtgatgtcctatgatctgtac

SEQ ID NO: 57738 - DNA, 25 bp, probe
tgtgttacttctacctttacccttc

SEQ ID NO: 57739 - DNA, 25 bp, probe
cttgtgttacttctacctttaccct

SEQ ID NO: 57740 - DNA, 25 bp, probe
tcttgtgttacttctacctttaccc

SEQ ID NO: 57741 - DNA, 25 bp, probe
gttacttctacctttacccttctgt

SEQ ID NO: 57742 - DNA, 25 bp, probe
tgttacttctacctttacccttctg

SEQ ID NO: 57743 - DNA, 25 bp, probe
gtgttacttctacctttacccttct

SEQ ID NO: 57744 - DNA, 25 bp, probe
ttgtgttacttctacctttaccctt

SEQ ID NO: 57745 - DNA, 25 bp, probe
ttgattcatcttgtgttacttctac

SEQ ID NO: 57746 - DNA, 25 bp, probe
gtggtgatgtcctatgatctgtacg

SEQ ID NO: 57747 - DNA, 25 bp, probe
tggtggtgatgtcctatgatctgta

SEQ ID NO: 57748 - DNA, 25 bp, probe
ttatccttgattcatcttgtgttac

SEQ ID NO: 57749 - DNA, 25 bp, probe
cacatcaatgagaacatggtcttgg

SEQ ID NO: 57750 - DNA, 25 bp, probe
cagatacccacatcaatgagaacat

SEQ ID NO: 57751 - DNA, 25 bp, probe
cttatctgtagtcttaggaactcag

SEQ ID NO: 57752 - DNA, 25 bp, probe
tgaagaatactttgaagagagtgct

SEQ ID NO: 57753 - DNA, 25 bp, probe
gtgaagaatactttgaagagagtgc

SEQ ID NO: 57754 - DNA, 25 bp, probe
gtcttaggaactcagaagtgaagaa

SEQ ID NO: 57755 - DNA, 25 bp, probe
acagccattatcatgtatgttggac

SEQ ID NO: 57756 - DNA, 25 bp, probe
cacagccattatcatgtatgttgga

SEQ ID NO: 57757 - DNA, 25 bp, probe
cttgattcatcttgtgttacttcta

SEQ ID NO: 57758 - DNA, 25 bp, probe
gaagaatactttgaagagagtgctg

SEQ ID NO: 57759 - DNA, 25 bp, probe
ctgtgctatccttcagatccaatca

SEQ ID NO: 57760 - DNA, 25 bp, probe
agtcttaggaactcagaagtgaaga

SEQ ID NO: 57761 - DNA, 25 bp, probe
aagaatactttgaagagagtgctgg

SEQ ID NO: 57762 - DNA, 25 bp, probe
ctctgtgtgattggactcgtttatg

SEQ ID NO: 57763 - DNA, 25 bp, probe
gaaatcttggctgttctcaaacttg

SEQ ID NO: 57764 - DNA, 25 bp, probe
ttcagaagaggattgtccaatgtgt

SEQ ID NO: 57765 - DNA, 25 bp, probe
cactgaaagccatgaagaaatgttc

SEQ ID NO: 57766 - DNA, 25 bp, probe
tcagaagaggattgtccaatgtgtg

SEQ ID NO: 57767 - DNA, 25 bp, probe
agacactgaaagccatgaagaaatg

SEQ ID NO: 57768 - DNA, 25 bp, probe
ctttcagaagaggattgtccaatgt

SEQ ID NO: 57769 - DNA, 25 bp, probe
tttcagaagaggattgtccaatgtg

SEQ ID NO: 57770 - DNA, 25 bp, probe
acactgaaagccatgaagaaatgtt

SEQ ID NO: 57771 - DNA, 25 bp, probe
cagacactgaaagccatgaagaaat

SEQ ID NO: 57772 - DNA, 25 bp, probe
gacactgaaagccatgaagaaatgt

SEQ ID NO: 57773 - DNA, 25 bp, probe
gagttcaggagagaggagtgttctg

SEQ ID NO: 57774 - DNA, 25 bp, probe
gctttcagaagaggattgtccaatg

SEQ ID NO: 57775 - DNA, 25 bp, probe
caataaaactgaagaccaagaccaa

SEQ ID NO: 57776 - DNA, 25 bp, probe
ccgatttactttgcactaaggacaa

SEQ ID NO: 57777 - DNA, 25 bp, probe
taaaactgaagaccaagaccaatgt

SEQ ID NO: 57778 - DNA, 25 bp, probe
ataaaactgaagaccaagaccaatg

SEQ ID NO: 57779 - DNA, 25 bp, probe
ctgaagaccaagaccaatgtctatg

SEQ ID NO: 57780 - DNA, 25 bp, probe
gaccaagaccaatgtctatgtgatc

SEQ ID NO: 57781 - DNA, 25 bp, probe
ctgaaagccatgaagaaatgttctg

SEQ ID NO: 57782 - DNA, 25 bp, probe
aataaaactgaagaccaagaccaat

SEQ ID NO: 57783 - DNA, 25 bp, probe
gttcaggagagaggagtgttctgtc

SEQ ID NO: 57784 - DNA, 25 bp, probe
agaccaagaccaatgtctatgtgat

SEQ ID NO: 57785 - DNA, 25 bp, probe
gaagaccaagaccaatgtctatgtg

SEQ ID NO: 57786 - DNA, 25 bp, probe
actgaagaccaagaccaatgtctat

SEQ ID NO: 57787 - DNA, 25 bp, probe
gaaagccatgaagaaatgttctgtg

SEQ ID NO: 57788 - DNA, 25 bp, probe
actgaaagccatgaagaaatgttct

SEQ ID NO: 57789 - DNA, 25 bp, probe
aagaccaagaccaatgtctatgtga

SEQ ID NO: 57790 - DNA, 25 bp, probe
tgaagaccaagaccaatgtctatgt

SEQ ID NO: 57791 - DNA, 25 bp, probe
aactgaagaccaagaccaatgtcta

SEQ ID NO: 57792 - DNA, 25 bp, probe
tccaaaagtcaaaagaactctaagc

SEQ ID NO: 57793 - DNA, 25 bp, probe
gctccaaaagtcaaaagaactctaa

SEQ ID NO: 57794 - DNA, 25 bp, probe
tgaaagccatgaagaaatgttctgt

SEQ ID NO: 57795 - DNA, 25 bp, probe
caaaagtcaaaagaactctaagccc

SEQ ID NO: 57796 - DNA, 25 bp, probe
ccaaaagtcaaaagaactctaagcc

SEQ ID NO: 57797 - DNA, 25 bp, probe
tgctccaaaagtcaaaagaactcta

SEQ ID NO: 57798 - DNA, 25 bp, probe
aagtcaaaagaactctaagcccaaa

SEQ ID NO: 57799 - DNA, 25 bp, probe
aaagtcaaaagaactctaagcccaa

SEQ ID NO: 57800 - DNA, 25 bp, probe
aaaagtcaaaagaactctaagccca

SEQ ID NO: 57801 - DNA, 25 bp, probe
gcaataaaactgaagaccaagacca

SEQ ID NO: 57802 - DNA, 25 bp, probe
ttgctccaaaagtcaaaagaactct

SEQ ID NO: 57803 - DNA, 25 bp, probe
gttgctccaaaagtcaaaagaactc

SEQ ID NO: 57804 - DNA, 25 bp, probe
cagaagaggattgtccaatgtgtgc

SEQ ID NO: 57805 - DNA, 25 bp, probe
ggagttcaggagagaggagtgttct

SEQ ID NO: 57806 - DNA, 25 bp, probe
agttcaggagagaggagtgttctgt

SEQ ID NO: 57807 - DNA, 25 bp, probe
gagggcaataaaactgaagaccaag

SEQ ID NO: 57808 - DNA, 25 bp, probe
actcttctctcctgcttctatgtaa

SEQ ID NO: 57809 - DNA, 25 bp, probe
tcaatcacttcttctacgatgtcaa

SEQ ID NO: 57810 - DNA, 25 bp, probe
aactcaatcacttcttctacgatgt

SEQ ID NO: 57811 - DNA, 25 bp, probe
ctcttctctcctgcttctatgtaat

SEQ ID NO: 57812 - DNA, 25 bp, probe
ctcaatcacttcttctacgatgtca

SEQ ID NO: 57813 - DNA, 25 bp, probe
actcaatcacttcttctacgatgtc

SEQ ID NO: 57814 - DNA, 25 bp, probe
gactcttctctcctgcttctatgta

SEQ ID NO: 57815 - DNA, 25 bp, probe
tctatgtaattggcttccttctgtt

SEQ ID NO: 57816 - DNA, 25 bp, probe
ttctatgtaattggcttccttctgt

SEQ ID NO: 57817 - DNA, 25 bp, probe
ttctctcctgcttctatgtaattgg

SEQ ID NO: 57818 - DNA, 25 bp, probe
caatcacttcttctacgatgtcaag

SEQ ID NO: 57819 - DNA, 25 bp, probe
cttctatgtaattggcttccttctg

SEQ ID NO: 57820 - DNA, 25 bp, probe
gcttctatgtaattggcttccttct

SEQ ID NO: 57821 - DNA, 25 bp, probe
cttctctcctgcttctatgtaattg

SEQ ID NO: 57822 - DNA, 25 bp, probe
tcttctctcctgcttctatgtaatt

SEQ ID NO: 57823 - DNA, 25 bp, probe
tgcttctatgtaattggcttccttc

SEQ ID NO: 57824 - DNA, 25 bp, probe
ctgcttctatgtaattggcttcctt

SEQ ID NO: 57825 - DNA, 25 bp, probe
aatcacttcttctacgatgtcaagc

SEQ ID NO: 57826 - DNA, 25 bp, probe
ctcctgcttctatgtaattggcttc

SEQ ID NO: 57827 - DNA, 25 bp, probe
cttcacatatattcgtcctgcttca

SEQ ID NO: 57828 - DNA, 25 bp, probe
tctcctgcttctatgtaattggctt

SEQ ID NO: 57829 - DNA, 25 bp, probe
ctgactcttctctcctgcttctatg

SEQ ID NO: 57830 - DNA, 25 bp, probe
cctgtagtgacacattactcaatca

SEQ ID NO: 57831 - DNA, 25 bp, probe
tctgactcttctctcctgcttctat

SEQ ID NO: 57832 - DNA, 25 bp, probe
ttctgactcttctctcctgcttcta

SEQ ID NO: 57833 - DNA, 25 bp, probe
aagaagtgatgatggctctgaagaa

SEQ ID NO: 57834 - DNA, 25 bp, probe
ctctcctgcttctatgtaattggct

SEQ ID NO: 57835 - DNA, 25 bp, probe
tctctcctgcttctatgtaattggc

SEQ ID NO: 57836 - DNA, 25 bp, probe
ctgtagtgacacattactcaatcaa

SEQ ID NO: 57837 - DNA, 25 bp, probe
tgactcttctctcctgcttctatgt

SEQ ID NO: 57838 - DNA, 25 bp, probe
gcctgtagtgacacattactcaatc

SEQ ID NO: 57839 - DNA, 25 bp, probe
gcttcacatatattcgtcctgcttc

SEQ ID NO: 57840 - DNA, 25 bp, probe
ttcacatatattcgtcctgcttcag

SEQ ID NO: 57841 - DNA, 25 bp, probe
tgtagtgacacattactcaatcaat

SEQ ID NO: 57842 - DNA, 25 bp, probe
cctgcttctatgtaattggcttcct

SEQ ID NO: 57843 - DNA, 25 bp, probe
tcctgcttctatgtaattggcttcc

SEQ ID NO: 57844 - DNA, 25 bp, probe
atcacttcttctacgatgtcaagcc

SEQ ID NO: 57845 - DNA, 25 bp, probe
tactgaatccactaatctacaccct

SEQ ID NO: 57846 - DNA, 25 bp, probe
attactcaatcaatggcttctttcc

SEQ ID NO: 57847 - DNA, 25 bp, probe
ctttctttctgactcttctctcctg

SEQ ID NO: 57848 - DNA, 25 bp, probe
ctgaatccactaatctacaccctta

SEQ ID NO: 57849 - DNA, 25 bp, probe
actgaatccactaatctacaccctt

SEQ ID NO: 57850 - DNA, 25 bp, probe
cttaggaacaaagaagtgatgatgg

SEQ ID NO: 57851 - DNA, 25 bp, probe
cacattactcaatcaatggcttctt

SEQ ID NO: 57852 - DNA, 25 bp, probe
gcacatagataggaagagtctggat

SEQ ID NO: 57853 - DNA, 25 bp, probe
acctccttatgtgagagagaataac

SEQ ID NO: 57854 - DNA, 25 bp, probe
gacctccttatgtgagagagaataa

SEQ ID NO: 57855 - DNA, 25 bp, probe
cgacctccttatgtgagagagaata

SEQ ID NO: 57856 - DNA, 25 bp, probe
cacatagataggaagagtctggatc

SEQ ID NO: 57857 - DNA, 25 bp, probe
cctccttatgtgagagagaataaca

SEQ ID NO: 57858 - DNA, 25 bp, probe
gaatcatacagcatctggaaccttc

SEQ ID NO: 57859 - DNA, 25 bp, probe
aatcatacagcatctggaaccttct

SEQ ID NO: 57860 - DNA, 25 bp, probe
tccacccaaactaaagactacattt

SEQ ID NO: 57861 - DNA, 25 bp, probe
ggcacatagataggaagagtctgga

SEQ ID NO: 57862 - DNA, 25 bp, probe
atcatacagcatctggaaccttctg

SEQ ID NO: 57863 - DNA, 25 bp, probe
acatagataggaagagtctggatct

SEQ ID NO: 57864 - DNA, 25 bp, probe
catagataggaagagtctggatctc

SEQ ID NO: 57865 - DNA, 25 bp, probe
aggacagctagttatactccattct

SEQ ID NO: 57866 - DNA, 25 bp, probe
caaggacagctagttatactccatt

SEQ ID NO: 57867 - DNA, 25 bp, probe
ggacagctagttatactccattctt

SEQ ID NO: 57868 - DNA, 25 bp, probe
aaggacagctagttatactccattc

SEQ ID NO: 57869 - DNA, 25 bp, probe
ggaatcatacagcatctggaacctt

SEQ ID NO: 57870 - DNA, 25 bp, probe
tgtgagagagaataacatctatgaa

SEQ ID NO: 57871 - DNA, 25 bp, probe
ccgacctccttatgtgagagagaat

SEQ ID NO: 57872 - DNA, 25 bp, probe
cacagctctaaggaagacttcaagt

SEQ ID NO: 57873 - DNA, 25 bp, probe
gtccacccaaactaaagactacatt

SEQ ID NO: 57874 - DNA, 25 bp, probe
gcaaggacagctagttatactccat

SEQ ID NO: 57875 - DNA, 25 bp, probe
tgtccacccaaactaaagactacat

SEQ ID NO: 57876 - DNA, 25 bp, probe
atgtccacccaaactaaagactaca

SEQ ID NO: 57877 - DNA, 25 bp, probe
ccacagctctaaggaagacttcaag

SEQ ID NO: 57878 - DNA, 25 bp, probe
agttatactccattctttggtcgtc

SEQ ID NO: 57879 - DNA, 25 bp, probe
gtggcaaggacagctagttatactc

SEQ ID NO: 57880 - DNA, 25 bp, probe
tagttatactccattctttggtcgt

SEQ ID NO: 57881 - DNA, 25 bp, probe
ttgagcggcacatagataggaagag

SEQ ID NO: 57882 - DNA, 25 bp, probe
tagataggaagagtctggatctctg

SEQ ID NO: 57883 - DNA, 25 bp, probe
tgggtgcagctatatgattaattct

SEQ ID NO: 57884 - DNA, 25 bp, probe
gataggaagagtctggatctctgat

SEQ ID NO: 57885 - DNA, 25 bp, probe
ataggaagagtctggatctctgatg

SEQ ID NO: 57886 - DNA, 25 bp, probe
gctagttatactccattctttggtc

SEQ ID NO: 57887 - DNA, 25 bp, probe
catgtccacccaaactaaagactac

SEQ ID NO: 57888 - DNA, 25 bp, probe
ctagttatactccattctttggtcg

SEQ ID NO: 57889 - DNA, 25 bp, probe
atagataggaagagtctggatctct

SEQ ID NO: 57890 - DNA, 25 bp, probe
agataggaagagtctggatctctga

SEQ ID NO: 57891 - DNA, 25 bp, probe
gttatactccattctttggtcgtcg

SEQ ID NO: 57892 - DNA, 25 bp, probe
agagaataacatctatgaaatccca

SEQ ID NO: 57893 - DNA, 25 bp, probe
cggcacatagataggaagagtctgg

SEQ ID NO: 57894 - DNA, 25 bp, probe
agctatatgattaattctgcccaat

SEQ ID NO: 57895 - DNA, 25 bp, probe
taggaagagtctggatctctgatga

SEQ ID NO: 57896 - DNA, 25 bp, probe
tacgggtttcttacattagaggatg

SEQ ID NO: 57897 - DNA, 25 bp, probe
aatacgggtttcttacattagagga

SEQ ID NO: 57898 - DNA, 25 bp, probe
atacgggtttcttacattagaggat

SEQ ID NO: 57899 - DNA, 25 bp, probe
tagtggatgtaaatggaacttctgc

SEQ ID NO: 57900 - DNA, 25 bp, probe
aaatacgggtttcttacattagagg

SEQ ID NO: 57901 - DNA, 25 bp, probe
gcatggtatcactaaaggtttcaaa

SEQ ID NO: 57902 - DNA, 25 bp, probe
ttagtggatgtaaatggaacttctg

SEQ ID NO: 57903 - DNA, 25 bp, probe
actctagttcttaagttgttagcca

SEQ ID NO: 57904 - DNA, 25 bp, probe
actttagtggatgtaaatggaactt

SEQ ID NO: 57905 - DNA, 25 bp, probe
ctagttcttaagttgttagccaagt

SEQ ID NO: 57906 - DNA, 25 bp, probe
tttagtggatgtaaatggaacttct

SEQ ID NO: 57907 - DNA, 25 bp, probe
gccaagtaaatatcattgttgaact

SEQ ID NO: 57908 - DNA, 25 bp, probe
agccaagtaaatatcattgttgaac

SEQ ID NO: 57909 - DNA, 25 bp, probe
tctagttcttaagttgttagccaag

SEQ ID NO: 57910 - DNA, 25 bp, probe
ctctagttcttaagttgttagccaa

SEQ ID NO: 57911 - DNA, 25 bp, probe
agttcttaagttgttagccaagtaa

SEQ ID NO: 57912 - DNA, 25 bp, probe
ctttagtggatgtaaatggaacttc

SEQ ID NO: 57913 - DNA, 25 bp, probe
catggataacaactctcactttagt

SEQ ID NO: 57914 - DNA, 25 bp, probe
tgcatggtatcactaaaggtttcaa

SEQ ID NO: 57915 - DNA, 25 bp, probe
ggataacaactctcactttagtgga

SEQ ID NO: 57916 - DNA, 25 bp, probe
tggataacaactctcactttagtgg

SEQ ID NO: 57917 - DNA, 25 bp, probe
ctgcatggtatcactaaaggtttca

SEQ ID NO: 57918 - DNA, 25 bp, probe
acaactctcactttagtggatgtaa

SEQ ID NO: 57919 - DNA, 25 bp, probe
aacaactctcactttagtggatgta

SEQ ID NO: 57920 - DNA, 25 bp, probe
taacaactctcactttagtggatgt

SEQ ID NO: 57921 - DNA, 25 bp, probe
tgttatttatcctgcatggtatcac

SEQ ID NO: 57922 - DNA, 25 bp, probe
ccttgttatttatcctgcatggtat

SEQ ID NO: 57923 - DNA, 25 bp, probe
gccttgttatttatcctgcatggta

SEQ ID NO: 57924 - DNA, 25 bp, probe
tctcactttagtggatgtaaatgga

SEQ ID NO: 57925 - DNA, 25 bp, probe
ctctcactttagtggatgtaaatgg

SEQ ID NO: 57926 - DNA, 25 bp, probe
gttatttatcctgcatggtatcact

SEQ ID NO: 57927 - DNA, 25 bp, probe
gtacactgaccttaggcatggagaa

SEQ ID NO: 57928 - DNA, 25 bp, probe
cactttagtggatgtaaatggaact

SEQ ID NO: 57929 - DNA, 25 bp, probe
tcactttagtggatgtaaatggaac

SEQ ID NO: 57930 - DNA, 25 bp, probe
tagttcttaagttgttagccaagta

SEQ ID NO: 57931 - DNA, 25 bp, probe
taaatgatttaaccattgccctctc

SEQ ID NO: 57932 - DNA, 25 bp, probe
ctcactttagtggatgtaaatggaa

SEQ ID NO: 57933 - DNA, 25 bp, probe
caactctcactttagtggatgtaaa

SEQ ID NO: 57934 - DNA, 25 bp, probe
tgataaatgatttaaccattgccct

SEQ ID NO: 57935 - DNA, 25 bp, probe
actctcactttagtggatgtaaatg

SEQ ID NO: 57936 - DNA, 25 bp, probe
ataacaactctcactttagtggatg

SEQ ID NO: 57937 - DNA, 25 bp, probe
atggataacaactctcactttagtg

SEQ ID NO: 57938 - DNA, 25 bp, probe
ttgttatttatcctgcatggtatca

SEQ ID NO: 57939 - DNA, 25 bp, probe
tggatgtaaatggaacttctgcaag

SEQ ID NO: 57940 - DNA, 25 bp, probe
ttccatagaatcacagaacaatcct

SEQ ID NO: 57941 - DNA, 25 bp, probe
ccatagaatcacagaacaatcctga

SEQ ID NO: 57942 - DNA, 25 bp, probe
tccatagaatcacagaacaatcctg

SEQ ID NO: 57943 - DNA, 25 bp, probe
tagaatcacagaacaatcctgaacc

SEQ ID NO: 57944 - DNA, 25 bp, probe
atagaatcacagaacaatcctgaac

SEQ ID NO: 57945 - DNA, 25 bp, probe
catagaatcacagaacaatcctgaa

SEQ ID NO: 57946 - DNA, 25 bp, probe
gaatcacagaacaatcctgaaccag

SEQ ID NO: 57947 - DNA, 25 bp, probe
aatcactaacacatatagggcttcc

SEQ ID NO: 57948 - DNA, 25 bp, probe
attccatagaatcacagaacaatcc

SEQ ID NO: 57949 - DNA, 25 bp, probe
agaaggctgaaatcactaacacata

SEQ ID NO: 57950 - DNA, 25 bp, probe
tttcagaactcaaagggcatttaga

SEQ ID NO: 57951 - DNA, 25 bp, probe
tgaaatcactaacacatatagggct

SEQ ID NO: 57952 - DNA, 25 bp, probe
aagaaggctgaaatcactaacacat

SEQ ID NO: 57953 - DNA, 25 bp, probe
agaatcacagaacaatcctgaacca

SEQ ID NO: 57954 - DNA, 25 bp, probe
ctgaaatcactaacacatatagggc

SEQ ID NO: 57955 - DNA, 25 bp, probe
gctgaaatcactaacacatataggg

SEQ ID NO: 57956 - DNA, 25 bp, probe
ggctgaaatcactaacacatatagg

SEQ ID NO: 57957 - DNA, 25 bp, probe
tagaggaagaaggctgaaatcacta

SEQ ID NO: 57958 - DNA, 25 bp, probe
tttagaggaagaaggctgaaatcac

SEQ ID NO: 57959 - DNA, 25 bp, probe
gaaggctgaaatcactaacacatat

SEQ ID NO: 57960 - DNA, 25 bp, probe
gaagaaggctgaaatcactaacaca

SEQ ID NO: 57961 - DNA, 25 bp, probe
aaatcactaacacatatagggcttc

SEQ ID NO: 57962 - DNA, 25 bp, probe
gaaatcactaacacatatagggctt

SEQ ID NO: 57963 - DNA, 25 bp, probe
gaggaagaaggctgaaatcactaac

SEQ ID NO: 57964 - DNA, 25 bp, probe
agaggaagaaggctgaaatcactaa

SEQ ID NO: 57965 - DNA, 25 bp, probe
ttagaggaagaaggctgaaatcact

SEQ ID NO: 57966 - DNA, 25 bp, probe
aggctgaaatcactaacacatatag

SEQ ID NO: 57967 - DNA, 25 bp, probe
atttagaggaagaaggctgaaatca

SEQ ID NO: 57968 - DNA, 25 bp, probe
catttagaggaagaaggctgaaatc

SEQ ID NO: 57969 - DNA, 25 bp, probe
ggaagaaggctgaaatcactaacac

SEQ ID NO: 57970 - DNA, 25 bp, probe
ttcagaactcaaagggcatttagag

SEQ ID NO: 57971 - DNA, 25 bp, probe
aggaagaaggctgaaatcactaaca

SEQ ID NO: 57972 - DNA, 25 bp, probe
aaggctgaaatcactaacacatata

SEQ ID NO: 57973 - DNA, 25 bp, probe
ctcaaagggcatttagaggaagaag

SEQ ID NO: 57974 - DNA, 25 bp, probe
catatagggcttcctttggtatcaa

SEQ ID NO: 57975 - DNA, 25 bp, probe
actaacacatatagggcttcctttg

SEQ ID NO: 57976 - DNA, 25 bp, probe
cactaacacatatagggcttccttt

SEQ ID NO: 57977 - DNA, 25 bp, probe
gcatttagaggaagaaggctgaaat

SEQ ID NO: 57978 - DNA, 25 bp, probe
gaactcaaagggcatttagaggaag

SEQ ID NO: 57979 - DNA, 25 bp, probe
cacatatagggcttcctttggtatc

SEQ ID NO: 57980 - DNA, 25 bp, probe
atcactaacacatatagggcttcct

SEQ ID NO: 57981 - DNA, 25 bp, probe
ctaacacatatagggcttcctttgg

SEQ ID NO: 57982 - DNA, 25 bp, probe
tcactaacacatatagggcttcctt

SEQ ID NO: 57983 - DNA, 25 bp, probe
tcaaagggcatttagaggaagaagg

SEQ ID NO: 57984 - DNA, 25 bp, probe
gtctctggcatcttcttcatactat

SEQ ID NO: 57985 - DNA, 25 bp, probe
tctctggcatcttcttcatactatc

SEQ ID NO: 57986 - DNA, 25 bp, probe
ctctggcatcttcttcatactatcg

SEQ ID NO: 57987 - DNA, 25 bp, probe
tgtctctggcatcttcttcatacta

SEQ ID NO: 57988 - DNA, 25 bp, probe
ttgtctctggcatcttcttcatact

SEQ ID NO: 57989 - DNA, 25 bp, probe
tctggcatcttcttcatactatcgg

SEQ ID NO: 57990 - DNA, 25 bp, probe
tttgtctctggcatcttcttcatac

SEQ ID NO: 57991 - DNA, 25 bp, probe
ttctttacatctccagcatcaacga

SEQ ID NO: 57992 - DNA, 25 bp, probe
ggttctttacatctccagcatcaac

SEQ ID NO: 57993 - DNA, 25 bp, probe
gttctttacatctccagcatcaacg

SEQ ID NO: 57994 - DNA, 25 bp, probe
ctggcatcttcttcatactatcggg

SEQ ID NO: 57995 - DNA, 25 bp, probe
tctttacatctccagcatcaacgac

SEQ ID NO: 57996 - DNA, 25 bp, probe
cttggttctttacatctccagcatc

SEQ ID NO: 57997 - DNA, 25 bp, probe
ttttgtctctggcatcttcttcata

SEQ ID NO: 57998 - DNA, 25 bp, probe
tggttctttacatctccagcatcaa

SEQ ID NO: 57999 - DNA, 25 bp, probe
ttggttctttacatctccagcatca

SEQ ID NO: 58000 - DNA, 25 bp, probe
agtattttcattatcgctacgggtg

SEQ ID NO: 58001 - DNA, 25 bp, probe
cagtattttcattatcgctacgggt

SEQ ID NO: 58002 - DNA, 25 bp, probe
cttttgtctctggcatcttcttcat

SEQ ID NO: 58003 - DNA, 25 bp, probe
ctctgagcagtattttcattatcgc

SEQ ID NO: 58004 - DNA, 25 bp, probe
gactactggctgtacatggaagaag

SEQ ID NO: 58005 - DNA, 25 bp, probe
gtattttcattatcgctacgggtgg

SEQ ID NO: 58006 - DNA, 25 bp, probe
ctttacatctccagcatcaacgacg

SEQ ID NO: 58007 - DNA, 25 bp, probe
tattttcattatcgctacgggtggt

SEQ ID NO: 58008 - DNA, 25 bp, probe
gcagtattttcattatcgctacggg

SEQ ID NO: 58009 - DNA, 25 bp, probe
ttcattatcgctacgggtggtcttt

SEQ ID NO: 58010 - DNA, 25 bp, probe
tttcattatcgctacgggtggtctt

SEQ ID NO: 58011 - DNA, 25 bp, probe
ttacatctccagcatcaacgacgag

SEQ ID NO: 58012 - DNA, 25 bp, probe
tgactactggctgtacatggaagaa

SEQ ID NO: 58013 - DNA, 25 bp, probe
tggcatcttcttcatactatcgggc

SEQ ID NO: 58014 - DNA, 25 bp, probe
catcttcttcatactatcgggcctc

SEQ ID NO: 58015 - DNA, 25 bp, probe
tttacatctccagcatcaacgacga

SEQ ID NO: 58016 - DNA, 25 bp, probe
atcttcttcatactatcgggcctct

SEQ ID NO: 58017 - DNA, 25 bp, probe
gagatcaatttggtgacggaaaaca

SEQ ID NO: 58018 - DNA, 25 bp, probe
ctgactactggctgtacatggaaga

SEQ ID NO: 58019 - DNA, 25 bp, probe
gcttggttctttacatctccagcat

SEQ ID NO: 58020 - DNA, 25 bp, probe
ctccttcctactcaaagaggtgacg

SEQ ID NO: 58021 - DNA, 25 bp, probe
gagcagtattttcattatcgctacg

SEQ ID NO: 58022 - DNA, 25 bp, probe
attttcattatcgctacgggtggtc

SEQ ID NO: 58023 - DNA, 25 bp, probe
tctgagcagtattttcattatcgct

SEQ ID NO: 58024 - DNA, 25 bp, probe
tggtgggcttggttctttacatctc

SEQ ID NO: 58025 - DNA, 25 bp, probe
cgcttcctccttcctactcaaagag

SEQ ID NO: 58026 - DNA, 25 bp, probe
tcttcttcatactatcgggcctctc

SEQ ID NO: 58027 - DNA, 25 bp, probe
actactggctgtacatggaagaagg

SEQ ID NO: 58028 - DNA, 25 bp, probe
ctgctcctcatacttctggtctact

SEQ ID NO: 58029 - DNA, 25 bp, probe
tgctcctcatacttctggtctactg

SEQ ID NO: 58030 - DNA, 25 bp, probe
cctgctcctcatacttctggtctac

SEQ ID NO: 58031 - DNA, 25 bp, probe
ctcctcatacttctggtctactgca

SEQ ID NO: 58032 - DNA, 25 bp, probe
gctcctcatacttctggtctactgc

SEQ ID NO: 58033 - DNA, 25 bp, probe
ccctgctcctcatacttctggtcta

SEQ ID NO: 58034 - DNA, 25 bp, probe
ttgactttcgaatccaggccagata

SEQ ID NO: 58035 - DNA, 25 bp, probe
tgactttcgaatccaggccagatag

SEQ ID NO: 58036 - DNA, 25 bp, probe
gttgactttcgaatccaggccagat

SEQ ID NO: 58037 - DNA, 25 bp, probe
acctaatcaatcagtgtatcagtgc

SEQ ID NO: 58038 - DNA, 25 bp, probe
aataagcatacacttcactcctctc

SEQ ID NO: 58039 - DNA, 25 bp, probe
gaataagcatacacttcactcctct

SEQ ID NO: 58040 - DNA, 25 bp, probe
agaataagcatacacttcactcctc

SEQ ID NO: 58041 - DNA, 25 bp, probe
ttccagaataagcatacacttcact

SEQ ID NO: 58042 - DNA, 25 bp, probe
cagaataagcatacacttcactcct

SEQ ID NO: 58043 - DNA, 25 bp, probe
cttccagaataagcatacacttcac

SEQ ID NO: 58044 - DNA, 25 bp, probe
tccttccagaataagcatacacttc

SEQ ID NO: 58045 - DNA, 25 bp, probe
tccagaataagcatacacttcactc

SEQ ID NO: 58046 - DNA, 25 bp, probe
ccttccagaataagcatacacttca

SEQ ID NO: 58047 - DNA, 25 bp, probe
gtccttccagaataagcatacactt

SEQ ID NO: 58048 - DNA, 25 bp, probe
gatgctcttatgtccttccagaata

SEQ ID NO: 58049 - DNA, 25 bp, probe
atgctcttatgtccttccagaataa

SEQ ID NO: 58050 - DNA, 25 bp, probe
aacctaatcaatcagtgtatcagtg

SEQ ID NO: 58051 - DNA, 25 bp, probe
ccagaataagcatacacttcactcc

SEQ ID NO: 58052 - DNA, 25 bp, probe
ataagcatacacttcactcctctcc

SEQ ID NO: 58053 - DNA, 25 bp, probe
atgtccttccagaataagcatacac

SEQ ID NO: 58054 - DNA, 25 bp, probe
tgtccttccagaataagcatacact

SEQ ID NO: 58055 - DNA, 25 bp, probe
tatgtccttccagaataagcataca

SEQ ID NO: 58056 - DNA, 25 bp, probe
atcagccaagattcctgtagaagtt

SEQ ID NO: 58057 - DNA, 25 bp, probe
ttatgtccttccagaataagcatac

SEQ ID NO: 58058 - DNA, 25 bp, probe
aatcaatcagtgtatcagtgcatct

SEQ ID NO: 58059 - DNA, 25 bp, probe
gacttgctttgtgaactgaatgtat

SEQ ID NO: 58060 - DNA, 25 bp, probe
gttaggtaaagagagtttggaggaa

SEQ ID NO: 58061 - DNA, 25 bp, probe
tgaagagaggttaggtaaagagagt

SEQ ID NO: 58062 - DNA, 25 bp, probe
gaggttaggtaaagagagtttggag

SEQ ID NO: 58063 - DNA, 25 bp, probe
gagaggttaggtaaagagagtttgg

SEQ ID NO: 58064 - DNA, 25 bp, probe
cctaatcaatcagtgtatcagtgca

SEQ ID NO: 58065 - DNA, 25 bp, probe
attcacttctatatgatgcctgtaa

SEQ ID NO: 58066 - DNA, 25 bp, probe
acttgctttgtgaactgaatgtatt

SEQ ID NO: 58067 - DNA, 25 bp, probe
agaggttaggtaaagagagtttgga

SEQ ID NO: 58068 - DNA, 25 bp, probe
agagaggttaggtaaagagagtttg

SEQ ID NO: 58069 - DNA, 25 bp, probe
tctgtgtttgaaagtttgggaataa

SEQ ID NO: 58070 - DNA, 25 bp, probe
tgatgaagagaggttaggtaaagag

SEQ ID NO: 58071 - DNA, 25 bp, probe
ctgatgaagagaggttaggtaaaga

SEQ ID NO: 58072 - DNA, 25 bp, probe
gaagagaggttaggtaaagagagtt

SEQ ID NO: 58073 - DNA, 25 bp, probe
ttaggtaaagagagtttggaggaaa

SEQ ID NO: 58074 - DNA, 25 bp, probe
taatcaatcagtgtatcagtgcatc

SEQ ID NO: 58075 - DNA, 25 bp, probe
ctaatcaatcagtgtatcagtgcat

SEQ ID NO: 58076 - DNA, 25 bp, probe
agacttgctttgtgaactgaatgta

SEQ ID NO: 58077 - DNA, 25 bp, probe
atgtctggtttactctttatcctga

SEQ ID NO: 58078 - DNA, 25 bp, probe
gtattctgtgtttgaaagtttggga

SEQ ID NO: 58079 - DNA, 25 bp, probe
agtattctgtgtttgaaagtttggg

SEQ ID NO: 58080 - DNA, 25 bp, probe
atgaagagaggttaggtaaagagag

SEQ ID NO: 58081 - DNA, 25 bp, probe
gcaagcattatatctcagtgtatcg

SEQ ID NO: 58082 - DNA, 25 bp, probe
ccagcaagcattatatctcagtgta

SEQ ID NO: 58083 - DNA, 25 bp, probe
aagcattatatctcagtgtatcgga

SEQ ID NO: 58084 - DNA, 25 bp, probe
caagcattatatctcagtgtatcgg

SEQ ID NO: 58085 - DNA, 25 bp, probe
cagcaagcattatatctcagtgtat

SEQ ID NO: 58086 - DNA, 25 bp, probe
agcaagcattatatctcagtgtatc

SEQ ID NO: 58087 - DNA, 25 bp, probe
attatatctcagtgtatcggagcct

SEQ ID NO: 58088 - DNA, 25 bp, probe
agcattatatctcagtgtatcggag

SEQ ID NO: 58089 - DNA, 25 bp, probe
cattatatctcagtgtatcggagcc

SEQ ID NO: 58090 - DNA, 25 bp, probe
gcattatatctcagtgtatcggagc

SEQ ID NO: 58091 - DNA, 25 bp, probe
ttatatctcagtgtatcggagcctg

SEQ ID NO: 58092 - DNA, 25 bp, probe
ttctactttgctttcatcactctca

SEQ ID NO: 58093 - DNA, 25 bp, probe
cttctactttgctttcatcactctc

SEQ ID NO: 58094 - DNA, 25 bp, probe
tctactttgctttcatcactctcag

SEQ ID NO: 58095 - DNA, 25 bp, probe
gcttctactttgctttcatcactct

SEQ ID NO: 58096 - DNA, 25 bp, probe
ggtcaggtcttctgtgtcttctatg

SEQ ID NO: 58097 - DNA, 25 bp, probe
aggtcaggtcttctgtgtcttctat

SEQ ID NO: 58098 - DNA, 25 bp, probe
tatatctcagtgtatcggagcctgg

SEQ ID NO: 58099 - DNA, 25 bp, probe
ggcttctactttgctttcatcactc

SEQ ID NO: 58100 - DNA, 25 bp, probe
gtcaggtcttctgtgtcttctatgc

SEQ ID NO: 58101 - DNA, 25 bp, probe
caggtcaggtcttctgtgtcttcta

SEQ ID NO: 58102 - DNA, 25 bp, probe
cccagcaagcattatatctcagtgt

SEQ ID NO: 58103 - DNA, 25 bp, probe
gagggcttctactttgctttcatca

SEQ ID NO: 58104 - DNA, 25 bp, probe
tcaggtcttctgtgtcttctatgcc

SEQ ID NO: 58105 - DNA, 25 bp, probe
gggcttctactttgctttcatcact

SEQ ID NO: 58106 - DNA, 25 bp, probe
agggcttctactttgctttcatcac

SEQ ID NO: 58107 - DNA, 25 bp, probe
cttctgtgtcttctatgccctgttg

SEQ ID NO: 58108 - DNA, 25 bp, probe
tcttctgtgtcttctatgccctgtt

SEQ ID NO: 58109 - DNA, 25 bp, probe
ccatatccaagaaaggactgggaag

SEQ ID NO: 58110 - DNA, 25 bp, probe
ctactttgctttcatcactctcagc

SEQ ID NO: 58111 - DNA, 25 bp, probe
cttaacgtgatcttcctcaaccacc

SEQ ID NO: 58112 - DNA, 25 bp, probe
cgagggcttctactttgctttcatc

SEQ ID NO: 58113 - DNA, 25 bp, probe
ctttcatcactctcagcaccattgg

SEQ ID NO: 58114 - DNA, 25 bp, probe
gtcttctgtgtcttctatgccctgt

SEQ ID NO: 58115 - DNA, 25 bp, probe
catatccaagaaaggactgggaagc

SEQ ID NO: 58116 - DNA, 25 bp, probe
ttaacgtgatcttcctcaaccacct

SEQ ID NO: 58117 - DNA, 25 bp, probe
gcttaacgtgatcttcctcaaccac

SEQ ID NO: 58118 - DNA, 25 bp, probe
ttctgtgtcttctatgccctgttgg

SEQ ID NO: 58119 - DNA, 25 bp, probe
gaccccagcaagcattatatctcag

SEQ ID NO: 58120 - DNA, 25 bp, probe
ggtcttctgtgtcttctatgccctg

SEQ ID NO: 58121 - DNA, 25 bp, probe
cagaccccagcaagcattatatctc

SEQ ID NO: 58122 - DNA, 25 bp, probe
ccccagcaagcattatatctcagtg

SEQ ID NO: 58123 - DNA, 25 bp, probe
taacgtgatcttcctcaaccacctg

SEQ ID NO: 58124 - DNA, 25 bp, probe
atatccaagaaaggactgggaagct

SEQ ID NO: 58125 - DNA, 25 bp, probe
agagaaccttactaatgctgaatgg

SEQ ID NO: 58126 - DNA, 25 bp, probe
aagaagtcagaaggagaattgtcat

SEQ ID NO: 58127 - DNA, 25 bp, probe
ttggtacttactgtggacttcatag

SEQ ID NO: 58128 - DNA, 25 bp, probe
cattggtacttactgtggacttcat

SEQ ID NO: 58129 - DNA, 25 bp, probe
attggtacttactgtggacttcata

SEQ ID NO: 58130 - DNA, 25 bp, probe
agttactagacctgaaccttgctaa

SEQ ID NO: 58131 - DNA, 25 bp, probe
tgttcatactgactggttactggat

SEQ ID NO: 58132 - DNA, 25 bp, probe
aagtcagaaggagaattgtcatgtt

SEQ ID NO: 58133 - DNA, 25 bp, probe
agaagtcagaaggagaattgtcatg

SEQ ID NO: 58134 - DNA, 25 bp, probe
gaagtcagaaggagaattgtcatgt

SEQ ID NO: 58135 - DNA, 25 bp, probe
gagttactagacctgaaccttgcta

SEQ ID NO: 58136 - DNA, 25 bp, probe
cagagaaccttactaatgctgaatg

SEQ ID NO: 58137 - DNA, 25 bp, probe
agtcagaaggagaattgtcatgttc

SEQ ID NO: 58138 - DNA, 25 bp, probe
tcatactgactggttactggatctt

SEQ ID NO: 58139 - DNA, 25 bp, probe
ttcatactgactggttactggatct

SEQ ID NO: 58140 - DNA, 25 bp, probe
gttcatactgactggttactggatc

SEQ ID NO: 58141 - DNA, 25 bp, probe
agaattgtcatgttccaaggagaat

SEQ ID NO: 58142 - DNA, 25 bp, probe
tgccaggaatagacatcaatgttaa

SEQ ID NO: 58143 - DNA, 25 bp, probe
ttgccaggaatagacatcaatgtta

SEQ ID NO: 58144 - DNA, 25 bp, probe
tggtacttactgtggacttcatagc

SEQ ID NO: 58145 - DNA, 25 bp, probe
gagaattgtcatgttccaaggagaa

SEQ ID NO: 58146 - DNA, 25 bp, probe
agtgttcatactgactggttactgg

SEQ ID NO: 58147 - DNA, 25 bp, probe
ttactgtggacttcatagcttactg

SEQ ID NO: 58148 - DNA, 25 bp, probe
cttactgtggacttcatagcttact

SEQ ID NO: 58149 - DNA, 25 bp, probe
acttactgtggacttcatagcttac

SEQ ID NO: 58150 - DNA, 25 bp, probe
gtacttactgtggacttcatagctt

SEQ ID NO: 58151 - DNA, 25 bp, probe
gactctcagagaaccttactaatgc

SEQ ID NO: 58152 - DNA, 25 bp, probe
actctcagagaaccttactaatgct

SEQ ID NO: 58153 - DNA, 25 bp, probe
tgactctcagagaaccttactaatg

SEQ ID NO: 58154 - DNA, 25 bp, probe
aattgtcatgttccaaggagaattg

SEQ ID NO: 58155 - DNA, 25 bp, probe
gaattgtcatgttccaaggagaatt

SEQ ID NO: 58156 - DNA, 25 bp, probe
gtgttcatactgactggttactgga

SEQ ID NO: 58157 - DNA, 25 bp, probe
ccttactaatgctgaatggtactaa

SEQ ID NO: 58158 - DNA, 25 bp, probe
ctctcagagaaccttactaatgctg

SEQ ID NO: 58159 - DNA, 25 bp, probe
agaaccttactaatgctgaatggta

SEQ ID NO: 58160 - DNA, 25 bp, probe
gagaaccttactaatgctgaatggt

SEQ ID NO: 58161 - DNA, 25 bp, probe
tacttactgtggacttcatagctta

SEQ ID NO: 58162 - DNA, 25 bp, probe
ttgactctcagagaaccttactaat

SEQ ID NO: 58163 - DNA, 25 bp, probe
aaatgaactgcttatggcttgtaaa

SEQ ID NO: 58164 - DNA, 25 bp, probe
atctaaatgaactgcttatggcttg

SEQ ID NO: 58165 - DNA, 25 bp, probe
ggacttcatagcttactgacagata

SEQ ID NO: 58166 - DNA, 25 bp, probe
attgattcttcttctctctttgcca

SEQ ID NO: 58167 - DNA, 25 bp, probe
ggtacttactgtggacttcatagct

SEQ ID NO: 58168 - DNA, 25 bp, probe
cacctcaaatcaaagaagaactgtt

SEQ ID NO: 58169 - DNA, 25 bp, probe
gttctgctctatcttactgctatgg

SEQ ID NO: 58170 - DNA, 25 bp, probe
aagccttgaagatgattctaacctg

SEQ ID NO: 58171 - DNA, 25 bp, probe
agttctgctctatcttactgctatg

SEQ ID NO: 58172 - DNA, 25 bp, probe
tacgatccacgattattgatgttga

SEQ ID NO: 58173 - DNA, 25 bp, probe
ttacgatccacgattattgatgttg

SEQ ID NO: 58174 - DNA, 25 bp, probe
agcattacgatccacgattattgat

SEQ ID NO: 58175 - DNA, 25 bp, probe
gatccacgattattgatgttgacat

SEQ ID NO: 58176 - DNA, 25 bp, probe
gcattacgatccacgattattgatg

SEQ ID NO: 58177 - DNA, 25 bp, probe
cattacgatccacgattattgatgt

SEQ ID NO: 58178 - DNA, 25 bp, probe
ccttgaagatgattctaacctgtgc

SEQ ID NO: 58179 - DNA, 25 bp, probe
gccttgaagatgattctaacctgtg

SEQ ID NO: 58180 - DNA, 25 bp, probe
gagcattacgatccacgattattga

SEQ ID NO: 58181 - DNA, 25 bp, probe
atccacgattattgatgttgacatg

SEQ ID NO: 58182 - DNA, 25 bp, probe
agccttgaagatgattctaacctgt

SEQ ID NO: 58183 - DNA, 25 bp, probe
attacgatccacgattattgatgtt

SEQ ID NO: 58184 - DNA, 25 bp, probe
cgatccacgattattgatgttgaca

SEQ ID NO: 58185 - DNA, 25 bp, probe
acgatccacgattattgatgttgac

SEQ ID NO: 58186 - DNA, 25 bp, probe
caccatgacacctgaattatgctaa

SEQ ID NO: 58187 - DNA, 25 bp, probe
cttccaccatgacacctgaattatg

SEQ ID NO: 58188 - DNA, 25 bp, probe
atatttcattctgtggcattgtgtc

SEQ ID NO: 58189 - DNA, 25 bp, probe
gaaacagaaagccttgaagatgatt

SEQ ID NO: 58190 - DNA, 25 bp, probe
agaaacagaaagccttgaagatgat

SEQ ID NO: 58191 - DNA, 25 bp, probe
tttcctttagatttcctggtgaagt

SEQ ID NO: 58192 - DNA, 25 bp, probe
aaacagaaagccttgaagatgattc

SEQ ID NO: 58193 - DNA, 25 bp, probe
tatttcattctgtggcattgtgtct

SEQ ID NO: 58194 - DNA, 25 bp, probe
ttcctttagatttcctggtgaagtc

SEQ ID NO: 58195 - DNA, 25 bp, probe
gagagaaacagaaagccttgaagat

SEQ ID NO: 58196 - DNA, 25 bp, probe
aaagccttgaagatgattctaacct

SEQ ID NO: 58197 - DNA, 25 bp, probe
gaaagccttgaagatgattctaacc

SEQ ID NO: 58198 - DNA, 25 bp, probe
aaccaaactgaatgtgacctgaaat

SEQ ID NO: 58199 - DNA, 25 bp, probe
gagaaacagaaagccttgaagatga

SEQ ID NO: 58200 - DNA, 25 bp, probe
agagaaacagaaagccttgaagatg

SEQ ID NO: 58201 - DNA, 25 bp, probe
ttgaagatgattctaacctgtgcag

SEQ ID NO: 58202 - DNA, 25 bp, probe
cttgaagatgattctaacctgtgca

SEQ ID NO: 58203 - DNA, 25 bp, probe
ttctgctctatcttactgctatggg

SEQ ID NO: 58204 - DNA, 25 bp, probe
aaaccaaactgaatgtgacctgaaa

SEQ ID NO: 58205 - DNA, 25 bp, probe
atttcattctgtggcattgtgtctt

SEQ ID NO: 58206 - DNA, 25 bp, probe
ggagcattacgatccacgattattg

SEQ ID NO: 58207 - DNA, 25 bp, probe
ccaccatgacacctgaattatgcta

SEQ ID NO: 58208 - DNA, 25 bp, probe
cacttcttcaaagcaggacctattt

SEQ ID NO: 58209 - DNA, 25 bp, probe
aatgcaagtacatcagaacatatct

SEQ ID NO: 58210 - DNA, 25 bp, probe
accaaactgaatgtgacctgaaatg

SEQ ID NO: 58211 - DNA, 25 bp, probe
cattgtgtcttgctagtctgaattc

SEQ ID NO: 58212 - DNA, 25 bp, probe
accatgacacctgaattatgctaaa

SEQ ID NO: 58213 - DNA, 25 bp, probe
ggtgacttagaattaactcgtgcta

SEQ ID NO: 58214 - DNA, 25 bp, probe
aggaagatagagtggtgacttagaa

SEQ ID NO: 58215 - DNA, 25 bp, probe
gaggaagatagagtggtgacttaga

SEQ ID NO: 58216 - DNA, 25 bp, probe
ggaagatagagtggtgacttagaat

SEQ ID NO: 58217 - DNA, 25 bp, probe
agtggtgacttagaattaactcgtg

SEQ ID NO: 58218 - DNA, 25 bp, probe
tgaggaagatagagtggtgacttag

SEQ ID NO: 58219 - DNA, 25 bp, probe
ctgaggaagatagagtggtgactta

SEQ ID NO: 58220 - DNA, 25 bp, probe
accaacaacactgaggaagatagag

SEQ ID NO: 58221 - DNA, 25 bp, probe
gaccaacaacactgaggaagataga

SEQ ID NO: 58222 - DNA, 25 bp, probe
agaccaacaacactgaggaagatag

SEQ ID NO: 58223 - DNA, 25 bp, probe
gtggtgacttagaattaactcgtgc

SEQ ID NO: 58224 - DNA, 25 bp, probe
tggtgacttagaattaactcgtgct

SEQ ID NO: 58225 - DNA, 25 bp, probe
gtgacttagaattaactcgtgctaa

SEQ ID NO: 58226 - DNA, 25 bp, probe
ccaacaacactgaggaagatagagt

SEQ ID NO: 58227 - DNA, 25 bp, probe
gaagatagagtggtgacttagaatt

SEQ ID NO: 58228 - DNA, 25 bp, probe
actgaggaagatagagtggtgactt

SEQ ID NO: 58229 - DNA, 25 bp, probe
cagaccaacaacactgaggaagata

SEQ ID NO: 58230 - DNA, 25 bp, probe
aaatagtttccaaagccagtctgat

SEQ ID NO: 58231 - DNA, 25 bp, probe
ctcctttcccaaattctacaacaag

SEQ ID NO: 58232 - DNA, 25 bp, probe
cctcctttcccaaattctacaacaa

SEQ ID NO: 58233 - DNA, 25 bp, probe
aatagtttccaaagccagtctgatg

SEQ ID NO: 58234 - DNA, 25 bp, probe
caaatagtttccaaagccagtctga

SEQ ID NO: 58235 - DNA, 25 bp, probe
gtcggaaatgaaattcacacaacta

SEQ ID NO: 58236 - DNA, 25 bp, probe
atagagtggtgacttagaattaact

SEQ ID NO: 58237 - DNA, 25 bp, probe
tcctttcccaaattctacaacaagc

SEQ ID NO: 58238 - DNA, 25 bp, probe
tcggaaatgaaattcacacaactat

SEQ ID NO: 58239 - DNA, 25 bp, probe
gatagagtggtgacttagaattaac

SEQ ID NO: 58240 - DNA, 25 bp, probe
attctgtcggaaatgaaattcacac

SEQ ID NO: 58241 - DNA, 25 bp, probe
agatagagtggtgacttagaattaa

SEQ ID NO: 58242 - DNA, 25 bp, probe
aagatagagtggtgacttagaatta

SEQ ID NO: 58243 - DNA, 25 bp, probe
ctttcccaaattctacaacaagctc

SEQ ID NO: 58244 - DNA, 25 bp, probe
tcccaaattctacaacaagctcaaa

SEQ ID NO: 58245 - DNA, 25 bp, probe
ttcccaaattctacaacaagctcaa

SEQ ID NO: 58246 - DNA, 25 bp, probe
tttcccaaattctacaacaagctca

SEQ ID NO: 58247 - DNA, 25 bp, probe
ctgtcggaaatgaaattcacacaac

SEQ ID NO: 58248 - DNA, 25 bp, probe
tctgtcggaaatgaaattcacacaa

SEQ ID NO: 58249 - DNA, 25 bp, probe
ttctgtcggaaatgaaattcacaca

SEQ ID NO: 58250 - DNA, 25 bp, probe
ccctcctttcccaaattctacaaca

SEQ ID NO: 58251 - DNA, 25 bp, probe
tgtcggaaatgaaattcacacaact

SEQ ID NO: 58252 - DNA, 25 bp, probe
atcagtgtggcaaatagtttccaaa

SEQ ID NO: 58253 - DNA, 25 bp, probe
cggaaatgaaattcacacaactata

SEQ ID NO: 58254 - DNA, 25 bp, probe
gcaaatagtttccaaagccagtctg

SEQ ID NO: 58255 - DNA, 25 bp, probe
ctgctagactctatttcctctggac

SEQ ID NO: 58256 - DNA, 25 bp, probe
tctgctagactctatttcctctgga

SEQ ID NO: 58257 - DNA, 25 bp, probe
cttcttcatcttcttggtctactgc

SEQ ID NO: 58258 - DNA, 25 bp, probe
gcttcttcatcttcttggtctactg

SEQ ID NO: 58259 - DNA, 25 bp, probe
aaggcttcttcatcttcttggtcta

SEQ ID NO: 58260 - DNA, 25 bp, probe
ggcttcttcatcttcttggtctact

SEQ ID NO: 58261 - DNA, 25 bp, probe
aggcttcttcatcttcttggtctac

SEQ ID NO: 58262 - DNA, 25 bp, probe
ctcaatagtgaagtgtcaaccatcc

SEQ ID NO: 58263 - DNA, 25 bp, probe
cctcaatagtgaagtgtcaaccatc

SEQ ID NO: 58264 - DNA, 25 bp, probe
atagtgaagtgtcaaccatccagaa

SEQ ID NO: 58265 - DNA, 25 bp, probe
aatagtgaagtgtcaaccatccaga

SEQ ID NO: 58266 - DNA, 25 bp, probe
caatagtgaagtgtcaaccatccag

SEQ ID NO: 58267 - DNA, 25 bp, probe
ttcttcatcttcttggtctactgcc

SEQ ID NO: 58268 - DNA, 25 bp, probe
tcaatagtgaagtgtcaaccatcca

SEQ ID NO: 58269 - DNA, 25 bp, probe
cttcatcttcttggtctactgcctc

SEQ ID NO: 58270 - DNA, 25 bp, probe
cctacctcttcaccatcatcaacag

SEQ ID NO: 58271 - DNA, 25 bp, probe
atctgagtctgagacatacacactt

SEQ ID NO: 58272 - DNA, 25 bp, probe
aatctgagtctgagacatacacact

SEQ ID NO: 58273 - DNA, 25 bp, probe
tagtgaagtgtcaaccatccagaac

SEQ ID NO: 58274 - DNA, 25 bp, probe
tcttcatcttcttggtctactgcct

SEQ ID NO: 58275 - DNA, 25 bp, probe
gttctccacaataggctctcaacaa

SEQ ID NO: 58276 - DNA, 25 bp, probe
ccttggagaggaagtaatcaacctt

SEQ ID NO: 58277 - DNA, 25 bp, probe
ctacctcttcaccatcatcaacagc

SEQ ID NO: 58278 - DNA, 25 bp, probe
cagcaggtccagaaacaatatcaaa

SEQ ID NO: 58279 - DNA, 25 bp, probe
aaactttcctccctcaatagtgaag

SEQ ID NO: 58280 - DNA, 25 bp, probe
ctccacaataggctctcaacaaatg

SEQ ID NO: 58281 - DNA, 25 bp, probe
tctccacaataggctctcaacaaat

SEQ ID NO: 58282 - DNA, 25 bp, probe
gctctcaacaaatgtgtggtaaatt

SEQ ID NO: 58283 - DNA, 25 bp, probe
tctcaacaaatgtgtggtaaattgc

SEQ ID NO: 58284 - DNA, 25 bp, probe
catggatctctttggcattatgaag

SEQ ID NO: 58285 - DNA, 25 bp, probe
ctctcaacaaatgtgtggtaaattg

SEQ ID NO: 58286 - DNA, 25 bp, probe
ttctccacaataggctctcaacaaa

SEQ ID NO: 58287 - DNA, 25 bp, probe
cttggagaggaagtaatcaaccttt

SEQ ID NO: 58288 - DNA, 25 bp, probe
ggcattatgaagaatgaagctaagg

SEQ ID NO: 58289 - DNA, 25 bp, probe
gacatacacactttccagcaagatg

SEQ ID NO: 58290 - DNA, 25 bp, probe
ttggagaggaagtaatcaaccttta

SEQ ID NO: 58291 - DNA, 25 bp, probe
tggcattatgaagaatgaagctaag

SEQ ID NO: 58292 - DNA, 25 bp, probe
agacatacacactttccagcaagat

SEQ ID NO: 58293 - DNA, 25 bp, probe
gcattatgaagaatgaagctaagga

SEQ ID NO: 58294 - DNA, 25 bp, probe
tggagaggaagtaatcaacctttac

SEQ ID NO: 58295 - DNA, 25 bp, probe
ttcatcttcttggtctactgcctcc

SEQ ID NO: 58296 - DNA, 25 bp, probe
tttcctccctcaatagtgaagtgtc

SEQ ID NO: 58297 - DNA, 25 bp, probe
ctttcctccctcaatagtgaagtgt

SEQ ID NO: 58298 - DNA, 25 bp, probe
ttggcattatgaagaatgaagctaa

SEQ ID NO: 58299 - DNA, 25 bp, probe
acaataggctctcaacaaatgtgtg

SEQ ID NO: 58300 - DNA, 25 bp, probe
ataggctctcaacaaatgtgtggta

SEQ ID NO: 58301 - DNA, 25 bp, probe
tgttctcggcaccttaaattattag

SEQ ID NO: 58302 - DNA, 25 bp, probe
ctgttctcggcaccttaaattatta

SEQ ID NO: 58303 - DNA, 25 bp, probe
tctcggcaccttaaattattagacc

SEQ ID NO: 58304 - DNA, 25 bp, probe
ctcggcaccttaaattattagaccc

SEQ ID NO: 58305 - DNA, 25 bp, probe
cctgttctcggcaccttaaattatt

SEQ ID NO: 58306 - DNA, 25 bp, probe
ttctcggcaccttaaattattagac

SEQ ID NO: 58307 - DNA, 25 bp, probe
gttctcggcaccttaaattattaga

SEQ ID NO: 58308 - DNA, 25 bp, probe
ttaaatctcgtttctcttggacaag

SEQ ID NO: 58309 - DNA, 25 bp, probe
acctgttctcggcaccttaaattat

SEQ ID NO: 58310 - DNA, 25 bp, probe
taaatctcgtttctcttggacaagc

SEQ ID NO: 58311 - DNA, 25 bp, probe
tttaaatctcgtttctcttggacaa

SEQ ID NO: 58312 - DNA, 25 bp, probe
gacctgttctcggcaccttaaatta

SEQ ID NO: 58313 - DNA, 25 bp, probe
acacccaagtatttgcacaatattt

SEQ ID NO: 58314 - DNA, 25 bp, probe
cacacccaagtatttgcacaatatt

SEQ ID NO: 58315 - DNA, 25 bp, probe
cacccaagtatttgcacaatatttg

SEQ ID NO: 58316 - DNA, 25 bp, probe
cttattgagagcgggatgaagtacg

SEQ ID NO: 58317 - DNA, 25 bp, probe
ccacacccaagtatttgcacaatat

SEQ ID NO: 58318 - DNA, 25 bp, probe
aaatctcgtttctcttggacaagca

SEQ ID NO: 58319 - DNA, 25 bp, probe
ttattgagagcgggatgaagtacga

SEQ ID NO: 58320 - DNA, 25 bp, probe
tttaattatccaaacagtgggcagc

SEQ ID NO: 58321 - DNA, 25 bp, probe
tattgagagcgggatgaagtacgag

SEQ ID NO: 58322 - DNA, 25 bp, probe
aatctcgtttctcttggacaagcac

SEQ ID NO: 58323 - DNA, 25 bp, probe
tcggcaccttaaattattagacccc

SEQ ID NO: 58324 - DNA, 25 bp, probe
ttttaaatctcgtttctcttggaca

SEQ ID NO: 58325 - DNA, 25 bp, probe
taattatccaaacagtgggcagctt

SEQ ID NO: 58326 - DNA, 25 bp, probe
ttaattatccaaacagtgggcagct

SEQ ID NO: 58327 - DNA, 25 bp, probe
acccaagtatttgcacaatatttgt

SEQ ID NO: 58328 - DNA, 25 bp, probe
tgacctgttctcggcaccttaaatt

SEQ ID NO: 58329 - DNA, 25 bp, probe
ttttaattatccaaacagtgggcag

SEQ ID NO: 58330 - DNA, 25 bp, probe
cccacacccaagtatttgcacaata

SEQ ID NO: 58331 - DNA, 25 bp, probe
cgggctgttttgttccttttctttt

SEQ ID NO: 58332 - DNA, 25 bp, probe
gcttattgagagcgggatgaagtac

SEQ ID NO: 58333 - DNA, 25 bp, probe
ctgacctgttctcggcaccttaaat

SEQ ID NO: 58334 - DNA, 25 bp, probe
cacagggatctcgttctcctcattt

SEQ ID NO: 58335 - DNA, 25 bp, probe
atctcgtttctcttggacaagcaca

SEQ ID NO: 58336 - DNA, 25 bp, probe
ctggtctcctctagcctgtttgttg

SEQ ID NO: 58337 - DNA, 25 bp, probe
aattatccaaacagtgggcagcttc

SEQ ID NO: 58338 - DNA, 25 bp, probe
tttctcttggacaagcacagggatc

SEQ ID NO: 58339 - DNA, 25 bp, probe
gtctcctctagcctgtttgttgtgg

SEQ ID NO: 58340 - DNA, 25 bp, probe
ggtctcctctagcctgtttgttgtg

SEQ ID NO: 58341 - DNA, 25 bp, probe
cagctcacctacctggagaaatacc

SEQ ID NO: 58342 - DNA, 25 bp, probe
gtttctcttggacaagcacagggat

SEQ ID NO: 58343 - DNA, 25 bp, probe
tctcgtttctcttggacaagcacag

SEQ ID NO: 58344 - DNA, 25 bp, probe
ggggtatattttgtaaccactgggc

SEQ ID NO: 58345 - DNA, 25 bp, probe
ttattcggcataatggacttggtag

SEQ ID NO: 58346 - DNA, 25 bp, probe
tcacacaacatacaagagtaccatt

SEQ ID NO: 58347 - DNA, 25 bp, probe
ttcacacaacatacaagagtaccat

SEQ ID NO: 58348 - DNA, 25 bp, probe
agagtaccattgttccttatatcgt

SEQ ID NO: 58349 - DNA, 25 bp, probe
cacacaacatacaagagtaccattg

SEQ ID NO: 58350 - DNA, 25 bp, probe
gagtaccattgttccttatatcgtt

SEQ ID NO: 58351 - DNA, 25 bp, probe
tattcggcataatggacttggtagt

SEQ ID NO: 58352 - DNA, 25 bp, probe
aagagtaccattgttccttatatcg

SEQ ID NO: 58353 - DNA, 25 bp, probe
attcggcataatggacttggtagtt

SEQ ID NO: 58354 - DNA, 25 bp, probe
attattcggcataatggacttggta

SEQ ID NO: 58355 - DNA, 25 bp, probe
tattattcggcataatggacttggt

SEQ ID NO: 58356 - DNA, 25 bp, probe
tgtttctctcctttatttcccagtc

SEQ ID NO: 58357 - DNA, 25 bp, probe
atctgtttctctcctttatttccca

SEQ ID NO: 58358 - DNA, 25 bp, probe
ttattattcggcataatggacttgg

SEQ ID NO: 58359 - DNA, 25 bp, probe
ggctgcgtgtaaagatgtataattt

SEQ ID NO: 58360 - DNA, 25 bp, probe
acctgttgtttattattattcggca

SEQ ID NO: 58361 - DNA, 25 bp, probe
tttctctcctttatttcccagtcct

SEQ ID NO: 58362 - DNA, 25 bp, probe
gtttctctcctttatttcccagtcc

SEQ ID NO: 58363 - DNA, 25 bp, probe
tataatttcctcaggtcattgccaa

SEQ ID NO: 58364 - DNA, 25 bp, probe
aggctgcgtgtaaagatgtataatt

SEQ ID NO: 58365 - DNA, 25 bp, probe
gaggctgcgtgtaaagatgtataat

SEQ ID NO: 58366 - DNA, 25 bp, probe
ctctcagaaagtcttcctcaatgta

SEQ ID NO: 58367 - DNA, 25 bp, probe
gtataatttcctcaggtcattgcca

SEQ ID NO: 58368 - DNA, 25 bp, probe
tgtataatttcctcaggtcattgcc

SEQ ID NO: 58369 - DNA, 25 bp, probe
gctgcgtgtaaagatgtataatttc

SEQ ID NO: 58370 - DNA, 25 bp, probe
agaatttcacacaacatacaagagt

SEQ ID NO: 58371 - DNA, 25 bp, probe
tctcagaaagtcttcctcaatgtat

SEQ ID NO: 58372 - DNA, 25 bp, probe
agtaccattgttccttatatcgtta

SEQ ID NO: 58373 - DNA, 25 bp, probe
ttctctcctttatttcccagtcctc

SEQ ID NO: 58374 - DNA, 25 bp, probe
gtctattgggagaaggaagtcattg

SEQ ID NO: 58375 - DNA, 25 bp, probe
atgtataatttcctcaggtcattgc

SEQ ID NO: 58376 - DNA, 25 bp, probe
tttcacacaacatacaagagtacca

SEQ ID NO: 58377 - DNA, 25 bp, probe
tgcgtgtaaagatgtataatttcct

SEQ ID NO: 58378 - DNA, 25 bp, probe
atttcacacaacatacaagagtacc

SEQ ID NO: 58379 - DNA, 25 bp, probe
ctctcctttatttcccagtcctctc

SEQ ID NO: 58380 - DNA, 25 bp, probe
ataatttcctcaggtcattgccaac

SEQ ID NO: 58381 - DNA, 25 bp, probe
ctgcgtgtaaagatgtataatttcc

SEQ ID NO: 58382 - DNA, 25 bp, probe
ctcagaaagtcttcctcaatgtatt

SEQ ID NO: 58383 - DNA, 25 bp, probe
tactgaggaaatcacactctctgaa

SEQ ID NO: 58384 - DNA, 25 bp, probe
cctttatttcccagtcctctcagaa

SEQ ID NO: 58385 - DNA, 25 bp, probe
gcgtgtaaagatgtataatttcctc

SEQ ID NO: 58386 - DNA, 25 bp, probe
cctgttgtttattattattcggcat

SEQ ID NO: 58387 - DNA, 25 bp, probe
tatctgtttctctcctttatttccc

SEQ ID NO: 58388 - DNA, 25 bp, probe
ctgaggaaatcacactctctgaaag

SEQ ID NO: 58389 - DNA, 25 bp, probe
catctatactccaagcgactagacc

SEQ ID NO: 58390 - DNA, 25 bp, probe
gcatctatactccaagcgactagac

SEQ ID NO: 58391 - DNA, 25 bp, probe
atctatactccaagcgactagaccg

SEQ ID NO: 58392 - DNA, 25 bp, probe
ggcatctatactccaagcgactaga

SEQ ID NO: 58393 - DNA, 25 bp, probe
cggcatctatactccaagcgactag

SEQ ID NO: 58394 - DNA, 25 bp, probe
caactcttgataaagggctgttttg

SEQ ID NO: 58395 - DNA, 25 bp, probe
aactcttgataaagggctgttttgc

SEQ ID NO: 58396 - DNA, 25 bp, probe
gcaactcttgataaagggctgtttt

SEQ ID NO: 58397 - DNA, 25 bp, probe
tatcctgcaactcttgataaagggc

SEQ ID NO: 58398 - DNA, 25 bp, probe
tgcaactcttgataaagggctgttt

SEQ ID NO: 58399 - DNA, 25 bp, probe
ttatcctgcaactcttgataaaggg

SEQ ID NO: 58400 - DNA, 25 bp, probe
ctgcaactcttgataaagggctgtt

SEQ ID NO: 58401 - DNA, 25 bp, probe
atcctgcaactcttgataaagggct

SEQ ID NO: 58402 - DNA, 25 bp, probe
ctatactccaagcgactagaccgga

SEQ ID NO: 58403 - DNA, 25 bp, probe
tctatactccaagcgactagaccgg

SEQ ID NO: 58404 - DNA, 25 bp, probe
ggatgtctggctgcaaagactattt

SEQ ID NO: 58405 - DNA, 25 bp, probe
tcctgcaactcttgataaagggctg

SEQ ID NO: 58406 - DNA, 25 bp, probe
cctgcaactcttgataaagggctgt

SEQ ID NO: 58407 - DNA, 25 bp, probe
gatgtctggctgcaaagactatttt

SEQ ID NO: 58408 - DNA, 25 bp, probe
cttgataaagggctgttttgccatg

SEQ ID NO: 58409 - DNA, 25 bp, probe
tcttgataaagggctgttttgccat

SEQ ID NO: 58410 - DNA, 25 bp, probe
ctcttgataaagggctgttttgcca

SEQ ID NO: 58411 - DNA, 25 bp, probe
actcttgataaagggctgttttgcc

SEQ ID NO: 58412 - DNA, 25 bp, probe
gggatgtctggctgcaaagactatt

SEQ ID NO: 58413 - DNA, 25 bp, probe
tatactccaagcgactagaccggag

SEQ ID NO: 58414 - DNA, 25 bp, probe
ataaagggctgttttgccatggaaa

SEQ ID NO: 58415 - DNA, 25 bp, probe
taaagggctgttttgccatggaaaa

SEQ ID NO: 58416 - DNA, 25 bp, probe
gataaagggctgttttgccatggaa

SEQ ID NO: 58417 - DNA, 25 bp, probe
ttgataaagggctgttttgccatgg

SEQ ID NO: 58418 - DNA, 25 bp, probe
tgataaagggctgttttgccatgga

SEQ ID NO: 58419 - DNA, 25 bp, probe
aatagaactacaagcggatggttaa

SEQ ID NO: 58420 - DNA, 25 bp, probe
agtctctgtgtaatcatctgaagaa

SEQ ID NO: 58421 - DNA, 25 bp, probe
gctggtatattcagtctctgtgtaa

SEQ ID NO: 58422 - DNA, 25 bp, probe
cagtctctgtgtaatcatctgaaga

SEQ ID NO: 58423 - DNA, 25 bp, probe
tagaaatagaactacaagcggatgg

SEQ ID NO: 58424 - DNA, 25 bp, probe
tacctgtgtcatctttcttgtttca

SEQ ID NO: 58425 - DNA, 25 bp, probe
gtgtcatctttcttgtttcatcgta

SEQ ID NO: 58426 - DNA, 25 bp, probe
cctgtgtcatctttcttgtttcatc

SEQ ID NO: 58427 - DNA, 25 bp, probe
ctgtgtcatctttcttgtttcatcg

SEQ ID NO: 58428 - DNA, 25 bp, probe
acctgtgtcatctttcttgtttcat

SEQ ID NO: 58429 - DNA, 25 bp, probe
ctacaagcggatggttaaacaattt

SEQ ID NO: 58430 - DNA, 25 bp, probe
gtaatcatctgaagaaattggtccc

SEQ ID NO: 58431 - DNA, 25 bp, probe
tattcagtctctgtgtaatcatctg

SEQ ID NO: 58432 - DNA, 25 bp, probe
tgtcatctttcttgtttcatcgtaa

SEQ ID NO: 58433 - DNA, 25 bp, probe
aaatagaactacaagcggatggtta

SEQ ID NO: 58434 - DNA, 25 bp, probe
atagaactacaagcggatggttaaa

SEQ ID NO: 58435 - DNA, 25 bp, probe
taatcatctgaagaaattggtccca

SEQ ID NO: 58436 - DNA, 25 bp, probe
tgtgtcatctttcttgtttcatcgt

SEQ ID NO: 58437 - DNA, 25 bp, probe
ctcttctgttcccttactgtttcac

SEQ ID NO: 58438 - DNA, 25 bp, probe
cactcttctgttcccttactgtttc

SEQ ID NO: 58439 - DNA, 25 bp, probe
tgtaatcatctgaagaaattggtcc

SEQ ID NO: 58440 - DNA, 25 bp, probe
ttagaaatagaactacaagcggatg

SEQ ID NO: 58441 - DNA, 25 bp, probe
ggtatattcagtctctgtgtaatca

SEQ ID NO: 58442 - DNA, 25 bp, probe
tggtatattcagtctctgtgtaatc

SEQ ID NO: 58443 - DNA, 25 bp, probe
ctggtatattcagtctctgtgtaat

SEQ ID NO: 58444 - DNA, 25 bp, probe
agctggtatattcagtctctgtgta

SEQ ID NO: 58445 - DNA, 25 bp, probe
tagaactacaagcggatggttaaac

SEQ ID NO: 58446 - DNA, 25 bp, probe
actacaagcggatggttaaacaatt

SEQ ID NO: 58447 - DNA, 25 bp, probe
actcttctgttcccttactgtttca

SEQ ID NO: 58448 - DNA, 25 bp, probe
tgtgtaatcatctgaagaaattggt

SEQ ID NO: 58449 - DNA, 25 bp, probe
gaaatagaactacaagcggatggtt

SEQ ID NO: 58450 - DNA, 25 bp, probe
gtacctgtgtcatctttcttgtttc

SEQ ID NO: 58451 - DNA, 25 bp, probe
tacaagcggatggttaaacaattta

SEQ ID NO: 58452 - DNA, 25 bp, probe
aactacaagcggatggttaaacaat

SEQ ID NO: 58453 - DNA, 25 bp, probe
tgtacctgtgtcatctttcttgttt

SEQ ID NO: 58454 - DNA, 25 bp, probe
agaaatagaactacaagcggatggt

SEQ ID NO: 58455 - DNA, 25 bp, probe
gtcatctttcttgtttcatcgtaaa

SEQ ID NO: 58456 - DNA, 25 bp, probe
gtctctgtgtaatcatctgaagaaa

SEQ ID NO: 58457 - DNA, 25 bp, probe
tttagaaatagaactacaagcggat

SEQ ID NO: 58458 - DNA, 25 bp, probe
gtgtacctgtgtcatctttcttgtt

SEQ ID NO: 58459 - DNA, 25 bp, probe
gtgtaatcatctgaagaaattggtc

SEQ ID NO: 58460 - DNA, 25 bp, probe
ctgtgtaatcatctgaagaaattgg

SEQ ID NO: 58461 - DNA, 25 bp, probe
atttagaaatagaactacaagcgga

SEQ ID NO: 58462 - DNA, 25 bp, probe
gaactacaagcggatggttaaacaa

SEQ ID NO: 58463 - DNA, 25 bp, probe
caaggaatgaagaacaacaactctc

SEQ ID NO: 58464 - DNA, 25 bp, probe
gaatgaagaacaacaactctcagtg

SEQ ID NO: 58465 - DNA, 25 bp, probe
aaggaatgaagaacaacaactctca

SEQ ID NO: 58466 - DNA, 25 bp, probe
tcaaggaatgaagaacaacaactct

SEQ ID NO: 58467 - DNA, 25 bp, probe
gtcaaggaatgaagaacaacaactc

SEQ ID NO: 58468 - DNA, 25 bp, probe
aggaatgaagaacaacaactctcag

SEQ ID NO: 58469 - DNA, 25 bp, probe
atgtcaaggaatgaagaacaacaac

SEQ ID NO: 58470 - DNA, 25 bp, probe
aatgtcaaggaatgaagaacaacaa

SEQ ID NO: 58471 - DNA, 25 bp, probe
ggaatgaagaacaacaactctcagt

SEQ ID NO: 58472 - DNA, 25 bp, probe
aatgaagaacaacaactctcagtgg

SEQ ID NO: 58473 - DNA, 25 bp, probe
tgtcaaggaatgaagaacaacaact

SEQ ID NO: 58474 - DNA, 25 bp, probe
ttctctgttaattcctggaactgta

SEQ ID NO: 58475 - DNA, 25 bp, probe
tctctgttaattcctggaactgtat

SEQ ID NO: 58476 - DNA, 25 bp, probe
ctctgttaattcctggaactgtatt

SEQ ID NO: 58477 - DNA, 25 bp, probe
atgaagaacaacaactctcagtggt

SEQ ID NO: 58478 - DNA, 25 bp, probe
ccaccttgttactgctactacactt

SEQ ID NO: 58479 - DNA, 25 bp, probe
ggcattaggagtgtttcatttgata

SEQ ID NO: 58480 - DNA, 25 bp, probe
gggcattaggagtgtttcatttgat

SEQ ID NO: 58481 - DNA, 25 bp, probe
aagggcattaggagtgtttcatttg

SEQ ID NO: 58482 - DNA, 25 bp, probe
gaagggcattaggagtgtttcattt

SEQ ID NO: 58483 - DNA, 25 bp, probe
aaatgtcaaggaatgaagaacaaca

SEQ ID NO: 58484 - DNA, 25 bp, probe
accttgttactgctactacactttg

SEQ ID NO: 58485 - DNA, 25 bp, probe
caccttgttactgctactacacttt

SEQ ID NO: 58486 - DNA, 25 bp, probe
tgaagaacaacaactctcagtggtg

SEQ ID NO: 58487 - DNA, 25 bp, probe
ttactgctactacactttgctcctc

SEQ ID NO: 58488 - DNA, 25 bp, probe
ctcatttactggatttgacttcagc

SEQ ID NO: 58489 - DNA, 25 bp, probe
cctcatttactggatttgacttcag

SEQ ID NO: 58490 - DNA, 25 bp, probe
ttgttactgctactacactttgctc

SEQ ID NO: 58491 - DNA, 25 bp, probe
cttgttactgctactacactttgct

SEQ ID NO: 58492 - DNA, 25 bp, probe
tttctctgttaattcctggaactgt

SEQ ID NO: 58493 - DNA, 25 bp, probe
gttactgctactacactttgctcct

SEQ ID NO: 58494 - DNA, 25 bp, probe
gcattaggagtgtttcatttgatat

SEQ ID NO: 58495 - DNA, 25 bp, probe
tcatttactggatttgacttcagcc

SEQ ID NO: 58496 - DNA, 25 bp, probe
tcctcatttactggatttgacttca

SEQ ID NO: 58497 - DNA, 25 bp, probe
gtcctcatttactggatttgacttc

SEQ ID NO: 58498 - DNA, 25 bp, probe
taggagtgtttcatttgatatgtga

SEQ ID NO: 58499 - DNA, 25 bp, probe
agggcattaggagtgtttcatttga

SEQ ID NO: 58500 - DNA, 25 bp, probe
acgccttgatgctttcttcattaag

SEQ ID NO: 58501 - DNA, 25 bp, probe
gacgccttgatgctttcttcattaa

SEQ ID NO: 58502 - DNA, 25 bp, probe
ccttgttactgctactacactttgc

SEQ ID NO: 58503 - DNA, 25 bp, probe
tactgctactacactttgctcctct

SEQ ID NO: 58504 - DNA, 25 bp, probe
ttaggagtgtttcatttgatatgtg

SEQ ID NO: 58505 - DNA, 25 bp, probe
tctgttaattcctggaactgtattt

SEQ ID NO: 58506 - DNA, 25 bp, probe
catttactggatttgacttcagcca

SEQ ID NO: 58507 - DNA, 25 bp, probe
aacctttatccctgcttatctgaaa

SEQ ID NO: 58508 - DNA, 25 bp, probe
aaacctttatccctgcttatctgaa

SEQ ID NO: 58509 - DNA, 25 bp, probe
aatgtagttctttgttcctgctttc

SEQ ID NO: 58510 - DNA, 25 bp, probe
ctttaccttcatttcatcctgttgg

SEQ ID NO: 58511 - DNA, 25 bp, probe
ctctcccttctttaccttcatttca

SEQ ID NO: 58512 - DNA, 25 bp, probe
tctctcccttctttaccttcatttc

SEQ ID NO: 58513 - DNA, 25 bp, probe
cctttatccctgcttatctgaaact

SEQ ID NO: 58514 - DNA, 25 bp, probe
gaaacctttatccctgcttatctga

SEQ ID NO: 58515 - DNA, 25 bp, probe
tagttctttgttcctgctttctctt

SEQ ID NO: 58516 - DNA, 25 bp, probe
actctcctttgatattatgtggctt

SEQ ID NO: 58517 - DNA, 25 bp, probe
aactctcctttgatattatgtggct

SEQ ID NO: 58518 - DNA, 25 bp, probe
tgtaatgtagttctttgttcctgct

SEQ ID NO: 58519 - DNA, 25 bp, probe
atgtaatgtagttctttgttcctgc

SEQ ID NO: 58520 - DNA, 25 bp, probe
ccttctttaccttcatttcatcctg

SEQ ID NO: 58521 - DNA, 25 bp, probe
cccttctttaccttcatttcatcct

SEQ ID NO: 58522 - DNA, 25 bp, probe
tctcccttctttaccttcatttcat

SEQ ID NO: 58523 - DNA, 25 bp, probe
tgcttcatatctctcccttctttac

SEQ ID NO: 58524 - DNA, 25 bp, probe
ttatccctgcttatctgaaacttcc

SEQ ID NO: 58525 - DNA, 25 bp, probe
acctttatccctgcttatctgaaac

SEQ ID NO: 58526 - DNA, 25 bp, probe
gtaatgtagttctttgttcctgctt

SEQ ID NO: 58527 - DNA, 25 bp, probe
tcccttctttaccttcatttcatcc

SEQ ID NO: 58528 - DNA, 25 bp, probe
ctgcttcatatctctcccttcttta

SEQ ID NO: 58529 - DNA, 25 bp, probe
atgtagttctttgttcctgctttct

SEQ ID NO: 58530 - DNA, 25 bp, probe
ctcccttctttaccttcatttcatc

SEQ ID NO: 58531 - DNA, 25 bp, probe
gcttcatatctctcccttctttacc

SEQ ID NO: 58532 - DNA, 25 bp, probe
atctctcccttctttaccttcattt

SEQ ID NO: 58533 - DNA, 25 bp, probe
gttctttgttcctgctttctctttc

SEQ ID NO: 58534 - DNA, 25 bp, probe
tctttaccttcatttcatcctgttg

SEQ ID NO: 58535 - DNA, 25 bp, probe
catatctctcccttctttaccttca

SEQ ID NO: 58536 - DNA, 25 bp, probe
gtagttctttgttcctgctttctct

SEQ ID NO: 58537 - DNA, 25 bp, probe
aaactctcctttgatattatgtggc

SEQ ID NO: 58538 - DNA, 25 bp, probe
ttctttgttcctgctttctctttca

SEQ ID NO: 58539 - DNA, 25 bp, probe
agttctttgttcctgctttctcttt

SEQ ID NO: 58540 - DNA, 25 bp, probe
cttctttaccttcatttcatcctgt

SEQ ID NO: 58541 - DNA, 25 bp, probe
tcatatctctcccttctttaccttc

SEQ ID NO: 58542 - DNA, 25 bp, probe
cttcatatctctcccttctttacct

SEQ ID NO: 58543 - DNA, 25 bp, probe
taatgtagttctttgttcctgcttt

SEQ ID NO: 58544 - DNA, 25 bp, probe
agaaacctttatccctgcttatctg

SEQ ID NO: 58545 - DNA, 25 bp, probe
ctctcctttgatattatgtggcttt

SEQ ID NO: 58546 - DNA, 25 bp, probe
tgtagttctttgttcctgctttctc

SEQ ID NO: 58547 - DNA, 25 bp, probe
ctttatccctgcttatctgaaactt

SEQ ID NO: 58548 - DNA, 25 bp, probe
cctagaaacctttatccctgcttat

SEQ ID NO: 58549 - DNA, 25 bp, probe
ctgcttatctgaaacttcccaactt

SEQ ID NO: 58550 - DNA, 25 bp, probe
tttatccctgcttatctgaaacttc

SEQ ID NO: 58551 - DNA, 25 bp, probe
tgccttaactcatagacatcaatca

SEQ ID NO: 58552 - DNA, 25 bp, probe
gccttaactcatagacatcaatcag

SEQ ID NO: 58553 - DNA, 25 bp, probe
gatgaatcaactgagacacaacttc

SEQ ID NO: 58554 - DNA, 25 bp, probe
ttgccttaactcatagacatcaatc

SEQ ID NO: 58555 - DNA, 25 bp, probe
ctcatagacatcaatcagagagtgt

SEQ ID NO: 58556 - DNA, 25 bp, probe
tgatgaatcaactgagacacaactt

SEQ ID NO: 58557 - DNA, 25 bp, probe
ccttaactcatagacatcaatcaga

SEQ ID NO: 58558 - DNA, 25 bp, probe
ctgatgaatcaactgagacacaact

SEQ ID NO: 58559 - DNA, 25 bp, probe
acatcaatcagagagtgtcacagat

SEQ ID NO: 58560 - DNA, 25 bp, probe
catcaatcagagagtgtcacagatt

SEQ ID NO: 58561 - DNA, 25 bp, probe
ttcaaatcccttacatcctttagca

SEQ ID NO: 58562 - DNA, 25 bp, probe
gacacaacttcaaatcccttacatc

SEQ ID NO: 58563 - DNA, 25 bp, probe
cttcaaatcccttacatcctttagc

SEQ ID NO: 58564 - DNA, 25 bp, probe
acaacttcaaatcccttacatcctt

SEQ ID NO: 58565 - DNA, 25 bp, probe
agacacaacttcaaatcccttacat

SEQ ID NO: 58566 - DNA, 25 bp, probe
caaatcccttacatcctttagcaga

SEQ ID NO: 58567 - DNA, 25 bp, probe
tcaaatcccttacatcctttagcag

SEQ ID NO: 58568 - DNA, 25 bp, probe
aaatcccttacatcctttagcagat

SEQ ID NO: 58569 - DNA, 25 bp, probe
caacttcaaatcccttacatccttt

SEQ ID NO: 58570 - DNA, 25 bp, probe
gtgtcatcaaccctgtcttctattt

SEQ ID NO: 58571 - DNA, 25 bp, probe
cacaacttcaaatcccttacatcct

SEQ ID NO: 58572 - DNA, 25 bp, probe
gagacacaacttcaaatcccttaca

SEQ ID NO: 58573 - DNA, 25 bp, probe
agtataaggctttctcaatcagtgc

SEQ ID NO: 58574 - DNA, 25 bp, probe
aggtagtataaggctttctcaatca

SEQ ID NO: 58575 - DNA, 25 bp, probe
agagagtgtcacagatttaaccttg

SEQ ID NO: 58576 - DNA, 25 bp, probe
cagagagtgtcacagatttaacctt

SEQ ID NO: 58577 - DNA, 25 bp, probe
atcagagagtgtcacagatttaacc

SEQ ID NO: 58578 - DNA, 25 bp, probe
gacatgctgatgaatcaactgagac

SEQ ID NO: 58579 - DNA, 25 bp, probe
acacaacttcaaatcccttacatcc

SEQ ID NO: 58580 - DNA, 25 bp, probe
ggtagtataaggctttctcaatcag

SEQ ID NO: 58581 - DNA, 25 bp, probe
taactcatagacatcaatcagagag

SEQ ID NO: 58582 - DNA, 25 bp, probe
gctgatgaatcaactgagacacaac

SEQ ID NO: 58583 - DNA, 25 bp, probe
agtgtcatcaaccctgtcttctatt

SEQ ID NO: 58584 - DNA, 25 bp, probe
catgctgatgaatcaactgagacac

SEQ ID NO: 58585 - DNA, 25 bp, probe
tcagagagtgtcacagatttaacct

SEQ ID NO: 58586 - DNA, 25 bp, probe
gtttgccttaactcatagacatcaa

SEQ ID NO: 58587 - DNA, 25 bp, probe
gaatcaactgagacacaacttcaaa

SEQ ID NO: 58588 - DNA, 25 bp, probe
acttcaaatcccttacatcctttag

SEQ ID NO: 58589 - DNA, 25 bp, probe
atcaactgagacacaacttcaaatc

SEQ ID NO: 58590 - DNA, 25 bp, probe
atgctgatgaatcaactgagacaca

SEQ ID NO: 58591 - DNA, 25 bp, probe
ctgagacacaacttcaaatccctta

SEQ ID NO: 58592 - DNA, 25 bp, probe
aatcaactgagacacaacttcaaat

SEQ ID NO: 58593 - DNA, 25 bp, probe
agagtgtcacagatttaaccttgat

SEQ ID NO: 58594 - DNA, 25 bp, probe
tgctgatgaatcaactgagacacaa

SEQ ID NO: 58595 - DNA, 25 bp, probe
cttatcttctatgttacggtgatgg

SEQ ID NO: 58596 - DNA, 25 bp, probe
ccaatactagagtcatagcgttagg

SEQ ID NO: 58597 - DNA, 25 bp, probe
caccaatactagagtcatagcgtta

SEQ ID NO: 58598 - DNA, 25 bp, probe
accaatactagagtcatagcgttag

SEQ ID NO: 58599 - DNA, 25 bp, probe
caatactagagtcatagcgttagga

SEQ ID NO: 58600 - DNA, 25 bp, probe
tgttcttatcttctatgttacggtg

SEQ ID NO: 58601 - DNA, 25 bp, probe
gtgttcttatcttctatgttacggt

SEQ ID NO: 58602 - DNA, 25 bp, probe
tgtgttcttatcttctatgttacgg

SEQ ID NO: 58603 - DNA, 25 bp, probe
aatactagagtcatagcgttaggag

SEQ ID NO: 58604 - DNA, 25 bp, probe
tcaccaatactagagtcatagcgtt

SEQ ID NO: 58605 - DNA, 25 bp, probe
ttcaccaatactagagtcatagcgt

SEQ ID NO: 58606 - DNA, 25 bp, probe
ttcttaatactgtcataggcattgc

SEQ ID NO: 58607 - DNA, 25 bp, probe
gttcttatcttctatgttacggtga

SEQ ID NO: 58608 - DNA, 25 bp, probe
atactagagtcatagcgttaggagt

SEQ ID NO: 58609 - DNA, 25 bp, probe
tactagagtcatagcgttaggagtg

SEQ ID NO: 58610 - DNA, 25 bp, probe
aacaatcttcctagactctctgatc

SEQ ID NO: 58611 - DNA, 25 bp, probe
tcttatcttctatgttacggtgatg

SEQ ID NO: 58612 - DNA, 25 bp, probe
ttaacaatcttcctagactctctga

SEQ ID NO: 58613 - DNA, 25 bp, probe
taacaatcttcctagactctctgat

SEQ ID NO: 58614 - DNA, 25 bp, probe
ttcttatcttctatgttacggtgat

SEQ ID NO: 58615 - DNA, 25 bp, probe
agcaaatacaatatggcattatccg

SEQ ID NO: 58616 - DNA, 25 bp, probe
ttatcttctatgttacggtgatggg

SEQ ID NO: 58617 - DNA, 25 bp, probe
catctacttcctctttcctccttta

SEQ ID NO: 58618 - DNA, 25 bp, probe
acatctacttcctctttcctccttt

SEQ ID NO: 58619 - DNA, 25 bp, probe
tttgtatccatcctgcctgtaattt

SEQ ID NO: 58620 - DNA, 25 bp, probe
tatcttctatgttacggtgatgggt

SEQ ID NO: 58621 - DNA, 25 bp, probe
ttcctctttcctcctttaatgaacc

SEQ ID NO: 58622 - DNA, 25 bp, probe
ttgtgttcttatcttctatgttacg

SEQ ID NO: 58623 - DNA, 25 bp, probe
acttcctctttcctcctttaatgaa

SEQ ID NO: 58624 - DNA, 25 bp, probe
cttcctctttcctcctttaatgaac

SEQ ID NO: 58625 - DNA, 25 bp, probe
attcttaatactgtcataggcattg

SEQ ID NO: 58626 - DNA, 25 bp, probe
tttcaccaatactagagtcatagcg

SEQ ID NO: 58627 - DNA, 25 bp, probe
gcaaatacaatatggcattatccgc

SEQ ID NO: 58628 - DNA, 25 bp, probe
tacttcctctttcctcctttaatga

SEQ ID NO: 58629 - DNA, 25 bp, probe
ctctttcctcctttaatgaaccctg

SEQ ID NO: 58630 - DNA, 25 bp, probe
caatcctttgagatatgcttccatt

SEQ ID NO: 58631 - DNA, 25 bp, probe
gtgatgggtttgacattcatttaca

SEQ ID NO: 58632 - DNA, 25 bp, probe
ctacttcctctttcctcctttaatg

SEQ ID NO: 58633 - DNA, 25 bp, probe
tctacttcctctttcctcctttaat

SEQ ID NO: 58634 - DNA, 25 bp, probe
atctacttcctctttcctcctttaa

SEQ ID NO: 58635 - DNA, 25 bp, probe
tgatgggtttgacattcatttacag

SEQ ID NO: 58636 - DNA, 25 bp, probe
gatgggtttgacattcatttacaga

SEQ ID NO: 58637 - DNA, 25 bp, probe
atcttctatgttacggtgatgggtt

SEQ ID NO: 58638 - DNA, 25 bp, probe
aatcctttgagatatgcttccattt

SEQ ID NO: 58639 - DNA, 25 bp, probe
gttactacatccagattcctcaaga

SEQ ID NO: 58640 - DNA, 25 bp, probe
tacctgtatctctaagtgttgctca

SEQ ID NO: 58641 - DNA, 25 bp, probe
cgttactacatccagattcctcaag

SEQ ID NO: 58642 - DNA, 25 bp, probe
catcgttactacatccagattcctc

SEQ ID NO: 58643 - DNA, 25 bp, probe
atcgttactacatccagattcctca

SEQ ID NO: 58644 - DNA, 25 bp, probe
tcgttactacatccagattcctcaa

SEQ ID NO: 58645 - DNA, 25 bp, probe
atacctgtatctctaagtgttgctc

SEQ ID NO: 58646 - DNA, 25 bp, probe
gaagatacctgtgtctatgagtgtc

SEQ ID NO: 58647 - DNA, 25 bp, probe
ttgaagatacctgtgtctatgagtg

SEQ ID NO: 58648 - DNA, 25 bp, probe
acaacatcgttactacatccagatt

SEQ ID NO: 58649 - DNA, 25 bp, probe
acatcgttactacatccagattcct

SEQ ID NO: 58650 - DNA, 25 bp, probe
aagatacctgtgtctatgagtgtct

SEQ ID NO: 58651 - DNA, 25 bp, probe
aacatcgttactacatccagattcc

SEQ ID NO: 58652 - DNA, 25 bp, probe
caacatcgttactacatccagattc

SEQ ID NO: 58653 - DNA, 25 bp, probe
gacaacatcgttactacatccagat

SEQ ID NO: 58654 - DNA, 25 bp, probe
aagacaacatcgttactacatccag

SEQ ID NO: 58655 - DNA, 25 bp, probe
tgaagatacctgtgtctatgagtgt

SEQ ID NO: 58656 - DNA, 25 bp, probe
cgtattcacatagacatcttggagc

SEQ ID NO: 58657 - DNA, 25 bp, probe
gcgtattcacatagacatcttggag

SEQ ID NO: 58658 - DNA, 25 bp, probe
ttactacatccagattcctcaagat

SEQ ID NO: 58659 - DNA, 25 bp, probe
agatacctgtgtctatgagtgtctg

SEQ ID NO: 58660 - DNA, 25 bp, probe
agacaacatcgttactacatccaga

SEQ ID NO: 58661 - DNA, 25 bp, probe
gatacctgtgtctatgagtgtctgg

SEQ ID NO: 58662 - DNA, 25 bp, probe
tacctgtgtctatgagtgtctggat

SEQ ID NO: 58663 - DNA, 25 bp, probe
atacctgtgtctatgagtgtctgga

SEQ ID NO: 58664 - DNA, 25 bp, probe
tattcacatagacatcttggagctg

SEQ ID NO: 58665 - DNA, 25 bp, probe
gtattcacatagacatcttggagct

SEQ ID NO: 58666 - DNA, 25 bp, probe
ggcgtattcacatagacatcttgga

SEQ ID NO: 58667 - DNA, 25 bp, probe
cctgtatctctaagtgttgctcaga

SEQ ID NO: 58668 - DNA, 25 bp, probe
tctaagtgttgctcagagtgaagag

SEQ ID NO: 58669 - DNA, 25 bp, probe
acctgtatctctaagtgttgctcag

SEQ ID NO: 58670 - DNA, 25 bp, probe
ctaagtgttgctcagagtgaagagt

SEQ ID NO: 58671 - DNA, 25 bp, probe
gatacctgtatctctaagtgttgct

SEQ ID NO: 58672 - DNA, 25 bp, probe
ctcagagtgaagagtgaagagcatt

SEQ ID NO: 58673 - DNA, 25 bp, probe
ggatacctgtatctctaagtgttgc

SEQ ID NO: 58674 - DNA, 25 bp, probe
tggatacctgtatctctaagtgttg

SEQ ID NO: 58675 - DNA, 25 bp, probe
gttggatacctgtatctctaagtgt

SEQ ID NO: 58676 - DNA, 25 bp, probe
taagtgttgctcagagtgaagagtg

SEQ ID NO: 58677 - DNA, 25 bp, probe
caagatggattcctgagcgaataag

SEQ ID NO: 58678 - DNA, 25 bp, probe
aaagacaacatcgttactacatcca

SEQ ID NO: 58679 - DNA, 25 bp, probe
tttactggcaggaatttgaagatac

SEQ ID NO: 58680 - DNA, 25 bp, probe
gtttactggcaggaatttgaagata

SEQ ID NO: 58681 - DNA, 25 bp, probe
cagattcctcaagatggattcctga

SEQ ID NO: 58682 - DNA, 25 bp, probe
ttactggcaggaatttgaagatacc

SEQ ID NO: 58683 - DNA, 25 bp, probe
ctgcttatcatcatctactgctaca

SEQ ID NO: 58684 - DNA, 25 bp, probe
tgcttatcatcatctactgctacat

SEQ ID NO: 58685 - DNA, 25 bp, probe
atctactgctacatcttcatcttca

SEQ ID NO: 58686 - DNA, 25 bp, probe
tcatctactgctacatcttcatctt

SEQ ID NO: 58687 - DNA, 25 bp, probe
tcatcatctactgctacatcttcat

SEQ ID NO: 58688 - DNA, 25 bp, probe
atcatcatctactgctacatcttca

SEQ ID NO: 58689 - DNA, 25 bp, probe
gcttatcatcatctactgctacatc

SEQ ID NO: 58690 - DNA, 25 bp, probe
catctactgctacatcttcatcttc

SEQ ID NO: 58691 - DNA, 25 bp, probe
atcatctactgctacatcttcatct

SEQ ID NO: 58692 - DNA, 25 bp, probe
catcatctactgctacatcttcatc

SEQ ID NO: 58693 - DNA, 25 bp, probe
tctactgctacatcttcatcttcag

SEQ ID NO: 58694 - DNA, 25 bp, probe
ctactgctacatcttcatcttcagg

SEQ ID NO: 58695 - DNA, 25 bp, probe
tatcatcatctactgctacatcttc

SEQ ID NO: 58696 - DNA, 25 bp, probe
cttatcatcatctactgctacatct

SEQ ID NO: 58697 - DNA, 25 bp, probe
ttatcatcatctactgctacatctt

SEQ ID NO: 58698 - DNA, 25 bp, probe
tactgctacatcttcatcttcaggg

SEQ ID NO: 58699 - DNA, 25 bp, probe
ctacatcttcatcttcagggccatc

SEQ ID NO: 58700 - DNA, 25 bp, probe
actgctacatcttcatcttcagggc

SEQ ID NO: 58701 - DNA, 25 bp, probe
tacatcttcatcttcagggccatcc

SEQ ID NO: 58702 - DNA, 25 bp, probe
ctgcaatccacaaccccatcattta

SEQ ID NO: 58703 - DNA, 25 bp, probe
caatccacaaccccatcatttacgc

SEQ ID NO: 58704 - DNA, 25 bp, probe
gcaatccacaaccccatcatttacg

SEQ ID NO: 58705 - DNA, 25 bp, probe
tgcaatccacaaccccatcatttac

SEQ ID NO: 58706 - DNA, 25 bp, probe
gctacatcttcatcttcagggccat

SEQ ID NO: 58707 - DNA, 25 bp, probe
ctgctacatcttcatcttcagggcc

SEQ ID NO: 58708 - DNA, 25 bp, probe
tctgcaatccacaaccccatcattt

SEQ ID NO: 58709 - DNA, 25 bp, probe
cttaatatgcaagactctcaaggag

SEQ ID NO: 58710 - DNA, 25 bp, probe
taccttaatatgcaagactctcaag

SEQ ID NO: 58711 - DNA, 25 bp, probe
ttaccttaatatgcaagactctcaa

SEQ ID NO: 58712 - DNA, 25 bp, probe
attaccttaatatgcaagactctca

SEQ ID NO: 58713 - DNA, 25 bp, probe
acatctggaaattaccttaatatgc

SEQ ID NO: 58714 - DNA, 25 bp, probe
gatcaaacatctggaaattacctta

SEQ ID NO: 58715 - DNA, 25 bp, probe
aattaccttaatatgcaagactctc

SEQ ID NO: 58716 - DNA, 25 bp, probe
atcaaacatctggaaattaccttaa

SEQ ID NO: 58717 - DNA, 25 bp, probe
agatcaaacatctggaaattacctt

SEQ ID NO: 58718 - DNA, 25 bp, probe
tcaaacatctggaaattaccttaat

SEQ ID NO: 58719 - DNA, 25 bp, probe
gtactttcttcctttccagctcctc

SEQ ID NO: 58720 - DNA, 25 bp, probe
aatatgcaagactctcaaggagtac

SEQ ID NO: 58721 - DNA, 25 bp, probe
ttaatatgcaagactctcaaggagt

SEQ ID NO: 58722 - DNA, 25 bp, probe
tggaaattaccttaatatgcaagac

SEQ ID NO: 58723 - DNA, 25 bp, probe
tactttcttcctttccagctcctca

SEQ ID NO: 58724 - DNA, 25 bp, probe
ccttaatatgcaagactctcaagga

SEQ ID NO: 58725 - DNA, 25 bp, probe
accttaatatgcaagactctcaagg

SEQ ID NO: 58726 - DNA, 25 bp, probe
taatatgcaagactctcaaggagta

SEQ ID NO: 58727 - DNA, 25 bp, probe
catctggaaattaccttaatatgca

SEQ ID NO: 58728 - DNA, 25 bp, probe
ggaaattaccttaatatgcaagact

SEQ ID NO: 58729 - DNA, 25 bp, probe
ctggaaattaccttaatatgcaaga

SEQ ID NO: 58730 - DNA, 25 bp, probe
tctggaaattaccttaatatgcaag

SEQ ID NO: 58731 - DNA, 25 bp, probe
atatgcaagactctcaaggagtact

SEQ ID NO: 58732 - DNA, 25 bp, probe
tatgcaagactctcaaggagtactt

SEQ ID NO: 58733 - DNA, 25 bp, probe
atctggaaattaccttaatatgcaa

SEQ ID NO: 58734 - DNA, 25 bp, probe
tgggactctcagcagatcaaacatc

SEQ ID NO: 58735 - DNA, 25 bp, probe
agtactttcttcctttccagctcct

SEQ ID NO: 58736 - DNA, 25 bp, probe
actttcttcctttccagctcctcag

SEQ ID NO: 58737 - DNA, 25 bp, probe
gagtactttcttcctttccagctcc

SEQ ID NO: 58738 - DNA, 25 bp, probe
aaattaccttaatatgcaagactct

SEQ ID NO: 58739 - DNA, 25 bp, probe
ctgggactctcagcagatcaaacat

SEQ ID NO: 58740 - DNA, 25 bp, probe
gaaattaccttaatatgcaagactc

SEQ ID NO: 58741 - DNA, 25 bp, probe
caaacatctggaaattaccttaata

SEQ ID NO: 58742 - DNA, 25 bp, probe
ggagtactttcttcctttccagctc

SEQ ID NO: 58743 - DNA, 25 bp, probe
gggactctcagcagatcaaacatct

SEQ ID NO: 58744 - DNA, 25 bp, probe
aacatctggaaattaccttaatatg

SEQ ID NO: 58745 - DNA, 25 bp, probe
caagactctcaaggagtactttctt

SEQ ID NO: 58746 - DNA, 25 bp, probe
aagactctcaaggagtactttcttc

SEQ ID NO: 58747 - DNA, 25 bp, probe
agactctcaaggagtactttcttcc

SEQ ID NO: 58748 - DNA, 25 bp, probe
atgcaagactctcaaggagtacttt

SEQ ID NO: 58749 - DNA, 25 bp, probe
gactctcaaggagtactttcttcct

SEQ ID NO: 58750 - DNA, 25 bp, probe
gcaagactctcaaggagtactttct

SEQ ID NO: 58751 - DNA, 25 bp, probe
ctttcttcctttccagctcctcagg

SEQ ID NO: 58752 - DNA, 25 bp, probe
tgcaagactctcaaggagtactttc

SEQ ID NO: 58753 - DNA, 25 bp, probe
aggagtactttcttcctttccagct

SEQ ID NO: 58754 - DNA, 25 bp, probe
gtggtgataatgtttcttggagaca

SEQ ID NO: 58755 - DNA, 25 bp, probe
cgtggtgataatgtttcttggagac

SEQ ID NO: 58756 - DNA, 25 bp, probe
ccgtggtgataatgtttcttggaga

SEQ ID NO: 58757 - DNA, 25 bp, probe
gtgataatgtttcttggagacatcc

SEQ ID NO: 58758 - DNA, 25 bp, probe
ggtgataatgtttcttggagacatc

SEQ ID NO: 58759 - DNA, 25 bp, probe
tggtgataatgtttcttggagacat

SEQ ID NO: 58760 - DNA, 25 bp, probe
tgataatgtttcttggagacatccc

SEQ ID NO: 58761 - DNA, 25 bp, probe
gccgtggtgataatgtttcttggag

SEQ ID NO: 58762 - DNA, 25 bp, probe
ctgccgtggtgataatgtttcttgg

SEQ ID NO: 58763 - DNA, 25 bp, probe
cctgccgtggtgataatgtttcttg

SEQ ID NO: 58764 - DNA, 25 bp, probe
tgccgtggtgataatgtttcttgga

SEQ ID NO: 58765 - DNA, 25 bp, probe
tttatccgttccatgggtgaagctc

SEQ ID NO: 58766 - DNA, 25 bp, probe
gtttatccgttccatgggtgaagct

SEQ ID NO: 58767 - DNA, 25 bp, probe
ttatcaagcatccatctgactaagg

SEQ ID NO: 58768 - DNA, 25 bp, probe
aagttaattgagaatcatcagccac

SEQ ID NO: 58769 - DNA, 25 bp, probe
agttaattgagaatcatcagccacg

SEQ ID NO: 58770 - DNA, 25 bp, probe
tatcaagcatccatctgactaaggc

SEQ ID NO: 58771 - DNA, 25 bp, probe
taaatcagtttcatacaacctccct

SEQ ID NO: 58772 - DNA, 25 bp, probe
gtaaatcagtttcatacaacctccc

SEQ ID NO: 58773 - DNA, 25 bp, probe
cctgacacttggatttacttcttta

SEQ ID NO: 58774 - DNA, 25 bp, probe
aaatcagtttcatacaacctccctc

SEQ ID NO: 58775 - DNA, 25 bp, probe
gcctgacacttggatttacttcttt

SEQ ID NO: 58776 - DNA, 25 bp, probe
ttctttatcaagcatccatctgact

SEQ ID NO: 58777 - DNA, 25 bp, probe
acttctttatcaagcatccatctga

SEQ ID NO: 58778 - DNA, 25 bp, probe
cttctttatcaagcatccatctgac

SEQ ID NO: 58779 - DNA, 25 bp, probe
tacttctttatcaagcatccatctg

SEQ ID NO: 58780 - DNA, 25 bp, probe
tctttatcaagcatccatctgacta

SEQ ID NO: 58781 - DNA, 25 bp, probe
catccatctgactaaggcacaaatc

SEQ ID NO: 58782 - DNA, 25 bp, probe
aaagttaattgagaatcatcagcca

SEQ ID NO: 58783 - DNA, 25 bp, probe
tttatcaagcatccatctgactaag

SEQ ID NO: 58784 - DNA, 25 bp, probe
ctttatcaagcatccatctgactaa

SEQ ID NO: 58785 - DNA, 25 bp, probe
gttaattgagaatcatcagccacgt

SEQ ID NO: 58786 - DNA, 25 bp, probe
catctgactaaggcacaaatccaac

SEQ ID NO: 58787 - DNA, 25 bp, probe
cttgcctgacacttggatttacttc

SEQ ID NO: 58788 - DNA, 25 bp, probe
ttacttctttatcaagcatccatct

SEQ ID NO: 58789 - DNA, 25 bp, probe
tgcctgacacttggatttacttctt

SEQ ID NO: 58790 - DNA, 25 bp, probe
ttgcctgacacttggatttacttct

SEQ ID NO: 58791 - DNA, 25 bp, probe
tctgactaaggcacaaatccaacat

SEQ ID NO: 58792 - DNA, 25 bp, probe
atctgactaaggcacaaatccaaca

SEQ ID NO: 58793 - DNA, 25 bp, probe
aatcagtttcatacaacctccctcc

SEQ ID NO: 58794 - DNA, 25 bp, probe
atccatctgactaaggcacaaatcc

SEQ ID NO: 58795 - DNA, 25 bp, probe
tttacttctttatcaagcatccatc

SEQ ID NO: 58796 - DNA, 25 bp, probe
gatttacttctttatcaagcatcca

SEQ ID NO: 58797 - DNA, 25 bp, probe
tggatttacttctttatcaagcatc

SEQ ID NO: 58798 - DNA, 25 bp, probe
ctgactaaggcacaaatccaacatg

SEQ ID NO: 58799 - DNA, 25 bp, probe
gacacttggatttacttctttatca

SEQ ID NO: 58800 - DNA, 25 bp, probe
tgacacttggatttacttctttatc

SEQ ID NO: 58801 - DNA, 25 bp, probe
atcaagcatccatctgactaaggca

SEQ ID NO: 58802 - DNA, 25 bp, probe
ccatctgactaaggcacaaatccaa

SEQ ID NO: 58803 - DNA, 25 bp, probe
ctgacacttggatttacttctttat

SEQ ID NO: 58804 - DNA, 25 bp, probe
aagcatccatctgactaaggcacaa

SEQ ID NO: 58805 - DNA, 25 bp, probe
tgtaaatcagtttcatacaacctcc

SEQ ID NO: 58806 - DNA, 25 bp, probe
ccttgcctgacacttggatttactt

SEQ ID NO: 58807 - DNA, 25 bp, probe
ttggatttacttctttatcaagcat

SEQ ID NO: 58808 - DNA, 25 bp, probe
gcatccatctgactaaggcacaaat

SEQ ID NO: 58809 - DNA, 25 bp, probe
atttacttctttatcaagcatccat

SEQ ID NO: 58810 - DNA, 25 bp, probe
catgaatgcaaagggaaagaggaaa

SEQ ID NO: 58811 - DNA, 25 bp, probe
acattcttctgtggcagttatctta

SEQ ID NO: 58812 - DNA, 25 bp, probe
cattcttctgtggcagttatcttac

SEQ ID NO: 58813 - DNA, 25 bp, probe
attcttctgtggcagttatcttacc

SEQ ID NO: 58814 - DNA, 25 bp, probe
cttctgtggcagttatcttaccttc

SEQ ID NO: 58815 - DNA, 25 bp, probe
tcttctgtggcagttatcttacctt

SEQ ID NO: 58816 - DNA, 25 bp, probe
ttcttctgtggcagttatcttacct

SEQ ID NO: 58817 - DNA, 25 bp, probe
ttaagcaccactggactacacattc

SEQ ID NO: 58818 - DNA, 25 bp, probe
gttatcttaccttcccatagacacc

SEQ ID NO: 58819 - DNA, 25 bp, probe
ttctgtggcagttatcttaccttcc

SEQ ID NO: 58820 - DNA, 25 bp, probe
gcagttatcttaccttcccatagac

SEQ ID NO: 58821 - DNA, 25 bp, probe
agttatcttaccttcccatagacac

SEQ ID NO: 58822 - DNA, 25 bp, probe
cagttatcttaccttcccatagaca

SEQ ID NO: 58823 - DNA, 25 bp, probe
ttatcttaccttcccatagacaccc

SEQ ID NO: 58824 - DNA, 25 bp, probe
caccactggactacacattcttctg

SEQ ID NO: 58825 - DNA, 25 bp, probe
ggcagttatcttaccttcccataga

SEQ ID NO: 58826 - DNA, 25 bp, probe
caacacacacacacattctctccat

SEQ ID NO: 58827 - DNA, 25 bp, probe
tatcttaccttcccatagacaccca

SEQ ID NO: 58828 - DNA, 25 bp, probe
taagcaccactggactacacattct

SEQ ID NO: 58829 - DNA, 25 bp, probe
tttaagcaccactggactacacatt

SEQ ID NO: 58830 - DNA, 25 bp, probe
accactggactacacattcttctgt

SEQ ID NO: 58831 - DNA, 25 bp, probe
aacacacacacacattctctccatg

SEQ ID NO: 58832 - DNA, 25 bp, probe
ctgtggatgaaatcttgctcagaag

SEQ ID NO: 58833 - DNA, 25 bp, probe
aatcttgctcagaagctcaatatgc

SEQ ID NO: 58834 - DNA, 25 bp, probe
tggcagttatcttaccttcccatag

SEQ ID NO: 58835 - DNA, 25 bp, probe
gatgatctcgatctcttgacctcat

SEQ ID NO: 58836 - DNA, 25 bp, probe
gtttaagcaccactggactacacat

SEQ ID NO: 58837 - DNA, 25 bp, probe
gatctcgatctcttgacctcatgat

SEQ ID NO: 58838 - DNA, 25 bp, probe
gtggcagttatcttaccttcccata

SEQ ID NO: 58839 - DNA, 25 bp, probe
atcttaccttcccatagacacccag

SEQ ID NO: 58840 - DNA, 25 bp, probe
atgatctcgatctcttgacctcatg

SEQ ID NO: 58841 - DNA, 25 bp, probe
ggatgatctcgatctcttgacctca

SEQ ID NO: 58842 - DNA, 25 bp, probe
aggatgatctcgatctcttgacctc

SEQ ID NO: 58843 - DNA, 25 bp, probe
aagcaccactggactacacattctt

SEQ ID NO: 58844 - DNA, 25 bp, probe
tttctgtggatgaaatcttgctcag

SEQ ID NO: 58845 - DNA, 25 bp, probe
ctttctgtggatgaaatcttgctca

SEQ ID NO: 58846 - DNA, 25 bp, probe
caggatgatctcgatctcttgacct

SEQ ID NO: 58847 - DNA, 25 bp, probe
gcaccactggactacacattcttct

SEQ ID NO: 58848 - DNA, 25 bp, probe
agcaccactggactacacattcttc

SEQ ID NO: 58849 - DNA, 25 bp, probe
cctttctgtggatgaaatcttgctc

SEQ ID NO: 58850 - DNA, 25 bp, probe
aaatcttgctcagaagctcaatatg

SEQ ID NO: 58851 - DNA, 25 bp, probe
tgaaatcttgctcagaagctcaata

SEQ ID NO: 58852 - DNA, 25 bp, probe
gaaatcttgctcagaagctcaatat

SEQ ID NO: 58853 - DNA, 25 bp, probe
tcctttctgtggatgaaatcttgct

SEQ ID NO: 58854 - DNA, 25 bp, probe
ccaggatgatctcgatctcttgacc

SEQ ID NO: 58855 - DNA, 25 bp, probe
ttcagaatgtcttgagaatccagtg

SEQ ID NO: 58856 - DNA, 25 bp, probe
agaatgtcttgagaatccagtgtct

SEQ ID NO: 58857 - DNA, 25 bp, probe
cagaatgtcttgagaatccagtgtc

SEQ ID NO: 58858 - DNA, 25 bp, probe
tcagaatgtcttgagaatccagtgt

SEQ ID NO: 58859 - DNA, 25 bp, probe
tattatgtgacatcgcttgttccta

SEQ ID NO: 58860 - DNA, 25 bp, probe
agagagcatatcaagcatgtgaatt

SEQ ID NO: 58861 - DNA, 25 bp, probe
attatgtgacatcgcttgttcctaa

SEQ ID NO: 58862 - DNA, 25 bp, probe
ttatgtgacatcgcttgttcctaag

SEQ ID NO: 58863 - DNA, 25 bp, probe
cagagagcatatcaagcatgtgaat

SEQ ID NO: 58864 - DNA, 25 bp, probe
gtattatgtgacatcgcttgttcct

SEQ ID NO: 58865 - DNA, 25 bp, probe
tgtattatgtgacatcgcttgttcc

SEQ ID NO: 58866 - DNA, 25 bp, probe
gttacgacctggtagtgagaacatt

SEQ ID NO: 58867 - DNA, 25 bp, probe
tatgtgacatcgcttgttcctaagt

SEQ ID NO: 58868 - DNA, 25 bp, probe
gggaatggattgtagatatttcacc

SEQ ID NO: 58869 - DNA, 25 bp, probe
tttcagaatgtcttgagaatccagt

SEQ ID NO: 58870 - DNA, 25 bp, probe
ctttcagaatgtcttgagaatccag

SEQ ID NO: 58871 - DNA, 25 bp, probe
cctttcagaatgtcttgagaatcca

SEQ ID NO: 58872 - DNA, 25 bp, probe
ttacgacctggtagtgagaacattt

SEQ ID NO: 58873 - DNA, 25 bp, probe
atgtattatgtgacatcgcttgttc

SEQ ID NO: 58874 - DNA, 25 bp, probe
gctatgtattatgtgacatcgcttg

SEQ ID NO: 58875 - DNA, 25 bp, probe
gagagcatatcaagcatgtgaattt

SEQ ID NO: 58876 - DNA, 25 bp, probe
ctatgtattatgtgacatcgcttgt

SEQ ID NO: 58877 - DNA, 25 bp, probe
gtgacatcgcttgttcctaagtgaa

SEQ ID NO: 58878 - DNA, 25 bp, probe
gcctttcagaatgtcttgagaatcc

SEQ ID NO: 58879 - DNA, 25 bp, probe
ggctatgtattatgtgacatcgctt

SEQ ID NO: 58880 - DNA, 25 bp, probe
atggctatgtattatgtgacatcgc

SEQ ID NO: 58881 - DNA, 25 bp, probe
gctggaagctatggctatgtattat

SEQ ID NO: 58882 - DNA, 25 bp, probe
tatgtattatgtgacatcgcttgtt

SEQ ID NO: 58883 - DNA, 25 bp, probe
agctatggctatgtattatgtgaca

SEQ ID NO: 58884 - DNA, 25 bp, probe
tggaagctatggctatgtattatgt

SEQ ID NO: 58885 - DNA, 25 bp, probe
ttgtagatatttcaccaagaattgc

SEQ ID NO: 58886 - DNA, 25 bp, probe
gctatggctatgtattatgtgacat

SEQ ID NO: 58887 - DNA, 25 bp, probe
ggaagctatggctatgtattatgtg

SEQ ID NO: 58888 - DNA, 25 bp, probe
ctggaagctatggctatgtattatg

SEQ ID NO: 58889 - DNA, 25 bp, probe
tatggctatgtattatgtgacatcg

SEQ ID NO: 58890 - DNA, 25 bp, probe
aagctatggctatgtattatgtgac

SEQ ID NO: 58891 - DNA, 25 bp, probe
atgtgacatcgcttgttcctaagtg

SEQ ID NO: 58892 - DNA, 25 bp, probe
tggctatgtattatgtgacatcgct

SEQ ID NO: 58893 - DNA, 25 bp, probe
ggaatggattgtagatatttcacca

SEQ ID NO: 58894 - DNA, 25 bp, probe
gaagctatggctatgtattatgtga

SEQ ID NO: 58895 - DNA, 25 bp, probe
gcagagagcatatcaagcatgtgaa

SEQ ID NO: 58896 - DNA, 25 bp, probe
atatttcaccaagaattgcagagag

SEQ ID NO: 58897 - DNA, 25 bp, probe
gatatttcaccaagaattgcagaga

SEQ ID NO: 58898 - DNA, 25 bp, probe
agatatttcaccaagaattgcagag

SEQ ID NO: 58899 - DNA, 25 bp, probe
atctcacctgttggaatgcactaat

SEQ ID NO: 58900 - DNA, 25 bp, probe
gatctcacctgttggaatgcactaa

SEQ ID NO: 58901 - DNA, 25 bp, probe
tcacctgttggaatgcactaatgtt

SEQ ID NO: 58902 - DNA, 25 bp, probe
tctcacctgttggaatgcactaatg

SEQ ID NO: 58903 - DNA, 25 bp, probe
ctcacctgttggaatgcactaatgt

SEQ ID NO: 58904 - DNA, 25 bp, probe
ttaagaagctcttcaccaactgtca

SEQ ID NO: 58905 - DNA, 25 bp, probe
tgagccccttaaatatcttgtctac

SEQ ID NO: 58906 - DNA, 25 bp, probe
tttctgagccccttaaatatcttgt

SEQ ID NO: 58907 - DNA, 25 bp, probe
tgttttctgagccccttaaatatct

SEQ ID NO: 58908 - DNA, 25 bp, probe
ctgagccccttaaatatcttgtcta

SEQ ID NO: 58909 - DNA, 25 bp, probe
ttctgagccccttaaatatcttgtc

SEQ ID NO: 58910 - DNA, 25 bp, probe
actaatgttttctgagccccttaaa

SEQ ID NO: 58911 - DNA, 25 bp, probe
gagccccttaaatatcttgtctaca

SEQ ID NO: 58912 - DNA, 25 bp, probe
taagaagctcttcaccaactgtcag

SEQ ID NO: 58913 - DNA, 25 bp, probe
ctaatgttttctgagccccttaaat

SEQ ID NO: 58914 - DNA, 25 bp, probe
tctgagccccttaaatatcttgtct

SEQ ID NO: 58915 - DNA, 25 bp, probe
atgttttctgagccccttaaatatc

SEQ ID NO: 58916 - DNA, 25 bp, probe
agccccttaaatatcttgtctacat

SEQ ID NO: 58917 - DNA, 25 bp, probe
ttttctgagccccttaaatatcttg

SEQ ID NO: 58918 - DNA, 25 bp, probe
gttttctgagccccttaaatatctt

SEQ ID NO: 58919 - DNA, 25 bp, probe
cactaatgttttctgagccccttaa

SEQ ID NO: 58920 - DNA, 25 bp, probe
ctttgtgatctcacctgttggaatg

SEQ ID NO: 58921 - DNA, 25 bp, probe
cacctgttggaatgcactaatgttt

SEQ ID NO: 58922 - DNA, 25 bp, probe
aatgttttctgagccccttaaatat

SEQ ID NO: 58923 - DNA, 25 bp, probe
agaagctcttcaccaactgtcagaa

SEQ ID NO: 58924 - DNA, 25 bp, probe
tgatctcacctgttggaatgcacta

SEQ ID NO: 58925 - DNA, 25 bp, probe
gccccttaaatatcttgtctacatt

SEQ ID NO: 58926 - DNA, 25 bp, probe
taatgttttctgagccccttaaata

SEQ ID NO: 58927 - DNA, 25 bp, probe
tttaagaagctcttcaccaactgtc

SEQ ID NO: 58928 - DNA, 25 bp, probe
cccttaaatatcttgtctacattct

SEQ ID NO: 58929 - DNA, 25 bp, probe
cctttgtgatctcacctgttggaat

SEQ ID NO: 58930 - DNA, 25 bp, probe
ttggaatgcactaatgttttctgag

SEQ ID NO: 58931 - DNA, 25 bp, probe
gttggaatgcactaatgttttctga

SEQ ID NO: 58932 - DNA, 25 bp, probe
ctgttggaatgcactaatgttttct

SEQ ID NO: 58933 - DNA, 25 bp, probe
tgttggaatgcactaatgttttctg

SEQ ID NO: 58934 - DNA, 25 bp, probe
gcactaatgttttctgagcccctta

SEQ ID NO: 58935 - DNA, 25 bp, probe
cctgttggaatgcactaatgttttc

SEQ ID NO: 58936 - DNA, 25 bp, probe
aagaagctcttcaccaactgtcaga

SEQ ID NO: 58937 - DNA, 25 bp, probe
ccccttaaatatcttgtctacattc

SEQ ID NO: 58938 - DNA, 25 bp, probe
acctgttggaatgcactaatgtttt

SEQ ID NO: 58939 - DNA, 25 bp, probe
gaagctcttcaccaactgtcagaag

SEQ ID NO: 58940 - DNA, 25 bp, probe
tttgtgatctcacctgttggaatgc

SEQ ID NO: 58941 - DNA, 25 bp, probe
tggaatgcactaatgttttctgagc

SEQ ID NO: 58942 - DNA, 25 bp, probe
gaagcctttgtgatctcacctgttg

SEQ ID NO: 58943 - DNA, 25 bp, probe
cagaggcagaaatcacaatttatgt

SEQ ID NO: 58944 - DNA, 25 bp, probe
acagaggcagaaatcacaatttatg

SEQ ID NO: 58945 - DNA, 25 bp, probe
cacagaggcagaaatcacaatttat

SEQ ID NO: 58946 - DNA, 25 bp, probe
tcacagaggcagaaatcacaattta

SEQ ID NO: 58947 - DNA, 25 bp, probe
agaggcagaaatcacaatttatgtt

SEQ ID NO: 58948 - DNA, 25 bp, probe
gaggcagaaatcacaatttatgttc

SEQ ID NO: 58949 - DNA, 25 bp, probe
taaattgggtcacagaggcagaaat

SEQ ID NO: 58950 - DNA, 25 bp, probe
ataaattgggtcacagaggcagaaa

SEQ ID NO: 58951 - DNA, 25 bp, probe
gtcacagaggcagaaatcacaattt

SEQ ID NO: 58952 - DNA, 25 bp, probe
gataaattgggtcacagaggcagaa

SEQ ID NO: 58953 - DNA, 25 bp, probe
aggcagaaatcacaatttatgttct

SEQ ID NO: 58954 - DNA, 25 bp, probe
ggtcacagaggcagaaatcacaatt

SEQ ID NO: 58955 - DNA, 25 bp, probe
aaattgggtcacagaggcagaaatc

SEQ ID NO: 58956 - DNA, 25 bp, probe
acaatttatgttctgcaatatcctg

SEQ ID NO: 58957 - DNA, 25 bp, probe
cacaatttatgttctgcaatatcct

SEQ ID NO: 58958 - DNA, 25 bp, probe
tcacaatttatgttctgcaatatcc

SEQ ID NO: 58959 - DNA, 25 bp, probe
tgataaattgggtcacagaggcaga

SEQ ID NO: 58960 - DNA, 25 bp, probe
gaaatcacaatttatgttctgcaat

SEQ ID NO: 58961 - DNA, 25 bp, probe
caatttatgttctgcaatatcctgc

SEQ ID NO: 58962 - DNA, 25 bp, probe
agaaatcacaatttatgttctgcaa

SEQ ID NO: 58963 - DNA, 25 bp, probe
aattgggtcacagaggcagaaatca

SEQ ID NO: 58964 - DNA, 25 bp, probe
aaaggtgataaattgggtcacagag

SEQ ID NO: 58965 - DNA, 25 bp, probe
gggtcacagaggcagaaatcacaat

SEQ ID NO: 58966 - DNA, 25 bp, probe
attgggtcacagaggcagaaatcac

SEQ ID NO: 58967 - DNA, 25 bp, probe
atcacaatttatgttctgcaatatc

SEQ ID NO: 58968 - DNA, 25 bp, probe
aaatcacaatttatgttctgcaata

SEQ ID NO: 58969 - DNA, 25 bp, probe
aaggtgataaattgggtcacagagg

SEQ ID NO: 58970 - DNA, 25 bp, probe
aatcacaatttatgttctgcaatat

SEQ ID NO: 58971 - DNA, 25 bp, probe
aaaaggtgataaattgggtcacaga

SEQ ID NO: 58972 - DNA, 25 bp, probe
gtgataaattgggtcacagaggcag

SEQ ID NO: 58973 - DNA, 25 bp, probe
tatggcagaaggcaaccacagaaaa

SEQ ID NO: 58974 - DNA, 25 bp, probe
aggtgataaattgggtcacagaggc

SEQ ID NO: 58975 - DNA, 25 bp, probe
ggtgataaattgggtcacagaggca

SEQ ID NO: 58976 - DNA, 25 bp, probe
aaaaggacagaggctgttccctatg

SEQ ID NO: 58977 - DNA, 25 bp, probe
aggtattatgaggagaaggtaggag

SEQ ID NO: 58978 - DNA, 25 bp, probe
ttatgaggagaaggtaggagtgtag

SEQ ID NO: 58979 - DNA, 25 bp, probe
attatgaggagaaggtaggagtgta

SEQ ID NO: 58980 - DNA, 25 bp, probe
tattatgaggagaaggtaggagtgt

SEQ ID NO: 58981 - DNA, 25 bp, probe
ggtattatgaggagaaggtaggagt

SEQ ID NO: 58982 - DNA, 25 bp, probe
caggtattatgaggagaaggtagga

SEQ ID NO: 58983 - DNA, 25 bp, probe
gtattatgaggagaaggtaggagtg

SEQ ID NO: 58984 - DNA, 25 bp, probe
acatatcacagatgccttctctaag

SEQ ID NO: 58985 - DNA, 25 bp, probe
cacatatcacagatgccttctctaa

SEQ ID NO: 58986 - DNA, 25 bp, probe
atatcacagatgccttctctaagac

SEQ ID NO: 58987 - DNA, 25 bp, probe
catatcacagatgccttctctaaga

SEQ ID NO: 58988 - DNA, 25 bp, probe
tatcacagatgccttctctaagaca

SEQ ID NO: 58989 - DNA, 25 bp, probe
acacatatcacagatgccttctcta

SEQ ID NO: 58990 - DNA, 25 bp, probe
cattaggtcagccactagatgtatt

SEQ ID NO: 58991 - DNA, 25 bp, probe
tcaggtattatgaggagaaggtagg

SEQ ID NO: 58992 - DNA, 25 bp, probe
atcacagatgccttctctaagacag

SEQ ID NO: 58993 - DNA, 25 bp, probe
cgtagtattgaacagagcaagttgt

SEQ ID NO: 58994 - DNA, 25 bp, probe
tatgaggagaaggtaggagtgtagc

SEQ ID NO: 58995 - DNA, 25 bp, probe
gacacatatcacagatgccttctct

SEQ ID NO: 58996 - DNA, 25 bp, probe
agacacatatcacagatgccttctc

SEQ ID NO: 58997 - DNA, 25 bp, probe
gagacacatatcacagatgccttct

SEQ ID NO: 58998 - DNA, 25 bp, probe
tctctccaacaacgtagtattgaac

SEQ ID NO: 58999 - DNA, 25 bp, probe
gtctctccaacaacgtagtattgaa

SEQ ID NO: 59000 - DNA, 25 bp, probe
ttaggtcagccactagatgtatttg

SEQ ID NO: 59001 - DNA, 25 bp, probe
aacgtagtattgaacagagcaagtt

SEQ ID NO: 59002 - DNA, 25 bp, probe
tccaacaacgtagtattgaacagag

SEQ ID NO: 59003 - DNA, 25 bp, probe
ctccaacaacgtagtattgaacaga

SEQ ID NO: 59004 - DNA, 25 bp, probe
tctccaacaacgtagtattgaacag

SEQ ID NO: 59005 - DNA, 25 bp, probe
ctctccaacaacgtagtattgaaca

SEQ ID NO: 59006 - DNA, 25 bp, probe
gagacattaggtcagccactagatg

SEQ ID NO: 59007 - DNA, 25 bp, probe
attaggtcagccactagatgtattt

SEQ ID NO: 59008 - DNA, 25 bp, probe
caagttgttaatttgtggagtaggg

SEQ ID NO: 59009 - DNA, 25 bp, probe
ggagacacatatcacagatgccttc

SEQ ID NO: 59010 - DNA, 25 bp, probe
gaaggagacacatatcacagatgcc

SEQ ID NO: 59011 - DNA, 25 bp, probe
ggaaggagacacatatcacagatgc

SEQ ID NO: 59012 - DNA, 25 bp, probe
agcaagttgttaatttgtggagtag

SEQ ID NO: 59013 - DNA, 25 bp, probe
gagcaagttgttaatttgtggagta

SEQ ID NO: 59014 - DNA, 25 bp, probe
aacaacgtagtattgaacagagcaa

SEQ ID NO: 59015 - DNA, 25 bp, probe
gcaagttgttaatttgtggagtagg

SEQ ID NO: 59016 - DNA, 25 bp, probe
taggtcagccactagatgtatttgt

SEQ ID NO: 59017 - DNA, 25 bp, probe
cagagcaagttgttaatttgtggag

SEQ ID NO: 59018 - DNA, 25 bp, probe
acgtagtattgaacagagcaagttg

SEQ ID NO: 59019 - DNA, 25 bp, probe
caacgtagtattgaacagagcaagt

SEQ ID NO: 59020 - DNA, 25 bp, probe
acaacgtagtattgaacagagcaag

SEQ ID NO: 59021 - DNA, 25 bp, probe
attaacaagatatcatcaacggagc

SEQ ID NO: 59022 - DNA, 25 bp, probe
ttaacaagatatcatcaacggagcc

SEQ ID NO: 59023 - DNA, 25 bp, probe
ccattaacaagatatcatcaacgga

SEQ ID NO: 59024 - DNA, 25 bp, probe
cattaacaagatatcatcaacggag

SEQ ID NO: 59025 - DNA, 25 bp, probe
cccattaacaagatatcatcaacgg

SEQ ID NO: 59026 - DNA, 25 bp, probe
tcccattaacaagatatcatcaacg

SEQ ID NO: 59027 - DNA, 25 bp, probe
caacctggagaagacctgagacatc

SEQ ID NO: 59028 - DNA, 25 bp, probe
ccctacatcccattaacaagatatc

SEQ ID NO: 59029 - DNA, 25 bp, probe
cccctacatcccattaacaagatat

SEQ ID NO: 59030 - DNA, 25 bp, probe
acccctacatcccattaacaagata

SEQ ID NO: 59031 - DNA, 25 bp, probe
aatctgaacccctacatcccattaa

SEQ ID NO: 59032 - DNA, 25 bp, probe
cctacatcccattaacaagatatca

SEQ ID NO: 59033 - DNA, 25 bp, probe
aacccctacatcccattaacaagat

SEQ ID NO: 59034 - DNA, 25 bp, probe
acatcccattaacaagatatcatca

SEQ ID NO: 59035 - DNA, 25 bp, probe
caatctgaacccctacatcccatta

SEQ ID NO: 59036 - DNA, 25 bp, probe
taacaagatatcatcaacggagccc

SEQ ID NO: 59037 - DNA, 25 bp, probe
atctgaacccctacatcccattaac

SEQ ID NO: 59038 - DNA, 25 bp, probe
gaacccctacatcccattaacaaga

SEQ ID NO: 59039 - DNA, 25 bp, probe
tgaacccctacatcccattaacaag

SEQ ID NO: 59040 - DNA, 25 bp, probe
ctgaacccctacatcccattaacaa

SEQ ID NO: 59041 - DNA, 25 bp, probe
atcccattaacaagatatcatcaac

SEQ ID NO: 59042 - DNA, 25 bp, probe
catcccattaacaagatatcatcaa

SEQ ID NO: 59043 - DNA, 25 bp, probe
tctgaacccctacatcccattaaca

SEQ ID NO: 59044 - DNA, 25 bp, probe
acaatctgaacccctacatcccatt

SEQ ID NO: 59045 - DNA, 25 bp, probe
aacaagatatcatcaacggagccct

SEQ ID NO: 59046 - DNA, 25 bp, probe
tacatcccattaacaagatatcatc

SEQ ID NO: 59047 - DNA, 25 bp, probe
ctacatcccattaacaagatatcat

SEQ ID NO: 59048 - DNA, 25 bp, probe
cacaatctgaacccctacatcccat

SEQ ID NO: 59049 - DNA, 25 bp, probe
acaagatatcatcaacggagccctg

SEQ ID NO: 59050 - DNA, 25 bp, probe
gtctgtcttctgccagatggaagtg

SEQ ID NO: 59051 - DNA, 25 bp, probe
gcttctggtaacaaatatcgctaaa

SEQ ID NO: 59052 - DNA, 25 bp, probe
caaatatcgctaaaccttactgtga

SEQ ID NO: 59053 - DNA, 25 bp, probe
cttactgtgaatttaggcatctctg

SEQ ID NO: 59054 - DNA, 25 bp, probe
ttactgtgaatttaggcatctctgg

SEQ ID NO: 59055 - DNA, 25 bp, probe
aaatatcgctaaaccttactgtgaa

SEQ ID NO: 59056 - DNA, 25 bp, probe
aatatcgctaaaccttactgtgaat

SEQ ID NO: 59057 - DNA, 25 bp, probe
cttctggtaacaaatatcgctaaac

SEQ ID NO: 59058 - DNA, 25 bp, probe
tatcgctaaaccttactgtgaattt

SEQ ID NO: 59059 - DNA, 25 bp, probe
atatcgctaaaccttactgtgaatt

SEQ ID NO: 59060 - DNA, 25 bp, probe
acaaatatcgctaaaccttactgtg

SEQ ID NO: 59061 - DNA, 25 bp, probe
atcgctaaaccttactgtgaattta

SEQ ID NO: 59062 - DNA, 25 bp, probe
aatacagacagaagcatgaaagaaa

SEQ ID NO: 59063 - DNA, 25 bp, probe
ccattcgtagctgaatatgtgatta

SEQ ID NO: 59064 - DNA, 25 bp, probe
aacaaatatcgctaaaccttactgt

SEQ ID NO: 59065 - DNA, 25 bp, probe
ccttactgtgaatttaggcatctct

SEQ ID NO: 59066 - DNA, 25 bp, probe
aaccttactgtgaatttaggcatct

SEQ ID NO: 59067 - DNA, 25 bp, probe
agtagtgaaacacaaacaaaggaaa

SEQ ID NO: 59068 - DNA, 25 bp, probe
aagtagtgaaacacaaacaaaggaa

SEQ ID NO: 59069 - DNA, 25 bp, probe
aaagtagtgaaacacaaacaaagga

SEQ ID NO: 59070 - DNA, 25 bp, probe
aaaccttactgtgaatttaggcatc

SEQ ID NO: 59071 - DNA, 25 bp, probe
accttactgtgaatttaggcatctc

SEQ ID NO: 59072 - DNA, 25 bp, probe
gccattcgtagctgaatatgtgatt

SEQ ID NO: 59073 - DNA, 25 bp, probe
tgaaataatacagacagaagcatga

SEQ ID NO: 59074 - DNA, 25 bp, probe
taatacagacagaagcatgaaagaa

SEQ ID NO: 59075 - DNA, 25 bp, probe
tctggtaacaaatatcgctaaacct

SEQ ID NO: 59076 - DNA, 25 bp, probe
ctggtaacaaatatcgctaaacctt

SEQ ID NO: 59077 - DNA, 25 bp, probe
ttctggtaacaaatatcgctaaacc

SEQ ID NO: 59078 - DNA, 25 bp, probe
ataatacagacagaagcatgaaaga

SEQ ID NO: 59079 - DNA, 25 bp, probe
tactgtgaatttaggcatctctggc

SEQ ID NO: 59080 - DNA, 25 bp, probe
taaaccttactgtgaatttaggcat

SEQ ID NO: 59081 - DNA, 25 bp, probe
taacaaatatcgctaaaccttactg

SEQ ID NO: 59082 - DNA, 25 bp, probe
agggcagcctatctcattatctaat

SEQ ID NO: 59083 - DNA, 25 bp, probe
aagggcagcctatctcattatctaa

SEQ ID NO: 59084 - DNA, 25 bp, probe
aaagggcagcctatctcattatcta

SEQ ID NO: 59085 - DNA, 25 bp, probe
tgccattcgtagctgaatatgtgat

SEQ ID NO: 59086 - DNA, 25 bp, probe
ttcgtagctgaatatgtgattaatt

SEQ ID NO: 59087 - DNA, 25 bp, probe
gagtctgccattcgtagctgaatat

SEQ ID NO: 59088 - DNA, 25 bp, probe
tggtaacaaatatcgctaaacctta

SEQ ID NO: 59089 - DNA, 25 bp, probe
ctctaatgatggacagaaagggcag

SEQ ID NO: 59090 - DNA, 25 bp, probe
aataatacagacagaagcatgaaag

SEQ ID NO: 59091 - DNA, 25 bp, probe
gaaataatacagacagaagcatgaa

SEQ ID NO: 59092 - DNA, 25 bp, probe
cattcgtagctgaatatgtgattaa

SEQ ID NO: 59093 - DNA, 25 bp, probe
ctgtgaatttaggcatctctggcat

SEQ ID NO: 59094 - DNA, 25 bp, probe
atgaaataatacagacagaagcatg

SEQ ID NO: 59095 - DNA, 25 bp, probe
aaggcatcatctacagagacttgaa

SEQ ID NO: 59096 - DNA, 25 bp, probe
gagatccttcaggagatgttgtatg

SEQ ID NO: 59097 - DNA, 25 bp, probe
agagatccttcaggagatgttgtat

SEQ ID NO: 59098 - DNA, 25 bp, probe
gcatcatctacagagacttgaaact

SEQ ID NO: 59099 - DNA, 25 bp, probe
cagagatccttcaggagatgttgta

SEQ ID NO: 59100 - DNA, 25 bp, probe
gatccttcaggagatgttgtatgga

SEQ ID NO: 59101 - DNA, 25 bp, probe
agatccttcaggagatgttgtatgg

SEQ ID NO: 59102 - DNA, 25 bp, probe
atcatctacagagacttgaaactgg

SEQ ID NO: 59103 - DNA, 25 bp, probe
ggcatcatctacagagacttgaaac

SEQ ID NO: 59104 - DNA, 25 bp, probe
atccttcaggagatgttgtatggac

SEQ ID NO: 59105 - DNA, 25 bp, probe
aggcatcatctacagagacttgaaa

SEQ ID NO: 59106 - DNA, 25 bp, probe
aaaggcatcatctacagagacttga

SEQ ID NO: 59107 - DNA, 25 bp, probe
catcatctacagagacttgaaactg

SEQ ID NO: 59108 - DNA, 25 bp, probe
catctacagagacttgaaactggac

SEQ ID NO: 59109 - DNA, 25 bp, probe
tcatctacagagacttgaaactgga

SEQ ID NO: 59110 - DNA, 25 bp, probe
atctacagagacttgaaactggaca

SEQ ID NO: 59111 - DNA, 25 bp, probe
ctacagagacttgaaactggacaac

SEQ ID NO: 59112 - DNA, 25 bp, probe
tctacagagacttgaaactggacaa

SEQ ID NO: 59113 - DNA, 25 bp, probe
ccttcaggagatgttgtatggacct

SEQ ID NO: 59114 - DNA, 25 bp, probe
agagatcatttctgcactcatgttc

SEQ ID NO: 59115 - DNA, 25 bp, probe
cttgaaactggacaacgtactactg

SEQ ID NO: 59116 - DNA, 25 bp, probe
gacttgaaactggacaacgtactac

SEQ ID NO: 59117 - DNA, 25 bp, probe
agacttgaaactggacaacgtacta

SEQ ID NO: 59118 - DNA, 25 bp, probe
tacagagacttgaaactggacaacg

SEQ ID NO: 59119 - DNA, 25 bp, probe
gatcatttctgcactcatgttcctc

SEQ ID NO: 59120 - DNA, 25 bp, probe
acttgaaactggacaacgtactact

SEQ ID NO: 59121 - DNA, 25 bp, probe
aaaaggcatcatctacagagacttg

SEQ ID NO: 59122 - DNA, 25 bp, probe
tccttcaggagatgttgtatggacc

SEQ ID NO: 59123 - DNA, 25 bp, probe
ccagagatccttcaggagatgttgt

SEQ ID NO: 59124 - DNA, 25 bp, probe
agatcatttctgcactcatgttcct

SEQ ID NO: 59125 - DNA, 25 bp, probe
gagatcatttctgcactcatgttcc

SEQ ID NO: 59126 - DNA, 25 bp, probe
ttgaaactggacaacgtactactgg

SEQ ID NO: 59127 - DNA, 25 bp, probe
gagacttgaaactggacaacgtact

SEQ ID NO: 59128 - DNA, 25 bp, probe
agagacttgaaactggacaacgtac

SEQ ID NO: 59129 - DNA, 25 bp, probe
gaaactggacaacgtactactggac

SEQ ID NO: 59130 - DNA, 25 bp, probe
atcatttctgcactcatgttcctcc

SEQ ID NO: 59131 - DNA, 25 bp, probe
cagagacttgaaactggacaacgta

SEQ ID NO: 59132 - DNA, 25 bp, probe
tgaaactggacaacgtactactgga

SEQ ID NO: 59133 - DNA, 25 bp, probe
cagagatcatttctgcactcatgtt

SEQ ID NO: 59134 - DNA, 25 bp, probe
catttctgcactcatgttcctccac

SEQ ID NO: 59135 - DNA, 25 bp, probe
aaactggacaacgtactactggacc

SEQ ID NO: 59136 - DNA, 25 bp, probe
tcatttctgcactcatgttcctcca

SEQ ID NO: 59137 - DNA, 25 bp, probe
cccagagatccttcaggagatgttg

SEQ ID NO: 59138 - DNA, 25 bp, probe
caaaagtccagacgtttcgatgaag

SEQ ID NO: 59139 - DNA, 25 bp, probe
attacatcggtattaacttggcaac

SEQ ID NO: 59140 - DNA, 25 bp, probe
gattacatcggtattaacttggcaa

SEQ ID NO: 59141 - DNA, 25 bp, probe
ggattacatcggtattaacttggca

SEQ ID NO: 59142 - DNA, 25 bp, probe
tggattacatcggtattaacttggc

SEQ ID NO: 59143 - DNA, 25 bp, probe
caagaaccgatgtgaattacttagt

SEQ ID NO: 59144 - DNA, 25 bp, probe
atggattacatcggtattaacttgg

SEQ ID NO: 59145 - DNA, 25 bp, probe
aagaaccgatgtgaattacttagtt

SEQ ID NO: 59146 - DNA, 25 bp, probe
aatggacaagaaccgatgtgaatta

SEQ ID NO: 59147 - DNA, 25 bp, probe
tgctcatggattacatcggtattaa

SEQ ID NO: 59148 - DNA, 25 bp, probe
gctcatggattacatcggtattaac

SEQ ID NO: 59149 - DNA, 25 bp, probe
ctgctcatggattacatcggtatta

SEQ ID NO: 59150 - DNA, 25 bp, probe
acaagaaccgatgtgaattacttag

SEQ ID NO: 59151 - DNA, 25 bp, probe
gacaagaaccgatgtgaattactta

SEQ ID NO: 59152 - DNA, 25 bp, probe
ttcttactgctcatggattacatcg

SEQ ID NO: 59153 - DNA, 25 bp, probe
ggacaagaaccgatgtgaattactt

SEQ ID NO: 59154 - DNA, 25 bp, probe
atggacaagaaccgatgtgaattac

SEQ ID NO: 59155 - DNA, 25 bp, probe
tactgctcatggattacatcggtat

SEQ ID NO: 59156 - DNA, 25 bp, probe
ttactgctcatggattacatcggta

SEQ ID NO: 59157 - DNA, 25 bp, probe
ttgtgagatgttgaacagaaggaat

SEQ ID NO: 59158 - DNA, 25 bp, probe
atgacttgtgagatgttgaacagaa

SEQ ID NO: 59159 - DNA, 25 bp, probe
ctcatggattacatcggtattaact

SEQ ID NO: 59160 - DNA, 25 bp, probe
tgtgagatgttgaacagaaggaatg

SEQ ID NO: 59161 - DNA, 25 bp, probe
cttgtgagatgttgaacagaaggaa

SEQ ID NO: 59162 - DNA, 25 bp, probe
tgacttgtgagatgttgaacagaag

SEQ ID NO: 59163 - DNA, 25 bp, probe
catgacttgtgagatgttgaacaga

SEQ ID NO: 59164 - DNA, 25 bp, probe
actgctcatggattacatcggtatt

SEQ ID NO: 59165 - DNA, 25 bp, probe
tataacgaaatggacaagaaccgat

SEQ ID NO: 59166 - DNA, 25 bp, probe
tggacaagaaccgatgtgaattact

SEQ ID NO: 59167 - DNA, 25 bp, probe
catggattacatcggtattaacttg

SEQ ID NO: 59168 - DNA, 25 bp, probe
ttacatcggtattaacttggcaacc

SEQ ID NO: 59169 - DNA, 25 bp, probe
ggtattaacttggcaaccatgaatt

SEQ ID NO: 59170 - DNA, 25 bp, probe
tcatggattacatcggtattaactt

SEQ ID NO: 59171 - DNA, 25 bp, probe
tcttactgctcatggattacatcgg

SEQ ID NO: 59172 - DNA, 25 bp, probe
gtgagatgttgaacagaaggaatgg

SEQ ID NO: 59173 - DNA, 25 bp, probe
gacttgtgagatgttgaacagaagg

SEQ ID NO: 59174 - DNA, 25 bp, probe
gtataacgaaatggacaagaaccga

SEQ ID NO: 59175 - DNA, 25 bp, probe
ctcttcgggttctatttctgtatgc

SEQ ID NO: 59176 - DNA, 25 bp, probe
gctcttcgggttctatttctgtatg

SEQ ID NO: 59177 - DNA, 25 bp, probe
cttactgctcatggattacatcggt

SEQ ID NO: 59178 - DNA, 25 bp, probe
acttgtgagatgttgaacagaagga

SEQ ID NO: 59179 - DNA, 25 bp, probe
gaattgccctcagtgaacatcttaa

SEQ ID NO: 59180 - DNA, 25 bp, probe
gttctatttctgtatgcccttggtg

SEQ ID NO: 59181 - DNA, 25 bp, probe
ataacgaaatggacaagaaccgatg

SEQ ID NO: 59182 - DNA, 25 bp, probe
gtgtataacgaaatggacaagaacc

SEQ ID NO: 59183 - DNA, 25 bp, probe
ctcctctactgcttgattctttctc

SEQ ID NO: 59184 - DNA, 25 bp, probe
tgtcctcctctactgcttgattctt

SEQ ID NO: 59185 - DNA, 25 bp, probe
ttctttctcagaggtttgtggttta

SEQ ID NO: 59186 - DNA, 25 bp, probe
tctttctcagaggtttgtggtttag

SEQ ID NO: 59187 - DNA, 25 bp, probe
attctttctcagaggtttgtggttt

SEQ ID NO: 59188 - DNA, 25 bp, probe
cttgattctttctcagaggtttgtg

SEQ ID NO: 59189 - DNA, 25 bp, probe
ctttctcagaggtttgtggtttagg

SEQ ID NO: 59190 - DNA, 25 bp, probe
gattctttctcagaggtttgtggtt

SEQ ID NO: 59191 - DNA, 25 bp, probe
ctgtcctcctctactgcttgattct

SEQ ID NO: 59192 - DNA, 25 bp, probe
cctcctctactgcttgattctttct

SEQ ID NO: 59193 - DNA, 25 bp, probe
tcctcctctactgcttgattctttc

SEQ ID NO: 59194 - DNA, 25 bp, probe
tagtgtggctactccttgtcctatg

SEQ ID NO: 59195 - DNA, 25 bp, probe
ttgattctttctcagaggtttgtgg

SEQ ID NO: 59196 - DNA, 25 bp, probe
tcctctactgcttgattctttctca

SEQ ID NO: 59197 - DNA, 25 bp, probe
gtcctcctctactgcttgattcttt

SEQ ID NO: 59198 - DNA, 25 bp, probe
tctactgcttgattctttctcagag

SEQ ID NO: 59199 - DNA, 25 bp, probe
ctctactgcttgattctttctcaga

SEQ ID NO: 59200 - DNA, 25 bp, probe
gcttgattctttctcagaggtttgt

SEQ ID NO: 59201 - DNA, 25 bp, probe
tgcttgattctttctcagaggtttg

SEQ ID NO: 59202 - DNA, 25 bp, probe
ctactgcttgattctttctcagagg

SEQ ID NO: 59203 - DNA, 25 bp, probe
cctctactgcttgattctttctcag

SEQ ID NO: 59204 - DNA, 25 bp, probe
ctgcttgattctttctcagaggttt

SEQ ID NO: 59205 - DNA, 25 bp, probe
cacaagccatttaatctcactcagc

SEQ ID NO: 59206 - DNA, 25 bp, probe
gcacaagccatttaatctcactcag

SEQ ID NO: 59207 - DNA, 25 bp, probe
tactgcttgattctttctcagaggt

SEQ ID NO: 59208 - DNA, 25 bp, probe
tgattctttctcagaggtttgtggt

SEQ ID NO: 59209 - DNA, 25 bp, probe
tttctcagaggtttgtggtttaggg

SEQ ID NO: 59210 - DNA, 25 bp, probe
aagccatttaatctcactcagcctc

SEQ ID NO: 59211 - DNA, 25 bp, probe
actgcttgattctttctcagaggtt

SEQ ID NO: 59212 - DNA, 25 bp, probe
cctgtcctcctctactgcttgattc

SEQ ID NO: 59213 - DNA, 25 bp, probe
caagccatttaatctcactcagcct

SEQ ID NO: 59214 - DNA, 25 bp, probe
ccatttaatctcactcagcctctgt

SEQ ID NO: 59215 - DNA, 25 bp, probe
cttgtcctatgcacatcctttaact

SEQ ID NO: 59216 - DNA, 25 bp, probe
tactccttgtcctatgcacatcctt

SEQ ID NO: 59217 - DNA, 25 bp, probe
acaagccatttaatctcactcagcc

SEQ ID NO: 59218 - DNA, 25 bp, probe
gtagtgtggctactccttgtcctat

SEQ ID NO: 59219 - DNA, 25 bp, probe
ttgtcctatgcacatcctttaactg

SEQ ID NO: 59220 - DNA, 25 bp, probe
ttgacctcttcctcatgaacatctt

SEQ ID NO: 59221 - DNA, 25 bp, probe
gtcctatgcacatcctttaactgtc

SEQ ID NO: 59222 - DNA, 25 bp, probe
agccatttaatctcactcagcctct

SEQ ID NO: 59223 - DNA, 25 bp, probe
ccttgtcctatgcacatcctttaac

SEQ ID NO: 59224 - DNA, 25 bp, probe
tccttgtcctatgcacatcctttaa

SEQ ID NO: 59225 - DNA, 25 bp, probe
ctgcacaagccatttaatctcactc

SEQ ID NO: 59226 - DNA, 25 bp, probe
tgacctcttcctcatgaacatcttc

SEQ ID NO: 59227 - DNA, 25 bp, probe
gatgtccttgatgctcatattgttc

SEQ ID NO: 59228 - DNA, 25 bp, probe
gaatacaggcatagagttcagactt

SEQ ID NO: 59229 - DNA, 25 bp, probe
agatgtccttgatgctcatattgtt

SEQ ID NO: 59230 - DNA, 25 bp, probe
aatagttgttgattggcaggagttg

SEQ ID NO: 59231 - DNA, 25 bp, probe
cagatgtccttgatgctcatattgt

SEQ ID NO: 59232 - DNA, 25 bp, probe
atgtccttgatgctcatattgttcc

SEQ ID NO: 59233 - DNA, 25 bp, probe
ttgtatcattatgaagtcatgcgtt

SEQ ID NO: 59234 - DNA, 25 bp, probe
ttagtcgagccaagttaagaatgtt

SEQ ID NO: 59235 - DNA, 25 bp, probe
tagtcgagccaagttaagaatgttc

SEQ ID NO: 59236 - DNA, 25 bp, probe
tattggtaaagaatggaaggtggag

SEQ ID NO: 59237 - DNA, 25 bp, probe
ctattggtaaagaatggaaggtgga

SEQ ID NO: 59238 - DNA, 25 bp, probe
tggtaaagagttagtttgagttgct

SEQ ID NO: 59239 - DNA, 25 bp, probe
gtggtaaagagttagtttgagttgc

SEQ ID NO: 59240 - DNA, 25 bp, probe
caggaaagaatgtgaaagtgactac

SEQ ID NO: 59241 - DNA, 25 bp, probe
ctcatattgttccctaatttgccag

SEQ ID NO: 59242 - DNA, 25 bp, probe
atgctcatattgttccctaatttgc

SEQ ID NO: 59243 - DNA, 25 bp, probe
tgtggtaaagagttagtttgagttg

SEQ ID NO: 59244 - DNA, 25 bp, probe
catattgttccctaatttgccagtg

SEQ ID NO: 59245 - DNA, 25 bp, probe
tcatattgttccctaatttgccagt

SEQ ID NO: 59246 - DNA, 25 bp, probe
tgttaagttgatggtgatgaaatgt

SEQ ID NO: 59247 - DNA, 25 bp, probe
ccaggaaagaatgtgaaagtgacta

SEQ ID NO: 59248 - DNA, 25 bp, probe
agagcagaactttcaccttcatata

SEQ ID NO: 59249 - DNA, 25 bp, probe
cagagcagaactttcaccttcatat

SEQ ID NO: 59250 - DNA, 25 bp, probe
ggtaaagagttagtttgagttgcta

SEQ ID NO: 59251 - DNA, 25 bp, probe
gaactcctaaatcaaattggcttct

SEQ ID NO: 59252 - DNA, 25 bp, probe
ggaactcctaaatcaaattggcttc

SEQ ID NO: 59253 - DNA, 25 bp, probe
gcaacttgtaaatgtggtaaagagt

SEQ ID NO: 59254 - DNA, 25 bp, probe
aatacaggcatagagttcagacttt

SEQ ID NO: 59255 - DNA, 25 bp, probe
gtgtgaatcttggtgtctacgttac

SEQ ID NO: 59256 - DNA, 25 bp, probe
ggctaaagaaggtttcagaaagaag

SEQ ID NO: 59257 - DNA, 25 bp, probe
cttagtcgagccaagttaagaatgt

SEQ ID NO: 59258 - DNA, 25 bp, probe
atagttgttgattggcaggagttgg

SEQ ID NO: 59259 - DNA, 25 bp, probe
atggctaaagaaggtttcagaaaga

SEQ ID NO: 59260 - DNA, 25 bp, probe
attggtaaagaatggaaggtggaga

SEQ ID NO: 59261 - DNA, 25 bp, probe
catcaatcccatcatctatgccttc

SEQ ID NO: 59262 - DNA, 25 bp, probe
ccttgatgctcatattgttccctaa

SEQ ID NO: 59263 - DNA, 25 bp, probe
agtgtgaatcttggtgtctacgtta

SEQ ID NO: 59264 - DNA, 25 bp, probe
tggctaaagaaggtttcagaaagaa

SEQ ID NO: 59265 - DNA, 25 bp, probe
aaagaaggagcctagagacagaaat

SEQ ID NO: 59266 - DNA, 25 bp, probe
gctaaagaaggtttcagaaagaagt

SEQ ID NO: 59267 - DNA, 25 bp, probe
cagtgggaactcctaaatcaaattg

SEQ ID NO: 59268 - DNA, 25 bp, probe
atgtggtaaagagttagtttgagtt

SEQ ID NO: 59269 - DNA, 25 bp, probe
aatgtggtaaagagttagtttgagt

SEQ ID NO: 59270 - DNA, 25 bp, probe
atattgttccctaatttgccagtgg

SEQ ID NO: 59271 - DNA, 25 bp, probe
catcctgaacccaacctagatcctc

SEQ ID NO: 59272 - DNA, 25 bp, probe
atcctgaacccaacctagatcctcc

SEQ ID NO: 59273 - DNA, 25 bp, probe
ccatcctgaacccaacctagatcct

SEQ ID NO: 59274 - DNA, 25 bp, probe
atattggtggcatcttcattgttct

SEQ ID NO: 59275 - DNA, 25 bp, probe
tattggtggcatcttcattgttctg

SEQ ID NO: 59276 - DNA, 25 bp, probe
aatattggtggcatcttcattgttc

SEQ ID NO: 59277 - DNA, 25 bp, probe
catggtagaagaattgaggatgtcc

SEQ ID NO: 59278 - DNA, 25 bp, probe
aagtaatgaagaaggaatccagcga

SEQ ID NO: 59279 - DNA, 25 bp, probe
gaatattggtggcatcttcattgtt

SEQ ID NO: 59280 - DNA, 25 bp, probe
cagaatattggtggcatcttcattg

SEQ ID NO: 59281 - DNA, 25 bp, probe
tcagaatattggtggcatcttcatt

SEQ ID NO: 59282 - DNA, 25 bp, probe
ttcagaatattggtggcatcttcat

SEQ ID NO: 59283 - DNA, 25 bp, probe
agaatattggtggcatcttcattgt

SEQ ID NO: 59284 - DNA, 25 bp, probe
taatgaagaaggaatccagcgagtc

SEQ ID NO: 59285 - DNA, 25 bp, probe
agtaatgaagaaggaatccagcgag

SEQ ID NO: 59286 - DNA, 25 bp, probe
gttcagaatattggtggcatcttca

SEQ ID NO: 59287 - DNA, 25 bp, probe
atatgatgaaggagaaatggtggag

SEQ ID NO: 59288 - DNA, 25 bp, probe
gtaatgaagaaggaatccagcgagt

SEQ ID NO: 59289 - DNA, 25 bp, probe
gaagaagttatcaacatgcacacat

SEQ ID NO: 59290 - DNA, 25 bp, probe
aacagaagaagttatcaacatgcac

SEQ ID NO: 59291 - DNA, 25 bp, probe
aagaagttatcaacatgcacacatt

SEQ ID NO: 59292 - DNA, 25 bp, probe
cagaagaagttatcaacatgcacac

SEQ ID NO: 59293 - DNA, 25 bp, probe
atagactctaaaggttatggcgttg

SEQ ID NO: 59294 - DNA, 25 bp, probe
acctctgattatgctttcctaatgg

SEQ ID NO: 59295 - DNA, 25 bp, probe
ggttcagaatattggtggcatcttc

SEQ ID NO: 59296 - DNA, 25 bp, probe
cacctctgattatgctttcctaatg

SEQ ID NO: 59297 - DNA, 25 bp, probe
agaagaagttatcaacatgcacaca

SEQ ID NO: 59298 - DNA, 25 bp, probe
acagaagaagttatcaacatgcaca

SEQ ID NO: 59299 - DNA, 25 bp, probe
tatagactctaaaggttatggcgtt

SEQ ID NO: 59300 - DNA, 25 bp, probe
ttatagactctaaaggttatggcgt

SEQ ID NO: 59301 - DNA, 25 bp, probe
ctcacctctgattatgctttcctaa

SEQ ID NO: 59302 - DNA, 25 bp, probe
tcacctctgattatgctttcctaat

SEQ ID NO: 59303 - DNA, 25 bp, probe
aaagtaatgaagaaggaatccagcg

SEQ ID NO: 59304 - DNA, 25 bp, probe
tatgatgaaggagaaatggtggagg

SEQ ID NO: 59305 - DNA, 25 bp, probe
cttatagactctaaaggttatggcg

SEQ ID NO: 59306 - DNA, 25 bp, probe
atggtagaagaattgaggatgtccc

SEQ ID NO: 59307 - DNA, 25 bp, probe
cctcacctctgattatgctttccta

SEQ ID NO: 59308 - DNA, 25 bp, probe
tagactctaaaggttatggcgttgg

SEQ ID NO: 59309 - DNA, 25 bp, probe
attggtggcatcttcattgttctgg

SEQ ID NO: 59310 - DNA, 25 bp, probe
tatgctttcctaatggagtcaacaa

SEQ ID NO: 59311 - DNA, 25 bp, probe
ttatgctttcctaatggagtcaaca

SEQ ID NO: 59312 - DNA, 25 bp, probe
cctctgattatgctttcctaatgga

SEQ ID NO: 59313 - DNA, 25 bp, probe
tagaagaattgaggatgtccctgaa

SEQ ID NO: 59314 - DNA, 25 bp, probe
tgattatgctttcctaatggagtca

SEQ ID NO: 59315 - DNA, 25 bp, probe
tctgattatgctttcctaatggagt

SEQ ID NO: 59316 - DNA, 25 bp, probe
ctgattatgctttcctaatggagtc

SEQ ID NO: 59317 - DNA, 25 bp, probe
agtcctcacctctgattatgctttc

SEQ ID NO: 59318 - DNA, 25 bp, probe
tctattccttgatagcggattacac

SEQ ID NO: 59319 - DNA, 25 bp, probe
ctctattccttgatagcggattaca

SEQ ID NO: 59320 - DNA, 25 bp, probe
cctctattccttgatagcggattac

SEQ ID NO: 59321 - DNA, 25 bp, probe
ctattccttgatagcggattacacc

SEQ ID NO: 59322 - DNA, 25 bp, probe
attccttgatagcggattacaccta

SEQ ID NO: 59323 - DNA, 25 bp, probe
tattccttgatagcggattacacct

SEQ ID NO: 59324 - DNA, 25 bp, probe
attccatcatcaaccctgtcatata

SEQ ID NO: 59325 - DNA, 25 bp, probe
aattccatcatcaaccctgtcatat

SEQ ID NO: 59326 - DNA, 25 bp, probe
caattccatcatcaaccctgtcata

SEQ ID NO: 59327 - DNA, 25 bp, probe
ttccttgatagcggattacacctac

SEQ ID NO: 59328 - DNA, 25 bp, probe
ttccatcatcaaccctgtcatatat

SEQ ID NO: 59329 - DNA, 25 bp, probe
cctttcaccctctattccttgatag

SEQ ID NO: 59330 - DNA, 25 bp, probe
ttcagaaaccaagagatccagaaag

SEQ ID NO: 59331 - DNA, 25 bp, probe
ctttcagaaaccaagagatccagaa

SEQ ID NO: 59332 - DNA, 25 bp, probe
tatgctttcagaaaccaagagatcc

SEQ ID NO: 59333 - DNA, 25 bp, probe
ctttcaccctctattccttgatagc

SEQ ID NO: 59334 - DNA, 25 bp, probe
atatgctttcagaaaccaagagatc

SEQ ID NO: 59335 - DNA, 25 bp, probe
gatctgtaagattgtgatgaggcac

SEQ ID NO: 59336 - DNA, 25 bp, probe
ctacaattccatcatcaaccctgtc

SEQ ID NO: 59337 - DNA, 25 bp, probe
gcctttcaccctctattccttgata

SEQ ID NO: 59338 - DNA, 25 bp, probe
tatatgctttcagaaaccaagagat

SEQ ID NO: 59339 - DNA, 25 bp, probe
acctacaattccatcatcaaccctg

SEQ ID NO: 59340 - DNA, 25 bp, probe
cacctacaattccatcatcaaccct

SEQ ID NO: 59341 - DNA, 25 bp, probe
tacaattccatcatcaaccctgtca

SEQ ID NO: 59342 - DNA, 25 bp, probe
ccctctattccttgatagcggatta

SEQ ID NO: 59343 - DNA, 25 bp, probe
atatatgctttcagaaaccaagaga

SEQ ID NO: 59344 - DNA, 25 bp, probe
tttcaccctctattccttgatagcg

SEQ ID NO: 59345 - DNA, 25 bp, probe
gccacctacaattccatcatcaacc

SEQ ID NO: 59346 - DNA, 25 bp, probe
catgcttcagctctacatccagatc

SEQ ID NO: 59347 - DNA, 25 bp, probe
atgctttcagaaaccaagagatcca

SEQ ID NO: 59348 - DNA, 25 bp, probe
acaattccatcatcaaccctgtcat

SEQ ID NO: 59349 - DNA, 25 bp, probe
atctgtaagattgtgatgaggcacg

SEQ ID NO: 59350 - DNA, 25 bp, probe
tccttgatagcggattacacctacc

SEQ ID NO: 59351 - DNA, 25 bp, probe
gatgcctttcaccctctattccttg

SEQ ID NO: 59352 - DNA, 25 bp, probe
tttcagaaaccaagagatccagaaa

SEQ ID NO: 59353 - DNA, 25 bp, probe
cctacaattccatcatcaaccctgt

SEQ ID NO: 59354 - DNA, 25 bp, probe
tcagaaaccaagagatccagaaagc

SEQ ID NO: 59355 - DNA, 25 bp, probe
tcatgcttcagctctacatccagat

SEQ ID NO: 59356 - DNA, 25 bp, probe
gctttcagaaaccaagagatccaga

SEQ ID NO: 59357 - DNA, 25 bp, probe
cgccacctacaattccatcatcaac

SEQ ID NO: 59358 - DNA, 25 bp, probe
attacacctacccctccatctatac

SEQ ID NO: 59359 - DNA, 25 bp, probe
gattacacctacccctccatctata

SEQ ID NO: 59360 - DNA, 25 bp, probe
tgctttcagaaaccaagagatccag

SEQ ID NO: 59361 - DNA, 25 bp, probe
ccacctacaattccatcatcaaccc

SEQ ID NO: 59362 - DNA, 25 bp, probe
gcttagacatgatgaatatgctcaa

SEQ ID NO: 59363 - DNA, 25 bp, probe
ggcttagacatgatgaatatgctca

SEQ ID NO: 59364 - DNA, 25 bp, probe
aaatatgtttccctatgtgtgtgtg

SEQ ID NO: 59365 - DNA, 25 bp, probe
aatatgtttccctatgtgtgtgtgg

SEQ ID NO: 59366 - DNA, 25 bp, probe
taaatatgtttccctatgtgtgtgt

SEQ ID NO: 59367 - DNA, 25 bp, probe
ctcaaagcatgtcagtttccttaat

SEQ ID NO: 59368 - DNA, 25 bp, probe
tcaaagcatgtcagtttccttaata

SEQ ID NO: 59369 - DNA, 25 bp, probe
gggcttagacatgatgaatatgctc

SEQ ID NO: 59370 - DNA, 25 bp, probe
caaagcatgtcagtttccttaataa

SEQ ID NO: 59371 - DNA, 25 bp, probe
ataaatatgtttccctatgtgtgtg

SEQ ID NO: 59372 - DNA, 25 bp, probe
atatgtttccctatgtgtgtgtgga

SEQ ID NO: 59373 - DNA, 25 bp, probe
tatgtttccctatgtgtgtgtggag

SEQ ID NO: 59374 - DNA, 25 bp, probe
aaagcatgtcagtttccttaataat

SEQ ID NO: 59375 - DNA, 25 bp, probe
tagacatgatgaatatgctcaaagc

SEQ ID NO: 59376 - DNA, 25 bp, probe
ttagacatgatgaatatgctcaaag

SEQ ID NO: 59377 - DNA, 25 bp, probe
cttagacatgatgaatatgctcaaa

SEQ ID NO: 59378 - DNA, 25 bp, probe
cataaatatgtttccctatgtgtgt

SEQ ID NO: 59379 - DNA, 25 bp, probe
tcataaatatgtttccctatgtgtg

SEQ ID NO: 59380 - DNA, 25 bp, probe
gtcataaatatgtttccctatgtgt

SEQ ID NO: 59381 - DNA, 25 bp, probe
tgtcataaatatgtttccctatgtg

SEQ ID NO: 59382 - DNA, 25 bp, probe
gctcaaagcatgtcagtttccttaa

SEQ ID NO: 59383 - DNA, 25 bp, probe
agcatgtcagtttccttaataataa

SEQ ID NO: 59384 - DNA, 25 bp, probe
aagcatgtcagtttccttaataata

SEQ ID NO: 59385 - DNA, 25 bp, probe
gtggggcttagacatgatgaatatg

SEQ ID NO: 59386 - DNA, 25 bp, probe
ctatgtgtgtgtggagggtatggag

SEQ ID NO: 59387 - DNA, 25 bp, probe
tgtggggcttagacatgatgaatat

SEQ ID NO: 59388 - DNA, 25 bp, probe
ttgtcataaatatgtttccctatgt

SEQ ID NO: 59389 - DNA, 25 bp, probe
ggggcttagacatgatgaatatgct

SEQ ID NO: 59390 - DNA, 25 bp, probe
tatgtgtgtgtggagggtatggagt

SEQ ID NO: 59391 - DNA, 25 bp, probe
ctgtggggcttagacatgatgaata

SEQ ID NO: 59392 - DNA, 25 bp, probe
gcatgtcagtttccttaataataat

SEQ ID NO: 59393 - DNA, 25 bp, probe
tggggcttagacatgatgaatatgc

SEQ ID NO: 59394 - DNA, 25 bp, probe
atgtttccctatgtgtgtgtggagg

SEQ ID NO: 59395 - DNA, 25 bp, probe
tagagacggggtttcactgtgtaag

SEQ ID NO: 59396 - DNA, 25 bp, probe
tttgtcataaatatgtttccctatg

SEQ ID NO: 59397 - DNA, 25 bp, probe
gtagagacggggtttcactgtgtaa

SEQ ID NO: 59398 - DNA, 25 bp, probe
tttcactgtgtaagccaggatggtc

SEQ ID NO: 59399 - DNA, 25 bp, probe
caggtgactccttctcagatgtcag

SEQ ID NO: 59400 - DNA, 25 bp, probe
cagtttccttaataataataggtcc

SEQ ID NO: 59401 - DNA, 25 bp, probe
tgattttgtcataaatatgtttccc

SEQ ID NO: 59402 - DNA, 25 bp, probe
gtttcactgtgtaagccaggatggt

SEQ ID NO: 59403 - DNA, 25 bp, probe
actgtggggcttagacatgatgaat

SEQ ID NO: 59404 - DNA, 25 bp, probe
gattttgtcataaatatgtttccct

SEQ ID NO: 59405 - DNA, 25 bp, probe
ggtgactccttctcagatgtcagtg

SEQ ID NO: 59406 - DNA, 25 bp, probe
agtcatccaatctaaccacatcaat

SEQ ID NO: 59407 - DNA, 25 bp, probe
aagtcatccaatctaaccacatcaa

SEQ ID NO: 59408 - DNA, 25 bp, probe
actctaccagactgtgtattcattg

SEQ ID NO: 59409 - DNA, 25 bp, probe
ctctaccagactgtgtattcattga

SEQ ID NO: 59410 - DNA, 25 bp, probe
gactctaccagactgtgtattcatt

SEQ ID NO: 59411 - DNA, 25 bp, probe
gaagactctaccagactgtgtattc

SEQ ID NO: 59412 - DNA, 25 bp, probe
gtcatccaatctaaccacatcaata

SEQ ID NO: 59413 - DNA, 25 bp, probe
agactctaccagactgtgtattcat

SEQ ID NO: 59414 - DNA, 25 bp, probe
agaagactctaccagactgtgtatt

SEQ ID NO: 59415 - DNA, 25 bp, probe
aagactctaccagactgtgtattca

SEQ ID NO: 59416 - DNA, 25 bp, probe
gtgtattcattgaagtcagatgtgg

SEQ ID NO: 59417 - DNA, 25 bp, probe
tgtattcattgaagtcagatgtggt

SEQ ID NO: 59418 - DNA, 25 bp, probe
tgtgtattcattgaagtcagatgtg

SEQ ID NO: 59419 - DNA, 25 bp, probe
attcattgaagtcagatgtggtaac

SEQ ID NO: 59420 - DNA, 25 bp, probe
ctaccagactgtgtattcattgaag

SEQ ID NO: 59421 - DNA, 25 bp, probe
tctaccagactgtgtattcattgaa

SEQ ID NO: 59422 - DNA, 25 bp, probe
ttcattgaagtcagatgtggtaact

SEQ ID NO: 59423 - DNA, 25 bp, probe
attgaagtcagatgtggtaactgtt

SEQ ID NO: 59424 - DNA, 25 bp, probe
taccagactgtgtattcattgaagt

SEQ ID NO: 59425 - DNA, 25 bp, probe
tgaagtcagatgtggtaactgttaa

SEQ ID NO: 59426 - DNA, 25 bp, probe
ttgaagtcagatgtggtaactgtta

SEQ ID NO: 59427 - DNA, 25 bp, probe
tcattgaagtcagatgtggtaactg

SEQ ID NO: 59428 - DNA, 25 bp, probe
tcatccaatctaaccacatcaatat

SEQ ID NO: 59429 - DNA, 25 bp, probe
gtattcattgaagtcagatgtggta

SEQ ID NO: 59430 - DNA, 25 bp, probe
cattgaagtcagatgtggtaactgt

SEQ ID NO: 59431 - DNA, 25 bp, probe
tgagagaataagtcatgttccttca

SEQ ID NO: 59432 - DNA, 25 bp, probe
ttagaagactctaccagactgtgta

SEQ ID NO: 59433 - DNA, 25 bp, probe
tagaagactctaccagactgtgtat

SEQ ID NO: 59434 - DNA, 25 bp, probe
gagaataagtcatgttccttcaaga

SEQ ID NO: 59435 - DNA, 25 bp, probe
gagagaataagtcatgttccttcaa

SEQ ID NO: 59436 - DNA, 25 bp, probe
agagaataagtcatgttccttcaag

SEQ ID NO: 59437 - DNA, 25 bp, probe
ctgtgtattcattgaagtcagatgt

SEQ ID NO: 59438 - DNA, 25 bp, probe
actgtgtattcattgaagtcagatg

SEQ ID NO: 59439 - DNA, 25 bp, probe
tattcattgaagtcagatgtggtaa

SEQ ID NO: 59440 - DNA, 25 bp, probe
aataagtcatgttccttcaagatca

SEQ ID NO: 59441 - DNA, 25 bp, probe
aaagtcatccaatctaaccacatca

SEQ ID NO: 59442 - DNA, 25 bp, probe
ataagtcatgttccttcaagatcat

SEQ ID NO: 59443 - DNA, 25 bp, probe
agaataagtcatgttccttcaagat

SEQ ID NO: 59444 - DNA, 25 bp, probe
atattgtcattcctgtattcacccg

SEQ ID NO: 59445 - DNA, 25 bp, probe
tagtgctcgctttctatgtagtttg

SEQ ID NO: 59446 - DNA, 25 bp, probe
ctcgctttctatgtagtttggtaat

SEQ ID NO: 59447 - DNA, 25 bp, probe
gaataagtcatgttccttcaagatc

SEQ ID NO: 59448 - DNA, 25 bp, probe
gtggtaactgttaaattgctgtgta

SEQ ID NO: 59449 - DNA, 25 bp, probe
gatgtggtaactgttaaattgctgt

SEQ ID NO: 59450 - DNA, 25 bp, probe
tcatcgctatctcctacttcatcac

SEQ ID NO: 59451 - DNA, 25 bp, probe
gtcatcgctatctcctacttcatca

SEQ ID NO: 59452 - DNA, 25 bp, probe
ggtcatcgctatctcctacttcatc

SEQ ID NO: 59453 - DNA, 25 bp, probe
catcgctatctcctacttcatcacc

SEQ ID NO: 59454 - DNA, 25 bp, probe
atcgctatctcctacttcatcacca

SEQ ID NO: 59455 - DNA, 25 bp, probe
tggtcatcgctatctcctacttcat

SEQ ID NO: 59456 - DNA, 25 bp, probe
ctatctcctacttcatcaccagcct

SEQ ID NO: 59457 - DNA, 25 bp, probe
tcgctatctcctacttcatcaccag

SEQ ID NO: 59458 - DNA, 25 bp, probe
ctggtcatcgctatctcctacttca

SEQ ID NO: 59459 - DNA, 25 bp, probe
tatctcctacttcatcaccagcctg

SEQ ID NO: 59460 - DNA, 25 bp, probe
tgtccaccatctgtgtcctctatac

SEQ ID NO: 59461 - DNA, 25 bp, probe
gtgtccaccatctgtgtcctctata

SEQ ID NO: 59462 - DNA, 25 bp, probe
gtccaccatctgtgtcctctatacc

SEQ ID NO: 59463 - DNA, 25 bp, probe
gctggtcatcgctatctcctacttc

SEQ ID NO: 59464 - DNA, 25 bp, probe
caccatctgtgtcctctataccacc

SEQ ID NO: 59465 - DNA, 25 bp, probe
ccaccatctgtgtcctctataccac

SEQ ID NO: 59466 - DNA, 25 bp, probe
tccaccatctgtgtcctctatacca

SEQ ID NO: 59467 - DNA, 25 bp, probe
atctcctacttcatcaccagcctga

SEQ ID NO: 59468 - DNA, 25 bp, probe
catctgtgtcctctataccaccctg

SEQ ID NO: 59469 - DNA, 25 bp, probe
gctatctcctacttcatcaccagcc

SEQ ID NO: 59470 - DNA, 25 bp, probe
cgctatctcctacttcatcaccagc

SEQ ID NO: 59471 - DNA, 25 bp, probe
ctacttcatcaccagcctgacgtac

SEQ ID NO: 59472 - DNA, 25 bp, probe
ccatctgtgtcctctataccaccct

SEQ ID NO: 59473 - DNA, 25 bp, probe
accatctgtgtcctctataccaccc

SEQ ID NO: 59474 - DNA, 25 bp, probe
atctgtgtcctctataccaccctgc

SEQ ID NO: 59475 - DNA, 25 bp, probe
taagaggatgaagtgatatggtgag

SEQ ID NO: 59476 - DNA, 25 bp, probe
tacacagactattgacatcagcatc

SEQ ID NO: 59477 - DNA, 25 bp, probe
ataagaggatgaagtgatatggtga

SEQ ID NO: 59478 - DNA, 25 bp, probe
gtacacagactattgacatcagcat

SEQ ID NO: 59479 - DNA, 25 bp, probe
agactattgacatcagcatcaccta

SEQ ID NO: 59480 - DNA, 25 bp, probe
ctattgacatcagcatcacctagaa

SEQ ID NO: 59481 - DNA, 25 bp, probe
gactattgacatcagcatcacctag

SEQ ID NO: 59482 - DNA, 25 bp, probe
actattgacatcagcatcacctaga

SEQ ID NO: 59483 - DNA, 25 bp, probe
aagaggatgaagtgatatggtgagc

SEQ ID NO: 59484 - DNA, 25 bp, probe
cacagactattgacatcagcatcac

SEQ ID NO: 59485 - DNA, 25 bp, probe
aacggtacacagactattgacatca

SEQ ID NO: 59486 - DNA, 25 bp, probe
acacagactattgacatcagcatca

SEQ ID NO: 59487 - DNA, 25 bp, probe
acggtacacagactattgacatcag

SEQ ID NO: 59488 - DNA, 25 bp, probe
tataagaggatgaagtgatatggtg

SEQ ID NO: 59489 - DNA, 25 bp, probe
gaggatgaagtgatatggtgagcag

SEQ ID NO: 59490 - DNA, 25 bp, probe
ggtacacagactattgacatcagca

SEQ ID NO: 59491 - DNA, 25 bp, probe
cagactattgacatcagcatcacct

SEQ ID NO: 59492 - DNA, 25 bp, probe
gttgctttaatcccttcctttatgc

SEQ ID NO: 59493 - DNA, 25 bp, probe
agttgctttaatcccttcctttatg

SEQ ID NO: 59494 - DNA, 25 bp, probe
acagactattgacatcagcatcacc

SEQ ID NO: 59495 - DNA, 25 bp, probe
agaggatgaagtgatatggtgagca

SEQ ID NO: 59496 - DNA, 25 bp, probe
agcatcacctagaaacttgttagaa

SEQ ID NO: 59497 - DNA, 25 bp, probe
atcagcatcacctagaaacttgtta

SEQ ID NO: 59498 - DNA, 25 bp, probe
ctttaatcccttcctttatgccctc

SEQ ID NO: 59499 - DNA, 25 bp, probe
cagcatcacctagaaacttgttaga

SEQ ID NO: 59500 - DNA, 25 bp, probe
tcagcatcacctagaaacttgttag

SEQ ID NO: 59501 - DNA, 25 bp, probe
ccctcaaacaatgtcatttcagaaa

SEQ ID NO: 59502 - DNA, 25 bp, probe
tcacctagaaacttgttagaaatgc

SEQ ID NO: 59503 - DNA, 25 bp, probe
gcatcacctagaaacttgttagaaa

SEQ ID NO: 59504 - DNA, 25 bp, probe
caatagttgctttaatcccttcctt

SEQ ID NO: 59505 - DNA, 25 bp, probe
ccaatagttgctttaatcccttcct

SEQ ID NO: 59506 - DNA, 25 bp, probe
ttaatcccttcctttatgccctctt

SEQ ID NO: 59507 - DNA, 25 bp, probe
tttaatcccttcctttatgccctct

SEQ ID NO: 59508 - DNA, 25 bp, probe
aatagttgctttaatcccttccttt

SEQ ID NO: 59509 - DNA, 25 bp, probe
tccctcaaacaatgtcatttcagaa

SEQ ID NO: 59510 - DNA, 25 bp, probe
cctcaaacaatgtcatttcagaaag

SEQ ID NO: 59511 - DNA, 25 bp, probe
ttgctttaatcccttcctttatgcc

SEQ ID NO: 59512 - DNA, 25 bp, probe
catcagcatcacctagaaacttgtt

SEQ ID NO: 59513 - DNA, 25 bp, probe
aaacggtacacagactattgacatc

SEQ ID NO: 59514 - DNA, 25 bp, probe
tattgacatcagcatcacctagaaa

SEQ ID NO: 59515 - DNA, 25 bp, probe
gtccctcaaacaatgtcatttcaga

SEQ ID NO: 59516 - DNA, 25 bp, probe
taatcccttcctttatgccctcttg

SEQ ID NO: 59517 - DNA, 25 bp, probe
gttctcaaacggtacacagactatt

SEQ ID NO: 59518 - DNA, 25 bp, probe
gacatcagcatcacctagaaacttg

SEQ ID NO: 59519 - DNA, 25 bp, probe
gacatcagatagtcacctcactaag

SEQ ID NO: 59520 - DNA, 25 bp, probe
agacatcagatagtcacctcactaa

SEQ ID NO: 59521 - DNA, 25 bp, probe
tactatatcttcgacagctacatcc

SEQ ID NO: 59522 - DNA, 25 bp, probe
gagacatcagatagtcacctcacta

SEQ ID NO: 59523 - DNA, 25 bp, probe
acatcagatagtcacctcactaagg

SEQ ID NO: 59524 - DNA, 25 bp, probe
tgttggtgggtttaggagttaattt

SEQ ID NO: 59525 - DNA, 25 bp, probe
actatatcttcgacagctacatccg

SEQ ID NO: 59526 - DNA, 25 bp, probe
ctgtgtcaaccctttcatttactat

SEQ ID NO: 59527 - DNA, 25 bp, probe
ctattcttcagcttggtatggaggt

SEQ ID NO: 59528 - DNA, 25 bp, probe
gctgtgtcaaccctttcatttacta

SEQ ID NO: 59529 - DNA, 25 bp, probe
ctgttggtgggtttaggagttaatt

SEQ ID NO: 59530 - DNA, 25 bp, probe
actctaaagggaactgtgacatttc

SEQ ID NO: 59531 - DNA, 25 bp, probe
aaaggcaactccaattaaactcata

SEQ ID NO: 59532 - DNA, 25 bp, probe
tattcttcagcttggtatggaggtg

SEQ ID NO: 59533 - DNA, 25 bp, probe
aaggcaactccaattaaactcatat

SEQ ID NO: 59534 - DNA, 25 bp, probe
ctaaagggaactgtgacatttcaag

SEQ ID NO: 59535 - DNA, 25 bp, probe
tctaaagggaactgtgacatttcaa

SEQ ID NO: 59536 - DNA, 25 bp, probe
tctgttggtgggtttaggagttaat

SEQ ID NO: 59537 - DNA, 25 bp, probe
ctctaaagggaactgtgacatttca

SEQ ID NO: 59538 - DNA, 25 bp, probe
atcagatagtcacctcactaaggct

SEQ ID NO: 59539 - DNA, 25 bp, probe
catcagatagtcacctcactaaggc

SEQ ID NO: 59540 - DNA, 25 bp, probe
ttactatatcttcgacagctacatc

SEQ ID NO: 59541 - DNA, 25 bp, probe
tgtgtcaaccctttcatttactata

SEQ ID NO: 59542 - DNA, 25 bp, probe
aaactatgactttgggagtagcact

SEQ ID NO: 59543 - DNA, 25 bp, probe
taaagggaactgtgacatttcaagc

SEQ ID NO: 59544 - DNA, 25 bp, probe
ctatatcttcgacagctacatccgc

SEQ ID NO: 59545 - DNA, 25 bp, probe
cactctaaagggaactgtgacattt

SEQ ID NO: 59546 - DNA, 25 bp, probe
atagtcacctcactaaggctctctc

SEQ ID NO: 59547 - DNA, 25 bp, probe
gatagtcacctcactaaggctctct

SEQ ID NO: 59548 - DNA, 25 bp, probe
agatagtcacctcactaaggctctc

SEQ ID NO: 59549 - DNA, 25 bp, probe
caagaacactatttaccctcagcta

SEQ ID NO: 59550 - DNA, 25 bp, probe
acactatttaccctcagctattctt

SEQ ID NO: 59551 - DNA, 25 bp, probe
aacactatttaccctcagctattct

SEQ ID NO: 59552 - DNA, 25 bp, probe
agaacactatttaccctcagctatt

SEQ ID NO: 59553 - DNA, 25 bp, probe
aagaacactatttaccctcagctat

SEQ ID NO: 59554 - DNA, 25 bp, probe
cccttcaatactttcaagttcctgg

SEQ ID NO: 59555 - DNA, 25 bp, probe
cagatagtcacctcactaaggctct

SEQ ID NO: 59556 - DNA, 25 bp, probe
tcagatagtcacctcactaaggctc

SEQ ID NO: 59557 - DNA, 25 bp, probe
actatttaccctcagctattcttca

SEQ ID NO: 59558 - DNA, 25 bp, probe
aactatgactttgggagtagcactg

SEQ ID NO: 59559 - DNA, 25 bp, probe
ctctgttggtgggtttaggagttaa

SEQ ID NO: 59560 - DNA, 25 bp, probe
agtagcactgagacatcagatagtc

SEQ ID NO: 59561 - DNA, 25 bp, probe
gagtagcactgagacatcagatagt

SEQ ID NO: 59562 - DNA, 25 bp, probe
cactatttaccctcagctattcttc

SEQ ID NO: 59563 - DNA, 25 bp, probe
caccaacttcaagaaggagatcaag

SEQ ID NO: 59564 - DNA, 25 bp, probe
caacaccaacttcaagaaggagatc

SEQ ID NO: 59565 - DNA, 25 bp, probe
acaccaacttcaagaaggagatcaa

SEQ ID NO: 59566 - DNA, 25 bp, probe
aacaccaacttcaagaaggagatca

SEQ ID NO: 59567 - DNA, 25 bp, probe
tcaacaccaacttcaagaaggagat

SEQ ID NO: 59568 - DNA, 25 bp, probe
cattcatctatggctttctcaacac

SEQ ID NO: 59569 - DNA, 25 bp, probe
accaacttcaagaaggagatcaagg

SEQ ID NO: 59570 - DNA, 25 bp, probe
attcatctatggctttctcaacacc

SEQ ID NO: 59571 - DNA, 25 bp, probe
ctcaacaccaacttcaagaaggaga

SEQ ID NO: 59572 - DNA, 25 bp, probe
tctcaacaccaacttcaagaaggag

SEQ ID NO: 59573 - DNA, 25 bp, probe
tccaatcccatttaaccaggtctag

SEQ ID NO: 59574 - DNA, 25 bp, probe
gtccaatcccatttaaccaggtcta

SEQ ID NO: 59575 - DNA, 25 bp, probe
catttaaccaggtctaggtcttctc

SEQ ID NO: 59576 - DNA, 25 bp, probe
ttctcaacaccaacttcaagaagga

SEQ ID NO: 59577 - DNA, 25 bp, probe
ccaacttcaagaaggagatcaaggc

SEQ ID NO: 59578 - DNA, 25 bp, probe
gaacctcatcttcttagtgtgccac

SEQ ID NO: 59579 - DNA, 25 bp, probe
ccaatcccatttaaccaggtctagg

SEQ ID NO: 59580 - DNA, 25 bp, probe
atttaaccaggtctaggtcttctcc

SEQ ID NO: 59581 - DNA, 25 bp, probe
ccatttaaccaggtctaggtcttct

SEQ ID NO: 59582 - DNA, 25 bp, probe
aatcccatttaaccaggtctaggtc

SEQ ID NO: 59583 - DNA, 25 bp, probe
ggaacctcatcttcttagtgtgcca

SEQ ID NO: 59584 - DNA, 25 bp, probe
caatcccatttaaccaggtctaggt

SEQ ID NO: 59585 - DNA, 25 bp, probe
ctttctcaacaccaacttcaagaag

SEQ ID NO: 59586 - DNA, 25 bp, probe
acagtacatacggaagtctccaaag

SEQ ID NO: 59587 - DNA, 25 bp, probe
ctatggctttctcaacaccaacttc

SEQ ID NO: 59588 - DNA, 25 bp, probe
atctatggctttctcaacaccaact

SEQ ID NO: 59589 - DNA, 25 bp, probe
catctatggctttctcaacaccaac

SEQ ID NO: 59590 - DNA, 25 bp, probe
tgtccacagtacatacggaagtctc

SEQ ID NO: 59591 - DNA, 25 bp, probe
tcatctatggctttctcaacaccaa

SEQ ID NO: 59592 - DNA, 25 bp, probe
ttcatctatggctttctcaacacca

SEQ ID NO: 59593 - DNA, 25 bp, probe
tctatggctttctcaacaccaactt

SEQ ID NO: 59594 - DNA, 25 bp, probe
cccatttaaccaggtctaggtcttc

SEQ ID NO: 59595 - DNA, 25 bp, probe
cacagtacatacggaagtctccaaa

SEQ ID NO: 59596 - DNA, 25 bp, probe
atcccatttaaccaggtctaggtct

SEQ ID NO: 59597 - DNA, 25 bp, probe
ccacagtacatacggaagtctccaa

SEQ ID NO: 59598 - DNA, 25 bp, probe
tttctcaacaccaacttcaagaagg

SEQ ID NO: 59599 - DNA, 25 bp, probe
ctgtccacagtacatacggaagtct

SEQ ID NO: 59600 - DNA, 25 bp, probe
tatggctttctcaacaccaacttca

SEQ ID NO: 59601 - DNA, 25 bp, probe
tcccatttaaccaggtctaggtctt

SEQ ID NO: 59602 - DNA, 25 bp, probe
cagtacatacggaagtctccaaagg

SEQ ID NO: 59603 - DNA, 25 bp, probe
ggctttctcaacaccaacttcaaga

SEQ ID NO: 59604 - DNA, 25 bp, probe
gctttctcaacaccaacttcaagaa

SEQ ID NO: 59605 - DNA, 25 bp, probe
tttaaccaggtctaggtcttctccc

SEQ ID NO: 59606 - DNA, 25 bp, probe
gtccacagtacatacggaagtctcc

SEQ ID NO: 59607 - DNA, 25 bp, probe
tctcaggagacattaagatagaagg

SEQ ID NO: 59608 - DNA, 25 bp, probe
tgacactctcaggagacattaagat

SEQ ID NO: 59609 - DNA, 25 bp, probe
acactctcaggagacattaagatag

SEQ ID NO: 59610 - DNA, 25 bp, probe
gacactctcaggagacattaagata

SEQ ID NO: 59611 - DNA, 25 bp, probe
cactctcaggagacattaagataga

SEQ ID NO: 59612 - DNA, 25 bp, probe
ctcaggagacattaagatagaaggg

SEQ ID NO: 59613 - DNA, 25 bp, probe
gaaatcaaagcaaaggagtggttac

SEQ ID NO: 59614 - DNA, 25 bp, probe
agaaatcaaagcaaaggagtggtta

SEQ ID NO: 59615 - DNA, 25 bp, probe
tagaaatcaaagcaaaggagtggtt

SEQ ID NO: 59616 - DNA, 25 bp, probe
actctcaggagacattaagatagaa

SEQ ID NO: 59617 - DNA, 25 bp, probe
atgtccttcaaatctgttagcgttt

SEQ ID NO: 59618 - DNA, 25 bp, probe
cgctgatgtgatctatgaagatgat

SEQ ID NO: 59619 - DNA, 25 bp, probe
cagaaacatcttgcttatttgccaa

SEQ ID NO: 59620 - DNA, 25 bp, probe
ctctcaggagacattaagatagaag

SEQ ID NO: 59621 - DNA, 25 bp, probe
ctagaaatcaaagcaaaggagtggt

SEQ ID NO: 59622 - DNA, 25 bp, probe
cacagaaacatcttgcttatttgcc

SEQ ID NO: 59623 - DNA, 25 bp, probe
gctgatgtgatctatgaagatgatt

SEQ ID NO: 59624 - DNA, 25 bp, probe
gaaacatcttgcttatttgccaaag

SEQ ID NO: 59625 - DNA, 25 bp, probe
agaaacatcttgcttatttgccaaa

SEQ ID NO: 59626 - DNA, 25 bp, probe
ctttctcatgtccttcaaatctgtt

SEQ ID NO: 59627 - DNA, 25 bp, probe
tctcatgtccttcaaatctgttagc

SEQ ID NO: 59628 - DNA, 25 bp, probe
acagaaacatcttgcttatttgcca

SEQ ID NO: 59629 - DNA, 25 bp, probe
ttctcatgtccttcaaatctgttag

SEQ ID NO: 59630 - DNA, 25 bp, probe
cactgtttggagaggatggtattca

SEQ ID NO: 59631 - DNA, 25 bp, probe
aaatcaaagcaaaggagtggttacc

SEQ ID NO: 59632 - DNA, 25 bp, probe
gctttctcatgtccttcaaatctgt

SEQ ID NO: 59633 - DNA, 25 bp, probe
tttctcatgtccttcaaatctgtta

SEQ ID NO: 59634 - DNA, 25 bp, probe
gtatttcagcttcaaggttcagatt

SEQ ID NO: 59635 - DNA, 25 bp, probe
gatggtattcaggctttctcatgtc

SEQ ID NO: 59636 - DNA, 25 bp, probe
agtaggaatcgtatttcagcttcaa

SEQ ID NO: 59637 - DNA, 25 bp, probe
aagtaggaatcgtatttcagcttca

SEQ ID NO: 59638 - DNA, 25 bp, probe
catgtccttcaaatctgttagcgtt

SEQ ID NO: 59639 - DNA, 25 bp, probe
gtaggaatcgtatttcagcttcaag

SEQ ID NO: 59640 - DNA, 25 bp, probe
gaatcgtatttcagcttcaaggttc

SEQ ID NO: 59641 - DNA, 25 bp, probe
aatcgtatttcagcttcaaggttca

SEQ ID NO: 59642 - DNA, 25 bp, probe
taggaatcgtatttcagcttcaagg

SEQ ID NO: 59643 - DNA, 25 bp, probe
gaggatggtattcaggctttctcat

SEQ ID NO: 59644 - DNA, 25 bp, probe
ctcatgtccttcaaatctgttagcg

SEQ ID NO: 59645 - DNA, 25 bp, probe
tatttcagcttcaaggttcagattg

SEQ ID NO: 59646 - DNA, 25 bp, probe
ggctttctcatgtccttcaaatctg

SEQ ID NO: 59647 - DNA, 25 bp, probe
cgtatttcagcttcaaggttcagat

SEQ ID NO: 59648 - DNA, 25 bp, probe
atcgtatttcagcttcaaggttcag

SEQ ID NO: 59649 - DNA, 25 bp, probe
actgtttggagaggatggtattcag

SEQ ID NO: 59650 - DNA, 25 bp, probe
ggaatcgtatttcagcttcaaggtt

SEQ ID NO: 59651 - DNA, 25 bp, probe
catagaggcacaggtaacccataaa

SEQ ID NO: 59652 - DNA, 25 bp, probe
tcatagaggcacaggtaacccataa

SEQ ID NO: 59653 - DNA, 25 bp, probe
gtcatagaggcacaggtaacccata

SEQ ID NO: 59654 - DNA, 25 bp, probe
atagaggcacaggtaacccataaaa

SEQ ID NO: 59655 - DNA, 25 bp, probe
tagaggcacaggtaacccataaaac

SEQ ID NO: 59656 - DNA, 25 bp, probe
ggtaacccataaaactgcaaacaag

SEQ ID NO: 59657 - DNA, 25 bp, probe
aggtaacccataaaactgcaaacaa

SEQ ID NO: 59658 - DNA, 25 bp, probe
taacccataaaactgcaaacaagct

SEQ ID NO: 59659 - DNA, 25 bp, probe
gtaacccataaaactgcaaacaagc

SEQ ID NO: 59660 - DNA, 25 bp, probe
agaggcacaggtaacccataaaact

SEQ ID NO: 59661 - DNA, 25 bp, probe
caggtaacccataaaactgcaaaca

SEQ ID NO: 59662 - DNA, 25 bp, probe
acaggtaacccataaaactgcaaac

SEQ ID NO: 59663 - DNA, 25 bp, probe
cacaggtaacccataaaactgcaaa

SEQ ID NO: 59664 - DNA, 25 bp, probe
gaggcacaggtaacccataaaactg

SEQ ID NO: 59665 - DNA, 25 bp, probe
aacccataaaactgcaaacaagctt

SEQ ID NO: 59666 - DNA, 25 bp, probe
gcacaggtaacccataaaactgcaa

SEQ ID NO: 59667 - DNA, 25 bp, probe
ctcatcatctttctcgtctgcttca

SEQ ID NO: 59668 - DNA, 25 bp, probe
tcatcatctttctcgtctgcttcac

SEQ ID NO: 59669 - DNA, 25 bp, probe
gctcatcatctttctcgtctgcttc

SEQ ID NO: 59670 - DNA, 25 bp, probe
tgctcatcatctttctcgtctgctt

SEQ ID NO: 59671 - DNA, 25 bp, probe
gtgctcatcatctttctcgtctgct

SEQ ID NO: 59672 - DNA, 25 bp, probe
catcatctttctcgtctgcttcacg

SEQ ID NO: 59673 - DNA, 25 bp, probe
atagtctctccaacagtgtattcca

SEQ ID NO: 59674 - DNA, 25 bp, probe
tagtctctccaacagtgtattccaa

SEQ ID NO: 59675 - DNA, 25 bp, probe
tatagtctctccaacagtgtattcc

SEQ ID NO: 59676 - DNA, 25 bp, probe
taatggatgtcatatctgaagtggc

SEQ ID NO: 59677 - DNA, 25 bp, probe
ttaatggatgtcatatctgaagtgg

SEQ ID NO: 59678 - DNA, 25 bp, probe
aatggatgtcatatctgaagtggct

SEQ ID NO: 59679 - DNA, 25 bp, probe
ggttgccatatatcatctacttctt

SEQ ID NO: 59680 - DNA, 25 bp, probe
ttatagtctctccaacagtgtattc

SEQ ID NO: 59681 - DNA, 25 bp, probe
cctcttaatggatgtcatatctgaa

SEQ ID NO: 59682 - DNA, 25 bp, probe
atggatgtcatatctgaagtggctc

SEQ ID NO: 59683 - DNA, 25 bp, probe
acctggcttgctattagtaacagtt

SEQ ID NO: 59684 - DNA, 25 bp, probe
ctgcttcacctatttcaacatcttc

SEQ ID NO: 59685 - DNA, 25 bp, probe
ccttattgtctgcttcacctatttc

SEQ ID NO: 59686 - DNA, 25 bp, probe
tctgcttcacctatttcaacatctt

SEQ ID NO: 59687 - DNA, 25 bp, probe
tggcttgctattagtaacagtttct

SEQ ID NO: 59688 - DNA, 25 bp, probe
ttacatcctctggttgccatatatc

SEQ ID NO: 59689 - DNA, 25 bp, probe
cctctggttgccatatatcatctac

SEQ ID NO: 59690 - DNA, 25 bp, probe
tcctctggttgccatatatcatcta

SEQ ID NO: 59691 - DNA, 25 bp, probe
ctctggttgccatatatcatctact

SEQ ID NO: 59692 - DNA, 25 bp, probe
cccttattgtctgcttcacctattt

SEQ ID NO: 59693 - DNA, 25 bp, probe
tgccatatatcatctacttcttgtt

SEQ ID NO: 59694 - DNA, 25 bp, probe
ttgccatatatcatctacttcttgt

SEQ ID NO: 59695 - DNA, 25 bp, probe
cttattgtctgcttcacctatttca

SEQ ID NO: 59696 - DNA, 25 bp, probe
tacatcctctggttgccatatatca

SEQ ID NO: 59697 - DNA, 25 bp, probe
gtctgcttcacctatttcaacatct

SEQ ID NO: 59698 - DNA, 25 bp, probe
cttaatggatgtcatatctgaagtg

SEQ ID NO: 59699 - DNA, 25 bp, probe
tggttgccatatatcatctacttct

SEQ ID NO: 59700 - DNA, 25 bp, probe
tctggttgccatatatcatctactt

SEQ ID NO: 59701 - DNA, 25 bp, probe
atcctctggttgccatatatcatct

SEQ ID NO: 59702 - DNA, 25 bp, probe
catcctctggttgccatatatcatc

SEQ ID NO: 59703 - DNA, 25 bp, probe
gccctcttaatggatgtcatatctg

SEQ ID NO: 59704 - DNA, 25 bp, probe
ctggttgccatatatcatctacttc

SEQ ID NO: 59705 - DNA, 25 bp, probe
tgcttcacctatttcaacatcttcc

SEQ ID NO: 59706 - DNA, 25 bp, probe
tcttaatggatgtcatatctgaagt

SEQ ID NO: 59707 - DNA, 25 bp, probe
gccatatatcatctacttcttgttg

SEQ ID NO: 59708 - DNA, 25 bp, probe
gttgccatatatcatctacttcttg

SEQ ID NO: 59709 - DNA, 25 bp, probe
tatcatctacttcttgttggaaagc

SEQ ID NO: 59710 - DNA, 25 bp, probe
acatcctctggttgccatatatcat

SEQ ID NO: 59711 - DNA, 25 bp, probe
tattgtctgcttcacctatttcaac

SEQ ID NO: 59712 - DNA, 25 bp, probe
gtctctccaacagtgtattccaaag

SEQ ID NO: 59713 - DNA, 25 bp, probe
ccctcttaatggatgtcatatctga

SEQ ID NO: 59714 - DNA, 25 bp, probe
cacctggcttgctattagtaacagt

SEQ ID NO: 59715 - DNA, 25 bp, probe
gacccttacacagttagaagcaaag

SEQ ID NO: 59716 - DNA, 25 bp, probe
gaccacctggcttgctattagtaac

SEQ ID NO: 59717 - DNA, 25 bp, probe
atgctgtaatacacaactcttggat

SEQ ID NO: 59718 - DNA, 25 bp, probe
tgctgtaatacacaactcttggata

SEQ ID NO: 59719 - DNA, 25 bp, probe
aatgctgtaatacacaactcttgga

SEQ ID NO: 59720 - DNA, 25 bp, probe
cctgcctaataatgctgtaatacac

SEQ ID NO: 59721 - DNA, 25 bp, probe
gctgtaatacacaactcttggatag

SEQ ID NO: 59722 - DNA, 25 bp, probe
taatgctgtaatacacaactcttgg

SEQ ID NO: 59723 - DNA, 25 bp, probe
agtcatggcttatggaacaactata

SEQ ID NO: 59724 - DNA, 25 bp, probe
ctgcctaataatgctgtaatacaca

SEQ ID NO: 59725 - DNA, 25 bp, probe
gtcatggcttatggaacaactatat

SEQ ID NO: 59726 - DNA, 25 bp, probe
tgcctaataatgctgtaatacacaa

SEQ ID NO: 59727 - DNA, 25 bp, probe
ggcagagctgtaatgttaatgatat

SEQ ID NO: 59728 - DNA, 25 bp, probe
gcctaataatgctgtaatacacaac

SEQ ID NO: 59729 - DNA, 25 bp, probe
atttctacatttcttctctgctgga

SEQ ID NO: 59730 - DNA, 25 bp, probe
agtttcaccaaatccacattcaaat

SEQ ID NO: 59731 - DNA, 25 bp, probe
gaactgggaatgtattatcacctgt

SEQ ID NO: 59732 - DNA, 25 bp, probe
tgaatactacactgaactgggaatg

SEQ ID NO: 59733 - DNA, 25 bp, probe
aatgaatactacactgaactgggaa

SEQ ID NO: 59734 - DNA, 25 bp, probe
aaatgaatactacactgaactggga

SEQ ID NO: 59735 - DNA, 25 bp, probe
caaatgaatactacactgaactggg

SEQ ID NO: 59736 - DNA, 25 bp, probe
tcatggcttatggaacaactatatt

SEQ ID NO: 59737 - DNA, 25 bp, probe
gcagaagaagaaagcaagaaagaaa

SEQ ID NO: 59738 - DNA, 25 bp, probe
atgaatactacactgaactgggaat

SEQ ID NO: 59739 - DNA, 25 bp, probe
cagtttcaccaaatccacattcaaa

SEQ ID NO: 59740 - DNA, 25 bp, probe
tttctacatttcttctctgctggac

SEQ ID NO: 59741 - DNA, 25 bp, probe
tgggaatgtattatcacctgttagt

SEQ ID NO: 59742 - DNA, 25 bp, probe
actgggaatgtattatcacctgtta

SEQ ID NO: 59743 - DNA, 25 bp, probe
gacaatttctctaaccacacaacat

SEQ ID NO: 59744 - DNA, 25 bp, probe
ttcagtcttcaaagtggaaatacct

SEQ ID NO: 59745 - DNA, 25 bp, probe
acaaatgaatactacactgaactgg

SEQ ID NO: 59746 - DNA, 25 bp, probe
ttagtcatggcttatggaacaacta

SEQ ID NO: 59747 - DNA, 25 bp, probe
ctgtaatacacaactcttggataga

SEQ ID NO: 59748 - DNA, 25 bp, probe
atggaacaactatatttcaccctct

SEQ ID NO: 59749 - DNA, 25 bp, probe
tagtcatggcttatggaacaactat

SEQ ID NO: 59750 - DNA, 25 bp, probe
aactgggaatgtattatcacctgtt

SEQ ID NO: 59751 - DNA, 25 bp, probe
gggagaaatgtagtctttggtgtaa

SEQ ID NO: 59752 - DNA, 25 bp, probe
ggagaaatgtagtctttggtgtaag

SEQ ID NO: 59753 - DNA, 25 bp, probe
ctgggaatgtattatcacctgttag

SEQ ID NO: 59754 - DNA, 25 bp, probe
tcagtttcaccaaatccacattcaa

SEQ ID NO: 59755 - DNA, 25 bp, probe
aagacaatttctctaaccacacaac

SEQ ID NO: 59756 - DNA, 25 bp, probe
tctcagtttcaccaaatccacattc

SEQ ID NO: 59757 - DNA, 25 bp, probe
tatttctacatttcttctctgctgg

SEQ ID NO: 59758 - DNA, 25 bp, probe
agacaatttctctaaccacacaaca

SEQ ID NO: 59759 - DNA, 25 bp, probe
tggaacaactatatttcaccctcta

SEQ ID NO: 59760 - DNA, 25 bp, probe
cttcaaagtggaaatacctgggaaa

SEQ ID NO: 59761 - DNA, 25 bp, probe
tttcagatatcagaaatcccttggg

SEQ ID NO: 59762 - DNA, 25 bp, probe
aaataaatacattccatgggctcac

SEQ ID NO: 59763 - DNA, 25 bp, probe
aataaatacattccatgggctcaca

SEQ ID NO: 59764 - DNA, 25 bp, probe
gaaataaatacattccatgggctca

SEQ ID NO: 59765 - DNA, 25 bp, probe
tgaaataaatacattccatgggctc

SEQ ID NO: 59766 - DNA, 25 bp, probe
ataaatacattccatgggctcacac

SEQ ID NO: 59767 - DNA, 25 bp, probe
atgaaataaatacattccatgggct

SEQ ID NO: 59768 - DNA, 25 bp, probe
ttttcagatatcagaaatcccttgg

SEQ ID NO: 59769 - DNA, 25 bp, probe
ggttttcagatatcagaaatccctt

SEQ ID NO: 59770 - DNA, 25 bp, probe
gggttttcagatatcagaaatccct

SEQ ID NO: 59771 - DNA, 25 bp, probe
gttttcagatatcagaaatcccttg

SEQ ID NO: 59772 - DNA, 25 bp, probe
ttcagatatcagaaatcccttgggg

SEQ ID NO: 59773 - DNA, 25 bp, probe
taaatacattccatgggctcacacg

SEQ ID NO: 59774 - DNA, 25 bp, probe
aatgaaataaatacattccatgggc

SEQ ID NO: 59775 - DNA, 25 bp, probe
aatacattccatgggctcacacgtt

SEQ ID NO: 59776 - DNA, 25 bp, probe
aaatacattccatgggctcacacgt

SEQ ID NO: 59777 - DNA, 25 bp, probe
tctgtgttaaagtatgtggaaatgc

SEQ ID NO: 59778 - DNA, 25 bp, probe
gctctgtgttaaagtatgtggaaat

SEQ ID NO: 59779 - DNA, 25 bp, probe
tgctctgtgttaaagtatgtggaaa

SEQ ID NO: 59780 - DNA, 25 bp, probe
tggcaaagaaatgagaaaggagaaa

SEQ ID NO: 59781 - DNA, 25 bp, probe
ttggcaaagaaatgagaaaggagaa

SEQ ID NO: 59782 - DNA, 25 bp, probe
ctgctctgtgttaaagtatgtggaa

SEQ ID NO: 59783 - DNA, 25 bp, probe
aactcaagtcactgctctgtgttaa

SEQ ID NO: 59784 - DNA, 25 bp, probe
tttggcaaagaaatgagaaaggaga

SEQ ID NO: 59785 - DNA, 25 bp, probe
ctctgtgttaaagtatgtggaaatg

SEQ ID NO: 59786 - DNA, 25 bp, probe
gaactcaagtcactgctctgtgtta

SEQ ID NO: 59787 - DNA, 25 bp, probe
cttgagatttggcaaagaaatgaga

SEQ ID NO: 59788 - DNA, 25 bp, probe
aagtcactgctctgtgttaaagtat

SEQ ID NO: 59789 - DNA, 25 bp, probe
atttggcaaagaaatgagaaaggag

SEQ ID NO: 59790 - DNA, 25 bp, probe
gatttggcaaagaaatgagaaagga

SEQ ID NO: 59791 - DNA, 25 bp, probe
agatttggcaaagaaatgagaaagg

SEQ ID NO: 59792 - DNA, 25 bp, probe
acttgagatttggcaaagaaatgag

SEQ ID NO: 59793 - DNA, 25 bp, probe
tgagatttggcaaagaaatgagaaa

SEQ ID NO: 59794 - DNA, 25 bp, probe
ttgagatttggcaaagaaatgagaa

SEQ ID NO: 59795 - DNA, 25 bp, probe
gacttgagatttggcaaagaaatga

SEQ ID NO: 59796 - DNA, 25 bp, probe
agtcactgctctgtgttaaagtatg

SEQ ID NO: 59797 - DNA, 25 bp, probe
gagatttggcaaagaaatgagaaag

SEQ ID NO: 59798 - DNA, 25 bp, probe
actgctctgtgttaaagtatgtgga

SEQ ID NO: 59799 - DNA, 25 bp, probe
tcactgctctgtgttaaagtatgtg

SEQ ID NO: 59800 - DNA, 25 bp, probe
gtcactgctctgtgttaaagtatgt

SEQ ID NO: 59801 - DNA, 25 bp, probe
caagtcactgctctgtgttaaagta

SEQ ID NO: 59802 - DNA, 25 bp, probe
ggacttgagatttggcaaagaaatg

SEQ ID NO: 59803 - DNA, 25 bp, probe
aggacttgagatttggcaaagaaat

SEQ ID NO: 59804 - DNA, 25 bp, probe
gaggacttgagatttggcaaagaaa

SEQ ID NO: 59805 - DNA, 25 bp, probe
ccatgaactccataggccattaatt

SEQ ID NO: 59806 - DNA, 25 bp, probe
ctgtgttaaagtatgtggaaatgca

SEQ ID NO: 59807 - DNA, 25 bp, probe
cactgctctgtgttaaagtatgtgg

SEQ ID NO: 59808 - DNA, 25 bp, probe
ctcaagtcactgctctgtgttaaag

SEQ ID NO: 59809 - DNA, 25 bp, probe
acatatcagcccatgaactccatag

SEQ ID NO: 59810 - DNA, 25 bp, probe
gacatatcagcccatgaactccata

SEQ ID NO: 59811 - DNA, 25 bp, probe
atctgggagaggaaggtgacatatc

SEQ ID NO: 59812 - DNA, 25 bp, probe
tcaagtcactgctctgtgttaaagt

SEQ ID NO: 59813 - DNA, 25 bp, probe
actcaagtcactgctctgtgttaaa

SEQ ID NO: 59814 - DNA, 25 bp, probe
tttctgcctttcctaatccactcag

SEQ ID NO: 59815 - DNA, 25 bp, probe
ggcaaagaaatgagaaaggagaaaa

SEQ ID NO: 59816 - DNA, 25 bp, probe
ctggctggaagtgcttaaaataaaa

SEQ ID NO: 59817 - DNA, 25 bp, probe
catatcagcccatgaactccatagg

SEQ ID NO: 59818 - DNA, 25 bp, probe
gatctgggagaggaaggtgacatat

SEQ ID NO: 59819 - DNA, 25 bp, probe
ggctggaagtgcttaaaataaaaca

SEQ ID NO: 59820 - DNA, 25 bp, probe
tggctggaagtgcttaaaataaaac

SEQ ID NO: 59821 - DNA, 25 bp, probe
tactttgtttccttcatcttcctct

SEQ ID NO: 59822 - DNA, 25 bp, probe
actttgtttccttcatcttcctctg

SEQ ID NO: 59823 - DNA, 25 bp, probe
gtttctgatgctgaatctctttgtc

SEQ ID NO: 59824 - DNA, 25 bp, probe
ttactttgtttccttcatcttcctc

SEQ ID NO: 59825 - DNA, 25 bp, probe
tttactttgtttccttcatcttcct

SEQ ID NO: 59826 - DNA, 25 bp, probe
ggactgtgaattattgcatgacatt

SEQ ID NO: 59827 - DNA, 25 bp, probe
ctcgtttctgatgctgaatctcttt

SEQ ID NO: 59828 - DNA, 25 bp, probe
tttctgatgctgaatctctttgtcg

SEQ ID NO: 59829 - DNA, 25 bp, probe
tcgtttctgatgctgaatctctttg

SEQ ID NO: 59830 - DNA, 25 bp, probe
ctttgtttccttcatcttcctctgc

SEQ ID NO: 59831 - DNA, 25 bp, probe
cgtttctgatgctgaatctctttgt

SEQ ID NO: 59832 - DNA, 25 bp, probe
tttgtttccttcatcttcctctgct

SEQ ID NO: 59833 - DNA, 25 bp, probe
gactgtgaattattgcatgacattc

SEQ ID NO: 59834 - DNA, 25 bp, probe
ttgtttccttcatcttcctctgctc

SEQ ID NO: 59835 - DNA, 25 bp, probe
catcatggacaactttgagtacctc

SEQ ID NO: 59836 - DNA, 25 bp, probe
tcatcatggacaactttgagtacct

SEQ ID NO: 59837 - DNA, 25 bp, probe
gtcatcatggacaactttgagtacc

SEQ ID NO: 59838 - DNA, 25 bp, probe
cttgggactgtgaattattgcatga

SEQ ID NO: 59839 - DNA, 25 bp, probe
atgacaacaccgtccacttcaattc

SEQ ID NO: 59840 - DNA, 25 bp, probe
gatgacaacaccgtccacttcaatt

SEQ ID NO: 59841 - DNA, 25 bp, probe
cgtcatcatggacaactttgagtac

SEQ ID NO: 59842 - DNA, 25 bp, probe
ttgggactgtgaattattgcatgac

SEQ ID NO: 59843 - DNA, 25 bp, probe
cttcatcttcctctgctcgtttctg

SEQ ID NO: 59844 - DNA, 25 bp, probe
gctcgtttctgatgctgaatctctt

SEQ ID NO: 59845 - DNA, 25 bp, probe
gggactgtgaattattgcatgacat

SEQ ID NO: 59846 - DNA, 25 bp, probe
ttctgatgctgaatctctttgtcgc

SEQ ID NO: 59847 - DNA, 25 bp, probe
ccgtcatcatggacaactttgagta

SEQ ID NO: 59848 - DNA, 25 bp, probe
tcatcttcctctgctcgtttctgat

SEQ ID NO: 59849 - DNA, 25 bp, probe
ttccttcatcttcctctgctcgttt

SEQ ID NO: 59850 - DNA, 25 bp, probe
tttccttcatcttcctctgctcgtt

SEQ ID NO: 59851 - DNA, 25 bp, probe
ttttactttgtttccttcatcttcc

SEQ ID NO: 59852 - DNA, 25 bp, probe
agatgacaacaccgtccacttcaat

SEQ ID NO: 59853 - DNA, 25 bp, probe
gcttgggactgtgaattattgcatg

SEQ ID NO: 59854 - DNA, 25 bp, probe
ttcatcttcctctgctcgtttctga

SEQ ID NO: 59855 - DNA, 25 bp, probe
ctgctcgtttctgatgctgaatctc

SEQ ID NO: 59856 - DNA, 25 bp, probe
ctctgctcgtttctgatgctgaatc

SEQ ID NO: 59857 - DNA, 25 bp, probe
cttacctggacatgtatcagatgct

SEQ ID NO: 59858 - DNA, 25 bp, probe
gtgggcttgggactgtgaattattg

SEQ ID NO: 59859 - DNA, 25 bp, probe
ttacctggacatgtatcagatgctg

SEQ ID NO: 59860 - DNA, 25 bp, probe
tgggactgtgaattattgcatgaca

SEQ ID NO: 59861 - DNA, 25 bp, probe
ccttcatcttcctctgctcgtttct

SEQ ID NO: 59862 - DNA, 25 bp, probe
tccttcatcttcctctgctcgtttc

SEQ ID NO: 59863 - DNA, 25 bp, probe
tgctcgtttctgatgctgaatctct

SEQ ID NO: 59864 - DNA, 25 bp, probe
tctgctcgtttctgatgctgaatct

SEQ ID NO: 59865 - DNA, 25 bp, probe
ctctacgagacagtgatgtatgtgt

SEQ ID NO: 59866 - DNA, 25 bp, probe
ttctctgtagtccttgcttcctatg

SEQ ID NO: 59867 - DNA, 25 bp, probe
tctacgagacagtgatgtatgtgtg

SEQ ID NO: 59868 - DNA, 25 bp, probe
tctgttggatgattatagcaggttc

SEQ ID NO: 59869 - DNA, 25 bp, probe
gtctgttggatgattatagcaggtt

SEQ ID NO: 59870 - DNA, 25 bp, probe
ctgttggatgattatagcaggttcc

SEQ ID NO: 59871 - DNA, 25 bp, probe
ctgattcctttctctgtagtccttg

SEQ ID NO: 59872 - DNA, 25 bp, probe
tgttggatgattatagcaggttcct

SEQ ID NO: 59873 - DNA, 25 bp, probe
cctctacgagacagtgatgtatgtg

SEQ ID NO: 59874 - DNA, 25 bp, probe
tttctctgtagtccttgcttcctat

SEQ ID NO: 59875 - DNA, 25 bp, probe
ggtctgttggatgattatagcaggt

SEQ ID NO: 59876 - DNA, 25 bp, probe
ctacgagacagtgatgtatgtgtgc

SEQ ID NO: 59877 - DNA, 25 bp, probe
ctttctctgtagtccttgcttccta

SEQ ID NO: 59878 - DNA, 25 bp, probe
attcctttctctgtagtccttgctt

SEQ ID NO: 59879 - DNA, 25 bp, probe
gagattaaccacttcttctgcgagg

SEQ ID NO: 59880 - DNA, 25 bp, probe
ggagattaaccacttcttctgcgag

SEQ ID NO: 59881 - DNA, 25 bp, probe
tacgagacagtgatgtatgtgtgct

SEQ ID NO: 59882 - DNA, 25 bp, probe
gattcctttctctgtagtccttgct

SEQ ID NO: 59883 - DNA, 25 bp, probe
gctgattcctttctctgtagtcctt

SEQ ID NO: 59884 - DNA, 25 bp, probe
gttggatgattatagcaggttcctg

SEQ ID NO: 59885 - DNA, 25 bp, probe
ttcctttctctgtagtccttgcttc

SEQ ID NO: 59886 - DNA, 25 bp, probe
tgattcctttctctgtagtccttgc

SEQ ID NO: 59887 - DNA, 25 bp, probe
cagctcaacacttcctctaccttac

SEQ ID NO: 59888 - DNA, 25 bp, probe
tctctgtagtccttgcttcctatgc

SEQ ID NO: 59889 - DNA, 25 bp, probe
acagctcaacacttcctctacctta

SEQ ID NO: 59890 - DNA, 25 bp, probe
tcaacacttcctctaccttaccctt

SEQ ID NO: 59891 - DNA, 25 bp, probe
ctgctgattcctttctctgtagtcc

SEQ ID NO: 59892 - DNA, 25 bp, probe
atgctgctgattcctttctctgtag

SEQ ID NO: 59893 - DNA, 25 bp, probe
gatgctgctgattcctttctctgta

SEQ ID NO: 59894 - DNA, 25 bp, probe
ggatgattatagcaggttcctggtt

SEQ ID NO: 59895 - DNA, 25 bp, probe
ttggatgattatagcaggttcctgg

SEQ ID NO: 59896 - DNA, 25 bp, probe
tttgatgctgctgattcctttctct

SEQ ID NO: 59897 - DNA, 25 bp, probe
caacacttcctctaccttacccttg

SEQ ID NO: 59898 - DNA, 25 bp, probe
tgctgattcctttctctgtagtcct

SEQ ID NO: 59899 - DNA, 25 bp, probe
ctcaacacttcctctaccttaccct

SEQ ID NO: 59900 - DNA, 25 bp, probe
catgactgtggtgtccttgttctac

SEQ ID NO: 59901 - DNA, 25 bp, probe
gctgctgattcctttctctgtagtc

SEQ ID NO: 59902 - DNA, 25 bp, probe
gatgattatagcaggttcctggttt

SEQ ID NO: 59903 - DNA, 25 bp, probe
agctcaacacttcctctaccttacc

SEQ ID NO: 59904 - DNA, 25 bp, probe
atgattatagcaggttcctggtttg

SEQ ID NO: 59905 - DNA, 25 bp, probe
ttgatgctgctgattcctttctctg

SEQ ID NO: 59906 - DNA, 25 bp, probe
acatgactgtggtgtccttgttcta

SEQ ID NO: 59907 - DNA, 25 bp, probe
aacacttcctctaccttacccttgt

SEQ ID NO: 59908 - DNA, 25 bp, probe
ctacatgctgccacattcttaccac

SEQ ID NO: 59909 - DNA, 25 bp, probe
acgcaaatgtatttctttctgatgt

SEQ ID NO: 59910 - DNA, 25 bp, probe
cacgcaaatgtatttctttctgatg

SEQ ID NO: 59911 - DNA, 25 bp, probe
tgtatttctttctgatgtttggtga

SEQ ID NO: 59912 - DNA, 25 bp, probe
cgcaaatgtatttctttctgatgtt

SEQ ID NO: 59913 - DNA, 25 bp, probe
cctcacgcaaatgtatttctttctg

SEQ ID NO: 59914 - DNA, 25 bp, probe
attgtcacctcctacatccacattg

SEQ ID NO: 59915 - DNA, 25 bp, probe
cattgtcacctcctacatccacatt

SEQ ID NO: 59916 - DNA, 25 bp, probe
ctcacgcaaatgtatttctttctga

SEQ ID NO: 59917 - DNA, 25 bp, probe
tcacgcaaatgtatttctttctgat

SEQ ID NO: 59918 - DNA, 25 bp, probe
atgtatttctttctgatgtttggtg

SEQ ID NO: 59919 - DNA, 25 bp, probe
atatacagactcggcatcacaccat

SEQ ID NO: 59920 - DNA, 25 bp, probe
atttctttctgatgtttggtgatct

SEQ ID NO: 59921 - DNA, 25 bp, probe
ttctttctgatgtttggtgatctag

SEQ ID NO: 59922 - DNA, 25 bp, probe
gtatttctttctgatgtttggtgat

SEQ ID NO: 59923 - DNA, 25 bp, probe
aatatacagactcggcatcacacca

SEQ ID NO: 59924 - DNA, 25 bp, probe
tttctttctgatgtttggtgatcta

SEQ ID NO: 59925 - DNA, 25 bp, probe
gcctcacgcaaatgtatttctttct

SEQ ID NO: 59926 - DNA, 25 bp, probe
attgcctctgaagagaaggacattg

SEQ ID NO: 59927 - DNA, 25 bp, probe
cattgcctctgaagagaaggacatt

SEQ ID NO: 59928 - DNA, 25 bp, probe
aatgtatttctttctgatgtttggt

SEQ ID NO: 59929 - DNA, 25 bp, probe
tatacagactcggcatcacaccatc

SEQ ID NO: 59930 - DNA, 25 bp, probe
ctctgcgttgtttgtgtgttctatg

SEQ ID NO: 59931 - DNA, 25 bp, probe
tatttctttctgatgtttggtgatc

SEQ ID NO: 59932 - DNA, 25 bp, probe
ttgtcacctcctacatccacattgt

SEQ ID NO: 59933 - DNA, 25 bp, probe
gcaaatgtatttctttctgatgttt

SEQ ID NO: 59934 - DNA, 25 bp, probe
aaatgtatttctttctgatgtttgg

SEQ ID NO: 59935 - DNA, 25 bp, probe
ctttctgatgtttggtgatctagac

SEQ ID NO: 59936 - DNA, 25 bp, probe
tctttctgatgtttggtgatctaga

SEQ ID NO: 59937 - DNA, 25 bp, probe
ttggtgatctagacagcttcttcct

SEQ ID NO: 59938 - DNA, 25 bp, probe
cctctgcgttgtttgtgtgttctat

SEQ ID NO: 59939 - DNA, 25 bp, probe
ctacatccacattgtgccagctatc

SEQ ID NO: 59940 - DNA, 25 bp, probe
ctcggcatcacaccatcacctatac

SEQ ID NO: 59941 - DNA, 25 bp, probe
tttctgatgtttggtgatctagaca

SEQ ID NO: 59942 - DNA, 25 bp, probe
gtttggtgatctagacagcttcttc

SEQ ID NO: 59943 - DNA, 25 bp, probe
tttgtgtgttctatgggaccctctt

SEQ ID NO: 59944 - DNA, 25 bp, probe
tctgcgttgtttgtgtgttctatgg

SEQ ID NO: 59945 - DNA, 25 bp, probe
ttctgatgtttggtgatctagacag

SEQ ID NO: 59946 - DNA, 25 bp, probe
gcattgtcacctcctacatccacat

SEQ ID NO: 59947 - DNA, 25 bp, probe
gatgtttggtgatctagacagcttc

SEQ ID NO: 59948 - DNA, 25 bp, probe
ccattgcctctgaagagaaggacat

SEQ ID NO: 59949 - DNA, 25 bp, probe
actcggcatcacaccatcacctata

SEQ ID NO: 59950 - DNA, 25 bp, probe
atgtttggtgatctagacagcttct

SEQ ID NO: 59951 - DNA, 25 bp, probe
tttggtgatctagacagcttcttcc

SEQ ID NO: 59952 - DNA, 25 bp, probe
cgttgtttgtgtgttctatgggacc

SEQ ID NO: 59953 - DNA, 25 bp, probe
gttctgacaccttcatcaataacat

SEQ ID NO: 59954 - DNA, 25 bp, probe
tctgacaccttcatcaataacatcg

SEQ ID NO: 59955 - DNA, 25 bp, probe
ttctgacaccttcatcaataacatc

SEQ ID NO: 59956 - DNA, 25 bp, probe
ctgacaccttcatcaataacatcgt

SEQ ID NO: 59957 - DNA, 25 bp, probe
ctgttctgacaccttcatcaataac

SEQ ID NO: 59958 - DNA, 25 bp, probe
cctgttctgacaccttcatcaataa

SEQ ID NO: 59959 - DNA, 25 bp, probe
ttctcctccgtcctaagagtatcat

SEQ ID NO: 59960 - DNA, 25 bp, probe
gacaccttcatcaataacatcgtga

SEQ ID NO: 59961 - DNA, 25 bp, probe
tgacaccttcatcaataacatcgtg

SEQ ID NO: 59962 - DNA, 25 bp, probe
gtcctaagagtatcatctgccagag

SEQ ID NO: 59963 - DNA, 25 bp, probe
ctcctccgtcctaagagtatcatct

SEQ ID NO: 59964 - DNA, 25 bp, probe
tctcctccgtcctaagagtatcatc

SEQ ID NO: 59965 - DNA, 25 bp, probe
cctctctgtggaatcctattctctt

SEQ ID NO: 59966 - DNA, 25 bp, probe
ctctctgtggaatcctattctctta

SEQ ID NO: 59967 - DNA, 25 bp, probe
tcctccgtcctaagagtatcatctg

SEQ ID NO: 59968 - DNA, 25 bp, probe
tcctctctgtggaatcctattctct

SEQ ID NO: 59969 - DNA, 25 bp, probe
tctctgtggaatcctattctcttat

SEQ ID NO: 59970 - DNA, 25 bp, probe
gcctgttctgacaccttcatcaata

SEQ ID NO: 59971 - DNA, 25 bp, probe
acaccttcatcaataacatcgtgat

SEQ ID NO: 59972 - DNA, 25 bp, probe
ttacaccaccttctaggacaagtct

SEQ ID NO: 59973 - DNA, 25 bp, probe
gttacaccaccttctaggacaagtc

SEQ ID NO: 59974 - DNA, 25 bp, probe
cagttacaccaccttctaggacaag

SEQ ID NO: 59975 - DNA, 25 bp, probe
gtggaatcctattctcttattctca

SEQ ID NO: 59976 - DNA, 25 bp, probe
tgtggaatcctattctcttattctc

SEQ ID NO: 59977 - DNA, 25 bp, probe
ctgtggaatcctattctcttattct

SEQ ID NO: 59978 - DNA, 25 bp, probe
tctgtggaatcctattctcttattc

SEQ ID NO: 59979 - DNA, 25 bp, probe
ctctgtggaatcctattctcttatt

SEQ ID NO: 59980 - DNA, 25 bp, probe
agttacaccaccttctaggacaagt

SEQ ID NO: 59981 - DNA, 25 bp, probe
tggaatcctattctcttattctcag

SEQ ID NO: 59982 - DNA, 25 bp, probe
ctctcagtggtcagcttgttctatg

SEQ ID NO: 59983 - DNA, 25 bp, probe
tcctaagagtatcatctgccagagg

SEQ ID NO: 59984 - DNA, 25 bp, probe
tttctcctccgtcctaagagtatca

SEQ ID NO: 59985 - DNA, 25 bp, probe
cgtcctaagagtatcatctgccaga

SEQ ID NO: 59986 - DNA, 25 bp, probe
tacaccaccttctaggacaagtctg

SEQ ID NO: 59987 - DNA, 25 bp, probe
ggaatcctattctcttattctcaga

SEQ ID NO: 59988 - DNA, 25 bp, probe
tgttctgacaccttcatcaataaca

SEQ ID NO: 59989 - DNA, 25 bp, probe
ctccgtcctaagagtatcatctgcc

SEQ ID NO: 59990 - DNA, 25 bp, probe
cctccgtcctaagagtatcatctgc

SEQ ID NO: 59991 - DNA, 25 bp, probe
cacaaatatggaaattccgcacttt

SEQ ID NO: 59992 - DNA, 25 bp, probe
ccgtcctaagagtatcatctgccag

SEQ ID NO: 59993 - DNA, 25 bp, probe
ttccttgcttgagaccttgaccatt

SEQ ID NO: 59994 - DNA, 25 bp, probe
cctctcagtggtcagcttgttctat

SEQ ID NO: 59995 - DNA, 25 bp, probe
tccgtcctaagagtatcatctgcca

SEQ ID NO: 59996 - DNA, 25 bp, probe
ttattctcagattttctcctccgtc

SEQ ID NO: 59997 - DNA, 25 bp, probe
gaatatgaagccatctacctagcaa

SEQ ID NO: 59998 - DNA, 25 bp, probe
tcaggaatatgaagccatctaccta

SEQ ID NO: 59999 - DNA, 25 bp, probe
ggaatatgaagccatctacctagca

SEQ ID NO: 60000 - DNA, 25 bp, probe
caggaatatgaagccatctacctag

SEQ ID NO: 60001 - DNA, 25 bp, probe
ttgtccatcaacttcaggaatatga

SEQ ID NO: 60002 - DNA, 25 bp, probe
aggaatatgaagccatctacctagc

SEQ ID NO: 60003 - DNA, 25 bp, probe
aatatgaagccatctacctagcaaa

SEQ ID NO: 60004 - DNA, 25 bp, probe
atttggaatgaagtacagagatgct

SEQ ID NO: 60005 - DNA, 25 bp, probe
ttggaatgaagtacagagatgcttt

SEQ ID NO: 60006 - DNA, 25 bp, probe
tttggaatgaagtacagagatgctt

SEQ ID NO: 60007 - DNA, 25 bp, probe
tgtccatcaacttcaggaatatgaa

SEQ ID NO: 60008 - DNA, 25 bp, probe
ttcaggaatatgaagccatctacct

SEQ ID NO: 60009 - DNA, 25 bp, probe
tttgtccatcaacttcaggaatatg

SEQ ID NO: 60010 - DNA, 25 bp, probe
gatttgtccatcaacttcaggaata

SEQ ID NO: 60011 - DNA, 25 bp, probe
ggatttgtccatcaacttcaggaat

SEQ ID NO: 60012 - DNA, 25 bp, probe
gcatacattatggaaacatttggaa

SEQ ID NO: 60013 - DNA, 25 bp, probe
atttgtccatcaacttcaggaatat

SEQ ID NO: 60014 - DNA, 25 bp, probe
catttggaatgaagtacagagatgc

SEQ ID NO: 60015 - DNA, 25 bp, probe
tggaaacatttggaatgaagtacag

SEQ ID NO: 60016 - DNA, 25 bp, probe
ggaaacatttggaatgaagtacaga

SEQ ID NO: 60017 - DNA, 25 bp, probe
acatttggaatgaagtacagagatg

SEQ ID NO: 60018 - DNA, 25 bp, probe
atggaaacatttggaatgaagtaca

SEQ ID NO: 60019 - DNA, 25 bp, probe
aaacatttggaatgaagtacagaga

SEQ ID NO: 60020 - DNA, 25 bp, probe
aacatttggaatgaagtacagagat

SEQ ID NO: 60021 - DNA, 25 bp, probe
gaaacatttggaatgaagtacagag

SEQ ID NO: 60022 - DNA, 25 bp, probe
tgcatacattatggaaacatttgga

SEQ ID NO: 60023 - DNA, 25 bp, probe
gcctttgttattgcatacattatgg

SEQ ID NO: 60024 - DNA, 25 bp, probe
agccatctacctagcaaaattaaca

SEQ ID NO: 60025 - DNA, 25 bp, probe
tgaagccatctacctagcaaaatta

SEQ ID NO: 60026 - DNA, 25 bp, probe
gccatctacctagcaaaattaacaa

SEQ ID NO: 60027 - DNA, 25 bp, probe
aagccatctacctagcaaaattaac

SEQ ID NO: 60028 - DNA, 25 bp, probe
tatgaagccatctacctagcaaaat

SEQ ID NO: 60029 - DNA, 25 bp, probe
atatgaagccatctacctagcaaaa

SEQ ID NO: 60030 - DNA, 25 bp, probe
gaagccatctacctagcaaaattaa

SEQ ID NO: 60031 - DNA, 25 bp, probe
atgaagccatctacctagcaaaatt

SEQ ID NO: 60032 - DNA, 25 bp, probe
ttgcatacattatggaaacatttgg

SEQ ID NO: 60033 - DNA, 25 bp, probe
cagcctttgttattgcatacattat

SEQ ID NO: 60034 - DNA, 25 bp, probe
ggaatgaagtacagagatgcttttg

SEQ ID NO: 60035 - DNA, 25 bp, probe
acattatggaaacatttggaatgaa

SEQ ID NO: 60036 - DNA, 25 bp, probe
aagtacagagatgcttttgcttatg

SEQ ID NO: 60037 - DNA, 25 bp, probe
tggaatgaagtacagagatgctttt

SEQ ID NO: 60038 - DNA, 25 bp, probe
tgaagtacagagatgcttttgctta

SEQ ID NO: 60039 - DNA, 25 bp, probe
gaagtacagagatgcttttgcttat

SEQ ID NO: 60040 - DNA, 25 bp, probe
gaatgaagtacagagatgcttttgc

SEQ ID NO: 60041 - DNA, 25 bp, probe
ccggaacctcagaacaattgaactc

SEQ ID NO: 60042 - DNA, 25 bp, probe
cggaacctcagaacaattgaactcc

SEQ ID NO: 60043 - DNA, 25 bp, probe
ctcagaacaattgaactcccctaaa

SEQ ID NO: 60044 - DNA, 25 bp, probe
tcagaacaattgaactcccctaaac

SEQ ID NO: 60045 - DNA, 25 bp, probe
gaacaattgaactcccctaaaccag

SEQ ID NO: 60046 - DNA, 25 bp, probe
cagaacaattgaactcccctaaacc

SEQ ID NO: 60047 - DNA, 25 bp, probe
agaacaattgaactcccctaaacca

SEQ ID NO: 60048 - DNA, 25 bp, probe
ggaacctcagaacaattgaactccc

SEQ ID NO: 60049 - DNA, 25 bp, probe
cctcagaacaattgaactcccctaa

SEQ ID NO: 60050 - DNA, 25 bp, probe
aattgaactcccctaaaccaggctc

SEQ ID NO: 60051 - DNA, 25 bp, probe
acctcagaacaattgaactccccta

SEQ ID NO: 60052 - DNA, 25 bp, probe
aacaattgaactcccctaaaccagg

SEQ ID NO: 60053 - DNA, 25 bp, probe
gaacctcagaacaattgaactcccc

SEQ ID NO: 60054 - DNA, 25 bp, probe
cccggaacctcagaacaattgaact

SEQ ID NO: 60055 - DNA, 25 bp, probe
aacctcagaacaattgaactcccct

SEQ ID NO: 60056 - DNA, 25 bp, probe
caattgaactcccctaaaccaggct

SEQ ID NO: 60057 - DNA, 25 bp, probe
acaattgaactcccctaaaccaggc

SEQ ID NO: 60058 - DNA, 25 bp, probe
gcaatttaagcacaaaggtactcat

SEQ ID NO: 60059 - DNA, 25 bp, probe
ttgacaccaaggttcttcagctatt

SEQ ID NO: 60060 - DNA, 25 bp, probe
caatttaagcacaaaggtactcatt

SEQ ID NO: 60061 - DNA, 25 bp, probe
ggcaatttaagcacaaaggtactca

SEQ ID NO: 60062 - DNA, 25 bp, probe
tggcaatttaagcacaaaggtactc

SEQ ID NO: 60063 - DNA, 25 bp, probe
gacaccaaggttcttcagctattga

SEQ ID NO: 60064 - DNA, 25 bp, probe
actggtcagtcacaagaacttcaac

SEQ ID NO: 60065 - DNA, 25 bp, probe
tttgtttgacaccaaggttcttcag

SEQ ID NO: 60066 - DNA, 25 bp, probe
tgacaccaaggttcttcagctattg

SEQ ID NO: 60067 - DNA, 25 bp, probe
aatttaagcacaaaggtactcattt

SEQ ID NO: 60068 - DNA, 25 bp, probe
gtggcaatttaagcacaaaggtact

SEQ ID NO: 60069 - DNA, 25 bp, probe
aaaggtactcatttgtaatcagatg

SEQ ID NO: 60070 - DNA, 25 bp, probe
ggtcagtcacaagaacttcaacctg

SEQ ID NO: 60071 - DNA, 25 bp, probe
ctggtcagtcacaagaacttcaacc

SEQ ID NO: 60072 - DNA, 25 bp, probe
tttgacaccaaggttcttcagctat

SEQ ID NO: 60073 - DNA, 25 bp, probe
cctgggtgttcattcattttgtttg

SEQ ID NO: 60074 - DNA, 25 bp, probe
tcctgggtgttcattcattttgttt

SEQ ID NO: 60075 - DNA, 25 bp, probe
ctgggtgttcattcattttgtttga

SEQ ID NO: 60076 - DNA, 25 bp, probe
tgggtgttcattcattttgtttgac

SEQ ID NO: 60077 - DNA, 25 bp, probe
gtcagtcacaagaacttcaacctgc

SEQ ID NO: 60078 - DNA, 25 bp, probe
ggaactgcaacgtcattaagtcaaa

SEQ ID NO: 60079 - DNA, 25 bp, probe
atttaagcacaaaggtactcatttg

SEQ ID NO: 60080 - DNA, 25 bp, probe
tgttcattcattttgtttgacacca

SEQ ID NO: 60081 - DNA, 25 bp, probe
ctcctgggtgttcattcattttgtt

SEQ ID NO: 60082 - DNA, 25 bp, probe
gttcattcattttgtttgacaccaa

SEQ ID NO: 60083 - DNA, 25 bp, probe
tcattcattttgtttgacaccaagg

SEQ ID NO: 60084 - DNA, 25 bp, probe
tggtcagtcacaagaacttcaacct

SEQ ID NO: 60085 - DNA, 25 bp, probe
ttcattcattttgtttgacaccaag

SEQ ID NO: 60086 - DNA, 25 bp, probe
catgttggtcatagtctgcactttg

SEQ ID NO: 60087 - DNA, 25 bp, probe
attcattttgtttgacaccaaggtt

SEQ ID NO: 60088 - DNA, 25 bp, probe
gggtgttcattcattttgtttgaca

SEQ ID NO: 60089 - DNA, 25 bp, probe
attttgtttgacaccaaggttcttc

SEQ ID NO: 60090 - DNA, 25 bp, probe
ggtggcaatttaagcacaaaggtac

SEQ ID NO: 60091 - DNA, 25 bp, probe
cattttgtttgacaccaaggttctt

SEQ ID NO: 60092 - DNA, 25 bp, probe
ttcattttgtttgacaccaaggttc

SEQ ID NO: 60093 - DNA, 25 bp, probe
cattcattttgtttgacaccaaggt

SEQ ID NO: 60094 - DNA, 25 bp, probe
tggtggcaatttaagcacaaaggta

SEQ ID NO: 60095 - DNA, 25 bp, probe
atgttggtcatagtctgcactttgt

SEQ ID NO: 60096 - DNA, 25 bp, probe
aaggtactcatttgtaatcagatga

SEQ ID NO: 60097 - DNA, 25 bp, probe
gtttgacaccaaggttcttcagcta

SEQ ID NO: 60098 - DNA, 25 bp, probe
tcattttgtttgacaccaaggttct

SEQ ID NO: 60099 - DNA, 25 bp, probe
ttttgtttgacaccaaggttcttca

SEQ ID NO: 60100 - DNA, 25 bp, probe
cactttgtggtggcaatttaagcac

SEQ ID NO: 60101 - DNA, 25 bp, probe
caaaggtactcatttgtaatcagat

SEQ ID NO: 60102 - DNA, 25 bp, probe
agtagaggctattcaaggttatcaa

SEQ ID NO: 60103 - DNA, 25 bp, probe
aagtagaggctattcaaggttatca

SEQ ID NO: 60104 - DNA, 25 bp, probe
agaggctattcaaggttatcaagaa

SEQ ID NO: 60105 - DNA, 25 bp, probe
gtagaggctattcaaggttatcaag

SEQ ID NO: 60106 - DNA, 25 bp, probe
caggttcaagtgattagagacagtg

SEQ ID NO: 60107 - DNA, 25 bp, probe
tagaggctattcaaggttatcaaga

SEQ ID NO: 60108 - DNA, 25 bp, probe
cttccaggttcaagtgattagagac

SEQ ID NO: 60109 - DNA, 25 bp, probe
ttccaggttcaagtgattagagaca

SEQ ID NO: 60110 - DNA, 25 bp, probe
tccaggttcaagtgattagagacag

SEQ ID NO: 60111 - DNA, 25 bp, probe
aggttcaagtgattagagacagtga

SEQ ID NO: 60112 - DNA, 25 bp, probe
tgtgctaatgatgagacagtgaatt

SEQ ID NO: 60113 - DNA, 25 bp, probe
ccaggttcaagtgattagagacagt

SEQ ID NO: 60114 - DNA, 25 bp, probe
ggcagatattggacacttccttatt

SEQ ID NO: 60115 - DNA, 25 bp, probe
cacctccatttccttagtttctgta

SEQ ID NO: 60116 - DNA, 25 bp, probe
ccttccaggttcaagtgattagaga

SEQ ID NO: 60117 - DNA, 25 bp, probe
acctccatttccttagtttctgtaa

SEQ ID NO: 60118 - DNA, 25 bp, probe
gattcaactttagtcctctccttcc

SEQ ID NO: 60119 - DNA, 25 bp, probe
gtgctaatgatgagacagtgaattt

SEQ ID NO: 60120 - DNA, 25 bp, probe
cagaaagtagaggctattcaaggtt

SEQ ID NO: 60121 - DNA, 25 bp, probe
aacagaaagtagaggctattcaagg

SEQ ID NO: 60122 - DNA, 25 bp, probe
tattcaaggttatcaagaaagtgcc

SEQ ID NO: 60123 - DNA, 25 bp, probe
ggctattcaaggttatcaagaaagt

SEQ ID NO: 60124 - DNA, 25 bp, probe
agaaagtagaggctattcaaggtta

SEQ ID NO: 60125 - DNA, 25 bp, probe
acagaaagtagaggctattcaaggt

SEQ ID NO: 60126 - DNA, 25 bp, probe
atctgttagcagtcctgacttgatt

SEQ ID NO: 60127 - DNA, 25 bp, probe
aatctgttagcagtcctgacttgat

SEQ ID NO: 60128 - DNA, 25 bp, probe
aggctattcaaggttatcaagaaag

SEQ ID NO: 60129 - DNA, 25 bp, probe
gaggctattcaaggttatcaagaaa

SEQ ID NO: 60130 - DNA, 25 bp, probe
attcaaggttatcaagaaagtgccc

SEQ ID NO: 60131 - DNA, 25 bp, probe
attcaactttagtcctctccttccc

SEQ ID NO: 60132 - DNA, 25 bp, probe
aaagtagaggctattcaaggttatc

SEQ ID NO: 60133 - DNA, 25 bp, probe
ctcctgctgaagagtttagaatgag

SEQ ID NO: 60134 - DNA, 25 bp, probe
ctattcaaggttatcaagaaagtgc

SEQ ID NO: 60135 - DNA, 25 bp, probe
gctattcaaggttatcaagaaagtg

SEQ ID NO: 60136 - DNA, 25 bp, probe
atttccttagtttctgtaagcctgt

SEQ ID NO: 60137 - DNA, 25 bp, probe
catttccttagtttctgtaagcctg

SEQ ID NO: 60138 - DNA, 25 bp, probe
tttccttagtttctgtaagcctgtt

SEQ ID NO: 60139 - DNA, 25 bp, probe
tccttagtttctgtaagcctgttaa

SEQ ID NO: 60140 - DNA, 25 bp, probe
ttccttagtttctgtaagcctgtta

SEQ ID NO: 60141 - DNA, 25 bp, probe
ctccatttccttagtttctgtaagc

SEQ ID NO: 60142 - DNA, 25 bp, probe
gaaagtagaggctattcaaggttat

SEQ ID NO: 60143 - DNA, 25 bp, probe
taacagaaagtagaggctattcaag

SEQ ID NO: 60144 - DNA, 25 bp, probe
attaggttctttcaagtttgactgg

SEQ ID NO: 60145 - DNA, 25 bp, probe
ccatttccttagtttctgtaagcct

SEQ ID NO: 60146 - DNA, 25 bp, probe
gtctcaagaatgctgtgaatcaata

SEQ ID NO: 60147 - DNA, 25 bp, probe
tctcaagaatgctgtgaatcaataa

SEQ ID NO: 60148 - DNA, 25 bp, probe
ggtctcaagaatgctgtgaatcaat

SEQ ID NO: 60149 - DNA, 25 bp, probe
tataggtatgtggtcaggaagcagt

SEQ ID NO: 60150 - DNA, 25 bp, probe
caactataggtatgtggtcaggaag

SEQ ID NO: 60151 - DNA, 25 bp, probe
taggtatgtggtcaggaagcagtta

SEQ ID NO: 60152 - DNA, 25 bp, probe
caaggagagtatggacatcaaattc

SEQ ID NO: 60153 - DNA, 25 bp, probe
gacatcaaattctttccttccagag

SEQ ID NO: 60154 - DNA, 25 bp, probe
aactataggtatgtggtcaggaagc

SEQ ID NO: 60155 - DNA, 25 bp, probe
gcaaggagagtatggacatcaaatt

SEQ ID NO: 60156 - DNA, 25 bp, probe
aggagagtatggacatcaaattctt

SEQ ID NO: 60157 - DNA, 25 bp, probe
aaggagagtatggacatcaaattct

SEQ ID NO: 60158 - DNA, 25 bp, probe
ataggtatgtggtcaggaagcagtt

SEQ ID NO: 60159 - DNA, 25 bp, probe
acaactataggtatgtggtcaggaa

SEQ ID NO: 60160 - DNA, 25 bp, probe
aacaactataggtatgtggtcagga

SEQ ID NO: 60161 - DNA, 25 bp, probe
taacaactataggtatgtggtcagg

SEQ ID NO: 60162 - DNA, 25 bp, probe
ggagagtatggacatcaaattcttt

SEQ ID NO: 60163 - DNA, 25 bp, probe
ctataggtatgtggtcaggaagcag

SEQ ID NO: 60164 - DNA, 25 bp, probe
ctactttagagccactcaaggaaac

SEQ ID NO: 60165 - DNA, 25 bp, probe
aggtatgtggtcaggaagcagttaa

SEQ ID NO: 60166 - DNA, 25 bp, probe
actactttagagccactcaaggaaa

SEQ ID NO: 60167 - DNA, 25 bp, probe
ttgaattcctgagcttaagtgatcc

SEQ ID NO: 60168 - DNA, 25 bp, probe
aatgcaaggagagtatggacatcaa

SEQ ID NO: 60169 - DNA, 25 bp, probe
tcttgaattcctgagcttaagtgat

SEQ ID NO: 60170 - DNA, 25 bp, probe
cttgaattcctgagcttaagtgatc

SEQ ID NO: 60171 - DNA, 25 bp, probe
tcaagaatgctgtgaatcaataaac

SEQ ID NO: 60172 - DNA, 25 bp, probe
gtcttgaattcctgagcttaagtga

SEQ ID NO: 60173 - DNA, 25 bp, probe
caagaatgctgtgaatcaataaaca

SEQ ID NO: 60174 - DNA, 25 bp, probe
actataggtatgtggtcaggaagca

SEQ ID NO: 60175 - DNA, 25 bp, probe
tgaattcctgagcttaagtgatcct

SEQ ID NO: 60176 - DNA, 25 bp, probe
acatcaaattctttccttccagagg

SEQ ID NO: 60177 - DNA, 25 bp, probe
ctcaagaatgctgtgaatcaataaa

SEQ ID NO: 60178 - DNA, 25 bp, probe
cactactttagagccactcaaggaa

SEQ ID NO: 60179 - DNA, 25 bp, probe
ctggtcttgaattcctgagcttaag

SEQ ID NO: 60180 - DNA, 25 bp, probe
gagagtatggacatcaaattctttc

SEQ ID NO: 60181 - DNA, 25 bp, probe
ggacatcaaattctttccttccaga

SEQ ID NO: 60182 - DNA, 25 bp, probe
tatggacatcaaattctttccttcc

SEQ ID NO: 60183 - DNA, 25 bp, probe
gaattcctgagcttaagtgatcctc

SEQ ID NO: 60184 - DNA, 25 bp, probe
ggtcttgaattcctgagcttaagtg

SEQ ID NO: 60185 - DNA, 25 bp, probe
caatgcaaggagagtatggacatca

SEQ ID NO: 60186 - DNA, 25 bp, probe
gagtatggacatcaaattctttcct

SEQ ID NO: 60187 - DNA, 25 bp, probe
agagtatggacatcaaattctttcc

SEQ ID NO: 60188 - DNA, 25 bp, probe
ggtatgtggtcaggaagcagttaaa

SEQ ID NO: 60189 - DNA, 25 bp, probe
ataacaactataggtatgtggtcag

SEQ ID NO: 60190 - DNA, 25 bp, probe
atctaactatggaatcctgtattgc

SEQ ID NO: 60191 - DNA, 25 bp, probe
tacttcatagcttggatcacattca

SEQ ID NO: 60192 - DNA, 25 bp, probe
acttcatagcttggatcacattcat

SEQ ID NO: 60193 - DNA, 25 bp, probe
cttcatagcttggatcacattcatc

SEQ ID NO: 60194 - DNA, 25 bp, probe
tactgtagaggtgaatgtctccttg

SEQ ID NO: 60195 - DNA, 25 bp, probe
ttacttcatagcttggatcacattc

SEQ ID NO: 60196 - DNA, 25 bp, probe
ctactgtagaggtgaatgtctcctt

SEQ ID NO: 60197 - DNA, 25 bp, probe
ctaactatggaatcctgtattgcac

SEQ ID NO: 60198 - DNA, 25 bp, probe
tctaactatggaatcctgtattgca

SEQ ID NO: 60199 - DNA, 25 bp, probe
atccctatctatgctaccacatttg

SEQ ID NO: 60200 - DNA, 25 bp, probe
catccctatctatgctaccacattt

SEQ ID NO: 60201 - DNA, 25 bp, probe
cattcatccctatctatgctaccac

SEQ ID NO: 60202 - DNA, 25 bp, probe
cacattcatccctatctatgctacc

SEQ ID NO: 60203 - DNA, 25 bp, probe
ccttcatttgcttcatatttgcttt

SEQ ID NO: 60204 - DNA, 25 bp, probe
tcacattcatccctatctatgctac

SEQ ID NO: 60205 - DNA, 25 bp, probe
tcatccctatctatgctaccacatt

SEQ ID NO: 60206 - DNA, 25 bp, probe
ttcatccctatctatgctaccacat

SEQ ID NO: 60207 - DNA, 25 bp, probe
attcatccctatctatgctaccaca

SEQ ID NO: 60208 - DNA, 25 bp, probe
acattcatccctatctatgctacca

SEQ ID NO: 60209 - DNA, 25 bp, probe
gccttcatttgcttcatatttgctt

SEQ ID NO: 60210 - DNA, 25 bp, probe
gttattcttcccatagtgtgagcag

SEQ ID NO: 60211 - DNA, 25 bp, probe
cagttattcttcccatagtgtgagc

SEQ ID NO: 60212 - DNA, 25 bp, probe
aagcaagagattaacacaaagtctg

SEQ ID NO: 60213 - DNA, 25 bp, probe
gctgtggagattattgtcatattaa

SEQ ID NO: 60214 - DNA, 25 bp, probe
aagagattaacacaaagtctgcctt

SEQ ID NO: 60215 - DNA, 25 bp, probe
aatatgagaattacaatgaagccaa

SEQ ID NO: 60216 - DNA, 25 bp, probe
agttattcttcccatagtgtgagca

SEQ ID NO: 60217 - DNA, 25 bp, probe
ttcatttgcttcatatttgctttca

SEQ ID NO: 60218 - DNA, 25 bp, probe
taactatggaatcctgtattgcaca

SEQ ID NO: 60219 - DNA, 25 bp, probe
gtaagcaagagattaacacaaagtc

SEQ ID NO: 60220 - DNA, 25 bp, probe
actatggaatcctgtattgcacatt

SEQ ID NO: 60221 - DNA, 25 bp, probe
aactatggaatcctgtattgcacat

SEQ ID NO: 60222 - DNA, 25 bp, probe
caagagattaacacaaagtctgcct

SEQ ID NO: 60223 - DNA, 25 bp, probe
atcacattcatccctatctatgcta

SEQ ID NO: 60224 - DNA, 25 bp, probe
gatcacattcatccctatctatgct

SEQ ID NO: 60225 - DNA, 25 bp, probe
acagttattcttcccatagtgtgag

SEQ ID NO: 60226 - DNA, 25 bp, probe
cttcatttgcttcatatttgctttc

SEQ ID NO: 60227 - DNA, 25 bp, probe
agctgtggagattattgtcatatta

SEQ ID NO: 60228 - DNA, 25 bp, probe
taagcaagagattaacacaaagtct

SEQ ID NO: 60229 - DNA, 25 bp, probe
tcatttgcttcatatttgctttcaa

SEQ ID NO: 60230 - DNA, 25 bp, probe
cctactgtagaggtgaatgtctcct

SEQ ID NO: 60231 - DNA, 25 bp, probe
gcctttctcaagatgatctacagtt

SEQ ID NO: 60232 - DNA, 25 bp, probe
tacagttattcttcccatagtgtga

SEQ ID NO: 60233 - DNA, 25 bp, probe
tgtaagcaagagattaacacaaagt

SEQ ID NO: 60234 - DNA, 25 bp, probe
aactgtagaagagaatcaagaagaa

SEQ ID NO: 60235 - DNA, 25 bp, probe
gtctgctgtaaatgtttgtctactg

SEQ ID NO: 60236 - DNA, 25 bp, probe
tggaaactgtagaagagaatcaaga

SEQ ID NO: 60237 - DNA, 25 bp, probe
tgtctgctgtaaatgtttgtctact

SEQ ID NO: 60238 - DNA, 25 bp, probe
gtgtctgctgtaaatgtttgtctac

SEQ ID NO: 60239 - DNA, 25 bp, probe
catcatggttaattctgtccaacaa

SEQ ID NO: 60240 - DNA, 25 bp, probe
ggtgtctgctgtaaatgtttgtcta

SEQ ID NO: 60241 - DNA, 25 bp, probe
ggaaactgtagaagagaatcaagaa

SEQ ID NO: 60242 - DNA, 25 bp, probe
tctgctgtaaatgtttgtctactgc

SEQ ID NO: 60243 - DNA, 25 bp, probe
tcattgtagagaatttggaaactgt

SEQ ID NO: 60244 - DNA, 25 bp, probe
gagaatttggaaactgtagaagaga

SEQ ID NO: 60245 - DNA, 25 bp, probe
agagaatttggaaactgtagaagag

SEQ ID NO: 60246 - DNA, 25 bp, probe
ccatcatggttaattctgtccaaca

SEQ ID NO: 60247 - DNA, 25 bp, probe
ttggaaactgtagaagagaatcaag

SEQ ID NO: 60248 - DNA, 25 bp, probe
atttggaaactgtagaagagaatca

SEQ ID NO: 60249 - DNA, 25 bp, probe
ttaattctgtccaacaaacacacac

SEQ ID NO: 60250 - DNA, 25 bp, probe
gttaattctgtccaacaaacacaca

SEQ ID NO: 60251 - DNA, 25 bp, probe
agaatttggaaactgtagaagagaa

SEQ ID NO: 60252 - DNA, 25 bp, probe
ggttaattctgtccaacaaacacac

SEQ ID NO: 60253 - DNA, 25 bp, probe
tttggaaactgtagaagagaatcaa

SEQ ID NO: 60254 - DNA, 25 bp, probe
tgtagagaatttggaaactgtagaa

SEQ ID NO: 60255 - DNA, 25 bp, probe
ttgtagagaatttggaaactgtaga

SEQ ID NO: 60256 - DNA, 25 bp, probe
tgttcattgtagagaatttggaaac

SEQ ID NO: 60257 - DNA, 25 bp, probe
actgtagaagagaatcaagaagaaa

SEQ ID NO: 60258 - DNA, 25 bp, probe
aaactgtagaagagaatcaagaaga

SEQ ID NO: 60259 - DNA, 25 bp, probe
gaaactgtagaagagaatcaagaag

SEQ ID NO: 60260 - DNA, 25 bp, probe
ttcattgtagagaatttggaaactg

SEQ ID NO: 60261 - DNA, 25 bp, probe
ctggtgtctgctgtaaatgtttgtc

SEQ ID NO: 60262 - DNA, 25 bp, probe
gttcattgtagagaatttggaaact

SEQ ID NO: 60263 - DNA, 25 bp, probe
atggttaattctgtccaacaaacac

SEQ ID NO: 60264 - DNA, 25 bp, probe
tagagaatttggaaactgtagaaga

SEQ ID NO: 60265 - DNA, 25 bp, probe
gtagagaatttggaaactgtagaag

SEQ ID NO: 60266 - DNA, 25 bp, probe
tggtgtctgctgtaaatgtttgtct

SEQ ID NO: 60267 - DNA, 25 bp, probe
aatttggaaactgtagaagagaatc

SEQ ID NO: 60268 - DNA, 25 bp, probe
gaatttggaaactgtagaagagaat

SEQ ID NO: 60269 - DNA, 25 bp, probe
cattgtagagaatttggaaactgta

SEQ ID NO: 60270 - DNA, 25 bp, probe
tggttaattctgtccaacaaacaca

SEQ ID NO: 60271 - DNA, 25 bp, probe
taattctgtccaacaaacacacacg

SEQ ID NO: 60272 - DNA, 25 bp, probe
catggttaattctgtccaacaaaca

SEQ ID NO: 60273 - DNA, 25 bp, probe
tcatggttaattctgtccaacaaac

SEQ ID NO: 60274 - DNA, 25 bp, probe
catgttcattgtagagaatttggaa

SEQ ID NO: 60275 - DNA, 25 bp, probe
atgttcattgtagagaatttggaaa

SEQ ID NO: 60276 - DNA, 25 bp, probe
atcatggttaattctgtccaacaaa

SEQ ID NO: 60277 - DNA, 25 bp, probe
attgtagagaatttggaaactgtag

SEQ ID NO: 60278 - DNA, 25 bp, probe
cctcttatggtgatgcttattctgt

SEQ ID NO: 60279 - DNA, 25 bp, probe
gcctcttatggtgatgcttattctg

SEQ ID NO: 60280 - DNA, 25 bp, probe
ctgcctcttatggtgatgcttattc

SEQ ID NO: 60281 - DNA, 25 bp, probe
ctcttatggtgatgcttattctgta

SEQ ID NO: 60282 - DNA, 25 bp, probe
tgcctcttatggtgatgcttattct

SEQ ID NO: 60283 - DNA, 25 bp, probe
tcttatggtgatgcttattctgtac

SEQ ID NO: 60284 - DNA, 25 bp, probe
actgtaatgtgactatgtattgcta

SEQ ID NO: 60285 - DNA, 25 bp, probe
cttcatccttgtcatcctcttcctc

SEQ ID NO: 60286 - DNA, 25 bp, probe
cactgtaatgtgactatgtattgct

SEQ ID NO: 60287 - DNA, 25 bp, probe
tgtgactatgtattgctagattgaa

SEQ ID NO: 60288 - DNA, 25 bp, probe
cctgcctcttatggtgatgcttatt

SEQ ID NO: 60289 - DNA, 25 bp, probe
atgtgactatgtattgctagattga

SEQ ID NO: 60290 - DNA, 25 bp, probe
caccttcatccttgtcatcctcttc

SEQ ID NO: 60291 - DNA, 25 bp, probe
tgtaatgtgactatgtattgctaga

SEQ ID NO: 60292 - DNA, 25 bp, probe
ctgtaatgtgactatgtattgctag

SEQ ID NO: 60293 - DNA, 25 bp, probe
agatttctgtgttccttctcattcc

SEQ ID NO: 60294 - DNA, 25 bp, probe
ccttcagattgtaacccaaagagaa

SEQ ID NO: 60295 - DNA, 25 bp, probe
cttcagattgtaacccaaagagaaa

SEQ ID NO: 60296 - DNA, 25 bp, probe
gatttctgtgttccttctcattccc

SEQ ID NO: 60297 - DNA, 25 bp, probe
aatgtgactatgtattgctagattg

SEQ ID NO: 60298 - DNA, 25 bp, probe
tcctgcctcttatggtgatgcttat

SEQ ID NO: 60299 - DNA, 25 bp, probe
gtgactatgtattgctagattgaat

SEQ ID NO: 60300 - DNA, 25 bp, probe
atttctgtgttccttctcattccca

SEQ ID NO: 60301 - DNA, 25 bp, probe
ttcatccttgtcatcctcttcctcc

SEQ ID NO: 60302 - DNA, 25 bp, probe
ccttcatccttgtcatcctcttcct

SEQ ID NO: 60303 - DNA, 25 bp, probe
ttaatgcccttcagattgtaaccca

SEQ ID NO: 60304 - DNA, 25 bp, probe
tcctttagacagtgggcattaatta

SEQ ID NO: 60305 - DNA, 25 bp, probe
aattaatgcccttcagattgtaacc

SEQ ID NO: 60306 - DNA, 25 bp, probe
ctcctttagacagtgggcattaatt

SEQ ID NO: 60307 - DNA, 25 bp, probe
attaatgcccttcagattgtaaccc

SEQ ID NO: 60308 - DNA, 25 bp, probe
accttcatccttgtcatcctcttcc

SEQ ID NO: 60309 - DNA, 25 bp, probe
cccttcagattgtaacccaaagaga

SEQ ID NO: 60310 - DNA, 25 bp, probe
taatgcccttcagattgtaacccaa

SEQ ID NO: 60311 - DNA, 25 bp, probe
cctttagacagtgggcattaattat

SEQ ID NO: 60312 - DNA, 25 bp, probe
ctcctgcctcttatggtgatgctta

SEQ ID NO: 60313 - DNA, 25 bp, probe
agacagtgggcattaattataacaa

SEQ ID NO: 60314 - DNA, 25 bp, probe
cagatttctgtgttccttctcattc

SEQ ID NO: 60315 - DNA, 25 bp, probe
gtaatgtgactatgtattgctagat

SEQ ID NO: 60316 - DNA, 25 bp, probe
ccaccttcatccttgtcatcctctt

SEQ ID NO: 60317 - DNA, 25 bp, probe
tcataattaatgcccttcagattgt

SEQ ID NO: 60318 - DNA, 25 bp, probe
tctcctttagacagtgggcattaat

SEQ ID NO: 60319 - DNA, 25 bp, probe
catccttgtcatcctcttcctcctg

SEQ ID NO: 60320 - DNA, 25 bp, probe
cttatggtgatgcttattctgtaca

SEQ ID NO: 60321 - DNA, 25 bp, probe
aggaagaagaaacgagctgtcatta

SEQ ID NO: 60322 - DNA, 25 bp, probe
aagccaagtttcaaggactgtcttt

SEQ ID NO: 60323 - DNA, 25 bp, probe
gaagccaagtttcaaggactgtctt

SEQ ID NO: 60324 - DNA, 25 bp, probe
caagtttcaaggactgtctttgagt

SEQ ID NO: 60325 - DNA, 25 bp, probe
agccaagtttcaaggactgtctttg

SEQ ID NO: 60326 - DNA, 25 bp, probe
ccaagtttcaaggactgtctttgag

SEQ ID NO: 60327 - DNA, 25 bp, probe
catcaggaagccaagtttcaaggac

SEQ ID NO: 60328 - DNA, 25 bp, probe
atcaggaagccaagtttcaaggact

SEQ ID NO: 60329 - DNA, 25 bp, probe
aagtttcaaggactgtctttgagtc

SEQ ID NO: 60330 - DNA, 25 bp, probe
gtttcaaggactgtctttgagtctg

SEQ ID NO: 60331 - DNA, 25 bp, probe
agtttcaaggactgtctttgagtct

SEQ ID NO: 60332 - DNA, 25 bp, probe
tttcaaggactgtctttgagtctgt

SEQ ID NO: 60333 - DNA, 25 bp, probe
ttcaaggactgtctttgagtctgtc

SEQ ID NO: 60334 - DNA, 25 bp, probe
aggactgtctttgagtctgtctgta

SEQ ID NO: 60335 - DNA, 25 bp, probe
gccaagtttcaaggactgtctttga

SEQ ID NO: 60336 - DNA, 25 bp, probe
ggaagccaagtttcaaggactgtct

SEQ ID NO: 60337 - DNA, 25 bp, probe
aggaagccaagtttcaaggactgtc

SEQ ID NO: 60338 - DNA, 25 bp, probe
tcaggaagccaagtttcaaggactg

SEQ ID NO: 60339 - DNA, 25 bp, probe
caaggactgtctttgagtctgtctg

SEQ ID NO: 60340 - DNA, 25 bp, probe
tcaaggactgtctttgagtctgtct

SEQ ID NO: 60341 - DNA, 25 bp, probe
aaggactgtctttgagtctgtctgt

SEQ ID NO: 60342 - DNA, 25 bp, probe
ggattgttaagaacgacattcagtg

SEQ ID NO: 60343 - DNA, 25 bp, probe
gattgttaagaacgacattcagtgc

SEQ ID NO: 60344 - DNA, 25 bp, probe
tattcctggattgtgaagctagaac

SEQ ID NO: 60345 - DNA, 25 bp, probe
ttattcctggattgtgaagctagaa

SEQ ID NO: 60346 - DNA, 25 bp, probe
attattcctggattgtgaagctaga

SEQ ID NO: 60347 - DNA, 25 bp, probe
gattattcctggattgtgaagctag

SEQ ID NO: 60348 - DNA, 25 bp, probe
aagggaagaatcagaatggcaatat

SEQ ID NO: 60349 - DNA, 25 bp, probe
aaagggaagaatcagaatggcaata

SEQ ID NO: 60350 - DNA, 25 bp, probe
agggaagaatcagaatggcaatata

SEQ ID NO: 60351 - DNA, 25 bp, probe
aactgtgagcttcgttgatgttaat

SEQ ID NO: 60352 - DNA, 25 bp, probe
actgtgagcttcgttgatgttaatc

SEQ ID NO: 60353 - DNA, 25 bp, probe
atatacaccatccctaattgctcct

SEQ ID NO: 60354 - DNA, 25 bp, probe
aatggcaatatatatggagaggagg

SEQ ID NO: 60355 - DNA, 25 bp, probe
attcctggattgtgaagctagaact

SEQ ID NO: 60356 - DNA, 25 bp, probe
tatacaccatccctaattgctcctt

SEQ ID NO: 60357 - DNA, 25 bp, probe
attgggctttcggtgtttgtaataa

SEQ ID NO: 60358 - DNA, 25 bp, probe
gaaagggaagaatcagaatggcaat

SEQ ID NO: 60359 - DNA, 25 bp, probe
gaactgtgagcttcgttgatgttaa

SEQ ID NO: 60360 - DNA, 25 bp, probe
ccctatatacaccatccctaattgc

SEQ ID NO: 60361 - DNA, 25 bp, probe
gggctttcggtgtttgtaataagta

SEQ ID NO: 60362 - DNA, 25 bp, probe
tatatacaccatccctaattgctcc

SEQ ID NO: 60363 - DNA, 25 bp, probe
cctatatacaccatccctaattgct

SEQ ID NO: 60364 - DNA, 25 bp, probe
aattgggctttcggtgtttgtaata

SEQ ID NO: 60365 - DNA, 25 bp, probe
ggattattcctggattgtgaagcta

SEQ ID NO: 60366 - DNA, 25 bp, probe
cagaatggcaatatatatggagagg

SEQ ID NO: 60367 - DNA, 25 bp, probe
gaaatgtgtttatctgctgtgggaa

SEQ ID NO: 60368 - DNA, 25 bp, probe
agaatggcaatatatatggagagga

SEQ ID NO: 60369 - DNA, 25 bp, probe
catatcactgcaacacctacaagtt

SEQ ID NO: 60370 - DNA, 25 bp, probe
ccagagacaaatcagaaatgtgttt

SEQ ID NO: 60371 - DNA, 25 bp, probe
ggctttcggtgtttgtaataagtac

SEQ ID NO: 60372 - DNA, 25 bp, probe
cttgggattgttaagaacgacattc

SEQ ID NO: 60373 - DNA, 25 bp, probe
taattgctccttctcacctcctctc

SEQ ID NO: 60374 - DNA, 25 bp, probe
ctaattgctccttctcacctcctct

SEQ ID NO: 60375 - DNA, 25 bp, probe
gaatggcaatatatatggagaggag

SEQ ID NO: 60376 - DNA, 25 bp, probe
accagagacaaatcagaaatgtgtt

SEQ ID NO: 60377 - DNA, 25 bp, probe
tactggaaagggaagaatcagaatg

SEQ ID NO: 60378 - DNA, 25 bp, probe
tggattgtgaagctagaactgtgag

SEQ ID NO: 60379 - DNA, 25 bp, probe
ctggattgtgaagctagaactgtga

SEQ ID NO: 60380 - DNA, 25 bp, probe
ttgggattgttaagaacgacattca

SEQ ID NO: 60381 - DNA, 25 bp, probe
actctttagtcttgggattgttaag

SEQ ID NO: 60382 - DNA, 25 bp, probe
gggaagaatcagaatggcaatatat

SEQ ID NO: 60383 - DNA, 25 bp, probe
ctatatacaccatccctaattgctc

SEQ ID NO: 60384 - DNA, 25 bp, probe
agaactgtgagcttcgttgatgtta

SEQ ID NO: 60385 - DNA, 25 bp, probe
tagaactgtgagcttcgttgatgtt

SEQ ID NO: 60386 - DNA, 25 bp, probe
ttggagacaattaagtcatggtacg

SEQ ID NO: 60387 - DNA, 25 bp, probe
aggtattactgtttgtgtgtttgag

SEQ ID NO: 60388 - DNA, 25 bp, probe
tgtttgtgtttgtgtatatgtgtct

SEQ ID NO: 60389 - DNA, 25 bp, probe
cttgtaggtattactgtttgtgtgt

SEQ ID NO: 60390 - DNA, 25 bp, probe
tcttgtaggtattactgtttgtgtg

SEQ ID NO: 60391 - DNA, 25 bp, probe
gaggaagaatgagtctactttggag

SEQ ID NO: 60392 - DNA, 25 bp, probe
attaagagtcaatctgcaagccatt

SEQ ID NO: 60393 - DNA, 25 bp, probe
aggaagaatgagtctactttggaga

SEQ ID NO: 60394 - DNA, 25 bp, probe
caggaggaagaatgagtctactttg

SEQ ID NO: 60395 - DNA, 25 bp, probe
tgtaggtattactgtttgtgtgttt

SEQ ID NO: 60396 - DNA, 25 bp, probe
ttgtaggtattactgtttgtgtgtt

SEQ ID NO: 60397 - DNA, 25 bp, probe
ggtattactgtttgtgtgtttgagt

SEQ ID NO: 60398 - DNA, 25 bp, probe
actgtttgtgtgtttgagtttactg

SEQ ID NO: 60399 - DNA, 25 bp, probe
atgtttgtgtttgtgtatatgtgtc

SEQ ID NO: 60400 - DNA, 25 bp, probe
ctgtttgtgtgtttgagtttactgc

SEQ ID NO: 60401 - DNA, 25 bp, probe
gtaggtattactgtttgtgtgtttg

SEQ ID NO: 60402 - DNA, 25 bp, probe
taggtattactgtttgtgtgtttga

SEQ ID NO: 60403 - DNA, 25 bp, probe
gtttgtgtttgtgtatatgtgtctt

SEQ ID NO: 60404 - DNA, 25 bp, probe
tactgtttgtgtgtttgagtttact

SEQ ID NO: 60405 - DNA, 25 bp, probe
aggaggaagaatgagtctactttgg

SEQ ID NO: 60406 - DNA, 25 bp, probe
ggaggaagaatgagtctactttgga

SEQ ID NO: 60407 - DNA, 25 bp, probe
ttcttgtaggtattactgtttgtgt

SEQ ID NO: 60408 - DNA, 25 bp, probe
ggagacaattaagtcatggtacgtt

SEQ ID NO: 60409 - DNA, 25 bp, probe
ttactgtttgtgtgtttgagtttac

SEQ ID NO: 60410 - DNA, 25 bp, probe
gtattactgtttgtgtgtttgagtt

SEQ ID NO: 60411 - DNA, 25 bp, probe
gcaggaggaagaatgagtctacttt

SEQ ID NO: 60412 - DNA, 25 bp, probe
tttgtgtttgtgtatatgtgtcttt

SEQ ID NO: 60413 - DNA, 25 bp, probe
ggcaggaggaagaatgagtctactt

SEQ ID NO: 60414 - DNA, 25 bp, probe
tggagacaattaagtcatggtacgt

SEQ ID NO: 60415 - DNA, 25 bp, probe
catgtttgtgtttgtgtatatgtgt

SEQ ID NO: 60416 - DNA, 25 bp, probe
caagagaactgtttaatatgctgat

SEQ ID NO: 60417 - DNA, 25 bp, probe
ttggcaggaggaagaatgagtctac

SEQ ID NO: 60418 - DNA, 25 bp, probe
gttggcaggaggaagaatgagtcta

SEQ ID NO: 60419 - DNA, 25 bp, probe
gattaagagtcaatctgcaagccat

SEQ ID NO: 60420 - DNA, 25 bp, probe
aagtcatggtacgtttcctaaagat

SEQ ID NO: 60421 - DNA, 25 bp, probe
acaattaagtcatggtacgtttcct

SEQ ID NO: 60422 - DNA, 25 bp, probe
tttggagacaattaagtcatggtac

SEQ ID NO: 60423 - DNA, 25 bp, probe
attactgtttgtgtgtttgagttta

SEQ ID NO: 60424 - DNA, 25 bp, probe
tattactgtttgtgtgtttgagttt

SEQ ID NO: 60425 - DNA, 25 bp, probe
taagtcatggtacgtttcctaaaga

SEQ ID NO: 60426 - DNA, 25 bp, probe
agtcatggtacgtttcctaaagata

SEQ ID NO: 60427 - DNA, 25 bp, probe
ctttggagacaattaagtcatggta

SEQ ID NO: 60428 - DNA, 25 bp, probe
attcttgtaggtattactgtttgtg

SEQ ID NO: 60429 - DNA, 25 bp, probe
gtcatggtacgtttcctaaagatag

SEQ ID NO: 60430 - DNA, 25 bp, probe
ggaaatggcttctttaaactgtgag

SEQ ID NO: 60431 - DNA, 25 bp, probe
ctggaaatggcttctttaaactgtg

SEQ ID NO: 60432 - DNA, 25 bp, probe
tggaaatggcttctttaaactgtga

SEQ ID NO: 60433 - DNA, 25 bp, probe
cttagcaacgcagaagagtacaaag

SEQ ID NO: 60434 - DNA, 25 bp, probe
ttagcaacgcagaagagtacaaagt

SEQ ID NO: 60435 - DNA, 25 bp, probe
ctgctggaaatggcttctttaaact

SEQ ID NO: 60436 - DNA, 25 bp, probe
gctggaaatggcttctttaaactgt

SEQ ID NO: 60437 - DNA, 25 bp, probe
tgctggaaatggcttctttaaactg

SEQ ID NO: 60438 - DNA, 25 bp, probe
tagcaacgcagaagagtacaaagtg

SEQ ID NO: 60439 - DNA, 25 bp, probe
gaaatggcttctttaaactgtgagc

SEQ ID NO: 60440 - DNA, 25 bp, probe
aaatggcttctttaaactgtgagca

SEQ ID NO: 60441 - DNA, 25 bp, probe
gctgctggaaatggcttctttaaac

SEQ ID NO: 60442 - DNA, 25 bp, probe
cagaagagtacaaagtgtggaagcc

SEQ ID NO: 60443 - DNA, 25 bp, probe
gcttagcaacgcagaagagtacaaa

SEQ ID NO: 60444 - DNA, 25 bp, probe
agcttagcaacgcagaagagtacaa

SEQ ID NO: 60445 - DNA, 25 bp, probe
aatggcttctttaaactgtgagcac

SEQ ID NO: 60446 - DNA, 25 bp, probe
gtgctgctggaaatggcttctttaa

SEQ ID NO: 60447 - DNA, 25 bp, probe
tgctgctggaaatggcttctttaaa

SEQ ID NO: 60448 - DNA, 25 bp, probe
cgcagaagagtacaaagtgtggaag

SEQ ID NO: 60449 - DNA, 25 bp, probe
gaagagtacaaagtgtggaagccag

SEQ ID NO: 60450 - DNA, 25 bp, probe
gcagaagagtacaaagtgtggaagc

SEQ ID NO: 60451 - DNA, 25 bp, probe
caattccagcttagcaacgcagaag

SEQ ID NO: 60452 - DNA, 25 bp, probe
agaagagtacaaagtgtggaagcca

SEQ ID NO: 60453 - DNA, 25 bp, probe
aattccagcttagcaacgcagaaga

SEQ ID NO: 60454 - DNA, 25 bp, probe
ttctttaaactgtgagcacgcagag

SEQ ID NO: 60455 - DNA, 25 bp, probe
cttctttaaactgtgagcacgcaga

SEQ ID NO: 60456 - DNA, 25 bp, probe
caacgcagaagagtacaaagtgtgg

SEQ ID NO: 60457 - DNA, 25 bp, probe
cagcttagcaacgcagaagagtaca

SEQ ID NO: 60458 - DNA, 25 bp, probe
acgcagaagagtacaaagtgtggaa

SEQ ID NO: 60459 - DNA, 25 bp, probe
aacgcagaagagtacaaagtgtgga

SEQ ID NO: 60460 - DNA, 25 bp, probe
agtgctgctggaaatggcttcttta

SEQ ID NO: 60461 - DNA, 25 bp, probe
gcaacgcagaagagtacaaagtgtg

SEQ ID NO: 60462 - DNA, 25 bp, probe
agcaacgcagaagagtacaaagtgt

SEQ ID NO: 60463 - DNA, 25 bp, probe
gactcccactctctgtcttccttca

SEQ ID NO: 60464 - DNA, 25 bp, probe
aagagtacaaagtgtggaagccagg

SEQ ID NO: 60465 - DNA, 25 bp, probe
actctctgtcttccttcacacagtg

SEQ ID NO: 60466 - DNA, 25 bp, probe
cactctctgtcttccttcacacagt

SEQ ID NO: 60467 - DNA, 25 bp, probe
tctctgtcttccttcacacagtgtc

SEQ ID NO: 60468 - DNA, 25 bp, probe
ctctctgtcttccttcacacagtgt

SEQ ID NO: 60469 - DNA, 25 bp, probe
atggcttctttaaactgtgagcacg

SEQ ID NO: 60470 - DNA, 25 bp, probe
ccactctctgtcttccttcacacag

SEQ ID NO: 60471 - DNA, 25 bp, probe
cagggcattaaactgctaaaagctg

SEQ ID NO: 60472 - DNA, 25 bp, probe
ctctgtcttccttcacacagtgtcc

SEQ ID NO: 60473 - DNA, 25 bp, probe
gcttctttaaactgtgagcacgcag

SEQ ID NO: 60474 - DNA, 25 bp, probe
tgatgtcctcatagaaggtgaactg

SEQ ID NO: 60475 - DNA, 25 bp, probe
ggcaccagaggatgaatatgatgtc

SEQ ID NO: 60476 - DNA, 25 bp, probe
gatgtcctcatagaaggtgaactgg

SEQ ID NO: 60477 - DNA, 25 bp, probe
atgatgtcctcatagaaggtgaact

SEQ ID NO: 60478 - DNA, 25 bp, probe
atgtcctcatagaaggtgaactgga

SEQ ID NO: 60479 - DNA, 25 bp, probe
aaattatgatctacacccgtttctt

SEQ ID NO: 60480 - DNA, 25 bp, probe
tcctcatagaaggtgaactggagag

SEQ ID NO: 60481 - DNA, 25 bp, probe
ttatgatctacacccgtttcttaaa

SEQ ID NO: 60482 - DNA, 25 bp, probe
gtcctcatagaaggtgaactggaga

SEQ ID NO: 60483 - DNA, 25 bp, probe
gcaccagaggatgaatatgatgtcc

SEQ ID NO: 60484 - DNA, 25 bp, probe
attatgatctacacccgtttcttaa

SEQ ID NO: 60485 - DNA, 25 bp, probe
aattatgatctacacccgtttctta

SEQ ID NO: 60486 - DNA, 25 bp, probe
tgtcctcatagaaggtgaactggag

SEQ ID NO: 60487 - DNA, 25 bp, probe
tatgatgtcctcatagaaggtgaac

SEQ ID NO: 60488 - DNA, 25 bp, probe
atatgatgtcctcatagaaggtgaa

SEQ ID NO: 60489 - DNA, 25 bp, probe
aatatgatgtcctcatagaaggtga

SEQ ID NO: 60490 - DNA, 25 bp, probe
tgaatatgatgtcctcatagaaggt

SEQ ID NO: 60491 - DNA, 25 bp, probe
cctcatagaaggtgaactggagagc

SEQ ID NO: 60492 - DNA, 25 bp, probe
tgatctacacccgtttcttaaaagg

SEQ ID NO: 60493 - DNA, 25 bp, probe
gaatatgatgtcctcatagaaggtg

SEQ ID NO: 60494 - DNA, 25 bp, probe
atgatctacacccgtttcttaaaag

SEQ ID NO: 60495 - DNA, 25 bp, probe
ctcatagaaggtgaactggagagcg

SEQ ID NO: 60496 - DNA, 25 bp, probe
caccagaggatgaatatgatgtcct

SEQ ID NO: 60497 - DNA, 25 bp, probe
gcgatcccaagtgtaaaattctcaa

SEQ ID NO: 60498 - DNA, 25 bp, probe
aggatgaatatgatgtcctcataga

SEQ ID NO: 60499 - DNA, 25 bp, probe
gggcaccagaggatgaatatgatgt

SEQ ID NO: 60500 - DNA, 25 bp, probe
atctacacccgtttcttaaaaggca

SEQ ID NO: 60501 - DNA, 25 bp, probe
gatctacacccgtttcttaaaaggc

SEQ ID NO: 60502 - DNA, 25 bp, probe
atgaatatgatgtcctcatagaagg

SEQ ID NO: 60503 - DNA, 25 bp, probe
ggatgaatatgatgtcctcatagaa

SEQ ID NO: 60504 - DNA, 25 bp, probe
tatgatctacacccgtttcttaaaa

SEQ ID NO: 60505 - DNA, 25 bp, probe
ccgtttcttaaaaggcagtctgaag

SEQ ID NO: 60506 - DNA, 25 bp, probe
tctacacccgtttcttaaaaggcag

SEQ ID NO: 60507 - DNA, 25 bp, probe
tttcttaaaaggcagtctgaagatg

SEQ ID NO: 60508 - DNA, 25 bp, probe
gtttcttaaaaggcagtctgaagat

SEQ ID NO: 60509 - DNA, 25 bp, probe
tacacccgtttcttaaaaggcagtc

SEQ ID NO: 60510 - DNA, 25 bp, probe
ctacacccgtttcttaaaaggcagt

SEQ ID NO: 60511 - DNA, 25 bp, probe
ttcttaaaaggcagtctgaagatgg

SEQ ID NO: 60512 - DNA, 25 bp, probe
gatgaatatgatgtcctcatagaag

SEQ ID NO: 60513 - DNA, 25 bp, probe
cgtttcttaaaaggcagtctgaaga

SEQ ID NO: 60514 - DNA, 25 bp, probe
cccgtttcttaaaaggcagtctgaa

SEQ ID NO: 60515 - DNA, 25 bp, probe
ggcgatcccaagtgtaaaattctca

SEQ ID NO: 60516 - DNA, 25 bp, probe
cgggcaccagaggatgaatatgatg

SEQ ID NO: 60517 - DNA, 25 bp, probe
cacccgtttcttaaaaggcagtctg

SEQ ID NO: 60518 - DNA, 25 bp, probe
gatatggtcaacctctcctgtgtaa

SEQ ID NO: 60519 - DNA, 25 bp, probe
atatggtcaacctctcctgtgtaac

SEQ ID NO: 60520 - DNA, 25 bp, probe
tatggtcaacctctcctgtgtaact

SEQ ID NO: 60521 - DNA, 25 bp, probe
caggacaagtgaacatgagtcatac

SEQ ID NO: 60522 - DNA, 25 bp, probe
tgatatggtcaacctctcctgtgta

SEQ ID NO: 60523 - DNA, 25 bp, probe
caacctctcctgtgtaactgtgatc

SEQ ID NO: 60524 - DNA, 25 bp, probe
tcctatttctctgacacaaactgtt

SEQ ID NO: 60525 - DNA, 25 bp, probe
cctatttctctgacacaaactgttc

SEQ ID NO: 60526 - DNA, 25 bp, probe
tatttctctgacacaaactgttcac

SEQ ID NO: 60527 - DNA, 25 bp, probe
ccaggacaagtgaacatgagtcata

SEQ ID NO: 60528 - DNA, 25 bp, probe
tcaacctctcctgtgtaactgtgat

SEQ ID NO: 60529 - DNA, 25 bp, probe
ctatttctctgacacaaactgttca

SEQ ID NO: 60530 - DNA, 25 bp, probe
gtcctatttctctgacacaaactgt

SEQ ID NO: 60531 - DNA, 25 bp, probe
ctcctgtgtaactgtgatcctgttg

SEQ ID NO: 60532 - DNA, 25 bp, probe
gtgtaactgtgatcctgttggagaa

SEQ ID NO: 60533 - DNA, 25 bp, probe
tctcctgtgtaactgtgatcctgtt

SEQ ID NO: 60534 - DNA, 25 bp, probe
aggacaagtgaacatgagtcatacg

SEQ ID NO: 60535 - DNA, 25 bp, probe
atttctctgacacaaactgttcacc

SEQ ID NO: 60536 - DNA, 25 bp, probe
aagaatacctgacctttgcctttga

SEQ ID NO: 60537 - DNA, 25 bp, probe
ctctcctgtgtaactgtgatcctgt

SEQ ID NO: 60538 - DNA, 25 bp, probe
ctgatatggtcaacctctcctgtgt

SEQ ID NO: 60539 - DNA, 25 bp, probe
ctacgtgacctatgtccttaacctg

SEQ ID NO: 60540 - DNA, 25 bp, probe
ctgtgtaactgtgatcctgttggag

SEQ ID NO: 60541 - DNA, 25 bp, probe
aacctctcctgtgtaactgtgatcc

SEQ ID NO: 60542 - DNA, 25 bp, probe
agaatacctgacctttgcctttgac

SEQ ID NO: 60543 - DNA, 25 bp, probe
atggtcaacctctcctgtgtaactg

SEQ ID NO: 60544 - DNA, 25 bp, probe
gtcaacctctcctgtgtaactgtga

SEQ ID NO: 60545 - DNA, 25 bp, probe
tgtgtaactgtgatcctgttggaga

SEQ ID NO: 60546 - DNA, 25 bp, probe
tgtaactgtgatcctgttggagaaa

SEQ ID NO: 60547 - DNA, 25 bp, probe
ggacaagtgaacatgagtcatacgg

SEQ ID NO: 60548 - DNA, 25 bp, probe
cctctcctgtgtaactgtgatcctg

SEQ ID NO: 60549 - DNA, 25 bp, probe
gtttctctcagtgttctctgggaag

SEQ ID NO: 60550 - DNA, 25 bp, probe
aaagaatacctgacctttgcctttg

SEQ ID NO: 60551 - DNA, 25 bp, probe
cctacgtgacctatgtccttaacct

SEQ ID NO: 60552 - DNA, 25 bp, probe
tcctgtgtaactgtgatcctgttgg

SEQ ID NO: 60553 - DNA, 25 bp, probe
acctctcctgtgtaactgtgatcct

SEQ ID NO: 60554 - DNA, 25 bp, probe
agtttctctcagtgttctctgggaa

SEQ ID NO: 60555 - DNA, 25 bp, probe
gaatacctgacctttgcctttgacc

SEQ ID NO: 60556 - DNA, 25 bp, probe
tacgtgacctatgtccttaacctgg

SEQ ID NO: 60557 - DNA, 25 bp, probe
tttctctgacacaaactgttcaccc

SEQ ID NO: 60558 - DNA, 25 bp, probe
ctgctgatatggtcaacctctcctg

SEQ ID NO: 60559 - DNA, 25 bp, probe
caagtgaacatgagtcatacgggag

SEQ ID NO: 60560 - DNA, 25 bp, probe
ggtcaacctctcctgtgtaactgtg

SEQ ID NO: 60561 - DNA, 25 bp, probe
cctgtgtaactgtgatcctgttgga

SEQ ID NO: 60562 - DNA, 25 bp, probe
aatctagtcctggaacaattgcaca

SEQ ID NO: 60563 - DNA, 25 bp, probe
atctagtcctggaacaattgcacac

SEQ ID NO: 60564 - DNA, 25 bp, probe
caatctagtcctggaacaattgcac

SEQ ID NO: 60565 - DNA, 25 bp, probe
tcttccttctgaccctcatctccat

SEQ ID NO: 60566 - DNA, 25 bp, probe
gtgtcttccttctgaccctcatctc

SEQ ID NO: 60567 - DNA, 25 bp, probe
ccaatctagtcctggaacaattgca

SEQ ID NO: 60568 - DNA, 25 bp, probe
cttccttctgaccctcatctccatg

SEQ ID NO: 60569 - DNA, 25 bp, probe
catggaccactgacttgtgatcctg

SEQ ID NO: 60570 - DNA, 25 bp, probe
ggccaatctagtcctggaacaattg

SEQ ID NO: 60571 - DNA, 25 bp, probe
tctagtcctggaacaattgcacacc

SEQ ID NO: 60572 - DNA, 25 bp, probe
gtcttccttctgaccctcatctcca

SEQ ID NO: 60573 - DNA, 25 bp, probe
tgtcttccttctgaccctcatctcc

SEQ ID NO: 60574 - DNA, 25 bp, probe
gccaatctagtcctggaacaattgc

SEQ ID NO: 60575 - DNA, 25 bp, probe
ctagtcctggaacaattgcacacca

SEQ ID NO: 60576 - DNA, 25 bp, probe
tagtcctggaacaattgcacaccag

SEQ ID NO: 60577 - DNA, 25 bp, probe
ttgtggcttcttagttagtaatggt

SEQ ID NO: 60578 - DNA, 25 bp, probe
tggcttcttagttagtaatggtgac

SEQ ID NO: 60579 - DNA, 25 bp, probe
gtggcttcttagttagtaatggtga

SEQ ID NO: 60580 - DNA, 25 bp, probe
tgtggcttcttagttagtaatggtg

SEQ ID NO: 60581 - DNA, 25 bp, probe
ggcttcttagttagtaatggtgact

SEQ ID NO: 60582 - DNA, 25 bp, probe
ggcattaagtggttcctattattct

SEQ ID NO: 60583 - DNA, 25 bp, probe
tgactatgtgctgctcttccttatt

SEQ ID NO: 60584 - DNA, 25 bp, probe
gcattaagtggttcctattattctg

SEQ ID NO: 60585 - DNA, 25 bp, probe
gtgactatgtgctgctcttccttat

SEQ ID NO: 60586 - DNA, 25 bp, probe
ttcagatgtcctgtcctctcttaac

SEQ ID NO: 60587 - DNA, 25 bp, probe
taatggtgactatgtgctgctcttc

SEQ ID NO: 60588 - DNA, 25 bp, probe
aggcattaagtggttcctattattc

SEQ ID NO: 60589 - DNA, 25 bp, probe
agttagtaatggtgactatgtgctg

SEQ ID NO: 60590 - DNA, 25 bp, probe
gtaatggtgactatgtgctgctctt

SEQ ID NO: 60591 - DNA, 25 bp, probe
tagttagtaatggtgactatgtgct

SEQ ID NO: 60592 - DNA, 25 bp, probe
cattaagtggttcctattattctgg

SEQ ID NO: 60593 - DNA, 25 bp, probe
gactatgtgctgctcttccttattt

SEQ ID NO: 60594 - DNA, 25 bp, probe
tttgtggcttcttagttagtaatgg

SEQ ID NO: 60595 - DNA, 25 bp, probe
actatgtgctgctcttccttatttg

SEQ ID NO: 60596 - DNA, 25 bp, probe
ttagttagtaatggtgactatgtgc

SEQ ID NO: 60597 - DNA, 25 bp, probe
gttagtaatggtgactatgtgctgc

SEQ ID NO: 60598 - DNA, 25 bp, probe
tcagatgtcctgtcctctcttaaca

SEQ ID NO: 60599 - DNA, 25 bp, probe
ttagtaatggtgactatgtgctgct

SEQ ID NO: 60600 - DNA, 25 bp, probe
atttacttcttcatgggctccttta

SEQ ID NO: 60601 - DNA, 25 bp, probe
tagtaatggtgactatgtgctgctc

SEQ ID NO: 60602 - DNA, 25 bp, probe
gcttcttagttagtaatggtgacta

SEQ ID NO: 60603 - DNA, 25 bp, probe
tttacttcttcatgggctcctttag

SEQ ID NO: 60604 - DNA, 25 bp, probe
tttcagatgtcctgtcctctcttaa

SEQ ID NO: 60605 - DNA, 25 bp, probe
ccttaggcattaagtggttcctatt

SEQ ID NO: 60606 - DNA, 25 bp, probe
ctatgtgctgctcttccttatttgc

SEQ ID NO: 60607 - DNA, 25 bp, probe
taagtggttcctattattctggatc

SEQ ID NO: 60608 - DNA, 25 bp, probe
catttacttcttcatgggctccttt

SEQ ID NO: 60609 - DNA, 25 bp, probe
gtttcagatgtcctgtcctctctta

SEQ ID NO: 60610 - DNA, 25 bp, probe
ttaagtggttcctattattctggat

SEQ ID NO: 60611 - DNA, 25 bp, probe
attaagtggttcctattattctgga

SEQ ID NO: 60612 - DNA, 25 bp, probe
agtaatggtgactatgtgctgctct

SEQ ID NO: 60613 - DNA, 25 bp, probe
atcatttacttcttcatgggctcct

SEQ ID NO: 60614 - DNA, 25 bp, probe
catcatttacttcttcatgggctcc

SEQ ID NO: 60615 - DNA, 25 bp, probe
ttacttcttcatgggctcctttagg

SEQ ID NO: 60616 - DNA, 25 bp, probe
tcatttacttcttcatgggctcctt

SEQ ID NO: 60617 - DNA, 25 bp, probe
ggtgactatgtgctgctcttcctta

SEQ ID NO: 60618 - DNA, 25 bp, probe
cttaggcattaagtggttcctatta

SEQ ID NO: 60619 - DNA, 25 bp, probe
cttagttagtaatggtgactatgtg

SEQ ID NO: 60620 - DNA, 25 bp, probe
caagaaacctgtcaactgtcatgtg

SEQ ID NO: 60621 - DNA, 25 bp, probe
gagtctgttatcacccaaataggaa

SEQ ID NO: 60622 - DNA, 25 bp, probe
agtctgttatcacccaaataggaaa

SEQ ID NO: 60623 - DNA, 25 bp, probe
ttatcacccaaataggaaacgacta

SEQ ID NO: 60624 - DNA, 25 bp, probe
tggaagaaatcaaagttgccctata

SEQ ID NO: 60625 - DNA, 25 bp, probe
gagagtctgttatcacccaaatagg

SEQ ID NO: 60626 - DNA, 25 bp, probe
ggagagtctgttatcacccaaatag

SEQ ID NO: 60627 - DNA, 25 bp, probe
agagtctgttatcacccaaatagga

SEQ ID NO: 60628 - DNA, 25 bp, probe
aggagagtctgttatcacccaaata

SEQ ID NO: 60629 - DNA, 25 bp, probe
ggaagaaatcaaagttgccctataa

SEQ ID NO: 60630 - DNA, 25 bp, probe
gtctgttatcacccaaataggaaac

SEQ ID NO: 60631 - DNA, 25 bp, probe
ataggaaacgactagaagagaaacc

SEQ ID NO: 60632 - DNA, 25 bp, probe
ccaaataggaaacgactagaagaga

SEQ ID NO: 60633 - DNA, 25 bp, probe
tatcacccaaataggaaacgactag

SEQ ID NO: 60634 - DNA, 25 bp, probe
gaaacgactagaagagaaaccagat

SEQ ID NO: 60635 - DNA, 25 bp, probe
gttatcacccaaataggaaacgact

SEQ ID NO: 60636 - DNA, 25 bp, probe
ctgttatcacccaaataggaaacga

SEQ ID NO: 60637 - DNA, 25 bp, probe
tctgttatcacccaaataggaaacg

SEQ ID NO: 60638 - DNA, 25 bp, probe
cccaaataggaaacgactagaagag

SEQ ID NO: 60639 - DNA, 25 bp, probe
ttggaagaaatcaaagttgccctat

SEQ ID NO: 60640 - DNA, 25 bp, probe
taggaaacgactagaagagaaacca

SEQ ID NO: 60641 - DNA, 25 bp, probe
tgttatcacccaaataggaaacgac

SEQ ID NO: 60642 - DNA, 25 bp, probe
aaacgactagaagagaaaccagatc

SEQ ID NO: 60643 - DNA, 25 bp, probe
cacccaaataggaaacgactagaag

SEQ ID NO: 60644 - DNA, 25 bp, probe
acccaaataggaaacgactagaaga

SEQ ID NO: 60645 - DNA, 25 bp, probe
atcacccaaataggaaacgactaga

SEQ ID NO: 60646 - DNA, 25 bp, probe
tcacccaaataggaaacgactagaa

SEQ ID NO: 60647 - DNA, 25 bp, probe
aataggaaacgactagaagagaaac

SEQ ID NO: 60648 - DNA, 25 bp, probe
caaataggaaacgactagaagagaa

SEQ ID NO: 60649 - DNA, 25 bp, probe
ggaaacgactagaagagaaaccaga

SEQ ID NO: 60650 - DNA, 25 bp, probe
aggaaacgactagaagagaaaccag

SEQ ID NO: 60651 - DNA, 25 bp, probe
caatcccttcgtctacctcttcttc

SEQ ID NO: 60652 - DNA, 25 bp, probe
aaataggaaacgactagaagagaaa

SEQ ID NO: 60653 - DNA, 25 bp, probe
tcaatcccttcgtctacctcttctt

SEQ ID NO: 60654 - DNA, 25 bp, probe
caggagagtctgttatcacccaaat

SEQ ID NO: 60655 - DNA, 25 bp, probe
ctcaatcccttcgtctacctcttct

SEQ ID NO: 60656 - DNA, 25 bp, probe
tctcaatcccttcgtctacctcttc

SEQ ID NO: 60657 - DNA, 25 bp, probe
ctctcaatcccttcgtctacctctt

SEQ ID NO: 60658 - DNA, 25 bp, probe
aatcccttcgtctacctcttcttcc

SEQ ID NO: 60659 - DNA, 25 bp, probe
tacacacttgcagtttggaagaaat

SEQ ID NO: 60660 - DNA, 25 bp, probe
tttggaagaaatcaaagttgcccta

SEQ ID NO: 60661 - DNA, 25 bp, probe
acacttgcagtttggaagaaatcaa

SEQ ID NO: 60662 - DNA, 25 bp, probe
ctacacacttgcagtttggaagaaa

SEQ ID NO: 60663 - DNA, 25 bp, probe
cagtttggaagaaatcaaagttgcc

SEQ ID NO: 60664 - DNA, 25 bp, probe
gatctacacacttgcagtttggaag

SEQ ID NO: 60665 - DNA, 25 bp, probe
gatcagatcaacaaagtgttcaagg

SEQ ID NO: 60666 - DNA, 25 bp, probe
cgatcagatcaacaaagtgttcaag

SEQ ID NO: 60667 - DNA, 25 bp, probe
atcagatcaacaaagtgttcaaggt

SEQ ID NO: 60668 - DNA, 25 bp, probe
ggaaatcgatcagatcaacaaagtg

SEQ ID NO: 60669 - DNA, 25 bp, probe
tcagatcaacaaagtgttcaaggtg

SEQ ID NO: 60670 - DNA, 25 bp, probe
tcgatcagatcaacaaagtgttcaa

SEQ ID NO: 60671 - DNA, 25 bp, probe
gaaatcgatcagatcaacaaagtgt

SEQ ID NO: 60672 - DNA, 25 bp, probe
cggaaatcgatcagatcaacaaagt

SEQ ID NO: 60673 - DNA, 25 bp, probe
cagatcaacaaagtgttcaaggtgg

SEQ ID NO: 60674 - DNA, 25 bp, probe
gaattcggaaatcgatcagatcaac

SEQ ID NO: 60675 - DNA, 25 bp, probe
attcggaaatcgatcagatcaacaa

SEQ ID NO: 60676 - DNA, 25 bp, probe
aattcggaaatcgatcagatcaaca

SEQ ID NO: 60677 - DNA, 25 bp, probe
ttcggaaatcgatcagatcaacaaa

SEQ ID NO: 60678 - DNA, 25 bp, probe
agatcaacaaagtgttcaaggtggg

SEQ ID NO: 60679 - DNA, 25 bp, probe
ggaattcggaaatcgatcagatcaa

SEQ ID NO: 60680 - DNA, 25 bp, probe
tcggaaatcgatcagatcaacaaag

SEQ ID NO: 60681 - DNA, 25 bp, probe
ctctcctggcgtcttaggaatactc

SEQ ID NO: 60682 - DNA, 25 bp, probe
atcaacaaagtgttcaaggtgggtc

SEQ ID NO: 60683 - DNA, 25 bp, probe
gatcaacaaagtgttcaaggtgggt

SEQ ID NO: 60684 - DNA, 25 bp, probe
aatcgatcagatcaacaaagtgttc

SEQ ID NO: 60685 - DNA, 25 bp, probe
aaatcgatcagatcaacaaagtgtt

SEQ ID NO: 60686 - DNA, 25 bp, probe
atcgatcagatcaacaaagtgttca

SEQ ID NO: 60687 - DNA, 25 bp, probe
gggaattcggaaatcgatcagatca

SEQ ID NO: 60688 - DNA, 25 bp, probe
caacaaagtgttcaaggtgggtctg

SEQ ID NO: 60689 - DNA, 25 bp, probe
tcaacaaagtgttcaaggtgggtct

SEQ ID NO: 60690 - DNA, 25 bp, probe
tctcctggcgtcttaggaatactcc

SEQ ID NO: 60691 - DNA, 25 bp, probe
cctctcctggcgtcttaggaatact

SEQ ID NO: 60692 - DNA, 25 bp, probe
cgggaattcggaaatcgatcagatc

SEQ ID NO: 60693 - DNA, 25 bp, probe
acctctcctggcgtcttaggaatac

SEQ ID NO: 60694 - DNA, 25 bp, probe
aagagcctgatggagaccatgaaac

SEQ ID NO: 60695 - DNA, 25 bp, probe
caagagcctgatggagaccatgaaa

SEQ ID NO: 60696 - DNA, 25 bp, probe
ccgggaattcggaaatcgatcagat

SEQ ID NO: 60697 - DNA, 25 bp, probe
tcatcatcttctaatgtgttggaga

SEQ ID NO: 60698 - DNA, 25 bp, probe
catcatcatcttctaatgtgttgga

SEQ ID NO: 60699 - DNA, 25 bp, probe
ggcatctaacatcatcatcttctaa

SEQ ID NO: 60700 - DNA, 25 bp, probe
catcataagaagtgtctggaatacc

SEQ ID NO: 60701 - DNA, 25 bp, probe
atcatcatcttctaatgtgttggag

SEQ ID NO: 60702 - DNA, 25 bp, probe
gttgatgtaatccaagttcgtcctt

SEQ ID NO: 60703 - DNA, 25 bp, probe
aagttgatgtaatccaagttcgtcc

SEQ ID NO: 60704 - DNA, 25 bp, probe
atgtaatatcaacagaaccttgtgg

SEQ ID NO: 60705 - DNA, 25 bp, probe
tcatcataagaagtgtctggaatac

SEQ ID NO: 60706 - DNA, 25 bp, probe
agttgatgtaatccaagttcgtcct

SEQ ID NO: 60707 - DNA, 25 bp, probe
tgtaatatcaacagaaccttgtggt

SEQ ID NO: 60708 - DNA, 25 bp, probe
gtaatatcaacagaaccttgtggtc

SEQ ID NO: 60709 - DNA, 25 bp, probe
taatatcaacagaaccttgtggtcc

SEQ ID NO: 60710 - DNA, 25 bp, probe
gactctattcagtgtcatgtcctat

SEQ ID NO: 60711 - DNA, 25 bp, probe
tgtaggaatgaagaatggcaacgaa

SEQ ID NO: 60712 - DNA, 25 bp, probe
ttcatcataagaagtgtctggaata

SEQ ID NO: 60713 - DNA, 25 bp, probe
aacatggattattagaactcaaggt

SEQ ID NO: 60714 - DNA, 25 bp, probe
gggcatctaacatcatcatcttcta

SEQ ID NO: 60715 - DNA, 25 bp, probe
ctgttggactctattcagtgtcatg

SEQ ID NO: 60716 - DNA, 25 bp, probe
actctattcagtgtcatgtcctata

SEQ ID NO: 60717 - DNA, 25 bp, probe
aatctacaaggcaaactcccatata

SEQ ID NO: 60718 - DNA, 25 bp, probe
gttggactctattcagtgtcatgtc

SEQ ID NO: 60719 - DNA, 25 bp, probe
gaatctacaaggcaaactcccatat

SEQ ID NO: 60720 - DNA, 25 bp, probe
gactttcaactcttcttccatcatt

SEQ ID NO: 60721 - DNA, 25 bp, probe
attagtaaattgcttctgagggtct

SEQ ID NO: 60722 - DNA, 25 bp, probe
aattcaacgggtgctttacataatg

SEQ ID NO: 60723 - DNA, 25 bp, probe
gtctggaatacccgttctatgtaat

SEQ ID NO: 60724 - DNA, 25 bp, probe
ttagtaaattgcttctgagggtctg

SEQ ID NO: 60725 - DNA, 25 bp, probe
acatggattattagaactcaaggtt

SEQ ID NO: 60726 - DNA, 25 bp, probe
ttgtaggaatgaagaatggcaacga

SEQ ID NO: 60727 - DNA, 25 bp, probe
atgtttgaaggatttctgagtgact

SEQ ID NO: 60728 - DNA, 25 bp, probe
atcataagaagtgtctggaataccc

SEQ ID NO: 60729 - DNA, 25 bp, probe
atgggcatctaacatcatcatcttc

SEQ ID NO: 60730 - DNA, 25 bp, probe
ttaattcaacgggtgctttacataa

SEQ ID NO: 60731 - DNA, 25 bp, probe
tttaattcaacgggtgctttacata

SEQ ID NO: 60732 - DNA, 25 bp, probe
gaatgaagaatggcaacgaaagatg

SEQ ID NO: 60733 - DNA, 25 bp, probe
actttcaactcttcttccatcattt

SEQ ID NO: 60734 - DNA, 25 bp, probe
tgttggactctattcagtgtcatgt

SEQ ID NO: 60735 - DNA, 25 bp, probe
taattcaacgggtgctttacataat

SEQ ID NO: 60736 - DNA, 25 bp, probe
taaattgcttctgagggtctgaaat

SEQ ID NO: 60737 - DNA, 25 bp, probe
ctgagggtctgaaattgaataaagt

SEQ ID NO: 60738 - DNA, 25 bp, probe
atgtaatccaagttcgtcctttgta

SEQ ID NO: 60739 - DNA, 25 bp, probe
aaagttgatgtaatccaagttcgtc

SEQ ID NO: 60740 - DNA, 25 bp, probe
caaagttgatgtaatccaagttcgt

SEQ ID NO: 60741 - DNA, 25 bp, probe
cttcaagtccttcatcttcacagag

SEQ ID NO: 60742 - DNA, 25 bp, probe
ttcaagtccttcatcttcacagaga

SEQ ID NO: 60743 - DNA, 25 bp, probe
gagaacttcaagtccttcatcttca

SEQ ID NO: 60744 - DNA, 25 bp, probe
agaacttcaagtccttcatcttcac

SEQ ID NO: 60745 - DNA, 25 bp, probe
aacttcaagtccttcatcttcacag

SEQ ID NO: 60746 - DNA, 25 bp, probe
gaacttcaagtccttcatcttcaca

SEQ ID NO: 60747 - DNA, 25 bp, probe
acttcaagtccttcatcttcacaga

SEQ ID NO: 60748 - DNA, 25 bp, probe
tcaagtccttcatcttcacagagac

SEQ ID NO: 60749 - DNA, 25 bp, probe
ggagaacttcaagtccttcatcttc

SEQ ID NO: 60750 - DNA, 25 bp, probe
cacatcattctcaactctatgcacc

SEQ ID NO: 60751 - DNA, 25 bp, probe
ccacatcattctcaactctatgcac

SEQ ID NO: 60752 - DNA, 25 bp, probe
caagtccttcatcttcacagagacc

SEQ ID NO: 60753 - DNA, 25 bp, probe
acatcattctcaactctatgcaccg

SEQ ID NO: 60754 - DNA, 25 bp, probe
cttcatcttcacagagacccagttc

SEQ ID NO: 60755 - DNA, 25 bp, probe
gccacatcattctcaactctatgca

SEQ ID NO: 60756 - DNA, 25 bp, probe
ttcatcttcacagagacccagttca

SEQ ID NO: 60757 - DNA, 25 bp, probe
cattctcaactctatgcaccgctac

SEQ ID NO: 60758 - DNA, 25 bp, probe
tcattctcaactctatgcaccgcta

SEQ ID NO: 60759 - DNA, 25 bp, probe
caaaggctttagagagagtgacctg

SEQ ID NO: 60760 - DNA, 25 bp, probe
aggagaacttcaagtccttcatctt

SEQ ID NO: 60761 - DNA, 25 bp, probe
atcttcacagagacccagttcacag

SEQ ID NO: 60762 - DNA, 25 bp, probe
tcatcttcacagagacccagttcac

SEQ ID NO: 60763 - DNA, 25 bp, probe
ccttcatcttcacagagacccagtt

SEQ ID NO: 60764 - DNA, 25 bp, probe
catcattctcaactctatgcaccgc

SEQ ID NO: 60765 - DNA, 25 bp, probe
atcattctcaactctatgcaccgct

SEQ ID NO: 60766 - DNA, 25 bp, probe
caggagaacttcaagtccttcatct

SEQ ID NO: 60767 - DNA, 25 bp, probe
aagtccttcatcttcacagagaccc

SEQ ID NO: 60768 - DNA, 25 bp, probe
gacagcctatcagaaccacaggatc

SEQ ID NO: 60769 - DNA, 25 bp, probe
catcttcacagagacccagttcaca

SEQ ID NO: 60770 - DNA, 25 bp, probe
attctcaactctatgcaccgctacc

SEQ ID NO: 60771 - DNA, 25 bp, probe
aaaggctttagagagagtgacctgg

SEQ ID NO: 60772 - DNA, 25 bp, probe
ccaaaggctttagagagagtgacct

SEQ ID NO: 60773 - DNA, 25 bp, probe
ggccacatcattctcaactctatgc

SEQ ID NO: 60774 - DNA, 25 bp, probe
ctatcagaaccacaggatcacccag

SEQ ID NO: 60775 - DNA, 25 bp, probe
cagcctatcagaaccacaggatcac

SEQ ID NO: 60776 - DNA, 25 bp, probe
cagtgacagcctatcagaaccacag

SEQ ID NO: 60777 - DNA, 25 bp, probe
tgacagcctatcagaaccacaggat

SEQ ID NO: 60778 - DNA, 25 bp, probe
ccaggagaacttcaagtccttcatc

SEQ ID NO: 60779 - DNA, 25 bp, probe
tccttcatcttcacagagacccagt

SEQ ID NO: 60780 - DNA, 25 bp, probe
acagcctatcagaaccacaggatca

SEQ ID NO: 60781 - DNA, 25 bp, probe
gtccttcatcttcacagagacccag

SEQ ID NO: 60782 - DNA, 25 bp, probe
aaggctttagagagagtgacctgga

SEQ ID NO: 60783 - DNA, 25 bp, probe
agtccttcatcttcacagagaccca

SEQ ID NO: 60784 - DNA, 25 bp, probe
ggctttagagagagtgacctggact

SEQ ID NO: 60785 - DNA, 25 bp, probe
ttcgctcattccaactaatcatcat

SEQ ID NO: 60786 - DNA, 25 bp, probe
gctcattccaactaatcatcatctt

SEQ ID NO: 60787 - DNA, 25 bp, probe
cgctcattccaactaatcatcatct

SEQ ID NO: 60788 - DNA, 25 bp, probe
tcgctcattccaactaatcatcatc

SEQ ID NO: 60789 - DNA, 25 bp, probe
gttcgctcattccaactaatcatca

SEQ ID NO: 60790 - DNA, 25 bp, probe
tcattccaactaatcatcatcttca

SEQ ID NO: 60791 - DNA, 25 bp, probe
ttccaactaatcatcatcttcaagt

SEQ ID NO: 60792 - DNA, 25 bp, probe
ctcattccaactaatcatcatcttc

SEQ ID NO: 60793 - DNA, 25 bp, probe
taaggacttgccagagaactacaac

SEQ ID NO: 60794 - DNA, 25 bp, probe
gtaaggacttgccagagaactacaa

SEQ ID NO: 60795 - DNA, 25 bp, probe
cattccaactaatcatcatcttcaa

SEQ ID NO: 60796 - DNA, 25 bp, probe
cttatctgtctaacttggctggtgg

SEQ ID NO: 60797 - DNA, 25 bp, probe
attccaactaatcatcatcttcaag

SEQ ID NO: 60798 - DNA, 25 bp, probe
ctgcttatctgtctaacttggctgg

SEQ ID NO: 60799 - DNA, 25 bp, probe
ttatctgtctaacttggctggtggt

SEQ ID NO: 60800 - DNA, 25 bp, probe
gcttatctgtctaacttggctggtg

SEQ ID NO: 60801 - DNA, 25 bp, probe
gctgcttatctgtctaacttggctg

SEQ ID NO: 60802 - DNA, 25 bp, probe
tgcttatctgtctaacttggctggt

SEQ ID NO: 60803 - DNA, 25 bp, probe
ggtaaggacttgccagagaactaca

SEQ ID NO: 60804 - DNA, 25 bp, probe
agttcgctcattccaactaatcatc

SEQ ID NO: 60805 - DNA, 25 bp, probe
cagttcgctcattccaactaatcat

SEQ ID NO: 60806 - DNA, 25 bp, probe
tccaactaatcatcatcttcaagtt

SEQ ID NO: 60807 - DNA, 25 bp, probe
tatctgtctaacttggctggtggtg

SEQ ID NO: 60808 - DNA, 25 bp, probe
cttcatactggccttcctctacaat

SEQ ID NO: 60809 - DNA, 25 bp, probe
gacagttcgctcattccaactaatc

SEQ ID NO: 60810 - DNA, 25 bp, probe
ttcatactggccttcctctacaatg

SEQ ID NO: 60811 - DNA, 25 bp, probe
acagttcgctcattccaactaatca

SEQ ID NO: 60812 - DNA, 25 bp, probe
tgacagttcgctcattccaactaat

SEQ ID NO: 60813 - DNA, 25 bp, probe
aatcatcatcttcaagttttccacc

SEQ ID NO: 60814 - DNA, 25 bp, probe
atcatcatcttcaagttttccacca

SEQ ID NO: 60815 - DNA, 25 bp, probe
tcatcatcttcaagttttccaccaa

SEQ ID NO: 60816 - DNA, 25 bp, probe
catcatcttcaagttttccaccaag

SEQ ID NO: 60817 - DNA, 25 bp, probe
atcatcttcaagttttccaccaagg

SEQ ID NO: 60818 - DNA, 25 bp, probe
ctgacagttcgctcattccaactaa

SEQ ID NO: 60819 - DNA, 25 bp, probe
catcttcaagttttccaccaaggta

SEQ ID NO: 60820 - DNA, 25 bp, probe
atcttcaagttttccaccaaggtac

SEQ ID NO: 60821 - DNA, 25 bp, probe
aaggacttgccagagaactacaacg

SEQ ID NO: 60822 - DNA, 25 bp, probe
taatcatcatcttcaagttttccac

SEQ ID NO: 60823 - DNA, 25 bp, probe
gtgggtattttctgcctaagtgcta

SEQ ID NO: 60824 - DNA, 25 bp, probe
tgggtattttctgcctaagtgctac

SEQ ID NO: 60825 - DNA, 25 bp, probe
tcatactggccttcctctacaatgg

SEQ ID NO: 60826 - DNA, 25 bp, probe
ccaactaatcatcatcttcaagttt

SEQ ID NO: 60827 - DNA, 25 bp, probe
ctaatcatcatcttcaagttttcca

SEQ ID NO: 60828 - DNA, 25 bp, probe
gggtaaggacttgccagagaactac

SEQ ID NO: 60829 - DNA, 25 bp, probe
ctcctggtaaagctgttggaatgag

SEQ ID NO: 60830 - DNA, 25 bp, probe
tcctggtaaagctgttggaatgagt

SEQ ID NO: 60831 - DNA, 25 bp, probe
gctcctggtaaagctgttggaatga

SEQ ID NO: 60832 - DNA, 25 bp, probe
ccattaaggcattcactaaggttaa

SEQ ID NO: 60833 - DNA, 25 bp, probe
attacagtctgaattgagtgctgag

SEQ ID NO: 60834 - DNA, 25 bp, probe
cattacagtctgaattgagtgctga

SEQ ID NO: 60835 - DNA, 25 bp, probe
ttacagtctgaattgagtgctgagg

SEQ ID NO: 60836 - DNA, 25 bp, probe
ctctgcattacagtctgaattgagt

SEQ ID NO: 60837 - DNA, 25 bp, probe
actctgcattacagtctgaattgag

SEQ ID NO: 60838 - DNA, 25 bp, probe
tttattagagaagggacagcaccag

SEQ ID NO: 60839 - DNA, 25 bp, probe
tctgcattacagtctgaattgagtg

SEQ ID NO: 60840 - DNA, 25 bp, probe
cactctgcattacagtctgaattga

SEQ ID NO: 60841 - DNA, 25 bp, probe
acactctgcattacagtctgaattg

SEQ ID NO: 60842 - DNA, 25 bp, probe
cacactctgcattacagtctgaatt

SEQ ID NO: 60843 - DNA, 25 bp, probe
aacagtttacaacaccctgaagaaa

SEQ ID NO: 60844 - DNA, 25 bp, probe
catgaaacccaggacagtaaagatc

SEQ ID NO: 60845 - DNA, 25 bp, probe
acatgaaacccaggacagtaaagat

SEQ ID NO: 60846 - DNA, 25 bp, probe
gaacatgaaacccaggacagtaaag

SEQ ID NO: 60847 - DNA, 25 bp, probe
tcacactctgcattacagtctgaat

SEQ ID NO: 60848 - DNA, 25 bp, probe
caacagtttacaacaccctgaagaa

SEQ ID NO: 60849 - DNA, 25 bp, probe
aaatggaccaacagtttacaacacc

SEQ ID NO: 60850 - DNA, 25 bp, probe
gaagaaagagcttaattcccgagat

SEQ ID NO: 60851 - DNA, 25 bp, probe
ttattagagaagggacagcaccaga

SEQ ID NO: 60852 - DNA, 25 bp, probe
aagaaagagcttaattcccgagatg

SEQ ID NO: 60853 - DNA, 25 bp, probe
aacatgaaacccaggacagtaaaga

SEQ ID NO: 60854 - DNA, 25 bp, probe
gagatggagcttgggaaagaatatg

SEQ ID NO: 60855 - DNA, 25 bp, probe
tgaacatgaaacccaggacagtaaa

SEQ ID NO: 60856 - DNA, 25 bp, probe
ttgaacatgaaacccaggacagtaa

SEQ ID NO: 60857 - DNA, 25 bp, probe
cattaaggcattcactaaggttaat

SEQ ID NO: 60858 - DNA, 25 bp, probe
cttcacactctgcattacagtctga

SEQ ID NO: 60859 - DNA, 25 bp, probe
aactgaaggagcctgtaatcaccaa

SEQ ID NO: 60860 - DNA, 25 bp, probe
gatggagcttgggaaagaatatgtg

SEQ ID NO: 60861 - DNA, 25 bp, probe
agatggagcttgggaaagaatatgt

SEQ ID NO: 60862 - DNA, 25 bp, probe
attgagtgctgaggcaagaagaata

SEQ ID NO: 60863 - DNA, 25 bp, probe
gcattacagtctgaattgagtgctg

SEQ ID NO: 60864 - DNA, 25 bp, probe
gaaggagcctgtaatcaccaaagag

SEQ ID NO: 60865 - DNA, 25 bp, probe
tattagagaagggacagcaccagac

SEQ ID NO: 60866 - DNA, 25 bp, probe
taatcaccaaagaggatgtggacat

SEQ ID NO: 60867 - DNA, 25 bp, probe
atgaatctgtagaaaaggaggaact

SEQ ID NO: 60868 - DNA, 25 bp, probe
ttaaggcattcactaaggttaattt

SEQ ID NO: 60869 - DNA, 25 bp, probe
ctgtaatcaccaaagaggatgtgga

SEQ ID NO: 60870 - DNA, 25 bp, probe
agaaagagcttaattcccgagatgg

SEQ ID NO: 60871 - DNA, 25 bp, probe
cgagatggagcttgggaaagaatat

SEQ ID NO: 60872 - DNA, 25 bp, probe
cttgggaaagaatatgtggcgagag

SEQ ID NO: 60873 - DNA, 25 bp, probe
tgaatctgtagaaaaggaggaacta

SEQ ID NO: 60874 - DNA, 25 bp, probe
aatgaatctgtagaaaaggaggaac

SEQ ID NO: 60875 - DNA, 25 bp, probe
gttgaacatgaaacccaggacagta

SEQ ID NO: 60876 - DNA, 25 bp, probe
tctacagcatacggaacaaggatat

SEQ ID NO: 60877 - DNA, 25 bp, probe
atctacagcatacggaacaaggata

SEQ ID NO: 60878 - DNA, 25 bp, probe
tatctacagcatacggaacaaggat

SEQ ID NO: 60879 - DNA, 25 bp, probe
ttatctacagcatacggaacaagga

SEQ ID NO: 60880 - DNA, 25 bp, probe
atacggaacaaggatatgaaggcag

SEQ ID NO: 60881 - DNA, 25 bp, probe
ctacagcatacggaacaaggatatg

SEQ ID NO: 60882 - DNA, 25 bp, probe
tacagcatacggaacaaggatatga

SEQ ID NO: 60883 - DNA, 25 bp, probe
ttatcatgttccaggatcactgttg

SEQ ID NO: 60884 - DNA, 25 bp, probe
cagcatacggaacaaggatatgaag

SEQ ID NO: 60885 - DNA, 25 bp, probe
tttatctacagcatacggaacaagg

SEQ ID NO: 60886 - DNA, 25 bp, probe
cctttatctacagcatacggaacaa

SEQ ID NO: 60887 - DNA, 25 bp, probe
ctttatctacagcatacggaacaag

SEQ ID NO: 60888 - DNA, 25 bp, probe
acagcatacggaacaaggatatgaa

SEQ ID NO: 60889 - DNA, 25 bp, probe
agcatacggaacaaggatatgaagg

SEQ ID NO: 60890 - DNA, 25 bp, probe
catacggaacaaggatatgaaggca

SEQ ID NO: 60891 - DNA, 25 bp, probe
atgtttatcatgttccaggatcact

SEQ ID NO: 60892 - DNA, 25 bp, probe
gatgtttatcatgttccaggatcac

SEQ ID NO: 60893 - DNA, 25 bp, probe
cagtctttaagatcccttctactcg

SEQ ID NO: 60894 - DNA, 25 bp, probe
ccctttatctacagcatacggaaca

SEQ ID NO: 60895 - DNA, 25 bp, probe
ctctgaaatctcccacttcttctgt

SEQ ID NO: 60896 - DNA, 25 bp, probe
acagtctttaagatcccttctactc

SEQ ID NO: 60897 - DNA, 25 bp, probe
gacagtctttaagatcccttctact

SEQ ID NO: 60898 - DNA, 25 bp, probe
agtctttaagatcccttctactcgg

SEQ ID NO: 60899 - DNA, 25 bp, probe
tatcatgttccaggatcactgttgg

SEQ ID NO: 60900 - DNA, 25 bp, probe
tttatcatgttccaggatcactgtt

SEQ ID NO: 60901 - DNA, 25 bp, probe
ggacagtctttaagatcccttctac

SEQ ID NO: 60902 - DNA, 25 bp, probe
gtttatcatgttccaggatcactgt

SEQ ID NO: 60903 - DNA, 25 bp, probe
tgtttatcatgttccaggatcactg

SEQ ID NO: 60904 - DNA, 25 bp, probe
tggacagtctttaagatcccttcta

SEQ ID NO: 60905 - DNA, 25 bp, probe
ggatgtttatcatgttccaggatca

SEQ ID NO: 60906 - DNA, 25 bp, probe
ttctggacagtctttaagatccctt

SEQ ID NO: 60907 - DNA, 25 bp, probe
tttctggacagtctttaagatccct

SEQ ID NO: 60908 - DNA, 25 bp, probe
ctggacagtctttaagatcccttct

SEQ ID NO: 60909 - DNA, 25 bp, probe
tctggacagtctttaagatcccttc

SEQ ID NO: 60910 - DNA, 25 bp, probe
ctgaaatctcccacttcttctgtga

SEQ ID NO: 60911 - DNA, 25 bp, probe
tctgaaatctcccacttcttctgtg

SEQ ID NO: 60912 - DNA, 25 bp, probe
gctctgaaatctcccacttcttctg

SEQ ID NO: 60913 - DNA, 25 bp, probe
tgaaatctcccacttcttctgtgac

SEQ ID NO: 60914 - DNA, 25 bp, probe
ctcaacccctttatctacagcatac

SEQ ID NO: 60915 - DNA, 25 bp, probe
gcatacggaacaaggatatgaaggc

SEQ ID NO: 60916 - DNA, 25 bp, probe
ggaccatctttgctgtgtacttaca

SEQ ID NO: 60917 - DNA, 25 bp, probe
attctcctgcatccttctctcgtac

SEQ ID NO: 60918 - DNA, 25 bp, probe
cattctcctgcatccttctctcgta

SEQ ID NO: 60919 - DNA, 25 bp, probe
gggaccatctttgctgtgtacttac

SEQ ID NO: 60920 - DNA, 25 bp, probe
cggacttgctgtgtatattgtaacg

SEQ ID NO: 60921 - DNA, 25 bp, probe
taattaactgtcaagcctgtggatg

SEQ ID NO: 60922 - DNA, 25 bp, probe
gtaattaactgtcaagcctgtggat

SEQ ID NO: 60923 - DNA, 25 bp, probe
ttatagtcatgcggtcttatgtatg

SEQ ID NO: 60924 - DNA, 25 bp, probe
gtattatagtcatgcggtcttatgt

SEQ ID NO: 60925 - DNA, 25 bp, probe
tgtattatagtcatgcggtcttatg

SEQ ID NO: 60926 - DNA, 25 bp, probe
attaactgtcaagcctgtggatgat

SEQ ID NO: 60927 - DNA, 25 bp, probe
ttgtaattaactgtcaagcctgtgg

SEQ ID NO: 60928 - DNA, 25 bp, probe
ttaactgtcaagcctgtggatgatt

SEQ ID NO: 60929 - DNA, 25 bp, probe
gtgaatggaaacttggaaatactcg

SEQ ID NO: 60930 - DNA, 25 bp, probe
tgtgaatggaaacttggaaatactc

SEQ ID NO: 60931 - DNA, 25 bp, probe
aattaactgtcaagcctgtggatga

SEQ ID NO: 60932 - DNA, 25 bp, probe
tgaatggaaacttggaaatactcgt

SEQ ID NO: 60933 - DNA, 25 bp, probe
tgtaaatgtgaatggaaacttggaa

SEQ ID NO: 60934 - DNA, 25 bp, probe
atacctgtgttcagattgtaagatc

SEQ ID NO: 60935 - DNA, 25 bp, probe
tgtaattaactgtcaagcctgtgga

SEQ ID NO: 60936 - DNA, 25 bp, probe
aatacctgtgttcagattgtaagat

SEQ ID NO: 60937 - DNA, 25 bp, probe
atgtaaatgtgaatggaaacttgga

SEQ ID NO: 60938 - DNA, 25 bp, probe
ttgtattatagtcatgcggtcttat

SEQ ID NO: 60939 - DNA, 25 bp, probe
ggacttgctgtgtatattgtaacgt

SEQ ID NO: 60940 - DNA, 25 bp, probe
atgtgaatggaaacttggaaatact

SEQ ID NO: 60941 - DNA, 25 bp, probe
gaatggaaacttggaaatactcgtt

SEQ ID NO: 60942 - DNA, 25 bp, probe
tggtagttcataaaggtttacagtg

SEQ ID NO: 60943 - DNA, 25 bp, probe
gctttactacacagtttggttacag

SEQ ID NO: 60944 - DNA, 25 bp, probe
gtaaatgtgaatggaaacttggaaa

SEQ ID NO: 60945 - DNA, 25 bp, probe
tttactacacagtttggttacagga

SEQ ID NO: 60946 - DNA, 25 bp, probe
ttactacacagtttggttacaggac

SEQ ID NO: 60947 - DNA, 25 bp, probe
attatagtcatgcggtcttatgtat

SEQ ID NO: 60948 - DNA, 25 bp, probe
ctttactacacagtttggttacagg

SEQ ID NO: 60949 - DNA, 25 bp, probe
tgctttactacacagtttggttaca

SEQ ID NO: 60950 - DNA, 25 bp, probe
aatgtgaatggaaacttggaaatac

SEQ ID NO: 60951 - DNA, 25 bp, probe
tactacacagtttggttacaggact

SEQ ID NO: 60952 - DNA, 25 bp, probe
tgcggtcttatgtatgataaacagt

SEQ ID NO: 60953 - DNA, 25 bp, probe
cctttgtattatagtcatgcggtct

SEQ ID NO: 60954 - DNA, 25 bp, probe
gcttctgcatactgtgttatgttac

SEQ ID NO: 60955 - DNA, 25 bp, probe
gcggtcttatgtatgataaacagtt

SEQ ID NO: 60956 - DNA, 25 bp, probe
ctacacagtttggttacaggacttc

SEQ ID NO: 60957 - DNA, 25 bp, probe
ttggtagttcataaaggtttacagt

SEQ ID NO: 60958 - DNA, 25 bp, probe
atgcggtcttatgtatgataaacag

SEQ ID NO: 60959 - DNA, 25 bp, probe
ctttgtattatagtcatgcggtctt

SEQ ID NO: 60960 - DNA, 25 bp, probe
tacacagtttggttacaggacttct

SEQ ID NO: 60961 - DNA, 25 bp, probe
ggtagttcataaaggtttacagtga

SEQ ID NO: 60962 - DNA, 25 bp, probe
cttctgcatactgtgttatgttaca

SEQ ID NO: 60963 - DNA, 25 bp, probe
agtcatgcggtcttatgtatgataa

SEQ ID NO: 60964 - DNA, 25 bp, probe
ctggagaggaagatctacatcgtcg

SEQ ID NO: 60965 - DNA, 25 bp, probe
gctggagaggaagatctacatcgtc

SEQ ID NO: 60966 - DNA, 25 bp, probe
ctgctggagaggaagatctacatcg

SEQ ID NO: 60967 - DNA, 25 bp, probe
cctgctggagaggaagatctacatc

SEQ ID NO: 60968 - DNA, 25 bp, probe
tgctggagaggaagatctacatcgt

SEQ ID NO: 60969 - DNA, 25 bp, probe
tggagaggaagatctacatcgtcgg

SEQ ID NO: 60970 - DNA, 25 bp, probe
ctcttctctctgcttctacattctg

SEQ ID NO: 60971 - DNA, 25 bp, probe
cctcttctctctgcttctacattct

SEQ ID NO: 60972 - DNA, 25 bp, probe
attgaggcttccaactgaatatgag

SEQ ID NO: 60973 - DNA, 25 bp, probe
cattgaggcttccaactgaatatga

SEQ ID NO: 60974 - DNA, 25 bp, probe
tcattgaggcttccaactgaatatg

SEQ ID NO: 60975 - DNA, 25 bp, probe
ctgcttctacattctgttcattgag

SEQ ID NO: 60976 - DNA, 25 bp, probe
ctctgcttctacattctgttcattg

SEQ ID NO: 60977 - DNA, 25 bp, probe
tctctgcttctacattctgttcatt

SEQ ID NO: 60978 - DNA, 25 bp, probe
tctgcttctacattctgttcattga

SEQ ID NO: 60979 - DNA, 25 bp, probe
ttctctctgcttctacattctgttc

SEQ ID NO: 60980 - DNA, 25 bp, probe
cttctctctgcttctacattctgtt

SEQ ID NO: 60981 - DNA, 25 bp, probe
ttctacattctgttcattgaggctt

SEQ ID NO: 60982 - DNA, 25 bp, probe
ctctctgcttctacattctgttcat

SEQ ID NO: 60983 - DNA, 25 bp, probe
tctacattctgttcattgaggcttc

SEQ ID NO: 60984 - DNA, 25 bp, probe
cttctacattctgttcattgaggct

SEQ ID NO: 60985 - DNA, 25 bp, probe
tcttctctctgcttctacattctgt

SEQ ID NO: 60986 - DNA, 25 bp, probe
tgcttctacattctgttcattgagg

SEQ ID NO: 60987 - DNA, 25 bp, probe
ttgaggcttccaactgaatatgaga

SEQ ID NO: 60988 - DNA, 25 bp, probe
tctctctgcttctacattctgttca

SEQ ID NO: 60989 - DNA, 25 bp, probe
tgaggcttccaactgaatatgagag

SEQ ID NO: 60990 - DNA, 25 bp, probe
ctacattctgttcattgaggcttcc

SEQ ID NO: 60991 - DNA, 25 bp, probe
tacattctgttcattgaggcttcca

SEQ ID NO: 60992 - DNA, 25 bp, probe
gcttctacattctgttcattgaggc

SEQ ID NO: 60993 - DNA, 25 bp, probe
attctgttcattgaggcttccaact

SEQ ID NO: 60994 - DNA, 25 bp, probe
cattctgttcattgaggcttccaac

SEQ ID NO: 60995 - DNA, 25 bp, probe
acattctgttcattgaggcttccaa

SEQ ID NO: 60996 - DNA, 25 bp, probe
ccctcttctctctgcttctacattc

SEQ ID NO: 60997 - DNA, 25 bp, probe
ctttccctcttctctctgcttctac

SEQ ID NO: 60998 - DNA, 25 bp, probe
tctttccctcttctctctgcttcta

SEQ ID NO: 60999 - DNA, 25 bp, probe
ttcattgaggcttccaactgaatat

SEQ ID NO: 61000 - DNA, 25 bp, probe
ttctgttcattgaggcttccaactg

SEQ ID NO: 61001 - DNA, 25 bp, probe
tccctcttctctctgcttctacatt

SEQ ID NO: 61002 - DNA, 25 bp, probe
ttccctcttctctctgcttctacat

SEQ ID NO: 61003 - DNA, 25 bp, probe
gttcattgaggcttccaactgaata

SEQ ID NO: 61004 - DNA, 25 bp, probe
tttccctcttctctctgcttctaca

SEQ ID NO: 61005 - DNA, 25 bp, probe
ttctctttccctcttctctctgctt

SEQ ID NO: 61006 - DNA, 25 bp, probe
tttctctttccctcttctctctgct

SEQ ID NO: 61007 - DNA, 25 bp, probe
ctctttccctcttctctctgcttct

SEQ ID NO: 61008 - DNA, 25 bp, probe
tctctttccctcttctctctgcttc

SEQ ID NO: 61009 - DNA, 25 bp, probe
ttcttttctctttccctcttctctc

SEQ ID NO: 61010 - DNA, 25 bp, probe
tctgttcattgaggcttccaactga

SEQ ID NO: 61011 - DNA, 25 bp, probe
cttttctctttccctcttctctctg

SEQ ID NO: 61012 - DNA, 25 bp, probe
tcttttctctttccctcttctctct

SEQ ID NO: 61013 - DNA, 25 bp, probe
tttcttttctctttccctcttctct

SEQ ID NO: 61014 - DNA, 25 bp, probe
ttattgtcaagagccaggagaagat

SEQ ID NO: 61015 - DNA, 25 bp, probe
tattgtcaagagccaggagaagatc

SEQ ID NO: 61016 - DNA, 25 bp, probe
ctacttcctcttcatctttggtgtc

SEQ ID NO: 61017 - DNA, 25 bp, probe
gtacttcaagaagatgatgctgctg

SEQ ID NO: 61018 - DNA, 25 bp, probe
agaaacggtcctctttattgtcaag

SEQ ID NO: 61019 - DNA, 25 bp, probe
cagaaacggtcctctttattgtcaa

SEQ ID NO: 61020 - DNA, 25 bp, probe
tcctacttcctcttcatctttggtg

SEQ ID NO: 61021 - DNA, 25 bp, probe
gtcctacttcctcttcatctttggt

SEQ ID NO: 61022 - DNA, 25 bp, probe
tttattgtcaagagccaggagaaga

SEQ ID NO: 61023 - DNA, 25 bp, probe
ctttattgtcaagagccaggagaag

SEQ ID NO: 61024 - DNA, 25 bp, probe
cctacttcctcttcatctttggtgt

SEQ ID NO: 61025 - DNA, 25 bp, probe
agtcctacttcctcttcatctttgg

SEQ ID NO: 61026 - DNA, 25 bp, probe
tacaagtcctacttcctcttcatct

SEQ ID NO: 61027 - DNA, 25 bp, probe
ctacaagtcctacttcctcttcatc

SEQ ID NO: 61028 - DNA, 25 bp, probe
tactacaagtcctacttcctcttca

SEQ ID NO: 61029 - DNA, 25 bp, probe
ctctactacaagtcctacttcctct

SEQ ID NO: 61030 - DNA, 25 bp, probe
actacaagtcctacttcctcttcat

SEQ ID NO: 61031 - DNA, 25 bp, probe
tctactacaagtcctacttcctctt

SEQ ID NO: 61032 - DNA, 25 bp, probe
aacagaaacggtcctctttattgtc

SEQ ID NO: 61033 - DNA, 25 bp, probe
ggtcaagaacaacaccatgaagtac

SEQ ID NO: 61034 - DNA, 25 bp, probe
ctactacaagtcctacttcctcttc

SEQ ID NO: 61035 - DNA, 25 bp, probe
atcagcagctctactacaagtccta

SEQ ID NO: 61036 - DNA, 25 bp, probe
tacttcctcttcatctttggtgtcg

SEQ ID NO: 61037 - DNA, 25 bp, probe
acaagtcctacttcctcttcatctt

SEQ ID NO: 61038 - DNA, 25 bp, probe
caacagaaacggtcctctttattgt

SEQ ID NO: 61039 - DNA, 25 bp, probe
gctctactacaagtcctacttcctc

SEQ ID NO: 61040 - DNA, 25 bp, probe
acagaaacggtcctctttattgtca

SEQ ID NO: 61041 - DNA, 25 bp, probe
tacttcaagaagatgatgctgctgc

SEQ ID NO: 61042 - DNA, 25 bp, probe
gtcaagaacaacaccatgaagtact

SEQ ID NO: 61043 - DNA, 25 bp, probe
gcaacagaaacggtcctctttattg

SEQ ID NO: 61044 - DNA, 25 bp, probe
cagcagctctactacaagtcctact

SEQ ID NO: 61045 - DNA, 25 bp, probe
tcagcagctctactacaagtcctac

SEQ ID NO: 61046 - DNA, 25 bp, probe
cagctctactacaagtcctacttcc

SEQ ID NO: 61047 - DNA, 25 bp, probe
gatcagcagctctactacaagtcct

SEQ ID NO: 61048 - DNA, 25 bp, probe
agtacttcaagaagatgatgctgct

SEQ ID NO: 61049 - DNA, 25 bp, probe
agctctactacaagtcctacttcct

SEQ ID NO: 61050 - DNA, 25 bp, probe
gaaacggtcctctttattgtcaaga

SEQ ID NO: 61051 - DNA, 25 bp, probe
cggtcaagaacaacaccatgaagta

SEQ ID NO: 61052 - DNA, 25 bp, probe
aagtcctacttcctcttcatctttg

SEQ ID NO: 61053 - DNA, 25 bp, probe
caagtcctacttcctcttcatcttt

SEQ ID NO: 61054 - DNA, 25 bp, probe
tctttattgtcaagagccaggagaa

SEQ ID NO: 61055 - DNA, 25 bp, probe
tggatcagcagctctactacaagtc

SEQ ID NO: 61056 - DNA, 25 bp, probe
gcagctctactacaagtcctacttc

SEQ ID NO: 61057 - DNA, 25 bp, probe
agcagctctactacaagtcctactt

SEQ ID NO: 61058 - DNA, 25 bp, probe
taagtaaccgaagaatgtatgcctc

SEQ ID NO: 61059 - DNA, 25 bp, probe
ctaagtaaccgaagaatgtatgcct

SEQ ID NO: 61060 - DNA, 25 bp, probe
gaatgtatgcctctgttcttatgtg

SEQ ID NO: 61061 - DNA, 25 bp, probe
tctaagtaaccgaagaatgtatgcc

SEQ ID NO: 61062 - DNA, 25 bp, probe
ctctaagtaaccgaagaatgtatgc

SEQ ID NO: 61063 - DNA, 25 bp, probe
gctctaagtaaccgaagaatgtatg

SEQ ID NO: 61064 - DNA, 25 bp, probe
aatgtatgcctctgttcttatgtgc

SEQ ID NO: 61065 - DNA, 25 bp, probe
gctacagatataagacagacatggt

SEQ ID NO: 61066 - DNA, 25 bp, probe
tgctacagatataagacagacatgg

SEQ ID NO: 61067 - DNA, 25 bp, probe
aagaagtgacaccgagatgttaatt

SEQ ID NO: 61068 - DNA, 25 bp, probe
gaagacctcagtcaattctctactt

SEQ ID NO: 61069 - DNA, 25 bp, probe
aagtaaccgaagaatgtatgcctct

SEQ ID NO: 61070 - DNA, 25 bp, probe
caagaagtgacaccgagatgttaat

SEQ ID NO: 61071 - DNA, 25 bp, probe
gtaactgtatgtgtgtgtgtgtgtg

SEQ ID NO: 61072 - DNA, 25 bp, probe
gtgtaactgtatgtgtgtgtgtgtg

SEQ ID NO: 61073 - DNA, 25 bp, probe
taaccgaagaatgtatgcctctgtt

SEQ ID NO: 61074 - DNA, 25 bp, probe
ccattagaattgttactcagctcct

SEQ ID NO: 61075 - DNA, 25 bp, probe
accattagaattgttactcagctcc

SEQ ID NO: 61076 - DNA, 25 bp, probe
taactgtatgtgtgtgtgtgtgtgt

SEQ ID NO: 61077 - DNA, 25 bp, probe
tgtaactgtatgtgtgtgtgtgtgt

SEQ ID NO: 61078 - DNA, 25 bp, probe
ttagaattgttactcagctccttca

SEQ ID NO: 61079 - DNA, 25 bp, probe
atacatgagtccatccatcagtcaa

SEQ ID NO: 61080 - DNA, 25 bp, probe
aatcaggtaactggaaggaggttaa

SEQ ID NO: 61081 - DNA, 25 bp, probe
agtaaccgaagaatgtatgcctctg

SEQ ID NO: 61082 - DNA, 25 bp, probe
cattagaattgttactcagctcctt

SEQ ID NO: 61083 - DNA, 25 bp, probe
tagaattgttactcagctccttcaa

SEQ ID NO: 61084 - DNA, 25 bp, probe
agctctaagtaaccgaagaatgtat

SEQ ID NO: 61085 - DNA, 25 bp, probe
aaccattagaattgttactcagctc

SEQ ID NO: 61086 - DNA, 25 bp, probe
ttcttcctcttctttacatacgcaa

SEQ ID NO: 61087 - DNA, 25 bp, probe
gcccagcaaatagtgataacaaata

SEQ ID NO: 61088 - DNA, 25 bp, probe
atagcccagcaaatagtgataacaa

SEQ ID NO: 61089 - DNA, 25 bp, probe
aatagcccagcaaatagtgataaca

SEQ ID NO: 61090 - DNA, 25 bp, probe
cttcctcttctttacatacgcaaac

SEQ ID NO: 61091 - DNA, 25 bp, probe
tcttcctcttctttacatacgcaaa

SEQ ID NO: 61092 - DNA, 25 bp, probe
ctggctctgtttgatgctatttatg

SEQ ID NO: 61093 - DNA, 25 bp, probe
tagcatacatgagtccatccatcag

SEQ ID NO: 61094 - DNA, 25 bp, probe
agataatagcccagcaaatagtgat

SEQ ID NO: 61095 - DNA, 25 bp, probe
cagataatagcccagcaaatagtga

SEQ ID NO: 61096 - DNA, 25 bp, probe
tcagataatagcccagcaaatagtg

SEQ ID NO: 61097 - DNA, 25 bp, probe
caaatcagataatagcccagcaaat

SEQ ID NO: 61098 - DNA, 25 bp, probe
gtaaccgaagaatgtatgcctctgt

SEQ ID NO: 61099 - DNA, 25 bp, probe
atgctacagatataagacagacatg

SEQ ID NO: 61100 - DNA, 25 bp, probe
tagcccagcaaatagtgataacaaa

SEQ ID NO: 61101 - DNA, 25 bp, probe
atcagataatagcccagcaaatagt

SEQ ID NO: 61102 - DNA, 25 bp, probe
tctcaagatttattcaggatcgtgt

SEQ ID NO: 61103 - DNA, 25 bp, probe
ggttctcaagatttattcaggatcg

SEQ ID NO: 61104 - DNA, 25 bp, probe
ctcaagatttattcaggatcgtgtt

SEQ ID NO: 61105 - DNA, 25 bp, probe
gggttctcaagatttattcaggatc

SEQ ID NO: 61106 - DNA, 25 bp, probe
ttctcaagatttattcaggatcgtg

SEQ ID NO: 61107 - DNA, 25 bp, probe
gttctcaagatttattcaggatcgt

SEQ ID NO: 61108 - DNA, 25 bp, probe
tcaagatttattcaggatcgtgtta

SEQ ID NO: 61109 - DNA, 25 bp, probe
tccttcaacctcatccagacagaac

SEQ ID NO: 61110 - DNA, 25 bp, probe
caagatttattcaggatcgtgttaa

SEQ ID NO: 61111 - DNA, 25 bp, probe
cttcaacctcatccagacagaacga

SEQ ID NO: 61112 - DNA, 25 bp, probe
ggggttctcaagatttattcaggat

SEQ ID NO: 61113 - DNA, 25 bp, probe
gtccttcaacctcatccagacagaa

SEQ ID NO: 61114 - DNA, 25 bp, probe
ctctggggttctcaagatttattca

SEQ ID NO: 61115 - DNA, 25 bp, probe
ttcaacctcatccagacagaacgac

SEQ ID NO: 61116 - DNA, 25 bp, probe
tggggttctcaagatttattcagga

SEQ ID NO: 61117 - DNA, 25 bp, probe
gctctggggttctcaagatttattc

SEQ ID NO: 61118 - DNA, 25 bp, probe
tctggggttctcaagatttattcag

SEQ ID NO: 61119 - DNA, 25 bp, probe
ctcatccagacagaacgacagaacc

SEQ ID NO: 61120 - DNA, 25 bp, probe
cctcatccagacagaacgacagaac

SEQ ID NO: 61121 - DNA, 25 bp, probe
ctggggttctcaagatttattcagg

SEQ ID NO: 61122 - DNA, 25 bp, probe
caacctcatccagacagaacgacag

SEQ ID NO: 61123 - DNA, 25 bp, probe
ccttcaacctcatccagacagaacg

SEQ ID NO: 61124 - DNA, 25 bp, probe
aagatttattcaggatcgtgttaac

SEQ ID NO: 61125 - DNA, 25 bp, probe
ggctctggggttctcaagatttatt

SEQ ID NO: 61126 - DNA, 25 bp, probe
ttattcaggatcgtgttaacggagg

SEQ ID NO: 61127 - DNA, 25 bp, probe
atttattcaggatcgtgttaacgga

SEQ ID NO: 61128 - DNA, 25 bp, probe
gatttattcaggatcgtgttaacgg

SEQ ID NO: 61129 - DNA, 25 bp, probe
agatttattcaggatcgtgttaacg

SEQ ID NO: 61130 - DNA, 25 bp, probe
tttattcaggatcgtgttaacggag

SEQ ID NO: 61131 - DNA, 25 bp, probe
tggctctggggttctcaagatttat

SEQ ID NO: 61132 - DNA, 25 bp, probe
ctggctctggggttctcaagattta

SEQ ID NO: 61133 - DNA, 25 bp, probe
tattcaggatcgtgttaacggaggc

SEQ ID NO: 61134 - DNA, 25 bp, probe
tgtccttcaacctcatccagacaga

SEQ ID NO: 61135 - DNA, 25 bp, probe
aaatagttccgtttgtttctctaaa

SEQ ID NO: 61136 - DNA, 25 bp, probe
ttgttctcatggaattggcctattg

SEQ ID NO: 61137 - DNA, 25 bp, probe
tttgttctcatggaattggcctatt

SEQ ID NO: 61138 - DNA, 25 bp, probe
gaaatagttccgtttgtttctctaa

SEQ ID NO: 61139 - DNA, 25 bp, probe
tgttctcatggaattggcctattgg

SEQ ID NO: 61140 - DNA, 25 bp, probe
aatcttttgttctcatggaattggc

SEQ ID NO: 61141 - DNA, 25 bp, probe
aaatcttttgttctcatggaattgg

SEQ ID NO: 61142 - DNA, 25 bp, probe
aatagttccgtttgtttctctaaaa

SEQ ID NO: 61143 - DNA, 25 bp, probe
atctggaaatagttccgtttgtttc

SEQ ID NO: 61144 - DNA, 25 bp, probe
catctggaaatagttccgtttgttt

SEQ ID NO: 61145 - DNA, 25 bp, probe
ctggaaatagttccgtttgtttctc

SEQ ID NO: 61146 - DNA, 25 bp, probe
tggaaatagttccgtttgtttctct

SEQ ID NO: 61147 - DNA, 25 bp, probe
tctggaaatagttccgtttgtttct

SEQ ID NO: 61148 - DNA, 25 bp, probe
tcatctggaaatagttccgtttgtt

SEQ ID NO: 61149 - DNA, 25 bp, probe
ggaaatagttccgtttgtttctcta

SEQ ID NO: 61150 - DNA, 25 bp, probe
ctcatctggaaatagttccgtttgt

SEQ ID NO: 61151 - DNA, 25 bp, probe
gaacatctccaacagaagcaaaacg

SEQ ID NO: 61152 - DNA, 25 bp, probe
cctcatctggaaatagttccgtttg

SEQ ID NO: 61153 - DNA, 25 bp, probe
aaaatcttttgttctcatggaattg

SEQ ID NO: 61154 - DNA, 25 bp, probe
gagttttgcccatatcaggacagtg

SEQ ID NO: 61155 - DNA, 25 bp, probe
ggaacatctccaacagaagcaaaac

SEQ ID NO: 61156 - DNA, 25 bp, probe
ttttgttctcatggaattggcctat

SEQ ID NO: 61157 - DNA, 25 bp, probe
cttttgttctcatggaattggccta

SEQ ID NO: 61158 - DNA, 25 bp, probe
atctccaacagaagcaaaacggaaa

SEQ ID NO: 61159 - DNA, 25 bp, probe
atcttttgttctcatggaattggcc

SEQ ID NO: 61160 - DNA, 25 bp, probe
gcctcatctggaaatagttccgttt

SEQ ID NO: 61161 - DNA, 25 bp, probe
aacatctccaacagaagcaaaacgg

SEQ ID NO: 61162 - DNA, 25 bp, probe
gggaacatctccaacagaagcaaaa

SEQ ID NO: 61163 - DNA, 25 bp, probe
catatcaggacagtggctccttctc

SEQ ID NO: 61164 - DNA, 25 bp, probe
tctccaacagaagcaaaacggaaag

SEQ ID NO: 61165 - DNA, 25 bp, probe
catctccaacagaagcaaaacggaa

SEQ ID NO: 61166 - DNA, 25 bp, probe
tcttttgttctcatggaattggcct

SEQ ID NO: 61167 - DNA, 25 bp, probe
atggaattggcctattggcaagatc

SEQ ID NO: 61168 - DNA, 25 bp, probe
ctccaacagaagcaaaacggaaagt

SEQ ID NO: 61169 - DNA, 25 bp, probe
catggaattggcctattggcaagat

SEQ ID NO: 61170 - DNA, 25 bp, probe
cgagttttgcccatatcaggacagt

SEQ ID NO: 61171 - DNA, 25 bp, probe
atatcaggacagtggctccttctca

SEQ ID NO: 61172 - DNA, 25 bp, probe
tccaacagaagcaaaacggaaagtg

SEQ ID NO: 61173 - DNA, 25 bp, probe
ctcatggaattggcctattggcaag

SEQ ID NO: 61174 - DNA, 25 bp, probe
gttctcatggaattggcctattggc

SEQ ID NO: 61175 - DNA, 25 bp, probe
acatctccaacagaagcaaaacgga

SEQ ID NO: 61176 - DNA, 25 bp, probe
agttttgcccatatcaggacagtgg

SEQ ID NO: 61177 - DNA, 25 bp, probe
tcatggaattggcctattggcaaga

SEQ ID NO: 61178 - DNA, 25 bp, probe
tctcatggaattggcctattggcaa

SEQ ID NO: 61179 - DNA, 25 bp, probe
gcccttttggactaatgttactgtc

SEQ ID NO: 61180 - DNA, 25 bp, probe
cttggcccttttggactaatgttac

SEQ ID NO: 61181 - DNA, 25 bp, probe
ttggcccttttggactaatgttact

SEQ ID NO: 61182 - DNA, 25 bp, probe
ggcccttttggactaatgttactgt

SEQ ID NO: 61183 - DNA, 25 bp, probe
tggcccttttggactaatgttactg

SEQ ID NO: 61184 - DNA, 25 bp, probe
ccttggcccttttggactaatgtta

SEQ ID NO: 61185 - DNA, 25 bp, probe
cttccttggcccttttggactaatg

SEQ ID NO: 61186 - DNA, 25 bp, probe
tcttccttggcccttttggactaat

SEQ ID NO: 61187 - DNA, 25 bp, probe
cccttttggactaatgttactgtcc

SEQ ID NO: 61188 - DNA, 25 bp, probe
ttcttccttggcccttttggactaa

SEQ ID NO: 61189 - DNA, 25 bp, probe
tttcttccttggcccttttggacta

SEQ ID NO: 61190 - DNA, 25 bp, probe
tccttggcccttttggactaatgtt

SEQ ID NO: 61191 - DNA, 25 bp, probe
ttccttggcccttttggactaatgt

SEQ ID NO: 61192 - DNA, 25 bp, probe
aattcttgaacaacttaacctccat

SEQ ID NO: 61193 - DNA, 25 bp, probe
tgttctcagtattcattcacttcca

SEQ ID NO: 61194 - DNA, 25 bp, probe
ttctcagtattcattcacttccagg

SEQ ID NO: 61195 - DNA, 25 bp, probe
tactgtgatgtacttgaaggagaac

SEQ ID NO: 61196 - DNA, 25 bp, probe
gttctcagtattcattcacttccag

SEQ ID NO: 61197 - DNA, 25 bp, probe
ctactgtgatgtacttgaaggagaa

SEQ ID NO: 61198 - DNA, 25 bp, probe
ttctactgtgatgtacttgaaggag

SEQ ID NO: 61199 - DNA, 25 bp, probe
ttcttgaacaacttaacctccatga

SEQ ID NO: 61200 - DNA, 25 bp, probe
attcttgaacaacttaacctccatg

SEQ ID NO: 61201 - DNA, 25 bp, probe
tctactgtgatgtacttgaaggaga

SEQ ID NO: 61202 - DNA, 25 bp, probe
gtgttctcagtattcattcacttcc

SEQ ID NO: 61203 - DNA, 25 bp, probe
tgtgttctcagtattcattcacttc

SEQ ID NO: 61204 - DNA, 25 bp, probe
ctgtgttctcagtattcattcactt

SEQ ID NO: 61205 - DNA, 25 bp, probe
tcttgaacaacttaacctccatgag

SEQ ID NO: 61206 - DNA, 25 bp, probe
actgtgatgtacttgaaggagaacc

SEQ ID NO: 61207 - DNA, 25 bp, probe
acctttatgctttgtgattgtgaaa

SEQ ID NO: 61208 - DNA, 25 bp, probe
caaataaggctgtaaatgtgctgta

SEQ ID NO: 61209 - DNA, 25 bp, probe
cctttatgctttgtgattgtgaaac

SEQ ID NO: 61210 - DNA, 25 bp, probe
aaataaggctgtaaatgtgctgtag

SEQ ID NO: 61211 - DNA, 25 bp, probe
ataaggctgtaaatgtgctgtagtt

SEQ ID NO: 61212 - DNA, 25 bp, probe
aataaggctgtaaatgtgctgtagt

SEQ ID NO: 61213 - DNA, 25 bp, probe
gtgaccaaataaggctgtaaatgtg

SEQ ID NO: 61214 - DNA, 25 bp, probe
agtgaccaaataaggctgtaaatgt

SEQ ID NO: 61215 - DNA, 25 bp, probe
taaggctgtaaatgtgctgtagttt

SEQ ID NO: 61216 - DNA, 25 bp, probe
tacctttatgctttgtgattgtgaa

SEQ ID NO: 61217 - DNA, 25 bp, probe
ttgtaaggaatggatcatggtctgg

SEQ ID NO: 61218 - DNA, 25 bp, probe
aaattcttgaacaacttaacctcca

SEQ ID NO: 61219 - DNA, 25 bp, probe
aatgagagaaatctgcctggaaatt

SEQ ID NO: 61220 - DNA, 25 bp, probe
ctgtgatgtacttgaaggagaacct

SEQ ID NO: 61221 - DNA, 25 bp, probe
gaatgagagaaatctgcctggaaat

SEQ ID NO: 61222 - DNA, 25 bp, probe
gtacctttatgctttgtgattgtga

SEQ ID NO: 61223 - DNA, 25 bp, probe
tgtacctttatgctttgtgattgtg

SEQ ID NO: 61224 - DNA, 25 bp, probe
taccctagtacagtgaatgagagaa

SEQ ID NO: 61225 - DNA, 25 bp, probe
ctaccctagtacagtgaatgagaga

SEQ ID NO: 61226 - DNA, 25 bp, probe
ccctagtacagtgaatgagagaaat

SEQ ID NO: 61227 - DNA, 25 bp, probe
agagaaatctgcctggaaattgttt

SEQ ID NO: 61228 - DNA, 25 bp, probe
accctagtacagtgaatgagagaaa

SEQ ID NO: 61229 - DNA, 25 bp, probe
tcctcacctgccaatcaactttata

SEQ ID NO: 61230 - DNA, 25 bp, probe
atgtacctttatgctttgtgattgt

SEQ ID NO: 61231 - DNA, 25 bp, probe
atggtggagatcatttgtaaggaat

SEQ ID NO: 61232 - DNA, 25 bp, probe
gaccaaataaggctgtaaatgtgct

SEQ ID NO: 61233 - DNA, 25 bp, probe
atgagagaaatctgcctggaaattg

SEQ ID NO: 61234 - DNA, 25 bp, probe
aaatctcccatgtctttgaaattcg

SEQ ID NO: 61235 - DNA, 25 bp, probe
atgtacttgaaggagaacctgtgtc

SEQ ID NO: 61236 - DNA, 25 bp, probe
gagtattgccttctggtgtcattaa

SEQ ID NO: 61237 - DNA, 25 bp, probe
agagtattgccttctggtgtcatta

SEQ ID NO: 61238 - DNA, 25 bp, probe
aatatccatgtcggcttgtagagag

SEQ ID NO: 61239 - DNA, 25 bp, probe
gaatatccatgtcggcttgtagaga

SEQ ID NO: 61240 - DNA, 25 bp, probe
ggaagcagacaatggattatgattt

SEQ ID NO: 61241 - DNA, 25 bp, probe
agtattgccttctggtgtcattaaa

SEQ ID NO: 61242 - DNA, 25 bp, probe
agacaatggattatgatttcaaggc

SEQ ID NO: 61243 - DNA, 25 bp, probe
aatggattatgatttcaaggcgaag

SEQ ID NO: 61244 - DNA, 25 bp, probe
gacaatggattatgatttcaaggcg

SEQ ID NO: 61245 - DNA, 25 bp, probe
caatggattatgatttcaaggcgaa

SEQ ID NO: 61246 - DNA, 25 bp, probe
gggaagcagacaatggattatgatt

SEQ ID NO: 61247 - DNA, 25 bp, probe
agcagacaatggattatgatttcaa

SEQ ID NO: 61248 - DNA, 25 bp, probe
aagcagacaatggattatgatttca

SEQ ID NO: 61249 - DNA, 25 bp, probe
acaatggattatgatttcaaggcga

SEQ ID NO: 61250 - DNA, 25 bp, probe
gcagacaatggattatgatttcaag

SEQ ID NO: 61251 - DNA, 25 bp, probe
aattgaaggcacaggaatatccatg

SEQ ID NO: 61252 - DNA, 25 bp, probe
atatccatgtcggcttgtagagaga

SEQ ID NO: 61253 - DNA, 25 bp, probe
tatccatgtcggcttgtagagagat

SEQ ID NO: 61254 - DNA, 25 bp, probe
cagcagaaggtaaagcagagtattg

SEQ ID NO: 61255 - DNA, 25 bp, probe
tcagcagaaggtaaagcagagtatt

SEQ ID NO: 61256 - DNA, 25 bp, probe
gaagcagacaatggattatgatttc

SEQ ID NO: 61257 - DNA, 25 bp, probe
aagcaaattgaaggcacaggaatat

SEQ ID NO: 61258 - DNA, 25 bp, probe
cagacaatggattatgatttcaagg

SEQ ID NO: 61259 - DNA, 25 bp, probe
ttcagcagaaggtaaagcagagtat

SEQ ID NO: 61260 - DNA, 25 bp, probe
agcaaattgaaggcacaggaatatc

SEQ ID NO: 61261 - DNA, 25 bp, probe
tttcagcagaaggtaaagcagagta

SEQ ID NO: 61262 - DNA, 25 bp, probe
gaagcaaattgaaggcacaggaata

SEQ ID NO: 61263 - DNA, 25 bp, probe
attgaaggcacaggaatatccatgt

SEQ ID NO: 61264 - DNA, 25 bp, probe
atggattatgatttcaaggcgaagc

SEQ ID NO: 61265 - DNA, 25 bp, probe
gtggaggatttgtttgagtacgaag

SEQ ID NO: 61266 - DNA, 25 bp, probe
aaattgaaggcacaggaatatccat

SEQ ID NO: 61267 - DNA, 25 bp, probe
atccatgtcggcttgtagagagatt

SEQ ID NO: 61268 - DNA, 25 bp, probe
ggaatatccatgtcggcttgtagag

SEQ ID NO: 61269 - DNA, 25 bp, probe
ttgaaggcacaggaatatccatgtc

SEQ ID NO: 61270 - DNA, 25 bp, probe
caaattgaaggcacaggaatatcca

SEQ ID NO: 61271 - DNA, 25 bp, probe
caggaatatccatgtcggcttgtag

SEQ ID NO: 61272 - DNA, 25 bp, probe
gaggatttgtttgagtacgaagggt

SEQ ID NO: 61273 - DNA, 25 bp, probe
tggaggatttgtttgagtacgaagg

SEQ ID NO: 61274 - DNA, 25 bp, probe
aggaatatccatgtcggcttgtaga

SEQ ID NO: 61275 - DNA, 25 bp, probe
aggatttgtttgagtacgaagggtg

SEQ ID NO: 61276 - DNA, 25 bp, probe
ggtggaggatttgtttgagtacgaa

SEQ ID NO: 61277 - DNA, 25 bp, probe
gtattgccttctggtgtcattaaaa

SEQ ID NO: 61278 - DNA, 25 bp, probe
tattgccttctggtgtcattaaaag

SEQ ID NO: 61279 - DNA, 25 bp, probe
tccatgtcggcttgtagagagattg

SEQ ID NO: 61280 - DNA, 25 bp, probe
ttccaactcaacctatcttacatcc

SEQ ID NO: 61281 - DNA, 25 bp, probe
ccaactcaacctatcttacatccaa

SEQ ID NO: 61282 - DNA, 25 bp, probe
acctcttctccatcttcaattcatt

SEQ ID NO: 61283 - DNA, 25 bp, probe
tccaactcaacctatcttacatcca

SEQ ID NO: 61284 - DNA, 25 bp, probe
tacctcttctccatcttcaattcat

SEQ ID NO: 61285 - DNA, 25 bp, probe
ccatcttcaattcattacaaggctt

SEQ ID NO: 61286 - DNA, 25 bp, probe
ctccatcttcaattcattacaaggc

SEQ ID NO: 61287 - DNA, 25 bp, probe
tccatcttcaattcattacaaggct

SEQ ID NO: 61288 - DNA, 25 bp, probe
gttccaactcaacctatcttacatc

SEQ ID NO: 61289 - DNA, 25 bp, probe
ctgagagaagaagtgttaaggaacc

SEQ ID NO: 61290 - DNA, 25 bp, probe
gtacctcttctccatcttcaattca

SEQ ID NO: 61291 - DNA, 25 bp, probe
tgtacctcttctccatcttcaattc

SEQ ID NO: 61292 - DNA, 25 bp, probe
gagagaagaagtgttaaggaacctg

SEQ ID NO: 61293 - DNA, 25 bp, probe
tctccatcttcaattcattacaagg

SEQ ID NO: 61294 - DNA, 25 bp, probe
tgagagaagaagtgttaaggaacct

SEQ ID NO: 61295 - DNA, 25 bp, probe
caatgctcattcagacaacttctat

SEQ ID NO: 61296 - DNA, 25 bp, probe
cctcttctccatcttcaattcatta

SEQ ID NO: 61297 - DNA, 25 bp, probe
atgtacctcttctccatcttcaatt

SEQ ID NO: 61298 - DNA, 25 bp, probe
catgtacctcttctccatcttcaat

SEQ ID NO: 61299 - DNA, 25 bp, probe
cttcatgtacctcttctccatcttc

SEQ ID NO: 61300 - DNA, 25 bp, probe
cactgtgctatgaaggagaatgttc

SEQ ID NO: 61301 - DNA, 25 bp, probe
tatattcatcttccactgtgctatg

SEQ ID NO: 61302 - DNA, 25 bp, probe
tcatgtacctcttctccatcttcaa

SEQ ID NO: 61303 - DNA, 25 bp, probe
ttcatgtacctcttctccatcttca

SEQ ID NO: 61304 - DNA, 25 bp, probe
tcttctccatcttcaattcattaca

SEQ ID NO: 61305 - DNA, 25 bp, probe
atgctcattcagacaacttctataa

SEQ ID NO: 61306 - DNA, 25 bp, probe
cctgagagaagaagtgttaaggaac

SEQ ID NO: 61307 - DNA, 25 bp, probe
ggagtaagacagctaccaatatcat

SEQ ID NO: 61308 - DNA, 25 bp, probe
gcaatgctcattcagacaacttcta

SEQ ID NO: 61309 - DNA, 25 bp, probe
agacagctaccaatatcatcaagaa

SEQ ID NO: 61310 - DNA, 25 bp, probe
aagacagctaccaatatcatcaaga

SEQ ID NO: 61311 - DNA, 25 bp, probe
ccttcatgtacctcttctccatctt

SEQ ID NO: 61312 - DNA, 25 bp, probe
ggttagcagataactcagattggag

SEQ ID NO: 61313 - DNA, 25 bp, probe
ttcggttagcagataactcagattg

SEQ ID NO: 61314 - DNA, 25 bp, probe
ttatattcatcttccactgtgctat

SEQ ID NO: 61315 - DNA, 25 bp, probe
aatgctcattcagacaacttctata

SEQ ID NO: 61316 - DNA, 25 bp, probe
agtaagacagctaccaatatcatca

SEQ ID NO: 61317 - DNA, 25 bp, probe
ctcttctccatcttcaattcattac

SEQ ID NO: 61318 - DNA, 25 bp, probe
catcttcaattcattacaaggctta

SEQ ID NO: 61319 - DNA, 25 bp, probe
tattatcatgtcagacaccttcagc

SEQ ID NO: 61320 - DNA, 25 bp, probe
agagaagaagtgttaaggaacctgc

SEQ ID NO: 61321 - DNA, 25 bp, probe
gagtaagacagctaccaatatcatc

SEQ ID NO: 61322 - DNA, 25 bp, probe
gtggtagatttcggttagcagataa

SEQ ID NO: 61323 - DNA, 25 bp, probe
cttctccatcttcaattcattacaa

SEQ ID NO: 61324 - DNA, 25 bp, probe
atatacatgaagccacagaatacca

SEQ ID NO: 61325 - DNA, 25 bp, probe
tacatgaagccacagaataccatat

SEQ ID NO: 61326 - DNA, 25 bp, probe
atacatgaagccacagaataccata

SEQ ID NO: 61327 - DNA, 25 bp, probe
tatacatgaagccacagaataccat

SEQ ID NO: 61328 - DNA, 25 bp, probe
acatgaagccacagaataccatatc

SEQ ID NO: 61329 - DNA, 25 bp, probe
tgtcaacctcttcactacaccttaa

SEQ ID NO: 61330 - DNA, 25 bp, probe
taatgaggatcaagtcagcaacaag

SEQ ID NO: 61331 - DNA, 25 bp, probe
catgaagccacagaataccatatcc

SEQ ID NO: 61332 - DNA, 25 bp, probe
gtaatgaggatcaagtcagcaacaa

SEQ ID NO: 61333 - DNA, 25 bp, probe
ctgtcaacctcttcactacacctta

SEQ ID NO: 61334 - DNA, 25 bp, probe
tatatacatgaagccacagaatacc

SEQ ID NO: 61335 - DNA, 25 bp, probe
gtcaacctcttcactacaccttaaa

SEQ ID NO: 61336 - DNA, 25 bp, probe
ccttaattgtttgctccttgacttt

SEQ ID NO: 61337 - DNA, 25 bp, probe
cacagaataccatatcccaagatga

SEQ ID NO: 61338 - DNA, 25 bp, probe
taattgtttgctccttgactttgaa

SEQ ID NO: 61339 - DNA, 25 bp, probe
ttaattgtttgctccttgactttga

SEQ ID NO: 61340 - DNA, 25 bp, probe
ctgtaatgaggatcaagtcagcaac

SEQ ID NO: 61341 - DNA, 25 bp, probe
agaataccatatcccaagatgaagg

SEQ ID NO: 61342 - DNA, 25 bp, probe
cttaattgtttgctccttgactttg

SEQ ID NO: 61343 - DNA, 25 bp, probe
aatctattacttatggagggtgtgt

SEQ ID NO: 61344 - DNA, 25 bp, probe
ccacagaataccatatcccaagatg

SEQ ID NO: 61345 - DNA, 25 bp, probe
acagaataccatatcccaagatgaa

SEQ ID NO: 61346 - DNA, 25 bp, probe
attgagattgttgtctttgctttcg

SEQ ID NO: 61347 - DNA, 25 bp, probe
aattgtttgctccttgactttgaag

SEQ ID NO: 61348 - DNA, 25 bp, probe
tttgctttcggagtggtatttcttt

SEQ ID NO: 61349 - DNA, 25 bp, probe
tatgatcgttatgctgctgtctgtc

SEQ ID NO: 61350 - DNA, 25 bp, probe
ctatgatcgttatgctgctgtctgt

SEQ ID NO: 61351 - DNA, 25 bp, probe
cagaataccatatcccaagatgaag

SEQ ID NO: 61352 - DNA, 25 bp, probe
tgtaatgaggatcaagtcagcaaca

SEQ ID NO: 61353 - DNA, 25 bp, probe
agtaattgagattgttgtctttgct

SEQ ID NO: 61354 - DNA, 25 bp, probe
tcaagctgtaatgaggatcaagtca

SEQ ID NO: 61355 - DNA, 25 bp, probe
aattgagattgttgtctttgctttc

SEQ ID NO: 61356 - DNA, 25 bp, probe
ctgtctgtcaacctcttcactacac

SEQ ID NO: 61357 - DNA, 25 bp, probe
ctttgctttcggagtggtatttctt

SEQ ID NO: 61358 - DNA, 25 bp, probe
caagctgtaatgaggatcaagtcag

SEQ ID NO: 61359 - DNA, 25 bp, probe
atctattacttatggagggtgtgta

SEQ ID NO: 61360 - DNA, 25 bp, probe
ctattacttatggagggtgtgtact

SEQ ID NO: 61361 - DNA, 25 bp, probe
tctattacttatggagggtgtgtac

SEQ ID NO: 61362 - DNA, 25 bp, probe
gtaattgagattgttgtctttgctt

SEQ ID NO: 61363 - DNA, 25 bp, probe
aagtaattgagattgttgtctttgc

SEQ ID NO: 61364 - DNA, 25 bp, probe
aaatctattacttatggagggtgtg

SEQ ID NO: 61365 - DNA, 25 bp, probe
tctgtcaacctcttcactacacctt

SEQ ID NO: 61366 - DNA, 25 bp, probe
gccacagaataccatatcccaagat

SEQ ID NO: 61367 - DNA, 25 bp, probe
atgaagccacagaataccatatccc

SEQ ID NO: 61368 - DNA, 25 bp, probe
agaccgaagagaatacattgatctg

SEQ ID NO: 61369 - DNA, 25 bp, probe
cagaccgaagagaatacattgatct

SEQ ID NO: 61370 - DNA, 25 bp, probe
gatacagtgagtcagatcaagagtc

SEQ ID NO: 61371 - DNA, 25 bp, probe
gcagaccgaagagaatacattgatc

SEQ ID NO: 61372 - DNA, 25 bp, probe
accgaagagaatacattgatctgtt

SEQ ID NO: 61373 - DNA, 25 bp, probe
gaccgaagagaatacattgatctgt

SEQ ID NO: 61374 - DNA, 25 bp, probe
atacagtgagtcagatcaagagtcc

SEQ ID NO: 61375 - DNA, 25 bp, probe
gaaggcagaccgaagagaatacatt

SEQ ID NO: 61376 - DNA, 25 bp, probe
ggcagaccgaagagaatacattgat

SEQ ID NO: 61377 - DNA, 25 bp, probe
ccgaagagaatacattgatctgtta

SEQ ID NO: 61378 - DNA, 25 bp, probe
ccaaatacaagcacaaatctaacca

SEQ ID NO: 61379 - DNA, 25 bp, probe
aaggcagaccgaagagaatacattg

SEQ ID NO: 61380 - DNA, 25 bp, probe
cccaaatacaagcacaaatctaacc

SEQ ID NO: 61381 - DNA, 25 bp, probe
catgtatgatacagtgagtcagatc

SEQ ID NO: 61382 - DNA, 25 bp, probe
catagcaatcatgttaagtcttgtt

SEQ ID NO: 61383 - DNA, 25 bp, probe
aatctaaccatgagcttcagcaatc

SEQ ID NO: 61384 - DNA, 25 bp, probe
caaatacaagcacaaatctaaccat

SEQ ID NO: 61385 - DNA, 25 bp, probe
atgtatgatacagtgagtcagatca

SEQ ID NO: 61386 - DNA, 25 bp, probe
gtgaatatgtctacagacctggagg

SEQ ID NO: 61387 - DNA, 25 bp, probe
agaaggcagaccgaagagaatacat

SEQ ID NO: 61388 - DNA, 25 bp, probe
atacaagcacaaatctaaccatgag

SEQ ID NO: 61389 - DNA, 25 bp, probe
atgatacagtgagtcagatcaagag

SEQ ID NO: 61390 - DNA, 25 bp, probe
tgatacagtgagtcagatcaagagt

SEQ ID NO: 61391 - DNA, 25 bp, probe
aatacaagcacaaatctaaccatga

SEQ ID NO: 61392 - DNA, 25 bp, probe
aggcagaccgaagagaatacattga

SEQ ID NO: 61393 - DNA, 25 bp, probe
ttaaccatcagtttgtgacaatgac

SEQ ID NO: 61394 - DNA, 25 bp, probe
cttaaccatcagtttgtgacaatga

SEQ ID NO: 61395 - DNA, 25 bp, probe
tcttaaccatcagtttgtgacaatg

SEQ ID NO: 61396 - DNA, 25 bp, probe
atctaaccatgagcttcagcaatca

SEQ ID NO: 61397 - DNA, 25 bp, probe
ctcttaaccatcagtttgtgacaat

SEQ ID NO: 61398 - DNA, 25 bp, probe
actcttaaccatcagtttgtgacaa

SEQ ID NO: 61399 - DNA, 25 bp, probe
taaccatcagtttgtgacaatgact

SEQ ID NO: 61400 - DNA, 25 bp, probe
agagaaggcagaccgaagagaatac

SEQ ID NO: 61401 - DNA, 25 bp, probe
cagagaaggcagaccgaagagaata

SEQ ID NO: 61402 - DNA, 25 bp, probe
tccacatagcaatcatgttaagtct

SEQ ID NO: 61403 - DNA, 25 bp, probe
gtatgatacagtgagtcagatcaag

SEQ ID NO: 61404 - DNA, 25 bp, probe
tacaagcacaaatctaaccatgagc

SEQ ID NO: 61405 - DNA, 25 bp, probe
aaatacaagcacaaatctaaccatg

SEQ ID NO: 61406 - DNA, 25 bp, probe
tatgatacagtgagtcagatcaaga

SEQ ID NO: 61407 - DNA, 25 bp, probe
ccacatagcaatcatgttaagtctt

SEQ ID NO: 61408 - DNA, 25 bp, probe
ttccacatagcaatcatgttaagtc

SEQ ID NO: 61409 - DNA, 25 bp, probe
cgaagagaatacattgatctgttaa

SEQ ID NO: 61410 - DNA, 25 bp, probe
gagaaggcagaccgaagagaataca

SEQ ID NO: 61411 - DNA, 25 bp, probe
tgtatgatacagtgagtcagatcaa

SEQ ID NO: 61412 - DNA, 25 bp, probe
cgagaatcttccttacagtaccatt

SEQ ID NO: 61413 - DNA, 25 bp, probe
ccgagaatcttccttacagtaccat

SEQ ID NO: 61414 - DNA, 25 bp, probe
gaagcatgtatgtactcaggttcag

SEQ ID NO: 61415 - DNA, 25 bp, probe
agaagcatgtatgtactcaggttca

SEQ ID NO: 61416 - DNA, 25 bp, probe
aatcttccttacagtaccattcagg

SEQ ID NO: 61417 - DNA, 25 bp, probe
gagaagcatgtatgtactcaggttc

SEQ ID NO: 61418 - DNA, 25 bp, probe
agagaagcatgtatgtactcaggtt

SEQ ID NO: 61419 - DNA, 25 bp, probe
ttctctactctcaaaccttctcctt

SEQ ID NO: 61420 - DNA, 25 bp, probe
tttctctactctcaaaccttctcct

SEQ ID NO: 61421 - DNA, 25 bp, probe
aagcatgtatgtactcaggttcagg

SEQ ID NO: 61422 - DNA, 25 bp, probe
agaatcttccttacagtaccattca

SEQ ID NO: 61423 - DNA, 25 bp, probe
atctaaatgctgccaatgagtttct

SEQ ID NO: 61424 - DNA, 25 bp, probe
cagagaagcatgtatgtactcaggt

SEQ ID NO: 61425 - DNA, 25 bp, probe
gaatcttccttacagtaccattcag

SEQ ID NO: 61426 - DNA, 25 bp, probe
gagaatcttccttacagtaccattc

SEQ ID NO: 61427 - DNA, 25 bp, probe
catctaaatgctgccaatgagtttc

SEQ ID NO: 61428 - DNA, 25 bp, probe
taaatgctgccaatgagtttctcta

SEQ ID NO: 61429 - DNA, 25 bp, probe
tctctactctcaaaccttctccttg

SEQ ID NO: 61430 - DNA, 25 bp, probe
acatctaaatgctgccaatgagttt

SEQ ID NO: 61431 - DNA, 25 bp, probe
ccagagaagcatgtatgtactcagg

SEQ ID NO: 61432 - DNA, 25 bp, probe
tctactctcaaaccttctccttgtc

SEQ ID NO: 61433 - DNA, 25 bp, probe
ctctactctcaaaccttctccttgt

SEQ ID NO: 61434 - DNA, 25 bp, probe
cacatctaaatgctgccaatgagtt

SEQ ID NO: 61435 - DNA, 25 bp, probe
ctaaatgctgccaatgagtttctct

SEQ ID NO: 61436 - DNA, 25 bp, probe
tctaaatgctgccaatgagtttctc

SEQ ID NO: 61437 - DNA, 25 bp, probe
actttagtgtctacaatcagctctc

SEQ ID NO: 61438 - DNA, 25 bp, probe
aaatgctgccaatgagtttctctac

SEQ ID NO: 61439 - DNA, 25 bp, probe
ctttagtgtctacaatcagctctcc

SEQ ID NO: 61440 - DNA, 25 bp, probe
ctactctcaaaccttctccttgtcc

SEQ ID NO: 61441 - DNA, 25 bp, probe
gtcccgagaatcttccttacagtac

SEQ ID NO: 61442 - DNA, 25 bp, probe
aatgctgccaatgagtttctctact

SEQ ID NO: 61443 - DNA, 25 bp, probe
aaatgcccactttagtgtctacaat

SEQ ID NO: 61444 - DNA, 25 bp, probe
tttagtgtctacaatcagctctccc

SEQ ID NO: 61445 - DNA, 25 bp, probe
tgtcccgagaatcttccttacagta

SEQ ID NO: 61446 - DNA, 25 bp, probe
aatgcccactttagtgtctacaatc

SEQ ID NO: 61447 - DNA, 25 bp, probe
gaaatgcccactttagtgtctacaa

SEQ ID NO: 61448 - DNA, 25 bp, probe
cactttagtgtctacaatcagctct

SEQ ID NO: 61449 - DNA, 25 bp, probe
agtttctctactctcaaaccttctc

SEQ ID NO: 61450 - DNA, 25 bp, probe
cttgtcccgagaatcttccttacag

SEQ ID NO: 61451 - DNA, 25 bp, probe
gtttctctactctcaaaccttctcc

SEQ ID NO: 61452 - DNA, 25 bp, probe
ccactttagtgtctacaatcagctc

SEQ ID NO: 61453 - DNA, 25 bp, probe
cccagagaagcatgtatgtactcag

SEQ ID NO: 61454 - DNA, 25 bp, probe
tcccgagaatcttccttacagtacc

SEQ ID NO: 61455 - DNA, 25 bp, probe
atgcccactttagtgtctacaatca

SEQ ID NO: 61456 - DNA, 25 bp, probe
tacaagcacctaattctaccaatca

SEQ ID NO: 61457 - DNA, 25 bp, probe
acaagcacctaattctaccaatcaa

SEQ ID NO: 61458 - DNA, 25 bp, probe
atgatggaagtgcctatgttatctt

SEQ ID NO: 61459 - DNA, 25 bp, probe
tctacaagcacctaattctaccaat

SEQ ID NO: 61460 - DNA, 25 bp, probe
atctacaagcacctaattctaccaa

SEQ ID NO: 61461 - DNA, 25 bp, probe
ctacaagcacctaattctaccaatc

SEQ ID NO: 61462 - DNA, 25 bp, probe
gtatccagcaattaaccattacctt

SEQ ID NO: 61463 - DNA, 25 bp, probe
tcagtatctacaagcacctaattct

SEQ ID NO: 61464 - DNA, 25 bp, probe
tatctacaagcacctaattctacca

SEQ ID NO: 61465 - DNA, 25 bp, probe
gtatctacaagcacctaattctacc

SEQ ID NO: 61466 - DNA, 25 bp, probe
atcagtatctacaagcacctaattc

SEQ ID NO: 61467 - DNA, 25 bp, probe
catgatggaagtgcctatgttatct

SEQ ID NO: 61468 - DNA, 25 bp, probe
tgttatatggattacagtcacctgg

SEQ ID NO: 61469 - DNA, 25 bp, probe
gttatatggattacagtcacctgga

SEQ ID NO: 61470 - DNA, 25 bp, probe
ttatatggattacagtcacctggaa

SEQ ID NO: 61471 - DNA, 25 bp, probe
cagtatctacaagcacctaattcta

SEQ ID NO: 61472 - DNA, 25 bp, probe
gatcagtatctacaagcacctaatt

SEQ ID NO: 61473 - DNA, 25 bp, probe
agtatctacaagcacctaattctac

SEQ ID NO: 61474 - DNA, 25 bp, probe
atgttatatggattacagtcacctg

SEQ ID NO: 61475 - DNA, 25 bp, probe
caacctgcctctatgctacaagatt

SEQ ID NO: 61476 - DNA, 25 bp, probe
tagttgctcctttcatccttcctat

SEQ ID NO: 61477 - DNA, 25 bp, probe
gcacctaattctaccaatcaaatgt

SEQ ID NO: 61478 - DNA, 25 bp, probe
ttgaactccttactttctccacttt

SEQ ID NO: 61479 - DNA, 25 bp, probe
tttgaactccttactttctccactt

SEQ ID NO: 61480 - DNA, 25 bp, probe
tctcctttgaactccttactttctc

SEQ ID NO: 61481 - DNA, 25 bp, probe
ctctcctttgaactccttactttct

SEQ ID NO: 61482 - DNA, 25 bp, probe
caagcacctaattctaccaatcaaa

SEQ ID NO: 61483 - DNA, 25 bp, probe
gtaatcatgttcattggtatccagc

SEQ ID NO: 61484 - DNA, 25 bp, probe
ctttgaactccttactttctccact

SEQ ID NO: 61485 - DNA, 25 bp, probe
tgttcattggtatccagcaattaac

SEQ ID NO: 61486 - DNA, 25 bp, probe
taatcatgttcattggtatccagca

SEQ ID NO: 61487 - DNA, 25 bp, probe
ttagttgctcctttcatccttccta

SEQ ID NO: 61488 - DNA, 25 bp, probe
agcacctaattctaccaatcaaatg

SEQ ID NO: 61489 - DNA, 25 bp, probe
ctccttactttctccactttgcttt

SEQ ID NO: 61490 - DNA, 25 bp, probe
gttcattggtatccagcaattaacc

SEQ ID NO: 61491 - DNA, 25 bp, probe
caaccatcttaaagtgaatgacgac

SEQ ID NO: 61492 - DNA, 25 bp, probe
ttccaaccatcttaaagtgaatgac

SEQ ID NO: 61493 - DNA, 25 bp, probe
gttccaaccatcttaaagtgaatga

SEQ ID NO: 61494 - DNA, 25 bp, probe
tgaactccttactttctccactttg

SEQ ID NO: 61495 - DNA, 25 bp, probe
aaccatcttaaagtgaatgacgaca

SEQ ID NO: 61496 - DNA, 25 bp, probe
ctcctttgaactccttactttctcc

SEQ ID NO: 61497 - DNA, 25 bp, probe
cctctcctttgaactccttactttc

SEQ ID NO: 61498 - DNA, 25 bp, probe
aatgttatatggattacagtcacct

SEQ ID NO: 61499 - DNA, 25 bp, probe
aatcatgttcattggtatccagcaa

SEQ ID NO: 61500 - DNA, 25 bp, probe
tcatcctgaacatcctcttcttctg

SEQ ID NO: 61501 - DNA, 25 bp, probe
ctggaaatgaaactgacaaaggtag

SEQ ID NO: 61502 - DNA, 25 bp, probe
attcctgattgcctggattccttat

SEQ ID NO: 61503 - DNA, 25 bp, probe
aaatgaaactgacaaaggtagcgat

SEQ ID NO: 61504 - DNA, 25 bp, probe
atcattgccaaggttaagtcctctt

SEQ ID NO: 61505 - DNA, 25 bp, probe
acaatcccatcatttaccaagttat

SEQ ID NO: 61506 - DNA, 25 bp, probe
gaacatcctcttcttctgcctcttg

SEQ ID NO: 61507 - DNA, 25 bp, probe
catcctgaacatcctcttcttctgc

SEQ ID NO: 61508 - DNA, 25 bp, probe
gtaaagatcattgccaaggttaagt

SEQ ID NO: 61509 - DNA, 25 bp, probe
cgtaaagatcattgccaaggttaag

SEQ ID NO: 61510 - DNA, 25 bp, probe
tggaaatgaaactgacaaaggtagc

SEQ ID NO: 61511 - DNA, 25 bp, probe
gctggaaatgaaactgacaaaggta

SEQ ID NO: 61512 - DNA, 25 bp, probe
taaagatcattgccaaggttaagtc

SEQ ID NO: 61513 - DNA, 25 bp, probe
tttgaaagcaaccaagaagaagtct

SEQ ID NO: 61514 - DNA, 25 bp, probe
gtttgaaagcaaccaagaagaagtc

SEQ ID NO: 61515 - DNA, 25 bp, probe
gtacaatcccatcatttaccaagtt

SEQ ID NO: 61516 - DNA, 25 bp, probe
aagatcattgccaaggttaagtcct

SEQ ID NO: 61517 - DNA, 25 bp, probe
aatgaaactgacaaaggtagcgatg

SEQ ID NO: 61518 - DNA, 25 bp, probe
gaaatgaaactgacaaaggtagcga

SEQ ID NO: 61519 - DNA, 25 bp, probe
gattcctgattgcctggattcctta

SEQ ID NO: 61520 - DNA, 25 bp, probe
ttgaaagcaaccaagaagaagtctc

SEQ ID NO: 61521 - DNA, 25 bp, probe
tacaatcccatcatttaccaagtta

SEQ ID NO: 61522 - DNA, 25 bp, probe
tcattgccaaggttaagtcctcttc

SEQ ID NO: 61523 - DNA, 25 bp, probe
tgaacatcctcttcttctgcctctt

SEQ ID NO: 61524 - DNA, 25 bp, probe
aaagatcattgccaaggttaagtcc

SEQ ID NO: 61525 - DNA, 25 bp, probe
ttcctgattgcctggattccttatg

SEQ ID NO: 61526 - DNA, 25 bp, probe
gatcattgccaaggttaagtcctct

SEQ ID NO: 61527 - DNA, 25 bp, probe
agatcattgccaaggttaagtcctc

SEQ ID NO: 61528 - DNA, 25 bp, probe
ttgatttgtgctggattcctgattg

SEQ ID NO: 61529 - DNA, 25 bp, probe
gttgatttgtgctggattcctgatt

SEQ ID NO: 61530 - DNA, 25 bp, probe
gaaagcaaccaagaagaagtctctg

SEQ ID NO: 61531 - DNA, 25 bp, probe
atcccatcatttaccaagttattga

SEQ ID NO: 61532 - DNA, 25 bp, probe
gtaaccacagtcaggaagtcttctg

SEQ ID NO: 61533 - DNA, 25 bp, probe
caatcccatcatttaccaagttatt

SEQ ID NO: 61534 - DNA, 25 bp, probe
ttcatcctgaacatcctcttcttct

SEQ ID NO: 61535 - DNA, 25 bp, probe
tgaaagcaaccaagaagaagtctct

SEQ ID NO: 61536 - DNA, 25 bp, probe
ctgacaaaggtagcgatgttgattt

SEQ ID NO: 61537 - DNA, 25 bp, probe
atgtgctggaaatgaaactgacaaa

SEQ ID NO: 61538 - DNA, 25 bp, probe
ggaaatgaaactgacaaaggtagcg

SEQ ID NO: 61539 - DNA, 25 bp, probe
ctgaacatcctcttcttctgcctct

SEQ ID NO: 61540 - DNA, 25 bp, probe
caaccaagaagaagtctctggaagg

SEQ ID NO: 61541 - DNA, 25 bp, probe
aatcccatcatttaccaagttattg

SEQ ID NO: 61542 - DNA, 25 bp, probe
gatgttgatttgtgctggattcctg

SEQ ID NO: 61543 - DNA, 25 bp, probe
aaagaagtagctcatttcgacagtc

SEQ ID NO: 61544 - DNA, 25 bp, probe
gagacctgaatcagtatgtcctgtc

SEQ ID NO: 61545 - DNA, 25 bp, probe
atgtgaatgtgaataagtactggct

SEQ ID NO: 61546 - DNA, 25 bp, probe
aatgtgaatgtgaataagtactggc

SEQ ID NO: 61547 - DNA, 25 bp, probe
tgaatgtgaataagtactggctgtc

SEQ ID NO: 61548 - DNA, 25 bp, probe
caaagagggcaatcaagacaacaaa

SEQ ID NO: 61549 - DNA, 25 bp, probe
gtgaatgtgaataagtactggctgt

SEQ ID NO: 61550 - DNA, 25 bp, probe
tgtgaatgtgaataagtactggctg

SEQ ID NO: 61551 - DNA, 25 bp, probe
ctatctctggtttgtcatggagttc

SEQ ID NO: 61552 - DNA, 25 bp, probe
tatctctggtttgtcatggagttct

SEQ ID NO: 61553 - DNA, 25 bp, probe
gaatgtgaataagtactggctgtcc

SEQ ID NO: 61554 - DNA, 25 bp, probe
aatgtgaataagtactggctgtcct

SEQ ID NO: 61555 - DNA, 25 bp, probe
atgtgaataagtactggctgtcctc

SEQ ID NO: 61556 - DNA, 25 bp, probe
agacctgaatcagtatgtcctgtcc

SEQ ID NO: 61557 - DNA, 25 bp, probe
ggagacctgaatcagtatgtcctgt

SEQ ID NO: 61558 - DNA, 25 bp, probe
tggagacctgaatcagtatgtcctg

SEQ ID NO: 61559 - DNA, 25 bp, probe
gtggagacctgaatcagtatgtcct

SEQ ID NO: 61560 - DNA, 25 bp, probe
atctctggtttgtcatggagttctg

SEQ ID NO: 61561 - DNA, 25 bp, probe
gctatctctggtttgtcatggagtt

SEQ ID NO: 61562 - DNA, 25 bp, probe
ctgctatctctggtttgtcatggag

SEQ ID NO: 61563 - DNA, 25 bp, probe
aaagagggcaatcaagacaacaaaa

SEQ ID NO: 61564 - DNA, 25 bp, probe
aagccagacaacatcctcatcacag

SEQ ID NO: 61565 - DNA, 25 bp, probe
gaagccagacaacatcctcatcaca

SEQ ID NO: 61566 - DNA, 25 bp, probe
tttgtcatggagttctgtgaaggtg

SEQ ID NO: 61567 - DNA, 25 bp, probe
gtttgtcatggagttctgtgaaggt

SEQ ID NO: 61568 - DNA, 25 bp, probe
tggtttgtcatggagttctgtgaag

SEQ ID NO: 61569 - DNA, 25 bp, probe
ctggtttgtcatggagttctgtgaa

SEQ ID NO: 61570 - DNA, 25 bp, probe
gtgaataagtactggctgtcctcag

SEQ ID NO: 61571 - DNA, 25 bp, probe
tgtgaataagtactggctgtcctca

SEQ ID NO: 61572 - DNA, 25 bp, probe
gactttggactaagcaaggtctgtg

SEQ ID NO: 61573 - DNA, 25 bp, probe
tgaagccagacaacatcctcatcac

SEQ ID NO: 61574 - DNA, 25 bp, probe
ctgaagccagacaacatcctcatca

SEQ ID NO: 61575 - DNA, 25 bp, probe
caccaacaaaagtttcatgctacag

SEQ ID NO: 61576 - DNA, 25 bp, probe
tgctatctctggtttgtcatggagt

SEQ ID NO: 61577 - DNA, 25 bp, probe
ctctggtttgtcatggagttctgtg

SEQ ID NO: 61578 - DNA, 25 bp, probe
tctctggtttgtcatggagttctgt

SEQ ID NO: 61579 - DNA, 25 bp, probe
ggtggagacctgaatcagtatgtcc

SEQ ID NO: 61580 - DNA, 25 bp, probe
ttgtcatggagttctgtgaaggtgg

SEQ ID NO: 61581 - DNA, 25 bp, probe
aaatgtgaatgtgaataagtactgg

SEQ ID NO: 61582 - DNA, 25 bp, probe
catggagttctgtgaaggtggagac

SEQ ID NO: 61583 - DNA, 25 bp, probe
ggtttgtcatggagttctgtgaagg

SEQ ID NO: 61584 - DNA, 25 bp, probe
gcaaagagggcaatcaagacaacaa

SEQ ID NO: 61585 - DNA, 25 bp, probe
gtcatggagttctgtgaaggtggag

SEQ ID NO: 61586 - DNA, 25 bp, probe
cctgctatctctggtttgtcatgga

SEQ ID NO: 61587 - DNA, 25 bp, probe
tctggtttgtcatggagttctgtga

SEQ ID NO: 61588 - DNA, 25 bp, probe
tttcatcaacagccttcgcaacaaa

SEQ ID NO: 61589 - DNA, 25 bp, probe
ctttcatcaacagccttcgcaacaa

SEQ ID NO: 61590 - DNA, 25 bp, probe
ttcatcaacagccttcgcaacaaag

SEQ ID NO: 61591 - DNA, 25 bp, probe
ttgaaccctttcatcaacagccttc

SEQ ID NO: 61592 - DNA, 25 bp, probe
cttgaaccctttcatcaacagcctt

SEQ ID NO: 61593 - DNA, 25 bp, probe
catcaacagccttcgcaacaaagag

SEQ ID NO: 61594 - DNA, 25 bp, probe
aaatctggctcactggcattttcat

SEQ ID NO: 61595 - DNA, 25 bp, probe
tggcattttcatgataacagttaca

SEQ ID NO: 61596 - DNA, 25 bp, probe
ggcattttcatgataacagttacag

SEQ ID NO: 61597 - DNA, 25 bp, probe
cgaccttgaaccctttcatcaacag

SEQ ID NO: 61598 - DNA, 25 bp, probe
ctcactggcattttcatgataacag

SEQ ID NO: 61599 - DNA, 25 bp, probe
gaccttgaaccctttcatcaacagc

SEQ ID NO: 61600 - DNA, 25 bp, probe
ctggcattttcatgataacagttac

SEQ ID NO: 61601 - DNA, 25 bp, probe
aatctggctcactggcattttcatg

SEQ ID NO: 61602 - DNA, 25 bp, probe
gcattttcatgataacagttacaga

SEQ ID NO: 61603 - DNA, 25 bp, probe
caaatctggctcactggcattttca

SEQ ID NO: 61604 - DNA, 25 bp, probe
gctcactggcattttcatgataaca

SEQ ID NO: 61605 - DNA, 25 bp, probe
ggctcactggcattttcatgataac

SEQ ID NO: 61606 - DNA, 25 bp, probe
ctgctcctcgtgttccttttcctac

SEQ ID NO: 61607 - DNA, 25 bp, probe
tggctcactggcattttcatgataa

SEQ ID NO: 61608 - DNA, 25 bp, probe
cttcttttgcgacatgacggtgatg

SEQ ID NO: 61609 - DNA, 25 bp, probe
ctggctcactggcattttcatgata

SEQ ID NO: 61610 - DNA, 25 bp, probe
cactggcattttcatgataacagtt

SEQ ID NO: 61611 - DNA, 25 bp, probe
cattttcatgataacagttacagaa

SEQ ID NO: 61612 - DNA, 25 bp, probe
actggcattttcatgataacagtta

SEQ ID NO: 61613 - DNA, 25 bp, probe
tcactggcattttcatgataacagt

SEQ ID NO: 61614 - DNA, 25 bp, probe
tctggctcactggcattttcatgat

SEQ ID NO: 61615 - DNA, 25 bp, probe
atctggctcactggcattttcatga

SEQ ID NO: 61616 - DNA, 25 bp, probe
attttcatgataacagttacagaaa

SEQ ID NO: 61617 - DNA, 25 bp, probe
ttttcatgataacagttacagaaaa

SEQ ID NO: 61618 - DNA, 25 bp, probe
ggagaaggagctgctcatctacttg

SEQ ID NO: 61619 - DNA, 25 bp, probe
gagaaggagctgctcatctacttgc

SEQ ID NO: 61620 - DNA, 25 bp, probe
agatgatgatgatgattcagactct

SEQ ID NO: 61621 - DNA, 25 bp, probe
aagatgatgatgatgattcagactc

SEQ ID NO: 61622 - DNA, 25 bp, probe
gatgatgatgatgattcagactctg

SEQ ID NO: 61623 - DNA, 25 bp, probe
tactgcgtggtgtatgataacaaca

SEQ ID NO: 61624 - DNA, 25 bp, probe
gtactgcgtggtgtatgataacaac

SEQ ID NO: 61625 - DNA, 25 bp, probe
aaagatgatgatgatgattcagact

SEQ ID NO: 61626 - DNA, 25 bp, probe
actgcgtggtgtatgataacaacag

SEQ ID NO: 61627 - DNA, 25 bp, probe
gaagtactgcgtggtgtatgataac

SEQ ID NO: 61628 - DNA, 25 bp, probe
gtggtgtatgataacaacagcagca

SEQ ID NO: 61629 - DNA, 25 bp, probe
tgaagtactgcgtggtgtatgataa

SEQ ID NO: 61630 - DNA, 25 bp, probe
tggtgtatgataacaacagcagcac

SEQ ID NO: 61631 - DNA, 25 bp, probe
catgtgtcacttcattgaggtcctg

SEQ ID NO: 61632 - DNA, 25 bp, probe
gtgaagtactgcgtggtgtatgata

SEQ ID NO: 61633 - DNA, 25 bp, probe
agtactgcgtggtgtatgataacaa

SEQ ID NO: 61634 - DNA, 25 bp, probe
aagtactgcgtggtgtatgataaca

SEQ ID NO: 61635 - DNA, 25 bp, probe
atgtgtcacttcattgaggtcctgg

SEQ ID NO: 61636 - DNA, 25 bp, probe
agactctgatggtgatggcaaagat

SEQ ID NO: 61637 - DNA, 25 bp, probe
gactctgatggtgatggcaaagatc

SEQ ID NO: 61638 - DNA, 25 bp, probe
cgtggtgtatgataacaacagcagc

SEQ ID NO: 61639 - DNA, 25 bp, probe
gcgtggtgtatgataacaacagcag

SEQ ID NO: 61640 - DNA, 25 bp, probe
accctggagatactcttaaaagatg

SEQ ID NO: 61641 - DNA, 25 bp, probe
caccctggagatactcttaaaagat

SEQ ID NO: 61642 - DNA, 25 bp, probe
ccctggagatactcttaaaagatga

SEQ ID NO: 61643 - DNA, 25 bp, probe
ctgcgtggtgtatgataacaacagc

SEQ ID NO: 61644 - DNA, 25 bp, probe
atgatgatgattcagactctgatgg

SEQ ID NO: 61645 - DNA, 25 bp, probe
tgatgatgatgattcagactctgat

SEQ ID NO: 61646 - DNA, 25 bp, probe
atgatgatgatgattcagactctga

SEQ ID NO: 61647 - DNA, 25 bp, probe
gatgatgatgattcagactctgatg

SEQ ID NO: 61648 - DNA, 25 bp, probe
agcaccctggagatactcttaaaag

SEQ ID NO: 61649 - DNA, 25 bp, probe
gatgattcagactctgatggtgatg

SEQ ID NO: 61650 - DNA, 25 bp, probe
gatgatgattcagactctgatggtg

SEQ ID NO: 61651 - DNA, 25 bp, probe
tgatgattcagactctgatggtgat

SEQ ID NO: 61652 - DNA, 25 bp, probe
atgatgattcagactctgatggtga

SEQ ID NO: 61653 - DNA, 25 bp, probe
tgatgatgattcagactctgatggt

SEQ ID NO: 61654 - DNA, 25 bp, probe
gcaccctggagatactcttaaaaga

SEQ ID NO: 61655 - DNA, 25 bp, probe
cagcaccctggagatactcttaaaa

SEQ ID NO: 61656 - DNA, 25 bp, probe
aaaagatgatgatgatgattcagac

SEQ ID NO: 61657 - DNA, 25 bp, probe
gtatgataacaacagcagcaccctg

SEQ ID NO: 61658 - DNA, 25 bp, probe
gcagcaccctggagatactcttaaa

SEQ ID NO: 61659 - DNA, 25 bp, probe
atgattcagactctgatggtgatgg

SEQ ID NO: 61660 - DNA, 25 bp, probe
cctggagatactcttaaaagatgat

SEQ ID NO: 61661 - DNA, 25 bp, probe
tgtatgataacaacagcagcaccct

SEQ ID NO: 61662 - DNA, 25 bp, probe
tgtgaagtactgcgtggtgtatgat

SEQ ID NO: 61663 - DNA, 25 bp, probe
gtgtatgataacaacagcagcaccc

SEQ ID NO: 61664 - DNA, 25 bp, probe
tctaggaacacaccagagagagaag

SEQ ID NO: 61665 - DNA, 25 bp, probe
ctaggaacacaccagagagagaagt

SEQ ID NO: 61666 - DNA, 25 bp, probe
gaaatatgccgaggagaacttcaaa

SEQ ID NO: 61667 - DNA, 25 bp, probe
gtctaggaacacaccagagagagaa

SEQ ID NO: 61668 - DNA, 25 bp, probe
caaagatagcgagaaatatgccgag

SEQ ID NO: 61669 - DNA, 25 bp, probe
cacattattctgaattccatgcaca

SEQ ID NO: 61670 - DNA, 25 bp, probe
agaaatatgccgaggagaacttcaa

SEQ ID NO: 61671 - DNA, 25 bp, probe
ccacattattctgaattccatgcac

SEQ ID NO: 61672 - DNA, 25 bp, probe
gagaaatatgccgaggagaacttca

SEQ ID NO: 61673 - DNA, 25 bp, probe
acattattctgaattccatgcacag

SEQ ID NO: 61674 - DNA, 25 bp, probe
taggaacacaccagagagagaagtg

SEQ ID NO: 61675 - DNA, 25 bp, probe
aaagatagcgagaaatatgccgagg

SEQ ID NO: 61676 - DNA, 25 bp, probe
gccacattattctgaattccatgca

SEQ ID NO: 61677 - DNA, 25 bp, probe
acaacggccacattattctgaattc

SEQ ID NO: 61678 - DNA, 25 bp, probe
gacaacggccacattattctgaatt

SEQ ID NO: 61679 - DNA, 25 bp, probe
atagcgagaaatatgccgaggagaa

SEQ ID NO: 61680 - DNA, 25 bp, probe
aagatagcgagaaatatgccgagga

SEQ ID NO: 61681 - DNA, 25 bp, probe
cgagaaatatgccgaggagaacttc

SEQ ID NO: 61682 - DNA, 25 bp, probe
cggccacattattctgaattccatg

SEQ ID NO: 61683 - DNA, 25 bp, probe
aaatatgccgaggagaacttcaaaa

SEQ ID NO: 61684 - DNA, 25 bp, probe
caacggccacattattctgaattcc

SEQ ID NO: 61685 - DNA, 25 bp, probe
acggccacattattctgaattccat

SEQ ID NO: 61686 - DNA, 25 bp, probe
ggccacattattctgaattccatgc

SEQ ID NO: 61687 - DNA, 25 bp, probe
aatatgccgaggagaacttcaaaac

SEQ ID NO: 61688 - DNA, 25 bp, probe
aacggccacattattctgaattcca

SEQ ID NO: 61689 - DNA, 25 bp, probe
gatagcgagaaatatgccgaggaga

SEQ ID NO: 61690 - DNA, 25 bp, probe
agatagcgagaaatatgccgaggag

SEQ ID NO: 61691 - DNA, 25 bp, probe
gaacacaccagagagagaagtggag

SEQ ID NO: 61692 - DNA, 25 bp, probe
cgtctaggaacacaccagagagaga

SEQ ID NO: 61693 - DNA, 25 bp, probe
tagcgagaaatatgccgaggagaac

SEQ ID NO: 61694 - DNA, 25 bp, probe
gaaggacaaggaagtgaaagctgag

SEQ ID NO: 61695 - DNA, 25 bp, probe
cattattctgaattccatgcacaga

SEQ ID NO: 61696 - DNA, 25 bp, probe
ctgaaggacaaggaagtgaaagctg

SEQ ID NO: 61697 - DNA, 25 bp, probe
tattctgaattccatgcacagatac

SEQ ID NO: 61698 - DNA, 25 bp, probe
attctgaattccatgcacagatacc

SEQ ID NO: 61699 - DNA, 25 bp, probe
attattctgaattccatgcacagat

SEQ ID NO: 61700 - DNA, 25 bp, probe
atatgccgaggagaacttcaaaacc

SEQ ID NO: 61701 - DNA, 25 bp, probe
aaggacaaggaagtgaaagctgaga

SEQ ID NO: 61702 - DNA, 25 bp, probe
cgacaacggccacattattctgaat

SEQ ID NO: 61703 - DNA, 25 bp, probe
ttattctgaattccatgcacagata

SEQ ID NO: 61704 - DNA, 25 bp, probe
tgaaggacaaggaagtgaaagctga

SEQ ID NO: 61705 - DNA, 25 bp, probe
ctgaattccatgcacagataccagc

SEQ ID NO: 61706 - DNA, 25 bp, probe
ttctgaattccatgcacagatacca

SEQ ID NO: 61707 - DNA, 25 bp, probe
aggagaacttcaaaacctttgtgtt

SEQ ID NO: 61708 - DNA, 25 bp, probe
ctaagtgctgctgtttctttaagag

SEQ ID NO: 61709 - DNA, 25 bp, probe
taagtgctgctgtttctttaagagg

SEQ ID NO: 61710 - DNA, 25 bp, probe
gctaagtgctgctgtttctttaaga

SEQ ID NO: 61711 - DNA, 25 bp, probe
agtgctgctgtttctttaagaggaa

SEQ ID NO: 61712 - DNA, 25 bp, probe
aagtgctgctgtttctttaagagga

SEQ ID NO: 61713 - DNA, 25 bp, probe
ttaagaggaaaaggaagaagactgc

SEQ ID NO: 61714 - DNA, 25 bp, probe
taagaggaaaaggaagaagactgct

SEQ ID NO: 61715 - DNA, 25 bp, probe
gtgctgctgtttctttaagaggaaa

SEQ ID NO: 61716 - DNA, 25 bp, probe
tttaagaggaaaaggaagaagactg

SEQ ID NO: 61717 - DNA, 25 bp, probe
aagctaagtgctgctgtttctttaa

SEQ ID NO: 61718 - DNA, 25 bp, probe
agctaagtgctgctgtttctttaag

SEQ ID NO: 61719 - DNA, 25 bp, probe
gaagctaagtgctgctgtttcttta

SEQ ID NO: 61720 - DNA, 25 bp, probe
aagaggaaaaggaagaagactgctc

SEQ ID NO: 61721 - DNA, 25 bp, probe
gctgtttctttaagaggaaaaggaa

SEQ ID NO: 61722 - DNA, 25 bp, probe
ctgctgtttctttaagaggaaaagg

SEQ ID NO: 61723 - DNA, 25 bp, probe
tgctgtttctttaagaggaaaagga

SEQ ID NO: 61724 - DNA, 25 bp, probe
gctgctgtttctttaagaggaaaag

SEQ ID NO: 61725 - DNA, 25 bp, probe
tgctgctgtttctttaagaggaaaa

SEQ ID NO: 61726 - DNA, 25 bp, probe
tggaggtagtggaggaagctaagtg

SEQ ID NO: 61727 - DNA, 25 bp, probe
gtggaggtagtggaggaagctaagt

SEQ ID NO: 61728 - DNA, 25 bp, probe
ctttaagaggaaaaggaagaagact

SEQ ID NO: 61729 - DNA, 25 bp, probe
gaggaaaaggaagaagactgctcag

SEQ ID NO: 61730 - DNA, 25 bp, probe
ggactctgactcaattgtacctgca

SEQ ID NO: 61731 - DNA, 25 bp, probe
tctttaagaggaaaaggaagaagac

SEQ ID NO: 61732 - DNA, 25 bp, probe
ctgtttctttaagaggaaaaggaag

SEQ ID NO: 61733 - DNA, 25 bp, probe
tgtttctttaagaggaaaaggaaga

SEQ ID NO: 61734 - DNA, 25 bp, probe
agaggaaaaggaagaagactgctca

SEQ ID NO: 61735 - DNA, 25 bp, probe
ggaagctaagtgctgctgtttcttt

SEQ ID NO: 61736 - DNA, 25 bp, probe
aggaaaaggaagaagactgctcagc

SEQ ID NO: 61737 - DNA, 25 bp, probe
aggaagctaagtgctgctgtttctt

SEQ ID NO: 61738 - DNA, 25 bp, probe
gggactctgactcaattgtacctgc

SEQ ID NO: 61739 - DNA, 25 bp, probe
gaggaagctaagtgctgctgtttct

SEQ ID NO: 61740 - DNA, 25 bp, probe
ggggactctgactcaattgtacctg

SEQ ID NO: 61741 - DNA, 25 bp, probe
ctggggactctgactcaattgtacc

SEQ ID NO: 61742 - DNA, 25 bp, probe
cctggggactctgactcaattgtac

SEQ ID NO: 61743 - DNA, 25 bp, probe
ttctttaagaggaaaaggaagaaga

SEQ ID NO: 61744 - DNA, 25 bp, probe
gtttctttaagaggaaaaggaagaa

SEQ ID NO: 61745 - DNA, 25 bp, probe
tggggactctgactcaattgtacct

SEQ ID NO: 61746 - DNA, 25 bp, probe
tttctttaagaggaaaaggaagaag

SEQ ID NO: 61747 - DNA, 25 bp, probe
tttcaaagcccagactctcttaaac

SEQ ID NO: 61748 - DNA, 25 bp, probe
ctttcaaagcccagactctcttaaa

SEQ ID NO: 61749 - DNA, 25 bp, probe
ttcaaagcccagactctcttaaacc

SEQ ID NO: 61750 - DNA, 25 bp, probe
ccagactctcttaaaccaggtgatc

SEQ ID NO: 61751 - DNA, 25 bp, probe
caaagcccagactctcttaaaccag

SEQ ID NO: 61752 - DNA, 25 bp, probe
tcaaagcccagactctcttaaacca

SEQ ID NO: 61753 - DNA, 25 bp, probe
cccagactctcttaaaccaggtgat

SEQ ID NO: 61754 - DNA, 25 bp, probe
aaagcccagactctcttaaaccagg

SEQ ID NO: 61755 - DNA, 25 bp, probe
agggcttgaaatggacatctgtgat

SEQ ID NO: 61756 - DNA, 25 bp, probe
cagactctcttaaaccaggtgatca

SEQ ID NO: 61757 - DNA, 25 bp, probe
gactctcttaaaccaggtgatcagc

SEQ ID NO: 61758 - DNA, 25 bp, probe
aatggacatctgtgatgggcatttc

SEQ ID NO: 61759 - DNA, 25 bp, probe
gaaatggacatctgtgatgggcatt

SEQ ID NO: 61760 - DNA, 25 bp, probe
aagcccagactctcttaaaccaggt

SEQ ID NO: 61761 - DNA, 25 bp, probe
cagggcttgaaatggacatctgtga

SEQ ID NO: 61762 - DNA, 25 bp, probe
cttgaaatggacatctgtgatgggc

SEQ ID NO: 61763 - DNA, 25 bp, probe
gcttgaaatggacatctgtgatggg

SEQ ID NO: 61764 - DNA, 25 bp, probe
ggcttgaaatggacatctgtgatgg

SEQ ID NO: 61765 - DNA, 25 bp, probe
gggcttgaaatggacatctgtgatg

SEQ ID NO: 61766 - DNA, 25 bp, probe
actctcttaaaccaggtgatcagcg

SEQ ID NO: 61767 - DNA, 25 bp, probe
tgaaatggacatctgtgatgggcat

SEQ ID NO: 61768 - DNA, 25 bp, probe
ttgaaatggacatctgtgatgggca

SEQ ID NO: 61769 - DNA, 25 bp, probe
aaatggacatctgtgatgggcattt

SEQ ID NO: 61770 - DNA, 25 bp, probe
ctctcttaaaccaggtgatcagcgg

SEQ ID NO: 61771 - DNA, 25 bp, probe
atggacatctgtgatgggcatttcc

SEQ ID NO: 61772 - DNA, 25 bp, probe
aggagtcttctgacagtgccaatac

SEQ ID NO: 61773 - DNA, 25 bp, probe
caggagtcttctgacagtgccaata

SEQ ID NO: 61774 - DNA, 25 bp, probe
tttcctcaggagtcttctgacagtg

SEQ ID NO: 61775 - DNA, 25 bp, probe
gtttcctcaggagtcttctgacagt

SEQ ID NO: 61776 - DNA, 25 bp, probe
tgtttcctcaggagtcttctgacag

SEQ ID NO: 61777 - DNA, 25 bp, probe
gtgtttcctcaggagtcttctgaca

SEQ ID NO: 61778 - DNA, 25 bp, probe
cgtgtttcctcaggagtcttctgac

SEQ ID NO: 61779 - DNA, 25 bp, probe
aagatgccagtgaacttgtaaggaa

SEQ ID NO: 61780 - DNA, 25 bp, probe
gttcaaaggcattaaagcatttctg

SEQ ID NO: 61781 - DNA, 25 bp, probe
gtaggttcaaaggcattaaagcatt

SEQ ID NO: 61782 - DNA, 25 bp, probe
cactgtaggttcaaaggcattaaag

SEQ ID NO: 61783 - DNA, 25 bp, probe
ttggtgcagacgatgtaattgatta

SEQ ID NO: 61784 - DNA, 25 bp, probe
taggttcaaaggcattaaagcattt

SEQ ID NO: 61785 - DNA, 25 bp, probe
agatgccagtgaacttgtaaggaag

SEQ ID NO: 61786 - DNA, 25 bp, probe
tcactgtaggttcaaaggcattaaa

SEQ ID NO: 61787 - DNA, 25 bp, probe
caaaggcattaaagcatttctggaa

SEQ ID NO: 61788 - DNA, 25 bp, probe
ttcaaaggcattaaagcatttctgg

SEQ ID NO: 61789 - DNA, 25 bp, probe
ggttcaaaggcattaaagcatttct

SEQ ID NO: 61790 - DNA, 25 bp, probe
aggttcaaaggcattaaagcatttc

SEQ ID NO: 61791 - DNA, 25 bp, probe
ccagttattgaacaaacctttcctt

SEQ ID NO: 61792 - DNA, 25 bp, probe
ctatgtgactttggtgactcctttc

SEQ ID NO: 61793 - DNA, 25 bp, probe
cattaaagcatttctggaaaggagt

SEQ ID NO: 61794 - DNA, 25 bp, probe
aaaggcattaaagcatttctggaaa

SEQ ID NO: 61795 - DNA, 25 bp, probe
tgtaggttcaaaggcattaaagcat

SEQ ID NO: 61796 - DNA, 25 bp, probe
gtcactgtaggttcaaaggcattaa

SEQ ID NO: 61797 - DNA, 25 bp, probe
attaaagcatttctggaaaggagtc

SEQ ID NO: 61798 - DNA, 25 bp, probe
aaggcattaaagcatttctggaaag

SEQ ID NO: 61799 - DNA, 25 bp, probe
tcaaaggcattaaagcatttctgga

SEQ ID NO: 61800 - DNA, 25 bp, probe
gcattaaagcatttctggaaaggag

SEQ ID NO: 61801 - DNA, 25 bp, probe
ctgtaggttcaaaggcattaaagca

SEQ ID NO: 61802 - DNA, 25 bp, probe
actgtaggttcaaaggcattaaagc

SEQ ID NO: 61803 - DNA, 25 bp, probe
cttggtgcagacgatgtaattgatt

SEQ ID NO: 61804 - DNA, 25 bp, probe
attacaaatctggaagtgtggaaga

SEQ ID NO: 61805 - DNA, 25 bp, probe
cagttattgaacaaacctttccttt

SEQ ID NO: 61806 - DNA, 25 bp, probe
ttacaaatctggaagtgtggaagag

SEQ ID NO: 61807 - DNA, 25 bp, probe
agtcactgtaggttcaaaggcatta

SEQ ID NO: 61808 - DNA, 25 bp, probe
ctatacaggtaatgaaagcatggga

SEQ ID NO: 61809 - DNA, 25 bp, probe
tatacaggtaatgaaagcatgggat

SEQ ID NO: 61810 - DNA, 25 bp, probe
gcacgaggaaagactgtaattaatg

SEQ ID NO: 61811 - DNA, 25 bp, probe
atacaggtaatgaaagcatgggatg

SEQ ID NO: 61812 - DNA, 25 bp, probe
gccagttattgaacaaacctttcct

SEQ ID NO: 61813 - DNA, 25 bp, probe
gaagtgtggaagagcagttgaaatc

SEQ ID NO: 61814 - DNA, 25 bp, probe
cacgaggaaagactgtaattaatgt

SEQ ID NO: 61815 - DNA, 25 bp, probe
ggcattaaagcatttctggaaagga

SEQ ID NO: 61816 - DNA, 25 bp, probe
aggcattaaagcatttctggaaagg

SEQ ID NO: 61817 - DNA, 25 bp, probe
tatgtgactttggtgactcctttcc

SEQ ID NO: 61818 - DNA, 25 bp, probe
cctatgtgactttggtgactccttt

SEQ ID NO: 61819 - DNA, 25 bp, probe
tggaagagcagttgaaatccttaaa

SEQ ID NO: 61820 - DNA, 25 bp, probe
tggtgcagacgatgtaattgattac

SEQ ID NO: 61821 - DNA, 25 bp, probe
cgcacgaggaaagactgtaattaat

SEQ ID NO: 61822 - DNA, 25 bp, probe
gattacaaatctggaagtgtggaag

SEQ ID NO: 61823 - DNA, 25 bp, probe
attctattaccatgcagtcaggatt

SEQ ID NO: 61824 - DNA, 25 bp, probe
aattctattaccatgcagtcaggat

SEQ ID NO: 61825 - DNA, 25 bp, probe
ttctattaccatgcagtcaggattc

SEQ ID NO: 61826 - DNA, 25 bp, probe
attctccactcttgctctttcatta

SEQ ID NO: 61827 - DNA, 25 bp, probe
tacaagggcttcatatacaatcagg

SEQ ID NO: 61828 - DNA, 25 bp, probe
tgatttagtgacagaacagagaacc

SEQ ID NO: 61829 - DNA, 25 bp, probe
ttctccactcttgctctttcattag

SEQ ID NO: 61830 - DNA, 25 bp, probe
ctattaccatgcagtcaggattctc

SEQ ID NO: 61831 - DNA, 25 bp, probe
tctattaccatgcagtcaggattct

SEQ ID NO: 61832 - DNA, 25 bp, probe
aaatgtagtgtttgtgtgtgtctaa

SEQ ID NO: 61833 - DNA, 25 bp, probe
agggcttcatatacaatcaggagat

SEQ ID NO: 61834 - DNA, 25 bp, probe
gattctccactcttgctctttcatt

SEQ ID NO: 61835 - DNA, 25 bp, probe
aagggcttcatatacaatcaggaga

SEQ ID NO: 61836 - DNA, 25 bp, probe
caagggcttcatatacaatcaggag

SEQ ID NO: 61837 - DNA, 25 bp, probe
gatttagtgacagaacagagaaccc

SEQ ID NO: 61838 - DNA, 25 bp, probe
tcttgctctttcattagatttgctg

SEQ ID NO: 61839 - DNA, 25 bp, probe
actcttgctctttcattagatttgc

SEQ ID NO: 61840 - DNA, 25 bp, probe
tccactcttgctctttcattagatt

SEQ ID NO: 61841 - DNA, 25 bp, probe
ctccactcttgctctttcattagat

SEQ ID NO: 61842 - DNA, 25 bp, probe
aatgtagtgtttgtgtgtgtctaac

SEQ ID NO: 61843 - DNA, 25 bp, probe
ctcttgctctttcattagatttgct

SEQ ID NO: 61844 - DNA, 25 bp, probe
cttgctctttcattagatttgctgg

SEQ ID NO: 61845 - DNA, 25 bp, probe
ccactcttgctctttcattagattt

SEQ ID NO: 61846 - DNA, 25 bp, probe
acaagggcttcatatacaatcagga

SEQ ID NO: 61847 - DNA, 25 bp, probe
atttagtgacagaacagagaaccca

SEQ ID NO: 61848 - DNA, 25 bp, probe
tctccactcttgctctttcattaga

SEQ ID NO: 61849 - DNA, 25 bp, probe
gtacaagggcttcatatacaatcag

SEQ ID NO: 61850 - DNA, 25 bp, probe
cttcaccctggactttctgatttag

SEQ ID NO: 61851 - DNA, 25 bp, probe
ctttcattagatttgctgggcttca

SEQ ID NO: 61852 - DNA, 25 bp, probe
ctctttcattagatttgctgggctt

SEQ ID NO: 61853 - DNA, 25 bp, probe
cactcttgctctttcattagatttg

SEQ ID NO: 61854 - DNA, 25 bp, probe
tctttcattagatttgctgggcttc

SEQ ID NO: 61855 - DNA, 25 bp, probe
tttcattagatttgctgggcttcac

SEQ ID NO: 61856 - DNA, 25 bp, probe
tttagtgacagaacagagaacccag

SEQ ID NO: 61857 - DNA, 25 bp, probe
ttcaccctggactttctgatttagt

SEQ ID NO: 61858 - DNA, 25 bp, probe
ttgctctttcattagatttgctggg

SEQ ID NO: 61859 - DNA, 25 bp, probe
ctgatttagtgacagaacagagaac

SEQ ID NO: 61860 - DNA, 25 bp, probe
cctggactttctgatttagtgacag

SEQ ID NO: 61861 - DNA, 25 bp, probe
gggcttcatatacaatcaggagatt

SEQ ID NO: 61862 - DNA, 25 bp, probe
ccctggactttctgatttagtgaca

SEQ ID NO: 61863 - DNA, 25 bp, probe
accctggactttctgatttagtgac

SEQ ID NO: 61864 - DNA, 25 bp, probe
aaattctattaccatgcagtcagga

SEQ ID NO: 61865 - DNA, 25 bp, probe
caaattctattaccatgcagtcagg

SEQ ID NO: 61866 - DNA, 25 bp, probe
cacaaattctattaccatgcagtca

SEQ ID NO: 61867 - DNA, 25 bp, probe
cttggttgagacacaaatgaagaaa

SEQ ID NO: 61868 - DNA, 25 bp, probe
ttggttgagacacaaatgaagaaac

SEQ ID NO: 61869 - DNA, 25 bp, probe
ggttgagacacaaatgaagaaacta

SEQ ID NO: 61870 - DNA, 25 bp, probe
cagtggaagaaagaaagatcaagtc

SEQ ID NO: 61871 - DNA, 25 bp, probe
tggttgagacacaaatgaagaaact

SEQ ID NO: 61872 - DNA, 25 bp, probe
tgagacacaaatgaagaaactagag

SEQ ID NO: 61873 - DNA, 25 bp, probe
gaaagaaagatcaagtccctggtag

SEQ ID NO: 61874 - DNA, 25 bp, probe
ggaaactatcatggacagagagaaa

SEQ ID NO: 61875 - DNA, 25 bp, probe
actatcatggacagagagaaagaag

SEQ ID NO: 61876 - DNA, 25 bp, probe
agaaagaaagatcaagtccctggta

SEQ ID NO: 61877 - DNA, 25 bp, probe
gagacacaaatgaagaaactagaga

SEQ ID NO: 61878 - DNA, 25 bp, probe
ctatcatggacagagagaaagaagc

SEQ ID NO: 61879 - DNA, 25 bp, probe
aactatcatggacagagagaaagaa

SEQ ID NO: 61880 - DNA, 25 bp, probe
aaactatcatggacagagagaaaga

SEQ ID NO: 61881 - DNA, 25 bp, probe
tggaaactatcatggacagagagaa

SEQ ID NO: 61882 - DNA, 25 bp, probe
gaagaaagaaagatcaagtccctgg

SEQ ID NO: 61883 - DNA, 25 bp, probe
gaaactatcatggacagagagaaag

SEQ ID NO: 61884 - DNA, 25 bp, probe
gcagtggaagaaagaaagatcaagt

SEQ ID NO: 61885 - DNA, 25 bp, probe
ttgagacacaaatgaagaaactaga

SEQ ID NO: 61886 - DNA, 25 bp, probe
gttgagacacaaatgaagaaactag

SEQ ID NO: 61887 - DNA, 25 bp, probe
aagaaagaaagatcaagtccctggt

SEQ ID NO: 61888 - DNA, 25 bp, probe
agacacaaatgaagaaactagagat

SEQ ID NO: 61889 - DNA, 25 bp, probe
tatcatggacagagagaaagaagct

SEQ ID NO: 61890 - DNA, 25 bp, probe
agaaactagagatcaaacttcgaca

SEQ ID NO: 61891 - DNA, 25 bp, probe
gacacaaatgaagaaactagagatc

SEQ ID NO: 61892 - DNA, 25 bp, probe
acacaaatgaagaaactagagatca

SEQ ID NO: 61893 - DNA, 25 bp, probe
agtggaagaaagaaagatcaagtcc

SEQ ID NO: 61894 - DNA, 25 bp, probe
gaaactagagatcaaacttcgacat

SEQ ID NO: 61895 - DNA, 25 bp, probe
aagaaactagagatcaaacttcgac

SEQ ID NO: 61896 - DNA, 25 bp, probe
ctggaaactatcatggacagagaga

SEQ ID NO: 61897 - DNA, 25 bp, probe
aactagagatcaaacttcgacattt

SEQ ID NO: 61898 - DNA, 25 bp, probe
aaactagagatcaaacttcgacatt

SEQ ID NO: 61899 - DNA, 25 bp, probe
tttgaagagctggaaactatcatgg

SEQ ID NO: 61900 - DNA, 25 bp, probe
aaagaaagatcaagtccctggtagc

SEQ ID NO: 61901 - DNA, 25 bp, probe
ggaagaaagaaagatcaagtccctg

SEQ ID NO: 61902 - DNA, 25 bp, probe
tggaagaaagaaagatcaagtccct

SEQ ID NO: 61903 - DNA, 25 bp, probe
gtggaagaaagaaagatcaagtccc

SEQ ID NO: 61904 - DNA, 25 bp, probe
tgcagtggaagaaagaaagatcaag

SEQ ID NO: 61905 - DNA, 25 bp, probe
ttgaagagctggaaactatcatgga

SEQ ID NO: 61906 - DNA, 25 bp, probe
tcttggttgagacacaaatgaagaa

SEQ ID NO: 61907 - DNA, 25 bp, probe
gaagagctggaaactatcatggaca

SEQ ID NO: 61908 - DNA, 25 bp, probe
ctcttggttgagacacaaatgaaga

SEQ ID NO: 61909 - DNA, 25 bp, probe
cacaaatgaagaaactagagatcaa

SEQ ID NO: 61910 - DNA, 25 bp, probe
atcatggacagagagaaagaagctc

SEQ ID NO: 61911 - DNA, 25 bp, probe
gactactatgccactgctctcaaga

SEQ ID NO: 61912 - DNA, 25 bp, probe
actactatgccactgctctcaagag

SEQ ID NO: 61913 - DNA, 25 bp, probe
cattctctatggcttcctctccgac

SEQ ID NO: 61914 - DNA, 25 bp, probe
ggactactatgccactgctctcaag

SEQ ID NO: 61915 - DNA, 25 bp, probe
attctctatggcttcctctccgaca

SEQ ID NO: 61916 - DNA, 25 bp, probe
ctatggcttcctctccgacaacttc

SEQ ID NO: 61917 - DNA, 25 bp, probe
ttctctatggcttcctctccgacaa

SEQ ID NO: 61918 - DNA, 25 bp, probe
tctatggcttcctctccgacaactt

SEQ ID NO: 61919 - DNA, 25 bp, probe
cccttatccttagctatgccaacag

SEQ ID NO: 61920 - DNA, 25 bp, probe
gtcccttatccttagctatgccaac

SEQ ID NO: 61921 - DNA, 25 bp, probe
atctcctgaatgctcacctaagctc

SEQ ID NO: 61922 - DNA, 25 bp, probe
tcccttatccttagctatgccaaca

SEQ ID NO: 61923 - DNA, 25 bp, probe
tgtcccttatccttagctatgccaa

SEQ ID NO: 61924 - DNA, 25 bp, probe
catctcctgaatgctcacctaagct

SEQ ID NO: 61925 - DNA, 25 bp, probe
tggactactatgccactgctctcaa

SEQ ID NO: 61926 - DNA, 25 bp, probe
ccttatccttagctatgccaacagc

SEQ ID NO: 61927 - DNA, 25 bp, probe
gtgtcccttatccttagctatgcca

SEQ ID NO: 61928 - DNA, 25 bp, probe
acgtgtcccttatccttagctatgc

SEQ ID NO: 61929 - DNA, 25 bp, probe
cgtgtcccttatccttagctatgcc

SEQ ID NO: 61930 - DNA, 25 bp, probe
cttatccttagctatgccaacagct

SEQ ID NO: 61931 - DNA, 25 bp, probe
tgcatctcctgaatgctcacctaag

SEQ ID NO: 61932 - DNA, 25 bp, probe
ctgcatctcctgaatgctcacctaa

SEQ ID NO: 61933 - DNA, 25 bp, probe
gaagactgcatctcctgaatgctca

SEQ ID NO: 61934 - DNA, 25 bp, probe
aagactgcatctcctgaatgctcac

SEQ ID NO: 61935 - DNA, 25 bp, probe
caaccccattctctatggcttcctc

SEQ ID NO: 61936 - DNA, 25 bp, probe
aaccccattctctatggcttcctct

SEQ ID NO: 61937 - DNA, 25 bp, probe
accccattctctatggcttcctctc

SEQ ID NO: 61938 - DNA, 25 bp, probe
tagaaccttaaagaaccatcagcat

SEQ ID NO: 61939 - DNA, 25 bp, probe
ttagaaccttaaagaaccatcagca

SEQ ID NO: 61940 - DNA, 25 bp, probe
aaattaacacaaaggaagtccaacc

SEQ ID NO: 61941 - DNA, 25 bp, probe
tgggaatgaaattaacacaaaggaa

SEQ ID NO: 61942 - DNA, 25 bp, probe
agaaccttaaagaaccatcagcatc

SEQ ID NO: 61943 - DNA, 25 bp, probe
tgaaattaacacaaaggaagtccaa

SEQ ID NO: 61944 - DNA, 25 bp, probe
gaaattaacacaaaggaagtccaac

SEQ ID NO: 61945 - DNA, 25 bp, probe
atgaaattaacacaaaggaagtcca

SEQ ID NO: 61946 - DNA, 25 bp, probe
gaaccttaaagaaccatcagcatca

SEQ ID NO: 61947 - DNA, 25 bp, probe
tctgctaattcgagtcatggctaat

SEQ ID NO: 61948 - DNA, 25 bp, probe
tgcttgggaatgaaattaacacaaa

SEQ ID NO: 61949 - DNA, 25 bp, probe
gggaatgaaattaacacaaaggaag

SEQ ID NO: 61950 - DNA, 25 bp, probe
ggtgatttgtatgctcattgaactt

SEQ ID NO: 61951 - DNA, 25 bp, probe
gcttgggaatgaaattaacacaaag

SEQ ID NO: 61952 - DNA, 25 bp, probe
ctcattgaactttaagaagcagtgt

SEQ ID NO: 61953 - DNA, 25 bp, probe
ctgcttgggaatgaaattaacacaa

SEQ ID NO: 61954 - DNA, 25 bp, probe
tttagaaccttaaagaaccatcagc

SEQ ID NO: 61955 - DNA, 25 bp, probe
ttgggaatgaaattaacacaaagga

SEQ ID NO: 61956 - DNA, 25 bp, probe
tcattgaactttaagaagcagtgtt

SEQ ID NO: 61957 - DNA, 25 bp, probe
aaccttaaagaaccatcagcatcac

SEQ ID NO: 61958 - DNA, 25 bp, probe
ctgctaattcgagtcatggctaatt

SEQ ID NO: 61959 - DNA, 25 bp, probe
aggtgatttgtatgctcattgaact

SEQ ID NO: 61960 - DNA, 25 bp, probe
caggtgatttgtatgctcattgaac

SEQ ID NO: 61961 - DNA, 25 bp, probe
tcaggtgatttgtatgctcattgaa

SEQ ID NO: 61962 - DNA, 25 bp, probe
ttctgctaattcgagtcatggctaa

SEQ ID NO: 61963 - DNA, 25 bp, probe
cttgggaatgaaattaacacaaagg

SEQ ID NO: 61964 - DNA, 25 bp, probe
ctcaggtgatttgtatgctcattga

SEQ ID NO: 61965 - DNA, 25 bp, probe
agtcatggctaatttaacacccttt

SEQ ID NO: 61966 - DNA, 25 bp, probe
ttactagcactttgagaatgagtct

SEQ ID NO: 61967 - DNA, 25 bp, probe
gtcatggctaatttaacacccttta

SEQ ID NO: 61968 - DNA, 25 bp, probe
cattgaactttaagaagcagtgttt

SEQ ID NO: 61969 - DNA, 25 bp, probe
ggaatgaaattaacacaaaggaagt

SEQ ID NO: 61970 - DNA, 25 bp, probe
cttactagcactttgagaatgagtc

SEQ ID NO: 61971 - DNA, 25 bp, probe
gtgatttgtatgctcattgaacttt

SEQ ID NO: 61972 - DNA, 25 bp, probe
ggctaatttaacaccctttagaacc

SEQ ID NO: 61973 - DNA, 25 bp, probe
gagtcatggctaatttaacaccctt

SEQ ID NO: 61974 - DNA, 25 bp, probe
aatgaaattaacacaaaggaagtcc

SEQ ID NO: 61975 - DNA, 25 bp, probe
cctgcttgggaatgaaattaacaca

SEQ ID NO: 61976 - DNA, 25 bp, probe
tggctaatttaacaccctttagaac

SEQ ID NO: 61977 - DNA, 25 bp, probe
gctaatttaacaccctttagaacct

SEQ ID NO: 61978 - DNA, 25 bp, probe
aattaacacaaaggaagtccaacct

SEQ ID NO: 61979 - DNA, 25 bp, probe
atcctcaggtgatttgtatgctcat

SEQ ID NO: 61980 - DNA, 25 bp, probe
attcgagtcatggctaatttaacac

SEQ ID NO: 61981 - DNA, 25 bp, probe
cctcaggtgatttgtatgctcattg

SEQ ID NO: 61982 - DNA, 25 bp, probe
gacagtgacataagttccttcttct

SEQ ID NO: 61983 - DNA, 25 bp, probe
aataggaacttcagaccagattgtt

SEQ ID NO: 61984 - DNA, 25 bp, probe
acagtgacataagttccttcttctg

SEQ ID NO: 61985 - DNA, 25 bp, probe
ctaagacgagaaccttctgagagac

SEQ ID NO: 61986 - DNA, 25 bp, probe
cagtgacataagttccttcttctgc

SEQ ID NO: 61987 - DNA, 25 bp, probe
taccaggaggacagtgacataagtt

SEQ ID NO: 61988 - DNA, 25 bp, probe
ggacagtgacataagttccttcttc

SEQ ID NO: 61989 - DNA, 25 bp, probe
taagacgagaaccttctgagagact

SEQ ID NO: 61990 - DNA, 25 bp, probe
aaataggaacttcagaccagattgt

SEQ ID NO: 61991 - DNA, 25 bp, probe
cagaaataggaacttcagaccagat

SEQ ID NO: 61992 - DNA, 25 bp, probe
gaaataggaacttcagaccagattg

SEQ ID NO: 61993 - DNA, 25 bp, probe
agaaataggaacttcagaccagatt

SEQ ID NO: 61994 - DNA, 25 bp, probe
ctcagaaataggaacttcagaccag

SEQ ID NO: 61995 - DNA, 25 bp, probe
gactcagaaataggaacttcagacc

SEQ ID NO: 61996 - DNA, 25 bp, probe
tcagaaataggaacttcagaccaga

SEQ ID NO: 61997 - DNA, 25 bp, probe
actcagaaataggaacttcagacca

SEQ ID NO: 61998 - DNA, 25 bp, probe
tgactcagaaataggaacttcagac

SEQ ID NO: 61999 - DNA, 25 bp, probe
tgttgactcagaaataggaacttca

SEQ ID NO: 62000 - DNA, 25 bp, probe
ttgactcagaaataggaacttcaga

SEQ ID NO: 62001 - DNA, 25 bp, probe
gttgactcagaaataggaacttcag

SEQ ID NO: 62002 - DNA, 25 bp, probe
atgttgactcagaaataggaacttc

SEQ ID NO: 62003 - DNA, 25 bp, probe
cctaagacgagaaccttctgagaga

SEQ ID NO: 62004 - DNA, 25 bp, probe
tcctaagacgagaaccttctgagag

SEQ ID NO: 62005 - DNA, 25 bp, probe
ggctatgttgactcagaaataggaa

SEQ ID NO: 62006 - DNA, 25 bp, probe
agtaccaggaggacagtgacataag

SEQ ID NO: 62007 - DNA, 25 bp, probe
gagtaccaggaggacagtgacataa

SEQ ID NO: 62008 - DNA, 25 bp, probe
gctatgttgactcagaaataggaac

SEQ ID NO: 62009 - DNA, 25 bp, probe
ctcctaagacgagaaccttctgaga

SEQ ID NO: 62010 - DNA, 25 bp, probe
gtaccaggaggacagtgacataagt

SEQ ID NO: 62011 - DNA, 25 bp, probe
accaggaggacagtgacataagttc

SEQ ID NO: 62012 - DNA, 25 bp, probe
gggctatgttgactcagaaatagga

SEQ ID NO: 62013 - DNA, 25 bp, probe
aagacgagaaccttctgagagactc

SEQ ID NO: 62014 - DNA, 25 bp, probe
ctatgttgactcagaaataggaact

SEQ ID NO: 62015 - DNA, 25 bp, probe
tatgttgactcagaaataggaactt

SEQ ID NO: 62016 - DNA, 25 bp, probe
ataggaacttcagaccagattgttc

SEQ ID NO: 62017 - DNA, 25 bp, probe
cctcctaagacgagaaccttctgag

SEQ ID NO: 62018 - DNA, 25 bp, probe
agaccagattgttcctgagtaccag

SEQ ID NO: 62019 - DNA, 25 bp, probe
tgagtaccaggaggacagtgacata

SEQ ID NO: 62020 - DNA, 25 bp, probe
cagaccagattgttcctgagtacca

SEQ ID NO: 62021 - DNA, 25 bp, probe
cactactgggacctactctggaaag

SEQ ID NO: 62022 - DNA, 25 bp, probe
ctcaacactactgggacctactctg

SEQ ID NO: 62023 - DNA, 25 bp, probe
cgggctatgttgactcagaaatagg

SEQ ID NO: 62024 - DNA, 25 bp, probe
cttcagaccagattgttcctgagta

SEQ ID NO: 62025 - DNA, 25 bp, probe
actcacagctcctcagatcttactc

SEQ ID NO: 62026 - DNA, 25 bp, probe
gaaggtatggctgctgtttgattat

SEQ ID NO: 62027 - DNA, 25 bp, probe
aaggtatggctgctgtttgattatg

SEQ ID NO: 62028 - DNA, 25 bp, probe
gaattgaagcaccctaatgtgattg

SEQ ID NO: 62029 - DNA, 25 bp, probe
agaattgaagcaccctaatgtgatt

SEQ ID NO: 62030 - DNA, 25 bp, probe
gagaattgaagcaccctaatgtgat

SEQ ID NO: 62031 - DNA, 25 bp, probe
ggaaggtatggctgctgtttgatta

SEQ ID NO: 62032 - DNA, 25 bp, probe
ctttctcacagtgacaggaaggtat

SEQ ID NO: 62033 - DNA, 25 bp, probe
tttctcacagtgacaggaaggtatg

SEQ ID NO: 62034 - DNA, 25 bp, probe
ttctcacagtgacaggaaggtatgg

SEQ ID NO: 62035 - DNA, 25 bp, probe
aggtatggctgctgtttgattatgc

SEQ ID NO: 62036 - DNA, 25 bp, probe
ctaatgtgattgcattgcagaaggt

SEQ ID NO: 62037 - DNA, 25 bp, probe
cgagaattgaagcaccctaatgtga

SEQ ID NO: 62038 - DNA, 25 bp, probe
taatgtgattgcattgcagaaggtg

SEQ ID NO: 62039 - DNA, 25 bp, probe
cctaatgtgattgcattgcagaagg

SEQ ID NO: 62040 - DNA, 25 bp, probe
aattgaagcaccctaatgtgattgc

SEQ ID NO: 62041 - DNA, 25 bp, probe
aggaaggtatggctgctgtttgatt

SEQ ID NO: 62042 - DNA, 25 bp, probe
tttgcgagaattgaagcaccctaat

SEQ ID NO: 62043 - DNA, 25 bp, probe
gcgagaattgaagcaccctaatgtg

SEQ ID NO: 62044 - DNA, 25 bp, probe
ccctaatgtgattgcattgcagaag

SEQ ID NO: 62045 - DNA, 25 bp, probe
atgtgattgcattgcagaaggtgtt

SEQ ID NO: 62046 - DNA, 25 bp, probe
aatgtgattgcattgcagaaggtgt

SEQ ID NO: 62047 - DNA, 25 bp, probe
ttgattatgcagagcatgacttgtg

SEQ ID NO: 62048 - DNA, 25 bp, probe
gaagcaccctaatgtgattgcattg

SEQ ID NO: 62049 - DNA, 25 bp, probe
aggtgttcctttctcacagtgacag

SEQ ID NO: 62050 - DNA, 25 bp, probe
ttgcgagaattgaagcaccctaatg

SEQ ID NO: 62051 - DNA, 25 bp, probe
accctaatgtgattgcattgcagaa

SEQ ID NO: 62052 - DNA, 25 bp, probe
tgaagcaccctaatgtgattgcatt

SEQ ID NO: 62053 - DNA, 25 bp, probe
ttgaagcaccctaatgtgattgcat

SEQ ID NO: 62054 - DNA, 25 bp, probe
attgaagcaccctaatgtgattgca

SEQ ID NO: 62055 - DNA, 25 bp, probe
caggaaggtatggctgctgtttgat

SEQ ID NO: 62056 - DNA, 25 bp, probe
tgtgattgcattgcagaaggtgttc

SEQ ID NO: 62057 - DNA, 25 bp, probe
gtttgattatgcagagcatgacttg

SEQ ID NO: 62058 - DNA, 25 bp, probe
tttgattatgcagagcatgacttgt

SEQ ID NO: 62059 - DNA, 25 bp, probe
tgtttgattatgcagagcatgactt

SEQ ID NO: 62060 - DNA, 25 bp, probe
cagaaggtgttcctttctcacagtg

SEQ ID NO: 62061 - DNA, 25 bp, probe
ctgtttgattatgcagagcatgact

SEQ ID NO: 62062 - DNA, 25 bp, probe
gaaggtgttcctttctcacagtgac

SEQ ID NO: 62063 - DNA, 25 bp, probe
caccctaatgtgattgcattgcaga

SEQ ID NO: 62064 - DNA, 25 bp, probe
tgattatgcagagcatgacttgtgg

SEQ ID NO: 62065 - DNA, 25 bp, probe
agaaggtgttcctttctcacagtga

SEQ ID NO: 62066 - DNA, 25 bp, probe
ggtatggctgctgtttgattatgca

SEQ ID NO: 62067 - DNA, 25 bp, probe
cctttctcacagtgacaggaaggta

SEQ ID NO: 62068 - DNA, 25 bp, probe
gattgcattgcagaaggtgttcctt

SEQ ID NO: 62069 - DNA, 25 bp, probe
tgcgagaattgaagcaccctaatgt

SEQ ID NO: 62070 - DNA, 25 bp, probe
agcagtatatctacctccacgactt

SEQ ID NO: 62071 - DNA, 25 bp, probe
tatatctacctccacgactttctga

SEQ ID NO: 62072 - DNA, 25 bp, probe
gtatatctacctccacgactttctg

SEQ ID NO: 62073 - DNA, 25 bp, probe
atatctacctccacgactttctgaa

SEQ ID NO: 62074 - DNA, 25 bp, probe
agtatatctacctccacgactttct

SEQ ID NO: 62075 - DNA, 25 bp, probe
cagtatatctacctccacgactttc

SEQ ID NO: 62076 - DNA, 25 bp, probe
gagcagtatatctacctccacgact

SEQ ID NO: 62077 - DNA, 25 bp, probe
tatctacctccacgactttctgaac

SEQ ID NO: 62078 - DNA, 25 bp, probe
gcagtatatctacctccacgacttt

SEQ ID NO: 62079 - DNA, 25 bp, probe
ctgagtgtaccgtggatctgtttaa

SEQ ID NO: 62080 - DNA, 25 bp, probe
tgagtgtaccgtggatctgtttaac

SEQ ID NO: 62081 - DNA, 25 bp, probe
atctacctccacgactttctgaaca

SEQ ID NO: 62082 - DNA, 25 bp, probe
aacgctggagcagtatatctacctc

SEQ ID NO: 62083 - DNA, 25 bp, probe
caacgctggagcagtatatctacct

SEQ ID NO: 62084 - DNA, 25 bp, probe
actgagtgtaccgtggatctgttta

SEQ ID NO: 62085 - DNA, 25 bp, probe
tctacctccacgactttctgaacag

SEQ ID NO: 62086 - DNA, 25 bp, probe
ctacctccacgactttctgaacagt

SEQ ID NO: 62087 - DNA, 25 bp, probe
ccaacgctggagcagtatatctacc

SEQ ID NO: 62088 - DNA, 25 bp, probe
gactgagtgtaccgtggatctgttt

SEQ ID NO: 62089 - DNA, 25 bp, probe
tacctccacgactttctgaacagtg

SEQ ID NO: 62090 - DNA, 25 bp, probe
gagtgtaccgtggatctgtttaacg

SEQ ID NO: 62091 - DNA, 25 bp, probe
cccaacgctggagcagtatatctac

SEQ ID NO: 62092 - DNA, 25 bp, probe
ggagcagtatatctacctccacgac

SEQ ID NO: 62093 - DNA, 25 bp, probe
gtgtaccgtggatctgtttaacgtg

SEQ ID NO: 62094 - DNA, 25 bp, probe
agtgtaccgtggatctgtttaacgt

SEQ ID NO: 62095 - DNA, 25 bp, probe
tgtaccgtggatctgtttaacgtgg

SEQ ID NO: 62096 - DNA, 25 bp, probe
acgctggagcagtatatctacctcc

SEQ ID NO: 62097 - DNA, 25 bp, probe
cttatgaccgctatgtggctatatg

SEQ ID NO: 62098 - DNA, 25 bp, probe
ggttgtggaactcagatattcttct

SEQ ID NO: 62099 - DNA, 25 bp, probe
aggttgtggaactcagatattcttc

SEQ ID NO: 62100 - DNA, 25 bp, probe
caggttgtggaactcagatattctt

SEQ ID NO: 62101 - DNA, 25 bp, probe
ttatgaccgctatgtggctatatgt

SEQ ID NO: 62102 - DNA, 25 bp, probe
gttgtggaactcagatattcttcta

SEQ ID NO: 62103 - DNA, 25 bp, probe
aactcagatattcttctatgtgtcc

SEQ ID NO: 62104 - DNA, 25 bp, probe
ggaactcagatattcttctatgtgt

SEQ ID NO: 62105 - DNA, 25 bp, probe
tggaactcagatattcttctatgtg

SEQ ID NO: 62106 - DNA, 25 bp, probe
gtggaactcagatattcttctatgt

SEQ ID NO: 62107 - DNA, 25 bp, probe
tgtggaactcagatattcttctatg

SEQ ID NO: 62108 - DNA, 25 bp, probe
gcttatgaccgctatgtggctatat

SEQ ID NO: 62109 - DNA, 25 bp, probe
gcaggttgtggaactcagatattct

SEQ ID NO: 62110 - DNA, 25 bp, probe
tgttgtgtggtaatgctaatctttc

SEQ ID NO: 62111 - DNA, 25 bp, probe
tatgaccgctatgtggctatatgtc

SEQ ID NO: 62112 - DNA, 25 bp, probe
gatattcttctatgtgtccctgctt

SEQ ID NO: 62113 - DNA, 25 bp, probe
gttgtgtggtaatgctaatctttcc

SEQ ID NO: 62114 - DNA, 25 bp, probe
ctacttgtcatttgttgtgtggtaa

SEQ ID NO: 62115 - DNA, 25 bp, probe
atattcttctatgtgtccctgcttg

SEQ ID NO: 62116 - DNA, 25 bp, probe
ttgttgtgtggtaatgctaatcttt

SEQ ID NO: 62117 - DNA, 25 bp, probe
tttgttgtgtggtaatgctaatctt

SEQ ID NO: 62118 - DNA, 25 bp, probe
ggtaatgctaatctttccagtttca

SEQ ID NO: 62119 - DNA, 25 bp, probe
actacttgtcatttgttgtgtggta

SEQ ID NO: 62120 - DNA, 25 bp, probe
atttgttgtgtggtaatgctaatct

SEQ ID NO: 62121 - DNA, 25 bp, probe
aatgctaatctttccagtttcagtt

SEQ ID NO: 62122 - DNA, 25 bp, probe
tacttgtcatttgttgtgtggtaat

SEQ ID NO: 62123 - DNA, 25 bp, probe
ttgtggaactcagatattcttctat

SEQ ID NO: 62124 - DNA, 25 bp, probe
actcagatattcttctatgtgtccc

SEQ ID NO: 62125 - DNA, 25 bp, probe
agatattcttctatgtgtccctgct

SEQ ID NO: 62126 - DNA, 25 bp, probe
tctgggaagaaatctatctctctgg

SEQ ID NO: 62127 - DNA, 25 bp, probe
ctcagatattcttctatgtgtccct

SEQ ID NO: 62128 - DNA, 25 bp, probe
tgctaatctttccagtttcagttat

SEQ ID NO: 62129 - DNA, 25 bp, probe
atgctaatctttccagtttcagtta

SEQ ID NO: 62130 - DNA, 25 bp, probe
taatgctaatctttccagtttcagt

SEQ ID NO: 62131 - DNA, 25 bp, probe
gaactcagatattcttctatgtgtc

SEQ ID NO: 62132 - DNA, 25 bp, probe
tctactacggtgctgctatgttcat

SEQ ID NO: 62133 - DNA, 25 bp, probe
gtaatgctaatctttccagtttcag

SEQ ID NO: 62134 - DNA, 25 bp, probe
aagaaatctatctctctggcaggtt

SEQ ID NO: 62135 - DNA, 25 bp, probe
atactttcctattcccatgtccttc

SEQ ID NO: 62136 - DNA, 25 bp, probe
catactttcctattcccatgtcctt

SEQ ID NO: 62137 - DNA, 25 bp, probe
atcatactttcctattcccatgtcc

SEQ ID NO: 62138 - DNA, 25 bp, probe
gctaatctttccagtttcagttatc

SEQ ID NO: 62139 - DNA, 25 bp, probe
tattcttctatgtgtccctgcttgg

SEQ ID NO: 62140 - DNA, 25 bp, probe
aagactacttgtcatttgttgtgtg

SEQ ID NO: 62141 - DNA, 25 bp, probe
atttatgaaaagtaacctggctgct

SEQ ID NO: 62142 - DNA, 25 bp, probe
aatttatgaaaagtaacctggctgc

SEQ ID NO: 62143 - DNA, 25 bp, probe
aaatttatgaaaagtaacctggctg

SEQ ID NO: 62144 - DNA, 25 bp, probe
gacaggcttctccatcactgaactg

SEQ ID NO: 62145 - DNA, 25 bp, probe
gagacaggcttctccatcactgaac

SEQ ID NO: 62146 - DNA, 25 bp, probe
taaatttatgaaaagtaacctggct

SEQ ID NO: 62147 - DNA, 25 bp, probe
ttgttccttctgtctatctctgttg

SEQ ID NO: 62148 - DNA, 25 bp, probe
ttccttctgtctatctctgttgctg

SEQ ID NO: 62149 - DNA, 25 bp, probe
gttccttctgtctatctctgttgct

SEQ ID NO: 62150 - DNA, 25 bp, probe
tgttccttctgtctatctctgttgc

SEQ ID NO: 62151 - DNA, 25 bp, probe
tccttctgtctatctctgttgctga

SEQ ID NO: 62152 - DNA, 25 bp, probe
tttgttccttctgtctatctctgtt

SEQ ID NO: 62153 - DNA, 25 bp, probe
ccttctgtctatctctgttgctgag

SEQ ID NO: 62154 - DNA, 25 bp, probe
cccagaagtctttagttaaggtcat

SEQ ID NO: 62155 - DNA, 25 bp, probe
gatgaatggatacagacctctttgg

SEQ ID NO: 62156 - DNA, 25 bp, probe
agatgaatggatacagacctctttg

SEQ ID NO: 62157 - DNA, 25 bp, probe
cagatgaatggatacagacctcttt

SEQ ID NO: 62158 - DNA, 25 bp, probe
ccagatgaatggatacagacctctt

SEQ ID NO: 62159 - DNA, 25 bp, probe
acatttgacttcctctccatttaag

SEQ ID NO: 62160 - DNA, 25 bp, probe
aatacatttgacttcctctccattt

SEQ ID NO: 62161 - DNA, 25 bp, probe
ccagaagtctttagttaaggtcatt

SEQ ID NO: 62162 - DNA, 25 bp, probe
aaatacatttgacttcctctccatt

SEQ ID NO: 62163 - DNA, 25 bp, probe
catttaaggtctggaaatcaagtgg

SEQ ID NO: 62164 - DNA, 25 bp, probe
tttaaggtctggaaatcaagtggga

SEQ ID NO: 62165 - DNA, 25 bp, probe
atttaaggtctggaaatcaagtggg

SEQ ID NO: 62166 - DNA, 25 bp, probe
atgaatggatacagacctctttggg

SEQ ID NO: 62167 - DNA, 25 bp, probe
ttaaggtctggaaatcaagtgggag

SEQ ID NO: 62168 - DNA, 25 bp, probe
tacatttgacttcctctccatttaa

SEQ ID NO: 62169 - DNA, 25 bp, probe
ggtcattactaggccatatcttagg

SEQ ID NO: 62170 - DNA, 25 bp, probe
atttgacttcctctccatttaaggt

SEQ ID NO: 62171 - DNA, 25 bp, probe
tttgacttcctctccatttaaggtc

SEQ ID NO: 62172 - DNA, 25 bp, probe
catttgacttcctctccatttaagg

SEQ ID NO: 62173 - DNA, 25 bp, probe
atcttgactttaccttggcacttga

SEQ ID NO: 62174 - DNA, 25 bp, probe
atacatttgacttcctctccattta

SEQ ID NO: 62175 - DNA, 25 bp, probe
gcccagaagtctttagttaaggtca

SEQ ID NO: 62176 - DNA, 25 bp, probe
aggtcattactaggccatatcttag

SEQ ID NO: 62177 - DNA, 25 bp, probe
ttgacttcctctccatttaaggtct

SEQ ID NO: 62178 - DNA, 25 bp, probe
ttaccttggcacttgagacagaact

SEQ ID NO: 62179 - DNA, 25 bp, probe
ccatttaaggtctggaaatcaagtg

SEQ ID NO: 62180 - DNA, 25 bp, probe
gttaaggtcattactaggccatatc

SEQ ID NO: 62181 - DNA, 25 bp, probe
gatcttgactttaccttggcacttg

SEQ ID NO: 62182 - DNA, 25 bp, probe
ttaaggtcattactaggccatatct

SEQ ID NO: 62183 - DNA, 25 bp, probe
tgacttcctctccatttaaggtctg

SEQ ID NO: 62184 - DNA, 25 bp, probe
aaggtcattactaggccatatctta

SEQ ID NO: 62185 - DNA, 25 bp, probe
taaggtcattactaggccatatctt

SEQ ID NO: 62186 - DNA, 25 bp, probe
tagtcccagatgaatggatacagac

SEQ ID NO: 62187 - DNA, 25 bp, probe
gtagtcccagatgaatggatacaga

SEQ ID NO: 62188 - DNA, 25 bp, probe
agttaaggtcattactaggccatat

SEQ ID NO: 62189 - DNA, 25 bp, probe
ctttaccttggcacttgagacagaa

SEQ ID NO: 62190 - DNA, 25 bp, probe
cttgactttaccttggcacttgaga

SEQ ID NO: 62191 - DNA, 25 bp, probe
tatcatcctctcacctgtcattctt

SEQ ID NO: 62192 - DNA, 25 bp, probe
gaagcatcttactcctgaaccttag

SEQ ID NO: 62193 - DNA, 25 bp, probe
gtatcatcctctcacctgtcattct

SEQ ID NO: 62194 - DNA, 25 bp, probe
aagcatcttactcctgaaccttaga

SEQ ID NO: 62195 - DNA, 25 bp, probe
agaagcatcttactcctgaacctta

SEQ ID NO: 62196 - DNA, 25 bp, probe
tgtatcatcctctcacctgtcattc

SEQ ID NO: 62197 - DNA, 25 bp, probe
ctgtatcatcctctcacctgtcatt

SEQ ID NO: 62198 - DNA, 25 bp, probe
gagttatatgagtcaagatcctgcc

SEQ ID NO: 62199 - DNA, 25 bp, probe
tatatgagtcaagatcctgcctaac

SEQ ID NO: 62200 - DNA, 25 bp, probe
gttatatgagtcaagatcctgccta

SEQ ID NO: 62201 - DNA, 25 bp, probe
agttatatgagtcaagatcctgcct

SEQ ID NO: 62202 - DNA, 25 bp, probe
atcatcctctcacctgtcattcttc

SEQ ID NO: 62203 - DNA, 25 bp, probe
agcatcttactcctgaaccttagac

SEQ ID NO: 62204 - DNA, 25 bp, probe
ttatatgagtcaagatcctgcctaa

SEQ ID NO: 62205 - DNA, 25 bp, probe
catcttactcctgaaccttagacag

SEQ ID NO: 62206 - DNA, 25 bp, probe
tgagttatatgagtcaagatcctgc

SEQ ID NO: 62207 - DNA, 25 bp, probe
gcatcttactcctgaaccttagaca

SEQ ID NO: 62208 - DNA, 25 bp, probe
gagttatgtcactgatctgaaggtc

SEQ ID NO: 62209 - DNA, 25 bp, probe
ctgaaccttagacaggaagtattgt

SEQ ID NO: 62210 - DNA, 25 bp, probe
atatgagtcaagatcctgcctaacc

SEQ ID NO: 62211 - DNA, 25 bp, probe
tgaaccttagacaggaagtattgtt

SEQ ID NO: 62212 - DNA, 25 bp, probe
cactgatctgaaggtcactgttaag

SEQ ID NO: 62213 - DNA, 25 bp, probe
ttatgtcactgatctgaaggtcact

SEQ ID NO: 62214 - DNA, 25 bp, probe
gttatgtcactgatctgaaggtcac

SEQ ID NO: 62215 - DNA, 25 bp, probe
agttatgtcactgatctgaaggtca

SEQ ID NO: 62216 - DNA, 25 bp, probe
taactctagctgtatcatcctctca

SEQ ID NO: 62217 - DNA, 25 bp, probe
tcactgatctgaaggtcactgttaa

SEQ ID NO: 62218 - DNA, 25 bp, probe
gcataactctagctgtatcatcctc

SEQ ID NO: 62219 - DNA, 25 bp, probe
gcttctaccatgagttatatgagtc

SEQ ID NO: 62220 - DNA, 25 bp, probe
catcctctcacctgtcattcttctg

SEQ ID NO: 62221 - DNA, 25 bp, probe
cataactctagctgtatcatcctct

SEQ ID NO: 62222 - DNA, 25 bp, probe
gtcgcataactctagctgtatcatc

SEQ ID NO: 62223 - DNA, 25 bp, probe
aactctagctgtatcatcctctcac

SEQ ID NO: 62224 - DNA, 25 bp, probe
ccatgagttatatgagtcaagatcc

SEQ ID NO: 62225 - DNA, 25 bp, probe
tcatcctctcacctgtcattcttct

SEQ ID NO: 62226 - DNA, 25 bp, probe
gtggagttatgtcactgatctgaag

SEQ ID NO: 62227 - DNA, 25 bp, probe
ataactctagctgtatcatcctctc

SEQ ID NO: 62228 - DNA, 25 bp, probe
tatgtcactgatctgaaggtcactg

SEQ ID NO: 62229 - DNA, 25 bp, probe
ggagttatgtcactgatctgaaggt

SEQ ID NO: 62230 - DNA, 25 bp, probe
tggagttatgtcactgatctgaagg

SEQ ID NO: 62231 - DNA, 25 bp, probe
taagtcgcataactctagctgtatc

SEQ ID NO: 62232 - DNA, 25 bp, probe
cagaaagagagattggaaggagaaa

SEQ ID NO: 62233 - DNA, 25 bp, probe
actcttctatttcagggacttaggt

SEQ ID NO: 62234 - DNA, 25 bp, probe
actgatctgaaggtcactgttaagg

SEQ ID NO: 62235 - DNA, 25 bp, probe
aataatcgctgaagatccatgtctc

SEQ ID NO: 62236 - DNA, 25 bp, probe
caataatcgctgaagatccatgtct

SEQ ID NO: 62237 - DNA, 25 bp, probe
aacaataatcgctgaagatccatgt

SEQ ID NO: 62238 - DNA, 25 bp, probe
acaataatcgctgaagatccatgtc

SEQ ID NO: 62239 - DNA, 25 bp, probe
ataatcgctgaagatccatgtctcc

SEQ ID NO: 62240 - DNA, 25 bp, probe
aatggagtctaatggtcaagggaaa

SEQ ID NO: 62241 - DNA, 25 bp, probe
aaacaataatcgctgaagatccatg

SEQ ID NO: 62242 - DNA, 25 bp, probe
gaatggagtctaatggtcaagggaa

SEQ ID NO: 62243 - DNA, 25 bp, probe
taatcgctgaagatccatgtctcct

SEQ ID NO: 62244 - DNA, 25 bp, probe
ctcgaatggagtctaatggtcaagg

SEQ ID NO: 62245 - DNA, 25 bp, probe
taatggtcaagggaaaaggaaagat

SEQ ID NO: 62246 - DNA, 25 bp, probe
ctaatggtcaagggaaaaggaaaga

SEQ ID NO: 62247 - DNA, 25 bp, probe
tctaatggtcaagggaaaaggaaag

SEQ ID NO: 62248 - DNA, 25 bp, probe
gtctaatggtcaagggaaaaggaaa

SEQ ID NO: 62249 - DNA, 25 bp, probe
aatggtcaagggaaaaggaaagatg

SEQ ID NO: 62250 - DNA, 25 bp, probe
agtctaatggtcaagggaaaaggaa

SEQ ID NO: 62251 - DNA, 25 bp, probe
aatcgctgaagatccatgtctcctc

SEQ ID NO: 62252 - DNA, 25 bp, probe
atggagtctaatggtcaagggaaaa

SEQ ID NO: 62253 - DNA, 25 bp, probe
aaaacaataatcgctgaagatccat

SEQ ID NO: 62254 - DNA, 25 bp, probe
agactctcccaacctgtttcttctc

SEQ ID NO: 62255 - DNA, 25 bp, probe
cgaatggagtctaatggtcaaggga

SEQ ID NO: 62256 - DNA, 25 bp, probe
gagtctaatggtcaagggaaaagga

SEQ ID NO: 62257 - DNA, 25 bp, probe
tcgctgaagatccatgtctcctcta

SEQ ID NO: 62258 - DNA, 25 bp, probe
taaaacaataatcgctgaagatcca

SEQ ID NO: 62259 - DNA, 25 bp, probe
tggagtctaatggtcaagggaaaag

SEQ ID NO: 62260 - DNA, 25 bp, probe
tactggtaaggctgactctcactcc

SEQ ID NO: 62261 - DNA, 25 bp, probe
ggagtctaatggtcaagggaaaagg

SEQ ID NO: 62262 - DNA, 25 bp, probe
ataaaacaataatcgctgaagatcc

SEQ ID NO: 62263 - DNA, 25 bp, probe
cagactctcccaacctgtttcttct

SEQ ID NO: 62264 - DNA, 25 bp, probe
atcgctgaagatccatgtctcctct

SEQ ID NO: 62265 - DNA, 25 bp, probe
tcgaatggagtctaatggtcaaggg

SEQ ID NO: 62266 - DNA, 25 bp, probe
atggtcaagggaaaaggaaagatgc

SEQ ID NO: 62267 - DNA, 25 bp, probe
tggtcaaatataaaacaataatcgc

SEQ ID NO: 62268 - DNA, 25 bp, probe
tcaagggaaaaggaaagatgcgaac

SEQ ID NO: 62269 - DNA, 25 bp, probe
gtcaagggaaaaggaaagatgcgaa

SEQ ID NO: 62270 - DNA, 25 bp, probe
ggtcaaatataaaacaataatcgct

SEQ ID NO: 62271 - DNA, 25 bp, probe
caagggaaaaggaaagatgcgaaca

SEQ ID NO: 62272 - DNA, 25 bp, probe
ccagactctcccaacctgtttcttc

SEQ ID NO: 62273 - DNA, 25 bp, probe
gtcaaatataaaacaataatcgctg

SEQ ID NO: 62274 - DNA, 25 bp, probe
tataaaacaataatcgctgaagatc

SEQ ID NO: 62275 - DNA, 25 bp, probe
tcaaatataaaacaataatcgctga

SEQ ID NO: 62276 - DNA, 25 bp, probe
aatataaaacaataatcgctgaaga

SEQ ID NO: 62277 - DNA, 25 bp, probe
atataaaacaataatcgctgaagat

SEQ ID NO: 62278 - DNA, 25 bp, probe
atactctgcaagatgtgctcaggta

SEQ ID NO: 62279 - DNA, 25 bp, probe
caaatactctgcaagatgtgctcag

SEQ ID NO: 62280 - DNA, 25 bp, probe
tactctgcaagatgtgctcaggtac

SEQ ID NO: 62281 - DNA, 25 bp, probe
aatactctgcaagatgtgctcaggt

SEQ ID NO: 62282 - DNA, 25 bp, probe
catgttagcctggtcaagatgctga

SEQ ID NO: 62283 - DNA, 25 bp, probe
aaatactctgcaagatgtgctcagg

SEQ ID NO: 62284 - DNA, 25 bp, probe
gcaaatactctgcaagatgtgctca

SEQ ID NO: 62285 - DNA, 25 bp, probe
atgttagcctggtcaagatgctgac

SEQ ID NO: 62286 - DNA, 25 bp, probe
ggcaaatactctgcaagatgtgctc

SEQ ID NO: 62287 - DNA, 25 bp, probe
aggggcaaatactctgcaagatgtg

SEQ ID NO: 62288 - DNA, 25 bp, probe
caggggcaaatactctgcaagatgt

SEQ ID NO: 62289 - DNA, 25 bp, probe
agcaagatcagaatagtagcagatg

SEQ ID NO: 62290 - DNA, 25 bp, probe
gagcaagatcagaatagtagcagat

SEQ ID NO: 62291 - DNA, 25 bp, probe
gcaagatcagaatagtagcagatgt

SEQ ID NO: 62292 - DNA, 25 bp, probe
atgagcaagatcagaatagtagcag

SEQ ID NO: 62293 - DNA, 25 bp, probe
tatgagcaagatcagaatagtagca

SEQ ID NO: 62294 - DNA, 25 bp, probe
tgagcaagatcagaatagtagcaga

SEQ ID NO: 62295 - DNA, 25 bp, probe
ggcagaccaatacctcatacctaac

SEQ ID NO: 62296 - DNA, 25 bp, probe
gcagaccaatacctcatacctaacg

SEQ ID NO: 62297 - DNA, 25 bp, probe
caagatcagaatagtagcagatgta

SEQ ID NO: 62298 - DNA, 25 bp, probe
atacctcatacctaacgtctcactt

SEQ ID NO: 62299 - DNA, 25 bp, probe
aatacctcatacctaacgtctcact

SEQ ID NO: 62300 - DNA, 25 bp, probe
caatacctcatacctaacgtctcac

SEQ ID NO: 62301 - DNA, 25 bp, probe
atatgagcaagatcagaatagtagc

SEQ ID NO: 62302 - DNA, 25 bp, probe
tacctcatacctaacgtctcacttg

SEQ ID NO: 62303 - DNA, 25 bp, probe
ccaatacctcatacctaacgtctca

SEQ ID NO: 62304 - DNA, 25 bp, probe
accaatacctcatacctaacgtctc

SEQ ID NO: 62305 - DNA, 25 bp, probe
cagaccaatacctcatacctaacgt

SEQ ID NO: 62306 - DNA, 25 bp, probe
aatcagagccttaggactgttacag

SEQ ID NO: 62307 - DNA, 25 bp, probe
aagatcagaatagtagcagatgtaa

SEQ ID NO: 62308 - DNA, 25 bp, probe
aagtcacatatgagcaagatcagaa

SEQ ID NO: 62309 - DNA, 25 bp, probe
agtcacatatgagcaagatcagaat

SEQ ID NO: 62310 - DNA, 25 bp, probe
gaccaatacctcatacctaacgtct

SEQ ID NO: 62311 - DNA, 25 bp, probe
agaccaatacctcatacctaacgtc

SEQ ID NO: 62312 - DNA, 25 bp, probe
cggcagaccaatacctcatacctaa

SEQ ID NO: 62313 - DNA, 25 bp, probe
gaaatcagagccttaggactgttac

SEQ ID NO: 62314 - DNA, 25 bp, probe
cacatatgagcaagatcagaatagt

SEQ ID NO: 62315 - DNA, 25 bp, probe
gtcacatatgagcaagatcagaata

SEQ ID NO: 62316 - DNA, 25 bp, probe
aaatcagagccttaggactgttaca

SEQ ID NO: 62317 - DNA, 25 bp, probe
tcacatatgagcaagatcagaatag

SEQ ID NO: 62318 - DNA, 25 bp, probe
cgaaatcagagccttaggactgtta

SEQ ID NO: 62319 - DNA, 25 bp, probe
agatcagaatagtagcagatgtaaa

SEQ ID NO: 62320 - DNA, 25 bp, probe
aaagtcacatatgagcaagatcaga

SEQ ID NO: 62321 - DNA, 25 bp, probe
acctcatacctaacgtctcacttgg

SEQ ID NO: 62322 - DNA, 25 bp, probe
acatatgagcaagatcagaatagta

SEQ ID NO: 62323 - DNA, 25 bp, probe
aagaggcacctaaacagattcttct

SEQ ID NO: 62324 - DNA, 25 bp, probe
ctcatacctaacgtctcacttggct

SEQ ID NO: 62325 - DNA, 25 bp, probe
atcagagccttaggactgttacagc

SEQ ID NO: 62326 - DNA, 25 bp, probe
aaaagcagaatgtatcatcagagcg

SEQ ID NO: 62327 - DNA, 25 bp, probe
catatgagcaagatcagaatagtag

SEQ ID NO: 62328 - DNA, 25 bp, probe
agattcttctggacaaaagtcacat

SEQ ID NO: 62329 - DNA, 25 bp, probe
tcatacctaacgtctcacttggctg

SEQ ID NO: 62330 - DNA, 25 bp, probe
gattcttctggacaaaagtcacata

SEQ ID NO: 62331 - DNA, 25 bp, probe
ggaagaggcacctaaacagattctt

SEQ ID NO: 62332 - DNA, 25 bp, probe
gggaagaggcacctaaacagattct

SEQ ID NO: 62333 - DNA, 25 bp, probe
atatgtccaaccaagatatcccagg

SEQ ID NO: 62334 - DNA, 25 bp, probe
aaagagttgttgctgaactttcaaa

SEQ ID NO: 62335 - DNA, 25 bp, probe
aagatatcccaggacgtttgcttac

SEQ ID NO: 62336 - DNA, 25 bp, probe
caagatatcccaggacgtttgctta

SEQ ID NO: 62337 - DNA, 25 bp, probe
tatgtccaaccaagatatcccagga

SEQ ID NO: 62338 - DNA, 25 bp, probe
gatatgtccaaccaagatatcccag

SEQ ID NO: 62339 - DNA, 25 bp, probe
gatatcccaggacgtttgcttacac

SEQ ID NO: 62340 - DNA, 25 bp, probe
agatatcccaggacgtttgcttaca

SEQ ID NO: 62341 - DNA, 25 bp, probe
atatcccaggacgtttgcttacact

SEQ ID NO: 62342 - DNA, 25 bp, probe
attgggatatgtccaaccaagatat

SEQ ID NO: 62343 - DNA, 25 bp, probe
tattgggatatgtccaaccaagata

SEQ ID NO: 62344 - DNA, 25 bp, probe
caaccaagatatcccaggacgtttg

SEQ ID NO: 62345 - DNA, 25 bp, probe
gagttgttgctgaactttcaaaatg

SEQ ID NO: 62346 - DNA, 25 bp, probe
agagttgttgctgaactttcaaaat

SEQ ID NO: 62347 - DNA, 25 bp, probe
aagagttgttgctgaactttcaaaa

SEQ ID NO: 62348 - DNA, 25 bp, probe
aaaagagttgttgctgaactttcaa

SEQ ID NO: 62349 - DNA, 25 bp, probe
agttgttgctgaactttcaaaatga

SEQ ID NO: 62350 - DNA, 25 bp, probe
caaaagagttgttgctgaactttca

SEQ ID NO: 62351 - DNA, 25 bp, probe
ccaaaagagttgttgctgaactttc

SEQ ID NO: 62352 - DNA, 25 bp, probe
ttgggatatgtccaaccaagatatc

SEQ ID NO: 62353 - DNA, 25 bp, probe
ccaaccaagatatcccaggacgttt

SEQ ID NO: 62354 - DNA, 25 bp, probe
tatcccaggacgtttgcttacactg

SEQ ID NO: 62355 - DNA, 25 bp, probe
ccaagatatcccaggacgtttgctt

SEQ ID NO: 62356 - DNA, 25 bp, probe
gccaaaagagttgttgctgaacttt

SEQ ID NO: 62357 - DNA, 25 bp, probe
aaccaagatatcccaggacgtttgc

SEQ ID NO: 62358 - DNA, 25 bp, probe
atgtccaaccaagatatcccaggac

SEQ ID NO: 62359 - DNA, 25 bp, probe
ggccaaaagagttgttgctgaactt

SEQ ID NO: 62360 - DNA, 25 bp, probe
tttgcttacactggcctttgcaatg

SEQ ID NO: 62361 - DNA, 25 bp, probe
gtttgcttacactggcctttgcaat

SEQ ID NO: 62362 - DNA, 25 bp, probe
aagagagagaaggagagagacagta

SEQ ID NO: 62363 - DNA, 25 bp, probe
agagagagaaggagagagacagtag

SEQ ID NO: 62364 - DNA, 25 bp, probe
tagagaaagagagagagagaggaga

SEQ ID NO: 62365 - DNA, 25 bp, probe
aaagagagagagagaggagaaagag

SEQ ID NO: 62366 - DNA, 25 bp, probe
gaaagagagagagagaggagaaaga

SEQ ID NO: 62367 - DNA, 25 bp, probe
agaaagagagagagagaggagaaag

SEQ ID NO: 62368 - DNA, 25 bp, probe
gagaaagagagagagagaggagaaa

SEQ ID NO: 62369 - DNA, 25 bp, probe
gagagagaaggagagagacagtagc

SEQ ID NO: 62370 - DNA, 25 bp, probe
gagagagaggagaaagagagagaag

SEQ ID NO: 62371 - DNA, 25 bp, probe
gagaaagagagagaaggagagagac

SEQ ID NO: 62372 - DNA, 25 bp, probe
agagagagaggagaaagagagagaa

SEQ ID NO: 62373 - DNA, 25 bp, probe
aagagagagagagaggagaaagaga

SEQ ID NO: 62374 - DNA, 25 bp, probe
agagaaagagagagagagaggagaa

SEQ ID NO: 62375 - DNA, 25 bp, probe
ctagagaaagagagagagagaggag

SEQ ID NO: 62376 - DNA, 25 bp, probe
cttcacaacagacatttcctagaga

SEQ ID NO: 62377 - DNA, 25 bp, probe
gaaagagagagaaggagagagacag

SEQ ID NO: 62378 - DNA, 25 bp, probe
gagagagagaggagaaagagagaga

SEQ ID NO: 62379 - DNA, 25 bp, probe
agagagagagaggagaaagagagag

SEQ ID NO: 62380 - DNA, 25 bp, probe
gagagagagagaggagaaagagaga

SEQ ID NO: 62381 - DNA, 25 bp, probe
agagagagagagaggagaaagagag

SEQ ID NO: 62382 - DNA, 25 bp, probe
ttcctagagaaagagagagagagag

SEQ ID NO: 62383 - DNA, 25 bp, probe
ttcacaacagacatttcctagagaa

SEQ ID NO: 62384 - DNA, 25 bp, probe
agaaagagagagaaggagagagaca

SEQ ID NO: 62385 - DNA, 25 bp, probe
aaagagagagaaggagagagacagt

SEQ ID NO: 62386 - DNA, 25 bp, probe
ggagaaagagagagaaggagagaga

SEQ ID NO: 62387 - DNA, 25 bp, probe
aggagaaagagagagaaggagagag

SEQ ID NO: 62388 - DNA, 25 bp, probe
gaggagaaagagagagaaggagaga

SEQ ID NO: 62389 - DNA, 25 bp, probe
agaggagaaagagagagaaggagag

SEQ ID NO: 62390 - DNA, 25 bp, probe
gagaggagaaagagagagaaggaga

SEQ ID NO: 62391 - DNA, 25 bp, probe
agagaggagaaagagagagaaggag

SEQ ID NO: 62392 - DNA, 25 bp, probe
gagagaggagaaagagagagaagga

SEQ ID NO: 62393 - DNA, 25 bp, probe
agagagaggagaaagagagagaagg

SEQ ID NO: 62394 - DNA, 25 bp, probe
gcttcacaacagacatttcctagag

SEQ ID NO: 62395 - DNA, 25 bp, probe
gaaggagagagacagtagccaagag

SEQ ID NO: 62396 - DNA, 25 bp, probe
gagaaggagagagacagtagccaag

SEQ ID NO: 62397 - DNA, 25 bp, probe
tgcttcacaacagacatttcctaga

SEQ ID NO: 62398 - DNA, 25 bp, probe
gagagagacagtagccaagagaacc

SEQ ID NO: 62399 - DNA, 25 bp, probe
ggagagagacagtagccaagagaac

SEQ ID NO: 62400 - DNA, 25 bp, probe
cctagagaaagagagagagagagga

SEQ ID NO: 62401 - DNA, 25 bp, probe
tcctagagaaagagagagagagagg

SEQ ID NO: 62402 - DNA, 25 bp, probe
aggagagagacagtagccaagagaa

SEQ ID NO: 62403 - DNA, 25 bp, probe
aaggagagagacagtagccaagaga

SEQ ID NO: 62404 - DNA, 25 bp, probe
agaaggagagagacagtagccaaga

SEQ ID NO: 62405 - DNA, 25 bp, probe
agagaaggagagagacagtagccaa

SEQ ID NO: 62406 - DNA, 25 bp, probe
tgagcaggatagaatcacttgaatt

SEQ ID NO: 62407 - DNA, 25 bp, probe
atggatggacacatactggattcaa

SEQ ID NO: 62408 - DNA, 25 bp, probe
agatggatggacacatactggattc

SEQ ID NO: 62409 - DNA, 25 bp, probe
gatggatggacacatactggattca

SEQ ID NO: 62410 - DNA, 25 bp, probe
cacttcagatggatggacacatact

SEQ ID NO: 62411 - DNA, 25 bp, probe
acacttcagatggatggacacatac

SEQ ID NO: 62412 - DNA, 25 bp, probe
cacacttcagatggatggacacata

SEQ ID NO: 62413 - DNA, 25 bp, probe
tggattcaaagagatatgccgttat

SEQ ID NO: 62414 - DNA, 25 bp, probe
ggacacatactggattcaaagagat

SEQ ID NO: 62415 - DNA, 25 bp, probe
agtcattagagtcacagaaagaacg

SEQ ID NO: 62416 - DNA, 25 bp, probe
atactggattcaaagagatatgccg

SEQ ID NO: 62417 - DNA, 25 bp, probe
gcaagtcattagagtcacagaaaga

SEQ ID NO: 62418 - DNA, 25 bp, probe
ggattcaaagagatatgccgttatt

SEQ ID NO: 62419 - DNA, 25 bp, probe
ctggattcaaagagatatgccgtta

SEQ ID NO: 62420 - DNA, 25 bp, probe
cagatggatggacacatactggatt

SEQ ID NO: 62421 - DNA, 25 bp, probe
acttcagatggatggacacatactg

SEQ ID NO: 62422 - DNA, 25 bp, probe
atggacacatactggattcaaagag

SEQ ID NO: 62423 - DNA, 25 bp, probe
gatggacacatactggattcaaaga

SEQ ID NO: 62424 - DNA, 25 bp, probe
aagtcattagagtcacagaaagaac

SEQ ID NO: 62425 - DNA, 25 bp, probe
caagtcattagagtcacagaaagaa

SEQ ID NO: 62426 - DNA, 25 bp, probe
ttcaaagagatatgccgttattgga

SEQ ID NO: 62427 - DNA, 25 bp, probe
ttcagaggacacacttcagatggat

SEQ ID NO: 62428 - DNA, 25 bp, probe
attcagaggacacacttcagatgga

SEQ ID NO: 62429 - DNA, 25 bp, probe
gtcattagagtcacagaaagaacgg

SEQ ID NO: 62430 - DNA, 25 bp, probe
attcaaagagatatgccgttattgg

SEQ ID NO: 62431 - DNA, 25 bp, probe
tggacacatactggattcaaagaga

SEQ ID NO: 62432 - DNA, 25 bp, probe
tcaaagagatatgccgttattggag

SEQ ID NO: 62433 - DNA, 25 bp, probe
tcataaactacgaacaggtgaacat

SEQ ID NO: 62434 - DNA, 25 bp, probe
tactggattcaaagagatatgccgt

SEQ ID NO: 62435 - DNA, 25 bp, probe
cattcagaggacacacttcagatgg

SEQ ID NO: 62436 - DNA, 25 bp, probe
ggatggacacatactggattcaaag

SEQ ID NO: 62437 - DNA, 25 bp, probe
ctgtctgaactggaagagaagctaa

SEQ ID NO: 62438 - DNA, 25 bp, probe
gacacatactggattcaaagagata

SEQ ID NO: 62439 - DNA, 25 bp, probe
cttcagatggatggacacatactgg

SEQ ID NO: 62440 - DNA, 25 bp, probe
gattcaaagagatatgccgttattg

SEQ ID NO: 62441 - DNA, 25 bp, probe
cataaactacgaacaggtgaacatg

SEQ ID NO: 62442 - DNA, 25 bp, probe
tcagatggatggacacatactggat

SEQ ID NO: 62443 - DNA, 25 bp, probe
tggatggacacatactggattcaaa

SEQ ID NO: 62444 - DNA, 25 bp, probe
ataaactacgaacaggtgaacatgg

SEQ ID NO: 62445 - DNA, 25 bp, probe
ttcagatggatggacacatactgga

SEQ ID NO: 62446 - DNA, 25 bp, probe
gagagccatgttcataaactacgaa

SEQ ID NO: 62447 - DNA, 25 bp, probe
ttgagagagccatgttcataaacta

SEQ ID NO: 62448 - DNA, 25 bp, probe
tgagagagccatgttcataaactac

SEQ ID NO: 62449 - DNA, 25 bp, probe
tttgagagagccatgttcataaact

SEQ ID NO: 62450 - DNA, 25 bp, probe
aattagtcagcattggatcagatgg

SEQ ID NO: 62451 - DNA, 25 bp, probe
gcctcttactgttctctcagataat

SEQ ID NO: 62452 - DNA, 25 bp, probe
tagtcagcattggatcagatggtat

SEQ ID NO: 62453 - DNA, 25 bp, probe
ttagtcagcattggatcagatggta

SEQ ID NO: 62454 - DNA, 25 bp, probe
taattagtcagcattggatcagatg

SEQ ID NO: 62455 - DNA, 25 bp, probe
agtcagcattggatcagatggtatt

SEQ ID NO: 62456 - DNA, 25 bp, probe
attagtcagcattggatcagatggt

SEQ ID NO: 62457 - DNA, 25 bp, probe
ttaattagtcagcattggatcagat

SEQ ID NO: 62458 - DNA, 25 bp, probe
tccaccctataccctaaataactgt

SEQ ID NO: 62459 - DNA, 25 bp, probe
gaaacataggaaagtgggaacaaag

SEQ ID NO: 62460 - DNA, 25 bp, probe
aagaagtgggttatgtggaaagaaa

SEQ ID NO: 62461 - DNA, 25 bp, probe
aaagaagtgggttatgtggaaagaa

SEQ ID NO: 62462 - DNA, 25 bp, probe
agaaacataggaaagtgggaacaaa

SEQ ID NO: 62463 - DNA, 25 bp, probe
ccaccctataccctaaataactgtt

SEQ ID NO: 62464 - DNA, 25 bp, probe
aaacataggaaagtgggaacaaagt

SEQ ID NO: 62465 - DNA, 25 bp, probe
taccctaaataactgttctttccca

SEQ ID NO: 62466 - DNA, 25 bp, probe
tcatccaccctataccctaaataac

SEQ ID NO: 62467 - DNA, 25 bp, probe
gctcatccaccctataccctaaata

SEQ ID NO: 62468 - DNA, 25 bp, probe
gagaaacataggaaagtgggaacaa

SEQ ID NO: 62469 - DNA, 25 bp, probe
taaagtgaatgcgagaaacatagga

SEQ ID NO: 62470 - DNA, 25 bp, probe
atccaccctataccctaaataactg

SEQ ID NO: 62471 - DNA, 25 bp, probe
catccaccctataccctaaataact

SEQ ID NO: 62472 - DNA, 25 bp, probe
ttaaagtgaatgcgagaaacatagg

SEQ ID NO: 62473 - DNA, 25 bp, probe
ctcatccaccctataccctaaataa

SEQ ID NO: 62474 - DNA, 25 bp, probe
aacataggaaagtgggaacaaagtt

SEQ ID NO: 62475 - DNA, 25 bp, probe
aagtgaatgcgagaaacataggaaa

SEQ ID NO: 62476 - DNA, 25 bp, probe
aaagtgaatgcgagaaacataggaa

SEQ ID NO: 62477 - DNA, 25 bp, probe
accctataccctaaataactgttct

SEQ ID NO: 62478 - DNA, 25 bp, probe
caccctataccctaaataactgttc

SEQ ID NO: 62479 - DNA, 25 bp, probe
agtgaatgcgagaaacataggaaag

SEQ ID NO: 62480 - DNA, 25 bp, probe
acataggaaagtgggaacaaagttg

SEQ ID NO: 62481 - DNA, 25 bp, probe
tcagcattggatcagatggtattta

SEQ ID NO: 62482 - DNA, 25 bp, probe
tgaatgcgagaaacataggaaagtg

SEQ ID NO: 62483 - DNA, 25 bp, probe
gtgaatgcgagaaacataggaaagt

SEQ ID NO: 62484 - DNA, 25 bp, probe
ataccctaaataactgttctttccc

SEQ ID NO: 62485 - DNA, 25 bp, probe
cagcattggatcagatggtatttaa

SEQ ID NO: 62486 - DNA, 25 bp, probe
atacaatggacaggattatgaaagt

SEQ ID NO: 62487 - DNA, 25 bp, probe
gcaggaaagttattatacaatggac

SEQ ID NO: 62488 - DNA, 25 bp, probe
agcaggaaagttattatacaatgga

SEQ ID NO: 62489 - DNA, 25 bp, probe
acaatggacaggattatgaaagtct

SEQ ID NO: 62490 - DNA, 25 bp, probe
accctaaataactgttctttcccag

SEQ ID NO: 62491 - DNA, 25 bp, probe
gtcagcattggatcagatggtattt

SEQ ID NO: 62492 - DNA, 25 bp, probe
cataggaaagtgggaacaaagttgg

SEQ ID NO: 62493 - DNA, 25 bp, probe
gaatgcgagaaacataggaaagtgg

SEQ ID NO: 62494 - DNA, 25 bp, probe
aactgttgtcttgctcttgatagaa

SEQ ID NO: 62495 - DNA, 25 bp, probe
ctatcagtatcggcagaacattcct

SEQ ID NO: 62496 - DNA, 25 bp, probe
gacctatcagtatcggcagaacatt

SEQ ID NO: 62497 - DNA, 25 bp, probe
acctatcagtatcggcagaacattc

SEQ ID NO: 62498 - DNA, 25 bp, probe
caactgttgtcttgctcttgataga

SEQ ID NO: 62499 - DNA, 25 bp, probe
gaaatcacctgttatccttgtttgt

SEQ ID NO: 62500 - DNA, 25 bp, probe
cctatcagtatcggcagaacattcc

SEQ ID NO: 62501 - DNA, 25 bp, probe
tgaaatcacctgttatccttgtttg

SEQ ID NO: 62502 - DNA, 25 bp, probe
gttgaaatcacctgttatccttgtt

SEQ ID NO: 62503 - DNA, 25 bp, probe
ttgttgaaatcacctgttatccttg

SEQ ID NO: 62504 - DNA, 25 bp, probe
tgttgaaatcacctgttatccttgt

SEQ ID NO: 62505 - DNA, 25 bp, probe
ttgcttcttctcaggaatacagttt

SEQ ID NO: 62506 - DNA, 25 bp, probe
tttgcttcttctcaggaatacagtt

SEQ ID NO: 62507 - DNA, 25 bp, probe
gccatgtcatctggaataatacttg

SEQ ID NO: 62508 - DNA, 25 bp, probe
tgccatgtcatctggaataatactt

SEQ ID NO: 62509 - DNA, 25 bp, probe
ttgccatgtcatctggaataatact

SEQ ID NO: 62510 - DNA, 25 bp, probe
ttgtcttgctcttgatagaaactga

SEQ ID NO: 62511 - DNA, 25 bp, probe
gttgtcttgctcttgatagaaactg

SEQ ID NO: 62512 - DNA, 25 bp, probe
ctgttgtcttgctcttgatagaaac

SEQ ID NO: 62513 - DNA, 25 bp, probe
ttgaaatcacctgttatccttgttt

SEQ ID NO: 62514 - DNA, 25 bp, probe
tttgttgaaatcacctgttatcctt

SEQ ID NO: 62515 - DNA, 25 bp, probe
tatcagtatcggcagaacattcctg

SEQ ID NO: 62516 - DNA, 25 bp, probe
tgttgtcttgctcttgatagaaact

SEQ ID NO: 62517 - DNA, 25 bp, probe
actgttgtcttgctcttgatagaaa

SEQ ID NO: 62518 - DNA, 25 bp, probe
caatctgtatttgtggaggaaagtc

SEQ ID NO: 62519 - DNA, 25 bp, probe
atcacctgttatccttgtttgtaaa

SEQ ID NO: 62520 - DNA, 25 bp, probe
aatcacctgttatccttgtttgtaa

SEQ ID NO: 62521 - DNA, 25 bp, probe
aaatcacctgttatccttgtttgta

SEQ ID NO: 62522 - DNA, 25 bp, probe
ttcaggagaagggagcataagttta

SEQ ID NO: 62523 - DNA, 25 bp, probe
tcttgctcttgatagaaactgagaa

SEQ ID NO: 62524 - DNA, 25 bp, probe
gtcttgctcttgatagaaactgaga

SEQ ID NO: 62525 - DNA, 25 bp, probe
aggagaagggagcataagtttacag

SEQ ID NO: 62526 - DNA, 25 bp, probe
cttgctcttgatagaaactgagaag

SEQ ID NO: 62527 - DNA, 25 bp, probe
tgtcttgctcttgatagaaactgag

SEQ ID NO: 62528 - DNA, 25 bp, probe
tcaggagaagggagcataagtttac

SEQ ID NO: 62529 - DNA, 25 bp, probe
agcaatctgtatttgtggaggaaag

SEQ ID NO: 62530 - DNA, 25 bp, probe
acctgttatccttgtttgtaaactg

SEQ ID NO: 62531 - DNA, 25 bp, probe
cacctgttatccttgtttgtaaact

SEQ ID NO: 62532 - DNA, 25 bp, probe
tcacctgttatccttgtttgtaaac

SEQ ID NO: 62533 - DNA, 25 bp, probe
aaatgtcacaaactgtagcacaaat

SEQ ID NO: 62534 - DNA, 25 bp, probe
ccatgtcatctggaataatacttga

SEQ ID NO: 62535 - DNA, 25 bp, probe
cctgttatccttgtttgtaaactga

SEQ ID NO: 62536 - DNA, 25 bp, probe
taaatgtcacaaactgtagcacaaa

SEQ ID NO: 62537 - DNA, 25 bp, probe
ttaaatgtcacaaactgtagcacaa

SEQ ID NO: 62538 - DNA, 25 bp, probe
tagatcctaagctcttgactgtagt

SEQ ID NO: 62539 - DNA, 25 bp, probe
cttccatagatcctaagctcttgac

SEQ ID NO: 62540 - DNA, 25 bp, probe
ttccatagatcctaagctcttgact

SEQ ID NO: 62541 - DNA, 25 bp, probe
agatcctaagctcttgactgtagtt

SEQ ID NO: 62542 - DNA, 25 bp, probe
catagatcctaagctcttgactgta

SEQ ID NO: 62543 - DNA, 25 bp, probe
atagatcctaagctcttgactgtag

SEQ ID NO: 62544 - DNA, 25 bp, probe
tccatagatcctaagctcttgactg

SEQ ID NO: 62545 - DNA, 25 bp, probe
ccatagatcctaagctcttgactgt

SEQ ID NO: 62546 - DNA, 25 bp, probe
tttcattcccgaccctttctactat

SEQ ID NO: 62547 - DNA, 25 bp, probe
acagttgaaataaacagacagcaaa

SEQ ID NO: 62548 - DNA, 25 bp, probe
ttaagagacaactaagcctttcgtg

SEQ ID NO: 62549 - DNA, 25 bp, probe
ttaatgaagaaacaccaaagaaagc

SEQ ID NO: 62550 - DNA, 25 bp, probe
tacagttgaaataaacagacagcaa

SEQ ID NO: 62551 - DNA, 25 bp, probe
ataagcagttcagaattagggaatg

SEQ ID NO: 62552 - DNA, 25 bp, probe
accttccatctaagatttcttccag

SEQ ID NO: 62553 - DNA, 25 bp, probe
aaccttccatctaagatttcttcca

SEQ ID NO: 62554 - DNA, 25 bp, probe
cttccatctaagatttcttccaggg

SEQ ID NO: 62555 - DNA, 25 bp, probe
gtacagttgaaataaacagacagca

SEQ ID NO: 62556 - DNA, 25 bp, probe
gaaccttccatctaagatttcttcc

SEQ ID NO: 62557 - DNA, 25 bp, probe
gtttcattcccgaccctttctacta

SEQ ID NO: 62558 - DNA, 25 bp, probe
ttcattcccgaccctttctactatg

SEQ ID NO: 62559 - DNA, 25 bp, probe
ccatctaagatttcttccagggaat

SEQ ID NO: 62560 - DNA, 25 bp, probe
gactgtagtttagccagacttgttt

SEQ ID NO: 62561 - DNA, 25 bp, probe
atctaagatttcttccagggaatgc

SEQ ID NO: 62562 - DNA, 25 bp, probe
catctaagatttcttccagggaatg

SEQ ID NO: 62563 - DNA, 25 bp, probe
tgaacttaagagacaactaagcctt

SEQ ID NO: 62564 - DNA, 25 bp, probe
catgaacttaagagacaactaagcc

SEQ ID NO: 62565 - DNA, 25 bp, probe
atgaacttaagagacaactaagcct

SEQ ID NO: 62566 - DNA, 25 bp, probe
cttgactgtagtttagccagacttg

SEQ ID NO: 62567 - DNA, 25 bp, probe
tcttgactgtagtttagccagactt

SEQ ID NO: 62568 - DNA, 25 bp, probe
gatcctaagctcttgactgtagttt

SEQ ID NO: 62569 - DNA, 25 bp, probe
aatgaagaaacaccaaagaaagctg

SEQ ID NO: 62570 - DNA, 25 bp, probe
taatgaagaaacaccaaagaaagct

SEQ ID NO: 62571 - DNA, 25 bp, probe
acatgaacttaagagacaactaagc

SEQ ID NO: 62572 - DNA, 25 bp, probe
ccttccatctaagatttcttccagg

SEQ ID NO: 62573 - DNA, 25 bp, probe
gttcagaattagggaatgctggttt

SEQ ID NO: 62574 - DNA, 25 bp, probe
cgcccataatttcttccattgctag

SEQ ID NO: 62575 - DNA, 25 bp, probe
taagagacaactaagcctttcgtgt

SEQ ID NO: 62576 - DNA, 25 bp, probe
ctcttgactgtagtttagccagact

SEQ ID NO: 62577 - DNA, 25 bp, probe
atcctaagctcttgactgtagttta

SEQ ID NO: 62578 - DNA, 25 bp, probe
tgactgtagtttagccagacttgtt

SEQ ID NO: 62579 - DNA, 25 bp, probe
ttgactgtagtttagccagacttgt

SEQ ID NO: 62580 - DNA, 25 bp, probe
ttccatctaagatttcttccaggga

SEQ ID NO: 62581 - DNA, 25 bp, probe
tataagcagttcagaattagggaat

SEQ ID NO: 62582 - DNA, 25 bp, probe
gcttcttagagacacagtatcagag

SEQ ID NO: 62583 - DNA, 25 bp, probe
atgcttcttagagacacagtatcag

SEQ ID NO: 62584 - DNA, 25 bp, probe
tgcttcttagagacacagtatcaga

SEQ ID NO: 62585 - DNA, 25 bp, probe
cttcttagagacacagtatcagagt

SEQ ID NO: 62586 - DNA, 25 bp, probe
tatgcttcttagagacacagtatca

SEQ ID NO: 62587 - DNA, 25 bp, probe
ttcttagagacacagtatcagagtg

SEQ ID NO: 62588 - DNA, 25 bp, probe
ttatgcttcttagagacacagtatc

SEQ ID NO: 62589 - DNA, 25 bp, probe
ttagagacacagtatcagagtgctt

SEQ ID NO: 62590 - DNA, 25 bp, probe
tagagacacagtatcagagtgcttc

SEQ ID NO: 62591 - DNA, 25 bp, probe
cttagagacacagtatcagagtgct

SEQ ID NO: 62592 - DNA, 25 bp, probe
tcttagagacacagtatcagagtgc

SEQ ID NO: 62593 - DNA, 25 bp, probe
gagatgtgtctacagagaaggtcag

SEQ ID NO: 62594 - DNA, 25 bp, probe
gtggtaacttcctatagcagcaata

SEQ ID NO: 62595 - DNA, 25 bp, probe
tggtaacttcctatagcagcaatat

SEQ ID NO: 62596 - DNA, 25 bp, probe
taaagaagaaagacaagatgggaca

SEQ ID NO: 62597 - DNA, 25 bp, probe
ggtaacttcctatagcagcaatatg

SEQ ID NO: 62598 - DNA, 25 bp, probe
tatagcagcaatatgaagggaacag

SEQ ID NO: 62599 - DNA, 25 bp, probe
ggcattccaaataccagaacataaa

SEQ ID NO: 62600 - DNA, 25 bp, probe
aaagaagaaagacaagatgggacac

SEQ ID NO: 62601 - DNA, 25 bp, probe
caatatgaagggaacagtgggtaag

SEQ ID NO: 62602 - DNA, 25 bp, probe
ataaagaagaaagacaagatgggac

SEQ ID NO: 62603 - DNA, 25 bp, probe
gacacagtatcagagtgcttcatct

SEQ ID NO: 62604 - DNA, 25 bp, probe
agacacagtatcagagtgcttcatc

SEQ ID NO: 62605 - DNA, 25 bp, probe
gagacacagtatcagagtgcttcat

SEQ ID NO: 62606 - DNA, 25 bp, probe
atttagggaggatggtagtgtgttt

SEQ ID NO: 62607 - DNA, 25 bp, probe
gtaacttcctatagcagcaatatga

SEQ ID NO: 62608 - DNA, 25 bp, probe
tgtggtaacttcctatagcagcaat

SEQ ID NO: 62609 - DNA, 25 bp, probe
gatttagggaggatggtagtgtgtt

SEQ ID NO: 62610 - DNA, 25 bp, probe
aataaagaagaaagacaagatggga

SEQ ID NO: 62611 - DNA, 25 bp, probe
aatatgaagggaacagtgggtaagg

SEQ ID NO: 62612 - DNA, 25 bp, probe
atagcagcaatatgaagggaacagt

SEQ ID NO: 62613 - DNA, 25 bp, probe
tgtctacagagaaggtcaggtgatg

SEQ ID NO: 62614 - DNA, 25 bp, probe
gtgtctacagagaaggtcaggtgat

SEQ ID NO: 62615 - DNA, 25 bp, probe
agtctgtggtaacttcctatagcag

SEQ ID NO: 62616 - DNA, 25 bp, probe
agatgtgtctacagagaaggtcagg

SEQ ID NO: 62617 - DNA, 25 bp, probe
ggagatgtgtctacagagaaggtca

SEQ ID NO: 62618 - DNA, 25 bp, probe
cactaagtctgtggtaacttcctat

SEQ ID NO: 62619 - DNA, 25 bp, probe
agagacacagtatcagagtgcttca

SEQ ID NO: 62620 - DNA, 25 bp, probe
taacttcctatagcagcaatatgaa

SEQ ID NO: 62621 - DNA, 25 bp, probe
ttagtccagtgatgtccatgtcaga

SEQ ID NO: 62622 - DNA, 25 bp, probe
gatgtgtctacagagaaggtcaggt

SEQ ID NO: 62623 - DNA, 25 bp, probe
aaataaagaagaaagacaagatggg

SEQ ID NO: 62624 - DNA, 25 bp, probe
atatgaagggaacagtgggtaagga

SEQ ID NO: 62625 - DNA, 25 bp, probe
ctatagcagcaatatgaagggaaca

SEQ ID NO: 62626 - DNA, 25 bp, probe
aattatcctacagatgatgcgagtg

SEQ ID NO: 62627 - DNA, 25 bp, probe
gtaaccattcttcaggagatgatga

SEQ ID NO: 62628 - DNA, 25 bp, probe
tgtaaccattcttcaggagatgatg

SEQ ID NO: 62629 - DNA, 25 bp, probe
ctgtaaccattcttcaggagatgat

SEQ ID NO: 62630 - DNA, 25 bp, probe
attatcctacagatgatgcgagtgg

SEQ ID NO: 62631 - DNA, 25 bp, probe
cctagagtctgtaagtacactgttc

SEQ ID NO: 62632 - DNA, 25 bp, probe
acctagagtctgtaagtacactgtt

SEQ ID NO: 62633 - DNA, 25 bp, probe
tagagtctgtaagtacactgttcac

SEQ ID NO: 62634 - DNA, 25 bp, probe
ctagagtctgtaagtacactgttca

SEQ ID NO: 62635 - DNA, 25 bp, probe
cacctagagtctgtaagtacactgt

SEQ ID NO: 62636 - DNA, 25 bp, probe
aagagattgactatgatggcagtgg

SEQ ID NO: 62637 - DNA, 25 bp, probe
atgaaagagattgactatgatggca

SEQ ID NO: 62638 - DNA, 25 bp, probe
caggagatgatgaaagagattgact

SEQ ID NO: 62639 - DNA, 25 bp, probe
ccacctagagtctgtaagtacactg

SEQ ID NO: 62640 - DNA, 25 bp, probe
gatgaaagagattgactatgatggc

SEQ ID NO: 62641 - DNA, 25 bp, probe
tgaaagagattgactatgatggcag

SEQ ID NO: 62642 - DNA, 25 bp, probe
aaattatcctacagatgatgcgagt

SEQ ID NO: 62643 - DNA, 25 bp, probe
gaaggacattggtactctgaaggac

SEQ ID NO: 62644 - DNA, 25 bp, probe
gagtctgtaagtacactgttcacga

SEQ ID NO: 62645 - DNA, 25 bp, probe
agagtctgtaagtacactgttcacg

SEQ ID NO: 62646 - DNA, 25 bp, probe
aggagatgatgaaagagattgacta

SEQ ID NO: 62647 - DNA, 25 bp, probe
gctgtaaccattcttcaggagatga

SEQ ID NO: 62648 - DNA, 25 bp, probe
tcaggagatgatgaaagagattgac

SEQ ID NO: 62649 - DNA, 25 bp, probe
tgatgaaagagattgactatgatgg

SEQ ID NO: 62650 - DNA, 25 bp, probe
gaaagagattgactatgatggcagt

SEQ ID NO: 62651 - DNA, 25 bp, probe
agtctgtaagtacactgttcacgac

SEQ ID NO: 62652 - DNA, 25 bp, probe
aaagagattgactatgatggcagtg

SEQ ID NO: 62653 - DNA, 25 bp, probe
ggagatgatgaaagagattgactat

SEQ ID NO: 62654 - DNA, 25 bp, probe
taaccattcttcaggagatgatgaa

SEQ ID NO: 62655 - DNA, 25 bp, probe
gagctgtaaccattcttcaggagat

SEQ ID NO: 62656 - DNA, 25 bp, probe
ggaaggacattggtactctgaagga

SEQ ID NO: 62657 - DNA, 25 bp, probe
gccacctagagtctgtaagtacact

SEQ ID NO: 62658 - DNA, 25 bp, probe
agctgtaaccattcttcaggagatg

SEQ ID NO: 62659 - DNA, 25 bp, probe
ctgtaagtacactgttcacgaccag

SEQ ID NO: 62660 - DNA, 25 bp, probe
gtctgtaagtacactgttcacgacc

SEQ ID NO: 62661 - DNA, 25 bp, probe
agatgatgaaagagattgactatga

SEQ ID NO: 62662 - DNA, 25 bp, probe
tgccacctagagtctgtaagtacac

SEQ ID NO: 62663 - DNA, 25 bp, probe
gtgccacctagagtctgtaagtaca

SEQ ID NO: 62664 - DNA, 25 bp, probe
tcggaaggacattggtactctgaag

SEQ ID NO: 62665 - DNA, 25 bp, probe
ctcggaaggacattggtactctgaa

SEQ ID NO: 62666 - DNA, 25 bp, probe
tctgtaagtacactgttcacgacca

SEQ ID NO: 62667 - DNA, 25 bp, probe
gaatacctggattgggatgtgtctg

SEQ ID NO: 62668 - DNA, 25 bp, probe
ctgaatacctggattgggatgtgtc

SEQ ID NO: 62669 - DNA, 25 bp, probe
gagatgatgaaagagattgactatg

SEQ ID NO: 62670 - DNA, 25 bp, probe
ggaggcatcagttgctatatattaa

SEQ ID NO: 62671 - DNA, 25 bp, probe
gtcgttaccagagatttacccatcg

SEQ ID NO: 62672 - DNA, 25 bp, probe
aaagggtcgttaccagagatttacc

SEQ ID NO: 62673 - DNA, 25 bp, probe
gggaggcatcagttgctatatatta

SEQ ID NO: 62674 - DNA, 25 bp, probe
taattccgatactagtttgctttgc

SEQ ID NO: 62675 - DNA, 25 bp, probe
aattccgatactagtttgctttgct

SEQ ID NO: 62676 - DNA, 25 bp, probe
ggtcgttaccagagatttacccatc

SEQ ID NO: 62677 - DNA, 25 bp, probe
tgggaggcatcagttgctatatatt

SEQ ID NO: 62678 - DNA, 25 bp, probe
aaaaggaaaagtacatgatgatgcg

SEQ ID NO: 62679 - DNA, 25 bp, probe
tcgttaccagagatttacccatcgg

SEQ ID NO: 62680 - DNA, 25 bp, probe
ctgggaggcatcagttgctatatat

SEQ ID NO: 62681 - DNA, 25 bp, probe
attccgatactagtttgctttgctg

SEQ ID NO: 62682 - DNA, 25 bp, probe
gatactagtttgctttgctgaccaa

SEQ ID NO: 62683 - DNA, 25 bp, probe
attatttgaccggatctacacccac

SEQ ID NO: 62684 - DNA, 25 bp, probe
cattatttgaccggatctacaccca

SEQ ID NO: 62685 - DNA, 25 bp, probe
ttaaaagggtcgttaccagagattt

SEQ ID NO: 62686 - DNA, 25 bp, probe
gaggcattatttgaccggatctaca

SEQ ID NO: 62687 - DNA, 25 bp, probe
taaaagggtcgttaccagagattta

SEQ ID NO: 62688 - DNA, 25 bp, probe
ttaattccgatactagtttgctttg

SEQ ID NO: 62689 - DNA, 25 bp, probe
aaaagggtcgttaccagagatttac

SEQ ID NO: 62690 - DNA, 25 bp, probe
aaaggaaaagtacatgatgatgcgg

SEQ ID NO: 62691 - DNA, 25 bp, probe
aggcattatttgaccggatctacac

SEQ ID NO: 62692 - DNA, 25 bp, probe
ttccgatactagtttgctttgctga

SEQ ID NO: 62693 - DNA, 25 bp, probe
tttaaaagggtcgttaccagagatt

SEQ ID NO: 62694 - DNA, 25 bp, probe
tccgatactagtttgctttgctgac

SEQ ID NO: 62695 - DNA, 25 bp, probe
cgaggcattatttgaccggatctac

SEQ ID NO: 62696 - DNA, 25 bp, probe
gaggcatcagttgctatatattaaa

SEQ ID NO: 62697 - DNA, 25 bp, probe
tactagtttgctttgctgaccaaat

SEQ ID NO: 62698 - DNA, 25 bp, probe
atactagtttgctttgctgaccaaa

SEQ ID NO: 62699 - DNA, 25 bp, probe
attaattccgatactagtttgcttt

SEQ ID NO: 62700 - DNA, 25 bp, probe
ctagtttgctttgctgaccaaatgc

SEQ ID NO: 62701 - DNA, 25 bp, probe
cgatactagtttgctttgctgacca

SEQ ID NO: 62702 - DNA, 25 bp, probe
gcattatttgaccggatctacaccc

SEQ ID NO: 62703 - DNA, 25 bp, probe
ggcattatttgaccggatctacacc

SEQ ID NO: 62704 - DNA, 25 bp, probe
gaaaagtacatgatgatgcgggact

SEQ ID NO: 62705 - DNA, 25 bp, probe
aaggaaaagtacatgatgatgcggg

SEQ ID NO: 62706 - DNA, 25 bp, probe
aaaagtacatgatgatgcgggactg

SEQ ID NO: 62707 - DNA, 25 bp, probe
actagtttgctttgctgaccaaatg

SEQ ID NO: 62708 - DNA, 25 bp, probe
ccgatactagtttgctttgctgacc

SEQ ID NO: 62709 - DNA, 25 bp, probe
ttatttgaccggatctacacccacc

SEQ ID NO: 62710 - DNA, 25 bp, probe
gctgggaggcatcagttgctatata

SEQ ID NO: 62711 - DNA, 25 bp, probe
ggaaaagtacatgatgatgcgggac

SEQ ID NO: 62712 - DNA, 25 bp, probe
aggaaaagtacatgatgatgcggga

SEQ ID NO: 62713 - DNA, 25 bp, probe
aaacacaaagtgtataaatctgagt

SEQ ID NO: 62714 - DNA, 25 bp, probe
gctctgctatgactataagtttgac

SEQ ID NO: 62715 - DNA, 25 bp, probe
caaggtatatcaaccattcgtgtgc

SEQ ID NO: 62716 - DNA, 25 bp, probe
gcaaggtatatcaaccattcgtgtg

SEQ ID NO: 62717 - DNA, 25 bp, probe
gaggttaaacggaatcacagaatgg

SEQ ID NO: 62718 - DNA, 25 bp, probe
ttgaagatgaccagcacaagattcc

SEQ ID NO: 62719 - DNA, 25 bp, probe
attgagtacatcgggactatcattc

SEQ ID NO: 62720 - DNA, 25 bp, probe
cattgagtacatcgggactatcatt

SEQ ID NO: 62721 - DNA, 25 bp, probe
tttgaagatgaccagcacaagattc

SEQ ID NO: 62722 - DNA, 25 bp, probe
ctttgaagatgaccagcacaagatt

SEQ ID NO: 62723 - DNA, 25 bp, probe
ggttaaacggaatcacagaatggtc

SEQ ID NO: 62724 - DNA, 25 bp, probe
tcattgagtacatcgggactatcat

SEQ ID NO: 62725 - DNA, 25 bp, probe
cgaggttaaacggaatcacagaatg

SEQ ID NO: 62726 - DNA, 25 bp, probe
tgatttcctcagtcctttaggttaa

SEQ ID NO: 62727 - DNA, 25 bp, probe
aggttaaacggaatcacagaatggt

SEQ ID NO: 62728 - DNA, 25 bp, probe
ctctgctatgactataagtttgact

SEQ ID NO: 62729 - DNA, 25 bp, probe
gatttcctcagtcctttaggttaaa

SEQ ID NO: 62730 - DNA, 25 bp, probe
gtttgactttgaagatgaccagcac

SEQ ID NO: 62731 - DNA, 25 bp, probe
ttgagtacatcgggactatcattcg

SEQ ID NO: 62732 - DNA, 25 bp, probe
actttgaagatgaccagcacaagat

SEQ ID NO: 62733 - DNA, 25 bp, probe
gtcattgagtacatcgggactatca

SEQ ID NO: 62734 - DNA, 25 bp, probe
ctaattgtgtggctgaagtggtgac

SEQ ID NO: 62735 - DNA, 25 bp, probe
tttgactttgaagatgaccagcaca

SEQ ID NO: 62736 - DNA, 25 bp, probe
agtttgactttgaagatgaccagca

SEQ ID NO: 62737 - DNA, 25 bp, probe
aaacgaagtagccaacaggaaagag

SEQ ID NO: 62738 - DNA, 25 bp, probe
gaaacgaagtagccaacaggaaaga

SEQ ID NO: 62739 - DNA, 25 bp, probe
gttaaacggaatcacagaatggtcc

SEQ ID NO: 62740 - DNA, 25 bp, probe
cgcaaggtatatcaaccattcgtgt

SEQ ID NO: 62741 - DNA, 25 bp, probe
ttgactttgaagatgaccagcacaa

SEQ ID NO: 62742 - DNA, 25 bp, probe
cgaagtagccaacaggaaagagaag

SEQ ID NO: 62743 - DNA, 25 bp, probe
ggtcattgagtacatcgggactatc

SEQ ID NO: 62744 - DNA, 25 bp, probe
aaggtatatcaaccattcgtgtgca

SEQ ID NO: 62745 - DNA, 25 bp, probe
gagaggacacaaaattatcatcagc

SEQ ID NO: 62746 - DNA, 25 bp, probe
ttaaacggaatcacagaatggtcca

SEQ ID NO: 62747 - DNA, 25 bp, probe
gactttgaagatgaccagcacaaga

SEQ ID NO: 62748 - DNA, 25 bp, probe
gaagtagccaacaggaaagagaagc

SEQ ID NO: 62749 - DNA, 25 bp, probe
gaatcacagaatggtccagcacttt

SEQ ID NO: 62750 - DNA, 25 bp, probe
taagtttgactttgaagatgaccag

SEQ ID NO: 62751 - DNA, 25 bp, probe
taattgtgtggctgaagtggtgact

SEQ ID NO: 62752 - DNA, 25 bp, probe
tgactttgaagatgaccagcacaag

SEQ ID NO: 62753 - DNA, 25 bp, probe
agagaggacacaaaattatcatcag

SEQ ID NO: 62754 - DNA, 25 bp, probe
gagagaggacacaaaattatcatca

SEQ ID NO: 62755 - DNA, 25 bp, probe
tggtcattgagtacatcgggactat

SEQ ID NO: 62756 - DNA, 25 bp, probe
atggtcattgagtacatcgggacta

SEQ ID NO: 62757 - DNA, 25 bp, probe
taaacggaatcacagaatggtccag

SEQ ID NO: 62758 - DNA, 25 bp, probe
atgtggtcctggaaatcccttattg

SEQ ID NO: 62759 - DNA, 25 bp, probe
gtggtcctggaaatcccttattgag

SEQ ID NO: 62760 - DNA, 25 bp, probe
catgtggtcctggaaatcccttatt

SEQ ID NO: 62761 - DNA, 25 bp, probe
tgtggtcctggaaatcccttattga

SEQ ID NO: 62762 - DNA, 25 bp, probe
tggtcctggaaatcccttattgagg

SEQ ID NO: 62763 - DNA, 25 bp, probe
gcatgtggtcctggaaatcccttat

SEQ ID NO: 62764 - DNA, 25 bp, probe
taacagcactttctcccagcacttc

SEQ ID NO: 62765 - DNA, 25 bp, probe
ctaacagcactttctcccagcactt

SEQ ID NO: 62766 - DNA, 25 bp, probe
cagactggcccatccatcttatgag

SEQ ID NO: 62767 - DNA, 25 bp, probe
caacctccaggatttggaacaactc

SEQ ID NO: 62768 - DNA, 25 bp, probe
ctggcccatccatcttatgaggatc

SEQ ID NO: 62769 - DNA, 25 bp, probe
aacctccaggatttggaacaactcc

SEQ ID NO: 62770 - DNA, 25 bp, probe
ccaacctccaggatttggaacaact

SEQ ID NO: 62771 - DNA, 25 bp, probe
actggcccatccatcttatgaggat

SEQ ID NO: 62772 - DNA, 25 bp, probe
cctccaggatttggaacaactccag

SEQ ID NO: 62773 - DNA, 25 bp, probe
cccatccatcttatgaggatcccag

SEQ ID NO: 62774 - DNA, 25 bp, probe
ctagccaacctccaggatttggaac

SEQ ID NO: 62775 - DNA, 25 bp, probe
catccatcttatgaggatcccagcc

SEQ ID NO: 62776 - DNA, 25 bp, probe
ccatccatcttatgaggatcccagc

SEQ ID NO: 62777 - DNA, 25 bp, probe
atccatcttatgaggatcccagcca

SEQ ID NO: 62778 - DNA, 25 bp, probe
gaagttgccatctaccttgggatca

SEQ ID NO: 62779 - DNA, 25 bp, probe
aaactgacccgaagttgccatctac

SEQ ID NO: 62780 - DNA, 25 bp, probe
caaactgacccgaagttgccatcta

SEQ ID NO: 62781 - DNA, 25 bp, probe
ttgctaataattctgttcctggctg

SEQ ID NO: 62782 - DNA, 25 bp, probe
ggtggttaagtcttattagtgtcta

SEQ ID NO: 62783 - DNA, 25 bp, probe
gtaaattgtaatcctttctccagcc

SEQ ID NO: 62784 - DNA, 25 bp, probe
gggtggttaagtcttattagtgtct

SEQ ID NO: 62785 - DNA, 25 bp, probe
ctttgctaataattctgttcctggc

SEQ ID NO: 62786 - DNA, 25 bp, probe
tgtaaattgtaatcctttctccagc

SEQ ID NO: 62787 - DNA, 25 bp, probe
tttgctaataattctgttcctggct

SEQ ID NO: 62788 - DNA, 25 bp, probe
caggataggaaatgggtgtgtttag

SEQ ID NO: 62789 - DNA, 25 bp, probe
taaattgtaatcctttctccagccc

SEQ ID NO: 62790 - DNA, 25 bp, probe
tctttgctaataattctgttcctgg

SEQ ID NO: 62791 - DNA, 25 bp, probe
gataggaaatgggtgtgtttagtgg

SEQ ID NO: 62792 - DNA, 25 bp, probe
ggataggaaatgggtgtgtttagtg

SEQ ID NO: 62793 - DNA, 25 bp, probe
aggataggaaatgggtgtgtttagt

SEQ ID NO: 62794 - DNA, 25 bp, probe
cactggtctgtaaattgtaatcctt

SEQ ID NO: 62795 - DNA, 25 bp, probe
aaattaagtgggctggagaagaatg

SEQ ID NO: 62796 - DNA, 25 bp, probe
acactggtctgtaaattgtaatcct

SEQ ID NO: 62797 - DNA, 25 bp, probe
actggtctgtaaattgtaatccttt

SEQ ID NO: 62798 - DNA, 25 bp, probe
tgctaataattctgttcctggctgc

SEQ ID NO: 62799 - DNA, 25 bp, probe
tggtctgtaaattgtaatcctttct

SEQ ID NO: 62800 - DNA, 25 bp, probe
gacactggtctgtaaattgtaatcc

SEQ ID NO: 62801 - DNA, 25 bp, probe
ggacactggtctgtaaattgtaatc

SEQ ID NO: 62802 - DNA, 25 bp, probe
gggacactggtctgtaaattgtaat

SEQ ID NO: 62803 - DNA, 25 bp, probe
aagtgtcaataaaccacaagttctg

SEQ ID NO: 62804 - DNA, 25 bp, probe
cagaagtgtcaataaaccacaagtt

SEQ ID NO: 62805 - DNA, 25 bp, probe
gaagtgtcaataaaccacaagttct

SEQ ID NO: 62806 - DNA, 25 bp, probe
agaagtgtcaataaaccacaagttc

SEQ ID NO: 62807 - DNA, 25 bp, probe
tctgtaaattgtaatcctttctcca

SEQ ID NO: 62808 - DNA, 25 bp, probe
ctggtctgtaaattgtaatcctttc

SEQ ID NO: 62809 - DNA, 25 bp, probe
ataggaaatgggtgtgtttagtggg

SEQ ID NO: 62810 - DNA, 25 bp, probe
ggatgactgtcttccctattcttag

SEQ ID NO: 62811 - DNA, 25 bp, probe
aggatgactgtcttccctattctta

SEQ ID NO: 62812 - DNA, 25 bp, probe
gtctgtaaattgtaatcctttctcc

SEQ ID NO: 62813 - DNA, 25 bp, probe
ggtctgtaaattgtaatcctttctc

SEQ ID NO: 62814 - DNA, 25 bp, probe
agggacactggtctgtaaattgtaa

SEQ ID NO: 62815 - DNA, 25 bp, probe
aaattgtaatcctttctccagccca

SEQ ID NO: 62816 - DNA, 25 bp, probe
ttctttgctaataattctgttcctg

SEQ ID NO: 62817 - DNA, 25 bp, probe
aattaagtgggctggagaagaatgg

SEQ ID NO: 62818 - DNA, 25 bp, probe
aattgtaatcctttctccagcccag

SEQ ID NO: 62819 - DNA, 25 bp, probe
caggatgactgtcttccctattctt

SEQ ID NO: 62820 - DNA, 25 bp, probe
gcagaagtgtcaataaaccacaagt

SEQ ID NO: 62821 - DNA, 25 bp, probe
cagggacactggtctgtaaattgta

SEQ ID NO: 62822 - DNA, 25 bp, probe
ctgtaaattgtaatcctttctccag

SEQ ID NO: 62823 - DNA, 25 bp, probe
ctatcacctggtggtctgattcata

SEQ ID NO: 62824 - DNA, 25 bp, probe
gtggttaagtcttattagtgtctat

SEQ ID NO: 62825 - DNA, 25 bp, probe
ccagaggtgttagaagataatgact

SEQ ID NO: 62826 - DNA, 25 bp, probe
ggtgttagaagataatgactatggc

SEQ ID NO: 62827 - DNA, 25 bp, probe
aggtgttagaagataatgactatgg

SEQ ID NO: 62828 - DNA, 25 bp, probe
acagatgatgaggatggtatggact

SEQ ID NO: 62829 - DNA, 25 bp, probe
cacagatgatgaggatggtatggac

SEQ ID NO: 62830 - DNA, 25 bp, probe
cagaggtgttagaagataatgacta

SEQ ID NO: 62831 - DNA, 25 bp, probe
accagaggtgttagaagataatgac

SEQ ID NO: 62832 - DNA, 25 bp, probe
tatgaaatgatgtgtgggaggttac

SEQ ID NO: 62833 - DNA, 25 bp, probe
gtatgaaatgatgtgtgggaggtta

SEQ ID NO: 62834 - DNA, 25 bp, probe
cagatgatgaggatggtatggactg

SEQ ID NO: 62835 - DNA, 25 bp, probe
tctttatggcatagtatgtttcctg

SEQ ID NO: 62836 - DNA, 25 bp, probe
atgtatgaaatgatgtgtgggaggt

SEQ ID NO: 62837 - DNA, 25 bp, probe
gaggtgttagaagataatgactatg

SEQ ID NO: 62838 - DNA, 25 bp, probe
tgtatgaaatgatgtgtgggaggtt

SEQ ID NO: 62839 - DNA, 25 bp, probe
agaggtgttagaagataatgactat

SEQ ID NO: 62840 - DNA, 25 bp, probe
gttagaagataatgactatggccga

SEQ ID NO: 62841 - DNA, 25 bp, probe
ttagaagataatgactatggccgag

SEQ ID NO: 62842 - DNA, 25 bp, probe
tgttagaagataatgactatggccg

SEQ ID NO: 62843 - DNA, 25 bp, probe
ttctttatggcatagtatgtttcct

SEQ ID NO: 62844 - DNA, 25 bp, probe
agatgatgaggatggtatggactgc

SEQ ID NO: 62845 - DNA, 25 bp, probe
gtgttagaagataatgactatggcc

SEQ ID NO: 62846 - DNA, 25 bp, probe
catgtatgaaatgatgtgtgggagg

SEQ ID NO: 62847 - DNA, 25 bp, probe
aggtaagatttctttatggcatagt

SEQ ID NO: 62848 - DNA, 25 bp, probe
tagaagataatgactatggccgagc

SEQ ID NO: 62849 - DNA, 25 bp, probe
tttctttatggcatagtatgtttcc

SEQ ID NO: 62850 - DNA, 25 bp, probe
atgaaatgatgtgtgggaggttacc

SEQ ID NO: 62851 - DNA, 25 bp, probe
atagtatgtttcctgcccacagatg

SEQ ID NO: 62852 - DNA, 25 bp, probe
catagtatgtttcctgcccacagat

SEQ ID NO: 62853 - DNA, 25 bp, probe
ccacagatgatgaggatggtatgga

SEQ ID NO: 62854 - DNA, 25 bp, probe
gtatggactgcatggacaatgagag

SEQ ID NO: 62855 - DNA, 25 bp, probe
atgatgaggatggtatggactgcat

SEQ ID NO: 62856 - DNA, 25 bp, probe
catttccctcaattttcctactctg

SEQ ID NO: 62857 - DNA, 25 bp, probe
aaggtaagatttctttatggcatag

SEQ ID NO: 62858 - DNA, 25 bp, probe
ttgtcatgtatgaaatgatgtgtgg

SEQ ID NO: 62859 - DNA, 25 bp, probe
ggttgtcatgtatgaaatgatgtgt

SEQ ID NO: 62860 - DNA, 25 bp, probe
ctttatggcatagtatgtttcctgc

SEQ ID NO: 62861 - DNA, 25 bp, probe
atttccctcaattttcctactctgc

SEQ ID NO: 62862 - DNA, 25 bp, probe
gcatttccctcaattttcctactct

SEQ ID NO: 62863 - DNA, 25 bp, probe
gggttgtcatgtatgaaatgatgtg

SEQ ID NO: 62864 - DNA, 25 bp, probe
tcatgtatgaaatgatgtgtgggag

SEQ ID NO: 62865 - DNA, 25 bp, probe
gttgtcatgtatgaaatgatgtgtg

SEQ ID NO: 62866 - DNA, 25 bp, probe
gtcatgtatgaaatgatgtgtggga

SEQ ID NO: 62867 - DNA, 25 bp, probe
gataatgactatggccgagcagtag

SEQ ID NO: 62868 - DNA, 25 bp, probe
gaatctaatgctggacaaagatggc

SEQ ID NO: 62869 - DNA, 25 bp, probe
caataatctccttcttgctgaccaa

SEQ ID NO: 62870 - DNA, 25 bp, probe
aacaataatctccttcttgctgacc

SEQ ID NO: 62871 - DNA, 25 bp, probe
acaataatctccttcttgctgacca

SEQ ID NO: 62872 - DNA, 25 bp, probe
tacagttcagacaggacaaagtatg

SEQ ID NO: 62873 - DNA, 25 bp, probe
tattgagatttccgatgagttcctg

SEQ ID NO: 62874 - DNA, 25 bp, probe
atattgagatttccgatgagttcct

SEQ ID NO: 62875 - DNA, 25 bp, probe
aagacaagaaggctttatacccatc

SEQ ID NO: 62876 - DNA, 25 bp, probe
gacaagaaggctttatacccatcta

SEQ ID NO: 62877 - DNA, 25 bp, probe
gaaggctttatacccatctagtgtt

SEQ ID NO: 62878 - DNA, 25 bp, probe
aaggctttatacccatctagtgttg

SEQ ID NO: 62879 - DNA, 25 bp, probe
acaaacaataatctccttcttgctg

SEQ ID NO: 62880 - DNA, 25 bp, probe
aataatctccttcttgctgaccaaa

SEQ ID NO: 62881 - DNA, 25 bp, probe
aaacaataatctccttcttgctgac

SEQ ID NO: 62882 - DNA, 25 bp, probe
caaacaataatctccttcttgctga

SEQ ID NO: 62883 - DNA, 25 bp, probe
aacaaacaataatctccttcttgct

SEQ ID NO: 62884 - DNA, 25 bp, probe
gtacagttcagacaggacaaagtat

SEQ ID NO: 62885 - DNA, 25 bp, probe
aagaaggctttatacccatctagtg

SEQ ID NO: 62886 - DNA, 25 bp, probe
caagaaggctttatacccatctagt

SEQ ID NO: 62887 - DNA, 25 bp, probe
acaagaaggctttatacccatctag

SEQ ID NO: 62888 - DNA, 25 bp, probe
gatcatcattgctgaagtcgtgaac

SEQ ID NO: 62889 - DNA, 25 bp, probe
agatcatcattgctgaagtcgtgaa

SEQ ID NO: 62890 - DNA, 25 bp, probe
aagatcatcattgctgaagtcgtga

SEQ ID NO: 62891 - DNA, 25 bp, probe
agacaagaaggctttatacccatct

SEQ ID NO: 62892 - DNA, 25 bp, probe
agaaggctttatacccatctagtgt

SEQ ID NO: 62893 - DNA, 25 bp, probe
aatcaagtcagaggttccattggtg

SEQ ID NO: 62894 - DNA, 25 bp, probe
aaattaaccgtgctaatgggaagag

SEQ ID NO: 62895 - DNA, 25 bp, probe
tatgaagagaaactagaagccagtg

SEQ ID NO: 62896 - DNA, 25 bp, probe
atcatcattgctgaagtcgtgaaca

SEQ ID NO: 62897 - DNA, 25 bp, probe
tttatgaagagaaactagaagccag

SEQ ID NO: 62898 - DNA, 25 bp, probe
attaaccgtgctaatgggaagagta

SEQ ID NO: 62899 - DNA, 25 bp, probe
acaaatcaagtcagaggttccattg

SEQ ID NO: 62900 - DNA, 25 bp, probe
ttatgaagagaaactagaagccagt

SEQ ID NO: 62901 - DNA, 25 bp, probe
cttacctggaaatcaacaagaaccc

SEQ ID NO: 62902 - DNA, 25 bp, probe
caggacaaagtatgtgtgaagttta

SEQ ID NO: 62903 - DNA, 25 bp, probe
acaggacaaagtatgtgtgaagttt

SEQ ID NO: 62904 - DNA, 25 bp, probe
tggatgtgaccaaggtatcaatgag

SEQ ID NO: 62905 - DNA, 25 bp, probe
tcatcattgctgaagtcgtgaacaa

SEQ ID NO: 62906 - DNA, 25 bp, probe
gatgagttcctggtacagttcagac

SEQ ID NO: 62907 - DNA, 25 bp, probe
aagtataagaaactcaaagatgcca

SEQ ID NO: 62908 - DNA, 25 bp, probe
gacaggacaaagtatgtgtgaagtt

SEQ ID NO: 62909 - DNA, 25 bp, probe
gaagagaaactagaagccagtgaac

SEQ ID NO: 62910 - DNA, 25 bp, probe
gtggatgtgaccaaggtatcaatga

SEQ ID NO: 62911 - DNA, 25 bp, probe
atgaagagaaactagaagccagtga

SEQ ID NO: 62912 - DNA, 25 bp, probe
taatgggaagagtacatctcggatt

SEQ ID NO: 62913 - DNA, 25 bp, probe
ctactgcttgatgtaactaggactc

SEQ ID NO: 62914 - DNA, 25 bp, probe
tctactgcttgatgtaactaggact

SEQ ID NO: 62915 - DNA, 25 bp, probe
atctactgcttgatgtaactaggac

SEQ ID NO: 62916 - DNA, 25 bp, probe
tactgcttgatgtaactaggactcc

SEQ ID NO: 62917 - DNA, 25 bp, probe
aacctaatcattccaccaagttatt

SEQ ID NO: 62918 - DNA, 25 bp, probe
tatctactgcttgatgtaactagga

SEQ ID NO: 62919 - DNA, 25 bp, probe
gtatctactgcttgatgtaactagg

SEQ ID NO: 62920 - DNA, 25 bp, probe
tgtatctactgcttgatgtaactag

SEQ ID NO: 62921 - DNA, 25 bp, probe
tgcagttgatgacatgaagattaag

SEQ ID NO: 62922 - DNA, 25 bp, probe
tcattatgtatctactgcttgatgt

SEQ ID NO: 62923 - DNA, 25 bp, probe
gatgcagttgatgacatgaagatta

SEQ ID NO: 62924 - DNA, 25 bp, probe
atgtatctactgcttgatgtaacta

SEQ ID NO: 62925 - DNA, 25 bp, probe
tatgtatctactgcttgatgtaact

SEQ ID NO: 62926 - DNA, 25 bp, probe
atgcagttgatgacatgaagattaa

SEQ ID NO: 62927 - DNA, 25 bp, probe
acctaatcattccaccaagttattt

SEQ ID NO: 62928 - DNA, 25 bp, probe
caactctgtactcttctcccatatt

SEQ ID NO: 62929 - DNA, 25 bp, probe
ggatgcagttgatgacatgaagatt

SEQ ID NO: 62930 - DNA, 25 bp, probe
atgaaggcaaatgttggatacaaat

SEQ ID NO: 62931 - DNA, 25 bp, probe
gatgaaggcaaatgttggatacaaa

SEQ ID NO: 62932 - DNA, 25 bp, probe
tacagatgaaggcaaatgttggata

SEQ ID NO: 62933 - DNA, 25 bp, probe
aaacctaatcattccaccaagttat

SEQ ID NO: 62934 - DNA, 25 bp, probe
tgaaggcaaatgttggatacaaata

SEQ ID NO: 62935 - DNA, 25 bp, probe
tccaccaagttatttaacatccatt

SEQ ID NO: 62936 - DNA, 25 bp, probe
ttccaccaagttatttaacatccat

SEQ ID NO: 62937 - DNA, 25 bp, probe
attccaccaagttatttaacatcca

SEQ ID NO: 62938 - DNA, 25 bp, probe
agatgaaggcaaatgttggatacaa

SEQ ID NO: 62939 - DNA, 25 bp, probe
gtactcttctcccatattattcagc

SEQ ID NO: 62940 - DNA, 25 bp, probe
ttatgtatctactgcttgatgtaac

SEQ ID NO: 62941 - DNA, 25 bp, probe
cattccaccaagttatttaacatcc

SEQ ID NO: 62942 - DNA, 25 bp, probe
ctgcttgatgtaactaggactcctc

SEQ ID NO: 62943 - DNA, 25 bp, probe
acaactctgtactcttctcccatat

SEQ ID NO: 62944 - DNA, 25 bp, probe
ccattaatcagatgcgtaaagacaa

SEQ ID NO: 62945 - DNA, 25 bp, probe
tccattaatcagatgcgtaaagaca

SEQ ID NO: 62946 - DNA, 25 bp, probe
aactctgtactcttctcccatatta

SEQ ID NO: 62947 - DNA, 25 bp, probe
ctcctatcaaagccctacaactctg

SEQ ID NO: 62948 - DNA, 25 bp, probe
atcagtacagatgaaggcaaatgtt

SEQ ID NO: 62949 - DNA, 25 bp, probe
atccattaatcagatgcgtaaagac

SEQ ID NO: 62950 - DNA, 25 bp, probe
actcttctcccatattattcagctc

SEQ ID NO: 62951 - DNA, 25 bp, probe
cagatgaaggcaaatgttggataca

SEQ ID NO: 62952 - DNA, 25 bp, probe
acagatgaaggcaaatgttggatac

SEQ ID NO: 62953 - DNA, 25 bp, probe
ctcttctcccatattattcagctcg

SEQ ID NO: 62954 - DNA, 25 bp, probe
gaaggcaaatgttggatacaaataa

SEQ ID NO: 62955 - DNA, 25 bp, probe
aaacagattatgaagtgagggatat

SEQ ID NO: 62956 - DNA, 25 bp, probe
actctgtactcttctcccatattat

SEQ ID NO: 62957 - DNA, 25 bp, probe
gattcaagagtattctcacttctgg

SEQ ID NO: 62958 - DNA, 25 bp, probe
gaatgtagtgtcagaggatactgtg

SEQ ID NO: 62959 - DNA, 25 bp, probe
aactggaatgtagtgtcagaggata

SEQ ID NO: 62960 - DNA, 25 bp, probe
ctggaatgtagtgtcagaggatact

SEQ ID NO: 62961 - DNA, 25 bp, probe
atgtccattcaagcagtcattctct

SEQ ID NO: 62962 - DNA, 25 bp, probe
ggaatgtagtgtcagaggatactgt

SEQ ID NO: 62963 - DNA, 25 bp, probe
tggaatgtagtgtcagaggatactg

SEQ ID NO: 62964 - DNA, 25 bp, probe
actggaatgtagtgtcagaggatac

SEQ ID NO: 62965 - DNA, 25 bp, probe
aatgtagtgtcagaggatactgtgg

SEQ ID NO: 62966 - DNA, 25 bp, probe
agattcaagagtattctcacttctg

SEQ ID NO: 62967 - DNA, 25 bp, probe
agaccaaggaataacattctgtagt

SEQ ID NO: 62968 - DNA, 25 bp, probe
aagtgttaatgctgcaagtaatctc

SEQ ID NO: 62969 - DNA, 25 bp, probe
gaagtgttaatgctgcaagtaatct

SEQ ID NO: 62970 - DNA, 25 bp, probe
agaagtgttaatgctgcaagtaatc

SEQ ID NO: 62971 - DNA, 25 bp, probe
agtgttaatgctgcaagtaatctct

SEQ ID NO: 62972 - DNA, 25 bp, probe
aagaagtgttaatgctgcaagtaat

SEQ ID NO: 62973 - DNA, 25 bp, probe
cacaaggacaagaacaaagtatgag

SEQ ID NO: 62974 - DNA, 25 bp, probe
ttgactaccttatctggtgttaaga

SEQ ID NO: 62975 - DNA, 25 bp, probe
tcaagattcaagagtattctcactt

SEQ ID NO: 62976 - DNA, 25 bp, probe
ttcaagattcaagagtattctcact

SEQ ID NO: 62977 - DNA, 25 bp, probe
accaaggaataacattctgtagttc

SEQ ID NO: 62978 - DNA, 25 bp, probe
gaccaaggaataacattctgtagtt

SEQ ID NO: 62979 - DNA, 25 bp, probe
gtgttaatgctgcaagtaatctctt

SEQ ID NO: 62980 - DNA, 25 bp, probe
ctcacttctcactgtaaacattagc

SEQ ID NO: 62981 - DNA, 25 bp, probe
aagaccaaggaataacattctgtag

SEQ ID NO: 62982 - DNA, 25 bp, probe
caagattcaagagtattctcacttc

SEQ ID NO: 62983 - DNA, 25 bp, probe
tggtagtgagaatatcagctctgtt

SEQ ID NO: 62984 - DNA, 25 bp, probe
gcctcacttctcactgtaaacatta

SEQ ID NO: 62985 - DNA, 25 bp, probe
ccacaaggacaagaacaaagtatga

SEQ ID NO: 62986 - DNA, 25 bp, probe
cctcacttctcactgtaaacattag

SEQ ID NO: 62987 - DNA, 25 bp, probe
ttactagagaggatttgaatgtggg

SEQ ID NO: 62988 - DNA, 25 bp, probe
aggaatgtgaatgctatatactctt

SEQ ID NO: 62989 - DNA, 25 bp, probe
aagattcaagagtattctcacttct

SEQ ID NO: 62990 - DNA, 25 bp, probe
tactagagaggatttgaatgtggga

SEQ ID NO: 62991 - DNA, 25 bp, probe
atattagagagggactggtagtgag

SEQ ID NO: 62992 - DNA, 25 bp, probe
acaaggacaagaacaaagtatgagc

SEQ ID NO: 62993 - DNA, 25 bp, probe
gactggtagtgagaatatcagctct

SEQ ID NO: 62994 - DNA, 25 bp, probe
gtaagaaatgtccattcaagcagtc

SEQ ID NO: 62995 - DNA, 25 bp, probe
attcaagagtattctcacttctggg

SEQ ID NO: 62996 - DNA, 25 bp, probe
tgactaccttatctggtgttaagat

SEQ ID NO: 62997 - DNA, 25 bp, probe
caagagtattctcacttctgggtta

SEQ ID NO: 62998 - DNA, 25 bp, probe
gagtattctcacttctgggttatca

SEQ ID NO: 62999 - DNA, 25 bp, probe
taagaaatgtccattcaagcagtca

SEQ ID NO: 63000 - DNA, 25 bp, probe
tagagagggactggtagtgagaata

SEQ ID NO: 63001 - DNA, 25 bp, probe
gaagaagagaacttacttgtggtgt

SEQ ID NO: 63002 - DNA, 25 bp, probe
tgaagaagagaacttacttgtggtg

SEQ ID NO: 63003 - DNA, 25 bp, probe
gtgaagaagagaacttacttgtggt

SEQ ID NO: 63004 - DNA, 25 bp, probe
tgtgaagaagagaacttacttgtgg

SEQ ID NO: 63005 - DNA, 25 bp, probe
aagaagagaacttacttgtggtgtg

SEQ ID NO: 63006 - DNA, 25 bp, probe
atgtgaagaagagaacttacttgtg

SEQ ID NO: 63007 - DNA, 25 bp, probe
ctggatctggtgttacaatggaatt

SEQ ID NO: 63008 - DNA, 25 bp, probe
cagatcaccttcagtcttatgtcat

SEQ ID NO: 63009 - DNA, 25 bp, probe
tacacagatcaccttcagtcttatg

SEQ ID NO: 63010 - DNA, 25 bp, probe
ttatcctggatctggtgttacaatg

SEQ ID NO: 63011 - DNA, 25 bp, probe
gttatcctggatctggtgttacaat

SEQ ID NO: 63012 - DNA, 25 bp, probe
agatcaccttcagtcttatgtcatt

SEQ ID NO: 63013 - DNA, 25 bp, probe
aatacacagatcaccttcagtctta

SEQ ID NO: 63014 - DNA, 25 bp, probe
ttcactattcaggacattctggatt

SEQ ID NO: 63015 - DNA, 25 bp, probe
aattcactattcaggacattctgga

SEQ ID NO: 63016 - DNA, 25 bp, probe
attcactattcaggacattctggat

SEQ ID NO: 63017 - DNA, 25 bp, probe
atacacagatcaccttcagtcttat

SEQ ID NO: 63018 - DNA, 25 bp, probe
ttcaggacattctggattattgttc

SEQ ID NO: 63019 - DNA, 25 bp, probe
tcactattcaggacattctggatta

SEQ ID NO: 63020 - DNA, 25 bp, probe
tcaggacattctggattattgttcc

SEQ ID NO: 63021 - DNA, 25 bp, probe
cacagatcaccttcagtcttatgtc

SEQ ID NO: 63022 - DNA, 25 bp, probe
agaagagaacttacttgtggtgtgg

SEQ ID NO: 63023 - DNA, 25 bp, probe
tatgtgaagaagagaacttacttgt

SEQ ID NO: 63024 - DNA, 25 bp, probe
attcaggacattctggattattgtt

SEQ ID NO: 63025 - DNA, 25 bp, probe
acagatcaccttcagtcttatgtca

SEQ ID NO: 63026 - DNA, 25 bp, probe
tatcctggatctggtgttacaatgg

SEQ ID NO: 63027 - DNA, 25 bp, probe
acacagatcaccttcagtcttatgt

SEQ ID NO: 63028 - DNA, 25 bp, probe
cactattcaggacattctggattat

SEQ ID NO: 63029 - DNA, 25 bp, probe
atgtggagaaagtagcaaatgaaag

SEQ ID NO: 63030 - DNA, 25 bp, probe
ataagcactttgaaggtttgatagc

SEQ ID NO: 63031 - DNA, 25 bp, probe
tgttatcctggatctggtgttacaa

SEQ ID NO: 63032 - DNA, 25 bp, probe
aatgtggagaaagtagcaaatgaaa

SEQ ID NO: 63033 - DNA, 25 bp, probe
tcagaggagtatttgttaatgtgga

SEQ ID NO: 63034 - DNA, 25 bp, probe
gaaagtagcaaatgaaagccagaag

SEQ ID NO: 63035 - DNA, 25 bp, probe
cctggatctggtgttacaatggaat

SEQ ID NO: 63036 - DNA, 25 bp, probe
cagaggagtatttgttaatgtggag

SEQ ID NO: 63037 - DNA, 25 bp, probe
aaagtagcaaatgaaagccagaaga

SEQ ID NO: 63038 - DNA, 25 bp, probe
agaaagtagcaaatgaaagccagaa

SEQ ID NO: 63039 - DNA, 25 bp, probe
agaggagtatttgttaatgtggaga

SEQ ID NO: 63040 - DNA, 25 bp, probe
cataagggaggaggaagtaagttac

SEQ ID NO: 63041 - DNA, 25 bp, probe
aaagcatacaccaaacttatcagag

SEQ ID NO: 63042 - DNA, 25 bp, probe
gcatacaccaaacttatcagaggag

SEQ ID NO: 63043 - DNA, 25 bp, probe
aagcatacaccaaacttatcagagg

SEQ ID NO: 63044 - DNA, 25 bp, probe
ctgttatcctggatctggtgttaca

SEQ ID NO: 63045 - DNA, 25 bp, probe
tagtatagatgtatggtctgctggc

SEQ ID NO: 63046 - DNA, 25 bp, probe
ctagtatagatgtatggtctgctgg

SEQ ID NO: 63047 - DNA, 25 bp, probe
ggagccactgattatacctctagta

SEQ ID NO: 63048 - DNA, 25 bp, probe
ttcgtatatctgttctcggtactat

SEQ ID NO: 63049 - DNA, 25 bp, probe
ttggagccactgattatacctctag

SEQ ID NO: 63050 - DNA, 25 bp, probe
cctctagtatagatgtatggtctgc

SEQ ID NO: 63051 - DNA, 25 bp, probe
gagccactgattatacctctagtat

SEQ ID NO: 63052 - DNA, 25 bp, probe
tcgtatatctgttctcggtactata

SEQ ID NO: 63053 - DNA, 25 bp, probe
tctagtatagatgtatggtctgctg

SEQ ID NO: 63054 - DNA, 25 bp, probe
tggagccactgattatacctctagt

SEQ ID NO: 63055 - DNA, 25 bp, probe
gaaatgaacccaaactacacagaat

SEQ ID NO: 63056 - DNA, 25 bp, probe
aatgtttcgtatatctgttctcggt

SEQ ID NO: 63057 - DNA, 25 bp, probe
caatgtttcgtatatctgttctcgg

SEQ ID NO: 63058 - DNA, 25 bp, probe
ccaatgtttcgtatatctgttctcg

SEQ ID NO: 63059 - DNA, 25 bp, probe
acccaatgtttcgtatatctgttct

SEQ ID NO: 63060 - DNA, 25 bp, probe
gtatagatgtatggtctgctggctg

SEQ ID NO: 63061 - DNA, 25 bp, probe
agtatagatgtatggtctgctggct

SEQ ID NO: 63062 - DNA, 25 bp, probe
agaaatgaacccaaactacacagaa

SEQ ID NO: 63063 - DNA, 25 bp, probe
cccaatgtttcgtatatctgttctc

SEQ ID NO: 63064 - DNA, 25 bp, probe
atgtttcgtatatctgttctcggta

SEQ ID NO: 63065 - DNA, 25 bp, probe
gatagtggtgtggatcagttggtag

SEQ ID NO: 63066 - DNA, 25 bp, probe
ctctagtatagatgtatggtctgct

SEQ ID NO: 63067 - DNA, 25 bp, probe
gagaaatgaacccaaactacacaga

SEQ ID NO: 63068 - DNA, 25 bp, probe
agagaaatgaacccaaactacacag

SEQ ID NO: 63069 - DNA, 25 bp, probe
gagctgttactaggacaaccaatat

SEQ ID NO: 63070 - DNA, 25 bp, probe
agctgttactaggacaaccaatatt

SEQ ID NO: 63071 - DNA, 25 bp, probe
aatgaacccaaactacacagaattt

SEQ ID NO: 63072 - DNA, 25 bp, probe
aaatgaacccaaactacacagaatt

SEQ ID NO: 63073 - DNA, 25 bp, probe
tagaaataatcaaggtcctgggaac

SEQ ID NO: 63074 - DNA, 25 bp, probe
gtagaaataatcaaggtcctgggaa

SEQ ID NO: 63075 - DNA, 25 bp, probe
tatagatgtatggtctgctggctgt

SEQ ID NO: 63076 - DNA, 25 bp, probe
agaacccaatgtttcgtatatctgt

SEQ ID NO: 63077 - DNA, 25 bp, probe
cagagaaatgaacccaaactacaca

SEQ ID NO: 63078 - DNA, 25 bp, probe
gagaacccaatgtttcgtatatctg

SEQ ID NO: 63079 - DNA, 25 bp, probe
ggagaacccaatgtttcgtatatct

SEQ ID NO: 63080 - DNA, 25 bp, probe
aggagaacccaatgtttcgtatatc

SEQ ID NO: 63081 - DNA, 25 bp, probe
gaggagaacccaatgtttcgtatat

SEQ ID NO: 63082 - DNA, 25 bp, probe
aacccaatgtttcgtatatctgttc

SEQ ID NO: 63083 - DNA, 25 bp, probe
gaacccaatgtttcgtatatctgtt

SEQ ID NO: 63084 - DNA, 25 bp, probe
atagtggtgtggatcagttggtaga

SEQ ID NO: 63085 - DNA, 25 bp, probe
cagttggtagaaataatcaaggtcc

SEQ ID NO: 63086 - DNA, 25 bp, probe
atcagagaaatgaacccaaactaca

SEQ ID NO: 63087 - DNA, 25 bp, probe
caaatcagagaaatgaacccaaact

SEQ ID NO: 63088 - DNA, 25 bp, probe
tgagctgttactaggacaaccaata

SEQ ID NO: 63089 - DNA, 25 bp, probe
atctatgacagcatcaaaggtatgg

SEQ ID NO: 63090 - DNA, 25 bp, probe
catctatgacagcatcaaaggtatg

SEQ ID NO: 63091 - DNA, 25 bp, probe
tcatctatgacagcatcaaaggtat

SEQ ID NO: 63092 - DNA, 25 bp, probe
atcatctatgacagcatcaaaggta

SEQ ID NO: 63093 - DNA, 25 bp, probe
tctatgacagcatcaaaggtatggc

SEQ ID NO: 63094 - DNA, 25 bp, probe
tatgacagcatcaaaggtatggctt

SEQ ID NO: 63095 - DNA, 25 bp, probe
ctatgacagcatcaaaggtatggct

SEQ ID NO: 63096 - DNA, 25 bp, probe
atgacagcatcaaaggtatggcttc

SEQ ID NO: 63097 - DNA, 25 bp, probe
cagcatcaaaggtatggcttctctg

SEQ ID NO: 63098 - DNA, 25 bp, probe
gacagcatcaaaggtatggcttctc

SEQ ID NO: 63099 - DNA, 25 bp, probe
acagcatcaaaggtatggcttctct

SEQ ID NO: 63100 - DNA, 25 bp, probe
tgacagcatcaaaggtatggcttct

SEQ ID NO: 63101 - DNA, 25 bp, probe
agcatcaaaggtatggcttctctgg

SEQ ID NO: 63102 - DNA, 25 bp, probe
ctagctgtgtgtcttccacaatgac

SEQ ID NO: 63103 - DNA, 25 bp, probe
tagctgtgtgtcttccacaatgact

SEQ ID NO: 63104 - DNA, 25 bp, probe
cctagctgtgtgtcttccacaatga

SEQ ID NO: 63105 - DNA, 25 bp, probe
tcctagctgtgtgtcttccacaatg

SEQ ID NO: 63106 - DNA, 25 bp, probe
gtcctagctgtgtgtcttccacaat

SEQ ID NO: 63107 - DNA, 25 bp, probe
gtgtgtcttccacaatgactgcatc

SEQ ID NO: 63108 - DNA, 25 bp, probe
tgtgtgtcttccacaatgactgcat

SEQ ID NO: 63109 - DNA, 25 bp, probe
gagatgtgtatcaggagtgtctaag

SEQ ID NO: 63110 - DNA, 25 bp, probe
aatgaagttgacataccacctaaca

SEQ ID NO: 63111 - DNA, 25 bp, probe
atgaagttgacataccacctaacac

SEQ ID NO: 63112 - DNA, 25 bp, probe
agatgtgtatcaggagtgtctaagg

SEQ ID NO: 63113 - DNA, 25 bp, probe
ggagatgtgtatcaggagtgtctaa

SEQ ID NO: 63114 - DNA, 25 bp, probe
gaagttgacataccacctaacactc

SEQ ID NO: 63115 - DNA, 25 bp, probe
ctaggagatgtgtatcaggagtgtc

SEQ ID NO: 63116 - DNA, 25 bp, probe
aggagatgtgtatcaggagtgtcta

SEQ ID NO: 63117 - DNA, 25 bp, probe
taggagatgtgtatcaggagtgtct

SEQ ID NO: 63118 - DNA, 25 bp, probe
tgaagttgacataccacctaacact

SEQ ID NO: 63119 - DNA, 25 bp, probe
gtatcaggagtgtctaaggcagatg

SEQ ID NO: 63120 - DNA, 25 bp, probe
gatgtgtatcaggagtgtctaaggc

SEQ ID NO: 63121 - DNA, 25 bp, probe
tgtatcaggagtgtctaaggcagat

SEQ ID NO: 63122 - DNA, 25 bp, probe
ttgctaggagatgtgtatcaggagt

SEQ ID NO: 63123 - DNA, 25 bp, probe
aagttgacataccacctaacactcg

SEQ ID NO: 63124 - DNA, 25 bp, probe
atgtgtatcaggagtgtctaaggca

SEQ ID NO: 63125 - DNA, 25 bp, probe
acaaatgaagttgacataccaccta

SEQ ID NO: 63126 - DNA, 25 bp, probe
tacaaatgaagttgacataccacct

SEQ ID NO: 63127 - DNA, 25 bp, probe
aaatgaagttgacataccacctaac

SEQ ID NO: 63128 - DNA, 25 bp, probe
atacaaatgaagttgacataccacc

SEQ ID NO: 63129 - DNA, 25 bp, probe
tgaacagaaatcacttccagtctta

SEQ ID NO: 63130 - DNA, 25 bp, probe
gaacagaaatcacttccagtcttac

SEQ ID NO: 63131 - DNA, 25 bp, probe
caaatgaagttgacataccacctaa

SEQ ID NO: 63132 - DNA, 25 bp, probe
ttgaacagaaatcacttccagtctt

SEQ ID NO: 63133 - DNA, 25 bp, probe
tatcaggagtgtctaaggcagatgg

SEQ ID NO: 63134 - DNA, 25 bp, probe
cttgaacagaaatcacttccagtct

SEQ ID NO: 63135 - DNA, 25 bp, probe
gctaggagatgtgtatcaggagtgt

SEQ ID NO: 63136 - DNA, 25 bp, probe
tgctaggagatgtgtatcaggagtg

SEQ ID NO: 63137 - DNA, 25 bp, probe
gtgtatcaggagtgtctaaggcaga

SEQ ID NO: 63138 - DNA, 25 bp, probe
tgatacaaatgaagttgacatacca

SEQ ID NO: 63139 - DNA, 25 bp, probe
tgtgtatcaggagtgtctaaggcag

SEQ ID NO: 63140 - DNA, 25 bp, probe
gatacaaatgaagttgacataccac

SEQ ID NO: 63141 - DNA, 25 bp, probe
gtgatacaaatgaagttgacatacc

SEQ ID NO: 63142 - DNA, 25 bp, probe
gcttgaacagaaatcacttccagtc

SEQ ID NO: 63143 - DNA, 25 bp, probe
agtgatacaaatgaagttgacatac

SEQ ID NO: 63144 - DNA, 25 bp, probe
aacgctatatgcctccagaagtgtt

SEQ ID NO: 63145 - DNA, 25 bp, probe
agttgacataccacctaacactcga

SEQ ID NO: 63146 - DNA, 25 bp, probe
gagagcttgaacagaaatcacttcc

SEQ ID NO: 63147 - DNA, 25 bp, probe
gagcttgaacagaaatcacttccag

SEQ ID NO: 63148 - DNA, 25 bp, probe
cgagagcttgaacagaaatcacttc

SEQ ID NO: 63149 - DNA, 25 bp, probe
ttagtgatacaaatgaagttgacat

SEQ ID NO: 63150 - DNA, 25 bp, probe
attagtgatacaaatgaagttgaca

SEQ ID NO: 63151 - DNA, 25 bp, probe
agagcttgaacagaaatcacttcca

SEQ ID NO: 63152 - DNA, 25 bp, probe
acgctatatgcctccagaagtgttg

SEQ ID NO: 63153 - DNA, 25 bp, probe
agaatatgaagttgccgatgatgag

SEQ ID NO: 63154 - DNA, 25 bp, probe
cagaatatgaagttgccgatgatga

SEQ ID NO: 63155 - DNA, 25 bp, probe
agattcttcaatgataagttggcag

SEQ ID NO: 63156 - DNA, 25 bp, probe
gattcttcaatgataagttggcagc

SEQ ID NO: 63157 - DNA, 25 bp, probe
gaatatgaagttgccgatgatgagg

SEQ ID NO: 63158 - DNA, 25 bp, probe
ttgtggactgtcaatcttagataga

SEQ ID NO: 63159 - DNA, 25 bp, probe
aatatgaagttgccgatgatgagga

SEQ ID NO: 63160 - DNA, 25 bp, probe
tagattcttcaatgataagttggca

SEQ ID NO: 63161 - DNA, 25 bp, probe
atatgaagttgccgatgatgaggac

SEQ ID NO: 63162 - DNA, 25 bp, probe
attcttcaatgataagttggcagcc

SEQ ID NO: 63163 - DNA, 25 bp, probe
atagattcttcaatgataagttggc

SEQ ID NO: 63164 - DNA, 25 bp, probe
tgtggactgtcaatcttagatagat

SEQ ID NO: 63165 - DNA, 25 bp, probe
gatgatgaggaccgaagtgattgtg

SEQ ID NO: 63166 - DNA, 25 bp, probe
attgtggactgtcaatcttagatag

SEQ ID NO: 63167 - DNA, 25 bp, probe
caagtttagcctacgcttatgaaac

SEQ ID NO: 63168 - DNA, 25 bp, probe
gcagaatatgaagttgccgatgatg

SEQ ID NO: 63169 - DNA, 25 bp, probe
tatgaagttgccgatgatgaggacc

SEQ ID NO: 63170 - DNA, 25 bp, probe
aagtttagcctacgcttatgaaacc

SEQ ID NO: 63171 - DNA, 25 bp, probe
atgatgaggaccgaagtgattgtgg

SEQ ID NO: 63172 - DNA, 25 bp, probe
gatagattcttcaatgataagttgg

SEQ ID NO: 63173 - DNA, 25 bp, probe
cgatgatgaggaccgaagtgattgt

SEQ ID NO: 63174 - DNA, 25 bp, probe
gcaagtttagcctacgcttatgaaa

SEQ ID NO: 63175 - DNA, 25 bp, probe
aagaggcacattgaattcttggatg

SEQ ID NO: 63176 - DNA, 25 bp, probe
cacattgaattcttggatgcagtgg

SEQ ID NO: 63177 - DNA, 25 bp, probe
gatgcagtggcagaatatgaagttg

SEQ ID NO: 63178 - DNA, 25 bp, probe
agcaagtttagcctacgcttatgaa

SEQ ID NO: 63179 - DNA, 25 bp, probe
ttcttcaatgataagttggcagccc

SEQ ID NO: 63180 - DNA, 25 bp, probe
gagcaagtttagcctacgcttatga

SEQ ID NO: 63181 - DNA, 25 bp, probe
ctaaagaggcacattgaattcttgg

SEQ ID NO: 63182 - DNA, 25 bp, probe
taaagaggcacattgaattcttgga

SEQ ID NO: 63183 - DNA, 25 bp, probe
gaccgaagtgattgtggactgtcaa

SEQ ID NO: 63184 - DNA, 25 bp, probe
accgaagtgattgtggactgtcaat

SEQ ID NO: 63185 - DNA, 25 bp, probe
ggatgcagtggcagaatatgaagtt

SEQ ID NO: 63186 - DNA, 25 bp, probe
ttggatgcagtggcagaatatgaag

SEQ ID NO: 63187 - DNA, 25 bp, probe
cttggatgcagtggcagaatatgaa

SEQ ID NO: 63188 - DNA, 25 bp, probe
ttcttggatgcagtggcagaatatg

SEQ ID NO: 63189 - DNA, 25 bp, probe
aaagaggcacattgaattcttggat

SEQ ID NO: 63190 - DNA, 25 bp, probe
gtggactgtcaatcttagatagatt

SEQ ID NO: 63191 - DNA, 25 bp, probe
tggactgtcaatcttagatagattc

SEQ ID NO: 63192 - DNA, 25 bp, probe
acattgaattcttggatgcagtggc

SEQ ID NO: 63193 - DNA, 25 bp, probe
ggagcaagtttagcctacgcttatg

SEQ ID NO: 63194 - DNA, 25 bp, probe
ggactgtcaatcttagatagattct

SEQ ID NO: 63195 - DNA, 25 bp, probe
gcacattgaattcttggatgcagtg

SEQ ID NO: 63196 - DNA, 25 bp, probe
tcttggatgcagtggcagaatatga

SEQ ID NO: 63197 - DNA, 25 bp, probe
ggattcaacccactattacttgctg

SEQ ID NO: 63198 - DNA, 25 bp, probe
gattcaacccactattacttgctgc

SEQ ID NO: 63199 - DNA, 25 bp, probe
attcaacccactattacttgctgcc

SEQ ID NO: 63200 - DNA, 25 bp, probe
caacttctccaccaacaacagcaac

SEQ ID NO: 63201 - DNA, 25 bp, probe
gggattcaacccactattacttgct

SEQ ID NO: 63202 - DNA, 25 bp, probe
ttcaacccactattacttgctgccc

SEQ ID NO: 63203 - DNA, 25 bp, probe
agtatctgaaggtggagcagctctt

SEQ ID NO: 63204 - DNA, 25 bp, probe
gtatctgaaggtggagcagctcttc

SEQ ID NO: 63205 - DNA, 25 bp, probe
acgactaacctatctatgaacaaca

SEQ ID NO: 63206 - DNA, 25 bp, probe
cgactaacctatctatgaacaacag

SEQ ID NO: 63207 - DNA, 25 bp, probe
aacgactaacctatctatgaacaac

SEQ ID NO: 63208 - DNA, 25 bp, probe
aaggtcaatgtcaagagaggaagag

SEQ ID NO: 63209 - DNA, 25 bp, probe
gtcaatgtcaagagaggaagagagg

SEQ ID NO: 63210 - DNA, 25 bp, probe
ggtcaatgtcaagagaggaagagag

SEQ ID NO: 63211 - DNA, 25 bp, probe
aggtcaatgtcaagagaggaagaga

SEQ ID NO: 63212 - DNA, 25 bp, probe
aactattggtgcttgactctcacta

SEQ ID NO: 63213 - DNA, 25 bp, probe
gactaacctatctatgaacaacagt

SEQ ID NO: 63214 - DNA, 25 bp, probe
taaagtttgtgtgttgtgtccattt

SEQ ID NO: 63215 - DNA, 25 bp, probe
tgattcttctcttgtgatttggttg

SEQ ID NO: 63216 - DNA, 25 bp, probe
taggtagaaactattggtgcttgac

SEQ ID NO: 63217 - DNA, 25 bp, probe
ttaggtagaaactattggtgcttga

SEQ ID NO: 63218 - DNA, 25 bp, probe
aactcgcttaggtagaaactattgg

SEQ ID NO: 63219 - DNA, 25 bp, probe
ccaaactcgcttaggtagaaactat

SEQ ID NO: 63220 - DNA, 25 bp, probe
aacctatctatgaacaacagtagtt

SEQ ID NO: 63221 - DNA, 25 bp, probe
ttaaagtttgtgtgttgtgtccatt

SEQ ID NO: 63222 - DNA, 25 bp, probe
cttaggtagaaactattggtgcttg

SEQ ID NO: 63223 - DNA, 25 bp, probe
attaaagtttgtgtgttgtgtccat

SEQ ID NO: 63224 - DNA, 25 bp, probe
gcttaggtagaaactattggtgctt

SEQ ID NO: 63225 - DNA, 25 bp, probe
gctattaaagtttgtgtgttgtgtc

SEQ ID NO: 63226 - DNA, 25 bp, probe
catggtaatgacagatgcaagttat

SEQ ID NO: 63227 - DNA, 25 bp, probe
gattcttctcttgtgatttggttgc

SEQ ID NO: 63228 - DNA, 25 bp, probe
tattaaagtttgtgtgttgtgtcca

SEQ ID NO: 63229 - DNA, 25 bp, probe
ctacacatacagaaagaagcagttc

SEQ ID NO: 63230 - DNA, 25 bp, probe
actattggtgcttgactctcactag

SEQ ID NO: 63231 - DNA, 25 bp, probe
ctcgcttaggtagaaactattggtg

SEQ ID NO: 63232 - DNA, 25 bp, probe
atggtaatgacagatgcaagttatt

SEQ ID NO: 63233 - DNA, 25 bp, probe
atgattcttctcttgtgatttggtt

SEQ ID NO: 63234 - DNA, 25 bp, probe
aaactcgcttaggtagaaactattg

SEQ ID NO: 63235 - DNA, 25 bp, probe
caaactcgcttaggtagaaactatt

SEQ ID NO: 63236 - DNA, 25 bp, probe
tctacacatacagaaagaagcagtt

SEQ ID NO: 63237 - DNA, 25 bp, probe
atctacacatacagaaagaagcagt

SEQ ID NO: 63238 - DNA, 25 bp, probe
tagaaactattggtgcttgactctc

SEQ ID NO: 63239 - DNA, 25 bp, probe
actcgcttaggtagaaactattggt

SEQ ID NO: 63240 - DNA, 25 bp, probe
tccaaactcgcttaggtagaaacta

SEQ ID NO: 63241 - DNA, 25 bp, probe
gtagaaactattggtgcttgactct

SEQ ID NO: 63242 - DNA, 25 bp, probe
ctattaaagtttgtgtgttgtgtcc

SEQ ID NO: 63243 - DNA, 25 bp, probe
ggtagaaactattggtgcttgactc

SEQ ID NO: 63244 - DNA, 25 bp, probe
caaaggtcaatgtcaagagaggaag

SEQ ID NO: 63245 - DNA, 25 bp, probe
tatgaacaacagtagtttctcaggg

SEQ ID NO: 63246 - DNA, 25 bp, probe
aggtagaaactattggtgcttgact

SEQ ID NO: 63247 - DNA, 25 bp, probe
aaaggtcaatgtcaagagaggaaga

SEQ ID NO: 63248 - DNA, 25 bp, probe
caaacgactaacctatctatgaaca

SEQ ID NO: 63249 - DNA, 25 bp, probe
ctatctgctccaggttctgaagaag

SEQ ID NO: 63250 - DNA, 25 bp, probe
tatctgctccaggttctgaagaagg

SEQ ID NO: 63251 - DNA, 25 bp, probe
cctatctgctccaggttctgaagaa

SEQ ID NO: 63252 - DNA, 25 bp, probe
ccctatctgctccaggttctgaaga

SEQ ID NO: 63253 - DNA, 25 bp, probe
ggctcaataaagatttcaagatcct

SEQ ID NO: 63254 - DNA, 25 bp, probe
gctcaataaagatttcaagatcctg

SEQ ID NO: 63255 - DNA, 25 bp, probe
ctcaataaagatttcaagatcctgt

SEQ ID NO: 63256 - DNA, 25 bp, probe
aaagatttcaagatcctgtacttgc

SEQ ID NO: 63257 - DNA, 25 bp, probe
caataaagatttcaagatcctgtac

SEQ ID NO: 63258 - DNA, 25 bp, probe
aagatttcaagatcctgtacttgcg

SEQ ID NO: 63259 - DNA, 25 bp, probe
aataaagatttcaagatcctgtact

SEQ ID NO: 63260 - DNA, 25 bp, probe
tcaataaagatttcaagatcctgta

SEQ ID NO: 63261 - DNA, 25 bp, probe
ataaagatttcaagatcctgtactt

SEQ ID NO: 63262 - DNA, 25 bp, probe
atttcaagatcctgtacttgcggaa

SEQ ID NO: 63263 - DNA, 25 bp, probe
gatttcaagatcctgtacttgcgga

SEQ ID NO: 63264 - DNA, 25 bp, probe
agatttcaagatcctgtacttgcgg

SEQ ID NO: 63265 - DNA, 25 bp, probe
tttcaagatcctgtacttgcggaag

SEQ ID NO: 63266 - DNA, 25 bp, probe
taaagatttcaagatcctgtacttg

SEQ ID NO: 63267 - DNA, 25 bp, probe
ttcaagatcctgtacttgcggaagc

SEQ ID NO: 63268 - DNA, 25 bp, probe
catcaactggttcttactctactgg

SEQ ID NO: 63269 - DNA, 25 bp, probe
gcatcaactggttcttactctactg

SEQ ID NO: 63270 - DNA, 25 bp, probe
ggcatcaactggttcttactctact

SEQ ID NO: 63271 - DNA, 25 bp, probe
cactatcaccttgtgttcctaatct

SEQ ID NO: 63272 - DNA, 25 bp, probe
aactaagaggtgaggcaatatatct

SEQ ID NO: 63273 - DNA, 25 bp, probe
ccactatcaccttgtgttcctaatc

SEQ ID NO: 63274 - DNA, 25 bp, probe
actatcaccttgtgttcctaatcta

SEQ ID NO: 63275 - DNA, 25 bp, probe
accactatcaccttgtgttcctaat

SEQ ID NO: 63276 - DNA, 25 bp, probe
aatctaaactaagaggtgaggcaat

SEQ ID NO: 63277 - DNA, 25 bp, probe
ctaatctaaactaagaggtgaggca

SEQ ID NO: 63278 - DNA, 25 bp, probe
taatctaaactaagaggtgaggcaa

SEQ ID NO: 63279 - DNA, 25 bp, probe
ctatcaccttgtgttcctaatctaa

SEQ ID NO: 63280 - DNA, 25 bp, probe
caccactatcaccttgtgttcctaa

SEQ ID NO: 63281 - DNA, 25 bp, probe
tctaaactaagaggtgaggcaatat

SEQ ID NO: 63282 - DNA, 25 bp, probe
atctaaactaagaggtgaggcaata

SEQ ID NO: 63283 - DNA, 25 bp, probe
aaacgggatgtgaggctactttata

SEQ ID NO: 63284 - DNA, 25 bp, probe
atcaactggttcttactctactggg

SEQ ID NO: 63285 - DNA, 25 bp, probe
gaggtgaggcaatatatctttctgt

SEQ ID NO: 63286 - DNA, 25 bp, probe
aggtgaggcaatatatctttctgtt

SEQ ID NO: 63287 - DNA, 25 bp, probe
cttactctactgggtggatgtgaaa

SEQ ID NO: 63288 - DNA, 25 bp, probe
ggtgaggcaatatatctttctgttt

SEQ ID NO: 63289 - DNA, 25 bp, probe
aacgggatgtgaggctactttatag

SEQ ID NO: 63290 - DNA, 25 bp, probe
ttactctactgggtggatgtgaaac

SEQ ID NO: 63291 - DNA, 25 bp, probe
agaggtgaggcaatatatctttctg

SEQ ID NO: 63292 - DNA, 25 bp, probe
catcctgacttccatccttgtcttc

SEQ ID NO: 63293 - DNA, 25 bp, probe
actaagaggtgaggcaatatatctt

SEQ ID NO: 63294 - DNA, 25 bp, probe
tcaccactatcaccttgtgttccta

SEQ ID NO: 63295 - DNA, 25 bp, probe
cctaatctaaactaagaggtgaggc

SEQ ID NO: 63296 - DNA, 25 bp, probe
tcaccttgtgttcctaatctaaact

SEQ ID NO: 63297 - DNA, 25 bp, probe
gttcttactctactgggtggatgtg

SEQ ID NO: 63298 - DNA, 25 bp, probe
tcttactctactgggtggatgtgaa

SEQ ID NO: 63299 - DNA, 25 bp, probe
ttcttactctactgggtggatgtga

SEQ ID NO: 63300 - DNA, 25 bp, probe
tttagacacagatcctaactttggg

SEQ ID NO: 63301 - DNA, 25 bp, probe
ctaaactaagaggtgaggcaatata

SEQ ID NO: 63302 - DNA, 25 bp, probe
atccttgtcttcctcacctgttctc

SEQ ID NO: 63303 - DNA, 25 bp, probe
tcatcctgacttccatccttgtctt

SEQ ID NO: 63304 - DNA, 25 bp, probe
aaactaagaggtgaggcaatatatc

SEQ ID NO: 63305 - DNA, 25 bp, probe
gtttagacacagatcctaactttgg

SEQ ID NO: 63306 - DNA, 25 bp, probe
tcctaatctaaactaagaggtgagg

SEQ ID NO: 63307 - DNA, 25 bp, probe
atcaccttgtgttcctaatctaaac

SEQ ID NO: 63308 - DNA, 25 bp, probe
caactggttcttactctactgggtg

SEQ ID NO: 63309 - DNA, 25 bp, probe
tcaactggttcttactctactgggt

SEQ ID NO: 63310 - DNA, 25 bp, probe
gaaacgggatgtgaggctactttat

SEQ ID NO: 63311 - DNA, 25 bp, probe
ttagacacagatcctaactttgggt

SEQ ID NO: 63312 - DNA, 25 bp, probe
atcagtaagactcttgagggacatc

SEQ ID NO: 63313 - DNA, 25 bp, probe
ccctctacttctatcatttcagctt

SEQ ID NO: 63314 - DNA, 25 bp, probe
catcagtaagactcttgagggacat

SEQ ID NO: 63315 - DNA, 25 bp, probe
ttctatcatttcagcttcttcatgg

SEQ ID NO: 63316 - DNA, 25 bp, probe
cctctacttctatcatttcagcttc

SEQ ID NO: 63317 - DNA, 25 bp, probe
tctatcatttcagcttcttcatggc

SEQ ID NO: 63318 - DNA, 25 bp, probe
tcagtaagactcttgagggacatct

SEQ ID NO: 63319 - DNA, 25 bp, probe
acttctatcatttcagcttcttcat

SEQ ID NO: 63320 - DNA, 25 bp, probe
cttctatcatttcagcttcttcatg

SEQ ID NO: 63321 - DNA, 25 bp, probe
ctctacttctatcatttcagcttct

SEQ ID NO: 63322 - DNA, 25 bp, probe
gtaagactcttgagggacatctttg

SEQ ID NO: 63323 - DNA, 25 bp, probe
agtaagactcttgagggacatcttt

SEQ ID NO: 63324 - DNA, 25 bp, probe
tacttctatcatttcagcttcttca

SEQ ID NO: 63325 - DNA, 25 bp, probe
agctccatcagtaagactcttgagg

SEQ ID NO: 63326 - DNA, 25 bp, probe
tctacttctatcatttcagcttctt

SEQ ID NO: 63327 - DNA, 25 bp, probe
cagtaagactcttgagggacatctt

SEQ ID NO: 63328 - DNA, 25 bp, probe
ctacttctatcatttcagcttcttc

SEQ ID NO: 63329 - DNA, 25 bp, probe
ccatcagtaagactcttgagggaca

SEQ ID NO: 63330 - DNA, 25 bp, probe
ctccatcagtaagactcttgaggga

SEQ ID NO: 63331 - DNA, 25 bp, probe
gatgtaggtaaagctgggatcagag

SEQ ID NO: 63332 - DNA, 25 bp, probe
actcttgagggacatctttgctgat

SEQ ID NO: 63333 - DNA, 25 bp, probe
taagactcttgagggacatctttgc

SEQ ID NO: 63334 - DNA, 25 bp, probe
tccatcagtaagactcttgagggac

SEQ ID NO: 63335 - DNA, 25 bp, probe
ctatcatttcagcttcttcatggcc

SEQ ID NO: 63336 - DNA, 25 bp, probe
gactcttgagggacatctttgctga

SEQ ID NO: 63337 - DNA, 25 bp, probe
cccctctacttctatcatttcagct

SEQ ID NO: 63338 - DNA, 25 bp, probe
agactcttgagggacatctttgctg

SEQ ID NO: 63339 - DNA, 25 bp, probe
gctccatcagtaagactcttgaggg

SEQ ID NO: 63340 - DNA, 25 bp, probe
ggacttgtggacatgactgtctaag

SEQ ID NO: 63341 - DNA, 25 bp, probe
tgatgtaggtaaagctgggatcaga

SEQ ID NO: 63342 - DNA, 25 bp, probe
aagactcttgagggacatctttgct

SEQ ID NO: 63343 - DNA, 25 bp, probe
gatcagagctccatcagtaagactc

SEQ ID NO: 63344 - DNA, 25 bp, probe
gagctccatcagtaagactcttgag

SEQ ID NO: 63345 - DNA, 25 bp, probe
ctcttgagggacatctttgctgatg

SEQ ID NO: 63346 - DNA, 25 bp, probe
gacttgtggacatgactgtctaagc

SEQ ID NO: 63347 - DNA, 25 bp, probe
cttgtggacatgactgtctaagcac

SEQ ID NO: 63348 - DNA, 25 bp, probe
cttgagggacatctttgctgatgac

SEQ ID NO: 63349 - DNA, 25 bp, probe
cctgatgtaggtaaagctgggatca

SEQ ID NO: 63350 - DNA, 25 bp, probe
tcttgagggacatctttgctgatga

SEQ ID NO: 63351 - DNA, 25 bp, probe
atgtaggtaaagctgggatcagagc

SEQ ID NO: 63352 - DNA, 25 bp, probe
acttgtggacatgactgtctaagca

SEQ ID NO: 63353 - DNA, 25 bp, probe
ggatcagagctccatcagtaagact

SEQ ID NO: 63354 - DNA, 25 bp, probe
gcctgatgtaggtaaagctgggatc

SEQ ID NO: 63355 - DNA, 25 bp, probe
atcagagctccatcagtaagactct

SEQ ID NO: 63356 - DNA, 25 bp, probe
cttcctcgtatcatccatctacttg

SEQ ID NO: 63357 - DNA, 25 bp, probe
tcttcctcgtatcatccatctactt

SEQ ID NO: 63358 - DNA, 25 bp, probe
ctgtcttcctcgtatcatccatcta

SEQ ID NO: 63359 - DNA, 25 bp, probe
gtcttcctcgtatcatccatctact

SEQ ID NO: 63360 - DNA, 25 bp, probe
attgtctctgtcttcctcgtatcat

SEQ ID NO: 63361 - DNA, 25 bp, probe
tgtcttcctcgtatcatccatctac

SEQ ID NO: 63362 - DNA, 25 bp, probe
ttgtctctgtcttcctcgtatcatc

SEQ ID NO: 63363 - DNA, 25 bp, probe
gattgtctctgtcttcctcgtatca

SEQ ID NO: 63364 - DNA, 25 bp, probe
ctctgtcttcctcgtatcatccatc

SEQ ID NO: 63365 - DNA, 25 bp, probe
tctgtcttcctcgtatcatccatct

SEQ ID NO: 63366 - DNA, 25 bp, probe
tctctgtcttcctcgtatcatccat

SEQ ID NO: 63367 - DNA, 25 bp, probe
ttcctcgtatcatccatctacttgg

SEQ ID NO: 63368 - DNA, 25 bp, probe
gtctctgtcttcctcgtatcatcca

SEQ ID NO: 63369 - DNA, 25 bp, probe
tgtctctgtcttcctcgtatcatcc

SEQ ID NO: 63370 - DNA, 25 bp, probe
cattctgcttctgtgactcagtgta

SEQ ID NO: 63371 - DNA, 25 bp, probe
attctgcttctgtgactcagtgtac

SEQ ID NO: 63372 - DNA, 25 bp, probe
ctgacttgtgtatctgcatcaacag

SEQ ID NO: 63373 - DNA, 25 bp, probe
gagtacgtcactgacttgtgtatct

SEQ ID NO: 63374 - DNA, 25 bp, probe
cactgacttgtgtatctgcatcaac

SEQ ID NO: 63375 - DNA, 25 bp, probe
agtacgtcactgacttgtgtatctg

SEQ ID NO: 63376 - DNA, 25 bp, probe
actgacttgtgtatctgcatcaaca

SEQ ID NO: 63377 - DNA, 25 bp, probe
cgattgtctctgtcttcctcgtatc

SEQ ID NO: 63378 - DNA, 25 bp, probe
tcactgacttgtgtatctgcatcaa

SEQ ID NO: 63379 - DNA, 25 bp, probe
ttctgtgactcagtgtaccaaagtt

SEQ ID NO: 63380 - DNA, 25 bp, probe
caaccattctgcttctgtgactcag

SEQ ID NO: 63381 - DNA, 25 bp, probe
gagaagacctgccttaacactcttg

SEQ ID NO: 63382 - DNA, 25 bp, probe
cttctgtgactcagtgtaccaaagt

SEQ ID NO: 63383 - DNA, 25 bp, probe
gtcactgacttgtgtatctgcatca

SEQ ID NO: 63384 - DNA, 25 bp, probe
gaagacctgccttaacactcttgtc

SEQ ID NO: 63385 - DNA, 25 bp, probe
tctgtgactcagtgtaccaaagttg

SEQ ID NO: 63386 - DNA, 25 bp, probe
cgagtacgtcactgacttgtgtatc

SEQ ID NO: 63387 - DNA, 25 bp, probe
aaccattctgcttctgtgactcagt

SEQ ID NO: 63388 - DNA, 25 bp, probe
agacctgccttaacactcttgtcag

SEQ ID NO: 63389 - DNA, 25 bp, probe
ttcttaacagaagctcaagagcgaa

SEQ ID NO: 63390 - DNA, 25 bp, probe
agaagacctgccttaacactcttgt

SEQ ID NO: 63391 - DNA, 25 bp, probe
ttctgcttctgtgactcagtgtacc

SEQ ID NO: 63392 - DNA, 25 bp, probe
gtacgtcactgacttgtgtatctgc

SEQ ID NO: 63393 - DNA, 25 bp, probe
tcctcgtatcatccatctacttggg

SEQ ID NO: 63394 - DNA, 25 bp, probe
tgacttgtgtatctgcatcaacagc

SEQ ID NO: 63395 - DNA, 25 bp, probe
tcttaacagaagctcaagagcgaag

SEQ ID NO: 63396 - DNA, 25 bp, probe
ccaaccattctgcttctgtgactca

SEQ ID NO: 63397 - DNA, 25 bp, probe
aagacctgccttaacactcttgtca

SEQ ID NO: 63398 - DNA, 25 bp, probe
ctgcttctgtgactcagtgtaccaa

SEQ ID NO: 63399 - DNA, 25 bp, probe
ggagaagacctgccttaacactctt

SEQ ID NO: 63400 - DNA, 25 bp, probe
cagaagactagaactacagcatcag

SEQ ID NO: 63401 - DNA, 25 bp, probe
tcagaagactagaactacagcatca

SEQ ID NO: 63402 - DNA, 25 bp, probe
agaagactagaactacagcatcagc

SEQ ID NO: 63403 - DNA, 25 bp, probe
gtcagaagactagaactacagcatc

SEQ ID NO: 63404 - DNA, 25 bp, probe
aagttggcttctctattgctacgat

SEQ ID NO: 63405 - DNA, 25 bp, probe
cagaactataatgaggacatggatc

SEQ ID NO: 63406 - DNA, 25 bp, probe
agttggcttctctattgctacgatc

SEQ ID NO: 63407 - DNA, 25 bp, probe
gttactactcatagcagccacaagg

SEQ ID NO: 63408 - DNA, 25 bp, probe
tgttactactcatagcagccacaag

SEQ ID NO: 63409 - DNA, 25 bp, probe
tttctcttaatctttgggaactgct

SEQ ID NO: 63410 - DNA, 25 bp, probe
ggcaagcaagtttctcttaatcttt

SEQ ID NO: 63411 - DNA, 25 bp, probe
ccagaactataatgaggacatggat

SEQ ID NO: 63412 - DNA, 25 bp, probe
gtttctcttaatctttgggaactgc

SEQ ID NO: 63413 - DNA, 25 bp, probe
taaataaacctagtctgtcctgtgc

SEQ ID NO: 63414 - DNA, 25 bp, probe
caagttggcttctctattgctacga

SEQ ID NO: 63415 - DNA, 25 bp, probe
gcaagtttctcttaatctttgggaa

SEQ ID NO: 63416 - DNA, 25 bp, probe
agcaagtttctcttaatctttggga

SEQ ID NO: 63417 - DNA, 25 bp, probe
aagcaagtttctcttaatctttggg

SEQ ID NO: 63418 - DNA, 25 bp, probe
ttctcttaatctttgggaactgctg

SEQ ID NO: 63419 - DNA, 25 bp, probe
gcaagcaagtttctcttaatctttg

SEQ ID NO: 63420 - DNA, 25 bp, probe
ttactactcatagcagccacaaggt

SEQ ID NO: 63421 - DNA, 25 bp, probe
caagcaagtttctcttaatctttgg

SEQ ID NO: 63422 - DNA, 25 bp, probe
attcaacaaagtgctcttcttcctc

SEQ ID NO: 63423 - DNA, 25 bp, probe
ctaaataaacctagtctgtcctgtg

SEQ ID NO: 63424 - DNA, 25 bp, probe
gtgttactactcatagcagccacaa

SEQ ID NO: 63425 - DNA, 25 bp, probe
cattcaacaaagtgctcttcttcct

SEQ ID NO: 63426 - DNA, 25 bp, probe
gggcaagcaagtttctcttaatctt

SEQ ID NO: 63427 - DNA, 25 bp, probe
acattcaacaaagtgctcttcttcc

SEQ ID NO: 63428 - DNA, 25 bp, probe
caagtttctcttaatctttgggaac

SEQ ID NO: 63429 - DNA, 25 bp, probe
aagtcttcctcaagttcttgcttcc

SEQ ID NO: 63430 - DNA, 25 bp, probe
cacattcaacaaagtgctcttcttc

SEQ ID NO: 63431 - DNA, 25 bp, probe
ttaatctttgggaactgctgctctt

SEQ ID NO: 63432 - DNA, 25 bp, probe
ttcaacaaagtgctcttcttcctca

SEQ ID NO: 63433 - DNA, 25 bp, probe
cagcctggtgttactactcatagca

SEQ ID NO: 63434 - DNA, 25 bp, probe
tggagctgtttcatcactaaataaa

SEQ ID NO: 63435 - DNA, 25 bp, probe
gatcccagaactataatgaggacat

SEQ ID NO: 63436 - DNA, 25 bp, probe
aaataaacctagtctgtcctgtgcc

SEQ ID NO: 63437 - DNA, 25 bp, probe
atccttctgttcttctgtcgcctac

SEQ ID NO: 63438 - DNA, 25 bp, probe
atcccagaactataatgaggacatg

SEQ ID NO: 63439 - DNA, 25 bp, probe
actaaataaacctagtctgtcctgt

SEQ ID NO: 63440 - DNA, 25 bp, probe
cactaaataaacctagtctgtcctg

SEQ ID NO: 63441 - DNA, 25 bp, probe
tcactaaataaacctagtctgtcct

SEQ ID NO: 63442 - DNA, 25 bp, probe
agtcttcctcaagttcttgcttcct

SEQ ID NO: 63443 - DNA, 25 bp, probe
gatccttctgttcttctgtcgccta

SEQ ID NO: 63444 - DNA, 25 bp, probe
cactcaagtacatcagaccaatctt

SEQ ID NO: 63445 - DNA, 25 bp, probe
atgttggagcagaacttatatgatt

SEQ ID NO: 63446 - DNA, 25 bp, probe
aatgttggagcagaacttatatgat

SEQ ID NO: 63447 - DNA, 25 bp, probe
ccactcaagtacatcagaccaatct

SEQ ID NO: 63448 - DNA, 25 bp, probe
tatgccagacaaggacagattgaag

SEQ ID NO: 63449 - DNA, 25 bp, probe
ctatgccagacaaggacagattgaa

SEQ ID NO: 63450 - DNA, 25 bp, probe
agctatgaagtcttggagttcctag

SEQ ID NO: 63451 - DNA, 25 bp, probe
ctacttacagtcacgttactacagg

SEQ ID NO: 63452 - DNA, 25 bp, probe
cctacttacagtcacgttactacag

SEQ ID NO: 63453 - DNA, 25 bp, probe
aacctacttacagtcacgttactac

SEQ ID NO: 63454 - DNA, 25 bp, probe
caacctacttacagtcacgttacta

SEQ ID NO: 63455 - DNA, 25 bp, probe
tttgaaatgttggagcagaacttat

SEQ ID NO: 63456 - DNA, 25 bp, probe
acctacttacagtcacgttactaca

SEQ ID NO: 63457 - DNA, 25 bp, probe
ctcaacctacttacagtcacgttac

SEQ ID NO: 63458 - DNA, 25 bp, probe
tcaacctacttacagtcacgttact

SEQ ID NO: 63459 - DNA, 25 bp, probe
acaaggacagattgaagtgagcatc

SEQ ID NO: 63460 - DNA, 25 bp, probe
gacaaggacagattgaagtgagcat

SEQ ID NO: 63461 - DNA, 25 bp, probe
ccagacaaggacagattgaagtgag

SEQ ID NO: 63462 - DNA, 25 bp, probe
ttgaaatgttggagcagaacttata

SEQ ID NO: 63463 - DNA, 25 bp, probe
tgttggagcagaacttatatgattt

SEQ ID NO: 63464 - DNA, 25 bp, probe
aaatgttggagcagaacttatatga

SEQ ID NO: 63465 - DNA, 25 bp, probe
tgaaatgttggagcagaacttatat

SEQ ID NO: 63466 - DNA, 25 bp, probe
gaaatgttggagcagaacttatatg

SEQ ID NO: 63467 - DNA, 25 bp, probe
gacagattgaagtgagcatcctttc

SEQ ID NO: 63468 - DNA, 25 bp, probe
gagatcctttgctctatgaccaata

SEQ ID NO: 63469 - DNA, 25 bp, probe
tacttacagtcacgttactacaggc

SEQ ID NO: 63470 - DNA, 25 bp, probe
agatcctttgctctatgaccaatag

SEQ ID NO: 63471 - DNA, 25 bp, probe
tagctatgaagtcttggagttccta

SEQ ID NO: 63472 - DNA, 25 bp, probe
cagacaaggacagattgaagtgagc

SEQ ID NO: 63473 - DNA, 25 bp, probe
gccactcaagtacatcagaccaatc

SEQ ID NO: 63474 - DNA, 25 bp, probe
cataagaatcacacctgccttgttt

SEQ ID NO: 63475 - DNA, 25 bp, probe
gctcaacctacttacagtcacgtta

SEQ ID NO: 63476 - DNA, 25 bp, probe
caccaaggaaattgtggctattaaa

SEQ ID NO: 63477 - DNA, 25 bp, probe
tgagatcctttgctctatgaccaat

SEQ ID NO: 63478 - DNA, 25 bp, probe
atgagatcctttgctctatgaccaa

SEQ ID NO: 63479 - DNA, 25 bp, probe
ttacagtcacgttactacaggcaag

SEQ ID NO: 63480 - DNA, 25 bp, probe
cttacagtcacgttactacaggcaa

SEQ ID NO: 63481 - DNA, 25 bp, probe
gtgtgctcaacctacttacagtcac

SEQ ID NO: 63482 - DNA, 25 bp, probe
agacaaggacagattgaagtgagca

SEQ ID NO: 63483 - DNA, 25 bp, probe
tgtgtgctcaacctacttacagtca

SEQ ID NO: 63484 - DNA, 25 bp, probe
actcaagtacatcagaccaatcttg

SEQ ID NO: 63485 - DNA, 25 bp, probe
tgccactcaagtacatcagaccaat

SEQ ID NO: 63486 - DNA, 25 bp, probe
acagattgaagtgagcatcctttcc

SEQ ID NO: 63487 - DNA, 25 bp, probe
catgagatcctttgctctatgacca

SEQ ID NO: 63488 - DNA, 25 bp, probe
aggtcatctgttctcagcttccttg

SEQ ID NO: 63489 - DNA, 25 bp, probe
caggtcatctgttctcagcttcctt

SEQ ID NO: 63490 - DNA, 25 bp, probe
catctgttctcagcttccttgcttc

SEQ ID NO: 63491 - DNA, 25 bp, probe
tcatctgttctcagcttccttgctt

SEQ ID NO: 63492 - DNA, 25 bp, probe
atctgttctcagcttccttgcttcc

SEQ ID NO: 63493 - DNA, 25 bp, probe
gtcatctgttctcagcttccttgct

SEQ ID NO: 63494 - DNA, 25 bp, probe
ctgttctcagcttccttgcttccat

SEQ ID NO: 63495 - DNA, 25 bp, probe
gaatatcctggcactgaggtcactc

SEQ ID NO: 63496 - DNA, 25 bp, probe
aatatcctggcactgaggtcactct

SEQ ID NO: 63497 - DNA, 25 bp, probe
ctactcaagttcatccacacaagtc

SEQ ID NO: 63498 - DNA, 25 bp, probe
tactcaagttcatccacacaagtct

SEQ ID NO: 63499 - DNA, 25 bp, probe
cctactcaagttcatccacacaagt

SEQ ID NO: 63500 - DNA, 25 bp, probe
actcaagttcatccacacaagtctg

SEQ ID NO: 63501 - DNA, 25 bp, probe
ctacaaccgcctactcaagttcatc

SEQ ID NO: 63502 - DNA, 25 bp, probe
gcctactcaagttcatccacacaag

SEQ ID NO: 63503 - DNA, 25 bp, probe
atcgacagcatttcctttcagttta

SEQ ID NO: 63504 - DNA, 25 bp, probe
cgacagcatttcctttcagtttagc

SEQ ID NO: 63505 - DNA, 25 bp, probe
tcgacagcatttcctttcagtttag

SEQ ID NO: 63506 - DNA, 25 bp, probe
catttcctttcagtttagcttgcag

SEQ ID NO: 63507 - DNA, 25 bp, probe
ctcaagttcatccacacaagtctgg

SEQ ID NO: 63508 - DNA, 25 bp, probe
catcgacagcatttcctttcagttt

SEQ ID NO: 63509 - DNA, 25 bp, probe
tacaaccgcctactcaagttcatcc

SEQ ID NO: 63510 - DNA, 25 bp, probe
cagcatttcctttcagtttagcttg

SEQ ID NO: 63511 - DNA, 25 bp, probe
atttcctttcagtttagcttgcagg

SEQ ID NO: 63512 - DNA, 25 bp, probe
acagcatttcctttcagtttagctt

SEQ ID NO: 63513 - DNA, 25 bp, probe
cgcctactcaagttcatccacacaa

SEQ ID NO: 63514 - DNA, 25 bp, probe
gctacaaccgcctactcaagttcat

SEQ ID NO: 63515 - DNA, 25 bp, probe
gacagcatttcctttcagtttagct

SEQ ID NO: 63516 - DNA, 25 bp, probe
ccatcgacagcatttcctttcagtt

SEQ ID NO: 63517 - DNA, 25 bp, probe
agcatttcctttcagtttagcttgc

SEQ ID NO: 63518 - DNA, 25 bp, probe
ctttcagtttagcttgcaggatggg

SEQ ID NO: 63519 - DNA, 25 bp, probe
gcatttcctttcagtttagcttgca

SEQ ID NO: 63520 - DNA, 25 bp, probe
cctttcagtttagcttgcaggatgg

SEQ ID NO: 63521 - DNA, 25 bp, probe
tttcagtttagcttgcaggatgggt

SEQ ID NO: 63522 - DNA, 25 bp, probe
ttcagtttagcttgcaggatgggtc

SEQ ID NO: 63523 - DNA, 25 bp, probe
ttcctttcagtttagcttgcaggat

SEQ ID NO: 63524 - DNA, 25 bp, probe
tttcctttcagtttagcttgcagga

SEQ ID NO: 63525 - DNA, 25 bp, probe
ctcaaagacaggacgcagatctctc

SEQ ID NO: 63526 - DNA, 25 bp, probe
tcctttcagtttagcttgcaggatg

SEQ ID NO: 63527 - DNA, 25 bp, probe
aagacaggacgcagatctctcctaa

SEQ ID NO: 63528 - DNA, 25 bp, probe
gacaggacgcagatctctcctaaag

SEQ ID NO: 63529 - DNA, 25 bp, probe
ctcgagtttctttgtcaacagcgtg

SEQ ID NO: 63530 - DNA, 25 bp, probe
agacaggacgcagatctctcctaaa

SEQ ID NO: 63531 - DNA, 25 bp, probe
aaagacaggacgcagatctctccta

SEQ ID NO: 63532 - DNA, 25 bp, probe
atgtcggctcgagtttctttgtcaa

SEQ ID NO: 63533 - DNA, 25 bp, probe
tagaggatgtcggctcgagtttctt

SEQ ID NO: 63534 - DNA, 25 bp, probe
gtgtacctagaagggatggaagagg

SEQ ID NO: 63535 - DNA, 25 bp, probe
cgtgtacctagaagggatggaagag

SEQ ID NO: 63536 - DNA, 25 bp, probe
ctttgtggaggtggagatcattggg

SEQ ID NO: 63537 - DNA, 25 bp, probe
acgtgtacctagaagggatggaaga

SEQ ID NO: 63538 - DNA, 25 bp, probe
tgtacctagaagggatggaagaggc

SEQ ID NO: 63539 - DNA, 25 bp, probe
cctttgtggaggtggagatcattgg

SEQ ID NO: 63540 - DNA, 25 bp, probe
ccctttgtggaggtggagatcattg

SEQ ID NO: 63541 - DNA, 25 bp, probe
tcatatataacagaagactgccaga

SEQ ID NO: 63542 - DNA, 25 bp, probe
taaatggcttgtggatgtttcttga

SEQ ID NO: 63543 - DNA, 25 bp, probe
gtaaatggcttgtggatgtttcttg

SEQ ID NO: 63544 - DNA, 25 bp, probe
catatataacagaagactgccagat

SEQ ID NO: 63545 - DNA, 25 bp, probe
atcatatataacagaagactgccag

SEQ ID NO: 63546 - DNA, 25 bp, probe
ggcatttctttccagacatctaata

SEQ ID NO: 63547 - DNA, 25 bp, probe
ctttccagacatctaataaaccagt

SEQ ID NO: 63548 - DNA, 25 bp, probe
aaatggcttgtggatgtttcttgat

SEQ ID NO: 63549 - DNA, 25 bp, probe
tattccattcccaagcccatatcat

SEQ ID NO: 63550 - DNA, 25 bp, probe
cggcatttctttccagacatctaat

SEQ ID NO: 63551 - DNA, 25 bp, probe
ggtaaatggcttgtggatgtttctt

SEQ ID NO: 63552 - DNA, 25 bp, probe
tctttccagacatctaataaaccag

SEQ ID NO: 63553 - DNA, 25 bp, probe
ttccagacatctaataaaccagtcc

SEQ ID NO: 63554 - DNA, 25 bp, probe
ctattccattcccaagcccatatca

SEQ ID NO: 63555 - DNA, 25 bp, probe
ccagacatctaataaaccagtcctg

SEQ ID NO: 63556 - DNA, 25 bp, probe
tccagacatctaataaaccagtcct

SEQ ID NO: 63557 - DNA, 25 bp, probe
tataacagaagactgccagatttcg

SEQ ID NO: 63558 - DNA, 25 bp, probe
aatggcttgtggatgtttcttgatg

SEQ ID NO: 63559 - DNA, 25 bp, probe
ttggtaaatggcttgtggatgtttc

SEQ ID NO: 63560 - DNA, 25 bp, probe
cttggtaaatggcttgtggatgttt

SEQ ID NO: 63561 - DNA, 25 bp, probe
cagacatctaataaaccagtcctgc

SEQ ID NO: 63562 - DNA, 25 bp, probe
atatataacagaagactgccagatt

SEQ ID NO: 63563 - DNA, 25 bp, probe
ttctttccagacatctaataaacca

SEQ ID NO: 63564 - DNA, 25 bp, probe
atttcggcatttctttccagacatc

SEQ ID NO: 63565 - DNA, 25 bp, probe
gatttcggcatttctttccagacat

SEQ ID NO: 63566 - DNA, 25 bp, probe
atataacagaagactgccagatttc

SEQ ID NO: 63567 - DNA, 25 bp, probe
tcggcatttctttccagacatctaa

SEQ ID NO: 63568 - DNA, 25 bp, probe
ttcggcatttctttccagacatcta

SEQ ID NO: 63569 - DNA, 25 bp, probe
gtcattacccagtctcatctgtgta

SEQ ID NO: 63570 - DNA, 25 bp, probe
tttccagacatctaataaaccagtc

SEQ ID NO: 63571 - DNA, 25 bp, probe
attccattcccaagcccatatcatc

SEQ ID NO: 63572 - DNA, 25 bp, probe
tggtaaatggcttgtggatgtttct

SEQ ID NO: 63573 - DNA, 25 bp, probe
acatctaataaaccagtcctgcatc

SEQ ID NO: 63574 - DNA, 25 bp, probe
gcatttctttccagacatctaataa

SEQ ID NO: 63575 - DNA, 25 bp, probe
cagatttcggcatttctttccagac

SEQ ID NO: 63576 - DNA, 25 bp, probe
tatcatatataacagaagactgcca

SEQ ID NO: 63577 - DNA, 25 bp, probe
tcattacccagtctcatctgtgtac

SEQ ID NO: 63578 - DNA, 25 bp, probe
aagtcattacccagtctcatctgtg

SEQ ID NO: 63579 - DNA, 25 bp, probe
caagtcattacccagtctcatctgt

SEQ ID NO: 63580 - DNA, 25 bp, probe
accaagtcattacccagtctcatct

SEQ ID NO: 63581 - DNA, 25 bp, probe
tatgctctgtgtctgtgggaaattc

SEQ ID NO: 63582 - DNA, 25 bp, probe
ctatgctctgtgtctgtgggaaatt

SEQ ID NO: 63583 - DNA, 25 bp, probe
cattcccaagcccatatcatctctg

SEQ ID NO: 63584 - DNA, 25 bp, probe
atggcttgtggatgtttcttgatgt

SEQ ID NO: 63585 - DNA, 25 bp, probe
ttatacatcgtgacttgaacagact

SEQ ID NO: 63586 - DNA, 25 bp, probe
tatacatcgtgacttgaacagactg

SEQ ID NO: 63587 - DNA, 25 bp, probe
attatacatcgtgacttgaacagac

SEQ ID NO: 63588 - DNA, 25 bp, probe
ccaattatacatcgtgacttgaaca

SEQ ID NO: 63589 - DNA, 25 bp, probe
gccaattatacatcgtgacttgaac

SEQ ID NO: 63590 - DNA, 25 bp, probe
agccaattatacatcgtgacttgaa

SEQ ID NO: 63591 - DNA, 25 bp, probe
cagccaattatacatcgtgacttga

SEQ ID NO: 63592 - DNA, 25 bp, probe
aattatacatcgtgacttgaacaga

SEQ ID NO: 63593 - DNA, 25 bp, probe
atacatcgtgacttgaacagactga

SEQ ID NO: 63594 - DNA, 25 bp, probe
acagccaattatacatcgtgacttg

SEQ ID NO: 63595 - DNA, 25 bp, probe
caattatacatcgtgacttgaacag

SEQ ID NO: 63596 - DNA, 25 bp, probe
aacctgacacagccaattatacatc

SEQ ID NO: 63597 - DNA, 25 bp, probe
caacctgacacagccaattatacat

SEQ ID NO: 63598 - DNA, 25 bp, probe
tacatcgtgacttgaacagactgag

SEQ ID NO: 63599 - DNA, 25 bp, probe
cacagccaattatacatcgtgactt

SEQ ID NO: 63600 - DNA, 25 bp, probe
aatacctactgctccaagtcagatg

SEQ ID NO: 63601 - DNA, 25 bp, probe
caatacctactgctccaagtcagat

SEQ ID NO: 63602 - DNA, 25 bp, probe
aaacctttcaaatgctttcctgtaa

SEQ ID NO: 63603 - DNA, 25 bp, probe
aacctttcaaatgctttcctgtaac

SEQ ID NO: 63604 - DNA, 25 bp, probe
ctttcaaatgctttcctgtaactgg

SEQ ID NO: 63605 - DNA, 25 bp, probe
cctttcaaatgctttcctgtaactg

SEQ ID NO: 63606 - DNA, 25 bp, probe
cacaacctgacacagccaattatac

SEQ ID NO: 63607 - DNA, 25 bp, probe
acctttcaaatgctttcctgtaact

SEQ ID NO: 63608 - DNA, 25 bp, probe
gccattgtcactcaatacatatcag

SEQ ID NO: 63609 - DNA, 25 bp, probe
attgagttccatgagattattggct

SEQ ID NO: 63610 - DNA, 25 bp, probe
gacacagccaattatacatcgtgac

SEQ ID NO: 63611 - DNA, 25 bp, probe
ctgacacagccaattatacatcgtg

SEQ ID NO: 63612 - DNA, 25 bp, probe
tgccattgtcactcaatacatatca

SEQ ID NO: 63613 - DNA, 25 bp, probe
aattgagttccatgagattattggc

SEQ ID NO: 63614 - DNA, 25 bp, probe
tcacaacctgacacagccaattata

SEQ ID NO: 63615 - DNA, 25 bp, probe
ttgccattgtcactcaatacatatc

SEQ ID NO: 63616 - DNA, 25 bp, probe
ccattgtcactcaatacatatcagg

SEQ ID NO: 63617 - DNA, 25 bp, probe
ttgagttccatgagattattggctc

SEQ ID NO: 63618 - DNA, 25 bp, probe
tttcaaatgctttcctgtaactggt

SEQ ID NO: 63619 - DNA, 25 bp, probe
ttccagttatcgagccaatacctac

SEQ ID NO: 63620 - DNA, 25 bp, probe
acaacctgacacagccaattataca

SEQ ID NO: 63621 - DNA, 25 bp, probe
acacagccaattatacatcgtgact

SEQ ID NO: 63622 - DNA, 25 bp, probe
tgacacagccaattatacatcgtga

SEQ ID NO: 63623 - DNA, 25 bp, probe
tgggaaagtatataaaggacgatgc

SEQ ID NO: 63624 - DNA, 25 bp, probe
attgccttcacatttccatcttcag

SEQ ID NO: 63625 - DNA, 25 bp, probe
ctggtgttactggtttcttacattg

SEQ ID NO: 63626 - DNA, 25 bp, probe
tctggtgttactggtttcttacatt

SEQ ID NO: 63627 - DNA, 25 bp, probe
ttctggtgttactggtttcttacat

SEQ ID NO: 63628 - DNA, 25 bp, probe
tttctggtgttactggtttcttaca

SEQ ID NO: 63629 - DNA, 25 bp, probe
accatcctgtgcatttagattaagt

SEQ ID NO: 63630 - DNA, 25 bp, probe
tgtgcatttagattaagttcatccc

SEQ ID NO: 63631 - DNA, 25 bp, probe
ccatcctgtgcatttagattaagtt

SEQ ID NO: 63632 - DNA, 25 bp, probe
tttagattaagttcatccctgcaag

SEQ ID NO: 63633 - DNA, 25 bp, probe
catttagattaagttcatccctgca

SEQ ID NO: 63634 - DNA, 25 bp, probe
tgcatttagattaagttcatccctg

SEQ ID NO: 63635 - DNA, 25 bp, probe
gtgcatttagattaagttcatccct

SEQ ID NO: 63636 - DNA, 25 bp, probe
tcctgtgcatttagattaagttcat

SEQ ID NO: 63637 - DNA, 25 bp, probe
atttagattaagttcatccctgcaa

SEQ ID NO: 63638 - DNA, 25 bp, probe
atcctgtgcatttagattaagttca

SEQ ID NO: 63639 - DNA, 25 bp, probe
ctgtgcatttagattaagttcatcc

SEQ ID NO: 63640 - DNA, 25 bp, probe
cctgtgcatttagattaagttcatc

SEQ ID NO: 63641 - DNA, 25 bp, probe
catcctgtgcatttagattaagttc

SEQ ID NO: 63642 - DNA, 25 bp, probe
caccatcctgtgcatttagattaag

SEQ ID NO: 63643 - DNA, 25 bp, probe
tcaccatcctgtgcatttagattaa

SEQ ID NO: 63644 - DNA, 25 bp, probe
ttagattaagttcatccctgcaagg

SEQ ID NO: 63645 - DNA, 25 bp, probe
ctcaccatcctgtgcatttagatta

SEQ ID NO: 63646 - DNA, 25 bp, probe
gcatttagattaagttcatccctgc

SEQ ID NO: 63647 - DNA, 25 bp, probe
tagattaagttcatccctgcaagga

SEQ ID NO: 63648 - DNA, 25 bp, probe
cctcaccatcctgtgcatttagatt

SEQ ID NO: 63649 - DNA, 25 bp, probe
gtacctcaccatcctgtgcatttag

SEQ ID NO: 63650 - DNA, 25 bp, probe
tacctcaccatcctgtgcatttaga

SEQ ID NO: 63651 - DNA, 25 bp, probe
gattaagttcatccctgcaaggatc

SEQ ID NO: 63652 - DNA, 25 bp, probe
attaagttcatccctgcaaggatct

SEQ ID NO: 63653 - DNA, 25 bp, probe
agattaagttcatccctgcaaggat

SEQ ID NO: 63654 - DNA, 25 bp, probe
acctcaccatcctgtgcatttagat

SEQ ID NO: 63655 - DNA, 25 bp, probe
ttaagttcatccctgcaaggatctg

SEQ ID NO: 63656 - DNA, 25 bp, probe
cgtacctcaccatcctgtgcattta

SEQ ID NO: 63657 - DNA, 25 bp, probe
taagttcatccctgcaaggatctgc

SEQ ID NO: 63658 - DNA, 25 bp, probe
tgcagttactttgaagacatcaaaa

SEQ ID NO: 63659 - DNA, 25 bp, probe
ctgttgtatctcaggtcactgctgt

SEQ ID NO: 63660 - DNA, 25 bp, probe
tgttgtatctcaggtcactgctgtg

SEQ ID NO: 63661 - DNA, 25 bp, probe
gtatctcaggtcactgctgtggttg

SEQ ID NO: 63662 - DNA, 25 bp, probe
gttgtatctcaggtcactgctgtgg

SEQ ID NO: 63663 - DNA, 25 bp, probe
cctgttgtatctcaggtcactgctg

SEQ ID NO: 63664 - DNA, 25 bp, probe
actgaaggcttttgagcaagaggag

SEQ ID NO: 63665 - DNA, 25 bp, probe
tttatcagcagttactggacaggac

SEQ ID NO: 63666 - DNA, 25 bp, probe
ttatcagcagttactggacaggacc

SEQ ID NO: 63667 - DNA, 25 bp, probe
ttggttccacagggatctgatagtg

SEQ ID NO: 63668 - DNA, 25 bp, probe
gttggttccacagggatctgatagt

SEQ ID NO: 63669 - DNA, 25 bp, probe
tgttggttccacagggatctgatag

SEQ ID NO: 63670 - DNA, 25 bp, probe
ttttatcagcagttactggacagga

SEQ ID NO: 63671 - DNA, 25 bp, probe
gttttatcagcagttactggacagg

SEQ ID NO: 63672 - DNA, 25 bp, probe
ggttttatcagcagttactggacag

SEQ ID NO: 63673 - DNA, 25 bp, probe
tatcagcagttactggacaggacca

SEQ ID NO: 63674 - DNA, 25 bp, probe
cggttttatcagcagttactggaca

SEQ ID NO: 63675 - DNA, 25 bp, probe
ctttggtttcatggccggttttatc

SEQ ID NO: 63676 - DNA, 25 bp, probe
ctgttggttccacagggatctgata

SEQ ID NO: 63677 - DNA, 25 bp, probe
tttggtttcatggccggttttatca

SEQ ID NO: 63678 - DNA, 25 bp, probe
ccggttttatcagcagttactggac

SEQ ID NO: 63679 - DNA, 25 bp, probe
ttggtttcatggccggttttatcag

SEQ ID NO: 63680 - DNA, 25 bp, probe
catggccggttttatcagcagttac

SEQ ID NO: 63681 - DNA, 25 bp, probe
atggccggttttatcagcagttact

SEQ ID NO: 63682 - DNA, 25 bp, probe
tcatggccggttttatcagcagtta

SEQ ID NO: 63683 - DNA, 25 bp, probe
gctttggtttcatggccggttttat

SEQ ID NO: 63684 - DNA, 25 bp, probe
gtttcatggccggttttatcagcag

SEQ ID NO: 63685 - DNA, 25 bp, probe
gccggttttatcagcagttactgga

SEQ ID NO: 63686 - DNA, 25 bp, probe
attaaagacgactcggaggacctta

SEQ ID NO: 63687 - DNA, 25 bp, probe
gaagcatgacagcattaaagacgac

SEQ ID NO: 63688 - DNA, 25 bp, probe
gatggatggaatcaaaatctctcag

SEQ ID NO: 63689 - DNA, 25 bp, probe
atggatggaatcaaaatctctcagg

SEQ ID NO: 63690 - DNA, 25 bp, probe
ggatggatggaatcaaaatctctca

SEQ ID NO: 63691 - DNA, 25 bp, probe
ttaaagacgactcggaggaccttaa

SEQ ID NO: 63692 - DNA, 25 bp, probe
atgggatggatggaatcaaaatctc

SEQ ID NO: 63693 - DNA, 25 bp, probe
gatgggatggatggaatcaaaatct

SEQ ID NO: 63694 - DNA, 25 bp, probe
gggatggatggaatcaaaatctctc

SEQ ID NO: 63695 - DNA, 25 bp, probe
aagcatgacagcattaaagacgact

SEQ ID NO: 63696 - DNA, 25 bp, probe
tgggatggatggaatcaaaatctct

SEQ ID NO: 63697 - DNA, 25 bp, probe
ctcctaattgcttctggggtaaatt

SEQ ID NO: 63698 - DNA, 25 bp, probe
tcctaattgcttctggggtaaattc

SEQ ID NO: 63699 - DNA, 25 bp, probe
cgatgggatggatggaatcaaaatc

SEQ ID NO: 63700 - DNA, 25 bp, probe
agcatgacagcattaaagacgactc

SEQ ID NO: 63701 - DNA, 25 bp, probe
ctgcttacgcctcctaattgcttct

SEQ ID NO: 63702 - DNA, 25 bp, probe
gaggaccttaagccagttatcgatg

SEQ ID NO: 63703 - DNA, 25 bp, probe
cctcctaattgcttctggggtaaat

SEQ ID NO: 63704 - DNA, 25 bp, probe
tggatggaatcaaaatctctcaggg

SEQ ID NO: 63705 - DNA, 25 bp, probe
cctaattgcttctggggtaaattcc

SEQ ID NO: 63706 - DNA, 25 bp, probe
ggaagcatgacagcattaaagacga

SEQ ID NO: 63707 - DNA, 25 bp, probe
taattgcttctggggtaaattccaa

SEQ ID NO: 63708 - DNA, 25 bp, probe
ctaattgcttctggggtaaattcca

SEQ ID NO: 63709 - DNA, 25 bp, probe
cattaaagacgactcggaggacctt

SEQ ID NO: 63710 - DNA, 25 bp, probe
atgacagcattaaagacgactcgga

SEQ ID NO: 63711 - DNA, 25 bp, probe
ctcggaggaccttaagccagttatc

SEQ ID NO: 63712 - DNA, 25 bp, probe
catgacagcattaaagacgactcgg

SEQ ID NO: 63713 - DNA, 25 bp, probe
tatcgatgggatggatggaatcaaa

SEQ ID NO: 63714 - DNA, 25 bp, probe
ttatcgatgggatggatggaatcaa

SEQ ID NO: 63715 - DNA, 25 bp, probe
ggatggaatcaaaatctctcagggg

SEQ ID NO: 63716 - DNA, 25 bp, probe
aattgcttctggggtaaattccaag

SEQ ID NO: 63717 - DNA, 25 bp, probe
agttatcgatgggatggatggaatc

SEQ ID NO: 63718 - DNA, 25 bp, probe
taaagacgactcggaggaccttaag

SEQ ID NO: 63719 - DNA, 25 bp, probe
gttatcgatgggatggatggaatca

SEQ ID NO: 63720 - DNA, 25 bp, probe
cagttatcgatgggatggatggaat

SEQ ID NO: 63721 - DNA, 25 bp, probe
ggaggaccttaagccagttatcgat

SEQ ID NO: 63722 - DNA, 25 bp, probe
ggactttgacctaatcagagtcatc

SEQ ID NO: 63723 - DNA, 25 bp, probe
tgacagcattaaagacgactcggag

SEQ ID NO: 63724 - DNA, 25 bp, probe
aggactttgacctaatcagagtcat

SEQ ID NO: 63725 - DNA, 25 bp, probe
gactttgacctaatcagagtcatcg

SEQ ID NO: 63726 - DNA, 25 bp, probe
tcgatgggatggatggaatcaaaat

SEQ ID NO: 63727 - DNA, 25 bp, probe
gatggaatcaaaatctctcaggggc

SEQ ID NO: 63728 - DNA, 25 bp, probe
tgcaggactttgacctaatcagagt

SEQ ID NO: 63729 - DNA, 25 bp, probe
gcatgacagcattaaagacgactcg

SEQ ID NO: 63730 - DNA, 25 bp, probe
tttccttagactctccttcccattc

SEQ ID NO: 63731 - DNA, 25 bp, probe
ctttccttagactctccttcccatt

SEQ ID NO: 63732 - DNA, 25 bp, probe
cttagactctccttcccattctgag

SEQ ID NO: 63733 - DNA, 25 bp, probe
ttccttagactctccttcccattct

SEQ ID NO: 63734 - DNA, 25 bp, probe
ttcccattctgagatccagtacaat

SEQ ID NO: 63735 - DNA, 25 bp, probe
ctttacagggtcactaactctggag

SEQ ID NO: 63736 - DNA, 25 bp, probe
tcccattctgagatccagtacaatc

SEQ ID NO: 63737 - DNA, 25 bp, probe
ccttagactctccttcccattctga

SEQ ID NO: 63738 - DNA, 25 bp, probe
tccttagactctccttcccattctg

SEQ ID NO: 63739 - DNA, 25 bp, probe
cttcccattctgagatccagtacaa

SEQ ID NO: 63740 - DNA, 25 bp, probe
caaactgggctttccttagactctc

SEQ ID NO: 63741 - DNA, 25 bp, probe
cccattctgagatccagtacaatct

SEQ ID NO: 63742 - DNA, 25 bp, probe
gctttccttagactctccttcccat

SEQ ID NO: 63743 - DNA, 25 bp, probe
tttacagggtcactaactctggagt

SEQ ID NO: 63744 - DNA, 25 bp, probe
ctccttcccattctgagatccagta

SEQ ID NO: 63745 - DNA, 25 bp, probe
tccttcccattctgagatccagtac

SEQ ID NO: 63746 - DNA, 25 bp, probe
gtggatggcacaaagaaaccaaatt

SEQ ID NO: 63747 - DNA, 25 bp, probe
ctaccctctaccaatcacacttgct

SEQ ID NO: 63748 - DNA, 25 bp, probe
aaactgggctttccttagactctcc

SEQ ID NO: 63749 - DNA, 25 bp, probe
ccttcccattctgagatccagtaca

SEQ ID NO: 63750 - DNA, 25 bp, probe
ctgggctttccttagactctccttc

SEQ ID NO: 63751 - DNA, 25 bp, probe
cagctttacagggtcactaactctg

SEQ ID NO: 63752 - DNA, 25 bp, probe
tgaatccttcttcgcagctttacag

SEQ ID NO: 63753 - DNA, 25 bp, probe
ggatggcacaaagaaaccaaatttc

SEQ ID NO: 63754 - DNA, 25 bp, probe
taccctctaccaatcacacttgctg

SEQ ID NO: 63755 - DNA, 25 bp, probe
ccctaccctctaccaatcacacttg

SEQ ID NO: 63756 - DNA, 25 bp, probe
tggatggcacaaagaaaccaaattt

SEQ ID NO: 63757 - DNA, 25 bp, probe
gctttacagggtcactaactctgga

SEQ ID NO: 63758 - DNA, 25 bp, probe
tagactctccttcccattctgagat

SEQ ID NO: 63759 - DNA, 25 bp, probe
ctgaatccttcttcgcagctttaca

SEQ ID NO: 63760 - DNA, 25 bp, probe
ttagactctccttcccattctgaga

SEQ ID NO: 63761 - DNA, 25 bp, probe
actgggctttccttagactctcctt

SEQ ID NO: 63762 - DNA, 25 bp, probe
aactgggctttccttagactctcct

SEQ ID NO: 63763 - DNA, 25 bp, probe
tgtcagatcctttgccagtcaaatc

SEQ ID NO: 63764 - DNA, 25 bp, probe
ctgtcagatcctttgccagtcaaat

SEQ ID NO: 63765 - DNA, 25 bp, probe
cctaccctctaccaatcacacttgc

SEQ ID NO: 63766 - DNA, 25 bp, probe
agctttacagggtcactaactctgg

SEQ ID NO: 63767 - DNA, 25 bp, probe
gcagctttacagggtcactaactct

SEQ ID NO: 63768 - DNA, 25 bp, probe
ccaaactgggctttccttagactct

SEQ ID NO: 63769 - DNA, 25 bp, probe
agactctccttcccattctgagatc

SEQ ID NO: 63770 - DNA, 25 bp, probe
gaatccttcttcgcagctttacagg

SEQ ID NO: 63771 - DNA, 25 bp, probe
gtcagatcctttgccagtcaaatcc

SEQ ID NO: 63772 - DNA, 25 bp, probe
agtacaatctcacaggggtctactc

SEQ ID NO: 63773 - DNA, 25 bp, probe
accaaactgggctttccttagactc

SEQ ID NO: 63774 - DNA, 25 bp, probe
ccactctgaactaaagaaggaactg

SEQ ID NO: 63775 - DNA, 25 bp, probe
cactctgaactaaagaaggaactgc

SEQ ID NO: 63776 - DNA, 25 bp, probe
cccactctgaactaaagaaggaact

SEQ ID NO: 63777 - DNA, 25 bp, probe
actctgaactaaagaaggaactgcc

SEQ ID NO: 63778 - DNA, 25 bp, probe
ctctgaactaaagaaggaactgccg

SEQ ID NO: 63779 - DNA, 25 bp, probe
ccccactctgaactaaagaaggaac

SEQ ID NO: 63780 - DNA, 25 bp, probe
tctgaactaaagaaggaactgccgc

SEQ ID NO: 63781 - DNA, 25 bp, probe
gccccactctgaactaaagaaggaa

SEQ ID NO: 63782 - DNA, 25 bp, probe
ctgccccactctgaactaaagaagg

SEQ ID NO: 63783 - DNA, 25 bp, probe
cctgccccactctgaactaaagaag

SEQ ID NO: 63784 - DNA, 25 bp, probe
tgccccactctgaactaaagaagga

SEQ ID NO: 63785 - DNA, 25 bp, probe
gaacttaacattctgatattccagc

SEQ ID NO: 63786 - DNA, 25 bp, probe
gcgggaacttaacattctgatattc

SEQ ID NO: 63787 - DNA, 25 bp, probe
agcgggaacttaacattctgatatt

SEQ ID NO: 63788 - DNA, 25 bp, probe
atattcgtccatcgtttgccttaat

SEQ ID NO: 63789 - DNA, 25 bp, probe
aataaactcactttgcccattccat

SEQ ID NO: 63790 - DNA, 25 bp, probe
gagcgggaacttaacattctgatat

SEQ ID NO: 63791 - DNA, 25 bp, probe
aaagaagaggaagggcaagtttaag

SEQ ID NO: 63792 - DNA, 25 bp, probe
ttgccttaattctcgaacagttgac

SEQ ID NO: 63793 - DNA, 25 bp, probe
ggcaagtttaagagaagtcgtttaa

SEQ ID NO: 63794 - DNA, 25 bp, probe
taaagaagaggaagggcaagtttaa

SEQ ID NO: 63795 - DNA, 25 bp, probe
gcaagatgactggaaactagaaatt

SEQ ID NO: 63796 - DNA, 25 bp, probe
gggcaagtttaagagaagtcgttta

SEQ ID NO: 63797 - DNA, 25 bp, probe
taattctcgaacagttgactgctat

SEQ ID NO: 63798 - DNA, 25 bp, probe
ttaattctcgaacagttgactgcta

SEQ ID NO: 63799 - DNA, 25 bp, probe
tattcgtccatcgtttgccttaatt

SEQ ID NO: 63800 - DNA, 25 bp, probe
gtaaagaagaggaagggcaagttta

SEQ ID NO: 63801 - DNA, 25 bp, probe
ggtagcagtcaataaactcactttg

SEQ ID NO: 63802 - DNA, 25 bp, probe
ataaactcactttgcccattccatc

SEQ ID NO: 63803 - DNA, 25 bp, probe
aattctcgaacagttgactgctatt

SEQ ID NO: 63804 - DNA, 25 bp, probe
gtcaataaactcactttgcccattc

SEQ ID NO: 63805 - DNA, 25 bp, probe
catattcgtccatcgtttgccttaa

SEQ ID NO: 63806 - DNA, 25 bp, probe
gggtagcagtcaataaactcacttt

SEQ ID NO: 63807 - DNA, 25 bp, probe
agtcaataaactcactttgcccatt

SEQ ID NO: 63808 - DNA, 25 bp, probe
cttaattctcgaacagttgactgct

SEQ ID NO: 63809 - DNA, 25 bp, probe
aagaggaagggcaagtttaagagaa

SEQ ID NO: 63810 - DNA, 25 bp, probe
aagaagaggaagggcaagtttaaga

SEQ ID NO: 63811 - DNA, 25 bp, probe
attctcgaacagttgactgctattg

SEQ ID NO: 63812 - DNA, 25 bp, probe
tgccttaattctcgaacagttgact

SEQ ID NO: 63813 - DNA, 25 bp, probe
tcaataaactcactttgcccattcc

SEQ ID NO: 63814 - DNA, 25 bp, probe
aacttaacattctgatattccagct

SEQ ID NO: 63815 - DNA, 25 bp, probe
tgactggaaactagaaattcaacaa

SEQ ID NO: 63816 - DNA, 25 bp, probe
cagtcaataaactcactttgcccat

SEQ ID NO: 63817 - DNA, 25 bp, probe
agaggaagggcaagtttaagagaag

SEQ ID NO: 63818 - DNA, 25 bp, probe
gaagaggaagggcaagtttaagaga

SEQ ID NO: 63819 - DNA, 25 bp, probe
agaagaggaagggcaagtttaagag

SEQ ID NO: 63820 - DNA, 25 bp, probe
atgactggaaactagaaattcaaca

SEQ ID NO: 63821 - DNA, 25 bp, probe
ctcgaacagttgactgctattgaag

SEQ ID NO: 63822 - DNA, 25 bp, probe
attcgtccatcgtttgccttaattc

SEQ ID NO: 63823 - DNA, 25 bp, probe
caataaactcactttgcccattcca

SEQ ID NO: 63824 - DNA, 25 bp, probe
agaagtcgtttaaagctcaaagatg

SEQ ID NO: 63825 - DNA, 25 bp, probe
tcatattcgtccatcgtttgcctta

SEQ ID NO: 63826 - DNA, 25 bp, probe
aggaagggcaagtttaagagaagtc

SEQ ID NO: 63827 - DNA, 25 bp, probe
gaggaagggcaagtttaagagaagt

SEQ ID NO: 63828 - DNA, 25 bp, probe
aacaaatgtttgatgagttgagaac

SEQ ID NO: 63829 - DNA, 25 bp, probe
catagaggtgagtccaacactgctc

SEQ ID NO: 63830 - DNA, 25 bp, probe
agatctctctgcatagaggtgagtc

SEQ ID NO: 63831 - DNA, 25 bp, probe
gatctctctgcatagaggtgagtcc

SEQ ID NO: 63832 - DNA, 25 bp, probe
ctgcatagaggtgagtccaacactg

SEQ ID NO: 63833 - DNA, 25 bp, probe
tctgcatagaggtgagtccaacact

SEQ ID NO: 63834 - DNA, 25 bp, probe
atctctctgcatagaggtgagtcca

SEQ ID NO: 63835 - DNA, 25 bp, probe
ctctctgcatagaggtgagtccaac

SEQ ID NO: 63836 - DNA, 25 bp, probe
tctctctgcatagaggtgagtccaa

SEQ ID NO: 63837 - DNA, 25 bp, probe
ctctgcatagaggtgagtccaacac

SEQ ID NO: 63838 - DNA, 25 bp, probe
tctctgcatagaggtgagtccaaca

SEQ ID NO: 63839 - DNA, 25 bp, probe
gtgtccagaatctgcgtctgagatc

SEQ ID NO: 63840 - DNA, 25 bp, probe
tgtccagaatctgcgtctgagatct

SEQ ID NO: 63841 - DNA, 25 bp, probe
gtgaaagatgtcccaggatccatgg

SEQ ID NO: 63842 - DNA, 25 bp, probe
attgactatgaatatgctggctaca

SEQ ID NO: 63843 - DNA, 25 bp, probe
tatgaatatgctggctacaactacc

SEQ ID NO: 63844 - DNA, 25 bp, probe
gactatgaatatgctggctacaact

SEQ ID NO: 63845 - DNA, 25 bp, probe
actatgaatatgctggctacaacta

SEQ ID NO: 63846 - DNA, 25 bp, probe
tgactatgaatatgctggctacaac

SEQ ID NO: 63847 - DNA, 25 bp, probe
ctatgaatatgctggctacaactac

SEQ ID NO: 63848 - DNA, 25 bp, probe
cattgactatgaatatgctggctac

SEQ ID NO: 63849 - DNA, 25 bp, probe
ttgactatgaatatgctggctacaa

SEQ ID NO: 63850 - DNA, 25 bp, probe
gaatatgctggctacaactaccaag

SEQ ID NO: 63851 - DNA, 25 bp, probe
atgaatatgctggctacaactacca

SEQ ID NO: 63852 - DNA, 25 bp, probe
tgaatatgctggctacaactaccaa

SEQ ID NO: 63853 - DNA, 25 bp, probe
tcattgactatgaatatgctggcta

SEQ ID NO: 63854 - DNA, 25 bp, probe
atcatctatgacagcatcaaaggtc

SEQ ID NO: 63855 - DNA, 25 bp, probe
caagatgcacaattatttcacgctt

SEQ ID NO: 63856 - DNA, 25 bp, probe
attggcaaccatttcaatgagtttg

SEQ ID NO: 63857 - DNA, 25 bp, probe
aagatgcacaattatttcacgcttg

SEQ ID NO: 63858 - DNA, 25 bp, probe
acaagatgcacaattatttcacgct

SEQ ID NO: 63859 - DNA, 25 bp, probe
cacaagatgcacaattatttcacgc

SEQ ID NO: 63860 - DNA, 25 bp, probe
aatatgctggctacaactaccaagc

SEQ ID NO: 63861 - DNA, 25 bp, probe
ctctggcacaagatgcacaattatt

SEQ ID NO: 63862 - DNA, 25 bp, probe
ctggcacaagatgcacaattatttc

SEQ ID NO: 63863 - DNA, 25 bp, probe
atatgctggctacaactaccaagct

SEQ ID NO: 63864 - DNA, 25 bp, probe
ggcacaagatgcacaattatttcac

SEQ ID NO: 63865 - DNA, 25 bp, probe
tctggcacaagatgcacaattattt

SEQ ID NO: 63866 - DNA, 25 bp, probe
ggttcattgactatgaatatgctgg

SEQ ID NO: 63867 - DNA, 25 bp, probe
cggttcattgactatgaatatgctg

SEQ ID NO: 63868 - DNA, 25 bp, probe
ttcattgactatgaatatgctggct

SEQ ID NO: 63869 - DNA, 25 bp, probe
gttcattgactatgaatatgctggc

SEQ ID NO: 63870 - DNA, 25 bp, probe
gtgcggttcattgactatgaatatg

SEQ ID NO: 63871 - DNA, 25 bp, probe
gcacaagatgcacaattatttcacg

SEQ ID NO: 63872 - DNA, 25 bp, probe
tggcacaagatgcacaattatttca

SEQ ID NO: 63873 - DNA, 25 bp, probe
cctctggcacaagatgcacaattat

SEQ ID NO: 63874 - DNA, 25 bp, probe
caaccatttcaatgagtttgcaggc

SEQ ID NO: 63875 - DNA, 25 bp, probe
gcggttcattgactatgaatatgct

SEQ ID NO: 63876 - DNA, 25 bp, probe
agatgcacaattatttcacgcttgt

SEQ ID NO: 63877 - DNA, 25 bp, probe
cgtgcggttcattgactatgaatat

SEQ ID NO: 63878 - DNA, 25 bp, probe
ttttgacattggcaaccatttcaat

SEQ ID NO: 63879 - DNA, 25 bp, probe
tgcggttcattgactatgaatatgc

SEQ ID NO: 63880 - DNA, 25 bp, probe
catctatgacagcatcaaaggtcac

SEQ ID NO: 63881 - DNA, 25 bp, probe
tcatctatgacagcatcaaaggtca

SEQ ID NO: 63882 - DNA, 25 bp, probe
cttttgacattggcaaccatttcaa

SEQ ID NO: 63883 - DNA, 25 bp, probe
tcctctggcacaagatgcacaatta

SEQ ID NO: 63884 - DNA, 25 bp, probe
gcttttgacattggcaaccatttca

SEQ ID NO: 63885 - DNA, 25 bp, probe
acgtgcggttcattgactatgaata

SEQ ID NO: 63886 - DNA, 25 bp, probe
tttggaatgagcaggaacctgtaca

SEQ ID NO: 63887 - DNA, 25 bp, probe
ctgtcaccaagtaggaagaagaatg

SEQ ID NO: 63888 - DNA, 25 bp, probe
gctgtcaccaagtaggaagaagaat

SEQ ID NO: 63889 - DNA, 25 bp, probe
gagtaccaggtcttagatgtccaac

SEQ ID NO: 63890 - DNA, 25 bp, probe
agagtaccaggtcttagatgtccaa

SEQ ID NO: 63891 - DNA, 25 bp, probe
attgtctggatgtggaagagcttaa

SEQ ID NO: 63892 - DNA, 25 bp, probe
gatggaagagtaccaggtcttagat

SEQ ID NO: 63893 - DNA, 25 bp, probe
atggaagagtaccaggtcttagatg

SEQ ID NO: 63894 - DNA, 25 bp, probe
tgtcaccaagtaggaagaagaatgg

SEQ ID NO: 63895 - DNA, 25 bp, probe
gattgtctggatgtggaagagctta

SEQ ID NO: 63896 - DNA, 25 bp, probe
gaagagtaccaggtcttagatgtcc

SEQ ID NO: 63897 - DNA, 25 bp, probe
ggaagagtaccaggtcttagatgtc

SEQ ID NO: 63898 - DNA, 25 bp, probe
taccaggtcttagatgtccaaccaa

SEQ ID NO: 63899 - DNA, 25 bp, probe
aagagtaccaggtcttagatgtcca

SEQ ID NO: 63900 - DNA, 25 bp, probe
tggaagagtaccaggtcttagatgt

SEQ ID NO: 63901 - DNA, 25 bp, probe
ttggatggaagagtaccaggtctta

SEQ ID NO: 63902 - DNA, 25 bp, probe
ggatggaagagtaccaggtcttaga

SEQ ID NO: 63903 - DNA, 25 bp, probe
ggctgtcaccaagtaggaagaagaa

SEQ ID NO: 63904 - DNA, 25 bp, probe
ttgtctggatgtggaagagcttaag

SEQ ID NO: 63905 - DNA, 25 bp, probe
tggatggaagagtaccaggtcttag

SEQ ID NO: 63906 - DNA, 25 bp, probe
agtaccaggtcttagatgtccaacc

SEQ ID NO: 63907 - DNA, 25 bp, probe
ctggatgtggaagagcttaaggaag

SEQ ID NO: 63908 - DNA, 25 bp, probe
ttaaggaagggattggaagtcgaag

SEQ ID NO: 63909 - DNA, 25 bp, probe
gtaccaggtcttagatgtccaacca

SEQ ID NO: 63910 - DNA, 25 bp, probe
aagaaaagagggcttcagaaatatg

SEQ ID NO: 63911 - DNA, 25 bp, probe
tctggatgtggaagagcttaaggaa

SEQ ID NO: 63912 - DNA, 25 bp, probe
agaaaagagggcttcagaaatatgc

SEQ ID NO: 63913 - DNA, 25 bp, probe
accaggtcttagatgtccaaccaag

SEQ ID NO: 63914 - DNA, 25 bp, probe
cttggatggaagagtaccaggtctt

SEQ ID NO: 63915 - DNA, 25 bp, probe
cataataccaagctccaagtcccag

SEQ ID NO: 63916 - DNA, 25 bp, probe
aagtaggaagaagaatggggtacaa

SEQ ID NO: 63917 - DNA, 25 bp, probe
gtcaccaagtaggaagaagaatggg

SEQ ID NO: 63918 - DNA, 25 bp, probe
taaggaagggattggaagtcgaaga

SEQ ID NO: 63919 - DNA, 25 bp, probe
agtaggaagaagaatggggtacaag

SEQ ID NO: 63920 - DNA, 25 bp, probe
cttaaggaagggattggaagtcgaa

SEQ ID NO: 63921 - DNA, 25 bp, probe
aagagcttaaggaagggattggaag

SEQ ID NO: 63922 - DNA, 25 bp, probe
gaagagcttaaggaagggattggaa

SEQ ID NO: 63923 - DNA, 25 bp, probe
caagtaggaagaagaatggggtaca

SEQ ID NO: 63924 - DNA, 25 bp, probe
gtctggatgtggaagagcttaagga

SEQ ID NO: 63925 - DNA, 25 bp, probe
tggatgtggaagagcttaaggaagg

SEQ ID NO: 63926 - DNA, 25 bp, probe
gagcttaaggaagggattggaagtc

SEQ ID NO: 63927 - DNA, 25 bp, probe
taggaagaagaatggggtacaagga

SEQ ID NO: 63928 - DNA, 25 bp, probe
gtaggaagaagaatggggtacaagg

SEQ ID NO: 63929 - DNA, 25 bp, probe
ttttatcccgccccataataccaag

SEQ ID NO: 63930 - DNA, 25 bp, probe
gaagaagaatggggtacaaggacat

SEQ ID NO: 63931 - DNA, 25 bp, probe
tatggacctatacatgatgcaccta

SEQ ID NO: 63932 - DNA, 25 bp, probe
gacctatacatgatgcacctacata

SEQ ID NO: 63933 - DNA, 25 bp, probe
acctatacatgatgcacctacatat

SEQ ID NO: 63934 - DNA, 25 bp, probe
ggacctatacatgatgcacctacat

SEQ ID NO: 63935 - DNA, 25 bp, probe
atggacctatacatgatgcacctac

SEQ ID NO: 63936 - DNA, 25 bp, probe
ctatacatgatgcacctacatatgg

SEQ ID NO: 63937 - DNA, 25 bp, probe
cctatacatgatgcacctacatatg

SEQ ID NO: 63938 - DNA, 25 bp, probe
gtatggacctatacatgatgcacct

SEQ ID NO: 63939 - DNA, 25 bp, probe
tggacctatacatgatgcacctaca

SEQ ID NO: 63940 - DNA, 25 bp, probe
tatacatgatgcacctacatatggt

SEQ ID NO: 63941 - DNA, 25 bp, probe
cctgcatgtgtgtatggacctatac

SEQ ID NO: 63942 - DNA, 25 bp, probe
tgtgtgtatggacctatacatgatg

SEQ ID NO: 63943 - DNA, 25 bp, probe
atgtgtgtatggacctatacatgat

SEQ ID NO: 63944 - DNA, 25 bp, probe
gtgtgtatggacctatacatgatgc

SEQ ID NO: 63945 - DNA, 25 bp, probe
gcctgcatgtgtgtatggacctata

SEQ ID NO: 63946 - DNA, 25 bp, probe
gtgtatggacctatacatgatgcac

SEQ ID NO: 63947 - DNA, 25 bp, probe
tgtgtatggacctatacatgatgca

SEQ ID NO: 63948 - DNA, 25 bp, probe
tgcatgtgtgtatggacctatacat

SEQ ID NO: 63949 - DNA, 25 bp, probe
tgtatggacctatacatgatgcacc

SEQ ID NO: 63950 - DNA, 25 bp, probe
ctgcatgtgtgtatggacctataca

SEQ ID NO: 63951 - DNA, 25 bp, probe
ccaggaaggcatatgtgaacatgtc

SEQ ID NO: 63952 - DNA, 25 bp, probe
caggaaggcatatgtgaacatgtcg

SEQ ID NO: 63953 - DNA, 25 bp, probe
gaaggcatatgtgaacatgtcgctg

SEQ ID NO: 63954 - DNA, 25 bp, probe
tacatatggtgctgcccaagaacat

SEQ ID NO: 63955 - DNA, 25 bp, probe
atatgtgaacatgtcgctgtttgag

SEQ ID NO: 63956 - DNA, 25 bp, probe
catatgtgaacatgtcgctgtttga

SEQ ID NO: 63957 - DNA, 25 bp, probe
aaggcatatgtgaacatgtcgctgt

SEQ ID NO: 63958 - DNA, 25 bp, probe
aagccaggaaggcatatgtgaacat

SEQ ID NO: 63959 - DNA, 25 bp, probe
ctacatatggtgctgcccaagaaca

SEQ ID NO: 63960 - DNA, 25 bp, probe
gcatatgtgaacatgtcgctgtttg

SEQ ID NO: 63961 - DNA, 25 bp, probe
gaagccaggaaggcatatgtgaaca

SEQ ID NO: 63962 - DNA, 25 bp, probe
aggcatatgtgaacatgtcgctgtt

SEQ ID NO: 63963 - DNA, 25 bp, probe
ggcatatgtgaacatgtcgctgttt

SEQ ID NO: 63964 - DNA, 25 bp, probe
gaaggagacaaggaaatacatcaga

SEQ ID NO: 63965 - DNA, 25 bp, probe
agaaggagacaaggaaatacatcag

SEQ ID NO: 63966 - DNA, 25 bp, probe
aggagacaaggaaatacatcagatt

SEQ ID NO: 63967 - DNA, 25 bp, probe
aaggagacaaggaaatacatcagat

SEQ ID NO: 63968 - DNA, 25 bp, probe
gactgatgatttggctaaagaggaa

SEQ ID NO: 63969 - DNA, 25 bp, probe
actgatgatttggctaaagaggaac

SEQ ID NO: 63970 - DNA, 25 bp, probe
tagaaggagacaaggaaatacatca

SEQ ID NO: 63971 - DNA, 25 bp, probe
ccaacttctttattccagagagact

SEQ ID NO: 63972 - DNA, 25 bp, probe
accaacttctttattccagagagac

SEQ ID NO: 63973 - DNA, 25 bp, probe
aaccaacttctttattccagagaga

SEQ ID NO: 63974 - DNA, 25 bp, probe
gctagaaggagacaaggaaatacat

SEQ ID NO: 63975 - DNA, 25 bp, probe
gaaccaacttctttattccagagag

SEQ ID NO: 63976 - DNA, 25 bp, probe
agactgatgatttggctaaagagga

SEQ ID NO: 63977 - DNA, 25 bp, probe
gtgctagaaggagacaaggaaatac

SEQ ID NO: 63978 - DNA, 25 bp, probe
agtgctagaaggagacaaggaaata

SEQ ID NO: 63979 - DNA, 25 bp, probe
tagtgctagaaggagacaaggaaat

SEQ ID NO: 63980 - DNA, 25 bp, probe
taagggtgaaagtggtttagtgcta

SEQ ID NO: 63981 - DNA, 25 bp, probe
ctgatgatttggctaaagaggaacc

SEQ ID NO: 63982 - DNA, 25 bp, probe
tgctagaaggagacaaggaaataca

SEQ ID NO: 63983 - DNA, 25 bp, probe
ttagtgctagaaggagacaaggaaa

SEQ ID NO: 63984 - DNA, 25 bp, probe
tttagtgctagaaggagacaaggaa

SEQ ID NO: 63985 - DNA, 25 bp, probe
gaaagtggtttagtgctagaaggag

SEQ ID NO: 63986 - DNA, 25 bp, probe
cagactgatgatttggctaaagagg

SEQ ID NO: 63987 - DNA, 25 bp, probe
aaagtggtttagtgctagaaggaga

SEQ ID NO: 63988 - DNA, 25 bp, probe
ctagaaggagacaaggaaatacatc

SEQ ID NO: 63989 - DNA, 25 bp, probe
gagactctgagactaagggtgaaag

SEQ ID NO: 63990 - DNA, 25 bp, probe
gtgaaagtggtttagtgctagaagg

SEQ ID NO: 63991 - DNA, 25 bp, probe
ggtgaaagtggtttagtgctagaag

SEQ ID NO: 63992 - DNA, 25 bp, probe
tgagactaagggtgaaagtggttta

SEQ ID NO: 63993 - DNA, 25 bp, probe
caacttctttattccagagagactc

SEQ ID NO: 63994 - DNA, 25 bp, probe
tgaaagtggtttagtgctagaagga

SEQ ID NO: 63995 - DNA, 25 bp, probe
gtttagtgctagaaggagacaagga

SEQ ID NO: 63996 - DNA, 25 bp, probe
gagactaagggtgaaagtggtttag

SEQ ID NO: 63997 - DNA, 25 bp, probe
ggagacaaggaaatacatcagattt

SEQ ID NO: 63998 - DNA, 25 bp, probe
tggtttagtgctagaaggagacaag

SEQ ID NO: 63999 - DNA, 25 bp, probe
aagtggtttagtgctagaaggagac

SEQ ID NO: 64000 - DNA, 25 bp, probe
tcagactgatgatttggctaaagag

SEQ ID NO: 64001 - DNA, 25 bp, probe
gtggtttagtgctagaaggagacaa

SEQ ID NO: 64002 - DNA, 25 bp, probe
ctgagactaagggtgaaagtggttt

SEQ ID NO: 64003 - DNA, 25 bp, probe
gactctgagactaagggtgaaagtg

SEQ ID NO: 64004 - DNA, 25 bp, probe
agactctgagactaagggtgaaagt

SEQ ID NO: 64005 - DNA, 25 bp, probe
gtattgctgtttacagatcagactg

SEQ ID NO: 64006 - DNA, 25 bp, probe
ggtttagtgctagaaggagacaagg

SEQ ID NO: 64007 - DNA, 25 bp, probe
tattgctgtttacagatcagactga

SEQ ID NO: 64008 - DNA, 25 bp, probe
gaaggttgtcacctatgaccacatt

SEQ ID NO: 64009 - DNA, 25 bp, probe
aaggttgtcacctatgaccacattg

SEQ ID NO: 64010 - DNA, 25 bp, probe
atgggagaccacaagttccacattc

SEQ ID NO: 64011 - DNA, 25 bp, probe
agaaggttgtcacctatgaccacat

SEQ ID NO: 64012 - DNA, 25 bp, probe
gagaaggttgtcacctatgaccaca

SEQ ID NO: 64013 - DNA, 25 bp, probe
catgggagaccacaagttccacatt

SEQ ID NO: 64014 - DNA, 25 bp, probe
gaggagaaggttgtcacctatgacc

SEQ ID NO: 64015 - DNA, 25 bp, probe
cgaggagaaggttgtcacctatgac

SEQ ID NO: 64016 - DNA, 25 bp, probe
aggttgtcacctatgaccacattgg

SEQ ID NO: 64017 - DNA, 25 bp, probe
ggagaaggttgtcacctatgaccac

SEQ ID NO: 64018 - DNA, 25 bp, probe
aggagaaggttgtcacctatgacca

SEQ ID NO: 64019 - DNA, 25 bp, probe
ctgtgcctttgacttggtgaatatc

SEQ ID NO: 64020 - DNA, 25 bp, probe
cctttgacttggtgaatatccatct

SEQ ID NO: 64021 - DNA, 25 bp, probe
ctttgacttggtgaatatccatctt

SEQ ID NO: 64022 - DNA, 25 bp, probe
tttgacttggtgaatatccatcttt

SEQ ID NO: 64023 - DNA, 25 bp, probe
gcctttgacttggtgaatatccatc

SEQ ID NO: 64024 - DNA, 25 bp, probe
tgtgcctttgacttggtgaatatcc

SEQ ID NO: 64025 - DNA, 25 bp, probe
cctgtgcctttgacttggtgaatat

SEQ ID NO: 64026 - DNA, 25 bp, probe
tgcctttgacttggtgaatatccat

SEQ ID NO: 64027 - DNA, 25 bp, probe
atcttttccatgatgcttccaatct

SEQ ID NO: 64028 - DNA, 25 bp, probe
ggtgaatatccatcttttccatgat

SEQ ID NO: 64029 - DNA, 25 bp, probe
tcttttccatgatgcttccaatctg

SEQ ID NO: 64030 - DNA, 25 bp, probe
tcctgtgcctttgacttggtgaata

SEQ ID NO: 64031 - DNA, 25 bp, probe
gtgcctttgacttggtgaatatcca

SEQ ID NO: 64032 - DNA, 25 bp, probe
acttggtgaatatccatcttttcca

SEQ ID NO: 64033 - DNA, 25 bp, probe
gacttggtgaatatccatcttttcc

SEQ ID NO: 64034 - DNA, 25 bp, probe
cttggtgaatatccatcttttccat

SEQ ID NO: 64035 - DNA, 25 bp, probe
tgacttggtgaatatccatcttttc

SEQ ID NO: 64036 - DNA, 25 bp, probe
tttccatgatgcttccaatctggtc

SEQ ID NO: 64037 - DNA, 25 bp, probe
tggtgaatatccatcttttccatga

SEQ ID NO: 64038 - DNA, 25 bp, probe
ttgacttggtgaatatccatctttt

SEQ ID NO: 64039 - DNA, 25 bp, probe
ttggtgaatatccatcttttccatg

SEQ ID NO: 64040 - DNA, 25 bp, probe
cttttccatgatgcttccaatctgg

SEQ ID NO: 64041 - DNA, 25 bp, probe
tgaatatccatcttttccatgatgc

SEQ ID NO: 64042 - DNA, 25 bp, probe
catcttttccatgatgcttccaatc

SEQ ID NO: 64043 - DNA, 25 bp, probe
atatccatcttttccatgatgcttc

SEQ ID NO: 64044 - DNA, 25 bp, probe
gaatatccatcttttccatgatgct

SEQ ID NO: 64045 - DNA, 25 bp, probe
tatccatcttttccatgatgcttcc

SEQ ID NO: 64046 - DNA, 25 bp, probe
aatatccatcttttccatgatgctt

SEQ ID NO: 64047 - DNA, 25 bp, probe
ttttccatgatgcttccaatctggt

SEQ ID NO: 64048 - DNA, 25 bp, probe
ccatcttttccatgatgcttccaat

SEQ ID NO: 64049 - DNA, 25 bp, probe
gtgaatatccatcttttccatgatg

SEQ ID NO: 64050 - DNA, 25 bp, probe
atccatcttttccatgatgcttcca

SEQ ID NO: 64051 - DNA, 25 bp, probe
tccatcttttccatgatgcttccaa

SEQ ID NO: 64052 - DNA, 25 bp, probe
ccaattcagtgttgtgtatgtgtct

SEQ ID NO: 64053 - DNA, 25 bp, probe
caattcagtgttgtgtatgtgtctg

SEQ ID NO: 64054 - DNA, 25 bp, probe
aattcagtgttgtgtatgtgtctgg

SEQ ID NO: 64055 - DNA, 25 bp, probe
attgaactacttgggtgctatgatt

SEQ ID NO: 64056 - DNA, 25 bp, probe
aattgaactacttgggtgctatgat

SEQ ID NO: 64057 - DNA, 25 bp, probe
aaattgaactacttgggtgctatga

SEQ ID NO: 64058 - DNA, 25 bp, probe
atcacatggctcagcagattatcaa

SEQ ID NO: 64059 - DNA, 25 bp, probe
ttgaactacttgggtgctatgattc

SEQ ID NO: 64060 - DNA, 25 bp, probe
tgaaagcaacttgagagatttgaat

SEQ ID NO: 64061 - DNA, 25 bp, probe
atgaaagcaacttgagagatttgaa

SEQ ID NO: 64062 - DNA, 25 bp, probe
aatgaaagcaacttgagagatttga

SEQ ID NO: 64063 - DNA, 25 bp, probe
caatgaaagcaacttgagagatttg

SEQ ID NO: 64064 - DNA, 25 bp, probe
ctcagcagattatcaaagaagactt

SEQ ID NO: 64065 - DNA, 25 bp, probe
gctcagcagattatcaaagaagact

SEQ ID NO: 64066 - DNA, 25 bp, probe
atggctcagcagattatcaaagaag

SEQ ID NO: 64067 - DNA, 25 bp, probe
agcaacttgagagatttgaatagaa

SEQ ID NO: 64068 - DNA, 25 bp, probe
aagcaacttgagagatttgaataga

SEQ ID NO: 64069 - DNA, 25 bp, probe
gaatcacatggctcagcagattatc

SEQ ID NO: 64070 - DNA, 25 bp, probe
ggctcagcagattatcaaagaagac

SEQ ID NO: 64071 - DNA, 25 bp, probe
catggctcagcagattatcaaagaa

SEQ ID NO: 64072 - DNA, 25 bp, probe
aaataggaaaccctccagattacag

SEQ ID NO: 64073 - DNA, 25 bp, probe
gaaataggaaaccctccagattaca

SEQ ID NO: 64074 - DNA, 25 bp, probe
tgaaataggaaaccctccagattac

SEQ ID NO: 64075 - DNA, 25 bp, probe
tggctcagcagattatcaaagaaga

SEQ ID NO: 64076 - DNA, 25 bp, probe
gcaacttgagagatttgaatagaaa

SEQ ID NO: 64077 - DNA, 25 bp, probe
gaaagcaacttgagagatttgaata

SEQ ID NO: 64078 - DNA, 25 bp, probe
aatcacatggctcagcagattatca

SEQ ID NO: 64079 - DNA, 25 bp, probe
tgaatcacatggctcagcagattat

SEQ ID NO: 64080 - DNA, 25 bp, probe
atgaatcacatggctcagcagatta

SEQ ID NO: 64081 - DNA, 25 bp, probe
aaagcaacttgagagatttgaatag

SEQ ID NO: 64082 - DNA, 25 bp, probe
atgaaataggaaaccctccagatta

SEQ ID NO: 64083 - DNA, 25 bp, probe
tatgaaataggaaaccctccagatt

SEQ ID NO: 64084 - DNA, 25 bp, probe
gaactacttgggtgctatgattcac

SEQ ID NO: 64085 - DNA, 25 bp, probe
atatgaaataggaaaccctccagat

SEQ ID NO: 64086 - DNA, 25 bp, probe
cccaattcagtgttgtgtatgtgtc

SEQ ID NO: 64087 - DNA, 25 bp, probe
aataggaaaccctccagattacagg

SEQ ID NO: 64088 - DNA, 25 bp, probe
cacatggctcagcagattatcaaag

SEQ ID NO: 64089 - DNA, 25 bp, probe
accatatatcaatgaaagcaacttg

SEQ ID NO: 64090 - DNA, 25 bp, probe
agtgttgtgtatgtgtctgggtaac

SEQ ID NO: 64091 - DNA, 25 bp, probe
acatggctcagcagattatcaaaga

SEQ ID NO: 64092 - DNA, 25 bp, probe
tcacatggctcagcagattatcaaa

SEQ ID NO: 64093 - DNA, 25 bp, probe
agatattttggaggatagactgtgc

SEQ ID NO: 64094 - DNA, 25 bp, probe
tcagcagattatcaaagaagacttt

SEQ ID NO: 64095 - DNA, 25 bp, probe
cagtgttgtgtatgtgtctgggtaa

SEQ ID NO: 64096 - DNA, 25 bp, probe
ctcatcctagatcaccgaggttatg

SEQ ID NO: 64097 - DNA, 25 bp, probe
tctcatcctagatcaccgaggttat

SEQ ID NO: 64098 - DNA, 25 bp, probe
atctcatcctagatcaccgaggtta

SEQ ID NO: 64099 - DNA, 25 bp, probe
caaaggaatcatttacagggacctc

SEQ ID NO: 64100 - DNA, 25 bp, probe
aaggaatcatttacagggacctcaa

SEQ ID NO: 64101 - DNA, 25 bp, probe
aaaggaatcatttacagggacctca

SEQ ID NO: 64102 - DNA, 25 bp, probe
aatctcatcctagatcaccgaggtt

SEQ ID NO: 64103 - DNA, 25 bp, probe
aggaatcatttacagggacctcaag

SEQ ID NO: 64104 - DNA, 25 bp, probe
tcatcctagatcaccgaggttatgc

SEQ ID NO: 64105 - DNA, 25 bp, probe
gaggttatgccaaactggttgattt

SEQ ID NO: 64106 - DNA, 25 bp, probe
ccaaaggaatcatttacagggacct

SEQ ID NO: 64107 - DNA, 25 bp, probe
tccaaaggaatcatttacagggacc

SEQ ID NO: 64108 - DNA, 25 bp, probe
gaatcatttacagggacctcaagcc

SEQ ID NO: 64109 - DNA, 25 bp, probe
ggaatcatttacagggacctcaagc

SEQ ID NO: 64110 - DNA, 25 bp, probe
ctagatcaccgaggttatgccaaac

SEQ ID NO: 64111 - DNA, 25 bp, probe
ctcaagccagaaaatctcatcctag

SEQ ID NO: 64112 - DNA, 25 bp, probe
taggatttggaaagaaaacatggac

SEQ ID NO: 64113 - DNA, 25 bp, probe
aggatttggaaagaaaacatggact

SEQ ID NO: 64114 - DNA, 25 bp, probe
tcaagccagaaaatctcatcctaga

SEQ ID NO: 64115 - DNA, 25 bp, probe
ggatttggaaagaaaacatggactt

SEQ ID NO: 64116 - DNA, 25 bp, probe
atttacagggacctcaagccagaaa

SEQ ID NO: 64117 - DNA, 25 bp, probe
tagatcaccgaggttatgccaaact

SEQ ID NO: 64118 - DNA, 25 bp, probe
aaatctcatcctagatcaccgaggt

SEQ ID NO: 64119 - DNA, 25 bp, probe
cctcaagccagaaaatctcatccta

SEQ ID NO: 64120 - DNA, 25 bp, probe
ataggatttggaaagaaaacatgga

SEQ ID NO: 64121 - DNA, 25 bp, probe
aatcatttacagggacctcaagcca

SEQ ID NO: 64122 - DNA, 25 bp, probe
catcctagatcaccgaggttatgcc

SEQ ID NO: 64123 - DNA, 25 bp, probe
aataggatttggaaagaaaacatgg

SEQ ID NO: 64124 - DNA, 25 bp, probe
atcatttacagggacctcaagccag

SEQ ID NO: 64125 - DNA, 25 bp, probe
atcctagatcaccgaggttatgcca

SEQ ID NO: 64126 - DNA, 25 bp, probe
caagccagaaaatctcatcctagat

SEQ ID NO: 64127 - DNA, 25 bp, probe
aggttatgccaaactggttgatttt

SEQ ID NO: 64128 - DNA, 25 bp, probe
catttacagggacctcaagccagaa

SEQ ID NO: 64129 - DNA, 25 bp, probe
cgaggttatgccaaactggttgatt

SEQ ID NO: 64130 - DNA, 25 bp, probe
aagccagaaaatctcatcctagatc

SEQ ID NO: 64131 - DNA, 25 bp, probe
ccagaaaatctcatcctagatcacc

SEQ ID NO: 64132 - DNA, 25 bp, probe
ttccaaaggaatcatttacagggac

SEQ ID NO: 64133 - DNA, 25 bp, probe
gaaaatctcatcctagatcaccgag

SEQ ID NO: 64134 - DNA, 25 bp, probe
agaaaatctcatcctagatcaccga

SEQ ID NO: 64135 - DNA, 25 bp, probe
cagaaaatctcatcctagatcaccg

SEQ ID NO: 64136 - DNA, 25 bp, probe
agagtatgtagccccagagatcatc

SEQ ID NO: 64137 - DNA, 25 bp, probe
gccagaaaatctcatcctagatcac

SEQ ID NO: 64138 - DNA, 25 bp, probe
agccagaaaatctcatcctagatca

SEQ ID NO: 64139 - DNA, 25 bp, probe
tcctagatcaccgaggttatgccaa

SEQ ID NO: 64140 - DNA, 25 bp, probe
gaggaacaatggcatctctgtcttg

SEQ ID NO: 64141 - DNA, 25 bp, probe
atctatgacaaagtgatgaccgtcc

SEQ ID NO: 64142 - DNA, 25 bp, probe
gaacaatggcatctctgtcttggtc

SEQ ID NO: 64143 - DNA, 25 bp, probe
tgaggaacaatggcatctctgtctt

SEQ ID NO: 64144 - DNA, 25 bp, probe
ctgaggaacaatggcatctctgtct

SEQ ID NO: 64145 - DNA, 25 bp, probe
ctatgacaaagtgatgaccgtccag

SEQ ID NO: 64146 - DNA, 25 bp, probe
tatgacaaagtgatgaccgtccaga

SEQ ID NO: 64147 - DNA, 25 bp, probe
tctatgacaaagtgatgaccgtcca

SEQ ID NO: 64148 - DNA, 25 bp, probe
catctatgacaaagtgatgaccgtc

SEQ ID NO: 64149 - DNA, 25 bp, probe
cacatctatgacaaagtgatgaccg

SEQ ID NO: 64150 - DNA, 25 bp, probe
gtgcctaccttctggaatgtctgtg

SEQ ID NO: 64151 - DNA, 25 bp, probe
aggaacaatggcatctctgtcttgg

SEQ ID NO: 64152 - DNA, 25 bp, probe
acatctatgacaaagtgatgaccgt

SEQ ID NO: 64153 - DNA, 25 bp, probe
gcacatctatgacaaagtgatgacc

SEQ ID NO: 64154 - DNA, 25 bp, probe
aatggtgcctaccttctggaatgtc

SEQ ID NO: 64155 - DNA, 25 bp, probe
tgctgcacatctatgacaaagtgat

SEQ ID NO: 64156 - DNA, 25 bp, probe
ggaacaatggcatctctgtcttggt

SEQ ID NO: 64157 - DNA, 25 bp, probe
gaaatggtgcctaccttctggaatg

SEQ ID NO: 64158 - DNA, 25 bp, probe
ctgcacatctatgacaaagtgatga

SEQ ID NO: 64159 - DNA, 25 bp, probe
tgcacatctatgacaaagtgatgac

SEQ ID NO: 64160 - DNA, 25 bp, probe
tgaaatggtgcctaccttctggaat

SEQ ID NO: 64161 - DNA, 25 bp, probe
ctgctgcacatctatgacaaagtga

SEQ ID NO: 64162 - DNA, 25 bp, probe
gaagctgaggaacaatggcatctct

SEQ ID NO: 64163 - DNA, 25 bp, probe
agaagctgaggaacaatggcatctc

SEQ ID NO: 64164 - DNA, 25 bp, probe
aaatggtgcctaccttctggaatgt

SEQ ID NO: 64165 - DNA, 25 bp, probe
atgacaaagtgatgaccgtccagag

SEQ ID NO: 64166 - DNA, 25 bp, probe
gctgcacatctatgacaaagtgatg

SEQ ID NO: 64167 - DNA, 25 bp, probe
aagctgaggaacaatggcatctctg

SEQ ID NO: 64168 - DNA, 25 bp, probe
ctgaaatggtgcctaccttctggaa

SEQ ID NO: 64169 - DNA, 25 bp, probe
cagaagctgaggaacaatggcatct

SEQ ID NO: 64170 - DNA, 25 bp, probe
cctgctgcacatctatgacaaagtg

SEQ ID NO: 64171 - DNA, 25 bp, probe
gtatgtgtgagccagggatggattc

SEQ ID NO: 64172 - DNA, 25 bp, probe
tatgtgtgagccagggatggattct

SEQ ID NO: 64173 - DNA, 25 bp, probe
ccctgctgcacatctatgacaaagt

SEQ ID NO: 64174 - DNA, 25 bp, probe
tggacaaatgcctatgaaattaaac

SEQ ID NO: 64175 - DNA, 25 bp, probe
ggacaaatgcctatgaaattaaact

SEQ ID NO: 64176 - DNA, 25 bp, probe
atggacaaatgcctatgaaattaaa

SEQ ID NO: 64177 - DNA, 25 bp, probe
catggacaaatgcctatgaaattaa

SEQ ID NO: 64178 - DNA, 25 bp, probe
aaagatcacaaggaggttcaccatg

SEQ ID NO: 64179 - DNA, 25 bp, probe
ggataacgaattggaaaagatcaca

SEQ ID NO: 64180 - DNA, 25 bp, probe
aggataacgaattggaaaagatcac

SEQ ID NO: 64181 - DNA, 25 bp, probe
caggataacgaattggaaaagatca

SEQ ID NO: 64182 - DNA, 25 bp, probe
taacgaattggaaaagatcacaagg

SEQ ID NO: 64183 - DNA, 25 bp, probe
aattggaaaagatcacaaggaggtt

SEQ ID NO: 64184 - DNA, 25 bp, probe
aacgaattggaaaagatcacaagga

SEQ ID NO: 64185 - DNA, 25 bp, probe
attggaaaagatcacaaggaggttc

SEQ ID NO: 64186 - DNA, 25 bp, probe
gaattggaaaagatcacaaggaggt

SEQ ID NO: 64187 - DNA, 25 bp, probe
caaagaagggctttattgcatttcc

SEQ ID NO: 64188 - DNA, 25 bp, probe
acgaattggaaaagatcacaaggag

SEQ ID NO: 64189 - DNA, 25 bp, probe
gacaaatgcctatgaaattaaacta

SEQ ID NO: 64190 - DNA, 25 bp, probe
gactgccaggataacgaattggaaa

SEQ ID NO: 64191 - DNA, 25 bp, probe
ataacgaattggaaaagatcacaag

SEQ ID NO: 64192 - DNA, 25 bp, probe
gataacgaattggaaaagatcacaa

SEQ ID NO: 64193 - DNA, 25 bp, probe
aaaagatcacaaggaggttcaccat

SEQ ID NO: 64194 - DNA, 25 bp, probe
ccaggataacgaattggaaaagatc

SEQ ID NO: 64195 - DNA, 25 bp, probe
cgaattggaaaagatcacaaggagg

SEQ ID NO: 64196 - DNA, 25 bp, probe
ttggaaaagatcacaaggaggttca

SEQ ID NO: 64197 - DNA, 25 bp, probe
gccaggataacgaattggaaaagat

SEQ ID NO: 64198 - DNA, 25 bp, probe
ggactgccaggataacgaattggaa

SEQ ID NO: 64199 - DNA, 25 bp, probe
aaagaagggctttattgcatttccc

SEQ ID NO: 64200 - DNA, 25 bp, probe
gaaaagatcacaaggaggttcacca

SEQ ID NO: 64201 - DNA, 25 bp, probe
tggaaaagatcacaaggaggttcac

SEQ ID NO: 64202 - DNA, 25 bp, probe
acaaatgcctatgaaattaaactat

SEQ ID NO: 64203 - DNA, 25 bp, probe
ctgccaggataacgaattggaaaag

SEQ ID NO: 64204 - DNA, 25 bp, probe
tgccaggataacgaattggaaaaga

SEQ ID NO: 64205 - DNA, 25 bp, probe
ccatggacaaatgcctatgaaatta

SEQ ID NO: 64206 - DNA, 25 bp, probe
actgccaggataacgaattggaaaa

SEQ ID NO: 64207 - DNA, 25 bp, probe
ggaaaagatcacaaggaggttcacc

SEQ ID NO: 64208 - DNA, 25 bp, probe
accatggacaaatgcctatgaaatt

SEQ ID NO: 64209 - DNA, 25 bp, probe
caccatggacaaatgcctatgaaat

SEQ ID NO: 64210 - DNA, 25 bp, probe
tagcaaagaagggctttattgcatt

SEQ ID NO: 64211 - DNA, 25 bp, probe
ctagcaaagaagggctttattgcat

SEQ ID NO: 64212 - DNA, 25 bp, probe
gcaaagaagggctttattgcatttc

SEQ ID NO: 64213 - DNA, 25 bp, probe
aagatcacaaggaggttcaccatgg

SEQ ID NO: 64214 - DNA, 25 bp, probe
agcaaagaagggctttattgcattt

SEQ ID NO: 64215 - DNA, 25 bp, probe
gatcacaaggaggttcaccatggag

SEQ ID NO: 64216 - DNA, 25 bp, probe
aagaagggctttattgcatttcccc

SEQ ID NO: 64217 - DNA, 25 bp, probe
ccaccatggacaaatgcctatgaaa

SEQ ID NO: 64218 - DNA, 25 bp, probe
cccaccatggacaaatgcctatgaa

SEQ ID NO: 64219 - DNA, 25 bp, probe
gctcaggaaggttatgtcatctatt

SEQ ID NO: 64220 - DNA, 25 bp, probe
tcaggaaggttatgtcatctattgg

SEQ ID NO: 64221 - DNA, 25 bp, probe
ggaaggttatgtcatctattggcaa

SEQ ID NO: 64222 - DNA, 25 bp, probe
caggaaggttatgtcatctattggc

SEQ ID NO: 64223 - DNA, 25 bp, probe
ctcaggaaggttatgtcatctattg

SEQ ID NO: 64224 - DNA, 25 bp, probe
gaaggttatgtcatctattggcaat

SEQ ID NO: 64225 - DNA, 25 bp, probe
aggaaggttatgtcatctattggca

SEQ ID NO: 64226 - DNA, 25 bp, probe
atgtgtattgaatgctcaggtatcc

SEQ ID NO: 64227 - DNA, 25 bp, probe
aaggttatgtcatctattggcaatg

SEQ ID NO: 64228 - DNA, 25 bp, probe
tgtgtattgaatgctcaggtatcca

SEQ ID NO: 64229 - DNA, 25 bp, probe
tcatgtgtattgaatgctcaggtat

SEQ ID NO: 64230 - DNA, 25 bp, probe
catgtgtattgaatgctcaggtatc

SEQ ID NO: 64231 - DNA, 25 bp, probe
ctcatgtgtattgaatgctcaggta

SEQ ID NO: 64232 - DNA, 25 bp, probe
agctcaggaaggttatgtcatctat

SEQ ID NO: 64233 - DNA, 25 bp, probe
gtgtattgaatgctcaggtatccac

SEQ ID NO: 64234 - DNA, 25 bp, probe
gagtcctcatgtgtattgaatgctc

SEQ ID NO: 64235 - DNA, 25 bp, probe
gtcctcatgtgtattgaatgctcag

SEQ ID NO: 64236 - DNA, 25 bp, probe
agtcctcatgtgtattgaatgctca

SEQ ID NO: 64237 - DNA, 25 bp, probe
ggttatgtcatctattggcaatgag

SEQ ID NO: 64238 - DNA, 25 bp, probe
aggttatgtcatctattggcaatga

SEQ ID NO: 64239 - DNA, 25 bp, probe
gttatgtcatctattggcaatgagc

SEQ ID NO: 64240 - DNA, 25 bp, probe
ggagtcctcatgtgtattgaatgct

SEQ ID NO: 64241 - DNA, 25 bp, probe
tgtattgaatgctcaggtatccacc

SEQ ID NO: 64242 - DNA, 25 bp, probe
atccattccaaatatgaggagaagc

SEQ ID NO: 64243 - DNA, 25 bp, probe
tcctcatgtgtattgaatgctcagg

SEQ ID NO: 64244 - DNA, 25 bp, probe
tatgtcatctattggcaatgagcta

SEQ ID NO: 64245 - DNA, 25 bp, probe
ttatgtcatctattggcaatgagct

SEQ ID NO: 64246 - DNA, 25 bp, probe
cctcatgtgtattgaatgctcaggt

SEQ ID NO: 64247 - DNA, 25 bp, probe
atgtcatctattggcaatgagctag

SEQ ID NO: 64248 - DNA, 25 bp, probe
ttgggagtcctcatgtgtattgaat

SEQ ID NO: 64249 - DNA, 25 bp, probe
gatccattccaaatatgaggagaag

SEQ ID NO: 64250 - DNA, 25 bp, probe
gtattgaatgctcaggtatccaccg

SEQ ID NO: 64251 - DNA, 25 bp, probe
aataaagtccacgagggaagagaag

SEQ ID NO: 64252 - DNA, 25 bp, probe
cttgggagtcctcatgtgtattgaa

SEQ ID NO: 64253 - DNA, 25 bp, probe
gaacttgggagtcctcatgtgtatt

SEQ ID NO: 64254 - DNA, 25 bp, probe
tgggagtcctcatgtgtattgaatg

SEQ ID NO: 64255 - DNA, 25 bp, probe
tccaaatatgaggagaagctctttc

SEQ ID NO: 64256 - DNA, 25 bp, probe
ttccaaatatgaggagaagctcttt

SEQ ID NO: 64257 - DNA, 25 bp, probe
attccaaatatgaggagaagctctt

SEQ ID NO: 64258 - DNA, 25 bp, probe
cattccaaatatgaggagaagctct

SEQ ID NO: 64259 - DNA, 25 bp, probe
caataaagtccacgagggaagagaa

SEQ ID NO: 64260 - DNA, 25 bp, probe
aacttgggagtcctcatgtgtattg

SEQ ID NO: 64261 - DNA, 25 bp, probe
ccattccaaatatgaggagaagctc

SEQ ID NO: 64262 - DNA, 25 bp, probe
ctcaataaagtccacgagggaagag

SEQ ID NO: 64263 - DNA, 25 bp, probe
cactgaattgaacaccatactgaac

SEQ ID NO: 64264 - DNA, 25 bp, probe
actgaattgaacaccatactgaaca

SEQ ID NO: 64265 - DNA, 25 bp, probe
acactgaattgaacaccatactgaa

SEQ ID NO: 64266 - DNA, 25 bp, probe
gacactgaattgaacaccatactga

SEQ ID NO: 64267 - DNA, 25 bp, probe
aattgaacaccatactgaacagcat

SEQ ID NO: 64268 - DNA, 25 bp, probe
tgataatggttgttctcaatcttgg

SEQ ID NO: 64269 - DNA, 25 bp, probe
attgaacaccatactgaacagcatc

SEQ ID NO: 64270 - DNA, 25 bp, probe
ggacactgaattgaacaccatactg

SEQ ID NO: 64271 - DNA, 25 bp, probe
aacaccatactgaacagcatcaatt

SEQ ID NO: 64272 - DNA, 25 bp, probe
gaattgaacaccatactgaacagca

SEQ ID NO: 64273 - DNA, 25 bp, probe
tgaattgaacaccatactgaacagc

SEQ ID NO: 64274 - DNA, 25 bp, probe
ctgaattgaacaccatactgaacag

SEQ ID NO: 64275 - DNA, 25 bp, probe
gaacaccatactgaacagcatcaat

SEQ ID NO: 64276 - DNA, 25 bp, probe
gcactttctgttgataatggttgtt

SEQ ID NO: 64277 - DNA, 25 bp, probe
cactttctgttgataatggttgttc

SEQ ID NO: 64278 - DNA, 25 bp, probe
agcactttctgttgataatggttgt

SEQ ID NO: 64279 - DNA, 25 bp, probe
actttctgttgataatggttgttct

SEQ ID NO: 64280 - DNA, 25 bp, probe
tgaacaccatactgaacagcatcaa

SEQ ID NO: 64281 - DNA, 25 bp, probe
ttgaacaccatactgaacagcatca

SEQ ID NO: 64282 - DNA, 25 bp, probe
ataatggttgttctcaatcttggga

SEQ ID NO: 64283 - DNA, 25 bp, probe
gataatggttgttctcaatcttggg

SEQ ID NO: 64284 - DNA, 25 bp, probe
ctttctgttgataatggttgttctc

SEQ ID NO: 64285 - DNA, 25 bp, probe
taatggttgttctcaatcttgggac

SEQ ID NO: 64286 - DNA, 25 bp, probe
caccatactgaacagcatcaatttc

SEQ ID NO: 64287 - DNA, 25 bp, probe
tttctgttgataatggttgttctca

SEQ ID NO: 64288 - DNA, 25 bp, probe
aatcttgggacactgaattgaacac

SEQ ID NO: 64289 - DNA, 25 bp, probe
gttctcaatcttgggacactgaatt

SEQ ID NO: 64290 - DNA, 25 bp, probe
acaccatactgaacagcatcaattt

SEQ ID NO: 64291 - DNA, 25 bp, probe
cagcactttctgttgataatggttg

SEQ ID NO: 64292 - DNA, 25 bp, probe
gaagcagcactttctgttgataatg

SEQ ID NO: 64293 - DNA, 25 bp, probe
agagaacgcacaggctattagtcat

SEQ ID NO: 64294 - DNA, 25 bp, probe
ttctgttgataatggttgttctcaa

SEQ ID NO: 64295 - DNA, 25 bp, probe
accatactgaacagcatcaatttcg

SEQ ID NO: 64296 - DNA, 25 bp, probe
tgttgataatggttgttctcaatct

SEQ ID NO: 64297 - DNA, 25 bp, probe
tctgttgataatggttgttctcaat

SEQ ID NO: 64298 - DNA, 25 bp, probe
ctgttgataatggttgttctcaatc

SEQ ID NO: 64299 - DNA, 25 bp, probe
aacagcatcaatttcgacaaagaat

SEQ ID NO: 64300 - DNA, 25 bp, probe
gaacagcatcaatttcgacaaagaa

SEQ ID NO: 64301 - DNA, 25 bp, probe
gagaacgcacaggctattagtcatg

SEQ ID NO: 64302 - DNA, 25 bp, probe
tgttctcaatcttgggacactgaat

SEQ ID NO: 64303 - DNA, 25 bp, probe
gggacactgaattgaacaccatact

SEQ ID NO: 64304 - DNA, 25 bp, probe
aagcagcactttctgttgataatgg

SEQ ID NO: 64305 - DNA, 25 bp, probe
catactgaacagcatcaatttcgac

SEQ ID NO: 64306 - DNA, 25 bp, probe
ttgttctcaatcttgggacactgaa

SEQ ID NO: 64307 - DNA, 25 bp, probe
ggagaaaccagaatgtgataaaggc

SEQ ID NO: 64308 - DNA, 25 bp, probe
caaaccagacagaaaccaaagagag

SEQ ID NO: 64309 - DNA, 25 bp, probe
aaaccagacagaaaccaaagagagt

SEQ ID NO: 64310 - DNA, 25 bp, probe
aaccagacagaaaccaaagagagtt

SEQ ID NO: 64311 - DNA, 25 bp, probe
tggagaaaccagaatgtgataaagg

SEQ ID NO: 64312 - DNA, 25 bp, probe
cttcgacctcagtgtcttcttctac

SEQ ID NO: 64313 - DNA, 25 bp, probe
aatcccaaaccagacagaaaccaaa

SEQ ID NO: 64314 - DNA, 25 bp, probe
ccaaaccagacagaaaccaaagaga

SEQ ID NO: 64315 - DNA, 25 bp, probe
accagacagaaaccaaagagagttg

SEQ ID NO: 64316 - DNA, 25 bp, probe
atcccaaaccagacagaaaccaaag

SEQ ID NO: 64317 - DNA, 25 bp, probe
gaatcccaaaccagacagaaaccaa

SEQ ID NO: 64318 - DNA, 25 bp, probe
cagacagaaaccaaagagagttgct

SEQ ID NO: 64319 - DNA, 25 bp, probe
ccttcgacctcagtgtcttcttcta

SEQ ID NO: 64320 - DNA, 25 bp, probe
agacagaaaccaaagagagttgctg

SEQ ID NO: 64321 - DNA, 25 bp, probe
ttcgacctcagtgtcttcttctacc

SEQ ID NO: 64322 - DNA, 25 bp, probe
caggaatcccaaaccagacagaaac

SEQ ID NO: 64323 - DNA, 25 bp, probe
gtaagatcctggttcactgcgtcat

SEQ ID NO: 64324 - DNA, 25 bp, probe
cccaaaccagacagaaaccaaagag

SEQ ID NO: 64325 - DNA, 25 bp, probe
taagatcctggttcactgcgtcatg

SEQ ID NO: 64326 - DNA, 25 bp, probe
aagagagttgctgctgttggagatg

SEQ ID NO: 64327 - DNA, 25 bp, probe
gagaaaccagaatgtgataaaggcc

SEQ ID NO: 64328 - DNA, 25 bp, probe
ctaagcgacgaccacagtaagatcc

SEQ ID NO: 64329 - DNA, 25 bp, probe
ccagacagaaaccaaagagagttgc

SEQ ID NO: 64330 - DNA, 25 bp, probe
tcccaaaccagacagaaaccaaaga

SEQ ID NO: 64331 - DNA, 25 bp, probe
gaaaccaaagagagttgctgctgtt

SEQ ID NO: 64332 - DNA, 25 bp, probe
aaagagagttgctgctgttggagat

SEQ ID NO: 64333 - DNA, 25 bp, probe
taagcgacgaccacagtaagatcct

SEQ ID NO: 64334 - DNA, 25 bp, probe
aaaccaaagagagttgctgctgttg

SEQ ID NO: 64335 - DNA, 25 bp, probe
aggaatcccaaaccagacagaaacc

SEQ ID NO: 64336 - DNA, 25 bp, probe
ccaggaatcccaaaccagacagaaa

SEQ ID NO: 64337 - DNA, 25 bp, probe
cagaaaccaaagagagttgctgctg

SEQ ID NO: 64338 - DNA, 25 bp, probe
gacagaaaccaaagagagttgctgc

SEQ ID NO: 64339 - DNA, 25 bp, probe
ggaatcccaaaccagacagaaacca

SEQ ID NO: 64340 - DNA, 25 bp, probe
caccttcgacctcagtgtcttcttc

SEQ ID NO: 64341 - DNA, 25 bp, probe
agaaaccaaagagagttgctgctgt

SEQ ID NO: 64342 - DNA, 25 bp, probe
accttcgacctcagtgtcttcttct

SEQ ID NO: 64343 - DNA, 25 bp, probe
acagaaaccaaagagagttgctgct

SEQ ID NO: 64344 - DNA, 25 bp, probe
ctggagaaaccagaatgtgataaag

SEQ ID NO: 64345 - DNA, 25 bp, probe
cctggagaaaccagaatgtgataaa

SEQ ID NO: 64346 - DNA, 25 bp, probe
gaccacagtaagatcctggttcact

SEQ ID NO: 64347 - DNA, 25 bp, probe
tcgacctcagtgtcttcttctaccc

SEQ ID NO: 64348 - DNA, 25 bp, probe
accacagtaagatcctggttcactg

SEQ ID NO: 64349 - DNA, 25 bp, probe
gcctggagaaaccagaatgtgataa

SEQ ID NO: 64350 - DNA, 25 bp, probe
ccacagtaagatcctggttcactgc

SEQ ID NO: 64351 - DNA, 25 bp, probe
attactaatgaccaggaggctgatt

SEQ ID NO: 64352 - DNA, 25 bp, probe
ttgccctggaagacatttatgaaag

SEQ ID NO: 64353 - DNA, 25 bp, probe
tttatgaaagcccaaatcacctgta

SEQ ID NO: 64354 - DNA, 25 bp, probe
cagatatatgggaagaaggtggaag

SEQ ID NO: 64355 - DNA, 25 bp, probe
gttgccctggaagacatttatgaaa

SEQ ID NO: 64356 - DNA, 25 bp, probe
agacatttatgaaagcccaaatcac

SEQ ID NO: 64357 - DNA, 25 bp, probe
ggaagacatttatgaaagcccaaat

SEQ ID NO: 64358 - DNA, 25 bp, probe
tattgttgccctggaagacatttat

SEQ ID NO: 64359 - DNA, 25 bp, probe
atattgttgccctggaagacattta

SEQ ID NO: 64360 - DNA, 25 bp, probe
aagacatttatgaaagcccaaatca

SEQ ID NO: 64361 - DNA, 25 bp, probe
catttatgaaagcccaaatcacctg

SEQ ID NO: 64362 - DNA, 25 bp, probe
gacatttatgaaagcccaaatcacc

SEQ ID NO: 64363 - DNA, 25 bp, probe
gaagacatttatgaaagcccaaatc

SEQ ID NO: 64364 - DNA, 25 bp, probe
atttatgaaagcccaaatcacctgt

SEQ ID NO: 64365 - DNA, 25 bp, probe
acatttatgaaagcccaaatcacct

SEQ ID NO: 64366 - DNA, 25 bp, probe
agatatatgggaagaaggtggaagc

SEQ ID NO: 64367 - DNA, 25 bp, probe
ttatgaaagcccaaatcacctgtac

SEQ ID NO: 64368 - DNA, 25 bp, probe
atatatgggaagaaggtggaagcta

SEQ ID NO: 64369 - DNA, 25 bp, probe
ttactaatgaccaggaggctgattt

SEQ ID NO: 64370 - DNA, 25 bp, probe
gcagatatatgggaagaaggtggaa

SEQ ID NO: 64371 - DNA, 25 bp, probe
cattactaatgaccaggaggctgat

SEQ ID NO: 64372 - DNA, 25 bp, probe
attgttgccctggaagacatttatg

SEQ ID NO: 64373 - DNA, 25 bp, probe
tatatgggaagaaggtggaagctag

SEQ ID NO: 64374 - DNA, 25 bp, probe
tactaatgaccaggaggctgatttc

SEQ ID NO: 64375 - DNA, 25 bp, probe
gaaggtggaagctagttctctgttg

SEQ ID NO: 64376 - DNA, 25 bp, probe
tatgaaagcccaaatcacctgtact

SEQ ID NO: 64377 - DNA, 25 bp, probe
tggaagacatttatgaaagcccaaa

SEQ ID NO: 64378 - DNA, 25 bp, probe
atgtatctgcttccatctgcctctc

SEQ ID NO: 64379 - DNA, 25 bp, probe
gatatatgggaagaaggtggaagct

SEQ ID NO: 64380 - DNA, 25 bp, probe
aatattgttgccctggaagacattt

SEQ ID NO: 64381 - DNA, 25 bp, probe
aaatattgttgccctggaagacatt

SEQ ID NO: 64382 - DNA, 25 bp, probe
gaagctagttctctgttggtcctag

SEQ ID NO: 64383 - DNA, 25 bp, probe
ctggaagacatttatgaaagcccaa

SEQ ID NO: 64384 - DNA, 25 bp, probe
agcagatatatgggaagaaggtgga

SEQ ID NO: 64385 - DNA, 25 bp, probe
cagcagatatatgggaagaaggtgg

SEQ ID NO: 64386 - DNA, 25 bp, probe
tgttgccctggaagacatttatgaa

SEQ ID NO: 64387 - DNA, 25 bp, probe
ttgttgccctggaagacatttatga

SEQ ID NO: 64388 - DNA, 25 bp, probe
atgaaagcccaaatcacctgtactt

SEQ ID NO: 64389 - DNA, 25 bp, probe
gctgatttctggattaagcatgaaa

SEQ ID NO: 64390 - DNA, 25 bp, probe
gaagaaggtggaagctagttctctg

SEQ ID NO: 64391 - DNA, 25 bp, probe
tgccctggaagacatttatgaaagc

SEQ ID NO: 64392 - DNA, 25 bp, probe
ctaatgaccaggaggctgatttctg

SEQ ID NO: 64393 - DNA, 25 bp, probe
ggaagctagttctctgttggtccta

SEQ ID NO: 64394 - DNA, 25 bp, probe
ccctggaagacatttatgaaagccc

SEQ ID NO: 64395 - DNA, 25 bp, probe
ttgtactacagtcaagatgaggagt

SEQ ID NO: 64396 - DNA, 25 bp, probe
tgtactacagtcaagatgaggagtc

SEQ ID NO: 64397 - DNA, 25 bp, probe
tactacagtcaagatgaggagtcca

SEQ ID NO: 64398 - DNA, 25 bp, probe
gtactacagtcaagatgaggagtcc

SEQ ID NO: 64399 - DNA, 25 bp, probe
actacagtcaagatgaggagtccaa

SEQ ID NO: 64400 - DNA, 25 bp, probe
catcggagtgattgcctacatcttg

SEQ ID NO: 64401 - DNA, 25 bp, probe
ttatacagagaaggatgccagcact

SEQ ID NO: 64402 - DNA, 25 bp, probe
ctacagtcaagatgaggagtccaaa

SEQ ID NO: 64403 - DNA, 25 bp, probe
gagtgattgcctacatcttgctctg

SEQ ID NO: 64404 - DNA, 25 bp, probe
acttcattcggaacctgatggagaa

SEQ ID NO: 64405 - DNA, 25 bp, probe
aagacttcattcggaacctgatgga

SEQ ID NO: 64406 - DNA, 25 bp, probe
cttgtactacagtcaagatgaggag

SEQ ID NO: 64407 - DNA, 25 bp, probe
tttatacagagaaggatgccagcac

SEQ ID NO: 64408 - DNA, 25 bp, probe
tatacagagaaggatgccagcactc

SEQ ID NO: 64409 - DNA, 25 bp, probe
gacttcattcggaacctgatggaga

SEQ ID NO: 64410 - DNA, 25 bp, probe
agacttcattcggaacctgatggag

SEQ ID NO: 64411 - DNA, 25 bp, probe
agaaggacccgaataaaagatacac

SEQ ID NO: 64412 - DNA, 25 bp, probe
gagaaggacccgaataaaagataca

SEQ ID NO: 64413 - DNA, 25 bp, probe
aaggggttttatacagagaaggatg

SEQ ID NO: 64414 - DNA, 25 bp, probe
gaaggggttttatacagagaaggat

SEQ ID NO: 64415 - DNA, 25 bp, probe
gagaaggggttttatacagagaagg

SEQ ID NO: 64416 - DNA, 25 bp, probe
ggagaaggggttttatacagagaag

SEQ ID NO: 64417 - DNA, 25 bp, probe
tagtggagaaggggttttatacaga

SEQ ID NO: 64418 - DNA, 25 bp, probe
ggatagtggagaaggggttttatac

SEQ ID NO: 64419 - DNA, 25 bp, probe
aaagacttcattcggaacctgatgg

SEQ ID NO: 64420 - DNA, 25 bp, probe
atagtggagaaggggttttatacag

SEQ ID NO: 64421 - DNA, 25 bp, probe
gatagtggagaaggggttttataca

SEQ ID NO: 64422 - DNA, 25 bp, probe
agaaggggttttatacagagaagga

SEQ ID NO: 64423 - DNA, 25 bp, probe
ggagaaggacccgaataaaagatac

SEQ ID NO: 64424 - DNA, 25 bp, probe
tggagaaggggttttatacagagaa

SEQ ID NO: 64425 - DNA, 25 bp, probe
tggagaaggacccgaataaaagata

SEQ ID NO: 64426 - DNA, 25 bp, probe
ccatcggagtgattgcctacatctt

SEQ ID NO: 64427 - DNA, 25 bp, probe
ggttttatacagagaaggatgccag

SEQ ID NO: 64428 - DNA, 25 bp, probe
cggatagtggagaaggggttttata

SEQ ID NO: 64429 - DNA, 25 bp, probe
gtggagaaggggttttatacagaga

SEQ ID NO: 64430 - DNA, 25 bp, probe
agtggagaaggggttttatacagag

SEQ ID NO: 64431 - DNA, 25 bp, probe
gaaggacccgaataaaagatacacg

SEQ ID NO: 64432 - DNA, 25 bp, probe
atggagaaggacccgaataaaagat

SEQ ID NO: 64433 - DNA, 25 bp, probe
ggagtgattgcctacatcttgctct

SEQ ID NO: 64434 - DNA, 25 bp, probe
caagatgaggagtccaaaataatga

SEQ ID NO: 64435 - DNA, 25 bp, probe
gttttatacagagaaggatgccagc

SEQ ID NO: 64436 - DNA, 25 bp, probe
cagtcaagatgaggagtccaaaata

SEQ ID NO: 64437 - DNA, 25 bp, probe
agtcaagatgaggagtccaaaataa

SEQ ID NO: 64438 - DNA, 25 bp, probe
gtactatctccacagaatgggcatc

SEQ ID NO: 64439 - DNA, 25 bp, probe
ggaagtctatgtgatcaagaaatcg

SEQ ID NO: 64440 - DNA, 25 bp, probe
gaagtctatgtgatcaagaaatcga

SEQ ID NO: 64441 - DNA, 25 bp, probe
tggaagtctatgtgatcaagaaatc

SEQ ID NO: 64442 - DNA, 25 bp, probe
atgtgatcaagaaatcgatagcatt

SEQ ID NO: 64443 - DNA, 25 bp, probe
atcaagaaatcgatagcatttgcag

SEQ ID NO: 64444 - DNA, 25 bp, probe
gatcaagaaatcgatagcatttgca

SEQ ID NO: 64445 - DNA, 25 bp, probe
tgatcaagaaatcgatagcatttgc

SEQ ID NO: 64446 - DNA, 25 bp, probe
tgtgatcaagaaatcgatagcattt

SEQ ID NO: 64447 - DNA, 25 bp, probe
tatgtgatcaagaaatcgatagcat

SEQ ID NO: 64448 - DNA, 25 bp, probe
gtgatcaagaaatcgatagcatttg

SEQ ID NO: 64449 - DNA, 25 bp, probe
ctatgtgatcaagaaatcgatagca

SEQ ID NO: 64450 - DNA, 25 bp, probe
tcaagaaatcgatagcatttgcagt

SEQ ID NO: 64451 - DNA, 25 bp, probe
aagtctatgtgatcaagaaatcgat

SEQ ID NO: 64452 - DNA, 25 bp, probe
tctatgtgatcaagaaatcgatagc

SEQ ID NO: 64453 - DNA, 25 bp, probe
agtctatgtgatcaagaaatcgata

SEQ ID NO: 64454 - DNA, 25 bp, probe
gtctatgtgatcaagaaatcgatag

SEQ ID NO: 64455 - DNA, 25 bp, probe
gtggaccagaggaaacctcagaaaa

SEQ ID NO: 64456 - DNA, 25 bp, probe
gttctacgataagcattgtgacctg

SEQ ID NO: 64457 - DNA, 25 bp, probe
ttctacgataagcattgtgacctgg

SEQ ID NO: 64458 - DNA, 25 bp, probe
gtatgaatttcctgacaaagactgg

SEQ ID NO: 64459 - DNA, 25 bp, probe
gcaagtatgaatttcctgacaaaga

SEQ ID NO: 64460 - DNA, 25 bp, probe
ggcaagtatgaatttcctgacaaag

SEQ ID NO: 64461 - DNA, 25 bp, probe
tatgaatttcctgacaaagactggg

SEQ ID NO: 64462 - DNA, 25 bp, probe
ctacgataagcattgtgacctggag

SEQ ID NO: 64463 - DNA, 25 bp, probe
aaaggaaagcaatcacttgtcattt

SEQ ID NO: 64464 - DNA, 25 bp, probe
atccaggaaggcaagtatgaatttc

SEQ ID NO: 64465 - DNA, 25 bp, probe
tacgataagcattgtgacctggaga

SEQ ID NO: 64466 - DNA, 25 bp, probe
tctacgataagcattgtgacctgga

SEQ ID NO: 64467 - DNA, 25 bp, probe
caagtatgaatttcctgacaaagac

SEQ ID NO: 64468 - DNA, 25 bp, probe
agtatgaatttcctgacaaagactg

SEQ ID NO: 64469 - DNA, 25 bp, probe
catccaggaaggcaagtatgaattt

SEQ ID NO: 64470 - DNA, 25 bp, probe
gcatccaggaaggcaagtatgaatt

SEQ ID NO: 64471 - DNA, 25 bp, probe
aagtatgaatttcctgacaaagact

SEQ ID NO: 64472 - DNA, 25 bp, probe
aggcaagtatgaatttcctgacaaa

SEQ ID NO: 64473 - DNA, 25 bp, probe
aaggcaagtatgaatttcctgacaa

SEQ ID NO: 64474 - DNA, 25 bp, probe
gaaggcaagtatgaatttcctgaca

SEQ ID NO: 64475 - DNA, 25 bp, probe
agcatccaggaaggcaagtatgaat

SEQ ID NO: 64476 - DNA, 25 bp, probe
acgataagcattgtgacctggagag

SEQ ID NO: 64477 - DNA, 25 bp, probe
aagcatccaggaaggcaagtatgaa

SEQ ID NO: 64478 - DNA, 25 bp, probe
atggtcctctacatcatgctgagtg

SEQ ID NO: 64479 - DNA, 25 bp, probe
atgaatttcctgacaaagactgggc

SEQ ID NO: 64480 - DNA, 25 bp, probe
aaggaaagcaatcacttgtcatttt

SEQ ID NO: 64481 - DNA, 25 bp, probe
aaaaggaaagcaatcacttgtcatt

SEQ ID NO: 64482 - DNA, 25 bp, probe
gaaaaggaaagcaatcacttgtcat

SEQ ID NO: 64483 - DNA, 25 bp, probe
aggaaagcaatcacttgtcattttg

SEQ ID NO: 64484 - DNA, 25 bp, probe
cgttctacgataagcattgtgacct

SEQ ID NO: 64485 - DNA, 25 bp, probe
tttgaaaaggaaagcaatcacttgt

SEQ ID NO: 64486 - DNA, 25 bp, probe
ttgaaaaggaaagcaatcacttgtc

SEQ ID NO: 64487 - DNA, 25 bp, probe
cacgttctacgataagcattgtgac

SEQ ID NO: 64488 - DNA, 25 bp, probe
tgaaaaggaaagcaatcacttgtca

SEQ ID NO: 64489 - DNA, 25 bp, probe
gaaagcatccaggaaggcaagtatg

SEQ ID NO: 64490 - DNA, 25 bp, probe
ctctacatcatgctgagtggctacc

SEQ ID NO: 64491 - DNA, 25 bp, probe
cctctacatcatgctgagtggctac

SEQ ID NO: 64492 - DNA, 25 bp, probe
tcctctacatcatgctgagtggcta

SEQ ID NO: 64493 - DNA, 25 bp, probe
gaatttcctgacaaagactgggcac

SEQ ID NO: 64494 - DNA, 25 bp, probe
tgaaagcatccaggaaggcaagtat

SEQ ID NO: 64495 - DNA, 25 bp, probe
ctacatcatgctgagtggctacctg

SEQ ID NO: 64496 - DNA, 25 bp, probe
acgttctacgataagcattgtgacc

SEQ ID NO: 64497 - DNA, 25 bp, probe
ccacgttctacgataagcattgtga

SEQ ID NO: 64498 - DNA, 25 bp, probe
aaagcatccaggaaggcaagtatga

SEQ ID NO: 64499 - DNA, 25 bp, probe
ctttgaaaaggaaagcaatcacttg

SEQ ID NO: 64500 - DNA, 25 bp, probe
gcaagacatcctacaagagaatact

SEQ ID NO: 64501 - DNA, 25 bp, probe
caagacatcctacaagagaatacta

SEQ ID NO: 64502 - DNA, 25 bp, probe
aagacatcctacaagagaatactat

SEQ ID NO: 64503 - DNA, 25 bp, probe
agacatcctacaagagaatactatt

SEQ ID NO: 64504 - DNA, 25 bp, probe
tactattcttaaagctgctgaagtg

SEQ ID NO: 64505 - DNA, 25 bp, probe
actattcttaaagctgctgaagtgc

SEQ ID NO: 64506 - DNA, 25 bp, probe
ctataaccagtctcagcaagacatc

SEQ ID NO: 64507 - DNA, 25 bp, probe
atactattcttaaagctgctgaagt

SEQ ID NO: 64508 - DNA, 25 bp, probe
gacatcctacaagagaatactattc

SEQ ID NO: 64509 - DNA, 25 bp, probe
tataaccagtctcagcaagacatcc

SEQ ID NO: 64510 - DNA, 25 bp, probe
ttggctataaccagtctcagcaaga

SEQ ID NO: 64511 - DNA, 25 bp, probe
aatactattcttaaagctgctgaag

SEQ ID NO: 64512 - DNA, 25 bp, probe
gctataaccagtctcagcaagacat

SEQ ID NO: 64513 - DNA, 25 bp, probe
tttggctataaccagtctcagcaag

SEQ ID NO: 64514 - DNA, 25 bp, probe
gaatactattcttaaagctgctgaa

SEQ ID NO: 64515 - DNA, 25 bp, probe
ctattcttaaagctgctgaagtgca

SEQ ID NO: 64516 - DNA, 25 bp, probe
ggctataaccagtctcagcaagaca

SEQ ID NO: 64517 - DNA, 25 bp, probe
tggctataaccagtctcagcaagac

SEQ ID NO: 64518 - DNA, 25 bp, probe
ttttggctataaccagtctcagcaa

SEQ ID NO: 64519 - DNA, 25 bp, probe
cttttggctataaccagtctcagca

SEQ ID NO: 64520 - DNA, 25 bp, probe
ccttttggctataaccagtctcagc

SEQ ID NO: 64521 - DNA, 25 bp, probe
acatcctacaagagaatactattct

SEQ ID NO: 64522 - DNA, 25 bp, probe
agaatactattcttaaagctgctga

SEQ ID NO: 64523 - DNA, 25 bp, probe
gagaatactattcttaaagctgctg

SEQ ID NO: 64524 - DNA, 25 bp, probe
agagaatactattcttaaagctgct

SEQ ID NO: 64525 - DNA, 25 bp, probe
aagagaatactattcttaaagctgc

SEQ ID NO: 64526 - DNA, 25 bp, probe
catcctacaagagaatactattctt

SEQ ID NO: 64527 - DNA, 25 bp, probe
gccttttggctataaccagtctcag

SEQ ID NO: 64528 - DNA, 25 bp, probe
ctgaagtgcagttcccaccaaaatg

SEQ ID NO: 64529 - DNA, 25 bp, probe
acaagagaatactattcttaaagct

SEQ ID NO: 64530 - DNA, 25 bp, probe
caagagaatactattcttaaagctg

SEQ ID NO: 64531 - DNA, 25 bp, probe
tgaagtgcagttcccaccaaaatga

SEQ ID NO: 64532 - DNA, 25 bp, probe
aaacgaaagtcaatccaagaagaaa

SEQ ID NO: 64533 - DNA, 25 bp, probe
ccatagtgaactgcttgaaactctg

SEQ ID NO: 64534 - DNA, 25 bp, probe
atagtgaactgcttgaaactctgct

SEQ ID NO: 64535 - DNA, 25 bp, probe
catagtgaactgcttgaaactctgc

SEQ ID NO: 64536 - DNA, 25 bp, probe
aactgcttgaaactctgctggaaat

SEQ ID NO: 64537 - DNA, 25 bp, probe
aacgaaagtcaatccaagaagaaaa

SEQ ID NO: 64538 - DNA, 25 bp, probe
aaaacgaaagtcaatccaagaagaa

SEQ ID NO: 64539 - DNA, 25 bp, probe
tagtgaactgcttgaaactctgctg

SEQ ID NO: 64540 - DNA, 25 bp, probe
gccatagtgaactgcttgaaactct

SEQ ID NO: 64541 - DNA, 25 bp, probe
ggatgaagtcctgattccttccaag

SEQ ID NO: 64542 - DNA, 25 bp, probe
ctgctgtgtccaaaataagagtgag

SEQ ID NO: 64543 - DNA, 25 bp, probe
actgcttgaaactctgctggaaatg

SEQ ID NO: 64544 - DNA, 25 bp, probe
gaactgcttgaaactctgctggaaa

SEQ ID NO: 64545 - DNA, 25 bp, probe
gatgaagtcctgattccttccaagg

SEQ ID NO: 64546 - DNA, 25 bp, probe
gtgtccaaaataagagtgagccaag

SEQ ID NO: 64547 - DNA, 25 bp, probe
tgtgtccaaaataagagtgagccaa

SEQ ID NO: 64548 - DNA, 25 bp, probe
ctgtgtccaaaataagagtgagcca

SEQ ID NO: 64549 - DNA, 25 bp, probe
agccatagtgaactgcttgaaactc

SEQ ID NO: 64550 - DNA, 25 bp, probe
gagccatagtgaactgcttgaaact

SEQ ID NO: 64551 - DNA, 25 bp, probe
tgaactgcttgaaactctgctggaa

SEQ ID NO: 64552 - DNA, 25 bp, probe
tgtccaaaataagagtgagccaagc

SEQ ID NO: 64553 - DNA, 25 bp, probe
gctgctgtgtccaaaataagagtga

SEQ ID NO: 64554 - DNA, 25 bp, probe
ctgctgctgtgtccaaaataagagt

SEQ ID NO: 64555 - DNA, 25 bp, probe
cttttcttgccctcttcttgtcctc

SEQ ID NO: 64556 - DNA, 25 bp, probe
ctcttttcttgccctcttcttgtcc

SEQ ID NO: 64557 - DNA, 25 bp, probe
cctcttttcttgccctcttcttgtc

SEQ ID NO: 64558 - DNA, 25 bp, probe
aggatgaagtcctgattccttccaa

SEQ ID NO: 64559 - DNA, 25 bp, probe
tgctgctgtgtccaaaataagagtg

SEQ ID NO: 64560 - DNA, 25 bp, probe
cttgaaactctgctggaaatgctgc

SEQ ID NO: 64561 - DNA, 25 bp, probe
gcttgaaactctgctggaaatgctg

SEQ ID NO: 64562 - DNA, 25 bp, probe
ctgcttgaaactctgctggaaatgc

SEQ ID NO: 64563 - DNA, 25 bp, probe
tcttttcttgccctcttcttgtcct

SEQ ID NO: 64564 - DNA, 25 bp, probe
aatgctgctgctgtgtccaaaataa

SEQ ID NO: 64565 - DNA, 25 bp, probe
aaatgctgctgctgtgtccaaaata

SEQ ID NO: 64566 - DNA, 25 bp, probe
gtccaaaataagagtgagccaagcc

SEQ ID NO: 64567 - DNA, 25 bp, probe
atgaagtcctgattccttccaaggc

SEQ ID NO: 64568 - DNA, 25 bp, probe
gactgcttttcagcctcttttcttg

SEQ ID NO: 64569 - DNA, 25 bp, probe
cgagccatagtgaactgcttgaaac

SEQ ID NO: 64570 - DNA, 25 bp, probe
cttttcagcctcttttcttgccctc

SEQ ID NO: 64571 - DNA, 25 bp, probe
atgctgctgctgtgtccaaaataag

SEQ ID NO: 64572 - DNA, 25 bp, probe
tgactgcttttcagcctcttttctt

SEQ ID NO: 64573 - DNA, 25 bp, probe
gctgctgctgtgtccaaaataagag

SEQ ID NO: 64574 - DNA, 25 bp, probe
tttcagcctcttttcttgccctctt

SEQ ID NO: 64575 - DNA, 25 bp, probe
ttttcagcctcttttcttgccctct

SEQ ID NO: 64576 - DNA, 25 bp, probe
agcacctgactgtatctggatttag

SEQ ID NO: 64577 - DNA, 25 bp, probe
aagaagatcctgtatgccacatcag

SEQ ID NO: 64578 - DNA, 25 bp, probe
gcacctgactgtatctggatttagt

SEQ ID NO: 64579 - DNA, 25 bp, probe
gaagatcctgtatgccacatcagac

SEQ ID NO: 64580 - DNA, 25 bp, probe
agaagatcctgtatgccacatcaga

SEQ ID NO: 64581 - DNA, 25 bp, probe
caatggatatttcgtgtgcctacag

SEQ ID NO: 64582 - DNA, 25 bp, probe
ttagatgcaatggatatttcgtgtg

SEQ ID NO: 64583 - DNA, 25 bp, probe
tttagatgcaatggatatttcgtgt

SEQ ID NO: 64584 - DNA, 25 bp, probe
cagcacctgactgtatctggattta

SEQ ID NO: 64585 - DNA, 25 bp, probe
aatggatatttcgtgtgcctacagt

SEQ ID NO: 64586 - DNA, 25 bp, probe
ctttagatgcaatggatatttcgtg

SEQ ID NO: 64587 - DNA, 25 bp, probe
aaagaagatcctgtatgccacatca

SEQ ID NO: 64588 - DNA, 25 bp, probe
tctttagatgcaatggatatttcgt

SEQ ID NO: 64589 - DNA, 25 bp, probe
aacagatacctcctattttgaagcc

SEQ ID NO: 64590 - DNA, 25 bp, probe
ttcgtgtgcctacagtggttcatat

SEQ ID NO: 64591 - DNA, 25 bp, probe
cagatacctcctattttgaagccag

SEQ ID NO: 64592 - DNA, 25 bp, probe
aaacagatacctcctattttgaagc

SEQ ID NO: 64593 - DNA, 25 bp, probe
atggatatttcgtgtgcctacagtg

SEQ ID NO: 64594 - DNA, 25 bp, probe
atcagatcaagtcgggaactccata

SEQ ID NO: 64595 - DNA, 25 bp, probe
acagatacctcctattttgaagcca

SEQ ID NO: 64596 - DNA, 25 bp, probe
atatttcgtgtgcctacagtggttc

SEQ ID NO: 64597 - DNA, 25 bp, probe
gatatttcgtgtgcctacagtggtt

SEQ ID NO: 64598 - DNA, 25 bp, probe
taccttgcacctgagctgttactag

SEQ ID NO: 64599 - DNA, 25 bp, probe
ctaccttgcacctgagctgttacta

SEQ ID NO: 64600 - DNA, 25 bp, probe
tcgtgtgcctacagtggttcatatc

SEQ ID NO: 64601 - DNA, 25 bp, probe
gaactccataccgaactccgaagag

SEQ ID NO: 64602 - DNA, 25 bp, probe
aagatcctgtatgccacatcagacc

SEQ ID NO: 64603 - DNA, 25 bp, probe
caaatcagatcaagtcgggaactcc

SEQ ID NO: 64604 - DNA, 25 bp, probe
ccaaatcagatcaagtcgggaactc

SEQ ID NO: 64605 - DNA, 25 bp, probe
aatcagatcaagtcgggaactccat

SEQ ID NO: 64606 - DNA, 25 bp, probe
tcagatcaagtcgggaactccatac

SEQ ID NO: 64607 - DNA, 25 bp, probe
aaaagaagatcctgtatgccacatc

SEQ ID NO: 64608 - DNA, 25 bp, probe
gaaacagatacctcctattttgaag

SEQ ID NO: 64609 - DNA, 25 bp, probe
aaatcagatcaagtcgggaactcca

SEQ ID NO: 64610 - DNA, 25 bp, probe
cctgactgtatctggatttagtctg

SEQ ID NO: 64611 - DNA, 25 bp, probe
ctgactgtatctggatttagtctgt

SEQ ID NO: 64612 - DNA, 25 bp, probe
acctgactgtatctggatttagtct

SEQ ID NO: 64613 - DNA, 25 bp, probe
cacctgactgtatctggatttagtc

SEQ ID NO: 64614 - DNA, 25 bp, probe
agatacctcctattttgaagccagg

SEQ ID NO: 64615 - DNA, 25 bp, probe
cctattttgaagccaggaatactgc

SEQ ID NO: 64616 - DNA, 25 bp, probe
attctgaaaagagagctaaaacgtc

SEQ ID NO: 64617 - DNA, 25 bp, probe
gaaaagagagctaaaacgtcatcct

SEQ ID NO: 64618 - DNA, 25 bp, probe
catcagaccccaaatcagatcaagt

SEQ ID NO: 64619 - DNA, 25 bp, probe
acatcagaccccaaatcagatcaag

SEQ ID NO: 64620 - DNA, 25 bp, probe
gattaccatgtccagatactgtcta

SEQ ID NO: 64621 - DNA, 25 bp, probe
ttaccatgtccagatactgtctatt

SEQ ID NO: 64622 - DNA, 25 bp, probe
tacagcccattaacttgagaatttg

SEQ ID NO: 64623 - DNA, 25 bp, probe
gccagatatttacagcccattaact

SEQ ID NO: 64624 - DNA, 25 bp, probe
attaccatgtccagatactgtctat

SEQ ID NO: 64625 - DNA, 25 bp, probe
cagcccattaacttgagaatttgtg

SEQ ID NO: 64626 - DNA, 25 bp, probe
tgccagatatttacagcccattaac

SEQ ID NO: 64627 - DNA, 25 bp, probe
taacttgagaatttgtgttgaaccc

SEQ ID NO: 64628 - DNA, 25 bp, probe
ccagatatttacagcccattaactt

SEQ ID NO: 64629 - DNA, 25 bp, probe
agcccattaacttgagaatttgtgt

SEQ ID NO: 64630 - DNA, 25 bp, probe
ttacagcccattaacttgagaattt

SEQ ID NO: 64631 - DNA, 25 bp, probe
tttacagcccattaacttgagaatt

SEQ ID NO: 64632 - DNA, 25 bp, probe
gcccattaacttgagaatttgtgtt

SEQ ID NO: 64633 - DNA, 25 bp, probe
ggattaccatgtccagatactgtct

SEQ ID NO: 64634 - DNA, 25 bp, probe
atttacagcccattaacttgagaat

SEQ ID NO: 64635 - DNA, 25 bp, probe
cccattaacttgagaatttgtgttg

SEQ ID NO: 64636 - DNA, 25 bp, probe
gagaatttgtgttgaacccagtttc

SEQ ID NO: 64637 - DNA, 25 bp, probe
tatttacagcccattaacttgagaa

SEQ ID NO: 64638 - DNA, 25 bp, probe
tgagaatttgtgttgaacccagttt

SEQ ID NO: 64639 - DNA, 25 bp, probe
ttgagaatttgtgttgaacccagtt

SEQ ID NO: 64640 - DNA, 25 bp, probe
cttgagaatttgtgttgaacccagt

SEQ ID NO: 64641 - DNA, 25 bp, probe
acttgagaatttgtgttgaacccag

SEQ ID NO: 64642 - DNA, 25 bp, probe
aacttgagaatttgtgttgaaccca

SEQ ID NO: 64643 - DNA, 25 bp, probe
ttaacttgagaatttgtgttgaacc

SEQ ID NO: 64644 - DNA, 25 bp, probe
atatttacagcccattaacttgaga

SEQ ID NO: 64645 - DNA, 25 bp, probe
agatatttacagcccattaacttga

SEQ ID NO: 64646 - DNA, 25 bp, probe
cagatatttacagcccattaacttg

SEQ ID NO: 64647 - DNA, 25 bp, probe
ccattaacttgagaatttgtgttga

SEQ ID NO: 64648 - DNA, 25 bp, probe
acagcccattaacttgagaatttgt

SEQ ID NO: 64649 - DNA, 25 bp, probe
ctgaagatggtgaactcatttcctg

SEQ ID NO: 64650 - DNA, 25 bp, probe
ctgccagatatttacagcccattaa

SEQ ID NO: 64651 - DNA, 25 bp, probe
gatatttacagcccattaacttgag

SEQ ID NO: 64652 - DNA, 25 bp, probe
accatgtccagatactgtctatttg

SEQ ID NO: 64653 - DNA, 25 bp, probe
tctatttggagacactgtcaacatg

SEQ ID NO: 64654 - DNA, 25 bp, probe
taccatgtccagatactgtctattt

SEQ ID NO: 64655 - DNA, 25 bp, probe
ccatgtccagatactgtctatttgg

SEQ ID NO: 64656 - DNA, 25 bp, probe
tgaagatggtgaactcatttcctgg

SEQ ID NO: 64657 - DNA, 25 bp, probe
gagggtacgatttgctaaagagagg

SEQ ID NO: 64658 - DNA, 25 bp, probe
ggagggtacgatttgctaaagagag

SEQ ID NO: 64659 - DNA, 25 bp, probe
ctatttggagacactgtcaacatgg

SEQ ID NO: 64660 - DNA, 25 bp, probe
aaagtcccagagatattgtgagcct

SEQ ID NO: 64661 - DNA, 25 bp, probe
attgggagggtacgatttgctaaag

SEQ ID NO: 64662 - DNA, 25 bp, probe
gctgaagatggtgaactcatttcct

SEQ ID NO: 64663 - DNA, 25 bp, probe
caaagtcccagagatattgtgagcc

SEQ ID NO: 64664 - DNA, 25 bp, probe
cacagcattgagaattaagaagacg

SEQ ID NO: 64665 - DNA, 25 bp, probe
atattctctgctcactgaacatctc

SEQ ID NO: 64666 - DNA, 25 bp, probe
tatattctctgctcactgaacatct

SEQ ID NO: 64667 - DNA, 25 bp, probe
tattctctgctcactgaacatctct

SEQ ID NO: 64668 - DNA, 25 bp, probe
cattgagaattaagaagacgcttgc

SEQ ID NO: 64669 - DNA, 25 bp, probe
gcattgagaattaagaagacgcttg

SEQ ID NO: 64670 - DNA, 25 bp, probe
tcacagcattgagaattaagaagac

SEQ ID NO: 64671 - DNA, 25 bp, probe
attctctgctcactgaacatctctt

SEQ ID NO: 64672 - DNA, 25 bp, probe
acagcattgagaattaagaagacgc

SEQ ID NO: 64673 - DNA, 25 bp, probe
attgagaattaagaagacgcttgcc

SEQ ID NO: 64674 - DNA, 25 bp, probe
tctaatcggtggaacagtgatgaag

SEQ ID NO: 64675 - DNA, 25 bp, probe
atatattctctgctcactgaacatc

SEQ ID NO: 64676 - DNA, 25 bp, probe
ctaatcggtggaacagtgatgaagt

SEQ ID NO: 64677 - DNA, 25 bp, probe
gtctaatcggtggaacagtgatgaa

SEQ ID NO: 64678 - DNA, 25 bp, probe
gaattaagaagacgcttgccaagat

SEQ ID NO: 64679 - DNA, 25 bp, probe
taatcggtggaacagtgatgaagtg

SEQ ID NO: 64680 - DNA, 25 bp, probe
aattaagaagacgcttgccaagatg

SEQ ID NO: 64681 - DNA, 25 bp, probe
tgctcactgaacatctctttacttt

SEQ ID NO: 64682 - DNA, 25 bp, probe
ctgctcactgaacatctctttactt

SEQ ID NO: 64683 - DNA, 25 bp, probe
tgattcgtaaatgccaccaaatata

SEQ ID NO: 64684 - DNA, 25 bp, probe
aattgtgtctaatcggtggaacagt

SEQ ID NO: 64685 - DNA, 25 bp, probe
gaacagtgatgaagtgagtggaact

SEQ ID NO: 64686 - DNA, 25 bp, probe
ctctgctcactgaacatctctttac

SEQ ID NO: 64687 - DNA, 25 bp, probe
tctctgctcactgaacatctcttta

SEQ ID NO: 64688 - DNA, 25 bp, probe
gagaattaagaagacgcttgccaag

SEQ ID NO: 64689 - DNA, 25 bp, probe
tgagaattaagaagacgcttgccaa

SEQ ID NO: 64690 - DNA, 25 bp, probe
ttgagaattaagaagacgcttgcca

SEQ ID NO: 64691 - DNA, 25 bp, probe
tctgctcactgaacatctctttact

SEQ ID NO: 64692 - DNA, 25 bp, probe
aacagtgacacaaatgaagttgatg

SEQ ID NO: 64693 - DNA, 25 bp, probe
agcattgagaattaagaagacgctt

SEQ ID NO: 64694 - DNA, 25 bp, probe
ctgaagaagtgattcgtaaatgcca

SEQ ID NO: 64695 - DNA, 25 bp, probe
agaattaagaagacgcttgccaaga

SEQ ID NO: 64696 - DNA, 25 bp, probe
ggaacagtgatgaagtgagtggaac

SEQ ID NO: 64697 - DNA, 25 bp, probe
attgtgtctaatcggtggaacagtg

SEQ ID NO: 64698 - DNA, 25 bp, probe
ttctctgctcactgaacatctcttt

SEQ ID NO: 64699 - DNA, 25 bp, probe
cagcattgagaattaagaagacgct

SEQ ID NO: 64700 - DNA, 25 bp, probe
gtgattcgtaaatgccaccaaatat

SEQ ID NO: 64701 - DNA, 25 bp, probe
gagtgatccgtcatacgaagatatg

SEQ ID NO: 64702 - DNA, 25 bp, probe
acagtgacacaaatgaagttgatgt

SEQ ID NO: 64703 - DNA, 25 bp, probe
cctgaagaagtgattcgtaaatgcc

SEQ ID NO: 64704 - DNA, 25 bp, probe
ccctgaagaagtgattcgtaaatgc

SEQ ID NO: 64705 - DNA, 25 bp, probe
agtgattcgtaaatgccaccaaata

SEQ ID NO: 64706 - DNA, 25 bp, probe
tggaacagtgatgaagtgagtggaa

SEQ ID NO: 64707 - DNA, 25 bp, probe
agatggttgaatcccaagatgtaaa

SEQ ID NO: 64708 - DNA, 25 bp, probe
acgagatgatagaaacagaatgctt

SEQ ID NO: 64709 - DNA, 25 bp, probe
aacgagatgatagaaacagaatgct

SEQ ID NO: 64710 - DNA, 25 bp, probe
aaacgagatgatagaaacagaatgc

SEQ ID NO: 64711 - DNA, 25 bp, probe
cgagatgatagaaacagaatgcttt

SEQ ID NO: 64712 - DNA, 25 bp, probe
tgatagaaacagaatgctttaagga

SEQ ID NO: 64713 - DNA, 25 bp, probe
gatagaaacagaatgctttaaggag

SEQ ID NO: 64714 - DNA, 25 bp, probe
atgatagaaacagaatgctttaagg

SEQ ID NO: 64715 - DNA, 25 bp, probe
gagatgatagaaacagaatgcttta

SEQ ID NO: 64716 - DNA, 25 bp, probe
atagaaacagaatgctttaaggagc

SEQ ID NO: 64717 - DNA, 25 bp, probe
gcaaaacgagatgatagaaacagaa

SEQ ID NO: 64718 - DNA, 25 bp, probe
atggcaaaacgagatgatagaaaca

SEQ ID NO: 64719 - DNA, 25 bp, probe
agatgatagaaacagaatgctttaa

SEQ ID NO: 64720 - DNA, 25 bp, probe
ggcaaaacgagatgatagaaacaga

SEQ ID NO: 64721 - DNA, 25 bp, probe
gatgatagaaacagaatgctttaag

SEQ ID NO: 64722 - DNA, 25 bp, probe
tggcaaaacgagatgatagaaacag

SEQ ID NO: 64723 - DNA, 25 bp, probe
tagaaacagaatgctttaaggagct

SEQ ID NO: 64724 - DNA, 25 bp, probe
cacagacgacgacttctactccaag

SEQ ID NO: 64725 - DNA, 25 bp, probe
aaacagaatgctttaaggagctgaa

SEQ ID NO: 64726 - DNA, 25 bp, probe
catggcaaaacgagatgatagaaac

SEQ ID NO: 64727 - DNA, 25 bp, probe
gaaacagaatgctttaaggagctga

SEQ ID NO: 64728 - DNA, 25 bp, probe
agaaacagaatgctttaaggagctg

SEQ ID NO: 64729 - DNA, 25 bp, probe
aaaacgagatgatagaaacagaatg

SEQ ID NO: 64730 - DNA, 25 bp, probe
caaaacgagatgatagaaacagaat

SEQ ID NO: 64731 - DNA, 25 bp, probe
aacagaatgctttaaggagctgaac

SEQ ID NO: 64732 - DNA, 25 bp, probe
gacgacttctactccaagttctcca

SEQ ID NO: 64733 - DNA, 25 bp, probe
acgacttctactccaagttctccac

SEQ ID NO: 64734 - DNA, 25 bp, probe
ctttaaggagctgaacgtgtttgga

SEQ ID NO: 64735 - DNA, 25 bp, probe
acgacgacttctactccaagttctc

SEQ ID NO: 64736 - DNA, 25 bp, probe
gacgacgacttctactccaagttct

SEQ ID NO: 64737 - DNA, 25 bp, probe
agacgacgacttctactccaagttc

SEQ ID NO: 64738 - DNA, 25 bp, probe
ctgaacgtgtttggacctaatggta

SEQ ID NO: 64739 - DNA, 25 bp, probe
tttaaggagctgaacgtgtttggac

SEQ ID NO: 64740 - DNA, 25 bp, probe
ggatggtaatcacagcattgctctc

SEQ ID NO: 64741 - DNA, 25 bp, probe
gaggatggtaatcacagcattgctc

SEQ ID NO: 64742 - DNA, 25 bp, probe
cagacgacgacttctactccaagtt

SEQ ID NO: 64743 - DNA, 25 bp, probe
tgaacgtgtttggacctaatggtac

SEQ ID NO: 64744 - DNA, 25 bp, probe
gatggtaatcacagcattgctctcg

SEQ ID NO: 64745 - DNA, 25 bp, probe
aggatggtaatcacagcattgctct

SEQ ID NO: 64746 - DNA, 25 bp, probe
gacttctactccaagttctccacgg

SEQ ID NO: 64747 - DNA, 25 bp, probe
cgacgacttctactccaagttctcc

SEQ ID NO: 64748 - DNA, 25 bp, probe
gagctgaacgtgtttggacctaatg

SEQ ID NO: 64749 - DNA, 25 bp, probe
atggtaatcacagcattgctctcga

SEQ ID NO: 64750 - DNA, 25 bp, probe
gtactgtaaggacgtgctggacatc

SEQ ID NO: 64751 - DNA, 25 bp, probe
cgacttctactccaagttctccacg

SEQ ID NO: 64752 - DNA, 25 bp, probe
atgggccatttctcagctataaatt

SEQ ID NO: 64753 - DNA, 25 bp, probe
catgggccatttctcagctataaat

SEQ ID NO: 64754 - DNA, 25 bp, probe
tgggccatttctcagctataaattg

SEQ ID NO: 64755 - DNA, 25 bp, probe
tcatgggccatttctcagctataaa

SEQ ID NO: 64756 - DNA, 25 bp, probe
ctcatgggccatttctcagctataa

SEQ ID NO: 64757 - DNA, 25 bp, probe
gggccatttctcagctataaattgc

SEQ ID NO: 64758 - DNA, 25 bp, probe
ctgtcattgtgattttcgacctcat

SEQ ID NO: 64759 - DNA, 25 bp, probe
cattctggacctcttcctgagagtg

SEQ ID NO: 64760 - DNA, 25 bp, probe
ctcattctggacctcttcctgagag

SEQ ID NO: 64761 - DNA, 25 bp, probe
ggccatttctcagctataaattgcg

SEQ ID NO: 64762 - DNA, 25 bp, probe
tgtcattgtgattttcgacctcatg

SEQ ID NO: 64763 - DNA, 25 bp, probe
tcattctggacctcttcctgagagt

SEQ ID NO: 64764 - DNA, 25 bp, probe
ctttctcttggcaatcagaaggctg

SEQ ID NO: 64765 - DNA, 25 bp, probe
gtcattgtgattttcgacctcatgg

SEQ ID NO: 64766 - DNA, 25 bp, probe
atttctcagctataaattgcgctct

SEQ ID NO: 64767 - DNA, 25 bp, probe
catttctcagctataaattgcgctc

SEQ ID NO: 64768 - DNA, 25 bp, probe
tttctcagctataaattgcgctctc

SEQ ID NO: 64769 - DNA, 25 bp, probe
cctcatgggccatttctcagctata

SEQ ID NO: 64770 - DNA, 25 bp, probe
tcattgtgattttcgacctcatggg

SEQ ID NO: 64771 - DNA, 25 bp, probe
ccatttctcagctataaattgcgct

SEQ ID NO: 64772 - DNA, 25 bp, probe
gccatttctcagctataaattgcgc

SEQ ID NO: 64773 - DNA, 25 bp, probe
ttctcagctataaattgcgctctca

SEQ ID NO: 64774 - DNA, 25 bp, probe
agctgtcattgtgattttcgacctc

SEQ ID NO: 64775 - DNA, 25 bp, probe
tctcagctataaattgcgctctcag

SEQ ID NO: 64776 - DNA, 25 bp, probe
gctgtcattgtgattttcgacctca

SEQ ID NO: 64777 - DNA, 25 bp, probe
cattgtgattttcgacctcatgggc

SEQ ID NO: 64778 - DNA, 25 bp, probe
ctcagctataaattgcgctctcagc

SEQ ID NO: 64779 - DNA, 25 bp, probe
gattttcgacctcatgggccatttc

SEQ ID NO: 64780 - DNA, 25 bp, probe
attttcgacctcatgggccatttct

SEQ ID NO: 64781 - DNA, 25 bp, probe
tgattttcgacctcatgggccattt

SEQ ID NO: 64782 - DNA, 25 bp, probe
tcagctataaattgcgctctcagct

SEQ ID NO: 64783 - DNA, 25 bp, probe
ttattccttcaatccagtgtcaaga

SEQ ID NO: 64784 - DNA, 25 bp, probe
tattccttcaatccagtgtcaagag

SEQ ID NO: 64785 - DNA, 25 bp, probe
attattccttcaatccagtgtcaag

SEQ ID NO: 64786 - DNA, 25 bp, probe
aattattccttcaatccagtgtcaa

SEQ ID NO: 64787 - DNA, 25 bp, probe
tcactggctctggtcaatactaatc

SEQ ID NO: 64788 - DNA, 25 bp, probe
ctcactggctctggtcaatactaat

SEQ ID NO: 64789 - DNA, 25 bp, probe
cactggctctggtcaatactaatcc

SEQ ID NO: 64790 - DNA, 25 bp, probe
ctctggtcaatactaatcccttcac

SEQ ID NO: 64791 - DNA, 25 bp, probe
gagatgatcttgaggaagctgaatg

SEQ ID NO: 64792 - DNA, 25 bp, probe
aagtttatgctcatacagtgtttgg

SEQ ID NO: 64793 - DNA, 25 bp, probe
ttggtacagtctacaagtgcattaa

SEQ ID NO: 64794 - DNA, 25 bp, probe
gtttatgctcatacagtgtttggac

SEQ ID NO: 64795 - DNA, 25 bp, probe
agtttatgctcatacagtgtttgga

SEQ ID NO: 64796 - DNA, 25 bp, probe
aaagcctggatagaagtgtttatgc

SEQ ID NO: 64797 - DNA, 25 bp, probe
catcaataagcaaactcaaagtgga

SEQ ID NO: 64798 - DNA, 25 bp, probe
acatcaataagcaaactcaaagtgg

SEQ ID NO: 64799 - DNA, 25 bp, probe
tcaataagcaaactcaaagtggaaa

SEQ ID NO: 64800 - DNA, 25 bp, probe
gaagtttatgctcatacagtgtttg

SEQ ID NO: 64801 - DNA, 25 bp, probe
tgtgacatcaataagcaaactcaaa

SEQ ID NO: 64802 - DNA, 25 bp, probe
atcaataagcaaactcaaagtggaa

SEQ ID NO: 64803 - DNA, 25 bp, probe
tgacatcaataagcaaactcaaagt

SEQ ID NO: 64804 - DNA, 25 bp, probe
gatttcacctgagaatttggctttg

SEQ ID NO: 64805 - DNA, 25 bp, probe
aaattattccttcaatccagtgtca

SEQ ID NO: 64806 - DNA, 25 bp, probe
aattcgagatgatcttgaggaagct

SEQ ID NO: 64807 - DNA, 25 bp, probe
gacatcaataagcaaactcaaagtg

SEQ ID NO: 64808 - DNA, 25 bp, probe
gtgacatcaataagcaaactcaaag

SEQ ID NO: 64809 - DNA, 25 bp, probe
gtgaagtttatgctcatacagtgtt

SEQ ID NO: 64810 - DNA, 25 bp, probe
attccttcaatccagtgtcaagagg

SEQ ID NO: 64811 - DNA, 25 bp, probe
gaatttggctttgcgtgaagtttat

SEQ ID NO: 64812 - DNA, 25 bp, probe
gctctggtcaatactaatcccttca

SEQ ID NO: 64813 - DNA, 25 bp, probe
gttggtgaatttggtacagtctaca

SEQ ID NO: 64814 - DNA, 25 bp, probe
gtgaatttggtacagtctacaagtg

SEQ ID NO: 64815 - DNA, 25 bp, probe
tgaagtttatgctcatacagtgttt

SEQ ID NO: 64816 - DNA, 25 bp, probe
ctttgcgtgaagtttatgctcatac

SEQ ID NO: 64817 - DNA, 25 bp, probe
aatttggctttgcgtgaagtttatg

SEQ ID NO: 64818 - DNA, 25 bp, probe
ttggtgaatttggtacagtctacaa

SEQ ID NO: 64819 - DNA, 25 bp, probe
tcttacgaaatgaagtccacaactg

SEQ ID NO: 64820 - DNA, 25 bp, probe
gtcttacgaaatgaagtccacaact

SEQ ID NO: 64821 - DNA, 25 bp, probe
ttatgctcatacagtgtttggacat

SEQ ID NO: 64822 - DNA, 25 bp, probe
caaagggtcttacgaaatgaagtcc

SEQ ID NO: 64823 - DNA, 25 bp, probe
ccaaagggtcttacgaaatgaagtc

SEQ ID NO: 64824 - DNA, 25 bp, probe
tttatgctcatacagtgtttggaca

SEQ ID NO: 64825 - DNA, 25 bp, probe
ggtgaatttggtacagtctacaagt

SEQ ID NO: 64826 - DNA, 25 bp, probe
tggtgaatttggtacagtctacaag

SEQ ID NO: 64827 - DNA, 25 bp, probe
tgatgccaattacacttcagatgaa

SEQ ID NO: 64828 - DNA, 25 bp, probe
gagaacctaagaaggacagtacatc

SEQ ID NO: 64829 - DNA, 25 bp, probe
agaacctaagaaggacagtacatct

SEQ ID NO: 64830 - DNA, 25 bp, probe
aacctaagaaggacagtacatctac

SEQ ID NO: 64831 - DNA, 25 bp, probe
gaacctaagaaggacagtacatcta

SEQ ID NO: 64832 - DNA, 25 bp, probe
acctaagaaggacagtacatctact

SEQ ID NO: 64833 - DNA, 25 bp, probe
cgagaacctaagaaggacagtacat

SEQ ID NO: 64834 - DNA, 25 bp, probe
gaagaaatctgagtcagcacagtac

SEQ ID NO: 64835 - DNA, 25 bp, probe
agaagaaatctgagtcagcacagta

SEQ ID NO: 64836 - DNA, 25 bp, probe
gaaatgtccctgatgccaattacac

SEQ ID NO: 64837 - DNA, 25 bp, probe
caagaagaaatctgagtcagcacag

SEQ ID NO: 64838 - DNA, 25 bp, probe
aagaaatctgagtcagcacagtaca

SEQ ID NO: 64839 - DNA, 25 bp, probe
cttgtgcaagaagaaatctgagtca

SEQ ID NO: 64840 - DNA, 25 bp, probe
aatgtccctgatgccaattacactt

SEQ ID NO: 64841 - DNA, 25 bp, probe
aaatgtccctgatgccaattacact

SEQ ID NO: 64842 - DNA, 25 bp, probe
gatgccaattacacttcagatgaag

SEQ ID NO: 64843 - DNA, 25 bp, probe
aagaagaaatctgagtcagcacagt

SEQ ID NO: 64844 - DNA, 25 bp, probe
atgccaattacacttcagatgaaga

SEQ ID NO: 64845 - DNA, 25 bp, probe
ctgatgccaattacacttcagatga

SEQ ID NO: 64846 - DNA, 25 bp, probe
agaaatctgagtcagcacagtacag

SEQ ID NO: 64847 - DNA, 25 bp, probe
tgccaattacacttcagatgaagag

SEQ ID NO: 64848 - DNA, 25 bp, probe
gcgagaacctaagaaggacagtaca

SEQ ID NO: 64849 - DNA, 25 bp, probe
acagtacaggcgagaacctaagaag

SEQ ID NO: 64850 - DNA, 25 bp, probe
atgtccctgatgccaattacacttc

SEQ ID NO: 64851 - DNA, 25 bp, probe
ttgtgcaagaagaaatctgagtcag

SEQ ID NO: 64852 - DNA, 25 bp, probe
gccaattacacttcagatgaagagg

SEQ ID NO: 64853 - DNA, 25 bp, probe
cctgatgccaattacacttcagatg

SEQ ID NO: 64854 - DNA, 25 bp, probe
cacagtacaggcgagaacctaagaa

SEQ ID NO: 64855 - DNA, 25 bp, probe
gcttgtgcaagaagaaatctgagtc

SEQ ID NO: 64856 - DNA, 25 bp, probe
aggcgagaacctaagaaggacagta

SEQ ID NO: 64857 - DNA, 25 bp, probe
gaaatctgagtcagcacagtacagg

SEQ ID NO: 64858 - DNA, 25 bp, probe
ggaaatgtccctgatgccaattaca

SEQ ID NO: 64859 - DNA, 25 bp, probe
agcttgtgcaagaagaaatctgagt

SEQ ID NO: 64860 - DNA, 25 bp, probe
ggcgagaacctaagaaggacagtac

SEQ ID NO: 64861 - DNA, 25 bp, probe
gtacaggcgagaacctaagaaggac

SEQ ID NO: 64862 - DNA, 25 bp, probe
cagtacaggcgagaacctaagaagg

SEQ ID NO: 64863 - DNA, 25 bp, probe
agtacaggcgagaacctaagaagga

SEQ ID NO: 64864 - DNA, 25 bp, probe
ctgactctatgagatggggaacaag

SEQ ID NO: 64865 - DNA, 25 bp, probe
tacaggcgagaacctaagaaggaca

SEQ ID NO: 64866 - DNA, 25 bp, probe
gcaagaagaaatctgagtcagcaca

SEQ ID NO: 64867 - DNA, 25 bp, probe
tgtccctgatgccaattacacttca

SEQ ID NO: 64868 - DNA, 25 bp, probe
aagcttgtgcaagaagaaatctgag

SEQ ID NO: 64869 - DNA, 25 bp, probe
tgtgcaagaagaaatctgagtcagc

SEQ ID NO: 64870 - DNA, 25 bp, probe
ccctgatgccaattacacttcagat

SEQ ID NO: 64871 - DNA, 25 bp, probe
ctgaagaaggagacgaagatgattg

SEQ ID NO: 64872 - DNA, 25 bp, probe
tctgaagaaggagacgaagatgatt

SEQ ID NO: 64873 - DNA, 25 bp, probe
tgaagaaggagacgaagatgattgg

SEQ ID NO: 64874 - DNA, 25 bp, probe
ctctgaagaaggagacgaagatgat

SEQ ID NO: 64875 - DNA, 25 bp, probe
cctctgaagaaggagacgaagatga

SEQ ID NO: 64876 - DNA, 25 bp, probe
gaagaaggagacgaagatgattggg

SEQ ID NO: 64877 - DNA, 25 bp, probe
gcctctgaagaaggagacgaagatg

SEQ ID NO: 64878 - DNA, 25 bp, probe
aagaaggagacgaagatgattgggc

SEQ ID NO: 64879 - DNA, 25 bp, probe
tgcctctgaagaaggagacgaagat

SEQ ID NO: 64880 - DNA, 25 bp, probe
gaaggagacgaagatgattgggcat

SEQ ID NO: 64881 - DNA, 25 bp, probe
aaggagacgaagatgattgggcatc

SEQ ID NO: 64882 - DNA, 25 bp, probe
gagacgaagatgattgggcatccaa

SEQ ID NO: 64883 - DNA, 25 bp, probe
acgctcttaatctgattgagacttc

SEQ ID NO: 64884 - DNA, 25 bp, probe
gacgctcttaatctgattgagactt

SEQ ID NO: 64885 - DNA, 25 bp, probe
cttaatctgattgagacttcggcac

SEQ ID NO: 64886 - DNA, 25 bp, probe
ctcttaatctgattgagacttcggc

SEQ ID NO: 64887 - DNA, 25 bp, probe
gctcttaatctgattgagacttcgg

SEQ ID NO: 64888 - DNA, 25 bp, probe
tcttaatctgattgagacttcggca

SEQ ID NO: 64889 - DNA, 25 bp, probe
cgctcttaatctgattgagacttcg

SEQ ID NO: 64890 - DNA, 25 bp, probe
ccgaggcttgaggtatattcattca

SEQ ID NO: 64891 - DNA, 25 bp, probe
cagcattctcatgtagttcgatatt

SEQ ID NO: 64892 - DNA, 25 bp, probe
aacttacccgtatctaacacacaat

SEQ ID NO: 64893 - DNA, 25 bp, probe
aaacttacccgtatctaacacacaa

SEQ ID NO: 64894 - DNA, 25 bp, probe
cgacttatcagaaacttacccgtat

SEQ ID NO: 64895 - DNA, 25 bp, probe
gaaacttacccgtatctaacacaca

SEQ ID NO: 64896 - DNA, 25 bp, probe
acttacccgtatctaacacacaata

SEQ ID NO: 64897 - DNA, 25 bp, probe
cagaacgctttgagagaagtatatg

SEQ ID NO: 64898 - DNA, 25 bp, probe
cttggacagcattctcatgtagttc

SEQ ID NO: 64899 - DNA, 25 bp, probe
tcagaaacttacccgtatctaacac

SEQ ID NO: 64900 - DNA, 25 bp, probe
acagcattctcatgtagttcgatat

SEQ ID NO: 64901 - DNA, 25 bp, probe
agaaacttacccgtatctaacacac

SEQ ID NO: 64902 - DNA, 25 bp, probe
cagaaacttacccgtatctaacaca

SEQ ID NO: 64903 - DNA, 25 bp, probe
cttacccgtatctaacacacaatag

SEQ ID NO: 64904 - DNA, 25 bp, probe
gacttatcagaaacttacccgtatc

SEQ ID NO: 64905 - DNA, 25 bp, probe
gacagcattctcatgtagttcgata

SEQ ID NO: 64906 - DNA, 25 bp, probe
atcagaaacttacccgtatctaaca

SEQ ID NO: 64907 - DNA, 25 bp, probe
gaacgctttgagagaagtatatgct

SEQ ID NO: 64908 - DNA, 25 bp, probe
agaacgctttgagagaagtatatgc

SEQ ID NO: 64909 - DNA, 25 bp, probe
gcagaacgctttgagagaagtatat

SEQ ID NO: 64910 - DNA, 25 bp, probe
cgacgctcttaatctgattgagact

SEQ ID NO: 64911 - DNA, 25 bp, probe
acttatcagaaacttacccgtatct

SEQ ID NO: 64912 - DNA, 25 bp, probe
acagaatgaatattgtaatggtgga

SEQ ID NO: 64913 - DNA, 25 bp, probe
ttaaagaagcagagttgaaggatct

SEQ ID NO: 64914 - DNA, 25 bp, probe
gaatgaatattgtaatggtggaagt

SEQ ID NO: 64915 - DNA, 25 bp, probe
cagaatgaatattgtaatggtggaa

SEQ ID NO: 64916 - DNA, 25 bp, probe
aacgctttgagagaagtatatgctc

SEQ ID NO: 64917 - DNA, 25 bp, probe
ttaatctgattgagacttcggcacg

SEQ ID NO: 64918 - DNA, 25 bp, probe
attcattcaatgtctttggttcaca

SEQ ID NO: 64919 - DNA, 25 bp, probe
taaagaagcagagttgaaggatctc

SEQ ID NO: 64920 - DNA, 25 bp, probe
cgaggcttgaggtatattcattcaa

SEQ ID NO: 64921 - DNA, 25 bp, probe
agaatgaatattgtaatggtggaag

SEQ ID NO: 64922 - DNA, 25 bp, probe
ggcttgaggtatattcattcaatgt

SEQ ID NO: 64923 - DNA, 25 bp, probe
aggcttgaggtatattcattcaatg

SEQ ID NO: 64924 - DNA, 25 bp, probe
ttgtaatggtggaagtttagctgat

SEQ ID NO: 64925 - DNA, 25 bp, probe
attgtaatggtggaagtttagctga

SEQ ID NO: 64926 - DNA, 25 bp, probe
tttaaagaagcagagttgaaggatc

SEQ ID NO: 64927 - DNA, 25 bp, probe
aagagaggtccagtatgcttcctac

SEQ ID NO: 64928 - DNA, 25 bp, probe
ggatgaagagaggtccagtatgctt

SEQ ID NO: 64929 - DNA, 25 bp, probe
gatgaagagaggtccagtatgcttc

SEQ ID NO: 64930 - DNA, 25 bp, probe
acaatggtctggggtattttgaaat

SEQ ID NO: 64931 - DNA, 25 bp, probe
cttttgtgatggatgaagagaggtc

SEQ ID NO: 64932 - DNA, 25 bp, probe
gaagagaggtccagtatgcttccta

SEQ ID NO: 64933 - DNA, 25 bp, probe
caatggtctggggtattttgaaata

SEQ ID NO: 64934 - DNA, 25 bp, probe
gactggtcttttgtgatggatgaag

SEQ ID NO: 64935 - DNA, 25 bp, probe
agaggtccagtatgcttcctaccat

SEQ ID NO: 64936 - DNA, 25 bp, probe
gacaatggtctggggtattttgaaa

SEQ ID NO: 64937 - DNA, 25 bp, probe
gaggtccagtatgcttcctaccatg

SEQ ID NO: 64938 - DNA, 25 bp, probe
atgaagagaggtccagtatgcttcc

SEQ ID NO: 64939 - DNA, 25 bp, probe
agagaggtccagtatgcttcctacc

SEQ ID NO: 64940 - DNA, 25 bp, probe
agactggtcttttgtgatggatgaa

SEQ ID NO: 64941 - DNA, 25 bp, probe
gatggatgaagagaggtccagtatg

SEQ ID NO: 64942 - DNA, 25 bp, probe
gagaggtccagtatgcttcctacca

SEQ ID NO: 64943 - DNA, 25 bp, probe
tgatggatgaagagaggtccagtat

SEQ ID NO: 64944 - DNA, 25 bp, probe
gtcttttgtgatggatgaagagagg

SEQ ID NO: 64945 - DNA, 25 bp, probe
ggtcttttgtgatggatgaagagag

SEQ ID NO: 64946 - DNA, 25 bp, probe
ttttgtgatggatgaagagaggtcc

SEQ ID NO: 64947 - DNA, 25 bp, probe
tcttttgtgatggatgaagagaggt

SEQ ID NO: 64948 - DNA, 25 bp, probe
ctggtcttttgtgatggatgaagag

SEQ ID NO: 64949 - DNA, 25 bp, probe
tggtcttttgtgatggatgaagaga

SEQ ID NO: 64950 - DNA, 25 bp, probe
actggtcttttgtgatggatgaaga

SEQ ID NO: 64951 - DNA, 25 bp, probe
cgacaatggtctggggtattttgaa

SEQ ID NO: 64952 - DNA, 25 bp, probe
tgaagagaggtccagtatgcttcct

SEQ ID NO: 64953 - DNA, 25 bp, probe
gtgatggatgaagagaggtccagta

SEQ ID NO: 64954 - DNA, 25 bp, probe
tatgaagactggtcttttgtgatgg

SEQ ID NO: 64955 - DNA, 25 bp, probe
ttatgaagactggtcttttgtgatg

SEQ ID NO: 64956 - DNA, 25 bp, probe
ttttatgaagactggtcttttgtga

SEQ ID NO: 64957 - DNA, 25 bp, probe
tttatgaagactggtcttttgtgat

SEQ ID NO: 64958 - DNA, 25 bp, probe
gaagactggtcttttgtgatggatg

SEQ ID NO: 64959 - DNA, 25 bp, probe
atggatgaagagaggtccagtatgc

SEQ ID NO: 64960 - DNA, 25 bp, probe
ttgtgatggatgaagagaggtccag

SEQ ID NO: 64961 - DNA, 25 bp, probe
aagactggtcttttgtgatggatga

SEQ ID NO: 64962 - DNA, 25 bp, probe
tgaagactggtcttttgtgatggat

SEQ ID NO: 64963 - DNA, 25 bp, probe
atgaagactggtcttttgtgatgga

SEQ ID NO: 64964 - DNA, 25 bp, probe
tattttgaaatacgttgttggccgg

SEQ ID NO: 64965 - DNA, 25 bp, probe
ctggggtattttgaaatacgttgtt

SEQ ID NO: 64966 - DNA, 25 bp, probe
tggggtattttgaaatacgttgttg

SEQ ID NO: 64967 - DNA, 25 bp, probe
gtctggggtattttgaaatacgttg

SEQ ID NO: 64968 - DNA, 25 bp, probe
tctggggtattttgaaatacgttgt

SEQ ID NO: 64969 - DNA, 25 bp, probe
aatggtctggggtattttgaaatac

SEQ ID NO: 64970 - DNA, 25 bp, probe
ggggtattttgaaatacgttgttgg

SEQ ID NO: 64971 - DNA, 25 bp, probe
ttgctgatctcttaaaggaagtgat

SEQ ID NO: 64972 - DNA, 25 bp, probe
attgctgatctcttaaaggaagtga

SEQ ID NO: 64973 - DNA, 25 bp, probe
gatgcctatgctttccgaatctatg

SEQ ID NO: 64974 - DNA, 25 bp, probe
gattgctgatctcttaaaggaagtg

SEQ ID NO: 64975 - DNA, 25 bp, probe
catatccagattgctgatctcttaa

SEQ ID NO: 64976 - DNA, 25 bp, probe
gaagttcaaagtacaaagtgtcctg

SEQ ID NO: 64977 - DNA, 25 bp, probe
aagttcaaagtacaaagtgtcctga

SEQ ID NO: 64978 - DNA, 25 bp, probe
agttcaaagtacaaagtgtcctgac

SEQ ID NO: 64979 - DNA, 25 bp, probe
atgcctatgctttccgaatctatgg

SEQ ID NO: 64980 - DNA, 25 bp, probe
cgatgcctatgctttccgaatctat

SEQ ID NO: 64981 - DNA, 25 bp, probe
ggaagttcaaagtacaaagtgtcct

SEQ ID NO: 64982 - DNA, 25 bp, probe
gttcaaagtacaaagtgtcctgacc

SEQ ID NO: 64983 - DNA, 25 bp, probe
agattgctgatctcttaaaggaagt

SEQ ID NO: 64984 - DNA, 25 bp, probe
atccagattgctgatctcttaaagg

SEQ ID NO: 64985 - DNA, 25 bp, probe
cagattgctgatctcttaaaggaag

SEQ ID NO: 64986 - DNA, 25 bp, probe
ccagattgctgatctcttaaaggaa

SEQ ID NO: 64987 - DNA, 25 bp, probe
cgggaagttcaaagtacaaagtgtc

SEQ ID NO: 64988 - DNA, 25 bp, probe
gggaagttcaaagtacaaagtgtcc

SEQ ID NO: 64989 - DNA, 25 bp, probe
tccagattgctgatctcttaaagga

SEQ ID NO: 64990 - DNA, 25 bp, probe
tgctgatctcttaaaggaagtgatc

SEQ ID NO: 64991 - DNA, 25 bp, probe
ctgatctcttaaaggaagtgatccc

SEQ ID NO: 64992 - DNA, 25 bp, probe
tatccagattgctgatctcttaaag

SEQ ID NO: 64993 - DNA, 25 bp, probe
aaagtacaaagtgtcctgacccaag

SEQ ID NO: 64994 - DNA, 25 bp, probe
ttcaaagtacaaagtgtcctgaccc

SEQ ID NO: 64995 - DNA, 25 bp, probe
gctgatctcttaaaggaagtgatcc

SEQ ID NO: 64996 - DNA, 25 bp, probe
gatcataagcagcaactaccagttt

SEQ ID NO: 64997 - DNA, 25 bp, probe
caaagtacaaagtgtcctgacccaa

SEQ ID NO: 64998 - DNA, 25 bp, probe
atcataagcagcaactaccagtttg

SEQ ID NO: 64999 - DNA, 25 bp, probe
atatccagattgctgatctcttaaa

SEQ ID NO: 65000 - DNA, 25 bp, probe
ataagcagcaactaccagtttggat

SEQ ID NO: 65001 - DNA, 25 bp, probe
gattacttggacaccgtgaaggacc

SEQ ID NO: 65002 - DNA, 25 bp, probe
tcaaagtacaaagtgtcctgaccca

SEQ ID NO: 65003 - DNA, 25 bp, probe
gcgggaagttcaaagtacaaagtgt

SEQ ID NO: 65004 - DNA, 25 bp, probe
taagcagcaactaccagtttggatc

SEQ ID NO: 65005 - DNA, 25 bp, probe
gatcatcgagagctgcatgaatgag

SEQ ID NO: 65006 - DNA, 25 bp, probe
gagatcatcgagagctgcatgaatg

SEQ ID NO: 65007 - DNA, 25 bp, probe
tgatcataagcagcaactaccagtt

SEQ ID NO: 65008 - DNA, 25 bp, probe
cataagcagcaactaccagtttgga

SEQ ID NO: 65009 - DNA, 25 bp, probe
tcataagcagcaactaccagtttgg

SEQ ID NO: 65010 - DNA, 25 bp, probe
agatcatcgagagctgcatgaatga

SEQ ID NO: 65011 - DNA, 25 bp, probe
tgagatcatcgagagctgcatgaat

SEQ ID NO: 65012 - DNA, 25 bp, probe
taaaggaagtgatccccgaagtcta

SEQ ID NO: 65013 - DNA, 25 bp, probe
ctcttaaaggaagtgatccccgaag

SEQ ID NO: 65014 - DNA, 25 bp, probe
atctcttaaaggaagtgatccccga

SEQ ID NO: 65015 - DNA, 25 bp, probe
ccagggagaaaagaaagacaggaag

SEQ ID NO: 65016 - DNA, 25 bp, probe
cagggagaaaagaaagacaggaagc

SEQ ID NO: 65017 - DNA, 25 bp, probe
gagaaaagaaagacaggaagcccac

SEQ ID NO: 65018 - DNA, 25 bp, probe
tccagggagaaaagaaagacaggaa

SEQ ID NO: 65019 - DNA, 25 bp, probe
agggagaaaagaaagacaggaagcc

SEQ ID NO: 65020 - DNA, 25 bp, probe
ggagaaaagaaagacaggaagccca

SEQ ID NO: 65021 - DNA, 25 bp, probe
agaaaagaaagacaggaagcccacc

SEQ ID NO: 65022 - DNA, 25 bp, probe
ctccagggagaaaagaaagacagga

SEQ ID NO: 65023 - DNA, 25 bp, probe
gaaaagaaagacaggaagcccacct

SEQ ID NO: 65024 - DNA, 25 bp, probe
gctccagggagaaaagaaagacagg

SEQ ID NO: 65025 - DNA, 25 bp, probe
ggctccagggagaaaagaaagacag

SEQ ID NO: 65026 - DNA, 25 bp, probe
caggctccagggagaaaagaaagac

SEQ ID NO: 65027 - DNA, 25 bp, probe
aaaagaaagacaggaagcccacctg

SEQ ID NO: 65028 - DNA, 25 bp, probe
ctaaacaaggatctgatgacgcaaa

SEQ ID NO: 65029 - DNA, 25 bp, probe
atctgatgacgcaaaatggaataag

SEQ ID NO: 65030 - DNA, 25 bp, probe
aaatggaataagctacgtcctcaac

SEQ ID NO: 65031 - DNA, 25 bp, probe
gatctgatgacgcaaaatggaataa

SEQ ID NO: 65032 - DNA, 25 bp, probe
cccatcaacgacaactactgtgaaa

SEQ ID NO: 65033 - DNA, 25 bp, probe
taaacaaggatctgatgacgcaaaa

SEQ ID NO: 65034 - DNA, 25 bp, probe
ggatctgatgacgcaaaatggaata

SEQ ID NO: 65035 - DNA, 25 bp, probe
tctgatgacgcaaaatggaataagc

SEQ ID NO: 65036 - DNA, 25 bp, probe
cctaaacaaggatctgatgacgcaa

SEQ ID NO: 65037 - DNA, 25 bp, probe
aaacaaggatctgatgacgcaaaat

SEQ ID NO: 65038 - DNA, 25 bp, probe
ccatcaacgacaactactgtgaaaa

SEQ ID NO: 65039 - DNA, 25 bp, probe
gatgacgcaaaatggaataagctac

SEQ ID NO: 65040 - DNA, 25 bp, probe
tgatgacgcaaaatggaataagcta

SEQ ID NO: 65041 - DNA, 25 bp, probe
aatggaataagctacgtcctcaacg

SEQ ID NO: 65042 - DNA, 25 bp, probe
aacaaggatctgatgacgcaaaatg

SEQ ID NO: 65043 - DNA, 25 bp, probe
aggatctgatgacgcaaaatggaat

SEQ ID NO: 65044 - DNA, 25 bp, probe
atgacgcaaaatggaataagctacg

SEQ ID NO: 65045 - DNA, 25 bp, probe
ctgatgacgcaaaatggaataagct

SEQ ID NO: 65046 - DNA, 25 bp, probe
aaggatctgatgacgcaaaatggaa

SEQ ID NO: 65047 - DNA, 25 bp, probe
aaaatggaataagctacgtcctcaa

SEQ ID NO: 65048 - DNA, 25 bp, probe
caaaatggaataagctacgtcctca

SEQ ID NO: 65049 - DNA, 25 bp, probe
caaggatctgatgacgcaaaatgga

SEQ ID NO: 65050 - DNA, 25 bp, probe
ccatcgcctacatcatgaagaccat

SEQ ID NO: 65051 - DNA, 25 bp, probe
acaaggatctgatgacgcaaaatgg

SEQ ID NO: 65052 - DNA, 25 bp, probe
gcaaaatggaataagctacgtcctc

SEQ ID NO: 65053 - DNA, 25 bp, probe
acgtcctaaacaaggatctgatgac

SEQ ID NO: 65054 - DNA, 25 bp, probe
agttcatcgataaagccaagctctc

SEQ ID NO: 65055 - DNA, 25 bp, probe
gagttcatcgataaagccaagctct

SEQ ID NO: 65056 - DNA, 25 bp, probe
catcgcctacatcatgaagaccatg

SEQ ID NO: 65057 - DNA, 25 bp, probe
gtcctaaacaaggatctgatgacgc

SEQ ID NO: 65058 - DNA, 25 bp, probe
atggaataagctacgtcctcaacgc

SEQ ID NO: 65059 - DNA, 25 bp, probe
tcctaaacaaggatctgatgacgca

SEQ ID NO: 65060 - DNA, 25 bp, probe
cgcaaaatggaataagctacgtcct

SEQ ID NO: 65061 - DNA, 25 bp, probe
ccccatcaacgacaactactgtgaa

SEQ ID NO: 65062 - DNA, 25 bp, probe
gttcatcgataaagccaagctctcc

SEQ ID NO: 65063 - DNA, 25 bp, probe
tgacgcaaaatggaataagctacgt

SEQ ID NO: 65064 - DNA, 25 bp, probe
ttcatcgataaagccaagctctcca

SEQ ID NO: 65065 - DNA, 25 bp, probe
cgagttcatcgataaagccaagctc

SEQ ID NO: 65066 - DNA, 25 bp, probe
acgcaaaatggaataagctacgtcc

SEQ ID NO: 65067 - DNA, 25 bp, probe
tcatcgataaagccaagctctccag

SEQ ID NO: 65068 - DNA, 25 bp, probe
atcgcctacatcatgaagaccatgg

SEQ ID NO: 65069 - DNA, 25 bp, probe
ctacatcatgaagaccatgggcatg

SEQ ID NO: 65070 - DNA, 25 bp, probe
tacatcatgaagaccatgggcatgt

SEQ ID NO: 65071 - DNA, 25 bp, probe
cctacatcatgaagaccatgggcat

SEQ ID NO: 65072 - DNA, 25 bp, probe
tcgagttcatcgataaagccaagct

SEQ ID NO: 65073 - DNA, 25 bp, probe
cgaatacagcagttacaattacagg

SEQ ID NO: 65074 - DNA, 25 bp, probe
gaaggtaatatcttgttgctggaag

SEQ ID NO: 65075 - DNA, 25 bp, probe
ctgtgagtggatgtatgattatagc

SEQ ID NO: 65076 - DNA, 25 bp, probe
agaaggtaatatcttgttgctggaa

SEQ ID NO: 65077 - DNA, 25 bp, probe
aaggtaatatcttgttgctggaagg

SEQ ID NO: 65078 - DNA, 25 bp, probe
acttctgtgagtggatgtatgatta

SEQ ID NO: 65079 - DNA, 25 bp, probe
cttctgtgagtggatgtatgattat

SEQ ID NO: 65080 - DNA, 25 bp, probe
tctgtgagtggatgtatgattatag

SEQ ID NO: 65081 - DNA, 25 bp, probe
tgtgagtggatgtatgattatagct

SEQ ID NO: 65082 - DNA, 25 bp, probe
tcgaatacagcagttacaattacag

SEQ ID NO: 65083 - DNA, 25 bp, probe
tgttgcttgaagttaataggtttgc

SEQ ID NO: 65084 - DNA, 25 bp, probe
ttctgtgagtggatgtatgattata

SEQ ID NO: 65085 - DNA, 25 bp, probe
gaatacagcagttacaattacaggg

SEQ ID NO: 65086 - DNA, 25 bp, probe
aggtaatatcttgttgctggaaggc

SEQ ID NO: 65087 - DNA, 25 bp, probe
gttgcttgaagttaataggtttgcc

SEQ ID NO: 65088 - DNA, 25 bp, probe
aagaaggtaatatcttgttgctgga

SEQ ID NO: 65089 - DNA, 25 bp, probe
atgttgcttgaagttaataggtttg

SEQ ID NO: 65090 - DNA, 25 bp, probe
gaagtatcccaccaagaaacaacag

SEQ ID NO: 65091 - DNA, 25 bp, probe
tctattgaatttgggtacatggact

SEQ ID NO: 65092 - DNA, 25 bp, probe
gaaatgttgcttgaagttaataggt

SEQ ID NO: 65093 - DNA, 25 bp, probe
aacagaaactgatgctcattgattt

SEQ ID NO: 65094 - DNA, 25 bp, probe
aaacagaaactgatgctcattgatt

SEQ ID NO: 65095 - DNA, 25 bp, probe
ttgcttgaagttaataggtttgccc

SEQ ID NO: 65096 - DNA, 25 bp, probe
ttcagccttctagagagttacagtt

SEQ ID NO: 65097 - DNA, 25 bp, probe
attgaatttgggtacatggactacg

SEQ ID NO: 65098 - DNA, 25 bp, probe
atctattgaatttgggtacatggac

SEQ ID NO: 65099 - DNA, 25 bp, probe
cttgaagttaataggtttgcccttg

SEQ ID NO: 65100 - DNA, 25 bp, probe
agaaatgttgcttgaagttaatagg

SEQ ID NO: 65101 - DNA, 25 bp, probe
tttgatgcctatttccaccagaaga

SEQ ID NO: 65102 - DNA, 25 bp, probe
gtttgatgcctatttccaccagaag

SEQ ID NO: 65103 - DNA, 25 bp, probe
aaagaagaaatgttgcttgaagtta

SEQ ID NO: 65104 - DNA, 25 bp, probe
tattgaatttgggtacatggactac

SEQ ID NO: 65105 - DNA, 25 bp, probe
aagaagaaatgttgcttgaagttaa

SEQ ID NO: 65106 - DNA, 25 bp, probe
catctattgaatttgggtacatgga

SEQ ID NO: 65107 - DNA, 25 bp, probe
gttcagccttctagagagttacagt

SEQ ID NO: 65108 - DNA, 25 bp, probe
aatgttgcttgaagttaataggttt

SEQ ID NO: 65109 - DNA, 25 bp, probe
aaatgttgcttgaagttaataggtt

SEQ ID NO: 65110 - DNA, 25 bp, probe
ctattgaatttgggtacatggacta

SEQ ID NO: 65111 - DNA, 25 bp, probe
agaagaaatgttgcttgaagttaat

SEQ ID NO: 65112 - DNA, 25 bp, probe
tcatctattgaatttgggtacatgg

SEQ ID NO: 65113 - DNA, 25 bp, probe
ttgatgcctatttccaccagaagag

SEQ ID NO: 65114 - DNA, 25 bp, probe
gcttgaagttaataggtttgccctt

SEQ ID NO: 65115 - DNA, 25 bp, probe
tgttcagccttctagagagttacag

SEQ ID NO: 65116 - DNA, 25 bp, probe
ctgttcagccttctagagagttaca

SEQ ID NO: 65117 - DNA, 25 bp, probe
atcttcttcccagtttcaaggctta

SEQ ID NO: 65118 - DNA, 25 bp, probe
tcttcttcccagtttcaaggcttac

SEQ ID NO: 65119 - DNA, 25 bp, probe
catcttcttcccagtttcaaggctt

SEQ ID NO: 65120 - DNA, 25 bp, probe
cttcttcccagtttcaaggcttacc

SEQ ID NO: 65121 - DNA, 25 bp, probe
ttcttcccagtttcaaggcttacct

SEQ ID NO: 65122 - DNA, 25 bp, probe
ctcttcaggcagcccagtaatagtc

SEQ ID NO: 65123 - DNA, 25 bp, probe
ctgcatcttcttcccagtttcaagg

SEQ ID NO: 65124 - DNA, 25 bp, probe
caacctgagaactgttcctctcctc

SEQ ID NO: 65125 - DNA, 25 bp, probe
gctgcatcttcttcccagtttcaag

SEQ ID NO: 65126 - DNA, 25 bp, probe
aatctttcagcagcaacctgagaac

SEQ ID NO: 65127 - DNA, 25 bp, probe
caatctttcagcagcaacctgagaa

SEQ ID NO: 65128 - DNA, 25 bp, probe
cttcccagtttcaaggcttaccttc

SEQ ID NO: 65129 - DNA, 25 bp, probe
cagcaacctgagaactgttcctctc

SEQ ID NO: 65130 - DNA, 25 bp, probe
tcttcccagtttcaaggcttacctt

SEQ ID NO: 65131 - DNA, 25 bp, probe
atctttcagcagcaacctgagaact

SEQ ID NO: 65132 - DNA, 25 bp, probe
ttcccagtttcaaggcttaccttcc

SEQ ID NO: 65133 - DNA, 25 bp, probe
tttcagcagcaacctgagaactgtt

SEQ ID NO: 65134 - DNA, 25 bp, probe
atatcatcaggctctaccaggttat

SEQ ID NO: 65135 - DNA, 25 bp, probe
catatcatcaggctctaccaggtta

SEQ ID NO: 65136 - DNA, 25 bp, probe
tatcatcaggctctaccaggttatg

SEQ ID NO: 65137 - DNA, 25 bp, probe
ttctggatgccaatctgaatatcaa

SEQ ID NO: 65138 - DNA, 25 bp, probe
ttacttctggatgccaatctgaata

SEQ ID NO: 65139 - DNA, 25 bp, probe
ttctaacaatattactcttcgtcgg

SEQ ID NO: 65140 - DNA, 25 bp, probe
tacttctggatgccaatctgaatat

SEQ ID NO: 65141 - DNA, 25 bp, probe
ggttatggagacagaacggatgatt

SEQ ID NO: 65142 - DNA, 25 bp, probe
cttctggatgccaatctgaatatca

SEQ ID NO: 65143 - DNA, 25 bp, probe
acttctggatgccaatctgaatatc

SEQ ID NO: 65144 - DNA, 25 bp, probe
cgggtatgtaaatctcttagtgtca

SEQ ID NO: 65145 - DNA, 25 bp, probe
gtcgggtatgtaaatctcttagtgt

SEQ ID NO: 65146 - DNA, 25 bp, probe
ttcgtcgggtatgtaaatctcttag

SEQ ID NO: 65147 - DNA, 25 bp, probe
cttcgtcgggtatgtaaatctctta

SEQ ID NO: 65148 - DNA, 25 bp, probe
tcgggtatgtaaatctcttagtgtc

SEQ ID NO: 65149 - DNA, 25 bp, probe
ttatggagacagaacggatgattta

SEQ ID NO: 65150 - DNA, 25 bp, probe
tatggagacagaacggatgatttat

SEQ ID NO: 65151 - DNA, 25 bp, probe
aagattaaagaagaccaatgccaag

SEQ ID NO: 65152 - DNA, 25 bp, probe
atggagacagaacggatgatttatc

SEQ ID NO: 65153 - DNA, 25 bp, probe
cgtcgggtatgtaaatctcttagtg

SEQ ID NO: 65154 - DNA, 25 bp, probe
tcgtcgggtatgtaaatctcttagt

SEQ ID NO: 65155 - DNA, 25 bp, probe
agattaaagaagaccaatgccaagt

SEQ ID NO: 65156 - DNA, 25 bp, probe
aaagattaaagaagaccaatgccaa

SEQ ID NO: 65157 - DNA, 25 bp, probe
tactcttcgtcgggtatgtaaatct

SEQ ID NO: 65158 - DNA, 25 bp, probe
aatattgtattgaggacatggcatt

SEQ ID NO: 65159 - DNA, 25 bp, probe
tcttcgtcgggtatgtaaatctctt

SEQ ID NO: 65160 - DNA, 25 bp, probe
gttatggagacagaacggatgattt

SEQ ID NO: 65161 - DNA, 25 bp, probe
ctctaccaggttatggagacagaac

SEQ ID NO: 65162 - DNA, 25 bp, probe
aggttatggagacagaacggatgat

SEQ ID NO: 65163 - DNA, 25 bp, probe
gggtatgtaaatctcttagtgtcac

SEQ ID NO: 65164 - DNA, 25 bp, probe
ctcttcgtcgggtatgtaaatctct

SEQ ID NO: 65165 - DNA, 25 bp, probe
ctggtgacagaatatgctagtggag

SEQ ID NO: 65166 - DNA, 25 bp, probe
tggagacagaacggatgatttatct

SEQ ID NO: 65167 - DNA, 25 bp, probe
ggcggtactgataaaggacataaat

SEQ ID NO: 65168 - DNA, 25 bp, probe
cttctaacaatattactcttcgtcg

SEQ ID NO: 65169 - DNA, 25 bp, probe
actcttcgtcgggtatgtaaatctc

SEQ ID NO: 65170 - DNA, 25 bp, probe
gattaaagaagaccaatgccaagtc

SEQ ID NO: 65171 - DNA, 25 bp, probe
agaacggatgatttatctggtgaca

SEQ ID NO: 65172 - DNA, 25 bp, probe
aaagcatatacgaatataaagcagc

SEQ ID NO: 65173 - DNA, 25 bp, probe
gcggtactgataaaggacataaata

SEQ ID NO: 65174 - DNA, 25 bp, probe
aggcggtactgataaaggacataaa

SEQ ID NO: 65175 - DNA, 25 bp, probe
ctaacaatattactcttcgtcgggt

SEQ ID NO: 65176 - DNA, 25 bp, probe
tctaacaatattactcttcgtcggg

SEQ ID NO: 65177 - DNA, 25 bp, probe
caatattactcttcgtcgggtatgt

SEQ ID NO: 65178 - DNA, 25 bp, probe
gactacttcagagagaggttcctaa

SEQ ID NO: 65179 - DNA, 25 bp, probe
aattgaggtgtaatgaaggcttgtc

SEQ ID NO: 65180 - DNA, 25 bp, probe
gtggagatcagattggatacagata

SEQ ID NO: 65181 - DNA, 25 bp, probe
aagaggactacttcagagagaggtt

SEQ ID NO: 65182 - DNA, 25 bp, probe
attgaggtgtaatgaaggcttgtct

SEQ ID NO: 65183 - DNA, 25 bp, probe
ggtggagatcagattggatacagat

SEQ ID NO: 65184 - DNA, 25 bp, probe
agaggactacttcagagagaggttc

SEQ ID NO: 65185 - DNA, 25 bp, probe
atcagattggatacagatatgaacg

SEQ ID NO: 65186 - DNA, 25 bp, probe
tggagatcagattggatacagatat

SEQ ID NO: 65187 - DNA, 25 bp, probe
ttgaggtgtaatgaaggcttgtctt

SEQ ID NO: 65188 - DNA, 25 bp, probe
ggagatcagattggatacagatatg

SEQ ID NO: 65189 - DNA, 25 bp, probe
accaccctcacataatcaaacttta

SEQ ID NO: 65190 - DNA, 25 bp, probe
cagattggatacagatatgaacgtg

SEQ ID NO: 65191 - DNA, 25 bp, probe
ttagaccaccctcacataatcaaac

SEQ ID NO: 65192 - DNA, 25 bp, probe
gttagaccaccctcacataatcaaa

SEQ ID NO: 65193 - DNA, 25 bp, probe
agattggatacagatatgaacgtgc

SEQ ID NO: 65194 - DNA, 25 bp, probe
attggatacagatatgaacgtgcat

SEQ ID NO: 65195 - DNA, 25 bp, probe
gattggatacagatatgaacgtgca

SEQ ID NO: 65196 - DNA, 25 bp, probe
taggaaagaggactacttcagagag

SEQ ID NO: 65197 - DNA, 25 bp, probe
actacttcagagagaggttcctaaa

SEQ ID NO: 65198 - DNA, 25 bp, probe
tagaccaccctcacataatcaaact

SEQ ID NO: 65199 - DNA, 25 bp, probe
gaccaccctcacataatcaaacttt

SEQ ID NO: 65200 - DNA, 25 bp, probe
gctttctaaggacattaaacagtga

SEQ ID NO: 65201 - DNA, 25 bp, probe
tcagattggatacagatatgaacgt

SEQ ID NO: 65202 - DNA, 25 bp, probe
aaattgaggtgtaatgaaggcttgt

SEQ ID NO: 65203 - DNA, 25 bp, probe
ggactacttcagagagaggttccta

SEQ ID NO: 65204 - DNA, 25 bp, probe
ccaccctcacataatcaaactttat

SEQ ID NO: 65205 - DNA, 25 bp, probe
gaaagaggactacttcagagagagg

SEQ ID NO: 65206 - DNA, 25 bp, probe
ggaaagaggactacttcagagagag

SEQ ID NO: 65207 - DNA, 25 bp, probe
agaccaccctcacataatcaaactt

SEQ ID NO: 65208 - DNA, 25 bp, probe
aggaaagaggactacttcagagaga

SEQ ID NO: 65209 - DNA, 25 bp, probe
ttggatacagatatgaacgtgcata

SEQ ID NO: 65210 - DNA, 25 bp, probe
gagatcagattggatacagatatga

SEQ ID NO: 65211 - DNA, 25 bp, probe
aagatggacagtgagaaagggaatt

SEQ ID NO: 65212 - DNA, 25 bp, probe
aaagaggactacttcagagagaggt

SEQ ID NO: 65213 - DNA, 25 bp, probe
accctcacataatcaaactttatca

SEQ ID NO: 65214 - DNA, 25 bp, probe
gaagatggacagtgagaaagggaat

SEQ ID NO: 65215 - DNA, 25 bp, probe
caccctcacataatcaaactttatc

SEQ ID NO: 65216 - DNA, 25 bp, probe
tgttagaccaccctcacataatcaa

SEQ ID NO: 65217 - DNA, 25 bp, probe
gatcagattggatacagatatgaac

SEQ ID NO: 65218 - DNA, 25 bp, probe
agatggacagtgagaaagggaattg

SEQ ID NO: 65219 - DNA, 25 bp, probe
ccctcacataatcaaactttatcag

SEQ ID NO: 65220 - DNA, 25 bp, probe
agatcagattggatacagatatgaa

SEQ ID NO: 65221 - DNA, 25 bp, probe
agctttctaaggacattaaacagtg

SEQ ID NO: 65222 - DNA, 25 bp, probe
tggctcctttcagaactcatatcag

SEQ ID NO: 65223 - DNA, 25 bp, probe
ggctcctttcagaactcatatcagt

SEQ ID NO: 65224 - DNA, 25 bp, probe
ctggctcctttcagaactcatatca

SEQ ID NO: 65225 - DNA, 25 bp, probe
tccagcagcagcctacaagtatatg

SEQ ID NO: 65226 - DNA, 25 bp, probe
gtccagcagcagcctacaagtatat

SEQ ID NO: 65227 - DNA, 25 bp, probe
cctggctcctttcagaactcatatc

SEQ ID NO: 65228 - DNA, 25 bp, probe
taagagaacaactctggagacagaa

SEQ ID NO: 65229 - DNA, 25 bp, probe
ttaagagaacaactctggagacaga

SEQ ID NO: 65230 - DNA, 25 bp, probe
actcatatcagtttaagagaacaac

SEQ ID NO: 65231 - DNA, 25 bp, probe
gctcctttcagaactcatatcagtt

SEQ ID NO: 65232 - DNA, 25 bp, probe
acctggctcctttcagaactcatat

SEQ ID NO: 65233 - DNA, 25 bp, probe
ctcctttcagaactcatatcagttt

SEQ ID NO: 65234 - DNA, 25 bp, probe
tttaagagaacaactctggagacag

SEQ ID NO: 65235 - DNA, 25 bp, probe
agtttaagagaacaactctggagac

SEQ ID NO: 65236 - DNA, 25 bp, probe
cagtttaagagaacaactctggaga

SEQ ID NO: 65237 - DNA, 25 bp, probe
tcagtttaagagaacaactctggag

SEQ ID NO: 65238 - DNA, 25 bp, probe
gtttaagagaacaactctggagaca

SEQ ID NO: 65239 - DNA, 25 bp, probe
atcagtttaagagaacaactctgga

SEQ ID NO: 65240 - DNA, 25 bp, probe
gaaattctagcttcctcagcctttg

SEQ ID NO: 65241 - DNA, 25 bp, probe
gacctggctcctttcagaactcata

SEQ ID NO: 65242 - DNA, 25 bp, probe
tatcagtttaagagaacaactctgg

SEQ ID NO: 65243 - DNA, 25 bp, probe
tcctttcagaactcatatcagttta

SEQ ID NO: 65244 - DNA, 25 bp, probe
aaattctagcttcctcagcctttgt

SEQ ID NO: 65245 - DNA, 25 bp, probe
gagaacaactctggagacagaaatg

SEQ ID NO: 65246 - DNA, 25 bp, probe
agagaacaactctggagacagaaat

SEQ ID NO: 65247 - DNA, 25 bp, probe
aagagaacaactctggagacagaaa

SEQ ID NO: 65248 - DNA, 25 bp, probe
tcagaactcatatcagtttaagaga

SEQ ID NO: 65249 - DNA, 25 bp, probe
cctttcagaactcatatcagtttaa

SEQ ID NO: 65250 - DNA, 25 bp, probe
aattctagcttcctcagcctttgtg

SEQ ID NO: 65251 - DNA, 25 bp, probe
cactgtccttcacaggaaattctag

SEQ ID NO: 65252 - DNA, 25 bp, probe
ccagcagcagcctacaagtatatgg

SEQ ID NO: 65253 - DNA, 25 bp, probe
agaacaactctggagacagaaatgg

SEQ ID NO: 65254 - DNA, 25 bp, probe
tcatatcagtttaagagaacaactc

SEQ ID NO: 65255 - DNA, 25 bp, probe
ctcatatcagtttaagagaacaact

SEQ ID NO: 65256 - DNA, 25 bp, probe
gaactcatatcagtttaagagaaca

SEQ ID NO: 65257 - DNA, 25 bp, probe
cagcagcagcctacaagtatatggg

SEQ ID NO: 65258 - DNA, 25 bp, probe
gtccttcacaggaaattctagcttc

SEQ ID NO: 65259 - DNA, 25 bp, probe
agaactcatatcagtttaagagaac

SEQ ID NO: 65260 - DNA, 25 bp, probe
cagaactcatatcagtttaagagaa

SEQ ID NO: 65261 - DNA, 25 bp, probe
ttcagaactcatatcagtttaagag

SEQ ID NO: 65262 - DNA, 25 bp, probe
ccactgtccttcacaggaaattcta

SEQ ID NO: 65263 - DNA, 25 bp, probe
atatcagtttaagagaacaactctg

SEQ ID NO: 65264 - DNA, 25 bp, probe
catatcagtttaagagaacaactct

SEQ ID NO: 65265 - DNA, 25 bp, probe
tgtccttcacaggaaattctagctt

SEQ ID NO: 65266 - DNA, 25 bp, probe
agaggcaactcaggagtaagatgtg

SEQ ID NO: 65267 - DNA, 25 bp, probe
cagaggcaactcaggagtaagatgt

SEQ ID NO: 65268 - DNA, 25 bp, probe
acagaggcaactcaggagtaagatg

SEQ ID NO: 65269 - DNA, 25 bp, probe
cacagaggcaactcaggagtaagat

SEQ ID NO: 65270 - DNA, 25 bp, probe
gaggcaactcaggagtaagatgtgt

SEQ ID NO: 65271 - DNA, 25 bp, probe
ggcaactcaggagtaagatgtgtga

SEQ ID NO: 65272 - DNA, 25 bp, probe
aggcaactcaggagtaagatgtgtg

SEQ ID NO: 65273 - DNA, 25 bp, probe
caactcaggagtaagatgtgtgagc

SEQ ID NO: 65274 - DNA, 25 bp, probe
gcaactcaggagtaagatgtgtgag

SEQ ID NO: 65275 - DNA, 25 bp, probe
aactcaggagtaagatgtgtgagcg

SEQ ID NO: 65276 - DNA, 25 bp, probe
cctaataggatggttctaggaagaa

SEQ ID NO: 65277 - DNA, 25 bp, probe
gaagttaccaggctttcctaatagg

SEQ ID NO: 65278 - DNA, 25 bp, probe
ggaagttaccaggctttcctaatag

SEQ ID NO: 65279 - DNA, 25 bp, probe
tggaagttaccaggctttcctaata

SEQ ID NO: 65280 - DNA, 25 bp, probe
ttggaagttaccaggctttcctaat

SEQ ID NO: 65281 - DNA, 25 bp, probe
tttggaagttaccaggctttcctaa

SEQ ID NO: 65282 - DNA, 25 bp, probe
gctttcctaataggatggttctagg

SEQ ID NO: 65283 - DNA, 25 bp, probe
ggctttcctaataggatggttctag

SEQ ID NO: 65284 - DNA, 25 bp, probe
aggctttcctaataggatggttcta

SEQ ID NO: 65285 - DNA, 25 bp, probe
gttaccaggctttcctaataggatg

SEQ ID NO: 65286 - DNA, 25 bp, probe
agttaccaggctttcctaataggat

SEQ ID NO: 65287 - DNA, 25 bp, probe
aagttaccaggctttcctaatagga

SEQ ID NO: 65288 - DNA, 25 bp, probe
ctttggaagttaccaggctttccta

SEQ ID NO: 65289 - DNA, 25 bp, probe
ttaccaggctttcctaataggatgg

SEQ ID NO: 65290 - DNA, 25 bp, probe
caggctttcctaataggatggttct

SEQ ID NO: 65291 - DNA, 25 bp, probe
ccactttggaagttaccaggctttc

SEQ ID NO: 65292 - DNA, 25 bp, probe
ccaggctttcctaataggatggttc

SEQ ID NO: 65293 - DNA, 25 bp, probe
taccaggctttcctaataggatggt

SEQ ID NO: 65294 - DNA, 25 bp, probe
cactttggaagttaccaggctttcc

SEQ ID NO: 65295 - DNA, 25 bp, probe
actttggaagttaccaggctttcct

SEQ ID NO: 65296 - DNA, 25 bp, probe
accaggctttcctaataggatggtt

SEQ ID NO: 65297 - DNA, 25 bp, probe
tccactttggaagttaccaggcttt

SEQ ID NO: 65298 - DNA, 25 bp, probe
ttcctacatcaatgccaactacatc

SEQ ID NO: 65299 - DNA, 25 bp, probe
gttcctacatcaatgccaactacat

SEQ ID NO: 65300 - DNA, 25 bp, probe
gagatgaacgagagtgtagagagtt

SEQ ID NO: 65301 - DNA, 25 bp, probe
agatgaacgagagtgtagagagttg

SEQ ID NO: 65302 - DNA, 25 bp, probe
gatgaacgagagtgtagagagttgt

SEQ ID NO: 65303 - DNA, 25 bp, probe
atgaacgagagtgtagagagttgtg

SEQ ID NO: 65304 - DNA, 25 bp, probe
tcctacatcaatgccaactacatcc

SEQ ID NO: 65305 - DNA, 25 bp, probe
aggagatgaacgagagtgtagagag

SEQ ID NO: 65306 - DNA, 25 bp, probe
gaggagatgaacgagagtgtagaga

SEQ ID NO: 65307 - DNA, 25 bp, probe
ggagatgaacgagagtgtagagagt

SEQ ID NO: 65308 - DNA, 25 bp, probe
ctctgagttcctacatcaatgccaa

SEQ ID NO: 65309 - DNA, 25 bp, probe
tctgagttcctacatcaatgccaac

SEQ ID NO: 65310 - DNA, 25 bp, probe
gaaagtcattcacacggaggattac

SEQ ID NO: 65311 - DNA, 25 bp, probe
agaaagtcattcacacggaggatta

SEQ ID NO: 65312 - DNA, 25 bp, probe
cctacatcaatgccaactacatccg

SEQ ID NO: 65313 - DNA, 25 bp, probe
cgaggagatgaacgagagtgtagag

SEQ ID NO: 65314 - DNA, 25 bp, probe
gaagcattactggttcacatcctgg

SEQ ID NO: 65315 - DNA, 25 bp, probe
gagttcctacatcaatgccaactac

SEQ ID NO: 65316 - DNA, 25 bp, probe
tgaacgagagtgtagagagttgtgg

SEQ ID NO: 65317 - DNA, 25 bp, probe
tgagttcctacatcaatgccaacta

SEQ ID NO: 65318 - DNA, 25 bp, probe
aaagtcattcacacggaggattacc

SEQ ID NO: 65319 - DNA, 25 bp, probe
gaccctctgagttcctacatcaatg

SEQ ID NO: 65320 - DNA, 25 bp, probe
agttcctacatcaatgccaactaca

SEQ ID NO: 65321 - DNA, 25 bp, probe
cagaaagtcattcacacggaggatt

SEQ ID NO: 65322 - DNA, 25 bp, probe
cctctgagttcctacatcaatgcca

SEQ ID NO: 65323 - DNA, 25 bp, probe
ctgaagcattactggttcacatcct

SEQ ID NO: 65324 - DNA, 25 bp, probe
ctgagttcctacatcaatgccaact

SEQ ID NO: 65325 - DNA, 25 bp, probe
gagatcactgtgcagaaagtcattc

SEQ ID NO: 65326 - DNA, 25 bp, probe
gagagtgtagagagttgtgggaagg

SEQ ID NO: 65327 - DNA, 25 bp, probe
tgaagcattactggttcacatcctg

SEQ ID NO: 65328 - DNA, 25 bp, probe
agatcactgtgcagaaagtcattca

SEQ ID NO: 65329 - DNA, 25 bp, probe
tgagatcactgtgcagaaagtcatt

SEQ ID NO: 65330 - DNA, 25 bp, probe
ttgagatcactgtgcagaaagtcat

SEQ ID NO: 65331 - DNA, 25 bp, probe
cgaccctctgagttcctacatcaat

SEQ ID NO: 65332 - DNA, 25 bp, probe
cattgtcatgatcaccaacatcgag

SEQ ID NO: 65333 - DNA, 25 bp, probe
cgagagtgtagagagttgtgggaag

SEQ ID NO: 65334 - DNA, 25 bp, probe
ttgtgggaagggaacaggattgtat

SEQ ID NO: 65335 - DNA, 25 bp, probe
atcgaggagatgaacgagagtgtag

SEQ ID NO: 65336 - DNA, 25 bp, probe
gatcactgtgcagaaagtcattcac

SEQ ID NO: 65337 - DNA, 25 bp, probe
ctacatcaatgccaactacatccgg

SEQ ID NO: 65338 - DNA, 25 bp, probe
cctgaagcattactggttcacatcc

SEQ ID NO: 65339 - DNA, 25 bp, probe
accctctgagttcctacatcaatgc

SEQ ID NO: 65340 - DNA, 25 bp, probe
tcatgatcaccaacatcgaggagat

SEQ ID NO: 65341 - DNA, 25 bp, probe
gttgagatcactgtgcagaaagtca

SEQ ID NO: 65342 - DNA, 25 bp, probe
tgatgtagaagatgttccagttgat

SEQ ID NO: 65343 - DNA, 25 bp, probe
gatgtagaagatgttccagttgatg

SEQ ID NO: 65344 - DNA, 25 bp, probe
gtgatgtagaagatgttccagttga

SEQ ID NO: 65345 - DNA, 25 bp, probe
gcatcttcctcataccttcaagtag

SEQ ID NO: 65346 - DNA, 25 bp, probe
tgtgatgtagaagatgttccagttg

SEQ ID NO: 65347 - DNA, 25 bp, probe
catcttcctcataccttcaagtaga

SEQ ID NO: 65348 - DNA, 25 bp, probe
gaagatgtaaggtggaaggaagttc

SEQ ID NO: 65349 - DNA, 25 bp, probe
gcaatgtaccagaataatgaaggaa

SEQ ID NO: 65350 - DNA, 25 bp, probe
atcttcctcataccttcaagtagaa

SEQ ID NO: 65351 - DNA, 25 bp, probe
gtattcaacagtgatggaacagtca

SEQ ID NO: 65352 - DNA, 25 bp, probe
gaaggttatctgttggatgacattg

SEQ ID NO: 65353 - DNA, 25 bp, probe
agaaggttatctgttggatgacatt

SEQ ID NO: 65354 - DNA, 25 bp, probe
ttatctgttggatgacattggagag

SEQ ID NO: 65355 - DNA, 25 bp, probe
gttatctgttggatgacattggaga

SEQ ID NO: 65356 - DNA, 25 bp, probe
ggaagatgtaaggtggaaggaagtt

SEQ ID NO: 65357 - DNA, 25 bp, probe
ctgtgatgtagaagatgttccagtt

SEQ ID NO: 65358 - DNA, 25 bp, probe
tatctgttggatgacattggagaga

SEQ ID NO: 65359 - DNA, 25 bp, probe
aaggttatctgttggatgacattgg

SEQ ID NO: 65360 - DNA, 25 bp, probe
gtaatagttcttgccgatccttgtc

SEQ ID NO: 65361 - DNA, 25 bp, probe
ctgtaatagttcttgccgatccttg

SEQ ID NO: 65362 - DNA, 25 bp, probe
ggttatctgttggatgacattggag

SEQ ID NO: 65363 - DNA, 25 bp, probe
taatagttcttgccgatccttgtca

SEQ ID NO: 65364 - DNA, 25 bp, probe
cgtattcaacagtgatggaacagtc

SEQ ID NO: 65365 - DNA, 25 bp, probe
gataggagctgtgatgtagaagatg

SEQ ID NO: 65366 - DNA, 25 bp, probe
agataggagctgtgatgtagaagat

SEQ ID NO: 65367 - DNA, 25 bp, probe
aagagataggagctgtgatgtagaa

SEQ ID NO: 65368 - DNA, 25 bp, probe
ctggaagatgtaaggtggaaggaag

SEQ ID NO: 65369 - DNA, 25 bp, probe
atctgttggatgacattggagagaa

SEQ ID NO: 65370 - DNA, 25 bp, probe
aggttatctgttggatgacattgga

SEQ ID NO: 65371 - DNA, 25 bp, probe
ataggagctgtgatgtagaagatgt

SEQ ID NO: 65372 - DNA, 25 bp, probe
tgtaatagttcttgccgatccttgt

SEQ ID NO: 65373 - DNA, 25 bp, probe
gagataggagctgtgatgtagaaga

SEQ ID NO: 65374 - DNA, 25 bp, probe
agagataggagctgtgatgtagaag

SEQ ID NO: 65375 - DNA, 25 bp, probe
taggagctgtgatgtagaagatgtt

SEQ ID NO: 65376 - DNA, 25 bp, probe
atgtagaagatgttccagttgatgg

SEQ ID NO: 65377 - DNA, 25 bp, probe
tgcaatgtaccagaataatgaagga

SEQ ID NO: 65378 - DNA, 25 bp, probe
gagaaggaaacatacatagtgggat

SEQ ID NO: 65379 - DNA, 25 bp, probe
atgcaatgtaccagaataatgaagg

SEQ ID NO: 65380 - DNA, 25 bp, probe
ctgagaaggaaacatacatagtggg

SEQ ID NO: 65381 - DNA, 25 bp, probe
tgctgagaaggaaacatacatagtg

SEQ ID NO: 65382 - DNA, 25 bp, probe
gtgctgagaaggaaacatacatagt

SEQ ID NO: 65383 - DNA, 25 bp, probe
cctgtaatagttcttgccgatcctt

SEQ ID NO: 65384 - DNA, 25 bp, probe
tgagaaggaaacatacatagtggga

SEQ ID NO: 65385 - DNA, 25 bp, probe
tacaacaacaaagcagaggatgatt

SEQ ID NO: 65386 - DNA, 25 bp, probe
aactaactcggtcattgctgttgaa

SEQ ID NO: 65387 - DNA, 25 bp, probe
aatttctggctttgggaactaactc

SEQ ID NO: 65388 - DNA, 25 bp, probe
gaatttctggctttgggaactaact

SEQ ID NO: 65389 - DNA, 25 bp, probe
gaactaactcggtcattgctgttga

SEQ ID NO: 65390 - DNA, 25 bp, probe
atgatgaatgcgaatttctggcttt

SEQ ID NO: 65391 - DNA, 25 bp, probe
ggagatgatgaatgcgaatttctgg

SEQ ID NO: 65392 - DNA, 25 bp, probe
gggagatgatgaatgcgaatttctg

SEQ ID NO: 65393 - DNA, 25 bp, probe
gatgatgaatgcgaatttctggctt

SEQ ID NO: 65394 - DNA, 25 bp, probe
cgaatttctggctttgggaactaac

SEQ ID NO: 65395 - DNA, 25 bp, probe
ggaactaactcggtcattgctgttg

SEQ ID NO: 65396 - DNA, 25 bp, probe
gagatgatgaatgcgaatttctggc

SEQ ID NO: 65397 - DNA, 25 bp, probe
tgatgaatgcgaatttctggctttg

SEQ ID NO: 65398 - DNA, 25 bp, probe
actaactcggtcattgctgttgaaa

SEQ ID NO: 65399 - DNA, 25 bp, probe
atttctggctttgggaactaactcg

SEQ ID NO: 65400 - DNA, 25 bp, probe
agatgatgaatgcgaatttctggct

SEQ ID NO: 65401 - DNA, 25 bp, probe
gatgaatgcgaatttctggctttgg

SEQ ID NO: 65402 - DNA, 25 bp, probe
ctttgggaactaactcggtcattgc

SEQ ID NO: 65403 - DNA, 25 bp, probe
gctttgggaactaactcggtcattg

SEQ ID NO: 65404 - DNA, 25 bp, probe
ctaactcggtcattgctgttgaaaa

SEQ ID NO: 65405 - DNA, 25 bp, probe
gcgaatttctggctttgggaactaa

SEQ ID NO: 65406 - DNA, 25 bp, probe
tttgggaactaactcggtcattgct

SEQ ID NO: 65407 - DNA, 25 bp, probe
gaatgcgaatttctggctttgggaa

SEQ ID NO: 65408 - DNA, 25 bp, probe
atgaatgcgaatttctggctttggg

SEQ ID NO: 65409 - DNA, 25 bp, probe
aggggagatgatgaatgcgaatttc

SEQ ID NO: 65410 - DNA, 25 bp, probe
ggggagatgatgaatgcgaatttct

SEQ ID NO: 65411 - DNA, 25 bp, probe
caggggagatgatgaatgcgaattt

SEQ ID NO: 65412 - DNA, 25 bp, probe
aatgcgaatttctggctttgggaac

SEQ ID NO: 65413 - DNA, 25 bp, probe
ttgggaactaactcggtcattgctg

SEQ ID NO: 65414 - DNA, 25 bp, probe
ggctttgggaactaactcggtcatt

SEQ ID NO: 65415 - DNA, 25 bp, probe
tttctggctttgggaactaactcgg

SEQ ID NO: 65416 - DNA, 25 bp, probe
gggaactaactcggtcattgctgtt

SEQ ID NO: 65417 - DNA, 25 bp, probe
tgcgaatttctggctttgggaacta

SEQ ID NO: 65418 - DNA, 25 bp, probe
ccaggggagatgatgaatgcgaatt

SEQ ID NO: 65419 - DNA, 25 bp, probe
cagatgagatcaccaaagagactac

SEQ ID NO: 65420 - DNA, 25 bp, probe
gcagatgagatcaccaaagagacta

SEQ ID NO: 65421 - DNA, 25 bp, probe
aaagcagatgagatcaccaaagaga

SEQ ID NO: 65422 - DNA, 25 bp, probe
agtacccaaatcgtcttatattagg

SEQ ID NO: 65423 - DNA, 25 bp, probe
atcgtcttatattagggaattaggg

SEQ ID NO: 65424 - DNA, 25 bp, probe
catcatggaggatttagtacccaaa

SEQ ID NO: 65425 - DNA, 25 bp, probe
aagcagatgagatcaccaaagagac

SEQ ID NO: 65426 - DNA, 25 bp, probe
atcatggaggatttagtacccaaat

SEQ ID NO: 65427 - DNA, 25 bp, probe
ccaaatcgtcttatattagggaatt

SEQ ID NO: 65428 - DNA, 25 bp, probe
tcgtcttatattagggaattagggg

SEQ ID NO: 65429 - DNA, 25 bp, probe
agcagatgagatcaccaaagagact

SEQ ID NO: 65430 - DNA, 25 bp, probe
acccaaatcgtcttatattagggaa

SEQ ID NO: 65431 - DNA, 25 bp, probe
gcatcatggaggatttagtacccaa

SEQ ID NO: 65432 - DNA, 25 bp, probe
gtacccaaatcgtcttatattaggg

SEQ ID NO: 65433 - DNA, 25 bp, probe
tacccaaatcgtcttatattaggga

SEQ ID NO: 65434 - DNA, 25 bp, probe
ctgcatcatggaggatttagtaccc

SEQ ID NO: 65435 - DNA, 25 bp, probe
aaaagcagatgagatcaccaaagag

SEQ ID NO: 65436 - DNA, 25 bp, probe
gaaaagcagatgagatcaccaaaga

SEQ ID NO: 65437 - DNA, 25 bp, probe
agaaaagcagatgagatcaccaaag

SEQ ID NO: 65438 - DNA, 25 bp, probe
cccaaatcgtcttatattagggaat

SEQ ID NO: 65439 - DNA, 25 bp, probe
cagaaaagcagatgagatcaccaaa

SEQ ID NO: 65440 - DNA, 25 bp, probe
cctgcatcatggaggatttagtacc

SEQ ID NO: 65441 - DNA, 25 bp, probe
aatcgtcttatattagggaattagg

SEQ ID NO: 65442 - DNA, 25 bp, probe
tttagtacccaaatcgtcttatatt

SEQ ID NO: 65443 - DNA, 25 bp, probe
gcctgcatcatggaggatttagtac

SEQ ID NO: 65444 - DNA, 25 bp, probe
tagtacccaaatcgtcttatattag

SEQ ID NO: 65445 - DNA, 25 bp, probe
tgcatcatggaggatttagtaccca

SEQ ID NO: 65446 - DNA, 25 bp, probe
tcatggaggatttagtacccaaatc

SEQ ID NO: 65447 - DNA, 25 bp, probe
gaggatttagtacccaaatcgtctt

SEQ ID NO: 65448 - DNA, 25 bp, probe
aggatttagtacccaaatcgtctta

SEQ ID NO: 65449 - DNA, 25 bp, probe
atttagtacccaaatcgtcttatat

SEQ ID NO: 65450 - DNA, 25 bp, probe
catggaggatttagtacccaaatcg

SEQ ID NO: 65451 - DNA, 25 bp, probe
atggaggatttagtacccaaatcgt

SEQ ID NO: 65452 - DNA, 25 bp, probe
gcagaaaagcagatgagatcaccaa

SEQ ID NO: 65453 - DNA, 25 bp, probe
ggatttagtacccaaatcgtcttat

SEQ ID NO: 65454 - DNA, 25 bp, probe
ttagtacccaaatcgtcttatatta

SEQ ID NO: 65455 - DNA, 25 bp, probe
gagcagaaaagcagatgagatcacc

SEQ ID NO: 65456 - DNA, 25 bp, probe
ggaggatttagtacccaaatcgtct

SEQ ID NO: 65457 - DNA, 25 bp, probe
tggaggatttagtacccaaatcgtc

SEQ ID NO: 65458 - DNA, 25 bp, probe
cgagcagaaaagcagatgagatcac

SEQ ID NO: 65459 - DNA, 25 bp, probe
agcagaaaagcagatgagatcacca

SEQ ID NO: 65460 - DNA, 25 bp, probe
tcgagcagaaaagcagatgagatca

SEQ ID NO: 65461 - DNA, 25 bp, probe
ggcctgcatcatggaggatttagta

SEQ ID NO: 65462 - DNA, 25 bp, probe
aagatgggaaccttctcttcgcatg

SEQ ID NO: 65463 - DNA, 25 bp, probe
ggatgaagaaattgaggcagaatac

SEQ ID NO: 65464 - DNA, 25 bp, probe
tggatgaagaaattgaggcagaata

SEQ ID NO: 65465 - DNA, 25 bp, probe
tatggatgaagaaattgaggcagaa

SEQ ID NO: 65466 - DNA, 25 bp, probe
atatggatgaagaaattgaggcaga

SEQ ID NO: 65467 - DNA, 25 bp, probe
gatatggatgaagaaattgaggcag

SEQ ID NO: 65468 - DNA, 25 bp, probe
gatgaagaaattgaggcagaataca

SEQ ID NO: 65469 - DNA, 25 bp, probe
ccttcctaatcatcccaatgttgta

SEQ ID NO: 65470 - DNA, 25 bp, probe
atggatgaagaaattgaggcagaat

SEQ ID NO: 65471 - DNA, 25 bp, probe
gttccttcctaatcatcccaatgtt

SEQ ID NO: 65472 - DNA, 25 bp, probe
ttccttcctaatcatcccaatgttg

SEQ ID NO: 65473 - DNA, 25 bp, probe
cctaatcatcccaatgttgtaaagt

SEQ ID NO: 65474 - DNA, 25 bp, probe
cagttccttcctaatcatcccaatg

SEQ ID NO: 65475 - DNA, 25 bp, probe
gaagaaattgaggcagaatacaaca

SEQ ID NO: 65476 - DNA, 25 bp, probe
tgaagaaattgaggcagaatacaac

SEQ ID NO: 65477 - DNA, 25 bp, probe
tcctaatcatcccaatgttgtaaag

SEQ ID NO: 65478 - DNA, 25 bp, probe
cttcctaatcatcccaatgttgtaa

SEQ ID NO: 65479 - DNA, 25 bp, probe
agaaattgaggcagaatacaacatt

SEQ ID NO: 65480 - DNA, 25 bp, probe
aagaaattgaggcagaatacaacat

SEQ ID NO: 65481 - DNA, 25 bp, probe
agttccttcctaatcatcccaatgt

SEQ ID NO: 65482 - DNA, 25 bp, probe
atgaagaaattgaggcagaatacaa

SEQ ID NO: 65483 - DNA, 25 bp, probe
ttcctaatcatcccaatgttgtaaa

SEQ ID NO: 65484 - DNA, 25 bp, probe
tccttcctaatcatcccaatgttgt

SEQ ID NO: 65485 - DNA, 25 bp, probe
gaaattgaggcagaatacaacattt

SEQ ID NO: 65486 - DNA, 25 bp, probe
ctaatcatcccaatgttgtaaagtt

SEQ ID NO: 65487 - DNA, 25 bp, probe
gcagttccttcctaatcatcccaat

SEQ ID NO: 65488 - DNA, 25 bp, probe
taatcatcccaatgttgtaaagttt

SEQ ID NO: 65489 - DNA, 25 bp, probe
aaaacttctgaaaatgacaaaccct

SEQ ID NO: 65490 - DNA, 25 bp, probe
aacttctgaaaatgacaaaccctaa

SEQ ID NO: 65491 - DNA, 25 bp, probe
aaacttctgaaaatgacaaacccta

SEQ ID NO: 65492 - DNA, 25 bp, probe
taaaacttctgaaaatgacaaaccc

SEQ ID NO: 65493 - DNA, 25 bp, probe
aattgaggcagaatacaacattttg

SEQ ID NO: 65494 - DNA, 25 bp, probe
gttttatgggatgttttacaaagcg

SEQ ID NO: 65495 - DNA, 25 bp, probe
ttttatgggatgttttacaaagcgg

SEQ ID NO: 65496 - DNA, 25 bp, probe
tttgcagttccttcctaatcatccc

SEQ ID NO: 65497 - DNA, 25 bp, probe
ttatgggatgttttacaaagcggat

SEQ ID NO: 65498 - DNA, 25 bp, probe
tttatgggatgttttacaaagcgga

SEQ ID NO: 65499 - DNA, 25 bp, probe
ctaagtgctgacacatcattcccag

SEQ ID NO: 65500 - DNA, 25 bp, probe
agttttatgggatgttttacaaagc

SEQ ID NO: 65501 - DNA, 25 bp, probe
aatcatcccaatgttgtaaagtttt

SEQ ID NO: 65502 - DNA, 25 bp, probe
tgttgtaaagttttatgggatgttt

SEQ ID NO: 65503 - DNA, 25 bp, probe
agacagaagttcaccagcagctaag

SEQ ID NO: 65504 - DNA, 25 bp, probe
gagacagaagttcaccagcagctaa

SEQ ID NO: 65505 - DNA, 25 bp, probe
aaattgaggcagaatacaacatttt

SEQ ID NO: 65506 - DNA, 25 bp, probe
ctaaaacttctgaaaatgacaaacc

SEQ ID NO: 65507 - DNA, 25 bp, probe
ggtagtattccagcatccttctata

SEQ ID NO: 65508 - DNA, 25 bp, probe
agtattccagcatccttctatatct

SEQ ID NO: 65509 - DNA, 25 bp, probe
gtattccagcatccttctatatctg

SEQ ID NO: 65510 - DNA, 25 bp, probe
tattccagcatccttctatatctga

SEQ ID NO: 65511 - DNA, 25 bp, probe
gtagtattccagcatccttctatat

SEQ ID NO: 65512 - DNA, 25 bp, probe
gggtagtattccagcatccttctat

SEQ ID NO: 65513 - DNA, 25 bp, probe
tagtattccagcatccttctatatc

SEQ ID NO: 65514 - DNA, 25 bp, probe
tgccaattacacttacaataagggt

SEQ ID NO: 65515 - DNA, 25 bp, probe
atgccaattacacttacaataaggg

SEQ ID NO: 65516 - DNA, 25 bp, probe
gccaattacacttacaataagggta

SEQ ID NO: 65517 - DNA, 25 bp, probe
tatatgtgggtagtattccagcatc

SEQ ID NO: 65518 - DNA, 25 bp, probe
ctatatgtgggtagtattccagcat

SEQ ID NO: 65519 - DNA, 25 bp, probe
actatatgtgggtagtattccagca

SEQ ID NO: 65520 - DNA, 25 bp, probe
caataagggtactatatgtgggtag

SEQ ID NO: 65521 - DNA, 25 bp, probe
acaataagggtactatatgtgggta

SEQ ID NO: 65522 - DNA, 25 bp, probe
tacaataagggtactatatgtgggt

SEQ ID NO: 65523 - DNA, 25 bp, probe
ctgatactctaccatcaccagagac

SEQ ID NO: 65524 - DNA, 25 bp, probe
atatgtgggtagtattccagcatcc

SEQ ID NO: 65525 - DNA, 25 bp, probe
tgggtagtattccagcatccttcta

SEQ ID NO: 65526 - DNA, 25 bp, probe
aataagggtactatatgtgggtagt

SEQ ID NO: 65527 - DNA, 25 bp, probe
ttacaataagggtactatatgtggg

SEQ ID NO: 65528 - DNA, 25 bp, probe
ccaattacacttacaataagggtac

SEQ ID NO: 65529 - DNA, 25 bp, probe
cctgatactctaccatcaccagaga

SEQ ID NO: 65530 - DNA, 25 bp, probe
tatgtgggtagtattccagcatcct

SEQ ID NO: 65531 - DNA, 25 bp, probe
atactctaccatcaccagagaccag

SEQ ID NO: 65532 - DNA, 25 bp, probe
gatactctaccatcaccagagacca

SEQ ID NO: 65533 - DNA, 25 bp, probe
tgatactctaccatcaccagagacc

SEQ ID NO: 65534 - DNA, 25 bp, probe
tctaccatcaccagagaccaggaag

SEQ ID NO: 65535 - DNA, 25 bp, probe
gggtactatatgtgggtagtattcc

SEQ ID NO: 65536 - DNA, 25 bp, probe
tactatatgtgggtagtattccagc

SEQ ID NO: 65537 - DNA, 25 bp, probe
atgtgggtagtattccagcatcctt

SEQ ID NO: 65538 - DNA, 25 bp, probe
ggtactatatgtgggtagtattcca

SEQ ID NO: 65539 - DNA, 25 bp, probe
caattacacttacaataagggtact

SEQ ID NO: 65540 - DNA, 25 bp, probe
agggtactatatgtgggtagtattc

SEQ ID NO: 65541 - DNA, 25 bp, probe
gtgggtagtattccagcatccttct

SEQ ID NO: 65542 - DNA, 25 bp, probe
cttacaataagggtactatatgtgg

SEQ ID NO: 65543 - DNA, 25 bp, probe
aagggtactatatgtgggtagtatt

SEQ ID NO: 65544 - DNA, 25 bp, probe
gtactatatgtgggtagtattccag

SEQ ID NO: 65545 - DNA, 25 bp, probe
tgtgggtagtattccagcatccttc

SEQ ID NO: 65546 - DNA, 25 bp, probe
catcaccagagaccaggaagctaaa

SEQ ID NO: 65547 - DNA, 25 bp, probe
taagggtactatatgtgggtagtat

SEQ ID NO: 65548 - DNA, 25 bp, probe
ataagggtactatatgtgggtagta

SEQ ID NO: 65549 - DNA, 25 bp, probe
tactctaccatcaccagagaccagg

SEQ ID NO: 65550 - DNA, 25 bp, probe
acttacaataagggtactatatgtg

SEQ ID NO: 65551 - DNA, 25 bp, probe
tgaagttacaaacatacagccatct

SEQ ID NO: 65552 - DNA, 25 bp, probe
atgaagttacaaacatacagccatc

SEQ ID NO: 65553 - DNA, 25 bp, probe
gaagttacaaacatacagccatctg

SEQ ID NO: 65554 - DNA, 25 bp, probe
catgaagttacaaacatacagccat

SEQ ID NO: 65555 - DNA, 25 bp, probe
tcacatgaagttacaaacatacagc

SEQ ID NO: 65556 - DNA, 25 bp, probe
cacatgaagttacaaacatacagcc

SEQ ID NO: 65557 - DNA, 25 bp, probe
acatgaagttacaaacatacagcca

SEQ ID NO: 65558 - DNA, 25 bp, probe
aagttacaaacatacagccatctgg

SEQ ID NO: 65559 - DNA, 25 bp, probe
cttaacttctcagcctctcaactgc

SEQ ID NO: 65560 - DNA, 25 bp, probe
cttcaatttccttttctcctgtgtc

SEQ ID NO: 65561 - DNA, 25 bp, probe
ttcaatttccttttctcctgtgtct

SEQ ID NO: 65562 - DNA, 25 bp, probe
agttacaaacatacagccatctggg

SEQ ID NO: 65563 - DNA, 25 bp, probe
tcaatttccttttctcctgtgtctg

SEQ ID NO: 65564 - DNA, 25 bp, probe
gcttaacttctcagcctctcaactg

SEQ ID NO: 65565 - DNA, 25 bp, probe
ctgcttaacttctcagcctctcaac

SEQ ID NO: 65566 - DNA, 25 bp, probe
ttaacttctcagcctctcaactgct

SEQ ID NO: 65567 - DNA, 25 bp, probe
tgcttaacttctcagcctctcaact

SEQ ID NO: 65568 - DNA, 25 bp, probe
gcttcaatttccttttctcctgtgt

SEQ ID NO: 65569 - DNA, 25 bp, probe
cagactcaaggagaggcagattcac

SEQ ID NO: 65570 - DNA, 25 bp, probe
caaggagaggcagattcaccagaag

SEQ ID NO: 65571 - DNA, 25 bp, probe
ctggcttcaatttccttttctcctg

SEQ ID NO: 65572 - DNA, 25 bp, probe
gtcctggcttcaatttccttttctc

SEQ ID NO: 65573 - DNA, 25 bp, probe
caatttccttttctcctgtgtctgc

SEQ ID NO: 65574 - DNA, 25 bp, probe
ggcttcaatttccttttctcctgtg

SEQ ID NO: 65575 - DNA, 25 bp, probe
agtcctggcttcaatttccttttct

SEQ ID NO: 65576 - DNA, 25 bp, probe
cagtcctggcttcaatttccttttc

SEQ ID NO: 65577 - DNA, 25 bp, probe
taacttctcagcctctcaactgctc

SEQ ID NO: 65578 - DNA, 25 bp, probe
aaagtggtcaaaagtgctgcttaac

SEQ ID NO: 65579 - DNA, 25 bp, probe
caaagtggtcaaaagtgctgcttaa

SEQ ID NO: 65580 - DNA, 25 bp, probe
tggcttcaatttccttttctcctgt

SEQ ID NO: 65581 - DNA, 25 bp, probe
cctggcttcaatttccttttctcct

SEQ ID NO: 65582 - DNA, 25 bp, probe
tcctggcttcaatttccttttctcc

SEQ ID NO: 65583 - DNA, 25 bp, probe
tgcaacaaacagttgaagaatcatc

SEQ ID NO: 65584 - DNA, 25 bp, probe
ctctcaactgctcccacttgtcttt

SEQ ID NO: 65585 - DNA, 25 bp, probe
gtgcaacaaacagttgaagaatcat

SEQ ID NO: 65586 - DNA, 25 bp, probe
aagtggtcaaaagtgctgcttaact

SEQ ID NO: 65587 - DNA, 25 bp, probe
tgtgcaacaaacagttgaagaatca

SEQ ID NO: 65588 - DNA, 25 bp, probe
tcaaaagtgctgcttaacttctcag

SEQ ID NO: 65589 - DNA, 25 bp, probe
atttccttttctcctgtgtctgcaa

SEQ ID NO: 65590 - DNA, 25 bp, probe
aatttccttttctcctgtgtctgca

SEQ ID NO: 65591 - DNA, 25 bp, probe
gtcaaaagtgctgcttaacttctca

SEQ ID NO: 65592 - DNA, 25 bp, probe
ctgtgcaacaaacagttgaagaatc

SEQ ID NO: 65593 - DNA, 25 bp, probe
tttccttttctcctgtgtctgcaaa

SEQ ID NO: 65594 - DNA, 25 bp, probe
gcagtcctggcttcaatttcctttt

SEQ ID NO: 65595 - DNA, 25 bp, probe
ccgattcattgagcacctacattaa

SEQ ID NO: 65596 - DNA, 25 bp, probe
accgattcattgagcacctacatta

SEQ ID NO: 65597 - DNA, 25 bp, probe
taaccgattcattgagcacctacat

SEQ ID NO: 65598 - DNA, 25 bp, probe
cgattcattgagcacctacattaat

SEQ ID NO: 65599 - DNA, 25 bp, probe
atgtaaccgattcattgagcaccta

SEQ ID NO: 65600 - DNA, 25 bp, probe
aaccgattcattgagcacctacatt

SEQ ID NO: 65601 - DNA, 25 bp, probe
gtaaccgattcattgagcacctaca

SEQ ID NO: 65602 - DNA, 25 bp, probe
tgtaaccgattcattgagcacctac

SEQ ID NO: 65603 - DNA, 25 bp, probe
tcagcagagtgtgtttaagaccaaa

SEQ ID NO: 65604 - DNA, 25 bp, probe
aatgtaaccgattcattgagcacct

SEQ ID NO: 65605 - DNA, 25 bp, probe
ctcagcagagtgtgtttaagaccaa

SEQ ID NO: 65606 - DNA, 25 bp, probe
gaacagacaatcttgatcagcagag

SEQ ID NO: 65607 - DNA, 25 bp, probe
atcagcagagaaaccaagtccaaac

SEQ ID NO: 65608 - DNA, 25 bp, probe
aagacagccctgtgattgttatgat

SEQ ID NO: 65609 - DNA, 25 bp, probe
acagacaatcttgatcagcagagaa

SEQ ID NO: 65610 - DNA, 25 bp, probe
aacagacaatcttgatcagcagaga

SEQ ID NO: 65611 - DNA, 25 bp, probe
ctcaaaggaacagacaatcttgatc

SEQ ID NO: 65612 - DNA, 25 bp, probe
gatcagcagagaaaccaagtccaaa

SEQ ID NO: 65613 - DNA, 25 bp, probe
attatattaggggctacagtggcaa

SEQ ID NO: 65614 - DNA, 25 bp, probe
aattatattaggggctacagtggca

SEQ ID NO: 65615 - DNA, 25 bp, probe
aaatgtaaccgattcattgagcacc

SEQ ID NO: 65616 - DNA, 25 bp, probe
cctcaaaggaacagacaatcttgat

SEQ ID NO: 65617 - DNA, 25 bp, probe
agacagccctgtgattgttatgatc

SEQ ID NO: 65618 - DNA, 25 bp, probe
aaggaacagacaatcttgatcagca

SEQ ID NO: 65619 - DNA, 25 bp, probe
ttatattaggggctacagtggcaag

SEQ ID NO: 65620 - DNA, 25 bp, probe
gaagacagccctgtgattgttatga

SEQ ID NO: 65621 - DNA, 25 bp, probe
cagcagagtgtgtttaagaccaaaa

SEQ ID NO: 65622 - DNA, 25 bp, probe
taattatattaggggctacagtggc

SEQ ID NO: 65623 - DNA, 25 bp, probe
ggaacagacaatcttgatcagcaga

SEQ ID NO: 65624 - DNA, 25 bp, probe
aggaacagacaatcttgatcagcag

SEQ ID NO: 65625 - DNA, 25 bp, probe
caaaggaacagacaatcttgatcag

SEQ ID NO: 65626 - DNA, 25 bp, probe
tggatgatttctggcagatggtttg

SEQ ID NO: 65627 - DNA, 25 bp, probe
gtggatgatttctggcagatggttt

SEQ ID NO: 65628 - DNA, 25 bp, probe
agacaatcttgatcagcagagaaac

SEQ ID NO: 65629 - DNA, 25 bp, probe
cagacaatcttgatcagcagagaaa

SEQ ID NO: 65630 - DNA, 25 bp, probe
aaaggaacagacaatcttgatcagc

SEQ ID NO: 65631 - DNA, 25 bp, probe
caatcttgatcagcagagaaaccaa

SEQ ID NO: 65632 - DNA, 25 bp, probe
ccctcaaaggaacagacaatcttga

SEQ ID NO: 65633 - DNA, 25 bp, probe
tcagcagagaaaccaagtccaaact

SEQ ID NO: 65634 - DNA, 25 bp, probe
gacaatcttgatcagcagagaaacc

SEQ ID NO: 65635 - DNA, 25 bp, probe
ggaagacagccctgtgattgttatg

SEQ ID NO: 65636 - DNA, 25 bp, probe
aaaatgtaaccgattcattgagcac

SEQ ID NO: 65637 - DNA, 25 bp, probe
catataccaccagggacttctgctc

SEQ ID NO: 65638 - DNA, 25 bp, probe
gccctcaaaggaacagacaatcttg

SEQ ID NO: 65639 - DNA, 25 bp, probe
agggccgagtaaagtgtgatcatta

SEQ ID NO: 65640 - DNA, 25 bp, probe
gggccgagtaaagtgtgatcattac

SEQ ID NO: 65641 - DNA, 25 bp, probe
aagggccgagtaaagtgtgatcatt

SEQ ID NO: 65642 - DNA, 25 bp, probe
ccgagtaaagtgtgatcattactgg

SEQ ID NO: 65643 - DNA, 25 bp, probe
gagtaaagtgtgatcattactggcc

SEQ ID NO: 65644 - DNA, 25 bp, probe
cgagtaaagtgtgatcattactggc

SEQ ID NO: 65645 - DNA, 25 bp, probe
gccgagtaaagtgtgatcattactg

SEQ ID NO: 65646 - DNA, 25 bp, probe
gaagggccgagtaaagtgtgatcat

SEQ ID NO: 65647 - DNA, 25 bp, probe
gagaagggccgagtaaagtgtgatc

SEQ ID NO: 65648 - DNA, 25 bp, probe
ggccgagtaaagtgtgatcattact

SEQ ID NO: 65649 - DNA, 25 bp, probe
aacaaaacgttcacaacatcgtcat

SEQ ID NO: 65650 - DNA, 25 bp, probe
aaacgttcacaacatcgtcatggtg

SEQ ID NO: 65651 - DNA, 25 bp, probe
acaaaacgttcacaacatcgtcatg

SEQ ID NO: 65652 - DNA, 25 bp, probe
gaacaaaacgttcacaacatcgtca

SEQ ID NO: 65653 - DNA, 25 bp, probe
caaaacgttcacaacatcgtcatgg

SEQ ID NO: 65654 - DNA, 25 bp, probe
aaaacgttcacaacatcgtcatggt

SEQ ID NO: 65655 - DNA, 25 bp, probe
ggaacaaaacgttcacaacatcgtc

SEQ ID NO: 65656 - DNA, 25 bp, probe
gggaacaaaacgttcacaacatcgt

SEQ ID NO: 65657 - DNA, 25 bp, probe
gagagagcattgtacgaacttccag

SEQ ID NO: 65658 - DNA, 25 bp, probe
ctgagagagcattgtacgaacttcc

SEQ ID NO: 65659 - DNA, 25 bp, probe
gaccacattgtccgatttatcactg

SEQ ID NO: 65660 - DNA, 25 bp, probe
cactgacttctgcaatgccaattac

SEQ ID NO: 65661 - DNA, 25 bp, probe
tgagagagcattgtacgaacttcca

SEQ ID NO: 65662 - DNA, 25 bp, probe
agatggaggatcggtgtgaaataac

SEQ ID NO: 65663 - DNA, 25 bp, probe
cagatggaggatcggtgtgaaataa

SEQ ID NO: 65664 - DNA, 25 bp, probe
ctgacttctgcaatgccaattacag

SEQ ID NO: 65665 - DNA, 25 bp, probe
actgacttctgcaatgccaattaca

SEQ ID NO: 65666 - DNA, 25 bp, probe
acattgtccgatttatcactgccag

SEQ ID NO: 65667 - DNA, 25 bp, probe
agagagcattgtacgaacttccagg

SEQ ID NO: 65668 - DNA, 25 bp, probe
cacattgtccgatttatcactgcca

SEQ ID NO: 65669 - DNA, 25 bp, probe
accacattgtccgatttatcactgc

SEQ ID NO: 65670 - DNA, 25 bp, probe
cgaccacattgtccgatttatcact

SEQ ID NO: 65671 - DNA, 25 bp, probe
ctacagcgaaagaactacagagtgc

SEQ ID NO: 65672 - DNA, 25 bp, probe
gatggaggatcggtgtgaaataacg

SEQ ID NO: 65673 - DNA, 25 bp, probe
gctacagcgaaagaactacagagtg

SEQ ID NO: 65674 - DNA, 25 bp, probe
ctgctacagcgaaagaactacagag

SEQ ID NO: 65675 - DNA, 25 bp, probe
acgaccacattgtccgatttatcac

SEQ ID NO: 65676 - DNA, 25 bp, probe
cacgaccacattgtccgatttatca

SEQ ID NO: 65677 - DNA, 25 bp, probe
gctgagagagcattgtacgaacttc

SEQ ID NO: 65678 - DNA, 25 bp, probe
tgctacagcgaaagaactacagagt

SEQ ID NO: 65679 - DNA, 25 bp, probe
ccacattgtccgatttatcactgcc

SEQ ID NO: 65680 - DNA, 25 bp, probe
gttccaagctgagagagcattgtac

SEQ ID NO: 65681 - DNA, 25 bp, probe
agttccaagctgagagagcattgta

SEQ ID NO: 65682 - DNA, 25 bp, probe
aaagaactacagagtgcgaggtgag

SEQ ID NO: 65683 - DNA, 25 bp, probe
gaaagaactacagagtgcgaggtga

SEQ ID NO: 65684 - DNA, 25 bp, probe
cattgtccgatttatcactgccagc

SEQ ID NO: 65685 - DNA, 25 bp, probe
caagctgagagagcattgtacgaac

SEQ ID NO: 65686 - DNA, 25 bp, probe
ttctgcaatgccaattacagccatc

SEQ ID NO: 65687 - DNA, 25 bp, probe
cttctgcaatgccaattacagccat

SEQ ID NO: 65688 - DNA, 25 bp, probe
tgacttctgcaatgccaattacagc

SEQ ID NO: 65689 - DNA, 25 bp, probe
agctgagagagcattgtacgaactt

SEQ ID NO: 65690 - DNA, 25 bp, probe
aagctgagagagcattgtacgaact

SEQ ID NO: 65691 - DNA, 25 bp, probe
gcagatggaggatcggtgtgaaata

SEQ ID NO: 65692 - DNA, 25 bp, probe
gcacgaccacattgtccgatttatc

SEQ ID NO: 65693 - DNA, 25 bp, probe
atggaggatcggtgtgaaataacgg

SEQ ID NO: 65694 - DNA, 25 bp, probe
cctgctacagcgaaagaactacaga

SEQ ID NO: 65695 - DNA, 25 bp, probe
tacagcgaaagaactacagagtgcg

SEQ ID NO: 65696 - DNA, 25 bp, probe
gacttctgcaatgccaattacagcc

SEQ ID NO: 65697 - DNA, 25 bp, probe
tgagctgtgtttctcccaggtaatc

SEQ ID NO: 65698 - DNA, 25 bp, probe
ctgagctgtgtttctcccaggtaat

SEQ ID NO: 65699 - DNA, 25 bp, probe
ctgcaatgccaattacagccatctg

SEQ ID NO: 65700 - DNA, 25 bp, probe
agcacgaccacattgtccgatttat

SEQ ID NO: 65701 - DNA, 25 bp, probe
gacaagactctggacctacaggatt

SEQ ID NO: 65702 - DNA, 25 bp, probe
cttggacaagactctggacctacag

SEQ ID NO: 65703 - DNA, 25 bp, probe
ggacaagactctggacctacaggat

SEQ ID NO: 65704 - DNA, 25 bp, probe
ctcttggacaagactctggacctac

SEQ ID NO: 65705 - DNA, 25 bp, probe
tcttggacaagactctggacctaca

SEQ ID NO: 65706 - DNA, 25 bp, probe
tattaagtattctctagcggaccag

SEQ ID NO: 65707 - DNA, 25 bp, probe
attaagtattctctagcggaccaga

SEQ ID NO: 65708 - DNA, 25 bp, probe
atattaagtattctctagcggacca

SEQ ID NO: 65709 - DNA, 25 bp, probe
ttaagtattctctagcggaccagac

SEQ ID NO: 65710 - DNA, 25 bp, probe
aatgagagaagacagtgctagagtc

SEQ ID NO: 65711 - DNA, 25 bp, probe
gaaatgagagaagacagtgctagag

SEQ ID NO: 65712 - DNA, 25 bp, probe
agaaatgagagaagacagtgctaga

SEQ ID NO: 65713 - DNA, 25 bp, probe
cagaaatgagagaagacagtgctag

SEQ ID NO: 65714 - DNA, 25 bp, probe
aatattaagtattctctagcggacc

SEQ ID NO: 65715 - DNA, 25 bp, probe
aaatgagagaagacagtgctagagt

SEQ ID NO: 65716 - DNA, 25 bp, probe
gattgaagaagagcagggtatcatc

SEQ ID NO: 65717 - DNA, 25 bp, probe
gaagaagagcagggtatcatcagaa

SEQ ID NO: 65718 - DNA, 25 bp, probe
aagaagagcagggtatcatcagaac

SEQ ID NO: 65719 - DNA, 25 bp, probe
attgaagaagagcagggtatcatca

SEQ ID NO: 65720 - DNA, 25 bp, probe
taagtattctctagcggaccagacg

SEQ ID NO: 65721 - DNA, 25 bp, probe
gagaaaggtgttgactgcgatattg

SEQ ID NO: 65722 - DNA, 25 bp, probe
agagaaaggtgttgactgcgatatt

SEQ ID NO: 65723 - DNA, 25 bp, probe
gaaaggtgttgactgcgatattgac

SEQ ID NO: 65724 - DNA, 25 bp, probe
agaaaggtgttgactgcgatattga

SEQ ID NO: 65725 - DNA, 25 bp, probe
ttgaagaagagcagggtatcatcag

SEQ ID NO: 65726 - DNA, 25 bp, probe
ggattgaagaagagcagggtatcat

SEQ ID NO: 65727 - DNA, 25 bp, probe
gagagaaaggtgttgactgcgatat

SEQ ID NO: 65728 - DNA, 25 bp, probe
caggattgaagaagagcagggtatc

SEQ ID NO: 65729 - DNA, 25 bp, probe
tgaagaagagcagggtatcatcaga

SEQ ID NO: 65730 - DNA, 25 bp, probe
aggattgaagaagagcagggtatca

SEQ ID NO: 65731 - DNA, 25 bp, probe
agaagacagtgctagagtctatgaa

SEQ ID NO: 65732 - DNA, 25 bp, probe
gagagaagacagtgctagagtctat

SEQ ID NO: 65733 - DNA, 25 bp, probe
gagaagacagtgctagagtctatga

SEQ ID NO: 65734 - DNA, 25 bp, probe
agagaagacagtgctagagtctatg

SEQ ID NO: 65735 - DNA, 25 bp, probe
agagagaaaggtgttgactgcgata

SEQ ID NO: 65736 - DNA, 25 bp, probe
tgagagaagacagtgctagagtcta

SEQ ID NO: 65737 - DNA, 25 bp, probe
aaaggtgttgactgcgatattgacg

SEQ ID NO: 65738 - DNA, 25 bp, probe
ttaaagaaaagcaagaggaaagggc

SEQ ID NO: 65739 - DNA, 25 bp, probe
aagtattctctagcggaccagacga

SEQ ID NO: 65740 - DNA, 25 bp, probe
atgagagaagacagtgctagagtct

SEQ ID NO: 65741 - DNA, 25 bp, probe
tttaaagaaaagcaagaggaaaggg

SEQ ID NO: 65742 - DNA, 25 bp, probe
acaaatattaagtattctctagcgg

SEQ ID NO: 65743 - DNA, 25 bp, probe
gaagacagtgctagagtctatgaaa

SEQ ID NO: 65744 - DNA, 25 bp, probe
agagcagggtatcatcagaaccaaa

SEQ ID NO: 65745 - DNA, 25 bp, probe
aagagcagggtatcatcagaaccaa

SEQ ID NO: 65746 - DNA, 25 bp, probe
gcaggattgaagaagagcagggtat

SEQ ID NO: 65747 - DNA, 25 bp, probe
taaagaaaagcaagaggaaagggca

SEQ ID NO: 65748 - DNA, 25 bp, probe
agaagagcagggtatcatcagaacc

SEQ ID NO: 65749 - DNA, 25 bp, probe
gtgttgactgcgatattgacgttcc

SEQ ID NO: 65750 - DNA, 25 bp, probe
caactgatgtggatgaagaagaagc

SEQ ID NO: 65751 - DNA, 25 bp, probe
gcaactgatgtggatgaagaagaag

SEQ ID NO: 65752 - DNA, 25 bp, probe
tatagcctatggagacatcactgtg

SEQ ID NO: 65753 - DNA, 25 bp, probe
aactgatgtggatgaagaagaagca

SEQ ID NO: 65754 - DNA, 25 bp, probe
aagaacctatagcctatggagacat

SEQ ID NO: 65755 - DNA, 25 bp, probe
gaagaacctatagcctatggagaca

SEQ ID NO: 65756 - DNA, 25 bp, probe
agaacctatagcctatggagacatc

SEQ ID NO: 65757 - DNA, 25 bp, probe
attcacggaagaacctatagcctat

SEQ ID NO: 65758 - DNA, 25 bp, probe
gaacctatagcctatggagacatca

SEQ ID NO: 65759 - DNA, 25 bp, probe
aacctatagcctatggagacatcac

SEQ ID NO: 65760 - DNA, 25 bp, probe
ggaagaacctatagcctatggagac

SEQ ID NO: 65761 - DNA, 25 bp, probe
cctatagcctatggagacatcactg

SEQ ID NO: 65762 - DNA, 25 bp, probe
ctatagcctatggagacatcactgt

SEQ ID NO: 65763 - DNA, 25 bp, probe
ttcacggaagaacctatagcctatg

SEQ ID NO: 65764 - DNA, 25 bp, probe
cattcacggaagaacctatagccta

SEQ ID NO: 65765 - DNA, 25 bp, probe
acctatagcctatggagacatcact

SEQ ID NO: 65766 - DNA, 25 bp, probe
actgatgtggatgaagaagaagcag

SEQ ID NO: 65767 - DNA, 25 bp, probe
tgtggagatgatttcagaggaagag

SEQ ID NO: 65768 - DNA, 25 bp, probe
cctatggagacatcactgtggagat

SEQ ID NO: 65769 - DNA, 25 bp, probe
atgagtttgttgacatcttagggct

SEQ ID NO: 65770 - DNA, 25 bp, probe
tgcaactgatgtggatgaagaagaa

SEQ ID NO: 65771 - DNA, 25 bp, probe
cggaagaacctatagcctatggaga

SEQ ID NO: 65772 - DNA, 25 bp, probe
gatgtggatgaagaagaagcagcag

SEQ ID NO: 65773 - DNA, 25 bp, probe
ctgtggagatgatttcagaggaaga

SEQ ID NO: 65774 - DNA, 25 bp, probe
atagcctatggagacatcactgtgg

SEQ ID NO: 65775 - DNA, 25 bp, probe
acggaagaacctatagcctatggag

SEQ ID NO: 65776 - DNA, 25 bp, probe
actgtggagatgatttcagaggaag

SEQ ID NO: 65777 - DNA, 25 bp, probe
catgagtttgttgacatcttagggc

SEQ ID NO: 65778 - DNA, 25 bp, probe
gagatgatttcagaggaagagcagg

SEQ ID NO: 65779 - DNA, 25 bp, probe
ggagatgatttcagaggaagagcag

SEQ ID NO: 65780 - DNA, 25 bp, probe
cacggaagaacctatagcctatgga

SEQ ID NO: 65781 - DNA, 25 bp, probe
tcacggaagaacctatagcctatgg

SEQ ID NO: 65782 - DNA, 25 bp, probe
gtggatgaagaagaagcagcagttc

SEQ ID NO: 65783 - DNA, 25 bp, probe
tgagtttgttgacatcttagggctg

SEQ ID NO: 65784 - DNA, 25 bp, probe
cactgtggagatgatttcagaggaa

SEQ ID NO: 65785 - DNA, 25 bp, probe
gatgatttcagaggaagagcaggac

SEQ ID NO: 65786 - DNA, 25 bp, probe
agatgatttcagaggaagagcagga

SEQ ID NO: 65787 - DNA, 25 bp, probe
gtggagatgatttcagaggaagagc

SEQ ID NO: 65788 - DNA, 25 bp, probe
gtgcaactgatgtggatgaagaaga

SEQ ID NO: 65789 - DNA, 25 bp, probe
ctatggagacatcactgtggagatg

SEQ ID NO: 65790 - DNA, 25 bp, probe
taatgagaaaaggagggtgaaatgt

SEQ ID NO: 65791 - DNA, 25 bp, probe
gtaatgagaaaaggagggtgaaatg

SEQ ID NO: 65792 - DNA, 25 bp, probe
tgtaatgagaaaaggagggtgaaat

SEQ ID NO: 65793 - DNA, 25 bp, probe
tggagatgatttcagaggaagagca

SEQ ID NO: 65794 - DNA, 25 bp, probe
cctcacttgtcatcagctaatcctt

SEQ ID NO: 65795 - DNA, 25 bp, probe
tgtgaatgtcatcttgaaaggtcag

SEQ ID NO: 65796 - DNA, 25 bp, probe
ctgtgaatgtcatcttgaaaggtca

SEQ ID NO: 65797 - DNA, 25 bp, probe
ctcacttgtcatcagctaatccttt

SEQ ID NO: 65798 - DNA, 25 bp, probe
gaatgtcatcttgaaaggtcagcag

SEQ ID NO: 65799 - DNA, 25 bp, probe
tcacttgtcatcagctaatcctttg

SEQ ID NO: 65800 - DNA, 25 bp, probe
aatgtcatcttgaaaggtcagcaga

SEQ ID NO: 65801 - DNA, 25 bp, probe
gtgaatgtcatcttgaaaggtcagc

SEQ ID NO: 65802 - DNA, 25 bp, probe
gctgtgaatgtcatcttgaaaggtc

SEQ ID NO: 65803 - DNA, 25 bp, probe
gttcttacagtgctggtgtttacag

SEQ ID NO: 65804 - DNA, 25 bp, probe
tgaatgtcatcttgaaaggtcagca

SEQ ID NO: 65805 - DNA, 25 bp, probe
gtggctgtgaatgtcatcttgaaag

SEQ ID NO: 65806 - DNA, 25 bp, probe
ttcttacagtgctggtgtttacagt

SEQ ID NO: 65807 - DNA, 25 bp, probe
atgtcatcttgaaaggtcagcagag

SEQ ID NO: 65808 - DNA, 25 bp, probe
cagcagtaagaaaagaaaagtggtt

SEQ ID NO: 65809 - DNA, 25 bp, probe
gtcacagcagtaagaaaagaaaagt

SEQ ID NO: 65810 - DNA, 25 bp, probe
ggtcacagcagtaagaaaagaaaag

SEQ ID NO: 65811 - DNA, 25 bp, probe
cacttgtcatcagctaatcctttgc

SEQ ID NO: 65812 - DNA, 25 bp, probe
agcagtaagaaaagaaaagtggttc

SEQ ID NO: 65813 - DNA, 25 bp, probe
acagcagtaagaaaagaaaagtggt

SEQ ID NO: 65814 - DNA, 25 bp, probe
tggtcacagcagtaagaaaagaaaa

SEQ ID NO: 65815 - DNA, 25 bp, probe
ttggtcacagcagtaagaaaagaaa

SEQ ID NO: 65816 - DNA, 25 bp, probe
ctatatgccaccattgctctgctct

SEQ ID NO: 65817 - DNA, 25 bp, probe
tcttacagtgctggtgtttacagtg

SEQ ID NO: 65818 - DNA, 25 bp, probe
ctccctcacttgtcatcagctaatc

SEQ ID NO: 65819 - DNA, 25 bp, probe
ggttcttacagtgctggtgtttaca

SEQ ID NO: 65820 - DNA, 25 bp, probe
tggttcttacagtgctggtgtttac

SEQ ID NO: 65821 - DNA, 25 bp, probe
gtggttcttacagtgctggtgttta

SEQ ID NO: 65822 - DNA, 25 bp, probe
acaaagaaggcagtatgtccaaagg

SEQ ID NO: 65823 - DNA, 25 bp, probe
ggctgtgaatgtcatcttgaaaggt

SEQ ID NO: 65824 - DNA, 25 bp, probe
aggtggctgtgaatgtcatcttgaa

SEQ ID NO: 65825 - DNA, 25 bp, probe
cttacagtgctggtgtttacagtgt

SEQ ID NO: 65826 - DNA, 25 bp, probe
cttggtcacagcagtaagaaaagaa

SEQ ID NO: 65827 - DNA, 25 bp, probe
tggctgtgaatgtcatcttgaaagg

SEQ ID NO: 65828 - DNA, 25 bp, probe
tctccctcacttgtcatcagctaat

SEQ ID NO: 65829 - DNA, 25 bp, probe
atctccctcacttgtcatcagctaa

SEQ ID NO: 65830 - DNA, 25 bp, probe
tcatcttgaaaggtcagcagagatc

SEQ ID NO: 65831 - DNA, 25 bp, probe
gtcatcttgaaaggtcagcagagat

SEQ ID NO: 65832 - DNA, 25 bp, probe
tgtcatcttgaaaggtcagcagaga

SEQ ID NO: 65833 - DNA, 25 bp, probe
tatatgccaccattgctctgctctg

SEQ ID NO: 65834 - DNA, 25 bp, probe
gtcaccttggtcacagcagtaagaa

SEQ ID NO: 65835 - DNA, 25 bp, probe
ttacagtgctggtgtttacagtgtg

SEQ ID NO: 65836 - DNA, 25 bp, probe
ggtggctgtgaatgtcatcttgaaa

SEQ ID NO: 65837 - DNA, 25 bp, probe
tcacagcagtaagaaaagaaaagtg

SEQ ID NO: 65838 - DNA, 25 bp, probe
ggcagatattggagagaacacatta

SEQ ID NO: 65839 - DNA, 25 bp, probe
gcagatattggagagaacacattat

SEQ ID NO: 65840 - DNA, 25 bp, probe
cattggcagatattggagagaacac

SEQ ID NO: 65841 - DNA, 25 bp, probe
tggcagatattggagagaacacatt

SEQ ID NO: 65842 - DNA, 25 bp, probe
ttggcagatattggagagaacacat

SEQ ID NO: 65843 - DNA, 25 bp, probe
attggcagatattggagagaacaca

SEQ ID NO: 65844 - DNA, 25 bp, probe
ttggagagaacacattatgtagcat

SEQ ID NO: 65845 - DNA, 25 bp, probe
attggagagaacacattatgtagca

SEQ ID NO: 65846 - DNA, 25 bp, probe
tagtaatccttatcaccatgaccag

SEQ ID NO: 65847 - DNA, 25 bp, probe
ctagtaatccttatcaccatgacca

SEQ ID NO: 65848 - DNA, 25 bp, probe
tggagagaacacattatgtagcatg

SEQ ID NO: 65849 - DNA, 25 bp, probe
cagatattggagagaacacattatg

SEQ ID NO: 65850 - DNA, 25 bp, probe
tattggagagaacacattatgtagc

SEQ ID NO: 65851 - DNA, 25 bp, probe
tattcaatgtaatgggatttcctgc

SEQ ID NO: 65852 - DNA, 25 bp, probe
ttgaactactaacgtcagaaccaat

SEQ ID NO: 65853 - DNA, 25 bp, probe
attgaactactaacgtcagaaccaa

SEQ ID NO: 65854 - DNA, 25 bp, probe
gctattgaactactaacgtcagaac

SEQ ID NO: 65855 - DNA, 25 bp, probe
agtaatccttatcaccatgaccagc

SEQ ID NO: 65856 - DNA, 25 bp, probe
atgtattgtttgagcaacttggatg

SEQ ID NO: 65857 - DNA, 25 bp, probe
tgaactactaacgtcagaaccaata

SEQ ID NO: 65858 - DNA, 25 bp, probe
tattgaactactaacgtcagaacca

SEQ ID NO: 65859 - DNA, 25 bp, probe
agctattgaactactaacgtcagaa

SEQ ID NO: 65860 - DNA, 25 bp, probe
aagctattgaactactaacgtcaga

SEQ ID NO: 65861 - DNA, 25 bp, probe
gaactactaacgtcagaaccaatat

SEQ ID NO: 65862 - DNA, 25 bp, probe
ctattgaactactaacgtcagaacc

SEQ ID NO: 65863 - DNA, 25 bp, probe
agatattggagagaacacattatgt

SEQ ID NO: 65864 - DNA, 25 bp, probe
aactactaacgtcagaaccaatatt

SEQ ID NO: 65865 - DNA, 25 bp, probe
gtaatccttatcaccatgaccagct

SEQ ID NO: 65866 - DNA, 25 bp, probe
catgtattgtttgagcaacttggat

SEQ ID NO: 65867 - DNA, 25 bp, probe
gtagcatgtattgtttgagcaactt

SEQ ID NO: 65868 - DNA, 25 bp, probe
tagcatgtattgtttgagcaacttg

SEQ ID NO: 65869 - DNA, 25 bp, probe
atgtagcatgtattgtttgagcaac

SEQ ID NO: 65870 - DNA, 25 bp, probe
ttatgtagcatgtattgtttgagca

SEQ ID NO: 65871 - DNA, 25 bp, probe
tatgtagcatgtattgtttgagcaa

SEQ ID NO: 65872 - DNA, 25 bp, probe
ccattggcagatattggagagaaca

SEQ ID NO: 65873 - DNA, 25 bp, probe
ggagagaacacattatgtagcatgt

SEQ ID NO: 65874 - DNA, 25 bp, probe
tgtagcatgtattgtttgagcaact

SEQ ID NO: 65875 - DNA, 25 bp, probe
actagtaatccttatcaccatgacc

SEQ ID NO: 65876 - DNA, 25 bp, probe
ggcattataccaaagctattgaact

SEQ ID NO: 65877 - DNA, 25 bp, probe
aggcattataccaaagctattgaac

SEQ ID NO: 65878 - DNA, 25 bp, probe
caaggcattataccaaagctattga

SEQ ID NO: 65879 - DNA, 25 bp, probe
gagagaacacattatgtagcatgta

SEQ ID NO: 65880 - DNA, 25 bp, probe
gcaaggcattataccaaagctattg

SEQ ID NO: 65881 - DNA, 25 bp, probe
attatgtagcatgtattgtttgagc

SEQ ID NO: 65882 - DNA, 25 bp, probe
gatgagatttatatcctggaccctg

SEQ ID NO: 65883 - DNA, 25 bp, probe
atgagatttatatcctggaccctga

SEQ ID NO: 65884 - DNA, 25 bp, probe
tgagatttatatcctggaccctgag

SEQ ID NO: 65885 - DNA, 25 bp, probe
gagatcgcacaggatgagatttata

SEQ ID NO: 65886 - DNA, 25 bp, probe
agatcgcacaggatgagatttatat

SEQ ID NO: 65887 - DNA, 25 bp, probe
gatcgcacaggatgagatttatatc

SEQ ID NO: 65888 - DNA, 25 bp, probe
tgagatcgcacaggatgagatttat

SEQ ID NO: 65889 - DNA, 25 bp, probe
gagatttatatcctggaccctgagc

SEQ ID NO: 65890 - DNA, 25 bp, probe
caagaggaacgacttctgtaagctc

SEQ ID NO: 65891 - DNA, 25 bp, probe
ctgagatcgcacaggatgagattta

SEQ ID NO: 65892 - DNA, 25 bp, probe
gatttatatcctggaccctgagctg

SEQ ID NO: 65893 - DNA, 25 bp, probe
agatttatatcctggaccctgagct

SEQ ID NO: 65894 - DNA, 25 bp, probe
tgccaagaggaacgacttctgtaag

SEQ ID NO: 65895 - DNA, 25 bp, probe
ctgccaagaggaacgacttctgtaa

SEQ ID NO: 65896 - DNA, 25 bp, probe
gactgagatcgcacaggatgagatt

SEQ ID NO: 65897 - DNA, 25 bp, probe
ccaagaggaacgacttctgtaagct

SEQ ID NO: 65898 - DNA, 25 bp, probe
atcgcacaggatgagatttatatcc

SEQ ID NO: 65899 - DNA, 25 bp, probe
ggatgagatttatatcctggaccct

SEQ ID NO: 65900 - DNA, 25 bp, probe
cacctcaactatgtgactgagatcg

SEQ ID NO: 65901 - DNA, 25 bp, probe
aagaggaacgacttctgtaagctcc

SEQ ID NO: 65902 - DNA, 25 bp, probe
gcacctcaactatgtgactgagatc

SEQ ID NO: 65903 - DNA, 25 bp, probe
caggagcacctcaactatgtgactg

SEQ ID NO: 65904 - DNA, 25 bp, probe
actgagatcgcacaggatgagattt

SEQ ID NO: 65905 - DNA, 25 bp, probe
ctcaactatgtgactgagatcgcac

SEQ ID NO: 65906 - DNA, 25 bp, probe
agcacctcaactatgtgactgagat

SEQ ID NO: 65907 - DNA, 25 bp, probe
atttatatcctggaccctgagctgc

SEQ ID NO: 65908 - DNA, 25 bp, probe
aggagcacctcaactatgtgactga

SEQ ID NO: 65909 - DNA, 25 bp, probe
gaacgacttctgtaagctccaggag

SEQ ID NO: 65910 - DNA, 25 bp, probe
gaggaacgacttctgtaagctccag

SEQ ID NO: 65911 - DNA, 25 bp, probe
gagcacctcaactatgtgactgaga

SEQ ID NO: 65912 - DNA, 25 bp, probe
agaggaacgacttctgtaagctcca

SEQ ID NO: 65913 - DNA, 25 bp, probe
cctcaactatgtgactgagatcgca

SEQ ID NO: 65914 - DNA, 25 bp, probe
acctcaactatgtgactgagatcgc

SEQ ID NO: 65915 - DNA, 25 bp, probe
tttatatcctggaccctgagctgct

SEQ ID NO: 65916 - DNA, 25 bp, probe
caactatgtgactgagatcgcacag

SEQ ID NO: 65917 - DNA, 25 bp, probe
ggagcacctcaactatgtgactgag

SEQ ID NO: 65918 - DNA, 25 bp, probe
tcaactatgtgactgagatcgcaca

SEQ ID NO: 65919 - DNA, 25 bp, probe
ctatgtgactgagatcgcacaggat

SEQ ID NO: 65920 - DNA, 25 bp, probe
tatgtgactgagatcgcacaggatg

SEQ ID NO: 65921 - DNA, 25 bp, probe
aactatgtgactgagatcgcacagg

SEQ ID NO: 65922 - DNA, 25 bp, probe
actatgtgactgagatcgcacagga

SEQ ID NO: 65923 - DNA, 25 bp, probe
gaaggttctttgatgacaatggcta

SEQ ID NO: 65924 - DNA, 25 bp, probe
aaggttctttgatgacaatggctac

SEQ ID NO: 65925 - DNA, 25 bp, probe
ttccgaaggttctttgatgacaatg

SEQ ID NO: 65926 - DNA, 25 bp, probe
cttccgaaggttctttgatgacaat

SEQ ID NO: 65927 - DNA, 25 bp, probe
gatttagaaagctctgatctggtgg

SEQ ID NO: 65928 - DNA, 25 bp, probe
tttagaaagctctgatctggtggat

SEQ ID NO: 65929 - DNA, 25 bp, probe
atttagaaagctctgatctggtgga

SEQ ID NO: 65930 - DNA, 25 bp, probe
tccgaaggttctttgatgacaatgg

SEQ ID NO: 65931 - DNA, 25 bp, probe
agatttagaaagctctgatctggtg

SEQ ID NO: 65932 - DNA, 25 bp, probe
cgaaggttctttgatgacaatggct

SEQ ID NO: 65933 - DNA, 25 bp, probe
aggttctttgatgacaatggctacc

SEQ ID NO: 65934 - DNA, 25 bp, probe
ttagaaagctctgatctggtggatc

SEQ ID NO: 65935 - DNA, 25 bp, probe
ggttctttgatgacaatggctaccc

SEQ ID NO: 65936 - DNA, 25 bp, probe
ccgaaggttctttgatgacaatggc

SEQ ID NO: 65937 - DNA, 25 bp, probe
tttgatgacaatggctacccctttc

SEQ ID NO: 65938 - DNA, 25 bp, probe
ctttgatgacaatggctaccccttt

SEQ ID NO: 65939 - DNA, 25 bp, probe
cattttacgaattcaccttccgaag

SEQ ID NO: 65940 - DNA, 25 bp, probe
gttctttgatgacaatggctacccc

SEQ ID NO: 65941 - DNA, 25 bp, probe
tctttgatgacaatggctacccctt

SEQ ID NO: 65942 - DNA, 25 bp, probe
ttctttgatgacaatggctacccct

SEQ ID NO: 65943 - DNA, 25 bp, probe
gcattttacgaattcaccttccgaa

SEQ ID NO: 65944 - DNA, 25 bp, probe
ccttccgaaggttctttgatgacaa

SEQ ID NO: 65945 - DNA, 25 bp, probe
ttgatgacaatggctacccctttcg

SEQ ID NO: 65946 - DNA, 25 bp, probe
gatgacaatggctacccctttcgat

SEQ ID NO: 65947 - DNA, 25 bp, probe
cgcattttacgaattcaccttccga

SEQ ID NO: 65948 - DNA, 25 bp, probe
atgacaatggctacccctttcgatg

SEQ ID NO: 65949 - DNA, 25 bp, probe
attttacgaattcaccttccgaagg

SEQ ID NO: 65950 - DNA, 25 bp, probe
acgcattttacgaattcaccttccg

SEQ ID NO: 65951 - DNA, 25 bp, probe
aggctgagagctcagatttagaaag

SEQ ID NO: 65952 - DNA, 25 bp, probe
caggctgagagctcagatttagaaa

SEQ ID NO: 65953 - DNA, 25 bp, probe
acaggctgagagctcagatttagaa

SEQ ID NO: 65954 - DNA, 25 bp, probe
ggctgagagctcagatttagaaagc

SEQ ID NO: 65955 - DNA, 25 bp, probe
ttcacaggctgagagctcagattta

SEQ ID NO: 65956 - DNA, 25 bp, probe
cacaggctgagagctcagatttaga

SEQ ID NO: 65957 - DNA, 25 bp, probe
tcacaggctgagagctcagatttag

SEQ ID NO: 65958 - DNA, 25 bp, probe
gctgagagctcagatttagaaagct

SEQ ID NO: 65959 - DNA, 25 bp, probe
cttcacaggctgagagctcagattt

SEQ ID NO: 65960 - DNA, 25 bp, probe
caatcctcgtatagcgtatgacaag

SEQ ID NO: 65961 - DNA, 25 bp, probe
aactgttattgaacttggctatctc

SEQ ID NO: 65962 - DNA, 25 bp, probe
gttattgaacttggctatctcacac

SEQ ID NO: 65963 - DNA, 25 bp, probe
actgttattgaacttggctatctca

SEQ ID NO: 65964 - DNA, 25 bp, probe
ctgttattgaacttggctatctcac

SEQ ID NO: 65965 - DNA, 25 bp, probe
ttattgaacttggctatctcacacc

SEQ ID NO: 65966 - DNA, 25 bp, probe
tgttattgaacttggctatctcaca

SEQ ID NO: 65967 - DNA, 25 bp, probe
ctctcaatcctcgtatagcgtatga

SEQ ID NO: 65968 - DNA, 25 bp, probe
tcaatcctcgtatagcgtatgacaa

SEQ ID NO: 65969 - DNA, 25 bp, probe
tctcaatcctcgtatagcgtatgac

SEQ ID NO: 65970 - DNA, 25 bp, probe
ctcaatcctcgtatagcgtatgaca

SEQ ID NO: 65971 - DNA, 25 bp, probe
aatcctcgtatagcgtatgacaagg

SEQ ID NO: 65972 - DNA, 25 bp, probe
cagaacagtttgatgaacaggtaaa

SEQ ID NO: 65973 - DNA, 25 bp, probe
aggaaactgttattgaacttggcta

SEQ ID NO: 65974 - DNA, 25 bp, probe
aaaggaaactgttattgaacttggc

SEQ ID NO: 65975 - DNA, 25 bp, probe
ggaaactgttattgaacttggctat

SEQ ID NO: 65976 - DNA, 25 bp, probe
tactgcctgtagtctgatgacgata

SEQ ID NO: 65977 - DNA, 25 bp, probe
tattgaacttggctatctcacacca

SEQ ID NO: 65978 - DNA, 25 bp, probe
caacaagctgatgaatgagtctcaa

SEQ ID NO: 65979 - DNA, 25 bp, probe
aaggaaactgttattgaacttggct

SEQ ID NO: 65980 - DNA, 25 bp, probe
ctactcagtgtgaagcaatgaccat

SEQ ID NO: 65981 - DNA, 25 bp, probe
ctatctcacaccagaacagtttgat

SEQ ID NO: 65982 - DNA, 25 bp, probe
ccagaacagtttgatgaacaggtaa

SEQ ID NO: 65983 - DNA, 25 bp, probe
tatctcacaccagaacagtttgatg

SEQ ID NO: 65984 - DNA, 25 bp, probe
gaaccaggaagtagtatcatgccag

SEQ ID NO: 65985 - DNA, 25 bp, probe
aaactgttattgaacttggctatct

SEQ ID NO: 65986 - DNA, 25 bp, probe
gaaactgttattgaacttggctatc

SEQ ID NO: 65987 - DNA, 25 bp, probe
ctgtagtctgatgacgatagcaaat

SEQ ID NO: 65988 - DNA, 25 bp, probe
tgtagtctgatgacgatagcaaata

SEQ ID NO: 65989 - DNA, 25 bp, probe
tcaacaagctgatgaatgagtctca

SEQ ID NO: 65990 - DNA, 25 bp, probe
aatgaaccaggaagtagtatcatgc

SEQ ID NO: 65991 - DNA, 25 bp, probe
gtgacagctctcaatcctcgtatag

SEQ ID NO: 65992 - DNA, 25 bp, probe
ctgatgaatgagtctcaaatgttgg

SEQ ID NO: 65993 - DNA, 25 bp, probe
gatgaatgagtctcaaatgttggtg

SEQ ID NO: 65994 - DNA, 25 bp, probe
atgaatgagtctcaaatgttggtga

SEQ ID NO: 65995 - DNA, 25 bp, probe
tgatgaatgagtctcaaatgttggt

SEQ ID NO: 65996 - DNA, 25 bp, probe
gctgatgaatgagtctcaaatgttg

SEQ ID NO: 65997 - DNA, 25 bp, probe
gtagtctgatgacgatagcaaataa

SEQ ID NO: 65998 - DNA, 25 bp, probe
tactcagtgtgaagcaatgaccatg

SEQ ID NO: 65999 - DNA, 25 bp, probe
taaaggaaactgttattgaacttgg

SEQ ID NO: 66000 - DNA, 25 bp, probe
atctcacaccagaacagtttgatga

SEQ ID NO: 66001 - DNA, 25 bp, probe
attgaacttggctatctcacaccag

SEQ ID NO: 66002 - DNA, 25 bp, probe
ctcacaccagaacagtttgatgaac

SEQ ID NO: 66003 - DNA, 25 bp, probe
ggatgcttcagtttcctttacagaa

SEQ ID NO: 66004 - DNA, 25 bp, probe
gaatcagacaggaggactatgtgtt

SEQ ID NO: 66005 - DNA, 25 bp, probe
caggaggactatgtgtttctaaagg

SEQ ID NO: 66006 - DNA, 25 bp, probe
aaatgaggacagttaaggagaaagt

SEQ ID NO: 66007 - DNA, 25 bp, probe
aatgaggacagttaaggagaaagtg

SEQ ID NO: 66008 - DNA, 25 bp, probe
ggaaatgaggacagttaaggagaaa

SEQ ID NO: 66009 - DNA, 25 bp, probe
gaaatgaggacagttaaggagaaag

SEQ ID NO: 66010 - DNA, 25 bp, probe
aagaaataattggaaacgggaatgc

SEQ ID NO: 66011 - DNA, 25 bp, probe
gaggactatgtgtttctaaaggctg

SEQ ID NO: 66012 - DNA, 25 bp, probe
tggaaatgaggacagttaaggagaa

SEQ ID NO: 66013 - DNA, 25 bp, probe
ttggaaatgaggacagttaaggaga

SEQ ID NO: 66014 - DNA, 25 bp, probe
cttggaaatgaggacagttaaggag

SEQ ID NO: 66015 - DNA, 25 bp, probe
aaagaaataattggaaacgggaatg

SEQ ID NO: 66016 - DNA, 25 bp, probe
aatgcgaatcagacaggaggactat

SEQ ID NO: 66017 - DNA, 25 bp, probe
acaggaggactatgtgtttctaaag

SEQ ID NO: 66018 - DNA, 25 bp, probe
gacaggaggactatgtgtttctaaa

SEQ ID NO: 66019 - DNA, 25 bp, probe
gaggacagttaaggagaaagtgtat

SEQ ID NO: 66020 - DNA, 25 bp, probe
gactatgtgtttctaaaggctgctg

SEQ ID NO: 66021 - DNA, 25 bp, probe
agacaggaggactatgtgtttctaa

SEQ ID NO: 66022 - DNA, 25 bp, probe
aggacagttaaggagaaagtgtatt

SEQ ID NO: 66023 - DNA, 25 bp, probe
aataattggaaacgggaatgcgaat

SEQ ID NO: 66024 - DNA, 25 bp, probe
ggaggactatgtgtttctaaaggct

SEQ ID NO: 66025 - DNA, 25 bp, probe
aggaggactatgtgtttctaaaggc

SEQ ID NO: 66026 - DNA, 25 bp, probe
tgaggacagttaaggagaaagtgta

SEQ ID NO: 66027 - DNA, 25 bp, probe
ggacagttaaggagaaagtgtattc

SEQ ID NO: 66028 - DNA, 25 bp, probe
aaataattggaaacgggaatgcgaa

SEQ ID NO: 66029 - DNA, 25 bp, probe
cagacaggaggactatgtgtttcta

SEQ ID NO: 66030 - DNA, 25 bp, probe
gataccttggaaatgaggacagtta

SEQ ID NO: 66031 - DNA, 25 bp, probe
taccttggaaatgaggacagttaag

SEQ ID NO: 66032 - DNA, 25 bp, probe
atgaggacagttaaggagaaagtgt

SEQ ID NO: 66033 - DNA, 25 bp, probe
ataccttggaaatgaggacagttaa

SEQ ID NO: 66034 - DNA, 25 bp, probe
aaagataccttggaaatgaggacag

SEQ ID NO: 66035 - DNA, 25 bp, probe
aatcagacaggaggactatgtgttt

SEQ ID NO: 66036 - DNA, 25 bp, probe
ataattggaaacgggaatgcgaatc

SEQ ID NO: 66037 - DNA, 25 bp, probe
gaaataattggaaacgggaatgcga

SEQ ID NO: 66038 - DNA, 25 bp, probe
agaaataattggaaacgggaatgcg

SEQ ID NO: 66039 - DNA, 25 bp, probe
atcagacaggaggactatgtgtttc

SEQ ID NO: 66040 - DNA, 25 bp, probe
agataccttggaaatgaggacagtt

SEQ ID NO: 66041 - DNA, 25 bp, probe
aagataccttggaaatgaggacagt

SEQ ID NO: 66042 - DNA, 25 bp, probe
atgcgaatcagacaggaggactatg

SEQ ID NO: 66043 - DNA, 25 bp, probe
gaatgcgaatcagacaggaggacta

SEQ ID NO: 66044 - DNA, 25 bp, probe
ggactatgtgtttctaaaggctgct

SEQ ID NO: 66045 - DNA, 25 bp, probe
aggactatgtgtttctaaaggctgc

SEQ ID NO: 66046 - DNA, 25 bp, probe
ttggtttacaactcgaaaggtattt

SEQ ID NO: 66047 - DNA, 25 bp, probe
tttggtttacaactcgaaaggtatt

SEQ ID NO: 66048 - DNA, 25 bp, probe
ctctatgtcaggattaccagattac

SEQ ID NO: 66049 - DNA, 25 bp, probe
acctctatgtcaggattaccagatt

SEQ ID NO: 66050 - DNA, 25 bp, probe
tctatgtcaggattaccagattaca

SEQ ID NO: 66051 - DNA, 25 bp, probe
gtcaggattaccagattacatgagc

SEQ ID NO: 66052 - DNA, 25 bp, probe
tgtcaggattaccagattacatgag

SEQ ID NO: 66053 - DNA, 25 bp, probe
cctctatgtcaggattaccagatta

SEQ ID NO: 66054 - DNA, 25 bp, probe
cacctctatgtcaggattaccagat

SEQ ID NO: 66055 - DNA, 25 bp, probe
tcaggattaccagattacatgagcc

SEQ ID NO: 66056 - DNA, 25 bp, probe
ccataggaaatagagagagggtctt

SEQ ID NO: 66057 - DNA, 25 bp, probe
aagtgcccataggaaatagagagag

SEQ ID NO: 66058 - DNA, 25 bp, probe
gaagtgcccataggaaatagagaga

SEQ ID NO: 66059 - DNA, 25 bp, probe
taggaaatagagagagggtctttgg

SEQ ID NO: 66060 - DNA, 25 bp, probe
attcaaccaaagcagacatctacag

SEQ ID NO: 66061 - DNA, 25 bp, probe
ataggaaatagagagagggtctttg

SEQ ID NO: 66062 - DNA, 25 bp, probe
cataggaaatagagagagggtcttt

SEQ ID NO: 66063 - DNA, 25 bp, probe
cattcaaccaaagcagacatctaca

SEQ ID NO: 66064 - DNA, 25 bp, probe
ccattcaaccaaagcagacatctac

SEQ ID NO: 66065 - DNA, 25 bp, probe
ggaagtgcccataggaaatagagag

SEQ ID NO: 66066 - DNA, 25 bp, probe
atgtcaggattaccagattacatga

SEQ ID NO: 66067 - DNA, 25 bp, probe
attaccagattacatgagcccagag

SEQ ID NO: 66068 - DNA, 25 bp, probe
gattaccagattacatgagcccaga

SEQ ID NO: 66069 - DNA, 25 bp, probe
agtgcccataggaaatagagagagg

SEQ ID NO: 66070 - DNA, 25 bp, probe
gaaatagagagagggtctttggctg

SEQ ID NO: 66071 - DNA, 25 bp, probe
gcacctctatgtcaggattaccaga

SEQ ID NO: 66072 - DNA, 25 bp, probe
tatgtcaggattaccagattacatg

SEQ ID NO: 66073 - DNA, 25 bp, probe
ctatgtcaggattaccagattacat

SEQ ID NO: 66074 - DNA, 25 bp, probe
ggattaccagattacatgagcccag

SEQ ID NO: 66075 - DNA, 25 bp, probe
caggattaccagattacatgagccc

SEQ ID NO: 66076 - DNA, 25 bp, probe
aggattaccagattacatgagccca

SEQ ID NO: 66077 - DNA, 25 bp, probe
ttcaaccaaagcagacatctacagc

SEQ ID NO: 66078 - DNA, 25 bp, probe
gccattcaaccaaagcagacatcta

SEQ ID NO: 66079 - DNA, 25 bp, probe
ctggaagtgcccataggaaatagag

SEQ ID NO: 66080 - DNA, 25 bp, probe
ggaaatagagagagggtctttggct

SEQ ID NO: 66081 - DNA, 25 bp, probe
aggaaatagagagagggtctttggc

SEQ ID NO: 66082 - DNA, 25 bp, probe
tggaagtgcccataggaaatagaga

SEQ ID NO: 66083 - DNA, 25 bp, probe
ttaccagattacatgagcccagagg

SEQ ID NO: 66084 - DNA, 25 bp, probe
tgcacctctatgtcaggattaccag

SEQ ID NO: 66085 - DNA, 25 bp, probe
ctgcacctctatgtcaggattacca

SEQ ID NO: 66086 - DNA, 25 bp, probe
cccataggaaatagagagagggtct

SEQ ID NO: 66087 - DNA, 25 bp, probe
aaatagagagagggtctttggctgc

SEQ ID NO: 66088 - DNA, 25 bp, probe
ttgctggaagtgcccataggaaata

SEQ ID NO: 66089 - DNA, 25 bp, probe
gctggaagtgcccataggaaataga

SEQ ID NO: 66090 - DNA, 25 bp, probe
gcccataggaaatagagagagggtc

SEQ ID NO: 66091 - DNA, 25 bp, probe
caaccaaagcagacatctacagcct

SEQ ID NO: 66092 - DNA, 25 bp, probe
ttgataagcagttagccacagaata

SEQ ID NO: 66093 - DNA, 25 bp, probe
taagcagttagccacagaatatgaa

SEQ ID NO: 66094 - DNA, 25 bp, probe
ataagcagttagccacagaatatga

SEQ ID NO: 66095 - DNA, 25 bp, probe
tgataagcagttagccacagaatat

SEQ ID NO: 66096 - DNA, 25 bp, probe
gataagcagttagccacagaatatg

SEQ ID NO: 66097 - DNA, 25 bp, probe
ccttgagaatgagattgaagaactg

SEQ ID NO: 66098 - DNA, 25 bp, probe
cagttagccacagaatatgaacaac

SEQ ID NO: 66099 - DNA, 25 bp, probe
agttagccacagaatatgaacaacc

SEQ ID NO: 66100 - DNA, 25 bp, probe
cttgagaatgagattgaagaactga

SEQ ID NO: 66101 - DNA, 25 bp, probe
agaatgagattgaagaactgatcca

SEQ ID NO: 66102 - DNA, 25 bp, probe
aagcagttagccacagaatatgaac

SEQ ID NO: 66103 - DNA, 25 bp, probe
ttgagaatgagattgaagaactgat

SEQ ID NO: 66104 - DNA, 25 bp, probe
gagaatgagattgaagaactgatcc

SEQ ID NO: 66105 - DNA, 25 bp, probe
gcagttagccacagaatatgaacaa

SEQ ID NO: 66106 - DNA, 25 bp, probe
tgagaatgagattgaagaactgatc

SEQ ID NO: 66107 - DNA, 25 bp, probe
aatgagattgaagaactgatccagg

SEQ ID NO: 66108 - DNA, 25 bp, probe
gaatgagattgaagaactgatccag

SEQ ID NO: 66109 - DNA, 25 bp, probe
agcagttagccacagaatatgaaca

SEQ ID NO: 66110 - DNA, 25 bp, probe
tttgataagcagttagccacagaat

SEQ ID NO: 66111 - DNA, 25 bp, probe
atttgataagcagttagccacagaa

SEQ ID NO: 66112 - DNA, 25 bp, probe
tgggatatggaatttgataagcagt

SEQ ID NO: 66113 - DNA, 25 bp, probe
gaatttgataagcagttagccacag

SEQ ID NO: 66114 - DNA, 25 bp, probe
cccttgagaatgagattgaagaact

SEQ ID NO: 66115 - DNA, 25 bp, probe
aatttgataagcagttagccacaga

SEQ ID NO: 66116 - DNA, 25 bp, probe
tatggaatttgataagcagttagcc

SEQ ID NO: 66117 - DNA, 25 bp, probe
ccttcactttgggatatggaatttg

SEQ ID NO: 66118 - DNA, 25 bp, probe
gggatatggaatttgataagcagtt

SEQ ID NO: 66119 - DNA, 25 bp, probe
ttgggatatggaatttgataagcag

SEQ ID NO: 66120 - DNA, 25 bp, probe
accttcactttgggatatggaattt

SEQ ID NO: 66121 - DNA, 25 bp, probe
tttgggatatggaatttgataagca

SEQ ID NO: 66122 - DNA, 25 bp, probe
caccttcactttgggatatggaatt

SEQ ID NO: 66123 - DNA, 25 bp, probe
cttcactttgggatatggaatttga

SEQ ID NO: 66124 - DNA, 25 bp, probe
ggaatttgataagcagttagccaca

SEQ ID NO: 66125 - DNA, 25 bp, probe
tcaccttcactttgggatatggaat

SEQ ID NO: 66126 - DNA, 25 bp, probe
atcaccttcactttgggatatggaa

SEQ ID NO: 66127 - DNA, 25 bp, probe
cacatcaccttcactttgggatatg

SEQ ID NO: 66128 - DNA, 25 bp, probe
acacatcaccttcactttgggatat

SEQ ID NO: 66129 - DNA, 25 bp, probe
ttcactttgggatatggaatttgat

SEQ ID NO: 66130 - DNA, 25 bp, probe
ctttgggatatggaatttgataagc

SEQ ID NO: 66131 - DNA, 25 bp, probe
gttagccacagaatatgaacaaccc

SEQ ID NO: 66132 - DNA, 25 bp, probe
caagactgttcagcatgaattagaa

SEQ ID NO: 66133 - DNA, 25 bp, probe
gaactgatttatgagcttgctgtag

SEQ ID NO: 66134 - DNA, 25 bp, probe
agaactgatttatgagcttgctgta

SEQ ID NO: 66135 - DNA, 25 bp, probe
tagaactgatttatgagcttgctgt

SEQ ID NO: 66136 - DNA, 25 bp, probe
aatggaagaacgcaagaaggagaag

SEQ ID NO: 66137 - DNA, 25 bp, probe
ccatttcaagacagtaggtgcttac

SEQ ID NO: 66138 - DNA, 25 bp, probe
caatggaagaacgcaagaaggagaa

SEQ ID NO: 66139 - DNA, 25 bp, probe
gatactacaaggctcaggctcagaa

SEQ ID NO: 66140 - DNA, 25 bp, probe
catttcaagacagtaggtgcttacc

SEQ ID NO: 66141 - DNA, 25 bp, probe
gccatttcaagacagtaggtgctta

SEQ ID NO: 66142 - DNA, 25 bp, probe
atactacaaggctcaggctcagaaa

SEQ ID NO: 66143 - DNA, 25 bp, probe
aagaacgcaagaaggagaaggtgaa

SEQ ID NO: 66144 - DNA, 25 bp, probe
cataagcagtgcaaatcctgtaatg

SEQ ID NO: 66145 - DNA, 25 bp, probe
atttcaagacagtaggtgcttaccc

SEQ ID NO: 66146 - DNA, 25 bp, probe
ccataagcagtgcaaatcctgtaat

SEQ ID NO: 66147 - DNA, 25 bp, probe
tactacaaggctcaggctcagaaag

SEQ ID NO: 66148 - DNA, 25 bp, probe
gaagaacgcaagaaggagaaggtga

SEQ ID NO: 66149 - DNA, 25 bp, probe
atggaagaacgcaagaaggagaagg

SEQ ID NO: 66150 - DNA, 25 bp, probe
gaacgcaagaaggagaaggtgaaag

SEQ ID NO: 66151 - DNA, 25 bp, probe
ggatactacaaggctcaggctcaga

SEQ ID NO: 66152 - DNA, 25 bp, probe
tttcaagacagtaggtgcttaccct

SEQ ID NO: 66153 - DNA, 25 bp, probe
agaacgcaagaaggagaaggtgaaa

SEQ ID NO: 66154 - DNA, 25 bp, probe
cccataagcagtgcaaatcctgtaa

SEQ ID NO: 66155 - DNA, 25 bp, probe
ataagcagtgcaaatcctgtaatgc

SEQ ID NO: 66156 - DNA, 25 bp, probe
aagacagtaggtgcttaccctgaac

SEQ ID NO: 66157 - DNA, 25 bp, probe
caagacagtaggtgcttaccctgaa

SEQ ID NO: 66158 - DNA, 25 bp, probe
ttcaagacagtaggtgcttaccctg

SEQ ID NO: 66159 - DNA, 25 bp, probe
agacagtaggtgcttaccctgaact

SEQ ID NO: 66160 - DNA, 25 bp, probe
tcaagacagtaggtgcttaccctga

SEQ ID NO: 66161 - DNA, 25 bp, probe
taagcagtgcaaatcctgtaatgcc

SEQ ID NO: 66162 - DNA, 25 bp, probe
gattgcggccatttcaagacagtag

SEQ ID NO: 66163 - DNA, 25 bp, probe
cgacaagctcaaagcactgaaacag

SEQ ID NO: 66164 - DNA, 25 bp, probe
gttacggtcagggatacgtcaactg

SEQ ID NO: 66165 - DNA, 25 bp, probe
ttaccctgaactgcgctttgaagaa

SEQ ID NO: 66166 - DNA, 25 bp, probe
gacagtaggtgcttaccctgaactg

SEQ ID NO: 66167 - DNA, 25 bp, probe
gatacaatggaagagaacagtgaga

SEQ ID NO: 66168 - DNA, 25 bp, probe
agatacaatggaagagaacagtgag

SEQ ID NO: 66169 - DNA, 25 bp, probe
cagatacaatggaagagaacagtga

SEQ ID NO: 66170 - DNA, 25 bp, probe
gacagatacaatggaagagaacagt

SEQ ID NO: 66171 - DNA, 25 bp, probe
tgacagatacaatggaagagaacag

SEQ ID NO: 66172 - DNA, 25 bp, probe
tacaatggaagagaacagtgagaat

SEQ ID NO: 66173 - DNA, 25 bp, probe
atacaatggaagagaacagtgagaa

SEQ ID NO: 66174 - DNA, 25 bp, probe
acagatacaatggaagagaacagtg

SEQ ID NO: 66175 - DNA, 25 bp, probe
ctgacagatacaatggaagagaaca

SEQ ID NO: 66176 - DNA, 25 bp, probe
actgacagatacaatggaagagaac

SEQ ID NO: 66177 - DNA, 25 bp, probe
acaatggaagagaacagtgagaatg

SEQ ID NO: 66178 - DNA, 25 bp, probe
aactgacagatacaatggaagagaa

SEQ ID NO: 66179 - DNA, 25 bp, probe
caatggaagagaacagtgagaatgc

SEQ ID NO: 66180 - DNA, 25 bp, probe
aatggaagagaacagtgagaatgct

SEQ ID NO: 66181 - DNA, 25 bp, probe
aattgagagaatctggctccttgaa

SEQ ID NO: 66182 - DNA, 25 bp, probe
gatgaaacagaggctaaatgagaac

SEQ ID NO: 66183 - DNA, 25 bp, probe
cattgtggagaaagaatcggttaaa

SEQ ID NO: 66184 - DNA, 25 bp, probe
tgtggagaaagaatcggttaaattg

SEQ ID NO: 66185 - DNA, 25 bp, probe
gtggagaaagaatcggttaaattga

SEQ ID NO: 66186 - DNA, 25 bp, probe
aaactgacagatacaatggaagaga

SEQ ID NO: 66187 - DNA, 25 bp, probe
tggagaaagaatcggttaaattgag

SEQ ID NO: 66188 - DNA, 25 bp, probe
atggaagagaacagtgagaatgctc

SEQ ID NO: 66189 - DNA, 25 bp, probe
attgagagaatctggctccttgaac

SEQ ID NO: 66190 - DNA, 25 bp, probe
ttgtggagaaagaatcggttaaatt

SEQ ID NO: 66191 - DNA, 25 bp, probe
attgtggagaaagaatcggttaaat

SEQ ID NO: 66192 - DNA, 25 bp, probe
ggagaaagaatcggttaaattgaga

SEQ ID NO: 66193 - DNA, 25 bp, probe
gaaacagaggctaaatgagaacgaa

SEQ ID NO: 66194 - DNA, 25 bp, probe
atgaaacagaggctaaatgagaacg

SEQ ID NO: 66195 - DNA, 25 bp, probe
cagaggctaaatgagaacgaacaaa

SEQ ID NO: 66196 - DNA, 25 bp, probe
aaacagaggctaaatgagaacgaac

SEQ ID NO: 66197 - DNA, 25 bp, probe
tatacagaaacggtggaaagaattt

SEQ ID NO: 66198 - DNA, 25 bp, probe
aatcggttaaattgagagaatctgg

SEQ ID NO: 66199 - DNA, 25 bp, probe
tgagaatgctctacggaaacatatt

SEQ ID NO: 66200 - DNA, 25 bp, probe
ttaaattgagagaatctggctcctt

SEQ ID NO: 66201 - DNA, 25 bp, probe
atcggttaaattgagagaatctggc

SEQ ID NO: 66202 - DNA, 25 bp, probe
gttaaattgagagaatctggctcct

SEQ ID NO: 66203 - DNA, 25 bp, probe
gtgagaatgctctacggaaacatat

SEQ ID NO: 66204 - DNA, 25 bp, probe
taaattgagagaatctggctccttg

SEQ ID NO: 66205 - DNA, 25 bp, probe
gcattgtggagaaagaatcggttaa

SEQ ID NO: 66206 - DNA, 25 bp, probe
agaaagaatcggttaaattgagaga

SEQ ID NO: 66207 - DNA, 25 bp, probe
gagaaagaatcggttaaattgagag

SEQ ID NO: 66208 - DNA, 25 bp, probe
aatgctctacggaaacatattctag

SEQ ID NO: 66209 - DNA, 25 bp, probe
tgaaacagaggctaaatgagaacga

SEQ ID NO: 66210 - DNA, 25 bp, probe
ggaacagaattggtctagaagaaga

SEQ ID NO: 66211 - DNA, 25 bp, probe
tacaatggtgagagtctgagtcaat

SEQ ID NO: 66212 - DNA, 25 bp, probe
atacaatggtgagagtctgagtcaa

SEQ ID NO: 66213 - DNA, 25 bp, probe
ggatacaatggtgagagtctgagtc

SEQ ID NO: 66214 - DNA, 25 bp, probe
gatacaatggtgagagtctgagtca

SEQ ID NO: 66215 - DNA, 25 bp, probe
aggatacaatggtgagagtctgagt

SEQ ID NO: 66216 - DNA, 25 bp, probe
ttcattaccgccatcataaagattg

SEQ ID NO: 66217 - DNA, 25 bp, probe
acaatggtgagagtctgagtcaatg

SEQ ID NO: 66218 - DNA, 25 bp, probe
caggatacaatggtgagagtctgag

SEQ ID NO: 66219 - DNA, 25 bp, probe
cttcattaccgccatcataaagatt

SEQ ID NO: 66220 - DNA, 25 bp, probe
cattaccgccatcataaagattgag

SEQ ID NO: 66221 - DNA, 25 bp, probe
ttaccgccatcataaagattgagta

SEQ ID NO: 66222 - DNA, 25 bp, probe
attaccgccatcataaagattgagt

SEQ ID NO: 66223 - DNA, 25 bp, probe
tcattaccgccatcataaagattga

SEQ ID NO: 66224 - DNA, 25 bp, probe
atggtgagagtctgagtcaatggat

SEQ ID NO: 66225 - DNA, 25 bp, probe
gcttcattaccgccatcataaagat

SEQ ID NO: 66226 - DNA, 25 bp, probe
tggtgagagtctgagtcaatggatt

SEQ ID NO: 66227 - DNA, 25 bp, probe
aatggtgagagtctgagtcaatgga

SEQ ID NO: 66228 - DNA, 25 bp, probe
caatggtgagagtctgagtcaatgg

SEQ ID NO: 66229 - DNA, 25 bp, probe
ataattaccgcttcaaagattctgc

SEQ ID NO: 66230 - DNA, 25 bp, probe
cccagtgccaaacatttcataatta

SEQ ID NO: 66231 - DNA, 25 bp, probe
agtgccaaacatttcataattaccg

SEQ ID NO: 66232 - DNA, 25 bp, probe
gtgagagtctgagtcaatggatttg

SEQ ID NO: 66233 - DNA, 25 bp, probe
ccaaacatttcataattaccgcttc

SEQ ID NO: 66234 - DNA, 25 bp, probe
taccgccatcataaagattgagtac

SEQ ID NO: 66235 - DNA, 25 bp, probe
cagtgccaaacatttcataattacc

SEQ ID NO: 66236 - DNA, 25 bp, probe
ccagtgccaaacatttcataattac

SEQ ID NO: 66237 - DNA, 25 bp, probe
gccaaacatttcataattaccgctt

SEQ ID NO: 66238 - DNA, 25 bp, probe
tgaacatcatccctgtatctactag

SEQ ID NO: 66239 - DNA, 25 bp, probe
caaacatttcataattaccgcttca

SEQ ID NO: 66240 - DNA, 25 bp, probe
cataattaccgcttcaaagattctg

SEQ ID NO: 66241 - DNA, 25 bp, probe
tcataattaccgcttcaaagattct

SEQ ID NO: 66242 - DNA, 25 bp, probe
acactgtcatcatcaatgatctctt

SEQ ID NO: 66243 - DNA, 25 bp, probe
tgtcatcatcaatgatctcttcact

SEQ ID NO: 66244 - DNA, 25 bp, probe
actgtcatcatcaatgatctcttca

SEQ ID NO: 66245 - DNA, 25 bp, probe
acatttcataattaccgcttcaaag

SEQ ID NO: 66246 - DNA, 25 bp, probe
tcatcatcaatgatctcttcactgg

SEQ ID NO: 66247 - DNA, 25 bp, probe
gtcatcatcaatgatctcttcactg

SEQ ID NO: 66248 - DNA, 25 bp, probe
ctgtcatcatcaatgatctcttcac

SEQ ID NO: 66249 - DNA, 25 bp, probe
cactgtcatcatcaatgatctcttc

SEQ ID NO: 66250 - DNA, 25 bp, probe
gacactgtcatcatcaatgatctct

SEQ ID NO: 66251 - DNA, 25 bp, probe
aatggacactgtcatcatcaatgat

SEQ ID NO: 66252 - DNA, 25 bp, probe
catccaggatacaatggtgagagtc

SEQ ID NO: 66253 - DNA, 25 bp, probe
atggacactgtcatcatcaatgatc

SEQ ID NO: 66254 - DNA, 25 bp, probe
tgagagtctgagtcaatggatttgg

SEQ ID NO: 66255 - DNA, 25 bp, probe
ctgaagatgagttgagagatgaagt

SEQ ID NO: 66256 - DNA, 25 bp, probe
tattactgatgaagaccaaggaaca

SEQ ID NO: 66257 - DNA, 25 bp, probe
tgtattactgatgaagaccaaggaa

SEQ ID NO: 66258 - DNA, 25 bp, probe
gtattactgatgaagaccaaggaac

SEQ ID NO: 66259 - DNA, 25 bp, probe
attactgatgaagaccaaggaacat

SEQ ID NO: 66260 - DNA, 25 bp, probe
tgaagatgagttgagagatgaagta

SEQ ID NO: 66261 - DNA, 25 bp, probe
aagatgagttgagagatgaagtagt

SEQ ID NO: 66262 - DNA, 25 bp, probe
tctgaagatgagttgagagatgaag

SEQ ID NO: 66263 - DNA, 25 bp, probe
gtagatgaggaacaactagaaccaa

SEQ ID NO: 66264 - DNA, 25 bp, probe
gatgaggaacaactagaaccaagat

SEQ ID NO: 66265 - DNA, 25 bp, probe
tagatgaggaacaactagaaccaag

SEQ ID NO: 66266 - DNA, 25 bp, probe
ttgtattactgatgaagaccaagga

SEQ ID NO: 66267 - DNA, 25 bp, probe
gaagatgagttgagagatgaagtag

SEQ ID NO: 66268 - DNA, 25 bp, probe
tgagttgagagatgaagtagtagaa

SEQ ID NO: 66269 - DNA, 25 bp, probe
atgaggaacaactagaaccaagatc

SEQ ID NO: 66270 - DNA, 25 bp, probe
agatgaggaacaactagaaccaaga

SEQ ID NO: 66271 - DNA, 25 bp, probe
tgaagaatctgaagatgagttgaga

SEQ ID NO: 66272 - DNA, 25 bp, probe
gcattgaagtagatgaggaacaact

SEQ ID NO: 66273 - DNA, 25 bp, probe
atgagttgagagatgaagtagtaga

SEQ ID NO: 66274 - DNA, 25 bp, probe
agatgagttgagagatgaagtagta

SEQ ID NO: 66275 - DNA, 25 bp, probe
aagaatctgaagatgagttgagaga

SEQ ID NO: 66276 - DNA, 25 bp, probe
ttgaagaatctgaagatgagttgag

SEQ ID NO: 66277 - DNA, 25 bp, probe
aagtagatgaggaacaactagaacc

SEQ ID NO: 66278 - DNA, 25 bp, probe
gatgagttgagagatgaagtagtag

SEQ ID NO: 66279 - DNA, 25 bp, probe
agtagatgaggaacaactagaacca

SEQ ID NO: 66280 - DNA, 25 bp, probe
gaagaatctgaagatgagttgagag

SEQ ID NO: 66281 - DNA, 25 bp, probe
tgaagtagatgaggaacaactagaa

SEQ ID NO: 66282 - DNA, 25 bp, probe
ttgaagtagatgaggaacaactaga

SEQ ID NO: 66283 - DNA, 25 bp, probe
gaagtagatgaggaacaactagaac

SEQ ID NO: 66284 - DNA, 25 bp, probe
atgaagaccaaggaacatcaacaac

SEQ ID NO: 66285 - DNA, 25 bp, probe
cattgaagtagatgaggaacaacta

SEQ ID NO: 66286 - DNA, 25 bp, probe
ggcattgaagtagatgaggaacaac

SEQ ID NO: 66287 - DNA, 25 bp, probe
tggcattgaagtagatgaggaacaa

SEQ ID NO: 66288 - DNA, 25 bp, probe
tctggcattgaagtagatgaggaac

SEQ ID NO: 66289 - DNA, 25 bp, probe
atggtctctggcattgaagtagatg

SEQ ID NO: 66290 - DNA, 25 bp, probe
gagttgagagatgaagtagtagaat

SEQ ID NO: 66291 - DNA, 25 bp, probe
attgaagtagatgaggaacaactag

SEQ ID NO: 66292 - DNA, 25 bp, probe
ctggcattgaagtagatgaggaaca

SEQ ID NO: 66293 - DNA, 25 bp, probe
ctctggcattgaagtagatgaggaa

SEQ ID NO: 66294 - DNA, 25 bp, probe
agaagatgaagggaaggtagaaatg

SEQ ID NO: 66295 - DNA, 25 bp, probe
gaagaagatgaagggaaggtagaaa

SEQ ID NO: 66296 - DNA, 25 bp, probe
aaagaagaagatgaagggaaggtag

SEQ ID NO: 66297 - DNA, 25 bp, probe
caaagaagaagatgaagggaaggta

SEQ ID NO: 66298 - DNA, 25 bp, probe
agaagaagatgaagggaaggtagaa

SEQ ID NO: 66299 - DNA, 25 bp, probe
gagcaagaggaagaacaagatagaa

SEQ ID NO: 66300 - DNA, 25 bp, probe
gacgatagaggtggttctgtaataa

SEQ ID NO: 66301 - DNA, 25 bp, probe
ggacgatagaggtggttctgtaata

SEQ ID NO: 66302 - DNA, 25 bp, probe
cgagcaagaggaagaacaagataga

SEQ ID NO: 66303 - DNA, 25 bp, probe
acacaatatatagaccaggttcaga

SEQ ID NO: 66304 - DNA, 25 bp, probe
caatatatagaccaggttcagaagg

SEQ ID NO: 66305 - DNA, 25 bp, probe
cacaatatatagaccaggttcagaa

SEQ ID NO: 66306 - DNA, 25 bp, probe
aggacgatagaggtggttctgtaat

SEQ ID NO: 66307 - DNA, 25 bp, probe
gaacaagatagaaagggtagccata

SEQ ID NO: 66308 - DNA, 25 bp, probe
aagaggaagaacaagatagaaaggg

SEQ ID NO: 66309 - DNA, 25 bp, probe
agcaagaggaagaacaagatagaaa

SEQ ID NO: 66310 - DNA, 25 bp, probe
gcattgagaagagtaaacagagaag

SEQ ID NO: 66311 - DNA, 25 bp, probe
gcaagaggaagaacaagatagaaag

SEQ ID NO: 66312 - DNA, 25 bp, probe
tagaaagggtagccatactgatttg

SEQ ID NO: 66313 - DNA, 25 bp, probe
aacaagatagaaagggtagccatac

SEQ ID NO: 66314 - DNA, 25 bp, probe
agatagaaagggtagccatactgat

SEQ ID NO: 66315 - DNA, 25 bp, probe
aggaagaacaagatagaaagggtag

SEQ ID NO: 66316 - DNA, 25 bp, probe
gaggaagaacaagatagaaagggta

SEQ ID NO: 66317 - DNA, 25 bp, probe
gatagaaagggtagccatactgatt

SEQ ID NO: 66318 - DNA, 25 bp, probe
aagatagaaagggtagccatactga

SEQ ID NO: 66319 - DNA, 25 bp, probe
caagatagaaagggtagccatactg

SEQ ID NO: 66320 - DNA, 25 bp, probe
acaagatagaaagggtagccatact

SEQ ID NO: 66321 - DNA, 25 bp, probe
agaggaagaacaagatagaaagggt

SEQ ID NO: 66322 - DNA, 25 bp, probe
ccgagcaagaggaagaacaagatag

SEQ ID NO: 66323 - DNA, 25 bp, probe
acaatatatagaccaggttcagaag

SEQ ID NO: 66324 - DNA, 25 bp, probe
atagaaagggtagccatactgattt

SEQ ID NO: 66325 - DNA, 25 bp, probe
gaagaacaagatagaaagggtagcc

SEQ ID NO: 66326 - DNA, 25 bp, probe
ggaagaacaagatagaaagggtagc

SEQ ID NO: 66327 - DNA, 25 bp, probe
caagaggaagaacaagatagaaagg

SEQ ID NO: 66328 - DNA, 25 bp, probe
agaacaagatagaaagggtagccat

SEQ ID NO: 66329 - DNA, 25 bp, probe
aaagccagttcaccaaatcttcata

SEQ ID NO: 66330 - DNA, 25 bp, probe
tacacaatatatagaccaggttcag

SEQ ID NO: 66331 - DNA, 25 bp, probe
acgatagaggtggttctgtaataaa

SEQ ID NO: 66332 - DNA, 25 bp, probe
ttcaccaaatcttcatagacgacag

SEQ ID NO: 66333 - DNA, 25 bp, probe
agttcaccaaatcttcatagacgac

SEQ ID NO: 66334 - DNA, 25 bp, probe
cagttcaccaaatcttcatagacga

SEQ ID NO: 66335 - DNA, 25 bp, probe
aagaacaagatagaaagggtagcca

SEQ ID NO: 66336 - DNA, 25 bp, probe
gaggacgatagaggtggttctgtaa

SEQ ID NO: 66337 - DNA, 25 bp, probe
gttcaccaaatcttcatagacgaca

SEQ ID NO: 66338 - DNA, 25 bp, probe
aagccagttcaccaaatcttcatag

SEQ ID NO: 66339 - DNA, 25 bp, probe
cgatagaggtggttctgtaataaag

SEQ ID NO: 66340 - DNA, 25 bp, probe
cattgagaagagtaaacagagaaga

SEQ ID NO: 66341 - DNA, 25 bp, probe
gttgaacatccttaagaatgctgat

SEQ ID NO: 66342 - DNA, 25 bp, probe
catccatactcacctccagtttaac

SEQ ID NO: 66343 - DNA, 25 bp, probe
gctctacatttgtgtttgtgttcaa

SEQ ID NO: 66344 - DNA, 25 bp, probe
cgctctacatttgtgtttgtgttca

SEQ ID NO: 66345 - DNA, 25 bp, probe
ctacatttgtgtttgtgttcaaagc

SEQ ID NO: 66346 - DNA, 25 bp, probe
tacatttgtgtttgtgttcaaagca

SEQ ID NO: 66347 - DNA, 25 bp, probe
tctacatttgtgtttgtgttcaaag

SEQ ID NO: 66348 - DNA, 25 bp, probe
ctctacatttgtgtttgtgttcaaa

SEQ ID NO: 66349 - DNA, 25 bp, probe
ccgctctacatttgtgtttgtgttc

SEQ ID NO: 66350 - DNA, 25 bp, probe
ttaacttcaaaactcacaaggagga

SEQ ID NO: 66351 - DNA, 25 bp, probe
taacttcaaaactcacaaggaggag

SEQ ID NO: 66352 - DNA, 25 bp, probe
tccgctctacatttgtgtttgtgtt

SEQ ID NO: 66353 - DNA, 25 bp, probe
tcacaaggaggagttacgtagagag

SEQ ID NO: 66354 - DNA, 25 bp, probe
acatttgtgtttgtgttcaaagcac

SEQ ID NO: 66355 - DNA, 25 bp, probe
ctcacaaggaggagttacgtagaga

SEQ ID NO: 66356 - DNA, 25 bp, probe
ctccgctctacatttgtgtttgtgt

SEQ ID NO: 66357 - DNA, 25 bp, probe
catttgtgtttgtgttcaaagcacg

SEQ ID NO: 66358 - DNA, 25 bp, probe
cacaaggaggagttacgtagagagg

SEQ ID NO: 66359 - DNA, 25 bp, probe
cctccgctctacatttgtgtttgtg

SEQ ID NO: 66360 - DNA, 25 bp, probe
taacagcctttggagtcgcaatgta

SEQ ID NO: 66361 - DNA, 25 bp, probe
atttgtgtttgtgttcaaagcacgg

SEQ ID NO: 66362 - DNA, 25 bp, probe
aacagcctttggagtcgcaatgtat

SEQ ID NO: 66363 - DNA, 25 bp, probe
ttggagtcgcaatgtatctgctgag

SEQ ID NO: 66364 - DNA, 25 bp, probe
ctttggagtcgcaatgtatctgctg

SEQ ID NO: 66365 - DNA, 25 bp, probe
actcacaaggaggagttacgtagag

SEQ ID NO: 66366 - DNA, 25 bp, probe
tttggagtcgcaatgtatctgctga

SEQ ID NO: 66367 - DNA, 25 bp, probe
aacttcaaaactcacaaggaggagt

SEQ ID NO: 66368 - DNA, 25 bp, probe
aaggaggagttacgtagagagggtg

SEQ ID NO: 66369 - DNA, 25 bp, probe
caaggaggagttacgtagagagggt

SEQ ID NO: 66370 - DNA, 25 bp, probe
acaaggaggagttacgtagagaggg

SEQ ID NO: 66371 - DNA, 25 bp, probe
gttaacagcctttggagtcgcaatg

SEQ ID NO: 66372 - DNA, 25 bp, probe
atgcttagagacccagaattgagat

SEQ ID NO: 66373 - DNA, 25 bp, probe
gagagatgcttagagacccagaatt

SEQ ID NO: 66374 - DNA, 25 bp, probe
gatgcttagagacccagaattgaga

SEQ ID NO: 66375 - DNA, 25 bp, probe
agatgcttagagacccagaattgag

SEQ ID NO: 66376 - DNA, 25 bp, probe
gagatgcttagagacccagaattga

SEQ ID NO: 66377 - DNA, 25 bp, probe
agagatgcttagagacccagaattg

SEQ ID NO: 66378 - DNA, 25 bp, probe
cttagagacccagaattgagatcca

SEQ ID NO: 66379 - DNA, 25 bp, probe
tagagacccagaattgagatccaaa

SEQ ID NO: 66380 - DNA, 25 bp, probe
ttagagacccagaattgagatccaa

SEQ ID NO: 66381 - DNA, 25 bp, probe
ttgatctacttcaagagcaagttct

SEQ ID NO: 66382 - DNA, 25 bp, probe
tgatctacttcaagagcaagttctc

SEQ ID NO: 66383 - DNA, 25 bp, probe
aacactcaactccatcgaatagctc

SEQ ID NO: 66384 - DNA, 25 bp, probe
tgcttagagacccagaattgagatc

SEQ ID NO: 66385 - DNA, 25 bp, probe
gatctacttcaagagcaagttctcg

SEQ ID NO: 66386 - DNA, 25 bp, probe
gcttagagacccagaattgagatcc

SEQ ID NO: 66387 - DNA, 25 bp, probe
ctcaactccatcgaatagctccaac

SEQ ID NO: 66388 - DNA, 25 bp, probe
ccaaacactcaactccatcgaatag

SEQ ID NO: 66389 - DNA, 25 bp, probe
aaatgatatccaacccaaccaactt

SEQ ID NO: 66390 - DNA, 25 bp, probe
atatccaacccaaccaacttcaacc

SEQ ID NO: 66391 - DNA, 25 bp, probe
aatgatatccaacccaaccaacttc

SEQ ID NO: 66392 - DNA, 25 bp, probe
atctacttcaagagcaagttctcgg

SEQ ID NO: 66393 - DNA, 25 bp, probe
actcaactccatcgaatagctccaa

SEQ ID NO: 66394 - DNA, 25 bp, probe
aaacactcaactccatcgaatagct

SEQ ID NO: 66395 - DNA, 25 bp, probe
caaacactcaactccatcgaatagc

SEQ ID NO: 66396 - DNA, 25 bp, probe
accaaacactcaactccatcgaata

SEQ ID NO: 66397 - DNA, 25 bp, probe
cgagagatgcttagagacccagaat

SEQ ID NO: 66398 - DNA, 25 bp, probe
gatatccaacccaaccaacttcaac

SEQ ID NO: 66399 - DNA, 25 bp, probe
atgatatccaacccaaccaacttca

SEQ ID NO: 66400 - DNA, 25 bp, probe
acccagaattgagatccaaaatgat

SEQ ID NO: 66401 - DNA, 25 bp, probe
cactcaactccatcgaatagctcca

SEQ ID NO: 66402 - DNA, 25 bp, probe
acactcaactccatcgaatagctcc

SEQ ID NO: 66403 - DNA, 25 bp, probe
gagacccagaattgagatccaaaat

SEQ ID NO: 66404 - DNA, 25 bp, probe
tgatatccaacccaaccaacttcaa

SEQ ID NO: 66405 - DNA, 25 bp, probe
gacccagaattgagatccaaaatga

SEQ ID NO: 66406 - DNA, 25 bp, probe
agacccagaattgagatccaaaatg

SEQ ID NO: 66407 - DNA, 25 bp, probe
cccagaattgagatccaaaatgata

SEQ ID NO: 66408 - DNA, 25 bp, probe
tcaactccatcgaatagctccaacc

SEQ ID NO: 66409 - DNA, 25 bp, probe
agagacccagaattgagatccaaaa

SEQ ID NO: 66410 - DNA, 25 bp, probe
tatccaacccaaccaacttcaacca

SEQ ID NO: 66411 - DNA, 25 bp, probe
caccaaacactcaactccatcgaat

SEQ ID NO: 66412 - DNA, 25 bp, probe
gatccaaaatgatatccaacccaac

SEQ ID NO: 66413 - DNA, 25 bp, probe
agatccaaaatgatatccaacccaa

SEQ ID NO: 66414 - DNA, 25 bp, probe
aaaatgatatccaacccaaccaact

SEQ ID NO: 66415 - DNA, 25 bp, probe
caaaatgatatccaacccaaccaac

SEQ ID NO: 66416 - DNA, 25 bp, probe
agatgcttcagtcaacttctcagag

SEQ ID NO: 66417 - DNA, 25 bp, probe
cagatgcttcagtcaacttctcaga

SEQ ID NO: 66418 - DNA, 25 bp, probe
gatgcttcagtcaacttctcagagt

SEQ ID NO: 66419 - DNA, 25 bp, probe
ctgctaaagagaaaggacaatttga

SEQ ID NO: 66420 - DNA, 25 bp, probe
tgctaaagagaaaggacaatttgaa

SEQ ID NO: 66421 - DNA, 25 bp, probe
tctgctaaagagaaaggacaatttg

SEQ ID NO: 66422 - DNA, 25 bp, probe
gattcaaagattgccaaacagagag

SEQ ID NO: 66423 - DNA, 25 bp, probe
ctaaagagaaaggacaatttgaagc

SEQ ID NO: 66424 - DNA, 25 bp, probe
gctaaagagaaaggacaatttgaag

SEQ ID NO: 66425 - DNA, 25 bp, probe
agattcaaagattgccaaacagaga

SEQ ID NO: 66426 - DNA, 25 bp, probe
gtctgctaaagagaaaggacaattt

SEQ ID NO: 66427 - DNA, 25 bp, probe
ccagatgcttcagtcaacttctcag

SEQ ID NO: 66428 - DNA, 25 bp, probe
attcaaagattgccaaacagagagg

SEQ ID NO: 66429 - DNA, 25 bp, probe
gagaaaggacaatttgaagctatgg

SEQ ID NO: 66430 - DNA, 25 bp, probe
agagaaaggacaatttgaagctatg

SEQ ID NO: 66431 - DNA, 25 bp, probe
aaagagaaaggacaatttgaagcta

SEQ ID NO: 66432 - DNA, 25 bp, probe
taaagagaaaggacaatttgaagct

SEQ ID NO: 66433 - DNA, 25 bp, probe
aagagaaaggacaatttgaagctat

SEQ ID NO: 66434 - DNA, 25 bp, probe
gaaactgggagggatgtggaataac

SEQ ID NO: 66435 - DNA, 25 bp, probe
agaaaggacaatttgaagctatggc

SEQ ID NO: 66436 - DNA, 25 bp, probe
atgcttcagtcaacttctcagagtt

SEQ ID NO: 66437 - DNA, 25 bp, probe
agaaactgggagggatgtggaataa

SEQ ID NO: 66438 - DNA, 25 bp, probe
aagaaactgggagggatgtggaata

SEQ ID NO: 66439 - DNA, 25 bp, probe
aaaggacaatttgaagctatggcaa

SEQ ID NO: 66440 - DNA, 25 bp, probe
gaaaggacaatttgaagctatggca

SEQ ID NO: 66441 - DNA, 25 bp, probe
tgaagtttatctggggagtatttgg

SEQ ID NO: 66442 - DNA, 25 bp, probe
cgtaagaagaaacacccagatgctt

SEQ ID NO: 66443 - DNA, 25 bp, probe
aaggacaatttgaagctatggcaag

SEQ ID NO: 66444 - DNA, 25 bp, probe
gaccatgtctgctaaagagaaagga

SEQ ID NO: 66445 - DNA, 25 bp, probe
aatgccatcgtatgtattttgtgtg

SEQ ID NO: 66446 - DNA, 25 bp, probe
gcccaaaagtcaaaagagaacattc

SEQ ID NO: 66447 - DNA, 25 bp, probe
accatgtctgctaaagagaaaggac

SEQ ID NO: 66448 - DNA, 25 bp, probe
gagcgtaagaagaaacacccagatg

SEQ ID NO: 66449 - DNA, 25 bp, probe
atgaagtttatctggggagtatttg

SEQ ID NO: 66450 - DNA, 25 bp, probe
cccaaaagtcaaaagagaacattct

SEQ ID NO: 66451 - DNA, 25 bp, probe
tctcagagttttctaagaagtgctt

SEQ ID NO: 66452 - DNA, 25 bp, probe
aaaagtcaaaagagaacattctggc

SEQ ID NO: 66453 - DNA, 25 bp, probe
aaatgccatcgtatgtattttgtgt

SEQ ID NO: 66454 - DNA, 25 bp, probe
ccgttacgaaagagaaatgaaaaca

SEQ ID NO: 66455 - DNA, 25 bp, probe
caaaagtcaaaagagaacattctgg

SEQ ID NO: 66456 - DNA, 25 bp, probe
ccaaaagtcaaaagagaacattctg

SEQ ID NO: 66457 - DNA, 25 bp, probe
cccgttacgaaagagaaatgaaaac

SEQ ID NO: 66458 - DNA, 25 bp, probe
cgttacgaaagagaaatgaaaacat

SEQ ID NO: 66459 - DNA, 25 bp, probe
aaactgggagggatgtggaataaca

SEQ ID NO: 66460 - DNA, 25 bp, probe
ctatgacagtgagtgggaacaaaat

SEQ ID NO: 66461 - DNA, 25 bp, probe
atgacagtgagtgggaacaaaatta

SEQ ID NO: 66462 - DNA, 25 bp, probe
tatgacagtgagtgggaacaaaatt

SEQ ID NO: 66463 - DNA, 25 bp, probe
tgacagtgagtgggaacaaaattaa

SEQ ID NO: 66464 - DNA, 25 bp, probe
ccaaggagcaatacatcgaagcatg

SEQ ID NO: 66465 - DNA, 25 bp, probe
agcaatacatcgaagcatgtctcag

SEQ ID NO: 66466 - DNA, 25 bp, probe
gagcaatacatcgaagcatgtctca

SEQ ID NO: 66467 - DNA, 25 bp, probe
aaggagcaatacatcgaagcatgtc

SEQ ID NO: 66468 - DNA, 25 bp, probe
agctatgacagtgagtgggaacaaa

SEQ ID NO: 66469 - DNA, 25 bp, probe
gctatgacagtgagtgggaacaaaa

SEQ ID NO: 66470 - DNA, 25 bp, probe
caaggagcaatacatcgaagcatgt

SEQ ID NO: 66471 - DNA, 25 bp, probe
ggagcaatacatcgaagcatgtctc

SEQ ID NO: 66472 - DNA, 25 bp, probe
caatacatcgaagcatgtctcagcc

SEQ ID NO: 66473 - DNA, 25 bp, probe
cagctatgacagtgagtgggaacaa

SEQ ID NO: 66474 - DNA, 25 bp, probe
gaggagtcccaaggagcaatacatc

SEQ ID NO: 66475 - DNA, 25 bp, probe
aggagcaatacatcgaagcatgtct

SEQ ID NO: 66476 - DNA, 25 bp, probe
aatacatcgaagcatgtctcagcca

SEQ ID NO: 66477 - DNA, 25 bp, probe
gcaatacatcgaagcatgtctcagc

SEQ ID NO: 66478 - DNA, 25 bp, probe
agtcccaaggagcaatacatcgaag

SEQ ID NO: 66479 - DNA, 25 bp, probe
gagtcccaaggagcaatacatcgaa

SEQ ID NO: 66480 - DNA, 25 bp, probe
tgaggagtcccaaggagcaatacat

SEQ ID NO: 66481 - DNA, 25 bp, probe
aagtgaggagtcccaaggagcaata

SEQ ID NO: 66482 - DNA, 25 bp, probe
atacatcgaagcatgtctcagccag

SEQ ID NO: 66483 - DNA, 25 bp, probe
tgtcattgatgaacagactgatgtc

SEQ ID NO: 66484 - DNA, 25 bp, probe
gtgtcattgatgaacagactgatgt

SEQ ID NO: 66485 - DNA, 25 bp, probe
tgtgtcattgatgaacagactgatg

SEQ ID NO: 66486 - DNA, 25 bp, probe
ccttacgaaatggtgttcaagaaac

SEQ ID NO: 66487 - DNA, 25 bp, probe
cttacgaaatggtgttcaagaaacg

SEQ ID NO: 66488 - DNA, 25 bp, probe
cccttacgaaatggtgttcaagaaa

SEQ ID NO: 66489 - DNA, 25 bp, probe
gtcattgatgaacagactgatgtct

SEQ ID NO: 66490 - DNA, 25 bp, probe
caacatcctttacctcacggcttac

SEQ ID NO: 66491 - DNA, 25 bp, probe
aacatcctttacctcacggcttact

SEQ ID NO: 66492 - DNA, 25 bp, probe
cttcaatcaccccaacatcctttac

SEQ ID NO: 66493 - DNA, 25 bp, probe
tcttcaatcaccccaacatccttta

SEQ ID NO: 66494 - DNA, 25 bp, probe
gcccttacgaaatggtgttcaagaa

SEQ ID NO: 66495 - DNA, 25 bp, probe
ctgtgtcattgatgaacagactgat

SEQ ID NO: 66496 - DNA, 25 bp, probe
gatcactgtgtcattgatgaacaga

SEQ ID NO: 66497 - DNA, 25 bp, probe
atcactgtgtcattgatgaacagac

SEQ ID NO: 66498 - DNA, 25 bp, probe
ttactgtctgagggatcactgtgtc

SEQ ID NO: 66499 - DNA, 25 bp, probe
cttactgtctgagggatcactgtgt

SEQ ID NO: 66500 - DNA, 25 bp, probe
atcctttacctcacggcttactgtc

SEQ ID NO: 66501 - DNA, 25 bp, probe
aaatggtgttcaagaaacgtgacag

SEQ ID NO: 66502 - DNA, 25 bp, probe
gaaatggtgttcaagaaacgtgaca

SEQ ID NO: 66503 - DNA, 25 bp, probe
ggatcactgtgtcattgatgaacag

SEQ ID NO: 66504 - DNA, 25 bp, probe
gagggatcactgtgtcattgatgaa

SEQ ID NO: 66505 - DNA, 25 bp, probe
actgtgtcattgatgaacagactga

SEQ ID NO: 66506 - DNA, 25 bp, probe
cactgtgtcattgatgaacagactg

SEQ ID NO: 66507 - DNA, 25 bp, probe
tcactgtgtcattgatgaacagact

SEQ ID NO: 66508 - DNA, 25 bp, probe
ctttacctcacggcttactgtctga

SEQ ID NO: 66509 - DNA, 25 bp, probe
catcctttacctcacggcttactgt

SEQ ID NO: 66510 - DNA, 25 bp, probe
acatcctttacctcacggcttactg

SEQ ID NO: 66511 - DNA, 25 bp, probe
agggatcactgtgtcattgatgaac

SEQ ID NO: 66512 - DNA, 25 bp, probe
ttcaatcaccccaacatcctttacc

SEQ ID NO: 66513 - DNA, 25 bp, probe
ctcttcaatcaccccaacatccttt

SEQ ID NO: 66514 - DNA, 25 bp, probe
cgaaatggtgttcaagaaacgtgac

SEQ ID NO: 66515 - DNA, 25 bp, probe
gtctgagggatcactgtgtcattga

SEQ ID NO: 66516 - DNA, 25 bp, probe
ctgtctgagggatcactgtgtcatt

SEQ ID NO: 66517 - DNA, 25 bp, probe
ccaacatcctttacctcacggctta

SEQ ID NO: 66518 - DNA, 25 bp, probe
ttacgaaatggtgttcaagaaacgt

SEQ ID NO: 66519 - DNA, 25 bp, probe
gggatcactgtgtcattgatgaaca

SEQ ID NO: 66520 - DNA, 25 bp, probe
atatatgccacaatgtttggggaag

SEQ ID NO: 66521 - DNA, 25 bp, probe
gatatatgccacaatgtttggggaa

SEQ ID NO: 66522 - DNA, 25 bp, probe
gctgtgtgatatatgccacaatgtt

SEQ ID NO: 66523 - DNA, 25 bp, probe
aatggtgttcaagaaacgtgacagt

SEQ ID NO: 66524 - DNA, 25 bp, probe
ctgagggatcactgtgtcattgatg

SEQ ID NO: 66525 - DNA, 25 bp, probe
tctgagggatcactgtgtcattgat

SEQ ID NO: 66526 - DNA, 25 bp, probe
caatcaccccaacatcctttacctc

SEQ ID NO: 66527 - DNA, 25 bp, probe
ttaattactcagatactcgtggctt

SEQ ID NO: 66528 - DNA, 25 bp, probe
agtgaagaatggaaagaaagagaca

SEQ ID NO: 66529 - DNA, 25 bp, probe
cagtgaagaatggaaagaaagagac

SEQ ID NO: 66530 - DNA, 25 bp, probe
tcagtgaagaatggaaagaaagaga

SEQ ID NO: 66531 - DNA, 25 bp, probe
gtcagtgaagaatggaaagaaagag

SEQ ID NO: 66532 - DNA, 25 bp, probe
agtcagtgaagaatggaaagaaaga

SEQ ID NO: 66533 - DNA, 25 bp, probe
cagtcagtgaagaatggaaagaaag

SEQ ID NO: 66534 - DNA, 25 bp, probe
agaatggaaagaaagagacatagca

SEQ ID NO: 66535 - DNA, 25 bp, probe
gaaggagaatcactttggactttac

SEQ ID NO: 66536 - DNA, 25 bp, probe
ggaaggagaatcactttggacttta

SEQ ID NO: 66537 - DNA, 25 bp, probe
gtgaagaatggaaagaaagagacat

SEQ ID NO: 66538 - DNA, 25 bp, probe
aaggagaatcactttggactttacc

SEQ ID NO: 66539 - DNA, 25 bp, probe
aattactcagatactcgtggctttg

SEQ ID NO: 66540 - DNA, 25 bp, probe
gaatggaaagaaagagacatagcat

SEQ ID NO: 66541 - DNA, 25 bp, probe
aagaatggaaagaaagagacatagc

SEQ ID NO: 66542 - DNA, 25 bp, probe
atggaaagaaagagacatagcattt

SEQ ID NO: 66543 - DNA, 25 bp, probe
ctttcagaggagatagaatttaggc

SEQ ID NO: 66544 - DNA, 25 bp, probe
ctttaccagttaggactccactttc

SEQ ID NO: 66545 - DNA, 25 bp, probe
taattactcagatactcgtggcttt

SEQ ID NO: 66546 - DNA, 25 bp, probe
tttaattactcagatactcgtggct

SEQ ID NO: 66547 - DNA, 25 bp, probe
actttaccagttaggactccacttt

SEQ ID NO: 66548 - DNA, 25 bp, probe
tttaccagttaggactccactttca

SEQ ID NO: 66549 - DNA, 25 bp, probe
gcttccatgtgaaactttgtgattt

SEQ ID NO: 66550 - DNA, 25 bp, probe
tgaagaatggaaagaaagagacata

SEQ ID NO: 66551 - DNA, 25 bp, probe
ttaccagttaggactccactttcag

SEQ ID NO: 66552 - DNA, 25 bp, probe
gactttaccagttaggactccactt

SEQ ID NO: 66553 - DNA, 25 bp, probe
ccactttcagaggagatagaattta

SEQ ID NO: 66554 - DNA, 25 bp, probe
aaatatcgttcactgtgacctcaaa

SEQ ID NO: 66555 - DNA, 25 bp, probe
tccactttcagaggagatagaattt

SEQ ID NO: 66556 - DNA, 25 bp, probe
agaatcactttggactttaccagtt

SEQ ID NO: 66557 - DNA, 25 bp, probe
atcactttggactttaccagttagg

SEQ ID NO: 66558 - DNA, 25 bp, probe
gaagaatggaaagaaagagacatag

SEQ ID NO: 66559 - DNA, 25 bp, probe
gagaatcactttggactttaccagt

SEQ ID NO: 66560 - DNA, 25 bp, probe
tagcttccatgtgaaactttgtgat

SEQ ID NO: 66561 - DNA, 25 bp, probe
ctttggactttaccagttaggactc

SEQ ID NO: 66562 - DNA, 25 bp, probe
actttcagaggagatagaatttagg

SEQ ID NO: 66563 - DNA, 25 bp, probe
gggaaggagaatcactttggacttt

SEQ ID NO: 66564 - DNA, 25 bp, probe
gaatcactttggactttaccagtta

SEQ ID NO: 66565 - DNA, 25 bp, probe
aatatcgttcactgtgacctcaaac

SEQ ID NO: 66566 - DNA, 25 bp, probe
ccagtcagtgaagaatggaaagaaa

SEQ ID NO: 66567 - DNA, 25 bp, probe
aatcactttggactttaccagttag

SEQ ID NO: 66568 - DNA, 25 bp, probe
taccagttaggactccactttcaga

SEQ ID NO: 66569 - DNA, 25 bp, probe
actttggactttaccagttaggact

SEQ ID NO: 66570 - DNA, 25 bp, probe
cactttggactttaccagttaggac

SEQ ID NO: 66571 - DNA, 25 bp, probe
gaacttcttaatcttccatcctcag

SEQ ID NO: 66572 - DNA, 25 bp, probe
aacttcttaatcttccatcctcagt

SEQ ID NO: 66573 - DNA, 25 bp, probe
ccagaacttcttaatcttccatcct

SEQ ID NO: 66574 - DNA, 25 bp, probe
tccagaacttcttaatcttccatcc

SEQ ID NO: 66575 - DNA, 25 bp, probe
gtccagaacttcttaatcttccatc

SEQ ID NO: 66576 - DNA, 25 bp, probe
agaacttcttaatcttccatcctca

SEQ ID NO: 66577 - DNA, 25 bp, probe
agtccagaacttcttaatcttccat

SEQ ID NO: 66578 - DNA, 25 bp, probe
acttcttaatcttccatcctcagta

SEQ ID NO: 66579 - DNA, 25 bp, probe
cagaacttcttaatcttccatcctc

SEQ ID NO: 66580 - DNA, 25 bp, probe
cttcttaatcttccatcctcagtaa

SEQ ID NO: 66581 - DNA, 25 bp, probe
tagtccagaacttcttaatcttcca

SEQ ID NO: 66582 - DNA, 25 bp, probe
gtagtccagaacttcttaatcttcc

SEQ ID NO: 66583 - DNA, 25 bp, probe
ctagcagaggacagactgactatac

SEQ ID NO: 66584 - DNA, 25 bp, probe
agaggacagactgactataccagaa

SEQ ID NO: 66585 - DNA, 25 bp, probe
actagcagaggacagactgactata

SEQ ID NO: 66586 - DNA, 25 bp, probe
ttcttaatcttccatcctcagtaat

SEQ ID NO: 66587 - DNA, 25 bp, probe
cgagaaccctttaatagcagatttg

SEQ ID NO: 66588 - DNA, 25 bp, probe
tcttaatcttccatcctcagtaatt

SEQ ID NO: 66589 - DNA, 25 bp, probe
ggcaaattcaggatgttaaaggatt

SEQ ID NO: 66590 - DNA, 25 bp, probe
agtagtccagaacttcttaatcttc

SEQ ID NO: 66591 - DNA, 25 bp, probe
aaaggaaattcagttagaggagcaa

SEQ ID NO: 66592 - DNA, 25 bp, probe
taaaggaaattcagttagaggagca

SEQ ID NO: 66593 - DNA, 25 bp, probe
aaggaaattcagttagaggagcaag

SEQ ID NO: 66594 - DNA, 25 bp, probe
aggcaaattcaggatgttaaaggat

SEQ ID NO: 66595 - DNA, 25 bp, probe
aaggcaaattcaggatgttaaagga

SEQ ID NO: 66596 - DNA, 25 bp, probe
agaaggcaaattcaggatgttaaag

SEQ ID NO: 66597 - DNA, 25 bp, probe
gagaaggcaaattcaggatgttaaa

SEQ ID NO: 66598 - DNA, 25 bp, probe
agagaaggcaaattcaggatgttaa

SEQ ID NO: 66599 - DNA, 25 bp, probe
cagaggacagactgactataccaga

SEQ ID NO: 66600 - DNA, 25 bp, probe
tagcagaggacagactgactatacc

SEQ ID NO: 66601 - DNA, 25 bp, probe
gaaggcaaattcaggatgttaaagg

SEQ ID NO: 66602 - DNA, 25 bp, probe
ggaaattcagttagaggagcaagag

SEQ ID NO: 66603 - DNA, 25 bp, probe
aaatcagagaaggcaaattcaggat

SEQ ID NO: 66604 - DNA, 25 bp, probe
cagagaaggcaaattcaggatgtta

SEQ ID NO: 66605 - DNA, 25 bp, probe
aggaaattcagttagaggagcaaga

SEQ ID NO: 66606 - DNA, 25 bp, probe
aatcagagaaggcaaattcaggatg

SEQ ID NO: 66607 - DNA, 25 bp, probe
gaaattcagttagaggagcaagagc

SEQ ID NO: 66608 - DNA, 25 bp, probe
gactagcagaggacagactgactat

SEQ ID NO: 66609 - DNA, 25 bp, probe
aattcaggatgttaaaggattacca

SEQ ID NO: 66610 - DNA, 25 bp, probe
ctttgtgtttgtgagagactagcag

SEQ ID NO: 66611 - DNA, 25 bp, probe
ctaaaggaaattcagttagaggagc

SEQ ID NO: 66612 - DNA, 25 bp, probe
ggcaagtagtccagaacttcttaat

SEQ ID NO: 66613 - DNA, 25 bp, probe
gcaagtagtccagaacttcttaatc

SEQ ID NO: 66614 - DNA, 25 bp, probe
gcaaattcaggatgttaaaggatta

SEQ ID NO: 66615 - DNA, 25 bp, probe
accgacagaaagaacaagagaaata

SEQ ID NO: 66616 - DNA, 25 bp, probe
aaccgacagaaagaacaagagaaat

SEQ ID NO: 66617 - DNA, 25 bp, probe
ccgacagaaagaacaagagaaatat

SEQ ID NO: 66618 - DNA, 25 bp, probe
caaccgacagaaagaacaagagaaa

SEQ ID NO: 66619 - DNA, 25 bp, probe
attcaaccgacagaaagaacaagag

SEQ ID NO: 66620 - DNA, 25 bp, probe
gattcaaccgacagaaagaacaaga

SEQ ID NO: 66621 - DNA, 25 bp, probe
agattcaaccgacagaaagaacaag

SEQ ID NO: 66622 - DNA, 25 bp, probe
cagattcaaccgacagaaagaacaa

SEQ ID NO: 66623 - DNA, 25 bp, probe
aaattccagaccctgaagatatgtc

SEQ ID NO: 66624 - DNA, 25 bp, probe
ctcagattcaaccgacagaaagaac

SEQ ID NO: 66625 - DNA, 25 bp, probe
tcaaccgacagaaagaacaagagaa

SEQ ID NO: 66626 - DNA, 25 bp, probe
ttcaaccgacagaaagaacaagaga

SEQ ID NO: 66627 - DNA, 25 bp, probe
tcagattcaaccgacagaaagaaca

SEQ ID NO: 66628 - DNA, 25 bp, probe
aattccagaccctgaagatatgtcc

SEQ ID NO: 66629 - DNA, 25 bp, probe
cgacagaaagaacaagagaaatatt

SEQ ID NO: 66630 - DNA, 25 bp, probe
catccagacattgttgctgagacag

SEQ ID NO: 66631 - DNA, 25 bp, probe
gctcagattcaaccgacagaaagaa

SEQ ID NO: 66632 - DNA, 25 bp, probe
atgctcagattcaaccgacagaaag

SEQ ID NO: 66633 - DNA, 25 bp, probe
gatgctcagattcaaccgacagaaa

SEQ ID NO: 66634 - DNA, 25 bp, probe
tgatgctcagattcaaccgacagaa

SEQ ID NO: 66635 - DNA, 25 bp, probe
gatgatatagcaatggcacgtcaaa

SEQ ID NO: 66636 - DNA, 25 bp, probe
tcatccagacattgttgctgagaca

SEQ ID NO: 66637 - DNA, 25 bp, probe
atgatatagcaatggcacgtcaaac

SEQ ID NO: 66638 - DNA, 25 bp, probe
ctcgatgatatagcaatggcacgtc

SEQ ID NO: 66639 - DNA, 25 bp, probe
cgatgatatagcaatggcacgtcaa

SEQ ID NO: 66640 - DNA, 25 bp, probe
gatatgtccctctgcctgtcagtaa

SEQ ID NO: 66641 - DNA, 25 bp, probe
attccagaccctgaagatatgtccc

SEQ ID NO: 66642 - DNA, 25 bp, probe
aaaattccagaccctgaagatatgt

SEQ ID NO: 66643 - DNA, 25 bp, probe
atatgtccctctgcctgtcagtaac

SEQ ID NO: 66644 - DNA, 25 bp, probe
gtgatgctcagattcaaccgacaga

SEQ ID NO: 66645 - DNA, 25 bp, probe
agtgatgctcagattcaaccgacag

SEQ ID NO: 66646 - DNA, 25 bp, probe
tgctcagattcaaccgacagaaaga

SEQ ID NO: 66647 - DNA, 25 bp, probe
ctgaagatatgtccctctgcctgtc

SEQ ID NO: 66648 - DNA, 25 bp, probe
tcgatgatatagcaatggcacgtca

SEQ ID NO: 66649 - DNA, 25 bp, probe
cagtgatgctcagattcaaccgaca

SEQ ID NO: 66650 - DNA, 25 bp, probe
agatatgtccctctgcctgtcagta

SEQ ID NO: 66651 - DNA, 25 bp, probe
gaagatatgtccctctgcctgtcag

SEQ ID NO: 66652 - DNA, 25 bp, probe
ttccagaccctgaagatatgtccct

SEQ ID NO: 66653 - DNA, 25 bp, probe
tgatatagcaatggcacgtcaaacc

SEQ ID NO: 66654 - DNA, 25 bp, probe
ctcatccagacattgttgctgagac

SEQ ID NO: 66655 - DNA, 25 bp, probe
tgaagatatgtccctctgcctgtca

SEQ ID NO: 66656 - DNA, 25 bp, probe
ccagaccctgaagatatgtccctct

SEQ ID NO: 66657 - DNA, 25 bp, probe
tccagaccctgaagatatgtccctc

SEQ ID NO: 66658 - DNA, 25 bp, probe
gatatagcaatggcacgtcaaaccc

SEQ ID NO: 66659 - DNA, 25 bp, probe
gacttcctctcagatttcatcatcc

SEQ ID NO: 66660 - DNA, 25 bp, probe
cagactatatcgctccagagatcct

SEQ ID NO: 66661 - DNA, 25 bp, probe
ggacttcctctcagatttcatcatc

SEQ ID NO: 66662 - DNA, 25 bp, probe
agactatatcgctccagagatcctc

SEQ ID NO: 66663 - DNA, 25 bp, probe
tggacttcctctcagatttcatcat

SEQ ID NO: 66664 - DNA, 25 bp, probe
ttgtggacttcctctcagatttcat

SEQ ID NO: 66665 - DNA, 25 bp, probe
cttcctctcagatttcatcatccga

SEQ ID NO: 66666 - DNA, 25 bp, probe
aaaggagggagaaccacagttaatt

SEQ ID NO: 66667 - DNA, 25 bp, probe
acttcctctcagatttcatcatccg

SEQ ID NO: 66668 - DNA, 25 bp, probe
gtggacttcctctcagatttcatca

SEQ ID NO: 66669 - DNA, 25 bp, probe
tgtggacttcctctcagatttcatc

SEQ ID NO: 66670 - DNA, 25 bp, probe
gatttcatcatccgagcattgtctg

SEQ ID NO: 66671 - DNA, 25 bp, probe
cagatttcatcatccgagcattgtc

SEQ ID NO: 66672 - DNA, 25 bp, probe
ccagactatatcgctccagagatcc

SEQ ID NO: 66673 - DNA, 25 bp, probe
aaggagggagaaccacagttaattc

SEQ ID NO: 66674 - DNA, 25 bp, probe
ttcctctcagatttcatcatccgag

SEQ ID NO: 66675 - DNA, 25 bp, probe
agatttcatcatccgagcattgtct

SEQ ID NO: 66676 - DNA, 25 bp, probe
gtgttgctctatgagatgctctgtg

SEQ ID NO: 66677 - DNA, 25 bp, probe
ctatatcgctccagagatcctccag

SEQ ID NO: 66678 - DNA, 25 bp, probe
gactatatcgctccagagatcctcc

SEQ ID NO: 66679 - DNA, 25 bp, probe
gttgtggacttcctctcagatttca

SEQ ID NO: 66680 - DNA, 25 bp, probe
tcagatttcatcatccgagcattgt

SEQ ID NO: 66681 - DNA, 25 bp, probe
caaaggagggagaaccacagttaat

SEQ ID NO: 66682 - DNA, 25 bp, probe
ctcagatttcatcatccgagcattg

SEQ ID NO: 66683 - DNA, 25 bp, probe
tctcagatttcatcatccgagcatt

SEQ ID NO: 66684 - DNA, 25 bp, probe
ctctcagatttcatcatccgagcat

SEQ ID NO: 66685 - DNA, 25 bp, probe
actatatcgctccagagatcctcca

SEQ ID NO: 66686 - DNA, 25 bp, probe
ggttgtggacttcctctcagatttc

SEQ ID NO: 66687 - DNA, 25 bp, probe
gccagactatatcgctccagagatc

SEQ ID NO: 66688 - DNA, 25 bp, probe
ttgctctatgagatgctctgtggtc

SEQ ID NO: 66689 - DNA, 25 bp, probe
caaagagatctgaaactggacaatg

SEQ ID NO: 66690 - DNA, 25 bp, probe
aaagagatctgaaactggacaatgt

SEQ ID NO: 66691 - DNA, 25 bp, probe
gttgctctatgagatgctctgtggt

SEQ ID NO: 66692 - DNA, 25 bp, probe
tgttgctctatgagatgctctgtgg

SEQ ID NO: 66693 - DNA, 25 bp, probe
acaaaggagggagaaccacagttaa

SEQ ID NO: 66694 - DNA, 25 bp, probe
tatatcgctccagagatcctccagg

SEQ ID NO: 66695 - DNA, 25 bp, probe
gactgtcaggtccaagtgtactgtt

SEQ ID NO: 66696 - DNA, 25 bp, probe
aggttgtggacttcctctcagattt

SEQ ID NO: 66697 - DNA, 25 bp, probe
cgtgttgctctatgagatgctctgt

SEQ ID NO: 66698 - DNA, 25 bp, probe
cttagccaccaaagagatctgaaac

SEQ ID NO: 66699 - DNA, 25 bp, probe
ttagccaccaaagagatctgaaact

SEQ ID NO: 66700 - DNA, 25 bp, probe
actgtcaggtccaagtgtactgttg

SEQ ID NO: 66701 - DNA, 25 bp, probe
gtaaactggcagacttcggaatgtg

SEQ ID NO: 66702 - DNA, 25 bp, probe
aagagatctgaaactggacaatgtc

SEQ ID NO: 66703 - DNA, 25 bp, probe
aataacgactctctctcctctctgt

SEQ ID NO: 66704 - DNA, 25 bp, probe
ataacgactctctctcctctctgtg

SEQ ID NO: 66705 - DNA, 25 bp, probe
aaataacgactctctctcctctctg

SEQ ID NO: 66706 - DNA, 25 bp, probe
gggaaaggcacactgttataaagag

SEQ ID NO: 66707 - DNA, 25 bp, probe
aaaggcacactgttataaagagctt

SEQ ID NO: 66708 - DNA, 25 bp, probe
gaaaggcacactgttataaagagct

SEQ ID NO: 66709 - DNA, 25 bp, probe
aaggcacactgttataaagagcttc

SEQ ID NO: 66710 - DNA, 25 bp, probe
ggaaaggcacactgttataaagagc

SEQ ID NO: 66711 - DNA, 25 bp, probe
taacgactctctctcctctctgtgg

SEQ ID NO: 66712 - DNA, 25 bp, probe
agtatgtcacctttgctgcttcttc

SEQ ID NO: 66713 - DNA, 25 bp, probe
aggcacactgttataaagagcttct

SEQ ID NO: 66714 - DNA, 25 bp, probe
aaaataacgactctctctcctctct

SEQ ID NO: 66715 - DNA, 25 bp, probe
aaagtagccccattcataagatgtc

SEQ ID NO: 66716 - DNA, 25 bp, probe
gaaagtagccccattcataagatgt

SEQ ID NO: 66717 - DNA, 25 bp, probe
tatgtcacctttgctgcttcttcac

SEQ ID NO: 66718 - DNA, 25 bp, probe
gtatgtcacctttgctgcttcttca

SEQ ID NO: 66719 - DNA, 25 bp, probe
aagtagccccattcataagatgtct

SEQ ID NO: 66720 - DNA, 25 bp, probe
tttcagtatgtcacctttgctgctt

SEQ ID NO: 66721 - DNA, 25 bp, probe
agtagccccattcataagatgtctg

SEQ ID NO: 66722 - DNA, 25 bp, probe
ggcacactgttataaagagcttctt

SEQ ID NO: 66723 - DNA, 25 bp, probe
agaccttttcagtatgtcacctttg

SEQ ID NO: 66724 - DNA, 25 bp, probe
cagaccttttcagtatgtcaccttt

SEQ ID NO: 66725 - DNA, 25 bp, probe
cattcataagatgtctgctgcccac

SEQ ID NO: 66726 - DNA, 25 bp, probe
cagtatgtcacctttgctgcttctt

SEQ ID NO: 66727 - DNA, 25 bp, probe
ttcagtatgtcacctttgctgcttc

SEQ ID NO: 66728 - DNA, 25 bp, probe
gactctctctcctctctgtggtctc

SEQ ID NO: 66729 - DNA, 25 bp, probe
accttttcagtatgtcacctttgct

SEQ ID NO: 66730 - DNA, 25 bp, probe
acagaccttttcagtatgtcacctt

SEQ ID NO: 66731 - DNA, 25 bp, probe
ctgcttcttcacacagatcttcaaa

SEQ ID NO: 66732 - DNA, 25 bp, probe
ccttttcagtatgtcacctttgctg

SEQ ID NO: 66733 - DNA, 25 bp, probe
gaccttttcagtatgtcacctttgc

SEQ ID NO: 66734 - DNA, 25 bp, probe
gctgcttcttcacacagatcttcaa

SEQ ID NO: 66735 - DNA, 25 bp, probe
ttgctgcttcttcacacagatcttc

SEQ ID NO: 66736 - DNA, 25 bp, probe
cacagaccttttcagtatgtcacct

SEQ ID NO: 66737 - DNA, 25 bp, probe
attcataagatgtctgctgcccaca

SEQ ID NO: 66738 - DNA, 25 bp, probe
tcagtatgtcacctttgctgcttct

SEQ ID NO: 66739 - DNA, 25 bp, probe
ttggggaaaggcacactgttataaa

SEQ ID NO: 66740 - DNA, 25 bp, probe
caggacacagaccttttcagtatgt

SEQ ID NO: 66741 - DNA, 25 bp, probe
acacagaccttttcagtatgtcacc

SEQ ID NO: 66742 - DNA, 25 bp, probe
gtagccccattcataagatgtctgc

SEQ ID NO: 66743 - DNA, 25 bp, probe
ggggaaaggcacactgttataaaga

SEQ ID NO: 66744 - DNA, 25 bp, probe
ttcataagatgtctgctgcccacaa

SEQ ID NO: 66745 - DNA, 25 bp, probe
cttttcagtatgtcacctttgctgc

SEQ ID NO: 66746 - DNA, 25 bp, probe
tggggaaaggcacactgttataaag

SEQ ID NO: 66747 - DNA, 25 bp, probe
catctctggagactcatctcaggac

SEQ ID NO: 66748 - DNA, 25 bp, probe
gacatctctggagactcatctcagg

SEQ ID NO: 66749 - DNA, 25 bp, probe
ggacatctctggagactcatctcag

SEQ ID NO: 66750 - DNA, 25 bp, probe
acatctctggagactcatctcagga

SEQ ID NO: 66751 - DNA, 25 bp, probe
caggtcacatccggctcacatattt

SEQ ID NO: 66752 - DNA, 25 bp, probe
gggacatctctggagactcatctca

SEQ ID NO: 66753 - DNA, 25 bp, probe
gtcacatccggctcacatattttgg

SEQ ID NO: 66754 - DNA, 25 bp, probe
ggtcacatccggctcacatattttg

SEQ ID NO: 66755 - DNA, 25 bp, probe
aggtcacatccggctcacatatttt

SEQ ID NO: 66756 - DNA, 25 bp, probe
aggagaggttgaagagagagattaa

SEQ ID NO: 66757 - DNA, 25 bp, probe
caggagaggttgaagagagagatta

SEQ ID NO: 66758 - DNA, 25 bp, probe
ggagaggttgaagagagagattaac

SEQ ID NO: 66759 - DNA, 25 bp, probe
gagaggttgaagagagagattaaca

SEQ ID NO: 66760 - DNA, 25 bp, probe
agaggttgaagagagagattaacaa

SEQ ID NO: 66761 - DNA, 25 bp, probe
ccaggagaggttgaagagagagatt

SEQ ID NO: 66762 - DNA, 25 bp, probe
gaacgacaccaaagagatgaagaaa

SEQ ID NO: 66763 - DNA, 25 bp, probe
ttgaagagagagattaacaactccc

SEQ ID NO: 66764 - DNA, 25 bp, probe
gaagagagagattaacaactcccac

SEQ ID NO: 66765 - DNA, 25 bp, probe
gagagagattaacaactcccacatc

SEQ ID NO: 66766 - DNA, 25 bp, probe
tgaagagagagattaacaactccca

SEQ ID NO: 66767 - DNA, 25 bp, probe
agagagagattaacaactcccacat

SEQ ID NO: 66768 - DNA, 25 bp, probe
aagagagagattaacaactcccaca

SEQ ID NO: 66769 - DNA, 25 bp, probe
agaacgacaccaaagagatgaagaa

SEQ ID NO: 66770 - DNA, 25 bp, probe
agagagattaacaactcccacatcc

SEQ ID NO: 66771 - DNA, 25 bp, probe
gagaacgacaccaaagagatgaaga

SEQ ID NO: 66772 - DNA, 25 bp, probe
agagattaacaactcccacatccag

SEQ ID NO: 66773 - DNA, 25 bp, probe
gagagattaacaactcccacatcca

SEQ ID NO: 66774 - DNA, 25 bp, probe
gagattaacaactcccacatccagg

SEQ ID NO: 66775 - DNA, 25 bp, probe
ggagaacgacaccaaagagatgaag

SEQ ID NO: 66776 - DNA, 25 bp, probe
aggttgaagagagagattaacaact

SEQ ID NO: 66777 - DNA, 25 bp, probe
gttgaagagagagattaacaactcc

SEQ ID NO: 66778 - DNA, 25 bp, probe
ggttgaagagagagattaacaactc

SEQ ID NO: 66779 - DNA, 25 bp, probe
gaggttgaagagagagattaacaac

SEQ ID NO: 66780 - DNA, 25 bp, probe
attaacaactcccacatccaggaag

SEQ ID NO: 66781 - DNA, 25 bp, probe
gattaacaactcccacatccaggaa

SEQ ID NO: 66782 - DNA, 25 bp, probe
aacgacaccaaagagatgaagaaaa

SEQ ID NO: 66783 - DNA, 25 bp, probe
taacaactcccacatccaggaagta

SEQ ID NO: 66784 - DNA, 25 bp, probe
agattaacaactcccacatccagga

SEQ ID NO: 66785 - DNA, 25 bp, probe
gaccaaagtcaccacagacaagatg

SEQ ID NO: 66786 - DNA, 25 bp, probe
ttaacaactcccacatccaggaagt

SEQ ID NO: 66787 - DNA, 25 bp, probe
ctggaacagatacgggagatggaaa

SEQ ID NO: 66788 - DNA, 25 bp, probe
ggaacagatacgggagatggaaaag

SEQ ID NO: 66789 - DNA, 25 bp, probe
cccaggagaggttgaagagagagat

SEQ ID NO: 66790 - DNA, 25 bp, probe
aacaactcccacatccaggaagtag

SEQ ID NO: 66791 - DNA, 25 bp, probe
catccaggaagtagtgcaggtgatc

SEQ ID NO: 66792 - DNA, 25 bp, probe
cggagaacgacaccaaagagatgaa

SEQ ID NO: 66793 - DNA, 25 bp, probe
gaacagatacgggagatggaaaagc

SEQ ID NO: 66794 - DNA, 25 bp, probe
tggaacagatacgggagatggaaaa

SEQ ID NO: 66795 - DNA, 25 bp, probe
aaagctggagacaaagagactggag

SEQ ID NO: 66796 - DNA, 25 bp, probe
gatcaagcagatgacggagaacttg

SEQ ID NO: 66797 - DNA, 25 bp, probe
gatacgggagatggaaaagcagttc

SEQ ID NO: 66798 - DNA, 25 bp, probe
agatacgggagatggaaaagcagtt

SEQ ID NO: 66799 - DNA, 25 bp, probe
tgatcaagcagatgacggagaactt

SEQ ID NO: 66800 - DNA, 25 bp, probe
gaaattgaaattctggcttgggatg

SEQ ID NO: 66801 - DNA, 25 bp, probe
tgaaattgaaattctggcttgggat

SEQ ID NO: 66802 - DNA, 25 bp, probe
cagtgaaattgaaattctggcttgg

SEQ ID NO: 66803 - DNA, 25 bp, probe
gtgaaattgaaattctggcttggga

SEQ ID NO: 66804 - DNA, 25 bp, probe
agtgaaattgaaattctggcttggg

SEQ ID NO: 66805 - DNA, 25 bp, probe
aaagtggttaaacaaactctcattt

SEQ ID NO: 66806 - DNA, 25 bp, probe
gcagtgaaattgaaattctggcttg

SEQ ID NO: 66807 - DNA, 25 bp, probe
atttgactgtgagaactcatcgaaa

SEQ ID NO: 66808 - DNA, 25 bp, probe
aaattgaaattctggcttgggatgc

SEQ ID NO: 66809 - DNA, 25 bp, probe
catttgactgtgagaactcatcgaa

SEQ ID NO: 66810 - DNA, 25 bp, probe
tttgactgtgagaactcatcgaaac

SEQ ID NO: 66811 - DNA, 25 bp, probe
tcatttgactgtgagaactcatcga

SEQ ID NO: 66812 - DNA, 25 bp, probe
gtggttaaacaaactctcatttgac

SEQ ID NO: 66813 - DNA, 25 bp, probe
tggttaaacaaactctcatttgact

SEQ ID NO: 66814 - DNA, 25 bp, probe
agtggttaaacaaactctcatttga

SEQ ID NO: 66815 - DNA, 25 bp, probe
aattgaaattctggcttgggatgct

SEQ ID NO: 66816 - DNA, 25 bp, probe
ataaaattatacagccaggtgggaa

SEQ ID NO: 66817 - DNA, 25 bp, probe
gataaaattatacagccaggtggga

SEQ ID NO: 66818 - DNA, 25 bp, probe
ttgactgtgagaactcatcgaaact

SEQ ID NO: 66819 - DNA, 25 bp, probe
taaaattatacagccaggtgggaag

SEQ ID NO: 66820 - DNA, 25 bp, probe
tgataaaattatacagccaggtggg

SEQ ID NO: 66821 - DNA, 25 bp, probe
taaacaaactctcatttgactgtga

SEQ ID NO: 66822 - DNA, 25 bp, probe
ggttaaacaaactctcatttgactg

SEQ ID NO: 66823 - DNA, 25 bp, probe
atgataaaattatacagccaggtgg

SEQ ID NO: 66824 - DNA, 25 bp, probe
agcagtgaaattgaaattctggctt

SEQ ID NO: 66825 - DNA, 25 bp, probe
aagtggttaaacaaactctcatttg

SEQ ID NO: 66826 - DNA, 25 bp, probe
ttaaacaaactctcatttgactgtg

SEQ ID NO: 66827 - DNA, 25 bp, probe
gttaaacaaactctcatttgactgt

SEQ ID NO: 66828 - DNA, 25 bp, probe
tgactgtgagaactcatcgaaactg

SEQ ID NO: 66829 - DNA, 25 bp, probe
tgatgataaaattatacagccaggt

SEQ ID NO: 66830 - DNA, 25 bp, probe
gatgataaaattatacagccaggtg

SEQ ID NO: 66831 - DNA, 25 bp, probe
attgaaattctggcttgggatgctg

SEQ ID NO: 66832 - DNA, 25 bp, probe
aaaagtggttaaacaaactctcatt

SEQ ID NO: 66833 - DNA, 25 bp, probe
aaacaaactctcatttgactgtgag

SEQ ID NO: 66834 - DNA, 25 bp, probe
aaattatacagccaggtgggaagca

SEQ ID NO: 66835 - DNA, 25 bp, probe
gactgtgagaactcatcgaaactgg

SEQ ID NO: 66836 - DNA, 25 bp, probe
actggggaaccatgatgataaaatt

SEQ ID NO: 66837 - DNA, 25 bp, probe
aactggggaaccatgatgataaaat

SEQ ID NO: 66838 - DNA, 25 bp, probe
aaactggggaaccatgatgataaaa

SEQ ID NO: 66839 - DNA, 25 bp, probe
gaaattctggcttgggatgctgatg

SEQ ID NO: 66840 - DNA, 25 bp, probe
atgatgataaaattatacagccagg

SEQ ID NO: 66841 - DNA, 25 bp, probe
gaaactggggaaccatgatgataaa

SEQ ID NO: 66842 - DNA, 25 bp, probe
ctggggaaccatgatgataaaatta

SEQ ID NO: 66843 - DNA, 25 bp, probe
ctcatttgactgtgagaactcatcg

SEQ ID NO: 66844 - DNA, 25 bp, probe
taatctggaccgttctgataacatt

SEQ ID NO: 66845 - DNA, 25 bp, probe
gtaatctggaccgttctgataacat

SEQ ID NO: 66846 - DNA, 25 bp, probe
ttgtaatctggaccgttctgataac

SEQ ID NO: 66847 - DNA, 25 bp, probe
gcctaatgacttcttactgaatgat

SEQ ID NO: 66848 - DNA, 25 bp, probe
aagatacctctgagttgtctctact

SEQ ID NO: 66849 - DNA, 25 bp, probe
caagatacctctgagttgtctctac

SEQ ID NO: 66850 - DNA, 25 bp, probe
gcaagatacctctgagttgtctcta

SEQ ID NO: 66851 - DNA, 25 bp, probe
cacattcaccattagtaccactctc

SEQ ID NO: 66852 - DNA, 25 bp, probe
tgtaatctggaccgttctgataaca

SEQ ID NO: 66853 - DNA, 25 bp, probe
acattcaccattagtaccactctcc

SEQ ID NO: 66854 - DNA, 25 bp, probe
tttgtaatctggaccgttctgataa

SEQ ID NO: 66855 - DNA, 25 bp, probe
ctttgtaatctggaccgttctgata

SEQ ID NO: 66856 - DNA, 25 bp, probe
aatctggaccgttctgataacattt

SEQ ID NO: 66857 - DNA, 25 bp, probe
gtctctactcaagtctttggatgtt

SEQ ID NO: 66858 - DNA, 25 bp, probe
ttgtctctactcaagtctttggatg

SEQ ID NO: 66859 - DNA, 25 bp, probe
gttgtctctactcaagtctttggat

SEQ ID NO: 66860 - DNA, 25 bp, probe
aaagcattcattctgtgggattctt

SEQ ID NO: 66861 - DNA, 25 bp, probe
gcacattcaccattagtaccactct

SEQ ID NO: 66862 - DNA, 25 bp, probe
tctctactcaagtctttggatgtta

SEQ ID NO: 66863 - DNA, 25 bp, probe
tgtctctactcaagtctttggatgt

SEQ ID NO: 66864 - DNA, 25 bp, probe
gaaagcattcattctgtgggattct

SEQ ID NO: 66865 - DNA, 25 bp, probe
agttgtctctactcaagtctttgga

SEQ ID NO: 66866 - DNA, 25 bp, probe
acttcttactgaatgatcccaatga

SEQ ID NO: 66867 - DNA, 25 bp, probe
tgacttcttactgaatgatcccaat

SEQ ID NO: 66868 - DNA, 25 bp, probe
atgacttcttactgaatgatcccaa

SEQ ID NO: 66869 - DNA, 25 bp, probe
aatgacttcttactgaatgatccca

SEQ ID NO: 66870 - DNA, 25 bp, probe
gacttcttactgaatgatcccaatg

SEQ ID NO: 66871 - DNA, 25 bp, probe
cattcaccattagtaccactctccg

SEQ ID NO: 66872 - DNA, 25 bp, probe
ctaatgacttcttactgaatgatcc

SEQ ID NO: 66873 - DNA, 25 bp, probe
cctaatgacttcttactgaatgatc

SEQ ID NO: 66874 - DNA, 25 bp, probe
aagcattcattctgtgggattcttg

SEQ ID NO: 66875 - DNA, 25 bp, probe
cttcttactgaatgatcccaatgaa

SEQ ID NO: 66876 - DNA, 25 bp, probe
ctctactcaagtctttggatgttaa

SEQ ID NO: 66877 - DNA, 25 bp, probe
gaaatgggaagacatgatgaccttt

SEQ ID NO: 66878 - DNA, 25 bp, probe
gaggcacattcaccattagtaccac

SEQ ID NO: 66879 - DNA, 25 bp, probe
aatggagatgtcaattgtggtagaa

SEQ ID NO: 66880 - DNA, 25 bp, probe
ttggcctaatgacttcttactgaat

SEQ ID NO: 66881 - DNA, 25 bp, probe
atgttggcctaatgacttcttactg

SEQ ID NO: 66882 - DNA, 25 bp, probe
ttcttactgaatgatcccaatgaaa

SEQ ID NO: 66883 - DNA, 25 bp, probe
ggcctaatgacttcttactgaatga

SEQ ID NO: 66884 - DNA, 25 bp, probe
ggagatgtcaattgtggtagaagaa

SEQ ID NO: 66885 - DNA, 25 bp, probe
atggagatgtcaattgtggtagaag

SEQ ID NO: 66886 - DNA, 25 bp, probe
gaatggagatgtcaattgtggtaga

SEQ ID NO: 66887 - DNA, 25 bp, probe
tggcctaatgacttcttactgaatg

SEQ ID NO: 66888 - DNA, 25 bp, probe
gattaccactgagacatccatcatc

SEQ ID NO: 66889 - DNA, 25 bp, probe
attaccactgagacatccatcatca

SEQ ID NO: 66890 - DNA, 25 bp, probe
actaacttggacctcactccttata

SEQ ID NO: 66891 - DNA, 25 bp, probe
ttaccactgagacatccatcatcac

SEQ ID NO: 66892 - DNA, 25 bp, probe
ctaacttggacctcactccttatat

SEQ ID NO: 66893 - DNA, 25 bp, probe
gaagctgagaacggatattcattac

SEQ ID NO: 66894 - DNA, 25 bp, probe
taacttggacctcactccttatatt

SEQ ID NO: 66895 - DNA, 25 bp, probe
ggaagctgagaacggatattcatta

SEQ ID NO: 66896 - DNA, 25 bp, probe
cggatattcattacccactcactaa

SEQ ID NO: 66897 - DNA, 25 bp, probe
cactaacttggacctcactccttat

SEQ ID NO: 66898 - DNA, 25 bp, probe
aagctgagaacggatattcattacc

SEQ ID NO: 66899 - DNA, 25 bp, probe
acctcactccttatatttgctcaat

SEQ ID NO: 66900 - DNA, 25 bp, probe
gacctcactccttatatttgctcaa

SEQ ID NO: 66901 - DNA, 25 bp, probe
acggatattcattacccactcacta

SEQ ID NO: 66902 - DNA, 25 bp, probe
ggatattcattacccactcactaac

SEQ ID NO: 66903 - DNA, 25 bp, probe
cctcactccttatatttgctcaatt

SEQ ID NO: 66904 - DNA, 25 bp, probe
aacggatattcattacccactcact

SEQ ID NO: 66905 - DNA, 25 bp, probe
gaacggatattcattacccactcac

SEQ ID NO: 66906 - DNA, 25 bp, probe
agaacggatattcattacccactca

SEQ ID NO: 66907 - DNA, 25 bp, probe
tattcattacccactcactaacttg

SEQ ID NO: 66908 - DNA, 25 bp, probe
aggaagctgagaacggatattcatt

SEQ ID NO: 66909 - DNA, 25 bp, probe
aaggaagctgagaacggatattcat

SEQ ID NO: 66910 - DNA, 25 bp, probe
ctgagaacggatattcattacccac

SEQ ID NO: 66911 - DNA, 25 bp, probe
tcactaacttggacctcactcctta

SEQ ID NO: 66912 - DNA, 25 bp, probe
gagaacggatattcattacccactc

SEQ ID NO: 66913 - DNA, 25 bp, probe
ccatccaaatatgaatgctcccttc

SEQ ID NO: 66914 - DNA, 25 bp, probe
tgagaacggatattcattacccact

SEQ ID NO: 66915 - DNA, 25 bp, probe
gatattcattacccactcactaact

SEQ ID NO: 66916 - DNA, 25 bp, probe
catccaaatatgaatgctcccttcg

SEQ ID NO: 66917 - DNA, 25 bp, probe
tccatccaaatatgaatgctccctt

SEQ ID NO: 66918 - DNA, 25 bp, probe
ttccatccaaatatgaatgctccct

SEQ ID NO: 66919 - DNA, 25 bp, probe
ctacaagaacgaagtcttcactgtc

SEQ ID NO: 66920 - DNA, 25 bp, probe
aatatcctaaatacaacctctgtgc

SEQ ID NO: 66921 - DNA, 25 bp, probe
tacaagaacgaagtcttcactgtct

SEQ ID NO: 66922 - DNA, 25 bp, probe
acttggacctcactccttatatttg

SEQ ID NO: 66923 - DNA, 25 bp, probe
aacttggacctcactccttatattt

SEQ ID NO: 66924 - DNA, 25 bp, probe
cgtatgtttaaagtgtgagaaatgc

SEQ ID NO: 66925 - DNA, 25 bp, probe
cagctcaattatagcatcgtatgtt

SEQ ID NO: 66926 - DNA, 25 bp, probe
gcatcgtatgtttaaagtgtgagaa

SEQ ID NO: 66927 - DNA, 25 bp, probe
taccactgagacatccatcatcacc

SEQ ID NO: 66928 - DNA, 25 bp, probe
agcatcgtatgtttaaagtgtgaga

SEQ ID NO: 66929 - DNA, 25 bp, probe
atattcattacccactcactaactt

SEQ ID NO: 66930 - DNA, 25 bp, probe
aaaggtttgacattcagggtacaac

SEQ ID NO: 66931 - DNA, 25 bp, probe
attcattacccactcactaacttgg

SEQ ID NO: 66932 - DNA, 25 bp, probe
tctacagcacggattattacaggat

SEQ ID NO: 66933 - DNA, 25 bp, probe
ctgataactactgacttcactggag

SEQ ID NO: 66934 - DNA, 25 bp, probe
tgataactactgacttcactggagt

SEQ ID NO: 66935 - DNA, 25 bp, probe
caggatctatgtaggtgttgatgaa

SEQ ID NO: 66936 - DNA, 25 bp, probe
agcacggattattacaggatctatg

SEQ ID NO: 66937 - DNA, 25 bp, probe
cagcacggattattacaggatctat

SEQ ID NO: 66938 - DNA, 25 bp, probe
ctacagcacggattattacaggatc

SEQ ID NO: 66939 - DNA, 25 bp, probe
gtctacagcacggattattacagga

SEQ ID NO: 66940 - DNA, 25 bp, probe
acagcacggattattacaggatcta

SEQ ID NO: 66941 - DNA, 25 bp, probe
tacagcacggattattacaggatct

SEQ ID NO: 66942 - DNA, 25 bp, probe
atgagcacattgtcaagttctatgg

SEQ ID NO: 66943 - DNA, 25 bp, probe
gagcacattgtcaagttctatggag

SEQ ID NO: 66944 - DNA, 25 bp, probe
acattgtcaagttctatggagtgtg

SEQ ID NO: 66945 - DNA, 25 bp, probe
gcacggattattacaggatctatgt

SEQ ID NO: 66946 - DNA, 25 bp, probe
catgagcacattgtcaagttctatg

SEQ ID NO: 66947 - DNA, 25 bp, probe
gctgataactactgacttcactgga

SEQ ID NO: 66948 - DNA, 25 bp, probe
cattgtcaagttctatggagtgtgc

SEQ ID NO: 66949 - DNA, 25 bp, probe
acaggatctatgtaggtgttgatga

SEQ ID NO: 66950 - DNA, 25 bp, probe
gaagcatggagacctgaataagttc

SEQ ID NO: 66951 - DNA, 25 bp, probe
cacattgtcaagttctatggagtgt

SEQ ID NO: 66952 - DNA, 25 bp, probe
agcacattgtcaagttctatggagt

SEQ ID NO: 66953 - DNA, 25 bp, probe
attatgccaagctgataactactga

SEQ ID NO: 66954 - DNA, 25 bp, probe
tgattatgccaagctgataactact

SEQ ID NO: 66955 - DNA, 25 bp, probe
tgaagcatggagacctgaataagtt

SEQ ID NO: 66956 - DNA, 25 bp, probe
atgaagcatggagacctgaataagt

SEQ ID NO: 66957 - DNA, 25 bp, probe
gattatgccaagctgataactactg

SEQ ID NO: 66958 - DNA, 25 bp, probe
ttatgccaagctgataactactgac

SEQ ID NO: 66959 - DNA, 25 bp, probe
tgagcacattgtcaagttctatgga

SEQ ID NO: 66960 - DNA, 25 bp, probe
tatgccaagctgataactactgact

SEQ ID NO: 66961 - DNA, 25 bp, probe
aagctgataactactgacttcactg

SEQ ID NO: 66962 - DNA, 25 bp, probe
caagctgataactactgacttcact

SEQ ID NO: 66963 - DNA, 25 bp, probe
ttgattatgccaagctgataactac

SEQ ID NO: 66964 - DNA, 25 bp, probe
tgtgaaaggcagatgtttgattatg

SEQ ID NO: 66965 - DNA, 25 bp, probe
gcatgagcacattgtcaagttctat

SEQ ID NO: 66966 - DNA, 25 bp, probe
ccaagctgataactactgacttcac

SEQ ID NO: 66967 - DNA, 25 bp, probe
gcacattgtcaagttctatggagtg

SEQ ID NO: 66968 - DNA, 25 bp, probe
tacaggatctatgtaggtgttgatg

SEQ ID NO: 66969 - DNA, 25 bp, probe
atgccaagctgataactactgactt

SEQ ID NO: 66970 - DNA, 25 bp, probe
agctgataactactgacttcactgg

SEQ ID NO: 66971 - DNA, 25 bp, probe
catggagacctgaataagttcctca

SEQ ID NO: 66972 - DNA, 25 bp, probe
aggatctatgtaggtgttgatgaaa

SEQ ID NO: 66973 - DNA, 25 bp, probe
attgtcaagttctatggagtgtgcg

SEQ ID NO: 66974 - DNA, 25 bp, probe
ttacaggatctatgtaggtgttgat

SEQ ID NO: 66975 - DNA, 25 bp, probe
attacaggatctatgtaggtgttga

SEQ ID NO: 66976 - DNA, 25 bp, probe
ttctgagaaacttggatttgaggag

SEQ ID NO: 66977 - DNA, 25 bp, probe
gttctgagaaacttggatttgagga

SEQ ID NO: 66978 - DNA, 25 bp, probe
ggttctgagaaacttggatttgagg

SEQ ID NO: 66979 - DNA, 25 bp, probe
gggttctgagaaacttggatttgag

SEQ ID NO: 66980 - DNA, 25 bp, probe
ctgggttctgagaaacttggatttg

SEQ ID NO: 66981 - DNA, 25 bp, probe
tctgagaaacttggatttgaggagc

SEQ ID NO: 66982 - DNA, 25 bp, probe
tgggttctgagaaacttggatttga

SEQ ID NO: 66983 - DNA, 25 bp, probe
cctgggttctgagaaacttggattt

SEQ ID NO: 66984 - DNA, 25 bp, probe
ctgagaaacttggatttgaggagct

SEQ ID NO: 66985 - DNA, 25 bp, probe
tgagaaacttggatttgaggagctg

SEQ ID NO: 66986 - DNA, 25 bp, probe
gagaaacttggatttgaggagctgg

SEQ ID NO: 66987 - DNA, 25 bp, probe
gaaacttggatttgaggagctggac

SEQ ID NO: 66988 - DNA, 25 bp, probe
agaaacttggatttgaggagctgga

SEQ ID NO: 66989 - DNA, 25 bp, probe
ccctgggttctgagaaacttggatt

SEQ ID NO: 66990 - DNA, 25 bp, probe
aaacttggatttgaggagctggaca

SEQ ID NO: 66991 - DNA, 25 bp, probe
aacttggatttgaggagctggacaa

SEQ ID NO: 66992 - DNA, 25 bp, probe
acttggatttgaggagctggacaag

SEQ ID NO: 66993 - DNA, 25 bp, probe
tgagaatctgttccattacttgact

SEQ ID NO: 66994 - DNA, 25 bp, probe
agaaggttgctccatatcatattca

SEQ ID NO: 66995 - DNA, 25 bp, probe
atgagaatctgttccattacttgac

SEQ ID NO: 66996 - DNA, 25 bp, probe
gaagagaaggttgctccatatcata

SEQ ID NO: 66997 - DNA, 25 bp, probe
gaaggttgctccatatcatattcaa

SEQ ID NO: 66998 - DNA, 25 bp, probe
agagaaggttgctccatatcatatt

SEQ ID NO: 66999 - DNA, 25 bp, probe
aagagaaggttgctccatatcatat

SEQ ID NO: 67000 - DNA, 25 bp, probe
aattgtagaagtgaggaccttgagt

SEQ ID NO: 67001 - DNA, 25 bp, probe
gagaaggttgctccatatcatattc

SEQ ID NO: 67002 - DNA, 25 bp, probe
agaagagaaggttgctccatatcat

SEQ ID NO: 67003 - DNA, 25 bp, probe
aaggttgctccatatcatattcaat

SEQ ID NO: 67004 - DNA, 25 bp, probe
aatggatgtctggtacaacttagag

SEQ ID NO: 67005 - DNA, 25 bp, probe
attgtagaagtgaggaccttgagtg

SEQ ID NO: 67006 - DNA, 25 bp, probe
catgagaatctgttccattacttga

SEQ ID NO: 67007 - DNA, 25 bp, probe
atggatgtctggtacaacttagaga

SEQ ID NO: 67008 - DNA, 25 bp, probe
gagaagagaaggttgctccatatca

SEQ ID NO: 67009 - DNA, 25 bp, probe
tggatgtctggtacaacttagagaa

SEQ ID NO: 67010 - DNA, 25 bp, probe
acatgagaatctgttccattacttg

SEQ ID NO: 67011 - DNA, 25 bp, probe
gtcataactccacagatcgaatcaa

SEQ ID NO: 67012 - DNA, 25 bp, probe
aggttgctccatatcatattcaata

SEQ ID NO: 67013 - DNA, 25 bp, probe
cagagtatgggatgaagatgatgat

SEQ ID NO: 67014 - DNA, 25 bp, probe
attaaatccagagtcaagcaacatt

SEQ ID NO: 67015 - DNA, 25 bp, probe
atccagagtcaagcaacatttcaaa

SEQ ID NO: 67016 - DNA, 25 bp, probe
aatccagagtcaagcaacatttcaa

SEQ ID NO: 67017 - DNA, 25 bp, probe
cgaatcaaagtcagagtatgggatg

SEQ ID NO: 67018 - DNA, 25 bp, probe
aaagtcagagtatgggatgaagatg

SEQ ID NO: 67019 - DNA, 25 bp, probe
caaagtcagagtatgggatgaagat

SEQ ID NO: 67020 - DNA, 25 bp, probe
atcaaagtcagagtatgggatgaag

SEQ ID NO: 67021 - DNA, 25 bp, probe
gaatcaaagtcagagtatgggatga

SEQ ID NO: 67022 - DNA, 25 bp, probe
aatcaaagtcagagtatgggatgaa

SEQ ID NO: 67023 - DNA, 25 bp, probe
atgttacagttcaagttggaaagaa

SEQ ID NO: 67024 - DNA, 25 bp, probe
tcagagtatgggatgaagatgatga

SEQ ID NO: 67025 - DNA, 25 bp, probe
gtcagagtatgggatgaagatgatg

SEQ ID NO: 67026 - DNA, 25 bp, probe
agtcagagtatgggatgaagatgat

SEQ ID NO: 67027 - DNA, 25 bp, probe
tattaaatccagagtcaagcaacat

SEQ ID NO: 67028 - DNA, 25 bp, probe
atattaaatccagagtcaagcaaca

SEQ ID NO: 67029 - DNA, 25 bp, probe
aagtcagagtatgggatgaagatga

SEQ ID NO: 67030 - DNA, 25 bp, probe
agagtatgggatgaagatgatgata

SEQ ID NO: 67031 - DNA, 25 bp, probe
tcaaagtcagagtatgggatgaaga

SEQ ID NO: 67032 - DNA, 25 bp, probe
tgtcataactccacagatcgaatca

SEQ ID NO: 67033 - DNA, 25 bp, probe
taaatccagagtcaagcaacatttc

SEQ ID NO: 67034 - DNA, 25 bp, probe
tacatgagaatctgttccattactt

SEQ ID NO: 67035 - DNA, 25 bp, probe
ttacatgagaatctgttccattact

SEQ ID NO: 67036 - DNA, 25 bp, probe
ttaaatccagagtcaagcaacattt

SEQ ID NO: 67037 - DNA, 25 bp, probe
tccgttgatgtgttgtctagtatag

SEQ ID NO: 67038 - DNA, 25 bp, probe
gtgatgagtcttcagtagagatgtt

SEQ ID NO: 67039 - DNA, 25 bp, probe
atccgttgatgtgttgtctagtata

SEQ ID NO: 67040 - DNA, 25 bp, probe
tatccgttgatgtgttgtctagtat

SEQ ID NO: 67041 - DNA, 25 bp, probe
atatccgttgatgtgttgtctagta

SEQ ID NO: 67042 - DNA, 25 bp, probe
gtgtgatgagtcttcagtagagatg

SEQ ID NO: 67043 - DNA, 25 bp, probe
tgtgatgagtcttcagtagagatgt

SEQ ID NO: 67044 - DNA, 25 bp, probe
gaatggtgtgatgagtcttcagtag

SEQ ID NO: 67045 - DNA, 25 bp, probe
ttgttgatgtcgtatcttatgctgc

SEQ ID NO: 67046 - DNA, 25 bp, probe
tgtgcgattcatcatatatcattgg

SEQ ID NO: 67047 - DNA, 25 bp, probe
aatggtgtgatgagtcttcagtaga

SEQ ID NO: 67048 - DNA, 25 bp, probe
agaatggtgtgatgagtcttcagta

SEQ ID NO: 67049 - DNA, 25 bp, probe
gtgcgattcatcatatatcattgga

SEQ ID NO: 67050 - DNA, 25 bp, probe
ggtgtgatgagtcttcagtagagat

SEQ ID NO: 67051 - DNA, 25 bp, probe
atggtgtgatgagtcttcagtagag

SEQ ID NO: 67052 - DNA, 25 bp, probe
gtgtgcgattcatcatatatcattg

SEQ ID NO: 67053 - DNA, 25 bp, probe
ttgatgtcgtatcttatgctgcgta

SEQ ID NO: 67054 - DNA, 25 bp, probe
agtgtgcgattcatcatatatcatt

SEQ ID NO: 67055 - DNA, 25 bp, probe
tgcgattcatcatatatcattggat

SEQ ID NO: 67056 - DNA, 25 bp, probe
ccgttgatgtgttgtctagtataga

SEQ ID NO: 67057 - DNA, 25 bp, probe
ggaattatagtgtgcgattcatcat

SEQ ID NO: 67058 - DNA, 25 bp, probe
tagtgtgcgattcatcatatatcat

SEQ ID NO: 67059 - DNA, 25 bp, probe
atagtgtgcgattcatcatatatca

SEQ ID NO: 67060 - DNA, 25 bp, probe
tggtgtgatgagtcttcagtagaga

SEQ ID NO: 67061 - DNA, 25 bp, probe
tttgttgatgtcgtatcttatgctg

SEQ ID NO: 67062 - DNA, 25 bp, probe
cagaatggtgtgatgagtcttcagt

SEQ ID NO: 67063 - DNA, 25 bp, probe
tgatgtgttgtctagtatagaagga

SEQ ID NO: 67064 - DNA, 25 bp, probe
cgttgatgtgttgtctagtatagaa

SEQ ID NO: 67065 - DNA, 25 bp, probe
gatatccgttgatgtgttgtctagt

SEQ ID NO: 67066 - DNA, 25 bp, probe
tgatatccgttgatgtgttgtctag

SEQ ID NO: 67067 - DNA, 25 bp, probe
gatgtgttgtctagtatagaaggac

SEQ ID NO: 67068 - DNA, 25 bp, probe
gtgatatccgttgatgtgttgtcta

SEQ ID NO: 67069 - DNA, 25 bp, probe
agtaaacacaagaggacaggttaag

SEQ ID NO: 67070 - DNA, 25 bp, probe
gcgattcatcatatatcattggatt

SEQ ID NO: 67071 - DNA, 25 bp, probe
tatgctagtaaacacaagaggacag

SEQ ID NO: 67072 - DNA, 25 bp, probe
gatgtcgtatcttatgctgcgtact

SEQ ID NO: 67073 - DNA, 25 bp, probe
tagtaaacacaagaggacaggttaa

SEQ ID NO: 67074 - DNA, 25 bp, probe
atatgctagtaaacacaagaggaca

SEQ ID NO: 67075 - DNA, 25 bp, probe
ccaatatgctagtaaacacaagagg

SEQ ID NO: 67076 - DNA, 25 bp, probe
cctccaatatgctagtaaacacaag

SEQ ID NO: 67077 - DNA, 25 bp, probe
ccctccaatatgctagtaaacacaa

SEQ ID NO: 67078 - DNA, 25 bp, probe
gttagacagatgcagatacagcttg

SEQ ID NO: 67079 - DNA, 25 bp, probe
ttactgggaattatagtgtgcgatt

SEQ ID NO: 67080 - DNA, 25 bp, probe
attactgggaattatagtgtgcgat

SEQ ID NO: 67081 - DNA, 25 bp, probe
caacaaacatcacccatacagatta

SEQ ID NO: 67082 - DNA, 25 bp, probe
aacaaacatcacccatacagattag

SEQ ID NO: 67083 - DNA, 25 bp, probe
acaacaaacatcacccatacagatt

SEQ ID NO: 67084 - DNA, 25 bp, probe
gacaacaaacatcacccatacagat

SEQ ID NO: 67085 - DNA, 25 bp, probe
ggattcccaaagcagaaagaaattc

SEQ ID NO: 67086 - DNA, 25 bp, probe
catcagttcttctcccatagaggtc

SEQ ID NO: 67087 - DNA, 25 bp, probe
cacatcagttcttctcccatagagg

SEQ ID NO: 67088 - DNA, 25 bp, probe
agtacaacaactgtgctacaaatgg

SEQ ID NO: 67089 - DNA, 25 bp, probe
ggacaacaaacatcacccatacaga

SEQ ID NO: 67090 - DNA, 25 bp, probe
acatcagttcttctcccatagaggt

SEQ ID NO: 67091 - DNA, 25 bp, probe
ccaaagcagaaagaaattctcttca

SEQ ID NO: 67092 - DNA, 25 bp, probe
attcccaaagcagaaagaaattctc

SEQ ID NO: 67093 - DNA, 25 bp, probe
gattcccaaagcagaaagaaattct

SEQ ID NO: 67094 - DNA, 25 bp, probe
gcacatcagttcttctcccatagag

SEQ ID NO: 67095 - DNA, 25 bp, probe
aagcagaaagaaattctcttcagtg

SEQ ID NO: 67096 - DNA, 25 bp, probe
cccaaagcagaaagaaattctcttc

SEQ ID NO: 67097 - DNA, 25 bp, probe
tcccaaagcagaaagaaattctctt

SEQ ID NO: 67098 - DNA, 25 bp, probe
ttcccaaagcagaaagaaattctct

SEQ ID NO: 67099 - DNA, 25 bp, probe
aaagcagaaagaaattctcttcagt

SEQ ID NO: 67100 - DNA, 25 bp, probe
caaagcagaaagaaattctcttcag

SEQ ID NO: 67101 - DNA, 25 bp, probe
gtacaacaactgtgctacaaatggg

SEQ ID NO: 67102 - DNA, 25 bp, probe
agcagaaagaaattctcttcagtgg

SEQ ID NO: 67103 - DNA, 25 bp, probe
atcagttcttctcccatagaggtcg

SEQ ID NO: 67104 - DNA, 25 bp, probe
cagaaagaaattctcttcagtgggc

SEQ ID NO: 67105 - DNA, 25 bp, probe
gcagaaagaaattctcttcagtggg

SEQ ID NO: 67106 - DNA, 25 bp, probe
ggcacatcagttcttctcccataga

SEQ ID NO: 67107 - DNA, 25 bp, probe
gggattcccaaagcagaaagaaatt

SEQ ID NO: 67108 - DNA, 25 bp, probe
ccaaactgtctcaaagagcaaccag

SEQ ID NO: 67109 - DNA, 25 bp, probe
catgcacaagcctcagtacaacaac

SEQ ID NO: 67110 - DNA, 25 bp, probe
cctcagtacaacaactgtgctacaa

SEQ ID NO: 67111 - DNA, 25 bp, probe
cagtacaacaactgtgctacaaatg

SEQ ID NO: 67112 - DNA, 25 bp, probe
tcagtacaacaactgtgctacaaat

SEQ ID NO: 67113 - DNA, 25 bp, probe
ctcagtacaacaactgtgctacaaa

SEQ ID NO: 67114 - DNA, 25 bp, probe
cagagctaaatgtacaagccaaatg

SEQ ID NO: 67115 - DNA, 25 bp, probe
acagagctaaatgtacaagccaaat

SEQ ID NO: 67116 - DNA, 25 bp, probe
atgcacaagcctcagtacaacaact

SEQ ID NO: 67117 - DNA, 25 bp, probe
tacgttttacaagttcagcactgtg

SEQ ID NO: 67118 - DNA, 25 bp, probe
gtacgttttacaagttcagcactgt

SEQ ID NO: 67119 - DNA, 25 bp, probe
tcagttcttctcccatagaggtcgg

SEQ ID NO: 67120 - DNA, 25 bp, probe
tacaacaactgtgctacaaatgggg

SEQ ID NO: 67121 - DNA, 25 bp, probe
gggacaacaaacatcacccatacag

SEQ ID NO: 67122 - DNA, 25 bp, probe
caaactgtctcaaagagcaaccagc

SEQ ID NO: 67123 - DNA, 25 bp, probe
cacagagctaaatgtacaagccaaa

SEQ ID NO: 67124 - DNA, 25 bp, probe
gagctaaatgtacaagccaaatgct

SEQ ID NO: 67125 - DNA, 25 bp, probe
ggaaattctccactaagtctgacgt

SEQ ID NO: 67126 - DNA, 25 bp, probe
ctggaaattctccactaagtctgac

SEQ ID NO: 67127 - DNA, 25 bp, probe
cctggaaattctccactaagtctga

SEQ ID NO: 67128 - DNA, 25 bp, probe
tcctggaaattctccactaagtctg

SEQ ID NO: 67129 - DNA, 25 bp, probe
gtcctggaaattctccactaagtct

SEQ ID NO: 67130 - DNA, 25 bp, probe
agtcctggaaattctccactaagtc

SEQ ID NO: 67131 - DNA, 25 bp, probe
gagtcctggaaattctccactaagt

SEQ ID NO: 67132 - DNA, 25 bp, probe
tggaaattctccactaagtctgacg

SEQ ID NO: 67133 - DNA, 25 bp, probe
ggagtcctggaaattctccactaag

SEQ ID NO: 67134 - DNA, 25 bp, probe
aggagtcctggaaattctccactaa

SEQ ID NO: 67135 - DNA, 25 bp, probe
caggagtcctggaaattctccacta

SEQ ID NO: 67136 - DNA, 25 bp, probe
ttgtatgatctcatgtaccagtgct

SEQ ID NO: 67137 - DNA, 25 bp, probe
cttatacatcaacatcgagagagcc

SEQ ID NO: 67138 - DNA, 25 bp, probe
tatacatcaacatcgagagagccaa

SEQ ID NO: 67139 - DNA, 25 bp, probe
ttatacatcaacatcgagagagcca

SEQ ID NO: 67140 - DNA, 25 bp, probe
tgtatgatctcatgtaccagtgctg

SEQ ID NO: 67141 - DNA, 25 bp, probe
atacatcaacatcgagagagccaag

SEQ ID NO: 67142 - DNA, 25 bp, probe
aaacactgagatttacaactacctc

SEQ ID NO: 67143 - DNA, 25 bp, probe
tttgtatgatctcatgtaccagtgc

SEQ ID NO: 67144 - DNA, 25 bp, probe
gagatttacaactacctcattggcg

SEQ ID NO: 67145 - DNA, 25 bp, probe
ctttacttgtctgcgaatggaactg

SEQ ID NO: 67146 - DNA, 25 bp, probe
cagagtgtatggaggacgttcttac

SEQ ID NO: 67147 - DNA, 25 bp, probe
agatttacaactacctcattggcgg

SEQ ID NO: 67148 - DNA, 25 bp, probe
gtatgatctcatgtaccagtgctgg

SEQ ID NO: 67149 - DNA, 25 bp, probe
tatgatctcatgtaccagtgctgga

SEQ ID NO: 67150 - DNA, 25 bp, probe
cgaaaacactgagatttacaactac

SEQ ID NO: 67151 - DNA, 25 bp, probe
aaaacactgagatttacaactacct

SEQ ID NO: 67152 - DNA, 25 bp, probe
agagtgtatggaggacgttcttaca

SEQ ID NO: 67153 - DNA, 25 bp, probe
gaaaacactgagatttacaactacc

SEQ ID NO: 67154 - DNA, 25 bp, probe
gctttacttgtctgcgaatggaact

SEQ ID NO: 67155 - DNA, 25 bp, probe
ttcttacactcccactccatccaag

SEQ ID NO: 67156 - DNA, 25 bp, probe
gatttacaactacctcattggcggg

SEQ ID NO: 67157 - DNA, 25 bp, probe
cagacgaccttttgtatgatctcat

SEQ ID NO: 67158 - DNA, 25 bp, probe
accttttgtatgatctcatgtacca

SEQ ID NO: 67159 - DNA, 25 bp, probe
acgaccttttgtatgatctcatgta

SEQ ID NO: 67160 - DNA, 25 bp, probe
cgaccttttgtatgatctcatgtac

SEQ ID NO: 67161 - DNA, 25 bp, probe
gttcttacactcccactccatccaa

SEQ ID NO: 67162 - DNA, 25 bp, probe
tacatcaacatcgagagagccaagg

SEQ ID NO: 67163 - DNA, 25 bp, probe
ccttttgtatgatctcatgtaccag

SEQ ID NO: 67164 - DNA, 25 bp, probe
gaccttttgtatgatctcatgtacc

SEQ ID NO: 67165 - DNA, 25 bp, probe
ttcagacgaccttttgtatgatctc

SEQ ID NO: 67166 - DNA, 25 bp, probe
cttcagacgaccttttgtatgatct

SEQ ID NO: 67167 - DNA, 25 bp, probe
gacgaccttttgtatgatctcatgt

SEQ ID NO: 67168 - DNA, 25 bp, probe
agacgaccttttgtatgatctcatg

SEQ ID NO: 67169 - DNA, 25 bp, probe
ccagagtgtatggaggacgttctta

SEQ ID NO: 67170 - DNA, 25 bp, probe
ttttgtatgatctcatgtaccagtg

SEQ ID NO: 67171 - DNA, 25 bp, probe
cttttgtatgatctcatgtaccagt

SEQ ID NO: 67172 - DNA, 25 bp, probe
ttacaactacctcattggcgggaat

SEQ ID NO: 67173 - DNA, 25 bp, probe
atttacaactacctcattggcggga

SEQ ID NO: 67174 - DNA, 25 bp, probe
ccttcagacgaccttttgtatgatc

SEQ ID NO: 67175 - DNA, 25 bp, probe
tcagacgaccttttgtatgatctca

SEQ ID NO: 67176 - DNA, 25 bp, probe
gcatcgaaaacactgagatttacaa

SEQ ID NO: 67177 - DNA, 25 bp, probe
atgatctcatgtaccagtgctggag

SEQ ID NO: 67178 - DNA, 25 bp, probe
tttacaactacctcattggcgggaa

SEQ ID NO: 67179 - DNA, 25 bp, probe
aacactgagatttacaactacctca

SEQ ID NO: 67180 - DNA, 25 bp, probe
acatcaagtccatcctgagtatcat

SEQ ID NO: 67181 - DNA, 25 bp, probe
catcaagtccatcctgagtatcatg

SEQ ID NO: 67182 - DNA, 25 bp, probe
gacatcaagtccatcctgagtatca

SEQ ID NO: 67183 - DNA, 25 bp, probe
cataaacaatgccaacttctccaag

SEQ ID NO: 67184 - DNA, 25 bp, probe
acataaacaatgccaacttctccaa

SEQ ID NO: 67185 - DNA, 25 bp, probe
ctactttgaaagggctacagacttc

SEQ ID NO: 67186 - DNA, 25 bp, probe
ataaacaatgccaacttctccaagg

SEQ ID NO: 67187 - DNA, 25 bp, probe
gcttcagaaactaggcagtattcat

SEQ ID NO: 67188 - DNA, 25 bp, probe
cacataaacaatgccaacttctcca

SEQ ID NO: 67189 - DNA, 25 bp, probe
atgaatcgtctgagtcagctaagag

SEQ ID NO: 67190 - DNA, 25 bp, probe
gatgaatcgtctgagtcagctaaga

SEQ ID NO: 67191 - DNA, 25 bp, probe
atctcaatgacaaactagccaagga

SEQ ID NO: 67192 - DNA, 25 bp, probe
cttcagaaactaggcagtattcatg

SEQ ID NO: 67193 - DNA, 25 bp, probe
caacacatctgtggatcaggatatc

SEQ ID NO: 67194 - DNA, 25 bp, probe
catctcaatgacaaactagccaagg

SEQ ID NO: 67195 - DNA, 25 bp, probe
ccatctcaatgacaaactagccaag

SEQ ID NO: 67196 - DNA, 25 bp, probe
ttctgtcacctgatgaatcgtctga

SEQ ID NO: 67197 - DNA, 25 bp, probe
tgatgaatcgtctgagtcagctaag

SEQ ID NO: 67198 - DNA, 25 bp, probe
caatgaggtcaccctgaagatttac

SEQ ID NO: 67199 - DNA, 25 bp, probe
tgaagatttacatgggcaacacatc

SEQ ID NO: 67200 - DNA, 25 bp, probe
ctgaagatttacatgggcaacacat

SEQ ID NO: 67201 - DNA, 25 bp, probe
atgaggtcaccctgaagatttacat

SEQ ID NO: 67202 - DNA, 25 bp, probe
caggtctttcatgcacataaacaat

SEQ ID NO: 67203 - DNA, 25 bp, probe
aatgaggtcaccctgaagatttaca

SEQ ID NO: 67204 - DNA, 25 bp, probe
gcaacacatctgtggatcaggatat

SEQ ID NO: 67205 - DNA, 25 bp, probe
aggtctttcatgcacataaacaatg

SEQ ID NO: 67206 - DNA, 25 bp, probe
taaacaatgccaacttctccaagga

SEQ ID NO: 67207 - DNA, 25 bp, probe
tctgtcacctgatgaatcgtctgag

SEQ ID NO: 67208 - DNA, 25 bp, probe
atcaagtccatcctgagtatcatga

SEQ ID NO: 67209 - DNA, 25 bp, probe
tttctgtcacctgatgaatcgtctg

SEQ ID NO: 67210 - DNA, 25 bp, probe
tctcaatgacaaactagccaaggag

SEQ ID NO: 67211 - DNA, 25 bp, probe
gtcacctgatgaatcgtctgagtca

SEQ ID NO: 67212 - DNA, 25 bp, probe
tgtcacctgatgaatcgtctgagtc

SEQ ID NO: 67213 - DNA, 25 bp, probe
ctgtcacctgatgaatcgtctgagt

SEQ ID NO: 67214 - DNA, 25 bp, probe
agcttcagaaactaggcagtattca

SEQ ID NO: 67215 - DNA, 25 bp, probe
cctactttgaaagggctacagactt

SEQ ID NO: 67216 - DNA, 25 bp, probe
tcaagtccatcctgagtatcatgag

SEQ ID NO: 67217 - DNA, 25 bp, probe
ctttgccatctcaatgacaaactag

SEQ ID NO: 67218 - DNA, 25 bp, probe
tgaggtcaccctgaagatttacatg

SEQ ID NO: 67219 - DNA, 25 bp, probe
gcaatgaggtcaccctgaagattta

SEQ ID NO: 67220 - DNA, 25 bp, probe
tatcatgaggcagaactgtgagatc

SEQ ID NO: 67221 - DNA, 25 bp, probe
gaagatttacatgggcaacacatct

SEQ ID NO: 67222 - DNA, 25 bp, probe
aagatttacatgggcaacacatctg

SEQ ID NO: 67223 - DNA, 25 bp, probe
gtatcatgaggcagaactgtgagat

SEQ ID NO: 67224 - DNA, 25 bp, probe
caacaactcctatgtcaacttcgag

SEQ ID NO: 67225 - DNA, 25 bp, probe
cattctaccaggacaccagtgaatc

SEQ ID NO: 67226 - DNA, 25 bp, probe
ccaacaactcctatgtcaacttcga

SEQ ID NO: 67227 - DNA, 25 bp, probe
tcccaacaactcctatgtcaacttc

SEQ ID NO: 67228 - DNA, 25 bp, probe
ctcccaacaactcctatgtcaactt

SEQ ID NO: 67229 - DNA, 25 bp, probe
gtctccatcttcaatgagaaggaag

SEQ ID NO: 67230 - DNA, 25 bp, probe
aacaactcctatgtcaacttcgagc

SEQ ID NO: 67231 - DNA, 25 bp, probe
acattctaccaggacaccagtgaat

SEQ ID NO: 67232 - DNA, 25 bp, probe
agtacactctcaaatgccactcaag

SEQ ID NO: 67233 - DNA, 25 bp, probe
attctaccaggacaccagtgaatcc

SEQ ID NO: 67234 - DNA, 25 bp, probe
ggtctccatcttcaatgagaaggaa

SEQ ID NO: 67235 - DNA, 25 bp, probe
gaagaccaagcacctgagagagtac

SEQ ID NO: 67236 - DNA, 25 bp, probe
tgaagaccaagcacctgagagagta

SEQ ID NO: 67237 - DNA, 25 bp, probe
caaggtggagtcattgaagaagctg

SEQ ID NO: 67238 - DNA, 25 bp, probe
cacattctaccaggacaccagtgaa

SEQ ID NO: 67239 - DNA, 25 bp, probe
tctccatcttcaatgagaaggaagc

SEQ ID NO: 67240 - DNA, 25 bp, probe
ctccatcttcaatgagaaggaagct

SEQ ID NO: 67241 - DNA, 25 bp, probe
ctggtctccatcttcaatgagaagg

SEQ ID NO: 67242 - DNA, 25 bp, probe
cctggtctccatcttcaatgagaag

SEQ ID NO: 67243 - DNA, 25 bp, probe
cccaacaactcctatgtcaacttcg

SEQ ID NO: 67244 - DNA, 25 bp, probe
agatcatgcactgaggaatttctgg

SEQ ID NO: 67245 - DNA, 25 bp, probe
tggtctccatcttcaatgagaagga

SEQ ID NO: 67246 - DNA, 25 bp, probe
aagaccaagcacctgagagagtaca

SEQ ID NO: 67247 - DNA, 25 bp, probe
aactcctatgtcaacttcgagcgtt

SEQ ID NO: 67248 - DNA, 25 bp, probe
gtacactctcaaatgccactcaagc

SEQ ID NO: 67249 - DNA, 25 bp, probe
cctcccaacaactcctatgtcaact

SEQ ID NO: 67250 - DNA, 25 bp, probe
ttcaatgagaaggaagcttggtacc

SEQ ID NO: 67251 - DNA, 25 bp, probe
caactcctatgtcaacttcgagcgt

SEQ ID NO: 67252 - DNA, 25 bp, probe
cttcaatgagaaggaagcttggtac

SEQ ID NO: 67253 - DNA, 25 bp, probe
tcttcaatgagaaggaagcttggta

SEQ ID NO: 67254 - DNA, 25 bp, probe
acaactcctatgtcaacttcgagcg

SEQ ID NO: 67255 - DNA, 25 bp, probe
catcttcaatgagaaggaagcttgg

SEQ ID NO: 67256 - DNA, 25 bp, probe
ccatcttcaatgagaaggaagcttg

SEQ ID NO: 67257 - DNA, 25 bp, probe
tccatcttcaatgagaaggaagctt

SEQ ID NO: 67258 - DNA, 25 bp, probe
gagtacactctcaaatgccactcaa

SEQ ID NO: 67259 - DNA, 25 bp, probe
cagatcatgcactgaggaatttctg

SEQ ID NO: 67260 - DNA, 25 bp, probe
atcttcaatgagaaggaagcttggt

SEQ ID NO: 67261 - DNA, 25 bp, probe
actcctatgtcaacttcgagcgttt

SEQ ID NO: 67262 - DNA, 25 bp, probe
gatcatgcactgaggaatttctggc

SEQ ID NO: 67263 - DNA, 25 bp, probe
ccagtttgagattctgaggcaggag

SEQ ID NO: 67264 - DNA, 25 bp, probe
cttggtaccgagaggagaatgagag

SEQ ID NO: 67265 - DNA, 25 bp, probe
gcagatcatgcactgaggaatttct

SEQ ID NO: 67266 - DNA, 25 bp, probe
agcagatcatgcactgaggaatttc

SEQ ID NO: 67267 - DNA, 25 bp, probe
ctcctatgtcaacttcgagcgtttt

SEQ ID NO: 67268 - DNA, 25 bp, probe
aatcagaactgcgtattacaatccg

SEQ ID NO: 67269 - DNA, 25 bp, probe
taatagttctgcctgcttgcttcta

SEQ ID NO: 67270 - DNA, 25 bp, probe
cttaatagttctgcctgcttgcttc

SEQ ID NO: 67271 - DNA, 25 bp, probe
ttaatagttctgcctgcttgcttct

SEQ ID NO: 67272 - DNA, 25 bp, probe
cgaaatcagaactgcgtattacaat

SEQ ID NO: 67273 - DNA, 25 bp, probe
aaatcagaactgcgtattacaatcc

SEQ ID NO: 67274 - DNA, 25 bp, probe
aatagttctgcctgcttgcttctac

SEQ ID NO: 67275 - DNA, 25 bp, probe
gaaatcagaactgcgtattacaatc

SEQ ID NO: 67276 - DNA, 25 bp, probe
ccttaatagttctgcctgcttgctt

SEQ ID NO: 67277 - DNA, 25 bp, probe
aaaccttaatagttctgcctgcttg

SEQ ID NO: 67278 - DNA, 25 bp, probe
aaattcaatcaggaaagccttagga

SEQ ID NO: 67279 - DNA, 25 bp, probe
caaattcaatcaggaaagccttagg

SEQ ID NO: 67280 - DNA, 25 bp, probe
tcaaattcaatcaggaaagccttag

SEQ ID NO: 67281 - DNA, 25 bp, probe
aaccttaatagttctgcctgcttgc

SEQ ID NO: 67282 - DNA, 25 bp, probe
aattcaatcaggaaagccttaggac

SEQ ID NO: 67283 - DNA, 25 bp, probe
atcaaattcaatcaggaaagcctta

SEQ ID NO: 67284 - DNA, 25 bp, probe
gatcaaattcaatcaggaaagcctt

SEQ ID NO: 67285 - DNA, 25 bp, probe
aatcaggaaagccttaggactgtta

SEQ ID NO: 67286 - DNA, 25 bp, probe
tcgaaatcagaactgcgtattacaa

SEQ ID NO: 67287 - DNA, 25 bp, probe
attcaatcaggaaagccttaggact

SEQ ID NO: 67288 - DNA, 25 bp, probe
atcaggaaagccttaggactgttac

SEQ ID NO: 67289 - DNA, 25 bp, probe
accttaatagttctgcctgcttgct

SEQ ID NO: 67290 - DNA, 25 bp, probe
ttcaatcaggaaagccttaggactg

SEQ ID NO: 67291 - DNA, 25 bp, probe
caatcaggaaagccttaggactgtt

SEQ ID NO: 67292 - DNA, 25 bp, probe
ggatgaaaaccttaatagttctgcc

SEQ ID NO: 67293 - DNA, 25 bp, probe
gggatgaaaaccttaatagttctgc

SEQ ID NO: 67294 - DNA, 25 bp, probe
atagttctgcctgcttgcttctacc

SEQ ID NO: 67295 - DNA, 25 bp, probe
ggggatgaaaaccttaatagttctg

SEQ ID NO: 67296 - DNA, 25 bp, probe
atgaaaaccttaatagttctgcctg

SEQ ID NO: 67297 - DNA, 25 bp, probe
aaaaccttaatagttctgcctgctt

SEQ ID NO: 67298 - DNA, 25 bp, probe
gatgaaaaccttaatagttctgcct

SEQ ID NO: 67299 - DNA, 25 bp, probe
atcagaactgcgtattacaatccgg

SEQ ID NO: 67300 - DNA, 25 bp, probe
gaaaaccttaatagttctgcctgct

SEQ ID NO: 67301 - DNA, 25 bp, probe
tgaaaaccttaatagttctgcctgc

SEQ ID NO: 67302 - DNA, 25 bp, probe
tcaggaaagccttaggactgttaca

SEQ ID NO: 67303 - DNA, 25 bp, probe
caggaaagccttaggactgttacag

SEQ ID NO: 67304 - DNA, 25 bp, probe
aaacgtcctttgcattatctgatca

SEQ ID NO: 67305 - DNA, 25 bp, probe
aggggatgaaaaccttaatagttct

SEQ ID NO: 67306 - DNA, 25 bp, probe
tcaatcaggaaagccttaggactgt

SEQ ID NO: 67307 - DNA, 25 bp, probe
aacgtcctttgcattatctgatcaa

SEQ ID NO: 67308 - DNA, 25 bp, probe
aaaacgtcctttgcattatctgatc

SEQ ID NO: 67309 - DNA, 25 bp, probe
cttcgaaatcagaactgcgtattac

SEQ ID NO: 67310 - DNA, 25 bp, probe
tcttcgaaatcagaactgcgtatta

SEQ ID NO: 67311 - DNA, 25 bp, probe
ttcgaaatcagaactgcgtattaca

SEQ ID NO: 67312 - DNA, 25 bp, probe
gcaacacataccatacagagaagat

SEQ ID NO: 67313 - DNA, 25 bp, probe
agatgcttcaagtaagttattccgt

SEQ ID NO: 67314 - DNA, 25 bp, probe
aagatgcttcaagtaagttattccg

SEQ ID NO: 67315 - DNA, 25 bp, probe
gatgcttcaagtaagttattccgta

SEQ ID NO: 67316 - DNA, 25 bp, probe
cacatcttagtattgagcagagtcg

SEQ ID NO: 67317 - DNA, 25 bp, probe
gcacatcttagtattgagcagagtc

SEQ ID NO: 67318 - DNA, 25 bp, probe
tgcttcaagtaagttattccgtatt

SEQ ID NO: 67319 - DNA, 25 bp, probe
atgcttcaagtaagttattccgtat

SEQ ID NO: 67320 - DNA, 25 bp, probe
aaggcaacacataccatacagagaa

SEQ ID NO: 67321 - DNA, 25 bp, probe
caagatgcttcaagtaagttattcc

SEQ ID NO: 67322 - DNA, 25 bp, probe
gcttcaagtaagttattccgtattg

SEQ ID NO: 67323 - DNA, 25 bp, probe
caacacataccatacagagaagata

SEQ ID NO: 67324 - DNA, 25 bp, probe
ggcaacacataccatacagagaaga

SEQ ID NO: 67325 - DNA, 25 bp, probe
aggcaacacataccatacagagaag

SEQ ID NO: 67326 - DNA, 25 bp, probe
ggatgacatggaatcgttagaatat

SEQ ID NO: 67327 - DNA, 25 bp, probe
tgacatggaatcgttagaatattgg

SEQ ID NO: 67328 - DNA, 25 bp, probe
caaggcaacacataccatacagaga

SEQ ID NO: 67329 - DNA, 25 bp, probe
acaagatgcttcaagtaagttattc

SEQ ID NO: 67330 - DNA, 25 bp, probe
acatcttagtattgagcagagtcgc

SEQ ID NO: 67331 - DNA, 25 bp, probe
tagccatgcacatcttagtattgag

SEQ ID NO: 67332 - DNA, 25 bp, probe
ctagccatgcacatcttagtattga

SEQ ID NO: 67333 - DNA, 25 bp, probe
aacacataccatacagagaagataa

SEQ ID NO: 67334 - DNA, 25 bp, probe
acaaggcaacacataccatacagag

SEQ ID NO: 67335 - DNA, 25 bp, probe
gacaaggcaacacataccatacaga

SEQ ID NO: 67336 - DNA, 25 bp, probe
attgtcggaaggaaatataaactgc

SEQ ID NO: 67337 - DNA, 25 bp, probe
ttgtcggaaggaaatataaactgct

SEQ ID NO: 67338 - DNA, 25 bp, probe
tcggaaggaaatataaactgctttg

SEQ ID NO: 67339 - DNA, 25 bp, probe
gtcggaaggaaatataaactgcttt

SEQ ID NO: 67340 - DNA, 25 bp, probe
cggaaggaaatataaactgctttgg

SEQ ID NO: 67341 - DNA, 25 bp, probe
tgtcggaaggaaatataaactgctt

SEQ ID NO: 67342 - DNA, 25 bp, probe
ggaaggaaatataaactgctttgga

SEQ ID NO: 67343 - DNA, 25 bp, probe
catcttagtattgagcagagtcgcc

SEQ ID NO: 67344 - DNA, 25 bp, probe
caggctttacaagatgcttcaagta

SEQ ID NO: 67345 - DNA, 25 bp, probe
cattgtcggaaggaaatataaactg

SEQ ID NO: 67346 - DNA, 25 bp, probe
tcattgtcggaaggaaatataaact

SEQ ID NO: 67347 - DNA, 25 bp, probe
aggaaatataaactgctttggaaga

SEQ ID NO: 67348 - DNA, 25 bp, probe
gggatgacatggaatcgttagaata

SEQ ID NO: 67349 - DNA, 25 bp, probe
atgacatggaatcgttagaatattg

SEQ ID NO: 67350 - DNA, 25 bp, probe
caacggtgaagaagtggtagtgaag

SEQ ID NO: 67351 - DNA, 25 bp, probe
ccaagggtaacatgaaaggtttcta

SEQ ID NO: 67352 - DNA, 25 bp, probe
atggaatcgttagaatattgggagg

SEQ ID NO: 67353 - DNA, 25 bp, probe
acatggaatcgttagaatattggga

SEQ ID NO: 67354 - DNA, 25 bp, probe
gacatggaatcgttagaatattggg

SEQ ID NO: 67355 - DNA, 25 bp, probe
caagggtaacatgaaaggtttctaa

SEQ ID NO: 67356 - DNA, 25 bp, probe
ctaactaaacaggaacagagacaca

SEQ ID NO: 67357 - DNA, 25 bp, probe
actaactaaacaggaacagagacac

SEQ ID NO: 67358 - DNA, 25 bp, probe
gcagaaactaactaaacaggaacag

SEQ ID NO: 67359 - DNA, 25 bp, probe
tgaagcagaaactaactaaacagga

SEQ ID NO: 67360 - DNA, 25 bp, probe
agatgagattgtcgcactgaagaag

SEQ ID NO: 67361 - DNA, 25 bp, probe
agcagaaactaactaaacaggaaca

SEQ ID NO: 67362 - DNA, 25 bp, probe
taactaaacaggaacagagacacac

SEQ ID NO: 67363 - DNA, 25 bp, probe
taaacaggaacagagacacacaaat

SEQ ID NO: 67364 - DNA, 25 bp, probe
aactaactaaacaggaacagagaca

SEQ ID NO: 67365 - DNA, 25 bp, probe
aagcagaaactaactaaacaggaac

SEQ ID NO: 67366 - DNA, 25 bp, probe
gaagcagaaactaactaaacaggaa

SEQ ID NO: 67367 - DNA, 25 bp, probe
ctaaacaggaacagagacacacaaa

SEQ ID NO: 67368 - DNA, 25 bp, probe
aaactaactaaacaggaacagagac

SEQ ID NO: 67369 - DNA, 25 bp, probe
cagaaactaactaaacaggaacaga

SEQ ID NO: 67370 - DNA, 25 bp, probe
aggaacagagacacacaaatcaatg

SEQ ID NO: 67371 - DNA, 25 bp, probe
caggaacagagacacacaaatcaat

SEQ ID NO: 67372 - DNA, 25 bp, probe
gaaactaactaaacaggaacagaga

SEQ ID NO: 67373 - DNA, 25 bp, probe
aaacaggaacagagacacacaaatc

SEQ ID NO: 67374 - DNA, 25 bp, probe
agaaactaactaaacaggaacagag

SEQ ID NO: 67375 - DNA, 25 bp, probe
actaaacaggaacagagacacacaa

SEQ ID NO: 67376 - DNA, 25 bp, probe
aactaaacaggaacagagacacaca

SEQ ID NO: 67377 - DNA, 25 bp, probe
ctgaagcagaaactaactaaacagg

SEQ ID NO: 67378 - DNA, 25 bp, probe
gaacagagacacacaaatcaatggg

SEQ ID NO: 67379 - DNA, 25 bp, probe
ggaacagagacacacaaatcaatgg

SEQ ID NO: 67380 - DNA, 25 bp, probe
gctgaagcagaaactaactaaacag

SEQ ID NO: 67381 - DNA, 25 bp, probe
aacatccgagtttcttctctacgaa

SEQ ID NO: 67382 - DNA, 25 bp, probe
gatgagattgtcgcactgaagaagg

SEQ ID NO: 67383 - DNA, 25 bp, probe
cagatgagattgtcgcactgaagaa

SEQ ID NO: 67384 - DNA, 25 bp, probe
acaggaacagagacacacaaatcaa

SEQ ID NO: 67385 - DNA, 25 bp, probe
aacaggaacagagacacacaaatca

SEQ ID NO: 67386 - DNA, 25 bp, probe
aacagagacacacaaatcaatggga

SEQ ID NO: 67387 - DNA, 25 bp, probe
gaacatccgagtttcttctctacga

SEQ ID NO: 67388 - DNA, 25 bp, probe
gagctgaagcagaaactaactaaac

SEQ ID NO: 67389 - DNA, 25 bp, probe
agctgaagcagaaactaactaaaca

SEQ ID NO: 67390 - DNA, 25 bp, probe
atgagattgtcgcactgaagaaggt

SEQ ID NO: 67391 - DNA, 25 bp, probe
acagagacacacaaatcaatgggac

SEQ ID NO: 67392 - DNA, 25 bp, probe
ggagctgaagcagaaactaactaaa

SEQ ID NO: 67393 - DNA, 25 bp, probe
gatggacaaggagaaggatggtgag

SEQ ID NO: 67394 - DNA, 25 bp, probe
acatccgagtttcttctctacgaaa

SEQ ID NO: 67395 - DNA, 25 bp, probe
acagatgagattgtcgcactgaaga

SEQ ID NO: 67396 - DNA, 25 bp, probe
tggagctgaagcagaaactaactaa

SEQ ID NO: 67397 - DNA, 25 bp, probe
gagacacacaaatcaatgggacctg

SEQ ID NO: 67398 - DNA, 25 bp, probe
cagagacacacaaatcaatgggacc

SEQ ID NO: 67399 - DNA, 25 bp, probe
gagaaggatggtgagcaggaaattg

SEQ ID NO: 67400 - DNA, 25 bp, probe
atgatgatgatgatgatgaggacca

SEQ ID NO: 67401 - DNA, 25 bp, probe
tgatgatgatgatgatgaggaccac

SEQ ID NO: 67402 - DNA, 25 bp, probe
catgatgatgatgatgatgaggacc

SEQ ID NO: 67403 - DNA, 25 bp, probe
gatgatgatgatgaggaccacgatg

SEQ ID NO: 67404 - DNA, 25 bp, probe
gatgatgatgatgatgaggaccacg

SEQ ID NO: 67405 - DNA, 25 bp, probe
tgatgatgatgatgaggaccacgat

SEQ ID NO: 67406 - DNA, 25 bp, probe
atgatgatgatgatgaggaccacga

SEQ ID NO: 67407 - DNA, 25 bp, probe
atgatgatgatgaggaccacgatgt

SEQ ID NO: 67408 - DNA, 25 bp, probe
tgatgatgatgaggaccacgatgtc

SEQ ID NO: 67409 - DNA, 25 bp, probe
taattcacttgggcagcgaggatat

SEQ ID NO: 67410 - DNA, 25 bp, probe
ataattcacttgggcagcgaggata

SEQ ID NO: 67411 - DNA, 25 bp, probe
tataattcacttgggcagcgaggat

SEQ ID NO: 67412 - DNA, 25 bp, probe
atataattcacttgggcagcgagga

SEQ ID NO: 67413 - DNA, 25 bp, probe
catataattcacttgggcagcgagg

SEQ ID NO: 67414 - DNA, 25 bp, probe
tcatgatgatgatgatgatgaggac

SEQ ID NO: 67415 - DNA, 25 bp, probe
ccatataattcacttgggcagcgag

SEQ ID NO: 67416 - DNA, 25 bp, probe
gatgatgatgaggaccacgatgtcg

SEQ ID NO: 67417 - DNA, 25 bp, probe
gtcctgtcatactctgcacgaactc

SEQ ID NO: 67418 - DNA, 25 bp, probe
aattcacttgggcagcgaggatatc

SEQ ID NO: 67419 - DNA, 25 bp, probe
ttgctgtggaagtggaagttctatt

SEQ ID NO: 67420 - DNA, 25 bp, probe
ccaaggagagaagtttacatcatca

SEQ ID NO: 67421 - DNA, 25 bp, probe
caaggagagaagtttacatcatcac

SEQ ID NO: 67422 - DNA, 25 bp, probe
cttgctgtggaagtggaagttctat

SEQ ID NO: 67423 - DNA, 25 bp, probe
tacatcacatataccttgttagtgg

SEQ ID NO: 67424 - DNA, 25 bp, probe
ctgtggaagtggaagttctatttgt

SEQ ID NO: 67425 - DNA, 25 bp, probe
caccttctgaaacctcttgtctaag

SEQ ID NO: 67426 - DNA, 25 bp, probe
gccaaggagagaagtttacatcatc

SEQ ID NO: 67427 - DNA, 25 bp, probe
ggagagaagtttacatcatcactga

SEQ ID NO: 67428 - DNA, 25 bp, probe
aggagagaagtttacatcatcactg

SEQ ID NO: 67429 - DNA, 25 bp, probe
agagaagtttacatcatcactgaca

SEQ ID NO: 67430 - DNA, 25 bp, probe
tgtggaagtggaagttctatttgtg

SEQ ID NO: 67431 - DNA, 25 bp, probe
aaggagagaagtttacatcatcact

SEQ ID NO: 67432 - DNA, 25 bp, probe
gagagaagtttacatcatcactgac

SEQ ID NO: 67433 - DNA, 25 bp, probe
agaagtttacatcatcactgacaag

SEQ ID NO: 67434 - DNA, 25 bp, probe
gagaagtttacatcatcactgacaa

SEQ ID NO: 67435 - DNA, 25 bp, probe
tgccaaggagagaagtttacatcat

SEQ ID NO: 67436 - DNA, 25 bp, probe
ctgagcaaacacttactgaagaagg

SEQ ID NO: 67437 - DNA, 25 bp, probe
cctgagcaaacacttactgaagaag

SEQ ID NO: 67438 - DNA, 25 bp, probe
catataccttgttagtgggcaaacc

SEQ ID NO: 67439 - DNA, 25 bp, probe
acatataccttgttagtgggcaaac

SEQ ID NO: 67440 - DNA, 25 bp, probe
ccaccttctgaaacctcttgtctaa

SEQ ID NO: 67441 - DNA, 25 bp, probe
acatcacatataccttgttagtggg

SEQ ID NO: 67442 - DNA, 25 bp, probe
gctgtggaagtggaagttctatttg

SEQ ID NO: 67443 - DNA, 25 bp, probe
ggtgggactcctgattatgtaactc

SEQ ID NO: 67444 - DNA, 25 bp, probe
aagatacttcaaatccgacagcact

SEQ ID NO: 67445 - DNA, 25 bp, probe
cacatataccttgttagtgggcaaa

SEQ ID NO: 67446 - DNA, 25 bp, probe
gtggaagtggaagttctatttgtgc

SEQ ID NO: 67447 - DNA, 25 bp, probe
tgctgtggaagtggaagttctattt

SEQ ID NO: 67448 - DNA, 25 bp, probe
acctgagcaaacacttactgaagaa

SEQ ID NO: 67449 - DNA, 25 bp, probe
ctgccaaggagagaagtttacatca

SEQ ID NO: 67450 - DNA, 25 bp, probe
catcacatataccttgttagtgggc

SEQ ID NO: 67451 - DNA, 25 bp, probe
agatacttcaaatccgacagcactc

SEQ ID NO: 67452 - DNA, 25 bp, probe
gtacatcacatataccttgttagtg

SEQ ID NO: 67453 - DNA, 25 bp, probe
atcacatataccttgttagtgggca

SEQ ID NO: 67454 - DNA, 25 bp, probe
ggtcccttgggtacatcacatatac

SEQ ID NO: 67455 - DNA, 25 bp, probe
tcacatataccttgttagtgggcaa

SEQ ID NO: 67456 - DNA, 25 bp, probe
tggtcccttgggtacatcacatata

SEQ ID NO: 67457 - DNA, 25 bp, probe
accaccttctgaaacctcttgtcta

SEQ ID NO: 67458 - DNA, 25 bp, probe
aaaccaccttctgaaacctcttgtc

SEQ ID NO: 67459 - DNA, 25 bp, probe
gagcaaacacttactgaagaagggt

SEQ ID NO: 67460 - DNA, 25 bp, probe
tgagcaaacacttactgaagaaggg

SEQ ID NO: 67461 - DNA, 25 bp, probe
cacctgagcaaacacttactgaaga

SEQ ID NO: 67462 - DNA, 25 bp, probe
ggactcctgattatgtaactcccag

SEQ ID NO: 67463 - DNA, 25 bp, probe
taacaaggttcagttcacagagatt

SEQ ID NO: 67464 - DNA, 25 bp, probe
ttaacaaggttcagttcacagagat

SEQ ID NO: 67465 - DNA, 25 bp, probe
taaccactgcttccaagtctctata

SEQ ID NO: 67466 - DNA, 25 bp, probe
ataaccactgcttccaagtctctat

SEQ ID NO: 67467 - DNA, 25 bp, probe
aacaaggttcagttcacagagattg

SEQ ID NO: 67468 - DNA, 25 bp, probe
aataaccactgcttccaagtctcta

SEQ ID NO: 67469 - DNA, 25 bp, probe
caaggttcagttcacagagattgag

SEQ ID NO: 67470 - DNA, 25 bp, probe
acaaggttcagttcacagagattga

SEQ ID NO: 67471 - DNA, 25 bp, probe
aaggttcagttcacagagattgagg

SEQ ID NO: 67472 - DNA, 25 bp, probe
ctttaacaaggttcagttcacagag

SEQ ID NO: 67473 - DNA, 25 bp, probe
tttaacaaggttcagttcacagaga

SEQ ID NO: 67474 - DNA, 25 bp, probe
caataaccactgcttccaagtctct

SEQ ID NO: 67475 - DNA, 25 bp, probe
gactttaacaaggttcagttcacag

SEQ ID NO: 67476 - DNA, 25 bp, probe
actttaacaaggttcagttcacaga

SEQ ID NO: 67477 - DNA, 25 bp, probe
tgactttaacaaggttcagttcaca

SEQ ID NO: 67478 - DNA, 25 bp, probe
aaccactgcttccaagtctctatag

SEQ ID NO: 67479 - DNA, 25 bp, probe
ctcctaagtcagggtgttatgtcct

SEQ ID NO: 67480 - DNA, 25 bp, probe
gtgttgactgactttaacaaggttc

SEQ ID NO: 67481 - DNA, 25 bp, probe
tgttgactgactttaacaaggttca

SEQ ID NO: 67482 - DNA, 25 bp, probe
gtgttatgtcctgaaaataggtgac

SEQ ID NO: 67483 - DNA, 25 bp, probe
ggtgttatgtcctgaaaataggtga

SEQ ID NO: 67484 - DNA, 25 bp, probe
agttcacagagattgagggcagaaa

SEQ ID NO: 67485 - DNA, 25 bp, probe
aggttcagttcacagagattgaggg

SEQ ID NO: 67486 - DNA, 25 bp, probe
gggtgttatgtcctgaaaataggtg

SEQ ID NO: 67487 - DNA, 25 bp, probe
agggtgttatgtcctgaaaataggt

SEQ ID NO: 67488 - DNA, 25 bp, probe
ggtgttgactgactttaacaaggtt

SEQ ID NO: 67489 - DNA, 25 bp, probe
ctgactttaacaaggttcagttcac

SEQ ID NO: 67490 - DNA, 25 bp, probe
gttgactgactttaacaaggttcag

SEQ ID NO: 67491 - DNA, 25 bp, probe
ctggtgttgactgactttaacaagg

SEQ ID NO: 67492 - DNA, 25 bp, probe
cctggtgttgactgactttaacaag

SEQ ID NO: 67493 - DNA, 25 bp, probe
atggctcctaagtcagggtgttatg

SEQ ID NO: 67494 - DNA, 25 bp, probe
ctgaaaataggtgacaacggcaaac

SEQ ID NO: 67495 - DNA, 25 bp, probe
gcaataaccactgcttccaagtctc

SEQ ID NO: 67496 - DNA, 25 bp, probe
cagttcacagagattgagggcagaa

SEQ ID NO: 67497 - DNA, 25 bp, probe
ttcagttcacagagattgagggcag

SEQ ID NO: 67498 - DNA, 25 bp, probe
tggtgttgactgactttaacaaggt

SEQ ID NO: 67499 - DNA, 25 bp, probe
aaataggtgacaacggcaaaccatc

SEQ ID NO: 67500 - DNA, 25 bp, probe
gttcacagagattgagggcagaaaa

SEQ ID NO: 67501 - DNA, 25 bp, probe
gctcctaagtcagggtgttatgtcc

SEQ ID NO: 67502 - DNA, 25 bp, probe
ggctcctaagtcagggtgttatgtc

SEQ ID NO: 67503 - DNA, 25 bp, probe
caccctggtgttgactgactttaac

SEQ ID NO: 67504 - DNA, 25 bp, probe
gttcagttcacagagattgagggca

SEQ ID NO: 67505 - DNA, 25 bp, probe
ccctggtgttgactgactttaacaa

SEQ ID NO: 67506 - DNA, 25 bp, probe
tggctcctaagtcagggtgttatgt

SEQ ID NO: 67507 - DNA, 25 bp, probe
cttacaatatgcctgttatctgtgg

SEQ ID NO: 67508 - DNA, 25 bp, probe
cctgacttacaatatgcctgttatc

SEQ ID NO: 67509 - DNA, 25 bp, probe
gcctgacttacaatatgcctgttat

SEQ ID NO: 67510 - DNA, 25 bp, probe
acttacaatatgcctgttatctgtg

SEQ ID NO: 67511 - DNA, 25 bp, probe
gacttacaatatgcctgttatctgt

SEQ ID NO: 67512 - DNA, 25 bp, probe
tgacttacaatatgcctgttatctg

SEQ ID NO: 67513 - DNA, 25 bp, probe
ctgacttacaatatgcctgttatct

SEQ ID NO: 67514 - DNA, 25 bp, probe
agcctgacttacaatatgcctgtta

SEQ ID NO: 67515 - DNA, 25 bp, probe
aagcctgacttacaatatgcctgtt

SEQ ID NO: 67516 - DNA, 25 bp, probe
tacaaagcctgacttacaatatgcc

SEQ ID NO: 67517 - DNA, 25 bp, probe
cgtacaaagcctgacttacaatatg

SEQ ID NO: 67518 - DNA, 25 bp, probe
gtacaaagcctgacttacaatatgc

SEQ ID NO: 67519 - DNA, 25 bp, probe
caaagcctgacttacaatatgcctg

SEQ ID NO: 67520 - DNA, 25 bp, probe
acaaagcctgacttacaatatgcct

SEQ ID NO: 67521 - DNA, 25 bp, probe
acgtacaaagcctgacttacaatat

SEQ ID NO: 67522 - DNA, 25 bp, probe
aacgtacaaagcctgacttacaata

SEQ ID NO: 67523 - DNA, 25 bp, probe
aaagcctgacttacaatatgcctgt

SEQ ID NO: 67524 - DNA, 25 bp, probe
aaacgtacaaagcctgacttacaat

SEQ ID NO: 67525 - DNA, 25 bp, probe
gtttcatctggggaacttacttttc

SEQ ID NO: 67526 - DNA, 25 bp, probe
ttacaatatgcctgttatctgtggc

SEQ ID NO: 67527 - DNA, 25 bp, probe
cgtttcatctggggaacttactttt

SEQ ID NO: 67528 - DNA, 25 bp, probe
ctgttatctgtggcgtttcatctgg

SEQ ID NO: 67529 - DNA, 25 bp, probe
cctgttatctgtggcgtttcatctg

SEQ ID NO: 67530 - DNA, 25 bp, probe
gaacttacttttccttgatagggtg

SEQ ID NO: 67531 - DNA, 25 bp, probe
aacttacttttccttgatagggtgc

SEQ ID NO: 67532 - DNA, 25 bp, probe
cttacttttccttgatagggtgctg

SEQ ID NO: 67533 - DNA, 25 bp, probe
acttacttttccttgatagggtgct

SEQ ID NO: 67534 - DNA, 25 bp, probe
gatccctgtagtgagttttggaaaa

SEQ ID NO: 67535 - DNA, 25 bp, probe
aaaacgtacaaagcctgacttacaa

SEQ ID NO: 67536 - DNA, 25 bp, probe
tacaatatgcctgttatctgtggcg

SEQ ID NO: 67537 - DNA, 25 bp, probe
gaaaacgtacaaagcctgacttaca

SEQ ID NO: 67538 - DNA, 25 bp, probe
gcgtttcatctggggaacttacttt

SEQ ID NO: 67539 - DNA, 25 bp, probe
ggaaaacgtacaaagcctgacttac

SEQ ID NO: 67540 - DNA, 25 bp, probe
ttacttttccttgatagggtgctgc

SEQ ID NO: 67541 - DNA, 25 bp, probe
tgttatctgtggcgtttcatctggg

SEQ ID NO: 67542 - DNA, 25 bp, probe
caatatgcctgttatctgtggcgtt

SEQ ID NO: 67543 - DNA, 25 bp, probe
tggaaaacgtacaaagcctgactta

SEQ ID NO: 67544 - DNA, 25 bp, probe
atccctgtagtgagttttggaaaac

SEQ ID NO: 67545 - DNA, 25 bp, probe
gtagtgagttttggaaaacgtacaa

SEQ ID NO: 67546 - DNA, 25 bp, probe
ctgtagtgagttttggaaaacgtac

SEQ ID NO: 67547 - DNA, 25 bp, probe
tgtagtgagttttggaaaacgtaca

SEQ ID NO: 67548 - DNA, 25 bp, probe
agtgagttttggaaaacgtacaaag

SEQ ID NO: 67549 - DNA, 25 bp, probe
tagtgagttttggaaaacgtacaaa

SEQ ID NO: 67550 - DNA, 25 bp, probe
cctgtagtgagttttggaaaacgta

SEQ ID NO: 67551 - DNA, 25 bp, probe
agactcccatcgcctatacgaaata

SEQ ID NO: 67552 - DNA, 25 bp, probe
aactctgagactcccatcgcctata

SEQ ID NO: 67553 - DNA, 25 bp, probe
actctgagactcccatcgcctatac

SEQ ID NO: 67554 - DNA, 25 bp, probe
gagactcccatcgcctatacgaaat

SEQ ID NO: 67555 - DNA, 25 bp, probe
gaggaactccaaaagggcttcaatg

SEQ ID NO: 67556 - DNA, 25 bp, probe
tgaggaactccaaaagggcttcaat

SEQ ID NO: 67557 - DNA, 25 bp, probe
tgagactcccatcgcctatacgaaa

SEQ ID NO: 67558 - DNA, 25 bp, probe
ctgaggaactccaaaagggcttcaa

SEQ ID NO: 67559 - DNA, 25 bp, probe
atcccaactccttgatgaagaagat

SEQ ID NO: 67560 - DNA, 25 bp, probe
gatgaagaagatcaccctccttaaa

SEQ ID NO: 67561 - DNA, 25 bp, probe
atgaagaagatcaccctccttaaat

SEQ ID NO: 67562 - DNA, 25 bp, probe
tgaagaagatcaccctccttaaata

SEQ ID NO: 67563 - DNA, 25 bp, probe
caactccttgatgaagaagatcacc

SEQ ID NO: 67564 - DNA, 25 bp, probe
ccaactccttgatgaagaagatcac

SEQ ID NO: 67565 - DNA, 25 bp, probe
tcccaactccttgatgaagaagatc

SEQ ID NO: 67566 - DNA, 25 bp, probe
gaagaagatcaccctccttaaatat

SEQ ID NO: 67567 - DNA, 25 bp, probe
atcctctacaatgatggtgacagcc

SEQ ID NO: 67568 - DNA, 25 bp, probe
tcatcctctacaatgatggtgacag

SEQ ID NO: 67569 - DNA, 25 bp, probe
ctcatcctctacaatgatggtgaca

SEQ ID NO: 67570 - DNA, 25 bp, probe
ctcaacacgcctcatcctctacaat

SEQ ID NO: 67571 - DNA, 25 bp, probe
cctcatcctctacaatgatggtgac

SEQ ID NO: 67572 - DNA, 25 bp, probe
aagaagatcaccctccttaaatatt

SEQ ID NO: 67573 - DNA, 25 bp, probe
tgatgaagaagatcaccctccttaa

SEQ ID NO: 67574 - DNA, 25 bp, probe
ttgatgaagaagatcaccctcctta

SEQ ID NO: 67575 - DNA, 25 bp, probe
tcaacacgcctcatcctctacaatg

SEQ ID NO: 67576 - DNA, 25 bp, probe
cttgatgaagaagatcaccctcctt

SEQ ID NO: 67577 - DNA, 25 bp, probe
agatcaccctccttaaatatttccg

SEQ ID NO: 67578 - DNA, 25 bp, probe
cctctacaatgatggtgacagcctg

SEQ ID NO: 67579 - DNA, 25 bp, probe
tcctctacaatgatggtgacagcct

SEQ ID NO: 67580 - DNA, 25 bp, probe
aactccttgatgaagaagatcaccc

SEQ ID NO: 67581 - DNA, 25 bp, probe
cccaactccttgatgaagaagatca

SEQ ID NO: 67582 - DNA, 25 bp, probe
catcctctacaatgatggtgacagc

SEQ ID NO: 67583 - DNA, 25 bp, probe
accctccttaaatatttccgcaatt

SEQ ID NO: 67584 - DNA, 25 bp, probe
ccctccttaaatatttccgcaatta

SEQ ID NO: 67585 - DNA, 25 bp, probe
ctccttgatgaagaagatcaccctc

SEQ ID NO: 67586 - DNA, 25 bp, probe
caccctccttaaatatttccgcaat

SEQ ID NO: 67587 - DNA, 25 bp, probe
aacacgcctcatcctctacaatgat

SEQ ID NO: 67588 - DNA, 25 bp, probe
gatcaccctccttaaatatttccgc

SEQ ID NO: 67589 - DNA, 25 bp, probe
ctcttcaatgactcaacacgcctca

SEQ ID NO: 67590 - DNA, 25 bp, probe
taaatatttccgcaattacatgagc

SEQ ID NO: 67591 - DNA, 25 bp, probe
catcccaactccttgatgaagaaga

SEQ ID NO: 67592 - DNA, 25 bp, probe
cctccttaaatatttccgcaattac

SEQ ID NO: 67593 - DNA, 25 bp, probe
aagatcaccctccttaaatatttcc

SEQ ID NO: 67594 - DNA, 25 bp, probe
actccttgatgaagaagatcaccct

SEQ ID NO: 67595 - DNA, 25 bp, probe
atcaccctccttaaatatttccgca

SEQ ID NO: 67596 - DNA, 25 bp, probe
cttcaatgactcaacacgcctcatc

SEQ ID NO: 67597 - DNA, 25 bp, probe
gcctcatcctctacaatgatggtga

SEQ ID NO: 67598 - DNA, 25 bp, probe
tcaccctccttaaatatttccgcaa

SEQ ID NO: 67599 - DNA, 25 bp, probe
gtgcagatcaacttcttccaggatc

SEQ ID NO: 67600 - DNA, 25 bp, probe
ctccttaaatatttccgcaattaca

SEQ ID NO: 67601 - DNA, 25 bp, probe
ccatcccaactccttgatgaagaag

SEQ ID NO: 67602 - DNA, 25 bp, probe
tcttcaatgactcaacacgcctcat

SEQ ID NO: 67603 - DNA, 25 bp, probe
gatgatagtaaagaacagaaacgcc

SEQ ID NO: 67604 - DNA, 25 bp, probe
tagtaaagaacagaaacgccgaata

SEQ ID NO: 67605 - DNA, 25 bp, probe
cgatgatagtaaagaacagaaacgc

SEQ ID NO: 67606 - DNA, 25 bp, probe
gtaaagaacagaaacgccgaatatc

SEQ ID NO: 67607 - DNA, 25 bp, probe
gatatgcacatccagatcacagatt

SEQ ID NO: 67608 - DNA, 25 bp, probe
atagtaaagaacagaaacgccgaat

SEQ ID NO: 67609 - DNA, 25 bp, probe
agtaaagaacagaaacgccgaatat

SEQ ID NO: 67610 - DNA, 25 bp, probe
aatgaagatatgcacatccagatca

SEQ ID NO: 67611 - DNA, 25 bp, probe
gaagatatgcacatccagatcacag

SEQ ID NO: 67612 - DNA, 25 bp, probe
gatagtaaagaacagaaacgccgaa

SEQ ID NO: 67613 - DNA, 25 bp, probe
atgatagtaaagaacagaaacgccg

SEQ ID NO: 67614 - DNA, 25 bp, probe
agatatgcacatccagatcacagat

SEQ ID NO: 67615 - DNA, 25 bp, probe
taaagaacagaaacgccgaatatcc

SEQ ID NO: 67616 - DNA, 25 bp, probe
atgaagatatgcacatccagatcac

SEQ ID NO: 67617 - DNA, 25 bp, probe
aagatatgcacatccagatcacaga

SEQ ID NO: 67618 - DNA, 25 bp, probe
tgaagatatgcacatccagatcaca

SEQ ID NO: 67619 - DNA, 25 bp, probe
tgatagtaaagaacagaaacgccga

SEQ ID NO: 67620 - DNA, 25 bp, probe
ccagagagcaaacaaggtagtatcc

SEQ ID NO: 67621 - DNA, 25 bp, probe
cccagagagcaaacaaggtagtatc

SEQ ID NO: 67622 - DNA, 25 bp, probe
tcgatgatagtaaagaacagaaacg

SEQ ID NO: 67623 - DNA, 25 bp, probe
atatgcacatccagatcacagattt

SEQ ID NO: 67624 - DNA, 25 bp, probe
gcaacactcgatgatagtaaagaac

SEQ ID NO: 67625 - DNA, 25 bp, probe
agcaacactcgatgatagtaaagaa

SEQ ID NO: 67626 - DNA, 25 bp, probe
aagcaacactcgatgatagtaaaga

SEQ ID NO: 67627 - DNA, 25 bp, probe
aaagcaacactcgatgatagtaaag

SEQ ID NO: 67628 - DNA, 25 bp, probe
cagagagcaaacaaggtagtatccg

SEQ ID NO: 67629 - DNA, 25 bp, probe
acactcgatgatagtaaagaacaga

SEQ ID NO: 67630 - DNA, 25 bp, probe
aaatgaagatatgcacatccagatc

SEQ ID NO: 67631 - DNA, 25 bp, probe
aaagaacagaaacgccgaatatcca

SEQ ID NO: 67632 - DNA, 25 bp, probe
caacactcgatgatagtaaagaaca

SEQ ID NO: 67633 - DNA, 25 bp, probe
aacactcgatgatagtaaagaacag

SEQ ID NO: 67634 - DNA, 25 bp, probe
cactcgatgatagtaaagaacagaa

SEQ ID NO: 67635 - DNA, 25 bp, probe
gttaaatgaagatatgcacatccag

SEQ ID NO: 67636 - DNA, 25 bp, probe
ttaaatgaagatatgcacatccaga

SEQ ID NO: 67637 - DNA, 25 bp, probe
ttggtaaatatcgtgaatttccttt

SEQ ID NO: 67638 - DNA, 25 bp, probe
tttggtaaatatcgtgaatttcctt

SEQ ID NO: 67639 - DNA, 25 bp, probe
aagaacagaaacgccgaatatccag

SEQ ID NO: 67640 - DNA, 25 bp, probe
tgttaaatgaagatatgcacatcca

SEQ ID NO: 67641 - DNA, 25 bp, probe
taaatgaagatatgcacatccagat

SEQ ID NO: 67642 - DNA, 25 bp, probe
ctcgatgatagtaaagaacagaaac

SEQ ID NO: 67643 - DNA, 25 bp, probe
cagaagatcattaagttggaatatg

SEQ ID NO: 67644 - DNA, 25 bp, probe
ttcagaagatcattaagttggaata

SEQ ID NO: 67645 - DNA, 25 bp, probe
tggagaaacttttggtaaatatcgt

SEQ ID NO: 67646 - DNA, 25 bp, probe
tcgtggagaaacttttggtaaatat

SEQ ID NO: 67647 - DNA, 25 bp, probe
tatatctaatggcttgagcacagag

SEQ ID NO: 67648 - DNA, 25 bp, probe
gtatatctaatggcttgagcacaga

SEQ ID NO: 67649 - DNA, 25 bp, probe
ggtatatctaatggcttgagcacag

SEQ ID NO: 67650 - DNA, 25 bp, probe
ccttgggtatatctaatggcttgag

SEQ ID NO: 67651 - DNA, 25 bp, probe
gcaaaggaatcgtgattattgtgat

SEQ ID NO: 67652 - DNA, 25 bp, probe
cttgggtatatctaatggcttgagc

SEQ ID NO: 67653 - DNA, 25 bp, probe
cttggcaaaggaatcgtgattattg

SEQ ID NO: 67654 - DNA, 25 bp, probe
ttgggtatatctaatggcttgagca

SEQ ID NO: 67655 - DNA, 25 bp, probe
ttggcaaaggaatcgtgattattgt

SEQ ID NO: 67656 - DNA, 25 bp, probe
cccttgggtatatctaatggcttga

SEQ ID NO: 67657 - DNA, 25 bp, probe
ttgtcattcactctaccaggctctc

SEQ ID NO: 67658 - DNA, 25 bp, probe
ggcaaaggaatcgtgattattgtga

SEQ ID NO: 67659 - DNA, 25 bp, probe
gggtatatctaatggcttgagcaca

SEQ ID NO: 67660 - DNA, 25 bp, probe
tgggtatatctaatggcttgagcac

SEQ ID NO: 67661 - DNA, 25 bp, probe
tggcaaaggaatcgtgattattgtg

SEQ ID NO: 67662 - DNA, 25 bp, probe
aaaggaatcgtgattattgtgatac

SEQ ID NO: 67663 - DNA, 25 bp, probe
caaaggaatcgtgattattgtgata

SEQ ID NO: 67664 - DNA, 25 bp, probe
atatctaatggcttgagcacagagc

SEQ ID NO: 67665 - DNA, 25 bp, probe
gtttgtcattcactctaccaggctc

SEQ ID NO: 67666 - DNA, 25 bp, probe
tttgtcattcactctaccaggctct

SEQ ID NO: 67667 - DNA, 25 bp, probe
ttgcgtttgtcattcactctaccag

SEQ ID NO: 67668 - DNA, 25 bp, probe
cttgcgtttgtcattcactctacca

SEQ ID NO: 67669 - DNA, 25 bp, probe
cattcactctaccaggctctccttc

SEQ ID NO: 67670 - DNA, 25 bp, probe
attcactctaccaggctctccttct

SEQ ID NO: 67671 - DNA, 25 bp, probe
ccttgcgtttgtcattcactctacc

SEQ ID NO: 67672 - DNA, 25 bp, probe
cccttgcgtttgtcattcactctac

SEQ ID NO: 67673 - DNA, 25 bp, probe
tcattcactctaccaggctctcctt

SEQ ID NO: 67674 - DNA, 25 bp, probe
tcccttgcgtttgtcattcactcta

SEQ ID NO: 67675 - DNA, 25 bp, probe
tatctaatggcttgagcacagagct

SEQ ID NO: 67676 - DNA, 25 bp, probe
ttcactctaccaggctctccttctg

SEQ ID NO: 67677 - DNA, 25 bp, probe
gtcattcactctaccaggctctcct

SEQ ID NO: 67678 - DNA, 25 bp, probe
cgtttgtcattcactctaccaggct

SEQ ID NO: 67679 - DNA, 25 bp, probe
ctgttgttacactggagctgaggag

SEQ ID NO: 67680 - DNA, 25 bp, probe
ccttggcaaaggaatcgtgattatt

SEQ ID NO: 67681 - DNA, 25 bp, probe
tgcgtttgtcattcactctaccagg

SEQ ID NO: 67682 - DNA, 25 bp, probe
gactgttgttacactggagctgagg

SEQ ID NO: 67683 - DNA, 25 bp, probe
taatggcttgagcacagagctgtag

SEQ ID NO: 67684 - DNA, 25 bp, probe
ctaatggcttgagcacagagctgta

SEQ ID NO: 67685 - DNA, 25 bp, probe
atctaatggcttgagcacagagctg

SEQ ID NO: 67686 - DNA, 25 bp, probe
ccccttgggtatatctaatggcttg

SEQ ID NO: 67687 - DNA, 25 bp, probe
gccttggcaaaggaatcgtgattat

SEQ ID NO: 67688 - DNA, 25 bp, probe
cattgaccaaattgaccacacatta

SEQ ID NO: 67689 - DNA, 25 bp, probe
attgaccaaattgaccacacattaa

SEQ ID NO: 67690 - DNA, 25 bp, probe
acattgaccaaattgaccacacatt

SEQ ID NO: 67691 - DNA, 25 bp, probe
ttgaccaaattgaccacacattaat

SEQ ID NO: 67692 - DNA, 25 bp, probe
gacattgaccaaattgaccacacat

SEQ ID NO: 67693 - DNA, 25 bp, probe
ttggtgatgacctcaacggaataac

SEQ ID NO: 67694 - DNA, 25 bp, probe
tgacattgaccaaattgaccacaca

SEQ ID NO: 67695 - DNA, 25 bp, probe
gtgacattgaccaaattgaccacac

SEQ ID NO: 67696 - DNA, 25 bp, probe
ttgaccacacattaatgataagctt

SEQ ID NO: 67697 - DNA, 25 bp, probe
attgaccacacattaatgataagct

SEQ ID NO: 67698 - DNA, 25 bp, probe
gttggtgatgacctcaacggaataa

SEQ ID NO: 67699 - DNA, 25 bp, probe
aattgaccacacattaatgataagc

SEQ ID NO: 67700 - DNA, 25 bp, probe
tggtgatgacctcaacggaataacg

SEQ ID NO: 67701 - DNA, 25 bp, probe
ggtgacattgaccaaattgaccaca

SEQ ID NO: 67702 - DNA, 25 bp, probe
agttggtgatgacctcaacggaata

SEQ ID NO: 67703 - DNA, 25 bp, probe
tagttggtgatgacctcaacggaat

SEQ ID NO: 67704 - DNA, 25 bp, probe
gtgatgacctcaacggaataacgtg

SEQ ID NO: 67705 - DNA, 25 bp, probe
ttagttggtgatgacctcaacggaa

SEQ ID NO: 67706 - DNA, 25 bp, probe
gaccaaattgaccacacattaatga

SEQ ID NO: 67707 - DNA, 25 bp, probe
tgaccaaattgaccacacattaatg

SEQ ID NO: 67708 - DNA, 25 bp, probe
accaaattgaccacacattaatgat

SEQ ID NO: 67709 - DNA, 25 bp, probe
tgatgacctcaacggaataacgtga

SEQ ID NO: 67710 - DNA, 25 bp, probe
cttagttggtgatgacctcaacgga

SEQ ID NO: 67711 - DNA, 25 bp, probe
ccaaattgaccacacattaatgata

SEQ ID NO: 67712 - DNA, 25 bp, probe
ggtgatgacctcaacggaataacgt

SEQ ID NO: 67713 - DNA, 25 bp, probe
aagcttagttggtgatgacctcaac

SEQ ID NO: 67714 - DNA, 25 bp, probe
cttgctaccagagaggacagctcta

SEQ ID NO: 67715 - DNA, 25 bp, probe
agcttagttggtgatgacctcaacg

SEQ ID NO: 67716 - DNA, 25 bp, probe
ttgctaccagagaggacagctctac

SEQ ID NO: 67717 - DNA, 25 bp, probe
caaattgaccacacattaatgataa

SEQ ID NO: 67718 - DNA, 25 bp, probe
aaattgaccacacattaatgataag

SEQ ID NO: 67719 - DNA, 25 bp, probe
ctggtgacattgaccaaattgacca

SEQ ID NO: 67720 - DNA, 25 bp, probe
ctacgctggtgacattgaccaaatt

SEQ ID NO: 67721 - DNA, 25 bp, probe
tggtgacattgaccaaattgaccac

SEQ ID NO: 67722 - DNA, 25 bp, probe
tacgctggtgacattgaccaaattg

SEQ ID NO: 67723 - DNA, 25 bp, probe
gctggtgacattgaccaaattgacc

SEQ ID NO: 67724 - DNA, 25 bp, probe
cgctggtgacattgaccaaattgac

SEQ ID NO: 67725 - DNA, 25 bp, probe
atacacactggatcatataagagcc

SEQ ID NO: 67726 - DNA, 25 bp, probe
catacacactggatcatataagagc

SEQ ID NO: 67727 - DNA, 25 bp, probe
tctattacggtcagatccagatgat

SEQ ID NO: 67728 - DNA, 25 bp, probe
ccaatgtatgatctattacggtcag

SEQ ID NO: 67729 - DNA, 25 bp, probe
cacatacacactggatcatataaga

SEQ ID NO: 67730 - DNA, 25 bp, probe
acatacacactggatcatataagag

SEQ ID NO: 67731 - DNA, 25 bp, probe
caatgtatgatctattacggtcaga

SEQ ID NO: 67732 - DNA, 25 bp, probe
atggaactctttagaattggtggaa

SEQ ID NO: 67733 - DNA, 25 bp, probe
tggaactctttagaattggtggaaa

SEQ ID NO: 67734 - DNA, 25 bp, probe
acgctttaagatattccttccttca

SEQ ID NO: 67735 - DNA, 25 bp, probe
tgacgctttaagatattccttcctt

SEQ ID NO: 67736 - DNA, 25 bp, probe
tatggaactctttagaattggtgga

SEQ ID NO: 67737 - DNA, 25 bp, probe
atgacgctttaagatattccttcct

SEQ ID NO: 67738 - DNA, 25 bp, probe
cgctttaagatattccttccttcag

SEQ ID NO: 67739 - DNA, 25 bp, probe
gacgctttaagatattccttccttc

SEQ ID NO: 67740 - DNA, 25 bp, probe
gatgacgctttaagatattccttcc

SEQ ID NO: 67741 - DNA, 25 bp, probe
gctacacatttggacaagacatttc

SEQ ID NO: 67742 - DNA, 25 bp, probe
tggtcaattacatgatcttatggaa

SEQ ID NO: 67743 - DNA, 25 bp, probe
cacatttggacaagacatttctgaa

SEQ ID NO: 67744 - DNA, 25 bp, probe
tacacatttggacaagacatttctg

SEQ ID NO: 67745 - DNA, 25 bp, probe
atggaactagatgacgctttaagat

SEQ ID NO: 67746 - DNA, 25 bp, probe
ctacacatttggacaagacatttct

SEQ ID NO: 67747 - DNA, 25 bp, probe
ccacatacacactggatcatataag

SEQ ID NO: 67748 - DNA, 25 bp, probe
gggtcatttacaagaagttccacat

SEQ ID NO: 67749 - DNA, 25 bp, probe
atctattacggtcagatccagatga

SEQ ID NO: 67750 - DNA, 25 bp, probe
tggaactagatgacgctttaagata

SEQ ID NO: 67751 - DNA, 25 bp, probe
ggtcaattacatgatcttatggaac

SEQ ID NO: 67752 - DNA, 25 bp, probe
atggtcaattacatgatcttatgga

SEQ ID NO: 67753 - DNA, 25 bp, probe
agatattccttccttcagtttgacc

SEQ ID NO: 67754 - DNA, 25 bp, probe
ttatggaactctttagaattggtgg

SEQ ID NO: 67755 - DNA, 25 bp, probe
agatgacgctttaagatattccttc

SEQ ID NO: 67756 - DNA, 25 bp, probe
acacatttggacaagacatttctga

SEQ ID NO: 67757 - DNA, 25 bp, probe
atttggacaagacatttctgaaacc

SEQ ID NO: 67758 - DNA, 25 bp, probe
acatttggacaagacatttctgaaa

SEQ ID NO: 67759 - DNA, 25 bp, probe
gctttaagatattccttccttcagt

SEQ ID NO: 67760 - DNA, 25 bp, probe
catataagagccctgggtcatttac

SEQ ID NO: 67761 - DNA, 25 bp, probe
tcatataagagccctgggtcattta

SEQ ID NO: 67762 - DNA, 25 bp, probe
aattactgttattgttgtggtaacc

SEQ ID NO: 67763 - DNA, 25 bp, probe
ggacaagacatttctgaaaccttta

SEQ ID NO: 67764 - DNA, 25 bp, probe
catttggacaagacatttctgaaac

SEQ ID NO: 67765 - DNA, 25 bp, probe
gatattccttccttcagtttgaccc

SEQ ID NO: 67766 - DNA, 25 bp, probe
tactgttattgttgtggtaaccagg

SEQ ID NO: 67767 - DNA, 25 bp, probe
atataagagccctgggtcatttaca

SEQ ID NO: 67768 - DNA, 25 bp, probe
aagatattccttccttcagtttgac

SEQ ID NO: 67769 - DNA, 25 bp, probe
tatgaatgcccctacttggtatatg

SEQ ID NO: 67770 - DNA, 25 bp, probe
gtatgaatgcccctacttggtatat

SEQ ID NO: 67771 - DNA, 25 bp, probe
atgaatgcccctacttggtatatgt

SEQ ID NO: 67772 - DNA, 25 bp, probe
tgaatgcccctacttggtatatgtg

SEQ ID NO: 67773 - DNA, 25 bp, probe
gaatgcccctacttggtatatgtgc

SEQ ID NO: 67774 - DNA, 25 bp, probe
ctacttggtatatgtgcccgtggtc

SEQ ID NO: 67775 - DNA, 25 bp, probe
aatgcccctacttggtatatgtgcc

SEQ ID NO: 67776 - DNA, 25 bp, probe
gcttggaaggtattatagttctgaa

SEQ ID NO: 67777 - DNA, 25 bp, probe
tatagttctgaacatcggatactgg

SEQ ID NO: 67778 - DNA, 25 bp, probe
aggtattatagttctgaacatcgga

SEQ ID NO: 67779 - DNA, 25 bp, probe
agcttggaaggtattatagttctga

SEQ ID NO: 67780 - DNA, 25 bp, probe
aaggtattatagttctgaacatcgg

SEQ ID NO: 67781 - DNA, 25 bp, probe
ggtattatagttctgaacatcggat

SEQ ID NO: 67782 - DNA, 25 bp, probe
caagaagatataaaggcgactgaat

SEQ ID NO: 67783 - DNA, 25 bp, probe
ttatagttctgaacatcggatactg

SEQ ID NO: 67784 - DNA, 25 bp, probe
cataactcacaagacacatgcaatg

SEQ ID NO: 67785 - DNA, 25 bp, probe
gtcaccataactcacaagacacatg

SEQ ID NO: 67786 - DNA, 25 bp, probe
tcaagaagatataaaggcgactgaa

SEQ ID NO: 67787 - DNA, 25 bp, probe
atcaagaagatataaaggcgactga

SEQ ID NO: 67788 - DNA, 25 bp, probe
cagcttggaaggtattatagttctg

SEQ ID NO: 67789 - DNA, 25 bp, probe
taactcacaagacacatgcaatgat

SEQ ID NO: 67790 - DNA, 25 bp, probe
ataactcacaagacacatgcaatga

SEQ ID NO: 67791 - DNA, 25 bp, probe
ggatcaagaagatataaaggcgact

SEQ ID NO: 67792 - DNA, 25 bp, probe
gatcaagaagatataaaggcgactg

SEQ ID NO: 67793 - DNA, 25 bp, probe
ttggaaggtattatagttctgaaca

SEQ ID NO: 67794 - DNA, 25 bp, probe
ccagcttggaaggtattatagttct

SEQ ID NO: 67795 - DNA, 25 bp, probe
agaagatataaaggcgactgaatag

SEQ ID NO: 67796 - DNA, 25 bp, probe
ccataactcacaagacacatgcaat

SEQ ID NO: 67797 - DNA, 25 bp, probe
ttcggatcaagaagatataaaggcg

SEQ ID NO: 67798 - DNA, 25 bp, probe
gaaggtattatagttctgaacatcg

SEQ ID NO: 67799 - DNA, 25 bp, probe
tggaaggtattatagttctgaacat

SEQ ID NO: 67800 - DNA, 25 bp, probe
cggatcaagaagatataaaggcgac

SEQ ID NO: 67801 - DNA, 25 bp, probe
gcaatgatgttatatttctctggag

SEQ ID NO: 67802 - DNA, 25 bp, probe
ctggagaacaaacagatgatgacat

SEQ ID NO: 67803 - DNA, 25 bp, probe
gatgacatctctagtacttcggatc

SEQ ID NO: 67804 - DNA, 25 bp, probe
tgatgacatctctagtacttcggat

SEQ ID NO: 67805 - DNA, 25 bp, probe
cttggaaggtattatagttctgaac

SEQ ID NO: 67806 - DNA, 25 bp, probe
gacatctctagtacttcggatcaag

SEQ ID NO: 67807 - DNA, 25 bp, probe
attatagttctgaacatcggatact

SEQ ID NO: 67808 - DNA, 25 bp, probe
aagaagatataaaggcgactgaata

SEQ ID NO: 67809 - DNA, 25 bp, probe
atgatgacatctctagtacttcgga

SEQ ID NO: 67810 - DNA, 25 bp, probe
acatctctagtacttcggatcaaga

SEQ ID NO: 67811 - DNA, 25 bp, probe
catctctagtacttcggatcaagaa

SEQ ID NO: 67812 - DNA, 25 bp, probe
tcaccataactcacaagacacatgc

SEQ ID NO: 67813 - DNA, 25 bp, probe
aactcacaagacacatgcaatgatg

SEQ ID NO: 67814 - DNA, 25 bp, probe
ggaaggtattatagttctgaacatc

SEQ ID NO: 67815 - DNA, 25 bp, probe
atgacatctctagtacttcggatca

SEQ ID NO: 67816 - DNA, 25 bp, probe
tgacatctctagtacttcggatcaa

SEQ ID NO: 67817 - DNA, 25 bp, probe
atagttctgaacatcggatactggg

SEQ ID NO: 67818 - DNA, 25 bp, probe
accataactcacaagacacatgcaa

SEQ ID NO: 67819 - DNA, 25 bp, probe
cacaagacacatgcaatgatgttat

SEQ ID NO: 67820 - DNA, 25 bp, probe
tcttcagaattcagattgagatggc

SEQ ID NO: 67821 - DNA, 25 bp, probe
cttcagaattcagattgagatggcc

SEQ ID NO: 67822 - DNA, 25 bp, probe
atcttcagaattcagattgagatgg

SEQ ID NO: 67823 - DNA, 25 bp, probe
ggagatcctgggagaagactcatag

SEQ ID NO: 67824 - DNA, 25 bp, probe
agaagggctacaatgtcaagtctga

SEQ ID NO: 67825 - DNA, 25 bp, probe
aggagatcctgggagaagactcata

SEQ ID NO: 67826 - DNA, 25 bp, probe
ccagaagggctacaatgtcaagtct

SEQ ID NO: 67827 - DNA, 25 bp, probe
cacaaaaccaagaagacggacattg

SEQ ID NO: 67828 - DNA, 25 bp, probe
catgaaggagatcctgggagaagac

SEQ ID NO: 67829 - DNA, 25 bp, probe
aaggagatcctgggagaagactcat

SEQ ID NO: 67830 - DNA, 25 bp, probe
atgaaggagatcctgggagaagact

SEQ ID NO: 67831 - DNA, 25 bp, probe
gaaggagatcctgggagaagactca

SEQ ID NO: 67832 - DNA, 25 bp, probe
tgaaggagatcctgggagaagactc

SEQ ID NO: 67833 - DNA, 25 bp, probe
cagaagggctacaatgtcaagtctg

SEQ ID NO: 67834 - DNA, 25 bp, probe
aaaaccaagaagacggacattgctg

SEQ ID NO: 67835 - DNA, 25 bp, probe
caaaaccaagaagacggacattgct

SEQ ID NO: 67836 - DNA, 25 bp, probe
gcacaaaaccaagaagacggacatt

SEQ ID NO: 67837 - DNA, 25 bp, probe
acaaaaccaagaagacggacattgc

SEQ ID NO: 67838 - DNA, 25 bp, probe
aatcttcagaattcagattgagatg

SEQ ID NO: 67839 - DNA, 25 bp, probe
gaagggctacaatgtcaagtctgac

SEQ ID NO: 67840 - DNA, 25 bp, probe
gccggaacctgcattgttttataaa

SEQ ID NO: 67841 - DNA, 25 bp, probe
agccggaacctgcattgttttataa

SEQ ID NO: 67842 - DNA, 25 bp, probe
tcatgaaggagatcctgggagaaga

SEQ ID NO: 67843 - DNA, 25 bp, probe
ccttcttcaccttgcacaaaaccaa

SEQ ID NO: 67844 - DNA, 25 bp, probe
cagccggaacctgcattgttttata

SEQ ID NO: 67845 - DNA, 25 bp, probe
cttcaccttgcacaaaaccaagaag

SEQ ID NO: 67846 - DNA, 25 bp, probe
cttcttcaccttgcacaaaaccaag

SEQ ID NO: 67847 - DNA, 25 bp, probe
ttcaccttgcacaaaaccaagaaga

SEQ ID NO: 67848 - DNA, 25 bp, probe
tcttcaccttgcacaaaaccaagaa

SEQ ID NO: 67849 - DNA, 25 bp, probe
ttcttcaccttgcacaaaaccaaga

SEQ ID NO: 67850 - DNA, 25 bp, probe
aagggctacaatgtcaagtctgacg

SEQ ID NO: 67851 - DNA, 25 bp, probe
aaatcttcagaattcagattgagat

SEQ ID NO: 67852 - DNA, 25 bp, probe
tcaccttgcacaaaaccaagaagac

SEQ ID NO: 67853 - DNA, 25 bp, probe
aaaatcttcagaattcagattgaga

SEQ ID NO: 67854 - DNA, 25 bp, probe
cttgcacaaaaccaagaagacggac

SEQ ID NO: 67855 - DNA, 25 bp, probe
taaaatcttcagaattcagattgag

SEQ ID NO: 67856 - DNA, 25 bp, probe
atgacaattccagaggacatccttg

SEQ ID NO: 67857 - DNA, 25 bp, probe
catgacaattccagaggacatcctt

SEQ ID NO: 67858 - DNA, 25 bp, probe
aacatgacaattccagaggacatcc

SEQ ID NO: 67859 - DNA, 25 bp, probe
aaacatgacaattccagaggacatc

SEQ ID NO: 67860 - DNA, 25 bp, probe
atgtgaagatgtgtgactttggcat

SEQ ID NO: 67861 - DNA, 25 bp, probe
gaagccctccaatgtccttatcaac

SEQ ID NO: 67862 - DNA, 25 bp, probe
acatgacaattccagaggacatcct

SEQ ID NO: 67863 - DNA, 25 bp, probe
atgtgaagccctccaatgtccttat

SEQ ID NO: 67864 - DNA, 25 bp, probe
tgaagccctccaatgtccttatcaa

SEQ ID NO: 67865 - DNA, 25 bp, probe
gccctccaatgtccttatcaacaag

SEQ ID NO: 67866 - DNA, 25 bp, probe
tgtgaagccctccaatgtccttatc

SEQ ID NO: 67867 - DNA, 25 bp, probe
gatgtgaagccctccaatgtcctta

SEQ ID NO: 67868 - DNA, 25 bp, probe
agccctccaatgtccttatcaacaa

SEQ ID NO: 67869 - DNA, 25 bp, probe
aagccctccaatgtccttatcaaca

SEQ ID NO: 67870 - DNA, 25 bp, probe
catgtgaagatgtgtgactttggca

SEQ ID NO: 67871 - DNA, 25 bp, probe
tgacaattccagaggacatccttgg

SEQ ID NO: 67872 - DNA, 25 bp, probe
aaaacatgacaattccagaggacat

SEQ ID NO: 67873 - DNA, 25 bp, probe
gtgaagccctccaatgtccttatca

SEQ ID NO: 67874 - DNA, 25 bp, probe
ccagaagggctacaatgtcaagtcc

SEQ ID NO: 67875 - DNA, 25 bp, probe
gaagatgtgtgactttggcatcagt

SEQ ID NO: 67876 - DNA, 25 bp, probe
tgaagatgtgtgactttggcatcag

SEQ ID NO: 67877 - DNA, 25 bp, probe
aagatgtgtgactttggcatcagtg

SEQ ID NO: 67878 - DNA, 25 bp, probe
gtgaagatgtgtgactttggcatca

SEQ ID NO: 67879 - DNA, 25 bp, probe
tgtgaagatgtgtgactttggcatc

SEQ ID NO: 67880 - DNA, 25 bp, probe
ccatgtgaagatgtgtgactttggc

SEQ ID NO: 67881 - DNA, 25 bp, probe
gccatgtgaagatgtgtgactttgg

SEQ ID NO: 67882 - DNA, 25 bp, probe
ccctccaatgtccttatcaacaagg

SEQ ID NO: 67883 - DNA, 25 bp, probe
ttatcaacaaggagggccatgtgaa

SEQ ID NO: 67884 - DNA, 25 bp, probe
gacaattccagaggacatccttggg

SEQ ID NO: 67885 - DNA, 25 bp, probe
ccttggggagattgctgtgtctatc

SEQ ID NO: 67886 - DNA, 25 bp, probe
ggccatgtgaagatgtgtgactttg

SEQ ID NO: 67887 - DNA, 25 bp, probe
agttctaccggaaggtgctggataa

SEQ ID NO: 67888 - DNA, 25 bp, probe
aagttctaccggaaggtgctggata

SEQ ID NO: 67889 - DNA, 25 bp, probe
gttctaccggaaggtgctggataaa

SEQ ID NO: 67890 - DNA, 25 bp, probe
tatcaacaaggagggccatgtgaag

SEQ ID NO: 67891 - DNA, 25 bp, probe
cttatcaacaaggagggccatgtga

SEQ ID NO: 67892 - DNA, 25 bp, probe
cttggggagattgctgtgtctatcg

SEQ ID NO: 67893 - DNA, 25 bp, probe
gtcggtgatccacagagatgtgaag

SEQ ID NO: 67894 - DNA, 25 bp, probe
tccttggggagattgctgtgtctat

SEQ ID NO: 67895 - DNA, 25 bp, probe
atccttggggagattgctgtgtcta

SEQ ID NO: 67896 - DNA, 25 bp, probe
ttctaccggaaggtgctggataaaa

SEQ ID NO: 67897 - DNA, 25 bp, probe
agaatatgtgaaccagccagatgtt

SEQ ID NO: 67898 - DNA, 25 bp, probe
cagaatatgtgaaccagccagatgt

SEQ ID NO: 67899 - DNA, 25 bp, probe
tcagaatatgtgaaccagccagatg

SEQ ID NO: 67900 - DNA, 25 bp, probe
tctcttgacctttcagaatatgtga

SEQ ID NO: 67901 - DNA, 25 bp, probe
ttcagaatatgtgaaccagccagat

SEQ ID NO: 67902 - DNA, 25 bp, probe
tatggagtccagtctaagcagagag

SEQ ID NO: 67903 - DNA, 25 bp, probe
caccttctcttgacctttcagaata

SEQ ID NO: 67904 - DNA, 25 bp, probe
accttctcttgacctttcagaatat

SEQ ID NO: 67905 - DNA, 25 bp, probe
gtatggagtccagtctaagcagaga

SEQ ID NO: 67906 - DNA, 25 bp, probe
ccttctcttgacctttcagaatatg

SEQ ID NO: 67907 - DNA, 25 bp, probe
ttctcttgacctttcagaatatgtg

SEQ ID NO: 67908 - DNA, 25 bp, probe
cttctcttgacctttcagaatatgt

SEQ ID NO: 67909 - DNA, 25 bp, probe
cttgacctttcagaatatgtgaacc

SEQ ID NO: 67910 - DNA, 25 bp, probe
ttgacctttcagaatatgtgaacca

SEQ ID NO: 67911 - DNA, 25 bp, probe
tcaccttctcttgacctttcagaat

SEQ ID NO: 67912 - DNA, 25 bp, probe
tgacctttcagaatatgtgaaccag

SEQ ID NO: 67913 - DNA, 25 bp, probe
tcttgacctttcagaatatgtgaac

SEQ ID NO: 67914 - DNA, 25 bp, probe
ctcttgacctttcagaatatgtgaa

SEQ ID NO: 67915 - DNA, 25 bp, probe
ggtatggagtccagtctaagcagag

SEQ ID NO: 67916 - DNA, 25 bp, probe
ctttcagaatatgtgaaccagccag

SEQ ID NO: 67917 - DNA, 25 bp, probe
gacctttcagaatatgtgaaccagc

SEQ ID NO: 67918 - DNA, 25 bp, probe
tttcagaatatgtgaaccagccaga

SEQ ID NO: 67919 - DNA, 25 bp, probe
atggagtccagtctaagcagagaga

SEQ ID NO: 67920 - DNA, 25 bp, probe
tggtatggagtccagtctaagcaga

SEQ ID NO: 67921 - DNA, 25 bp, probe
cctttcagaatatgtgaaccagcca

SEQ ID NO: 67922 - DNA, 25 bp, probe
acctttcagaatatgtgaaccagcc

SEQ ID NO: 67923 - DNA, 25 bp, probe
gtcaccttctcttgacctttcagaa

SEQ ID NO: 67924 - DNA, 25 bp, probe
tggagtccagtctaagcagagagac

SEQ ID NO: 67925 - DNA, 25 bp, probe
ctggtatggagtccagtctaagcag

SEQ ID NO: 67926 - DNA, 25 bp, probe
ccctaatgggtcaccttctcttgac

SEQ ID NO: 67927 - DNA, 25 bp, probe
agcctggtatggagtccagtctaag

SEQ ID NO: 67928 - DNA, 25 bp, probe
ttcccctaatgggtcaccttctctt

SEQ ID NO: 67929 - DNA, 25 bp, probe
cctggtatggagtccagtctaagca

SEQ ID NO: 67930 - DNA, 25 bp, probe
cagcctggtatggagtccagtctaa

SEQ ID NO: 67931 - DNA, 25 bp, probe
cttcccctaatgggtcaccttctct

SEQ ID NO: 67932 - DNA, 25 bp, probe
cagaggaagattatggagatggagc

SEQ ID NO: 67933 - DNA, 25 bp, probe
gcagaggaagattatggagatggag

SEQ ID NO: 67934 - DNA, 25 bp, probe
gaagattatggagatggagctgagt

SEQ ID NO: 67935 - DNA, 25 bp, probe
gttgcagaggaagattatggagatg

SEQ ID NO: 67936 - DNA, 25 bp, probe
agttgcagaggaagattatggagat

SEQ ID NO: 67937 - DNA, 25 bp, probe
aagattatggagatggagctgagtg

SEQ ID NO: 67938 - DNA, 25 bp, probe
ggaagattatggagatggagctgag

SEQ ID NO: 67939 - DNA, 25 bp, probe
gaggaagattatggagatggagctg

SEQ ID NO: 67940 - DNA, 25 bp, probe
gagttgcagaggaagattatggaga

SEQ ID NO: 67941 - DNA, 25 bp, probe
agaggaagattatggagatggagct

SEQ ID NO: 67942 - DNA, 25 bp, probe
ttgcagaggaagattatggagatgg

SEQ ID NO: 67943 - DNA, 25 bp, probe
tgagttgcagaggaagattatggag

SEQ ID NO: 67944 - DNA, 25 bp, probe
aggaagattatggagatggagctga

SEQ ID NO: 67945 - DNA, 25 bp, probe
gattatggagatggagctgagtgtg

SEQ ID NO: 67946 - DNA, 25 bp, probe
agattatggagatggagctgagtgt

SEQ ID NO: 67947 - DNA, 25 bp, probe
ctgagttgcagaggaagattatgga

SEQ ID NO: 67948 - DNA, 25 bp, probe
tgcagaggaagattatggagatgga

SEQ ID NO: 67949 - DNA, 25 bp, probe
cctgagttgcagaggaagattatgg

SEQ ID NO: 67950 - DNA, 25 bp, probe
attatggagatggagctgagtgtgc

SEQ ID NO: 67951 - DNA, 25 bp, probe
atcctgagttgcagaggaagattat

SEQ ID NO: 67952 - DNA, 25 bp, probe
gatcctgagttgcagaggaagatta

SEQ ID NO: 67953 - DNA, 25 bp, probe
tcctgagttgcagaggaagattatg

SEQ ID NO: 67954 - DNA, 25 bp, probe
cacccacagaaagaaggcaaatctt

SEQ ID NO: 67955 - DNA, 25 bp, probe
agaaagaaggcaaatctttgggatg

SEQ ID NO: 67956 - DNA, 25 bp, probe
cagaaagaaggcaaatctttgggat

SEQ ID NO: 67957 - DNA, 25 bp, probe
cacagaaagaaggcaaatctttggg

SEQ ID NO: 67958 - DNA, 25 bp, probe
ccacagaaagaaggcaaatctttgg

SEQ ID NO: 67959 - DNA, 25 bp, probe
cccacagaaagaaggcaaatctttg

SEQ ID NO: 67960 - DNA, 25 bp, probe
acagaaagaaggcaaatctttggga

SEQ ID NO: 67961 - DNA, 25 bp, probe
cgatcctgagttgcagaggaagatt

SEQ ID NO: 67962 - DNA, 25 bp, probe
acccacagaaagaaggcaaatcttt

SEQ ID NO: 67963 - DNA, 25 bp, probe
gaaagaaggcaaatctttgggatgc

SEQ ID NO: 67964 - DNA, 25 bp, probe
aaagaaggcaaatctttgggatgcg

SEQ ID NO: 67965 - DNA, 25 bp, probe
cctttatctctgtcccatacccatc

SEQ ID NO: 67966 - DNA, 25 bp, probe
ctttatctctgtcccatacccatcg

SEQ ID NO: 67967 - DNA, 25 bp, probe
tttatctctgtcccatacccatcgt

SEQ ID NO: 67968 - DNA, 25 bp, probe
ccctttatctctgtcccatacccat

SEQ ID NO: 67969 - DNA, 25 bp, probe
ctttaggtctggactttgtggactc

SEQ ID NO: 67970 - DNA, 25 bp, probe
ttatctctgtcccatacccatcgtg

SEQ ID NO: 67971 - DNA, 25 bp, probe
cttcccctttatctctgtcccatac

SEQ ID NO: 67972 - DNA, 25 bp, probe
tcttcccctttatctctgtcccata

SEQ ID NO: 67973 - DNA, 25 bp, probe
ctgtgctttaggtctggactttgtg

SEQ ID NO: 67974 - DNA, 25 bp, probe
cgtattcacagccttcagtcctcag

SEQ ID NO: 67975 - DNA, 25 bp, probe
tatctctgtcccatacccatcgtgt

SEQ ID NO: 67976 - DNA, 25 bp, probe
ttcccctttatctctgtcccatacc

SEQ ID NO: 67977 - DNA, 25 bp, probe
ctcttcccctttatctctgtcccat

SEQ ID NO: 67978 - DNA, 25 bp, probe
tttaggtctggactttgtggactcg

SEQ ID NO: 67979 - DNA, 25 bp, probe
gtgctttaggtctggactttgtgga

SEQ ID NO: 67980 - DNA, 25 bp, probe
gctttaggtctggactttgtggact

SEQ ID NO: 67981 - DNA, 25 bp, probe
tgtgctttaggtctggactttgtgg

SEQ ID NO: 67982 - DNA, 25 bp, probe
tgctttaggtctggactttgtggac

SEQ ID NO: 67983 - DNA, 25 bp, probe
gaactttgtgtaccaaaatgcactg

SEQ ID NO: 67984 - DNA, 25 bp, probe
cttcgtgtctgtctctggttttcct

SEQ ID NO: 67985 - DNA, 25 bp, probe
tcccctttatctctgtcccataccc

SEQ ID NO: 67986 - DNA, 25 bp, probe
tctgtctctggttttcctgggtttg

SEQ ID NO: 67987 - DNA, 25 bp, probe
gtctgtctctggttttcctgggttt

SEQ ID NO: 67988 - DNA, 25 bp, probe
ttcgtgtctgtctctggttttcctg

SEQ ID NO: 67989 - DNA, 25 bp, probe
cctcttcccctttatctctgtccca

SEQ ID NO: 67990 - DNA, 25 bp, probe
ggaactttgtgtaccaaaatgcact

SEQ ID NO: 67991 - DNA, 25 bp, probe
cccctttatctctgtcccataccca

SEQ ID NO: 67992 - DNA, 25 bp, probe
aactttgtgtaccaaaatgcactgg

SEQ ID NO: 67993 - DNA, 25 bp, probe
gggaactttgtgtaccaaaatgcac

SEQ ID NO: 67994 - DNA, 25 bp, probe
agctgtgctttaggtctggactttg

SEQ ID NO: 67995 - DNA, 25 bp, probe
ttgtgtaccaaaatgcactggcttc

SEQ ID NO: 67996 - DNA, 25 bp, probe
tttgtgtaccaaaatgcactggctt

SEQ ID NO: 67997 - DNA, 25 bp, probe
ggggaactttgtgtaccaaaatgca

SEQ ID NO: 67998 - DNA, 25 bp, probe
gtgtaccaaaatgcactggcttcag

SEQ ID NO: 67999 - DNA, 25 bp, probe
cggggaactttgtgtaccaaaatgc

SEQ ID NO: 68000 - DNA, 25 bp, probe
gcggggaactttgtgtaccaaaatg

SEQ ID NO: 68001 - DNA, 25 bp, probe
ctttgtgtaccaaaatgcactggct

SEQ ID NO: 68002 - DNA, 25 bp, probe
actttgtgtaccaaaatgcactggc

SEQ ID NO: 68003 - DNA, 25 bp, probe
ggaacgataatgaagaacagagacg

SEQ ID NO: 68004 - DNA, 25 bp, probe
gagagagggaacgataatgaagaac

SEQ ID NO: 68005 - DNA, 25 bp, probe
gataatgaagaacagagacgtggag

SEQ ID NO: 68006 - DNA, 25 bp, probe
gagggaacgataatgaagaacagag

SEQ ID NO: 68007 - DNA, 25 bp, probe
gagagggaacgataatgaagaacag

SEQ ID NO: 68008 - DNA, 25 bp, probe
gggaacgataatgaagaacagagac

SEQ ID NO: 68009 - DNA, 25 bp, probe
agggaacgataatgaagaacagaga

SEQ ID NO: 68010 - DNA, 25 bp, probe
agagggaacgataatgaagaacaga

SEQ ID NO: 68011 - DNA, 25 bp, probe
agagagggaacgataatgaagaaca

SEQ ID NO: 68012 - DNA, 25 bp, probe
ggagagagggaacgataatgaagaa

SEQ ID NO: 68013 - DNA, 25 bp, probe
aatctgtttatggaatcaaggaagt

SEQ ID NO: 68014 - DNA, 25 bp, probe
tttgatcttagggaatggatgtacc

SEQ ID NO: 68015 - DNA, 25 bp, probe
taccttaaacaagtagccctgtatg

SEQ ID NO: 68016 - DNA, 25 bp, probe
gaggagagagggaacgataatgaag

SEQ ID NO: 68017 - DNA, 25 bp, probe
gaagaggagagagggaacgataatg

SEQ ID NO: 68018 - DNA, 25 bp, probe
agaagaggagagagggaacgataat

SEQ ID NO: 68019 - DNA, 25 bp, probe
ataatgaagaacagagacgtggagg

SEQ ID NO: 68020 - DNA, 25 bp, probe
gaatttgatcttagggaatggatgt

SEQ ID NO: 68021 - DNA, 25 bp, probe
tgaatttgatcttagggaatggatg

SEQ ID NO: 68022 - DNA, 25 bp, probe
cttaaacaagtagccctgtatggag

SEQ ID NO: 68023 - DNA, 25 bp, probe
tctgtttatggaatcaaggaagtaa

SEQ ID NO: 68024 - DNA, 25 bp, probe
taaacaagtagccctgtatggagaa

SEQ ID NO: 68025 - DNA, 25 bp, probe
ttaaacaagtagccctgtatggaga

SEQ ID NO: 68026 - DNA, 25 bp, probe
aggagagagggaacgataatgaaga

SEQ ID NO: 68027 - DNA, 25 bp, probe
agaggagagagggaacgataatgaa

SEQ ID NO: 68028 - DNA, 25 bp, probe
aagaggagagagggaacgataatga

SEQ ID NO: 68029 - DNA, 25 bp, probe
caaatctgtttatggaatcaaggaa

SEQ ID NO: 68030 - DNA, 25 bp, probe
tttgaatttgatcttagggaatgga

SEQ ID NO: 68031 - DNA, 25 bp, probe
gtaccttaaacaagtagccctgtat

SEQ ID NO: 68032 - DNA, 25 bp, probe
atctgtttatggaatcaaggaagta

SEQ ID NO: 68033 - DNA, 25 bp, probe
atttgatcttagggaatggatgtac

SEQ ID NO: 68034 - DNA, 25 bp, probe
cgataatgaagaacagagacgtgga

SEQ ID NO: 68035 - DNA, 25 bp, probe
atggatgtaccttaaacaagtagcc

SEQ ID NO: 68036 - DNA, 25 bp, probe
ctgtttatggaatcaaggaagtaac

SEQ ID NO: 68037 - DNA, 25 bp, probe
gggaatggatgtaccttaaacaagt

SEQ ID NO: 68038 - DNA, 25 bp, probe
ttgaatttgatcttagggaatggat

SEQ ID NO: 68039 - DNA, 25 bp, probe
aatggatgtaccttaaacaagtagc

SEQ ID NO: 68040 - DNA, 25 bp, probe
aaatctgtttatggaatcaaggaag

SEQ ID NO: 68041 - DNA, 25 bp, probe
tgtaccttaaacaagtagccctgta

SEQ ID NO: 68042 - DNA, 25 bp, probe
gatgtaccttaaacaagtagccctg

SEQ ID NO: 68043 - DNA, 25 bp, probe
gagaagaggagagagggaacgataa

SEQ ID NO: 68044 - DNA, 25 bp, probe
agggaatggatgtaccttaaacaag

SEQ ID NO: 68045 - DNA, 25 bp, probe
tagggaatggatgtaccttaaacaa

SEQ ID NO: 68046 - DNA, 25 bp, probe
ttagggaatggatgtaccttaaaca

SEQ ID NO: 68047 - DNA, 25 bp, probe
aagcatacaggtgaagagaatatcg

SEQ ID NO: 68048 - DNA, 25 bp, probe
tgaagcatacaggtgaagagaatat

SEQ ID NO: 68049 - DNA, 25 bp, probe
atacaggtgaagagaatatcgtgga

SEQ ID NO: 68050 - DNA, 25 bp, probe
catacaggtgaagagaatatcgtgg

SEQ ID NO: 68051 - DNA, 25 bp, probe
gaagcatacaggtgaagagaatatc

SEQ ID NO: 68052 - DNA, 25 bp, probe
tacaggtgaagagaatatcgtggaa

SEQ ID NO: 68053 - DNA, 25 bp, probe
taaggaaccacaagcagtattctat

SEQ ID NO: 68054 - DNA, 25 bp, probe
ttaaggaaccacaagcagtattcta

SEQ ID NO: 68055 - DNA, 25 bp, probe
aaggaaccacaagcagtattctatg

SEQ ID NO: 68056 - DNA, 25 bp, probe
gcatacaggtgaagagaatatcgtg

SEQ ID NO: 68057 - DNA, 25 bp, probe
agcatacaggtgaagagaatatcgt

SEQ ID NO: 68058 - DNA, 25 bp, probe
tgttggattcagaaggacatatcaa

SEQ ID NO: 68059 - DNA, 25 bp, probe
gtacttcgtcatggaatatgtcaac

SEQ ID NO: 68060 - DNA, 25 bp, probe
tgtacttcgtcatggaatatgtcaa

SEQ ID NO: 68061 - DNA, 25 bp, probe
ctgaagcatacaggtgaagagaata

SEQ ID NO: 68062 - DNA, 25 bp, probe
ctgtacttcgtcatggaatatgtca

SEQ ID NO: 68063 - DNA, 25 bp, probe
gctgactgtggacgactcttaataa

SEQ ID NO: 68064 - DNA, 25 bp, probe
gaagaaggatgtggtgattcaggat

SEQ ID NO: 68065 - DNA, 25 bp, probe
gctgtacttcgtcatggaatatgtc

SEQ ID NO: 68066 - DNA, 25 bp, probe
aagaaggatgtggtgattcaggatg

SEQ ID NO: 68067 - DNA, 25 bp, probe
gaaggatgtggtgattcaggatgat

SEQ ID NO: 68068 - DNA, 25 bp, probe
tgactgtggacgactcttaataaat

SEQ ID NO: 68069 - DNA, 25 bp, probe
ctgactgtggacgactcttaataaa

SEQ ID NO: 68070 - DNA, 25 bp, probe
ccatcggattgttctttcttcataa

SEQ ID NO: 68071 - DNA, 25 bp, probe
gataacgtcatgttggattcagaag

SEQ ID NO: 68072 - DNA, 25 bp, probe
agataacgtcatgttggattcagaa

SEQ ID NO: 68073 - DNA, 25 bp, probe
tagataacgtcatgttggattcaga

SEQ ID NO: 68074 - DNA, 25 bp, probe
tttaaggaaccacaagcagtattct

SEQ ID NO: 68075 - DNA, 25 bp, probe
aaggatgtggtgattcaggatgatg

SEQ ID NO: 68076 - DNA, 25 bp, probe
atttaaggaaccacaagcagtattc

SEQ ID NO: 68077 - DNA, 25 bp, probe
gttagataacgtcatgttggattca

SEQ ID NO: 68078 - DNA, 25 bp, probe
tgaagttagataacgtcatgttgga

SEQ ID NO: 68079 - DNA, 25 bp, probe
aatttaaggaaccacaagcagtatt

SEQ ID NO: 68080 - DNA, 25 bp, probe
ctgaagttagataacgtcatgttgg

SEQ ID NO: 68081 - DNA, 25 bp, probe
ttagataacgtcatgttggattcag

SEQ ID NO: 68082 - DNA, 25 bp, probe
agttagataacgtcatgttggattc

SEQ ID NO: 68083 - DNA, 25 bp, probe
gaagttagataacgtcatgttggat

SEQ ID NO: 68084 - DNA, 25 bp, probe
gactgtggacgactcttaataaatt

SEQ ID NO: 68085 - DNA, 25 bp, probe
ataacgtcatgttggattcagaagg

SEQ ID NO: 68086 - DNA, 25 bp, probe
caggtgaagagaatatcgtggaaac

SEQ ID NO: 68087 - DNA, 25 bp, probe
gttggattcagaaggacatatcaaa

SEQ ID NO: 68088 - DNA, 25 bp, probe
tctgaagttagataacgtcatgttg

SEQ ID NO: 68089 - DNA, 25 bp, probe
tgctgactgtggacgactcttaata

SEQ ID NO: 68090 - DNA, 25 bp, probe
acaggtgaagagaatatcgtggaaa

SEQ ID NO: 68091 - DNA, 25 bp, probe
tgaaggttacactgatattaaggca

SEQ ID NO: 68092 - DNA, 25 bp, probe
aatataataacttgttggaggctgc

SEQ ID NO: 68093 - DNA, 25 bp, probe
gcaggctgtggaatataataacttg

SEQ ID NO: 68094 - DNA, 25 bp, probe
tggaatataataacttgttggaggc

SEQ ID NO: 68095 - DNA, 25 bp, probe
ggcaggctgtggaatataataactt

SEQ ID NO: 68096 - DNA, 25 bp, probe
caggctgtggaatataataacttgt

SEQ ID NO: 68097 - DNA, 25 bp, probe
ggaatataataacttgttggaggct

SEQ ID NO: 68098 - DNA, 25 bp, probe
atgaaggttacactgatattaaggc

SEQ ID NO: 68099 - DNA, 25 bp, probe
tcaagttatcctggagtcttattgg

SEQ ID NO: 68100 - DNA, 25 bp, probe
aggcaggctgtggaatataataact

SEQ ID NO: 68101 - DNA, 25 bp, probe
agtcaagttatcctggagtcttatt

SEQ ID NO: 68102 - DNA, 25 bp, probe
gctgtggaatataataacttgttgg

SEQ ID NO: 68103 - DNA, 25 bp, probe
ggctgtggaatataataacttgttg

SEQ ID NO: 68104 - DNA, 25 bp, probe
aggctgtggaatataataacttgtt

SEQ ID NO: 68105 - DNA, 25 bp, probe
gtcaagttatcctggagtcttattg

SEQ ID NO: 68106 - DNA, 25 bp, probe
caagttatcctggagtcttattggc

SEQ ID NO: 68107 - DNA, 25 bp, probe
aaggttacactgatattaaggcagg

SEQ ID NO: 68108 - DNA, 25 bp, probe
tcagtcaagttatcctggagtctta

SEQ ID NO: 68109 - DNA, 25 bp, probe
atataataacttgttggaggctgcc

SEQ ID NO: 68110 - DNA, 25 bp, probe
cagtcaagttatcctggagtcttat

SEQ ID NO: 68111 - DNA, 25 bp, probe
gaaggttacactgatattaaggcag

SEQ ID NO: 68112 - DNA, 25 bp, probe
aatgaagacacagatgagagacacc

SEQ ID NO: 68113 - DNA, 25 bp, probe
gaatataataacttgttggaggctg

SEQ ID NO: 68114 - DNA, 25 bp, probe
caggcaggctgtggaatataataac

SEQ ID NO: 68115 - DNA, 25 bp, probe
gtggaatataataacttgttggagg

SEQ ID NO: 68116 - DNA, 25 bp, probe
acttacctagaatatgacttccagg

SEQ ID NO: 68117 - DNA, 25 bp, probe
ctcagtcaagttatcctggagtctt

SEQ ID NO: 68118 - DNA, 25 bp, probe
ttggatgaaggttacactgatatta

SEQ ID NO: 68119 - DNA, 25 bp, probe
tggatgaaggttacactgatattaa

SEQ ID NO: 68120 - DNA, 25 bp, probe
gaagacacagatgagagacaccaag

SEQ ID NO: 68121 - DNA, 25 bp, probe
aacttacctagaatatgacttccag

SEQ ID NO: 68122 - DNA, 25 bp, probe
gaaatgaagacacagatgagagaca

SEQ ID NO: 68123 - DNA, 25 bp, probe
ccaggtttatagatgtaggaaagga

SEQ ID NO: 68124 - DNA, 25 bp, probe
aaatgaagacacagatgagagacac

SEQ ID NO: 68125 - DNA, 25 bp, probe
agatgtccaggtttatagatgtagg

SEQ ID NO: 68126 - DNA, 25 bp, probe
gcattagttggaagtcatttctgtt

SEQ ID NO: 68127 - DNA, 25 bp, probe
aaaggcattagttggaagtcatttc

SEQ ID NO: 68128 - DNA, 25 bp, probe
aaggcattagttggaagtcatttct

SEQ ID NO: 68129 - DNA, 25 bp, probe
atcagatgtccaggtttatagatgt

SEQ ID NO: 68130 - DNA, 25 bp, probe
cctcctctgtgtgtttaatagatga

SEQ ID NO: 68131 - DNA, 25 bp, probe
gatgaaggttacactgatattaagg

SEQ ID NO: 68132 - DNA, 25 bp, probe
ggatgaaggttacactgatattaag

SEQ ID NO: 68133 - DNA, 25 bp, probe
atgaagacacagatgagagacacca

SEQ ID NO: 68134 - DNA, 25 bp, probe
cgaaatgaagacacagatgagagac

SEQ ID NO: 68135 - DNA, 25 bp, probe
ctatctaagtcacaggtggaggacc

SEQ ID NO: 68136 - DNA, 25 bp, probe
gctatctaagtcacaggtggaggac

SEQ ID NO: 68137 - DNA, 25 bp, probe
agctatctaagtcacaggtggagga

SEQ ID NO: 68138 - DNA, 25 bp, probe
cagctatctaagtcacaggtggagg

SEQ ID NO: 68139 - DNA, 25 bp, probe
cagagtcacctgatgtcaaccttgt

SEQ ID NO: 68140 - DNA, 25 bp, probe
ctcagtcttccatgtcagagtcacc

SEQ ID NO: 68141 - DNA, 25 bp, probe
cctcagtcttccatgtcagagtcac

SEQ ID NO: 68142 - DNA, 25 bp, probe
agagtcacctgatgtcaaccttgtg

SEQ ID NO: 68143 - DNA, 25 bp, probe
gcagctatctaagtcacaggtggag

SEQ ID NO: 68144 - DNA, 25 bp, probe
tcagtcttccatgtcagagtcacct

SEQ ID NO: 68145 - DNA, 25 bp, probe
cagcagctatctaagtcacaggtgg

SEQ ID NO: 68146 - DNA, 25 bp, probe
ccagcagctatctaagtcacaggtg

SEQ ID NO: 68147 - DNA, 25 bp, probe
cagtcttccatgtcagagtcacctg

SEQ ID NO: 68148 - DNA, 25 bp, probe
agcagctatctaagtcacaggtgga

SEQ ID NO: 68149 - DNA, 25 bp, probe
catgtcagagtcacctgatgtcaac

SEQ ID NO: 68150 - DNA, 25 bp, probe
cttgtgacccagcagctatctaagt

SEQ ID NO: 68151 - DNA, 25 bp, probe
tcttccatgtcagagtcacctgatg

SEQ ID NO: 68152 - DNA, 25 bp, probe
gtcttccatgtcagagtcacctgat

SEQ ID NO: 68153 - DNA, 25 bp, probe
ttgtgacccagcagctatctaagtc

SEQ ID NO: 68154 - DNA, 25 bp, probe
ttccatgtcagagtcacctgatgtc

SEQ ID NO: 68155 - DNA, 25 bp, probe
cttccatgtcagagtcacctgatgt

SEQ ID NO: 68156 - DNA, 25 bp, probe
tatctaagtcacaggtggaggaccc

SEQ ID NO: 68157 - DNA, 25 bp, probe
tcagagtcacctgatgtcaaccttg

SEQ ID NO: 68158 - DNA, 25 bp, probe
gtcagagtcacctgatgtcaacctt

SEQ ID NO: 68159 - DNA, 25 bp, probe
ccttgtgacccagcagctatctaag

SEQ ID NO: 68160 - DNA, 25 bp, probe
atgtcagagtcacctgatgtcaacc

SEQ ID NO: 68161 - DNA, 25 bp, probe
ccatgtcagagtcacctgatgtcaa

SEQ ID NO: 68162 - DNA, 25 bp, probe
gacccagcagctatctaagtcacag

SEQ ID NO: 68163 - DNA, 25 bp, probe
agtcttccatgtcagagtcacctga

SEQ ID NO: 68164 - DNA, 25 bp, probe
gagtcacctgatgtcaaccttgtga

SEQ ID NO: 68165 - DNA, 25 bp, probe
tccatgtcagagtcacctgatgtca

SEQ ID NO: 68166 - DNA, 25 bp, probe
tgtcagagtcacctgatgtcaacct

SEQ ID NO: 68167 - DNA, 25 bp, probe
tgacccagcagctatctaagtcaca

SEQ ID NO: 68168 - DNA, 25 bp, probe
tgtgacccagcagctatctaagtca

SEQ ID NO: 68169 - DNA, 25 bp, probe
tcagatacagaggacagtgctggag

SEQ ID NO: 68170 - DNA, 25 bp, probe
ctcagatacagaggacagtgctgga

SEQ ID NO: 68171 - DNA, 25 bp, probe
tcacttcagagagctcagatacaga

SEQ ID NO: 68172 - DNA, 25 bp, probe
cacttcagagagctcagatacagag

SEQ ID NO: 68173 - DNA, 25 bp, probe
ctcacttcagagagctcagatacag

SEQ ID NO: 68174 - DNA, 25 bp, probe
cttcagagagctcagatacagagga

SEQ ID NO: 68175 - DNA, 25 bp, probe
ttcagagagctcagatacagaggac

SEQ ID NO: 68176 - DNA, 25 bp, probe
acttcagagagctcagatacagagg

SEQ ID NO: 68177 - DNA, 25 bp, probe
cagagagctcagatacagaggacag

SEQ ID NO: 68178 - DNA, 25 bp, probe
gagagctcagatacagaggacagtg

SEQ ID NO: 68179 - DNA, 25 bp, probe
agagagctcagatacagaggacagt

SEQ ID NO: 68180 - DNA, 25 bp, probe
tcagagagctcagatacagaggaca

SEQ ID NO: 68181 - DNA, 25 bp, probe
ttgattgaatgtggaatgaagtacg

SEQ ID NO: 68182 - DNA, 25 bp, probe
cgattacgcttcagagataccaatg

SEQ ID NO: 68183 - DNA, 25 bp, probe
taccaatgctactctcaacaagttc

SEQ ID NO: 68184 - DNA, 25 bp, probe
ctaccaatgctactctcaacaagtt

SEQ ID NO: 68185 - DNA, 25 bp, probe
gattacgcttcagagataccaatgg

SEQ ID NO: 68186 - DNA, 25 bp, probe
aatgctactctcaacaagttcacag

SEQ ID NO: 68187 - DNA, 25 bp, probe
caatgctactctcaacaagttcaca

SEQ ID NO: 68188 - DNA, 25 bp, probe
atgctactctcaacaagttcacaga

SEQ ID NO: 68189 - DNA, 25 bp, probe
ccaatgctactctcaacaagttcac

SEQ ID NO: 68190 - DNA, 25 bp, probe
cctaccaatgctactctcaacaagt

SEQ ID NO: 68191 - DNA, 25 bp, probe
accaatgctactctcaacaagttca

SEQ ID NO: 68192 - DNA, 25 bp, probe
ttgctttgattgaatgtggaatgaa

SEQ ID NO: 68193 - DNA, 25 bp, probe
tgattgaatgtggaatgaagtacgt

SEQ ID NO: 68194 - DNA, 25 bp, probe
cttgctttgattgaatgtggaatga

SEQ ID NO: 68195 - DNA, 25 bp, probe
tgacgacttcgatagtagatgattg

SEQ ID NO: 68196 - DNA, 25 bp, probe
gtgacgacttcgatagtagatgatt

SEQ ID NO: 68197 - DNA, 25 bp, probe
cgacttcgatagtagatgattggtt

SEQ ID NO: 68198 - DNA, 25 bp, probe
acttgctttgattgaatgtggaatg

SEQ ID NO: 68199 - DNA, 25 bp, probe
gacgacttcgatagtagatgattgg

SEQ ID NO: 68200 - DNA, 25 bp, probe
agtgacgacttcgatagtagatgat

SEQ ID NO: 68201 - DNA, 25 bp, probe
tgtgttcagcagaaagaaatgtaaa

SEQ ID NO: 68202 - DNA, 25 bp, probe
gctttgattgaatgtggaatgaagt

SEQ ID NO: 68203 - DNA, 25 bp, probe
tgctttgattgaatgtggaatgaag

SEQ ID NO: 68204 - DNA, 25 bp, probe
tatggagtgacgacttcgatagtag

SEQ ID NO: 68205 - DNA, 25 bp, probe
acgacttcgatagtagatgattggt

SEQ ID NO: 68206 - DNA, 25 bp, probe
gagtgacgacttcgatagtagatga

SEQ ID NO: 68207 - DNA, 25 bp, probe
gtatggagtgacgacttcgatagta

SEQ ID NO: 68208 - DNA, 25 bp, probe
ataactcacaaccctaccaatgcta

SEQ ID NO: 68209 - DNA, 25 bp, probe
tgttcagcagaaagaaatgtaaatg

SEQ ID NO: 68210 - DNA, 25 bp, probe
gtgttcagcagaaagaaatgtaaat

SEQ ID NO: 68211 - DNA, 25 bp, probe
ctgataactcacaaccctaccaatg

SEQ ID NO: 68212 - DNA, 25 bp, probe
tctgataactcacaaccctaccaat

SEQ ID NO: 68213 - DNA, 25 bp, probe
ttctgataactcacaaccctaccaa

SEQ ID NO: 68214 - DNA, 25 bp, probe
tttctgataactcacaaccctacca

SEQ ID NO: 68215 - DNA, 25 bp, probe
ctgtgttcagcagaaagaaatgtaa

SEQ ID NO: 68216 - DNA, 25 bp, probe
ggagtgacgacttcgatagtagatg

SEQ ID NO: 68217 - DNA, 25 bp, probe
taactcacaaccctaccaatgctac

SEQ ID NO: 68218 - DNA, 25 bp, probe
gttcagcagaaagaaatgtaaatga

SEQ ID NO: 68219 - DNA, 25 bp, probe
gacttcgatagtagatgattggtta

SEQ ID NO: 68220 - DNA, 25 bp, probe
cacttgctttgattgaatgtggaat

SEQ ID NO: 68221 - DNA, 25 bp, probe
ctttgattgaatgtggaatgaagta

SEQ ID NO: 68222 - DNA, 25 bp, probe
tggagtgacgacttcgatagtagat

SEQ ID NO: 68223 - DNA, 25 bp, probe
atggagtgacgacttcgatagtaga

SEQ ID NO: 68224 - DNA, 25 bp, probe
tttgattgaatgtggaatgaagtac

SEQ ID NO: 68225 - DNA, 25 bp, probe
ctaataagcatgatggtagagtcct

SEQ ID NO: 68226 - DNA, 25 bp, probe
aataagcatgatggtagagtccttg

SEQ ID NO: 68227 - DNA, 25 bp, probe
taataagcatgatggtagagtcctt

SEQ ID NO: 68228 - DNA, 25 bp, probe
ctaatgactcaggcaacatctactg

SEQ ID NO: 68229 - DNA, 25 bp, probe
gaagcagtcaccaagataatctgag

SEQ ID NO: 68230 - DNA, 25 bp, probe
gctaatgactcaggcaacatctact

SEQ ID NO: 68231 - DNA, 25 bp, probe
tacctcacagtgcttaaagaagaat

SEQ ID NO: 68232 - DNA, 25 bp, probe
ttacctcacagtgcttaaagaagaa

SEQ ID NO: 68233 - DNA, 25 bp, probe
caggcaacatctactgagctaatag

SEQ ID NO: 68234 - DNA, 25 bp, probe
acctcacagtgcttaaagaagaatt

SEQ ID NO: 68235 - DNA, 25 bp, probe
tttacctcacagtgcttaaagaaga

SEQ ID NO: 68236 - DNA, 25 bp, probe
aagcagtcaccaagataatctgagg

SEQ ID NO: 68237 - DNA, 25 bp, probe
ggaagcagtcaccaagataatctga

SEQ ID NO: 68238 - DNA, 25 bp, probe
gctaataagcatgatggtagagtcc

SEQ ID NO: 68239 - DNA, 25 bp, probe
gatacagtgtgaagtctgacatttg

SEQ ID NO: 68240 - DNA, 25 bp, probe
agctaatgactcaggcaacatctac

SEQ ID NO: 68241 - DNA, 25 bp, probe
gagctaatgactcaggcaacatcta

SEQ ID NO: 68242 - DNA, 25 bp, probe
ggatacagtgtgaagtctgacattt

SEQ ID NO: 68243 - DNA, 25 bp, probe
atacagtgtgaagtctgacatttgg

SEQ ID NO: 68244 - DNA, 25 bp, probe
aagataatctgaggtttggcatgtc

SEQ ID NO: 68245 - DNA, 25 bp, probe
gcagtcaccaagataatctgaggtt

SEQ ID NO: 68246 - DNA, 25 bp, probe
tggaagcagtcaccaagataatctg

SEQ ID NO: 68247 - DNA, 25 bp, probe
agctaataagcatgatggtagagtc

SEQ ID NO: 68248 - DNA, 25 bp, probe
aaagatttccaaatgtccagaggat

SEQ ID NO: 68249 - DNA, 25 bp, probe
catctactgagctaatagccactag

SEQ ID NO: 68250 - DNA, 25 bp, probe
acatctactgagctaatagccacta

SEQ ID NO: 68251 - DNA, 25 bp, probe
aagctaataagcatgatggtagagt

SEQ ID NO: 68252 - DNA, 25 bp, probe
caagataatctgaggtttggcatgt

SEQ ID NO: 68253 - DNA, 25 bp, probe
cagaggatgtgggaaagctaataag

SEQ ID NO: 68254 - DNA, 25 bp, probe
aagatttccaaatgtccagaggatg

SEQ ID NO: 68255 - DNA, 25 bp, probe
aacatctactgagctaatagccact

SEQ ID NO: 68256 - DNA, 25 bp, probe
caacatctactgagctaatagccac

SEQ ID NO: 68257 - DNA, 25 bp, probe
tacagtgtgaagtctgacatttgga

SEQ ID NO: 68258 - DNA, 25 bp, probe
agtcaccaagataatctgaggtttg

SEQ ID NO: 68259 - DNA, 25 bp, probe
cagtcaccaagataatctgaggttt

SEQ ID NO: 68260 - DNA, 25 bp, probe
gggatacagtgtgaagtctgacatt

SEQ ID NO: 68261 - DNA, 25 bp, probe
tacatacccagagctaatgactcag

SEQ ID NO: 68262 - DNA, 25 bp, probe
ctacatacccagagctaatgactca

SEQ ID NO: 68263 - DNA, 25 bp, probe
gatttccaaatgtccagaggatgtg

SEQ ID NO: 68264 - DNA, 25 bp, probe
agatttccaaatgtccagaggatgt

SEQ ID NO: 68265 - DNA, 25 bp, probe
agcagtcaccaagataatctgaggt

SEQ ID NO: 68266 - DNA, 25 bp, probe
caaccagaagggatacagtgtgaag

SEQ ID NO: 68267 - DNA, 25 bp, probe
aggcaacatctactgagctaatagc

SEQ ID NO: 68268 - DNA, 25 bp, probe
cctacatacccagagctaatgactc

SEQ ID NO: 68269 - DNA, 25 bp, probe
gaggaggatggtgatgatgattatt

SEQ ID NO: 68270 - DNA, 25 bp, probe
ggaggaggatggtgatgatgattat

SEQ ID NO: 68271 - DNA, 25 bp, probe
aggaggaggatggtgatgatgatta

SEQ ID NO: 68272 - DNA, 25 bp, probe
tcattcttaatcaccaaggtcatat

SEQ ID NO: 68273 - DNA, 25 bp, probe
atcattcttaatcaccaaggtcata

SEQ ID NO: 68274 - DNA, 25 bp, probe
tatcattcttaatcaccaaggtcat

SEQ ID NO: 68275 - DNA, 25 bp, probe
atatcattcttaatcaccaaggtca

SEQ ID NO: 68276 - DNA, 25 bp, probe
aggaggatggtgatgatgattattt

SEQ ID NO: 68277 - DNA, 25 bp, probe
tgaaactaacagactttggactacg

SEQ ID NO: 68278 - DNA, 25 bp, probe
aaggaggaggatggtgatgatgatt

SEQ ID NO: 68279 - DNA, 25 bp, probe
ggctcatccattctttagacacatt

SEQ ID NO: 68280 - DNA, 25 bp, probe
atgaaactaacagactttggactac

SEQ ID NO: 68281 - DNA, 25 bp, probe
tggactacgcaaagaatctattcat

SEQ ID NO: 68282 - DNA, 25 bp, probe
ggatcatatacagagacctgaagcc

SEQ ID NO: 68283 - DNA, 25 bp, probe
ttggactacgcaaagaatctattca

SEQ ID NO: 68284 - DNA, 25 bp, probe
aggctcatccattctttagacacat

SEQ ID NO: 68285 - DNA, 25 bp, probe
ctcagtggaggagaactatttatgc

SEQ ID NO: 68286 - DNA, 25 bp, probe
gatcatatacagagacctgaagccg

SEQ ID NO: 68287 - DNA, 25 bp, probe
gaaactaacagactttggactacgc

SEQ ID NO: 68288 - DNA, 25 bp, probe
gaaggaggaggatggtgatgatgat

SEQ ID NO: 68289 - DNA, 25 bp, probe
aatatcattcttaatcaccaaggtc

SEQ ID NO: 68290 - DNA, 25 bp, probe
ggactacgcaaagaatctattcatg

SEQ ID NO: 68291 - DNA, 25 bp, probe
atatttatggaagacactgcctgct

SEQ ID NO: 68292 - DNA, 25 bp, probe
aaggctcatccattctttagacaca

SEQ ID NO: 68293 - DNA, 25 bp, probe
atatgaaactaacagactttggact

SEQ ID NO: 68294 - DNA, 25 bp, probe
gaatatttatggaagacactgcctg

SEQ ID NO: 68295 - DNA, 25 bp, probe
ttcaatctgaagaggatgtaagtca

SEQ ID NO: 68296 - DNA, 25 bp, probe
ggaatatttatggaagacactgcct

SEQ ID NO: 68297 - DNA, 25 bp, probe
agggaatatttatggaagacactgc

SEQ ID NO: 68298 - DNA, 25 bp, probe
tatttatggaagacactgcctgctt

SEQ ID NO: 68299 - DNA, 25 bp, probe
gagggaatatttatggaagacactg

SEQ ID NO: 68300 - DNA, 25 bp, probe
aaactaacagactttggactacgca

SEQ ID NO: 68301 - DNA, 25 bp, probe
agagggaatatttatggaagacact

SEQ ID NO: 68302 - DNA, 25 bp, probe
gagagggaatatttatggaagacac

SEQ ID NO: 68303 - DNA, 25 bp, probe
agagagggaatatttatggaagaca

SEQ ID NO: 68304 - DNA, 25 bp, probe
aatatttatggaagacactgcctgc

SEQ ID NO: 68305 - DNA, 25 bp, probe
gggaatatttatggaagacactgcc

SEQ ID NO: 68306 - DNA, 25 bp, probe
gcagttagaaagagagggaatattt

SEQ ID NO: 68307 - DNA, 25 bp, probe
tatgaaactaacagactttggacta

SEQ ID NO: 68308 - DNA, 25 bp, probe
attcaatctgaagaggatgtaagtc

SEQ ID NO: 68309 - DNA, 25 bp, probe
gagaaggaggaggatggtgatgatg

SEQ ID NO: 68310 - DNA, 25 bp, probe
aactaacagactttggactacgcaa

SEQ ID NO: 68311 - DNA, 25 bp, probe
cattcttaatcaccaaggtcatatg

SEQ ID NO: 68312 - DNA, 25 bp, probe
tttatgcagttagaaagagagggaa

SEQ ID NO: 68313 - DNA, 25 bp, probe
ttatctcagaccttaaccttacagg

SEQ ID NO: 68314 - DNA, 25 bp, probe
tatctcagaccttaaccttacaggc

SEQ ID NO: 68315 - DNA, 25 bp, probe
cctctttatctcagaccttaacctt

SEQ ID NO: 68316 - DNA, 25 bp, probe
ccctctttatctcagaccttaacct

SEQ ID NO: 68317 - DNA, 25 bp, probe
tttatctcagaccttaaccttacag

SEQ ID NO: 68318 - DNA, 25 bp, probe
ctttatctcagaccttaaccttaca

SEQ ID NO: 68319 - DNA, 25 bp, probe
tctttatctcagaccttaaccttac

SEQ ID NO: 68320 - DNA, 25 bp, probe
ctctttatctcagaccttaacctta

SEQ ID NO: 68321 - DNA, 25 bp, probe
cccctctttatctcagaccttaacc

SEQ ID NO: 68322 - DNA, 25 bp, probe
agttggatgagacacacccttacac

SEQ ID NO: 68323 - DNA, 25 bp, probe
cagttggatgagacacacccttaca

SEQ ID NO: 68324 - DNA, 25 bp, probe
gcccctctttatctcagaccttaac

SEQ ID NO: 68325 - DNA, 25 bp, probe
atctcagaccttaaccttacaggcc

SEQ ID NO: 68326 - DNA, 25 bp, probe
tccagatcgtagccccaattcttag

SEQ ID NO: 68327 - DNA, 25 bp, probe
ctccagatcgtagccccaattctta

SEQ ID NO: 68328 - DNA, 25 bp, probe
ggcccctctttatctcagaccttaa

SEQ ID NO: 68329 - DNA, 25 bp, probe
ggatgccttcactgtagctattggg

SEQ ID NO: 68330 - DNA, 25 bp, probe
gggatgccttcactgtagctattgg

SEQ ID NO: 68331 - DNA, 25 bp, probe
ctacacttttggcagcaatcagcac

SEQ ID NO: 68332 - DNA, 25 bp, probe
cttgcagtccaaaccccagattttc

SEQ ID NO: 68333 - DNA, 25 bp, probe
aggcccctctttatctcagacctta

SEQ ID NO: 68334 - DNA, 25 bp, probe
ttgcagtccaaaccccagattttca

SEQ ID NO: 68335 - DNA, 25 bp, probe
gatgccttcactgtagctattgggg

SEQ ID NO: 68336 - DNA, 25 bp, probe
ggggatgccttcactgtagctattg

SEQ ID NO: 68337 - DNA, 25 bp, probe
cttcactgtagctattggggcagag

SEQ ID NO: 68338 - DNA, 25 bp, probe
ttcactgtagctattggggcagaga

SEQ ID NO: 68339 - DNA, 25 bp, probe
ttcattagccatctgaaactgacag

SEQ ID NO: 68340 - DNA, 25 bp, probe
attagccatctgaaactgacagact

SEQ ID NO: 68341 - DNA, 25 bp, probe
cattagccatctgaaactgacagac

SEQ ID NO: 68342 - DNA, 25 bp, probe
tcattagccatctgaaactgacaga

SEQ ID NO: 68343 - DNA, 25 bp, probe
tagccatctgaaactgacagacttt

SEQ ID NO: 68344 - DNA, 25 bp, probe
ttagccatctgaaactgacagactt

SEQ ID NO: 68345 - DNA, 25 bp, probe
agccatctgaaactgacagactttg

SEQ ID NO: 68346 - DNA, 25 bp, probe
tttcattagccatctgaaactgaca

SEQ ID NO: 68347 - DNA, 25 bp, probe
ttttcattagccatctgaaactgac

SEQ ID NO: 68348 - DNA, 25 bp, probe
cttttcattagccatctgaaactga

SEQ ID NO: 68349 - DNA, 25 bp, probe
ccttttcattagccatctgaaactg

SEQ ID NO: 68350 - DNA, 25 bp, probe
accttttcattagccatctgaaact

SEQ ID NO: 68351 - DNA, 25 bp, probe
caccttttcattagccatctgaaac

SEQ ID NO: 68352 - DNA, 25 bp, probe
ggcaccttttcattagccatctgaa

SEQ ID NO: 68353 - DNA, 25 bp, probe
gcaccttttcattagccatctgaaa

SEQ ID NO: 68354 - DNA, 25 bp, probe
aaaacggcaccttttcattagccat

SEQ ID NO: 68355 - DNA, 25 bp, probe
aaacggcaccttttcattagccatc

SEQ ID NO: 68356 - DNA, 25 bp, probe
agggaaaacggcaccttttcattag

SEQ ID NO: 68357 - DNA, 25 bp, probe
aacggcaccttttcattagccatct

SEQ ID NO: 68358 - DNA, 25 bp, probe
gaaaacggcaccttttcattagcca

SEQ ID NO: 68359 - DNA, 25 bp, probe
ggaaaacggcaccttttcattagcc

SEQ ID NO: 68360 - DNA, 25 bp, probe
gggaaaacggcaccttttcattagc

SEQ ID NO: 68361 - DNA, 25 bp, probe
gccaaggtgaaggatatagcaatat

SEQ ID NO: 68362 - DNA, 25 bp, probe
ggatagagaagaacgacttgagaag

SEQ ID NO: 68363 - DNA, 25 bp, probe
agccaaggtgaaggatatagcaata

SEQ ID NO: 68364 - DNA, 25 bp, probe
aagccaaggtgaaggatatagcaat

SEQ ID NO: 68365 - DNA, 25 bp, probe
cggatagagaagaacgacttgagaa

SEQ ID NO: 68366 - DNA, 25 bp, probe
tatattaggacgactcagtatccga

SEQ ID NO: 68367 - DNA, 25 bp, probe
atattaggacgactcagtatccgag

SEQ ID NO: 68368 - DNA, 25 bp, probe
ttatattaggacgactcagtatccg

SEQ ID NO: 68369 - DNA, 25 bp, probe
ccagggacaggataactctaataaa

SEQ ID NO: 68370 - DNA, 25 bp, probe
tattaggacgactcagtatccgaga

SEQ ID NO: 68371 - DNA, 25 bp, probe
ccaacaatccaactcctatcaccag

SEQ ID NO: 68372 - DNA, 25 bp, probe
caacaacgacctaaagatttggaaa

SEQ ID NO: 68373 - DNA, 25 bp, probe
aaacaacaacgacctaaagatttgg

SEQ ID NO: 68374 - DNA, 25 bp, probe
acaacaacgacctaaagatttggaa

SEQ ID NO: 68375 - DNA, 25 bp, probe
aacaacaacgacctaaagatttgga

SEQ ID NO: 68376 - DNA, 25 bp, probe
atcttcttcctattactcatgggtg

SEQ ID NO: 68377 - DNA, 25 bp, probe
tcttcttcctattactcatgggtgt

SEQ ID NO: 68378 - DNA, 25 bp, probe
cttcttcctattactcatgggtgta

SEQ ID NO: 68379 - DNA, 25 bp, probe
aatcttcttcctattactcatgggt

SEQ ID NO: 68380 - DNA, 25 bp, probe
cttgcggatagagaagaacgacttg

SEQ ID NO: 68381 - DNA, 25 bp, probe
atagagaagaacgacttgagaagtg

SEQ ID NO: 68382 - DNA, 25 bp, probe
gatagagaagaacgacttgagaagt

SEQ ID NO: 68383 - DNA, 25 bp, probe
agatgtactccaagaaggtactctt

SEQ ID NO: 68384 - DNA, 25 bp, probe
aagatgtactccaagaaggtactct

SEQ ID NO: 68385 - DNA, 25 bp, probe
aaagccaaggtgaaggatatagcaa

SEQ ID NO: 68386 - DNA, 25 bp, probe
ttcttcctattactcatgggtgtat

SEQ ID NO: 68387 - DNA, 25 bp, probe
caacaatccaactcctatcaccagc

SEQ ID NO: 68388 - DNA, 25 bp, probe
attaggacgactcagtatccgagag

SEQ ID NO: 68389 - DNA, 25 bp, probe
caatcaactgtcctgatgaaccatt

SEQ ID NO: 68390 - DNA, 25 bp, probe
tccagggacaggataactctaataa

SEQ ID NO: 68391 - DNA, 25 bp, probe
ctaccttgcggatagagaagaacga

SEQ ID NO: 68392 - DNA, 25 bp, probe
tagagaagaacgacttgagaagtgt

SEQ ID NO: 68393 - DNA, 25 bp, probe
ttgcggatagagaagaacgacttga

SEQ ID NO: 68394 - DNA, 25 bp, probe
aaatcttcttcctattactcatggg

SEQ ID NO: 68395 - DNA, 25 bp, probe
tcttcctattactcatgggtgtata

SEQ ID NO: 68396 - DNA, 25 bp, probe
ccaaggtgaaggatatagcaatatc

SEQ ID NO: 68397 - DNA, 25 bp, probe
caaagccaaggtgaaggatatagca

SEQ ID NO: 68398 - DNA, 25 bp, probe
gcggatagagaagaacgacttgaga

SEQ ID NO: 68399 - DNA, 25 bp, probe
taccttgcggatagagaagaacgac

SEQ ID NO: 68400 - DNA, 25 bp, probe
tcctattactcatgggtgtatacga

SEQ ID NO: 68401 - DNA, 25 bp, probe
ttcctattactcatgggtgtatacg

SEQ ID NO: 68402 - DNA, 25 bp, probe
tcctaccttgcggatagagaagaac

SEQ ID NO: 68403 - DNA, 25 bp, probe
agagaagaacgacttgagaagtgtc

SEQ ID NO: 68404 - DNA, 25 bp, probe
tgcggatagagaagaacgacttgag

SEQ ID NO: 68405 - DNA, 25 bp, probe
ggatgaactcagccaactacagtcc

SEQ ID NO: 68406 - DNA, 25 bp, probe
gatgaactcagccaactacagtccc

SEQ ID NO: 68407 - DNA, 25 bp, probe
tcagaaatcgtgggctactattatc

SEQ ID NO: 68408 - DNA, 25 bp, probe
ctcagaaatcgtgggctactattat

SEQ ID NO: 68409 - DNA, 25 bp, probe
cagaaatcgtgggctactattatcc

SEQ ID NO: 68410 - DNA, 25 bp, probe
tctcagaaatcgtgggctactatta

SEQ ID NO: 68411 - DNA, 25 bp, probe
ctactattatcccagtgacgcatct

SEQ ID NO: 68412 - DNA, 25 bp, probe
gtctcagaaatcgtgggctactatt

SEQ ID NO: 68413 - DNA, 25 bp, probe
tactattatcccagtgacgcatctg

SEQ ID NO: 68414 - DNA, 25 bp, probe
tgtctcagaaatcgtgggctactat

SEQ ID NO: 68415 - DNA, 25 bp, probe
ttgtctcagaaatcgtgggctacta

SEQ ID NO: 68416 - DNA, 25 bp, probe
gctactattatcccagtgacgcatc

SEQ ID NO: 68417 - DNA, 25 bp, probe
ttcacctacaccaatttctgccttc

SEQ ID NO: 68418 - DNA, 25 bp, probe
cttcacctacaccaatttctgcctt

SEQ ID NO: 68419 - DNA, 25 bp, probe
cccacttcacctacaccaatttctg

SEQ ID NO: 68420 - DNA, 25 bp, probe
ctattatcccagtgacgcatctgtg

SEQ ID NO: 68421 - DNA, 25 bp, probe
ctttgtctcagaaatcgtgggctac

SEQ ID NO: 68422 - DNA, 25 bp, probe
actattatcccagtgacgcatctgt

SEQ ID NO: 68423 - DNA, 25 bp, probe
agaaatcgtgggctactattatccc

SEQ ID NO: 68424 - DNA, 25 bp, probe
tttgtctcagaaatcgtgggctact

SEQ ID NO: 68425 - DNA, 25 bp, probe
cacttcacctacaccaatttctgcc

SEQ ID NO: 68426 - DNA, 25 bp, probe
ccacttcacctacaccaatttctgc

SEQ ID NO: 68427 - DNA, 25 bp, probe
acttcacctacaccaatttctgcct

SEQ ID NO: 68428 - DNA, 25 bp, probe
ggctactattatcccagtgacgcat

SEQ ID NO: 68429 - DNA, 25 bp, probe
tcacctacaccaatttctgccttcc

SEQ ID NO: 68430 - DNA, 25 bp, probe
gcccacttcacctacaccaatttct

SEQ ID NO: 68431 - DNA, 25 bp, probe
gctttgtctcagaaatcgtgggcta

SEQ ID NO: 68432 - DNA, 25 bp, probe
ctatccccaactaccactaccgaga

SEQ ID NO: 68433 - DNA, 25 bp, probe
agagctttgtctcagaaatcgtggg

SEQ ID NO: 68434 - DNA, 25 bp, probe
tatccccaactaccactaccgagac

SEQ ID NO: 68435 - DNA, 25 bp, probe
gagagctttgtctcagaaatcgtgg

SEQ ID NO: 68436 - DNA, 25 bp, probe
tattatcccagtgacgcatctgtgc

SEQ ID NO: 68437 - DNA, 25 bp, probe
tgaagttagatcagaagacacagaa

SEQ ID NO: 68438 - DNA, 25 bp, probe
cagtgattaatgtggttcagtacgg

SEQ ID NO: 68439 - DNA, 25 bp, probe
agttagatcagaagacacagaaagt

SEQ ID NO: 68440 - DNA, 25 bp, probe
gttagatcagaagacacagaaagtt

SEQ ID NO: 68441 - DNA, 25 bp, probe
ccaatacaatgaggtttccaaaggg

SEQ ID NO: 68442 - DNA, 25 bp, probe
attaatgtggttcagtacggctgta

SEQ ID NO: 68443 - DNA, 25 bp, probe
aagttagatcagaagacacagaaag

SEQ ID NO: 68444 - DNA, 25 bp, probe
gaagttagatcagaagacacagaaa

SEQ ID NO: 68445 - DNA, 25 bp, probe
ccagtgattaatgtggttcagtacg

SEQ ID NO: 68446 - DNA, 25 bp, probe
ttagatcagaagacacagaaagttc

SEQ ID NO: 68447 - DNA, 25 bp, probe
caatacaatgaggtttccaaaggga

SEQ ID NO: 68448 - DNA, 25 bp, probe
taccaatacaatgaggtttccaaag

SEQ ID NO: 68449 - DNA, 25 bp, probe
gtaccaatacaatgaggtttccaaa

SEQ ID NO: 68450 - DNA, 25 bp, probe
gtgattaatgtggttcagtacggct

SEQ ID NO: 68451 - DNA, 25 bp, probe
agtgattaatgtggttcagtacggc

SEQ ID NO: 68452 - DNA, 25 bp, probe
accaatacaatgaggtttccaaagg

SEQ ID NO: 68453 - DNA, 25 bp, probe
ttcagtacggctgtaccaatacaat

SEQ ID NO: 68454 - DNA, 25 bp, probe
tgtaccaatacaatgaggtttccaa

SEQ ID NO: 68455 - DNA, 25 bp, probe
gattaatgtggttcagtacggctgt

SEQ ID NO: 68456 - DNA, 25 bp, probe
tgattaatgtggttcagtacggctg

SEQ ID NO: 68457 - DNA, 25 bp, probe
ctgtaccaatacaatgaggtttcca

SEQ ID NO: 68458 - DNA, 25 bp, probe
agtacggctgtaccaatacaatgag

SEQ ID NO: 68459 - DNA, 25 bp, probe
ctgaagttagatcagaagacacaga

SEQ ID NO: 68460 - DNA, 25 bp, probe
tagatcagaagacacagaaagttct

SEQ ID NO: 68461 - DNA, 25 bp, probe
cagtacggctgtaccaatacaatga

SEQ ID NO: 68462 - DNA, 25 bp, probe
tcagtacggctgtaccaatacaatg

SEQ ID NO: 68463 - DNA, 25 bp, probe
cccagtgattaatgtggttcagtac

SEQ ID NO: 68464 - DNA, 25 bp, probe
gctgaagttagatcagaagacacag

SEQ ID NO: 68465 - DNA, 25 bp, probe
gttcagtacggctgtaccaatacaa

SEQ ID NO: 68466 - DNA, 25 bp, probe
ttaatgtggttcagtacggctgtac

SEQ ID NO: 68467 - DNA, 25 bp, probe
cctggcaaagttacttcctttacag

SEQ ID NO: 68468 - DNA, 25 bp, probe
gctgtaccaatacaatgaggtttcc

SEQ ID NO: 68469 - DNA, 25 bp, probe
ggctgtaccaatacaatgaggtttc

SEQ ID NO: 68470 - DNA, 25 bp, probe
tacggctgtaccaatacaatgaggt

SEQ ID NO: 68471 - DNA, 25 bp, probe
aaattgtcttaaagcaaagaggtac

SEQ ID NO: 68472 - DNA, 25 bp, probe
ttctgatgaaaacaaagtctctgcc

SEQ ID NO: 68473 - DNA, 25 bp, probe
agctgaagttagatcagaagacaca

SEQ ID NO: 68474 - DNA, 25 bp, probe
gtacggctgtaccaatacaatgagg

SEQ ID NO: 68475 - DNA, 25 bp, probe
ctggcaaagttacttcctttacagc

SEQ ID NO: 68476 - DNA, 25 bp, probe
ccctggcaaagttacttcctttaca

SEQ ID NO: 68477 - DNA, 25 bp, probe
accctggcaaagttacttcctttac

SEQ ID NO: 68478 - DNA, 25 bp, probe
caccctggcaaagttacttccttta

SEQ ID NO: 68479 - DNA, 25 bp, probe
atagaccagaccccagtgattaatg

SEQ ID NO: 68480 - DNA, 25 bp, probe
catagaccagaccccagtgattaat

SEQ ID NO: 68481 - DNA, 25 bp, probe
aaggcacagtcaatatacaggagtc

SEQ ID NO: 68482 - DNA, 25 bp, probe
gaaggcacagtcaatatacaggagt

SEQ ID NO: 68483 - DNA, 25 bp, probe
gagtctgaaggcacagtcaatatac

SEQ ID NO: 68484 - DNA, 25 bp, probe
gtctgaaggcacagtcaatatacag

SEQ ID NO: 68485 - DNA, 25 bp, probe
tgagtctgaaggcacagtcaatata

SEQ ID NO: 68486 - DNA, 25 bp, probe
agtctgaaggcacagtcaatataca

SEQ ID NO: 68487 - DNA, 25 bp, probe
tgaaggcacagtcaatatacaggag

SEQ ID NO: 68488 - DNA, 25 bp, probe
atgagtctgaaggcacagtcaatat

SEQ ID NO: 68489 - DNA, 25 bp, probe
ggcacagtcaatatacaggagtcag

SEQ ID NO: 68490 - DNA, 25 bp, probe
ttgccaagaagagaagactaagaaa

SEQ ID NO: 68491 - DNA, 25 bp, probe
tttgccaagaagagaagactaagaa

SEQ ID NO: 68492 - DNA, 25 bp, probe
ctgaaggcacagtcaatatacagga

SEQ ID NO: 68493 - DNA, 25 bp, probe
tctgaaggcacagtcaatatacagg

SEQ ID NO: 68494 - DNA, 25 bp, probe
cacagtcaatatacaggagtcagct

SEQ ID NO: 68495 - DNA, 25 bp, probe
ctttgccaagaagagaagactaaga

SEQ ID NO: 68496 - DNA, 25 bp, probe
aggcacagtcaatatacaggagtca

SEQ ID NO: 68497 - DNA, 25 bp, probe
gatgagtctgaaggcacagtcaata

SEQ ID NO: 68498 - DNA, 25 bp, probe
cgtctctcatttgcttcttggtaaa

SEQ ID NO: 68499 - DNA, 25 bp, probe
gcacagtcaatatacaggagtcagc

SEQ ID NO: 68500 - DNA, 25 bp, probe
ccttcatcgtggatttaatttatgc

SEQ ID NO: 68501 - DNA, 25 bp, probe
ctctcatttgcttcttggtaaatcc

SEQ ID NO: 68502 - DNA, 25 bp, probe
gtctctcatttgcttcttggtaaat

SEQ ID NO: 68503 - DNA, 25 bp, probe
agttgtatggtgtgtggaattctta

SEQ ID NO: 68504 - DNA, 25 bp, probe
tctctcatttgcttcttggtaaatc

SEQ ID NO: 68505 - DNA, 25 bp, probe
ttgtatggtgtgtggaattcttact

SEQ ID NO: 68506 - DNA, 25 bp, probe
gttgtatggtgtgtggaattcttac

SEQ ID NO: 68507 - DNA, 25 bp, probe
cccttcatcgtggatttaatttatg

SEQ ID NO: 68508 - DNA, 25 bp, probe
tatggtgtgtggaattcttactgtg

SEQ ID NO: 68509 - DNA, 25 bp, probe
gtatggtgtgtggaattcttactgt

SEQ ID NO: 68510 - DNA, 25 bp, probe
tgtatggtgtgtggaattcttactg

SEQ ID NO: 68511 - DNA, 25 bp, probe
tcgtctctcatttgcttcttggtaa

SEQ ID NO: 68512 - DNA, 25 bp, probe
aatcctcgtctctcatttgcttctt

SEQ ID NO: 68513 - DNA, 25 bp, probe
tctcatttgcttcttggtaaatccc

SEQ ID NO: 68514 - DNA, 25 bp, probe
aagttgtatggtgtgtggaattctt

SEQ ID NO: 68515 - DNA, 25 bp, probe
tgtgtggaattcttactgtgatgtg

SEQ ID NO: 68516 - DNA, 25 bp, probe
gtgtgtggaattcttactgtgatgt

SEQ ID NO: 68517 - DNA, 25 bp, probe
cttcatcgtggatttaatttatgct

SEQ ID NO: 68518 - DNA, 25 bp, probe
aattcttactgtgatgtgggagagg

SEQ ID NO: 68519 - DNA, 25 bp, probe
caagttgtatggtgtgtggaattct

SEQ ID NO: 68520 - DNA, 25 bp, probe
ctcgtctctcatttgcttcttggta

SEQ ID NO: 68521 - DNA, 25 bp, probe
gtgtggaattcttactgtgatgtgg

SEQ ID NO: 68522 - DNA, 25 bp, probe
ggtgtgtggaattcttactgtgatg

SEQ ID NO: 68523 - DNA, 25 bp, probe
tcatcgtggatttaatttatgcttt

SEQ ID NO: 68524 - DNA, 25 bp, probe
ttcatcgtggatttaatttatgctt

SEQ ID NO: 68525 - DNA, 25 bp, probe
cacgaaatggctggaaagaagttaa

SEQ ID NO: 68526 - DNA, 25 bp, probe
tcacgaaatggctggaaagaagtta

SEQ ID NO: 68527 - DNA, 25 bp, probe
cgtatgaatctatgccacagcaatg

SEQ ID NO: 68528 - DNA, 25 bp, probe
gctgtgtagtgtgaaagaaaagttt

SEQ ID NO: 68529 - DNA, 25 bp, probe
gtatgaatctatgccacagcaatgc

SEQ ID NO: 68530 - DNA, 25 bp, probe
ctcacgaaatggctggaaagaagtt

SEQ ID NO: 68531 - DNA, 25 bp, probe
atcgctgtgtagtgtgaaagaaaag

SEQ ID NO: 68532 - DNA, 25 bp, probe
ctgtgtagtgtgaaagaaaagtttt

SEQ ID NO: 68533 - DNA, 25 bp, probe
catcgctgtgtagtgtgaaagaaaa

SEQ ID NO: 68534 - DNA, 25 bp, probe
gaaatggctggaaagaagttaacag

SEQ ID NO: 68535 - DNA, 25 bp, probe
gctggaaagaagttaacaggtctaa

SEQ ID NO: 68536 - DNA, 25 bp, probe
tatgaatctatgccacagcaatgct

SEQ ID NO: 68537 - DNA, 25 bp, probe
cgaaatggctggaaagaagttaaca

SEQ ID NO: 68538 - DNA, 25 bp, probe
acgaaatggctggaaagaagttaac

SEQ ID NO: 68539 - DNA, 25 bp, probe
cgctgtgtagtgtgaaagaaaagtt

SEQ ID NO: 68540 - DNA, 25 bp, probe
gcatcgctgtgtagtgtgaaagaaa

SEQ ID NO: 68541 - DNA, 25 bp, probe
cacctgcgtatgaatctatgccaca

SEQ ID NO: 68542 - DNA, 25 bp, probe
ctggaaagaagttaacaggtctaaa

SEQ ID NO: 68543 - DNA, 25 bp, probe
aaatggctggaaagaagttaacagg

SEQ ID NO: 68544 - DNA, 25 bp, probe
acctgcgtatgaatctatgccacag

SEQ ID NO: 68545 - DNA, 25 bp, probe
tcgctgtgtagtgtgaaagaaaagt

SEQ ID NO: 68546 - DNA, 25 bp, probe
gcgtatgaatctatgccacagcaat

SEQ ID NO: 68547 - DNA, 25 bp, probe
atgaatctatgccacagcaatgctt

SEQ ID NO: 68548 - DNA, 25 bp, probe
ggctggaaagaagttaacaggtcta

SEQ ID NO: 68549 - DNA, 25 bp, probe
aatggctggaaagaagttaacaggt

SEQ ID NO: 68550 - DNA, 25 bp, probe
aatacccaatggaaacaagtggcac

SEQ ID NO: 68551 - DNA, 25 bp, probe
catttaaacctctgttgcaatctga

SEQ ID NO: 68552 - DNA, 25 bp, probe
atttaaacctctgttgcaatctgaa

SEQ ID NO: 68553 - DNA, 25 bp, probe
ccatttaaacctctgttgcaatctg

SEQ ID NO: 68554 - DNA, 25 bp, probe
atggctggaaagaagttaacaggtc

SEQ ID NO: 68555 - DNA, 25 bp, probe
tgtagtgtgaaagaaaagttttcct

SEQ ID NO: 68556 - DNA, 25 bp, probe
gtgtagtgtgaaagaaaagttttcc

SEQ ID NO: 68557 - DNA, 25 bp, probe
aactctcagtgaaagtgcccatcag

SEQ ID NO: 68558 - DNA, 25 bp, probe
tcaactctcagtgaaagtgcccatc

SEQ ID NO: 68559 - DNA, 25 bp, probe
ctcaactctcagtgaaagtgcccat

SEQ ID NO: 68560 - DNA, 25 bp, probe
cccatttaaacctctgttgcaatct

SEQ ID NO: 68561 - DNA, 25 bp, probe
tgtgtagtgtgaaagaaaagttttc

SEQ ID NO: 68562 - DNA, 25 bp, probe
ccacagcaatgcttttaatgaattt

SEQ ID NO: 68563 - DNA, 25 bp, probe
caactctcagtgaaagtgcccatca

SEQ ID NO: 68564 - DNA, 25 bp, probe
gtagtgtgaaagaaaagttttcctt

SEQ ID NO: 68565 - DNA, 25 bp, probe
agagcacctgcgtatgaatctatgc

SEQ ID NO: 68566 - DNA, 25 bp, probe
tggaaagaagttaacaggtctaaaa

SEQ ID NO: 68567 - DNA, 25 bp, probe
tgcgtatgaatctatgccacagcaa

SEQ ID NO: 68568 - DNA, 25 bp, probe
gccacagcaatgcttttaatgaatt

SEQ ID NO: 68569 - DNA, 25 bp, probe
ctcaacacatagtaggtgctcaatc

SEQ ID NO: 68570 - DNA, 25 bp, probe
caacacatagtaggtgctcaatcag

SEQ ID NO: 68571 - DNA, 25 bp, probe
tctcaacacatagtaggtgctcaat

SEQ ID NO: 68572 - DNA, 25 bp, probe
tcaacacatagtaggtgctcaatca

SEQ ID NO: 68573 - DNA, 25 bp, probe
ctctcaacacatagtaggtgctcaa

SEQ ID NO: 68574 - DNA, 25 bp, probe
ctcaagaccatcctccgaagtaaga

SEQ ID NO: 68575 - DNA, 25 bp, probe
tcaagaccatcctccgaagtaagag

SEQ ID NO: 68576 - DNA, 25 bp, probe
taagagcttggagaacttcttcctt

SEQ ID NO: 68577 - DNA, 25 bp, probe
cactggctctcaacacatagtaggt

SEQ ID NO: 68578 - DNA, 25 bp, probe
aagtaagagcttggagaacttcttc

SEQ ID NO: 68579 - DNA, 25 bp, probe
cctcaagaccatcctccgaagtaag

SEQ ID NO: 68580 - DNA, 25 bp, probe
gtaagagcttggagaacttcttcct

SEQ ID NO: 68581 - DNA, 25 bp, probe
agtaagagcttggagaacttcttcc

SEQ ID NO: 68582 - DNA, 25 bp, probe
aacacatagtaggtgctcaatcagc

SEQ ID NO: 68583 - DNA, 25 bp, probe
actggctctcaacacatagtaggtg

SEQ ID NO: 68584 - DNA, 25 bp, probe
aatcagcagcctttggtgaatacat

SEQ ID NO: 68585 - DNA, 25 bp, probe
aagagcttggagaacttcttccttc

SEQ ID NO: 68586 - DNA, 25 bp, probe
ctcaatcagcagcctttggtgaata

SEQ ID NO: 68587 - DNA, 25 bp, probe
gctctcaacacatagtaggtgctca

SEQ ID NO: 68588 - DNA, 25 bp, probe
ccactggctctcaacacatagtagg

SEQ ID NO: 68589 - DNA, 25 bp, probe
tcaatcagcagcctttggtgaatac

SEQ ID NO: 68590 - DNA, 25 bp, probe
ctcatcgtaggaaactccaaacagg

SEQ ID NO: 68591 - DNA, 25 bp, probe
caatcagcagcctttggtgaataca

SEQ ID NO: 68592 - DNA, 25 bp, probe
caagaccatcctccgaagtaagagc

SEQ ID NO: 68593 - DNA, 25 bp, probe
atcagcagcctttggtgaatacatg

SEQ ID NO: 68594 - DNA, 25 bp, probe
ggctctcaacacatagtaggtgctc

SEQ ID NO: 68595 - DNA, 25 bp, probe
gctcatcgtaggaaactccaaacag

SEQ ID NO: 68596 - DNA, 25 bp, probe
tccgaagtaagagcttggagaactt

SEQ ID NO: 68597 - DNA, 25 bp, probe
cagcagcctttggtgaatacatgag

SEQ ID NO: 68598 - DNA, 25 bp, probe
ctggctctcaacacatagtaggtgc

SEQ ID NO: 68599 - DNA, 25 bp, probe
agagcttggagaacttcttccttcg

SEQ ID NO: 68600 - DNA, 25 bp, probe
gaccatcctccgaagtaagagcttg

SEQ ID NO: 68601 - DNA, 25 bp, probe
cccactggctctcaacacatagtag

SEQ ID NO: 68602 - DNA, 25 bp, probe
atgtaagatgtgcaaagtcagcgtc

SEQ ID NO: 68603 - DNA, 25 bp, probe
gatgtaagatgtgcaaagtcagcgt

SEQ ID NO: 68604 - DNA, 25 bp, probe
agaccatcctccgaagtaagagctt

SEQ ID NO: 68605 - DNA, 25 bp, probe
aagaccatcctccgaagtaagagct

SEQ ID NO: 68606 - DNA, 25 bp, probe
tcatcgtaggaaactccaaacaggg

SEQ ID NO: 68607 - DNA, 25 bp, probe
cagctcatcgtaggaaactccaaac

SEQ ID NO: 68608 - DNA, 25 bp, probe
tcagcagcctttggtgaatacatga

SEQ ID NO: 68609 - DNA, 25 bp, probe
caaacagggcttgcgatgtaagatg

SEQ ID NO: 68610 - DNA, 25 bp, probe
cagcttccaggaacatgtcttcaag

SEQ ID NO: 68611 - DNA, 25 bp, probe
agctcatcgtaggaaactccaaaca

SEQ ID NO: 68612 - DNA, 25 bp, probe
acccactggctctcaacacatagta

SEQ ID NO: 68613 - DNA, 25 bp, probe
atcttaacacaggcaatgtcttctt

SEQ ID NO: 68614 - DNA, 25 bp, probe
tatatcttcagagagtacaccaagc

SEQ ID NO: 68615 - DNA, 25 bp, probe
cgcatatatcttcagagagtacacc

SEQ ID NO: 68616 - DNA, 25 bp, probe
tcgcatatatcttcagagagtacac

SEQ ID NO: 68617 - DNA, 25 bp, probe
gcatatatcttcagagagtacacca

SEQ ID NO: 68618 - DNA, 25 bp, probe
cctcgcatatatcttcagagagtac

SEQ ID NO: 68619 - DNA, 25 bp, probe
catcttaacacaggcaatgtcttct

SEQ ID NO: 68620 - DNA, 25 bp, probe
ctcgcatatatcttcagagagtaca

SEQ ID NO: 68621 - DNA, 25 bp, probe
gagttacatcttaacacaggcaatg

SEQ ID NO: 68622 - DNA, 25 bp, probe
atatcttcagagagtacaccaagcc

SEQ ID NO: 68623 - DNA, 25 bp, probe
gcctcgcatatatcttcagagagta

SEQ ID NO: 68624 - DNA, 25 bp, probe
ggagttacatcttaacacaggcaat

SEQ ID NO: 68625 - DNA, 25 bp, probe
agtttagttgacatagaagaggcac

SEQ ID NO: 68626 - DNA, 25 bp, probe
cagtttagttgacatagaagaggca

SEQ ID NO: 68627 - DNA, 25 bp, probe
tgccagtttagttgacatagaagag

SEQ ID NO: 68628 - DNA, 25 bp, probe
gtttagttgacatagaagaggcaca

SEQ ID NO: 68629 - DNA, 25 bp, probe
atgccagtttagttgacatagaaga

SEQ ID NO: 68630 - DNA, 25 bp, probe
catagaagaggcacaaaggagttac

SEQ ID NO: 68631 - DNA, 25 bp, probe
ccagtttagttgacatagaagaggc

SEQ ID NO: 68632 - DNA, 25 bp, probe
gccagtttagttgacatagaagagg

SEQ ID NO: 68633 - DNA, 25 bp, probe
aatgccagtttagttgacatagaag

SEQ ID NO: 68634 - DNA, 25 bp, probe
gaggcacaaaggagttacatcttaa

SEQ ID NO: 68635 - DNA, 25 bp, probe
aggagttacatcttaacacaggcaa

SEQ ID NO: 68636 - DNA, 25 bp, probe
aaggagttacatcttaacacaggca

SEQ ID NO: 68637 - DNA, 25 bp, probe
ttagttgacatagaagaggcacaaa

SEQ ID NO: 68638 - DNA, 25 bp, probe
tttagttgacatagaagaggcacaa

SEQ ID NO: 68639 - DNA, 25 bp, probe
tagaagaggcacaaaggagttacat

SEQ ID NO: 68640 - DNA, 25 bp, probe
atagaagaggcacaaaggagttaca

SEQ ID NO: 68641 - DNA, 25 bp, probe
acatagaagaggcacaaaggagtta

SEQ ID NO: 68642 - DNA, 25 bp, probe
tagttgacatagaagaggcacaaag

SEQ ID NO: 68643 - DNA, 25 bp, probe
tgacagttgtggtttatcattctct

SEQ ID NO: 68644 - DNA, 25 bp, probe
gacagttgtggtttatcattctcta

SEQ ID NO: 68645 - DNA, 25 bp, probe
catatatcttcagagagtacaccaa

SEQ ID NO: 68646 - DNA, 25 bp, probe
agaggcacaaaggagttacatctta

SEQ ID NO: 68647 - DNA, 25 bp, probe
atatatcttcagagagtacaccaag

SEQ ID NO: 68648 - DNA, 25 bp, probe
tcttaacacaggcaatgtcttcttt

SEQ ID NO: 68649 - DNA, 25 bp, probe
taatgccagtttagttgacatagaa

SEQ ID NO: 68650 - DNA, 25 bp, probe
ttaatgccagtttagttgacataga

SEQ ID NO: 68651 - DNA, 25 bp, probe
tacatcttaacacaggcaatgtctt

SEQ ID NO: 68652 - DNA, 25 bp, probe
ttacatcttaacacaggcaatgtct

SEQ ID NO: 68653 - DNA, 25 bp, probe
gttacatcttaacacaggcaatgtc

SEQ ID NO: 68654 - DNA, 25 bp, probe
acagttgtggtttatcattctctat

SEQ ID NO: 68655 - DNA, 25 bp, probe
gctgagaatgattatattaatgcca

SEQ ID NO: 68656 - DNA, 25 bp, probe
tgctgagaatgattatattaatgcc

SEQ ID NO: 68657 - DNA, 25 bp, probe
attggcaacctattctcactaagat

SEQ ID NO: 68658 - DNA, 25 bp, probe
ttggcaacctattctcactaagatg

SEQ ID NO: 68659 - DNA, 25 bp, probe
tattggcaacctattctcactaaga

SEQ ID NO: 68660 - DNA, 25 bp, probe
atattggcaacctattctcactaag

SEQ ID NO: 68661 - DNA, 25 bp, probe
gttatattggcaacctattctcact

SEQ ID NO: 68662 - DNA, 25 bp, probe
tggcaacctattctcactaagatgg

SEQ ID NO: 68663 - DNA, 25 bp, probe
tacaatggaggagaacagtgagagt

SEQ ID NO: 68664 - DNA, 25 bp, probe
tatattggcaacctattctcactaa

SEQ ID NO: 68665 - DNA, 25 bp, probe
ttatattggcaacctattctcacta

SEQ ID NO: 68666 - DNA, 25 bp, probe
tgaaacagaggctaaatgagaatga

SEQ ID NO: 68667 - DNA, 25 bp, probe
aaacagaggctaaatgagaatgaac

SEQ ID NO: 68668 - DNA, 25 bp, probe
agaggctaaatgagaatgaacgaaa

SEQ ID NO: 68669 - DNA, 25 bp, probe
atgaaacagaggctaaatgagaatg

SEQ ID NO: 68670 - DNA, 25 bp, probe
gaaacagaggctaaatgagaatgaa

SEQ ID NO: 68671 - DNA, 25 bp, probe
gatgaaacagaggctaaatgagaat

SEQ ID NO: 68672 - DNA, 25 bp, probe
cagaggctaaatgagaatgaacgaa

SEQ ID NO: 68673 - DNA, 25 bp, probe
aacagaggctaaatgagaatgaacg

SEQ ID NO: 68674 - DNA, 25 bp, probe
acagaggctaaatgagaatgaacga

SEQ ID NO: 68675 - DNA, 25 bp, probe
acaatggaggagaacagtgagagtg

SEQ ID NO: 68676 - DNA, 25 bp, probe
ggcaacctattctcactaagatggg

SEQ ID NO: 68677 - DNA, 25 bp, probe
gaaacgtattcgagaggacagaaag

SEQ ID NO: 68678 - DNA, 25 bp, probe
caccttctctctggtagacacttgt

SEQ ID NO: 68679 - DNA, 25 bp, probe
gaggctaaatgagaatgaacgaaaa

SEQ ID NO: 68680 - DNA, 25 bp, probe
ctcactaagatggggtttatgtcag

SEQ ID NO: 68681 - DNA, 25 bp, probe
ctaagatggggtttatgtcagtcat

SEQ ID NO: 68682 - DNA, 25 bp, probe
taagatggggtttatgtcagtcatt

SEQ ID NO: 68683 - DNA, 25 bp, probe
gaggagaacagtgagagtgctctac

SEQ ID NO: 68684 - DNA, 25 bp, probe
gatggggtttatgtcagtcattttg

SEQ ID NO: 68685 - DNA, 25 bp, probe
agatggggtttatgtcagtcatttt

SEQ ID NO: 68686 - DNA, 25 bp, probe
aagatggggtttatgtcagtcattt

SEQ ID NO: 68687 - DNA, 25 bp, probe
ttctcactaagatggggtttatgtc

SEQ ID NO: 68688 - DNA, 25 bp, probe
accttctctctggtagacacttgtc

SEQ ID NO: 68689 - DNA, 25 bp, probe
ggtttatgtcagtcattttggttgg

SEQ ID NO: 68690 - DNA, 25 bp, probe
gggtttatgtcagtcattttggttg

SEQ ID NO: 68691 - DNA, 25 bp, probe
attctcactaagatggggtttatgt

SEQ ID NO: 68692 - DNA, 25 bp, probe
cctattctcactaagatggggttta

SEQ ID NO: 68693 - DNA, 25 bp, probe
tctcactaagatggggtttatgtca

SEQ ID NO: 68694 - DNA, 25 bp, probe
gtttatgtcagtcattttggttggc

SEQ ID NO: 68695 - DNA, 25 bp, probe
cactaagatggggtttatgtcagtc

SEQ ID NO: 68696 - DNA, 25 bp, probe
tggttatattggcaacctattctca

SEQ ID NO: 68697 - DNA, 25 bp, probe
atggggtttatgtcagtcattttgg

SEQ ID NO: 68698 - DNA, 25 bp, probe
ggttatattggcaacctattctcac

SEQ ID NO: 68699 - DNA, 25 bp, probe
gtggttatattggcaacctattctc

SEQ ID NO: 68700 - DNA, 25 bp, probe
ggtggttatattggcaacctattct

SEQ ID NO: 68701 - DNA, 25 bp, probe
gagaagatcccaaagttacaagagc

SEQ ID NO: 68702 - DNA, 25 bp, probe
atcccaaagttacaagagccaagtt

SEQ ID NO: 68703 - DNA, 25 bp, probe
aagatcccaaagttacaagagccaa

SEQ ID NO: 68704 - DNA, 25 bp, probe
ggagaagatcccaaagttacaagag

SEQ ID NO: 68705 - DNA, 25 bp, probe
caggagaagatcccaaagttacaag

SEQ ID NO: 68706 - DNA, 25 bp, probe
aggagaagatcccaaagttacaaga

SEQ ID NO: 68707 - DNA, 25 bp, probe
agaagatcccaaagttacaagagcc

SEQ ID NO: 68708 - DNA, 25 bp, probe
tcccaaagttacaagagccaagttc

SEQ ID NO: 68709 - DNA, 25 bp, probe
agatcccaaagttacaagagccaag

SEQ ID NO: 68710 - DNA, 25 bp, probe
gaagatcccaaagttacaagagcca

SEQ ID NO: 68711 - DNA, 25 bp, probe
gttacaagagccaagttctttatcc

SEQ ID NO: 68712 - DNA, 25 bp, probe
caaagttacaagagccaagttcttt

SEQ ID NO: 68713 - DNA, 25 bp, probe
cccaaagttacaagagccaagttct

SEQ ID NO: 68714 - DNA, 25 bp, probe
gatcccaaagttacaagagccaagt

SEQ ID NO: 68715 - DNA, 25 bp, probe
agttacaagagccaagttctttatc

SEQ ID NO: 68716 - DNA, 25 bp, probe
ttacaagagccaagttctttatccg

SEQ ID NO: 68717 - DNA, 25 bp, probe
aaagttacaagagccaagttcttta

SEQ ID NO: 68718 - DNA, 25 bp, probe
aagttacaagagccaagttctttat

SEQ ID NO: 68719 - DNA, 25 bp, probe
ccaaagttacaagagccaagttctt

SEQ ID NO: 68720 - DNA, 25 bp, probe
gcaggagaagatcccaaagttacaa

SEQ ID NO: 68721 - DNA, 25 bp, probe
gatgcaggagaagatcccaaagtta

SEQ ID NO: 68722 - DNA, 25 bp, probe
atgcaggagaagatcccaaagttac

SEQ ID NO: 68723 - DNA, 25 bp, probe
caagttctttatccgggacctgttt

SEQ ID NO: 68724 - DNA, 25 bp, probe
tgcaggagaagatcccaaagttaca

SEQ ID NO: 68725 - DNA, 25 bp, probe
agatgcaggagaagatcccaaagtt

SEQ ID NO: 68726 - DNA, 25 bp, probe
tacaagagccaagttctttatccgg

SEQ ID NO: 68727 - DNA, 25 bp, probe
aagttctttatccgggacctgtttt

SEQ ID NO: 68728 - DNA, 25 bp, probe
cagatgcaggagaagatcccaaagt

SEQ ID NO: 68729 - DNA, 25 bp, probe
caaacattactgctacccgcacttc

SEQ ID NO: 68730 - DNA, 25 bp, probe
ccaagttctttatccgggacctgtt

SEQ ID NO: 68731 - DNA, 25 bp, probe
aaacattactgctacccgcacttca

SEQ ID NO: 68732 - DNA, 25 bp, probe
ccagatgcaggagaagatcccaaag

SEQ ID NO: 68733 - DNA, 25 bp, probe
aagagccaagttctttatccgggac

SEQ ID NO: 68734 - DNA, 25 bp, probe
caagagccaagttctttatccggga

SEQ ID NO: 68735 - DNA, 25 bp, probe
acaagagccaagttctttatccggg

SEQ ID NO: 68736 - DNA, 25 bp, probe
cctcaagcagtatgagctcttgtga

SEQ ID NO: 68737 - DNA, 25 bp, probe
acctcaagcagtatgagctcttgtg

SEQ ID NO: 68738 - DNA, 25 bp, probe
cacctcaagcagtatgagctcttgt

SEQ ID NO: 68739 - DNA, 25 bp, probe
gtaagacagtagaagtgatgacagc

SEQ ID NO: 68740 - DNA, 25 bp, probe
tgtaagacagtagaagtgatgacag

SEQ ID NO: 68741 - DNA, 25 bp, probe
ttgtaagacagtagaagtgatgaca

SEQ ID NO: 68742 - DNA, 25 bp, probe
taagacagtagaagtgatgacagct

SEQ ID NO: 68743 - DNA, 25 bp, probe
cctcatttcctaacttctgtgtctg

SEQ ID NO: 68744 - DNA, 25 bp, probe
tagcaaactcctataccactgtcaa

SEQ ID NO: 68745 - DNA, 25 bp, probe
acctcatttcctaacttctgtgtct

SEQ ID NO: 68746 - DNA, 25 bp, probe
taccactgtcaagtatagccgagaa

SEQ ID NO: 68747 - DNA, 25 bp, probe
caaactcctataccactgtcaagta

SEQ ID NO: 68748 - DNA, 25 bp, probe
ctcatttcctaacttctgtgtctgc

SEQ ID NO: 68749 - DNA, 25 bp, probe
catttcctaacttctgtgtctgctg

SEQ ID NO: 68750 - DNA, 25 bp, probe
ttcgtaaacacatgatagcaaactc

SEQ ID NO: 68751 - DNA, 25 bp, probe
atgatagcaaactcctataccactg

SEQ ID NO: 68752 - DNA, 25 bp, probe
gctttgtaagacagtagaagtgatg

SEQ ID NO: 68753 - DNA, 25 bp, probe
tttcgtaaacacatgatagcaaact

SEQ ID NO: 68754 - DNA, 25 bp, probe
caggagaaagggaagaaacaaagtg

SEQ ID NO: 68755 - DNA, 25 bp, probe
tcatttcctaacttctgtgtctgct

SEQ ID NO: 68756 - DNA, 25 bp, probe
gatagcaaactcctataccactgtc

SEQ ID NO: 68757 - DNA, 25 bp, probe
ataccactgtcaagtatagccgaga

SEQ ID NO: 68758 - DNA, 25 bp, probe
cgctttgtaagacagtagaagtgat

SEQ ID NO: 68759 - DNA, 25 bp, probe
tttccgctttgtaagacagtagaag

SEQ ID NO: 68760 - DNA, 25 bp, probe
atagcaaactcctataccactgtca

SEQ ID NO: 68761 - DNA, 25 bp, probe
tgatagcaaactcctataccactgt

SEQ ID NO: 68762 - DNA, 25 bp, probe
gtaaacacatgatagcaaactccta

SEQ ID NO: 68763 - DNA, 25 bp, probe
agcaaactcctataccactgtcaag

SEQ ID NO: 68764 - DNA, 25 bp, probe
tataccactgtcaagtatagccgag

SEQ ID NO: 68765 - DNA, 25 bp, probe
gtttccgctttgtaagacagtagaa

SEQ ID NO: 68766 - DNA, 25 bp, probe
cgtaaacacatgatagcaaactcct

SEQ ID NO: 68767 - DNA, 25 bp, probe
tcgtaaacacatgatagcaaactcc

SEQ ID NO: 68768 - DNA, 25 bp, probe
tttgtaagacagtagaagtgatgac

SEQ ID NO: 68769 - DNA, 25 bp, probe
catgatagcaaactcctataccact

SEQ ID NO: 68770 - DNA, 25 bp, probe
acatgatagcaaactcctataccac

SEQ ID NO: 68771 - DNA, 25 bp, probe
cacatgatagcaaactcctatacca

SEQ ID NO: 68772 - DNA, 25 bp, probe
acacatgatagcaaactcctatacc

SEQ ID NO: 68773 - DNA, 25 bp, probe
aaactcctataccactgtcaagtat

SEQ ID NO: 68774 - DNA, 25 bp, probe
ctttgtaagacagtagaagtgatga

SEQ ID NO: 68775 - DNA, 25 bp, probe
aactcctataccactgtcaagtata

SEQ ID NO: 68776 - DNA, 25 bp, probe
cacctcatttcctaacttctgtgtc

SEQ ID NO: 68777 - DNA, 25 bp, probe
gacacctcatttcctaacttctgtg

SEQ ID NO: 68778 - DNA, 25 bp, probe
ttccgctttgtaagacagtagaagt

SEQ ID NO: 68779 - DNA, 25 bp, probe
tgggaaattgacatgcagaaatatt

SEQ ID NO: 68780 - DNA, 25 bp, probe
aacacatgatagcaaactcctatac

SEQ ID NO: 68781 - DNA, 25 bp, probe
tgtttccgctttgtaagacagtaga

SEQ ID NO: 68782 - DNA, 25 bp, probe
gtgtttccgctttgtaagacagtag

SEQ ID NO: 68783 - DNA, 25 bp, probe
tgaattgatgaatctgtgttggaag

SEQ ID NO: 68784 - DNA, 25 bp, probe
atgaattgatgaatctgtgttggaa

SEQ ID NO: 68785 - DNA, 25 bp, probe
attgatgaatctgtgttggaagaag

SEQ ID NO: 68786 - DNA, 25 bp, probe
gaattgatgaatctgtgttggaaga

SEQ ID NO: 68787 - DNA, 25 bp, probe
aattgatgaatctgtgttggaagaa

SEQ ID NO: 68788 - DNA, 25 bp, probe
ttgatgaatctgtgttggaagaagg

SEQ ID NO: 68789 - DNA, 25 bp, probe
gatgaatctgtgttggaagaaggac

SEQ ID NO: 68790 - DNA, 25 bp, probe
catgaattgatgaatctgtgttgga

SEQ ID NO: 68791 - DNA, 25 bp, probe
tccatgaattgatgaatctgtgttg

SEQ ID NO: 68792 - DNA, 25 bp, probe
ctccatgaattgatgaatctgtgtt

SEQ ID NO: 68793 - DNA, 25 bp, probe
tgatgaatctgtgttggaagaagga

SEQ ID NO: 68794 - DNA, 25 bp, probe
cctccatgaattgatgaatctgtgt

SEQ ID NO: 68795 - DNA, 25 bp, probe
atgaatctgtgttggaagaaggacc

SEQ ID NO: 68796 - DNA, 25 bp, probe
ccatgaattgatgaatctgtgttgg

SEQ ID NO: 68797 - DNA, 25 bp, probe
cctgatgaaagaccaacatttgaat

SEQ ID NO: 68798 - DNA, 25 bp, probe
aatccctccatgaattgatgaatct

SEQ ID NO: 68799 - DNA, 25 bp, probe
agaatccctccatgaattgatgaat

SEQ ID NO: 68800 - DNA, 25 bp, probe
gaatccctccatgaattgatgaatc

SEQ ID NO: 68801 - DNA, 25 bp, probe
atccctccatgaattgatgaatctg

SEQ ID NO: 68802 - DNA, 25 bp, probe
ccctgatgaaagaccaacatttgaa

SEQ ID NO: 68803 - DNA, 25 bp, probe
cagaatccctccatgaattgatgaa

SEQ ID NO: 68804 - DNA, 25 bp, probe
ctgatgaaagaccaacatttgaata

SEQ ID NO: 68805 - DNA, 25 bp, probe
gaccctgatgaaagaccaacatttg

SEQ ID NO: 68806 - DNA, 25 bp, probe
ccctccatgaattgatgaatctgtg

SEQ ID NO: 68807 - DNA, 25 bp, probe
tccctccatgaattgatgaatctgt

SEQ ID NO: 68808 - DNA, 25 bp, probe
ttcttggaagactacttcactgcta

SEQ ID NO: 68809 - DNA, 25 bp, probe
accctgatgaaagaccaacatttga

SEQ ID NO: 68810 - DNA, 25 bp, probe
tcttggaagactacttcactgctac

SEQ ID NO: 68811 - DNA, 25 bp, probe
tccttcttggaagactacttcactg

SEQ ID NO: 68812 - DNA, 25 bp, probe
gtccttcttggaagactacttcact

SEQ ID NO: 68813 - DNA, 25 bp, probe
gtccagaatccctccatgaattgat

SEQ ID NO: 68814 - DNA, 25 bp, probe
ccagaatccctccatgaattgatga

SEQ ID NO: 68815 - DNA, 25 bp, probe
tccagaatccctccatgaattgatg

SEQ ID NO: 68816 - DNA, 25 bp, probe
tgatgaaagaccaacatttgaatat

SEQ ID NO: 68817 - DNA, 25 bp, probe
ttggaagactacttcactgctacag

SEQ ID NO: 68818 - DNA, 25 bp, probe
cttggaagactacttcactgctaca

SEQ ID NO: 68819 - DNA, 25 bp, probe
ggaagactacttcactgctacagag

SEQ ID NO: 68820 - DNA, 25 bp, probe
atatattcagtccttcttggaagac

SEQ ID NO: 68821 - DNA, 25 bp, probe
ggaccctgatgaaagaccaacattt

SEQ ID NO: 68822 - DNA, 25 bp, probe
tattcagtccttcttggaagactac

SEQ ID NO: 68823 - DNA, 25 bp, probe
cttcttggaagactacttcactgct

SEQ ID NO: 68824 - DNA, 25 bp, probe
attcagtccttcttggaagactact

SEQ ID NO: 68825 - DNA, 25 bp, probe
gttggaagaaggaccctgatgaaag

SEQ ID NO: 68826 - DNA, 25 bp, probe
ttcagtccttcttggaagactactt

SEQ ID NO: 68827 - DNA, 25 bp, probe
ggctattctctttgaacctttggag

SEQ ID NO: 68828 - DNA, 25 bp, probe
aatcatagagcttgccttagtttca

SEQ ID NO: 68829 - DNA, 25 bp, probe
aaatcatagagcttgccttagtttc

SEQ ID NO: 68830 - DNA, 25 bp, probe
gacaagtggcaagaggagtacaatg

SEQ ID NO: 68831 - DNA, 25 bp, probe
atcatagagcttgccttagtttcaa

SEQ ID NO: 68832 - DNA, 25 bp, probe
tcatagagcttgccttagtttcaaa

SEQ ID NO: 68833 - DNA, 25 bp, probe
ctattctctttgaacctttggaggc

SEQ ID NO: 68834 - DNA, 25 bp, probe
gctattctctttgaacctttggagg

SEQ ID NO: 68835 - DNA, 25 bp, probe
gaggctattctctttgaacctttgg

SEQ ID NO: 68836 - DNA, 25 bp, probe
ggaggctattctctttgaacctttg

SEQ ID NO: 68837 - DNA, 25 bp, probe
aggctattctctttgaacctttgga

SEQ ID NO: 68838 - DNA, 25 bp, probe
tggaggctattctctttgaaccttt

SEQ ID NO: 68839 - DNA, 25 bp, probe
gaggtggaggctattctctttgaac

SEQ ID NO: 68840 - DNA, 25 bp, probe
gtggaggctattctctttgaacctt

SEQ ID NO: 68841 - DNA, 25 bp, probe
gttcagggtctagccaaaatcatag

SEQ ID NO: 68842 - DNA, 25 bp, probe
ggacaagtggcaagaggagtacaat

SEQ ID NO: 68843 - DNA, 25 bp, probe
acaagtggcaagaggagtacaatgg

SEQ ID NO: 68844 - DNA, 25 bp, probe
ttagtttcaaaagcaaccaggtcag

SEQ ID NO: 68845 - DNA, 25 bp, probe
cttagtttcaaaagcaaccaggtca

SEQ ID NO: 68846 - DNA, 25 bp, probe
aaaatcatagagcttgccttagttt

SEQ ID NO: 68847 - DNA, 25 bp, probe
catagagcttgccttagtttcaaaa

SEQ ID NO: 68848 - DNA, 25 bp, probe
atagagcttgccttagtttcaaaag

SEQ ID NO: 68849 - DNA, 25 bp, probe
caaaatcatagagcttgccttagtt

SEQ ID NO: 68850 - DNA, 25 bp, probe
ttcagggtctagccaaaatcataga

SEQ ID NO: 68851 - DNA, 25 bp, probe
ccaaaatcatagagcttgccttagt

SEQ ID NO: 68852 - DNA, 25 bp, probe
cgttcagggtctagccaaaatcata

SEQ ID NO: 68853 - DNA, 25 bp, probe
tcctgggcatcactcagaagaattt

SEQ ID NO: 68854 - DNA, 25 bp, probe
tagtttcaaaagcaaccaggtcaga

SEQ ID NO: 68855 - DNA, 25 bp, probe
tcagggtctagccaaaatcatagag

SEQ ID NO: 68856 - DNA, 25 bp, probe
ctcctgggcatcactcagaagaatt

SEQ ID NO: 68857 - DNA, 25 bp, probe
ggtggaggctattctctttgaacct

SEQ ID NO: 68858 - DNA, 25 bp, probe
aggtggaggctattctctttgaacc

SEQ ID NO: 68859 - DNA, 25 bp, probe
ccttagtttcaaaagcaaccaggtc

SEQ ID NO: 68860 - DNA, 25 bp, probe
gccaaaatcatagagcttgccttag

SEQ ID NO: 68861 - DNA, 25 bp, probe
agaggtggaggctattctctttgaa

SEQ ID NO: 68862 - DNA, 25 bp, probe
tattctctttgaacctttggaggcc

SEQ ID NO: 68863 - DNA, 25 bp, probe
cctgggcatcactcagaagaatttt

SEQ ID NO: 68864 - DNA, 25 bp, probe
cagggtctagccaaaatcatagagc

SEQ ID NO: 68865 - DNA, 25 bp, probe
agtttcaaaagcaaccaggtcagag

SEQ ID NO: 68866 - DNA, 25 bp, probe
ggtctagccaaaatcatagagcttg

SEQ ID NO: 68867 - DNA, 25 bp, probe
cagaggtggaggctattctctttga

SEQ ID NO: 68868 - DNA, 25 bp, probe
tcagaggtggaggctattctctttg

SEQ ID NO: 68869 - DNA, 25 bp, probe
gtcagaggtggaggctattctcttt

SEQ ID NO: 68870 - DNA, 25 bp, probe
gtctagccaaaatcatagagcttgc

SEQ ID NO: 68871 - DNA, 25 bp, probe
cttcactctcatctcggacgagaag

SEQ ID NO: 68872 - DNA, 25 bp, probe
cactctcatctcggacgagaagaac

SEQ ID NO: 68873 - DNA, 25 bp, probe
tcactctcatctcggacgagaagaa

SEQ ID NO: 68874 - DNA, 25 bp, probe
ttcactctcatctcggacgagaaga

SEQ ID NO: 68875 - DNA, 25 bp, probe
tataacgtcgaggtcaagcacatta

SEQ ID NO: 68876 - DNA, 25 bp, probe
atataacgtcgaggtcaagcacatt

SEQ ID NO: 68877 - DNA, 25 bp, probe
aatataacgtcgaggtcaagcacat

SEQ ID NO: 68878 - DNA, 25 bp, probe
ataacgtcgaggtcaagcacattaa

SEQ ID NO: 68879 - DNA, 25 bp, probe
taacgtcgaggtcaagcacattaaa

SEQ ID NO: 68880 - DNA, 25 bp, probe
aggacctgtctgttcatctctggta

SEQ ID NO: 68881 - DNA, 25 bp, probe
cgaggtcaagcacattaaaatcatg

SEQ ID NO: 68882 - DNA, 25 bp, probe
ggacctgtctgttcatctctggtac

SEQ ID NO: 68883 - DNA, 25 bp, probe
ctcaggacctgtctgttcatctctg

SEQ ID NO: 68884 - DNA, 25 bp, probe
tcgaggtcaagcacattaaaatcat

SEQ ID NO: 68885 - DNA, 25 bp, probe
gacctgtctgttcatctctggtacg

SEQ ID NO: 68886 - DNA, 25 bp, probe
gtcgaggtcaagcacattaaaatca

SEQ ID NO: 68887 - DNA, 25 bp, probe
ctgtctgttcatctctggtacgcag

SEQ ID NO: 68888 - DNA, 25 bp, probe
cgtcgaggtcaagcacattaaaatc

SEQ ID NO: 68889 - DNA, 25 bp, probe
cctcaggacctgtctgttcatctct

SEQ ID NO: 68890 - DNA, 25 bp, probe
attaaaatcatgacagcagaaggac

SEQ ID NO: 68891 - DNA, 25 bp, probe
tcctcaggacctgtctgttcatctc

SEQ ID NO: 68892 - DNA, 25 bp, probe
ctcctcaggacctgtctgttcatct

SEQ ID NO: 68893 - DNA, 25 bp, probe
acattaaaatcatgacagcagaagg

SEQ ID NO: 68894 - DNA, 25 bp, probe
cattaaaatcatgacagcagaagga

SEQ ID NO: 68895 - DNA, 25 bp, probe
gcacattaaaatcatgacagcagaa

SEQ ID NO: 68896 - DNA, 25 bp, probe
aagcacattaaaatcatgacagcag

SEQ ID NO: 68897 - DNA, 25 bp, probe
caagcacattaaaatcatgacagca

SEQ ID NO: 68898 - DNA, 25 bp, probe
cacattaaaatcatgacagcagaag

SEQ ID NO: 68899 - DNA, 25 bp, probe
gaggtcaagcacattaaaatcatga

SEQ ID NO: 68900 - DNA, 25 bp, probe
tcaagcacattaaaatcatgacagc

SEQ ID NO: 68901 - DNA, 25 bp, probe
agcacattaaaatcatgacagcaga

SEQ ID NO: 68902 - DNA, 25 bp, probe
acgtcgaggtcaagcacattaaaat

SEQ ID NO: 68903 - DNA, 25 bp, probe
aacgtcgaggtcaagcacattaaaa

SEQ ID NO: 68904 - DNA, 25 bp, probe
ggtcaagcacattaaaatcatgaca

SEQ ID NO: 68905 - DNA, 25 bp, probe
aggtcaagcacattaaaatcatgac

SEQ ID NO: 68906 - DNA, 25 bp, probe
gtcaagcacattaaaatcatgacag

SEQ ID NO: 68907 - DNA, 25 bp, probe
caacacacacatattcacaagagtt

SEQ ID NO: 68908 - DNA, 25 bp, probe
aacacacacatattcacaagagttg

SEQ ID NO: 68909 - DNA, 25 bp, probe
ccaacacacacatattcacaagagt

SEQ ID NO: 68910 - DNA, 25 bp, probe
acacacatattcacaagagttgctg

SEQ ID NO: 68911 - DNA, 25 bp, probe
cacacacatattcacaagagttgct

SEQ ID NO: 68912 - DNA, 25 bp, probe
acacacacatattcacaagagttgc

SEQ ID NO: 68913 - DNA, 25 bp, probe
atatgacaatatcaggctctggatc

SEQ ID NO: 68914 - DNA, 25 bp, probe
tatgacaatatcaggctctggatca

SEQ ID NO: 68915 - DNA, 25 bp, probe
cacacatattcacaagagttgctgg

SEQ ID NO: 68916 - DNA, 25 bp, probe
acacatattcacaagagttgctggt

SEQ ID NO: 68917 - DNA, 25 bp, probe
atcaggtctaccattgcttgttcag

SEQ ID NO: 68918 - DNA, 25 bp, probe
atgacaatatcaggctctggatcag

SEQ ID NO: 68919 - DNA, 25 bp, probe
ggtctaccattgcttgttcagagaa

SEQ ID NO: 68920 - DNA, 25 bp, probe
aatatcaggctctggatcaggtcta

SEQ ID NO: 68921 - DNA, 25 bp, probe
gatcaggtctaccattgcttgttca

SEQ ID NO: 68922 - DNA, 25 bp, probe
atattcacaagagttgctggtggaa

SEQ ID NO: 68923 - DNA, 25 bp, probe
cacatattcacaagagttgctggtg

SEQ ID NO: 68924 - DNA, 25 bp, probe
cccaacacacacatattcacaagag

SEQ ID NO: 68925 - DNA, 25 bp, probe
atatcaggctctggatcaggtctac

SEQ ID NO: 68926 - DNA, 25 bp, probe
caggtctaccattgcttgttcagag

SEQ ID NO: 68927 - DNA, 25 bp, probe
tattcacaagagttgctggtggaag

SEQ ID NO: 68928 - DNA, 25 bp, probe
ggatcaggtctaccattgcttgttc

SEQ ID NO: 68929 - DNA, 25 bp, probe
aggtctaccattgcttgttcagaga

SEQ ID NO: 68930 - DNA, 25 bp, probe
gatatgacaatatcaggctctggat

SEQ ID NO: 68931 - DNA, 25 bp, probe
catattcacaagagttgctggtgga

SEQ ID NO: 68932 - DNA, 25 bp, probe
acatattcacaagagttgctggtgg

SEQ ID NO: 68933 - DNA, 25 bp, probe
tcaggtctaccattgcttgttcaga

SEQ ID NO: 68934 - DNA, 25 bp, probe
aactattgttgttacaggaacactg

SEQ ID NO: 68935 - DNA, 25 bp, probe
actattgttgttacaggaacactgg

SEQ ID NO: 68936 - DNA, 25 bp, probe
caatatcaggctctggatcaggtct

SEQ ID NO: 68937 - DNA, 25 bp, probe
acaatatcaggctctggatcaggtc

SEQ ID NO: 68938 - DNA, 25 bp, probe
gacaatatcaggctctggatcaggt

SEQ ID NO: 68939 - DNA, 25 bp, probe
tgacaatatcaggctctggatcagg

SEQ ID NO: 68940 - DNA, 25 bp, probe
ctattgttgttacaggaacactggc

SEQ ID NO: 68941 - DNA, 25 bp, probe
gtctaccattgcttgttcagagaac

SEQ ID NO: 68942 - DNA, 25 bp, probe
ataaccccaacacacacatattcac

SEQ ID NO: 68943 - DNA, 25 bp, probe
cataaccccaacacacacatattca

SEQ ID NO: 68944 - DNA, 25 bp, probe
acataaccccaacacacacatattc

SEQ ID NO: 68945 - DNA, 25 bp, probe
cacataaccccaacacacacatatt

SEQ ID NO: 68946 - DNA, 25 bp, probe
tattgttgttacaggaacactggca

SEQ ID NO: 68947 - DNA, 25 bp, probe
ctctggatcaggtctaccattgctt

SEQ ID NO: 68948 - DNA, 25 bp, probe
tggatcaggtctaccattgcttgtt

SEQ ID NO: 68949 - DNA, 25 bp, probe
tgtgaaaactattgttgttacagga

SEQ ID NO: 68950 - DNA, 25 bp, probe
tctggatcaggtctaccattgcttg

SEQ ID NO: 68951 - DNA, 25 bp, probe
ttggagttctgctgtatgagatgtt

SEQ ID NO: 68952 - DNA, 25 bp, probe
tggagttctgctgtatgagatgttg

SEQ ID NO: 68953 - DNA, 25 bp, probe
ggagttctgctgtatgagatgttgg

SEQ ID NO: 68954 - DNA, 25 bp, probe
ctttggagttctgctgtatgagatg

SEQ ID NO: 68955 - DNA, 25 bp, probe
tttggagttctgctgtatgagatgt

SEQ ID NO: 68956 - DNA, 25 bp, probe
gagttctgctgtatgagatgttggc

SEQ ID NO: 68957 - DNA, 25 bp, probe
cctttggagttctgctgtatgagat

SEQ ID NO: 68958 - DNA, 25 bp, probe
catcatggaacaaactgtcacctac

SEQ ID NO: 68959 - DNA, 25 bp, probe
atcatggaacaaactgtcacctacc

SEQ ID NO: 68960 - DNA, 25 bp, probe
tcctttggagttctgctgtatgaga

SEQ ID NO: 68961 - DNA, 25 bp, probe
gtcctttggagttctgctgtatgag

SEQ ID NO: 68962 - DNA, 25 bp, probe
ccatcatggaacaaactgtcaccta

SEQ ID NO: 68963 - DNA, 25 bp, probe
ttggcatgtgtaaggagaacgtctt

SEQ ID NO: 68964 - DNA, 25 bp, probe
agttctgctgtatgagatgttggca

SEQ ID NO: 68965 - DNA, 25 bp, probe
tggcatgtgtaaggagaacgtcttc

SEQ ID NO: 68966 - DNA, 25 bp, probe
ggtcctttggagttctgctgtatga

SEQ ID NO: 68967 - DNA, 25 bp, probe
gagatcattgcctaccagccctatg

SEQ ID NO: 68968 - DNA, 25 bp, probe
tggtcctttggagttctgctgtatg

SEQ ID NO: 68969 - DNA, 25 bp, probe
gtggtcctttggagttctgctgtat

SEQ ID NO: 68970 - DNA, 25 bp, probe
tcatggaacaaactgtcacctaccc

SEQ ID NO: 68971 - DNA, 25 bp, probe
ctatgggaagtctgtcgattggtgg

SEQ ID NO: 68972 - DNA, 25 bp, probe
cctatgggaagtctgtcgattggtg

SEQ ID NO: 68973 - DNA, 25 bp, probe
tttggcatgtgtaaggagaacgtct

SEQ ID NO: 68974 - DNA, 25 bp, probe
gaagtctgtcgattggtggtccttt

SEQ ID NO: 68975 - DNA, 25 bp, probe
aagtctgtcgattggtggtcctttg

SEQ ID NO: 68976 - DNA, 25 bp, probe
tttcaggccatcatggaacaaactg

SEQ ID NO: 68977 - DNA, 25 bp, probe
aacaaactgtcacctaccccaagtc

SEQ ID NO: 68978 - DNA, 25 bp, probe
gaacaaactgtcacctaccccaagt

SEQ ID NO: 68979 - DNA, 25 bp, probe
gtttcaggccatcatggaacaaact

SEQ ID NO: 68980 - DNA, 25 bp, probe
ctgtttcaggccatcatggaacaaa

SEQ ID NO: 68981 - DNA, 25 bp, probe
ttcaggccatcatggaacaaactgt

SEQ ID NO: 68982 - DNA, 25 bp, probe
gactacatagccccggagatcattg

SEQ ID NO: 68983 - DNA, 25 bp, probe
tgtttcaggccatcatggaacaaac

SEQ ID NO: 68984 - DNA, 25 bp, probe
catgtgtaaggagaacgtcttcccc

SEQ ID NO: 68985 - DNA, 25 bp, probe
cttctacgaggacttcctcatctgg

SEQ ID NO: 68986 - DNA, 25 bp, probe
ccttctacgaggacttcctcatctg

SEQ ID NO: 68987 - DNA, 25 bp, probe
cccttctacgaggacttcctcatct

SEQ ID NO: 68988 - DNA, 25 bp, probe
ggacctgaagttggacaatttgctc

SEQ ID NO: 68989 - DNA, 25 bp, probe
tacagggacctgaagttggacaatt

SEQ ID NO: 68990 - DNA, 25 bp, probe
gaagttggacaatttgctcctggac

SEQ ID NO: 68991 - DNA, 25 bp, probe
ctgaagttggacaatttgctcctgg

SEQ ID NO: 68992 - DNA, 25 bp, probe
cctgaagttggacaatttgctcctg

SEQ ID NO: 68993 - DNA, 25 bp, probe
gacctgaagttggacaatttgctcc

SEQ ID NO: 68994 - DNA, 25 bp, probe
cagggacctgaagttggacaatttg

SEQ ID NO: 68995 - DNA, 25 bp, probe
tgaagttggacaatttgctcctgga

SEQ ID NO: 68996 - DNA, 25 bp, probe
acctgaagttggacaatttgctcct

SEQ ID NO: 68997 - DNA, 25 bp, probe
acagggacctgaagttggacaattt

SEQ ID NO: 68998 - DNA, 25 bp, probe
aagttggacaatttgctcctggaca

SEQ ID NO: 68999 - DNA, 25 bp, probe
ggaagttctggggtttgttgataag

SEQ ID NO: 69000 - DNA, 25 bp, probe
atatgaggaagttctggggtttgtt

SEQ ID NO: 69001 - DNA, 25 bp, probe
aggaagttctggggtttgttgataa

SEQ ID NO: 69002 - DNA, 25 bp, probe
gaagttctggggtttgttgataagc

SEQ ID NO: 69003 - DNA, 25 bp, probe
gaggaagttctggggtttgttgata

SEQ ID NO: 69004 - DNA, 25 bp, probe
tatgaggaagttctggggtttgttg

SEQ ID NO: 69005 - DNA, 25 bp, probe
aagttctggggtttgttgataagcc

SEQ ID NO: 69006 - DNA, 25 bp, probe
ggacagcggaacatatgaggaagtt

SEQ ID NO: 69007 - DNA, 25 bp, probe
aacatatgaggaagttctggggttt

SEQ ID NO: 69008 - DNA, 25 bp, probe
catatgaggaagttctggggtttgt

SEQ ID NO: 69009 - DNA, 25 bp, probe
acatatgaggaagttctggggtttg

SEQ ID NO: 69010 - DNA, 25 bp, probe
tgaggaagttctggggtttgttgat

SEQ ID NO: 69011 - DNA, 25 bp, probe
atgaggaagttctggggtttgttga

SEQ ID NO: 69012 - DNA, 25 bp, probe
cagcggaacatatgaggaagttctg

SEQ ID NO: 69013 - DNA, 25 bp, probe
gacagcggaacatatgaggaagttc

SEQ ID NO: 69014 - DNA, 25 bp, probe
acagcggaacatatgaggaagttct

SEQ ID NO: 69015 - DNA, 25 bp, probe
aaaacagaagtcttaccagtgctgg

SEQ ID NO: 69016 - DNA, 25 bp, probe
agcggaacatatgaggaagttctgg

SEQ ID NO: 69017 - DNA, 25 bp, probe
tttaaacattcagcaccaaagccgg

SEQ ID NO: 69018 - DNA, 25 bp, probe
gaagtcttaccagtgctggtttaaa

SEQ ID NO: 69019 - DNA, 25 bp, probe
agaagtcttaccagtgctggtttaa

SEQ ID NO: 69020 - DNA, 25 bp, probe
gaacatatgaggaagttctggggtt

SEQ ID NO: 69021 - DNA, 25 bp, probe
cagaagtcttaccagtgctggttta

SEQ ID NO: 69022 - DNA, 25 bp, probe
aacagaagtcttaccagtgctggtt

SEQ ID NO: 69023 - DNA, 25 bp, probe
ggaacatatgaggaagttctggggt

SEQ ID NO: 69024 - DNA, 25 bp, probe
acagaagtcttaccagtgctggttt

SEQ ID NO: 69025 - DNA, 25 bp, probe
aaacagaagtcttaccagtgctggt

SEQ ID NO: 69026 - DNA, 25 bp, probe
cggaacatatgaggaagttctgggg

SEQ ID NO: 69027 - DNA, 25 bp, probe
cgagacagacaacatgaaccagatc

SEQ ID NO: 69028 - DNA, 25 bp, probe
gacagacaacatgaaccagatctac

SEQ ID NO: 69029 - DNA, 25 bp, probe
agacagacaacatgaaccagatcta

SEQ ID NO: 69030 - DNA, 25 bp, probe
acgagacagacaacatgaaccagat

SEQ ID NO: 69031 - DNA, 25 bp, probe
gagacagacaacatgaaccagatct

SEQ ID NO: 69032 - DNA, 25 bp, probe
acagacaacatgaaccagatctacg

SEQ ID NO: 69033 - DNA, 25 bp, probe
caaccacgagacagacaacatgaac

SEQ ID NO: 69034 - DNA, 25 bp, probe
cagacaacatgaaccagatctacgg

SEQ ID NO: 69035 - DNA, 25 bp, probe
cacgagacagacaacatgaaccaga

SEQ ID NO: 69036 - DNA, 25 bp, probe
agacaacatgaaccagatctacggt

SEQ ID NO: 69037 - DNA, 25 bp, probe
gacaacatgaaccagatctacggtt

SEQ ID NO: 69038 - DNA, 25 bp, probe
caacatgaaccagatctacggtttc

SEQ ID NO: 69039 - DNA, 25 bp, probe
acaacatgaaccagatctacggttt

SEQ ID NO: 69040 - DNA, 25 bp, probe
aacatgaaccagatctacggtttcg

SEQ ID NO: 69041 - DNA, 25 bp, probe
catgaaccagatctacggtttcgag

SEQ ID NO: 69042 - DNA, 25 bp, probe
acatgaaccagatctacggtttcga

SEQ ID NO: 69043 - DNA, 25 bp, probe
atgaaccagatctacggtttcgagg

SEQ ID NO: 69044 - DNA, 25 bp, probe
gatgccacgactattcttggacttg

SEQ ID NO: 69045 - DNA, 25 bp, probe
agatgccacgactattcttggactt

SEQ ID NO: 69046 - DNA, 25 bp, probe
gagatgccacgactattcttggact

SEQ ID NO: 69047 - DNA, 25 bp, probe
atgccacgactattcttggacttgg

SEQ ID NO: 69048 - DNA, 25 bp, probe
cacgactattcttggacttgggacc

SEQ ID NO: 69049 - DNA, 25 bp, probe
ccacgactattcttggacttgggac

SEQ ID NO: 69050 - DNA, 25 bp, probe
ggtgaaggtagaatgtaagaagagg

SEQ ID NO: 69051 - DNA, 25 bp, probe
caggtgaaggtagaatgtaagaaga

SEQ ID NO: 69052 - DNA, 25 bp, probe
aggtgaaggtagaatgtaagaagag

SEQ ID NO: 69053 - DNA, 25 bp, probe
ccaggtgaaggtagaatgtaagaag

SEQ ID NO: 69054 - DNA, 25 bp, probe
gtgaaggtagaatgtaagaagaggc

SEQ ID NO: 69055 - DNA, 25 bp, probe
accaggtgaaggtagaatgtaagaa

SEQ ID NO: 69056 - DNA, 25 bp, probe
gaccaggtgaaggtagaatgtaaga

SEQ ID NO: 69057 - DNA, 25 bp, probe
agaccaggtgaaggtagaatgtaag

SEQ ID NO: 69058 - DNA, 25 bp, probe
gagaccaggtgaaggtagaatgtaa

SEQ ID NO: 69059 - DNA, 25 bp, probe
ggaatgtccacagtctcattacttc

SEQ ID NO: 69060 - DNA, 25 bp, probe
gaatgtccacagtctcattacttcg

SEQ ID NO: 69061 - DNA, 25 bp, probe
agagaccaggtgaaggtagaatgta

SEQ ID NO: 69062 - DNA, 25 bp, probe
atgtccacagtctcattacttcgac

SEQ ID NO: 69063 - DNA, 25 bp, probe
aaggtagaatgtaagaagaggccag

SEQ ID NO: 69064 - DNA, 25 bp, probe
gtccacagtctcattacttcgacaa

SEQ ID NO: 69065 - DNA, 25 bp, probe
gaaggtagaatgtaagaagaggcca

SEQ ID NO: 69066 - DNA, 25 bp, probe
tgaaggtagaatgtaagaagaggcc

SEQ ID NO: 69067 - DNA, 25 bp, probe
aatgtccacagtctcattacttcga

SEQ ID NO: 69068 - DNA, 25 bp, probe
cagagaccaggtgaaggtagaatgt

SEQ ID NO: 69069 - DNA, 25 bp, probe
acagtctcattacttcgacaaacac

SEQ ID NO: 69070 - DNA, 25 bp, probe
cacagtctcattacttcgacaaaca

SEQ ID NO: 69071 - DNA, 25 bp, probe
gtaaccttttctcctttctcttccc

SEQ ID NO: 69072 - DNA, 25 bp, probe
taaccttttctcctttctcttccca

SEQ ID NO: 69073 - DNA, 25 bp, probe
cagtctcattacttcgacaaacacc

SEQ ID NO: 69074 - DNA, 25 bp, probe
ccacagtctcattacttcgacaaac

SEQ ID NO: 69075 - DNA, 25 bp, probe
tccacagtctcattacttcgacaaa

SEQ ID NO: 69076 - DNA, 25 bp, probe
ggtaaccttttctcctttctcttcc

SEQ ID NO: 69077 - DNA, 25 bp, probe
gggtaaccttttctcctttctcttc

SEQ ID NO: 69078 - DNA, 25 bp, probe
gatgggtaaccttttctcctttctc

SEQ ID NO: 69079 - DNA, 25 bp, probe
gggaatgtccacagtctcattactt

SEQ ID NO: 69080 - DNA, 25 bp, probe
atgggtaaccttttctcctttctct

SEQ ID NO: 69081 - DNA, 25 bp, probe
atgggaatgtccacagtctcattac

SEQ ID NO: 69082 - DNA, 25 bp, probe
aaatcactcctacacgctatccctg

SEQ ID NO: 69083 - DNA, 25 bp, probe
tgggtaaccttttctcctttctctt

SEQ ID NO: 69084 - DNA, 25 bp, probe
aggtagaatgtaagaagaggccagg

SEQ ID NO: 69085 - DNA, 25 bp, probe
aaccttttctcctttctcttcccag

SEQ ID NO: 69086 - DNA, 25 bp, probe
agtctcattacttcgacaaacaccc

SEQ ID NO: 69087 - DNA, 25 bp, probe
tgggaatgtccacagtctcattact

SEQ ID NO: 69088 - DNA, 25 bp, probe
gcagagaccaggtgaaggtagaatg

SEQ ID NO: 69089 - DNA, 25 bp, probe
gaaaatcactcctacacgctatccc

SEQ ID NO: 69090 - DNA, 25 bp, probe
tttctcctttctcttcccagctctg

SEQ ID NO: 69091 - DNA, 25 bp, probe
aaaatcactcctacacgctatccct

SEQ ID NO: 69092 - DNA, 25 bp, probe
ggatgggtaaccttttctcctttct

SEQ ID NO: 69093 - DNA, 25 bp, probe
gtctcattacttcgacaaacacccg

SEQ ID NO: 69094 - DNA, 25 bp, probe
ttatgccagttcttccagagactaa

SEQ ID NO: 69095 - DNA, 25 bp, probe
gattggaatgaattatcctgccttg

SEQ ID NO: 69096 - DNA, 25 bp, probe
atgattggaatgaattatcctgcct

SEQ ID NO: 69097 - DNA, 25 bp, probe
aatgattggaatgaattatcctgcc

SEQ ID NO: 69098 - DNA, 25 bp, probe
tgattggaatgaattatcctgcctt

SEQ ID NO: 69099 - DNA, 25 bp, probe
attggaatgaattatcctgccttgg

SEQ ID NO: 69100 - DNA, 25 bp, probe
cttcacatcttcttaggcagtcttt

SEQ ID NO: 69101 - DNA, 25 bp, probe
ttcacatcttcttaggcagtctttg

SEQ ID NO: 69102 - DNA, 25 bp, probe
ccttcacatcttcttaggcagtctt

SEQ ID NO: 69103 - DNA, 25 bp, probe
ttggaatgaattatcctgccttgga

SEQ ID NO: 69104 - DNA, 25 bp, probe
cctcagagaaatgattggaatgaat

SEQ ID NO: 69105 - DNA, 25 bp, probe
tttatgccagttcttccagagacta

SEQ ID NO: 69106 - DNA, 25 bp, probe
ctccttcacatcttcttaggcagtc

SEQ ID NO: 69107 - DNA, 25 bp, probe
gtctccttcacatcttcttaggcag

SEQ ID NO: 69108 - DNA, 25 bp, probe
gcctcagagaaatgattggaatgaa

SEQ ID NO: 69109 - DNA, 25 bp, probe
ctgggtctccttcacatcttcttag

SEQ ID NO: 69110 - DNA, 25 bp, probe
caaatcctaccagatgttcacattt

SEQ ID NO: 69111 - DNA, 25 bp, probe
tccttcacatcttcttaggcagtct

SEQ ID NO: 69112 - DNA, 25 bp, probe
tctccttcacatcttcttaggcagt

SEQ ID NO: 69113 - DNA, 25 bp, probe
gcaaatcctaccagatgttcacatt

SEQ ID NO: 69114 - DNA, 25 bp, probe
ctcagagaaatgattggaatgaatt

SEQ ID NO: 69115 - DNA, 25 bp, probe
ttacaggcaaatcctaccagatgtt

SEQ ID NO: 69116 - DNA, 25 bp, probe
tcttacaggcaaatcctaccagatg

SEQ ID NO: 69117 - DNA, 25 bp, probe
gtcttacaggcaaatcctaccagat

SEQ ID NO: 69118 - DNA, 25 bp, probe
aaatgattggaatgaattatcctgc

SEQ ID NO: 69119 - DNA, 25 bp, probe
cctgggtctccttcacatcttctta

SEQ ID NO: 69120 - DNA, 25 bp, probe
tacaggcaaatcctaccagatgttc

SEQ ID NO: 69121 - DNA, 25 bp, probe
cttacaggcaaatcctaccagatgt

SEQ ID NO: 69122 - DNA, 25 bp, probe
ggtctccttcacatcttcttaggca

SEQ ID NO: 69123 - DNA, 25 bp, probe
gaatgaattatcctgccttggatgg

SEQ ID NO: 69124 - DNA, 25 bp, probe
ggaatgaattatcctgccttggatg

SEQ ID NO: 69125 - DNA, 25 bp, probe
ggcaaatcctaccagatgttcacat

SEQ ID NO: 69126 - DNA, 25 bp, probe
tgttcacattttatgccagttcttc

SEQ ID NO: 69127 - DNA, 25 bp, probe
gttcacattttatgccagttcttcc

SEQ ID NO: 69128 - DNA, 25 bp, probe
ttcacattttatgccagttcttcca

SEQ ID NO: 69129 - DNA, 25 bp, probe
aatgaattatcctgccttggatgga

SEQ ID NO: 69130 - DNA, 25 bp, probe
tggaatgaattatcctgccttggat

SEQ ID NO: 69131 - DNA, 25 bp, probe
attttatgccagttcttccagagac

SEQ ID NO: 69132 - DNA, 25 bp, probe
cattttatgccagttcttccagaga

SEQ ID NO: 69133 - DNA, 25 bp, probe
acattttatgccagttcttccagag

SEQ ID NO: 69134 - DNA, 25 bp, probe
tcacattttatgccagttcttccag

SEQ ID NO: 69135 - DNA, 25 bp, probe
atgttcacattttatgccagttctt

SEQ ID NO: 69136 - DNA, 25 bp, probe
gatgttcacattttatgccagttct

SEQ ID NO: 69137 - DNA, 25 bp, probe
agatgttcacattttatgccagttc

SEQ ID NO: 69138 - DNA, 25 bp, probe
tcactgttgccaaatgggaaagaaa

SEQ ID NO: 69139 - DNA, 25 bp, probe
gtcactgttgccaaatgggaaagaa

SEQ ID NO: 69140 - DNA, 25 bp, probe
cactgttgccaaatgggaaagaaaa

SEQ ID NO: 69141 - DNA, 25 bp, probe
actgttgccaaatgggaaagaaaac

SEQ ID NO: 69142 - DNA, 25 bp, probe
caaatgggaaagaaaacagctcagg

SEQ ID NO: 69143 - DNA, 25 bp, probe
ccaaatgggaaagaaaacagctcag

SEQ ID NO: 69144 - DNA, 25 bp, probe
gttgccaaatgggaaagaaaacagc

SEQ ID NO: 69145 - DNA, 25 bp, probe
ttgccaaatgggaaagaaaacagct

SEQ ID NO: 69146 - DNA, 25 bp, probe
aaatgggaaagaaaacagctcaggc

SEQ ID NO: 69147 - DNA, 25 bp, probe
tgttgccaaatgggaaagaaaacag

SEQ ID NO: 69148 - DNA, 25 bp, probe
ctgttgccaaatgggaaagaaaaca

SEQ ID NO: 69149 - DNA, 25 bp, probe
gccaaatgggaaagaaaacagctca

SEQ ID NO: 69150 - DNA, 25 bp, probe
tgccaaatgggaaagaaaacagctc

SEQ ID NO: 69151 - DNA, 25 bp, probe
aatgggaaagaaaacagctcaggca

SEQ ID NO: 69152 - DNA, 25 bp, probe
caggagtttgtcaataaatgcccag

SEQ ID NO: 69153 - DNA, 25 bp, probe
tccaggagtttgtcaataaatgccc

SEQ ID NO: 69154 - DNA, 25 bp, probe
ccaggagtttgtcaataaatgccca

SEQ ID NO: 69155 - DNA, 25 bp, probe
gagtttgtcaataaatgcccagcct

SEQ ID NO: 69156 - DNA, 25 bp, probe
aggagtttgtcaataaatgcccagc

SEQ ID NO: 69157 - DNA, 25 bp, probe
agtttgtcaataaatgcccagcctg

SEQ ID NO: 69158 - DNA, 25 bp, probe
ggagtttgtcaataaatgcccagcc

SEQ ID NO: 69159 - DNA, 25 bp, probe
ttctgtgcctaaccacaccttcatc

SEQ ID NO: 69160 - DNA, 25 bp, probe
gttactttctgtgcctaaccacacc

SEQ ID NO: 69161 - DNA, 25 bp, probe
tactttctgtgcctaaccacacctt

SEQ ID NO: 69162 - DNA, 25 bp, probe
ttactttctgtgcctaaccacacct

SEQ ID NO: 69163 - DNA, 25 bp, probe
cgttactttctgtgcctaaccacac

SEQ ID NO: 69164 - DNA, 25 bp, probe
tgtgcctaaccacaccttcatcaag

SEQ ID NO: 69165 - DNA, 25 bp, probe
ctgtgcctaaccacaccttcatcaa

SEQ ID NO: 69166 - DNA, 25 bp, probe
tttctgtgcctaaccacaccttcat

SEQ ID NO: 69167 - DNA, 25 bp, probe
cctagacagcccgttactttctgtg

SEQ ID NO: 69168 - DNA, 25 bp, probe
ctttctgtgcctaaccacaccttca

SEQ ID NO: 69169 - DNA, 25 bp, probe
actttctgtgcctaaccacaccttc

SEQ ID NO: 69170 - DNA, 25 bp, probe
ccgttactttctgtgcctaaccaca

SEQ ID NO: 69171 - DNA, 25 bp, probe
caaacagtggtcatcaaaggagttc

SEQ ID NO: 69172 - DNA, 25 bp, probe
aaggaagcaaacagtggtcatcaaa

SEQ ID NO: 69173 - DNA, 25 bp, probe
aaacagtggtcatcaaaggagttcg

SEQ ID NO: 69174 - DNA, 25 bp, probe
aagcaaacagtggtcatcaaaggag

SEQ ID NO: 69175 - DNA, 25 bp, probe
gaagcaaacagtggtcatcaaagga

SEQ ID NO: 69176 - DNA, 25 bp, probe
aggaagcaaacagtggtcatcaaag

SEQ ID NO: 69177 - DNA, 25 bp, probe
gaaggaagcaaacagtggtcatcaa

SEQ ID NO: 69178 - DNA, 25 bp, probe
gcaaacagtggtcatcaaaggagtt

SEQ ID NO: 69179 - DNA, 25 bp, probe
ggaagcaaacagtggtcatcaaagg

SEQ ID NO: 69180 - DNA, 25 bp, probe
agcaaacagtggtcatcaaaggagt

SEQ ID NO: 69181 - DNA, 25 bp, probe
ccacatcaagatcactgactttggc

SEQ ID NO: 69182 - DNA, 25 bp, probe
gccacatcaagatcactgactttgg

SEQ ID NO: 69183 - DNA, 25 bp, probe
catcaagatcactgactttggcctc

SEQ ID NO: 69184 - DNA, 25 bp, probe
atcaagatcactgactttggcctct

SEQ ID NO: 69185 - DNA, 25 bp, probe
cacatcaagatcactgactttggcc

SEQ ID NO: 69186 - DNA, 25 bp, probe
ggccacatcaagatcactgactttg

SEQ ID NO: 69187 - DNA, 25 bp, probe
acatcaagatcactgactttggcct

SEQ ID NO: 69188 - DNA, 25 bp, probe
tcaagatcactgactttggcctctg

SEQ ID NO: 69189 - DNA, 25 bp, probe
ctaccgctacagcaaccgatattgt

SEQ ID NO: 69190 - DNA, 25 bp, probe
taccgctacagcaaccgatattgtg

SEQ ID NO: 69191 - DNA, 25 bp, probe
cagaaccgttactgtgaatgagtga

SEQ ID NO: 69192 - DNA, 25 bp, probe
tcagaaccgttactgtgaatgagtg

SEQ ID NO: 69193 - DNA, 25 bp, probe
gtcagaaccgttactgtgaatgagt

SEQ ID NO: 69194 - DNA, 25 bp, probe
ggtcagaaccgttactgtgaatgag

SEQ ID NO: 69195 - DNA, 25 bp, probe
ctggtcagaaccgttactgtgaatg

SEQ ID NO: 69196 - DNA, 25 bp, probe
tggtcagaaccgttactgtgaatga

SEQ ID NO: 69197 - DNA, 25 bp, probe
actggtcagaaccgttactgtgaat

SEQ ID NO: 69198 - DNA, 25 bp, probe
gactggtcagaaccgttactgtgaa

SEQ ID NO: 69199 - DNA, 25 bp, probe
ttttggtctgccaccttcaggaaaa

SEQ ID NO: 69200 - DNA, 25 bp, probe
ctgaaagggatgcttgagtacgaac

SEQ ID NO: 69201 - DNA, 25 bp, probe
tgaaagggatgcttgagtacgaacc

SEQ ID NO: 69202 - DNA, 25 bp, probe
gctgaaagggatgcttgagtacgaa

SEQ ID NO: 69203 - DNA, 25 bp, probe
catggagtacctggagagcaagaag

SEQ ID NO: 69204 - DNA, 25 bp, probe
gagtacctggagagcaagaagcttg

SEQ ID NO: 69205 - DNA, 25 bp, probe
ccactaccagaacatcaaagagaat

SEQ ID NO: 69206 - DNA, 25 bp, probe
cactaccagaacatcaaagagaatt

SEQ ID NO: 69207 - DNA, 25 bp, probe
actaccagaacatcaaagagaattg

SEQ ID NO: 69208 - DNA, 25 bp, probe
taccagaacatcaaagagaattgtg

SEQ ID NO: 69209 - DNA, 25 bp, probe
tcagtctctttgatgtggtccttaa

SEQ ID NO: 69210 - DNA, 25 bp, probe
ttcagtctctttgatgtggtcctta

SEQ ID NO: 69211 - DNA, 25 bp, probe
ctaccagaacatcaaagagaattgt

SEQ ID NO: 69212 - DNA, 25 bp, probe
cccactaccagaacatcaaagagaa

SEQ ID NO: 69213 - DNA, 25 bp, probe
accagaacatcaaagagaattgtgc

SEQ ID NO: 69214 - DNA, 25 bp, probe
cttcagtctctttgatgtggtcctt

SEQ ID NO: 69215 - DNA, 25 bp, probe
cagaacatcaaagagaattgtgccc

SEQ ID NO: 69216 - DNA, 25 bp, probe
ccagaacatcaaagagaattgtgcc

SEQ ID NO: 69217 - DNA, 25 bp, probe
cagtctctttgatgtggtccttaag

SEQ ID NO: 69218 - DNA, 25 bp, probe
tgacttcagtctctttgatgtggtc

SEQ ID NO: 69219 - DNA, 25 bp, probe
ctgacttcagtctctttgatgtggt

SEQ ID NO: 69220 - DNA, 25 bp, probe
acctgacttcagtctctttgatgtg

SEQ ID NO: 69221 - DNA, 25 bp, probe
cacctgacttcagtctctttgatgt

SEQ ID NO: 69222 - DNA, 25 bp, probe
acttcagtctctttgatgtggtcct

SEQ ID NO: 69223 - DNA, 25 bp, probe
ctttgatgtggtccttaagatgagg

SEQ ID NO: 69224 - DNA, 25 bp, probe
gacttcagtctctttgatgtggtcc

SEQ ID NO: 69225 - DNA, 25 bp, probe
cctgacttcagtctctttgatgtgg

SEQ ID NO: 69226 - DNA, 25 bp, probe
ccacctgacttcagtctctttgatg

SEQ ID NO: 69227 - DNA, 25 bp, probe
tctttgatgtggtccttaagatgag

SEQ ID NO: 69228 - DNA, 25 bp, probe
ctctttgatgtggtccttaagatga

SEQ ID NO: 69229 - DNA, 25 bp, probe
tctctttgatgtggtccttaagatg

SEQ ID NO: 69230 - DNA, 25 bp, probe
gtctctttgatgtggtccttaagat

SEQ ID NO: 69231 - DNA, 25 bp, probe
agtctctttgatgtggtccttaaga

SEQ ID NO: 69232 - DNA, 25 bp, probe
gatcccacctgacttcagtctcttt

SEQ ID NO: 69233 - DNA, 25 bp, probe
ttgatgtggtccttaagatgaggaa

SEQ ID NO: 69234 - DNA, 25 bp, probe
cccacctgacttcagtctctttgat

SEQ ID NO: 69235 - DNA, 25 bp, probe
atcccacctgacttcagtctctttg

SEQ ID NO: 69236 - DNA, 25 bp, probe
tgatgtggtccttaagatgaggaag

SEQ ID NO: 69237 - DNA, 25 bp, probe
gatgatcccacctgacttcagtctc

SEQ ID NO: 69238 - DNA, 25 bp, probe
ccccactaccagaacatcaaagaga

SEQ ID NO: 69239 - DNA, 25 bp, probe
cagatgatcccacctgacttcagtc

SEQ ID NO: 69240 - DNA, 25 bp, probe
agaacatcaaagagaattgtgcccc

SEQ ID NO: 69241 - DNA, 25 bp, probe
atgatcccacctgacttcagtctct

SEQ ID NO: 69242 - DNA, 25 bp, probe
agatgatcccacctgacttcagtct

SEQ ID NO: 69243 - DNA, 25 bp, probe
gatgtggtccttaagatgaggaagc

SEQ ID NO: 69244 - DNA, 25 bp, probe
gaacatcaaagagaattgtgcccca

SEQ ID NO: 69245 - DNA, 25 bp, probe
tgatcccacctgacttcagtctctt

SEQ ID NO: 69246 - DNA, 25 bp, probe
tttgatgtggtccttaagatgagga

SEQ ID NO: 69247 - DNA, 25 bp, probe
tcccacctgacttcagtctctttga

SEQ ID NO: 69248 - DNA, 25 bp, probe
aacatcaaagagaattgtgccccac

SEQ ID NO: 69249 - DNA, 25 bp, probe
ggtaacgaatattggtataatagca

SEQ ID NO: 69250 - DNA, 25 bp, probe
aggtaacgaatattggtataatagc

SEQ ID NO: 69251 - DNA, 25 bp, probe
agttaatgtagattattcggaagaa

SEQ ID NO: 69252 - DNA, 25 bp, probe
aagttaatgtagattattcggaaga

SEQ ID NO: 69253 - DNA, 25 bp, probe
gagaaaagaccaacagcagagatat

SEQ ID NO: 69254 - DNA, 25 bp, probe
agaaaagaccaacagcagagatatg

SEQ ID NO: 69255 - DNA, 25 bp, probe
agagaaaagaccaacagcagagata

SEQ ID NO: 69256 - DNA, 25 bp, probe
atgtagattattcggaagaaacttt

SEQ ID NO: 69257 - DNA, 25 bp, probe
aatgtagattattcggaagaaactt

SEQ ID NO: 69258 - DNA, 25 bp, probe
aaaatccagagaaaagaccaacagc

SEQ ID NO: 69259 - DNA, 25 bp, probe
tgatttaaaggtaacgaatattggt

SEQ ID NO: 69260 - DNA, 25 bp, probe
ttctcaagttaatgtagattattcg

SEQ ID NO: 69261 - DNA, 25 bp, probe
acctcaatatttctcaagttaatgt

SEQ ID NO: 69262 - DNA, 25 bp, probe
aaacatacctcaatatttctcaagt

SEQ ID NO: 69263 - DNA, 25 bp, probe
cagagaaaagaccaacagcagagat

SEQ ID NO: 69264 - DNA, 25 bp, probe
aacatacctcaatatttctcaagtt

SEQ ID NO: 69265 - DNA, 25 bp, probe
aaatccagagaaaagaccaacagca

SEQ ID NO: 69266 - DNA, 25 bp, probe
taatgtagattattcggaagaaact

SEQ ID NO: 69267 - DNA, 25 bp, probe
aagaccaacagcagagatatgcctt

SEQ ID NO: 69268 - DNA, 25 bp, probe
aacagcagagatatgcctttctcat

SEQ ID NO: 69269 - DNA, 25 bp, probe
aatccagagaaaagaccaacagcag

SEQ ID NO: 69270 - DNA, 25 bp, probe
ttgatttaaaggtaacgaatattgg

SEQ ID NO: 69271 - DNA, 25 bp, probe
tgtagattattcggaagaaactttt

SEQ ID NO: 69272 - DNA, 25 bp, probe
gtaacgaatattggtataatagcat

SEQ ID NO: 69273 - DNA, 25 bp, probe
acatacctcaatatttctcaagtta

SEQ ID NO: 69274 - DNA, 25 bp, probe
ttaatgtagattattcggaagaaac

SEQ ID NO: 69275 - DNA, 25 bp, probe
gttaatgtagattattcggaagaaa

SEQ ID NO: 69276 - DNA, 25 bp, probe
caacagcagagatatgcctttctca

SEQ ID NO: 69277 - DNA, 25 bp, probe
atccagagaaaagaccaacagcaga

SEQ ID NO: 69278 - DNA, 25 bp, probe
gaccaacagcagagatatgcctttc

SEQ ID NO: 69279 - DNA, 25 bp, probe
gaaacatacctcaatatttctcaag

SEQ ID NO: 69280 - DNA, 25 bp, probe
accaacagcagagatatgcctttct

SEQ ID NO: 69281 - DNA, 25 bp, probe
agaccaacagcagagatatgccttt

SEQ ID NO: 69282 - DNA, 25 bp, probe
aaagaccaacagcagagatatgcct

SEQ ID NO: 69283 - DNA, 25 bp, probe
gaaaagaccaacagcagagatatgc

SEQ ID NO: 69284 - DNA, 25 bp, probe
ccaacagcagagatatgcctttctc

SEQ ID NO: 69285 - DNA, 25 bp, probe
gatttaaaggtaacgaatattggta

SEQ ID NO: 69286 - DNA, 25 bp, probe
ccagagaaaagaccaacagcagaga

SEQ ID NO: 69287 - DNA, 25 bp, probe
tccagagaaaagaccaacagcagag

SEQ ID NO: 69288 - DNA, 25 bp, probe
atcaagaaacatacctcaatatttc

SEQ ID NO: 69289 - DNA, 25 bp, probe
aaaagaccaacagcagagatatgcc

SEQ ID NO: 69290 - DNA, 25 bp, probe
aacattgtacaccttgatttaaagg

SEQ ID NO: 69291 - DNA, 25 bp, probe
ccttgatttaaaggtaacgaatatt

SEQ ID NO: 69292 - DNA, 25 bp, probe
agaaacatacctcaatatttctcaa

SEQ ID NO: 69293 - DNA, 25 bp, probe
aagccttctcttctgtcatcattaa

SEQ ID NO: 69294 - DNA, 25 bp, probe
agccttctcttctgtcatcattaag

SEQ ID NO: 69295 - DNA, 25 bp, probe
ttctcttctgtcatcattaaggagc

SEQ ID NO: 69296 - DNA, 25 bp, probe
ttctgtcatcattaaggagcctcaa

SEQ ID NO: 69297 - DNA, 25 bp, probe
cttctcttctgtcatcattaaggag

SEQ ID NO: 69298 - DNA, 25 bp, probe
tcttctgtcatcattaaggagcctc

SEQ ID NO: 69299 - DNA, 25 bp, probe
tctcttctgtcatcattaaggagcc

SEQ ID NO: 69300 - DNA, 25 bp, probe
cttctgtcatcattaaggagcctca

SEQ ID NO: 69301 - DNA, 25 bp, probe
ctcttctgtcatcattaaggagcct

SEQ ID NO: 69302 - DNA, 25 bp, probe
aagaatgatgctggctatagtgaac

SEQ ID NO: 69303 - DNA, 25 bp, probe
caagaatgatgctggctatagtgaa

SEQ ID NO: 69304 - DNA, 25 bp, probe
tggaaactggaagaaatgagactta

SEQ ID NO: 69305 - DNA, 25 bp, probe
atggaaactggaagaaatgagactt

SEQ ID NO: 69306 - DNA, 25 bp, probe
gatcgagtgagcattacaacaacaa

SEQ ID NO: 69307 - DNA, 25 bp, probe
tgtcatcattaaggagcctcaaatc

SEQ ID NO: 69308 - DNA, 25 bp, probe
ctgtcatcattaaggagcctcaaat

SEQ ID NO: 69309 - DNA, 25 bp, probe
ggaaactggaagaaatgagacttaa

SEQ ID NO: 69310 - DNA, 25 bp, probe
attaccaatcagcttataacttgca

SEQ ID NO: 69311 - DNA, 25 bp, probe
tggaggaggcactgaaattactaat

SEQ ID NO: 69312 - DNA, 25 bp, probe
atggaggaggcactgaaattactaa

SEQ ID NO: 69313 - DNA, 25 bp, probe
cagatcgagtgagcattacaacaac

SEQ ID NO: 69314 - DNA, 25 bp, probe
aagagacagatcgagtgagcattac

SEQ ID NO: 69315 - DNA, 25 bp, probe
ggaagaaatgagacttaaagagaca

SEQ ID NO: 69316 - DNA, 25 bp, probe
tggaagaaatgagacttaaagagac

SEQ ID NO: 69317 - DNA, 25 bp, probe
actggaagaaatgagacttaaagag

SEQ ID NO: 69318 - DNA, 25 bp, probe
tcactggaattaccaatcagcttat

SEQ ID NO: 69319 - DNA, 25 bp, probe
aattaccaatcagcttataacttgc

SEQ ID NO: 69320 - DNA, 25 bp, probe
ctcactggaattaccaatcagctta

SEQ ID NO: 69321 - DNA, 25 bp, probe
tgacctcactggaattaccaatcag

SEQ ID NO: 69322 - DNA, 25 bp, probe
ctgacctcactggaattaccaatca

SEQ ID NO: 69323 - DNA, 25 bp, probe
tctgtcatcattaaggagcctcaaa

SEQ ID NO: 69324 - DNA, 25 bp, probe
gatggaggaggcactgaaattacta

SEQ ID NO: 69325 - DNA, 25 bp, probe
gagacagatcgagtgagcattacaa

SEQ ID NO: 69326 - DNA, 25 bp, probe
aaatgagacttaaagagacagatcg

SEQ ID NO: 69327 - DNA, 25 bp, probe
gtcatcattaaggagcctcaaatcg

SEQ ID NO: 69328 - DNA, 25 bp, probe
ctaactttcacagtagagcgtcttg

SEQ ID NO: 69329 - DNA, 25 bp, probe
aaagatggaggaggcactgaaatta

SEQ ID NO: 69330 - DNA, 25 bp, probe
taaagatggaggaggcactgaaatt

SEQ ID NO: 69331 - DNA, 25 bp, probe
ctggaagaaatgagacttaaagaga

SEQ ID NO: 69332 - DNA, 25 bp, probe
gtaacatggaaactggaagaaatga

SEQ ID NO: 69333 - DNA, 25 bp, probe
aacatggaaactggaagaaatgaga

SEQ ID NO: 69334 - DNA, 25 bp, probe
aactggaagaaatgagacttaaaga

SEQ ID NO: 69335 - DNA, 25 bp, probe
agatcgagtgagcattacaacaaca

SEQ ID NO: 69336 - DNA, 25 bp, probe
acagatcgagtgagcattacaacaa

SEQ ID NO: 69337 - DNA, 25 bp, probe
gaggttgtttcccataatagaactg

SEQ ID NO: 69338 - DNA, 25 bp, probe
agagggtgagaaagaaaggaagatt

SEQ ID NO: 69339 - DNA, 25 bp, probe
agaggttgtttcccataatagaact

SEQ ID NO: 69340 - DNA, 25 bp, probe
gagggtgagaaagaaaggaagattc

SEQ ID NO: 69341 - DNA, 25 bp, probe
aggttgtttcccataatagaactgc

SEQ ID NO: 69342 - DNA, 25 bp, probe
aagaggttgtttcccataatagaac

SEQ ID NO: 69343 - DNA, 25 bp, probe
cagagggtgagaaagaaaggaagat

SEQ ID NO: 69344 - DNA, 25 bp, probe
aaagaggttgtttcccataatagaa

SEQ ID NO: 69345 - DNA, 25 bp, probe
agagtgcctttgataggagaaattc

SEQ ID NO: 69346 - DNA, 25 bp, probe
aaagaagcagagggtgagaaagaaa

SEQ ID NO: 69347 - DNA, 25 bp, probe
agtgcctttgataggagaaattcag

SEQ ID NO: 69348 - DNA, 25 bp, probe
gagtgcctttgataggagaaattca

SEQ ID NO: 69349 - DNA, 25 bp, probe
cagagtgcctttgataggagaaatt

SEQ ID NO: 69350 - DNA, 25 bp, probe
aagaagcagagggtgagaaagaaag

SEQ ID NO: 69351 - DNA, 25 bp, probe
gaaagaagcagagggtgagaaagaa

SEQ ID NO: 69352 - DNA, 25 bp, probe
tgaggaacatgaaagagaacgtaaa

SEQ ID NO: 69353 - DNA, 25 bp, probe
acagagtgcctttgataggagaaat

SEQ ID NO: 69354 - DNA, 25 bp, probe
ctgaggaacatgaaagagaacgtaa

SEQ ID NO: 69355 - DNA, 25 bp, probe
gaatagtgcaagttcaatccctaaa

SEQ ID NO: 69356 - DNA, 25 bp, probe
agagaaagaggttgtttcccataat

SEQ ID NO: 69357 - DNA, 25 bp, probe
aatagagaaagaggttgtttcccat

SEQ ID NO: 69358 - DNA, 25 bp, probe
aaatagagaaagaggttgtttccca

SEQ ID NO: 69359 - DNA, 25 bp, probe
aatggatatcacaggacaaggaggt

SEQ ID NO: 69360 - DNA, 25 bp, probe
agtgtttatcgagccaaatggatat

SEQ ID NO: 69361 - DNA, 25 bp, probe
tagagaaagaggttgtttcccataa

SEQ ID NO: 69362 - DNA, 25 bp, probe
atagagaaagaggttgtttcccata

SEQ ID NO: 69363 - DNA, 25 bp, probe
gtgcctttgataggagaaattcagc

SEQ ID NO: 69364 - DNA, 25 bp, probe
gagtgtttatcgagccaaatggata

SEQ ID NO: 69365 - DNA, 25 bp, probe
caaatggatatcacaggacaaggag

SEQ ID NO: 69366 - DNA, 25 bp, probe
gggtgagaaagaaaggaagattcta

SEQ ID NO: 69367 - DNA, 25 bp, probe
ggttgtttcccataatagaactgca

SEQ ID NO: 69368 - DNA, 25 bp, probe
catcctgaggaacatgaaagagaac

SEQ ID NO: 69369 - DNA, 25 bp, probe
gaaagaggttgtttcccataataga

SEQ ID NO: 69370 - DNA, 25 bp, probe
agaaagaggttgtttcccataatag

SEQ ID NO: 69371 - DNA, 25 bp, probe
gagaaagaggttgtttcccataata

SEQ ID NO: 69372 - DNA, 25 bp, probe
cacagagtgcctttgataggagaaa

SEQ ID NO: 69373 - DNA, 25 bp, probe
gtttatcgagccaaatggatatcac

SEQ ID NO: 69374 - DNA, 25 bp, probe
gtgtttatcgagccaaatggatatc

SEQ ID NO: 69375 - DNA, 25 bp, probe
tttatcgagccaaatggatatcaca

SEQ ID NO: 69376 - DNA, 25 bp, probe
tgtttatcgagccaaatggatatca

SEQ ID NO: 69377 - DNA, 25 bp, probe
ttttcccctaaataatgtgctctcc

SEQ ID NO: 69378 - DNA, 25 bp, probe
agggtgagaaagaaaggaagattct

SEQ ID NO: 69379 - DNA, 25 bp, probe
ttatcgagccaaatggatatcacag

SEQ ID NO: 69380 - DNA, 25 bp, probe
ggtgagaaagaaaggaagattctaa

SEQ ID NO: 69381 - DNA, 25 bp, probe
atttggaggcacagaaagaaagaaa

SEQ ID NO: 69382 - DNA, 25 bp, probe
gatttggaggcacagaaagaaagaa

SEQ ID NO: 69383 - DNA, 25 bp, probe
aggatttggaggcacagaaagaaag

SEQ ID NO: 69384 - DNA, 25 bp, probe
ggatttggaggcacagaaagaaaga

SEQ ID NO: 69385 - DNA, 25 bp, probe
gcacagaaagaaagaaaaccaaaag

SEQ ID NO: 69386 - DNA, 25 bp, probe
gaaagaaagaaaaccaaaagagacg

SEQ ID NO: 69387 - DNA, 25 bp, probe
caggatttggaggcacagaaagaaa

SEQ ID NO: 69388 - DNA, 25 bp, probe
ggcacagaaagaaagaaaaccaaaa

SEQ ID NO: 69389 - DNA, 25 bp, probe
cacagaaagaaagaaaaccaaaaga

SEQ ID NO: 69390 - DNA, 25 bp, probe
tttggaggcacagaaagaaagaaaa

SEQ ID NO: 69391 - DNA, 25 bp, probe
acagaaagaaagaaaaccaaaagag

SEQ ID NO: 69392 - DNA, 25 bp, probe
aggcacagaaagaaagaaaaccaaa

SEQ ID NO: 69393 - DNA, 25 bp, probe
tagttcaggatttggaggcacagaa

SEQ ID NO: 69394 - DNA, 25 bp, probe
tgatgtgcaatgaagcatctcaatt

SEQ ID NO: 69395 - DNA, 25 bp, probe
agaaagaaagaaaaccaaaagagac

SEQ ID NO: 69396 - DNA, 25 bp, probe
cagaaagaaagaaaaccaaaagaga

SEQ ID NO: 69397 - DNA, 25 bp, probe
gaggcacagaaagaaagaaaaccaa

SEQ ID NO: 69398 - DNA, 25 bp, probe
ttggaggcacagaaagaaagaaaac

SEQ ID NO: 69399 - DNA, 25 bp, probe
aagaactcaggactttaccccaaaa

SEQ ID NO: 69400 - DNA, 25 bp, probe
ctggaggaagcactaggatgttcag

SEQ ID NO: 69401 - DNA, 25 bp, probe
gtgatgtgcaatgaagcatctcaat

SEQ ID NO: 69402 - DNA, 25 bp, probe
tcaggatttggaggcacagaaagaa

SEQ ID NO: 69403 - DNA, 25 bp, probe
gttcaggatttggaggcacagaaag

SEQ ID NO: 69404 - DNA, 25 bp, probe
ctagttcaggatttggaggcacaga

SEQ ID NO: 69405 - DNA, 25 bp, probe
ttcaggatttggaggcacagaaaga

SEQ ID NO: 69406 - DNA, 25 bp, probe
aaagaaagaaaaccaaaagagacgt

SEQ ID NO: 69407 - DNA, 25 bp, probe
gatgtgcaatgaagcatctcaattg

SEQ ID NO: 69408 - DNA, 25 bp, probe
agttcaggatttggaggcacagaaa

SEQ ID NO: 69409 - DNA, 25 bp, probe
gagcgaaagaactcaggactttacc

SEQ ID NO: 69410 - DNA, 25 bp, probe
aaagaactcaggactttaccccaaa

SEQ ID NO: 69411 - DNA, 25 bp, probe
ggaggcacagaaagaaagaaaacca

SEQ ID NO: 69412 - DNA, 25 bp, probe
tggaggcacagaaagaaagaaaacc

SEQ ID NO: 69413 - DNA, 25 bp, probe
agaactcaggactttaccccaaaag

SEQ ID NO: 69414 - DNA, 25 bp, probe
gaaagaactcaggactttaccccaa

SEQ ID NO: 69415 - DNA, 25 bp, probe
tgagcgaaagaactcaggactttac

SEQ ID NO: 69416 - DNA, 25 bp, probe
gtgagcgaaagaactcaggacttta

SEQ ID NO: 69417 - DNA, 25 bp, probe
ctcagtcctagttcaggatttggag

SEQ ID NO: 69418 - DNA, 25 bp, probe
agcgaaagaactcaggactttaccc

SEQ ID NO: 69419 - DNA, 25 bp, probe
cctagttcaggatttggaggcacag

SEQ ID NO: 69420 - DNA, 25 bp, probe
cgtgatgtgcaatgaagcatctcaa

SEQ ID NO: 69421 - DNA, 25 bp, probe
tcagtcctagttcaggatttggagg

SEQ ID NO: 69422 - DNA, 25 bp, probe
gaactcaggactttaccccaaaagc

SEQ ID NO: 69423 - DNA, 25 bp, probe
gctcagtcctagttcaggatttgga

SEQ ID NO: 69424 - DNA, 25 bp, probe
aggctcagtcctagttcaggatttg

SEQ ID NO: 69425 - DNA, 25 bp, probe
cttaccatccaagaggctacaagag

SEQ ID NO: 69426 - DNA, 25 bp, probe
gcttaccatccaagaggctacaaga

SEQ ID NO: 69427 - DNA, 25 bp, probe
ccttcaaaccacgcattgtaagttg

SEQ ID NO: 69428 - DNA, 25 bp, probe
ggcttaccatccaagaggctacaag

SEQ ID NO: 69429 - DNA, 25 bp, probe
cttcaaaccacgcattgtaagttgg

SEQ ID NO: 69430 - DNA, 25 bp, probe
ttaccatccaagaggctacaagagc

SEQ ID NO: 69431 - DNA, 25 bp, probe
cccttcaaaccacgcattgtaagtt

SEQ ID NO: 69432 - DNA, 25 bp, probe
cacccttcaaaccacgcattgtaag

SEQ ID NO: 69433 - DNA, 25 bp, probe
atgggaaaagtccagaaacctgttt

SEQ ID NO: 69434 - DNA, 25 bp, probe
tgggaaaagtccagaaacctgtttt

SEQ ID NO: 69435 - DNA, 25 bp, probe
cactaagagacacagggaagctgag

SEQ ID NO: 69436 - DNA, 25 bp, probe
catgggaaaagtccagaaacctgtt

SEQ ID NO: 69437 - DNA, 25 bp, probe
ttcaaaccacgcattgtaagttggt

SEQ ID NO: 69438 - DNA, 25 bp, probe
tcaaaccacgcattgtaagttggtc

SEQ ID NO: 69439 - DNA, 25 bp, probe
caaaccacgcattgtaagttggtcc

SEQ ID NO: 69440 - DNA, 25 bp, probe
aagaacttgagaacaacattcggaa

SEQ ID NO: 69441 - DNA, 25 bp, probe
cacacttcaggatttctttgatacc

SEQ ID NO: 69442 - DNA, 25 bp, probe
ccacacttcaggatttctttgatac

SEQ ID NO: 69443 - DNA, 25 bp, probe
accacacttcaggatttctttgata

SEQ ID NO: 69444 - DNA, 25 bp, probe
gaacttgagaacaacattcggaaag

SEQ ID NO: 69445 - DNA, 25 bp, probe
agaacttgagaacaacattcggaaa

SEQ ID NO: 69446 - DNA, 25 bp, probe
aaagaacttgagaacaacattcgga

SEQ ID NO: 69447 - DNA, 25 bp, probe
caccacacttcaggatttctttgat

SEQ ID NO: 69448 - DNA, 25 bp, probe
atgagttcaacttcatcaaggtgtt

SEQ ID NO: 69449 - DNA, 25 bp, probe
gacaccacacttcaggatttctttg

SEQ ID NO: 69450 - DNA, 25 bp, probe
acacttcaggatttctttgatacct

SEQ ID NO: 69451 - DNA, 25 bp, probe
acttcaggatttctttgatacctct

SEQ ID NO: 69452 - DNA, 25 bp, probe
cacttcaggatttctttgatacctc

SEQ ID NO: 69453 - DNA, 25 bp, probe
atgacaccacacttcaggatttctt

SEQ ID NO: 69454 - DNA, 25 bp, probe
aacttgagaacaacattcggaaagc

SEQ ID NO: 69455 - DNA, 25 bp, probe
acaccacacttcaggatttctttga

SEQ ID NO: 69456 - DNA, 25 bp, probe
tgacaccacacttcaggatttcttt

SEQ ID NO: 69457 - DNA, 25 bp, probe
cttcaggatttctttgatacctcta

SEQ ID NO: 69458 - DNA, 25 bp, probe
ttcaggatttctttgatacctctag

SEQ ID NO: 69459 - DNA, 25 bp, probe
aacattcggaaagccttgtcatttg

SEQ ID NO: 69460 - DNA, 25 bp, probe
caacattcggaaagccttgtcattt

SEQ ID NO: 69461 - DNA, 25 bp, probe
tgtgaccaggaaataaaagaacttg

SEQ ID NO: 69462 - DNA, 25 bp, probe
gtgaccaggaaataaaagaacttga

SEQ ID NO: 69463 - DNA, 25 bp, probe
tgaccaggaaataaaagaacttgag

SEQ ID NO: 69464 - DNA, 25 bp, probe
ttgtgaccaggaaataaaagaactt

SEQ ID NO: 69465 - DNA, 25 bp, probe
cttgtgaccaggaaataaaagaact

SEQ ID NO: 69466 - DNA, 25 bp, probe
gaccaggaaataaaagaacttgaga

SEQ ID NO: 69467 - DNA, 25 bp, probe
ttgagaacaacattcggaaagcctt

SEQ ID NO: 69468 - DNA, 25 bp, probe
aaaagaacttgagaacaacattcgg

SEQ ID NO: 69469 - DNA, 25 bp, probe
tgagttcaacttcatcaaggtgttg

SEQ ID NO: 69470 - DNA, 25 bp, probe
accaggaaataaaagaacttgagaa

SEQ ID NO: 69471 - DNA, 25 bp, probe
catgacaccacacttcaggatttct

SEQ ID NO: 69472 - DNA, 25 bp, probe
ccaggaaataaaagaacttgagaac

SEQ ID NO: 69473 - DNA, 25 bp, probe
acattcggaaagccttgtcatttga

SEQ ID NO: 69474 - DNA, 25 bp, probe
gagttcaacttcatcaaggtgttgg

SEQ ID NO: 69475 - DNA, 25 bp, probe
cttgagaacaacattcggaaagcct

SEQ ID NO: 69476 - DNA, 25 bp, probe
taaaagaacttgagaacaacattcg

SEQ ID NO: 69477 - DNA, 25 bp, probe
ccttgtgaccaggaaataaaagaac

SEQ ID NO: 69478 - DNA, 25 bp, probe
caggaaataaaagaacttgagaaca

SEQ ID NO: 69479 - DNA, 25 bp, probe
tgagaacaacattcggaaagccttg

SEQ ID NO: 69480 - DNA, 25 bp, probe
acttgagaacaacattcggaaagcc

SEQ ID NO: 69481 - DNA, 25 bp, probe
cccttgtgaccaggaaataaaagaa

SEQ ID NO: 69482 - DNA, 25 bp, probe
cattcggaaagccttgtcatttgac

SEQ ID NO: 69483 - DNA, 25 bp, probe
tcaggatttctttgatacctctaga

SEQ ID NO: 69484 - DNA, 25 bp, probe
cggagaattatgagacctactgatg

SEQ ID NO: 69485 - DNA, 25 bp, probe
tcggagaattatgagacctactgat

SEQ ID NO: 69486 - DNA, 25 bp, probe
ttaggagattatgtggacagaggaa

SEQ ID NO: 69487 - DNA, 25 bp, probe
ggagaattatgagacctactgatgt

SEQ ID NO: 69488 - DNA, 25 bp, probe
cttaggagattatgtggacagagga

SEQ ID NO: 69489 - DNA, 25 bp, probe
ttcggagaattatgagacctactga

SEQ ID NO: 69490 - DNA, 25 bp, probe
ttcttaggagattatgtggacagag

SEQ ID NO: 69491 - DNA, 25 bp, probe
tcttaggagattatgtggacagagg

SEQ ID NO: 69492 - DNA, 25 bp, probe
agaattatgagacctactgatgtcc

SEQ ID NO: 69493 - DNA, 25 bp, probe
gatcttctgttgtcatggaggattg

SEQ ID NO: 69494 - DNA, 25 bp, probe
ttgtggagatattcatggacagtat

SEQ ID NO: 69495 - DNA, 25 bp, probe
ctatggagcagattcggagaattat

SEQ ID NO: 69496 - DNA, 25 bp, probe
attcggagaattatgagacctactg

SEQ ID NO: 69497 - DNA, 25 bp, probe
tatggagcagattcggagaattatg

SEQ ID NO: 69498 - DNA, 25 bp, probe
gattcggagaattatgagacctact

SEQ ID NO: 69499 - DNA, 25 bp, probe
agattcggagaattatgagacctac

SEQ ID NO: 69500 - DNA, 25 bp, probe
cagattcggagaattatgagaccta

SEQ ID NO: 69501 - DNA, 25 bp, probe
gagaattatgagacctactgatgtc

SEQ ID NO: 69502 - DNA, 25 bp, probe
agaagttcgaggcttatgtatcaag

SEQ ID NO: 69503 - DNA, 25 bp, probe
atcttctgttgtcatggaggattgt

SEQ ID NO: 69504 - DNA, 25 bp, probe
aagttcgaggcttatgtatcaagtc

SEQ ID NO: 69505 - DNA, 25 bp, probe
gaagttcgaggcttatgtatcaagt

SEQ ID NO: 69506 - DNA, 25 bp, probe
cagaagttcgaggcttatgtatcaa

SEQ ID NO: 69507 - DNA, 25 bp, probe
tctatggagcagattcggagaatta

SEQ ID NO: 69508 - DNA, 25 bp, probe
gagcagattcggagaattatgagac

SEQ ID NO: 69509 - DNA, 25 bp, probe
tgtggagatattcatggacagtata

SEQ ID NO: 69510 - DNA, 25 bp, probe
agttcgaggcttatgtatcaagtct

SEQ ID NO: 69511 - DNA, 25 bp, probe
taggagattatgtggacagaggaaa

SEQ ID NO: 69512 - DNA, 25 bp, probe
aattgtggaagaccttcactgattg

SEQ ID NO: 69513 - DNA, 25 bp, probe
atggagcagattcggagaattatga

SEQ ID NO: 69514 - DNA, 25 bp, probe
tcttctgttgtcatggaggattgtc

SEQ ID NO: 69515 - DNA, 25 bp, probe
gttcgaggcttatgtatcaagtctc

SEQ ID NO: 69516 - DNA, 25 bp, probe
cttctgttgtcatggaggattgtca

SEQ ID NO: 69517 - DNA, 25 bp, probe
tttcttaggagattatgtggacaga

SEQ ID NO: 69518 - DNA, 25 bp, probe
aggagattatgtggacagaggaaag

SEQ ID NO: 69519 - DNA, 25 bp, probe
tggagatattcatggacagtataca

SEQ ID NO: 69520 - DNA, 25 bp, probe
ggagcagattcggagaattatgaga

SEQ ID NO: 69521 - DNA, 25 bp, probe
atctatggagcagattcggagaatt

SEQ ID NO: 69522 - DNA, 25 bp, probe
tcgcatttatggattctatgatgaa

SEQ ID NO: 69523 - DNA, 25 bp, probe
gtggagatattcatggacagtatac

SEQ ID NO: 69524 - DNA, 25 bp, probe
atcgcatttatggattctatgatga

SEQ ID NO: 69525 - DNA, 25 bp, probe
gcagattcggagaattatgagacct

SEQ ID NO: 69526 - DNA, 25 bp, probe
agcagattcggagaattatgagacc

SEQ ID NO: 69527 - DNA, 25 bp, probe
tggagcagattcggagaattatgag

SEQ ID NO: 69528 - DNA, 25 bp, probe
gctcctctatggttgtaatgttgac

SEQ ID NO: 69529 - DNA, 25 bp, probe
gaagactacatcaatgcgaactata

SEQ ID NO: 69530 - DNA, 25 bp, probe
tgaagactacatcaatgcgaactat

SEQ ID NO: 69531 - DNA, 25 bp, probe
atgaagactacatcaatgcgaacta

SEQ ID NO: 69532 - DNA, 25 bp, probe
taatgaagactacatcaatgcgaac

SEQ ID NO: 69533 - DNA, 25 bp, probe
gtaatgaagactacatcaatgcgaa

SEQ ID NO: 69534 - DNA, 25 bp, probe
aatgaagactacatcaatgcgaact

SEQ ID NO: 69535 - DNA, 25 bp, probe
aaggtaatgaagactacatcaatgc

SEQ ID NO: 69536 - DNA, 25 bp, probe
ggtaatgaagactacatcaatgcga

SEQ ID NO: 69537 - DNA, 25 bp, probe
aggtaatgaagactacatcaatgcg

SEQ ID NO: 69538 - DNA, 25 bp, probe
aaggctcctctatggttgtaatgtt

SEQ ID NO: 69539 - DNA, 25 bp, probe
aagactacatcaatgcgaactatat

SEQ ID NO: 69540 - DNA, 25 bp, probe
gtaatgttgaccacacaagttgaac

SEQ ID NO: 69541 - DNA, 25 bp, probe
tgtaatgttgaccacacaagttgaa

SEQ ID NO: 69542 - DNA, 25 bp, probe
ggctcctctatggttgtaatgttga

SEQ ID NO: 69543 - DNA, 25 bp, probe
aggctcctctatggttgtaatgttg

SEQ ID NO: 69544 - DNA, 25 bp, probe
ccactcactcagatccagtacatag

SEQ ID NO: 69545 - DNA, 25 bp, probe
ctcctctatggttgtaatgttgacc

SEQ ID NO: 69546 - DNA, 25 bp, probe
caaggctcctctatggttgtaatgt

SEQ ID NO: 69547 - DNA, 25 bp, probe
tccactcactcagatccagtacata

SEQ ID NO: 69548 - DNA, 25 bp, probe
taatgttgaccacacaagttgaacg

SEQ ID NO: 69549 - DNA, 25 bp, probe
cactcactcagatccagtacatagc

SEQ ID NO: 69550 - DNA, 25 bp, probe
acagagatatttcgccttatgatgc

SEQ ID NO: 69551 - DNA, 25 bp, probe
agactacatcaatgcgaactatata

SEQ ID NO: 69552 - DNA, 25 bp, probe
tacagagatatttcgccttatgatg

SEQ ID NO: 69553 - DNA, 25 bp, probe
cagagatatttcgccttatgatgcc

SEQ ID NO: 69554 - DNA, 25 bp, probe
gagatatttcgccttatgatgccac

SEQ ID NO: 69555 - DNA, 25 bp, probe
agagatatttcgccttatgatgcca

SEQ ID NO: 69556 - DNA, 25 bp, probe
gatacagagatatttcgccttatga

SEQ ID NO: 69557 - DNA, 25 bp, probe
agatacagagatatttcgccttatg

SEQ ID NO: 69558 - DNA, 25 bp, probe
cctgtgccaaattacctcagaatat

SEQ ID NO: 69559 - DNA, 25 bp, probe
ctcactcagatccagtacatagcct

SEQ ID NO: 69560 - DNA, 25 bp, probe
ccttcttccagcattataaatcagt

SEQ ID NO: 69561 - DNA, 25 bp, probe
gactacatcaatgcgaactatataa

SEQ ID NO: 69562 - DNA, 25 bp, probe
gatatttcgccttatgatgccacac

SEQ ID NO: 69563 - DNA, 25 bp, probe
agatatttcgccttatgatgccaca

SEQ ID NO: 69564 - DNA, 25 bp, probe
tccttcttccagcattataaatcag

SEQ ID NO: 69565 - DNA, 25 bp, probe
actcactcagatccagtacatagcc

SEQ ID NO: 69566 - DNA, 25 bp, probe
taaatcagtacattgcttgtcaagg

SEQ ID NO: 69567 - DNA, 25 bp, probe
atacagagatatttcgccttatgat

SEQ ID NO: 69568 - DNA, 25 bp, probe
cctgatgattcgagtgactttctag

SEQ ID NO: 69569 - DNA, 25 bp, probe
tcctgtgccaaattacctcagaata

SEQ ID NO: 69570 - DNA, 25 bp, probe
ttccttcttccagcattataaatca

SEQ ID NO: 69571 - DNA, 25 bp, probe
gtccactcactcagatccagtacat

SEQ ID NO: 69572 - DNA, 25 bp, probe
tggttaagaagaatggacagtgttg

SEQ ID NO: 69573 - DNA, 25 bp, probe
ctggttaagaagaatggacagtgtt

SEQ ID NO: 69574 - DNA, 25 bp, probe
ggttaagaagaatggacagtgttgc

SEQ ID NO: 69575 - DNA, 25 bp, probe
acgactatcttcagcttactactct

SEQ ID NO: 69576 - DNA, 25 bp, probe
gttgtacgactatcttcagcttact

SEQ ID NO: 69577 - DNA, 25 bp, probe
tgtacgactatcttcagcttactac

SEQ ID NO: 69578 - DNA, 25 bp, probe
gtacgactatcttcagcttactact

SEQ ID NO: 69579 - DNA, 25 bp, probe
tctggttaagaagaatggacagtgt

SEQ ID NO: 69580 - DNA, 25 bp, probe
tacgactatcttcagcttactactc

SEQ ID NO: 69581 - DNA, 25 bp, probe
cttcagacatgacatcaagacactc

SEQ ID NO: 69582 - DNA, 25 bp, probe
ttgtacgactatcttcagcttacta

SEQ ID NO: 69583 - DNA, 25 bp, probe
gacatgacatcaagacactccagta

SEQ ID NO: 69584 - DNA, 25 bp, probe
attgcttcagacatgacatcaagac

SEQ ID NO: 69585 - DNA, 25 bp, probe
cattgcttcagacatgacatcaaga

SEQ ID NO: 69586 - DNA, 25 bp, probe
taagaagaatggacagtgttgcata

SEQ ID NO: 69587 - DNA, 25 bp, probe
acatgacatcaagacactccagtac

SEQ ID NO: 69588 - DNA, 25 bp, probe
gggtgtagtagaaattcagtatcca

SEQ ID NO: 69589 - DNA, 25 bp, probe
tgggtgtagtagaaattcagtatcc

SEQ ID NO: 69590 - DNA, 25 bp, probe
gagtgggtgtagtagaaattcagta

SEQ ID NO: 69591 - DNA, 25 bp, probe
ttaagaagaatggacagtgttgcat

SEQ ID NO: 69592 - DNA, 25 bp, probe
caaggagtgggtgtagtagaaattc

SEQ ID NO: 69593 - DNA, 25 bp, probe
cttcagcttactactctggatacag

SEQ ID NO: 69594 - DNA, 25 bp, probe
tcttcagcttactactctggataca

SEQ ID NO: 69595 - DNA, 25 bp, probe
actatcttcagcttactactctgga

SEQ ID NO: 69596 - DNA, 25 bp, probe
gactatcttcagcttactactctgg

SEQ ID NO: 69597 - DNA, 25 bp, probe
cgactatcttcagcttactactctg

SEQ ID NO: 69598 - DNA, 25 bp, probe
tcttaggtttcattgcttcagacat

SEQ ID NO: 69599 - DNA, 25 bp, probe
atcttaggtttcattgcttcagaca

SEQ ID NO: 69600 - DNA, 25 bp, probe
cttgcctgttctggaagtgttatca

SEQ ID NO: 69601 - DNA, 25 bp, probe
tcagcttactactctggatacagtt

SEQ ID NO: 69602 - DNA, 25 bp, probe
ttcagcttactactctggatacagt

SEQ ID NO: 69603 - DNA, 25 bp, probe
agtgggtgtagtagaaattcagtat

SEQ ID NO: 69604 - DNA, 25 bp, probe
aaggagtgggtgtagtagaaattca

SEQ ID NO: 69605 - DNA, 25 bp, probe
atcttcagcttactactctggatac

SEQ ID NO: 69606 - DNA, 25 bp, probe
aagaagaatggacagtgttgcatag

SEQ ID NO: 69607 - DNA, 25 bp, probe
ctgttctggaagtgttatcaccaac

SEQ ID NO: 69608 - DNA, 25 bp, probe
ttactactctggatacagttagctg

SEQ ID NO: 69609 - DNA, 25 bp, probe
cagcttactactctggatacagtta

SEQ ID NO: 69610 - DNA, 25 bp, probe
gcttactactctggatacagttagc

SEQ ID NO: 69611 - DNA, 25 bp, probe
gtgggtgtagtagaaattcagtatc

SEQ ID NO: 69612 - DNA, 25 bp, probe
tatcttaggtttcattgcttcagac

SEQ ID NO: 69613 - DNA, 25 bp, probe
gttaagaagaatggacagtgttgca

SEQ ID NO: 69614 - DNA, 25 bp, probe
cttactactctggatacagttagct

SEQ ID NO: 69615 - DNA, 25 bp, probe
agcttactactctggatacagttag

SEQ ID NO: 69616 - DNA, 25 bp, probe
ccagtagagcttatacatatcaggt

SEQ ID NO: 69617 - DNA, 25 bp, probe
gtagagcttatacatatcaggttgc

SEQ ID NO: 69618 - DNA, 25 bp, probe
tagagcttatacatatcaggttgca

SEQ ID NO: 69619 - DNA, 25 bp, probe
agtagagcttatacatatcaggttg

SEQ ID NO: 69620 - DNA, 25 bp, probe
cagtagagcttatacatatcaggtt

SEQ ID NO: 69621 - DNA, 25 bp, probe
tacatagggatctgaaaccaagcaa

SEQ ID NO: 69622 - DNA, 25 bp, probe
tgagttactatttggagctaggatg

SEQ ID NO: 69623 - DNA, 25 bp, probe
cccagtagagcttatacatatcagg

SEQ ID NO: 69624 - DNA, 25 bp, probe
ctgagttactatttggagctaggat

SEQ ID NO: 69625 - DNA, 25 bp, probe
ctacatagggatctgaaaccaagca

SEQ ID NO: 69626 - DNA, 25 bp, probe
atagggatctgaaaccaagcaactt

SEQ ID NO: 69627 - DNA, 25 bp, probe
tcctacatagggatctgaaaccaag

SEQ ID NO: 69628 - DNA, 25 bp, probe
catagggatctgaaaccaagcaact

SEQ ID NO: 69629 - DNA, 25 bp, probe
gatgtatggtgtaggtgtggacatt

SEQ ID NO: 69630 - DNA, 25 bp, probe
cctgagttactatttggagctagga

SEQ ID NO: 69631 - DNA, 25 bp, probe
atgtatggtgtaggtgtggacattg

SEQ ID NO: 69632 - DNA, 25 bp, probe
acatagggatctgaaaccaagcaac

SEQ ID NO: 69633 - DNA, 25 bp, probe
agagcttatacatatcaggttgcaa

SEQ ID NO: 69634 - DNA, 25 bp, probe
cctacatagggatctgaaaccaagc

SEQ ID NO: 69635 - DNA, 25 bp, probe
caactgtccagtggaaaccttaaag

SEQ ID NO: 69636 - DNA, 25 bp, probe
ccctgagttactatttggagctagg

SEQ ID NO: 69637 - DNA, 25 bp, probe
ttaatccatgtgttcgaattacggc

SEQ ID NO: 69638 - DNA, 25 bp, probe
attcttatttaatccatgtgttcga

SEQ ID NO: 69639 - DNA, 25 bp, probe
attgcagcaggagacgacttactag

SEQ ID NO: 69640 - DNA, 25 bp, probe
ccccagtagagcttatacatatcag

SEQ ID NO: 69641 - DNA, 25 bp, probe
tgtatggtgtaggtgtggacattgc

SEQ ID NO: 69642 - DNA, 25 bp, probe
cattgcagcaggagacgacttacta

SEQ ID NO: 69643 - DNA, 25 bp, probe
gccccagtagagcttatacatatca

SEQ ID NO: 69644 - DNA, 25 bp, probe
ccaactgtccagtggaaaccttaaa

SEQ ID NO: 69645 - DNA, 25 bp, probe
tttaatccatgtgttcgaattacgg

SEQ ID NO: 69646 - DNA, 25 bp, probe
cccctgagttactatttggagctag

SEQ ID NO: 69647 - DNA, 25 bp, probe
gcttattcttatttaatccatgtgt

SEQ ID NO: 69648 - DNA, 25 bp, probe
aaccttaaaggagcaatcaaatcct

SEQ ID NO: 69649 - DNA, 25 bp, probe
atttaatccatgtgttcgaattacg

SEQ ID NO: 69650 - DNA, 25 bp, probe
tattcttatttaatccatgtgttcg

SEQ ID NO: 69651 - DNA, 25 bp, probe
tatggtgtaggtgtggacattgcag

SEQ ID NO: 69652 - DNA, 25 bp, probe
accttaaaggagcaatcaaatcctg

SEQ ID NO: 69653 - DNA, 25 bp, probe
taatccatgtgttcgaattacggcc

SEQ ID NO: 69654 - DNA, 25 bp, probe
ttgcagcaggagacgacttactaga

SEQ ID NO: 69655 - DNA, 25 bp, probe
gtatggtgtaggtgtggacattgca

SEQ ID NO: 69656 - DNA, 25 bp, probe
tagggatctgaaaccaagcaacttg

SEQ ID NO: 69657 - DNA, 25 bp, probe
agccccagtagagcttatacatatc

SEQ ID NO: 69658 - DNA, 25 bp, probe
gagccccagtagagcttatacatat

SEQ ID NO: 69659 - DNA, 25 bp, probe
ggatctgaaaccaagcaacttgttg

SEQ ID NO: 69660 - DNA, 25 bp, probe
cttcatcctcataatgtcagagtga

SEQ ID NO: 69661 - DNA, 25 bp, probe
gcttcatcctcataatgtcagagtg

SEQ ID NO: 69662 - DNA, 25 bp, probe
tcataatgtcagagtgagcagtgag

SEQ ID NO: 69663 - DNA, 25 bp, probe
ggcttcatcctcataatgtcagagt

SEQ ID NO: 69664 - DNA, 25 bp, probe
cagtatatgtctcagcatccaggag

SEQ ID NO: 69665 - DNA, 25 bp, probe
atctgaaggacagtgttacagcaat

SEQ ID NO: 69666 - DNA, 25 bp, probe
tttatgaaagccaaatatacagcct

SEQ ID NO: 69667 - DNA, 25 bp, probe
tctgaaggacagtgttacagcaatt

SEQ ID NO: 69668 - DNA, 25 bp, probe
atcatcaaagttatccttcaagagc

SEQ ID NO: 69669 - DNA, 25 bp, probe
tgaaagccaaatatacagccttaaa

SEQ ID NO: 69670 - DNA, 25 bp, probe
ttatgaaagccaaatatacagcctt

SEQ ID NO: 69671 - DNA, 25 bp, probe
atgaaagccaaatatacagccttaa

SEQ ID NO: 69672 - DNA, 25 bp, probe
cataatgtcagagtgagcagtgagg

SEQ ID NO: 69673 - DNA, 25 bp, probe
aaatagaatgtggacctaaataccc

SEQ ID NO: 69674 - DNA, 25 bp, probe
ccagtatatgtctcagcatccagga

SEQ ID NO: 69675 - DNA, 25 bp, probe
gacctaaatacccagaagaactccc

SEQ ID NO: 69676 - DNA, 25 bp, probe
agtatatgtctcagcatccaggagg

SEQ ID NO: 69677 - DNA, 25 bp, probe
catctgaaggacagtgttacagcaa

SEQ ID NO: 69678 - DNA, 25 bp, probe
gttaatagttctaatggaatggtga

SEQ ID NO: 69679 - DNA, 25 bp, probe
agttaatagttctaatggaatggtg

SEQ ID NO: 69680 - DNA, 25 bp, probe
tatgaaagccaaatatacagcctta

SEQ ID NO: 69681 - DNA, 25 bp, probe
caaagttatccttcaagagcttcag

SEQ ID NO: 69682 - DNA, 25 bp, probe
tcaaagttatccttcaagagcttca

SEQ ID NO: 69683 - DNA, 25 bp, probe
tcatcaaagttatccttcaagagct

SEQ ID NO: 69684 - DNA, 25 bp, probe
gagttaatagttctaatggaatggt

SEQ ID NO: 69685 - DNA, 25 bp, probe
tagaatgtggacctaaatacccaga

SEQ ID NO: 69686 - DNA, 25 bp, probe
atagaatgtggacctaaatacccag

SEQ ID NO: 69687 - DNA, 25 bp, probe
catcaaagttatccttcaagagctt

SEQ ID NO: 69688 - DNA, 25 bp, probe
atcaaagttatccttcaagagcttc

SEQ ID NO: 69689 - DNA, 25 bp, probe
atttatgaaagccaaatatacagcc

SEQ ID NO: 69690 - DNA, 25 bp, probe
gaatgtggacctaaatacccagaag

SEQ ID NO: 69691 - DNA, 25 bp, probe
aatagaatgtggacctaaataccca

SEQ ID NO: 69692 - DNA, 25 bp, probe
atgtggacctaaatacccagaagaa

SEQ ID NO: 69693 - DNA, 25 bp, probe
aatgtggacctaaatacccagaaga

SEQ ID NO: 69694 - DNA, 25 bp, probe
agaatgtggacctaaatacccagaa

SEQ ID NO: 69695 - DNA, 25 bp, probe
aaagttatccttcaagagcttcagc

SEQ ID NO: 69696 - DNA, 25 bp, probe
aagttatccttcaagagcttcagcg

SEQ ID NO: 69697 - DNA, 25 bp, probe
agagttaatagttctaatggaatgg

SEQ ID NO: 69698 - DNA, 25 bp, probe
tggacctaaatacccagaagaactc

SEQ ID NO: 69699 - DNA, 25 bp, probe
gtggacctaaatacccagaagaact

SEQ ID NO: 69700 - DNA, 25 bp, probe
ggacctaaatacccagaagaactcc

SEQ ID NO: 69701 - DNA, 25 bp, probe
ttaatagttctaatggaatggtgaa

SEQ ID NO: 69702 - DNA, 25 bp, probe
ttctaatggaatggtgaacccaaga

SEQ ID NO: 69703 - DNA, 25 bp, probe
gggcttcatcctcataatgtcagag

SEQ ID NO: 69704 - DNA, 25 bp, probe
aaccagaggatgaagtagaactagc

SEQ ID NO: 69705 - DNA, 25 bp, probe
gtagaactagcacgcatcaagaatg

SEQ ID NO: 69706 - DNA, 25 bp, probe
gcttcggttattgtcatccattgtg

SEQ ID NO: 69707 - DNA, 25 bp, probe
agtagaactagcacgcatcaagaat

SEQ ID NO: 69708 - DNA, 25 bp, probe
ccagaggatgaagtagaactagcac

SEQ ID NO: 69709 - DNA, 25 bp, probe
ctataagagaaacaagaacctgcca

SEQ ID NO: 69710 - DNA, 25 bp, probe
tataagagaaacaagaacctgccac

SEQ ID NO: 69711 - DNA, 25 bp, probe
aagtagaactagcacgcatcaagaa

SEQ ID NO: 69712 - DNA, 25 bp, probe
atgaagtagaactagcacgcatcaa

SEQ ID NO: 69713 - DNA, 25 bp, probe
accagaggatgaagtagaactagca

SEQ ID NO: 69714 - DNA, 25 bp, probe
tctataagagaaacaagaacctgcc

SEQ ID NO: 69715 - DNA, 25 bp, probe
cacaaaccagaggatgaagtagaac

SEQ ID NO: 69716 - DNA, 25 bp, probe
cagaggatgaagtagaactagcacg

SEQ ID NO: 69717 - DNA, 25 bp, probe
gaagtagaactagcacgcatcaaga

SEQ ID NO: 69718 - DNA, 25 bp, probe
caaaccagaggatgaagtagaacta

SEQ ID NO: 69719 - DNA, 25 bp, probe
tttcattcaatcaaagatcagccag

SEQ ID NO: 69720 - DNA, 25 bp, probe
gagcttcggttattgtcatccattg

SEQ ID NO: 69721 - DNA, 25 bp, probe
atttcattcaatcaaagatcagcca

SEQ ID NO: 69722 - DNA, 25 bp, probe
atcacaaaccagaggatgaagtaga

SEQ ID NO: 69723 - DNA, 25 bp, probe
aaaccagaggatgaagtagaactag

SEQ ID NO: 69724 - DNA, 25 bp, probe
cttcggttattgtcatccattgtgg

SEQ ID NO: 69725 - DNA, 25 bp, probe
tgaagtagaactagcacgcatcaag

SEQ ID NO: 69726 - DNA, 25 bp, probe
acaaaccagaggatgaagtagaact

SEQ ID NO: 69727 - DNA, 25 bp, probe
tcacaaaccagaggatgaagtagaa

SEQ ID NO: 69728 - DNA, 25 bp, probe
gatcacaaaccagaggatgaagtag

SEQ ID NO: 69729 - DNA, 25 bp, probe
agcttcggttattgtcatccattgt

SEQ ID NO: 69730 - DNA, 25 bp, probe
ttcattcaatcaaagatcagccagc

SEQ ID NO: 69731 - DNA, 25 bp, probe
ataagagaaacaagaacctgccacc

SEQ ID NO: 69732 - DNA, 25 bp, probe
aggatgaagtagaactagcacgcat

SEQ ID NO: 69733 - DNA, 25 bp, probe
gatttcattcaatcaaagatcagcc

SEQ ID NO: 69734 - DNA, 25 bp, probe
gggaccacttctataagagaaacaa

SEQ ID NO: 69735 - DNA, 25 bp, probe
agaggatgaagtagaactagcacgc

SEQ ID NO: 69736 - DNA, 25 bp, probe
tgactctcactgacgaccatgaatt

SEQ ID NO: 69737 - DNA, 25 bp, probe
agatttcattcaatcaaagatcagc

SEQ ID NO: 69738 - DNA, 25 bp, probe
ggaccacttctataagagaaacaag

SEQ ID NO: 69739 - DNA, 25 bp, probe
ttctataagagaaacaagaacctgc

SEQ ID NO: 69740 - DNA, 25 bp, probe
aattcatggtcattgcctgtgatgg

SEQ ID NO: 69741 - DNA, 25 bp, probe
ggagcttcggttattgtcatccatt

SEQ ID NO: 69742 - DNA, 25 bp, probe
gaggatgaagtagaactagcacgca

SEQ ID NO: 69743 - DNA, 25 bp, probe
gaattcatggtcattgcctgtgatg

SEQ ID NO: 69744 - DNA, 25 bp, probe
ctgactctcactgacgaccatgaat

SEQ ID NO: 69745 - DNA, 25 bp, probe
gatgaagtagaactagcacgcatca

SEQ ID NO: 69746 - DNA, 25 bp, probe
gaccacttctataagagaaacaaga

SEQ ID NO: 69747 - DNA, 25 bp, probe
taagagaaacaagaacctgccacct

SEQ ID NO: 69748 - DNA, 25 bp, probe
tatggagctatggaatcgttatgtg

SEQ ID NO: 69749 - DNA, 25 bp, probe
gtatggagctatggaatcgttatgt

SEQ ID NO: 69750 - DNA, 25 bp, probe
tgtatggagctatggaatcgttatg

SEQ ID NO: 69751 - DNA, 25 bp, probe
caagtgatgtatggagctatggaat

SEQ ID NO: 69752 - DNA, 25 bp, probe
atgtatggagctatggaatcgttat

SEQ ID NO: 69753 - DNA, 25 bp, probe
gatgtatggagctatggaatcgtta

SEQ ID NO: 69754 - DNA, 25 bp, probe
aagtgatgtatggagctatggaatc

SEQ ID NO: 69755 - DNA, 25 bp, probe
cctatcgtaaattcacatcagcaag

SEQ ID NO: 69756 - DNA, 25 bp, probe
tgatgtatggagctatggaatcgtt

SEQ ID NO: 69757 - DNA, 25 bp, probe
ctatcgtaaattcacatcagcaagt

SEQ ID NO: 69758 - DNA, 25 bp, probe
attgcctatcgtaaattcacatcag

SEQ ID NO: 69759 - DNA, 25 bp, probe
gatgtgattaaagccattgaggaag

SEQ ID NO: 69760 - DNA, 25 bp, probe
agatgtgattaaagccattgaggaa

SEQ ID NO: 69761 - DNA, 25 bp, probe
aagatgtgattaaagccattgagga

SEQ ID NO: 69762 - DNA, 25 bp, probe
ctatggaatcgttatgtgggaagtg

SEQ ID NO: 69763 - DNA, 25 bp, probe
caagatgtgattaaagccattgagg

SEQ ID NO: 69764 - DNA, 25 bp, probe
tatggaatcgttatgtgggaagtga

SEQ ID NO: 69765 - DNA, 25 bp, probe
agtgatgtatggagctatggaatcg

SEQ ID NO: 69766 - DNA, 25 bp, probe
atgtgattaaagccattgaggaagg

SEQ ID NO: 69767 - DNA, 25 bp, probe
gaatcgttatgtgggaagtgatgtc

SEQ ID NO: 69768 - DNA, 25 bp, probe
gtgatgtatggagctatggaatcgt

SEQ ID NO: 69769 - DNA, 25 bp, probe
gcctatcgtaaattcacatcagcaa

SEQ ID NO: 69770 - DNA, 25 bp, probe
ttgcctatcgtaaattcacatcagc

SEQ ID NO: 69771 - DNA, 25 bp, probe
atggaatcgttatgtgggaagtgat

SEQ ID NO: 69772 - DNA, 25 bp, probe
atggagctatggaatcgttatgtgg

SEQ ID NO: 69773 - DNA, 25 bp, probe
aattgcctatcgtaaattcacatca

SEQ ID NO: 69774 - DNA, 25 bp, probe
gcaagtgatgtatggagctatggaa

SEQ ID NO: 69775 - DNA, 25 bp, probe
tatcgtaaattcacatcagcaagtg

SEQ ID NO: 69776 - DNA, 25 bp, probe
gctatggaatcgttatgtgggaagt

SEQ ID NO: 69777 - DNA, 25 bp, probe
ggaatcgttatgtgggaagtgatgt

SEQ ID NO: 69778 - DNA, 25 bp, probe
tggaatcgttatgtgggaagtgatg

SEQ ID NO: 69779 - DNA, 25 bp, probe
ctaaatttgggcagattgtcaacat

SEQ ID NO: 69780 - DNA, 25 bp, probe
taaatttgggcagattgtcaacatg

SEQ ID NO: 69781 - DNA, 25 bp, probe
tgggatatgtccaatcaagatgtga

SEQ ID NO: 69782 - DNA, 25 bp, probe
atcagcaagtgatgtatggagctat

SEQ ID NO: 69783 - DNA, 25 bp, probe
aagaattggtatcacagccatcacg

SEQ ID NO: 69784 - DNA, 25 bp, probe
aatcgttatgtgggaagtgatgtcg

SEQ ID NO: 69785 - DNA, 25 bp, probe
gggatatgtccaatcaagatgtgat

SEQ ID NO: 69786 - DNA, 25 bp, probe
agctatggaatcgttatgtgggaag

SEQ ID NO: 69787 - DNA, 25 bp, probe
gagctatggaatcgttatgtgggaa

SEQ ID NO: 69788 - DNA, 25 bp, probe
tcagcaagtgatgtatggagctatg

SEQ ID NO: 69789 - DNA, 25 bp, probe
catcacgcaccagaataagattttg

SEQ ID NO: 69790 - DNA, 25 bp, probe
tcgttatgtgggaagtgatgtcgta

SEQ ID NO: 69791 - DNA, 25 bp, probe
cctaaatttgggcagattgtcaaca

SEQ ID NO: 69792 - DNA, 25 bp, probe
ccagactctcttaatccaggtgatc

SEQ ID NO: 69793 - DNA, 25 bp, probe
tttcaaagcccagactctcttaatc

SEQ ID NO: 69794 - DNA, 25 bp, probe
ctttcaaagcccagactctcttaat

SEQ ID NO: 69795 - DNA, 25 bp, probe
ttcaaagcccagactctcttaatcc

SEQ ID NO: 69796 - DNA, 25 bp, probe
caaagcccagactctcttaatccag

SEQ ID NO: 69797 - DNA, 25 bp, probe
cagactctcttaatccaggtgatca

SEQ ID NO: 69798 - DNA, 25 bp, probe
cccagactctcttaatccaggtgat

SEQ ID NO: 69799 - DNA, 25 bp, probe
tcaaagcccagactctcttaatcca

SEQ ID NO: 69800 - DNA, 25 bp, probe
gactctcttaatccaggtgatcagc

SEQ ID NO: 69801 - DNA, 25 bp, probe
aaagcccagactctcttaatccagg

SEQ ID NO: 69802 - DNA, 25 bp, probe
aagcccagactctcttaatccaggt

SEQ ID NO: 69803 - DNA, 25 bp, probe
actctcttaatccaggtgatcagcg

SEQ ID NO: 69804 - DNA, 25 bp, probe
ctctcttaatccaggtgatcagcgg

SEQ ID NO: 69805 - DNA, 25 bp, probe
ctcttaatccaggtgatcagcggtc

SEQ ID NO: 69806 - DNA, 25 bp, probe
tctcttaatccaggtgatcagcggt

SEQ ID NO: 69807 - DNA, 25 bp, probe
cttaatccaggtgatcagcggtcag

SEQ ID NO: 69808 - DNA, 25 bp, probe
gatgctcataggtcacttctacttc

SEQ ID NO: 69809 - DNA, 25 bp, probe
atgctcataggtcacttctacttct

SEQ ID NO: 69810 - DNA, 25 bp, probe
gctcataggtcacttctacttctct

SEQ ID NO: 69811 - DNA, 25 bp, probe
cataggtcacttctacttctctaca

SEQ ID NO: 69812 - DNA, 25 bp, probe
taggtcacttctacttctctacaga

SEQ ID NO: 69813 - DNA, 25 bp, probe
tgctcataggtcacttctacttctc

SEQ ID NO: 69814 - DNA, 25 bp, probe
agatgctcataggtcacttctactt

SEQ ID NO: 69815 - DNA, 25 bp, probe
ataggtcacttctacttctctacag

SEQ ID NO: 69816 - DNA, 25 bp, probe
tcataggtcacttctacttctctac

SEQ ID NO: 69817 - DNA, 25 bp, probe
ctcataggtcacttctacttctcta

SEQ ID NO: 69818 - DNA, 25 bp, probe
gagatgctcataggtcacttctact

SEQ ID NO: 69819 - DNA, 25 bp, probe
agagatgctcataggtcacttctac

SEQ ID NO: 69820 - DNA, 25 bp, probe
cagagatgctcataggtcacttcta

SEQ ID NO: 69821 - DNA, 25 bp, probe
aggtcacttctacttctctacagag

SEQ ID NO: 69822 - DNA, 25 bp, probe
ccagagatgctcataggtcacttct

SEQ ID NO: 69823 - DNA, 25 bp, probe
tccagagatgctcataggtcacttc

SEQ ID NO: 69824 - DNA, 25 bp, probe
actgatgtctggcttaagtccttag

SEQ ID NO: 69825 - DNA, 25 bp, probe
gtccagagatgctcataggtcactt

SEQ ID NO: 69826 - DNA, 25 bp, probe
ccttcctgtccagagatgctcatag

SEQ ID NO: 69827 - DNA, 25 bp, probe
tacagagacttgaagcccaccaata

SEQ ID NO: 69828 - DNA, 25 bp, probe
ctgtccagagatgctcataggtcac

SEQ ID NO: 69829 - DNA, 25 bp, probe
cttcctgtccagagatgctcatagg

SEQ ID NO: 69830 - DNA, 25 bp, probe
ttgagcttatcatgccaagggttat

SEQ ID NO: 69831 - DNA, 25 bp, probe
ctacttctctacagagacttgaagc

SEQ ID NO: 69832 - DNA, 25 bp, probe
gtcacttctacttctctacagagac

SEQ ID NO: 69833 - DNA, 25 bp, probe
tcacttctacttctctacagagact

SEQ ID NO: 69834 - DNA, 25 bp, probe
ggtcacttctacttctctacagaga

SEQ ID NO: 69835 - DNA, 25 bp, probe
acttctacttctctacagagacttg

SEQ ID NO: 69836 - DNA, 25 bp, probe
cacttctacttctctacagagactt

SEQ ID NO: 69837 - DNA, 25 bp, probe
tctacttctctacagagacttgaag

SEQ ID NO: 69838 - DNA, 25 bp, probe
cttctacttctctacagagacttga

SEQ ID NO: 69839 - DNA, 25 bp, probe
tgtccagagatgctcataggtcact

SEQ ID NO: 69840 - DNA, 25 bp, probe
tacttctctacagagacttgaagcc

SEQ ID NO: 69841 - DNA, 25 bp, probe
tgagcttatcatgccaagggttatg

SEQ ID NO: 69842 - DNA, 25 bp, probe
ttctacttctctacagagacttgaa

SEQ ID NO: 69843 - DNA, 25 bp, probe
ttcctgtccagagatgctcataggt

SEQ ID NO: 69844 - DNA, 25 bp, probe
gatgtctggcttaagtccttagctg

SEQ ID NO: 69845 - DNA, 25 bp, probe
ctgatgtctggcttaagtccttagc

SEQ ID NO: 69846 - DNA, 25 bp, probe
ctacagagacttgaagcccaccaat

SEQ ID NO: 69847 - DNA, 25 bp, probe
gactgatgtctggcttaagtcctta

SEQ ID NO: 69848 - DNA, 25 bp, probe
tcctgtccagagatgctcataggtc

SEQ ID NO: 69849 - DNA, 25 bp, probe
tgatgtctggcttaagtccttagct

SEQ ID NO: 69850 - DNA, 25 bp, probe
cctgtccagagatgctcataggtca

SEQ ID NO: 69851 - DNA, 25 bp, probe
gagcttatcatgccaagggttatgc

SEQ ID NO: 69852 - DNA, 25 bp, probe
cacctagacatcaagccagacaacc

SEQ ID NO: 69853 - DNA, 25 bp, probe
ccacctagacatcaagccagacaac

SEQ ID NO: 69854 - DNA, 25 bp, probe
cctagacatcaagccagacaacctg

SEQ ID NO: 69855 - DNA, 25 bp, probe
aaaggttctctctgtacatccctgg

SEQ ID NO: 69856 - DNA, 25 bp, probe
aaggttctctctgtacatccctgga

SEQ ID NO: 69857 - DNA, 25 bp, probe
aggttctctctgtacatccctggag

SEQ ID NO: 69858 - DNA, 25 bp, probe
catgaagtcctgttactacagcctg

SEQ ID NO: 69859 - DNA, 25 bp, probe
gacagctactacactgtaagcctct

SEQ ID NO: 69860 - DNA, 25 bp, probe
cagctactacactgtaagcctctgc

SEQ ID NO: 69861 - DNA, 25 bp, probe
atgaagtcctgttactacagcctgg

SEQ ID NO: 69862 - DNA, 25 bp, probe
acagctactacactgtaagcctctg

SEQ ID NO: 69863 - DNA, 25 bp, probe
gcatgaagtcctgttactacagcct

SEQ ID NO: 69864 - DNA, 25 bp, probe
cgacagctactacactgtaagcctc

SEQ ID NO: 69865 - DNA, 25 bp, probe
ccgacgacagctactacactgtaag

SEQ ID NO: 69866 - DNA, 25 bp, probe
cagcgcatgaagtcctgttactaca

SEQ ID NO: 69867 - DNA, 25 bp, probe
gacgacagctactacactgtaagcc

SEQ ID NO: 69868 - DNA, 25 bp, probe
acgacagctactacactgtaagcct

SEQ ID NO: 69869 - DNA, 25 bp, probe
cgacgacagctactacactgtaagc

SEQ ID NO: 69870 - DNA, 25 bp, probe
agcgcatgaagtcctgttactacag

SEQ ID NO: 69871 - DNA, 25 bp, probe
ctgacattgacacagatgatctctt

SEQ ID NO: 69872 - DNA, 25 bp, probe
ctcattcgtgtgacatacagacaag

SEQ ID NO: 69873 - DNA, 25 bp, probe
tctcattcgtgtgacatacagacaa

SEQ ID NO: 69874 - DNA, 25 bp, probe
ttagttatgcttccaagacgccaat

SEQ ID NO: 69875 - DNA, 25 bp, probe
gtttgagactttagttatgcttcca

SEQ ID NO: 69876 - DNA, 25 bp, probe
tgtttgagactttagttatgcttcc

SEQ ID NO: 69877 - DNA, 25 bp, probe
aagaaggaattagataacccacagt

SEQ ID NO: 69878 - DNA, 25 bp, probe
tgagactttagttatgcttccaaga

SEQ ID NO: 69879 - DNA, 25 bp, probe
gtagagccattatgttgtggaatcc

SEQ ID NO: 69880 - DNA, 25 bp, probe
ggtagagccattatgttgtggaatc

SEQ ID NO: 69881 - DNA, 25 bp, probe
gagactttagttatgcttccaagac

SEQ ID NO: 69882 - DNA, 25 bp, probe
agaagaaggaattagataacccaca

SEQ ID NO: 69883 - DNA, 25 bp, probe
agactttagttatgcttccaagacg

SEQ ID NO: 69884 - DNA, 25 bp, probe
aggaattagataacccacagttcaa

SEQ ID NO: 69885 - DNA, 25 bp, probe
aaggaattagataacccacagttca

SEQ ID NO: 69886 - DNA, 25 bp, probe
gaagaaggaattagataacccacag

SEQ ID NO: 69887 - DNA, 25 bp, probe
aggcaatctgtttgagactttagtt

SEQ ID NO: 69888 - DNA, 25 bp, probe
agaaggaattagataacccacagtt

SEQ ID NO: 69889 - DNA, 25 bp, probe
ggcaatctgtttgagactttagtta

SEQ ID NO: 69890 - DNA, 25 bp, probe
gaaggaattagataacccacagttc

SEQ ID NO: 69891 - DNA, 25 bp, probe
ttgagactttagttatgcttccaag

SEQ ID NO: 69892 - DNA, 25 bp, probe
gaggcaatctgtttgagactttagt

SEQ ID NO: 69893 - DNA, 25 bp, probe
cttacaggatttcaggcagaagaag

SEQ ID NO: 69894 - DNA, 25 bp, probe
cattcacaagcagaatccaacaatg

SEQ ID NO: 69895 - DNA, 25 bp, probe
tggtagagccattatgttgtggaat

SEQ ID NO: 69896 - DNA, 25 bp, probe
ggaattagataacccacagttcaat

SEQ ID NO: 69897 - DNA, 25 bp, probe
acattgacacagatgatctctttct

SEQ ID NO: 69898 - DNA, 25 bp, probe
tgacattgacacagatgatctcttt

SEQ ID NO: 69899 - DNA, 25 bp, probe
tcattcgtgtgacatacagacaagg

SEQ ID NO: 69900 - DNA, 25 bp, probe
tctctttctttatgctttccttaca

SEQ ID NO: 69901 - DNA, 25 bp, probe
gacattgacacagatgatctctttc

SEQ ID NO: 69902 - DNA, 25 bp, probe
ctgtttgagactttagttatgcttc

SEQ ID NO: 69903 - DNA, 25 bp, probe
tttgagactttagttatgcttccaa

SEQ ID NO: 69904 - DNA, 25 bp, probe
attcacaagcagaatccaacaatgg

SEQ ID NO: 69905 - DNA, 25 bp, probe
ccattcacaagcagaatccaacaat

SEQ ID NO: 69906 - DNA, 25 bp, probe
tagttatgcttccaagacgccaatg

SEQ ID NO: 69907 - DNA, 25 bp, probe
aagaagaaggaattagataacccac

SEQ ID NO: 69908 - DNA, 25 bp, probe
tctgtttgagactttagttatgctt

SEQ ID NO: 69909 - DNA, 25 bp, probe
acacagatgatctctttctttatgc

SEQ ID NO: 69910 - DNA, 25 bp, probe
ggaggcaatctgtttgagactttag

SEQ ID NO: 69911 - DNA, 25 bp, probe
cattgacacagatgatctctttctt

SEQ ID NO: 69912 - DNA, 25 bp, probe
tacacagacttcaagcaactctcct

SEQ ID NO: 69913 - DNA, 25 bp, probe
ctctttctttatgctttccttacag

SEQ ID NO: 69914 - DNA, 25 bp, probe
atctgtttgagactttagttatgct

SEQ ID NO: 69915 - DNA, 25 bp, probe
atgatacaaggacatagcacagaca

SEQ ID NO: 69916 - DNA, 25 bp, probe
gatacaaggacatagcacagacagt

SEQ ID NO: 69917 - DNA, 25 bp, probe
tgatacaaggacatagcacagacag

SEQ ID NO: 69918 - DNA, 25 bp, probe
catgatacaaggacatagcacagac

SEQ ID NO: 69919 - DNA, 25 bp, probe
acatgatacaaggacatagcacaga

SEQ ID NO: 69920 - DNA, 25 bp, probe
cacatgatacaaggacatagcacag

SEQ ID NO: 69921 - DNA, 25 bp, probe
atacaaggacatagcacagacagtg

SEQ ID NO: 69922 - DNA, 25 bp, probe
gcacatgatacaaggacatagcaca

SEQ ID NO: 69923 - DNA, 25 bp, probe
tacaaggacatagcacagacagtga

SEQ ID NO: 69924 - DNA, 25 bp, probe
ctgtttccattacaaccactgctac

SEQ ID NO: 69925 - DNA, 25 bp, probe
tgagcttgcatttgaaattgacttt

SEQ ID NO: 69926 - DNA, 25 bp, probe
ctgagcttgcatttgaaattgactt

SEQ ID NO: 69927 - DNA, 25 bp, probe
gtttccattacaaccactgctacca

SEQ ID NO: 69928 - DNA, 25 bp, probe
acaaggacatagcacagacagtgaa

SEQ ID NO: 69929 - DNA, 25 bp, probe
gacatagcacagacagtgaaactca

SEQ ID NO: 69930 - DNA, 25 bp, probe
tttccattacaaccactgctaccag

SEQ ID NO: 69931 - DNA, 25 bp, probe
aaggacatagcacagacagtgaaac

SEQ ID NO: 69932 - DNA, 25 bp, probe
caaggacatagcacagacagtgaaa

SEQ ID NO: 69933 - DNA, 25 bp, probe
tgtttccattacaaccactgctacc

SEQ ID NO: 69934 - DNA, 25 bp, probe
cctgagcttgcatttgaaattgact

SEQ ID NO: 69935 - DNA, 25 bp, probe
cttgcatttgaaattgactttcgag

SEQ ID NO: 69936 - DNA, 25 bp, probe
gagcttgcatttgaaattgactttc

SEQ ID NO: 69937 - DNA, 25 bp, probe
gctgtttccattacaaccactgcta

SEQ ID NO: 69938 - DNA, 25 bp, probe
ggacatagcacagacagtgaaactc

SEQ ID NO: 69939 - DNA, 25 bp, probe
ttgcatttgaaattgactttcgagc

SEQ ID NO: 69940 - DNA, 25 bp, probe
gcttgcatttgaaattgactttcga

SEQ ID NO: 69941 - DNA, 25 bp, probe
agcttgcatttgaaattgactttcg

SEQ ID NO: 69942 - DNA, 25 bp, probe
aggacatagcacagacagtgaaact

SEQ ID NO: 69943 - DNA, 25 bp, probe
atttgaaattgactttcgagcccag

SEQ ID NO: 69944 - DNA, 25 bp, probe
attacaaccactgctaccagtagtg

SEQ ID NO: 69945 - DNA, 25 bp, probe
cattacaaccactgctaccagtagt

SEQ ID NO: 69946 - DNA, 25 bp, probe
cacaagacatgcaaaactcaaagat

SEQ ID NO: 69947 - DNA, 25 bp, probe
tgcacatgatacaaggacatagcac

SEQ ID NO: 69948 - DNA, 25 bp, probe
catttgaaattgactttcgagccca

SEQ ID NO: 69949 - DNA, 25 bp, probe
acaagacatgcaaaactcaaagatg

SEQ ID NO: 69950 - DNA, 25 bp, probe
tcacaagacatgcaaaactcaaaga

SEQ ID NO: 69951 - DNA, 25 bp, probe
ccattacaaccactgctaccagtag

SEQ ID NO: 69952 - DNA, 25 bp, probe
gcctgagcttgcatttgaaattgac

SEQ ID NO: 69953 - DNA, 25 bp, probe
tgaaactcacctttctgtgaagaac

SEQ ID NO: 69954 - DNA, 25 bp, probe
gtgaaactcacctttctgtgaagaa

SEQ ID NO: 69955 - DNA, 25 bp, probe
tccattacaaccactgctaccagta

SEQ ID NO: 69956 - DNA, 25 bp, probe
tgcatttgaaattgactttcgagcc

SEQ ID NO: 69957 - DNA, 25 bp, probe
ctttcacaaggccctttcttcctat

SEQ ID NO: 69958 - DNA, 25 bp, probe
gtcacaagacatgcaaaactcaaag

SEQ ID NO: 69959 - DNA, 25 bp, probe
gcacttcagactagcattgttctat

SEQ ID NO: 69960 - DNA, 25 bp, probe
cacttcagactagcattgttctatt

SEQ ID NO: 69961 - DNA, 25 bp, probe
cctataccatgtccacttagaatgt

SEQ ID NO: 69962 - DNA, 25 bp, probe
tcctataccatgtccacttagaatg

SEQ ID NO: 69963 - DNA, 25 bp, probe
tgtcagtagaggtagagacttcaac

SEQ ID NO: 69964 - DNA, 25 bp, probe
gtgtcagtagaggtagagacttcaa

SEQ ID NO: 69965 - DNA, 25 bp, probe
agcacttcagactagcattgttcta

SEQ ID NO: 69966 - DNA, 25 bp, probe
ttcctataccatgtccacttagaat

SEQ ID NO: 69967 - DNA, 25 bp, probe
agtagaggtagagacttcaaccaag

SEQ ID NO: 69968 - DNA, 25 bp, probe
ctataccatgtccacttagaatgtt

SEQ ID NO: 69969 - DNA, 25 bp, probe
ttgtgttggtgtcagtagaggtaga

SEQ ID NO: 69970 - DNA, 25 bp, probe
ctttagtttgtgttggtgtcagtag

SEQ ID NO: 69971 - DNA, 25 bp, probe
tccacttagaatgtttgaaatgctg

SEQ ID NO: 69972 - DNA, 25 bp, probe
gtccacttagaatgtttgaaatgct

SEQ ID NO: 69973 - DNA, 25 bp, probe
tttagtttgtgttggtgtcagtaga

SEQ ID NO: 69974 - DNA, 25 bp, probe
cacttagaatgtttgaaatgctggt

SEQ ID NO: 69975 - DNA, 25 bp, probe
tgtccacttagaatgtttgaaatgc

SEQ ID NO: 69976 - DNA, 25 bp, probe
caacaacagaatctcaaagcagtat

SEQ ID NO: 69977 - DNA, 25 bp, probe
cagtagaggtagagacttcaaccaa

SEQ ID NO: 69978 - DNA, 25 bp, probe
ttagtttgtgttggtgtcagtagag

SEQ ID NO: 69979 - DNA, 25 bp, probe
tcaacaacagaatctcaaagcagta

SEQ ID NO: 69980 - DNA, 25 bp, probe
gtgttggtgtcagtagaggtagaga

SEQ ID NO: 69981 - DNA, 25 bp, probe
aaattgtcatcagaactcacctttg

SEQ ID NO: 69982 - DNA, 25 bp, probe
gaaattgtcatcagaactcaccttt

SEQ ID NO: 69983 - DNA, 25 bp, probe
ttggtgtcagtagaggtagagactt

SEQ ID NO: 69984 - DNA, 25 bp, probe
agaatgtttgaaatgctggtagttc

SEQ ID NO: 69985 - DNA, 25 bp, probe
acttcagactagcattgttctatta

SEQ ID NO: 69986 - DNA, 25 bp, probe
cctttagtttgtgttggtgtcagta

SEQ ID NO: 69987 - DNA, 25 bp, probe
tagaatgtttgaaatgctggtagtt

SEQ ID NO: 69988 - DNA, 25 bp, probe
ttagaatgtttgaaatgctggtagt

SEQ ID NO: 69989 - DNA, 25 bp, probe
acttagaatgtttgaaatgctggta

SEQ ID NO: 69990 - DNA, 25 bp, probe
tagcaggaaattgtcatcagaactc

SEQ ID NO: 69991 - DNA, 25 bp, probe
atcaacaacagaatctcaaagcagt

SEQ ID NO: 69992 - DNA, 25 bp, probe
gtcagtagaggtagagacttcaacc

SEQ ID NO: 69993 - DNA, 25 bp, probe
aatacctatgtggagcacttcagac

SEQ ID NO: 69994 - DNA, 25 bp, probe
gaatgtttgaaatgctggtagttcc

SEQ ID NO: 69995 - DNA, 25 bp, probe
aaatctagcaggaaattgtcatcag

SEQ ID NO: 69996 - DNA, 25 bp, probe
aatgtttgaaatgctggtagttcct

SEQ ID NO: 69997 - DNA, 25 bp, probe
ttcagactagcattgttctattaga

SEQ ID NO: 69998 - DNA, 25 bp, probe
tacctatgtggagcacttcagacta

SEQ ID NO: 69999 - DNA, 25 bp, probe
ggaaattgtcatcagaactcacctt

SEQ ID NO: 70000 - DNA, 25 bp, probe
gtcaatccaaattctacctcttcat

SEQ ID NO: 70001 - DNA, 25 bp, probe
ctagcaggaaattgtcatcagaact

SEQ ID NO: 70002 - DNA, 25 bp, probe
tcagtagaggtagagacttcaacca

SEQ ID NO: 70003 - DNA, 25 bp, probe
taccagtcctcaagtagtttctcaa

SEQ ID NO: 70004 - DNA, 25 bp, probe
accagtcctcaagtagtttctcaaa

SEQ ID NO: 70005 - DNA, 25 bp, probe
ggagtctctagatattctcaggagt

SEQ ID NO: 70006 - DNA, 25 bp, probe
tggagtctctagatattctcaggag

SEQ ID NO: 70007 - DNA, 25 bp, probe
agtctctagatattctcaggagtct

SEQ ID NO: 70008 - DNA, 25 bp, probe
ctggagtctctagatattctcagga

SEQ ID NO: 70009 - DNA, 25 bp, probe
actggagtctctagatattctcagg

SEQ ID NO: 70010 - DNA, 25 bp, probe
gagtctctagatattctcaggagtc

SEQ ID NO: 70011 - DNA, 25 bp, probe
gtctctagatattctcaggagtctg

SEQ ID NO: 70012 - DNA, 25 bp, probe
gtacccatctaccagtcctcaagta

SEQ ID NO: 70013 - DNA, 25 bp, probe
aactggagtctctagatattctcag

SEQ ID NO: 70014 - DNA, 25 bp, probe
atctaccagtcctcaagtagtttct

SEQ ID NO: 70015 - DNA, 25 bp, probe
catctaccagtcctcaagtagtttc

SEQ ID NO: 70016 - DNA, 25 bp, probe
tctaccagtcctcaagtagtttctc

SEQ ID NO: 70017 - DNA, 25 bp, probe
ccagtcctcaagtagtttctcaaac

SEQ ID NO: 70018 - DNA, 25 bp, probe
ctaccagtcctcaagtagtttctca

SEQ ID NO: 70019 - DNA, 25 bp, probe
tgtgaaacaatgccagaatctttct

SEQ ID NO: 70020 - DNA, 25 bp, probe
ccatacatctggtgtctactggagg

SEQ ID NO: 70021 - DNA, 25 bp, probe
ccatctaccagtcctcaagtagttt

SEQ ID NO: 70022 - DNA, 25 bp, probe
agttttgtggttctctgtgtagatg

SEQ ID NO: 70023 - DNA, 25 bp, probe
cacttttccgtcttcttggtcttag

SEQ ID NO: 70024 - DNA, 25 bp, probe
tacccatctaccagtcctcaagtag

SEQ ID NO: 70025 - DNA, 25 bp, probe
ttgtggttctctgtgtagatgcaaa

SEQ ID NO: 70026 - DNA, 25 bp, probe
tttgtggttctctgtgtagatgcaa

SEQ ID NO: 70027 - DNA, 25 bp, probe
ttgtgaaacaatgccagaatctttc

SEQ ID NO: 70028 - DNA, 25 bp, probe
cagttttgtggttctctgtgtagat

SEQ ID NO: 70029 - DNA, 25 bp, probe
tcaaactggagtctctagatattct

SEQ ID NO: 70030 - DNA, 25 bp, probe
catacatctggtgtctactggaggg

SEQ ID NO: 70031 - DNA, 25 bp, probe
tttctcaaactggagtctctagata

SEQ ID NO: 70032 - DNA, 25 bp, probe
aaactggagtctctagatattctca

SEQ ID NO: 70033 - DNA, 25 bp, probe
tctcaaactggagtctctagatatt

SEQ ID NO: 70034 - DNA, 25 bp, probe
ttctcaaactggagtctctagatat

SEQ ID NO: 70035 - DNA, 25 bp, probe
gttttgtggttctctgtgtagatgc

SEQ ID NO: 70036 - DNA, 25 bp, probe
caaactggagtctctagatattctc

SEQ ID NO: 70037 - DNA, 25 bp, probe
ctcaaactggagtctctagatattc

SEQ ID NO: 70038 - DNA, 25 bp, probe
atacatctggtgtctactggagggt

SEQ ID NO: 70039 - DNA, 25 bp, probe
tgtggttctctgtgtagatgcaaac

SEQ ID NO: 70040 - DNA, 25 bp, probe
ctgtacccatctaccagtcctcaag

SEQ ID NO: 70041 - DNA, 25 bp, probe
cccatctaccagtcctcaagtagtt

SEQ ID NO: 70042 - DNA, 25 bp, probe
acttttccgtcttcttggtcttagc

SEQ ID NO: 70043 - DNA, 25 bp, probe
tgtacccatctaccagtcctcaagt

SEQ ID NO: 70044 - DNA, 25 bp, probe
tctctagatattctcaggagtctga

SEQ ID NO: 70045 - DNA, 25 bp, probe
gtttctcaaactggagtctctagat

SEQ ID NO: 70046 - DNA, 25 bp, probe
tctgagatataaacagttttgtggt

SEQ ID NO: 70047 - DNA, 25 bp, probe
ctgttggaatcttaggaactagacc

SEQ ID NO: 70048 - DNA, 25 bp, probe
tctgttggaatcttaggaactagac

SEQ ID NO: 70049 - DNA, 25 bp, probe
ttctgttggaatcttaggaactaga

SEQ ID NO: 70050 - DNA, 25 bp, probe
tgttggaatcttaggaactagacca

SEQ ID NO: 70051 - DNA, 25 bp, probe
actttctgttggaatcttaggaact

SEQ ID NO: 70052 - DNA, 25 bp, probe
cactttctgttggaatcttaggaac

SEQ ID NO: 70053 - DNA, 25 bp, probe
ggaatcttaggaactagaccaaagg

SEQ ID NO: 70054 - DNA, 25 bp, probe
gaatcttaggaactagaccaaaggc

SEQ ID NO: 70055 - DNA, 25 bp, probe
ctttctgttggaatcttaggaacta

SEQ ID NO: 70056 - DNA, 25 bp, probe
tttctgttggaatcttaggaactag

SEQ ID NO: 70057 - DNA, 25 bp, probe
atgatggaaagcgaacaaggagtaa

SEQ ID NO: 70058 - DNA, 25 bp, probe
agagaatggtctttacctaacacag

SEQ ID NO: 70059 - DNA, 25 bp, probe
taccactttctgttggaatcttagg

SEQ ID NO: 70060 - DNA, 25 bp, probe
gtttaccactttctgttggaatctt

SEQ ID NO: 70061 - DNA, 25 bp, probe
cagagaatggtctttacctaacaca

SEQ ID NO: 70062 - DNA, 25 bp, probe
gtaagggaactttgcgatacatgag

SEQ ID NO: 70063 - DNA, 25 bp, probe
tgtttaccactttctgttggaatct

SEQ ID NO: 70064 - DNA, 25 bp, probe
gtgtttaccactttctgttggaatc

SEQ ID NO: 70065 - DNA, 25 bp, probe
tggaatcttaggaactagaccaaag

SEQ ID NO: 70066 - DNA, 25 bp, probe
ccactttctgttggaatcttaggaa

SEQ ID NO: 70067 - DNA, 25 bp, probe
ccagagaatggtctttacctaacac

SEQ ID NO: 70068 - DNA, 25 bp, probe
aatcttaggaactagaccaaaggcg

SEQ ID NO: 70069 - DNA, 25 bp, probe
gagtaagggaactttgcgatacatg

SEQ ID NO: 70070 - DNA, 25 bp, probe
aaggagtaagggaactttgcgatac

SEQ ID NO: 70071 - DNA, 25 bp, probe
caaggagtaagggaactttgcgata

SEQ ID NO: 70072 - DNA, 25 bp, probe
ttaccactttctgttggaatcttag

SEQ ID NO: 70073 - DNA, 25 bp, probe
gagaatggtctttacctaacacagc

SEQ ID NO: 70074 - DNA, 25 bp, probe
ggagtaagggaactttgcgatacat

SEQ ID NO: 70075 - DNA, 25 bp, probe
tgatggaaagcgaacaaggagtaag

SEQ ID NO: 70076 - DNA, 25 bp, probe
accactttctgttggaatcttagga

SEQ ID NO: 70077 - DNA, 25 bp, probe
agtaagggaactttgcgatacatga

SEQ ID NO: 70078 - DNA, 25 bp, probe
ttgccagagaatggtctttacctaa

SEQ ID NO: 70079 - DNA, 25 bp, probe
tttgccagagaatggtctttaccta

SEQ ID NO: 70080 - DNA, 25 bp, probe
tttaccactttctgttggaatctta

SEQ ID NO: 70081 - DNA, 25 bp, probe
gccagagaatggtctttacctaaca

SEQ ID NO: 70082 - DNA, 25 bp, probe
tgccagagaatggtctttacctaac

SEQ ID NO: 70083 - DNA, 25 bp, probe
gatggaaagcgaacaaggagtaagg

SEQ ID NO: 70084 - DNA, 25 bp, probe
agaatggtctttacctaacacagcc

SEQ ID NO: 70085 - DNA, 25 bp, probe
taagggaactttgcgatacatgagc

SEQ ID NO: 70086 - DNA, 25 bp, probe
aggagtaagggaactttgcgataca

SEQ ID NO: 70087 - DNA, 25 bp, probe
gttggaatcttaggaactagaccaa

SEQ ID NO: 70088 - DNA, 25 bp, probe
gaaagcgaacaaggagtaagggaac

SEQ ID NO: 70089 - DNA, 25 bp, probe
tacaaaagtctccaagtgtttacca

SEQ ID NO: 70090 - DNA, 25 bp, probe
ttacaaaagtctccaagtgtttacc

SEQ ID NO: 70091 - DNA, 25 bp, probe
aattggtacataagccattactggt

SEQ ID NO: 70092 - DNA, 25 bp, probe
gaattggtacataagccattactgg

SEQ ID NO: 70093 - DNA, 25 bp, probe
tggagaattggtacataagccatta

SEQ ID NO: 70094 - DNA, 25 bp, probe
ttggagaattggtacataagccatt

SEQ ID NO: 70095 - DNA, 25 bp, probe
ggagaattggtacataagccattac

SEQ ID NO: 70096 - DNA, 25 bp, probe
attggtacataagccattactggtg

SEQ ID NO: 70097 - DNA, 25 bp, probe
tacataagccattactggtggatct

SEQ ID NO: 70098 - DNA, 25 bp, probe
gtacataagccattactggtggatc

SEQ ID NO: 70099 - DNA, 25 bp, probe
agaattggtacataagccattactg

SEQ ID NO: 70100 - DNA, 25 bp, probe
gagaattggtacataagccattact

SEQ ID NO: 70101 - DNA, 25 bp, probe
catttggagaattggtacataagcc

SEQ ID NO: 70102 - DNA, 25 bp, probe
tcatttggagaattggtacataagc

SEQ ID NO: 70103 - DNA, 25 bp, probe
cagaggttgaaagtgatctatggat

SEQ ID NO: 70104 - DNA, 25 bp, probe
cattactggtggatctcactgttga

SEQ ID NO: 70105 - DNA, 25 bp, probe
ataagccattactggtggatctcac

SEQ ID NO: 70106 - DNA, 25 bp, probe
cataagccattactggtggatctca

SEQ ID NO: 70107 - DNA, 25 bp, probe
acataagccattactggtggatctc

SEQ ID NO: 70108 - DNA, 25 bp, probe
ggtacataagccattactggtggat

SEQ ID NO: 70109 - DNA, 25 bp, probe
agtcatttggagaattggtacataa

SEQ ID NO: 70110 - DNA, 25 bp, probe
aagtcatttggagaattggtacata

SEQ ID NO: 70111 - DNA, 25 bp, probe
ttggtacataagccattactggtgg

SEQ ID NO: 70112 - DNA, 25 bp, probe
gtcatttggagaattggtacataag

SEQ ID NO: 70113 - DNA, 25 bp, probe
tttggagaattggtacataagccat

SEQ ID NO: 70114 - DNA, 25 bp, probe
atttggagaattggtacataagcca

SEQ ID NO: 70115 - DNA, 25 bp, probe
taagccattactggtggatctcact

SEQ ID NO: 70116 - DNA, 25 bp, probe
ccattactggtggatctcactgttg

SEQ ID NO: 70117 - DNA, 25 bp, probe
tggtacataagccattactggtgga

SEQ ID NO: 70118 - DNA, 25 bp, probe
ccagaggttgaaagtgatctatgga

SEQ ID NO: 70119 - DNA, 25 bp, probe
agaggttgaaagtgatctatggatc

SEQ ID NO: 70120 - DNA, 25 bp, probe
attactggtggatctcactgttgag

SEQ ID NO: 70121 - DNA, 25 bp, probe
gccagaggttgaaagtgatctatgg

SEQ ID NO: 70122 - DNA, 25 bp, probe
aagccattactggtggatctcactg

SEQ ID NO: 70123 - DNA, 25 bp, probe
gccattactggtggatctcactgtt

SEQ ID NO: 70124 - DNA, 25 bp, probe
gtcagctccagaattccttgtctct

SEQ ID NO: 70125 - DNA, 25 bp, probe
agtcagctccagaattccttgtctc

SEQ ID NO: 70126 - DNA, 25 bp, probe
cagtcagctccagaattccttgtct

SEQ ID NO: 70127 - DNA, 25 bp, probe
ggccagaggttgaaagtgatctatg

SEQ ID NO: 70128 - DNA, 25 bp, probe
aggccagaggttgaaagtgatctat

SEQ ID NO: 70129 - DNA, 25 bp, probe
ttactggtggatctcactgttgagg

SEQ ID NO: 70130 - DNA, 25 bp, probe
aaggccagaggttgaaagtgatcta

SEQ ID NO: 70131 - DNA, 25 bp, probe
tactggtggatctcactgttgagga

SEQ ID NO: 70132 - DNA, 25 bp, probe
ctggtggatctcactgttgaggaag

SEQ ID NO: 70133 - DNA, 25 bp, probe
ttgaaagtgatctatggatcctgtg

SEQ ID NO: 70134 - DNA, 25 bp, probe
gttgaaagtgatctatggatcctgt

SEQ ID NO: 70135 - DNA, 25 bp, probe
gagaaggaaagcacaaggagaagac

SEQ ID NO: 70136 - DNA, 25 bp, probe
gaaggaaagcacaaggagaagacag

SEQ ID NO: 70137 - DNA, 25 bp, probe
aaggaaagcacaaggagaagacaga

SEQ ID NO: 70138 - DNA, 25 bp, probe
agaaggaaagcacaaggagaagaca

SEQ ID NO: 70139 - DNA, 25 bp, probe
ggagaaggaaagcacaaggagaaga

SEQ ID NO: 70140 - DNA, 25 bp, probe
ttgatgaacaatgaagcagctcagc

SEQ ID NO: 70141 - DNA, 25 bp, probe
tggagaaggaaagcacaaggagaag

SEQ ID NO: 70142 - DNA, 25 bp, probe
gatgaacaatgaagcagctcagcag

SEQ ID NO: 70143 - DNA, 25 bp, probe
gtggagaaggaaagcacaaggagaa

SEQ ID NO: 70144 - DNA, 25 bp, probe
ctgttgctctgatgtttgctcagtg

SEQ ID NO: 70145 - DNA, 25 bp, probe
tacacaatcctctattaccctccaa

SEQ ID NO: 70146 - DNA, 25 bp, probe
ttacacaatcctctattaccctcca

SEQ ID NO: 70147 - DNA, 25 bp, probe
tttacacaatcctctattaccctcc

SEQ ID NO: 70148 - DNA, 25 bp, probe
cctctattaccctccaacagtcata

SEQ ID NO: 70149 - DNA, 25 bp, probe
ctctattaccctccaacagtcatat

SEQ ID NO: 70150 - DNA, 25 bp, probe
actttacacaatcctctattaccct

SEQ ID NO: 70151 - DNA, 25 bp, probe
aatcctctattaccctccaacagtc

SEQ ID NO: 70152 - DNA, 25 bp, probe
gactttacacaatcctctattaccc

SEQ ID NO: 70153 - DNA, 25 bp, probe
caatcctctattaccctccaacagt

SEQ ID NO: 70154 - DNA, 25 bp, probe
acaatcctctattaccctccaacag

SEQ ID NO: 70155 - DNA, 25 bp, probe
ctttacacaatcctctattaccctc

SEQ ID NO: 70156 - DNA, 25 bp, probe
cacaatcctctattaccctccaaca

SEQ ID NO: 70157 - DNA, 25 bp, probe
acacaatcctctattaccctccaac

SEQ ID NO: 70158 - DNA, 25 bp, probe
tcctctattaccctccaacagtcat

SEQ ID NO: 70159 - DNA, 25 bp, probe
atcctctattaccctccaacagtca

SEQ ID NO: 70160 - DNA, 25 bp, probe
actggactttacacaatcctctatt

SEQ ID NO: 70161 - DNA, 25 bp, probe
gtactggactttacacaatcctcta

SEQ ID NO: 70162 - DNA, 25 bp, probe
ggactttacacaatcctctattacc

SEQ ID NO: 70163 - DNA, 25 bp, probe
tactggactttacacaatcctctat

SEQ ID NO: 70164 - DNA, 25 bp, probe
aaggacccagtaataaccaggagag

SEQ ID NO: 70165 - DNA, 25 bp, probe
tggactttacacaatcctctattac

SEQ ID NO: 70166 - DNA, 25 bp, probe
caaggacccagtaataaccaggaga

SEQ ID NO: 70167 - DNA, 25 bp, probe
tctattaccctccaacagtcatatg

SEQ ID NO: 70168 - DNA, 25 bp, probe
ctggactttacacaatcctctatta

SEQ ID NO: 70169 - DNA, 25 bp, probe
gacccagtaataaccaggagagagg

SEQ ID NO: 70170 - DNA, 25 bp, probe
ggacccagtaataaccaggagagag

SEQ ID NO: 70171 - DNA, 25 bp, probe
aggacccagtaataaccaggagaga

SEQ ID NO: 70172 - DNA, 25 bp, probe
ctattaccctccaacagtcatatgg

SEQ ID NO: 70173 - DNA, 25 bp, probe
ccaaggacccagtaataaccaggag

SEQ ID NO: 70174 - DNA, 25 bp, probe
gacccaaggacccagtaataaccag

SEQ ID NO: 70175 - DNA, 25 bp, probe
tagctgaactcactccatgcaacat

SEQ ID NO: 70176 - DNA, 25 bp, probe
agtactggactttacacaatcctct

SEQ ID NO: 70177 - DNA, 25 bp, probe
tattaccctccaacagtcatatggc

SEQ ID NO: 70178 - DNA, 25 bp, probe
cttgttgattgtgggattgtgggtg

SEQ ID NO: 70179 - DNA, 25 bp, probe
ctagctgaactcactccatgcaaca

SEQ ID NO: 70180 - DNA, 25 bp, probe
ctcagaccatccttaaccctcgaag

SEQ ID NO: 70181 - DNA, 25 bp, probe
gttgggcttgttgattgtgggattg

SEQ ID NO: 70182 - DNA, 25 bp, probe
acccagtaataaccaggagagaggc

SEQ ID NO: 70183 - DNA, 25 bp, probe
cttccctagctgaactcactccatg

SEQ ID NO: 70184 - DNA, 25 bp, probe
cacaaagcctcacaccatgacaatg

SEQ ID NO: 70185 - DNA, 25 bp, probe
attaccctccaacagtcatatggcc

SEQ ID NO: 70186 - DNA, 25 bp, probe
agaagtgatgagaacctgaggggag

SEQ ID NO: 70187 - DNA, 25 bp, probe
gagggacccaaggacccagtaataa

SEQ ID NO: 70188 - DNA, 25 bp, probe
ttaccctccaacagtcatatggcct

SEQ ID NO: 70189 - DNA, 25 bp, probe
tttcacagctcaaagagaagcacaa

SEQ ID NO: 70190 - DNA, 25 bp, probe
ttcacagctcaaagagaagcacaag

SEQ ID NO: 70191 - DNA, 25 bp, probe
cttttcacagctcaaagagaagcac

SEQ ID NO: 70192 - DNA, 25 bp, probe
ttttcacagctcaaagagaagcaca

SEQ ID NO: 70193 - DNA, 25 bp, probe
ggtcttttcacagctcaaagagaag

SEQ ID NO: 70194 - DNA, 25 bp, probe
gtggtggtcttttcacagctcaaag

SEQ ID NO: 70195 - DNA, 25 bp, probe
gtcttttcacagctcaaagagaagc

SEQ ID NO: 70196 - DNA, 25 bp, probe
tggtcttttcacagctcaaagagaa

SEQ ID NO: 70197 - DNA, 25 bp, probe
tcttttcacagctcaaagagaagca

SEQ ID NO: 70198 - DNA, 25 bp, probe
gtggtcttttcacagctcaaagaga

SEQ ID NO: 70199 - DNA, 25 bp, probe
ggtggtcttttcacagctcaaagag

SEQ ID NO: 70200 - DNA, 25 bp, probe
tggtggtcttttcacagctcaaaga

SEQ ID NO: 70201 - DNA, 25 bp, probe
atgttcataagcagtgttccaagat

SEQ ID NO: 70202 - DNA, 25 bp, probe
aatgttcataagcagtgttccaaga

SEQ ID NO: 70203 - DNA, 25 bp, probe
gaatgttcataagcagtgttccaag

SEQ ID NO: 70204 - DNA, 25 bp, probe
tgttcataagcagtgttccaagatg

SEQ ID NO: 70205 - DNA, 25 bp, probe
tgaatgttcataagcagtgttccaa

SEQ ID NO: 70206 - DNA, 25 bp, probe
ttgaatgttcataagcagtgttcca

SEQ ID NO: 70207 - DNA, 25 bp, probe
gagactgattgtggtttgaatgttc

SEQ ID NO: 70208 - DNA, 25 bp, probe
tgagactgattgtggtttgaatgtt

SEQ ID NO: 70209 - DNA, 25 bp, probe
ctgagactgattgtggtttgaatgt

SEQ ID NO: 70210 - DNA, 25 bp, probe
gttcataagcagtgttccaagatgg

SEQ ID NO: 70211 - DNA, 25 bp, probe
attgtggtttgaatgttcataagca

SEQ ID NO: 70212 - DNA, 25 bp, probe
tttgaatgttcataagcagtgttcc

SEQ ID NO: 70213 - DNA, 25 bp, probe
gactgattgtggtttgaatgttcat

SEQ ID NO: 70214 - DNA, 25 bp, probe
gtttgaatgttcataagcagtgttc

SEQ ID NO: 70215 - DNA, 25 bp, probe
ggtttgaatgttcataagcagtgtt

SEQ ID NO: 70216 - DNA, 25 bp, probe
ttgtggtttgaatgttcataagcag

SEQ ID NO: 70217 - DNA, 25 bp, probe
gattgtggtttgaatgttcataagc

SEQ ID NO: 70218 - DNA, 25 bp, probe
ttcataagcagtgttccaagatggt

SEQ ID NO: 70219 - DNA, 25 bp, probe
actgattgtggtttgaatgttcata

SEQ ID NO: 70220 - DNA, 25 bp, probe
gtggtttgaatgttcataagcagtg

SEQ ID NO: 70221 - DNA, 25 bp, probe
agactgattgtggtttgaatgttca

SEQ ID NO: 70222 - DNA, 25 bp, probe
tggtttgaatgttcataagcagtgt

SEQ ID NO: 70223 - DNA, 25 bp, probe
tgtggtttgaatgttcataagcagt

SEQ ID NO: 70224 - DNA, 25 bp, probe
gctgagactgattgtggtttgaatg

SEQ ID NO: 70225 - DNA, 25 bp, probe
tcataagcagtgttccaagatggtc

SEQ ID NO: 70226 - DNA, 25 bp, probe
tgattgtggtttgaatgttcataag

SEQ ID NO: 70227 - DNA, 25 bp, probe
ctgattgtggtttgaatgttcataa

SEQ ID NO: 70228 - DNA, 25 bp, probe
cataagcagtgttccaagatggtcc

SEQ ID NO: 70229 - DNA, 25 bp, probe
agctgagactgattgtggtttgaat

SEQ ID NO: 70230 - DNA, 25 bp, probe
ataagcagtgttccaagatggtccc

SEQ ID NO: 70231 - DNA, 25 bp, probe
aaagaagtgaagatttctgcattcc

SEQ ID NO: 70232 - DNA, 25 bp, probe
gaaagaagtgaagatttctgcattc

SEQ ID NO: 70233 - DNA, 25 bp, probe
catcgccaacatccaactcaacaac

SEQ ID NO: 70234 - DNA, 25 bp, probe
ttccgagtgaagtttaacgaagcac

SEQ ID NO: 70235 - DNA, 25 bp, probe
aagaagtgaagatttctgcattccg

SEQ ID NO: 70236 - DNA, 25 bp, probe
aagacatccggtatctcaaggactc

SEQ ID NO: 70237 - DNA, 25 bp, probe
ctccaaagacatccggtatctcaag

SEQ ID NO: 70238 - DNA, 25 bp, probe
caaagacatccggtatctcaaggac

SEQ ID NO: 70239 - DNA, 25 bp, probe
aaagacatccggtatctcaaggact

SEQ ID NO: 70240 - DNA, 25 bp, probe
cttccgagtgaagtttaacgaagca

SEQ ID NO: 70241 - DNA, 25 bp, probe
aagtttaacgaagcacttccgactg

SEQ ID NO: 70242 - DNA, 25 bp, probe
gtggatcatgtacagcaatgaggag

SEQ ID NO: 70243 - DNA, 25 bp, probe
tccaaagacatccggtatctcaagg

SEQ ID NO: 70244 - DNA, 25 bp, probe
gagaaagaagtgaagatttctgcat

SEQ ID NO: 70245 - DNA, 25 bp, probe
gaagtgaagatttctgcattccggg

SEQ ID NO: 70246 - DNA, 25 bp, probe
agaaagaagtgaagatttctgcatt

SEQ ID NO: 70247 - DNA, 25 bp, probe
tgtggatcatgtacagcaatgagga

SEQ ID NO: 70248 - DNA, 25 bp, probe
agaagtgaagatttctgcattccgg

SEQ ID NO: 70249 - DNA, 25 bp, probe
ccaaagacatccggtatctcaagga

SEQ ID NO: 70250 - DNA, 25 bp, probe
gctccaaagacatccggtatctcaa

SEQ ID NO: 70251 - DNA, 25 bp, probe
agacatccggtatctcaaggactcc

SEQ ID NO: 70252 - DNA, 25 bp, probe
tggatcatgtacagcaatgaggagg

SEQ ID NO: 70253 - DNA, 25 bp, probe
caccctcatggactccaagatgaag

SEQ ID NO: 70254 - DNA, 25 bp, probe
ctgctccaaagacatccggtatctc

SEQ ID NO: 70255 - DNA, 25 bp, probe
ccgagtgaagtttaacgaagcactt

SEQ ID NO: 70256 - DNA, 25 bp, probe
ctgtggatcatgtacagcaatgagg

SEQ ID NO: 70257 - DNA, 25 bp, probe
cctgtggatcatgtacagcaatgag

SEQ ID NO: 70258 - DNA, 25 bp, probe
atcatgtacagcaatgaggaggcag

SEQ ID NO: 70259 - DNA, 25 bp, probe
gatcatgtacagcaatgaggaggca

SEQ ID NO: 70260 - DNA, 25 bp, probe
aagatttctgcattccggggtgtat

SEQ ID NO: 70261 - DNA, 25 bp, probe
ttaacgaagcacttccgactggaaa

SEQ ID NO: 70262 - DNA, 25 bp, probe
tttaacgaagcacttccgactggaa

SEQ ID NO: 70263 - DNA, 25 bp, probe
tccgagtgaagtttaacgaagcact

SEQ ID NO: 70264 - DNA, 25 bp, probe
agatttctgcattccggggtgtatg

SEQ ID NO: 70265 - DNA, 25 bp, probe
gaagatttctgcattccggggtgta

SEQ ID NO: 70266 - DNA, 25 bp, probe
gatgaagcccctgtggatcatgtac

SEQ ID NO: 70267 - DNA, 25 bp, probe
agatgaagcccctgtggatcatgta

SEQ ID NO: 70268 - DNA, 25 bp, probe
ccctgtggatcatgtacagcaatga

SEQ ID NO: 70269 - DNA, 25 bp, probe
aattcttacttgatgacaacagcga

SEQ ID NO: 70270 - DNA, 25 bp, probe
attcttacttgatgacaacagcgac

SEQ ID NO: 70271 - DNA, 25 bp, probe
caatggagcagaagagagaggaatt

SEQ ID NO: 70272 - DNA, 25 bp, probe
tcttacttgatgacaacagcgacat

SEQ ID NO: 70273 - DNA, 25 bp, probe
tcaatggagcagaagagagaggaat

SEQ ID NO: 70274 - DNA, 25 bp, probe
agcagaagagagaggaatttgaatt

SEQ ID NO: 70275 - DNA, 25 bp, probe
gagcagaagagagaggaatttgaat

SEQ ID NO: 70276 - DNA, 25 bp, probe
ttcttacttgatgacaacagcgaca

SEQ ID NO: 70277 - DNA, 25 bp, probe
aatggagcagaagagagaggaattt

SEQ ID NO: 70278 - DNA, 25 bp, probe
tgaattcttacttgatgacaacagc

SEQ ID NO: 70279 - DNA, 25 bp, probe
ggagcagaagagagaggaatttgaa

SEQ ID NO: 70280 - DNA, 25 bp, probe
gaattcttacttgatgacaacagcg

SEQ ID NO: 70281 - DNA, 25 bp, probe
atggagcagaagagagaggaatttg

SEQ ID NO: 70282 - DNA, 25 bp, probe
ctcaatggagcagaagagagaggaa

SEQ ID NO: 70283 - DNA, 25 bp, probe
ttgaattcttacttgatgacaacag

SEQ ID NO: 70284 - DNA, 25 bp, probe
tggagcagaagagagaggaatttga

SEQ ID NO: 70285 - DNA, 25 bp, probe
cttacttgatgacaacagcgacatc

SEQ ID NO: 70286 - DNA, 25 bp, probe
cacctcaatggagcagaagagagag

SEQ ID NO: 70287 - DNA, 25 bp, probe
gcagaagagagaggaatttgaattc

SEQ ID NO: 70288 - DNA, 25 bp, probe
tattccacagcctcaaaatttaacc

SEQ ID NO: 70289 - DNA, 25 bp, probe
cacacctcaatggagcagaagagag

SEQ ID NO: 70290 - DNA, 25 bp, probe
acacctcaatggagcagaagagaga

SEQ ID NO: 70291 - DNA, 25 bp, probe
tttgaattcttacttgatgacaaca

SEQ ID NO: 70292 - DNA, 25 bp, probe
ggagtgcatacatggaggaagaagg

SEQ ID NO: 70293 - DNA, 25 bp, probe
ttattccacagcctcaaaatttaac

SEQ ID NO: 70294 - DNA, 25 bp, probe
gttattccacagcctcaaaatttaa

SEQ ID NO: 70295 - DNA, 25 bp, probe
tgttattccacagcctcaaaattta

SEQ ID NO: 70296 - DNA, 25 bp, probe
catacatggaggaagaaggcgtctt

SEQ ID NO: 70297 - DNA, 25 bp, probe
cagaagagagaggaatttgaattct

SEQ ID NO: 70298 - DNA, 25 bp, probe
attccacagcctcaaaatttaaccg

SEQ ID NO: 70299 - DNA, 25 bp, probe
cggagtgcatacatggaggaagaag

SEQ ID NO: 70300 - DNA, 25 bp, probe
agagagaggaatttgaattcttact

SEQ ID NO: 70301 - DNA, 25 bp, probe
agaagagagaggaatttgaattctt

SEQ ID NO: 70302 - DNA, 25 bp, probe
atttgaattcttacttgatgacaac

SEQ ID NO: 70303 - DNA, 25 bp, probe
gagaggaatttgaattcttacttga

SEQ ID NO: 70304 - DNA, 25 bp, probe
agagaggaatttgaattcttacttg

SEQ ID NO: 70305 - DNA, 25 bp, probe
ggaatttgaattcttacttgatgac

SEQ ID NO: 70306 - DNA, 25 bp, probe
gagagaggaatttgaattcttactt

SEQ ID NO: 70307 - DNA, 25 bp, probe
aggaatttgaattcttacttgatga

SEQ ID NO: 70308 - DNA, 25 bp, probe
gaggaatttgaattcttacttgatg

SEQ ID NO: 70309 - DNA, 25 bp, probe
aagagagaggaatttgaattcttac

SEQ ID NO: 70310 - DNA, 25 bp, probe
agaggaatttgaattcttacttgat

SEQ ID NO: 70311 - DNA, 25 bp, probe
gaagagagaggaatttgaattctta

SEQ ID NO: 70312 - DNA, 25 bp, probe
aatttgaattcttacttgatgacaa

SEQ ID NO: 70313 - DNA, 25 bp, probe
tgtcattatggaaagcagaaggata

SEQ ID NO: 70314 - DNA, 25 bp, probe
catgtgtccttagtcaactgtacca

SEQ ID NO: 70315 - DNA, 25 bp, probe
gagttgtgtgtggagttatggagac

SEQ ID NO: 70316 - DNA, 25 bp, probe
gaagcccaaaggagttacattctta

SEQ ID NO: 70317 - DNA, 25 bp, probe
cttagtcaactgtaccactgtcctc

SEQ ID NO: 70318 - DNA, 25 bp, probe
caaaggagttacattcttacccagg

SEQ ID NO: 70319 - DNA, 25 bp, probe
ccaaaggagttacattcttacccag

SEQ ID NO: 70320 - DNA, 25 bp, probe
aagcccaaaggagttacattcttac

SEQ ID NO: 70321 - DNA, 25 bp, probe
agaagataatgactatatcaacgct

SEQ ID NO: 70322 - DNA, 25 bp, probe
gtcattatggaaagcagaaggatat

SEQ ID NO: 70323 - DNA, 25 bp, probe
aagttcttagtgcatcttcatggtg

SEQ ID NO: 70324 - DNA, 25 bp, probe
caagttcttagtgcatcttcatggt

SEQ ID NO: 70325 - DNA, 25 bp, probe
gtcggattaaactacatcaagaaga

SEQ ID NO: 70326 - DNA, 25 bp, probe
gtccttagtcaactgtaccactgtc

SEQ ID NO: 70327 - DNA, 25 bp, probe
gaagttcttaagctgtcattatgga

SEQ ID NO: 70328 - DNA, 25 bp, probe
atgtgtccttagtcaactgtaccac

SEQ ID NO: 70329 - DNA, 25 bp, probe
agtcggattaaactacatcaagaag

SEQ ID NO: 70330 - DNA, 25 bp, probe
ttcttagtgcatcttcatggtgtct

SEQ ID NO: 70331 - DNA, 25 bp, probe
gttcttagtgcatcttcatggtgtc

SEQ ID NO: 70332 - DNA, 25 bp, probe
gaagaagcccaaaggagttacattc

SEQ ID NO: 70333 - DNA, 25 bp, probe
cctttgaccatagtcggattaaact

SEQ ID NO: 70334 - DNA, 25 bp, probe
ctgtcattatggaaagcagaaggat

SEQ ID NO: 70335 - DNA, 25 bp, probe
tgaagttcttaagctgtcattatgg

SEQ ID NO: 70336 - DNA, 25 bp, probe
gcctgaagttcttaagctgtcatta

SEQ ID NO: 70337 - DNA, 25 bp, probe
agttcttagtgcatcttcatggtgt

SEQ ID NO: 70338 - DNA, 25 bp, probe
cccaaaggagttacattcttaccca

SEQ ID NO: 70339 - DNA, 25 bp, probe
aagaagataatgactatatcaacgc

SEQ ID NO: 70340 - DNA, 25 bp, probe
tcggattaaactacatcaagaagat

SEQ ID NO: 70341 - DNA, 25 bp, probe
cctgaagttcttaagctgtcattat

SEQ ID NO: 70342 - DNA, 25 bp, probe
tagtgcatcttcatggtgtctgatt

SEQ ID NO: 70343 - DNA, 25 bp, probe
ttagtgcatcttcatggtgtctgat

SEQ ID NO: 70344 - DNA, 25 bp, probe
aagttcttaagctgtcattatggaa

SEQ ID NO: 70345 - DNA, 25 bp, probe
tgtccttagtcaactgtaccactgt

SEQ ID NO: 70346 - DNA, 25 bp, probe
gtgtggagttgtgtgtggagttatg

SEQ ID NO: 70347 - DNA, 25 bp, probe
gtgtccttagtcaactgtaccactg

SEQ ID NO: 70348 - DNA, 25 bp, probe
ccctttgaccatagtcggattaaac

SEQ ID NO: 70349 - DNA, 25 bp, probe
agcccaaaggagttacattcttacc

SEQ ID NO: 70350 - DNA, 25 bp, probe
tcttagtgcatcttcatggtgtctg

SEQ ID NO: 70351 - DNA, 25 bp, probe
aaaggagttacattcttacccaggg

SEQ ID NO: 70352 - DNA, 25 bp, probe
ttgaccatagtcggattaaactaca

SEQ ID NO: 70353 - DNA, 25 bp, probe
accatagtcggattaaactacatca

SEQ ID NO: 70354 - DNA, 25 bp, probe
tgaccatagtcggattaaactacat

SEQ ID NO: 70355 - DNA, 25 bp, probe
ggagttgtgtgtggagttatggaga

SEQ ID NO: 70356 - DNA, 25 bp, probe
tgtgtccttagtcaactgtaccact

SEQ ID NO: 70357 - DNA, 25 bp, probe
gatggtaggattcagttctgtggtg

SEQ ID NO: 70358 - DNA, 25 bp, probe
tctcagaagaaacagatcaaaggtt

SEQ ID NO: 70359 - DNA, 25 bp, probe
cagtctcagaagaaacagatcaaag

SEQ ID NO: 70360 - DNA, 25 bp, probe
agtctcagaagaaacagatcaaagg

SEQ ID NO: 70361 - DNA, 25 bp, probe
gtctcagaagaaacagatcaaaggt

SEQ ID NO: 70362 - DNA, 25 bp, probe
ccagtctcagaagaaacagatcaaa

SEQ ID NO: 70363 - DNA, 25 bp, probe
cgatggtaggattcagttctgtggt

SEQ ID NO: 70364 - DNA, 25 bp, probe
gccagtctcagaagaaacagatcaa

SEQ ID NO: 70365 - DNA, 25 bp, probe
ctcagaagaaacagatcaaaggttt

SEQ ID NO: 70366 - DNA, 25 bp, probe
taggattcagttctgtggtgcatct

SEQ ID NO: 70367 - DNA, 25 bp, probe
gtaggattcagttctgtggtgcatc

SEQ ID NO: 70368 - DNA, 25 bp, probe
gagccagtctcagaagaaacagatc

SEQ ID NO: 70369 - DNA, 25 bp, probe
atggtaggattcagttctgtggtgc

SEQ ID NO: 70370 - DNA, 25 bp, probe
ccgatggtaggattcagttctgtgg

SEQ ID NO: 70371 - DNA, 25 bp, probe
agccagtctcagaagaaacagatca

SEQ ID NO: 70372 - DNA, 25 bp, probe
ctagcccgatggtaggattcagttc

SEQ ID NO: 70373 - DNA, 25 bp, probe
ggtaggattcagttctgtggtgcat

SEQ ID NO: 70374 - DNA, 25 bp, probe
tagcccgatggtaggattcagttct

SEQ ID NO: 70375 - DNA, 25 bp, probe
cccgatggtaggattcagttctgtg

SEQ ID NO: 70376 - DNA, 25 bp, probe
tcagaagaaacagatcaaaggtttt

SEQ ID NO: 70377 - DNA, 25 bp, probe
aggattcagttctgtggtgcatctg

SEQ ID NO: 70378 - DNA, 25 bp, probe
gattcagttctgtggtgcatctgag

SEQ ID NO: 70379 - DNA, 25 bp, probe
tgagccagtctcagaagaaacagat

SEQ ID NO: 70380 - DNA, 25 bp, probe
ggaccatgcactgagttactggaag

SEQ ID NO: 70381 - DNA, 25 bp, probe
ggattcagttctgtggtgcatctga

SEQ ID NO: 70382 - DNA, 25 bp, probe
ttgaagaacaactacagtgaggacc

SEQ ID NO: 70383 - DNA, 25 bp, probe
ctttgaagaacaactacagtgagga

SEQ ID NO: 70384 - DNA, 25 bp, probe
tgaagaacaactacagtgaggacct

SEQ ID NO: 70385 - DNA, 25 bp, probe
tttgaagaacaactacagtgaggac

SEQ ID NO: 70386 - DNA, 25 bp, probe
gaagaacaactacagtgaggacctg

SEQ ID NO: 70387 - DNA, 25 bp, probe
gcctttgaagaacaactacagtgag

SEQ ID NO: 70388 - DNA, 25 bp, probe
catgtttagtgaccagaatttcctg

SEQ ID NO: 70389 - DNA, 25 bp, probe
cagtgcctttgaagaacaactacag

SEQ ID NO: 70390 - DNA, 25 bp, probe
cctttgaagaacaactacagtgagg

SEQ ID NO: 70391 - DNA, 25 bp, probe
tgcctttgaagaacaactacagtga

SEQ ID NO: 70392 - DNA, 25 bp, probe
gtgcctttgaagaacaactacagtg

SEQ ID NO: 70393 - DNA, 25 bp, probe
agtgcctttgaagaacaactacagt

SEQ ID NO: 70394 - DNA, 25 bp, probe
cttcacagtggacaatggactcaac

SEQ ID NO: 70395 - DNA, 25 bp, probe
cagtaaccctgaatttgcctttctg

SEQ ID NO: 70396 - DNA, 25 bp, probe
aagaacaactacagtgaggacctgg

SEQ ID NO: 70397 - DNA, 25 bp, probe
gatacagagcagtgcctttgaagaa

SEQ ID NO: 70398 - DNA, 25 bp, probe
gagtatgacagcaccaagcagaaga

SEQ ID NO: 70399 - DNA, 25 bp, probe
atacagagcagtgcctttgaagaac

SEQ ID NO: 70400 - DNA, 25 bp, probe
gaacaactacagtgaggacctggag

SEQ ID NO: 70401 - DNA, 25 bp, probe
tatgacagcaccaagcagaagacag

SEQ ID NO: 70402 - DNA, 25 bp, probe
agtatgacagcaccaagcagaagac

SEQ ID NO: 70403 - DNA, 25 bp, probe
tgagtatgacagcaccaagcagaag

SEQ ID NO: 70404 - DNA, 25 bp, probe
agtaaccctgaatttgcctttctgc

SEQ ID NO: 70405 - DNA, 25 bp, probe
gagcagtgcctttgaagaacaacta

SEQ ID NO: 70406 - DNA, 25 bp, probe
cttccacttccagatcagtaaccct

SEQ ID NO: 70407 - DNA, 25 bp, probe
ccttcacagtggacaatggactcaa

SEQ ID NO: 70408 - DNA, 25 bp, probe
cttcgtggtgtatgaggaagacatg

SEQ ID NO: 70409 - DNA, 25 bp, probe
gtatgacagcaccaagcagaagaca

SEQ ID NO: 70410 - DNA, 25 bp, probe
agaacaactacagtgaggacctgga

SEQ ID NO: 70411 - DNA, 25 bp, probe
agcagtgcctttgaagaacaactac

SEQ ID NO: 70412 - DNA, 25 bp, probe
gacatgtttagtgaccagaatttcc

SEQ ID NO: 70413 - DNA, 25 bp, probe
acatgtttagtgaccagaatttcct

SEQ ID NO: 70414 - DNA, 25 bp, probe
agacatgtttagtgaccagaatttc

SEQ ID NO: 70415 - DNA, 25 bp, probe
gaagacatgtttagtgaccagaatt

SEQ ID NO: 70416 - DNA, 25 bp, probe
ggaagacatgtttagtgaccagaat

SEQ ID NO: 70417 - DNA, 25 bp, probe
tatgaggaagacatgtttagtgacc

SEQ ID NO: 70418 - DNA, 25 bp, probe
ttcacagtggacaatggactcaacc

SEQ ID NO: 70419 - DNA, 25 bp, probe
ctgagtatgacagcaccaagcagaa

SEQ ID NO: 70420 - DNA, 25 bp, probe
cttccagatcagtaaccctgaattt

SEQ ID NO: 70421 - DNA, 25 bp, probe
agagtttgtgggtcagtctgtcttc

SEQ ID NO: 70422 - DNA, 25 bp, probe
gtatgaggaagacatgtttagtgac

SEQ ID NO: 70423 - DNA, 25 bp, probe
aagacatgtttagtgaccagaattt

SEQ ID NO: 70424 - DNA, 25 bp, probe
ttccagatcagtaaccctgaatttg

SEQ ID NO: 70425 - DNA, 25 bp, probe
gcagtgcctttgaagaacaactaca

SEQ ID NO: 70426 - DNA, 25 bp, probe
gcaggttatatcaggtcaattctta

SEQ ID NO: 70427 - DNA, 25 bp, probe
gaactcgcatggttatgaataatgg

SEQ ID NO: 70428 - DNA, 25 bp, probe
aactcgcatggttatgaataatgga

SEQ ID NO: 70429 - DNA, 25 bp, probe
cgaactcgcatggttatgaataatg

SEQ ID NO: 70430 - DNA, 25 bp, probe
tcgcatggttatgaataatggactc

SEQ ID NO: 70431 - DNA, 25 bp, probe
ctcgcatggttatgaataatggact

SEQ ID NO: 70432 - DNA, 25 bp, probe
gcatggttatgaataatggactcaa

SEQ ID NO: 70433 - DNA, 25 bp, probe
actcgcatggttatgaataatggac

SEQ ID NO: 70434 - DNA, 25 bp, probe
ctgtcttgagaatagctgtgtatga

SEQ ID NO: 70435 - DNA, 25 bp, probe
tgtcttgagaatagctgtgtatgat

SEQ ID NO: 70436 - DNA, 25 bp, probe
tcttgagaatagctgtgtatgatga

SEQ ID NO: 70437 - DNA, 25 bp, probe
gtcttgagaatagctgtgtatgatg

SEQ ID NO: 70438 - DNA, 25 bp, probe
cgcatggttatgaataatggactca

SEQ ID NO: 70439 - DNA, 25 bp, probe
ccgaactcgcatggttatgaataat

SEQ ID NO: 70440 - DNA, 25 bp, probe
atgatgataacaacaagctgattgg

SEQ ID NO: 70441 - DNA, 25 bp, probe
tgcaggttatatcaggtcaattctt

SEQ ID NO: 70442 - DNA, 25 bp, probe
tggttatgaataatggactcaatcc

SEQ ID NO: 70443 - DNA, 25 bp, probe
gtgcaggttatatcaggtcaattct

SEQ ID NO: 70444 - DNA, 25 bp, probe
agtgcaggttatatcaggtcaattc

SEQ ID NO: 70445 - DNA, 25 bp, probe
cttgagaatagctgtgtatgatgat

SEQ ID NO: 70446 - DNA, 25 bp, probe
aagagtcatttgtatttcggaaggt

SEQ ID NO: 70447 - DNA, 25 bp, probe
cagtgcaggttatatcaggtcaatt

SEQ ID NO: 70448 - DNA, 25 bp, probe
atgggaaatgagtcaaaggagtatt

SEQ ID NO: 70449 - DNA, 25 bp, probe
tgtgtatgatgataacaacaagctg

SEQ ID NO: 70450 - DNA, 25 bp, probe
gaagagtcatttgtatttcggaagg

SEQ ID NO: 70451 - DNA, 25 bp, probe
gtgtatgatgataacaacaagctga

SEQ ID NO: 70452 - DNA, 25 bp, probe
ctgtgtatgatgataacaacaagct

SEQ ID NO: 70453 - DNA, 25 bp, probe
agctgtgtatgatgataacaacaag

SEQ ID NO: 70454 - DNA, 25 bp, probe
gaaactcctgttgatggtgttattg

SEQ ID NO: 70455 - DNA, 25 bp, probe
agagtcatttgtatttcggaaggtg

SEQ ID NO: 70456 - DNA, 25 bp, probe
tgaaactcctgttgatggtgttatt

SEQ ID NO: 70457 - DNA, 25 bp, probe
tatgtgcctgatggatttggagata

SEQ ID NO: 70458 - DNA, 25 bp, probe
tcagtgcaggttatatcaggtcaat

SEQ ID NO: 70459 - DNA, 25 bp, probe
ctgaaactcctgttgatggtgttat

SEQ ID NO: 70460 - DNA, 25 bp, probe
tccgaactcgcatggttatgaataa

SEQ ID NO: 70461 - DNA, 25 bp, probe
ttccgaactcgcatggttatgaata

SEQ ID NO: 70462 - DNA, 25 bp, probe
agtcatttgtatttcggaaggtgat

SEQ ID NO: 70463 - DNA, 25 bp, probe
tgaagagtcatttgtatttcggaag

SEQ ID NO: 70464 - DNA, 25 bp, probe
caatccagtttacaatgaagagtca

SEQ ID NO: 70465 - DNA, 25 bp, probe
tgtatgatgataacaacaagctgat

SEQ ID NO: 70466 - DNA, 25 bp, probe
gctgtgtatgatgataacaacaagc

SEQ ID NO: 70467 - DNA, 25 bp, probe
tcaatccagtttacaatgaagagtc

SEQ ID NO: 70468 - DNA, 25 bp, probe
gactcaatccagtttacaatgaaga

SEQ ID NO: 70469 - DNA, 25 bp, probe
gtatgatgataacaacaagctgatt

SEQ ID NO: 70470 - DNA, 25 bp, probe
aacagtatgagttctgctacaaggt

SEQ ID NO: 70471 - DNA, 25 bp, probe
acagtatgagttctgctacaaggtg

SEQ ID NO: 70472 - DNA, 25 bp, probe
gtatgagttctgctacaaggtggtg

SEQ ID NO: 70473 - DNA, 25 bp, probe
agtatgagttctgctacaaggtggt

SEQ ID NO: 70474 - DNA, 25 bp, probe
ctacaaggtggtgcaggagtatatt

SEQ ID NO: 70475 - DNA, 25 bp, probe
cagtatgagttctgctacaaggtgg

SEQ ID NO: 70476 - DNA, 25 bp, probe
aaggtggtgcaggagtatattgatg

SEQ ID NO: 70477 - DNA, 25 bp, probe
tacaaggtggtgcaggagtatattg

SEQ ID NO: 70478 - DNA, 25 bp, probe
caaggtggtgcaggagtatattgat

SEQ ID NO: 70479 - DNA, 25 bp, probe
gaacagtatgagttctgctacaagg

SEQ ID NO: 70480 - DNA, 25 bp, probe
ggaacagtatgagttctgctacaag

SEQ ID NO: 70481 - DNA, 25 bp, probe
tggaacagtatgagttctgctacaa

SEQ ID NO: 70482 - DNA, 25 bp, probe
tatgagttctgctacaaggtggtgc

SEQ ID NO: 70483 - DNA, 25 bp, probe
acaaggtggtgcaggagtatattga

SEQ ID NO: 70484 - DNA, 25 bp, probe
ctggaacagtatgagttctgctaca

SEQ ID NO: 70485 - DNA, 25 bp, probe
tcaccaacaccagggagaataagag

SEQ ID NO: 70486 - DNA, 25 bp, probe
cttgaaaaggacctagagaagtgtg

SEQ ID NO: 70487 - DNA, 25 bp, probe
gctacaaggtggtgcaggagtatat

SEQ ID NO: 70488 - DNA, 25 bp, probe
gtcaccaacaccagggagaataaga

SEQ ID NO: 70489 - DNA, 25 bp, probe
ttgaaaaggacctagagaagtgtgc

SEQ ID NO: 70490 - DNA, 25 bp, probe
caccaacaccagggagaataagagc

SEQ ID NO: 70491 - DNA, 25 bp, probe
gaaagcagaggggattttggatgtc

SEQ ID NO: 70492 - DNA, 25 bp, probe
gtgaaagcagaggggattttggatg

SEQ ID NO: 70493 - DNA, 25 bp, probe
ttggatgtcttccagactgtcaaga

SEQ ID NO: 70494 - DNA, 25 bp, probe
ggtcaccaacaccagggagaataag

SEQ ID NO: 70495 - DNA, 25 bp, probe
aagcagaggggattttggatgtctt

SEQ ID NO: 70496 - DNA, 25 bp, probe
aaagcagaggggattttggatgtct

SEQ ID NO: 70497 - DNA, 25 bp, probe
tgaaaaggacctagagaagtgtgcc

SEQ ID NO: 70498 - DNA, 25 bp, probe
tgaaagcagaggggattttggatgt

SEQ ID NO: 70499 - DNA, 25 bp, probe
tgtgaaagcagaggggattttggat

SEQ ID NO: 70500 - DNA, 25 bp, probe
tggatgtcttccagactgtcaagag

SEQ ID NO: 70501 - DNA, 25 bp, probe
tttggatgtcttccagactgtcaag

SEQ ID NO: 70502 - DNA, 25 bp, probe
agcagaggggattttggatgtcttc

SEQ ID NO: 70503 - DNA, 25 bp, probe
gatgtcttccagactgtcaagagcc

SEQ ID NO: 70504 - DNA, 25 bp, probe
ggatgtcttccagactgtcaagagc

SEQ ID NO: 70505 - DNA, 25 bp, probe
tgctacaaggtggtgcaggagtata

SEQ ID NO: 70506 - DNA, 25 bp, probe
gaaaaggacctagagaagtgtgccc

SEQ ID NO: 70507 - DNA, 25 bp, probe
ccttgaaaaggacctagagaagtgt

SEQ ID NO: 70508 - DNA, 25 bp, probe
tgtgataaaatgtggcccagtgaac

SEQ ID NO: 70509 - DNA, 25 bp, probe
gacctagagaagtgtgcccagtact

SEQ ID NO: 70510 - DNA, 25 bp, probe
gattttggatgtcttccagactgtc

SEQ ID NO: 70511 - DNA, 25 bp, probe
ctgtgataaaatgtggcccagtgaa

SEQ ID NO: 70512 - DNA, 25 bp, probe
gataaaatgtggcccagtgaacatc

SEQ ID NO: 70513 - DNA, 25 bp, probe
gtgataaaatgtggcccagtgaaca

SEQ ID NO: 70514 - DNA, 25 bp, probe
tatgaccaaatctccgataagacag

SEQ ID NO: 70515 - DNA, 25 bp, probe
ttatgaccaaatctccgataagaca

SEQ ID NO: 70516 - DNA, 25 bp, probe
gtgaattatgaccaaatctccgata

SEQ ID NO: 70517 - DNA, 25 bp, probe
atgaccaaatctccgataagacaga

SEQ ID NO: 70518 - DNA, 25 bp, probe
accaaatctccgataagacagacat

SEQ ID NO: 70519 - DNA, 25 bp, probe
attatgaccaaatctccgataagac

SEQ ID NO: 70520 - DNA, 25 bp, probe
atttggtgaagatcattgactttgg

SEQ ID NO: 70521 - DNA, 25 bp, probe
gcatttggtgaagatcattgacttt

SEQ ID NO: 70522 - DNA, 25 bp, probe
catttggtgaagatcattgactttg

SEQ ID NO: 70523 - DNA, 25 bp, probe
tgaattatgaccaaatctccgataa

SEQ ID NO: 70524 - DNA, 25 bp, probe
gaccaaatctccgataagacagaca

SEQ ID NO: 70525 - DNA, 25 bp, probe
tgaccaaatctccgataagacagac

SEQ ID NO: 70526 - DNA, 25 bp, probe
ccaaatctccgataagacagacatg

SEQ ID NO: 70527 - DNA, 25 bp, probe
aattatgaccaaatctccgataaga

SEQ ID NO: 70528 - DNA, 25 bp, probe
gaattatgaccaaatctccgataag

SEQ ID NO: 70529 - DNA, 25 bp, probe
ggtgaattatgaccaaatctccgat

SEQ ID NO: 70530 - DNA, 25 bp, probe
ggcatttggtgaagatcattgactt

SEQ ID NO: 70531 - DNA, 25 bp, probe
tttggtgaagatcattgactttggc

SEQ ID NO: 70532 - DNA, 25 bp, probe
gataagacagacatgtggagtatgg

SEQ ID NO: 70533 - DNA, 25 bp, probe
cgataagacagacatgtggagtatg

SEQ ID NO: 70534 - DNA, 25 bp, probe
attgtggatgaggactaccatctga

SEQ ID NO: 70535 - DNA, 25 bp, probe
ccgataagacagacatgtggagtat

SEQ ID NO: 70536 - DNA, 25 bp, probe
gggcatttggtgaagatcattgact

SEQ ID NO: 70537 - DNA, 25 bp, probe
aatctccgataagacagacatgtgg

SEQ ID NO: 70538 - DNA, 25 bp, probe
ccagagaacatcctgtgtgtcaaca

SEQ ID NO: 70539 - DNA, 25 bp, probe
ttgtggatgaggactaccatctgac

SEQ ID NO: 70540 - DNA, 25 bp, probe
aacgagaagctgaaggtgaactttg

SEQ ID NO: 70541 - DNA, 25 bp, probe
caacgagaagctgaaggtgaacttt

SEQ ID NO: 70542 - DNA, 25 bp, probe
tccgataagacagacatgtggagta

SEQ ID NO: 70543 - DNA, 25 bp, probe
aaatctccgataagacagacatgtg

SEQ ID NO: 70544 - DNA, 25 bp, probe
caaatctccgataagacagacatgt

SEQ ID NO: 70545 - DNA, 25 bp, probe
atctccgataagacagacatgtgga

SEQ ID NO: 70546 - DNA, 25 bp, probe
ataagacagacatgtggagtatggg

SEQ ID NO: 70547 - DNA, 25 bp, probe
cgggcatttggtgaagatcattgac

SEQ ID NO: 70548 - DNA, 25 bp, probe
gtataaccccaacgagaagctgaag

SEQ ID NO: 70549 - DNA, 25 bp, probe
ctcttcatgcacaagatgagggttt

SEQ ID NO: 70550 - DNA, 25 bp, probe
gagaagctgaaggtgaactttggga

SEQ ID NO: 70551 - DNA, 25 bp, probe
aggtggtgaattatgaccaaatctc

SEQ ID NO: 70552 - DNA, 25 bp, probe
gaggtggtgaattatgaccaaatct

SEQ ID NO: 70553 - DNA, 25 bp, probe
tgaggtggtgaattatgaccaaatc

SEQ ID NO: 70554 - DNA, 25 bp, probe
ctgaggtggtgaattatgaccaaat

SEQ ID NO: 70555 - DNA, 25 bp, probe
ttggtgaagatcattgactttggcc

SEQ ID NO: 70556 - DNA, 25 bp, probe
cagagaacatcctgtgtgtcaacac

SEQ ID NO: 70557 - DNA, 25 bp, probe
agaagctgaaggtgaactttgggac

SEQ ID NO: 70558 - DNA, 25 bp, probe
atctctctgaaggactggtaactaa

SEQ ID NO: 70559 - DNA, 25 bp, probe
tgatgaagaagtaaggaagtgtgaa

SEQ ID NO: 70560 - DNA, 25 bp, probe
ctgatgaagaagtaaggaagtgtga

SEQ ID NO: 70561 - DNA, 25 bp, probe
atgaagaagtaaggaagtgtgaagg

SEQ ID NO: 70562 - DNA, 25 bp, probe
gatgaagaagtaaggaagtgtgaag

SEQ ID NO: 70563 - DNA, 25 bp, probe
gaagaagtaaggaagtgtgaaggag

SEQ ID NO: 70564 - DNA, 25 bp, probe
catctctctgaaggactggtaacta

SEQ ID NO: 70565 - DNA, 25 bp, probe
ttggtattgatgaagttctgcttga

SEQ ID NO: 70566 - DNA, 25 bp, probe
gaagtaaggaagtgtgaaggagttg

SEQ ID NO: 70567 - DNA, 25 bp, probe
agaagtaaggaagtgtgaaggagtt

SEQ ID NO: 70568 - DNA, 25 bp, probe
aagaagtaaggaagtgtgaaggagt

SEQ ID NO: 70569 - DNA, 25 bp, probe
tgaagaagtaaggaagtgtgaagga

SEQ ID NO: 70570 - DNA, 25 bp, probe
tattgatgaagttctgcttgacctg

SEQ ID NO: 70571 - DNA, 25 bp, probe
gtattgatgaagttctgcttgacct

SEQ ID NO: 70572 - DNA, 25 bp, probe
aagtaaggaagtgtgaaggagttga

SEQ ID NO: 70573 - DNA, 25 bp, probe
actgatgaagaagtaaggaagtgtg

SEQ ID NO: 70574 - DNA, 25 bp, probe
tggtattgatgaagttctgcttgac

SEQ ID NO: 70575 - DNA, 25 bp, probe
agtaaggaagtgtgaaggagttgag

SEQ ID NO: 70576 - DNA, 25 bp, probe
atcatctctctgaaggactggtaac

SEQ ID NO: 70577 - DNA, 25 bp, probe
ataaggatcatctctctgaaggact

SEQ ID NO: 70578 - DNA, 25 bp, probe
cataaggatcatctctctgaaggac

SEQ ID NO: 70579 - DNA, 25 bp, probe
atcactgatgaagaagtaaggaagt

SEQ ID NO: 70580 - DNA, 25 bp, probe
taaggatcatctctctgaaggactg

SEQ ID NO: 70581 - DNA, 25 bp, probe
ccataaggatcatctctctgaagga

SEQ ID NO: 70582 - DNA, 25 bp, probe
gatcatctctctgaaggactggtaa

SEQ ID NO: 70583 - DNA, 25 bp, probe
attgatgaagttctgcttgacctga

SEQ ID NO: 70584 - DNA, 25 bp, probe
tcatctctctgaaggactggtaact

SEQ ID NO: 70585 - DNA, 25 bp, probe
gtaaggaagtgtgaaggagttgagg

SEQ ID NO: 70586 - DNA, 25 bp, probe
taaggaagtgtgaaggagttgagga

SEQ ID NO: 70587 - DNA, 25 bp, probe
ctgaaggactggtaactaaatggta

SEQ ID NO: 70588 - DNA, 25 bp, probe
tctctgaaggactggtaactaaatg

SEQ ID NO: 70589 - DNA, 25 bp, probe
tctctctgaaggactggtaactaaa

SEQ ID NO: 70590 - DNA, 25 bp, probe
ctctctgaaggactggtaactaaat

SEQ ID NO: 70591 - DNA, 25 bp, probe
ctctgaaggactggtaactaaatgg

SEQ ID NO: 70592 - DNA, 25 bp, probe
attaccaccttctgctatggaatct

SEQ ID NO: 70593 - DNA, 25 bp, probe
cattaccaccttctgctatggaatc

SEQ ID NO: 70594 - DNA, 25 bp, probe
tttggtattgatgaagttctgcttg

SEQ ID NO: 70595 - DNA, 25 bp, probe
ttaccaccttctgctatggaatctt

SEQ ID NO: 70596 - DNA, 25 bp, probe
ctttggtattgatgaagttctgctt

SEQ ID NO: 70597 - DNA, 25 bp, probe
tatcactgatgaagaagtaaggaag

SEQ ID NO: 70598 - DNA, 25 bp, probe
tctgaaggactggtaactaaatggt

SEQ ID NO: 70599 - DNA, 25 bp, probe
ttgatgaagttctgcttgacctgag

SEQ ID NO: 70600 - DNA, 25 bp, probe
acattaccaccttctgctatggaat

SEQ ID NO: 70601 - DNA, 25 bp, probe
taccaccttctgctatggaatcttc

SEQ ID NO: 70602 - DNA, 25 bp, probe
ctcagcatcctcctcttcctctatt

SEQ ID NO: 70603 - DNA, 25 bp, probe
catcctcctcttcctctatttcctg

SEQ ID NO: 70604 - DNA, 25 bp, probe
ctatttcctggagtcatgtgagatt

SEQ ID NO: 70605 - DNA, 25 bp, probe
tatttcctggagtcatgtgagattt

SEQ ID NO: 70606 - DNA, 25 bp, probe
atttcctggagtcatgtgagatttc

SEQ ID NO: 70607 - DNA, 25 bp, probe
tctatttcctggagtcatgtgagat

SEQ ID NO: 70608 - DNA, 25 bp, probe
cagcatcctcctcttcctctatttc

SEQ ID NO: 70609 - DNA, 25 bp, probe
tttcctggagtcatgtgagatttct

SEQ ID NO: 70610 - DNA, 25 bp, probe
atcctcctcttcctctatttcctgg

SEQ ID NO: 70611 - DNA, 25 bp, probe
tcagcatcctcctcttcctctattt

SEQ ID NO: 70612 - DNA, 25 bp, probe
ctcttcctctatttcctggagtcat

SEQ ID NO: 70613 - DNA, 25 bp, probe
ctctatttcctggagtcatgtgaga

SEQ ID NO: 70614 - DNA, 25 bp, probe
ttcctggagtcatgtgagatttctg

SEQ ID NO: 70615 - DNA, 25 bp, probe
gcatcctcctcttcctctatttcct

SEQ ID NO: 70616 - DNA, 25 bp, probe
agcatcctcctcttcctctatttcc

SEQ ID NO: 70617 - DNA, 25 bp, probe
tcttcctctatttcctggagtcatg

SEQ ID NO: 70618 - DNA, 25 bp, probe
cctctatttcctggagtcatgtgag

SEQ ID NO: 70619 - DNA, 25 bp, probe
cttcctctatttcctggagtcatgt

SEQ ID NO: 70620 - DNA, 25 bp, probe
ttcctctatttcctggagtcatgtg

SEQ ID NO: 70621 - DNA, 25 bp, probe
cctggagtcatgtgagatttctgtc

SEQ ID NO: 70622 - DNA, 25 bp, probe
tcctcttcctctatttcctggagtc

SEQ ID NO: 70623 - DNA, 25 bp, probe
tcctggagtcatgtgagatttctgt

SEQ ID NO: 70624 - DNA, 25 bp, probe
cctcttcctctatttcctggagtca

SEQ ID NO: 70625 - DNA, 25 bp, probe
tcctctatttcctggagtcatgtga

SEQ ID NO: 70626 - DNA, 25 bp, probe
ggagtcatgtgagatttctgtcctc

SEQ ID NO: 70627 - DNA, 25 bp, probe
ctatgacgactccgacatcaggaag

SEQ ID NO: 70628 - DNA, 25 bp, probe
ctggagtcatgtgagatttctgtcc

SEQ ID NO: 70629 - DNA, 25 bp, probe
tcctcctcttcctctatttcctgga

SEQ ID NO: 70630 - DNA, 25 bp, probe
tggagtcatgtgagatttctgtcct

SEQ ID NO: 70631 - DNA, 25 bp, probe
gctcagcatcctcctcttcctctat

SEQ ID NO: 70632 - DNA, 25 bp, probe
tatgacgactccgacatcaggaaga

SEQ ID NO: 70633 - DNA, 25 bp, probe
agtcatgtgagatttctgtcctcag

SEQ ID NO: 70634 - DNA, 25 bp, probe
gagtcatgtgagatttctgtcctca

SEQ ID NO: 70635 - DNA, 25 bp, probe
atttctgtcctcagccctcaagttc

SEQ ID NO: 70636 - DNA, 25 bp, probe
gatttctgtcctcagccctcaagtt

SEQ ID NO: 70637 - DNA, 25 bp, probe
gagatttctgtcctcagccctcaag

SEQ ID NO: 70638 - DNA, 25 bp, probe
gtcatgtgagatttctgtcctcagc

SEQ ID NO: 70639 - DNA, 25 bp, probe
ctcctcttcctctatttcctggagt

SEQ ID NO: 70640 - DNA, 25 bp, probe
tcatgtgagatttctgtcctcagcc

SEQ ID NO: 70641 - DNA, 25 bp, probe
cctcctcttcctctatttcctggag

SEQ ID NO: 70642 - DNA, 25 bp, probe
cttacgactccaacatcaggaagat

SEQ ID NO: 70643 - DNA, 25 bp, probe
ttacgactccaacatcaggaagatg

SEQ ID NO: 70644 - DNA, 25 bp, probe
ccttacgactccaacatcaggaaga

SEQ ID NO: 70645 - DNA, 25 bp, probe
actgccctctatggtcttcaacaag

SEQ ID NO: 70646 - DNA, 25 bp, probe
gactgccctctatggtcttcaacaa

SEQ ID NO: 70647 - DNA, 25 bp, probe
caacatcaggaagatgctgcgtatc

SEQ ID NO: 70648 - DNA, 25 bp, probe
catggtgtatgacatctggagcctg

SEQ ID NO: 70649 - DNA, 25 bp, probe
tacgactccaacatcaggaagatgc

SEQ ID NO: 70650 - DNA, 25 bp, probe
gccctctatggtcttcaacaaggag

SEQ ID NO: 70651 - DNA, 25 bp, probe
ctgccctctatggtcttcaacaagg

SEQ ID NO: 70652 - DNA, 25 bp, probe
atgatcctctacatcatggtctgca

SEQ ID NO: 70653 - DNA, 25 bp, probe
ctctatggtcttcaacaaggagggg

SEQ ID NO: 70654 - DNA, 25 bp, probe
aacatcaggaagatgctgcgtatcc

SEQ ID NO: 70655 - DNA, 25 bp, probe
cctctatggtcttcaacaaggaggg

SEQ ID NO: 70656 - DNA, 25 bp, probe
ccctctatggtcttcaacaaggagg

SEQ ID NO: 70657 - DNA, 25 bp, probe
ctaccagcccatggtgtatgacatc

SEQ ID NO: 70658 - DNA, 25 bp, probe
taccagcccatggtgtatgacatct

SEQ ID NO: 70659 - DNA, 25 bp, probe
gctatggaacttctggactgtaatt

SEQ ID NO: 70660 - DNA, 25 bp, probe
ggctatggaacttctggactgtaat

SEQ ID NO: 70661 - DNA, 25 bp, probe
ttaattcagctagtacaggtcctaa

SEQ ID NO: 70662 - DNA, 25 bp, probe
tttggataacttgcttgtgagattt

SEQ ID NO: 70663 - DNA, 25 bp, probe
atttggataacttgcttgtgagatt

SEQ ID NO: 70664 - DNA, 25 bp, probe
aggctatggaacttctggactgtaa

SEQ ID NO: 70665 - DNA, 25 bp, probe
ctatggaacttctggactgtaatta

SEQ ID NO: 70666 - DNA, 25 bp, probe
caggagaagaaggatgaaacacaaa

SEQ ID NO: 70667 - DNA, 25 bp, probe
aaacaggagaagaaggatgaaacac

SEQ ID NO: 70668 - DNA, 25 bp, probe
caaacaggagaagaaggatgaaaca

SEQ ID NO: 70669 - DNA, 25 bp, probe
agctcattaacttaactgacattgt

SEQ ID NO: 70670 - DNA, 25 bp, probe
gctcattaacttaactgacattgtc

SEQ ID NO: 70671 - DNA, 25 bp, probe
tatttggataacttgcttgtgagat

SEQ ID NO: 70672 - DNA, 25 bp, probe
atatttggataacttgcttgtgaga

SEQ ID NO: 70673 - DNA, 25 bp, probe
aagttgtgtgactctagtctgtgtt

SEQ ID NO: 70674 - DNA, 25 bp, probe
tcaaacaggagaagaaggatgaaac

SEQ ID NO: 70675 - DNA, 25 bp, probe
gtcaaacaggagaagaaggatgaaa

SEQ ID NO: 70676 - DNA, 25 bp, probe
gctagagacaatgaattaagggaaa

SEQ ID NO: 70677 - DNA, 25 bp, probe
acaggagaagaaggatgaaacacaa

SEQ ID NO: 70678 - DNA, 25 bp, probe
aacaggagaagaaggatgaaacaca

SEQ ID NO: 70679 - DNA, 25 bp, probe
aagctcattaacttaactgacattg

SEQ ID NO: 70680 - DNA, 25 bp, probe
attgtcaaacaggagaagaaggatg

SEQ ID NO: 70681 - DNA, 25 bp, probe
cattgtcaaacaggagaagaaggat

SEQ ID NO: 70682 - DNA, 25 bp, probe
ctcaaagcaatttctacacgagatc

SEQ ID NO: 70683 - DNA, 25 bp, probe
tactgaagaaagcattgactaatca

SEQ ID NO: 70684 - DNA, 25 bp, probe
caaagcaatttctacacgagatcct

SEQ ID NO: 70685 - DNA, 25 bp, probe
tcaaagcaatttctacacgagatcc

SEQ ID NO: 70686 - DNA, 25 bp, probe
aaagcaatttctacacgagatcctc

SEQ ID NO: 70687 - DNA, 25 bp, probe
agctagagacaatgaattaagggaa

SEQ ID NO: 70688 - DNA, 25 bp, probe
atttaattcagctagtacaggtcct

SEQ ID NO: 70689 - DNA, 25 bp, probe
tgtcaaacaggagaagaaggatgaa

SEQ ID NO: 70690 - DNA, 25 bp, probe
ttgtcaaacaggagaagaaggatga

SEQ ID NO: 70691 - DNA, 25 bp, probe
ttactgaagaaagcattgactaatc

SEQ ID NO: 70692 - DNA, 25 bp, probe
acattgtcaaacaggagaagaagga

SEQ ID NO: 70693 - DNA, 25 bp, probe
taattcagctagtacaggtcctaaa

SEQ ID NO: 70694 - DNA, 25 bp, probe
tttaattcagctagtacaggtccta

SEQ ID NO: 70695 - DNA, 25 bp, probe
aagcaatttctacacgagatcctct

SEQ ID NO: 70696 - DNA, 25 bp, probe
caggctatggaacttctggactgta

SEQ ID NO: 70697 - DNA, 25 bp, probe
tttactgaagaaagcattgactaat

SEQ ID NO: 70698 - DNA, 25 bp, probe
aatatttggataacttgcttgtgag

SEQ ID NO: 70699 - DNA, 25 bp, probe
caatatttggataacttgcttgtga

SEQ ID NO: 70700 - DNA, 25 bp, probe
gttgtgtgactctagtctgtgtttg

SEQ ID NO: 70701 - DNA, 25 bp, probe
ttgtgtgactctagtctgtgtttga

SEQ ID NO: 70702 - DNA, 25 bp, probe
agttgtgtgactctagtctgtgttt

SEQ ID NO: 70703 - DNA, 25 bp, probe
gacatctatgagaaggaagtccgtt

SEQ ID NO: 70704 - DNA, 25 bp, probe
tggagaaggaaactgacaaatactg

SEQ ID NO: 70705 - DNA, 25 bp, probe
gtggagaaggaaactgacaaatact

SEQ ID NO: 70706 - DNA, 25 bp, probe
ccgtttgatgattccactaaagaag

SEQ ID NO: 70707 - DNA, 25 bp, probe
cctgacatctatgagaaggaagtcc

SEQ ID NO: 70708 - DNA, 25 bp, probe
tccgtttgatgattccactaaagaa

SEQ ID NO: 70709 - DNA, 25 bp, probe
gtccgtttgatgattccactaaaga

SEQ ID NO: 70710 - DNA, 25 bp, probe
ctgacatctatgagaaggaagtccg

SEQ ID NO: 70711 - DNA, 25 bp, probe
gagaaggaaactgacaaatactggg

SEQ ID NO: 70712 - DNA, 25 bp, probe
ggagaaggaaactgacaaatactgg

SEQ ID NO: 70713 - DNA, 25 bp, probe
cgtttgatgattccactaaagaagt

SEQ ID NO: 70714 - DNA, 25 bp, probe
ctatgagaaggaagtccgtttgatg

SEQ ID NO: 70715 - DNA, 25 bp, probe
aagtccgtttgatgattccactaaa

SEQ ID NO: 70716 - DNA, 25 bp, probe
cgtggagaaggaaactgacaaatac

SEQ ID NO: 70717 - DNA, 25 bp, probe
agtccgtttgatgattccactaaag

SEQ ID NO: 70718 - DNA, 25 bp, probe
gaagtccgtttgatgattccactaa

SEQ ID NO: 70719 - DNA, 25 bp, probe
tatgagaaggaagtccgtttgatga

SEQ ID NO: 70720 - DNA, 25 bp, probe
tctatgagaaggaagtccgtttgat

SEQ ID NO: 70721 - DNA, 25 bp, probe
atctatgagaaggaagtccgtttga

SEQ ID NO: 70722 - DNA, 25 bp, probe
catctatgagaaggaagtccgtttg

SEQ ID NO: 70723 - DNA, 25 bp, probe
gaatgatccctgacatctatgagaa

SEQ ID NO: 70724 - DNA, 25 bp, probe
aatgatccctgacatctatgagaag

SEQ ID NO: 70725 - DNA, 25 bp, probe
tgacatctatgagaaggaagtccgt

SEQ ID NO: 70726 - DNA, 25 bp, probe
tccactaaagaagttgaagtacctg

SEQ ID NO: 70727 - DNA, 25 bp, probe
acatctatgagaaggaagtccgttt

SEQ ID NO: 70728 - DNA, 25 bp, probe
ttccactaaagaagttgaagtacct

SEQ ID NO: 70729 - DNA, 25 bp, probe
gagaaggaagtccgtttgatgattc

SEQ ID NO: 70730 - DNA, 25 bp, probe
atgattccactaaagaagttgaagt

SEQ ID NO: 70731 - DNA, 25 bp, probe
tgatgattccactaaagaagttgaa

SEQ ID NO: 70732 - DNA, 25 bp, probe
ttgatgattccactaaagaagttga

SEQ ID NO: 70733 - DNA, 25 bp, probe
atgagaaggaagtccgtttgatgat

SEQ ID NO: 70734 - DNA, 25 bp, probe
attccactaaagaagttgaagtacc

SEQ ID NO: 70735 - DNA, 25 bp, probe
tgagaaggaagtccgtttgatgatt

SEQ ID NO: 70736 - DNA, 25 bp, probe
cactaaagaagttgaagtacctggc

SEQ ID NO: 70737 - DNA, 25 bp, probe
gatgattccactaaagaagttgaag

SEQ ID NO: 70738 - DNA, 25 bp, probe
tgattccactaaagaagttgaagta

SEQ ID NO: 70739 - DNA, 25 bp, probe
tttgatgattccactaaagaagttg

SEQ ID NO: 70740 - DNA, 25 bp, probe
gtttgatgattccactaaagaagtt

SEQ ID NO: 70741 - DNA, 25 bp, probe
atccctgacatctatgagaaggaag

SEQ ID NO: 70742 - DNA, 25 bp, probe
atgatccctgacatctatgagaagg

SEQ ID NO: 70743 - DNA, 25 bp, probe
gatccctgacatctatgagaaggaa

SEQ ID NO: 70744 - DNA, 25 bp, probe
ccctgacatctatgagaaggaagtc

SEQ ID NO: 70745 - DNA, 25 bp, probe
ggaatgatccctgacatctatgaga

SEQ ID NO: 70746 - DNA, 25 bp, probe
ccactaaagaagttgaagtacctgg

SEQ ID NO: 70747 - DNA, 25 bp, probe
ctttgactggaacatgctgaaattc

SEQ ID NO: 70748 - DNA, 25 bp, probe
tctttgactggaacatgctgaaatt

SEQ ID NO: 70749 - DNA, 25 bp, probe
tttgactggaacatgctgaaattcg

SEQ ID NO: 70750 - DNA, 25 bp, probe
gtctttgactggaacatgctgaaat

SEQ ID NO: 70751 - DNA, 25 bp, probe
ttgactggaacatgctgaaattcgt

SEQ ID NO: 70752 - DNA, 25 bp, probe
gaacatgctgaaattcgtgagtcac

SEQ ID NO: 70753 - DNA, 25 bp, probe
tggaacatgctgaaattcgtgagtc

SEQ ID NO: 70754 - DNA, 25 bp, probe
ctggaacatgctgaaattcgtgagt

SEQ ID NO: 70755 - DNA, 25 bp, probe
actggaacatgctgaaattcgtgag

SEQ ID NO: 70756 - DNA, 25 bp, probe
gactggaacatgctgaaattcgtga

SEQ ID NO: 70757 - DNA, 25 bp, probe
agtcatggtgcttgctttcttcttg

SEQ ID NO: 70758 - DNA, 25 bp, probe
cagtcatggtgcttgctttcttctt

SEQ ID NO: 70759 - DNA, 25 bp, probe
ggaacatgctgaaattcgtgagtca

SEQ ID NO: 70760 - DNA, 25 bp, probe
tgactggaacatgctgaaattcgtg

SEQ ID NO: 70761 - DNA, 25 bp, probe
cgtctttgactggaacatgctgaaa

SEQ ID NO: 70762 - DNA, 25 bp, probe
aacatgctgaaattcgtgagtcacc

SEQ ID NO: 70763 - DNA, 25 bp, probe
tggtgcttgctttcttcttggtcat

SEQ ID NO: 70764 - DNA, 25 bp, probe
atggtgcttgctttcttcttggtca

SEQ ID NO: 70765 - DNA, 25 bp, probe
ctacgtctttgactggaacatgctg

SEQ ID NO: 70766 - DNA, 25 bp, probe
gtgcttgctttcttcttggtcatgg

SEQ ID NO: 70767 - DNA, 25 bp, probe
ggtgcttgctttcttcttggtcatg

SEQ ID NO: 70768 - DNA, 25 bp, probe
catggtgcttgctttcttcttggtc

SEQ ID NO: 70769 - DNA, 25 bp, probe
gtcatggtgcttgctttcttcttgg

SEQ ID NO: 70770 - DNA, 25 bp, probe
catgctgaaattcgtgagtcacctg

SEQ ID NO: 70771 - DNA, 25 bp, probe
tacgtctttgactggaacatgctga

SEQ ID NO: 70772 - DNA, 25 bp, probe
actacgtctttgactggaacatgct

SEQ ID NO: 70773 - DNA, 25 bp, probe
tcatggtgcttgctttcttcttggt

SEQ ID NO: 70774 - DNA, 25 bp, probe
acatgctgaaattcgtgagtcacct

SEQ ID NO: 70775 - DNA, 25 bp, probe
ctgaaattcgtgagtcacctggagg

SEQ ID NO: 70776 - DNA, 25 bp, probe
acgtctttgactggaacatgctgaa

SEQ ID NO: 70777 - DNA, 25 bp, probe
caagaagggtcatatcatccacatc

SEQ ID NO: 70778 - DNA, 25 bp, probe
acaagaagggtcatatcatccacat

SEQ ID NO: 70779 - DNA, 25 bp, probe
aagaagggtcatatcatccacatcg

SEQ ID NO: 70780 - DNA, 25 bp, probe
ttatgctggacaagaagggtcatat

SEQ ID NO: 70781 - DNA, 25 bp, probe
attatgctggacaagaagggtcata

SEQ ID NO: 70782 - DNA, 25 bp, probe
gacaagaagggtcatatcatccaca

SEQ ID NO: 70783 - DNA, 25 bp, probe
tatgctggacaagaagggtcatatc

SEQ ID NO: 70784 - DNA, 25 bp, probe
caacattatgctggacaagaagggt

SEQ ID NO: 70785 - DNA, 25 bp, probe
ctggacaagaagggtcatatcatcc

SEQ ID NO: 70786 - DNA, 25 bp, probe
cattatgctggacaagaagggtcat

SEQ ID NO: 70787 - DNA, 25 bp, probe
ggtcatatcatccacatcgactttg

SEQ ID NO: 70788 - DNA, 25 bp, probe
ggacaagaagggtcatatcatccac

SEQ ID NO: 70789 - DNA, 25 bp, probe
gctggacaagaagggtcatatcatc

SEQ ID NO: 70790 - DNA, 25 bp, probe
aacattatgctggacaagaagggtc

SEQ ID NO: 70791 - DNA, 25 bp, probe
agaagggtcatatcatccacatcga

SEQ ID NO: 70792 - DNA, 25 bp, probe
gtcatatcatccacatcgactttgg

SEQ ID NO: 70793 - DNA, 25 bp, probe
gggtcatatcatccacatcgacttt

SEQ ID NO: 70794 - DNA, 25 bp, probe
tgctggacaagaagggtcatatcat

SEQ ID NO: 70795 - DNA, 25 bp, probe
atgctggacaagaagggtcatatca

SEQ ID NO: 70796 - DNA, 25 bp, probe
gaagggtcatatcatccacatcgac

SEQ ID NO: 70797 - DNA, 25 bp, probe
agggtcatatcatccacatcgactt

SEQ ID NO: 70798 - DNA, 25 bp, probe
aagggtcatatcatccacatcgact

SEQ ID NO: 70799 - DNA, 25 bp, probe
acattatgctggacaagaagggtca

SEQ ID NO: 70800 - DNA, 25 bp, probe
tcatatcatccacatcgactttggc

SEQ ID NO: 70801 - DNA, 25 bp, probe
tggacaagaagggtcatatcatcca

SEQ ID NO: 70802 - DNA, 25 bp, probe
acaagtttgggaagtgggattattt

SEQ ID NO: 70803 - DNA, 25 bp, probe
gacaagtttgggaagtgggattatt

SEQ ID NO: 70804 - DNA, 25 bp, probe
aagaaagcactgtatggtttggaag

SEQ ID NO: 70805 - DNA, 25 bp, probe
gaagaaagcactgtatggtttggaa

SEQ ID NO: 70806 - DNA, 25 bp, probe
tgacaagtttgggaagtgggattat

SEQ ID NO: 70807 - DNA, 25 bp, probe
ttgacaagtttgggaagtgggatta

SEQ ID NO: 70808 - DNA, 25 bp, probe
agaagaaagcactgtatggtttgga

SEQ ID NO: 70809 - DNA, 25 bp, probe
actcatttgacaagtttgggaagtg

SEQ ID NO: 70810 - DNA, 25 bp, probe
ctcatttgacaagtttgggaagtgg

SEQ ID NO: 70811 - DNA, 25 bp, probe
atttgacaagtttgggaagtgggat

SEQ ID NO: 70812 - DNA, 25 bp, probe
tttgacaagtttgggaagtgggatt

SEQ ID NO: 70813 - DNA, 25 bp, probe
caagaaattccagtttacgtcgaag

SEQ ID NO: 70814 - DNA, 25 bp, probe
ggactttcctctgtcaactcatttg

SEQ ID NO: 70815 - DNA, 25 bp, probe
tcaagaaattccagtttacgtcgaa

SEQ ID NO: 70816 - DNA, 25 bp, probe
cagaagaaagcactgtatggtttgg

SEQ ID NO: 70817 - DNA, 25 bp, probe
gtcaagaaattccagtttacgtcga

SEQ ID NO: 70818 - DNA, 25 bp, probe
caagtttgggaagtgggattatttt

SEQ ID NO: 70819 - DNA, 25 bp, probe
gcagaagaaagcactgtatggtttg

SEQ ID NO: 70820 - DNA, 25 bp, probe
gggactttcctctgtcaactcattt

SEQ ID NO: 70821 - DNA, 25 bp, probe
aagaaattccagtttacgtcgaagc

SEQ ID NO: 70822 - DNA, 25 bp, probe
agcagaagaaagcactgtatggttt

SEQ ID NO: 70823 - DNA, 25 bp, probe
catttgacaagtttgggaagtggga

SEQ ID NO: 70824 - DNA, 25 bp, probe
gactttcctctgtcaactcatttga

SEQ ID NO: 70825 - DNA, 25 bp, probe
tcatttgacaagtttgggaagtggg

SEQ ID NO: 70826 - DNA, 25 bp, probe
caactcatttgacaagtttgggaag

SEQ ID NO: 70827 - DNA, 25 bp, probe
agaaagcactgtatggtttggaagc

SEQ ID NO: 70828 - DNA, 25 bp, probe
aactcatttgacaagtttgggaagt

SEQ ID NO: 70829 - DNA, 25 bp, probe
tcaactcatttgacaagtttgggaa

SEQ ID NO: 70830 - DNA, 25 bp, probe
gagcagaagaaagcactgtatggtt

SEQ ID NO: 70831 - DNA, 25 bp, probe
gaccagtttgacttcacttttgttg

SEQ ID NO: 70832 - DNA, 25 bp, probe
accagtttgacttcacttttgttga

SEQ ID NO: 70833 - DNA, 25 bp, probe
ccaggttcaattttctgagatttct

SEQ ID NO: 70834 - DNA, 25 bp, probe
tccaggttcaattttctgagatttc

SEQ ID NO: 70835 - DNA, 25 bp, probe
ctccaggttcaattttctgagattt

SEQ ID NO: 70836 - DNA, 25 bp, probe
gaggagcagaagaaagcactgtatg

SEQ ID NO: 70837 - DNA, 25 bp, probe
gaaattccagtttacgtcgaagcac

SEQ ID NO: 70838 - DNA, 25 bp, probe
agggactttcctctgtcaactcatt

SEQ ID NO: 70839 - DNA, 25 bp, probe
aaatgctccaggttcaattttctga

SEQ ID NO: 70840 - DNA, 25 bp, probe
ggaccagtttgacttcacttttgtt

SEQ ID NO: 70841 - DNA, 25 bp, probe
agaaattccagtttacgtcgaagca

SEQ ID NO: 70842 - DNA, 25 bp, probe
gctccaggttcaattttctgagatt

SEQ ID NO: 70843 - DNA, 25 bp, probe
aatgctccaggttcaattttctgag

SEQ ID NO: 70844 - DNA, 25 bp, probe
aattccagtttacgtcgaagcacat

SEQ ID NO: 70845 - DNA, 25 bp, probe
tatcgcgtcaagaaattccagttta

SEQ ID NO: 70846 - DNA, 25 bp, probe
tccagtatctctttgaggatgaccc

SEQ ID NO: 70847 - DNA, 25 bp, probe
gatccagtatctctttgaggatgac

SEQ ID NO: 70848 - DNA, 25 bp, probe
atccagtatctctttgaggatgacc

SEQ ID NO: 70849 - DNA, 25 bp, probe
agtatctctttgaggatgaccccag

SEQ ID NO: 70850 - DNA, 25 bp, probe
cagtatctctttgaggatgacccca

SEQ ID NO: 70851 - DNA, 25 bp, probe
ccagtatctctttgaggatgacccc

SEQ ID NO: 70852 - DNA, 25 bp, probe
gtatctctttgaggatgaccccagc

SEQ ID NO: 70853 - DNA, 25 bp, probe
ggatccagtatctctttgaggatga

SEQ ID NO: 70854 - DNA, 25 bp, probe
gggatccagtatctctttgaggatg

SEQ ID NO: 70855 - DNA, 25 bp, probe
caggggatccagtatctctttgagg

SEQ ID NO: 70856 - DNA, 25 bp, probe
ccaggggatccagtatctctttgag

SEQ ID NO: 70857 - DNA, 25 bp, probe
aggggatccagtatctctttgagga

SEQ ID NO: 70858 - DNA, 25 bp, probe
ggggatccagtatctctttgaggat

SEQ ID NO: 70859 - DNA, 25 bp, probe
tttcctgagtgacacagacattgac

SEQ ID NO: 70860 - DNA, 25 bp, probe
gtttcctgagtgacacagacattga

SEQ ID NO: 70861 - DNA, 25 bp, probe
tgtttcctgagtgacacagacattg

SEQ ID NO: 70862 - DNA, 25 bp, probe
ttcctgagtgacacagacattgacc

SEQ ID NO: 70863 - DNA, 25 bp, probe
cctgagtgacacagacattgaccag

SEQ ID NO: 70864 - DNA, 25 bp, probe
gtgtttcctgagtgacacagacatt

SEQ ID NO: 70865 - DNA, 25 bp, probe
ctcagaacacgcccggacatatatc

SEQ ID NO: 70866 - DNA, 25 bp, probe
ggtgtttcctgagtgacacagacat

SEQ ID NO: 70867 - DNA, 25 bp, probe
taagtattctctagtggaccagacg

SEQ ID NO: 70868 - DNA, 25 bp, probe
ttaagtattctctagtggaccagac

SEQ ID NO: 70869 - DNA, 25 bp, probe
ctatacggtggtccagcatcatatt

SEQ ID NO: 70870 - DNA, 25 bp, probe
attaagtattctctagtggaccaga

SEQ ID NO: 70871 - DNA, 25 bp, probe
tatacggtggtccagcatcatattg

SEQ ID NO: 70872 - DNA, 25 bp, probe
agaagagagtgccagagtctatgaa

SEQ ID NO: 70873 - DNA, 25 bp, probe
aagtattctctagtggaccagacga

SEQ ID NO: 70874 - DNA, 25 bp, probe
gagagaagagagtgccagagtctat

SEQ ID NO: 70875 - DNA, 25 bp, probe
aaagattggacaagggaatatggag

SEQ ID NO: 70876 - DNA, 25 bp, probe
tctatacggtggtccagcatcatat

SEQ ID NO: 70877 - DNA, 25 bp, probe
atctatacggtggtccagcatcata

SEQ ID NO: 70878 - DNA, 25 bp, probe
tatctatacggtggtccagcatcat

SEQ ID NO: 70879 - DNA, 25 bp, probe
gagaagagagtgccagagtctatga

SEQ ID NO: 70880 - DNA, 25 bp, probe
agagaagagagtgccagagtctatg

SEQ ID NO: 70881 - DNA, 25 bp, probe
gcaacagcagaaacatttaagatga

SEQ ID NO: 70882 - DNA, 25 bp, probe
ttatctatacggtggtccagcatca

SEQ ID NO: 70883 - DNA, 25 bp, probe
ttggacaagggaatatggagagaat

SEQ ID NO: 70884 - DNA, 25 bp, probe
attggacaagggaatatggagagaa

SEQ ID NO: 70885 - DNA, 25 bp, probe
aagattggacaagggaatatggaga

SEQ ID NO: 70886 - DNA, 25 bp, probe
ccagcatcatattgaaacactacag

SEQ ID NO: 70887 - DNA, 25 bp, probe
gtccagcatcatattgaaacactac

SEQ ID NO: 70888 - DNA, 25 bp, probe
caaagattggacaagggaatatgga

SEQ ID NO: 70889 - DNA, 25 bp, probe
tcaaagattggacaagggaatatgg

SEQ ID NO: 70890 - DNA, 25 bp, probe
ttcaaagattggacaagggaatatg

SEQ ID NO: 70891 - DNA, 25 bp, probe
tccagcatcatattgaaacactaca

SEQ ID NO: 70892 - DNA, 25 bp, probe
cagcatcatattgaaacactacagc

SEQ ID NO: 70893 - DNA, 25 bp, probe
agcacagtaccgatttatctatacg

SEQ ID NO: 70894 - DNA, 25 bp, probe
agattggacaagggaatatggagag

SEQ ID NO: 70895 - DNA, 25 bp, probe
agtattctctagtggaccagacgag

SEQ ID NO: 70896 - DNA, 25 bp, probe
gattggacaagggaatatggagaga

SEQ ID NO: 70897 - DNA, 25 bp, probe
ggtccagcatcatattgaaacacta

SEQ ID NO: 70898 - DNA, 25 bp, probe
taaactttcaaagattggacaaggg

SEQ ID NO: 70899 - DNA, 25 bp, probe
atttatctatacggtggtccagcat

SEQ ID NO: 70900 - DNA, 25 bp, probe
acaagggaatatggagagaatggtc

SEQ ID NO: 70901 - DNA, 25 bp, probe
gacaagggaatatggagagaatggt

SEQ ID NO: 70902 - DNA, 25 bp, probe
tggacaagggaatatggagagaatg

SEQ ID NO: 70903 - DNA, 25 bp, probe
tttcaaagattggacaagggaatat

SEQ ID NO: 70904 - DNA, 25 bp, probe
ctttcaaagattggacaagggaata

SEQ ID NO: 70905 - DNA, 25 bp, probe
actttcaaagattggacaagggaat

SEQ ID NO: 70906 - DNA, 25 bp, probe
tattctctagtggaccagacgagtg

SEQ ID NO: 70907 - DNA, 25 bp, probe
gtattctctagtggaccagacgagt

SEQ ID NO: 70908 - DNA, 25 bp, probe
tattaagtattctctagtggaccag

SEQ ID NO: 70909 - DNA, 25 bp, probe
aactttcaaagattggacaagggaa

SEQ ID NO: 70910 - DNA, 25 bp, probe
aaactttcaaagattggacaaggga

SEQ ID NO: 70911 - DNA, 25 bp, probe
aaaatggacaaggagagcaccttcc

SEQ ID NO: 70912 - DNA, 25 bp, probe
gacactgtgggaaatgttcacctac

SEQ ID NO: 70913 - DNA, 25 bp, probe
tgacactgtgggaaatgttcaccta

SEQ ID NO: 70914 - DNA, 25 bp, probe
acactgtgggaaatgttcacctacg

SEQ ID NO: 70915 - DNA, 25 bp, probe
cctccataaaacagtagcacaaaag

SEQ ID NO: 70916 - DNA, 25 bp, probe
tacctccataaaacagtagcacaaa

SEQ ID NO: 70917 - DNA, 25 bp, probe
acctccataaaacagtagcacaaaa

SEQ ID NO: 70918 - DNA, 25 bp, probe
ctccataaaacagtagcacaaaagc

SEQ ID NO: 70919 - DNA, 25 bp, probe
ctgctgtctactccaagaaaccaac

SEQ ID NO: 70920 - DNA, 25 bp, probe
tctgctgtctactccaagaaaccaa

SEQ ID NO: 70921 - DNA, 25 bp, probe
ttaaaactcaagtacaatcaggggt

SEQ ID NO: 70922 - DNA, 25 bp, probe
gtacctccataaaacagtagcacaa

SEQ ID NO: 70923 - DNA, 25 bp, probe
taaaactcaagtacaatcaggggtt

SEQ ID NO: 70924 - DNA, 25 bp, probe
aaaactcaagtacaatcaggggttg

SEQ ID NO: 70925 - DNA, 25 bp, probe
ttgtacctccataaaacagtagcac

SEQ ID NO: 70926 - DNA, 25 bp, probe
gttgtacctccataaaacagtagca

SEQ ID NO: 70927 - DNA, 25 bp, probe
tttaaaactcaagtacaatcagggg

SEQ ID NO: 70928 - DNA, 25 bp, probe
tgtacctccataaaacagtagcaca

SEQ ID NO: 70929 - DNA, 25 bp, probe
cttctgctgtctactccaagaaacc

SEQ ID NO: 70930 - DNA, 25 bp, probe
ccttctgctgtctactccaagaaac

SEQ ID NO: 70931 - DNA, 25 bp, probe
gggttgtacctccataaaacagtag

SEQ ID NO: 70932 - DNA, 25 bp, probe
tactccaagaaaccaacgctgagaa

SEQ ID NO: 70933 - DNA, 25 bp, probe
actggttccagagtgggatagttag

SEQ ID NO: 70934 - DNA, 25 bp, probe
ggttgtacctccataaaacagtagc

SEQ ID NO: 70935 - DNA, 25 bp, probe
caagaaaccaacgctgagaaaactg

SEQ ID NO: 70936 - DNA, 25 bp, probe
aatcaggggttgtacctccataaaa

SEQ ID NO: 70937 - DNA, 25 bp, probe
ctactccaagaaaccaacgctgaga

SEQ ID NO: 70938 - DNA, 25 bp, probe
tctactccaagaaaccaacgctgag

SEQ ID NO: 70939 - DNA, 25 bp, probe
ttctgctgtctactccaagaaacca

SEQ ID NO: 70940 - DNA, 25 bp, probe
ggggttgtacctccataaaacagta

SEQ ID NO: 70941 - DNA, 25 bp, probe
aactggttccagagtgggatagtta

SEQ ID NO: 70942 - DNA, 25 bp, probe
gtctactccaagaaaccaacgctga

SEQ ID NO: 70943 - DNA, 25 bp, probe
ctgtctactccaagaaaccaacgct

SEQ ID NO: 70944 - DNA, 25 bp, probe
atcaggggttgtacctccataaaac

SEQ ID NO: 70945 - DNA, 25 bp, probe
caatcaggggttgtacctccataaa

SEQ ID NO: 70946 - DNA, 25 bp, probe
tgtctactccaagaaaccaacgctg

SEQ ID NO: 70947 - DNA, 25 bp, probe
tgctgtctactccaagaaaccaacg

SEQ ID NO: 70948 - DNA, 25 bp, probe
cccttctgctgtctactccaagaaa

SEQ ID NO: 70949 - DNA, 25 bp, probe
actccaagaaaccaacgctgagaaa

SEQ ID NO: 70950 - DNA, 25 bp, probe
tccataaaacagtagcacaaaagct

SEQ ID NO: 70951 - DNA, 25 bp, probe
aaactggttccagagtgggatagtt

SEQ ID NO: 70952 - DNA, 25 bp, probe
ccaagaaaccaacgctgagaaaact

SEQ ID NO: 70953 - DNA, 25 bp, probe
tccaagaaaccaacgctgagaaaac

SEQ ID NO: 70954 - DNA, 25 bp, probe
caggggttgtacctccataaaacag

SEQ ID NO: 70955 - DNA, 25 bp, probe
tatccccttctgctgtctactccaa

SEQ ID NO: 70956 - DNA, 25 bp, probe
ctccaagaaaccaacgctgagaaaa

SEQ ID NO: 70957 - DNA, 25 bp, probe
aggggttgtacctccataaaacagt

SEQ ID NO: 70958 - DNA, 25 bp, probe
tcaggggttgtacctccataaaaca

SEQ ID NO: 70959 - DNA, 25 bp, probe
atctgtcctgggattgtgcaagaag

SEQ ID NO: 70960 - DNA, 25 bp, probe
catctgtcctgggattgtgcaagaa

SEQ ID NO: 70961 - DNA, 25 bp, probe
tccttctggataccaattacaacat

SEQ ID NO: 70962 - DNA, 25 bp, probe
ttccttctggataccaattacaaca

SEQ ID NO: 70963 - DNA, 25 bp, probe
acttccttctggataccaattacaa

SEQ ID NO: 70964 - DNA, 25 bp, probe
aacttccttctggataccaattaca

SEQ ID NO: 70965 - DNA, 25 bp, probe
cttccttctggataccaattacaac

SEQ ID NO: 70966 - DNA, 25 bp, probe
caggaagaggaacacaataggctag

SEQ ID NO: 70967 - DNA, 25 bp, probe
gaacttccttctggataccaattac

SEQ ID NO: 70968 - DNA, 25 bp, probe
gcctccagagactataccaaatatc

SEQ ID NO: 70969 - DNA, 25 bp, probe
agcctccagagactataccaaatat

SEQ ID NO: 70970 - DNA, 25 bp, probe
agacgagatatgttacgggaattac

SEQ ID NO: 70971 - DNA, 25 bp, probe
aagacgagatatgttacgggaatta

SEQ ID NO: 70972 - DNA, 25 bp, probe
caagacgagatatgttacgggaatt

SEQ ID NO: 70973 - DNA, 25 bp, probe
cagcctccagagactataccaaata

SEQ ID NO: 70974 - DNA, 25 bp, probe
ccttctggataccaattacaacata

SEQ ID NO: 70975 - DNA, 25 bp, probe
gagaacttccttctggataccaatt

SEQ ID NO: 70976 - DNA, 25 bp, probe
ggaactgcaagacgagatatgttac

SEQ ID NO: 70977 - DNA, 25 bp, probe
agaacttccttctggataccaatta

SEQ ID NO: 70978 - DNA, 25 bp, probe
agagaacttccttctggataccaat

SEQ ID NO: 70979 - DNA, 25 bp, probe
aaatcccattcttcatttcctcaga

SEQ ID NO: 70980 - DNA, 25 bp, probe
acgagatatgttacgggaattacaa

SEQ ID NO: 70981 - DNA, 25 bp, probe
gacgagatatgttacgggaattaca

SEQ ID NO: 70982 - DNA, 25 bp, probe
cctccagagactataccaaatatct

SEQ ID NO: 70983 - DNA, 25 bp, probe
gaactgcaagacgagatatgttacg

SEQ ID NO: 70984 - DNA, 25 bp, probe
tggaactgcaagacgagatatgtta

SEQ ID NO: 70985 - DNA, 25 bp, probe
ccaggaagaggaacacaataggcta

SEQ ID NO: 70986 - DNA, 25 bp, probe
cgagatatgttacgggaattacaaa

SEQ ID NO: 70987 - DNA, 25 bp, probe
agactataccaaatatctactgtgc

SEQ ID NO: 70988 - DNA, 25 bp, probe
gcaagacgagatatgttacgggaat

SEQ ID NO: 70989 - DNA, 25 bp, probe
ttcctcagaactagaaagcctcatg

SEQ ID NO: 70990 - DNA, 25 bp, probe
cttcatttcctcagaactagaaagc

SEQ ID NO: 70991 - DNA, 25 bp, probe
aactgcaagacgagatatgttacgg

SEQ ID NO: 70992 - DNA, 25 bp, probe
cttctggataccaattacaacataa

SEQ ID NO: 70993 - DNA, 25 bp, probe
ttcatttcctcagaactagaaagcc

SEQ ID NO: 70994 - DNA, 25 bp, probe
catttcctcagaactagaaagcctc

SEQ ID NO: 70995 - DNA, 25 bp, probe
cccattcttcatttcctcagaacta

SEQ ID NO: 70996 - DNA, 25 bp, probe
aatcccattcttcatttcctcagaa

SEQ ID NO: 70997 - DNA, 25 bp, probe
caggttcactgttagccagaatctg

SEQ ID NO: 70998 - DNA, 25 bp, probe
gtggaactgcaagacgagatatgtt

SEQ ID NO: 70999 - DNA, 25 bp, probe
aatatctactgtgcagtattgccac

SEQ ID NO: 71000 - DNA, 25 bp, probe
ccattcttcatttcctcagaactag

SEQ ID NO: 71001 - DNA, 25 bp, probe
atcccattcttcatttcctcagaac

SEQ ID NO: 71002 - DNA, 25 bp, probe
ttgtggaactgcaagacgagatatg

SEQ ID NO: 71003 - DNA, 25 bp, probe
tttcctcagaactagaaagcctcat

SEQ ID NO: 71004 - DNA, 25 bp, probe
atttcctcagaactagaaagcctca

SEQ ID NO: 71005 - DNA, 25 bp, probe
tatgtccaaccaagatgtcatcaat

SEQ ID NO: 71006 - DNA, 25 bp, probe
atatgtccaaccaagatgtcatcaa

SEQ ID NO: 71007 - DNA, 25 bp, probe
gatatgtccaaccaagatgtcatca

SEQ ID NO: 71008 - DNA, 25 bp, probe
atgtccaaccaagatgtcatcaatg

SEQ ID NO: 71009 - DNA, 25 bp, probe
cagaagaagatcctgaacagcattc

SEQ ID NO: 71010 - DNA, 25 bp, probe
ggatatgtccaaccaagatgtcatc

SEQ ID NO: 71011 - DNA, 25 bp, probe
cattctatgagggtccagataagtc

SEQ ID NO: 71012 - DNA, 25 bp, probe
gagattgtcaacaccctagataaga

SEQ ID NO: 71013 - DNA, 25 bp, probe
ggagattgtcaacaccctagataag

SEQ ID NO: 71014 - DNA, 25 bp, probe
attctatgagggtccagataagtca

SEQ ID NO: 71015 - DNA, 25 bp, probe
gattgtcaacaccctagataagatg

SEQ ID NO: 71016 - DNA, 25 bp, probe
agattgtcaacaccctagataagat

SEQ ID NO: 71017 - DNA, 25 bp, probe
ttctatgagggtccagataagtcag

SEQ ID NO: 71018 - DNA, 25 bp, probe
ttgtcaacaccctagataagatgat

SEQ ID NO: 71019 - DNA, 25 bp, probe
attgtcaacaccctagataagatga

SEQ ID NO: 71020 - DNA, 25 bp, probe
ctatgagggtccagataagtcagtc

SEQ ID NO: 71021 - DNA, 25 bp, probe
gtcaacaccctagataagatgatcc

SEQ ID NO: 71022 - DNA, 25 bp, probe
tgtcaacaccctagataagatgatc

SEQ ID NO: 71023 - DNA, 25 bp, probe
atcctgaacagcattcattctatga

SEQ ID NO: 71024 - DNA, 25 bp, probe
gatcctgaacagcattcattctatg

SEQ ID NO: 71025 - DNA, 25 bp, probe
agatcctgaacagcattcattctat

SEQ ID NO: 71026 - DNA, 25 bp, probe
aagatcctgaacagcattcattcta

SEQ ID NO: 71027 - DNA, 25 bp, probe
cggagattgtcaacaccctagataa

SEQ ID NO: 71028 - DNA, 25 bp, probe
tctatgagggtccagataagtcagt

SEQ ID NO: 71029 - DNA, 25 bp, probe
tcctgaacagcattcattctatgag

SEQ ID NO: 71030 - DNA, 25 bp, probe
aagaagatcctgaacagcattcatt

SEQ ID NO: 71031 - DNA, 25 bp, probe
tatgagggtccagataagtcagtca

SEQ ID NO: 71032 - DNA, 25 bp, probe
gaagatcctgaacagcattcattct

SEQ ID NO: 71033 - DNA, 25 bp, probe
agaagatcctgaacagcattcattc

SEQ ID NO: 71034 - DNA, 25 bp, probe
gaagaagatcctgaacagcattcat

SEQ ID NO: 71035 - DNA, 25 bp, probe
tcaacaccctagataagatgatccg

SEQ ID NO: 71036 - DNA, 25 bp, probe
agaagacctcctgagaataggcatc

SEQ ID NO: 71037 - DNA, 25 bp, probe
cctgaacagcattcattctatgagg

SEQ ID NO: 71038 - DNA, 25 bp, probe
gaagacctcctgagaataggcatca

SEQ ID NO: 71039 - DNA, 25 bp, probe
cagaagacctcctgagaataggcat

SEQ ID NO: 71040 - DNA, 25 bp, probe
agaagaagatcctgaacagcattca

SEQ ID NO: 71041 - DNA, 25 bp, probe
tgtccaaccaagatgtcatcaatgc

SEQ ID NO: 71042 - DNA, 25 bp, probe
gataagtcagtcaccaacggcaatg

SEQ ID NO: 71043 - DNA, 25 bp, probe
aagacctcctgagaataggcatcac

SEQ ID NO: 71044 - DNA, 25 bp, probe
agataagtcagtcaccaacggcaat

SEQ ID NO: 71045 - DNA, 25 bp, probe
ccaaccaagatgtcatcaatgccat

SEQ ID NO: 71046 - DNA, 25 bp, probe
gggatatgtccaaccaagatgtcat

SEQ ID NO: 71047 - DNA, 25 bp, probe
tcattctatgagggtccagataagt

SEQ ID NO: 71048 - DNA, 25 bp, probe
cattcattctatgagggtccagata

SEQ ID NO: 71049 - DNA, 25 bp, probe
attattccagggtttatgtgtcagg

SEQ ID NO: 71050 - DNA, 25 bp, probe
cattggagagaaaggatttggttat

SEQ ID NO: 71051 - DNA, 25 bp, probe
gcattggagagaaaggatttggtta

SEQ ID NO: 71052 - DNA, 25 bp, probe
aattattccagggtttatgtgtcag

SEQ ID NO: 71053 - DNA, 25 bp, probe
ctgagcattggagagaaaggatttg

SEQ ID NO: 71054 - DNA, 25 bp, probe
agtacgttcgagaatatgctgtagg

SEQ ID NO: 71055 - DNA, 25 bp, probe
cagtacgttcgagaatatgctgtag

SEQ ID NO: 71056 - DNA, 25 bp, probe
agagaaaggatttggttataagggt

SEQ ID NO: 71057 - DNA, 25 bp, probe
ttattccagggtttatgtgtcaggg

SEQ ID NO: 71058 - DNA, 25 bp, probe
tctgagcattggagagaaaggattt

SEQ ID NO: 71059 - DNA, 25 bp, probe
taagggttcctgctttcagataatt

SEQ ID NO: 71060 - DNA, 25 bp, probe
ataagggttcctgctttcagataat

SEQ ID NO: 71061 - DNA, 25 bp, probe
gatttcaactatccagaccagtacg

SEQ ID NO: 71062 - DNA, 25 bp, probe
gagagaaaggatttggttataaggg

SEQ ID NO: 71063 - DNA, 25 bp, probe
ggagagaaaggatttggttataagg

SEQ ID NO: 71064 - DNA, 25 bp, probe
ttcaactatccagaccagtacgttc

SEQ ID NO: 71065 - DNA, 25 bp, probe
tataagggttcctgctttcagataa

SEQ ID NO: 71066 - DNA, 25 bp, probe
gagaaaggatttggttataagggtt

SEQ ID NO: 71067 - DNA, 25 bp, probe
attggagagaaaggatttggttata

SEQ ID NO: 71068 - DNA, 25 bp, probe
gaacaagcagccaagtaaggtgatt

SEQ ID NO: 71069 - DNA, 25 bp, probe
agaaaggatttggttataagggttc

SEQ ID NO: 71070 - DNA, 25 bp, probe
agcattggagagaaaggatttggtt

SEQ ID NO: 71071 - DNA, 25 bp, probe
cctagagcttctggatttcaactat

SEQ ID NO: 71072 - DNA, 25 bp, probe
agggagaaatttgatgatgagaact

SEQ ID NO: 71073 - DNA, 25 bp, probe
cagggagaaatttgatgatgagaac

SEQ ID NO: 71074 - DNA, 25 bp, probe
acagggagaaatttgatgatgagaa

SEQ ID NO: 71075 - DNA, 25 bp, probe
tggagagaaaggatttggttataag

SEQ ID NO: 71076 - DNA, 25 bp, probe
tacagggagaaatttgatgatgaga

SEQ ID NO: 71077 - DNA, 25 bp, probe
ccagaccagtacgttcgagaatatg

SEQ ID NO: 71078 - DNA, 25 bp, probe
tccagaccagtacgttcgagaatat

SEQ ID NO: 71079 - DNA, 25 bp, probe
atccagaccagtacgttcgagaata

SEQ ID NO: 71080 - DNA, 25 bp, probe
tatccagaccagtacgttcgagaat

SEQ ID NO: 71081 - DNA, 25 bp, probe
gggagaaatttgatgatgagaactt

SEQ ID NO: 71082 - DNA, 25 bp, probe
ctacagggagaaatttgatgatgag

SEQ ID NO: 71083 - DNA, 25 bp, probe
ccagtacgttcgagaatatgctgta

SEQ ID NO: 71084 - DNA, 25 bp, probe
aagggttcctgctttcagataatta

SEQ ID NO: 71085 - DNA, 25 bp, probe
agacaagtttccaaagacagcagaa

SEQ ID NO: 71086 - DNA, 25 bp, probe
ctagagcttctggatttcaactatc

SEQ ID NO: 71087 - DNA, 25 bp, probe
gttataagggttcctgctttcagat

SEQ ID NO: 71088 - DNA, 25 bp, probe
gcagccaagtaaggtgattgtgtag

SEQ ID NO: 71089 - DNA, 25 bp, probe
atttggttataagggttcctgcttt

SEQ ID NO: 71090 - DNA, 25 bp, probe
tctacagggagaaatttgatgatga

SEQ ID NO: 71091 - DNA, 25 bp, probe
taattattccagggtttatgtgtca

SEQ ID NO: 71092 - DNA, 25 bp, probe
ttataagggttcctgctttcagata

SEQ ID NO: 71093 - DNA, 25 bp, probe
gctgtgttcatattctgtctagtgt

SEQ ID NO: 71094 - DNA, 25 bp, probe
cagcagcgtcaggtactactaatat

SEQ ID NO: 71095 - DNA, 25 bp, probe
agcagcgtcaggtactactaatatt

SEQ ID NO: 71096 - DNA, 25 bp, probe
tgtgttcatattctgtctagtgtag

SEQ ID NO: 71097 - DNA, 25 bp, probe
ctgtgttcatattctgtctagtgta

SEQ ID NO: 71098 - DNA, 25 bp, probe
aagctgtgttcatattctgtctagt

SEQ ID NO: 71099 - DNA, 25 bp, probe
agctgtgttcatattctgtctagtg

SEQ ID NO: 71100 - DNA, 25 bp, probe
gtgatagtggacagcaacttgagaa

SEQ ID NO: 71101 - DNA, 25 bp, probe
acagcagcgtcaggtactactaata

SEQ ID NO: 71102 - DNA, 25 bp, probe
gatagtggacagcaacttgagaaat

SEQ ID NO: 71103 - DNA, 25 bp, probe
gcagcgtcaggtactactaatatta

SEQ ID NO: 71104 - DNA, 25 bp, probe
atagtggacagcaacttgagaaatg

SEQ ID NO: 71105 - DNA, 25 bp, probe
cttgagaaatgctcttagggtcttc

SEQ ID NO: 71106 - DNA, 25 bp, probe
acttgagaaatgctcttagggtctt

SEQ ID NO: 71107 - DNA, 25 bp, probe
aacttgagaaatgctcttagggtct

SEQ ID NO: 71108 - DNA, 25 bp, probe
caacttgagaaatgctcttagggtc

SEQ ID NO: 71109 - DNA, 25 bp, probe
tgatagtggacagcaacttgagaaa

SEQ ID NO: 71110 - DNA, 25 bp, probe
aaagctgtgttcatattctgtctag

SEQ ID NO: 71111 - DNA, 25 bp, probe
attgggaaagctgtgttcatattct

SEQ ID NO: 71112 - DNA, 25 bp, probe
cattgggaaagctgtgttcatattc

SEQ ID NO: 71113 - DNA, 25 bp, probe
ggaaagctgtgttcatattctgtct

SEQ ID NO: 71114 - DNA, 25 bp, probe
ttgagaaatgctcttagggtcttcc

SEQ ID NO: 71115 - DNA, 25 bp, probe
gaaagctgtgttcatattctgtcta

SEQ ID NO: 71116 - DNA, 25 bp, probe
tgtgatagtggacagcaacttgaga

SEQ ID NO: 71117 - DNA, 25 bp, probe
ttgggaaagctgtgttcatattctg

SEQ ID NO: 71118 - DNA, 25 bp, probe
tacattgggaaagctgtgttcatat

SEQ ID NO: 71119 - DNA, 25 bp, probe
cagcgtcaggtactactaatattat

SEQ ID NO: 71120 - DNA, 25 bp, probe
actcctttccctaccactgtgatag

SEQ ID NO: 71121 - DNA, 25 bp, probe
gactcctttccctaccactgtgata

SEQ ID NO: 71122 - DNA, 25 bp, probe
acattgggaaagctgtgttcatatt

SEQ ID NO: 71123 - DNA, 25 bp, probe
gggaaagctgtgttcatattctgtc

SEQ ID NO: 71124 - DNA, 25 bp, probe
gtacattgggaaagctgtgttcata

SEQ ID NO: 71125 - DNA, 25 bp, probe
cacagcagcgtcaggtactactaat

SEQ ID NO: 71126 - DNA, 25 bp, probe
ctaatattattcctggtctttgggc

SEQ ID NO: 71127 - DNA, 25 bp, probe
ctcctttccctaccactgtgatagt

SEQ ID NO: 71128 - DNA, 25 bp, probe
tgggaaagctgtgttcatattctgt

SEQ ID NO: 71129 - DNA, 25 bp, probe
gcacatccttggactaaggttatta

SEQ ID NO: 71130 - DNA, 25 bp, probe
taatattattcctggtctttgggcc

SEQ ID NO: 71131 - DNA, 25 bp, probe
agcgtcaggtactactaatattatt

SEQ ID NO: 71132 - DNA, 25 bp, probe
gcgtcaggtactactaatattattc

SEQ ID NO: 71133 - DNA, 25 bp, probe
actaatattattcctggtctttggg

SEQ ID NO: 71134 - DNA, 25 bp, probe
cacatccttggactaaggttattat

SEQ ID NO: 71135 - DNA, 25 bp, probe
gaactcagactcctttccctaccac

SEQ ID NO: 71136 - DNA, 25 bp, probe
cctagagggaactcagactcctttc

SEQ ID NO: 71137 - DNA, 25 bp, probe
agatcactgtaacatagtccgattg

SEQ ID NO: 71138 - DNA, 25 bp, probe
ctagatcactgtaacatagtccgat

SEQ ID NO: 71139 - DNA, 25 bp, probe
tagatcactgtaacatagtccgatt

SEQ ID NO: 71140 - DNA, 25 bp, probe
tgtaacatagtccgattgcgttatt

SEQ ID NO: 71141 - DNA, 25 bp, probe
gctagatcactgtaacatagtccga

SEQ ID NO: 71142 - DNA, 25 bp, probe
ctgtaacatagtccgattgcgttat

SEQ ID NO: 71143 - DNA, 25 bp, probe
gatcactgtaacatagtccgattgc

SEQ ID NO: 71144 - DNA, 25 bp, probe
aagctagatcactgtaacatagtcc

SEQ ID NO: 71145 - DNA, 25 bp, probe
gattgcgttatttcttctactccag

SEQ ID NO: 71146 - DNA, 25 bp, probe
tagtccgattgcgttatttcttcta

SEQ ID NO: 71147 - DNA, 25 bp, probe
atagtccgattgcgttatttcttct

SEQ ID NO: 71148 - DNA, 25 bp, probe
catagtccgattgcgttatttcttc

SEQ ID NO: 71149 - DNA, 25 bp, probe
attgcgttatttcttctactccagt

SEQ ID NO: 71150 - DNA, 25 bp, probe
acatagtccgattgcgttatttctt

SEQ ID NO: 71151 - DNA, 25 bp, probe
tccgattgcgttatttcttctactc

SEQ ID NO: 71152 - DNA, 25 bp, probe
gttatttcttctactccagtggtga

SEQ ID NO: 71153 - DNA, 25 bp, probe
cgattgcgttatttcttctactcca

SEQ ID NO: 71154 - DNA, 25 bp, probe
gtccgattgcgttatttcttctact

SEQ ID NO: 71155 - DNA, 25 bp, probe
agtccgattgcgttatttcttctac

SEQ ID NO: 71156 - DNA, 25 bp, probe
caagaagtcagctatacagacacta

SEQ ID NO: 71157 - DNA, 25 bp, probe
ttgcgttatttcttctactccagtg

SEQ ID NO: 71158 - DNA, 25 bp, probe
aacatagtccgattgcgttatttct

SEQ ID NO: 71159 - DNA, 25 bp, probe
agctagatcactgtaacatagtccg

SEQ ID NO: 71160 - DNA, 25 bp, probe
aagaagtcagctatacagacactaa

SEQ ID NO: 71161 - DNA, 25 bp, probe
actgtaacatagtccgattgcgtta

SEQ ID NO: 71162 - DNA, 25 bp, probe
cgttatttcttctactccagtggtg

SEQ ID NO: 71163 - DNA, 25 bp, probe
acaagaagtcagctatacagacact

SEQ ID NO: 71164 - DNA, 25 bp, probe
cacaagaagtcagctatacagacac

SEQ ID NO: 71165 - DNA, 25 bp, probe
atcatttggtgtggtatatcaagcc

SEQ ID NO: 71166 - DNA, 25 bp, probe
ccgattgcgttatttcttctactcc

SEQ ID NO: 71167 - DNA, 25 bp, probe
atggatcatttggtgtggtatatca

SEQ ID NO: 71168 - DNA, 25 bp, probe
ctactccagtggtgagaagaaatta

SEQ ID NO: 71169 - DNA, 25 bp, probe
ttatttcttctactccagtggtgag

SEQ ID NO: 71170 - DNA, 25 bp, probe
atcactgtaacatagtccgattgcg

SEQ ID NO: 71171 - DNA, 25 bp, probe
aatactcagcccaagaatttgtcag

SEQ ID NO: 71172 - DNA, 25 bp, probe
tatttcttctactccagtggtgaga

SEQ ID NO: 71173 - DNA, 25 bp, probe
gatcatttggtgtggtatatcaagc

SEQ ID NO: 71174 - DNA, 25 bp, probe
tggatcatttggtgtggtatatcaa

SEQ ID NO: 71175 - DNA, 25 bp, probe
tactccagtggtgagaagaaattaa

SEQ ID NO: 71176 - DNA, 25 bp, probe
ggatcatttggtgtggtatatcaag

SEQ ID NO: 71177 - DNA, 25 bp, probe
caatactcagcccaagaatttgtca

SEQ ID NO: 71178 - DNA, 25 bp, probe
tctactccagtggtgagaagaaatt

SEQ ID NO: 71179 - DNA, 25 bp, probe
ccacaagaagtcagctatacagaca

SEQ ID NO: 71180 - DNA, 25 bp, probe
ccaaactttgtgattcaggagaact

SEQ ID NO: 71181 - DNA, 25 bp, probe
aatactgaataccgaagcgaatact

SEQ ID NO: 71182 - DNA, 25 bp, probe
acataatactgaataccgaagcgaa

SEQ ID NO: 71183 - DNA, 25 bp, probe
atactgaataccgaagcgaatactg

SEQ ID NO: 71184 - DNA, 25 bp, probe
gacataatactgaataccgaagcga

SEQ ID NO: 71185 - DNA, 25 bp, probe
agacataatactgaataccgaagcg

SEQ ID NO: 71186 - DNA, 25 bp, probe
cataatactgaataccgaagcgaat

SEQ ID NO: 71187 - DNA, 25 bp, probe
aagacataatactgaataccgaagc

SEQ ID NO: 71188 - DNA, 25 bp, probe
taatactgaataccgaagcgaatac

SEQ ID NO: 71189 - DNA, 25 bp, probe
gctcctacctagaagacataatact

SEQ ID NO: 71190 - DNA, 25 bp, probe
ataatactgaataccgaagcgaata

SEQ ID NO: 71191 - DNA, 25 bp, probe
actataagctcctacctagaagaca

SEQ ID NO: 71192 - DNA, 25 bp, probe
tactgaataccgaagcgaatactgc

SEQ ID NO: 71193 - DNA, 25 bp, probe
agaagacataatactgaataccgaa

SEQ ID NO: 71194 - DNA, 25 bp, probe
agctcctacctagaagacataatac

SEQ ID NO: 71195 - DNA, 25 bp, probe
gaagacataatactgaataccgaag

SEQ ID NO: 71196 - DNA, 25 bp, probe
tcctacctagaagacataatactga

SEQ ID NO: 71197 - DNA, 25 bp, probe
gattgttgctgagttggtttatagt

SEQ ID NO: 71198 - DNA, 25 bp, probe
agaaatagagaagatggctgagaaa

SEQ ID NO: 71199 - DNA, 25 bp, probe
acgagatatttaaggaggcaagtag

SEQ ID NO: 71200 - DNA, 25 bp, probe
gacgagatatttaaggaggcaagta

SEQ ID NO: 71201 - DNA, 25 bp, probe
gagatatttaaggaggcaagtaggg

SEQ ID NO: 71202 - DNA, 25 bp, probe
ttgttgctgagttggtttatagttt

SEQ ID NO: 71203 - DNA, 25 bp, probe
agattgttgctgagttggtttatag

SEQ ID NO: 71204 - DNA, 25 bp, probe
gagattgttgctgagttggtttata

SEQ ID NO: 71205 - DNA, 25 bp, probe
ctataagctcctacctagaagacat

SEQ ID NO: 71206 - DNA, 25 bp, probe
cgagatatttaaggaggcaagtagg

SEQ ID NO: 71207 - DNA, 25 bp, probe
aaagaaattaactgagggagagcaa

SEQ ID NO: 71208 - DNA, 25 bp, probe
attgttgctgagttggtttatagtt

SEQ ID NO: 71209 - DNA, 25 bp, probe
gaaattaactgagggagagcaagat

SEQ ID NO: 71210 - DNA, 25 bp, probe
ctcctacctagaagacataatactg

SEQ ID NO: 71211 - DNA, 25 bp, probe
tatcttcagtcagaggagattgttg

SEQ ID NO: 71212 - DNA, 25 bp, probe
aagaaattaactgagggagagcaag

SEQ ID NO: 71213 - DNA, 25 bp, probe
ctatcttcagtcagaggagattgtt

SEQ ID NO: 71214 - DNA, 25 bp, probe
aacctatcttcagtcagaggagatt

SEQ ID NO: 71215 - DNA, 25 bp, probe
aaattaactgagggagagcaagatg

SEQ ID NO: 71216 - DNA, 25 bp, probe
gaacctatcttcagtcagaggagat

SEQ ID NO: 71217 - DNA, 25 bp, probe
cctatcttcagtcagaggagattgt

SEQ ID NO: 71218 - DNA, 25 bp, probe
acctatcttcagtcagaggagattg

SEQ ID NO: 71219 - DNA, 25 bp, probe
aagctcctacctagaagacataata

SEQ ID NO: 71220 - DNA, 25 bp, probe
taagctcctacctagaagacataat

SEQ ID NO: 71221 - DNA, 25 bp, probe
ataagctcctacctagaagacataa

SEQ ID NO: 71222 - DNA, 25 bp, probe
ggagattgttgctgagttggtttat

SEQ ID NO: 71223 - DNA, 25 bp, probe
tactataagctcctacctagaagac

SEQ ID NO: 71224 - DNA, 25 bp, probe
gtactataagctcctacctagaaga

SEQ ID NO: 71225 - DNA, 25 bp, probe
cagtgaacatgattctagtcaagac

SEQ ID NO: 71226 - DNA, 25 bp, probe
gtcagtgaacatgattctagtcaag

SEQ ID NO: 71227 - DNA, 25 bp, probe
ggtcagtgaacatgattctagtcaa

SEQ ID NO: 71228 - DNA, 25 bp, probe
agtgaacatgattctagtcaagacg

SEQ ID NO: 71229 - DNA, 25 bp, probe
tcagtgaacatgattctagtcaaga

SEQ ID NO: 71230 - DNA, 25 bp, probe
gtgaacatgattctagtcaagacgg

SEQ ID NO: 71231 - DNA, 25 bp, probe
ttcctccgagagagagatgagtatc

SEQ ID NO: 71232 - DNA, 25 bp, probe
cttcctccgagagagagatgagtat

SEQ ID NO: 71233 - DNA, 25 bp, probe
atcacccaaatatcattcagttcca

SEQ ID NO: 71234 - DNA, 25 bp, probe
tcacccaaatatcattcagttccac

SEQ ID NO: 71235 - DNA, 25 bp, probe
atgattctagtcaagacggcatctg

SEQ ID NO: 71236 - DNA, 25 bp, probe
tatcacccaaatatcattcagttcc

SEQ ID NO: 71237 - DNA, 25 bp, probe
caaatatcattcagttccaccaggt

SEQ ID NO: 71238 - DNA, 25 bp, probe
aacatgattctagtcaagacggcat

SEQ ID NO: 71239 - DNA, 25 bp, probe
ccaaatatcattcagttccaccagg

SEQ ID NO: 71240 - DNA, 25 bp, probe
cccaaatatcattcagttccaccag

SEQ ID NO: 71241 - DNA, 25 bp, probe
aagactctctatcacccaaatatca

SEQ ID NO: 71242 - DNA, 25 bp, probe
catgattctagtcaagacggcatct

SEQ ID NO: 71243 - DNA, 25 bp, probe
cacccaaatatcattcagttccacc

SEQ ID NO: 71244 - DNA, 25 bp, probe
agactctctatcacccaaatatcat

SEQ ID NO: 71245 - DNA, 25 bp, probe
ctctatcacccaaatatcattcagt

SEQ ID NO: 71246 - DNA, 25 bp, probe
tgaagactctctatcacccaaatat

SEQ ID NO: 71247 - DNA, 25 bp, probe
atgaagactctctatcacccaaata

SEQ ID NO: 71248 - DNA, 25 bp, probe
tcttcctccgagagagagatgagta

SEQ ID NO: 71249 - DNA, 25 bp, probe
gaagactctctatcacccaaatatc

SEQ ID NO: 71250 - DNA, 25 bp, probe
acccaaatatcattcagttccacca

SEQ ID NO: 71251 - DNA, 25 bp, probe
tctctatcacccaaatatcattcag

SEQ ID NO: 71252 - DNA, 25 bp, probe
ctctctatcacccaaatatcattca

SEQ ID NO: 71253 - DNA, 25 bp, probe
actctctatcacccaaatatcattc

SEQ ID NO: 71254 - DNA, 25 bp, probe
gactctctatcacccaaatatcatt

SEQ ID NO: 71255 - DNA, 25 bp, probe
tcctccgagagagagatgagtatca

SEQ ID NO: 71256 - DNA, 25 bp, probe
acatgattctagtcaagacggcatc

SEQ ID NO: 71257 - DNA, 25 bp, probe
catgaagactctctatcacccaaat

SEQ ID NO: 71258 - DNA, 25 bp, probe
gaacatgattctagtcaagacggca

SEQ ID NO: 71259 - DNA, 25 bp, probe
tgaacatgattctagtcaagacggc

SEQ ID NO: 71260 - DNA, 25 bp, probe
tctatcacccaaatatcattcagtt

SEQ ID NO: 71261 - DNA, 25 bp, probe
aatatcattcagttccaccaggtga

SEQ ID NO: 71262 - DNA, 25 bp, probe
ctatcacccaaatatcattcagttc

SEQ ID NO: 71263 - DNA, 25 bp, probe
ctccgagagagagatgagtatcatg

SEQ ID NO: 71264 - DNA, 25 bp, probe
atatcattcagttccaccaggtgac

SEQ ID NO: 71265 - DNA, 25 bp, probe
cctccgagagagagatgagtatcat

SEQ ID NO: 71266 - DNA, 25 bp, probe
gggtcagtgaacatgattctagtca

SEQ ID NO: 71267 - DNA, 25 bp, probe
agtatcatgaagactctctatcacc

SEQ ID NO: 71268 - DNA, 25 bp, probe
aaatatcattcagttccaccaggtg

SEQ ID NO: 71269 - DNA, 25 bp, probe
gagtgacattgtgaggaagattgat

SEQ ID NO: 71270 - DNA, 25 bp, probe
ttgagtgacattgtgaggaagattg

SEQ ID NO: 71271 - DNA, 25 bp, probe
gttgagtgacattgtgaggaagatt

SEQ ID NO: 71272 - DNA, 25 bp, probe
tctctcagtgtacttgttcctattg

SEQ ID NO: 71273 - DNA, 25 bp, probe
gtctctcagtgtacttgttcctatt

SEQ ID NO: 71274 - DNA, 25 bp, probe
agtgacattgtgaggaagattgatc

SEQ ID NO: 71275 - DNA, 25 bp, probe
ctctcagtgtacttgttcctattgc

SEQ ID NO: 71276 - DNA, 25 bp, probe
ggtctctcagtgtacttgttcctat

SEQ ID NO: 71277 - DNA, 25 bp, probe
tgagtgacattgtgaggaagattga

SEQ ID NO: 71278 - DNA, 25 bp, probe
tcagtgtacttgttcctattgcctt

SEQ ID NO: 71279 - DNA, 25 bp, probe
ggctacactatctaacatctggctg

SEQ ID NO: 71280 - DNA, 25 bp, probe
gctacactatctaacatctggctgt

SEQ ID NO: 71281 - DNA, 25 bp, probe
ctcagtgtacttgttcctattgcct

SEQ ID NO: 71282 - DNA, 25 bp, probe
tctcagtgtacttgttcctattgcc

SEQ ID NO: 71283 - DNA, 25 bp, probe
cttcttctgggctacactatctaac

SEQ ID NO: 71284 - DNA, 25 bp, probe
ctaacttcttctgggctacactatc

SEQ ID NO: 71285 - DNA, 25 bp, probe
tgttgagtgacattgtgaggaagat

SEQ ID NO: 71286 - DNA, 25 bp, probe
cttctgggctacactatctaacatc

SEQ ID NO: 71287 - DNA, 25 bp, probe
acttcttctgggctacactatctaa

SEQ ID NO: 71288 - DNA, 25 bp, probe
aacttcttctgggctacactatcta

SEQ ID NO: 71289 - DNA, 25 bp, probe
taacttcttctgggctacactatct

SEQ ID NO: 71290 - DNA, 25 bp, probe
ttctgggctacactatctaacatct

SEQ ID NO: 71291 - DNA, 25 bp, probe
tcttctgggctacactatctaacat

SEQ ID NO: 71292 - DNA, 25 bp, probe
ttcttctgggctacactatctaaca

SEQ ID NO: 71293 - DNA, 25 bp, probe
tctgggctacactatctaacatctg

SEQ ID NO: 71294 - DNA, 25 bp, probe
ctgttgagtgacattgtgaggaaga

SEQ ID NO: 71295 - DNA, 25 bp, probe
aggtctctcagtgtacttgttccta

SEQ ID NO: 71296 - DNA, 25 bp, probe
gctaacttcttctgggctacactat

SEQ ID NO: 71297 - DNA, 25 bp, probe
cagtgtacttgttcctattgccttt

SEQ ID NO: 71298 - DNA, 25 bp, probe
ctgggctacactatctaacatctgg

SEQ ID NO: 71299 - DNA, 25 bp, probe
tacactatctaacatctggctgttg

SEQ ID NO: 71300 - DNA, 25 bp, probe
ctacactatctaacatctggctgtt

SEQ ID NO: 71301 - DNA, 25 bp, probe
ctatctaacatctggctgttgagtg

SEQ ID NO: 71302 - DNA, 25 bp, probe
cactatctaacatctggctgttgag

SEQ ID NO: 71303 - DNA, 25 bp, probe
tatctaacatctggctgttgagtga

SEQ ID NO: 71304 - DNA, 25 bp, probe
actatctaacatctggctgttgagt

SEQ ID NO: 71305 - DNA, 25 bp, probe
gaggtctctcagtgtacttgttcct

SEQ ID NO: 71306 - DNA, 25 bp, probe
acactatctaacatctggctgttga

SEQ ID NO: 71307 - DNA, 25 bp, probe
gtgacattgtgaggaagattgatca

SEQ ID NO: 71308 - DNA, 25 bp, probe
ttttccttttggctaacttcttctg

SEQ ID NO: 71309 - DNA, 25 bp, probe
cttgttcctattgccttttcctttt

SEQ ID NO: 71310 - DNA, 25 bp, probe
tacttgttcctattgccttttcctt

SEQ ID NO: 71311 - DNA, 25 bp, probe
cttttccttttggctaacttcttct

SEQ ID NO: 71312 - DNA, 25 bp, probe
ttgttcctattgccttttccttttg

SEQ ID NO: 71313 - DNA, 25 bp, probe
aattcttctgaacaacactcattgc

SEQ ID NO: 71314 - DNA, 25 bp, probe
gaacaacactcattgcctcttctaa

SEQ ID NO: 71315 - DNA, 25 bp, probe
attcttctgaacaacactcattgcc

SEQ ID NO: 71316 - DNA, 25 bp, probe
tgaacaacactcattgcctcttcta

SEQ ID NO: 71317 - DNA, 25 bp, probe
gaaccacaaattcttctgaacaaca

SEQ ID NO: 71318 - DNA, 25 bp, probe
aaccacaaattcttctgaacaacac

SEQ ID NO: 71319 - DNA, 25 bp, probe
ccacaaattcttctgaacaacactc

SEQ ID NO: 71320 - DNA, 25 bp, probe
ttctgaacaacactcattgcctctt

SEQ ID NO: 71321 - DNA, 25 bp, probe
ttcttctgaacaacactcattgcct

SEQ ID NO: 71322 - DNA, 25 bp, probe
aacaacactcattgcctcttctaaa

SEQ ID NO: 71323 - DNA, 25 bp, probe
cacaaattcttctgaacaacactca

SEQ ID NO: 71324 - DNA, 25 bp, probe
accacaaattcttctgaacaacact

SEQ ID NO: 71325 - DNA, 25 bp, probe
acaaattcttctgaacaacactcat

SEQ ID NO: 71326 - DNA, 25 bp, probe
cgaaccacaaattcttctgaacaac

SEQ ID NO: 71327 - DNA, 25 bp, probe
ctgaacaacactcattgcctcttct

SEQ ID NO: 71328 - DNA, 25 bp, probe
tctgaacaacactcattgcctcttc

SEQ ID NO: 71329 - DNA, 25 bp, probe
cttctgaacaacactcattgcctct

SEQ ID NO: 71330 - DNA, 25 bp, probe
tcttctgaacaacactcattgcctc

SEQ ID NO: 71331 - DNA, 25 bp, probe
aaattcttctgaacaacactcattg

SEQ ID NO: 71332 - DNA, 25 bp, probe
caaattcttctgaacaacactcatt

SEQ ID NO: 71333 - DNA, 25 bp, probe
ccgaaccacaaattcttctgaacaa

SEQ ID NO: 71334 - DNA, 25 bp, probe
caacactcattgcctcttctaaaag

SEQ ID NO: 71335 - DNA, 25 bp, probe
caaagaatccttctcttcctccaga

SEQ ID NO: 71336 - DNA, 25 bp, probe
ctggaggtggagttattttggaaaa

SEQ ID NO: 71337 - DNA, 25 bp, probe
acaacactcattgcctcttctaaaa

SEQ ID NO: 71338 - DNA, 25 bp, probe
cccgaaccacaaattcttctgaaca

SEQ ID NO: 71339 - DNA, 25 bp, probe
aacactcattgcctcttctaaaagc

SEQ ID NO: 71340 - DNA, 25 bp, probe
ccaaagaatccttctcttcctccag

SEQ ID NO: 71341 - DNA, 25 bp, probe
actggaggtggagttattttggaaa

SEQ ID NO: 71342 - DNA, 25 bp, probe
aaagaatccttctcttcctccagag

SEQ ID NO: 71343 - DNA, 25 bp, probe
ctcattgcctcttctaaaagctact

SEQ ID NO: 71344 - DNA, 25 bp, probe
agctcatttcacttactgttttgta

SEQ ID NO: 71345 - DNA, 25 bp, probe
cattgcctcttctaaaagctactga

SEQ ID NO: 71346 - DNA, 25 bp, probe
tcattgcctcttctaaaagctactg

SEQ ID NO: 71347 - DNA, 25 bp, probe
actcattgcctcttctaaaagctac

SEQ ID NO: 71348 - DNA, 25 bp, probe
cactcattgcctcttctaaaagcta

SEQ ID NO: 71349 - DNA, 25 bp, probe
attgcctcttctaaaagctactgag

SEQ ID NO: 71350 - DNA, 25 bp, probe
gctcatttcacttactgttttgtaa

SEQ ID NO: 71351 - DNA, 25 bp, probe
aagaatccttctcttcctccagagc

SEQ ID NO: 71352 - DNA, 25 bp, probe
cactggaggtggagttattttggaa

SEQ ID NO: 71353 - DNA, 25 bp, probe
acactcattgcctcttctaaaagct

SEQ ID NO: 71354 - DNA, 25 bp, probe
gacactggaggtggagttattttgg

SEQ ID NO: 71355 - DNA, 25 bp, probe
ggacactggaggtggagttattttg

SEQ ID NO: 71356 - DNA, 25 bp, probe
atcaggccaaagaatccttctcttc

SEQ ID NO: 71357 - DNA, 25 bp, probe
gtcttacgagcagcatatccatcta

SEQ ID NO: 71358 - DNA, 25 bp, probe
tcttacgagcagcatatccatctag

SEQ ID NO: 71359 - DNA, 25 bp, probe
cagtgatgtcaatagtggactctca

SEQ ID NO: 71360 - DNA, 25 bp, probe
gagtcttacgagcagcatatccatc

SEQ ID NO: 71361 - DNA, 25 bp, probe
ctttgggtcctgtggttcttattac

SEQ ID NO: 71362 - DNA, 25 bp, probe
gtcctgtggttcttattactgctgg

SEQ ID NO: 71363 - DNA, 25 bp, probe
ggtcctgtggttcttattactgctg

SEQ ID NO: 71364 - DNA, 25 bp, probe
agtcttacgagcagcatatccatct

SEQ ID NO: 71365 - DNA, 25 bp, probe
tttgggtcctgtggttcttattact

SEQ ID NO: 71366 - DNA, 25 bp, probe
actttgggtcctgtggttcttatta

SEQ ID NO: 71367 - DNA, 25 bp, probe
cgcttaaagaaggaaggtaacactt

SEQ ID NO: 71368 - DNA, 25 bp, probe
ctgtggttcttattactgctggctc

SEQ ID NO: 71369 - DNA, 25 bp, probe
ccagtgatgtcaatagtggactctc

SEQ ID NO: 71370 - DNA, 25 bp, probe
ttgggtcctgtggttcttattactg

SEQ ID NO: 71371 - DNA, 25 bp, probe
ttacgagcagcatatccatctagaa

SEQ ID NO: 71372 - DNA, 25 bp, probe
cacctccagtgactcaaattactag

SEQ ID NO: 71373 - DNA, 25 bp, probe
atatccatctagaacaccaccagag

SEQ ID NO: 71374 - DNA, 25 bp, probe
cttacgagcagcatatccatctaga

SEQ ID NO: 71375 - DNA, 25 bp, probe
catatccatctagaacaccaccaga

SEQ ID NO: 71376 - DNA, 25 bp, probe
tacgagcagcatatccatctagaac

SEQ ID NO: 71377 - DNA, 25 bp, probe
aagaaggaaggtaacactttgggtc

SEQ ID NO: 71378 - DNA, 25 bp, probe
ccgcttaaagaaggaaggtaacact

SEQ ID NO: 71379 - DNA, 25 bp, probe
taaagaaggaaggtaacactttggg

SEQ ID NO: 71380 - DNA, 25 bp, probe
gcttaaagaaggaaggtaacacttt

SEQ ID NO: 71381 - DNA, 25 bp, probe
ttaaagaaggaaggtaacactttgg

SEQ ID NO: 71382 - DNA, 25 bp, probe
cgagtcttacgagcagcatatccat

SEQ ID NO: 71383 - DNA, 25 bp, probe
catcaagagggtttcggatatggtg

SEQ ID NO: 71384 - DNA, 25 bp, probe
cacatcaagagggtttcggatatgg

SEQ ID NO: 71385 - DNA, 25 bp, probe
gcatatccatctagaacaccaccag

SEQ ID NO: 71386 - DNA, 25 bp, probe
cagcatatccatctagaacaccacc

SEQ ID NO: 71387 - DNA, 25 bp, probe
gagcagcatatccatctagaacacc

SEQ ID NO: 71388 - DNA, 25 bp, probe
gactctcactgtctaggagcatcac

SEQ ID NO: 71389 - DNA, 25 bp, probe
tgtggttcttattactgctggctcc

SEQ ID NO: 71390 - DNA, 25 bp, probe
cctgtggttcttattactgctggct

SEQ ID NO: 71391 - DNA, 25 bp, probe
tcctgtggttcttattactgctggc

SEQ ID NO: 71392 - DNA, 25 bp, probe
tatccatctagaacaccaccagagg

SEQ ID NO: 71393 - DNA, 25 bp, probe
agcatatccatctagaacaccacca

SEQ ID NO: 71394 - DNA, 25 bp, probe
cttaaagaaggaaggtaacactttg

SEQ ID NO: 71395 - DNA, 25 bp, probe
acatcaagagggtttcggatatggt

SEQ ID NO: 71396 - DNA, 25 bp, probe
cccgcttaaagaaggaaggtaacac

SEQ ID NO: 71397 - DNA, 25 bp, probe
cactttgggtcctgtggttcttatt

SEQ ID NO: 71398 - DNA, 25 bp, probe
cgagcagcatatccatctagaacac

SEQ ID NO: 71399 - DNA, 25 bp, probe
aaagaaggaaggtaacactttgggt

SEQ ID NO: 71400 - DNA, 25 bp, probe
gcagcatatccatctagaacaccac

SEQ ID NO: 71401 - DNA, 25 bp, probe
taaggaaatagaggctgagttagtg

SEQ ID NO: 71402 - DNA, 25 bp, probe
acattaaggaaatagaggctgagtt

SEQ ID NO: 71403 - DNA, 25 bp, probe
cacattaaggaaatagaggctgagt

SEQ ID NO: 71404 - DNA, 25 bp, probe
aaggaaatagaggctgagttagtga

SEQ ID NO: 71405 - DNA, 25 bp, probe
ccacattaaggaaatagaggctgag

SEQ ID NO: 71406 - DNA, 25 bp, probe
ttaaggaaatagaggctgagttagt

SEQ ID NO: 71407 - DNA, 25 bp, probe
aggaaatagaggctgagttagtgac

SEQ ID NO: 71408 - DNA, 25 bp, probe
ggaaatagaggctgagttagtgaca

SEQ ID NO: 71409 - DNA, 25 bp, probe
cattaaggaaatagaggctgagtta

SEQ ID NO: 71410 - DNA, 25 bp, probe
cccacattaaggaaatagaggctga

SEQ ID NO: 71411 - DNA, 25 bp, probe
gacgaaatcctgtcagatgataact

SEQ ID NO: 71412 - DNA, 25 bp, probe
gaaatagaggctgagttagtgacag

SEQ ID NO: 71413 - DNA, 25 bp, probe
attaaggaaatagaggctgagttag

SEQ ID NO: 71414 - DNA, 25 bp, probe
aaatagaggctgagttagtgacagg

SEQ ID NO: 71415 - DNA, 25 bp, probe
cgaaatctcaaagatcatggtagta

SEQ ID NO: 71416 - DNA, 25 bp, probe
tcgaaatctcaaagatcatggtagt

SEQ ID NO: 71417 - DNA, 25 bp, probe
catagccttcctgctgtgattcttc

SEQ ID NO: 71418 - DNA, 25 bp, probe
aatagaggctgagttagtgacaggg

SEQ ID NO: 71419 - DNA, 25 bp, probe
gaaatctcaaagatcatggtagtac

SEQ ID NO: 71420 - DNA, 25 bp, probe
tctcaaagatcatggtagtacttac

SEQ ID NO: 71421 - DNA, 25 bp, probe
ctcaaagatcatggtagtacttact

SEQ ID NO: 71422 - DNA, 25 bp, probe
atagaggctgagttagtgacagggt

SEQ ID NO: 71423 - DNA, 25 bp, probe
tgacgaaatcctgtcagatgataac

SEQ ID NO: 71424 - DNA, 25 bp, probe
gtgacgaaatcctgtcagatgataa

SEQ ID NO: 71425 - DNA, 25 bp, probe
ccatagccttcctgctgtgattctt

SEQ ID NO: 71426 - DNA, 25 bp, probe
atagccttcctgctgtgattcttcg

SEQ ID NO: 71427 - DNA, 25 bp, probe
tgtgacgaaatcctgtcagatgata

SEQ ID NO: 71428 - DNA, 25 bp, probe
gctgtgattcttcgaaatctcaaag

SEQ ID NO: 71429 - DNA, 25 bp, probe
tgctgtgattcttcgaaatctcaaa

SEQ ID NO: 71430 - DNA, 25 bp, probe
aatctcaaagatcatggtagtactt

SEQ ID NO: 71431 - DNA, 25 bp, probe
aaatctcaaagatcatggtagtact

SEQ ID NO: 71432 - DNA, 25 bp, probe
ctgctgtgattcttcgaaatctcaa

SEQ ID NO: 71433 - DNA, 25 bp, probe
tcttcgaaatctcaaagatcatggt

SEQ ID NO: 71434 - DNA, 25 bp, probe
ttcgaaatctcaaagatcatggtag

SEQ ID NO: 71435 - DNA, 25 bp, probe
cttcgaaatctcaaagatcatggta

SEQ ID NO: 71436 - DNA, 25 bp, probe
ttcttcgaaatctcaaagatcatgg

SEQ ID NO: 71437 - DNA, 25 bp, probe
ctgtgattcttcgaaatctcaaaga

SEQ ID NO: 71438 - DNA, 25 bp, probe
caggatcaagaccaagaccagcttt

SEQ ID NO: 71439 - DNA, 25 bp, probe
tgtgattcttcgaaatctcaaagat

SEQ ID NO: 71440 - DNA, 25 bp, probe
tagaggctgagttagtgacagggtg

SEQ ID NO: 71441 - DNA, 25 bp, probe
aggatcaagaccaagaccagctttg

SEQ ID NO: 71442 - DNA, 25 bp, probe
ctgtgacgaaatcctgtcagatgat

SEQ ID NO: 71443 - DNA, 25 bp, probe
cttcctgctgtgattcttcgaaatc

SEQ ID NO: 71444 - DNA, 25 bp, probe
gtgattcttcgaaatctcaaagatc

SEQ ID NO: 71445 - DNA, 25 bp, probe
tgaaggagatattgttgtactggac

SEQ ID NO: 71446 - DNA, 25 bp, probe
gaaggagatattgttgtactggacc

SEQ ID NO: 71447 - DNA, 25 bp, probe
atgaaggagatattgttgtactgga

SEQ ID NO: 71448 - DNA, 25 bp, probe
gatgaaggagatattgttgtactgg

SEQ ID NO: 71449 - DNA, 25 bp, probe
tataactcaccagagaaggacactg

SEQ ID NO: 71450 - DNA, 25 bp, probe
agatgaaggagatattgttgtactg

SEQ ID NO: 71451 - DNA, 25 bp, probe
ttataactcaccagagaaggacact

SEQ ID NO: 71452 - DNA, 25 bp, probe
ctgatgaaccaactttagagaacct

SEQ ID NO: 71453 - DNA, 25 bp, probe
agggaagaggcaagtttaatcatat

SEQ ID NO: 71454 - DNA, 25 bp, probe
tgatgaaccaactttagagaacctg

SEQ ID NO: 71455 - DNA, 25 bp, probe
cagggaagaggcaagtttaatcata

SEQ ID NO: 71456 - DNA, 25 bp, probe
ggcaagtttaatcatattcacaagc

SEQ ID NO: 71457 - DNA, 25 bp, probe
aagatgaaggagatattgttgtact

SEQ ID NO: 71458 - DNA, 25 bp, probe
gggaagaggcaagtttaatcatatt

SEQ ID NO: 71459 - DNA, 25 bp, probe
tctgatgaaccaactttagagaacc

SEQ ID NO: 71460 - DNA, 25 bp, probe
gcaagtttaatcatattcacaagca

SEQ ID NO: 71461 - DNA, 25 bp, probe
gtatgtgaagtcgccagcatttata

SEQ ID NO: 71462 - DNA, 25 bp, probe
agaggcaagtttaatcatattcaca

SEQ ID NO: 71463 - DNA, 25 bp, probe
atctgatgaaccaactttagagaac

SEQ ID NO: 71464 - DNA, 25 bp, probe
ataactcaccagagaaggacactga

SEQ ID NO: 71465 - DNA, 25 bp, probe
gaatctgatgaaccaactttagaga

SEQ ID NO: 71466 - DNA, 25 bp, probe
gatgaaccaactttagagaacctgc

SEQ ID NO: 71467 - DNA, 25 bp, probe
agaatctgatgaaccaactttagag

SEQ ID NO: 71468 - DNA, 25 bp, probe
taactcaccagagaaggacactgaa

SEQ ID NO: 71469 - DNA, 25 bp, probe
aggcaagtttaatcatattcacaag

SEQ ID NO: 71470 - DNA, 25 bp, probe
gaggcaagtttaatcatattcacaa

SEQ ID NO: 71471 - DNA, 25 bp, probe
aatctgatgaaccaactttagagaa

SEQ ID NO: 71472 - DNA, 25 bp, probe
aagaatctgatgaaccaactttaga

SEQ ID NO: 71473 - DNA, 25 bp, probe
tatgtgaagtcgccagcatttataa

SEQ ID NO: 71474 - DNA, 25 bp, probe
ggaagaggcaagtttaatcatattc

SEQ ID NO: 71475 - DNA, 25 bp, probe
aaggagatattgttgtactggaccc

SEQ ID NO: 71476 - DNA, 25 bp, probe
aagaggcaagtttaatcatattcac

SEQ ID NO: 71477 - DNA, 25 bp, probe
tttataactcaccagagaaggacac

SEQ ID NO: 71478 - DNA, 25 bp, probe
gcatttataactcaccagagaagga

SEQ ID NO: 71479 - DNA, 25 bp, probe
agcatttataactcaccagagaagg

SEQ ID NO: 71480 - DNA, 25 bp, probe
ggacctccacgaacttgaatcaatt

SEQ ID NO: 71481 - DNA, 25 bp, probe
cagcatttataactcaccagagaag

SEQ ID NO: 71482 - DNA, 25 bp, probe
ccagcatttataactcaccagagaa

SEQ ID NO: 71483 - DNA, 25 bp, probe
agtttaatcatattcacaagcacaa

SEQ ID NO: 71484 - DNA, 25 bp, probe
aagtttaatcatattcacaagcaca

SEQ ID NO: 71485 - DNA, 25 bp, probe
atttataactcaccagagaaggaca

SEQ ID NO: 71486 - DNA, 25 bp, probe
acgaacttgaatcaattgtagagga

SEQ ID NO: 71487 - DNA, 25 bp, probe
cacgaacttgaatcaattgtagagg

SEQ ID NO: 71488 - DNA, 25 bp, probe
ccacgaacttgaatcaattgtagag

SEQ ID NO: 71489 - DNA, 25 bp, probe
gagaagataatcaccaggacagagg

SEQ ID NO: 71490 - DNA, 25 bp, probe
ggagaagataatcaccaggacagag

SEQ ID NO: 71491 - DNA, 25 bp, probe
gaggagaagataatcaccaggacag

SEQ ID NO: 71492 - DNA, 25 bp, probe
ctgacagtggaggagaagataatca

SEQ ID NO: 71493 - DNA, 25 bp, probe
cgaacttgaagaagagagatcagaa

SEQ ID NO: 71494 - DNA, 25 bp, probe
aggagaagataatcaccaggacaga

SEQ ID NO: 71495 - DNA, 25 bp, probe
aaggtaagttattcctatcctgtgg

SEQ ID NO: 71496 - DNA, 25 bp, probe
aattccagcatgataacttcacaga

SEQ ID NO: 71497 - DNA, 25 bp, probe
ggtaagttattcctatcctgtggac

SEQ ID NO: 71498 - DNA, 25 bp, probe
aggtaagttattcctatcctgtgga

SEQ ID NO: 71499 - DNA, 25 bp, probe
attccagcatgataacttcacagag

SEQ ID NO: 71500 - DNA, 25 bp, probe
taagttattcctatcctgtggactg

SEQ ID NO: 71501 - DNA, 25 bp, probe
gtaagttattcctatcctgtggact

SEQ ID NO: 71502 - DNA, 25 bp, probe
tgacagtggaggagaagataatcac

SEQ ID NO: 71503 - DNA, 25 bp, probe
aagttattcctatcctgtggactgg

SEQ ID NO: 71504 - DNA, 25 bp, probe
cctgacagtggaggagaagataatc

SEQ ID NO: 71505 - DNA, 25 bp, probe
acgaacaccattcaaagattacaag

SEQ ID NO: 71506 - DNA, 25 bp, probe
gacgaacaccattcaaagattacaa

SEQ ID NO: 71507 - DNA, 25 bp, probe
cccttgatatacgctatggtaaaga

SEQ ID NO: 71508 - DNA, 25 bp, probe
gttattcctatcctgtggactggtt

SEQ ID NO: 71509 - DNA, 25 bp, probe
gaacaccattcaaagattacaagga

SEQ ID NO: 71510 - DNA, 25 bp, probe
ggaggagaagataatcaccaggaca

SEQ ID NO: 71511 - DNA, 25 bp, probe
cgaacaccattcaaagattacaagg

SEQ ID NO: 71512 - DNA, 25 bp, probe
gacagtggaggagaagataatcacc

SEQ ID NO: 71513 - DNA, 25 bp, probe
aaggcgaacttgaagaagagagatc

SEQ ID NO: 71514 - DNA, 25 bp, probe
acaccattcaaagattacaaggaaa

SEQ ID NO: 71515 - DNA, 25 bp, probe
aacaccattcaaagattacaaggaa

SEQ ID NO: 71516 - DNA, 25 bp, probe
gcgaacttgaagaagagagatcaga

SEQ ID NO: 71517 - DNA, 25 bp, probe
gacattgatgagaactgggagattg

SEQ ID NO: 71518 - DNA, 25 bp, probe
atgagaactgggagattgtggatag

SEQ ID NO: 71519 - DNA, 25 bp, probe
gatgagaactgggagattgtggata

SEQ ID NO: 71520 - DNA, 25 bp, probe
cattgatgagaactgggagattgtg

SEQ ID NO: 71521 - DNA, 25 bp, probe
tgacattgatgagaactgggagatt

SEQ ID NO: 71522 - DNA, 25 bp, probe
ggacgaacaccattcaaagattaca

SEQ ID NO: 71523 - DNA, 25 bp, probe
cagtggaggagaagataatcaccag

SEQ ID NO: 71524 - DNA, 25 bp, probe
taaagaggatctgaagcaaagaact

SEQ ID NO: 71525 - DNA, 25 bp, probe
gtaaagaggatctgaagcaaagaac

SEQ ID NO: 71526 - DNA, 25 bp, probe
agtaaagaggatctgaagcaaagaa

SEQ ID NO: 71527 - DNA, 25 bp, probe
ccagcatgataacttcacagaggaa

SEQ ID NO: 71528 - DNA, 25 bp, probe
ttccagcatgataacttcacagagg

SEQ ID NO: 71529 - DNA, 25 bp, probe
ccttgatatacgctatggtaaagaa

SEQ ID NO: 71530 - DNA, 25 bp, probe
agttattcctatcctgtggactggt

SEQ ID NO: 71531 - DNA, 25 bp, probe
aatgaaaggcgaacttgaagaagag

SEQ ID NO: 71532 - DNA, 25 bp, probe
ctgacattgatgagaactgggagat

SEQ ID NO: 71533 - DNA, 25 bp, probe
ctagttagtaaggatgaagaacagc

SEQ ID NO: 71534 - DNA, 25 bp, probe
gagacctcaagttccacatctacaa

SEQ ID NO: 71535 - DNA, 25 bp, probe
agacctcaagttccacatctacaac

SEQ ID NO: 71536 - DNA, 25 bp, probe
tagttagtaaggatgaagaacagct

SEQ ID NO: 71537 - DNA, 25 bp, probe
tctagttagtaaggatgaagaacag

SEQ ID NO: 71538 - DNA, 25 bp, probe
cgggttctagttagtaaggatgaag

SEQ ID NO: 71539 - DNA, 25 bp, probe
gggttctagttagtaaggatgaaga

SEQ ID NO: 71540 - DNA, 25 bp, probe
gacctcaagttccacatctacaacg

SEQ ID NO: 71541 - DNA, 25 bp, probe
ccaagaggtgaatttagtcctgaaa

SEQ ID NO: 71542 - DNA, 25 bp, probe
gcgggttctagttagtaaggatgaa

SEQ ID NO: 71543 - DNA, 25 bp, probe
gttgtagatgtggaacttgaggcag

SEQ ID NO: 71544 - DNA, 25 bp, probe
gagcgggttctagttagtaaggatg

SEQ ID NO: 71545 - DNA, 25 bp, probe
gaaggagcgggttctagttagtaag

SEQ ID NO: 71546 - DNA, 25 bp, probe
agcgggttctagttagtaaggatga

SEQ ID NO: 71547 - DNA, 25 bp, probe
ggttctagttagtaaggatgaagaa

SEQ ID NO: 71548 - DNA, 25 bp, probe
accaagaggtgaatttagtcctgaa

SEQ ID NO: 71549 - DNA, 25 bp, probe
tgaaggagcgggttctagttagtaa

SEQ ID NO: 71550 - DNA, 25 bp, probe
ggagacctcaagttccacatctaca

SEQ ID NO: 71551 - DNA, 25 bp, probe
aaaggaaatcttggagaaggtcagc

SEQ ID NO: 71552 - DNA, 25 bp, probe
gaccaagaggtgaatttagtcctga

SEQ ID NO: 71553 - DNA, 25 bp, probe
tattgagcaggaccaagaggtgaat

SEQ ID NO: 71554 - DNA, 25 bp, probe
atattgagcaggaccaagaggtgaa

SEQ ID NO: 71555 - DNA, 25 bp, probe
ggagcgggttctagttagtaaggat

SEQ ID NO: 71556 - DNA, 25 bp, probe
ttgtagatgtggaacttgaggcagg

SEQ ID NO: 71557 - DNA, 25 bp, probe
ttctagttagtaaggatgaagaaca

SEQ ID NO: 71558 - DNA, 25 bp, probe
cttggaaaaggaaatcttggagaag

SEQ ID NO: 71559 - DNA, 25 bp, probe
ctctcttggaaaaggaaatcttgga

SEQ ID NO: 71560 - DNA, 25 bp, probe
tcttggaaaaggaaatcttggagaa

SEQ ID NO: 71561 - DNA, 25 bp, probe
aaggagcgggttctagttagtaagg

SEQ ID NO: 71562 - DNA, 25 bp, probe
gaagaagaaaggtggcgagaagatg

SEQ ID NO: 71563 - DNA, 25 bp, probe
aaaaggaaatcttggagaaggtcag

SEQ ID NO: 71564 - DNA, 25 bp, probe
gaaaaggaaatcttggagaaggtca

SEQ ID NO: 71565 - DNA, 25 bp, probe
gtgaaggagcgggttctagttagta

SEQ ID NO: 71566 - DNA, 25 bp, probe
ttggaaaaggaaatcttggagaagg

SEQ ID NO: 71567 - DNA, 25 bp, probe
gatattgagcaggaccaagaggtga

SEQ ID NO: 71568 - DNA, 25 bp, probe
ctcttggaaaaggaaatcttggaga

SEQ ID NO: 71569 - DNA, 25 bp, probe
tctcttggaaaaggaaatcttggag

SEQ ID NO: 71570 - DNA, 25 bp, probe
ggaaaaggaaatcttggagaaggtc

SEQ ID NO: 71571 - DNA, 25 bp, probe
acctcaagttccacatctacaacgt

SEQ ID NO: 71572 - DNA, 25 bp, probe
tgaagaagaaaggtggcgagaagat

SEQ ID NO: 71573 - DNA, 25 bp, probe
gatggctctcttggaaaaggaaatc

SEQ ID NO: 71574 - DNA, 25 bp, probe
ctgtctcatgctctttccactacac

SEQ ID NO: 71575 - DNA, 25 bp, probe
aaggaaatcttggagaaggtcagca

SEQ ID NO: 71576 - DNA, 25 bp, probe
attgagcaggaccaagaggtgaatt

SEQ ID NO: 71577 - DNA, 25 bp, probe
agaagacactatgaatctaccgaga

SEQ ID NO: 71578 - DNA, 25 bp, probe
cagaagacactatgaatctaccgag

SEQ ID NO: 71579 - DNA, 25 bp, probe
atggctattgagatggtagaaggag

SEQ ID NO: 71580 - DNA, 25 bp, probe
tgctcagaagacactatgaatctac

SEQ ID NO: 71581 - DNA, 25 bp, probe
ctcagaagacactatgaatctaccg

SEQ ID NO: 71582 - DNA, 25 bp, probe
tcagaagacactatgaatctaccga

SEQ ID NO: 71583 - DNA, 25 bp, probe
gctcagaagacactatgaatctacc

SEQ ID NO: 71584 - DNA, 25 bp, probe
ctgctcagaagacactatgaatcta

SEQ ID NO: 71585 - DNA, 25 bp, probe
ctattgagatggtagaaggagagcc

SEQ ID NO: 71586 - DNA, 25 bp, probe
ggctattgagatggtagaaggagag

SEQ ID NO: 71587 - DNA, 25 bp, probe
tggctattgagatggtagaaggaga

SEQ ID NO: 71588 - DNA, 25 bp, probe
atcatggctattgagatggtagaag

SEQ ID NO: 71589 - DNA, 25 bp, probe
ggtatcatggctattgagatggtag

SEQ ID NO: 71590 - DNA, 25 bp, probe
gtatcatggctattgagatggtaga

SEQ ID NO: 71591 - DNA, 25 bp, probe
catggctattgagatggtagaagga

SEQ ID NO: 71592 - DNA, 25 bp, probe
tatcatggctattgagatggtagaa

SEQ ID NO: 71593 - DNA, 25 bp, probe
tcatggctattgagatggtagaagg

SEQ ID NO: 71594 - DNA, 25 bp, probe
gctgctcagaagacactatgaatct

SEQ ID NO: 71595 - DNA, 25 bp, probe
tattgagatggtagaaggagagcct

SEQ ID NO: 71596 - DNA, 25 bp, probe
gaagacactatgaatctaccgagat

SEQ ID NO: 71597 - DNA, 25 bp, probe
agctgctcagaagacactatgaatc

SEQ ID NO: 71598 - DNA, 25 bp, probe
attgagatggtagaaggagagcctc

SEQ ID NO: 71599 - DNA, 25 bp, probe
gggtatcatggctattgagatggta

SEQ ID NO: 71600 - DNA, 25 bp, probe
agcctggatgaggaagatgagaatt

SEQ ID NO: 71601 - DNA, 25 bp, probe
gctattgagatggtagaaggagagc

SEQ ID NO: 71602 - DNA, 25 bp, probe
ctctgggtatcatggctattgagat

SEQ ID NO: 71603 - DNA, 25 bp, probe
tctgggtatcatggctattgagatg

SEQ ID NO: 71604 - DNA, 25 bp, probe
tatggtctctgggtatcatggctat

SEQ ID NO: 71605 - DNA, 25 bp, probe
atatggtctctgggtatcatggcta

SEQ ID NO: 71606 - DNA, 25 bp, probe
gtctctgggtatcatggctattgag

SEQ ID NO: 71607 - DNA, 25 bp, probe
ctgggtatcatggctattgagatgg

SEQ ID NO: 71608 - DNA, 25 bp, probe
cagcctggatgaggaagatgagaat

SEQ ID NO: 71609 - DNA, 25 bp, probe
atggtctctgggtatcatggctatt

SEQ ID NO: 71610 - DNA, 25 bp, probe
ctccatacctcaatgaaaatccctt

SEQ ID NO: 71611 - DNA, 25 bp, probe
tccatacctcaatgaaaatcccttg

SEQ ID NO: 71612 - DNA, 25 bp, probe
gtatcagagcctgtacatgaagtga

SEQ ID NO: 71613 - DNA, 25 bp, probe
tgggtatcatggctattgagatggt

SEQ ID NO: 71614 - DNA, 25 bp, probe
cctccatacctcaatgaaaatccct

SEQ ID NO: 71615 - DNA, 25 bp, probe
gagcctccatacctcaatgaaaatc

SEQ ID NO: 71616 - DNA, 25 bp, probe
gcctggatgaggaagatgagaattc

SEQ ID NO: 71617 - DNA, 25 bp, probe
tggtctctgggtatcatggctattg

SEQ ID NO: 71618 - DNA, 25 bp, probe
agagcctccatacctcaatgaaaat

SEQ ID NO: 71619 - DNA, 25 bp, probe
ggtctctgggtatcatggctattga

SEQ ID NO: 71620 - DNA, 25 bp, probe
gacatatggtctctgggtatcatgg

SEQ ID NO: 71621 - DNA, 25 bp, probe
atctttgaattggtggaacttgttg

SEQ ID NO: 71622 - DNA, 25 bp, probe
aatggaacatacgggcaagtttata

SEQ ID NO: 71623 - DNA, 25 bp, probe
gaattggtggaacttgttggaaatg

SEQ ID NO: 71624 - DNA, 25 bp, probe
gatctttgaattggtggaacttgtt

SEQ ID NO: 71625 - DNA, 25 bp, probe
aaatggaacatacgggcaagtttat

SEQ ID NO: 71626 - DNA, 25 bp, probe
tgaattggtggaacttgttggaaat

SEQ ID NO: 71627 - DNA, 25 bp, probe
ttgaattggtggaacttgttggaaa

SEQ ID NO: 71628 - DNA, 25 bp, probe
tttgaattggtggaacttgttggaa

SEQ ID NO: 71629 - DNA, 25 bp, probe
gaaatggaacatacgggcaagttta

SEQ ID NO: 71630 - DNA, 25 bp, probe
ctttgaattggtggaacttgttgga

SEQ ID NO: 71631 - DNA, 25 bp, probe
tctttgaattggtggaacttgttgg

SEQ ID NO: 71632 - DNA, 25 bp, probe
atggaacatacgggcaagtttataa

SEQ ID NO: 71633 - DNA, 25 bp, probe
ggatctttgaattggtggaacttgt

SEQ ID NO: 71634 - DNA, 25 bp, probe
aattggtggaacttgttggaaatgg

SEQ ID NO: 71635 - DNA, 25 bp, probe
tggaacatacgggcaagtttataag

SEQ ID NO: 71636 - DNA, 25 bp, probe
gcaagtttataagcctcatctacgg

SEQ ID NO: 71637 - DNA, 25 bp, probe
gggatctttgaattggtggaacttg

SEQ ID NO: 71638 - DNA, 25 bp, probe
agggatctttgaattggtggaactt

SEQ ID NO: 71639 - DNA, 25 bp, probe
ctgattcccactgtgtccatctatg

SEQ ID NO: 71640 - DNA, 25 bp, probe
attggtggaacttgttggaaatgga

SEQ ID NO: 71641 - DNA, 25 bp, probe
ggaacatacgggcaagtttataagc

SEQ ID NO: 71642 - DNA, 25 bp, probe
ttggtggaacttgttggaaatggaa

SEQ ID NO: 71643 - DNA, 25 bp, probe
cagggatctttgaattggtggaact

SEQ ID NO: 71644 - DNA, 25 bp, probe
cctgattcccactgtgtccatctat

SEQ ID NO: 71645 - DNA, 25 bp, probe
ggaacttgttggaaatggaacatac

SEQ ID NO: 71646 - DNA, 25 bp, probe
tggtggaacttgttggaaatggaac

SEQ ID NO: 71647 - DNA, 25 bp, probe
tggaacttgttggaaatggaacata

SEQ ID NO: 71648 - DNA, 25 bp, probe
gaacttgttggaaatggaacatacg

SEQ ID NO: 71649 - DNA, 25 bp, probe
attcccactgtgtccatctatggta

SEQ ID NO: 71650 - DNA, 25 bp, probe
ggaaatggaacatacgggcaagttt

SEQ ID NO: 71651 - DNA, 25 bp, probe
aacttgttggaaatggaacatacgg

SEQ ID NO: 71652 - DNA, 25 bp, probe
gtggaacttgttggaaatggaacat

SEQ ID NO: 71653 - DNA, 25 bp, probe
gtgtccatctatggtagcacattgc

SEQ ID NO: 71654 - DNA, 25 bp, probe
ttcccactgtgtccatctatggtag

SEQ ID NO: 71655 - DNA, 25 bp, probe
tcctgattcccactgtgtccatcta

SEQ ID NO: 71656 - DNA, 25 bp, probe
gcagggatctttgaattggtggaac

SEQ ID NO: 71657 - DNA, 25 bp, probe
gggcaagtttataagcctcatctac

SEQ ID NO: 71658 - DNA, 25 bp, probe
gttggaaatggaacatacgggcaag

SEQ ID NO: 71659 - DNA, 25 bp, probe
caagtttataagcctcatctacggc

SEQ ID NO: 71660 - DNA, 25 bp, probe
ggcaagtttataagcctcatctacg

SEQ ID NO: 71661 - DNA, 25 bp, probe
ctgtgtccatctatggtagcacatt

SEQ ID NO: 71662 - DNA, 25 bp, probe
ccactgtgtccatctatggtagcac

SEQ ID NO: 71663 - DNA, 25 bp, probe
gattcccactgtgtccatctatggt

SEQ ID NO: 71664 - DNA, 25 bp, probe
tgattcccactgtgtccatctatgg

SEQ ID NO: 71665 - DNA, 25 bp, probe
gaacaagctgtggtactttgaattt

SEQ ID NO: 71666 - DNA, 25 bp, probe
aacaagctgtggtactttgaatttg

SEQ ID NO: 71667 - DNA, 25 bp, probe
ggatgaagaacaagctgtggtactt

SEQ ID NO: 71668 - DNA, 25 bp, probe
agaacaagctgtggtactttgaatt

SEQ ID NO: 71669 - DNA, 25 bp, probe
aagaacaagctgtggtactttgaat

SEQ ID NO: 71670 - DNA, 25 bp, probe
gatgaagaacaagctgtggtacttt

SEQ ID NO: 71671 - DNA, 25 bp, probe
gaagaacaagctgtggtactttgaa

SEQ ID NO: 71672 - DNA, 25 bp, probe
atgaagaacaagctgtggtactttg

SEQ ID NO: 71673 - DNA, 25 bp, probe
taaaattactcacaagaaccaagcg

SEQ ID NO: 71674 - DNA, 25 bp, probe
acaagctgtggtactttgaatttgg

SEQ ID NO: 71675 - DNA, 25 bp, probe
caggatgaagaacaagctgtggtac

SEQ ID NO: 71676 - DNA, 25 bp, probe
aggatgaagaacaagctgtggtact

SEQ ID NO: 71677 - DNA, 25 bp, probe
gcacgattaaaattactcacaagaa

SEQ ID NO: 71678 - DNA, 25 bp, probe
ttaaaattactcacaagaaccaagc

SEQ ID NO: 71679 - DNA, 25 bp, probe
tgaagaacaagctgtggtactttga

SEQ ID NO: 71680 - DNA, 25 bp, probe
aattctgcgttcaagacctcagtga

SEQ ID NO: 71681 - DNA, 25 bp, probe
cgattaaaattactcacaagaacca

SEQ ID NO: 71682 - DNA, 25 bp, probe
acgattaaaattactcacaagaacc

SEQ ID NO: 71683 - DNA, 25 bp, probe
gaaattctgcgttcaagacctcagt

SEQ ID NO: 71684 - DNA, 25 bp, probe
aaggaagagccgttcaaaagactaa

SEQ ID NO: 71685 - DNA, 25 bp, probe
cactgaccccaaagaactgaaattc

SEQ ID NO: 71686 - DNA, 25 bp, probe
aaagaactgaaattctgcgttcaag

SEQ ID NO: 71687 - DNA, 25 bp, probe
tactttgaatttggcacctcggaga

SEQ ID NO: 71688 - DNA, 25 bp, probe
caaagaactgaaattctgcgttcaa

SEQ ID NO: 71689 - DNA, 25 bp, probe
aaattctgcgttcaagacctcagtg

SEQ ID NO: 71690 - DNA, 25 bp, probe
caagctgtggtactttgaatttggc

SEQ ID NO: 71691 - DNA, 25 bp, probe
cattctcaacattcccagcatgtac

SEQ ID NO: 71692 - DNA, 25 bp, probe
gtactttgaatttggcacctcggag

SEQ ID NO: 71693 - DNA, 25 bp, probe
catagaccccaggatgaagaacaag

SEQ ID NO: 71694 - DNA, 25 bp, probe
aagaactgaaattctgcgttcaaga

SEQ ID NO: 71695 - DNA, 25 bp, probe
caagaaactccacgaccacattgag

SEQ ID NO: 71696 - DNA, 25 bp, probe
tgcacgattaaaattactcacaaga

SEQ ID NO: 71697 - DNA, 25 bp, probe
ccatgttgcacgattaaaattactc

SEQ ID NO: 71698 - DNA, 25 bp, probe
gaaggaagagccgttcaaaagacta

SEQ ID NO: 71699 - DNA, 25 bp, probe
gccatgttgcacgattaaaattact

SEQ ID NO: 71700 - DNA, 25 bp, probe
agccatgttgcacgattaaaattac

SEQ ID NO: 71701 - DNA, 25 bp, probe
cagccatgttgcacgattaaaatta

SEQ ID NO: 71702 - DNA, 25 bp, probe
aagctgtggtactttgaatttggca

SEQ ID NO: 71703 - DNA, 25 bp, probe
tcactgaccccaaagaactgaaatt

SEQ ID NO: 71704 - DNA, 25 bp, probe
cacgattaaaattactcacaagaac

SEQ ID NO: 71705 - DNA, 25 bp, probe
atgttgcacgattaaaattactcac

SEQ ID NO: 71706 - DNA, 25 bp, probe
catgttgcacgattaaaattactca

SEQ ID NO: 71707 - DNA, 25 bp, probe
attctgcgttcaagacctcagtgac

SEQ ID NO: 71708 - DNA, 25 bp, probe
agaactgaaattctgcgttcaagac

SEQ ID NO: 71709 - DNA, 25 bp, probe
ctatgaaaagagtgatggttcctgg

SEQ ID NO: 71710 - DNA, 25 bp, probe
gctatgaaaagagtgatggttcctg

SEQ ID NO: 71711 - DNA, 25 bp, probe
tatgaaaagagtgatggttcctggg

SEQ ID NO: 71712 - DNA, 25 bp, probe
ggctatgaaaagagtgatggttcct

SEQ ID NO: 71713 - DNA, 25 bp, probe
cggctatgaaaagagtgatggttcc

SEQ ID NO: 71714 - DNA, 25 bp, probe
atgaaaagagtgatggttcctgggg

SEQ ID NO: 71715 - DNA, 25 bp, probe
aggatcaagcaccccaacattgtag

SEQ ID NO: 71716 - DNA, 25 bp, probe
caggatcaagcaccccaacattgta

SEQ ID NO: 71717 - DNA, 25 bp, probe
gaaaagagtgatggttcctggggac

SEQ ID NO: 71718 - DNA, 25 bp, probe
aagatcgtaacaacttatgacatgc

SEQ ID NO: 71719 - DNA, 25 bp, probe
gatcgtaacaacttatgacatgcaa

SEQ ID NO: 71720 - DNA, 25 bp, probe
atcgtaacaacttatgacatgcaac

SEQ ID NO: 71721 - DNA, 25 bp, probe
cgtaacaacttatgacatgcaactt

SEQ ID NO: 71722 - DNA, 25 bp, probe
gagaggaatgctgagaagtgaagac

SEQ ID NO: 71723 - DNA, 25 bp, probe
gcaaagaaagcagtttagagatgat

SEQ ID NO: 71724 - DNA, 25 bp, probe
agatcgtaacaacttatgacatgca

SEQ ID NO: 71725 - DNA, 25 bp, probe
aggacttctcagactttgtaacttc

SEQ ID NO: 71726 - DNA, 25 bp, probe
ggacttctcagactttgtaacttca

SEQ ID NO: 71727 - DNA, 25 bp, probe
tcgtaacaacttatgacatgcaact

SEQ ID NO: 71728 - DNA, 25 bp, probe
aagcagtttagagatgattcagtcc

SEQ ID NO: 71729 - DNA, 25 bp, probe
aaggacttctcagactttgtaactt

SEQ ID NO: 71730 - DNA, 25 bp, probe
ctaagaatgagacattggagaacct

SEQ ID NO: 71731 - DNA, 25 bp, probe
atgctaagaatgagacattggagaa

SEQ ID NO: 71732 - DNA, 25 bp, probe
taagaatgagacattggagaacctg

SEQ ID NO: 71733 - DNA, 25 bp, probe
aaagcagtttagagatgattcagtc

SEQ ID NO: 71734 - DNA, 25 bp, probe
tatgctaagaatgagacattggaga

SEQ ID NO: 71735 - DNA, 25 bp, probe
gacttctcagactttgtaacttcat

SEQ ID NO: 71736 - DNA, 25 bp, probe
tgctaagaatgagacattggagaac

SEQ ID NO: 71737 - DNA, 25 bp, probe
taaggacttctcagactttgtaact

SEQ ID NO: 71738 - DNA, 25 bp, probe
gaaagcagtttagagatgattcagt

SEQ ID NO: 71739 - DNA, 25 bp, probe
gacattggagaacctgaaacaaatc

SEQ ID NO: 71740 - DNA, 25 bp, probe
tatgacatgcaacttaaggacttct

SEQ ID NO: 71741 - DNA, 25 bp, probe
ggcaaagaaagcagtttagagatga

SEQ ID NO: 71742 - DNA, 25 bp, probe
aggcaaagaaagcagtttagagatg

SEQ ID NO: 71743 - DNA, 25 bp, probe
caggcaaagaaagcagtttagagat

SEQ ID NO: 71744 - DNA, 25 bp, probe
agacattggagaacctgaaacaaat

SEQ ID NO: 71745 - DNA, 25 bp, probe
agaaagcagtttagagatgattcag

SEQ ID NO: 71746 - DNA, 25 bp, probe
ttatgacatgcaacttaaggacttc

SEQ ID NO: 71747 - DNA, 25 bp, probe
gtttagagatgattcagtccctcaa

SEQ ID NO: 71748 - DNA, 25 bp, probe
aaagcaaacgatgaaactggagaat

SEQ ID NO: 71749 - DNA, 25 bp, probe
tttagagatgattcagtccctcaag

SEQ ID NO: 71750 - DNA, 25 bp, probe
cagtttagagatgattcagtccctc

SEQ ID NO: 71751 - DNA, 25 bp, probe
gctaagaatgagacattggagaacc

SEQ ID NO: 71752 - DNA, 25 bp, probe
acttctcagactttgtaacttcatt

SEQ ID NO: 71753 - DNA, 25 bp, probe
atgacatgcaacttaaggacttctc

SEQ ID NO: 71754 - DNA, 25 bp, probe
agtttagagatgattcagtccctca

SEQ ID NO: 71755 - DNA, 25 bp, probe
ttaaggacttctcagactttgtaac

SEQ ID NO: 71756 - DNA, 25 bp, probe
atatgctaagaatgagacattggag

SEQ ID NO: 71757 - DNA, 25 bp, probe
aagaaagcagtttagagatgattca

SEQ ID NO: 71758 - DNA, 25 bp, probe
agaatgagacattggagaacctgaa

SEQ ID NO: 71759 - DNA, 25 bp, probe
aagaatgagacattggagaacctga

SEQ ID NO: 71760 - DNA, 25 bp, probe
gagacattggagaacctgaaacaaa

SEQ ID NO: 71761 - DNA, 25 bp, probe
gtaacaacttatgacatgcaactta

SEQ ID NO: 71762 - DNA, 25 bp, probe
gattgacaaggagatcagtgagatg

SEQ ID NO: 71763 - DNA, 25 bp, probe
agattgacaaggagatcagtgagat

SEQ ID NO: 71764 - DNA, 25 bp, probe
attgacaaggagatcagtgagatga

SEQ ID NO: 71765 - DNA, 25 bp, probe
ttgacaaggagatcagtgagatgaa

SEQ ID NO: 71766 - DNA, 25 bp, probe
gagattgacaaggagatcagtgaga

SEQ ID NO: 71767 - DNA, 25 bp, probe
tgacaaggagatcagtgagatgaag

SEQ ID NO: 71768 - DNA, 25 bp, probe
catggaggagattgacaaggagatc

SEQ ID NO: 71769 - DNA, 25 bp, probe
ggagattgacaaggagatcagtgag

SEQ ID NO: 71770 - DNA, 25 bp, probe
gaggagattgacaaggagatcagtg

SEQ ID NO: 71771 - DNA, 25 bp, probe
aggagattgacaaggagatcagtga

SEQ ID NO: 71772 - DNA, 25 bp, probe
atggaggagattgacaaggagatca

SEQ ID NO: 71773 - DNA, 25 bp, probe
gctgaagagttccttaagaatcatg

SEQ ID NO: 71774 - DNA, 25 bp, probe
cttcatggaggagattgacaaggag

SEQ ID NO: 71775 - DNA, 25 bp, probe
ggctgaagagttccttaagaatcat

SEQ ID NO: 71776 - DNA, 25 bp, probe
gagcagagaacttctttatccttcg

SEQ ID NO: 71777 - DNA, 25 bp, probe
cgagcagagaacttctttatccttc

SEQ ID NO: 71778 - DNA, 25 bp, probe
tcatggaggagattgacaaggagat

SEQ ID NO: 71779 - DNA, 25 bp, probe
gtggctgaagagttccttaagaatc

SEQ ID NO: 71780 - DNA, 25 bp, probe
gacaaggagatcagtgagatgaagc

SEQ ID NO: 71781 - DNA, 25 bp, probe
gcattgtggctgaagagttccttaa

SEQ ID NO: 71782 - DNA, 25 bp, probe
ttcatggaggagattgacaaggaga

SEQ ID NO: 71783 - DNA, 25 bp, probe
cattgtggctgaagagttccttaag

SEQ ID NO: 71784 - DNA, 25 bp, probe
ctgaagagttccttaagaatcatgt

SEQ ID NO: 71785 - DNA, 25 bp, probe
tgtggctgaagagttccttaagaat

SEQ ID NO: 71786 - DNA, 25 bp, probe
attgtggctgaagagttccttaaga

SEQ ID NO: 71787 - DNA, 25 bp, probe
tggctgaagagttccttaagaatca

SEQ ID NO: 71788 - DNA, 25 bp, probe
gatgcgagcagagaacttctttatc

SEQ ID NO: 71789 - DNA, 25 bp, probe
ttgtggctgaagagttccttaagaa

SEQ ID NO: 71790 - DNA, 25 bp, probe
acttcatggaggagattgacaagga

SEQ ID NO: 71791 - DNA, 25 bp, probe
cacttcatggaggagattgacaagg

SEQ ID NO: 71792 - DNA, 25 bp, probe
ggaggagattgacaaggagatcagt

SEQ ID NO: 71793 - DNA, 25 bp, probe
tggaggagattgacaaggagatcag

SEQ ID NO: 71794 - DNA, 25 bp, probe
tgaagagttccttaagaatcatgtt

SEQ ID NO: 71795 - DNA, 25 bp, probe
agtgagatgaagctgtcagtcaatg

SEQ ID NO: 71796 - DNA, 25 bp, probe
gagatcagtgagatgaagctgtcag

SEQ ID NO: 71797 - DNA, 25 bp, probe
ggtgtcagctttagagaaacatttc

SEQ ID NO: 71798 - DNA, 25 bp, probe
tgatgcgagcagagaacttctttat

SEQ ID NO: 71799 - DNA, 25 bp, probe
atgatgcgagcagagaacttcttta

SEQ ID NO: 71800 - DNA, 25 bp, probe
cagtgagatgaagctgtcagtcaat

SEQ ID NO: 71801 - DNA, 25 bp, probe
agcagagaacttctttatccttcga

SEQ ID NO: 71802 - DNA, 25 bp, probe
caacttccacacagagcagatgtac

SEQ ID NO: 71803 - DNA, 25 bp, probe
gatcagtgagatgaagctgtcagtc

SEQ ID NO: 71804 - DNA, 25 bp, probe
caaggagatcagtgagatgaagctg

SEQ ID NO: 71805 - DNA, 25 bp, probe
acaaggagatcagtgagatgaagct

SEQ ID NO: 71806 - DNA, 25 bp, probe
gaacacgatggacctcaagaatcaa

SEQ ID NO: 71807 - DNA, 25 bp, probe
cacgatggacctcaagaatcaaatt

SEQ ID NO: 71808 - DNA, 25 bp, probe
acacgatggacctcaagaatcaaat

SEQ ID NO: 71809 - DNA, 25 bp, probe
aacacgatggacctcaagaatcaaa

SEQ ID NO: 71810 - DNA, 25 bp, probe
acgatggacctcaagaatcaaattt

SEQ ID NO: 71811 - DNA, 25 bp, probe
cttctattcagggaacacgatggac

SEQ ID NO: 71812 - DNA, 25 bp, probe
ggaacacgatggacctcaagaatca

SEQ ID NO: 71813 - DNA, 25 bp, probe
ccttggcgtcatactctaccatatg

SEQ ID NO: 71814 - DNA, 25 bp, probe
ttctattcagggaacacgatggacc

SEQ ID NO: 71815 - DNA, 25 bp, probe
gccttggcgtcatactctaccatat

SEQ ID NO: 71816 - DNA, 25 bp, probe
cgatggacctcaagaatcaaatttt

SEQ ID NO: 71817 - DNA, 25 bp, probe
aatcaaattttcacaggaagctacc

SEQ ID NO: 71818 - DNA, 25 bp, probe
ggacctcaagaatcaaattttcaca

SEQ ID NO: 71819 - DNA, 25 bp, probe
tggacctcaagaatcaaattttcac

SEQ ID NO: 71820 - DNA, 25 bp, probe
caccattcctgctcagaactcttcc

SEQ ID NO: 71821 - DNA, 25 bp, probe
ccaccattcctgctcagaactcttc

SEQ ID NO: 71822 - DNA, 25 bp, probe
aagaatcaaattttcacaggaagct

SEQ ID NO: 71823 - DNA, 25 bp, probe
caagaatcaaattttcacaggaagc

SEQ ID NO: 71824 - DNA, 25 bp, probe
ccttctattcagggaacacgatgga

SEQ ID NO: 71825 - DNA, 25 bp, probe
cattcctgctcagaactcttcctgg

SEQ ID NO: 71826 - DNA, 25 bp, probe
ccattcctgctcagaactcttcctg

SEQ ID NO: 71827 - DNA, 25 bp, probe
atcaaattttcacaggaagctacca

SEQ ID NO: 71828 - DNA, 25 bp, probe
atggacctcaagaatcaaattttca

SEQ ID NO: 71829 - DNA, 25 bp, probe
gaatcaaattttcacaggaagctac

SEQ ID NO: 71830 - DNA, 25 bp, probe
agaatcaaattttcacaggaagcta

SEQ ID NO: 71831 - DNA, 25 bp, probe
gacctcaagaatcaaattttcacag

SEQ ID NO: 71832 - DNA, 25 bp, probe
gatggacctcaagaatcaaattttc

SEQ ID NO: 71833 - DNA, 25 bp, probe
aagtgaaggcagaagaccaccattc

SEQ ID NO: 71834 - DNA, 25 bp, probe
gaagtgaaggcagaagaccaccatt

SEQ ID NO: 71835 - DNA, 25 bp, probe
tcaaattttcacaggaagctaccac

SEQ ID NO: 71836 - DNA, 25 bp, probe
tcaagaatcaaattttcacaggaag

SEQ ID NO: 71837 - DNA, 25 bp, probe
ctcaagaatcaaattttcacaggaa

SEQ ID NO: 71838 - DNA, 25 bp, probe
acctcaagaatcaaattttcacagg

SEQ ID NO: 71839 - DNA, 25 bp, probe
cctcaagaatcaaattttcacagga

SEQ ID NO: 71840 - DNA, 25 bp, probe
ctattcagggaacacgatggacctc

SEQ ID NO: 71841 - DNA, 25 bp, probe
caaattttcacaggaagctaccacg

SEQ ID NO: 71842 - DNA, 25 bp, probe
tctattcagggaacacgatggacct

SEQ ID NO: 71843 - DNA, 25 bp, probe
tattcagggaacacgatggacctca

SEQ ID NO: 71844 - DNA, 25 bp, probe
aaattttcacaggaagctaccacgc

SEQ ID NO: 71845 - DNA, 25 bp, probe
atggtgatgatgaggatgaactctt

SEQ ID NO: 71846 - DNA, 25 bp, probe
tggtgatgatgaggatgaactcttc

SEQ ID NO: 71847 - DNA, 25 bp, probe
catggtgatgatgaggatgaactct

SEQ ID NO: 71848 - DNA, 25 bp, probe
ggtgatgatgaggatgaactcttcg

SEQ ID NO: 71849 - DNA, 25 bp, probe
tgatgatgaggatgaactcttcgag

SEQ ID NO: 71850 - DNA, 25 bp, probe
gtgatgatgaggatgaactcttcga

SEQ ID NO: 71851 - DNA, 25 bp, probe
gtccttctgtacgagatgctcattg

SEQ ID NO: 71852 - DNA, 25 bp, probe
tccttctgtacgagatgctcattgg

SEQ ID NO: 71853 - DNA, 25 bp, probe
ggtccttctgtacgagatgctcatt

SEQ ID NO: 71854 - DNA, 25 bp, probe
atgatgaggatgaactcttcgagtc

SEQ ID NO: 71855 - DNA, 25 bp, probe
gatgatgaggatgaactcttcgagt

SEQ ID NO: 71856 - DNA, 25 bp, probe
ttgggatgtgcaaagagaacatatt

SEQ ID NO: 71857 - DNA, 25 bp, probe
tttgggatgtgcaaagagaacatat

SEQ ID NO: 71858 - DNA, 25 bp, probe
tgggatgtgcaaagagaacatattc

SEQ ID NO: 71859 - DNA, 25 bp, probe
attctctgtggactggtggtctttc

SEQ ID NO: 71860 - DNA, 25 bp, probe
ctgaagtacacattctctgtggact

SEQ ID NO: 71861 - DNA, 25 bp, probe
caaagagaacatattcggggagagc

SEQ ID NO: 71862 - DNA, 25 bp, probe
gcaaagagaacatattcggggagag

SEQ ID NO: 71863 - DNA, 25 bp, probe
atgaggatgaactcttcgagtccat

SEQ ID NO: 71864 - DNA, 25 bp, probe
tgaagtacacattctctgtggactg

SEQ ID NO: 71865 - DNA, 25 bp, probe
gatgtgcaaagagaacatattcggg

SEQ ID NO: 71866 - DNA, 25 bp, probe
ggatgtgcaaagagaacatattcgg

SEQ ID NO: 71867 - DNA, 25 bp, probe
gggatgtgcaaagagaacatattcg

SEQ ID NO: 71868 - DNA, 25 bp, probe
gactatatcgcccctgagatcctac

SEQ ID NO: 71869 - DNA, 25 bp, probe
cattctctgtggactggtggtcttt

SEQ ID NO: 71870 - DNA, 25 bp, probe
atcaagattgccgactttgggatgt

SEQ ID NO: 71871 - DNA, 25 bp, probe
acatcaagattgccgactttgggat

SEQ ID NO: 71872 - DNA, 25 bp, probe
tgactatatcgcccctgagatccta

SEQ ID NO: 71873 - DNA, 25 bp, probe
gaagtacacattctctgtggactgg

SEQ ID NO: 71874 - DNA, 25 bp, probe
cctgaagtacacattctctgtggac

SEQ ID NO: 71875 - DNA, 25 bp, probe
tgaggatgaactcttcgagtccatc

SEQ ID NO: 71876 - DNA, 25 bp, probe
gatgaggatgaactcttcgagtcca

SEQ ID NO: 71877 - DNA, 25 bp, probe
tgatgaggatgaactcttcgagtcc

SEQ ID NO: 71878 - DNA, 25 bp, probe
ctatatcgcccctgagatcctacag

SEQ ID NO: 71879 - DNA, 25 bp, probe
actatatcgcccctgagatcctaca

SEQ ID NO: 71880 - DNA, 25 bp, probe
cttccatggtgatgatgaggatgaa

SEQ ID NO: 71881 - DNA, 25 bp, probe
ccatggtgatgatgaggatgaactc

SEQ ID NO: 71882 - DNA, 25 bp, probe
aagtacacattctctgtggactggt

SEQ ID NO: 71883 - DNA, 25 bp, probe
ttccatggtgatgatgaggatgaac

SEQ ID NO: 71884 - DNA, 25 bp, probe
aaagagaacatattcggggagagcc

SEQ ID NO: 71885 - DNA, 25 bp, probe
tacagggcctgaagtacacattctc

SEQ ID NO: 71886 - DNA, 25 bp, probe
ctacagggcctgaagtacacattct

SEQ ID NO: 71887 - DNA, 25 bp, probe
tccatggtgatgatgaggatgaact

SEQ ID NO: 71888 - DNA, 25 bp, probe
gtgcaaagagaacatattcggggag

SEQ ID NO: 71889 - DNA, 25 bp, probe
tgtctgaggatgagttaagttcttc

SEQ ID NO: 71890 - DNA, 25 bp, probe
ctgtctgaggatgagttaagttctt

SEQ ID NO: 71891 - DNA, 25 bp, probe
attgtctgtctgaggatgagttaag

SEQ ID NO: 71892 - DNA, 25 bp, probe
gtctgaggatgagttaagttcttct

SEQ ID NO: 71893 - DNA, 25 bp, probe
tctgtctgaggatgagttaagttct

SEQ ID NO: 71894 - DNA, 25 bp, probe
gtctgtctgaggatgagttaagttc

SEQ ID NO: 71895 - DNA, 25 bp, probe
cattgtctgtctgaggatgagttaa

SEQ ID NO: 71896 - DNA, 25 bp, probe
tgaggatgagttaagttcttctaca

SEQ ID NO: 71897 - DNA, 25 bp, probe
tgtctgtctgaggatgagttaagtt

SEQ ID NO: 71898 - DNA, 25 bp, probe
ttgtctgtctgaggatgagttaagt

SEQ ID NO: 71899 - DNA, 25 bp, probe
ctgaggatgagttaagttcttctac

SEQ ID NO: 71900 - DNA, 25 bp, probe
tctgaggatgagttaagttcttcta

SEQ ID NO: 71901 - DNA, 25 bp, probe
ttgatagagagaccacacagtacat

SEQ ID NO: 71902 - DNA, 25 bp, probe
atagagagaccacacagtacatcag

SEQ ID NO: 71903 - DNA, 25 bp, probe
gatagagagaccacacagtacatca

SEQ ID NO: 71904 - DNA, 25 bp, probe
tgatagagagaccacacagtacatc

SEQ ID NO: 71905 - DNA, 25 bp, probe
ggatgagttaagttcttctacaagt

SEQ ID NO: 71906 - DNA, 25 bp, probe
gaggatgagttaagttcttctacaa

SEQ ID NO: 71907 - DNA, 25 bp, probe
aggatgagttaagttcttctacaag

SEQ ID NO: 71908 - DNA, 25 bp, probe
tgagttaagttcttctacaagttca

SEQ ID NO: 71909 - DNA, 25 bp, probe
ggatgaatttgatagagagaccaca

SEQ ID NO: 71910 - DNA, 25 bp, probe
aggatgaatttgatagagagaccac

SEQ ID NO: 71911 - DNA, 25 bp, probe
ggaggatgaatttgatagagagacc

SEQ ID NO: 71912 - DNA, 25 bp, probe
gaatttgatagagagaccacacagt

SEQ ID NO: 71913 - DNA, 25 bp, probe
tgaatttgatagagagaccacacag

SEQ ID NO: 71914 - DNA, 25 bp, probe
atgaatttgatagagagaccacaca

SEQ ID NO: 71915 - DNA, 25 bp, probe
gaggatgaatttgatagagagacca

SEQ ID NO: 71916 - DNA, 25 bp, probe
ttctacaagttcaactgataagtca

SEQ ID NO: 71917 - DNA, 25 bp, probe
ctcaggaaaggaaacagattcattg

SEQ ID NO: 71918 - DNA, 25 bp, probe
actcaggaaaggaaacagattcatt

SEQ ID NO: 71919 - DNA, 25 bp, probe
aggaggatgaatttgatagagagac

SEQ ID NO: 71920 - DNA, 25 bp, probe
gatgaatttgatagagagaccacac

SEQ ID NO: 71921 - DNA, 25 bp, probe
aatttgatagagagaccacacagta

SEQ ID NO: 71922 - DNA, 25 bp, probe
agttaagttcttctacaagttcaac

SEQ ID NO: 71923 - DNA, 25 bp, probe
gaggaggatgaatttgatagagaga

SEQ ID NO: 71924 - DNA, 25 bp, probe
cactcaggaaaggaaacagattcat

SEQ ID NO: 71925 - DNA, 25 bp, probe
tcttctacaagttcaactgataagt

SEQ ID NO: 71926 - DNA, 25 bp, probe
gagttaagttcttctacaagttcaa

SEQ ID NO: 71927 - DNA, 25 bp, probe
atttgatagagagaccacacagtac

SEQ ID NO: 71928 - DNA, 25 bp, probe
cttctacaagttcaactgataagtc

SEQ ID NO: 71929 - DNA, 25 bp, probe
gggaaaggtcagacaaatgaaatta

SEQ ID NO: 71930 - DNA, 25 bp, probe
gtcactcaggaaaggaaacagattc

SEQ ID NO: 71931 - DNA, 25 bp, probe
tttgatagagagaccacacagtaca

SEQ ID NO: 71932 - DNA, 25 bp, probe
agggaaaggtcagacaaatgaaatt

SEQ ID NO: 71933 - DNA, 25 bp, probe
aagattgacttgagactaactagca

SEQ ID NO: 71934 - DNA, 25 bp, probe
agattgacttgagactaactagcaa

SEQ ID NO: 71935 - DNA, 25 bp, probe
ttacatactcaactcctgccttctc

SEQ ID NO: 71936 - DNA, 25 bp, probe
cttctctgaggacttcttcaaggaa

SEQ ID NO: 71937 - DNA, 25 bp, probe
tacatactcaactcctgccttctct

SEQ ID NO: 71938 - DNA, 25 bp, probe
tttacatactcaactcctgccttct

SEQ ID NO: 71939 - DNA, 25 bp, probe
atagtgggtttacatactcaactcc

SEQ ID NO: 71940 - DNA, 25 bp, probe
tagtgggtttacatactcaactcct

SEQ ID NO: 71941 - DNA, 25 bp, probe
gtttacatactcaactcctgccttc

SEQ ID NO: 71942 - DNA, 25 bp, probe
gattgacttgagactaactagcaaa

SEQ ID NO: 71943 - DNA, 25 bp, probe
aatagtgggtttacatactcaactc

SEQ ID NO: 71944 - DNA, 25 bp, probe
tatttcagctcccaagtttagttca

SEQ ID NO: 71945 - DNA, 25 bp, probe
gtatttcagctcccaagtttagttc

SEQ ID NO: 71946 - DNA, 25 bp, probe
acatactcaactcctgccttctctg

SEQ ID NO: 71947 - DNA, 25 bp, probe
agtgggtttacatactcaactcctg

SEQ ID NO: 71948 - DNA, 25 bp, probe
aaggtatttcagctcccaagtttag

SEQ ID NO: 71949 - DNA, 25 bp, probe
aaatagtgggtttacatactcaact

SEQ ID NO: 71950 - DNA, 25 bp, probe
catactcaactcctgccttctctga

SEQ ID NO: 71951 - DNA, 25 bp, probe
ggtatttcagctcccaagtttagtt

SEQ ID NO: 71952 - DNA, 25 bp, probe
gaaggtatttcagctcccaagttta

SEQ ID NO: 71953 - DNA, 25 bp, probe
atttcagctcccaagtttagttcag

SEQ ID NO: 71954 - DNA, 25 bp, probe
tgaggacttcttcaaggaaggtatt

SEQ ID NO: 71955 - DNA, 25 bp, probe
ggtttacatactcaactcctgcctt

SEQ ID NO: 71956 - DNA, 25 bp, probe
ctgaggacttcttcaaggaaggtat

SEQ ID NO: 71957 - DNA, 25 bp, probe
aggtatttcagctcccaagtttagt

SEQ ID NO: 71958 - DNA, 25 bp, probe
ttctctgaggacttcttcaaggaag

SEQ ID NO: 71959 - DNA, 25 bp, probe
aatctatcagatcatgctggactgc

SEQ ID NO: 71960 - DNA, 25 bp, probe
caagattgacttgagactaactagc

SEQ ID NO: 71961 - DNA, 25 bp, probe
gaaatctatcagatcatgctggact

SEQ ID NO: 71962 - DNA, 25 bp, probe
aaatctatcagatcatgctggactg

SEQ ID NO: 71963 - DNA, 25 bp, probe
tgaaatctatcagatcatgctggac

SEQ ID NO: 71964 - DNA, 25 bp, probe
tctgaggacttcttcaaggaaggta

SEQ ID NO: 71965 - DNA, 25 bp, probe
gtgggtttacatactcaactcctgc

SEQ ID NO: 71966 - DNA, 25 bp, probe
tgccttctctgaggacttcttcaag

SEQ ID NO: 71967 - DNA, 25 bp, probe
ctgccttctctgaggacttcttcaa

SEQ ID NO: 71968 - DNA, 25 bp, probe
cacctccatgtttgatgactaccag

SEQ ID NO: 71969 - DNA, 25 bp, probe
aggacttcttcaaggaaggtatttc

SEQ ID NO: 71970 - DNA, 25 bp, probe
gaggacttcttcaaggaaggtattt

SEQ ID NO: 71971 - DNA, 25 bp, probe
ggacttcttcaaggaaggtatttca

SEQ ID NO: 71972 - DNA, 25 bp, probe
tttcagctcccaagtttagttcagg

SEQ ID NO: 71973 - DNA, 25 bp, probe
gacttcttcaaggaaggtatttcag

SEQ ID NO: 71974 - DNA, 25 bp, probe
taactagcaaaagtaagaagtcggg

SEQ ID NO: 71975 - DNA, 25 bp, probe
ctaactagcaaaagtaagaagtcgg

SEQ ID NO: 71976 - DNA, 25 bp, probe
agtactccactcctgaaatctatca

SEQ ID NO: 71977 - DNA, 25 bp, probe
taccagttcatctataaagcaatgc

SEQ ID NO: 71978 - DNA, 25 bp, probe
cttggcagaagatgagtttgtgtac

SEQ ID NO: 71979 - DNA, 25 bp, probe
ttggcagaagatgagtttgtgtact

SEQ ID NO: 71980 - DNA, 25 bp, probe
ataccagttcatctataaagcaatg

SEQ ID NO: 71981 - DNA, 25 bp, probe
gcttggcagaagatgagtttgtgta

SEQ ID NO: 71982 - DNA, 25 bp, probe
aataccagttcatctataaagcaat

SEQ ID NO: 71983 - DNA, 25 bp, probe
gccaagtcgagaagaatccatgaac

SEQ ID NO: 71984 - DNA, 25 bp, probe
tggcagaagatgagtttgtgtactg

SEQ ID NO: 71985 - DNA, 25 bp, probe
accagttcatctataaagcaatgct

SEQ ID NO: 71986 - DNA, 25 bp, probe
ggcagaagatgagtttgtgtactgg

SEQ ID NO: 71987 - DNA, 25 bp, probe
gcagaagatgagtttgtgtactggc

SEQ ID NO: 71988 - DNA, 25 bp, probe
cagagcttggcagaagatgagtttg

SEQ ID NO: 71989 - DNA, 25 bp, probe
gagcttggcagaagatgagtttgtg

SEQ ID NO: 71990 - DNA, 25 bp, probe
agagcttggcagaagatgagtttgt

SEQ ID NO: 71991 - DNA, 25 bp, probe
ggccaagtcgagaagaatccatgaa

SEQ ID NO: 71992 - DNA, 25 bp, probe
cagaagatgagtttgtgtactggcc

SEQ ID NO: 71993 - DNA, 25 bp, probe
agcttggcagaagatgagtttgtgt

SEQ ID NO: 71994 - DNA, 25 bp, probe
ctataaagcaatgcttagcttggtc

SEQ ID NO: 71995 - DNA, 25 bp, probe
ccagttcatctataaagcaatgctt

SEQ ID NO: 71996 - DNA, 25 bp, probe
tctataaagcaatgcttagcttggt

SEQ ID NO: 71997 - DNA, 25 bp, probe
atctataaagcaatgcttagcttgg

SEQ ID NO: 71998 - DNA, 25 bp, probe
tataaagcaatgcttagcttggtca

SEQ ID NO: 71999 - DNA, 25 bp, probe
ccagagcttggcagaagatgagttt

SEQ ID NO: 72000 - DNA, 25 bp, probe
catctataaagcaatgcttagcttg

SEQ ID NO: 72001 - DNA, 25 bp, probe
gttcatctataaagcaatgcttagc

SEQ ID NO: 72002 - DNA, 25 bp, probe
tcatctataaagcaatgcttagctt

SEQ ID NO: 72003 - DNA, 25 bp, probe
ttcatctataaagcaatgcttagct

SEQ ID NO: 72004 - DNA, 25 bp, probe
ataaagcaatgcttagcttggtcag

SEQ ID NO: 72005 - DNA, 25 bp, probe
cagttcatctataaagcaatgctta

SEQ ID NO: 72006 - DNA, 25 bp, probe
agttcatctataaagcaatgcttag

SEQ ID NO: 72007 - DNA, 25 bp, probe
taaagcaatgcttagcttggtcagc

SEQ ID NO: 72008 - DNA, 25 bp, probe
taagctcagaaagatgactgccatg

SEQ ID NO: 72009 - DNA, 25 bp, probe
gtaagctcagaaagatgactgccat

SEQ ID NO: 72010 - DNA, 25 bp, probe
ctcagaaagatgactgccatgaagg

SEQ ID NO: 72011 - DNA, 25 bp, probe
gctcagaaagatgactgccatgaag

SEQ ID NO: 72012 - DNA, 25 bp, probe
agtaagctcagaaagatgactgcca

SEQ ID NO: 72013 - DNA, 25 bp, probe
agctcagaaagatgactgccatgaa

SEQ ID NO: 72014 - DNA, 25 bp, probe
aagctcagaaagatgactgccatga

SEQ ID NO: 72015 - DNA, 25 bp, probe
aaagatcactggttgaaacacccga

SEQ ID NO: 72016 - DNA, 25 bp, probe
gaggccagtaagctcagaaagatga

SEQ ID NO: 72017 - DNA, 25 bp, probe
aagatcactggttgaaacacccgag

SEQ ID NO: 72018 - DNA, 25 bp, probe
ggccagtaagctcagaaagatgact

SEQ ID NO: 72019 - DNA, 25 bp, probe
aggccagtaagctcagaaagatgac

SEQ ID NO: 72020 - DNA, 25 bp, probe
cagtaagctcagaaagatgactgcc

SEQ ID NO: 72021 - DNA, 25 bp, probe
ccagtaagctcagaaagatgactgc

SEQ ID NO: 72022 - DNA, 25 bp, probe
gccagtaagctcagaaagatgactg

SEQ ID NO: 72023 - DNA, 25 bp, probe
ttcaatgaacctttcctagggctgt

SEQ ID NO: 72024 - DNA, 25 bp, probe
tcaatgaacctttcctagggctgtg

SEQ ID NO: 72025 - DNA, 25 bp, probe
tcagaaagatgactgccatgaaggc

SEQ ID NO: 72026 - DNA, 25 bp, probe
tgaggccagtaagctcagaaagatg

SEQ ID NO: 72027 - DNA, 25 bp, probe
gtgaggccagtaagctcagaaagat

SEQ ID NO: 72028 - DNA, 25 bp, probe
gttcaatgaacctttcctagggctg

SEQ ID NO: 72029 - DNA, 25 bp, probe
gttgaaacacccgaggttcaatgaa

SEQ ID NO: 72030 - DNA, 25 bp, probe
ttgaaacacccgaggttcaatgaac

SEQ ID NO: 72031 - DNA, 25 bp, probe
gagtgaggccagtaagctcagaaag

SEQ ID NO: 72032 - DNA, 25 bp, probe
gactgctccaagaatcagagaattg

SEQ ID NO: 72033 - DNA, 25 bp, probe
cgactgctccaagaatcagagaatt

SEQ ID NO: 72034 - DNA, 25 bp, probe
gagaacagactcctccaactacagc

SEQ ID NO: 72035 - DNA, 25 bp, probe
tcgactgctccaagaatcagagaat

SEQ ID NO: 72036 - DNA, 25 bp, probe
ttcgactgctccaagaatcagagaa

SEQ ID NO: 72037 - DNA, 25 bp, probe
cttcgactgctccaagaatcagaga

SEQ ID NO: 72038 - DNA, 25 bp, probe
actgctccaagaatcagagaattgg

SEQ ID NO: 72039 - DNA, 25 bp, probe
ctccaagaatcagagaattggcagg

SEQ ID NO: 72040 - DNA, 25 bp, probe
ccttcgactgctccaagaatcagag

SEQ ID NO: 72041 - DNA, 25 bp, probe
aagaatcagagaattggcagggcag

SEQ ID NO: 72042 - DNA, 25 bp, probe
gctccaagaatcagagaattggcag

SEQ ID NO: 72043 - DNA, 25 bp, probe
ctgctccaagaatcagagaattggc

SEQ ID NO: 72044 - DNA, 25 bp, probe
ggagaacagactcctccaactacag

SEQ ID NO: 72045 - DNA, 25 bp, probe
tgctccaagaatcagagaattggca

SEQ ID NO: 72046 - DNA, 25 bp, probe
tccaagaatcagagaattggcaggg

SEQ ID NO: 72047 - DNA, 25 bp, probe
ttggatgatgagtatgtcagttctt

SEQ ID NO: 72048 - DNA, 25 bp, probe
tggatgatgagtatgtcagttcttt

SEQ ID NO: 72049 - DNA, 25 bp, probe
tttggatgatgagtatgtcagttct

SEQ ID NO: 72050 - DNA, 25 bp, probe
tttcagactttggaatgacaaggta

SEQ ID NO: 72051 - DNA, 25 bp, probe
aatttcagactttggaatgacaagg

SEQ ID NO: 72052 - DNA, 25 bp, probe
atttcagactttggaatgacaaggt

SEQ ID NO: 72053 - DNA, 25 bp, probe
caaggaattgtttggtcagttcaac

SEQ ID NO: 72054 - DNA, 25 bp, probe
gtaaatctgatgtctggtcatttgc

SEQ ID NO: 72055 - DNA, 25 bp, probe
agtaaatctgatgtctggtcatttg

SEQ ID NO: 72056 - DNA, 25 bp, probe
tgtggtatttgtaaatctgtgagaa

SEQ ID NO: 72057 - DNA, 25 bp, probe
tataaaggagattggaagcggtcag

SEQ ID NO: 72058 - DNA, 25 bp, probe
gagatagatccatctgagttggctt

SEQ ID NO: 72059 - DNA, 25 bp, probe
atgtggtatttgtaaatctgtgaga

SEQ ID NO: 72060 - DNA, 25 bp, probe
cagtaaatctgatgtctggtcattt

SEQ ID NO: 72061 - DNA, 25 bp, probe
ttcagactttggaatgacaaggtac

SEQ ID NO: 72062 - DNA, 25 bp, probe
taaatctgatgtctggtcatttgcc

SEQ ID NO: 72063 - DNA, 25 bp, probe
atcaatgaaggctccatgtctgaag

SEQ ID NO: 72064 - DNA, 25 bp, probe
gtcacatatccaggtagctatcaag

SEQ ID NO: 72065 - DNA, 25 bp, probe
gcagtaaatctgatgtctggtcatt

SEQ ID NO: 72066 - DNA, 25 bp, probe
aagtacagcagtaaatctgatgtct

SEQ ID NO: 72067 - DNA, 25 bp, probe
agtacagcagtaaatctgatgtctg

SEQ ID NO: 72068 - DNA, 25 bp, probe
catcaatgaaggctccatgtctgaa

SEQ ID NO: 72069 - DNA, 25 bp, probe
tacagcagtaaatctgatgtctggt

SEQ ID NO: 72070 - DNA, 25 bp, probe
tcacatatccaggtagctatcaagg

SEQ ID NO: 72071 - DNA, 25 bp, probe
aatgtggtatttgtaaatctgtgag

SEQ ID NO: 72072 - DNA, 25 bp, probe
ttataaaggagattggaagcggtca

SEQ ID NO: 72073 - DNA, 25 bp, probe
ggtcacatatccaggtagctatcaa

SEQ ID NO: 72074 - DNA, 25 bp, probe
agcagtaaatctgatgtctggtcat

SEQ ID NO: 72075 - DNA, 25 bp, probe
gtacagcagtaaatctgatgtctgg

SEQ ID NO: 72076 - DNA, 25 bp, probe
taagtacagcagtaaatctgatgtc

SEQ ID NO: 72077 - DNA, 25 bp, probe
gtggtatttgtaaatctgtgagaat

SEQ ID NO: 72078 - DNA, 25 bp, probe
caatgaaggctccatgtctgaagag

SEQ ID NO: 72079 - DNA, 25 bp, probe
gcaaggaattgtttggtcagttcaa

SEQ ID NO: 72080 - DNA, 25 bp, probe
gtagctatcaaggccatcaatgaag

SEQ ID NO: 72081 - DNA, 25 bp, probe
cagcagtaaatctgatgtctggtca

SEQ ID NO: 72082 - DNA, 25 bp, probe
acagcagtaaatctgatgtctggtc

SEQ ID NO: 72083 - DNA, 25 bp, probe
ataagtacagcagtaaatctgatgt

SEQ ID NO: 72084 - DNA, 25 bp, probe
tcaataagtacagcagtaaatctga

SEQ ID NO: 72085 - DNA, 25 bp, probe
aaagtgggagatagatccatctgag

SEQ ID NO: 72086 - DNA, 25 bp, probe
tcaatgaaggctccatgtctgaaga

SEQ ID NO: 72087 - DNA, 25 bp, probe
agatagatccatctgagttggcttt

SEQ ID NO: 72088 - DNA, 25 bp, probe
aaatttcagactttggaatgacaag

SEQ ID NO: 72089 - DNA, 25 bp, probe
cacatatccaggtagctatcaaggc

SEQ ID NO: 72090 - DNA, 25 bp, probe
aaatgtggtatttgtaaatctgtga

SEQ ID NO: 72091 - DNA, 25 bp, probe
tactgacattgtattggaactgctt

SEQ ID NO: 72092 - DNA, 25 bp, probe
ctactgacattgtattggaactgct

SEQ ID NO: 72093 - DNA, 25 bp, probe
actgacattgtattggaactgcttc

SEQ ID NO: 72094 - DNA, 25 bp, probe
cctactgacattgtattggaactgc

SEQ ID NO: 72095 - DNA, 25 bp, probe
aagtcgttcctactgacattgtatt

SEQ ID NO: 72096 - DNA, 25 bp, probe
gaagtcgttcctactgacattgtat

SEQ ID NO: 72097 - DNA, 25 bp, probe
agtcgttcctactgacattgtattg

SEQ ID NO: 72098 - DNA, 25 bp, probe
agaagtcgttcctactgacattgta

SEQ ID NO: 72099 - DNA, 25 bp, probe
tcctactgacattgtattggaactg

SEQ ID NO: 72100 - DNA, 25 bp, probe
gtcgttcctactgacattgtattgg

SEQ ID NO: 72101 - DNA, 25 bp, probe
gaagaagtcgttcctactgacattg

SEQ ID NO: 72102 - DNA, 25 bp, probe
tgaagaagtcgttcctactgacatt

SEQ ID NO: 72103 - DNA, 25 bp, probe
aagaagtcgttcctactgacattgt

SEQ ID NO: 72104 - DNA, 25 bp, probe
tcgttcctactgacattgtattgga

SEQ ID NO: 72105 - DNA, 25 bp, probe
gtgaagaagtcgttcctactgacat

SEQ ID NO: 72106 - DNA, 25 bp, probe
catgaaggaggtgaagaagtcgttc

SEQ ID NO: 72107 - DNA, 25 bp, probe
gaggtgaagaagtcgttcctactga

SEQ ID NO: 72108 - DNA, 25 bp, probe
aggtgaagaagtcgttcctactgac

SEQ ID NO: 72109 - DNA, 25 bp, probe
ccttttcttttcattcttacccctc

SEQ ID NO: 72110 - DNA, 25 bp, probe
tccttttcttttcattcttacccct

SEQ ID NO: 72111 - DNA, 25 bp, probe
ctccttttcttttcattcttacccc

SEQ ID NO: 72112 - DNA, 25 bp, probe
cctccttttcttttcattcttaccc

SEQ ID NO: 72113 - DNA, 25 bp, probe
gcatcctccttttcttttcattctt

SEQ ID NO: 72114 - DNA, 25 bp, probe
ggtgaagaagtcgttcctactgaca

SEQ ID NO: 72115 - DNA, 25 bp, probe
tttcttttcattcttacccctcttg

SEQ ID NO: 72116 - DNA, 25 bp, probe
cttttcttttcattcttacccctct

SEQ ID NO: 72117 - DNA, 25 bp, probe
tcctccttttcttttcattcttacc

SEQ ID NO: 72118 - DNA, 25 bp, probe
ttcctactgacattgtattggaact

SEQ ID NO: 72119 - DNA, 25 bp, probe
ttcttttcattcttacccctcttgc

SEQ ID NO: 72120 - DNA, 25 bp, probe
cgttcctactgacattgtattggaa

SEQ ID NO: 72121 - DNA, 25 bp, probe
atggcatcctccttttcttttcatt

SEQ ID NO: 72122 - DNA, 25 bp, probe
ttttcttttcattcttacccctctt

SEQ ID NO: 72123 - DNA, 25 bp, probe
ggcatcctccttttcttttcattct

SEQ ID NO: 72124 - DNA, 25 bp, probe
tggcatcctccttttcttttcattc

SEQ ID NO: 72125 - DNA, 25 bp, probe
cttttcattcttacccctcttgctg

SEQ ID NO: 72126 - DNA, 25 bp, probe
tcttttcattcttacccctcttgct

SEQ ID NO: 72127 - DNA, 25 bp, probe
atgaaggaggtgaagaagtcgttcc

SEQ ID NO: 72128 - DNA, 25 bp, probe
gacattgtattggaactgcttcctg

SEQ ID NO: 72129 - DNA, 25 bp, probe
ctgacattgtattggaactgcttcc

SEQ ID NO: 72130 - DNA, 25 bp, probe
ggaggtgaagaagtcgttcctactg

SEQ ID NO: 72131 - DNA, 25 bp, probe
aagtgtcagaagttgcaagttcatc

SEQ ID NO: 72132 - DNA, 25 bp, probe
gaagtgtcagaagttgcaagttcat

SEQ ID NO: 72133 - DNA, 25 bp, probe
tgacattgtattggaactgcttcct

SEQ ID NO: 72134 - DNA, 25 bp, probe
catggcatcctccttttcttttcat

SEQ ID NO: 72135 - DNA, 25 bp, probe
atcagagagaagatggtgtggtcta

SEQ ID NO: 72136 - DNA, 25 bp, probe
atattaagtatcctctagcggacca

SEQ ID NO: 72137 - DNA, 25 bp, probe
cttattgacatcatcagagagaaga

SEQ ID NO: 72138 - DNA, 25 bp, probe
tcttattgacatcatcagagagaag

SEQ ID NO: 72139 - DNA, 25 bp, probe
tattaagtatcctctagcggaccag

SEQ ID NO: 72140 - DNA, 25 bp, probe
ttattgacatcatcagagagaagat

SEQ ID NO: 72141 - DNA, 25 bp, probe
aatattaagtatcctctagcggacc

SEQ ID NO: 72142 - DNA, 25 bp, probe
tcagagagaagatggtgtggtctac

SEQ ID NO: 72143 - DNA, 25 bp, probe
attaagtatcctctagcggaccaga

SEQ ID NO: 72144 - DNA, 25 bp, probe
cggagagaggaaagagtaaatgtgt

SEQ ID NO: 72145 - DNA, 25 bp, probe
gcaagaggaaagggcatgaatatat

SEQ ID NO: 72146 - DNA, 25 bp, probe
gaagcggagagaggaaagagtaaat

SEQ ID NO: 72147 - DNA, 25 bp, probe
aagcggagagaggaaagagtaaatg

SEQ ID NO: 72148 - DNA, 25 bp, probe
attgacatcatcagagagaagatgg

SEQ ID NO: 72149 - DNA, 25 bp, probe
aatgagaggagacagtgctagagtc

SEQ ID NO: 72150 - DNA, 25 bp, probe
gaaatgagaggagacagtgctagag

SEQ ID NO: 72151 - DNA, 25 bp, probe
caagaggaaagggcatgaatatata

SEQ ID NO: 72152 - DNA, 25 bp, probe
agcaagaggaaagggcatgaatata

SEQ ID NO: 72153 - DNA, 25 bp, probe
ttaagtatcctctagcggaccagac

SEQ ID NO: 72154 - DNA, 25 bp, probe
agaaatgagaggagacagtgctaga

SEQ ID NO: 72155 - DNA, 25 bp, probe
cagaaatgagaggagacagtgctag

SEQ ID NO: 72156 - DNA, 25 bp, probe
ttgacatcatcagagagaagatggt

SEQ ID NO: 72157 - DNA, 25 bp, probe
aatgaaagaagcggagagaggaaag

SEQ ID NO: 72158 - DNA, 25 bp, probe
atgacaatgaaagaagcggagagag

SEQ ID NO: 72159 - DNA, 25 bp, probe
agaagcggagagaggaaagagtaaa

SEQ ID NO: 72160 - DNA, 25 bp, probe
aagaagcggagagaggaaagagtaa

SEQ ID NO: 72161 - DNA, 25 bp, probe
aaagaagcggagagaggaaagagta

SEQ ID NO: 72162 - DNA, 25 bp, probe
gagagaagatggtgtggtctacgag

SEQ ID NO: 72163 - DNA, 25 bp, probe
aaatgagaggagacagtgctagagt

SEQ ID NO: 72164 - DNA, 25 bp, probe
caatgaaagaagcggagagaggaaa

SEQ ID NO: 72165 - DNA, 25 bp, probe
gacatcatcagagagaagatggtgt

SEQ ID NO: 72166 - DNA, 25 bp, probe
tgacatcatcagagagaagatggtg

SEQ ID NO: 72167 - DNA, 25 bp, probe
agaggaaagggcatgaatatataaa

SEQ ID NO: 72168 - DNA, 25 bp, probe
aagaggaaagggcatgaatatataa

SEQ ID NO: 72169 - DNA, 25 bp, probe
aagcaagaggaaagggcatgaatat

SEQ ID NO: 72170 - DNA, 25 bp, probe
gcggagagaggaaagagtaaatgtg

SEQ ID NO: 72171 - DNA, 25 bp, probe
tattgacatcatcagagagaagatg

SEQ ID NO: 72172 - DNA, 25 bp, probe
agcggagagaggaaagagtaaatgt

SEQ ID NO: 72173 - DNA, 25 bp, probe
cagagagaagatggtgtggtctacg

SEQ ID NO: 72174 - DNA, 25 bp, probe
acatcatcagagagaagatggtgtg

SEQ ID NO: 72175 - DNA, 25 bp, probe
aaagcaagaggaaagggcatgaata

SEQ ID NO: 72176 - DNA, 25 bp, probe
agagagaagatggtgtggtctacga

SEQ ID NO: 72177 - DNA, 25 bp, probe
atgaaagaagcggagagaggaaaga

SEQ ID NO: 72178 - DNA, 25 bp, probe
gattgaacaaaagcagaaaagcaag

SEQ ID NO: 72179 - DNA, 25 bp, probe
ctacatcccatccacaatactactg

SEQ ID NO: 72180 - DNA, 25 bp, probe
tctacatcccatccacaatactact

SEQ ID NO: 72181 - DNA, 25 bp, probe
ttctacatcccatccacaatactac

SEQ ID NO: 72182 - DNA, 25 bp, probe
tacatcccatccacaatactactga

SEQ ID NO: 72183 - DNA, 25 bp, probe
attagattgagatacagctccagac

SEQ ID NO: 72184 - DNA, 25 bp, probe
catcccatccacaatactactgatt

SEQ ID NO: 72185 - DNA, 25 bp, probe
atcccatccacaatactactgattt

SEQ ID NO: 72186 - DNA, 25 bp, probe
aattagattgagatacagctccaga

SEQ ID NO: 72187 - DNA, 25 bp, probe
cagatattctacatcccatccacaa

SEQ ID NO: 72188 - DNA, 25 bp, probe
acatcccatccacaatactactgat

SEQ ID NO: 72189 - DNA, 25 bp, probe
aaacattcccacccagatattctac

SEQ ID NO: 72190 - DNA, 25 bp, probe
cattcccacccagatattctacatc

SEQ ID NO: 72191 - DNA, 25 bp, probe
attctacatcccatccacaatacta

SEQ ID NO: 72192 - DNA, 25 bp, probe
agatattctacatcccatccacaat

SEQ ID NO: 72193 - DNA, 25 bp, probe
acattcccacccagatattctacat

SEQ ID NO: 72194 - DNA, 25 bp, probe
aacattcccacccagatattctaca

SEQ ID NO: 72195 - DNA, 25 bp, probe
tattctacatcccatccacaatact

SEQ ID NO: 72196 - DNA, 25 bp, probe
catttgtcaactgctttacctcctt

SEQ ID NO: 72197 - DNA, 25 bp, probe
ttagattgagatacagctccagacg

SEQ ID NO: 72198 - DNA, 25 bp, probe
ccagatattctacatcccatccaca

SEQ ID NO: 72199 - DNA, 25 bp, probe
attcccacccagatattctacatcc

SEQ ID NO: 72200 - DNA, 25 bp, probe
tgtgacagaatttaacaagagactc

SEQ ID NO: 72201 - DNA, 25 bp, probe
atttgtcaactgctttacctccttg

SEQ ID NO: 72202 - DNA, 25 bp, probe
gccagactttgtcatcaataactta

SEQ ID NO: 72203 - DNA, 25 bp, probe
cagcactatgtgacagaatttaaca

SEQ ID NO: 72204 - DNA, 25 bp, probe
acagcactatgtgacagaatttaac

SEQ ID NO: 72205 - DNA, 25 bp, probe
cccagatattctacatcccatccac

SEQ ID NO: 72206 - DNA, 25 bp, probe
cacccagatattctacatcccatcc

SEQ ID NO: 72207 - DNA, 25 bp, probe
ccacccagatattctacatcccatc

SEQ ID NO: 72208 - DNA, 25 bp, probe
gtgacagaatttaacaagagactct

SEQ ID NO: 72209 - DNA, 25 bp, probe
atattctacatcccatccacaatac

SEQ ID NO: 72210 - DNA, 25 bp, probe
atgtgacagaatttaacaagagact

SEQ ID NO: 72211 - DNA, 25 bp, probe
agcactatgtgacagaatttaacaa

SEQ ID NO: 72212 - DNA, 25 bp, probe
gcactatgtgacagaatttaacaag

SEQ ID NO: 72213 - DNA, 25 bp, probe
gatattctacatcccatccacaata

SEQ ID NO: 72214 - DNA, 25 bp, probe
acccagatattctacatcccatcca

SEQ ID NO: 72215 - DNA, 25 bp, probe
tttgtcaactgctttacctccttgt

SEQ ID NO: 72216 - DNA, 25 bp, probe
aaggactcatctacctcacagatcc

SEQ ID NO: 72217 - DNA, 25 bp, probe
aaattagattgagatacagctccag

SEQ ID NO: 72218 - DNA, 25 bp, probe
tgacagaatttaacaagagactcta

SEQ ID NO: 72219 - DNA, 25 bp, probe
cccacccagatattctacatcccat

SEQ ID NO: 72220 - DNA, 25 bp, probe
ttcccacccagatattctacatccc

SEQ ID NO: 72221 - DNA, 25 bp, probe
aaaggactcatctacctcacagatc

SEQ ID NO: 72222 - DNA, 25 bp, probe
tcccatccacaatactactgatttt

SEQ ID NO: 72223 - DNA, 25 bp, probe
tagaaacactttggaaacactttgg

SEQ ID NO: 72224 - DNA, 25 bp, probe
gaaacactttggaaacactttggat

SEQ ID NO: 72225 - DNA, 25 bp, probe
aaacactttggaaacactttggatg

SEQ ID NO: 72226 - DNA, 25 bp, probe
cactttggaaacactttggatgaac

SEQ ID NO: 72227 - DNA, 25 bp, probe
agaaacactttggaaacactttgga

SEQ ID NO: 72228 - DNA, 25 bp, probe
acactttggaaacactttggatgaa

SEQ ID NO: 72229 - DNA, 25 bp, probe
aacactttggaaacactttggatga

SEQ ID NO: 72230 - DNA, 25 bp, probe
atagaaacactttggaaacactttg

SEQ ID NO: 72231 - DNA, 25 bp, probe
actttggaaacactttggatgaacc

SEQ ID NO: 72232 - DNA, 25 bp, probe
tatagaaacactttggaaacacttt

SEQ ID NO: 72233 - DNA, 25 bp, probe
ttatagaaacactttggaaacactt

SEQ ID NO: 72234 - DNA, 25 bp, probe
tttatagaaacactttggaaacact

SEQ ID NO: 72235 - DNA, 25 bp, probe
tgagtttgtatcatggaggagatcc

SEQ ID NO: 72236 - DNA, 25 bp, probe
ctttggaaacactttggatgaacca

SEQ ID NO: 72237 - DNA, 25 bp, probe
gcatttccaaagatgagtttgtatc

SEQ ID NO: 72238 - DNA, 25 bp, probe
atgagtttgtatcatggaggagatc

SEQ ID NO: 72239 - DNA, 25 bp, probe
gatgagtttgtatcatggaggagat

SEQ ID NO: 72240 - DNA, 25 bp, probe
aagatgagtttgtatcatggaggag

SEQ ID NO: 72241 - DNA, 25 bp, probe
aaagatgagtttgtatcatggagga

SEQ ID NO: 72242 - DNA, 25 bp, probe
caaagatgagtttgtatcatggagg

SEQ ID NO: 72243 - DNA, 25 bp, probe
ccaaagatgagtttgtatcatggag

SEQ ID NO: 72244 - DNA, 25 bp, probe
agatgagtttgtatcatggaggaga

SEQ ID NO: 72245 - DNA, 25 bp, probe
ttccaaagatgagtttgtatcatgg

SEQ ID NO: 72246 - DNA, 25 bp, probe
atcatcccgtcattttcagtttgtt

SEQ ID NO: 72247 - DNA, 25 bp, probe
gagtttgtatcatggaggagatccc

SEQ ID NO: 72248 - DNA, 25 bp, probe
gtttgtatcatggaggagatccctg

SEQ ID NO: 72249 - DNA, 25 bp, probe
agtttgtatcatggaggagatccct

SEQ ID NO: 72250 - DNA, 25 bp, probe
caccaggagaatgtgcaactttatt

SEQ ID NO: 72251 - DNA, 25 bp, probe
aggagaatgtgcaactttattccag

SEQ ID NO: 72252 - DNA, 25 bp, probe
ttcagtttgttggacattttacagc

SEQ ID NO: 72253 - DNA, 25 bp, probe
caggagaatgtgcaactttattcca

SEQ ID NO: 72254 - DNA, 25 bp, probe
accaggagaatgtgcaactttattc

SEQ ID NO: 72255 - DNA, 25 bp, probe
tttgtatcatggaggagatccctgt

SEQ ID NO: 72256 - DNA, 25 bp, probe
gtcattttcagtttgttggacattt

SEQ ID NO: 72257 - DNA, 25 bp, probe
tcatcccgtcattttcagtttgttg

SEQ ID NO: 72258 - DNA, 25 bp, probe
agatcatcccgtcattttcagtttg

SEQ ID NO: 72259 - DNA, 25 bp, probe
cagatcatcccgtcattttcagttt

SEQ ID NO: 72260 - DNA, 25 bp, probe
tttcagtttgttggacattttacag

SEQ ID NO: 72261 - DNA, 25 bp, probe
cgtcattttcagtttgttggacatt

SEQ ID NO: 72262 - DNA, 25 bp, probe
catttccaaagatgagtttgtatca

SEQ ID NO: 72263 - DNA, 25 bp, probe
ctgcatttccaaagatgagtttgta

SEQ ID NO: 72264 - DNA, 25 bp, probe
tcattttcagtttgttggacatttt

SEQ ID NO: 72265 - DNA, 25 bp, probe
gatcatcccgtcattttcagtttgt

SEQ ID NO: 72266 - DNA, 25 bp, probe
ttcgtgaaggcttttgttctttctc

SEQ ID NO: 72267 - DNA, 25 bp, probe
aattccagccagagatgaagagaca

SEQ ID NO: 72268 - DNA, 25 bp, probe
attccagccagagatgaagagacac

SEQ ID NO: 72269 - DNA, 25 bp, probe
ccagagatgaagagacacagtctag

SEQ ID NO: 72270 - DNA, 25 bp, probe
ctcagagtccattattcaccaccca

SEQ ID NO: 72271 - DNA, 25 bp, probe
ggctcagagtccattattcaccacc

SEQ ID NO: 72272 - DNA, 25 bp, probe
tcagagtccattattcaccacccac

SEQ ID NO: 72273 - DNA, 25 bp, probe
tggctcagagtccattattcaccac

SEQ ID NO: 72274 - DNA, 25 bp, probe
cagccagagatgaagagacacagtc

SEQ ID NO: 72275 - DNA, 25 bp, probe
agagatgaagagacacagtctagag

SEQ ID NO: 72276 - DNA, 25 bp, probe
cagagatgaagagacacagtctaga

SEQ ID NO: 72277 - DNA, 25 bp, probe
gagatgaagagacacagtctagagg

SEQ ID NO: 72278 - DNA, 25 bp, probe
gatgaagagacacagtctagaggtc

SEQ ID NO: 72279 - DNA, 25 bp, probe
gccagagatgaagagacacagtcta

SEQ ID NO: 72280 - DNA, 25 bp, probe
agatgaagagacacagtctagaggt

SEQ ID NO: 72281 - DNA, 25 bp, probe
gagtccattattcaccacccaccag

SEQ ID NO: 72282 - DNA, 25 bp, probe
cagagtccattattcaccacccacc

SEQ ID NO: 72283 - DNA, 25 bp, probe
gctcagagtccattattcaccaccc

SEQ ID NO: 72284 - DNA, 25 bp, probe
atggctcagagtccattattcacca

SEQ ID NO: 72285 - DNA, 25 bp, probe
atgaagagacacagtctagaggtcc

SEQ ID NO: 72286 - DNA, 25 bp, probe
gagacacagtctagaggtcctgatg

SEQ ID NO: 72287 - DNA, 25 bp, probe
gaagagacacagtctagaggtcctg

SEQ ID NO: 72288 - DNA, 25 bp, probe
agagacacagtctagaggtcctgat

SEQ ID NO: 72289 - DNA, 25 bp, probe
aagagacacagtctagaggtcctga

SEQ ID NO: 72290 - DNA, 25 bp, probe
tgaagagacacagtctagaggtcct

SEQ ID NO: 72291 - DNA, 25 bp, probe
agccagagatgaagagacacagtct

SEQ ID NO: 72292 - DNA, 25 bp, probe
agatcccctctctgagtccataacc

SEQ ID NO: 72293 - DNA, 25 bp, probe
atcccctctctgagtccataaccag

SEQ ID NO: 72294 - DNA, 25 bp, probe
ctctctgagtccataaccaggctca

SEQ ID NO: 72295 - DNA, 25 bp, probe
gatcccctctctgagtccataacca

SEQ ID NO: 72296 - DNA, 25 bp, probe
agacacagtctagaggtcctgatgg

SEQ ID NO: 72297 - DNA, 25 bp, probe
cagatcccctctctgagtccataac

SEQ ID NO: 72298 - DNA, 25 bp, probe
ccagatcccctctctgagtccataa

SEQ ID NO: 72299 - DNA, 25 bp, probe
ccaagacacttattcatacatcagg

SEQ ID NO: 72300 - DNA, 25 bp, probe
aactctcatcaacatctgacaacaa

SEQ ID NO: 72301 - DNA, 25 bp, probe
ctcatcaacatctgacaacaacaac

SEQ ID NO: 72302 - DNA, 25 bp, probe
tctcatcaacatctgacaacaacaa

SEQ ID NO: 72303 - DNA, 25 bp, probe
caagacacttattcatacatcagga

SEQ ID NO: 72304 - DNA, 25 bp, probe
tccaagacacttattcatacatcag

SEQ ID NO: 72305 - DNA, 25 bp, probe
ctctcatcaacatctgacaacaaca

SEQ ID NO: 72306 - DNA, 25 bp, probe
actctcatcaacatctgacaacaac

SEQ ID NO: 72307 - DNA, 25 bp, probe
tcatcaacatctgacaacaacaaca

SEQ ID NO: 72308 - DNA, 25 bp, probe
caggtccaagacacttattcataca

SEQ ID NO: 72309 - DNA, 25 bp, probe
aggtccaagacacttattcatacat

SEQ ID NO: 72310 - DNA, 25 bp, probe
ggtccaagacacttattcatacatc

SEQ ID NO: 72311 - DNA, 25 bp, probe
catcaacatctgacaacaacaacag

SEQ ID NO: 72312 - DNA, 25 bp, probe
aagacacttattcatacatcaggaa

SEQ ID NO: 72313 - DNA, 25 bp, probe
gtccaagacacttattcatacatca

SEQ ID NO: 72314 - DNA, 25 bp, probe
gcaggtccaagacacttattcatac

SEQ ID NO: 72315 - DNA, 25 bp, probe
agcaggtccaagacacttattcata

SEQ ID NO: 72316 - DNA, 25 bp, probe
actgacacggtctggaagaattatt

SEQ ID NO: 72317 - DNA, 25 bp, probe
gaaacaggtatggaagtgaatctct

SEQ ID NO: 72318 - DNA, 25 bp, probe
tgaaacaggtatggaagtgaatctc

SEQ ID NO: 72319 - DNA, 25 bp, probe
aatgagcaggtccaagacacttatt

SEQ ID NO: 72320 - DNA, 25 bp, probe
aacagagtaggagagactgctaagt

SEQ ID NO: 72321 - DNA, 25 bp, probe
aacagaaggaaacagagtaggagag

SEQ ID NO: 72322 - DNA, 25 bp, probe
caaactctcatcaacatctgacaac

SEQ ID NO: 72323 - DNA, 25 bp, probe
cttcccaaactctcatcaacatctg

SEQ ID NO: 72324 - DNA, 25 bp, probe
atcaacatctgacaacaacaacagc

SEQ ID NO: 72325 - DNA, 25 bp, probe
aaactctcatcaacatctgacaaca

SEQ ID NO: 72326 - DNA, 25 bp, probe
gagcaggtccaagacacttattcat

SEQ ID NO: 72327 - DNA, 25 bp, probe
atgagcaggtccaagacacttattc

SEQ ID NO: 72328 - DNA, 25 bp, probe
aacaggtatggaagtgaatctctgc

SEQ ID NO: 72329 - DNA, 25 bp, probe
cactgacacggtctggaagaattat

SEQ ID NO: 72330 - DNA, 25 bp, probe
aaggttacaacgtgaatgtgaattg

SEQ ID NO: 72331 - DNA, 25 bp, probe
caaggttacaacgtgaatgtgaatt

SEQ ID NO: 72332 - DNA, 25 bp, probe
caacagaaggaaacagagtaggaga

SEQ ID NO: 72333 - DNA, 25 bp, probe
tcaacagaaggaaacagagtaggag

SEQ ID NO: 72334 - DNA, 25 bp, probe
aacatctgacaacaacaacagcaag

SEQ ID NO: 72335 - DNA, 25 bp, probe
cagaaggaaacagagtaggagagac

SEQ ID NO: 72336 - DNA, 25 bp, probe
gaaggaattggtcacctaacactga

SEQ ID NO: 72337 - DNA, 25 bp, probe
ctgaaggaattggtcacctaacact

SEQ ID NO: 72338 - DNA, 25 bp, probe
ccaaactctcatcaacatctgacaa

SEQ ID NO: 72339 - DNA, 25 bp, probe
catctgacaacaacaacagcaagag

SEQ ID NO: 72340 - DNA, 25 bp, probe
cttacttgcttcccaaactctcatc

SEQ ID NO: 72341 - DNA, 25 bp, probe
tgaaggaattggtcacctaacactg

SEQ ID NO: 72342 - DNA, 25 bp, probe
acagaaggaaacagagtaggagaga

SEQ ID NO: 72343 - DNA, 25 bp, probe
aattccattatgacaacacagcagg

SEQ ID NO: 72344 - DNA, 25 bp, probe
cattatgacaacacagcaggaatca

SEQ ID NO: 72345 - DNA, 25 bp, probe
ccattatgacaacacagcaggaatc

SEQ ID NO: 72346 - DNA, 25 bp, probe
tatggaggaggaggaagtatgtgac

SEQ ID NO: 72347 - DNA, 25 bp, probe
gtatggaggaggaggaagtatgtga

SEQ ID NO: 72348 - DNA, 25 bp, probe
ctgtatggaggaggaggaagtatgt

SEQ ID NO: 72349 - DNA, 25 bp, probe
tgtatggaggaggaggaagtatgtg

SEQ ID NO: 72350 - DNA, 25 bp, probe
aaattccattatgacaacacagcag

SEQ ID NO: 72351 - DNA, 25 bp, probe
caaattccattatgacaacacagca

SEQ ID NO: 72352 - DNA, 25 bp, probe
cccaaattccattatgacaacacag

SEQ ID NO: 72353 - DNA, 25 bp, probe
gactacattgttcttccgatatcag

SEQ ID NO: 72354 - DNA, 25 bp, probe
ttgaaagaaggaactagaatgaggg

SEQ ID NO: 72355 - DNA, 25 bp, probe
gcgattgaaagaaggaactagaatg

SEQ ID NO: 72356 - DNA, 25 bp, probe
cattgttcttccgatatcagagact

SEQ ID NO: 72357 - DNA, 25 bp, probe
acattgttcttccgatatcagagac

SEQ ID NO: 72358 - DNA, 25 bp, probe
attgttcttccgatatcagagactt

SEQ ID NO: 72359 - DNA, 25 bp, probe
ccaaattccattatgacaacacagc

SEQ ID NO: 72360 - DNA, 25 bp, probe
actacattgttcttccgatatcaga

SEQ ID NO: 72361 - DNA, 25 bp, probe
agactacattgttcttccgatatca

SEQ ID NO: 72362 - DNA, 25 bp, probe
tacattgttcttccgatatcagaga

SEQ ID NO: 72363 - DNA, 25 bp, probe
cgattgaaagaaggaactagaatga

SEQ ID NO: 72364 - DNA, 25 bp, probe
ggcgattgaaagaaggaactagaat

SEQ ID NO: 72365 - DNA, 25 bp, probe
ctacattgttcttccgatatcagag

SEQ ID NO: 72366 - DNA, 25 bp, probe
tgtaggcgattgaaagaaggaacta

SEQ ID NO: 72367 - DNA, 25 bp, probe
taggcgattgaaagaaggaactaga

SEQ ID NO: 72368 - DNA, 25 bp, probe
gtaggcgattgaaagaaggaactag

SEQ ID NO: 72369 - DNA, 25 bp, probe
tttgtaggcgattgaaagaaggaac

SEQ ID NO: 72370 - DNA, 25 bp, probe
ttccttaggtgcttctccatatcct

SEQ ID NO: 72371 - DNA, 25 bp, probe
tccattatgacaacacagcaggaat

SEQ ID NO: 72372 - DNA, 25 bp, probe
attccattatgacaacacagcagga

SEQ ID NO: 72373 - DNA, 25 bp, probe
attgaaagaaggaactagaatgagg

SEQ ID NO: 72374 - DNA, 25 bp, probe
tttccttaggtgcttctccatatcc

SEQ ID NO: 72375 - DNA, 25 bp, probe
aggcgattgaaagaaggaactagaa

SEQ ID NO: 72376 - DNA, 25 bp, probe
atatcagagactttgagcatggaag

SEQ ID NO: 72377 - DNA, 25 bp, probe
ttgtaggcgattgaaagaaggaact

SEQ ID NO: 72378 - DNA, 25 bp, probe
ccctgattatactacaccagaaatg

SEQ ID NO: 72379 - DNA, 25 bp, probe
tgaaagaaggaactagaatgagggc

SEQ ID NO: 72380 - DNA, 25 bp, probe
aggatggcaaagactacattgttct

SEQ ID NO: 72381 - DNA, 25 bp, probe
caggatggcaaagactacattgttc

SEQ ID NO: 72382 - DNA, 25 bp, probe
tatcagagactttgagcatggaaga

SEQ ID NO: 72383 - DNA, 25 bp, probe
cctgtatggaggaggaggaagtatg

SEQ ID NO: 72384 - DNA, 25 bp, probe
tccttaggtgcttctccatatcctg

SEQ ID NO: 72385 - DNA, 25 bp, probe
cctgattatactacaccagaaatgt

SEQ ID NO: 72386 - DNA, 25 bp, probe
gattgaaagaaggaactagaatgag

SEQ ID NO: 72387 - DNA, 25 bp, probe
gaagatgttccagattcagttccac

SEQ ID NO: 72388 - DNA, 25 bp, probe
aagatgttccagattcagttccaca

SEQ ID NO: 72389 - DNA, 25 bp, probe
ggactttaagattgaagatggcaaa

SEQ ID NO: 72390 - DNA, 25 bp, probe
gatgcgggactttaagattgaagat

SEQ ID NO: 72391 - DNA, 25 bp, probe
aagatgcgggactttaagattgaag

SEQ ID NO: 72392 - DNA, 25 bp, probe
agatgttccagattcagttccacac

SEQ ID NO: 72393 - DNA, 25 bp, probe
atgcgggactttaagattgaagatg

SEQ ID NO: 72394 - DNA, 25 bp, probe
gggactttaagattgaagatggcaa

SEQ ID NO: 72395 - DNA, 25 bp, probe
caagatgcgggactttaagattgaa

SEQ ID NO: 72396 - DNA, 25 bp, probe
agatgcgggactttaagattgaaga

SEQ ID NO: 72397 - DNA, 25 bp, probe
atgaagatgttccagattcagttcc

SEQ ID NO: 72398 - DNA, 25 bp, probe
catgaagatgttccagattcagttc

SEQ ID NO: 72399 - DNA, 25 bp, probe
atccatgaagatgttccagattcag

SEQ ID NO: 72400 - DNA, 25 bp, probe
gacaagatgcgggactttaagattg

SEQ ID NO: 72401 - DNA, 25 bp, probe
ccatgaagatgttccagattcagtt

SEQ ID NO: 72402 - DNA, 25 bp, probe
tttaagattgaagatggcaaagcgg

SEQ ID NO: 72403 - DNA, 25 bp, probe
catccatgaagatgttccagattca

SEQ ID NO: 72404 - DNA, 25 bp, probe
acaagatgcgggactttaagattga

SEQ ID NO: 72405 - DNA, 25 bp, probe
tgaagatgttccagattcagttcca

SEQ ID NO: 72406 - DNA, 25 bp, probe
tccatgaagatgttccagattcagt

SEQ ID NO: 72407 - DNA, 25 bp, probe
actttaagattgaagatggcaaagc

SEQ ID NO: 72408 - DNA, 25 bp, probe
gatgttccagattcagttccacacg

SEQ ID NO: 72409 - DNA, 25 bp, probe
ctttaagattgaagatggcaaagcg

SEQ ID NO: 72410 - DNA, 25 bp, probe
gactttaagattgaagatggcaaag

SEQ ID NO: 72411 - DNA, 25 bp, probe
gcatccatgaagatgttccagattc

SEQ ID NO: 72412 - DNA, 25 bp, probe
cgggactttaagattgaagatggca

SEQ ID NO: 72413 - DNA, 25 bp, probe
tgcgggactttaagattgaagatgg

SEQ ID NO: 72414 - DNA, 25 bp, probe
ttaagattgaagatggcaaagcggt

SEQ ID NO: 72415 - DNA, 25 bp, probe
cgacaagatgcgggactttaagatt

SEQ ID NO: 72416 - DNA, 25 bp, probe
tacgacaagatgcgggactttaaga

SEQ ID NO: 72417 - DNA, 25 bp, probe
taagattgaagatggcaaagcggtg

SEQ ID NO: 72418 - DNA, 25 bp, probe
ggcatccatgaagatgttccagatt

SEQ ID NO: 72419 - DNA, 25 bp, probe
actgtgaaatttgccaagtacgttg

SEQ ID NO: 72420 - DNA, 25 bp, probe
cactgtgaaatttgccaagtacgtt

SEQ ID NO: 72421 - DNA, 25 bp, probe
gtacgacaagatgcgggactttaag

SEQ ID NO: 72422 - DNA, 25 bp, probe
caagatggcatccatgaagatgttc

SEQ ID NO: 72423 - DNA, 25 bp, probe
gcgggactttaagattgaagatggc

SEQ ID NO: 72424 - DNA, 25 bp, probe
acgacaagatgcgggactttaagat

SEQ ID NO: 72425 - DNA, 25 bp, probe
atgttccagattcagttccacacgg

SEQ ID NO: 72426 - DNA, 25 bp, probe
caccactgtgaaatttgccaagtac

SEQ ID NO: 72427 - DNA, 25 bp, probe
attgaagatggcaaagcggtgattc

SEQ ID NO: 72428 - DNA, 25 bp, probe
gattgaagatggcaaagcggtgatt

SEQ ID NO: 72429 - DNA, 25 bp, probe
agtacgacaagatgcgggactttaa

SEQ ID NO: 72430 - DNA, 25 bp, probe
aagatggcatccatgaagatgttcc

SEQ ID NO: 72431 - DNA, 25 bp, probe
catgatgaagtgaatggaatagagc

SEQ ID NO: 72432 - DNA, 25 bp, probe
aagtgaatggaatagagctagatgg

SEQ ID NO: 72433 - DNA, 25 bp, probe
atgatgaagtgaatggaatagagct

SEQ ID NO: 72434 - DNA, 25 bp, probe
tgatgaagtgaatggaatagagcta

SEQ ID NO: 72435 - DNA, 25 bp, probe
tgaagtgaatggaatagagctagat

SEQ ID NO: 72436 - DNA, 25 bp, probe
atgaagtgaatggaatagagctaga

SEQ ID NO: 72437 - DNA, 25 bp, probe
gaagtgaatggaatagagctagatg

SEQ ID NO: 72438 - DNA, 25 bp, probe
gatgaagtgaatggaatagagctag

SEQ ID NO: 72439 - DNA, 25 bp, probe
tataggaccagcaaccatgatgaag

SEQ ID NO: 72440 - DNA, 25 bp, probe
aagaaagagagaagggaatcagaag

SEQ ID NO: 72441 - DNA, 25 bp, probe
gaagaaagagagaagggaatcagaa

SEQ ID NO: 72442 - DNA, 25 bp, probe
atcagaagaaagagagaagggaatc

SEQ ID NO: 72443 - DNA, 25 bp, probe
agaagaaagagagaagggaatcaga

SEQ ID NO: 72444 - DNA, 25 bp, probe
cagaagaaagagagaagggaatcag

SEQ ID NO: 72445 - DNA, 25 bp, probe
tcagaagaaagagagaagggaatca

SEQ ID NO: 72446 - DNA, 25 bp, probe
acatcagcattcagagtagcaactt

SEQ ID NO: 72447 - DNA, 25 bp, probe
aacatcagcattcagagtagcaact

SEQ ID NO: 72448 - DNA, 25 bp, probe
gtaagaaactatgtggagaatcggc

SEQ ID NO: 72449 - DNA, 25 bp, probe
agtaagaaactatgtggagaatcgg

SEQ ID NO: 72450 - DNA, 25 bp, probe
gatcagaagaaagagagaagggaat

SEQ ID NO: 72451 - DNA, 25 bp, probe
cagtaagaaactatgtggagaatcg

SEQ ID NO: 72452 - DNA, 25 bp, probe
tagatgggatcagaagaaagagaga

SEQ ID NO: 72453 - DNA, 25 bp, probe
ctagatgggatcagaagaaagagag

SEQ ID NO: 72454 - DNA, 25 bp, probe
gatgggatcagaagaaagagagaag

SEQ ID NO: 72455 - DNA, 25 bp, probe
agatgggatcagaagaaagagagaa

SEQ ID NO: 72456 - DNA, 25 bp, probe
aaacatcagcattcagagtagcaac

SEQ ID NO: 72457 - DNA, 25 bp, probe
caaacatcagcattcagagtagcaa

SEQ ID NO: 72458 - DNA, 25 bp, probe
ttgttgtcaaagatgctagtgattg

SEQ ID NO: 72459 - DNA, 25 bp, probe
cttgttgtcaaagatgctagtgatt

SEQ ID NO: 72460 - DNA, 25 bp, probe
ctataggaccagcaaccatgatgaa

SEQ ID NO: 72461 - DNA, 25 bp, probe
acttgttgtcaaagatgctagtgat

SEQ ID NO: 72462 - DNA, 25 bp, probe
agaaagagagaagggaatcagaagc

SEQ ID NO: 72463 - DNA, 25 bp, probe
ggatcagaagaaagagagaagggaa

SEQ ID NO: 72464 - DNA, 25 bp, probe
gctagatgggatcagaagaaagaga

SEQ ID NO: 72465 - DNA, 25 bp, probe
atgggatcagaagaaagagagaagg

SEQ ID NO: 72466 - DNA, 25 bp, probe
catcagcattcagagtagcaacttt

SEQ ID NO: 72467 - DNA, 25 bp, probe
cagcaaacatcagcattcagagtag

SEQ ID NO: 72468 - DNA, 25 bp, probe
atagagctagatgggatcagaagaa

SEQ ID NO: 72469 - DNA, 25 bp, probe
aatagagctagatgggatcagaaga

SEQ ID NO: 72470 - DNA, 25 bp, probe
aagaatatcagtggacgacgcctta

SEQ ID NO: 72471 - DNA, 25 bp, probe
tagagctagatgggatcagaagaaa

SEQ ID NO: 72472 - DNA, 25 bp, probe
gaatagagctagatgggatcagaag

SEQ ID NO: 72473 - DNA, 25 bp, probe
gaatggaatagagctagatgggatc

SEQ ID NO: 72474 - DNA, 25 bp, probe
tgaatggaatagagctagatgggat

SEQ ID NO: 72475 - DNA, 25 bp, probe
ttaatcagtcaggatcttgatgatc

SEQ ID NO: 72476 - DNA, 25 bp, probe
attaatcagtcaggatcttgatgat

SEQ ID NO: 72477 - DNA, 25 bp, probe
atcagtcaggatcttgatgatcaat

SEQ ID NO: 72478 - DNA, 25 bp, probe
aatcagtcaggatcttgatgatcaa

SEQ ID NO: 72479 - DNA, 25 bp, probe
tcagtcaggatcttgatgatcaata

SEQ ID NO: 72480 - DNA, 25 bp, probe
taatcagtcaggatcttgatgatca

SEQ ID NO: 72481 - DNA, 25 bp, probe
cagtcaggatcttgatgatcaatat

SEQ ID NO: 72482 - DNA, 25 bp, probe
ggattaatcagtcaggatcttgatg

SEQ ID NO: 72483 - DNA, 25 bp, probe
gattaatcagtcaggatcttgatga

SEQ ID NO: 72484 - DNA, 25 bp, probe
agtcaggatcttgatgatcaatata

SEQ ID NO: 72485 - DNA, 25 bp, probe
gtcaggatcttgatgatcaatatat

SEQ ID NO: 72486 - DNA, 25 bp, probe
tcaggatcttgatgatcaatatatt

SEQ ID NO: 72487 - DNA, 25 bp, probe
cttgatgatcaatatattttctgct

SEQ ID NO: 72488 - DNA, 25 bp, probe
tcttgatgatcaatatattttctgc

SEQ ID NO: 72489 - DNA, 25 bp, probe
acagatggaattaacttcatggtga

SEQ ID NO: 72490 - DNA, 25 bp, probe
tcaccacagatggaattaacttcat

SEQ ID NO: 72491 - DNA, 25 bp, probe
ctcaccacagatggaattaacttca

SEQ ID NO: 72492 - DNA, 25 bp, probe
cacagatggaattaacttcatggtg

SEQ ID NO: 72493 - DNA, 25 bp, probe
cctcaccacagatggaattaacttc

SEQ ID NO: 72494 - DNA, 25 bp, probe
caccacagatggaattaacttcatg

SEQ ID NO: 72495 - DNA, 25 bp, probe
tcctcaccacagatggaattaactt

SEQ ID NO: 72496 - DNA, 25 bp, probe
ccacagatggaattaacttcatggt

SEQ ID NO: 72497 - DNA, 25 bp, probe
accacagatggaattaacttcatgg

SEQ ID NO: 72498 - DNA, 25 bp, probe
tggtgaatagtcaagagatttgtga

SEQ ID NO: 72499 - DNA, 25 bp, probe
atggtgaatagtcaagagatttgtg

SEQ ID NO: 72500 - DNA, 25 bp, probe
gtcctcaccacagatggaattaact

SEQ ID NO: 72501 - DNA, 25 bp, probe
aacttcatggtgaatagtcaagaga

SEQ ID NO: 72502 - DNA, 25 bp, probe
acttcatggtgaatagtcaagagat

SEQ ID NO: 72503 - DNA, 25 bp, probe
catggtgaatagtcaagagatttgt

SEQ ID NO: 72504 - DNA, 25 bp, probe
cagatggaattaacttcatggtgaa

SEQ ID NO: 72505 - DNA, 25 bp, probe
tcatggtgaatagtcaagagatttg

SEQ ID NO: 72506 - DNA, 25 bp, probe
cttcatggtgaatagtcaagagatt

SEQ ID NO: 72507 - DNA, 25 bp, probe
ggtcctcaccacagatggaattaac

SEQ ID NO: 72508 - DNA, 25 bp, probe
agatggaattaacttcatggtgaat

SEQ ID NO: 72509 - DNA, 25 bp, probe
taacttcatggtgaatagtcaagag

SEQ ID NO: 72510 - DNA, 25 bp, probe
tggaattaacttcatggtgaatagt

SEQ ID NO: 72511 - DNA, 25 bp, probe
ttaacttcatggtgaatagtcaaga

SEQ ID NO: 72512 - DNA, 25 bp, probe
ggaattaacttcatggtgaatagtc

SEQ ID NO: 72513 - DNA, 25 bp, probe
aaggagaaggaaggaaaggacagtc

SEQ ID NO: 72514 - DNA, 25 bp, probe
attaacttcatggtgaatagtcaag

SEQ ID NO: 72515 - DNA, 25 bp, probe
gaattaacttcatggtgaatagtca

SEQ ID NO: 72516 - DNA, 25 bp, probe
atggaattaacttcatggtgaatag

SEQ ID NO: 72517 - DNA, 25 bp, probe
gatggaattaacttcatggtgaata

SEQ ID NO: 72518 - DNA, 25 bp, probe
caaggagaaggaaggaaaggacagt

SEQ ID NO: 72519 - DNA, 25 bp, probe
aattaacttcatggtgaatagtcaa

SEQ ID NO: 72520 - DNA, 25 bp, probe
ttcatggtgaatagtcaagagattt

SEQ ID NO: 72521 - DNA, 25 bp, probe
aaagtcccaaggagaaggaaggaaa

SEQ ID NO: 72522 - DNA, 25 bp, probe
gactttgtcaatcagtgccatgatc

SEQ ID NO: 72523 - DNA, 25 bp, probe
ccaaggagaaggaaggaaaggacag

SEQ ID NO: 72524 - DNA, 25 bp, probe
aagtcccaaggagaaggaaggaaag

SEQ ID NO: 72525 - DNA, 25 bp, probe
agatttgtgactttgtcaatcagtg

SEQ ID NO: 72526 - DNA, 25 bp, probe
gagatttgtgactttgtcaatcagt

SEQ ID NO: 72527 - DNA, 25 bp, probe
gtcaagagatttgtgactttgtcaa

SEQ ID NO: 72528 - DNA, 25 bp, probe
ggtgaatagtcaagagatttgtgac

SEQ ID NO: 72529 - DNA, 25 bp, probe
agagatttgtgactttgtcaatcag

SEQ ID NO: 72530 - DNA, 25 bp, probe
aagagatttgtgactttgtcaatca

SEQ ID NO: 72531 - DNA, 25 bp, probe
tcaagagatttgtgactttgtcaat

SEQ ID NO: 72532 - DNA, 25 bp, probe
caagagatttgtgactttgtcaatc

SEQ ID NO: 72533 - DNA, 25 bp, probe
tattagaactcacaggcatactgac

SEQ ID NO: 72534 - DNA, 25 bp, probe
ttattagaactcacaggcatactga

SEQ ID NO: 72535 - DNA, 25 bp, probe
gatgaagagctgctaataattggtg

SEQ ID NO: 72536 - DNA, 25 bp, probe
ctgatgaagagctgctaataattgg

SEQ ID NO: 72537 - DNA, 25 bp, probe
tgatgaagagctgctaataattggt

SEQ ID NO: 72538 - DNA, 25 bp, probe
attagaactcacaggcatactgaca

SEQ ID NO: 72539 - DNA, 25 bp, probe
atgaagagctgctaataattggtgg

SEQ ID NO: 72540 - DNA, 25 bp, probe
ttagaactcacaggcatactgacag

SEQ ID NO: 72541 - DNA, 25 bp, probe
atttattagaactcacaggcatact

SEQ ID NO: 72542 - DNA, 25 bp, probe
tttattagaactcacaggcatactg

SEQ ID NO: 72543 - DNA, 25 bp, probe
gctgatgaagagctgctaataattg

SEQ ID NO: 72544 - DNA, 25 bp, probe
ggctgatgaagagctgctaataatt

SEQ ID NO: 72545 - DNA, 25 bp, probe
tagaactcacaggcatactgacagt

SEQ ID NO: 72546 - DNA, 25 bp, probe
aatttattagaactcacaggcatac

SEQ ID NO: 72547 - DNA, 25 bp, probe
gaactcacaggcatactgacagtaa

SEQ ID NO: 72548 - DNA, 25 bp, probe
aggctgatgaagagctgctaataat

SEQ ID NO: 72549 - DNA, 25 bp, probe
gttattttgttggcattggtcattt

SEQ ID NO: 72550 - DNA, 25 bp, probe
ttttgttggcattggtcattttaag

SEQ ID NO: 72551 - DNA, 25 bp, probe
aaaggttattttgttggcattggtc

SEQ ID NO: 72552 - DNA, 25 bp, probe
ggttattttgttggcattggtcatt

SEQ ID NO: 72553 - DNA, 25 bp, probe
ttattttgttggcattggtcatttt

SEQ ID NO: 72554 - DNA, 25 bp, probe
attttgttggcattggtcattttaa

SEQ ID NO: 72555 - DNA, 25 bp, probe
agaactcacaggcatactgacagta

SEQ ID NO: 72556 - DNA, 25 bp, probe
caggctgatgaagagctgctaataa

SEQ ID NO: 72557 - DNA, 25 bp, probe
aggttattttgttggcattggtcat

SEQ ID NO: 72558 - DNA, 25 bp, probe
tttgttggcattggtcattttaagc

SEQ ID NO: 72559 - DNA, 25 bp, probe
cacaggcatactgacagtaaatctc

SEQ ID NO: 72560 - DNA, 25 bp, probe
ctcacaggcatactgacagtaaatc

SEQ ID NO: 72561 - DNA, 25 bp, probe
tgaagagctgctaataattggtggg

SEQ ID NO: 72562 - DNA, 25 bp, probe
tattttgttggcattggtcatttta

SEQ ID NO: 72563 - DNA, 25 bp, probe
aaggttattttgttggcattggtca

SEQ ID NO: 72564 - DNA, 25 bp, probe
acaggcatactgacagtaaatctca

SEQ ID NO: 72565 - DNA, 25 bp, probe
tcacaggcatactgacagtaaatct

SEQ ID NO: 72566 - DNA, 25 bp, probe
ggcctggctgttaaatttattagaa

SEQ ID NO: 72567 - DNA, 25 bp, probe
actcacaggcatactgacagtaaat

SEQ ID NO: 72568 - DNA, 25 bp, probe
aactcacaggcatactgacagtaaa

SEQ ID NO: 72569 - DNA, 25 bp, probe
gggcctggctgttaaatttattaga

SEQ ID NO: 72570 - DNA, 25 bp, probe
aaaaggttattttgttggcattggt

SEQ ID NO: 72571 - DNA, 25 bp, probe
cattggtcattttaagctagttggg

SEQ ID NO: 72572 - DNA, 25 bp, probe
gcctggctgttaaatttattagaac

SEQ ID NO: 72573 - DNA, 25 bp, probe
gcattggtcattttaagctagttgg

SEQ ID NO: 72574 - DNA, 25 bp, probe
ggcattggtcattttaagctagttg

SEQ ID NO: 72575 - DNA, 25 bp, probe
gttggcattggtcattttaagctag

SEQ ID NO: 72576 - DNA, 25 bp, probe
tggcattggtcattttaagctagtt

SEQ ID NO: 72577 - DNA, 25 bp, probe
cagaattatgtcaggttggcttgtc

SEQ ID NO: 72578 - DNA, 25 bp, probe
agaattatgtcaggttggcttgtcc

SEQ ID NO: 72579 - DNA, 25 bp, probe
ctccagaattatgtcaggttggctt

SEQ ID NO: 72580 - DNA, 25 bp, probe
tccagaattatgtcaggttggcttg

SEQ ID NO: 72581 - DNA, 25 bp, probe
cttccctccagaattatgtcaggtt

SEQ ID NO: 72582 - DNA, 25 bp, probe
ccagaattatgtcaggttggcttgt

SEQ ID NO: 72583 - DNA, 25 bp, probe
ttccctccagaattatgtcaggttg

SEQ ID NO: 72584 - DNA, 25 bp, probe
ataggagagaatggggacagaatat

SEQ ID NO: 72585 - DNA, 25 bp, probe
tataggagagaatggggacagaata

SEQ ID NO: 72586 - DNA, 25 bp, probe
tctggcaagctataggagagaatgg

SEQ ID NO: 72587 - DNA, 25 bp, probe
gaattatgtcaggttggcttgtccc

SEQ ID NO: 72588 - DNA, 25 bp, probe
cggaatagtgaagactttattcgtg

SEQ ID NO: 72589 - DNA, 25 bp, probe
ggaatagtgaagactttattcgtgg

SEQ ID NO: 72590 - DNA, 25 bp, probe
taggagagaatggggacagaatatt

SEQ ID NO: 72591 - DNA, 25 bp, probe
aggagagaatggggacagaatattt

SEQ ID NO: 72592 - DNA, 25 bp, probe
cctccagaattatgtcaggttggct

SEQ ID NO: 72593 - DNA, 25 bp, probe
ggagagaatggggacagaatatttc

SEQ ID NO: 72594 - DNA, 25 bp, probe
ctctggcaagctataggagagaatg

SEQ ID NO: 72595 - DNA, 25 bp, probe
ccttccctccagaattatgtcaggt

SEQ ID NO: 72596 - DNA, 25 bp, probe
gaatatttctcctgctgtgcccttc

SEQ ID NO: 72597 - DNA, 25 bp, probe
ctataggagagaatggggacagaat

SEQ ID NO: 72598 - DNA, 25 bp, probe
tccctccagaattatgtcaggttgg

SEQ ID NO: 72599 - DNA, 25 bp, probe
aattatgtcaggttggcttgtccct

SEQ ID NO: 72600 - DNA, 25 bp, probe
cccttccctccagaattatgtcagg

SEQ ID NO: 72601 - DNA, 25 bp, probe
gcccttccctccagaattatgtcag

SEQ ID NO: 72602 - DNA, 25 bp, probe
gagagaatggggacagaatatttct

SEQ ID NO: 72603 - DNA, 25 bp, probe
gtgcccttccctccagaattatgtc

SEQ ID NO: 72604 - DNA, 25 bp, probe
gaatggggacagaatatttctcctg

SEQ ID NO: 72605 - DNA, 25 bp, probe
agaatggggacagaatatttctcct

SEQ ID NO: 72606 - DNA, 25 bp, probe
ctggcaagctataggagagaatggg

SEQ ID NO: 72607 - DNA, 25 bp, probe
ccggaatagtgaagactttattcgt

SEQ ID NO: 72608 - DNA, 25 bp, probe
attatgtcaggttggcttgtccctc

SEQ ID NO: 72609 - DNA, 25 bp, probe
gctctggcaagctataggagagaat

SEQ ID NO: 72610 - DNA, 25 bp, probe
gctataggagagaatggggacagaa

SEQ ID NO: 72611 - DNA, 25 bp, probe
aagctataggagagaatggggacag

SEQ ID NO: 72612 - DNA, 25 bp, probe
ctgtgcccttccctccagaattatg

SEQ ID NO: 72613 - DNA, 25 bp, probe
caagctataggagagaatggggaca

SEQ ID NO: 72614 - DNA, 25 bp, probe
aatatttctcctgctgtgcccttcc

SEQ ID NO: 72615 - DNA, 25 bp, probe
agaatatttctcctgctgtgccctt

SEQ ID NO: 72616 - DNA, 25 bp, probe
agctataggagagaatggggacaga

SEQ ID NO: 72617 - DNA, 25 bp, probe
aatggggacagaatatttctcctgc

SEQ ID NO: 72618 - DNA, 25 bp, probe
gggacagaatatttctcctgctgtg

SEQ ID NO: 72619 - DNA, 25 bp, probe
cagaatatttctcctgctgtgccct

SEQ ID NO: 72620 - DNA, 25 bp, probe
atggggacagaatatttctcctgct

SEQ ID NO: 72621 - DNA, 25 bp, probe
atgcctcagagacaagtatagttac

SEQ ID NO: 72622 - DNA, 25 bp, probe
atcatcatcactgacttcaatctgt

SEQ ID NO: 72623 - DNA, 25 bp, probe
aatcatgcctcagagacaagtatag

SEQ ID NO: 72624 - DNA, 25 bp, probe
caatcatgcctcagagacaagtata

SEQ ID NO: 72625 - DNA, 25 bp, probe
catgcctcagagacaagtatagtta

SEQ ID NO: 72626 - DNA, 25 bp, probe
atcatgcctcagagacaagtatagt

SEQ ID NO: 72627 - DNA, 25 bp, probe
tcatgcctcagagacaagtatagtt

SEQ ID NO: 72628 - DNA, 25 bp, probe
gatcatcatcactgacttcaatctg

SEQ ID NO: 72629 - DNA, 25 bp, probe
caagatcatcatcactgacttcaat

SEQ ID NO: 72630 - DNA, 25 bp, probe
ccaagatcatcatcactgacttcaa

SEQ ID NO: 72631 - DNA, 25 bp, probe
ctccaagatcatcatcactgacttc

SEQ ID NO: 72632 - DNA, 25 bp, probe
aagatcatcatcactgacttcaatc

SEQ ID NO: 72633 - DNA, 25 bp, probe
tcatcatcactgacttcaatctgtg

SEQ ID NO: 72634 - DNA, 25 bp, probe
acaatcatgcctcagagacaagtat

SEQ ID NO: 72635 - DNA, 25 bp, probe
actccaagatcatcatcactgactt

SEQ ID NO: 72636 - DNA, 25 bp, probe
tccaagatcatcatcactgacttca

SEQ ID NO: 72637 - DNA, 25 bp, probe
gcctcagagacaagtatagttactc

SEQ ID NO: 72638 - DNA, 25 bp, probe
cctcagagacaagtatagttactcg

SEQ ID NO: 72639 - DNA, 25 bp, probe
aacaatcatgcctcagagacaagta

SEQ ID NO: 72640 - DNA, 25 bp, probe
tgcctcagagacaagtatagttact

SEQ ID NO: 72641 - DNA, 25 bp, probe
gactccaagatcatcatcactgact

SEQ ID NO: 72642 - DNA, 25 bp, probe
ctgactccaagatcatcatcactga

SEQ ID NO: 72643 - DNA, 25 bp, probe
tgactccaagatcatcatcactgac

SEQ ID NO: 72644 - DNA, 25 bp, probe
actgactccaagatcatcatcactg

SEQ ID NO: 72645 - DNA, 25 bp, probe
cactgactccaagatcatcatcact

SEQ ID NO: 72646 - DNA, 25 bp, probe
atcatcgtctacatcctgctgagta

SEQ ID NO: 72647 - DNA, 25 bp, probe
catcatcactgacttcaatctgtgc

SEQ ID NO: 72648 - DNA, 25 bp, probe
agatcatcatcactgacttcaatct

SEQ ID NO: 72649 - DNA, 25 bp, probe
acaagtatagttactcgaatgagcc

SEQ ID NO: 72650 - DNA, 25 bp, probe
gacaagtatagttactcgaatgagc

SEQ ID NO: 72651 - DNA, 25 bp, probe
ctcagagacaagtatagttactcga

SEQ ID NO: 72652 - DNA, 25 bp, probe
caacaatcatgcctcagagacaagt

SEQ ID NO: 72653 - DNA, 25 bp, probe
acaacaatcatgcctcagagacaag

SEQ ID NO: 72654 - DNA, 25 bp, probe
gacaacaatcatgcctcagagacaa

SEQ ID NO: 72655 - DNA, 25 bp, probe
tcagagacaagtatagttactcgaa

SEQ ID NO: 72656 - DNA, 25 bp, probe
atcatcactgacttcaatctgtgcc

SEQ ID NO: 72657 - DNA, 25 bp, probe
ctgcctgtatgagatggtgctagat

SEQ ID NO: 72658 - DNA, 25 bp, probe
gcactgactccaagatcatcatcac

SEQ ID NO: 72659 - DNA, 25 bp, probe
gagacaagtatagttactcgaatga

SEQ ID NO: 72660 - DNA, 25 bp, probe
tgcctgtatgagatggtgctagatg

SEQ ID NO: 72661 - DNA, 25 bp, probe
agacaagtatagttactcgaatgag

SEQ ID NO: 72662 - DNA, 25 bp, probe
agagacaagtatagttactcgaatg

SEQ ID NO: 72663 - DNA, 25 bp, probe
cagagacaagtatagttactcgaat

SEQ ID NO: 72664 - DNA, 25 bp, probe
catcatcgtctacatcctgctgagt

SEQ ID NO: 72665 - DNA, 25 bp, probe
cattcttccttcacagttcctctac

SEQ ID NO: 72666 - DNA, 25 bp, probe
attcttccttcacagttcctctact

SEQ ID NO: 72667 - DNA, 25 bp, probe
ccattcttccttcacagttcctcta

SEQ ID NO: 72668 - DNA, 25 bp, probe
aagtccttgataatcgttctcagca

SEQ ID NO: 72669 - DNA, 25 bp, probe
agaccagctcttaatatcaaccttg

SEQ ID NO: 72670 - DNA, 25 bp, probe
gagaccagctcttaatatcaacctt

SEQ ID NO: 72671 - DNA, 25 bp, probe
aaggagaccagctcttaatatcaac

SEQ ID NO: 72672 - DNA, 25 bp, probe
gaaggagaccagctcttaatatcaa

SEQ ID NO: 72673 - DNA, 25 bp, probe
cagaaggagaccagctcttaatatc

SEQ ID NO: 72674 - DNA, 25 bp, probe
gctcttaatatcaaccttgccctat

SEQ ID NO: 72675 - DNA, 25 bp, probe
agaaggagaccagctcttaatatca

SEQ ID NO: 72676 - DNA, 25 bp, probe
acagaaggagaccagctcttaatat

SEQ ID NO: 72677 - DNA, 25 bp, probe
gaccagctcttaatatcaaccttgc

SEQ ID NO: 72678 - DNA, 25 bp, probe
ccttgataatcgttctcagcacaga

SEQ ID NO: 72679 - DNA, 25 bp, probe
tccttgataatcgttctcagcacag

SEQ ID NO: 72680 - DNA, 25 bp, probe
agtccttgataatcgttctcagcac

SEQ ID NO: 72681 - DNA, 25 bp, probe
gtccttgataatcgttctcagcaca

SEQ ID NO: 72682 - DNA, 25 bp, probe
taccagagcagttacagagaaagag

SEQ ID NO: 72683 - DNA, 25 bp, probe
ctaccagagcagttacagagaaaga

SEQ ID NO: 72684 - DNA, 25 bp, probe
gaaagtccttgataatcgttctcag

SEQ ID NO: 72685 - DNA, 25 bp, probe
cacagaaggagaccagctcttaata

SEQ ID NO: 72686 - DNA, 25 bp, probe
ggagaccagctcttaatatcaacct

SEQ ID NO: 72687 - DNA, 25 bp, probe
aggagaccagctcttaatatcaacc

SEQ ID NO: 72688 - DNA, 25 bp, probe
aaagtccttgataatcgttctcagc

SEQ ID NO: 72689 - DNA, 25 bp, probe
tcttaatatcaaccttgccctattg

SEQ ID NO: 72690 - DNA, 25 bp, probe
ttgataatcgttctcagcacagaag

SEQ ID NO: 72691 - DNA, 25 bp, probe
cttgataatcgttctcagcacagaa

SEQ ID NO: 72692 - DNA, 25 bp, probe
ctcttaatatcaaccttgccctatt

SEQ ID NO: 72693 - DNA, 25 bp, probe
ccctattgagaaaggaatttaccct

SEQ ID NO: 72694 - DNA, 25 bp, probe
ttgccctattgagaaaggaatttac

SEQ ID NO: 72695 - DNA, 25 bp, probe
tgccctattgagaaaggaatttacc

SEQ ID NO: 72696 - DNA, 25 bp, probe
accagctcttaatatcaaccttgcc

SEQ ID NO: 72697 - DNA, 25 bp, probe
ttggaaagtccttgataatcgttct

SEQ ID NO: 72698 - DNA, 25 bp, probe
cttgccctattgagaaaggaattta

SEQ ID NO: 72699 - DNA, 25 bp, probe
tttggaaagtccttgataatcgttc

SEQ ID NO: 72700 - DNA, 25 bp, probe
ggaaagtccttgataatcgttctca

SEQ ID NO: 72701 - DNA, 25 bp, probe
tggaaagtccttgataatcgttctc

SEQ ID NO: 72702 - DNA, 25 bp, probe
gagaagagcaccctgagaatgaaat

SEQ ID NO: 72703 - DNA, 25 bp, probe
ctttggaaagtccttgataatcgtt

SEQ ID NO: 72704 - DNA, 25 bp, probe
tgatgactgttcagcttctcagatc

SEQ ID NO: 72705 - DNA, 25 bp, probe
gccattactttacagcctgaacaag

SEQ ID NO: 72706 - DNA, 25 bp, probe
gccctattgagaaaggaatttaccc

SEQ ID NO: 72707 - DNA, 25 bp, probe
agctcttaatatcaaccttgcccta

SEQ ID NO: 72708 - DNA, 25 bp, probe
agaagagcaccctgagaatgaaatg

SEQ ID NO: 72709 - DNA, 25 bp, probe
gttctataaactggtgaaggatgga

SEQ ID NO: 72710 - DNA, 25 bp, probe
ttctataaactggtgaaggatggat

SEQ ID NO: 72711 - DNA, 25 bp, probe
ctataaactggtgaaggatggatac

SEQ ID NO: 72712 - DNA, 25 bp, probe
tctataaactggtgaaggatggata

SEQ ID NO: 72713 - DNA, 25 bp, probe
catgaatgactccaactacattgtc

SEQ ID NO: 72714 - DNA, 25 bp, probe
tataaactggtgaaggatggatacc

SEQ ID NO: 72715 - DNA, 25 bp, probe
agagagcatctttgactgtgtctac

SEQ ID NO: 72716 - DNA, 25 bp, probe
cagagagcatctttgactgtgtcta

SEQ ID NO: 72717 - DNA, 25 bp, probe
cccaaagaatatatacagcatcatg

SEQ ID NO: 72718 - DNA, 25 bp, probe
acatcatgaatgactccaactacat

SEQ ID NO: 72719 - DNA, 25 bp, probe
gagagcatctttgactgtgtctaca

SEQ ID NO: 72720 - DNA, 25 bp, probe
gacatcatgaatgactccaactaca

SEQ ID NO: 72721 - DNA, 25 bp, probe
agaatatatacagcatcatgcaggc

SEQ ID NO: 72722 - DNA, 25 bp, probe
atcctggtgaacagcaagttctata

SEQ ID NO: 72723 - DNA, 25 bp, probe
aagaatatatacagcatcatgcagg

SEQ ID NO: 72724 - DNA, 25 bp, probe
tcctggtgaacagcaagttctataa

SEQ ID NO: 72725 - DNA, 25 bp, probe
agttctataaactggtgaaggatgg

SEQ ID NO: 72726 - DNA, 25 bp, probe
cagcaagttctataaactggtgaag

SEQ ID NO: 72727 - DNA, 25 bp, probe
acagcaagttctataaactggtgaa

SEQ ID NO: 72728 - DNA, 25 bp, probe
aacagcaagttctataaactggtga

SEQ ID NO: 72729 - DNA, 25 bp, probe
gcaagttctataaactggtgaagga

SEQ ID NO: 72730 - DNA, 25 bp, probe
agcaagttctataaactggtgaagg

SEQ ID NO: 72731 - DNA, 25 bp, probe
ggacatcatgaatgactccaactac

SEQ ID NO: 72732 - DNA, 25 bp, probe
gaatgactccaactacattgtcaag

SEQ ID NO: 72733 - DNA, 25 bp, probe
atgaatgactccaactacattgtca

SEQ ID NO: 72734 - DNA, 25 bp, probe
tgaatgactccaactacattgtcaa

SEQ ID NO: 72735 - DNA, 25 bp, probe
gccccaaagaatatatacagcatca

SEQ ID NO: 72736 - DNA, 25 bp, probe
tcatgaatgactccaactacattgt

SEQ ID NO: 72737 - DNA, 25 bp, probe
aagttctataaactggtgaaggatg

SEQ ID NO: 72738 - DNA, 25 bp, probe
caagttctataaactggtgaaggat

SEQ ID NO: 72739 - DNA, 25 bp, probe
agagcatctttgactgtgtctacac

SEQ ID NO: 72740 - DNA, 25 bp, probe
aatgactccaactacattgtcaagg

SEQ ID NO: 72741 - DNA, 25 bp, probe
atcatgaatgactccaactacattg

SEQ ID NO: 72742 - DNA, 25 bp, probe
catcatgaatgactccaactacatt

SEQ ID NO: 72743 - DNA, 25 bp, probe
ccccaaagaatatatacagcatcat

SEQ ID NO: 72744 - DNA, 25 bp, probe
atctttgactgtgtctacacggttc

SEQ ID NO: 72745 - DNA, 25 bp, probe
gaacagcaagttctataaactggtg

SEQ ID NO: 72746 - DNA, 25 bp, probe
gtgaacagcaagttctataaactgg

SEQ ID NO: 72747 - DNA, 25 bp, probe
ggtgaacagcaagttctataaactg

SEQ ID NO: 72748 - DNA, 25 bp, probe
ctggtgaacagcaagttctataaac

SEQ ID NO: 72749 - DNA, 25 bp, probe
catcctggtgaacagcaagttctat

SEQ ID NO: 72750 - DNA, 25 bp, probe
tgaacagcaagttctataaactggt

SEQ ID NO: 72751 - DNA, 25 bp, probe
tggtgaacagcaagttctataaact

SEQ ID NO: 72752 - DNA, 25 bp, probe
ttgactgtgtctacacggttcagag

SEQ ID NO: 72753 - DNA, 25 bp, probe
ataaggaggtagtgttcttggactt

SEQ ID NO: 72754 - DNA, 25 bp, probe
taaggaggtagtgttcttggacttc

SEQ ID NO: 72755 - DNA, 25 bp, probe
cataaggaggtagtgttcttggact

SEQ ID NO: 72756 - DNA, 25 bp, probe
caagcatccatcactgagagaagaa

SEQ ID NO: 72757 - DNA, 25 bp, probe
atcaccataaggaggtagtgttctt

SEQ ID NO: 72758 - DNA, 25 bp, probe
atccatcactgagagaagaaagaag

SEQ ID NO: 72759 - DNA, 25 bp, probe
catccatcactgagagaagaaagaa

SEQ ID NO: 72760 - DNA, 25 bp, probe
ttcaagcatccatcactgagagaag

SEQ ID NO: 72761 - DNA, 25 bp, probe
cttcaagcatccatcactgagagaa

SEQ ID NO: 72762 - DNA, 25 bp, probe
ttcttcaagcatccatcactgagag

SEQ ID NO: 72763 - DNA, 25 bp, probe
cctcagagaaacaatcacagaaaga

SEQ ID NO: 72764 - DNA, 25 bp, probe
caaatgctgaaagacatctatggaa

SEQ ID NO: 72765 - DNA, 25 bp, probe
tcagagaaacaatcacagaaagagc

SEQ ID NO: 72766 - DNA, 25 bp, probe
atcactgagagaagaaagaagggat

SEQ ID NO: 72767 - DNA, 25 bp, probe
actatgtctttgatgaaggagaagc

SEQ ID NO: 72768 - DNA, 25 bp, probe
gatcaccataaggaggtagtgttct

SEQ ID NO: 72769 - DNA, 25 bp, probe
agatcaccataaggaggtagtgttc

SEQ ID NO: 72770 - DNA, 25 bp, probe
tcaccataaggaggtagtgttcttg

SEQ ID NO: 72771 - DNA, 25 bp, probe
aaatgctgaaagacatctatggaaa

SEQ ID NO: 72772 - DNA, 25 bp, probe
ggactatcaagtgctggtcttctac

SEQ ID NO: 72773 - DNA, 25 bp, probe
aggactatcaagtgctggtcttcta

SEQ ID NO: 72774 - DNA, 25 bp, probe
aatgctgaaagacatctatggaaat

SEQ ID NO: 72775 - DNA, 25 bp, probe
cagatcaccataaggaggtagtgtt

SEQ ID NO: 72776 - DNA, 25 bp, probe
ctatgtctttgatgaaggagaagcc

SEQ ID NO: 72777 - DNA, 25 bp, probe
ggaggtagtgttcttggacttcaac

SEQ ID NO: 72778 - DNA, 25 bp, probe
gtagaacttggtgactttatcagca

SEQ ID NO: 72779 - DNA, 25 bp, probe
tgtagaacttggtgactttatcagc

SEQ ID NO: 72780 - DNA, 25 bp, probe
ctcagagaaacaatcacagaaagag

SEQ ID NO: 72781 - DNA, 25 bp, probe
ctcacagatcaccataaggaggtag

SEQ ID NO: 72782 - DNA, 25 bp, probe
caactatgtctttgatgaaggagaa

SEQ ID NO: 72783 - DNA, 25 bp, probe
tgctgaaagacatctatggaaataa

SEQ ID NO: 72784 - DNA, 25 bp, probe
catcactgagagaagaaagaaggga

SEQ ID NO: 72785 - DNA, 25 bp, probe
tccatcactgagagaagaaagaagg

SEQ ID NO: 72786 - DNA, 25 bp, probe
aggaggtagtgttcttggacttcaa

SEQ ID NO: 72787 - DNA, 25 bp, probe
aaggaggtagtgttcttggacttca

SEQ ID NO: 72788 - DNA, 25 bp, probe
aactatgtctttgatgaaggagaag

SEQ ID NO: 72789 - DNA, 25 bp, probe
ttgtagaacttggtgactttatcag

SEQ ID NO: 72790 - DNA, 25 bp, probe
aagcatccatcactgagagaagaaa

SEQ ID NO: 72791 - DNA, 25 bp, probe
tatgtctttgatgaaggagaagcca

SEQ ID NO: 72792 - DNA, 25 bp, probe
gtccaaatgctgaaagacatctatg

SEQ ID NO: 72793 - DNA, 25 bp, probe
ccataaggaggtagtgttcttggac

SEQ ID NO: 72794 - DNA, 25 bp, probe
atgctgaaagacatctatggaaata

SEQ ID NO: 72795 - DNA, 25 bp, probe
cacagatcaccataaggaggtagtg

SEQ ID NO: 72796 - DNA, 25 bp, probe
tcaagcatccatcactgagagaaga

SEQ ID NO: 72797 - DNA, 25 bp, probe
tatggcagaagtatgtagagcaatc

SEQ ID NO: 72798 - DNA, 25 bp, probe
ttatggcagaagtatgtagagcaat

SEQ ID NO: 72799 - DNA, 25 bp, probe
attatggcagaagtatgtagagcaa

SEQ ID NO: 72800 - DNA, 25 bp, probe
tattatggcagaagtatgtagagca

SEQ ID NO: 72801 - DNA, 25 bp, probe
atggcagaagtatgtagagcaatca

SEQ ID NO: 72802 - DNA, 25 bp, probe
atattatggcagaagtatgtagagc

SEQ ID NO: 72803 - DNA, 25 bp, probe
tggcagaagtatgtagagcaatcaa

SEQ ID NO: 72804 - DNA, 25 bp, probe
accatgattgatgatgaagccttaa

SEQ ID NO: 72805 - DNA, 25 bp, probe
aaccatgattgatgatgaagcctta

SEQ ID NO: 72806 - DNA, 25 bp, probe
gcagaagtatgtagagcaatcaaac

SEQ ID NO: 72807 - DNA, 25 bp, probe
caaccatgattgatgatgaagcctt

SEQ ID NO: 72808 - DNA, 25 bp, probe
ggcagaagtatgtagagcaatcaaa

SEQ ID NO: 72809 - DNA, 25 bp, probe
tgatattatggcagaagtatgtaga

SEQ ID NO: 72810 - DNA, 25 bp, probe
tggcatttaggaattagaagtcaaa

SEQ ID NO: 72811 - DNA, 25 bp, probe
atggcatttaggaattagaagtcaa

SEQ ID NO: 72812 - DNA, 25 bp, probe
ggcatttaggaattagaagtcaaag

SEQ ID NO: 72813 - DNA, 25 bp, probe
aatggcatttaggaattagaagtca

SEQ ID NO: 72814 - DNA, 25 bp, probe
ccatgattgatgatgaagccttaaa

SEQ ID NO: 72815 - DNA, 25 bp, probe
cagaagtatgtagagcaatcaaaca

SEQ ID NO: 72816 - DNA, 25 bp, probe
gatattatggcagaagtatgtagag

SEQ ID NO: 72817 - DNA, 25 bp, probe
agaagtatgtagagcaatcaaacaa

SEQ ID NO: 72818 - DNA, 25 bp, probe
agttcaaccatgattgatgatgaag

SEQ ID NO: 72819 - DNA, 25 bp, probe
gcatttaggaattagaagtcaaagt

SEQ ID NO: 72820 - DNA, 25 bp, probe
gttcaaccatgattgatgatgaagc

SEQ ID NO: 72821 - DNA, 25 bp, probe
cgaccaaatgatattatggcagaag

SEQ ID NO: 72822 - DNA, 25 bp, probe
gaccaaatgatattatggcagaagt

SEQ ID NO: 72823 - DNA, 25 bp, probe
atgatattatggcagaagtatgtag

SEQ ID NO: 72824 - DNA, 25 bp, probe
tagttcaaccatgattgatgatgaa

SEQ ID NO: 72825 - DNA, 25 bp, probe
gatccatcatatagttcaaccatga

SEQ ID NO: 72826 - DNA, 25 bp, probe
atatcagggaacatgaatggtttaa

SEQ ID NO: 72827 - DNA, 25 bp, probe
atagttcaaccatgattgatgatga

SEQ ID NO: 72828 - DNA, 25 bp, probe
atttaggaattagaagtcaaagtcg

SEQ ID NO: 72829 - DNA, 25 bp, probe
gaagtatgtagagcaatcaaacaat

SEQ ID NO: 72830 - DNA, 25 bp, probe
ttcaaccatgattgatgatgaagcc

SEQ ID NO: 72831 - DNA, 25 bp, probe
tatcagggaacatgaatggtttaaa

SEQ ID NO: 72832 - DNA, 25 bp, probe
tttaggaattagaagtcaaagtcga

SEQ ID NO: 72833 - DNA, 25 bp, probe
accaaatgatattatggcagaagta

SEQ ID NO: 72834 - DNA, 25 bp, probe
accttccaaaatatctctttcctga

SEQ ID NO: 72835 - DNA, 25 bp, probe
gaccttccaaaatatctctttcctg

SEQ ID NO: 72836 - DNA, 25 bp, probe
aatgatattatggcagaagtatgta

SEQ ID NO: 72837 - DNA, 25 bp, probe
tcaaccatgattgatgatgaagcct

SEQ ID NO: 72838 - DNA, 25 bp, probe
tcgaccaaatgatattatggcagaa

SEQ ID NO: 72839 - DNA, 25 bp, probe
gatatcagggaacatgaatggttta

SEQ ID NO: 72840 - DNA, 25 bp, probe
tgattgatgatgaagccttaaaaga

SEQ ID NO: 72841 - DNA, 25 bp, probe
aatgttagtgattgatcctgacaag

SEQ ID NO: 72842 - DNA, 25 bp, probe
atgttagtgattgatcctgacaagc

SEQ ID NO: 72843 - DNA, 25 bp, probe
aaagaagcaagaatggtgttgtaaa

SEQ ID NO: 72844 - DNA, 25 bp, probe
gaaagaagcaagaatggtgttgtaa

SEQ ID NO: 72845 - DNA, 25 bp, probe
gattgggaagaaagaagcaagaatg

SEQ ID NO: 72846 - DNA, 25 bp, probe
atttatgatgcccagttggaagaaa

SEQ ID NO: 72847 - DNA, 25 bp, probe
aatttatgatgcccagttggaagaa

SEQ ID NO: 72848 - DNA, 25 bp, probe
agaaagaagcaagaatggtgttgta

SEQ ID NO: 72849 - DNA, 25 bp, probe
gaagaaagaagcaagaatggtgttg

SEQ ID NO: 72850 - DNA, 25 bp, probe
ggaagaaagaagcaagaatggtgtt

SEQ ID NO: 72851 - DNA, 25 bp, probe
aaagaagtcatggattgggaagaaa

SEQ ID NO: 72852 - DNA, 25 bp, probe
tttatgatgcccagttggaagaaag

SEQ ID NO: 72853 - DNA, 25 bp, probe
aagaaagaagcaagaatggtgttgt

SEQ ID NO: 72854 - DNA, 25 bp, probe
ggattgggaagaaagaagcaagaat

SEQ ID NO: 72855 - DNA, 25 bp, probe
aagtcatggattgggaagaaagaag

SEQ ID NO: 72856 - DNA, 25 bp, probe
gaagtcatggattgggaagaaagaa

SEQ ID NO: 72857 - DNA, 25 bp, probe
aagaagtcatggattgggaagaaag

SEQ ID NO: 72858 - DNA, 25 bp, probe
attgggaagaaagaagcaagaatgg

SEQ ID NO: 72859 - DNA, 25 bp, probe
ttacaaagaagtcatggattgggaa

SEQ ID NO: 72860 - DNA, 25 bp, probe
tttacaaagaagtcatggattggga

SEQ ID NO: 72861 - DNA, 25 bp, probe
atttacaaagaagtcatggattggg

SEQ ID NO: 72862 - DNA, 25 bp, probe
tacaaagaagtcatggattgggaag

SEQ ID NO: 72863 - DNA, 25 bp, probe
ttatgatgcccagttggaagaaaga

SEQ ID NO: 72864 - DNA, 25 bp, probe
agaagtcatggattgggaagaaaga

SEQ ID NO: 72865 - DNA, 25 bp, probe
caaagaagtcatggattgggaagaa

SEQ ID NO: 72866 - DNA, 25 bp, probe
gagaacatgcaattgaagaatggaa

SEQ ID NO: 72867 - DNA, 25 bp, probe
aagagaacatgcaattgaagaatgg

SEQ ID NO: 72868 - DNA, 25 bp, probe
aaatgttagtgattgatcctgacaa

SEQ ID NO: 72869 - DNA, 25 bp, probe
tgttagtgattgatcctgacaagcg

SEQ ID NO: 72870 - DNA, 25 bp, probe
agagaacatgcaattgaagaatgga

SEQ ID NO: 72871 - DNA, 25 bp, probe
atggattgggaagaaagaagcaaga

SEQ ID NO: 72872 - DNA, 25 bp, probe
tatgatgcccagttggaagaaagag

SEQ ID NO: 72873 - DNA, 25 bp, probe
aaatttatgatgcccagttggaaga

SEQ ID NO: 72874 - DNA, 25 bp, probe
tggattgggaagaaagaagcaagaa

SEQ ID NO: 72875 - DNA, 25 bp, probe
agctaatttacaaagaagtcatgga

SEQ ID NO: 72876 - DNA, 25 bp, probe
aatttacaaagaagtcatggattgg

SEQ ID NO: 72877 - DNA, 25 bp, probe
gttagtgattgatcctgacaagcgg

SEQ ID NO: 72878 - DNA, 25 bp, probe
acaaagaagtcatggattgggaaga

SEQ ID NO: 72879 - DNA, 25 bp, probe
gctaatttacaaagaagtcatggat

SEQ ID NO: 72880 - DNA, 25 bp, probe
gagctaatttacaaagaagtcatgg

SEQ ID NO: 72881 - DNA, 25 bp, probe
gttggaagaaagagaacatgcaatt

SEQ ID NO: 72882 - DNA, 25 bp, probe
caaatttatgatgcccagttggaag

SEQ ID NO: 72883 - DNA, 25 bp, probe
ttgggaagaaagaagcaagaatggt

SEQ ID NO: 72884 - DNA, 25 bp, probe
tcacccatacatcactgtttggtat

SEQ ID NO: 72885 - DNA, 25 bp, probe
gtgaaaggttgtgtgatattccaag

SEQ ID NO: 72886 - DNA, 25 bp, probe
tgaaaggttgtgtgatattccaagg

SEQ ID NO: 72887 - DNA, 25 bp, probe
ggtgaaaggttgtgtgatattccaa

SEQ ID NO: 72888 - DNA, 25 bp, probe
ctggtgaaaggttgtgtgatattcc

SEQ ID NO: 72889 - DNA, 25 bp, probe
tgatattccaaggcactgaccgtat

SEQ ID NO: 72890 - DNA, 25 bp, probe
gatattccaaggcactgaccgtatc

SEQ ID NO: 72891 - DNA, 25 bp, probe
gctggtgaaaggttgtgtgatattc

SEQ ID NO: 72892 - DNA, 25 bp, probe
gaaaggttgtgtgatattccaaggc

SEQ ID NO: 72893 - DNA, 25 bp, probe
ttgtgtgatattccaaggcactgac

SEQ ID NO: 72894 - DNA, 25 bp, probe
gttgtgtgatattccaaggcactga

SEQ ID NO: 72895 - DNA, 25 bp, probe
aaggttgtgtgatattccaaggcac

SEQ ID NO: 72896 - DNA, 25 bp, probe
atattccaaggcactgaccgtatcc

SEQ ID NO: 72897 - DNA, 25 bp, probe
aaaggttgtgtgatattccaaggca

SEQ ID NO: 72898 - DNA, 25 bp, probe
ggatttgaagcctagcaacattgtt

SEQ ID NO: 72899 - DNA, 25 bp, probe
gaggatttgaagcctagcaacattg

SEQ ID NO: 72900 - DNA, 25 bp, probe
agaggatttgaagcctagcaacatt

SEQ ID NO: 72901 - DNA, 25 bp, probe
gaagagaggatttgaagcctagcaa

SEQ ID NO: 72902 - DNA, 25 bp, probe
tggtgaaaggttgtgtgatattcca

SEQ ID NO: 72903 - DNA, 25 bp, probe
agctggtgaaaggttgtgtgatatt

SEQ ID NO: 72904 - DNA, 25 bp, probe
ggttgtgtgatattccaaggcactg

SEQ ID NO: 72905 - DNA, 25 bp, probe
gagaggatttgaagcctagcaacat

SEQ ID NO: 72906 - DNA, 25 bp, probe
aagagaggatttgaagcctagcaac

SEQ ID NO: 72907 - DNA, 25 bp, probe
aacattgttgtgaaatcagactgca

SEQ ID NO: 72908 - DNA, 25 bp, probe
aggttgtgtgatattccaaggcact

SEQ ID NO: 72909 - DNA, 25 bp, probe
aggatttgaagcctagcaacattgt

SEQ ID NO: 72910 - DNA, 25 bp, probe
gagctggtgaaaggttgtgtgatat

SEQ ID NO: 72911 - DNA, 25 bp, probe
gagggaagagaggatttgaagccta

SEQ ID NO: 72912 - DNA, 25 bp, probe
gtgatattccaaggcactgaccgta

SEQ ID NO: 72913 - DNA, 25 bp, probe
agggaagagaggatttgaagcctag

SEQ ID NO: 72914 - DNA, 25 bp, probe
acattgttgtgaaatcagactgcac

SEQ ID NO: 72915 - DNA, 25 bp, probe
ctacaaagagaacgtggacatctgg

SEQ ID NO: 72916 - DNA, 25 bp, probe
tgtgtgatattccaaggcactgacc

SEQ ID NO: 72917 - DNA, 25 bp, probe
agagaggatttgaagcctagcaaca

SEQ ID NO: 72918 - DNA, 25 bp, probe
agagctggtgaaaggttgtgtgata

SEQ ID NO: 72919 - DNA, 25 bp, probe
catcctgggtatgggctacaaagag

SEQ ID NO: 72920 - DNA, 25 bp, probe
cctgggtatgggctacaaagagaac

SEQ ID NO: 72921 - DNA, 25 bp, probe
atcctgggtatgggctacaaagaga

SEQ ID NO: 72922 - DNA, 25 bp, probe
cattgttgtgaaatcagactgcacc

SEQ ID NO: 72923 - DNA, 25 bp, probe
tcctgggtatgggctacaaagagaa

SEQ ID NO: 72924 - DNA, 25 bp, probe
tacaaagagaacgtggacatctggt

SEQ ID NO: 72925 - DNA, 25 bp, probe
gctacaaagagaacgtggacatctg

SEQ ID NO: 72926 - DNA, 25 bp, probe
ggaagagaggatttgaagcctagca

SEQ ID NO: 72927 - DNA, 25 bp, probe
atatctggtcagtgggttgcatcat

SEQ ID NO: 72928 - DNA, 25 bp, probe
gtcatcctgggtatgggctacaaag

SEQ ID NO: 72929 - DNA, 25 bp, probe
taatggatgctaacttatgtcaggt

SEQ ID NO: 72930 - DNA, 25 bp, probe
gcttatcgtgaacttgtcctcttaa

SEQ ID NO: 72931 - DNA, 25 bp, probe
aatggatgctaacttatgtcaggtt

SEQ ID NO: 72932 - DNA, 25 bp, probe
gaggagatgccagacaacaataatt

SEQ ID NO: 72933 - DNA, 25 bp, probe
ttaatggatgctaacttatgtcagg

SEQ ID NO: 72934 - DNA, 25 bp, probe
aggagatgccagacaacaataattg

SEQ ID NO: 72935 - DNA, 25 bp, probe
tggatgctaacttatgtcaggttat

SEQ ID NO: 72936 - DNA, 25 bp, probe
atggatgctaacttatgtcaggtta

SEQ ID NO: 72937 - DNA, 25 bp, probe
gagatgccagacaacaataattgct

SEQ ID NO: 72938 - DNA, 25 bp, probe
ggaggagatgccagacaacaataat

SEQ ID NO: 72939 - DNA, 25 bp, probe
gctaacttatgtcaggttattcaca

SEQ ID NO: 72940 - DNA, 25 bp, probe
tgctaacttatgtcaggttattcac

SEQ ID NO: 72941 - DNA, 25 bp, probe
tggttatggaattaatggatgctaa

SEQ ID NO: 72942 - DNA, 25 bp, probe
ttggttatggaattaatggatgcta

SEQ ID NO: 72943 - DNA, 25 bp, probe
ggatgctaacttatgtcaggttatt

SEQ ID NO: 72944 - DNA, 25 bp, probe
agcttatcgtgaacttgtcctctta

SEQ ID NO: 72945 - DNA, 25 bp, probe
gcatttgatacagttcttgggataa

SEQ ID NO: 72946 - DNA, 25 bp, probe
aatgtcctaccttctttaccagatg

SEQ ID NO: 72947 - DNA, 25 bp, probe
gaatgtcctaccttctttaccagat

SEQ ID NO: 72948 - DNA, 25 bp, probe
ctaccttctttaccagatgctttgt

SEQ ID NO: 72949 - DNA, 25 bp, probe
agatgccagacaacaataattgctg

SEQ ID NO: 72950 - DNA, 25 bp, probe
cttatcgtgaacttgtcctcttaaa

SEQ ID NO: 72951 - DNA, 25 bp, probe
atgctaacttatgtcaggttattca

SEQ ID NO: 72952 - DNA, 25 bp, probe
taccttctttaccagatgctttgtg

SEQ ID NO: 72953 - DNA, 25 bp, probe
ggagatgccagacaacaataattgc

SEQ ID NO: 72954 - DNA, 25 bp, probe
cctaccttctttaccagatgctttg

SEQ ID NO: 72955 - DNA, 25 bp, probe
tcctaccttctttaccagatgcttt

SEQ ID NO: 72956 - DNA, 25 bp, probe
atgctttgtggtattaaacatctgc

SEQ ID NO: 72957 - DNA, 25 bp, probe
atacagttcttgggataaatgttgc

SEQ ID NO: 72958 - DNA, 25 bp, probe
gatgctaacttatgtcaggttattc

SEQ ID NO: 72959 - DNA, 25 bp, probe
tcaagatgtgtatttggttatggaa

SEQ ID NO: 72960 - DNA, 25 bp, probe
ttcaagatgtgtatttggttatgga

SEQ ID NO: 72961 - DNA, 25 bp, probe
ggaattaatggatgctaacttatgt

SEQ ID NO: 72962 - DNA, 25 bp, probe
tggaattaatggatgctaacttatg

SEQ ID NO: 72963 - DNA, 25 bp, probe
ggttatggaattaatggatgctaac

SEQ ID NO: 72964 - DNA, 25 bp, probe
gtcctaccttctttaccagatgctt

SEQ ID NO: 72965 - DNA, 25 bp, probe
atgtcctaccttctttaccagatgc

SEQ ID NO: 72966 - DNA, 25 bp, probe
ggttattcacatggagctggatcat

SEQ ID NO: 72967 - DNA, 25 bp, probe
aagagagcttatcgtgaacttgtcc

SEQ ID NO: 72968 - DNA, 25 bp, probe
acttatgtcaggttattcacatgga

SEQ ID NO: 72969 - DNA, 25 bp, probe
tttggttatggaattaatggatgct

SEQ ID NO: 72970 - DNA, 25 bp, probe
attaatggatgctaacttatgtcag

SEQ ID NO: 72971 - DNA, 25 bp, probe
cttatgtcaggttattcacatggag

SEQ ID NO: 72972 - DNA, 25 bp, probe
ttatgtcaggttattcacatggagc

SEQ ID NO: 72973 - DNA, 25 bp, probe
catctcttccttggtgtctcacttc

SEQ ID NO: 72974 - DNA, 25 bp, probe
atctcttccttggtgtctcacttca

SEQ ID NO: 72975 - DNA, 25 bp, probe
ctcttccttggtgtctcacttcaac

SEQ ID NO: 72976 - DNA, 25 bp, probe
tctcttccttggtgtctcacttcaa

SEQ ID NO: 72977 - DNA, 25 bp, probe
cagactcaaccttcactgtcctaaa

SEQ ID NO: 72978 - DNA, 25 bp, probe
cttccttggtgtctcacttcaactg

SEQ ID NO: 72979 - DNA, 25 bp, probe
tcttccttggtgtctcacttcaact

SEQ ID NO: 72980 - DNA, 25 bp, probe
cgacagtaaatgtgacagtcagttt

SEQ ID NO: 72981 - DNA, 25 bp, probe
cttggtgtctcacttcaactgtgtg

SEQ ID NO: 72982 - DNA, 25 bp, probe
ttccttggtgtctcacttcaactgt

SEQ ID NO: 72983 - DNA, 25 bp, probe
gcagactcaaccttcactgtcctaa

SEQ ID NO: 72984 - DNA, 25 bp, probe
atgagcgacagtaaatgtgacagtc

SEQ ID NO: 72985 - DNA, 25 bp, probe
ccatctcttccttggtgtctcactt

SEQ ID NO: 72986 - DNA, 25 bp, probe
ttggtgtctcacttcaactgtgtgt

SEQ ID NO: 72987 - DNA, 25 bp, probe
gaacgttagtctcttgcatggtaag

SEQ ID NO: 72988 - DNA, 25 bp, probe
gactcaaccttcactgtcctaaaac

SEQ ID NO: 72989 - DNA, 25 bp, probe
agactcaaccttcactgtcctaaaa

SEQ ID NO: 72990 - DNA, 25 bp, probe
aatttgtagaaacgctctggcaaag

SEQ ID NO: 72991 - DNA, 25 bp, probe
tgtctcacttcaactgtgtgtccag

SEQ ID NO: 72992 - DNA, 25 bp, probe
tccttggtgtctcacttcaactgtg

SEQ ID NO: 72993 - DNA, 25 bp, probe
tgaacgttagtctcttgcatggtaa

SEQ ID NO: 72994 - DNA, 25 bp, probe
cagtcagttttatagtgtgcaagtg

SEQ ID NO: 72995 - DNA, 25 bp, probe
gacagtaaatgtgacagtcagtttt

SEQ ID NO: 72996 - DNA, 25 bp, probe
atgtgacagtcagttttatagtgtg

SEQ ID NO: 72997 - DNA, 25 bp, probe
actcaaccttcactgtcctaaaacg

SEQ ID NO: 72998 - DNA, 25 bp, probe
tgtgacagtcagttttatagtgtgc

SEQ ID NO: 72999 - DNA, 25 bp, probe
ctgaacgttagtctcttgcatggta

SEQ ID NO: 73000 - DNA, 25 bp, probe
agtcagttttatagtgtgcaagtgg

SEQ ID NO: 73001 - DNA, 25 bp, probe
acagtaaatgtgacagtcagtttta

SEQ ID NO: 73002 - DNA, 25 bp, probe
gcgacagtaaatgtgacagtcagtt

SEQ ID NO: 73003 - DNA, 25 bp, probe
gtgtctcacttcaactgtgtgtcca

SEQ ID NO: 73004 - DNA, 25 bp, probe
tggtgtctcacttcaactgtgtgtc

SEQ ID NO: 73005 - DNA, 25 bp, probe
ccttggtgtctcacttcaactgtgt

SEQ ID NO: 73006 - DNA, 25 bp, probe
aaatttgtagaaacgctctggcaaa

SEQ ID NO: 73007 - DNA, 25 bp, probe
aatgtgacagtcagttttatagtgt

SEQ ID NO: 73008 - DNA, 25 bp, probe
gagcgacagtaaatgtgacagtcag

SEQ ID NO: 73009 - DNA, 25 bp, probe
acgttagtctcttgcatggtaagac

SEQ ID NO: 73010 - DNA, 25 bp, probe
gacagtcagttttatagtgtgcaag

SEQ ID NO: 73011 - DNA, 25 bp, probe
atttgtagaaacgctctggcaaaga

SEQ ID NO: 73012 - DNA, 25 bp, probe
acagtcagttttatagtgtgcaagt

SEQ ID NO: 73013 - DNA, 25 bp, probe
tgacagtcagttttatagtgtgcaa

SEQ ID NO: 73014 - DNA, 25 bp, probe
aaatgtgacagtcagttttatagtg

SEQ ID NO: 73015 - DNA, 25 bp, probe
cagtaaatgtgacagtcagttttat

SEQ ID NO: 73016 - DNA, 25 bp, probe
gtgacagtcagttttatagtgtgca

SEQ ID NO: 73017 - DNA, 25 bp, probe
aaatgtccctggtttctattgatct

SEQ ID NO: 73018 - DNA, 25 bp, probe
aatgtccctggtttctattgatctg

SEQ ID NO: 73019 - DNA, 25 bp, probe
gtttctattgatctggaagggactc

SEQ ID NO: 73020 - DNA, 25 bp, probe
ggtttctattgatctggaagggact

SEQ ID NO: 73021 - DNA, 25 bp, probe
ctggtttctattgatctggaaggga

SEQ ID NO: 73022 - DNA, 25 bp, probe
atgtccctggtttctattgatctgg

SEQ ID NO: 73023 - DNA, 25 bp, probe
tggtttctattgatctggaagggac

SEQ ID NO: 73024 - DNA, 25 bp, probe
tcaagatgattaccaactggttcga

SEQ ID NO: 73025 - DNA, 25 bp, probe
atcaagatgattaccaactggttcg

SEQ ID NO: 73026 - DNA, 25 bp, probe
tgaaatgtccctggtttctattgat

SEQ ID NO: 73027 - DNA, 25 bp, probe
ttgaaatgtccctggtttctattga

SEQ ID NO: 73028 - DNA, 25 bp, probe
attgaaatgtccctggtttctattg

SEQ ID NO: 73029 - DNA, 25 bp, probe
tttctattgatctggaagggactcc

SEQ ID NO: 73030 - DNA, 25 bp, probe
gattgaaatgtccctggtttctatt

SEQ ID NO: 73031 - DNA, 25 bp, probe
ggattgaaatgtccctggtttctat

SEQ ID NO: 73032 - DNA, 25 bp, probe
gaaatgtccctggtttctattgatc

SEQ ID NO: 73033 - DNA, 25 bp, probe
tccctggtttctattgatctggaag

SEQ ID NO: 73034 - DNA, 25 bp, probe
gtccctggtttctattgatctggaa

SEQ ID NO: 73035 - DNA, 25 bp, probe
ttctattgatctggaagggactcct

SEQ ID NO: 73036 - DNA, 25 bp, probe
tggattgaaatgtccctggtttcta

SEQ ID NO: 73037 - DNA, 25 bp, probe
cctggtttctattgatctggaaggg

SEQ ID NO: 73038 - DNA, 25 bp, probe
ccctggtttctattgatctggaagg

SEQ ID NO: 73039 - DNA, 25 bp, probe
tctattgatctggaagggactcctc

SEQ ID NO: 73040 - DNA, 25 bp, probe
tgtccctggtttctattgatctgga

SEQ ID NO: 73041 - DNA, 25 bp, probe
ctggattgaaatgtccctggtttct

SEQ ID NO: 73042 - DNA, 25 bp, probe
caagatgattaccaactggttcgaa

SEQ ID NO: 73043 - DNA, 25 bp, probe
ctattgatctggaagggactcctcc

SEQ ID NO: 73044 - DNA, 25 bp, probe
tattgatctggaagggactcctcct

SEQ ID NO: 73045 - DNA, 25 bp, probe
aatcaagatgattaccaactggttc

SEQ ID NO: 73046 - DNA, 25 bp, probe
cctggattgaaatgtccctggtttc

SEQ ID NO: 73047 - DNA, 25 bp, probe
gtgcaactctaccagatcctgacag

SEQ ID NO: 73048 - DNA, 25 bp, probe
cctcctggaaagtgaacagtctgag

SEQ ID NO: 73049 - DNA, 25 bp, probe
tgcaactctaccagatcctgacaga

SEQ ID NO: 73050 - DNA, 25 bp, probe
cctggaaagtgaacagtctgaggag

SEQ ID NO: 73051 - DNA, 25 bp, probe
ctcctggaaagtgaacagtctgagg

SEQ ID NO: 73052 - DNA, 25 bp, probe
aagatgattaccaactggttcgaaa

SEQ ID NO: 73053 - DNA, 25 bp, probe
gatctggaagggactcctcctctag

SEQ ID NO: 73054 - DNA, 25 bp, probe
ctcctctaggattgctgaaacaggg

SEQ ID NO: 73055 - DNA, 25 bp, probe
cctcctctaggattgctgaaacagg

SEQ ID NO: 73056 - DNA, 25 bp, probe
ctggaaagtgaacagtctgaggagc

SEQ ID NO: 73057 - DNA, 25 bp, probe
attgatctggaagggactcctcctc

SEQ ID NO: 73058 - DNA, 25 bp, probe
tgatctggaagggactcctcctcta

SEQ ID NO: 73059 - DNA, 25 bp, probe
gactcctcctctaggattgctgaaa

SEQ ID NO: 73060 - DNA, 25 bp, probe
tcctcctctaggattgctgaaacag

SEQ ID NO: 73061 - DNA, 25 bp, probe
gaaatgcgattcttctcagtgcttc

SEQ ID NO: 73062 - DNA, 25 bp, probe
aaagaaaggcaggctgaattgtgat

SEQ ID NO: 73063 - DNA, 25 bp, probe
ctataaggctcttgcactgtgacag

SEQ ID NO: 73064 - DNA, 25 bp, probe
aaatgcgattcttctcagtgcttcc

SEQ ID NO: 73065 - DNA, 25 bp, probe
tataaggctcttgcactgtgacaga

SEQ ID NO: 73066 - DNA, 25 bp, probe
ggaaatgcgattcttctcagtgctt

SEQ ID NO: 73067 - DNA, 25 bp, probe
aagaaaggcaggctgaattgtgatc

SEQ ID NO: 73068 - DNA, 25 bp, probe
gtatggagcatctgcaaagtctgag

SEQ ID NO: 73069 - DNA, 25 bp, probe
gaggaaatgcgattcttctcagtgc

SEQ ID NO: 73070 - DNA, 25 bp, probe
ctgtatggagcatctgcaaagtctg

SEQ ID NO: 73071 - DNA, 25 bp, probe
aggaaatgcgattcttctcagtgct

SEQ ID NO: 73072 - DNA, 25 bp, probe
aaagtctgagcaggttttgaagtcc

SEQ ID NO: 73073 - DNA, 25 bp, probe
gctataaggctcttgcactgtgaca

SEQ ID NO: 73074 - DNA, 25 bp, probe
atgaggaaatgcgattcttctcagt

SEQ ID NO: 73075 - DNA, 25 bp, probe
aagtccaagagcatcccagctataa

SEQ ID NO: 73076 - DNA, 25 bp, probe
tgtatggagcatctgcaaagtctga

SEQ ID NO: 73077 - DNA, 25 bp, probe
aaaagaaaggcaggctgaattgtga

SEQ ID NO: 73078 - DNA, 25 bp, probe
agtccaagagcatcccagctataag

SEQ ID NO: 73079 - DNA, 25 bp, probe
gaagtccaagagcatcccagctata

SEQ ID NO: 73080 - DNA, 25 bp, probe
ctgagcaggttttgaagtccaagag

SEQ ID NO: 73081 - DNA, 25 bp, probe
agctataaggctcttgcactgtgac

SEQ ID NO: 73082 - DNA, 25 bp, probe
cagctataaggctcttgcactgtga

SEQ ID NO: 73083 - DNA, 25 bp, probe
tgaggaaatgcgattcttctcagtg

SEQ ID NO: 73084 - DNA, 25 bp, probe
gtctgagcaggttttgaagtccaag

SEQ ID NO: 73085 - DNA, 25 bp, probe
caaagtctgagcaggttttgaagtc

SEQ ID NO: 73086 - DNA, 25 bp, probe
cctgtatggagcatctgcaaagtct

SEQ ID NO: 73087 - DNA, 25 bp, probe
gttttgaagtccaagagcatcccag

SEQ ID NO: 73088 - DNA, 25 bp, probe
caggttttgaagtccaagagcatcc

SEQ ID NO: 73089 - DNA, 25 bp, probe
tctgagcaggttttgaagtccaaga

SEQ ID NO: 73090 - DNA, 25 bp, probe
aagtctgagcaggttttgaagtcca

SEQ ID NO: 73091 - DNA, 25 bp, probe
agtctgagcaggttttgaagtccaa

SEQ ID NO: 73092 - DNA, 25 bp, probe
tatggagcatctgcaaagtctgagc

SEQ ID NO: 73093 - DNA, 25 bp, probe
ataaggctcttgcactgtgacagag

SEQ ID NO: 73094 - DNA, 25 bp, probe
gcaggttttgaagtccaagagcatc

SEQ ID NO: 73095 - DNA, 25 bp, probe
gtccaagagcatcccagctataagg

SEQ ID NO: 73096 - DNA, 25 bp, probe
agcaggttttgaagtccaagagcat

SEQ ID NO: 73097 - DNA, 25 bp, probe
aggttttgaagtccaagagcatccc

SEQ ID NO: 73098 - DNA, 25 bp, probe
gcaaagtctgagcaggttttgaagt

SEQ ID NO: 73099 - DNA, 25 bp, probe
tgcaaagtctgagcaggttttgaag

SEQ ID NO: 73100 - DNA, 25 bp, probe
gtattgttggaatgtcttgtgatga

SEQ ID NO: 73101 - DNA, 25 bp, probe
ggtattgttggaatgtcttgtgatg

SEQ ID NO: 73102 - DNA, 25 bp, probe
tggtattgttggaatgtcttgtgat

SEQ ID NO: 73103 - DNA, 25 bp, probe
tattgttggaatgtcttgtgatgaa

SEQ ID NO: 73104 - DNA, 25 bp, probe
ttgtgtggtattgttggaatgtctt

SEQ ID NO: 73105 - DNA, 25 bp, probe
attgttggaatgtcttgtgatgaac

SEQ ID NO: 73106 - DNA, 25 bp, probe
ctgtctacatcattatggaactggt

SEQ ID NO: 73107 - DNA, 25 bp, probe
tgtctacatcattatggaactggtt

SEQ ID NO: 73108 - DNA, 25 bp, probe
cctgtctacatcattatggaactgg

SEQ ID NO: 73109 - DNA, 25 bp, probe
gtggtattgttggaatgtcttgtga

SEQ ID NO: 73110 - DNA, 25 bp, probe
cttgtgtggtattgttggaatgtct

SEQ ID NO: 73111 - DNA, 25 bp, probe
gcctgtctacatcattatggaactg

SEQ ID NO: 73112 - DNA, 25 bp, probe
tgtggtattgttggaatgtcttgtg

SEQ ID NO: 73113 - DNA, 25 bp, probe
gtgtggtattgttggaatgtcttgt

SEQ ID NO: 73114 - DNA, 25 bp, probe
tgtgtggtattgttggaatgtcttg

SEQ ID NO: 73115 - DNA, 25 bp, probe
acttgtgtggtattgttggaatgtc

SEQ ID NO: 73116 - DNA, 25 bp, probe
cagcctgtctacatcattatggaac

SEQ ID NO: 73117 - DNA, 25 bp, probe
agcctgtctacatcattatggaact

SEQ ID NO: 73118 - DNA, 25 bp, probe
ttgttggaatgtcttgtgatgaacc

SEQ ID NO: 73119 - DNA, 25 bp, probe
aggtgtagttctgctgaatcctatt

SEQ ID NO: 73120 - DNA, 25 bp, probe
agttctgctgaatcctattcctaag

SEQ ID NO: 73121 - DNA, 25 bp, probe
gtagttctgctgaatcctattccta

SEQ ID NO: 73122 - DNA, 25 bp, probe
gttctgctgaatcctattcctaagg

SEQ ID NO: 73123 - DNA, 25 bp, probe
gaatgtcttgtgatgaaccactagg

SEQ ID NO: 73124 - DNA, 25 bp, probe
ggaatgtcttgtgatgaaccactag

SEQ ID NO: 73125 - DNA, 25 bp, probe
tgtagttctgctgaatcctattcct

SEQ ID NO: 73126 - DNA, 25 bp, probe
gtgtagttctgctgaatcctattcc

SEQ ID NO: 73127 - DNA, 25 bp, probe
ggtgtagttctgctgaatcctattc

SEQ ID NO: 73128 - DNA, 25 bp, probe
aacaggtcatcactaagaaatcagg

SEQ ID NO: 73129 - DNA, 25 bp, probe
caggtgtagttctgctgaatcctat

SEQ ID NO: 73130 - DNA, 25 bp, probe
atgtcatattgggagaattactggg

SEQ ID NO: 73131 - DNA, 25 bp, probe
tagttctgctgaatcctattcctaa

SEQ ID NO: 73132 - DNA, 25 bp, probe
cacttgtgtggtattgttggaatgt

SEQ ID NO: 73133 - DNA, 25 bp, probe
aaacaggtcatcactaagaaatcag

SEQ ID NO: 73134 - DNA, 25 bp, probe
gaatagcagaatctcggaaagaaag

SEQ ID NO: 73135 - DNA, 25 bp, probe
acagcctgtctacatcattatggaa

SEQ ID NO: 73136 - DNA, 25 bp, probe
gatgtcatattgggagaattactgg

SEQ ID NO: 73137 - DNA, 25 bp, probe
acaggtcatcactaagaaatcaggt

SEQ ID NO: 73138 - DNA, 25 bp, probe
acattcctcaacttatagatcatca

SEQ ID NO: 73139 - DNA, 25 bp, probe
aatagcagaatctcggaaagaaagg

SEQ ID NO: 73140 - DNA, 25 bp, probe
ctacatcattatggaactggtttca

SEQ ID NO: 73141 - DNA, 25 bp, probe
gtctacatcattatggaactggttt

SEQ ID NO: 73142 - DNA, 25 bp, probe
tggaatgtcttgtgatgaaccacta

SEQ ID NO: 73143 - DNA, 25 bp, probe
tctacatcattatggaactggtttc

SEQ ID NO: 73144 - DNA, 25 bp, probe
ctgagaaggaagaaggatgaactaa

SEQ ID NO: 73145 - DNA, 25 bp, probe
tctgagaaggaagaaggatgaacta

SEQ ID NO: 73146 - DNA, 25 bp, probe
tgagaaggaagaaggatgaactaaa

SEQ ID NO: 73147 - DNA, 25 bp, probe
agcaaatggagtgagagattacaag

SEQ ID NO: 73148 - DNA, 25 bp, probe
cagcaaatggagtgagagattacaa

SEQ ID NO: 73149 - DNA, 25 bp, probe
aaagaatgaaacggtgaaggctaaa

SEQ ID NO: 73150 - DNA, 25 bp, probe
gacagcaaatggagtgagagattac

SEQ ID NO: 73151 - DNA, 25 bp, probe
agacagcaaatggagtgagagatta

SEQ ID NO: 73152 - DNA, 25 bp, probe
gaaagaatgaaacggtgaaggctaa

SEQ ID NO: 73153 - DNA, 25 bp, probe
ttctgagaaggaagaaggatgaact

SEQ ID NO: 73154 - DNA, 25 bp, probe
acagcaaatggagtgagagattaca

SEQ ID NO: 73155 - DNA, 25 bp, probe
actgttatcataactgctattggtt

SEQ ID NO: 73156 - DNA, 25 bp, probe
aactgttatcataactgctattggt

SEQ ID NO: 73157 - DNA, 25 bp, probe
gtctgaaggactggtatctgtgttg

SEQ ID NO: 73158 - DNA, 25 bp, probe
gcaaatggagtgagagattacaagc

SEQ ID NO: 73159 - DNA, 25 bp, probe
tatacacagaaagaatgaaacggtg

SEQ ID NO: 73160 - DNA, 25 bp, probe
gaactgttatcataactgctattgg

SEQ ID NO: 73161 - DNA, 25 bp, probe
atacacagaaagaatgaaacggtga

SEQ ID NO: 73162 - DNA, 25 bp, probe
agaaagaatgaaacggtgaaggcta

SEQ ID NO: 73163 - DNA, 25 bp, probe
tacacagaaagaatgaaacggtgaa

SEQ ID NO: 73164 - DNA, 25 bp, probe
tgtctgaaggactggtatctgtgtt

SEQ ID NO: 73165 - DNA, 25 bp, probe
gactggtatctgtgttgcctactca

SEQ ID NO: 73166 - DNA, 25 bp, probe
caaatggagtgagagattacaagct

SEQ ID NO: 73167 - DNA, 25 bp, probe
tctgtctgaaggactggtatctgtg

SEQ ID NO: 73168 - DNA, 25 bp, probe
gtctgtctgaaggactggtatctgt

SEQ ID NO: 73169 - DNA, 25 bp, probe
cagacagcaaatggagtgagagatt

SEQ ID NO: 73170 - DNA, 25 bp, probe
ctgtctgaaggactggtatctgtgt

SEQ ID NO: 73171 - DNA, 25 bp, probe
aaatggagtgagagattacaagctc

SEQ ID NO: 73172 - DNA, 25 bp, probe
acacagaaagaatgaaacggtgaag

SEQ ID NO: 73173 - DNA, 25 bp, probe
gtatacacagaaagaatgaaacggt

SEQ ID NO: 73174 - DNA, 25 bp, probe
gaggtctgtctgaaggactggtatc

SEQ ID NO: 73175 - DNA, 25 bp, probe
agaactgttatcataactgctattg

SEQ ID NO: 73176 - DNA, 25 bp, probe
tctgaaggactggtatctgtgttgc

SEQ ID NO: 73177 - DNA, 25 bp, probe
ctttctgagaaggaagaaggatgaa

SEQ ID NO: 73178 - DNA, 25 bp, probe
tttctgagaaggaagaaggatgaac

SEQ ID NO: 73179 - DNA, 25 bp, probe
ggagtgagagattacaagctcttaa

SEQ ID NO: 73180 - DNA, 25 bp, probe
tggagtgagagattacaagctctta

SEQ ID NO: 73181 - DNA, 25 bp, probe
ggactggtatctgtgttgcctactc

SEQ ID NO: 73182 - DNA, 25 bp, probe
ggtctgtctgaaggactggtatctg

SEQ ID NO: 73183 - DNA, 25 bp, probe
gaaggactggtatctgtgttgccta

SEQ ID NO: 73184 - DNA, 25 bp, probe
cacagaaagaatgaaacggtgaagg

SEQ ID NO: 73185 - DNA, 25 bp, probe
ctgttatcataactgctattggtta

SEQ ID NO: 73186 - DNA, 25 bp, probe
aggtctgtctgaaggactggtatct

SEQ ID NO: 73187 - DNA, 25 bp, probe
atggagtgagagattacaagctctt

SEQ ID NO: 73188 - DNA, 25 bp, probe
ctgaaagcatcttcgacaaggtgta

SEQ ID NO: 73189 - DNA, 25 bp, probe
tgaaagcatcttcgacaaggtgtac

SEQ ID NO: 73190 - DNA, 25 bp, probe
agatcttgtctgctacagcttccag

SEQ ID NO: 73191 - DNA, 25 bp, probe
gatcttgtctgctacagcttccagg

SEQ ID NO: 73192 - DNA, 25 bp, probe
gaaagcatcttcgacaaggtgtaca

SEQ ID NO: 73193 - DNA, 25 bp, probe
ggacatctacaaagaccccgactac

SEQ ID NO: 73194 - DNA, 25 bp, probe
gacatctacaaagaccccgactacg

SEQ ID NO: 73195 - DNA, 25 bp, probe
cttctctgggagatcttctctctgg

SEQ ID NO: 73196 - DNA, 25 bp, probe
gcttctctgggagatcttctctctg

SEQ ID NO: 73197 - DNA, 25 bp, probe
catctacaaagaccccgactacgtc

SEQ ID NO: 73198 - DNA, 25 bp, probe
tgcttctctgggagatcttctctct

SEQ ID NO: 73199 - DNA, 25 bp, probe
gtgcttctctgggagatcttctctc

SEQ ID NO: 73200 - DNA, 25 bp, probe
acatctacaaagaccccgactacgt

SEQ ID NO: 73201 - DNA, 25 bp, probe
gggacatctacaaagaccccgacta

SEQ ID NO: 73202 - DNA, 25 bp, probe
ttctctgggagatcttctctctggc

SEQ ID NO: 73203 - DNA, 25 bp, probe
ggtgcttctctgggagatcttctct

SEQ ID NO: 73204 - DNA, 25 bp, probe
gcatttgttggaggcagatattaaa

SEQ ID NO: 73205 - DNA, 25 bp, probe
agcatttgttggaggcagatattaa

SEQ ID NO: 73206 - DNA, 25 bp, probe
gagcatttgttggaggcagatatta

SEQ ID NO: 73207 - DNA, 25 bp, probe
cctccttgcattacattcactcatc

SEQ ID NO: 73208 - DNA, 25 bp, probe
tgttggaggcagatattaaactctt

SEQ ID NO: 73209 - DNA, 25 bp, probe
ttgttggaggcagatattaaactct

SEQ ID NO: 73210 - DNA, 25 bp, probe
gttggaggcagatattaaactcttc

SEQ ID NO: 73211 - DNA, 25 bp, probe
atttgttggaggcagatattaaact

SEQ ID NO: 73212 - DNA, 25 bp, probe
catttgttggaggcagatattaaac

SEQ ID NO: 73213 - DNA, 25 bp, probe
tttgttggaggcagatattaaactc

SEQ ID NO: 73214 - DNA, 25 bp, probe
cttgcattacattcactcatcggaa

SEQ ID NO: 73215 - DNA, 25 bp, probe
ctccttgcattacattcactcatcg

SEQ ID NO: 73216 - DNA, 25 bp, probe
gaagaagcctccttgcattacattc

SEQ ID NO: 73217 - DNA, 25 bp, probe
ttggaggcagatattaaactcttcc

SEQ ID NO: 73218 - DNA, 25 bp, probe
tttgggatagagcctttcttgtcaa

SEQ ID NO: 73219 - DNA, 25 bp, probe
agggaatttgcctttactattctcc

SEQ ID NO: 73220 - DNA, 25 bp, probe
accattagacttagctttacgtgaa

SEQ ID NO: 73221 - DNA, 25 bp, probe
aagaagcctccttgcattacattca

SEQ ID NO: 73222 - DNA, 25 bp, probe
tgaagaagcctccttgcattacatt

SEQ ID NO: 73223 - DNA, 25 bp, probe
cagaaactgaagaagcacggttaaa

SEQ ID NO: 73224 - DNA, 25 bp, probe
ttccaggaaaccctttattcagaaa

SEQ ID NO: 73225 - DNA, 25 bp, probe
ttagacttagctttacgtgaaggac

SEQ ID NO: 73226 - DNA, 25 bp, probe
attagacttagctttacgtgaagga

SEQ ID NO: 73227 - DNA, 25 bp, probe
cattagacttagctttacgtgaagg

SEQ ID NO: 73228 - DNA, 25 bp, probe
ccattagacttagctttacgtgaag

SEQ ID NO: 73229 - DNA, 25 bp, probe
attacattcactcatcggaaacgct

SEQ ID NO: 73230 - DNA, 25 bp, probe
cattacattcactcatcggaaacgc

SEQ ID NO: 73231 - DNA, 25 bp, probe
gcattacattcactcatcggaaacg

SEQ ID NO: 73232 - DNA, 25 bp, probe
aaaccctttattcagaaagaggaca

SEQ ID NO: 73233 - DNA, 25 bp, probe
gaaaccctttattcagaaagaggac

SEQ ID NO: 73234 - DNA, 25 bp, probe
ggaaaccctttattcagaaagagga

SEQ ID NO: 73235 - DNA, 25 bp, probe
aggaaaccctttattcagaaagagg

SEQ ID NO: 73236 - DNA, 25 bp, probe
caggaaaccctttattcagaaagag

SEQ ID NO: 73237 - DNA, 25 bp, probe
ccaggaaaccctttattcagaaaga

SEQ ID NO: 73238 - DNA, 25 bp, probe
tccaggaaaccctttattcagaaag

SEQ ID NO: 73239 - DNA, 25 bp, probe
ccttgcattacattcactcatcgga

SEQ ID NO: 73240 - DNA, 25 bp, probe
tccttgcattacattcactcatcgg

SEQ ID NO: 73241 - DNA, 25 bp, probe
aaccctttattcagaaagaggacac

SEQ ID NO: 73242 - DNA, 25 bp, probe
tagacttagctttacgtgaaggaca

SEQ ID NO: 73243 - DNA, 25 bp, probe
ttgcattacattcactcatcggaaa

SEQ ID NO: 73244 - DNA, 25 bp, probe
tggaggcagatattaaactcttccg

SEQ ID NO: 73245 - DNA, 25 bp, probe
gcctccttgcattacattcactcat

SEQ ID NO: 73246 - DNA, 25 bp, probe
ttgggatagagcctttcttgtcaag

SEQ ID NO: 73247 - DNA, 25 bp, probe
ggaaatacttttgggatagagcctt

SEQ ID NO: 73248 - DNA, 25 bp, probe
taaccaaaggaataggagaaagagc

SEQ ID NO: 73249 - DNA, 25 bp, probe
caaaggaataggagaaagagcaaat

SEQ ID NO: 73250 - DNA, 25 bp, probe
ccaaaggaataggagaaagagcaaa

SEQ ID NO: 73251 - DNA, 25 bp, probe
ctaaccaaaggaataggagaaagag

SEQ ID NO: 73252 - DNA, 25 bp, probe
aaaggaataggagaaagagcaaatt

SEQ ID NO: 73253 - DNA, 25 bp, probe
accaaaggaataggagaaagagcaa

SEQ ID NO: 73254 - DNA, 25 bp, probe
aaccaaaggaataggagaaagagca

SEQ ID NO: 73255 - DNA, 25 bp, probe
attcactccctaaccaaaggaatag

SEQ ID NO: 73256 - DNA, 25 bp, probe
gattcactccctaaccaaaggaata

SEQ ID NO: 73257 - DNA, 25 bp, probe
gatatccagaaggagctgtctactg

SEQ ID NO: 73258 - DNA, 25 bp, probe
ctgatatccagaaggagctgtctac

SEQ ID NO: 73259 - DNA, 25 bp, probe
aaggaataggagaaagagcaaattt

SEQ ID NO: 73260 - DNA, 25 bp, probe
tgatatccagaaggagctgtctact

SEQ ID NO: 73261 - DNA, 25 bp, probe
actgatatccagaaggagctgtcta

SEQ ID NO: 73262 - DNA, 25 bp, probe
ggattcactccctaaccaaaggaat

SEQ ID NO: 73263 - DNA, 25 bp, probe
cctaaccaaaggaataggagaaaga

SEQ ID NO: 73264 - DNA, 25 bp, probe
ccctaaccaaaggaataggagaaag

SEQ ID NO: 73265 - DNA, 25 bp, probe
tccctaaccaaaggaataggagaaa

SEQ ID NO: 73266 - DNA, 25 bp, probe
ttcactccctaaccaaaggaatagg

SEQ ID NO: 73267 - DNA, 25 bp, probe
aacactgatatccagaaggagctgt

SEQ ID NO: 73268 - DNA, 25 bp, probe
cactgatatccagaaggagctgtct

SEQ ID NO: 73269 - DNA, 25 bp, probe
tcactccctaaccaaaggaatagga

SEQ ID NO: 73270 - DNA, 25 bp, probe
acactgatatccagaaggagctgtc

SEQ ID NO: 73271 - DNA, 25 bp, probe
aaacactgatatccagaaggagctg

SEQ ID NO: 73272 - DNA, 25 bp, probe
tgcagtgtatatgaatggaggtggc

SEQ ID NO: 73273 - DNA, 25 bp, probe
aagtggaaacttctcccaagtgaag

SEQ ID NO: 73274 - DNA, 25 bp, probe
agtgtatatgaatggaggtggcctg

SEQ ID NO: 73275 - DNA, 25 bp, probe
cagtgtatatgaatggaggtggcct

SEQ ID NO: 73276 - DNA, 25 bp, probe
tgaaaacactgatatccagaaggag

SEQ ID NO: 73277 - DNA, 25 bp, probe
gtgaaaacactgatatccagaagga

SEQ ID NO: 73278 - DNA, 25 bp, probe
gaaaacactgatatccagaaggagc

SEQ ID NO: 73279 - DNA, 25 bp, probe
aaaacactgatatccagaaggagct

SEQ ID NO: 73280 - DNA, 25 bp, probe
ctccctaaccaaaggaataggagaa

SEQ ID NO: 73281 - DNA, 25 bp, probe
atatccagaaggagctgtctactgg

SEQ ID NO: 73282 - DNA, 25 bp, probe
gtatatgaatggaggtggcctggtg

SEQ ID NO: 73283 - DNA, 25 bp, probe
gtgtatatgaatggaggtggcctgg

SEQ ID NO: 73284 - DNA, 25 bp, probe
atgaggtcagaccaggatttgcatt

SEQ ID NO: 73285 - DNA, 25 bp, probe
cactccctaaccaaaggaataggag

SEQ ID NO: 73286 - DNA, 25 bp, probe
actccctaaccaaaggaataggaga

SEQ ID NO: 73287 - DNA, 25 bp, probe
tatatgaatggaggtggcctggtga

SEQ ID NO: 73288 - DNA, 25 bp, probe
tgtatatgaatggaggtggcctggt

SEQ ID NO: 73289 - DNA, 25 bp, probe
gaggtcagaccaggatttgcattga

SEQ ID NO: 73290 - DNA, 25 bp, probe
catgaggtcagaccaggatttgcat

SEQ ID NO: 73291 - DNA, 25 bp, probe
tgagtgaaaacactgatatccagaa

SEQ ID NO: 73292 - DNA, 25 bp, probe
acataccatacagagaacacaagag

SEQ ID NO: 73293 - DNA, 25 bp, probe
aacacataccatacagagaacacaa

SEQ ID NO: 73294 - DNA, 25 bp, probe
cacataccatacagagaacacaaga

SEQ ID NO: 73295 - DNA, 25 bp, probe
acacataccatacagagaacacaag

SEQ ID NO: 73296 - DNA, 25 bp, probe
cataccatacagagaacacaagagc

SEQ ID NO: 73297 - DNA, 25 bp, probe
catacagagaacacaagagccttac

SEQ ID NO: 73298 - DNA, 25 bp, probe
atacagagaacacaagagccttaca

SEQ ID NO: 73299 - DNA, 25 bp, probe
ataccatacagagaacacaagagcc

SEQ ID NO: 73300 - DNA, 25 bp, probe
tacagagaacacaagagccttacag

SEQ ID NO: 73301 - DNA, 25 bp, probe
ccatacagagaacacaagagcctta

SEQ ID NO: 73302 - DNA, 25 bp, probe
tgattatgaatatgactggattggt

SEQ ID NO: 73303 - DNA, 25 bp, probe
aaacacataccatacagagaacaca

SEQ ID NO: 73304 - DNA, 25 bp, probe
gaaacacataccatacagagaacac

SEQ ID NO: 73305 - DNA, 25 bp, probe
agaaacacataccatacagagaaca

SEQ ID NO: 73306 - DNA, 25 bp, probe
ggagacaaagaaacacataccatac

SEQ ID NO: 73307 - DNA, 25 bp, probe
gacacattaaaggagaggtatcaga

SEQ ID NO: 73308 - DNA, 25 bp, probe
taaaggctgacacattaaaggagag

SEQ ID NO: 73309 - DNA, 25 bp, probe
taccatacagagaacacaagagcct

SEQ ID NO: 73310 - DNA, 25 bp, probe
cggagacaaagaaacacataccata

SEQ ID NO: 73311 - DNA, 25 bp, probe
cttaataggacgaccaggaaacaaa

SEQ ID NO: 73312 - DNA, 25 bp, probe
acaaagaaacacataccatacagag

SEQ ID NO: 73313 - DNA, 25 bp, probe
gacaaagaaacacataccatacaga

SEQ ID NO: 73314 - DNA, 25 bp, probe
agacaaagaaacacataccatacag

SEQ ID NO: 73315 - DNA, 25 bp, probe
gagacaaagaaacacataccataca

SEQ ID NO: 73316 - DNA, 25 bp, probe
acacattaaaggagaggtatcagaa

SEQ ID NO: 73317 - DNA, 25 bp, probe
ccagcaagttattcacattatagat

SEQ ID NO: 73318 - DNA, 25 bp, probe
acccagcaagttattcacattatag

SEQ ID NO: 73319 - DNA, 25 bp, probe
gctgacacattaaaggagaggtatc

SEQ ID NO: 73320 - DNA, 25 bp, probe
aagaaacacataccatacagagaac

SEQ ID NO: 73321 - DNA, 25 bp, probe
caaagaaacacataccatacagaga

SEQ ID NO: 73322 - DNA, 25 bp, probe
ttaaaggctgacacattaaaggaga

SEQ ID NO: 73323 - DNA, 25 bp, probe
cttaaaggctgacacattaaaggag

SEQ ID NO: 73324 - DNA, 25 bp, probe
aaagtagaagagacgatttagaagc

SEQ ID NO: 73325 - DNA, 25 bp, probe
ttgattatgaatatgactggattgg

SEQ ID NO: 73326 - DNA, 25 bp, probe
aaacccagcaagttattcacattat

SEQ ID NO: 73327 - DNA, 25 bp, probe
cccagcaagttattcacattataga

SEQ ID NO: 73328 - DNA, 25 bp, probe
tgacacattaaaggagaggtatcag

SEQ ID NO: 73329 - DNA, 25 bp, probe
ctgacacattaaaggagaggtatca

SEQ ID NO: 73330 - DNA, 25 bp, probe
gccttacaggaacagctagatatat

SEQ ID NO: 73331 - DNA, 25 bp, probe
tcttaataggacgaccaggaaacaa

SEQ ID NO: 73332 - DNA, 25 bp, probe
tgagcataaacacacatttaggaaa

SEQ ID NO: 73333 - DNA, 25 bp, probe
agaaatggcaacatatcttcgttat

SEQ ID NO: 73334 - DNA, 25 bp, probe
aaagaacaaagtagaagagacgatt

SEQ ID NO: 73335 - DNA, 25 bp, probe
aagaacaaagtagaagagacgattt

SEQ ID NO: 73336 - DNA, 25 bp, probe
atccaaagaaacggctgactacatt

SEQ ID NO: 73337 - DNA, 25 bp, probe
tccaaagaaacggctgactacattt

SEQ ID NO: 73338 - DNA, 25 bp, probe
aaagaaacggctgactacatttcaa

SEQ ID NO: 73339 - DNA, 25 bp, probe
aagaaacggctgactacatttcaag

SEQ ID NO: 73340 - DNA, 25 bp, probe
gatccaaagaaacggctgactacat

SEQ ID NO: 73341 - DNA, 25 bp, probe
caaagaaacggctgactacatttca

SEQ ID NO: 73342 - DNA, 25 bp, probe
ccaaagaaacggctgactacatttc

SEQ ID NO: 73343 - DNA, 25 bp, probe
aaagaagctccaagaattcaatgcc

SEQ ID NO: 73344 - DNA, 25 bp, probe
tacacatggataccgctcaaaagaa

SEQ ID NO: 73345 - DNA, 25 bp, probe
cacaggtaaagcagccaattttgta

SEQ ID NO: 73346 - DNA, 25 bp, probe
acaggtaaagcagccaattttgtac

SEQ ID NO: 73347 - DNA, 25 bp, probe
actacatttcaagctctccagcatc

SEQ ID NO: 73348 - DNA, 25 bp, probe
gactacatttcaagctctccagcat

SEQ ID NO: 73349 - DNA, 25 bp, probe
gtacacatggataccgctcaaaaga

SEQ ID NO: 73350 - DNA, 25 bp, probe
gtcacaggtaaagcagccaattttg

SEQ ID NO: 73351 - DNA, 25 bp, probe
ctcaaaagaagctccaagaattcaa

SEQ ID NO: 73352 - DNA, 25 bp, probe
caaaagaagctccaagaattcaatg

SEQ ID NO: 73353 - DNA, 25 bp, probe
tcaaaagaagctccaagaattcaat

SEQ ID NO: 73354 - DNA, 25 bp, probe
aaaagaagctccaagaattcaatgc

SEQ ID NO: 73355 - DNA, 25 bp, probe
agaaacggctgactacatttcaagc

SEQ ID NO: 73356 - DNA, 25 bp, probe
acacatggataccgctcaaaagaag

SEQ ID NO: 73357 - DNA, 25 bp, probe
ctacatttcaagctctccagcatcc

SEQ ID NO: 73358 - DNA, 25 bp, probe
ctgactacatttcaagctctccagc

SEQ ID NO: 73359 - DNA, 25 bp, probe
gctgactacatttcaagctctccag

SEQ ID NO: 73360 - DNA, 25 bp, probe
aagaagctccaagaattcaatgccc

SEQ ID NO: 73361 - DNA, 25 bp, probe
taaagcagccaattttgtacacatg

SEQ ID NO: 73362 - DNA, 25 bp, probe
gtaaagcagccaattttgtacacat

SEQ ID NO: 73363 - DNA, 25 bp, probe
tcacaggtaaagcagccaattttgt

SEQ ID NO: 73364 - DNA, 25 bp, probe
aaacggctgactacatttcaagctc

SEQ ID NO: 73365 - DNA, 25 bp, probe
gaaacggctgactacatttcaagct

SEQ ID NO: 73366 - DNA, 25 bp, probe
ggtcacaggtaaagcagccaatttt

SEQ ID NO: 73367 - DNA, 25 bp, probe
aattttgtacacatggataccgctc

SEQ ID NO: 73368 - DNA, 25 bp, probe
tgactacatttcaagctctccagca

SEQ ID NO: 73369 - DNA, 25 bp, probe
caattttgtacacatggataccgct

SEQ ID NO: 73370 - DNA, 25 bp, probe
aggtaaagcagccaattttgtacac

SEQ ID NO: 73371 - DNA, 25 bp, probe
caggtaaagcagccaattttgtaca

SEQ ID NO: 73372 - DNA, 25 bp, probe
tttgtacacatggataccgctcaaa

SEQ ID NO: 73373 - DNA, 25 bp, probe
ggtaaagcagccaattttgtacaca

SEQ ID NO: 73374 - DNA, 25 bp, probe
cagccaattttgtacacatggatac

SEQ ID NO: 73375 - DNA, 25 bp, probe
attttgtacacatggataccgctca

SEQ ID NO: 73376 - DNA, 25 bp, probe
aacggctgactacatttcaagctct

SEQ ID NO: 73377 - DNA, 25 bp, probe
agccaattttgtacacatggatacc

SEQ ID NO: 73378 - DNA, 25 bp, probe
ggctgactacatttcaagctctcca

SEQ ID NO: 73379 - DNA, 25 bp, probe
gctcaaaagaagctccaagaattca

SEQ ID NO: 73380 - DNA, 25 bp, probe
aaggcttgtttacaaattgatcctg

SEQ ID NO: 73381 - DNA, 25 bp, probe
aaaggcttgtttacaaattgatcct

SEQ ID NO: 73382 - DNA, 25 bp, probe
taaaggcttgtttacaaattgatcc

SEQ ID NO: 73383 - DNA, 25 bp, probe
ggcttgtttacaaattgatcctgct

SEQ ID NO: 73384 - DNA, 25 bp, probe
gctaagtagttcagttttgggaaag

SEQ ID NO: 73385 - DNA, 25 bp, probe
taagtagttcagttttgggaaagga

SEQ ID NO: 73386 - DNA, 25 bp, probe
gtagttcagttttgggaaaggaaat

SEQ ID NO: 73387 - DNA, 25 bp, probe
agtagttcagttttgggaaaggaaa

SEQ ID NO: 73388 - DNA, 25 bp, probe
aagtagttcagttttgggaaaggaa

SEQ ID NO: 73389 - DNA, 25 bp, probe
ctaagtagttcagttttgggaaagg

SEQ ID NO: 73390 - DNA, 25 bp, probe
tgctaagtagttcagttttgggaaa

SEQ ID NO: 73391 - DNA, 25 bp, probe
gttcagttttgggaaaggaaataga

SEQ ID NO: 73392 - DNA, 25 bp, probe
agttcagttttgggaaaggaaatag

SEQ ID NO: 73393 - DNA, 25 bp, probe
aggcttgtttacaaattgatcctgc

SEQ ID NO: 73394 - DNA, 25 bp, probe
tcagttttgggaaaggaaatagaaa

SEQ ID NO: 73395 - DNA, 25 bp, probe
ttcagttttgggaaaggaaatagaa

SEQ ID NO: 73396 - DNA, 25 bp, probe
ttaaaggcttgtttacaaattgatc

SEQ ID NO: 73397 - DNA, 25 bp, probe
tagttcagttttgggaaaggaaata

SEQ ID NO: 73398 - DNA, 25 bp, probe
ggctaagaagagggacacctttaaa

SEQ ID NO: 73399 - DNA, 25 bp, probe
ctgctaagtagttcagttttgggaa

SEQ ID NO: 73400 - DNA, 25 bp, probe
gggctaagaagagggacacctttaa

SEQ ID NO: 73401 - DNA, 25 bp, probe
cagttttgggaaaggaaatagaaaa

SEQ ID NO: 73402 - DNA, 25 bp, probe
tttaaaggcttgtttacaaattgat

SEQ ID NO: 73403 - DNA, 25 bp, probe
gctaagaagagggacacctttaaag

SEQ ID NO: 73404 - DNA, 25 bp, probe
ctttaaaggcttgtttacaaattga

SEQ ID NO: 73405 - DNA, 25 bp, probe
atcatggaacttgacgatactctaa

SEQ ID NO: 73406 - DNA, 25 bp, probe
aatcatggaacttgacgatactcta

SEQ ID NO: 73407 - DNA, 25 bp, probe
caatcatggaacttgacgatactct

SEQ ID NO: 73408 - DNA, 25 bp, probe
gcaatcatggaacttgacgatactc

SEQ ID NO: 73409 - DNA, 25 bp, probe
tagtgatggagggatataactggtg

SEQ ID NO: 73410 - DNA, 25 bp, probe
ctagtgatggagggatataactggt

SEQ ID NO: 73411 - DNA, 25 bp, probe
tcatggaacttgacgatactctaaa

SEQ ID NO: 73412 - DNA, 25 bp, probe
gctagtgatggagggatataactgg

SEQ ID NO: 73413 - DNA, 25 bp, probe
ctgcaatcatggaacttgacgatac

SEQ ID NO: 73414 - DNA, 25 bp, probe
tgcaatcatggaacttgacgatact

SEQ ID NO: 73415 - DNA, 25 bp, probe
agctagtgatggagggatataactg

SEQ ID NO: 73416 - DNA, 25 bp, probe
cagctagtgatggagggatataact

SEQ ID NO: 73417 - DNA, 25 bp, probe
aaatactctttcttgcagtttgacc

SEQ ID NO: 73418 - DNA, 25 bp, probe
aatactctttcttgcagtttgaccc

SEQ ID NO: 73419 - DNA, 25 bp, probe
ccatgaccggaatgtagtaacgatt

SEQ ID NO: 73420 - DNA, 25 bp, probe
catgaccggaatgtagtaacgattt

SEQ ID NO: 73421 - DNA, 25 bp, probe
gctgcaatcatggaacttgacgata

SEQ ID NO: 73422 - DNA, 25 bp, probe
ccagctagtgatggagggatataac

SEQ ID NO: 73423 - DNA, 25 bp, probe
atactctttcttgcagtttgaccca

SEQ ID NO: 73424 - DNA, 25 bp, probe
atggaacttgacgatactctaaaat

SEQ ID NO: 73425 - DNA, 25 bp, probe
agtgatggagggatataactggtgc

SEQ ID NO: 73426 - DNA, 25 bp, probe
accagctagtgatggagggatataa

SEQ ID NO: 73427 - DNA, 25 bp, probe
catggaacttgacgatactctaaaa

SEQ ID NO: 73428 - DNA, 25 bp, probe
tggaacttgacgatactctaaaata

SEQ ID NO: 73429 - DNA, 25 bp, probe
tactctttcttgcagtttgacccag

SEQ ID NO: 73430 - DNA, 25 bp, probe
ggaacttgacgatactctaaaatac

SEQ ID NO: 73431 - DNA, 25 bp, probe
caccagctagtgatggagggatata

SEQ ID NO: 73432 - DNA, 25 bp, probe
acttgacgatactctaaaatactct

SEQ ID NO: 73433 - DNA, 25 bp, probe
gtgatggagggatataactggtgcc

SEQ ID NO: 73434 - DNA, 25 bp, probe
aaaatactctttcttgcagtttgac

SEQ ID NO: 73435 - DNA, 25 bp, probe
ggagggatataactggtgccatgac

SEQ ID NO: 73436 - DNA, 25 bp, probe
aacttgacgatactctaaaatactc

SEQ ID NO: 73437 - DNA, 25 bp, probe
gaacttgacgatactctaaaatact

SEQ ID NO: 73438 - DNA, 25 bp, probe
atgaccggaatgtagtaacgatttt

SEQ ID NO: 73439 - DNA, 25 bp, probe
atataactggtgccatgaccggaat

SEQ ID NO: 73440 - DNA, 25 bp, probe
tgacgatactctaaaatactctttc

SEQ ID NO: 73441 - DNA, 25 bp, probe
accggaatgtagtaacgattttcag

SEQ ID NO: 73442 - DNA, 25 bp, probe
cttgacgatactctaaaatactctt

SEQ ID NO: 73443 - DNA, 25 bp, probe
gaccggaatgtagtaacgattttca

SEQ ID NO: 73444 - DNA, 25 bp, probe
tgaccggaatgtagtaacgattttc

SEQ ID NO: 73445 - DNA, 25 bp, probe
agctgcaatcatggaacttgacgat

SEQ ID NO: 73446 - DNA, 25 bp, probe
gacgatactctaaaatactctttct

SEQ ID NO: 73447 - DNA, 25 bp, probe
gccatgaccggaatgtagtaacgat

SEQ ID NO: 73448 - DNA, 25 bp, probe
taaaatactctttcttgcagtttga

SEQ ID NO: 73449 - DNA, 25 bp, probe
ggtgaataacaagccttctcctatc

SEQ ID NO: 73450 - DNA, 25 bp, probe
tgaataacaagccttctcctatcac

SEQ ID NO: 73451 - DNA, 25 bp, probe
gtgaataacaagccttctcctatca

SEQ ID NO: 73452 - DNA, 25 bp, probe
gaataacaagccttctcctatcacg

SEQ ID NO: 73453 - DNA, 25 bp, probe
tggtgaataacaagccttctcctat

SEQ ID NO: 73454 - DNA, 25 bp, probe
ctggtgaataacaagccttctccta

SEQ ID NO: 73455 - DNA, 25 bp, probe
aataacaagccttctcctatcacgg

SEQ ID NO: 73456 - DNA, 25 bp, probe
aaggtacttcatatattcttggcaa

SEQ ID NO: 73457 - DNA, 25 bp, probe
aggtacttcatatattcttggcaat

SEQ ID NO: 73458 - DNA, 25 bp, probe
gaaagcagacaaccattaaccaaag

SEQ ID NO: 73459 - DNA, 25 bp, probe
ttcagagaaagcagacaaccattaa

SEQ ID NO: 73460 - DNA, 25 bp, probe
tcagagaaagcagacaaccattaac

SEQ ID NO: 73461 - DNA, 25 bp, probe
cttcagagaaagcagacaaccatta

SEQ ID NO: 73462 - DNA, 25 bp, probe
agaaagcagacaaccattaaccaaa

SEQ ID NO: 73463 - DNA, 25 bp, probe
aaagcagacaaccattaaccaaagt

SEQ ID NO: 73464 - DNA, 25 bp, probe
agagaatgatgtcttcagagaaagc

SEQ ID NO: 73465 - DNA, 25 bp, probe
ggtacttcatatattcttggcaatt

SEQ ID NO: 73466 - DNA, 25 bp, probe
gaatgatgtcttcagagaaagcaga

SEQ ID NO: 73467 - DNA, 25 bp, probe
agaatgatgtcttcagagaaagcag

SEQ ID NO: 73468 - DNA, 25 bp, probe
gagaatgatgtcttcagagaaagca

SEQ ID NO: 73469 - DNA, 25 bp, probe
gagaaagcagacaaccattaaccaa

SEQ ID NO: 73470 - DNA, 25 bp, probe
gtcctggtgaataacaagccttctc

SEQ ID NO: 73471 - DNA, 25 bp, probe
caaagtggatgtctggttcatactc

SEQ ID NO: 73472 - DNA, 25 bp, probe
cagagaaagcagacaaccattaacc

SEQ ID NO: 73473 - DNA, 25 bp, probe
agagaaagcagacaaccattaacca

SEQ ID NO: 73474 - DNA, 25 bp, probe
aagtcacagctaaggattcaaagat

SEQ ID NO: 73475 - DNA, 25 bp, probe
attaaccaaagtcacagctaaggat

SEQ ID NO: 73476 - DNA, 25 bp, probe
atactccagcctttgaacttcattg

SEQ ID NO: 73477 - DNA, 25 bp, probe
catactccagcctttgaacttcatt

SEQ ID NO: 73478 - DNA, 25 bp, probe
aaagtcacagctaaggattcaaaga

SEQ ID NO: 73479 - DNA, 25 bp, probe
caaagtcacagctaaggattcaaag

SEQ ID NO: 73480 - DNA, 25 bp, probe
ttaaccaaagtcacagctaaggatt

SEQ ID NO: 73481 - DNA, 25 bp, probe
agacaaccattaaccaaagtcacag

SEQ ID NO: 73482 - DNA, 25 bp, probe
taaccaaagtcacagctaaggattc

SEQ ID NO: 73483 - DNA, 25 bp, probe
agtcacagctaaggattcaaagatc

SEQ ID NO: 73484 - DNA, 25 bp, probe
aaccattaaccaaagtcacagctaa

SEQ ID NO: 73485 - DNA, 25 bp, probe
tcttcagagaaagcagacaaccatt

SEQ ID NO: 73486 - DNA, 25 bp, probe
cagacaaccattaaccaaagtcaca

SEQ ID NO: 73487 - DNA, 25 bp, probe
cattaaccaaagtcacagctaagga

SEQ ID NO: 73488 - DNA, 25 bp, probe
taacaagccttctcctatcacggat

SEQ ID NO: 73489 - DNA, 25 bp, probe
ataacaagccttctcctatcacgga

SEQ ID NO: 73490 - DNA, 25 bp, probe
accattaaccaaagtcacagctaag

SEQ ID NO: 73491 - DNA, 25 bp, probe
ccaaagtcacagctaaggattcaaa

SEQ ID NO: 73492 - DNA, 25 bp, probe
caaccattaaccaaagtcacagcta

SEQ ID NO: 73493 - DNA, 25 bp, probe
aaggcattgttcacagtgatcttaa

SEQ ID NO: 73494 - DNA, 25 bp, probe
aggcattgttcacagtgatcttaaa

SEQ ID NO: 73495 - DNA, 25 bp, probe
aaaggcattgttcacagtgatctta

SEQ ID NO: 73496 - DNA, 25 bp, probe
taaaggcattgttcacagtgatctt

SEQ ID NO: 73497 - DNA, 25 bp, probe
ttaaaggcattgttcacagtgatct

SEQ ID NO: 73498 - DNA, 25 bp, probe
tttaaaggcattgttcacagtgatc

SEQ ID NO: 73499 - DNA, 25 bp, probe
ttttaaaggcattgttcacagtgat

SEQ ID NO: 73500 - DNA, 25 bp, probe
attttaaaggcattgttcacagtga

SEQ ID NO: 73501 - DNA, 25 bp, probe
tattttaaaggcattgttcacagtg

SEQ ID NO: 73502 - DNA, 25 bp, probe
ttattttaaaggcattgttcacagt

SEQ ID NO: 73503 - DNA, 25 bp, probe
tttattttaaaggcattgttcacag

SEQ ID NO: 73504 - DNA, 25 bp, probe
ttttattttaaaggcattgttcaca

SEQ ID NO: 73505 - DNA, 25 bp, probe
actacagcacaagattgaagaagag

SEQ ID NO: 73506 - DNA, 25 bp, probe
aacactacagcacaagattgaagaa

SEQ ID NO: 73507 - DNA, 25 bp, probe
cactacagcacaagattgaagaaga

SEQ ID NO: 73508 - DNA, 25 bp, probe
acactacagcacaagattgaagaag

SEQ ID NO: 73509 - DNA, 25 bp, probe
taagtattctctagcagaccagaca

SEQ ID NO: 73510 - DNA, 25 bp, probe
ttaagtattctctagcagaccagac

SEQ ID NO: 73511 - DNA, 25 bp, probe
aagtattctctagcagaccagacaa

SEQ ID NO: 73512 - DNA, 25 bp, probe
ctacagcacaagattgaagaagagc

SEQ ID NO: 73513 - DNA, 25 bp, probe
agtattctctagcagaccagacaag

SEQ ID NO: 73514 - DNA, 25 bp, probe
gtattctctagcagaccagacaagt

SEQ ID NO: 73515 - DNA, 25 bp, probe
attaagtattctctagcagaccaga

SEQ ID NO: 73516 - DNA, 25 bp, probe
tattctctagcagaccagacaagtg

SEQ ID NO: 73517 - DNA, 25 bp, probe
agtcttattgacatcatcagagaga

SEQ ID NO: 73518 - DNA, 25 bp, probe
tacagcacaagattgaagaagagca

SEQ ID NO: 73519 - DNA, 25 bp, probe
tatggcagtccagcattatattgaa

SEQ ID NO: 73520 - DNA, 25 bp, probe
atatggcagtccagcattatattga

SEQ ID NO: 73521 - DNA, 25 bp, probe
agcacaagattgaagaagagcagaa

SEQ ID NO: 73522 - DNA, 25 bp, probe
gtcttattgacatcatcagagagaa

SEQ ID NO: 73523 - DNA, 25 bp, probe
ttatctatatggcagtccagcatta

SEQ ID NO: 73524 - DNA, 25 bp, probe
gtattaactgcaacattgaccttct

SEQ ID NO: 73525 - DNA, 25 bp, probe
atggagagaggaaagagtaaatgtg

SEQ ID NO: 73526 - DNA, 25 bp, probe
tctatatggcagtccagcattatat

SEQ ID NO: 73527 - DNA, 25 bp, probe
atctatatggcagtccagcattata

SEQ ID NO: 73528 - DNA, 25 bp, probe
tatctatatggcagtccagcattat

SEQ ID NO: 73529 - DNA, 25 bp, probe
taccgatttatctatatggcagtcc

SEQ ID NO: 73530 - DNA, 25 bp, probe
tattaactgcaacattgaccttctc

SEQ ID NO: 73531 - DNA, 25 bp, probe
gaaacactacagcacaagattgaag

SEQ ID NO: 73532 - DNA, 25 bp, probe
gcagtccagcattatattgaaacac

SEQ ID NO: 73533 - DNA, 25 bp, probe
tatatggcagtccagcattatattg

SEQ ID NO: 73534 - DNA, 25 bp, probe
aaacactacagcacaagattgaaga

SEQ ID NO: 73535 - DNA, 25 bp, probe
caagaggaaagggcacgaatataaa

SEQ ID NO: 73536 - DNA, 25 bp, probe
gcattatattgaaacactacagcac

SEQ ID NO: 73537 - DNA, 25 bp, probe
tgaaacactacagcacaagattgaa

SEQ ID NO: 73538 - DNA, 25 bp, probe
agcattatattgaaacactacagca

SEQ ID NO: 73539 - DNA, 25 bp, probe
ggaggttcattgtgattaatagtct

SEQ ID NO: 73540 - DNA, 25 bp, probe
attgaaacactacagcacaagattg

SEQ ID NO: 73541 - DNA, 25 bp, probe
ctatatggcagtccagcattatatt

SEQ ID NO: 73542 - DNA, 25 bp, probe
aatgtgtcaaatactggtctgaaga

SEQ ID NO: 73543 - DNA, 25 bp, probe
attaactgcaacattgaccttctca

SEQ ID NO: 73544 - DNA, 25 bp, probe
atgtgtcaaatactggtctgaagag

SEQ ID NO: 73545 - DNA, 25 bp, probe
aaatgtgtcaaatactggtctgaag

SEQ ID NO: 73546 - DNA, 25 bp, probe
aatgagagaagacaatgctggagtc

SEQ ID NO: 73547 - DNA, 25 bp, probe
tattaagtattctctagcagaccag

SEQ ID NO: 73548 - DNA, 25 bp, probe
cagtccagcattatattgaaacact

SEQ ID NO: 73549 - DNA, 25 bp, probe
ggatgactattgaggatgtgatgag

SEQ ID NO: 73550 - DNA, 25 bp, probe
aggatgactattgaggatgtgatga

SEQ ID NO: 73551 - DNA, 25 bp, probe
caggatgactattgaggatgtgatg

SEQ ID NO: 73552 - DNA, 25 bp, probe
gatgactattgaggatgtgatgagt

SEQ ID NO: 73553 - DNA, 25 bp, probe
cacttcacgcactccttaataacat

SEQ ID NO: 73554 - DNA, 25 bp, probe
atgactattgaggatgtgatgagtt

SEQ ID NO: 73555 - DNA, 25 bp, probe
ccaggatgactattgaggatgtgat

SEQ ID NO: 73556 - DNA, 25 bp, probe
gaatcagtagccaggatgactattg

SEQ ID NO: 73557 - DNA, 25 bp, probe
aatcagtagccaggatgactattga

SEQ ID NO: 73558 - DNA, 25 bp, probe
tgaatcagtagccaggatgactatt

SEQ ID NO: 73559 - DNA, 25 bp, probe
ttgaatcagtagccaggatgactat

SEQ ID NO: 73560 - DNA, 25 bp, probe
atcagtagccaggatgactattgag

SEQ ID NO: 73561 - DNA, 25 bp, probe
cttgaatcagtagccaggatgacta

SEQ ID NO: 73562 - DNA, 25 bp, probe
gtagccaggatgactattgaggatg

SEQ ID NO: 73563 - DNA, 25 bp, probe
acttcacgcactccttaataacatg

SEQ ID NO: 73564 - DNA, 25 bp, probe
tagccaggatgactattgaggatgt

SEQ ID NO: 73565 - DNA, 25 bp, probe
atgagcagcattcagactatgagag

SEQ ID NO: 73566 - DNA, 25 bp, probe
agtagccaggatgactattgaggat

SEQ ID NO: 73567 - DNA, 25 bp, probe
tattgaggatgtgatgagtttaggg

SEQ ID NO: 73568 - DNA, 25 bp, probe
ttatggagaaagaccttattgggac

SEQ ID NO: 73569 - DNA, 25 bp, probe
aaacactcctgatttcactaccttt

SEQ ID NO: 73570 - DNA, 25 bp, probe
atgtgggaagttatgtcttatggag

SEQ ID NO: 73571 - DNA, 25 bp, probe
cttatggagaaagaccttattggga

SEQ ID NO: 73572 - DNA, 25 bp, probe
tatggagaaagaccttattgggaca

SEQ ID NO: 73573 - DNA, 25 bp, probe
gtgggaagttatgtcttatggagaa

SEQ ID NO: 73574 - DNA, 25 bp, probe
ttgaggatgtgatgagtttagggat

SEQ ID NO: 73575 - DNA, 25 bp, probe
attgaggatgtgatgagtttaggga

SEQ ID NO: 73576 - DNA, 25 bp, probe
ctattgaggatgtgatgagtttagg

SEQ ID NO: 73577 - DNA, 25 bp, probe
aagcaatagaagaaggttatcgttt

SEQ ID NO: 73578 - DNA, 25 bp, probe
aaagcaatagaagaaggttatcgtt

SEQ ID NO: 73579 - DNA, 25 bp, probe
tgggaagttatgtcttatggagaaa

SEQ ID NO: 73580 - DNA, 25 bp, probe
aatgtcatcatatcctgcacttcac

SEQ ID NO: 73581 - DNA, 25 bp, probe
tgtgggaagttatgtcttatggaga

SEQ ID NO: 73582 - DNA, 25 bp, probe
cagcattcagactatgagagcacaa

SEQ ID NO: 73583 - DNA, 25 bp, probe
tgactattgaggatgtgatgagttt

SEQ ID NO: 73584 - DNA, 25 bp, probe
gggaagttatgtcttatggagaaag

SEQ ID NO: 73585 - DNA, 25 bp, probe
atggagaaagaccttattgggacat

SEQ ID NO: 73586 - DNA, 25 bp, probe
gatataaagataatttcacggcagc

SEQ ID NO: 73587 - DNA, 25 bp, probe
catgagcagcattcagactatgaga

SEQ ID NO: 73588 - DNA, 25 bp, probe
gcaatagaagaaggttatcgtttac

SEQ ID NO: 73589 - DNA, 25 bp, probe
agcaatagaagaaggttatcgttta

SEQ ID NO: 73590 - DNA, 25 bp, probe
cagtagccaggatgactattgagga

SEQ ID NO: 73591 - DNA, 25 bp, probe
tcagtagccaggatgactattgagg

SEQ ID NO: 73592 - DNA, 25 bp, probe
tgttcagttggagaatggctacaag

SEQ ID NO: 73593 - DNA, 25 bp, probe
tggagcctacaattatatggagatt

SEQ ID NO: 73594 - DNA, 25 bp, probe
ttggagcctacaattatatggagat

SEQ ID NO: 73595 - DNA, 25 bp, probe
ttgccaccaacagatgaatctataa

SEQ ID NO: 73596 - DNA, 25 bp, probe
cttgccaccaacagatgaatctata

SEQ ID NO: 73597 - DNA, 25 bp, probe
agttcatcactactagacagcacaa

SEQ ID NO: 73598 - DNA, 25 bp, probe
gagttcatcactactagacagcaca

SEQ ID NO: 73599 - DNA, 25 bp, probe
caatggattatatagctcacatggc

SEQ ID NO: 73600 - DNA, 25 bp, probe
ggacgagttcatcactactagacag

SEQ ID NO: 73601 - DNA, 25 bp, probe
aattgaccatgactatgagcgagat

SEQ ID NO: 73602 - DNA, 25 bp, probe
tagacagcacaaatacgaacttcaa

SEQ ID NO: 73603 - DNA, 25 bp, probe
acaatggattatatagctcacatgg

SEQ ID NO: 73604 - DNA, 25 bp, probe
cagcacaaatacgaacttcaaagaa

SEQ ID NO: 73605 - DNA, 25 bp, probe
tactagacagcacaaatacgaactt

SEQ ID NO: 73606 - DNA, 25 bp, probe
ttcatcactactagacagcacaaat

SEQ ID NO: 73607 - DNA, 25 bp, probe
gcctacaattatatggagattggtg

SEQ ID NO: 73608 - DNA, 25 bp, probe
agcctacaattatatggagattggt

SEQ ID NO: 73609 - DNA, 25 bp, probe
gaccaactatctaggaaatacaccc

SEQ ID NO: 73610 - DNA, 25 bp, probe
gacagcacaaatacgaacttcaaag

SEQ ID NO: 73611 - DNA, 25 bp, probe
ctactagacagcacaaatacgaact

SEQ ID NO: 73612 - DNA, 25 bp, probe
actatctaggaaatacacccaccat

SEQ ID NO: 73613 - DNA, 25 bp, probe
caactatctaggaaatacacccacc

SEQ ID NO: 73614 - DNA, 25 bp, probe
ccaactatctaggaaatacacccac

SEQ ID NO: 73615 - DNA, 25 bp, probe
atgactatgagcgagatggactgaa

SEQ ID NO: 73616 - DNA, 25 bp, probe
atcactactagacagcacaaatacg

SEQ ID NO: 73617 - DNA, 25 bp, probe
gacgagttcatcactactagacagc

SEQ ID NO: 73618 - DNA, 25 bp, probe
actactagacagcacaaatacgaac

SEQ ID NO: 73619 - DNA, 25 bp, probe
cactactagacagcacaaatacgaa

SEQ ID NO: 73620 - DNA, 25 bp, probe
cagattggagcctacaattatatgg

SEQ ID NO: 73621 - DNA, 25 bp, probe
aactatctaggaaatacacccacca

SEQ ID NO: 73622 - DNA, 25 bp, probe
accaactatctaggaaatacaccca

SEQ ID NO: 73623 - DNA, 25 bp, probe
catcactactagacagcacaaatac

SEQ ID NO: 73624 - DNA, 25 bp, probe
tcatcactactagacagcacaaata

SEQ ID NO: 73625 - DNA, 25 bp, probe
attggagcctacaattatatggaga

SEQ ID NO: 73626 - DNA, 25 bp, probe
agattggagcctacaattatatgga

SEQ ID NO: 73627 - DNA, 25 bp, probe
acagcacaaatacgaacttcaaaga

SEQ ID NO: 73628 - DNA, 25 bp, probe
agacagcacaaatacgaacttcaaa

SEQ ID NO: 73629 - DNA, 25 bp, probe
gcttcacacagtctcagattgatga

SEQ ID NO: 73630 - DNA, 25 bp, probe
gttcatcactactagacagcacaaa

SEQ ID NO: 73631 - DNA, 25 bp, probe
tcacacagtctcagattgatgaaat

SEQ ID NO: 73632 - DNA, 25 bp, probe
cattcagattggagcctacaattat

SEQ ID NO: 73633 - DNA, 25 bp, probe
gcattcagattggagcctacaatta

SEQ ID NO: 73634 - DNA, 25 bp, probe
aattatatggagattggtgggacga

SEQ ID NO: 73635 - DNA, 25 bp, probe
aattccaagtcatatgcctagtctg

SEQ ID NO: 73636 - DNA, 25 bp, probe
caattccaagtcatatgcctagtct

SEQ ID NO: 73637 - DNA, 25 bp, probe
atatcaggacaagacatttcaaaga

SEQ ID NO: 73638 - DNA, 25 bp, probe
tatcaggacaagacatttcaaagaa

SEQ ID NO: 73639 - DNA, 25 bp, probe
caggacaagacatttcaaagaaagt

SEQ ID NO: 73640 - DNA, 25 bp, probe
tcaggacaagacatttcaaagaaag

SEQ ID NO: 73641 - DNA, 25 bp, probe
atcaggacaagacatttcaaagaaa

SEQ ID NO: 73642 - DNA, 25 bp, probe
gatatcaggacaagacatttcaaag

SEQ ID NO: 73643 - DNA, 25 bp, probe
ctggtaaagcaattcctccttgtca

SEQ ID NO: 73644 - DNA, 25 bp, probe
tggtaaagcaattcctccttgtcac

SEQ ID NO: 73645 - DNA, 25 bp, probe
gtaaagcaattcctccttgtcaccg

SEQ ID NO: 73646 - DNA, 25 bp, probe
taaagcaattcctccttgtcaccga

SEQ ID NO: 73647 - DNA, 25 bp, probe
ggtaaagcaattcctccttgtcacc

SEQ ID NO: 73648 - DNA, 25 bp, probe
gctggtaaagcaattcctccttgtc

SEQ ID NO: 73649 - DNA, 25 bp, probe
ttttctgctagtgacttgcacagtc

SEQ ID NO: 73650 - DNA, 25 bp, probe
tttctgctagtgacttgcacagtcc

SEQ ID NO: 73651 - DNA, 25 bp, probe
gagaccatggctctcatcctcaaag

SEQ ID NO: 73652 - DNA, 25 bp, probe
attcaggaccaacttcagttattca

SEQ ID NO: 73653 - DNA, 25 bp, probe
caggaccaacttcagttattcagaa

SEQ ID NO: 73654 - DNA, 25 bp, probe
ttcaggaccaacttcagttattcag

SEQ ID NO: 73655 - DNA, 25 bp, probe
attcagatgacattatgccagttgc

SEQ ID NO: 73656 - DNA, 25 bp, probe
aattcaggaccaacttcagttattc

SEQ ID NO: 73657 - DNA, 25 bp, probe
tcaggaccaacttcagttattcaga

SEQ ID NO: 73658 - DNA, 25 bp, probe
tcagatgacattatgccagttgctt

SEQ ID NO: 73659 - DNA, 25 bp, probe
ttcagatgacattatgccagttgct

SEQ ID NO: 73660 - DNA, 25 bp, probe
tataagtccagagatgaagcaaaca

SEQ ID NO: 73661 - DNA, 25 bp, probe
ataagtccagagatgaagcaaacaa

SEQ ID NO: 73662 - DNA, 25 bp, probe
gatgacattatgccagttgctttaa

SEQ ID NO: 73663 - DNA, 25 bp, probe
agatgacattatgccagttgcttta

SEQ ID NO: 73664 - DNA, 25 bp, probe
taagtccagagatgaagcaaacaac

SEQ ID NO: 73665 - DNA, 25 bp, probe
atgacattatgccagttgctttaat

SEQ ID NO: 73666 - DNA, 25 bp, probe
agttgctttaatggaaacgaagaac

SEQ ID NO: 73667 - DNA, 25 bp, probe
cagttgctttaatggaaacgaagaa

SEQ ID NO: 73668 - DNA, 25 bp, probe
ctttaatggaaacgaagaaccgaga

SEQ ID NO: 73669 - DNA, 25 bp, probe
gttgctttaatggaaacgaagaacc

SEQ ID NO: 73670 - DNA, 25 bp, probe
aggaccaacttcagttattcagaaa

SEQ ID NO: 73671 - DNA, 25 bp, probe
ggaccaacttcagttattcagaaat

SEQ ID NO: 73672 - DNA, 25 bp, probe
cagatgacattatgccagttgcttt

SEQ ID NO: 73673 - DNA, 25 bp, probe
ttcatagaattcaggaccaacttca

SEQ ID NO: 73674 - DNA, 25 bp, probe
tcatagaattcaggaccaacttcag

SEQ ID NO: 73675 - DNA, 25 bp, probe
gcatttataagtccagagatgaagc

SEQ ID NO: 73676 - DNA, 25 bp, probe
catagaattcaggaccaacttcagt

SEQ ID NO: 73677 - DNA, 25 bp, probe
agaattcaggaccaacttcagttat

SEQ ID NO: 73678 - DNA, 25 bp, probe
atagaattcaggaccaacttcagtt

SEQ ID NO: 73679 - DNA, 25 bp, probe
ttataagtccagagatgaagcaaac

SEQ ID NO: 73680 - DNA, 25 bp, probe
tagaattcaggaccaacttcagtta

SEQ ID NO: 73681 - DNA, 25 bp, probe
gaattcaggaccaacttcagttatt

SEQ ID NO: 73682 - DNA, 25 bp, probe
catttataagtccagagatgaagca

SEQ ID NO: 73683 - DNA, 25 bp, probe
attatgccagttgctttaatggaaa

SEQ ID NO: 73684 - DNA, 25 bp, probe
ttatgccagttgctttaatggaaac

SEQ ID NO: 73685 - DNA, 25 bp, probe
tttataagtccagagatgaagcaaa

SEQ ID NO: 73686 - DNA, 25 bp, probe
agcatttataagtccagagatgaag

SEQ ID NO: 73687 - DNA, 25 bp, probe
ttgctttaatggaaacgaagaaccg

SEQ ID NO: 73688 - DNA, 25 bp, probe
aagtccagagatgaagcaaacaaca

SEQ ID NO: 73689 - DNA, 25 bp, probe
atttataagtccagagatgaagcaa

SEQ ID NO: 73690 - DNA, 25 bp, probe
gctttaatggaaacgaagaaccgag

SEQ ID NO: 73691 - DNA, 25 bp, probe
gaccaacttcagttattcagaaatt

SEQ ID NO: 73692 - DNA, 25 bp, probe
agtccagagatgaagcaaacaacag

SEQ ID NO: 73693 - DNA, 25 bp, probe
ccagttgctttaatggaaacgaaga

SEQ ID NO: 73694 - DNA, 25 bp, probe
tgctttaatggaaacgaagaaccga

SEQ ID NO: 73695 - DNA, 25 bp, probe
tccagagatgaagcaaacaacagtg

SEQ ID NO: 73696 - DNA, 25 bp, probe
agatcgtcatatcaggtatcataga

SEQ ID NO: 73697 - DNA, 25 bp, probe
gtcatatcaggtatcatagaccacc

SEQ ID NO: 73698 - DNA, 25 bp, probe
cgtcatatcaggtatcatagaccac

SEQ ID NO: 73699 - DNA, 25 bp, probe
tcgtcatatcaggtatcatagacca

SEQ ID NO: 73700 - DNA, 25 bp, probe
tgagatcgtcatatcaggtatcata

SEQ ID NO: 73701 - DNA, 25 bp, probe
atcgtcatatcaggtatcatagacc

SEQ ID NO: 73702 - DNA, 25 bp, probe
gagatcgtcatatcaggtatcatag

SEQ ID NO: 73703 - DNA, 25 bp, probe
aaagaatctatggcagtgtttgaac

SEQ ID NO: 73704 - DNA, 25 bp, probe
gatcgtcatatcaggtatcatagac

SEQ ID NO: 73705 - DNA, 25 bp, probe
agcctttctacttactaccagcaat

SEQ ID NO: 73706 - DNA, 25 bp, probe
ctgagttggtctaatagctgtggaa

SEQ ID NO: 73707 - DNA, 25 bp, probe
aagcctttctacttactaccagcaa

SEQ ID NO: 73708 - DNA, 25 bp, probe
tgagttggtctaatagctgtggaac

SEQ ID NO: 73709 - DNA, 25 bp, probe
gcattgttattacagagaaagcaag

SEQ ID NO: 73710 - DNA, 25 bp, probe
gtgcccaaactccaaagaatctatg

SEQ ID NO: 73711 - DNA, 25 bp, probe
ctaatagctgtggaaccggaataat

SEQ ID NO: 73712 - DNA, 25 bp, probe
taatagctgtggaaccggaataatg

SEQ ID NO: 73713 - DNA, 25 bp, probe
aaagcctttctacttactaccagca

SEQ ID NO: 73714 - DNA, 25 bp, probe
tgttattacagagaaagcaagaact

SEQ ID NO: 73715 - DNA, 25 bp, probe
tctaatagctgtggaaccggaataa

SEQ ID NO: 73716 - DNA, 25 bp, probe
tggcacaagaatatatgaaagttca

SEQ ID NO: 73717 - DNA, 25 bp, probe
aagaatctatggcagtgtttgaaca

SEQ ID NO: 73718 - DNA, 25 bp, probe
agaatctatggcagtgtttgaacag

SEQ ID NO: 73719 - DNA, 25 bp, probe
atagctgtggaaccggaataatgat

SEQ ID NO: 73720 - DNA, 25 bp, probe
gtctaatagctgtggaaccggaata

SEQ ID NO: 73721 - DNA, 25 bp, probe
ttgttattacagagaaagcaagaac

SEQ ID NO: 73722 - DNA, 25 bp, probe
ctccaaagaatctatggcagtgttt

SEQ ID NO: 73723 - DNA, 25 bp, probe
aaactccaaagaatctatggcagtg

SEQ ID NO: 73724 - DNA, 25 bp, probe
caaactccaaagaatctatggcagt

SEQ ID NO: 73725 - DNA, 25 bp, probe
aatagctgtggaaccggaataatga

SEQ ID NO: 73726 - DNA, 25 bp, probe
atggcacaagaatatatgaaagttc

SEQ ID NO: 73727 - DNA, 25 bp, probe
ggcacaagaatatatgaaagttcaa

SEQ ID NO: 73728 - DNA, 25 bp, probe
cattgttattacagagaaagcaaga

SEQ ID NO: 73729 - DNA, 25 bp, probe
aatggcacaagaatatatgaaagtt

SEQ ID NO: 73730 - DNA, 25 bp, probe
aaatggcacaagaatatatgaaagt

SEQ ID NO: 73731 - DNA, 25 bp, probe
tagctgtggaaccggaataatgatc

SEQ ID NO: 73732 - DNA, 25 bp, probe
cctgagttggtctaatagctgtgga

SEQ ID NO: 73733 - DNA, 25 bp, probe
ccaaactccaaagaatctatggcag

SEQ ID NO: 73734 - DNA, 25 bp, probe
gaaagttcaaacagaaattgcattg

SEQ ID NO: 73735 - DNA, 25 bp, probe
tgaaagttcaaacagaaattgcatt

SEQ ID NO: 73736 - DNA, 25 bp, probe
gttattacagagaaagcaagaacta

SEQ ID NO: 73737 - DNA, 25 bp, probe
ctgagatcgtcatatcaggtatcat

SEQ ID NO: 73738 - DNA, 25 bp, probe
atgaaagttcaaacagaaattgcat

SEQ ID NO: 73739 - DNA, 25 bp, probe
aaagttcaaacagaaattgcattgt

SEQ ID NO: 73740 - DNA, 25 bp, probe
cttgggtggctgcttgtataaactg

SEQ ID NO: 73741 - DNA, 25 bp, probe
atccttgggtggctgcttgtataaa

SEQ ID NO: 73742 - DNA, 25 bp, probe
gctgcttgtataaactgcaagattt

SEQ ID NO: 73743 - DNA, 25 bp, probe
ctgcttgtataaactgcaagatttg

SEQ ID NO: 73744 - DNA, 25 bp, probe
catccttgggtggctgcttgtataa

SEQ ID NO: 73745 - DNA, 25 bp, probe
ccttgggtggctgcttgtataaact

SEQ ID NO: 73746 - DNA, 25 bp, probe
tccttgggtggctgcttgtataaac

SEQ ID NO: 73747 - DNA, 25 bp, probe
ggctgcttgtataaactgcaagatt

SEQ ID NO: 73748 - DNA, 25 bp, probe
tggctgcttgtataaactgcaagat

SEQ ID NO: 73749 - DNA, 25 bp, probe
tgcttgtataaactgcaagatttgc

SEQ ID NO: 73750 - DNA, 25 bp, probe
gtggctgcttgtataaactgcaaga

SEQ ID NO: 73751 - DNA, 25 bp, probe
ggtggctgcttgtataaactgcaag

SEQ ID NO: 73752 - DNA, 25 bp, probe
gatgcactacaaccagacaggtcag

SEQ ID NO: 73753 - DNA, 25 bp, probe
tggtgtggagatactcttagagaag

SEQ ID NO: 73754 - DNA, 25 bp, probe
gtggtgtggagatactcttagagaa

SEQ ID NO: 73755 - DNA, 25 bp, probe
ggtgtggagatactcttagagaaga

SEQ ID NO: 73756 - DNA, 25 bp, probe
ggtggtgtggagatactcttagaga

SEQ ID NO: 73757 - DNA, 25 bp, probe
gggtggtgtggagatactcttagag

SEQ ID NO: 73758 - DNA, 25 bp, probe
ggggtggtgtggagatactcttaga

SEQ ID NO: 73759 - DNA, 25 bp, probe
tagcccggaagcaggagatcattaa

SEQ ID NO: 73760 - DNA, 25 bp, probe
acaaagcagtttatatatttcttca

SEQ ID NO: 73761 - DNA, 25 bp, probe
caagaacacatacactggagagaag

SEQ ID NO: 73762 - DNA, 25 bp, probe
gaacacatacactggagagaagtta

SEQ ID NO: 73763 - DNA, 25 bp, probe
aacacatacactggagagaagttaa

SEQ ID NO: 73764 - DNA, 25 bp, probe
agaacacatacactggagagaagtt

SEQ ID NO: 73765 - DNA, 25 bp, probe
aagaacacatacactggagagaagt

SEQ ID NO: 73766 - DNA, 25 bp, probe
gcaagaacacatacactggagagaa

SEQ ID NO: 73767 - DNA, 25 bp, probe
aagcaagaacacatacactggagag

SEQ ID NO: 73768 - DNA, 25 bp, probe
ataagggtaaatgggaagttggtag

SEQ ID NO: 73769 - DNA, 25 bp, probe
cagagaataagggtaaatgggaagt

SEQ ID NO: 73770 - DNA, 25 bp, probe
acagagaataagggtaaatgggaag

SEQ ID NO: 73771 - DNA, 25 bp, probe
caacagagaataagggtaaatggga

SEQ ID NO: 73772 - DNA, 25 bp, probe
agaataagggtaaatgggaagttgg

SEQ ID NO: 73773 - DNA, 25 bp, probe
aacagagaataagggtaaatgggaa

SEQ ID NO: 73774 - DNA, 25 bp, probe
aataagggtaaatgggaagttggta

SEQ ID NO: 73775 - DNA, 25 bp, probe
gagaataagggtaaatgggaagttg

SEQ ID NO: 73776 - DNA, 25 bp, probe
gaataagggtaaatgggaagttggt

SEQ ID NO: 73777 - DNA, 25 bp, probe
agagaataagggtaaatgggaagtt

SEQ ID NO: 73778 - DNA, 25 bp, probe
aaattgtaaacatcaggcactttgg

SEQ ID NO: 73779 - DNA, 25 bp, probe
gtaaacatcaggcactttggttaat

SEQ ID NO: 73780 - DNA, 25 bp, probe
aaacatcaggcactttggttaatag

SEQ ID NO: 73781 - DNA, 25 bp, probe
atagttgaaagacctgttgtaaccc

SEQ ID NO: 73782 - DNA, 25 bp, probe
aatagttgaaagacctgttgtaacc

SEQ ID NO: 73783 - DNA, 25 bp, probe
caggcactttggttaatagttgaaa

SEQ ID NO: 73784 - DNA, 25 bp, probe
atcaggcactttggttaatagttga

SEQ ID NO: 73785 - DNA, 25 bp, probe
catcaggcactttggttaatagttg

SEQ ID NO: 73786 - DNA, 25 bp, probe
tcaggcactttggttaatagttgaa

SEQ ID NO: 73787 - DNA, 25 bp, probe
acatcaggcactttggttaatagtt

SEQ ID NO: 73788 - DNA, 25 bp, probe
aacatcaggcactttggttaatagt

SEQ ID NO: 73789 - DNA, 25 bp, probe
tgtaaacatcaggcactttggttaa

SEQ ID NO: 73790 - DNA, 25 bp, probe
ttgtaaacatcaggcactttggtta

SEQ ID NO: 73791 - DNA, 25 bp, probe
taaacatcaggcactttggttaata

SEQ ID NO: 73792 - DNA, 25 bp, probe
aattgtaaacatcaggcactttggt

SEQ ID NO: 73793 - DNA, 25 bp, probe
agcaagaacacatacactggagaga

SEQ ID NO: 73794 - DNA, 25 bp, probe
tagttgaaagacctgttgtaaccca

SEQ ID NO: 73795 - DNA, 25 bp, probe
attgtaaacatcaggcactttggtt

SEQ ID NO: 73796 - DNA, 25 bp, probe
gggaaggatcttatgctacagtata

SEQ ID NO: 73797 - DNA, 25 bp, probe
taagggtaaatgggaagttggtagc

SEQ ID NO: 73798 - DNA, 25 bp, probe
ggaaggatcttatgctacagtatac

SEQ ID NO: 73799 - DNA, 25 bp, probe
aaagcaagaacacatacactggaga

SEQ ID NO: 73800 - DNA, 25 bp, probe
acacatacactggagagaagttaac

SEQ ID NO: 73801 - DNA, 25 bp, probe
gaagttggtagctctgaaggtgatc

SEQ ID NO: 73802 - DNA, 25 bp, probe
actgagattcctatacagggactta

SEQ ID NO: 73803 - DNA, 25 bp, probe
taactgagattcctatacagggact

SEQ ID NO: 73804 - DNA, 25 bp, probe
aactgagattcctatacagggactt

SEQ ID NO: 73805 - DNA, 25 bp, probe
taccttcaagagcattaagagacag

SEQ ID NO: 73806 - DNA, 25 bp, probe
ataccttcaagagcattaagagaca

SEQ ID NO: 73807 - DNA, 25 bp, probe
cataccttcaagagcattaagagac

SEQ ID NO: 73808 - DNA, 25 bp, probe
tcataccttcaagagcattaagaga

SEQ ID NO: 73809 - DNA, 25 bp, probe
aagagcattaagagacagcaacaag

SEQ ID NO: 73810 - DNA, 25 bp, probe
ttcaagagcattaagagacagcaac

SEQ ID NO: 73811 - DNA, 25 bp, probe
cttcaagagcattaagagacagcaa

SEQ ID NO: 73812 - DNA, 25 bp, probe
acaactcataccttcaagagcatta

SEQ ID NO: 73813 - DNA, 25 bp, probe
actcataccttcaagagcattaaga

SEQ ID NO: 73814 - DNA, 25 bp, probe
aacagacaactcataccttcaagag

SEQ ID NO: 73815 - DNA, 25 bp, probe
caagagcattaagagacagcaacaa

SEQ ID NO: 73816 - DNA, 25 bp, probe
caactcataccttcaagagcattaa

SEQ ID NO: 73817 - DNA, 25 bp, probe
ctcataccttcaagagcattaagag

SEQ ID NO: 73818 - DNA, 25 bp, probe
gacaactcataccttcaagagcatt

SEQ ID NO: 73819 - DNA, 25 bp, probe
aactcataccttcaagagcattaag

SEQ ID NO: 73820 - DNA, 25 bp, probe
acatgctaacatagtgctacttcat

SEQ ID NO: 73821 - DNA, 25 bp, probe
aacatgctaacatagtgctacttca

SEQ ID NO: 73822 - DNA, 25 bp, probe
ttgtcattcagaaccaagtacagaa

SEQ ID NO: 73823 - DNA, 25 bp, probe
agacaactcataccttcaagagcat

SEQ ID NO: 73824 - DNA, 25 bp, probe
gttgtcattcagaaccaagtacaga

SEQ ID NO: 73825 - DNA, 25 bp, probe
tcaagagcattaagagacagcaaca

SEQ ID NO: 73826 - DNA, 25 bp, probe
tgtcattcagaaccaagtacagaat

SEQ ID NO: 73827 - DNA, 25 bp, probe
aaacagacaactcataccttcaaga

SEQ ID NO: 73828 - DNA, 25 bp, probe
gaggacttaatcaaatcacaagcaa

SEQ ID NO: 73829 - DNA, 25 bp, probe
ccttcaagagcattaagagacagca

SEQ ID NO: 73830 - DNA, 25 bp, probe
accttcaagagcattaagagacagc

SEQ ID NO: 73831 - DNA, 25 bp, probe
cagacaactcataccttcaagagca

SEQ ID NO: 73832 - DNA, 25 bp, probe
acagacaactcataccttcaagagc

SEQ ID NO: 73833 - DNA, 25 bp, probe
aggacttaatcaaatcacaagcaaa

SEQ ID NO: 73834 - DNA, 25 bp, probe
aaccaagtacagaatgcgaacagat

SEQ ID NO: 73835 - DNA, 25 bp, probe
aagtacagaatgcgaacagatgtaa

SEQ ID NO: 73836 - DNA, 25 bp, probe
atcttgaatcttcccactcatactc

SEQ ID NO: 73837 - DNA, 25 bp, probe
ttcagaaccaagtacagaatgcgaa

SEQ ID NO: 73838 - DNA, 25 bp, probe
ggaggacttaatcaaatcacaagca

SEQ ID NO: 73839 - DNA, 25 bp, probe
tggaggacttaatcaaatcacaagc

SEQ ID NO: 73840 - DNA, 25 bp, probe
atgacatcatccataccaaggagac

SEQ ID NO: 73841 - DNA, 25 bp, probe
gatgcctttctgatcttgaatcttc

SEQ ID NO: 73842 - DNA, 25 bp, probe
agatgtaaacattgtggatgactga

SEQ ID NO: 73843 - DNA, 25 bp, probe
caagtacagaatgcgaacagatgta

SEQ ID NO: 73844 - DNA, 25 bp, probe
atgatgcctttctgatcttgaatct

SEQ ID NO: 73845 - DNA, 25 bp, probe
aatgatgcctttctgatcttgaatc

SEQ ID NO: 73846 - DNA, 25 bp, probe
tttctgatcttgaatcttcccactc

SEQ ID NO: 73847 - DNA, 25 bp, probe
ctttctgatcttgaatcttcccact

SEQ ID NO: 73848 - DNA, 25 bp, probe
tgatgcctttctgatcttgaatctt

SEQ ID NO: 73849 - DNA, 25 bp, probe
gtcttacatccaccagcgttatatt

SEQ ID NO: 73850 - DNA, 25 bp, probe
tgtcttacatccaccagcgttatat

SEQ ID NO: 73851 - DNA, 25 bp, probe
tcttacatccaccagcgttatattt

SEQ ID NO: 73852 - DNA, 25 bp, probe
ctgtcttacatccaccagcgttata

SEQ ID NO: 73853 - DNA, 25 bp, probe
tacagacctccagatgtccttctag

SEQ ID NO: 73854 - DNA, 25 bp, probe
tgtccttctaggctcaacagaatat

SEQ ID NO: 73855 - DNA, 25 bp, probe
atgtccttctaggctcaacagaata

SEQ ID NO: 73856 - DNA, 25 bp, probe
tttgttgaaatgatccaaggagttg

SEQ ID NO: 73857 - DNA, 25 bp, probe
ctttgttgaaatgatccaaggagtt

SEQ ID NO: 73858 - DNA, 25 bp, probe
catctttgttgaaatgatccaagga

SEQ ID NO: 73859 - DNA, 25 bp, probe
atctttgttgaaatgatccaaggag

SEQ ID NO: 73860 - DNA, 25 bp, probe
tctttgttgaaatgatccaaggagt

SEQ ID NO: 73861 - DNA, 25 bp, probe
gtacagacctccagatgtccttcta

SEQ ID NO: 73862 - DNA, 25 bp, probe
gtggagacattagatggatgttcta

SEQ ID NO: 73863 - DNA, 25 bp, probe
gtccttctaggctcaacagaatatt

SEQ ID NO: 73864 - DNA, 25 bp, probe
cattcaggatcaacttgaacgaata

SEQ ID NO: 73865 - DNA, 25 bp, probe
gcatctttgttgaaatgatccaagg

SEQ ID NO: 73866 - DNA, 25 bp, probe
atactccaacgaagtggttaccttg

SEQ ID NO: 73867 - DNA, 25 bp, probe
catactccaacgaagtggttacctt

SEQ ID NO: 73868 - DNA, 25 bp, probe
acattcaggatcaacttgaacgaat

SEQ ID NO: 73869 - DNA, 25 bp, probe
tgtggagacattagatggatgttct

SEQ ID NO: 73870 - DNA, 25 bp, probe
gtgtggagacattagatggatgttc

SEQ ID NO: 73871 - DNA, 25 bp, probe
acacatactccaacgaagtggttac

SEQ ID NO: 73872 - DNA, 25 bp, probe
cacacatactccaacgaagtggtta

SEQ ID NO: 73873 - DNA, 25 bp, probe
gatgtccttctaggctcaacagaat

SEQ ID NO: 73874 - DNA, 25 bp, probe
attcaggatcaacttgaacgaatat

SEQ ID NO: 73875 - DNA, 25 bp, probe
aaagtgttcagaagagatccagtga

SEQ ID NO: 73876 - DNA, 25 bp, probe
atgtgtggagacattagatggatgt

SEQ ID NO: 73877 - DNA, 25 bp, probe
gacattcaggatcaacttgaacgaa

SEQ ID NO: 73878 - DNA, 25 bp, probe
aagacattcaggatcaacttgaacg

SEQ ID NO: 73879 - DNA, 25 bp, probe
catgtgtggagacattagatggatg

SEQ ID NO: 73880 - DNA, 25 bp, probe
tcatgtgtggagacattagatggat

SEQ ID NO: 73881 - DNA, 25 bp, probe
ttaaagctggcagatttcgagatag

SEQ ID NO: 73882 - DNA, 25 bp, probe
aagtgttcagaagagatccagtgaa

SEQ ID NO: 73883 - DNA, 25 bp, probe
ttcatgtgtggagacattagatgga

SEQ ID NO: 73884 - DNA, 25 bp, probe
gttcatgtgtggagacattagatgg

SEQ ID NO: 73885 - DNA, 25 bp, probe
ggttcatgtgtggagacattagatg

SEQ ID NO: 73886 - DNA, 25 bp, probe
tgtgtggagacattagatggatgtt

SEQ ID NO: 73887 - DNA, 25 bp, probe
gagtaggttgcatctttgttgaaat

SEQ ID NO: 73888 - DNA, 25 bp, probe
gttaaagctggcagatttcgagata

SEQ ID NO: 73889 - DNA, 25 bp, probe
tcaggatcaacttgaacgaatattt

SEQ ID NO: 73890 - DNA, 25 bp, probe
ttcaggatcaacttgaacgaatatt

SEQ ID NO: 73891 - DNA, 25 bp, probe
gtaggttgcatctttgttgaaatga

SEQ ID NO: 73892 - DNA, 25 bp, probe
agtaggttgcatctttgttgaaatg

SEQ ID NO: 73893 - DNA, 25 bp, probe
cagtaaatgatagtgatggcaaagg

SEQ ID NO: 73894 - DNA, 25 bp, probe
tgacagtaaatgatagtgatggcaa

SEQ ID NO: 73895 - DNA, 25 bp, probe
ttgacagtaaatgatagtgatggca

SEQ ID NO: 73896 - DNA, 25 bp, probe
gttgacagtaaatgatagtgatggc

SEQ ID NO: 73897 - DNA, 25 bp, probe
tagtgatggcaaaggcgatattata

SEQ ID NO: 73898 - DNA, 25 bp, probe
atagtgatggcaaaggcgatattat

SEQ ID NO: 73899 - DNA, 25 bp, probe
acagtaaatgatagtgatggcaaag

SEQ ID NO: 73900 - DNA, 25 bp, probe
gacagtaaatgatagtgatggcaaa

SEQ ID NO: 73901 - DNA, 25 bp, probe
gatagtgatggcaaaggcgatatta

SEQ ID NO: 73902 - DNA, 25 bp, probe
agtaaatgatagtgatggcaaaggc

SEQ ID NO: 73903 - DNA, 25 bp, probe
agttgacagtaaatgatagtgatgg

SEQ ID NO: 73904 - DNA, 25 bp, probe
agaatgttggatatgatgtttcagc

SEQ ID NO: 73905 - DNA, 25 bp, probe
gagagttgacagtaaatgatagtga

SEQ ID NO: 73906 - DNA, 25 bp, probe
agagagttgacagtaaatgatagtg

SEQ ID NO: 73907 - DNA, 25 bp, probe
gatggcaaaggcgatattataaaca

SEQ ID NO: 73908 - DNA, 25 bp, probe
tgatggcaaaggcgatattataaac

SEQ ID NO: 73909 - DNA, 25 bp, probe
gtgatggcaaaggcgatattataaa

SEQ ID NO: 73910 - DNA, 25 bp, probe
agtgatggcaaaggcgatattataa

SEQ ID NO: 73911 - DNA, 25 bp, probe
tggcaaaggcgatattataaacatt

SEQ ID NO: 73912 - DNA, 25 bp, probe
atgatagtgatggcaaaggcgatat

SEQ ID NO: 73913 - DNA, 25 bp, probe
atggcaaaggcgatattataaacat

SEQ ID NO: 73914 - DNA, 25 bp, probe
aatgatagtgatggcaaaggcgata

SEQ ID NO: 73915 - DNA, 25 bp, probe
gagttgacagtaaatgatagtgatg

SEQ ID NO: 73916 - DNA, 25 bp, probe
tgatagtgatggcaaaggcgatatt

SEQ ID NO: 73917 - DNA, 25 bp, probe
gggaatatagagagttgacagtaaa

SEQ ID NO: 73918 - DNA, 25 bp, probe
gtaaatgatagtgatggcaaaggcg

SEQ ID NO: 73919 - DNA, 25 bp, probe
agagttgacagtaaatgatagtgat

SEQ ID NO: 73920 - DNA, 25 bp, probe
taaatgatagtgatggcaaaggcga

SEQ ID NO: 73921 - DNA, 25 bp, probe
gataaccacctgaaagggatgattg

SEQ ID NO: 73922 - DNA, 25 bp, probe
gttggatatgatgtttcagcttctc

SEQ ID NO: 73923 - DNA, 25 bp, probe
atgttggatatgatgtttcagcttc

SEQ ID NO: 73924 - DNA, 25 bp, probe
gaatgttggatatgatgtttcagct

SEQ ID NO: 73925 - DNA, 25 bp, probe
tgttggatatgatgtttcagcttct

SEQ ID NO: 73926 - DNA, 25 bp, probe
aagaatgttggatatgatgtttcag

SEQ ID NO: 73927 - DNA, 25 bp, probe
aatgttggatatgatgtttcagctt

SEQ ID NO: 73928 - DNA, 25 bp, probe
ggcaaaggcgatattataaacatta

SEQ ID NO: 73929 - DNA, 25 bp, probe
aaatgatagtgatggcaaaggcgat

SEQ ID NO: 73930 - DNA, 25 bp, probe
ggataaccacctgaaagggatgatt

SEQ ID NO: 73931 - DNA, 25 bp, probe
ctctaacctcagtgggattgaaacc

SEQ ID NO: 73932 - DNA, 25 bp, probe
aaagaatgttggatatgatgtttca

SEQ ID NO: 73933 - DNA, 25 bp, probe
aaaggataaccacctgaaagggatg

SEQ ID NO: 73934 - DNA, 25 bp, probe
tagagagttgacagtaaatgatagt

SEQ ID NO: 73935 - DNA, 25 bp, probe
tggggaatatagagagttgacagta

SEQ ID NO: 73936 - DNA, 25 bp, probe
ttggatatgatgtttcagcttctcc

SEQ ID NO: 73937 - DNA, 25 bp, probe
aagacttgaccacttacttggataa

SEQ ID NO: 73938 - DNA, 25 bp, probe
acagacagagaaaccaaactaactt

SEQ ID NO: 73939 - DNA, 25 bp, probe
aacagacagagaaaccaaactaact

SEQ ID NO: 73940 - DNA, 25 bp, probe
gaacagacagagaaaccaaactaac

SEQ ID NO: 73941 - DNA, 25 bp, probe
cagacagagaaaccaaactaacttt

SEQ ID NO: 73942 - DNA, 25 bp, probe
aagaagagactttgggaaatgagaa

SEQ ID NO: 73943 - DNA, 25 bp, probe
agaagagactttgggaaatgagaac

SEQ ID NO: 73944 - DNA, 25 bp, probe
cgaacagacagagaaaccaaactaa

SEQ ID NO: 73945 - DNA, 25 bp, probe
aaacaagaagagactttgggaaatg

SEQ ID NO: 73946 - DNA, 25 bp, probe
aacaagaagagactttgggaaatga

SEQ ID NO: 73947 - DNA, 25 bp, probe
caagaagagactttgggaaatgaga

SEQ ID NO: 73948 - DNA, 25 bp, probe
ccactgaaaccataaaggaatcaag

SEQ ID NO: 73949 - DNA, 25 bp, probe
acaagaagagactttgggaaatgag

SEQ ID NO: 73950 - DNA, 25 bp, probe
cactgaaaccataaaggaatcaagc

SEQ ID NO: 73951 - DNA, 25 bp, probe
tgaaaccataaaggaatcaagccat

SEQ ID NO: 73952 - DNA, 25 bp, probe
gaagagactttgggaaatgagaacc

SEQ ID NO: 73953 - DNA, 25 bp, probe
tgaattacgagcagaaagatccatc

SEQ ID NO: 73954 - DNA, 25 bp, probe
cccactgaaaccataaaggaatcaa

SEQ ID NO: 73955 - DNA, 25 bp, probe
tttagggagcacaaacaagaagaga

SEQ ID NO: 73956 - DNA, 25 bp, probe
gaattacgagcagaaagatccatct

SEQ ID NO: 73957 - DNA, 25 bp, probe
agacagagaaaccaaactaacttta

SEQ ID NO: 73958 - DNA, 25 bp, probe
acgaacagacagagaaaccaaacta

SEQ ID NO: 73959 - DNA, 25 bp, probe
ctgaaaccataaaggaatcaagcca

SEQ ID NO: 73960 - DNA, 25 bp, probe
actgaaaccataaaggaatcaagcc

SEQ ID NO: 73961 - DNA, 25 bp, probe
gaaaccataaaggaatcaagccatg

SEQ ID NO: 73962 - DNA, 25 bp, probe
gacagagaaaccaaactaactttag

SEQ ID NO: 73963 - DNA, 25 bp, probe
ctgaattacgagcagaaagatccat

SEQ ID NO: 73964 - DNA, 25 bp, probe
ttagggagcacaaacaagaagagac

SEQ ID NO: 73965 - DNA, 25 bp, probe
actttgggaaatgagaaccagttat

SEQ ID NO: 73966 - DNA, 25 bp, probe
agacttgaccacttacttggataaa

SEQ ID NO: 73967 - DNA, 25 bp, probe
gacttgaccacttacttggataaag

SEQ ID NO: 73968 - DNA, 25 bp, probe
gactttgggaaatgagaaccagtta

SEQ ID NO: 73969 - DNA, 25 bp, probe
tttgggaaatgagaaccagttatag

SEQ ID NO: 73970 - DNA, 25 bp, probe
ctttgggaaatgagaaccagttata

SEQ ID NO: 73971 - DNA, 25 bp, probe
caagacttgaccacttacttggata

SEQ ID NO: 73972 - DNA, 25 bp, probe
caacccttctttaccacaagctatg

SEQ ID NO: 73973 - DNA, 25 bp, probe
tcaacccttctttaccacaagctat

SEQ ID NO: 73974 - DNA, 25 bp, probe
tgcccactgaaaccataaaggaatc

SEQ ID NO: 73975 - DNA, 25 bp, probe
aagagactttgggaaatgagaacca

SEQ ID NO: 73976 - DNA, 25 bp, probe
tagggagcacaaacaagaagagact

SEQ ID NO: 73977 - DNA, 25 bp, probe
caaacaagaagagactttgggaaat

SEQ ID NO: 73978 - DNA, 25 bp, probe
actgtcaacccttctttaccacaag

SEQ ID NO: 73979 - DNA, 25 bp, probe
gactgtcaacccttctttaccacaa

SEQ ID NO: 73980 - DNA, 25 bp, probe
cacgaacagacagagaaaccaaact

SEQ ID NO: 73981 - DNA, 25 bp, probe
aatatagcaggaacaacacattcag

SEQ ID NO: 73982 - DNA, 25 bp, probe
gataacacttcaccactcttcagaa

SEQ ID NO: 73983 - DNA, 25 bp, probe
gacataatatagcaggaacaacaca

SEQ ID NO: 73984 - DNA, 25 bp, probe
ataacacttcaccactcttcagaac

SEQ ID NO: 73985 - DNA, 25 bp, probe
atatagcaggaacaacacattcagg

SEQ ID NO: 73986 - DNA, 25 bp, probe
ttaacaccaagtcctacaacacaag

SEQ ID NO: 73987 - DNA, 25 bp, probe
agacataatatagcaggaacaacac

SEQ ID NO: 73988 - DNA, 25 bp, probe
ctaatccacttcactctgatgactc

SEQ ID NO: 73989 - DNA, 25 bp, probe
tactaatccacttcactctgatgac

SEQ ID NO: 73990 - DNA, 25 bp, probe
atgataacacttcaccactcttcag

SEQ ID NO: 73991 - DNA, 25 bp, probe
gttagcaagtgaacataatcatcca

SEQ ID NO: 73992 - DNA, 25 bp, probe
ttagcaagtgaacataatcatccag

SEQ ID NO: 73993 - DNA, 25 bp, probe
acataatatagcaggaacaacacat

SEQ ID NO: 73994 - DNA, 25 bp, probe
taatccacttcactctgatgactca

SEQ ID NO: 73995 - DNA, 25 bp, probe
actaatccacttcactctgatgact

SEQ ID NO: 73996 - DNA, 25 bp, probe
aatccaacagaagccacagatattg

SEQ ID NO: 73997 - DNA, 25 bp, probe
ttactaatccacttcactctgatga

SEQ ID NO: 73998 - DNA, 25 bp, probe
tagcaagtgaacataatcatccagc

SEQ ID NO: 73999 - DNA, 25 bp, probe
taatatagcaggaacaacacattca

SEQ ID NO: 74000 - DNA, 25 bp, probe
tgataacacttcaccactcttcaga

SEQ ID NO: 74001 - DNA, 25 bp, probe
taacaccaagtcctacaacacaagt

SEQ ID NO: 74002 - DNA, 25 bp, probe
taacacttcaccactcttcagaaca

SEQ ID NO: 74003 - DNA, 25 bp, probe
tatagcaggaacaacacattcaggt

SEQ ID NO: 74004 - DNA, 25 bp, probe
catgataacacttcaccactcttca

SEQ ID NO: 74005 - DNA, 25 bp, probe
cataatatagcaggaacaacacatt

SEQ ID NO: 74006 - DNA, 25 bp, probe
aagatgttgatgttagtgaagattc

SEQ ID NO: 74007 - DNA, 25 bp, probe
tagacataatatagcaggaacaaca

SEQ ID NO: 74008 - DNA, 25 bp, probe
agatgttgatgttagtgaagattca

SEQ ID NO: 74009 - DNA, 25 bp, probe
aacaccaagtcctacaacacaagtt

SEQ ID NO: 74010 - DNA, 25 bp, probe
aaatccaacagaagccacagatatt

SEQ ID NO: 74011 - DNA, 25 bp, probe
ataatatagcaggaacaacacattc

SEQ ID NO: 74012 - DNA, 25 bp, probe
tttaacaccaagtcctacaacacaa

SEQ ID NO: 74013 - DNA, 25 bp, probe
ctttcagtgacaagagagaacaaat

SEQ ID NO: 74014 - DNA, 25 bp, probe
aagaactcctgaatcgtttgtgtta

SEQ ID NO: 74015 - DNA, 25 bp, probe
gagtttaacaccaagtcctacaaca

SEQ ID NO: 74016 - DNA, 25 bp, probe
tgagtttaacaccaagtcctacaac

SEQ ID NO: 74017 - DNA, 25 bp, probe
catagaatgtccacctactttcagt

SEQ ID NO: 74018 - DNA, 25 bp, probe
agaactcctgaatcgtttgtgttag

SEQ ID NO: 74019 - DNA, 25 bp, probe
ctcagactcagatgaaagaaactct

SEQ ID NO: 74020 - DNA, 25 bp, probe
gatgactcagactcagatgaaagaa

SEQ ID NO: 74021 - DNA, 25 bp, probe
tactttcagtgacaagagagaacaa

SEQ ID NO: 74022 - DNA, 25 bp, probe
ctactttcagtgacaagagagaaca

SEQ ID NO: 74023 - DNA, 25 bp, probe
gcatagaatgtccacctactttcag

SEQ ID NO: 74024 - DNA, 25 bp, probe
actcagactcagatgaaagaaactc

SEQ ID NO: 74025 - DNA, 25 bp, probe
ataaacagggtacttcttgggaaga

SEQ ID NO: 74026 - DNA, 25 bp, probe
gaagaagaatggggagctgaaattg

SEQ ID NO: 74027 - DNA, 25 bp, probe
ggaagaagaatggggagctgaaatt

SEQ ID NO: 74028 - DNA, 25 bp, probe
aagaagaatggggagctgaaattgg

SEQ ID NO: 74029 - DNA, 25 bp, probe
taaacagggtacttcttgggaagaa

SEQ ID NO: 74030 - DNA, 25 bp, probe
gggaagaagaatggggagctgaaat

SEQ ID NO: 74031 - DNA, 25 bp, probe
cctttcccaagtgatccttgactcc

SEQ ID NO: 74032 - DNA, 25 bp, probe
ccctttcccaagtgatccttgactc

SEQ ID NO: 74033 - DNA, 25 bp, probe
ctttcccaagtgatccttgactccg

SEQ ID NO: 74034 - DNA, 25 bp, probe
gggagctgaaattggctgattttgg

SEQ ID NO: 74035 - DNA, 25 bp, probe
ggggagctgaaattggctgattttg

SEQ ID NO: 74036 - DNA, 25 bp, probe
atggggagctgaaattggctgattt

SEQ ID NO: 74037 - DNA, 25 bp, probe
aatggggagctgaaattggctgatt

SEQ ID NO: 74038 - DNA, 25 bp, probe
ctgaaattggctgattttggcctgg

SEQ ID NO: 74039 - DNA, 25 bp, probe
ggaatgagataatgaagacaacaca

SEQ ID NO: 74040 - DNA, 25 bp, probe
aatgagataatgaagacaacacact

SEQ ID NO: 74041 - DNA, 25 bp, probe
gaatgagataatgaagacaacacac

SEQ ID NO: 74042 - DNA, 25 bp, probe
tgagataatgaagacaacacactat

SEQ ID NO: 74043 - DNA, 25 bp, probe
atgagataatgaagacaacacacta

SEQ ID NO: 74044 - DNA, 25 bp, probe
gggaatgagataatgaagacaacac

SEQ ID NO: 74045 - DNA, 25 bp, probe
agggaatgagataatgaagacaaca

SEQ ID NO: 74046 - DNA, 25 bp, probe
cagggaatgagataatgaagacaac

SEQ ID NO: 74047 - DNA, 25 bp, probe
gagataatgaagacaacacactatt

SEQ ID NO: 74048 - DNA, 25 bp, probe
gaaagtacatttgtccaggaatcag

SEQ ID NO: 74049 - DNA, 25 bp, probe
tcagggaatgagataatgaagacaa

SEQ ID NO: 74050 - DNA, 25 bp, probe
atgtcagggaatgagataatgaaga

SEQ ID NO: 74051 - DNA, 25 bp, probe
aaagtacatttgtccaggaatcagg

SEQ ID NO: 74052 - DNA, 25 bp, probe
taatgaagacaacacactatttggt

SEQ ID NO: 74053 - DNA, 25 bp, probe
gtcagggaatgagataatgaagaca

SEQ ID NO: 74054 - DNA, 25 bp, probe
tgtcagggaatgagataatgaagac

SEQ ID NO: 74055 - DNA, 25 bp, probe
aatgaagacaacacactatttggtg

SEQ ID NO: 74056 - DNA, 25 bp, probe
acacactatttggtggacaagaaat

SEQ ID NO: 74057 - DNA, 25 bp, probe
catgtcagggaatgagataatgaag

SEQ ID NO: 74058 - DNA, 25 bp, probe
aacacactatttggtggacaagaaa

SEQ ID NO: 74059 - DNA, 25 bp, probe
atgaagacaacacactatttggtgg

SEQ ID NO: 74060 - DNA, 25 bp, probe
aaggaaagtacatttgtccaggaat

SEQ ID NO: 74061 - DNA, 25 bp, probe
ataatgaagacaacacactatttgg

SEQ ID NO: 74062 - DNA, 25 bp, probe
caacacactatttggtggacaagaa

SEQ ID NO: 74063 - DNA, 25 bp, probe
aggaaagtacatttgtccaggaatc

SEQ ID NO: 74064 - DNA, 25 bp, probe
ggaaagtacatttgtccaggaatca

SEQ ID NO: 74065 - DNA, 25 bp, probe
caaggaaagtacatttgtccaggaa

SEQ ID NO: 74066 - DNA, 25 bp, probe
gaagacaacacactatttggtggac

SEQ ID NO: 74067 - DNA, 25 bp, probe
aagtacatttgtccaggaatcagga

SEQ ID NO: 74068 - DNA, 25 bp, probe
gacaacacactatttggtggacaag

SEQ ID NO: 74069 - DNA, 25 bp, probe
cactatttggtggacaagaaatacc

SEQ ID NO: 74070 - DNA, 25 bp, probe
tgaagacaacacactatttggtgga

SEQ ID NO: 74071 - DNA, 25 bp, probe
actatttggtggacaagaaataccc

SEQ ID NO: 74072 - DNA, 25 bp, probe
acactatttggtggacaagaaatac

SEQ ID NO: 74073 - DNA, 25 bp, probe
cacactatttggtggacaagaaata

SEQ ID NO: 74074 - DNA, 25 bp, probe
agtacatttgtccaggaatcaggag

SEQ ID NO: 74075 - DNA, 25 bp, probe
acaacacactatttggtggacaaga

SEQ ID NO: 74076 - DNA, 25 bp, probe
agacaacacactatttggtggacaa

SEQ ID NO: 74077 - DNA, 25 bp, probe
aagacaacacactatttggtggaca

SEQ ID NO: 74078 - DNA, 25 bp, probe
ggttcgcaaggaaagtacatttgtc

SEQ ID NO: 74079 - DNA, 25 bp, probe
gggaaaataatgccatcttcagttt

SEQ ID NO: 74080 - DNA, 25 bp, probe
agataatgaagacaacacactattt

SEQ ID NO: 74081 - DNA, 25 bp, probe
agggaaaataatgccatcttcagtt

SEQ ID NO: 74082 - DNA, 25 bp, probe
aagggaaaataatgccatcttcagt

SEQ ID NO: 74083 - DNA, 25 bp, probe
ctaacaatgtccactacgagaacta

SEQ ID NO: 74084 - DNA, 25 bp, probe
tactaacaatgtccactacgagaac

SEQ ID NO: 74085 - DNA, 25 bp, probe
ttactaacaatgtccactacgagaa

SEQ ID NO: 74086 - DNA, 25 bp, probe
aacaatgtccactacgagaactatg

SEQ ID NO: 74087 - DNA, 25 bp, probe
taacaatgtccactacgagaactat

SEQ ID NO: 74088 - DNA, 25 bp, probe
gttactaacaatgtccactacgaga

SEQ ID NO: 74089 - DNA, 25 bp, probe
actaacaatgtccactacgagaact

SEQ ID NO: 74090 - DNA, 25 bp, probe
gtgacttacaatggagttgataaca

SEQ ID NO: 74091 - DNA, 25 bp, probe
gctgtgacttacaatggagttgata

SEQ ID NO: 74092 - DNA, 25 bp, probe
atcaactcattattcctcacagatt

SEQ ID NO: 74093 - DNA, 25 bp, probe
aatcaactcattattcctcacagat

SEQ ID NO: 74094 - DNA, 25 bp, probe
cactacgagaactatggaagcagaa

SEQ ID NO: 74095 - DNA, 25 bp, probe
tgtgacttacaatggagttgataac

SEQ ID NO: 74096 - DNA, 25 bp, probe
tgacttacaatggagttgataacaa

SEQ ID NO: 74097 - DNA, 25 bp, probe
ctgtgacttacaatggagttgataa

SEQ ID NO: 74098 - DNA, 25 bp, probe
taatcaactcattattcctcacaga

SEQ ID NO: 74099 - DNA, 25 bp, probe
tgataacaacaagaataaagggcag

SEQ ID NO: 74100 - DNA, 25 bp, probe
gataacaacaagaataaagggcagc

SEQ ID NO: 74101 - DNA, 25 bp, probe
actacgagaactatggaagcagaaa

SEQ ID NO: 74102 - DNA, 25 bp, probe
gcaggacttgaaagatgttactaac

SEQ ID NO: 74103 - DNA, 25 bp, probe
cttcagtgctgatctactaccagta

SEQ ID NO: 74104 - DNA, 25 bp, probe
ttgataacaacaagaataaagggca

SEQ ID NO: 74105 - DNA, 25 bp, probe
gatttgtattctccagagtacccag

SEQ ID NO: 74106 - DNA, 25 bp, probe
ttcagtgctgatctactaccagtac

SEQ ID NO: 74107 - DNA, 25 bp, probe
ttaatcaactcattattcctcacag

SEQ ID NO: 74108 - DNA, 25 bp, probe
tcaactcattattcctcacagattt

SEQ ID NO: 74109 - DNA, 25 bp, probe
acaatgtccactacgagaactatgg

SEQ ID NO: 74110 - DNA, 25 bp, probe
ctcacagatttgtattctccagagt

SEQ ID NO: 74111 - DNA, 25 bp, probe
ttcctcacagatttgtattctccag

SEQ ID NO: 74112 - DNA, 25 bp, probe
attcctcacagatttgtattctcca

SEQ ID NO: 74113 - DNA, 25 bp, probe
cagatttgtattctccagagtaccc

SEQ ID NO: 74114 - DNA, 25 bp, probe
agatttgtattctccagagtaccca

SEQ ID NO: 74115 - DNA, 25 bp, probe
cctcacagatttgtattctccagag

SEQ ID NO: 74116 - DNA, 25 bp, probe
tcctcacagatttgtattctccaga

SEQ ID NO: 74117 - DNA, 25 bp, probe
tcacagatttgtattctccagagta

SEQ ID NO: 74118 - DNA, 25 bp, probe
caactcattattcctcacagatttg

SEQ ID NO: 74119 - DNA, 25 bp, probe
cgacattaatcaactcattattcct

SEQ ID NO: 74120 - DNA, 25 bp, probe
acagatttgtattctccagagtacc

SEQ ID NO: 74121 - DNA, 25 bp, probe
agctgtgacttacaatggagttgat

SEQ ID NO: 74122 - DNA, 25 bp, probe
tattctccagagtacccagctatta

SEQ ID NO: 74123 - DNA, 25 bp, probe
ttctccagagtacccagctattaat

SEQ ID NO: 74124 - DNA, 25 bp, probe
attctccagagtacccagctattaa

SEQ ID NO: 74125 - DNA, 25 bp, probe
aactcattattcctcacagatttgt

SEQ ID NO: 74126 - DNA, 25 bp, probe
cacagatttgtattctccagagtac

SEQ ID NO: 74127 - DNA, 25 bp, probe
ccagaccagaagttagttcaatgaa

SEQ ID NO: 74128 - DNA, 25 bp, probe
agaccagaagttagttcaatgaatg

SEQ ID NO: 74129 - DNA, 25 bp, probe
cagaccagaagttagttcaatgaat

SEQ ID NO: 74130 - DNA, 25 bp, probe
gttagttcaatgaatggacttggag

SEQ ID NO: 74131 - DNA, 25 bp, probe
agttagttcaatgaatggacttgga

SEQ ID NO: 74132 - DNA, 25 bp, probe
ttagttcaatgaatggacttggagg

SEQ ID NO: 74133 - DNA, 25 bp, probe
cagaagttagttcaatgaatggact

SEQ ID NO: 74134 - DNA, 25 bp, probe
gattctaagaagcaagtacaagcgg

SEQ ID NO: 74135 - DNA, 25 bp, probe
ggattctaagaagcaagtacaagcg

SEQ ID NO: 74136 - DNA, 25 bp, probe
tctaagaagcaagtacaagcggatt

SEQ ID NO: 74137 - DNA, 25 bp, probe
ccagaagttagttcaatgaatggac

SEQ ID NO: 74138 - DNA, 25 bp, probe
accagaagttagttcaatgaatgga

SEQ ID NO: 74139 - DNA, 25 bp, probe
gaccagaagttagttcaatgaatgg

SEQ ID NO: 74140 - DNA, 25 bp, probe
ttctaagaagcaagtacaagcggat

SEQ ID NO: 74141 - DNA, 25 bp, probe
attctaagaagcaagtacaagcgga

SEQ ID NO: 74142 - DNA, 25 bp, probe
ctaagaagcaagtacaagcggattg

SEQ ID NO: 74143 - DNA, 25 bp, probe
cagccttatggaaagactcattcta

SEQ ID NO: 74144 - DNA, 25 bp, probe
agccttatggaaagactcattctag

SEQ ID NO: 74145 - DNA, 25 bp, probe
tgggattctaagaagcaagtacaag

SEQ ID NO: 74146 - DNA, 25 bp, probe
gtgggattctaagaagcaagtacaa

SEQ ID NO: 74147 - DNA, 25 bp, probe
tgagtgggattctaagaagcaagta

SEQ ID NO: 74148 - DNA, 25 bp, probe
gagtgggattctaagaagcaagtac

SEQ ID NO: 74149 - DNA, 25 bp, probe
gatgagtgggattctaagaagcaag

SEQ ID NO: 74150 - DNA, 25 bp, probe
cttatgccatttgctgtctgcttta

SEQ ID NO: 74151 - DNA, 25 bp, probe
agatgagtgggattctaagaagcaa

SEQ ID NO: 74152 - DNA, 25 bp, probe
aagttagttcaatgaatggacttgg

SEQ ID NO: 74153 - DNA, 25 bp, probe
agtgggattctaagaagcaagtaca

SEQ ID NO: 74154 - DNA, 25 bp, probe
ttatgccatttgctgtctgctttac

SEQ ID NO: 74155 - DNA, 25 bp, probe
atgagtgggattctaagaagcaagt

SEQ ID NO: 74156 - DNA, 25 bp, probe
cccagaccagaagttagttcaatga

SEQ ID NO: 74157 - DNA, 25 bp, probe
gggattctaagaagcaagtacaagc

SEQ ID NO: 74158 - DNA, 25 bp, probe
ctagatgagtgggattctaagaagc

SEQ ID NO: 74159 - DNA, 25 bp, probe
cttcacttatgccatttgctgtctg

SEQ ID NO: 74160 - DNA, 25 bp, probe
tagatgagtgggattctaagaagca

SEQ ID NO: 74161 - DNA, 25 bp, probe
gaagttagttcaatgaatggacttg

SEQ ID NO: 74162 - DNA, 25 bp, probe
agaagttagttcaatgaatggactt

SEQ ID NO: 74163 - DNA, 25 bp, probe
tagttcaatgaatggacttggaggg

SEQ ID NO: 74164 - DNA, 25 bp, probe
ccagccttatggaaagactcattct

SEQ ID NO: 74165 - DNA, 25 bp, probe
ccttcacttatgccatttgctgtct

SEQ ID NO: 74166 - DNA, 25 bp, probe
gccttatggaaagactcattctaga

SEQ ID NO: 74167 - DNA, 25 bp, probe
gcccagaccagaagttagttcaatg

SEQ ID NO: 74168 - DNA, 25 bp, probe
acttatgccatttgctgtctgcttt

SEQ ID NO: 74169 - DNA, 25 bp, probe
agcccagaccagaagttagttcaat

SEQ ID NO: 74170 - DNA, 25 bp, probe
tatgccatttgctgtctgctttacc

SEQ ID NO: 74171 - DNA, 25 bp, probe
agccagagttgaatgttattatcca

SEQ ID NO: 74172 - DNA, 25 bp, probe
ccagagttgaatgttattatccagc

SEQ ID NO: 74173 - DNA, 25 bp, probe
gccagagttgaatgttattatccag

SEQ ID NO: 74174 - DNA, 25 bp, probe
cagccagagttgaatgttattatcc

SEQ ID NO: 74175 - DNA, 25 bp, probe
gcagccagagttgaatgttattatc

SEQ ID NO: 74176 - DNA, 25 bp, probe
aataacaatggttctagttgcttca

SEQ ID NO: 74177 - DNA, 25 bp, probe
ataacaatggttctagttgcttcat

SEQ ID NO: 74178 - DNA, 25 bp, probe
taacaatggttctagttgcttcatg

SEQ ID NO: 74179 - DNA, 25 bp, probe
ggcagccagagttgaatgttattat

SEQ ID NO: 74180 - DNA, 25 bp, probe
ccttaataacaatggttctagttgc

SEQ ID NO: 74181 - DNA, 25 bp, probe
gccttaataacaatggttctagttg

SEQ ID NO: 74182 - DNA, 25 bp, probe
cagagttgaatgttattatccagct

SEQ ID NO: 74183 - DNA, 25 bp, probe
aacaatggttctagttgcttcatgg

SEQ ID NO: 74184 - DNA, 25 bp, probe
aggcagccagagttgaatgttatta

SEQ ID NO: 74185 - DNA, 25 bp, probe
gacacacactactgcaatgatatct

SEQ ID NO: 74186 - DNA, 25 bp, probe
agagttgaatgttattatccagctt

SEQ ID NO: 74187 - DNA, 25 bp, probe
caatggttctagttgcttcatggac

SEQ ID NO: 74188 - DNA, 25 bp, probe
acacacactactgcaatgatatctg

SEQ ID NO: 74189 - DNA, 25 bp, probe
aatggttctagttgcttcatggact

SEQ ID NO: 74190 - DNA, 25 bp, probe
taataacaatggttctagttgcttc

SEQ ID NO: 74191 - DNA, 25 bp, probe
cttaataacaatggttctagttgct

SEQ ID NO: 74192 - DNA, 25 bp, probe
tttggaaactttaggttcttctgtt

SEQ ID NO: 74193 - DNA, 25 bp, probe
gcctagagatcaagaatatctgagt

SEQ ID NO: 74194 - DNA, 25 bp, probe
acaatggttctagttgcttcatgga

SEQ ID NO: 74195 - DNA, 25 bp, probe
atggttctagttgcttcatggacta

SEQ ID NO: 74196 - DNA, 25 bp, probe
tggttctagttgcttcatggactaa

SEQ ID NO: 74197 - DNA, 25 bp, probe
cgacacacactactgcaatgatatc

SEQ ID NO: 74198 - DNA, 25 bp, probe
ttgttgctgctctggtattctcaag

SEQ ID NO: 74199 - DNA, 25 bp, probe
gtattctcaaggcttgcattaccag

SEQ ID NO: 74200 - DNA, 25 bp, probe
ctggtattctcaaggcttgcattac

SEQ ID NO: 74201 - DNA, 25 bp, probe
ttaataacaatggttctagttgctt

SEQ ID NO: 74202 - DNA, 25 bp, probe
acgacacacactactgcaatgatat

SEQ ID NO: 74203 - DNA, 25 bp, probe
tctggtattctcaaggcttgcatta

SEQ ID NO: 74204 - DNA, 25 bp, probe
ataagcagttgccagtgacattctc

SEQ ID NO: 74205 - DNA, 25 bp, probe
gataagcagttgccagtgacattct

SEQ ID NO: 74206 - DNA, 25 bp, probe
aacgacacacactactgcaatgata

SEQ ID NO: 74207 - DNA, 25 bp, probe
taacgacacacactactgcaatgat

SEQ ID NO: 74208 - DNA, 25 bp, probe
tggccttaataacaatggttctagt

SEQ ID NO: 74209 - DNA, 25 bp, probe
gaatgttattatccagctttgttgc

SEQ ID NO: 74210 - DNA, 25 bp, probe
cctggccttaataacaatggttcta

SEQ ID NO: 74211 - DNA, 25 bp, probe
ctggccttaataacaatggttctag

SEQ ID NO: 74212 - DNA, 25 bp, probe
aaagccatattcatcttgatcctag

SEQ ID NO: 74213 - DNA, 25 bp, probe
gaggcagccagagttgaatgttatt

SEQ ID NO: 74214 - DNA, 25 bp, probe
ggccttaataacaatggttctagtt

SEQ ID NO: 74215 - DNA, 25 bp, probe
tataactctggtggtctccttacaa

SEQ ID NO: 74216 - DNA, 25 bp, probe
atataactctggtggtctccttaca

SEQ ID NO: 74217 - DNA, 25 bp, probe
aatataactctggtggtctccttac

SEQ ID NO: 74218 - DNA, 25 bp, probe
ataactctggtggtctccttacaat

SEQ ID NO: 74219 - DNA, 25 bp, probe
gaatataactctggtggtctcctta

SEQ ID NO: 74220 - DNA, 25 bp, probe
taactctggtggtctccttacaatg

SEQ ID NO: 74221 - DNA, 25 bp, probe
caaggacagtattgagtcagatgat

SEQ ID NO: 74222 - DNA, 25 bp, probe
tacaaggacagtattgagtcagatg

SEQ ID NO: 74223 - DNA, 25 bp, probe
acaaggacagtattgagtcagatga

SEQ ID NO: 74224 - DNA, 25 bp, probe
aaggacagtattgagtcagatgatc

SEQ ID NO: 74225 - DNA, 25 bp, probe
gtacaaggacagtattgagtcagat

SEQ ID NO: 74226 - DNA, 25 bp, probe
aagtacaaggacagtattgagtcag

SEQ ID NO: 74227 - DNA, 25 bp, probe
gacagtattgagtcagatgatcctg

SEQ ID NO: 74228 - DNA, 25 bp, probe
agtacaaggacagtattgagtcaga

SEQ ID NO: 74229 - DNA, 25 bp, probe
gagaggagttcaccagtgttagaag

SEQ ID NO: 74230 - DNA, 25 bp, probe
taagtacaaggacagtattgagtca

SEQ ID NO: 74231 - DNA, 25 bp, probe
aagagaggagttcaccagtgttaga

SEQ ID NO: 74232 - DNA, 25 bp, probe
ggaatataactctggtggtctcctt

SEQ ID NO: 74233 - DNA, 25 bp, probe
agagaggagttcaccagtgttagaa

SEQ ID NO: 74234 - DNA, 25 bp, probe
ctaagtacaaggacagtattgagtc

SEQ ID NO: 74235 - DNA, 25 bp, probe
gaggaatataactctggtggtctcc

SEQ ID NO: 74236 - DNA, 25 bp, probe
ggacagtattgagtcagatgatcct

SEQ ID NO: 74237 - DNA, 25 bp, probe
aggacagtattgagtcagatgatcc

SEQ ID NO: 74238 - DNA, 25 bp, probe
tcagtctctttagaagcagtgtatg

SEQ ID NO: 74239 - DNA, 25 bp, probe
gtcagtctctttagaagcagtgtat

SEQ ID NO: 74240 - DNA, 25 bp, probe
atttgtcagtctctttagaagcagt

SEQ ID NO: 74241 - DNA, 25 bp, probe
gatttgtcagtctctttagaagcag

SEQ ID NO: 74242 - DNA, 25 bp, probe
aggatttgtcagtctctttagaagc

SEQ ID NO: 74243 - DNA, 25 bp, probe
agaggagttcaccagtgttagaagt

SEQ ID NO: 74244 - DNA, 25 bp, probe
ggatttgtcagtctctttagaagca

SEQ ID NO: 74245 - DNA, 25 bp, probe
gcaggatttgtcagtctctttagaa

SEQ ID NO: 74246 - DNA, 25 bp, probe
agtctctttagaagcagtgtatgga

SEQ ID NO: 74247 - DNA, 25 bp, probe
cagtctctttagaagcagtgtatgg

SEQ ID NO: 74248 - DNA, 25 bp, probe
caggatttgtcagtctctttagaag

SEQ ID NO: 74249 - DNA, 25 bp, probe
tttgtcagtctctttagaagcagtg

SEQ ID NO: 74250 - DNA, 25 bp, probe
tgtcagtctctttagaagcagtgta

SEQ ID NO: 74251 - DNA, 25 bp, probe
aggtgatgcagacaaggagataatt

SEQ ID NO: 74252 - DNA, 25 bp, probe
aaggtgatgcagacaaggagataat

SEQ ID NO: 74253 - DNA, 25 bp, probe
tcattgccacagtacaagctaagta

SEQ ID NO: 74254 - DNA, 25 bp, probe
aggagcaaattctgatgaaatactt

SEQ ID NO: 74255 - DNA, 25 bp, probe
aaggagcaaattctgatgaaatact

SEQ ID NO: 74256 - DNA, 25 bp, probe
gaaggagcaaattctgatgaaatac

SEQ ID NO: 74257 - DNA, 25 bp, probe
tctttagaagcagtgtatggacaag

SEQ ID NO: 74258 - DNA, 25 bp, probe
ctctttagaagcagtgtatggacaa

SEQ ID NO: 74259 - DNA, 25 bp, probe
ctacaacctagagaagaagcgacat

SEQ ID NO: 74260 - DNA, 25 bp, probe
tacaacctagagaagaagcgacatg

SEQ ID NO: 74261 - DNA, 25 bp, probe
caacctagagaagaagcgacatgag

SEQ ID NO: 74262 - DNA, 25 bp, probe
cctacaacctagagaagaagcgaca

SEQ ID NO: 74263 - DNA, 25 bp, probe
acctacaacctagagaagaagcgac

SEQ ID NO: 74264 - DNA, 25 bp, probe
acaacctagagaagaagcgacatga

SEQ ID NO: 74265 - DNA, 25 bp, probe
tataggctgcatcatctttgagtac

SEQ ID NO: 74266 - DNA, 25 bp, probe
gtataggctgcatcatctttgagta

SEQ ID NO: 74267 - DNA, 25 bp, probe
gagtataggctgcatcatctttgag

SEQ ID NO: 74268 - DNA, 25 bp, probe
atccgaaagacaagaaaacagaaat

SEQ ID NO: 74269 - DNA, 25 bp, probe
agtataggctgcatcatctttgagt

SEQ ID NO: 74270 - DNA, 25 bp, probe
tccgaaagacaagaaaacagaaata

SEQ ID NO: 74271 - DNA, 25 bp, probe
catgctagagtatgaaccagctcag

SEQ ID NO: 74272 - DNA, 25 bp, probe
gatccgaaagacaagaaaacagaaa

SEQ ID NO: 74273 - DNA, 25 bp, probe
gatgatccgaaagacaagaaaacag

SEQ ID NO: 74274 - DNA, 25 bp, probe
atgatccgaaagacaagaaaacaga

SEQ ID NO: 74275 - DNA, 25 bp, probe
aacctagagaagaagcgacatgagc

SEQ ID NO: 74276 - DNA, 25 bp, probe
tgatccgaaagacaagaaaacagaa

SEQ ID NO: 74277 - DNA, 25 bp, probe
cagaagtcatccttgagttgggttg

SEQ ID NO: 74278 - DNA, 25 bp, probe
ccgaaagacaagaaaacagaaatat

SEQ ID NO: 74279 - DNA, 25 bp, probe
ctgcatcatctttgagtactatgtg

SEQ ID NO: 74280 - DNA, 25 bp, probe
catctttgagtactatgtgggcttc

SEQ ID NO: 74281 - DNA, 25 bp, probe
tgcatcatctttgagtactatgtgg

SEQ ID NO: 74282 - DNA, 25 bp, probe
gctgcatcatctttgagtactatgt

SEQ ID NO: 74283 - DNA, 25 bp, probe
taggctgcatcatctttgagtacta

SEQ ID NO: 74284 - DNA, 25 bp, probe
catcatctttgagtactatgtgggc

SEQ ID NO: 74285 - DNA, 25 bp, probe
gcatcatctttgagtactatgtggg

SEQ ID NO: 74286 - DNA, 25 bp, probe
atcatctttgagtactatgtgggct

SEQ ID NO: 74287 - DNA, 25 bp, probe
atctttgagtactatgtgggcttca

SEQ ID NO: 74288 - DNA, 25 bp, probe
tcatctttgagtactatgtgggctt

SEQ ID NO: 74289 - DNA, 25 bp, probe
ggctgcatcatctttgagtactatg

SEQ ID NO: 74290 - DNA, 25 bp, probe
aggctgcatcatctttgagtactat

SEQ ID NO: 74291 - DNA, 25 bp, probe
ataggctgcatcatctttgagtact

SEQ ID NO: 74292 - DNA, 25 bp, probe
atgacaacagacagcatctagccac

SEQ ID NO: 74293 - DNA, 25 bp, probe
atctagccacgatggaaaggatctt

SEQ ID NO: 74294 - DNA, 25 bp, probe
ggatgatccgaaagacaagaaaaca

SEQ ID NO: 74295 - DNA, 25 bp, probe
agaagtcatccttgagttgggttgg

SEQ ID NO: 74296 - DNA, 25 bp, probe
tctttgagtactatgtgggcttcac

SEQ ID NO: 74297 - DNA, 25 bp, probe
acccatgacaacagacagcatctag

SEQ ID NO: 74298 - DNA, 25 bp, probe
atgctagagtatgaaccagctcagc

SEQ ID NO: 74299 - DNA, 25 bp, probe
gacccatgacaacagacagcatcta

SEQ ID NO: 74300 - DNA, 25 bp, probe
aagcccttcagcatcctttcttctc

SEQ ID NO: 74301 - DNA, 25 bp, probe
aagtcatccttgagttgggttggtc

SEQ ID NO: 74302 - DNA, 25 bp, probe
gaagtcatccttgagttgggttggt

SEQ ID NO: 74303 - DNA, 25 bp, probe
tattccagagacgaagaccacatag

SEQ ID NO: 74304 - DNA, 25 bp, probe
ctattccagagacgaagaccacata

SEQ ID NO: 74305 - DNA, 25 bp, probe
gaagactattccagagacgaagacc

SEQ ID NO: 74306 - DNA, 25 bp, probe
aagactattccagagacgaagacca

SEQ ID NO: 74307 - DNA, 25 bp, probe
actattccagagacgaagaccacat

SEQ ID NO: 74308 - DNA, 25 bp, probe
aacgggagattatttgtttgaacca

SEQ ID NO: 74309 - DNA, 25 bp, probe
caacgggagattatttgtttgaacc

SEQ ID NO: 74310 - DNA, 25 bp, probe
acgggagattatttgtttgaaccac

SEQ ID NO: 74311 - DNA, 25 bp, probe
gggagattatttgtttgaaccacat

SEQ ID NO: 74312 - DNA, 25 bp, probe
gcaacgggagattatttgtttgaac

SEQ ID NO: 74313 - DNA, 25 bp, probe
ccgatgttagaaatggttccagaaa

SEQ ID NO: 74314 - DNA, 25 bp, probe
agactattccagagacgaagaccac

SEQ ID NO: 74315 - DNA, 25 bp, probe
tgtactgattaaactgtcgtgtgtt

SEQ ID NO: 74316 - DNA, 25 bp, probe
gtgtactgattaaactgtcgtgtgt

SEQ ID NO: 74317 - DNA, 25 bp, probe
agatttcctgatcccgatgttagaa

SEQ ID NO: 74318 - DNA, 25 bp, probe
agtgtactgattaaactgtcgtgtg

SEQ ID NO: 74319 - DNA, 25 bp, probe
gactattccagagacgaagaccaca

SEQ ID NO: 74320 - DNA, 25 bp, probe
ctgatcccgatgttagaaatggttc

SEQ ID NO: 74321 - DNA, 25 bp, probe
ggagattatttgtttgaaccacatt

SEQ ID NO: 74322 - DNA, 25 bp, probe
cgggagattatttgtttgaaccaca

SEQ ID NO: 74323 - DNA, 25 bp, probe
tacagatttcctgatcccgatgtta

SEQ ID NO: 74324 - DNA, 25 bp, probe
ggcaacgggagattatttgtttgaa

SEQ ID NO: 74325 - DNA, 25 bp, probe
gaagaccacatagcccacatcatag

SEQ ID NO: 74326 - DNA, 25 bp, probe
cacagtttacagatttcctgatccc

SEQ ID NO: 74327 - DNA, 25 bp, probe
agcctctttgatgtacttgtggaaa

SEQ ID NO: 74328 - DNA, 25 bp, probe
gtttacagatttcctgatcccgatg

SEQ ID NO: 74329 - DNA, 25 bp, probe
agtttacagatttcctgatcccgat

SEQ ID NO: 74330 - DNA, 25 bp, probe
ttcctgatcccgatgttagaaatgg

SEQ ID NO: 74331 - DNA, 25 bp, probe
ttacagatttcctgatcccgatgtt

SEQ ID NO: 74332 - DNA, 25 bp, probe
tttacagatttcctgatcccgatgt

SEQ ID NO: 74333 - DNA, 25 bp, probe
atcccgatgttagaaatggttccag

SEQ ID NO: 74334 - DNA, 25 bp, probe
aagaccacatagcccacatcataga

SEQ ID NO: 74335 - DNA, 25 bp, probe
cctgatcccgatgttagaaatggtt

SEQ ID NO: 74336 - DNA, 25 bp, probe
cagatttcctgatcccgatgttaga

SEQ ID NO: 74337 - DNA, 25 bp, probe
gcacagtttacagatttcctgatcc

SEQ ID NO: 74338 - DNA, 25 bp, probe
gagcctctttgatgtacttgtggaa

SEQ ID NO: 74339 - DNA, 25 bp, probe
cccgatgttagaaatggttccagaa

SEQ ID NO: 74340 - DNA, 25 bp, probe
attccagagacgaagaccacatagc

SEQ ID NO: 74341 - DNA, 25 bp, probe
gatcccgatgttagaaatggttcca

SEQ ID NO: 74342 - DNA, 25 bp, probe
tgatcccgatgttagaaatggttcc

SEQ ID NO: 74343 - DNA, 25 bp, probe
gatttcctgatcccgatgttagaaa

SEQ ID NO: 74344 - DNA, 25 bp, probe
attaaactgtcgtgtgtttctgttt

SEQ ID NO: 74345 - DNA, 25 bp, probe
gattaaactgtcgtgtgtttctgtt

SEQ ID NO: 74346 - DNA, 25 bp, probe
ctggcaacgggagattatttgtttg

SEQ ID NO: 74347 - DNA, 25 bp, probe
atgaccctgagaaagtttacaatga

SEQ ID NO: 74348 - DNA, 25 bp, probe
gatgaccctgagaaagtttacaatg

SEQ ID NO: 74349 - DNA, 25 bp, probe
tgatgaccctgagaaagtttacaat

SEQ ID NO: 74350 - DNA, 25 bp, probe
tgaccctgagaaagtttacaatgaa

SEQ ID NO: 74351 - DNA, 25 bp, probe
gaccctgagaaagtttacaatgaaa

SEQ ID NO: 74352 - DNA, 25 bp, probe
ctgatgaccctgagaaagtttacaa

SEQ ID NO: 74353 - DNA, 25 bp, probe
cataagggaatatcaccagaagcag

SEQ ID NO: 74354 - DNA, 25 bp, probe
accctgagaaagtttacaatgaaat

SEQ ID NO: 74355 - DNA, 25 bp, probe
gtacacattagccaatgagaacatc

SEQ ID NO: 74356 - DNA, 25 bp, probe
tacacattagccaatgagaacatcc

SEQ ID NO: 74357 - DNA, 25 bp, probe
aatatcaccagaagcagcgaagaag

SEQ ID NO: 74358 - DNA, 25 bp, probe
gaatatcaccagaagcagcgaagaa

SEQ ID NO: 74359 - DNA, 25 bp, probe
cactgatgaccctgagaaagtttac

SEQ ID NO: 74360 - DNA, 25 bp, probe
tcactgatgaccctgagaaagttta

SEQ ID NO: 74361 - DNA, 25 bp, probe
actgatgaccctgagaaagtttaca

SEQ ID NO: 74362 - DNA, 25 bp, probe
ataagggaatatcaccagaagcagc

SEQ ID NO: 74363 - DNA, 25 bp, probe
gcataagggaatatcaccagaagca

SEQ ID NO: 74364 - DNA, 25 bp, probe
ccctgagaaagtttacaatgaaata

SEQ ID NO: 74365 - DNA, 25 bp, probe
tttgcataagggaatatcaccagaa

SEQ ID NO: 74366 - DNA, 25 bp, probe
ttgcataagggaatatcaccagaag

SEQ ID NO: 74367 - DNA, 25 bp, probe
gtttgcataagggaatatcaccaga

SEQ ID NO: 74368 - DNA, 25 bp, probe
atttgttagatcacatcgccgataa

SEQ ID NO: 74369 - DNA, 25 bp, probe
tgtttgcataagggaatatcaccag

SEQ ID NO: 74370 - DNA, 25 bp, probe
ctgtttgcataagggaatatcacca

SEQ ID NO: 74371 - DNA, 25 bp, probe
catttgttagatcacatcgccgata

SEQ ID NO: 74372 - DNA, 25 bp, probe
ttgttagatcacatcgccgataacc

SEQ ID NO: 74373 - DNA, 25 bp, probe
gagaaagtttacaatgaaatagtcg

SEQ ID NO: 74374 - DNA, 25 bp, probe
tttgttagatcacatcgccgataac

SEQ ID NO: 74375 - DNA, 25 bp, probe
acctgtttgcataagggaatatcac

SEQ ID NO: 74376 - DNA, 25 bp, probe
cacctgtttgcataagggaatatca

SEQ ID NO: 74377 - DNA, 25 bp, probe
acacctgtttgcataagggaatatc

SEQ ID NO: 74378 - DNA, 25 bp, probe
gacacctgtttgcataagggaatat

SEQ ID NO: 74379 - DNA, 25 bp, probe
gttagatcacatcgccgataaccag

SEQ ID NO: 74380 - DNA, 25 bp, probe
atatcaccagaagcagcgaagaagg

SEQ ID NO: 74381 - DNA, 25 bp, probe
ggaatatcaccagaagcagcgaaga

SEQ ID NO: 74382 - DNA, 25 bp, probe
tgcataagggaatatcaccagaagc

SEQ ID NO: 74383 - DNA, 25 bp, probe
cctgtttgcataagggaatatcacc

SEQ ID NO: 74384 - DNA, 25 bp, probe
cctgagaaagtttacaatgaaatag

SEQ ID NO: 74385 - DNA, 25 bp, probe
acaagcaaaatgttattgaagccat

SEQ ID NO: 74386 - DNA, 25 bp, probe
tgtacacattagccaatgagaacat

SEQ ID NO: 74387 - DNA, 25 bp, probe
ttagatcacatcgccgataaccagg

SEQ ID NO: 74388 - DNA, 25 bp, probe
agaaagtttacaatgaaatagtcga

SEQ ID NO: 74389 - DNA, 25 bp, probe
tgttagatcacatcgccgataacca

SEQ ID NO: 74390 - DNA, 25 bp, probe
catcgccgataaccaggatttacag

SEQ ID NO: 74391 - DNA, 25 bp, probe
aagacaaagaagaaagcagttacag

SEQ ID NO: 74392 - DNA, 25 bp, probe
agacaaagaagaaagcagttacagt

SEQ ID NO: 74393 - DNA, 25 bp, probe
acaaagaagaaagcagttacagtct

SEQ ID NO: 74394 - DNA, 25 bp, probe
taagacaaagaagaaagcagttaca

SEQ ID NO: 74395 - DNA, 25 bp, probe
ctaagacaaagaagaaagcagttac

SEQ ID NO: 74396 - DNA, 25 bp, probe
gacaaagaagaaagcagttacagtc

SEQ ID NO: 74397 - DNA, 25 bp, probe
tctaagacaaagaagaaagcagtta

SEQ ID NO: 74398 - DNA, 25 bp, probe
gaaagcagttacagtcttgtggaaa

SEQ ID NO: 74399 - DNA, 25 bp, probe
agaaagcagttacagtcttgtggaa

SEQ ID NO: 74400 - DNA, 25 bp, probe
aaatctgttccctgattcttctggt

SEQ ID NO: 74401 - DNA, 25 bp, probe
aaagaagaaagcagttacagtcttg

SEQ ID NO: 74402 - DNA, 25 bp, probe
caaagaagaaagcagttacagtctt

SEQ ID NO: 74403 - DNA, 25 bp, probe
gccaagttctaagacaaagaagaaa

SEQ ID NO: 74404 - DNA, 25 bp, probe
gttctaagacaaagaagaaagcagt

SEQ ID NO: 74405 - DNA, 25 bp, probe
aagaagaaagcagttacagtcttgt

SEQ ID NO: 74406 - DNA, 25 bp, probe
agttctaagacaaagaagaaagcag

SEQ ID NO: 74407 - DNA, 25 bp, probe
ggaaaatgtgggaagatggtaaaat

SEQ ID NO: 74408 - DNA, 25 bp, probe
agaagaaagcagttacagtcttgtg

SEQ ID NO: 74409 - DNA, 25 bp, probe
ttctaagacaaagaagaaagcagtt

SEQ ID NO: 74410 - DNA, 25 bp, probe
aagttctaagacaaagaagaaagca

SEQ ID NO: 74411 - DNA, 25 bp, probe
cgacaagctggcatctttctttaaa

SEQ ID NO: 74412 - DNA, 25 bp, probe
caagttctaagacaaagaagaaagc

SEQ ID NO: 74413 - DNA, 25 bp, probe
ggctgaggacgaagacttctctatc

SEQ ID NO: 74414 - DNA, 25 bp, probe
aatctgttccctgattcttctggtg

SEQ ID NO: 74415 - DNA, 25 bp, probe
gacgaagacttctctatcctgctgg

SEQ ID NO: 74416 - DNA, 25 bp, probe
tacgacaagctggcatctttcttta

SEQ ID NO: 74417 - DNA, 25 bp, probe
gaaaatgtgggaagatggtaaaatc

SEQ ID NO: 74418 - DNA, 25 bp, probe
gggaaaatgtgggaagatggtaaaa

SEQ ID NO: 74419 - DNA, 25 bp, probe
ccaagttctaagacaaagaagaaag

SEQ ID NO: 74420 - DNA, 25 bp, probe
gaagaaagcagttacagtcttgtgg

SEQ ID NO: 74421 - DNA, 25 bp, probe
gctgaggacgaagacttctctatcc

SEQ ID NO: 74422 - DNA, 25 bp, probe
aagaaagcagttacagtcttgtgga

SEQ ID NO: 74423 - DNA, 25 bp, probe
aaagcagttacagtcttgtggaaaa

SEQ ID NO: 74424 - DNA, 25 bp, probe
tgggaaaatgtgggaagatggtaaa

SEQ ID NO: 74425 - DNA, 25 bp, probe
ggacgaagacttctctatcctgctg

SEQ ID NO: 74426 - DNA, 25 bp, probe
acgacaagctggcatctttctttaa

SEQ ID NO: 74427 - DNA, 25 bp, probe
ctttagaaagtaggtgtgtggctgc

SEQ ID NO: 74428 - DNA, 25 bp, probe
gctttagaaagtaggtgtgtggctg

SEQ ID NO: 74429 - DNA, 25 bp, probe
aagcagttacagtcttgtggaaaag

SEQ ID NO: 74430 - DNA, 25 bp, probe
tggtaaaatctgttccctgattctt

SEQ ID NO: 74431 - DNA, 25 bp, probe
atggtaaaatctgttccctgattct

SEQ ID NO: 74432 - DNA, 25 bp, probe
gatggtaaaatctgttccctgattc

SEQ ID NO: 74433 - DNA, 25 bp, probe
ggtaaaatctgttccctgattcttc

SEQ ID NO: 74434 - DNA, 25 bp, probe
cagttacagtcttgtggaaaaggtg

SEQ ID NO: 74435 - DNA, 25 bp, probe
ggaggtgttcttcaatgattgtaac

SEQ ID NO: 74436 - DNA, 25 bp, probe
tggaggtgttcttcaatgattgtaa

SEQ ID NO: 74437 - DNA, 25 bp, probe
gttcttcaatgattgtaacagcctg

SEQ ID NO: 74438 - DNA, 25 bp, probe
ctggaggtgttcttcaatgattgta

SEQ ID NO: 74439 - DNA, 25 bp, probe
ttcttcaatgattgtaacagcctgc

SEQ ID NO: 74440 - DNA, 25 bp, probe
cctggaggtgttcttcaatgattgt

SEQ ID NO: 74441 - DNA, 25 bp, probe
tgatgaagaagatcacactccttaa

SEQ ID NO: 74442 - DNA, 25 bp, probe
atgatgaagaagatcacactcctta

SEQ ID NO: 74443 - DNA, 25 bp, probe
attccatgatgaagaagatcacact

SEQ ID NO: 74444 - DNA, 25 bp, probe
cattccatgatgaagaagatcacac

SEQ ID NO: 74445 - DNA, 25 bp, probe
catgatgaagaagatcacactcctt

SEQ ID NO: 74446 - DNA, 25 bp, probe
ttccatgatgaagaagatcacactc

SEQ ID NO: 74447 - DNA, 25 bp, probe
ccattccatgatgaagaagatcaca

SEQ ID NO: 74448 - DNA, 25 bp, probe
gatgaagaagatcacactccttaaa

SEQ ID NO: 74449 - DNA, 25 bp, probe
ctgaatgagtatctggagctgtgtg

SEQ ID NO: 74450 - DNA, 25 bp, probe
atgagtatctggagctgtgtggtaa

SEQ ID NO: 74451 - DNA, 25 bp, probe
aatgagtatctggagctgtgtggta

SEQ ID NO: 74452 - DNA, 25 bp, probe
aggtgttcttcaatgattgtaacag

SEQ ID NO: 74453 - DNA, 25 bp, probe
gaggtgttcttcaatgattgtaaca

SEQ ID NO: 74454 - DNA, 25 bp, probe
tgttcttcaatgattgtaacagcct

SEQ ID NO: 74455 - DNA, 25 bp, probe
gtgttcttcaatgattgtaacagcc

SEQ ID NO: 74456 - DNA, 25 bp, probe
ggtgttcttcaatgattgtaacagc

SEQ ID NO: 74457 - DNA, 25 bp, probe
catgcagatcaacttcttccaggat

SEQ ID NO: 74458 - DNA, 25 bp, probe
ccatgatgaagaagatcacactcct

SEQ ID NO: 74459 - DNA, 25 bp, probe
atgaagaagatcacactccttaaat

SEQ ID NO: 74460 - DNA, 25 bp, probe
tccatgatgaagaagatcacactcc

SEQ ID NO: 74461 - DNA, 25 bp, probe
tcttcaatgattgtaacagcctgca

SEQ ID NO: 74462 - DNA, 25 bp, probe
attacttgagcgagcacttcctgaa

SEQ ID NO: 74463 - DNA, 25 bp, probe
agcctggaggtgttcttcaatgatt

SEQ ID NO: 74464 - DNA, 25 bp, probe
aattacttgagcgagcacttcctga

SEQ ID NO: 74465 - DNA, 25 bp, probe
caattacttgagcgagcacttcctg

SEQ ID NO: 74466 - DNA, 25 bp, probe
tgaagaagatcacactccttaaata

SEQ ID NO: 74467 - DNA, 25 bp, probe
gcctggaggtgttcttcaatgattg

SEQ ID NO: 74468 - DNA, 25 bp, probe
tgagtatctggagctgtgtggtaac

SEQ ID NO: 74469 - DNA, 25 bp, probe
ttcctgaatgagtatctggagctgt

SEQ ID NO: 74470 - DNA, 25 bp, probe
cctgaatgagtatctggagctgtgt

SEQ ID NO: 74471 - DNA, 25 bp, probe
gaatgagtatctggagctgtgtggt

SEQ ID NO: 74472 - DNA, 25 bp, probe
tgaatgagtatctggagctgtgtgg

SEQ ID NO: 74473 - DNA, 25 bp, probe
cccattccatgatgaagaagatcac

SEQ ID NO: 74474 - DNA, 25 bp, probe
gagtatctggagctgtgtggtaaca

SEQ ID NO: 74475 - DNA, 25 bp, probe
tttcctgaatgagtatctggagctg

SEQ ID NO: 74476 - DNA, 25 bp, probe
cagcctggaggtgttcttcaatgat

SEQ ID NO: 74477 - DNA, 25 bp, probe
tcctgaatgagtatctggagctgtg

SEQ ID NO: 74478 - DNA, 25 bp, probe
cacactccttaaatatttccgcaat

SEQ ID NO: 74479 - DNA, 25 bp, probe
atgagcctactgatgttgttgataa

SEQ ID NO: 74480 - DNA, 25 bp, probe
aatgagcctactgatgttgttgata

SEQ ID NO: 74481 - DNA, 25 bp, probe
aattagaagcctcgtaccaatcatc

SEQ ID NO: 74482 - DNA, 25 bp, probe
caattagaagcctcgtaccaatcat

SEQ ID NO: 74483 - DNA, 25 bp, probe
gaagataggaaccattcaacttagt

SEQ ID NO: 74484 - DNA, 25 bp, probe
ctcaattagaagcctcgtaccaatc

SEQ ID NO: 74485 - DNA, 25 bp, probe
attagaagcctcgtaccaatcatct

SEQ ID NO: 74486 - DNA, 25 bp, probe
ttagaagcctcgtaccaatcatctt

SEQ ID NO: 74487 - DNA, 25 bp, probe
tcaattagaagcctcgtaccaatca

SEQ ID NO: 74488 - DNA, 25 bp, probe
tgagcctactgatgttgttgataaa

SEQ ID NO: 74489 - DNA, 25 bp, probe
tagaagcctcgtaccaatcatcttg

SEQ ID NO: 74490 - DNA, 25 bp, probe
aaatgagcctactgatgttgttgat

SEQ ID NO: 74491 - DNA, 25 bp, probe
aagataggaaccattcaacttagtt

SEQ ID NO: 74492 - DNA, 25 bp, probe
gagcctactgatgttgttgataaat

SEQ ID NO: 74493 - DNA, 25 bp, probe
aatgaggaaggatttctgaacaaca

SEQ ID NO: 74494 - DNA, 25 bp, probe
ttgttgtgagttctttagcaggaaa

SEQ ID NO: 74495 - DNA, 25 bp, probe
tttgttgtgagttctttagcaggaa

SEQ ID NO: 74496 - DNA, 25 bp, probe
agcctactgatgttgttgataaatt

SEQ ID NO: 74497 - DNA, 25 bp, probe
aagatcctgaaatgctagaaactga

SEQ ID NO: 74498 - DNA, 25 bp, probe
ggaatgacaaatctggctcaattag

SEQ ID NO: 74499 - DNA, 25 bp, probe
agatcctgaaatgctagaaactgag

SEQ ID NO: 74500 - DNA, 25 bp, probe
gaagatcctgaaatgctagaaactg

SEQ ID NO: 74501 - DNA, 25 bp, probe
agaagatcctgaaatgctagaaact

SEQ ID NO: 74502 - DNA, 25 bp, probe
aggaatgacaaatctggctcaatta

SEQ ID NO: 74503 - DNA, 25 bp, probe
atatcaaagtcagtaagccaagaaa

SEQ ID NO: 74504 - DNA, 25 bp, probe
atgacaaatctggctcaattagaag

SEQ ID NO: 74505 - DNA, 25 bp, probe
gaatgacaaatctggctcaattaga

SEQ ID NO: 74506 - DNA, 25 bp, probe
aagaagatcctgaaatgctagaaac

SEQ ID NO: 74507 - DNA, 25 bp, probe
aatgacaaatctggctcaattagaa

SEQ ID NO: 74508 - DNA, 25 bp, probe
aaatgaggaaggatttctgaacaac

SEQ ID NO: 74509 - DNA, 25 bp, probe
aaaggaatgacaaatctggctcaat

SEQ ID NO: 74510 - DNA, 25 bp, probe
gaaagaagatcctgaaatgctagaa

SEQ ID NO: 74511 - DNA, 25 bp, probe
aaggaatgacaaatctggctcaatt

SEQ ID NO: 74512 - DNA, 25 bp, probe
aaagaagatcctgaaatgctagaaa

SEQ ID NO: 74513 - DNA, 25 bp, probe
atgaggaaggatttctgaacaacag

SEQ ID NO: 74514 - DNA, 25 bp, probe
gctgaagataggaaccattcaactt

SEQ ID NO: 74515 - DNA, 25 bp, probe
ttaaatgacttgaatagctcggtgt

SEQ ID NO: 74516 - DNA, 25 bp, probe
attaaatgacttgaatagctcggtg

SEQ ID NO: 74517 - DNA, 25 bp, probe
ggagagaggaaatgaggaaggattt

SEQ ID NO: 74518 - DNA, 25 bp, probe
ggaaagaagatcctgaaatgctaga

SEQ ID NO: 74519 - DNA, 25 bp, probe
aattaaatgacttgaatagctcggt

SEQ ID NO: 74520 - DNA, 25 bp, probe
gaggaaggatttctgaacaacagtg

SEQ ID NO: 74521 - DNA, 25 bp, probe
gcctactgatgttgttgataaatta

SEQ ID NO: 74522 - DNA, 25 bp, probe
tgaagataggaaccattcaacttag

SEQ ID NO: 74523 - DNA, 25 bp, probe
ttggatttgatggagactgaacaag

SEQ ID NO: 74524 - DNA, 25 bp, probe
cttggatttgatggagactgaacaa

SEQ ID NO: 74525 - DNA, 25 bp, probe
gtggacaagatgaaggctatcgttc

SEQ ID NO: 74526 - DNA, 25 bp, probe
aagatgaagtattcagaagaggagc

SEQ ID NO: 74527 - DNA, 25 bp, probe
ccaagatgaagtattcagaagagga

SEQ ID NO: 74528 - DNA, 25 bp, probe
agcgaaagacccaagatgaagtatt

SEQ ID NO: 74529 - DNA, 25 bp, probe
aagcgaaagacccaagatgaagtat

SEQ ID NO: 74530 - DNA, 25 bp, probe
gcgaaagacccaagatgaagtattc

SEQ ID NO: 74531 - DNA, 25 bp, probe
ccagattacaatcctgaagggaaat

SEQ ID NO: 74532 - DNA, 25 bp, probe
caagatgaagtattcagaagaggag

SEQ ID NO: 74533 - DNA, 25 bp, probe
gtttacccaccagattacaatcctg

SEQ ID NO: 74534 - DNA, 25 bp, probe
gttgagtttaaggagcttgtttacc

SEQ ID NO: 74535 - DNA, 25 bp, probe
ggttgagtttaaggagcttgtttac

SEQ ID NO: 74536 - DNA, 25 bp, probe
ttacccaccagattacaatcctgaa

SEQ ID NO: 74537 - DNA, 25 bp, probe
tttacccaccagattacaatcctga

SEQ ID NO: 74538 - DNA, 25 bp, probe
tgtttacccaccagattacaatcct

SEQ ID NO: 74539 - DNA, 25 bp, probe
tggttgagtttaaggagcttgttta

SEQ ID NO: 74540 - DNA, 25 bp, probe
caagatgaaggctatcgttcagaag

SEQ ID NO: 74541 - DNA, 25 bp, probe
cagattacaatcctgaagggaaatt

SEQ ID NO: 74542 - DNA, 25 bp, probe
ccttggatttgatggagactgaaca

SEQ ID NO: 74543 - DNA, 25 bp, probe
cctgaagggaaatttaccaagagaa

SEQ ID NO: 74544 - DNA, 25 bp, probe
tacccaccagattacaatcctgaag

SEQ ID NO: 74545 - DNA, 25 bp, probe
ttgagtttaaggagcttgtttaccc

SEQ ID NO: 74546 - DNA, 25 bp, probe
gaagcgaaagacccaagatgaagta

SEQ ID NO: 74547 - DNA, 25 bp, probe
cccgcaggaacatctctctttattt

SEQ ID NO: 74548 - DNA, 25 bp, probe
ctgaagggaaatttaccaagagaaa

SEQ ID NO: 74549 - DNA, 25 bp, probe
gcccaaggttgaagcaatgaataaa

SEQ ID NO: 74550 - DNA, 25 bp, probe
gatgaagtattcagaagaggagctg

SEQ ID NO: 74551 - DNA, 25 bp, probe
agatgaagtattcagaagaggagct

SEQ ID NO: 74552 - DNA, 25 bp, probe
accagattacaatcctgaagggaaa

SEQ ID NO: 74553 - DNA, 25 bp, probe
gatttgatggagactgaacaagcag

SEQ ID NO: 74554 - DNA, 25 bp, probe
acaagatgaaggctatcgttcagaa

SEQ ID NO: 74555 - DNA, 25 bp, probe
gagtttaaggagcttgtttacccac

SEQ ID NO: 74556 - DNA, 25 bp, probe
gaagatgccctttactgaaagtcat

SEQ ID NO: 74557 - DNA, 25 bp, probe
aagaggagttggatgaccagaaatt

SEQ ID NO: 74558 - DNA, 25 bp, probe
gtggttgagtttaaggagcttgttt

SEQ ID NO: 74559 - DNA, 25 bp, probe
tgagtttaaggagcttgtttaccca

SEQ ID NO: 74560 - DNA, 25 bp, probe
gacaagatgaaggctatcgttcaga

SEQ ID NO: 74561 - DNA, 25 bp, probe
caccagattacaatcctgaagggaa

SEQ ID NO: 74562 - DNA, 25 bp, probe
tttgctgatgataaaaggaagatgc

SEQ ID NO: 74563 - DNA, 25 bp, probe
atctctctttattttgtggctttgg

SEQ ID NO: 74564 - DNA, 25 bp, probe
cgcaggaacatctctctttattttg

SEQ ID NO: 74565 - DNA, 25 bp, probe
aatgaagattttggaagcgaaagac

SEQ ID NO: 74566 - DNA, 25 bp, probe
taatgaagattttggaagcgaaaga

SEQ ID NO: 74567 - DNA, 25 bp, probe
gatgagtcaataccgttccatagag

SEQ ID NO: 74568 - DNA, 25 bp, probe
agatgagtcaataccgttccataga

SEQ ID NO: 74569 - DNA, 25 bp, probe
cagatgagtcaataccgttccatag

SEQ ID NO: 74570 - DNA, 25 bp, probe
gaagactattccagagacgaagatc

SEQ ID NO: 74571 - DNA, 25 bp, probe
tattccagagacgaagatcacatag

SEQ ID NO: 74572 - DNA, 25 bp, probe
ctattccagagacgaagatcacata

SEQ ID NO: 74573 - DNA, 25 bp, probe
aagactattccagagacgaagatca

SEQ ID NO: 74574 - DNA, 25 bp, probe
atgagtcaataccgttccatagagg

SEQ ID NO: 74575 - DNA, 25 bp, probe
actattccagagacgaagatcacat

SEQ ID NO: 74576 - DNA, 25 bp, probe
ccagatgagtcaataccgttccata

SEQ ID NO: 74577 - DNA, 25 bp, probe
cagagacgaagatcacatagcattg

SEQ ID NO: 74578 - DNA, 25 bp, probe
agactattccagagacgaagatcac

SEQ ID NO: 74579 - DNA, 25 bp, probe
gactattccagagacgaagatcaca

SEQ ID NO: 74580 - DNA, 25 bp, probe
gaagacatccagatgagtcaatacc

SEQ ID NO: 74581 - DNA, 25 bp, probe
agagacgaagatcacatagcattga

SEQ ID NO: 74582 - DNA, 25 bp, probe
ggaagacatccagatgagtcaatac

SEQ ID NO: 74583 - DNA, 25 bp, probe
attccagagacgaagatcacatagc

SEQ ID NO: 74584 - DNA, 25 bp, probe
ccagagacgaagatcacatagcatt

SEQ ID NO: 74585 - DNA, 25 bp, probe
attagagtagaaattgctgacctgg

SEQ ID NO: 74586 - DNA, 25 bp, probe
acatccagatgagtcaataccgttc

SEQ ID NO: 74587 - DNA, 25 bp, probe
tttaataggagagggatacagcacc

SEQ ID NO: 74588 - DNA, 25 bp, probe
gagtcaataccgttccatagaggtt

SEQ ID NO: 74589 - DNA, 25 bp, probe
aagacatccagatgagtcaataccg

SEQ ID NO: 74590 - DNA, 25 bp, probe
cggaagacatccagatgagtcaata

SEQ ID NO: 74591 - DNA, 25 bp, probe
gcgattatttgtttgaaccacattc

SEQ ID NO: 74592 - DNA, 25 bp, probe
atccagatgagtcaataccgttcca

SEQ ID NO: 74593 - DNA, 25 bp, probe
gacatccagatgagtcaataccgtt

SEQ ID NO: 74594 - DNA, 25 bp, probe
tccagatgagtcaataccgttccat

SEQ ID NO: 74595 - DNA, 25 bp, probe
gagacgaagatcacatagcattgat

SEQ ID NO: 74596 - DNA, 25 bp, probe
tccagagacgaagatcacatagcat

SEQ ID NO: 74597 - DNA, 25 bp, probe
caatgggcgattatttgtttgaacc

SEQ ID NO: 74598 - DNA, 25 bp, probe
catccagatgagtcaataccgttcc

SEQ ID NO: 74599 - DNA, 25 bp, probe
ggcgattatttgtttgaaccacatt

SEQ ID NO: 74600 - DNA, 25 bp, probe
ttagagtagaaattgctgacctggg

SEQ ID NO: 74601 - DNA, 25 bp, probe
aattagagtagaaattgctgacctg

SEQ ID NO: 74602 - DNA, 25 bp, probe
gtagaaattgctgacctgggaaatg

SEQ ID NO: 74603 - DNA, 25 bp, probe
agtagaaattgctgacctgggaaat

SEQ ID NO: 74604 - DNA, 25 bp, probe
cgattatttgtttgaaccacattct

SEQ ID NO: 74605 - DNA, 25 bp, probe
ttccagagacgaagatcacatagca

SEQ ID NO: 74606 - DNA, 25 bp, probe
tgagtcaataccgttccatagaggt

SEQ ID NO: 74607 - DNA, 25 bp, probe
gcaatgggcgattatttgtttgaac

SEQ ID NO: 74608 - DNA, 25 bp, probe
aaattagagtagaaattgctgacct

SEQ ID NO: 74609 - DNA, 25 bp, probe
agacatccagatgagtcaataccgt

SEQ ID NO: 74610 - DNA, 25 bp, probe
gatcaccacttactgacagaagcag

SEQ ID NO: 74611 - DNA, 25 bp, probe
tagcagaaaggatagccaaagaaat

SEQ ID NO: 74612 - DNA, 25 bp, probe
attagcagaaaggatagccaaagaa

SEQ ID NO: 74613 - DNA, 25 bp, probe
ttagcagaaaggatagccaaagaaa

SEQ ID NO: 74614 - DNA, 25 bp, probe
caaagaaaccaccataacgagaaag

SEQ ID NO: 74615 - DNA, 25 bp, probe
cattagcagaaaggatagccaaaga

SEQ ID NO: 74616 - DNA, 25 bp, probe
agcagaaaggatagccaaagaaatt

SEQ ID NO: 74617 - DNA, 25 bp, probe
cagaaaggatagccaaagaaattca

SEQ ID NO: 74618 - DNA, 25 bp, probe
aggatagccaaagaaattcagcatt

SEQ ID NO: 74619 - DNA, 25 bp, probe
aaggatagccaaagaaattcagcat

SEQ ID NO: 74620 - DNA, 25 bp, probe
gaaaggatagccaaagaaattcagc

SEQ ID NO: 74621 - DNA, 25 bp, probe
agaaaggatagccaaagaaattcag

SEQ ID NO: 74622 - DNA, 25 bp, probe
gcagaaaggatagccaaagaaattc

SEQ ID NO: 74623 - DNA, 25 bp, probe
caaatatgatagttgccaagatgcc

SEQ ID NO: 74624 - DNA, 25 bp, probe
ccaaatatgatagttgccaagatgc

SEQ ID NO: 74625 - DNA, 25 bp, probe
gccaaatatgatagttgccaagatg

SEQ ID NO: 74626 - DNA, 25 bp, probe
agccaaatatgatagttgccaagat

SEQ ID NO: 74627 - DNA, 25 bp, probe
aaaggatagccaaagaaattcagca

SEQ ID NO: 74628 - DNA, 25 bp, probe
tcatcaaactcagtctcaaactctt

SEQ ID NO: 74629 - DNA, 25 bp, probe
atcatcaaactcagtctcaaactct

SEQ ID NO: 74630 - DNA, 25 bp, probe
gatagccaaagaaattcagcattgt

SEQ ID NO: 74631 - DNA, 25 bp, probe
aaatatgatagttgccaagatgccc

SEQ ID NO: 74632 - DNA, 25 bp, probe
tgaagatacaacagccaaatatgat

SEQ ID NO: 74633 - DNA, 25 bp, probe
atagccaaagaaattcagcattgtg

SEQ ID NO: 74634 - DNA, 25 bp, probe
acgagaaagtatcatcaaactcagt

SEQ ID NO: 74635 - DNA, 25 bp, probe
cgagaaagtatcatcaaactcagtc

SEQ ID NO: 74636 - DNA, 25 bp, probe
ggatagccaaagaaattcagcattg

SEQ ID NO: 74637 - DNA, 25 bp, probe
aacagccaaatatgatagttgccaa

SEQ ID NO: 74638 - DNA, 25 bp, probe
catcaaactcagtctcaaactctta

SEQ ID NO: 74639 - DNA, 25 bp, probe
gtatcatcaaactcagtctcaaact

SEQ ID NO: 74640 - DNA, 25 bp, probe
agtatcatcaaactcagtctcaaac

SEQ ID NO: 74641 - DNA, 25 bp, probe
cagccaaatatgatagttgccaaga

SEQ ID NO: 74642 - DNA, 25 bp, probe
aaagaaaccaccataacgagaaagc

SEQ ID NO: 74643 - DNA, 25 bp, probe
tatcatcaaactcagtctcaaactc

SEQ ID NO: 74644 - DNA, 25 bp, probe
gaaagtatcatcaaactcagtctca

SEQ ID NO: 74645 - DNA, 25 bp, probe
cctgaagatacaacagccaaatatg

SEQ ID NO: 74646 - DNA, 25 bp, probe
acagccaaatatgatagttgccaag

SEQ ID NO: 74647 - DNA, 25 bp, probe
gcaaagaaaccaccataacgagaaa

SEQ ID NO: 74648 - DNA, 25 bp, probe
ccctgaagatacaacagccaaatat

SEQ ID NO: 74649 - DNA, 25 bp, probe
gcattagcagaaaggatagccaaag

SEQ ID NO: 74650 - DNA, 25 bp, probe
acgaacatacgagaaagtatcatca

SEQ ID NO: 74651 - DNA, 25 bp, probe
agatacaacagccaaatatgatagt

SEQ ID NO: 74652 - DNA, 25 bp, probe
ctgaagatacaacagccaaatatga

SEQ ID NO: 74653 - DNA, 25 bp, probe
agaaagtatcatcaaactcagtctc

SEQ ID NO: 74654 - DNA, 25 bp, probe
tacgagaaagtatcatcaaactcag

SEQ ID NO: 74655 - DNA, 25 bp, probe
aaatatgactgtgactgaccctgag

SEQ ID NO: 74656 - DNA, 25 bp, probe
actggatgaaaatatgactgtgact

SEQ ID NO: 74657 - DNA, 25 bp, probe
gatgaaaatatgactgtgactgacc

SEQ ID NO: 74658 - DNA, 25 bp, probe
ggatgaaaatatgactgtgactgac

SEQ ID NO: 74659 - DNA, 25 bp, probe
ctggatgaaaatatgactgtgactg

SEQ ID NO: 74660 - DNA, 25 bp, probe
atgaaaatatgactgtgactgaccc

SEQ ID NO: 74661 - DNA, 25 bp, probe
taccactggatgaaaatatgactgt

SEQ ID NO: 74662 - DNA, 25 bp, probe
gaaaatatgactgtgactgaccctg

SEQ ID NO: 74663 - DNA, 25 bp, probe
aatatgactgtgactgaccctgagg

SEQ ID NO: 74664 - DNA, 25 bp, probe
aaaatatgactgtgactgaccctga

SEQ ID NO: 74665 - DNA, 25 bp, probe
tgaaaatatgactgtgactgaccct

SEQ ID NO: 74666 - DNA, 25 bp, probe
cactggatgaaaatatgactgtgac

SEQ ID NO: 74667 - DNA, 25 bp, probe
ccactggatgaaaatatgactgtga

SEQ ID NO: 74668 - DNA, 25 bp, probe
accactggatgaaaatatgactgtg

SEQ ID NO: 74669 - DNA, 25 bp, probe
caagatcatgcacatagatgtccag

SEQ ID NO: 74670 - DNA, 25 bp, probe
cacaagatcatgcacatagatgtcc

SEQ ID NO: 74671 - DNA, 25 bp, probe
acaagatcatgcacatagatgtcca

SEQ ID NO: 74672 - DNA, 25 bp, probe
gacatatctgagggagaagcacaag

SEQ ID NO: 74673 - DNA, 25 bp, probe
acatatctgagggagaagcacaaga

SEQ ID NO: 74674 - DNA, 25 bp, probe
aagatcatgcacatagatgtccagc

SEQ ID NO: 74675 - DNA, 25 bp, probe
tgacatatctgagggagaagcacaa

SEQ ID NO: 74676 - DNA, 25 bp, probe
gaagcacaagatcatgcacatagat

SEQ ID NO: 74677 - DNA, 25 bp, probe
atatctgagggagaagcacaagatc

SEQ ID NO: 74678 - DNA, 25 bp, probe
catatctgagggagaagcacaagat

SEQ ID NO: 74679 - DNA, 25 bp, probe
aagcacaagatcatgcacatagatg

SEQ ID NO: 74680 - DNA, 25 bp, probe
gagaagcacaagatcatgcacatag

SEQ ID NO: 74681 - DNA, 25 bp, probe
ctgacatatctgagggagaagcaca

SEQ ID NO: 74682 - DNA, 25 bp, probe
gcacaagatcatgcacatagatgtc

SEQ ID NO: 74683 - DNA, 25 bp, probe
agaagcacaagatcatgcacataga

SEQ ID NO: 74684 - DNA, 25 bp, probe
gtagagatggcagttgggaggtatc

SEQ ID NO: 74685 - DNA, 25 bp, probe
agcacaagatcatgcacatagatgt

SEQ ID NO: 74686 - DNA, 25 bp, probe
attccctggatcaagtcctgaagaa

SEQ ID NO: 74687 - DNA, 25 bp, probe
tatctgagggagaagcacaagatca

SEQ ID NO: 74688 - DNA, 25 bp, probe
ggagatcaagctctgtaactttggg

SEQ ID NO: 74689 - DNA, 25 bp, probe
gggagatcaagctctgtaactttgg

SEQ ID NO: 74690 - DNA, 25 bp, probe
ttccctggatcaagtcctgaagaaa

SEQ ID NO: 74691 - DNA, 25 bp, probe
ggagaagcacaagatcatgcacata

SEQ ID NO: 74692 - DNA, 25 bp, probe
gattccctggatcaagtcctgaaga

SEQ ID NO: 74693 - DNA, 25 bp, probe
agattccctggatcaagtcctgaag

SEQ ID NO: 74694 - DNA, 25 bp, probe
gagattccctggatcaagtcctgaa

SEQ ID NO: 74695 - DNA, 25 bp, probe
aaagattccaggggactcattactc

SEQ ID NO: 74696 - DNA, 25 bp, probe
gaaagattccaggggactcattact

SEQ ID NO: 74697 - DNA, 25 bp, probe
agaaagattccaggggactcattac

SEQ ID NO: 74698 - DNA, 25 bp, probe
cagaaagattccaggggactcatta

SEQ ID NO: 74699 - DNA, 25 bp, probe
atctgagggagaagcacaagatcat

SEQ ID NO: 74700 - DNA, 25 bp, probe
atggatggagattccctggatcaag

SEQ ID NO: 74701 - DNA, 25 bp, probe
tccctggatcaagtcctgaagaaag

SEQ ID NO: 74702 - DNA, 25 bp, probe
tctgagggagaagcacaagatcatg

SEQ ID NO: 74703 - DNA, 25 bp, probe
cctgacatatctgagggagaagcac

SEQ ID NO: 74704 - DNA, 25 bp, probe
agatcatgcacatagatgtccagcc

SEQ ID NO: 74705 - DNA, 25 bp, probe
catggatggagattccctggatcaa

SEQ ID NO: 74706 - DNA, 25 bp, probe
aagattccaggggactcattactct

SEQ ID NO: 74707 - DNA, 25 bp, probe
agtcctgaagaaagcgggaagaatt

SEQ ID NO: 74708 - DNA, 25 bp, probe
aagtcctgaagaaagcgggaagaat

SEQ ID NO: 74709 - DNA, 25 bp, probe
gaggtatcccatcccttctccagat

SEQ ID NO: 74710 - DNA, 25 bp, probe
gatggagattccctggatcaagtcc

SEQ ID NO: 74711 - DNA, 25 bp, probe
ggatggagattccctggatcaagtc

SEQ ID NO: 74712 - DNA, 25 bp, probe
ggtagagatggcagttgggaggtat

SEQ ID NO: 74713 - DNA, 25 bp, probe
tgaggaagaagaagatggaactatg

SEQ ID NO: 74714 - DNA, 25 bp, probe
gaggaagaagaagatggaactatga

SEQ ID NO: 74715 - DNA, 25 bp, probe
gatgaggaagaagaagatggaacta

SEQ ID NO: 74716 - DNA, 25 bp, probe
aggaagaagaagatggaactatgaa

SEQ ID NO: 74717 - DNA, 25 bp, probe
atgaggaagaagaagatggaactat

SEQ ID NO: 74718 - DNA, 25 bp, probe
gaggatgaggaagaagaagatggaa

SEQ ID NO: 74719 - DNA, 25 bp, probe
agtgaggatgaggaagaagaagatg

SEQ ID NO: 74720 - DNA, 25 bp, probe
cagtgaggatgaggaagaagaagat

SEQ ID NO: 74721 - DNA, 25 bp, probe
ggatgaggaagaagaagatggaact

SEQ ID NO: 74722 - DNA, 25 bp, probe
aggatgaggaagaagaagatggaac

SEQ ID NO: 74723 - DNA, 25 bp, probe
aacagtgaggatgaggaagaagaag

SEQ ID NO: 74724 - DNA, 25 bp, probe
ccagaccatgattgaacataatagc

SEQ ID NO: 74725 - DNA, 25 bp, probe
ccatgattgaacataatagcacgat

SEQ ID NO: 74726 - DNA, 25 bp, probe
gaccatgattgaacataatagcacg

SEQ ID NO: 74727 - DNA, 25 bp, probe
accatgattgaacataatagcacga

SEQ ID NO: 74728 - DNA, 25 bp, probe
agaccatgattgaacataatagcac

SEQ ID NO: 74729 - DNA, 25 bp, probe
cagaccatgattgaacataatagca

SEQ ID NO: 74730 - DNA, 25 bp, probe
catgattgaacataatagcacgatg

SEQ ID NO: 74731 - DNA, 25 bp, probe
tgaggatgaggaagaagaagatgga

SEQ ID NO: 74732 - DNA, 25 bp, probe
gtgaggatgaggaagaagaagatgg

SEQ ID NO: 74733 - DNA, 25 bp, probe
ataatagcacgatgttggaatccga

SEQ ID NO: 74734 - DNA, 25 bp, probe
cataatagcacgatgttggaatccg

SEQ ID NO: 74735 - DNA, 25 bp, probe
taagcaagacttcaagaataagagt

SEQ ID NO: 74736 - DNA, 25 bp, probe
acagtgaggatgaggaagaagaaga

SEQ ID NO: 74737 - DNA, 25 bp, probe
ataaacagtgaggatgaggaagaag

SEQ ID NO: 74738 - DNA, 25 bp, probe
gataaacagtgaggatgaggaagaa

SEQ ID NO: 74739 - DNA, 25 bp, probe
taaacagtgaggatgaggaagaaga

SEQ ID NO: 74740 - DNA, 25 bp, probe
tgataaacagtgaggatgaggaaga

SEQ ID NO: 74741 - DNA, 25 bp, probe
gtgataaacagtgaggatgaggaag

SEQ ID NO: 74742 - DNA, 25 bp, probe
aataacaaggacaatgggataactg

SEQ ID NO: 74743 - DNA, 25 bp, probe
ataacaaggacaatgggataactgc

SEQ ID NO: 74744 - DNA, 25 bp, probe
tggactactttgataagcaagactt

SEQ ID NO: 74745 - DNA, 25 bp, probe
atggactactttgataagcaagact

SEQ ID NO: 74746 - DNA, 25 bp, probe
ggactactttgataagcaagacttc

SEQ ID NO: 74747 - DNA, 25 bp, probe
ggaagaagaagatggaactatgaaa

SEQ ID NO: 74748 - DNA, 25 bp, probe
aaacagtgaggatgaggaagaagaa

SEQ ID NO: 74749 - DNA, 25 bp, probe
taatagcacgatgttggaatccgac

SEQ ID NO: 74750 - DNA, 25 bp, probe
ataagcaagacttcaagaataagag

SEQ ID NO: 74751 - DNA, 25 bp, probe
gataagcaagacttcaagaataaga

SEQ ID NO: 74752 - DNA, 25 bp, probe
tgataagcaagacttcaagaataag

SEQ ID NO: 74753 - DNA, 25 bp, probe
acaaggacaatgggataactgctat

SEQ ID NO: 74754 - DNA, 25 bp, probe
aacaaggacaatgggataactgcta

SEQ ID NO: 74755 - DNA, 25 bp, probe
taacaaggacaatgggataactgct

SEQ ID NO: 74756 - DNA, 25 bp, probe
gactactttgataagcaagacttca

SEQ ID NO: 74757 - DNA, 25 bp, probe
ctcttctcatctcattcgacacaag

SEQ ID NO: 74758 - DNA, 25 bp, probe
tcttctcatctcattcgacacaagt

SEQ ID NO: 74759 - DNA, 25 bp, probe
cctcttctcatctcattcgacacaa

SEQ ID NO: 74760 - DNA, 25 bp, probe
cttctcatctcattcgacacaagtc

SEQ ID NO: 74761 - DNA, 25 bp, probe
tacttacagagcgtcctggatgatt

SEQ ID NO: 74762 - DNA, 25 bp, probe
ctacttacagagcgtcctggatgat

SEQ ID NO: 74763 - DNA, 25 bp, probe
ttctcatctcattcgacacaagtcc

SEQ ID NO: 74764 - DNA, 25 bp, probe
atgaaaatgtgctggaaagaaaagg

SEQ ID NO: 74765 - DNA, 25 bp, probe
tacagagcgtcctggatgatttcta

SEQ ID NO: 74766 - DNA, 25 bp, probe
tatgaaaatgtgctggaaagaaaag

SEQ ID NO: 74767 - DNA, 25 bp, probe
gtttgactacttacagagcgtcctg

SEQ ID NO: 74768 - DNA, 25 bp, probe
gatgatttctacacagccacggaag

SEQ ID NO: 74769 - DNA, 25 bp, probe
gactacttacagagcgtcctggatg

SEQ ID NO: 74770 - DNA, 25 bp, probe
ttatgaaaatgtgctggaaagaaaa

SEQ ID NO: 74771 - DNA, 25 bp, probe
cttacagagcgtcctggatgatttc

SEQ ID NO: 74772 - DNA, 25 bp, probe
attatgaaaatgtgctggaaagaaa

SEQ ID NO: 74773 - DNA, 25 bp, probe
aaagaaaaggcagaagagagaccaa

SEQ ID NO: 74774 - DNA, 25 bp, probe
ttacagagcgtcctggatgatttct

SEQ ID NO: 74775 - DNA, 25 bp, probe
actacttacagagcgtcctggatga

SEQ ID NO: 74776 - DNA, 25 bp, probe
tgactacttacagagcgtcctggat

SEQ ID NO: 74777 - DNA, 25 bp, probe
gaaagaaaaggcagaagagagacca

SEQ ID NO: 74778 - DNA, 25 bp, probe
tggaaagaaaaggcagaagagagac

SEQ ID NO: 74779 - DNA, 25 bp, probe
ttgactacttacagagcgtcctgga

SEQ ID NO: 74780 - DNA, 25 bp, probe
acttacagagcgtcctggatgattt

SEQ ID NO: 74781 - DNA, 25 bp, probe
ccagatgagctctatgacattatga

SEQ ID NO: 74782 - DNA, 25 bp, probe
agagcgtcctggatgatttctacac

SEQ ID NO: 74783 - DNA, 25 bp, probe
aagaaaaggcagaagagagaccaac

SEQ ID NO: 74784 - DNA, 25 bp, probe
tgaaaatgtgctggaaagaaaaggc

SEQ ID NO: 74785 - DNA, 25 bp, probe
gagcgtcctggatgatttctacaca

SEQ ID NO: 74786 - DNA, 25 bp, probe
tttgactacttacagagcgtcctgg

SEQ ID NO: 74787 - DNA, 25 bp, probe
ccctcttctcatctcattcgacaca

SEQ ID NO: 74788 - DNA, 25 bp, probe
ctggaaagaaaaggcagaagagaga

SEQ ID NO: 74789 - DNA, 25 bp, probe
cagatgagctctatgacattatgaa

SEQ ID NO: 74790 - DNA, 25 bp, probe
ggaaagaaaaggcagaagagagacc

SEQ ID NO: 74791 - DNA, 25 bp, probe
cagagcgtcctggatgatttctaca

SEQ ID NO: 74792 - DNA, 25 bp, probe
acagagcgtcctggatgatttctac

SEQ ID NO: 74793 - DNA, 25 bp, probe
cattatgaaaatgtgctggaaagaa

SEQ ID NO: 74794 - DNA, 25 bp, probe
cgtttgactacttacagagcgtcct

SEQ ID NO: 74795 - DNA, 25 bp, probe
agcgtcctggatgatttctacacag

SEQ ID NO: 74796 - DNA, 25 bp, probe
gagagaccaacgtttgactacttac

SEQ ID NO: 74797 - DNA, 25 bp, probe
agagagaccaacgtttgactactta

SEQ ID NO: 74798 - DNA, 25 bp, probe
atgatttctacacagccacggaagg

SEQ ID NO: 74799 - DNA, 25 bp, probe
ggatgatttctacacagccacggaa

SEQ ID NO: 74800 - DNA, 25 bp, probe
gaccaacgtttgactacttacagag

SEQ ID NO: 74801 - DNA, 25 bp, probe
ggctatggttcattcgtcttcatcc

SEQ ID NO: 74802 - DNA, 25 bp, probe
catgtcgtgttggttactataacaa

SEQ ID NO: 74803 - DNA, 25 bp, probe
ccatgtcgtgttggttactataaca

SEQ ID NO: 74804 - DNA, 25 bp, probe
atcccatgtcgtgttggttactata

SEQ ID NO: 74805 - DNA, 25 bp, probe
cccatgtcgtgttggttactataac

SEQ ID NO: 74806 - DNA, 25 bp, probe
atgtcgtgttggttactataacaac

SEQ ID NO: 74807 - DNA, 25 bp, probe
catggtcttctttgtcatcagcttc

SEQ ID NO: 74808 - DNA, 25 bp, probe
tcccatgtcgtgttggttactataa

SEQ ID NO: 74809 - DNA, 25 bp, probe
atggtcttctttgtcatcagcttca

SEQ ID NO: 74810 - DNA, 25 bp, probe
ctatggttcattcgtcttcatccca

SEQ ID NO: 74811 - DNA, 25 bp, probe
tcagcatggtcttctttgtcatcag

SEQ ID NO: 74812 - DNA, 25 bp, probe
ctcagcatggtcttctttgtcatca

SEQ ID NO: 74813 - DNA, 25 bp, probe
gctatggttcattcgtcttcatccc

SEQ ID NO: 74814 - DNA, 25 bp, probe
tggtcttctttgtcatcagcttcag

SEQ ID NO: 74815 - DNA, 25 bp, probe
catcccatgtcgtgttggttactat

SEQ ID NO: 74816 - DNA, 25 bp, probe
ggttcattcgtcttcatcccatgtc

SEQ ID NO: 74817 - DNA, 25 bp, probe
ggtcttctttgtcatcagcttcagg

SEQ ID NO: 74818 - DNA, 25 bp, probe
gaaacaatcaccttgctccacactc

SEQ ID NO: 74819 - DNA, 25 bp, probe
gttcattcgtcttcatcccatgtcg

SEQ ID NO: 74820 - DNA, 25 bp, probe
tttcaggaaacaatcaccttgctcc

SEQ ID NO: 74821 - DNA, 25 bp, probe
gcatggtcttctttgtcatcagctt

SEQ ID NO: 74822 - DNA, 25 bp, probe
tcatcccatgtcgtgttggttacta

SEQ ID NO: 74823 - DNA, 25 bp, probe
gctcagcatggtcttctttgtcatc

SEQ ID NO: 74824 - DNA, 25 bp, probe
ttttcaggaaacaatcaccttgctc

SEQ ID NO: 74825 - DNA, 25 bp, probe
gttggttactataacaacagtacca

SEQ ID NO: 74826 - DNA, 25 bp, probe
gtcttctttgtcatcagcttcaggc

SEQ ID NO: 74827 - DNA, 25 bp, probe
ctcattgacttttctgctcaggaca

SEQ ID NO: 74828 - DNA, 25 bp, probe
tggttactataacaacagtaccaag

SEQ ID NO: 74829 - DNA, 25 bp, probe
cagcatggtcttctttgtcatcagc

SEQ ID NO: 74830 - DNA, 25 bp, probe
ttcattcgtcttcatcccatgtcgt

SEQ ID NO: 74831 - DNA, 25 bp, probe
cttcatcccatgtcgtgttggttac

SEQ ID NO: 74832 - DNA, 25 bp, probe
tatggttcattcgtcttcatcccat

SEQ ID NO: 74833 - DNA, 25 bp, probe
tcattgacttttctgctcaggacag

SEQ ID NO: 74834 - DNA, 25 bp, probe
tcttcatcccatgtcgtgttggtta

SEQ ID NO: 74835 - DNA, 25 bp, probe
cttctttgtcatcagcttcaggcac

SEQ ID NO: 74836 - DNA, 25 bp, probe
attcgtcttcatcccatgtcgtgtt

SEQ ID NO: 74837 - DNA, 25 bp, probe
aaacaatcaccttgctccacactca

SEQ ID NO: 74838 - DNA, 25 bp, probe
tcttctttgtcatcagcttcaggca

SEQ ID NO: 74839 - DNA, 25 bp, probe
ttcatcccatgtcgtgttggttact

SEQ ID NO: 74840 - DNA, 25 bp, probe
ttcaggaaacaatcaccttgctcca

SEQ ID NO: 74841 - DNA, 25 bp, probe
tggttcattcgtcttcatcccatgt

SEQ ID NO: 74842 - DNA, 25 bp, probe
gttttcaggaaacaatcaccttgct

SEQ ID NO: 74843 - DNA, 25 bp, probe
tcattcgtcttcatcccatgtcgtg

SEQ ID NO: 74844 - DNA, 25 bp, probe
gctcattgacttttctgctcaggac

SEQ ID NO: 74845 - DNA, 25 bp, probe
ttctgccttaaatcttgatgatcca

SEQ ID NO: 74846 - DNA, 25 bp, probe
ggttgctgatgggattaggtatttg

SEQ ID NO: 74847 - DNA, 25 bp, probe
aattatacaggagagaaactcagca

SEQ ID NO: 74848 - DNA, 25 bp, probe
tttctgccttaaatcttgatgatcc

SEQ ID NO: 74849 - DNA, 25 bp, probe
attatacaggagagaaactcagcat

SEQ ID NO: 74850 - DNA, 25 bp, probe
atggttgctgatgggattaggtatt

SEQ ID NO: 74851 - DNA, 25 bp, probe
tggttgctgatgggattaggtattt

SEQ ID NO: 74852 - DNA, 25 bp, probe
tctgccttaaatcttgatgatccaa

SEQ ID NO: 74853 - DNA, 25 bp, probe
gatggttgctgatgggattaggtat

SEQ ID NO: 74854 - DNA, 25 bp, probe
gttgctgatgggattaggtatttgc

SEQ ID NO: 74855 - DNA, 25 bp, probe
gactgaggatcaagtttacatggta

SEQ ID NO: 74856 - DNA, 25 bp, probe
tgagactgaggatcaagtttacatg

SEQ ID NO: 74857 - DNA, 25 bp, probe
actcataggaatctaaagcctgaaa

SEQ ID NO: 74858 - DNA, 25 bp, probe
aactcataggaatctaaagcctgaa

SEQ ID NO: 74859 - DNA, 25 bp, probe
ttatacaggagagaaactcagcatg

SEQ ID NO: 74860 - DNA, 25 bp, probe
gagactgaggatcaagtttacatgg

SEQ ID NO: 74861 - DNA, 25 bp, probe
tatacaggagagaaactcagcatga

SEQ ID NO: 74862 - DNA, 25 bp, probe
taactcataggaatctaaagcctga

SEQ ID NO: 74863 - DNA, 25 bp, probe
agactgaggatcaagtttacatggt

SEQ ID NO: 74864 - DNA, 25 bp, probe
gatcaagtttacatggtaatggagc

SEQ ID NO: 74865 - DNA, 25 bp, probe
aggatcaagtttacatggtaatgga

SEQ ID NO: 74866 - DNA, 25 bp, probe
actgaggatcaagtttacatggtaa

SEQ ID NO: 74867 - DNA, 25 bp, probe
ggatcaagtttacatggtaatggag

SEQ ID NO: 74868 - DNA, 25 bp, probe
gaggatcaagtttacatggtaatgg

SEQ ID NO: 74869 - DNA, 25 bp, probe
agatggttgctgatgggattaggta

SEQ ID NO: 74870 - DNA, 25 bp, probe
ataactcataggaatctaaagcctg

SEQ ID NO: 74871 - DNA, 25 bp, probe
tgaggatcaagtttacatggtaatg

SEQ ID NO: 74872 - DNA, 25 bp, probe
atacaggagagaaactcagcatgac

SEQ ID NO: 74873 - DNA, 25 bp, probe
ctgaggatcaagtttacatggtaat

SEQ ID NO: 74874 - DNA, 25 bp, probe
gataactcataggaatctaaagcct

SEQ ID NO: 74875 - DNA, 25 bp, probe
atcaagtttacatggtaatggagct

SEQ ID NO: 74876 - DNA, 25 bp, probe
taattatacaggagagaaactcagc

SEQ ID NO: 74877 - DNA, 25 bp, probe
tcaagtttacatggtaatggagctg

SEQ ID NO: 74878 - DNA, 25 bp, probe
gctgatgggattaggtatttgcatg

SEQ ID NO: 74879 - DNA, 25 bp, probe
atctttgagactgaggatcaagttt

SEQ ID NO: 74880 - DNA, 25 bp, probe
ggaatctaaagcctgaaaacctctt

SEQ ID NO: 74881 - DNA, 25 bp, probe
tttgagactgaggatcaagtttaca

SEQ ID NO: 74882 - DNA, 25 bp, probe
gatctttgagactgaggatcaagtt

SEQ ID NO: 74883 - DNA, 25 bp, probe
ttgagactgaggatcaagtttacat

SEQ ID NO: 74884 - DNA, 25 bp, probe
ctttgagactgaggatcaagtttac

SEQ ID NO: 74885 - DNA, 25 bp, probe
tctttgagactgaggatcaagttta

SEQ ID NO: 74886 - DNA, 25 bp, probe
gaatctaaagcctgaaaacctctta

SEQ ID NO: 74887 - DNA, 25 bp, probe
ttttgtgatgaagtgttttctcagc

SEQ ID NO: 74888 - DNA, 25 bp, probe
agcctgaaaacctcttatactatca

SEQ ID NO: 74889 - DNA, 25 bp, probe
attgtaaagtcatttctcttccagc

SEQ ID NO: 74890 - DNA, 25 bp, probe
agattgtaaagtcatttctcttcca

SEQ ID NO: 74891 - DNA, 25 bp, probe
cgatcctgagattgtaaagtcattt

SEQ ID NO: 74892 - DNA, 25 bp, probe
gattgtaaagtcatttctcttccag

SEQ ID NO: 74893 - DNA, 25 bp, probe
atcctgagattgtaaagtcatttct

SEQ ID NO: 74894 - DNA, 25 bp, probe
ttgtaaagtcatttctcttccagct

SEQ ID NO: 74895 - DNA, 25 bp, probe
tcgatcctgagattgtaaagtcatt

SEQ ID NO: 74896 - DNA, 25 bp, probe
catgaccaagctgccagactataag

SEQ ID NO: 74897 - DNA, 25 bp, probe
ctcgatcctgagattgtaaagtcat

SEQ ID NO: 74898 - DNA, 25 bp, probe
gatcctgagattgtaaagtcatttc

SEQ ID NO: 74899 - DNA, 25 bp, probe
cagactataagctgtacccattgta

SEQ ID NO: 74900 - DNA, 25 bp, probe
ccagactataagctgtacccattgt

SEQ ID NO: 74901 - DNA, 25 bp, probe
agactataagctgtacccattgtac

SEQ ID NO: 74902 - DNA, 25 bp, probe
gactataagctgtacccattgtacc

SEQ ID NO: 74903 - DNA, 25 bp, probe
ccatgaccaagctgccagactataa

SEQ ID NO: 74904 - DNA, 25 bp, probe
atccccatctgctatgtcttctttg

SEQ ID NO: 74905 - DNA, 25 bp, probe
gccagactataagctgtacccattg

SEQ ID NO: 74906 - DNA, 25 bp, probe
agaatcttctgaagtgtaacccctg

SEQ ID NO: 74907 - DNA, 25 bp, probe
actataagctgtacccattgtaccc

SEQ ID NO: 74908 - DNA, 25 bp, probe
gatccccatctgctatgtcttcttt

SEQ ID NO: 74909 - DNA, 25 bp, probe
tcctgagattgtaaagtcatttctc

SEQ ID NO: 74910 - DNA, 25 bp, probe
cctgagattgtaaagtcatttctct

SEQ ID NO: 74911 - DNA, 25 bp, probe
tgccagactataagctgtacccatt

SEQ ID NO: 74912 - DNA, 25 bp, probe
tctcgatcctgagattgtaaagtca

SEQ ID NO: 74913 - DNA, 25 bp, probe
gaagtgtaacccctgccaatgtatc

SEQ ID NO: 74914 - DNA, 25 bp, probe
ctataagctgtacccattgtacccg

SEQ ID NO: 74915 - DNA, 25 bp, probe
ctgccagactataagctgtacccat

SEQ ID NO: 74916 - DNA, 25 bp, probe
gagattgtaaagtcatttctcttcc

SEQ ID NO: 74917 - DNA, 25 bp, probe
ctgtactccacgtccattgacttgt

SEQ ID NO: 74918 - DNA, 25 bp, probe
taataaacaggaatggggagctgaa

SEQ ID NO: 74919 - DNA, 25 bp, probe
tccatgaccaagctgccagactata

SEQ ID NO: 74920 - DNA, 25 bp, probe
tgccaatgtatctcagcagaagagg

SEQ ID NO: 74921 - DNA, 25 bp, probe
aagtgtaacccctgccaatgtatct

SEQ ID NO: 74922 - DNA, 25 bp, probe
ctaataaacaggaatggggagctga

SEQ ID NO: 74923 - DNA, 25 bp, probe
ataaacaggaatggggagctgaaat

SEQ ID NO: 74924 - DNA, 25 bp, probe
tgagattgtaaagtcatttctcttc

SEQ ID NO: 74925 - DNA, 25 bp, probe
ctgagattgtaaagtcatttctctt

SEQ ID NO: 74926 - DNA, 25 bp, probe
gaatcttctgaagtgtaacccctgc

SEQ ID NO: 74927 - DNA, 25 bp, probe
cgtcgatgaccagttgaagaggatc

SEQ ID NO: 74928 - DNA, 25 bp, probe
tgtactccacgtccattgacttgtg

SEQ ID NO: 74929 - DNA, 25 bp, probe
taaacaggaatggggagctgaaatt

SEQ ID NO: 74930 - DNA, 25 bp, probe
aataaacaggaatggggagctgaaa

SEQ ID NO: 74931 - DNA, 25 bp, probe
tgaagtgtaacccctgccaatgtat

SEQ ID NO: 74932 - DNA, 25 bp, probe
tacccctacttttccgacttctgtc

SEQ ID NO: 74933 - DNA, 25 bp, probe
cgttgtgattgatattctgactgac

SEQ ID NO: 74934 - DNA, 25 bp, probe
cgctcacaactatatgctaagagaa

SEQ ID NO: 74935 - DNA, 25 bp, probe
gctcacaactatatgctaagagaac

SEQ ID NO: 74936 - DNA, 25 bp, probe
atcatgcgtgttaggaatatcagag

SEQ ID NO: 74937 - DNA, 25 bp, probe
catgcgtgttaggaatatcagagaa

SEQ ID NO: 74938 - DNA, 25 bp, probe
catcatgcgtgttaggaatatcaga

SEQ ID NO: 74939 - DNA, 25 bp, probe
gttgtgattgatattctgactgaca

SEQ ID NO: 74940 - DNA, 25 bp, probe
tgtgattgatattctgactgacatc

SEQ ID NO: 74941 - DNA, 25 bp, probe
tcatgcgtgttaggaatatcagaga

SEQ ID NO: 74942 - DNA, 25 bp, probe
caccgctcacaactatatgctaaga

SEQ ID NO: 74943 - DNA, 25 bp, probe
tgtggaacattacaagaagaatcct

SEQ ID NO: 74944 - DNA, 25 bp, probe
ttgtgattgatattctgactgacat

SEQ ID NO: 74945 - DNA, 25 bp, probe
ccgctcacaactatatgctaagaga

SEQ ID NO: 74946 - DNA, 25 bp, probe
tcacaactatatgctaagagaactt

SEQ ID NO: 74947 - DNA, 25 bp, probe
ctcacaactatatgctaagagaact

SEQ ID NO: 74948 - DNA, 25 bp, probe
acgttgtgattgatattctgactga

SEQ ID NO: 74949 - DNA, 25 bp, probe
accgctcacaactatatgctaagag

SEQ ID NO: 74950 - DNA, 25 bp, probe
atgcgtgttaggaatatcagagaaa

SEQ ID NO: 74951 - DNA, 25 bp, probe
tgttaggaatatcagagaaagcacc

SEQ ID NO: 74952 - DNA, 25 bp, probe
cattacaagaagaatcctatgatgg

SEQ ID NO: 74953 - DNA, 25 bp, probe
gtggaacattacaagaagaatccta

SEQ ID NO: 74954 - DNA, 25 bp, probe
cgtgttaggaatatcagagaaagca

SEQ ID NO: 74955 - DNA, 25 bp, probe
tgcgtgttaggaatatcagagaaag

SEQ ID NO: 74956 - DNA, 25 bp, probe
tacgttgtgattgatattctgactg

SEQ ID NO: 74957 - DNA, 25 bp, probe
gttaggaatatcagagaaagcaccg

SEQ ID NO: 74958 - DNA, 25 bp, probe
ctatatggcggtccagcattatact

SEQ ID NO: 74959 - DNA, 25 bp, probe
tctatatggcggtccagcattatac

SEQ ID NO: 74960 - DNA, 25 bp, probe
caagaggaaagaaatgagagcagac

SEQ ID NO: 74961 - DNA, 25 bp, probe
gacagaaacacagtaccgatttatc

SEQ ID NO: 74962 - DNA, 25 bp, probe
agacagaaacacagtaccgatttat

SEQ ID NO: 74963 - DNA, 25 bp, probe
aaagcaagaggaaagaaatgagagc

SEQ ID NO: 74964 - DNA, 25 bp, probe
catacgttgtgattgatattctgac

SEQ ID NO: 74965 - DNA, 25 bp, probe
cagacagaaacacagtaccgattta

SEQ ID NO: 74966 - DNA, 25 bp, probe
agaacttaaactttcaaaggttggg

SEQ ID NO: 74967 - DNA, 25 bp, probe
atacgttgtgattgatattctgact

SEQ ID NO: 74968 - DNA, 25 bp, probe
gcgtgttaggaatatcagagaaagc

SEQ ID NO: 74969 - DNA, 25 bp, probe
tggaacattacaagaagaatcctat

SEQ ID NO: 74970 - DNA, 25 bp, probe
tatatggcggtccagcattatactg

SEQ ID NO: 74971 - DNA, 25 bp, probe
acagaaacacagtaccgatttatct

SEQ ID NO: 74972 - DNA, 25 bp, probe
ggacatacgttgtgattgatattct

SEQ ID NO: 74973 - DNA, 25 bp, probe
aagaggaaagaaatgagagcagaca

SEQ ID NO: 74974 - DNA, 25 bp, probe
acattacaagaagaatcctatgatg

SEQ ID NO: 74975 - DNA, 25 bp, probe
cagcattatactgaaacactacagc

SEQ ID NO: 74976 - DNA, 25 bp, probe
tccagcattatactgaaacactaca

SEQ ID NO: 74977 - DNA, 25 bp, probe
taagtatttgcagcagaacaggtat

SEQ ID NO: 74978 - DNA, 25 bp, probe
ataagtatttgcagcagaacaggta

SEQ ID NO: 74979 - DNA, 25 bp, probe
aagtatttgcagcagaacaggtatt

SEQ ID NO: 74980 - DNA, 25 bp, probe
aataagtatttgcagcagaacaggt

SEQ ID NO: 74981 - DNA, 25 bp, probe
caataagtatttgcagcagaacagg

SEQ ID NO: 74982 - DNA, 25 bp, probe
agtatttgcagcagaacaggtattg

SEQ ID NO: 74983 - DNA, 25 bp, probe
gtatttgcagcagaacaggtattgg

SEQ ID NO: 74984 - DNA, 25 bp, probe
taaaggtgactcggatgctcaagaa

SEQ ID NO: 74985 - DNA, 25 bp, probe
aaacagaactgggagagttgtgaaa

SEQ ID NO: 74986 - DNA, 25 bp, probe
ttgtgagatgcctgtgtcagaagac

SEQ ID NO: 74987 - DNA, 25 bp, probe
gttgtgagatgcctgtgtcagaaga

SEQ ID NO: 74988 - DNA, 25 bp, probe
tatttgcagcagaacaggtattggg

SEQ ID NO: 74989 - DNA, 25 bp, probe
tgttgtgagatgcctgtgtcagaag

SEQ ID NO: 74990 - DNA, 25 bp, probe
gtgatgaaaacagaactgggagagt

SEQ ID NO: 74991 - DNA, 25 bp, probe
gtaaaggtgactcggatgctcaaga

SEQ ID NO: 74992 - DNA, 25 bp, probe
caggactgtaaaggtgactcggatg

SEQ ID NO: 74993 - DNA, 25 bp, probe
aaaggtgactcggatgctcaagaaa

SEQ ID NO: 74994 - DNA, 25 bp, probe
ggtgatgaaaacagaactgggagag

SEQ ID NO: 74995 - DNA, 25 bp, probe
tcagaagacactgagttcctcactc

SEQ ID NO: 74996 - DNA, 25 bp, probe
tgtaaaggtgactcggatgctcaag

SEQ ID NO: 74997 - DNA, 25 bp, probe
ctgtaaaggtgactcggatgctcaa

SEQ ID NO: 74998 - DNA, 25 bp, probe
gactgtaaaggtgactcggatgctc

SEQ ID NO: 74999 - DNA, 25 bp, probe
gtcagaagacactgagttcctcact

SEQ ID NO: 75000 - DNA, 25 bp, probe
aggtgatgaaaacagaactgggaga

SEQ ID NO: 75001 - DNA, 25 bp, probe
aaggtgactcggatgctcaagaaac

SEQ ID NO: 75002 - DNA, 25 bp, probe
gatgaaaacagaactgggagagttg

SEQ ID NO: 75003 - DNA, 25 bp, probe
caggtgatgaaaacagaactgggag

SEQ ID NO: 75004 - DNA, 25 bp, probe
tgatgaaaacagaactgggagagtt

SEQ ID NO: 75005 - DNA, 25 bp, probe
atgaaaacagaactgggagagttgt

SEQ ID NO: 75006 - DNA, 25 bp, probe
tgtcagaagacactgagttcctcac

SEQ ID NO: 75007 - DNA, 25 bp, probe
aacagaactgggagagttgtgaaaa

SEQ ID NO: 75008 - DNA, 25 bp, probe
aaaacagaactgggagagttgtgaa

SEQ ID NO: 75009 - DNA, 25 bp, probe
cagaagacactgagttcctcactcg

SEQ ID NO: 75010 - DNA, 25 bp, probe
gaaaacagaactgggagagttgtga

SEQ ID NO: 75011 - DNA, 25 bp, probe
acagaactgggagagttgtgaaaac

SEQ ID NO: 75012 - DNA, 25 bp, probe
tgaaaacagaactgggagagttgtg

SEQ ID NO: 75013 - DNA, 25 bp, probe
cagaactgggagagttgtgaaaacc

SEQ ID NO: 75014 - DNA, 25 bp, probe
agaactgggagagttgtgaaaaccg

SEQ ID NO: 75015 - DNA, 25 bp, probe
ccaggtgatgaaaacagaactggga

SEQ ID NO: 75016 - DNA, 25 bp, probe
cataagatgctcagagtcctcaatt

SEQ ID NO: 75017 - DNA, 25 bp, probe
gagagaggagaaggatctaaggtag

SEQ ID NO: 75018 - DNA, 25 bp, probe
aactgagagaggagaaggatctaag

SEQ ID NO: 75019 - DNA, 25 bp, probe
caactgagagaggagaaggatctaa

SEQ ID NO: 75020 - DNA, 25 bp, probe
gagaggagaaggatctaaggtagtg

SEQ ID NO: 75021 - DNA, 25 bp, probe
agagaggagaaggatctaaggtagt

SEQ ID NO: 75022 - DNA, 25 bp, probe
tgagagaggagaaggatctaaggta

SEQ ID NO: 75023 - DNA, 25 bp, probe
tcaactgagagaggagaaggatcta

SEQ ID NO: 75024 - DNA, 25 bp, probe
catcaactgagagaggagaaggatc

SEQ ID NO: 75025 - DNA, 25 bp, probe
atcaactgagagaggagaaggatct

SEQ ID NO: 75026 - DNA, 25 bp, probe
agaggagaaggatctaaggtagtgg

SEQ ID NO: 75027 - DNA, 25 bp, probe
ctgagagaggagaaggatctaaggt

SEQ ID NO: 75028 - DNA, 25 bp, probe
actgagagaggagaaggatctaagg

SEQ ID NO: 75029 - DNA, 25 bp, probe
ccatcaactgagagaggagaaggat

SEQ ID NO: 75030 - DNA, 25 bp, probe
ctgtcaaacaatgaggtgatagagt

SEQ ID NO: 75031 - DNA, 25 bp, probe
tcaaacaatgaggtgatagagtgta

SEQ ID NO: 75032 - DNA, 25 bp, probe
gtcaaacaatgaggtgatagagtgt

SEQ ID NO: 75033 - DNA, 25 bp, probe
tgtcaaacaatgaggtgatagagtg

SEQ ID NO: 75034 - DNA, 25 bp, probe
caaacaatgaggtgatagagtgtat

SEQ ID NO: 75035 - DNA, 25 bp, probe
ataagatgctcagagtcctcaattg

SEQ ID NO: 75036 - DNA, 25 bp, probe
aaacaatgaggtgatagagtgtatc

SEQ ID NO: 75037 - DNA, 25 bp, probe
gctgtcaaacaatgaggtgatagag

SEQ ID NO: 75038 - DNA, 25 bp, probe
catccataccctccttcagaacttg

SEQ ID NO: 75039 - DNA, 25 bp, probe
taagatgctcagagtcctcaattgt

SEQ ID NO: 75040 - DNA, 25 bp, probe
ggtctacctggacattctaggctag

SEQ ID NO: 75041 - DNA, 25 bp, probe
aattgtgactccttcccatcaactg

SEQ ID NO: 75042 - DNA, 25 bp, probe
gaggagaaggatctaaggtagtggg

SEQ ID NO: 75043 - DNA, 25 bp, probe
gaagaacatcaagggcatccatacc

SEQ ID NO: 75044 - DNA, 25 bp, probe
agctgtcaaacaatgaggtgataga

SEQ ID NO: 75045 - DNA, 25 bp, probe
aacaatgaggtgatagagtgtatca

SEQ ID NO: 75046 - DNA, 25 bp, probe
gatctaaggtagtgggccattatag

SEQ ID NO: 75047 - DNA, 25 bp, probe
aagatgctcagagtcctcaattgtg

SEQ ID NO: 75048 - DNA, 25 bp, probe
atctaaggtagtgggccattatagg

SEQ ID NO: 75049 - DNA, 25 bp, probe
ggatctaaggtagtgggccattata

SEQ ID NO: 75050 - DNA, 25 bp, probe
tgaagcttgtgataacatgcataag

SEQ ID NO: 75051 - DNA, 25 bp, probe
cttgaagcttgtgataacatgcata

SEQ ID NO: 75052 - DNA, 25 bp, probe
agcttgtgataacatgcataagatg

SEQ ID NO: 75053 - DNA, 25 bp, probe
gaagcttgtgataacatgcataaga

SEQ ID NO: 75054 - DNA, 25 bp, probe
ttgaagcttgtgataacatgcataa

SEQ ID NO: 75055 - DNA, 25 bp, probe
aagcttgtgataacatgcataagat

SEQ ID NO: 75056 - DNA, 25 bp, probe
attgtgactccttcccatcaactga

SEQ ID NO: 75057 - DNA, 25 bp, probe
ggagattttcacctatggcaaacag

SEQ ID NO: 75058 - DNA, 25 bp, probe
agagagcatcatgtacaggaaattc

SEQ ID NO: 75059 - DNA, 25 bp, probe
gcatccataccctccttcagaactt

SEQ ID NO: 75060 - DNA, 25 bp, probe
ttaaggatgtgacgttattaccagt

SEQ ID NO: 75061 - DNA, 25 bp, probe
taaggatgtgacgttattaccagtg

SEQ ID NO: 75062 - DNA, 25 bp, probe
tggaatcagagattacagaagttct

SEQ ID NO: 75063 - DNA, 25 bp, probe
tgtgacgttattaccagtgaactaa

SEQ ID NO: 75064 - DNA, 25 bp, probe
atgtgacgttattaccagtgaacta

SEQ ID NO: 75065 - DNA, 25 bp, probe
cagcactgactactacaggttctac

SEQ ID NO: 75066 - DNA, 25 bp, probe
taatgaaagttctcccttccttgat

SEQ ID NO: 75067 - DNA, 25 bp, probe
ctacaccttaatgaaagttctccct

SEQ ID NO: 75068 - DNA, 25 bp, probe
tctacaccttaatgaaagttctccc

SEQ ID NO: 75069 - DNA, 25 bp, probe
ttaatgaaagttctcccttccttga

SEQ ID NO: 75070 - DNA, 25 bp, probe
cttaatgaaagttctcccttccttg

SEQ ID NO: 75071 - DNA, 25 bp, probe
ccttaatgaaagttctcccttcctt

SEQ ID NO: 75072 - DNA, 25 bp, probe
tacaccttaatgaaagttctccctt

SEQ ID NO: 75073 - DNA, 25 bp, probe
agttctgattcatagagtattggaa

SEQ ID NO: 75074 - DNA, 25 bp, probe
aagttctgattcatagagtattgga

SEQ ID NO: 75075 - DNA, 25 bp, probe
tgctgatcttgaacaatggagactt

SEQ ID NO: 75076 - DNA, 25 bp, probe
acaccttaatgaaagttctcccttc

SEQ ID NO: 75077 - DNA, 25 bp, probe
gatgtgacgttattaccagtgaact

SEQ ID NO: 75078 - DNA, 25 bp, probe
atggaatcagagattacagaagttc

SEQ ID NO: 75079 - DNA, 25 bp, probe
aatgaaagttctcccttccttgatg

SEQ ID NO: 75080 - DNA, 25 bp, probe
gcactgactactacaggttctacac

SEQ ID NO: 75081 - DNA, 25 bp, probe
ttgctgatcttgaacaatggagact

SEQ ID NO: 75082 - DNA, 25 bp, probe
gttctgattcatagagtattggaag

SEQ ID NO: 75083 - DNA, 25 bp, probe
gaagttctgattcatagagtattgg

SEQ ID NO: 75084 - DNA, 25 bp, probe
agcactgactactacaggttctaca

SEQ ID NO: 75085 - DNA, 25 bp, probe
acagcactgactactacaggttcta

SEQ ID NO: 75086 - DNA, 25 bp, probe
tacagcactgactactacaggttct

SEQ ID NO: 75087 - DNA, 25 bp, probe
cactgactactacaggttctacacc

SEQ ID NO: 75088 - DNA, 25 bp, probe
aggatgtgacgttattaccagtgaa

SEQ ID NO: 75089 - DNA, 25 bp, probe
aaggatgtgacgttattaccagtga

SEQ ID NO: 75090 - DNA, 25 bp, probe
tctgattcatagagtattggaagaa

SEQ ID NO: 75091 - DNA, 25 bp, probe
ttctgattcatagagtattggaaga

SEQ ID NO: 75092 - DNA, 25 bp, probe
cttaaggatgtgacgttattaccag

SEQ ID NO: 75093 - DNA, 25 bp, probe
accttaatgaaagttctcccttcct

SEQ ID NO: 75094 - DNA, 25 bp, probe
caccttaatgaaagttctcccttcc

SEQ ID NO: 75095 - DNA, 25 bp, probe
ttctacaccttaatgaaagttctcc

SEQ ID NO: 75096 - DNA, 25 bp, probe
gtacagcactgactactacaggttc

SEQ ID NO: 75097 - DNA, 25 bp, probe
aatggaatcagagattacagaagtt

SEQ ID NO: 75098 - DNA, 25 bp, probe
ggatgtgacgttattaccagtgaac

SEQ ID NO: 75099 - DNA, 25 bp, probe
catcacattggcgttatttgtcatc

SEQ ID NO: 75100 - DNA, 25 bp, probe
gctgatcttgaacaatggagacttt

SEQ ID NO: 75101 - DNA, 25 bp, probe
atcacattggcgttatttgtcatca

SEQ ID NO: 75102 - DNA, 25 bp, probe
ctttgctgatcttgaacaatggaga

SEQ ID NO: 75103 - DNA, 25 bp, probe
gttctacaccttaatgaaagttctc

SEQ ID NO: 75104 - DNA, 25 bp, probe
tatctttcctgtggagttccctcta

SEQ ID NO: 75105 - DNA, 25 bp, probe
gaggacttcgctttggatatctttc

SEQ ID NO: 75106 - DNA, 25 bp, probe
atatctttcctgtggagttccctct

SEQ ID NO: 75107 - DNA, 25 bp, probe
atctttcctgtggagttccctctaa

SEQ ID NO: 75108 - DNA, 25 bp, probe
tttggatatctttcctgtggagttc

SEQ ID NO: 75109 - DNA, 25 bp, probe
ctttggatatctttcctgtggagtt

SEQ ID NO: 75110 - DNA, 25 bp, probe
tctttcctgtggagttccctctaaa

SEQ ID NO: 75111 - DNA, 25 bp, probe
ctttcctgtggagttccctctaaag

SEQ ID NO: 75112 - DNA, 25 bp, probe
ggaggacttcgctttggatatcttt

SEQ ID NO: 75113 - DNA, 25 bp, probe
ctgtggagttccctctaaaggatct

SEQ ID NO: 75114 - DNA, 25 bp, probe
gacttcgctttggatatctttcctg

SEQ ID NO: 75115 - DNA, 25 bp, probe
ttggatatctttcctgtggagttcc

SEQ ID NO: 75116 - DNA, 25 bp, probe
cttcgctttggatatctttcctgtg

SEQ ID NO: 75117 - DNA, 25 bp, probe
tgtggagttccctctaaaggatctg

SEQ ID NO: 75118 - DNA, 25 bp, probe
gatatctttcctgtggagttccctc

SEQ ID NO: 75119 - DNA, 25 bp, probe
acttcgctttggatatctttcctgt

SEQ ID NO: 75120 - DNA, 25 bp, probe
tttcctgtggagttccctctaaagg

SEQ ID NO: 75121 - DNA, 25 bp, probe
gctttggatatctttcctgtggagt

SEQ ID NO: 75122 - DNA, 25 bp, probe
ccgaggtcaagaggtgtatgtgaaa

SEQ ID NO: 75123 - DNA, 25 bp, probe
ggacttcgctttggatatctttcct

SEQ ID NO: 75124 - DNA, 25 bp, probe
aggacttcgctttggatatctttcc

SEQ ID NO: 75125 - DNA, 25 bp, probe
cgaggtcaagaggtgtatgtgaaaa

SEQ ID NO: 75126 - DNA, 25 bp, probe
gtggagttccctctaaaggatctgg

SEQ ID NO: 75127 - DNA, 25 bp, probe
cctgtggagttccctctaaaggatc

SEQ ID NO: 75128 - DNA, 25 bp, probe
ttcgctttggatatctttcctgtgg

SEQ ID NO: 75129 - DNA, 25 bp, probe
ggatatctttcctgtggagttccct

SEQ ID NO: 75130 - DNA, 25 bp, probe
gagttccctctaaaggatctggctg

SEQ ID NO: 75131 - DNA, 25 bp, probe
cgctttggatatctttcctgtggag

SEQ ID NO: 75132 - DNA, 25 bp, probe
tggatatctttcctgtggagttccc

SEQ ID NO: 75133 - DNA, 25 bp, probe
attgtcccgaggtcaagaggtgtat

SEQ ID NO: 75134 - DNA, 25 bp, probe
tcgctttggatatctttcctgtgga

SEQ ID NO: 75135 - DNA, 25 bp, probe
cggaggacttcgctttggatatctt

SEQ ID NO: 75136 - DNA, 25 bp, probe
ggagttccctctaaaggatctggct

SEQ ID NO: 75137 - DNA, 25 bp, probe
tcctgtggagttccctctaaaggat

SEQ ID NO: 75138 - DNA, 25 bp, probe
ttcctgtggagttccctctaaagga

SEQ ID NO: 75139 - DNA, 25 bp, probe
atatctggatatctgctggaagcct

SEQ ID NO: 75140 - DNA, 25 bp, probe
ccgatatctggatatctgctggaag

SEQ ID NO: 75141 - DNA, 25 bp, probe
gatatctgctggaagcctcaagaag

SEQ ID NO: 75142 - DNA, 25 bp, probe
gatatctggatatctgctggaagcc

SEQ ID NO: 75143 - DNA, 25 bp, probe
tatctggatatctgctggaagcctc

SEQ ID NO: 75144 - DNA, 25 bp, probe
cgatatctggatatctgctggaagc

SEQ ID NO: 75145 - DNA, 25 bp, probe
atatctgctggaagcctcaagaagc

SEQ ID NO: 75146 - DNA, 25 bp, probe
catgtcccgatatctggatatctgc

SEQ ID NO: 75147 - DNA, 25 bp, probe
gcatgtcccgatatctggatatctg

SEQ ID NO: 75148 - DNA, 25 bp, probe
ggatatctgctggaagcctcaagaa

SEQ ID NO: 75149 - DNA, 25 bp, probe
atgtcccgatatctggatatctgct

SEQ ID NO: 75150 - DNA, 25 bp, probe
cccgatatctggatatctgctggaa

SEQ ID NO: 75151 - DNA, 25 bp, probe
tgtcccgatatctggatatctgctg

SEQ ID NO: 75152 - DNA, 25 bp, probe
ggcatgtcccgatatctggatatct

SEQ ID NO: 75153 - DNA, 25 bp, probe
ctggatatctgctggaagcctcaag

SEQ ID NO: 75154 - DNA, 25 bp, probe
atctggatatctgctggaagcctca

SEQ ID NO: 75155 - DNA, 25 bp, probe
tggatatctgctggaagcctcaaga

SEQ ID NO: 75156 - DNA, 25 bp, probe
tctggatatctgctggaagcctcaa

SEQ ID NO: 75157 - DNA, 25 bp, probe
tcccgatatctggatatctgctgga

SEQ ID NO: 75158 - DNA, 25 bp, probe
gtcccgatatctggatatctgctgg

SEQ ID NO: 75159 - DNA, 25 bp, probe
gggcatgtcccgatatctggatatc

SEQ ID NO: 75160 - DNA, 25 bp, probe
caacaaaatgggcatgagtgtcagg

SEQ ID NO: 75161 - DNA, 25 bp, probe
tgggcatgtcccgatatctggatat

SEQ ID NO: 75162 - DNA, 25 bp, probe
cacagataccattgatattgctcca

SEQ ID NO: 75163 - DNA, 25 bp, probe
aagaagaatggaacttgctgtattg

SEQ ID NO: 75164 - DNA, 25 bp, probe
aattatgagagaatgttggtatgcc

SEQ ID NO: 75165 - DNA, 25 bp, probe
acagataccattgatattgctccaa

SEQ ID NO: 75166 - DNA, 25 bp, probe
ccacagataccattgatattgctcc

SEQ ID NO: 75167 - DNA, 25 bp, probe
ttcagccacagataccattgatatt

SEQ ID NO: 75168 - DNA, 25 bp, probe
attcagccacagataccattgatat

SEQ ID NO: 75169 - DNA, 25 bp, probe
gattcagccacagataccattgata

SEQ ID NO: 75170 - DNA, 25 bp, probe
tcagccacagataccattgatattg

SEQ ID NO: 75171 - DNA, 25 bp, probe
actgccttattatgatcttgtacct

SEQ ID NO: 75172 - DNA, 25 bp, probe
gccacagataccattgatattgctc

SEQ ID NO: 75173 - DNA, 25 bp, probe
taagacatgattcagccacagatac

SEQ ID NO: 75174 - DNA, 25 bp, probe
gtaagacatgattcagccacagata

SEQ ID NO: 75175 - DNA, 25 bp, probe
aacattatcgcaactcagtcaacag

SEQ ID NO: 75176 - DNA, 25 bp, probe
accaactgccttattatgatcttgt

SEQ ID NO: 75177 - DNA, 25 bp, probe
cagccacagataccattgatattgc

SEQ ID NO: 75178 - DNA, 25 bp, probe
agaagaatggaacttgctgtattgc

SEQ ID NO: 75179 - DNA, 25 bp, probe
aactgccttattatgatcttgtacc

SEQ ID NO: 75180 - DNA, 25 bp, probe
catgaagattaccaactgccttatt

SEQ ID NO: 75181 - DNA, 25 bp, probe
agattaccaactgccttattatgat

SEQ ID NO: 75182 - DNA, 25 bp, probe
aagattaccaactgccttattatga

SEQ ID NO: 75183 - DNA, 25 bp, probe
tgaagattaccaactgccttattat

SEQ ID NO: 75184 - DNA, 25 bp, probe
atgaagattaccaactgccttatta

SEQ ID NO: 75185 - DNA, 25 bp, probe
tgccttattatgatcttgtaccttc

SEQ ID NO: 75186 - DNA, 25 bp, probe
ctgccttattatgatcttgtacctt

SEQ ID NO: 75187 - DNA, 25 bp, probe
gaagattaccaactgccttattatg

SEQ ID NO: 75188 - DNA, 25 bp, probe
gccttattatgatcttgtaccttct

SEQ ID NO: 75189 - DNA, 25 bp, probe
ccaactgccttattatgatcttgta

SEQ ID NO: 75190 - DNA, 25 bp, probe
taccaactgccttattatgatcttg

SEQ ID NO: 75191 - DNA, 25 bp, probe
tgattcagccacagataccattgat

SEQ ID NO: 75192 - DNA, 25 bp, probe
atgattcagccacagataccattga

SEQ ID NO: 75193 - DNA, 25 bp, probe
agtaagacatgattcagccacagat

SEQ ID NO: 75194 - DNA, 25 bp, probe
ttaccaactgccttattatgatctt

SEQ ID NO: 75195 - DNA, 25 bp, probe
attatcgcaactcagtcaacaggaa

SEQ ID NO: 75196 - DNA, 25 bp, probe
attatgagagaatgttggtatgcca

SEQ ID NO: 75197 - DNA, 25 bp, probe
cctgaagttctcgatgattccataa

SEQ ID NO: 75198 - DNA, 25 bp, probe
attaccaactgccttattatgatct

SEQ ID NO: 75199 - DNA, 25 bp, probe
catgattcagccacagataccattg

SEQ ID NO: 75200 - DNA, 25 bp, probe
ttaggactggcagtaagacatgatt

SEQ ID NO: 75201 - DNA, 25 bp, probe
tattatgatcttgtaccttctgacc

SEQ ID NO: 75202 - DNA, 25 bp, probe
gattaccaactgccttattatgatc

SEQ ID NO: 75203 - DNA, 25 bp, probe
caactgccttattatgatcttgtac

SEQ ID NO: 75204 - DNA, 25 bp, probe
cttggtaaagaagaatggaacttgc

SEQ ID NO: 75205 - DNA, 25 bp, probe
gtaaagaagaatggaacttgctgta

SEQ ID NO: 75206 - DNA, 25 bp, probe
gtttaagcatgagatgtttgaggag

SEQ ID NO: 75207 - DNA, 25 bp, probe
caggtttaagcatgagatgtttgag

SEQ ID NO: 75208 - DNA, 25 bp, probe
tttaagcatgagatgtttgaggagg

SEQ ID NO: 75209 - DNA, 25 bp, probe
ggtttaagcatgagatgtttgagga

SEQ ID NO: 75210 - DNA, 25 bp, probe
aggtttaagcatgagatgtttgagg

SEQ ID NO: 75211 - DNA, 25 bp, probe
ttaagcatgagatgtttgaggaggt

SEQ ID NO: 75212 - DNA, 25 bp, probe
gcaggtttaagcatgagatgtttga

SEQ ID NO: 75213 - DNA, 25 bp, probe
taagcatgagatgtttgaggaggtg

SEQ ID NO: 75214 - DNA, 25 bp, probe
ggcaggtttaagcatgagatgtttg

SEQ ID NO: 75215 - DNA, 25 bp, probe
gaggtgttcgctgaagagagaaatg

SEQ ID NO: 75216 - DNA, 25 bp, probe
catgagatgtttgaggaggtgttcg

SEQ ID NO: 75217 - DNA, 25 bp, probe
gggcaggtttaagcatgagatgttt

SEQ ID NO: 75218 - DNA, 25 bp, probe
gcatgagatgtttgaggaggtgttc

SEQ ID NO: 75219 - DNA, 25 bp, probe
gtgttcgctgaagagagaaatgctc

SEQ ID NO: 75220 - DNA, 25 bp, probe
agcatgagatgtttgaggaggtgtt

SEQ ID NO: 75221 - DNA, 25 bp, probe
aagcatgagatgtttgaggaggtgt

SEQ ID NO: 75222 - DNA, 25 bp, probe
ggaggtgttcgctgaagagagaaat

SEQ ID NO: 75223 - DNA, 25 bp, probe
agggcaggtttaagcatgagatgtt

SEQ ID NO: 75224 - DNA, 25 bp, probe
atgagatgtttgaggaggtgttcgc

SEQ ID NO: 75225 - DNA, 25 bp, probe
gagggcaggtttaagcatgagatgt

SEQ ID NO: 75226 - DNA, 25 bp, probe
tgttcgctgaagagagaaatgctcc

SEQ ID NO: 75227 - DNA, 25 bp, probe
gaagttcatcaagccaggagattag

SEQ ID NO: 75228 - DNA, 25 bp, probe
ttcagtggagatcagcaagttaatt

SEQ ID NO: 75229 - DNA, 25 bp, probe
gttcagtggagatcagcaagttaat

SEQ ID NO: 75230 - DNA, 25 bp, probe
cagtggagatcagcaagttaattac

SEQ ID NO: 75231 - DNA, 25 bp, probe
tcagtggagatcagcaagttaatta

SEQ ID NO: 75232 - DNA, 25 bp, probe
agtggagatcagcaagttaattacc

SEQ ID NO: 75233 - DNA, 25 bp, probe
ggaagttcatcaagccaggagatta

SEQ ID NO: 75234 - DNA, 25 bp, probe
ctaaggtagagctacagtgtgaatg

SEQ ID NO: 75235 - DNA, 25 bp, probe
gtgatagtttgaaagaagatgccag

SEQ ID NO: 75236 - DNA, 25 bp, probe
cagtgatagtttgaaagaagatgcc

SEQ ID NO: 75237 - DNA, 25 bp, probe
attagcagaggcatttcatatcagt

SEQ ID NO: 75238 - DNA, 25 bp, probe
atagtttgaaagaagatgccaggaa

SEQ ID NO: 75239 - DNA, 25 bp, probe
agtgatagtttgaaagaagatgcca

SEQ ID NO: 75240 - DNA, 25 bp, probe
ggagattagcagaggcatttcatat

SEQ ID NO: 75241 - DNA, 25 bp, probe
aagttcatcaagccaggagattagc

SEQ ID NO: 75242 - DNA, 25 bp, probe
agattagcagaggcatttcatatca

SEQ ID NO: 75243 - DNA, 25 bp, probe
gattagcagaggcatttcatatcag

SEQ ID NO: 75244 - DNA, 25 bp, probe
gatagtttgaaagaagatgccagga

SEQ ID NO: 75245 - DNA, 25 bp, probe
gagattagcagaggcatttcatatc

SEQ ID NO: 75246 - DNA, 25 bp, probe
ttagcagaggcatttcatatcagtg

SEQ ID NO: 75247 - DNA, 25 bp, probe
tagtttgaaagaagatgccaggaag

SEQ ID NO: 75248 - DNA, 25 bp, probe
tgatagtttgaaagaagatgccagg

SEQ ID NO: 75249 - DNA, 25 bp, probe
ctctaagataacagacatgcagctt

SEQ ID NO: 75250 - DNA, 25 bp, probe
tctaagataacagacatgcagcttg

SEQ ID NO: 75251 - DNA, 25 bp, probe
aggagattagcagaggcatttcata

SEQ ID NO: 75252 - DNA, 25 bp, probe
tggagatcagcaagttaattaccaa

SEQ ID NO: 75253 - DNA, 25 bp, probe
taaggtagagctacagtgtgaatgt

SEQ ID NO: 75254 - DNA, 25 bp, probe
ggttcagtggagatcagcaagttaa

SEQ ID NO: 75255 - DNA, 25 bp, probe
gtggagatcagcaagttaattacca

SEQ ID NO: 75256 - DNA, 25 bp, probe
tcagtgatagtttgaaagaagatgc

SEQ ID NO: 75257 - DNA, 25 bp, probe
ggcatttcatatcagtgaggattct

SEQ ID NO: 75258 - DNA, 25 bp, probe
aggcatttcatatcagtgaggattc

SEQ ID NO: 75259 - DNA, 25 bp, probe
gaggcatttcatatcagtgaggatt

SEQ ID NO: 75260 - DNA, 25 bp, probe
ctacagtgtgaatgtggacgaagaa

SEQ ID NO: 75261 - DNA, 25 bp, probe
ctaagataacagacatgcagcttgg

SEQ ID NO: 75262 - DNA, 25 bp, probe
agaggcatttcatatcagtgaggat

SEQ ID NO: 75263 - DNA, 25 bp, probe
gttcatcaagccaggagattagcag

SEQ ID NO: 75264 - DNA, 25 bp, probe
gcatttcatatcagtgaggattctg

SEQ ID NO: 75265 - DNA, 25 bp, probe
ggagatcagcaagttaattaccaaa

SEQ ID NO: 75266 - DNA, 25 bp, probe
taagataacagacatgcagcttgga

SEQ ID NO: 75267 - DNA, 25 bp, probe
ttcatcaagccaggagattagcaga

SEQ ID NO: 75268 - DNA, 25 bp, probe
tagcagaggcatttcatatcagtga

SEQ ID NO: 75269 - DNA, 25 bp, probe
cctctaagataacagacatgcagct

SEQ ID NO: 75270 - DNA, 25 bp, probe
aggaagttcatcaagccaggagatt

SEQ ID NO: 75271 - DNA, 25 bp, probe
tgtgtagggagatattcaacaggag

SEQ ID NO: 75272 - DNA, 25 bp, probe
gtgtagggagatattcaacaggagg

SEQ ID NO: 75273 - DNA, 25 bp, probe
atgagctgtgtagggagatattcaa

SEQ ID NO: 75274 - DNA, 25 bp, probe
gatgagctgtgtagggagatattca

SEQ ID NO: 75275 - DNA, 25 bp, probe
ggatgagctgtgtagggagatattc

SEQ ID NO: 75276 - DNA, 25 bp, probe
tgagctgtgtagggagatattcaac

SEQ ID NO: 75277 - DNA, 25 bp, probe
ctaggaagaggtctgatgacatcat

SEQ ID NO: 75278 - DNA, 25 bp, probe
aggatgagctgtgtagggagatatt

SEQ ID NO: 75279 - DNA, 25 bp, probe
tgtagggagatattcaacaggaggg

SEQ ID NO: 75280 - DNA, 25 bp, probe
taggaagaggtctgatgacatcatg

SEQ ID NO: 75281 - DNA, 25 bp, probe
gagctgtgtagggagatattcaaca

SEQ ID NO: 75282 - DNA, 25 bp, probe
gaggatgagctgtgtagggagatat

SEQ ID NO: 75283 - DNA, 25 bp, probe
atattcaacaggagggcggaagtag

SEQ ID NO: 75284 - DNA, 25 bp, probe
gatattcaacaggagggcggaagta

SEQ ID NO: 75285 - DNA, 25 bp, probe
gtagggagatattcaacaggagggc

SEQ ID NO: 75286 - DNA, 25 bp, probe
gaagaggtctgatgacatcatggag

SEQ ID NO: 75287 - DNA, 25 bp, probe
gtctgatgacatcatggaggatgag

SEQ ID NO: 75288 - DNA, 25 bp, probe
cttgtgtccctgagcagagttacat

SEQ ID NO: 75289 - DNA, 25 bp, probe
gaggtctgatgacatcatggaggat

SEQ ID NO: 75290 - DNA, 25 bp, probe
aagaggtctgatgacatcatggagg

SEQ ID NO: 75291 - DNA, 25 bp, probe
ggaagaggtctgatgacatcatgga

SEQ ID NO: 75292 - DNA, 25 bp, probe
aggaagaggtctgatgacatcatgg

SEQ ID NO: 75293 - DNA, 25 bp, probe
tattcaacaggagggcggaagtaga

SEQ ID NO: 75294 - DNA, 25 bp, probe
gagatattcaacaggagggcggaag

SEQ ID NO: 75295 - DNA, 25 bp, probe
ctgtgtagggagatattcaacagga

SEQ ID NO: 75296 - DNA, 25 bp, probe
acatcatggaggatgagctgtgtag

SEQ ID NO: 75297 - DNA, 25 bp, probe
gacatcatggaggatgagctgtgta

SEQ ID NO: 75298 - DNA, 25 bp, probe
ggtctgatgacatcatggaggatga

SEQ ID NO: 75299 - DNA, 25 bp, probe
aggtctgatgacatcatggaggatg

SEQ ID NO: 75300 - DNA, 25 bp, probe
ggaggatgagctgtgtagggagata

SEQ ID NO: 75301 - DNA, 25 bp, probe
ttgtgtccctgagcagagttacatg

SEQ ID NO: 75302 - DNA, 25 bp, probe
gatgacatcatggaggatgagctgt

SEQ ID NO: 75303 - DNA, 25 bp, probe
agctgtgtagggagatattcaacag

SEQ ID NO: 75304 - DNA, 25 bp, probe
ctgatgacatcatggaggatgagct

SEQ ID NO: 75305 - DNA, 25 bp, probe
tctgatgacatcatggaggatgagc

SEQ ID NO: 75306 - DNA, 25 bp, probe
agaggtctgatgacatcatggagga

SEQ ID NO: 75307 - DNA, 25 bp, probe
catcatggaggatgagctgtgtagg

SEQ ID NO: 75308 - DNA, 25 bp, probe
atgacatcatggaggatgagctgtg

SEQ ID NO: 75309 - DNA, 25 bp, probe
cctaggaagaggtctgatgacatca

SEQ ID NO: 75310 - DNA, 25 bp, probe
tgatgacatcatggaggatgagctg

SEQ ID NO: 75311 - DNA, 25 bp, probe
gctgtgtagggagatattcaacagg

SEQ ID NO: 75312 - DNA, 25 bp, probe
gagttacatgctccaagactccctg

SEQ ID NO: 75313 - DNA, 25 bp, probe
cagagttacatgctccaagactccc

SEQ ID NO: 75314 - DNA, 25 bp, probe
agagttacatgctccaagactccct

SEQ ID NO: 75315 - DNA, 25 bp, probe
tttaagcaggcgtttgatgaaagtc

SEQ ID NO: 75316 - DNA, 25 bp, probe
atgaaagtccccactcagcatatta

SEQ ID NO: 75317 - DNA, 25 bp, probe
ttttaagcaggcgtttgatgaaagt

SEQ ID NO: 75318 - DNA, 25 bp, probe
gattatggaagcatgtggtgaccag

SEQ ID NO: 75319 - DNA, 25 bp, probe
ttaagcaggcgtttgatgaaagtcc

SEQ ID NO: 75320 - DNA, 25 bp, probe
gaagaggtggttcatcatctgtccg

SEQ ID NO: 75321 - DNA, 25 bp, probe
ggaagaggtggttcatcatctgtcc

SEQ ID NO: 75322 - DNA, 25 bp, probe
tgaaagtccccactcagcatattac

SEQ ID NO: 75323 - DNA, 25 bp, probe
gatgaaagtccccactcagcatatt

SEQ ID NO: 75324 - DNA, 25 bp, probe
gggaagaggtggttcatcatctgtc

SEQ ID NO: 75325 - DNA, 25 bp, probe
gaaagtccccactcagcatattacc

SEQ ID NO: 75326 - DNA, 25 bp, probe
cttttaagcaggcgtttgatgaaag

SEQ ID NO: 75327 - DNA, 25 bp, probe
aaagtccccactcagcatattacca

SEQ ID NO: 75328 - DNA, 25 bp, probe
tgatgaaagtccccactcagcatat

SEQ ID NO: 75329 - DNA, 25 bp, probe
attatggaagcatgtggtgaccagg

SEQ ID NO: 75330 - DNA, 25 bp, probe
ggattatggaagcatgtggtgacca

SEQ ID NO: 75331 - DNA, 25 bp, probe
ttgatgaaagtccccactcagcata

SEQ ID NO: 75332 - DNA, 25 bp, probe
aagtccccactcagcatattaccag

SEQ ID NO: 75333 - DNA, 25 bp, probe
cactcagcatattaccaggggtttg

SEQ ID NO: 75334 - DNA, 25 bp, probe
tttgatgaaagtccccactcagcat

SEQ ID NO: 75335 - DNA, 25 bp, probe
actcagcatattaccaggggtttgg

SEQ ID NO: 75336 - DNA, 25 bp, probe
ccactcagcatattaccaggggttt

SEQ ID NO: 75337 - DNA, 25 bp, probe
gcttttaagcaggcgtttgatgaaa

SEQ ID NO: 75338 - DNA, 25 bp, probe
gagatcataccaggccctttccttg

SEQ ID NO: 75339 - DNA, 25 bp, probe
tgagatcataccaggccctttcctt

SEQ ID NO: 75340 - DNA, 25 bp, probe
gtgacctttgctctcactcagatct

SEQ ID NO: 75341 - DNA, 25 bp, probe
agaaccaccatcttattcaggattg

SEQ ID NO: 75342 - DNA, 25 bp, probe
caccatcttattcaggattgcttga

SEQ ID NO: 75343 - DNA, 25 bp, probe
taccttctggctgtatatgaacatc

SEQ ID NO: 75344 - DNA, 25 bp, probe
ctaccttctggctgtatatgaacat

SEQ ID NO: 75345 - DNA, 25 bp, probe
ccaccatcttattcaggattgcttg

SEQ ID NO: 75346 - DNA, 25 bp, probe
gaaccaccatcttattcaggattgc

SEQ ID NO: 75347 - DNA, 25 bp, probe
accaccatcttattcaggattgctt

SEQ ID NO: 75348 - DNA, 25 bp, probe
aaccaccatcttattcaggattgct

SEQ ID NO: 75349 - DNA, 25 bp, probe
accttctggctgtatatgaacatca

SEQ ID NO: 75350 - DNA, 25 bp, probe
gctaccttctggctgtatatgaaca

SEQ ID NO: 75351 - DNA, 25 bp, probe
cagctatggtacagacagaggtatt

SEQ ID NO: 75352 - DNA, 25 bp, probe
aaatcaagggaagaagaaatcacag

SEQ ID NO: 75353 - DNA, 25 bp, probe
gaagaagaaatcacagcaaagaacc

SEQ ID NO: 75354 - DNA, 25 bp, probe
ggaagaagaaatcacagcaaagaac

SEQ ID NO: 75355 - DNA, 25 bp, probe
aagaagaaatcacagcaaagaacca

SEQ ID NO: 75356 - DNA, 25 bp, probe
aagaaccaccatcttattcaggatt

SEQ ID NO: 75357 - DNA, 25 bp, probe
aatcaagggaagaagaaatcacagc

SEQ ID NO: 75358 - DNA, 25 bp, probe
gggaagaagaaatcacagcaaagaa

SEQ ID NO: 75359 - DNA, 25 bp, probe
aagggaagaagaaatcacagcaaag

SEQ ID NO: 75360 - DNA, 25 bp, probe
agaagaaatcacagcaaagaaccac

SEQ ID NO: 75361 - DNA, 25 bp, probe
caagggaagaagaaatcacagcaaa

SEQ ID NO: 75362 - DNA, 25 bp, probe
ccttctggctgtatatgaacatcat

SEQ ID NO: 75363 - DNA, 25 bp, probe
accatcttattcaggattgcttgaa

SEQ ID NO: 75364 - DNA, 25 bp, probe
agggaagaagaaatcacagcaaaga

SEQ ID NO: 75365 - DNA, 25 bp, probe
acatcatatatacctcaaggattca

SEQ ID NO: 75366 - DNA, 25 bp, probe
atcaagggaagaagaaatcacagca

SEQ ID NO: 75367 - DNA, 25 bp, probe
agctatggtacagacagaggtattt

SEQ ID NO: 75368 - DNA, 25 bp, probe
tcaagggaagaagaaatcacagcaa

SEQ ID NO: 75369 - DNA, 25 bp, probe
tgaacatcatatatacctcaaggat

SEQ ID NO: 75370 - DNA, 25 bp, probe
gaagaaatcacagcaaagaaccacc

SEQ ID NO: 75371 - DNA, 25 bp, probe
gaaatcacagcaaagaaccaccatc

SEQ ID NO: 75372 - DNA, 25 bp, probe
ctgtgtaaatggatttgtgtgcctg

SEQ ID NO: 75373 - DNA, 25 bp, probe
agaaatcacagcaaagaaccaccat

SEQ ID NO: 75374 - DNA, 25 bp, probe
agctaccttctggctgtatatgaac

SEQ ID NO: 75375 - DNA, 25 bp, probe
aaagaaccaccatcttattcaggat

SEQ ID NO: 75376 - DNA, 25 bp, probe
caaagaaccaccatcttattcagga

SEQ ID NO: 75377 - DNA, 25 bp, probe
aaatcacagcaaagaaccaccatct

SEQ ID NO: 75378 - DNA, 25 bp, probe
aagaaatcacagcaaagaaccacca

SEQ ID NO: 75379 - DNA, 25 bp, probe
aatgaaacggactctgctttgacat

SEQ ID NO: 75380 - DNA, 25 bp, probe
catcatatatacctcaaggattcaa

SEQ ID NO: 75381 - DNA, 25 bp, probe
aacatcatatatacctcaaggattc

SEQ ID NO: 75382 - DNA, 25 bp, probe
gaacatcatatatacctcaaggatt

SEQ ID NO: 75383 - DNA, 25 bp, probe
ccagctatggtacagacagaggtat

SEQ ID NO: 75384 - DNA, 25 bp, probe
gccaagtccataaaacaaaagaaca

SEQ ID NO: 75385 - DNA, 25 bp, probe
atgacagaatgctggaacaataatg

SEQ ID NO: 75386 - DNA, 25 bp, probe
gacagaatgctggaacaataatgta

SEQ ID NO: 75387 - DNA, 25 bp, probe
acagaatgctggaacaataatgtaa

SEQ ID NO: 75388 - DNA, 25 bp, probe
tgacagaatgctggaacaataatgt

SEQ ID NO: 75389 - DNA, 25 bp, probe
catgacagaatgctggaacaataat

SEQ ID NO: 75390 - DNA, 25 bp, probe
aagtatgctccagaatcactgacag

SEQ ID NO: 75391 - DNA, 25 bp, probe
tcaagtatgctccagaatcactgac

SEQ ID NO: 75392 - DNA, 25 bp, probe
gtcaagtatgctccagaatcactga

SEQ ID NO: 75393 - DNA, 25 bp, probe
caagtatgctccagaatcactgaca

SEQ ID NO: 75394 - DNA, 25 bp, probe
cgagtggatcaaataagggataaca

SEQ ID NO: 75395 - DNA, 25 bp, probe
gatcaaataagggataacatggctg

SEQ ID NO: 75396 - DNA, 25 bp, probe
tggaacaataatgtaaatcaacgcc

SEQ ID NO: 75397 - DNA, 25 bp, probe
cagaatcactgacagagagcaagtt

SEQ ID NO: 75398 - DNA, 25 bp, probe
tatgctccagaatcactgacagaga

SEQ ID NO: 75399 - DNA, 25 bp, probe
gtatgctccagaatcactgacagag

SEQ ID NO: 75400 - DNA, 25 bp, probe
gtggatcaaataagggataacatgg

SEQ ID NO: 75401 - DNA, 25 bp, probe
ggatcaaataagggataacatggct

SEQ ID NO: 75402 - DNA, 25 bp, probe
ctggaacaataatgtaaatcaacgc

SEQ ID NO: 75403 - DNA, 25 bp, probe
gctggaacaataatgtaaatcaacg

SEQ ID NO: 75404 - DNA, 25 bp, probe
caaataagggataacatggctggat

SEQ ID NO: 75405 - DNA, 25 bp, probe
atcaaataagggataacatggctgg

SEQ ID NO: 75406 - DNA, 25 bp, probe
tggatcaaataagggataacatggc

SEQ ID NO: 75407 - DNA, 25 bp, probe
ggaacaataatgtaaatcaacgccc

SEQ ID NO: 75408 - DNA, 25 bp, probe
aaagtccaccagcgatctatatgat

SEQ ID NO: 75409 - DNA, 25 bp, probe
aaataagggataacatggctggatg

SEQ ID NO: 75410 - DNA, 25 bp, probe
gagtggatcaaataagggataacat

SEQ ID NO: 75411 - DNA, 25 bp, probe
agtatgctccagaatcactgacaga

SEQ ID NO: 75412 - DNA, 25 bp, probe
agtggatcaaataagggataacatg

SEQ ID NO: 75413 - DNA, 25 bp, probe
tgctggaacaataatgtaaatcaac

SEQ ID NO: 75414 - DNA, 25 bp, probe
tcaaataagggataacatggctgga

SEQ ID NO: 75415 - DNA, 25 bp, probe
aataagggataacatggctggatga

SEQ ID NO: 75416 - DNA, 25 bp, probe
tcgagtggatcaaataagggataac

SEQ ID NO: 75417 - DNA, 25 bp, probe
ttcgagtggatcaaataagggataa

SEQ ID NO: 75418 - DNA, 25 bp, probe
cttcgagtggatcaaataagggata

SEQ ID NO: 75419 - DNA, 25 bp, probe
agaatcactgacagagagcaagttt

SEQ ID NO: 75420 - DNA, 25 bp, probe
cagaatgctggaacaataatgtaaa

SEQ ID NO: 75421 - DNA, 25 bp, probe
aagtccaccagcgatctatatgatc

SEQ ID NO: 75422 - DNA, 25 bp, probe
cgtcaagtatgctccagaatcactg

SEQ ID NO: 75423 - DNA, 25 bp, probe
tagctcttcgagtggatcaaataag

SEQ ID NO: 75424 - DNA, 25 bp, probe
ctagctcttcgagtggatcaaataa

SEQ ID NO: 75425 - DNA, 25 bp, probe
tcttcgagtggatcaaataagggat

SEQ ID NO: 75426 - DNA, 25 bp, probe
tctagctcttcgagtggatcaaata

SEQ ID NO: 75427 - DNA, 25 bp, probe
atgctggaacaataatgtaaatcaa

SEQ ID NO: 75428 - DNA, 25 bp, probe
aatgctggaacaataatgtaaatca

SEQ ID NO: 75429 - DNA, 25 bp, probe
aacagccaacattatagtcagtcat

SEQ ID NO: 75430 - DNA, 25 bp, probe
taacagccaacattatagtcagtca

SEQ ID NO: 75431 - DNA, 25 bp, probe
cagccaacattatagtcagtcatct

SEQ ID NO: 75432 - DNA, 25 bp, probe
acagccaacattatagtcagtcatc

SEQ ID NO: 75433 - DNA, 25 bp, probe
gccaacattatagtcagtcatctac

SEQ ID NO: 75434 - DNA, 25 bp, probe
agccaacattatagtcagtcatcta

SEQ ID NO: 75435 - DNA, 25 bp, probe
ttaacagccaacattatagtcagtc

SEQ ID NO: 75436 - DNA, 25 bp, probe
gcaattaacagccaacattatagtc

SEQ ID NO: 75437 - DNA, 25 bp, probe
ttattcaggcttatgtcttcacact

SEQ ID NO: 75438 - DNA, 25 bp, probe
cttattcaggcttatgtcttcacac

SEQ ID NO: 75439 - DNA, 25 bp, probe
attaacagccaacattatagtcagt

SEQ ID NO: 75440 - DNA, 25 bp, probe
attcaggcttatgtcttcacactac

SEQ ID NO: 75441 - DNA, 25 bp, probe
tcaggcttatgtcttcacactacta

SEQ ID NO: 75442 - DNA, 25 bp, probe
tattcaggcttatgtcttcacacta

SEQ ID NO: 75443 - DNA, 25 bp, probe
caggcttatgtcttcacactactag

SEQ ID NO: 75444 - DNA, 25 bp, probe
ccatagaccttattcaggcttatgt

SEQ ID NO: 75445 - DNA, 25 bp, probe
gaccttattcaggcttatgtcttca

SEQ ID NO: 75446 - DNA, 25 bp, probe
ccttattcaggcttatgtcttcaca

SEQ ID NO: 75447 - DNA, 25 bp, probe
accttattcaggcttatgtcttcac

SEQ ID NO: 75448 - DNA, 25 bp, probe
ttcaggcttatgtcttcacactact

SEQ ID NO: 75449 - DNA, 25 bp, probe
caattaacagccaacattatagtca

SEQ ID NO: 75450 - DNA, 25 bp, probe
catagaccttattcaggcttatgtc

SEQ ID NO: 75451 - DNA, 25 bp, probe
aattaacagccaacattatagtcag

SEQ ID NO: 75452 - DNA, 25 bp, probe
ccaacattatagtcagtcatctact

SEQ ID NO: 75453 - DNA, 25 bp, probe
tgcaattaacagccaacattatagt

SEQ ID NO: 75454 - DNA, 25 bp, probe
acctatgccacttatccctatacta

SEQ ID NO: 75455 - DNA, 25 bp, probe
gtgcaattaacagccaacattatag

SEQ ID NO: 75456 - DNA, 25 bp, probe
caaattcgccatagaccttattcag

SEQ ID NO: 75457 - DNA, 25 bp, probe
ctcaaattcgccatagaccttattc

SEQ ID NO: 75458 - DNA, 25 bp, probe
tcaaattcgccatagaccttattca

SEQ ID NO: 75459 - DNA, 25 bp, probe
cacctatgccacttatccctatact

SEQ ID NO: 75460 - DNA, 25 bp, probe
acacctatgccacttatccctatac

SEQ ID NO: 75461 - DNA, 25 bp, probe
cacacctatgccacttatccctata

SEQ ID NO: 75462 - DNA, 25 bp, probe
tctcaaattcgccatagaccttatt

SEQ ID NO: 75463 - DNA, 25 bp, probe
ttctcaaattcgccatagaccttat

SEQ ID NO: 75464 - DNA, 25 bp, probe
attctcaaattcgccatagacctta

SEQ ID NO: 75465 - DNA, 25 bp, probe
tattctcaaattcgccatagacctt

SEQ ID NO: 75466 - DNA, 25 bp, probe
acgtctactgagtactacacactat

SEQ ID NO: 75467 - DNA, 25 bp, probe
cttattctatcaggctttgggatga

SEQ ID NO: 75468 - DNA, 25 bp, probe
cctatgccacttatccctatactag

SEQ ID NO: 75469 - DNA, 25 bp, probe
actgactattctcaaattcgccata

SEQ ID NO: 75470 - DNA, 25 bp, probe
tactgactattctcaaattcgccat

SEQ ID NO: 75471 - DNA, 25 bp, probe
accattagcctatttattcaaccaa

SEQ ID NO: 75472 - DNA, 25 bp, probe
aaccattagcctatttattcaacca

SEQ ID NO: 75473 - DNA, 25 bp, probe
actaacatcgaagcatctgaatcat

SEQ ID NO: 75474 - DNA, 25 bp, probe
ctaacatcgaagcatctgaatcatg

SEQ ID NO: 75475 - DNA, 25 bp, probe
gactaacatcgaagcatctgaatca

SEQ ID NO: 75476 - DNA, 25 bp, probe
ggactaacatcgaagcatctgaatc

SEQ ID NO: 75477 - DNA, 25 bp, probe
gaaagggagggtgaaagtgattatg

SEQ ID NO: 75478 - DNA, 25 bp, probe
gaatcatagggaaagagagggagac

SEQ ID NO: 75479 - DNA, 25 bp, probe
aagcatctgaatcatgtccactctc

SEQ ID NO: 75480 - DNA, 25 bp, probe
gaagcatctgaatcatgtccactct

SEQ ID NO: 75481 - DNA, 25 bp, probe
catagggaaagagagggagacaaag

SEQ ID NO: 75482 - DNA, 25 bp, probe
atcatagggaaagagagggagacaa

SEQ ID NO: 75483 - DNA, 25 bp, probe
aatcatagggaaagagagggagaca

SEQ ID NO: 75484 - DNA, 25 bp, probe
ggagggtgaaagtgattatgggaat

SEQ ID NO: 75485 - DNA, 25 bp, probe
ggaaagggagggtgaaagtgattat

SEQ ID NO: 75486 - DNA, 25 bp, probe
tcatagggaaagagagggagacaaa

SEQ ID NO: 75487 - DNA, 25 bp, probe
ttatgggaatcatagggaaagagag

SEQ ID NO: 75488 - DNA, 25 bp, probe
tatgggaatcatagggaaagagagg

SEQ ID NO: 75489 - DNA, 25 bp, probe
aaagggagggtgaaagtgattatgg

SEQ ID NO: 75490 - DNA, 25 bp, probe
aaagagagggagacaaagggactaa

SEQ ID NO: 75491 - DNA, 25 bp, probe
ggaatcatagggaaagagagggaga

SEQ ID NO: 75492 - DNA, 25 bp, probe
attatgggaatcatagggaaagaga

SEQ ID NO: 75493 - DNA, 25 bp, probe
gagggtgaaagtgattatgggaatc

SEQ ID NO: 75494 - DNA, 25 bp, probe
atactgactctcccaacctgtttct

SEQ ID NO: 75495 - DNA, 25 bp, probe
catactgactctcccaacctgtttc

SEQ ID NO: 75496 - DNA, 25 bp, probe
gaaagagagggagacaaagggacta

SEQ ID NO: 75497 - DNA, 25 bp, probe
atagggaaagagagggagacaaagg

SEQ ID NO: 75498 - DNA, 25 bp, probe
taacatcgaagcatctgaatcatgt

SEQ ID NO: 75499 - DNA, 25 bp, probe
gattatgggaatcatagggaaagag

SEQ ID NO: 75500 - DNA, 25 bp, probe
tactgactctcccaacctgtttctt

SEQ ID NO: 75501 - DNA, 25 bp, probe
atcgaagcatctgaatcatgtccac

SEQ ID NO: 75502 - DNA, 25 bp, probe
catcgaagcatctgaatcatgtcca

SEQ ID NO: 75503 - DNA, 25 bp, probe
aagagagggagacaaagggactaac

SEQ ID NO: 75504 - DNA, 25 bp, probe
tactagatgcagtttcttcctttcg

SEQ ID NO: 75505 - DNA, 25 bp, probe
cgaagcatctgaatcatgtccactc

SEQ ID NO: 75506 - DNA, 25 bp, probe
atgggaatcatagggaaagagaggg

SEQ ID NO: 75507 - DNA, 25 bp, probe
agagggagacaaagggactaacatc

SEQ ID NO: 75508 - DNA, 25 bp, probe
gagagggagacaaagggactaacat

SEQ ID NO: 75509 - DNA, 25 bp, probe
ttactagatgcagtttcttcctttc

SEQ ID NO: 75510 - DNA, 25 bp, probe
cattactagatgcagtttcttcctt

SEQ ID NO: 75511 - DNA, 25 bp, probe
tggaaagggagggtgaaagtgatta

SEQ ID NO: 75512 - DNA, 25 bp, probe
aacatcgaagcatctgaatcatgtc

SEQ ID NO: 75513 - DNA, 25 bp, probe
gggaatcatagggaaagagagggag

SEQ ID NO: 75514 - DNA, 25 bp, probe
attactagatgcagtttcttccttt

SEQ ID NO: 75515 - DNA, 25 bp, probe
agcatctgaatcatgtccactctcc

SEQ ID NO: 75516 - DNA, 25 bp, probe
gggactaacatcgaagcatctgaat

SEQ ID NO: 75517 - DNA, 25 bp, probe
ataagaagaggaagttcacaaccaa

SEQ ID NO: 75518 - DNA, 25 bp, probe
gataagaagaggaagttcacaacca

SEQ ID NO: 75519 - DNA, 25 bp, probe
tgataagaagaggaagttcacaacc

SEQ ID NO: 75520 - DNA, 25 bp, probe
agatatgcgtgaaggattactgctt

SEQ ID NO: 75521 - DNA, 25 bp, probe
accaaagtgataagaagaggaagtt

SEQ ID NO: 75522 - DNA, 25 bp, probe
tctctattcaggtggacttgtttac

SEQ ID NO: 75523 - DNA, 25 bp, probe
tgggaaaggtattagatttactgct

SEQ ID NO: 75524 - DNA, 25 bp, probe
ctctattcaggtggacttgtttaca

SEQ ID NO: 75525 - DNA, 25 bp, probe
taagaagaggaagttcacaaccaaa

SEQ ID NO: 75526 - DNA, 25 bp, probe
ccaaagtgataagaagaggaagttc

SEQ ID NO: 75527 - DNA, 25 bp, probe
aagaagaggaagttcacaaccaaat

SEQ ID NO: 75528 - DNA, 25 bp, probe
atgggaaaggtattagatttactgc

SEQ ID NO: 75529 - DNA, 25 bp, probe
agaagaggaagttcacaaccaaatc

SEQ ID NO: 75530 - DNA, 25 bp, probe
gtacaatgagacattccacttcctc

SEQ ID NO: 75531 - DNA, 25 bp, probe
gatatgcgtgaaggattactgcttt

SEQ ID NO: 75532 - DNA, 25 bp, probe
cagatatgcgtgaaggattactgct

SEQ ID NO: 75533 - DNA, 25 bp, probe
atatgcgtgaaggattactgctttg

SEQ ID NO: 75534 - DNA, 25 bp, probe
agtacaatgagacattccacttcct

SEQ ID NO: 75535 - DNA, 25 bp, probe
caaagtgataagaagaggaagttca

SEQ ID NO: 75536 - DNA, 25 bp, probe
gtctctattcaggtggacttgttta

SEQ ID NO: 75537 - DNA, 25 bp, probe
gcatgatgggaaaggtattagattt

SEQ ID NO: 75538 - DNA, 25 bp, probe
caagtacaatgagacattccacttc

SEQ ID NO: 75539 - DNA, 25 bp, probe
gggaaaggtattagatttactgcta

SEQ ID NO: 75540 - DNA, 25 bp, probe
tacaatgagacattccacttcctcc

SEQ ID NO: 75541 - DNA, 25 bp, probe
caccaaagtgataagaagaggaagt

SEQ ID NO: 75542 - DNA, 25 bp, probe
acaccaaagtgataagaagaggaag

SEQ ID NO: 75543 - DNA, 25 bp, probe
aagtacaatgagacattccacttcc

SEQ ID NO: 75544 - DNA, 25 bp, probe
tctattcaggtggacttgtttacac

SEQ ID NO: 75545 - DNA, 25 bp, probe
cacaccaaagtgataagaagaggaa

SEQ ID NO: 75546 - DNA, 25 bp, probe
ctattcaggtggacttgtttacaca

SEQ ID NO: 75547 - DNA, 25 bp, probe
ccaagtacaatgagacattccactt

SEQ ID NO: 75548 - DNA, 25 bp, probe
tattcaggtggacttgtttacacac

SEQ ID NO: 75549 - DNA, 25 bp, probe
ccgagtcctatgagttgcagatatg

SEQ ID NO: 75550 - DNA, 25 bp, probe
tttatctcagaggagcaatgacgag

SEQ ID NO: 75551 - DNA, 25 bp, probe
tgcatgatgggaaaggtattagatt

SEQ ID NO: 75552 - DNA, 25 bp, probe
gtgcatgatgggaaaggtattagat

SEQ ID NO: 75553 - DNA, 25 bp, probe
ttatctcagaggagcaatgacgagg

SEQ ID NO: 75554 - DNA, 25 bp, probe
aagtgcatgatgggaaaggtattag

SEQ ID NO: 75555 - DNA, 25 bp, probe
tgatgggaaaggtattagatttact

SEQ ID NO: 75556 - DNA, 25 bp, probe
caagtgcatgatgggaaaggtatta

SEQ ID NO: 75557 - DNA, 25 bp, probe
gatttactgctaatgaggacattcg

SEQ ID NO: 75558 - DNA, 25 bp, probe
atttactgctaatgaggacattcgt

SEQ ID NO: 75559 - DNA, 25 bp, probe
gaggaagttcacaaccaaatccaaa

SEQ ID NO: 75560 - DNA, 25 bp, probe
gatgggaaaggtattagatttactg

SEQ ID NO: 75561 - DNA, 25 bp, probe
atcagaagttgtcactcattgtcat

SEQ ID NO: 75562 - DNA, 25 bp, probe
gatcagaagttgtcactcattgtca

SEQ ID NO: 75563 - DNA, 25 bp, probe
agaagttgtcactcattgtcatgtt

SEQ ID NO: 75564 - DNA, 25 bp, probe
gaagttgtcactcattgtcatgttg

SEQ ID NO: 75565 - DNA, 25 bp, probe
aagttgtcactcattgtcatgttga

SEQ ID NO: 75566 - DNA, 25 bp, probe
tcagaagttgtcactcattgtcatg

SEQ ID NO: 75567 - DNA, 25 bp, probe
ggatcagaagttgtcactcattgtc

SEQ ID NO: 75568 - DNA, 25 bp, probe
cagaagttgtcactcattgtcatgt

SEQ ID NO: 75569 - DNA, 25 bp, probe
ttgtaaactatgtgaggtctctgag

SEQ ID NO: 75570 - DNA, 25 bp, probe
tttgtaaactatgtgaggtctctga

SEQ ID NO: 75571 - DNA, 25 bp, probe
ccgactttctggaatttgtaaacta

SEQ ID NO: 75572 - DNA, 25 bp, probe
tggaatttgtaaactatgtgaggtc

SEQ ID NO: 75573 - DNA, 25 bp, probe
ctggaatttgtaaactatgtgaggt

SEQ ID NO: 75574 - DNA, 25 bp, probe
ggaatttgtaaactatgtgaggtct

SEQ ID NO: 75575 - DNA, 25 bp, probe
tctggaatttgtaaactatgtgagg

SEQ ID NO: 75576 - DNA, 25 bp, probe
atttgtaaactatgtgaggtctctg

SEQ ID NO: 75577 - DNA, 25 bp, probe
tgtaaactatgtgaggtctctgaga

SEQ ID NO: 75578 - DNA, 25 bp, probe
aatttgtaaactatgtgaggtctct

SEQ ID NO: 75579 - DNA, 25 bp, probe
gtaaactatgtgaggtctctgagag

SEQ ID NO: 75580 - DNA, 25 bp, probe
taaactatgtgaggtctctgagagt

SEQ ID NO: 75581 - DNA, 25 bp, probe
gaatttgtaaactatgtgaggtctc

SEQ ID NO: 75582 - DNA, 25 bp, probe
ctccgactttctggaatttgtaaac

SEQ ID NO: 75583 - DNA, 25 bp, probe
tccgactttctggaatttgtaaact

SEQ ID NO: 75584 - DNA, 25 bp, probe
cgactttctggaatttgtaaactat

SEQ ID NO: 75585 - DNA, 25 bp, probe
aactatgtgaggtctctgagagtgg

SEQ ID NO: 75586 - DNA, 25 bp, probe
cctccgactttctggaatttgtaaa

SEQ ID NO: 75587 - DNA, 25 bp, probe
aaactatgtgaggtctctgagagtg

SEQ ID NO: 75588 - DNA, 25 bp, probe
ttctggaatttgtaaactatgtgag

SEQ ID NO: 75589 - DNA, 25 bp, probe
atttacccactggatattgtccgaa

SEQ ID NO: 75590 - DNA, 25 bp, probe
gaagaacacacagtgacacatctcc

SEQ ID NO: 75591 - DNA, 25 bp, probe
ggaagaacacacagtgacacatctc

SEQ ID NO: 75592 - DNA, 25 bp, probe
tcctccgactttctggaatttgtaa

SEQ ID NO: 75593 - DNA, 25 bp, probe
tttacccactggatattgtccgaaa

SEQ ID NO: 75594 - DNA, 25 bp, probe
ctatgtgaggtctctgagagtggac

SEQ ID NO: 75595 - DNA, 25 bp, probe
aacacacagtgacacatctccagta

SEQ ID NO: 75596 - DNA, 25 bp, probe
tttctggaatttgtaaactatgtga

SEQ ID NO: 75597 - DNA, 25 bp, probe
actttctggaatttgtaaactatgt

SEQ ID NO: 75598 - DNA, 25 bp, probe
taactgagaggaacctgcccattta

SEQ ID NO: 75599 - DNA, 25 bp, probe
ctcctccgactttctggaatttgta

SEQ ID NO: 75600 - DNA, 25 bp, probe
actatgtgaggtctctgagagtgga

SEQ ID NO: 75601 - DNA, 25 bp, probe
catttacccactggatattgtccga

SEQ ID NO: 75602 - DNA, 25 bp, probe
ctttctggaatttgtaaactatgtg

SEQ ID NO: 75603 - DNA, 25 bp, probe
gggatcagaagttgtcactcattgt

SEQ ID NO: 75604 - DNA, 25 bp, probe
tgggatcagaagttgtcactcattg

SEQ ID NO: 75605 - DNA, 25 bp, probe
agaagaaggtgaactggaatatagg

SEQ ID NO: 75606 - DNA, 25 bp, probe
gtgaactggaatataggcaagagag

SEQ ID NO: 75607 - DNA, 25 bp, probe
gaagaaggtgaactggaatataggc

SEQ ID NO: 75608 - DNA, 25 bp, probe
gaaggtgaactggaatataggcaag

SEQ ID NO: 75609 - DNA, 25 bp, probe
agtaattcttcaatccagtgttcag

SEQ ID NO: 75610 - DNA, 25 bp, probe
gagtaattcttcaatccagtgttca

SEQ ID NO: 75611 - DNA, 25 bp, probe
agagagtaattcttcaatccagtgt

SEQ ID NO: 75612 - DNA, 25 bp, probe
aaggtgaactggaatataggcaaga

SEQ ID NO: 75613 - DNA, 25 bp, probe
agaaggtgaactggaatataggcaa

SEQ ID NO: 75614 - DNA, 25 bp, probe
aagaaggtgaactggaatataggca

SEQ ID NO: 75615 - DNA, 25 bp, probe
agagaagaaggtgaactggaatata

SEQ ID NO: 75616 - DNA, 25 bp, probe
gagaagaaggtgaactggaatatag

SEQ ID NO: 75617 - DNA, 25 bp, probe
gaactggaatataggcaagagagta

SEQ ID NO: 75618 - DNA, 25 bp, probe
gtaattcttcaatccagtgttcaga

SEQ ID NO: 75619 - DNA, 25 bp, probe
taattcttcaatccagtgttcagag

SEQ ID NO: 75620 - DNA, 25 bp, probe
agagtaattcttcaatccagtgttc

SEQ ID NO: 75621 - DNA, 25 bp, probe
gagagtaattcttcaatccagtgtt

SEQ ID NO: 75622 - DNA, 25 bp, probe
aactggaatataggcaagagagtaa

SEQ ID NO: 75623 - DNA, 25 bp, probe
tgaactggaatataggcaagagagt

SEQ ID NO: 75624 - DNA, 25 bp, probe
ggtgaactggaatataggcaagaga

SEQ ID NO: 75625 - DNA, 25 bp, probe
aggtgaactggaatataggcaagag

SEQ ID NO: 75626 - DNA, 25 bp, probe
actggaatataggcaagagagtaat

SEQ ID NO: 75627 - DNA, 25 bp, probe
aattcttcaatccagtgttcagagc

SEQ ID NO: 75628 - DNA, 25 bp, probe
cagagaagaaggtgaactggaatat

SEQ ID NO: 75629 - DNA, 25 bp, probe
ctggaatataggcaagagagtaatt

SEQ ID NO: 75630 - DNA, 25 bp, probe
aaacatctgaacctaacatttctgg

SEQ ID NO: 75631 - DNA, 25 bp, probe
tacaaccttactgcacacttaacac

SEQ ID NO: 75632 - DNA, 25 bp, probe
gcagagaagaaggtgaactggaata

SEQ ID NO: 75633 - DNA, 25 bp, probe
gtacaaccttactgcacacttaaca

SEQ ID NO: 75634 - DNA, 25 bp, probe
cctctcacggaatacaatttcacta

SEQ ID NO: 75635 - DNA, 25 bp, probe
aatggagtgacacaaggtgatagac

SEQ ID NO: 75636 - DNA, 25 bp, probe
gcaagagagtaattcttcaatccag

SEQ ID NO: 75637 - DNA, 25 bp, probe
aggcaagagagtaattcttcaatcc

SEQ ID NO: 75638 - DNA, 25 bp, probe
gtcgagaatcaagatcagcaagaac

SEQ ID NO: 75639 - DNA, 25 bp, probe
ggcaagagagtaattcttcaatcca

SEQ ID NO: 75640 - DNA, 25 bp, probe
aacatctgaacctaacatttctggc

SEQ ID NO: 75641 - DNA, 25 bp, probe
ctctcacggaatacaatttcactat

SEQ ID NO: 75642 - DNA, 25 bp, probe
tggaatataggcaagagagtaattc

SEQ ID NO: 75643 - DNA, 25 bp, probe
caaccttactgcacacttaacactc

SEQ ID NO: 75644 - DNA, 25 bp, probe
attcttcaatccagtgttcagagct

SEQ ID NO: 75645 - DNA, 25 bp, probe
ggagtgacacaaggtgatagacttc

SEQ ID NO: 75646 - DNA, 25 bp, probe
ggaatataggcaagagagtaattct

SEQ ID NO: 75647 - DNA, 25 bp, probe
gccttatcagtgtgaaattagtccc

SEQ ID NO: 75648 - DNA, 25 bp, probe
aagagagtaattcttcaatccagtg

SEQ ID NO: 75649 - DNA, 25 bp, probe
cttcctgtgtaccatcttctcctac

SEQ ID NO: 75650 - DNA, 25 bp, probe
ccttacactatgatgtggttatgaa

SEQ ID NO: 75651 - DNA, 25 bp, probe
gatctgtacttcaagaagcctcctt

SEQ ID NO: 75652 - DNA, 25 bp, probe
ctacttatgtctcgcttgtctttct

SEQ ID NO: 75653 - DNA, 25 bp, probe
tacttatgtctcgcttgtctttctg

SEQ ID NO: 75654 - DNA, 25 bp, probe
gtgctacttatgtctcgcttgtctt

SEQ ID NO: 75655 - DNA, 25 bp, probe
ttctatgggagtgtcatctatgtct

SEQ ID NO: 75656 - DNA, 25 bp, probe
gttctatgggagtgtcatctatgtc

SEQ ID NO: 75657 - DNA, 25 bp, probe
ctgttctatgggagtgtcatctatg

SEQ ID NO: 75658 - DNA, 25 bp, probe
tctatgggagtgtcatctatgtcta

SEQ ID NO: 75659 - DNA, 25 bp, probe
tgttctatgggagtgtcatctatgt

SEQ ID NO: 75660 - DNA, 25 bp, probe
atgggagtgtcatctatgtctattt

SEQ ID NO: 75661 - DNA, 25 bp, probe
ccttcctgtgtaccatcttctccta

SEQ ID NO: 75662 - DNA, 25 bp, probe
cctgttctatgggagtgtcatctat

SEQ ID NO: 75663 - DNA, 25 bp, probe
tctgtccatgtactcagtgatgaag

SEQ ID NO: 75664 - DNA, 25 bp, probe
ctctgtccatgtactcagtgatgaa

SEQ ID NO: 75665 - DNA, 25 bp, probe
ctatgggagtgtcatctatgtctat

SEQ ID NO: 75666 - DNA, 25 bp, probe
gctacttatgtctcgcttgtctttc

SEQ ID NO: 75667 - DNA, 25 bp, probe
cttatgtctcgcttgtctttctgtg

SEQ ID NO: 75668 - DNA, 25 bp, probe
tatgggagtgtcatctatgtctatt

SEQ ID NO: 75669 - DNA, 25 bp, probe
ttcctgtgtaccatcttctcctacc

SEQ ID NO: 75670 - DNA, 25 bp, probe
acttatgtctcgcttgtctttctgt

SEQ ID NO: 75671 - DNA, 25 bp, probe
ctcactgtagtggtcctgttctatg

SEQ ID NO: 75672 - DNA, 25 bp, probe
cccttacactatgatgtggttatga

SEQ ID NO: 75673 - DNA, 25 bp, probe
cggataaggaagaactatcacattt

SEQ ID NO: 75674 - DNA, 25 bp, probe
tgctacttatgtctcgcttgtcttt

SEQ ID NO: 75675 - DNA, 25 bp, probe
ctgtccatgtactcagtgatgaagg

SEQ ID NO: 75676 - DNA, 25 bp, probe
aatcatcgtcactgtgctcagaatc

SEQ ID NO: 75677 - DNA, 25 bp, probe
ctcgatctgtacttcaagaagcctc

SEQ ID NO: 75678 - DNA, 25 bp, probe
gaggctcgatctgtacttcaagaag

SEQ ID NO: 75679 - DNA, 25 bp, probe
ccggataaggaagaactatcacatt

SEQ ID NO: 75680 - DNA, 25 bp, probe
cctgtgtaccatcttctcctacctg

SEQ ID NO: 75681 - DNA, 25 bp, probe
tcctgtgtaccatcttctcctacct

SEQ ID NO: 75682 - DNA, 25 bp, probe
catcttctcctacctgcaaatcatc

SEQ ID NO: 75683 - DNA, 25 bp, probe
tcctgttctatgggagtgtcatcta

SEQ ID NO: 75684 - DNA, 25 bp, probe
cctcactgtagtggtcctgttctat

SEQ ID NO: 75685 - DNA, 25 bp, probe
cctctgtccatgtactcagtgatga

SEQ ID NO: 75686 - DNA, 25 bp, probe
aggaagaactatcacatttctgagg

SEQ ID NO: 75687 - DNA, 25 bp, probe
atctgtacttcaagaagcctccttc

SEQ ID NO: 75688 - DNA, 25 bp, probe
cgatctgtacttcaagaagcctcct

SEQ ID NO: 75689 - DNA, 25 bp, probe
aagaactatcacatttctgaggctc

SEQ ID NO: 75690 - DNA, 25 bp, probe
gaagaactatcacatttctgaggct

SEQ ID NO: 75691 - DNA, 25 bp, probe
tgaggctcgatctgtacttcaagaa

SEQ ID NO: 75692 - DNA, 25 bp, probe
ttctgaggctcgatctgtacttcaa

SEQ ID NO: 75693 - DNA, 25 bp, probe
gactacactgcatacccctggtttg

SEQ ID NO: 75694 - DNA, 25 bp, probe
atacccctggtttgcaggtaacatg

SEQ ID NO: 75695 - DNA, 25 bp, probe
catacccctggtttgcaggtaacat

SEQ ID NO: 75696 - DNA, 25 bp, probe
ggattctctcttccaagttattgtg

SEQ ID NO: 75697 - DNA, 25 bp, probe
aggattctctcttccaagttattgt

SEQ ID NO: 75698 - DNA, 25 bp, probe
tcagtctagcattcaattatcttca

SEQ ID NO: 75699 - DNA, 25 bp, probe
gaggattctctcttccaagttattg

SEQ ID NO: 75700 - DNA, 25 bp, probe
gattctctcttccaagttattgtgg

SEQ ID NO: 75701 - DNA, 25 bp, probe
aggaaagtatgtaaatggaggagac

SEQ ID NO: 75702 - DNA, 25 bp, probe
gaggaaagtatgtaaatggaggaga

SEQ ID NO: 75703 - DNA, 25 bp, probe
agaggaaagtatgtaaatggaggag

SEQ ID NO: 75704 - DNA, 25 bp, probe
ggaaagtatgtaaatggaggagacc

SEQ ID NO: 75705 - DNA, 25 bp, probe
aagaggaaagtatgtaaatggagga

SEQ ID NO: 75706 - DNA, 25 bp, probe
aggaagaggaaagtatgtaaatgga

SEQ ID NO: 75707 - DNA, 25 bp, probe
ccaggtaataggaagaggaaagtat

SEQ ID NO: 75708 - DNA, 25 bp, probe
gaagaggaaagtatgtaaatggagg

SEQ ID NO: 75709 - DNA, 25 bp, probe
ggaagaggaaagtatgtaaatggag

SEQ ID NO: 75710 - DNA, 25 bp, probe
ggaggagattatggtttcagtgttg

SEQ ID NO: 75711 - DNA, 25 bp, probe
gaaggaggagattatggtttcagtg

SEQ ID NO: 75712 - DNA, 25 bp, probe
aggaggagattatggtttcagtgtt

SEQ ID NO: 75713 - DNA, 25 bp, probe
aaggaggagattatggtttcagtgt

SEQ ID NO: 75714 - DNA, 25 bp, probe
gaggagattatggtttcagtgttga

SEQ ID NO: 75715 - DNA, 25 bp, probe
gcagaaatcagtctagcattcaatt

SEQ ID NO: 75716 - DNA, 25 bp, probe
aggtaataggaagaggaaagtatgt

SEQ ID NO: 75717 - DNA, 25 bp, probe
ggagattatggtttcagtgttgact

SEQ ID NO: 75718 - DNA, 25 bp, probe
aggagattatggtttcagtgttgac

SEQ ID NO: 75719 - DNA, 25 bp, probe
cagtctagcattcaattatcttcat

SEQ ID NO: 75720 - DNA, 25 bp, probe
caggtaataggaagaggaaagtatg

SEQ ID NO: 75721 - DNA, 25 bp, probe
ttaacaaggaccctaagaaacgact

SEQ ID NO: 75722 - DNA, 25 bp, probe
atcagtctagcattcaattatcttc

SEQ ID NO: 75723 - DNA, 25 bp, probe
taggaagaggaaagtatgtaaatgg

SEQ ID NO: 75724 - DNA, 25 bp, probe
ttgctccaggtaataggaagaggaa

SEQ ID NO: 75725 - DNA, 25 bp, probe
tctcagtttactaatgaacctgtct

SEQ ID NO: 75726 - DNA, 25 bp, probe
aaatggaggagacctaatgtttcat

SEQ ID NO: 75727 - DNA, 25 bp, probe
gaaagtatgtaaatggaggagacct

SEQ ID NO: 75728 - DNA, 25 bp, probe
tgtaaatggaggagacctaatgttt

SEQ ID NO: 75729 - DNA, 25 bp, probe
agtctagcattcaattatcttcatg

SEQ ID NO: 75730 - DNA, 25 bp, probe
ctcttggagtgctaatgtttgagac

SEQ ID NO: 75731 - DNA, 25 bp, probe
taaatggaggagacctaatgtttca

SEQ ID NO: 75732 - DNA, 25 bp, probe
atgtaaatggaggagacctaatgtt

SEQ ID NO: 75733 - DNA, 25 bp, probe
aatggaggagacctaatgtttcata

SEQ ID NO: 75734 - DNA, 25 bp, probe
gtaaatggaggagacctaatgtttc

SEQ ID NO: 75735 - DNA, 25 bp, probe
taacaaggaccctaagaaacgactg

SEQ ID NO: 75736 - DNA, 25 bp, probe
tccaggtaataggaagaggaaagta

SEQ ID NO: 75737 - DNA, 25 bp, probe
tttgatttgctccaggtaataggaa

SEQ ID NO: 75738 - DNA, 25 bp, probe
atggaggagacctaatgtttcatat

SEQ ID NO: 75739 - DNA, 25 bp, probe
cttaacaaggaccctaagaaacgac

SEQ ID NO: 75740 - DNA, 25 bp, probe
aactatgttctggtacaactcctcg

SEQ ID NO: 75741 - DNA, 25 bp, probe
tatgttctggtacaactcctcgatt

SEQ ID NO: 75742 - DNA, 25 bp, probe
ctatgttctggtacaactcctcgat

SEQ ID NO: 75743 - DNA, 25 bp, probe
aaactatgttctggtacaactcctc

SEQ ID NO: 75744 - DNA, 25 bp, probe
caaactatgttctggtacaactcct

SEQ ID NO: 75745 - DNA, 25 bp, probe
tcaaactatgttctggtacaactcc

SEQ ID NO: 75746 - DNA, 25 bp, probe
catcaaactatgttctggtacaact

SEQ ID NO: 75747 - DNA, 25 bp, probe
atcaaactatgttctggtacaactc

SEQ ID NO: 75748 - DNA, 25 bp, probe
actatgttctggtacaactcctcga

SEQ ID NO: 75749 - DNA, 25 bp, probe
atgttctggtacaactcctcgattt

SEQ ID NO: 75750 - DNA, 25 bp, probe
acatcaaactatgttctggtacaac

SEQ ID NO: 75751 - DNA, 25 bp, probe
gcttacatcaaactatgttctggta

SEQ ID NO: 75752 - DNA, 25 bp, probe
agcttacatcaaactatgttctggt

SEQ ID NO: 75753 - DNA, 25 bp, probe
gagcttacatcaaactatgttctgg

SEQ ID NO: 75754 - DNA, 25 bp, probe
ggagcttacatcaaactatgttctg

SEQ ID NO: 75755 - DNA, 25 bp, probe
tacatcaaactatgttctggtacaa

SEQ ID NO: 75756 - DNA, 25 bp, probe
ttacatcaaactatgttctggtaca

SEQ ID NO: 75757 - DNA, 25 bp, probe
cttacatcaaactatgttctggtac

SEQ ID NO: 75758 - DNA, 25 bp, probe
acttcaagaccacagaaaatcaggc

SEQ ID NO: 75759 - DNA, 25 bp, probe
tgttctggtacaactcctcgatttt

SEQ ID NO: 75760 - DNA, 25 bp, probe
cttcaagaccacagaaaatcaggcc

SEQ ID NO: 75761 - DNA, 25 bp, probe
attagtcattcagagcaactcaagg

SEQ ID NO: 75762 - DNA, 25 bp, probe
tattagtcattcagagcaactcaag

SEQ ID NO: 75763 - DNA, 25 bp, probe
tagtcattcagagcaactcaaggaa

SEQ ID NO: 75764 - DNA, 25 bp, probe
ttagtcattcagagcaactcaagga

SEQ ID NO: 75765 - DNA, 25 bp, probe
atattagtcattcagagcaactcaa

SEQ ID NO: 75766 - DNA, 25 bp, probe
ccctataacagaacaaatcgctcac

SEQ ID NO: 75767 - DNA, 25 bp, probe
gaagaaatctcaaacagtacccaat

SEQ ID NO: 75768 - DNA, 25 bp, probe
aatattagtcattcagagcaactca

SEQ ID NO: 75769 - DNA, 25 bp, probe
gaaatctcaaacagtacccaattcc

SEQ ID NO: 75770 - DNA, 25 bp, probe
agaagaaatctcaaacagtacccaa

SEQ ID NO: 75771 - DNA, 25 bp, probe
aagaagaaatctcaaacagtaccca

SEQ ID NO: 75772 - DNA, 25 bp, probe
agaaatctcaaacagtacccaattc

SEQ ID NO: 75773 - DNA, 25 bp, probe
aagaaatctcaaacagtacccaatt

SEQ ID NO: 75774 - DNA, 25 bp, probe
aaagaagaaatctcaaacagtaccc

SEQ ID NO: 75775 - DNA, 25 bp, probe
cctataacagaacaaatcgctcacg

SEQ ID NO: 75776 - DNA, 25 bp, probe
aaatctcaaacagtacccaattccg

SEQ ID NO: 75777 - DNA, 25 bp, probe
ctcacgaatgccaaatctgaatgat

SEQ ID NO: 75778 - DNA, 25 bp, probe
aatctcaaacagtacccaattccga

SEQ ID NO: 75779 - DNA, 25 bp, probe
agtcattcagagcaactcaaggaaa

SEQ ID NO: 75780 - DNA, 25 bp, probe
cgcaagttgttacatctctcttcgg

SEQ ID NO: 75781 - DNA, 25 bp, probe
tcacgaatgccaaatctgaatgatt

SEQ ID NO: 75782 - DNA, 25 bp, probe
gcaagttgttacatctctcttcggc

SEQ ID NO: 75783 - DNA, 25 bp, probe
atctcaaacagtacccaattccgac

SEQ ID NO: 75784 - DNA, 25 bp, probe
tataacagaacaaatcgctcacgaa

SEQ ID NO: 75785 - DNA, 25 bp, probe
ctataacagaacaaatcgctcacga

SEQ ID NO: 75786 - DNA, 25 bp, probe
ataacagaacaaatcgctcacgaat

SEQ ID NO: 75787 - DNA, 25 bp, probe
tgacgttgcagaaatccattcattc

SEQ ID NO: 75788 - DNA, 25 bp, probe
ctcaaacagtacccaattccgacag

SEQ ID NO: 75789 - DNA, 25 bp, probe
taacagaacaaatcgctcacgaatg

SEQ ID NO: 75790 - DNA, 25 bp, probe
aaatattagtcattcagagcaactc

SEQ ID NO: 75791 - DNA, 25 bp, probe
ctgacgttgcagaaatccattcatt

SEQ ID NO: 75792 - DNA, 25 bp, probe
gtcattcagagcaactcaaggaaaa

SEQ ID NO: 75793 - DNA, 25 bp, probe
tctcaaacagtacccaattccgaca

SEQ ID NO: 75794 - DNA, 25 bp, probe
cccctataacagaacaaatcgctca

SEQ ID NO: 75795 - DNA, 25 bp, probe
acccctataacagaacaaatcgctc

SEQ ID NO: 75796 - DNA, 25 bp, probe
ttacatctctcttcggcctcaaatc

SEQ ID NO: 75797 - DNA, 25 bp, probe
tgaatgatttaaaagagacagcctt

SEQ ID NO: 75798 - DNA, 25 bp, probe
caagttgttacatctctcttcggcc

SEQ ID NO: 75799 - DNA, 25 bp, probe
cacccctataacagaacaaatcgct

SEQ ID NO: 75800 - DNA, 25 bp, probe
gctcacgaatgccaaatctgaatga

SEQ ID NO: 75801 - DNA, 25 bp, probe
gaatgatttaaaagagacagccttg

SEQ ID NO: 75802 - DNA, 25 bp, probe
aagttgttacatctctcttcggcct

SEQ ID NO: 75803 - DNA, 25 bp, probe
gttacatctctcttcggcctcaaat

SEQ ID NO: 75804 - DNA, 25 bp, probe
aaaagaagaaatctcaaacagtacc

SEQ ID NO: 75805 - DNA, 25 bp, probe
aattccaagttcaacattcactctc

SEQ ID NO: 75806 - DNA, 25 bp, probe
tgagtcaagcagaattgttcagaat

SEQ ID NO: 75807 - DNA, 25 bp, probe
atgagtcaagcagaattgttcagaa

SEQ ID NO: 75808 - DNA, 25 bp, probe
gagtcaagcagaattgttcagaatt

SEQ ID NO: 75809 - DNA, 25 bp, probe
attccaagttcaacattcactctcc

SEQ ID NO: 75810 - DNA, 25 bp, probe
gcttccttagagtccaaatccttta

SEQ ID NO: 75811 - DNA, 25 bp, probe
acaagagcaagtggaaagaagatac

SEQ ID NO: 75812 - DNA, 25 bp, probe
aaatgggttctcaatcataaaggtg

SEQ ID NO: 75813 - DNA, 25 bp, probe
tctgaggagaataagaaatgggttc

SEQ ID NO: 75814 - DNA, 25 bp, probe
gtctgaggagaataagaaatgggtt

SEQ ID NO: 75815 - DNA, 25 bp, probe
gaaatgggttctcaatcataaaggt

SEQ ID NO: 75816 - DNA, 25 bp, probe
agtctgaggagaataagaaatgggt

SEQ ID NO: 75817 - DNA, 25 bp, probe
cagtctgaggagaataagaaatggg

SEQ ID NO: 75818 - DNA, 25 bp, probe
aagtggaaagaagatactggatgtc

SEQ ID NO: 75819 - DNA, 25 bp, probe
aaacttctcaaatcacactcagtct

SEQ ID NO: 75820 - DNA, 25 bp, probe
caagtggaaagaagatactggatgt

SEQ ID NO: 75821 - DNA, 25 bp, probe
aagagcaagtggaaagaagatactg

SEQ ID NO: 75822 - DNA, 25 bp, probe
caagagcaagtggaaagaagatact

SEQ ID NO: 75823 - DNA, 25 bp, probe
aatgggttctcaatcataaaggtgc

SEQ ID NO: 75824 - DNA, 25 bp, probe
agtggaaagaagatactggatgtca

SEQ ID NO: 75825 - DNA, 25 bp, probe
aacttctcaaatcacactcagtctg

SEQ ID NO: 75826 - DNA, 25 bp, probe
cttccttagagtccaaatcctttat

SEQ ID NO: 75827 - DNA, 25 bp, probe
ttccaagttcaacattcactctccg

SEQ ID NO: 75828 - DNA, 25 bp, probe
gcaagtggaaagaagatactggatg

SEQ ID NO: 75829 - DNA, 25 bp, probe
gtggaaagaagatactggatgtcag

SEQ ID NO: 75830 - DNA, 25 bp, probe
agcaagtggaaagaagatactggat

SEQ ID NO: 75831 - DNA, 25 bp, probe
tcagtctgaggagaataagaaatgg

SEQ ID NO: 75832 - DNA, 25 bp, probe
ggcttccttagagtccaaatccttt

SEQ ID NO: 75833 - DNA, 25 bp, probe
cacaagagcaagtggaaagaagata

SEQ ID NO: 75834 - DNA, 25 bp, probe
gagcaagtggaaagaagatactgga

SEQ ID NO: 75835 - DNA, 25 bp, probe
agagcaagtggaaagaagatactgg

SEQ ID NO: 75836 - DNA, 25 bp, probe
aatgacaaatcagcaaccacaagag

SEQ ID NO: 75837 - DNA, 25 bp, probe
gaatgacaaatcagcaaccacaaga

SEQ ID NO: 75838 - DNA, 25 bp, probe
acttctcaaatcacactcagtctga

SEQ ID NO: 75839 - DNA, 25 bp, probe
aattgttcagaattccaagttcaac

SEQ ID NO: 75840 - DNA, 25 bp, probe
cagaattccaagttcaacattcact

SEQ ID NO: 75841 - DNA, 25 bp, probe
tcagaattccaagttcaacattcac

SEQ ID NO: 75842 - DNA, 25 bp, probe
gaattccaagttcaacattcactct

SEQ ID NO: 75843 - DNA, 25 bp, probe
agaattccaagttcaacattcactc

SEQ ID NO: 75844 - DNA, 25 bp, probe
ttcagaattccaagttcaacattca

SEQ ID NO: 75845 - DNA, 25 bp, probe
atgggttctcaatcataaaggtgcc

SEQ ID NO: 75846 - DNA, 25 bp, probe
ctgaggagaataagaaatgggttct

SEQ ID NO: 75847 - DNA, 25 bp, probe
cttctaggtctaaggagaaagcaat

SEQ ID NO: 75848 - DNA, 25 bp, probe
gttcagaattccaagttcaacattc

SEQ ID NO: 75849 - DNA, 25 bp, probe
ctttgactatatcacagagaagggc

SEQ ID NO: 75850 - DNA, 25 bp, probe
tctttgactatatcacagagaaggg

SEQ ID NO: 75851 - DNA, 25 bp, probe
cccttggatctctttgactatatca

SEQ ID NO: 75852 - DNA, 25 bp, probe
tggatctctttgactatatcacaga

SEQ ID NO: 75853 - DNA, 25 bp, probe
ccttggatctctttgactatatcac

SEQ ID NO: 75854 - DNA, 25 bp, probe
ttggatctctttgactatatcacag

SEQ ID NO: 75855 - DNA, 25 bp, probe
cttggatctctttgactatatcaca

SEQ ID NO: 75856 - DNA, 25 bp, probe
atcgtgacatcaaggatgagaacat

SEQ ID NO: 75857 - DNA, 25 bp, probe
tcgtgacatcaaggatgagaacatc

SEQ ID NO: 75858 - DNA, 25 bp, probe
ccccttggatctctttgactatatc

SEQ ID NO: 75859 - DNA, 25 bp, probe
catcgtgacatcaaggatgagaaca

SEQ ID NO: 75860 - DNA, 25 bp, probe
ccatcgtgacatcaaggatgagaac

SEQ ID NO: 75861 - DNA, 25 bp, probe
tttgactatatcacagagaagggcc

SEQ ID NO: 75862 - DNA, 25 bp, probe
ctctttgactatatcacagagaagg

SEQ ID NO: 75863 - DNA, 25 bp, probe
tccatcgtgacatcaaggatgagaa

SEQ ID NO: 75864 - DNA, 25 bp, probe
ggatctctttgactatatcacagag

SEQ ID NO: 75865 - DNA, 25 bp, probe
gtccatcgtgacatcaaggatgaga

SEQ ID NO: 75866 - DNA, 25 bp, probe
gttgtccatcgtgacatcaaggatg

SEQ ID NO: 75867 - DNA, 25 bp, probe
ttgtccatcgtgacatcaaggatga

SEQ ID NO: 75868 - DNA, 25 bp, probe
agttgtccatcgtgacatcaaggat

SEQ ID NO: 75869 - DNA, 25 bp, probe
tgtccatcgtgacatcaaggatgag

SEQ ID NO: 75870 - DNA, 25 bp, probe
gagttgtccatcgtgacatcaagga

SEQ ID NO: 75871 - DNA, 25 bp, probe
tggagttgtccatcgtgacatcaag

SEQ ID NO: 75872 - DNA, 25 bp, probe
gtggagttgtccatcgtgacatcaa

SEQ ID NO: 75873 - DNA, 25 bp, probe
gacagtgttatgagcgaaggaataa

SEQ ID NO: 75874 - DNA, 25 bp, probe
gttgaaggagagccagagtattgaa

SEQ ID NO: 75875 - DNA, 25 bp, probe
ggacagtgttatgagcgaaggaata

SEQ ID NO: 75876 - DNA, 25 bp, probe
aaaggaaatagcagcagaagtcaat

SEQ ID NO: 75877 - DNA, 25 bp, probe
aaggttgaaggagagccagagtatt

SEQ ID NO: 75878 - DNA, 25 bp, probe
aggagagccagagtattgaaagaaa

SEQ ID NO: 75879 - DNA, 25 bp, probe
aaggagagccagagtattgaaagaa

SEQ ID NO: 75880 - DNA, 25 bp, probe
acagtgttatgagcgaaggaataaa

SEQ ID NO: 75881 - DNA, 25 bp, probe
gaaaggaaatagcagcagaagtcaa

SEQ ID NO: 75882 - DNA, 25 bp, probe
aaggaaatagcagcagaagtcaatg

SEQ ID NO: 75883 - DNA, 25 bp, probe
ttgaaggagagccagagtattgaaa

SEQ ID NO: 75884 - DNA, 25 bp, probe
aaactttatattggcatcaggacaa

SEQ ID NO: 75885 - DNA, 25 bp, probe
gaaggagagccagagtattgaaaga

SEQ ID NO: 75886 - DNA, 25 bp, probe
tgaaggagagccagagtattgaaag

SEQ ID NO: 75887 - DNA, 25 bp, probe
gaaatagcagcagaagtcaatgtgg

SEQ ID NO: 75888 - DNA, 25 bp, probe
ggaaatagcagcagaagtcaatgtg

SEQ ID NO: 75889 - DNA, 25 bp, probe
aggaaatagcagcagaagtcaatgt

SEQ ID NO: 75890 - DNA, 25 bp, probe
atggaaaggaaatagcagcagaagt

SEQ ID NO: 75891 - DNA, 25 bp, probe
ggttgaaggagagccagagtattga

SEQ ID NO: 75892 - DNA, 25 bp, probe
aggttgaaggagagccagagtattg

SEQ ID NO: 75893 - DNA, 25 bp, probe
aattggaattagctcagacaggaaa

SEQ ID NO: 75894 - DNA, 25 bp, probe
aaattggaattagctcagacaggaa

SEQ ID NO: 75895 - DNA, 25 bp, probe
cacaaattggaattagctcagacag

SEQ ID NO: 75896 - DNA, 25 bp, probe
atcacaaattggaattagctcagac

SEQ ID NO: 75897 - DNA, 25 bp, probe
catcacaaattggaattagctcaga

SEQ ID NO: 75898 - DNA, 25 bp, probe
tcatcacaaattggaattagctcag

SEQ ID NO: 75899 - DNA, 25 bp, probe
agtatcatcacaaattggaattagc

SEQ ID NO: 75900 - DNA, 25 bp, probe
gaattaaagatcatggcaggacagg

SEQ ID NO: 75901 - DNA, 25 bp, probe
tgaattaaagatcatggcaggacag

SEQ ID NO: 75902 - DNA, 25 bp, probe
tcacaaattggaattagctcagaca

SEQ ID NO: 75903 - DNA, 25 bp, probe
caaattggaattagctcagacagga

SEQ ID NO: 75904 - DNA, 25 bp, probe
atcatcacaaattggaattagctca

SEQ ID NO: 75905 - DNA, 25 bp, probe
attaaagatcatggcaggacaggaa

SEQ ID NO: 75906 - DNA, 25 bp, probe
aattaaagatcatggcaggacagga

SEQ ID NO: 75907 - DNA, 25 bp, probe
atgaaggcaatacatgagcaagtcc

SEQ ID NO: 75908 - DNA, 25 bp, probe
aatagcagcagaagtcaatgtggac

SEQ ID NO: 75909 - DNA, 25 bp, probe
aaatagcagcagaagtcaatgtgga

SEQ ID NO: 75910 - DNA, 25 bp, probe
acaaattggaattagctcagacagg

SEQ ID NO: 75911 - DNA, 25 bp, probe
ctgctttcattgcctttgttcctac

SEQ ID NO: 75912 - DNA, 25 bp, probe
catggaaaggaaatagcagcagaag

SEQ ID NO: 75913 - DNA, 25 bp, probe
ggaaaggaaatagcagcagaagtca

SEQ ID NO: 75914 - DNA, 25 bp, probe
tggaaaggaaatagcagcagaagtc

SEQ ID NO: 75915 - DNA, 25 bp, probe
actttatattggcatcaggacaatg

SEQ ID NO: 75916 - DNA, 25 bp, probe
aaaggttgaaggagagccagagtat

SEQ ID NO: 75917 - DNA, 25 bp, probe
caggaagtaagaagtaagagtgacc

SEQ ID NO: 75918 - DNA, 25 bp, probe
ctgtgagaataatcgctatggaatg

SEQ ID NO: 75919 - DNA, 25 bp, probe
tgtgagaataatcgctatggaatgg

SEQ ID NO: 75920 - DNA, 25 bp, probe
tattatgcttctcaaggacaggatg

SEQ ID NO: 75921 - DNA, 25 bp, probe
ctattatgcttctcaaggacaggat

SEQ ID NO: 75922 - DNA, 25 bp, probe
tctgtgagaataatcgctatggaat

SEQ ID NO: 75923 - DNA, 25 bp, probe
atctgtgagaataatcgctatggaa

SEQ ID NO: 75924 - DNA, 25 bp, probe
catctgtgagaataatcgctatgga

SEQ ID NO: 75925 - DNA, 25 bp, probe
actgattactacaagagaggcgatt

SEQ ID NO: 75926 - DNA, 25 bp, probe
tcatctgtgagaataatcgctatgg

SEQ ID NO: 75927 - DNA, 25 bp, probe
tcaggaagtaagaagtaagagtgac

SEQ ID NO: 75928 - DNA, 25 bp, probe
ttcatctgtgagaataatcgctatg

SEQ ID NO: 75929 - DNA, 25 bp, probe
cactgattactacaagagaggcgat

SEQ ID NO: 75930 - DNA, 25 bp, probe
ttcaggaagtaagaagtaagagtga

SEQ ID NO: 75931 - DNA, 25 bp, probe
attcaggaagtaagaagtaagagtg

SEQ ID NO: 75932 - DNA, 25 bp, probe
gaagtgaggaaggagattgaggatg

SEQ ID NO: 75933 - DNA, 25 bp, probe
attatgcttctcaaggacaggatgg

SEQ ID NO: 75934 - DNA, 25 bp, probe
aattgatgtggaagtgaggaaggag

SEQ ID NO: 75935 - DNA, 25 bp, probe
ccagcactgattactacaagagagg

SEQ ID NO: 75936 - DNA, 25 bp, probe
cctattatgcttctcaaggacagga

SEQ ID NO: 75937 - DNA, 25 bp, probe
gatgtggaagtgaggaaggagattg

SEQ ID NO: 75938 - DNA, 25 bp, probe
ttactacaagagaggcgatttcatt

SEQ ID NO: 75939 - DNA, 25 bp, probe
attactacaagagaggcgatttcat

SEQ ID NO: 75940 - DNA, 25 bp, probe
gaagtaagagtgaccctattatgct

SEQ ID NO: 75941 - DNA, 25 bp, probe
agaagtaagagtgaccctattatgc

SEQ ID NO: 75942 - DNA, 25 bp, probe
tactacaagagaggcgatttcattc

SEQ ID NO: 75943 - DNA, 25 bp, probe
gattactacaagagaggcgatttca

SEQ ID NO: 75944 - DNA, 25 bp, probe
tgattactacaagagaggcgatttc

SEQ ID NO: 75945 - DNA, 25 bp, probe
ctgattactacaagagaggcgattt

SEQ ID NO: 75946 - DNA, 25 bp, probe
gagaataatcgctatggaatgggaa

SEQ ID NO: 75947 - DNA, 25 bp, probe
agaataatcgctatggaatgggaac

SEQ ID NO: 75948 - DNA, 25 bp, probe
aattcaggaagtaagaagtaagagt

SEQ ID NO: 75949 - DNA, 25 bp, probe
gtgtggaagaactaaaggaaattga

SEQ ID NO: 75950 - DNA, 25 bp, probe
agtaagagtgaccctattatgcttc

SEQ ID NO: 75951 - DNA, 25 bp, probe
gaagtaagaagtaagagtgacccta

SEQ ID NO: 75952 - DNA, 25 bp, probe
taaaggaaattgatgtggaagtgag

SEQ ID NO: 75953 - DNA, 25 bp, probe
ctaaaggaaattgatgtggaagtga

SEQ ID NO: 75954 - DNA, 25 bp, probe
gtaagagtgaccctattatgcttct

SEQ ID NO: 75955 - DNA, 25 bp, probe
ggaagtaagaagtaagagtgaccct

SEQ ID NO: 75956 - DNA, 25 bp, probe
aggaagtaagaagtaagagtgaccc

SEQ ID NO: 75957 - DNA, 25 bp, probe
acacgagaagaaattcaggaagtaa

SEQ ID NO: 75958 - DNA, 25 bp, probe
cagcactgattactacaagagaggc

SEQ ID NO: 75959 - DNA, 25 bp, probe
gccagcactgattactacaagagag

SEQ ID NO: 75960 - DNA, 25 bp, probe
aagtaagagtgaccctattatgctt

SEQ ID NO: 75961 - DNA, 25 bp, probe
tcagagaacggctacattaagatat

SEQ ID NO: 75962 - DNA, 25 bp, probe
ttcagagaacggctacattaagata

SEQ ID NO: 75963 - DNA, 25 bp, probe
cagagaacggctacattaagatatt

SEQ ID NO: 75964 - DNA, 25 bp, probe
ttaagcaccgcaatatcgttcagta

SEQ ID NO: 75965 - DNA, 25 bp, probe
tttcagagaacggctacattaagat

SEQ ID NO: 75966 - DNA, 25 bp, probe
gtttcagagaacggctacattaaga

SEQ ID NO: 75967 - DNA, 25 bp, probe
tacagacccacattaaaggcaagta

SEQ ID NO: 75968 - DNA, 25 bp, probe
ttaagatatttatggagcaggtgcc

SEQ ID NO: 75969 - DNA, 25 bp, probe
tacagatgggaagttgaatagtttc

SEQ ID NO: 75970 - DNA, 25 bp, probe
attaagatatttatggagcaggtgc

SEQ ID NO: 75971 - DNA, 25 bp, probe
gtacagatgggaagttgaatagttt

SEQ ID NO: 75972 - DNA, 25 bp, probe
taagatatttatggagcaggtgcct

SEQ ID NO: 75973 - DNA, 25 bp, probe
cttacagacccacattaaaggcaag

SEQ ID NO: 75974 - DNA, 25 bp, probe
agagaacggctacattaagatattt

SEQ ID NO: 75975 - DNA, 25 bp, probe
tgtttcagagaacggctacattaag

SEQ ID NO: 75976 - DNA, 25 bp, probe
taagcaccgcaatatcgttcagtac

SEQ ID NO: 75977 - DNA, 25 bp, probe
ctgtttcagagaacggctacattaa

SEQ ID NO: 75978 - DNA, 25 bp, probe
ttacagacccacattaaaggcaagt

SEQ ID NO: 75979 - DNA, 25 bp, probe
acattaagatatttatggagcaggt

SEQ ID NO: 75980 - DNA, 25 bp, probe
acggctacattaagatatttatgga

SEQ ID NO: 75981 - DNA, 25 bp, probe
aagaaagtttccagaaagaagggat

SEQ ID NO: 75982 - DNA, 25 bp, probe
aaagaaagtttccagaaagaaggga

SEQ ID NO: 75983 - DNA, 25 bp, probe
cattaagatatttatggagcaggtg

SEQ ID NO: 75984 - DNA, 25 bp, probe
caagtaccttaagcaccgcaatatc

SEQ ID NO: 75985 - DNA, 25 bp, probe
ccctccttacagacccacattaaag

SEQ ID NO: 75986 - DNA, 25 bp, probe
agaaagtttccagaaagaagggatg

SEQ ID NO: 75987 - DNA, 25 bp, probe
cggctacattaagatatttatggag

SEQ ID NO: 75988 - DNA, 25 bp, probe
acaagtaccttaagcaccgcaatat

SEQ ID NO: 75989 - DNA, 25 bp, probe
accctccttacagacccacattaaa

SEQ ID NO: 75990 - DNA, 25 bp, probe
aacggctacattaagatatttatgg

SEQ ID NO: 75991 - DNA, 25 bp, probe
gaatagtttcatggaagccagagaa

SEQ ID NO: 75992 - DNA, 25 bp, probe
gaaagtttccagaaagaagggatgg

SEQ ID NO: 75993 - DNA, 25 bp, probe
aatagtttcatggaagccagagaaa

SEQ ID NO: 75994 - DNA, 25 bp, probe
gaacagacagcagaacttgaccttt

SEQ ID NO: 75995 - DNA, 25 bp, probe
acagacccacattaaaggcaagtac

SEQ ID NO: 75996 - DNA, 25 bp, probe
catggaacagacagcagaacttgac

SEQ ID NO: 75997 - DNA, 25 bp, probe
aacagacagcagaacttgacctttc

SEQ ID NO: 75998 - DNA, 25 bp, probe
gaccctccttacagacccacattaa

SEQ ID NO: 75999 - DNA, 25 bp, probe
gagaacggctacattaagatattta

SEQ ID NO: 76000 - DNA, 25 bp, probe
taccttaagcaccgcaatatcgttc

SEQ ID NO: 76001 - DNA, 25 bp, probe
acagatgggaagttgaatagtttca

SEQ ID NO: 76002 - DNA, 25 bp, probe
aagtaccttaagcaccgcaatatcg

SEQ ID NO: 76003 - DNA, 25 bp, probe
aaaagaaagtttccagaaagaaggg

SEQ ID NO: 76004 - DNA, 25 bp, probe
gggaagttgaatagtttcatggaag

SEQ ID NO: 76005 - DNA, 25 bp, probe
cagagacataaagcacttgatgatg

SEQ ID NO: 76006 - DNA, 25 bp, probe
acagagacataaagcacttgatgat

SEQ ID NO: 76007 - DNA, 25 bp, probe
cacagagacataaagcacttgatga

SEQ ID NO: 76008 - DNA, 25 bp, probe
tagataaggacatggatgaagcgga

SEQ ID NO: 76009 - DNA, 25 bp, probe
gtagataaggacatggatgaagcgg

SEQ ID NO: 76010 - DNA, 25 bp, probe
ggtagataaggacatggatgaagcg

SEQ ID NO: 76011 - DNA, 25 bp, probe
gataaggacatggatgaagcggaag

SEQ ID NO: 76012 - DNA, 25 bp, probe
gcacagagacataaagcacttgatg

SEQ ID NO: 76013 - DNA, 25 bp, probe
ataaggacatggatgaagcggaaga

SEQ ID NO: 76014 - DNA, 25 bp, probe
agataaggacatggatgaagcggaa

SEQ ID NO: 76015 - DNA, 25 bp, probe
gggtagataaggacatggatgaagc

SEQ ID NO: 76016 - DNA, 25 bp, probe
gcacttgatgatgttattttccgaa

SEQ ID NO: 76017 - DNA, 25 bp, probe
aagcacttgatgatgttattttccg

SEQ ID NO: 76018 - DNA, 25 bp, probe
atgatgttattttccgaaggcgata

SEQ ID NO: 76019 - DNA, 25 bp, probe
agcacttgatgatgttattttccga

SEQ ID NO: 76020 - DNA, 25 bp, probe
acttgatgatgttattttccgaagg

SEQ ID NO: 76021 - DNA, 25 bp, probe
tattttccgaaggcgataatgttct

SEQ ID NO: 76022 - DNA, 25 bp, probe
ttattttccgaaggcgataatgttc

SEQ ID NO: 76023 - DNA, 25 bp, probe
gttattttccgaaggcgataatgtt

SEQ ID NO: 76024 - DNA, 25 bp, probe
atgttattttccgaaggcgataatg

SEQ ID NO: 76025 - DNA, 25 bp, probe
gatgttattttccgaaggcgataat

SEQ ID NO: 76026 - DNA, 25 bp, probe
taaggacatggatgaagcggaagag

SEQ ID NO: 76027 - DNA, 25 bp, probe
cttgatgatgttattttccgaaggc

SEQ ID NO: 76028 - DNA, 25 bp, probe
gaaggaaccgacaatcaagttttac

SEQ ID NO: 76029 - DNA, 25 bp, probe
agagacataaagcacttgatgatgt

SEQ ID NO: 76030 - DNA, 25 bp, probe
gagacataaagcacttgatgatgtt

SEQ ID NO: 76031 - DNA, 25 bp, probe
tgatgttattttccgaaggcgataa

SEQ ID NO: 76032 - DNA, 25 bp, probe
aaagcacttgatgatgttattttcc

SEQ ID NO: 76033 - DNA, 25 bp, probe
cacttgatgatgttattttccgaag

SEQ ID NO: 76034 - DNA, 25 bp, probe
tgttattttccgaaggcgataatgt

SEQ ID NO: 76035 - DNA, 25 bp, probe
aaggaaccgacaatcaagttttaca

SEQ ID NO: 76036 - DNA, 25 bp, probe
ctgtgagactgaaggggtagataag

SEQ ID NO: 76037 - DNA, 25 bp, probe
cataaagcacttgatgatgttattt

SEQ ID NO: 76038 - DNA, 25 bp, probe
accgacaatcaagttttacaccaaa

SEQ ID NO: 76039 - DNA, 25 bp, probe
tgaaggaaccgacaatcaagtttta

SEQ ID NO: 76040 - DNA, 25 bp, probe
gatgatgttattttccgaaggcgat

SEQ ID NO: 76041 - DNA, 25 bp, probe
agactgaaggggtagataaggacat

SEQ ID NO: 76042 - DNA, 25 bp, probe
aaccgacaatcaagttttacaccaa

SEQ ID NO: 76043 - DNA, 25 bp, probe
agacataaagcacttgatgatgtta

SEQ ID NO: 76044 - DNA, 25 bp, probe
aggaaccgacaatcaagttttacac

SEQ ID NO: 76045 - DNA, 25 bp, probe
tttgagcctacctgtgagactgaag

SEQ ID NO: 76046 - DNA, 25 bp, probe
ctttgagcctacctgtgagactgaa

SEQ ID NO: 76047 - DNA, 25 bp, probe
atgaaggaaccgacaatcaagtttt

SEQ ID NO: 76048 - DNA, 25 bp, probe
attttccgaaggcgataatgttctg

SEQ ID NO: 76049 - DNA, 25 bp, probe
gctgaagatgagatagaggacattc

SEQ ID NO: 76050 - DNA, 25 bp, probe
tgagatagaggacattcaacaagaa

SEQ ID NO: 76051 - DNA, 25 bp, probe
atgagatagaggacattcaacaaga

SEQ ID NO: 76052 - DNA, 25 bp, probe
agatgagatagaggacattcaacaa

SEQ ID NO: 76053 - DNA, 25 bp, probe
aagatgagatagaggacattcaaca

SEQ ID NO: 76054 - DNA, 25 bp, probe
gatgagatagaggacattcaacaag

SEQ ID NO: 76055 - DNA, 25 bp, probe
gaagatgagatagaggacattcaac

SEQ ID NO: 76056 - DNA, 25 bp, probe
acagtgttgagatgtatgaaggata

SEQ ID NO: 76057 - DNA, 25 bp, probe
cacagtgttgagatgtatgaaggat

SEQ ID NO: 76058 - DNA, 25 bp, probe
atcacagtgttgagatgtatgaagg

SEQ ID NO: 76059 - DNA, 25 bp, probe
aatcacagtgttgagatgtatgaag

SEQ ID NO: 76060 - DNA, 25 bp, probe
tcacagtgttgagatgtatgaagga

SEQ ID NO: 76061 - DNA, 25 bp, probe
aataatggaatatcctgatggaggc

SEQ ID NO: 76062 - DNA, 25 bp, probe
gaagaagctgaagatgagatagagg

SEQ ID NO: 76063 - DNA, 25 bp, probe
ggaagaagctgaagatgagatagag

SEQ ID NO: 76064 - DNA, 25 bp, probe
cagtgttgagatgtatgaaggatac

SEQ ID NO: 76065 - DNA, 25 bp, probe
aagaagctgaagatgagatagagga

SEQ ID NO: 76066 - DNA, 25 bp, probe
ctggaagaagctgaagatgagatag

SEQ ID NO: 76067 - DNA, 25 bp, probe
tggaagaagctgaagatgagataga

SEQ ID NO: 76068 - DNA, 25 bp, probe
ataatggaatatcctgatggaggct

SEQ ID NO: 76069 - DNA, 25 bp, probe
agaagctgaagatgagatagaggac

SEQ ID NO: 76070 - DNA, 25 bp, probe
agctgaagatgagatagaggacatt

SEQ ID NO: 76071 - DNA, 25 bp, probe
aagctgaagatgagatagaggacat

SEQ ID NO: 76072 - DNA, 25 bp, probe
tctggaagaagctgaagatgagata

SEQ ID NO: 76073 - DNA, 25 bp, probe
gaagctgaagatgagatagaggaca

SEQ ID NO: 76074 - DNA, 25 bp, probe
taatggaatatcctgatggaggctc

SEQ ID NO: 76075 - DNA, 25 bp, probe
aatcattgatctggaagaagctgaa

SEQ ID NO: 76076 - DNA, 25 bp, probe
atcattgatctggaagaagctgaag

SEQ ID NO: 76077 - DNA, 25 bp, probe
gaggacattcaacaagaaatcacag

SEQ ID NO: 76078 - DNA, 25 bp, probe
agaggacattcaacaagaaatcaca

SEQ ID NO: 76079 - DNA, 25 bp, probe
aggacattcaacaagaaatcacagt

SEQ ID NO: 76080 - DNA, 25 bp, probe
tagaggacattcaacaagaaatcac

SEQ ID NO: 76081 - DNA, 25 bp, probe
ggacattcaacaagaaatcacagtg

SEQ ID NO: 76082 - DNA, 25 bp, probe
tcattgatctggaagaagctgaaga

SEQ ID NO: 76083 - DNA, 25 bp, probe
gagatagaggacattcaacaagaaa

SEQ ID NO: 76084 - DNA, 25 bp, probe
gtccctgggcataacaactatttaa

SEQ ID NO: 76085 - DNA, 25 bp, probe
gacattcaacaagaaatcacagtgt

SEQ ID NO: 76086 - DNA, 25 bp, probe
atagaggacattcaacaagaaatca

SEQ ID NO: 76087 - DNA, 25 bp, probe
caagaaatcacagtgttgagatgta

SEQ ID NO: 76088 - DNA, 25 bp, probe
acaagaaatcacagtgttgagatgt

SEQ ID NO: 76089 - DNA, 25 bp, probe
agagaaatactgaaaggacttgatt

SEQ ID NO: 76090 - DNA, 25 bp, probe
gaaatcacagtgttgagatgtatga

SEQ ID NO: 76091 - DNA, 25 bp, probe
agaaatcacagtgttgagatgtatg

SEQ ID NO: 76092 - DNA, 25 bp, probe
taataatggaatatcctgatggagg

SEQ ID NO: 76093 - DNA, 25 bp, probe
atcttattctgcttgtgctgctatt

SEQ ID NO: 76094 - DNA, 25 bp, probe
ttctcttcatcttattctgcttgtg

SEQ ID NO: 76095 - DNA, 25 bp, probe
ccatccagccagataattgataact

SEQ ID NO: 76096 - DNA, 25 bp, probe
ctcttcatcttattctgcttgtgct

SEQ ID NO: 76097 - DNA, 25 bp, probe
tctcttcatcttattctgcttgtgc

SEQ ID NO: 76098 - DNA, 25 bp, probe
accatccagccagataattgataac

SEQ ID NO: 76099 - DNA, 25 bp, probe
caccatccagccagataattgataa

SEQ ID NO: 76100 - DNA, 25 bp, probe
tcttcatcttattctgcttgtgctg

SEQ ID NO: 76101 - DNA, 25 bp, probe
catcttattctgcttgtgctgctat

SEQ ID NO: 76102 - DNA, 25 bp, probe
tcttattctgcttgtgctgctattg

SEQ ID NO: 76103 - DNA, 25 bp, probe
attctcttcatcttattctgcttgt

SEQ ID NO: 76104 - DNA, 25 bp, probe
catgaagatcctggttgttgtattg

SEQ ID NO: 76105 - DNA, 25 bp, probe
catccagccagataattgataactg

SEQ ID NO: 76106 - DNA, 25 bp, probe
atgaagatcctggttgttgtattgc

SEQ ID NO: 76107 - DNA, 25 bp, probe
tcatcttattctgcttgtgctgcta

SEQ ID NO: 76108 - DNA, 25 bp, probe
cttattctgcttgtgctgctattgg

SEQ ID NO: 76109 - DNA, 25 bp, probe
ttattctgcttgtgctgctattgga

SEQ ID NO: 76110 - DNA, 25 bp, probe
cttcatcttattctgcttgtgctgc

SEQ ID NO: 76111 - DNA, 25 bp, probe
aattctcttcatcttattctgcttg

SEQ ID NO: 76112 - DNA, 25 bp, probe
tattctgcttgtgctgctattggaa

SEQ ID NO: 76113 - DNA, 25 bp, probe
gcaccatccagccagataattgata

SEQ ID NO: 76114 - DNA, 25 bp, probe
cttctggtgacttcaaattctcttc

SEQ ID NO: 76115 - DNA, 25 bp, probe
tcttctggtgacttcaaattctctt

SEQ ID NO: 76116 - DNA, 25 bp, probe
atcttctggtgacttcaaattctct

SEQ ID NO: 76117 - DNA, 25 bp, probe
catcttctggtgacttcaaattctc

SEQ ID NO: 76118 - DNA, 25 bp, probe
tggaagatgacgatgaatttatgga

SEQ ID NO: 76119 - DNA, 25 bp, probe
ctggaagatgacgatgaatttatgg

SEQ ID NO: 76120 - DNA, 25 bp, probe
acatcttctggtgacttcaaattct

SEQ ID NO: 76121 - DNA, 25 bp, probe
aacatcttctggtgacttcaaattc

SEQ ID NO: 76122 - DNA, 25 bp, probe
agatgacgatgaatttatggagact

SEQ ID NO: 76123 - DNA, 25 bp, probe
ggaagatgacgatgaatttatggag

SEQ ID NO: 76124 - DNA, 25 bp, probe
tgaagaggtttacttgaatccgaaa

SEQ ID NO: 76125 - DNA, 25 bp, probe
ttcatcttattctgcttgtgctgct

SEQ ID NO: 76126 - DNA, 25 bp, probe
actggaagatgacgatgaatttatg

SEQ ID NO: 76127 - DNA, 25 bp, probe
cactggaagatgacgatgaatttat

SEQ ID NO: 76128 - DNA, 25 bp, probe
ctgaagaggtttacttgaatccgaa

SEQ ID NO: 76129 - DNA, 25 bp, probe
gaacatcttctggtgacttcaaatt

SEQ ID NO: 76130 - DNA, 25 bp, probe
aagatgacgatgaatttatggagac

SEQ ID NO: 76131 - DNA, 25 bp, probe
aagaacatgaaggcaaggtagactc

SEQ ID NO: 76132 - DNA, 25 bp, probe
aattgagatgaaaggattgaacagt

SEQ ID NO: 76133 - DNA, 25 bp, probe
gaagatgacgatgaatttatggaga

SEQ ID NO: 76134 - DNA, 25 bp, probe
ccactggaagatgacgatgaattta

SEQ ID NO: 76135 - DNA, 25 bp, probe
ggttgtagaaaggtcaaagaagatt

SEQ ID NO: 76136 - DNA, 25 bp, probe
tggtgacttcaaattctcttcatct

SEQ ID NO: 76137 - DNA, 25 bp, probe
tccagaggtgtttcattacttcaaa

SEQ ID NO: 76138 - DNA, 25 bp, probe
ccagaggtgtttcattacttcaaat

SEQ ID NO: 76139 - DNA, 25 bp, probe
ctccagaggtgtttcattacttcaa

SEQ ID NO: 76140 - DNA, 25 bp, probe
gaaggtgttagatgatgaaattggt

SEQ ID NO: 76141 - DNA, 25 bp, probe
tgaaggtgttagatgatgaaattgg

SEQ ID NO: 76142 - DNA, 25 bp, probe
ggtgttagatgatgaaattggttcc

SEQ ID NO: 76143 - DNA, 25 bp, probe
ttaagttacggaaataagcaggttt

SEQ ID NO: 76144 - DNA, 25 bp, probe
gttagatgatgaaattggttcctgc

SEQ ID NO: 76145 - DNA, 25 bp, probe
tgttagatgatgaaattggttcctg

SEQ ID NO: 76146 - DNA, 25 bp, probe
gtgttagatgatgaaattggttcct

SEQ ID NO: 76147 - DNA, 25 bp, probe
aggtgttagatgatgaaattggttc

SEQ ID NO: 76148 - DNA, 25 bp, probe
aaggtgttagatgatgaaattggtt

SEQ ID NO: 76149 - DNA, 25 bp, probe
attaagttacggaaataagcaggtt

SEQ ID NO: 76150 - DNA, 25 bp, probe
aattaagttacggaaataagcaggt

SEQ ID NO: 76151 - DNA, 25 bp, probe
ggtgtttcattacttcaaatacagc

SEQ ID NO: 76152 - DNA, 25 bp, probe
aggcaagtgtattctctggagtctc

SEQ ID NO: 76153 - DNA, 25 bp, probe
aaattaagttacggaaataagcagg

SEQ ID NO: 76154 - DNA, 25 bp, probe
tgtggcaactacaaaggatgtttag

SEQ ID NO: 76155 - DNA, 25 bp, probe
ttgaaggtgttagatgatgaaattg

SEQ ID NO: 76156 - DNA, 25 bp, probe
actgtgctgaaccaagtttatgaac

SEQ ID NO: 76157 - DNA, 25 bp, probe
cactgtgctgaaccaagtttatgaa

SEQ ID NO: 76158 - DNA, 25 bp, probe
gaggcaagtgtattctctggagtct

SEQ ID NO: 76159 - DNA, 25 bp, probe
cttcaaatacagcagcaagtcagac

SEQ ID NO: 76160 - DNA, 25 bp, probe
agaggtgtttcattacttcaaatac

SEQ ID NO: 76161 - DNA, 25 bp, probe
cagaggtgtttcattacttcaaata

SEQ ID NO: 76162 - DNA, 25 bp, probe
gctccagaggtgtttcattacttca

SEQ ID NO: 76163 - DNA, 25 bp, probe
tttgaaggtgttagatgatgaaatt

SEQ ID NO: 76164 - DNA, 25 bp, probe
ttagatgatgaaattggttcctgca

SEQ ID NO: 76165 - DNA, 25 bp, probe
aggtgtttcattacttcaaatacag

SEQ ID NO: 76166 - DNA, 25 bp, probe
gaggtgtttcattacttcaaataca

SEQ ID NO: 76167 - DNA, 25 bp, probe
agctccagaggtgtttcattacttc

SEQ ID NO: 76168 - DNA, 25 bp, probe
gctcttttgaaggtgttagatgatg

SEQ ID NO: 76169 - DNA, 25 bp, probe
taagttacggaaataagcaggtttt

SEQ ID NO: 76170 - DNA, 25 bp, probe
gaaaaccccaaaattaagttacgga

SEQ ID NO: 76171 - DNA, 25 bp, probe
agaaaaccccaaaattaagttacgg

SEQ ID NO: 76172 - DNA, 25 bp, probe
aaaccccaaaattaagttacggaaa

SEQ ID NO: 76173 - DNA, 25 bp, probe
aaaaccccaaaattaagttacggaa

SEQ ID NO: 76174 - DNA, 25 bp, probe
ggctcttttgaaggtgttagatgat

SEQ ID NO: 76175 - DNA, 25 bp, probe
aaccccaaaattaagttacggaaat

SEQ ID NO: 76176 - DNA, 25 bp, probe
cagctccagaggtgtttcattactt

SEQ ID NO: 76177 - DNA, 25 bp, probe
aatacagcagcaagtcagacgtatg

SEQ ID NO: 76178 - DNA, 25 bp, probe
ttacttcaaatacagcagcaagtca

SEQ ID NO: 76179 - DNA, 25 bp, probe
accccaaaattaagttacggaaata

SEQ ID NO: 76180 - DNA, 25 bp, probe
ctcttttgaaggtgttagatgatga

SEQ ID NO: 76181 - DNA, 25 bp, probe
tccatttatagcacctcagacattc

SEQ ID NO: 76182 - DNA, 25 bp, probe
ctccatttatagcacctcagacatt

SEQ ID NO: 76183 - DNA, 25 bp, probe
catttatagcacctcagacattccc

SEQ ID NO: 76184 - DNA, 25 bp, probe
ccatttatagcacctcagacattcc

SEQ ID NO: 76185 - DNA, 25 bp, probe
atttatagcacctcagacattccca

SEQ ID NO: 76186 - DNA, 25 bp, probe
tttatagcacctcagacattcccaa

SEQ ID NO: 76187 - DNA, 25 bp, probe
ttatagcacctcagacattcccaac

SEQ ID NO: 76188 - DNA, 25 bp, probe
caaacccacctactatgttgacaca

SEQ ID NO: 76189 - DNA, 25 bp, probe
ccttgaaatgctgctgtcctcttaa

SEQ ID NO: 76190 - DNA, 25 bp, probe
ccaaacccacctactatgttgacac

SEQ ID NO: 76191 - DNA, 25 bp, probe
ctactatgttgacacatttcctggt

SEQ ID NO: 76192 - DNA, 25 bp, probe
acctactatgttgacacatttcctg

SEQ ID NO: 76193 - DNA, 25 bp, probe
cacctactatgttgacacatttcct

SEQ ID NO: 76194 - DNA, 25 bp, probe
tactatgttgacacatttcctggtg

SEQ ID NO: 76195 - DNA, 25 bp, probe
cctactatgttgacacatttcctgg

SEQ ID NO: 76196 - DNA, 25 bp, probe
ccacctactatgttgacacatttcc

SEQ ID NO: 76197 - DNA, 25 bp, probe
cccacctactatgttgacacatttc

SEQ ID NO: 76198 - DNA, 25 bp, probe
tcgaatttatcagtgcaagaggagg

SEQ ID NO: 76199 - DNA, 25 bp, probe
tatagcacctcagacattcccaacc

SEQ ID NO: 76200 - DNA, 25 bp, probe
cttagctccatttatagcacctcag

SEQ ID NO: 76201 - DNA, 25 bp, probe
ttagctccatttatagcacctcaga

SEQ ID NO: 76202 - DNA, 25 bp, probe
acccacctactatgttgacacattt

SEQ ID NO: 76203 - DNA, 25 bp, probe
aacccacctactatgttgacacatt

SEQ ID NO: 76204 - DNA, 25 bp, probe
aaacccacctactatgttgacacat

SEQ ID NO: 76205 - DNA, 25 bp, probe
gctccatttatagcacctcagacat

SEQ ID NO: 76206 - DNA, 25 bp, probe
tagctccatttatagcacctcagac

SEQ ID NO: 76207 - DNA, 25 bp, probe
ccttagctccatttatagcacctca

SEQ ID NO: 76208 - DNA, 25 bp, probe
gaacaaatgccttgaaatgctgctg

SEQ ID NO: 76209 - DNA, 25 bp, probe
cccaaacccacctactatgttgaca

SEQ ID NO: 76210 - DNA, 25 bp, probe
tttcgaatttatcagtgcaagagga

SEQ ID NO: 76211 - DNA, 25 bp, probe
ttcgaatttatcagtgcaagaggag

SEQ ID NO: 76212 - DNA, 25 bp, probe
tatgttgacacatttcctggtgctc

SEQ ID NO: 76213 - DNA, 25 bp, probe
ctatgttgacacatttcctggtgct

SEQ ID NO: 76214 - DNA, 25 bp, probe
cgaatttatcagtgcaagaggaggc

SEQ ID NO: 76215 - DNA, 25 bp, probe
gccttagctccatttatagcacctc

SEQ ID NO: 76216 - DNA, 25 bp, probe
tcggaacaaatgccttgaaatgctg

SEQ ID NO: 76217 - DNA, 25 bp, probe
gtcggaacaaatgccttgaaatgct

SEQ ID NO: 76218 - DNA, 25 bp, probe
agctccatttatagcacctcagaca

SEQ ID NO: 76219 - DNA, 25 bp, probe
ttgtcggaacaaatgccttgaaatg

SEQ ID NO: 76220 - DNA, 25 bp, probe
aacaaatgccttgaaatgctgctgt

SEQ ID NO: 76221 - DNA, 25 bp, probe
actatgttgacacatttcctggtgc

SEQ ID NO: 76222 - DNA, 25 bp, probe
ggaacaaatgccttgaaatgctgct

SEQ ID NO: 76223 - DNA, 25 bp, probe
gaatttatcagtgcaagaggaggcc

SEQ ID NO: 76224 - DNA, 25 bp, probe
tgtttgttttacagatctaaagcgg

SEQ ID NO: 76225 - DNA, 25 bp, probe
gatatgaaccaccagtccaagaatc

SEQ ID NO: 76226 - DNA, 25 bp, probe
atatgaaccaccagtccaagaatct

SEQ ID NO: 76227 - DNA, 25 bp, probe
tatgaaccaccagtccaagaatctg

SEQ ID NO: 76228 - DNA, 25 bp, probe
agttgaacgagctgatggatatgaa

SEQ ID NO: 76229 - DNA, 25 bp, probe
aagttgaacgagctgatggatatga

SEQ ID NO: 76230 - DNA, 25 bp, probe
aagtacagaaggtgctaaagttgaa

SEQ ID NO: 76231 - DNA, 25 bp, probe
taagtacagaaggtgctaaagttga

SEQ ID NO: 76232 - DNA, 25 bp, probe
ggttaagtacagaaggtgctaaagt

SEQ ID NO: 76233 - DNA, 25 bp, probe
gttgaacgagctgatggatatgaac

SEQ ID NO: 76234 - DNA, 25 bp, probe
agtacagaaggtgctaaagttgaac

SEQ ID NO: 76235 - DNA, 25 bp, probe
ggatatgaaccaccagtccaagaat

SEQ ID NO: 76236 - DNA, 25 bp, probe
ttaagtacagaaggtgctaaagttg

SEQ ID NO: 76237 - DNA, 25 bp, probe
gttaagtacagaaggtgctaaagtt

SEQ ID NO: 76238 - DNA, 25 bp, probe
gggttaagtacagaaggtgctaaag

SEQ ID NO: 76239 - DNA, 25 bp, probe
agggttaagtacagaaggtgctaaa

SEQ ID NO: 76240 - DNA, 25 bp, probe
tacagaaggtgctaaagttgaacga

SEQ ID NO: 76241 - DNA, 25 bp, probe
taaagttgaacgagctgatggatat

SEQ ID NO: 76242 - DNA, 25 bp, probe
cagggttaagtacagaaggtgctaa

SEQ ID NO: 76243 - DNA, 25 bp, probe
ctaaagttgaacgagctgatggata

SEQ ID NO: 76244 - DNA, 25 bp, probe
ttgaacgagctgatggatatgaacc

SEQ ID NO: 76245 - DNA, 25 bp, probe
gtacagaaggtgctaaagttgaacg

SEQ ID NO: 76246 - DNA, 25 bp, probe
aaagttgaacgagctgatggatatg

SEQ ID NO: 76247 - DNA, 25 bp, probe
accaccagtccaagaatctgtttaa

SEQ ID NO: 76248 - DNA, 25 bp, probe
aaccaccagtccaagaatctgttta

SEQ ID NO: 76249 - DNA, 25 bp, probe
acagaaggtgctaaagttgaacgag

SEQ ID NO: 76250 - DNA, 25 bp, probe
atgaaccaccagtccaagaatctgt

SEQ ID NO: 76251 - DNA, 25 bp, probe
tgaaccaccagtccaagaatctgtt

SEQ ID NO: 76252 - DNA, 25 bp, probe
gaaccaccagtccaagaatctgttt

SEQ ID NO: 76253 - DNA, 25 bp, probe
ccagggttaagtacagaaggtgcta

SEQ ID NO: 76254 - DNA, 25 bp, probe
agtccagggttaagtacagaaggtg

SEQ ID NO: 76255 - DNA, 25 bp, probe
gaacgagctgatggatatgaaccac

SEQ ID NO: 76256 - DNA, 25 bp, probe
ggtctcttctgtagggagcagtaag

SEQ ID NO: 76257 - DNA, 25 bp, probe
tgaacgagctgatggatatgaacca

SEQ ID NO: 76258 - DNA, 25 bp, probe
agctgatggatatgaaccaccagtc

SEQ ID NO: 76259 - DNA, 25 bp, probe
gagctgatggatatgaaccaccagt

SEQ ID NO: 76260 - DNA, 25 bp, probe
ctcttctgtagggagcagtaagcag

SEQ ID NO: 76261 - DNA, 25 bp, probe
gtctcttctgtagggagcagtaagc

SEQ ID NO: 76262 - DNA, 25 bp, probe
tggtctcttctgtagggagcagtaa

SEQ ID NO: 76263 - DNA, 25 bp, probe
gctgatggatatgaaccaccagtcc

SEQ ID NO: 76264 - DNA, 25 bp, probe
tctcttctgtagggagcagtaagca

SEQ ID NO: 76265 - DNA, 25 bp, probe
aacgagctgatggatatgaaccacc

SEQ ID NO: 76266 - DNA, 25 bp, probe
gtccagggttaagtacagaaggtgc

SEQ ID NO: 76267 - DNA, 25 bp, probe
gctaaagttgaacgagctgatggat

SEQ ID NO: 76268 - DNA, 25 bp, probe
tccagggttaagtacagaaggtgct

SEQ ID NO: 76269 - DNA, 25 bp, probe
tagtctatatgcttgttcttctcca

SEQ ID NO: 76270 - DNA, 25 bp, probe
agtctatatgcttgttcttctccaa

SEQ ID NO: 76271 - DNA, 25 bp, probe
ggattgttctgtatgaattgatgac

SEQ ID NO: 76272 - DNA, 25 bp, probe
ttagtctatatgcttgttcttctcc

SEQ ID NO: 76273 - DNA, 25 bp, probe
aattctcacctctattaagctgctg

SEQ ID NO: 76274 - DNA, 25 bp, probe
gattgttctgtatgaattgatgact

SEQ ID NO: 76275 - DNA, 25 bp, probe
ggacaaggatacctatctccagatc

SEQ ID NO: 76276 - DNA, 25 bp, probe
gcatttgggattgttctgtatgaat

SEQ ID NO: 76277 - DNA, 25 bp, probe
tatggcaccagaagtcatcagaatg

SEQ ID NO: 76278 - DNA, 25 bp, probe
gtatggcaccagaagtcatcagaat

SEQ ID NO: 76279 - DNA, 25 bp, probe
attctcacctctattaagctgctga

SEQ ID NO: 76280 - DNA, 25 bp, probe
tgggattgttctgtatgaattgatg

SEQ ID NO: 76281 - DNA, 25 bp, probe
gggattgttctgtatgaattgatga

SEQ ID NO: 76282 - DNA, 25 bp, probe
tttgggattgttctgtatgaattga

SEQ ID NO: 76283 - DNA, 25 bp, probe
gtctatatgcttgttcttctccaaa

SEQ ID NO: 76284 - DNA, 25 bp, probe
ttgggattgttctgtatgaattgat

SEQ ID NO: 76285 - DNA, 25 bp, probe
ttctcacctctattaagctgctgac

SEQ ID NO: 76286 - DNA, 25 bp, probe
atttgggattgttctgtatgaattg

SEQ ID NO: 76287 - DNA, 25 bp, probe
catttgggattgttctgtatgaatt

SEQ ID NO: 76288 - DNA, 25 bp, probe
aaattctcacctctattaagctgct

SEQ ID NO: 76289 - DNA, 25 bp, probe
caaattctcacctctattaagctgc

SEQ ID NO: 76290 - DNA, 25 bp, probe
cccaaattctcacctctattaagct

SEQ ID NO: 76291 - DNA, 25 bp, probe
ccaaattctcacctctattaagctg

SEQ ID NO: 76292 - DNA, 25 bp, probe
agtttgaacagttgtctggatcttt

SEQ ID NO: 76293 - DNA, 25 bp, probe
tttatggtgggacaaggatacctat

SEQ ID NO: 76294 - DNA, 25 bp, probe
aaattcatacagctttcagtcagat

SEQ ID NO: 76295 - DNA, 25 bp, probe
cagtttgaacagttgtctggatctt

SEQ ID NO: 76296 - DNA, 25 bp, probe
ttatggtgggacaaggatacctatc

SEQ ID NO: 76297 - DNA, 25 bp, probe
tgtatggcaccagaagtcatcagaa

SEQ ID NO: 76298 - DNA, 25 bp, probe
atatggtgcatttcttgtctactga

SEQ ID NO: 76299 - DNA, 25 bp, probe
gatatggtgcatttcttgtctactg

SEQ ID NO: 76300 - DNA, 25 bp, probe
ggatatggtgcatttcttgtctact

SEQ ID NO: 76301 - DNA, 25 bp, probe
aaggatacctatctccagatctcag

SEQ ID NO: 76302 - DNA, 25 bp, probe
tatggtgggacaaggatacctatct

SEQ ID NO: 76303 - DNA, 25 bp, probe
tgcatttgggattgttctgtatgaa

SEQ ID NO: 76304 - DNA, 25 bp, probe
aattcatacagctttcagtcagata

SEQ ID NO: 76305 - DNA, 25 bp, probe
caaggatacctatctccagatctca

SEQ ID NO: 76306 - DNA, 25 bp, probe
acaaggatacctatctccagatctc

SEQ ID NO: 76307 - DNA, 25 bp, probe
gacaaggatacctatctccagatct

SEQ ID NO: 76308 - DNA, 25 bp, probe
ctacacctcaccagtttgaacagtt

SEQ ID NO: 76309 - DNA, 25 bp, probe
gggatatggtgcatttcttgtctac

SEQ ID NO: 76310 - DNA, 25 bp, probe
attcatacagctttcagtcagatat

SEQ ID NO: 76311 - DNA, 25 bp, probe
cagctttcagtcagatatatatgca

SEQ ID NO: 76312 - DNA, 25 bp, probe
acagctttcagtcagatatatatgc

SEQ ID NO: 76313 - DNA, 25 bp, probe
atgagatgattattggtggtggaac

SEQ ID NO: 76314 - DNA, 25 bp, probe
tgagatgattattggtggtggaacg

SEQ ID NO: 76315 - DNA, 25 bp, probe
caagaagtatgctgagactgtcact

SEQ ID NO: 76316 - DNA, 25 bp, probe
tgagaagaatgcagcaagaagtatg

SEQ ID NO: 76317 - DNA, 25 bp, probe
gagatgattattggtggtggaacgg

SEQ ID NO: 76318 - DNA, 25 bp, probe
ctgagaagaatgcagcaagaagtat

SEQ ID NO: 76319 - DNA, 25 bp, probe
aagattgtcaaagacctaatgtccc

SEQ ID NO: 76320 - DNA, 25 bp, probe
attgtcaaagacctaatgtcccaag

SEQ ID NO: 76321 - DNA, 25 bp, probe
gattgtcaaagacctaatgtcccaa

SEQ ID NO: 76322 - DNA, 25 bp, probe
ctttcatgtggaagaagaagggaag

SEQ ID NO: 76323 - DNA, 25 bp, probe
agattgtcaaagacctaatgtccca

SEQ ID NO: 76324 - DNA, 25 bp, probe
aagaagtatgctgagactgtcactt

SEQ ID NO: 76325 - DNA, 25 bp, probe
acctgatcaataatatgctggacaa

SEQ ID NO: 76326 - DNA, 25 bp, probe
ctaatgtcccaagctgagaagaatg

SEQ ID NO: 76327 - DNA, 25 bp, probe
cacctgatcaataatatgctggaca

SEQ ID NO: 76328 - DNA, 25 bp, probe
ttaaggtgctcaacaacatggagac

SEQ ID NO: 76329 - DNA, 25 bp, probe
actttcatgtggaagaagaagggaa

SEQ ID NO: 76330 - DNA, 25 bp, probe
tgccaaatggaacacagaggataaa

SEQ ID NO: 76331 - DNA, 25 bp, probe
gatcaataatatgctggacaaagtc

SEQ ID NO: 76332 - DNA, 25 bp, probe
agaagtatgctgagactgtcacttg

SEQ ID NO: 76333 - DNA, 25 bp, probe
tttcatgtggaagaagaagggaagg

SEQ ID NO: 76334 - DNA, 25 bp, probe
cctaatgtcccaagctgagaagaat

SEQ ID NO: 76335 - DNA, 25 bp, probe
gactggcacttctctgtttgatgaa

SEQ ID NO: 76336 - DNA, 25 bp, probe
atggaacacagaggataaaatcaga

SEQ ID NO: 76337 - DNA, 25 bp, probe
ggaacacagaggataaaatcagaca

SEQ ID NO: 76338 - DNA, 25 bp, probe
tggaacacagaggataaaatcagac

SEQ ID NO: 76339 - DNA, 25 bp, probe
aatggaacacagaggataaaatcag

SEQ ID NO: 76340 - DNA, 25 bp, probe
taaggtgctcaacaacatggagact

SEQ ID NO: 76341 - DNA, 25 bp, probe
atgtggaagaagaagggaagggaaa

SEQ ID NO: 76342 - DNA, 25 bp, probe
ccaaatggaacacagaggataaaat

SEQ ID NO: 76343 - DNA, 25 bp, probe
gaacacagaggataaaatcagacat

SEQ ID NO: 76344 - DNA, 25 bp, probe
cttaaggtgctcaacaacatggaga

SEQ ID NO: 76345 - DNA, 25 bp, probe
aaatggaacacagaggataaaatca

SEQ ID NO: 76346 - DNA, 25 bp, probe
atccacctgatcaataatatgctgg

SEQ ID NO: 76347 - DNA, 25 bp, probe
gaaaactctgggaacaagacaagat

SEQ ID NO: 76348 - DNA, 25 bp, probe
caaatggaacacagaggataaaatc

SEQ ID NO: 76349 - DNA, 25 bp, probe
aaactctgggaacaagacaagatcc

SEQ ID NO: 76350 - DNA, 25 bp, probe
cactttcatgtggaagaagaaggga

SEQ ID NO: 76351 - DNA, 25 bp, probe
gaagtatgctgagactgtcacttgg

SEQ ID NO: 76352 - DNA, 25 bp, probe
atgattattggtggtggaacggctt

SEQ ID NO: 76353 - DNA, 25 bp, probe
ggaacaagacaagatccacctgatc

SEQ ID NO: 76354 - DNA, 25 bp, probe
ttgtcaaagacctaatgtcccaagc

SEQ ID NO: 76355 - DNA, 25 bp, probe
ccacctgatcaataatatgctggac

SEQ ID NO: 76356 - DNA, 25 bp, probe
taatgtcccaagctgagaagaatgc

SEQ ID NO: 76357 - DNA, 25 bp, probe
tatgtttatttcttctgctgtccca

SEQ ID NO: 76358 - DNA, 25 bp, probe
ctatgtttatttcttctgctgtccc

SEQ ID NO: 76359 - DNA, 25 bp, probe
cctatgtttatttcttctgctgtcc

SEQ ID NO: 76360 - DNA, 25 bp, probe
acctatgtttatttcttctgctgtc

SEQ ID NO: 76361 - DNA, 25 bp, probe
tggaacctatgtttatttcttctgc

SEQ ID NO: 76362 - DNA, 25 bp, probe
ggaacctatgtttatttcttctgct

SEQ ID NO: 76363 - DNA, 25 bp, probe
atgtttatttcttctgctgtcccac

SEQ ID NO: 76364 - DNA, 25 bp, probe
aacctatgtttatttcttctgctgt

SEQ ID NO: 76365 - DNA, 25 bp, probe
gctgtcccacatttaattgataaca

SEQ ID NO: 76366 - DNA, 25 bp, probe
tgctgtcccacatttaattgataac

SEQ ID NO: 76367 - DNA, 25 bp, probe
tctgctgtcccacatttaattgata

SEQ ID NO: 76368 - DNA, 25 bp, probe
tatttcttctgctgtcccacattta

SEQ ID NO: 76369 - DNA, 25 bp, probe
ctgctgtcccacatttaattgataa

SEQ ID NO: 76370 - DNA, 25 bp, probe
ttctgctgtcccacatttaattgat

SEQ ID NO: 76371 - DNA, 25 bp, probe
ttcttctgctgtcccacatttaatt

SEQ ID NO: 76372 - DNA, 25 bp, probe
tttcttctgctgtcccacatttaat

SEQ ID NO: 76373 - DNA, 25 bp, probe
atttcttctgctgtcccacatttaa

SEQ ID NO: 76374 - DNA, 25 bp, probe
ttatttcttctgctgtcccacattt

SEQ ID NO: 76375 - DNA, 25 bp, probe
tttatttcttctgctgtcccacatt

SEQ ID NO: 76376 - DNA, 25 bp, probe
gaacctatgtttatttcttctgctg

SEQ ID NO: 76377 - DNA, 25 bp, probe
cttctgtttcatggaacctatgttt

SEQ ID NO: 76378 - DNA, 25 bp, probe
ctacagaaatgctaactgatagacg

SEQ ID NO: 76379 - DNA, 25 bp, probe
gtcccacatttaattgataacaaca

SEQ ID NO: 76380 - DNA, 25 bp, probe
cttctgctgtcccacatttaattga

SEQ ID NO: 76381 - DNA, 25 bp, probe
tcttctgctgtcccacatttaattg

SEQ ID NO: 76382 - DNA, 25 bp, probe
gtttatttcttctgctgtcccacat

SEQ ID NO: 76383 - DNA, 25 bp, probe
gcttctgtttcatggaacctatgtt

SEQ ID NO: 76384 - DNA, 25 bp, probe
ttctgtttcatggaacctatgttta

SEQ ID NO: 76385 - DNA, 25 bp, probe
tgtcccacatttaattgataacaac

SEQ ID NO: 76386 - DNA, 25 bp, probe
actacagaaatgctaactgatagac

SEQ ID NO: 76387 - DNA, 25 bp, probe
tctgtttcatggaacctatgtttat

SEQ ID NO: 76388 - DNA, 25 bp, probe
ctgtcccacatttaattgataacaa

SEQ ID NO: 76389 - DNA, 25 bp, probe
agaaatgctaactgatagacgtgtt

SEQ ID NO: 76390 - DNA, 25 bp, probe
aacaacatcactacaagtataagaa

SEQ ID NO: 76391 - DNA, 25 bp, probe
atggaacctatgtttatttcttctg

SEQ ID NO: 76392 - DNA, 25 bp, probe
tcccacatttaattgataacaacat

SEQ ID NO: 76393 - DNA, 25 bp, probe
ctgtttcatggaacctatgtttatt

SEQ ID NO: 76394 - DNA, 25 bp, probe
tgtttatttcttctgctgtcccaca

SEQ ID NO: 76395 - DNA, 25 bp, probe
aactacagaaatgctaactgataga

SEQ ID NO: 76396 - DNA, 25 bp, probe
gtataagaaaaggaagcagaaacgg

SEQ ID NO: 76397 - DNA, 25 bp, probe
cccacatttaattgataacaacatc

SEQ ID NO: 76398 - DNA, 25 bp, probe
tacagaaatgctaactgatagacgt

SEQ ID NO: 76399 - DNA, 25 bp, probe
agtataagaaaaggaagcagaaacg

SEQ ID NO: 76400 - DNA, 25 bp, probe
ctggcttctgtttcatggaacctat

SEQ ID NO: 76401 - DNA, 25 bp, probe
aagcaatggatgtgtattcaatgtc

SEQ ID NO: 76402 - DNA, 25 bp, probe
cattcaatcaactctggcttcatac

SEQ ID NO: 76403 - DNA, 25 bp, probe
tcaatcaactctggcttcatacaat

SEQ ID NO: 76404 - DNA, 25 bp, probe
attcaatcaactctggcttcataca

SEQ ID NO: 76405 - DNA, 25 bp, probe
caaccgtatccagaacttcagaata

SEQ ID NO: 76406 - DNA, 25 bp, probe
ttcaatcaactctggcttcatacaa

SEQ ID NO: 76407 - DNA, 25 bp, probe
catagtggagacgatgagagtaatc

SEQ ID NO: 76408 - DNA, 25 bp, probe
agcaatggatgtgtattcaatgtca

SEQ ID NO: 76409 - DNA, 25 bp, probe
caatcaactctggcttcatacaatg

SEQ ID NO: 76410 - DNA, 25 bp, probe
aatcaactctggcttcatacaatgg

SEQ ID NO: 76411 - DNA, 25 bp, probe
gcattcaatcaactctggcttcata

SEQ ID NO: 76412 - DNA, 25 bp, probe
ttcagaatctccagaataccagcaa

SEQ ID NO: 76413 - DNA, 25 bp, probe
cgtatccagaacttcagaataccaa

SEQ ID NO: 76414 - DNA, 25 bp, probe
aaccgtatccagaacttcagaatac

SEQ ID NO: 76415 - DNA, 25 bp, probe
ggatgtgtattcaatgtcacttgtg

SEQ ID NO: 76416 - DNA, 25 bp, probe
atggatgtgtattcaatgtcacttg

SEQ ID NO: 76417 - DNA, 25 bp, probe
caatggatgtgtattcaatgtcact

SEQ ID NO: 76418 - DNA, 25 bp, probe
cttcagaatctccagaataccagca

SEQ ID NO: 76419 - DNA, 25 bp, probe
tggatgtgtattcaatgtcacttgt

SEQ ID NO: 76420 - DNA, 25 bp, probe
tcagaatctccagaataccagcaac

SEQ ID NO: 76421 - DNA, 25 bp, probe
aatggatgtgtattcaatgtcactt

SEQ ID NO: 76422 - DNA, 25 bp, probe
gcaatggatgtgtattcaatgtcac

SEQ ID NO: 76423 - DNA, 25 bp, probe
atagtggagacgatgagagtaatcc

SEQ ID NO: 76424 - DNA, 25 bp, probe
ccttcagaatctccagaataccagc

SEQ ID NO: 76425 - DNA, 25 bp, probe
gccttcagaatctccagaataccag

SEQ ID NO: 76426 - DNA, 25 bp, probe
aaagcaatggatgtgtattcaatgt

SEQ ID NO: 76427 - DNA, 25 bp, probe
ttcaaagcaatggatgtgtattcaa

SEQ ID NO: 76428 - DNA, 25 bp, probe
caaagcaatggatgtgtattcaatg

SEQ ID NO: 76429 - DNA, 25 bp, probe
tcaaagcaatggatgtgtattcaat

SEQ ID NO: 76430 - DNA, 25 bp, probe
attcaaagcaatggatgtgtattca

SEQ ID NO: 76431 - DNA, 25 bp, probe
ccgtatccagaacttcagaatacca

SEQ ID NO: 76432 - DNA, 25 bp, probe
accgtatccagaacttcagaatacc

SEQ ID NO: 76433 - DNA, 25 bp, probe
tgtattcaatgtcacttgtgatgtg

SEQ ID NO: 76434 - DNA, 25 bp, probe
gtgtattcaatgtcacttgtgatgt

SEQ ID NO: 76435 - DNA, 25 bp, probe
tgtgtattcaatgtcacttgtgatg

SEQ ID NO: 76436 - DNA, 25 bp, probe
gaggacgttcagaaggatatcatag

SEQ ID NO: 76437 - DNA, 25 bp, probe
gtattcaatgtcacttgtgatgtgg

SEQ ID NO: 76438 - DNA, 25 bp, probe
gatgtgtattcaatgtcacttgtga

SEQ ID NO: 76439 - DNA, 25 bp, probe
cgttcagaaggatatcatagtggag

SEQ ID NO: 76440 - DNA, 25 bp, probe
agaggacgttcagaaggatatcata

SEQ ID NO: 76441 - DNA, 25 bp, probe
aataccaaagttcaggatgtcagaa

SEQ ID NO: 76442 - DNA, 25 bp, probe
ttcagaataccaaagttcaggatgt

SEQ ID NO: 76443 - DNA, 25 bp, probe
agaaggatatcatagtggagacgat

SEQ ID NO: 76444 - DNA, 25 bp, probe
gacgttcagaaggatatcatagtgg

SEQ ID NO: 76445 - DNA, 25 bp, probe
ccaataacagagtaaagttgatccc

SEQ ID NO: 76446 - DNA, 25 bp, probe
taacagagtaaagttgatcccaagc

SEQ ID NO: 76447 - DNA, 25 bp, probe
caataacagagtaaagttgatccca

SEQ ID NO: 76448 - DNA, 25 bp, probe
ataacagagtaaagttgatcccaag

SEQ ID NO: 76449 - DNA, 25 bp, probe
tccaataacagagtaaagttgatcc

SEQ ID NO: 76450 - DNA, 25 bp, probe
aataacagagtaaagttgatcccaa

SEQ ID NO: 76451 - DNA, 25 bp, probe
ctgtgtcttgggaacctgtgattac

SEQ ID NO: 76452 - DNA, 25 bp, probe
ctccaataacagagtaaagttgatc

SEQ ID NO: 76453 - DNA, 25 bp, probe
ttaacctcactccttgctgtgtctt

SEQ ID NO: 76454 - DNA, 25 bp, probe
aacagagtaaagttgatcccaagcc

SEQ ID NO: 76455 - DNA, 25 bp, probe
cttaacctcactccttgctgtgtct

SEQ ID NO: 76456 - DNA, 25 bp, probe
taacctcactccttgctgtgtcttg

SEQ ID NO: 76457 - DNA, 25 bp, probe
cagagtaaagttgatcccaagcctg

SEQ ID NO: 76458 - DNA, 25 bp, probe
acagagtaaagttgatcccaagcct

SEQ ID NO: 76459 - DNA, 25 bp, probe
ccactccaataacagagtaaagttg

SEQ ID NO: 76460 - DNA, 25 bp, probe
cccactccaataacagagtaaagtt

SEQ ID NO: 76461 - DNA, 25 bp, probe
atgaacaacctcagctccatgaaca

SEQ ID NO: 76462 - DNA, 25 bp, probe
tgtgtcttgggaacctgtgattacc

SEQ ID NO: 76463 - DNA, 25 bp, probe
cacccactccaataacagagtaaag

SEQ ID NO: 76464 - DNA, 25 bp, probe
cactccaataacagagtaaagttga

SEQ ID NO: 76465 - DNA, 25 bp, probe
acccactccaataacagagtaaagt

SEQ ID NO: 76466 - DNA, 25 bp, probe
gctgtgtcttgggaacctgtgatta

SEQ ID NO: 76467 - DNA, 25 bp, probe
ccttaacctcactccttgctgtgtc

SEQ ID NO: 76468 - DNA, 25 bp, probe
actccaataacagagtaaagttgat

SEQ ID NO: 76469 - DNA, 25 bp, probe
tgaacaacctcagctccatgaacag

SEQ ID NO: 76470 - DNA, 25 bp, probe
agagtaaagttgatcccaagcctgg

SEQ ID NO: 76471 - DNA, 25 bp, probe
gcacccactccaataacagagtaaa

SEQ ID NO: 76472 - DNA, 25 bp, probe
aagaagcatgggagagaggctaaag

SEQ ID NO: 76473 - DNA, 25 bp, probe
catgaacaacctcagctccatgaac

SEQ ID NO: 76474 - DNA, 25 bp, probe
gtcagcacccactccaataacagag

SEQ ID NO: 76475 - DNA, 25 bp, probe
caagaagcatgggagagaggctaaa

SEQ ID NO: 76476 - DNA, 25 bp, probe
agcacccactccaataacagagtaa

SEQ ID NO: 76477 - DNA, 25 bp, probe
cagcacccactccaataacagagta

SEQ ID NO: 76478 - DNA, 25 bp, probe
gtgtcttgggaacctgtgattaccc

SEQ ID NO: 76479 - DNA, 25 bp, probe
cttcaagagcacttcacatactgag

SEQ ID NO: 76480 - DNA, 25 bp, probe
ttcaagagcacttcacatactgaga

SEQ ID NO: 76481 - DNA, 25 bp, probe
tcaagagcacttcacatactgagac

SEQ ID NO: 76482 - DNA, 25 bp, probe
ccttcaagagcacttcacatactga

SEQ ID NO: 76483 - DNA, 25 bp, probe
cttcacatactgagacctccagatg

SEQ ID NO: 76484 - DNA, 25 bp, probe
acttcacatactgagacctccagat

SEQ ID NO: 76485 - DNA, 25 bp, probe
aagagcacttcacatactgagacct

SEQ ID NO: 76486 - DNA, 25 bp, probe
caagagcacttcacatactgagacc

SEQ ID NO: 76487 - DNA, 25 bp, probe
cacttcacatactgagacctccaga

SEQ ID NO: 76488 - DNA, 25 bp, probe
cttcccttcaagagcacttcacata

SEQ ID NO: 76489 - DNA, 25 bp, probe
agagcacttcacatactgagacctc

SEQ ID NO: 76490 - DNA, 25 bp, probe
aatgatggcagggataacacacaat

SEQ ID NO: 76491 - DNA, 25 bp, probe
ttcccttcaagagcacttcacatac

SEQ ID NO: 76492 - DNA, 25 bp, probe
aaatgatggcagggataacacacaa

SEQ ID NO: 76493 - DNA, 25 bp, probe
agaaatgatggcagggataacacac

SEQ ID NO: 76494 - DNA, 25 bp, probe
cagaaatgatggcagggataacaca

SEQ ID NO: 76495 - DNA, 25 bp, probe
ttcacatactgagacctccagatgc

SEQ ID NO: 76496 - DNA, 25 bp, probe
atgatggcagggataacacacaatg

SEQ ID NO: 76497 - DNA, 25 bp, probe
gaaatgatggcagggataacacaca

SEQ ID NO: 76498 - DNA, 25 bp, probe
cccttcaagagcacttcacatactg

SEQ ID NO: 76499 - DNA, 25 bp, probe
tcccttcaagagcacttcacatact

SEQ ID NO: 76500 - DNA, 25 bp, probe
gatggcagggataacacacaatgag

SEQ ID NO: 76501 - DNA, 25 bp, probe
gaaatcttcccttcaagagcacttc

SEQ ID NO: 76502 - DNA, 25 bp, probe
gagcacttcacatactgagacctcc

SEQ ID NO: 76503 - DNA, 25 bp, probe
cagggataacacacaatgagagggt

SEQ ID NO: 76504 - DNA, 25 bp, probe
atggcagggataacacacaatgaga

SEQ ID NO: 76505 - DNA, 25 bp, probe
aaatcttcccttcaagagcacttca

SEQ ID NO: 76506 - DNA, 25 bp, probe
gcacttcacatactgagacctccag

SEQ ID NO: 76507 - DNA, 25 bp, probe
catactgagacctccagatgcactt

SEQ ID NO: 76508 - DNA, 25 bp, probe
tgatggcagggataacacacaatga

SEQ ID NO: 76509 - DNA, 25 bp, probe
agcacttcacatactgagacctcca

SEQ ID NO: 76510 - DNA, 25 bp, probe
aatcttcccttcaagagcacttcac

SEQ ID NO: 76511 - DNA, 25 bp, probe
ccagaaatgatggcagggataacac

SEQ ID NO: 76512 - DNA, 25 bp, probe
agggataacacacaatgagagggtg

SEQ ID NO: 76513 - DNA, 25 bp, probe
tggcagggataacacacaatgagag

SEQ ID NO: 76514 - DNA, 25 bp, probe
atactgagacctccagatgcacttt

SEQ ID NO: 76515 - DNA, 25 bp, probe
ataacacacaatgagagggtgtatc

SEQ ID NO: 76516 - DNA, 25 bp, probe
gataacacacaatgagagggtgtat

SEQ ID NO: 76517 - DNA, 25 bp, probe
cacatactgagacctccagatgcac

SEQ ID NO: 76518 - DNA, 25 bp, probe
tcttcccttcaagagcacttcacat

SEQ ID NO: 76519 - DNA, 25 bp, probe
atcttcccttcaagagcacttcaca

SEQ ID NO: 76520 - DNA, 25 bp, probe
tactgagacctccagatgcactttc

SEQ ID NO: 76521 - DNA, 25 bp, probe
taacacacaatgagagggtgtatct

SEQ ID NO: 76522 - DNA, 25 bp, probe
actttcaagggagatgtgtggcttc

SEQ ID NO: 76523 - DNA, 25 bp, probe
ggaatgtagatggtgacttaatgga

SEQ ID NO: 76524 - DNA, 25 bp, probe
ccttggaatgtagatggtgacttaa

SEQ ID NO: 76525 - DNA, 25 bp, probe
tggaatgtagatggtgacttaatgg

SEQ ID NO: 76526 - DNA, 25 bp, probe
ttggaatgtagatggtgacttaatg

SEQ ID NO: 76527 - DNA, 25 bp, probe
gaatgtagatggtgacttaatggaa

SEQ ID NO: 76528 - DNA, 25 bp, probe
cttggaatgtagatggtgacttaat

SEQ ID NO: 76529 - DNA, 25 bp, probe
aatgtagatggtgacttaatggaag

SEQ ID NO: 76530 - DNA, 25 bp, probe
gttgagacttacactgttgaggaag

SEQ ID NO: 76531 - DNA, 25 bp, probe
atggaagtatggctcttataattgc

SEQ ID NO: 76532 - DNA, 25 bp, probe
atgtcagcattatggcaattccttg

SEQ ID NO: 76533 - DNA, 25 bp, probe
tgttgagacttacactgttgaggaa

SEQ ID NO: 76534 - DNA, 25 bp, probe
ttgttgagacttacactgttgagga

SEQ ID NO: 76535 - DNA, 25 bp, probe
ttcatccaaggaataatactggtgg

SEQ ID NO: 76536 - DNA, 25 bp, probe
gttcatccaaggaataatactggtg

SEQ ID NO: 76537 - DNA, 25 bp, probe
agttcatccaaggaataatactggt

SEQ ID NO: 76538 - DNA, 25 bp, probe
aagttgcatcagaggtccatattag

SEQ ID NO: 76539 - DNA, 25 bp, probe
gaagttgcatcagaggtccatatta

SEQ ID NO: 76540 - DNA, 25 bp, probe
tcagaggtccatattagattgcatc

SEQ ID NO: 76541 - DNA, 25 bp, probe
catcagaggtccatattagattgca

SEQ ID NO: 76542 - DNA, 25 bp, probe
tgcatcagaggtccatattagattg

SEQ ID NO: 76543 - DNA, 25 bp, probe
gttgcatcagaggtccatattagat

SEQ ID NO: 76544 - DNA, 25 bp, probe
ttgcatcagaggtccatattagatt

SEQ ID NO: 76545 - DNA, 25 bp, probe
atcagaggtccatattagattgcat

SEQ ID NO: 76546 - DNA, 25 bp, probe
cagaggtccatattagattgcatcc

SEQ ID NO: 76547 - DNA, 25 bp, probe
gatataatccagaggaggaggagga

SEQ ID NO: 76548 - DNA, 25 bp, probe
agttgcatcagaggtccatattaga

SEQ ID NO: 76549 - DNA, 25 bp, probe
cttatcagtctttatggaggaagca

SEQ ID NO: 76550 - DNA, 25 bp, probe
ttatcagtctttatggaggaagcat

SEQ ID NO: 76551 - DNA, 25 bp, probe
agaggtccatattagattgcatcca

SEQ ID NO: 76552 - DNA, 25 bp, probe
ggtccatattagattgcatccaaga

SEQ ID NO: 76553 - DNA, 25 bp, probe
aggtccatattagattgcatccaag

SEQ ID NO: 76554 - DNA, 25 bp, probe
gaggtccatattagattgcatccaa

SEQ ID NO: 76555 - DNA, 25 bp, probe
aagttcatccaaggaataatactgg

SEQ ID NO: 76556 - DNA, 25 bp, probe
tccatattagattgcatccaagact

SEQ ID NO: 76557 - DNA, 25 bp, probe
ttgaatgtcagcattatggcaattc

SEQ ID NO: 76558 - DNA, 25 bp, probe
cttgaatgtcagcattatggcaatt

SEQ ID NO: 76559 - DNA, 25 bp, probe
tagattgcatccaagacttatcagt

SEQ ID NO: 76560 - DNA, 25 bp, probe
acttatcagtctttatggaggaagc

SEQ ID NO: 76561 - DNA, 25 bp, probe
ccatattagattgcatccaagactt

SEQ ID NO: 76562 - DNA, 25 bp, probe
ttagattgcatccaagacttatcag

SEQ ID NO: 76563 - DNA, 25 bp, probe
tcttgaatgtcagcattatggcaat

SEQ ID NO: 76564 - DNA, 25 bp, probe
cccttggaatgtagatggtgactta

SEQ ID NO: 76565 - DNA, 25 bp, probe
cttaatggaagttgcatcagaggtc

SEQ ID NO: 76566 - DNA, 25 bp, probe
gtccatattagattgcatccaagac

SEQ ID NO: 76567 - DNA, 25 bp, probe
gttcacagtccaacttcatatctct

SEQ ID NO: 76568 - DNA, 25 bp, probe
ggttcacagtccaacttcatatctc

SEQ ID NO: 76569 - DNA, 25 bp, probe
aggttcacagtccaacttcatatct

SEQ ID NO: 76570 - DNA, 25 bp, probe
caggttcacagtccaacttcatatc

SEQ ID NO: 76571 - DNA, 25 bp, probe
ttcacagtccaacttcatatctctg

SEQ ID NO: 76572 - DNA, 25 bp, probe
acaggttcacagtccaacttcatat

SEQ ID NO: 76573 - DNA, 25 bp, probe
aacaggttcacagtccaacttcata

SEQ ID NO: 76574 - DNA, 25 bp, probe
gaatccaacaatgaccacttccaac

SEQ ID NO: 76575 - DNA, 25 bp, probe
agaatccaacaatgaccacttccaa

SEQ ID NO: 76576 - DNA, 25 bp, probe
cttgacaataggatcatcatctcca

SEQ ID NO: 76577 - DNA, 25 bp, probe
ttgacaataggatcatcatctccaa

SEQ ID NO: 76578 - DNA, 25 bp, probe
ccttgacaataggatcatcatctcc

SEQ ID NO: 76579 - DNA, 25 bp, probe
gtaataaatctcttccaacaccagc

SEQ ID NO: 76580 - DNA, 25 bp, probe
gtagttacgagtcaatgggagaatc

SEQ ID NO: 76581 - DNA, 25 bp, probe
gtaaatggactgattaacggcaaag

SEQ ID NO: 76582 - DNA, 25 bp, probe
aatccaacaatgaccacttccaaca

SEQ ID NO: 76583 - DNA, 25 bp, probe
cagtaataaatctcttccaacacca

SEQ ID NO: 76584 - DNA, 25 bp, probe
acagtaataaatctcttccaacacc

SEQ ID NO: 76585 - DNA, 25 bp, probe
gagaatccaacaatgaccacttcca

SEQ ID NO: 76586 - DNA, 25 bp, probe
tgtagttacgagtcaatgggagaat

SEQ ID NO: 76587 - DNA, 25 bp, probe
tcacagtccaacttcatatctctgc

SEQ ID NO: 76588 - DNA, 25 bp, probe
agtaataaatctcttccaacaccag

SEQ ID NO: 76589 - DNA, 25 bp, probe
aacactcctgatattcaaatccact

SEQ ID NO: 76590 - DNA, 25 bp, probe
caacactcctgatattcaaatccac

SEQ ID NO: 76591 - DNA, 25 bp, probe
cacaacactcctgatattcaaatcc

SEQ ID NO: 76592 - DNA, 25 bp, probe
acaacactcctgatattcaaatcca

SEQ ID NO: 76593 - DNA, 25 bp, probe
gcacaacactcctgatattcaaatc

SEQ ID NO: 76594 - DNA, 25 bp, probe
cactcctgatattcaaatccactgt

SEQ ID NO: 76595 - DNA, 25 bp, probe
acactcctgatattcaaatccactg

SEQ ID NO: 76596 - DNA, 25 bp, probe
tcctgatattcaaatccactgtgag

SEQ ID NO: 76597 - DNA, 25 bp, probe
ctcctgatattcaaatccactgtga

SEQ ID NO: 76598 - DNA, 25 bp, probe
cgagtttatctggagtgtagagtca

SEQ ID NO: 76599 - DNA, 25 bp, probe
actcctgatattcaaatccactgtg

SEQ ID NO: 76600 - DNA, 25 bp, probe
agtaaatggactgattaacggcaaa

SEQ ID NO: 76601 - DNA, 25 bp, probe
tgttcagcaagaaatgattatggat

SEQ ID NO: 76602 - DNA, 25 bp, probe
atgttcagcaagaaatgattatgga

SEQ ID NO: 76603 - DNA, 25 bp, probe
ctgtagttacgagtcaatgggagaa

SEQ ID NO: 76604 - DNA, 25 bp, probe
acaacttctgtttccttgacaatag

SEQ ID NO: 76605 - DNA, 25 bp, probe
gaactgcacaacactcctgatattc

SEQ ID NO: 76606 - DNA, 25 bp, probe
gagtaaatggactgattaacggcaa

SEQ ID NO: 76607 - DNA, 25 bp, probe
gtggagtaaatggactgattaacgg

SEQ ID NO: 76608 - DNA, 25 bp, probe
ccgtggagtaaatggactgattaac

SEQ ID NO: 76609 - DNA, 25 bp, probe
ctgatattcaaatccactgtgaggg

SEQ ID NO: 76610 - DNA, 25 bp, probe
aacaatgaccacttccaacactttc

SEQ ID NO: 76611 - DNA, 25 bp, probe
gaatcaacatctcacacaacttcag

SEQ ID NO: 76612 - DNA, 25 bp, probe
cagaatcaacatctcacacaacttc

SEQ ID NO: 76613 - DNA, 25 bp, probe
agaatcaacatctcacacaacttca

SEQ ID NO: 76614 - DNA, 25 bp, probe
tcagaatcaacatctcacacaactt

SEQ ID NO: 76615 - DNA, 25 bp, probe
ttcagaatcaacatctcacacaact

SEQ ID NO: 76616 - DNA, 25 bp, probe
gttcagaatcaacatctcacacaac

SEQ ID NO: 76617 - DNA, 25 bp, probe
aacagaggttcagaatcaacatctc

SEQ ID NO: 76618 - DNA, 25 bp, probe
ggttcagaatcaacatctcacacaa

SEQ ID NO: 76619 - DNA, 25 bp, probe
aatcaacatctcacacaacttcagc

SEQ ID NO: 76620 - DNA, 25 bp, probe
cagaggttcagaatcaacatctcac

SEQ ID NO: 76621 - DNA, 25 bp, probe
gaggttcagaatcaacatctcacac

SEQ ID NO: 76622 - DNA, 25 bp, probe
agaggttcagaatcaacatctcaca

SEQ ID NO: 76623 - DNA, 25 bp, probe
acagaggttcagaatcaacatctca

SEQ ID NO: 76624 - DNA, 25 bp, probe
aggttcagaatcaacatctcacaca

SEQ ID NO: 76625 - DNA, 25 bp, probe
caacatctcacacaacttcagcatc

SEQ ID NO: 76626 - DNA, 25 bp, probe
aacaagattattctcacatacctga

SEQ ID NO: 76627 - DNA, 25 bp, probe
acaacttcagcatccacaactacaa

SEQ ID NO: 76628 - DNA, 25 bp, probe
tcaacatctcacacaacttcagcat

SEQ ID NO: 76629 - DNA, 25 bp, probe
atcaacatctcacacaacttcagca

SEQ ID NO: 76630 - DNA, 25 bp, probe
agcatccacaactacaaatcactac

SEQ ID NO: 76631 - DNA, 25 bp, probe
cagcatccacaactacaaatcacta

SEQ ID NO: 76632 - DNA, 25 bp, probe
aacttcagcatccacaactacaaat

SEQ ID NO: 76633 - DNA, 25 bp, probe
aaacagaggttcagaatcaacatct

SEQ ID NO: 76634 - DNA, 25 bp, probe
caaacagaggttcagaatcaacatc

SEQ ID NO: 76635 - DNA, 25 bp, probe
cttcagcatccacaactacaaatca

SEQ ID NO: 76636 - DNA, 25 bp, probe
acttcagcatccacaactacaaatc

SEQ ID NO: 76637 - DNA, 25 bp, probe
catccacaactacaaatcactaccg

SEQ ID NO: 76638 - DNA, 25 bp, probe
ccaaacagaggttcagaatcaacat

SEQ ID NO: 76639 - DNA, 25 bp, probe
cacaactacaaatcactaccgcttt

SEQ ID NO: 76640 - DNA, 25 bp, probe
ttcagcatccacaactacaaatcac

SEQ ID NO: 76641 - DNA, 25 bp, probe
gcatccacaactacaaatcactacc

SEQ ID NO: 76642 - DNA, 25 bp, probe
caacttcagcatccacaactacaaa

SEQ ID NO: 76643 - DNA, 25 bp, probe
cacaacttcagcatccacaactaca

SEQ ID NO: 76644 - DNA, 25 bp, probe
acacaacttcagcatccacaactac

SEQ ID NO: 76645 - DNA, 25 bp, probe
cacacaacttcagcatccacaacta

SEQ ID NO: 76646 - DNA, 25 bp, probe
attcaaagattgccaaacagaggtt

SEQ ID NO: 76647 - DNA, 25 bp, probe
aacatctcacacaacttcagcatcc

SEQ ID NO: 76648 - DNA, 25 bp, probe
agattcaaagattgccaaacagagg

SEQ ID NO: 76649 - DNA, 25 bp, probe
gattcaaagattgccaaacagaggt

SEQ ID NO: 76650 - DNA, 25 bp, probe
tcagcatccacaactacaaatcact

SEQ ID NO: 76651 - DNA, 25 bp, probe
caatggaaacaagattattctcaca

SEQ ID NO: 76652 - DNA, 25 bp, probe
ttcaaagattgccaaacagaggttc

SEQ ID NO: 76653 - DNA, 25 bp, probe
ggaaacaagattattctcacatacc

SEQ ID NO: 76654 - DNA, 25 bp, probe
tcaatggaaacaagattattctcac

SEQ ID NO: 76655 - DNA, 25 bp, probe
aggtgatctcaagtctaataacatt

SEQ ID NO: 76656 - DNA, 25 bp, probe
aaggtgatctcaagtctaataacat

SEQ ID NO: 76657 - DNA, 25 bp, probe
gattatctttatggtgggctgtgac

SEQ ID NO: 76658 - DNA, 25 bp, probe
attatctttatggtgggctgtgact

SEQ ID NO: 76659 - DNA, 25 bp, probe
ctgatgagtttccttcctgactact

SEQ ID NO: 76660 - DNA, 25 bp, probe
agattatctttatggtgggctgtga

SEQ ID NO: 76661 - DNA, 25 bp, probe
ttatctttatggtgggctgtgactc

SEQ ID NO: 76662 - DNA, 25 bp, probe
agtttccttcctgactactcaacac

SEQ ID NO: 76663 - DNA, 25 bp, probe
cagattatctttatggtgggctgtg

SEQ ID NO: 76664 - DNA, 25 bp, probe
gtttccttcctgactactcaacaca

SEQ ID NO: 76665 - DNA, 25 bp, probe
tttcaacacaaagatgagtgactct

SEQ ID NO: 76666 - DNA, 25 bp, probe
tatctttatggtgggctgtgactct

SEQ ID NO: 76667 - DNA, 25 bp, probe
tttccttcctgactactcaacacag

SEQ ID NO: 76668 - DNA, 25 bp, probe
ttcaacacaaagatgagtgactctc

SEQ ID NO: 76669 - DNA, 25 bp, probe
gctgatgagtttccttcctgactac

SEQ ID NO: 76670 - DNA, 25 bp, probe
acgaatcaatgttttatctctgtcc

SEQ ID NO: 76671 - DNA, 25 bp, probe
agctgtgaccagattatctttatgg

SEQ ID NO: 76672 - DNA, 25 bp, probe
cgaatcaatgttttatctctgtcct

SEQ ID NO: 76673 - DNA, 25 bp, probe
aaatcgtccttttatcaaacccaag

SEQ ID NO: 76674 - DNA, 25 bp, probe
ggtgatctcaagtctaataacattt

SEQ ID NO: 76675 - DNA, 25 bp, probe
ccaccaacgaatcaatgttttatct

SEQ ID NO: 76676 - DNA, 25 bp, probe
ccagattatctttatggtgggctgt

SEQ ID NO: 76677 - DNA, 25 bp, probe
atctttatggtgggctgtgactctt

SEQ ID NO: 76678 - DNA, 25 bp, probe
caccaacgaatcaatgttttatctc

SEQ ID NO: 76679 - DNA, 25 bp, probe
cccaccaacgaatcaatgttttatc

SEQ ID NO: 76680 - DNA, 25 bp, probe
accaacgaatcaatgttttatctct

SEQ ID NO: 76681 - DNA, 25 bp, probe
ctaaatcgtccttttatcaaaccca

SEQ ID NO: 76682 - DNA, 25 bp, probe
tctaaatcgtccttttatcaaaccc

SEQ ID NO: 76683 - DNA, 25 bp, probe
ccaacgaatcaatgttttatctctg

SEQ ID NO: 76684 - DNA, 25 bp, probe
taaatcgtccttttatcaaacccaa

SEQ ID NO: 76685 - DNA, 25 bp, probe
tcaatgttttatctctgtcctgaag

SEQ ID NO: 76686 - DNA, 25 bp, probe
gaatcaatgttttatctctgtcctg

SEQ ID NO: 76687 - DNA, 25 bp, probe
aacacaaagatgagtgactctcgtc

SEQ ID NO: 76688 - DNA, 25 bp, probe
tcaacacaaagatgagtgactctcg

SEQ ID NO: 76689 - DNA, 25 bp, probe
caacgaatcaatgttttatctctgt

SEQ ID NO: 76690 - DNA, 25 bp, probe
ttatcaaacccaagctgatgagttt

SEQ ID NO: 76691 - DNA, 25 bp, probe
tttatcaaacccaagctgatgagtt

SEQ ID NO: 76692 - DNA, 25 bp, probe
aatcgtccttttatcaaacccaagc

SEQ ID NO: 76693 - DNA, 25 bp, probe
acctctaaatcgtccttttatcaaa

SEQ ID NO: 76694 - DNA, 25 bp, probe
agctgatgagtttccttcctgacta

SEQ ID NO: 76695 - DNA, 25 bp, probe
aacgaatcaatgttttatctctgtc

SEQ ID NO: 76696 - DNA, 25 bp, probe
atcaatgttttatctctgtcctgaa

SEQ ID NO: 76697 - DNA, 25 bp, probe
aatcaatgttttatctctgtcctga

SEQ ID NO: 76698 - DNA, 25 bp, probe
tatcaaacccaagctgatgagtttc

SEQ ID NO: 76699 - DNA, 25 bp, probe
tgatgctcttaattggaacattgac

SEQ ID NO: 76700 - DNA, 25 bp, probe
gatgctcttaattggaacattgact

SEQ ID NO: 76701 - DNA, 25 bp, probe
atgctcttaattggaacattgactt

SEQ ID NO: 76702 - DNA, 25 bp, probe
atgatgctcttaattggaacattga

SEQ ID NO: 76703 - DNA, 25 bp, probe
atacaccatccagaatcagcatcta

SEQ ID NO: 76704 - DNA, 25 bp, probe
ccatccagaatcagcatctaatgaa

SEQ ID NO: 76705 - DNA, 25 bp, probe
tacaccatccagaatcagcatctaa

SEQ ID NO: 76706 - DNA, 25 bp, probe
actgtgataccatgatgctcttaat

SEQ ID NO: 76707 - DNA, 25 bp, probe
caccatccagaatcagcatctaatg

SEQ ID NO: 76708 - DNA, 25 bp, probe
tactgtgataccatgatgctcttaa

SEQ ID NO: 76709 - DNA, 25 bp, probe
tgtgataccatgatgctcttaattg

SEQ ID NO: 76710 - DNA, 25 bp, probe
atactgtgataccatgatgctctta

SEQ ID NO: 76711 - DNA, 25 bp, probe
ttaagtcagaagatgagtacacacc

SEQ ID NO: 76712 - DNA, 25 bp, probe
ctgtgataccatgatgctcttaatt

SEQ ID NO: 76713 - DNA, 25 bp, probe
catactgtgataccatgatgctctt

SEQ ID NO: 76714 - DNA, 25 bp, probe
accatccagaatcagcatctaatga

SEQ ID NO: 76715 - DNA, 25 bp, probe
acaccatccagaatcagcatctaat

SEQ ID NO: 76716 - DNA, 25 bp, probe
catgatgctcttaattggaacattg

SEQ ID NO: 76717 - DNA, 25 bp, probe
taagtcagaagatgagtacacacca

SEQ ID NO: 76718 - DNA, 25 bp, probe
agatacaccatccagaatcagcatc

SEQ ID NO: 76719 - DNA, 25 bp, probe
gagatacaccatccagaatcagcat

SEQ ID NO: 76720 - DNA, 25 bp, probe
gatacaccatccagaatcagcatct

SEQ ID NO: 76721 - DNA, 25 bp, probe
accagttccttaatgacgtagatag

SEQ ID NO: 76722 - DNA, 25 bp, probe
ccatactgtgataccatgatgctct

SEQ ID NO: 76723 - DNA, 25 bp, probe
gtctttgtgtgtgaactcctatact

SEQ ID NO: 76724 - DNA, 25 bp, probe
ctgggatgattatattgcttgagga

SEQ ID NO: 76725 - DNA, 25 bp, probe
tctttgtgtgtgaactcctatactt

SEQ ID NO: 76726 - DNA, 25 bp, probe
tgggatgattatattgcttgaggat

SEQ ID NO: 76727 - DNA, 25 bp, probe
actgggatgattatattgcttgagg

SEQ ID NO: 76728 - DNA, 25 bp, probe
aaccagttccttaatgacgtagata

SEQ ID NO: 76729 - DNA, 25 bp, probe
gaaccagttccttaatgacgtagat

SEQ ID NO: 76730 - DNA, 25 bp, probe
tgctcttaattggaacattgacttt

SEQ ID NO: 76731 - DNA, 25 bp, probe
ccatgatgctcttaattggaacatt

SEQ ID NO: 76732 - DNA, 25 bp, probe
taccatgatgctcttaattggaaca

SEQ ID NO: 76733 - DNA, 25 bp, probe
tgataccatgatgctcttaattgga

SEQ ID NO: 76734 - DNA, 25 bp, probe
gtgataccatgatgctcttaattgg

SEQ ID NO: 76735 - DNA, 25 bp, probe
ctttgtgtgtgaactcctatacttt

SEQ ID NO: 76736 - DNA, 25 bp, probe
cacctttatgattgagaacccattt

SEQ ID NO: 76737 - DNA, 25 bp, probe
acctttatgattgagaacccatttc

SEQ ID NO: 76738 - DNA, 25 bp, probe
aagtcagaagatgagtacacaccac

SEQ ID NO: 76739 - DNA, 25 bp, probe
accatgatgctcttaattggaacat

SEQ ID NO: 76740 - DNA, 25 bp, probe
ataccatgatgctcttaattggaac

SEQ ID NO: 76741 - DNA, 25 bp, probe
gggatgattatattgcttgaggatt

SEQ ID NO: 76742 - DNA, 25 bp, probe
cgtctttgtgtgtgaactcctatac

SEQ ID NO: 76743 - DNA, 25 bp, probe
ctatgtcttcattgggcatgacttc

SEQ ID NO: 76744 - DNA, 25 bp, probe
tatgtcttcattgggcatgacttct

SEQ ID NO: 76745 - DNA, 25 bp, probe
tctatgtcttcattgggcatgactt

SEQ ID NO: 76746 - DNA, 25 bp, probe
ctctatgtcttcattgggcatgact

SEQ ID NO: 76747 - DNA, 25 bp, probe
tctctatgtcttcattgggcatgac

SEQ ID NO: 76748 - DNA, 25 bp, probe
atgtcttcattgggcatgacttctg

SEQ ID NO: 76749 - DNA, 25 bp, probe
tgtcttcattgggcatgacttctgg

SEQ ID NO: 76750 - DNA, 25 bp, probe
attgtaaactttctcagggtcatca

SEQ ID NO: 76751 - DNA, 25 bp, probe
cattgtaaactttctcagggtcatc

SEQ ID NO: 76752 - DNA, 25 bp, probe
tcattgtaaactttctcagggtcat

SEQ ID NO: 76753 - DNA, 25 bp, probe
ttcattgtaaactttctcagggtca

SEQ ID NO: 76754 - DNA, 25 bp, probe
catttcccataacatcccagatact

SEQ ID NO: 76755 - DNA, 25 bp, probe
tcatttcccataacatcccagatac

SEQ ID NO: 76756 - DNA, 25 bp, probe
tttcattgtaaactttctcagggtc

SEQ ID NO: 76757 - DNA, 25 bp, probe
ttgtaaactttctcagggtcatcag

SEQ ID NO: 76758 - DNA, 25 bp, probe
ttcatttcccataacatcccagata

SEQ ID NO: 76759 - DNA, 25 bp, probe
cttcatttcccataacatcccagat

SEQ ID NO: 76760 - DNA, 25 bp, probe
aacctgttctgattccattctttac

SEQ ID NO: 76761 - DNA, 25 bp, probe
cccataacatcccagatactatcac

SEQ ID NO: 76762 - DNA, 25 bp, probe
tcccataacatcccagatactatca

SEQ ID NO: 76763 - DNA, 25 bp, probe
gaaacctgttctgattccattcttt

SEQ ID NO: 76764 - DNA, 25 bp, probe
ctcttcatttcccataacatcccag

SEQ ID NO: 76765 - DNA, 25 bp, probe
ccataacatcccagatactatcaca

SEQ ID NO: 76766 - DNA, 25 bp, probe
atttcattgtaaactttctcagggt

SEQ ID NO: 76767 - DNA, 25 bp, probe
ttcccataacatcccagatactatc

SEQ ID NO: 76768 - DNA, 25 bp, probe
tttcccataacatcccagatactat

SEQ ID NO: 76769 - DNA, 25 bp, probe
atttcccataacatcccagatacta

SEQ ID NO: 76770 - DNA, 25 bp, probe
aaacctgttctgattccattcttta

SEQ ID NO: 76771 - DNA, 25 bp, probe
ccagatactatcacatgcaaggata

SEQ ID NO: 76772 - DNA, 25 bp, probe
gtgacttcaagcctggatcttacaa

SEQ ID NO: 76773 - DNA, 25 bp, probe
tcttcatttcccataacatcccaga

SEQ ID NO: 76774 - DNA, 25 bp, probe
acctgttctgattccattctttaca

SEQ ID NO: 76775 - DNA, 25 bp, probe
ctatcacatgcaaggataatgaagt

SEQ ID NO: 76776 - DNA, 25 bp, probe
actatcacatgcaaggataatgaag

SEQ ID NO: 76777 - DNA, 25 bp, probe
cacatgcaaggataatgaagtgatc

SEQ ID NO: 76778 - DNA, 25 bp, probe
taaactttctcagggtcatcagtga

SEQ ID NO: 76779 - DNA, 25 bp, probe
gtaaactttctcagggtcatcagtg

SEQ ID NO: 76780 - DNA, 25 bp, probe
taacatcccagatactatcacatgc

SEQ ID NO: 76781 - DNA, 25 bp, probe
tatcacatgcaaggataatgaagtg

SEQ ID NO: 76782 - DNA, 25 bp, probe
cctgttctgattccattctttacat

SEQ ID NO: 76783 - DNA, 25 bp, probe
tgtaaactttctcagggtcatcagt

SEQ ID NO: 76784 - DNA, 25 bp, probe
cagatactatcacatgcaaggataa

SEQ ID NO: 76785 - DNA, 25 bp, probe
cataacatcccagatactatcacat

SEQ ID NO: 76786 - DNA, 25 bp, probe
agtgacttcaagcctggatcttaca

SEQ ID NO: 76787 - DNA, 25 bp, probe
tactatcacatgcaaggataatgaa

SEQ ID NO: 76788 - DNA, 25 bp, probe
tatttcattgtaaactttctcaggg

SEQ ID NO: 76789 - DNA, 25 bp, probe
tgacttcaagcctggatcttacaaa

SEQ ID NO: 76790 - DNA, 25 bp, probe
cagtgacttcaagcctggatcttac

SEQ ID NO: 76791 - DNA, 25 bp, probe
tcagtgacttcaagcctggatctta

SEQ ID NO: 76792 - DNA, 25 bp, probe
gctcttcatttcccataacatccca

SEQ ID NO: 76793 - DNA, 25 bp, probe
atactatcacatgcaaggataatga

SEQ ID NO: 76794 - DNA, 25 bp, probe
atccatacagtccataccatcacac

SEQ ID NO: 76795 - DNA, 25 bp, probe
catccatacagtccataccatcaca

SEQ ID NO: 76796 - DNA, 25 bp, probe
acatccatacagtccataccatcac

SEQ ID NO: 76797 - DNA, 25 bp, probe
cacatccatacagtccataccatca

SEQ ID NO: 76798 - DNA, 25 bp, probe
acacatccatacagtccataccatc

SEQ ID NO: 76799 - DNA, 25 bp, probe
cacacatccatacagtccataccat

SEQ ID NO: 76800 - DNA, 25 bp, probe
atacagtccataccatcacacacac

SEQ ID NO: 76801 - DNA, 25 bp, probe
catacagtccataccatcacacaca

SEQ ID NO: 76802 - DNA, 25 bp, probe
ccatacagtccataccatcacacac

SEQ ID NO: 76803 - DNA, 25 bp, probe
tccatacagtccataccatcacaca

SEQ ID NO: 76804 - DNA, 25 bp, probe
cacacacatccatacagtccatacc

SEQ ID NO: 76805 - DNA, 25 bp, probe
ccacacacatccatacagtccatac

SEQ ID NO: 76806 - DNA, 25 bp, probe
acacacatccatacagtccatacca

SEQ ID NO: 76807 - DNA, 25 bp, probe
gcctctgtttctgcatttgtataat

SEQ ID NO: 76808 - DNA, 25 bp, probe
agcctctgtttctgcatttgtataa

SEQ ID NO: 76809 - DNA, 25 bp, probe
tacagtccataccatcacacacacc

SEQ ID NO: 76810 - DNA, 25 bp, probe
gagcctctgtttctgcatttgtata

SEQ ID NO: 76811 - DNA, 25 bp, probe
atccatacagtccacaccatcacac

SEQ ID NO: 76812 - DNA, 25 bp, probe
catccatacagtccacaccatcaca

SEQ ID NO: 76813 - DNA, 25 bp, probe
acatccatacagtccacaccatcac

SEQ ID NO: 76814 - DNA, 25 bp, probe
acacatccatacagtccacaccatc

SEQ ID NO: 76815 - DNA, 25 bp, probe
atccatacactccacaccatcacac

SEQ ID NO: 76816 - DNA, 25 bp, probe
catccatacactccacaccatcaca

SEQ ID NO: 76817 - DNA, 25 bp, probe
acatccatacactccacaccatcac

SEQ ID NO: 76818 - DNA, 25 bp, probe
acacatccatacactccacaccatc

SEQ ID NO: 76819 - DNA, 25 bp, probe
cacacatccatacagtccacaccat

SEQ ID NO: 76820 - DNA, 25 bp, probe
cacacatccatacactccacaccat

SEQ ID NO: 76821 - DNA, 25 bp, probe
atacagtccacaccatcacacacac

SEQ ID NO: 76822 - DNA, 25 bp, probe
catacagtccacaccatcacacaca

SEQ ID NO: 76823 - DNA, 25 bp, probe
atacactccacaccatcacacacac

SEQ ID NO: 76824 - DNA, 25 bp, probe
catacactccacaccatcacacaca

SEQ ID NO: 76825 - DNA, 25 bp, probe
cccacacacatccatacagtccata

SEQ ID NO: 76826 - DNA, 25 bp, probe
tctgtttctgcatttgtataatggg

SEQ ID NO: 76827 - DNA, 25 bp, probe
atttgtataatggggctggtaggac

SEQ ID NO: 76828 - DNA, 25 bp, probe
ctctgtttctgcatttgtataatgg

SEQ ID NO: 76829 - DNA, 25 bp, probe
cctctgtttctgcatttgtataatg

SEQ ID NO: 76830 - DNA, 25 bp, probe
cgagcctctgtttctgcatttgtat

SEQ ID NO: 76831 - DNA, 25 bp, probe
catttgtataatggggctggtagga

SEQ ID NO: 76832 - DNA, 25 bp, probe
ctgtttctgcatttgtataatgggg

SEQ ID NO: 76833 - DNA, 25 bp, probe
tttctgcatttgtataatggggctg

SEQ ID NO: 76834 - DNA, 25 bp, probe
gtttctgcatttgtataatggggct

SEQ ID NO: 76835 - DNA, 25 bp, probe
tgtttctgcatttgtataatggggc

SEQ ID NO: 76836 - DNA, 25 bp, probe
cttcactccagcctgtttcctgatc

SEQ ID NO: 76837 - DNA, 25 bp, probe
gcatttgtataatggggctggtagg

SEQ ID NO: 76838 - DNA, 25 bp, probe
cacatcttggtctacagagaaatct

SEQ ID NO: 76839 - DNA, 25 bp, probe
acatcttggtctacagagaaatctt

SEQ ID NO: 76840 - DNA, 25 bp, probe
tcttggtctacagagaaatcttcat

SEQ ID NO: 76841 - DNA, 25 bp, probe
atcttggtctacagagaaatcttca

SEQ ID NO: 76842 - DNA, 25 bp, probe
catcttggtctacagagaaatcttc

SEQ ID NO: 76843 - DNA, 25 bp, probe
tgaatgagggcaatgctaagtattt

SEQ ID NO: 76844 - DNA, 25 bp, probe
gcaacattgtgaccatagtttatac

SEQ ID NO: 76845 - DNA, 25 bp, probe
ctgaatgagggcaatgctaagtatt

SEQ ID NO: 76846 - DNA, 25 bp, probe
cttggtctacagagaaatcttcatg

SEQ ID NO: 76847 - DNA, 25 bp, probe
gaaagatttacaacctgaatgaggg

SEQ ID NO: 76848 - DNA, 25 bp, probe
ggaaagatttacaacctgaatgagg

SEQ ID NO: 76849 - DNA, 25 bp, probe
cttggtgaatttgtactggtggaaa

SEQ ID NO: 76850 - DNA, 25 bp, probe
aggaaagatttacaacctgaatgag

SEQ ID NO: 76851 - DNA, 25 bp, probe
ttggtctacagagaaatcttcatgt

SEQ ID NO: 76852 - DNA, 25 bp, probe
aaggaaagatttacaacctgaatga

SEQ ID NO: 76853 - DNA, 25 bp, probe
gatttacaacctgaatgagggcaat

SEQ ID NO: 76854 - DNA, 25 bp, probe
aaagatttacaacctgaatgagggc

SEQ ID NO: 76855 - DNA, 25 bp, probe
agaaaggaaagatttacaacctgaa

SEQ ID NO: 76856 - DNA, 25 bp, probe
aagaaaggaaagatttacaacctga

SEQ ID NO: 76857 - DNA, 25 bp, probe
tgacttggctcttggtgaatttgta

SEQ ID NO: 76858 - DNA, 25 bp, probe
ccacatcttggtctacagagaaatc

SEQ ID NO: 76859 - DNA, 25 bp, probe
tcttggtgaatttgtactggtggaa

SEQ ID NO: 76860 - DNA, 25 bp, probe
cttggctcttggtgaatttgtactg

SEQ ID NO: 76861 - DNA, 25 bp, probe
gacttggctcttggtgaatttgtac

SEQ ID NO: 76862 - DNA, 25 bp, probe
agatgtcaagattagtaagaaagga

SEQ ID NO: 76863 - DNA, 25 bp, probe
cttgacttggctcttggtgaatttg

SEQ ID NO: 76864 - DNA, 25 bp, probe
atttacaacctgaatgagggcaatg

SEQ ID NO: 76865 - DNA, 25 bp, probe
ctgcaacattgtgaccatagtttat

SEQ ID NO: 76866 - DNA, 25 bp, probe
aaaggaaagatttacaacctgaatg

SEQ ID NO: 76867 - DNA, 25 bp, probe
attgtgaccatagtttatacactgt

SEQ ID NO: 76868 - DNA, 25 bp, probe
acattgtgaccatagtttatacact

SEQ ID NO: 76869 - DNA, 25 bp, probe
ctcttggtgaatttgtactggtgga

SEQ ID NO: 76870 - DNA, 25 bp, probe
acttggctcttggtgaatttgtact

SEQ ID NO: 76871 - DNA, 25 bp, probe
cattgtgaccatagtttatacactg

SEQ ID NO: 76872 - DNA, 25 bp, probe
tgcaacattgtgaccatagtttata

SEQ ID NO: 76873 - DNA, 25 bp, probe
acagagaaatcttcatgtacccagg

SEQ ID NO: 76874 - DNA, 25 bp, probe
tgtgaccatagtttatacactgtac

SEQ ID NO: 76875 - DNA, 25 bp, probe
tgtcaagattagtaagaaaggaaag

SEQ ID NO: 76876 - DNA, 25 bp, probe
caacattgtgaccatagtttataca

SEQ ID NO: 76877 - DNA, 25 bp, probe
gaaaggaaagatttacaacctgaat

SEQ ID NO: 76878 - DNA, 25 bp, probe
tacagagaaatcttcatgtacccag

SEQ ID NO: 76879 - DNA, 25 bp, probe
ctacagagaaatcttcatgtaccca

SEQ ID NO: 76880 - DNA, 25 bp, probe
tctacagagaaatcttcatgtaccc

SEQ ID NO: 76881 - DNA, 25 bp, probe
agatttacaacctgaatgagggcaa

SEQ ID NO: 76882 - DNA, 25 bp, probe
gatgatgcgtattgttaagaccgtg

SEQ ID NO: 76883 - DNA, 25 bp, probe
agatgttgaagaggactctgtgatc

SEQ ID NO: 76884 - DNA, 25 bp, probe
ggatgatgcgtattgttaagaccgt

SEQ ID NO: 76885 - DNA, 25 bp, probe
atgatgcgtattgttaagaccgtgg

SEQ ID NO: 76886 - DNA, 25 bp, probe
gatgcgtattgttaagaccgtggag

SEQ ID NO: 76887 - DNA, 25 bp, probe
tctgaggctgatgatctagagtcta

SEQ ID NO: 76888 - DNA, 25 bp, probe
gatgttgaagaggactctgtgatcc

SEQ ID NO: 76889 - DNA, 25 bp, probe
atgatctagagtctaggatgaagct

SEQ ID NO: 76890 - DNA, 25 bp, probe
tgatctagagtctaggatgaagctc

SEQ ID NO: 76891 - DNA, 25 bp, probe
gatgatctagagtctaggatgaagc

SEQ ID NO: 76892 - DNA, 25 bp, probe
gctgatgatctagagtctaggatga

SEQ ID NO: 76893 - DNA, 25 bp, probe
ttgacaacctcggcacctacaataa

SEQ ID NO: 76894 - DNA, 25 bp, probe
tgatgcgtattgttaagaccgtgga

SEQ ID NO: 76895 - DNA, 25 bp, probe
ctgaggctgatgatctagagtctag

SEQ ID NO: 76896 - DNA, 25 bp, probe
ctagagtctaggatgaagctctgag

SEQ ID NO: 76897 - DNA, 25 bp, probe
gtctgaggctgatgatctagagtct

SEQ ID NO: 76898 - DNA, 25 bp, probe
agtctgaggctgatgatctagagtc

SEQ ID NO: 76899 - DNA, 25 bp, probe
ggctgatgatctagagtctaggatg

SEQ ID NO: 76900 - DNA, 25 bp, probe
aggctgatgatctagagtctaggat

SEQ ID NO: 76901 - DNA, 25 bp, probe
tgatgatctagagtctaggatgaag

SEQ ID NO: 76902 - DNA, 25 bp, probe
ctgatgatctagagtctaggatgaa

SEQ ID NO: 76903 - DNA, 25 bp, probe
ttcttatgtgaaaactggttcctca

SEQ ID NO: 76904 - DNA, 25 bp, probe
cgatatctgtttcctctggtttcag

SEQ ID NO: 76905 - DNA, 25 bp, probe
ccgatatctgtttcctctggtttca

SEQ ID NO: 76906 - DNA, 25 bp, probe
gaggctgatgatctagagtctagga

SEQ ID NO: 76907 - DNA, 25 bp, probe
cagatgttgaagaggactctgtgat

SEQ ID NO: 76908 - DNA, 25 bp, probe
gaaggggatgatgcgtattgttaag

SEQ ID NO: 76909 - DNA, 25 bp, probe
gggatgatgcgtattgttaagaccg

SEQ ID NO: 76910 - DNA, 25 bp, probe
tgaggctgatgatctagagtctagg

SEQ ID NO: 76911 - DNA, 25 bp, probe
aaggggatgatgcgtattgttaaga

SEQ ID NO: 76912 - DNA, 25 bp, probe
atgcgtattgttaagaccgtggagg

SEQ ID NO: 76913 - DNA, 25 bp, probe
tcttatgtgaaaactggttcctcag

SEQ ID NO: 76914 - DNA, 25 bp, probe
cagtctgaggctgatgatctagagt

SEQ ID NO: 76915 - DNA, 25 bp, probe
gatctagagtctaggatgaagctct

SEQ ID NO: 76916 - DNA, 25 bp, probe
atctagagtctaggatgaagctctg

SEQ ID NO: 76917 - DNA, 25 bp, probe
tacattcaagtccttcaggccatct

SEQ ID NO: 76918 - DNA, 25 bp, probe
tgacaacctcggcacctacaataaa

SEQ ID NO: 76919 - DNA, 25 bp, probe
cccgatatctgtttcctctggtttc

SEQ ID NO: 76920 - DNA, 25 bp, probe
tggaccagatgttgaagaggactct

SEQ ID NO: 76921 - DNA, 25 bp, probe
tctagagtctaggatgaagctctga

SEQ ID NO: 76922 - DNA, 25 bp, probe
aggggatgatgcgtattgttaagac

SEQ ID NO: 76923 - DNA, 25 bp, probe
tttgacaacctcggcacctacaata

SEQ ID NO: 76924 - DNA, 25 bp, probe
atatctgtttcctctggtttcagac

SEQ ID NO: 76925 - DNA, 25 bp, probe
tagagtctaggatgaagctctgagc

SEQ ID NO: 76926 - DNA, 25 bp, probe
gtcttctgacacttgtaggtggtac

SEQ ID NO: 76927 - DNA, 25 bp, probe
cttctgacacttgtaggtggtacat

SEQ ID NO: 76928 - DNA, 25 bp, probe
tcttctctagctggtcgatcttctc

SEQ ID NO: 76929 - DNA, 25 bp, probe
ctcttctctagctggtcgatcttct

SEQ ID NO: 76930 - DNA, 25 bp, probe
ttctgacacttgtaggtggtacatg

SEQ ID NO: 76931 - DNA, 25 bp, probe
tcttctgacacttgtaggtggtaca

SEQ ID NO: 76932 - DNA, 25 bp, probe
cagagacatttaacatggatgcgtc

SEQ ID NO: 76933 - DNA, 25 bp, probe
cttctctagctggtcgatcttctcc

SEQ ID NO: 76934 - DNA, 25 bp, probe
agagacatttaacatggatgcgtcc

SEQ ID NO: 76935 - DNA, 25 bp, probe
tgtcttctgacacttgtaggtggta

SEQ ID NO: 76936 - DNA, 25 bp, probe
gagacatttaacatggatgcgtccc

SEQ ID NO: 76937 - DNA, 25 bp, probe
gctcttctctagctggtcgatcttc

SEQ ID NO: 76938 - DNA, 25 bp, probe
ctgacacttgtaggtggtacatgtg

SEQ ID NO: 76939 - DNA, 25 bp, probe
tctgacacttgtaggtggtacatgt

SEQ ID NO: 76940 - DNA, 25 bp, probe
gcagagacatttaacatggatgcgt

SEQ ID NO: 76941 - DNA, 25 bp, probe
tgcagagacatttaacatggatgcg

SEQ ID NO: 76942 - DNA, 25 bp, probe
tgacacttgtaggtggtacatgtgt

SEQ ID NO: 76943 - DNA, 25 bp, probe
gtaagtgtcctggttcccgatgaac

SEQ ID NO: 76944 - DNA, 25 bp, probe
acacttgtaggtggtacatgtgtcc

SEQ ID NO: 76945 - DNA, 25 bp, probe
cacttgtaggtggtacatgtgtccc

SEQ ID NO: 76946 - DNA, 25 bp, probe
acttgtaggtggtacatgtgtccca

SEQ ID NO: 76947 - DNA, 25 bp, probe
tcttcttgttcgtgataactagagt

SEQ ID NO: 76948 - DNA, 25 bp, probe
ttgttcgtgataactagagtcagag

SEQ ID NO: 76949 - DNA, 25 bp, probe
cttgttcgtgataactagagtcaga

SEQ ID NO: 76950 - DNA, 25 bp, probe
tcttgttcgtgataactagagtcag

SEQ ID NO: 76951 - DNA, 25 bp, probe
ttcgtgataactagagtcagagtct

SEQ ID NO: 76952 - DNA, 25 bp, probe
gttcgtgataactagagtcagagtc

SEQ ID NO: 76953 - DNA, 25 bp, probe
ttcttgttcgtgataactagagtca

SEQ ID NO: 76954 - DNA, 25 bp, probe
cttcttgttcgtgataactagagtc

SEQ ID NO: 76955 - DNA, 25 bp, probe
tgttcgtgataactagagtcagagt

SEQ ID NO: 76956 - DNA, 25 bp, probe
ttcttcttgttcgtgataactagag

SEQ ID NO: 76957 - DNA, 25 bp, probe
caatataaggcgtcagactggagag

SEQ ID NO: 76958 - DNA, 25 bp, probe
gataactagagtcagagtctgttgc

SEQ ID NO: 76959 - DNA, 25 bp, probe
tgataactagagtcagagtctgttg

SEQ ID NO: 76960 - DNA, 25 bp, probe
gtgataactagagtcagagtctgtt

SEQ ID NO: 76961 - DNA, 25 bp, probe
tcgtgataactagagtcagagtctg

SEQ ID NO: 76962 - DNA, 25 bp, probe
cgtgataactagagtcagagtctgt

SEQ ID NO: 76963 - DNA, 25 bp, probe
ttcaattcggtaagtttctccacat

SEQ ID NO: 76964 - DNA, 25 bp, probe
aaagccacttagtaatgaaaccttc

SEQ ID NO: 76965 - DNA, 25 bp, probe
gctttctcttcaattcggtaagttt

SEQ ID NO: 76966 - DNA, 25 bp, probe
attcggtaagtttctccacatcttc

SEQ ID NO: 76967 - DNA, 25 bp, probe
aattcggtaagtttctccacatctt

SEQ ID NO: 76968 - DNA, 25 bp, probe
tctcttcaattcggtaagtttctcc

SEQ ID NO: 76969 - DNA, 25 bp, probe
cggttctatgttaaagccacttagt

SEQ ID NO: 76970 - DNA, 25 bp, probe
caattcggtaagtttctccacatct

SEQ ID NO: 76971 - DNA, 25 bp, probe
tcaattcggtaagtttctccacatc

SEQ ID NO: 76972 - DNA, 25 bp, probe
ctcttcaattcggtaagtttctcca

SEQ ID NO: 76973 - DNA, 25 bp, probe
acaatataaggcgtcagactggaga

SEQ ID NO: 76974 - DNA, 25 bp, probe
cacaatataaggcgtcagactggag

SEQ ID NO: 76975 - DNA, 25 bp, probe
gccacttagtaatgaaaccttccat

SEQ ID NO: 76976 - DNA, 25 bp, probe
aagccacttagtaatgaaaccttcc

SEQ ID NO: 76977 - DNA, 25 bp, probe
ttctcttcaattcggtaagtttctc

SEQ ID NO: 76978 - DNA, 25 bp, probe
tcttcaattcggtaagtttctccac

SEQ ID NO: 76979 - DNA, 25 bp, probe
aagcacaatataaggcgtcagactg

SEQ ID NO: 76980 - DNA, 25 bp, probe
ataactagagtcagagtctgttgcg

SEQ ID NO: 76981 - DNA, 25 bp, probe
cttcaattcggtaagtttctccaca

SEQ ID NO: 76982 - DNA, 25 bp, probe
tttctcttcaattcggtaagtttct

SEQ ID NO: 76983 - DNA, 25 bp, probe
gtaagtttctccacatcttcccaac

SEQ ID NO: 76984 - DNA, 25 bp, probe
ctttctcttcaattcggtaagtttc

SEQ ID NO: 76985 - DNA, 25 bp, probe
ggctttctcttcaattcggtaagtt

SEQ ID NO: 76986 - DNA, 25 bp, probe
taaagccacttagtaatgaaacctt

SEQ ID NO: 76987 - DNA, 25 bp, probe
ttaaagccacttagtaatgaaacct

SEQ ID NO: 76988 - DNA, 25 bp, probe
gttaaagccacttagtaatgaaacc

SEQ ID NO: 76989 - DNA, 25 bp, probe
ggttctatgttaaagccacttagta

SEQ ID NO: 76990 - DNA, 25 bp, probe
ttagtaatgaaaccttccatgacca

SEQ ID NO: 76991 - DNA, 25 bp, probe
aggacaggttagagaggaagaagta

SEQ ID NO: 76992 - DNA, 25 bp, probe
acaggttagagaggaagaagtacat

SEQ ID NO: 76993 - DNA, 25 bp, probe
caggttagagaggaagaagtacatg

SEQ ID NO: 76994 - DNA, 25 bp, probe
gacaggttagagaggaagaagtaca

SEQ ID NO: 76995 - DNA, 25 bp, probe
aggttagagaggaagaagtacatgg

SEQ ID NO: 76996 - DNA, 25 bp, probe
ggacaggttagagaggaagaagtac

SEQ ID NO: 76997 - DNA, 25 bp, probe
aaggacaggttagagaggaagaagt

SEQ ID NO: 76998 - DNA, 25 bp, probe
gtcagatacatggagaggaagagtc

SEQ ID NO: 76999 - DNA, 25 bp, probe
gaaagtcccagaagaagaaatccta

SEQ ID NO: 77000 - DNA, 25 bp, probe
ttgtcagatacatggagaggaagag

SEQ ID NO: 77001 - DNA, 25 bp, probe
aagtcccagaagaagaaatcctaaa

SEQ ID NO: 77002 - DNA, 25 bp, probe
aaagtcccagaagaagaaatcctaa

SEQ ID NO: 77003 - DNA, 25 bp, probe
gttgtcagatacatggagaggaaga

SEQ ID NO: 77004 - DNA, 25 bp, probe
agttgtcagatacatggagaggaag

SEQ ID NO: 77005 - DNA, 25 bp, probe
caagagtaagctgtccaacactata

SEQ ID NO: 77006 - DNA, 25 bp, probe
aacacagttgtcagatacatggaga

SEQ ID NO: 77007 - DNA, 25 bp, probe
cataggtgatgactttactctgtgt

SEQ ID NO: 77008 - DNA, 25 bp, probe
gtggaggtaacacagatgtctacaa

SEQ ID NO: 77009 - DNA, 25 bp, probe
aagagtaagctgtccaacactataa

SEQ ID NO: 77010 - DNA, 25 bp, probe
tacaaaggacaggttagagaggaag

SEQ ID NO: 77011 - DNA, 25 bp, probe
ctacaaaggacaggttagagaggaa

SEQ ID NO: 77012 - DNA, 25 bp, probe
cagttgtcagatacatggagaggaa

SEQ ID NO: 77013 - DNA, 25 bp, probe
aaaggacaggttagagaggaagaag

SEQ ID NO: 77014 - DNA, 25 bp, probe
tgaaagtcccagaagaagaaatcct

SEQ ID NO: 77015 - DNA, 25 bp, probe
acacagttgtcagatacatggagag

SEQ ID NO: 77016 - DNA, 25 bp, probe
gcataggtgatgactttactctgtg

SEQ ID NO: 77017 - DNA, 25 bp, probe
caaaggacaggttagagaggaagaa

SEQ ID NO: 77018 - DNA, 25 bp, probe
tcaagagtaagctgtccaacactat

SEQ ID NO: 77019 - DNA, 25 bp, probe
tgtcagatacatggagaggaagagt

SEQ ID NO: 77020 - DNA, 25 bp, probe
ttccaaacacagttgtcagatacat

SEQ ID NO: 77021 - DNA, 25 bp, probe
tttccaaacacagttgtcagataca

SEQ ID NO: 77022 - DNA, 25 bp, probe
gaggtaacacagatgtctacaaagg

SEQ ID NO: 77023 - DNA, 25 bp, probe
ggaggtaacacagatgtctacaaag

SEQ ID NO: 77024 - DNA, 25 bp, probe
ataggtgatgactttactctgtgtc

SEQ ID NO: 77025 - DNA, 25 bp, probe
aggtaacacagatgtctacaaagga

SEQ ID NO: 77026 - DNA, 25 bp, probe
cacagttgtcagatacatggagagg

SEQ ID NO: 77027 - DNA, 25 bp, probe
gtttccaaacacagttgtcagatac

SEQ ID NO: 77028 - DNA, 25 bp, probe
tggaggtaacacagatgtctacaaa

SEQ ID NO: 77029 - DNA, 25 bp, probe
gctgtccaacactataaagagtaca

SEQ ID NO: 77030 - DNA, 25 bp, probe
ggtaacacagatgtctacaaaggac

SEQ ID NO: 77031 - DNA, 25 bp, probe
acagttgtcagatacatggagagga

SEQ ID NO: 77032 - DNA, 25 bp, probe
gtcaagagtaagctgtccaacacta

SEQ ID NO: 77033 - DNA, 25 bp, probe
ctgaaagtcccagaagaagaaatcc

SEQ ID NO: 77034 - DNA, 25 bp, probe
acaaaggacaggttagagaggaaga

SEQ ID NO: 77035 - DNA, 25 bp, probe
gatgattgctctcttctatggagtg

SEQ ID NO: 77036 - DNA, 25 bp, probe
agatgattgctctcttctatggagt

SEQ ID NO: 77037 - DNA, 25 bp, probe
ctcagcagaggaagagaagatgatt

SEQ ID NO: 77038 - DNA, 25 bp, probe
cttgaggaataaggaagttacggct

SEQ ID NO: 77039 - DNA, 25 bp, probe
ttgaggaataaggaagttacggctg

SEQ ID NO: 77040 - DNA, 25 bp, probe
atgattgctctcttctatggagtgg

SEQ ID NO: 77041 - DNA, 25 bp, probe
ttgatctacagcttgaggaataagg

SEQ ID NO: 77042 - DNA, 25 bp, probe
ctacagcttgaggaataaggaagtt

SEQ ID NO: 77043 - DNA, 25 bp, probe
atctacagcttgaggaataaggaag

SEQ ID NO: 77044 - DNA, 25 bp, probe
gatctacagcttgaggaataaggaa

SEQ ID NO: 77045 - DNA, 25 bp, probe
tcagcagaggaagagaagatgattg

SEQ ID NO: 77046 - DNA, 25 bp, probe
acagcttgaggaataaggaagttac

SEQ ID NO: 77047 - DNA, 25 bp, probe
tgatctacagcttgaggaataagga

SEQ ID NO: 77048 - DNA, 25 bp, probe
tacagcttgaggaataaggaagtta

SEQ ID NO: 77049 - DNA, 25 bp, probe
tctacagcttgaggaataaggaagt

SEQ ID NO: 77050 - DNA, 25 bp, probe
cttgatctacagcttgaggaataag

SEQ ID NO: 77051 - DNA, 25 bp, probe
cctggttctattctcctatgcttgc

SEQ ID NO: 77052 - DNA, 25 bp, probe
cagcttgaggaataaggaagttacg

SEQ ID NO: 77053 - DNA, 25 bp, probe
ctgttccctggttctattctcctat

SEQ ID NO: 77054 - DNA, 25 bp, probe
tgttccctggttctattctcctatg

SEQ ID NO: 77055 - DNA, 25 bp, probe
ccttgatctacagcttgaggaataa

SEQ ID NO: 77056 - DNA, 25 bp, probe
aagatgattgctctcttctatggag

SEQ ID NO: 77057 - DNA, 25 bp, probe
ttcctgtgtcacggtgttatcaatc

SEQ ID NO: 77058 - DNA, 25 bp, probe
cttcctgtgtcacggtgttatcaat

SEQ ID NO: 77059 - DNA, 25 bp, probe
gattgctctcttctatggagtggtg

SEQ ID NO: 77060 - DNA, 25 bp, probe
aacaattatcaccttccagcttcct

SEQ ID NO: 77061 - DNA, 25 bp, probe
tggttctattctcctatgcttgcat

SEQ ID NO: 77062 - DNA, 25 bp, probe
agcttgaggaataaggaagttacgg

SEQ ID NO: 77063 - DNA, 25 bp, probe
tgattgctctcttctatggagtggt

SEQ ID NO: 77064 - DNA, 25 bp, probe
tgtgtcacggtgttatcaatcactt

SEQ ID NO: 77065 - DNA, 25 bp, probe
ggttctattctcctatgcttgcata

SEQ ID NO: 77066 - DNA, 25 bp, probe
ctggttctattctcctatgcttgca

SEQ ID NO: 77067 - DNA, 25 bp, probe
ggtgttatcaatcactttgtctgtg

SEQ ID NO: 77068 - DNA, 25 bp, probe
attgctctcttctatggagtggtgt

SEQ ID NO: 77069 - DNA, 25 bp, probe
ccctggttctattctcctatgcttg

SEQ ID NO: 77070 - DNA, 25 bp, probe
gttccctggttctattctcctatgc

SEQ ID NO: 77071 - DNA, 25 bp, probe
gaataaggaagttacggctgctgtc

SEQ ID NO: 77072 - DNA, 25 bp, probe
gcttgaggaataaggaagttacggc

SEQ ID NO: 77073 - DNA, 25 bp, probe
tccctggttctattctcctatgctt

SEQ ID NO: 77074 - DNA, 25 bp, probe
ttccctggttctattctcctatgct

SEQ ID NO: 77075 - DNA, 25 bp, probe
ctgtgtcacggtgttatcaatcact

SEQ ID NO: 77076 - DNA, 25 bp, probe
gaaacaattatcaccttccagcttc

SEQ ID NO: 77077 - DNA, 25 bp, probe
cggtgttatcaatcactttgtctgt

SEQ ID NO: 77078 - DNA, 25 bp, probe
acggtgttatcaatcactttgtctg

SEQ ID NO: 77079 - DNA, 25 bp, probe
caatgtcatcaaccacttcttctgt

SEQ ID NO: 77080 - DNA, 25 bp, probe
atcttctatgccattgtcactcctt

SEQ ID NO: 77081 - DNA, 25 bp, probe
ccaatgtcatcaaccacttcttctg

SEQ ID NO: 77082 - DNA, 25 bp, probe
ttccatcttctatgccattgtcact

SEQ ID NO: 77083 - DNA, 25 bp, probe
ttctatgccattgtcactccttctc

SEQ ID NO: 77084 - DNA, 25 bp, probe
cttctatgccattgtcactccttct

SEQ ID NO: 77085 - DNA, 25 bp, probe
tcttctatgccattgtcactccttc

SEQ ID NO: 77086 - DNA, 25 bp, probe
cttcttctgtgacatctctccagta

SEQ ID NO: 77087 - DNA, 25 bp, probe
catcttctatgccattgtcactcct

SEQ ID NO: 77088 - DNA, 25 bp, probe
tccatcttctatgccattgtcactc

SEQ ID NO: 77089 - DNA, 25 bp, probe
aatgtcatcaaccacttcttctgtg

SEQ ID NO: 77090 - DNA, 25 bp, probe
ctatgccattgtcactccttctctc

SEQ ID NO: 77091 - DNA, 25 bp, probe
catttattgcctaagaaaccgagag

SEQ ID NO: 77092 - DNA, 25 bp, probe
ctccttctctcaaccctttcattta

SEQ ID NO: 77093 - DNA, 25 bp, probe
ttattactgtcctgtcctacggatg

SEQ ID NO: 77094 - DNA, 25 bp, probe
ctctttattactgtcctgtcctacg

SEQ ID NO: 77095 - DNA, 25 bp, probe
attcccactctttattactgtcctg

SEQ ID NO: 77096 - DNA, 25 bp, probe
tcatttattgcctaagaaaccgaga

SEQ ID NO: 77097 - DNA, 25 bp, probe
tccttctctcaaccctttcatttat

SEQ ID NO: 77098 - DNA, 25 bp, probe
gtcatcttcctattcccactcttta

SEQ ID NO: 77099 - DNA, 25 bp, probe
ttcttctgtgacatctctccagtac

SEQ ID NO: 77100 - DNA, 25 bp, probe
catcaaccacttcttctgtgacatc

SEQ ID NO: 77101 - DNA, 25 bp, probe
actctttattactgtcctgtcctac

SEQ ID NO: 77102 - DNA, 25 bp, probe
cactctttattactgtcctgtccta

SEQ ID NO: 77103 - DNA, 25 bp, probe
atcaaccacttcttctgtgacatct

SEQ ID NO: 77104 - DNA, 25 bp, probe
atgtccataactgagttggtagact

SEQ ID NO: 77105 - DNA, 25 bp, probe
ttcatttattgcctaagaaaccgag

SEQ ID NO: 77106 - DNA, 25 bp, probe
ccttctctcaaccctttcatttatt

SEQ ID NO: 77107 - DNA, 25 bp, probe
atttccatcttctatgccattgtca

SEQ ID NO: 77108 - DNA, 25 bp, probe
ttcccactctttattactgtcctgt

SEQ ID NO: 77109 - DNA, 25 bp, probe
tctatgccattgtcactccttctct

SEQ ID NO: 77110 - DNA, 25 bp, probe
tgtccataactgagttggtagactt

SEQ ID NO: 77111 - DNA, 25 bp, probe
tcatcaaccacttcttctgtgacat

SEQ ID NO: 77112 - DNA, 25 bp, probe
atgtcatcaaccacttcttctgtga

SEQ ID NO: 77113 - DNA, 25 bp, probe
tctttattactgtcctgtcctacgg

SEQ ID NO: 77114 - DNA, 25 bp, probe
tcatcttcctattcccactctttat

SEQ ID NO: 77115 - DNA, 25 bp, probe
tctcaaccctttcatttattgccta

SEQ ID NO: 77116 - DNA, 25 bp, probe
ttctctcaaccctttcatttattgc

SEQ ID NO: 77117 - DNA, 25 bp, probe
tacttaatctctcctgcacagacat

SEQ ID NO: 77118 - DNA, 25 bp, probe
catgtccataactgagttggtagac

SEQ ID NO: 77119 - DNA, 25 bp, probe
caaccctttcatttattgcctaaga

SEQ ID NO: 77120 - DNA, 25 bp, probe
tcaaccctttcatttattgcctaag

SEQ ID NO: 77121 - DNA, 25 bp, probe
ctcaaccctttcatttattgcctaa

SEQ ID NO: 77122 - DNA, 25 bp, probe
tattcccactctttattactgtcct

SEQ ID NO: 77123 - DNA, 25 bp, probe
gcttgtggcaatatcaatgtcaata

SEQ ID NO: 77124 - DNA, 25 bp, probe
tgtggcaatatcaatgtcaatatca

SEQ ID NO: 77125 - DNA, 25 bp, probe
tctacaggactggatatagtgctta

SEQ ID NO: 77126 - DNA, 25 bp, probe
actctctacaggactggatatagtg

SEQ ID NO: 77127 - DNA, 25 bp, probe
ctctacaggactggatatagtgctt

SEQ ID NO: 77128 - DNA, 25 bp, probe
ctacaggactggatatagtgcttat

SEQ ID NO: 77129 - DNA, 25 bp, probe
ctactctctacaggactggatatag

SEQ ID NO: 77130 - DNA, 25 bp, probe
aacatcattcctcattcctactgtg

SEQ ID NO: 77131 - DNA, 25 bp, probe
caggactggatatagtgcttatcat

SEQ ID NO: 77132 - DNA, 25 bp, probe
acaggactggatatagtgcttatca

SEQ ID NO: 77133 - DNA, 25 bp, probe
atatcctacacaatgatccttcacg

SEQ ID NO: 77134 - DNA, 25 bp, probe
ctctctacaggactggatatagtgc

SEQ ID NO: 77135 - DNA, 25 bp, probe
tactctctacaggactggatatagt

SEQ ID NO: 77136 - DNA, 25 bp, probe
tacaggactggatatagtgcttatc

SEQ ID NO: 77137 - DNA, 25 bp, probe
tctctacaggactggatatagtgct

SEQ ID NO: 77138 - DNA, 25 bp, probe
aggactggatatagtgcttatcatt

SEQ ID NO: 77139 - DNA, 25 bp, probe
acatcattcctcattcctactgtga

SEQ ID NO: 77140 - DNA, 25 bp, probe
ttctctcctatcagtgtatgctgtt

SEQ ID NO: 77141 - DNA, 25 bp, probe
cctactctctacaggactggatata

SEQ ID NO: 77142 - DNA, 25 bp, probe
gtggcaatatcaatgtcaatatcat

SEQ ID NO: 77143 - DNA, 25 bp, probe
ttgtggcaatatcaatgtcaatatc

SEQ ID NO: 77144 - DNA, 25 bp, probe
cttgtggcaatatcaatgtcaatat

SEQ ID NO: 77145 - DNA, 25 bp, probe
gcggctctcatatctgtgtcatatt

SEQ ID NO: 77146 - DNA, 25 bp, probe
ggcttgtggcaatatcaatgtcaat

SEQ ID NO: 77147 - DNA, 25 bp, probe
cggctctcatatctgtgtcatattt

SEQ ID NO: 77148 - DNA, 25 bp, probe
gaaacatcattcctcattcctactg

SEQ ID NO: 77149 - DNA, 25 bp, probe
agaaacatcattcctcattcctact

SEQ ID NO: 77150 - DNA, 25 bp, probe
tatatcctacacaatgatccttcac

SEQ ID NO: 77151 - DNA, 25 bp, probe
ggactggatatagtgcttatcatta

SEQ ID NO: 77152 - DNA, 25 bp, probe
tatcctacacaatgatccttcacgc

SEQ ID NO: 77153 - DNA, 25 bp, probe
aaacatcattcctcattcctactgt

SEQ ID NO: 77154 - DNA, 25 bp, probe
gagaaacatcattcctcattcctac

SEQ ID NO: 77155 - DNA, 25 bp, probe
tataccgacttacatattgtgggag

SEQ ID NO: 77156 - DNA, 25 bp, probe
acatattgtgggagaaacatcattc

SEQ ID NO: 77157 - DNA, 25 bp, probe
cgacttacatattgtgggagaaaca

SEQ ID NO: 77158 - DNA, 25 bp, probe
ataccgacttacatattgtgggaga

SEQ ID NO: 77159 - DNA, 25 bp, probe
tgcggctctcatatctgtgtcatat

SEQ ID NO: 77160 - DNA, 25 bp, probe
taccgacttacatattgtgggagaa

SEQ ID NO: 77161 - DNA, 25 bp, probe
ggctctcatatctgtgtcatattta

SEQ ID NO: 77162 - DNA, 25 bp, probe
cttacatattgtgggagaaacatca

SEQ ID NO: 77163 - DNA, 25 bp, probe
acttacatattgtgggagaaacatc

SEQ ID NO: 77164 - DNA, 25 bp, probe
gacttacatattgtgggagaaacat

SEQ ID NO: 77165 - DNA, 25 bp, probe
tgaagaccaaacaaattaaagatcg

SEQ ID NO: 77166 - DNA, 25 bp, probe
tttctctcctatcagtgtatgctgt

SEQ ID NO: 77167 - DNA, 25 bp, probe
atactgttgttggatgctatactca

SEQ ID NO: 77168 - DNA, 25 bp, probe
cgttattcctccatcctgactaatt

SEQ ID NO: 77169 - DNA, 25 bp, probe
tattcctccatcctgactaattcca

SEQ ID NO: 77170 - DNA, 25 bp, probe
ttattcctccatcctgactaattcc

SEQ ID NO: 77171 - DNA, 25 bp, probe
tcagacatccgattcaatagttact

SEQ ID NO: 77172 - DNA, 25 bp, probe
tactgttgttggatgctatactcat

SEQ ID NO: 77173 - DNA, 25 bp, probe
catactgttgttggatgctatactc

SEQ ID NO: 77174 - DNA, 25 bp, probe
ttcataccagaatgcttagactctt

SEQ ID NO: 77175 - DNA, 25 bp, probe
ttcagacatccgattcaatagttac

SEQ ID NO: 77176 - DNA, 25 bp, probe
gttcagacatccgattcaatagtta

SEQ ID NO: 77177 - DNA, 25 bp, probe
gttattcctccatcctgactaattc

SEQ ID NO: 77178 - DNA, 25 bp, probe
tgttcagacatccgattcaatagtt

SEQ ID NO: 77179 - DNA, 25 bp, probe
ctgttcagacatccgattcaatagt

SEQ ID NO: 77180 - DNA, 25 bp, probe
tctcattggcaacatctacatcctt

SEQ ID NO: 77181 - DNA, 25 bp, probe
ttctcattggcaacatctacatcct

SEQ ID NO: 77182 - DNA, 25 bp, probe
gttctcattggcaacatctacatcc

SEQ ID NO: 77183 - DNA, 25 bp, probe
cagacatccgattcaatagttacta

SEQ ID NO: 77184 - DNA, 25 bp, probe
cctgttcagacatccgattcaatag

SEQ ID NO: 77185 - DNA, 25 bp, probe
attcctccatcctgactaattccag

SEQ ID NO: 77186 - DNA, 25 bp, probe
cgttctcattggcaacatctacatc

SEQ ID NO: 77187 - DNA, 25 bp, probe
cctccatcctgactaattccagaat

SEQ ID NO: 77188 - DNA, 25 bp, probe
acagattcataccagaatgcttaga

SEQ ID NO: 77189 - DNA, 25 bp, probe
catccgattcaatagttactatgcc

SEQ ID NO: 77190 - DNA, 25 bp, probe
attcataccagaatgcttagactct

SEQ ID NO: 77191 - DNA, 25 bp, probe
agattcataccagaatgcttagact

SEQ ID NO: 77192 - DNA, 25 bp, probe
cagattcataccagaatgcttagac

SEQ ID NO: 77193 - DNA, 25 bp, probe
gattcataccagaatgcttagactc

SEQ ID NO: 77194 - DNA, 25 bp, probe
caacagattcataccagaatgctta

SEQ ID NO: 77195 - DNA, 25 bp, probe
gttctacatccctatcattagcctc

SEQ ID NO: 77196 - DNA, 25 bp, probe
tacgttattcctccatcctgactaa

SEQ ID NO: 77197 - DNA, 25 bp, probe
ttctacatccctatcattagcctca

SEQ ID NO: 77198 - DNA, 25 bp, probe
atttccacatcctttctcactcttt

SEQ ID NO: 77199 - DNA, 25 bp, probe
aacagattcataccagaatgcttag

SEQ ID NO: 77200 - DNA, 25 bp, probe
ctccatcctgactaattccagaatt

SEQ ID NO: 77201 - DNA, 25 bp, probe
acatccgattcaatagttactatgc

SEQ ID NO: 77202 - DNA, 25 bp, probe
ctacgttattcctccatcctgacta

SEQ ID NO: 77203 - DNA, 25 bp, probe
tacatccctatcattagcctcacaa

SEQ ID NO: 77204 - DNA, 25 bp, probe
ccaacagattcataccagaatgctt

SEQ ID NO: 77205 - DNA, 25 bp, probe
attgggctcactataataggtagga

SEQ ID NO: 77206 - DNA, 25 bp, probe
acgttattcctccatcctgactaat

SEQ ID NO: 77207 - DNA, 25 bp, probe
caatccactacgttattcctccatc

SEQ ID NO: 77208 - DNA, 25 bp, probe
tctacatccctatcattagcctcac

SEQ ID NO: 77209 - DNA, 25 bp, probe
tttccacatcctttctcactctttc

SEQ ID NO: 77210 - DNA, 25 bp, probe
catttccacatcctttctcactctt

SEQ ID NO: 77211 - DNA, 25 bp, probe
gtcttcctacagttctaccttcttg

SEQ ID NO: 77212 - DNA, 25 bp, probe
ttctaccttcttgccttcttctctt

SEQ ID NO: 77213 - DNA, 25 bp, probe
tacagttctaccttcttgccttctt

SEQ ID NO: 77214 - DNA, 25 bp, probe
actacagtcatctctcactcttact

SEQ ID NO: 77215 - DNA, 25 bp, probe
aactacagtcatctctcactcttac

SEQ ID NO: 77216 - DNA, 25 bp, probe
ctacagttctaccttcttgccttct

SEQ ID NO: 77217 - DNA, 25 bp, probe
tcttcctacagttctaccttcttgc

SEQ ID NO: 77218 - DNA, 25 bp, probe
gaactacagtcatctctcactctta

SEQ ID NO: 77219 - DNA, 25 bp, probe
gttctaccttcttgccttcttctct

SEQ ID NO: 77220 - DNA, 25 bp, probe
agttctaccttcttgccttcttctc

SEQ ID NO: 77221 - DNA, 25 bp, probe
tgtcttcctacagttctaccttctt

SEQ ID NO: 77222 - DNA, 25 bp, probe
gctgccattcttataataccttcct

SEQ ID NO: 77223 - DNA, 25 bp, probe
gttcacacataccaccatatattca

SEQ ID NO: 77224 - DNA, 25 bp, probe
ttgtgtcttcctacagttctacctt

SEQ ID NO: 77225 - DNA, 25 bp, probe
cgaactacagtcatctctcactctt

SEQ ID NO: 77226 - DNA, 25 bp, probe
cagttctaccttcttgccttcttct

SEQ ID NO: 77227 - DNA, 25 bp, probe
gtgtcttcctacagttctaccttct

SEQ ID NO: 77228 - DNA, 25 bp, probe
tgtgtcttcctacagttctaccttc

SEQ ID NO: 77229 - DNA, 25 bp, probe
tatccgagtcaacaagatatatggc

SEQ ID NO: 77230 - DNA, 25 bp, probe
ggctgccattcttataataccttcc

SEQ ID NO: 77231 - DNA, 25 bp, probe
acagttctaccttcttgccttcttc

SEQ ID NO: 77232 - DNA, 25 bp, probe
cctacagttctaccttcttgccttc

SEQ ID NO: 77233 - DNA, 25 bp, probe
cttcctacagttctaccttcttgcc

SEQ ID NO: 77234 - DNA, 25 bp, probe
ctatcgaactacagtcatctctcac

SEQ ID NO: 77235 - DNA, 25 bp, probe
ctgccattcttataataccttcctt

SEQ ID NO: 77236 - DNA, 25 bp, probe
ttcacacataccaccatatattcat

SEQ ID NO: 77237 - DNA, 25 bp, probe
tcctacagttctaccttcttgcctt

SEQ ID NO: 77238 - DNA, 25 bp, probe
ttcctacagttctaccttcttgcct

SEQ ID NO: 77239 - DNA, 25 bp, probe
tcaaatctttacctgttagtcccac

SEQ ID NO: 77240 - DNA, 25 bp, probe
gtcaaatctttacctgttagtccca

SEQ ID NO: 77241 - DNA, 25 bp, probe
tgtcaaatctttacctgttagtccc

SEQ ID NO: 77242 - DNA, 25 bp, probe
cactatcgaactacagtcatctctc

SEQ ID NO: 77243 - DNA, 25 bp, probe
aacactatcgaactacagtcatctc

SEQ ID NO: 77244 - DNA, 25 bp, probe
tcctcttgtcaaatctttacctgtt

SEQ ID NO: 77245 - DNA, 25 bp, probe
atcctcttgtcaaatctttacctgt

SEQ ID NO: 77246 - DNA, 25 bp, probe
tatcgaactacagtcatctctcact

SEQ ID NO: 77247 - DNA, 25 bp, probe
actatcgaactacagtcatctctca

SEQ ID NO: 77248 - DNA, 25 bp, probe
acactatcgaactacagtcatctct

SEQ ID NO: 77249 - DNA, 25 bp, probe
ccaccatatattcatatcctcttgt

SEQ ID NO: 77250 - DNA, 25 bp, probe
accaccatatattcatatcctcttg

SEQ ID NO: 77251 - DNA, 25 bp, probe
cttcttgccttcttctctttcttca

SEQ ID NO: 77252 - DNA, 25 bp, probe
ggttcacacataccaccatatattc

SEQ ID NO: 77253 - DNA, 25 bp, probe
ctaccttcttgccttcttctctttc

SEQ ID NO: 77254 - DNA, 25 bp, probe
ttgtcaaatctttacctgttagtcc

SEQ ID NO: 77255 - DNA, 25 bp, probe
attaactgacgaagaagcaactaag

SEQ ID NO: 77256 - DNA, 25 bp, probe
taataccatcactgacacttacctt

SEQ ID NO: 77257 - DNA, 25 bp, probe
ataataccatcactgacacttacct

SEQ ID NO: 77258 - DNA, 25 bp, probe
ttccttgataagtatgctgaagtgc

SEQ ID NO: 77259 - DNA, 25 bp, probe
attccttgataagtatgctgaagtg

SEQ ID NO: 77260 - DNA, 25 bp, probe
ttaactgacgaagaagcaactaagt

SEQ ID NO: 77261 - DNA, 25 bp, probe
aataataccatcactgacacttacc

SEQ ID NO: 77262 - DNA, 25 bp, probe
tattaactgacgaagaagcaactaa

SEQ ID NO: 77263 - DNA, 25 bp, probe
acttcaataataccatcactgacac

SEQ ID NO: 77264 - DNA, 25 bp, probe
ctgacgaagaagcaactaagttaat

SEQ ID NO: 77265 - DNA, 25 bp, probe
atattaactgacgaagaagcaacta

SEQ ID NO: 77266 - DNA, 25 bp, probe
cttcaataataccatcactgacact

SEQ ID NO: 77267 - DNA, 25 bp, probe
actgacgaagaagcaactaagttaa

SEQ ID NO: 77268 - DNA, 25 bp, probe
aattccttgataagtatgctgaagt

SEQ ID NO: 77269 - DNA, 25 bp, probe
ttcataatcaactaaggaagaacga

SEQ ID NO: 77270 - DNA, 25 bp, probe
atcaactaaggaagaacgatcaatt

SEQ ID NO: 77271 - DNA, 25 bp, probe
aatcaactaaggaagaacgatcaat

SEQ ID NO: 77272 - DNA, 25 bp, probe
tcataatcaactaaggaagaacgat

SEQ ID NO: 77273 - DNA, 25 bp, probe
ttcaataataccatcactgacactt

SEQ ID NO: 77274 - DNA, 25 bp, probe
aacttcaataataccatcactgaca

SEQ ID NO: 77275 - DNA, 25 bp, probe
acaacttcaataataccatcactga

SEQ ID NO: 77276 - DNA, 25 bp, probe
aatattaactgacgaagaagcaact

SEQ ID NO: 77277 - DNA, 25 bp, probe
caataataccatcactgacacttac

SEQ ID NO: 77278 - DNA, 25 bp, probe
caacttcaataataccatcactgac

SEQ ID NO: 77279 - DNA, 25 bp, probe
tgacgaagaagcaactaagttaata

SEQ ID NO: 77280 - DNA, 25 bp, probe
taatcaactaaggaagaacgatcaa

SEQ ID NO: 77281 - DNA, 25 bp, probe
ataatcaactaaggaagaacgatca

SEQ ID NO: 77282 - DNA, 25 bp, probe
tccttgataagtatgctgaagtgcc

SEQ ID NO: 77283 - DNA, 25 bp, probe
accatcactgacacttacctttatt

SEQ ID NO: 77284 - DNA, 25 bp, probe
aataccatcactgacacttaccttt

SEQ ID NO: 77285 - DNA, 25 bp, probe
tcaataataccatcactgacactta

SEQ ID NO: 77286 - DNA, 25 bp, probe
cataatcaactaaggaagaacgatc

SEQ ID NO: 77287 - DNA, 25 bp, probe
cccaaatgaagagactccaatgtaa

SEQ ID NO: 77288 - DNA, 25 bp, probe
taccatcactgacacttacctttat

SEQ ID NO: 77289 - DNA, 25 bp, probe
ataccatcactgacacttaccttta

SEQ ID NO: 77290 - DNA, 25 bp, probe
ccaaatgaagagactccaatgtaaa

SEQ ID NO: 77291 - DNA, 25 bp, probe
tacaacttcaataataccatcactg

SEQ ID NO: 77292 - DNA, 25 bp, probe
gacgaagaagcaactaagttaataa

SEQ ID NO: 77293 - DNA, 25 bp, probe
gcataactactgagaggaaagtgat

SEQ ID NO: 77294 - DNA, 25 bp, probe
aactactgagaggaaagtgattgat

SEQ ID NO: 77295 - DNA, 25 bp, probe
tgaagagactccaatgtaaacaaat

SEQ ID NO: 77296 - DNA, 25 bp, probe
atgaagagactccaatgtaaacaaa

SEQ ID NO: 77297 - DNA, 25 bp, probe
aatgaagagactccaatgtaaacaa

SEQ ID NO: 77298 - DNA, 25 bp, probe
aaatgaagagactccaatgtaaaca

SEQ ID NO: 77299 - DNA, 25 bp, probe
aagaaagtcaaagaccaccgaggag

SEQ ID NO: 77300 - DNA, 25 bp, probe
caagaaagtcaaagaccaccgagga

SEQ ID NO: 77301 - DNA, 25 bp, probe
gaaagtcaaagaccaccgaggagag

SEQ ID NO: 77302 - DNA, 25 bp, probe
ctttgtgcagaaagtcagggatacg

SEQ ID NO: 77303 - DNA, 25 bp, probe
agaaagtcaaagaccaccgaggaga

SEQ ID NO: 77304 - DNA, 25 bp, probe
tttgtgcagaaagtcagggatacgg

SEQ ID NO: 77305 - DNA, 25 bp, probe
actttgtgcagaaagtcagggatac

SEQ ID NO: 77306 - DNA, 25 bp, probe
cactttgtgcagaaagtcagggata

SEQ ID NO: 77307 - DNA, 25 bp, probe
cgctattgtttaatggctgtgttta

SEQ ID NO: 77308 - DNA, 25 bp, probe
tatctcaacgctattgtttaatggc

SEQ ID NO: 77309 - DNA, 25 bp, probe
tgtttaatggctgtgtttaatgtga

SEQ ID NO: 77310 - DNA, 25 bp, probe
cattgtatggatttatctcaacgct

SEQ ID NO: 77311 - DNA, 25 bp, probe
acattgtatggatttatctcaacgc

SEQ ID NO: 77312 - DNA, 25 bp, probe
gctgtgtttaatgtgatctatctgg

SEQ ID NO: 77313 - DNA, 25 bp, probe
ggctgtgtttaatgtgatctatctg

SEQ ID NO: 77314 - DNA, 25 bp, probe
tggctgtgtttaatgtgatctatct

SEQ ID NO: 77315 - DNA, 25 bp, probe
tggatttatctcaacgctattgttt

SEQ ID NO: 77316 - DNA, 25 bp, probe
ttgtttaatggctgtgtttaatgtg

SEQ ID NO: 77317 - DNA, 25 bp, probe
atctcaacgctattgtttaatggct

SEQ ID NO: 77318 - DNA, 25 bp, probe
atggatttatctcaacgctattgtt

SEQ ID NO: 77319 - DNA, 25 bp, probe
atggctgtgtttaatgtgatctatc

SEQ ID NO: 77320 - DNA, 25 bp, probe
tgtatggatttatctcaacgctatt

SEQ ID NO: 77321 - DNA, 25 bp, probe
gtttaatggctgtgtttaatgtgat

SEQ ID NO: 77322 - DNA, 25 bp, probe
gctattgtttaatggctgtgtttaa

SEQ ID NO: 77323 - DNA, 25 bp, probe
aatggctgtgtttaatgtgatctat

SEQ ID NO: 77324 - DNA, 25 bp, probe
acgctattgtttaatggctgtgttt

SEQ ID NO: 77325 - DNA, 25 bp, probe
ttaatggctgtgtttaatgtgatct

SEQ ID NO: 77326 - DNA, 25 bp, probe
attgtttaatggctgtgtttaatgt

SEQ ID NO: 77327 - DNA, 25 bp, probe
tatggatttatctcaacgctattgt

SEQ ID NO: 77328 - DNA, 25 bp, probe
ttgtatggatttatctcaacgctat

SEQ ID NO: 77329 - DNA, 25 bp, probe
attgtatggatttatctcaacgcta

SEQ ID NO: 77330 - DNA, 25 bp, probe
ctgtgtttaatgtgatctatctgga

SEQ ID NO: 77331 - DNA, 25 bp, probe
aacgctattgtttaatggctgtgtt

SEQ ID NO: 77332 - DNA, 25 bp, probe
tctcaacgctattgtttaatggctg

SEQ ID NO: 77333 - DNA, 25 bp, probe
taatggctgtgtttaatgtgatcta

SEQ ID NO: 77334 - DNA, 25 bp, probe
gtatggatttatctcaacgctattg

SEQ ID NO: 77335 - DNA, 25 bp, probe
ctgaacaagatggtcaagcaagtga

SEQ ID NO: 77336 - DNA, 25 bp, probe
ctcaacgctattgtttaatggctgt

SEQ ID NO: 77337 - DNA, 25 bp, probe
tttaatggctgtgtttaatgtgatc

SEQ ID NO: 77338 - DNA, 25 bp, probe
tgtgtttaatgtgatctatctggaa

SEQ ID NO: 77339 - DNA, 25 bp, probe
ttatctcaacgctattgtttaatgg

SEQ ID NO: 77340 - DNA, 25 bp, probe
tcaacgctattgtttaatggctgtg

SEQ ID NO: 77341 - DNA, 25 bp, probe
ggatttatctcaacgctattgttta

SEQ ID NO: 77342 - DNA, 25 bp, probe
caacgctattgtttaatggctgtgt

SEQ ID NO: 77343 - DNA, 25 bp, probe
gatcctgaacctgaacaagatggtc

SEQ ID NO: 77344 - DNA, 25 bp, probe
gtgtttaatgtgatctatctggaaa

SEQ ID NO: 77345 - DNA, 25 bp, probe
cctgaacctgaacaagatggtcaag

SEQ ID NO: 77346 - DNA, 25 bp, probe
tacattgtatggatttatctcaacg

SEQ ID NO: 77347 - DNA, 25 bp, probe
cctgaacaagatggtcaagcaagtg

SEQ ID NO: 77348 - DNA, 25 bp, probe
aacctgaacaagatggtcaagcaag

SEQ ID NO: 77349 - DNA, 25 bp, probe
gaacctgaacaagatggtcaagcaa

SEQ ID NO: 77350 - DNA, 25 bp, probe
atcctgaacctgaacaagatggtca

SEQ ID NO: 77351 - DNA, 25 bp, probe
atgccctctcttatgtggtacaata

SEQ ID NO: 77352 - DNA, 25 bp, probe
acatgaatgctgtttgggtacttaa

SEQ ID NO: 77353 - DNA, 25 bp, probe
tgccctctcttatgtggtacaatac

SEQ ID NO: 77354 - DNA, 25 bp, probe
gatgccctctcttatgtggtacaat

SEQ ID NO: 77355 - DNA, 25 bp, probe
gaatgctgtttgggtacttaagaaa

SEQ ID NO: 77356 - DNA, 25 bp, probe
atgaatgctgtttgggtacttaaga

SEQ ID NO: 77357 - DNA, 25 bp, probe
catgaatgctgtttgggtacttaag

SEQ ID NO: 77358 - DNA, 25 bp, probe
tgaatgctgtttgggtacttaagaa

SEQ ID NO: 77359 - DNA, 25 bp, probe
atgctgtttgggtacttaagaaatt

SEQ ID NO: 77360 - DNA, 25 bp, probe
aatgctgtttgggtacttaagaaat

SEQ ID NO: 77361 - DNA, 25 bp, probe
tgatgccctctcttatgtggtacaa

SEQ ID NO: 77362 - DNA, 25 bp, probe
aacatgaatgctgtttgggtactta

SEQ ID NO: 77363 - DNA, 25 bp, probe
acatttgaacatgaatgctgtttgg

SEQ ID NO: 77364 - DNA, 25 bp, probe
tttgaacatgaatgctgtttgggta

SEQ ID NO: 77365 - DNA, 25 bp, probe
catttgaacatgaatgctgtttggg

SEQ ID NO: 77366 - DNA, 25 bp, probe
gaacatgaatgctgtttgggtactt

SEQ ID NO: 77367 - DNA, 25 bp, probe
gtgatgccctctcttatgtggtaca

SEQ ID NO: 77368 - DNA, 25 bp, probe
atttgaacatgaatgctgtttgggt

SEQ ID NO: 77369 - DNA, 25 bp, probe
ttgaacatgaatgctgtttgggtac

SEQ ID NO: 77370 - DNA, 25 bp, probe
gccctctcttatgtggtacaatacc

SEQ ID NO: 77371 - DNA, 25 bp, probe
ggtgatgccctctcttatgtggtac

SEQ ID NO: 77372 - DNA, 25 bp, probe
tgaacatgaatgctgtttgggtact

SEQ ID NO: 77373 - DNA, 25 bp, probe
actttgttttgatgagggtgatgcc

SEQ ID NO: 77374 - DNA, 25 bp, probe
ctttgttttgatgagggtgatgccc

SEQ ID NO: 77375 - DNA, 25 bp, probe
catctgggtttgtttacagcaattc

SEQ ID NO: 77376 - DNA, 25 bp, probe
tttgtttacagcaattcctggactc

SEQ ID NO: 77377 - DNA, 25 bp, probe
atctgggtttgtttacagcaattcc

SEQ ID NO: 77378 - DNA, 25 bp, probe
gtttgtttacagcaattcctggact

SEQ ID NO: 77379 - DNA, 25 bp, probe
ctgggtttgtttacagcaattcctg

SEQ ID NO: 77380 - DNA, 25 bp, probe
gcatctgggtttgtttacagcaatt

SEQ ID NO: 77381 - DNA, 25 bp, probe
ggtttgtttacagcaattcctggac

SEQ ID NO: 77382 - DNA, 25 bp, probe
tctgggtttgtttacagcaattcct

SEQ ID NO: 77383 - DNA, 25 bp, probe
ttgatcctgcatctgggtttgttta

SEQ ID NO: 77384 - DNA, 25 bp, probe
ttgtttacagcaattcctggactcg

SEQ ID NO: 77385 - DNA, 25 bp, probe
gggtttgtttacagcaattcctgga

SEQ ID NO: 77386 - DNA, 25 bp, probe
gatcctgcatctgggtttgtttaca

SEQ ID NO: 77387 - DNA, 25 bp, probe
tgatcctgcatctgggtttgtttac

SEQ ID NO: 77388 - DNA, 25 bp, probe
tgggtttgtttacagcaattcctgg

SEQ ID NO: 77389 - DNA, 25 bp, probe
aatgaagtgacactttgacatttcc

SEQ ID NO: 77390 - DNA, 25 bp, probe
acaatgaagtgacactttgacattt

SEQ ID NO: 77391 - DNA, 25 bp, probe
gacaatgaagtgacactttgacatt

SEQ ID NO: 77392 - DNA, 25 bp, probe
aatgacaatgaagtgacactttgac

SEQ ID NO: 77393 - DNA, 25 bp, probe
gaagtgacactttgacatttccaaa

SEQ ID NO: 77394 - DNA, 25 bp, probe
caatgaagtgacactttgacatttc

SEQ ID NO: 77395 - DNA, 25 bp, probe
atgaagtgacactttgacatttcca

SEQ ID NO: 77396 - DNA, 25 bp, probe
tgacaatgaagtgacactttgacat

SEQ ID NO: 77397 - DNA, 25 bp, probe
atgacaatgaagtgacactttgaca

SEQ ID NO: 77398 - DNA, 25 bp, probe
taatgacaatgaagtgacactttga

SEQ ID NO: 77399 - DNA, 25 bp, probe
tgaagtgacactttgacatttccaa

SEQ ID NO: 77400 - DNA, 25 bp, probe
atcctgcatctgggtttgtttacag

SEQ ID NO: 77401 - DNA, 25 bp, probe
ttaatgacaatgaagtgacactttg

SEQ ID NO: 77402 - DNA, 25 bp, probe
gttgatcctgcatctgggtttgttt

SEQ ID NO: 77403 - DNA, 25 bp, probe
gtattttggtcacagggtggttttg

SEQ ID NO: 77404 - DNA, 25 bp, probe
tttaatgacaatgaagtgacacttt

SEQ ID NO: 77405 - DNA, 25 bp, probe
tattttggtcacagggtggttttgg

SEQ ID NO: 77406 - DNA, 25 bp, probe
ggtattttggtcacagggtggtttt

SEQ ID NO: 77407 - DNA, 25 bp, probe
tgtttacagcaattcctggactcgg

SEQ ID NO: 77408 - DNA, 25 bp, probe
aagtgacactttgacatttccaaaa

SEQ ID NO: 77409 - DNA, 25 bp, probe
tgcatctgggtttgtttacagcaat

SEQ ID NO: 77410 - DNA, 25 bp, probe
ctgcatctgggtttgtttacagcaa

SEQ ID NO: 77411 - DNA, 25 bp, probe
ctgagaagggttgatcctgcatctg

SEQ ID NO: 77412 - DNA, 25 bp, probe
ttttaatgacaatgaagtgacactt

SEQ ID NO: 77413 - DNA, 25 bp, probe
ttggtcacagggtggttttggttta

SEQ ID NO: 77414 - DNA, 25 bp, probe
tggtcacagggtggttttggtttag

SEQ ID NO: 77415 - DNA, 25 bp, probe
gggtattttggtcacagggtggttt

SEQ ID NO: 77416 - DNA, 25 bp, probe
cctgctcatggtcttcgagtatatg

SEQ ID NO: 77417 - DNA, 25 bp, probe
ctgctcatggtcttcgagtatatgc

SEQ ID NO: 77418 - DNA, 25 bp, probe
ccctgctcatggtcttcgagtatat

SEQ ID NO: 77419 - DNA, 25 bp, probe
tgctcatggtcttcgagtatatgcg

SEQ ID NO: 77420 - DNA, 25 bp, probe
gtcttcccttccctatagacatccc

SEQ ID NO: 77421 - DNA, 25 bp, probe
cgtcttcccttccctatagacatcc

SEQ ID NO: 77422 - DNA, 25 bp, probe
ccgtcttcccttccctatagacatc

SEQ ID NO: 77423 - DNA, 25 bp, probe
cccgtcttcccttccctatagacat

SEQ ID NO: 77424 - DNA, 25 bp, probe
tgtagagtagacacagtgagtatgt

SEQ ID NO: 77425 - DNA, 25 bp, probe
gtattacacatattagccacgagtt

SEQ ID NO: 77426 - DNA, 25 bp, probe
ttactcatctgaatccatcaactga

SEQ ID NO: 77427 - DNA, 25 bp, probe
tcatctgaatccatcaactgagtat

SEQ ID NO: 77428 - DNA, 25 bp, probe
cttactcatctgaatccatcaactg

SEQ ID NO: 77429 - DNA, 25 bp, probe
tcttactcatctgaatccatcaact

SEQ ID NO: 77430 - DNA, 25 bp, probe
ttatgtctggactacagttcaagtg

SEQ ID NO: 77431 - DNA, 25 bp, probe
aagagtagttgaactgagcaatacc

SEQ ID NO: 77432 - DNA, 25 bp, probe
tgtattacacatattagccacgagt

SEQ ID NO: 77433 - DNA, 25 bp, probe
atcttactcatctgaatccatcaac

SEQ ID NO: 77434 - DNA, 25 bp, probe
tgttgtattacacatattagccacg

SEQ ID NO: 77435 - DNA, 25 bp, probe
gttgtattacacatattagccacga

SEQ ID NO: 77436 - DNA, 25 bp, probe
gagtagttgaactgagcaatacctc

SEQ ID NO: 77437 - DNA, 25 bp, probe
agagtagttgaactgagcaatacct

SEQ ID NO: 77438 - DNA, 25 bp, probe
ttgtattacacatattagccacgag

SEQ ID NO: 77439 - DNA, 25 bp, probe
gctatgtgaggaattacttacagaa

SEQ ID NO: 77440 - DNA, 25 bp, probe
atacctcctcctgtgttgtattaca

SEQ ID NO: 77441 - DNA, 25 bp, probe
catctgaatccatcaactgagtata

SEQ ID NO: 77442 - DNA, 25 bp, probe
taagagtagttgaactgagcaatac

SEQ ID NO: 77443 - DNA, 25 bp, probe
tatgtctggactacagttcaagtgg

SEQ ID NO: 77444 - DNA, 25 bp, probe
aataagagtagttgaactgagcaat

SEQ ID NO: 77445 - DNA, 25 bp, probe
aatcttactcatctgaatccatcaa

SEQ ID NO: 77446 - DNA, 25 bp, probe
agaataataccacaacacttatggc

SEQ ID NO: 77447 - DNA, 25 bp, probe
aatctactggataacaccttctggt

SEQ ID NO: 77448 - DNA, 25 bp, probe
tagttgaactgagcaatacctcctc

SEQ ID NO: 77449 - DNA, 25 bp, probe
aaatctactggataacaccttctgg

SEQ ID NO: 77450 - DNA, 25 bp, probe
cctgaaatctactggataacacctt

SEQ ID NO: 77451 - DNA, 25 bp, probe
atctactggataacaccttctggtc

SEQ ID NO: 77452 - DNA, 25 bp, probe
gaggaattacttacagaaaccaacc

SEQ ID NO: 77453 - DNA, 25 bp, probe
gaccagataaacttgaattgacacg

SEQ ID NO: 77454 - DNA, 25 bp, probe
tgaccagataaacttgaattgacac

SEQ ID NO: 77455 - DNA, 25 bp, probe
gtgaccagataaacttgaattgaca

SEQ ID NO: 77456 - DNA, 25 bp, probe
gtagttgaactgagcaatacctcct

SEQ ID NO: 77457 - DNA, 25 bp, probe
agtagttgaactgagcaatacctcc

SEQ ID NO: 77458 - DNA, 25 bp, probe
acagctatgtgaggaattacttaca

SEQ ID NO: 77459 - DNA, 25 bp, probe
ggaattacttacagaaaccaacctt

SEQ ID NO: 77460 - DNA, 25 bp, probe
gggaacactagatataaatggcgta

SEQ ID NO: 77461 - DNA, 25 bp, probe
tgagggaacactagatataaatggc

SEQ ID NO: 77462 - DNA, 25 bp, probe
actagatataaatggcgtaactccc

SEQ ID NO: 77463 - DNA, 25 bp, probe
tgaaatctactggataacaccttct

SEQ ID NO: 77464 - DNA, 25 bp, probe
attacttacagaaaccaacctttgc

SEQ ID NO: 77465 - DNA, 25 bp, probe
tgaggaattacttacagaaaccaac

SEQ ID NO: 77466 - DNA, 25 bp, probe
gtgaggaattacttacagaaaccaa

SEQ ID NO: 77467 - DNA, 25 bp, probe
atctgaatccatcaactgagtataa

SEQ ID NO: 77468 - DNA, 25 bp, probe
ttgatgaagaaggagctgaactact

SEQ ID NO: 77469 - DNA, 25 bp, probe
cttccatgtcaagattcagctagtg

SEQ ID NO: 77470 - DNA, 25 bp, probe
tgatgaagaaggagctgaactactt

SEQ ID NO: 77471 - DNA, 25 bp, probe
gctcatcaataatatgctggacaaa

SEQ ID NO: 77472 - DNA, 25 bp, probe
aaccttccatgtcaagattcagcta

SEQ ID NO: 77473 - DNA, 25 bp, probe
tcatcaataatatgctggacaaagt

SEQ ID NO: 77474 - DNA, 25 bp, probe
aattccatttgtaggtagtgagaca

SEQ ID NO: 77475 - DNA, 25 bp, probe
caaatggaacacggaggataaagtc

SEQ ID NO: 77476 - DNA, 25 bp, probe
gcatacattcttcaagatcccattt

SEQ ID NO: 77477 - DNA, 25 bp, probe
ccttccatgtcaagattcagctagt

SEQ ID NO: 77478 - DNA, 25 bp, probe
accttccatgtcaagattcagctag

SEQ ID NO: 77479 - DNA, 25 bp, probe
ctcatcaataatatgctggacaaag

SEQ ID NO: 77480 - DNA, 25 bp, probe
aaatggaacacggaggataaagtca

SEQ ID NO: 77481 - DNA, 25 bp, probe
aaattccatttgtaggtagtgagac

SEQ ID NO: 77482 - DNA, 25 bp, probe
tgaaattccatttgtaggtagtgag

SEQ ID NO: 77483 - DNA, 25 bp, probe
tcagcatggaaacaagatgaaattc

SEQ ID NO: 77484 - DNA, 25 bp, probe
ctcagcatggaaacaagatgaaatt

SEQ ID NO: 77485 - DNA, 25 bp, probe
tactcagcatggaaacaagatgaaa

SEQ ID NO: 77486 - DNA, 25 bp, probe
gaaattccatttgtaggtagtgaga

SEQ ID NO: 77487 - DNA, 25 bp, probe
ttagctttgtcactgtttcactact

SEQ ID NO: 77488 - DNA, 25 bp, probe
attagctttgtcactgtttcactac

SEQ ID NO: 77489 - DNA, 25 bp, probe
ctactcagcatggaaacaagatgaa

SEQ ID NO: 77490 - DNA, 25 bp, probe
agatccagctcatcaataatatgct

SEQ ID NO: 77491 - DNA, 25 bp, probe
aatggaacacggaggataaagtcag

SEQ ID NO: 77492 - DNA, 25 bp, probe
agctcatcaataatatgctggacaa

SEQ ID NO: 77493 - DNA, 25 bp, probe
tagctttgtcactgtttcactactc

SEQ ID NO: 77494 - DNA, 25 bp, probe
gattagctttgtcactgtttcacta

SEQ ID NO: 77495 - DNA, 25 bp, probe
tttgatgaagaaggagctgaactac

SEQ ID NO: 77496 - DNA, 25 bp, probe
actcagcatggaaacaagatgaaat

SEQ ID NO: 77497 - DNA, 25 bp, probe
atgaaattccatttgtaggtagtga

SEQ ID NO: 77498 - DNA, 25 bp, probe
catacattcttcaagatcccatttg

SEQ ID NO: 77499 - DNA, 25 bp, probe
catcaataatatgctggacaaagtc

SEQ ID NO: 77500 - DNA, 25 bp, probe
gatgaagaaggagctgaactacttt

SEQ ID NO: 77501 - DNA, 25 bp, probe
tcactactcagcatggaaacaagat

SEQ ID NO: 77502 - DNA, 25 bp, probe
atgaagaaggagctgaactactttg

SEQ ID NO: 77503 - DNA, 25 bp, probe
gatgaaattccatttgtaggtagtg

SEQ ID NO: 77504 - DNA, 25 bp, probe
atgattagctttgtcactgtttcac

SEQ ID NO: 77505 - DNA, 25 bp, probe
gtgactaaaccattgtgcattctag

SEQ ID NO: 77506 - DNA, 25 bp, probe
cactactcagcatggaaacaagatg

SEQ ID NO: 77507 - DNA, 25 bp, probe
agtgactaaaccattgtgcattcta

SEQ ID NO: 77508 - DNA, 25 bp, probe
tagtgactaaaccattgtgcattct

SEQ ID NO: 77509 - DNA, 25 bp, probe
agatgaaattccatttgtaggtagt

SEQ ID NO: 77510 - DNA, 25 bp, probe
ctttgtcactgtttcactactcagc

SEQ ID NO: 77511 - DNA, 25 bp, probe
gctttgtcactgtttcactactcag

SEQ ID NO: 77512 - DNA, 25 bp, probe
ccacttcttcattctctcggtatag

SEQ ID NO: 77513 - DNA, 25 bp, probe
tccacttcttcattctctcggtata

SEQ ID NO: 77514 - DNA, 25 bp, probe
ttccacttcttcattctctcggtat

SEQ ID NO: 77515 - DNA, 25 bp, probe
cacttcttcattctctcggtatagt

SEQ ID NO: 77516 - DNA, 25 bp, probe
acttcttcattctctcggtatagtt

SEQ ID NO: 77517 - DNA, 25 bp, probe
taatccttgttagagttatccctgc

SEQ ID NO: 77518 - DNA, 25 bp, probe
tatttccacttcttcattctctcgg

SEQ ID NO: 77519 - DNA, 25 bp, probe
gctgttgctctggtatttcctataa

SEQ ID NO: 77520 - DNA, 25 bp, probe
ccttagtgctcctttatccaatttg

SEQ ID NO: 77521 - DNA, 25 bp, probe
tccttagtgctcctttatccaattt

SEQ ID NO: 77522 - DNA, 25 bp, probe
gtccttagtgctcctttatccaatt

SEQ ID NO: 77523 - DNA, 25 bp, probe
cttagtgctcctttatccaatttgt

SEQ ID NO: 77524 - DNA, 25 bp, probe
agtccttagtgctcctttatccaat

SEQ ID NO: 77525 - DNA, 25 bp, probe
gctgagctatgtagtatgctatgat

SEQ ID NO: 77526 - DNA, 25 bp, probe
atatttccacttcttcattctctcg

SEQ ID NO: 77527 - DNA, 25 bp, probe
agctgagctatgtagtatgctatga

SEQ ID NO: 77528 - DNA, 25 bp, probe
tttccacttcttcattctctcggta

SEQ ID NO: 77529 - DNA, 25 bp, probe
gtgctcctttatccaatttgtactt

SEQ ID NO: 77530 - DNA, 25 bp, probe
cttcttcattctctcggtatagttt

SEQ ID NO: 77531 - DNA, 25 bp, probe
tatacccatcagtgattcattccca

SEQ ID NO: 77532 - DNA, 25 bp, probe
atttccacttcttcattctctcggt

SEQ ID NO: 77533 - DNA, 25 bp, probe
ttattgtctttggcattaacagtgt

SEQ ID NO: 77534 - DNA, 25 bp, probe
tagtgctcctttatccaatttgtac

SEQ ID NO: 77535 - DNA, 25 bp, probe
ttagtgctcctttatccaatttgta

SEQ ID NO: 77536 - DNA, 25 bp, probe
tgctcctttatccaatttgtacttg

SEQ ID NO: 77537 - DNA, 25 bp, probe
agtgctcctttatccaatttgtact

SEQ ID NO: 77538 - DNA, 25 bp, probe
gctcctttatccaatttgtacttga

SEQ ID NO: 77539 - DNA, 25 bp, probe
gtctttggcattaacagtgtttcaa

SEQ ID NO: 77540 - DNA, 25 bp, probe
atacccatcagtgattcattcccaa

SEQ ID NO: 77541 - DNA, 25 bp, probe
tttattgtctttggcattaacagtg

SEQ ID NO: 77542 - DNA, 25 bp, probe
gaaggctctgttccacatatatttc

SEQ ID NO: 77543 - DNA, 25 bp, probe
attgtctttggcattaacagtgttt

SEQ ID NO: 77544 - DNA, 25 bp, probe
gctctgttccacatatatttccact

SEQ ID NO: 77545 - DNA, 25 bp, probe
aaggctctgttccacatatatttcc

SEQ ID NO: 77546 - DNA, 25 bp, probe
gagtccttagtgctcctttatccaa

SEQ ID NO: 77547 - DNA, 25 bp, probe
acctccatgtttctaagtaatatgc

SEQ ID NO: 77548 - DNA, 25 bp, probe
tacccatcagtgattcattcccaaa

SEQ ID NO: 77549 - DNA, 25 bp, probe
tattgtctttggcattaacagtgtt

SEQ ID NO: 77550 - DNA, 25 bp, probe
ttgtctttggcattaacagtgtttc

SEQ ID NO: 77551 - DNA, 25 bp, probe
cctccatgtttctaagtaatatgct

SEQ ID NO: 77552 - DNA, 25 bp, probe
tcagtgattcattcccaaatcttct

SEQ ID NO: 77553 - DNA, 25 bp, probe
ataatccttgttagagttatccctg

SEQ ID NO: 77554 - DNA, 25 bp, probe
ttccacatatatttccacttcttca

SEQ ID NO: 77555 - DNA, 25 bp, probe
ctgttccacatatatttccacttct

SEQ ID NO: 77556 - DNA, 25 bp, probe
attccaccaccaataatcatctcat

SEQ ID NO: 77557 - DNA, 25 bp, probe
ttccaccaccaataatcatctcatt

SEQ ID NO: 77558 - DNA, 25 bp, probe
cattccaccaccaataatcatctca

SEQ ID NO: 77559 - DNA, 25 bp, probe
ccattccaccaccaataatcatctc

SEQ ID NO: 77560 - DNA, 25 bp, probe
aagtcaacaggcaaggtaatcttca

SEQ ID NO: 77561 - DNA, 25 bp, probe
aagccattccaccaccaataatcat

SEQ ID NO: 77562 - DNA, 25 bp, probe
agtagttcagctccttcttcatcaa

SEQ ID NO: 77563 - DNA, 25 bp, probe
aagtagttcagctccttcttcatca

SEQ ID NO: 77564 - DNA, 25 bp, probe
tttgtccagcatattattgatgagc

SEQ ID NO: 77565 - DNA, 25 bp, probe
accaccaataatcatctcattgact

SEQ ID NO: 77566 - DNA, 25 bp, probe
caccaccaataatcatctcattgac

SEQ ID NO: 77567 - DNA, 25 bp, probe
agtcaacaggcaaggtaatcttcac

SEQ ID NO: 77568 - DNA, 25 bp, probe
ccaccaccaataatcatctcattga

SEQ ID NO: 77569 - DNA, 25 bp, probe
tccaccaccaataatcatctcattg

SEQ ID NO: 77570 - DNA, 25 bp, probe
gccattccaccaccaataatcatct

SEQ ID NO: 77571 - DNA, 25 bp, probe
agccattccaccaccaataatcatc

SEQ ID NO: 77572 - DNA, 25 bp, probe
ccaccaataatcatctcattgactt

SEQ ID NO: 77573 - DNA, 25 bp, probe
aaagtcaacaggcaaggtaatcttc

SEQ ID NO: 77574 - DNA, 25 bp, probe
actttgtccagcatattattgatga

SEQ ID NO: 77575 - DNA, 25 bp, probe
tcaacaggcaaggtaatcttcacac

SEQ ID NO: 77576 - DNA, 25 bp, probe
gtcaacaggcaaggtaatcttcaca

SEQ ID NO: 77577 - DNA, 25 bp, probe
caaagtcaacaggcaaggtaatctt

SEQ ID NO: 77578 - DNA, 25 bp, probe
ttggacattaggtctttgacaatct

SEQ ID NO: 77579 - DNA, 25 bp, probe
atctcattgactttgtccagcatat

SEQ ID NO: 77580 - DNA, 25 bp, probe
ctttgtccagcatattattgatgag

SEQ ID NO: 77581 - DNA, 25 bp, probe
tctcattgactttgtccagcatatt

SEQ ID NO: 77582 - DNA, 25 bp, probe
tttggacattaggtctttgacaatc

SEQ ID NO: 77583 - DNA, 25 bp, probe
ctttggacattaggtctttgacaat

SEQ ID NO: 77584 - DNA, 25 bp, probe
ctcattgactttgtccagcatatta

SEQ ID NO: 77585 - DNA, 25 bp, probe
catctcattgactttgtccagcata

SEQ ID NO: 77586 - DNA, 25 bp, probe
taatcatctcattgactttgtccag

SEQ ID NO: 77587 - DNA, 25 bp, probe
ttgactttgtccagcatattattga

SEQ ID NO: 77588 - DNA, 25 bp, probe
agcatattattgatgagctggatct

SEQ ID NO: 77589 - DNA, 25 bp, probe
ttgtccagcatattattgatgagct

SEQ ID NO: 77590 - DNA, 25 bp, probe
tgactttgtccagcatattattgat

SEQ ID NO: 77591 - DNA, 25 bp, probe
tcattgactttgtccagcatattat

SEQ ID NO: 77592 - DNA, 25 bp, probe
gtagttcagctccttcttcatcaaa

SEQ ID NO: 77593 - DNA, 25 bp, probe
aaagtagttcagctccttcttcatc

SEQ ID NO: 77594 - DNA, 25 bp, probe
gactttgtccagcatattattgatg

SEQ ID NO: 77595 - DNA, 25 bp, probe
aatcatctcattgactttgtccagc

SEQ ID NO: 77596 - DNA, 25 bp, probe
acaaagtcaacaggcaaggtaatct

SEQ ID NO: 77597 - DNA, 25 bp, probe
gctttggacattaggtctttgacaa

SEQ ID NO: 77598 - DNA, 25 bp, probe
caaagtagttcagctccttcttcat

SEQ ID NO: 77599 - DNA, 25 bp, probe
ataatcatctcattgactttgtcca

SEQ ID NO: 77600 - DNA, 25 bp, probe
ctctcctcactcactctgtcttctc

SEQ ID NO: 77601 - DNA, 25 bp, probe
cctctcctcactcactctgtcttct

SEQ ID NO: 77602 - DNA, 25 bp, probe
ggagaaggtgatgatctgggcatat

SEQ ID NO: 77603 - DNA, 25 bp, probe
gagaaggtgatgatctgggcatatg

SEQ ID NO: 77604 - DNA, 25 bp, probe
aatccctctcctcactcactctgtc

SEQ ID NO: 77605 - DNA, 25 bp, probe
gaatccctctcctcactcactctgt

SEQ ID NO: 77606 - DNA, 25 bp, probe
aggagaaggtgatgatctgggcata

SEQ ID NO: 77607 - DNA, 25 bp, probe
agaaggtgatgatctgggcatatgg

SEQ ID NO: 77608 - DNA, 25 bp, probe
gaaggtgatgatctgggcatatggg

SEQ ID NO: 77609 - DNA, 25 bp, probe
aagtgagatgtctggagatcatatt

SEQ ID NO: 77610 - DNA, 25 bp, probe
gtgcttctctacgatatggtgtgtg

SEQ ID NO: 77611 - DNA, 25 bp, probe
agagcctgagcgtttaatttattca

SEQ ID NO: 77612 - DNA, 25 bp, probe
cagagcctgagcgtttaatttattc

SEQ ID NO: 77613 - DNA, 25 bp, probe
agtgagatgtctggagatcatattt

SEQ ID NO: 77614 - DNA, 25 bp, probe
aaagtgagatgtctggagatcatat

SEQ ID NO: 77615 - DNA, 25 bp, probe
ttattcagtacctgtgtttgtgtga

SEQ ID NO: 77616 - DNA, 25 bp, probe
tttattcagtacctgtgtttgtgtg

SEQ ID NO: 77617 - DNA, 25 bp, probe
tgagcgtttaatttattcagtacct

SEQ ID NO: 77618 - DNA, 25 bp, probe
ccagagcctgagcgtttaatttatt

SEQ ID NO: 77619 - DNA, 25 bp, probe
caactctgttatttatggtgtgacc

SEQ ID NO: 77620 - DNA, 25 bp, probe
ccaactctgttatttatggtgtgac

SEQ ID NO: 77621 - DNA, 25 bp, probe
atttattcagtacctgtgtttgtgt

SEQ ID NO: 77622 - DNA, 25 bp, probe
gcgtttaatttattcagtacctgtg

SEQ ID NO: 77623 - DNA, 25 bp, probe
agcgtttaatttattcagtacctgt

SEQ ID NO: 77624 - DNA, 25 bp, probe
aactctgttatttatggtgtgaccc

SEQ ID NO: 77625 - DNA, 25 bp, probe
gagcgtttaatttattcagtacctg

SEQ ID NO: 77626 - DNA, 25 bp, probe
gccaactctgttatttatggtgtga

SEQ ID NO: 77627 - DNA, 25 bp, probe
tgcttctctacgatatggtgtgtgg

SEQ ID NO: 77628 - DNA, 25 bp, probe
cagaagatgaacatgtatagtggct

SEQ ID NO: 77629 - DNA, 25 bp, probe
aatttattcagtacctgtgtttgtg

SEQ ID NO: 77630 - DNA, 25 bp, probe
agaagatgaacatgtatagtggcta

SEQ ID NO: 77631 - DNA, 25 bp, probe
cgtttaatttattcagtacctgtgt

SEQ ID NO: 77632 - DNA, 25 bp, probe
aagatgaacatgtatagtggctaac

SEQ ID NO: 77633 - DNA, 25 bp, probe
tcagaagatgaacatgtatagtggc

SEQ ID NO: 77634 - DNA, 25 bp, probe
agatgaacatgtatagtggctaact

SEQ ID NO: 77635 - DNA, 25 bp, probe
gaagatgaacatgtatagtggctaa

SEQ ID NO: 77636 - DNA, 25 bp, probe
gtcagaagatgaacatgtatagtgg

SEQ ID NO: 77637 - DNA, 25 bp, probe
gcctgtcagaagatgaacatgtata

SEQ ID NO: 77638 - DNA, 25 bp, probe
tattcagtacctgtgtttgtgtgaa

SEQ ID NO: 77639 - DNA, 25 bp, probe
cgccaactctgttatttatggtgtg

SEQ ID NO: 77640 - DNA, 25 bp, probe
gatgaacatgtatagtggctaactt

SEQ ID NO: 77641 - DNA, 25 bp, probe
gttcaaaagtgagatgtctggagat

SEQ ID NO: 77642 - DNA, 25 bp, probe
cctgtcagaagatgaacatgtatag

SEQ ID NO: 77643 - DNA, 25 bp, probe
aacatgtatagtggctaacttaagg

SEQ ID NO: 77644 - DNA, 25 bp, probe
tttctcaagctctgtctgtccaaag

SEQ ID NO: 77645 - DNA, 25 bp, probe
tgtcagaagatgaacatgtatagtg

SEQ ID NO: 77646 - DNA, 25 bp, probe
ttcagtacctgtgtttgtgtgaatg

SEQ ID NO: 77647 - DNA, 25 bp, probe
tttcagttcaaaagtgagatgtctg

SEQ ID NO: 77648 - DNA, 25 bp, probe
ttcaaaagtgagatgtctggagatc

SEQ ID NO: 77649 - DNA, 25 bp, probe
caaaagtgagatgtctggagatcat

SEQ ID NO: 77650 - DNA, 25 bp, probe
ctgtcagaagatgaacatgtatagt

SEQ ID NO: 77651 - DNA, 25 bp, probe
agttcaaaagtgagatgtctggaga

SEQ ID NO: 77652 - DNA, 25 bp, probe
aaaagtgagatgtctggagatcata

SEQ ID NO: 77653 - DNA, 25 bp, probe
agttgtcaatgatgtgcttcaagtg

SEQ ID NO: 77654 - DNA, 25 bp, probe
cagttgtcaatgatgtgcttcaagt

SEQ ID NO: 77655 - DNA, 25 bp, probe
gcaacttcaatgagagggaattaac

SEQ ID NO: 77656 - DNA, 25 bp, probe
acttcaatgagagggaattaactgg

SEQ ID NO: 77657 - DNA, 25 bp, probe
ccagttgtcaatgatgtgcttcaag

SEQ ID NO: 77658 - DNA, 25 bp, probe
aacttcaatgagagggaattaactg

SEQ ID NO: 77659 - DNA, 25 bp, probe
caacttcaatgagagggaattaact

SEQ ID NO: 77660 - DNA, 25 bp, probe
ggcaacttcaatgagagggaattaa

SEQ ID NO: 77661 - DNA, 25 bp, probe
catgtgaatatccaggatacaatga

SEQ ID NO: 77662 - DNA, 25 bp, probe
tcatgtgaatatccaggatacaatg

SEQ ID NO: 77663 - DNA, 25 bp, probe
gttgtcaatgatgtgcttcaagtgg

SEQ ID NO: 77664 - DNA, 25 bp, probe
tatccaggatacaatgattggtgag

SEQ ID NO: 77665 - DNA, 25 bp, probe
gacgacccagatcaagataaagaag

SEQ ID NO: 77666 - DNA, 25 bp, probe
ttcatcaccagctatctcgaagaag

SEQ ID NO: 77667 - DNA, 25 bp, probe
caatgagagggaattaactggcttc

SEQ ID NO: 77668 - DNA, 25 bp, probe
cttcaatgagagggaattaactggc

SEQ ID NO: 77669 - DNA, 25 bp, probe
gatcaagataaagaagcctcccaag

SEQ ID NO: 77670 - DNA, 25 bp, probe
atatccaggatacaatgattggtga

SEQ ID NO: 77671 - DNA, 25 bp, probe
attcctgaagtggctgtagcttatc

SEQ ID NO: 77672 - DNA, 25 bp, probe
gcagaagtcctttcatgtgaatatc

SEQ ID NO: 77673 - DNA, 25 bp, probe
agaagtcctttcatgtgaatatcca

SEQ ID NO: 77674 - DNA, 25 bp, probe
tcaatgagagggaattaactggctt

SEQ ID NO: 77675 - DNA, 25 bp, probe
gaagtcctttcatgtgaatatccag

SEQ ID NO: 77676 - DNA, 25 bp, probe
cagaagtcctttcatgtgaatatcc

SEQ ID NO: 77677 - DNA, 25 bp, probe
agatcaagataaagaagcctcccaa

SEQ ID NO: 77678 - DNA, 25 bp, probe
ttcaatgagagggaattaactggct

SEQ ID NO: 77679 - DNA, 25 bp, probe
aatatccaggatacaatgattggtg

SEQ ID NO: 77680 - DNA, 25 bp, probe
cattcctgaagtggctgtagcttat

SEQ ID NO: 77681 - DNA, 25 bp, probe
tgtgaatatccaggatacaatgatt

SEQ ID NO: 77682 - DNA, 25 bp, probe
ttcatgtgaatatccaggatacaat

SEQ ID NO: 77683 - DNA, 25 bp, probe
tggcaacttcaatgagagggaatta

SEQ ID NO: 77684 - DNA, 25 bp, probe
aatgagagggaattaactggcttca

SEQ ID NO: 77685 - DNA, 25 bp, probe
gaatatccaggatacaatgattggt

SEQ ID NO: 77686 - DNA, 25 bp, probe
tgaatatccaggatacaatgattgg

SEQ ID NO: 77687 - DNA, 25 bp, probe
cagatcaagataaagaagcctccca

SEQ ID NO: 77688 - DNA, 25 bp, probe
acccagatcaagataaagaagcctc

SEQ ID NO: 77689 - DNA, 25 bp, probe
gacccagatcaagataaagaagcct

SEQ ID NO: 77690 - DNA, 25 bp, probe
tgacgacccagatcaagataaagaa

SEQ ID NO: 77691 - DNA, 25 bp, probe
gtgaatatccaggatacaatgattg

SEQ ID NO: 77692 - DNA, 25 bp, probe
atgtgaatatccaggatacaatgat

SEQ ID NO: 77693 - DNA, 25 bp, probe
gagagggaattaactggcttcatca

SEQ ID NO: 77694 - DNA, 25 bp, probe
cacttctttggacagattactgagc

SEQ ID NO: 77695 - DNA, 25 bp, probe
caaggtcactatgaagacaggcaag

SEQ ID NO: 77696 - DNA, 25 bp, probe
agagggaattaactggcttcatcac

SEQ ID NO: 77697 - DNA, 25 bp, probe
aagagttcctagagagagaagacaa

SEQ ID NO: 77698 - DNA, 25 bp, probe
ggatggatatgtcaggaatgtgatt

SEQ ID NO: 77699 - DNA, 25 bp, probe
aatgtgattcttcatcttccaagga

SEQ ID NO: 77700 - DNA, 25 bp, probe
ctacggatggatatgtcaggaatgt

SEQ ID NO: 77701 - DNA, 25 bp, probe
tacggatggatatgtcaggaatgtg

SEQ ID NO: 77702 - DNA, 25 bp, probe
atgtgattcttcatcttccaaggaa

SEQ ID NO: 77703 - DNA, 25 bp, probe
gaatgtgattcttcatcttccaagg

SEQ ID NO: 77704 - DNA, 25 bp, probe
atgtcaggaatgtgattcttcatct

SEQ ID NO: 77705 - DNA, 25 bp, probe
gtcaggaatgtgattcttcatcttc

SEQ ID NO: 77706 - DNA, 25 bp, probe
tgtcaggaatgtgattcttcatctt

SEQ ID NO: 77707 - DNA, 25 bp, probe
tggatatgtcaggaatgtgattctt

SEQ ID NO: 77708 - DNA, 25 bp, probe
atggatatgtcaggaatgtgattct

SEQ ID NO: 77709 - DNA, 25 bp, probe
cggatggatatgtcaggaatgtgat

SEQ ID NO: 77710 - DNA, 25 bp, probe
ggatatgtcaggaatgtgattcttc

SEQ ID NO: 77711 - DNA, 25 bp, probe
gatggatatgtcaggaatgtgattc

SEQ ID NO: 77712 - DNA, 25 bp, probe
gctacggatggatatgtcaggaatg

SEQ ID NO: 77713 - DNA, 25 bp, probe
ggctgaagatttaagaactgaatgt

SEQ ID NO: 77714 - DNA, 25 bp, probe
caaggctgaagatttaagaactgaa

SEQ ID NO: 77715 - DNA, 25 bp, probe
tatgtcaggaatgtgattcttcatc

SEQ ID NO: 77716 - DNA, 25 bp, probe
gatatgtcaggaatgtgattcttca

SEQ ID NO: 77717 - DNA, 25 bp, probe
aggctgaagatttaagaactgaatg

SEQ ID NO: 77718 - DNA, 25 bp, probe
ccaagaagattccgataagaaacac

SEQ ID NO: 77719 - DNA, 25 bp, probe
aagattccgataagaaacacgagaa

SEQ ID NO: 77720 - DNA, 25 bp, probe
aagaagattccgataagaaacacga

SEQ ID NO: 77721 - DNA, 25 bp, probe
caagaagattccgataagaaacacg

SEQ ID NO: 77722 - DNA, 25 bp, probe
aacccaagaagattccgataagaaa

SEQ ID NO: 77723 - DNA, 25 bp, probe
gaacccaagaagattccgataagaa

SEQ ID NO: 77724 - DNA, 25 bp, probe
ccaaggctgaagatttaagaactga

SEQ ID NO: 77725 - DNA, 25 bp, probe
gaagattccgataagaaacacgaga

SEQ ID NO: 77726 - DNA, 25 bp, probe
agaagattccgataagaaacacgag

SEQ ID NO: 77727 - DNA, 25 bp, probe
cccaagaagattccgataagaaaca

SEQ ID NO: 77728 - DNA, 25 bp, probe
acccaagaagattccgataagaaac

SEQ ID NO: 77729 - DNA, 25 bp, probe
agattccgataagaaacacgagaac

SEQ ID NO: 77730 - DNA, 25 bp, probe
ctgaagatttaagaactgaatgtgc

SEQ ID NO: 77731 - DNA, 25 bp, probe
gctgaagatttaagaactgaatgtg

SEQ ID NO: 77732 - DNA, 25 bp, probe
aaggctgaagatttaagaactgaat

SEQ ID NO: 77733 - DNA, 25 bp, probe
tcctagagagagaagacaaagacag

SEQ ID NO: 77734 - DNA, 25 bp, probe
gttcctagagagagaagacaaagac

SEQ ID NO: 77735 - DNA, 25 bp, probe
agttcctagagagagaagacaaaga

SEQ ID NO: 77736 - DNA, 25 bp, probe
gagttcctagagagagaagacaaag

SEQ ID NO: 77737 - DNA, 25 bp, probe
agagttcctagagagagaagacaaa

SEQ ID NO: 77738 - DNA, 25 bp, probe
aaagagttcctagagagagaagaca

SEQ ID NO: 77739 - DNA, 25 bp, probe
agaacccaagaagattccgataaga

SEQ ID NO: 77740 - DNA, 25 bp, probe
cagaacccaagaagattccgataag

SEQ ID NO: 77741 - DNA, 25 bp, probe
aagaaacagaagacgccaacaggta

SEQ ID NO: 77742 - DNA, 25 bp, probe
agaaacagaagacgccaacaggtac

SEQ ID NO: 77743 - DNA, 25 bp, probe
cgaacttgaatacctaatgtctgtc

SEQ ID NO: 77744 - DNA, 25 bp, probe
ccgaacttgaatacctaatgtctgt

SEQ ID NO: 77745 - DNA, 25 bp, probe
tggcttaatagttgaccttctgaat

SEQ ID NO: 77746 - DNA, 25 bp, probe
ttggcttaatagttgaccttctgaa

SEQ ID NO: 77747 - DNA, 25 bp, probe
attggcttaatagttgaccttctga

SEQ ID NO: 77748 - DNA, 25 bp, probe
tgattggcttaatagttgaccttct

SEQ ID NO: 77749 - DNA, 25 bp, probe
gattggcttaatagttgaccttctg

SEQ ID NO: 77750 - DNA, 25 bp, probe
ctccttgattggcttaatagttgac

SEQ ID NO: 77751 - DNA, 25 bp, probe
cctccttgattggcttaatagttga

SEQ ID NO: 77752 - DNA, 25 bp, probe
ttgattggcttaatagttgaccttc

SEQ ID NO: 77753 - DNA, 25 bp, probe
cttgattggcttaatagttgacctt

SEQ ID NO: 77754 - DNA, 25 bp, probe
ccttgattggcttaatagttgacct

SEQ ID NO: 77755 - DNA, 25 bp, probe
tccttgattggcttaatagttgacc

SEQ ID NO: 77756 - DNA, 25 bp, probe
ggcttaatagttgaccttctgaatt

SEQ ID NO: 77757 - DNA, 25 bp, probe
gaacttgaatacctaatgtctgtca

SEQ ID NO: 77758 - DNA, 25 bp, probe
aacttgaatacctaatgtctgtcag

SEQ ID NO: 77759 - DNA, 25 bp, probe
acttgaatacctaatgtctgtcagg

SEQ ID NO: 77760 - DNA, 25 bp, probe
ttgaatacctaatgtctgtcaggag

SEQ ID NO: 77761 - DNA, 25 bp, probe
cttgaatacctaatgtctgtcagga

SEQ ID NO: 77762 - DNA, 25 bp, probe
gaatacctaatgtctgtcaggagtg

SEQ ID NO: 77763 - DNA, 25 bp, probe
aatacctaatgtctgtcaggagtga

SEQ ID NO: 77764 - DNA, 25 bp, probe
tgaatacctaatgtctgtcaggagt

SEQ ID NO: 77765 - DNA, 25 bp, probe
cccgaacttgaatacctaatgtctg

SEQ ID NO: 77766 - DNA, 25 bp, probe
attctgagttggacttcatctttct

SEQ ID NO: 77767 - DNA, 25 bp, probe
acaaattctgagttggacttcatct

SEQ ID NO: 77768 - DNA, 25 bp, probe
cacaaattctgagttggacttcatc

SEQ ID NO: 77769 - DNA, 25 bp, probe
caaattctgagttggacttcatctt

SEQ ID NO: 77770 - DNA, 25 bp, probe
aattctgagttggacttcatctttc

SEQ ID NO: 77771 - DNA, 25 bp, probe
ttctgagttggacttcatctttctc

SEQ ID NO: 77772 - DNA, 25 bp, probe
aataatcaagatttgtgacttcggg

SEQ ID NO: 77773 - DNA, 25 bp, probe
ataatcaagatttgtgacttcgggt

SEQ ID NO: 77774 - DNA, 25 bp, probe
taatcaagatttgtgacttcgggtt

SEQ ID NO: 77775 - DNA, 25 bp, probe
aagcgtattatggcaaacacttcaa

SEQ ID NO: 77776 - DNA, 25 bp, probe
aaagcgtattatggcaaacacttca

SEQ ID NO: 77777 - DNA, 25 bp, probe
aaattctgagttggacttcatcttt

SEQ ID NO: 77778 - DNA, 25 bp, probe
ctgagttggacttcatctttctctg

SEQ ID NO: 77779 - DNA, 25 bp, probe
tctgagttggacttcatctttctct

SEQ ID NO: 77780 - DNA, 25 bp, probe
gcaaggaataatcaagatttgtgac

SEQ ID NO: 77781 - DNA, 25 bp, probe
agcaaggaataatcaagatttgtga

SEQ ID NO: 77782 - DNA, 25 bp, probe
atttgtactggtgtagtgattgcta

SEQ ID NO: 77783 - DNA, 25 bp, probe
aactaagcaaggaataatcaagatt

SEQ ID NO: 77784 - DNA, 25 bp, probe
tttgtactggtgtagtgattgctag

SEQ ID NO: 77785 - DNA, 25 bp, probe
agcgtattatggcaaacacttcaag

SEQ ID NO: 77786 - DNA, 25 bp, probe
ttcatttgtactggtgtagtgattg

SEQ ID NO: 77787 - DNA, 25 bp, probe
attgatattgtgagcagccagaagg

SEQ ID NO: 77788 - DNA, 25 bp, probe
cttcctgccacatcttcctagagaa

SEQ ID NO: 77789 - DNA, 25 bp, probe
tgatattgtgagcagccagaaggtt

SEQ ID NO: 77790 - DNA, 25 bp, probe
ttgatattgtgagcagccagaaggt

SEQ ID NO: 77791 - DNA, 25 bp, probe
gatattgtgagcagccagaaggttt

SEQ ID NO: 77792 - DNA, 25 bp, probe
atattgtgagcagccagaaggtttg

SEQ ID NO: 77793 - DNA, 25 bp, probe
ttcctgccacatcttcctagagaag

SEQ ID NO: 77794 - DNA, 25 bp, probe
tgtaaatatccttcgggctttgttt

SEQ ID NO: 77795 - DNA, 25 bp, probe
ttgtaaatatccttcgggctttgtt

SEQ ID NO: 77796 - DNA, 25 bp, probe
tttgtaaatatccttcgggctttgt

SEQ ID NO: 77797 - DNA, 25 bp, probe
gtaaatatccttcgggctttgttta

SEQ ID NO: 77798 - DNA, 25 bp, probe
cttccaaaccatcttgttcaacttc

SEQ ID NO: 77799 - DNA, 25 bp, probe
tcttccaaaccatcttgttcaactt

SEQ ID NO: 77800 - DNA, 25 bp, probe
taaatatccttcgggctttgtttaa

SEQ ID NO: 77801 - DNA, 25 bp, probe
ctcttccaaaccatcttgttcaact

SEQ ID NO: 77802 - DNA, 25 bp, probe
gactcttccaaaccatcttgttcaa

SEQ ID NO: 77803 - DNA, 25 bp, probe
actcttccaaaccatcttgttcaac

SEQ ID NO: 77804 - DNA, 25 bp, probe
ttccaaaccatcttgttcaacttcc

SEQ ID NO: 77805 - DNA, 25 bp, probe
aaatatccttcgggctttgtttaaa

SEQ ID NO: 77806 - DNA, 25 bp, probe
ttttgtaaatatccttcgggctttg

SEQ ID NO: 77807 - DNA, 25 bp, probe
cgactcttccaaaccatcttgttca

SEQ ID NO: 77808 - DNA, 25 bp, probe
tccaaaccatcttgttcaacttccc

SEQ ID NO: 77809 - DNA, 25 bp, probe
tcgactcttccaaaccatcttgttc

SEQ ID NO: 77810 - DNA, 25 bp, probe
ctcgactcttccaaaccatcttgtt

SEQ ID NO: 77811 - DNA, 25 bp, probe
aatatccttcgggctttgtttaaaa

SEQ ID NO: 77812 - DNA, 25 bp, probe
aaaccatcttgttcaacttccccat

SEQ ID NO: 77813 - DNA, 25 bp, probe
ttttggtgagaaggaagagggaaaa

SEQ ID NO: 77814 - DNA, 25 bp, probe
aagctcgactcttccaaaccatctt

SEQ ID NO: 77815 - DNA, 25 bp, probe
caaaccatcttgttcaacttcccca

SEQ ID NO: 77816 - DNA, 25 bp, probe
atcttgttcaacttccccatgtgtg

SEQ ID NO: 77817 - DNA, 25 bp, probe
catcttgttcaacttccccatgtgt

SEQ ID NO: 77818 - DNA, 25 bp, probe
aaccatcttgttcaacttccccatg

SEQ ID NO: 77819 - DNA, 25 bp, probe
gactccagagaagggatggtgaaac

SEQ ID NO: 77820 - DNA, 25 bp, probe
ccaaaccatcttgttcaacttcccc

SEQ ID NO: 77821 - DNA, 25 bp, probe
agctcgactcttccaaaccatcttg

SEQ ID NO: 77822 - DNA, 25 bp, probe
ccatcttgttcaacttccccatgtg

SEQ ID NO: 77823 - DNA, 25 bp, probe
gctcgactcttccaaaccatcttgt

SEQ ID NO: 77824 - DNA, 25 bp, probe
cagagaagggatggtgaaaccgaag

SEQ ID NO: 77825 - DNA, 25 bp, probe
ctaggactccagagaagggatggtg

SEQ ID NO: 77826 - DNA, 25 bp, probe
accatcttgttcaacttccccatgt

SEQ ID NO: 77827 - DNA, 25 bp, probe
gaagctcgactcttccaaaccatct

SEQ ID NO: 77828 - DNA, 25 bp, probe
aatgaaggaatatggctggaatctg

SEQ ID NO: 77829 - DNA, 25 bp, probe
caatgaaggaatatggctggaatct

SEQ ID NO: 77830 - DNA, 25 bp, probe
tacggtatatcttgaatgtcactcg

SEQ ID NO: 77831 - DNA, 25 bp, probe
aacttagaggacttacagaaccgag

SEQ ID NO: 77832 - DNA, 25 bp, probe
caacttagaggacttacagaaccga

SEQ ID NO: 77833 - DNA, 25 bp, probe
cacgctctaagttgttgatctctag

SEQ ID NO: 77834 - DNA, 25 bp, probe
gtatatgatgaagaggcaacggatc

SEQ ID NO: 77835 - DNA, 25 bp, probe
ggtacggtatatcttgaatgtcact

SEQ ID NO: 77836 - DNA, 25 bp, probe
tatatgatgaagaggcaacggatct

SEQ ID NO: 77837 - DNA, 25 bp, probe
ggtatatgatgaagaggcaacggat

SEQ ID NO: 77838 - DNA, 25 bp, probe
gcaatgaaggaatatggctggaatc

SEQ ID NO: 77839 - DNA, 25 bp, probe
gtacggtatatcttgaatgtcactc

SEQ ID NO: 77840 - DNA, 25 bp, probe
atgaaggaatatggctggaatctgg

SEQ ID NO: 77841 - DNA, 25 bp, probe
ctccaacttagaggacttacagaac

SEQ ID NO: 77842 - DNA, 25 bp, probe
atgagacaactggaagagtatcagg

SEQ ID NO: 77843 - DNA, 25 bp, probe
ccaacttagaggacttacagaaccg

SEQ ID NO: 77844 - DNA, 25 bp, probe
gccttattgaagaagacaggatcat

SEQ ID NO: 77845 - DNA, 25 bp, probe
ccacgctctaagttgttgatctcta

SEQ ID NO: 77846 - DNA, 25 bp, probe
ttgccttattgaagaagacaggatc

SEQ ID NO: 77847 - DNA, 25 bp, probe
catgagacaactggaagagtatcag

SEQ ID NO: 77848 - DNA, 25 bp, probe
tccaacttagaggacttacagaacc

SEQ ID NO: 77849 - DNA, 25 bp, probe
atggatagccctacacagatatttg

SEQ ID NO: 77850 - DNA, 25 bp, probe
caaatggatagccctacacagatat

SEQ ID NO: 77851 - DNA, 25 bp, probe
ggatagccctacacagatatttgag

SEQ ID NO: 77852 - DNA, 25 bp, probe
acttcacatttctcatccttacctg

SEQ ID NO: 77853 - DNA, 25 bp, probe
tatgtgaaagaaagacgaacggtaa

SEQ ID NO: 77854 - DNA, 25 bp, probe
gcctatgactatgtgaaagaaagac

SEQ ID NO: 77855 - DNA, 25 bp, probe
agcctatgactatgtgaaagaaaga

SEQ ID NO: 77856 - DNA, 25 bp, probe
atgactatgtgaaagaaagacgaac

SEQ ID NO: 77857 - DNA, 25 bp, probe
cctatgactatgtgaaagaaagacg

SEQ ID NO: 77858 - DNA, 25 bp, probe
gagcctatgactatgtgaaagaaag

SEQ ID NO: 77859 - DNA, 25 bp, probe
cgagcctatgactatgtgaaagaaa

SEQ ID NO: 77860 - DNA, 25 bp, probe
aatggatagccctacacagatattt

SEQ ID NO: 77861 - DNA, 25 bp, probe
aaatggatagccctacacagatatt

SEQ ID NO: 77862 - DNA, 25 bp, probe
tcaaatggatagccctacacagata

SEQ ID NO: 77863 - DNA, 25 bp, probe
acatccaaagagataagaacagagt

SEQ ID NO: 77864 - DNA, 25 bp, probe
ccttattgaagaagacaggatcatt

SEQ ID NO: 77865 - DNA, 25 bp, probe
aagcacagaatttgagtcagtagat

SEQ ID NO: 77866 - DNA, 25 bp, probe
gaaggaatatggctggaatctggac

SEQ ID NO: 77867 - DNA, 25 bp, probe
gatagccctacacagatatttgagc

SEQ ID NO: 77868 - DNA, 25 bp, probe
tggatagccctacacagatatttga

SEQ ID NO: 77869 - DNA, 25 bp, probe
tacttcacatttctcatccttacct

SEQ ID NO: 77870 - DNA, 25 bp, probe
ctatgtgaaagaaagacgaacggta

SEQ ID NO: 77871 - DNA, 25 bp, probe
aaagcacagaatttgagtcagtaga

SEQ ID NO: 77872 - DNA, 25 bp, probe
gaagatgatgacaaccagaagacat

SEQ ID NO: 77873 - DNA, 25 bp, probe
gtgtagtgagattattcctgtaggt

SEQ ID NO: 77874 - DNA, 25 bp, probe
agtgtagtgagattattcctgtagg

SEQ ID NO: 77875 - DNA, 25 bp, probe
tgtagtgagattattcctgtaggtt

SEQ ID NO: 77876 - DNA, 25 bp, probe
gtgagattattcctgtaggttatgg

SEQ ID NO: 77877 - DNA, 25 bp, probe
taacaaggcacctaattacaacaag

SEQ ID NO: 77878 - DNA, 25 bp, probe
ttaacaaggcacctaattacaacaa

SEQ ID NO: 77879 - DNA, 25 bp, probe
ttcagtgtagtgagattattcctgt

SEQ ID NO: 77880 - DNA, 25 bp, probe
cttaacaaggcacctaattacaaca

SEQ ID NO: 77881 - DNA, 25 bp, probe
aagatgatgacaaccagaagacatg

SEQ ID NO: 77882 - DNA, 25 bp, probe
tcttaacaaggcacctaattacaac

SEQ ID NO: 77883 - DNA, 25 bp, probe
aacagttgacactcacttattgtaa

SEQ ID NO: 77884 - DNA, 25 bp, probe
cttcttaacaaggcacctaattaca

SEQ ID NO: 77885 - DNA, 25 bp, probe
gatgatgacaaccagaagacatgag

SEQ ID NO: 77886 - DNA, 25 bp, probe
ggaagatgatgacaaccagaagaca

SEQ ID NO: 77887 - DNA, 25 bp, probe
tcagtgtagtgagattattcctgta

SEQ ID NO: 77888 - DNA, 25 bp, probe
ttcttaacaaggcacctaattacaa

SEQ ID NO: 77889 - DNA, 25 bp, probe
aatagcagcattgattcttctggtg

SEQ ID NO: 77890 - DNA, 25 bp, probe
agtgagattattcctgtaggttatg

SEQ ID NO: 77891 - DNA, 25 bp, probe
agatgatgacaaccagaagacatga

SEQ ID NO: 77892 - DNA, 25 bp, probe
cagtgtagtgagattattcctgtag

SEQ ID NO: 77893 - DNA, 25 bp, probe
aaggcacctaattacaacaagcatg

SEQ ID NO: 77894 - DNA, 25 bp, probe
caaggcacctaattacaacaagcat

SEQ ID NO: 77895 - DNA, 25 bp, probe
gaagattgttctactgcatgtgaag

SEQ ID NO: 77896 - DNA, 25 bp, probe
gaatagcagcattgattcttctggt

SEQ ID NO: 77897 - DNA, 25 bp, probe
tctgaagaacctttccatttagtga

SEQ ID NO: 77898 - DNA, 25 bp, probe
aacaaggcacctaattacaacaagc

SEQ ID NO: 77899 - DNA, 25 bp, probe
cataaaccttccactcttgaacaaa

SEQ ID NO: 77900 - DNA, 25 bp, probe
tctaattgacttactgggaaactga

SEQ ID NO: 77901 - DNA, 25 bp, probe
tgaagattgttctactgcatgtgaa

SEQ ID NO: 77902 - DNA, 25 bp, probe
ataaaccttccactcttgaacaaag

SEQ ID NO: 77903 - DNA, 25 bp, probe
tgagattattcctgtaggttatggg

SEQ ID NO: 77904 - DNA, 25 bp, probe
gtagtgagattattcctgtaggtta

SEQ ID NO: 77905 - DNA, 25 bp, probe
tgcatgtgtgataactgatcttgtt

SEQ ID NO: 77906 - DNA, 25 bp, probe
ctgaagaacctttccatttagtgat

SEQ ID NO: 77907 - DNA, 25 bp, probe
ctgcatgtgtgataactgatcttgt

SEQ ID NO: 77908 - DNA, 25 bp, probe
aagattgttctactgcatgtgaagt

SEQ ID NO: 77909 - DNA, 25 bp, probe
aagtgaagattgttctactgcatgt

SEQ ID NO: 77910 - DNA, 25 bp, probe
atgacaaccagaagacatgagctaa

SEQ ID NO: 77911 - DNA, 25 bp, probe
ctaattgacttactgggaaactgaa

SEQ ID NO: 77912 - DNA, 25 bp, probe
gctttcagtgtagtgagattattcc

SEQ ID NO: 77913 - DNA, 25 bp, probe
gtgaagattgttctactgcatgtga

SEQ ID NO: 77914 - DNA, 25 bp, probe
agttcctagtgacatagaaacgatg

SEQ ID NO: 77915 - DNA, 25 bp, probe
tgtaaagtgaagattgttctactgc

SEQ ID NO: 77916 - DNA, 25 bp, probe
acctctatggcattgctggttctac

SEQ ID NO: 77917 - DNA, 25 bp, probe
cacctctatggcattgctggttcta

SEQ ID NO: 77918 - DNA, 25 bp, probe
cctctatggcattgctggttctacc

SEQ ID NO: 77919 - DNA, 25 bp, probe
aaaaggggattccgatatcaagctg

SEQ ID NO: 77920 - DNA, 25 bp, probe
caatggaaagctgagactgctgtac

SEQ ID NO: 77921 - DNA, 25 bp, probe
gaaagctgagactgctgtacgaatg

SEQ ID NO: 77922 - DNA, 25 bp, probe
gattccgatatcaagctgtgggaaa

SEQ ID NO: 77923 - DNA, 25 bp, probe
aaaggggattccgatatcaagctgt

SEQ ID NO: 77924 - DNA, 25 bp, probe
ccaatggaaagctgagactgctgta

SEQ ID NO: 77925 - DNA, 25 bp, probe
ggaaagctgagactgctgtacgaat

SEQ ID NO: 77926 - DNA, 25 bp, probe
aatggaaagctgagactgctgtacg

SEQ ID NO: 77927 - DNA, 25 bp, probe
aaggggattccgatatcaagctgtg

SEQ ID NO: 77928 - DNA, 25 bp, probe
attccgatatcaagctgtgggaaaa

SEQ ID NO: 77929 - DNA, 25 bp, probe
ggattccgatatcaagctgtgggaa

SEQ ID NO: 77930 - DNA, 25 bp, probe
ttccgatatcaagctgtgggaaaac

SEQ ID NO: 77931 - DNA, 25 bp, probe
tccgatatcaagctgtgggaaaacc

SEQ ID NO: 77932 - DNA, 25 bp, probe
gcttgatgaatgttggatatttctg

SEQ ID NO: 77933 - DNA, 25 bp, probe
ttgatgaatgttggatatttctgga

SEQ ID NO: 77934 - DNA, 25 bp, probe
tgatgaatgttggatatttctggat

SEQ ID NO: 77935 - DNA, 25 bp, probe
cttgatgaatgttggatatttctgg

SEQ ID NO: 77936 - DNA, 25 bp, probe
ttggatatttctggatttcagggtg

SEQ ID NO: 77937 - DNA, 25 bp, probe
gttggatatttctggatttcagggt

SEQ ID NO: 77938 - DNA, 25 bp, probe
tgttggatatttctggatttcaggg

SEQ ID NO: 77939 - DNA, 25 bp, probe
atgttggatatttctggatttcagg

SEQ ID NO: 77940 - DNA, 25 bp, probe
gaatgttggatatttctggatttca

SEQ ID NO: 77941 - DNA, 25 bp, probe
tgaatgttggatatttctggatttc

SEQ ID NO: 77942 - DNA, 25 bp, probe
gatgaatgttggatatttctggatt

SEQ ID NO: 77943 - DNA, 25 bp, probe
agcttgatgaatgttggatatttct

SEQ ID NO: 77944 - DNA, 25 bp, probe
tggatatttctggatttcagggtgg

SEQ ID NO: 77945 - DNA, 25 bp, probe
atgaatgttggatatttctggattt

SEQ ID NO: 77946 - DNA, 25 bp, probe
aatgttggatatttctggatttcag

SEQ ID NO: 77947 - DNA, 25 bp, probe
ggatatttctggatttcagggtggc

SEQ ID NO: 77948 - DNA, 25 bp, probe
aagcttgatgaatgttggatatttc

SEQ ID NO: 77949 - DNA, 25 bp, probe
gatatttctggatttcagggtggcc

SEQ ID NO: 77950 - DNA, 25 bp, probe
atatttctggatttcagggtggccc

SEQ ID NO: 77951 - DNA, 25 bp, probe
aagcatctgattgagacatggtgta

SEQ ID NO: 77952 - DNA, 25 bp, probe
agcatctgattgagacatggtgtac

SEQ ID NO: 77953 - DNA, 25 bp, probe
tggaggaagcatctgattgagacat

SEQ ID NO: 77954 - DNA, 25 bp, probe
atggaggaagcatctgattgagaca

SEQ ID NO: 77955 - DNA, 25 bp, probe
gaggaagcatctgattgagacatgg

SEQ ID NO: 77956 - DNA, 25 bp, probe
ggaggaagcatctgattgagacatg

SEQ ID NO: 77957 - DNA, 25 bp, probe
gaagcatctgattgagacatggtgt

SEQ ID NO: 77958 - DNA, 25 bp, probe
ggaagcatctgattgagacatggtg

SEQ ID NO: 77959 - DNA, 25 bp, probe
aggaagcatctgattgagacatggt

SEQ ID NO: 77960 - DNA, 25 bp, probe
catctgattgagacatggtgtacag

SEQ ID NO: 77961 - DNA, 25 bp, probe
gatggaggaagcatctgattgagac

SEQ ID NO: 77962 - DNA, 25 bp, probe
atctgattgagacatggtgtacagg

SEQ ID NO: 77963 - DNA, 25 bp, probe
ctgtatccagacacacttggcagat

SEQ ID NO: 77964 - DNA, 25 bp, probe
gcatctgattgagacatggtgtaca

SEQ ID NO: 77965 - DNA, 25 bp, probe
ctgattgagacatggtgtacaggtc

SEQ ID NO: 77966 - DNA, 25 bp, probe
tgtatccagacacacttggcagatg

SEQ ID NO: 77967 - DNA, 25 bp, probe
tctgattgagacatggtgtacaggt

SEQ ID NO: 77968 - DNA, 25 bp, probe
atgtgctctgtatccagacacactt

SEQ ID NO: 77969 - DNA, 25 bp, probe
ctttgcttcttgagtagagccacca

SEQ ID NO: 77970 - DNA, 25 bp, probe
gatgtgctctgtatccagacacact

SEQ ID NO: 77971 - DNA, 25 bp, probe
ctctgtatccagacacacttggcag

SEQ ID NO: 77972 - DNA, 25 bp, probe
tttgcttcttgagtagagccaccac

SEQ ID NO: 77973 - DNA, 25 bp, probe
gtgctctgtatccagacacacttgg

SEQ ID NO: 77974 - DNA, 25 bp, probe
tgtgctctgtatccagacacacttg

SEQ ID NO: 77975 - DNA, 25 bp, probe
ctgctatgaagagatacctgagact

SEQ ID NO: 77976 - DNA, 25 bp, probe
tgctatgaagagatacctgagactg

SEQ ID NO: 77977 - DNA, 25 bp, probe
actgctatgaagagatacctgagac

SEQ ID NO: 77978 - DNA, 25 bp, probe
cactgctatgaagagatacctgaga

SEQ ID NO: 77979 - DNA, 25 bp, probe
acactgctatgaagagatacctgag

SEQ ID NO: 77980 - DNA, 25 bp, probe
cacactgctatgaagagatacctga

SEQ ID NO: 77981 - DNA, 25 bp, probe
gctatgaagagatacctgagactgg

SEQ ID NO: 77982 - DNA, 25 bp, probe
agtaagatggaagagtggtacagtt

SEQ ID NO: 77983 - DNA, 25 bp, probe
aagtaagatggaagagtggtacagt

SEQ ID NO: 77984 - DNA, 25 bp, probe
taatccactctcacactgctatgaa

SEQ ID NO: 77985 - DNA, 25 bp, probe
ttaatccactctcacactgctatga

SEQ ID NO: 77986 - DNA, 25 bp, probe
gtattaatccactctcacactgcta

SEQ ID NO: 77987 - DNA, 25 bp, probe
tcacactgctatgaagagatacctg

SEQ ID NO: 77988 - DNA, 25 bp, probe
ctcacactgctatgaagagatacct

SEQ ID NO: 77989 - DNA, 25 bp, probe
attaatccactctcacactgctatg

SEQ ID NO: 77990 - DNA, 25 bp, probe
tattaatccactctcacactgctat

SEQ ID NO: 77991 - DNA, 25 bp, probe
aatccactctcacactgctatgaag

SEQ ID NO: 77992 - DNA, 25 bp, probe
acttagatcctccttatactctgag

SEQ ID NO: 77993 - DNA, 25 bp, probe
atgggcatttaggtagactggataa

SEQ ID NO: 77994 - DNA, 25 bp, probe
ttctttatccagtctgtccttgatg

SEQ ID NO: 77995 - DNA, 25 bp, probe
tttctttatccagtctgtccttgat

SEQ ID NO: 77996 - DNA, 25 bp, probe
ctatgaagagatacctgagactggg

SEQ ID NO: 77997 - DNA, 25 bp, probe
ggcatttaggtagactggataaaga

SEQ ID NO: 77998 - DNA, 25 bp, probe
cttagatcctccttatactctgagt

SEQ ID NO: 77999 - DNA, 25 bp, probe
tgtattaatccactctcacactgct

SEQ ID NO: 78000 - DNA, 25 bp, probe
gatgggcatttaggtagactggata

SEQ ID NO: 78001 - DNA, 25 bp, probe
gggcatttaggtagactggataaag

SEQ ID NO: 78002 - DNA, 25 bp, probe
gtaagatggaagagtggtacagttt

SEQ ID NO: 78003 - DNA, 25 bp, probe
aaagtaagatggaagagtggtacag

SEQ ID NO: 78004 - DNA, 25 bp, probe
tgggcatttaggtagactggataaa

SEQ ID NO: 78005 - DNA, 25 bp, probe
ttagatcctccttatactctgagtt

SEQ ID NO: 78006 - DNA, 25 bp, probe
atccactctcacactgctatgaaga

SEQ ID NO: 78007 - DNA, 25 bp, probe
cttgagaaaggcatgtgttgtttaa

SEQ ID NO: 78008 - DNA, 25 bp, probe
gcatttaggtagactggataaagaa

SEQ ID NO: 78009 - DNA, 25 bp, probe
tacttagatcctccttatactctga

SEQ ID NO: 78010 - DNA, 25 bp, probe
actatgtgtattaatccactctcac

SEQ ID NO: 78011 - DNA, 25 bp, probe
cactatgtgtattaatccactctca

SEQ ID NO: 78012 - DNA, 25 bp, probe
tcttgagaaaggcatgtgttgttta

SEQ ID NO: 78013 - DNA, 25 bp, probe
gatcctccttatactctgagtttct

SEQ ID NO: 78014 - DNA, 25 bp, probe
agatcctccttatactctgagtttc

SEQ ID NO: 78015 - DNA, 25 bp, probe
tcctccttatactctgagtttcttt

SEQ ID NO: 78016 - DNA, 25 bp, probe
cctccttatactctgagtttctttc

SEQ ID NO: 78017 - DNA, 25 bp, probe
atcctccttatactctgagtttctt

SEQ ID NO: 78018 - DNA, 25 bp, probe
ctcttgagaaaggcatgtgttgttt

SEQ ID NO: 78019 - DNA, 25 bp, probe
gcatggcaataactcataatctgat

SEQ ID NO: 78020 - DNA, 25 bp, probe
ctcataatctgatttggaggtttgc

SEQ ID NO: 78021 - DNA, 25 bp, probe
catggcaataactcataatctgatt

SEQ ID NO: 78022 - DNA, 25 bp, probe
actcataatctgatttggaggtttg

SEQ ID NO: 78023 - DNA, 25 bp, probe
tcataatctgatttggaggtttgcc

SEQ ID NO: 78024 - DNA, 25 bp, probe
cataatctgatttggaggtttgccc

SEQ ID NO: 78025 - DNA, 25 bp, probe
ggcaataactcataatctgatttgg

SEQ ID NO: 78026 - DNA, 25 bp, probe
aactcataatctgatttggaggttt

SEQ ID NO: 78027 - DNA, 25 bp, probe
tggcaataactcataatctgatttg

SEQ ID NO: 78028 - DNA, 25 bp, probe
taactcataatctgatttggaggtt

SEQ ID NO: 78029 - DNA, 25 bp, probe
gcaataactcataatctgatttgga

SEQ ID NO: 78030 - DNA, 25 bp, probe
ataactcataatctgatttggaggt

SEQ ID NO: 78031 - DNA, 25 bp, probe
ctgcatggcaataactcataatctg

SEQ ID NO: 78032 - DNA, 25 bp, probe
tgcatggcaataactcataatctga

SEQ ID NO: 78033 - DNA, 25 bp, probe
ataatctgatttggaggtttgccct

SEQ ID NO: 78034 - DNA, 25 bp, probe
atctgatttggaggtttgcccttta

SEQ ID NO: 78035 - DNA, 25 bp, probe
taatctgatttggaggtttgccctt

SEQ ID NO: 78036 - DNA, 25 bp, probe
gctgcatggcaataactcataatct

SEQ ID NO: 78037 - DNA, 25 bp, probe
atggcaataactcataatctgattt

SEQ ID NO: 78038 - DNA, 25 bp, probe
tgctgcatggcaataactcataatc

SEQ ID NO: 78039 - DNA, 25 bp, probe
tctgatttggaggtttgccctttac

SEQ ID NO: 78040 - DNA, 25 bp, probe
aatctgatttggaggtttgcccttt

SEQ ID NO: 78041 - DNA, 25 bp, probe
aataactcataatctgatttggagg

SEQ ID NO: 78042 - DNA, 25 bp, probe
ctgatttggaggtttgccctttaca

SEQ ID NO: 78043 - DNA, 25 bp, probe
caataactcataatctgatttggag

SEQ ID NO: 78044 - DNA, 25 bp, probe
ataaacatcaccctgcaaagccaaa

SEQ ID NO: 78045 - DNA, 25 bp, probe
aataaacatcaccctgcaaagccaa

SEQ ID NO: 78046 - DNA, 25 bp, probe
aaataaacatcaccctgcaaagcca

SEQ ID NO: 78047 - DNA, 25 bp, probe
taaacatcaccctgcaaagccaaaa

SEQ ID NO: 78048 - DNA, 25 bp, probe
aagtaatctcttccacacaacagtg

SEQ ID NO: 78049 - DNA, 25 bp, probe
taccaataagtatatcatgcttgcc

SEQ ID NO: 78050 - DNA, 25 bp, probe
aagagctgatgacttcctaacacta

SEQ ID NO: 78051 - DNA, 25 bp, probe
taagagctgatgacttcctaacact

SEQ ID NO: 78052 - DNA, 25 bp, probe
gtaagagctgatgacttcctaacac

SEQ ID NO: 78053 - DNA, 25 bp, probe
agagctgatgacttcctaacactag

SEQ ID NO: 78054 - DNA, 25 bp, probe
gataaagatggcattaggcagagat

SEQ ID NO: 78055 - DNA, 25 bp, probe
agtaagagctgatgacttcctaaca

SEQ ID NO: 78056 - DNA, 25 bp, probe
tagagagaaaggaaggtgaaacttg

SEQ ID NO: 78057 - DNA, 25 bp, probe
aaagtaatctcttccacacaacagt

SEQ ID NO: 78058 - DNA, 25 bp, probe
gaaagtaatctcttccacacaacag

SEQ ID NO: 78059 - DNA, 25 bp, probe
agaaagtaatctcttccacacaaca

SEQ ID NO: 78060 - DNA, 25 bp, probe
gaaaggaaggtgaaacttgagagat

SEQ ID NO: 78061 - DNA, 25 bp, probe
ataaagatggcattaggcagagatg

SEQ ID NO: 78062 - DNA, 25 bp, probe
atgataaagatggcattaggcagag

SEQ ID NO: 78063 - DNA, 25 bp, probe
aaagtaattcatacacaagggacgg

SEQ ID NO: 78064 - DNA, 25 bp, probe
cagtaagagctgatgacttcctaac

SEQ ID NO: 78065 - DNA, 25 bp, probe
gagaaaggaaggtgaaacttgagag

SEQ ID NO: 78066 - DNA, 25 bp, probe
gagagaaaggaaggtgaaacttgag

SEQ ID NO: 78067 - DNA, 25 bp, probe
ctagagagaaaggaaggtgaaactt

SEQ ID NO: 78068 - DNA, 25 bp, probe
tgataaagatggcattaggcagaga

SEQ ID NO: 78069 - DNA, 25 bp, probe
agaaaggaaggtgaaacttgagaga

SEQ ID NO: 78070 - DNA, 25 bp, probe
agagaaaggaaggtgaaacttgaga

SEQ ID NO: 78071 - DNA, 25 bp, probe
agagagaaaggaaggtgaaacttga

SEQ ID NO: 78072 - DNA, 25 bp, probe
taaagatggcattaggcagagatga

SEQ ID NO: 78073 - DNA, 25 bp, probe
tagaaagtaatctcttccacacaac

SEQ ID NO: 78074 - DNA, 25 bp, probe
aaaggaaggtgaaacttgagagatc

SEQ ID NO: 78075 - DNA, 25 bp, probe
tgaagaccctctaggagtaagatac

SEQ ID NO: 78076 - DNA, 25 bp, probe
gtgaagaccctctaggagtaagata

SEQ ID NO: 78077 - DNA, 25 bp, probe
ccattattattgttgtcattgttgt

SEQ ID NO: 78078 - DNA, 25 bp, probe
accattattattgttgtcattgttg

SEQ ID NO: 78079 - DNA, 25 bp, probe
ttagtgaagaccctctaggagtaag

SEQ ID NO: 78080 - DNA, 25 bp, probe
tttagtgaagaccctctaggagtaa

SEQ ID NO: 78081 - DNA, 25 bp, probe
ctttagtgaagaccctctaggagta

SEQ ID NO: 78082 - DNA, 25 bp, probe
tatatcatgcttgccctagagagtt

SEQ ID NO: 78083 - DNA, 25 bp, probe
taagtatatcatgcttgccctagag

SEQ ID NO: 78084 - DNA, 25 bp, probe
aagtaattcatacacaagggacggt

SEQ ID NO: 78085 - DNA, 25 bp, probe
tagtgaagaccctctaggagtaaga

SEQ ID NO: 78086 - DNA, 25 bp, probe
aagtatatcatgcttgccctagaga

SEQ ID NO: 78087 - DNA, 25 bp, probe
ctgatgacttcctaacactaggtac

SEQ ID NO: 78088 - DNA, 25 bp, probe
agtatatcatgcttgccctagagag

SEQ ID NO: 78089 - DNA, 25 bp, probe
gacttcctaacactaggtacaagtt

SEQ ID NO: 78090 - DNA, 25 bp, probe
tgatgacttcctaacactaggtaca

SEQ ID NO: 78091 - DNA, 25 bp, probe
atgacttcctaacactaggtacaag

SEQ ID NO: 78092 - DNA, 25 bp, probe
attctcagtgtttcaaatgcaaatg

SEQ ID NO: 78093 - DNA, 25 bp, probe
ttctcagtgtttcaaatgcaaatga

SEQ ID NO: 78094 - DNA, 25 bp, probe
aattctcagtgtttcaaatgcaaat

SEQ ID NO: 78095 - DNA, 25 bp, probe
tgtttcaaatgcaaatgagccatat

SEQ ID NO: 78096 - DNA, 25 bp, probe
gtgtttcaaatgcaaatgagccata

SEQ ID NO: 78097 - DNA, 25 bp, probe
tcaaatgcaaatgagccatatgaaa

SEQ ID NO: 78098 - DNA, 25 bp, probe
tttcaaatgcaaatgagccatatga

SEQ ID NO: 78099 - DNA, 25 bp, probe
gtttcaaatgcaaatgagccatatg

SEQ ID NO: 78100 - DNA, 25 bp, probe
taggaattctcagtgtttcaaatgc

SEQ ID NO: 78101 - DNA, 25 bp, probe
gaattctcagtgtttcaaatgcaaa

SEQ ID NO: 78102 - DNA, 25 bp, probe
ggaattctcagtgtttcaaatgcaa

SEQ ID NO: 78103 - DNA, 25 bp, probe
aggaattctcagtgtttcaaatgca

SEQ ID NO: 78104 - DNA, 25 bp, probe
agtgtttcaaatgcaaatgagccat

SEQ ID NO: 78105 - DNA, 25 bp, probe
agataggaattctcagtgtttcaaa

SEQ ID NO: 78106 - DNA, 25 bp, probe
tctagaattggtttgctctgatcat

SEQ ID NO: 78107 - DNA, 25 bp, probe
tagaattggtttgctctgatcattg

SEQ ID NO: 78108 - DNA, 25 bp, probe
ctagaattggtttgctctgatcatt

SEQ ID NO: 78109 - DNA, 25 bp, probe
gattcctttccccatgcttttacat

SEQ ID NO: 78110 - DNA, 25 bp, probe
tgttctttcaagtgcaaagtaattt

SEQ ID NO: 78111 - DNA, 25 bp, probe
aaatgttctttcaagtgcaaagtaa

SEQ ID NO: 78112 - DNA, 25 bp, probe
ataggaattctcagtgtttcaaatg

SEQ ID NO: 78113 - DNA, 25 bp, probe
atgttctttcaagtgcaaagtaatt

SEQ ID NO: 78114 - DNA, 25 bp, probe
aatgttctttcaagtgcaaagtaat

SEQ ID NO: 78115 - DNA, 25 bp, probe
tcagtgtttcaaatgcaaatgagcc

SEQ ID NO: 78116 - DNA, 25 bp, probe
ctgattcctttccccatgcttttac

SEQ ID NO: 78117 - DNA, 25 bp, probe
cagtgtttcaaatgcaaatgagcca

SEQ ID NO: 78118 - DNA, 25 bp, probe
gataggaattctcagtgtttcaaat

SEQ ID NO: 78119 - DNA, 25 bp, probe
ttcaaatgcaaatgagccatatgaa

SEQ ID NO: 78120 - DNA, 25 bp, probe
ttgatcaccttccaaacatttagga

SEQ ID NO: 78121 - DNA, 25 bp, probe
gatcaccttccaaacatttaggaaa

SEQ ID NO: 78122 - DNA, 25 bp, probe
gaattggtttgctctgatcattgct

SEQ ID NO: 78123 - DNA, 25 bp, probe
tgattcctttccccatgcttttaca

SEQ ID NO: 78124 - DNA, 25 bp, probe
tttaggaaaatgttctttcaagtgc

SEQ ID NO: 78125 - DNA, 25 bp, probe
aattggtttgctctgatcattgctg

SEQ ID NO: 78126 - DNA, 25 bp, probe
agaattggtttgctctgatcattgc

SEQ ID NO: 78127 - DNA, 25 bp, probe
tgagccatatgaaaattaagatgcc

SEQ ID NO: 78128 - DNA, 25 bp, probe
gagccatatgaaaattaagatgcct

SEQ ID NO: 78129 - DNA, 25 bp, probe
caaatgcaaatgagccatatgaaaa

SEQ ID NO: 78130 - DNA, 25 bp, probe
tctcagtgtttcaaatgcaaatgag

SEQ ID NO: 78131 - DNA, 25 bp, probe
agccatatgaaaattaagatgcctt

SEQ ID NO: 78132 - DNA, 25 bp, probe
gccatatgaaaattaagatgccttc

SEQ ID NO: 78133 - DNA, 25 bp, probe
aatgcaaatgagccatatgaaaatt

SEQ ID NO: 78134 - DNA, 25 bp, probe
aaatgcaaatgagccatatgaaaat

SEQ ID NO: 78135 - DNA, 25 bp, probe
ttgctctgatcattgctgattcctt

SEQ ID NO: 78136 - DNA, 25 bp, probe
tgtaattctaggctgaaggactctt

SEQ ID NO: 78137 - DNA, 25 bp, probe
gaggatattgtggaatcatcatcgc

SEQ ID NO: 78138 - DNA, 25 bp, probe
gcgaggatattgtggaatcatcatc

SEQ ID NO: 78139 - DNA, 25 bp, probe
aactgtaattctaggctgaaggact

SEQ ID NO: 78140 - DNA, 25 bp, probe
caactgtaattctaggctgaaggac

SEQ ID NO: 78141 - DNA, 25 bp, probe
agcgaggatattgtggaatcatcat

SEQ ID NO: 78142 - DNA, 25 bp, probe
ctgtaattctaggctgaaggactct

SEQ ID NO: 78143 - DNA, 25 bp, probe
actgtaattctaggctgaaggactc

SEQ ID NO: 78144 - DNA, 25 bp, probe
aagacaaggaggagatggatgagaa

SEQ ID NO: 78145 - DNA, 25 bp, probe
ctaggacaaggtggaagagtgtatc

SEQ ID NO: 78146 - DNA, 25 bp, probe
cagcgaggatattgtggaatcatca

SEQ ID NO: 78147 - DNA, 25 bp, probe
ctaaatgaagaagaggaagaggagg

SEQ ID NO: 78148 - DNA, 25 bp, probe
taggacaaggtggaagagtgtatct

SEQ ID NO: 78149 - DNA, 25 bp, probe
taaatgaagaagaggaagaggagga

SEQ ID NO: 78150 - DNA, 25 bp, probe
cactgatgtgtctaccttctctgaa

SEQ ID NO: 78151 - DNA, 25 bp, probe
aggatattgtggaatcatcatcgcc

SEQ ID NO: 78152 - DNA, 25 bp, probe
aatgaagaagaggaagaggaggagg

SEQ ID NO: 78153 - DNA, 25 bp, probe
gcaactgtaattctaggctgaagga

SEQ ID NO: 78154 - DNA, 25 bp, probe
tcaaccactgcaactgtaattctag

SEQ ID NO: 78155 - DNA, 25 bp, probe
agacaaggaggagatggatgagaag

SEQ ID NO: 78156 - DNA, 25 bp, probe
gtcaaccactgcaactgtaattcta

SEQ ID NO: 78157 - DNA, 25 bp, probe
tctaaatgaagaagaggaagaggag

SEQ ID NO: 78158 - DNA, 25 bp, probe
aaatgaagaagaggaagaggaggag

SEQ ID NO: 78159 - DNA, 25 bp, probe
caaccactgcaactgtaattctagg

SEQ ID NO: 78160 - DNA, 25 bp, probe
atctaaatgaagaagaggaagagga

SEQ ID NO: 78161 - DNA, 25 bp, probe
ctgcaactgtaattctaggctgaag

SEQ ID NO: 78162 - DNA, 25 bp, probe
aaagagaaagacaaggaggagatgg

SEQ ID NO: 78163 - DNA, 25 bp, probe
gggcagatgatctaaatgaagaaga

SEQ ID NO: 78164 - DNA, 25 bp, probe
gcagatgatctaaatgaagaagagg

SEQ ID NO: 78165 - DNA, 25 bp, probe
ggcagatgatctaaatgaagaagag

SEQ ID NO: 78166 - DNA, 25 bp, probe
cgaggatattgtggaatcatcatcg

SEQ ID NO: 78167 - DNA, 25 bp, probe
atgaagaagaggaagaggaggagga

SEQ ID NO: 78168 - DNA, 25 bp, probe
aagccaggaaggtaaacaagagaaa

SEQ ID NO: 78169 - DNA, 25 bp, probe
actgcaactgtaattctaggctgaa

SEQ ID NO: 78170 - DNA, 25 bp, probe
gaaagacaaggaggagatggatgag

SEQ ID NO: 78171 - DNA, 25 bp, probe
gagaaagacaaggaggagatggatg

SEQ ID NO: 78172 - DNA, 25 bp, probe
agagaaagacaaggaggagatggat

SEQ ID NO: 78173 - DNA, 25 bp, probe
ctgtcaaccactgcaactgtaattc

SEQ ID NO: 78174 - DNA, 25 bp, probe
gatctaaatgaagaagaggaagagg

SEQ ID NO: 78175 - DNA, 25 bp, probe
gtaattctaggctgaaggactcttc

SEQ ID NO: 78176 - DNA, 25 bp, probe
gacaaggaggagatggatgagaagg

SEQ ID NO: 78177 - DNA, 25 bp, probe
aaagacaaggaggagatggatgaga

SEQ ID NO: 78178 - DNA, 25 bp, probe
agaaagacaaggaggagatggatga

SEQ ID NO: 78179 - DNA, 25 bp, probe
aagagaaagacaaggaggagatgga

SEQ ID NO: 78180 - DNA, 25 bp, probe
gaagaggaactattggacagagaat

SEQ ID NO: 78181 - DNA, 25 bp, probe
taacagaagaggaactattggacag

SEQ ID NO: 78182 - DNA, 25 bp, probe
agaagaggaactattggacagagaa

SEQ ID NO: 78183 - DNA, 25 bp, probe
ttaacagaagaggaactattggaca

SEQ ID NO: 78184 - DNA, 25 bp, probe
aagaggaactattggacagagaatt

SEQ ID NO: 78185 - DNA, 25 bp, probe
aacagaagaggaactattggacaga

SEQ ID NO: 78186 - DNA, 25 bp, probe
cagaagaggaactattggacagaga

SEQ ID NO: 78187 - DNA, 25 bp, probe
acagaagaggaactattggacagag

SEQ ID NO: 78188 - DNA, 25 bp, probe
aatcagaagaacatcagcaatccac

SEQ ID NO: 78189 - DNA, 25 bp, probe
ggcatcacctgaatatcttacctcc

SEQ ID NO: 78190 - DNA, 25 bp, probe
aggcatcacctgaatatcttacctc

SEQ ID NO: 78191 - DNA, 25 bp, probe
acaaatcagaagaacatcagcaatc

SEQ ID NO: 78192 - DNA, 25 bp, probe
cacaaatcagaagaacatcagcaat

SEQ ID NO: 78193 - DNA, 25 bp, probe
caaatcagaagaacatcagcaatcc

SEQ ID NO: 78194 - DNA, 25 bp, probe
actattggacagagaatttgacctt

SEQ ID NO: 78195 - DNA, 25 bp, probe
aactattggacagagaatttgacct

SEQ ID NO: 78196 - DNA, 25 bp, probe
aaatcagaagaacatcagcaatcca

SEQ ID NO: 78197 - DNA, 25 bp, probe
gaactattggacagagaatttgacc

SEQ ID NO: 78198 - DNA, 25 bp, probe
ggaactattggacagagaatttgac

SEQ ID NO: 78199 - DNA, 25 bp, probe
aggaactattggacagagaatttga

SEQ ID NO: 78200 - DNA, 25 bp, probe
tttcacaaatcagaagaacatcagc

SEQ ID NO: 78201 - DNA, 25 bp, probe
gaggaactattggacagagaatttg

SEQ ID NO: 78202 - DNA, 25 bp, probe
agaggaactattggacagagaattt

SEQ ID NO: 78203 - DNA, 25 bp, probe
atcagaagaacatcagcaatccacc

SEQ ID NO: 78204 - DNA, 25 bp, probe
tcacaaatcagaagaacatcagcaa

SEQ ID NO: 78205 - DNA, 25 bp, probe
gtttcctacacttcatcacttccag

SEQ ID NO: 78206 - DNA, 25 bp, probe
ctattggacagagaatttgaccttc

SEQ ID NO: 78207 - DNA, 25 bp, probe
ggaaccataatggactcctcctata

SEQ ID NO: 78208 - DNA, 25 bp, probe
ttcacaaatcagaagaacatcagca

SEQ ID NO: 78209 - DNA, 25 bp, probe
tagtttcctacacttcatcacttcc

SEQ ID NO: 78210 - DNA, 25 bp, probe
ccttagtttcctacacttcatcact

SEQ ID NO: 78211 - DNA, 25 bp, probe
cagccttagtttcctacacttcatc

SEQ ID NO: 78212 - DNA, 25 bp, probe
attgctgatagtatgctaatatcct

SEQ ID NO: 78213 - DNA, 25 bp, probe
gccttagtttcctacacttcatcac

SEQ ID NO: 78214 - DNA, 25 bp, probe
agccttagtttcctacacttcatca

SEQ ID NO: 78215 - DNA, 25 bp, probe
tcaagagttctcaccagccttagtt

SEQ ID NO: 78216 - DNA, 25 bp, probe
ttagtttcctacacttcatcacttc

SEQ ID NO: 78217 - DNA, 25 bp, probe
cttagtttcctacacttcatcactt

SEQ ID NO: 78218 - DNA, 25 bp, probe
cttctaagatcaagtaagggacact

SEQ ID NO: 78219 - DNA, 25 bp, probe
aaccataatggactcctcctatagt

SEQ ID NO: 78220 - DNA, 25 bp, probe
agtttcctacacttcatcacttcca

SEQ ID NO: 78221 - DNA, 25 bp, probe
gaaccataatggactcctcctatag

SEQ ID NO: 78222 - DNA, 25 bp, probe
accataatggactcctcctatagtg

SEQ ID NO: 78223 - DNA, 25 bp, probe
gtaagggacacttgaaggcttattt

SEQ ID NO: 78224 - DNA, 25 bp, probe
ctgaagatacatcaatacctgacct

SEQ ID NO: 78225 - DNA, 25 bp, probe
tctgaagatacatcaatacctgacc

SEQ ID NO: 78226 - DNA, 25 bp, probe
tgaagatacatcaatacctgacctt

SEQ ID NO: 78227 - DNA, 25 bp, probe
tgtgagtaccagcatatagagtgtt

SEQ ID NO: 78228 - DNA, 25 bp, probe
atgtgagtaccagcatatagagtgt

SEQ ID NO: 78229 - DNA, 25 bp, probe
tgtgaggaagaacagtattgacata

SEQ ID NO: 78230 - DNA, 25 bp, probe
gttagagatgatgcctccattccta

SEQ ID NO: 78231 - DNA, 25 bp, probe
tgaggaagaacagtattgacatacc

SEQ ID NO: 78232 - DNA, 25 bp, probe
ttagagatgatgcctccattcctag

SEQ ID NO: 78233 - DNA, 25 bp, probe
gtgaggaagaacagtattgacatac

SEQ ID NO: 78234 - DNA, 25 bp, probe
ttgttctctgtaactcttcaattct

SEQ ID NO: 78235 - DNA, 25 bp, probe
ttctgaagatacatcaatacctgac

SEQ ID NO: 78236 - DNA, 25 bp, probe
aattcagactcttacattgttctct

SEQ ID NO: 78237 - DNA, 25 bp, probe
tagagatgatgcctccattcctaga

SEQ ID NO: 78238 - DNA, 25 bp, probe
tatgtgagtaccagcatatagagtg

SEQ ID NO: 78239 - DNA, 25 bp, probe
ctatgtgagtaccagcatatagagt

SEQ ID NO: 78240 - DNA, 25 bp, probe
gtaaacatacttcagcatcttggag

SEQ ID NO: 78241 - DNA, 25 bp, probe
ttctggcttctatttctatgtgagt

SEQ ID NO: 78242 - DNA, 25 bp, probe
gaggcttctcattctggcttctatt

SEQ ID NO: 78243 - DNA, 25 bp, probe
taaacatacttcagcatcttggagg

SEQ ID NO: 78244 - DNA, 25 bp, probe
tgttctctgtaactcttcaattcta

SEQ ID NO: 78245 - DNA, 25 bp, probe
gcttctcattctggcttctatttct

SEQ ID NO: 78246 - DNA, 25 bp, probe
cagacttagaccttcaggaaacata

SEQ ID NO: 78247 - DNA, 25 bp, probe
agacttagaccttcaggaaacatag

SEQ ID NO: 78248 - DNA, 25 bp, probe
tctggcttctatttctatgtgagta

SEQ ID NO: 78249 - DNA, 25 bp, probe
aggaaaggaaattcagactcttaca

SEQ ID NO: 78250 - DNA, 25 bp, probe
ttatctgcacagacttagaccttca

SEQ ID NO: 78251 - DNA, 25 bp, probe
cagagcattgtgatattgtcaaaga

SEQ ID NO: 78252 - DNA, 25 bp, probe
gtgagtaccagcatatagagtgttt

SEQ ID NO: 78253 - DNA, 25 bp, probe
ggcttctatttctatgtgagtacca

SEQ ID NO: 78254 - DNA, 25 bp, probe
tggcttctatttctatgtgagtacc

SEQ ID NO: 78255 - DNA, 25 bp, probe
attctggcttctatttctatgtgag

SEQ ID NO: 78256 - DNA, 25 bp, probe
cattctggcttctatttctatgtga

SEQ ID NO: 78257 - DNA, 25 bp, probe
tcattctggcttctatttctatgtg

SEQ ID NO: 78258 - DNA, 25 bp, probe
gagcattgtgatattgtcaaagaga

SEQ ID NO: 78259 - DNA, 25 bp, probe
agagcattgtgatattgtcaaagag

SEQ ID NO: 78260 - DNA, 25 bp, probe
acagacttagaccttcaggaaacat

SEQ ID NO: 78261 - DNA, 25 bp, probe
tccattcctagagggctaataacag

SEQ ID NO: 78262 - DNA, 25 bp, probe
ggcttctcattctggcttctatttc

SEQ ID NO: 78263 - DNA, 25 bp, probe
ggaaaggaaattcagactcttacat

SEQ ID NO: 78264 - DNA, 25 bp, probe
ttctatttctatgtgagtaccagca

SEQ ID NO: 78265 - DNA, 25 bp, probe
aaggaaaggaaattcagactcttac

SEQ ID NO: 78266 - DNA, 25 bp, probe
agcattgtgatattgtcaaagagaa

SEQ ID NO: 78267 - DNA, 25 bp, probe
gataatttgggaggcttctcattct

SEQ ID NO: 78268 - DNA, 25 bp, probe
tcatagctcttctatagtgtcacct

SEQ ID NO: 78269 - DNA, 25 bp, probe
gtcatagctcttctatagtgtcacc

SEQ ID NO: 78270 - DNA, 25 bp, probe
cgtcatagctcttctatagtgtcac

SEQ ID NO: 78271 - DNA, 25 bp, probe
acgtcatagctcttctatagtgtca

SEQ ID NO: 78272 - DNA, 25 bp, probe
tgtcacctaaattcaattcactggc

SEQ ID NO: 78273 - DNA, 25 bp, probe
catagctcttctatagtgtcaccta

SEQ ID NO: 78274 - DNA, 25 bp, probe
gtgtcacctaaattcaattcactgg

SEQ ID NO: 78275 - DNA, 25 bp, probe
atagctcttctatagtgtcacctaa

SEQ ID NO: 78276 - DNA, 25 bp, probe
agctcttctatagtgtcacctaaat

SEQ ID NO: 78277 - DNA, 25 bp, probe
tagctcttctatagtgtcacctaaa

SEQ ID NO: 78278 - DNA, 25 bp, probe
gctcttctatagtgtcacctaaatt

SEQ ID NO: 78279 - DNA, 25 bp, probe
atagtgtcacctaaattcaattcac

SEQ ID NO: 78280 - DNA, 25 bp, probe
tcttctatagtgtcacctaaattca

SEQ ID NO: 78281 - DNA, 25 bp, probe
tatagtgtcacctaaattcaattca

SEQ ID NO: 78282 - DNA, 25 bp, probe
gtcacctaaattcaattcactggcc

SEQ ID NO: 78283 - DNA, 25 bp, probe
ctcttctatagtgtcacctaaattc

SEQ ID NO: 78284 - DNA, 25 bp, probe
cttctatagtgtcacctaaattcaa

SEQ ID NO: 78285 - DNA, 25 bp, probe
agtgtcacctaaattcaattcactg

SEQ ID NO: 78286 - DNA, 25 bp, probe
taaattcaattcactggccgtcgtt

SEQ ID NO: 78287 - DNA, 25 bp, probe
acctaaattcaattcactggccgtc

SEQ ID NO: 78288 - DNA, 25 bp, probe
tcacctaaattcaattcactggccg

SEQ ID NO: 78289 - DNA, 25 bp, probe
tagtgtcacctaaattcaattcact

SEQ ID NO: 78290 - DNA, 25 bp, probe
tctatagtgtcacctaaattcaatt

SEQ ID NO: 78291 - DNA, 25 bp, probe
ttctatagtgtcacctaaattcaat

SEQ ID NO: 78292 - DNA, 25 bp, probe
cacctaaattcaattcactggccgt

SEQ ID NO: 78293 - DNA, 25 bp, probe
ctatagtgtcacctaaattcaattc

SEQ ID NO: 78294 - DNA, 25 bp, probe
ctaaattcaattcactggccgtcgt

SEQ ID NO: 78295 - DNA, 25 bp, probe
gttacccaacttaatcgccttgcag

SEQ ID NO: 78296 - DNA, 25 bp, probe
aaaccctggcgttacccaacttaat

SEQ ID NO: 78297 - DNA, 25 bp, probe
aaattcaattcactggccgtcgttt

SEQ ID NO: 78298 - DNA, 25 bp, probe
aaccctggcgttacccaacttaatc

SEQ ID NO: 78299 - DNA, 25 bp, probe
cctaaattcaattcactggccgtcg

SEQ ID NO: 78300 - DNA, 25 bp, probe
ttttacaacgtcgtgactgggaaaa

SEQ ID NO: 78301 - DNA, 25 bp, probe
tttacaacgtcgtgactgggaaaac

SEQ ID NO: 78302 - DNA, 25 bp, probe
attcaattcactggccgtcgtttta

SEQ ID NO: 78303 - DNA, 25 bp, probe
aattcaattcactggccgtcgtttt

SEQ ID NO: 78304 - DNA, 25 bp, probe
aaaaccctggcgttacccaacttaa

SEQ ID NO: 78305 - DNA, 25 bp, probe
ttcaattcactggccgtcgttttac

SEQ ID NO: 78306 - DNA, 25 bp, probe
agtaaaataaaagaatgacatggaa

SEQ ID NO: 78307 - DNA, 25 bp, probe
aagtaaaataaaagaatgacatgga

SEQ ID NO: 78308 - DNA, 25 bp, probe
gagtcatgcatttcttgagcaccta

SEQ ID NO: 78309 - DNA, 25 bp, probe
tcacccgagtcatgcatttcttgag

SEQ ID NO: 78310 - DNA, 25 bp, probe
tgtcactgtcacgattatggattat

SEQ ID NO: 78311 - DNA, 25 bp, probe
tatgaacagacagacacagatatgg

SEQ ID NO: 78312 - DNA, 25 bp, probe
cagatatgaacagacagacacagat

SEQ ID NO: 78313 - DNA, 25 bp, probe
ctgtcactgtcacgattatggatta

SEQ ID NO: 78314 - DNA, 25 bp, probe
tatcaatatcaaccaaccaaccaac

SEQ ID NO: 78315 - DNA, 25 bp, probe
agatatgaacagacagacacagata

SEQ ID NO: 78316 - DNA, 25 bp, probe
atatcaatatcaaccaaccaaccaa

SEQ ID NO: 78317 - DNA, 25 bp, probe
aatatcaatatcaaccaaccaacca

SEQ ID NO: 78318 - DNA, 25 bp, probe
gttgagttccattgcgttaattgaa

SEQ ID NO: 78319 - DNA, 25 bp, probe
caatatcaatatcaaccaaccaacc

SEQ ID NO: 78320 - DNA, 25 bp, probe
atgaacagacagacacagatatggt

SEQ ID NO: 78321 - DNA, 25 bp, probe
tccgtggatcatacaatcaatcaat

SEQ ID NO: 78322 - DNA, 25 bp, probe
gtcactgtcacgattatggattata

SEQ ID NO: 78323 - DNA, 25 bp, probe
atcaatatcaaccaaccaaccaacc

SEQ ID NO: 78324 - DNA, 25 bp, probe
tcagatatgaacagacagacacaga

SEQ ID NO: 78325 - DNA, 25 bp, probe
tatccgtggatcatacaatcaatca

SEQ ID NO: 78326 - DNA, 25 bp, probe
ccgtggatcatacaatcaatcaata

SEQ ID NO: 78327 - DNA, 25 bp, probe
atccgtggatcatacaatcaatcaa

SEQ ID NO: 78328 - DNA, 25 bp, probe
atatgaacagacagacacagatatg

SEQ ID NO: 78329 - DNA, 25 bp, probe
aatatcaaccaaccaaccaaccaac

SEQ ID NO: 78330 - DNA, 25 bp, probe
caatatcaaccaaccaaccaaccaa

SEQ ID NO: 78331 - DNA, 25 bp, probe
gatatgaacagacagacacagatat

SEQ ID NO: 78332 - DNA, 25 bp, probe
gcagcgtatctagtaattaagcata

SEQ ID NO: 78333 - DNA, 25 bp, probe
tcaatatcaatatcaaccaaccaac

SEQ ID NO: 78334 - DNA, 25 bp, probe
tcactgtcacgattatggattatat

SEQ ID NO: 78335 - DNA, 25 bp, probe
agtggctcgatcagtagttatctat

SEQ ID NO: 78336 - DNA, 25 bp, probe
cattgctgtcactgtcacgattatg

SEQ ID NO: 78337 - DNA, 25 bp, probe
ggctcgatcagtagttatctataca

SEQ ID NO: 78338 - DNA, 25 bp, probe
tggctcgatcagtagttatctatac

SEQ ID NO: 78339 - DNA, 25 bp, probe
gtggctcgatcagtagttatctata

SEQ ID NO: 78340 - DNA, 25 bp, probe
cgttgagttccattgcgttaattga

SEQ ID NO: 78341 - DNA, 25 bp, probe
gtatccgtggatcatacaatcaatc

SEQ ID NO: 78342 - DNA, 25 bp, probe
attaagcataccacgtagtcactaa

SEQ ID NO: 78343 - DNA, 25 bp, probe
aattaagcataccacgtagtcacta

SEQ ID NO: 78344 - DNA, 25 bp, probe
taattaagcataccacgtagtcact

SEQ ID NO: 78345 - DNA, 25 bp, probe
gtaattaagcataccacgtagtcac

SEQ ID NO: 78346 - DNA, 25 bp, probe
agtaattaagcataccacgtagtca

SEQ ID NO: 78347 - DNA, 25 bp, probe
aaacgaaaccgatacaaacagaaat

SEQ ID NO: 78348 - DNA, 25 bp, probe
aagtaaagcaaccacaaacagaaat

SEQ ID NO: 78349 - DNA, 25 bp, probe
aaagtaaagcaaccacaaacagaaa

SEQ ID NO: 78350 - DNA, 25 bp, probe
cagtggctcgatcagtagttatcta

SEQ ID NO: 78351 - DNA, 25 bp, probe
tcaatatcaaccaaccaaccaacca

SEQ ID NO: 78352 - DNA, 25 bp, probe
accgatacaaacagaaatccactaa

SEQ ID NO: 78353 - DNA, 25 bp, probe
aaccgatacaaacagaaatccacta

SEQ ID NO: 78354 - DNA, 25 bp, probe
cttggaggctctggagacaattatc

SEQ ID NO: 78355 - DNA, 25 bp, probe
caacatgagggaaataagcaaagag

SEQ ID NO: 78356 - DNA, 25 bp, probe
aacatgagggaaataagcaaagagg

SEQ ID NO: 78357 - DNA, 25 bp, probe
gcaacatgagggaaataagcaaaga

SEQ ID NO: 78358 - DNA, 25 bp, probe
agcaacatgagggaaataagcaaag

SEQ ID NO: 78359 - DNA, 25 bp, probe
cagcaacatgagggaaataagcaaa

SEQ ID NO: 78360 - DNA, 25 bp, probe
acatgagggaaataagcaaagaggg

SEQ ID NO: 78361 - DNA, 25 bp, probe
agggaaataagcaaagagggcaatc

SEQ ID NO: 78362 - DNA, 25 bp, probe
gagggaaataagcaaagagggcaat

SEQ ID NO: 78363 - DNA, 25 bp, probe
ttggaggctctggagacaattatcg

SEQ ID NO: 78364 - DNA, 25 bp, probe
ccttggaggctctggagacaattat

SEQ ID NO: 78365 - DNA, 25 bp, probe
ccagcaacatgagggaaataagcaa

SEQ ID NO: 78366 - DNA, 25 bp, probe
atgagggaaataagcaaagagggca

SEQ ID NO: 78367 - DNA, 25 bp, probe
tgagggaaataagcaaagagggcaa

SEQ ID NO: 78368 - DNA, 25 bp, probe
catgagggaaataagcaaagagggc

SEQ ID NO: 78369 - DNA, 25 bp, probe
tccttggaggctctggagacaatta

SEQ ID NO: 78370 - DNA, 25 bp, probe
gggaaataagcaaagagggcaatcg

SEQ ID NO: 78371 - DNA, 25 bp, probe
ggaaataagcaaagagggcaatcgc

SEQ ID NO: 78372 - DNA, 25 bp, probe
tccagcaacatgagggaaataagca

SEQ ID NO: 78373 - DNA, 25 bp, probe
ttccagcaacatgagggaaataagc

SEQ ID NO: 78374 - DNA, 25 bp, probe
gaaataagcaaagagggcaatcgcc

SEQ ID NO: 78375 - DNA, 25 bp, probe
gaatctgggattcagggcttcagag

SEQ ID NO: 78376 - DNA, 25 bp, probe
ctctcaaccatcctcatatcatcag

SEQ ID NO: 78377 - DNA, 25 bp, probe
catctctcaaccatcctcatatcat

SEQ ID NO: 78378 - DNA, 25 bp, probe
gtcatctctcaaccatcctcatatc

SEQ ID NO: 78379 - DNA, 25 bp, probe
tctctcaaccatcctcatatcatca

SEQ ID NO: 78380 - DNA, 25 bp, probe
atctctcaaccatcctcatatcatc

SEQ ID NO: 78381 - DNA, 25 bp, probe
tcatctctcaaccatcctcatatca

SEQ ID NO: 78382 - DNA, 25 bp, probe
ctcaaccatcctcatatcatcagta

SEQ ID NO: 78383 - DNA, 25 bp, probe
tctcaaccatcctcatatcatcagt

SEQ ID NO: 78384 - DNA, 25 bp, probe
tgtcatctctcaaccatcctcatat

SEQ ID NO: 78385 - DNA, 25 bp, probe
atgtcatctctcaaccatcctcata

SEQ ID NO: 78386 - DNA, 25 bp, probe
tcaaccatcctcatatcatcagtat

SEQ ID NO: 78387 - DNA, 25 bp, probe
caaccatcctcatatcatcagtatt

SEQ ID NO: 78388 - DNA, 25 bp, probe
ttcacatcagacgagagattgagat

SEQ ID NO: 78389 - DNA, 25 bp, probe
acatcagacgagagattgagatcat

SEQ ID NO: 78390 - DNA, 25 bp, probe
aattaaggatgaacaagacatggtt

SEQ ID NO: 78391 - DNA, 25 bp, probe
catcagacgagagattgagatcatg

SEQ ID NO: 78392 - DNA, 25 bp, probe
atcagacgagagattgagatcatgt

SEQ ID NO: 78393 - DNA, 25 bp, probe
gttcacatcagacgagagattgaga

SEQ ID NO: 78394 - DNA, 25 bp, probe
tcacatcagacgagagattgagatc

SEQ ID NO: 78395 - DNA, 25 bp, probe
gacgagagattgagatcatgtcatc

SEQ ID NO: 78396 - DNA, 25 bp, probe
atggttcacatcagacgagagattg

SEQ ID NO: 78397 - DNA, 25 bp, probe
atcatgtcatctctcaaccatcctc

SEQ ID NO: 78398 - DNA, 25 bp, probe
gatcatgtcatctctcaaccatcct

SEQ ID NO: 78399 - DNA, 25 bp, probe
agacgagagattgagatcatgtcat

SEQ ID NO: 78400 - DNA, 25 bp, probe
cacatcagacgagagattgagatca

SEQ ID NO: 78401 - DNA, 25 bp, probe
catgtcatctctcaaccatcctcat

SEQ ID NO: 78402 - DNA, 25 bp, probe
tcagacgagagattgagatcatgtc

SEQ ID NO: 78403 - DNA, 25 bp, probe
cagacgagagattgagatcatgtca

SEQ ID NO: 78404 - DNA, 25 bp, probe
ggttcacatcagacgagagattgag

SEQ ID NO: 78405 - DNA, 25 bp, probe
catggttcacatcagacgagagatt

SEQ ID NO: 78406 - DNA, 25 bp, probe
atcttgaaacacagcagcaaatact

SEQ ID NO: 78407 - DNA, 25 bp, probe
catcttgaaacacagcagcaaatac

SEQ ID NO: 78408 - DNA, 25 bp, probe
acgagagattgagatcatgtcatct

SEQ ID NO: 78409 - DNA, 25 bp, probe
tcatgtcatctctcaaccatcctca

SEQ ID NO: 78410 - DNA, 25 bp, probe
aaattaaggatgaacaagacatggt

SEQ ID NO: 78411 - DNA, 25 bp, probe
tcttgaaacacagcagcaaatactc

SEQ ID NO: 78412 - DNA, 25 bp, probe
tggttcacatcagacgagagattga

SEQ ID NO: 78413 - DNA, 25 bp, probe
agatcatgtcatctctcaaccatcc

SEQ ID NO: 78414 - DNA, 25 bp, probe
aaccatcctcatatcatcagtattt

SEQ ID NO: 78415 - DNA, 25 bp, probe
ttgaaacacagcagcaaatactcag

SEQ ID NO: 78416 - DNA, 25 bp, probe
cttgaaacacagcagcaaatactca

SEQ ID NO: 78417 - DNA, 25 bp, probe
acatggttcacatcagacgagagat

SEQ ID NO: 78418 - DNA, 25 bp, probe
aacaagacatggttcacatcagacg

SEQ ID NO: 78419 - DNA, 25 bp, probe
caagacatggttcacatcagacgag

SEQ ID NO: 78420 - DNA, 25 bp, probe
cccagtttcatatacaggtcacttg

SEQ ID NO: 78421 - DNA, 25 bp, probe
tcccagtttcatatacaggtcactt

SEQ ID NO: 78422 - DNA, 25 bp, probe
tttgtcccagtttcatatacaggtc

SEQ ID NO: 78423 - DNA, 25 bp, probe
ctttgtcccagtttcatatacaggt

SEQ ID NO: 78424 - DNA, 25 bp, probe
cagtttcatatacaggtcacttggc

SEQ ID NO: 78425 - DNA, 25 bp, probe
gtcccagtttcatatacaggtcact

SEQ ID NO: 78426 - DNA, 25 bp, probe
ttgtcccagtttcatatacaggtca

SEQ ID NO: 78427 - DNA, 25 bp, probe
gctttgtcccagtttcatatacagg

SEQ ID NO: 78428 - DNA, 25 bp, probe
ggctttgtcccagtttcatatacag

SEQ ID NO: 78429 - DNA, 25 bp, probe
tgtcccagtttcatatacaggtcac

SEQ ID NO: 78430 - DNA, 25 bp, probe
ccagtttcatatacaggtcacttgg

SEQ ID NO: 78431 - DNA, 25 bp, probe
taaattcttgctctgggcatctaat

SEQ ID NO: 78432 - DNA, 25 bp, probe
aaattcttgctctgggcatctaatt

SEQ ID NO: 78433 - DNA, 25 bp, probe
ttccagagagtgaggtaggtgctag

SEQ ID NO: 78434 - DNA, 25 bp, probe
gttccagagagtgaggtaggtgcta

SEQ ID NO: 78435 - DNA, 25 bp, probe
aattcttgctctgggcatctaattc

SEQ ID NO: 78436 - DNA, 25 bp, probe
gggctttgtcccagtttcatataca

SEQ ID NO: 78437 - DNA, 25 bp, probe
agtttcatatacaggtcacttggcc

SEQ ID NO: 78438 - DNA, 25 bp, probe
attcttgctctgggcatctaattcc

SEQ ID NO: 78439 - DNA, 25 bp, probe
taattccaaccaccttccccacaat

SEQ ID NO: 78440 - DNA, 25 bp, probe
cttgctctgggcatctaattccaac

SEQ ID NO: 78441 - DNA, 25 bp, probe
tcttgctctgggcatctaattccaa

SEQ ID NO: 78442 - DNA, 25 bp, probe
ttcttgctctgggcatctaattcca

SEQ ID NO: 78443 - DNA, 25 bp, probe
tgggcatctaattccaaccaccttc

SEQ ID NO: 78444 - DNA, 25 bp, probe
ctgggcatctaattccaaccacctt

SEQ ID NO: 78445 - DNA, 25 bp, probe
atctaattccaaccaccttccccac

SEQ ID NO: 78446 - DNA, 25 bp, probe
catctaattccaaccaccttcccca

SEQ ID NO: 78447 - DNA, 25 bp, probe
ttctgagatcccctttaggatgaag

SEQ ID NO: 78448 - DNA, 25 bp, probe
gttctgagatcccctttaggatgaa

SEQ ID NO: 78449 - DNA, 25 bp, probe
ctaattccaaccaccttccccacaa

SEQ ID NO: 78450 - DNA, 25 bp, probe
ttgctctgggcatctaattccaacc

SEQ ID NO: 78451 - DNA, 25 bp, probe
cgttctgagatcccctttaggatga

SEQ ID NO: 78452 - DNA, 25 bp, probe
tctgagatcccctttaggatgaagg

SEQ ID NO: 78453 - DNA, 25 bp, probe
acgttctgagatcccctttaggatg

SEQ ID NO: 78454 - DNA, 25 bp, probe
aacgttctgagatcccctttaggat

SEQ ID NO: 78455 - DNA, 25 bp, probe
cttgaaccattatgctggctatgag

SEQ ID NO: 78456 - DNA, 25 bp, probe
ttccttgaaccattatgctggctat

SEQ ID NO: 78457 - DNA, 25 bp, probe
ctatgagcaggtcaccaatgaagac

SEQ ID NO: 78458 - DNA, 25 bp, probe
cttccttgaaccattatgctggcta

SEQ ID NO: 78459 - DNA, 25 bp, probe
ccttgaaccattatgctggctatga

SEQ ID NO: 78460 - DNA, 25 bp, probe
tccttgaaccattatgctggctatg

SEQ ID NO: 78461 - DNA, 25 bp, probe
ttgaaccattatgctggctatgagc

SEQ ID NO: 78462 - DNA, 25 bp, probe
gctatgagcaggtcaccaatgaaga

SEQ ID NO: 78463 - DNA, 25 bp, probe
tatgagcaggtcaccaatgaagacc

SEQ ID NO: 78464 - DNA, 25 bp, probe
ctccacttcctcccttctctttctc

SEQ ID NO: 78465 - DNA, 25 bp, probe
cagactttggcttcatgtttgaaag

SEQ ID NO: 78466 - DNA, 25 bp, probe
ccacttcctcccttctctttctctg

SEQ ID NO: 78467 - DNA, 25 bp, probe
tccacttcctcccttctctttctct

SEQ ID NO: 78468 - DNA, 25 bp, probe
atcactgtctccaagaaaacacaac

SEQ ID NO: 78469 - DNA, 25 bp, probe
catcactgtctccaagaaaacacaa

SEQ ID NO: 78470 - DNA, 25 bp, probe
tttgcagactttggcttcatgtttg

SEQ ID NO: 78471 - DNA, 25 bp, probe
catatcatccacatcggtcagccag

SEQ ID NO: 78472 - DNA, 25 bp, probe
cacttcctcccttctctttctctgc

SEQ ID NO: 78473 - DNA, 25 bp, probe
ttcctccacttcctcccttctcttt

SEQ ID NO: 78474 - DNA, 25 bp, probe
gcagactttggcttcatgtttgaaa

SEQ ID NO: 78475 - DNA, 25 bp, probe
ttgcagactttggcttcatgtttga

SEQ ID NO: 78476 - DNA, 25 bp, probe
tccttttccactcctcaaaacagac

SEQ ID NO: 78477 - DNA, 25 bp, probe
gtccttttccactcctcaaaacaga

SEQ ID NO: 78478 - DNA, 25 bp, probe
agtccttttccactcctcaaaacag

SEQ ID NO: 78479 - DNA, 25 bp, probe
ccatcactgtctccaagaaaacaca

SEQ ID NO: 78480 - DNA, 25 bp, probe
cctccacttcctcccttctctttct

SEQ ID NO: 78481 - DNA, 25 bp, probe
tcctccacttcctcccttctctttc

SEQ ID NO: 78482 - DNA, 25 bp, probe
cttcctccacttcctcccttctctt

SEQ ID NO: 78483 - DNA, 25 bp, probe
ttttgcagactttggcttcatgttt

SEQ ID NO: 78484 - DNA, 25 bp, probe
cttttccactcctcaaaacagacca

SEQ ID NO: 78485 - DNA, 25 bp, probe
actgtctccaagaaaacacaacctg

SEQ ID NO: 78486 - DNA, 25 bp, probe
cactgtctccaagaaaacacaacct

SEQ ID NO: 78487 - DNA, 25 bp, probe
tcactgtctccaagaaaacacaacc

SEQ ID NO: 78488 - DNA, 25 bp, probe
tttccactcctcaaaacagaccact

SEQ ID NO: 78489 - DNA, 25 bp, probe
ttttccactcctcaaaacagaccac

SEQ ID NO: 78490 - DNA, 25 bp, probe
ctccaagaaaacacaacctgccttt

SEQ ID NO: 78491 - DNA, 25 bp, probe
gttttgcagactttggcttcatgtt

SEQ ID NO: 78492 - DNA, 25 bp, probe
cccatcactgtctccaagaaaacac

SEQ ID NO: 78493 - DNA, 25 bp, probe
ctgacatcaagctgacggatgagat

SEQ ID NO: 78494 - DNA, 25 bp, probe
ccttttccactcctcaaaacagacc

SEQ ID NO: 78495 - DNA, 25 bp, probe
caagaaaacacaacctgccttttgg

SEQ ID NO: 78496 - DNA, 25 bp, probe
ccaagaaaacacaacctgccttttg

SEQ ID NO: 78497 - DNA, 25 bp, probe
ctctttggtgttttgcagactttgg

SEQ ID NO: 78498 - DNA, 25 bp, probe
ttccactcctcaaaacagaccactc

SEQ ID NO: 78499 - DNA, 25 bp, probe
tccaagaaaacacaacctgcctttt

SEQ ID NO: 78500 - DNA, 25 bp, probe
tgacatcaagctgacggatgagatg

SEQ ID NO: 78501 - DNA, 25 bp, probe
tgcagactttggcttcatgtttgaa

SEQ ID NO: 78502 - DNA, 25 bp, probe
gtgttttgcagactttggcttcatg

SEQ ID NO: 78503 - DNA, 25 bp, probe
gctctttggtgttttgcagactttg

SEQ ID NO: 78504 - DNA, 25 bp, probe
agctctttggtgttttgcagacttt

SEQ ID NO: 78505 - DNA, 25 bp, probe
accccatcactgtctccaagaaaac

SEQ ID NO: 78506 - DNA, 25 bp, probe
caccccatcactgtctccaagaaaa

SEQ ID NO: 78507 - DNA, 25 bp, probe
ctgtctccaagaaaacacaacctgc

SEQ ID NO: 78508 - DNA, 25 bp, probe
tgcttgagtcttaccgtaattgata

SEQ ID NO: 78509 - DNA, 25 bp, probe
atgcttgagtcttaccgtaattgat

SEQ ID NO: 78510 - DNA, 25 bp, probe
gatgcttgagtcttaccgtaattga

SEQ ID NO: 78511 - DNA, 25 bp, probe
gcttgagtcttaccgtaattgataa

SEQ ID NO: 78512 - DNA, 25 bp, probe
ggatgcttgagtcttaccgtaattg

SEQ ID NO: 78513 - DNA, 25 bp, probe
ttgagtcttaccgtaattgataaca

SEQ ID NO: 78514 - DNA, 25 bp, probe
tggatgcttgagtcttaccgtaatt

SEQ ID NO: 78515 - DNA, 25 bp, probe
tgagtcttaccgtaattgataacaa

SEQ ID NO: 78516 - DNA, 25 bp, probe
cttgagtcttaccgtaattgataac

SEQ ID NO: 78517 - DNA, 25 bp, probe
ctggatgcttgagtcttaccgtaat

SEQ ID NO: 78518 - DNA, 25 bp, probe
tatttctggatgcttgagtcttacc

SEQ ID NO: 78519 - DNA, 25 bp, probe
gctatttctggatgcttgagtctta

SEQ ID NO: 78520 - DNA, 25 bp, probe
ctatttctggatgcttgagtcttac

SEQ ID NO: 78521 - DNA, 25 bp, probe
tgtgtgttaaactaatggaaatgct

SEQ ID NO: 78522 - DNA, 25 bp, probe
tgtgttaaactaatggaaatgctca

SEQ ID NO: 78523 - DNA, 25 bp, probe
gtgtgttaaactaatggaaatgctc

SEQ ID NO: 78524 - DNA, 25 bp, probe
ttgtgtgttaaactaatggaaatgc

SEQ ID NO: 78525 - DNA, 25 bp, probe
ttctggatgcttgagtcttaccgta

SEQ ID NO: 78526 - DNA, 25 bp, probe
tctggatgcttgagtcttaccgtaa

SEQ ID NO: 78527 - DNA, 25 bp, probe
gaggagacatttgtgtgttaaacta

SEQ ID NO: 78528 - DNA, 25 bp, probe
gtgttaaactaatggaaatgctcat

SEQ ID NO: 78529 - DNA, 25 bp, probe
ggaggagacatttgtgtgttaaact

SEQ ID NO: 78530 - DNA, 25 bp, probe
aggagacatttgtgtgttaaactaa

SEQ ID NO: 78531 - DNA, 25 bp, probe
ctagacctcaagagtgaaatgtagg

SEQ ID NO: 78532 - DNA, 25 bp, probe
tagacctcaagagtgaaatgtaggg

SEQ ID NO: 78533 - DNA, 25 bp, probe
gggaggagacatttgtgtgttaaac

SEQ ID NO: 78534 - DNA, 25 bp, probe
agttattctagacctcaagagtgaa

SEQ ID NO: 78535 - DNA, 25 bp, probe
aagttattctagacctcaagagtga

SEQ ID NO: 78536 - DNA, 25 bp, probe
atttctggatgcttgagtcttaccg

SEQ ID NO: 78537 - DNA, 25 bp, probe
ggagacatttgtgtgttaaactaat

SEQ ID NO: 78538 - DNA, 25 bp, probe
acagagtaagttattctagacctca

SEQ ID NO: 78539 - DNA, 25 bp, probe
gagtcttaccgtaattgataacaaa

SEQ ID NO: 78540 - DNA, 25 bp, probe
tttgtgtgttaaactaatggaaatg

SEQ ID NO: 78541 - DNA, 25 bp, probe
taagttattctagacctcaagagtg

SEQ ID NO: 78542 - DNA, 25 bp, probe
gtaagttattctagacctcaagagt

SEQ ID NO: 78543 - DNA, 25 bp, probe
gacatttgtgtgttaaactaatgga

SEQ ID NO: 78544 - DNA, 25 bp, probe
agacatttgtgtgttaaactaatgg

SEQ ID NO: 78545 - DNA, 25 bp, probe
tggtttattgtagaaaagttgaggt

SEQ ID NO: 78546 - DNA, 25 bp, probe
agtaagttattctagacctcaagag

SEQ ID NO: 78547 - DNA, 25 bp, probe
cagagtaagttattctagacctcaa

SEQ ID NO: 78548 - DNA, 25 bp, probe
attctagacctcaagagtgaaatgt

SEQ ID NO: 78549 - DNA, 25 bp, probe
tctagacctcaagagtgaaatgtag

SEQ ID NO: 78550 - DNA, 25 bp, probe
gagtaagttattctagacctcaaga

SEQ ID NO: 78551 - DNA, 25 bp, probe
agagtaagttattctagacctcaag

SEQ ID NO: 78552 - DNA, 25 bp, probe
aatgatacttgacatccttccacaa

SEQ ID NO: 78553 - DNA, 25 bp, probe
tccttcctcacacagttcatcataa

SEQ ID NO: 78554 - DNA, 25 bp, probe
caaggatgtctatgatgatggcaag

SEQ ID NO: 78555 - DNA, 25 bp, probe
cttcctcacacagttcatcataacc

SEQ ID NO: 78556 - DNA, 25 bp, probe
ccttcctcacacagttcatcataac

SEQ ID NO: 78557 - DNA, 25 bp, probe
aggatgtctatgatgatggcaagtt

SEQ ID NO: 78558 - DNA, 25 bp, probe
aaggatgtctatgatgatggcaagt

SEQ ID NO: 78559 - DNA, 25 bp, probe
ctccttcctcacacagttcatcata

SEQ ID NO: 78560 - DNA, 25 bp, probe
atcattgataagagcaagagagacc

SEQ ID NO: 78561 - DNA, 25 bp, probe
cgtgaagatcattgataagagcaag

SEQ ID NO: 78562 - DNA, 25 bp, probe
tatgccgtgaagatcattgataaga

SEQ ID NO: 78563 - DNA, 25 bp, probe
gtatgccgtgaagatcattgataag

SEQ ID NO: 78564 - DNA, 25 bp, probe
agtatgccgtgaagatcattgataa

SEQ ID NO: 78565 - DNA, 25 bp, probe
gatcattgataagagcaagagagac

SEQ ID NO: 78566 - DNA, 25 bp, probe
agatcattgataagagcaagagaga

SEQ ID NO: 78567 - DNA, 25 bp, probe
gagtatgccgtgaagatcattgata

SEQ ID NO: 78568 - DNA, 25 bp, probe
atgccgtgaagatcattgataagag

SEQ ID NO: 78569 - DNA, 25 bp, probe
tcaaggatgtctatgatgatggcaa

SEQ ID NO: 78570 - DNA, 25 bp, probe
gtgaagatcattgataagagcaaga

SEQ ID NO: 78571 - DNA, 25 bp, probe
ccgtgaagatcattgataagagcaa

SEQ ID NO: 78572 - DNA, 25 bp, probe
tgaagatcattgataagagcaagag

SEQ ID NO: 78573 - DNA, 25 bp, probe
gaagatcattgataagagcaagaga

SEQ ID NO: 78574 - DNA, 25 bp, probe
ttatccagtattgttcatcgagacc

SEQ ID NO: 78575 - DNA, 25 bp, probe
tgttatccagtattgttcatcgaga

SEQ ID NO: 78576 - DNA, 25 bp, probe
aagatcattgataagagcaagagag

SEQ ID NO: 78577 - DNA, 25 bp, probe
gttatccagtattgttcatcgagac

SEQ ID NO: 78578 - DNA, 25 bp, probe
tatccagtattgttcatcgagacct

SEQ ID NO: 78579 - DNA, 25 bp, probe
ctcaaggatgtctatgatgatggca

SEQ ID NO: 78580 - DNA, 25 bp, probe
aaagtcagcctaaagaagttatggt

SEQ ID NO: 78581 - DNA, 25 bp, probe
aaatacctctactttccctcccata

SEQ ID NO: 78582 - DNA, 25 bp, probe
aatacctctactttccctcccatat

SEQ ID NO: 78583 - DNA, 25 bp, probe
atacctctactttccctcccatatc

SEQ ID NO: 78584 - DNA, 25 bp, probe
aagtcagcctaaagaagttatggta

SEQ ID NO: 78585 - DNA, 25 bp, probe
tctatgatgatggcaagtttgtgta

SEQ ID NO: 78586 - DNA, 25 bp, probe
gatgtctatgatgatggcaagtttg

SEQ ID NO: 78587 - DNA, 25 bp, probe
atgttatccagtattgttcatcgag

SEQ ID NO: 78588 - DNA, 25 bp, probe
tcagcctaaagaagttatggtatca

SEQ ID NO: 78589 - DNA, 25 bp, probe
agtcagcctaaagaagttatggtat

SEQ ID NO: 78590 - DNA, 25 bp, probe
atgtctatgatgatggcaagtttgt

SEQ ID NO: 78591 - DNA, 25 bp, probe
aaatgatacttgacatccttccaca

SEQ ID NO: 78592 - DNA, 25 bp, probe
gtcagcctaaagaagttatggtatc

SEQ ID NO: 78593 - DNA, 25 bp, probe
aaaccttagtgaaatagcaagtgac

SEQ ID NO: 78594 - DNA, 25 bp, probe
ggatgtctatgatgatggcaagttt

SEQ ID NO: 78595 - DNA, 25 bp, probe
taatgttatccagtattgttcatcg

SEQ ID NO: 78596 - DNA, 25 bp, probe
agtctgcgtgtatgtctatgtatag

SEQ ID NO: 78597 - DNA, 25 bp, probe
cagtctgcgtgtatgtctatgtata

SEQ ID NO: 78598 - DNA, 25 bp, probe
gtctgcgtgtatgtctatgtataga

SEQ ID NO: 78599 - DNA, 25 bp, probe
catggtggaatggaatcagttagaa

SEQ ID NO: 78600 - DNA, 25 bp, probe
tatgtatagactgtatcgtacctgg

SEQ ID NO: 78601 - DNA, 25 bp, probe
gtatctgacatggtggaatggaatc

SEQ ID NO: 78602 - DNA, 25 bp, probe
gacatggtggaatggaatcagttag

SEQ ID NO: 78603 - DNA, 25 bp, probe
agtatctgacatggtggaatggaat

SEQ ID NO: 78604 - DNA, 25 bp, probe
acatggtggaatggaatcagttaga

SEQ ID NO: 78605 - DNA, 25 bp, probe
tatctgacatggtggaatggaatca

SEQ ID NO: 78606 - DNA, 25 bp, probe
atggtggaatggaatcagttagaaa

SEQ ID NO: 78607 - DNA, 25 bp, probe
ccaccagttataatcttcaacctta

SEQ ID NO: 78608 - DNA, 25 bp, probe
atcagttagaaagcgaagaaatcac

SEQ ID NO: 78609 - DNA, 25 bp, probe
gaatggaatcagttagaaagcgaag

SEQ ID NO: 78610 - DNA, 25 bp, probe
ggaatcagttagaaagcgaagaaat

SEQ ID NO: 78611 - DNA, 25 bp, probe
atggaatcagttagaaagcgaagaa

SEQ ID NO: 78612 - DNA, 25 bp, probe
aatggaatcagttagaaagcgaaga

SEQ ID NO: 78613 - DNA, 25 bp, probe
gagtatctgacatggtggaatggaa

SEQ ID NO: 78614 - DNA, 25 bp, probe
tggaatcagttagaaagcgaagaaa

SEQ ID NO: 78615 - DNA, 25 bp, probe
tggtggaatggaatcagttagaaag

SEQ ID NO: 78616 - DNA, 25 bp, probe
tttagtttccattctttctgccttt

SEQ ID NO: 78617 - DNA, 25 bp, probe
tgacatggtggaatggaatcagtta

SEQ ID NO: 78618 - DNA, 25 bp, probe
ctatgtatagactgtatcgtacctg

SEQ ID NO: 78619 - DNA, 25 bp, probe
aatcagttagaaagcgaagaaatca

SEQ ID NO: 78620 - DNA, 25 bp, probe
gagaaagaaagaaggaaagaagaca

SEQ ID NO: 78621 - DNA, 25 bp, probe
ggaatggaatcagttagaaagcgaa

SEQ ID NO: 78622 - DNA, 25 bp, probe
agagaaagaaagaaggaaagaagac

SEQ ID NO: 78623 - DNA, 25 bp, probe
gaatcagttagaaagcgaagaaatc

SEQ ID NO: 78624 - DNA, 25 bp, probe
agaaggaaagaagacaaagaaagaa

SEQ ID NO: 78625 - DNA, 25 bp, probe
aagaaggaaagaagacaaagaaaga

SEQ ID NO: 78626 - DNA, 25 bp, probe
agaaagaaggaaagaagacaaagaa

SEQ ID NO: 78627 - DNA, 25 bp, probe
aagaaagaaggaaagaagacaaaga

SEQ ID NO: 78628 - DNA, 25 bp, probe
agaaagaaagaaggaaagaagacaa

SEQ ID NO: 78629 - DNA, 25 bp, probe
tcagttagaaagcgaagaaatcact

SEQ ID NO: 78630 - DNA, 25 bp, probe
cagttagaaagcgaagaaatcacta

SEQ ID NO: 78631 - DNA, 25 bp, probe
gtcctctcttctacctccaatgaaa

SEQ ID NO: 78632 - DNA, 25 bp, probe
atgtatagactgtatcgtacctggg

SEQ ID NO: 78633 - DNA, 25 bp, probe
caccagttataatcttcaaccttac

SEQ ID NO: 78634 - DNA, 25 bp, probe
ggtggaatggaatcagttagaaagc

SEQ ID NO: 78635 - DNA, 25 bp, probe
cgtcctctcttctacctccaatgaa

SEQ ID NO: 78636 - DNA, 25 bp, probe
aagagaaagaaagaaggaaagaaga

SEQ ID NO: 78637 - DNA, 25 bp, probe
agaagagaaagaaagaaggaaagaa

SEQ ID NO: 78638 - DNA, 25 bp, probe
aagaagagaaagaaagaaggaaaga

SEQ ID NO: 78639 - DNA, 25 bp, probe
gtcatatagagagatccctaatccc

SEQ ID NO: 78640 - DNA, 25 bp, probe
caacagtccttggtcaactatctta

SEQ ID NO: 78641 - DNA, 25 bp, probe
aacagtccttggtcaactatcttaa

SEQ ID NO: 78642 - DNA, 25 bp, probe
acagtccttggtcaactatcttaat

SEQ ID NO: 78643 - DNA, 25 bp, probe
cattgagatgactcctacgaatagt

SEQ ID NO: 78644 - DNA, 25 bp, probe
ccattgagatgactcctacgaatag

SEQ ID NO: 78645 - DNA, 25 bp, probe
tccattgagatgactcctacgaata

SEQ ID NO: 78646 - DNA, 25 bp, probe
ctccattgagatgactcctacgaat

SEQ ID NO: 78647 - DNA, 25 bp, probe
cagtccttggtcaactatcttaata

SEQ ID NO: 78648 - DNA, 25 bp, probe
ctacattgatctacctcttgggaaa

SEQ ID NO: 78649 - DNA, 25 bp, probe
tcctacgaatagtctgagtagatcc

SEQ ID NO: 78650 - DNA, 25 bp, probe
agtccttggtcaactatcttaataa

SEQ ID NO: 78651 - DNA, 25 bp, probe
gcaacagtccttggtcaactatctt

SEQ ID NO: 78652 - DNA, 25 bp, probe
tacattgatctacctcttgggaaag

SEQ ID NO: 78653 - DNA, 25 bp, probe
ctcctacgaatagtctgagtagatc

SEQ ID NO: 78654 - DNA, 25 bp, probe
cgacaagaagaatttgaggatgtaa

SEQ ID NO: 78655 - DNA, 25 bp, probe
cctacattgatctacctcttgggaa

SEQ ID NO: 78656 - DNA, 25 bp, probe
gaaagatgctcagagagagaatcct

SEQ ID NO: 78657 - DNA, 25 bp, probe
gaccaaattccattcaaatgaaaga

SEQ ID NO: 78658 - DNA, 25 bp, probe
gcaaagaaaggataagacctctctc

SEQ ID NO: 78659 - DNA, 25 bp, probe
caaagaaaggataagacctctctcc

SEQ ID NO: 78660 - DNA, 25 bp, probe
tcaaatgaaagatagaacagattgc

SEQ ID NO: 78661 - DNA, 25 bp, probe
gggaccaaattccattcaaatgaaa

SEQ ID NO: 78662 - DNA, 25 bp, probe
aaagatgctcagagagagaatcctg

SEQ ID NO: 78663 - DNA, 25 bp, probe
accaaattccattcaaatgaaagat

SEQ ID NO: 78664 - DNA, 25 bp, probe
ggaccaaattccattcaaatgaaag

SEQ ID NO: 78665 - DNA, 25 bp, probe
tttcgacaagaagaatttgaggatg

SEQ ID NO: 78666 - DNA, 25 bp, probe
ctttcgacaagaagaatttgaggat

SEQ ID NO: 78667 - DNA, 25 bp, probe
aaagaaaggataagacctctctccg

SEQ ID NO: 78668 - DNA, 25 bp, probe
gggaaagatgctcagagagagaatc

SEQ ID NO: 78669 - DNA, 25 bp, probe
tcgacaagaagaatttgaggatgta

SEQ ID NO: 78670 - DNA, 25 bp, probe
ttcgacaagaagaatttgaggatgt

SEQ ID NO: 78671 - DNA, 25 bp, probe
gacaagaagaatttgaggatgtaaa

SEQ ID NO: 78672 - DNA, 25 bp, probe
gaaaggataagacctctctccgatg

SEQ ID NO: 78673 - DNA, 25 bp, probe
agaaaggataagacctctctccgat

SEQ ID NO: 78674 - DNA, 25 bp, probe
attgatctacctcttgggaaagatg

SEQ ID NO: 78675 - DNA, 25 bp, probe
cattgatctacctcttgggaaagat

SEQ ID NO: 78676 - DNA, 25 bp, probe
ccattcaaatgaaagatagaacaga

SEQ ID NO: 78677 - DNA, 25 bp, probe
tccattcaaatgaaagatagaacag

SEQ ID NO: 78678 - DNA, 25 bp, probe
gactcctacgaatagtctgagtaga

SEQ ID NO: 78679 - DNA, 25 bp, probe
atgactcctacgaatagtctgagta

SEQ ID NO: 78680 - DNA, 25 bp, probe
actcctacgaatagtctgagtagat

SEQ ID NO: 78681 - DNA, 25 bp, probe
tgactcctacgaatagtctgagtag

SEQ ID NO: 78682 - DNA, 25 bp, probe
ttgagatgactcctacgaatagtct

SEQ ID NO: 78683 - DNA, 25 bp, probe
aagaaaggataagacctctctccga

SEQ ID NO: 78684 - DNA, 25 bp, probe
ccaaggatgctgtgtagataagtaa

SEQ ID NO: 78685 - DNA, 25 bp, probe
tccaaggatgctgtgtagataagta

SEQ ID NO: 78686 - DNA, 25 bp, probe
ctccaaggatgctgtgtagataagt

SEQ ID NO: 78687 - DNA, 25 bp, probe
cctccaaggatgctgtgtagataag

SEQ ID NO: 78688 - DNA, 25 bp, probe
tcctggatcacagaactcatttcat

SEQ ID NO: 78689 - DNA, 25 bp, probe
cctggatcacagaactcatttcatg

SEQ ID NO: 78690 - DNA, 25 bp, probe
agtagtgtttccatgctctgtgtac

SEQ ID NO: 78691 - DNA, 25 bp, probe
gtcctggatcacagaactcatttca

SEQ ID NO: 78692 - DNA, 25 bp, probe
ggtcctggatcacagaactcatttc

SEQ ID NO: 78693 - DNA, 25 bp, probe
gtagtgtttccatgctctgtgtacg

SEQ ID NO: 78694 - DNA, 25 bp, probe
ctttcctgacccttccctttctctg

SEQ ID NO: 78695 - DNA, 25 bp, probe
tcctccaaggatgctgtgtagataa

SEQ ID NO: 78696 - DNA, 25 bp, probe
tagtgtttccatgctctgtgtacgt

SEQ ID NO: 78697 - DNA, 25 bp, probe
gggtcctggatcacagaactcattt

SEQ ID NO: 78698 - DNA, 25 bp, probe
ctggatcacagaactcatttcatga

SEQ ID NO: 78699 - DNA, 25 bp, probe
atgggtcctggatcacagaactcat

SEQ ID NO: 78700 - DNA, 25 bp, probe
agagaagatcaccctccttcgagag

SEQ ID NO: 78701 - DNA, 25 bp, probe
tcatttcatgagtgttttcgagggg

SEQ ID NO: 78702 - DNA, 25 bp, probe
tacctcatggcacatctaaagagag

SEQ ID NO: 78703 - DNA, 25 bp, probe
gtacctcatggcacatctaaagaga

SEQ ID NO: 78704 - DNA, 25 bp, probe
ctcatggcacatctaaagagagtga

SEQ ID NO: 78705 - DNA, 25 bp, probe
tcatggcacatctaaagagagtgac

SEQ ID NO: 78706 - DNA, 25 bp, probe
acatctaaagagagtgaccctccac

SEQ ID NO: 78707 - DNA, 25 bp, probe
cacatctaaagagagtgaccctcca

SEQ ID NO: 78708 - DNA, 25 bp, probe
cctcatggcacatctaaagagagtg

SEQ ID NO: 78709 - DNA, 25 bp, probe
acctcatggcacatctaaagagagt

SEQ ID NO: 78710 - DNA, 25 bp, probe
catggcacatctaaagagagtgacc

SEQ ID NO: 78711 - DNA, 25 bp, probe
ctaaagagagtgaccctccacgaaa

SEQ ID NO: 78712 - DNA, 25 bp, probe
atggcacatctaaagagagtgaccc

SEQ ID NO: 78713 - DNA, 25 bp, probe
catctaaagagagtgaccctccacg

SEQ ID NO: 78714 - DNA, 25 bp, probe
atctaaagagagtgaccctccacga

SEQ ID NO: 78715 - DNA, 25 bp, probe
gcacatctaaagagagtgaccctcc

SEQ ID NO: 78716 - DNA, 25 bp, probe
ggcacatctaaagagagtgaccctc

SEQ ID NO: 78717 - DNA, 25 bp, probe
tctaaagagagtgaccctccacgaa

SEQ ID NO: 78718 - DNA, 25 bp, probe
taaagagagtgaccctccacgaaaa

SEQ ID NO: 78719 - DNA, 25 bp, probe
tggcacatctaaagagagtgaccct

SEQ ID NO: 78720 - DNA, 25 bp, probe
aaagagagtgaccctccacgaaaag

SEQ ID NO: 78721 - DNA, 25 bp, probe
gaatatggcaattagcgatatagca

SEQ ID NO: 78722 - DNA, 25 bp, probe
agaatatggcaattagcgatatagc

SEQ ID NO: 78723 - DNA, 25 bp, probe
atggcaattagcgatatagcatacc

SEQ ID NO: 78724 - DNA, 25 bp, probe
aatatggcaattagcgatatagcat

SEQ ID NO: 78725 - DNA, 25 bp, probe
gcaacttactagagtgatgatgtga

SEQ ID NO: 78726 - DNA, 25 bp, probe
caacttactagagtgatgatgtgaa

SEQ ID NO: 78727 - DNA, 25 bp, probe
ggcttcagctactatctaatcatca

SEQ ID NO: 78728 - DNA, 25 bp, probe
cggcttcagctactatctaatcatc

SEQ ID NO: 78729 - DNA, 25 bp, probe
tatggcaattagcgatatagcatac

SEQ ID NO: 78730 - DNA, 25 bp, probe
gcttcagctactatctaatcatcac

SEQ ID NO: 78731 - DNA, 25 bp, probe
acggcttcagctactatctaatcat

SEQ ID NO: 78732 - DNA, 25 bp, probe
gtgatgatgtgaaagaaatggtgat

SEQ ID NO: 78733 - DNA, 25 bp, probe
tagcgatatagcatacccaaacaaa

SEQ ID NO: 78734 - DNA, 25 bp, probe
ttagcgatatagcatacccaaacaa

SEQ ID NO: 78735 - DNA, 25 bp, probe
attagcgatatagcatacccaaaca

SEQ ID NO: 78736 - DNA, 25 bp, probe
gagtgatgatgtgaaagaaatggtg

SEQ ID NO: 78737 - DNA, 25 bp, probe
agagtgatgatgtgaaagaaatggt

SEQ ID NO: 78738 - DNA, 25 bp, probe
gctactatctaatcatcacccgaag

SEQ ID NO: 78739 - DNA, 25 bp, probe
tttgttatcaggttgtttcagttgt

SEQ ID NO: 78740 - DNA, 25 bp, probe
tattggatgccctatctatctgcta

SEQ ID NO: 78741 - DNA, 25 bp, probe
cagttgtattggatgccctatctat

SEQ ID NO: 78742 - DNA, 25 bp, probe
caggttgtttcagttgtattggatg

SEQ ID NO: 78743 - DNA, 25 bp, probe
tcaggttgtttcagttgtattggat

SEQ ID NO: 78744 - DNA, 25 bp, probe
atcaggttgtttcagttgtattgga

SEQ ID NO: 78745 - DNA, 25 bp, probe
acccgaagatttaagatacaccaaa

SEQ ID NO: 78746 - DNA, 25 bp, probe
ttgtattggatgccctatctatctg

SEQ ID NO: 78747 - DNA, 25 bp, probe
gttgtattggatgccctatctatct

SEQ ID NO: 78748 - DNA, 25 bp, probe
agttgtattggatgccctatctatc

SEQ ID NO: 78749 - DNA, 25 bp, probe
agtgatgatgtgaaagaaatggtga

SEQ ID NO: 78750 - DNA, 25 bp, probe
cttcagctactatctaatcatcacc

SEQ ID NO: 78751 - DNA, 25 bp, probe
tgatgatgtgaaagaaatggtgatt

SEQ ID NO: 78752 - DNA, 25 bp, probe
tatcaggttgtttcagttgtattgg

SEQ ID NO: 78753 - DNA, 25 bp, probe
atcacccgaagatttaagatacacc

SEQ ID NO: 78754 - DNA, 25 bp, probe
catcacccgaagatttaagatacac

SEQ ID NO: 78755 - DNA, 25 bp, probe
ttgcctttgtaatttgacttctgac

SEQ ID NO: 78756 - DNA, 25 bp, probe
cttgcctttgtaatttgacttctga

SEQ ID NO: 78757 - DNA, 25 bp, probe
tcatcacccgaagatttaagataca

SEQ ID NO: 78758 - DNA, 25 bp, probe
cacccgaagatttaagatacaccaa

SEQ ID NO: 78759 - DNA, 25 bp, probe
tcagttgtattggatgccctatcta

SEQ ID NO: 78760 - DNA, 25 bp, probe
tttcagttgtattggatgccctatc

SEQ ID NO: 78761 - DNA, 25 bp, probe
ggcaaagactatcccaaggttattt

SEQ ID NO: 78762 - DNA, 25 bp, probe
cgatatagcatacccaaacaaagat

SEQ ID NO: 78763 - DNA, 25 bp, probe
gcctacttccactgtaagaaagaat

SEQ ID NO: 78764 - DNA, 25 bp, probe
gtttcagttgtattggatgccctat

SEQ ID NO: 78765 - DNA, 25 bp, probe
agccttaatccttctcacttctcag

SEQ ID NO: 78766 - DNA, 25 bp, probe
gagccttaatccttctcacttctca

SEQ ID NO: 78767 - DNA, 25 bp, probe
gccttaatccttctcacttctcagt

SEQ ID NO: 78768 - DNA, 25 bp, probe
cgagccttaatccttctcacttctc

SEQ ID NO: 78769 - DNA, 25 bp, probe
ccagggtgatctcaaagtatctaat

SEQ ID NO: 78770 - DNA, 25 bp, probe
cccagggtgatctcaaagtatctaa

SEQ ID NO: 78771 - DNA, 25 bp, probe
ctcagtgtcagagcagaaatgaatc

SEQ ID NO: 78772 - DNA, 25 bp, probe
cagggtgatctcaaagtatctaatt

SEQ ID NO: 78773 - DNA, 25 bp, probe
tctcagtgtcagagcagaaatgaat

SEQ ID NO: 78774 - DNA, 25 bp, probe
agggtgatctcaaagtatctaattc

SEQ ID NO: 78775 - DNA, 25 bp, probe
ttgactgtgtccattcgggttatta

SEQ ID NO: 78776 - DNA, 25 bp, probe
gggtgatctcaaagtatctaattca

SEQ ID NO: 78777 - DNA, 25 bp, probe
gtcgagccttaatccttctcacttc

SEQ ID NO: 78778 - DNA, 25 bp, probe
tgactgtgtccattcgggttattag

SEQ ID NO: 78779 - DNA, 25 bp, probe
tcgagccttaatccttctcacttct

SEQ ID NO: 78780 - DNA, 25 bp, probe
cagtgtcagagcagaaatgaatcct

SEQ ID NO: 78781 - DNA, 25 bp, probe
tcagtgtcagagcagaaatgaatcc

SEQ ID NO: 78782 - DNA, 25 bp, probe
agtcgagccttaatccttctcactt

SEQ ID NO: 78783 - DNA, 25 bp, probe
agtgtcagagcagaaatgaatcctg

SEQ ID NO: 78784 - DNA, 25 bp, probe
tgatctcaaagtatctaattcacct

SEQ ID NO: 78785 - DNA, 25 bp, probe
attcgggttattagcagctaagaag

SEQ ID NO: 78786 - DNA, 25 bp, probe
cattcgggttattagcagctaagaa

SEQ ID NO: 78787 - DNA, 25 bp, probe
gagtcgagccttaatccttctcact

SEQ ID NO: 78788 - DNA, 25 bp, probe
agagtcgagccttaatccttctcac

SEQ ID NO: 78789 - DNA, 25 bp, probe
cagagtcgagccttaatccttctca

SEQ ID NO: 78790 - DNA, 25 bp, probe
ttaatccttctcacttctcagtgtc

SEQ ID NO: 78791 - DNA, 25 bp, probe
cttaatccttctcacttctcagtgt

SEQ ID NO: 78792 - DNA, 25 bp, probe
ccttaatccttctcacttctcagtg

SEQ ID NO: 78793 - DNA, 25 bp, probe
gttgactgtgtccattcgggttatt

SEQ ID NO: 78794 - DNA, 25 bp, probe
ttctcagtgtcagagcagaaatgaa

SEQ ID NO: 78795 - DNA, 25 bp, probe
taatccttctcacttctcagtgtca

SEQ ID NO: 78796 - DNA, 25 bp, probe
ctgtgtccattcgggttattagcag

SEQ ID NO: 78797 - DNA, 25 bp, probe
gactgtgtccattcgggttattagc

SEQ ID NO: 78798 - DNA, 25 bp, probe
actgtgtccattcgggttattagca

SEQ ID NO: 78799 - DNA, 25 bp, probe
gatctcaaagtatctaattcacctt

SEQ ID NO: 78800 - DNA, 25 bp, probe
cttctcagtgtcagagcagaaatga

SEQ ID NO: 78801 - DNA, 25 bp, probe
gtgtcagagcagaaatgaatcctgg

SEQ ID NO: 78802 - DNA, 25 bp, probe
acttctcagtgtcagagcagaaatg

SEQ ID NO: 78803 - DNA, 25 bp, probe
ccagagtcgagccttaatccttctc

SEQ ID NO: 78804 - DNA, 25 bp, probe
ccattcgggttattagcagctaaga

SEQ ID NO: 78805 - DNA, 25 bp, probe
tccattcgggttattagcagctaag

SEQ ID NO: 78806 - DNA, 25 bp, probe
aatccttctcacttctcagtgtcag

SEQ ID NO: 78807 - DNA, 25 bp, probe
tgtccattcgggttattagcagcta

SEQ ID NO: 78808 - DNA, 25 bp, probe
tcaaagtatctaattcaccttaaca

SEQ ID NO: 78809 - DNA, 25 bp, probe
gtgaggcagtcttgttcttagtata

SEQ ID NO: 78810 - DNA, 25 bp, probe
atattgtattgtgtctggttcctgt

SEQ ID NO: 78811 - DNA, 25 bp, probe
tgaggcagtcttgttcttagtatag

SEQ ID NO: 78812 - DNA, 25 bp, probe
tattgtattgtgtctggttcctgtc

SEQ ID NO: 78813 - DNA, 25 bp, probe
ctgagaagaatggtgtgaagattac

SEQ ID NO: 78814 - DNA, 25 bp, probe
tcttagtatagatgctgacctccat

SEQ ID NO: 78815 - DNA, 25 bp, probe
gttcttagtatagatgctgacctcc

SEQ ID NO: 78816 - DNA, 25 bp, probe
ttcttagtatagatgctgacctcca

SEQ ID NO: 78817 - DNA, 25 bp, probe
tgttcttagtatagatgctgacctc

SEQ ID NO: 78818 - DNA, 25 bp, probe
gaggcagtcttgttcttagtataga

SEQ ID NO: 78819 - DNA, 25 bp, probe
tgtgaggcagtcttgttcttagtat

SEQ ID NO: 78820 - DNA, 25 bp, probe
ttgttcttagtatagatgctgacct

SEQ ID NO: 78821 - DNA, 25 bp, probe
ttgtgaggcagtcttgttcttagta

SEQ ID NO: 78822 - DNA, 25 bp, probe
tatattgtattgtgtctggttcctg

SEQ ID NO: 78823 - DNA, 25 bp, probe
cttgttcttagtatagatgctgacc

SEQ ID NO: 78824 - DNA, 25 bp, probe
ggcagtcttgttcttagtatagatg

SEQ ID NO: 78825 - DNA, 25 bp, probe
aggcagtcttgttcttagtatagat

SEQ ID NO: 78826 - DNA, 25 bp, probe
ctctccatgataatagcaggttgta

SEQ ID NO: 78827 - DNA, 25 bp, probe
attgtattgtgtctggttcctgtct

SEQ ID NO: 78828 - DNA, 25 bp, probe
tctccatgataatagcaggttgtat

SEQ ID NO: 78829 - DNA, 25 bp, probe
ttatattgtattgtgtctggttcct

SEQ ID NO: 78830 - DNA, 25 bp, probe
tcttgttcttagtatagatgctgac

SEQ ID NO: 78831 - DNA, 25 bp, probe
gtcttgttcttagtatagatgctga

SEQ ID NO: 78832 - DNA, 25 bp, probe
agtcttgttcttagtatagatgctg

SEQ ID NO: 78833 - DNA, 25 bp, probe
cagtcttgttcttagtatagatgct

SEQ ID NO: 78834 - DNA, 25 bp, probe
ttgtattgtgtctggttcctgtctg

SEQ ID NO: 78835 - DNA, 25 bp, probe
gaagaatggtgtgaagattaccttg

SEQ ID NO: 78836 - DNA, 25 bp, probe
agaagaatggtgtgaagattacctt

SEQ ID NO: 78837 - DNA, 25 bp, probe
gagaagaatggtgtgaagattacct

SEQ ID NO: 78838 - DNA, 25 bp, probe
tgagaagaatggtgtgaagattacc

SEQ ID NO: 78839 - DNA, 25 bp, probe
ctccatgataatagcaggttgtata

SEQ ID NO: 78840 - DNA, 25 bp, probe
aagaatggtgtgaagattaccttgc

SEQ ID NO: 78841 - DNA, 25 bp, probe
tagattggcacttctctgtttgatg

SEQ ID NO: 78842 - DNA, 25 bp, probe
gtagattggcacttctctgtttgat

SEQ ID NO: 78843 - DNA, 25 bp, probe
caaatgccaagtggatgtgaaatag

SEQ ID NO: 78844 - DNA, 25 bp, probe
tccatgataatagcaggttgtataa

SEQ ID NO: 78845 - DNA, 25 bp, probe
ctttgtgaggcagtcttgttcttag

SEQ ID NO: 78846 - DNA, 25 bp, probe
gattggcacttctctgtttgatgaa

SEQ ID NO: 78847 - DNA, 25 bp, probe
aacaacatggaggtaggaaacaaat

SEQ ID NO: 78848 - DNA, 25 bp, probe
aagattgtcaaagacctaatgtcca

SEQ ID NO: 78849 - DNA, 25 bp, probe
ctgtgtagattggcacttctctgtt

SEQ ID NO: 78850 - DNA, 25 bp, probe
gacaagtttgatgagaatgccaaga

SEQ ID NO: 78851 - DNA, 25 bp, probe
aagtttgatgagaatgccaagactg

SEQ ID NO: 78852 - DNA, 25 bp, probe
caagtttgatgagaatgccaagact

SEQ ID NO: 78853 - DNA, 25 bp, probe
aacctcagaacttactcatcagtca

SEQ ID NO: 78854 - DNA, 25 bp, probe
ctcagaacttactcatcagtcacct

SEQ ID NO: 78855 - DNA, 25 bp, probe
acctcagaacttactcatcagtcac

SEQ ID NO: 78856 - DNA, 25 bp, probe
tcagaacttactcatcagtcacctg

SEQ ID NO: 78857 - DNA, 25 bp, probe
cctcagaacttactcatcagtcacc

SEQ ID NO: 78858 - DNA, 25 bp, probe
aaacctcagaacttactcatcagtc

SEQ ID NO: 78859 - DNA, 25 bp, probe
gaaacctcagaacttactcatcagt

SEQ ID NO: 78860 - DNA, 25 bp, probe
tgaaacctcagaacttactcatcag

SEQ ID NO: 78861 - DNA, 25 bp, probe
cagaacttactcatcagtcacctgg

SEQ ID NO: 78862 - DNA, 25 bp, probe
tatcaaactaccacaaaggaagtgt

SEQ ID NO: 78863 - DNA, 25 bp, probe
gctcaaatctccttatggatagtgt

SEQ ID NO: 78864 - DNA, 25 bp, probe
atatcaaactaccacaaaggaagtg

SEQ ID NO: 78865 - DNA, 25 bp, probe
ctccttatggatagtgtttcttcct

SEQ ID NO: 78866 - DNA, 25 bp, probe
tctccttatggatagtgtttcttcc

SEQ ID NO: 78867 - DNA, 25 bp, probe
agaacatgatgctttgtgaggatat

SEQ ID NO: 78868 - DNA, 25 bp, probe
aagaacatgatgctttgtgaggata

SEQ ID NO: 78869 - DNA, 25 bp, probe
ggctcaaatctccttatggatagtg

SEQ ID NO: 78870 - DNA, 25 bp, probe
gtggctcaaatctccttatggatag

SEQ ID NO: 78871 - DNA, 25 bp, probe
tccttatggatagtgtttcttcctt

SEQ ID NO: 78872 - DNA, 25 bp, probe
gatagtgtttcttccttccagcttt

SEQ ID NO: 78873 - DNA, 25 bp, probe
tggctcaaatctccttatggatagt

SEQ ID NO: 78874 - DNA, 25 bp, probe
cttatggatagtgtttcttccttcc

SEQ ID NO: 78875 - DNA, 25 bp, probe
ccttatggatagtgtttcttccttc

SEQ ID NO: 78876 - DNA, 25 bp, probe
agggattggtagctttctaggattc

SEQ ID NO: 78877 - DNA, 25 bp, probe
gagggattggtagctttctaggatt

SEQ ID NO: 78878 - DNA, 25 bp, probe
gaggatatcaaactaccacaaagga

SEQ ID NO: 78879 - DNA, 25 bp, probe
aggatatcaaactaccacaaaggaa

SEQ ID NO: 78880 - DNA, 25 bp, probe
ggatatcaaactaccacaaaggaag

SEQ ID NO: 78881 - DNA, 25 bp, probe
caccaagtcccagtttagtcagatg

SEQ ID NO: 78882 - DNA, 25 bp, probe
gattccaccaagtcccagtttagtc

SEQ ID NO: 78883 - DNA, 25 bp, probe
caagaacatgatgctttgtgaggat

SEQ ID NO: 78884 - DNA, 25 bp, probe
ctcaaatctccttatggatagtgtt

SEQ ID NO: 78885 - DNA, 25 bp, probe
ggtggctcaaatctccttatggata

SEQ ID NO: 78886 - DNA, 25 bp, probe
tagctttctaggattccaccaagtc

SEQ ID NO: 78887 - DNA, 25 bp, probe
tgaggatatcaaactaccacaaagg

SEQ ID NO: 78888 - DNA, 25 bp, probe
atctccttatggatagtgtttcttc

SEQ ID NO: 78889 - DNA, 25 bp, probe
gtagctttctaggattccaccaagt

SEQ ID NO: 78890 - DNA, 25 bp, probe
tcaaatctccttatggatagtgttt

SEQ ID NO: 78891 - DNA, 25 bp, probe
gaacatgatgctttgtgaggatatc

SEQ ID NO: 78892 - DNA, 25 bp, probe
gatatcaaactaccacaaaggaagt

SEQ ID NO: 78893 - DNA, 25 bp, probe
gattggtagctttctaggattccac

SEQ ID NO: 78894 - DNA, 25 bp, probe
caaatctccttatggatagtgtttc

SEQ ID NO: 78895 - DNA, 25 bp, probe
attccaccaagtcccagtttagtca

SEQ ID NO: 78896 - DNA, 25 bp, probe
aatctccttatggatagtgtttctt

SEQ ID NO: 78897 - DNA, 25 bp, probe
tgactgatgagtaagttctgaggtt

SEQ ID NO: 78898 - DNA, 25 bp, probe
aggtgactgatgagtaagttctgag

SEQ ID NO: 78899 - DNA, 25 bp, probe
gtgactgatgagtaagttctgaggt

SEQ ID NO: 78900 - DNA, 25 bp, probe
caggtgactgatgagtaagttctga

SEQ ID NO: 78901 - DNA, 25 bp, probe
ggtgactgatgagtaagttctgagg

SEQ ID NO: 78902 - DNA, 25 bp, probe
ctgatgagtaagttctgaggtttca

SEQ ID NO: 78903 - DNA, 25 bp, probe
actgatgagtaagttctgaggtttc

SEQ ID NO: 78904 - DNA, 25 bp, probe
gactgatgagtaagttctgaggttt

SEQ ID NO: 78905 - DNA, 25 bp, probe
ccaggtgactgatgagtaagttctg

SEQ ID NO: 78906 - DNA, 25 bp, probe
acacttcctttgtggtagtttgata

SEQ ID NO: 78907 - DNA, 25 bp, probe
acactatccataaggagatttgagc

SEQ ID NO: 78908 - DNA, 25 bp, probe
cacttcctttgtggtagtttgatat

SEQ ID NO: 78909 - DNA, 25 bp, probe
ggaagaaacactatccataaggaga

SEQ ID NO: 78910 - DNA, 25 bp, probe
aggaagaaacactatccataaggag

SEQ ID NO: 78911 - DNA, 25 bp, probe
atatcctcacaaagcatcatgttct

SEQ ID NO: 78912 - DNA, 25 bp, probe
tatcctcacaaagcatcatgttctt

SEQ ID NO: 78913 - DNA, 25 bp, probe
ctatccataaggagatttgagccac

SEQ ID NO: 78914 - DNA, 25 bp, probe
cactatccataaggagatttgagcc

SEQ ID NO: 78915 - DNA, 25 bp, probe
aaggaagaaacactatccataagga

SEQ ID NO: 78916 - DNA, 25 bp, probe
actatccataaggagatttgagcca

SEQ ID NO: 78917 - DNA, 25 bp, probe
aaagctggaaggaagaaacactatc

SEQ ID NO: 78918 - DNA, 25 bp, probe
gaaggaagaaacactatccataagg

SEQ ID NO: 78919 - DNA, 25 bp, probe
ggaaggaagaaacactatccataag

SEQ ID NO: 78920 - DNA, 25 bp, probe
aatcctagaaagctaccaatccctc

SEQ ID NO: 78921 - DNA, 25 bp, probe
gaatcctagaaagctaccaatccct

SEQ ID NO: 78922 - DNA, 25 bp, probe
tcctttgtggtagtttgatatcctc

SEQ ID NO: 78923 - DNA, 25 bp, probe
ttcctttgtggtagtttgatatcct

SEQ ID NO: 78924 - DNA, 25 bp, probe
cttcctttgtggtagtttgatatcc

SEQ ID NO: 78925 - DNA, 25 bp, probe
gactaaactgggacttggtggaatc

SEQ ID NO: 78926 - DNA, 25 bp, probe
catctgactaaactgggacttggtg

SEQ ID NO: 78927 - DNA, 25 bp, probe
atcctcacaaagcatcatgttcttg

SEQ ID NO: 78928 - DNA, 25 bp, probe
tatccataaggagatttgagccacc

SEQ ID NO: 78929 - DNA, 25 bp, probe
aacactatccataaggagatttgag

SEQ ID NO: 78930 - DNA, 25 bp, probe
gacttggtggaatcctagaaagcta

SEQ ID NO: 78931 - DNA, 25 bp, probe
gaagaaacactatccataaggagat

SEQ ID NO: 78932 - DNA, 25 bp, probe
cctttgtggtagtttgatatcctca

SEQ ID NO: 78933 - DNA, 25 bp, probe
acttggtggaatcctagaaagctac

SEQ ID NO: 78934 - DNA, 25 bp, probe
aaacactatccataaggagatttga

SEQ ID NO: 78935 - DNA, 25 bp, probe
gatatcctcacaaagcatcatgttc

SEQ ID NO: 78936 - DNA, 25 bp, probe
acttcctttgtggtagtttgatatc

SEQ ID NO: 78937 - DNA, 25 bp, probe
gaaacactatccataaggagatttg

SEQ ID NO: 78938 - DNA, 25 bp, probe
gtggaatcctagaaagctaccaatc

SEQ ID NO: 78939 - DNA, 25 bp, probe
tgactaaactgggacttggtggaat

SEQ ID NO: 78940 - DNA, 25 bp, probe
agaaacactatccataaggagattt

SEQ ID NO: 78941 - DNA, 25 bp, probe
gaagttccactgatgtgtgttaatt

SEQ ID NO: 78942 - DNA, 25 bp, probe
agaagttccactgatgtgtgttaat

SEQ ID NO: 78943 - DNA, 25 bp, probe
actgatgtgtgttaattatgaccaa

SEQ ID NO: 78944 - DNA, 25 bp, probe
ttgtagtacagaagttccactgatg

SEQ ID NO: 78945 - DNA, 25 bp, probe
gttgtagtacagaagttccactgat

SEQ ID NO: 78946 - DNA, 25 bp, probe
gagaataatatgtggaatggacagt

SEQ ID NO: 78947 - DNA, 25 bp, probe
tgtgtgttaattatgaccaacttga

SEQ ID NO: 78948 - DNA, 25 bp, probe
cagaagttccactgatgtgtgttaa

SEQ ID NO: 78949 - DNA, 25 bp, probe
ttcttaatgtgaagctacgatgtct

SEQ ID NO: 78950 - DNA, 25 bp, probe
tgatgtgtgttaattatgaccaact

SEQ ID NO: 78951 - DNA, 25 bp, probe
tcttaatgtgaagctacgatgtcta

SEQ ID NO: 78952 - DNA, 25 bp, probe
tgtgttaattatgaccaacttgagt

SEQ ID NO: 78953 - DNA, 25 bp, probe
agagaataatatgtggaatggacag

SEQ ID NO: 78954 - DNA, 25 bp, probe
tgtagtacagaagttccactgatgt

SEQ ID NO: 78955 - DNA, 25 bp, probe
ctgatgtgtgttaattatgaccaac

SEQ ID NO: 78956 - DNA, 25 bp, probe
gtagtacagaagttccactgatgtg

SEQ ID NO: 78957 - DNA, 25 bp, probe
gtgtgttaattatgaccaacttgag

SEQ ID NO: 78958 - DNA, 25 bp, probe
tagtacagaagttccactgatgtgt

SEQ ID NO: 78959 - DNA, 25 bp, probe
cttaatgtgaagctacgatgtctaa

SEQ ID NO: 78960 - DNA, 25 bp, probe
ccactgatgtgtgttaattatgacc

SEQ ID NO: 78961 - DNA, 25 bp, probe
cactgatgtgtgttaattatgacca

SEQ ID NO: 78962 - DNA, 25 bp, probe
atgtgtgttaattatgaccaacttg

SEQ ID NO: 78963 - DNA, 25 bp, probe
tccactgatgtgtgttaattatgac

SEQ ID NO: 78964 - DNA, 25 bp, probe
acagaagttccactgatgtgtgtta

SEQ ID NO: 78965 - DNA, 25 bp, probe
tacagaagttccactgatgtgtgtt

SEQ ID NO: 78966 - DNA, 25 bp, probe
tcttccatacgattgttatagagaa

SEQ ID NO: 78967 - DNA, 25 bp, probe
ttcttccatacgattgttatagaga

SEQ ID NO: 78968 - DNA, 25 bp, probe
gatgtgtgttaattatgaccaactt

SEQ ID NO: 78969 - DNA, 25 bp, probe
aagttccactgatgtgtgttaatta

SEQ ID NO: 78970 - DNA, 25 bp, probe
gttccactgatgtgtgttaattatg

SEQ ID NO: 78971 - DNA, 25 bp, probe
ttccactgatgtgtgttaattatga

SEQ ID NO: 78972 - DNA, 25 bp, probe
agttccactgatgtgtgttaattat

SEQ ID NO: 78973 - DNA, 25 bp, probe
cgttgtagtacagaagttccactga

SEQ ID NO: 78974 - DNA, 25 bp, probe
atttctctcccaaattgtaatgctg

SEQ ID NO: 78975 - DNA, 25 bp, probe
atgtggaatggacagtatttctctc

SEQ ID NO: 78976 - DNA, 25 bp, probe
agaataatatgtggaatggacagta

SEQ ID NO: 78977 - DNA, 25 bp, probe
tatgtggaatggacagtatttctct

SEQ ID NO: 78978 - DNA, 25 bp, probe
agtacagaagttccactgatgtgtg

SEQ ID NO: 78979 - DNA, 25 bp, probe
tagagaataatatgtggaatggaca

SEQ ID NO: 78980 - DNA, 25 bp, probe
tgaccaacttgagtaagtaatccaa

SEQ ID NO: 78981 - DNA, 25 bp, probe
atgaccaacttgagtaagtaatcca

SEQ ID NO: 78982 - DNA, 25 bp, probe
gtgttaattatgaccaacttgagta

SEQ ID NO: 78983 - DNA, 25 bp, probe
tatttctctcccaaattgtaatgct

SEQ ID NO: 78984 - DNA, 25 bp, probe
gtatttctctcccaaattgtaatgc

SEQ ID NO: 78985 - DNA, 25 bp, probe
aattaacacacatcagtggaacttc

SEQ ID NO: 78986 - DNA, 25 bp, probe
attaacacacatcagtggaacttct

SEQ ID NO: 78987 - DNA, 25 bp, probe
ttggtcataattaacacacatcagt

SEQ ID NO: 78988 - DNA, 25 bp, probe
atcagtggaacttctgtactacaac

SEQ ID NO: 78989 - DNA, 25 bp, probe
catcagtggaacttctgtactacaa

SEQ ID NO: 78990 - DNA, 25 bp, probe
actgtccattccacatattattctc

SEQ ID NO: 78991 - DNA, 25 bp, probe
tcaagttggtcataattaacacaca

SEQ ID NO: 78992 - DNA, 25 bp, probe
ttaacacacatcagtggaacttctg

SEQ ID NO: 78993 - DNA, 25 bp, probe
agacatcgtagcttcacattaagaa

SEQ ID NO: 78994 - DNA, 25 bp, probe
agttggtcataattaacacacatca

SEQ ID NO: 78995 - DNA, 25 bp, probe
tagacatcgtagcttcacattaaga

SEQ ID NO: 78996 - DNA, 25 bp, probe
actcaagttggtcataattaacaca

SEQ ID NO: 78997 - DNA, 25 bp, probe
acatcagtggaacttctgtactaca

SEQ ID NO: 78998 - DNA, 25 bp, probe
ctgtccattccacatattattctct

SEQ ID NO: 78999 - DNA, 25 bp, probe
gttggtcataattaacacacatcag

SEQ ID NO: 79000 - DNA, 25 bp, probe
cacatcagtggaacttctgtactac

SEQ ID NO: 79001 - DNA, 25 bp, probe
ctcaagttggtcataattaacacac

SEQ ID NO: 79002 - DNA, 25 bp, probe
acacatcagtggaacttctgtacta

SEQ ID NO: 79003 - DNA, 25 bp, probe
ggtcataattaacacacatcagtgg

SEQ ID NO: 79004 - DNA, 25 bp, probe
ttagacatcgtagcttcacattaag

SEQ ID NO: 79005 - DNA, 25 bp, probe
tggtcataattaacacacatcagtg

SEQ ID NO: 79006 - DNA, 25 bp, probe
caagttggtcataattaacacacat

SEQ ID NO: 79007 - DNA, 25 bp, probe
gtcataattaacacacatcagtgga

SEQ ID NO: 79008 - DNA, 25 bp, probe
aacacacatcagtggaacttctgta

SEQ ID NO: 79009 - DNA, 25 bp, probe
taacacacatcagtggaacttctgt

SEQ ID NO: 79010 - DNA, 25 bp, probe
tctctataacaatcgtatggaagaa

SEQ ID NO: 79011 - DNA, 25 bp, probe
ttctctataacaatcgtatggaaga

SEQ ID NO: 79012 - DNA, 25 bp, probe
aagttggtcataattaacacacatc

SEQ ID NO: 79013 - DNA, 25 bp, probe
taattaacacacatcagtggaactt

SEQ ID NO: 79014 - DNA, 25 bp, probe
cataattaacacacatcagtggaac

SEQ ID NO: 79015 - DNA, 25 bp, probe
ataattaacacacatcagtggaact

SEQ ID NO: 79016 - DNA, 25 bp, probe
tcataattaacacacatcagtggaa

SEQ ID NO: 79017 - DNA, 25 bp, probe
tcagtggaacttctgtactacaacg

SEQ ID NO: 79018 - DNA, 25 bp, probe
tactgtccattccacatattattct

SEQ ID NO: 79019 - DNA, 25 bp, probe
gagagaaatactgtccattccacat

SEQ ID NO: 79020 - DNA, 25 bp, probe
cagcattacaatttgggagagaaat

SEQ ID NO: 79021 - DNA, 25 bp, probe
agagaaatactgtccattccacata

SEQ ID NO: 79022 - DNA, 25 bp, probe
cacacatcagtggaacttctgtact

SEQ ID NO: 79023 - DNA, 25 bp, probe
tgtccattccacatattattctcta

SEQ ID NO: 79024 - DNA, 25 bp, probe
ttggattacttactcaagttggtca

SEQ ID NO: 79025 - DNA, 25 bp, probe
tggattacttactcaagttggtcat

SEQ ID NO: 79026 - DNA, 25 bp, probe
tactcaagttggtcataattaacac

SEQ ID NO: 79027 - DNA, 25 bp, probe
tacaatttgggagagaaatactgtc

SEQ ID NO: 79028 - DNA, 25 bp, probe
gcattacaatttgggagagaaatac

SEQ ID NO: 79029 - DNA, 25 bp, probe
ccattccagtcttcacagtatcaac

SEQ ID NO: 79030 - DNA, 25 bp, probe
cattccagtcttcacagtatcaact

SEQ ID NO: 79031 - DNA, 25 bp, probe
gttgtatggaagagcattcggattg

SEQ ID NO: 79032 - DNA, 25 bp, probe
atttctttctttgacttgtgactgc

SEQ ID NO: 79033 - DNA, 25 bp, probe
catttctttctttgacttgtgactg

SEQ ID NO: 79034 - DNA, 25 bp, probe
aaactttctaaattgactgagccct

SEQ ID NO: 79035 - DNA, 25 bp, probe
taaactttctaaattgactgagccc

SEQ ID NO: 79036 - DNA, 25 bp, probe
aactttctaaattgactgagccctg

SEQ ID NO: 79037 - DNA, 25 bp, probe
ggttgtatggaagagcattcggatt

SEQ ID NO: 79038 - DNA, 25 bp, probe
tcatttctttctttgacttgtgact

SEQ ID NO: 79039 - DNA, 25 bp, probe
ttatcttcaagaacaagcagcaaga

SEQ ID NO: 79040 - DNA, 25 bp, probe
tttatcttcaagaacaagcagcaag

SEQ ID NO: 79041 - DNA, 25 bp, probe
ctttatcttcaagaacaagcagcaa

SEQ ID NO: 79042 - DNA, 25 bp, probe
tatcttcaagaacaagcagcaagag

SEQ ID NO: 79043 - DNA, 25 bp, probe
tttctttctttgacttgtgactgcc

SEQ ID NO: 79044 - DNA, 25 bp, probe
ttcatttctttctttgacttgtgac

SEQ ID NO: 79045 - DNA, 25 bp, probe
cccattccagtcttcacagtatcaa

SEQ ID NO: 79046 - DNA, 25 bp, probe
actttctaaattgactgagccctgt

SEQ ID NO: 79047 - DNA, 25 bp, probe
cattctgaattctggaggctatatc

SEQ ID NO: 79048 - DNA, 25 bp, probe
cttcatttctttctttgacttgtga

SEQ ID NO: 79049 - DNA, 25 bp, probe
tcttcatttctttctttgacttgtg

SEQ ID NO: 79050 - DNA, 25 bp, probe
tctgaattctggaggctatatcatg

SEQ ID NO: 79051 - DNA, 25 bp, probe
gtcattctgaattctggaggctata

SEQ ID NO: 79052 - DNA, 25 bp, probe
ctcccattccagtcttcacagtatc

SEQ ID NO: 79053 - DNA, 25 bp, probe
ctgaattctggaggctatatcatgg

SEQ ID NO: 79054 - DNA, 25 bp, probe
ttctgaattctggaggctatatcat

SEQ ID NO: 79055 - DNA, 25 bp, probe
attctgaattctggaggctatatca

SEQ ID NO: 79056 - DNA, 25 bp, probe
tcattctgaattctggaggctatat

SEQ ID NO: 79057 - DNA, 25 bp, probe
ataaactttctaaattgactgagcc

SEQ ID NO: 79058 - DNA, 25 bp, probe
ctttctaaattgactgagccctgtc

SEQ ID NO: 79059 - DNA, 25 bp, probe
tttctaaattgactgagccctgtct

SEQ ID NO: 79060 - DNA, 25 bp, probe
tgtcattctgaattctggaggctat

SEQ ID NO: 79061 - DNA, 25 bp, probe
atgtcattctgaattctggaggcta

SEQ ID NO: 79062 - DNA, 25 bp, probe
tcccattccagtcttcacagtatca

SEQ ID NO: 79063 - DNA, 25 bp, probe
tggttgtatggaagagcattcggat

SEQ ID NO: 79064 - DNA, 25 bp, probe
atcttcatttctttctttgacttgt

SEQ ID NO: 79065 - DNA, 25 bp, probe
ttctaaattgactgagccctgtctc

SEQ ID NO: 79066 - DNA, 25 bp, probe
tgaattctggaggctatatcatggc

SEQ ID NO: 79067 - DNA, 25 bp, probe
cacatccttaaccttggcaaaataa

SEQ ID NO: 79068 - DNA, 25 bp, probe
tccttaaccttggcaaaataaactt

SEQ ID NO: 79069 - DNA, 25 bp, probe
acatccttaaccttggcaaaataaa

SEQ ID NO: 79070 - DNA, 25 bp, probe
atccttaaccttggcaaaataaact

SEQ ID NO: 79071 - DNA, 25 bp, probe
catccttaaccttggcaaaataaac

SEQ ID NO: 79072 - DNA, 25 bp, probe
cctcccattccagtcttcacagtat

SEQ ID NO: 79073 - DNA, 25 bp, probe
cctcattgctgctctctgttattac

SEQ ID NO: 79074 - DNA, 25 bp, probe
acctcattgctgctctctgttatta

SEQ ID NO: 79075 - DNA, 25 bp, probe
ctgctctctgttattacactctctg

SEQ ID NO: 79076 - DNA, 25 bp, probe
gcaacgagcaagattcatgtataag

SEQ ID NO: 79077 - DNA, 25 bp, probe
caacgagcaagattcatgtataaga

SEQ ID NO: 79078 - DNA, 25 bp, probe
tacctgagtgttataatccttcgtg

SEQ ID NO: 79079 - DNA, 25 bp, probe
cctgagtgttataatccttcgtgaa

SEQ ID NO: 79080 - DNA, 25 bp, probe
tgttgaatcatggttcgtatgttac

SEQ ID NO: 79081 - DNA, 25 bp, probe
gtgttgaatcatggttcgtatgtta

SEQ ID NO: 79082 - DNA, 25 bp, probe
agcaacgagcaagattcatgtataa

SEQ ID NO: 79083 - DNA, 25 bp, probe
tgctctctgttattacactctctgt

SEQ ID NO: 79084 - DNA, 25 bp, probe
attgctgctctctgttattacactc

SEQ ID NO: 79085 - DNA, 25 bp, probe
ctcattgctgctctctgttattaca

SEQ ID NO: 79086 - DNA, 25 bp, probe
acgagcaagattcatgtataagagc

SEQ ID NO: 79087 - DNA, 25 bp, probe
aacgagcaagattcatgtataagag

SEQ ID NO: 79088 - DNA, 25 bp, probe
cattgctgctctctgttattacact

SEQ ID NO: 79089 - DNA, 25 bp, probe
tcattgctgctctctgttattacac

SEQ ID NO: 79090 - DNA, 25 bp, probe
atacctgagtgttataatccttcgt

SEQ ID NO: 79091 - DNA, 25 bp, probe
tacatacaagtgttctcacctcatt

SEQ ID NO: 79092 - DNA, 25 bp, probe
acctgagtgttataatccttcgtga

SEQ ID NO: 79093 - DNA, 25 bp, probe
tgtgttgaatcatggttcgtatgtt

SEQ ID NO: 79094 - DNA, 25 bp, probe
cagcaacgagcaagattcatgtata

SEQ ID NO: 79095 - DNA, 25 bp, probe
cgagcaagattcatgtataagagcc

SEQ ID NO: 79096 - DNA, 25 bp, probe
acatacaagtgttctcacctcattg

SEQ ID NO: 79097 - DNA, 25 bp, probe
ttgctgctctctgttattacactct

SEQ ID NO: 79098 - DNA, 25 bp, probe
gtacatacaagtgttctcacctcat

SEQ ID NO: 79099 - DNA, 25 bp, probe
cacctgtgaatcagatccatgtata

SEQ ID NO: 79100 - DNA, 25 bp, probe
gctgctctctgttattacactctct

SEQ ID NO: 79101 - DNA, 25 bp, probe
acctgtgaatcagatccatgtataa

SEQ ID NO: 79102 - DNA, 25 bp, probe
gtgtgttgaatcatggttcgtatgt

SEQ ID NO: 79103 - DNA, 25 bp, probe
gtgaatcagatccatgtataagagt

SEQ ID NO: 79104 - DNA, 25 bp, probe
tgtgaatcagatccatgtataagag

SEQ ID NO: 79105 - DNA, 25 bp, probe
ggctttatgtgatatacctgagtgt

SEQ ID NO: 79106 - DNA, 25 bp, probe
tgctgctctctgttattacactctc

SEQ ID NO: 79107 - DNA, 25 bp, probe
cctgtgaatcagatccatgtataag

SEQ ID NO: 79108 - DNA, 25 bp, probe
gttgaatcatggttcgtatgttacc

SEQ ID NO: 79109 - DNA, 25 bp, probe
gctctctgttattacactctctgta

SEQ ID NO: 79110 - DNA, 25 bp, probe
catacaagtgttctcacctcattgc

SEQ ID NO: 79111 - DNA, 25 bp, probe
ctacaggtgtgttgaatcatggttc

SEQ ID NO: 79112 - DNA, 25 bp, probe
gctttatgtgatatacctgagtgtt

SEQ ID NO: 79113 - DNA, 25 bp, probe
cacctcattgctgctctctgttatt

SEQ ID NO: 79114 - DNA, 25 bp, probe
ggtgtgttgaatcatggttcgtatg

SEQ ID NO: 79115 - DNA, 25 bp, probe
tacactctctgtatcattaaggctt

SEQ ID NO: 79116 - DNA, 25 bp, probe
ttacactctctgtatcattaaggct

SEQ ID NO: 79117 - DNA, 25 bp, probe
cctcttccatgtctctaatgttagt

SEQ ID NO: 79118 - DNA, 25 bp, probe
tagttggtggatagaatgtctttgc

SEQ ID NO: 79119 - DNA, 25 bp, probe
tcttccatgtctctaatgttagtac

SEQ ID NO: 79120 - DNA, 25 bp, probe
ctcttccatgtctctaatgttagta

SEQ ID NO: 79121 - DNA, 25 bp, probe
ctagttggtggatagaatgtctttg

SEQ ID NO: 79122 - DNA, 25 bp, probe
ccctcttccatgtctctaatgttag

SEQ ID NO: 79123 - DNA, 25 bp, probe
tccctcttccatgtctctaatgtta

SEQ ID NO: 79124 - DNA, 25 bp, probe
catgactagttggtggatagaatgt

SEQ ID NO: 79125 - DNA, 25 bp, probe
tccatgtctctaatgttagtactgc

SEQ ID NO: 79126 - DNA, 25 bp, probe
ccatgtctctaatgttagtactgcc

SEQ ID NO: 79127 - DNA, 25 bp, probe
gtccctcttccatgtctctaatgtt

SEQ ID NO: 79128 - DNA, 25 bp, probe
tctgtccctcttccatgtctctaat

SEQ ID NO: 79129 - DNA, 25 bp, probe
gactagttggtggatagaatgtctt

SEQ ID NO: 79130 - DNA, 25 bp, probe
atgactagttggtggatagaatgtc

SEQ ID NO: 79131 - DNA, 25 bp, probe
ctgtccctcttccatgtctctaatg

SEQ ID NO: 79132 - DNA, 25 bp, probe
tgactagttggtggatagaatgtct

SEQ ID NO: 79133 - DNA, 25 bp, probe
catcttagccactggacaggaatca

SEQ ID NO: 79134 - DNA, 25 bp, probe
attctgcttacagctacagtcacat

SEQ ID NO: 79135 - DNA, 25 bp, probe
ttccatgtctctaatgttagtactg

SEQ ID NO: 79136 - DNA, 25 bp, probe
ttaggatatgatgtttcagcttctc

SEQ ID NO: 79137 - DNA, 25 bp, probe
agttggtggatagaatgtctttgcc

SEQ ID NO: 79138 - DNA, 25 bp, probe
taggatatgatgtttcagcttctcc

SEQ ID NO: 79139 - DNA, 25 bp, probe
tgtccctcttccatgtctctaatgt

SEQ ID NO: 79140 - DNA, 25 bp, probe
ccatgactagttggtggatagaatg

SEQ ID NO: 79141 - DNA, 25 bp, probe
gtgagagagtgctgtccttttatta

SEQ ID NO: 79142 - DNA, 25 bp, probe
gtggatagaatgtctttgcccattt

SEQ ID NO: 79143 - DNA, 25 bp, probe
atcttagccactggacaggaatcag

SEQ ID NO: 79144 - DNA, 25 bp, probe
tgagagagtgctgtccttttattaa

SEQ ID NO: 79145 - DNA, 25 bp, probe
cttccatgtctctaatgttagtact

SEQ ID NO: 79146 - DNA, 25 bp, probe
agagagtgctgtccttttattaaac

SEQ ID NO: 79147 - DNA, 25 bp, probe
ttatatggcagtgggtaggcagaaa

SEQ ID NO: 79148 - DNA, 25 bp, probe
tttatatggcagtgggtaggcagaa

SEQ ID NO: 79149 - DNA, 25 bp, probe
gtctgtccctcttccatgtctctaa

SEQ ID NO: 79150 - DNA, 25 bp, probe
attaggatatgatgtttcagcttct

SEQ ID NO: 79151 - DNA, 25 bp, probe
gagagagtgctgtccttttattaaa

SEQ ID NO: 79152 - DNA, 25 bp, probe
ttctgcttacagctacagtcacatc

SEQ ID NO: 79153 - DNA, 25 bp, probe
cttccgttttgagtgtttactgatt

SEQ ID NO: 79154 - DNA, 25 bp, probe
tccgttttgagtgtttactgatttt

SEQ ID NO: 79155 - DNA, 25 bp, probe
ttccgttttgagtgtttactgattt

SEQ ID NO: 79156 - DNA, 25 bp, probe
agtgagagagtgctgtccttttatt

SEQ ID NO: 79157 - DNA, 25 bp, probe
ccgttttgagtgtttactgattttc

SEQ ID NO: 79158 - DNA, 25 bp, probe
cattctgcttacagctacagtcaca

SEQ ID NO: 79159 - DNA, 25 bp, probe
atgtctctaatgttagtactgccca

SEQ ID NO: 79160 - DNA, 25 bp, probe
ctctaatgttagtactgcccatgac

SEQ ID NO: 79161 - DNA, 25 bp, probe
actaacattagagacatggaagagg

SEQ ID NO: 79162 - DNA, 25 bp, probe
gcaaagacattctatccaccaacta

SEQ ID NO: 79163 - DNA, 25 bp, probe
gtactaacattagagacatggaaga

SEQ ID NO: 79164 - DNA, 25 bp, probe
aggttagagccatctggaaactata

SEQ ID NO: 79165 - DNA, 25 bp, probe
tactaacattagagacatggaagag

SEQ ID NO: 79166 - DNA, 25 bp, probe
caaagacattctatccaccaactag

SEQ ID NO: 79167 - DNA, 25 bp, probe
ctaacattagagacatggaagaggg

SEQ ID NO: 79168 - DNA, 25 bp, probe
ctactcggtgtgaatgaagaaagtc

SEQ ID NO: 79169 - DNA, 25 bp, probe
taacattagagacatggaagaggga

SEQ ID NO: 79170 - DNA, 25 bp, probe
gaggttagagccatctggaaactat

SEQ ID NO: 79171 - DNA, 25 bp, probe
gcagtactaacattagagacatgga

SEQ ID NO: 79172 - DNA, 25 bp, probe
acattctatccaccaactagtcatg

SEQ ID NO: 79173 - DNA, 25 bp, probe
actactcggtgtgaatgaagaaagt

SEQ ID NO: 79174 - DNA, 25 bp, probe
ggcagtactaacattagagacatgg

SEQ ID NO: 79175 - DNA, 25 bp, probe
tgtgaatgaagaaagtccagacctc

SEQ ID NO: 79176 - DNA, 25 bp, probe
aacattagagacatggaagagggac

SEQ ID NO: 79177 - DNA, 25 bp, probe
gtgtgaatgaagaaagtccagacct

SEQ ID NO: 79178 - DNA, 25 bp, probe
cactactcggtgtgaatgaagaaag

SEQ ID NO: 79179 - DNA, 25 bp, probe
ggttagagccatctggaaactatag

SEQ ID NO: 79180 - DNA, 25 bp, probe
attagagacatggaagagggacaga

SEQ ID NO: 79181 - DNA, 25 bp, probe
tactcggtgtgaatgaagaaagtcc

SEQ ID NO: 79182 - DNA, 25 bp, probe
gttagagccatctggaaactataga

SEQ ID NO: 79183 - DNA, 25 bp, probe
cattagagacatggaagagggacag

SEQ ID NO: 79184 - DNA, 25 bp, probe
gacattctatccaccaactagtcat

SEQ ID NO: 79185 - DNA, 25 bp, probe
aagacattctatccaccaactagtc

SEQ ID NO: 79186 - DNA, 25 bp, probe
agacattctatccaccaactagtca

SEQ ID NO: 79187 - DNA, 25 bp, probe
ctcggagaagctgaaacatcatatc

SEQ ID NO: 79188 - DNA, 25 bp, probe
tgattcctgtccagtggctaagatg

SEQ ID NO: 79189 - DNA, 25 bp, probe
tgaggttagagccatctggaaacta

SEQ ID NO: 79190 - DNA, 25 bp, probe
cagtactaacattagagacatggaa

SEQ ID NO: 79191 - DNA, 25 bp, probe
atgtgactgtagctgtaagcagaat

SEQ ID NO: 79192 - DNA, 25 bp, probe
gagaagctgaaacatcatatcctaa

SEQ ID NO: 79193 - DNA, 25 bp, probe
ggcaaagacattctatccaccaact

SEQ ID NO: 79194 - DNA, 25 bp, probe
ggagaagctgaaacatcatatccta

SEQ ID NO: 79195 - DNA, 25 bp, probe
acattagagacatggaagagggaca

SEQ ID NO: 79196 - DNA, 25 bp, probe
taataaaaggacagcactctctcac

SEQ ID NO: 79197 - DNA, 25 bp, probe
cattctatccaccaactagtcatgg

SEQ ID NO: 79198 - DNA, 25 bp, probe
aaatgggcaaagacattctatccac

SEQ ID NO: 79199 - DNA, 25 bp, probe
ttaataaaaggacagcactctctca

SEQ ID NO: 79200 - DNA, 25 bp, probe
ctgattcctgtccagtggctaagat

SEQ ID NO: 79201 - DNA, 25 bp, probe
agtactaacattagagacatggaag

SEQ ID NO: 79202 - DNA, 25 bp, probe
gtgaatgaagaaagtccagacctcg

SEQ ID NO: 79203 - DNA, 25 bp, probe
ctcggtgtgaatgaagaaagtccag

SEQ ID NO: 79204 - DNA, 25 bp, probe
gtttaataaaaggacagcactctct

SEQ ID NO: 79205 - DNA, 25 bp, probe
ttcaccaaccagttatactccttga

SEQ ID NO: 79206 - DNA, 25 bp, probe
aataatcacatcttggagaattgga

SEQ ID NO: 79207 - DNA, 25 bp, probe
tcaccaaccagttatactccttgag

SEQ ID NO: 79208 - DNA, 25 bp, probe
aatcacatcttggagaattggatat

SEQ ID NO: 79209 - DNA, 25 bp, probe
ataatcacatcttggagaattggat

SEQ ID NO: 79210 - DNA, 25 bp, probe
taatcacatcttggagaattggata

SEQ ID NO: 79211 - DNA, 25 bp, probe
tgggagtttgagtagtttctgatta

SEQ ID NO: 79212 - DNA, 25 bp, probe
gtgggagtttgagtagtttctgatt

SEQ ID NO: 79213 - DNA, 25 bp, probe
atttatcctttgtttcaccaaccag

SEQ ID NO: 79214 - DNA, 25 bp, probe
catttatcctttgtttcaccaacca

SEQ ID NO: 79215 - DNA, 25 bp, probe
cctttgtttcaccaaccagttatac

SEQ ID NO: 79216 - DNA, 25 bp, probe
tcctttgtttcaccaaccagttata

SEQ ID NO: 79217 - DNA, 25 bp, probe
tatcctttgtttcaccaaccagtta

SEQ ID NO: 79218 - DNA, 25 bp, probe
cacatcttggagaattggatatctg

SEQ ID NO: 79219 - DNA, 25 bp, probe
atcctttgtttcaccaaccagttat

SEQ ID NO: 79220 - DNA, 25 bp, probe
tcacatcttggagaattggatatct

SEQ ID NO: 79221 - DNA, 25 bp, probe
tttgtttcaccaaccagttatactc

SEQ ID NO: 79222 - DNA, 25 bp, probe
ctttgtttcaccaaccagttatact

SEQ ID NO: 79223 - DNA, 25 bp, probe
tttcaccaaccagttatactccttg

SEQ ID NO: 79224 - DNA, 25 bp, probe
gtttcaccaaccagttatactcctt

SEQ ID NO: 79225 - DNA, 25 bp, probe
ttatcctttgtttcaccaaccagtt

SEQ ID NO: 79226 - DNA, 25 bp, probe
tttatcctttgtttcaccaaccagt

SEQ ID NO: 79227 - DNA, 25 bp, probe
catcttggagaattggatatctgtc

SEQ ID NO: 79228 - DNA, 25 bp, probe
gggagtttgagtagtttctgattat

SEQ ID NO: 79229 - DNA, 25 bp, probe
ttgtttcaccaaccagttatactcc

SEQ ID NO: 79230 - DNA, 25 bp, probe
tcccttcagacatttatcctttgtt

SEQ ID NO: 79231 - DNA, 25 bp, probe
acatttatcctttgtttcaccaacc

SEQ ID NO: 79232 - DNA, 25 bp, probe
cagacatttatcctttgtttcacca

SEQ ID NO: 79233 - DNA, 25 bp, probe
taataatcacatcttggagaattgg

SEQ ID NO: 79234 - DNA, 25 bp, probe
tcagacatttatcctttgtttcacc

SEQ ID NO: 79235 - DNA, 25 bp, probe
acatcttggagaattggatatctgt

SEQ ID NO: 79236 - DNA, 25 bp, probe
cccttcagacatttatcctttgttt

SEQ ID NO: 79237 - DNA, 25 bp, probe
gacatttatcctttgtttcaccaac

SEQ ID NO: 79238 - DNA, 25 bp, probe
agacatttatcctttgtttcaccaa

SEQ ID NO: 79239 - DNA, 25 bp, probe
atcacatcttggagaattggatatc

SEQ ID NO: 79240 - DNA, 25 bp, probe
tgtttcaccaaccagttatactcct

SEQ ID NO: 79241 - DNA, 25 bp, probe
gtcccttcagacatttatcctttgt

SEQ ID NO: 79242 - DNA, 25 bp, probe
ggtgggagtttgagtagtttctgat

SEQ ID NO: 79243 - DNA, 25 bp, probe
tcagtgacacaaatgaagttgatgt

SEQ ID NO: 79244 - DNA, 25 bp, probe
atcttggagaattggatatctgtcc

SEQ ID NO: 79245 - DNA, 25 bp, probe
ccttcagacatttatcctttgtttc

SEQ ID NO: 79246 - DNA, 25 bp, probe
ggagtttgagtagtttctgattatg

SEQ ID NO: 79247 - DNA, 25 bp, probe
gtgtaataatcacatcttggagaat

SEQ ID NO: 79248 - DNA, 25 bp, probe
gaggtgggagtttgagtagtttctg

SEQ ID NO: 79249 - DNA, 25 bp, probe
gattaaggagaagaggtaacgcaag

SEQ ID NO: 79250 - DNA, 25 bp, probe
attaaggagaagaggtaacgcaagt

SEQ ID NO: 79251 - DNA, 25 bp, probe
tgattaaggagaagaggtaacgcaa

SEQ ID NO: 79252 - DNA, 25 bp, probe
ctgattaaggagaagaggtaacgca

SEQ ID NO: 79253 - DNA, 25 bp, probe
ttaaggagaagaggtaacgcaagtt

SEQ ID NO: 79254 - DNA, 25 bp, probe
tctgattaaggagaagaggtaacgc

SEQ ID NO: 79255 - DNA, 25 bp, probe
taaggagaagaggtaacgcaagttc

SEQ ID NO: 79256 - DNA, 25 bp, probe
aaacctttctcttcctgccatttat

SEQ ID NO: 79257 - DNA, 25 bp, probe
cctttctcttcctgccatttatcat

SEQ ID NO: 79258 - DNA, 25 bp, probe
aacctttctcttcctgccatttatc

SEQ ID NO: 79259 - DNA, 25 bp, probe
ctttctcttcctgccatttatcata

SEQ ID NO: 79260 - DNA, 25 bp, probe
caaacctttctcttcctgccattta

SEQ ID NO: 79261 - DNA, 25 bp, probe
ttctgattaaggagaagaggtaacg

SEQ ID NO: 79262 - DNA, 25 bp, probe
acctttctcttcctgccatttatca

SEQ ID NO: 79263 - DNA, 25 bp, probe
tttctcttcctgccatttatcatat

SEQ ID NO: 79264 - DNA, 25 bp, probe
ctcttactaacatctgtgatgcttg

SEQ ID NO: 79265 - DNA, 25 bp, probe
tctcttactaacatctgtgatgctt

SEQ ID NO: 79266 - DNA, 25 bp, probe
ttctcttactaacatctgtgatgct

SEQ ID NO: 79267 - DNA, 25 bp, probe
atgaagctacacaaacctttctctt

SEQ ID NO: 79268 - DNA, 25 bp, probe
tcttactaacatctgtgatgcttgc

SEQ ID NO: 79269 - DNA, 25 bp, probe
tttccttctctcacctttaaatggc

SEQ ID NO: 79270 - DNA, 25 bp, probe
aattatgcttcaggattaggttatt

SEQ ID NO: 79271 - DNA, 25 bp, probe
attctcttactaacatctgtgatgc

SEQ ID NO: 79272 - DNA, 25 bp, probe
cttctctcacctttaaatggcacaa

SEQ ID NO: 79273 - DNA, 25 bp, probe
catgaagctacacaaacctttctct

SEQ ID NO: 79274 - DNA, 25 bp, probe
ttctctcacctttaaatggcacaac

SEQ ID NO: 79275 - DNA, 25 bp, probe
acaaacctttctcttcctgccattt

SEQ ID NO: 79276 - DNA, 25 bp, probe
ttccttctctcacctttaaatggca

SEQ ID NO: 79277 - DNA, 25 bp, probe
aagctacacaaacctttctcttcct

SEQ ID NO: 79278 - DNA, 25 bp, probe
cttactaacatctgtgatgcttgcg

SEQ ID NO: 79279 - DNA, 25 bp, probe
ctacacaaacctttctcttcctgcc

SEQ ID NO: 79280 - DNA, 25 bp, probe
ttctcttcctgccatttatcatatg

SEQ ID NO: 79281 - DNA, 25 bp, probe
agtcatggatagaatgaggtttgag

SEQ ID NO: 79282 - DNA, 25 bp, probe
aagtcatggatagaatgaggtttga

SEQ ID NO: 79283 - DNA, 25 bp, probe
agctacacaaacctttctcttcctg

SEQ ID NO: 79284 - DNA, 25 bp, probe
catggatagaatgaggtttgagcct

SEQ ID NO: 79285 - DNA, 25 bp, probe
cacaaacctttctcttcctgccatt

SEQ ID NO: 79286 - DNA, 25 bp, probe
tccttctctcacctttaaatggcac

SEQ ID NO: 79287 - DNA, 25 bp, probe
aaagtcatggatagaatgaggtttg

SEQ ID NO: 79288 - DNA, 25 bp, probe
caaagtcatggatagaatgaggttt

SEQ ID NO: 79289 - DNA, 25 bp, probe
gcaaagtcatggatagaatgaggtt

SEQ ID NO: 79290 - DNA, 25 bp, probe
agaaaagcaatctgtatggaaaggg

SEQ ID NO: 79291 - DNA, 25 bp, probe
ccttctctcacctttaaatggcaca

SEQ ID NO: 79292 - DNA, 25 bp, probe
attatgcttcaggattaggttattt

SEQ ID NO: 79293 - DNA, 25 bp, probe
cttgcgttacctcttctccttaatc

SEQ ID NO: 79294 - DNA, 25 bp, probe
ttgcgttacctcttctccttaatca

SEQ ID NO: 79295 - DNA, 25 bp, probe
acttgcgttacctcttctccttaat

SEQ ID NO: 79296 - DNA, 25 bp, probe
tgcgttacctcttctccttaatcag

SEQ ID NO: 79297 - DNA, 25 bp, probe
gcgttacctcttctccttaatcaga

SEQ ID NO: 79298 - DNA, 25 bp, probe
aacttgcgttacctcttctccttaa

SEQ ID NO: 79299 - DNA, 25 bp, probe
gaacttgcgttacctcttctcctta

SEQ ID NO: 79300 - DNA, 25 bp, probe
ataaatggcaggaagagaaaggttt

SEQ ID NO: 79301 - DNA, 25 bp, probe
atgataaatggcaggaagagaaagg

SEQ ID NO: 79302 - DNA, 25 bp, probe
gataaatggcaggaagagaaaggtt

SEQ ID NO: 79303 - DNA, 25 bp, probe
aaattcttcatcctctaagtcccac

SEQ ID NO: 79304 - DNA, 25 bp, probe
gaaattcttcatcctctaagtccca

SEQ ID NO: 79305 - DNA, 25 bp, probe
taaatggcaggaagagaaaggtttg

SEQ ID NO: 79306 - DNA, 25 bp, probe
tatgataaatggcaggaagagaaag

SEQ ID NO: 79307 - DNA, 25 bp, probe
cgttacctcttctccttaatcagaa

SEQ ID NO: 79308 - DNA, 25 bp, probe
tgataaatggcaggaagagaaaggt

SEQ ID NO: 79309 - DNA, 25 bp, probe
atatgataaatggcaggaagagaaa

SEQ ID NO: 79310 - DNA, 25 bp, probe
aattcttcatcctctaagtcccacc

SEQ ID NO: 79311 - DNA, 25 bp, probe
agcatcacagatgttagtaagagaa

SEQ ID NO: 79312 - DNA, 25 bp, probe
aagcatcacagatgttagtaagaga

SEQ ID NO: 79313 - DNA, 25 bp, probe
caagcatcacagatgttagtaagag

SEQ ID NO: 79314 - DNA, 25 bp, probe
attcttcatcctctaagtcccacct

SEQ ID NO: 79315 - DNA, 25 bp, probe
aagagaaaggtttgtgtagcttcat

SEQ ID NO: 79316 - DNA, 25 bp, probe
aataacctaatcctgaagcataatt

SEQ ID NO: 79317 - DNA, 25 bp, probe
gccatttaaaggtgagagaaggaaa

SEQ ID NO: 79318 - DNA, 25 bp, probe
gcaagcatcacagatgttagtaaga

SEQ ID NO: 79319 - DNA, 25 bp, probe
ttgtgccatttaaaggtgagagaag

SEQ ID NO: 79320 - DNA, 25 bp, probe
gcatcacagatgttagtaagagaat

SEQ ID NO: 79321 - DNA, 25 bp, probe
agagaaaggtttgtgtagcttcatg

SEQ ID NO: 79322 - DNA, 25 bp, probe
gttgtgccatttaaaggtgagagaa

SEQ ID NO: 79323 - DNA, 25 bp, probe
aaatggcaggaagagaaaggtttgt

SEQ ID NO: 79324 - DNA, 25 bp, probe
cctccgagatgtcctgaaattcttc

SEQ ID NO: 79325 - DNA, 25 bp, probe
tgccatttaaaggtgagagaaggaa

SEQ ID NO: 79326 - DNA, 25 bp, probe
aggaagagaaaggtttgtgtagctt

SEQ ID NO: 79327 - DNA, 25 bp, probe
ttcttcatcctctaagtcccacctg

SEQ ID NO: 79328 - DNA, 25 bp, probe
cgcaagcatcacagatgttagtaag

SEQ ID NO: 79329 - DNA, 25 bp, probe
tcctccgagatgtcctgaaattctt

SEQ ID NO: 79330 - DNA, 25 bp, probe
ggcaggaagagaaaggtttgtgtag

SEQ ID NO: 79331 - DNA, 25 bp, probe
tcaaacctcattctatccatgactt

SEQ ID NO: 79332 - DNA, 25 bp, probe
ctcaaacctcattctatccatgact

SEQ ID NO: 79333 - DNA, 25 bp, probe
catatgataaatggcaggaagagaa

SEQ ID NO: 79334 - DNA, 25 bp, probe
tgaaattcttcatcctctaagtccc

SEQ ID NO: 79335 - DNA, 25 bp, probe
aatcagaagcttagagatgaactcc

SEQ ID NO: 79336 - DNA, 25 bp, probe
aggctcaaacctcattctatccatg

SEQ ID NO: 79337 - DNA, 25 bp, probe
acaaaccctgtactttctgataaca

SEQ ID NO: 79338 - DNA, 25 bp, probe
cacaaaccctgtactttctgataac

SEQ ID NO: 79339 - DNA, 25 bp, probe
ccacaaaccctgtactttctgataa

SEQ ID NO: 79340 - DNA, 25 bp, probe
tccacaaaccctgtactttctgata

SEQ ID NO: 79341 - DNA, 25 bp, probe
tttctgataacagctctcttccttt

SEQ ID NO: 79342 - DNA, 25 bp, probe
tactttctgataacagctctcttcc

SEQ ID NO: 79343 - DNA, 25 bp, probe
ctttctgataacagctctcttcctt

SEQ ID NO: 79344 - DNA, 25 bp, probe
tgtactttctgataacagctctctt

SEQ ID NO: 79345 - DNA, 25 bp, probe
gtactttctgataacagctctcttc

SEQ ID NO: 79346 - DNA, 25 bp, probe
actttctgataacagctctcttcct

SEQ ID NO: 79347 - DNA, 25 bp, probe
ctccacaaaccctgtactttctgat

SEQ ID NO: 79348 - DNA, 25 bp, probe
cttcctgacctgttgtgtgaaactc

SEQ ID NO: 79349 - DNA, 25 bp, probe
ctcactccacaaaccctgtactttc

SEQ ID NO: 79350 - DNA, 25 bp, probe
caagcacagatgtacaggtatcagg

SEQ ID NO: 79351 - DNA, 25 bp, probe
cactccacaaaccctgtactttctg

SEQ ID NO: 79352 - DNA, 25 bp, probe
gaaactcactccacaaaccctgtac

SEQ ID NO: 79353 - DNA, 25 bp, probe
tgaaactcactccacaaaccctgta

SEQ ID NO: 79354 - DNA, 25 bp, probe
actccacaaaccctgtactttctga

SEQ ID NO: 79355 - DNA, 25 bp, probe
tcactccacaaaccctgtactttct

SEQ ID NO: 79356 - DNA, 25 bp, probe
actcactccacaaaccctgtacttt

SEQ ID NO: 79357 - DNA, 25 bp, probe
aactcactccacaaaccctgtactt

SEQ ID NO: 79358 - DNA, 25 bp, probe
aaactcactccacaaaccctgtact

SEQ ID NO: 79359 - DNA, 25 bp, probe
gcaagcacagatgtacaggtatcag

SEQ ID NO: 79360 - DNA, 25 bp, probe
cagcaagcacagatgtacaggtatc

SEQ ID NO: 79361 - DNA, 25 bp, probe
ttcctgacctgttgtgtgaaactca

SEQ ID NO: 79362 - DNA, 25 bp, probe
ttctgataacagctctcttcctttt

SEQ ID NO: 79363 - DNA, 25 bp, probe
cacagatgtacaggtatcagggaac

SEQ ID NO: 79364 - DNA, 25 bp, probe
agcaagcacagatgtacaggtatca

SEQ ID NO: 79365 - DNA, 25 bp, probe
cactttccagcaagcacagatgtac

SEQ ID NO: 79366 - DNA, 25 bp, probe
caaaccctgtactttctgataacag

SEQ ID NO: 79367 - DNA, 25 bp, probe
aaaccctgtactttctgataacagc

SEQ ID NO: 79368 - DNA, 25 bp, probe
ctgtactttctgataacagctctct

SEQ ID NO: 79369 - DNA, 25 bp, probe
gtatcagggaacatggggaagaaac

SEQ ID NO: 79370 - DNA, 25 bp, probe
cctgtactttctgataacagctctc

SEQ ID NO: 79371 - DNA, 25 bp, probe
ccttcctgacctgttgtgtgaaact

SEQ ID NO: 79372 - DNA, 25 bp, probe
acagatgtacaggtatcagggaaca

SEQ ID NO: 79373 - DNA, 25 bp, probe
aaccctgtactttctgataacagct

SEQ ID NO: 79374 - DNA, 25 bp, probe
ccctgtactttctgataacagctct

SEQ ID NO: 79375 - DNA, 25 bp, probe
accctgtactttctgataacagctc

SEQ ID NO: 79376 - DNA, 25 bp, probe
ccagcaagcacagatgtacaggtat

SEQ ID NO: 79377 - DNA, 25 bp, probe
agatgtacaggtatcagggaacatg

SEQ ID NO: 79378 - DNA, 25 bp, probe
cagatgtacaggtatcagggaacat

SEQ ID NO: 79379 - DNA, 25 bp, probe
tatcagggaacatggggaagaaacc

SEQ ID NO: 79380 - DNA, 25 bp, probe
ggtatcagggaacatggggaagaaa

SEQ ID NO: 79381 - DNA, 25 bp, probe
tgttgttgttgttgttgttgagtat

SEQ ID NO: 79382 - DNA, 25 bp, probe
ttgttgttgttgttgttgttgagta

SEQ ID NO: 79383 - DNA, 25 bp, probe
ataccttgttgttgttgttgttgtt

SEQ ID NO: 79384 - DNA, 25 bp, probe
tgttgttgttgttgttgagtattcc

SEQ ID NO: 79385 - DNA, 25 bp, probe
gttgttgttgttgttgttgagtatt

SEQ ID NO: 79386 - DNA, 25 bp, probe
cataccttgttgttgttgttgttgt

SEQ ID NO: 79387 - DNA, 25 bp, probe
taccttgttgttgttgttgttgttg

SEQ ID NO: 79388 - DNA, 25 bp, probe
ttgttgttgttgttgttgagtattc

SEQ ID NO: 79389 - DNA, 25 bp, probe
cttgttgttgttgttgttgttgagt

SEQ ID NO: 79390 - DNA, 25 bp, probe
ccttgttgttgttgttgttgttgag

SEQ ID NO: 79391 - DNA, 25 bp, probe
gcataccttgttgttgttgttgttg

SEQ ID NO: 79392 - DNA, 25 bp, probe
accttgttgttgttgttgttgttga

SEQ ID NO: 79393 - DNA, 25 bp, probe
tgttgttgttgttgagtattcccta

SEQ ID NO: 79394 - DNA, 25 bp, probe
gttgttgttgttgagtattccctaa

SEQ ID NO: 79395 - DNA, 25 bp, probe
ttgttgttgttgttgagtattccct

SEQ ID NO: 79396 - DNA, 25 bp, probe
gttgttgttgttgttgagtattccc

SEQ ID NO: 79397 - DNA, 25 bp, probe
ttgttgttgttgagtattccctaaa

SEQ ID NO: 79398 - DNA, 25 bp, probe
tgcataccttgttgttgttgttgtt

SEQ ID NO: 79399 - DNA, 25 bp, probe
ctgcataccttgttgttgttgttgt

SEQ ID NO: 79400 - DNA, 25 bp, probe
ttaaatagttgcagaggatgtcatt

SEQ ID NO: 79401 - DNA, 25 bp, probe
tttaaatagttgcagaggatgtcat

SEQ ID NO: 79402 - DNA, 25 bp, probe
cctgcataccttgttgttgttgttg

SEQ ID NO: 79403 - DNA, 25 bp, probe
aaatagttgcagaggatgtcatttc

SEQ ID NO: 79404 - DNA, 25 bp, probe
tgttgttgttgagtattccctaaaa

SEQ ID NO: 79405 - DNA, 25 bp, probe
tgaaattgtgtactcccttgtactt

SEQ ID NO: 79406 - DNA, 25 bp, probe
ttgaaattgtgtactcccttgtact

SEQ ID NO: 79407 - DNA, 25 bp, probe
taaatagttgcagaggatgtcattt

SEQ ID NO: 79408 - DNA, 25 bp, probe
aaattgtgtactcccttgtacttgt

SEQ ID NO: 79409 - DNA, 25 bp, probe
gaaattgtgtactcccttgtacttg

SEQ ID NO: 79410 - DNA, 25 bp, probe
tttgaaattgtgtactcccttgtac

SEQ ID NO: 79411 - DNA, 25 bp, probe
aattgtgtactcccttgtacttgtc

SEQ ID NO: 79412 - DNA, 25 bp, probe
aatagttgcagaggatgtcatttcc

SEQ ID NO: 79413 - DNA, 25 bp, probe
gttgttgttgagtattccctaaaag

SEQ ID NO: 79414 - DNA, 25 bp, probe
gcagaggatgtcatttccatcatat

SEQ ID NO: 79415 - DNA, 25 bp, probe
gaggatgtcatttccatcatattgt

SEQ ID NO: 79416 - DNA, 25 bp, probe
attgtgtactcccttgtacttgtca

SEQ ID NO: 79417 - DNA, 25 bp, probe
ttttgaaattgtgtactcccttgta

SEQ ID NO: 79418 - DNA, 25 bp, probe
agaggatgtcatttccatcatattg

SEQ ID NO: 79419 - DNA, 25 bp, probe
cagaggatgtcatttccatcatatt

SEQ ID NO: 79420 - DNA, 25 bp, probe
ataaaattacaccgctctttcaaaa

SEQ ID NO: 79421 - DNA, 25 bp, probe
aataaaattacaccgctctttcaaa

SEQ ID NO: 79422 - DNA, 25 bp, probe
aaataaaattacaccgctctttcaa

SEQ ID NO: 79423 - DNA, 25 bp, probe
aaaataaaattacaccgctctttca

SEQ ID NO: 79424 - DNA, 25 bp, probe
ttgtgtactcccttgtacttgtcaa

SEQ ID NO: 79425 - DNA, 25 bp, probe
tttagtttcctccatatttgtctgc

SEQ ID NO: 79426 - DNA, 25 bp, probe
ttagtttcctccatatttgtctgcc

SEQ ID NO: 79427 - DNA, 25 bp, probe
caccagtctgaaaggcataaattaa

SEQ ID NO: 79428 - DNA, 25 bp, probe
tgaaaggcataaattaaatccacga

SEQ ID NO: 79429 - DNA, 25 bp, probe
ctgaaaggcataaattaaatccacg

SEQ ID NO: 79430 - DNA, 25 bp, probe
tttcctccatatttgtctgccaata

SEQ ID NO: 79431 - DNA, 25 bp, probe
ccaccagtctgaaaggcataaatta

SEQ ID NO: 79432 - DNA, 25 bp, probe
accagtctgaaaggcataaattaaa

SEQ ID NO: 79433 - DNA, 25 bp, probe
tccatatttgtctgccaatagaaac

SEQ ID NO: 79434 - DNA, 25 bp, probe
cctccatatttgtctgccaatagaa

SEQ ID NO: 79435 - DNA, 25 bp, probe
ttcctccatatttgtctgccaatag

SEQ ID NO: 79436 - DNA, 25 bp, probe
aggcataaattaaatccacgatgaa

SEQ ID NO: 79437 - DNA, 25 bp, probe
aaggcataaattaaatccacgatga

SEQ ID NO: 79438 - DNA, 25 bp, probe
ctgtgtactgaccactgagatactc

SEQ ID NO: 79439 - DNA, 25 bp, probe
ctctgtgtactgaccactgagatac

SEQ ID NO: 79440 - DNA, 25 bp, probe
ctccatatttgtctgccaatagaaa

SEQ ID NO: 79441 - DNA, 25 bp, probe
gcataaattaaatccacgatgaagg

SEQ ID NO: 79442 - DNA, 25 bp, probe
ggcataaattaaatccacgatgaag

SEQ ID NO: 79443 - DNA, 25 bp, probe
agaaacatttggtcacatctgaatt

SEQ ID NO: 79444 - DNA, 25 bp, probe
tagtttcctccatatttgtctgcca

SEQ ID NO: 79445 - DNA, 25 bp, probe
tctgtgtactgaccactgagatact

SEQ ID NO: 79446 - DNA, 25 bp, probe
actctgtgtactgaccactgagata

SEQ ID NO: 79447 - DNA, 25 bp, probe
tcctccatatttgtctgccaataga

SEQ ID NO: 79448 - DNA, 25 bp, probe
caatagaaacatttggtcacatctg

SEQ ID NO: 79449 - DNA, 25 bp, probe
aaaggcataaattaaatccacgatg

SEQ ID NO: 79450 - DNA, 25 bp, probe
ccatatttgtctgccaatagaaaca

SEQ ID NO: 79451 - DNA, 25 bp, probe
gaaacatttggtcacatctgaattt

SEQ ID NO: 79452 - DNA, 25 bp, probe
tagaaacatttggtcacatctgaat

SEQ ID NO: 79453 - DNA, 25 bp, probe
atagaaacatttggtcacatctgaa

SEQ ID NO: 79454 - DNA, 25 bp, probe
aatagaaacatttggtcacatctga

SEQ ID NO: 79455 - DNA, 25 bp, probe
gtttcctccatatttgtctgccaat

SEQ ID NO: 79456 - DNA, 25 bp, probe
gaaaggcataaattaaatccacgat

SEQ ID NO: 79457 - DNA, 25 bp, probe
cataaattaaatccacgatgaaggg

SEQ ID NO: 79458 - DNA, 25 bp, probe
atttgtctgccaatagaaacatttg

SEQ ID NO: 79459 - DNA, 25 bp, probe
tctgaaaggcataaattaaatccac

SEQ ID NO: 79460 - DNA, 25 bp, probe
gtctgaaaggcataaattaaatcca

SEQ ID NO: 79461 - DNA, 25 bp, probe
ctgttaagtgagtgattacaaagga

SEQ ID NO: 79462 - DNA, 25 bp, probe
tctgttaagtgagtgattacaaagg

SEQ ID NO: 79463 - DNA, 25 bp, probe
ctttagtttcctccatatttgtctg

SEQ ID NO: 79464 - DNA, 25 bp, probe
ccagtctgaaaggcataaattaaat

SEQ ID NO: 79465 - DNA, 25 bp, probe
ggatgctttacttcctccagaatat

SEQ ID NO: 79466 - DNA, 25 bp, probe
tctttagtttcctccatatttgtct

SEQ ID NO: 79467 - DNA, 25 bp, probe
atggctctgcatcacttaggtattc

SEQ ID NO: 79468 - DNA, 25 bp, probe
tgttaagtgagtgattacaaaggaa

SEQ ID NO: 79469 - DNA, 25 bp, probe
tatatccactccaagaacttcatcc

SEQ ID NO: 79470 - DNA, 25 bp, probe
atatccactccaagaacttcatcca

SEQ ID NO: 79471 - DNA, 25 bp, probe
gtatatccactccaagaacttcatc

SEQ ID NO: 79472 - DNA, 25 bp, probe
agtatatccactccaagaacttcat

SEQ ID NO: 79473 - DNA, 25 bp, probe
tatccactccaagaacttcatccac

SEQ ID NO: 79474 - DNA, 25 bp, probe
gaagatacaggctcagaggtttaac

SEQ ID NO: 79475 - DNA, 25 bp, probe
agatacaggctcagaggtttaacat

SEQ ID NO: 79476 - DNA, 25 bp, probe
aagatacaggctcagaggtttaaca

SEQ ID NO: 79477 - DNA, 25 bp, probe
ggaagatacaggctcagaggtttaa

SEQ ID NO: 79478 - DNA, 25 bp, probe
gatacaggctcagaggtttaacatg

SEQ ID NO: 79479 - DNA, 25 bp, probe
cagaggtttaacatgggttgcttaa

SEQ ID NO: 79480 - DNA, 25 bp, probe
tggaagatacaggctcagaggttta

SEQ ID NO: 79481 - DNA, 25 bp, probe
atacaggctcagaggtttaacatgg

SEQ ID NO: 79482 - DNA, 25 bp, probe
tcagaggtttaacatgggttgctta

SEQ ID NO: 79483 - DNA, 25 bp, probe
atccactccaagaacttcatccacc

SEQ ID NO: 79484 - DNA, 25 bp, probe
caacctggtctacatcatcgacttc

SEQ ID NO: 79485 - DNA, 25 bp, probe
gagtatatccactccaagaacttca

SEQ ID NO: 79486 - DNA, 25 bp, probe
cgagtatatccactccaagaacttc

SEQ ID NO: 79487 - DNA, 25 bp, probe
tttaacatgggttgcttaaggtcat

SEQ ID NO: 79488 - DNA, 25 bp, probe
agaggtttaacatgggttgcttaag

SEQ ID NO: 79489 - DNA, 25 bp, probe
atcgagtatatccactccaagaact

SEQ ID NO: 79490 - DNA, 25 bp, probe
catcgagtatatccactccaagaac

SEQ ID NO: 79491 - DNA, 25 bp, probe
tcgagtatatccactccaagaactt

SEQ ID NO: 79492 - DNA, 25 bp, probe
gtttaacatgggttgcttaaggtca

SEQ ID NO: 79493 - DNA, 25 bp, probe
ctcagaggtttaacatgggttgctt

SEQ ID NO: 79494 - DNA, 25 bp, probe
gaggtttaacatgggttgcttaagg

SEQ ID NO: 79495 - DNA, 25 bp, probe
ggtttaacatgggttgcttaaggtc

SEQ ID NO: 79496 - DNA, 25 bp, probe
gcatcgagtatatccactccaagaa

SEQ ID NO: 79497 - DNA, 25 bp, probe
aggtttaacatgggttgcttaaggt

SEQ ID NO: 79498 - DNA, 25 bp, probe
ctggaagatacaggctcagaggttt

SEQ ID NO: 79499 - DNA, 25 bp, probe
aacctggtctacatcatcgacttcg

SEQ ID NO: 79500 - DNA, 25 bp, probe
tacaggctcagaggtttaacatggg

SEQ ID NO: 79501 - DNA, 25 bp, probe
cagatcagccgcatcgagtatatcc

SEQ ID NO: 79502 - DNA, 25 bp, probe
ccagatcagccgcatcgagtatatc

SEQ ID NO: 79503 - DNA, 25 bp, probe
gcaacctggtctacatcatcgactt

SEQ ID NO: 79504 - DNA, 25 bp, probe
gatcagccgcatcgagtatatccac

SEQ ID NO: 79505 - DNA, 25 bp, probe
agatcagccgcatcgagtatatcca

SEQ ID NO: 79506 - DNA, 25 bp, probe
aggctcagaggtttaacatgggttg

SEQ ID NO: 79507 - DNA, 25 bp, probe
caggctcagaggtttaacatgggtt

SEQ ID NO: 79508 - DNA, 25 bp, probe
ttaacatgggttgcttaaggtcatg

SEQ ID NO: 79509 - DNA, 25 bp, probe
cgcatcgagtatatccactccaaga

SEQ ID NO: 79510 - DNA, 25 bp, probe
gaagggcaacctggtctacatcatc

SEQ ID NO: 79511 - DNA, 25 bp, probe
gaagaagggcaacctggtctacatc

SEQ ID NO: 79512 - DNA, 25 bp, probe
ggttgcttaaggtcatgcagcttag

SEQ ID NO: 79513 - DNA, 25 bp, probe
gagttgattatctggaggtctcatt

SEQ ID NO: 79514 - DNA, 25 bp, probe
taggtgttaagatataaggcattgc

SEQ ID NO: 79515 - DNA, 25 bp, probe
caactgttatactaccagaaggctt

SEQ ID NO: 79516 - DNA, 25 bp, probe
atccaactgttatactaccagaagg

SEQ ID NO: 79517 - DNA, 25 bp, probe
ccaactgttatactaccagaaggct

SEQ ID NO: 79518 - DNA, 25 bp, probe
tccaactgttatactaccagaaggc

SEQ ID NO: 79519 - DNA, 25 bp, probe
atttgagttgattatctggaggtct

SEQ ID NO: 79520 - DNA, 25 bp, probe
tcagaaactaccaccaaattatcca

SEQ ID NO: 79521 - DNA, 25 bp, probe
atctggaggtctcatttcttgtaaa

SEQ ID NO: 79522 - DNA, 25 bp, probe
actaccaccaaattatccaactgtt

SEQ ID NO: 79523 - DNA, 25 bp, probe
aactaccaccaaattatccaactgt

SEQ ID NO: 79524 - DNA, 25 bp, probe
aaactaccaccaaattatccaactg

SEQ ID NO: 79525 - DNA, 25 bp, probe
attatctggaggtctcatttcttgt

SEQ ID NO: 79526 - DNA, 25 bp, probe
ttattccagatactgtataacctgc

SEQ ID NO: 79527 - DNA, 25 bp, probe
gaaactaccaccaaattatccaact

SEQ ID NO: 79528 - DNA, 25 bp, probe
agaaactaccaccaaattatccaac

SEQ ID NO: 79529 - DNA, 25 bp, probe
cagaaactaccaccaaattatccaa

SEQ ID NO: 79530 - DNA, 25 bp, probe
tctggaggtctcatttcttgtaaag

SEQ ID NO: 79531 - DNA, 25 bp, probe
ctggaggtctcatttcttgtaaagt

SEQ ID NO: 79532 - DNA, 25 bp, probe
aaagtttgacctggttgtgttattt

SEQ ID NO: 79533 - DNA, 25 bp, probe
gattatctggaggtctcatttcttg

SEQ ID NO: 79534 - DNA, 25 bp, probe
ttcagaaactaccaccaaattatcc

SEQ ID NO: 79535 - DNA, 25 bp, probe
tggaggtctcatttcttgtaaagta

SEQ ID NO: 79536 - DNA, 25 bp, probe
tatctggaggtctcatttcttgtaa

SEQ ID NO: 79537 - DNA, 25 bp, probe
ttatctggaggtctcatttcttgta

SEQ ID NO: 79538 - DNA, 25 bp, probe
ctaggtgttaagatataaggcattg

SEQ ID NO: 79539 - DNA, 25 bp, probe
aatttgagttgattatctggaggtc

SEQ ID NO: 79540 - DNA, 25 bp, probe
ctaccaccaaattatccaactgtta

SEQ ID NO: 79541 - DNA, 25 bp, probe
agttgattatctggaggtctcattt

SEQ ID NO: 79542 - DNA, 25 bp, probe
tttgagttgattatctggaggtctc

SEQ ID NO: 79543 - DNA, 25 bp, probe
tgattatctggaggtctcatttctt

SEQ ID NO: 79544 - DNA, 25 bp, probe
ttgattatctggaggtctcatttct

SEQ ID NO: 79545 - DNA, 25 bp, probe
gttgattatctggaggtctcatttc

SEQ ID NO: 79546 - DNA, 25 bp, probe
attccagatactgtataacctgcat

SEQ ID NO: 79547 - DNA, 25 bp, probe
tatccaactgttatactaccagaag

SEQ ID NO: 79548 - DNA, 25 bp, probe
tctaggtgttaagatataaggcatt

SEQ ID NO: 79549 - DNA, 25 bp, probe
ttctaggtgttaagatataaggcat

SEQ ID NO: 79550 - DNA, 25 bp, probe
gaatctggagttgaatgattattcc

SEQ ID NO: 79551 - DNA, 25 bp, probe
ggaggtctcatttcttgtaaagtat

SEQ ID NO: 79552 - DNA, 25 bp, probe
accaccaaattatccaactgttata

SEQ ID NO: 79553 - DNA, 25 bp, probe
taccaccaaattatccaactgttat

SEQ ID NO: 79554 - DNA, 25 bp, probe
aactgttatactaccagaaggcttt

SEQ ID NO: 79555 - DNA, 25 bp, probe
ccagatactgtataacctgcataac

SEQ ID NO: 79556 - DNA, 25 bp, probe
tccagatactgtataacctgcataa

SEQ ID NO: 79557 - DNA, 25 bp, probe
acaaggaatactaatggatcgtctt

SEQ ID NO: 79558 - DNA, 25 bp, probe
cttggtgtgtgttatggacaattaa

SEQ ID NO: 79559 - DNA, 25 bp, probe
gtacaaggaatactaatggatcgtc

SEQ ID NO: 79560 - DNA, 25 bp, probe
tacaaggaatactaatggatcgtct

SEQ ID NO: 79561 - DNA, 25 bp, probe
ccttggtgtgtgttatggacaatta

SEQ ID NO: 79562 - DNA, 25 bp, probe
gtgtgtgttatggacaattaactgt

SEQ ID NO: 79563 - DNA, 25 bp, probe
ttggtgtgtgttatggacaattaac

SEQ ID NO: 79564 - DNA, 25 bp, probe
ggtgtgtgttatggacaattaactg

SEQ ID NO: 79565 - DNA, 25 bp, probe
tggtgtgtgttatggacaattaact

SEQ ID NO: 79566 - DNA, 25 bp, probe
tgtgtgttatggacaattaactgtt

SEQ ID NO: 79567 - DNA, 25 bp, probe
caaggaatactaatggatcgtctta

SEQ ID NO: 79568 - DNA, 25 bp, probe
caacttgagtgatctgagctgaatt

SEQ ID NO: 79569 - DNA, 25 bp, probe
caaacacaaaggacagtcatacatt

SEQ ID NO: 79570 - DNA, 25 bp, probe
aaacacaaaggacagtcatacattt

SEQ ID NO: 79571 - DNA, 25 bp, probe
acaaacacaaaggacagtcatacat

SEQ ID NO: 79572 - DNA, 25 bp, probe
caatgttgtgggtagagagaatgag

SEQ ID NO: 79573 - DNA, 25 bp, probe
gttgtgggtagagagaatgagtttg

SEQ ID NO: 79574 - DNA, 25 bp, probe
cctccacatgctgatgatgactatt

SEQ ID NO: 79575 - DNA, 25 bp, probe
atgttgtgggtagagagaatgagtt

SEQ ID NO: 79576 - DNA, 25 bp, probe
aatgttgtgggtagagagaatgagt

SEQ ID NO: 79577 - DNA, 25 bp, probe
ttgtgactaggagagactaaacttt

SEQ ID NO: 79578 - DNA, 25 bp, probe
tttgtgactaggagagactaaactt

SEQ ID NO: 79579 - DNA, 25 bp, probe
ggagtcttgaaatgtcacagtagta

SEQ ID NO: 79580 - DNA, 25 bp, probe
ggtagagagaatgagtttgtgacta

SEQ ID NO: 79581 - DNA, 25 bp, probe
gtgtggagacttgaaacttgaatgt

SEQ ID NO: 79582 - DNA, 25 bp, probe
ttgtgggtagagagaatgagtttgt

SEQ ID NO: 79583 - DNA, 25 bp, probe
tgttgtgggtagagagaatgagttt

SEQ ID NO: 79584 - DNA, 25 bp, probe
aactaaagaatctaggaaccttgcc

SEQ ID NO: 79585 - DNA, 25 bp, probe
aaggaatactaatggatcgtcttaa

SEQ ID NO: 79586 - DNA, 25 bp, probe
aaacttgaatgtcccttccaacttt

SEQ ID NO: 79587 - DNA, 25 bp, probe
aaactaaagaatctaggaaccttgc

SEQ ID NO: 79588 - DNA, 25 bp, probe
atgagtttgtgactaggagagacta

SEQ ID NO: 79589 - DNA, 25 bp, probe
ttgatatttgagccattcctaaaga

SEQ ID NO: 79590 - DNA, 25 bp, probe
cacaaacacaaaggacagtcataca

SEQ ID NO: 79591 - DNA, 25 bp, probe
acacaaacacaaaggacagtcatac

SEQ ID NO: 79592 - DNA, 25 bp, probe
cacacaaacacaaaggacagtcata

SEQ ID NO: 79593 - DNA, 25 bp, probe
tcaacttgagtgatctgagctgaat

SEQ ID NO: 79594 - DNA, 25 bp, probe
tgagtttgtgactaggagagactaa

SEQ ID NO: 79595 - DNA, 25 bp, probe
gagaatgagtttgtgactaggagag

SEQ ID NO: 79596 - DNA, 25 bp, probe
gagagaatgagtttgtgactaggag

SEQ ID NO: 79597 - DNA, 25 bp, probe
gagtttgtgactaggagagactaaa

SEQ ID NO: 79598 - DNA, 25 bp, probe
tgggtagagagaatgagtttgtgac

SEQ ID NO: 79599 - DNA, 25 bp, probe
gtgggtagagagaatgagtttgtga

SEQ ID NO: 79600 - DNA, 25 bp, probe
gctgtgaaagaaacaaacattgaat

SEQ ID NO: 79601 - DNA, 25 bp, probe
gatatgtgagacgaatgatggctag

SEQ ID NO: 79602 - DNA, 25 bp, probe
tatgtgagacgaatgatggctagat

SEQ ID NO: 79603 - DNA, 25 bp, probe
atatgtgagacgaatgatggctaga

SEQ ID NO: 79604 - DNA, 25 bp, probe
cgatatgtgagacgaatgatggcta

SEQ ID NO: 79605 - DNA, 25 bp, probe
aagagactaatggatgaagctaaga

SEQ ID NO: 79606 - DNA, 25 bp, probe
agagactaatggatgaagctaagat

SEQ ID NO: 79607 - DNA, 25 bp, probe
atgtgagacgaatgatggctagatc

SEQ ID NO: 79608 - DNA, 25 bp, probe
ggcatatttgaggaccatagtttct

SEQ ID NO: 79609 - DNA, 25 bp, probe
gcatatttgaggaccatagtttctt

SEQ ID NO: 79610 - DNA, 25 bp, probe
gagactaatggatgaagctaagatt

SEQ ID NO: 79611 - DNA, 25 bp, probe
tttgaggaccatagtttcttgttaa

SEQ ID NO: 79612 - DNA, 25 bp, probe
atttgaggaccatagtttcttgtta

SEQ ID NO: 79613 - DNA, 25 bp, probe
tatttgaggaccatagtttcttgtt

SEQ ID NO: 79614 - DNA, 25 bp, probe
atatttgaggaccatagtttcttgt

SEQ ID NO: 79615 - DNA, 25 bp, probe
aaagccttcatcatccaaacattgt

SEQ ID NO: 79616 - DNA, 25 bp, probe
atctccaagaggtttgtctcattct

SEQ ID NO: 79617 - DNA, 25 bp, probe
catatttgaggaccatagtttcttg

SEQ ID NO: 79618 - DNA, 25 bp, probe
gatctccaagaggtttgtctcattc

SEQ ID NO: 79619 - DNA, 25 bp, probe
tctccaagaggtttgtctcattctc

SEQ ID NO: 79620 - DNA, 25 bp, probe
gtgccgatatgtgagacgaatgatg

SEQ ID NO: 79621 - DNA, 25 bp, probe
attggcatatttgaggaccatagtt

SEQ ID NO: 79622 - DNA, 25 bp, probe
aattggcatatttgaggaccatagt

SEQ ID NO: 79623 - DNA, 25 bp, probe
ttggcatatttgaggaccatagttt

SEQ ID NO: 79624 - DNA, 25 bp, probe
aagccttcatcatccaaacattgtt

SEQ ID NO: 79625 - DNA, 25 bp, probe
aaattggcatatttgaggaccatag

SEQ ID NO: 79626 - DNA, 25 bp, probe
tggcatatttgaggaccatagtttc

SEQ ID NO: 79627 - DNA, 25 bp, probe
gtgtggcttgcataaataactgttt

SEQ ID NO: 79628 - DNA, 25 bp, probe
aaagagactaatggatgaagctaag

SEQ ID NO: 79629 - DNA, 25 bp, probe
ctgaagtgtggcttgcataaataac

SEQ ID NO: 79630 - DNA, 25 bp, probe
tgtggcttgcataaataactgttta

SEQ ID NO: 79631 - DNA, 25 bp, probe
agccttcatcatccaaacattgttg

SEQ ID NO: 79632 - DNA, 25 bp, probe
gaagtgtggcttgcataaataactg

SEQ ID NO: 79633 - DNA, 25 bp, probe
ctccaagaggtttgtctcattctcc

SEQ ID NO: 79634 - DNA, 25 bp, probe
tgaagtgtggcttgcataaataact

SEQ ID NO: 79635 - DNA, 25 bp, probe
aagaggtttgtctcattctccttgg

SEQ ID NO: 79636 - DNA, 25 bp, probe
ccaagaggtttgtctcattctcctt

SEQ ID NO: 79637 - DNA, 25 bp, probe
agactaatggatgaagctaagattt

SEQ ID NO: 79638 - DNA, 25 bp, probe
agtgtggcttgcataaataactgtt

SEQ ID NO: 79639 - DNA, 25 bp, probe
aagtgtggcttgcataaataactgt

SEQ ID NO: 79640 - DNA, 25 bp, probe
gaaaagccttcatcatccaaacatt

SEQ ID NO: 79641 - DNA, 25 bp, probe
ccgatatgtgagacgaatgatggct

SEQ ID NO: 79642 - DNA, 25 bp, probe
gtgtgtatcaaaagagactaatgga

SEQ ID NO: 79643 - DNA, 25 bp, probe
tgtctcattctccttgggctgtaaa

SEQ ID NO: 79644 - DNA, 25 bp, probe
ttgtctcattctccttgggctgtaa

SEQ ID NO: 79645 - DNA, 25 bp, probe
ctgagagaatatgcctacgatgtcc

SEQ ID NO: 79646 - DNA, 25 bp, probe
cctgagagaatatgcctacgatgtc

SEQ ID NO: 79647 - DNA, 25 bp, probe
gtcctgagagaatatgcctacgatg

SEQ ID NO: 79648 - DNA, 25 bp, probe
tagcctacagagagagacagtacaa

SEQ ID NO: 79649 - DNA, 25 bp, probe
ttagcctacagagagagacagtaca

SEQ ID NO: 79650 - DNA, 25 bp, probe
atagtctgacagaacattcaatgga

SEQ ID NO: 79651 - DNA, 25 bp, probe
cacagtcctgagagaatatgcctac

SEQ ID NO: 79652 - DNA, 25 bp, probe
agtcctgagagaatatgcctacgat

SEQ ID NO: 79653 - DNA, 25 bp, probe
tctgacagaacattcaatggacaat

SEQ ID NO: 79654 - DNA, 25 bp, probe
aatagtctgacagaacattcaatgg

SEQ ID NO: 79655 - DNA, 25 bp, probe
gcttgataatagtctgacagaacat

SEQ ID NO: 79656 - DNA, 25 bp, probe
tcctgagagaatatgcctacgatgt

SEQ ID NO: 79657 - DNA, 25 bp, probe
agcttgataatagtctgacagaaca

SEQ ID NO: 79658 - DNA, 25 bp, probe
tagtctgacagaacattcaatggac

SEQ ID NO: 79659 - DNA, 25 bp, probe
tcacagtcctgagagaatatgccta

SEQ ID NO: 79660 - DNA, 25 bp, probe
ggattatggaaacacgaaactactg

SEQ ID NO: 79661 - DNA, 25 bp, probe
tggattatggaaacacgaaactact

SEQ ID NO: 79662 - DNA, 25 bp, probe
ctggattatggaaacacgaaactac

SEQ ID NO: 79663 - DNA, 25 bp, probe
actggattatggaaacacgaaacta

SEQ ID NO: 79664 - DNA, 25 bp, probe
tatttagcctacagagagagacagt

SEQ ID NO: 79665 - DNA, 25 bp, probe
tcttatatgttgcactgtggatgtt

SEQ ID NO: 79666 - DNA, 25 bp, probe
atttagcctacagagagagacagta

SEQ ID NO: 79667 - DNA, 25 bp, probe
gccttactttgctcttatatgttgc

SEQ ID NO: 79668 - DNA, 25 bp, probe
tctttgtattaccctttggacttgg

SEQ ID NO: 79669 - DNA, 25 bp, probe
tgtttctttgtattaccctttggac

SEQ ID NO: 79670 - DNA, 25 bp, probe
gctgtttctttgtattaccctttgg

SEQ ID NO: 79671 - DNA, 25 bp, probe
ggctgtttctttgtattaccctttg

SEQ ID NO: 79672 - DNA, 25 bp, probe
ctttggctgtttctttgtattaccc

SEQ ID NO: 79673 - DNA, 25 bp, probe
ctcttatatgttgcactgtggatgt

SEQ ID NO: 79674 - DNA, 25 bp, probe
ttctttgtattaccctttggacttg

SEQ ID NO: 79675 - DNA, 25 bp, probe
gtttctttgtattaccctttggact

SEQ ID NO: 79676 - DNA, 25 bp, probe
ctgtttctttgtattaccctttgga

SEQ ID NO: 79677 - DNA, 25 bp, probe
tggctgtttctttgtattacccttt

SEQ ID NO: 79678 - DNA, 25 bp, probe
ttggctgtttctttgtattaccctt

SEQ ID NO: 79679 - DNA, 25 bp, probe
tttggctgtttctttgtattaccct

SEQ ID NO: 79680 - DNA, 25 bp, probe
ttatttagcctacagagagagacag

SEQ ID NO: 79681 - DNA, 25 bp, probe
cttatttagcctacagagagagaca

SEQ ID NO: 79682 - DNA, 25 bp, probe
gacagaacattcaatggacaatgat

SEQ ID NO: 79683 - DNA, 25 bp, probe
gctttggctgtttctttgtattacc

SEQ ID NO: 79684 - DNA, 25 bp, probe
ggctttggctgtttctttgtattac

SEQ ID NO: 79685 - DNA, 25 bp, probe
ctgacagaacattcaatggacaatg

SEQ ID NO: 79686 - DNA, 25 bp, probe
gtctgacagaacattcaatggacaa

SEQ ID NO: 79687 - DNA, 25 bp, probe
tgacagaacattcaatggacaatga

SEQ ID NO: 79688 - DNA, 25 bp, probe
cagcttgataatagtctgacagaac

SEQ ID NO: 79689 - DNA, 25 bp, probe
ggtagatcatctgaggtcaggaatt

SEQ ID NO: 79690 - DNA, 25 bp, probe
gtagatcatctgaggtcaggaattc

SEQ ID NO: 79691 - DNA, 25 bp, probe
tagatcatctgaggtcaggaattca

SEQ ID NO: 79692 - DNA, 25 bp, probe
gatcatctgaggtcaggaattcaag

SEQ ID NO: 79693 - DNA, 25 bp, probe
atggtgaaaccctgtctctagtaaa

SEQ ID NO: 79694 - DNA, 25 bp, probe
atcatctgaggtcaggaattcaaga

SEQ ID NO: 79695 - DNA, 25 bp, probe
agatcatctgaggtcaggaattcaa

SEQ ID NO: 79696 - DNA, 25 bp, probe
tcatctgaggtcaggaattcaagac

SEQ ID NO: 79697 - DNA, 25 bp, probe
catggtgaaaccctgtctctagtaa

SEQ ID NO: 79698 - DNA, 25 bp, probe
gggtagatcatctgaggtcaggaat

SEQ ID NO: 79699 - DNA, 25 bp, probe
acatggtgaaaccctgtctctagta

SEQ ID NO: 79700 - DNA, 25 bp, probe
caacatggtgaaaccctgtctctag

SEQ ID NO: 79701 - DNA, 25 bp, probe
caaggtgggtagatcatctgaggtc

SEQ ID NO: 79702 - DNA, 25 bp, probe
tggtgaaaccctgtctctagtaaaa

SEQ ID NO: 79703 - DNA, 25 bp, probe
aacatggtgaaaccctgtctctagt

SEQ ID NO: 79704 - DNA, 25 bp, probe
aaggtgggtagatcatctgaggtca

SEQ ID NO: 79705 - DNA, 25 bp, probe
tgggtagatcatctgaggtcaggaa

SEQ ID NO: 79706 - DNA, 25 bp, probe
gtgggtagatcatctgaggtcagga

SEQ ID NO: 79707 - DNA, 25 bp, probe
aggtgggtagatcatctgaggtcag

SEQ ID NO: 79708 - DNA, 25 bp, probe
cctgtaatcccagcactttgagagg

SEQ ID NO: 79709 - DNA, 25 bp, probe
ccaaggtgggtagatcatctgaggt

SEQ ID NO: 79710 - DNA, 25 bp, probe
catctgaggtcaggaattcaagacc

SEQ ID NO: 79711 - DNA, 25 bp, probe
atgcctgtaatcccagcactttgag

SEQ ID NO: 79712 - DNA, 25 bp, probe
atctgaggtcaggaattcaagacca

SEQ ID NO: 79713 - DNA, 25 bp, probe
tctgaggtcaggaattcaagaccag

SEQ ID NO: 79714 - DNA, 25 bp, probe
ctgaggtcaggaattcaagaccagc

SEQ ID NO: 79715 - DNA, 25 bp, probe
tctccagacttctacagatgattat

SEQ ID NO: 79716 - DNA, 25 bp, probe
agaaacagattacaggacgaatagc

SEQ ID NO: 79717 - DNA, 25 bp, probe
ctccagacttctacagatgattata

SEQ ID NO: 79718 - DNA, 25 bp, probe
aacactggagtatgcttcacctaga

SEQ ID NO: 79719 - DNA, 25 bp, probe
atgcttcacctagaaacagattaca

SEQ ID NO: 79720 - DNA, 25 bp, probe
gagtatgcttcacctagaaacagat

SEQ ID NO: 79721 - DNA, 25 bp, probe
agtatgcttcacctagaaacagatt

SEQ ID NO: 79722 - DNA, 25 bp, probe
tgcttcacctagaaacagattacag

SEQ ID NO: 79723 - DNA, 25 bp, probe
acactggagtatgcttcacctagaa

SEQ ID NO: 79724 - DNA, 25 bp, probe
atctccagacttctacagatgatta

SEQ ID NO: 79725 - DNA, 25 bp, probe
tatctccagacttctacagatgatt

SEQ ID NO: 79726 - DNA, 25 bp, probe
ttatctccagacttctacagatgat

SEQ ID NO: 79727 - DNA, 25 bp, probe
attatctccagacttctacagatga

SEQ ID NO: 79728 - DNA, 25 bp, probe
tagaaacagattacaggacgaatag

SEQ ID NO: 79729 - DNA, 25 bp, probe
tatgcttcacctagaaacagattac

SEQ ID NO: 79730 - DNA, 25 bp, probe
gtatgcttcacctagaaacagatta

SEQ ID NO: 79731 - DNA, 25 bp, probe
ggagtatgcttcacctagaaacaga

SEQ ID NO: 79732 - DNA, 25 bp, probe
ctagaaacagattacaggacgaata

SEQ ID NO: 79733 - DNA, 25 bp, probe
cctagaaacagattacaggacgaat

SEQ ID NO: 79734 - DNA, 25 bp, probe
ttcacctagaaacagattacaggac

SEQ ID NO: 79735 - DNA, 25 bp, probe
cttcacctagaaacagattacagga

SEQ ID NO: 79736 - DNA, 25 bp, probe
tggagtatgcttcacctagaaacag

SEQ ID NO: 79737 - DNA, 25 bp, probe
ctggagtatgcttcacctagaaaca

SEQ ID NO: 79738 - DNA, 25 bp, probe
actggagtatgcttcacctagaaac

SEQ ID NO: 79739 - DNA, 25 bp, probe
cactggagtatgcttcacctagaaa

SEQ ID NO: 79740 - DNA, 25 bp, probe
gaaacagattacaggacgaatagct

SEQ ID NO: 79741 - DNA, 25 bp, probe
aaacactggagtatgcttcacctag

SEQ ID NO: 79742 - DNA, 25 bp, probe
gcttcacctagaaacagattacagg

SEQ ID NO: 79743 - DNA, 25 bp, probe
aattatctccagacttctacagatg

SEQ ID NO: 79744 - DNA, 25 bp, probe
acctagaaacagattacaggacgaa

SEQ ID NO: 79745 - DNA, 25 bp, probe
tccagacttctacagatgattataa

SEQ ID NO: 79746 - DNA, 25 bp, probe
catttaacccataacatgagttgca

SEQ ID NO: 79747 - DNA, 25 bp, probe
cacctagaaacagattacaggacga

SEQ ID NO: 79748 - DNA, 25 bp, probe
tcacctagaaacagattacaggacg

SEQ ID NO: 79749 - DNA, 25 bp, probe
gaaccgttacttcaaaatacaatgc

SEQ ID NO: 79750 - DNA, 25 bp, probe
tcatttaacccataacatgagttgc

SEQ ID NO: 79751 - DNA, 25 bp, probe
gcaaaattatctccagacttctaca

SEQ ID NO: 79752 - DNA, 25 bp, probe
aaacagattacaggacgaatagcta

SEQ ID NO: 79753 - DNA, 25 bp, probe
ctaaaacactggagtatgcttcacc

SEQ ID NO: 79754 - DNA, 25 bp, probe
cctaaaacactggagtatgcttcac

SEQ ID NO: 79755 - DNA, 25 bp, probe
ggatgcaattgtgttgtaaagtttc

SEQ ID NO: 79756 - DNA, 25 bp, probe
atttgtatttgggatgcaattgtgt

SEQ ID NO: 79757 - DNA, 25 bp, probe
atttgggatgcaattgtgttgtaaa

SEQ ID NO: 79758 - DNA, 25 bp, probe
tatttgggatgcaattgtgttgtaa

SEQ ID NO: 79759 - DNA, 25 bp, probe
ccttatcctggacatgaatgtattg

SEQ ID NO: 79760 - DNA, 25 bp, probe
aatcctggtgtatgctccttatcct

SEQ ID NO: 79761 - DNA, 25 bp, probe
taaatcctggtgtatgctccttatc

SEQ ID NO: 79762 - DNA, 25 bp, probe
gtataaatcctggtgtatgctcctt

SEQ ID NO: 79763 - DNA, 25 bp, probe
tgtatgctaaggtgaagaagaaaga

SEQ ID NO: 79764 - DNA, 25 bp, probe
cttatcctggacatgaatgtattgt

SEQ ID NO: 79765 - DNA, 25 bp, probe
atgctaaggtgaagaagaaagactc

SEQ ID NO: 79766 - DNA, 25 bp, probe
tatgctaaggtgaagaagaaagact

SEQ ID NO: 79767 - DNA, 25 bp, probe
gtatgctaaggtgaagaagaaagac

SEQ ID NO: 79768 - DNA, 25 bp, probe
ctgtatgctaaggtgaagaagaaag

SEQ ID NO: 79769 - DNA, 25 bp, probe
ctccttatcctggacatgaatgtat

SEQ ID NO: 79770 - DNA, 25 bp, probe
tccttatcctggacatgaatgtatt

SEQ ID NO: 79771 - DNA, 25 bp, probe
tgtataaatcctggtgtatgctcct

SEQ ID NO: 79772 - DNA, 25 bp, probe
gtgtataaatcctggtgtatgctcc

SEQ ID NO: 79773 - DNA, 25 bp, probe
tataaatcctggtgtatgctcctta

SEQ ID NO: 79774 - DNA, 25 bp, probe
tatgctccttatcctggacatgaat

SEQ ID NO: 79775 - DNA, 25 bp, probe
tatcctggacatgaatgtattgtac

SEQ ID NO: 79776 - DNA, 25 bp, probe
gtctgtggactataacacctctgac

SEQ ID NO: 79777 - DNA, 25 bp, probe
ataaatcctggtgtatgctccttat

SEQ ID NO: 79778 - DNA, 25 bp, probe
cgtgtataaatcctggtgtatgctc

SEQ ID NO: 79779 - DNA, 25 bp, probe
tgtctgtggactataacacctctga

SEQ ID NO: 79780 - DNA, 25 bp, probe
gcctgtatgctaaggtgaagaagaa

SEQ ID NO: 79781 - DNA, 25 bp, probe
atcctggtgtatgctccttatcctg

SEQ ID NO: 79782 - DNA, 25 bp, probe
gctccttatcctggacatgaatgta

SEQ ID NO: 79783 - DNA, 25 bp, probe
gtatgctccttatcctggacatgaa

SEQ ID NO: 79784 - DNA, 25 bp, probe
aaatcctggtgtatgctccttatcc

SEQ ID NO: 79785 - DNA, 25 bp, probe
ttatcctggacatgaatgtattgta

SEQ ID NO: 79786 - DNA, 25 bp, probe
tgctaaggtgaagaagaaagactcc

SEQ ID NO: 79787 - DNA, 25 bp, probe
cctgtatgctaaggtgaagaagaaa

SEQ ID NO: 79788 - DNA, 25 bp, probe
ccgtgtataaatcctggtgtatgct

SEQ ID NO: 79789 - DNA, 25 bp, probe
atgctccttatcctggacatgaatg

SEQ ID NO: 79790 - DNA, 25 bp, probe
tctgtggactataacacctctgacc

SEQ ID NO: 79791 - DNA, 25 bp, probe
ctaaggtgaagaagaaagactccct

SEQ ID NO: 79792 - DNA, 25 bp, probe
gtgtatgctccttatcctggacatg

SEQ ID NO: 79793 - DNA, 25 bp, probe
taaggtgaagaagaaagactccctg

SEQ ID NO: 79794 - DNA, 25 bp, probe
gctaaggtgaagaagaaagactccc

SEQ ID NO: 79795 - DNA, 25 bp, probe
tgtatgctccttatcctggacatga

SEQ ID NO: 79796 - DNA, 25 bp, probe
tgatgatgctttcaaagatgatcga

SEQ ID NO: 79797 - DNA, 25 bp, probe
gagcctgtatgctaaggtgaagaag

SEQ ID NO: 79798 - DNA, 25 bp, probe
ggtgtatgctccttatcctggacat

SEQ ID NO: 79799 - DNA, 25 bp, probe
gtggagtttgtattttcttatgggc

SEQ ID NO: 79800 - DNA, 25 bp, probe
gtatggcaaagtggagtttgtattt

SEQ ID NO: 79801 - DNA, 25 bp, probe
agtatggcaaagtggagtttgtatt

SEQ ID NO: 79802 - DNA, 25 bp, probe
agtggagtttgtattttcttatggg

SEQ ID NO: 79803 - DNA, 25 bp, probe
gtaatgagaagattcagccaagcat

SEQ ID NO: 79804 - DNA, 25 bp, probe
ataagtctgtcagagttatgcgttc

SEQ ID NO: 79805 - DNA, 25 bp, probe
gataagtctgtcagagttatgcgtt

SEQ ID NO: 79806 - DNA, 25 bp, probe
gtatattggagacttcagagtaacc

SEQ ID NO: 79807 - DNA, 25 bp, probe
ggtgataagtctgtcagagttatgc

SEQ ID NO: 79808 - DNA, 25 bp, probe
actacaggcattgcttggagataat

SEQ ID NO: 79809 - DNA, 25 bp, probe
taagtctgtcagagttatgcgttct

SEQ ID NO: 79810 - DNA, 25 bp, probe
atattggagacttcagagtaaccag

SEQ ID NO: 79811 - DNA, 25 bp, probe
gtgataagtctgtcagagttatgcg

SEQ ID NO: 79812 - DNA, 25 bp, probe
tgagatgtacttgaacgtaatgaga

SEQ ID NO: 79813 - DNA, 25 bp, probe
tgtatattggagacttcagagtaac

SEQ ID NO: 79814 - DNA, 25 bp, probe
tgataagtctgtcagagttatgcgt

SEQ ID NO: 79815 - DNA, 25 bp, probe
ttcctgtggctgaagttcttgatac

SEQ ID NO: 79816 - DNA, 25 bp, probe
gttcctgtggctgaagttcttgata

SEQ ID NO: 79817 - DNA, 25 bp, probe
attgttgaagggtgataagtctgtc

SEQ ID NO: 79818 - DNA, 25 bp, probe
ccatgagatgtacttgaacgtaatg

SEQ ID NO: 79819 - DNA, 25 bp, probe
acctttgtatattggagacttcaga

SEQ ID NO: 79820 - DNA, 25 bp, probe
cattgttgaagggtgataagtctgt

SEQ ID NO: 79821 - DNA, 25 bp, probe
tgcttaaatatagtcttgaagggct

SEQ ID NO: 79822 - DNA, 25 bp, probe
cttccttggatgtcattgcttaaat

SEQ ID NO: 79823 - DNA, 25 bp, probe
catgagatgtacttgaacgtaatga

SEQ ID NO: 79824 - DNA, 25 bp, probe
gactacaggcattgcttggagataa

SEQ ID NO: 79825 - DNA, 25 bp, probe
tatattggagacttcagagtaacca

SEQ ID NO: 79826 - DNA, 25 bp, probe
gagatgtacttgaacgtaatgagaa

SEQ ID NO: 79827 - DNA, 25 bp, probe
atgagatgtacttgaacgtaatgag

SEQ ID NO: 79828 - DNA, 25 bp, probe
gcaacctttgtatattggagacttc

SEQ ID NO: 79829 - DNA, 25 bp, probe
agcaacctttgtatattggagactt

SEQ ID NO: 79830 - DNA, 25 bp, probe
aagtctgtcagagttatgcgttctt

SEQ ID NO: 79831 - DNA, 25 bp, probe
taatgagaagattcagccaagcatt

SEQ ID NO: 79832 - DNA, 25 bp, probe
ttgcttaaatatagtcttgaagggc

SEQ ID NO: 79833 - DNA, 25 bp, probe
tgcttccttggatgtcattgcttaa

SEQ ID NO: 79834 - DNA, 25 bp, probe
tcagagtaaccagcaaggaagagaa

SEQ ID NO: 79835 - DNA, 25 bp, probe
cctttgtatattggagacttcagag

SEQ ID NO: 79836 - DNA, 25 bp, probe
gagtaaccagcaaggaagagaaatc

SEQ ID NO: 79837 - DNA, 25 bp, probe
gagcaacctttgtatattggagact

SEQ ID NO: 79838 - DNA, 25 bp, probe
aaatatagtcttgaagggcttgttt

SEQ ID NO: 79839 - DNA, 25 bp, probe
gatgtacttgaacgtaatgagaaga

SEQ ID NO: 79840 - DNA, 25 bp, probe
agatgtacttgaacgtaatgagaag

SEQ ID NO: 79841 - DNA, 25 bp, probe
gcttaaatatagtcttgaagggctt

SEQ ID NO: 79842 - DNA, 25 bp, probe
tattggagacttcagagtaaccagc

SEQ ID NO: 79843 - DNA, 25 bp, probe
aagcattgttgaagggtgataagtc

SEQ ID NO: 79844 - DNA, 25 bp, probe
gagaagattcagccaagcattgttg

SEQ ID NO: 79845 - DNA, 25 bp, probe
gagttctgcttccttggatgtcatt

SEQ ID NO: 79846 - DNA, 25 bp, probe
aacctttgtatattggagacttcag

SEQ ID NO: 79847 - DNA, 25 bp, probe
cttctcagtgtaggtaaccgtctat

SEQ ID NO: 79848 - DNA, 25 bp, probe
ttctcagtgtaggtaaccgtctatg

SEQ ID NO: 79849 - DNA, 25 bp, probe
tcttctcagtgtaggtaaccgtcta

SEQ ID NO: 79850 - DNA, 25 bp, probe
tggttctatactgtgtagattgctg

SEQ ID NO: 79851 - DNA, 25 bp, probe
ctggttctatactgtgtagattgct

SEQ ID NO: 79852 - DNA, 25 bp, probe
tctatactgtgtagattgctggcta

SEQ ID NO: 79853 - DNA, 25 bp, probe
ggttctatactgtgtagattgctgg

SEQ ID NO: 79854 - DNA, 25 bp, probe
cctggttctatactgtgtagattgc

SEQ ID NO: 79855 - DNA, 25 bp, probe
tcctggttctatactgtgtagattg

SEQ ID NO: 79856 - DNA, 25 bp, probe
catcctggttctatactgtgtagat

SEQ ID NO: 79857 - DNA, 25 bp, probe
ccatcctggttctatactgtgtaga

SEQ ID NO: 79858 - DNA, 25 bp, probe
ttctatactgtgtagattgctggct

SEQ ID NO: 79859 - DNA, 25 bp, probe
gttctatactgtgtagattgctggc

SEQ ID NO: 79860 - DNA, 25 bp, probe
atcctggttctatactgtgtagatt

SEQ ID NO: 79861 - DNA, 25 bp, probe
tctcagtgtaggtaaccgtctatgg

SEQ ID NO: 79862 - DNA, 25 bp, probe
ctcttctcagtgtaggtaaccgtct

SEQ ID NO: 79863 - DNA, 25 bp, probe
ctatactgtgtagattgctggctac

SEQ ID NO: 79864 - DNA, 25 bp, probe
atactgtgtagattgctggctacta

SEQ ID NO: 79865 - DNA, 25 bp, probe
tatactgtgtagattgctggctact

SEQ ID NO: 79866 - DNA, 25 bp, probe
tactgtgtagattgctggctactaa

SEQ ID NO: 79867 - DNA, 25 bp, probe
gccatcctggttctatactgtgtag

SEQ ID NO: 79868 - DNA, 25 bp, probe
actcttctcagtgtaggtaaccgtc

SEQ ID NO: 79869 - DNA, 25 bp, probe
taacaccatcgtttccactcttctc

SEQ ID NO: 79870 - DNA, 25 bp, probe
ctaacaccatcgtttccactcttct

SEQ ID NO: 79871 - DNA, 25 bp, probe
ctcagtgtaggtaaccgtctatggt

SEQ ID NO: 79872 - DNA, 25 bp, probe
tgtaggtaaccgtctatggtgtgtt

SEQ ID NO: 79873 - DNA, 25 bp, probe
tcagtgtaggtaaccgtctatggtg

SEQ ID NO: 79874 - DNA, 25 bp, probe
agtatgtcctttgtatctctaagtt

SEQ ID NO: 79875 - DNA, 25 bp, probe
aagtatgtcctttgtatctctaagt

SEQ ID NO: 79876 - DNA, 25 bp, probe
agtgtaggtaaccgtctatggtgtg

SEQ ID NO: 79877 - DNA, 25 bp, probe
cagtgtaggtaaccgtctatggtgt

SEQ ID NO: 79878 - DNA, 25 bp, probe
agaagtatgtcctttgtatctctaa

SEQ ID NO: 79879 - DNA, 25 bp, probe
aagaagtatgtcctttgtatctcta

SEQ ID NO: 79880 - DNA, 25 bp, probe
taagaagtatgtcctttgtatctct

SEQ ID NO: 79881 - DNA, 25 bp, probe
gtaggtaaccgtctatggtgtgttt

SEQ ID NO: 79882 - DNA, 25 bp, probe
cctaacaccatcgtttccactcttc

SEQ ID NO: 79883 - DNA, 25 bp, probe
gtgtaggtaaccgtctatggtgtgt

SEQ ID NO: 79884 - DNA, 25 bp, probe
actgtgtagattgctggctactaaa

SEQ ID NO: 79885 - DNA, 25 bp, probe
gaagtatgtcctttgtatctctaag

SEQ ID NO: 79886 - DNA, 25 bp, probe
tctctaagttacatgacctatatct

SEQ ID NO: 79887 - DNA, 25 bp, probe
aaattctaataagaggatcagccgg

SEQ ID NO: 79888 - DNA, 25 bp, probe
ttgtatctctaagttacatgaccta

SEQ ID NO: 79889 - DNA, 25 bp, probe
aaaattctaataagaggatcagccg

SEQ ID NO: 79890 - DNA, 25 bp, probe
ttccactcttctcagtgtaggtaac

SEQ ID NO: 79891 - DNA, 25 bp, probe
cctgatgctgtataatgtatgttga

SEQ ID NO: 79892 - DNA, 25 bp, probe
gctgtataatgtatgttgaatgtgg

SEQ ID NO: 79893 - DNA, 25 bp, probe
ctcatattctgttcttccgactcct

SEQ ID NO: 79894 - DNA, 25 bp, probe
tcatattctgttcttccgactcctg

SEQ ID NO: 79895 - DNA, 25 bp, probe
ctctgactcacagttacttatggag

SEQ ID NO: 79896 - DNA, 25 bp, probe
tcttcacacattctgatcttctctg

SEQ ID NO: 79897 - DNA, 25 bp, probe
gttccttcaagaagttcctctgata

SEQ ID NO: 79898 - DNA, 25 bp, probe
cacctctgactcacagttacttatg

SEQ ID NO: 79899 - DNA, 25 bp, probe
atcttcacacattctgatcttctct

SEQ ID NO: 79900 - DNA, 25 bp, probe
ttccttcaagaagttcctctgatag

SEQ ID NO: 79901 - DNA, 25 bp, probe
gtataatgtatgttgaatgtggtcc

SEQ ID NO: 79902 - DNA, 25 bp, probe
tgctgtataatgtatgttgaatgtg

SEQ ID NO: 79903 - DNA, 25 bp, probe
cttcacacattctgatcttctctgt

SEQ ID NO: 79904 - DNA, 25 bp, probe
cctctgactcacagttacttatgga

SEQ ID NO: 79905 - DNA, 25 bp, probe
ggttatcttcacacattctgatctt

SEQ ID NO: 79906 - DNA, 25 bp, probe
cctcatattctgttcttccgactcc

SEQ ID NO: 79907 - DNA, 25 bp, probe
ggaagctagaagtgtagaatgaagt

SEQ ID NO: 79908 - DNA, 25 bp, probe
aggaagctagaagtgtagaatgaag

SEQ ID NO: 79909 - DNA, 25 bp, probe
agttccttcaagaagttcctctgat

SEQ ID NO: 79910 - DNA, 25 bp, probe
acctctgactcacagttacttatgg

SEQ ID NO: 79911 - DNA, 25 bp, probe
ctgataggaagctagaagtgtagaa

SEQ ID NO: 79912 - DNA, 25 bp, probe
tctgataggaagctagaagtgtaga

SEQ ID NO: 79913 - DNA, 25 bp, probe
ctctgataggaagctagaagtgtag

SEQ ID NO: 79914 - DNA, 25 bp, probe
tattctgttcttccgactcctgcta

SEQ ID NO: 79915 - DNA, 25 bp, probe
ctgatgctgtataatgtatgttgaa

SEQ ID NO: 79916 - DNA, 25 bp, probe
tctgactcacagttacttatggagc

SEQ ID NO: 79917 - DNA, 25 bp, probe
taggaagctagaagtgtagaatgaa

SEQ ID NO: 79918 - DNA, 25 bp, probe
tatcttcacacattctgatcttctc

SEQ ID NO: 79919 - DNA, 25 bp, probe
cagaactgatgagatgaacgtaatg

SEQ ID NO: 79920 - DNA, 25 bp, probe
gaagctagaagtgtagaatgaagtt

SEQ ID NO: 79921 - DNA, 25 bp, probe
tgtataatgtatgttgaatgtggtc

SEQ ID NO: 79922 - DNA, 25 bp, probe
ctgtataatgtatgttgaatgtggt

SEQ ID NO: 79923 - DNA, 25 bp, probe
accctgatgctgtataatgtatgtt

SEQ ID NO: 79924 - DNA, 25 bp, probe
ccagcaggaataaatactcacacta

SEQ ID NO: 79925 - DNA, 25 bp, probe
ccctgatgctgtataatgtatgttg

SEQ ID NO: 79926 - DNA, 25 bp, probe
ataggaagctagaagtgtagaatga

SEQ ID NO: 79927 - DNA, 25 bp, probe
tgataggaagctagaagtgtagaat

SEQ ID NO: 79928 - DNA, 25 bp, probe
tgactcacagttacttatggagcac

SEQ ID NO: 79929 - DNA, 25 bp, probe
ttgttccctcatattctgttcttcc

SEQ ID NO: 79930 - DNA, 25 bp, probe
tccttcaagaagttcctctgatagg

SEQ ID NO: 79931 - DNA, 25 bp, probe
ctgactcacagttacttatggagca

SEQ ID NO: 79932 - DNA, 25 bp, probe
gcacctctgactcacagttacttat

SEQ ID NO: 79933 - DNA, 25 bp, probe
cttgttccctcatattctgttcttc

SEQ ID NO: 79934 - DNA, 25 bp, probe
cagcaggaataaatactcacactac

SEQ ID NO: 79935 - DNA, 25 bp, probe
cattctcctgctatcctcttcattc

SEQ ID NO: 79936 - DNA, 25 bp, probe
attctcctgctatcctcttcattca

SEQ ID NO: 79937 - DNA, 25 bp, probe
tcattctcctgctatcctcttcatt

SEQ ID NO: 79938 - DNA, 25 bp, probe
ctcattctcctgctatcctcttcat

SEQ ID NO: 79939 - DNA, 25 bp, probe
aataatgccacctcaggaattaact

SEQ ID NO: 79940 - DNA, 25 bp, probe
tgttctgtactgtactgtgatgtag

SEQ ID NO: 79941 - DNA, 25 bp, probe
atgttctgtactgtactgtgatgta

SEQ ID NO: 79942 - DNA, 25 bp, probe
tatgttctgtactgtactgtgatgt

SEQ ID NO: 79943 - DNA, 25 bp, probe
ttctcctgctatcctcttcattcac

SEQ ID NO: 79944 - DNA, 25 bp, probe
agaaggtctaagtgtaggtgatgtg

SEQ ID NO: 79945 - DNA, 25 bp, probe
gttctgtactgtactgtgatgtagc

SEQ ID NO: 79946 - DNA, 25 bp, probe
tgtaggtgatgtgccattccataat

SEQ ID NO: 79947 - DNA, 25 bp, probe
tatactgaattagccttggaggttg

SEQ ID NO: 79948 - DNA, 25 bp, probe
ataatgccacctcaggaattaactg

SEQ ID NO: 79949 - DNA, 25 bp, probe
ttatgttctgtactgtactgtgatg

SEQ ID NO: 79950 - DNA, 25 bp, probe
ttatactgaattagccttggaggtt

SEQ ID NO: 79951 - DNA, 25 bp, probe
tagaaggtctaagtgtaggtgatgt

SEQ ID NO: 79952 - DNA, 25 bp, probe
tctaagtgtaggtgatgtgccattc

SEQ ID NO: 79953 - DNA, 25 bp, probe
tctgtactgtactgtgatgtagctt

SEQ ID NO: 79954 - DNA, 25 bp, probe
ttctgtactgtactgtgatgtagct

SEQ ID NO: 79955 - DNA, 25 bp, probe
atactgaattagccttggaggttga

SEQ ID NO: 79956 - DNA, 25 bp, probe
gtctaagtgtaggtgatgtgccatt

SEQ ID NO: 79957 - DNA, 25 bp, probe
gaaggtctaagtgtaggtgatgtgc

SEQ ID NO: 79958 - DNA, 25 bp, probe
tatgcttatgtggttgttcagtttg

SEQ ID NO: 79959 - DNA, 25 bp, probe
tttcacagcacaaactcatctttac

SEQ ID NO: 79960 - DNA, 25 bp, probe
ttatgcttatgtggttgttcagttt

SEQ ID NO: 79961 - DNA, 25 bp, probe
tttatgcttatgtggttgttcagtt

SEQ ID NO: 79962 - DNA, 25 bp, probe
cagttaagaaataatgccacctcag

SEQ ID NO: 79963 - DNA, 25 bp, probe
tcagttaagaaataatgccacctca

SEQ ID NO: 79964 - DNA, 25 bp, probe
cttatgtggttgttcagtttgttcc

SEQ ID NO: 79965 - DNA, 25 bp, probe
atttatgcttatgtggttgttcagt

SEQ ID NO: 79966 - DNA, 25 bp, probe
gcaaatctttattcactttcactgg

SEQ ID NO: 79967 - DNA, 25 bp, probe
gtgtaggtgatgtgccattccataa

SEQ ID NO: 79968 - DNA, 25 bp, probe
gccttcagaataccgcaatttaatt

SEQ ID NO: 79969 - DNA, 25 bp, probe
gaattaactggcattgggaacattt

SEQ ID NO: 79970 - DNA, 25 bp, probe
taagaaataatgccacctcaggaat

SEQ ID NO: 79971 - DNA, 25 bp, probe
ttaagaaataatgccacctcaggaa

SEQ ID NO: 79972 - DNA, 25 bp, probe
aattaactggcattgggaacatttg

SEQ ID NO: 79973 - DNA, 25 bp, probe
atcagttaagaaataatgccacctc

SEQ ID NO: 79974 - DNA, 25 bp, probe
ttcacagcacaaactcatctttaca

SEQ ID NO: 79975 - DNA, 25 bp, probe
gatttatgcttatgtggttgttcag

SEQ ID NO: 79976 - DNA, 25 bp, probe
aagaaataatgccacctcaggaatt

SEQ ID NO: 79977 - DNA, 25 bp, probe
catcagttaagaaataatgccacct

SEQ ID NO: 79978 - DNA, 25 bp, probe
gcttatgtggttgttcagtttgttc

SEQ ID NO: 79979 - DNA, 25 bp, probe
atcatgtatatgtgtgtgtgtatgc

SEQ ID NO: 79980 - DNA, 25 bp, probe
tcatgtatatgtgtgtgtgtatgca

SEQ ID NO: 79981 - DNA, 25 bp, probe
aatcatgtatatgtgtgtgtgtatg

SEQ ID NO: 79982 - DNA, 25 bp, probe
atgggcatgtttgagaattagaatg

SEQ ID NO: 79983 - DNA, 25 bp, probe
catgggcatgtttgagaattagaat

SEQ ID NO: 79984 - DNA, 25 bp, probe
agcaaatcatgtatatgtgtgtgtg

SEQ ID NO: 79985 - DNA, 25 bp, probe
gcaaatcatgtatatgtgtgtgtgt

SEQ ID NO: 79986 - DNA, 25 bp, probe
gggcatgtttgagaattagaatgat

SEQ ID NO: 79987 - DNA, 25 bp, probe
tgggcatgtttgagaattagaatga

SEQ ID NO: 79988 - DNA, 25 bp, probe
ctagatggagataacactggtgcct

SEQ ID NO: 79989 - DNA, 25 bp, probe
caacacagggagaccttatctttat

SEQ ID NO: 79990 - DNA, 25 bp, probe
ggcatgtttgagaattagaatgatg

SEQ ID NO: 79991 - DNA, 25 bp, probe
tagcaaatcatgtatatgtgtgtgt

SEQ ID NO: 79992 - DNA, 25 bp, probe
tagatggagataacactggtgcctc

SEQ ID NO: 79993 - DNA, 25 bp, probe
aacacagggagaccttatctttata

SEQ ID NO: 79994 - DNA, 25 bp, probe
catgtatatgtgtgtgtgtatgcat

SEQ ID NO: 79995 - DNA, 25 bp, probe
gcatgtttgagaattagaatgatga

SEQ ID NO: 79996 - DNA, 25 bp, probe
gcatgggcatgtttgagaattagaa

SEQ ID NO: 79997 - DNA, 25 bp, probe
ttagcaaatcatgtatatgtgtgtg

SEQ ID NO: 79998 - DNA, 25 bp, probe
gcaacacagggagaccttatcttta

SEQ ID NO: 79999 - DNA, 25 bp, probe
acacagggagaccttatctttataa

SEQ ID NO: 80000 - DNA, 25 bp, probe
caaatcatgtatatgtgtgtgtgta

SEQ ID NO: 80001 - DNA, 25 bp, probe
gcaattagcaaatcatgtatatgtg

SEQ ID NO: 80002 - DNA, 25 bp, probe
tgtatatgtgtgtgtgtatgcattg

SEQ ID NO: 80003 - DNA, 25 bp, probe
agcaattagcaaatcatgtatatgt

SEQ ID NO: 80004 - DNA, 25 bp, probe
aatacaggctctgagtctggtgtag

SEQ ID NO: 80005 - DNA, 25 bp, probe
gaataaagcaattagcaaatcatgt

SEQ ID NO: 80006 - DNA, 25 bp, probe
tgtttgagaattagaatgatgacaa

SEQ ID NO: 80007 - DNA, 25 bp, probe
gtatatgtgtgtgtgtatgcattgc

SEQ ID NO: 80008 - DNA, 25 bp, probe
ctgaataaagcaattagcaaatcat

SEQ ID NO: 80009 - DNA, 25 bp, probe
atgtatatgtgtgtgtgtatgcatt

SEQ ID NO: 80010 - DNA, 25 bp, probe
tgagaattagaatgatgacaaatga

SEQ ID NO: 80011 - DNA, 25 bp, probe
atgtttgagaattagaatgatgaca

SEQ ID NO: 80012 - DNA, 25 bp, probe
attagcaaatcatgtatatgtgtgt

SEQ ID NO: 80013 - DNA, 25 bp, probe
tgaataaagcaattagcaaatcatg

SEQ ID NO: 80014 - DNA, 25 bp, probe
tatatgtgtgtgtgtatgcattgcc

SEQ ID NO: 80015 - DNA, 25 bp, probe
catgtttgagaattagaatgatgac

SEQ ID NO: 80016 - DNA, 25 bp, probe
aaatcatgtatatgtgtgtgtgtat

SEQ ID NO: 80017 - DNA, 25 bp, probe
tctagatggagataacactggtgcc

SEQ ID NO: 80018 - DNA, 25 bp, probe
aagcaattagcaaatcatgtatatg

SEQ ID NO: 80019 - DNA, 25 bp, probe
aaatacaggctctgagtctggtgta

SEQ ID NO: 80020 - DNA, 25 bp, probe
atacaggctctgagtctggtgtagt

SEQ ID NO: 80021 - DNA, 25 bp, probe
ttgagaattagaatgatgacaaatg

SEQ ID NO: 80022 - DNA, 25 bp, probe
gagaattagaatgatgacaaatgaa

SEQ ID NO: 80023 - DNA, 25 bp, probe
gaaggaaggacacagaatggataag

SEQ ID NO: 80024 - DNA, 25 bp, probe
tgaaggaaggacacagaatggataa

SEQ ID NO: 80025 - DNA, 25 bp, probe
aaggaaggacacagaatggataagc

SEQ ID NO: 80026 - DNA, 25 bp, probe
gttggtagaagacttggatcgaatt

SEQ ID NO: 80027 - DNA, 25 bp, probe
ctgaaggaaggacacagaatggata

SEQ ID NO: 80028 - DNA, 25 bp, probe
gtgaaaccctgtctctactaaagat

SEQ ID NO: 80029 - DNA, 25 bp, probe
agttggtagaagacttggatcgaat

SEQ ID NO: 80030 - DNA, 25 bp, probe
aagcagttggtagaagacttggatc

SEQ ID NO: 80031 - DNA, 25 bp, probe
tttatggcttcattgagaaactggg

SEQ ID NO: 80032 - DNA, 25 bp, probe
tgaaaccctgtctctactaaagata

SEQ ID NO: 80033 - DNA, 25 bp, probe
gaaagtttatggcttcattgagaaa

SEQ ID NO: 80034 - DNA, 25 bp, probe
gaaaccctgtctctactaaagatac

SEQ ID NO: 80035 - DNA, 25 bp, probe
cgttcaagcagttggtagaagactt

SEQ ID NO: 80036 - DNA, 25 bp, probe
ttggtagaagacttggatcgaattc

SEQ ID NO: 80037 - DNA, 25 bp, probe
accctgtctctactaaagatacaaa

SEQ ID NO: 80038 - DNA, 25 bp, probe
aaccctgtctctactaaagatacaa

SEQ ID NO: 80039 - DNA, 25 bp, probe
aaaccctgtctctactaaagataca

SEQ ID NO: 80040 - DNA, 25 bp, probe
tatggcttcattgagaaactgggaa

SEQ ID NO: 80041 - DNA, 25 bp, probe
ttatggcttcattgagaaactggga

SEQ ID NO: 80042 - DNA, 25 bp, probe
cagttggtagaagacttggatcgaa

SEQ ID NO: 80043 - DNA, 25 bp, probe
gaagacttggatcgaattctcactc

SEQ ID NO: 80044 - DNA, 25 bp, probe
gaattctcactctcacaaccaatga

SEQ ID NO: 80045 - DNA, 25 bp, probe
aagacttggatcgaattctcactct

SEQ ID NO: 80046 - DNA, 25 bp, probe
aggaaggacacagaatggataagcc

SEQ ID NO: 80047 - DNA, 25 bp, probe
cgaattctcactctcacaaccaatg

SEQ ID NO: 80048 - DNA, 25 bp, probe
gacttggatcgaattctcactctca

SEQ ID NO: 80049 - DNA, 25 bp, probe
agacttggatcgaattctcactctc

SEQ ID NO: 80050 - DNA, 25 bp, probe
gaaggacacagaatggataagccag

SEQ ID NO: 80051 - DNA, 25 bp, probe
ggtgaaaccctgtctctactaaaga

SEQ ID NO: 80052 - DNA, 25 bp, probe
tcgaattctcactctcacaaccaat

SEQ ID NO: 80053 - DNA, 25 bp, probe
atcgaattctcactctcacaaccaa

SEQ ID NO: 80054 - DNA, 25 bp, probe
ttggatcgaattctcactctcacaa

SEQ ID NO: 80055 - DNA, 25 bp, probe
atggcttcattgagaaactgggaaa

SEQ ID NO: 80056 - DNA, 25 bp, probe
cttggatcgaattctcactctcaca

SEQ ID NO: 80057 - DNA, 25 bp, probe
acttggatcgaattctcactctcac

SEQ ID NO: 80058 - DNA, 25 bp, probe
tggtgaaaccctgtctctactaaag

SEQ ID NO: 80059 - DNA, 25 bp, probe
gtttatggcttcattgagaaactgg

SEQ ID NO: 80060 - DNA, 25 bp, probe
gatcgaattctcactctcacaacca

SEQ ID NO: 80061 - DNA, 25 bp, probe
tggatcgaattctcactctcacaac

SEQ ID NO: 80062 - DNA, 25 bp, probe
caacgaactgtacatgatgatgagg

SEQ ID NO: 80063 - DNA, 25 bp, probe
ccaacgaactgtacatgatgatgag

SEQ ID NO: 80064 - DNA, 25 bp, probe
aattctcactctcacaaccaatgag

SEQ ID NO: 80065 - DNA, 25 bp, probe
tagaagacttggatcgaattctcac

SEQ ID NO: 80066 - DNA, 25 bp, probe
gtagaagacttggatcgaattctca

SEQ ID NO: 80067 - DNA, 25 bp, probe
ctctccagataatcactagccagat

SEQ ID NO: 80068 - DNA, 25 bp, probe
gaagaattgtgagaacagaacagaa

SEQ ID NO: 80069 - DNA, 25 bp, probe
cgaagaattgtgagaacagaacaga

SEQ ID NO: 80070 - DNA, 25 bp, probe
ttcttcctctatctccactcctgtc

SEQ ID NO: 80071 - DNA, 25 bp, probe
tctccagataatcactagccagatt

SEQ ID NO: 80072 - DNA, 25 bp, probe
gttcttcctctatctccactcctgt

SEQ ID NO: 80073 - DNA, 25 bp, probe
tgttcttcctctatctccactcctg

SEQ ID NO: 80074 - DNA, 25 bp, probe
ccgaagaattgtgagaacagaacag

SEQ ID NO: 80075 - DNA, 25 bp, probe
ccgaggttatgataacatctactgt

SEQ ID NO: 80076 - DNA, 25 bp, probe
aatcttaattggttggtttgctctc

SEQ ID NO: 80077 - DNA, 25 bp, probe
tagccgaggttatgataacatctac

SEQ ID NO: 80078 - DNA, 25 bp, probe
aaatcttaattggttggtttgctct

SEQ ID NO: 80079 - DNA, 25 bp, probe
gccgaggttatgataacatctactg

SEQ ID NO: 80080 - DNA, 25 bp, probe
agccgaggttatgataacatctact

SEQ ID NO: 80081 - DNA, 25 bp, probe
ttagccgaggttatgataacatcta

SEQ ID NO: 80082 - DNA, 25 bp, probe
ggtttgctctccagataatcactag

SEQ ID NO: 80083 - DNA, 25 bp, probe
tttctgcctgtgtgcttatgttaaa

SEQ ID NO: 80084 - DNA, 25 bp, probe
cttcctctatctccactcctgtcag

SEQ ID NO: 80085 - DNA, 25 bp, probe
atcttaattggttggtttgctctcc

SEQ ID NO: 80086 - DNA, 25 bp, probe
aattgtgagaacagaacagaaactc

SEQ ID NO: 80087 - DNA, 25 bp, probe
gaattgtgagaacagaacagaaact

SEQ ID NO: 80088 - DNA, 25 bp, probe
agaattgtgagaacagaacagaaac

SEQ ID NO: 80089 - DNA, 25 bp, probe
tcttcctctatctccactcctgtca

SEQ ID NO: 80090 - DNA, 25 bp, probe
aagaattgtgagaacagaacagaaa

SEQ ID NO: 80091 - DNA, 25 bp, probe
gtttctgcctgtgtgcttatgttaa

SEQ ID NO: 80092 - DNA, 25 bp, probe
gtgttcttcctctatctccactcct

SEQ ID NO: 80093 - DNA, 25 bp, probe
aactatgtctactggtttctgcctg

SEQ ID NO: 80094 - DNA, 25 bp, probe
cgaggttatgataacatctactgta

SEQ ID NO: 80095 - DNA, 25 bp, probe
tccagataatcactagccagatttc

SEQ ID NO: 80096 - DNA, 25 bp, probe
ctccagataatcactagccagattt

SEQ ID NO: 80097 - DNA, 25 bp, probe
ctatgtctactggtttctgcctgtg

SEQ ID NO: 80098 - DNA, 25 bp, probe
tggtgttcttcctctatctccactc

SEQ ID NO: 80099 - DNA, 25 bp, probe
ctggtgttcttcctctatctccact

SEQ ID NO: 80100 - DNA, 25 bp, probe
ccagataatcactagccagatttcg

SEQ ID NO: 80101 - DNA, 25 bp, probe
tggtttgctctccagataatcacta

SEQ ID NO: 80102 - DNA, 25 bp, probe
tttagccgaggttatgataacatct

SEQ ID NO: 80103 - DNA, 25 bp, probe
ctgtgccttaattcagaacaccaaa

SEQ ID NO: 80104 - DNA, 25 bp, probe
gccgaagaattgtgagaacagaaca

SEQ ID NO: 80105 - DNA, 25 bp, probe
actatgtctactggtttctgcctgt

SEQ ID NO: 80106 - DNA, 25 bp, probe
gagaacagaacagaaactcagggtt

SEQ ID NO: 80107 - DNA, 25 bp, probe
ggtgttcttcctctatctccactcc

SEQ ID NO: 80108 - DNA, 25 bp, probe
ttggtttgctctccagataatcact

SEQ ID NO: 80109 - DNA, 25 bp, probe
gttggtttgctctccagataatcac

SEQ ID NO: 80110 - DNA, 25 bp, probe
ttcctactcctaatgagagttcctt

SEQ ID NO: 80111 - DNA, 25 bp, probe
aaggagtgaaggagattgatattgc

SEQ ID NO: 80112 - DNA, 25 bp, probe
ggagtgaaggagattgatattgctg

SEQ ID NO: 80113 - DNA, 25 bp, probe
aggagtgaaggagattgatattgct

SEQ ID NO: 80114 - DNA, 25 bp, probe
gagtgaaggagattgatattgctgc

SEQ ID NO: 80115 - DNA, 25 bp, probe
atccttattgacatggtcctgaatc

SEQ ID NO: 80116 - DNA, 25 bp, probe
catccttattgacatggtcctgaat

SEQ ID NO: 80117 - DNA, 25 bp, probe
ctacatccttattgacatggtcctg

SEQ ID NO: 80118 - DNA, 25 bp, probe
tacatccttattgacatggtcctga

SEQ ID NO: 80119 - DNA, 25 bp, probe
agtgaaggagattgatattgctgcc

SEQ ID NO: 80120 - DNA, 25 bp, probe
tatagacaaagcagaacgaggaaac

SEQ ID NO: 80121 - DNA, 25 bp, probe
atgattctggcatacatggaggatc

SEQ ID NO: 80122 - DNA, 25 bp, probe
cctacatccttattgacatggtcct

SEQ ID NO: 80123 - DNA, 25 bp, probe
ccaaaggagtgaaggagattgatat

SEQ ID NO: 80124 - DNA, 25 bp, probe
acatccttattgacatggtcctgaa

SEQ ID NO: 80125 - DNA, 25 bp, probe
cacctacatccttattgacatggtc

SEQ ID NO: 80126 - DNA, 25 bp, probe
tgaaggagattgatattgctgccac

SEQ ID NO: 80127 - DNA, 25 bp, probe
gtgaaggagattgatattgctgcca

SEQ ID NO: 80128 - DNA, 25 bp, probe
aaaggagtgaaggagattgatattg

SEQ ID NO: 80129 - DNA, 25 bp, probe
caggcacctacatccttattgacat

SEQ ID NO: 80130 - DNA, 25 bp, probe
caaaggagtgaaggagattgatatt

SEQ ID NO: 80131 - DNA, 25 bp, probe
cgttctaaggaccagtttgagtttg

SEQ ID NO: 80132 - DNA, 25 bp, probe
tcagtgtgaataaagttagtgtgtt

SEQ ID NO: 80133 - DNA, 25 bp, probe
acctacatccttattgacatggtcc

SEQ ID NO: 80134 - DNA, 25 bp, probe
tccttattgacatggtcctgaatcg

SEQ ID NO: 80135 - DNA, 25 bp, probe
atcagtgtgaataaagttagtgtgt

SEQ ID NO: 80136 - DNA, 25 bp, probe
gttctaaggaccagtttgagtttgc

SEQ ID NO: 80137 - DNA, 25 bp, probe
aggcacctacatccttattgacatg

SEQ ID NO: 80138 - DNA, 25 bp, probe
gattctggcatacatggaggatcac

SEQ ID NO: 80139 - DNA, 25 bp, probe
atgagagcaacatcaagaagaaccg

SEQ ID NO: 80140 - DNA, 25 bp, probe
gacaggcacctacatccttattgac

SEQ ID NO: 80141 - DNA, 25 bp, probe
ttattgacatggtcctgaatcgcat

SEQ ID NO: 80142 - DNA, 25 bp, probe
gaaggagattgatattgctgccacc

SEQ ID NO: 80143 - DNA, 25 bp, probe
ggcacctacatccttattgacatgg

SEQ ID NO: 80144 - DNA, 25 bp, probe
gccaaaggagtgaaggagattgata

SEQ ID NO: 80145 - DNA, 25 bp, probe
aggaaagtgaacaagtgctacagag

SEQ ID NO: 80146 - DNA, 25 bp, probe
caggacacatgattctggcatacat

SEQ ID NO: 80147 - DNA, 25 bp, probe
ctatagacaaagcagaacgaggaaa

SEQ ID NO: 80148 - DNA, 25 bp, probe
ctaccacctatagacaaagcagaac

SEQ ID NO: 80149 - DNA, 25 bp, probe
gcacctacatccttattgacatggt

SEQ ID NO: 80150 - DNA, 25 bp, probe
ccgttctaaggaccagtttgagttt

SEQ ID NO: 80151 - DNA, 25 bp, probe
caggaaagtgaacaagtgctacaga

SEQ ID NO: 80152 - DNA, 25 bp, probe
cttattgacatggtcctgaatcgca

SEQ ID NO: 80153 - DNA, 25 bp, probe
ctctagcacaagggaacatttctag

SEQ ID NO: 80154 - DNA, 25 bp, probe
acaggcacctacatccttattgaca

SEQ ID NO: 80155 - DNA, 25 bp, probe
ttaaggagtgtggtaaatatgcgtc

SEQ ID NO: 80156 - DNA, 25 bp, probe
tcatcaaacagagaagcacatcaac

SEQ ID NO: 80157 - DNA, 25 bp, probe
gtcatcaaacagagaagcacatcaa

SEQ ID NO: 80158 - DNA, 25 bp, probe
catcaaacagagaagcacatcaaca

SEQ ID NO: 80159 - DNA, 25 bp, probe
tagaagtgatggatgaaaccaactg

SEQ ID NO: 80160 - DNA, 25 bp, probe
gtagaagtgatggatgaaaccaact

SEQ ID NO: 80161 - DNA, 25 bp, probe
agtagaagtgatggatgaaaccaac

SEQ ID NO: 80162 - DNA, 25 bp, probe
tgtcatcaaacagagaagcacatca

SEQ ID NO: 80163 - DNA, 25 bp, probe
tcttaaggagtgtggtaaatatgcg

SEQ ID NO: 80164 - DNA, 25 bp, probe
cttaaggagtgtggtaaatatgcgt

SEQ ID NO: 80165 - DNA, 25 bp, probe
taaggagtgtggtaaatatgcgtcc

SEQ ID NO: 80166 - DNA, 25 bp, probe
atcttaaggagtgtggtaaatatgc

SEQ ID NO: 80167 - DNA, 25 bp, probe
caagatcctgctctgtcatcaaaca

SEQ ID NO: 80168 - DNA, 25 bp, probe
atgaaaccaactgccagaaagtgtt

SEQ ID NO: 80169 - DNA, 25 bp, probe
agttccatagaacatttccagaagt

SEQ ID NO: 80170 - DNA, 25 bp, probe
gttccatagaacatttccagaagtt

SEQ ID NO: 80171 - DNA, 25 bp, probe
ttccatagaacatttccagaagttc

SEQ ID NO: 80172 - DNA, 25 bp, probe
gatgaaaccaactgccagaaagtgt

SEQ ID NO: 80173 - DNA, 25 bp, probe
agaagtgatggatgaaaccaactgc

SEQ ID NO: 80174 - DNA, 25 bp, probe
tagttccatagaacatttccagaag

SEQ ID NO: 80175 - DNA, 25 bp, probe
atggatgaaaccaactgccagaaag

SEQ ID NO: 80176 - DNA, 25 bp, probe
gatggatgaaaccaactgccagaaa

SEQ ID NO: 80177 - DNA, 25 bp, probe
tctccgtgaaatcatggtacagtcg

SEQ ID NO: 80178 - DNA, 25 bp, probe
ggatgaaaccaactgccagaaagtg

SEQ ID NO: 80179 - DNA, 25 bp, probe
atagttccatagaacatttccagaa

SEQ ID NO: 80180 - DNA, 25 bp, probe
gaagtgatggatgaaaccaactgcc

SEQ ID NO: 80181 - DNA, 25 bp, probe
aaccaggttgtaagttctacaaatg

SEQ ID NO: 80182 - DNA, 25 bp, probe
tatagttccatagaacatttccaga

SEQ ID NO: 80183 - DNA, 25 bp, probe
ccaggttgtaagttctacaaatgga

SEQ ID NO: 80184 - DNA, 25 bp, probe
accaggttgtaagttctacaaatgg

SEQ ID NO: 80185 - DNA, 25 bp, probe
ctgtcatcaaacagagaagcacatc

SEQ ID NO: 80186 - DNA, 25 bp, probe
aaaccaggttgtaagttctacaaat

SEQ ID NO: 80187 - DNA, 25 bp, probe
gtaaacagttgcctactccagtggg

SEQ ID NO: 80188 - DNA, 25 bp, probe
ggtaaacagttgcctactccagtgg

SEQ ID NO: 80189 - DNA, 25 bp, probe
ggtaaatatgcgtccgcttttgttg

SEQ ID NO: 80190 - DNA, 25 bp, probe
tgatggatgaaaccaactgccagaa

SEQ ID NO: 80191 - DNA, 25 bp, probe
caactgccagaaagtgttgaacatg

SEQ ID NO: 80192 - DNA, 25 bp, probe
aaggagtgtggtaaatatgcgtccg

SEQ ID NO: 80193 - DNA, 25 bp, probe
gcaagatcctgctctgtcatcaaac

SEQ ID NO: 80194 - DNA, 25 bp, probe
aagatcctgctctgtcatcaaacag

SEQ ID NO: 80195 - DNA, 25 bp, probe
tggatgaaaccaactgccagaaagt

SEQ ID NO: 80196 - DNA, 25 bp, probe
aagtgatggatgaaaccaactgcca

SEQ ID NO: 80197 - DNA, 25 bp, probe
tggtaaatatgcgtccgcttttgtt

SEQ ID NO: 80198 - DNA, 25 bp, probe
agtgtggtaaatatgcgtccgcttt

SEQ ID NO: 80199 - DNA, 25 bp, probe
ctcattactaggatatgtgacgcag

SEQ ID NO: 80200 - DNA, 25 bp, probe
gttcagaagcagaagacaagttcac

SEQ ID NO: 80201 - DNA, 25 bp, probe
ttcagaagcagaagacaagttcaca

SEQ ID NO: 80202 - DNA, 25 bp, probe
aaggttcagaagcagaagacaagtt

SEQ ID NO: 80203 - DNA, 25 bp, probe
tgacagagattccttggctttatta

SEQ ID NO: 80204 - DNA, 25 bp, probe
cttacactctgtggaggtggaatta

SEQ ID NO: 80205 - DNA, 25 bp, probe
ttacactctgtggaggtggaattac

SEQ ID NO: 80206 - DNA, 25 bp, probe
tcattactaggatatgtgacgcagc

SEQ ID NO: 80207 - DNA, 25 bp, probe
gctcattactaggatatgtgacgca

SEQ ID NO: 80208 - DNA, 25 bp, probe
tcagaagcagaagacaagttcacag

SEQ ID NO: 80209 - DNA, 25 bp, probe
aggttcagaagcagaagacaagttc

SEQ ID NO: 80210 - DNA, 25 bp, probe
ctgacagagattccttggctttatt

SEQ ID NO: 80211 - DNA, 25 bp, probe
gacagagattccttggctttattat

SEQ ID NO: 80212 - DNA, 25 bp, probe
agtatccaatgccttacactctgtg

SEQ ID NO: 80213 - DNA, 25 bp, probe
tacaagagacactgccactgaaata

SEQ ID NO: 80214 - DNA, 25 bp, probe
atgaaacagaatctttgctagttgg

SEQ ID NO: 80215 - DNA, 25 bp, probe
ggttcagaagcagaagacaagttca

SEQ ID NO: 80216 - DNA, 25 bp, probe
actgacagagattccttggctttat

SEQ ID NO: 80217 - DNA, 25 bp, probe
agctcattactaggatatgtgacgc

SEQ ID NO: 80218 - DNA, 25 bp, probe
gaagagcgagtatccaatgccttac

SEQ ID NO: 80219 - DNA, 25 bp, probe
actgaaatagccatcaatgtgaagg

SEQ ID NO: 80220 - DNA, 25 bp, probe
cattactaggatatgtgacgcagcc

SEQ ID NO: 80221 - DNA, 25 bp, probe
tacagaaactgacagagattccttg

SEQ ID NO: 80222 - DNA, 25 bp, probe
ttacagaaactgacagagattcctt

SEQ ID NO: 80223 - DNA, 25 bp, probe
tggaattacagaaactgacagagat

SEQ ID NO: 80224 - DNA, 25 bp, probe
aactgacagagattccttggcttta

SEQ ID NO: 80225 - DNA, 25 bp, probe
gtggaattacagaaactgacagaga

SEQ ID NO: 80226 - DNA, 25 bp, probe
attacagaaactgacagagattcct

SEQ ID NO: 80227 - DNA, 25 bp, probe
tacactctgtggaggtggaattaca

SEQ ID NO: 80228 - DNA, 25 bp, probe
cactgaaatagccatcaatgtgaag

SEQ ID NO: 80229 - DNA, 25 bp, probe
ttacaagagacactgccactgaaat

SEQ ID NO: 80230 - DNA, 25 bp, probe
attactaggatatgtgacgcagcca

SEQ ID NO: 80231 - DNA, 25 bp, probe
aatgaaacagaatctttgctagttg

SEQ ID NO: 80232 - DNA, 25 bp, probe
aattacagaaactgacagagattcc

SEQ ID NO: 80233 - DNA, 25 bp, probe
ggaattacagaaactgacagagatt

SEQ ID NO: 80234 - DNA, 25 bp, probe
ggtggaattacagaaactgacagag

SEQ ID NO: 80235 - DNA, 25 bp, probe
gaggtggaattacagaaactgacag

SEQ ID NO: 80236 - DNA, 25 bp, probe
tgaagagcgagtatccaatgcctta

SEQ ID NO: 80237 - DNA, 25 bp, probe
acagagattccttggctttattata

SEQ ID NO: 80238 - DNA, 25 bp, probe
tgaaacagaatctttgctagttggc

SEQ ID NO: 80239 - DNA, 25 bp, probe
aggtggaattacagaaactgacaga

SEQ ID NO: 80240 - DNA, 25 bp, probe
aaaggttcagaagcagaagacaagt

SEQ ID NO: 80241 - DNA, 25 bp, probe
acaagagacactgccactgaaatag

SEQ ID NO: 80242 - DNA, 25 bp, probe
cttggctttattatatcttacaccc

SEQ ID NO: 80243 - DNA, 25 bp, probe
gacattgtgagaagtgacctagaag

SEQ ID NO: 80244 - DNA, 25 bp, probe
ggacattgtgagaagtgacctagaa

SEQ ID NO: 80245 - DNA, 25 bp, probe
tcatattaccaaggaataactggcg

SEQ ID NO: 80246 - DNA, 25 bp, probe
ctcatattaccaaggaataactggc

SEQ ID NO: 80247 - DNA, 25 bp, probe
ccgcactactctttgatgtattact

SEQ ID NO: 80248 - DNA, 25 bp, probe
cgcactactctttgatgtattactc

SEQ ID NO: 80249 - DNA, 25 bp, probe
gatcttccatacctaccagttctgc

SEQ ID NO: 80250 - DNA, 25 bp, probe
catattaccaaggaataactggcgg

SEQ ID NO: 80251 - DNA, 25 bp, probe
acattgtgagaagtgacctagaagg

SEQ ID NO: 80252 - DNA, 25 bp, probe
actcatattaccaaggaataactgg

SEQ ID NO: 80253 - DNA, 25 bp, probe
ggatcttccatacctaccagttctg

SEQ ID NO: 80254 - DNA, 25 bp, probe
gccgcactactctttgatgtattac

SEQ ID NO: 80255 - DNA, 25 bp, probe
gcactactctttgatgtattactca

SEQ ID NO: 80256 - DNA, 25 bp, probe
cattgtgagaagtgacctagaaggc

SEQ ID NO: 80257 - DNA, 25 bp, probe
atcttccatacctaccagttctgcg

SEQ ID NO: 80258 - DNA, 25 bp, probe
tgagaagtgacctagaaggcaagag

SEQ ID NO: 80259 - DNA, 25 bp, probe
attgtgagaagtgacctagaaggca

SEQ ID NO: 80260 - DNA, 25 bp, probe
ttgtgagaagtgacctagaaggcaa

SEQ ID NO: 80261 - DNA, 25 bp, probe
tactcatattaccaaggaataactg

SEQ ID NO: 80262 - DNA, 25 bp, probe
ctgaagggacattgtgagaagtgac

SEQ ID NO: 80263 - DNA, 25 bp, probe
tgatgtattactcatattaccaagg

SEQ ID NO: 80264 - DNA, 25 bp, probe
gtgagaagtgacctagaaggcaaga

SEQ ID NO: 80265 - DNA, 25 bp, probe
gatgtattactcatattaccaagga

SEQ ID NO: 80266 - DNA, 25 bp, probe
atattaccaaggaataactggcggg

SEQ ID NO: 80267 - DNA, 25 bp, probe
tgtgagaagtgacctagaaggcaag

SEQ ID NO: 80268 - DNA, 25 bp, probe
gggacattgtgagaagtgacctaga

SEQ ID NO: 80269 - DNA, 25 bp, probe
gagaagtgacctagaaggcaagagg

SEQ ID NO: 80270 - DNA, 25 bp, probe
aagggacattgtgagaagtgaccta

SEQ ID NO: 80271 - DNA, 25 bp, probe
gggatcttccatacctaccagttct

SEQ ID NO: 80272 - DNA, 25 bp, probe
agggatcttccatacctaccagttc

SEQ ID NO: 80273 - DNA, 25 bp, probe
gagggatcttccatacctaccagtt

SEQ ID NO: 80274 - DNA, 25 bp, probe
tgtattactcatattaccaaggaat

SEQ ID NO: 80275 - DNA, 25 bp, probe
atgtattactcatattaccaaggaa

SEQ ID NO: 80276 - DNA, 25 bp, probe
ttactcatattaccaaggaataact

SEQ ID NO: 80277 - DNA, 25 bp, probe
cactactctttgatgtattactcat

SEQ ID NO: 80278 - DNA, 25 bp, probe
agggacattgtgagaagtgacctag

SEQ ID NO: 80279 - DNA, 25 bp, probe
ctgttactcagcagaccatgaaagg

SEQ ID NO: 80280 - DNA, 25 bp, probe
cctgttactcagcagaccatgaaag

SEQ ID NO: 80281 - DNA, 25 bp, probe
cacctgttactcagcagaccatgaa

SEQ ID NO: 80282 - DNA, 25 bp, probe
tgaagggacattgtgagaagtgacc

SEQ ID NO: 80283 - DNA, 25 bp, probe
ggccgcactactctttgatgtatta

SEQ ID NO: 80284 - DNA, 25 bp, probe
acctgttactcagcagaccatgaaa

SEQ ID NO: 80285 - DNA, 25 bp, probe
gaagggacattgtgagaagtgacct

SEQ ID NO: 80286 - DNA, 25 bp, probe
ctttactggcacttcaggaacaagc

SEQ ID NO: 80287 - DNA, 25 bp, probe
tcttcaacttgctgctcattatcta

SEQ ID NO: 80288 - DNA, 25 bp, probe
ttcaacttgctgctcattatctaac

SEQ ID NO: 80289 - DNA, 25 bp, probe
tcaacttgctgctcattatctaaca

SEQ ID NO: 80290 - DNA, 25 bp, probe
atcttcaacttgctgctcattatct

SEQ ID NO: 80291 - DNA, 25 bp, probe
cttcaacttgctgctcattatctaa

SEQ ID NO: 80292 - DNA, 25 bp, probe
tatcttcaacttgctgctcattatc

SEQ ID NO: 80293 - DNA, 25 bp, probe
gaatatcttcaacttgctgctcatt

SEQ ID NO: 80294 - DNA, 25 bp, probe
agaatatcttcaacttgctgctcat

SEQ ID NO: 80295 - DNA, 25 bp, probe
caacttgctgctcattatctaacaa

SEQ ID NO: 80296 - DNA, 25 bp, probe
aatatcttcaacttgctgctcatta

SEQ ID NO: 80297 - DNA, 25 bp, probe
atatcttcaacttgctgctcattat

SEQ ID NO: 80298 - DNA, 25 bp, probe
tcattacttctggttacaacagtga

SEQ ID NO: 80299 - DNA, 25 bp, probe
cattacttctggttacaacagtgaa

SEQ ID NO: 80300 - DNA, 25 bp, probe
ttcattacttctggttacaacagtg

SEQ ID NO: 80301 - DNA, 25 bp, probe
cttgaccatagccataagaatatct

SEQ ID NO: 80302 - DNA, 25 bp, probe
attcattacttctggttacaacagt

SEQ ID NO: 80303 - DNA, 25 bp, probe
tatggaaagagacaaagatggagac

SEQ ID NO: 80304 - DNA, 25 bp, probe
tgatatggaaagagacaaagatgga

SEQ ID NO: 80305 - DNA, 25 bp, probe
cgatttctcttgaccatagccataa

SEQ ID NO: 80306 - DNA, 25 bp, probe
atatggaaagagacaaagatggaga

SEQ ID NO: 80307 - DNA, 25 bp, probe
ctgatatggaaagagacaaagatgg

SEQ ID NO: 80308 - DNA, 25 bp, probe
catctcaaatctgctctacaccttt

SEQ ID NO: 80309 - DNA, 25 bp, probe
cctttagccatcatttcttattcca

SEQ ID NO: 80310 - DNA, 25 bp, probe
acctttagccatcatttcttattcc

SEQ ID NO: 80311 - DNA, 25 bp, probe
agacaaagatggagacctcaattat

SEQ ID NO: 80312 - DNA, 25 bp, probe
gatatggaaagagacaaagatggag

SEQ ID NO: 80313 - DNA, 25 bp, probe
gatttctcttgaccatagccataag

SEQ ID NO: 80314 - DNA, 25 bp, probe
tttagccatcatttcttattccaca

SEQ ID NO: 80315 - DNA, 25 bp, probe
cttgctgctcattatctaacaaaca

SEQ ID NO: 80316 - DNA, 25 bp, probe
acttgctgctcattatctaacaaac

SEQ ID NO: 80317 - DNA, 25 bp, probe
ccctggaagtttactattcaacaca

SEQ ID NO: 80318 - DNA, 25 bp, probe
tgctgctcattatctaacaaacata

SEQ ID NO: 80319 - DNA, 25 bp, probe
gacaaagatggagacctcaattatt

SEQ ID NO: 80320 - DNA, 25 bp, probe
agccatcatttcttattccacatta

SEQ ID NO: 80321 - DNA, 25 bp, probe
tagccatcatttcttattccacatt

SEQ ID NO: 80322 - DNA, 25 bp, probe
ttagccatcatttcttattccacat

SEQ ID NO: 80323 - DNA, 25 bp, probe
ttgctgctcattatctaacaaacat

SEQ ID NO: 80324 - DNA, 25 bp, probe
aacttgctgctcattatctaacaaa

SEQ ID NO: 80325 - DNA, 25 bp, probe
cctggaagtttactattcaacacat

SEQ ID NO: 80326 - DNA, 25 bp, probe
ttctcttgaccatagccataagaat

SEQ ID NO: 80327 - DNA, 25 bp, probe
aattcattacttctggttacaacag

SEQ ID NO: 80328 - DNA, 25 bp, probe
gccataagaatatcttcaacttgct

SEQ ID NO: 80329 - DNA, 25 bp, probe
agccataagaatatcttcaacttgc

SEQ ID NO: 80330 - DNA, 25 bp, probe
aagaatatcttcaacttgctgctca

SEQ ID NO: 80331 - DNA, 25 bp, probe
gtcctactctatacaatgcttaccg

SEQ ID NO: 80332 - DNA, 25 bp, probe
ttgtgatatatggagtcttggtgtc

SEQ ID NO: 80333 - DNA, 25 bp, probe
cttgtgatatatggagtcttggtgt

SEQ ID NO: 80334 - DNA, 25 bp, probe
gctatgatgctgcttgtgatatatg

SEQ ID NO: 80335 - DNA, 25 bp, probe
tatgatgctgcttgtgatatatgga

SEQ ID NO: 80336 - DNA, 25 bp, probe
ctatgatgctgcttgtgatatatgg

SEQ ID NO: 80337 - DNA, 25 bp, probe
aggctatgatgctgcttgtgatata

SEQ ID NO: 80338 - DNA, 25 bp, probe
atgatgctgcttgtgatatatggag

SEQ ID NO: 80339 - DNA, 25 bp, probe
agtcttggtgtcctactctatacaa

SEQ ID NO: 80340 - DNA, 25 bp, probe
ggctatgatgctgcttgtgatatat

SEQ ID NO: 80341 - DNA, 25 bp, probe
ctgcttgtgatatatggagtcttgg

SEQ ID NO: 80342 - DNA, 25 bp, probe
tgtcctactctatacaatgcttacc

SEQ ID NO: 80343 - DNA, 25 bp, probe
ggtgtcctactctatacaatgctta

SEQ ID NO: 80344 - DNA, 25 bp, probe
cttggtgtcctactctatacaatgc

SEQ ID NO: 80345 - DNA, 25 bp, probe
tcttggtgtcctactctatacaatg

SEQ ID NO: 80346 - DNA, 25 bp, probe
gtcttggtgtcctactctatacaat

SEQ ID NO: 80347 - DNA, 25 bp, probe
gcttgtgatatatggagtcttggtg

SEQ ID NO: 80348 - DNA, 25 bp, probe
tggtgtcctactctatacaatgctt

SEQ ID NO: 80349 - DNA, 25 bp, probe
ttggtgtcctactctatacaatgct

SEQ ID NO: 80350 - DNA, 25 bp, probe
gatgctgcttgtgatatatggagtc

SEQ ID NO: 80351 - DNA, 25 bp, probe
tgcttgtgatatatggagtcttggt

SEQ ID NO: 80352 - DNA, 25 bp, probe
gctgcttgtgatatatggagtcttg

SEQ ID NO: 80353 - DNA, 25 bp, probe
atgctgcttgtgatatatggagtct

SEQ ID NO: 80354 - DNA, 25 bp, probe
gtgtcctactctatacaatgcttac

SEQ ID NO: 80355 - DNA, 25 bp, probe
tgctgcttgtgatatatggagtctt

SEQ ID NO: 80356 - DNA, 25 bp, probe
tgatgctgcttgtgatatatggagt

SEQ ID NO: 80357 - DNA, 25 bp, probe
aaggctatgatgctgcttgtgatat

SEQ ID NO: 80358 - DNA, 25 bp, probe
tgtgaagtgacctcagtgagatatt

SEQ ID NO: 80359 - DNA, 25 bp, probe
atatatggagtcttggtgtcctact

SEQ ID NO: 80360 - DNA, 25 bp, probe
tgatatatggagtcttggtgtccta

SEQ ID NO: 80361 - DNA, 25 bp, probe
gatatatggagtcttggtgtcctac

SEQ ID NO: 80362 - DNA, 25 bp, probe
acaataccaactaaacagacaggat

SEQ ID NO: 80363 - DNA, 25 bp, probe
caataccaactaaacagacaggatg

SEQ ID NO: 80364 - DNA, 25 bp, probe
cacaataccaactaaacagacagga

SEQ ID NO: 80365 - DNA, 25 bp, probe
acatattctgctttgaaccgtaatc

SEQ ID NO: 80366 - DNA, 25 bp, probe
aataccaactaaacagacaggatgc

SEQ ID NO: 80367 - DNA, 25 bp, probe
gtgatatatggagtcttggtgtcct

SEQ ID NO: 80368 - DNA, 25 bp, probe
ctgtgaagtgacctcagtgagatat

SEQ ID NO: 80369 - DNA, 25 bp, probe
ctacatattctgctttgaaccgtaa

SEQ ID NO: 80370 - DNA, 25 bp, probe
ccacaataccaactaaacagacagg

SEQ ID NO: 80371 - DNA, 25 bp, probe
tgtgatatatggagtcttggtgtcc

SEQ ID NO: 80372 - DNA, 25 bp, probe
catattctgctttgaaccgtaatca

SEQ ID NO: 80373 - DNA, 25 bp, probe
gctacatattctgctttgaaccgta

SEQ ID NO: 80374 - DNA, 25 bp, probe
gaccaactgccacaataccaactaa

SEQ ID NO: 80375 - DNA, 25 bp, probe
attaaagaataagctgtcgttaaaa

SEQ ID NO: 80376 - DNA, 25 bp, probe
agaataaggagatgaccaggaagat

SEQ ID NO: 80377 - DNA, 25 bp, probe
gaataaggagatgaccaggaagatg

SEQ ID NO: 80378 - DNA, 25 bp, probe
aacaggagacagaataaggagatga

SEQ ID NO: 80379 - DNA, 25 bp, probe
cagaataaggagatgaccaggaaga

SEQ ID NO: 80380 - DNA, 25 bp, probe
acaggagacagaataaggagatgac

SEQ ID NO: 80381 - DNA, 25 bp, probe
tgtaactaatgtctcctccgaagaa

SEQ ID NO: 80382 - DNA, 25 bp, probe
acagaataaggagatgaccaggaag

SEQ ID NO: 80383 - DNA, 25 bp, probe
gacagaataaggagatgaccaggaa

SEQ ID NO: 80384 - DNA, 25 bp, probe
ctgtaactaatgtctcctccgaaga

SEQ ID NO: 80385 - DNA, 25 bp, probe
acagaagactcactccatagttcat

SEQ ID NO: 80386 - DNA, 25 bp, probe
atgacagaagactcactccatagtt

SEQ ID NO: 80387 - DNA, 25 bp, probe
gagacagaataaggagatgaccagg

SEQ ID NO: 80388 - DNA, 25 bp, probe
ggagacagaataaggagatgaccag

SEQ ID NO: 80389 - DNA, 25 bp, probe
caggagacagaataaggagatgacc

SEQ ID NO: 80390 - DNA, 25 bp, probe
gatgacagaagactcactccatagt

SEQ ID NO: 80391 - DNA, 25 bp, probe
gacagaagactcactccatagttca

SEQ ID NO: 80392 - DNA, 25 bp, probe
tgacagaagactcactccatagttc

SEQ ID NO: 80393 - DNA, 25 bp, probe
ctcacacctgtaatcctagcatctt

SEQ ID NO: 80394 - DNA, 25 bp, probe
caggaagatggctggattaagaatt

SEQ ID NO: 80395 - DNA, 25 bp, probe
agacagaataaggagatgaccagga

SEQ ID NO: 80396 - DNA, 25 bp, probe
aggagacagaataaggagatgacca

SEQ ID NO: 80397 - DNA, 25 bp, probe
cagaagactcactccatagttcatg

SEQ ID NO: 80398 - DNA, 25 bp, probe
tcacacctgtaatcctagcatcttg

SEQ ID NO: 80399 - DNA, 25 bp, probe
aactcaagctgtaactaatgtctcc

SEQ ID NO: 80400 - DNA, 25 bp, probe
gaactcaagctgtaactaatgtctc

SEQ ID NO: 80401 - DNA, 25 bp, probe
gagaactcaagctgtaactaatgtc

SEQ ID NO: 80402 - DNA, 25 bp, probe
ctcaagctgtaactaatgtctcctc

SEQ ID NO: 80403 - DNA, 25 bp, probe
agaactcaagctgtaactaatgtct

SEQ ID NO: 80404 - DNA, 25 bp, probe
tatctgacagcgttagtacagtgat

SEQ ID NO: 80405 - DNA, 25 bp, probe
actcaagctgtaactaatgtctcct

SEQ ID NO: 80406 - DNA, 25 bp, probe
gctgtaactaatgtctcctccgaag

SEQ ID NO: 80407 - DNA, 25 bp, probe
ggaacagttacgaggcagttagatt

SEQ ID NO: 80408 - DNA, 25 bp, probe
tgagaactcaagctgtaactaatgt

SEQ ID NO: 80409 - DNA, 25 bp, probe
ctgagaactcaagctgtaactaatg

SEQ ID NO: 80410 - DNA, 25 bp, probe
aaacaggagacagaataaggagatg

SEQ ID NO: 80411 - DNA, 25 bp, probe
caaacaggagacagaataaggagat

SEQ ID NO: 80412 - DNA, 25 bp, probe
aacaaacaggagacagaataaggag

SEQ ID NO: 80413 - DNA, 25 bp, probe
ccaaactgctcaaatctttacacaa

SEQ ID NO: 80414 - DNA, 25 bp, probe
caacaaacaggagacagaataagga

SEQ ID NO: 80415 - DNA, 25 bp, probe
gtattaaactttcacctgccacttc

SEQ ID NO: 80416 - DNA, 25 bp, probe
gaccaaactgctcaaatctttacac

SEQ ID NO: 80417 - DNA, 25 bp, probe
acaaacaggagacagaataaggaga

SEQ ID NO: 80418 - DNA, 25 bp, probe
gtaactaatgtctcctccgaagaaa

SEQ ID NO: 80419 - DNA, 25 bp, probe
tcaagctgtaactaatgtctcctcc

SEQ ID NO: 80420 - DNA, 25 bp, probe
ctatgccttagacacatcctcctac

SEQ ID NO: 80421 - DNA, 25 bp, probe
actatgccttagacacatcctccta

SEQ ID NO: 80422 - DNA, 25 bp, probe
tatgccttagacacatcctcctacc

SEQ ID NO: 80423 - DNA, 25 bp, probe
gactatgccttagacacatcctcct

SEQ ID NO: 80424 - DNA, 25 bp, probe
tgtggatggagaatgtgcagttatt

SEQ ID NO: 80425 - DNA, 25 bp, probe
tggatggagaatgtgcagttattta

SEQ ID NO: 80426 - DNA, 25 bp, probe
ggatggagaatgtgcagttatttat

SEQ ID NO: 80427 - DNA, 25 bp, probe
gtggatggagaatgtgcagttattt

SEQ ID NO: 80428 - DNA, 25 bp, probe
cgactatgccttagacacatcctcc

SEQ ID NO: 80429 - DNA, 25 bp, probe
tcgactatgccttagacacatcctc

SEQ ID NO: 80430 - DNA, 25 bp, probe
ttcagtttgtaaacgtatcctctgt

SEQ ID NO: 80431 - DNA, 25 bp, probe
ctgtggatggagaatgtgcagttat

SEQ ID NO: 80432 - DNA, 25 bp, probe
tcagtttgtaaacgtatcctctgta

SEQ ID NO: 80433 - DNA, 25 bp, probe
acgtatcctctgtattcagtaaaca

SEQ ID NO: 80434 - DNA, 25 bp, probe
tgtaaacgtatcctctgtattcagt

SEQ ID NO: 80435 - DNA, 25 bp, probe
tttgtaaacgtatcctctgtattca

SEQ ID NO: 80436 - DNA, 25 bp, probe
attcagtttgtaaacgtatcctctg

SEQ ID NO: 80437 - DNA, 25 bp, probe
gggaaacaaaactaaagagaccact

SEQ ID NO: 80438 - DNA, 25 bp, probe
agtttgtaaacgtatcctctgtatt

SEQ ID NO: 80439 - DNA, 25 bp, probe
cagtttgtaaacgtatcctctgtat

SEQ ID NO: 80440 - DNA, 25 bp, probe
gatggagaatgtgcagttatttatt

SEQ ID NO: 80441 - DNA, 25 bp, probe
cagtgggaaacaaaactaaagagac

SEQ ID NO: 80442 - DNA, 25 bp, probe
aacgtatcctctgtattcagtaaac

SEQ ID NO: 80443 - DNA, 25 bp, probe
ttgtaaacgtatcctctgtattcag

SEQ ID NO: 80444 - DNA, 25 bp, probe
gtttgtaaacgtatcctctgtattc

SEQ ID NO: 80445 - DNA, 25 bp, probe
tattcagtttgtaaacgtatcctct

SEQ ID NO: 80446 - DNA, 25 bp, probe
gtattcagtttgtaaacgtatcctc

SEQ ID NO: 80447 - DNA, 25 bp, probe
ggaaacaaaactaaagagaccactc

SEQ ID NO: 80448 - DNA, 25 bp, probe
agtgggaaacaaaactaaagagacc

SEQ ID NO: 80449 - DNA, 25 bp, probe
attatgcgtattcagtttgtaaacg

SEQ ID NO: 80450 - DNA, 25 bp, probe
ccagtgggaaacaaaactaaagaga

SEQ ID NO: 80451 - DNA, 25 bp, probe
aaacgtatcctctgtattcagtaaa

SEQ ID NO: 80452 - DNA, 25 bp, probe
gtaaacgtatcctctgtattcagta

SEQ ID NO: 80453 - DNA, 25 bp, probe
tgcgtattcagtttgtaaacgtatc

SEQ ID NO: 80454 - DNA, 25 bp, probe
ttatgcgtattcagtttgtaaacgt

SEQ ID NO: 80455 - DNA, 25 bp, probe
gcgtattcagtttgtaaacgtatcc

SEQ ID NO: 80456 - DNA, 25 bp, probe
atgcgtattcagtttgtaaacgtat

SEQ ID NO: 80457 - DNA, 25 bp, probe
tccagtgggaaacaaaactaaagag

SEQ ID NO: 80458 - DNA, 25 bp, probe
ctccagtgggaaacaaaactaaaga

SEQ ID NO: 80459 - DNA, 25 bp, probe
cgtattcagtttgtaaacgtatcct

SEQ ID NO: 80460 - DNA, 25 bp, probe
tattatgcgtattcagtttgtaaac

SEQ ID NO: 80461 - DNA, 25 bp, probe
cagttatttattatgcgtattcagt

SEQ ID NO: 80462 - DNA, 25 bp, probe
tatgcgtattcagtttgtaaacgta

SEQ ID NO: 80463 - DNA, 25 bp, probe
taaacgtatcctctgtattcagtaa

SEQ ID NO: 80464 - DNA, 25 bp, probe
tgtaacccagtgattatgatgtaaa

SEQ ID NO: 80465 - DNA, 25 bp, probe
ctgtaacccagtgattatgatgtaa

SEQ ID NO: 80466 - DNA, 25 bp, probe
ctcacaaggagtcgcaatgtatctg

SEQ ID NO: 80467 - DNA, 25 bp, probe
gtaacccagtgattatgatgtaaat

SEQ ID NO: 80468 - DNA, 25 bp, probe
agtagcaagtaaagtgttttcctga

SEQ ID NO: 80469 - DNA, 25 bp, probe
aagtagcaagtaaagtgttttcctg

SEQ ID NO: 80470 - DNA, 25 bp, probe
gtagcaagtaaagtgttttcctgaa

SEQ ID NO: 80471 - DNA, 25 bp, probe
tagcaagtaaagtgttttcctgaac

SEQ ID NO: 80472 - DNA, 25 bp, probe
taagtagcaagtaaagtgttttcct

SEQ ID NO: 80473 - DNA, 25 bp, probe
aacccagtgattatgatgtaaatta

SEQ ID NO: 80474 - DNA, 25 bp, probe
taacccagtgattatgatgtaaatt

SEQ ID NO: 80475 - DNA, 25 bp, probe
ttaagtagcaagtaaagtgttttcc

SEQ ID NO: 80476 - DNA, 25 bp, probe
aaattaagtagcaagtaaagtgttt

SEQ ID NO: 80477 - DNA, 25 bp, probe
gtaaattaagtagcaagtaaagtgt

SEQ ID NO: 80478 - DNA, 25 bp, probe
tgtaaattaagtagcaagtaaagtg

SEQ ID NO: 80479 - DNA, 25 bp, probe
aactcacaaggagtcgcaatgtatc

SEQ ID NO: 80480 - DNA, 25 bp, probe
actcacaaggagtcgcaatgtatct

SEQ ID NO: 80481 - DNA, 25 bp, probe
aaactcacaaggagtcgcaatgtat

SEQ ID NO: 80482 - DNA, 25 bp, probe
aaggagtcgcaatgtatctgctgag

SEQ ID NO: 80483 - DNA, 25 bp, probe
attaagtagcaagtaaagtgttttc

SEQ ID NO: 80484 - DNA, 25 bp, probe
caaggagtcgcaatgtatctgctga

SEQ ID NO: 80485 - DNA, 25 bp, probe
agcaagtaaagtgttttcctgaaca

SEQ ID NO: 80486 - DNA, 25 bp, probe
ttaacttcaaaactcacaaggagtc

SEQ ID NO: 80487 - DNA, 25 bp, probe
taacttcaaaactcacaaggagtcg

SEQ ID NO: 80488 - DNA, 25 bp, probe
attaacttcaaaactcacaaggagt

SEQ ID NO: 80489 - DNA, 25 bp, probe
aattaagtagcaagtaaagtgtttt

SEQ ID NO: 80490 - DNA, 25 bp, probe
aaaactcacaaggagtcgcaatgta

SEQ ID NO: 80491 - DNA, 25 bp, probe
ttcaaaactcacaaggagtcgcaat

SEQ ID NO: 80492 - DNA, 25 bp, probe
tcaaaactcacaaggagtcgcaatg

SEQ ID NO: 80493 - DNA, 25 bp, probe
cttcaaaactcacaaggagtcgcaa

SEQ ID NO: 80494 - DNA, 25 bp, probe
aacttcaaaactcacaaggagtcgc

SEQ ID NO: 80495 - DNA, 25 bp, probe
caaaactcacaaggagtcgcaatgt

SEQ ID NO: 80496 - DNA, 25 bp, probe
acttcaaaactcacaaggagtcgca

SEQ ID NO: 80497 - DNA, 25 bp, probe
ggtcccgtcgtagcaattatattta

SEQ ID NO: 80498 - DNA, 25 bp, probe
gtcccgtcgtagcaattatatttat

SEQ ID NO: 80499 - DNA, 25 bp, probe
tcccgtcgtagcaattatatttatt

SEQ ID NO: 80500 - DNA, 25 bp, probe
aggtcccgtcgtagcaattatattt

SEQ ID NO: 80501 - DNA, 25 bp, probe
aaggtcccgtcgtagcaattatatt

SEQ ID NO: 80502 - DNA, 25 bp, probe
cagggtgatctcgaagtatctaatt

SEQ ID NO: 80503 - DNA, 25 bp, probe
caaggtcccgtcgtagcaattatat

SEQ ID NO: 80504 - DNA, 25 bp, probe
agggtgatctcgaagtatctaattc

SEQ ID NO: 80505 - DNA, 25 bp, probe
gaagtatctaattcgccctcagcat

SEQ ID NO: 80506 - DNA, 25 bp, probe
ccagggtgatctcgaagtatctaat

SEQ ID NO: 80507 - DNA, 25 bp, probe
cccgtcgtagcaattatatttatta

SEQ ID NO: 80508 - DNA, 25 bp, probe
aagtatctaattcgccctcagcatg

SEQ ID NO: 80509 - DNA, 25 bp, probe
cccagggtgatctcgaagtatctaa

SEQ ID NO: 80510 - DNA, 25 bp, probe
gtatctaattcgccctcagcatgtg

SEQ ID NO: 80511 - DNA, 25 bp, probe
agtatctaattcgccctcagcatgt

SEQ ID NO: 80512 - DNA, 25 bp, probe
gtgatctcgaagtatctaattcgcc

SEQ ID NO: 80513 - DNA, 25 bp, probe
ggtgatctcgaagtatctaattcgc

SEQ ID NO: 80514 - DNA, 25 bp, probe
gtagaggatgttcctgcttctctag

SEQ ID NO: 80515 - DNA, 25 bp, probe
ccgtcgtagcaattatatttattat

SEQ ID NO: 80516 - DNA, 25 bp, probe
gcaaggtcccgtcgtagcaattata

SEQ ID NO: 80517 - DNA, 25 bp, probe
tatctaattcgccctcagcatgtgg

SEQ ID NO: 80518 - DNA, 25 bp, probe
gagtagaggatgttcctgcttctct

SEQ ID NO: 80519 - DNA, 25 bp, probe
agtagaggatgttcctgcttctcta

SEQ ID NO: 80520 - DNA, 25 bp, probe
tagaggatgttcctgcttctctagg

SEQ ID NO: 80521 - DNA, 25 bp, probe
gatgttcctgcttctctaggcaagg

SEQ ID NO: 80522 - DNA, 25 bp, probe
ggatgttcctgcttctctaggcaag

SEQ ID NO: 80523 - DNA, 25 bp, probe
gggtgatctcgaagtatctaattcg

SEQ ID NO: 80524 - DNA, 25 bp, probe
ggagtagaggatgttcctgcttctc

SEQ ID NO: 80525 - DNA, 25 bp, probe
atctcgaagtatctaattcgccctc

SEQ ID NO: 80526 - DNA, 25 bp, probe
gatctcgaagtatctaattcgccct

SEQ ID NO: 80527 - DNA, 25 bp, probe
tgatctcgaagtatctaattcgccc

SEQ ID NO: 80528 - DNA, 25 bp, probe
ctcgaagtatctaattcgccctcag

SEQ ID NO: 80529 - DNA, 25 bp, probe
tctcgaagtatctaattcgccctca

SEQ ID NO: 80530 - DNA, 25 bp, probe
ccccagggtgatctcgaagtatcta

SEQ ID NO: 80531 - DNA, 25 bp, probe
tcgaagtatctaattcgccctcagc

SEQ ID NO: 80532 - DNA, 25 bp, probe
cgaagtatctaattcgccctcagca

SEQ ID NO: 80533 - DNA, 25 bp, probe
gggagtagaggatgttcctgcttct

SEQ ID NO: 80534 - DNA, 25 bp, probe
cttcctggatctgagaatttattgg

SEQ ID NO: 80535 - DNA, 25 bp, probe
cctggatctgagaatttattggaaa

SEQ ID NO: 80536 - DNA, 25 bp, probe
cctcttcctggatctgagaatttat

SEQ ID NO: 80537 - DNA, 25 bp, probe
tattgaggtgtaattgcacaagtaa

SEQ ID NO: 80538 - DNA, 25 bp, probe
ttattgaggtgtaattgcacaagta

SEQ ID NO: 80539 - DNA, 25 bp, probe
tcttcctggatctgagaatttattg

SEQ ID NO: 80540 - DNA, 25 bp, probe
tcctcttcctggatctgagaattta

SEQ ID NO: 80541 - DNA, 25 bp, probe
tcctggatctgagaatttattggaa

SEQ ID NO: 80542 - DNA, 25 bp, probe
ttcctggatctgagaatttattgga

SEQ ID NO: 80543 - DNA, 25 bp, probe
ctcttcctggatctgagaatttatt

SEQ ID NO: 80544 - DNA, 25 bp, probe
ttcctcttcctggatctgagaattt

SEQ ID NO: 80545 - DNA, 25 bp, probe
tttcctcttcctggatctgagaatt

SEQ ID NO: 80546 - DNA, 25 bp, probe
ctttcctcttcctggatctgagaat

SEQ ID NO: 80547 - DNA, 25 bp, probe
attgaggtgtaattgcacaagtaaa

SEQ ID NO: 80548 - DNA, 25 bp, probe
tttattgaggtgtaattgcacaagt

SEQ ID NO: 80549 - DNA, 25 bp, probe
aatatgatgtttggatgtatgtgta

SEQ ID NO: 80550 - DNA, 25 bp, probe
taatatgatgtttggatgtatgtgt

SEQ ID NO: 80551 - DNA, 25 bp, probe
tttcctttcctcttcctggatctga

SEQ ID NO: 80552 - DNA, 25 bp, probe
atgatgtttggatgtatgtgtatat

SEQ ID NO: 80553 - DNA, 25 bp, probe
atatgatgtttggatgtatgtgtat

SEQ ID NO: 80554 - DNA, 25 bp, probe
ttcagttttattgaggtgtaattgc

SEQ ID NO: 80555 - DNA, 25 bp, probe
agttgctaatccttatttcttctaa

SEQ ID NO: 80556 - DNA, 25 bp, probe
cctttcctcttcctggatctgagaa

SEQ ID NO: 80557 - DNA, 25 bp, probe
ttcctttcctcttcctggatctgag

SEQ ID NO: 80558 - DNA, 25 bp, probe
atagttgctaatccttatttcttct

SEQ ID NO: 80559 - DNA, 25 bp, probe
ggatctgagaatttattggaaaaca

SEQ ID NO: 80560 - DNA, 25 bp, probe
tggatctgagaatttattggaaaac

SEQ ID NO: 80561 - DNA, 25 bp, probe
tatgatgtttggatgtatgtgtata

SEQ ID NO: 80562 - DNA, 25 bp, probe
gatagttgctaatccttatttcttc

SEQ ID NO: 80563 - DNA, 25 bp, probe
agatagttgctaatccttatttctt

SEQ ID NO: 80564 - DNA, 25 bp, probe
aagatagttgctaatccttatttct

SEQ ID NO: 80565 - DNA, 25 bp, probe
tttattggaaaacagattttgggtt

SEQ ID NO: 80566 - DNA, 25 bp, probe
atttattggaaaacagattttgggt

SEQ ID NO: 80567 - DNA, 25 bp, probe
ctggatctgagaatttattggaaaa

SEQ ID NO: 80568 - DNA, 25 bp, probe
tcagttttattgaggtgtaattgca

SEQ ID NO: 80569 - DNA, 25 bp, probe
tggaaaacagattttgggtttcttt

SEQ ID NO: 80570 - DNA, 25 bp, probe
ttggaaaacagattttgggtttctt

SEQ ID NO: 80571 - DNA, 25 bp, probe
attggaaaacagattttgggtttct

SEQ ID NO: 80572 - DNA, 25 bp, probe
gttgctaatccttatttcttctaaa

SEQ ID NO: 80573 - DNA, 25 bp, probe
tgatgtttggatgtatgtgtatata

SEQ ID NO: 80574 - DNA, 25 bp, probe
ggaaaacagattttgggtttctttt

SEQ ID NO: 80575 - DNA, 25 bp, probe
ataatatgatgtttggatgtatgtg

SEQ ID NO: 80576 - DNA, 25 bp, probe
tcctttcctcttcctggatctgaga

SEQ ID NO: 80577 - DNA, 25 bp, probe
ttttcctttcctcttcctggatctg

SEQ ID NO: 80578 - DNA, 25 bp, probe
actttattaattccaagggcatacc

SEQ ID NO: 80579 - DNA, 25 bp, probe
ctttattaattccaagggcataccc

SEQ ID NO: 80580 - DNA, 25 bp, probe
tactttattaattccaagggcatac

SEQ ID NO: 80581 - DNA, 25 bp, probe
gtactttattaattccaagggcata

SEQ ID NO: 80582 - DNA, 25 bp, probe
agtactttattaattccaagggcat

SEQ ID NO: 80583 - DNA, 25 bp, probe
tgctttccagggattgggttctaag

SEQ ID NO: 80584 - DNA, 25 bp, probe
tttattaattccaagggcatacccc

SEQ ID NO: 80585 - DNA, 25 bp, probe
gtgctttccagggattgggttctaa

SEQ ID NO: 80586 - DNA, 25 bp, probe
ctttccagggattgggttctaagct

SEQ ID NO: 80587 - DNA, 25 bp, probe
tttccagggattgggttctaagctg

SEQ ID NO: 80588 - DNA, 25 bp, probe
ttattaattccaagggcataccccg

SEQ ID NO: 80589 - DNA, 25 bp, probe
taagctgcctccagttgttggaata

SEQ ID NO: 80590 - DNA, 25 bp, probe
ctaagctgcctccagttgttggaat

SEQ ID NO: 80591 - DNA, 25 bp, probe
tattaattccaagggcataccccgc

SEQ ID NO: 80592 - DNA, 25 bp, probe
gagaagagcagaagaatctacactt

SEQ ID NO: 80593 - DNA, 25 bp, probe
cagagtatggagaagtcactaatgt

SEQ ID NO: 80594 - DNA, 25 bp, probe
cgagaagagcagaagaatctacact

SEQ ID NO: 80595 - DNA, 25 bp, probe
agagtatggagaagtcactaatgtg

SEQ ID NO: 80596 - DNA, 25 bp, probe
ccagagtatggagaagtcactaatg

SEQ ID NO: 80597 - DNA, 25 bp, probe
accagagtatggagaagtcactaat

SEQ ID NO: 80598 - DNA, 25 bp, probe
aatcatgtgaagacttgtcgagaag

SEQ ID NO: 80599 - DNA, 25 bp, probe
caccagagtatggagaagtcactaa

SEQ ID NO: 80600 - DNA, 25 bp, probe
ccattacagagggagttcattcaaa

SEQ ID NO: 80601 - DNA, 25 bp, probe
ttgtcgagaagagcagaagaatcta

SEQ ID NO: 80602 - DNA, 25 bp, probe
caatcatgtgaagacttgtcgagaa

SEQ ID NO: 80603 - DNA, 25 bp, probe
atcatgtgaagacttgtcgagaaga

SEQ ID NO: 80604 - DNA, 25 bp, probe
tcgagaagagcagaagaatctacac

SEQ ID NO: 80605 - DNA, 25 bp, probe
gtcgagaagagcagaagaatctaca

SEQ ID NO: 80606 - DNA, 25 bp, probe
tgtcgagaagagcagaagaatctac

SEQ ID NO: 80607 - DNA, 25 bp, probe
agtcaccagctctggaattagataa

SEQ ID NO: 80608 - DNA, 25 bp, probe
tcatgtgaagacttgtcgagaagag

SEQ ID NO: 80609 - DNA, 25 bp, probe
cttgtcgagaagagcagaagaatct

SEQ ID NO: 80610 - DNA, 25 bp, probe
gaagagaaccagttcagactttgta

SEQ ID NO: 80611 - DNA, 25 bp, probe
aagagaaccagttcagactttgtac

SEQ ID NO: 80612 - DNA, 25 bp, probe
acttgtcgagaagagcagaagaatc

SEQ ID NO: 80613 - DNA, 25 bp, probe
gacttgtcgagaagagcagaagaat

SEQ ID NO: 80614 - DNA, 25 bp, probe
cagtcaccagctctggaattagata

SEQ ID NO: 80615 - DNA, 25 bp, probe
agaagagcagaagaatctacacttc

SEQ ID NO: 80616 - DNA, 25 bp, probe
gaaccagttcagactttgtactctc

SEQ ID NO: 80617 - DNA, 25 bp, probe
aaccagttcagactttgtactctca

SEQ ID NO: 80618 - DNA, 25 bp, probe
gagaaccagttcagactttgtactc

SEQ ID NO: 80619 - DNA, 25 bp, probe
agaaccagttcagactttgtactct

SEQ ID NO: 80620 - DNA, 25 bp, probe
agagaaccagttcagactttgtact

SEQ ID NO: 80621 - DNA, 25 bp, probe
agataaattccttgaagatgtcagg

SEQ ID NO: 80622 - DNA, 25 bp, probe
ccagttcagactttgtactctcagt

SEQ ID NO: 80623 - DNA, 25 bp, probe
accagttcagactttgtactctcag

SEQ ID NO: 80624 - DNA, 25 bp, probe
gaagacttgtcgagaagagcagaag

SEQ ID NO: 80625 - DNA, 25 bp, probe
gaagatgtcaggaatgggatctatc

SEQ ID NO: 80626 - DNA, 25 bp, probe
gcaccagagtatggagaagtcacta

SEQ ID NO: 80627 - DNA, 25 bp, probe
tgaagatgtcaggaatgggatctat

SEQ ID NO: 80628 - DNA, 25 bp, probe
ttgaagatgtcaggaatgggatcta

SEQ ID NO: 80629 - DNA, 25 bp, probe
aggaagagaaccagttcagactttg

SEQ ID NO: 80630 - DNA, 25 bp, probe
caggaagagaaccagttcagacttt

SEQ ID NO: 80631 - DNA, 25 bp, probe
agacttgtcgagaagagcagaagaa

SEQ ID NO: 80632 - DNA, 25 bp, probe
aagacttgtcgagaagagcagaaga

SEQ ID NO: 80633 - DNA, 25 bp, probe
ttacagagggagttcattcaaaagt

SEQ ID NO: 80634 - DNA, 25 bp, probe
gaatctacacttctttgcaccagag

SEQ ID NO: 80635 - DNA, 25 bp, probe
tcaacaatcatgtgaagacttgtcg

SEQ ID NO: 80636 - DNA, 25 bp, probe
aatgttcagaggaagcagtattgta

SEQ ID NO: 80637 - DNA, 25 bp, probe
atacattgattctggtggtagactg

SEQ ID NO: 80638 - DNA, 25 bp, probe
gaatgttcagaggaagcagtattgt

SEQ ID NO: 80639 - DNA, 25 bp, probe
tatacattgattctggtggtagact

SEQ ID NO: 80640 - DNA, 25 bp, probe
ggaatgttcagaggaagcagtattg

SEQ ID NO: 80641 - DNA, 25 bp, probe
attgattctggtggtagactggtag

SEQ ID NO: 80642 - DNA, 25 bp, probe
atgttcagaggaagcagtattgtac

SEQ ID NO: 80643 - DNA, 25 bp, probe
tggaatgttcagaggaagcagtatt

SEQ ID NO: 80644 - DNA, 25 bp, probe
ttggaatgttcagaggaagcagtat

SEQ ID NO: 80645 - DNA, 25 bp, probe
cattgattctggtggtagactggta

SEQ ID NO: 80646 - DNA, 25 bp, probe
tacattgattctggtggtagactgg

SEQ ID NO: 80647 - DNA, 25 bp, probe
aagacaccatactcagcaatcacaa

SEQ ID NO: 80648 - DNA, 25 bp, probe
agaagacaccatactcagcaatcac

SEQ ID NO: 80649 - DNA, 25 bp, probe
gtatccaataaagtgaaaccaaccc

SEQ ID NO: 80650 - DNA, 25 bp, probe
gacaccatactcagcaatcacaaga

SEQ ID NO: 80651 - DNA, 25 bp, probe
agacaccatactcagcaatcacaag

SEQ ID NO: 80652 - DNA, 25 bp, probe
gaagacaccatactcagcaatcaca

SEQ ID NO: 80653 - DNA, 25 bp, probe
tgtatccaataaagtgaaaccaacc

SEQ ID NO: 80654 - DNA, 25 bp, probe
gagaagacaccatactcagcaatca

SEQ ID NO: 80655 - DNA, 25 bp, probe
ttgattctggtggtagactggtagt

SEQ ID NO: 80656 - DNA, 25 bp, probe
attgttggtcctatttgtaaatccc

SEQ ID NO: 80657 - DNA, 25 bp, probe
gtgtatccaataaagtgaaaccaac

SEQ ID NO: 80658 - DNA, 25 bp, probe
acaccatactcagcaatcacaagag

SEQ ID NO: 80659 - DNA, 25 bp, probe
ttctgaaatgggagttcctgagata

SEQ ID NO: 80660 - DNA, 25 bp, probe
gtatacattgattctggtggtagac

SEQ ID NO: 80661 - DNA, 25 bp, probe
cattgttggtcctatttgtaaatcc

SEQ ID NO: 80662 - DNA, 25 bp, probe
gaaatgggagttcctgagatacaac

SEQ ID NO: 80663 - DNA, 25 bp, probe
attctggtggtagactggtagtgag

SEQ ID NO: 80664 - DNA, 25 bp, probe
gattctggtggtagactggtagtga

SEQ ID NO: 80665 - DNA, 25 bp, probe
cacacattgttggtcctatttgtaa

SEQ ID NO: 80666 - DNA, 25 bp, probe
tttcttgggtttggaatgttcagag

SEQ ID NO: 80667 - DNA, 25 bp, probe
aagtgtttcttgggtttggaatgtt

SEQ ID NO: 80668 - DNA, 25 bp, probe
aaagtgtttcttgggtttggaatgt

SEQ ID NO: 80669 - DNA, 25 bp, probe
tgaaatgggagttcctgagatacaa

SEQ ID NO: 80670 - DNA, 25 bp, probe
acacattgttggtcctatttgtaaa

SEQ ID NO: 80671 - DNA, 25 bp, probe
ggcagcttcactccatgtcatatat

SEQ ID NO: 80672 - DNA, 25 bp, probe
gtttcttgggtttggaatgttcaga

SEQ ID NO: 80673 - DNA, 25 bp, probe
tctgaaatgggagttcctgagatac

SEQ ID NO: 80674 - DNA, 25 bp, probe
tgattctggtggtagactggtagtg

SEQ ID NO: 80675 - DNA, 25 bp, probe
atgggagttcctgagatacaacaaa

SEQ ID NO: 80676 - DNA, 25 bp, probe
aatgggagttcctgagatacaacaa

SEQ ID NO: 80677 - DNA, 25 bp, probe
aaatgggagttcctgagatacaaca

SEQ ID NO: 80678 - DNA, 25 bp, probe
ctgaaatgggagttcctgagataca

SEQ ID NO: 80679 - DNA, 25 bp, probe
acattgattctggtggtagactggt

SEQ ID NO: 80680 - DNA, 25 bp, probe
ttcatcaagcactatgagatactcg

SEQ ID NO: 80681 - DNA, 25 bp, probe
cttcatcaagcactatgagatactc

SEQ ID NO: 80682 - DNA, 25 bp, probe
gcttcatcaagcactatgagatact

SEQ ID NO: 80683 - DNA, 25 bp, probe
agcttcatcaagcactatgagatac

SEQ ID NO: 80684 - DNA, 25 bp, probe
cagcttcatcaagcactatgagata

SEQ ID NO: 80685 - DNA, 25 bp, probe
caaggactgaggacagaaagtaggg

SEQ ID NO: 80686 - DNA, 25 bp, probe
ccaaggactgaggacagaaagtagg

SEQ ID NO: 80687 - DNA, 25 bp, probe
acagcttcatcaagcactatgagat

SEQ ID NO: 80688 - DNA, 25 bp, probe
gccaaggactgaggacagaaagtag

SEQ ID NO: 80689 - DNA, 25 bp, probe
gaacacagcttcatcaagcactatg

SEQ ID NO: 80690 - DNA, 25 bp, probe
aacacagcttcatcaagcactatga

SEQ ID NO: 80691 - DNA, 25 bp, probe
tgaacacagcttcatcaagcactat

SEQ ID NO: 80692 - DNA, 25 bp, probe
cacagcttcatcaagcactatgaga

SEQ ID NO: 80693 - DNA, 25 bp, probe
ttgaacacagcttcatcaagcacta

SEQ ID NO: 80694 - DNA, 25 bp, probe
tgccaaggactgaggacagaaagta

SEQ ID NO: 80695 - DNA, 25 bp, probe
acacagcttcatcaagcactatgag

SEQ ID NO: 80696 - DNA, 25 bp, probe
aaggactgaggacagaaagtagggg

SEQ ID NO: 80697 - DNA, 25 bp, probe
aagcaagttcactacagcatcaata

SEQ ID NO: 80698 - DNA, 25 bp, probe
gcaagttcactacagcatcaataga

SEQ ID NO: 80699 - DNA, 25 bp, probe
agcaagttcactacagcatcaatag

SEQ ID NO: 80700 - DNA, 25 bp, probe
caagttcactacagcatcaatagaa

SEQ ID NO: 80701 - DNA, 25 bp, probe
gaagcaagttcactacagcatcaat

SEQ ID NO: 80702 - DNA, 25 bp, probe
tctttgagataatttaaccctgcct

SEQ ID NO: 80703 - DNA, 25 bp, probe
tcactacagcatcaatagaaagtca

SEQ ID NO: 80704 - DNA, 25 bp, probe
agttcactacagcatcaatagaaag

SEQ ID NO: 80705 - DNA, 25 bp, probe
tttgagataatttaaccctgcctct

SEQ ID NO: 80706 - DNA, 25 bp, probe
ctttgagataatttaaccctgcctc

SEQ ID NO: 80707 - DNA, 25 bp, probe
gttcactacagcatcaatagaaagt

SEQ ID NO: 80708 - DNA, 25 bp, probe
aagttcactacagcatcaatagaaa

SEQ ID NO: 80709 - DNA, 25 bp, probe
cactacagcatcaatagaaagtcat

SEQ ID NO: 80710 - DNA, 25 bp, probe
ttcactacagcatcaatagaaagtc

SEQ ID NO: 80711 - DNA, 25 bp, probe
ctacagcatcaatagaaagtcatct

SEQ ID NO: 80712 - DNA, 25 bp, probe
actacagcatcaatagaaagtcatc

SEQ ID NO: 80713 - DNA, 25 bp, probe
agataatttaaccctgcctctcaga

SEQ ID NO: 80714 - DNA, 25 bp, probe
tacagcatcaatagaaagtcatctt

SEQ ID NO: 80715 - DNA, 25 bp, probe
agatggatgaattatgataaaggct

SEQ ID NO: 80716 - DNA, 25 bp, probe
agaatgaactgtctagatggatgaa

SEQ ID NO: 80717 - DNA, 25 bp, probe
gaatgaactgtctagatggatgaat

SEQ ID NO: 80718 - DNA, 25 bp, probe
tgaattatgataaaggcttaggact

SEQ ID NO: 80719 - DNA, 25 bp, probe
gataatttaaccctgcctctcagag

SEQ ID NO: 80720 - DNA, 25 bp, probe
tatgataaaggcttaggacttcaaa

SEQ ID NO: 80721 - DNA, 25 bp, probe
ttatgataaaggcttaggacttcaa

SEQ ID NO: 80722 - DNA, 25 bp, probe
aatgaactgtctagatggatgaatt

SEQ ID NO: 80723 - DNA, 25 bp, probe
ggatgaattatgataaaggcttagg

SEQ ID NO: 80724 - DNA, 25 bp, probe
ctacatgaatccaaaggaacagatg

SEQ ID NO: 80725 - DNA, 25 bp, probe
cctacatgaatccaaaggaacagat

SEQ ID NO: 80726 - DNA, 25 bp, probe
attatgataaaggcttaggacttca

SEQ ID NO: 80727 - DNA, 25 bp, probe
gatggatgaattatgataaaggctt

SEQ ID NO: 80728 - DNA, 25 bp, probe
gacttaatcggttgaccctactgtg

SEQ ID NO: 80729 - DNA, 25 bp, probe
atctttgagataatttaaccctgcc

SEQ ID NO: 80730 - DNA, 25 bp, probe
acagcatcaatagaaagtcatcttt

SEQ ID NO: 80731 - DNA, 25 bp, probe
tagaatgaactgtctagatggatga

SEQ ID NO: 80732 - DNA, 25 bp, probe
cagcatcaatagaaagtcatctttg

SEQ ID NO: 80733 - DNA, 25 bp, probe
aactgtctagatggatgaattatga

SEQ ID NO: 80734 - DNA, 25 bp, probe
tgaactgtctagatggatgaattat

SEQ ID NO: 80735 - DNA, 25 bp, probe
atgaactgtctagatggatgaatta

SEQ ID NO: 80736 - DNA, 25 bp, probe
atgaattatgataaaggcttaggac

SEQ ID NO: 80737 - DNA, 25 bp, probe
tggatgaattatgataaaggcttag

SEQ ID NO: 80738 - DNA, 25 bp, probe
ataaaggcttaggacttcaaaaggt

SEQ ID NO: 80739 - DNA, 25 bp, probe
catctttgagataatttaaccctgc

SEQ ID NO: 80740 - DNA, 25 bp, probe
ttaatcggttgaccctactgtggat

SEQ ID NO: 80741 - DNA, 25 bp, probe
tagaatctcctggaatgcttaatgg

SEQ ID NO: 80742 - DNA, 25 bp, probe
cctagaatctcctggaatgcttaat

SEQ ID NO: 80743 - DNA, 25 bp, probe
ctagaatctcctggaatgcttaatg

SEQ ID NO: 80744 - DNA, 25 bp, probe
attcaagaattatgactcatcggtc

SEQ ID NO: 80745 - DNA, 25 bp, probe
gaatctcctggaatgcttaatggac

SEQ ID NO: 80746 - DNA, 25 bp, probe
agaatctcctggaatgcttaatgga

SEQ ID NO: 80747 - DNA, 25 bp, probe
aattcaagaattatgactcatcggt

SEQ ID NO: 80748 - DNA, 25 bp, probe
ccctagaatctcctggaatgcttaa

SEQ ID NO: 80749 - DNA, 25 bp, probe
aatctcctggaatgcttaatggacc

SEQ ID NO: 80750 - DNA, 25 bp, probe
gcaccgaaattcaagaattatgact

SEQ ID NO: 80751 - DNA, 25 bp, probe
agcaccgaaattcaagaattatgac

SEQ ID NO: 80752 - DNA, 25 bp, probe
cagcaccgaaattcaagaattatga

SEQ ID NO: 80753 - DNA, 25 bp, probe
atctcctggaatgcttaatggacct

SEQ ID NO: 80754 - DNA, 25 bp, probe
ccagcaccgaaattcaagaattatg

SEQ ID NO: 80755 - DNA, 25 bp, probe
tccagcaccgaaattcaagaattat

SEQ ID NO: 80756 - DNA, 25 bp, probe
accgaaattcaagaattatgactca

SEQ ID NO: 80757 - DNA, 25 bp, probe
ttccagcaccgaaattcaagaatta

SEQ ID NO: 80758 - DNA, 25 bp, probe
caccgaaattcaagaattatgactc

SEQ ID NO: 80759 - DNA, 25 bp, probe
tctcctggaatgcttaatggacctt

SEQ ID NO: 80760 - DNA, 25 bp, probe
tccctagaatctcctggaatgctta

SEQ ID NO: 80761 - DNA, 25 bp, probe
aaattcaagaattatgactcatcgg

SEQ ID NO: 80762 - DNA, 25 bp, probe
ccgaaattcaagaattatgactcat

SEQ ID NO: 80763 - DNA, 25 bp, probe
tcctggaatgcttaatggacctttc

SEQ ID NO: 80764 - DNA, 25 bp, probe
ctcctggaatgcttaatggaccttt

SEQ ID NO: 80765 - DNA, 25 bp, probe
ttcaagaattatgactcatcggtca

SEQ ID NO: 80766 - DNA, 25 bp, probe
tcaagaattatgactcatcggtcag

SEQ ID NO: 80767 - DNA, 25 bp, probe
ctttccagcaccgaaattcaagaat

SEQ ID NO: 80768 - DNA, 25 bp, probe
tttccagcaccgaaattcaagaatt

SEQ ID NO: 80769 - DNA, 25 bp, probe
caagaattatgactcatcggtcagc

SEQ ID NO: 80770 - DNA, 25 bp, probe
ctccctagaatctcctggaatgctt

SEQ ID NO: 80771 - DNA, 25 bp, probe
aattatgactcatcggtcagcagaa

SEQ ID NO: 80772 - DNA, 25 bp, probe
aagaattatgactcatcggtcagca

SEQ ID NO: 80773 - DNA, 25 bp, probe
gaaattcaagaattatgactcatcg

SEQ ID NO: 80774 - DNA, 25 bp, probe
cgaaattcaagaattatgactcatc

SEQ ID NO: 80775 - DNA, 25 bp, probe
gaattatgactcatcggtcagcaga

SEQ ID NO: 80776 - DNA, 25 bp, probe
agaattatgactcatcggtcagcag

SEQ ID NO: 80777 - DNA, 25 bp, probe
gaagctccctagaatctcctggaat

SEQ ID NO: 80778 - DNA, 25 bp, probe
ttctaccattctggaagctccctag

SEQ ID NO: 80779 - DNA, 25 bp, probe
aagctccctagaatctcctggaatg

SEQ ID NO: 80780 - DNA, 25 bp, probe
ctaccattctggaagctccctagaa

SEQ ID NO: 80781 - DNA, 25 bp, probe
cctttccagcaccgaaattcaagaa

SEQ ID NO: 80782 - DNA, 25 bp, probe
tctaccattctggaagctccctaga

SEQ ID NO: 80783 - DNA, 25 bp, probe
cttctaccattctggaagctcccta

SEQ ID NO: 80784 - DNA, 25 bp, probe
attatgactcatcggtcagcagaaa

SEQ ID NO: 80785 - DNA, 25 bp, probe
cctgtgtggtaactgtattgttcta

SEQ ID NO: 80786 - DNA, 25 bp, probe
acaactaacttcttcaactatggac

SEQ ID NO: 80787 - DNA, 25 bp, probe
caactaacttcttcaactatggact

SEQ ID NO: 80788 - DNA, 25 bp, probe
atgtaatcctgtaggttggtacttc

SEQ ID NO: 80789 - DNA, 25 bp, probe
cctacttcttagaatatgcctgtcc

SEQ ID NO: 80790 - DNA, 25 bp, probe
ctacttcttagaatatgcctgtcca

SEQ ID NO: 80791 - DNA, 25 bp, probe
tagcctacttcttagaatatgcctg

SEQ ID NO: 80792 - DNA, 25 bp, probe
ctgtgtggtaactgtattgttctag

SEQ ID NO: 80793 - DNA, 25 bp, probe
tacttcttagaatatgcctgtccaa

SEQ ID NO: 80794 - DNA, 25 bp, probe
gcctacttcttagaatatgcctgtc

SEQ ID NO: 80795 - DNA, 25 bp, probe
agcctacttcttagaatatgcctgt

SEQ ID NO: 80796 - DNA, 25 bp, probe
tatgtaatcctgtaggttggtactt

SEQ ID NO: 80797 - DNA, 25 bp, probe
atagcctacttcttagaatatgcct

SEQ ID NO: 80798 - DNA, 25 bp, probe
tgtaatcctgtaggttggtacttcc

SEQ ID NO: 80799 - DNA, 25 bp, probe
aactaacttcttcaactatggactt

SEQ ID NO: 80800 - DNA, 25 bp, probe
atatgtaatcctgtaggttggtact

SEQ ID NO: 80801 - DNA, 25 bp, probe
aacattcaagacagtccaacaactc

SEQ ID NO: 80802 - DNA, 25 bp, probe
cttatatgtaatcctgtaggttggt

SEQ ID NO: 80803 - DNA, 25 bp, probe
tacaactaacttcttcaactatgga

SEQ ID NO: 80804 - DNA, 25 bp, probe
aatagcctacttcttagaatatgcc

SEQ ID NO: 80805 - DNA, 25 bp, probe
tcttatatgtaatcctgtaggttgg

SEQ ID NO: 80806 - DNA, 25 bp, probe
gtgtcttatatgtaatcctgtaggt

SEQ ID NO: 80807 - DNA, 25 bp, probe
gggctatctttgttctttgttagtc

SEQ ID NO: 80808 - DNA, 25 bp, probe
agggctatctttgttctttgttagt

SEQ ID NO: 80809 - DNA, 25 bp, probe
ggtgatgcagataatagcctacttc

SEQ ID NO: 80810 - DNA, 25 bp, probe
gcagataatagcctacttcttagaa

SEQ ID NO: 80811 - DNA, 25 bp, probe
agatggagagagtcaggaccttaac

SEQ ID NO: 80812 - DNA, 25 bp, probe
cagatggagagagtcaggaccttaa

SEQ ID NO: 80813 - DNA, 25 bp, probe
gtgatgcagataatagcctacttct

SEQ ID NO: 80814 - DNA, 25 bp, probe
ggctatctttgttctttgttagtct

SEQ ID NO: 80815 - DNA, 25 bp, probe
tgatgcagataatagcctacttctt

SEQ ID NO: 80816 - DNA, 25 bp, probe
ctaataggtgatgcagataatagcc

SEQ ID NO: 80817 - DNA, 25 bp, probe
aagggctatctttgttctttgttag

SEQ ID NO: 80818 - DNA, 25 bp, probe
agtgtcttatatgtaatcctgtagg

SEQ ID NO: 80819 - DNA, 25 bp, probe
atatccttgtgagtacgtgatggtt

SEQ ID NO: 80820 - DNA, 25 bp, probe
aatatccttgtgagtacgtgatggt

SEQ ID NO: 80821 - DNA, 25 bp, probe
gatggagagagtcaggaccttaact

SEQ ID NO: 80822 - DNA, 25 bp, probe
ttacaactaacttcttcaactatgg

SEQ ID NO: 80823 - DNA, 25 bp, probe
gctattctcataaagtggacatctt

SEQ ID NO: 80824 - DNA, 25 bp, probe
acttcttagaatatgcctgtccaaa

SEQ ID NO: 80825 - DNA, 25 bp, probe
tgcagataatagcctacttcttaga

SEQ ID NO: 80826 - DNA, 25 bp, probe
ttctttgttagtctcttgaaactgg

SEQ ID NO: 80827 - DNA, 25 bp, probe
tctttgttctttgttagtctcttga

SEQ ID NO: 80828 - DNA, 25 bp, probe
tatatgtaatcctgtaggttggtac

SEQ ID NO: 80829 - DNA, 25 bp, probe
agaattgaagaagaagtggatggag

SEQ ID NO: 80830 - DNA, 25 bp, probe
gagaattgaagaagaagtggatgga

SEQ ID NO: 80831 - DNA, 25 bp, probe
agagaattgaagaagaagtggatgg

SEQ ID NO: 80832 - DNA, 25 bp, probe
aagagaattgaagaagaagtggatg

SEQ ID NO: 80833 - DNA, 25 bp, probe
acaagagaattgaagaagaagtgga

SEQ ID NO: 80834 - DNA, 25 bp, probe
gacaagagaattgaagaagaagtgg

SEQ ID NO: 80835 - DNA, 25 bp, probe
caagagaattgaagaagaagtggat

SEQ ID NO: 80836 - DNA, 25 bp, probe
agacaagagaattgaagaagaagtg

SEQ ID NO: 80837 - DNA, 25 bp, probe
agattattctgaatactgctgagcc

SEQ ID NO: 80838 - DNA, 25 bp, probe
gaattgaagaagaagtggatggagc

SEQ ID NO: 80839 - DNA, 25 bp, probe
aagacaagagaattgaagaagaagt

SEQ ID NO: 80840 - DNA, 25 bp, probe
aagattattctgaatactgctgagc

SEQ ID NO: 80841 - DNA, 25 bp, probe
caagacaagagaattgaagaagaag

SEQ ID NO: 80842 - DNA, 25 bp, probe
aattgaagaagaagtggatggagca

SEQ ID NO: 80843 - DNA, 25 bp, probe
attgaagaagaagtggatggagcag

SEQ ID NO: 80844 - DNA, 25 bp, probe
gatggaggtgtttcaggaatactac

SEQ ID NO: 80845 - DNA, 25 bp, probe
agatggaggtgtttcaggaatacta

SEQ ID NO: 80846 - DNA, 25 bp, probe
acatctactaatgaaattggctggt

SEQ ID NO: 80847 - DNA, 25 bp, probe
ggagggcagaaatacatctactaat

SEQ ID NO: 80848 - DNA, 25 bp, probe
catctactaatgaaattggctggtt

SEQ ID NO: 80849 - DNA, 25 bp, probe
caagatggaggtgtttcaggaatac

SEQ ID NO: 80850 - DNA, 25 bp, probe
aagatggaggtgtttcaggaatact

SEQ ID NO: 80851 - DNA, 25 bp, probe
agggcagaaatacatctactaatga

SEQ ID NO: 80852 - DNA, 25 bp, probe
atctactaatgaaattggctggttt

SEQ ID NO: 80853 - DNA, 25 bp, probe
gctgttcttcaagacaagagaattg

SEQ ID NO: 80854 - DNA, 25 bp, probe
gagggcagaaatacatctactaatg

SEQ ID NO: 80855 - DNA, 25 bp, probe
gggagggcagaaatacatctactaa

SEQ ID NO: 80856 - DNA, 25 bp, probe
gaagattattctgaatactgctgag

SEQ ID NO: 80857 - DNA, 25 bp, probe
tacatctactaatgaaattggctgg

SEQ ID NO: 80858 - DNA, 25 bp, probe
gggcagaaatacatctactaatgaa

SEQ ID NO: 80859 - DNA, 25 bp, probe
atgacttccagatgttctcctttga

SEQ ID NO: 80860 - DNA, 25 bp, probe
gtgccctgacatggttaatttataa

SEQ ID NO: 80861 - DNA, 25 bp, probe
atggaggtgtttcaggaatactacg

SEQ ID NO: 80862 - DNA, 25 bp, probe
agatttcccaggaactatgaagaag

SEQ ID NO: 80863 - DNA, 25 bp, probe
caagatttcccaggaactatgaaga

SEQ ID NO: 80864 - DNA, 25 bp, probe
aagatttcccaggaactatgaagaa

SEQ ID NO: 80865 - DNA, 25 bp, probe
gatttcccaggaactatgaagaagg

SEQ ID NO: 80866 - DNA, 25 bp, probe
ctgttcttcaagacaagagaattga

SEQ ID NO: 80867 - DNA, 25 bp, probe
gattattctgaatactgctgagccc

SEQ ID NO: 80868 - DNA, 25 bp, probe
tgggagggcagaaatacatctacta

SEQ ID NO: 80869 - DNA, 25 bp, probe
tgtgccctgacatggttaatttata

SEQ ID NO: 80870 - DNA, 25 bp, probe
attattctgaatactgctgagccct

SEQ ID NO: 80871 - DNA, 25 bp, probe
tatgagctgttcttcaagacaagag

SEQ ID NO: 80872 - DNA, 25 bp, probe
ctatgagctgttcttcaagacaaga

SEQ ID NO: 80873 - DNA, 25 bp, probe
actatcaagtcagatgtatggtcat

SEQ ID NO: 80874 - DNA, 25 bp, probe
ctatcaagtcagatgtatggtcatt

SEQ ID NO: 80875 - DNA, 25 bp, probe
tactatcaagtcagatgtatggtca

SEQ ID NO: 80876 - DNA, 25 bp, probe
gaccaacctctgattcaactcattg

SEQ ID NO: 80877 - DNA, 25 bp, probe
ttactatcaagtcagatgtatggtc

SEQ ID NO: 80878 - DNA, 25 bp, probe
cgagtgatagaggacagcgagtata

SEQ ID NO: 80879 - DNA, 25 bp, probe
tgtatggtcatttggtgtattgcta

SEQ ID NO: 80880 - DNA, 25 bp, probe
gaatgtggtttattgagcaaaggaa

SEQ ID NO: 80881 - DNA, 25 bp, probe
aaggaatgtggtttattgagcaaag

SEQ ID NO: 80882 - DNA, 25 bp, probe
gaaggaatgtggtttattgagcaaa

SEQ ID NO: 80883 - DNA, 25 bp, probe
tatggtcatttggtgtattgctaac

SEQ ID NO: 80884 - DNA, 25 bp, probe
gtatggtcatttggtgtattgctaa

SEQ ID NO: 80885 - DNA, 25 bp, probe
aatgtggtttattgagcaaaggaat

SEQ ID NO: 80886 - DNA, 25 bp, probe
atggtcatttggtgtattgctaact

SEQ ID NO: 80887 - DNA, 25 bp, probe
ctccatatccaggtatgtccaactc

SEQ ID NO: 80888 - DNA, 25 bp, probe
atgtggtttattgagcaaaggaatt

SEQ ID NO: 80889 - DNA, 25 bp, probe
tcagatgtatggtcatttggtgtat

SEQ ID NO: 80890 - DNA, 25 bp, probe
gatgtatggtcatttggtgtattgc

SEQ ID NO: 80891 - DNA, 25 bp, probe
agaaggaatgtggtttattgagcaa

SEQ ID NO: 80892 - DNA, 25 bp, probe
gtcagatgtatggtcatttggtgta

SEQ ID NO: 80893 - DNA, 25 bp, probe
atgtatggtcatttggtgtattgct

SEQ ID NO: 80894 - DNA, 25 bp, probe
tgtggtttattgagcaaaggaatta

SEQ ID NO: 80895 - DNA, 25 bp, probe
agatgtatggtcatttggtgtattg

SEQ ID NO: 80896 - DNA, 25 bp, probe
cagatgtatggtcatttggtgtatt

SEQ ID NO: 80897 - DNA, 25 bp, probe
aagtcagatgtatggtcatttggtg

SEQ ID NO: 80898 - DNA, 25 bp, probe
gactccatatccaggtatgtccaac

SEQ ID NO: 80899 - DNA, 25 bp, probe
tggtcatttggtgtattgctaactg

SEQ ID NO: 80900 - DNA, 25 bp, probe
cagaaggaatgtggtttattgagca

SEQ ID NO: 80901 - DNA, 25 bp, probe
gtcatttggtgtattgctaactgaa

SEQ ID NO: 80902 - DNA, 25 bp, probe
aggaattatattcaccgtgatctga

SEQ ID NO: 80903 - DNA, 25 bp, probe
tcaagtcagatgtatggtcatttgg

SEQ ID NO: 80904 - DNA, 25 bp, probe
atcaagtcagatgtatggtcatttg

SEQ ID NO: 80905 - DNA, 25 bp, probe
caagtcagatgtatggtcatttggt

SEQ ID NO: 80906 - DNA, 25 bp, probe
gaattatattcaccgtgatctgagg

SEQ ID NO: 80907 - DNA, 25 bp, probe
ggaattatattcaccgtgatctgag

SEQ ID NO: 80908 - DNA, 25 bp, probe
tcatttggtgtattgctaactgaaa

SEQ ID NO: 80909 - DNA, 25 bp, probe
gagtgatagaggacagcgagtatac

SEQ ID NO: 80910 - DNA, 25 bp, probe
ggaatgtggtttattgagcaaagga

SEQ ID NO: 80911 - DNA, 25 bp, probe
aggaatgtggtttattgagcaaagg

SEQ ID NO: 80912 - DNA, 25 bp, probe
ggtatgtccaactcggaggtaatta

SEQ ID NO: 80913 - DNA, 25 bp, probe
actccatatccaggtatgtccaact

SEQ ID NO: 80914 - DNA, 25 bp, probe
cgaccaacctctgattcaactcatt

SEQ ID NO: 80915 - DNA, 25 bp, probe
aaggaattatattcaccgtgatctg

SEQ ID NO: 80916 - DNA, 25 bp, probe
ggtcatttggtgtattgctaactga

SEQ ID NO: 80917 - DNA, 25 bp, probe
gtgttacttcattcagagtgttact

SEQ ID NO: 80918 - DNA, 25 bp, probe
agtgttacttcattcagagtgttac

SEQ ID NO: 80919 - DNA, 25 bp, probe
tgttacttcattcagagtgttactt

SEQ ID NO: 80920 - DNA, 25 bp, probe
ttacaagttggagtcactcttatgc

SEQ ID NO: 80921 - DNA, 25 bp, probe
atagtgttacttcattcagagtgtt

SEQ ID NO: 80922 - DNA, 25 bp, probe
aatagtgttacttcattcagagtgt

SEQ ID NO: 80923 - DNA, 25 bp, probe
gtattcggtgtcagtcctgtcttac

SEQ ID NO: 80924 - DNA, 25 bp, probe
accaaagatgaatgaagcaaatgtt

SEQ ID NO: 80925 - DNA, 25 bp, probe
tacaagttggagtcactcttatgct

SEQ ID NO: 80926 - DNA, 25 bp, probe
taccaaagatgaatgaagcaaatgt

SEQ ID NO: 80927 - DNA, 25 bp, probe
caaatgttacactgccttattctgg

SEQ ID NO: 80928 - DNA, 25 bp, probe
gatgaatgaagcaaatgttacactg

SEQ ID NO: 80929 - DNA, 25 bp, probe
tagtgttacttcattcagagtgtta

SEQ ID NO: 80930 - DNA, 25 bp, probe
agatgaatgaagcaaatgttacact

SEQ ID NO: 80931 - DNA, 25 bp, probe
tactttgtttctctcccaatgtttg

SEQ ID NO: 80932 - DNA, 25 bp, probe
gttactttgtttctctcccaatgtt

SEQ ID NO: 80933 - DNA, 25 bp, probe
gtgttactttgtttctctcccaatg

SEQ ID NO: 80934 - DNA, 25 bp, probe
ccaaagatgaatgaagcaaatgtta

SEQ ID NO: 80935 - DNA, 25 bp, probe
ttaccaaagatgaatgaagcaaatg

SEQ ID NO: 80936 - DNA, 25 bp, probe
tgttactttgtttctctcccaatgt

SEQ ID NO: 80937 - DNA, 25 bp, probe
aaatgttacactgccttattctggg

SEQ ID NO: 80938 - DNA, 25 bp, probe
agtgttactttgtttctctcccaat

SEQ ID NO: 80939 - DNA, 25 bp, probe
aagttggagtcactcttatgctgtt

SEQ ID NO: 80940 - DNA, 25 bp, probe
aagatgaatgaagcaaatgttacac

SEQ ID NO: 80941 - DNA, 25 bp, probe
ttactttgtttctctcccaatgttt

SEQ ID NO: 80942 - DNA, 25 bp, probe
cctcaagggtatgaatagtgttact

SEQ ID NO: 80943 - DNA, 25 bp, probe
tcctcaagggtatgaatagtgttac

SEQ ID NO: 80944 - DNA, 25 bp, probe
gtcctcaagggtatgaatagtgtta

SEQ ID NO: 80945 - DNA, 25 bp, probe
gagtgttactttgtttctctcccaa

SEQ ID NO: 80946 - DNA, 25 bp, probe
acttcattcagagtgttactttgtt

SEQ ID NO: 80947 - DNA, 25 bp, probe
cttaccaaagatgaatgaagcaaat

SEQ ID NO: 80948 - DNA, 25 bp, probe
tcattcagagtgttactttgtttct

SEQ ID NO: 80949 - DNA, 25 bp, probe
aatgttacactgccttattctggga

SEQ ID NO: 80950 - DNA, 25 bp, probe
agttggagtcactcttatgctgttc

SEQ ID NO: 80951 - DNA, 25 bp, probe
ctatagcttccaggtattcggtgtc

SEQ ID NO: 80952 - DNA, 25 bp, probe
aaagatgaatgaagcaaatgttaca

SEQ ID NO: 80953 - DNA, 25 bp, probe
caaagatgaatgaagcaaatgttac

SEQ ID NO: 80954 - DNA, 25 bp, probe
atgttacactgccttattctgggaa

SEQ ID NO: 80955 - DNA, 25 bp, probe
ggtattcggtgtcagtcctgtctta

SEQ ID NO: 80956 - DNA, 25 bp, probe
gaatagtgttacttcattcagagtg

SEQ ID NO: 80957 - DNA, 25 bp, probe
cattcagagtgttactttgtttctc

SEQ ID NO: 80958 - DNA, 25 bp, probe
ggtcctcaagggtatgaatagtgtt

SEQ ID NO: 80959 - DNA, 25 bp, probe
tatagcttccaggtattcggtgtca

SEQ ID NO: 80960 - DNA, 25 bp, probe
tacttcattcagagtgttactttgt

SEQ ID NO: 80961 - DNA, 25 bp, probe
atctcaacaaacagcaaatagcaat

SEQ ID NO: 80962 - DNA, 25 bp, probe
aatctcaacaaacagcaaatagcaa

SEQ ID NO: 80963 - DNA, 25 bp, probe
tcacagaatactaaagcacctcaaa

SEQ ID NO: 80964 - DNA, 25 bp, probe
atcacagaatactaaagcacctcaa

SEQ ID NO: 80965 - DNA, 25 bp, probe
aacagcaaatagcaatcactttacc

SEQ ID NO: 80966 - DNA, 25 bp, probe
acaaacagcaaatagcaatcacttt

SEQ ID NO: 80967 - DNA, 25 bp, probe
aacaaacagcaaatagcaatcactt

SEQ ID NO: 80968 - DNA, 25 bp, probe
taatctcaacaaacagcaaatagca

SEQ ID NO: 80969 - DNA, 25 bp, probe
tctcaacaaacagcaaatagcaatc

SEQ ID NO: 80970 - DNA, 25 bp, probe
gccagggatgttgctaaatagatta

SEQ ID NO: 80971 - DNA, 25 bp, probe
cagcaaatagcaatcactttaccag

SEQ ID NO: 80972 - DNA, 25 bp, probe
ctcaacaaacagcaaatagcaatca

SEQ ID NO: 80973 - DNA, 25 bp, probe
gtcgcaaagagaaagtgatgtaatg

SEQ ID NO: 80974 - DNA, 25 bp, probe
agtcgcaaagagaaagtgatgtaat

SEQ ID NO: 80975 - DNA, 25 bp, probe
aagtcgcaaagagaaagtgatgtaa

SEQ ID NO: 80976 - DNA, 25 bp, probe
caacaaacagcaaatagcaatcact

SEQ ID NO: 80977 - DNA, 25 bp, probe
tcaacaaacagcaaatagcaatcac

SEQ ID NO: 80978 - DNA, 25 bp, probe
aaacagcaaatagcaatcactttac

SEQ ID NO: 80979 - DNA, 25 bp, probe
caaacagcaaatagcaatcacttta

SEQ ID NO: 80980 - DNA, 25 bp, probe
acagcaaatagcaatcactttacca

SEQ ID NO: 80981 - DNA, 25 bp, probe
gaagtcgcaaagagaaagtgatgta

SEQ ID NO: 80982 - DNA, 25 bp, probe
tttggcaattcttagagacatttcc

SEQ ID NO: 80983 - DNA, 25 bp, probe
tgaactcagccatctctatatattc

SEQ ID NO: 80984 - DNA, 25 bp, probe
gcatttggcaattcttagagacatt

SEQ ID NO: 80985 - DNA, 25 bp, probe
agtcaagggtgaataatctcaacaa

SEQ ID NO: 80986 - DNA, 25 bp, probe
aagtcaagggtgaataatctcaaca

SEQ ID NO: 80987 - DNA, 25 bp, probe
ggtgaataatctcaacaaacagcaa

SEQ ID NO: 80988 - DNA, 25 bp, probe
caagggtgaataatctcaacaaaca

SEQ ID NO: 80989 - DNA, 25 bp, probe
ttcactaggcatttggcaattctta

SEQ ID NO: 80990 - DNA, 25 bp, probe
aagggtgaataatctcaacaaacag

SEQ ID NO: 80991 - DNA, 25 bp, probe
tcaagggtgaataatctcaacaaac

SEQ ID NO: 80992 - DNA, 25 bp, probe
gtcaagggtgaataatctcaacaaa

SEQ ID NO: 80993 - DNA, 25 bp, probe
ataatctcaacaaacagcaaatagc

SEQ ID NO: 80994 - DNA, 25 bp, probe
ccagggatgttgctaaatagattat

SEQ ID NO: 80995 - DNA, 25 bp, probe
taggatcacagaatactaaagcacc

SEQ ID NO: 80996 - DNA, 25 bp, probe
tgctttaagtcaagggtgaataatc

SEQ ID NO: 80997 - DNA, 25 bp, probe
ctgctttaagtcaagggtgaataat

SEQ ID NO: 80998 - DNA, 25 bp, probe
gatcacagaatactaaagcacctca

SEQ ID NO: 80999 - DNA, 25 bp, probe
actaggcatttggcaattcttagag

SEQ ID NO: 81000 - DNA, 25 bp, probe
taggcatttggcaattcttagagac

SEQ ID NO: 81001 - DNA, 25 bp, probe
gaactcagccatctctatatattct

SEQ ID NO: 81002 - DNA, 25 bp, probe
aactgaatttgaacactgagccttt

SEQ ID NO: 81003 - DNA, 25 bp, probe
aaactgaatttgaacactgagcctt

SEQ ID NO: 81004 - DNA, 25 bp, probe
gctttaagtcaagggtgaataatct

SEQ ID NO: 81005 - DNA, 25 bp, probe
ggaaggcaagttagttaagtatcac

SEQ ID NO: 81006 - DNA, 25 bp, probe
aggcaagttagttaagtatcactga

SEQ ID NO: 81007 - DNA, 25 bp, probe
aaggcaagttagttaagtatcactg

SEQ ID NO: 81008 - DNA, 25 bp, probe
gaaggcaagttagttaagtatcact

SEQ ID NO: 81009 - DNA, 25 bp, probe
ggcaagttagttaagtatcactgat

SEQ ID NO: 81010 - DNA, 25 bp, probe
tgaaatgagaagtaaaggcagatga

SEQ ID NO: 81011 - DNA, 25 bp, probe
ttgaaatgagaagtaaaggcagatg

SEQ ID NO: 81012 - DNA, 25 bp, probe
gggaaggcaagttagttaagtatca

SEQ ID NO: 81013 - DNA, 25 bp, probe
gaaatgagaagtaaaggcagatgaa

SEQ ID NO: 81014 - DNA, 25 bp, probe
gcaagttagttaagtatcactgatg

SEQ ID NO: 81015 - DNA, 25 bp, probe
aaatgagaagtaaaggcagatgaaa

SEQ ID NO: 81016 - DNA, 25 bp, probe
cttgaaatgagaagtaaaggcagat

SEQ ID NO: 81017 - DNA, 25 bp, probe
ctgtgaaaccttgaaatgagaagta

SEQ ID NO: 81018 - DNA, 25 bp, probe
tctgtgaaaccttgaaatgagaagt

SEQ ID NO: 81019 - DNA, 25 bp, probe
agttagttaagtatcactgatgtgg

SEQ ID NO: 81020 - DNA, 25 bp, probe
tgtgaaaccttgaaatgagaagtaa

SEQ ID NO: 81021 - DNA, 25 bp, probe
ctctgtgaaaccttgaaatgagaag

SEQ ID NO: 81022 - DNA, 25 bp, probe
actctgtgaaaccttgaaatgagaa

SEQ ID NO: 81023 - DNA, 25 bp, probe
taagtcatttcatgtttctgtctgg

SEQ ID NO: 81024 - DNA, 25 bp, probe
gtgaaaccttgaaatgagaagtaaa

SEQ ID NO: 81025 - DNA, 25 bp, probe
aagtcatttcatgtttctgtctggg

SEQ ID NO: 81026 - DNA, 25 bp, probe
tgaaaccttgaaatgagaagtaaag

SEQ ID NO: 81027 - DNA, 25 bp, probe
ttaagtatcactgatgtgggttgag

SEQ ID NO: 81028 - DNA, 25 bp, probe
cactctgtgaaaccttgaaatgaga

SEQ ID NO: 81029 - DNA, 25 bp, probe
gttaagtatcactgatgtgggttga

SEQ ID NO: 81030 - DNA, 25 bp, probe
agttaagtatcactgatgtgggttg

SEQ ID NO: 81031 - DNA, 25 bp, probe
tagttaagtatcactgatgtgggtt

SEQ ID NO: 81032 - DNA, 25 bp, probe
ttagttaagtatcactgatgtgggt

SEQ ID NO: 81033 - DNA, 25 bp, probe
taagtatcactgatgtgggttgaga

SEQ ID NO: 81034 - DNA, 25 bp, probe
gttagttaagtatcactgatgtggg

SEQ ID NO: 81035 - DNA, 25 bp, probe
caagttagttaagtatcactgatgt

SEQ ID NO: 81036 - DNA, 25 bp, probe
ccacaggtgatcctaacatatcagg

SEQ ID NO: 81037 - DNA, 25 bp, probe
ttaagtcatttcatgtttctgtctg

SEQ ID NO: 81038 - DNA, 25 bp, probe
aagttagttaagtatcactgatgtg

SEQ ID NO: 81039 - DNA, 25 bp, probe
tgagaagtaaaggcagatgaaaaga

SEQ ID NO: 81040 - DNA, 25 bp, probe
cacaggtgatcctaacatatcaggc

SEQ ID NO: 81041 - DNA, 25 bp, probe
aagtatcactgatgtgggttgagac

SEQ ID NO: 81042 - DNA, 25 bp, probe
gcactctgtgaaaccttgaaatgag

SEQ ID NO: 81043 - DNA, 25 bp, probe
atttctcaaaggtcttccaaaactc

SEQ ID NO: 81044 - DNA, 25 bp, probe
gatttctcaaaggtcttccaaaact

SEQ ID NO: 81045 - DNA, 25 bp, probe
gagaagtaaaggcagatgaaaagaa

SEQ ID NO: 81046 - DNA, 25 bp, probe
atgagaagtaaaggcagatgaaaag

SEQ ID NO: 81047 - DNA, 25 bp, probe
ttctcaaaggtcttccaaaactcaa

SEQ ID NO: 81048 - DNA, 25 bp, probe
tttctcaaaggtcttccaaaactca

SEQ ID NO: 81049 - DNA, 25 bp, probe
caagaccagatgtgatttgttaaaa

SEQ ID NO: 81050 - DNA, 25 bp, probe
acaagaccagatgtgatttgttaaa

SEQ ID NO: 81051 - DNA, 25 bp, probe
atcccggaagcaggagatcattaag

SEQ ID NO: 81052 - DNA, 25 bp, probe
catcccggaagcaggagatcattaa

SEQ ID NO: 81053 - DNA, 25 bp, probe
tcccggaagcaggagatcattaaga

SEQ ID NO: 81054 - DNA, 25 bp, probe
caataaatgtctgttgatgactgcc

SEQ ID NO: 81055 - DNA, 25 bp, probe
aataaatgtctgttgatgactgccg

SEQ ID NO: 81056 - DNA, 25 bp, probe
tcaataaatgtctgttgatgactgc

SEQ ID NO: 81057 - DNA, 25 bp, probe
ggagttcaataaatgtctgttgatg

SEQ ID NO: 81058 - DNA, 25 bp, probe
aggagttcaataaatgtctgttgat

SEQ ID NO: 81059 - DNA, 25 bp, probe
ttcaataaatgtctgttgatgactg

SEQ ID NO: 81060 - DNA, 25 bp, probe
gttcaataaatgtctgttgatgact

SEQ ID NO: 81061 - DNA, 25 bp, probe
agttcaataaatgtctgttgatgac

SEQ ID NO: 81062 - DNA, 25 bp, probe
gagttcaataaatgtctgttgatga

SEQ ID NO: 81063 - DNA, 25 bp, probe
catttcctgagaccaccagagagag

SEQ ID NO: 81064 - DNA, 25 bp, probe
cgccattacaccaatgcttcagatg

SEQ ID NO: 81065 - DNA, 25 bp, probe
attacaccaatgcttcagatgggct

SEQ ID NO: 81066 - DNA, 25 bp, probe
cattacaccaatgcttcagatgggc

SEQ ID NO: 81067 - DNA, 25 bp, probe
atttcctgagaccaccagagagagg

SEQ ID NO: 81068 - DNA, 25 bp, probe
gccattacaccaatgcttcagatgg

SEQ ID NO: 81069 - DNA, 25 bp, probe
ccattacaccaatgcttcagatggg

SEQ ID NO: 81070 - DNA, 25 bp, probe
aaggaacagcaatggtgtcagtatc

SEQ ID NO: 81071 - DNA, 25 bp, probe
gaaggaacagcaatggtgtcagtat

SEQ ID NO: 81072 - DNA, 25 bp, probe
atgtatttgatggtgacctgggaat

SEQ ID NO: 81073 - DNA, 25 bp, probe
gatgtatttgatggtgacctgggaa

SEQ ID NO: 81074 - DNA, 25 bp, probe
tgtatttgatggtgacctgggaatg

SEQ ID NO: 81075 - DNA, 25 bp, probe
agagactgtccctgaaacctagtac

SEQ ID NO: 81076 - DNA, 25 bp, probe
ctccgatgtatttgatggtgacctg

SEQ ID NO: 81077 - DNA, 25 bp, probe
gaacagcaatggtgtcagtatccag

SEQ ID NO: 81078 - DNA, 25 bp, probe
cagagactgtccctgaaacctagta

SEQ ID NO: 81079 - DNA, 25 bp, probe
gtatttgatggtgacctgggaatgg

SEQ ID NO: 81080 - DNA, 25 bp, probe
agatcctgggtactgaaagccttag

SEQ ID NO: 81081 - DNA, 25 bp, probe
cctaagggagtgtctaagaacaaaa

SEQ ID NO: 81082 - DNA, 25 bp, probe
taagggagtgtctaagaacaaaagc

SEQ ID NO: 81083 - DNA, 25 bp, probe
ctaagggagtgtctaagaacaaaag

SEQ ID NO: 81084 - DNA, 25 bp, probe
ggaaggaacagcaatggtgtcagta

SEQ ID NO: 81085 - DNA, 25 bp, probe
ctaagaacaaaagcgacccattcag

SEQ ID NO: 81086 - DNA, 25 bp, probe
cagatcctgggtactgaaagcctta

SEQ ID NO: 81087 - DNA, 25 bp, probe
aggaacagcaatggtgtcagtatcc

SEQ ID NO: 81088 - DNA, 25 bp, probe
atggtgtcagtatccaggctttgta

SEQ ID NO: 81089 - DNA, 25 bp, probe
taagaacaaaagcgacccattcaga

SEQ ID NO: 81090 - DNA, 25 bp, probe
tctaagaacaaaagcgacccattca

SEQ ID NO: 81091 - DNA, 25 bp, probe
tatttgatggtgacctgggaatggg

SEQ ID NO: 81092 - DNA, 25 bp, probe
ccctaagggagtgtctaagaacaaa

SEQ ID NO: 81093 - DNA, 25 bp, probe
atgaggaaggaacagcaatggtgtc

SEQ ID NO: 81094 - DNA, 25 bp, probe
cgatgtatttgatggtgacctggga

SEQ ID NO: 81095 - DNA, 25 bp, probe
tccgatgtatttgatggtgacctgg

SEQ ID NO: 81096 - DNA, 25 bp, probe
ctgggtactgaaagccttagggaag

SEQ ID NO: 81097 - DNA, 25 bp, probe
gtctaagaacaaaagcgacccattc

SEQ ID NO: 81098 - DNA, 25 bp, probe
aacagcaatggtgtcagtatccagg

SEQ ID NO: 81099 - DNA, 25 bp, probe
ggaacagcaatggtgtcagtatcca

SEQ ID NO: 81100 - DNA, 25 bp, probe
ctggctccgatgtatttgatggtga

SEQ ID NO: 81101 - DNA, 25 bp, probe
caatggtgtcagtatccaggctttg

SEQ ID NO: 81102 - DNA, 25 bp, probe
gagactgtccctgaaacctagtact

SEQ ID NO: 81103 - DNA, 25 bp, probe
gtcagtatccaggctttgtacagag

SEQ ID NO: 81104 - DNA, 25 bp, probe
gctccgatgtatttgatggtgacct

SEQ ID NO: 81105 - DNA, 25 bp, probe
agactgtccctgaaacctagtactg

SEQ ID NO: 81106 - DNA, 25 bp, probe
tggctccgatgtatttgatggtgac

SEQ ID NO: 81107 - DNA, 25 bp, probe
cagtatccaggctttgtacagagtg

SEQ ID NO: 81108 - DNA, 25 bp, probe
gatcctgggtactgaaagccttagg

SEQ ID NO: 81109 - DNA, 25 bp, probe
aatggtgtcagtatccaggctttgt

SEQ ID NO: 81110 - DNA, 25 bp, probe
tgtctaagaacaaaagcgacccatt

SEQ ID NO: 81111 - DNA, 25 bp, probe
ttctccacacccactttgtccattt

SEQ ID NO: 81112 - DNA, 25 bp, probe
tcagtatccaggctttgtacagagt

SEQ ID NO: 81113 - DNA, 25 bp, probe
aagggagtgtctaagaacaaaagcg

SEQ ID NO: 81114 - DNA, 25 bp, probe
ttcatataaactcaagtgcctgcta

SEQ ID NO: 81115 - DNA, 25 bp, probe
tcatataaactcaagtgcctgctac

SEQ ID NO: 81116 - DNA, 25 bp, probe
catataaactcaagtgcctgctaca

SEQ ID NO: 81117 - DNA, 25 bp, probe
gcacggattattacaggctctttaa

SEQ ID NO: 81118 - DNA, 25 bp, probe
acatcttcatataaactcaagtgcc

SEQ ID NO: 81119 - DNA, 25 bp, probe
cttcatataaactcaagtgcctgct

SEQ ID NO: 81120 - DNA, 25 bp, probe
tcttcatataaactcaagtgcctgc

SEQ ID NO: 81121 - DNA, 25 bp, probe
atcttcatataaactcaagtgcctg

SEQ ID NO: 81122 - DNA, 25 bp, probe
catcttcatataaactcaagtgcct

SEQ ID NO: 81123 - DNA, 25 bp, probe
cacggattattacaggctctttaat

SEQ ID NO: 81124 - DNA, 25 bp, probe
agcgaacatcttcatataaactcaa

SEQ ID NO: 81125 - DNA, 25 bp, probe
aagcgaacatcttcatataaactca

SEQ ID NO: 81126 - DNA, 25 bp, probe
gtctacagcacggattattacaggc

SEQ ID NO: 81127 - DNA, 25 bp, probe
gcgaacatcttcatataaactcaag

SEQ ID NO: 81128 - DNA, 25 bp, probe
catccttgactgaagcgaacatctt

SEQ ID NO: 81129 - DNA, 25 bp, probe
attacaggctctttaatccatctgg

SEQ ID NO: 81130 - DNA, 25 bp, probe
atataaactcaagtgcctgctacac

SEQ ID NO: 81131 - DNA, 25 bp, probe
acaactccttccatccttgactgaa

SEQ ID NO: 81132 - DNA, 25 bp, probe
aacatcttcatataaactcaagtgc

SEQ ID NO: 81133 - DNA, 25 bp, probe
tattacaggctctttaatccatctg

SEQ ID NO: 81134 - DNA, 25 bp, probe
ttattacaggctctttaatccatct

SEQ ID NO: 81135 - DNA, 25 bp, probe
cgaacatcttcatataaactcaagt

SEQ ID NO: 81136 - DNA, 25 bp, probe
taaactcaagtgcctgctacacata

SEQ ID NO: 81137 - DNA, 25 bp, probe
tataaactcaagtgcctgctacaca

SEQ ID NO: 81138 - DNA, 25 bp, probe
ctcacaactccttccatccttgact

SEQ ID NO: 81139 - DNA, 25 bp, probe
gctctttaatccatctggaaatgat

SEQ ID NO: 81140 - DNA, 25 bp, probe
ggctctttaatccatctggaaatga

SEQ ID NO: 81141 - DNA, 25 bp, probe
aggctctttaatccatctggaaatg

SEQ ID NO: 81142 - DNA, 25 bp, probe
caggctctttaatccatctggaaat

SEQ ID NO: 81143 - DNA, 25 bp, probe
cacaactccttccatccttgactga

SEQ ID NO: 81144 - DNA, 25 bp, probe
tcacaactccttccatccttgactg

SEQ ID NO: 81145 - DNA, 25 bp, probe
tacaggctctttaatccatctggaa

SEQ ID NO: 81146 - DNA, 25 bp, probe
ttacaggctctttaatccatctgga

SEQ ID NO: 81147 - DNA, 25 bp, probe
ctacagcacggattattacaggctc

SEQ ID NO: 81148 - DNA, 25 bp, probe
ataaactcaagtgcctgctacacat

SEQ ID NO: 81149 - DNA, 25 bp, probe
tgcctgctacacatacaacactgaa

SEQ ID NO: 81150 - DNA, 25 bp, probe
ctcaagtgcctgctacacatacaac

SEQ ID NO: 81151 - DNA, 25 bp, probe
gcctgctacacatacaacactgaaa

SEQ ID NO: 81152 - DNA, 25 bp, probe
attattacaggctctttaatccatc

SEQ ID NO: 81153 - DNA, 25 bp, probe
ttccatccttgactgaagcgaacat

SEQ ID NO: 81154 - DNA, 25 bp, probe
cctgctacacatacaacactgaaaa

SEQ ID NO: 81155 - DNA, 25 bp, probe
tacagcacggattattacaggctct

SEQ ID NO: 81156 - DNA, 25 bp, probe
tctacagcacggattattacaggct

SEQ ID NO: 81157 - DNA, 25 bp, probe
agcacggattattacaggctcttta

SEQ ID NO: 81158 - DNA, 25 bp, probe
cactgtaatatcagaaatggttggc

SEQ ID NO: 81159 - DNA, 25 bp, probe
gacacgtagtaattctgtgacatac

SEQ ID NO: 81160 - DNA, 25 bp, probe
acactgtaatatcagaaatggttgg

SEQ ID NO: 81161 - DNA, 25 bp, probe
acacgtagtaattctgtgacatact

SEQ ID NO: 81162 - DNA, 25 bp, probe
cacgtagtaattctgtgacatactt

SEQ ID NO: 81163 - DNA, 25 bp, probe
tacactgtaatatcagaaatggttg

SEQ ID NO: 81164 - DNA, 25 bp, probe
acacacctgtagtcccagatacttg

SEQ ID NO: 81165 - DNA, 25 bp, probe
cacacacctgtagtcccagatactt

SEQ ID NO: 81166 - DNA, 25 bp, probe
agtttgtattggactttatttcctt

SEQ ID NO: 81167 - DNA, 25 bp, probe
gcaagagaacaagatcctgtctcaa

SEQ ID NO: 81168 - DNA, 25 bp, probe
atagcaatacactgtaatatcagaa

SEQ ID NO: 81169 - DNA, 25 bp, probe
ctgtaatatcagaaatggttggcct

SEQ ID NO: 81170 - DNA, 25 bp, probe
acgtagtaattctgtgacatacttt

SEQ ID NO: 81171 - DNA, 25 bp, probe
caagagaacaagatcctgtctcaaa

SEQ ID NO: 81172 - DNA, 25 bp, probe
tgtaatatcagaaatggttggcctg

SEQ ID NO: 81173 - DNA, 25 bp, probe
actgtaatatcagaaatggttggcc

SEQ ID NO: 81174 - DNA, 25 bp, probe
gcaatacactgtaatatcagaaatg

SEQ ID NO: 81175 - DNA, 25 bp, probe
agcaatacactgtaatatcagaaat

SEQ ID NO: 81176 - DNA, 25 bp, probe
gtttgtattggactttatttccttt

SEQ ID NO: 81177 - DNA, 25 bp, probe
tagtttgtattggactttatttcct

SEQ ID NO: 81178 - DNA, 25 bp, probe
atacactgtaatatcagaaatggtt

SEQ ID NO: 81179 - DNA, 25 bp, probe
aatacactgtaatatcagaaatggt

SEQ ID NO: 81180 - DNA, 25 bp, probe
tagcacacacctgtagtcccagata

SEQ ID NO: 81181 - DNA, 25 bp, probe
caatacactgtaatatcagaaatgg

SEQ ID NO: 81182 - DNA, 25 bp, probe
tagcaatacactgtaatatcagaaa

SEQ ID NO: 81183 - DNA, 25 bp, probe
cacacctgtagtcccagatacttgg

SEQ ID NO: 81184 - DNA, 25 bp, probe
cttgagacctagcaatcagtcaggg

SEQ ID NO: 81185 - DNA, 25 bp, probe
gcttgagacctagcaatcagtcagg

SEQ ID NO: 81186 - DNA, 25 bp, probe
cgtagtaattctgtgacatactttt

SEQ ID NO: 81187 - DNA, 25 bp, probe
ttagtttgtattggactttatttcc

SEQ ID NO: 81188 - DNA, 25 bp, probe
ggcaagagaacaagatcctgtctca

SEQ ID NO: 81189 - DNA, 25 bp, probe
ctagcctgggcaagagaacaagatc

SEQ ID NO: 81190 - DNA, 25 bp, probe
aagagaacaagatcctgtctcaaaa

SEQ ID NO: 81191 - DNA, 25 bp, probe
taatatcagaaatggttggcctgag

SEQ ID NO: 81192 - DNA, 25 bp, probe
ttggactttatttcctttattcaaa

SEQ ID NO: 81193 - DNA, 25 bp, probe
gtaatatcagaaatggttggcctga

SEQ ID NO: 81194 - DNA, 25 bp, probe
tggactttatttcctttattcaaat

SEQ ID NO: 81195 - DNA, 25 bp, probe
attggactttatttcctttattcaa

SEQ ID NO: 81196 - DNA, 25 bp, probe
ctgggcaagagaacaagatcctgtc

SEQ ID NO: 81197 - DNA, 25 bp, probe
ttgaacgttgagacattctggcttt

SEQ ID NO: 81198 - DNA, 25 bp, probe
tttgaacgttgagacattctggctt

SEQ ID NO: 81199 - DNA, 25 bp, probe
aacattttgaacgttgagacattct

SEQ ID NO: 81200 - DNA, 25 bp, probe
aactaacattttgaacgttgagaca

SEQ ID NO: 81201 - DNA, 25 bp, probe
acattttgaacgttgagacattctg

SEQ ID NO: 81202 - DNA, 25 bp, probe
atttctttgttatcaaacttcagct

SEQ ID NO: 81203 - DNA, 25 bp, probe
tatttctttgttatcaaacttcagc

SEQ ID NO: 81204 - DNA, 25 bp, probe
tatccatatacttcaggtgttgctg

SEQ ID NO: 81205 - DNA, 25 bp, probe
ccatatacttcaggtgttgctgtta

SEQ ID NO: 81206 - DNA, 25 bp, probe
catatacttcaggtgttgctgttaa

SEQ ID NO: 81207 - DNA, 25 bp, probe
gtatccatatacttcaggtgttgct

SEQ ID NO: 81208 - DNA, 25 bp, probe
tgtatccatatacttcaggtgttgc

SEQ ID NO: 81209 - DNA, 25 bp, probe
actgagcatccatagatatattcct

SEQ ID NO: 81210 - DNA, 25 bp, probe
tcttgtatccatatacttcaggtgt

SEQ ID NO: 81211 - DNA, 25 bp, probe
atccatatacttcaggtgttgctgt

SEQ ID NO: 81212 - DNA, 25 bp, probe
ttgtatccatatacttcaggtgttg

SEQ ID NO: 81213 - DNA, 25 bp, probe
tccatatacttcaggtgttgctgtt

SEQ ID NO: 81214 - DNA, 25 bp, probe
taaggtttaggaatggtggatgaag

SEQ ID NO: 81215 - DNA, 25 bp, probe
tgtatggtaaggtttaggaatggtg

SEQ ID NO: 81216 - DNA, 25 bp, probe
atacttaccctgtgcctcatatttc

SEQ ID NO: 81217 - DNA, 25 bp, probe
ttgtatggtaaggtttaggaatggt

SEQ ID NO: 81218 - DNA, 25 bp, probe
ccctgtgcctcatatttcaatagta

SEQ ID NO: 81219 - DNA, 25 bp, probe
taccctgtgcctcatatttcaatag

SEQ ID NO: 81220 - DNA, 25 bp, probe
catacttaccctgtgcctcatattt

SEQ ID NO: 81221 - DNA, 25 bp, probe
gtaaggtttaggaatggtggatgaa

SEQ ID NO: 81222 - DNA, 25 bp, probe
ttaccctgtgcctcatatttcaata

SEQ ID NO: 81223 - DNA, 25 bp, probe
atggtggatgaagggtatctctata

SEQ ID NO: 81224 - DNA, 25 bp, probe
tggtggatgaagggtatctctatat

SEQ ID NO: 81225 - DNA, 25 bp, probe
aatggtggatgaagggtatctctat

SEQ ID NO: 81226 - DNA, 25 bp, probe
gtatggtaaggtttaggaatggtgg

SEQ ID NO: 81227 - DNA, 25 bp, probe
cttaccctgtgcctcatatttcaat

SEQ ID NO: 81228 - DNA, 25 bp, probe
cttgtatccatatacttcaggtgtt

SEQ ID NO: 81229 - DNA, 25 bp, probe
tatggtaaggtttaggaatggtgga

SEQ ID NO: 81230 - DNA, 25 bp, probe
agttatgtatggtttctgaagggta

SEQ ID NO: 81231 - DNA, 25 bp, probe
tttaggaatggtggatgaagggtat

SEQ ID NO: 81232 - DNA, 25 bp, probe
tcagtgaatatatctgctagaagga

SEQ ID NO: 81233 - DNA, 25 bp, probe
ttgaattgatttgaggagcagtaaa

SEQ ID NO: 81234 - DNA, 25 bp, probe
tttgaattgatttgaggagcagtaa

SEQ ID NO: 81235 - DNA, 25 bp, probe
gaatggtggatgaagggtatctcta

SEQ ID NO: 81236 - DNA, 25 bp, probe
tacttaccctgtgcctcatatttca

SEQ ID NO: 81237 - DNA, 25 bp, probe
ttcttgtatccatatacttcaggtg

SEQ ID NO: 81238 - DNA, 25 bp, probe
tttgtatggtaaggtttaggaatgg

SEQ ID NO: 81239 - DNA, 25 bp, probe
ataaataaagtgctcaacaatgtgc

SEQ ID NO: 81240 - DNA, 25 bp, probe
atggtaaggtttaggaatggtggat

SEQ ID NO: 81241 - DNA, 25 bp, probe
ctcagtgaatatatctgctagaagg

SEQ ID NO: 81242 - DNA, 25 bp, probe
gttatgtatggtttctgaagggtaa

SEQ ID NO: 81243 - DNA, 25 bp, probe
ttaggaatggtggatgaagggtatc

SEQ ID NO: 81244 - DNA, 25 bp, probe
cctgtgcctcatatttcaatagtac

SEQ ID NO: 81245 - DNA, 25 bp, probe
accctgtgcctcatatttcaatagt

SEQ ID NO: 81246 - DNA, 25 bp, probe
atgtatggtttctgaagggtaattt

SEQ ID NO: 81247 - DNA, 25 bp, probe
cagtgaatatatctgctagaaggaa

SEQ ID NO: 81248 - DNA, 25 bp, probe
gtgacagagagagaccatatccaaa

SEQ ID NO: 81249 - DNA, 25 bp, probe
ctaacaggaaggtgtccagttcaag

SEQ ID NO: 81250 - DNA, 25 bp, probe
ggtgacagagagagaccatatccaa

SEQ ID NO: 81251 - DNA, 25 bp, probe
taacaggaaggtgtccagttcaaga

SEQ ID NO: 81252 - DNA, 25 bp, probe
tttacctgatgcttggcttctttta

SEQ ID NO: 81253 - DNA, 25 bp, probe
tgacagagagagaccatatccaaaa

SEQ ID NO: 81254 - DNA, 25 bp, probe
ttacctgatgcttggcttcttttag

SEQ ID NO: 81255 - DNA, 25 bp, probe
aacttctggtttacctgatgcttgg

SEQ ID NO: 81256 - DNA, 25 bp, probe
aaacttctggtttacctgatgcttg

SEQ ID NO: 81257 - DNA, 25 bp, probe
caggaaggtgtccagttcaagagaa

SEQ ID NO: 81258 - DNA, 25 bp, probe
cctaacaggaaggtgtccagttcaa

SEQ ID NO: 81259 - DNA, 25 bp, probe
ggtttacctgatgcttggcttcttt

SEQ ID NO: 81260 - DNA, 25 bp, probe
catctcatttcctttagcccgtgtg

SEQ ID NO: 81261 - DNA, 25 bp, probe
gtttacctgatgcttggcttctttt

SEQ ID NO: 81262 - DNA, 25 bp, probe
aacaggaaggtgtccagttcaagag

SEQ ID NO: 81263 - DNA, 25 bp, probe
ctgggtgacagagagagaccatatc

SEQ ID NO: 81264 - DNA, 25 bp, probe
taaacttctggtttacctgatgctt

SEQ ID NO: 81265 - DNA, 25 bp, probe
ttaaacttctggtttacctgatgct

SEQ ID NO: 81266 - DNA, 25 bp, probe
attaaacttctggtttacctgatgc

SEQ ID NO: 81267 - DNA, 25 bp, probe
aattgcttgaactcaggagttggag

SEQ ID NO: 81268 - DNA, 25 bp, probe
gaattgcttgaactcaggagttgga

SEQ ID NO: 81269 - DNA, 25 bp, probe
agaatctcagaaggtcctcctgaac

SEQ ID NO: 81270 - DNA, 25 bp, probe
cagaatctcagaaggtcctcctgaa

SEQ ID NO: 81271 - DNA, 25 bp, probe
tggtttacctgatgcttggcttctt

SEQ ID NO: 81272 - DNA, 25 bp, probe
ttctggtttacctgatgcttggctt

SEQ ID NO: 81273 - DNA, 25 bp, probe
acaggaaggtgtccagttcaagaga

SEQ ID NO: 81274 - DNA, 25 bp, probe
ccatctcatttcctttagcccgtgt

SEQ ID NO: 81275 - DNA, 25 bp, probe
tacctgatgcttggcttcttttagg

SEQ ID NO: 81276 - DNA, 25 bp, probe
attgcttgaactcaggagttggaga

SEQ ID NO: 81277 - DNA, 25 bp, probe
aaaattagccaggtgtaggggtagg

SEQ ID NO: 81278 - DNA, 25 bp, probe
ctggtttacctgatgcttggcttct

SEQ ID NO: 81279 - DNA, 25 bp, probe
tctggtttacctgatgcttggcttc

SEQ ID NO: 81280 - DNA, 25 bp, probe
cttctggtttacctgatgcttggct

SEQ ID NO: 81281 - DNA, 25 bp, probe
aggaaggtgtccagttcaagagaac

SEQ ID NO: 81282 - DNA, 25 bp, probe
gatgcttggcttcttttagggctac

SEQ ID NO: 81283 - DNA, 25 bp, probe
ggaattgcttgaactcaggagttgg

SEQ ID NO: 81284 - DNA, 25 bp, probe
gaatctcagaaggtcctcctgaacc

SEQ ID NO: 81285 - DNA, 25 bp, probe
gggtgacagagagagaccatatcca

SEQ ID NO: 81286 - DNA, 25 bp, probe
tgggtgacagagagagaccatatcc

SEQ ID NO: 81287 - DNA, 25 bp, probe
tgatgcttggcttcttttagggcta

SEQ ID NO: 81288 - DNA, 25 bp, probe
cttgaactcaggagttggagaccag

SEQ ID NO: 81289 - DNA, 25 bp, probe
tattaaacttctggtttacctgatg

SEQ ID NO: 81290 - DNA, 25 bp, probe
ttgcttgaactcaggagttggagac

SEQ ID NO: 81291 - DNA, 25 bp, probe
tctgggtgacagagagagaccatat

SEQ ID NO: 81292 - DNA, 25 bp, probe
cagttatcaagaatgggtcaggaga

SEQ ID NO: 81293 - DNA, 25 bp, probe
acagttatcaagaatgggtcaggag

SEQ ID NO: 81294 - DNA, 25 bp, probe
cacagttatcaagaatgggtcagga

SEQ ID NO: 81295 - DNA, 25 bp, probe
agttatcaagaatgggtcaggagac

SEQ ID NO: 81296 - DNA, 25 bp, probe
catttaattggcagcacaagatcct

SEQ ID NO: 81297 - DNA, 25 bp, probe
cctctgccacagttatcaagaatgg

SEQ ID NO: 81298 - DNA, 25 bp, probe
atttaattggcagcacaagatcctg

SEQ ID NO: 81299 - DNA, 25 bp, probe
gagaaaccatgcacatagaatacgg

SEQ ID NO: 81300 - DNA, 25 bp, probe
ggagaaaccatgcacatagaatacg

SEQ ID NO: 81301 - DNA, 25 bp, probe
acatagaatacggcacagtctggtc

SEQ ID NO: 81302 - DNA, 25 bp, probe
cacatagaatacggcacagtctggt

SEQ ID NO: 81303 - DNA, 25 bp, probe
tggagaaaccatgcacatagaatac

SEQ ID NO: 81304 - DNA, 25 bp, probe
ccctctgccacagttatcaagaatg

SEQ ID NO: 81305 - DNA, 25 bp, probe
ctttccctctgccacagttatcaag

SEQ ID NO: 81306 - DNA, 25 bp, probe
gcatttaattggcagcacaagatcc

SEQ ID NO: 81307 - DNA, 25 bp, probe
ccacagttatcaagaatgggtcagg

SEQ ID NO: 81308 - DNA, 25 bp, probe
tccctctgccacagttatcaagaat

SEQ ID NO: 81309 - DNA, 25 bp, probe
catagaatacggcacagtctggtcc

SEQ ID NO: 81310 - DNA, 25 bp, probe
gcaagaggaattgatcagtatcact

SEQ ID NO: 81311 - DNA, 25 bp, probe
atagaatacggcacagtctggtcct

SEQ ID NO: 81312 - DNA, 25 bp, probe
ttccctctgccacagttatcaagaa

SEQ ID NO: 81313 - DNA, 25 bp, probe
tttccctctgccacagttatcaaga

SEQ ID NO: 81314 - DNA, 25 bp, probe
tctttccctctgccacagttatcaa

SEQ ID NO: 81315 - DNA, 25 bp, probe
tgcaagaggaattgatcagtatcac

SEQ ID NO: 81316 - DNA, 25 bp, probe
ctctgccacagttatcaagaatggg

SEQ ID NO: 81317 - DNA, 25 bp, probe
tagaatacggcacagtctggtcctt

SEQ ID NO: 81318 - DNA, 25 bp, probe
caagaggaattgatcagtatcactt

SEQ ID NO: 81319 - DNA, 25 bp, probe
agaaaccatgcacatagaatacggc

SEQ ID NO: 81320 - DNA, 25 bp, probe
gccacagttatcaagaatgggtcag

SEQ ID NO: 81321 - DNA, 25 bp, probe
ctgccacagttatcaagaatgggtc

SEQ ID NO: 81322 - DNA, 25 bp, probe
ctctttccctctgccacagttatca

SEQ ID NO: 81323 - DNA, 25 bp, probe
ctagaccttcaatggagaaaccatg

SEQ ID NO: 81324 - DNA, 25 bp, probe
tctgccacagttatcaagaatgggt

SEQ ID NO: 81325 - DNA, 25 bp, probe
ttgcaagaggaattgatcagtatca

SEQ ID NO: 81326 - DNA, 25 bp, probe
tttgcaagaggaattgatcagtatc

SEQ ID NO: 81327 - DNA, 25 bp, probe
gatttgcaagaggaattgatcagta

SEQ ID NO: 81328 - DNA, 25 bp, probe
tgccacagttatcaagaatgggtca

SEQ ID NO: 81329 - DNA, 25 bp, probe
atggagaaaccatgcacatagaata

SEQ ID NO: 81330 - DNA, 25 bp, probe
atttgcaagaggaattgatcagtat

SEQ ID NO: 81331 - DNA, 25 bp, probe
aatggagaaaccatgcacatagaat

SEQ ID NO: 81332 - DNA, 25 bp, probe
cctctttccctctgccacagttatc

SEQ ID NO: 81333 - DNA, 25 bp, probe
tgcatttaattggcagcacaagatc

SEQ ID NO: 81334 - DNA, 25 bp, probe
catgcacatagaatacggcacagtc

SEQ ID NO: 81335 - DNA, 25 bp, probe
caatggagaaaccatgcacatagaa

SEQ ID NO: 81336 - DNA, 25 bp, probe
gattggaagaatggttcgttaagtt

SEQ ID NO: 81337 - DNA, 25 bp, probe
agattggaagaatggttcgttaagt

SEQ ID NO: 81338 - DNA, 25 bp, probe
aagattggaagaatggttcgttaag

SEQ ID NO: 81339 - DNA, 25 bp, probe
atgactctgtgatacttagaccaag

SEQ ID NO: 81340 - DNA, 25 bp, probe
gatgactctgtgatacttagaccaa

SEQ ID NO: 81341 - DNA, 25 bp, probe
ttgatgactctgtgatacttagacc

SEQ ID NO: 81342 - DNA, 25 bp, probe
tgatgactctgtgatacttagacca

SEQ ID NO: 81343 - DNA, 25 bp, probe
ctgtgatacttagaccaagcaagag

SEQ ID NO: 81344 - DNA, 25 bp, probe
actctagtgctcttggtgtatattc

SEQ ID NO: 81345 - DNA, 25 bp, probe
gactctagtgctcttggtgtatatt

SEQ ID NO: 81346 - DNA, 25 bp, probe
tgactctagtgctcttggtgtatat

SEQ ID NO: 81347 - DNA, 25 bp, probe
atgactctagtgctcttggtgtata

SEQ ID NO: 81348 - DNA, 25 bp, probe
cctaagattggaagaatggttcgtt

SEQ ID NO: 81349 - DNA, 25 bp, probe
ctctagtgctcttggtgtatattct

SEQ ID NO: 81350 - DNA, 25 bp, probe
ctaagattggaagaatggttcgtta

SEQ ID NO: 81351 - DNA, 25 bp, probe
ctctgtgatacttagaccaagcaag

SEQ ID NO: 81352 - DNA, 25 bp, probe
gatacttagaccaagcaagagtgta

SEQ ID NO: 81353 - DNA, 25 bp, probe
atacttagaccaagcaagagtgtaa

SEQ ID NO: 81354 - DNA, 25 bp, probe
tctagtgctcttggtgtatattctt

SEQ ID NO: 81355 - DNA, 25 bp, probe
tctgtgatacttagaccaagcaaga

SEQ ID NO: 81356 - DNA, 25 bp, probe
actctgtgatacttagaccaagcaa

SEQ ID NO: 81357 - DNA, 25 bp, probe
taagattggaagaatggttcgttaa

SEQ ID NO: 81358 - DNA, 25 bp, probe
aactgctccaaggatagatgatgaa

SEQ ID NO: 81359 - DNA, 25 bp, probe
gtgatacttagaccaagcaagagtg

SEQ ID NO: 81360 - DNA, 25 bp, probe
tgatacttagaccaagcaagagtgt

SEQ ID NO: 81361 - DNA, 25 bp, probe
tgtgatacttagaccaagcaagagt

SEQ ID NO: 81362 - DNA, 25 bp, probe
gactctgtgatacttagaccaagca

SEQ ID NO: 81363 - DNA, 25 bp, probe
tgactctgtgatacttagaccaagc

SEQ ID NO: 81364 - DNA, 25 bp, probe
tagtgctcttggtgtatattcttac

SEQ ID NO: 81365 - DNA, 25 bp, probe
caactgctccaaggatagatgatga

SEQ ID NO: 81366 - DNA, 25 bp, probe
ttacctgagaagcaagatggaactg

SEQ ID NO: 81367 - DNA, 25 bp, probe
catgactctagtgctcttggtgtat

SEQ ID NO: 81368 - DNA, 25 bp, probe
ctagtgctcttggtgtatattctta

SEQ ID NO: 81369 - DNA, 25 bp, probe
aaatgttcccaaatccttatcctca

SEQ ID NO: 81370 - DNA, 25 bp, probe
caaatgttcccaaatccttatcctc

SEQ ID NO: 81371 - DNA, 25 bp, probe
tcctctacatccctcttctcttatt

SEQ ID NO: 81372 - DNA, 25 bp, probe
catcctctacatccctcttctctta

SEQ ID NO: 81373 - DNA, 25 bp, probe
caccaaatgttcccaaatccttatc

SEQ ID NO: 81374 - DNA, 25 bp, probe
aatgttcccaaatccttatcctcag

SEQ ID NO: 81375 - DNA, 25 bp, probe
atcctctacatccctcttctcttat

SEQ ID NO: 81376 - DNA, 25 bp, probe
tcaccaaatgttcccaaatccttat

SEQ ID NO: 81377 - DNA, 25 bp, probe
tcattgatttatttctggctttccc

SEQ ID NO: 81378 - DNA, 25 bp, probe
gatttacctgagaagcaagatggaa

SEQ ID NO: 81379 - DNA, 25 bp, probe
aattctcaccaaatgttcccaaatc

SEQ ID NO: 81380 - DNA, 25 bp, probe
gtaatggtagtcttccttctgatgt

SEQ ID NO: 81381 - DNA, 25 bp, probe
cgtaatggtagtcttccttctgatg

SEQ ID NO: 81382 - DNA, 25 bp, probe
ccgtaatggtagtcttccttctgat

SEQ ID NO: 81383 - DNA, 25 bp, probe
ttgccgtaatggtagtcttccttct

SEQ ID NO: 81384 - DNA, 25 bp, probe
gccgtaatggtagtcttccttctga

SEQ ID NO: 81385 - DNA, 25 bp, probe
tttgccgtaatggtagtcttccttc

SEQ ID NO: 81386 - DNA, 25 bp, probe
tgccgtaatggtagtcttccttctg

SEQ ID NO: 81387 - DNA, 25 bp, probe
actttgcctgaattcgtggtttata

SEQ ID NO: 81388 - DNA, 25 bp, probe
tttgcctgaattcgtggtttataaa

SEQ ID NO: 81389 - DNA, 25 bp, probe
ttttgccgtaatggtagtcttcctt

SEQ ID NO: 81390 - DNA, 25 bp, probe
cactttgcctgaattcgtggtttat

SEQ ID NO: 81391 - DNA, 25 bp, probe
tttgtgatcggtgtcctggacaatc

SEQ ID NO: 81392 - DNA, 25 bp, probe
taactatgctgtgtctactaactgg

SEQ ID NO: 81393 - DNA, 25 bp, probe
gttatgatgactgccattatctctt

SEQ ID NO: 81394 - DNA, 25 bp, probe
agttatgatgactgccattatctct

SEQ ID NO: 81395 - DNA, 25 bp, probe
aagttatgatgactgccattatctc

SEQ ID NO: 81396 - DNA, 25 bp, probe
ataactatgctgtgtctactaactg

SEQ ID NO: 81397 - DNA, 25 bp, probe
cttacttctcactacgaaccagtca

SEQ ID NO: 81398 - DNA, 25 bp, probe
ttacttctcactacgaaccagtcac

SEQ ID NO: 81399 - DNA, 25 bp, probe
aataactatgctgtgtctactaact

SEQ ID NO: 81400 - DNA, 25 bp, probe
gccattatctctttctttgtgtgtt

SEQ ID NO: 81401 - DNA, 25 bp, probe
gactgccattatctctttctttgtg

SEQ ID NO: 81402 - DNA, 25 bp, probe
ctttcttctgcctttcttcatcatc

SEQ ID NO: 81403 - DNA, 25 bp, probe
cttctcactacgaaccagtcactac

SEQ ID NO: 81404 - DNA, 25 bp, probe
ctgccattatctctttctttgtgtg

SEQ ID NO: 81405 - DNA, 25 bp, probe
tgactgccattatctctttctttgt

SEQ ID NO: 81406 - DNA, 25 bp, probe
tctgcctttcttcatcatcatcttt

SEQ ID NO: 81407 - DNA, 25 bp, probe
ttctgcctttcttcatcatcatctt

SEQ ID NO: 81408 - DNA, 25 bp, probe
ttcttctgcctttcttcatcatcat

SEQ ID NO: 81409 - DNA, 25 bp, probe
actgccattatctctttctttgtgt

SEQ ID NO: 81410 - DNA, 25 bp, probe
tttcttctgcctttcttcatcatca

SEQ ID NO: 81411 - DNA, 25 bp, probe
cacaaacctaaactcagaagcctaa

SEQ ID NO: 81412 - DNA, 25 bp, probe
tatctctttctttgtgtgttggatg

SEQ ID NO: 81413 - DNA, 25 bp, probe
tgccattatctctttctttgtgtgt

SEQ ID NO: 81414 - DNA, 25 bp, probe
cttctgcctttcttcatcatcatct

SEQ ID NO: 81415 - DNA, 25 bp, probe
tcttctgcctttcttcatcatcatc

SEQ ID NO: 81416 - DNA, 25 bp, probe
tgatgactgccattatctctttctt

SEQ ID NO: 81417 - DNA, 25 bp, probe
atgatgactgccattatctctttct

SEQ ID NO: 81418 - DNA, 25 bp, probe
tctcactacgaaccagtcactactt

SEQ ID NO: 81419 - DNA, 25 bp, probe
ttctcactacgaaccagtcactact

SEQ ID NO: 81420 - DNA, 25 bp, probe
acttctcactacgaaccagtcacta

SEQ ID NO: 81421 - DNA, 25 bp, probe
tacttctcactacgaaccagtcact

SEQ ID NO: 81422 - DNA, 25 bp, probe
atgactgccattatctctttctttg

SEQ ID NO: 81423 - DNA, 25 bp, probe
tatgctgtgtctactaactgggaaa

SEQ ID NO: 81424 - DNA, 25 bp, probe
cattatctctttctttgtgtgttgg

SEQ ID NO: 81425 - DNA, 25 bp, probe
ccattatctctttctttgtgtgttg

SEQ ID NO: 81426 - DNA, 25 bp, probe
gatgactgccattatctctttcttt

SEQ ID NO: 81427 - DNA, 25 bp, probe
taccatatacaccagggcttacttc

SEQ ID NO: 81428 - DNA, 25 bp, probe
ctaccatatacaccagggcttactt

SEQ ID NO: 81429 - DNA, 25 bp, probe
attatctctttctttgtgtgttgga

SEQ ID NO: 81430 - DNA, 25 bp, probe
actttgatacttacagtgctaacca

SEQ ID NO: 81431 - DNA, 25 bp, probe
agttgactttgatacttacagtgct

SEQ ID NO: 81432 - DNA, 25 bp, probe
gagttgactttgatacttacagtgc

SEQ ID NO: 81433 - DNA, 25 bp, probe
ctatgctgtgtctactaactgggaa

SEQ ID NO: 81434 - DNA, 25 bp, probe
ttatctctttctttgtgtgttggat

SEQ ID NO: 81435 - DNA, 25 bp, probe
cttcaaagttatgatgactgccatt

SEQ ID NO: 81436 - DNA, 25 bp, probe
ttctctactgtgttcctaactccaa

SEQ ID NO: 81437 - DNA, 25 bp, probe
cttggttgtggaagacagaatcatc

SEQ ID NO: 81438 - DNA, 25 bp, probe
ttggttgtggaagacagaatcatct

SEQ ID NO: 81439 - DNA, 25 bp, probe
cttctttgcctgtatatttgtggtg

SEQ ID NO: 81440 - DNA, 25 bp, probe
tcttctttgcctgtatatttgtggt

SEQ ID NO: 81441 - DNA, 25 bp, probe
ttcttctttgcctgtatatttgtgg

SEQ ID NO: 81442 - DNA, 25 bp, probe
ttctttgcctgtatatttgtggtga

SEQ ID NO: 81443 - DNA, 25 bp, probe
ttgtggaagacagaatcatctcctt

SEQ ID NO: 81444 - DNA, 25 bp, probe
tcattctcacttcctatgctttcat

SEQ ID NO: 81445 - DNA, 25 bp, probe
atcattctcacttcctatgctttca

SEQ ID NO: 81446 - DNA, 25 bp, probe
acttggttgtggaagacagaatcat

SEQ ID NO: 81447 - DNA, 25 bp, probe
aagacagaatcatctccttcacagg

SEQ ID NO: 81448 - DNA, 25 bp, probe
cattctcacttcctatgctttcatt

SEQ ID NO: 81449 - DNA, 25 bp, probe
tctttgcctgtatatttgtggtgac

SEQ ID NO: 81450 - DNA, 25 bp, probe
tctctactgtgttcctaactccaaa

SEQ ID NO: 81451 - DNA, 25 bp, probe
tttctctactgtgttcctaactcca

SEQ ID NO: 81452 - DNA, 25 bp, probe
tggttgtggaagacagaatcatctc

SEQ ID NO: 81453 - DNA, 25 bp, probe
aacttggttgtggaagacagaatca

SEQ ID NO: 81454 - DNA, 25 bp, probe
attctcacttcctatgctttcattt

SEQ ID NO: 81455 - DNA, 25 bp, probe
gttgtggaagacagaatcatctcct

SEQ ID NO: 81456 - DNA, 25 bp, probe
aacattcaatgaaataagcagcctg

SEQ ID NO: 81457 - DNA, 25 bp, probe
caacattcaatgaaataagcagcct

SEQ ID NO: 81458 - DNA, 25 bp, probe
tatttgtggtgacagaaacattcat

SEQ ID NO: 81459 - DNA, 25 bp, probe
atatttgtggtgacagaaacattca

SEQ ID NO: 81460 - DNA, 25 bp, probe
attcttctttgcctgtatatttgtg

SEQ ID NO: 81461 - DNA, 25 bp, probe
attaataactttgtctgtgagcacg

SEQ ID NO: 81462 - DNA, 25 bp, probe
tgtatatttgtggtgacagaaacat

SEQ ID NO: 81463 - DNA, 25 bp, probe
ttaataactttgtctgtgagcacgc

SEQ ID NO: 81464 - DNA, 25 bp, probe
ctttgcctgtatatttgtggtgaca

SEQ ID NO: 81465 - DNA, 25 bp, probe
acatacacatactttctgttgactt

SEQ ID NO: 81466 - DNA, 25 bp, probe
cattaataactttgtctgtgagcac

SEQ ID NO: 81467 - DNA, 25 bp, probe
ttgttagtggctgcatcatactctt

SEQ ID NO: 81468 - DNA, 25 bp, probe
atttgtggtgacagaaacattcatg

SEQ ID NO: 81469 - DNA, 25 bp, probe
gaagacagaatcatctccttcacag

SEQ ID NO: 81470 - DNA, 25 bp, probe
gcaacattcaatgaaataagcagcc

SEQ ID NO: 81471 - DNA, 25 bp, probe
cattcaatgaaataagcagcctggt

SEQ ID NO: 81472 - DNA, 25 bp, probe
acattcaatgaaataagcagcctgg

SEQ ID NO: 81473 - DNA, 25 bp, probe
ctcttggagtttagtttgttcctta

SEQ ID NO: 81474 - DNA, 25 bp, probe
ggttgtggaagacagaatcatctcc

SEQ ID NO: 81475 - DNA, 25 bp, probe
tcattaataactttgtctgtgagca

SEQ ID NO: 81476 - DNA, 25 bp, probe
cttgttagtggctgcatcatactct

SEQ ID NO: 81477 - DNA, 25 bp, probe
tatgacagatttgtggcagtgtgta

SEQ ID NO: 81478 - DNA, 25 bp, probe
gtatatttgtggtgacagaaacatt

SEQ ID NO: 81479 - DNA, 25 bp, probe
aattcttctttgcctgtatatttgt

SEQ ID NO: 81480 - DNA, 25 bp, probe
attggtccattctcacactgctata

SEQ ID NO: 81481 - DNA, 25 bp, probe
tattggtccattctcacactgctat

SEQ ID NO: 81482 - DNA, 25 bp, probe
ttggtccattctcacactgctataa

SEQ ID NO: 81483 - DNA, 25 bp, probe
gtattggtccattctcacactgcta

SEQ ID NO: 81484 - DNA, 25 bp, probe
cttacaatcatggcagaaggtgaag

SEQ ID NO: 81485 - DNA, 25 bp, probe
gtccattctcacactgctataaaga

SEQ ID NO: 81486 - DNA, 25 bp, probe
ggtccattctcacactgctataaag

SEQ ID NO: 81487 - DNA, 25 bp, probe
acttacaatcatggcagaaggtgaa

SEQ ID NO: 81488 - DNA, 25 bp, probe
aacttacaatcatggcagaaggtga

SEQ ID NO: 81489 - DNA, 25 bp, probe
agtccttaaagttgttctcccaaga

SEQ ID NO: 81490 - DNA, 25 bp, probe
tggtccattctcacactgctataaa

SEQ ID NO: 81491 - DNA, 25 bp, probe
gtccttaaagttgttctcccaagag

SEQ ID NO: 81492 - DNA, 25 bp, probe
gagtccttaaagttgttctcccaag

SEQ ID NO: 81493 - DNA, 25 bp, probe
aagaggattaattggctgacagttt

SEQ ID NO: 81494 - DNA, 25 bp, probe
aaagaggattaattggctgacagtt

SEQ ID NO: 81495 - DNA, 25 bp, probe
catagggagtccttaaagttgttct

SEQ ID NO: 81496 - DNA, 25 bp, probe
atagggagtccttaaagttgttctc

SEQ ID NO: 81497 - DNA, 25 bp, probe
caggaaacttacaatcatggcagaa

SEQ ID NO: 81498 - DNA, 25 bp, probe
aggaaacttacaatcatggcagaag

SEQ ID NO: 81499 - DNA, 25 bp, probe
cctgtattggtccattctcacactg

SEQ ID NO: 81500 - DNA, 25 bp, probe
ttacaatcatggcagaaggtgaagg

SEQ ID NO: 81501 - DNA, 25 bp, probe
gaaacttacaatcatggcagaaggt

SEQ ID NO: 81502 - DNA, 25 bp, probe
gaggattaattggctgacagtttga

SEQ ID NO: 81503 - DNA, 25 bp, probe
agaggattaattggctgacagtttg

SEQ ID NO: 81504 - DNA, 25 bp, probe
gcatagggagtccttaaagttgttc

SEQ ID NO: 81505 - DNA, 25 bp, probe
aaacttacaatcatggcagaaggtg

SEQ ID NO: 81506 - DNA, 25 bp, probe
ctcaggaaacttacaatcatggcag

SEQ ID NO: 81507 - DNA, 25 bp, probe
aggattaattggctgacagtttgac

SEQ ID NO: 81508 - DNA, 25 bp, probe
ggattaattggctgacagtttgaca

SEQ ID NO: 81509 - DNA, 25 bp, probe
aaagaaatatctgagactgggtaat

SEQ ID NO: 81510 - DNA, 25 bp, probe
tcaggaaacttacaatcatggcaga

SEQ ID NO: 81511 - DNA, 25 bp, probe
ggaaacttacaatcatggcagaagg

SEQ ID NO: 81512 - DNA, 25 bp, probe
aagaaatatctgagactgggtaatt

SEQ ID NO: 81513 - DNA, 25 bp, probe
gattaattggctgacagtttgacag

SEQ ID NO: 81514 - DNA, 25 bp, probe
ctgtattggtccattctcacactgc

SEQ ID NO: 81515 - DNA, 25 bp, probe
cttaaagttgttctcccaagagctt

SEQ ID NO: 81516 - DNA, 25 bp, probe
tccttaaagttgttctcccaagagc

SEQ ID NO: 81517 - DNA, 25 bp, probe
gaagaggcatagggagtccttaaag

SEQ ID NO: 81518 - DNA, 25 bp, probe
ttgttggatgagatggaaggtggag

SEQ ID NO: 81519 - DNA, 25 bp, probe
tccattctcacactgctataaagaa

SEQ ID NO: 81520 - DNA, 25 bp, probe
agaaatatctgagactgggtaattt

SEQ ID NO: 81521 - DNA, 25 bp, probe
taaagaaatatctgagactgggtaa

SEQ ID NO: 81522 - DNA, 25 bp, probe
gctataaagaaatatctgagactgg

SEQ ID NO: 81523 - DNA, 25 bp, probe
ccattctcacactgctataaagaaa

SEQ ID NO: 81524 - DNA, 25 bp, probe
gtctacagcacggattattacaggg

SEQ ID NO: 81525 - DNA, 25 bp, probe
tctacagcacggattattacagggt

SEQ ID NO: 81526 - DNA, 25 bp, probe
ctacagcacggattattacagggtg

SEQ ID NO: 81527 - DNA, 25 bp, probe
gattattacagggtgggaggacaca

SEQ ID NO: 81528 - DNA, 25 bp, probe
attattacagggtgggaggacacac

SEQ ID NO: 81529 - DNA, 25 bp, probe
ggattattacagggtgggaggacac

SEQ ID NO: 81530 - DNA, 25 bp, probe
tacagcacggattattacagggtgg

SEQ ID NO: 81531 - DNA, 25 bp, probe
tgattgtcacataaggtacttgaag

SEQ ID NO: 81532 - DNA, 25 bp, probe
gattgtcacataaggtacttgaaga

SEQ ID NO: 81533 - DNA, 25 bp, probe
tcaattaatgctgaacatgaagagt

SEQ ID NO: 81534 - DNA, 25 bp, probe
ctgggttaggagaagtaatgaatgt

SEQ ID NO: 81535 - DNA, 25 bp, probe
gtatctactgcatccttcaactctc

SEQ ID NO: 81536 - DNA, 25 bp, probe
ttgtcacataaggtacttgaagatt

SEQ ID NO: 81537 - DNA, 25 bp, probe
tatctactgcatccttcaactctca

SEQ ID NO: 81538 - DNA, 25 bp, probe
atacaatgcagtgaacataaccaac

SEQ ID NO: 81539 - DNA, 25 bp, probe
catacaatgcagtgaacataaccaa

SEQ ID NO: 81540 - DNA, 25 bp, probe
atgtatctactgcatccttcaactc

SEQ ID NO: 81541 - DNA, 25 bp, probe
catgtatctactgcatccttcaact

SEQ ID NO: 81542 - DNA, 25 bp, probe
tgtatctactgcatccttcaactct

SEQ ID NO: 81543 - DNA, 25 bp, probe
attgtcacataaggtacttgaagat

SEQ ID NO: 81544 - DNA, 25 bp, probe
tgggttaggagaagtaatgaatgta

SEQ ID NO: 81545 - DNA, 25 bp, probe
tctgggttaggagaagtaatgaatg

SEQ ID NO: 81546 - DNA, 25 bp, probe
ttaaattgtgtttcagcaggatgta

SEQ ID NO: 81547 - DNA, 25 bp, probe
tttatcgttcaaactgtccactctg

SEQ ID NO: 81548 - DNA, 25 bp, probe
tgcttcaagataaagtgtatttggg

SEQ ID NO: 81549 - DNA, 25 bp, probe
tcatacaatgcagtgaacataacca

SEQ ID NO: 81550 - DNA, 25 bp, probe
tcccagtatgatattgtgatgtttc

SEQ ID NO: 81551 - DNA, 25 bp, probe
cttcccagtatgatattgtgatgtt

SEQ ID NO: 81552 - DNA, 25 bp, probe
aatgtccaaattgtaatgttgcctt

SEQ ID NO: 81553 - DNA, 25 bp, probe
gcttcaagataaagtgtatttggga

SEQ ID NO: 81554 - DNA, 25 bp, probe
tactgcatccttcaactctcactag

SEQ ID NO: 81555 - DNA, 25 bp, probe
ctactgcatccttcaactctcacta

SEQ ID NO: 81556 - DNA, 25 bp, probe
tacaatgcagtgaacataaccaact

SEQ ID NO: 81557 - DNA, 25 bp, probe
acttcccagtatgatattgtgatgt

SEQ ID NO: 81558 - DNA, 25 bp, probe
ggttaggagaagtaatgaatgtatc

SEQ ID NO: 81559 - DNA, 25 bp, probe
aaattgtaatgttgccttgcttcaa

SEQ ID NO: 81560 - DNA, 25 bp, probe
taatgtccaaattgtaatgttgcct

SEQ ID NO: 81561 - DNA, 25 bp, probe
atgtccaaattgtaatgttgccttg

SEQ ID NO: 81562 - DNA, 25 bp, probe
caattaatgctgaacatgaagagta

SEQ ID NO: 81563 - DNA, 25 bp, probe
caatgcagtgaacataaccaacttg

SEQ ID NO: 81564 - DNA, 25 bp, probe
ttcccagtatgatattgtgatgttt

SEQ ID NO: 81565 - DNA, 25 bp, probe
cccagtatgatattgtgatgtttca

SEQ ID NO: 81566 - DNA, 25 bp, probe
ctttgacatctcactgttggaaatt

SEQ ID NO: 81567 - DNA, 25 bp, probe
caaattgtaatgttgccttgcttca

SEQ ID NO: 81568 - DNA, 25 bp, probe
taatttgctttgacatctcactgtt

SEQ ID NO: 81569 - DNA, 25 bp, probe
tcatcatctggtcctttgtgaaatg

SEQ ID NO: 81570 - DNA, 25 bp, probe
gtcatcatctggtcctttgtgaaat

SEQ ID NO: 81571 - DNA, 25 bp, probe
aatttgctttgacatctcactgttg

SEQ ID NO: 81572 - DNA, 25 bp, probe
ataatgtccaaattgtaatgttgcc

SEQ ID NO: 81573 - DNA, 25 bp, probe
acaatgcagtgaacataaccaactt

SEQ ID NO: 81574 - DNA, 25 bp, probe
ataatttgctttgacatctcactgt

SEQ ID NO: 81575 - DNA, 25 bp, probe
aatatctatgcttctctcactgtgc

SEQ ID NO: 81576 - DNA, 25 bp, probe
aactattcagcacttcagaagatgg

SEQ ID NO: 81577 - DNA, 25 bp, probe
actgtcataatgatctgtacttcca

SEQ ID NO: 81578 - DNA, 25 bp, probe
ctattcagcacttcagaagatggac

SEQ ID NO: 81579 - DNA, 25 bp, probe
atatctatgcttctctcactgtgcc

SEQ ID NO: 81580 - DNA, 25 bp, probe
aggactgtcataatgatctgtactt

SEQ ID NO: 81581 - DNA, 25 bp, probe
taactattcagcacttcagaagatg

SEQ ID NO: 81582 - DNA, 25 bp, probe
gactgtcataatgatctgtacttcc

SEQ ID NO: 81583 - DNA, 25 bp, probe
ggactgtcataatgatctgtacttc

SEQ ID NO: 81584 - DNA, 25 bp, probe
tattcagcacttcagaagatggact

SEQ ID NO: 81585 - DNA, 25 bp, probe
actattcagcacttcagaagatgga

SEQ ID NO: 81586 - DNA, 25 bp, probe
tatacaacacacagtagctcttcag

SEQ ID NO: 81587 - DNA, 25 bp, probe
ttatacaacacacagtagctcttca

SEQ ID NO: 81588 - DNA, 25 bp, probe
caggactgtcataatgatctgtact

SEQ ID NO: 81589 - DNA, 25 bp, probe
ccaggactgtcataatgatctgtac

SEQ ID NO: 81590 - DNA, 25 bp, probe
tccaggactgtcataatgatctgta

SEQ ID NO: 81591 - DNA, 25 bp, probe
ttccaggactgtcataatgatctgt

SEQ ID NO: 81592 - DNA, 25 bp, probe
ttaactattcagcacttcagaagat

SEQ ID NO: 81593 - DNA, 25 bp, probe
ctgtcataatgatctgtacttccat

SEQ ID NO: 81594 - DNA, 25 bp, probe
gtcataatgatctgtacttccatgt

SEQ ID NO: 81595 - DNA, 25 bp, probe
tgtcataatgatctgtacttccatg

SEQ ID NO: 81596 - DNA, 25 bp, probe
agggtattgatgtttcttgtggata

SEQ ID NO: 81597 - DNA, 25 bp, probe
tgtatcagagtatttgcccattaga

SEQ ID NO: 81598 - DNA, 25 bp, probe
ggacacttagggctatttaatttcg

SEQ ID NO: 81599 - DNA, 25 bp, probe
cagggacacttagggctatttaatt

SEQ ID NO: 81600 - DNA, 25 bp, probe
agggacacttagggctatttaattt

SEQ ID NO: 81601 - DNA, 25 bp, probe
gggacacttagggctatttaatttc

SEQ ID NO: 81602 - DNA, 25 bp, probe
gggtattgatgtttcttgtggataa

SEQ ID NO: 81603 - DNA, 25 bp, probe
cagggtattgatgtttcttgtggat

SEQ ID NO: 81604 - DNA, 25 bp, probe
tatctatgcttctctcactgtgcct

SEQ ID NO: 81605 - DNA, 25 bp, probe
tcagggacacttagggctatttaat

SEQ ID NO: 81606 - DNA, 25 bp, probe
ttcagggacacttagggctatttaa

SEQ ID NO: 81607 - DNA, 25 bp, probe
attcagcacttcagaagatggactc

SEQ ID NO: 81608 - DNA, 25 bp, probe
tatatcttatgcttatttccgctgg

SEQ ID NO: 81609 - DNA, 25 bp, probe
cttcagggacacttagggctattta

SEQ ID NO: 81610 - DNA, 25 bp, probe
gtcatttcatttcccaaggttgatt

SEQ ID NO: 81611 - DNA, 25 bp, probe
tgtgtcttcagtttgagaaccttaa

SEQ ID NO: 81612 - DNA, 25 bp, probe
ttgtgtcttcagtttgagaacctta

SEQ ID NO: 81613 - DNA, 25 bp, probe
tcatttcatttcccaaggttgattt

SEQ ID NO: 81614 - DNA, 25 bp, probe
tatcaaataagggaagtaatcagcc

SEQ ID NO: 81615 - DNA, 25 bp, probe
gagtaccattctagcaaacctacat

SEQ ID NO: 81616 - DNA, 25 bp, probe
gtgtcttcagtttgagaaccttaaa

SEQ ID NO: 81617 - DNA, 25 bp, probe
agtaccattctagcaaacctacatt

SEQ ID NO: 81618 - DNA, 25 bp, probe
gcctccatcttattaaatagtgaca

SEQ ID NO: 81619 - DNA, 25 bp, probe
ctctctgtggtgtctctctattatg

SEQ ID NO: 81620 - DNA, 25 bp, probe
tctctctgtggtgtctctctattat

SEQ ID NO: 81621 - DNA, 25 bp, probe
atctctctgtggtgtctctctatta

SEQ ID NO: 81622 - DNA, 25 bp, probe
gtaagcagttctattgacaaggatg

SEQ ID NO: 81623 - DNA, 25 bp, probe
tctctgtggtgtctctctattatgg

SEQ ID NO: 81624 - DNA, 25 bp, probe
catctctctgtggtgtctctctatt

SEQ ID NO: 81625 - DNA, 25 bp, probe
taagcagttctattgacaaggatgt

SEQ ID NO: 81626 - DNA, 25 bp, probe
tgtaagcagttctattgacaaggat

SEQ ID NO: 81627 - DNA, 25 bp, probe
ctgtaagcagttctattgacaagga

SEQ ID NO: 81628 - DNA, 25 bp, probe
cattcatgtgtatcctggtatcata

SEQ ID NO: 81629 - DNA, 25 bp, probe
tggtgtctctctattatgggtcaat

SEQ ID NO: 81630 - DNA, 25 bp, probe
ccattcatgtgtatcctggtatcat

SEQ ID NO: 81631 - DNA, 25 bp, probe
ggtgtctctctattatgggtcaata

SEQ ID NO: 81632 - DNA, 25 bp, probe
gtggtgtctctctattatgggtcaa

SEQ ID NO: 81633 - DNA, 25 bp, probe
gtgtatcctggtatcatatggctac

SEQ ID NO: 81634 - DNA, 25 bp, probe
tgtgtatcctggtatcatatggcta

SEQ ID NO: 81635 - DNA, 25 bp, probe
ctctgtggtgtctctctattatggg

SEQ ID NO: 81636 - DNA, 25 bp, probe
atcctggtatcatatggctacattg

SEQ ID NO: 81637 - DNA, 25 bp, probe
tcatgtgtatcctggtatcatatgg

SEQ ID NO: 81638 - DNA, 25 bp, probe
gtatcctggtatcatatggctacat

SEQ ID NO: 81639 - DNA, 25 bp, probe
ctgtggtgtctctctattatgggtc

SEQ ID NO: 81640 - DNA, 25 bp, probe
atgtgtatcctggtatcatatggct

SEQ ID NO: 81641 - DNA, 25 bp, probe
catgtgtatcctggtatcatatggc

SEQ ID NO: 81642 - DNA, 25 bp, probe
attcatgtgtatcctggtatcatat

SEQ ID NO: 81643 - DNA, 25 bp, probe
tctgtggtgtctctctattatgggt

SEQ ID NO: 81644 - DNA, 25 bp, probe
tatcctggtatcatatggctacatt

SEQ ID NO: 81645 - DNA, 25 bp, probe
tgtggtgtctctctattatgggtca

SEQ ID NO: 81646 - DNA, 25 bp, probe
ccatctctctgtggtgtctctctat

SEQ ID NO: 81647 - DNA, 25 bp, probe
tcctggtatcatatggctacattgg

SEQ ID NO: 81648 - DNA, 25 bp, probe
gatatcttcctcaatgagctggtca

SEQ ID NO: 81649 - DNA, 25 bp, probe
gccattcatgtgtatcctggtatca

SEQ ID NO: 81650 - DNA, 25 bp, probe
tgccattcatgtgtatcctggtatc

SEQ ID NO: 81651 - DNA, 25 bp, probe
ctgccattcatgtgtatcctggtat

SEQ ID NO: 81652 - DNA, 25 bp, probe
ttcatgtgtatcctggtatcatatg

SEQ ID NO: 81653 - DNA, 25 bp, probe
cattaccctgccattcatgtgtatc

SEQ ID NO: 81654 - DNA, 25 bp, probe
ggatgtcattgtggctctcatgtac

SEQ ID NO: 81655 - DNA, 25 bp, probe
gtgtctctctattatgggtcaatat

SEQ ID NO: 81656 - DNA, 25 bp, probe
tcattaccctgccattcatgtgtat

SEQ ID NO: 81657 - DNA, 25 bp, probe
gctctgtgtcttcttagtggctgta

SEQ ID NO: 81658 - DNA, 25 bp, probe
aggatgtcattgtggctctcatgta

SEQ ID NO: 81659 - DNA, 25 bp, probe
tctctattatgggtcaatatttggc

SEQ ID NO: 81660 - DNA, 25 bp, probe
atatcttcctcaatgagctggtcat

SEQ ID NO: 81661 - DNA, 25 bp, probe
tgtatcctggtatcatatggctaca

SEQ ID NO: 81662 - DNA, 25 bp, probe
attaccctgccattcatgtgtatcc

SEQ ID NO: 81663 - DNA, 25 bp, probe
agaagtatagatgtatgtgcgtgta

SEQ ID NO: 81664 - DNA, 25 bp, probe
tagaagtatagatgtatgtgcgtgt

SEQ ID NO: 81665 - DNA, 25 bp, probe
gaagtatagatgtatgtgcgtgtat

SEQ ID NO: 81666 - DNA, 25 bp, probe
ttagaagtatagatgtatgtgcgtg

SEQ ID NO: 81667 - DNA, 25 bp, probe
ttccttgaagttcttagcataatgt

SEQ ID NO: 81668 - DNA, 25 bp, probe
cttagaagtatagatgtatgtgcgt

SEQ ID NO: 81669 - DNA, 25 bp, probe
tatacacacacacacacacacacag

SEQ ID NO: 81670 - DNA, 25 bp, probe
tgaagttcttagcataatgtatcca

SEQ ID NO: 81671 - DNA, 25 bp, probe
tccttgaagttcttagcataatgta

SEQ ID NO: 81672 - DNA, 25 bp, probe
tcttagaagtatagatgtatgtgcg

SEQ ID NO: 81673 - DNA, 25 bp, probe
ttatagtcgtgccatgttgttactc

SEQ ID NO: 81674 - DNA, 25 bp, probe
atctaggcaacaacacttagaagtt

SEQ ID NO: 81675 - DNA, 25 bp, probe
aagtatagatgtatgtgcgtgtata

SEQ ID NO: 81676 - DNA, 25 bp, probe
tatctaggcaacaacacttagaagt

SEQ ID NO: 81677 - DNA, 25 bp, probe
cacacacacagagataaacacaata

SEQ ID NO: 81678 - DNA, 25 bp, probe
tatagtcgtgccatgttgttactca

SEQ ID NO: 81679 - DNA, 25 bp, probe
acacacacacagagataaacacaat

SEQ ID NO: 81680 - DNA, 25 bp, probe
atatctaggcaacaacacttagaag

SEQ ID NO: 81681 - DNA, 25 bp, probe
cacacacacacacacacagagataa

SEQ ID NO: 81682 - DNA, 25 bp, probe
ttgaagttcttagcataatgtatcc

SEQ ID NO: 81683 - DNA, 25 bp, probe
ccttgaagttcttagcataatgtat

SEQ ID NO: 81684 - DNA, 25 bp, probe
acacacacagagataaacacaatat

SEQ ID NO: 81685 - DNA, 25 bp, probe
cacacacacacagagataaacacaa

SEQ ID NO: 81686 - DNA, 25 bp, probe
acacacacacacacacacagagata

SEQ ID NO: 81687 - DNA, 25 bp, probe
tactttcatgtggtaggttctttct

SEQ ID NO: 81688 - DNA, 25 bp, probe
tttcatgtggtaggttctttctcag

SEQ ID NO: 81689 - DNA, 25 bp, probe
ctttcatgtggtaggttctttctca

SEQ ID NO: 81690 - DNA, 25 bp, probe
actttcatgtggtaggttctttctc

SEQ ID NO: 81691 - DNA, 25 bp, probe
gaagttcttagcataatgtatccat

SEQ ID NO: 81692 - DNA, 25 bp, probe
agtatatatctaggcaacaacactt

SEQ ID NO: 81693 - DNA, 25 bp, probe
ggcaacaacacttagaagtttatca

SEQ ID NO: 81694 - DNA, 25 bp, probe
tctttctcaggaactcagtttaact

SEQ ID NO: 81695 - DNA, 25 bp, probe
cgtgactgtcagtattctcgctatt

SEQ ID NO: 81696 - DNA, 25 bp, probe
aggcaacaacacttagaagtttatc

SEQ ID NO: 81697 - DNA, 25 bp, probe
ttctttctcaggaactcagtttaac

SEQ ID NO: 81698 - DNA, 25 bp, probe
atactttcatgtggtaggttctttc

SEQ ID NO: 81699 - DNA, 25 bp, probe
gcttctactggcacaatttattatt

SEQ ID NO: 81700 - DNA, 25 bp, probe
catactttcatgtggtaggttcttt

SEQ ID NO: 81701 - DNA, 25 bp, probe
ctaggcaacaacacttagaagttta

SEQ ID NO: 81702 - DNA, 25 bp, probe
cacacacacacacagagataaacac

SEQ ID NO: 81703 - DNA, 25 bp, probe
cacacacacacacacagagataaac

SEQ ID NO: 81704 - DNA, 25 bp, probe
tttatagtcgtgccatgttgttact

SEQ ID NO: 81705 - DNA, 25 bp, probe
aaataaagattcctgtgtactggtt

SEQ ID NO: 81706 - DNA, 25 bp, probe
gcaacaacacttagaagtttatcag

SEQ ID NO: 81707 - DNA, 25 bp, probe
actctcagtgttacagcatcattaa

SEQ ID NO: 81708 - DNA, 25 bp, probe
aactctcagtgttacagcatcatta

SEQ ID NO: 81709 - DNA, 25 bp, probe
gaactctcagtgttacagcatcatt

SEQ ID NO: 81710 - DNA, 25 bp, probe
ctctcagtgttacagcatcattaat

SEQ ID NO: 81711 - DNA, 25 bp, probe
tgaactctcagtgttacagcatcat

SEQ ID NO: 81712 - DNA, 25 bp, probe
ttgaactctcagtgttacagcatca

SEQ ID NO: 81713 - DNA, 25 bp, probe
tcctttccaccagtgatttgtatta

SEQ ID NO: 81714 - DNA, 25 bp, probe
cctttccaccagtgatttgtattaa

SEQ ID NO: 81715 - DNA, 25 bp, probe
ctcctttccaccagtgatttgtatt

SEQ ID NO: 81716 - DNA, 25 bp, probe
ttccaccagtgatttgtattaagac

SEQ ID NO: 81717 - DNA, 25 bp, probe
aagatgagatcaccaaagagactac

SEQ ID NO: 81718 - DNA, 25 bp, probe
aaagatgagatcaccaaagagacta

SEQ ID NO: 81719 - DNA, 25 bp, probe
tttccaccagtgatttgtattaaga

SEQ ID NO: 81720 - DNA, 25 bp, probe
accagtgatttgtattaagacagca

SEQ ID NO: 81721 - DNA, 25 bp, probe
caccagtgatttgtattaagacagc

SEQ ID NO: 81722 - DNA, 25 bp, probe
tccaccagtgatttgtattaagaca

SEQ ID NO: 81723 - DNA, 25 bp, probe
ccaccagtgatttgtattaagacag

SEQ ID NO: 81724 - DNA, 25 bp, probe
tttgaactctcagtgttacagcatc

SEQ ID NO: 81725 - DNA, 25 bp, probe
ctttccaccagtgatttgtattaag

SEQ ID NO: 81726 - DNA, 25 bp, probe
ccagtgatttgtattaagacagcac

SEQ ID NO: 81727 - DNA, 25 bp, probe
tccttgcacttaaactcattccata

SEQ ID NO: 81728 - DNA, 25 bp, probe
ccttgcacttaaactcattccatat

SEQ ID NO: 81729 - DNA, 25 bp, probe
gatgtccttgcacttaaactcattc

SEQ ID NO: 81730 - DNA, 25 bp, probe
gtccttgcacttaaactcattccat

SEQ ID NO: 81731 - DNA, 25 bp, probe
gctcctttccaccagtgatttgtat

SEQ ID NO: 81732 - DNA, 25 bp, probe
caattggcatgactcctcttatgag

SEQ ID NO: 81733 - DNA, 25 bp, probe
atgtccttgcacttaaactcattcc

SEQ ID NO: 81734 - DNA, 25 bp, probe
ggatgtccttgcacttaaactcatt

SEQ ID NO: 81735 - DNA, 25 bp, probe
tgtattaagacagcacttatattgt

SEQ ID NO: 81736 - DNA, 25 bp, probe
attccatatgcatctgtgtgtgtag

SEQ ID NO: 81737 - DNA, 25 bp, probe
gtgatttgtattaagacagcactta

SEQ ID NO: 81738 - DNA, 25 bp, probe
cttgcacttaaactcattccatatg

SEQ ID NO: 81739 - DNA, 25 bp, probe
cattccatatgcatctgtgtgtgta

SEQ ID NO: 81740 - DNA, 25 bp, probe
ccctattgtatgacctttgctgagg

SEQ ID NO: 81741 - DNA, 25 bp, probe
aactcattccatatgcatctgtgtg

SEQ ID NO: 81742 - DNA, 25 bp, probe
aaaagatgagatcaccaaagagact

SEQ ID NO: 81743 - DNA, 25 bp, probe
gaaaagatgagatcaccaaagagac

SEQ ID NO: 81744 - DNA, 25 bp, probe
cagaaaagatgagatcaccaaagag

SEQ ID NO: 81745 - DNA, 25 bp, probe
agaaaagatgagatcaccaaagaga

SEQ ID NO: 81746 - DNA, 25 bp, probe
ttttgaactctcagtgttacagcat

SEQ ID NO: 81747 - DNA, 25 bp, probe
tgtccttgcacttaaactcattcca

SEQ ID NO: 81748 - DNA, 25 bp, probe
ttccatatgcatctgtgtgtgtaga

SEQ ID NO: 81749 - DNA, 25 bp, probe
gcagaaaagatgagatcaccaaaga

SEQ ID NO: 81750 - DNA, 25 bp, probe
agcagaaaagatgagatcaccaaag

SEQ ID NO: 81751 - DNA, 25 bp, probe
agcagaaagtgtcagtcattgtcat

SEQ ID NO: 81752 - DNA, 25 bp, probe
gagcagaaagtgtcagtcattgtca

SEQ ID NO: 81753 - DNA, 25 bp, probe
agaaagtgtcagtcattgtcatgct

SEQ ID NO: 81754 - DNA, 25 bp, probe
cagaaagtgtcagtcattgtcatgc

SEQ ID NO: 81755 - DNA, 25 bp, probe
gcagaaagtgtcagtcattgtcatg

SEQ ID NO: 81756 - DNA, 25 bp, probe
tgagcagaaagtgtcagtcattgtc

SEQ ID NO: 81757 - DNA, 25 bp, probe
gaaagtgtcagtcattgtcatgctg

SEQ ID NO: 81758 - DNA, 25 bp, probe
agtcattgtcatgctggtttctgag

SEQ ID NO: 81759 - DNA, 25 bp, probe
atgagcagaaagtgtcagtcattgt

SEQ ID NO: 81760 - DNA, 25 bp, probe
catgagcagaaagtgtcagtcattg

SEQ ID NO: 81761 - DNA, 25 bp, probe
cagtcattgtcatgctggtttctga

SEQ ID NO: 81762 - DNA, 25 bp, probe
tcagtcattgtcatgctggtttctg

SEQ ID NO: 81763 - DNA, 25 bp, probe
gtcagtcattgtcatgctggtttct

SEQ ID NO: 81764 - DNA, 25 bp, probe
agtgtcagtcattgtcatgctggtt

SEQ ID NO: 81765 - DNA, 25 bp, probe
aagtgtcagtcattgtcatgctggt

SEQ ID NO: 81766 - DNA, 25 bp, probe
tgtcagtcattgtcatgctggtttc

SEQ ID NO: 81767 - DNA, 25 bp, probe
aaagtgtcagtcattgtcatgctgg

SEQ ID NO: 81768 - DNA, 25 bp, probe
gtcattgtcatgctggtttctgagg

SEQ ID NO: 81769 - DNA, 25 bp, probe
gtgtcagtcattgtcatgctggttt

SEQ ID NO: 81770 - DNA, 25 bp, probe
ccatgagcagaaagtgtcagtcatt

SEQ ID NO: 81771 - DNA, 25 bp, probe
ctatttaactttgctctcagatgcc

SEQ ID NO: 81772 - DNA, 25 bp, probe
tatttaactttgctctcagatgcct

SEQ ID NO: 81773 - DNA, 25 bp, probe
cttatgctgtgttagtttcgttgtc

SEQ ID NO: 81774 - DNA, 25 bp, probe
ccagcctcattctatttaactttgc

SEQ ID NO: 81775 - DNA, 25 bp, probe
gcctcattctatttaactttgctct

SEQ ID NO: 81776 - DNA, 25 bp, probe
accagcctcattctatttaactttg

SEQ ID NO: 81777 - DNA, 25 bp, probe
gaccagcctcattctatttaacttt

SEQ ID NO: 81778 - DNA, 25 bp, probe
cgaccagcctcattctatttaactt

SEQ ID NO: 81779 - DNA, 25 bp, probe
ttatgctgtgttagtttcgttgtca

SEQ ID NO: 81780 - DNA, 25 bp, probe
aagtccttatgctgtgttagtttcg

SEQ ID NO: 81781 - DNA, 25 bp, probe
tctatttaactttgctctcagatgc

SEQ ID NO: 81782 - DNA, 25 bp, probe
tcataattccagagaagggcatttc

SEQ ID NO: 81783 - DNA, 25 bp, probe
atttaactttgctctcagatgcctc

SEQ ID NO: 81784 - DNA, 25 bp, probe
tccttatgctgtgttagtttcgttg

SEQ ID NO: 81785 - DNA, 25 bp, probe
gtccttatgctgtgttagtttcgtt

SEQ ID NO: 81786 - DNA, 25 bp, probe
taagtccttatgctgtgttagtttc

SEQ ID NO: 81787 - DNA, 25 bp, probe
tataggtcagtgaaagggcaagtag

SEQ ID NO: 81788 - DNA, 25 bp, probe
gcttaagtccttatgctgtgttagt

SEQ ID NO: 81789 - DNA, 25 bp, probe
ccttatgctgtgttagtttcgttgt

SEQ ID NO: 81790 - DNA, 25 bp, probe
ttaagtccttatgctgtgttagttt

SEQ ID NO: 81791 - DNA, 25 bp, probe
ctcataattccagagaagggcattt

SEQ ID NO: 81792 - DNA, 25 bp, probe
cttaagtccttatgctgtgttagtt

SEQ ID NO: 81793 - DNA, 25 bp, probe
tttatgtgtgtgcctcattcctttc

SEQ ID NO: 81794 - DNA, 25 bp, probe
ctctcagatgcctcagatgctatag

SEQ ID NO: 81795 - DNA, 25 bp, probe
ggcttaagtccttatgctgtgttag

SEQ ID NO: 81796 - DNA, 25 bp, probe
agtccttatgctgtgttagtttcgt

SEQ ID NO: 81797 - DNA, 25 bp, probe
gtttatgtgtgtgcctcattccttt

SEQ ID NO: 81798 - DNA, 25 bp, probe
cctcattctatttaactttgctctc

SEQ ID NO: 81799 - DNA, 25 bp, probe
gaacagtccatccttatccctcttc

SEQ ID NO: 81800 - DNA, 25 bp, probe
gctctcagatgcctcagatgctata

SEQ ID NO: 81801 - DNA, 25 bp, probe
aacagtccatccttatccctcttct

SEQ ID NO: 81802 - DNA, 25 bp, probe
tttaactttgctctcagatgcctca

SEQ ID NO: 81803 - DNA, 25 bp, probe
cctaagtctttcccacggtttatgt

SEQ ID NO: 81804 - DNA, 25 bp, probe
ttgcgaccagcctcattctatttaa

SEQ ID NO: 81805 - DNA, 25 bp, probe
tatgctgtgttagtttcgttgtcag

SEQ ID NO: 81806 - DNA, 25 bp, probe
taggtcagtgaaagggcaagtagta

SEQ ID NO: 81807 - DNA, 25 bp, probe
ctaagtctttcccacggtttatgtg

SEQ ID NO: 81808 - DNA, 25 bp, probe
ttaactttgctctcagatgcctcag

SEQ ID NO: 81809 - DNA, 25 bp, probe
cttgcgaccagcctcattctattta

SEQ ID NO: 81810 - DNA, 25 bp, probe
tcagacctctccctcataattccag

SEQ ID NO: 81811 - DNA, 25 bp, probe
ctcagacctctccctcataattcca

SEQ ID NO: 81812 - DNA, 25 bp, probe
tcattctatttaactttgctctcag

SEQ ID NO: 81813 - DNA, 25 bp, probe
ctcattctatttaactttgctctca

SEQ ID NO: 81814 - DNA, 25 bp, probe
gcgaccagcctcattctatttaact

SEQ ID NO: 81815 - DNA, 25 bp, probe
atcttgtgttcctatactcgcattg

SEQ ID NO: 81816 - DNA, 25 bp, probe
cttgctgatcttgtgttcctatact

SEQ ID NO: 81817 - DNA, 25 bp, probe
ttgctgatcttgtgttcctatactc

SEQ ID NO: 81818 - DNA, 25 bp, probe
gatcttgtgttcctatactcgcatt

SEQ ID NO: 81819 - DNA, 25 bp, probe
tgatcttgtgttcctatactcgcat

SEQ ID NO: 81820 - DNA, 25 bp, probe
gcttgctgatcttgtgttcctatac

SEQ ID NO: 81821 - DNA, 25 bp, probe
tgcttgctgatcttgtgttcctata

SEQ ID NO: 81822 - DNA, 25 bp, probe
ctgatcttgtgttcctatactcgca

SEQ ID NO: 81823 - DNA, 25 bp, probe
tgctgatcttgtgttcctatactcg

SEQ ID NO: 81824 - DNA, 25 bp, probe
cttgtgttcctatactcgcattgct

SEQ ID NO: 81825 - DNA, 25 bp, probe
tcttgtgttcctatactcgcattgc

SEQ ID NO: 81826 - DNA, 25 bp, probe
ctgcttgctgatcttgtgttcctat

SEQ ID NO: 81827 - DNA, 25 bp, probe
gctgatcttgtgttcctatactcgc

SEQ ID NO: 81828 - DNA, 25 bp, probe
ttgtgttcctatactcgcattgctg

SEQ ID NO: 81829 - DNA, 25 bp, probe
tatcctcaagatcccatcagctaaa

SEQ ID NO: 81830 - DNA, 25 bp, probe
ctatcctcaagatcccatcagctaa

SEQ ID NO: 81831 - DNA, 25 bp, probe
aacaaggtgaaccacttcttctgtg

SEQ ID NO: 81832 - DNA, 25 bp, probe
caacaaggtgaaccacttcttctgt

SEQ ID NO: 81833 - DNA, 25 bp, probe
tagccctcagaaactgtatcccata

SEQ ID NO: 81834 - DNA, 25 bp, probe
atcctcaagatcccatcagctaaag

SEQ ID NO: 81835 - DNA, 25 bp, probe
ctcacacctccttgttgtctctctt

SEQ ID NO: 81836 - DNA, 25 bp, probe
cattgctgctgctatcctcaagatc

SEQ ID NO: 81837 - DNA, 25 bp, probe
caaggtgaaccacttcttctgtgac

SEQ ID NO: 81838 - DNA, 25 bp, probe
cctccttgttgtctctcttttctat

SEQ ID NO: 81839 - DNA, 25 bp, probe
acctccttgttgtctctcttttcta

SEQ ID NO: 81840 - DNA, 25 bp, probe
ccaacaaggtgaaccacttcttctg

SEQ ID NO: 81841 - DNA, 25 bp, probe
aaggtgaaccacttcttctgtgaca

SEQ ID NO: 81842 - DNA, 25 bp, probe
acaaggtgaaccacttcttctgtga

SEQ ID NO: 81843 - DNA, 25 bp, probe
agccctcagaaactgtatcccatag

SEQ ID NO: 81844 - DNA, 25 bp, probe
tcacacctccttgttgtctctcttt

SEQ ID NO: 81845 - DNA, 25 bp, probe
ctagccctcagaaactgtatcccat

SEQ ID NO: 81846 - DNA, 25 bp, probe
ctccttgttgtctctcttttctata

SEQ ID NO: 81847 - DNA, 25 bp, probe
cacctccttgttgtctctcttttct

SEQ ID NO: 81848 - DNA, 25 bp, probe
accaacaaggtgaaccacttcttct

SEQ ID NO: 81849 - DNA, 25 bp, probe
ccatcagctaaagggaagcataaag

SEQ ID NO: 81850 - DNA, 25 bp, probe
cctgcttgctgatcttgtgttccta

SEQ ID NO: 81851 - DNA, 25 bp, probe
attgctgctgctatcctcaagatcc

SEQ ID NO: 81852 - DNA, 25 bp, probe
ctatactcgcattgctgctgctatc

SEQ ID NO: 81853 - DNA, 25 bp, probe
catcagctaaagggaagcataaagc

SEQ ID NO: 81854 - DNA, 25 bp, probe
tccttgttgtctctcttttctatat

SEQ ID NO: 81855 - DNA, 25 bp, probe
aggtgaaccacttcttctgtgacag

SEQ ID NO: 81856 - DNA, 25 bp, probe
gtcctagccctcagaaactgtatcc

SEQ ID NO: 81857 - DNA, 25 bp, probe
ggtcctagccctcagaaactgtatc

SEQ ID NO: 81858 - DNA, 25 bp, probe
acacctccttgttgtctctcttttc

SEQ ID NO: 81859 - DNA, 25 bp, probe
agcaagacttactaacgcatatcaa

SEQ ID NO: 81860 - DNA, 25 bp, probe
aagcaagacttactaacgcatatca

SEQ ID NO: 81861 - DNA, 25 bp, probe
ctaaatggtttcagtggcaaataca

SEQ ID NO: 81862 - DNA, 25 bp, probe
tctaaatggtttcagtggcaaatac

SEQ ID NO: 81863 - DNA, 25 bp, probe
gcaagacttactaacgcatatcaaa

SEQ ID NO: 81864 - DNA, 25 bp, probe
gttctaaatggtttcagtggcaaat

SEQ ID NO: 81865 - DNA, 25 bp, probe
ttctaaatggtttcagtggcaaata

SEQ ID NO: 81866 - DNA, 25 bp, probe
caaagcaagacttactaacgcatat

SEQ ID NO: 81867 - DNA, 25 bp, probe
aaagcaagacttactaacgcatatc

SEQ ID NO: 81868 - DNA, 25 bp, probe
ggtttcagtggcaaatacataacat

SEQ ID NO: 81869 - DNA, 25 bp, probe
atggtttcagtggcaaatacataac

SEQ ID NO: 81870 - DNA, 25 bp, probe
aatggtttcagtggcaaatacataa

SEQ ID NO: 81871 - DNA, 25 bp, probe
aaatggtttcagtggcaaatacata

SEQ ID NO: 81872 - DNA, 25 bp, probe
taaatggtttcagtggcaaatacat

SEQ ID NO: 81873 - DNA, 25 bp, probe
attattcaaattctcacgccttcca

SEQ ID NO: 81874 - DNA, 25 bp, probe
ttattcaaattctcacgccttccaa

SEQ ID NO: 81875 - DNA, 25 bp, probe
tggtttcagtggcaaatacataaca

SEQ ID NO: 81876 - DNA, 25 bp, probe
ccaaagcaagacttactaacgcata

SEQ ID NO: 81877 - DNA, 25 bp, probe
gtttcagtggcaaatacataacatt

SEQ ID NO: 81878 - DNA, 25 bp, probe
aattattcaaattctcacgccttcc

SEQ ID NO: 81879 - DNA, 25 bp, probe
gcccagccagataatacatgataat

SEQ ID NO: 81880 - DNA, 25 bp, probe
ttcagtggcaaatacataacattgt

SEQ ID NO: 81881 - DNA, 25 bp, probe
tttcagtggcaaatacataacattg

SEQ ID NO: 81882 - DNA, 25 bp, probe
tattcaaattctcacgccttccaac

SEQ ID NO: 81883 - DNA, 25 bp, probe
tgtaaactaacattcactggttcca

SEQ ID NO: 81884 - DNA, 25 bp, probe
ggttctaaatggtttcagtggcaaa

SEQ ID NO: 81885 - DNA, 25 bp, probe
cccagccagataatacatgataatc

SEQ ID NO: 81886 - DNA, 25 bp, probe
ctcatgctaaactgtctgattatgc

SEQ ID NO: 81887 - DNA, 25 bp, probe
aaattattcaaattctcacgccttc

SEQ ID NO: 81888 - DNA, 25 bp, probe
cagggattaaggaatgaacctcttt

SEQ ID NO: 81889 - DNA, 25 bp, probe
ccctcatgctaaactgtctgattat

SEQ ID NO: 81890 - DNA, 25 bp, probe
cctcatgctaaactgtctgattatg

SEQ ID NO: 81891 - DNA, 25 bp, probe
ctagatggaaaccctcatgctaaac

SEQ ID NO: 81892 - DNA, 25 bp, probe
aaaccaaagcaagacttactaacgc

SEQ ID NO: 81893 - DNA, 25 bp, probe
atgataatctccctcctcaaggttt

SEQ ID NO: 81894 - DNA, 25 bp, probe
caagacttactaacgcatatcaaat

SEQ ID NO: 81895 - DNA, 25 bp, probe
atacatgataatctccctcctcaag

SEQ ID NO: 81896 - DNA, 25 bp, probe
tagatggaaaccctcatgctaaact

SEQ ID NO: 81897 - DNA, 25 bp, probe
ccagccagataatacatgataatct

SEQ ID NO: 81898 - DNA, 25 bp, probe
aatacatgataatctccctcctcaa

SEQ ID NO: 81899 - DNA, 25 bp, probe
accctcatgctaaactgtctgatta

SEQ ID NO: 81900 - DNA, 25 bp, probe
agccagataatacatgataatctcc

SEQ ID NO: 81901 - DNA, 25 bp, probe
atggttctaaatggtttcagtggca

SEQ ID NO: 81902 - DNA, 25 bp, probe
tacatgataatctccctcctcaagg

SEQ ID NO: 81903 - DNA, 25 bp, probe
aataatcatcaaaggcaagagggtt

SEQ ID NO: 81904 - DNA, 25 bp, probe
aagaataatcatcaaaggcaagagg

SEQ ID NO: 81905 - DNA, 25 bp, probe
cacattcacctctttccacttaaac

SEQ ID NO: 81906 - DNA, 25 bp, probe
agaataatcatcaaaggcaagaggg

SEQ ID NO: 81907 - DNA, 25 bp, probe
gaataatcatcaaaggcaagagggt

SEQ ID NO: 81908 - DNA, 25 bp, probe
ccacattcacctctttccacttaaa

SEQ ID NO: 81909 - DNA, 25 bp, probe
atcaaaggcaagagggttgtatatt

SEQ ID NO: 81910 - DNA, 25 bp, probe
tcaaaggcaagagggttgtatattt

SEQ ID NO: 81911 - DNA, 25 bp, probe
catcaaaggcaagagggttgtatat

SEQ ID NO: 81912 - DNA, 25 bp, probe
acattcacctctttccacttaaacg

SEQ ID NO: 81913 - DNA, 25 bp, probe
ataacctctttaatgcctgaaatca

SEQ ID NO: 81914 - DNA, 25 bp, probe
aatttctcttcaagcatcatcaccc

SEQ ID NO: 81915 - DNA, 25 bp, probe
ataatcatcaaaggcaagagggttg

SEQ ID NO: 81916 - DNA, 25 bp, probe
acctctttaatgcctgaaatcataa

SEQ ID NO: 81917 - DNA, 25 bp, probe
aacctctttaatgcctgaaatcata

SEQ ID NO: 81918 - DNA, 25 bp, probe
taacctctttaatgcctgaaatcat

SEQ ID NO: 81919 - DNA, 25 bp, probe
tcatcaaaggcaagagggttgtata

SEQ ID NO: 81920 - DNA, 25 bp, probe
cctctttaatgcctgaaatcataag

SEQ ID NO: 81921 - DNA, 25 bp, probe
tttgtctgccatgtcatttatgatg

SEQ ID NO: 81922 - DNA, 25 bp, probe
tgtctgccatgtcatttatgatgta

SEQ ID NO: 81923 - DNA, 25 bp, probe
gtctgccatgtcatttatgatgtat

SEQ ID NO: 81924 - DNA, 25 bp, probe
atttctcttcaagcatcatcaccca

SEQ ID NO: 81925 - DNA, 25 bp, probe
ttgtctgccatgtcatttatgatgt

SEQ ID NO: 81926 - DNA, 25 bp, probe
atcatcaaaggcaagagggttgtat

SEQ ID NO: 81927 - DNA, 25 bp, probe
ctggacatataattgctggctggtg

SEQ ID NO: 81928 - DNA, 25 bp, probe
aaatttctcttcaagcatcatcacc

SEQ ID NO: 81929 - DNA, 25 bp, probe
cccacattcacctctttccacttaa

SEQ ID NO: 81930 - DNA, 25 bp, probe
aatcatcaaaggcaagagggttgta

SEQ ID NO: 81931 - DNA, 25 bp, probe
taatcatcaaaggcaagagggttgt

SEQ ID NO: 81932 - DNA, 25 bp, probe
taagaataatcatcaaaggcaagag

SEQ ID NO: 81933 - DNA, 25 bp, probe
ttgctatatgaacacatcgggactg

SEQ ID NO: 81934 - DNA, 25 bp, probe
gttgctatatgaacacatcgggact

SEQ ID NO: 81935 - DNA, 25 bp, probe
tcttgggctggacatataattgctg

SEQ ID NO: 81936 - DNA, 25 bp, probe
tgtatataacctctttaatgcctga

SEQ ID NO: 81937 - DNA, 25 bp, probe
tctgccatgtcatttatgatgtata

SEQ ID NO: 81938 - DNA, 25 bp, probe
cacatctggaatttgctgcaataaa

SEQ ID NO: 81939 - DNA, 25 bp, probe
ttaaacgtgtcccatgaatcttgtc

SEQ ID NO: 81940 - DNA, 25 bp, probe
cttaaacgtgtcccatgaatcttgt

SEQ ID NO: 81941 - DNA, 25 bp, probe
acttaaacgtgtcccatgaatcttg

SEQ ID NO: 81942 - DNA, 25 bp, probe
cattcacctctttccacttaaacgt

SEQ ID NO: 81943 - DNA, 25 bp, probe
tataacctctttaatgcctgaaatc

SEQ ID NO: 81944 - DNA, 25 bp, probe
tcataagaataatcatcaaaggcaa

SEQ ID NO: 81945 - DNA, 25 bp, probe
tttctcttcaagcatcatcacccac

SEQ ID NO: 81946 - DNA, 25 bp, probe
ctcttcaagcatcatcacccacttt

SEQ ID NO: 81947 - DNA, 25 bp, probe
atactctcataaagcatgtgccaaa

SEQ ID NO: 81948 - DNA, 25 bp, probe
aatactctcataaagcatgtgccaa

SEQ ID NO: 81949 - DNA, 25 bp, probe
caatactctcataaagcatgtgcca

SEQ ID NO: 81950 - DNA, 25 bp, probe
ccaatactctcataaagcatgtgcc

SEQ ID NO: 81951 - DNA, 25 bp, probe
cgccaatactctcataaagcatgtg

SEQ ID NO: 81952 - DNA, 25 bp, probe
gccaatactctcataaagcatgtgc

SEQ ID NO: 81953 - DNA, 25 bp, probe
ccgccaatactctcataaagcatgt

SEQ ID NO: 81954 - DNA, 25 bp, probe
tactctcataaagcatgtgccaaaa

SEQ ID NO: 81955 - DNA, 25 bp, probe
cccgccaatactctcataaagcatg

SEQ ID NO: 81956 - DNA, 25 bp, probe
tactccttacactgccctctgttct

SEQ ID NO: 81957 - DNA, 25 bp, probe
gtactccttacactgccctctgttc

SEQ ID NO: 81958 - DNA, 25 bp, probe
ctggcgtgtgtttgttattgtaaat

SEQ ID NO: 81959 - DNA, 25 bp, probe
taatcagttaggagggacatcacaa

SEQ ID NO: 81960 - DNA, 25 bp, probe
ggcgtgtgtttgttattgtaaattg

SEQ ID NO: 81961 - DNA, 25 bp, probe
tggcgtgtgtttgttattgtaaatt

SEQ ID NO: 81962 - DNA, 25 bp, probe
ggaagaaattatagaaacgggactg

SEQ ID NO: 81963 - DNA, 25 bp, probe
caggaagaaattatagaaacgggac

SEQ ID NO: 81964 - DNA, 25 bp, probe
aggaagaaattatagaaacgggact

SEQ ID NO: 81965 - DNA, 25 bp, probe
atggcaggaagaaattatagaaacg

SEQ ID NO: 81966 - DNA, 25 bp, probe
cgtgtgtttgttattgtaaattgct

SEQ ID NO: 81967 - DNA, 25 bp, probe
gcgtgtgtttgttattgtaaattgc

SEQ ID NO: 81968 - DNA, 25 bp, probe
gcaggaagaaattatagaaacggga

SEQ ID NO: 81969 - DNA, 25 bp, probe
gaagaaattatagaaacgggactgt

SEQ ID NO: 81970 - DNA, 25 bp, probe
tggcaggaagaaattatagaaacgg

SEQ ID NO: 81971 - DNA, 25 bp, probe
aattgatgatttctctgaggttcgg

SEQ ID NO: 81972 - DNA, 25 bp, probe
gaaatctgtggaatgagggctaatc

SEQ ID NO: 81973 - DNA, 25 bp, probe
taaattgctctctttaccagacagg

SEQ ID NO: 81974 - DNA, 25 bp, probe
tctggcgtgtgtttgttattgtaaa

SEQ ID NO: 81975 - DNA, 25 bp, probe
agcatggcaggaagaaattatagaa

SEQ ID NO: 81976 - DNA, 25 bp, probe
gcatggcaggaagaaattatagaaa

SEQ ID NO: 81977 - DNA, 25 bp, probe
tagcatggcaggaagaaattataga

SEQ ID NO: 81978 - DNA, 25 bp, probe
ggcaggaagaaattatagaaacggg

SEQ ID NO: 81979 - DNA, 25 bp, probe
aaattgatgatttctctgaggttcg

SEQ ID NO: 81980 - DNA, 25 bp, probe
tttatgccaaagacatcgctgaaat

SEQ ID NO: 81981 - DNA, 25 bp, probe
aagaaattatagaaacgggactgtt

SEQ ID NO: 81982 - DNA, 25 bp, probe
ttatgccaaagacatcgctgaaatt

SEQ ID NO: 81983 - DNA, 25 bp, probe
gtgtgtttgttattgtaaattgctc

SEQ ID NO: 81984 - DNA, 25 bp, probe
gtctggcgtgtgtttgttattgtaa

SEQ ID NO: 81985 - DNA, 25 bp, probe
atagcatggcaggaagaaattatag

SEQ ID NO: 81986 - DNA, 25 bp, probe
tgtgtttgttattgtaaattgctct

SEQ ID NO: 81987 - DNA, 25 bp, probe
ggcaagctcactactagaacacatt

SEQ ID NO: 81988 - DNA, 25 bp, probe
ctaatcagttaggagggacatcaca

SEQ ID NO: 81989 - DNA, 25 bp, probe
aaatctgtggaatgagggctaatca

SEQ ID NO: 81990 - DNA, 25 bp, probe
aatcagttaggagggacatcacaac

SEQ ID NO: 81991 - DNA, 25 bp, probe
catggcaggaagaaattatagaaac

SEQ ID NO: 81992 - DNA, 25 bp, probe
ggaaatctgtggaatgagggctaat

SEQ ID NO: 81993 - DNA, 25 bp, probe
gtgtttgttattgtaaattgctctc

SEQ ID NO: 81994 - DNA, 25 bp, probe
attgatgatttctctgaggttcggg

SEQ ID NO: 81995 - DNA, 25 bp, probe
gcaagctcactactagaacacattt

SEQ ID NO: 81996 - DNA, 25 bp, probe
tgtttgttattgtaaattgctctct

SEQ ID NO: 81997 - DNA, 25 bp, probe
aagacaggcaagctcactactagaa

SEQ ID NO: 81998 - DNA, 25 bp, probe
gtttatgccaaagacatcgctgaaa

SEQ ID NO: 81999 - DNA, 25 bp, probe
tatgccaaagacatcgctgaaattg

SEQ ID NO: 82000 - DNA, 25 bp, probe
tgtggaatgagggctaatcagttag

SEQ ID NO: 82001 - DNA, 25 bp, probe
ctgtggaatgagggctaatcagtta

SEQ ID NO: 82002 - DNA, 25 bp, probe
acagagttattgtgaagattcaaca

SEQ ID NO: 82003 - DNA, 25 bp, probe
ctcataatggcatttctcctttctg

SEQ ID NO: 82004 - DNA, 25 bp, probe
atcctcataatggcatttctccttt

SEQ ID NO: 82005 - DNA, 25 bp, probe
cataatggcatttctcctttctgtg

SEQ ID NO: 82006 - DNA, 25 bp, probe
tcataatggcatttctcctttctgt

SEQ ID NO: 82007 - DNA, 25 bp, probe
cctcataatggcatttctcctttct

SEQ ID NO: 82008 - DNA, 25 bp, probe
tcctcataatggcatttctcctttc

SEQ ID NO: 82009 - DNA, 25 bp, probe
gattcaacaatttcttggcatagtg

SEQ ID NO: 82010 - DNA, 25 bp, probe
agattcaacaatttcttggcatagt

SEQ ID NO: 82011 - DNA, 25 bp, probe
catcctcataatggcatttctcctt

SEQ ID NO: 82012 - DNA, 25 bp, probe
acacatcctcataatggcatttctc

SEQ ID NO: 82013 - DNA, 25 bp, probe
cacacatcctcataatggcatttct

SEQ ID NO: 82014 - DNA, 25 bp, probe
acacacatcctcataatggcatttc

SEQ ID NO: 82015 - DNA, 25 bp, probe
cacatcctcataatggcatttctcc

SEQ ID NO: 82016 - DNA, 25 bp, probe
acatcctcataatggcatttctcct

SEQ ID NO: 82017 - DNA, 25 bp, probe
cacacacatcctcataatggcattt

SEQ ID NO: 82018 - DNA, 25 bp, probe
catcagtgtcctcatctgtccaatg

SEQ ID NO: 82019 - DNA, 25 bp, probe
gaatgatagactctttcaccctgct

SEQ ID NO: 82020 - DNA, 25 bp, probe
aatgatagactctttcaccctgctg

SEQ ID NO: 82021 - DNA, 25 bp, probe
gcacacacatcctcataatggcatt

SEQ ID NO: 82022 - DNA, 25 bp, probe
tgaagattcaacaatttcttggcat

SEQ ID NO: 82023 - DNA, 25 bp, probe
gtacatggcaaagtttcaaagagct

SEQ ID NO: 82024 - DNA, 25 bp, probe
gtgaagattcaacaatttcttggca

SEQ ID NO: 82025 - DNA, 25 bp, probe
tgtgaagattcaacaatttcttggc

SEQ ID NO: 82026 - DNA, 25 bp, probe
cagagttattgtgaagattcaacaa

SEQ ID NO: 82027 - DNA, 25 bp, probe
atgaatgatagactctttcaccctg

SEQ ID NO: 82028 - DNA, 25 bp, probe
gaagattcaacaatttcttggcata

SEQ ID NO: 82029 - DNA, 25 bp, probe
aagattcaacaatttcttggcatag

SEQ ID NO: 82030 - DNA, 25 bp, probe
attcaacaatttcttggcatagtgc

SEQ ID NO: 82031 - DNA, 25 bp, probe
catgaatgatagactctttcaccct

SEQ ID NO: 82032 - DNA, 25 bp, probe
atcagtgtcctcatctgtccaatga

SEQ ID NO: 82033 - DNA, 25 bp, probe
aattgtgagtgctattgtacatggc

SEQ ID NO: 82034 - DNA, 25 bp, probe
ataatggcatttctcctttctgtgc

SEQ ID NO: 82035 - DNA, 25 bp, probe
gctctcatcatgaatgatagactct

SEQ ID NO: 82036 - DNA, 25 bp, probe
agctctcatcatgaatgatagactc

SEQ ID NO: 82037 - DNA, 25 bp, probe
cagctctcatcatgaatgatagact

SEQ ID NO: 82038 - DNA, 25 bp, probe
aaaagatggtgttagtccccttctc

SEQ ID NO: 82039 - DNA, 25 bp, probe
atgatagactctttcaccctgctgg

SEQ ID NO: 82040 - DNA, 25 bp, probe
gcatcagtgtcctcatctgtccaat

SEQ ID NO: 82041 - DNA, 25 bp, probe
attgtacatggcaaagtttcaaaga

SEQ ID NO: 82042 - DNA, 25 bp, probe
ttgtacatggcaaagtttcaaagag

SEQ ID NO: 82043 - DNA, 25 bp, probe
ttgtgaagattcaacaatttcttgg

SEQ ID NO: 82044 - DNA, 25 bp, probe
cagcccttttctcacagagttattg

SEQ ID NO: 82045 - DNA, 25 bp, probe
gctattgtacatggcaaagtttcaa

SEQ ID NO: 82046 - DNA, 25 bp, probe
gagaagacagtagaatgagcctatc

SEQ ID NO: 82047 - DNA, 25 bp, probe
ggagaagacagtagaatgagcctat

SEQ ID NO: 82048 - DNA, 25 bp, probe
agaagacagtagaatgagcctatct

SEQ ID NO: 82049 - DNA, 25 bp, probe
tggagaagacagtagaatgagccta

SEQ ID NO: 82050 - DNA, 25 bp, probe
agacagtagaatgagcctatctagt

SEQ ID NO: 82051 - DNA, 25 bp, probe
gacagtagaatgagcctatctagtt

SEQ ID NO: 82052 - DNA, 25 bp, probe
gaagacagtagaatgagcctatcta

SEQ ID NO: 82053 - DNA, 25 bp, probe
aagacagtagaatgagcctatctag

SEQ ID NO: 82054 - DNA, 25 bp, probe
ccgtaggtttgtaactgtttcatag

SEQ ID NO: 82055 - DNA, 25 bp, probe
ttgtaactgtttcatagaagagccc

SEQ ID NO: 82056 - DNA, 25 bp, probe
tttgtaactgtttcatagaagagcc

SEQ ID NO: 82057 - DNA, 25 bp, probe
gtaactgtttcatagaagagccctg

SEQ ID NO: 82058 - DNA, 25 bp, probe
cgtaggtttgtaactgtttcataga

SEQ ID NO: 82059 - DNA, 25 bp, probe
tgtaactgtttcatagaagagccct

SEQ ID NO: 82060 - DNA, 25 bp, probe
gccgtaggtttgtaactgtttcata

SEQ ID NO: 82061 - DNA, 25 bp, probe
gtttgtaactgtttcatagaagagc

SEQ ID NO: 82062 - DNA, 25 bp, probe
aggtttgtaactgtttcatagaaga

SEQ ID NO: 82063 - DNA, 25 bp, probe
taactgtttcatagaagagccctgg

SEQ ID NO: 82064 - DNA, 25 bp, probe
ggtttgtaactgtttcatagaagag

SEQ ID NO: 82065 - DNA, 25 bp, probe
aaggtgttcatgtgacttcagtgag

SEQ ID NO: 82066 - DNA, 25 bp, probe
ctggagaagacagtagaatgagcct

SEQ ID NO: 82067 - DNA, 25 bp, probe
tttcatagaagagccctggagaaga

SEQ ID NO: 82068 - DNA, 25 bp, probe
gtttcatagaagagccctggagaag

SEQ ID NO: 82069 - DNA, 25 bp, probe
acagtagaatgagcctatctagttt

SEQ ID NO: 82070 - DNA, 25 bp, probe
cagaaaggtgttcatgtgacttcag

SEQ ID NO: 82071 - DNA, 25 bp, probe
aataaagaagcacgttgatttcacc

SEQ ID NO: 82072 - DNA, 25 bp, probe
gaaaggtgttcatgtgacttcagtg

SEQ ID NO: 82073 - DNA, 25 bp, probe
cattgtgacttatgaggagcaagcc

SEQ ID NO: 82074 - DNA, 25 bp, probe
agaaaggtgttcatgtgacttcagt

SEQ ID NO: 82075 - DNA, 25 bp, probe
ataaagaagcacgttgatttcacca

SEQ ID NO: 82076 - DNA, 25 bp, probe
gtaggtttgtaactgtttcatagaa

SEQ ID NO: 82077 - DNA, 25 bp, probe
tgtttcatagaagagccctggagaa

SEQ ID NO: 82078 - DNA, 25 bp, probe
aaataaagaagcacgttgatttcac

SEQ ID NO: 82079 - DNA, 25 bp, probe
aaaggtgttcatgtgacttcagtga

SEQ ID NO: 82080 - DNA, 25 bp, probe
taaagaagcacgttgatttcaccaa

SEQ ID NO: 82081 - DNA, 25 bp, probe
taggtttgtaactgtttcatagaag

SEQ ID NO: 82082 - DNA, 25 bp, probe
ttcatagaagagccctggagaagac

SEQ ID NO: 82083 - DNA, 25 bp, probe
attgtgacttatgaggagcaagcct

SEQ ID NO: 82084 - DNA, 25 bp, probe
acagaaaggtgttcatgtgacttca

SEQ ID NO: 82085 - DNA, 25 bp, probe
aactgtttcatagaagagccctgga

SEQ ID NO: 82086 - DNA, 25 bp, probe
tcattgtgacttatgaggagcaagc

SEQ ID NO: 82087 - DNA, 25 bp, probe
ctgtttcatagaagagccctggaga

SEQ ID NO: 82088 - DNA, 25 bp, probe
cctggagaagacagtagaatgagcc

SEQ ID NO: 82089 - DNA, 25 bp, probe
caccaaacctggctaatgtttaaat

SEQ ID NO: 82090 - DNA, 25 bp, probe
gactcagtgcagagacagataatat

SEQ ID NO: 82091 - DNA, 25 bp, probe
tgactcagtgcagagacagataata

SEQ ID NO: 82092 - DNA, 25 bp, probe
actcagtgcagagacagataatata

SEQ ID NO: 82093 - DNA, 25 bp, probe
gtgactcagtgcagagacagataat

SEQ ID NO: 82094 - DNA, 25 bp, probe
ctcagtgcagagacagataatatat

SEQ ID NO: 82095 - DNA, 25 bp, probe
gtgtgactcagtgcagagacagata

SEQ ID NO: 82096 - DNA, 25 bp, probe
tgtgactcagtgcagagacagataa

SEQ ID NO: 82097 - DNA, 25 bp, probe
tcagtgcagagacagataatatatt

SEQ ID NO: 82098 - DNA, 25 bp, probe
caacttgggaattttgggaaagaac

SEQ ID NO: 82099 - DNA, 25 bp, probe
cttgggaattttgggaaagaacctt

SEQ ID NO: 82100 - DNA, 25 bp, probe
aacttgggaattttgggaaagaacc

SEQ ID NO: 82101 - DNA, 25 bp, probe
catatcctggcggttgaaaagtttt

SEQ ID NO: 82102 - DNA, 25 bp, probe
acttgggaattttgggaaagaacct

SEQ ID NO: 82103 - DNA, 25 bp, probe
tgggaattttgggaaagaacctttt

SEQ ID NO: 82104 - DNA, 25 bp, probe
ttgggaattttgggaaagaaccttt

SEQ ID NO: 82105 - DNA, 25 bp, probe
agttttctttccggggtttatttta

SEQ ID NO: 82106 - DNA, 25 bp, probe
aagttttctttccggggtttatttt

SEQ ID NO: 82107 - DNA, 25 bp, probe
cagtgcagagacagataatatattt

SEQ ID NO: 82108 - DNA, 25 bp, probe
gttttctttccggggtttattttaa

SEQ ID NO: 82109 - DNA, 25 bp, probe
atatcctggcggttgaaaagttttc

SEQ ID NO: 82110 - DNA, 25 bp, probe
ttttctttccggggtttattttaaa

SEQ ID NO: 82111 - DNA, 25 bp, probe
aaagttttctttccggggtttattt

SEQ ID NO: 82112 - DNA, 25 bp, probe
aaaagttttctttccggggtttatt

SEQ ID NO: 82113 - DNA, 25 bp, probe
gaaaagttttctttccggggtttat

SEQ ID NO: 82114 - DNA, 25 bp, probe
tatcctggcggttgaaaagttttct

SEQ ID NO: 82115 - DNA, 25 bp, probe
ccatatcctggcggttgaaaagttt

SEQ ID NO: 82116 - DNA, 25 bp, probe
tgaaaagttttctttccggggttta

SEQ ID NO: 82117 - DNA, 25 bp, probe
ttgaaaagttttctttccggggttt

SEQ ID NO: 82118 - DNA, 25 bp, probe
ctggcggttgaaaagttttctttcc

SEQ ID NO: 82119 - DNA, 25 bp, probe
cctggcggttgaaaagttttctttc

SEQ ID NO: 82120 - DNA, 25 bp, probe
tttctttccggggtttattttaaaa

SEQ ID NO: 82121 - DNA, 25 bp, probe
atcctggcggttgaaaagttttctt

SEQ ID NO: 82122 - DNA, 25 bp, probe
aaaccaacttgggaattttgggaaa

SEQ ID NO: 82123 - DNA, 25 bp, probe
aaaaccaacttgggaattttgggaa

SEQ ID NO: 82124 - DNA, 25 bp, probe
agtgcagagacagataatatattta

SEQ ID NO: 82125 - DNA, 25 bp, probe
gttgaaaagttttctttccggggtt

SEQ ID NO: 82126 - DNA, 25 bp, probe
ccaacttgggaattttgggaaagaa

SEQ ID NO: 82127 - DNA, 25 bp, probe
tcctggcggttgaaaagttttcttt

SEQ ID NO: 82128 - DNA, 25 bp, probe
tccatatcctggcggttgaaaagtt

SEQ ID NO: 82129 - DNA, 25 bp, probe
aaccaacttgggaattttgggaaag

SEQ ID NO: 82130 - DNA, 25 bp, probe
ctccatatcctggcggttgaaaagt

SEQ ID NO: 82131 - DNA, 25 bp, probe
accaacttgggaattttgggaaaga

SEQ ID NO: 82132 - DNA, 25 bp, probe
ggttgaaaagttttctttccggggt

SEQ ID NO: 82133 - DNA, 25 bp, probe
tggcggttgaaaagttttctttccg

SEQ ID NO: 82134 - DNA, 25 bp, probe
cggttgaaaagttttctttccgggg

SEQ ID NO: 82135 - DNA, 25 bp, probe
ttaatacctcttgtgacagttacgg

SEQ ID NO: 82136 - DNA, 25 bp, probe
cttaatacctcttgtgacagttacg

SEQ ID NO: 82137 - DNA, 25 bp, probe
accttaatacctcttgtgacagtta

SEQ ID NO: 82138 - DNA, 25 bp, probe
ccttaatacctcttgtgacagttac

SEQ ID NO: 82139 - DNA, 25 bp, probe
gagttgtctctgtccacacattatc

SEQ ID NO: 82140 - DNA, 25 bp, probe
caccttaatacctcttgtgacagtt

SEQ ID NO: 82141 - DNA, 25 bp, probe
tctctgtccacacattatcacctac

SEQ ID NO: 82142 - DNA, 25 bp, probe
gtctctgtccacacattatcaccta

SEQ ID NO: 82143 - DNA, 25 bp, probe
taatacctcttgtgacagttacggc

SEQ ID NO: 82144 - DNA, 25 bp, probe
gttgtctctgtccacacattatcac

SEQ ID NO: 82145 - DNA, 25 bp, probe
agttgtctctgtccacacattatca

SEQ ID NO: 82146 - DNA, 25 bp, probe
tgagttgtctctgtccacacattat

SEQ ID NO: 82147 - DNA, 25 bp, probe
gtaagcagcaccttaatacctcttg

SEQ ID NO: 82148 - DNA, 25 bp, probe
taagcagcaccttaatacctcttgt

SEQ ID NO: 82149 - DNA, 25 bp, probe
gataataaatgactgcgttggagag

SEQ ID NO: 82150 - DNA, 25 bp, probe
ctgagttgtctctgtccacacatta

SEQ ID NO: 82151 - DNA, 25 bp, probe
caacagttcctagctcttgacttag

SEQ ID NO: 82152 - DNA, 25 bp, probe
ataataaatgactgcgttggagagg

SEQ ID NO: 82153 - DNA, 25 bp, probe
accaaagttacatttcctgacagat

SEQ ID NO: 82154 - DNA, 25 bp, probe
ttgtatcaacagttcctagctcttg

SEQ ID NO: 82155 - DNA, 25 bp, probe
caaagttacatttcctgacagatgg

SEQ ID NO: 82156 - DNA, 25 bp, probe
ccaaagttacatttcctgacagatg

SEQ ID NO: 82157 - DNA, 25 bp, probe
cgataataaatgactgcgttggaga

SEQ ID NO: 82158 - DNA, 25 bp, probe
ccattctcctaagtaaagcctgaag

SEQ ID NO: 82159 - DNA, 25 bp, probe
ttgtctctgtccacacattatcacc

SEQ ID NO: 82160 - DNA, 25 bp, probe
ttacatttcctgacagatggctaag

SEQ ID NO: 82161 - DNA, 25 bp, probe
aaaccaaagttacatttcctgacag

SEQ ID NO: 82162 - DNA, 25 bp, probe
agcaccttaatacctcttgtgacag

SEQ ID NO: 82163 - DNA, 25 bp, probe
tccattctcctaagtaaagcctgaa

SEQ ID NO: 82164 - DNA, 25 bp, probe
aaccaaagttacatttcctgacaga

SEQ ID NO: 82165 - DNA, 25 bp, probe
gttacatttcctgacagatggctaa

SEQ ID NO: 82166 - DNA, 25 bp, probe
aattcaacacagacacacatatccc

SEQ ID NO: 82167 - DNA, 25 bp, probe
ctagtaagtagatgatcccgttgag

SEQ ID NO: 82168 - DNA, 25 bp, probe
ctctgtccacacattatcacctacg

SEQ ID NO: 82169 - DNA, 25 bp, probe
tacatttcctgacagatggctaaga

SEQ ID NO: 82170 - DNA, 25 bp, probe
tagtaagtagatgatcccgttgagg

SEQ ID NO: 82171 - DNA, 25 bp, probe
cctagtaagtagatgatcccgttga

SEQ ID NO: 82172 - DNA, 25 bp, probe
gtccattctcctaagtaaagcctga

SEQ ID NO: 82173 - DNA, 25 bp, probe
gcaccttaatacctcttgtgacagt

SEQ ID NO: 82174 - DNA, 25 bp, probe
cagcaccttaatacctcttgtgaca

SEQ ID NO: 82175 - DNA, 25 bp, probe
agttacatttcctgacagatggcta

SEQ ID NO: 82176 - DNA, 25 bp, probe
attcaacacagacacacatatccct

SEQ ID NO: 82177 - DNA, 25 bp, probe
aaagttacatttcctgacagatggc

SEQ ID NO: 82178 - DNA, 25 bp, probe
gaattcaacacagacacacatatcc

SEQ ID NO: 82179 - DNA, 25 bp, probe
ggcaagtatcctaagttagcacatt

SEQ ID NO: 82180 - DNA, 25 bp, probe
attgatgagccttgaattaaccatg

SEQ ID NO: 82181 - DNA, 25 bp, probe
aattgatgagccttgaattaaccat

SEQ ID NO: 82182 - DNA, 25 bp, probe
ctaacatcttgatgccaatcttcac

SEQ ID NO: 82183 - DNA, 25 bp, probe
taacatcttgatgccaatcttcaca

SEQ ID NO: 82184 - DNA, 25 bp, probe
tgtcatcttattgctgatacattca

SEQ ID NO: 82185 - DNA, 25 bp, probe
tgattgtcatcttattgctgataca

SEQ ID NO: 82186 - DNA, 25 bp, probe
tgctaacatcttgatgccaatcttc

SEQ ID NO: 82187 - DNA, 25 bp, probe
ctgctaacatcttgatgccaatctt

SEQ ID NO: 82188 - DNA, 25 bp, probe
gctaacatcttgatgccaatcttca

SEQ ID NO: 82189 - DNA, 25 bp, probe
aacatcttgatgccaatcttcacag

SEQ ID NO: 82190 - DNA, 25 bp, probe
ttgatgagccttgaattaaccatgc

SEQ ID NO: 82191 - DNA, 25 bp, probe
ttgattgtcatcttattgctgatac

SEQ ID NO: 82192 - DNA, 25 bp, probe
agaaacatcaggtccttaaatacga

SEQ ID NO: 82193 - DNA, 25 bp, probe
gcaagtatcctaagttagcacattt

SEQ ID NO: 82194 - DNA, 25 bp, probe
tgttacagaagatggttactagatt

SEQ ID NO: 82195 - DNA, 25 bp, probe
ttgttacagaagatggttactagat

SEQ ID NO: 82196 - DNA, 25 bp, probe
gtcatcttattgctgatacattcat

SEQ ID NO: 82197 - DNA, 25 bp, probe
ttgtcatcttattgctgatacattc

SEQ ID NO: 82198 - DNA, 25 bp, probe
gaaacatcaggtccttaaatacgat

SEQ ID NO: 82199 - DNA, 25 bp, probe
tcaggtccttaaatacgatgaacat

SEQ ID NO: 82200 - DNA, 25 bp, probe
atcaggtccttaaatacgatgaaca

SEQ ID NO: 82201 - DNA, 25 bp, probe
gattgtcatcttattgctgatacat

SEQ ID NO: 82202 - DNA, 25 bp, probe
caggtccttaaatacgatgaacatg

SEQ ID NO: 82203 - DNA, 25 bp, probe
atcttcacagcattctttgattgtc

SEQ ID NO: 82204 - DNA, 25 bp, probe
cacagcattctttgattgtcatctt

SEQ ID NO: 82205 - DNA, 25 bp, probe
ttcacagcattctttgattgtcatc

SEQ ID NO: 82206 - DNA, 25 bp, probe
cttcacagcattctttgattgtcat

SEQ ID NO: 82207 - DNA, 25 bp, probe
tagaaacatcaggtccttaaatacg

SEQ ID NO: 82208 - DNA, 25 bp, probe
gggaataattgatgagccttgaatt

SEQ ID NO: 82209 - DNA, 25 bp, probe
cagtatgctgctaacatcttgatgc

SEQ ID NO: 82210 - DNA, 25 bp, probe
tctttgattgtcatcttattgctga

SEQ ID NO: 82211 - DNA, 25 bp, probe
aggtccttaaatacgatgaacatgg

SEQ ID NO: 82212 - DNA, 25 bp, probe
gatgaacatgggatacaaaggaatt

SEQ ID NO: 82213 - DNA, 25 bp, probe
atacgatgaacatgggatacaaagg

SEQ ID NO: 82214 - DNA, 25 bp, probe
taattgatgagccttgaattaacca

SEQ ID NO: 82215 - DNA, 25 bp, probe
aatacgatgaacatgggatacaaag

SEQ ID NO: 82216 - DNA, 25 bp, probe
tatgctgctaacatcttgatgccaa

SEQ ID NO: 82217 - DNA, 25 bp, probe
acagcattctttgattgtcatctta

SEQ ID NO: 82218 - DNA, 25 bp, probe
tcacagcattctttgattgtcatct

SEQ ID NO: 82219 - DNA, 25 bp, probe
cgatgaacatgggatacaaaggaat

SEQ ID NO: 82220 - DNA, 25 bp, probe
tcttcacagcattctttgattgtca

SEQ ID NO: 82221 - DNA, 25 bp, probe
aaatacgatgaacatgggatacaaa

SEQ ID NO: 82222 - DNA, 25 bp, probe
tgaagacctaaactttcctaaatgt

SEQ ID NO: 82223 - DNA, 25 bp, probe
tctgagaattacaatgtgagaaccg

SEQ ID NO: 82224 - DNA, 25 bp, probe
acctctgagaattacaatgtgagaa

SEQ ID NO: 82225 - DNA, 25 bp, probe
ctctgagaattacaatgtgagaacc

SEQ ID NO: 82226 - DNA, 25 bp, probe
cctctgagaattacaatgtgagaac

SEQ ID NO: 82227 - DNA, 25 bp, probe
cacctctgagaattacaatgtgaga

SEQ ID NO: 82228 - DNA, 25 bp, probe
ctgagaattacaatgtgagaaccgc

SEQ ID NO: 82229 - DNA, 25 bp, probe
tgagaattacaatgtgagaaccgct

SEQ ID NO: 82230 - DNA, 25 bp, probe
tttcacctctgagaattacaatgtg

SEQ ID NO: 82231 - DNA, 25 bp, probe
agcaatttctgtatagttttcacct

SEQ ID NO: 82232 - DNA, 25 bp, probe
ttcacctctgagaattacaatgtga

SEQ ID NO: 82233 - DNA, 25 bp, probe
gcaatttctgtatagttttcacctc

SEQ ID NO: 82234 - DNA, 25 bp, probe
tcacctctgagaattacaatgtgag

SEQ ID NO: 82235 - DNA, 25 bp, probe
tctgtatagttttcacctctgagaa

SEQ ID NO: 82236 - DNA, 25 bp, probe
ttctgtatagttttcacctctgaga

SEQ ID NO: 82237 - DNA, 25 bp, probe
tttctagagattcaaactgctccag

SEQ ID NO: 82238 - DNA, 25 bp, probe
ttttcacctctgagaattacaatgt

SEQ ID NO: 82239 - DNA, 25 bp, probe
gttttcacctctgagaattacaatg

SEQ ID NO: 82240 - DNA, 25 bp, probe
agttttcacctctgagaattacaat

SEQ ID NO: 82241 - DNA, 25 bp, probe
tttctgtatagttttcacctctgag

SEQ ID NO: 82242 - DNA, 25 bp, probe
gctccagcaatttctgtatagtttt

SEQ ID NO: 82243 - DNA, 25 bp, probe
cagcaatttctgtatagttttcacc

SEQ ID NO: 82244 - DNA, 25 bp, probe
ccagcaatttctgtatagttttcac

SEQ ID NO: 82245 - DNA, 25 bp, probe
tccagcaatttctgtatagttttca

SEQ ID NO: 82246 - DNA, 25 bp, probe
ctgtatagttttcacctctgagaat

SEQ ID NO: 82247 - DNA, 25 bp, probe
tgctccagcaatttctgtatagttt

SEQ ID NO: 82248 - DNA, 25 bp, probe
aaactgctccagcaatttctgtata

SEQ ID NO: 82249 - DNA, 25 bp, probe
ctgctccagcaatttctgtatagtt

SEQ ID NO: 82250 - DNA, 25 bp, probe
aactgctccagcaatttctgtatag

SEQ ID NO: 82251 - DNA, 25 bp, probe
tagttttcacctctgagaattacaa

SEQ ID NO: 82252 - DNA, 25 bp, probe
ctccagcaatttctgtatagttttc

SEQ ID NO: 82253 - DNA, 25 bp, probe
atttctgtatagttttcacctctga

SEQ ID NO: 82254 - DNA, 25 bp, probe
atagttttcacctctgagaattaca

SEQ ID NO: 82255 - DNA, 25 bp, probe
tgtatagttttcacctctgagaatt

SEQ ID NO: 82256 - DNA, 25 bp, probe
aatttctgtatagttttcacctctg

SEQ ID NO: 82257 - DNA, 25 bp, probe
caatttctgtatagttttcacctct

SEQ ID NO: 82258 - DNA, 25 bp, probe
actgctccagcaatttctgtatagt

SEQ ID NO: 82259 - DNA, 25 bp, probe
caaactgctccagcaatttctgtat

SEQ ID NO: 82260 - DNA, 25 bp, probe
ttctagagattcaaactgctccagc

SEQ ID NO: 82261 - DNA, 25 bp, probe
tagagattcaaactgctccagcaat

SEQ ID NO: 82262 - DNA, 25 bp, probe
gattcaaactgctccagcaatttct

SEQ ID NO: 82263 - DNA, 25 bp, probe
agattcaaactgctccagcaatttc

SEQ ID NO: 82264 - DNA, 25 bp, probe
gagattcaaactgctccagcaattt

SEQ ID NO: 82265 - DNA, 25 bp, probe
attcaaactgctccagcaatttctg

SEQ ID NO: 82266 - DNA, 25 bp, probe
gggaggtgaatgttttctagagatt

SEQ ID NO: 82267 - DNA, 25 bp, probe
gagcaagaacaaggtgacacatatt

SEQ ID NO: 82268 - DNA, 25 bp, probe
agcaagaacaaggtgacacatattc

SEQ ID NO: 82269 - DNA, 25 bp, probe
tgagcaagaacaaggtgacacatat

SEQ ID NO: 82270 - DNA, 25 bp, probe
tttcgttaataaagggcaacttagc

SEQ ID NO: 82271 - DNA, 25 bp, probe
ttgagcaagaacaaggtgacacata

SEQ ID NO: 82272 - DNA, 25 bp, probe
caagaacaaggtgacacatattctg

SEQ ID NO: 82273 - DNA, 25 bp, probe
aagaacaaggtgacacatattctgt

SEQ ID NO: 82274 - DNA, 25 bp, probe
gagaagcatgaggtccatcagtatc

SEQ ID NO: 82275 - DNA, 25 bp, probe
attgagcaagaacaaggtgacacat

SEQ ID NO: 82276 - DNA, 25 bp, probe
tttatctctggtttgtgttctccgt

SEQ ID NO: 82277 - DNA, 25 bp, probe
gcaagaacaaggtgacacatattct

SEQ ID NO: 82278 - DNA, 25 bp, probe
tatgttggagggagttaaatacctg

SEQ ID NO: 82279 - DNA, 25 bp, probe
cctatgttggagggagttaaatacc

SEQ ID NO: 82280 - DNA, 25 bp, probe
ctatgttggagggagttaaatacct

SEQ ID NO: 82281 - DNA, 25 bp, probe
aattgagcaagaacaaggtgacaca

SEQ ID NO: 82282 - DNA, 25 bp, probe
gcctatgttggagggagttaaatac

SEQ ID NO: 82283 - DNA, 25 bp, probe
tgagaagcatgaggtccatcagtat

SEQ ID NO: 82284 - DNA, 25 bp, probe
atgttggagggagttaaatacctgt

SEQ ID NO: 82285 - DNA, 25 bp, probe
ttatctctggtttgtgttctccgtg

SEQ ID NO: 82286 - DNA, 25 bp, probe
ttgagaagcatgaggtccatcagta

SEQ ID NO: 82287 - DNA, 25 bp, probe
ggaattgaccgaaagctctatgttt

SEQ ID NO: 82288 - DNA, 25 bp, probe
tgttggagggagttaaatacctgtg

SEQ ID NO: 82289 - DNA, 25 bp, probe
gttttatctctggtttgtgttctcc

SEQ ID NO: 82290 - DNA, 25 bp, probe
ggttttatctctggtttgtgttctc

SEQ ID NO: 82291 - DNA, 25 bp, probe
gaacaattgagcaagaacaaggtga

SEQ ID NO: 82292 - DNA, 25 bp, probe
tggaattgaccgaaagctctatgtt

SEQ ID NO: 82293 - DNA, 25 bp, probe
gggttttatctctggtttgtgttct

SEQ ID NO: 82294 - DNA, 25 bp, probe
tgttttcgttaataaagggcaactt

SEQ ID NO: 82295 - DNA, 25 bp, probe
atgttttcgttaataaagggcaact

SEQ ID NO: 82296 - DNA, 25 bp, probe
ttttatctctggtttgtgttctccg

SEQ ID NO: 82297 - DNA, 25 bp, probe
agaagcatgaggtccatcagtatcg

SEQ ID NO: 82298 - DNA, 25 bp, probe
tctatgttttcgttaataaagggca

SEQ ID NO: 82299 - DNA, 25 bp, probe
aacaattgagcaagaacaaggtgac

SEQ ID NO: 82300 - DNA, 25 bp, probe
tgggttttatctctggtttgtgttc

SEQ ID NO: 82301 - DNA, 25 bp, probe
gtgggttttatctctggtttgtgtt

SEQ ID NO: 82302 - DNA, 25 bp, probe
ctctatgttttcgttaataaagggc

SEQ ID NO: 82303 - DNA, 25 bp, probe
gctctatgttttcgttaataaaggg

SEQ ID NO: 82304 - DNA, 25 bp, probe
ctatgttttcgttaataaagggcaa

SEQ ID NO: 82305 - DNA, 25 bp, probe
gaacaaggtgacacatattctgtct

SEQ ID NO: 82306 - DNA, 25 bp, probe
agaacaaggtgacacatattctgtc

SEQ ID NO: 82307 - DNA, 25 bp, probe
tatgttttcgttaataaagggcaac

SEQ ID NO: 82308 - DNA, 25 bp, probe
aacaaggtgacacatattctgtctg

SEQ ID NO: 82309 - DNA, 25 bp, probe
gttttcgttaataaagggcaactta

SEQ ID NO: 82310 - DNA, 25 bp, probe
gtggaattgaccgaaagctctatgt

SEQ ID NO: 82311 - DNA, 25 bp, probe
ttactgcttccttcataactgttca

SEQ ID NO: 82312 - DNA, 25 bp, probe
tactgcttccttcataactgttcac

SEQ ID NO: 82313 - DNA, 25 bp, probe
acaggcacagtaagaataattcaga

SEQ ID NO: 82314 - DNA, 25 bp, probe
gctacaggcacagtaagaataattc

SEQ ID NO: 82315 - DNA, 25 bp, probe
acagtaagaataattcagagcggta

SEQ ID NO: 82316 - DNA, 25 bp, probe
atagagccatatcatacactgaagc

SEQ ID NO: 82317 - DNA, 25 bp, probe
caggcacagtaagaataattcagag

SEQ ID NO: 82318 - DNA, 25 bp, probe
cacagtaagaataattcagagcggt

SEQ ID NO: 82319 - DNA, 25 bp, probe
aggcacagtaagaataattcagagc

SEQ ID NO: 82320 - DNA, 25 bp, probe
ctgcttccttcataactgttcacaa

SEQ ID NO: 82321 - DNA, 25 bp, probe
tagagccatatcatacactgaagca

SEQ ID NO: 82322 - DNA, 25 bp, probe
cagtaagaataattcagagcggtac

SEQ ID NO: 82323 - DNA, 25 bp, probe
cacacagttatctctaggagttgac

SEQ ID NO: 82324 - DNA, 25 bp, probe
gacacacagttatctctaggagttg

SEQ ID NO: 82325 - DNA, 25 bp, probe
tacaggcacagtaagaataattcag

SEQ ID NO: 82326 - DNA, 25 bp, probe
ctacaggcacagtaagaataattca

SEQ ID NO: 82327 - DNA, 25 bp, probe
acacacagttatctctaggagttga

SEQ ID NO: 82328 - DNA, 25 bp, probe
tgacacacagttatctctaggagtt

SEQ ID NO: 82329 - DNA, 25 bp, probe
agagccatatcatacactgaagcaa

SEQ ID NO: 82330 - DNA, 25 bp, probe
taagaataattcagagcggtactgg

SEQ ID NO: 82331 - DNA, 25 bp, probe
gttactgcttccttcataactgttc

SEQ ID NO: 82332 - DNA, 25 bp, probe
agctacaggcacagtaagaataatt

SEQ ID NO: 82333 - DNA, 25 bp, probe
actgcttccttcataactgttcaca

SEQ ID NO: 82334 - DNA, 25 bp, probe
gcacagtaagaataattcagagcgg

SEQ ID NO: 82335 - DNA, 25 bp, probe
ggcacagtaagaataattcagagcg

SEQ ID NO: 82336 - DNA, 25 bp, probe
gagctacaggcacagtaagaataat

SEQ ID NO: 82337 - DNA, 25 bp, probe
gtaagaataattcagagcggtactg

SEQ ID NO: 82338 - DNA, 25 bp, probe
acacagttatctctaggagttgacg

SEQ ID NO: 82339 - DNA, 25 bp, probe
gtgacacacagttatctctaggagt

SEQ ID NO: 82340 - DNA, 25 bp, probe
ctggaagcctgttggttagtgtatt

SEQ ID NO: 82341 - DNA, 25 bp, probe
aaagaacacagagaaatcagagagt

SEQ ID NO: 82342 - DNA, 25 bp, probe
tcaaagaacacagagaaatcagaga

SEQ ID NO: 82343 - DNA, 25 bp, probe
caaagaacacagagaaatcagagag

SEQ ID NO: 82344 - DNA, 25 bp, probe
tgagctacaggcacagtaagaataa

SEQ ID NO: 82345 - DNA, 25 bp, probe
ggaagcctgttggttagtgtattta

SEQ ID NO: 82346 - DNA, 25 bp, probe
agtaagaataattcagagcggtact

SEQ ID NO: 82347 - DNA, 25 bp, probe
tcctatagagccatatcatacactg

SEQ ID NO: 82348 - DNA, 25 bp, probe
gaagcctgttggttagtgtatttat

SEQ ID NO: 82349 - DNA, 25 bp, probe
ctttctttgggaactctgtctttct

SEQ ID NO: 82350 - DNA, 25 bp, probe
taggtattaagaggctattgggttt

SEQ ID NO: 82351 - DNA, 25 bp, probe
ttaggtattaagaggctattgggtt

SEQ ID NO: 82352 - DNA, 25 bp, probe
tttaggtattaagaggctattgggt

SEQ ID NO: 82353 - DNA, 25 bp, probe
tttctttgggaactctgtctttctc

SEQ ID NO: 82354 - DNA, 25 bp, probe
tatagagccatatcatacactgaag

SEQ ID NO: 82355 - DNA, 25 bp, probe
ttcttcttctcttacttccctctca

SEQ ID NO: 82356 - DNA, 25 bp, probe
tttcttcttctcttacttccctctc

SEQ ID NO: 82357 - DNA, 25 bp, probe
tcttcttctcttacttccctctcac

SEQ ID NO: 82358 - DNA, 25 bp, probe
ttcttctcttacttccctctcacag

SEQ ID NO: 82359 - DNA, 25 bp, probe
cttcttctcttacttccctctcaca

SEQ ID NO: 82360 - DNA, 25 bp, probe
atttcttcttctcttacttccctct

SEQ ID NO: 82361 - DNA, 25 bp, probe
tcttctcttacttccctctcacaga

SEQ ID NO: 82362 - DNA, 25 bp, probe
tatttcttcttctcttacttccctc

SEQ ID NO: 82363 - DNA, 25 bp, probe
gcttatttcttcttctcttacttcc

SEQ ID NO: 82364 - DNA, 25 bp, probe
ttatttcttcttctcttacttccct

SEQ ID NO: 82365 - DNA, 25 bp, probe
cttatttcttcttctcttacttccc

SEQ ID NO: 82366 - DNA, 25 bp, probe
tgcttatttcttcttctcttacttc

SEQ ID NO: 82367 - DNA, 25 bp, probe
aaattccaccaacatccagaccaaa

SEQ ID NO: 82368 - DNA, 25 bp, probe
ttctcttacttccctctcacagaaa

SEQ ID NO: 82369 - DNA, 25 bp, probe
caatgtaggaacccaaaatgcttat

SEQ ID NO: 82370 - DNA, 25 bp, probe
aacagaactaaagaagaaaaccgac

SEQ ID NO: 82371 - DNA, 25 bp, probe
caacagaactaaagaagaaaaccga

SEQ ID NO: 82372 - DNA, 25 bp, probe
tcaacagaactaaagaagaaaaccg

SEQ ID NO: 82373 - DNA, 25 bp, probe
gcctcaacagaactaaagaagaaaa

SEQ ID NO: 82374 - DNA, 25 bp, probe
cttctcttacttccctctcacagaa

SEQ ID NO: 82375 - DNA, 25 bp, probe
gaaaagtcttacgaatggggaaatt

SEQ ID NO: 82376 - DNA, 25 bp, probe
aatgtaggaacccaaaatgcttatt

SEQ ID NO: 82377 - DNA, 25 bp, probe
gaaattccaccaacatccagaccaa

SEQ ID NO: 82378 - DNA, 25 bp, probe
agaaaagtcttacgaatggggaaat

SEQ ID NO: 82379 - DNA, 25 bp, probe
ctctcacagaaaagtcttacgaatg

SEQ ID NO: 82380 - DNA, 25 bp, probe
ctcttacttccctctcacagaaaag

SEQ ID NO: 82381 - DNA, 25 bp, probe
acagaactaaagaagaaaaccgacc

SEQ ID NO: 82382 - DNA, 25 bp, probe
cctctcacagaaaagtcttacgaat

SEQ ID NO: 82383 - DNA, 25 bp, probe
tctcacagaaaagtcttacgaatgg

SEQ ID NO: 82384 - DNA, 25 bp, probe
cttccctctcacagaaaagtcttac

SEQ ID NO: 82385 - DNA, 25 bp, probe
tctcttacttccctctcacagaaaa

SEQ ID NO: 82386 - DNA, 25 bp, probe
ccaatgtaggaacccaaaatgctta

SEQ ID NO: 82387 - DNA, 25 bp, probe
gaactaaagaagaaaaccgaccctt

SEQ ID NO: 82388 - DNA, 25 bp, probe
cagaaaagtcttacgaatggggaaa

SEQ ID NO: 82389 - DNA, 25 bp, probe
ctcaacagaactaaagaagaaaacc

SEQ ID NO: 82390 - DNA, 25 bp, probe
cctcaacagaactaaagaagaaaac

SEQ ID NO: 82391 - DNA, 25 bp, probe
agaactaaagaagaaaaccgaccct

SEQ ID NO: 82392 - DNA, 25 bp, probe
cagaactaaagaagaaaaccgaccc

SEQ ID NO: 82393 - DNA, 25 bp, probe
ggcctcaacagaactaaagaagaaa

SEQ ID NO: 82394 - DNA, 25 bp, probe
atgcttatttcttcttctcttactt

SEQ ID NO: 82395 - DNA, 25 bp, probe
aatgcttatttcttcttctcttact

SEQ ID NO: 82396 - DNA, 25 bp, probe
ggaacccaaaatgcttatttcttct

SEQ ID NO: 82397 - DNA, 25 bp, probe
aggaacccaaaatgcttatttcttc

SEQ ID NO: 82398 - DNA, 25 bp, probe
tgtaggaacccaaaatgcttatttc

SEQ ID NO: 82399 - DNA, 25 bp, probe
tatgaattaaggtaagaggtgtggc

SEQ ID NO: 82400 - DNA, 25 bp, probe
gttgaccaattatagttcggctctt

SEQ ID NO: 82401 - DNA, 25 bp, probe
caattatagttcggctcttgactga

SEQ ID NO: 82402 - DNA, 25 bp, probe
aattatagttcggctcttgactgag

SEQ ID NO: 82403 - DNA, 25 bp, probe
ttgaccaattatagttcggctcttg

SEQ ID NO: 82404 - DNA, 25 bp, probe
atgaattaaggtaagaggtgtggct

SEQ ID NO: 82405 - DNA, 25 bp, probe
ttatgaattaaggtaagaggtgtgg

SEQ ID NO: 82406 - DNA, 25 bp, probe
attatagttcggctcttgactgaga

SEQ ID NO: 82407 - DNA, 25 bp, probe
gaccaattatagttcggctcttgac

SEQ ID NO: 82408 - DNA, 25 bp, probe
ttatagttcggctcttgactgagaa

SEQ ID NO: 82409 - DNA, 25 bp, probe
tgaattaaggtaagaggtgtggctt

SEQ ID NO: 82410 - DNA, 25 bp, probe
ccaattatagttcggctcttgactg

SEQ ID NO: 82411 - DNA, 25 bp, probe
tgaccaattatagttcggctcttga

SEQ ID NO: 82412 - DNA, 25 bp, probe
tatagttcggctcttgactgagaag

SEQ ID NO: 82413 - DNA, 25 bp, probe
accaattatagttcggctcttgact

SEQ ID NO: 82414 - DNA, 25 bp, probe
ttccagccgttgaccaattatagtt

SEQ ID NO: 82415 - DNA, 25 bp, probe
tccagccgttgaccaattatagttc

SEQ ID NO: 82416 - DNA, 25 bp, probe
ggatgatgagaagaaatgatttggg

SEQ ID NO: 82417 - DNA, 25 bp, probe
gggatgatgagaagaaatgatttgg

SEQ ID NO: 82418 - DNA, 25 bp, probe
cgttgaccaattatagttcggctct

SEQ ID NO: 82419 - DNA, 25 bp, probe
gatgatgagaagaaatgatttggga

SEQ ID NO: 82420 - DNA, 25 bp, probe
tgatgagaagaaatgatttgggaaa

SEQ ID NO: 82421 - DNA, 25 bp, probe
gaattaaggtaagaggtgtggcttt

SEQ ID NO: 82422 - DNA, 25 bp, probe
atgatgagaagaaatgatttgggaa

SEQ ID NO: 82423 - DNA, 25 bp, probe
cactggcattaaagagtcatagaaa

SEQ ID NO: 82424 - DNA, 25 bp, probe
gcactggcattaaagagtcatagaa

SEQ ID NO: 82425 - DNA, 25 bp, probe
tctcatttaccatcatgtatccagt

SEQ ID NO: 82426 - DNA, 25 bp, probe
caaatgttgctgacaaacttatccc

SEQ ID NO: 82427 - DNA, 25 bp, probe
ccaaatgttgctgacaaacttatcc

SEQ ID NO: 82428 - DNA, 25 bp, probe
atgttgctgacaaacttatcccaaa

SEQ ID NO: 82429 - DNA, 25 bp, probe
aatgttgctgacaaacttatcccaa

SEQ ID NO: 82430 - DNA, 25 bp, probe
aaatgttgctgacaaacttatccca

SEQ ID NO: 82431 - DNA, 25 bp, probe
gggattcaaattctagtaataggct

SEQ ID NO: 82432 - DNA, 25 bp, probe
atagttcggctcttgactgagaagt

SEQ ID NO: 82433 - DNA, 25 bp, probe
aatgagaattaagccagtgcctgag

SEQ ID NO: 82434 - DNA, 25 bp, probe
gccaaatgttgctgacaaacttatc

SEQ ID NO: 82435 - DNA, 25 bp, probe
tagttcggctcttgactgagaagtt

SEQ ID NO: 82436 - DNA, 25 bp, probe
atttaccatcatgtatccagtagtg

SEQ ID NO: 82437 - DNA, 25 bp, probe
tttccagccgttgaccaattatagt

SEQ ID NO: 82438 - DNA, 25 bp, probe
catttaccatcatgtatccagtagt

SEQ ID NO: 82439 - DNA, 25 bp, probe
atctcatttaccatcatgtatccag

SEQ ID NO: 82440 - DNA, 25 bp, probe
tcttgactgagaagttgtggtggaa

SEQ ID NO: 82441 - DNA, 25 bp, probe
ccagccgttgaccaattatagttcg

SEQ ID NO: 82442 - DNA, 25 bp, probe
agaacaatctcatttaccatcatgt

SEQ ID NO: 82443 - DNA, 25 bp, probe
catcctgtcctgctatatgaagatc

SEQ ID NO: 82444 - DNA, 25 bp, probe
ctgctatatgaagatcacctggaag

SEQ ID NO: 82445 - DNA, 25 bp, probe
atcctgtcctgctatatgaagatca

SEQ ID NO: 82446 - DNA, 25 bp, probe
ctgtcctgctatatgaagatcacct

SEQ ID NO: 82447 - DNA, 25 bp, probe
tcctgtcctgctatatgaagatcac

SEQ ID NO: 82448 - DNA, 25 bp, probe
cctgctatatgaagatcacctggaa

SEQ ID NO: 82449 - DNA, 25 bp, probe
tgtcctgctatatgaagatcacctg

SEQ ID NO: 82450 - DNA, 25 bp, probe
ctatatgaagatcacctggaagctg

SEQ ID NO: 82451 - DNA, 25 bp, probe
tatatgaagatcacctggaagctgt

SEQ ID NO: 82452 - DNA, 25 bp, probe
gtcctgctatatgaagatcacctgg

SEQ ID NO: 82453 - DNA, 25 bp, probe
cctgtcctgctatatgaagatcacc

SEQ ID NO: 82454 - DNA, 25 bp, probe
tcatcctgtcctgctatatgaagat

SEQ ID NO: 82455 - DNA, 25 bp, probe
atcatcctgtcctgctatatgaaga

SEQ ID NO: 82456 - DNA, 25 bp, probe
gatcatcctgtcctgctatatgaag

SEQ ID NO: 82457 - DNA, 25 bp, probe
tcctgctatatgaagatcacctgga

SEQ ID NO: 82458 - DNA, 25 bp, probe
catgaacatgaactgtggcattacc

SEQ ID NO: 82459 - DNA, 25 bp, probe
ctaccacctcaacatcaagcagttc

SEQ ID NO: 82460 - DNA, 25 bp, probe
ggatcatcctgtcctgctatatgaa

SEQ ID NO: 82461 - DNA, 25 bp, probe
atatgaagatcacctggaagctgtg

SEQ ID NO: 82462 - DNA, 25 bp, probe
tgctatatgaagatcacctggaagc

SEQ ID NO: 82463 - DNA, 25 bp, probe
gctatatgaagatcacctggaagct

SEQ ID NO: 82464 - DNA, 25 bp, probe
taccacctcaacatcaagcagttca

SEQ ID NO: 82465 - DNA, 25 bp, probe
accacctcaacatcaagcagttcat

SEQ ID NO: 82466 - DNA, 25 bp, probe
cctaccacctcaacatcaagcagtt

SEQ ID NO: 82467 - DNA, 25 bp, probe
cacctcaacatcaagcagttcatgg

SEQ ID NO: 82468 - DNA, 25 bp, probe
ccacctcaacatcaagcagttcatg

SEQ ID NO: 82469 - DNA, 25 bp, probe
atgaacatgaactgtggcattaccc

SEQ ID NO: 82470 - DNA, 25 bp, probe
ctcatgaacatgaactgtggcatta

SEQ ID NO: 82471 - DNA, 25 bp, probe
tcatgaacatgaactgtggcattac

SEQ ID NO: 82472 - DNA, 25 bp, probe
gggatcatcctgtcctgctatatga

SEQ ID NO: 82473 - DNA, 25 bp, probe
tatgaagatcacctggaagctgtgc

SEQ ID NO: 82474 - DNA, 25 bp, probe
cctcatgaacatgaactgtggcatt

SEQ ID NO: 82475 - DNA, 25 bp, probe
ggggatcatcctgtcctgctatatg

SEQ ID NO: 82476 - DNA, 25 bp, probe
tggggatcatcctgtcctgctatat

SEQ ID NO: 82477 - DNA, 25 bp, probe
ctttcttactgtcccttcaggccac

SEQ ID NO: 82478 - DNA, 25 bp, probe
gtggggatcatcctgtcctgctata

SEQ ID NO: 82479 - DNA, 25 bp, probe
ttctgctatctctacattccattga

SEQ ID NO: 82480 - DNA, 25 bp, probe
gttctgctatctctacattccattg

SEQ ID NO: 82481 - DNA, 25 bp, probe
agttctgctatctctacattccatt

SEQ ID NO: 82482 - DNA, 25 bp, probe
tctgctatctctacattccattgaa

SEQ ID NO: 82483 - DNA, 25 bp, probe
cgattcttaataagtgagttctgct

SEQ ID NO: 82484 - DNA, 25 bp, probe
gagttctgctatctctacattccat

SEQ ID NO: 82485 - DNA, 25 bp, probe
agtgagttctgctatctctacattc

SEQ ID NO: 82486 - DNA, 25 bp, probe
gtgagttctgctatctctacattcc

SEQ ID NO: 82487 - DNA, 25 bp, probe
tgagttctgctatctctacattcca

SEQ ID NO: 82488 - DNA, 25 bp, probe
aagtgagttctgctatctctacatt

SEQ ID NO: 82489 - DNA, 25 bp, probe
gattctccttgatattaccaacaca

SEQ ID NO: 82490 - DNA, 25 bp, probe
ttctccttgatattaccaacacatt

SEQ ID NO: 82491 - DNA, 25 bp, probe
taagtgagttctgctatctctacat

SEQ ID NO: 82492 - DNA, 25 bp, probe
ataagtgagttctgctatctctaca

SEQ ID NO: 82493 - DNA, 25 bp, probe
attctccttgatattaccaacacat

SEQ ID NO: 82494 - DNA, 25 bp, probe
tcgattcttaataagtgagttctgc

SEQ ID NO: 82495 - DNA, 25 bp, probe
aataagtgagttctgctatctctac

SEQ ID NO: 82496 - DNA, 25 bp, probe
tacttctttcctacctgatagcatc

SEQ ID NO: 82497 - DNA, 25 bp, probe
ctgctatctctacattccattgaat

SEQ ID NO: 82498 - DNA, 25 bp, probe
atacttctttcctacctgatagcat

SEQ ID NO: 82499 - DNA, 25 bp, probe
agcattagtctgacagtacaatgtt

SEQ ID NO: 82500 - DNA, 25 bp, probe
aagcattagtctgacagtacaatgt

SEQ ID NO: 82501 - DNA, 25 bp, probe
gctcgattcttaataagtgagttct

SEQ ID NO: 82502 - DNA, 25 bp, probe
agctcgattcttaataagtgagttc

SEQ ID NO: 82503 - DNA, 25 bp, probe
gaagctcgattcttaataagtgagt

SEQ ID NO: 82504 - DNA, 25 bp, probe
tgctatctctacattccattgaatt

SEQ ID NO: 82505 - DNA, 25 bp, probe
tcttaataagtgagttctgctatct

SEQ ID NO: 82506 - DNA, 25 bp, probe
ccttctatgactggaggcattactg

SEQ ID NO: 82507 - DNA, 25 bp, probe
ggaaagcattagtctgacagtacaa

SEQ ID NO: 82508 - DNA, 25 bp, probe
tatacttctttcctacctgatagca

SEQ ID NO: 82509 - DNA, 25 bp, probe
gaaagcattagtctgacagtacaat

SEQ ID NO: 82510 - DNA, 25 bp, probe
tatctcacactgaatctttcctaca

SEQ ID NO: 82511 - DNA, 25 bp, probe
atggaaagcattagtctgacagtac

SEQ ID NO: 82512 - DNA, 25 bp, probe
ccttggtttctagtaaagacaactg

SEQ ID NO: 82513 - DNA, 25 bp, probe
aagctcgattcttaataagtgagtt

SEQ ID NO: 82514 - DNA, 25 bp, probe
tgttatctcacactgaatctttcct

SEQ ID NO: 82515 - DNA, 25 bp, probe
tggtttctagtaaagacaactgtgg

SEQ ID NO: 82516 - DNA, 25 bp, probe
ccctgttatctcacactgaatcttt

SEQ ID NO: 82517 - DNA, 25 bp, probe
tttccctgttatctcacactgaatc

SEQ ID NO: 82518 - DNA, 25 bp, probe
ctgttatctcacactgaatctttcc

SEQ ID NO: 82519 - DNA, 25 bp, probe
cctgttatctcacactgaatctttc

SEQ ID NO: 82520 - DNA, 25 bp, probe
ttggtttctagtaaagacaactgtg

SEQ ID NO: 82521 - DNA, 25 bp, probe
ttaataagtgagttctgctatctct

SEQ ID NO: 82522 - DNA, 25 bp, probe
gccttggtttctagtaaagacaact

SEQ ID NO: 82523 - DNA, 25 bp, probe
gttattggtggtgatgttcatcttg

SEQ ID NO: 82524 - DNA, 25 bp, probe
ttattggtggtgatgttcatcttgt

SEQ ID NO: 82525 - DNA, 25 bp, probe
tgttattggtggtgatgttcatctt

SEQ ID NO: 82526 - DNA, 25 bp, probe
ttgttattggtggtgatgttcatct

SEQ ID NO: 82527 - DNA, 25 bp, probe
gttgttattggtggtgatgttcatc

SEQ ID NO: 82528 - DNA, 25 bp, probe
ggttgttattggtggtgatgttcat

SEQ ID NO: 82529 - DNA, 25 bp, probe
tattggtggtgatgttcatcttgtg

SEQ ID NO: 82530 - DNA, 25 bp, probe
atcttgtgtttctgtgtgtctttct

SEQ ID NO: 82531 - DNA, 25 bp, probe
catcttgtgtttctgtgtgtctttc

SEQ ID NO: 82532 - DNA, 25 bp, probe
tcatcttgtgtttctgtgtgtcttt

SEQ ID NO: 82533 - DNA, 25 bp, probe
ttcatcttgtgtttctgtgtgtctt

SEQ ID NO: 82534 - DNA, 25 bp, probe
atgttcatcttgtgtttctgtgtgt

SEQ ID NO: 82535 - DNA, 25 bp, probe
ttgtgtttctgtgtgtctttctctc

SEQ ID NO: 82536 - DNA, 25 bp, probe
cttgtgtttctgtgtgtctttctct

SEQ ID NO: 82537 - DNA, 25 bp, probe
tcttgtgtttctgtgtgtctttctc

SEQ ID NO: 82538 - DNA, 25 bp, probe
aatttctaggtcgtgctacaacttc

SEQ ID NO: 82539 - DNA, 25 bp, probe
gaatttctaggtcgtgctacaactt

SEQ ID NO: 82540 - DNA, 25 bp, probe
gttcatcttgtgtttctgtgtgtct

SEQ ID NO: 82541 - DNA, 25 bp, probe
tctctccagaatgaaagaaatgttt

SEQ ID NO: 82542 - DNA, 25 bp, probe
tgttcatcttgtgtttctgtgtgtc

SEQ ID NO: 82543 - DNA, 25 bp, probe
gatgttcatcttgtgtttctgtgtg

SEQ ID NO: 82544 - DNA, 25 bp, probe
attggtggtgatgttcatcttgtgt

SEQ ID NO: 82545 - DNA, 25 bp, probe
atgctgccttctcagtagaacttaa

SEQ ID NO: 82546 - DNA, 25 bp, probe
aaggaatttctaggtcgtgctacaa

SEQ ID NO: 82547 - DNA, 25 bp, probe
aaaggaatttctaggtcgtgctaca

SEQ ID NO: 82548 - DNA, 25 bp, probe
gtgatgttcatcttgtgtttctgtg

SEQ ID NO: 82549 - DNA, 25 bp, probe
tgatgttcatcttgtgtttctgtgt

SEQ ID NO: 82550 - DNA, 25 bp, probe
ttggtggtgatgttcatcttgtgtt

SEQ ID NO: 82551 - DNA, 25 bp, probe
gatgctgccttctcagtagaactta

SEQ ID NO: 82552 - DNA, 25 bp, probe
ggtgatgttcatcttgtgtttctgt

SEQ ID NO: 82553 - DNA, 25 bp, probe
tggtgatgttcatcttgtgtttctg

SEQ ID NO: 82554 - DNA, 25 bp, probe
gtggtgatgttcatcttgtgtttct

SEQ ID NO: 82555 - DNA, 25 bp, probe
atttctaggtcgtgctacaacttcc

SEQ ID NO: 82556 - DNA, 25 bp, probe
ggaatttctaggtcgtgctacaact

SEQ ID NO: 82557 - DNA, 25 bp, probe
aggaatttctaggtcgtgctacaac

SEQ ID NO: 82558 - DNA, 25 bp, probe
gtgtttctgtgtgtctttctctcca

SEQ ID NO: 82559 - DNA, 25 bp, probe
tgtgtttctgtgtgtctttctctcc

SEQ ID NO: 82560 - DNA, 25 bp, probe
cggttgttattggtggtgatgttca

SEQ ID NO: 82561 - DNA, 25 bp, probe
aagttcatgttctttcagtcagctc

SEQ ID NO: 82562 - DNA, 25 bp, probe
tcaacagtgagatgcaaaggtatag

SEQ ID NO: 82563 - DNA, 25 bp, probe
tgccttctcagtagaacttaaacat

SEQ ID NO: 82564 - DNA, 25 bp, probe
aaatgctgaagagagtgttgatggg

SEQ ID NO: 82565 - DNA, 25 bp, probe
ctgccttctcagtagaacttaaaca

SEQ ID NO: 82566 - DNA, 25 bp, probe
aaccaaagttcatgttctttcagtc

SEQ ID NO: 82567 - DNA, 25 bp, probe
tgaaattcaatgaagatcggtgctt

SEQ ID NO: 82568 - DNA, 25 bp, probe
catctactggtttgtgctctactgg

SEQ ID NO: 82569 - DNA, 25 bp, probe
atctactggtttgtgctctactggt

SEQ ID NO: 82570 - DNA, 25 bp, probe
ctactggtttgtgctctactggttg

SEQ ID NO: 82571 - DNA, 25 bp, probe
caggaaactggatcaagaacacatg

SEQ ID NO: 82572 - DNA, 25 bp, probe
tctactggtttgtgctctactggtt

SEQ ID NO: 82573 - DNA, 25 bp, probe
tactggtttgtgctctactggttga

SEQ ID NO: 82574 - DNA, 25 bp, probe
ctgtcctggtgttcctcatctgttc

SEQ ID NO: 82575 - DNA, 25 bp, probe
gaaattcaatgaagatcggtgcttc

SEQ ID NO: 82576 - DNA, 25 bp, probe
tcttgaaattcaatgaagatcggtg

SEQ ID NO: 82577 - DNA, 25 bp, probe
ttcttgaaattcaatgaagatcggt

SEQ ID NO: 82578 - DNA, 25 bp, probe
tctgtcctggtgttcctcatctgtt

SEQ ID NO: 82579 - DNA, 25 bp, probe
gttcttgaaattcaatgaagatcgg

SEQ ID NO: 82580 - DNA, 25 bp, probe
cagcaagttcttgaaattcaatgaa

SEQ ID NO: 82581 - DNA, 25 bp, probe
gcagcaagttcttgaaattcaatga

SEQ ID NO: 82582 - DNA, 25 bp, probe
gcaggaaactggatcaagaacacat

SEQ ID NO: 82583 - DNA, 25 bp, probe
cttgaaattcaatgaagatcggtgc

SEQ ID NO: 82584 - DNA, 25 bp, probe
gcaagttcttgaaattcaatgaaga

SEQ ID NO: 82585 - DNA, 25 bp, probe
agcaagttcttgaaattcaatgaag

SEQ ID NO: 82586 - DNA, 25 bp, probe
ttgaaattcaatgaagatcggtgct

SEQ ID NO: 82587 - DNA, 25 bp, probe
tgcagcaagttcttgaaattcaatg

SEQ ID NO: 82588 - DNA, 25 bp, probe
agttcttgaaattcaatgaagatcg

SEQ ID NO: 82589 - DNA, 25 bp, probe
ggaaactggatcaagaacacatgtt

SEQ ID NO: 82590 - DNA, 25 bp, probe
aggaaactggatcaagaacacatgt

SEQ ID NO: 82591 - DNA, 25 bp, probe
actggtttgtgctctactggttgag

SEQ ID NO: 82592 - DNA, 25 bp, probe
gcatctactggtttgtgctctactg

SEQ ID NO: 82593 - DNA, 25 bp, probe
tcttaaccccagtgatgactctgtc

SEQ ID NO: 82594 - DNA, 25 bp, probe
gatgaacgggttgacctcttccttc

SEQ ID NO: 82595 - DNA, 25 bp, probe
caagttcttgaaattcaatgaagat

SEQ ID NO: 82596 - DNA, 25 bp, probe
gtcttaaccccagtgatgactctgt

SEQ ID NO: 82597 - DNA, 25 bp, probe
aagttcttgaaattcaatgaagatc

SEQ ID NO: 82598 - DNA, 25 bp, probe
gaaactggatcaagaacacatgttc

SEQ ID NO: 82599 - DNA, 25 bp, probe
cttaaccccagtgatgactctgtcc

SEQ ID NO: 82600 - DNA, 25 bp, probe
ggtcttaaccccagtgatgactctg

SEQ ID NO: 82601 - DNA, 25 bp, probe
catgttctaaacaatcaaaagtgat

SEQ ID NO: 82602 - DNA, 25 bp, probe
ttaaccccagtgatgactctgtcca

SEQ ID NO: 82603 - DNA, 25 bp, probe
caatcaaaagtgattccagaaagga

SEQ ID NO: 82604 - DNA, 25 bp, probe
acaatcaaaagtgattccagaaagg

SEQ ID NO: 82605 - DNA, 25 bp, probe
aatcaaaagtgattccagaaaggaa

SEQ ID NO: 82606 - DNA, 25 bp, probe
aacaatcaaaagtgattccagaaag

SEQ ID NO: 82607 - DNA, 25 bp, probe
aaacaatcaaaagtgattccagaaa

SEQ ID NO: 82608 - DNA, 25 bp, probe
acacatgttctaaacaatcaaaagt

SEQ ID NO: 82609 - DNA, 25 bp, probe
ctaaacaatcaaaagtgattccaga

SEQ ID NO: 82610 - DNA, 25 bp, probe
tctaaacaatcaaaagtgattccag

SEQ ID NO: 82611 - DNA, 25 bp, probe
aaaattggagctcttttccacatgg

SEQ ID NO: 82612 - DNA, 25 bp, probe
aaattggagctcttttccacatggc

SEQ ID NO: 82613 - DNA, 25 bp, probe
aaagcaatttccaacctgacaaatc

SEQ ID NO: 82614 - DNA, 25 bp, probe
tgggtggagatgaagaaagcaattt

SEQ ID NO: 82615 - DNA, 25 bp, probe
aagcaatttccaacctgacaaatcc

SEQ ID NO: 82616 - DNA, 25 bp, probe
gaaagcaatttccaacctgacaaat

SEQ ID NO: 82617 - DNA, 25 bp, probe
gagatgaagaaagcaatttccaacc

SEQ ID NO: 82618 - DNA, 25 bp, probe
ggagatgaagaaagcaatttccaac

SEQ ID NO: 82619 - DNA, 25 bp, probe
gatgaagaaagcaatttccaacctg

SEQ ID NO: 82620 - DNA, 25 bp, probe
agatgaagaaagcaatttccaacct

SEQ ID NO: 82621 - DNA, 25 bp, probe
atgaagaaagcaatttccaacctga

SEQ ID NO: 82622 - DNA, 25 bp, probe
ctgggtggagatgaagaaagcaatt

SEQ ID NO: 82623 - DNA, 25 bp, probe
agaaagcaatttccaacctgacaaa

SEQ ID NO: 82624 - DNA, 25 bp, probe
aagaaagcaatttccaacctgacaa

SEQ ID NO: 82625 - DNA, 25 bp, probe
gaagaaagcaatttccaacctgaca

SEQ ID NO: 82626 - DNA, 25 bp, probe
tgaagaaagcaatttccaacctgac

SEQ ID NO: 82627 - DNA, 25 bp, probe
ggtggagatgaagaaagcaatttcc

SEQ ID NO: 82628 - DNA, 25 bp, probe
gggtggagatgaagaaagcaatttc

SEQ ID NO: 82629 - DNA, 25 bp, probe
cattgtcaagaagctgccatacctg

SEQ ID NO: 82630 - DNA, 25 bp, probe
tcattgtcaagaagctgccatacct

SEQ ID NO: 82631 - DNA, 25 bp, probe
agcaatttccaacctgacaaatccg

SEQ ID NO: 82632 - DNA, 25 bp, probe
cctgggtggagatgaagaaagcaat

SEQ ID NO: 82633 - DNA, 25 bp, probe
tggagatgaagaaagcaatttccaa

SEQ ID NO: 82634 - DNA, 25 bp, probe
gtgtcctgggtggagatgaagaaag

SEQ ID NO: 82635 - DNA, 25 bp, probe
gtggagatgaagaaagcaatttcca

SEQ ID NO: 82636 - DNA, 25 bp, probe
caatttccaacctgacaaatccgcc

SEQ ID NO: 82637 - DNA, 25 bp, probe
cttgccataggacttgtattgttat

SEQ ID NO: 82638 - DNA, 25 bp, probe
ttgccataggacttgtattgttatt

SEQ ID NO: 82639 - DNA, 25 bp, probe
ctatgtccatgtgaacgctacttat

SEQ ID NO: 82640 - DNA, 25 bp, probe
tatgtccatgtgaacgctacttatg

SEQ ID NO: 82641 - DNA, 25 bp, probe
ccttgccataggacttgtattgtta

SEQ ID NO: 82642 - DNA, 25 bp, probe
actatgtccatgtgaacgctactta

SEQ ID NO: 82643 - DNA, 25 bp, probe
agaagataacgctgatgatgaggtg

SEQ ID NO: 82644 - DNA, 25 bp, probe
ctccgtatccttctctgttgtcatc

SEQ ID NO: 82645 - DNA, 25 bp, probe
ctgttgtcatcagaagataacgctg

SEQ ID NO: 82646 - DNA, 25 bp, probe
ccatgtgaacgctacttatgtgaac

SEQ ID NO: 82647 - DNA, 25 bp, probe
tccatgtgaacgctacttatgtgaa

SEQ ID NO: 82648 - DNA, 25 bp, probe
tccgtatccttctctgttgtcatca

SEQ ID NO: 82649 - DNA, 25 bp, probe
atgtccatgtgaacgctacttatgt

SEQ ID NO: 82650 - DNA, 25 bp, probe
cagaagataacgctgatgatgaggt

SEQ ID NO: 82651 - DNA, 25 bp, probe
tgccataggacttgtattgttattt

SEQ ID NO: 82652 - DNA, 25 bp, probe
gaagataacgctgatgatgaggtgg

SEQ ID NO: 82653 - DNA, 25 bp, probe
catgtgaacgctacttatgtgaacg

SEQ ID NO: 82654 - DNA, 25 bp, probe
atcagcgatcttctctactttcatt

SEQ ID NO: 82655 - DNA, 25 bp, probe
tcagcgatcttctctactttcattg

SEQ ID NO: 82656 - DNA, 25 bp, probe
cgatattctttgctccttgccatag

SEQ ID NO: 82657 - DNA, 25 bp, probe
tatcagcgatcttctctactttcat

SEQ ID NO: 82658 - DNA, 25 bp, probe
atatcagcgatcttctctactttca

SEQ ID NO: 82659 - DNA, 25 bp, probe
cggatatcagcgatcttctctactt

SEQ ID NO: 82660 - DNA, 25 bp, probe
ccgtatccttctctgttgtcatcag

SEQ ID NO: 82661 - DNA, 25 bp, probe
gtccatgtgaacgctacttatgtga

SEQ ID NO: 82662 - DNA, 25 bp, probe
aagataacgctgatgatgaggtgga

SEQ ID NO: 82663 - DNA, 25 bp, probe
aggaatttcttatctgacagagcat

SEQ ID NO: 82664 - DNA, 25 bp, probe
aaggaatttcttatctgacagagca

SEQ ID NO: 82665 - DNA, 25 bp, probe
cagcgatcttctctactttcattgg

SEQ ID NO: 82666 - DNA, 25 bp, probe
ggaatttcttatctgacagagcatc

SEQ ID NO: 82667 - DNA, 25 bp, probe
ctgggagacatcatagtgctagtac

SEQ ID NO: 82668 - DNA, 25 bp, probe
tctgggagacatcatagtgctagta

SEQ ID NO: 82669 - DNA, 25 bp, probe
gaagactcctacaacccgaatactg

SEQ ID NO: 82670 - DNA, 25 bp, probe
agaagactcctacaacccgaatact

SEQ ID NO: 82671 - DNA, 25 bp, probe
tgtccatgtgaacgctacttatgtg

SEQ ID NO: 82672 - DNA, 25 bp, probe
cttctgggagacatcatagtgctag

SEQ ID NO: 82673 - DNA, 25 bp, probe
gaatttcttatctgacagagcatca

SEQ ID NO: 82674 - DNA, 25 bp, probe
gatattctttgctccttgccatagg

SEQ ID NO: 82675 - DNA, 25 bp, probe
cactatgtccatgtgaacgctactt

SEQ ID NO: 82676 - DNA, 25 bp, probe
gagaagactcctacaacccgaatac

SEQ ID NO: 82677 - DNA, 25 bp, probe
atcctgacgtaaacacctttgatat

SEQ ID NO: 82678 - DNA, 25 bp, probe
tactatgtcaaagcaacagtccaca

SEQ ID NO: 82679 - DNA, 25 bp, probe
tcctgacgtaaacacctttgatata

SEQ ID NO: 82680 - DNA, 25 bp, probe
ttatcctgacgtaaacacctttgat

SEQ ID NO: 82681 - DNA, 25 bp, probe
ttgtgttattactatgagtcaggct

SEQ ID NO: 82682 - DNA, 25 bp, probe
caggtactctaagaatgatgaagca

SEQ ID NO: 82683 - DNA, 25 bp, probe
acaggtactctaagaatgatgaagc

SEQ ID NO: 82684 - DNA, 25 bp, probe
tgtgttattactatgagtcaggctc

SEQ ID NO: 82685 - DNA, 25 bp, probe
gtgttattactatgagtcaggctct

SEQ ID NO: 82686 - DNA, 25 bp, probe
aggtactctaagaatgatgaagcat

SEQ ID NO: 82687 - DNA, 25 bp, probe
attgtgttattactatgagtcaggc

SEQ ID NO: 82688 - DNA, 25 bp, probe
gttattactatgagtcaggctctgt

SEQ ID NO: 82689 - DNA, 25 bp, probe
tgttattactatgagtcaggctctg

SEQ ID NO: 82690 - DNA, 25 bp, probe
ttattactatgagtcaggctctgtt

SEQ ID NO: 82691 - DNA, 25 bp, probe
aacaggtactctaagaatgatgaag

SEQ ID NO: 82692 - DNA, 25 bp, probe
ttataaggagtctgagaatattggc

SEQ ID NO: 82693 - DNA, 25 bp, probe
gcaggctttgtatgtgaataattct

SEQ ID NO: 82694 - DNA, 25 bp, probe
actctaagaatgatgaagcattgtt

SEQ ID NO: 82695 - DNA, 25 bp, probe
tttgtatgtgaataattctagcggg

SEQ ID NO: 82696 - DNA, 25 bp, probe
ggtactctaagaatgatgaagcatt

SEQ ID NO: 82697 - DNA, 25 bp, probe
tatgagtcaggctctgtttattgtt

SEQ ID NO: 82698 - DNA, 25 bp, probe
taacaggtactctaagaatgatgaa

SEQ ID NO: 82699 - DNA, 25 bp, probe
ttaacaggtactctaagaatgatga

SEQ ID NO: 82700 - DNA, 25 bp, probe
ctatgagtcaggctctgtttattgt

SEQ ID NO: 82701 - DNA, 25 bp, probe
actatgagtcaggctctgtttattg

SEQ ID NO: 82702 - DNA, 25 bp, probe
ccctgtgttatccagttatgagata

SEQ ID NO: 82703 - DNA, 25 bp, probe
atgagtcaggctctgtttattgttt

SEQ ID NO: 82704 - DNA, 25 bp, probe
agtcaggctctgtttattgtttcaa

SEQ ID NO: 82705 - DNA, 25 bp, probe
tactctaagaatgatgaagcattgt

SEQ ID NO: 82706 - DNA, 25 bp, probe
tactatgagtcaggctctgtttatt

SEQ ID NO: 82707 - DNA, 25 bp, probe
ttactatgagtcaggctctgtttat

SEQ ID NO: 82708 - DNA, 25 bp, probe
attactatgagtcaggctctgttta

SEQ ID NO: 82709 - DNA, 25 bp, probe
tattactatgagtcaggctctgttt

SEQ ID NO: 82710 - DNA, 25 bp, probe
tataaggagtctgagaatattggcc

SEQ ID NO: 82711 - DNA, 25 bp, probe
ctttgtatgtgaataattctagcgg

SEQ ID NO: 82712 - DNA, 25 bp, probe
gagtcaggctctgtttattgtttca

SEQ ID NO: 82713 - DNA, 25 bp, probe
tgagtcaggctctgtttattgtttc

SEQ ID NO: 82714 - DNA, 25 bp, probe
gtactctaagaatgatgaagcattg

SEQ ID NO: 82715 - DNA, 25 bp, probe
ttacaccaaagtatgaactggagag

SEQ ID NO: 82716 - DNA, 25 bp, probe
tttacaccaaagtatgaactggaga

SEQ ID NO: 82717 - DNA, 25 bp, probe
cttgcaggctttgtatgtgaataat

SEQ ID NO: 82718 - DNA, 25 bp, probe
gaaatttgaatacttgcaggctttg

SEQ ID NO: 82719 - DNA, 25 bp, probe
tgaaatttgaatacttgcaggcttt

SEQ ID NO: 82720 - DNA, 25 bp, probe
ttgcaggctttgtatgtgaataatt

SEQ ID NO: 82721 - DNA, 25 bp, probe
aatttgaatacttgcaggctttgta

SEQ ID NO: 82722 - DNA, 25 bp, probe
aaatttgaatacttgcaggctttgt

SEQ ID NO: 82723 - DNA, 25 bp, probe
tacttgcaggctttgtatgtgaata

SEQ ID NO: 82724 - DNA, 25 bp, probe
gtgaaatttgaatacttgcaggctt

SEQ ID NO: 82725 - DNA, 25 bp, probe
catcaccaagcaggaagttatctag

SEQ ID NO: 82726 - DNA, 25 bp, probe
ccatcaccaagcaggaagttatcta

SEQ ID NO: 82727 - DNA, 25 bp, probe
atcaccaagcaggaagttatctagc

SEQ ID NO: 82728 - DNA, 25 bp, probe
accaagcaggaagttatctagcaag

SEQ ID NO: 82729 - DNA, 25 bp, probe
caccaagcaggaagttatctagcaa

SEQ ID NO: 82730 - DNA, 25 bp, probe
gaccatcaccaagcaggaagttatc

SEQ ID NO: 82731 - DNA, 25 bp, probe
accatcaccaagcaggaagttatct

SEQ ID NO: 82732 - DNA, 25 bp, probe
tcaccaagcaggaagttatctagca

SEQ ID NO: 82733 - DNA, 25 bp, probe
caagcaggaagttatctagcaagcc

SEQ ID NO: 82734 - DNA, 25 bp, probe
ccaagcaggaagttatctagcaagc

SEQ ID NO: 82735 - DNA, 25 bp, probe
cgaccatcaccaagcaggaagttat

SEQ ID NO: 82736 - DNA, 25 bp, probe
aagcaggaagttatctagcaagccg

SEQ ID NO: 82737 - DNA, 25 bp, probe
cagagcaggaatgggaaggatgaag

SEQ ID NO: 82738 - DNA, 25 bp, probe
ggaacatatgggaaccaacgtcatc

SEQ ID NO: 82739 - DNA, 25 bp, probe
gaacatatgggaaccaacgtcatcg

SEQ ID NO: 82740 - DNA, 25 bp, probe
aggaacatatgggaaccaacgtcat

SEQ ID NO: 82741 - DNA, 25 bp, probe
gatgcaggaacatatgggaaccaac

SEQ ID NO: 82742 - DNA, 25 bp, probe
tgatgcaggaacatatgggaaccaa

SEQ ID NO: 82743 - DNA, 25 bp, probe
ctgatgcaggaacatatgggaacca

SEQ ID NO: 82744 - DNA, 25 bp, probe
caggaacatatgggaaccaacgtca

SEQ ID NO: 82745 - DNA, 25 bp, probe
aacatatgggaaccaacgtcatcgt

SEQ ID NO: 82746 - DNA, 25 bp, probe
cctcacctgatgcaggaacatatgg

SEQ ID NO: 82747 - DNA, 25 bp, probe
acctgatgcaggaacatatgggaac

SEQ ID NO: 82748 - DNA, 25 bp, probe
cacctgatgcaggaacatatgggaa

SEQ ID NO: 82749 - DNA, 25 bp, probe
acatatgggaaccaacgtcatcgtt

SEQ ID NO: 82750 - DNA, 25 bp, probe
ctcacctgatgcaggaacatatggg

SEQ ID NO: 82751 - DNA, 25 bp, probe
ccctcacctgatgcaggaacatatg

SEQ ID NO: 82752 - DNA, 25 bp, probe
gtatctggagaattgcctctacctg

SEQ ID NO: 82753 - DNA, 25 bp, probe
ctgtatctggagaattgcctctacc

SEQ ID NO: 82754 - DNA, 25 bp, probe
cctgtatctggagaattgcctctac

SEQ ID NO: 82755 - DNA, 25 bp, probe
cttctctatggcattgctggttcta

SEQ ID NO: 82756 - DNA, 25 bp, probe
tgtatctggagaattgcctctacct

SEQ ID NO: 82757 - DNA, 25 bp, probe
ttctctatggcattgctggttctac

SEQ ID NO: 82758 - DNA, 25 bp, probe
tatctggagaattgcctctacctgg

SEQ ID NO: 82759 - DNA, 25 bp, probe
gcctgtatctggagaattgcctcta

SEQ ID NO: 82760 - DNA, 25 bp, probe
ctatgacaacctgccgcttctctat

SEQ ID NO: 82761 - DNA, 25 bp, probe
tatgacaacctgccgcttctctatg

SEQ ID NO: 82762 - DNA, 25 bp, probe
atctggagaattgcctctacctgga

SEQ ID NO: 82763 - DNA, 25 bp, probe
tctctatggcattgctggttctacc

SEQ ID NO: 82764 - DNA, 25 bp, probe
ctgcctgtatctggagaattgcctc

SEQ ID NO: 82765 - DNA, 25 bp, probe
caatggaaaggctgagactgctgta

SEQ ID NO: 82766 - DNA, 25 bp, probe
aatggaaaggctgagactgctgtac

SEQ ID NO: 82767 - DNA, 25 bp, probe
gaaaggctgagactgctgtacgaat

SEQ ID NO: 82768 - DNA, 25 bp, probe
aaaggctgagactgctgtacgaatg

SEQ ID NO: 82769 - DNA, 25 bp, probe
ccgttatctatgtctttatgaaccg

SEQ ID NO: 82770 - DNA, 25 bp, probe
cccgttatctatgtctttatgaacc

SEQ ID NO: 82771 - DNA, 25 bp, probe
gtgcagtcttacatgattgtcctca

SEQ ID NO: 82772 - DNA, 25 bp, probe
accccgttatctatgtctttatgaa

SEQ ID NO: 82773 - DNA, 25 bp, probe
tatctatgtctttatgaaccggcag

SEQ ID NO: 82774 - DNA, 25 bp, probe
ttatctatgtctttatgaaccggca

SEQ ID NO: 82775 - DNA, 25 bp, probe
aaccccgttatctatgtctttatga

SEQ ID NO: 82776 - DNA, 25 bp, probe
caaccccgttatctatgtctttatg

SEQ ID NO: 82777 - DNA, 25 bp, probe
tgcagtcttacatgattgtcctcat

SEQ ID NO: 82778 - DNA, 25 bp, probe
actatctacaaccccgttatctatg

SEQ ID NO: 82779 - DNA, 25 bp, probe
cactatctacaaccccgttatctat

SEQ ID NO: 82780 - DNA, 25 bp, probe
ccccgttatctatgtctttatgaac

SEQ ID NO: 82781 - DNA, 25 bp, probe
ccactatctacaaccccgttatcta

SEQ ID NO: 82782 - DNA, 25 bp, probe
gttatctatgtctttatgaaccggc

SEQ ID NO: 82783 - DNA, 25 bp, probe
cgttatctatgtctttatgaaccgg

SEQ ID NO: 82784 - DNA, 25 bp, probe
ggtgcagtcttacatgattgtcctc

SEQ ID NO: 82785 - DNA, 25 bp, probe
ctacaaccccgttatctatgtcttt

SEQ ID NO: 82786 - DNA, 25 bp, probe
acaaccccgttatctatgtctttat

SEQ ID NO: 82787 - DNA, 25 bp, probe
atctacaaccccgttatctatgtct

SEQ ID NO: 82788 - DNA, 25 bp, probe
ctatgtctttatgaaccggcagttt

SEQ ID NO: 82789 - DNA, 25 bp, probe
tctacaaccccgttatctatgtctt

SEQ ID NO: 82790 - DNA, 25 bp, probe
tatctacaaccccgttatctatgtc

SEQ ID NO: 82791 - DNA, 25 bp, probe
ctatctacaaccccgttatctatgt

SEQ ID NO: 82792 - DNA, 25 bp, probe
tatgtctttatgaaccggcagtttc

SEQ ID NO: 82793 - DNA, 25 bp, probe
tacaaccccgttatctatgtcttta

SEQ ID NO: 82794 - DNA, 25 bp, probe
gaagaaggttgacgatggctctgaa

SEQ ID NO: 82795 - DNA, 25 bp, probe
atctatgtctttatgaaccggcagt

SEQ ID NO: 82796 - DNA, 25 bp, probe
tctatgtctttatgaaccggcagtt

SEQ ID NO: 82797 - DNA, 25 bp, probe
aagaaggttgacgatggctctgaac

SEQ ID NO: 82798 - DNA, 25 bp, probe
aggtctcatctgtgtcctcggtatc

SEQ ID NO: 82799 - DNA, 25 bp, probe
caaagcagcagaaagagtctgaatc

SEQ ID NO: 82800 - DNA, 25 bp, probe
gccactatctacaaccccgttatct

SEQ ID NO: 82801 - DNA, 25 bp, probe
ttgccaaaagtgccactatctacaa

SEQ ID NO: 82802 - DNA, 25 bp, probe
tttgccaaaagtgccactatctaca

SEQ ID NO: 82803 - DNA, 25 bp, probe
gaaagagtctgaatccacccagaag

SEQ ID NO: 82804 - DNA, 25 bp, probe
tgccactatctacaaccccgttatc

SEQ ID NO: 82805 - DNA, 25 bp, probe
ctttgccaaaagtgccactatctac

SEQ ID NO: 82806 - DNA, 25 bp, probe
atgtctttatgaaccggcagtttcg

SEQ ID NO: 82807 - DNA, 25 bp, probe
agaaagagtctgaatccacccagaa

SEQ ID NO: 82808 - DNA, 25 bp, probe
aaagcagcagaaagagtctgaatcc

SEQ ID NO: 82809 - DNA, 25 bp, probe
caaaagtgccactatctacaacccc

SEQ ID NO: 82810 - DNA, 25 bp, probe
ccaaaagtgccactatctacaaccc

SEQ ID NO: 82811 - DNA, 25 bp, probe
tgccaaaagtgccactatctacaac

SEQ ID NO: 82812 - DNA, 25 bp, probe
gtgccactatctacaaccccgttat

SEQ ID NO: 82813 - DNA, 25 bp, probe
aaccatcaagttccaaccattaagg

SEQ ID NO: 82814 - DNA, 25 bp, probe
acaaccaaccagttcagaatgatac

SEQ ID NO: 82815 - DNA, 25 bp, probe
cacaaccaaccagttcagaatgata

SEQ ID NO: 82816 - DNA, 25 bp, probe
caaccaaccagttcagaatgatacg

SEQ ID NO: 82817 - DNA, 25 bp, probe
tcacaaccaaccagttcagaatgat

SEQ ID NO: 82818 - DNA, 25 bp, probe
tactgacagccacatttgacattta

SEQ ID NO: 82819 - DNA, 25 bp, probe
ccaaccagttcagaatgatacggaa

SEQ ID NO: 82820 - DNA, 25 bp, probe
catcaagttccaaccattaaggtcc

SEQ ID NO: 82821 - DNA, 25 bp, probe
ccatcaagttccaaccattaaggtc

SEQ ID NO: 82822 - DNA, 25 bp, probe
actgacagccacatttgacatttat

SEQ ID NO: 82823 - DNA, 25 bp, probe
ctgacagccacatttgacatttatg

SEQ ID NO: 82824 - DNA, 25 bp, probe
tctcacaaccaaccagttcagaatg

SEQ ID NO: 82825 - DNA, 25 bp, probe
gtctcacaaccaaccagttcagaat

SEQ ID NO: 82826 - DNA, 25 bp, probe
aaccaaccagttcagaatgatacgg

SEQ ID NO: 82827 - DNA, 25 bp, probe
atcaagttccaaccattaaggtcca

SEQ ID NO: 82828 - DNA, 25 bp, probe
ctactgacagccacatttgacattt

SEQ ID NO: 82829 - DNA, 25 bp, probe
ctcacaaccaaccagttcagaatga

SEQ ID NO: 82830 - DNA, 25 bp, probe
accatcaagttccaaccattaaggt

SEQ ID NO: 82831 - DNA, 25 bp, probe
gtttggagctatttcttgatggaag

SEQ ID NO: 82832 - DNA, 25 bp, probe
tttggagctatttcttgatggaagt

SEQ ID NO: 82833 - DNA, 25 bp, probe
agtttggagctatttcttgatggaa

SEQ ID NO: 82834 - DNA, 25 bp, probe
aagtttggagctatttcttgatgga

SEQ ID NO: 82835 - DNA, 25 bp, probe
taagtttggagctatttcttgatgg

SEQ ID NO: 82836 - DNA, 25 bp, probe
tcaagttccaaccattaaggtccac

SEQ ID NO: 82837 - DNA, 25 bp, probe
ttggagctatttcttgatggaagtg

SEQ ID NO: 82838 - DNA, 25 bp, probe
tgacagccacatttgacatttatgc

SEQ ID NO: 82839 - DNA, 25 bp, probe
aacagaatttcatgcacaatccaaa

SEQ ID NO: 82840 - DNA, 25 bp, probe
aaacagaatttcatgcacaatccaa

SEQ ID NO: 82841 - DNA, 25 bp, probe
gagctatttcttgatggaagtgagg

SEQ ID NO: 82842 - DNA, 25 bp, probe
ggagctatttcttgatggaagtgag

SEQ ID NO: 82843 - DNA, 25 bp, probe
acacactctaagtttggagctattt

SEQ ID NO: 82844 - DNA, 25 bp, probe
accaaccagttcagaatgatacgga

SEQ ID NO: 82845 - DNA, 25 bp, probe
cacactctaagtttggagctatttc

SEQ ID NO: 82846 - DNA, 25 bp, probe
acactctaagtttggagctatttct

SEQ ID NO: 82847 - DNA, 25 bp, probe
ctaatgctttcttggtcactctgtg

SEQ ID NO: 82848 - DNA, 25 bp, probe
aagttccaaccattaaggtccacac

SEQ ID NO: 82849 - DNA, 25 bp, probe
caagttccaaccattaaggtccaca

SEQ ID NO: 82850 - DNA, 25 bp, probe
cacacactctaagtttggagctatt

SEQ ID NO: 82851 - DNA, 25 bp, probe
tttgagcacacactctaagtttgga

SEQ ID NO: 82852 - DNA, 25 bp, probe
gaaccatcaagttccaaccattaag

SEQ ID NO: 82853 - DNA, 25 bp, probe
agaaccatcaagttccaaccattaa

SEQ ID NO: 82854 - DNA, 25 bp, probe
aagaaccatcaagttccaaccatta

SEQ ID NO: 82855 - DNA, 25 bp, probe
tggagctatttcttgatggaagtga

SEQ ID NO: 82856 - DNA, 25 bp, probe
actctaagtttggagctatttcttg

SEQ ID NO: 82857 - DNA, 25 bp, probe
ctagacgacgaataaagccctgttg

SEQ ID NO: 82858 - DNA, 25 bp, probe
tttactctagacgacgaataaagcc

SEQ ID NO: 82859 - DNA, 25 bp, probe
ttactctagacgacgaataaagccc

SEQ ID NO: 82860 - DNA, 25 bp, probe
tactctagacgacgaataaagccct

SEQ ID NO: 82861 - DNA, 25 bp, probe
gtgttccagtggatgagttttatca

SEQ ID NO: 82862 - DNA, 25 bp, probe
tgtgttccagtggatgagttttatc

SEQ ID NO: 82863 - DNA, 25 bp, probe
gtgtgttccagtggatgagttttat

SEQ ID NO: 82864 - DNA, 25 bp, probe
cctcttttactctagacgacgaata

SEQ ID NO: 82865 - DNA, 25 bp, probe
tctagacgacgaataaagccctgtt

SEQ ID NO: 82866 - DNA, 25 bp, probe
ttttactctagacgacgaataaagc

SEQ ID NO: 82867 - DNA, 25 bp, probe
tgttccagtggatgagttttatcat

SEQ ID NO: 82868 - DNA, 25 bp, probe
ccctcttttactctagacgacgaat

SEQ ID NO: 82869 - DNA, 25 bp, probe
ctctagacgacgaataaagccctgt

SEQ ID NO: 82870 - DNA, 25 bp, probe
actctagacgacgaataaagccctg

SEQ ID NO: 82871 - DNA, 25 bp, probe
ctctcgaattggctctgacccttac

SEQ ID NO: 82872 - DNA, 25 bp, probe
ctcttttactctagacgacgaataa

SEQ ID NO: 82873 - DNA, 25 bp, probe
tcttttactctagacgacgaataaa

SEQ ID NO: 82874 - DNA, 25 bp, probe
cgtgtgttccagtggatgagtttta

SEQ ID NO: 82875 - DNA, 25 bp, probe
cctcctcccctcttttactctagac

SEQ ID NO: 82876 - DNA, 25 bp, probe
cccctcctcccctcttttactctag

SEQ ID NO: 82877 - DNA, 25 bp, probe
ctcctcccctcttttactctagacg

SEQ ID NO: 82878 - DNA, 25 bp, probe
aataaagccctgttgcttgagtgta

SEQ ID NO: 82879 - DNA, 25 bp, probe
cccctcttttactctagacgacgaa

SEQ ID NO: 82880 - DNA, 25 bp, probe
cctcccctcttttactctagacgac

SEQ ID NO: 82881 - DNA, 25 bp, probe
tcctcccctcttttactctagacga

SEQ ID NO: 82882 - DNA, 25 bp, probe
cttttactctagacgacgaataaag

SEQ ID NO: 82883 - DNA, 25 bp, probe
ctcccctcttttactctagacgacg

SEQ ID NO: 82884 - DNA, 25 bp, probe
ccctcctcccctcttttactctaga

SEQ ID NO: 82885 - DNA, 25 bp, probe
ataaagccctgttgcttgagtgtac

SEQ ID NO: 82886 - DNA, 25 bp, probe
tcccctcttttactctagacgacga

SEQ ID NO: 82887 - DNA, 25 bp, probe
gaataaagccctgttgcttgagtgt

SEQ ID NO: 82888 - DNA, 25 bp, probe
gacgaataaagccctgttgcttgag

SEQ ID NO: 82889 - DNA, 25 bp, probe
cgaataaagccctgttgcttgagtg

SEQ ID NO: 82890 - DNA, 25 bp, probe
acgaataaagccctgttgcttgagt

SEQ ID NO: 82891 - DNA, 25 bp, probe
tcttggaggattatactgactgtgg

SEQ ID NO: 82892 - DNA, 25 bp, probe
cttggaggattatactgactgtggt

SEQ ID NO: 82893 - DNA, 25 bp, probe
acaatgtcttggaggattatactga

SEQ ID NO: 82894 - DNA, 25 bp, probe
ttggaggattatactgactgtggtg

SEQ ID NO: 82895 - DNA, 25 bp, probe
aacaatgtcttggaggattatactg

SEQ ID NO: 82896 - DNA, 25 bp, probe
gtcttggaggattatactgactgtg

SEQ ID NO: 82897 - DNA, 25 bp, probe
atgtcttggaggattatactgactg

SEQ ID NO: 82898 - DNA, 25 bp, probe
tgtcttggaggattatactgactgt

SEQ ID NO: 82899 - DNA, 25 bp, probe
ggattatactgactgtggtggtgtt

SEQ ID NO: 82900 - DNA, 25 bp, probe
caatgtcttggaggattatactgac

SEQ ID NO: 82901 - DNA, 25 bp, probe
aatgtcttggaggattatactgact

SEQ ID NO: 82902 - DNA, 25 bp, probe
gaggattatactgactgtggtggtg

SEQ ID NO: 82903 - DNA, 25 bp, probe
ttgataacaatgtcttggaggatta

SEQ ID NO: 82904 - DNA, 25 bp, probe
tgataacaatgtcttggaggattat

SEQ ID NO: 82905 - DNA, 25 bp, probe
tttctactactttggctggtatctg

SEQ ID NO: 82906 - DNA, 25 bp, probe
gtttctactactttggctggtatct

SEQ ID NO: 82907 - DNA, 25 bp, probe
taaatccctccctgtggtatatcat

SEQ ID NO: 82908 - DNA, 25 bp, probe
ttaaatccctccctgtggtatatca

SEQ ID NO: 82909 - DNA, 25 bp, probe
attatactgactgtggtggtgtttc

SEQ ID NO: 82910 - DNA, 25 bp, probe
gattatactgactgtggtggtgttt

SEQ ID NO: 82911 - DNA, 25 bp, probe
gaatgctgcatcatctatgtgtaac

SEQ ID NO: 82912 - DNA, 25 bp, probe
aggattatactgactgtggtggtgt

SEQ ID NO: 82913 - DNA, 25 bp, probe
attaaatccctccctgtggtatatc

SEQ ID NO: 82914 - DNA, 25 bp, probe
aaatccctccctgtggtatatcatt

SEQ ID NO: 82915 - DNA, 25 bp, probe
aatccttgtgacatggttaagcaac

SEQ ID NO: 82916 - DNA, 25 bp, probe
tgaatgctgcatcatctatgtgtaa

SEQ ID NO: 82917 - DNA, 25 bp, probe
taacaatgtcttggaggattatact

SEQ ID NO: 82918 - DNA, 25 bp, probe
gattaaatccctccctgtggtatat

SEQ ID NO: 82919 - DNA, 25 bp, probe
agtttctactactttggctggtatc

SEQ ID NO: 82920 - DNA, 25 bp, probe
ctgctttgataacaatgtcttggag

SEQ ID NO: 82921 - DNA, 25 bp, probe
ctgtggtggtgtttctggattaaat

SEQ ID NO: 82922 - DNA, 25 bp, probe
ttctactactttggctggtatctgg

SEQ ID NO: 82923 - DNA, 25 bp, probe
ggaggattatactgactgtggtggt

SEQ ID NO: 82924 - DNA, 25 bp, probe
ttatactgactgtggtggtgtttct

SEQ ID NO: 82925 - DNA, 25 bp, probe
tctgctttgataacaatgtcttgga

SEQ ID NO: 82926 - DNA, 25 bp, probe
gtctgctttgataacaatgtcttgg

SEQ ID NO: 82927 - DNA, 25 bp, probe
ctgtggtatatcattggaatccagt

SEQ ID NO: 82928 - DNA, 25 bp, probe
aatccctccctgtggtatatcattg

SEQ ID NO: 82929 - DNA, 25 bp, probe
tgtggtatatcattggaatccagtt

SEQ ID NO: 82930 - DNA, 25 bp, probe
gtgaatgctgcatcatctatgtgta

SEQ ID NO: 82931 - DNA, 25 bp, probe
ctttgataacaatgtcttggaggat

SEQ ID NO: 82932 - DNA, 25 bp, probe
tattcataatggttgagagcaaagg

SEQ ID NO: 82933 - DNA, 25 bp, probe
tggaggattatactgactgtggtgg

SEQ ID NO: 82934 - DNA, 25 bp, probe
cctgtggtatatcattggaatccag

SEQ ID NO: 82935 - DNA, 25 bp, probe
ttgatagagttctgttacaagtcca

SEQ ID NO: 82936 - DNA, 25 bp, probe
tgatagagttctgttacaagtccag

SEQ ID NO: 82937 - DNA, 25 bp, probe
gatagagttctgttacaagtccagg

SEQ ID NO: 82938 - DNA, 25 bp, probe
cctcattaagaactcctgtaaacct

SEQ ID NO: 82939 - DNA, 25 bp, probe
tcctcattaagaactcctgtaaacc

SEQ ID NO: 82940 - DNA, 25 bp, probe
agaaacaaagccagattatccatca

SEQ ID NO: 82941 - DNA, 25 bp, probe
aagaaacaaagccagattatccatc

SEQ ID NO: 82942 - DNA, 25 bp, probe
agccataagaaacaaagccagatta

SEQ ID NO: 82943 - DNA, 25 bp, probe
gaaacaaagccagattatccatcac

SEQ ID NO: 82944 - DNA, 25 bp, probe
aaacaaagccagattatccatcact

SEQ ID NO: 82945 - DNA, 25 bp, probe
cattaagaactcctgtaaaccttgc

SEQ ID NO: 82946 - DNA, 25 bp, probe
gccataagaaacaaagccagattat

SEQ ID NO: 82947 - DNA, 25 bp, probe
gtggctttgatagagttctgttaca

SEQ ID NO: 82948 - DNA, 25 bp, probe
aagccataagaaacaaagccagatt

SEQ ID NO: 82949 - DNA, 25 bp, probe
tggctttgatagagttctgttacaa

SEQ ID NO: 82950 - DNA, 25 bp, probe
attaagaactcctgtaaaccttgcc

SEQ ID NO: 82951 - DNA, 25 bp, probe
ggctttgatagagttctgttacaag

SEQ ID NO: 82952 - DNA, 25 bp, probe
ggtggctttgatagagttctgttac

SEQ ID NO: 82953 - DNA, 25 bp, probe
taagaaacaaagccagattatccat

SEQ ID NO: 82954 - DNA, 25 bp, probe
tcattaagaactcctgtaaaccttg

SEQ ID NO: 82955 - DNA, 25 bp, probe
tggtggctttgatagagttctgtta

SEQ ID NO: 82956 - DNA, 25 bp, probe
aaatggtggtacgataaaggtgaat

SEQ ID NO: 82957 - DNA, 25 bp, probe
gctttgatagagttctgttacaagt

SEQ ID NO: 82958 - DNA, 25 bp, probe
gaagccataagaaacaaagccagat

SEQ ID NO: 82959 - DNA, 25 bp, probe
aaacaaatggtggtacgataaaggt

SEQ ID NO: 82960 - DNA, 25 bp, probe
ctcattaagaactcctgtaaacctt

SEQ ID NO: 82961 - DNA, 25 bp, probe
ttcctcattaagaactcctgtaaac

SEQ ID NO: 82962 - DNA, 25 bp, probe
ataagaaacaaagccagattatcca

SEQ ID NO: 82963 - DNA, 25 bp, probe
aatggtggtacgataaaggtgaatg

SEQ ID NO: 82964 - DNA, 25 bp, probe
cataagaaacaaagccagattatcc

SEQ ID NO: 82965 - DNA, 25 bp, probe
ccataagaaacaaagccagattatc

SEQ ID NO: 82966 - DNA, 25 bp, probe
caaatggtggtacgataaaggtgaa

SEQ ID NO: 82967 - DNA, 25 bp, probe
tttgatagagttctgttacaagtcc

SEQ ID NO: 82968 - DNA, 25 bp, probe
aacaaatggtggtacgataaaggtg

SEQ ID NO: 82969 - DNA, 25 bp, probe
atgaaagtgggaggaaatctggatt

SEQ ID NO: 82970 - DNA, 25 bp, probe
gatgaaagtgggaggaaatctggat

SEQ ID NO: 82971 - DNA, 25 bp, probe
aacaaagccagattatccatcactg

SEQ ID NO: 82972 - DNA, 25 bp, probe
atagagttctgttacaagtccaggg

SEQ ID NO: 82973 - DNA, 25 bp, probe
atggtggtacgataaaggtgaatgt

SEQ ID NO: 82974 - DNA, 25 bp, probe
acaaatggtggtacgataaaggtga

SEQ ID NO: 82975 - DNA, 25 bp, probe
ctggtggctttgatagagttctgtt

SEQ ID NO: 82976 - DNA, 25 bp, probe
tgaaagtgggaggaaatctggattc

SEQ ID NO: 82977 - DNA, 25 bp, probe
ctttgatagagttctgttacaagtc

SEQ ID NO: 82978 - DNA, 25 bp, probe
tgaagccataagaaacaaagccaga

SEQ ID NO: 82979 - DNA, 25 bp, probe
tatgcaaactctctcattaaccctt

SEQ ID NO: 82980 - DNA, 25 bp, probe
ctatgcaaactctctcattaaccct

SEQ ID NO: 82981 - DNA, 25 bp, probe
atgcaaactctctcattaacccttt

SEQ ID NO: 82982 - DNA, 25 bp, probe
gctatgcaaactctctcattaaccc

SEQ ID NO: 82983 - DNA, 25 bp, probe
ggctatgcaaactctctcattaacc

SEQ ID NO: 82984 - DNA, 25 bp, probe
catgattgaaagcagaacaatggag

SEQ ID NO: 82985 - DNA, 25 bp, probe
gcaaactctctcattaaccctttta

SEQ ID NO: 82986 - DNA, 25 bp, probe
tgcaaactctctcattaaccctttt

SEQ ID NO: 82987 - DNA, 25 bp, probe
caaactctctcattaacccttttat

SEQ ID NO: 82988 - DNA, 25 bp, probe
tttcgagactcctcaagcatgaaag

SEQ ID NO: 82989 - DNA, 25 bp, probe
ctttcgagactcctcaagcatgaaa

SEQ ID NO: 82990 - DNA, 25 bp, probe
tcatgattgaaagcagaacaatgga

SEQ ID NO: 82991 - DNA, 25 bp, probe
aaacctttcgagactcctcaagcat

SEQ ID NO: 82992 - DNA, 25 bp, probe
tgattcatgattgaaagcagaacaa

SEQ ID NO: 82993 - DNA, 25 bp, probe
ttcatgattgaaagcagaacaatgg

SEQ ID NO: 82994 - DNA, 25 bp, probe
atgattcatgattgaaagcagaaca

SEQ ID NO: 82995 - DNA, 25 bp, probe
gaagagtgtgcaaacctttcgagac

SEQ ID NO: 82996 - DNA, 25 bp, probe
attcatgattgaaagcagaacaatg

SEQ ID NO: 82997 - DNA, 25 bp, probe
gattcatgattgaaagcagaacaat

SEQ ID NO: 82998 - DNA, 25 bp, probe
cctttcgagactcctcaagcatgaa

SEQ ID NO: 82999 - DNA, 25 bp, probe
gagactcctcaagcatgaaaggaaa

SEQ ID NO: 83000 - DNA, 25 bp, probe
catgattcatgattgaaagcagaac

SEQ ID NO: 83001 - DNA, 25 bp, probe
aagagtgtgcaaacctttcgagact

SEQ ID NO: 83002 - DNA, 25 bp, probe
ttcgagactcctcaagcatgaaagg

SEQ ID NO: 83003 - DNA, 25 bp, probe
aacctttcgagactcctcaagcatg

SEQ ID NO: 83004 - DNA, 25 bp, probe
caaacctttcgagactcctcaagca

SEQ ID NO: 83005 - DNA, 25 bp, probe
tgcaaacctttcgagactcctcaag

SEQ ID NO: 83006 - DNA, 25 bp, probe
agactcctcaagcatgaaaggaaaa

SEQ ID NO: 83007 - DNA, 25 bp, probe
cgagactcctcaagcatgaaaggaa

SEQ ID NO: 83008 - DNA, 25 bp, probe
agagtgtgcaaacctttcgagactc

SEQ ID NO: 83009 - DNA, 25 bp, probe
aatcctcattcctctacaatcagtc

SEQ ID NO: 83010 - DNA, 25 bp, probe
tcctcattcctctacaatcagtcat

SEQ ID NO: 83011 - DNA, 25 bp, probe
atcctcattcctctacaatcagtca

SEQ ID NO: 83012 - DNA, 25 bp, probe
gatacctacacttccatcaattctg

SEQ ID NO: 83013 - DNA, 25 bp, probe
gcagtaatgtcaatggttggttata

SEQ ID NO: 83014 - DNA, 25 bp, probe
atgtcaatggttggttatattctgg

SEQ ID NO: 83015 - DNA, 25 bp, probe
catcatggtacagtagtagatcagc

SEQ ID NO: 83016 - DNA, 25 bp, probe
acatcatggtacagtagtagatcag

SEQ ID NO: 83017 - DNA, 25 bp, probe
cctcattcctctacaatcagtcatg

SEQ ID NO: 83018 - DNA, 25 bp, probe
tgtggttgtatctgttcaattctaa

SEQ ID NO: 83019 - DNA, 25 bp, probe
atcatggtacagtagtagatcagct

SEQ ID NO: 83020 - DNA, 25 bp, probe
tcatggtacagtagtagatcagctt

SEQ ID NO: 83021 - DNA, 25 bp, probe
atggtacagtagtagatcagcttac

SEQ ID NO: 83022 - DNA, 25 bp, probe
catggtacagtagtagatcagctta

SEQ ID NO: 83023 - DNA, 25 bp, probe
atacctacacttccatcaattctgg

SEQ ID NO: 83024 - DNA, 25 bp, probe
aatgtcaatggttggttatattctg

SEQ ID NO: 83025 - DNA, 25 bp, probe
tacatcatggtacagtagtagatca

SEQ ID NO: 83026 - DNA, 25 bp, probe
aaatcctcattcctctacaatcagt

SEQ ID NO: 83027 - DNA, 25 bp, probe
ttgatgatatggtggaaattcttgc

SEQ ID NO: 83028 - DNA, 25 bp, probe
gggtttgatgatatggtggaaattc

SEQ ID NO: 83029 - DNA, 25 bp, probe
gatgatatggtggaaattcttgctt

SEQ ID NO: 83030 - DNA, 25 bp, probe
agggtttgatgatatggtggaaatt

SEQ ID NO: 83031 - DNA, 25 bp, probe
tgatgatatggtggaaattcttgct

SEQ ID NO: 83032 - DNA, 25 bp, probe
cagggtttgatgatatggtggaaat

SEQ ID NO: 83033 - DNA, 25 bp, probe
tgagaaaggattgtagactaatgga

SEQ ID NO: 83034 - DNA, 25 bp, probe
ggtttgatgatatggtggaaattct

SEQ ID NO: 83035 - DNA, 25 bp, probe
atatggtggaaattcttgcttctct

SEQ ID NO: 83036 - DNA, 25 bp, probe
gatatggtggaaattcttgcttctc

SEQ ID NO: 83037 - DNA, 25 bp, probe
tatggtggaaattcttgcttctctt

SEQ ID NO: 83038 - DNA, 25 bp, probe
tgatatggtggaaattcttgcttct

SEQ ID NO: 83039 - DNA, 25 bp, probe
atgatatggtggaaattcttgcttc

SEQ ID NO: 83040 - DNA, 25 bp, probe
ctgagaaaggattgtagactaatgg

SEQ ID NO: 83041 - DNA, 25 bp, probe
tgcagtaatgtcaatggttggttat

SEQ ID NO: 83042 - DNA, 25 bp, probe
gaaatcctcattcctctacaatcag

SEQ ID NO: 83043 - DNA, 25 bp, probe
cagtaatgtcaatggttggttatat

SEQ ID NO: 83044 - DNA, 25 bp, probe
tgtcaatggttggttatattctggg

SEQ ID NO: 83045 - DNA, 25 bp, probe
tgaaatcctcattcctctacaatca

SEQ ID NO: 83046 - DNA, 25 bp, probe
agtgaaatcctcattcctctacaat

SEQ ID NO: 83047 - DNA, 25 bp, probe
gtgaaatcctcattcctctacaatc

SEQ ID NO: 83048 - DNA, 25 bp, probe
gtggaaattcttgcttctcttcaga

SEQ ID NO: 83049 - DNA, 25 bp, probe
tggtacagtagtagatcagcttact

SEQ ID NO: 83050 - DNA, 25 bp, probe
tagtgaaatcctcattcctctacaa

SEQ ID NO: 83051 - DNA, 25 bp, probe
ttagtgaaatcctcattcctctaca

SEQ ID NO: 83052 - DNA, 25 bp, probe
atggtggaaattcttgcttctcttc

SEQ ID NO: 83053 - DNA, 25 bp, probe
tagtacaggtggtgtgtaagaagta

SEQ ID NO: 83054 - DNA, 25 bp, probe
caacaagattgaggaatttctggag

SEQ ID NO: 83055 - DNA, 25 bp, probe
catagtacaggtggtgtgtaagaag

SEQ ID NO: 83056 - DNA, 25 bp, probe
caccaacaagattgaggaatttctg

SEQ ID NO: 83057 - DNA, 25 bp, probe
gacaccaacaagattgaggaatttc

SEQ ID NO: 83058 - DNA, 25 bp, probe
aacaagattgaggaatttctggagg

SEQ ID NO: 83059 - DNA, 25 bp, probe
atagtacaggtggtgtgtaagaagt

SEQ ID NO: 83060 - DNA, 25 bp, probe
acaccaacaagattgaggaatttct

SEQ ID NO: 83061 - DNA, 25 bp, probe
acatagtacaggtggtgtgtaagaa

SEQ ID NO: 83062 - DNA, 25 bp, probe
aagtaggtctgattgagcttgtgtt

SEQ ID NO: 83063 - DNA, 25 bp, probe
gatgaaaccagtgctgaagatgaag

SEQ ID NO: 83064 - DNA, 25 bp, probe
agtaggtctgattgagcttgtgttg

SEQ ID NO: 83065 - DNA, 25 bp, probe
taggtctgattgagcttgtgttgtg

SEQ ID NO: 83066 - DNA, 25 bp, probe
gtaggtctgattgagcttgtgttgt

SEQ ID NO: 83067 - DNA, 25 bp, probe
agtacaggtggtgtgtaagaagtac

SEQ ID NO: 83068 - DNA, 25 bp, probe
ccaacaagattgaggaatttctgga

SEQ ID NO: 83069 - DNA, 25 bp, probe
accaacaagattgaggaatttctgg

SEQ ID NO: 83070 - DNA, 25 bp, probe
tcaatgacaatctggagaagggact

SEQ ID NO: 83071 - DNA, 25 bp, probe
caatgacaatctggagaagggactc

SEQ ID NO: 83072 - DNA, 25 bp, probe
caagattgaggaatttctggaggca

SEQ ID NO: 83073 - DNA, 25 bp, probe
acaagattgaggaatttctggaggc

SEQ ID NO: 83074 - DNA, 25 bp, probe
gtacaggtggtgtgtaagaagtacc

SEQ ID NO: 83075 - DNA, 25 bp, probe
atgaaaccagtgctgaagatgaagg

SEQ ID NO: 83076 - DNA, 25 bp, probe
ggatgaaaccagtgctgaagatgaa

SEQ ID NO: 83077 - DNA, 25 bp, probe
gaaagccctgaaggttttagacaat

SEQ ID NO: 83078 - DNA, 25 bp, probe
cacctgtccagatgatgaggagatc

SEQ ID NO: 83079 - DNA, 25 bp, probe
tacaggtggtgtgtaagaagtaccg

SEQ ID NO: 83080 - DNA, 25 bp, probe
tgaaagccctgaaggttttagacaa

SEQ ID NO: 83081 - DNA, 25 bp, probe
caagtaggtctgattgagcttgtgt

SEQ ID NO: 83082 - DNA, 25 bp, probe
cacatagtacaggtggtgtgtaaga

SEQ ID NO: 83083 - DNA, 25 bp, probe
ctgaaagccctgaaggttttagaca

SEQ ID NO: 83084 - DNA, 25 bp, probe
tagtttgggtgcaagtaggtctgat

SEQ ID NO: 83085 - DNA, 25 bp, probe
gtggatgaaaccagtgctgaagatg

SEQ ID NO: 83086 - DNA, 25 bp, probe
gaagtggatgaaaccagtgctgaag

SEQ ID NO: 83087 - DNA, 25 bp, probe
gaagaagtggatgaaaccagtgctg

SEQ ID NO: 83088 - DNA, 25 bp, probe
cagaagaagtggatgaaaccagtgc

SEQ ID NO: 83089 - DNA, 25 bp, probe
ccacctgtccagatgatgaggagat

SEQ ID NO: 83090 - DNA, 25 bp, probe
ggtgcaagtaggtctgattgagctt

SEQ ID NO: 83091 - DNA, 25 bp, probe
tggatgaaaccagtgctgaagatga

SEQ ID NO: 83092 - DNA, 25 bp, probe
agtggatgaaaccagtgctgaagat

SEQ ID NO: 83093 - DNA, 25 bp, probe
agaagaagtggatgaaaccagtgct

SEQ ID NO: 83094 - DNA, 25 bp, probe
tgattgagcttgtgttgtgctgaag

SEQ ID NO: 83095 - DNA, 25 bp, probe
ctgattgagcttgtgttgtgctgaa

SEQ ID NO: 83096 - DNA, 25 bp, probe
ctagtttgggtgcaagtaggtctga

SEQ ID NO: 83097 - DNA, 25 bp, probe
aattcctgcttaatgtcagtctaca

SEQ ID NO: 83098 - DNA, 25 bp, probe
attcctgcttaatgtcagtctacag

SEQ ID NO: 83099 - DNA, 25 bp, probe
tactggataaacttgcttcagactt

SEQ ID NO: 83100 - DNA, 25 bp, probe
ctactggataaacttgcttcagact

SEQ ID NO: 83101 - DNA, 25 bp, probe
tctactggataaacttgcttcagac

SEQ ID NO: 83102 - DNA, 25 bp, probe
atctactggataaacttgcttcaga

SEQ ID NO: 83103 - DNA, 25 bp, probe
catctactggataaacttgcttcag

SEQ ID NO: 83104 - DNA, 25 bp, probe
actggataaacttgcttcagacttt

SEQ ID NO: 83105 - DNA, 25 bp, probe
aaattcctgcttaatgtcagtctac

SEQ ID NO: 83106 - DNA, 25 bp, probe
ttaaattcctgcttaatgtcagtct

SEQ ID NO: 83107 - DNA, 25 bp, probe
ccatctactggataaacttgcttca

SEQ ID NO: 83108 - DNA, 25 bp, probe
taaattcctgcttaatgtcagtcta

SEQ ID NO: 83109 - DNA, 25 bp, probe
gccatctactggataaacttgcttc

SEQ ID NO: 83110 - DNA, 25 bp, probe
ctggtcaccacaattagagcttgat

SEQ ID NO: 83111 - DNA, 25 bp, probe
tggtcaccacaattagagcttgatg

SEQ ID NO: 83112 - DNA, 25 bp, probe
tttaaattcctgcttaatgtcagtc

SEQ ID NO: 83113 - DNA, 25 bp, probe
agccatctactggataaacttgctt

SEQ ID NO: 83114 - DNA, 25 bp, probe
ctggataaacttgcttcagactttt

SEQ ID NO: 83115 - DNA, 25 bp, probe
caccacaattagagcttgatgcctc

SEQ ID NO: 83116 - DNA, 25 bp, probe
gtcaccacaattagagcttgatgcc

SEQ ID NO: 83117 - DNA, 25 bp, probe
ggtcaccacaattagagcttgatgc

SEQ ID NO: 83118 - DNA, 25 bp, probe
cagccatctactggataaacttgct

SEQ ID NO: 83119 - DNA, 25 bp, probe
tcaccacaattagagcttgatgcct

SEQ ID NO: 83120 - DNA, 25 bp, probe
gagatttctcattgatcacagatgt

SEQ ID NO: 83121 - DNA, 25 bp, probe
gatttctcattgatcacagatgtgc

SEQ ID NO: 83122 - DNA, 25 bp, probe
agatttctcattgatcacagatgtg

SEQ ID NO: 83123 - DNA, 25 bp, probe
atttctcattgatcacagatgtgcc

SEQ ID NO: 83124 - DNA, 25 bp, probe
ggagaggagggaatcgtacattttg

SEQ ID NO: 83125 - DNA, 25 bp, probe
gaggagggaatcgtacattttgctt

SEQ ID NO: 83126 - DNA, 25 bp, probe
agggagaggagggaatcgtacattt

SEQ ID NO: 83127 - DNA, 25 bp, probe
aagggagaggagggaatcgtacatt

SEQ ID NO: 83128 - DNA, 25 bp, probe
cctggtcaccacaattagagcttga

SEQ ID NO: 83129 - DNA, 25 bp, probe
accacaattagagcttgatgcctcc

SEQ ID NO: 83130 - DNA, 25 bp, probe
ctaggctgagatgcaccaagtacag

SEQ ID NO: 83131 - DNA, 25 bp, probe
aggagggaatcgtacattttgcttg

SEQ ID NO: 83132 - DNA, 25 bp, probe
tttcaggaagggagaggagggaatc

SEQ ID NO: 83133 - DNA, 25 bp, probe
ctttcaggaagggagaggagggaat

SEQ ID NO: 83134 - DNA, 25 bp, probe
gagaggagggaatcgtacattttgc

SEQ ID NO: 83135 - DNA, 25 bp, probe
agtagcccaggtcactgttaactag

SEQ ID NO: 83136 - DNA, 25 bp, probe
gagtagcccaggtcactgttaacta

SEQ ID NO: 83137 - DNA, 25 bp, probe
ttcctgcttaatgtcagtctacagg

SEQ ID NO: 83138 - DNA, 25 bp, probe
gaagggagaggagggaatcgtacat

SEQ ID NO: 83139 - DNA, 25 bp, probe
cttcactggagaccggaattgagag

SEQ ID NO: 83140 - DNA, 25 bp, probe
ttttaaattcctgcttaatgtcagt

SEQ ID NO: 83141 - DNA, 25 bp, probe
tatctcacaggagttggttagaatt

SEQ ID NO: 83142 - DNA, 25 bp, probe
atatctcacaggagttggttagaat

SEQ ID NO: 83143 - DNA, 25 bp, probe
tatatctcacaggagttggttagaa

SEQ ID NO: 83144 - DNA, 25 bp, probe
ttatatctcacaggagttggttaga

SEQ ID NO: 83145 - DNA, 25 bp, probe
aaccacacttagtcctgatgtactt

SEQ ID NO: 83146 - DNA, 25 bp, probe
gggaaatacaagaagagaaagacca

SEQ ID NO: 83147 - DNA, 25 bp, probe
tgggaaatacaagaagagaaagacc

SEQ ID NO: 83148 - DNA, 25 bp, probe
ggaaatacaagaagagaaagaccag

SEQ ID NO: 83149 - DNA, 25 bp, probe
gaataaaccacacttagtcctgatg

SEQ ID NO: 83150 - DNA, 25 bp, probe
aaatacaagaagagaaagaccagtg

SEQ ID NO: 83151 - DNA, 25 bp, probe
aatacaagaagagaaagaccagtgg

SEQ ID NO: 83152 - DNA, 25 bp, probe
gaaatacaagaagagaaagaccagt

SEQ ID NO: 83153 - DNA, 25 bp, probe
taagtggagttgggaaatacaagaa

SEQ ID NO: 83154 - DNA, 25 bp, probe
ggagttgggaaatacaagaagagaa

SEQ ID NO: 83155 - DNA, 25 bp, probe
gtaagtggagttgggaaatacaaga

SEQ ID NO: 83156 - DNA, 25 bp, probe
aagtggagttgggaaatacaagaag

SEQ ID NO: 83157 - DNA, 25 bp, probe
tgagaagtaattcctctgattctgt

SEQ ID NO: 83158 - DNA, 25 bp, probe
atctcacaggagttggttagaattt

SEQ ID NO: 83159 - DNA, 25 bp, probe
ttgggaaatacaagaagagaaagac

SEQ ID NO: 83160 - DNA, 25 bp, probe
gttgggaaatacaagaagagaaaga

SEQ ID NO: 83161 - DNA, 25 bp, probe
agttgggaaatacaagaagagaaag

SEQ ID NO: 83162 - DNA, 25 bp, probe
gagttgggaaatacaagaagagaaa

SEQ ID NO: 83163 - DNA, 25 bp, probe
ggagttggttagaatttctgtgttt

SEQ ID NO: 83164 - DNA, 25 bp, probe
aggagttggttagaatttctgtgtt

SEQ ID NO: 83165 - DNA, 25 bp, probe
tctcacaggagttggttagaatttc

SEQ ID NO: 83166 - DNA, 25 bp, probe
tggagttgggaaatacaagaagaga

SEQ ID NO: 83167 - DNA, 25 bp, probe
gtggagttgggaaatacaagaagag

SEQ ID NO: 83168 - DNA, 25 bp, probe
ggtaagtggagttgggaaatacaag

SEQ ID NO: 83169 - DNA, 25 bp, probe
aataaaccacacttagtcctgatgt

SEQ ID NO: 83170 - DNA, 25 bp, probe
tttgtaagacttagatgagatagcg

SEQ ID NO: 83171 - DNA, 25 bp, probe
agtggagttgggaaatacaagaaga

SEQ ID NO: 83172 - DNA, 25 bp, probe
ataaaccacacttagtcctgatgta

SEQ ID NO: 83173 - DNA, 25 bp, probe
ctcacaggagttggttagaatttct

SEQ ID NO: 83174 - DNA, 25 bp, probe
atacaagaagagaaagaccagtggg

SEQ ID NO: 83175 - DNA, 25 bp, probe
gagaagtaattcctctgattctgtt

SEQ ID NO: 83176 - DNA, 25 bp, probe
ttgagaagtaattcctctgattctg

SEQ ID NO: 83177 - DNA, 25 bp, probe
taaaccacacttagtcctgatgtac

SEQ ID NO: 83178 - DNA, 25 bp, probe
gggatttgtaagacttagatgagat

SEQ ID NO: 83179 - DNA, 25 bp, probe
ccacacttagtcctgatgtacttta

SEQ ID NO: 83180 - DNA, 25 bp, probe
aattgagaagtaattcctctgattc

SEQ ID NO: 83181 - DNA, 25 bp, probe
tcacaggagttggttagaatttctg

SEQ ID NO: 83182 - DNA, 25 bp, probe
ggaataaaccacacttagtcctgat

SEQ ID NO: 83183 - DNA, 25 bp, probe
caggagttggttagaatttctgtgt

SEQ ID NO: 83184 - DNA, 25 bp, probe
accacacttagtcctgatgtacttt

SEQ ID NO: 83185 - DNA, 25 bp, probe
aacttggacatagatcagaagctaa

SEQ ID NO: 83186 - DNA, 25 bp, probe
tttactactgagggaaatagccaaa

SEQ ID NO: 83187 - DNA, 25 bp, probe
gtaaatgctgtagaagtgagtttgt

SEQ ID NO: 83188 - DNA, 25 bp, probe
agtaaatgctgtagaagtgagtttg

SEQ ID NO: 83189 - DNA, 25 bp, probe
aatgctgtagaagtgagtttgtaaa

SEQ ID NO: 83190 - DNA, 25 bp, probe
aaatgctgtagaagtgagtttgtaa

SEQ ID NO: 83191 - DNA, 25 bp, probe
ttaaagagaacactggacaacattt

SEQ ID NO: 83192 - DNA, 25 bp, probe
atgctgtagaagtgagtttgtaaat

SEQ ID NO: 83193 - DNA, 25 bp, probe
aagtaaatgctgtagaagtgagttt

SEQ ID NO: 83194 - DNA, 25 bp, probe
tagcagagttacttctaagggttcc

SEQ ID NO: 83195 - DNA, 25 bp, probe
tgctgtagaagtgagtttgtaaata

SEQ ID NO: 83196 - DNA, 25 bp, probe
taaatgctgtagaagtgagtttgta

SEQ ID NO: 83197 - DNA, 25 bp, probe
tcaaacttggacatagatcagaagc

SEQ ID NO: 83198 - DNA, 25 bp, probe
ttagcagagttacttctaagggttc

SEQ ID NO: 83199 - DNA, 25 bp, probe
taagtaaatgctgtagaagtgagtt

SEQ ID NO: 83200 - DNA, 25 bp, probe
ttaagtaaatgctgtagaagtgagt

SEQ ID NO: 83201 - DNA, 25 bp, probe
attagcagagttacttctaagggtt

SEQ ID NO: 83202 - DNA, 25 bp, probe
atcaaacttggacatagatcagaag

SEQ ID NO: 83203 - DNA, 25 bp, probe
aatcaaacttggacatagatcagaa

SEQ ID NO: 83204 - DNA, 25 bp, probe
aaatcaaacttggacatagatcaga

SEQ ID NO: 83205 - DNA, 25 bp, probe
tatcacaaatctgtagtagcatggg

SEQ ID NO: 83206 - DNA, 25 bp, probe
gtatcacaaatctgtagtagcatgg

SEQ ID NO: 83207 - DNA, 25 bp, probe
tattagcagagttacttctaagggt

SEQ ID NO: 83208 - DNA, 25 bp, probe
acttggacatagatcagaagctaaa

SEQ ID NO: 83209 - DNA, 25 bp, probe
aaacttggacatagatcagaagcta

SEQ ID NO: 83210 - DNA, 25 bp, probe
tttaaagagaacactggacaacatt

SEQ ID NO: 83211 - DNA, 25 bp, probe
caaacttggacatagatcagaagct

SEQ ID NO: 83212 - DNA, 25 bp, probe
gctgtagaagtgagtttgtaaatat

SEQ ID NO: 83213 - DNA, 25 bp, probe
agtatcacaaatctgtagtagcatg

SEQ ID NO: 83214 - DNA, 25 bp, probe
atcacaaatctgtagtagcatgggt

SEQ ID NO: 83215 - DNA, 25 bp, probe
attaagtaaatgctgtagaagtgag

SEQ ID NO: 83216 - DNA, 25 bp, probe
acactggacaacattttactactga

SEQ ID NO: 83217 - DNA, 25 bp, probe
agagaacactggacaacattttact

SEQ ID NO: 83218 - DNA, 25 bp, probe
aagagaacactggacaacattttac

SEQ ID NO: 83219 - DNA, 25 bp, probe
atattagcagagttacttctaaggg

SEQ ID NO: 83220 - DNA, 25 bp, probe
ttactactgagggaaatagccaaaa

SEQ ID NO: 83221 - DNA, 25 bp, probe
ttttactactgagggaaatagccaa

SEQ ID NO: 83222 - DNA, 25 bp, probe
ggacaacattttactactgagggaa

SEQ ID NO: 83223 - DNA, 25 bp, probe
actggacaacattttactactgagg

SEQ ID NO: 83224 - DNA, 25 bp, probe
cactggacaacattttactactgag

SEQ ID NO: 83225 - DNA, 25 bp, probe
aacactggacaacattttactactg

SEQ ID NO: 83226 - DNA, 25 bp, probe
gaacactggacaacattttactact

SEQ ID NO: 83227 - DNA, 25 bp, probe
agaacactggacaacattttactac

SEQ ID NO: 83228 - DNA, 25 bp, probe
agcagagttacttctaagggttcct

SEQ ID NO: 83229 - DNA, 25 bp, probe
tatatgatccatgaaccagaacctc

SEQ ID NO: 83230 - DNA, 25 bp, probe
atatgatccatgaaccagaacctca

SEQ ID NO: 83231 - DNA, 25 bp, probe
attatgttgccttcttgtttctcac

SEQ ID NO: 83232 - DNA, 25 bp, probe
tacccaagaaaccaaagaaatgaag

SEQ ID NO: 83233 - DNA, 25 bp, probe
ctacccaagaaaccaaagaaatgaa

SEQ ID NO: 83234 - DNA, 25 bp, probe
actacccaagaaaccaaagaaatga

SEQ ID NO: 83235 - DNA, 25 bp, probe
cactacccaagaaaccaaagaaatg

SEQ ID NO: 83236 - DNA, 25 bp, probe
tatgttgccttcttgtttctcactt

SEQ ID NO: 83237 - DNA, 25 bp, probe
ttatgttgccttcttgtttctcact

SEQ ID NO: 83238 - DNA, 25 bp, probe
gtccttacttcctaacatctttctg

SEQ ID NO: 83239 - DNA, 25 bp, probe
tatgatccatgaaccagaacctcac

SEQ ID NO: 83240 - DNA, 25 bp, probe
tccttacttcctaacatctttctga

SEQ ID NO: 83241 - DNA, 25 bp, probe
tattatgttgccttcttgtttctca

SEQ ID NO: 83242 - DNA, 25 bp, probe
ccactacccaagaaaccaaagaaat

SEQ ID NO: 83243 - DNA, 25 bp, probe
agctgtccttacttcctaacatctt

SEQ ID NO: 83244 - DNA, 25 bp, probe
atgttgccttcttgtttctcacttt

SEQ ID NO: 83245 - DNA, 25 bp, probe
gccttcttgtttctcactttgatat

SEQ ID NO: 83246 - DNA, 25 bp, probe
tgccttcttgtttctcactttgata

SEQ ID NO: 83247 - DNA, 25 bp, probe
cttgcggatttatgtttcagtgtac

SEQ ID NO: 83248 - DNA, 25 bp, probe
acttgcggatttatgtttcagtgta

SEQ ID NO: 83249 - DNA, 25 bp, probe
ttgcggatttatgtttcagtgtact

SEQ ID NO: 83250 - DNA, 25 bp, probe
gctgtccttacttcctaacatcttt

SEQ ID NO: 83251 - DNA, 25 bp, probe
ttgccttcttgtttctcactttgat

SEQ ID NO: 83252 - DNA, 25 bp, probe
ccttacttcctaacatctttctgat

SEQ ID NO: 83253 - DNA, 25 bp, probe
tgtccttacttcctaacatctttct

SEQ ID NO: 83254 - DNA, 25 bp, probe
ctgtccttacttcctaacatctttc

SEQ ID NO: 83255 - DNA, 25 bp, probe
ttattatgttgccttcttgtttctc

SEQ ID NO: 83256 - DNA, 25 bp, probe
tgttgccttcttgtttctcactttg

SEQ ID NO: 83257 - DNA, 25 bp, probe
acccaagaaaccaaagaaatgaagc

SEQ ID NO: 83258 - DNA, 25 bp, probe
aaagccttgattaaagaggaagttt

SEQ ID NO: 83259 - DNA, 25 bp, probe
acttcctaacatctttctgataaca

SEQ ID NO: 83260 - DNA, 25 bp, probe
tatgtgtggtgacttgcggatttat

SEQ ID NO: 83261 - DNA, 25 bp, probe
gacttgcggatttatgtttcagtgt

SEQ ID NO: 83262 - DNA, 25 bp, probe
tgacttgcggatttatgtttcagtg

SEQ ID NO: 83263 - DNA, 25 bp, probe
gtgacttgcggatttatgtttcagt

SEQ ID NO: 83264 - DNA, 25 bp, probe
gttgccttcttgtttctcactttga

SEQ ID NO: 83265 - DNA, 25 bp, probe
gatccatgaaccagaacctcacatc

SEQ ID NO: 83266 - DNA, 25 bp, probe
ccaagaaaccaaagaaatgaagctg

SEQ ID NO: 83267 - DNA, 25 bp, probe
attattatgttgccttcttgtttct

SEQ ID NO: 83268 - DNA, 25 bp, probe
cattattatgttgccttcttgtttc

SEQ ID NO: 83269 - DNA, 25 bp, probe
cggatttatgtttcagtgtactgga

SEQ ID NO: 83270 - DNA, 25 bp, probe
gtggtgacttgcggatttatgtttc

SEQ ID NO: 83271 - DNA, 25 bp, probe
ccttcttgtttctcactttgatatt

SEQ ID NO: 83272 - DNA, 25 bp, probe
ggatttatgtttcagtgtactggaa

SEQ ID NO: 83273 - DNA, 25 bp, probe
ctctcctgaatacttatctgtgacc

SEQ ID NO: 83274 - DNA, 25 bp, probe
cctctcctgaatacttatctgtgac

SEQ ID NO: 83275 - DNA, 25 bp, probe
acctctcctgaatacttatctgtga

SEQ ID NO: 83276 - DNA, 25 bp, probe
tctcctgaatacttatctgtgacca

SEQ ID NO: 83277 - DNA, 25 bp, probe
ctccacctctcctgaatacttatct

SEQ ID NO: 83278 - DNA, 25 bp, probe
tccacctctcctgaatacttatctg

SEQ ID NO: 83279 - DNA, 25 bp, probe
ccacctctcctgaatacttatctgt

SEQ ID NO: 83280 - DNA, 25 bp, probe
ctcctgaatacttatctgtgaccac

SEQ ID NO: 83281 - DNA, 25 bp, probe
cctccacctctcctgaatacttatc

SEQ ID NO: 83282 - DNA, 25 bp, probe
cacctctcctgaatacttatctgtg

SEQ ID NO: 83283 - DNA, 25 bp, probe
ctttattgctgtgatagtctgtgtg

SEQ ID NO: 83284 - DNA, 25 bp, probe
tctttattgctgtgatagtctgtgt

SEQ ID NO: 83285 - DNA, 25 bp, probe
ttctttattgctgtgatagtctgtg

SEQ ID NO: 83286 - DNA, 25 bp, probe
tcctgaatacttatctgtgaccaca

SEQ ID NO: 83287 - DNA, 25 bp, probe
gtaggtggtgttgagaaagaatgag

SEQ ID NO: 83288 - DNA, 25 bp, probe
gcctccacctctcctgaatacttat

SEQ ID NO: 83289 - DNA, 25 bp, probe
gttgagaaagaatgagcattgagac

SEQ ID NO: 83290 - DNA, 25 bp, probe
cctgaatacttatctgtgaccacac

SEQ ID NO: 83291 - DNA, 25 bp, probe
tttctttattgctgtgatagtctgt

SEQ ID NO: 83292 - DNA, 25 bp, probe
ctgtaggtggtgttgagaaagaatg

SEQ ID NO: 83293 - DNA, 25 bp, probe
ttgagaaagaatgagcattgagaca

SEQ ID NO: 83294 - DNA, 25 bp, probe
tgttgagaaagaatgagcattgaga

SEQ ID NO: 83295 - DNA, 25 bp, probe
gtgttgagaaagaatgagcattgag

SEQ ID NO: 83296 - DNA, 25 bp, probe
tttattgctgtgatagtctgtgtgc

SEQ ID NO: 83297 - DNA, 25 bp, probe
ctgaatacttatctgtgaccacacg

SEQ ID NO: 83298 - DNA, 25 bp, probe
tgtaggtggtgttgagaaagaatga

SEQ ID NO: 83299 - DNA, 25 bp, probe
tgagaaagaatgagcattgagacac

SEQ ID NO: 83300 - DNA, 25 bp, probe
caattctgacttctcccatctagtg

SEQ ID NO: 83301 - DNA, 25 bp, probe
ggtgttgagaaagaatgagcattga

SEQ ID NO: 83302 - DNA, 25 bp, probe
catctagtggaaatgagcgaaatca

SEQ ID NO: 83303 - DNA, 25 bp, probe
tctcctccaggtatttgagttgttt

SEQ ID NO: 83304 - DNA, 25 bp, probe
ttctcctccaggtatttgagttgtt

SEQ ID NO: 83305 - DNA, 25 bp, probe
gtctcttgagatttggatacactct

SEQ ID NO: 83306 - DNA, 25 bp, probe
tggtgttgagaaagaatgagcattg

SEQ ID NO: 83307 - DNA, 25 bp, probe
gtggtgttgagaaagaatgagcatt

SEQ ID NO: 83308 - DNA, 25 bp, probe
tttggatacactctctagctttagg

SEQ ID NO: 83309 - DNA, 25 bp, probe
gagactctcttaggaaaccaatagt

SEQ ID NO: 83310 - DNA, 25 bp, probe
tgtctcttgagatttggatacactc

SEQ ID NO: 83311 - DNA, 25 bp, probe
ctgtctcttgagatttggatacact

SEQ ID NO: 83312 - DNA, 25 bp, probe
gagaaagaatgagcattgagacacg

SEQ ID NO: 83313 - DNA, 25 bp, probe
ttggatacactctctagctttaggg

SEQ ID NO: 83314 - DNA, 25 bp, probe
cttctcctccaggtatttgagttgt

SEQ ID NO: 83315 - DNA, 25 bp, probe
actctcttaggaaaccaatagtccc

SEQ ID NO: 83316 - DNA, 25 bp, probe
taggtggtgttgagaaagaatgagc

SEQ ID NO: 83317 - DNA, 25 bp, probe
tatatgtctgtgtgtgtgtgtgtat

SEQ ID NO: 83318 - DNA, 25 bp, probe
gtctgtgtgtgtgtgtgtatgtata

SEQ ID NO: 83319 - DNA, 25 bp, probe
atatgtctgtgtgtgtgtgtgtatg

SEQ ID NO: 83320 - DNA, 25 bp, probe
atatatgtctgtgtgtgtgtgtgta

SEQ ID NO: 83321 - DNA, 25 bp, probe
tgtctgtgtgtgtgtgtgtatgtat

SEQ ID NO: 83322 - DNA, 25 bp, probe
atgtctgtgtgtgtgtgtgtatgta

SEQ ID NO: 83323 - DNA, 25 bp, probe
tatgtctgtgtgtgtgtgtgtatgt

SEQ ID NO: 83324 - DNA, 25 bp, probe
aatatatgtctgtgtgtgtgtgtgt

SEQ ID NO: 83325 - DNA, 25 bp, probe
tctgtgtgtgtgtgtgtatgtatac

SEQ ID NO: 83326 - DNA, 25 bp, probe
aggaaggctactggcattaattatt

SEQ ID NO: 83327 - DNA, 25 bp, probe
taggaaggctactggcattaattat

SEQ ID NO: 83328 - DNA, 25 bp, probe
gaactctgatcgcttcacataacaa

SEQ ID NO: 83329 - DNA, 25 bp, probe
tcatgttaatagacagtagccaagt

SEQ ID NO: 83330 - DNA, 25 bp, probe
ggaaggctactggcattaattatta

SEQ ID NO: 83331 - DNA, 25 bp, probe
agacagtagccaagttatattgaat

SEQ ID NO: 83332 - DNA, 25 bp, probe
ggaggacatcataaggaagttatta

SEQ ID NO: 83333 - DNA, 25 bp, probe
catgttaatagacagtagccaagtt

SEQ ID NO: 83334 - DNA, 25 bp, probe
gacatcataaggaagttattaacgg

SEQ ID NO: 83335 - DNA, 25 bp, probe
ggacatcataaggaagttattaacg

SEQ ID NO: 83336 - DNA, 25 bp, probe
gatactctccctgacatttctaaca

SEQ ID NO: 83337 - DNA, 25 bp, probe
atcatgttaatagacagtagccaag

SEQ ID NO: 83338 - DNA, 25 bp, probe
gaatcatgttaatagacagtagcca

SEQ ID NO: 83339 - DNA, 25 bp, probe
tgaatcatgttaatagacagtagcc

SEQ ID NO: 83340 - DNA, 25 bp, probe
gagggaggacatcataaggaagtta

SEQ ID NO: 83341 - DNA, 25 bp, probe
agcactcccttaggcattatttaat

SEQ ID NO: 83342 - DNA, 25 bp, probe
taagaagacatgacaatgcaatgaa

SEQ ID NO: 83343 - DNA, 25 bp, probe
ttaagaagacatgacaatgcaatga

SEQ ID NO: 83344 - DNA, 25 bp, probe
atactctccctgacatttctaacat

SEQ ID NO: 83345 - DNA, 25 bp, probe
gggaggacatcataaggaagttatt

SEQ ID NO: 83346 - DNA, 25 bp, probe
actctccctgacatttctaacatat

SEQ ID NO: 83347 - DNA, 25 bp, probe
agggaggacatcataaggaagttat

SEQ ID NO: 83348 - DNA, 25 bp, probe
cctcccagttctacaagcatatttc

SEQ ID NO: 83349 - DNA, 25 bp, probe
tagacagtagccaagttatattgaa

SEQ ID NO: 83350 - DNA, 25 bp, probe
agatactctccctgacatttctaac

SEQ ID NO: 83351 - DNA, 25 bp, probe
aagcactcccttaggcattatttaa

SEQ ID NO: 83352 - DNA, 25 bp, probe
aaagcactcccttaggcattattta

SEQ ID NO: 83353 - DNA, 25 bp, probe
tgttaatagacagtagccaagttat

SEQ ID NO: 83354 - DNA, 25 bp, probe
atgttaatagacagtagccaagtta

SEQ ID NO: 83355 - DNA, 25 bp, probe
ttcacataacaaagcactcccttag

SEQ ID NO: 83356 - DNA, 25 bp, probe
cttcacataacaaagcactccctta

SEQ ID NO: 83357 - DNA, 25 bp, probe
tcctcccagttctacaagcatattt

SEQ ID NO: 83358 - DNA, 25 bp, probe
ttcctcccagttctacaagcatatt

SEQ ID NO: 83359 - DNA, 25 bp, probe
tttcctcccagttctacaagcatat

SEQ ID NO: 83360 - DNA, 25 bp, probe
ttgttcaaagttgtagttcttgtgc

SEQ ID NO: 83361 - DNA, 25 bp, probe
accaaggagccaataattgactatt

SEQ ID NO: 83362 - DNA, 25 bp, probe
aaccaaggagccaataattgactat

SEQ ID NO: 83363 - DNA, 25 bp, probe
ataaccaaggagccaataattgact

SEQ ID NO: 83364 - DNA, 25 bp, probe
taaccaaggagccaataattgacta

SEQ ID NO: 83365 - DNA, 25 bp, probe
aataaccaaggagccaataattgac

SEQ ID NO: 83366 - DNA, 25 bp, probe
agtctcacatactgtcttgtactga

SEQ ID NO: 83367 - DNA, 25 bp, probe
cacagacatcagtcagacaagaatc

SEQ ID NO: 83368 - DNA, 25 bp, probe
agaatgattaggtatagtggagact

SEQ ID NO: 83369 - DNA, 25 bp, probe
gtctcacatactgtcttgtactgac

SEQ ID NO: 83370 - DNA, 25 bp, probe
aagaatgattaggtatagtggagac

SEQ ID NO: 83371 - DNA, 25 bp, probe
tcacagacatcagtcagacaagaat

SEQ ID NO: 83372 - DNA, 25 bp, probe
atcacagacatcagtcagacaagaa

SEQ ID NO: 83373 - DNA, 25 bp, probe
tcccttgtctattcctgtctgtata

SEQ ID NO: 83374 - DNA, 25 bp, probe
atcccttgtctattcctgtctgtat

SEQ ID NO: 83375 - DNA, 25 bp, probe
aatcccttgtctattcctgtctgta

SEQ ID NO: 83376 - DNA, 25 bp, probe
agacatcagtcagacaagaatcctg

SEQ ID NO: 83377 - DNA, 25 bp, probe
cagacatcagtcagacaagaatcct

SEQ ID NO: 83378 - DNA, 25 bp, probe
cccttgtctattcctgtctgtataa

SEQ ID NO: 83379 - DNA, 25 bp, probe
attcctcatcacagacatcagtcag

SEQ ID NO: 83380 - DNA, 25 bp, probe
gattcctcatcacagacatcagtca

SEQ ID NO: 83381 - DNA, 25 bp, probe
gaatgattaggtatagtggagactt

SEQ ID NO: 83382 - DNA, 25 bp, probe
acagacatcagtcagacaagaatcc

SEQ ID NO: 83383 - DNA, 25 bp, probe
tgtgtcagaaatcccttgtctattc

SEQ ID NO: 83384 - DNA, 25 bp, probe
gaaatcccttgtctattcctgtctg

SEQ ID NO: 83385 - DNA, 25 bp, probe
catcacagacatcagtcagacaaga

SEQ ID NO: 83386 - DNA, 25 bp, probe
tcatcacagacatcagtcagacaag

SEQ ID NO: 83387 - DNA, 25 bp, probe
ctcatcacagacatcagtcagacaa

SEQ ID NO: 83388 - DNA, 25 bp, probe
gtgtgtcagaaatcccttgtctatt

SEQ ID NO: 83389 - DNA, 25 bp, probe
aaatcccttgtctattcctgtctgt

SEQ ID NO: 83390 - DNA, 25 bp, probe
agaaatcccttgtctattcctgtct

SEQ ID NO: 83391 - DNA, 25 bp, probe
tgtcagaaatcccttgtctattcct

SEQ ID NO: 83392 - DNA, 25 bp, probe
gtgtcagaaatcccttgtctattcc

SEQ ID NO: 83393 - DNA, 25 bp, probe
taggtatagtggagacttatttgcc

SEQ ID NO: 83394 - DNA, 25 bp, probe
agtgtgtcagaaatcccttgtctat

SEQ ID NO: 83395 - DNA, 25 bp, probe
attcctgtctgtataaagtgtttca

SEQ ID NO: 83396 - DNA, 25 bp, probe
ccaaggagccaataattgactattt

SEQ ID NO: 83397 - DNA, 25 bp, probe
gacatcagtcagacaagaatcctgg

SEQ ID NO: 83398 - DNA, 25 bp, probe
tgtctattcctgtctgtataaagtg

SEQ ID NO: 83399 - DNA, 25 bp, probe
aaataaccaaggagccaataattga

SEQ ID NO: 83400 - DNA, 25 bp, probe
ggagacttatttgccagcagataaa

SEQ ID NO: 83401 - DNA, 25 bp, probe
gtctattcctgtctgtataaagtgt

SEQ ID NO: 83402 - DNA, 25 bp, probe
ccttgtctattcctgtctgtataaa

SEQ ID NO: 83403 - DNA, 25 bp, probe
aagaatcctgggagcagtaatttac

SEQ ID NO: 83404 - DNA, 25 bp, probe
caagaatcctgggagcagtaattta

SEQ ID NO: 83405 - DNA, 25 bp, probe
ctcatccaccaacatacagactaat

SEQ ID NO: 83406 - DNA, 25 bp, probe
tcatccaccaacatacagactaatt

SEQ ID NO: 83407 - DNA, 25 bp, probe
tatctctcatccaccaacatacaga

SEQ ID NO: 83408 - DNA, 25 bp, probe
tctcatccaccaacatacagactaa

SEQ ID NO: 83409 - DNA, 25 bp, probe
gcagtcattcatcaactcattctat

SEQ ID NO: 83410 - DNA, 25 bp, probe
ctctcatccaccaacatacagacta

SEQ ID NO: 83411 - DNA, 25 bp, probe
aactctgtcacattacctgaatcac

SEQ ID NO: 83412 - DNA, 25 bp, probe
atctctcatccaccaacatacagac

SEQ ID NO: 83413 - DNA, 25 bp, probe
ttgtatctctcatccaccaacatac

SEQ ID NO: 83414 - DNA, 25 bp, probe
gtatctctcatccaccaacatacag

SEQ ID NO: 83415 - DNA, 25 bp, probe
gtgatgtcaacaagatggtggaatc

SEQ ID NO: 83416 - DNA, 25 bp, probe
gacagttgtatctctcatccaccaa

SEQ ID NO: 83417 - DNA, 25 bp, probe
agtgatgtcaacaagatggtggaat

SEQ ID NO: 83418 - DNA, 25 bp, probe
gaatcgacagttgtatctctcatcc

SEQ ID NO: 83419 - DNA, 25 bp, probe
ggaatcgacagttgtatctctcatc

SEQ ID NO: 83420 - DNA, 25 bp, probe
actctgtcacattacctgaatcacc

SEQ ID NO: 83421 - DNA, 25 bp, probe
gtcattcatcaactcattctattca

SEQ ID NO: 83422 - DNA, 25 bp, probe
aatcgacagttgtatctctcatcca

SEQ ID NO: 83423 - DNA, 25 bp, probe
tggaatcgacagttgtatctctcat

SEQ ID NO: 83424 - DNA, 25 bp, probe
gaaatatgaactgcctgacaaagaa

SEQ ID NO: 83425 - DNA, 25 bp, probe
gagaaatatgaactgcctgacaaag

SEQ ID NO: 83426 - DNA, 25 bp, probe
gaaatggagaaatatgaactgcctg

SEQ ID NO: 83427 - DNA, 25 bp, probe
agaaatggagaaatatgaactgcct

SEQ ID NO: 83428 - DNA, 25 bp, probe
agaaatatgaactgcctgacaaaga

SEQ ID NO: 83429 - DNA, 25 bp, probe
aaatggagaaatatgaactgcctga

SEQ ID NO: 83430 - DNA, 25 bp, probe
aagaaatggagaaatatgaactgcc

SEQ ID NO: 83431 - DNA, 25 bp, probe
aaatatgaactgcctgacaaagaat

SEQ ID NO: 83432 - DNA, 25 bp, probe
ccaagaatactgaggcaattcacat

SEQ ID NO: 83433 - DNA, 25 bp, probe
tctctcatccaccaacatacagact

SEQ ID NO: 83434 - DNA, 25 bp, probe
caaggaatcaaggaaacttagcaaa

SEQ ID NO: 83435 - DNA, 25 bp, probe
gaaacacaaggaatcaaggaaactt

SEQ ID NO: 83436 - DNA, 25 bp, probe
aaggaatcaaggaaacttagcaaag

SEQ ID NO: 83437 - DNA, 25 bp, probe
ctccagaatccaagtgaaagtttat

SEQ ID NO: 83438 - DNA, 25 bp, probe
gacacgatgaaagcacaggaatata

SEQ ID NO: 83439 - DNA, 25 bp, probe
aacacaaggaatcaaggaaacttag

SEQ ID NO: 83440 - DNA, 25 bp, probe
caagaatactgaggcaattcacatg

SEQ ID NO: 83441 - DNA, 25 bp, probe
gagtgatgtcaacaagatggtggaa

SEQ ID NO: 83442 - DNA, 25 bp, probe
aaggagtgatgtcaacaagatggtg

SEQ ID NO: 83443 - DNA, 25 bp, probe
aatatgaactgcctgacaaagaatt

SEQ ID NO: 83444 - DNA, 25 bp, probe
aatggagaaatatgaactgcctgac

SEQ ID NO: 83445 - DNA, 25 bp, probe
gaaagtttatagcaccctggtagta

SEQ ID NO: 83446 - DNA, 25 bp, probe
gctccagaatccaagtgaaagttta

SEQ ID NO: 83447 - DNA, 25 bp, probe
acaaggaatcaaggaaacttagcaa

SEQ ID NO: 83448 - DNA, 25 bp, probe
catccaccaacatacagactaattt

SEQ ID NO: 83449 - DNA, 25 bp, probe
gagtcagacagtccagaggatgttg

SEQ ID NO: 83450 - DNA, 25 bp, probe
catgagtcagacagtccagaggatg

SEQ ID NO: 83451 - DNA, 25 bp, probe
atgagtcagacagtccagaggatgt

SEQ ID NO: 83452 - DNA, 25 bp, probe
tgagtcagacagtccagaggatgtt

SEQ ID NO: 83453 - DNA, 25 bp, probe
aactgttctctgtgacatcatcctg

SEQ ID NO: 83454 - DNA, 25 bp, probe
aagaagtttgaggaggtgaatgaga

SEQ ID NO: 83455 - DNA, 25 bp, probe
gaactgttctctgtgacatcatcct

SEQ ID NO: 83456 - DNA, 25 bp, probe
aagtttgaggaggtgaatgagacta

SEQ ID NO: 83457 - DNA, 25 bp, probe
caagaagtttgaggaggtgaatgag

SEQ ID NO: 83458 - DNA, 25 bp, probe
catcatcctgctcaacttcctcaag

SEQ ID NO: 83459 - DNA, 25 bp, probe
agaagtttgaggaggtgaatgagac

SEQ ID NO: 83460 - DNA, 25 bp, probe
gaatgctggcaagttcaacatcatc

SEQ ID NO: 83461 - DNA, 25 bp, probe
agtttgaggaggtgaatgagactac

SEQ ID NO: 83462 - DNA, 25 bp, probe
gaagtttgaggaggtgaatgagact

SEQ ID NO: 83463 - DNA, 25 bp, probe
acatcatcctgctcaacttcctcaa

SEQ ID NO: 83464 - DNA, 25 bp, probe
ctgtgacatcatcctgctcaacttc

SEQ ID NO: 83465 - DNA, 25 bp, probe
ttctctgtgacatcatcctgctcaa

SEQ ID NO: 83466 - DNA, 25 bp, probe
gtttgaggaggtgaatgagactacg

SEQ ID NO: 83467 - DNA, 25 bp, probe
ccaagaagtttgaggaggtgaatga

SEQ ID NO: 83468 - DNA, 25 bp, probe
gacatcatcctgctcaacttcctca

SEQ ID NO: 83469 - DNA, 25 bp, probe
tctgtgacatcatcctgctcaactt

SEQ ID NO: 83470 - DNA, 25 bp, probe
ggaactgttctctgtgacatcatcc

SEQ ID NO: 83471 - DNA, 25 bp, probe
ctacaaaatggaaaatggcagtgag

SEQ ID NO: 83472 - DNA, 25 bp, probe
tgacatcatcctgctcaacttcctc

SEQ ID NO: 83473 - DNA, 25 bp, probe
acaaaatggaaaatggcagtgagta

SEQ ID NO: 83474 - DNA, 25 bp, probe
tacaaaatggaaaatggcagtgagt

SEQ ID NO: 83475 - DNA, 25 bp, probe
ctctgtgacatcatcctgctcaact

SEQ ID NO: 83476 - DNA, 25 bp, probe
tctctgtgacatcatcctgctcaac

SEQ ID NO: 83477 - DNA, 25 bp, probe
gttctctgtgacatcatcctgctca

SEQ ID NO: 83478 - DNA, 25 bp, probe
tactacaaaatggaaaatggcagtg

SEQ ID NO: 83479 - DNA, 25 bp, probe
aatgctggcaagttcaacatcatcc

SEQ ID NO: 83480 - DNA, 25 bp, probe
ggaatgctggcaagttcaacatcat

SEQ ID NO: 83481 - DNA, 25 bp, probe
tgttctctgtgacatcatcctgctc

SEQ ID NO: 83482 - DNA, 25 bp, probe
ctgttctctgtgacatcatcctgct

SEQ ID NO: 83483 - DNA, 25 bp, probe
gtgacatcatcctgctcaacttcct

SEQ ID NO: 83484 - DNA, 25 bp, probe
caaaatggaaaatggcagtgagtac

SEQ ID NO: 83485 - DNA, 25 bp, probe
atcatcctgctcaacttcctcaagg

SEQ ID NO: 83486 - DNA, 25 bp, probe
actacaaaatggaaaatggcagtga

SEQ ID NO: 83487 - DNA, 25 bp, probe
ggtgaatgagactacgctgaaaatc

SEQ ID NO: 83488 - DNA, 25 bp, probe
gtactacaaaatggaaaatggcagt

SEQ ID NO: 83489 - DNA, 25 bp, probe
gtacaaagccaagaagtttgaggag

SEQ ID NO: 83490 - DNA, 25 bp, probe
cgaccagtacaaagccaagaagttt

SEQ ID NO: 83491 - DNA, 25 bp, probe
gggaactgttctctgtgacatcatc

SEQ ID NO: 83492 - DNA, 25 bp, probe
aggtgaatgagactacgctgaaaat

SEQ ID NO: 83493 - DNA, 25 bp, probe
actgttctctgtgacatcatcctgc

SEQ ID NO: 83494 - DNA, 25 bp, probe
gtgaatgagactacgctgaaaatcg

SEQ ID NO: 83495 - DNA, 25 bp, probe
aggaggtgaatgagactacgctgaa

SEQ ID NO: 83496 - DNA, 25 bp, probe
ttgaggaggtgaatgagactacgct

SEQ ID NO: 83497 - DNA, 25 bp, probe
acaatgtattactggactctgaagg

SEQ ID NO: 83498 - DNA, 25 bp, probe
ggacaatgtattactggactctgaa

SEQ ID NO: 83499 - DNA, 25 bp, probe
aactggacaatgtattactggactc

SEQ ID NO: 83500 - DNA, 25 bp, probe
ctggacaatgtattactggactctg

SEQ ID NO: 83501 - DNA, 25 bp, probe
caatgtattactggactctgaaggc

SEQ ID NO: 83502 - DNA, 25 bp, probe
tggacaatgtattactggactctga

SEQ ID NO: 83503 - DNA, 25 bp, probe
actggacaatgtattactggactct

SEQ ID NO: 83504 - DNA, 25 bp, probe
gacaatgtattactggactctgaag

SEQ ID NO: 83505 - DNA, 25 bp, probe
tactactagcttccagacaatcatg

SEQ ID NO: 83506 - DNA, 25 bp, probe
aatactactagcttccagacaatca

SEQ ID NO: 83507 - DNA, 25 bp, probe
atactactagcttccagacaatcat

SEQ ID NO: 83508 - DNA, 25 bp, probe
ctacggcatgtgtaaggaaggatta

SEQ ID NO: 83509 - DNA, 25 bp, probe
aaactggacaatgtattactggact

SEQ ID NO: 83510 - DNA, 25 bp, probe
tgaaactggacaatgtattactgga

SEQ ID NO: 83511 - DNA, 25 bp, probe
gaaactggacaatgtattactggac

SEQ ID NO: 83512 - DNA, 25 bp, probe
actactagcttccagacaatcatgt

SEQ ID NO: 83513 - DNA, 25 bp, probe
ttaaggcagcagttattaaattggt

SEQ ID NO: 83514 - DNA, 25 bp, probe
ttgaaactggacaatgtattactgg

SEQ ID NO: 83515 - DNA, 25 bp, probe
acatagtgggattacatcataaacc

SEQ ID NO: 83516 - DNA, 25 bp, probe
catagtgggattacatcataaacct

SEQ ID NO: 83517 - DNA, 25 bp, probe
ttctactcatgttgccatttaatgc

SEQ ID NO: 83518 - DNA, 25 bp, probe
agcagattgttctttgttatagagt

SEQ ID NO: 83519 - DNA, 25 bp, probe
agagatttgaaactggacaatgtat

SEQ ID NO: 83520 - DNA, 25 bp, probe
atagagatttgaaactggacaatgt

SEQ ID NO: 83521 - DNA, 25 bp, probe
atagtgggattacatcataaacctc

SEQ ID NO: 83522 - DNA, 25 bp, probe
taatactactagcttccagacaatc

SEQ ID NO: 83523 - DNA, 25 bp, probe
tctgtgttaaatcatttcagggttt

SEQ ID NO: 83524 - DNA, 25 bp, probe
ttctgtgttaaatcatttcagggtt

SEQ ID NO: 83525 - DNA, 25 bp, probe
attaaggcacatagtgggattacat

SEQ ID NO: 83526 - DNA, 25 bp, probe
ggcacatagtgggattacatcataa

SEQ ID NO: 83527 - DNA, 25 bp, probe
ttaaggcacatagtgggattacatc

SEQ ID NO: 83528 - DNA, 25 bp, probe
ggcctacagatgagtaatgaagtta

SEQ ID NO: 83529 - DNA, 25 bp, probe
acattaaactcactgactacggcat

SEQ ID NO: 83530 - DNA, 25 bp, probe
cattaaggcacatagtgggattaca

SEQ ID NO: 83531 - DNA, 25 bp, probe
attctgtgttaaatcatttcagggt

SEQ ID NO: 83532 - DNA, 25 bp, probe
atgtattctactcatgttgccattt

SEQ ID NO: 83533 - DNA, 25 bp, probe
cattctgtgttaaatcatttcaggg

SEQ ID NO: 83534 - DNA, 25 bp, probe
tacggcatgtgtaaggaaggattac

SEQ ID NO: 83535 - DNA, 25 bp, probe
tagtgggattacatcataaacctcc

SEQ ID NO: 83536 - DNA, 25 bp, probe
gcacatagtgggattacatcataaa

SEQ ID NO: 83537 - DNA, 25 bp, probe
aggcacatagtgggattacatcata

SEQ ID NO: 83538 - DNA, 25 bp, probe
taaggcacatagtgggattacatca

SEQ ID NO: 83539 - DNA, 25 bp, probe
tagagatttgaaactggacaatgta

SEQ ID NO: 83540 - DNA, 25 bp, probe
tttgaaactggacaatgtattactg

SEQ ID NO: 83541 - DNA, 25 bp, probe
taactgtatccttaaccaccgcata

SEQ ID NO: 83542 - DNA, 25 bp, probe
aactgtatccttaaccaccgcatat

SEQ ID NO: 83543 - DNA, 25 bp, probe
ttaactgtatccttaaccaccgcat

SEQ ID NO: 83544 - DNA, 25 bp, probe
gtgattgaccctttaactgtatcct

SEQ ID NO: 83545 - DNA, 25 bp, probe
tgattgaccctttaactgtatcctt

SEQ ID NO: 83546 - DNA, 25 bp, probe
accctttaactgtatccttaaccac

SEQ ID NO: 83547 - DNA, 25 bp, probe
gaccctttaactgtatccttaacca

SEQ ID NO: 83548 - DNA, 25 bp, probe
tgaccctttaactgtatccttaacc

SEQ ID NO: 83549 - DNA, 25 bp, probe
ccctttaactgtatccttaaccacc

SEQ ID NO: 83550 - DNA, 25 bp, probe
cgtgattgaccctttaactgtatcc

SEQ ID NO: 83551 - DNA, 25 bp, probe
cctttaactgtatccttaaccaccg

SEQ ID NO: 83552 - DNA, 25 bp, probe
ttgaccctttaactgtatccttaac

SEQ ID NO: 83553 - DNA, 25 bp, probe
ctttaactgtatccttaaccaccgc

SEQ ID NO: 83554 - DNA, 25 bp, probe
gattgaccctttaactgtatcctta

SEQ ID NO: 83555 - DNA, 25 bp, probe
gcgtgattgaccctttaactgtatc

SEQ ID NO: 83556 - DNA, 25 bp, probe
tttaactgtatccttaaccaccgca

SEQ ID NO: 83557 - DNA, 25 bp, probe
attgaccctttaactgtatccttaa

SEQ ID NO: 83558 - DNA, 25 bp, probe
actgtatccttaaccaccgcatatg

SEQ ID NO: 83559 - DNA, 25 bp, probe
gttgttcctggtcattgagtacgtc

SEQ ID NO: 83560 - DNA, 25 bp, probe
gtcggttgttcctggtcattgagta

SEQ ID NO: 83561 - DNA, 25 bp, probe
gacatgaacacagaggactaccttt

SEQ ID NO: 83562 - DNA, 25 bp, probe
ggacatgaacacagaggactacctt

SEQ ID NO: 83563 - DNA, 25 bp, probe
tcggttgttcctggtcattgagtac

SEQ ID NO: 83564 - DNA, 25 bp, probe
ttgttcctggtcattgagtacgtca

SEQ ID NO: 83565 - DNA, 25 bp, probe
aagtcggttgttcctggtcattgag

SEQ ID NO: 83566 - DNA, 25 bp, probe
catgaacacagaggactaccttttc

SEQ ID NO: 83567 - DNA, 25 bp, probe
cagaggactaccttttccaagtgat

SEQ ID NO: 83568 - DNA, 25 bp, probe
tagcgtcctgaggaataaaatgttc

SEQ ID NO: 83569 - DNA, 25 bp, probe
agaggactaccttttccaagtgatc

SEQ ID NO: 83570 - DNA, 25 bp, probe
gtagcgtcctgaggaataaaatgtt

SEQ ID NO: 83571 - DNA, 25 bp, probe
acatgaacacagaggactacctttt

SEQ ID NO: 83572 - DNA, 25 bp, probe
atgaacacagaggactaccttttcc

SEQ ID NO: 83573 - DNA, 25 bp, probe
ggttgttcctggtcattgagtacgt

SEQ ID NO: 83574 - DNA, 25 bp, probe
gttcctggtcattgagtacgtcaac

SEQ ID NO: 83575 - DNA, 25 bp, probe
aacacagaggactaccttttccaag

SEQ ID NO: 83576 - DNA, 25 bp, probe
gaacacagaggactaccttttccaa

SEQ ID NO: 83577 - DNA, 25 bp, probe
gtgtagcgtcctgaggaataaaatg

SEQ ID NO: 83578 - DNA, 25 bp, probe
tgtagcgtcctgaggaataaaatgt

SEQ ID NO: 83579 - DNA, 25 bp, probe
tgttcctggtcattgagtacgtcaa

SEQ ID NO: 83580 - DNA, 25 bp, probe
gaggactaccttttccaagtgatcc

SEQ ID NO: 83581 - DNA, 25 bp, probe
cacagaggactaccttttccaagtg

SEQ ID NO: 83582 - DNA, 25 bp, probe
acagaggactaccttttccaagtga

SEQ ID NO: 83583 - DNA, 25 bp, probe
ggactaccttttccaagtgatcctg

SEQ ID NO: 83584 - DNA, 25 bp, probe
gatcatctacagggacctgaagctg

SEQ ID NO: 83585 - DNA, 25 bp, probe
cagattatgccaacttcaagtaagc

SEQ ID NO: 83586 - DNA, 25 bp, probe
tcagattatgccaacttcaagtaag

SEQ ID NO: 83587 - DNA, 25 bp, probe
agattatgccaacttcaagtaagcg

SEQ ID NO: 83588 - DNA, 25 bp, probe
gctttggttaatacatctttcccta

SEQ ID NO: 83589 - DNA, 25 bp, probe
gattatgccaacttcaagtaagcgg

SEQ ID NO: 83590 - DNA, 25 bp, probe
gggaattaaatagtgtgatgtttgg

SEQ ID NO: 83591 - DNA, 25 bp, probe
aatgtgttagcactgatagtccttt

SEQ ID NO: 83592 - DNA, 25 bp, probe
aaatgtgttagcactgatagtcctt

SEQ ID NO: 83593 - DNA, 25 bp, probe
taaatgtgttagcactgatagtcct

SEQ ID NO: 83594 - DNA, 25 bp, probe
gtaaatgtgttagcactgatagtcc

SEQ ID NO: 83595 - DNA, 25 bp, probe
tgtaaatgtgttagcactgatagtc

SEQ ID NO: 83596 - DNA, 25 bp, probe
agtaataggaccagagcggtatctc

SEQ ID NO: 83597 - DNA, 25 bp, probe
gagtaataggaccagagcggtatct

SEQ ID NO: 83598 - DNA, 25 bp, probe
ggaattaaatagtgtgatgtttgga

SEQ ID NO: 83599 - DNA, 25 bp, probe
atgtaaatgtgttagcactgatagt

SEQ ID NO: 83600 - DNA, 25 bp, probe
accaggaggattgcctttaatattt

SEQ ID NO: 83601 - DNA, 25 bp, probe
gtgatgtttggattgatatcgtgaa

SEQ ID NO: 83602 - DNA, 25 bp, probe
gaccaggaggattgcctttaatatt

SEQ ID NO: 83603 - DNA, 25 bp, probe
tgtgatgtttggattgatatcgtga

SEQ ID NO: 83604 - DNA, 25 bp, probe
gtgtgatgtttggattgatatcgtg

SEQ ID NO: 83605 - DNA, 25 bp, probe
agtgtgatgtttggattgatatcgt

SEQ ID NO: 83606 - DNA, 25 bp, probe
attggtacataggcttctattacct

SEQ ID NO: 83607 - DNA, 25 bp, probe
ggaccaggaggattgcctttaatat

SEQ ID NO: 83608 - DNA, 25 bp, probe
tgatgtttggattgatatcgtgaaa

SEQ ID NO: 83609 - DNA, 25 bp, probe
tagtgtgatgtttggattgatatcg

SEQ ID NO: 83610 - DNA, 25 bp, probe
gtaccaccatgcactgtaaatatcc

SEQ ID NO: 83611 - DNA, 25 bp, probe
ttaaatagtgtgatgtttggattga

SEQ ID NO: 83612 - DNA, 25 bp, probe
ttggtacataggcttctattaccta

SEQ ID NO: 83613 - DNA, 25 bp, probe
cgtaccaccatgcactgtaaatatc

SEQ ID NO: 83614 - DNA, 25 bp, probe
aaatagtgtgatgtttggattgata

SEQ ID NO: 83615 - DNA, 25 bp, probe
taaatagtgtgatgtttggattgat

SEQ ID NO: 83616 - DNA, 25 bp, probe
tttccctaaagaagataaacacaaa

SEQ ID NO: 83617 - DNA, 25 bp, probe
aattggtacataggcttctattacc

SEQ ID NO: 83618 - DNA, 25 bp, probe
ctttggttaatacatctttccctaa

SEQ ID NO: 83619 - DNA, 25 bp, probe
ggagtaataggaccagagcggtatc

SEQ ID NO: 83620 - DNA, 25 bp, probe
gataaacacaaaatccattccaggt

SEQ ID NO: 83621 - DNA, 25 bp, probe
agataaacacaaaatccattccagg

SEQ ID NO: 83622 - DNA, 25 bp, probe
taaacacaaaatccattccaggtag

SEQ ID NO: 83623 - DNA, 25 bp, probe
aatagtgtgatgtttggattgatat

SEQ ID NO: 83624 - DNA, 25 bp, probe
gatgtttggattgatatcgtgaaat

SEQ ID NO: 83625 - DNA, 25 bp, probe
taccaccatgcactgtaaatatccc

SEQ ID NO: 83626 - DNA, 25 bp, probe
ataaacacaaaatccattccaggta

SEQ ID NO: 83627 - DNA, 25 bp, probe
ttggggaattaaatagtgtgatgtt

SEQ ID NO: 83628 - DNA, 25 bp, probe
tggggaattaaatagtgtgatgttt

SEQ ID NO: 83629 - DNA, 25 bp, probe
atggtttggtgatacattgagaaat

SEQ ID NO: 83630 - DNA, 25 bp, probe
aggtaaataatggtttggtgataca

SEQ ID NO: 83631 - DNA, 25 bp, probe
gatggctggatcatttaaagttctt

SEQ ID NO: 83632 - DNA, 25 bp, probe
atggctggatcatttaaagttcttt

SEQ ID NO: 83633 - DNA, 25 bp, probe
ggtaaataatggtttggtgatacat

SEQ ID NO: 83634 - DNA, 25 bp, probe
tggtttggtgatacattgagaaatg

SEQ ID NO: 83635 - DNA, 25 bp, probe
aatggtttggtgatacattgagaaa

SEQ ID NO: 83636 - DNA, 25 bp, probe
ctgttacacttgtgcagaaagattt

SEQ ID NO: 83637 - DNA, 25 bp, probe
taatggtttggtgatacattgagaa

SEQ ID NO: 83638 - DNA, 25 bp, probe
taggtaaataatggtttggtgatac

SEQ ID NO: 83639 - DNA, 25 bp, probe
ataatggtttggtgatacattgaga

SEQ ID NO: 83640 - DNA, 25 bp, probe
ttgtacctgttacacttgtgcagaa

SEQ ID NO: 83641 - DNA, 25 bp, probe
cctgttacacttgtgcagaaagatt

SEQ ID NO: 83642 - DNA, 25 bp, probe
aataatggtttggtgatacattgag

SEQ ID NO: 83643 - DNA, 25 bp, probe
agctgttgtacctgttacacttgtg

SEQ ID NO: 83644 - DNA, 25 bp, probe
gtacctgttacacttgtgcagaaag

SEQ ID NO: 83645 - DNA, 25 bp, probe
tgatggctggatcatttaaagttct

SEQ ID NO: 83646 - DNA, 25 bp, probe
tacctgttacacttgtgcagaaaga

SEQ ID NO: 83647 - DNA, 25 bp, probe
gttgtacctgttacacttgtgcaga

SEQ ID NO: 83648 - DNA, 25 bp, probe
aaataatggtttggtgatacattga

SEQ ID NO: 83649 - DNA, 25 bp, probe
ttaggtaaataatggtttggtgata

SEQ ID NO: 83650 - DNA, 25 bp, probe
tggctggatcatttaaagttctttt

SEQ ID NO: 83651 - DNA, 25 bp, probe
acctgttacacttgtgcagaaagat

SEQ ID NO: 83652 - DNA, 25 bp, probe
tgttgtacctgttacacttgtgcag

SEQ ID NO: 83653 - DNA, 25 bp, probe
ctgttgtacctgttacacttgtgca

SEQ ID NO: 83654 - DNA, 25 bp, probe
tgttacacttgtgcagaaagatttt

SEQ ID NO: 83655 - DNA, 25 bp, probe
tgtacctgttacacttgtgcagaaa

SEQ ID NO: 83656 - DNA, 25 bp, probe
gctgttgtacctgttacacttgtgc

SEQ ID NO: 83657 - DNA, 25 bp, probe
taaataatggtttggtgatacattg

SEQ ID NO: 83658 - DNA, 25 bp, probe
gtaaataatggtttggtgatacatt

SEQ ID NO: 83659 - DNA, 25 bp, probe
atgatggctggatcatttaaagttc

SEQ ID NO: 83660 - DNA, 25 bp, probe
ggtttggtgatacattgagaaatgt

SEQ ID NO: 83661 - DNA, 25 bp, probe
ttgagaaatgtacacattaaaaggc

SEQ ID NO: 83662 - DNA, 25 bp, probe
attgagaaatgtacacattaaaagg

SEQ ID NO: 83663 - DNA, 25 bp, probe
cattgagaaatgtacacattaaaag

SEQ ID NO: 83664 - DNA, 25 bp, probe
acattgagaaatgtacacattaaaa

SEQ ID NO: 83665 - DNA, 25 bp, probe
tggatggaatcttcactactcaatc

SEQ ID NO: 83666 - DNA, 25 bp, probe
gatggatggaatcttcactactcaa

SEQ ID NO: 83667 - DNA, 25 bp, probe
ggatggaatcttcactactcaatct

SEQ ID NO: 83668 - DNA, 25 bp, probe
atggatggaatcttcactactcaat

SEQ ID NO: 83669 - DNA, 25 bp, probe
gatggaatcttcactactcaatctg

SEQ ID NO: 83670 - DNA, 25 bp, probe
ttgatggatggaatcttcactactc

SEQ ID NO: 83671 - DNA, 25 bp, probe
caatacattatcctggaactgatgg

SEQ ID NO: 83672 - DNA, 25 bp, probe
cactactcaatctgatgtatggtct

SEQ ID NO: 83673 - DNA, 25 bp, probe
tcactactcaatctgatgtatggtc

SEQ ID NO: 83674 - DNA, 25 bp, probe
ttcactactcaatctgatgtatggt

SEQ ID NO: 83675 - DNA, 25 bp, probe
tggaatcttcactactcaatctgat

SEQ ID NO: 83676 - DNA, 25 bp, probe
atggaatcttcactactcaatctga

SEQ ID NO: 83677 - DNA, 25 bp, probe
actactcaatctgatgtatggtctt

SEQ ID NO: 83678 - DNA, 25 bp, probe
ggaatcttcactactcaatctgatg

SEQ ID NO: 83679 - DNA, 25 bp, probe
tgatggatggaatcttcactactca

SEQ ID NO: 83680 - DNA, 25 bp, probe
cttcactactcaatctgatgtatgg

SEQ ID NO: 83681 - DNA, 25 bp, probe
catcttaggagttggaagtggagaa

SEQ ID NO: 83682 - DNA, 25 bp, probe
gaatcttcactactcaatctgatgt

SEQ ID NO: 83683 - DNA, 25 bp, probe
atacattatcctggaactgatggag

SEQ ID NO: 83684 - DNA, 25 bp, probe
gacatcttaggagttggaagtggag

SEQ ID NO: 83685 - DNA, 25 bp, probe
ccacagaccaggagaagattgaatt

SEQ ID NO: 83686 - DNA, 25 bp, probe
aatacattatcctggaactgatgga

SEQ ID NO: 83687 - DNA, 25 bp, probe
tcttcactactcaatctgatgtatg

SEQ ID NO: 83688 - DNA, 25 bp, probe
cagtggacatcttaggagttggaag

SEQ ID NO: 83689 - DNA, 25 bp, probe
ccaatacattatcctggaactgatg

SEQ ID NO: 83690 - DNA, 25 bp, probe
tacattatcctggaactgatggagg

SEQ ID NO: 83691 - DNA, 25 bp, probe
ttgtttgggaaatagagagttgaga

SEQ ID NO: 83692 - DNA, 25 bp, probe
gttgtttgggaaatagagagttgag

SEQ ID NO: 83693 - DNA, 25 bp, probe
tgtttgggaaatagagagttgagat

SEQ ID NO: 83694 - DNA, 25 bp, probe
acatcttaggagttggaagtggaga

SEQ ID NO: 83695 - DNA, 25 bp, probe
aatagcgttgtttgggaaatagaga

SEQ ID NO: 83696 - DNA, 25 bp, probe
ctataccagtccacggatagtgaag

SEQ ID NO: 83697 - DNA, 25 bp, probe
taatagcgttgtttgggaaatagag

SEQ ID NO: 83698 - DNA, 25 bp, probe
atagcgttgtttgggaaatagagag

SEQ ID NO: 83699 - DNA, 25 bp, probe
gtggacatcttaggagttggaagtg

SEQ ID NO: 83700 - DNA, 25 bp, probe
agtggacatcttaggagttggaagt

SEQ ID NO: 83701 - DNA, 25 bp, probe
tctaatcttggttctgagagccatt

SEQ ID NO: 83702 - DNA, 25 bp, probe
ttctaatcttggttctgagagccat

SEQ ID NO: 83703 - DNA, 25 bp, probe
gaagtggagaaatcaaagtagcagt

SEQ ID NO: 83704 - DNA, 25 bp, probe
tataccagtccacggatagtgaaga

SEQ ID NO: 83705 - DNA, 25 bp, probe
tgtagacctgtgtgtagatatttca

SEQ ID NO: 83706 - DNA, 25 bp, probe
ggagaccttcttacttatttgcgta

SEQ ID NO: 83707 - DNA, 25 bp, probe
aagtggagaaatcaaagtagcagtg

SEQ ID NO: 83708 - DNA, 25 bp, probe
atttctaatcttggttctgagagcc

SEQ ID NO: 83709 - DNA, 25 bp, probe
tttacaagatccatttgcctttctg

SEQ ID NO: 83710 - DNA, 25 bp, probe
tgtttagcagaactcattctatccc

SEQ ID NO: 83711 - DNA, 25 bp, probe
gctgtttagcagaactcattctatc

SEQ ID NO: 83712 - DNA, 25 bp, probe
ttacaagatccatttgcctttctgg

SEQ ID NO: 83713 - DNA, 25 bp, probe
ctgtttagcagaactcattctatcc

SEQ ID NO: 83714 - DNA, 25 bp, probe
ggctgtttagcagaactcattctat

SEQ ID NO: 83715 - DNA, 25 bp, probe
tggctgtttagcagaactcattcta

SEQ ID NO: 83716 - DNA, 25 bp, probe
gttactcagggttcatctgtccatg

SEQ ID NO: 83717 - DNA, 25 bp, probe
tctgagactctttagagcagctttg

SEQ ID NO: 83718 - DNA, 25 bp, probe
ttttacaagatccatttgcctttct

SEQ ID NO: 83719 - DNA, 25 bp, probe
tacaagatccatttgcctttctggg

SEQ ID NO: 83720 - DNA, 25 bp, probe
gactctttagagcagctttgggatc

SEQ ID NO: 83721 - DNA, 25 bp, probe
ggttactcagggttcatctgtccat

SEQ ID NO: 83722 - DNA, 25 bp, probe
agagagaggatgtggaaagcacttt

SEQ ID NO: 83723 - DNA, 25 bp, probe
ctgagactctttagagcagctttgg

SEQ ID NO: 83724 - DNA, 25 bp, probe
ctggctgtttagcagaactcattct

SEQ ID NO: 83725 - DNA, 25 bp, probe
attctatccccaatcagctcctttt

SEQ ID NO: 83726 - DNA, 25 bp, probe
agactctttagagcagctttgggat

SEQ ID NO: 83727 - DNA, 25 bp, probe
aactcattctatccccaatcagctc

SEQ ID NO: 83728 - DNA, 25 bp, probe
cagaactcattctatccccaatcag

SEQ ID NO: 83729 - DNA, 25 bp, probe
gtttagcagaactcattctatcccc

SEQ ID NO: 83730 - DNA, 25 bp, probe
ctggttactcagggttcatctgtcc

SEQ ID NO: 83731 - DNA, 25 bp, probe
gaactcattctatccccaatcagct

SEQ ID NO: 83732 - DNA, 25 bp, probe
ttctatccccaatcagctccttttc

SEQ ID NO: 83733 - DNA, 25 bp, probe
cattctatccccaatcagctccttt

SEQ ID NO: 83734 - DNA, 25 bp, probe
tagcagaactcattctatccccaat

SEQ ID NO: 83735 - DNA, 25 bp, probe
ctctgagactctttagagcagcttt

SEQ ID NO: 83736 - DNA, 25 bp, probe
ttagcagaactcattctatccccaa

SEQ ID NO: 83737 - DNA, 25 bp, probe
tttagcagaactcattctatcccca

SEQ ID NO: 83738 - DNA, 25 bp, probe
caagatccatttgcctttctgggag

SEQ ID NO: 83739 - DNA, 25 bp, probe
cagagagaggatgtggaaagcactt

SEQ ID NO: 83740 - DNA, 25 bp, probe
atctggctgtttagcagaactcatt

SEQ ID NO: 83741 - DNA, 25 bp, probe
gagactctttagagcagctttggga

SEQ ID NO: 83742 - DNA, 25 bp, probe
cgttctgttctgctgggagttctag

SEQ ID NO: 83743 - DNA, 25 bp, probe
gagagaggatgtggaaagcactttt

SEQ ID NO: 83744 - DNA, 25 bp, probe
agaactcattctatccccaatcagc

SEQ ID NO: 83745 - DNA, 25 bp, probe
agcagaactcattctatccccaatc

SEQ ID NO: 83746 - DNA, 25 bp, probe
tctctgagactctttagagcagctt

SEQ ID NO: 83747 - DNA, 25 bp, probe
tgagactctttagagcagctttggg

SEQ ID NO: 83748 - DNA, 25 bp, probe
tcattctatccccaatcagctcctt

SEQ ID NO: 83749 - DNA, 25 bp, probe
gcagaactcattctatccccaatca

SEQ ID NO: 83750 - DNA, 25 bp, probe
gttctgttctgctgggagttctaga

SEQ ID NO: 83751 - DNA, 25 bp, probe
acaagatccatttgcctttctggga

SEQ ID NO: 83752 - DNA, 25 bp, probe
ctctctgagactctttagagcagct

SEQ ID NO: 83753 - DNA, 25 bp, probe
ctactctgggaaatggtttgtcttc

SEQ ID NO: 83754 - DNA, 25 bp, probe
atcttcaaggctggcttaagtataa

SEQ ID NO: 83755 - DNA, 25 bp, probe
ttatcttcaaggctggcttaagtat

SEQ ID NO: 83756 - DNA, 25 bp, probe
actactctgggaaatggtttgtctt

SEQ ID NO: 83757 - DNA, 25 bp, probe
aatacaattccagaaagtgaactca

SEQ ID NO: 83758 - DNA, 25 bp, probe
tatcttcaaggctggcttaagtata

SEQ ID NO: 83759 - DNA, 25 bp, probe
acaattccagaaagtgaactcatat

SEQ ID NO: 83760 - DNA, 25 bp, probe
atacaattccagaaagtgaactcat

SEQ ID NO: 83761 - DNA, 25 bp, probe
gtgcttatcttcaaggctggcttaa

SEQ ID NO: 83762 - DNA, 25 bp, probe
tactctgggaaatggtttgtcttca

SEQ ID NO: 83763 - DNA, 25 bp, probe
ctgggaaatggtttgtcttcaagat

SEQ ID NO: 83764 - DNA, 25 bp, probe
cttatcttcaaggctggcttaagta

SEQ ID NO: 83765 - DNA, 25 bp, probe
ctctgggaaatggtttgtcttcaag

SEQ ID NO: 83766 - DNA, 25 bp, probe
tacaattccagaaagtgaactcata

SEQ ID NO: 83767 - DNA, 25 bp, probe
cactactctgggaaatggtttgtct

SEQ ID NO: 83768 - DNA, 25 bp, probe
tcactactctgggaaatggtttgtc

SEQ ID NO: 83769 - DNA, 25 bp, probe
tgggaaatggtttgtcttcaagatg

SEQ ID NO: 83770 - DNA, 25 bp, probe
caattccagaaagtgaactcatatt

SEQ ID NO: 83771 - DNA, 25 bp, probe
agttcattacatctttaatttggca

SEQ ID NO: 83772 - DNA, 25 bp, probe
actctgggaaatggtttgtcttcaa

SEQ ID NO: 83773 - DNA, 25 bp, probe
tctgggaaatggtttgtcttcaaga

SEQ ID NO: 83774 - DNA, 25 bp, probe
ggtttgtcttcaagatgcaatactt

SEQ ID NO: 83775 - DNA, 25 bp, probe
atggtttgtcttcaagatgcaatac

SEQ ID NO: 83776 - DNA, 25 bp, probe
aaatggtttgtcttcaagatgcaat

SEQ ID NO: 83777 - DNA, 25 bp, probe
gttcattacatctttaatttggcag

SEQ ID NO: 83778 - DNA, 25 bp, probe
aatggtttgtcttcaagatgcaata

SEQ ID NO: 83779 - DNA, 25 bp, probe
gaaatggtttgtcttcaagatgcaa

SEQ ID NO: 83780 - DNA, 25 bp, probe
tcattacatctttaatttggcagaa

SEQ ID NO: 83781 - DNA, 25 bp, probe
ttcattacatctttaatttggcaga

SEQ ID NO: 83782 - DNA, 25 bp, probe
tggtttgtcttcaagatgcaatact

SEQ ID NO: 83783 - DNA, 25 bp, probe
taatacaattccagaaagtgaactc

SEQ ID NO: 83784 - DNA, 25 bp, probe
gagttcattacatctttaatttggc

SEQ ID NO: 83785 - DNA, 25 bp, probe
cacctagaatatgctatgcacagag

SEQ ID NO: 83786 - DNA, 25 bp, probe
tcttcaaggctggcttaagtataaa

SEQ ID NO: 83787 - DNA, 25 bp, probe
tgtgcttatcttcaaggctggctta

SEQ ID NO: 83788 - DNA, 25 bp, probe
actcatatttctaaggtaagatccc

SEQ ID NO: 83789 - DNA, 25 bp, probe
gtttgtcttcaagatgcaatacttt

SEQ ID NO: 83790 - DNA, 25 bp, probe
aattccagaaagtgaactcatattt

SEQ ID NO: 83791 - DNA, 25 bp, probe
gggaaatggtttgtcttcaagatgc

SEQ ID NO: 83792 - DNA, 25 bp, probe
gatctgtagtaaacaatggtgattt

SEQ ID NO: 83793 - DNA, 25 bp, probe
ggagataatacaattccagaaagtg

SEQ ID NO: 83794 - DNA, 25 bp, probe
gagataatacaattccagaaagtga

SEQ ID NO: 83795 - DNA, 25 bp, probe
atacttattagaagcaaactgccct

SEQ ID NO: 83796 - DNA, 25 bp, probe
aggagataatacaattccagaaagt

SEQ ID NO: 83797 - DNA, 25 bp, probe
gtgcctgaaggagtataagttctac

SEQ ID NO: 83798 - DNA, 25 bp, probe
agtgcctgaaggagtataagttcta

SEQ ID NO: 83799 - DNA, 25 bp, probe
taagttctactatgcgtcagatgtc

SEQ ID NO: 83800 - DNA, 25 bp, probe
ataagttctactatgcgtcagatgt

SEQ ID NO: 83801 - DNA, 25 bp, probe
aagttctactatgcgtcagatgtct

SEQ ID NO: 83802 - DNA, 25 bp, probe
gagtgcctgaaggagtataagttct

SEQ ID NO: 83803 - DNA, 25 bp, probe
agagtgcctgaaggagtataagttc

SEQ ID NO: 83804 - DNA, 25 bp, probe
tataagttctactatgcgtcagatg

SEQ ID NO: 83805 - DNA, 25 bp, probe
gtataagttctactatgcgtcagat

SEQ ID NO: 83806 - DNA, 25 bp, probe
aagacagtccatgagaagtaccaag

SEQ ID NO: 83807 - DNA, 25 bp, probe
gaagacagtccatgagaagtaccaa

SEQ ID NO: 83808 - DNA, 25 bp, probe
tgcctgaaggagtataagttctact

SEQ ID NO: 83809 - DNA, 25 bp, probe
ggagtataagttctactatgcgtca

SEQ ID NO: 83810 - DNA, 25 bp, probe
aggagtataagttctactatgcgtc

SEQ ID NO: 83811 - DNA, 25 bp, probe
cagagtgcctgaaggagtataagtt

SEQ ID NO: 83812 - DNA, 25 bp, probe
aaggagtataagttctactatgcgt

SEQ ID NO: 83813 - DNA, 25 bp, probe
gcctgaaggagtataagttctacta

SEQ ID NO: 83814 - DNA, 25 bp, probe
agtataagttctactatgcgtcaga

SEQ ID NO: 83815 - DNA, 25 bp, probe
tctgaagacagtccatgagaagtac

SEQ ID NO: 83816 - DNA, 25 bp, probe
gagtataagttctactatgcgtcag

SEQ ID NO: 83817 - DNA, 25 bp, probe
gaaggagtataagttctactatgcg

SEQ ID NO: 83818 - DNA, 25 bp, probe
agttctactatgcgtcagatgtctg

SEQ ID NO: 83819 - DNA, 25 bp, probe
tctaccacgagcacatcatcaagta

SEQ ID NO: 83820 - DNA, 25 bp, probe
tgaagacagtccatgagaagtacca

SEQ ID NO: 83821 - DNA, 25 bp, probe
ctgaagacagtccatgagaagtacc

SEQ ID NO: 83822 - DNA, 25 bp, probe
ttctgaagacagtccatgagaagta

SEQ ID NO: 83823 - DNA, 25 bp, probe
cattctgaagacagtccatgagaag

SEQ ID NO: 83824 - DNA, 25 bp, probe
ctaccacgagcacatcatcaagtac

SEQ ID NO: 83825 - DNA, 25 bp, probe
attctgaagacagtccatgagaagt

SEQ ID NO: 83826 - DNA, 25 bp, probe
tgaaggagtataagttctactatgc

SEQ ID NO: 83827 - DNA, 25 bp, probe
gaacctcatacccattctgaagaca

SEQ ID NO: 83828 - DNA, 25 bp, probe
gttctactatgcgtcagatgtctgg

SEQ ID NO: 83829 - DNA, 25 bp, probe
agacagtccatgagaagtaccaagg

SEQ ID NO: 83830 - DNA, 25 bp, probe
ctggaagcaggagattgacattctg

SEQ ID NO: 83831 - DNA, 25 bp, probe
ccagagtgcctgaaggagtataagt

SEQ ID NO: 83832 - DNA, 25 bp, probe
catacccattctgaagacagtccat

SEQ ID NO: 83833 - DNA, 25 bp, probe
aacctcatacccattctgaagacag

SEQ ID NO: 83834 - DNA, 25 bp, probe
aaatgtccctgtgaggtctatcatc

SEQ ID NO: 83835 - DNA, 25 bp, probe
ttctactatgcgtcagatgtctggt

SEQ ID NO: 83836 - DNA, 25 bp, probe
ccattctgaagacagtccatgagaa

SEQ ID NO: 83837 - DNA, 25 bp, probe
taccacgagcacatcatcaagtaca

SEQ ID NO: 83838 - DNA, 25 bp, probe
caaatgtccctgtgaggtctatcat

SEQ ID NO: 83839 - DNA, 25 bp, probe
atcttgagggacccaacatttgtag

SEQ ID NO: 83840 - DNA, 25 bp, probe
gatcttgagggacccaacatttgta

SEQ ID NO: 83841 - DNA, 25 bp, probe
tcaatatgtagtggagatgaagcat

SEQ ID NO: 83842 - DNA, 25 bp, probe
atatgtagtggagatgaagcatagc

SEQ ID NO: 83843 - DNA, 25 bp, probe
caatatgtagtggagatgaagcata

SEQ ID NO: 83844 - DNA, 25 bp, probe
gtaacctcaaccttctggactcaag

SEQ ID NO: 83845 - DNA, 25 bp, probe
gatgataacacttggagctattaca

SEQ ID NO: 83846 - DNA, 25 bp, probe
tgatgataacacttggagctattac

SEQ ID NO: 83847 - DNA, 25 bp, probe
aatatgtagtggagatgaagcatag

SEQ ID NO: 83848 - DNA, 25 bp, probe
cccacattcttaaattatcacagga

SEQ ID NO: 83849 - DNA, 25 bp, probe
tgtaacctcaaccttctggactcaa

SEQ ID NO: 83850 - DNA, 25 bp, probe
atgataacacttggagctattacat

SEQ ID NO: 83851 - DNA, 25 bp, probe
ttcaatatgtagtggagatgaagca

SEQ ID NO: 83852 - DNA, 25 bp, probe
ctgtaacctcaaccttctggactca

SEQ ID NO: 83853 - DNA, 25 bp, probe
actgtaacctcaaccttctggactc

SEQ ID NO: 83854 - DNA, 25 bp, probe
ctcactgtaacctcaaccttctgga

SEQ ID NO: 83855 - DNA, 25 bp, probe
tttgttgaaatggcatcgtacataa

SEQ ID NO: 83856 - DNA, 25 bp, probe
tgataacacttggagctattacata

SEQ ID NO: 83857 - DNA, 25 bp, probe
tgttgaaatggcatcgtacataatt

SEQ ID NO: 83858 - DNA, 25 bp, probe
ttgttgaaatggcatcgtacataat

SEQ ID NO: 83859 - DNA, 25 bp, probe
aagcatagctgagtagttgaactag

SEQ ID NO: 83860 - DNA, 25 bp, probe
gaagcatagctgagtagttgaacta

SEQ ID NO: 83861 - DNA, 25 bp, probe
tctaaattatttcctcaccatcctt

SEQ ID NO: 83862 - DNA, 25 bp, probe
ttctaaattatttcctcaccatcct

SEQ ID NO: 83863 - DNA, 25 bp, probe
cactgtaacctcaaccttctggact

SEQ ID NO: 83864 - DNA, 25 bp, probe
tcactgtaacctcaaccttctggac

SEQ ID NO: 83865 - DNA, 25 bp, probe
gatgaagcatagctgagtagttgaa

SEQ ID NO: 83866 - DNA, 25 bp, probe
gttgaaatggcatcgtacataattt

SEQ ID NO: 83867 - DNA, 25 bp, probe
atgaagcatagctgagtagttgaac

SEQ ID NO: 83868 - DNA, 25 bp, probe
tatgtagtggagatgaagcatagct

SEQ ID NO: 83869 - DNA, 25 bp, probe
gagatgaagcatagctgagtagttg

SEQ ID NO: 83870 - DNA, 25 bp, probe
taacacttggagctattacatagtt

SEQ ID NO: 83871 - DNA, 25 bp, probe
agatgaagcatagctgagtagttga

SEQ ID NO: 83872 - DNA, 25 bp, probe
ataacacttggagctattacatagt

SEQ ID NO: 83873 - DNA, 25 bp, probe
agcatagctgagtagttgaactagg

SEQ ID NO: 83874 - DNA, 25 bp, probe
tgaagcatagctgagtagttgaact

SEQ ID NO: 83875 - DNA, 25 bp, probe
ccacattcttaaattatcacaggat

SEQ ID NO: 83876 - DNA, 25 bp, probe
ggagatgaagcatagctgagtagtt

SEQ ID NO: 83877 - DNA, 25 bp, probe
ctaaattatttcctcaccatccttt

SEQ ID NO: 83878 - DNA, 25 bp, probe
gataacacttggagctattacatag

SEQ ID NO: 83879 - DNA, 25 bp, probe
atgtagtggagatgaagcatagctg

SEQ ID NO: 83880 - DNA, 25 bp, probe
tttattttctatttcgcacagggtc

SEQ ID NO: 83881 - DNA, 25 bp, probe
ttatttcctcaccatccttttgttg

SEQ ID NO: 83882 - DNA, 25 bp, probe
attctaaattatttcctcaccatcc

SEQ ID NO: 83883 - DNA, 25 bp, probe
ttattttctatttcgcacagggtct

SEQ ID NO: 83884 - DNA, 25 bp, probe
ttttattttctatttcgcacagggt

SEQ ID NO: 83885 - DNA, 25 bp, probe
ttgcctgattatctcttacacgaac

SEQ ID NO: 83886 - DNA, 25 bp, probe
cttctacacacacttctgatgaaca

SEQ ID NO: 83887 - DNA, 25 bp, probe
cctcctcatcattctagtcatcatt

SEQ ID NO: 83888 - DNA, 25 bp, probe
acctcctcatcattctagtcatcat

SEQ ID NO: 83889 - DNA, 25 bp, probe
caacctcctcatcattctagtcatc

SEQ ID NO: 83890 - DNA, 25 bp, probe
aacctcctcatcattctagtcatca

SEQ ID NO: 83891 - DNA, 25 bp, probe
tcattactgacactcaactccatac

SEQ ID NO: 83892 - DNA, 25 bp, probe
ccttctacacacacttctgatgaac

SEQ ID NO: 83893 - DNA, 25 bp, probe
catcattactgacactcaactccat

SEQ ID NO: 83894 - DNA, 25 bp, probe
atcattactgacactcaactccata

SEQ ID NO: 83895 - DNA, 25 bp, probe
cattactgacactcaactccatacc

SEQ ID NO: 83896 - DNA, 25 bp, probe
tcatcattactgacactcaactcca

SEQ ID NO: 83897 - DNA, 25 bp, probe
ttctacacacacttctgatgaacag

SEQ ID NO: 83898 - DNA, 25 bp, probe
gcaacctcctcatcattctagtcat

SEQ ID NO: 83899 - DNA, 25 bp, probe
tcctcatcattctagtcatcattac

SEQ ID NO: 83900 - DNA, 25 bp, probe
tgcctgattatctcttacacgaacg

SEQ ID NO: 83901 - DNA, 25 bp, probe
ctcctcatcattctagtcatcatta

SEQ ID NO: 83902 - DNA, 25 bp, probe
tttgcctgattatctcttacacgaa

SEQ ID NO: 83903 - DNA, 25 bp, probe
actccaatgttgaatccctttatct

SEQ ID NO: 83904 - DNA, 25 bp, probe
acagtggtaactccaatgttgaatc

SEQ ID NO: 83905 - DNA, 25 bp, probe
ctttgcctgattatctcttacacga

SEQ ID NO: 83906 - DNA, 25 bp, probe
cctcatcattctagtcatcattact

SEQ ID NO: 83907 - DNA, 25 bp, probe
cacagtggtaactccaatgttgaat

SEQ ID NO: 83908 - DNA, 25 bp, probe
tgctttgcctgattatctcttacac

SEQ ID NO: 83909 - DNA, 25 bp, probe
gtgctttgcctgattatctcttaca

SEQ ID NO: 83910 - DNA, 25 bp, probe
tgtgctttgcctgattatctcttac

SEQ ID NO: 83911 - DNA, 25 bp, probe
gtgtgctttgcctgattatctctta

SEQ ID NO: 83912 - DNA, 25 bp, probe
agtcttccctgagaaagttaatctg

SEQ ID NO: 83913 - DNA, 25 bp, probe
tctacagtttgaggaaccaagaaat

SEQ ID NO: 83914 - DNA, 25 bp, probe
atctacagtttgaggaaccaagaaa

SEQ ID NO: 83915 - DNA, 25 bp, probe
aagtcttccctgagaaagttaatct

SEQ ID NO: 83916 - DNA, 25 bp, probe
aactccaatgttgaatccctttatc

SEQ ID NO: 83917 - DNA, 25 bp, probe
gtcttccctgagaaagttaatctgg

SEQ ID NO: 83918 - DNA, 25 bp, probe
atatgccacccacttcattacattc

SEQ ID NO: 83919 - DNA, 25 bp, probe
tatctacagtttgaggaaccaagaa

SEQ ID NO: 83920 - DNA, 25 bp, probe
ttatctacagtttgaggaaccaaga

SEQ ID NO: 83921 - DNA, 25 bp, probe
cagtggtaactccaatgttgaatcc

SEQ ID NO: 83922 - DNA, 25 bp, probe
tacacagtggtaactccaatgttga

SEQ ID NO: 83923 - DNA, 25 bp, probe
tccaatgttgaatccctttatctac

SEQ ID NO: 83924 - DNA, 25 bp, probe
atttgtgtgctttgcctgattatct

SEQ ID NO: 83925 - DNA, 25 bp, probe
catttgtgtgctttgcctgattatc

SEQ ID NO: 83926 - DNA, 25 bp, probe
gagaaagttaatctgggttcggaaa

SEQ ID NO: 83927 - DNA, 25 bp, probe
gtaactccaatgttgaatcccttta

SEQ ID NO: 83928 - DNA, 25 bp, probe
tttgtgttgatttcagttctccctc

SEQ ID NO: 83929 - DNA, 25 bp, probe
attatagtcagcattccagccaata

SEQ ID NO: 83930 - DNA, 25 bp, probe
ttatagtcagcattccagccaatat

SEQ ID NO: 83931 - DNA, 25 bp, probe
gattatagtcagcattccagccaat

SEQ ID NO: 83932 - DNA, 25 bp, probe
gactaagtgttctcagagtgatgtt

SEQ ID NO: 83933 - DNA, 25 bp, probe
ttgtgattatagtcagcattccagc

SEQ ID NO: 83934 - DNA, 25 bp, probe
ctacttgtcagcatcacagttactt

SEQ ID NO: 83935 - DNA, 25 bp, probe
aatattggatctctgtgtgtgtctt

SEQ ID NO: 83936 - DNA, 25 bp, probe
tatagtcagcattccagccaatatt

SEQ ID NO: 83937 - DNA, 25 bp, probe
ggactaagtgttctcagagtgatgt

SEQ ID NO: 83938 - DNA, 25 bp, probe
ggaattagaggtccttgagtagaac

SEQ ID NO: 83939 - DNA, 25 bp, probe
atggaattagaggtccttgagtaga

SEQ ID NO: 83940 - DNA, 25 bp, probe
tggaattagaggtccttgagtagaa

SEQ ID NO: 83941 - DNA, 25 bp, probe
actatggaattagaggtccttgagt

SEQ ID NO: 83942 - DNA, 25 bp, probe
gttgctgatccaattctgtactgtt

SEQ ID NO: 83943 - DNA, 25 bp, probe
tgattatagtcagcattccagccaa

SEQ ID NO: 83944 - DNA, 25 bp, probe
acacaatgtatagaatcacggttgc

SEQ ID NO: 83945 - DNA, 25 bp, probe
actacttgtcagcatcacagttact

SEQ ID NO: 83946 - DNA, 25 bp, probe
gaattagaggtccttgagtagaacc

SEQ ID NO: 83947 - DNA, 25 bp, probe
ttgtgttgctgatccaattctgtac

SEQ ID NO: 83948 - DNA, 25 bp, probe
attagaggtccttgagtagaaccaa

SEQ ID NO: 83949 - DNA, 25 bp, probe
aattagaggtccttgagtagaacca

SEQ ID NO: 83950 - DNA, 25 bp, probe
tatggaattagaggtccttgagtag

SEQ ID NO: 83951 - DNA, 25 bp, probe
ctatggaattagaggtccttgagta

SEQ ID NO: 83952 - DNA, 25 bp, probe
tactatggaattagaggtccttgag

SEQ ID NO: 83953 - DNA, 25 bp, probe
ttgtcttatgctttactccctttca

SEQ ID NO: 83954 - DNA, 25 bp, probe
taccctttagagaaatggcaaatca

SEQ ID NO: 83955 - DNA, 25 bp, probe
gacaaataccctttagagaaatggc

SEQ ID NO: 83956 - DNA, 25 bp, probe
ctttagagaaatggcaaatcaacct

SEQ ID NO: 83957 - DNA, 25 bp, probe
acaaataccctttagagaaatggca

SEQ ID NO: 83958 - DNA, 25 bp, probe
caaataccctttagagaaatggcaa

SEQ ID NO: 83959 - DNA, 25 bp, probe
ttgaagggaagggaagtttaagtta

SEQ ID NO: 83960 - DNA, 25 bp, probe
cctttagagaaatggcaaatcaacc

SEQ ID NO: 83961 - DNA, 25 bp, probe
ccctttagagaaatggcaaatcaac

SEQ ID NO: 83962 - DNA, 25 bp, probe
tttgaagggaagggaagtttaagtt

SEQ ID NO: 83963 - DNA, 25 bp, probe
gtgttgctgatccaattctgtactg

SEQ ID NO: 83964 - DNA, 25 bp, probe
tgaagggaagggaagtttaagttat

SEQ ID NO: 83965 - DNA, 25 bp, probe
tttgtcttatgctttactccctttc

SEQ ID NO: 83966 - DNA, 25 bp, probe
atgtattgaagaacagcatgacctg

SEQ ID NO: 83967 - DNA, 25 bp, probe
accctttagagaaatggcaaatcaa

SEQ ID NO: 83968 - DNA, 25 bp, probe
tgctatgacaaataccctttagaga

SEQ ID NO: 83969 - DNA, 25 bp, probe
gaagggaagggaagtttaagttatg

SEQ ID NO: 83970 - DNA, 25 bp, probe
tgtcttatgctttactccctttcat

SEQ ID NO: 83971 - DNA, 25 bp, probe
ataccctttagagaaatggcaaatc

SEQ ID NO: 83972 - DNA, 25 bp, probe
gtatagaatcacggttgcattaaca

SEQ ID NO: 83973 - DNA, 25 bp, probe
taatcacatacagaagagcaacaac

SEQ ID NO: 83974 - DNA, 25 bp, probe
atcacatacagaagagcaacaacaa

SEQ ID NO: 83975 - DNA, 25 bp, probe
aatcacatacagaagagcaacaaca

SEQ ID NO: 83976 - DNA, 25 bp, probe
tccacttaatcacatacagaagagc

SEQ ID NO: 83977 - DNA, 25 bp, probe
ccacttaatcacatacagaagagca

SEQ ID NO: 83978 - DNA, 25 bp, probe
cttaatcacatacagaagagcaaca

SEQ ID NO: 83979 - DNA, 25 bp, probe
acttaatcacatacagaagagcaac

SEQ ID NO: 83980 - DNA, 25 bp, probe
cacttaatcacatacagaagagcaa

SEQ ID NO: 83981 - DNA, 25 bp, probe
ttaatcacatacagaagagcaacaa

SEQ ID NO: 83982 - DNA, 25 bp, probe
gattctatggtcaatgtgaaggact

SEQ ID NO: 83983 - DNA, 25 bp, probe
atccacttaatcacatacagaagag

SEQ ID NO: 83984 - DNA, 25 bp, probe
attctatggtcaatgtgaaggacta

SEQ ID NO: 83985 - DNA, 25 bp, probe
agaagagaataaggacgccatcatc

SEQ ID NO: 83986 - DNA, 25 bp, probe
ctatggtcaatgtgaaggactagaa

SEQ ID NO: 83987 - DNA, 25 bp, probe
ttctatggtcaatgtgaaggactag

SEQ ID NO: 83988 - DNA, 25 bp, probe
gaagagaataaggacgccatcatca

SEQ ID NO: 83989 - DNA, 25 bp, probe
cagaagagaataaggacgccatcat

SEQ ID NO: 83990 - DNA, 25 bp, probe
aatccacttaatcacatacagaaga

SEQ ID NO: 83991 - DNA, 25 bp, probe
tctatggtcaatgtgaaggactaga

SEQ ID NO: 83992 - DNA, 25 bp, probe
cgattctatggtcaatgtgaaggac

SEQ ID NO: 83993 - DNA, 25 bp, probe
aagagaataaggacgccatcatcac

SEQ ID NO: 83994 - DNA, 25 bp, probe
accctaaatgaacgataaacagaga

SEQ ID NO: 83995 - DNA, 25 bp, probe
gaccctaaatgaacgataaacagag

SEQ ID NO: 83996 - DNA, 25 bp, probe
aagaagaaaggaaagatttacagcc

SEQ ID NO: 83997 - DNA, 25 bp, probe
ggaccctaaatgaacgataaacaga

SEQ ID NO: 83998 - DNA, 25 bp, probe
atgaacgataaacagagatggtagc

SEQ ID NO: 83999 - DNA, 25 bp, probe
aaggaccctaaatgaacgataaaca

SEQ ID NO: 84000 - DNA, 25 bp, probe
acatacagaagagcaacaacaaact

SEQ ID NO: 84001 - DNA, 25 bp, probe
cacatacagaagagcaacaacaaac

SEQ ID NO: 84002 - DNA, 25 bp, probe
tcacatacagaagagcaacaacaaa

SEQ ID NO: 84003 - DNA, 25 bp, probe
aggaccctaaatgaacgataaacag

SEQ ID NO: 84004 - DNA, 25 bp, probe
aatgaacgataaacagagatggtag

SEQ ID NO: 84005 - DNA, 25 bp, probe
ccctaaatgaacgataaacagagat

SEQ ID NO: 84006 - DNA, 25 bp, probe
tctaaggaccctaaatgaacgataa

SEQ ID NO: 84007 - DNA, 25 bp, probe
ctcagaagagaataaggacgccatc

SEQ ID NO: 84008 - DNA, 25 bp, probe
atcggaaccatctttgccatctata

SEQ ID NO: 84009 - DNA, 25 bp, probe
gcgattctatggtcaatgtgaagga

SEQ ID NO: 84010 - DNA, 25 bp, probe
aggcgattctatggtcaatgtgaag

SEQ ID NO: 84011 - DNA, 25 bp, probe
aaatgaacgataaacagagatggta

SEQ ID NO: 84012 - DNA, 25 bp, probe
taaatgaacgataaacagagatggt

SEQ ID NO: 84013 - DNA, 25 bp, probe
taaggaccctaaatgaacgataaac

SEQ ID NO: 84014 - DNA, 25 bp, probe
tcagaagagaataaggacgccatca

SEQ ID NO: 84015 - DNA, 25 bp, probe
ctaaggaccctaaatgaacgataaa

SEQ ID NO: 84016 - DNA, 25 bp, probe
caggcgattctatggtcaatgtgaa

SEQ ID NO: 84017 - DNA, 25 bp, probe
gagctcacagagtttatagttaaaa

SEQ ID NO: 84018 - DNA, 25 bp, probe
aagttcctgtgtgtcttgatgtctg

SEQ ID NO: 84019 - DNA, 25 bp, probe
ctggtgatgatggagaagatcctag

SEQ ID NO: 84020 - DNA, 25 bp, probe
ctgtgaggagaagtcagtgaagaac

SEQ ID NO: 84021 - DNA, 25 bp, probe
atacagacttgaaacctgagaacat

SEQ ID NO: 84022 - DNA, 25 bp, probe
ttctgagtttgaaaccctctacaat

SEQ ID NO: 84023 - DNA, 25 bp, probe
attctgagtttgaaaccctctacaa

SEQ ID NO: 84024 - DNA, 25 bp, probe
aattctgagtttgaaaccctctaca

SEQ ID NO: 84025 - DNA, 25 bp, probe
tacagacttgaaacctgagaacatc

SEQ ID NO: 84026 - DNA, 25 bp, probe
agttcctgtgtgtcttgatgtctga

SEQ ID NO: 84027 - DNA, 25 bp, probe
tgagtttgaaaccctctacaatgag

SEQ ID NO: 84028 - DNA, 25 bp, probe
ctgagtttgaaaccctctacaatga

SEQ ID NO: 84029 - DNA, 25 bp, probe
tctgagtttgaaaccctctacaatg

SEQ ID NO: 84030 - DNA, 25 bp, probe
catacagacttgaaacctgagaaca

SEQ ID NO: 84031 - DNA, 25 bp, probe
agacttgaaacctgagaacatcctg

SEQ ID NO: 84032 - DNA, 25 bp, probe
ccatacagacttgaaacctgagaac

SEQ ID NO: 84033 - DNA, 25 bp, probe
gtgaggagaagtcagtgaagaacac

SEQ ID NO: 84034 - DNA, 25 bp, probe
tgtgaggagaagtcagtgaagaaca

SEQ ID NO: 84035 - DNA, 25 bp, probe
ttgagttcctgaaggagaataactt

SEQ ID NO: 84036 - DNA, 25 bp, probe
cctggtgatgatggagaagatccta

SEQ ID NO: 84037 - DNA, 25 bp, probe
aatgaacagtgcaatgtgaaggaag

SEQ ID NO: 84038 - DNA, 25 bp, probe
gagtttgaaaccctctacaatgagc

SEQ ID NO: 84039 - DNA, 25 bp, probe
tgagttcctgaaggagaataacttc

SEQ ID NO: 84040 - DNA, 25 bp, probe
cacagatttgacccaagctatttat

SEQ ID NO: 84041 - DNA, 25 bp, probe
gagttcctgaaggagaataacttcc

SEQ ID NO: 84042 - DNA, 25 bp, probe
cttgatgtctgactggttcaacttc

SEQ ID NO: 84043 - DNA, 25 bp, probe
ctccaagagcgatatgagattgtgg

SEQ ID NO: 84044 - DNA, 25 bp, probe
caatgaacagtgcaatgtgaaggaa

SEQ ID NO: 84045 - DNA, 25 bp, probe
gttcctgaaggagaataacttccag

SEQ ID NO: 84046 - DNA, 25 bp, probe
gtgtgtcttgatgtctgactggttc

SEQ ID NO: 84047 - DNA, 25 bp, probe
ttcctgtgtgtcttgatgtctgact

SEQ ID NO: 84048 - DNA, 25 bp, probe
gttcctgtgtgtcttgatgtctgac

SEQ ID NO: 84049 - DNA, 25 bp, probe
tcttgatgtctgactggttcaactt

SEQ ID NO: 84050 - DNA, 25 bp, probe
agttcctgaaggagaataacttcca

SEQ ID NO: 84051 - DNA, 25 bp, probe
cccatacagacttgaaacctgagaa

SEQ ID NO: 84052 - DNA, 25 bp, probe
gtttgaaaccctctacaatgagcac

SEQ ID NO: 84053 - DNA, 25 bp, probe
agtttgaaaccctctacaatgagca

SEQ ID NO: 84054 - DNA, 25 bp, probe
ctttgagttcctgaaggagaataac

SEQ ID NO: 84055 - DNA, 25 bp, probe
ttgaaaccctctacaatgagcacaa

SEQ ID NO: 84056 - DNA, 25 bp, probe
tttgaaaccctctacaatgagcaca

SEQ ID NO: 84057 - DNA, 25 bp, probe
gcacagatttgacccaagctattta

SEQ ID NO: 84058 - DNA, 25 bp, probe
cagacttgaaacctgagaacatcct

SEQ ID NO: 84059 - DNA, 25 bp, probe
gaaaccctctacaatgagcacaaga

SEQ ID NO: 84060 - DNA, 25 bp, probe
gacttgaaacctgagaacatcctgt

SEQ ID NO: 84061 - DNA, 25 bp, probe
tgtgtcttgatgtctgactggttca

SEQ ID NO: 84062 - DNA, 25 bp, probe
ttggaacaggatgatgaagatgatt

SEQ ID NO: 84063 - DNA, 25 bp, probe
gaatggcagtgtattagtaggagag

SEQ ID NO: 84064 - DNA, 25 bp, probe
agaatggcagtgtattagtaggaga

SEQ ID NO: 84065 - DNA, 25 bp, probe
cagaatggcagtgtattagtaggag

SEQ ID NO: 84066 - DNA, 25 bp, probe
atgtattcagcatccttacttcgtc

SEQ ID NO: 84067 - DNA, 25 bp, probe
tgtattcagcatccttacttcgtct

SEQ ID NO: 84068 - DNA, 25 bp, probe
cgtaataggctaattgtactgctct

SEQ ID NO: 84069 - DNA, 25 bp, probe
aatggcagtgtattagtaggagagc

SEQ ID NO: 84070 - DNA, 25 bp, probe
catgtattcagcatccttacttcgt

SEQ ID NO: 84071 - DNA, 25 bp, probe
gtaataggctaattgtactgctctt

SEQ ID NO: 84072 - DNA, 25 bp, probe
gtattcagcatccttacttcgtctg

SEQ ID NO: 84073 - DNA, 25 bp, probe
ggctaattgtactgctcttagaatg

SEQ ID NO: 84074 - DNA, 25 bp, probe
aggctaattgtactgctcttagaat

SEQ ID NO: 84075 - DNA, 25 bp, probe
ttccagaatggcagtgtattagtag

SEQ ID NO: 84076 - DNA, 25 bp, probe
taggctaattgtactgctcttagaa

SEQ ID NO: 84077 - DNA, 25 bp, probe
acttattccagaatggcagtgtatt

SEQ ID NO: 84078 - DNA, 25 bp, probe
attccagaatggcagtgtattagta

SEQ ID NO: 84079 - DNA, 25 bp, probe
tattccagaatggcagtgtattagt

SEQ ID NO: 84080 - DNA, 25 bp, probe
gctaattgtactgctcttagaatgt

SEQ ID NO: 84081 - DNA, 25 bp, probe
ctcttagaatgtaagcgttcacgaa

SEQ ID NO: 84082 - DNA, 25 bp, probe
ataggctaattgtactgctcttaga

SEQ ID NO: 84083 - DNA, 25 bp, probe
tggaacaggatgatgaagatgattt

SEQ ID NO: 84084 - DNA, 25 bp, probe
tttggaacaggatgatgaagatgat

SEQ ID NO: 84085 - DNA, 25 bp, probe
acgtaataggctaattgtactgctc

SEQ ID NO: 84086 - DNA, 25 bp, probe
gtttatgaagttctattctgcccac

SEQ ID NO: 84087 - DNA, 25 bp, probe
ggagacattaaaccagacaatttca

SEQ ID NO: 84088 - DNA, 25 bp, probe
ttattccagaatggcagtgtattag

SEQ ID NO: 84089 - DNA, 25 bp, probe
cttattccagaatggcagtgtatta

SEQ ID NO: 84090 - DNA, 25 bp, probe
tgtttatgaagttctattctgccca

SEQ ID NO: 84091 - DNA, 25 bp, probe
attccagattgtcatcatcttccat

SEQ ID NO: 84092 - DNA, 25 bp, probe
aaccagtgagttcctatccaaatac

SEQ ID NO: 84093 - DNA, 25 bp, probe
ctaaaccagtgagttcctatccaaa

SEQ ID NO: 84094 - DNA, 25 bp, probe
tttctaaaccagtgagttcctatcc

SEQ ID NO: 84095 - DNA, 25 bp, probe
aataggctaattgtactgctcttag

SEQ ID NO: 84096 - DNA, 25 bp, probe
tattccagattgtcatcatcttcca

SEQ ID NO: 84097 - DNA, 25 bp, probe
ccagattgtcatcatcttccatctt

SEQ ID NO: 84098 - DNA, 25 bp, probe
ttccagattgtcatcatcttccatc

SEQ ID NO: 84099 - DNA, 25 bp, probe
aaaccagtgagttcctatccaaata

SEQ ID NO: 84100 - DNA, 25 bp, probe
taaaccagtgagttcctatccaaat

SEQ ID NO: 84101 - DNA, 25 bp, probe
gctttctaaaccagtgagttcctat

SEQ ID NO: 84102 - DNA, 25 bp, probe
ccagaatggcagtgtattagtagga

SEQ ID NO: 84103 - DNA, 25 bp, probe
tccagaatggcagtgtattagtagg

SEQ ID NO: 84104 - DNA, 25 bp, probe
atgtttatgaagttctattctgccc

SEQ ID NO: 84105 - DNA, 25 bp, probe
tctaaaccagtgagttcctatccaa

SEQ ID NO: 84106 - DNA, 25 bp, probe
catattgaagatggattaggagagg

SEQ ID NO: 84107 - DNA, 25 bp, probe
agattacacaaccttcacgacagtt

SEQ ID NO: 84108 - DNA, 25 bp, probe
acagcagaataaaggcaataagatg

SEQ ID NO: 84109 - DNA, 25 bp, probe
cagcagaataaaggcaataagatga

SEQ ID NO: 84110 - DNA, 25 bp, probe
gacagcagaataaaggcaataagat

SEQ ID NO: 84111 - DNA, 25 bp, probe
atattgaagatggattaggagaggg

SEQ ID NO: 84112 - DNA, 25 bp, probe
tcatattgaagatggattaggagag

SEQ ID NO: 84113 - DNA, 25 bp, probe
agaagaagatcctgagcagtatcca

SEQ ID NO: 84114 - DNA, 25 bp, probe
cagattacacaaccttcacgacagt

SEQ ID NO: 84115 - DNA, 25 bp, probe
agcagaataaaggcaataagatgaa

SEQ ID NO: 84116 - DNA, 25 bp, probe
cgacagcagaataaaggcaataaga

SEQ ID NO: 84117 - DNA, 25 bp, probe
gaagaagatcctgagcagtatccag

SEQ ID NO: 84118 - DNA, 25 bp, probe
cagaagaagatcctgagcagtatcc

SEQ ID NO: 84119 - DNA, 25 bp, probe
ccagaagaagatcctgagcagtatc

SEQ ID NO: 84120 - DNA, 25 bp, probe
caaattctcccagattgtcaatacc

SEQ ID NO: 84121 - DNA, 25 bp, probe
ccaaattctcccagattgtcaatac

SEQ ID NO: 84122 - DNA, 25 bp, probe
aaattctcccagattgtcaataccc

SEQ ID NO: 84123 - DNA, 25 bp, probe
cccaaattctcccagattgtcaata

SEQ ID NO: 84124 - DNA, 25 bp, probe
aacctcacacttgtctgttcttcag

SEQ ID NO: 84125 - DNA, 25 bp, probe
ccagattacacaaccttcacgacag

SEQ ID NO: 84126 - DNA, 25 bp, probe
aattctcccagattgtcaataccct

SEQ ID NO: 84127 - DNA, 25 bp, probe
ccgacagcagaataaaggcaataag

SEQ ID NO: 84128 - DNA, 25 bp, probe
caacctcacacttgtctgttcttca

SEQ ID NO: 84129 - DNA, 25 bp, probe
accagaagaagatcctgagcagtat

SEQ ID NO: 84130 - DNA, 25 bp, probe
tagtgatgtctggagctacggaatt

SEQ ID NO: 84131 - DNA, 25 bp, probe
attctcccagattgtcaataccctg

SEQ ID NO: 84132 - DNA, 25 bp, probe
ctagtgatgtctggagctacggaat

SEQ ID NO: 84133 - DNA, 25 bp, probe
acctcacacttgtctgttcttcagt

SEQ ID NO: 84134 - DNA, 25 bp, probe
caccagaagaagatcctgagcagta

SEQ ID NO: 84135 - DNA, 25 bp, probe
tattgaagatggattaggagagggg

SEQ ID NO: 84136 - DNA, 25 bp, probe
atgtctggagctacggaattgtcat

SEQ ID NO: 84137 - DNA, 25 bp, probe
ttcatattgaagatggattaggaga

SEQ ID NO: 84138 - DNA, 25 bp, probe
gccatagcctatcggaagttcactt

SEQ ID NO: 84139 - DNA, 25 bp, probe
atgagcaaccaggatgtcatcaatg

SEQ ID NO: 84140 - DNA, 25 bp, probe
ctatcggaagttcacttctgctagt

SEQ ID NO: 84141 - DNA, 25 bp, probe
atagcctatcggaagttcacttctg

SEQ ID NO: 84142 - DNA, 25 bp, probe
catagcctatcggaagttcacttct

SEQ ID NO: 84143 - DNA, 25 bp, probe
gcccaaattctcccagattgtcaat

SEQ ID NO: 84144 - DNA, 25 bp, probe
catgagcaaccaggatgtcatcaat

SEQ ID NO: 84145 - DNA, 25 bp, probe
gattacacaaccttcacgacagttg

SEQ ID NO: 84146 - DNA, 25 bp, probe
gatgtctggagctacggaattgtca

SEQ ID NO: 84147 - DNA, 25 bp, probe
tgatgtctggagctacggaattgtc

SEQ ID NO: 84148 - DNA, 25 bp, probe
agtgatgtctggagctacggaattg

SEQ ID NO: 84149 - DNA, 25 bp, probe
cttctgctagtgatgtctggagcta

SEQ ID NO: 84150 - DNA, 25 bp, probe
tgtatatttgctgcaaagagaaacc

SEQ ID NO: 84151 - DNA, 25 bp, probe
gtatatttgctgcaaagagaaaccg

SEQ ID NO: 84152 - DNA, 25 bp, probe
atgcttttgctgctgcttaatccta

SEQ ID NO: 84153 - DNA, 25 bp, probe
atgtatatttgctgcaaagagaaac

SEQ ID NO: 84154 - DNA, 25 bp, probe
gtgatgcttttgctgctgcttaatc

SEQ ID NO: 84155 - DNA, 25 bp, probe
aatgtatatttgctgcaaagagaaa

SEQ ID NO: 84156 - DNA, 25 bp, probe
tatatttgctgcaaagagaaaccgc

SEQ ID NO: 84157 - DNA, 25 bp, probe
tgcttttgctgctgcttaatcctac

SEQ ID NO: 84158 - DNA, 25 bp, probe
cttttgctgctgcttaatcctaccc

SEQ ID NO: 84159 - DNA, 25 bp, probe
taatgtatatttgctgcaaagagaa

SEQ ID NO: 84160 - DNA, 25 bp, probe
ttaatgtatatttgctgcaaagaga

SEQ ID NO: 84161 - DNA, 25 bp, probe
gcagagcaataacactatatttatt

SEQ ID NO: 84162 - DNA, 25 bp, probe
gatgcttttgctgctgcttaatcct

SEQ ID NO: 84163 - DNA, 25 bp, probe
tgcagagcaataacactatatttat

SEQ ID NO: 84164 - DNA, 25 bp, probe
tgatgcttttgctgctgcttaatcc

SEQ ID NO: 84165 - DNA, 25 bp, probe
gcttttgctgctgcttaatcctacc

SEQ ID NO: 84166 - DNA, 25 bp, probe
tttaatgtatatttgctgcaaagag

SEQ ID NO: 84167 - DNA, 25 bp, probe
atatttgctgcaaagagaaaccgct

SEQ ID NO: 84168 - DNA, 25 bp, probe
ggtgatgcttttgctgctgcttaat

SEQ ID NO: 84169 - DNA, 25 bp, probe
tatttgctgcaaagagaaaccgctt

SEQ ID NO: 84170 - DNA, 25 bp, probe
accgcttttggttttaaacctttaa

SEQ ID NO: 84171 - DNA, 25 bp, probe
aaccgcttttggttttaaaccttta

SEQ ID NO: 84172 - DNA, 25 bp, probe
ccgcttttggttttaaacctttaat

SEQ ID NO: 84173 - DNA, 25 bp, probe
cgcttttggttttaaacctttaatg

SEQ ID NO: 84174 - DNA, 25 bp, probe
tctattttaatgtatatttgctgca

SEQ ID NO: 84175 - DNA, 25 bp, probe
atttgctgcaaagagaaaccgcttt

SEQ ID NO: 84176 - DNA, 25 bp, probe
gcttttggttttaaacctttaatga

SEQ ID NO: 84177 - DNA, 25 bp, probe
ttttaatgtatatttgctgcaaaga

SEQ ID NO: 84178 - DNA, 25 bp, probe
attttaatgtatatttgctgcaaag

SEQ ID NO: 84179 - DNA, 25 bp, probe
tttgctgcaaagagaaaccgctttt

SEQ ID NO: 84180 - DNA, 25 bp, probe
tggttttaaacctttaatgagaaaa

SEQ ID NO: 84181 - DNA, 25 bp, probe
ttggttttaaacctttaatgagaaa

SEQ ID NO: 84182 - DNA, 25 bp, probe
tttggttttaaacctttaatgagaa

SEQ ID NO: 84183 - DNA, 25 bp, probe
ttttggttttaaacctttaatgaga

SEQ ID NO: 84184 - DNA, 25 bp, probe
cttttggttttaaacctttaatgag

SEQ ID NO: 84185 - DNA, 25 bp, probe
tgtacagagactctattttaatgta

SEQ ID NO: 84186 - DNA, 25 bp, probe
ctgcaaagagaaaccgcttttggtt

SEQ ID NO: 84187 - DNA, 25 bp, probe
tcagagaactatactaccctcacag

SEQ ID NO: 84188 - DNA, 25 bp, probe
ttcagagaactatactaccctcaca

SEQ ID NO: 84189 - DNA, 25 bp, probe
cagagaactatactaccctcacagt

SEQ ID NO: 84190 - DNA, 25 bp, probe
agagaactatactaccctcacagtg

SEQ ID NO: 84191 - DNA, 25 bp, probe
attcagagaactatactaccctcac

SEQ ID NO: 84192 - DNA, 25 bp, probe
cttaccagagcaagatcaagatccg

SEQ ID NO: 84193 - DNA, 25 bp, probe
gtgcgtgtcaaatattcatctagtc

SEQ ID NO: 84194 - DNA, 25 bp, probe
tgtgcgtgtcaaatattcatctagt

SEQ ID NO: 84195 - DNA, 25 bp, probe
ggttcttcccacttctattcctgag

SEQ ID NO: 84196 - DNA, 25 bp, probe
atgtgcgtgtcaaatattcatctag

SEQ ID NO: 84197 - DNA, 25 bp, probe
tgcgtgtcaaatattcatctagtcc

SEQ ID NO: 84198 - DNA, 25 bp, probe
gttcttcccacttctattcctgagg

SEQ ID NO: 84199 - DNA, 25 bp, probe
gagaactatactaccctcacagtga

SEQ ID NO: 84200 - DNA, 25 bp, probe
tcaatggttcttcccacttctattc

SEQ ID NO: 84201 - DNA, 25 bp, probe
ctcaatggttcttcccacttctatt

SEQ ID NO: 84202 - DNA, 25 bp, probe
gcgtgtcaaatattcatctagtccc

SEQ ID NO: 84203 - DNA, 25 bp, probe
ttcttcccacttctattcctgaggt

SEQ ID NO: 84204 - DNA, 25 bp, probe
ggagatgtgcgtgtcaaatattcat

SEQ ID NO: 84205 - DNA, 25 bp, probe
aatggttcttcccacttctattcct

SEQ ID NO: 84206 - DNA, 25 bp, probe
caatggttcttcccacttctattcc

SEQ ID NO: 84207 - DNA, 25 bp, probe
tattcagagaactatactaccctca

SEQ ID NO: 84208 - DNA, 25 bp, probe
ctgtgccgtcttgtcctttatcttt

SEQ ID NO: 84209 - DNA, 25 bp, probe
atggttcttcccacttctattcctg

SEQ ID NO: 84210 - DNA, 25 bp, probe
cctcaatggttcttcccacttctat

SEQ ID NO: 84211 - DNA, 25 bp, probe
gcttaccagagcaagatcaagatcc

SEQ ID NO: 84212 - DNA, 25 bp, probe
agggagatgtgcgtgtcaaatattc

SEQ ID NO: 84213 - DNA, 25 bp, probe
gagggagatgtgcgtgtcaaatatt

SEQ ID NO: 84214 - DNA, 25 bp, probe
tggttcttcccacttctattcctga

SEQ ID NO: 84215 - DNA, 25 bp, probe
tcctcaatggttcttcccacttcta

SEQ ID NO: 84216 - DNA, 25 bp, probe
cgcttaccagagcaagatcaagatc

SEQ ID NO: 84217 - DNA, 25 bp, probe
tcttcccacttctattcctgaggtg

SEQ ID NO: 84218 - DNA, 25 bp, probe
tgtcaaatattcatctagtcccctg

SEQ ID NO: 84219 - DNA, 25 bp, probe
gtgtcaaatattcatctagtcccct

SEQ ID NO: 84220 - DNA, 25 bp, probe
atattcagagaactatactaccctc

SEQ ID NO: 84221 - DNA, 25 bp, probe
gtcaaatattcatctagtcccctgg

SEQ ID NO: 84222 - DNA, 25 bp, probe
gatgtgcgtgtcaaatattcatcta

SEQ ID NO: 84223 - DNA, 25 bp, probe
gagatgtgcgtgtcaaatattcatc

SEQ ID NO: 84224 - DNA, 25 bp, probe
ttaccagagcaagatcaagatccgc

SEQ ID NO: 84225 - DNA, 25 bp, probe
gggagatgtgcgtgtcaaatattca

SEQ ID NO: 84226 - DNA, 25 bp, probe
cgtgtcaaatattcatctagtcccc

SEQ ID NO: 84227 - DNA, 25 bp, probe
cttactggcaggaaggatcaggatg

SEQ ID NO: 84228 - DNA, 25 bp, probe
tcaaatattcatctagtcccctggg

SEQ ID NO: 84229 - DNA, 25 bp, probe
atcctcaatggttcttcccacttct

SEQ ID NO: 84230 - DNA, 25 bp, probe
catcctcaatggttcttcccacttc

SEQ ID NO: 84231 - DNA, 25 bp, probe
ttgtaactaactaactgctgtggtt

SEQ ID NO: 84232 - DNA, 25 bp, probe
tgtaactaactaactgctgtggttg

SEQ ID NO: 84233 - DNA, 25 bp, probe
gtaactaactaactgctgtggttgg

SEQ ID NO: 84234 - DNA, 25 bp, probe
taactaactaactgctgtggttgga

SEQ ID NO: 84235 - DNA, 25 bp, probe
tttgtaactaactaactgctgtggt

SEQ ID NO: 84236 - DNA, 25 bp, probe
aactaactaactgctgtggttggag

SEQ ID NO: 84237 - DNA, 25 bp, probe
gatgtaaagtttattgttgcttcgc

SEQ ID NO: 84238 - DNA, 25 bp, probe
tgttgccaaagagatgtaaagttta

SEQ ID NO: 84239 - DNA, 25 bp, probe
ttgttgccaaagagatgtaaagttt

SEQ ID NO: 84240 - DNA, 25 bp, probe
attgttgccaaagagatgtaaagtt

SEQ ID NO: 84241 - DNA, 25 bp, probe
tattgttgccaaagagatgtaaagt

SEQ ID NO: 84242 - DNA, 25 bp, probe
agttattgttgccaaagagatgtaa

SEQ ID NO: 84243 - DNA, 25 bp, probe
aagttattgttgccaaagagatgta

SEQ ID NO: 84244 - DNA, 25 bp, probe
taagttattgttgccaaagagatgt

SEQ ID NO: 84245 - DNA, 25 bp, probe
agatgtaaagtttattgttgcttcg

SEQ ID NO: 84246 - DNA, 25 bp, probe
gttgccaaagagatgtaaagtttat

SEQ ID NO: 84247 - DNA, 25 bp, probe
gttattgttgccaaagagatgtaaa

SEQ ID NO: 84248 - DNA, 25 bp, probe
gccaaagagatgtaaagtttattgt

SEQ ID NO: 84249 - DNA, 25 bp, probe
tgccaaagagatgtaaagtttattg

SEQ ID NO: 84250 - DNA, 25 bp, probe
ttattgttgccaaagagatgtaaag

SEQ ID NO: 84251 - DNA, 25 bp, probe
ttaagttattgttgccaaagagatg

SEQ ID NO: 84252 - DNA, 25 bp, probe
ttgccaaagagatgtaaagtttatt

SEQ ID NO: 84253 - DNA, 25 bp, probe
aagagatgtaaagtttattgttgct

SEQ ID NO: 84254 - DNA, 25 bp, probe
tttaagttattgttgccaaagagat

SEQ ID NO: 84255 - DNA, 25 bp, probe
agagatgtaaagtttattgttgctt

SEQ ID NO: 84256 - DNA, 25 bp, probe
gagatgtaaagtttattgttgcttc

SEQ ID NO: 84257 - DNA, 25 bp, probe
ttatctcaaagtccgtggctgtttc

SEQ ID NO: 84258 - DNA, 25 bp, probe
tttgtgttttgtttgaggcttagaa

SEQ ID NO: 84259 - DNA, 25 bp, probe
ttttgtgttttgtttgaggcttaga

SEQ ID NO: 84260 - DNA, 25 bp, probe
gttttgtgttttgtttgaggcttag

SEQ ID NO: 84261 - DNA, 25 bp, probe
gggatttgttttgtgttttgtttga

SEQ ID NO: 84262 - DNA, 25 bp, probe
atttgttttgtgttttgtttgaggc

SEQ ID NO: 84263 - DNA, 25 bp, probe
cttatctcaaagtccgtggctgttt

SEQ ID NO: 84264 - DNA, 25 bp, probe
tgttttgtgttttgtttgaggctta

SEQ ID NO: 84265 - DNA, 25 bp, probe
ttttgtaactaactaactgctgtgg

SEQ ID NO: 84266 - DNA, 25 bp, probe
gggtgattttaagttattgttgcca

SEQ ID NO: 84267 - DNA, 25 bp, probe
tgggtgattttaagttattgttgcc

SEQ ID NO: 84268 - DNA, 25 bp, probe
ggggatttgttttgtgttttgtttg

SEQ ID NO: 84269 - DNA, 25 bp, probe
gaatggaagttgggtgattttaagt

SEQ ID NO: 84270 - DNA, 25 bp, probe
cgaatggaagttgggtgattttaag

SEQ ID NO: 84271 - DNA, 25 bp, probe
aatggaagttgggtgattttaagtt

SEQ ID NO: 84272 - DNA, 25 bp, probe
aaagagatgtaaagtttattgttgc

SEQ ID NO: 84273 - DNA, 25 bp, probe
ttgttttgtgttttgtttgaggctt

SEQ ID NO: 84274 - DNA, 25 bp, probe
tttgttttgtgttttgtttgaggct

SEQ ID NO: 84275 - DNA, 25 bp, probe
tcactccctttgtggactttattta

SEQ ID NO: 84276 - DNA, 25 bp, probe
cactccctttgtggactttatttaa

SEQ ID NO: 84277 - DNA, 25 bp, probe
ctcactccctttgtggactttattt

SEQ ID NO: 84278 - DNA, 25 bp, probe
aatgatgtcgatgaccagttgaaga

SEQ ID NO: 84279 - DNA, 25 bp, probe
caatgatgtcgatgaccagttgaag

SEQ ID NO: 84280 - DNA, 25 bp, probe
atttcataaattggctcctttccca

SEQ ID NO: 84281 - DNA, 25 bp, probe
tctcactccctttgtggactttatt

SEQ ID NO: 84282 - DNA, 25 bp, probe
ttctcactccctttgtggactttat

SEQ ID NO: 84283 - DNA, 25 bp, probe
atgatgtcgatgaccagttgaagag

SEQ ID NO: 84284 - DNA, 25 bp, probe
actccctttgtggactttatttaat

SEQ ID NO: 84285 - DNA, 25 bp, probe
tttctcactccctttgtggacttta

SEQ ID NO: 84286 - DNA, 25 bp, probe
tttcataaattggctcctttcccac

SEQ ID NO: 84287 - DNA, 25 bp, probe
ccctttgtggactttatttaatttc

SEQ ID NO: 84288 - DNA, 25 bp, probe
cataaattggctcctttcccacaaa

SEQ ID NO: 84289 - DNA, 25 bp, probe
atttctcactccctttgtggacttt

SEQ ID NO: 84290 - DNA, 25 bp, probe
aatttctcactccctttgtggactt

SEQ ID NO: 84291 - DNA, 25 bp, probe
ctccctttgtggactttatttaatt

SEQ ID NO: 84292 - DNA, 25 bp, probe
gaatttctcactccctttgtggact

SEQ ID NO: 84293 - DNA, 25 bp, probe
tcataaattggctcctttcccacaa

SEQ ID NO: 84294 - DNA, 25 bp, probe
ttcataaattggctcctttcccaca

SEQ ID NO: 84295 - DNA, 25 bp, probe
atgtcgatgaccagttgaagaggat

SEQ ID NO: 84296 - DNA, 25 bp, probe
tccctttgtggactttatttaattt

SEQ ID NO: 84297 - DNA, 25 bp, probe
cctttgtggactttatttaatttca

SEQ ID NO: 84298 - DNA, 25 bp, probe
aatttcataaattggctcctttccc

SEQ ID NO: 84299 - DNA, 25 bp, probe
gcaatgatgtcgatgaccagttgaa

SEQ ID NO: 84300 - DNA, 25 bp, probe
tgtcgatgaccagttgaagaggatc

SEQ ID NO: 84301 - DNA, 25 bp, probe
gatgtcgatgaccagttgaagagga

SEQ ID NO: 84302 - DNA, 25 bp, probe
ataaattggctcctttcccacaaaa

SEQ ID NO: 84303 - DNA, 25 bp, probe
taatttcataaattggctcctttcc

SEQ ID NO: 84304 - DNA, 25 bp, probe
cgaatttctcactccctttgtggac

SEQ ID NO: 84305 - DNA, 25 bp, probe
tgatgtcgatgaccagttgaagagg

SEQ ID NO: 84306 - DNA, 25 bp, probe
ccgaatttctcactccctttgtgga

SEQ ID NO: 84307 - DNA, 25 bp, probe
ttaatttcataaattggctcctttc

SEQ ID NO: 84308 - DNA, 25 bp, probe
tttaatttcataaattggctccttt

SEQ ID NO: 84309 - DNA, 25 bp, probe
atttaatttcataaattggctcctt

SEQ ID NO: 84310 - DNA, 25 bp, probe
tatttaatttcataaattggctcct

SEQ ID NO: 84311 - DNA, 25 bp, probe
ggcctatttaagcccctcttgagag

SEQ ID NO: 84312 - DNA, 25 bp, probe
ctggcctatttaagcccctcttgag

SEQ ID NO: 84313 - DNA, 25 bp, probe
gcctatttaagcccctcttgagagg

SEQ ID NO: 84314 - DNA, 25 bp, probe
tggcctatttaagcccctcttgaga

SEQ ID NO: 84315 - DNA, 25 bp, probe
ctgttcctgagtttgagtaggtccc

SEQ ID NO: 84316 - DNA, 25 bp, probe
cctgttcctgagtttgagtaggtcc

SEQ ID NO: 84317 - DNA, 25 bp, probe
gtacctaaaacagatccaggacctg

SEQ ID NO: 84318 - DNA, 25 bp, probe
gcctgttcctgagtttgagtaggtc

SEQ ID NO: 84319 - DNA, 25 bp, probe
gtgtatgtaacacaataaacaagct

SEQ ID NO: 84320 - DNA, 25 bp, probe
caagtgaaactgaggttcaggagac

SEQ ID NO: 84321 - DNA, 25 bp, probe
attgaaaactcaagagcttcgagag

SEQ ID NO: 84322 - DNA, 25 bp, probe
cattgaaaactcaagagcttcgaga

SEQ ID NO: 84323 - DNA, 25 bp, probe
ccattgaaaactcaagagcttcgag

SEQ ID NO: 84324 - DNA, 25 bp, probe
tacctaaaacagatccaggacctgc

SEQ ID NO: 84325 - DNA, 25 bp, probe
aagtgaaactgaggttcaggagacc

SEQ ID NO: 84326 - DNA, 25 bp, probe
ccaagtgaaactgaggttcaggaga

SEQ ID NO: 84327 - DNA, 25 bp, probe
ttcctgagtttgagtaggtccccat

SEQ ID NO: 84328 - DNA, 25 bp, probe
ttgaaaactcaagagcttcgagagc

SEQ ID NO: 84329 - DNA, 25 bp, probe
cccaagtgaaactgaggttcaggag

SEQ ID NO: 84330 - DNA, 25 bp, probe
gccattgaaaactcaagagcttcga

SEQ ID NO: 84331 - DNA, 25 bp, probe
catggagcggtacctaaaacagatc

SEQ ID NO: 84332 - DNA, 25 bp, probe
tacatcccaagtcggccattgaaaa

SEQ ID NO: 84333 - DNA, 25 bp, probe
aagtcggccattgaaaactcaagag

SEQ ID NO: 84334 - DNA, 25 bp, probe
caagtcggccattgaaaactcaaga

SEQ ID NO: 84335 - DNA, 25 bp, probe
ggtacctaaaacagatccaggacct

SEQ ID NO: 84336 - DNA, 25 bp, probe
aaaactcaagagcttcgagagccag

SEQ ID NO: 84337 - DNA, 25 bp, probe
gaaaactcaagagcttcgagagcca

SEQ ID NO: 84338 - DNA, 25 bp, probe
tgaaaactcaagagcttcgagagcc

SEQ ID NO: 84339 - DNA, 25 bp, probe
ccatggagcggtacctaaaacagat

SEQ ID NO: 84340 - DNA, 25 bp, probe
atggagcggtacctaaaacagatcc

SEQ ID NO: 84341 - DNA, 25 bp, probe
ccaagtcggccattgaaaactcaag

SEQ ID NO: 84342 - DNA, 25 bp, probe
ggccattgaaaactcaagagcttcg

SEQ ID NO: 84343 - DNA, 25 bp, probe
cggccattgaaaactcaagagcttc

SEQ ID NO: 84344 - DNA, 25 bp, probe
cggtacctaaaacagatccaggacc

SEQ ID NO: 84345 - DNA, 25 bp, probe
gagcggtacctaaaacagatccagg

SEQ ID NO: 84346 - DNA, 25 bp, probe
ggagcggtacctaaaacagatccag

SEQ ID NO: 84347 - DNA, 25 bp, probe
gcggtacctaaaacagatccaggac

SEQ ID NO: 84348 - DNA, 25 bp, probe
agcggtacctaaaacagatccagga

SEQ ID NO: 84349 - DNA, 25 bp, probe
ctttgtctactacttctcctcctcc

SEQ ID NO: 84350 - DNA, 25 bp, probe
cctttgtctactacttctcctcctc

SEQ ID NO: 84351 - DNA, 25 bp, probe
ccctttgtctactacttctcctcct

SEQ ID NO: 84352 - DNA, 25 bp, probe
tttgtctactacttctcctcctccg

SEQ ID NO: 84353 - DNA, 25 bp, probe
ctgaaagaaagaccagtgaacactc

SEQ ID NO: 84354 - DNA, 25 bp, probe
tgaaagaaagaccagtgaacactca

SEQ ID NO: 84355 - DNA, 25 bp, probe
acccctttgtctactacttctcctc

SEQ ID NO: 84356 - DNA, 25 bp, probe
gctgaaagaaagaccagtgaacact

SEQ ID NO: 84357 - DNA, 25 bp, probe
agctgaaagaaagaccagtgaacac

SEQ ID NO: 84358 - DNA, 25 bp, probe
ctgctcaacttccttgtctgctttg

SEQ ID NO: 84359 - DNA, 25 bp, probe
cccctttgtctactacttctcctcc

SEQ ID NO: 84360 - DNA, 25 bp, probe
ttgtctactacttctcctcctccgg

SEQ ID NO: 84361 - DNA, 25 bp, probe
gacccctttgtctactacttctcct

SEQ ID NO: 84362 - DNA, 25 bp, probe
gaaagaaagaccagtgaacactcac

SEQ ID NO: 84363 - DNA, 25 bp, probe
aaagaaagaccagtgaacactcaca

SEQ ID NO: 84364 - DNA, 25 bp, probe
aagaaagaccagtgaacactcacag

SEQ ID NO: 84365 - DNA, 25 bp, probe
cgacccctttgtctactacttctcc

SEQ ID NO: 84366 - DNA, 25 bp, probe
tcgacccctttgtctactacttctc

SEQ ID NO: 84367 - DNA, 25 bp, probe
gatcatcaccagctactgctacagc

SEQ ID NO: 84368 - DNA, 25 bp, probe
tgatcatcaccagctactgctacag

SEQ ID NO: 84369 - DNA, 25 bp, probe
ctgatcatcaccagctactgctaca

SEQ ID NO: 84370 - DNA, 25 bp, probe
ctactacttctcctcctccgggttc

SEQ ID NO: 84371 - DNA, 25 bp, probe
agaaagaccagtgaacactcacagg

SEQ ID NO: 84372 - DNA, 25 bp, probe
agaggaaatagtttagtcacaggtt

SEQ ID NO: 84373 - DNA, 25 bp, probe
aagaggaaatagtttagtcacaggt

SEQ ID NO: 84374 - DNA, 25 bp, probe
gaggaaatagtttagtcacaggttt

SEQ ID NO: 84375 - DNA, 25 bp, probe
tttactgaccgttgtgaatttctgt

SEQ ID NO: 84376 - DNA, 25 bp, probe
tattaacagcagggtcacttctcat

SEQ ID NO: 84377 - DNA, 25 bp, probe
attaacagcagggtcacttctcatt

SEQ ID NO: 84378 - DNA, 25 bp, probe
taagaggaaatagtttagtcacagg

SEQ ID NO: 84379 - DNA, 25 bp, probe
atcactgaaatggataagaggaaat

SEQ ID NO: 84380 - DNA, 25 bp, probe
gtattaacagcagggtcacttctca

SEQ ID NO: 84381 - DNA, 25 bp, probe
ttaacagcagggtcacttctcattt

SEQ ID NO: 84382 - DNA, 25 bp, probe
ttactgaccgttgtgaatttctgtc

SEQ ID NO: 84383 - DNA, 25 bp, probe
gttgtattaacagcagggtcacttc

SEQ ID NO: 84384 - DNA, 25 bp, probe
ttgtattaacagcagggtcacttct

SEQ ID NO: 84385 - DNA, 25 bp, probe
tcactgaaatggataagaggaaata

SEQ ID NO: 84386 - DNA, 25 bp, probe
cactgaaatggataagaggaaatag

SEQ ID NO: 84387 - DNA, 25 bp, probe
gaccgttgtgaatttctgtctcaaa

SEQ ID NO: 84388 - DNA, 25 bp, probe
aagcctagtgtaaatttctgcatct

SEQ ID NO: 84389 - DNA, 25 bp, probe
caagcctagtgtaaatttctgcatc

SEQ ID NO: 84390 - DNA, 25 bp, probe
tatcaagcctagtgtaaatttctgc

SEQ ID NO: 84391 - DNA, 25 bp, probe
tcaagcctagtgtaaatttctgcat

SEQ ID NO: 84392 - DNA, 25 bp, probe
atcaagcctagtgtaaatttctgca

SEQ ID NO: 84393 - DNA, 25 bp, probe
tgtattaacagcagggtcacttctc

SEQ ID NO: 84394 - DNA, 25 bp, probe
agcctagtgtaaatttctgcatctc

SEQ ID NO: 84395 - DNA, 25 bp, probe
aatttctgcatctcacacgacttta

SEQ ID NO: 84396 - DNA, 25 bp, probe
taaatttctgcatctcacacgactt

SEQ ID NO: 84397 - DNA, 25 bp, probe
tactgaccgttgtgaatttctgtct

SEQ ID NO: 84398 - DNA, 25 bp, probe
gcctagtgtaaatttctgcatctca

SEQ ID NO: 84399 - DNA, 25 bp, probe
actgaaatggataagaggaaatagt

SEQ ID NO: 84400 - DNA, 25 bp, probe
aagttaatagtatttgtgttgagca

SEQ ID NO: 84401 - DNA, 25 bp, probe
atttctgcatctcacacgactttag

SEQ ID NO: 84402 - DNA, 25 bp, probe
tagtgggatcacagaaatctggaaa

SEQ ID NO: 84403 - DNA, 25 bp, probe
tggataagaggaaatagtttagtca

SEQ ID NO: 84404 - DNA, 25 bp, probe
gtaaatttctgcatctcacacgact

SEQ ID NO: 84405 - DNA, 25 bp, probe
tatcactgaaatggataagaggaaa

SEQ ID NO: 84406 - DNA, 25 bp, probe
aaatttctgcatctcacacgacttt

SEQ ID NO: 84407 - DNA, 25 bp, probe
gcagaatttatcactgaaatggata

SEQ ID NO: 84408 - DNA, 25 bp, probe
ctagtgggatcacagaaatctggaa

SEQ ID NO: 84409 - DNA, 25 bp, probe
agttaatagtatttgtgttgagcaa

SEQ ID NO: 84410 - DNA, 25 bp, probe
ggataagaggaaatagtttagtcac

SEQ ID NO: 84411 - DNA, 25 bp, probe
ttatctgccaaaacaaggacaaatc

SEQ ID NO: 84412 - DNA, 25 bp, probe
tttatctgccaaaacaaggacaaat

SEQ ID NO: 84413 - DNA, 25 bp, probe
atttatctgccaaaacaaggacaaa

SEQ ID NO: 84414 - DNA, 25 bp, probe
gtatttatctgccaaaacaaggaca

SEQ ID NO: 84415 - DNA, 25 bp, probe
ggtatttatctgccaaaacaaggac

SEQ ID NO: 84416 - DNA, 25 bp, probe
gcttctattccttccaatgagagat

SEQ ID NO: 84417 - DNA, 25 bp, probe
tacttgcttctattccttccaatga

SEQ ID NO: 84418 - DNA, 25 bp, probe
ttgcttctattccttccaatgagag

SEQ ID NO: 84419 - DNA, 25 bp, probe
cttgcttctattccttccaatgaga

SEQ ID NO: 84420 - DNA, 25 bp, probe
acttgcttctattccttccaatgag

SEQ ID NO: 84421 - DNA, 25 bp, probe
tgcttctattccttccaatgagaga

SEQ ID NO: 84422 - DNA, 25 bp, probe
gtacttgcttctattccttccaatg

SEQ ID NO: 84423 - DNA, 25 bp, probe
tcttgtggcatcattataaggctta

SEQ ID NO: 84424 - DNA, 25 bp, probe
cttctattccttccaatgagagatt

SEQ ID NO: 84425 - DNA, 25 bp, probe
cttgtggcatcattataaggcttaa

SEQ ID NO: 84426 - DNA, 25 bp, probe
attcttgtggcatcattataaggct

SEQ ID NO: 84427 - DNA, 25 bp, probe
ttcttgtggcatcattataaggctt

SEQ ID NO: 84428 - DNA, 25 bp, probe
tattcttgtggcatcattataaggc

SEQ ID NO: 84429 - DNA, 25 bp, probe
tggcatcattataaggcttaattgt

SEQ ID NO: 84430 - DNA, 25 bp, probe
tgtggcatcattataaggcttaatt

SEQ ID NO: 84431 - DNA, 25 bp, probe
ttgtggcatcattataaggcttaat

SEQ ID NO: 84432 - DNA, 25 bp, probe
gcatcattataaggcttaattgtgg

SEQ ID NO: 84433 - DNA, 25 bp, probe
ggcatcattataaggcttaattgtg

SEQ ID NO: 84434 - DNA, 25 bp, probe
gtggcatcattataaggcttaattg

SEQ ID NO: 84435 - DNA, 25 bp, probe
gggattagtttattcttgtggcatc

SEQ ID NO: 84436 - DNA, 25 bp, probe
ggattagtttattcttgtggcatca

SEQ ID NO: 84437 - DNA, 25 bp, probe
aaaccagatttctttagggcacaat

SEQ ID NO: 84438 - DNA, 25 bp, probe
accagatttctttagggcacaattt

SEQ ID NO: 84439 - DNA, 25 bp, probe
aaccagatttctttagggcacaatt

SEQ ID NO: 84440 - DNA, 25 bp, probe
taaaccagatttctttagggcacaa

SEQ ID NO: 84441 - DNA, 25 bp, probe
ttccttccaatgagagattataaca

SEQ ID NO: 84442 - DNA, 25 bp, probe
ttctattccttccaatgagagatta

SEQ ID NO: 84443 - DNA, 25 bp, probe
tctattccttccaatgagagattat

SEQ ID NO: 84444 - DNA, 25 bp, probe
tccttccaatgagagattataacat

SEQ ID NO: 84445 - DNA, 25 bp, probe
catcattataaggcttaattgtgga

SEQ ID NO: 84446 - DNA, 25 bp, probe
ttattcttgtggcatcattataagg

SEQ ID NO: 84447 - DNA, 25 bp, probe
gattagtttattcttgtggcatcat

SEQ ID NO: 84448 - DNA, 25 bp, probe
agtacttgcttctattccttccaat

SEQ ID NO: 84449 - DNA, 25 bp, probe
attagtttattcttgtggcatcatt

SEQ ID NO: 84450 - DNA, 25 bp, probe
attccttccaatgagagattataac

SEQ ID NO: 84451 - DNA, 25 bp, probe
atcattataaggcttaattgtggaa

SEQ ID NO: 84452 - DNA, 25 bp, probe
tgcttatgaaacagatttatgagaa

SEQ ID NO: 84453 - DNA, 25 bp, probe
ttagtttattcttgtggcatcatta

SEQ ID NO: 84454 - DNA, 25 bp, probe
tttaggtctctgtccattgctttta

SEQ ID NO: 84455 - DNA, 25 bp, probe
taggtctctgtccattgcttttaat

SEQ ID NO: 84456 - DNA, 25 bp, probe
ttaggtctctgtccattgcttttaa

SEQ ID NO: 84457 - DNA, 25 bp, probe
ttttaggtctctgtccattgctttt

SEQ ID NO: 84458 - DNA, 25 bp, probe
tttggggattagtttattcttgtgg

SEQ ID NO: 84459 - DNA, 25 bp, probe
atgcttatgaaacagatttatgaga

SEQ ID NO: 84460 - DNA, 25 bp, probe
atcaggtactgtgtctgctcataag

SEQ ID NO: 84461 - DNA, 25 bp, probe
caggtactgtgtctgctcataagta

SEQ ID NO: 84462 - DNA, 25 bp, probe
tcaggtactgtgtctgctcataagt

SEQ ID NO: 84463 - DNA, 25 bp, probe
actttcaataaagacctgacttgga

SEQ ID NO: 84464 - DNA, 25 bp, probe
cactttcaataaagacctgacttgg

SEQ ID NO: 84465 - DNA, 25 bp, probe
ccactttcaataaagacctgacttg

SEQ ID NO: 84466 - DNA, 25 bp, probe
ctttcaataaagacctgacttggag

SEQ ID NO: 84467 - DNA, 25 bp, probe
gccactttcaataaagacctgactt

SEQ ID NO: 84468 - DNA, 25 bp, probe
tgtgtcatccagaatgttttgtttt

SEQ ID NO: 84469 - DNA, 25 bp, probe
ttgtgtcatccagaatgttttgttt

SEQ ID NO: 84470 - DNA, 25 bp, probe
tacttgtgtcatccagaatgttttg

SEQ ID NO: 84471 - DNA, 25 bp, probe
cttgtgtcatccagaatgttttgtt

SEQ ID NO: 84472 - DNA, 25 bp, probe
ctgccactttcaataaagacctgac

SEQ ID NO: 84473 - DNA, 25 bp, probe
acttgtgtcatccagaatgttttgt

SEQ ID NO: 84474 - DNA, 25 bp, probe
agtacttgtgtcatccagaatgttt

SEQ ID NO: 84475 - DNA, 25 bp, probe
tgccactttcaataaagacctgact

SEQ ID NO: 84476 - DNA, 25 bp, probe
gtacttgtgtcatccagaatgtttt

SEQ ID NO: 84477 - DNA, 25 bp, probe
tagttttcatagaacattgagaggc

SEQ ID NO: 84478 - DNA, 25 bp, probe
cctgccactttcaataaagacctga

SEQ ID NO: 84479 - DNA, 25 bp, probe
ctacgacttcaaggctgacatctgg

SEQ ID NO: 84480 - DNA, 25 bp, probe
aaattgaattacttgtttcctgaaa

SEQ ID NO: 84481 - DNA, 25 bp, probe
cctacgacttcaaggctgacatctg

SEQ ID NO: 84482 - DNA, 25 bp, probe
ccctgccactttcaataaagacctg

SEQ ID NO: 84483 - DNA, 25 bp, probe
ttagttttcatagaacattgagagg

SEQ ID NO: 84484 - DNA, 25 bp, probe
agttttcatagaacattgagaggcc

SEQ ID NO: 84485 - DNA, 25 bp, probe
aaaattgaattacttgtttcctgaa

SEQ ID NO: 84486 - DNA, 25 bp, probe
gttttcatagaacattgagaggccc

SEQ ID NO: 84487 - DNA, 25 bp, probe
gttagttttcatagaacattgagag

SEQ ID NO: 84488 - DNA, 25 bp, probe
gaaaattgaattacttgtttcctga

SEQ ID NO: 84489 - DNA, 25 bp, probe
agaaaattgaattacttgtttcctg

SEQ ID NO: 84490 - DNA, 25 bp, probe
ttttcatagaacattgagaggcccc

SEQ ID NO: 84491 - DNA, 25 bp, probe
tttcatagaacattgagaggcccct

SEQ ID NO: 84492 - DNA, 25 bp, probe
aagaaaattgaattacttgtttcct

SEQ ID NO: 84493 - DNA, 25 bp, probe
tgttagttttcatagaacattgaga

SEQ ID NO: 84494 - DNA, 25 bp, probe
cccctgccactttcaataaagacct

SEQ ID NO: 84495 - DNA, 25 bp, probe
ttcatagaacattgagaggcccctg

SEQ ID NO: 84496 - DNA, 25 bp, probe
atgttagttttcatagaacattgag

SEQ ID NO: 84497 - DNA, 25 bp, probe
ctcaaatcacctcctctctattcct

SEQ ID NO: 84498 - DNA, 25 bp, probe
tcaaatcacctcctctctattcctg

SEQ ID NO: 84499 - DNA, 25 bp, probe
attgctcaaatcacctcctctctat

SEQ ID NO: 84500 - DNA, 25 bp, probe
ttgctcaaatcacctcctctctatt

SEQ ID NO: 84501 - DNA, 25 bp, probe
tgctcaaatcacctcctctctattc

SEQ ID NO: 84502 - DNA, 25 bp, probe
caaatcacctcctctctattcctgg

SEQ ID NO: 84503 - DNA, 25 bp, probe
cattgctcaaatcacctcctctcta

SEQ ID NO: 84504 - DNA, 25 bp, probe
gctcaaatcacctcctctctattcc

SEQ ID NO: 84505 - DNA, 25 bp, probe
aaatcacctcctctctattcctggg

SEQ ID NO: 84506 - DNA, 25 bp, probe
agacataggaggcattgctcaaatc

SEQ ID NO: 84507 - DNA, 25 bp, probe
gagacataggaggcattgctcaaat

SEQ ID NO: 84508 - DNA, 25 bp, probe
gacataggaggcattgctcaaatca

SEQ ID NO: 84509 - DNA, 25 bp, probe
atgatttccgagggagacataggag

SEQ ID NO: 84510 - DNA, 25 bp, probe
gatgatttccgagggagacatagga

SEQ ID NO: 84511 - DNA, 25 bp, probe
acataggaggcattgctcaaatcac

SEQ ID NO: 84512 - DNA, 25 bp, probe
cataggaggcattgctcaaatcacc

SEQ ID NO: 84513 - DNA, 25 bp, probe
ggatgatttccgagggagacatagg

SEQ ID NO: 84514 - DNA, 25 bp, probe
ataggaggcattgctcaaatcacct

SEQ ID NO: 84515 - DNA, 25 bp, probe
aatcacctcctctctattcctgggc

SEQ ID NO: 84516 - DNA, 25 bp, probe
ggagacataggaggcattgctcaaa

SEQ ID NO: 84517 - DNA, 25 bp, probe
gcattgctcaaatcacctcctctct

SEQ ID NO: 84518 - DNA, 25 bp, probe
tgatttccgagggagacataggagg

SEQ ID NO: 84519 - DNA, 25 bp, probe
taggaggcattgctcaaatcacctc

SEQ ID NO: 84520 - DNA, 25 bp, probe
ggcaagttctttggtctcttctatg

SEQ ID NO: 84521 - DNA, 25 bp, probe
tttatcagaaagtttgagttccctg

SEQ ID NO: 84522 - DNA, 25 bp, probe
ttatcagaaagtttgagttccctgc

SEQ ID NO: 84523 - DNA, 25 bp, probe
gggcaagttctttggtctcttctat

SEQ ID NO: 84524 - DNA, 25 bp, probe
cattacattgtgggaatggatgaaa

SEQ ID NO: 84525 - DNA, 25 bp, probe
aagttctttggtctcttctatgcag

SEQ ID NO: 84526 - DNA, 25 bp, probe
attacattgtgggaatggatgaaag

SEQ ID NO: 84527 - DNA, 25 bp, probe
aaagagaggagattctatgtgcttt

SEQ ID NO: 84528 - DNA, 25 bp, probe
caagttctttggtctcttctatgca

SEQ ID NO: 84529 - DNA, 25 bp, probe
gttctttggtctcttctatgcagtg

SEQ ID NO: 84530 - DNA, 25 bp, probe
agttctttggtctcttctatgcagt

SEQ ID NO: 84531 - DNA, 25 bp, probe
atgtctgtgtgtgtgcatgtatgtg

SEQ ID NO: 84532 - DNA, 25 bp, probe
ctgccttcttcacacccattacatt

SEQ ID NO: 84533 - DNA, 25 bp, probe
tatcagaaagtttgagttccctgcc

SEQ ID NO: 84534 - DNA, 25 bp, probe
tgccttcttcacacccattacattg

SEQ ID NO: 84535 - DNA, 25 bp, probe
ttacattgtgggaatggatgaaagc

SEQ ID NO: 84536 - DNA, 25 bp, probe
aagagaggagattctatgtgctttt

SEQ ID NO: 84537 - DNA, 25 bp, probe
aaaagagaggagattctatgtgctt

SEQ ID NO: 84538 - DNA, 25 bp, probe
agagaggagattctatgtgctttta

SEQ ID NO: 84539 - DNA, 25 bp, probe
taaaagagaggagattctatgtgct

SEQ ID NO: 84540 - DNA, 25 bp, probe
ttctttggtctcttctatgcagtgg

SEQ ID NO: 84541 - DNA, 25 bp, probe
aggagattctatgtgcttttatcag

SEQ ID NO: 84542 - DNA, 25 bp, probe
gaggagattctatgtgcttttatca

SEQ ID NO: 84543 - DNA, 25 bp, probe
ggagattctatgtgcttttatcaga

SEQ ID NO: 84544 - DNA, 25 bp, probe
ttaaaagagaggagattctatgtgc

SEQ ID NO: 84545 - DNA, 25 bp, probe
gccttcttcacacccattacattgt

SEQ ID NO: 84546 - DNA, 25 bp, probe
tctgccttcttcacacccattacat

SEQ ID NO: 84547 - DNA, 25 bp, probe
gtctgtgtgtgtgcatgtatgtgtg

SEQ ID NO: 84548 - DNA, 25 bp, probe
ttttatcagaaagtttgagttccct

SEQ ID NO: 84549 - DNA, 25 bp, probe
agaggagattctatgtgcttttatc

SEQ ID NO: 84550 - DNA, 25 bp, probe
gagaggagattctatgtgcttttat

SEQ ID NO: 84551 - DNA, 25 bp, probe
gcaagttctttggtctcttctatgc

SEQ ID NO: 84552 - DNA, 25 bp, probe
ggagagctgcttaatgtgctttaaa

SEQ ID NO: 84553 - DNA, 25 bp, probe
tgtgctttaaaagagaggagattct

SEQ ID NO: 84554 - DNA, 25 bp, probe
tgtctgtgtgtgtgcatgtatgtgt

SEQ ID NO: 84555 - DNA, 25 bp, probe
tgcttaatgtgctttaaaagagagg

SEQ ID NO: 84556 - DNA, 25 bp, probe
atctcactgtggtcaccctcttcta

SEQ ID NO: 84557 - DNA, 25 bp, probe
atgtgctttaaaagagaggagattc

SEQ ID NO: 84558 - DNA, 25 bp, probe
gcttaatgtgctttaaaagagagga

SEQ ID NO: 84559 - DNA, 25 bp, probe
gctgcttaatgtgctttaaaagaga

SEQ ID NO: 84560 - DNA, 25 bp, probe
aatgtgctttaaaagagaggagatt

SEQ ID NO: 84561 - DNA, 25 bp, probe
ctctgccttcttcacacccattaca

SEQ ID NO: 84562 - DNA, 25 bp, probe
tacattgtgggaatggatgaaagcc

SEQ ID NO: 84563 - DNA, 25 bp, probe
ctgcttaatgtgctttaaaagagag

SEQ ID NO: 84564 - DNA, 25 bp, probe
atggtaggatattgactaactgagc

SEQ ID NO: 84565 - DNA, 25 bp, probe
agatggtaggatattgactaactga

SEQ ID NO: 84566 - DNA, 25 bp, probe
gatggtaggatattgactaactgag

SEQ ID NO: 84567 - DNA, 25 bp, probe
ggctgtagaacacatagatactaga

SEQ ID NO: 84568 - DNA, 25 bp, probe
aagatggtaggatattgactaactg

SEQ ID NO: 84569 - DNA, 25 bp, probe
tggtaggatattgactaactgagct

SEQ ID NO: 84570 - DNA, 25 bp, probe
caagatggtaggatattgactaact

SEQ ID NO: 84571 - DNA, 25 bp, probe
atgctgctgaaattgtagagagtat

SEQ ID NO: 84572 - DNA, 25 bp, probe
aatgctgctgaaattgtagagagta

SEQ ID NO: 84573 - DNA, 25 bp, probe
tgctgctgaaattgtagagagtata

SEQ ID NO: 84574 - DNA, 25 bp, probe
gctgctgaaattgtagagagtatag

SEQ ID NO: 84575 - DNA, 25 bp, probe
aaatgctgctgaaattgtagagagt

SEQ ID NO: 84576 - DNA, 25 bp, probe
aaatcagtttattgggttctagggc

SEQ ID NO: 84577 - DNA, 25 bp, probe
tgtcacattcataatgctgatactt

SEQ ID NO: 84578 - DNA, 25 bp, probe
ttgtcacattcataatgctgatact

SEQ ID NO: 84579 - DNA, 25 bp, probe
agggctgtagaacacatagatacta

SEQ ID NO: 84580 - DNA, 25 bp, probe
tagggctgtagaacacatagatact

SEQ ID NO: 84581 - DNA, 25 bp, probe
gctgtagaacacatagatactagat

SEQ ID NO: 84582 - DNA, 25 bp, probe
aatcagtttattgggttctagggct

SEQ ID NO: 84583 - DNA, 25 bp, probe
gggctgtagaacacatagatactag

SEQ ID NO: 84584 - DNA, 25 bp, probe
ctagggctgtagaacacatagatac

SEQ ID NO: 84585 - DNA, 25 bp, probe
agtttattgggttctagggctgtag

SEQ ID NO: 84586 - DNA, 25 bp, probe
ctgaaattgtagagagtatagccaa

SEQ ID NO: 84587 - DNA, 25 bp, probe
ggagctttcaagatggtaggatatt

SEQ ID NO: 84588 - DNA, 25 bp, probe
attgtcacattcataatgctgatac

SEQ ID NO: 84589 - DNA, 25 bp, probe
taaatcagtttattgggttctaggg

SEQ ID NO: 84590 - DNA, 25 bp, probe
tctagggctgtagaacacatagata

SEQ ID NO: 84591 - DNA, 25 bp, probe
gatgctgtatttcactcctgtaagg

SEQ ID NO: 84592 - DNA, 25 bp, probe
aaattacattggaagggagctttca

SEQ ID NO: 84593 - DNA, 25 bp, probe
tgaaattgtagagagtatagccaaa

SEQ ID NO: 84594 - DNA, 25 bp, probe
ggatgctgtatttcactcctgtaag

SEQ ID NO: 84595 - DNA, 25 bp, probe
gagctttcaagatggtaggatattg

SEQ ID NO: 84596 - DNA, 25 bp, probe
aattacattggaagggagctttcaa

SEQ ID NO: 84597 - DNA, 25 bp, probe
agttaaactgtatttctgatgttgc

SEQ ID NO: 84598 - DNA, 25 bp, probe
atgtaagttgttcatgttgcagaaa

SEQ ID NO: 84599 - DNA, 25 bp, probe
gggagctttcaagatggtaggatat

SEQ ID NO: 84600 - DNA, 25 bp, probe
cacattcataatgctgatacttaca

SEQ ID NO: 84601 - DNA, 25 bp, probe
attacattggaagggagctttcaag

SEQ ID NO: 84602 - DNA, 25 bp, probe
cagtttattgggttctagggctgta

SEQ ID NO: 84603 - DNA, 25 bp, probe
gtttattgggttctagggctgtaga

SEQ ID NO: 84604 - DNA, 25 bp, probe
accacggattctctttaatattgta

SEQ ID NO: 84605 - DNA, 25 bp, probe
taccacggattctctttaatattgt

SEQ ID NO: 84606 - DNA, 25 bp, probe
ttattgtcacattcataatgctgat

SEQ ID NO: 84607 - DNA, 25 bp, probe
gaaagttcttatcagcaagatggtc

SEQ ID NO: 84608 - DNA, 25 bp, probe
tgcttaattcttgcttcctatgcta

SEQ ID NO: 84609 - DNA, 25 bp, probe
tatgcttaattcttgcttcctatgc

SEQ ID NO: 84610 - DNA, 25 bp, probe
acagttagagtaggttgctatggtt

SEQ ID NO: 84611 - DNA, 25 bp, probe
tgaacagttagagtaggttgctatg

SEQ ID NO: 84612 - DNA, 25 bp, probe
atgcttaattcttgcttcctatgct

SEQ ID NO: 84613 - DNA, 25 bp, probe
atgctagtattggaagtgctgtatt

SEQ ID NO: 84614 - DNA, 25 bp, probe
ctatgctagtattggaagtgctgta

SEQ ID NO: 84615 - DNA, 25 bp, probe
ttgaacagttagagtaggttgctat

SEQ ID NO: 84616 - DNA, 25 bp, probe
attgaacagttagagtaggttgcta

SEQ ID NO: 84617 - DNA, 25 bp, probe
tattgaacagttagagtaggttgct

SEQ ID NO: 84618 - DNA, 25 bp, probe
gcttaattcttgcttcctatgctag

SEQ ID NO: 84619 - DNA, 25 bp, probe
gaacagttagagtaggttgctatgg

SEQ ID NO: 84620 - DNA, 25 bp, probe
ttcttgcttcctatgctagtattgg

SEQ ID NO: 84621 - DNA, 25 bp, probe
cactatgcttaattcttgcttccta

SEQ ID NO: 84622 - DNA, 25 bp, probe
ccactatgcttaattcttgcttcct

SEQ ID NO: 84623 - DNA, 25 bp, probe
tatgctagtattggaagtgctgtat

SEQ ID NO: 84624 - DNA, 25 bp, probe
cttggcatagtggcacattatatta

SEQ ID NO: 84625 - DNA, 25 bp, probe
aacagttagagtaggttgctatggt

SEQ ID NO: 84626 - DNA, 25 bp, probe
ttattgaacagttagagtaggttgc

SEQ ID NO: 84627 - DNA, 25 bp, probe
tacttggcatagtggcacattatat

SEQ ID NO: 84628 - DNA, 25 bp, probe
atacttggcatagtggcacattata

SEQ ID NO: 84629 - DNA, 25 bp, probe
tatacttggcatagtggcacattat

SEQ ID NO: 84630 - DNA, 25 bp, probe
ttatacttggcatagtggcacatta

SEQ ID NO: 84631 - DNA, 25 bp, probe
acttggcatagtggcacattatatt

SEQ ID NO: 84632 - DNA, 25 bp, probe
attatacttggcatagtggcacatt

SEQ ID NO: 84633 - DNA, 25 bp, probe
attcttgcttcctatgctagtattg

SEQ ID NO: 84634 - DNA, 25 bp, probe
cttaattcttgcttcctatgctagt

SEQ ID NO: 84635 - DNA, 25 bp, probe
ttggcatagtggcacattatattat

SEQ ID NO: 84636 - DNA, 25 bp, probe
gattatacttggcatagtggcacat

SEQ ID NO: 84637 - DNA, 25 bp, probe
actatgcttaattcttgcttcctat

SEQ ID NO: 84638 - DNA, 25 bp, probe
ggcatagtggcacattatattatgg

SEQ ID NO: 84639 - DNA, 25 bp, probe
ctatgcttaattcttgcttcctatg

SEQ ID NO: 84640 - DNA, 25 bp, probe
aattcttgcttcctatgctagtatt

SEQ ID NO: 84641 - DNA, 25 bp, probe
aaggattatacttggcatagtggca

SEQ ID NO: 84642 - DNA, 25 bp, probe
tggcatagtggcacattatattatg

SEQ ID NO: 84643 - DNA, 25 bp, probe
cctatgctagtattggaagtgctgt

SEQ ID NO: 84644 - DNA, 25 bp, probe
gcatagtggcacattatattatgga

SEQ ID NO: 84645 - DNA, 25 bp, probe
tcttgcttcctatgctagtattgga

SEQ ID NO: 84646 - DNA, 25 bp, probe
ttaattcttgcttcctatgctagta

SEQ ID NO: 84647 - DNA, 25 bp, probe
cagttagagtaggttgctatggttt

SEQ ID NO: 84648 - DNA, 25 bp, probe
gttattgaacagttagagtaggttg

SEQ ID NO: 84649 - DNA, 25 bp, probe
agttattgaacagttagagtaggtt

SEQ ID NO: 84650 - DNA, 25 bp, probe
aagttattgaacagttagagtaggt

SEQ ID NO: 84651 - DNA, 25 bp, probe
gctttaagtgatagtgggtagacat

SEQ ID NO: 84652 - DNA, 25 bp, probe
gttctcattatctctacaatcctca

SEQ ID NO: 84653 - DNA, 25 bp, probe
caagtcagagaacaccagagaacat

SEQ ID NO: 84654 - DNA, 25 bp, probe
tctcattatctctacaatcctcaag

SEQ ID NO: 84655 - DNA, 25 bp, probe
ctcattatctctacaatcctcaaga

SEQ ID NO: 84656 - DNA, 25 bp, probe
cactaggcaggaatatgaggtgtaa

SEQ ID NO: 84657 - DNA, 25 bp, probe
gagaaataaagaggtcaaagatgct

SEQ ID NO: 84658 - DNA, 25 bp, probe
taggcaggaatatgaggtgtaaact

SEQ ID NO: 84659 - DNA, 25 bp, probe
tgttctcattatctctacaatcctc

SEQ ID NO: 84660 - DNA, 25 bp, probe
ttctcattatctctacaatcctcaa

SEQ ID NO: 84661 - DNA, 25 bp, probe
aagtcagagaacaccagagaacatg

SEQ ID NO: 84662 - DNA, 25 bp, probe
aagaggaatagcagtttcatacaac

SEQ ID NO: 84663 - DNA, 25 bp, probe
ctaggcaggaatatgaggtgtaaac

SEQ ID NO: 84664 - DNA, 25 bp, probe
actaggcaggaatatgaggtgtaaa

SEQ ID NO: 84665 - DNA, 25 bp, probe
tgagaaataaagaggtcaaagatgc

SEQ ID NO: 84666 - DNA, 25 bp, probe
aaagaggaatagcagtttcatacaa

SEQ ID NO: 84667 - DNA, 25 bp, probe
agaaataaagaggtcaaagatgctc

SEQ ID NO: 84668 - DNA, 25 bp, probe
aacatccacactaggcaggaatatg

SEQ ID NO: 84669 - DNA, 25 bp, probe
caacatccacactaggcaggaatat

SEQ ID NO: 84670 - DNA, 25 bp, probe
atgttctcattatctctacaatcct

SEQ ID NO: 84671 - DNA, 25 bp, probe
catccacactaggcaggaatatgag

SEQ ID NO: 84672 - DNA, 25 bp, probe
ccctgagaaataaagaggtcaaaga

SEQ ID NO: 84673 - DNA, 25 bp, probe
taaactcacaaacacttggctccta

SEQ ID NO: 84674 - DNA, 25 bp, probe
catctgtattcaggttacccttctg

SEQ ID NO: 84675 - DNA, 25 bp, probe
gacatctgtattcaggttacccttc

SEQ ID NO: 84676 - DNA, 25 bp, probe
atctgtattcaggttacccttctgt

SEQ ID NO: 84677 - DNA, 25 bp, probe
acatctgtattcaggttacccttct

SEQ ID NO: 84678 - DNA, 25 bp, probe
tgacatctgtattcaggttaccctt

SEQ ID NO: 84679 - DNA, 25 bp, probe
aggcaggaatatgaggtgtaaactc

SEQ ID NO: 84680 - DNA, 25 bp, probe
atacaccctgagaaataaagaggtc

SEQ ID NO: 84681 - DNA, 25 bp, probe
accctgagaaataaagaggtcaaag

SEQ ID NO: 84682 - DNA, 25 bp, probe
agtcagagaacaccagagaacatga

SEQ ID NO: 84683 - DNA, 25 bp, probe
cctgagaaataaagaggtcaaagat

SEQ ID NO: 84684 - DNA, 25 bp, probe
caccctgagaaataaagaggtcaaa

SEQ ID NO: 84685 - DNA, 25 bp, probe
acatccacactaggcaggaatatga

SEQ ID NO: 84686 - DNA, 25 bp, probe
tacaccctgagaaataaagaggtca

SEQ ID NO: 84687 - DNA, 25 bp, probe
ctgagaaataaagaggtcaaagatg

SEQ ID NO: 84688 - DNA, 25 bp, probe
tattcaggttacccttctgtgctag

SEQ ID NO: 84689 - DNA, 25 bp, probe
tctgtattcaggttacccttctgtg

SEQ ID NO: 84690 - DNA, 25 bp, probe
tcaacatccacactaggcaggaata

SEQ ID NO: 84691 - DNA, 25 bp, probe
gtattcaggttacccttctgtgcta

SEQ ID NO: 84692 - DNA, 25 bp, probe
gtgacatctgtattcaggttaccct

SEQ ID NO: 84693 - DNA, 25 bp, probe
tatacaccctgagaaataaagaggt

SEQ ID NO: 84694 - DNA, 25 bp, probe
acaccctgagaaataaagaggtcaa

SEQ ID NO: 84695 - DNA, 25 bp, probe
ccaagtcagagaacaccagagaaca

SEQ ID NO: 84696 - DNA, 25 bp, probe
gaactgtctcattgtccttctgatc

SEQ ID NO: 84697 - DNA, 25 bp, probe
ttgtcctgttcttggtcatgtatgt

SEQ ID NO: 84698 - DNA, 25 bp, probe
atgtatttctttctcaccaacctct

SEQ ID NO: 84699 - DNA, 25 bp, probe
tgtatttctttctcaccaacctctc

SEQ ID NO: 84700 - DNA, 25 bp, probe
gtatttctttctcaccaacctctcc

SEQ ID NO: 84701 - DNA, 25 bp, probe
cctggcagaaactattatggaaatt

SEQ ID NO: 84702 - DNA, 25 bp, probe
ggaactgtctcattgtccttctgat

SEQ ID NO: 84703 - DNA, 25 bp, probe
tgtcctgttcttggtcatgtatgtg

SEQ ID NO: 84704 - DNA, 25 bp, probe
agacttgggtgagtgaatttattct

SEQ ID NO: 84705 - DNA, 25 bp, probe
cagacttgggtgagtgaatttattc

SEQ ID NO: 84706 - DNA, 25 bp, probe
cccatgatttacagcctaaggaata

SEQ ID NO: 84707 - DNA, 25 bp, probe
catgtatttctttctcaccaacctc

SEQ ID NO: 84708 - DNA, 25 bp, probe
tatttctttctcaccaacctctccc

SEQ ID NO: 84709 - DNA, 25 bp, probe
atcctaaagatccagtccagagaag

SEQ ID NO: 84710 - DNA, 25 bp, probe
catatcctgtgaactcctagctgtg

SEQ ID NO: 84711 - DNA, 25 bp, probe
gacttgggtgagtgaatttattctc

SEQ ID NO: 84712 - DNA, 25 bp, probe
ctcccatgtatttctttctcaccaa

SEQ ID NO: 84713 - DNA, 25 bp, probe
ttgggtgagtgaatttattctcctc

SEQ ID NO: 84714 - DNA, 25 bp, probe
cttgggtgagtgaatttattctcct

SEQ ID NO: 84715 - DNA, 25 bp, probe
acttgggtgagtgaatttattctcc

SEQ ID NO: 84716 - DNA, 25 bp, probe
ccatgtatttctttctcaccaacct

SEQ ID NO: 84717 - DNA, 25 bp, probe
tcccatgtatttctttctcaccaac

SEQ ID NO: 84718 - DNA, 25 bp, probe
ctggcagaaactattatggaaattc

SEQ ID NO: 84719 - DNA, 25 bp, probe
catcctaaagatccagtccagagaa

SEQ ID NO: 84720 - DNA, 25 bp, probe
ctgttcttggtcatgtatgtggtga

SEQ ID NO: 84721 - DNA, 25 bp, probe
tttgtcctgttcttggtcatgtatg

SEQ ID NO: 84722 - DNA, 25 bp, probe
gtttgtcctgttcttggtcatgtat

SEQ ID NO: 84723 - DNA, 25 bp, probe
ttacagcctaaggaataaagaggtg

SEQ ID NO: 84724 - DNA, 25 bp, probe
aaactattatggaaattctctgggt

SEQ ID NO: 84725 - DNA, 25 bp, probe
cactcccatgtatttctttctcacc

SEQ ID NO: 84726 - DNA, 25 bp, probe
tttacagcctaaggaataaagaggt

SEQ ID NO: 84727 - DNA, 25 bp, probe
ccatgatttacagcctaaggaataa

SEQ ID NO: 84728 - DNA, 25 bp, probe
tacagcctaaggaataaagaggtga

SEQ ID NO: 84729 - DNA, 25 bp, probe
cagcctaaggaataaagaggtgaag

SEQ ID NO: 84730 - DNA, 25 bp, probe
gcctggcagaaactattatggaaat

SEQ ID NO: 84731 - DNA, 25 bp, probe
actcccatgtatttctttctcacca

SEQ ID NO: 84732 - DNA, 25 bp, probe
aactattatggaaattctctgggtt

SEQ ID NO: 84733 - DNA, 25 bp, probe
aagatccagtccagagaaggaagaa

SEQ ID NO: 84734 - DNA, 25 bp, probe
gtcctgttcttggtcatgtatgtgg

SEQ ID NO: 84735 - DNA, 25 bp, probe
cccatgtatttctttctcaccaacc

SEQ ID NO: 84736 - DNA, 25 bp, probe
acactcccatgtatttctttctcac

SEQ ID NO: 84737 - DNA, 25 bp, probe
cacactcccatgtatttctttctca

SEQ ID NO: 84738 - DNA, 25 bp, probe
cagtccagagaaggaagaaagaaag

SEQ ID NO: 84739 - DNA, 25 bp, probe
acagcctaaggaataaagaggtgaa

SEQ ID NO: 84740 - DNA, 25 bp, probe
ttgacatactgatcctctactctga

SEQ ID NO: 84741 - DNA, 25 bp, probe
gttgacatactgatcctctactctg

SEQ ID NO: 84742 - DNA, 25 bp, probe
tgttgacatactgatcctctactct

SEQ ID NO: 84743 - DNA, 25 bp, probe
atgttgacatactgatcctctactc

SEQ ID NO: 84744 - DNA, 25 bp, probe
tgacatactgatcctctactctgag

SEQ ID NO: 84745 - DNA, 25 bp, probe
gacatactgatcctctactctgagt

SEQ ID NO: 84746 - DNA, 25 bp, probe
acatactgatcctctactctgagtg

SEQ ID NO: 84747 - DNA, 25 bp, probe
ccagttatccttgtatccatgtaat

SEQ ID NO: 84748 - DNA, 25 bp, probe
catactgatcctctactctgagtgg

SEQ ID NO: 84749 - DNA, 25 bp, probe
aacagttattatcgctgactaatca

SEQ ID NO: 84750 - DNA, 25 bp, probe
ctatgacgcactttacagatgaatg

SEQ ID NO: 84751 - DNA, 25 bp, probe
cttcaggatatcgacagcagattat

SEQ ID NO: 84752 - DNA, 25 bp, probe
cgaccaatatgttgacatactgatc

SEQ ID NO: 84753 - DNA, 25 bp, probe
accaatatgttgacatactgatcct

SEQ ID NO: 84754 - DNA, 25 bp, probe
gaaattaaaggaagagatggaaggg

SEQ ID NO: 84755 - DNA, 25 bp, probe
cagaagaatggataagaaagatgct

SEQ ID NO: 84756 - DNA, 25 bp, probe
tcagaagaatggataagaaagatgc

SEQ ID NO: 84757 - DNA, 25 bp, probe
gaccaatatgttgacatactgatcc

SEQ ID NO: 84758 - DNA, 25 bp, probe
ccgaccaatatgttgacatactgat

SEQ ID NO: 84759 - DNA, 25 bp, probe
cccaatttatccaagttctaacaca

SEQ ID NO: 84760 - DNA, 25 bp, probe
atatcgacagcagattatctccagg

SEQ ID NO: 84761 - DNA, 25 bp, probe
ccaatatgttgacatactgatcctc

SEQ ID NO: 84762 - DNA, 25 bp, probe
atgaccgaccaatatgttgacatac

SEQ ID NO: 84763 - DNA, 25 bp, probe
catgaccgaccaatatgttgacata

SEQ ID NO: 84764 - DNA, 25 bp, probe
tttgatgtggtcgtgtaaatatgta

SEQ ID NO: 84765 - DNA, 25 bp, probe
gctatgacgcactttacagatgaat

SEQ ID NO: 84766 - DNA, 25 bp, probe
aataacgcttgggcattaaatgaat

SEQ ID NO: 84767 - DNA, 25 bp, probe
aaataacgcttgggcattaaatgaa

SEQ ID NO: 84768 - DNA, 25 bp, probe
tcttcaggatatcgacagcagatta

SEQ ID NO: 84769 - DNA, 25 bp, probe
agaaattaaaggaagagatggaagg

SEQ ID NO: 84770 - DNA, 25 bp, probe
agatcccagttatccttgtatccat

SEQ ID NO: 84771 - DNA, 25 bp, probe
gaccgaccaatatgttgacatactg

SEQ ID NO: 84772 - DNA, 25 bp, probe
aagaatggataagaaagatgcttca

SEQ ID NO: 84773 - DNA, 25 bp, probe
ttgatgtggtcgtgtaaatatgtac

SEQ ID NO: 84774 - DNA, 25 bp, probe
cccagttatccttgtatccatgtaa

SEQ ID NO: 84775 - DNA, 25 bp, probe
tcatccgaaagacagaaatgtagaa

SEQ ID NO: 84776 - DNA, 25 bp, probe
ttcaggatatcgacagcagattatc

SEQ ID NO: 84777 - DNA, 25 bp, probe
tcccagttatccttgtatccatgta

SEQ ID NO: 84778 - DNA, 25 bp, probe
tgagaaggataaagtggcattattt

SEQ ID NO: 84779 - DNA, 25 bp, probe
ttgagaaggataaagtggcattatt

SEQ ID NO: 84780 - DNA, 25 bp, probe
tttgagaaggataaagtggcattat

SEQ ID NO: 84781 - DNA, 25 bp, probe
cagtatttgatgtggtcgtgtaaat

SEQ ID NO: 84782 - DNA, 25 bp, probe
tgcttcatcttaggaaacagttatt

SEQ ID NO: 84783 - DNA, 25 bp, probe
ctcatccgaaagacagaaatgtaga

SEQ ID NO: 84784 - DNA, 25 bp, probe
tgtttgacttcgtattgacccttat

SEQ ID NO: 84785 - DNA, 25 bp, probe
atgtttgacttcgtattgaccctta

SEQ ID NO: 84786 - DNA, 25 bp, probe
gagtaggctataagggaagattgtc

SEQ ID NO: 84787 - DNA, 25 bp, probe
agagtaggctataagggaagattgt

SEQ ID NO: 84788 - DNA, 25 bp, probe
gacttcgtattgacccttatctgta

SEQ ID NO: 84789 - DNA, 25 bp, probe
tttgacttcgtattgacccttatct

SEQ ID NO: 84790 - DNA, 25 bp, probe
gtttgacttcgtattgacccttatc

SEQ ID NO: 84791 - DNA, 25 bp, probe
ttgacttcgtattgacccttatctg

SEQ ID NO: 84792 - DNA, 25 bp, probe
gctttgatttggatgattaggtctt

SEQ ID NO: 84793 - DNA, 25 bp, probe
agtaggctataagggaagattgtca

SEQ ID NO: 84794 - DNA, 25 bp, probe
caactcgtatttatctctgatgtgc

SEQ ID NO: 84795 - DNA, 25 bp, probe
gtaggctataagggaagattgtcaa

SEQ ID NO: 84796 - DNA, 25 bp, probe
taggtctttaatagtgttgagtggc

SEQ ID NO: 84797 - DNA, 25 bp, probe
acttcgtattgacccttatctgtaa

SEQ ID NO: 84798 - DNA, 25 bp, probe
aagagtaggctataagggaagattg

SEQ ID NO: 84799 - DNA, 25 bp, probe
aatgtttgacttcgtattgaccctt

SEQ ID NO: 84800 - DNA, 25 bp, probe
aactcgtatttatctctgatgtgcc

SEQ ID NO: 84801 - DNA, 25 bp, probe
gagcccaacttctaaaggtcaatat

SEQ ID NO: 84802 - DNA, 25 bp, probe
agcccaacttctaaaggtcaatata

SEQ ID NO: 84803 - DNA, 25 bp, probe
tgacttcgtattgacccttatctgt

SEQ ID NO: 84804 - DNA, 25 bp, probe
tagaatgtttgacttcgtattgacc

SEQ ID NO: 84805 - DNA, 25 bp, probe
aaagagtaggctataagggaagatt

SEQ ID NO: 84806 - DNA, 25 bp, probe
cttcgtattgacccttatctgtaaa

SEQ ID NO: 84807 - DNA, 25 bp, probe
gaatgtttgacttcgtattgaccct

SEQ ID NO: 84808 - DNA, 25 bp, probe
agaatgtttgacttcgtattgaccc

SEQ ID NO: 84809 - DNA, 25 bp, probe
aggctataagggaagattgtcaata

SEQ ID NO: 84810 - DNA, 25 bp, probe
taggctataagggaagattgtcaat

SEQ ID NO: 84811 - DNA, 25 bp, probe
tcttctgtagaatgtttgacttcgt

SEQ ID NO: 84812 - DNA, 25 bp, probe
tgtagaatgtttgacttcgtattga

SEQ ID NO: 84813 - DNA, 25 bp, probe
ttaggtctttaatagtgttgagtgg

SEQ ID NO: 84814 - DNA, 25 bp, probe
gtagaatgtttgacttcgtattgac

SEQ ID NO: 84815 - DNA, 25 bp, probe
ctgtagaatgtttgacttcgtattg

SEQ ID NO: 84816 - DNA, 25 bp, probe
tctgtagaatgtttgacttcgtatt

SEQ ID NO: 84817 - DNA, 25 bp, probe
cttctgtagaatgtttgacttcgta

SEQ ID NO: 84818 - DNA, 25 bp, probe
aggtctttaatagtgttgagtggca

SEQ ID NO: 84819 - DNA, 25 bp, probe
tcaatatatcatcctttggcatccc

SEQ ID NO: 84820 - DNA, 25 bp, probe
gtcaatatatcatcctttggcatcc

SEQ ID NO: 84821 - DNA, 25 bp, probe
ggtcaatatatcatcctttggcatc

SEQ ID NO: 84822 - DNA, 25 bp, probe
taaagagtaggctataagggaagat

SEQ ID NO: 84823 - DNA, 25 bp, probe
ataaagagtaggctataagggaaga

SEQ ID NO: 84824 - DNA, 25 bp, probe
ggctataagggaagattgtcaatat

SEQ ID NO: 84825 - DNA, 25 bp, probe
acaactcgtatttatctctgatgtg

SEQ ID NO: 84826 - DNA, 25 bp, probe
tctttaatagtgttgagtggcacaa

SEQ ID NO: 84827 - DNA, 25 bp, probe
gcccaacttctaaaggtcaatatat

SEQ ID NO: 84828 - DNA, 25 bp, probe
tatcgagtctacaatctatgcagtg

SEQ ID NO: 84829 - DNA, 25 bp, probe
ctatcgagtctacaatctatgcagt

SEQ ID NO: 84830 - DNA, 25 bp, probe
gtgaaacatctctacaactggaatc

SEQ ID NO: 84831 - DNA, 25 bp, probe
tgaaacatctctacaactggaatct

SEQ ID NO: 84832 - DNA, 25 bp, probe
acctctgtatgatgatgtgaaagtg

SEQ ID NO: 84833 - DNA, 25 bp, probe
ccactatcgagtctacaatctatgc

SEQ ID NO: 84834 - DNA, 25 bp, probe
gaaacatctctacaactggaatctc

SEQ ID NO: 84835 - DNA, 25 bp, probe
accactatcgagtctacaatctatg

SEQ ID NO: 84836 - DNA, 25 bp, probe
atcgagtctacaatctatgcagtga

SEQ ID NO: 84837 - DNA, 25 bp, probe
ctagacctcacttacgttacagaac

SEQ ID NO: 84838 - DNA, 25 bp, probe
ttagatactgccattattgtgattc

SEQ ID NO: 84839 - DNA, 25 bp, probe
attgctatgtcatttccatcttctg

SEQ ID NO: 84840 - DNA, 25 bp, probe
tcgagtctacaatctatgcagtgaa

SEQ ID NO: 84841 - DNA, 25 bp, probe
cctagacctcacttacgttacagaa

SEQ ID NO: 84842 - DNA, 25 bp, probe
gtccacctctgtatgatgatgtgaa

SEQ ID NO: 84843 - DNA, 25 bp, probe
cactatcgagtctacaatctatgca

SEQ ID NO: 84844 - DNA, 25 bp, probe
tctatcctaaatgttcccttgaagt

SEQ ID NO: 84845 - DNA, 25 bp, probe
actatcgagtctacaatctatgcag

SEQ ID NO: 84846 - DNA, 25 bp, probe
agtgaaacatctctacaactggaat

SEQ ID NO: 84847 - DNA, 25 bp, probe
aagtgaaacatctctacaactggaa

SEQ ID NO: 84848 - DNA, 25 bp, probe
aaccactatcgagtctacaatctat

SEQ ID NO: 84849 - DNA, 25 bp, probe
caagtgaaacatctctacaactgga

SEQ ID NO: 84850 - DNA, 25 bp, probe
cacaagtgaaacatctctacaactg

SEQ ID NO: 84851 - DNA, 25 bp, probe
cctctgtatgatgatgtgaaagtgc

SEQ ID NO: 84852 - DNA, 25 bp, probe
acaagtgaaacatctctacaactgg

SEQ ID NO: 84853 - DNA, 25 bp, probe
gacctagacctcacttacgttacag

SEQ ID NO: 84854 - DNA, 25 bp, probe
atggatttgacctagacctcactta

SEQ ID NO: 84855 - DNA, 25 bp, probe
ttgacctagacctcacttacgttac

SEQ ID NO: 84856 - DNA, 25 bp, probe
atctatcctaaatgttcccttgaag

SEQ ID NO: 84857 - DNA, 25 bp, probe
tattgctatgtcatttccatcttct

SEQ ID NO: 84858 - DNA, 25 bp, probe
acctagacctcacttacgttacaga

SEQ ID NO: 84859 - DNA, 25 bp, probe
gcacaagtgaaacatctctacaact

SEQ ID NO: 84860 - DNA, 25 bp, probe
acagaacgtattattgctatgtcat

SEQ ID NO: 84861 - DNA, 25 bp, probe
atcctaaatgttcccttgaagtatt

SEQ ID NO: 84862 - DNA, 25 bp, probe
cacctctgtatgatgatgtgaaagt

SEQ ID NO: 84863 - DNA, 25 bp, probe
cagaacgtattattgctatgtcatt

SEQ ID NO: 84864 - DNA, 25 bp, probe
tggatttgacctagacctcacttac

SEQ ID NO: 84865 - DNA, 25 bp, probe
ctatcctaaatgttcccttgaagta

SEQ ID NO: 84866 - DNA, 25 bp, probe
aaatctatcctaaatgttcccttga

SEQ ID NO: 84867 - DNA, 25 bp, probe
tcctaaatctatcctaaatgttccc

SEQ ID NO: 84868 - DNA, 25 bp, probe
aaacatctctacaactggaatctcc

SEQ ID NO: 84869 - DNA, 25 bp, probe
cctaaatctatcctaaatgttccct

SEQ ID NO: 84870 - DNA, 25 bp, probe
gatggatttgacctagacctcactt

SEQ ID NO: 84871 - DNA, 25 bp, probe
ccacctctgtatgatgatgtgaaag

SEQ ID NO: 84872 - DNA, 25 bp, probe
tttctcctcatcctcctctcctatg

SEQ ID NO: 84873 - DNA, 25 bp, probe
catcctcctctcctatgccttcatc

SEQ ID NO: 84874 - DNA, 25 bp, probe
tcatcctcctctcctatgccttcat

SEQ ID NO: 84875 - DNA, 25 bp, probe
ttctcctcatcctcctctcctatgc

SEQ ID NO: 84876 - DNA, 25 bp, probe
ttttctcctcatcctcctctcctat

SEQ ID NO: 84877 - DNA, 25 bp, probe
ccatcatcttcagcctcaggaacaa

SEQ ID NO: 84878 - DNA, 25 bp, probe
ctcatcctcctctcctatgccttca

SEQ ID NO: 84879 - DNA, 25 bp, probe
atcctcctctcctatgccttcatcg

SEQ ID NO: 84880 - DNA, 25 bp, probe
gttttctcctcatcctcctctccta

SEQ ID NO: 84881 - DNA, 25 bp, probe
atcttgaagatcccttctgctgaag

SEQ ID NO: 84882 - DNA, 25 bp, probe
catcttgaagatcccttctgctgaa

SEQ ID NO: 84883 - DNA, 25 bp, probe
ctgttttctcctcatcctcctctcc

SEQ ID NO: 84884 - DNA, 25 bp, probe
tgttttctcctcatcctcctctcct

SEQ ID NO: 84885 - DNA, 25 bp, probe
gctgttttctcctcatcctcctctc

SEQ ID NO: 84886 - DNA, 25 bp, probe
ctaggaaggcatgtctattgtgatt

SEQ ID NO: 84887 - DNA, 25 bp, probe
aatgttctaggaaggcatgtctatt

SEQ ID NO: 84888 - DNA, 25 bp, probe
atgttctaggaaggcatgtctattg

SEQ ID NO: 84889 - DNA, 25 bp, probe
tctaggaaggcatgtctattgtgat

SEQ ID NO: 84890 - DNA, 25 bp, probe
ttacttcagtgaggagattggagtc

SEQ ID NO: 84891 - DNA, 25 bp, probe
ttctaggaaggcatgtctattgtga

SEQ ID NO: 84892 - DNA, 25 bp, probe
gttctaggaaggcatgtctattgtg

SEQ ID NO: 84893 - DNA, 25 bp, probe
tgttctaggaaggcatgtctattgt

SEQ ID NO: 84894 - DNA, 25 bp, probe
cgtaatgttgaacagaattggagta

SEQ ID NO: 84895 - DNA, 25 bp, probe
tacttcagtgaggagattggagtct

SEQ ID NO: 84896 - DNA, 25 bp, probe
caagccgtaatgttgaacagaattg

SEQ ID NO: 84897 - DNA, 25 bp, probe
ttggaacatcagcaccagtatattg

SEQ ID NO: 84898 - DNA, 25 bp, probe
ccgtaatgttgaacagaattggagt

SEQ ID NO: 84899 - DNA, 25 bp, probe
ggctaacaagaggaaagaactacat

SEQ ID NO: 84900 - DNA, 25 bp, probe
tggtagacagttcatgcagtatatg

SEQ ID NO: 84901 - DNA, 25 bp, probe
agggaagttagtcaaatgaaatgga

SEQ ID NO: 84902 - DNA, 25 bp, probe
cagggaagttagtcaaatgaaatgg

SEQ ID NO: 84903 - DNA, 25 bp, probe
gaggagattggagtctgaatggatc

SEQ ID NO: 84904 - DNA, 25 bp, probe
tgaggagattggagtctgaatggat

SEQ ID NO: 84905 - DNA, 25 bp, probe
gggaagttagtcaaatgaaatggaa

SEQ ID NO: 84906 - DNA, 25 bp, probe
atggtagacagttcatgcagtatat

SEQ ID NO: 84907 - DNA, 25 bp, probe
cattgtatgtttgtggaaagagcat

SEQ ID NO: 84908 - DNA, 25 bp, probe
tatttctgtgcccttaaacccattt

SEQ ID NO: 84909 - DNA, 25 bp, probe
ttatttctgtgcccttaaacccatt

SEQ ID NO: 84910 - DNA, 25 bp, probe
gctaacaagaggaaagaactacatt

SEQ ID NO: 84911 - DNA, 25 bp, probe
tgtttgtggaaagagcatagtttaa

SEQ ID NO: 84912 - DNA, 25 bp, probe
tgaaatggaaattggtaaatggaca

SEQ ID NO: 84913 - DNA, 25 bp, probe
catttatttctgtgcccttaaaccc

SEQ ID NO: 84914 - DNA, 25 bp, probe
atgtttgtggaaagagcatagttta

SEQ ID NO: 84915 - DNA, 25 bp, probe
gtggaaagagcatagtttaacatct

SEQ ID NO: 84916 - DNA, 25 bp, probe
atttctgtgcccttaaacccattta

SEQ ID NO: 84917 - DNA, 25 bp, probe
tttatttctgtgcccttaaacccat

SEQ ID NO: 84918 - DNA, 25 bp, probe
atttatttctgtgcccttaaaccca

SEQ ID NO: 84919 - DNA, 25 bp, probe
gtttgtggaaagagcatagtttaac

SEQ ID NO: 84920 - DNA, 25 bp, probe
aatggatcaactctaggatttaggc

SEQ ID NO: 84921 - DNA, 25 bp, probe
tcagggaagttagtcaaatgaaatg

SEQ ID NO: 84922 - DNA, 25 bp, probe
gagggctaacaagaggaaagaacta

SEQ ID NO: 84923 - DNA, 25 bp, probe
cagtgaggagattggagtctgaatg

SEQ ID NO: 84924 - DNA, 25 bp, probe
tctctccagagttgcatgtagatag

SEQ ID NO: 84925 - DNA, 25 bp, probe
aagccgtaatgttgaacagaattgg

SEQ ID NO: 84926 - DNA, 25 bp, probe
gattggagtctgaatggatctgttt

SEQ ID NO: 84927 - DNA, 25 bp, probe
taggaaggcatgtctattgtgattt

SEQ ID NO: 84928 - DNA, 25 bp, probe
tttacttcagtgaggagattggagt

SEQ ID NO: 84929 - DNA, 25 bp, probe
tgaggtttgttctttccagtgaatg

SEQ ID NO: 84930 - DNA, 25 bp, probe
atatagcactgtagtcagagatgag

SEQ ID NO: 84931 - DNA, 25 bp, probe
tataatgaagaggctgtccagataa

SEQ ID NO: 84932 - DNA, 25 bp, probe
gagattaacacaacacctgtcctta

SEQ ID NO: 84933 - DNA, 25 bp, probe
gattaacacaacacctgtccttact

SEQ ID NO: 84934 - DNA, 25 bp, probe
agattaacacaacacctgtccttac

SEQ ID NO: 84935 - DNA, 25 bp, probe
attaacacaacacctgtccttactg

SEQ ID NO: 84936 - DNA, 25 bp, probe
tatagcactgtagtcagagatgagg

SEQ ID NO: 84937 - DNA, 25 bp, probe
ttataatgaagaggctgtccagata

SEQ ID NO: 84938 - DNA, 25 bp, probe
ctgattgttggcatggtgagattaa

SEQ ID NO: 84939 - DNA, 25 bp, probe
aatatagcactgtagtcagagatga

SEQ ID NO: 84940 - DNA, 25 bp, probe
tagcactgtagtcagagatgaggta

SEQ ID NO: 84941 - DNA, 25 bp, probe
ttaacacaacacctgtccttactgt

SEQ ID NO: 84942 - DNA, 25 bp, probe
tgagattaacacaacacctgtcctt

SEQ ID NO: 84943 - DNA, 25 bp, probe
tgattgttggcatggtgagattaac

SEQ ID NO: 84944 - DNA, 25 bp, probe
gtaccttatatagaacagcatcagt

SEQ ID NO: 84945 - DNA, 25 bp, probe
ttctgcaactgaggacctaattatg

SEQ ID NO: 84946 - DNA, 25 bp, probe
gtagtcagagatgaggtaggtggaa

SEQ ID NO: 84947 - DNA, 25 bp, probe
agtaccttatatagaacagcatcag

SEQ ID NO: 84948 - DNA, 25 bp, probe
taagtgccaccaagatagaaatgat

SEQ ID NO: 84949 - DNA, 25 bp, probe
taatgaagaggctgtccagataaat

SEQ ID NO: 84950 - DNA, 25 bp, probe
ataatgaagaggctgtccagataaa

SEQ ID NO: 84951 - DNA, 25 bp, probe
aatgaagaggctgtccagataaatc

SEQ ID NO: 84952 - DNA, 25 bp, probe
aaaggaaggagcagagaaatcttaa

SEQ ID NO: 84953 - DNA, 25 bp, probe
ctaagtgccaccaagatagaaatga

SEQ ID NO: 84954 - DNA, 25 bp, probe
caaaggaaggagcagagaaatctta

SEQ ID NO: 84955 - DNA, 25 bp, probe
agtgccaccaagatagaaatgattt

SEQ ID NO: 84956 - DNA, 25 bp, probe
aagtgccaccaagatagaaatgatt

SEQ ID NO: 84957 - DNA, 25 bp, probe
atagcactgtagtcagagatgaggt

SEQ ID NO: 84958 - DNA, 25 bp, probe
ccaccaagatagaaatgatttgctc

SEQ ID NO: 84959 - DNA, 25 bp, probe
agccaatctgaagatgtcattctta

SEQ ID NO: 84960 - DNA, 25 bp, probe
aagtatgaccaaatggctatcttcc

SEQ ID NO: 84961 - DNA, 25 bp, probe
actgtagtcagagatgaggtaggtg

SEQ ID NO: 84962 - DNA, 25 bp, probe
cactgtagtcagagatgaggtaggt

SEQ ID NO: 84963 - DNA, 25 bp, probe
atagaaatgatttgctcaacagtgc

SEQ ID NO: 84964 - DNA, 25 bp, probe
caccaagatagaaatgatttgctca

SEQ ID NO: 84965 - DNA, 25 bp, probe
aaagtatgaccaaatggctatcttc

SEQ ID NO: 84966 - DNA, 25 bp, probe
gccaatctgaagatgtcattcttat

SEQ ID NO: 84967 - DNA, 25 bp, probe
gtgccaccaagatagaaatgatttg

SEQ ID NO: 84968 - DNA, 25 bp, probe
cctaagtgccaccaagatagaaatg

SEQ ID NO: 84969 - DNA, 25 bp, probe
accaagatagaaatgatttgctcaa

SEQ ID NO: 84970 - DNA, 25 bp, probe
acctaagtgccaccaagatagaaat

SEQ ID NO: 84971 - DNA, 25 bp, probe
gtgagattaacacaacacctgtcct

SEQ ID NO: 84972 - DNA, 25 bp, probe
cagccaatctgaagatgtcattctt

SEQ ID NO: 84973 - DNA, 25 bp, probe
tagaaatgatttgctcaacagtgct

SEQ ID NO: 84974 - DNA, 25 bp, probe
atagagccaccatatcaacacttag

SEQ ID NO: 84975 - DNA, 25 bp, probe
ctgttctgtgctggacttctaatat

SEQ ID NO: 84976 - DNA, 25 bp, probe
aatagagccaccatatcaacactta

SEQ ID NO: 84977 - DNA, 25 bp, probe
tgttctgtgctggacttctaatata

SEQ ID NO: 84978 - DNA, 25 bp, probe
taagccttgaagaagtatgtgagag

SEQ ID NO: 84979 - DNA, 25 bp, probe
ttgtaagccttgaagaagtatgtga

SEQ ID NO: 84980 - DNA, 25 bp, probe
cttgtaagccttgaagaagtatgtg

SEQ ID NO: 84981 - DNA, 25 bp, probe
gtaagccttgaagaagtatgtgaga

SEQ ID NO: 84982 - DNA, 25 bp, probe
ctccttgtaagccttgaagaagtat

SEQ ID NO: 84983 - DNA, 25 bp, probe
tgtaagccttgaagaagtatgtgag

SEQ ID NO: 84984 - DNA, 25 bp, probe
tccttgtaagccttgaagaagtatg

SEQ ID NO: 84985 - DNA, 25 bp, probe
ctaatatctgctgtgcttctctgac

SEQ ID NO: 84986 - DNA, 25 bp, probe
ccttgtaagccttgaagaagtatgt

SEQ ID NO: 84987 - DNA, 25 bp, probe
tctgttctgtgctggacttctaata

SEQ ID NO: 84988 - DNA, 25 bp, probe
tatctgttctgtgctggacttctaa

SEQ ID NO: 84989 - DNA, 25 bp, probe
tctccttgtaagccttgaagaagta

SEQ ID NO: 84990 - DNA, 25 bp, probe
ctatctgttctgtgctggacttcta

SEQ ID NO: 84991 - DNA, 25 bp, probe
atctgttctgtgctggacttctaat

SEQ ID NO: 84992 - DNA, 25 bp, probe
aatctatctgttctgtgctggactt

SEQ ID NO: 84993 - DNA, 25 bp, probe
ccttgatgatactgccataatgata

SEQ ID NO: 84994 - DNA, 25 bp, probe
atctatctgttctgtgctggacttc

SEQ ID NO: 84995 - DNA, 25 bp, probe
tagagccaccatatcaacacttagc

SEQ ID NO: 84996 - DNA, 25 bp, probe
gaatctatctgttctgtgctggact

SEQ ID NO: 84997 - DNA, 25 bp, probe
tgatactgccataatgatatgtcca

SEQ ID NO: 84998 - DNA, 25 bp, probe
taatatctgctgtgcttctctgaca

SEQ ID NO: 84999 - DNA, 25 bp, probe
gctaatatctgctgtgcttctctga

SEQ ID NO: 85000 - DNA, 25 bp, probe
gttctgtgctggacttctaatatat

SEQ ID NO: 85001 - DNA, 25 bp, probe
gatactgccataatgatatgtccat

SEQ ID NO: 85002 - DNA, 25 bp, probe
atgatactgccataatgatatgtcc

SEQ ID NO: 85003 - DNA, 25 bp, probe
aaatagagccaccatatcaacactt

SEQ ID NO: 85004 - DNA, 25 bp, probe
ttcacagcaatcatttaaccacaaa

SEQ ID NO: 85005 - DNA, 25 bp, probe
tatcaacacttagccctacccatta

SEQ ID NO: 85006 - DNA, 25 bp, probe
tctatctgttctgtgctggacttct

SEQ ID NO: 85007 - DNA, 25 bp, probe
aataacattgggctaatatctgctg

SEQ ID NO: 85008 - DNA, 25 bp, probe
ctgactccactactaatttgctgta

SEQ ID NO: 85009 - DNA, 25 bp, probe
tgactccactactaatttgctgtaa

SEQ ID NO: 85010 - DNA, 25 bp, probe
cccttgatgatactgccataatgat

SEQ ID NO: 85011 - DNA, 25 bp, probe
atcccttgatgatactgccataatg

SEQ ID NO: 85012 - DNA, 25 bp, probe
aatctgagtcagcttagaagagtac

SEQ ID NO: 85013 - DNA, 25 bp, probe
atatcaacacttagccctacccatt

SEQ ID NO: 85014 - DNA, 25 bp, probe
gttcacagcaatcatttaaccacaa

SEQ ID NO: 85015 - DNA, 25 bp, probe
aagccttgaagaagtatgtgagagg

SEQ ID NO: 85016 - DNA, 25 bp, probe
actccactactaatttgctgtaaag

SEQ ID NO: 85017 - DNA, 25 bp, probe
gactccactactaatttgctgtaaa

SEQ ID NO: 85018 - DNA, 25 bp, probe
ctagagcattgagcactttatctcc

SEQ ID NO: 85019 - DNA, 25 bp, probe
tagagcattgagcactttatctccc

SEQ ID NO: 85020 - DNA, 25 bp, probe
ctcagtgaagtttctccagtcccta

SEQ ID NO: 85021 - DNA, 25 bp, probe
ataaaatatctgagcggaactgtga

SEQ ID NO: 85022 - DNA, 25 bp, probe
taaaatatctgagcggaactgtgaa

SEQ ID NO: 85023 - DNA, 25 bp, probe
agtgaagtttctccagtccctagtc

SEQ ID NO: 85024 - DNA, 25 bp, probe
tcagtgaagtttctccagtccctag

SEQ ID NO: 85025 - DNA, 25 bp, probe
aataaaatatctgagcggaactgtg

SEQ ID NO: 85026 - DNA, 25 bp, probe
ctttatctcccacgactcagtgaag

SEQ ID NO: 85027 - DNA, 25 bp, probe
acacaaataaaatatctgagcggaa

SEQ ID NO: 85028 - DNA, 25 bp, probe
aacacaaataaaatatctgagcgga

SEQ ID NO: 85029 - DNA, 25 bp, probe
aaatatctgagcggaactgtgaaaa

SEQ ID NO: 85030 - DNA, 25 bp, probe
aaaatatctgagcggaactgtgaaa

SEQ ID NO: 85031 - DNA, 25 bp, probe
cacaaataaaatatctgagcggaac

SEQ ID NO: 85032 - DNA, 25 bp, probe
aaataaaatatctgagcggaactgt

SEQ ID NO: 85033 - DNA, 25 bp, probe
acaaataaaatatctgagcggaact

SEQ ID NO: 85034 - DNA, 25 bp, probe
aatctagagcattgagcactttatc

SEQ ID NO: 85035 - DNA, 25 bp, probe
atctagagcattgagcactttatct

SEQ ID NO: 85036 - DNA, 25 bp, probe
caaataaaatatctgagcggaactg

SEQ ID NO: 85037 - DNA, 25 bp, probe
cagtgaagtttctccagtccctagt

SEQ ID NO: 85038 - DNA, 25 bp, probe
aaacacaaataaaatatctgagcgg

SEQ ID NO: 85039 - DNA, 25 bp, probe
caaatctagagcattgagcacttta

SEQ ID NO: 85040 - DNA, 25 bp, probe
aaatctagagcattgagcactttat

SEQ ID NO: 85041 - DNA, 25 bp, probe
gaagtttctccagtccctagtcctc

SEQ ID NO: 85042 - DNA, 25 bp, probe
tctagagcattgagcactttatctc

SEQ ID NO: 85043 - DNA, 25 bp, probe
caccttcctcagtttgctcacttac

SEQ ID NO: 85044 - DNA, 25 bp, probe
ttctccagtccctagtcctctcttt

SEQ ID NO: 85045 - DNA, 25 bp, probe
tttctccagtccctagtcctctctt

SEQ ID NO: 85046 - DNA, 25 bp, probe
tatctcccacgactcagtgaagttt

SEQ ID NO: 85047 - DNA, 25 bp, probe
ttatctcccacgactcagtgaagtt

SEQ ID NO: 85048 - DNA, 25 bp, probe
tttatctcccacgactcagtgaagt

SEQ ID NO: 85049 - DNA, 25 bp, probe
actttatctcccacgactcagtgaa

SEQ ID NO: 85050 - DNA, 25 bp, probe
ccaaatctagagcattgagcacttt

SEQ ID NO: 85051 - DNA, 25 bp, probe
cattgagcactttatctcccacgac

SEQ ID NO: 85052 - DNA, 25 bp, probe
gagcattgagcactttatctcccac

SEQ ID NO: 85053 - DNA, 25 bp, probe
aagtttctccagtccctagtcctct

SEQ ID NO: 85054 - DNA, 25 bp, probe
caaacacaaataaaatatctgagcg

SEQ ID NO: 85055 - DNA, 25 bp, probe
attgagcactttatctcccacgact

SEQ ID NO: 85056 - DNA, 25 bp, probe
agagcattgagcactttatctccca

SEQ ID NO: 85057 - DNA, 25 bp, probe
tgaagtttctccagtccctagtcct

SEQ ID NO: 85058 - DNA, 25 bp, probe
gtgaagtttctccagtccctagtcc

SEQ ID NO: 85059 - DNA, 25 bp, probe
ctcctcccctaagttattgctgttc

SEQ ID NO: 85060 - DNA, 25 bp, probe
ctcatcctcaccctcattgactcag

SEQ ID NO: 85061 - DNA, 25 bp, probe
gtttctccagtccctagtcctctct

SEQ ID NO: 85062 - DNA, 25 bp, probe
ttgataccagttgagtagaatgtga

SEQ ID NO: 85063 - DNA, 25 bp, probe
atcattcttctcttgctgtaacact

SEQ ID NO: 85064 - DNA, 25 bp, probe
tgataccagttgagtagaatgtgat

SEQ ID NO: 85065 - DNA, 25 bp, probe
attcttctcttgctgtaacacttga

SEQ ID NO: 85066 - DNA, 25 bp, probe
cattcttctcttgctgtaacacttg

SEQ ID NO: 85067 - DNA, 25 bp, probe
tcattcttctcttgctgtaacactt

SEQ ID NO: 85068 - DNA, 25 bp, probe
aatcattcttctcttgctgtaacac

SEQ ID NO: 85069 - DNA, 25 bp, probe
ttgctgtaacacttgaccttaactt

SEQ ID NO: 85070 - DNA, 25 bp, probe
ctcttgctgtaacacttgaccttaa

SEQ ID NO: 85071 - DNA, 25 bp, probe
ggaatcattcttctcttgctgtaac

SEQ ID NO: 85072 - DNA, 25 bp, probe
aggaatcattcttctcttgctgtaa

SEQ ID NO: 85073 - DNA, 25 bp, probe
cttgctgtaacacttgaccttaact

SEQ ID NO: 85074 - DNA, 25 bp, probe
tcttgctgtaacacttgaccttaac

SEQ ID NO: 85075 - DNA, 25 bp, probe
ttcttctcttgctgtaacacttgac

SEQ ID NO: 85076 - DNA, 25 bp, probe
ataggaatcattcttctcttgctgt

SEQ ID NO: 85077 - DNA, 25 bp, probe
gaatcattcttctcttgctgtaaca

SEQ ID NO: 85078 - DNA, 25 bp, probe
taggaatcattcttctcttgctgta

SEQ ID NO: 85079 - DNA, 25 bp, probe
tctcttgctgtaacacttgacctta

SEQ ID NO: 85080 - DNA, 25 bp, probe
aataggaatcattcttctcttgctg

SEQ ID NO: 85081 - DNA, 25 bp, probe
aatacttgtgaagccagccaattaa

SEQ ID NO: 85082 - DNA, 25 bp, probe
caataggaatcattcttctcttgct

SEQ ID NO: 85083 - DNA, 25 bp, probe
tcaataggaatcattcttctcttgc

SEQ ID NO: 85084 - DNA, 25 bp, probe
gataccagttgagtagaatgtgatc

SEQ ID NO: 85085 - DNA, 25 bp, probe
ttcaggataagaacttccaggttac

SEQ ID NO: 85086 - DNA, 25 bp, probe
cttcaggataagaacttccaggtta

SEQ ID NO: 85087 - DNA, 25 bp, probe
ttctcttgctgtaacacttgacctt

SEQ ID NO: 85088 - DNA, 25 bp, probe
tacttgtgaagccagccaattaata

SEQ ID NO: 85089 - DNA, 25 bp, probe
atacttgtgaagccagccaattaat

SEQ ID NO: 85090 - DNA, 25 bp, probe
aaggacaagtattccagtatctctt

SEQ ID NO: 85091 - DNA, 25 bp, probe
acttgtgaagccagccaattaataa

SEQ ID NO: 85092 - DNA, 25 bp, probe
tctgaatatgcaactgtccacttaa

SEQ ID NO: 85093 - DNA, 25 bp, probe
ttctgaatatgcaactgtccactta

SEQ ID NO: 85094 - DNA, 25 bp, probe
ctgaatatgcaactgtccacttaat

SEQ ID NO: 85095 - DNA, 25 bp, probe
tcaggataagaacttccaggttacc

SEQ ID NO: 85096 - DNA, 25 bp, probe
aggactcttgtatttgtgaactgta

SEQ ID NO: 85097 - DNA, 25 bp, probe
taggactcttgtatttgtgaactgt

SEQ ID NO: 85098 - DNA, 25 bp, probe
cttctcttgctgtaacacttgacct

SEQ ID NO: 85099 - DNA, 25 bp, probe
tcttctcttgctgtaacacttgacc

SEQ ID NO: 85100 - DNA, 25 bp, probe
ggactcttgtatttgtgaactgtaa

SEQ ID NO: 85101 - DNA, 25 bp, probe
aggacaagtattccagtatctctta

SEQ ID NO: 85102 - DNA, 25 bp, probe
taaggacaagtattccagtatctct

SEQ ID NO: 85103 - DNA, 25 bp, probe
tgctgtaacacttgaccttaacttt

SEQ ID NO: 85104 - DNA, 25 bp, probe
tttgataccagttgagtagaatgtg

SEQ ID NO: 85105 - DNA, 25 bp, probe
ccttcaggataagaacttccaggtt

SEQ ID NO: 85106 - DNA, 25 bp, probe
ttcattgtcactcaactgccttata

SEQ ID NO: 85107 - DNA, 25 bp, probe
tataacattgtcaagttctgccgag

SEQ ID NO: 85108 - DNA, 25 bp, probe
aataacactctgctgtaacgaagaa

SEQ ID NO: 85109 - DNA, 25 bp, probe
ataacactctgctgtaacgaagaag

SEQ ID NO: 85110 - DNA, 25 bp, probe
gaataacactctgctgtaacgaaga

SEQ ID NO: 85111 - DNA, 25 bp, probe
tgaataacactctgctgtaacgaag

SEQ ID NO: 85112 - DNA, 25 bp, probe
ccttataacattgtcaagttctgcc

SEQ ID NO: 85113 - DNA, 25 bp, probe
ttgtaacaggcataagtgaataaca

SEQ ID NO: 85114 - DNA, 25 bp, probe
tgccttataacattgtcaagttctg

SEQ ID NO: 85115 - DNA, 25 bp, probe
cttataacattgtcaagttctgccg

SEQ ID NO: 85116 - DNA, 25 bp, probe
cactcaactgccttataacattgtc

SEQ ID NO: 85117 - DNA, 25 bp, probe
gtcactcaactgccttataacattg

SEQ ID NO: 85118 - DNA, 25 bp, probe
cattgtcactcaactgccttataac

SEQ ID NO: 85119 - DNA, 25 bp, probe
tcattgtcactcaactgccttataa

SEQ ID NO: 85120 - DNA, 25 bp, probe
tgtaacaggcataagtgaataacac

SEQ ID NO: 85121 - DNA, 25 bp, probe
gccttataacattgtcaagttctgc

SEQ ID NO: 85122 - DNA, 25 bp, probe
ctgccttataacattgtcaagttct

SEQ ID NO: 85123 - DNA, 25 bp, probe
tcaactgccttataacattgtcaag

SEQ ID NO: 85124 - DNA, 25 bp, probe
ctcaactgccttataacattgtcaa

SEQ ID NO: 85125 - DNA, 25 bp, probe
actcaactgccttataacattgtca

SEQ ID NO: 85126 - DNA, 25 bp, probe
tcactcaactgccttataacattgt

SEQ ID NO: 85127 - DNA, 25 bp, probe
ttataacattgtcaagttctgccga

SEQ ID NO: 85128 - DNA, 25 bp, probe
caactgccttataacattgtcaagt

SEQ ID NO: 85129 - DNA, 25 bp, probe
attgtaacaggcataagtgaataac

SEQ ID NO: 85130 - DNA, 25 bp, probe
actgccttataacattgtcaagttc

SEQ ID NO: 85131 - DNA, 25 bp, probe
taacactctgctgtaacgaagaaga

SEQ ID NO: 85132 - DNA, 25 bp, probe
gtgaataacactctgctgtaacgaa

SEQ ID NO: 85133 - DNA, 25 bp, probe
tgtcactcaactgccttataacatt

SEQ ID NO: 85134 - DNA, 25 bp, probe
ttgtcactcaactgccttataacat

SEQ ID NO: 85135 - DNA, 25 bp, probe
attgtcactcaactgccttataaca

SEQ ID NO: 85136 - DNA, 25 bp, probe
tgacacagaactatatacacacatt

SEQ ID NO: 85137 - DNA, 25 bp, probe
aatgacacagaactatatacacaca

SEQ ID NO: 85138 - DNA, 25 bp, probe
agttctgctcacagtcgttatagtt

SEQ ID NO: 85139 - DNA, 25 bp, probe
aagttctgctcacagtcgttatagt

SEQ ID NO: 85140 - DNA, 25 bp, probe
agccaagaagaggaaacaagataat

SEQ ID NO: 85141 - DNA, 25 bp, probe
aagccaagaagaggaaacaagataa

SEQ ID NO: 85142 - DNA, 25 bp, probe
aaagccaagaagaggaaacaagata

SEQ ID NO: 85143 - DNA, 25 bp, probe
gacacagaactatatacacacattg

SEQ ID NO: 85144 - DNA, 25 bp, probe
atgacacagaactatatacacacat

SEQ ID NO: 85145 - DNA, 25 bp, probe
accatctttgtaacttcctgtgaat

SEQ ID NO: 85146 - DNA, 25 bp, probe
taccatctttgtaacttcctgtgaa

SEQ ID NO: 85147 - DNA, 25 bp, probe
tttaatacaagaacgatttccctgc

SEQ ID NO: 85148 - DNA, 25 bp, probe
acacagaactatatacacacattgt

SEQ ID NO: 85149 - DNA, 25 bp, probe
gccaagaagaggaaacaagataata

SEQ ID NO: 85150 - DNA, 25 bp, probe
atcaccaaattcatacagatcgttt

SEQ ID NO: 85151 - DNA, 25 bp, probe
aatcaccaaattcatacagatcgtt

SEQ ID NO: 85152 - DNA, 25 bp, probe
aaatcaccaaattcatacagatcgt

SEQ ID NO: 85153 - DNA, 25 bp, probe
tcaccaaattcatacagatcgttta

SEQ ID NO: 85154 - DNA, 25 bp, probe
caccaaattcatacagatcgtttaa

SEQ ID NO: 85155 - DNA, 25 bp, probe
gaggctggagtgtagtagtgtgatc

SEQ ID NO: 85156 - DNA, 25 bp, probe
cgtatccacaaaatcaccaaattca

SEQ ID NO: 85157 - DNA, 25 bp, probe
tccacaaaatcaccaaattcataca

SEQ ID NO: 85158 - DNA, 25 bp, probe
gagtgtagtagtgtgatcctggctc

SEQ ID NO: 85159 - DNA, 25 bp, probe
ccacaaaatcaccaaattcatacag

SEQ ID NO: 85160 - DNA, 25 bp, probe
ctggagtgtagtagtgtgatcctgg

SEQ ID NO: 85161 - DNA, 25 bp, probe
accaaattcatacagatcgtttaaa

SEQ ID NO: 85162 - DNA, 25 bp, probe
aatttccaaatggagtttcgctctc

SEQ ID NO: 85163 - DNA, 25 bp, probe
gaatttccaaatggagtttcgctct

SEQ ID NO: 85164 - DNA, 25 bp, probe
gcgtatccacaaaatcaccaaattc

SEQ ID NO: 85165 - DNA, 25 bp, probe
cacaaaatcaccaaattcatacaga

SEQ ID NO: 85166 - DNA, 25 bp, probe
atccacaaaatcaccaaattcatac

SEQ ID NO: 85167 - DNA, 25 bp, probe
gtatccacaaaatcaccaaattcat

SEQ ID NO: 85168 - DNA, 25 bp, probe
agtgtagtagtgtgatcctggctca

SEQ ID NO: 85169 - DNA, 25 bp, probe
gctggagtgtagtagtgtgatcctg

SEQ ID NO: 85170 - DNA, 25 bp, probe
aaaatcaccaaattcatacagatcg

SEQ ID NO: 85171 - DNA, 25 bp, probe
ggcgtatccacaaaatcaccaaatt

SEQ ID NO: 85172 - DNA, 25 bp, probe
acaaaatcaccaaattcatacagat

SEQ ID NO: 85173 - DNA, 25 bp, probe
ccaaattcatacagatcgtttaaat

SEQ ID NO: 85174 - DNA, 25 bp, probe
ttttactcccctttcccaagcaaat

SEQ ID NO: 85175 - DNA, 25 bp, probe
tatccacaaaatcaccaaattcata

SEQ ID NO: 85176 - DNA, 25 bp, probe
tttactcccctttcccaagcaaatc

SEQ ID NO: 85177 - DNA, 25 bp, probe
caaaatcaccaaattcatacagatc

SEQ ID NO: 85178 - DNA, 25 bp, probe
atttccaaatggagtttcgctctcg

SEQ ID NO: 85179 - DNA, 25 bp, probe
ggagtgtagtagtgtgatcctggct

SEQ ID NO: 85180 - DNA, 25 bp, probe
ggctggagtgtagtagtgtgatcct

SEQ ID NO: 85181 - DNA, 25 bp, probe
aggctggagtgtagtagtgtgatcc

SEQ ID NO: 85182 - DNA, 25 bp, probe
gggcgtatccacaaaatcaccaaat

SEQ ID NO: 85183 - DNA, 25 bp, probe
gtagtagtgtgatcctggctcactg

SEQ ID NO: 85184 - DNA, 25 bp, probe
gtgtagtagtgtgatcctggctcac

SEQ ID NO: 85185 - DNA, 25 bp, probe
tgtagtagtgtgatcctggctcact

SEQ ID NO: 85186 - DNA, 25 bp, probe
ttccaaatggagtttcgctctcgtt

SEQ ID NO: 85187 - DNA, 25 bp, probe
tttccaaatggagtttcgctctcgt

SEQ ID NO: 85188 - DNA, 25 bp, probe
ttactcccctttcccaagcaaatcg

SEQ ID NO: 85189 - DNA, 25 bp, probe
cgaatttccaaatggagtttcgctc

SEQ ID NO: 85190 - DNA, 25 bp, probe
aaaatccgcttctacttttggtacc

SEQ ID NO: 85191 - DNA, 25 bp, probe
ctttcccaagcaaatcgtgcatttt

SEQ ID NO: 85192 - DNA, 25 bp, probe
cctttcccaagcaaatcgtgcattt

SEQ ID NO: 85193 - DNA, 25 bp, probe
aaatccgcttctacttttggtaccc

SEQ ID NO: 85194 - DNA, 25 bp, probe
attgtaattggttgtcactgttgta

SEQ ID NO: 85195 - DNA, 25 bp, probe
tattgtaattggttgtcactgttgt

SEQ ID NO: 85196 - DNA, 25 bp, probe
atattcttgaacaccaccactgaag

SEQ ID NO: 85197 - DNA, 25 bp, probe
ggaagattgctgctcagaatatcat

SEQ ID NO: 85198 - DNA, 25 bp, probe
gaagattgctgctcagaatatcata

SEQ ID NO: 85199 - DNA, 25 bp, probe
ttgtaattggttgtcactgttgtac

SEQ ID NO: 85200 - DNA, 25 bp, probe
ttattgtaattggttgtcactgttg

SEQ ID NO: 85201 - DNA, 25 bp, probe
aagattgctgctcagaatatcatat

SEQ ID NO: 85202 - DNA, 25 bp, probe
aggaagattgctgctcagaatatca

SEQ ID NO: 85203 - DNA, 25 bp, probe
tgtaattggttgtcactgttgtacg

SEQ ID NO: 85204 - DNA, 25 bp, probe
tgctgctcagaatatcatataatgt

SEQ ID NO: 85205 - DNA, 25 bp, probe
aatattcttgaacaccaccactgaa

SEQ ID NO: 85206 - DNA, 25 bp, probe
caggaagattgctgctcagaatatc

SEQ ID NO: 85207 - DNA, 25 bp, probe
agattgctgctcagaatatcatata

SEQ ID NO: 85208 - DNA, 25 bp, probe
tcaggaagattgctgctcagaatat

SEQ ID NO: 85209 - DNA, 25 bp, probe
gtaattggttgtcactgttgtacgg

SEQ ID NO: 85210 - DNA, 25 bp, probe
attgtggaaatgaaagtaattgggt

SEQ ID NO: 85211 - DNA, 25 bp, probe
taattggttgtcactgttgtacggt

SEQ ID NO: 85212 - DNA, 25 bp, probe
ttgtggaaatgaaagtaattgggta

SEQ ID NO: 85213 - DNA, 25 bp, probe
gctgctcagaatatcatataatgtt

SEQ ID NO: 85214 - DNA, 25 bp, probe
ttgctgctcagaatatcatataatg

SEQ ID NO: 85215 - DNA, 25 bp, probe
ctcaggaagattgctgctcagaata

SEQ ID NO: 85216 - DNA, 25 bp, probe
aatagactcaggaagattgctgctc

SEQ ID NO: 85217 - DNA, 25 bp, probe
tgtggaaatgaaagtaattgggtat

SEQ ID NO: 85218 - DNA, 25 bp, probe
tttaatgaaatatgtggactgctct

SEQ ID NO: 85219 - DNA, 25 bp, probe
ggagagggaaaggctgtactatata

SEQ ID NO: 85220 - DNA, 25 bp, probe
aatgaaatatgtggactgctctagc

SEQ ID NO: 85221 - DNA, 25 bp, probe
gattgctgctcagaatatcatataa

SEQ ID NO: 85222 - DNA, 25 bp, probe
actgttgtacggtgtctagaattaa

SEQ ID NO: 85223 - DNA, 25 bp, probe
gagagggaaaggctgtactatatat

SEQ ID NO: 85224 - DNA, 25 bp, probe
taatgaaatatgtggactgctctag

SEQ ID NO: 85225 - DNA, 25 bp, probe
ttaatgaaatatgtggactgctcta

SEQ ID NO: 85226 - DNA, 25 bp, probe
tattcttgaacaccaccactgaaga

SEQ ID NO: 85227 - DNA, 25 bp, probe
gtggaaatgaaagtaattgggtatt

SEQ ID NO: 85228 - DNA, 25 bp, probe
agagggaaaggctgtactatatatt

SEQ ID NO: 85229 - DNA, 25 bp, probe
tttattgtaattggttgtcactgtt

SEQ ID NO: 85230 - DNA, 25 bp, probe
atagactcaggaagattgctgctca

SEQ ID NO: 85231 - DNA, 25 bp, probe
attgctgctcagaatatcatataat

SEQ ID NO: 85232 - DNA, 25 bp, probe
cctgtggtcatgatcaagatagtag

SEQ ID NO: 85233 - DNA, 25 bp, probe
ctgtggtcatgatcaagatagtagt

SEQ ID NO: 85234 - DNA, 25 bp, probe
tcctgtggtcatgatcaagatagta

SEQ ID NO: 85235 - DNA, 25 bp, probe
cactgttgtacggtgtctagaatta

SEQ ID NO: 85236 - DNA, 25 bp, probe
aaatagactcaggaagattgctgct

SEQ ID NO: 85237 - DNA, 25 bp, probe
gagggaaaggctgtactatatattt

SEQ ID NO: 85238 - DNA, 25 bp, probe
gatgtgtacctgcttagttaattgg

SEQ ID NO: 85239 - DNA, 25 bp, probe
ctaagaagcaggcagttgatgtatg

SEQ ID NO: 85240 - DNA, 25 bp, probe
agagatgtgtacctgcttagttaat

SEQ ID NO: 85241 - DNA, 25 bp, probe
tctaagaagcaggcagttgatgtat

SEQ ID NO: 85242 - DNA, 25 bp, probe
ctagcattgaactgtattatgtggt

SEQ ID NO: 85243 - DNA, 25 bp, probe
tagcattgaactgtattatgtggtt

SEQ ID NO: 85244 - DNA, 25 bp, probe
agatgtgtacctgcttagttaattg

SEQ ID NO: 85245 - DNA, 25 bp, probe
atgtgtacctgcttagttaattggc

SEQ ID NO: 85246 - DNA, 25 bp, probe
tagagatgtgtacctgcttagttaa

SEQ ID NO: 85247 - DNA, 25 bp, probe
ttagagatgtgtacctgcttagtta

SEQ ID NO: 85248 - DNA, 25 bp, probe
ctgcttagttaattggctcagaatt

SEQ ID NO: 85249 - DNA, 25 bp, probe
gagatgtgtacctgcttagttaatt

SEQ ID NO: 85250 - DNA, 25 bp, probe
taagaagcaggcagttgatgtatgt

SEQ ID NO: 85251 - DNA, 25 bp, probe
cctgcttagttaattggctcagaat

SEQ ID NO: 85252 - DNA, 25 bp, probe
gtgtacctgcttagttaattggctc

SEQ ID NO: 85253 - DNA, 25 bp, probe
gagaccacagccttagtatgacatc

SEQ ID NO: 85254 - DNA, 25 bp, probe
tgtacctgcttagttaattggctca

SEQ ID NO: 85255 - DNA, 25 bp, probe
cattagagtctgtgagtctcattct

SEQ ID NO: 85256 - DNA, 25 bp, probe
tacctgcttagttaattggctcaga

SEQ ID NO: 85257 - DNA, 25 bp, probe
ttctaagaagcaggcagttgatgta

SEQ ID NO: 85258 - DNA, 25 bp, probe
acattagagtctgtgagtctcattc

SEQ ID NO: 85259 - DNA, 25 bp, probe
attagagtctgtgagtctcattctt

SEQ ID NO: 85260 - DNA, 25 bp, probe
tgtgtacctgcttagttaattggct

SEQ ID NO: 85261 - DNA, 25 bp, probe
aagatacagatgtgtgaacttcaat

SEQ ID NO: 85262 - DNA, 25 bp, probe
gtacctgcttagttaattggctcag

SEQ ID NO: 85263 - DNA, 25 bp, probe
agcaggcagttgatgtatgtttata

SEQ ID NO: 85264 - DNA, 25 bp, probe
tcatcttatttagcactggagcaaa

SEQ ID NO: 85265 - DNA, 25 bp, probe
ttcatcttatttagcactggagcaa

SEQ ID NO: 85266 - DNA, 25 bp, probe
tacattagagtctgtgagtctcatt

SEQ ID NO: 85267 - DNA, 25 bp, probe
aatacattagagtctgtgagtctca

SEQ ID NO: 85268 - DNA, 25 bp, probe
gcaggcagttgatgtatgtttatat

SEQ ID NO: 85269 - DNA, 25 bp, probe
ccttagtatgacatcctgcacaatt

SEQ ID NO: 85270 - DNA, 25 bp, probe
atgccagtagtatttagagatgtgt

SEQ ID NO: 85271 - DNA, 25 bp, probe
aagaagcaggcagttgatgtatgtt

SEQ ID NO: 85272 - DNA, 25 bp, probe
aaacatcacactttaatttggagca

SEQ ID NO: 85273 - DNA, 25 bp, probe
aacatcacactttaatttggagcat

SEQ ID NO: 85274 - DNA, 25 bp, probe
acctgcttagttaattggctcagaa

SEQ ID NO: 85275 - DNA, 25 bp, probe
atacattagagtctgtgagtctcat

SEQ ID NO: 85276 - DNA, 25 bp, probe
gaagcatttattctactgaaggcac

SEQ ID NO: 85277 - DNA, 25 bp, probe
gtgaagcatttattctactgaaggc

SEQ ID NO: 85278 - DNA, 25 bp, probe
aagcaggcagttgatgtatgtttat

SEQ ID NO: 85279 - DNA, 25 bp, probe
tgaagcatttattctactgaaggca

SEQ ID NO: 85280 - DNA, 25 bp, probe
aagcatttattctactgaaggcaca

SEQ ID NO: 85281 - DNA, 25 bp, probe
tgccagtagtatttagagatgtgta

SEQ ID NO: 85282 - DNA, 25 bp, probe
aactgaagtctgaaatttggtcaaa

SEQ ID NO: 85283 - DNA, 25 bp, probe
aaactgaagtctgaaatttggtcaa

SEQ ID NO: 85284 - DNA, 25 bp, probe
aaccattaaaactgaagtctgaaat

SEQ ID NO: 85285 - DNA, 25 bp, probe
accattaaaactgaagtctgaaatt

SEQ ID NO: 85286 - DNA, 25 bp, probe
actgaagtctgaaatttggtcaaaa

SEQ ID NO: 85287 - DNA, 25 bp, probe
aaaactgaagtctgaaatttggtca

SEQ ID NO: 85288 - DNA, 25 bp, probe
taaccattaaaactgaagtctgaaa

SEQ ID NO: 85289 - DNA, 25 bp, probe
taaaactgaagtctgaaatttggtc

SEQ ID NO: 85290 - DNA, 25 bp, probe
ttaaaactgaagtctgaaatttggt

SEQ ID NO: 85291 - DNA, 25 bp, probe
attaaaactgaagtctgaaatttgg

SEQ ID NO: 85292 - DNA, 25 bp, probe
ccattaaaactgaagtctgaaattt

SEQ ID NO: 85293 - DNA, 25 bp, probe
cattaaaactgaagtctgaaatttg

SEQ ID NO: 85294 - DNA, 25 bp, probe
ttactgtagtgtattgaagaactgc

SEQ ID NO: 85295 - DNA, 25 bp, probe
atgctatctcctaattacttggtgg

SEQ ID NO: 85296 - DNA, 25 bp, probe
ctatctcctaattacttggtggcta

SEQ ID NO: 85297 - DNA, 25 bp, probe
tgatgctatctcctaattacttggt

SEQ ID NO: 85298 - DNA, 25 bp, probe
atctcctaattacttggtggctaat

SEQ ID NO: 85299 - DNA, 25 bp, probe
tatctcctaattacttggtggctaa

SEQ ID NO: 85300 - DNA, 25 bp, probe
gatgctatctcctaattacttggtg

SEQ ID NO: 85301 - DNA, 25 bp, probe
tctcctaattacttggtggctaata

SEQ ID NO: 85302 - DNA, 25 bp, probe
ttgatgctatctcctaattacttgg

SEQ ID NO: 85303 - DNA, 25 bp, probe
gctatctcctaattacttggtggct

SEQ ID NO: 85304 - DNA, 25 bp, probe
tgctatctcctaattacttggtggc

SEQ ID NO: 85305 - DNA, 25 bp, probe
ttctaccattccaataggagataca

SEQ ID NO: 85306 - DNA, 25 bp, probe
ataggagatacattggtcaaacact

SEQ ID NO: 85307 - DNA, 25 bp, probe
ctcctaattacttggtggctaataa

SEQ ID NO: 85308 - DNA, 25 bp, probe
tctaccattccaataggagatacat

SEQ ID NO: 85309 - DNA, 25 bp, probe
ctgtagtgtattgaagaactgcatg

SEQ ID NO: 85310 - DNA, 25 bp, probe
actgtagtgtattgaagaactgcat

SEQ ID NO: 85311 - DNA, 25 bp, probe
tactgtagtgtattgaagaactgca

SEQ ID NO: 85312 - DNA, 25 bp, probe
agatacattggtcaaacactcaaac

SEQ ID NO: 85313 - DNA, 25 bp, probe
aataggagatacattggtcaaacac

SEQ ID NO: 85314 - DNA, 25 bp, probe
ttcaatttcaattaactcccttggc

SEQ ID NO: 85315 - DNA, 25 bp, probe
agcatctaaactcatcttctttcaa

SEQ ID NO: 85316 - DNA, 25 bp, probe
caatttcaattaactcccttggcta

SEQ ID NO: 85317 - DNA, 25 bp, probe
tcaatttcaattaactcccttggct

SEQ ID NO: 85318 - DNA, 25 bp, probe
taggagatacattggtcaaacactc

SEQ ID NO: 85319 - DNA, 25 bp, probe
gctttcaatttcaattaactccctt

SEQ ID NO: 85320 - DNA, 25 bp, probe
tgttccaactttcaggtttgataat

SEQ ID NO: 85321 - DNA, 25 bp, probe
atgttccaactttcaggtttgataa

SEQ ID NO: 85322 - DNA, 25 bp, probe
gtcaaacactcaaacctagatcatt

SEQ ID NO: 85323 - DNA, 25 bp, probe
gagatacattggtcaaacactcaaa

SEQ ID NO: 85324 - DNA, 25 bp, probe
aagcatctaaactcatcttctttca

SEQ ID NO: 85325 - DNA, 25 bp, probe
aagttgtgcaattacctaacatgat

SEQ ID NO: 85326 - DNA, 25 bp, probe
aatttcaattaactcccttggctat

SEQ ID NO: 85327 - DNA, 25 bp, probe
ggagatacattggtcaaacactcaa

SEQ ID NO: 85328 - DNA, 25 bp, probe
ctaccattccaataggagatacatt

SEQ ID NO: 85329 - DNA, 25 bp, probe
tacttggtggctaataaatgttaca

SEQ ID NO: 85330 - DNA, 25 bp, probe
ttcaattaactcccttggctataag

SEQ ID NO: 85331 - DNA, 25 bp, probe
tcaaacactcaaacctagatcattt

SEQ ID NO: 85332 - DNA, 25 bp, probe
agttgtgcaattacctaacatgata

SEQ ID NO: 85333 - DNA, 25 bp, probe
acttggtggctaataaatgttacat

SEQ ID NO: 85334 - DNA, 25 bp, probe
catgttccaactttcaggtttgata

SEQ ID NO: 85335 - DNA, 25 bp, probe
gcatctaaactcatcttctttcaat

SEQ ID NO: 85336 - DNA, 25 bp, probe
tttcaatttcaattaactcccttgg

SEQ ID NO: 85337 - DNA, 25 bp, probe
aggagatacattggtcaaacactca

SEQ ID NO: 85338 - DNA, 25 bp, probe
gaaaccacttcctctacactgctcc

SEQ ID NO: 85339 - DNA, 25 bp, probe
aaaccacttcctctacactgctcct

SEQ ID NO: 85340 - DNA, 25 bp, probe
gatggaaaccacttcctctacactg

SEQ ID NO: 85341 - DNA, 25 bp, probe
gtgatggaaaccacttcctctacac

SEQ ID NO: 85342 - DNA, 25 bp, probe
tgatggaaaccacttcctctacact

SEQ ID NO: 85343 - DNA, 25 bp, probe
aaagaagggaaatgccacctggttt

SEQ ID NO: 85344 - DNA, 25 bp, probe
cgtgatggaaaccacttcctctaca

SEQ ID NO: 85345 - DNA, 25 bp, probe
atggaaaccacttcctctacactgc

SEQ ID NO: 85346 - DNA, 25 bp, probe
aaaagaagggaaatgccacctggtt

SEQ ID NO: 85347 - DNA, 25 bp, probe
ggaaaccacttcctctacactgctc

SEQ ID NO: 85348 - DNA, 25 bp, probe
ccgtgatggaaaccacttcctctac

SEQ ID NO: 85349 - DNA, 25 bp, probe
tccgtgatggaaaccacttcctcta

SEQ ID NO: 85350 - DNA, 25 bp, probe
ggtgacagagcaaggctactgaaaa

SEQ ID NO: 85351 - DNA, 25 bp, probe
ctttgggtcaagggatgaagacctg

SEQ ID NO: 85352 - DNA, 25 bp, probe
ccagacttaatcttgaatgatacga

SEQ ID NO: 85353 - DNA, 25 bp, probe
ccttcatctgttcagtcatctccaa

SEQ ID NO: 85354 - DNA, 25 bp, probe
atcttgaatgatacgattatgccca

SEQ ID NO: 85355 - DNA, 25 bp, probe
atgccttcatctgttcagtcatctc

SEQ ID NO: 85356 - DNA, 25 bp, probe
ggcagatgagcttacaagtattgaa

SEQ ID NO: 85357 - DNA, 25 bp, probe
agtgtgtttctttctaaattgctgt

SEQ ID NO: 85358 - DNA, 25 bp, probe
tgaggcagatgagcttacaagtatt

SEQ ID NO: 85359 - DNA, 25 bp, probe
gtgtttctttctaaattgctgttcc

SEQ ID NO: 85360 - DNA, 25 bp, probe
tgtttctttctaaattgctgttcct

SEQ ID NO: 85361 - DNA, 25 bp, probe
taccaaatgatagaaacagactgcc

SEQ ID NO: 85362 - DNA, 25 bp, probe
cttcatctgttcagtcatctccaaa

SEQ ID NO: 85363 - DNA, 25 bp, probe
gaggcagatgagcttacaagtattg

SEQ ID NO: 85364 - DNA, 25 bp, probe
ataccaaatgatagaaacagactgc

SEQ ID NO: 85365 - DNA, 25 bp, probe
gtgtgtttctttctaaattgctgtt

SEQ ID NO: 85366 - DNA, 25 bp, probe
cccagacttaatcttgaatgatacg

SEQ ID NO: 85367 - DNA, 25 bp, probe
cttgaatgatacgattatgcccaat

SEQ ID NO: 85368 - DNA, 25 bp, probe
tcttgaatgatacgattatgcccaa

SEQ ID NO: 85369 - DNA, 25 bp, probe
tgtgtttctttctaaattgctgttc

SEQ ID NO: 85370 - DNA, 25 bp, probe
aggcagatgagcttacaagtattga

SEQ ID NO: 85371 - DNA, 25 bp, probe
gtttctttctaaattgctgttcctt

SEQ ID NO: 85372 - DNA, 25 bp, probe
tgaatgatacgattatgcccaatat

SEQ ID NO: 85373 - DNA, 25 bp, probe
aagtgtgtttctttctaaattgctg

SEQ ID NO: 85374 - DNA, 25 bp, probe
cagacttaatcttgaatgatacgat

SEQ ID NO: 85375 - DNA, 25 bp, probe
atgatagaaacagactgcctgaatt

SEQ ID NO: 85376 - DNA, 25 bp, probe
aatgatagaaacagactgcctgaat

SEQ ID NO: 85377 - DNA, 25 bp, probe
acccagacttaatcttgaatgatac

SEQ ID NO: 85378 - DNA, 25 bp, probe
ttgaatgatacgattatgcccaata

SEQ ID NO: 85379 - DNA, 25 bp, probe
aaatgatagaaacagactgcctgaa

SEQ ID NO: 85380 - DNA, 25 bp, probe
atagaaacagactgcctgaattgag

SEQ ID NO: 85381 - DNA, 25 bp, probe
gatagaaacagactgcctgaattga

SEQ ID NO: 85382 - DNA, 25 bp, probe
tgatagaaacagactgcctgaattg

SEQ ID NO: 85383 - DNA, 25 bp, probe
caaatgatagaaacagactgcctga

SEQ ID NO: 85384 - DNA, 25 bp, probe
accaaatgatagaaacagactgcct

SEQ ID NO: 85385 - DNA, 25 bp, probe
aacagactgcctgaattgagaattt

SEQ ID NO: 85386 - DNA, 25 bp, probe
aaacagactgcctgaattgagaatt

SEQ ID NO: 85387 - DNA, 25 bp, probe
ctgaggcagatgagcttacaagtat

SEQ ID NO: 85388 - DNA, 25 bp, probe
gaaacagactgcctgaattgagaat

SEQ ID NO: 85389 - DNA, 25 bp, probe
aacccagacttaatcttgaatgata

SEQ ID NO: 85390 - DNA, 25 bp, probe
taacccagacttaatcttgaatgat

SEQ ID NO: 85391 - DNA, 25 bp, probe
ataacccagacttaatcttgaatga

SEQ ID NO: 85392 - DNA, 25 bp, probe
tagaaacagactgcctgaattgaga

SEQ ID NO: 85393 - DNA, 25 bp, probe
agaaataacccagacttaatcttga

SEQ ID NO: 85394 - DNA, 25 bp, probe
gcagatgagcttacaagtattgaaa

SEQ ID NO: 85395 - DNA, 25 bp, probe
aatcttgaatgatacgattatgccc

SEQ ID NO: 85396 - DNA, 25 bp, probe
ttcatatccaacgacagaagcattc

SEQ ID NO: 85397 - DNA, 25 bp, probe
tcatatccaacgacagaagcattcc

SEQ ID NO: 85398 - DNA, 25 bp, probe
atttcatatccaacgacagaagcat

SEQ ID NO: 85399 - DNA, 25 bp, probe
tttcatatccaacgacagaagcatt

SEQ ID NO: 85400 - DNA, 25 bp, probe
caacgacagaagcattccctataag

SEQ ID NO: 85401 - DNA, 25 bp, probe
ccaacgacagaagcattccctataa

SEQ ID NO: 85402 - DNA, 25 bp, probe
aacgacagaagcattccctataagg

SEQ ID NO: 85403 - DNA, 25 bp, probe
tccaacgacagaagcattccctata

SEQ ID NO: 85404 - DNA, 25 bp, probe
tatccaacgacagaagcattcccta

SEQ ID NO: 85405 - DNA, 25 bp, probe
gatcaatcacttctactgtgacctc

SEQ ID NO: 85406 - DNA, 25 bp, probe
catatccaacgacagaagcattccc

SEQ ID NO: 85407 - DNA, 25 bp, probe
atccaacgacagaagcattccctat

SEQ ID NO: 85408 - DNA, 25 bp, probe
atatccaacgacagaagcattccct

SEQ ID NO: 85409 - DNA, 25 bp, probe
atcaatcacttctactgtgacctcc

SEQ ID NO: 85410 - DNA, 25 bp, probe
tcatgtgtcttttccttcaccaatg

SEQ ID NO: 85411 - DNA, 25 bp, probe
gtcatgtgtcttttccttcaccaat

SEQ ID NO: 85412 - DNA, 25 bp, probe
cagactgcttcttgctgaccatcat

SEQ ID NO: 85413 - DNA, 25 bp, probe
agactgcttcttgctgaccatcatg

SEQ ID NO: 85414 - DNA, 25 bp, probe
catgtcatgtgtcttttccttcacc

SEQ ID NO: 85415 - DNA, 25 bp, probe
acgacagaagcattccctataaggc

SEQ ID NO: 85416 - DNA, 25 bp, probe
atgtgatcaatcacttctactgtga

SEQ ID NO: 85417 - DNA, 25 bp, probe
ccaatgtgatcaatcacttctactg

SEQ ID NO: 85418 - DNA, 25 bp, probe
atgtcatgtgtcttttccttcacca

SEQ ID NO: 85419 - DNA, 25 bp, probe
tgtgatcaatcacttctactgtgac

SEQ ID NO: 85420 - DNA, 25 bp, probe
tgtcatgtgtcttttccttcaccaa

SEQ ID NO: 85421 - DNA, 25 bp, probe
aatgtgatcaatcacttctactgtg

SEQ ID NO: 85422 - DNA, 25 bp, probe
caatgtgatcaatcacttctactgt

SEQ ID NO: 85423 - DNA, 25 bp, probe
gcatgtcatgtgtcttttccttcac

SEQ ID NO: 85424 - DNA, 25 bp, probe
tgatcaatcacttctactgtgacct

SEQ ID NO: 85425 - DNA, 25 bp, probe
gtgatcaatcacttctactgtgacc

SEQ ID NO: 85426 - DNA, 25 bp, probe
catgtgtcttttccttcaccaatgc

SEQ ID NO: 85427 - DNA, 25 bp, probe
ggcatgtcatgtgtcttttccttca

SEQ ID NO: 85428 - DNA, 25 bp, probe
cttcttgctgaccatcatggcctat

SEQ ID NO: 85429 - DNA, 25 bp, probe
cccaatgtgatcaatcacttctact

SEQ ID NO: 85430 - DNA, 25 bp, probe
tcttttccttcaccaatgcactgac

SEQ ID NO: 85431 - DNA, 25 bp, probe
gtcttttccttcaccaatgcactga

SEQ ID NO: 85432 - DNA, 25 bp, probe
atgtgtcttttccttcaccaatgca

SEQ ID NO: 85433 - DNA, 25 bp, probe
gggcatgtcatgtgtcttttccttc

SEQ ID NO: 85434 - DNA, 25 bp, probe
ttcttgctgaccatcatggcctatg

SEQ ID NO: 85435 - DNA, 25 bp, probe
tgtcttttccttcaccaatgcactg

SEQ ID NO: 85436 - DNA, 25 bp, probe
catcatggcctatgaccgctatctg

SEQ ID NO: 85437 - DNA, 25 bp, probe
gtgtcttttccttcaccaatgcact

SEQ ID NO: 85438 - DNA, 25 bp, probe
tgggcatgtcatgtgtcttttcctt

SEQ ID NO: 85439 - DNA, 25 bp, probe
tgtgtcttttccttcaccaatgcac

SEQ ID NO: 85440 - DNA, 25 bp, probe
aatgtgttctgtctgtccatccatc

SEQ ID NO: 85441 - DNA, 25 bp, probe
caatgtgttctgtctgtccatccat

SEQ ID NO: 85442 - DNA, 25 bp, probe
gttccatcaatacctgatccagaat

SEQ ID NO: 85443 - DNA, 25 bp, probe
ttccatcaatacctgatccagaatg

SEQ ID NO: 85444 - DNA, 25 bp, probe
ccatcaatacctgatccagaatgtt

SEQ ID NO: 85445 - DNA, 25 bp, probe
atgtgttctgtctgtccatccatct

SEQ ID NO: 85446 - DNA, 25 bp, probe
tccatcaatacctgatccagaatgt

SEQ ID NO: 85447 - DNA, 25 bp, probe
tgttctgtctgtccatccatctctg

SEQ ID NO: 85448 - DNA, 25 bp, probe
gtgttctgtctgtccatccatctct

SEQ ID NO: 85449 - DNA, 25 bp, probe
tcaatacctgatccagaatgtttcc

SEQ ID NO: 85450 - DNA, 25 bp, probe
ttgctcttcctactgtacatattgg

SEQ ID NO: 85451 - DNA, 25 bp, probe
ggttccatcaatacctgatccagaa

SEQ ID NO: 85452 - DNA, 25 bp, probe
gcattgctcttcctactgtacatat

SEQ ID NO: 85453 - DNA, 25 bp, probe
tgtgttctgtctgtccatccatctc

SEQ ID NO: 85454 - DNA, 25 bp, probe
caatacctgatccagaatgtttccg

SEQ ID NO: 85455 - DNA, 25 bp, probe
atggttccatcaatacctgatccag

SEQ ID NO: 85456 - DNA, 25 bp, probe
aatacctgatccagaatgtttccgt

SEQ ID NO: 85457 - DNA, 25 bp, probe
attgctcttcctactgtacatattg

SEQ ID NO: 85458 - DNA, 25 bp, probe
cattgctcttcctactgtacatatt

SEQ ID NO: 85459 - DNA, 25 bp, probe
tggttccatcaatacctgatccaga

SEQ ID NO: 85460 - DNA, 25 bp, probe
catcaatacctgatccagaatgttt

SEQ ID NO: 85461 - DNA, 25 bp, probe
atacctgatccagaatgtttccgtg

SEQ ID NO: 85462 - DNA, 25 bp, probe
atcaatacctgatccagaatgtttc

SEQ ID NO: 85463 - DNA, 25 bp, probe
cagaatgtttccgtgctacactttg

SEQ ID NO: 85464 - DNA, 25 bp, probe
gaatgtttccgtgctacactttgtg

SEQ ID NO: 85465 - DNA, 25 bp, probe
agaatgtttccgtgctacactttgt

SEQ ID NO: 85466 - DNA, 25 bp, probe
ttaacgatggttccatcaatacctg

SEQ ID NO: 85467 - DNA, 25 bp, probe
gttctgtctgtccatccatctctgc

SEQ ID NO: 85468 - DNA, 25 bp, probe
taacgatggttccatcaatacctga

SEQ ID NO: 85469 - DNA, 25 bp, probe
ctgcaatgtgttctgtctgtccatc

SEQ ID NO: 85470 - DNA, 25 bp, probe
agcattgctcttcctactgtacata

SEQ ID NO: 85471 - DNA, 25 bp, probe
aacgatggttccatcaatacctgat

SEQ ID NO: 85472 - DNA, 25 bp, probe
tgctcttcctactgtacatattggg

SEQ ID NO: 85473 - DNA, 25 bp, probe
gatggttccatcaatacctgatcca

SEQ ID NO: 85474 - DNA, 25 bp, probe
ccagaatgtttccgtgctacacttt

SEQ ID NO: 85475 - DNA, 25 bp, probe
ctgatccagaatgtttccgtgctac

SEQ ID NO: 85476 - DNA, 25 bp, probe
acgatggttccatcaatacctgatc

SEQ ID NO: 85477 - DNA, 25 bp, probe
ctccagcattgctcttcctactgta

SEQ ID NO: 85478 - DNA, 25 bp, probe
gatccagaatgtttccgtgctacac

SEQ ID NO: 85479 - DNA, 25 bp, probe
tttaacgatggttccatcaatacct

SEQ ID NO: 85480 - DNA, 25 bp, probe
cagcattgctcttcctactgtacat

SEQ ID NO: 85481 - DNA, 25 bp, probe
atccagaatgtttccgtgctacact

SEQ ID NO: 85482 - DNA, 25 bp, probe
cgatggttccatcaatacctgatcc

SEQ ID NO: 85483 - DNA, 25 bp, probe
tccagcattgctcttcctactgtac

SEQ ID NO: 85484 - DNA, 25 bp, probe
ttacttaccttactaacttctccgc

SEQ ID NO: 85485 - DNA, 25 bp, probe
tacttaccttactaacttctccgca

SEQ ID NO: 85486 - DNA, 25 bp, probe
cttaccttactaacttctccgcaag

SEQ ID NO: 85487 - DNA, 25 bp, probe
acttaccttactaacttctccgcaa

SEQ ID NO: 85488 - DNA, 25 bp, probe
gcttacttaccttactaacttctcc

SEQ ID NO: 85489 - DNA, 25 bp, probe
gacacagtgcttacttaccttacta

SEQ ID NO: 85490 - DNA, 25 bp, probe
acagtgcttacttaccttactaact

SEQ ID NO: 85491 - DNA, 25 bp, probe
aagacacagtgcttacttaccttac

SEQ ID NO: 85492 - DNA, 25 bp, probe
acacagtgcttacttaccttactaa

SEQ ID NO: 85493 - DNA, 25 bp, probe
cttacttaccttactaacttctccg

SEQ ID NO: 85494 - DNA, 25 bp, probe
cacagtgcttacttaccttactaac

SEQ ID NO: 85495 - DNA, 25 bp, probe
gtgcttacttaccttactaacttct

SEQ ID NO: 85496 - DNA, 25 bp, probe
agacacagtgcttacttaccttact

SEQ ID NO: 85497 - DNA, 25 bp, probe
tgcttacttaccttactaacttctc

SEQ ID NO: 85498 - DNA, 25 bp, probe
cagtgcttacttaccttactaactt

SEQ ID NO: 85499 - DNA, 25 bp, probe
agtgcttacttaccttactaacttc

SEQ ID NO: 85500 - DNA, 25 bp, probe
ttaggaacaaagaggtaaaggaagc

SEQ ID NO: 85501 - DNA, 25 bp, probe
cacttaggaacaaagaggtaaagga

SEQ ID NO: 85502 - DNA, 25 bp, probe
acacttaggaacaaagaggtaaagg

SEQ ID NO: 85503 - DNA, 25 bp, probe
acttaggaacaaagaggtaaaggaa

SEQ ID NO: 85504 - DNA, 25 bp, probe
cttaggaacaaagaggtaaaggaag

SEQ ID NO: 85505 - DNA, 25 bp, probe
aaagacacagtgcttacttacctta

SEQ ID NO: 85506 - DNA, 25 bp, probe
taaagacacagtgcttacttacctt

SEQ ID NO: 85507 - DNA, 25 bp, probe
ctaaagacacagtgcttacttacct

SEQ ID NO: 85508 - DNA, 25 bp, probe
ttgctaaagacacagtgcttactta

SEQ ID NO: 85509 - DNA, 25 bp, probe
tgctaaagacacagtgcttacttac

SEQ ID NO: 85510 - DNA, 25 bp, probe
tttgctaaagacacagtgcttactt

SEQ ID NO: 85511 - DNA, 25 bp, probe
tacacttaggaacaaagaggtaaag

SEQ ID NO: 85512 - DNA, 25 bp, probe
taggaacaaagaggtaaaggaagcc

SEQ ID NO: 85513 - DNA, 25 bp, probe
gctaaagacacagtgcttacttacc

SEQ ID NO: 85514 - DNA, 25 bp, probe
atacacttaggaacaaagaggtaaa

SEQ ID NO: 85515 - DNA, 25 bp, probe
ttaccttactaacttctccgcaagt

SEQ ID NO: 85516 - DNA, 25 bp, probe
actattgtaatctccctcaaagaaa

SEQ ID NO: 85517 - DNA, 25 bp, probe
aactattgtaatctccctcaaagaa

SEQ ID NO: 85518 - DNA, 25 bp, probe
aaactattgtaatctccctcaaaga

SEQ ID NO: 85519 - DNA, 25 bp, probe
tatacacttaggaacaaagaggtaa

SEQ ID NO: 85520 - DNA, 25 bp, probe
ctttgctaaagacacagtgcttact

SEQ ID NO: 85521 - DNA, 25 bp, probe
atatacacttaggaacaaagaggta

SEQ ID NO: 85522 - DNA, 25 bp, probe
tatatacacttaggaacaaagaggt

SEQ ID NO: 85523 - DNA, 25 bp, probe
acccatgctgaatccccttatatat

SEQ ID NO: 85524 - DNA, 25 bp, probe
gctttgctaaagacacagtgcttac

SEQ ID NO: 85525 - DNA, 25 bp, probe
cacccatgctgaatccccttatata

SEQ ID NO: 85526 - DNA, 25 bp, probe
aggaacaaagaggtaaaggaagcct

SEQ ID NO: 85527 - DNA, 25 bp, probe
agaaaactattgtaatctccctcaa

SEQ ID NO: 85528 - DNA, 25 bp, probe
atcttggtaatgatgtcctacgatc

SEQ ID NO: 85529 - DNA, 25 bp, probe
cttcttctgtgaaatcctgtctgtc

SEQ ID NO: 85530 - DNA, 25 bp, probe
acttcttctgtgaaatcctgtctgt

SEQ ID NO: 85531 - DNA, 25 bp, probe
gaaatcaaccacttcttctgtgaaa

SEQ ID NO: 85532 - DNA, 25 bp, probe
aatcaaccacttcttctgtgaaatc

SEQ ID NO: 85533 - DNA, 25 bp, probe
atgaaatcaaccacttcttctgtga

SEQ ID NO: 85534 - DNA, 25 bp, probe
aaatcaaccacttcttctgtgaaat

SEQ ID NO: 85535 - DNA, 25 bp, probe
tgaaatcaaccacttcttctgtgaa

SEQ ID NO: 85536 - DNA, 25 bp, probe
ccatgaaatcaaccacttcttctgt

SEQ ID NO: 85537 - DNA, 25 bp, probe
catcttggtaatgatgtcctacgat

SEQ ID NO: 85538 - DNA, 25 bp, probe
agtgtctcatcttggtaatgatgtc

SEQ ID NO: 85539 - DNA, 25 bp, probe
gagtgtctcatcttggtaatgatgt

SEQ ID NO: 85540 - DNA, 25 bp, probe
tctcatcttggtaatgatgtcctac

SEQ ID NO: 85541 - DNA, 25 bp, probe
gtctcatcttggtaatgatgtccta

SEQ ID NO: 85542 - DNA, 25 bp, probe
atcaaccacttcttctgtgaaatcc

SEQ ID NO: 85543 - DNA, 25 bp, probe
ttcttctgtgaaatcctgtctgtcc

SEQ ID NO: 85544 - DNA, 25 bp, probe
ctcatcttggtaatgatgtcctacg

SEQ ID NO: 85545 - DNA, 25 bp, probe
cacttcttctgtgaaatcctgtctg

SEQ ID NO: 85546 - DNA, 25 bp, probe
tcatcttggtaatgatgtcctacga

SEQ ID NO: 85547 - DNA, 25 bp, probe
tgtctcatcttggtaatgatgtcct

SEQ ID NO: 85548 - DNA, 25 bp, probe
gtgtctcatcttggtaatgatgtcc

SEQ ID NO: 85549 - DNA, 25 bp, probe
catgaaatcaaccacttcttctgtg

SEQ ID NO: 85550 - DNA, 25 bp, probe
cccatgaaatcaaccacttcttctg

SEQ ID NO: 85551 - DNA, 25 bp, probe
cttctgtgaaatcctgtctgtcctc

SEQ ID NO: 85552 - DNA, 25 bp, probe
tgaaatcctgtctgtcctcaagttg

SEQ ID NO: 85553 - DNA, 25 bp, probe
gtgaaatcctgtctgtcctcaagtt

SEQ ID NO: 85554 - DNA, 25 bp, probe
caaccacttcttctgtgaaatcctg

SEQ ID NO: 85555 - DNA, 25 bp, probe
tcaaccacttcttctgtgaaatcct

SEQ ID NO: 85556 - DNA, 25 bp, probe
tctgcaatattctgtcatcatgaga

SEQ ID NO: 85557 - DNA, 25 bp, probe
cctctgcaatattctgtcatcatga

SEQ ID NO: 85558 - DNA, 25 bp, probe
ccctctgcaatattctgtcatcatg

SEQ ID NO: 85559 - DNA, 25 bp, probe
ctctgcaatattctgtcatcatgag

SEQ ID NO: 85560 - DNA, 25 bp, probe
aaccacttcttctgtgaaatcctgt

SEQ ID NO: 85561 - DNA, 25 bp, probe
ctgcaatattctgtcatcatgagat

SEQ ID NO: 85562 - DNA, 25 bp, probe
tcttctgtgaaatcctgtctgtcct

SEQ ID NO: 85563 - DNA, 25 bp, probe
gaaatcctgtctgtcctcaagttgg

SEQ ID NO: 85564 - DNA, 25 bp, probe
ctgagtgtctcatcttggtaatgat

SEQ ID NO: 85565 - DNA, 25 bp, probe
tgagtgtctcatcttggtaatgatg

SEQ ID NO: 85566 - DNA, 25 bp, probe
ccacttcttctgtgaaatcctgtct

SEQ ID NO: 85567 - DNA, 25 bp, probe
accctctgcaatattctgtcatcat

SEQ ID NO: 85568 - DNA, 25 bp, probe
ctgtgaaatcctgtctgtcctcaag

SEQ ID NO: 85569 - DNA, 25 bp, probe
accacttcttctgtgaaatcctgtc

SEQ ID NO: 85570 - DNA, 25 bp, probe
actgagtgtctcatcttggtaatga

SEQ ID NO: 85571 - DNA, 25 bp, probe
cactgagtgtctcatcttggtaatg

SEQ ID NO: 85572 - DNA, 25 bp, probe
ttcttgtatgtgtagcttgctagtt

SEQ ID NO: 85573 - DNA, 25 bp, probe
ctagagacaagagagacacctccaa

SEQ ID NO: 85574 - DNA, 25 bp, probe
tagagacaagagagacacctccaac

SEQ ID NO: 85575 - DNA, 25 bp, probe
cttgtatgtgtagcttgctagtttg

SEQ ID NO: 85576 - DNA, 25 bp, probe
tcttgtatgtgtagcttgctagttt

SEQ ID NO: 85577 - DNA, 25 bp, probe
tttcttgtatgtgtagcttgctagt

SEQ ID NO: 85578 - DNA, 25 bp, probe
ctttcttgtatgtgtagcttgctag

SEQ ID NO: 85579 - DNA, 25 bp, probe
cctttcttgtatgtgtagcttgcta

SEQ ID NO: 85580 - DNA, 25 bp, probe
aagctagagacaagagagacacctc

SEQ ID NO: 85581 - DNA, 25 bp, probe
aaagctagagacaagagagacacct

SEQ ID NO: 85582 - DNA, 25 bp, probe
gcctttcttgtatgtgtagcttgct

SEQ ID NO: 85583 - DNA, 25 bp, probe
gctagagacaagagagacacctcca

SEQ ID NO: 85584 - DNA, 25 bp, probe
caaaagctagagacaagagagacac

SEQ ID NO: 85585 - DNA, 25 bp, probe
agctagagacaagagagacacctcc

SEQ ID NO: 85586 - DNA, 25 bp, probe
aaattgtgagtaagcttcggaattc

SEQ ID NO: 85587 - DNA, 25 bp, probe
aaaagctagagacaagagagacacc

SEQ ID NO: 85588 - DNA, 25 bp, probe
ccaaaagctagagacaagagagaca

SEQ ID NO: 85589 - DNA, 25 bp, probe
tataagccaaaagctagagacaaga

SEQ ID NO: 85590 - DNA, 25 bp, probe
ataagccaaaagctagagacaagag

SEQ ID NO: 85591 - DNA, 25 bp, probe
ttataagccaaaagctagagacaag

SEQ ID NO: 85592 - DNA, 25 bp, probe
gccaaaagctagagacaagagagac

SEQ ID NO: 85593 - DNA, 25 bp, probe
taagccaaaagctagagacaagaga

SEQ ID NO: 85594 - DNA, 25 bp, probe
aagccaaaagctagagacaagagag

SEQ ID NO: 85595 - DNA, 25 bp, probe
ggcctttcttgtatgtgtagcttgc

SEQ ID NO: 85596 - DNA, 25 bp, probe
aaaattgtgagtaagcttcggaatt

SEQ ID NO: 85597 - DNA, 25 bp, probe
catgtggaaagcttgtcttagaggc

SEQ ID NO: 85598 - DNA, 25 bp, probe
agccaaaagctagagacaagagaga

SEQ ID NO: 85599 - DNA, 25 bp, probe
ccttataagccaaaagctagagaca

SEQ ID NO: 85600 - DNA, 25 bp, probe
cccttataagccaaaagctagagac

SEQ ID NO: 85601 - DNA, 25 bp, probe
cttataagccaaaagctagagacaa

SEQ ID NO: 85602 - DNA, 25 bp, probe
atgtggaaagcttgtcttagaggcc

SEQ ID NO: 85603 - DNA, 25 bp, probe
ccccttataagccaaaagctagaga

SEQ ID NO: 85604 - DNA, 25 bp, probe
aataaggagatgaaggcagcaataa

SEQ ID NO: 85605 - DNA, 25 bp, probe
gaataaggagatgaaggcagcaata

SEQ ID NO: 85606 - DNA, 25 bp, probe
ttcttcatacttctaatctcctacg

SEQ ID NO: 85607 - DNA, 25 bp, probe
atccagttgtctatacattcaggaa

SEQ ID NO: 85608 - DNA, 25 bp, probe
aatccagttgtctatacattcagga

SEQ ID NO: 85609 - DNA, 25 bp, probe
tccagttgtctatacattcaggaat

SEQ ID NO: 85610 - DNA, 25 bp, probe
cttctaatctcctacgtcttcatcc

SEQ ID NO: 85611 - DNA, 25 bp, probe
ttctaatctcctacgtcttcatcct

SEQ ID NO: 85612 - DNA, 25 bp, probe
ctccactatctgaccattatgagcc

SEQ ID NO: 85613 - DNA, 25 bp, probe
cctccactatctgaccattatgagc

SEQ ID NO: 85614 - DNA, 25 bp, probe
atgaaggcagcaataaagagagtat

SEQ ID NO: 85615 - DNA, 25 bp, probe
gaatccagttgtctatacattcagg

SEQ ID NO: 85616 - DNA, 25 bp, probe
ataaggagatgaaggcagcaataaa

SEQ ID NO: 85617 - DNA, 25 bp, probe
acttctaatctcctacgtcttcatc

SEQ ID NO: 85618 - DNA, 25 bp, probe
tcccaagatgatttatgacctgttc

SEQ ID NO: 85619 - DNA, 25 bp, probe
ctcccaagatgatttatgacctgtt

SEQ ID NO: 85620 - DNA, 25 bp, probe
gatgaaggcagcaataaagagagta

SEQ ID NO: 85621 - DNA, 25 bp, probe
taatctcctacgtcttcatcctgtt

SEQ ID NO: 85622 - DNA, 25 bp, probe
tctaatctcctacgtcttcatcctg

SEQ ID NO: 85623 - DNA, 25 bp, probe
taaggagatgaaggcagcaataaag

SEQ ID NO: 85624 - DNA, 25 bp, probe
ggaataaggagatgaaggcagcaat

SEQ ID NO: 85625 - DNA, 25 bp, probe
ccagttgtctatacattcaggaata

SEQ ID NO: 85626 - DNA, 25 bp, probe
cctaattcacagatggacaagtttc

SEQ ID NO: 85627 - DNA, 25 bp, probe
tgaaggcagcaataaagagagtatg

SEQ ID NO: 85628 - DNA, 25 bp, probe
ctctatgtggcaagcattactggaa

SEQ ID NO: 85629 - DNA, 25 bp, probe
ctaatctcctacgtcttcatcctgt

SEQ ID NO: 85630 - DNA, 25 bp, probe
ttcttgttaatttagccttctgtgg

SEQ ID NO: 85631 - DNA, 25 bp, probe
cttctcccaagatgatttatgacct

SEQ ID NO: 85632 - DNA, 25 bp, probe
ttctcccaagatgatttatgacctg

SEQ ID NO: 85633 - DNA, 25 bp, probe
acttctcccaagatgatttatgacc

SEQ ID NO: 85634 - DNA, 25 bp, probe
ccctaattcacagatggacaagttt

SEQ ID NO: 85635 - DNA, 25 bp, probe
cacttctcccaagatgatttatgac

SEQ ID NO: 85636 - DNA, 25 bp, probe
ttctgaatccagttgtctatacatt

SEQ ID NO: 85637 - DNA, 25 bp, probe
gagatgaaggcagcaataaagagag

SEQ ID NO: 85638 - DNA, 25 bp, probe
atggagagaatcactcagtggtatc

SEQ ID NO: 85639 - DNA, 25 bp, probe
gatggagagaatcactcagtggtat

SEQ ID NO: 85640 - DNA, 25 bp, probe
tgtcacttctcccaagatgatttat

SEQ ID NO: 85641 - DNA, 25 bp, probe
ctgtcacttctcccaagatgattta

SEQ ID NO: 85642 - DNA, 25 bp, probe
gtcacttctcccaagatgatttatg

SEQ ID NO: 85643 - DNA, 25 bp, probe
tttatctgtgtgggtactttcttca

SEQ ID NO: 85644 - DNA, 25 bp, probe
tctgaatccagttgtctatacattc

SEQ ID NO: 85645 - DNA, 25 bp, probe
tacttctaatctcctacgtcttcat

SEQ ID NO: 85646 - DNA, 25 bp, probe
atacttctaatctcctacgtcttca

SEQ ID NO: 85647 - DNA, 25 bp, probe
tcatacttctaatctcctacgtctt

SEQ ID NO: 85648 - DNA, 25 bp, probe
cccagtaaagagctttctcacaaaa

SEQ ID NO: 85649 - DNA, 25 bp, probe
ccccagtaaagagctttctcacaaa

SEQ ID NO: 85650 - DNA, 25 bp, probe
ctctgtcttcacctgattcaactaa

SEQ ID NO: 85651 - DNA, 25 bp, probe
ttaactctgtcttcacctgattcaa

SEQ ID NO: 85652 - DNA, 25 bp, probe
taactctgtcttcacctgattcaac

SEQ ID NO: 85653 - DNA, 25 bp, probe
actctgtcttcacctgattcaacta

SEQ ID NO: 85654 - DNA, 25 bp, probe
aatagttactccagtgccaacaatc

SEQ ID NO: 85655 - DNA, 25 bp, probe
aactctgtcttcacctgattcaact

SEQ ID NO: 85656 - DNA, 25 bp, probe
atagttactccagtgccaacaatcc

SEQ ID NO: 85657 - DNA, 25 bp, probe
accttgttatttctcagactttgga

SEQ ID NO: 85658 - DNA, 25 bp, probe
tctgtcttcacctgattcaactaaa

SEQ ID NO: 85659 - DNA, 25 bp, probe
tttaactctgtcttcacctgattca

SEQ ID NO: 85660 - DNA, 25 bp, probe
taaatagttactccagtgccaacaa

SEQ ID NO: 85661 - DNA, 25 bp, probe
ccttgttatttctcagactttggaa

SEQ ID NO: 85662 - DNA, 25 bp, probe
aaccttgttatttctcagactttgg

SEQ ID NO: 85663 - DNA, 25 bp, probe
aaatagttactccagtgccaacaat

SEQ ID NO: 85664 - DNA, 25 bp, probe
ccaaacctctgttcagtgtaaatag

SEQ ID NO: 85665 - DNA, 25 bp, probe
caaacctctgttcagtgtaaatagt

SEQ ID NO: 85666 - DNA, 25 bp, probe
gccaaacctctgttcagtgtaaata

SEQ ID NO: 85667 - DNA, 25 bp, probe
gaaccttgttatttctcagactttg

SEQ ID NO: 85668 - DNA, 25 bp, probe
gcattcgagacagaaccttgttatt

SEQ ID NO: 85669 - DNA, 25 bp, probe
gttactccagtgccaacaatcctag

SEQ ID NO: 85670 - DNA, 25 bp, probe
aaacctctgttcagtgtaaatagtt

SEQ ID NO: 85671 - DNA, 25 bp, probe
agttactccagtgccaacaatccta

SEQ ID NO: 85672 - DNA, 25 bp, probe
tagttactccagtgccaacaatcct

SEQ ID NO: 85673 - DNA, 25 bp, probe
tcagtgtaaatagttactccagtgc

SEQ ID NO: 85674 - DNA, 25 bp, probe
agcattcgagacagaaccttgttat

SEQ ID NO: 85675 - DNA, 25 bp, probe
gtaaatagttactccagtgccaaca

SEQ ID NO: 85676 - DNA, 25 bp, probe
tgtaaatagttactccagtgccaac

SEQ ID NO: 85677 - DNA, 25 bp, probe
gtgtaaatagttactccagtgccaa

SEQ ID NO: 85678 - DNA, 25 bp, probe
aagcattcgagacagaaccttgtta

SEQ ID NO: 85679 - DNA, 25 bp, probe
ttactccagtgccaacaatcctagt

SEQ ID NO: 85680 - DNA, 25 bp, probe
cagtgtaaatagttactccagtgcc

SEQ ID NO: 85681 - DNA, 25 bp, probe
aacctctgttcagtgtaaatagtta

SEQ ID NO: 85682 - DNA, 25 bp, probe
agtgtaaatagttactccagtgcca

SEQ ID NO: 85683 - DNA, 25 bp, probe
ttcagtgtaaatagttactccagtg

SEQ ID NO: 85684 - DNA, 25 bp, probe
gttcagtgtaaatagttactccagt

SEQ ID NO: 85685 - DNA, 25 bp, probe
tgttcagtgtaaatagttactccag

SEQ ID NO: 85686 - DNA, 25 bp, probe
ctgttcagtgtaaatagttactcca

SEQ ID NO: 85687 - DNA, 25 bp, probe
acctctgttcagtgtaaatagttac

SEQ ID NO: 85688 - DNA, 25 bp, probe
cattcgagacagaaccttgttattt

SEQ ID NO: 85689 - DNA, 25 bp, probe
attcgagacagaaccttgttatttc

SEQ ID NO: 85690 - DNA, 25 bp, probe
tctgttcagtgtaaatagttactcc

SEQ ID NO: 85691 - DNA, 25 bp, probe
cctctgttcagtgtaaatagttact

SEQ ID NO: 85692 - DNA, 25 bp, probe
acagaaccttgttatttctcagact

SEQ ID NO: 85693 - DNA, 25 bp, probe
gacagaaccttgttatttctcagac

SEQ ID NO: 85694 - DNA, 25 bp, probe
tatgtatcttcaaccaccttcatcc

SEQ ID NO: 85695 - DNA, 25 bp, probe
aattattggttctgcctaaggatgg

SEQ ID NO: 85696 - DNA, 25 bp, probe
tgaattattggttctgcctaaggat

SEQ ID NO: 85697 - DNA, 25 bp, probe
atgaattattggttctgcctaagga

SEQ ID NO: 85698 - DNA, 25 bp, probe
gaattattggttctgcctaaggatg

SEQ ID NO: 85699 - DNA, 25 bp, probe
tatactacttggcttctcagatagg

SEQ ID NO: 85700 - DNA, 25 bp, probe
tctaattccagtgacattgatcctc

SEQ ID NO: 85701 - DNA, 25 bp, probe
ttctaattccagtgacattgatcct

SEQ ID NO: 85702 - DNA, 25 bp, probe
cttctaattccagtgacattgatcc

SEQ ID NO: 85703 - DNA, 25 bp, probe
atatgtatcttcaaccaccttcatc

SEQ ID NO: 85704 - DNA, 25 bp, probe
atgtatcttcaaccaccttcatcca

SEQ ID NO: 85705 - DNA, 25 bp, probe
ttcttctaattccagtgacattgat

SEQ ID NO: 85706 - DNA, 25 bp, probe
attcttctaattccagtgacattga

SEQ ID NO: 85707 - DNA, 25 bp, probe
catgaattattggttctgcctaagg

SEQ ID NO: 85708 - DNA, 25 bp, probe
taattccagtgacattgatcctcat

SEQ ID NO: 85709 - DNA, 25 bp, probe
ctaattccagtgacattgatcctca

SEQ ID NO: 85710 - DNA, 25 bp, probe
tcttctaattccagtgacattgatc

SEQ ID NO: 85711 - DNA, 25 bp, probe
gtgacattgatcctcatctcctatg

SEQ ID NO: 85712 - DNA, 25 bp, probe
agtgacattgatcctcatctcctat

SEQ ID NO: 85713 - DNA, 25 bp, probe
atctctgctataccacaactacagt

SEQ ID NO: 85714 - DNA, 25 bp, probe
aattccagtgacattgatcctcatc

SEQ ID NO: 85715 - DNA, 25 bp, probe
tctctgctataccacaactacagtc

SEQ ID NO: 85716 - DNA, 25 bp, probe
cagtgacattgatcctcatctccta

SEQ ID NO: 85717 - DNA, 25 bp, probe
gatctctgctataccacaactacag

SEQ ID NO: 85718 - DNA, 25 bp, probe
cctcttctatggaatcatcacatcc

SEQ ID NO: 85719 - DNA, 25 bp, probe
gaatcatcacatccatgttgaactc

SEQ ID NO: 85720 - DNA, 25 bp, probe
tgtatcttcaaccaccttcatccac

SEQ ID NO: 85721 - DNA, 25 bp, probe
tgacattgatcctcatctcctatgg

SEQ ID NO: 85722 - DNA, 25 bp, probe
attccagtgacattgatcctcatct

SEQ ID NO: 85723 - DNA, 25 bp, probe
ttatatgtatcttcaaccaccttca

SEQ ID NO: 85724 - DNA, 25 bp, probe
gtggtcctgttaatatcatacacaa

SEQ ID NO: 85725 - DNA, 25 bp, probe
ttgtggtcctgttaatatcatacac

SEQ ID NO: 85726 - DNA, 25 bp, probe
attgatcctcatctcctatggcttc

SEQ ID NO: 85727 - DNA, 25 bp, probe
gatcctcatctcctatggcttcata

SEQ ID NO: 85728 - DNA, 25 bp, probe
aatcatcacatccatgttgaactcc

SEQ ID NO: 85729 - DNA, 25 bp, probe
cattgatcctcatctcctatggctt

SEQ ID NO: 85730 - DNA, 25 bp, probe
ttatactacttggcttctcagatag

SEQ ID NO: 85731 - DNA, 25 bp, probe
ttctcactaatctctccatcttaga

SEQ ID NO: 85732 - DNA, 25 bp, probe
tataccacaactacagtccctcata

SEQ ID NO: 85733 - DNA, 25 bp, probe
ataccacaactacagtccctcatat

SEQ ID NO: 85734 - DNA, 25 bp, probe
tatatgtatcttcaaccaccttcat

SEQ ID NO: 85735 - DNA, 25 bp, probe
ttccagtgacattgatcctcatctc

SEQ ID NO: 85736 - DNA, 25 bp, probe
tggtcctgttaatatcatacacaat

SEQ ID NO: 85737 - DNA, 25 bp, probe
atactacttggcttctcagataggg

SEQ ID NO: 85738 - DNA, 25 bp, probe
ccattaacttctccatacctctctg

SEQ ID NO: 85739 - DNA, 25 bp, probe
agcaatctgtcaaccacttcattat

SEQ ID NO: 85740 - DNA, 25 bp, probe
attaacttctccatacctctctgtg

SEQ ID NO: 85741 - DNA, 25 bp, probe
cattaacttctccatacctctctgt

SEQ ID NO: 85742 - DNA, 25 bp, probe
gcaatctgtcaaccacttcattatg

SEQ ID NO: 85743 - DNA, 25 bp, probe
ctacattcgcatcttctctacagtg

SEQ ID NO: 85744 - DNA, 25 bp, probe
ctctcctacattcgcatcttctcta

SEQ ID NO: 85745 - DNA, 25 bp, probe
agagagtcattcaccaattcttctg

SEQ ID NO: 85746 - DNA, 25 bp, probe
tctcctacattcgcatcttctctac

SEQ ID NO: 85747 - DNA, 25 bp, probe
gagagtcattcaccaattcttctgt

SEQ ID NO: 85748 - DNA, 25 bp, probe
tcctacattcgcatcttctctacag

SEQ ID NO: 85749 - DNA, 25 bp, probe
ctcctacattcgcatcttctctaca

SEQ ID NO: 85750 - DNA, 25 bp, probe
gccattaacttctccatacctctct

SEQ ID NO: 85751 - DNA, 25 bp, probe
tgccattaacttctccatacctctc

SEQ ID NO: 85752 - DNA, 25 bp, probe
ctgccattaacttctccatacctct

SEQ ID NO: 85753 - DNA, 25 bp, probe
cctacattcgcatcttctctacagt

SEQ ID NO: 85754 - DNA, 25 bp, probe
atctgtcaaccacttcattatgaga

SEQ ID NO: 85755 - DNA, 25 bp, probe
caatctgtcaaccacttcattatga

SEQ ID NO: 85756 - DNA, 25 bp, probe
aatctgtcaaccacttcattatgag

SEQ ID NO: 85757 - DNA, 25 bp, probe
ctatactgtgatacctccaacactc

SEQ ID NO: 85758 - DNA, 25 bp, probe
tctatactgtgatacctccaacact

SEQ ID NO: 85759 - DNA, 25 bp, probe
tatactgtgatacctccaacactca

SEQ ID NO: 85760 - DNA, 25 bp, probe
ttctatactgtgatacctccaacac

SEQ ID NO: 85761 - DNA, 25 bp, probe
attctatactgtgatacctccaaca

SEQ ID NO: 85762 - DNA, 25 bp, probe
ccgtattctatactgtgatacctcc

SEQ ID NO: 85763 - DNA, 25 bp, probe
ctgtcaaccacttcattatgagact

SEQ ID NO: 85764 - DNA, 25 bp, probe
tctgtcaaccacttcattatgagac

SEQ ID NO: 85765 - DNA, 25 bp, probe
tgtcaaccacttcattatgagacta

SEQ ID NO: 85766 - DNA, 25 bp, probe
cgtattctatactgtgatacctcca

SEQ ID NO: 85767 - DNA, 25 bp, probe
agagtcattcaccaattcttctgtg

SEQ ID NO: 85768 - DNA, 25 bp, probe
tggaccttgtattctccgtattcta

SEQ ID NO: 85769 - DNA, 25 bp, probe
tactgtgatacctccaacactcaat

SEQ ID NO: 85770 - DNA, 25 bp, probe
atactgtgatacctccaacactcaa

SEQ ID NO: 85771 - DNA, 25 bp, probe
ggaccttgtattctccgtattctat

SEQ ID NO: 85772 - DNA, 25 bp, probe
tccgtattctatactgtgatacctc

SEQ ID NO: 85773 - DNA, 25 bp, probe
ctccgtattctatactgtgatacct

SEQ ID NO: 85774 - DNA, 25 bp, probe
tctccgtattctatactgtgatacc

SEQ ID NO: 85775 - DNA, 25 bp, probe
cagcaatctgtcaaccacttcatta

SEQ ID NO: 85776 - DNA, 25 bp, probe
ccaattcttctgtgatgttcctcag

SEQ ID NO: 85777 - DNA, 25 bp, probe
accaattcttctgtgatgttcctca

SEQ ID NO: 85778 - DNA, 25 bp, probe
gaccttgtattctccgtattctata

SEQ ID NO: 85779 - DNA, 25 bp, probe
tattctatactgtgatacctccaac

SEQ ID NO: 85780 - DNA, 25 bp, probe
atctccattgtgctctcctacattc

SEQ ID NO: 85781 - DNA, 25 bp, probe
catgctgccattaacttctccatac

SEQ ID NO: 85782 - DNA, 25 bp, probe
caccagacaagacaacatcatctct

SEQ ID NO: 85783 - DNA, 25 bp, probe
ctgtgctgatacctccagatatgag

SEQ ID NO: 85784 - DNA, 25 bp, probe
gcctcctatacacaaattctactca

SEQ ID NO: 85785 - DNA, 25 bp, probe
aaattctactcactgtgctccatat

SEQ ID NO: 85786 - DNA, 25 bp, probe
catctacagcctgaggaataaggag

SEQ ID NO: 85787 - DNA, 25 bp, probe
caaattctactcactgtgctccata

SEQ ID NO: 85788 - DNA, 25 bp, probe
tcatctacagcctgaggaataagga

SEQ ID NO: 85789 - DNA, 25 bp, probe
aattctactcactgtgctccatatg

SEQ ID NO: 85790 - DNA, 25 bp, probe
cctaagtgccctaatatataccgtg

SEQ ID NO: 85791 - DNA, 25 bp, probe
cctcctatacacaaattctactcac

SEQ ID NO: 85792 - DNA, 25 bp, probe
ctaagtgccctaatatataccgtgt

SEQ ID NO: 85793 - DNA, 25 bp, probe
tccctaagtgccctaatatataccg

SEQ ID NO: 85794 - DNA, 25 bp, probe
ccctaagtgccctaatatataccgt

SEQ ID NO: 85795 - DNA, 25 bp, probe
atccctaagtgccctaatatatacc

SEQ ID NO: 85796 - DNA, 25 bp, probe
atctacagcctgaggaataaggagg

SEQ ID NO: 85797 - DNA, 25 bp, probe
tcctatacacaaattctactcactg

SEQ ID NO: 85798 - DNA, 25 bp, probe
taagtgccctaatatataccgtgta

SEQ ID NO: 85799 - DNA, 25 bp, probe
cctgtgctgatacctccagatatga

SEQ ID NO: 85800 - DNA, 25 bp, probe
gattccctctcttgctgctatactg

SEQ ID NO: 85801 - DNA, 25 bp, probe
ctgattccctctcttgctgctatac

SEQ ID NO: 85802 - DNA, 25 bp, probe
ctcctatacacaaattctactcact

SEQ ID NO: 85803 - DNA, 25 bp, probe
cctatacacaaattctactcactgt

SEQ ID NO: 85804 - DNA, 25 bp, probe
catccctaagtgccctaatatatac

SEQ ID NO: 85805 - DNA, 25 bp, probe
gcaccagacaagacaacatcatctc

SEQ ID NO: 85806 - DNA, 25 bp, probe
tgattccctctcttgctgctatact

SEQ ID NO: 85807 - DNA, 25 bp, probe
attctactcactgtgctccatatgc

SEQ ID NO: 85808 - DNA, 25 bp, probe
ataccgtgtataccatgcactatcc

SEQ ID NO: 85809 - DNA, 25 bp, probe
aagtgccctaatatataccgtgtat

SEQ ID NO: 85810 - DNA, 25 bp, probe
cagcaccagacaagacaacatcatc

SEQ ID NO: 85811 - DNA, 25 bp, probe
acaaattctactcactgtgctccat

SEQ ID NO: 85812 - DNA, 25 bp, probe
ctcatggtatatgtgatgggtgtga

SEQ ID NO: 85813 - DNA, 25 bp, probe
cattcatgtatgtcttgcccagttc

SEQ ID NO: 85814 - DNA, 25 bp, probe
ctgaatccactcatctacagcctga

SEQ ID NO: 85815 - DNA, 25 bp, probe
tcatggtatatgtgatgggtgtgac

SEQ ID NO: 85816 - DNA, 25 bp, probe
ctgactgtggttgggatgttctatg

SEQ ID NO: 85817 - DNA, 25 bp, probe
tataccgtgtataccatgcactatc

SEQ ID NO: 85818 - DNA, 25 bp, probe
ctacagcctgaggaataaggaggtc

SEQ ID NO: 85819 - DNA, 25 bp, probe
agcaccagacaagacaacatcatct

SEQ ID NO: 85820 - DNA, 25 bp, probe
atataccgtgtataccatgcactat

SEQ ID NO: 85821 - DNA, 25 bp, probe
atatataccgtgtataccatgcact

SEQ ID NO: 85822 - DNA, 25 bp, probe
ctatggagctgccacattcatgtat

SEQ ID NO: 85823 - DNA, 25 bp, probe
tgtataccatgcactatcccttctg

SEQ ID NO: 85824 - DNA, 25 bp, probe
tgctatactggcctcctatacacaa

SEQ ID NO: 85825 - DNA, 25 bp, probe
cagacaagacaacatcatctctgtt

SEQ ID NO: 85826 - DNA, 25 bp, probe
ctcacacctctcatccttattctta

SEQ ID NO: 85827 - DNA, 25 bp, probe
tcacacctctcatccttattcttat

SEQ ID NO: 85828 - DNA, 25 bp, probe
cctcacacctctcatccttattctt

SEQ ID NO: 85829 - DNA, 25 bp, probe
agttgtcgccatcttctacttaatt

SEQ ID NO: 85830 - DNA, 25 bp, probe
gagttgtcgccatcttctacttaat

SEQ ID NO: 85831 - DNA, 25 bp, probe
tggatctcatcttactgtagtgtct

SEQ ID NO: 85832 - DNA, 25 bp, probe
gtggatctcatcttactgtagtgtc

SEQ ID NO: 85833 - DNA, 25 bp, probe
ctgtggatctcatcttactgtagtg

SEQ ID NO: 85834 - DNA, 25 bp, probe
tacctgtggatctcatcttactgta

SEQ ID NO: 85835 - DNA, 25 bp, probe
actgtagtgtctatgttctatggaa

SEQ ID NO: 85836 - DNA, 25 bp, probe
aatacctgtggatctcatcttactg

SEQ ID NO: 85837 - DNA, 25 bp, probe
atacctgtggatctcatcttactgt

SEQ ID NO: 85838 - DNA, 25 bp, probe
gaatacctgtggatctcatcttact

SEQ ID NO: 85839 - DNA, 25 bp, probe
tgtggatctcatcttactgtagtgt

SEQ ID NO: 85840 - DNA, 25 bp, probe
tataattgtcctcacacctctcatc

SEQ ID NO: 85841 - DNA, 25 bp, probe
ttcttatatcctatggctacattgc

SEQ ID NO: 85842 - DNA, 25 bp, probe
cctgtggatctcatcttactgtagt

SEQ ID NO: 85843 - DNA, 25 bp, probe
acctgtggatctcatcttactgtag

SEQ ID NO: 85844 - DNA, 25 bp, probe
tctcatcttactgtagtgtctatgt

SEQ ID NO: 85845 - DNA, 25 bp, probe
gtcctcacacctctcatccttattc

SEQ ID NO: 85846 - DNA, 25 bp, probe
tactgtagtgtctatgttctatgga

SEQ ID NO: 85847 - DNA, 25 bp, probe
tgaatacctgtggatctcatcttac

SEQ ID NO: 85848 - DNA, 25 bp, probe
ggatctcatcttactgtagtgtcta

SEQ ID NO: 85849 - DNA, 25 bp, probe
tcctcacacctctcatccttattct

SEQ ID NO: 85850 - DNA, 25 bp, probe
ttgtcgccatcttctacttaattac

SEQ ID NO: 85851 - DNA, 25 bp, probe
gttgtcgccatcttctacttaatta

SEQ ID NO: 85852 - DNA, 25 bp, probe
gtcgccatcttctacttaattacat

SEQ ID NO: 85853 - DNA, 25 bp, probe
cttctcctggctgttatgtcctatg

SEQ ID NO: 85854 - DNA, 25 bp, probe
tctcctggctgttatgtcctatgat

SEQ ID NO: 85855 - DNA, 25 bp, probe
tcatcttactgtagtgtctatgttc

SEQ ID NO: 85856 - DNA, 25 bp, probe
cacacctctcatccttattcttata

SEQ ID NO: 85857 - DNA, 25 bp, probe
ataattgtcctcacacctctcatcc

SEQ ID NO: 85858 - DNA, 25 bp, probe
tgtcgccatcttctacttaattaca

SEQ ID NO: 85859 - DNA, 25 bp, probe
catcttactgtagtgtctatgttct

SEQ ID NO: 85860 - DNA, 25 bp, probe
ctcatcttactgtagtgtctatgtt

SEQ ID NO: 85861 - DNA, 25 bp, probe
ttactgtagtgtctatgttctatgg

SEQ ID NO: 85862 - DNA, 25 bp, probe
cgccatcttctacttaattacattg

SEQ ID NO: 85863 - DNA, 25 bp, probe
ctcctggctgttatgtcctatgatc

SEQ ID NO: 85864 - DNA, 25 bp, probe
ttctcctggctgttatgtcctatga

SEQ ID NO: 85865 - DNA, 25 bp, probe
ttataattgtcctcacacctctcat

SEQ ID NO: 85866 - DNA, 25 bp, probe
ggagttgtcgccatcttctacttaa

SEQ ID NO: 85867 - DNA, 25 bp, probe
tcgccatcttctacttaattacatt

SEQ ID NO: 85868 - DNA, 25 bp, probe
aagcaatgaatacctgtggatctca

SEQ ID NO: 85869 - DNA, 25 bp, probe
ctggctgttatgtcctatgatcgtt

SEQ ID NO: 85870 - DNA, 25 bp, probe
tatgtgtgtgaagtggtgtatatgg

SEQ ID NO: 85871 - DNA, 25 bp, probe
ggtatgtgtgtgaagtggtgtatat

SEQ ID NO: 85872 - DNA, 25 bp, probe
gtatgtgtgtgaagtggtgtatatg

SEQ ID NO: 85873 - DNA, 25 bp, probe
actgaatgactgctaagaattaacc

SEQ ID NO: 85874 - DNA, 25 bp, probe
gaagtggtgtatatggaagcatctc

SEQ ID NO: 85875 - DNA, 25 bp, probe
gtgtgtgaagtggtgtatatggaag

SEQ ID NO: 85876 - DNA, 25 bp, probe
ctgaatgactgctaagaattaacct

SEQ ID NO: 85877 - DNA, 25 bp, probe
atgtgtgtgaagtggtgtatatgga

SEQ ID NO: 85878 - DNA, 25 bp, probe
tgaagtggtgtatatggaagcatct

SEQ ID NO: 85879 - DNA, 25 bp, probe
gtgaagtggtgtatatggaagcatc

SEQ ID NO: 85880 - DNA, 25 bp, probe
tatagttgtgaacattgcttgtgtg

SEQ ID NO: 85881 - DNA, 25 bp, probe
tgtgtgtgaagtggtgtatatggaa

SEQ ID NO: 85882 - DNA, 25 bp, probe
ttatagttgtgaacattgcttgtgt

SEQ ID NO: 85883 - DNA, 25 bp, probe
tgaatgactgctaagaattaacctt

SEQ ID NO: 85884 - DNA, 25 bp, probe
aagaccagttcatagttaatacagg

SEQ ID NO: 85885 - DNA, 25 bp, probe
tgtgaagtggtgtatatggaagcat

SEQ ID NO: 85886 - DNA, 25 bp, probe
cggtatgtgtgtgaagtggtgtata

SEQ ID NO: 85887 - DNA, 25 bp, probe
atagttgtgaacattgcttgtgtgt

SEQ ID NO: 85888 - DNA, 25 bp, probe
gtgtgaagtggtgtatatggaagca

SEQ ID NO: 85889 - DNA, 25 bp, probe
tgtgtgaagtggtgtatatggaagc

SEQ ID NO: 85890 - DNA, 25 bp, probe
agaccagttcatagttaatacaggt

SEQ ID NO: 85891 - DNA, 25 bp, probe
tagttgtgaacattgcttgtgtgtg

SEQ ID NO: 85892 - DNA, 25 bp, probe
gaccagttcatagttaatacaggtt

SEQ ID NO: 85893 - DNA, 25 bp, probe
tactgaatgactgctaagaattaac

SEQ ID NO: 85894 - DNA, 25 bp, probe
aagtggtgtatatggaagcatctcc

SEQ ID NO: 85895 - DNA, 25 bp, probe
ttaatacaggtttacagttcatgcc

SEQ ID NO: 85896 - DNA, 25 bp, probe
tttatagttgtgaacattgcttgtg

SEQ ID NO: 85897 - DNA, 25 bp, probe
gttaatacaggtttacagttcatgc

SEQ ID NO: 85898 - DNA, 25 bp, probe
gaatgactgctaagaattaacctta

SEQ ID NO: 85899 - DNA, 25 bp, probe
aagaattaaccttaagaccagttca

SEQ ID NO: 85900 - DNA, 25 bp, probe
tatatggaagcatctccctacactg

SEQ ID NO: 85901 - DNA, 25 bp, probe
gtatatggaagcatctccctacact

SEQ ID NO: 85902 - DNA, 25 bp, probe
taatacaggtttacagttcatgcct

SEQ ID NO: 85903 - DNA, 25 bp, probe
acggtatgtgtgtgaagtggtgtat

SEQ ID NO: 85904 - DNA, 25 bp, probe
gctaagaattaaccttaagaccagt

SEQ ID NO: 85905 - DNA, 25 bp, probe
tgctaagaattaaccttaagaccag

SEQ ID NO: 85906 - DNA, 25 bp, probe
ctgctaagaattaaccttaagacca

SEQ ID NO: 85907 - DNA, 25 bp, probe
actgctaagaattaaccttaagacc

SEQ ID NO: 85908 - DNA, 25 bp, probe
aaattaaagtctgaggacgagagca

SEQ ID NO: 85909 - DNA, 25 bp, probe
agaattaaccttaagaccagttcat

SEQ ID NO: 85910 - DNA, 25 bp, probe
atttatagttgtgaacattgcttgt

SEQ ID NO: 85911 - DNA, 25 bp, probe
ttaaccttaagaccagttcatagtt

SEQ ID NO: 85912 - DNA, 25 bp, probe
atactgaatgactgctaagaattaa

SEQ ID NO: 85913 - DNA, 25 bp, probe
aatactgaatgactgctaagaatta

SEQ ID NO: 85914 - DNA, 25 bp, probe
atcttggcttctgttactcatactc

SEQ ID NO: 85915 - DNA, 25 bp, probe
gatcttggcttctgttactcatact

SEQ ID NO: 85916 - DNA, 25 bp, probe
cttaatactggagactggctgagaa

SEQ ID NO: 85917 - DNA, 25 bp, probe
ctctaggaactcttcatcacaacta

SEQ ID NO: 85918 - DNA, 25 bp, probe
aggaactcttcatcacaactagatt

SEQ ID NO: 85919 - DNA, 25 bp, probe
ttaatactggagactggctgagaac

SEQ ID NO: 85920 - DNA, 25 bp, probe
aacttaatactggagactggctgag

SEQ ID NO: 85921 - DNA, 25 bp, probe
taggaactcttcatcacaactagat

SEQ ID NO: 85922 - DNA, 25 bp, probe
tcttggcttctgttactcatactcg

SEQ ID NO: 85923 - DNA, 25 bp, probe
aaggagagtggttgctgttaatatt

SEQ ID NO: 85924 - DNA, 25 bp, probe
atactggagactggctgagaactta

SEQ ID NO: 85925 - DNA, 25 bp, probe
taatactggagactggctgagaact

SEQ ID NO: 85926 - DNA, 25 bp, probe
acttaatactggagactggctgaga

SEQ ID NO: 85927 - DNA, 25 bp, probe
gctctaggaactcttcatcacaact

SEQ ID NO: 85928 - DNA, 25 bp, probe
ttgcctcttctaagtgtctatgagc

SEQ ID NO: 85929 - DNA, 25 bp, probe
aaaggagagtggttgctgttaatat

SEQ ID NO: 85930 - DNA, 25 bp, probe
ataaaggagagtggttgctgttaat

SEQ ID NO: 85931 - DNA, 25 bp, probe
cctcttctaagtgtctatgagcttg

SEQ ID NO: 85932 - DNA, 25 bp, probe
atttgcctcttctaagtgtctatga

SEQ ID NO: 85933 - DNA, 25 bp, probe
taaaggagagtggttgctgttaata

SEQ ID NO: 85934 - DNA, 25 bp, probe
ctaggaactcttcatcacaactaga

SEQ ID NO: 85935 - DNA, 25 bp, probe
tctaggaactcttcatcacaactag

SEQ ID NO: 85936 - DNA, 25 bp, probe
gatttgcctcttctaagtgtctatg

SEQ ID NO: 85937 - DNA, 25 bp, probe
cttggcttctgttactcatactcgg

SEQ ID NO: 85938 - DNA, 25 bp, probe
ttaataaattgggaatgggtttggg

SEQ ID NO: 85939 - DNA, 25 bp, probe
gataaaggagagtggttgctgttaa

SEQ ID NO: 85940 - DNA, 25 bp, probe
ttcaaacttaatactggagactggc

SEQ ID NO: 85941 - DNA, 25 bp, probe
ttgaagagtcccttaatatgtggtg

SEQ ID NO: 85942 - DNA, 25 bp, probe
tcttatctattgggtggtatgtgaa

SEQ ID NO: 85943 - DNA, 25 bp, probe
tttgaagagtcccttaatatgtggt

SEQ ID NO: 85944 - DNA, 25 bp, probe
ggaggctcttgcttacactaatcag

SEQ ID NO: 85945 - DNA, 25 bp, probe
ctcttctaagtgtctatgagcttgc

SEQ ID NO: 85946 - DNA, 25 bp, probe
atcttatctattgggtggtatgtga

SEQ ID NO: 85947 - DNA, 25 bp, probe
gaattgataaaggagagtggttgct

SEQ ID NO: 85948 - DNA, 25 bp, probe
aatactggagactggctgagaactt

SEQ ID NO: 85949 - DNA, 25 bp, probe
agatttgcctcttctaagtgtctat

SEQ ID NO: 85950 - DNA, 25 bp, probe
tttcaaacttaatactggagactgg

SEQ ID NO: 85951 - DNA, 25 bp, probe
aaacttaatactggagactggctga

SEQ ID NO: 85952 - DNA, 25 bp, probe
caaacttaatactggagactggctg

SEQ ID NO: 85953 - DNA, 25 bp, probe
tcaaacttaatactggagactggct

SEQ ID NO: 85954 - DNA, 25 bp, probe
aattgataaaggagagtggttgctg

SEQ ID NO: 85955 - DNA, 25 bp, probe
gggaattgataaaggagagtggttg

SEQ ID NO: 85956 - DNA, 25 bp, probe
tactggagactggctgagaacttac

SEQ ID NO: 85957 - DNA, 25 bp, probe
tgataaaggagagtggttgctgtta

SEQ ID NO: 85958 - DNA, 25 bp, probe
ttaattccaatgtaccaggtgaact

SEQ ID NO: 85959 - DNA, 25 bp, probe
ttactgtgaatgagtgaagatcctg

SEQ ID NO: 85960 - DNA, 25 bp, probe
gttactgtgaatgagtgaagatcct

SEQ ID NO: 85961 - DNA, 25 bp, probe
accgttactgtgaatgagtgaagat

SEQ ID NO: 85962 - DNA, 25 bp, probe
taattccaatgtaccaggtgaactg

SEQ ID NO: 85963 - DNA, 25 bp, probe
cgttactgtgaatgagtgaagatcc

SEQ ID NO: 85964 - DNA, 25 bp, probe
ccgttactgtgaatgagtgaagatc

SEQ ID NO: 85965 - DNA, 25 bp, probe
aaccgttactgtgaatgagtgaaga

SEQ ID NO: 85966 - DNA, 25 bp, probe
tactgtgaatgagtgaagatcctgg

SEQ ID NO: 85967 - DNA, 25 bp, probe
aaacatccaagcactttaattccaa

SEQ ID NO: 85968 - DNA, 25 bp, probe
aacatccaagcactttaattccaat

SEQ ID NO: 85969 - DNA, 25 bp, probe
catccaagcactttaattccaatgt

SEQ ID NO: 85970 - DNA, 25 bp, probe
acatccaagcactttaattccaatg

SEQ ID NO: 85971 - DNA, 25 bp, probe
ctgtgaatgagtgaagatcctggag

SEQ ID NO: 85972 - DNA, 25 bp, probe
atccaagcactttaattccaatgta

SEQ ID NO: 85973 - DNA, 25 bp, probe
aattccaatgtaccaggtgaactga

SEQ ID NO: 85974 - DNA, 25 bp, probe
actttaattccaatgtaccaggtga

SEQ ID NO: 85975 - DNA, 25 bp, probe
aagcactttaattccaatgtaccag

SEQ ID NO: 85976 - DNA, 25 bp, probe
caagcactttaattccaatgtacca

SEQ ID NO: 85977 - DNA, 25 bp, probe
tccaagcactttaattccaatgtac

SEQ ID NO: 85978 - DNA, 25 bp, probe
ccaagcactttaattccaatgtacc

SEQ ID NO: 85979 - DNA, 25 bp, probe
tttaattccaatgtaccaggtgaac

SEQ ID NO: 85980 - DNA, 25 bp, probe
ctttaattccaatgtaccaggtgaa

SEQ ID NO: 85981 - DNA, 25 bp, probe
agcactttaattccaatgtaccagg

SEQ ID NO: 85982 - DNA, 25 bp, probe
gccatgtgttaatgttacgatgttt

SEQ ID NO: 85983 - DNA, 25 bp, probe
gcactttaattccaatgtaccaggt

SEQ ID NO: 85984 - DNA, 25 bp, probe
attccaatgtaccaggtgaactgac

SEQ ID NO: 85985 - DNA, 25 bp, probe
ctagagctgattgagttcttcgagg

SEQ ID NO: 85986 - DNA, 25 bp, probe
cctagagctgattgagttcttcgag

SEQ ID NO: 85987 - DNA, 25 bp, probe
actgtgaatgagtgaagatcctgga

SEQ ID NO: 85988 - DNA, 25 bp, probe
gtcctagagctgattgagttcttcg

SEQ ID NO: 85989 - DNA, 25 bp, probe
cgtcctagagctgattgagttcttc

SEQ ID NO: 85990 - DNA, 25 bp, probe
cactttaattccaatgtaccaggtg

SEQ ID NO: 85991 - DNA, 25 bp, probe
tagagctgattgagttcttcgagga

SEQ ID NO: 85992 - DNA, 25 bp, probe
tcctagagctgattgagttcttcga

SEQ ID NO: 85993 - DNA, 25 bp, probe
tttcctttacaccaactgtcaatgc

SEQ ID NO: 85994 - DNA, 25 bp, probe
tgtgaatgagtgaagatcctggagg

SEQ ID NO: 85995 - DNA, 25 bp, probe
ggccatgtgttaatgttacgatgtt

SEQ ID NO: 85996 - DNA, 25 bp, probe
acgtcctagagctgattgagttctt

SEQ ID NO: 85997 - DNA, 25 bp, probe
aacgtcctagagctgattgagttct

SEQ ID NO: 85998 - DNA, 25 bp, probe
aaaacatccaagcactttaattcca

SEQ ID NO: 85999 - DNA, 25 bp, probe
ctcagaagttttcctttacaccaac

SEQ ID NO: 86000 - DNA, 25 bp, probe
tgaatgagtgaagatcctggaggac

SEQ ID NO: 86001 - DNA, 25 bp, probe
gtgaatgagtgaagatcctggagga

SEQ ID NO: 86002 - DNA, 25 bp, probe
tatctcctccttgtcaccaacataa

SEQ ID NO: 86003 - DNA, 25 bp, probe
ttatctcctccttgtcaccaacata

SEQ ID NO: 86004 - DNA, 25 bp, probe
cttatctcctccttgtcaccaacat

SEQ ID NO: 86005 - DNA, 25 bp, probe
tcctcgtaaacatatcagtagacct

SEQ ID NO: 86006 - DNA, 25 bp, probe
ggtcatcctcgtaaacatatcagta

SEQ ID NO: 86007 - DNA, 25 bp, probe
atcctcgtaaacatatcagtagacc

SEQ ID NO: 86008 - DNA, 25 bp, probe
atctcctccttgtcaccaacataac

SEQ ID NO: 86009 - DNA, 25 bp, probe
catcctcgtaaacatatcagtagac

SEQ ID NO: 86010 - DNA, 25 bp, probe
gtcatcctcgtaaacatatcagtag

SEQ ID NO: 86011 - DNA, 25 bp, probe
tcatcctcgtaaacatatcagtaga

SEQ ID NO: 86012 - DNA, 25 bp, probe
cttgtcaccaacataaccctttatc

SEQ ID NO: 86013 - DNA, 25 bp, probe
ctcgtaaacatatcagtagacctgg

SEQ ID NO: 86014 - DNA, 25 bp, probe
cctcgtaaacatatcagtagacctg

SEQ ID NO: 86015 - DNA, 25 bp, probe
cacagaatcctccaagatactttgc

SEQ ID NO: 86016 - DNA, 25 bp, probe
gcacagaatcctccaagatactttg

SEQ ID NO: 86017 - DNA, 25 bp, probe
ccttgtcaccaacataaccctttat

SEQ ID NO: 86018 - DNA, 25 bp, probe
ttgcacagaatcctccaagatactt

SEQ ID NO: 86019 - DNA, 25 bp, probe
gtaggtcatcctcgtaaacatatca

SEQ ID NO: 86020 - DNA, 25 bp, probe
ttgtcaccaacataaccctttatcg

SEQ ID NO: 86021 - DNA, 25 bp, probe
taggtcatcctcgtaaacatatcag

SEQ ID NO: 86022 - DNA, 25 bp, probe
cgtaggtcatcctcgtaaacatatc

SEQ ID NO: 86023 - DNA, 25 bp, probe
aggtcatcctcgtaaacatatcagt

SEQ ID NO: 86024 - DNA, 25 bp, probe
tcgtaaacatatcagtagacctggg

SEQ ID NO: 86025 - DNA, 25 bp, probe
tccttgtcaccaacataacccttta

SEQ ID NO: 86026 - DNA, 25 bp, probe
gttgcacagaatcctccaagatact

SEQ ID NO: 86027 - DNA, 25 bp, probe
ctgcttatctcctccttgtcaccaa

SEQ ID NO: 86028 - DNA, 25 bp, probe
gcgtaggtcatcctcgtaaacatat

SEQ ID NO: 86029 - DNA, 25 bp, probe
cagaatcctccaagatactttgcag

SEQ ID NO: 86030 - DNA, 25 bp, probe
tctcctccttgtcaccaacataacc

SEQ ID NO: 86031 - DNA, 25 bp, probe
atctagaagctgaagacgagagtga

SEQ ID NO: 86032 - DNA, 25 bp, probe
catctagaagctgaagacgagagtg

SEQ ID NO: 86033 - DNA, 25 bp, probe
tgcttatctcctccttgtcaccaac

SEQ ID NO: 86034 - DNA, 25 bp, probe
tgcacagaatcctccaagatacttt

SEQ ID NO: 86035 - DNA, 25 bp, probe
ctccttgtcaccaacataacccttt

SEQ ID NO: 86036 - DNA, 25 bp, probe
ggttgcacagaatcctccaagatac

SEQ ID NO: 86037 - DNA, 25 bp, probe
acagaatcctccaagatactttgca

SEQ ID NO: 86038 - DNA, 25 bp, probe
gcttatctcctccttgtcaccaaca

SEQ ID NO: 86039 - DNA, 25 bp, probe
ttttgattttgtgagagcgtaggtc

SEQ ID NO: 86040 - DNA, 25 bp, probe
tgtcaccaacataaccctttatcgc

SEQ ID NO: 86041 - DNA, 25 bp, probe
agcgtaggtcatcctcgtaaacata

SEQ ID NO: 86042 - DNA, 25 bp, probe
ctagaagctgaagacgagagtgacc

SEQ ID NO: 86043 - DNA, 25 bp, probe
gttttgattttgtgagagcgtaggt

SEQ ID NO: 86044 - DNA, 25 bp, probe
tctagaagctgaagacgagagtgac

SEQ ID NO: 86045 - DNA, 25 bp, probe
ccatctagaagctgaagacgagagt

SEQ ID NO: 86046 - DNA, 25 bp, probe
agtaaccaatatgtgcagtatacgt

SEQ ID NO: 86047 - DNA, 25 bp, probe
tcattgctttgtattgtagtaacca

SEQ ID NO: 86048 - DNA, 25 bp, probe
aatatgtgcagtatacgttgaatgt

SEQ ID NO: 86049 - DNA, 25 bp, probe
gtaaccaatatgtgcagtatacgtt

SEQ ID NO: 86050 - DNA, 25 bp, probe
ccaatatgtgcagtatacgttgaat

SEQ ID NO: 86051 - DNA, 25 bp, probe
accaatatgtgcagtatacgttgaa

SEQ ID NO: 86052 - DNA, 25 bp, probe
aaccaatatgtgcagtatacgttga

SEQ ID NO: 86053 - DNA, 25 bp, probe
taaccaatatgtgcagtatacgttg

SEQ ID NO: 86054 - DNA, 25 bp, probe
ctcattgctttgtattgtagtaacc

SEQ ID NO: 86055 - DNA, 25 bp, probe
tagtaaccaatatgtgcagtatacg

SEQ ID NO: 86056 - DNA, 25 bp, probe
caatatgtgcagtatacgttgaatg

SEQ ID NO: 86057 - DNA, 25 bp, probe
accttgtccttctccactgatactg

SEQ ID NO: 86058 - DNA, 25 bp, probe
caccttgtccttctccactgatact

SEQ ID NO: 86059 - DNA, 25 bp, probe
atatgtgcagtatacgttgaatgta

SEQ ID NO: 86060 - DNA, 25 bp, probe
ttgtagtaaccaatatgtgcagtat

SEQ ID NO: 86061 - DNA, 25 bp, probe
cattgctttgtattgtagtaaccaa

SEQ ID NO: 86062 - DNA, 25 bp, probe
tgtagtaaccaatatgtgcagtata

SEQ ID NO: 86063 - DNA, 25 bp, probe
tatgtgcagtatacgttgaatgtat

SEQ ID NO: 86064 - DNA, 25 bp, probe
actcattgctttgtattgtagtaac

SEQ ID NO: 86065 - DNA, 25 bp, probe
tactgtatgtatgggagagcagact

SEQ ID NO: 86066 - DNA, 25 bp, probe
gtagtaaccaatatgtgcagtatac

SEQ ID NO: 86067 - DNA, 25 bp, probe
atggtactgtatgtatgggagagca

SEQ ID NO: 86068 - DNA, 25 bp, probe
catggtactgtatgtatgggagagc

SEQ ID NO: 86069 - DNA, 25 bp, probe
gtactgtatgtatgggagagcagac

SEQ ID NO: 86070 - DNA, 25 bp, probe
attgtagtaaccaatatgtgcagta

SEQ ID NO: 86071 - DNA, 25 bp, probe
aactcattgctttgtattgtagtaa

SEQ ID NO: 86072 - DNA, 25 bp, probe
aaactcattgctttgtattgtagta

SEQ ID NO: 86073 - DNA, 25 bp, probe
gatgaaagccagtgagcctactaac

SEQ ID NO: 86074 - DNA, 25 bp, probe
agatgaaagccagtgagcctactaa

SEQ ID NO: 86075 - DNA, 25 bp, probe
tgtgcagtatacgttgaatgtatat

SEQ ID NO: 86076 - DNA, 25 bp, probe
atgtgcagtatacgttgaatgtata

SEQ ID NO: 86077 - DNA, 25 bp, probe
gtgcagtatacgttgaatgtatatg

SEQ ID NO: 86078 - DNA, 25 bp, probe
cctgatgtgtttacatggtactgta

SEQ ID NO: 86079 - DNA, 25 bp, probe
tgcagtatacgttgaatgtatatga

SEQ ID NO: 86080 - DNA, 25 bp, probe
ggtactgtatgtatgggagagcaga

SEQ ID NO: 86081 - DNA, 25 bp, probe
catactttcctatttctgttctttg

SEQ ID NO: 86082 - DNA, 25 bp, probe
tactttcctatttctgttctttgaa

SEQ ID NO: 86083 - DNA, 25 bp, probe
acatggtactgtatgtatgggagag

SEQ ID NO: 86084 - DNA, 25 bp, probe
gatgtgtttacatggtactgtatgt

SEQ ID NO: 86085 - DNA, 25 bp, probe
tgatgtgtttacatggtactgtatg

SEQ ID NO: 86086 - DNA, 25 bp, probe
ccttgtccttctccactgatactgg

SEQ ID NO: 86087 - DNA, 25 bp, probe
actgtatgtatgggagagcagactg

SEQ ID NO: 86088 - DNA, 25 bp, probe
atactttcctatttctgttctttga

SEQ ID NO: 86089 - DNA, 25 bp, probe
gcaccttgtccttctccactgatac

SEQ ID NO: 86090 - DNA, 25 bp, probe
acgtatgataaagctccagttgaaa

SEQ ID NO: 86091 - DNA, 25 bp, probe
gttggaatatacgttgcacatttac

SEQ ID NO: 86092 - DNA, 25 bp, probe
agtatggagtgatgactttggttcg

SEQ ID NO: 86093 - DNA, 25 bp, probe
gatgactttggttcgagtttgtgat

SEQ ID NO: 86094 - DNA, 25 bp, probe
atgactttggttcgagtttgtgatg

SEQ ID NO: 86095 - DNA, 25 bp, probe
ctgtggagatttcctgtgagaacat

SEQ ID NO: 86096 - DNA, 25 bp, probe
ccagaggaacttaagaagtatggag

SEQ ID NO: 86097 - DNA, 25 bp, probe
ttcgttggaatatacgttgcacatt

SEQ ID NO: 86098 - DNA, 25 bp, probe
aagaagtatggagtgatgactttgg

SEQ ID NO: 86099 - DNA, 25 bp, probe
ctttggttcgagtttgtgatgctac

SEQ ID NO: 86100 - DNA, 25 bp, probe
aagtatggagtgatgactttggttc

SEQ ID NO: 86101 - DNA, 25 bp, probe
gaagtatggagtgatgactttggtt

SEQ ID NO: 86102 - DNA, 25 bp, probe
gagtgatgactttggttcgagtttg

SEQ ID NO: 86103 - DNA, 25 bp, probe
tatggagtgatgactttggttcgag

SEQ ID NO: 86104 - DNA, 25 bp, probe
acttaagaagtatggagtgatgact

SEQ ID NO: 86105 - DNA, 25 bp, probe
ggaacttaagaagtatggagtgatg

SEQ ID NO: 86106 - DNA, 25 bp, probe
aggaacttaagaagtatggagtgat

SEQ ID NO: 86107 - DNA, 25 bp, probe
gtatggagtgatgactttggttcga

SEQ ID NO: 86108 - DNA, 25 bp, probe
agaagtatggagtgatgactttggt

SEQ ID NO: 86109 - DNA, 25 bp, probe
tacgtatgataaagctccagttgaa

SEQ ID NO: 86110 - DNA, 25 bp, probe
ctacgtatgataaagctccagttga

SEQ ID NO: 86111 - DNA, 25 bp, probe
aacttaagaagtatggagtgatgac

SEQ ID NO: 86112 - DNA, 25 bp, probe
catttacggcgattctgagtgtgag

SEQ ID NO: 86113 - DNA, 25 bp, probe
cgagtttgtgatgctacgtatgata

SEQ ID NO: 86114 - DNA, 25 bp, probe
taagaagtatggagtgatgactttg

SEQ ID NO: 86115 - DNA, 25 bp, probe
tgtggagatttcctgtgagaacatg

SEQ ID NO: 86116 - DNA, 25 bp, probe
gagtttgtgatgctacgtatgataa

SEQ ID NO: 86117 - DNA, 25 bp, probe
cttaagaagtatggagtgatgactt

SEQ ID NO: 86118 - DNA, 25 bp, probe
gaacttaagaagtatggagtgatga

SEQ ID NO: 86119 - DNA, 25 bp, probe
tgatgactttggttcgagtttgtga

SEQ ID NO: 86120 - DNA, 25 bp, probe
gtgatgactttggttcgagtttgtg

SEQ ID NO: 86121 - DNA, 25 bp, probe
agtgatgactttggttcgagtttgt

SEQ ID NO: 86122 - DNA, 25 bp, probe
agatttcctgtgagaacatgcgttt

SEQ ID NO: 86123 - DNA, 25 bp, probe
actttggttcgagtttgtgatgcta

SEQ ID NO: 86124 - DNA, 25 bp, probe
tcagatagtagatgattggttaaac

SEQ ID NO: 86125 - DNA, 25 bp, probe
agtttgtgatgctacgtatgataaa

SEQ ID NO: 86126 - DNA, 25 bp, probe
cgtatgataaagctccagttgaaaa

SEQ ID NO: 86127 - DNA, 25 bp, probe
gtttgtgatgctacgtatgataaag

SEQ ID NO: 86128 - DNA, 25 bp, probe
ttggaatatacgttgcacatttacg

SEQ ID NO: 86129 - DNA, 25 bp, probe
cgttggaatatacgttgcacattta

SEQ ID NO: 86130 - DNA, 25 bp, probe
tttcttgtaactcacaaccctacca

SEQ ID NO: 86131 - DNA, 25 bp, probe
ggagtgatgactttggttcgagttt

SEQ ID NO: 86132 - DNA, 25 bp, probe
ttaagaagtatggagtgatgacttt

SEQ ID NO: 86133 - DNA, 25 bp, probe
gagatttcctgtgagaacatgcgtt

SEQ ID NO: 86134 - DNA, 25 bp, probe
cctcttggttgtctctctcttctat

SEQ ID NO: 86135 - DNA, 25 bp, probe
ctcttggttgtctctctcttctata

SEQ ID NO: 86136 - DNA, 25 bp, probe
tgtcctcatcatcctggtcactata

SEQ ID NO: 86137 - DNA, 25 bp, probe
cattcaagacacaaccatctccttc

SEQ ID NO: 86138 - DNA, 25 bp, probe
atcattcaagacacaaccatctcct

SEQ ID NO: 86139 - DNA, 25 bp, probe
tcattcaagacacaaccatctcctt

SEQ ID NO: 86140 - DNA, 25 bp, probe
ccatcatctacagctcaaggaataa

SEQ ID NO: 86141 - DNA, 25 bp, probe
gatcattcaagacacaaccatctcc

SEQ ID NO: 86142 - DNA, 25 bp, probe
atgtcctcatcatcctggtcactat

SEQ ID NO: 86143 - DNA, 25 bp, probe
gttgtctctctcttctatagcactg

SEQ ID NO: 86144 - DNA, 25 bp, probe
cttggttgtctctctcttctatagc

SEQ ID NO: 86145 - DNA, 25 bp, probe
ttggttgtctctctcttctatagca

SEQ ID NO: 86146 - DNA, 25 bp, probe
attcattctctttcctttcttgctg

SEQ ID NO: 86147 - DNA, 25 bp, probe
cattcattctctttcctttcttgct

SEQ ID NO: 86148 - DNA, 25 bp, probe
cccattcattctctttcctttcttg

SEQ ID NO: 86149 - DNA, 25 bp, probe
tcccattcattctctttcctttctt

SEQ ID NO: 86150 - DNA, 25 bp, probe
ccattcattctctttcctttcttgc

SEQ ID NO: 86151 - DNA, 25 bp, probe
aatgtcctcatcatcctggtcacta

SEQ ID NO: 86152 - DNA, 25 bp, probe
ggttgtctctctcttctatagcact

SEQ ID NO: 86153 - DNA, 25 bp, probe
gtcccattcattctctttcctttct

SEQ ID NO: 86154 - DNA, 25 bp, probe
tcttggttgtctctctcttctatag

SEQ ID NO: 86155 - DNA, 25 bp, probe
attcaagacacaaccatctccttcc

SEQ ID NO: 86156 - DNA, 25 bp, probe
tgtcccattcattctctttcctttc

SEQ ID NO: 86157 - DNA, 25 bp, probe
ctgtcccattcattctctttccttt

SEQ ID NO: 86158 - DNA, 25 bp, probe
ggagataggtttcaacttggtcatt

SEQ ID NO: 86159 - DNA, 25 bp, probe
tggttgtctctctcttctatagcac

SEQ ID NO: 86160 - DNA, 25 bp, probe
ttactttaatgggcaatgtcctcat

SEQ ID NO: 86161 - DNA, 25 bp, probe
gccactcagatgtatttcttcttct

SEQ ID NO: 86162 - DNA, 25 bp, probe
gtcctcatcatcctggtcactatag

SEQ ID NO: 86163 - DNA, 25 bp, probe
atttacttggttactttaatgggca

SEQ ID NO: 86164 - DNA, 25 bp, probe
tactttaatgggcaatgtcctcatc

SEQ ID NO: 86165 - DNA, 25 bp, probe
gagataggtttcaacttggtcattg

SEQ ID NO: 86166 - DNA, 25 bp, probe
gataggtttcaacttggtcattgtg

SEQ ID NO: 86167 - DNA, 25 bp, probe
agataggtttcaacttggtcattgt

SEQ ID NO: 86168 - DNA, 25 bp, probe
ttgtctctctcttctatagcactgc

SEQ ID NO: 86169 - DNA, 25 bp, probe
tgccactcagatgtatttcttcttc

SEQ ID NO: 86170 - DNA, 25 bp, probe
tacttggttactttaatgggcaatg

SEQ ID NO: 86171 - DNA, 25 bp, probe
gttactttaatgggcaatgtcctca

SEQ ID NO: 86172 - DNA, 25 bp, probe
cttggttactttaatgggcaatgtc

SEQ ID NO: 86173 - DNA, 25 bp, probe
tcattctctttcctttcttgctgat

SEQ ID NO: 86174 - DNA, 25 bp, probe
cattctctttcctttcttgctgatc

SEQ ID NO: 86175 - DNA, 25 bp, probe
tttacttggttactttaatgggcaa

SEQ ID NO: 86176 - DNA, 25 bp, probe
ttcattctctttcctttcttgctga

SEQ ID NO: 86177 - DNA, 25 bp, probe
ctcaaggaataaagaagtgaaggct

SEQ ID NO: 86178 - DNA, 25 bp, probe
cacagggattggaacatgatttata

SEQ ID NO: 86179 - DNA, 25 bp, probe
cagggattggaacatgatttatagt

SEQ ID NO: 86180 - DNA, 25 bp, probe
acagggattggaacatgatttatag

SEQ ID NO: 86181 - DNA, 25 bp, probe
gcacagggattggaacatgatttat

SEQ ID NO: 86182 - DNA, 25 bp, probe
agggattggaacatgatttatagtt

SEQ ID NO: 86183 - DNA, 25 bp, probe
atgcttccatttgtaatcaagttat

SEQ ID NO: 86184 - DNA, 25 bp, probe
ataataagtcacagccaaatgcttc

SEQ ID NO: 86185 - DNA, 25 bp, probe
cataataagtcacagccaaatgctt

SEQ ID NO: 86186 - DNA, 25 bp, probe
atacataattataaccgagggctgg

SEQ ID NO: 86187 - DNA, 25 bp, probe
tgcttccatttgtaatcaagttata

SEQ ID NO: 86188 - DNA, 25 bp, probe
taataagtcacagccaaatgcttcc

SEQ ID NO: 86189 - DNA, 25 bp, probe
gcttccatttgtaatcaagttatac

SEQ ID NO: 86190 - DNA, 25 bp, probe
aaagcctaatatgcagaaatgaatt

SEQ ID NO: 86191 - DNA, 25 bp, probe
tgcacagggattggaacatgattta

SEQ ID NO: 86192 - DNA, 25 bp, probe
aatgcttccatttgtaatcaagtta

SEQ ID NO: 86193 - DNA, 25 bp, probe
gggattggaacatgatttatagtta

SEQ ID NO: 86194 - DNA, 25 bp, probe
tacataattataaccgagggctggc

SEQ ID NO: 86195 - DNA, 25 bp, probe
tatacataattataaccgagggctg

SEQ ID NO: 86196 - DNA, 25 bp, probe
atttgcacagggattggaacatgat

SEQ ID NO: 86197 - DNA, 25 bp, probe
agcctaatatgcagaaatgaattaa

SEQ ID NO: 86198 - DNA, 25 bp, probe
aagcctaatatgcagaaatgaatta

SEQ ID NO: 86199 - DNA, 25 bp, probe
catgcataataagtcacagccaaat

SEQ ID NO: 86200 - DNA, 25 bp, probe
ttgcacagggattggaacatgattt

SEQ ID NO: 86201 - DNA, 25 bp, probe
tttgcacagggattggaacatgatt

SEQ ID NO: 86202 - DNA, 25 bp, probe
aatttgcacagggattggaacatga

SEQ ID NO: 86203 - DNA, 25 bp, probe
ataagtcacagccaaatgcttccat

SEQ ID NO: 86204 - DNA, 25 bp, probe
gcctaatatgcagaaatgaattaag

SEQ ID NO: 86205 - DNA, 25 bp, probe
atgcataataagtcacagccaaatg

SEQ ID NO: 86206 - DNA, 25 bp, probe
taagtcacagccaaatgcttccatt

SEQ ID NO: 86207 - DNA, 25 bp, probe
aataagtcacagccaaatgcttcca

SEQ ID NO: 86208 - DNA, 25 bp, probe
cacaataaacagaaaactttgctta

SEQ ID NO: 86209 - DNA, 25 bp, probe
cttgcacaataaacagaaaactttg

SEQ ID NO: 86210 - DNA, 25 bp, probe
tcttgcacaataaacagaaaacttt

SEQ ID NO: 86211 - DNA, 25 bp, probe
taattataaccgagggctggcgttt

SEQ ID NO: 86212 - DNA, 25 bp, probe
gcacaataaacagaaaactttgctt

SEQ ID NO: 86213 - DNA, 25 bp, probe
aaaagcctaatatgcagaaatgaat

SEQ ID NO: 86214 - DNA, 25 bp, probe
ttatacataattataaccgagggct

SEQ ID NO: 86215 - DNA, 25 bp, probe
caatttgcacagggattggaacatg

SEQ ID NO: 86216 - DNA, 25 bp, probe
gttaaaagcctaatatgcagaaatg

SEQ ID NO: 86217 - DNA, 25 bp, probe
acaataaacagaaaactttgcttat

SEQ ID NO: 86218 - DNA, 25 bp, probe
ggaacatgatttatagttaaaagcc

SEQ ID NO: 86219 - DNA, 25 bp, probe
taaaagcctaatatgcagaaatgaa

SEQ ID NO: 86220 - DNA, 25 bp, probe
ttaaaagcctaatatgcagaaatga

SEQ ID NO: 86221 - DNA, 25 bp, probe
agttaaaagcctaatatgcagaaat

SEQ ID NO: 86222 - DNA, 25 bp, probe
tcagttattagtctgtgaagtgctt

SEQ ID NO: 86223 - DNA, 25 bp, probe
acagatacactacagtagaagaact

SEQ ID NO: 86224 - DNA, 25 bp, probe
aacagatacactacagtagaagaac

SEQ ID NO: 86225 - DNA, 25 bp, probe
atatacttccgtctcgatgctgtta

SEQ ID NO: 86226 - DNA, 25 bp, probe
tatacttccgtctcgatgctgttaa

SEQ ID NO: 86227 - DNA, 25 bp, probe
gctaaaggctatgcgatatgaattt

SEQ ID NO: 86228 - DNA, 25 bp, probe
cattcagattctcgtgtaacacttg

SEQ ID NO: 86229 - DNA, 25 bp, probe
attcagattctcgtgtaacacttgt

SEQ ID NO: 86230 - DNA, 25 bp, probe
ataaagtgatgttctggtggaggta

SEQ ID NO: 86231 - DNA, 25 bp, probe
ttcagattctcgtgtaacacttgtt

SEQ ID NO: 86232 - DNA, 25 bp, probe
cagatacactacagtagaagaactt

SEQ ID NO: 86233 - DNA, 25 bp, probe
ggctaaaggctatgcgatatgaatt

SEQ ID NO: 86234 - DNA, 25 bp, probe
caataaagtgatgttctggtggagg

SEQ ID NO: 86235 - DNA, 25 bp, probe
tcagattctcgtgtaacacttgttg

SEQ ID NO: 86236 - DNA, 25 bp, probe
gtaacagatacactacagtagaaga

SEQ ID NO: 86237 - DNA, 25 bp, probe
taaagtgatgttctggtggaggtag

SEQ ID NO: 86238 - DNA, 25 bp, probe
aataaagtgatgttctggtggaggt

SEQ ID NO: 86239 - DNA, 25 bp, probe
gcattcagattctcgtgtaacactt

SEQ ID NO: 86240 - DNA, 25 bp, probe
ctaaaggctatgcgatatgaatttc

SEQ ID NO: 86241 - DNA, 25 bp, probe
aggctaaaggctatgcgatatgaat

SEQ ID NO: 86242 - DNA, 25 bp, probe
gttattagtctgtgaagtgctttac

SEQ ID NO: 86243 - DNA, 25 bp, probe
ggctatgcgatatgaatttcagaaa

SEQ ID NO: 86244 - DNA, 25 bp, probe
aaaggctatgcgatatgaatttcag

SEQ ID NO: 86245 - DNA, 25 bp, probe
acaataaagtgatgttctggtggag

SEQ ID NO: 86246 - DNA, 25 bp, probe
ttcatatacttccgtctcgatgctg

SEQ ID NO: 86247 - DNA, 25 bp, probe
aggctatgcgatatgaatttcagaa

SEQ ID NO: 86248 - DNA, 25 bp, probe
aaggctatgcgatatgaatttcaga

SEQ ID NO: 86249 - DNA, 25 bp, probe
agttattagtctgtgaagtgcttta

SEQ ID NO: 86250 - DNA, 25 bp, probe
gattagccatctttcaaattcactt

SEQ ID NO: 86251 - DNA, 25 bp, probe
cagttattagtctgtgaagtgcttt

SEQ ID NO: 86252 - DNA, 25 bp, probe
ttcagttattagtctgtgaagtgct

SEQ ID NO: 86253 - DNA, 25 bp, probe
gttcagttattagtctgtgaagtgc

SEQ ID NO: 86254 - DNA, 25 bp, probe
gattctcgtgtaacacttgttgctt

SEQ ID NO: 86255 - DNA, 25 bp, probe
gatgttctggtggaggtagactgaa

SEQ ID NO: 86256 - DNA, 25 bp, probe
aaggctaaaggctatgcgatatgaa

SEQ ID NO: 86257 - DNA, 25 bp, probe
aaaggctaaaggctatgcgatatga

SEQ ID NO: 86258 - DNA, 25 bp, probe
atggagagctatgtaacagatacac

SEQ ID NO: 86259 - DNA, 25 bp, probe
catatacttccgtctcgatgctgtt

SEQ ID NO: 86260 - DNA, 25 bp, probe
tggagagctatgtaacagatacact

SEQ ID NO: 86261 - DNA, 25 bp, probe
attctcgtgtaacacttgttgcttg

SEQ ID NO: 86262 - DNA, 25 bp, probe
ctcttctgtgatagctgtagtttct

SEQ ID NO: 86263 - DNA, 25 bp, probe
gtactgactgtgtaagctaaattgc

SEQ ID NO: 86264 - DNA, 25 bp, probe
taaaggctatgcgatatgaatttca

SEQ ID NO: 86265 - DNA, 25 bp, probe
attagccatctttcaaattcacttt

SEQ ID NO: 86266 - DNA, 25 bp, probe
caatctgtgaagcctttatctatgg

SEQ ID NO: 86267 - DNA, 25 bp, probe
tcaatctgtgaagcctttatctatg

SEQ ID NO: 86268 - DNA, 25 bp, probe
tgttcaatctgtgaagcctttatct

SEQ ID NO: 86269 - DNA, 25 bp, probe
gtgttcaatctgtgaagcctttatc

SEQ ID NO: 86270 - DNA, 25 bp, probe
tgtgttcaatctgtgaagcctttat

SEQ ID NO: 86271 - DNA, 25 bp, probe
aagaaaacttgtgttcaatctgtga

SEQ ID NO: 86272 - DNA, 25 bp, probe
gttcaatctgtgaagcctttatcta

SEQ ID NO: 86273 - DNA, 25 bp, probe
ttgtgttcaatctgtgaagccttta

SEQ ID NO: 86274 - DNA, 25 bp, probe
acttgtgttcaatctgtgaagcctt

SEQ ID NO: 86275 - DNA, 25 bp, probe
aacttgtgttcaatctgtgaagcct

SEQ ID NO: 86276 - DNA, 25 bp, probe
aaagaaaacttgtgttcaatctgtg

SEQ ID NO: 86277 - DNA, 25 bp, probe
aaaagaaaacttgtgttcaatctgt

SEQ ID NO: 86278 - DNA, 25 bp, probe
ttcaatctgtgaagcctttatctat

SEQ ID NO: 86279 - DNA, 25 bp, probe
cttgtgttcaatctgtgaagccttt

SEQ ID NO: 86280 - DNA, 25 bp, probe
aaacttgtgttcaatctgtgaagcc

SEQ ID NO: 86281 - DNA, 25 bp, probe
agaaaacttgtgttcaatctgtgaa

SEQ ID NO: 86282 - DNA, 25 bp, probe
gaaaacttgtgttcaatctgtgaag

SEQ ID NO: 86283 - DNA, 25 bp, probe
aaaacttgtgttcaatctgtgaagc

SEQ ID NO: 86284 - DNA, 25 bp, probe
tgcctggattctacatacaagtata

SEQ ID NO: 86285 - DNA, 25 bp, probe
ttgcctggattctacatacaagtat

SEQ ID NO: 86286 - DNA, 25 bp, probe
gcctggattctacatacaagtatat

SEQ ID NO: 86287 - DNA, 25 bp, probe
ccttgctggctaatataaatgcttt

SEQ ID NO: 86288 - DNA, 25 bp, probe
tttatgctcacacaacagtttcaac

SEQ ID NO: 86289 - DNA, 25 bp, probe
accttgctggctaatataaatgctt

SEQ ID NO: 86290 - DNA, 25 bp, probe
caccttgctggctaatataaatgct

SEQ ID NO: 86291 - DNA, 25 bp, probe
tatgctcacacaacagtttcaacaa

SEQ ID NO: 86292 - DNA, 25 bp, probe
ttatgctcacacaacagtttcaaca

SEQ ID NO: 86293 - DNA, 25 bp, probe
ttgacaactgccatgaactctactc

SEQ ID NO: 86294 - DNA, 25 bp, probe
taactctttgaggattgatctgtca

SEQ ID NO: 86295 - DNA, 25 bp, probe
atgctcacacaacagtttcaacaaa

SEQ ID NO: 86296 - DNA, 25 bp, probe
cataactctttgaggattgatctgt

SEQ ID NO: 86297 - DNA, 25 bp, probe
acataactctttgaggattgatctg

SEQ ID NO: 86298 - DNA, 25 bp, probe
ataactctttgaggattgatctgtc

SEQ ID NO: 86299 - DNA, 25 bp, probe
catttatcaagctatgacgcacttt

SEQ ID NO: 86300 - DNA, 25 bp, probe
gaatccatttatcaagctatgacgc

SEQ ID NO: 86301 - DNA, 25 bp, probe
tgaatccatttatcaagctatgacg

SEQ ID NO: 86302 - DNA, 25 bp, probe
aatccatttatcaagctatgacgca

SEQ ID NO: 86303 - DNA, 25 bp, probe
tttgacaactgccatgaactctact

SEQ ID NO: 86304 - DNA, 25 bp, probe
cttgcctggattctacatacaagta

SEQ ID NO: 86305 - DNA, 25 bp, probe
atccatttatcaagctatgacgcac

SEQ ID NO: 86306 - DNA, 25 bp, probe
acacaacagtttcaacaaacataca

SEQ ID NO: 86307 - DNA, 25 bp, probe
acagtttcaacaaacatacaggttt

SEQ ID NO: 86308 - DNA, 25 bp, probe
aacagtttcaacaaacatacaggtt

SEQ ID NO: 86309 - DNA, 25 bp, probe
cacacaacagtttcaacaaacatac

SEQ ID NO: 86310 - DNA, 25 bp, probe
tcacacaacagtttcaacaaacata

SEQ ID NO: 86311 - DNA, 25 bp, probe
caacagtttcaacaaacatacaggt

SEQ ID NO: 86312 - DNA, 25 bp, probe
acaacagtttcaacaaacatacagg

SEQ ID NO: 86313 - DNA, 25 bp, probe
cacaacagtttcaacaaacatacag

SEQ ID NO: 86314 - DNA, 25 bp, probe
gaaagactgcaagacctgaaatcaa

SEQ ID NO: 86315 - DNA, 25 bp, probe
tttcaacaaacatacaggtttctgc

SEQ ID NO: 86316 - DNA, 25 bp, probe
gtttcaacaaacatacaggtttctg

SEQ ID NO: 86317 - DNA, 25 bp, probe
agtttcaacaaacatacaggtttct

SEQ ID NO: 86318 - DNA, 25 bp, probe
cagtttcaacaaacatacaggtttc

SEQ ID NO: 86319 - DNA, 25 bp, probe
ccatttatcaagctatgacgcactt

SEQ ID NO: 86320 - DNA, 25 bp, probe
caatactgaaagactgcaagacctg

SEQ ID NO: 86321 - DNA, 25 bp, probe
aaactttcctgcaagcaatactgaa

SEQ ID NO: 86322 - DNA, 25 bp, probe
ctcacacaacagtttcaacaaacat

SEQ ID NO: 86323 - DNA, 25 bp, probe
aaagactgcaagacctgaaatcaac

SEQ ID NO: 86324 - DNA, 25 bp, probe
atactgaaagactgcaagacctgaa

SEQ ID NO: 86325 - DNA, 25 bp, probe
aatactgaaagactgcaagacctga

SEQ ID NO: 86326 - DNA, 25 bp, probe
ttttatgctcacacaacagtttcaa

SEQ ID NO: 86327 - DNA, 25 bp, probe
cctggattctacatacaagtatatt

SEQ ID NO: 86328 - DNA, 25 bp, probe
gcttatgagaatgaatgaactgtgt

SEQ ID NO: 86329 - DNA, 25 bp, probe
tgcttatgagaatgaatgaactgtg

SEQ ID NO: 86330 - DNA, 25 bp, probe
ctgcttatgagaatgaatgaactgt

SEQ ID NO: 86331 - DNA, 25 bp, probe
tgagaatgaatgaactgtgtctgta

SEQ ID NO: 86332 - DNA, 25 bp, probe
ggtctgcttatgagaatgaatgaac

SEQ ID NO: 86333 - DNA, 25 bp, probe
atgagaatgaatgaactgtgtctgt

SEQ ID NO: 86334 - DNA, 25 bp, probe
cggactcctaattcaatgctctatt

SEQ ID NO: 86335 - DNA, 25 bp, probe
tctgcttatgagaatgaatgaactg

SEQ ID NO: 86336 - DNA, 25 bp, probe
gtctgcttatgagaatgaatgaact

SEQ ID NO: 86337 - DNA, 25 bp, probe
cattaaggctctacaacttggacaa

SEQ ID NO: 86338 - DNA, 25 bp, probe
gagaatgaatgaactgtgtctgtaa

SEQ ID NO: 86339 - DNA, 25 bp, probe
ctcattaaggctctacaacttggac

SEQ ID NO: 86340 - DNA, 25 bp, probe
tatgagaatgaatgaactgtgtctg

SEQ ID NO: 86341 - DNA, 25 bp, probe
gccttgtatcaatagtgtcattcca

SEQ ID NO: 86342 - DNA, 25 bp, probe
atagaaggaatgaggcagaactgaa

SEQ ID NO: 86343 - DNA, 25 bp, probe
acggactcctaattcaatgctctat

SEQ ID NO: 86344 - DNA, 25 bp, probe
tcattaaggctctacaacttggaca

SEQ ID NO: 86345 - DNA, 25 bp, probe
ccttgtatcaatagtgtcattccat

SEQ ID NO: 86346 - DNA, 25 bp, probe
cttatgagaatgaatgaactgtgtc

SEQ ID NO: 86347 - DNA, 25 bp, probe
atcacatagaaggaatgaggcagaa

SEQ ID NO: 86348 - DNA, 25 bp, probe
ttatgagaatgaatgaactgtgtct

SEQ ID NO: 86349 - DNA, 25 bp, probe
gacggactcctaattcaatgctcta

SEQ ID NO: 86350 - DNA, 25 bp, probe
tgctctattatgttatcagtgttca

SEQ ID NO: 86351 - DNA, 25 bp, probe
tagaaggaatgaggcagaactgaag

SEQ ID NO: 86352 - DNA, 25 bp, probe
aatagtcctgtgaggtagagatgaa

SEQ ID NO: 86353 - DNA, 25 bp, probe
taatagtcctgtgaggtagagatga

SEQ ID NO: 86354 - DNA, 25 bp, probe
atagtcctgtgaggtagagatgaag

SEQ ID NO: 86355 - DNA, 25 bp, probe
catagaaggaatgaggcagaactga

SEQ ID NO: 86356 - DNA, 25 bp, probe
cacatagaaggaatgaggcagaact

SEQ ID NO: 86357 - DNA, 25 bp, probe
ctgtgaggtagagatgaagtcagtt

SEQ ID NO: 86358 - DNA, 25 bp, probe
ggactcctaattcaatgctctatta

SEQ ID NO: 86359 - DNA, 25 bp, probe
gctctattatgttatcagtgttcac

SEQ ID NO: 86360 - DNA, 25 bp, probe
acatagaaggaatgaggcagaactg

SEQ ID NO: 86361 - DNA, 25 bp, probe
ataatagtcctgtgaggtagagatg

SEQ ID NO: 86362 - DNA, 25 bp, probe
tgtatcaatagtgtcattccatgtt

SEQ ID NO: 86363 - DNA, 25 bp, probe
gctcattaaggctctacaacttgga

SEQ ID NO: 86364 - DNA, 25 bp, probe
tcacatagaaggaatgaggcagaac

SEQ ID NO: 86365 - DNA, 25 bp, probe
ttgtatcaatagtgtcattccatgt

SEQ ID NO: 86366 - DNA, 25 bp, probe
tgctttctgttcatttggtatttgt

SEQ ID NO: 86367 - DNA, 25 bp, probe
gatcacatagaaggaatgaggcaga

SEQ ID NO: 86368 - DNA, 25 bp, probe
agatcacatagaaggaatgaggcag

SEQ ID NO: 86369 - DNA, 25 bp, probe
tagtcctgtgaggtagagatgaagt

SEQ ID NO: 86370 - DNA, 25 bp, probe
ctttctgttcatttggtatttgtgc

SEQ ID NO: 86371 - DNA, 25 bp, probe
gctttctgttcatttggtatttgtg

SEQ ID NO: 86372 - DNA, 25 bp, probe
tttgaaataaagctctgtgtgcctg

SEQ ID NO: 86373 - DNA, 25 bp, probe
ttttgaaataaagctctgtgtgcct

SEQ ID NO: 86374 - DNA, 25 bp, probe
ttgaaataaagctctgtgtgcctgg

SEQ ID NO: 86375 - DNA, 25 bp, probe
cttctgaactccatacagcctctac

SEQ ID NO: 86376 - DNA, 25 bp, probe
ttctgaactccatacagcctctaca

SEQ ID NO: 86377 - DNA, 25 bp, probe
tctgaactccatacagcctctacag

SEQ ID NO: 86378 - DNA, 25 bp, probe
ccttctgaactccatacagcctcta

SEQ ID NO: 86379 - DNA, 25 bp, probe
ctgaactccatacagcctctacagc

SEQ ID NO: 86380 - DNA, 25 bp, probe
gttcctggccttctgaactccatac

SEQ ID NO: 86381 - DNA, 25 bp, probe
cagagagagagagagagagagagag

SEQ ID NO: 86382 - DNA, 25 bp, probe
gagagagagagagagagagagagtg

SEQ ID NO: 86383 - DNA, 25 bp, probe
agagagagagagagagagagagagt

SEQ ID NO: 86384 - DNA, 25 bp, probe
gcagagagagagagagagagagaga

SEQ ID NO: 86385 - DNA, 25 bp, probe
ttaattaccgtgagtgacatagcct

SEQ ID NO: 86386 - DNA, 25 bp, probe
gaatccaaatctgtcctctgtagta

SEQ ID NO: 86387 - DNA, 25 bp, probe
gaactgggcgaatgtcttatttaat

SEQ ID NO: 86388 - DNA, 25 bp, probe
ttgaactgggcgaatgtcttattta

SEQ ID NO: 86389 - DNA, 25 bp, probe
tgaactgggcgaatgtcttatttaa

SEQ ID NO: 86390 - DNA, 25 bp, probe
atccaaatctgtcctctgtagtatt

SEQ ID NO: 86391 - DNA, 25 bp, probe
aatccaaatctgtcctctgtagtat

SEQ ID NO: 86392 - DNA, 25 bp, probe
tgaatccaaatctgtcctctgtagt

SEQ ID NO: 86393 - DNA, 25 bp, probe
aactgggcgaatgtcttatttaatt

SEQ ID NO: 86394 - DNA, 25 bp, probe
tttacgctcatcacctaaacttgta

SEQ ID NO: 86395 - DNA, 25 bp, probe
ttgaatccaaatctgtcctctgtag

SEQ ID NO: 86396 - DNA, 25 bp, probe
taattaccgtgagtgacatagcctc

SEQ ID NO: 86397 - DNA, 25 bp, probe
gtttctgtatatgattctctgtggt

SEQ ID NO: 86398 - DNA, 25 bp, probe
tgtttctgtatatgattctctgtgg

SEQ ID NO: 86399 - DNA, 25 bp, probe
cttgaactgggcgaatgtcttattt

SEQ ID NO: 86400 - DNA, 25 bp, probe
ctttacgctcatcacctaaacttgt

SEQ ID NO: 86401 - DNA, 25 bp, probe
ttacgctcatcacctaaacttgtac

SEQ ID NO: 86402 - DNA, 25 bp, probe
ggcgaatgtcttatttaattaccgt

SEQ ID NO: 86403 - DNA, 25 bp, probe
gggcgaatgtcttatttaattaccg

SEQ ID NO: 86404 - DNA, 25 bp, probe
cgctcatcacctaaacttgtacttt

SEQ ID NO: 86405 - DNA, 25 bp, probe
tccaaatctgtcctctgtagtattt

SEQ ID NO: 86406 - DNA, 25 bp, probe
tgggcgaatgtcttatttaattacc

SEQ ID NO: 86407 - DNA, 25 bp, probe
atttaattaccgtgagtgacatagc

SEQ ID NO: 86408 - DNA, 25 bp, probe
tttaattaccgtgagtgacatagcc

SEQ ID NO: 86409 - DNA, 25 bp, probe
tacgctcatcacctaaacttgtact

SEQ ID NO: 86410 - DNA, 25 bp, probe
gcgaatgtcttatttaattaccgtg

SEQ ID NO: 86411 - DNA, 25 bp, probe
gctcatcacctaaacttgtacttta

SEQ ID NO: 86412 - DNA, 25 bp, probe
ttctgtatatgattctctgtggttt

SEQ ID NO: 86413 - DNA, 25 bp, probe
tttctgtatatgattctctgtggtt

SEQ ID NO: 86414 - DNA, 25 bp, probe
actgggcgaatgtcttatttaatta

SEQ ID NO: 86415 - DNA, 25 bp, probe
ccactcctctaagacaaagtagatt

SEQ ID NO: 86416 - DNA, 25 bp, probe
tcttgaactgggcgaatgtcttatt

SEQ ID NO: 86417 - DNA, 25 bp, probe
ctgggcgaatgtcttatttaattac

SEQ ID NO: 86418 - DNA, 25 bp, probe
cccactcctctaagacaaagtagat

SEQ ID NO: 86419 - DNA, 25 bp, probe
acgctcatcacctaaacttgtactt

SEQ ID NO: 86420 - DNA, 25 bp, probe
gctttacgctcatcacctaaacttg

SEQ ID NO: 86421 - DNA, 25 bp, probe
ctcttgaactgggcgaatgtcttat

SEQ ID NO: 86422 - DNA, 25 bp, probe
tcttatttaattaccgtgagtgaca

SEQ ID NO: 86423 - DNA, 25 bp, probe
tgtcttatttaattaccgtgagtga

SEQ ID NO: 86424 - DNA, 25 bp, probe
tgttaacgtgatgtgccactatatt

SEQ ID NO: 86425 - DNA, 25 bp, probe
ttgttaacgtgatgtgccactatat

SEQ ID NO: 86426 - DNA, 25 bp, probe
actcctctaagacaaagtagattct

SEQ ID NO: 86427 - DNA, 25 bp, probe
cactcctctaagacaaagtagattc

SEQ ID NO: 86428 - DNA, 25 bp, probe
ctgatagaaatggtttcctctggat

SEQ ID NO: 86429 - DNA, 25 bp, probe
aactgctcttgacaatgactattcc

SEQ ID NO: 86430 - DNA, 25 bp, probe
acaatgtatccaacagacactcaat

SEQ ID NO: 86431 - DNA, 25 bp, probe
tacaatgtatccaacagacactcaa

SEQ ID NO: 86432 - DNA, 25 bp, probe
caatgtatccaacagacactcaata

SEQ ID NO: 86433 - DNA, 25 bp, probe
agtacaatgtatccaacagacactc

SEQ ID NO: 86434 - DNA, 25 bp, probe
gtacaatgtatccaacagacactca

SEQ ID NO: 86435 - DNA, 25 bp, probe
tgtagtacaatgtatccaacagaca

SEQ ID NO: 86436 - DNA, 25 bp, probe
tagtacaatgtatccaacagacact

SEQ ID NO: 86437 - DNA, 25 bp, probe
gtagtacaatgtatccaacagacac

SEQ ID NO: 86438 - DNA, 25 bp, probe
aatgtatccaacagacactcaataa

SEQ ID NO: 86439 - DNA, 25 bp, probe
aaactgctcttgacaatgactattc

SEQ ID NO: 86440 - DNA, 25 bp, probe
ctcttgacaatgactattccctgac

SEQ ID NO: 86441 - DNA, 25 bp, probe
atccaacagacactcaataaacttt

SEQ ID NO: 86442 - DNA, 25 bp, probe
gtatccaacagacactcaataaact

SEQ ID NO: 86443 - DNA, 25 bp, probe
tttacaaagaatccacctgacttcc

SEQ ID NO: 86444 - DNA, 25 bp, probe
ccttgtaaatcttcccaaatgttgt

SEQ ID NO: 86445 - DNA, 25 bp, probe
accttgtaaatcttcccaaatgttg

SEQ ID NO: 86446 - DNA, 25 bp, probe
caaactgctcttgacaatgactatt

SEQ ID NO: 86447 - DNA, 25 bp, probe
tacaaactgctcttgacaatgacta

SEQ ID NO: 86448 - DNA, 25 bp, probe
aatacaaactgctcttgacaatgac

SEQ ID NO: 86449 - DNA, 25 bp, probe
caatacaaactgctcttgacaatga

SEQ ID NO: 86450 - DNA, 25 bp, probe
cttgacaatgactattccctgacag

SEQ ID NO: 86451 - DNA, 25 bp, probe
acaaactgctcttgacaatgactat

SEQ ID NO: 86452 - DNA, 25 bp, probe
atacaaactgctcttgacaatgact

SEQ ID NO: 86453 - DNA, 25 bp, probe
tcttgacaatgactattccctgaca

SEQ ID NO: 86454 - DNA, 25 bp, probe
cttgtaaatcttcccaaatgttgtg

SEQ ID NO: 86455 - DNA, 25 bp, probe
gacaatgactattccctgacagtta

SEQ ID NO: 86456 - DNA, 25 bp, probe
ctcaactaatttctacattgccaga

SEQ ID NO: 86457 - DNA, 25 bp, probe
tctcaactaatttctacattgccag

SEQ ID NO: 86458 - DNA, 25 bp, probe
acaatgactattccctgacagttat

SEQ ID NO: 86459 - DNA, 25 bp, probe
acagaatgctatatgagaaacactt

SEQ ID NO: 86460 - DNA, 25 bp, probe
tatccaacagacactcaataaactt

SEQ ID NO: 86461 - DNA, 25 bp, probe
gaatctgttcagtcaaataactcca

SEQ ID NO: 86462 - DNA, 25 bp, probe
taccttgtaaatcttcccaaatgtt

SEQ ID NO: 86463 - DNA, 25 bp, probe
tatctgtaattcttgcccaccaaac

SEQ ID NO: 86464 - DNA, 25 bp, probe
gtatctgtaattcttgcccaccaaa

SEQ ID NO: 86465 - DNA, 25 bp, probe
agaatctgttcagtcaaataactcc

SEQ ID NO: 86466 - DNA, 25 bp, probe
ataccttgtaaatcttcccaaatgt

SEQ ID NO: 86467 - DNA, 25 bp, probe
atctcaactaatttctacattgcca

SEQ ID NO: 86468 - DNA, 25 bp, probe
tgtatccaacagacactcaataaac

SEQ ID NO: 86469 - DNA, 25 bp, probe
caatgactattccctgacagttatt

SEQ ID NO: 86470 - DNA, 25 bp, probe
tattctactagctatcctgacacca

SEQ ID NO: 86471 - DNA, 25 bp, probe
tgacaatgactattccctgacagtt

SEQ ID NO: 86472 - DNA, 25 bp, probe
ttgacaatgactattccctgacagt

SEQ ID NO: 86473 - DNA, 25 bp, probe
taggaccagaggatgtctagttcta

SEQ ID NO: 86474 - DNA, 25 bp, probe
cctaagtagtctcaagtacagagtt

SEQ ID NO: 86475 - DNA, 25 bp, probe
gcctaagtagtctcaagtacagagt

SEQ ID NO: 86476 - DNA, 25 bp, probe
atataagctactgagtggaacatgg

SEQ ID NO: 86477 - DNA, 25 bp, probe
gcatataagctactgagtggaacat

SEQ ID NO: 86478 - DNA, 25 bp, probe
tataagctactgagtggaacatgga

SEQ ID NO: 86479 - DNA, 25 bp, probe
gataggaccagaggatgtctagttc

SEQ ID NO: 86480 - DNA, 25 bp, probe
ataggaccagaggatgtctagttct

SEQ ID NO: 86481 - DNA, 25 bp, probe
agataggaccagaggatgtctagtt

SEQ ID NO: 86482 - DNA, 25 bp, probe
catataagctactgagtggaacatg

SEQ ID NO: 86483 - DNA, 25 bp, probe
agaggatgtctagttctaggctgag

SEQ ID NO: 86484 - DNA, 25 bp, probe
tgccagtattctaagacatttgagt

SEQ ID NO: 86485 - DNA, 25 bp, probe
cacgcctaagtagtctcaagtacag

SEQ ID NO: 86486 - DNA, 25 bp, probe
cgcctaagtagtctcaagtacagag

SEQ ID NO: 86487 - DNA, 25 bp, probe
ttgccagtattctaagacatttgag

SEQ ID NO: 86488 - DNA, 25 bp, probe
aggaccagaggatgtctagttctag

SEQ ID NO: 86489 - DNA, 25 bp, probe
ataaaggagtcttaatgttctgccc

SEQ ID NO: 86490 - DNA, 25 bp, probe
ataagctactgagtggaacatggag

SEQ ID NO: 86491 - DNA, 25 bp, probe
cagataggaccagaggatgtctagt

SEQ ID NO: 86492 - DNA, 25 bp, probe
cttgccagtattctaagacatttga

SEQ ID NO: 86493 - DNA, 25 bp, probe
tggttaaatggtttatacagggact

SEQ ID NO: 86494 - DNA, 25 bp, probe
acgcctaagtagtctcaagtacaga

SEQ ID NO: 86495 - DNA, 25 bp, probe
ggcatataagctactgagtggaaca

SEQ ID NO: 86496 - DNA, 25 bp, probe
ctgaggagatggaggtagaagaaag

SEQ ID NO: 86497 - DNA, 25 bp, probe
aagtacagagttaaagagatcccac

SEQ ID NO: 86498 - DNA, 25 bp, probe
caagtacagagttaaagagatccca

SEQ ID NO: 86499 - DNA, 25 bp, probe
ttggttaaatggtttatacagggac

SEQ ID NO: 86500 - DNA, 25 bp, probe
gccagtattctaagacatttgagta

SEQ ID NO: 86501 - DNA, 25 bp, probe
tcaagtacagagttaaagagatccc

SEQ ID NO: 86502 - DNA, 25 bp, probe
tacagagttaaagagatcccaccat

SEQ ID NO: 86503 - DNA, 25 bp, probe
gcttcttgccagtattctaagacat

SEQ ID NO: 86504 - DNA, 25 bp, probe
cagagttaaagagatcccaccattc

SEQ ID NO: 86505 - DNA, 25 bp, probe
tataaaggagtcttaatgttctgcc

SEQ ID NO: 86506 - DNA, 25 bp, probe
cttcttgccagtattctaagacatt

SEQ ID NO: 86507 - DNA, 25 bp, probe
cagaggatgtctagttctaggctga

SEQ ID NO: 86508 - DNA, 25 bp, probe
agtacagagttaaagagatcccacc

SEQ ID NO: 86509 - DNA, 25 bp, probe
gcctgcttctatgtatttatcaaca

SEQ ID NO: 86510 - DNA, 25 bp, probe
agacatttgagtaattgctgtttgc

SEQ ID NO: 86511 - DNA, 25 bp, probe
gtttatacagggactgatttgcttc

SEQ ID NO: 86512 - DNA, 25 bp, probe
ccagataggaccagaggatgtctag

SEQ ID NO: 86513 - DNA, 25 bp, probe
acagagttaaagagatcccaccatt

SEQ ID NO: 86514 - DNA, 25 bp, probe
caccacgcctaagtagtctcaagta

SEQ ID NO: 86515 - DNA, 25 bp, probe
ggttaaatggtttatacagggactg

SEQ ID NO: 86516 - DNA, 25 bp, probe
gtacagagttaaagagatcccacca

SEQ ID NO: 86517 - DNA, 25 bp, probe
tagtgaggaactgaccattatatgc

SEQ ID NO: 86518 - DNA, 25 bp, probe
gaactgaccattatatgccttcact

SEQ ID NO: 86519 - DNA, 25 bp, probe
aactgaccattatatgccttcactg

SEQ ID NO: 86520 - DNA, 25 bp, probe
ggaactgaccattatatgccttcac

SEQ ID NO: 86521 - DNA, 25 bp, probe
gaggaactgaccattatatgccttc

SEQ ID NO: 86522 - DNA, 25 bp, probe
agtgaggaactgaccattatatgcc

SEQ ID NO: 86523 - DNA, 25 bp, probe
aggaactgaccattatatgccttca

SEQ ID NO: 86524 - DNA, 25 bp, probe
tgaggaactgaccattatatgcctt

SEQ ID NO: 86525 - DNA, 25 bp, probe
ggcttcttgtgcaataatatgatgt

SEQ ID NO: 86526 - DNA, 25 bp, probe
tggcttcttgtgcaataatatgatg

SEQ ID NO: 86527 - DNA, 25 bp, probe
atagtgaggaactgaccattatatg

SEQ ID NO: 86528 - DNA, 25 bp, probe
ctggcttcttgtgcaataatatgat

SEQ ID NO: 86529 - DNA, 25 bp, probe
atcaaatactttccttcccaccttt

SEQ ID NO: 86530 - DNA, 25 bp, probe
tatcaaatactttccttcccacctt

SEQ ID NO: 86531 - DNA, 25 bp, probe
actggcttcttgtgcaataatatga

SEQ ID NO: 86532 - DNA, 25 bp, probe
atatcaaatactttccttcccacct

SEQ ID NO: 86533 - DNA, 25 bp, probe
gtgaggaactgaccattatatgcct

SEQ ID NO: 86534 - DNA, 25 bp, probe
gcttcttgtgcaataatatgatgtt

SEQ ID NO: 86535 - DNA, 25 bp, probe
cagtgccataaaccttgttacatat

SEQ ID NO: 86536 - DNA, 25 bp, probe
ttgaaatagtgaggaactgaccatt

SEQ ID NO: 86537 - DNA, 25 bp, probe
tttgaaatagtgaggaactgaccat

SEQ ID NO: 86538 - DNA, 25 bp, probe
tgaaatagtgaggaactgaccatta

SEQ ID NO: 86539 - DNA, 25 bp, probe
aatagtgaggaactgaccattatat

SEQ ID NO: 86540 - DNA, 25 bp, probe
acagtgccataaaccttgttacata

SEQ ID NO: 86541 - DNA, 25 bp, probe
tacagtgccataaaccttgttacat

SEQ ID NO: 86542 - DNA, 25 bp, probe
gttacagtgccataaaccttgttac

SEQ ID NO: 86543 - DNA, 25 bp, probe
ttacagtgccataaaccttgttaca

SEQ ID NO: 86544 - DNA, 25 bp, probe
tatatcaaatactttccttcccacc

SEQ ID NO: 86545 - DNA, 25 bp, probe
actgaccattatatgccttcactgg

SEQ ID NO: 86546 - DNA, 25 bp, probe
cactggcttcttgtgcaataatatg

SEQ ID NO: 86547 - DNA, 25 bp, probe
tcactggcttcttgtgcaataatat

SEQ ID NO: 86548 - DNA, 25 bp, probe
ttctgatttgattctggttacagtg

SEQ ID NO: 86549 - DNA, 25 bp, probe
ttcactggcttcttgtgcaataata

SEQ ID NO: 86550 - DNA, 25 bp, probe
gaaatagtgaggaactgaccattat

SEQ ID NO: 86551 - DNA, 25 bp, probe
tctgatttgattctggttacagtgc

SEQ ID NO: 86552 - DNA, 25 bp, probe
tttctgatttgattctggttacagt

SEQ ID NO: 86553 - DNA, 25 bp, probe
tttgtgtgtttcatgctctggattt

SEQ ID NO: 86554 - DNA, 25 bp, probe
atttgattctggttacagtgccata

SEQ ID NO: 86555 - DNA, 25 bp, probe
ttgattctggttacagtgccataaa

SEQ ID NO: 86556 - DNA, 25 bp, probe
tttgattctggttacagtgccataa

SEQ ID NO: 86557 - DNA, 25 bp, probe
gctgaatgatagacaaatagtgcaa

SEQ ID NO: 86558 - DNA, 25 bp, probe
agctgaatgatagacaaatagtgca

SEQ ID NO: 86559 - DNA, 25 bp, probe
cttcactggcttcttgtgcaataat

SEQ ID NO: 86560 - DNA, 25 bp, probe
tgattctggttacagtgccataaac

SEQ ID NO: 86561 - DNA, 25 bp, probe
gccaagattgacagacacctaatat

SEQ ID NO: 86562 - DNA, 25 bp, probe
ttgtcagaagatgtgaagtcgtatt

SEQ ID NO: 86563 - DNA, 25 bp, probe
tgtcagaagatgtgaagtcgtatta

SEQ ID NO: 86564 - DNA, 25 bp, probe
cttgtcagaagatgtgaagtcgtat

SEQ ID NO: 86565 - DNA, 25 bp, probe
gtattgtactgccattcctactgta

SEQ ID NO: 86566 - DNA, 25 bp, probe
attgtactgccattcctactgtatt

SEQ ID NO: 86567 - DNA, 25 bp, probe
ttgtattgtactgccattcctactg

SEQ ID NO: 86568 - DNA, 25 bp, probe
tattgtactgccattcctactgtat

SEQ ID NO: 86569 - DNA, 25 bp, probe
gtcagaagatgtgaagtcgtattat

SEQ ID NO: 86570 - DNA, 25 bp, probe
tgtattgtactgccattcctactgt

SEQ ID NO: 86571 - DNA, 25 bp, probe
ccaagattgacagacacctaatatt

SEQ ID NO: 86572 - DNA, 25 bp, probe
cagaagatgtgaagtcgtattatac

SEQ ID NO: 86573 - DNA, 25 bp, probe
gcagaacctttaattggatgtgtta

SEQ ID NO: 86574 - DNA, 25 bp, probe
aagatgtgaagtcgtattatacagt

SEQ ID NO: 86575 - DNA, 25 bp, probe
tacaatggaggagaacagtgagagg

SEQ ID NO: 86576 - DNA, 25 bp, probe
ttgtactgccattcctactgtattt

SEQ ID NO: 86577 - DNA, 25 bp, probe
tttgtattgtactgccattcctact

SEQ ID NO: 86578 - DNA, 25 bp, probe
actttgtattgtactgccattccta

SEQ ID NO: 86579 - DNA, 25 bp, probe
tactttgtattgtactgccattcct

SEQ ID NO: 86580 - DNA, 25 bp, probe
ctttgtattgtactgccattcctac

SEQ ID NO: 86581 - DNA, 25 bp, probe
agaagatgtgaagtcgtattataca

SEQ ID NO: 86582 - DNA, 25 bp, probe
tcagaagatgtgaagtcgtattata

SEQ ID NO: 86583 - DNA, 25 bp, probe
ttactttgtattgtactgccattcc

SEQ ID NO: 86584 - DNA, 25 bp, probe
caagattgacagacacctaatattc

SEQ ID NO: 86585 - DNA, 25 bp, probe
aaaccagaacaatatctcactttca

SEQ ID NO: 86586 - DNA, 25 bp, probe
acctttaattggatgtgttaagtgt

SEQ ID NO: 86587 - DNA, 25 bp, probe
accagaacaatatctcactttcatt

SEQ ID NO: 86588 - DNA, 25 bp, probe
aaccagaacaatatctcactttcat

SEQ ID NO: 86589 - DNA, 25 bp, probe
gtgaagtcgtattatacagtacatc

SEQ ID NO: 86590 - DNA, 25 bp, probe
gaagatgtgaagtcgtattatacag

SEQ ID NO: 86591 - DNA, 25 bp, probe
gagattactttgtattgtactgcca

SEQ ID NO: 86592 - DNA, 25 bp, probe
aagattgacagacacctaatattca

SEQ ID NO: 86593 - DNA, 25 bp, probe
tgaaaccagaacaatatctcacttt

SEQ ID NO: 86594 - DNA, 25 bp, probe
tgtgaagtcgtattatacagtacat

SEQ ID NO: 86595 - DNA, 25 bp, probe
atgtgaagtcgtattatacagtaca

SEQ ID NO: 86596 - DNA, 25 bp, probe
tcttgtcagaagatgtgaagtcgta

SEQ ID NO: 86597 - DNA, 25 bp, probe
gattgacagacacctaatattcatg

SEQ ID NO: 86598 - DNA, 25 bp, probe
tgaagtcgtattatacagtacatct

SEQ ID NO: 86599 - DNA, 25 bp, probe
agagattactttgtattgtactgcc

SEQ ID NO: 86600 - DNA, 25 bp, probe
ttaaagtgagagaatctggctcctt

SEQ ID NO: 86601 - DNA, 25 bp, probe
agattgacagacacctaatattcat

SEQ ID NO: 86602 - DNA, 25 bp, probe
gattgcctcacagttgtttgtttac

SEQ ID NO: 86603 - DNA, 25 bp, probe
agattgcctcacagttgtttgttta

SEQ ID NO: 86604 - DNA, 25 bp, probe
tagattgcctcacagttgtttgttt

SEQ ID NO: 86605 - DNA, 25 bp, probe
ttgtatgagcgaaattgtctttact

SEQ ID NO: 86606 - DNA, 25 bp, probe
tttgtatgagcgaaattgtctttac

SEQ ID NO: 86607 - DNA, 25 bp, probe
tgtatgagcgaaattgtctttacta

SEQ ID NO: 86608 - DNA, 25 bp, probe
atgagcgaaattgtctttactaaac

SEQ ID NO: 86609 - DNA, 25 bp, probe
tgagcgaaattgtctttactaaaca

SEQ ID NO: 86610 - DNA, 25 bp, probe
agcgaaattgtctttactaaacaga

SEQ ID NO: 86611 - DNA, 25 bp, probe
aagtcttccctcagatttccattgt

SEQ ID NO: 86612 - DNA, 25 bp, probe
gagcgaaattgtctttactaaacag

SEQ ID NO: 86613 - DNA, 25 bp, probe
gaatacttcacctttcctctccctc

SEQ ID NO: 86614 - DNA, 25 bp, probe
gaagtcttccctcagatttccattg

SEQ ID NO: 86615 - DNA, 25 bp, probe
gcgaaattgtctttactaaacagat

SEQ ID NO: 86616 - DNA, 25 bp, probe
aatacttcacctttcctctccctca

SEQ ID NO: 86617 - DNA, 25 bp, probe
gtatgagcgaaattgtctttactaa

SEQ ID NO: 86618 - DNA, 25 bp, probe
agtcttccctcagatttccattgtg

SEQ ID NO: 86619 - DNA, 25 bp, probe
tgaagtcttccctcagatttccatt

SEQ ID NO: 86620 - DNA, 25 bp, probe
ttgaagtcttccctcagatttccat

SEQ ID NO: 86621 - DNA, 25 bp, probe
cactcgattgttgtaaactgttgtt

SEQ ID NO: 86622 - DNA, 25 bp, probe
tttgaagtcttccctcagatttcca

SEQ ID NO: 86623 - DNA, 25 bp, probe
atacttcacctttcctctccctcag

SEQ ID NO: 86624 - DNA, 25 bp, probe
tcttccctcagatttccattgtgtg

SEQ ID NO: 86625 - DNA, 25 bp, probe
gtcttccctcagatttccattgtgt

SEQ ID NO: 86626 - DNA, 25 bp, probe
tatgagcgaaattgtctttactaaa

SEQ ID NO: 86627 - DNA, 25 bp, probe
tgttttgtatgagcgaaattgtctt

SEQ ID NO: 86628 - DNA, 25 bp, probe
ttgttttgtatgagcgaaattgtct

SEQ ID NO: 86629 - DNA, 25 bp, probe
gttgttttgtatgagcgaaattgtc

SEQ ID NO: 86630 - DNA, 25 bp, probe
ctgttgttttgtatgagcgaaattg

SEQ ID NO: 86631 - DNA, 25 bp, probe
actgttgttttgtatgagcgaaatt

SEQ ID NO: 86632 - DNA, 25 bp, probe
tgttgttttgtatgagcgaaattgt

SEQ ID NO: 86633 - DNA, 25 bp, probe
agcactcgattgttgtaaactgttg

SEQ ID NO: 86634 - DNA, 25 bp, probe
aactgttgttttgtatgagcgaaat

SEQ ID NO: 86635 - DNA, 25 bp, probe
gttttgtatgagcgaaattgtcttt

SEQ ID NO: 86636 - DNA, 25 bp, probe
gcactcgattgttgtaaactgttgt

SEQ ID NO: 86637 - DNA, 25 bp, probe
actcgattgttgtaaactgttgttt

SEQ ID NO: 86638 - DNA, 25 bp, probe
cagcactcgattgttgtaaactgtt

SEQ ID NO: 86639 - DNA, 25 bp, probe
cttttgaagtcttccctcagatttc

SEQ ID NO: 86640 - DNA, 25 bp, probe
ttttgaagtcttccctcagatttcc

SEQ ID NO: 86641 - DNA, 25 bp, probe
ttttgtatgagcgaaattgtcttta

SEQ ID NO: 86642 - DNA, 25 bp, probe
catttcctgtgtttgtcctgggttc

SEQ ID NO: 86643 - DNA, 25 bp, probe
atttcctgtgtttgtcctgggttct

SEQ ID NO: 86644 - DNA, 25 bp, probe
cgaaattgtctttactaaacagatt

SEQ ID NO: 86645 - DNA, 25 bp, probe
cttccctcagatttccattgtgtgg

SEQ ID NO: 86646 - DNA, 25 bp, probe
gtccagcactcgattgttgtaaact

SEQ ID NO: 86647 - DNA, 25 bp, probe
tgtccagcactcgattgttgtaaac

SEQ ID NO: 86648 - DNA, 25 bp, probe
taaactgttgttttgtatgagcgaa

SEQ ID NO: 86649 - DNA, 25 bp, probe
tatgaaatcgttagcaccttaggag

SEQ ID NO: 86650 - DNA, 25 bp, probe
atatgaaatcgttagcaccttagga

SEQ ID NO: 86651 - DNA, 25 bp, probe
gatatgaaatcgttagcaccttagg

SEQ ID NO: 86652 - DNA, 25 bp, probe
ctggctacaagagcgatatgaaatc

SEQ ID NO: 86653 - DNA, 25 bp, probe
actggctacaagagcgatatgaaat

SEQ ID NO: 86654 - DNA, 25 bp, probe
gactggctacaagagcgatatgaaa

SEQ ID NO: 86655 - DNA, 25 bp, probe
ggactggctacaagagcgatatgaa

SEQ ID NO: 86656 - DNA, 25 bp, probe
cgatatgaaatcgttagcaccttag

SEQ ID NO: 86657 - DNA, 25 bp, probe
tacaagagcgatatgaaatcgttag

SEQ ID NO: 86658 - DNA, 25 bp, probe
ctacaagagcgatatgaaatcgtta

SEQ ID NO: 86659 - DNA, 25 bp, probe
gcgatatgaaatcgttagcacctta

SEQ ID NO: 86660 - DNA, 25 bp, probe
aagagcgatatgaaatcgttagcac

SEQ ID NO: 86661 - DNA, 25 bp, probe
caagagcgatatgaaatcgttagca

SEQ ID NO: 86662 - DNA, 25 bp, probe
acaagagcgatatgaaatcgttagc

SEQ ID NO: 86663 - DNA, 25 bp, probe
gctacaagagcgatatgaaatcgtt

SEQ ID NO: 86664 - DNA, 25 bp, probe
agcgatatgaaatcgttagcacctt

SEQ ID NO: 86665 - DNA, 25 bp, probe
gagcgatatgaaatcgttagcacct

SEQ ID NO: 86666 - DNA, 25 bp, probe
agagcgatatgaaatcgttagcacc

SEQ ID NO: 86667 - DNA, 25 bp, probe
ggctacaagagcgatatgaaatcgt

SEQ ID NO: 86668 - DNA, 25 bp, probe
tggctacaagagcgatatgaaatcg

SEQ ID NO: 86669 - DNA, 25 bp, probe
ccatgaataatacacgacctgttat

SEQ ID NO: 86670 - DNA, 25 bp, probe
cctgttatttccatgactgctttac

SEQ ID NO: 86671 - DNA, 25 bp, probe
tgttatttccatgactgctttactg

SEQ ID NO: 86672 - DNA, 25 bp, probe
acctgttatttccatgactgcttta

SEQ ID NO: 86673 - DNA, 25 bp, probe
gttatttccatgactgctttactga

SEQ ID NO: 86674 - DNA, 25 bp, probe
ctgttatttccatgactgctttact

SEQ ID NO: 86675 - DNA, 25 bp, probe
atttccatgactgctttactgattt

SEQ ID NO: 86676 - DNA, 25 bp, probe
gtcagtttgtgcccatgaataatac

SEQ ID NO: 86677 - DNA, 25 bp, probe
agtcagtttgtgcccatgaataata

SEQ ID NO: 86678 - DNA, 25 bp, probe
tatttccatgactgctttactgatt

SEQ ID NO: 86679 - DNA, 25 bp, probe
ttatttccatgactgctttactgat

SEQ ID NO: 86680 - DNA, 25 bp, probe
gacctgttatttccatgactgcttt

SEQ ID NO: 86681 - DNA, 25 bp, probe
aatacacgacctgttatttccatga

SEQ ID NO: 86682 - DNA, 25 bp, probe
cccatgaataatacacgacctgtta

SEQ ID NO: 86683 - DNA, 25 bp, probe
tatctggcttgtccatctggtctaa

SEQ ID NO: 86684 - DNA, 25 bp, probe
tcagtttgtgcccatgaataataca

SEQ ID NO: 86685 - DNA, 25 bp, probe
atacacgacctgttatttccatgac

SEQ ID NO: 86686 - DNA, 25 bp, probe
ataatacacgacctgttatttccat

SEQ ID NO: 86687 - DNA, 25 bp, probe
taatacacgacctgttatttccatg

SEQ ID NO: 86688 - DNA, 25 bp, probe
gagtcagtttgtgcccatgaataat

SEQ ID NO: 86689 - DNA, 25 bp, probe
cagtttgtgcccatgaataatacac

SEQ ID NO: 86690 - DNA, 25 bp, probe
tacacgacctgttatttccatgact

SEQ ID NO: 86691 - DNA, 25 bp, probe
gtatctggcttgtccatctggtcta

SEQ ID NO: 86692 - DNA, 25 bp, probe
ttacagaattgaatctagagtctcc

SEQ ID NO: 86693 - DNA, 25 bp, probe
catgaataatacacgacctgttatt

SEQ ID NO: 86694 - DNA, 25 bp, probe
atgagtcagtttgtgcccatgaata

SEQ ID NO: 86695 - DNA, 25 bp, probe
tttgtgcccatgaataatacacgac

SEQ ID NO: 86696 - DNA, 25 bp, probe
gtttgtgcccatgaataatacacga

SEQ ID NO: 86697 - DNA, 25 bp, probe
agtttgtgcccatgaataatacacg

SEQ ID NO: 86698 - DNA, 25 bp, probe
tgagtcagtttgtgcccatgaataa

SEQ ID NO: 86699 - DNA, 25 bp, probe
aataatacacgacctgttatttcca

SEQ ID NO: 86700 - DNA, 25 bp, probe
atctggcttgtccatctggtctaag

SEQ ID NO: 86701 - DNA, 25 bp, probe
tacagaattgaatctagagtctccc

SEQ ID NO: 86702 - DNA, 25 bp, probe
cgacctgttatttccatgactgctt

SEQ ID NO: 86703 - DNA, 25 bp, probe
gaataatacacgacctgttatttcc

SEQ ID NO: 86704 - DNA, 25 bp, probe
tttccatgactgctttactgatttt

SEQ ID NO: 86705 - DNA, 25 bp, probe
acacgacctgttatttccatgactg

SEQ ID NO: 86706 - DNA, 25 bp, probe
actgcatcataactttacagaattg

SEQ ID NO: 86707 - DNA, 25 bp, probe
gcccatgaataatacacgacctgtt

SEQ ID NO: 86708 - DNA, 25 bp, probe
ctgcatcataactttacagaattga

SEQ ID NO: 86709 - DNA, 25 bp, probe
tgcatcataactttacagaattgaa

SEQ ID NO: 86710 - DNA, 25 bp, probe
gcatcataactttacagaattgaat

SEQ ID NO: 86711 - DNA, 25 bp, probe
ttaaggtcaatatactgtacctcgg

SEQ ID NO: 86712 - DNA, 25 bp, probe
tgaataatacacgacctgttatttc

SEQ ID NO: 86713 - DNA, 25 bp, probe
ttcttactggtgagatgctgagttc

SEQ ID NO: 86714 - DNA, 25 bp, probe
gttcttactggtgagatgctgagtt

SEQ ID NO: 86715 - DNA, 25 bp, probe
aaagaaagacattacacccagacag

SEQ ID NO: 86716 - DNA, 25 bp, probe
gagttcttactggtgagatgctgag

SEQ ID NO: 86717 - DNA, 25 bp, probe
caaagaaagacattacacccagaca

SEQ ID NO: 86718 - DNA, 25 bp, probe
aagaaagacattacacccagacaga

SEQ ID NO: 86719 - DNA, 25 bp, probe
ctccagagaacgatttgtcttcatt

SEQ ID NO: 86720 - DNA, 25 bp, probe
tccagagaacgatttgtcttcattg

SEQ ID NO: 86721 - DNA, 25 bp, probe
tatcctccagagaacgatttgtctt

SEQ ID NO: 86722 - DNA, 25 bp, probe
ccaaagaaagacattacacccagac

SEQ ID NO: 86723 - DNA, 25 bp, probe
agttcttactggtgagatgctgagt

SEQ ID NO: 86724 - DNA, 25 bp, probe
ctatcctccagagaacgatttgtct

SEQ ID NO: 86725 - DNA, 25 bp, probe
tctatcctccagagaacgatttgtc

SEQ ID NO: 86726 - DNA, 25 bp, probe
gaaagacattacacccagacagact

SEQ ID NO: 86727 - DNA, 25 bp, probe
agaaagacattacacccagacagac

SEQ ID NO: 86728 - DNA, 25 bp, probe
gtctatcctccagagaacgatttgt

SEQ ID NO: 86729 - DNA, 25 bp, probe
cagagaacgatttgtcttcattggg

SEQ ID NO: 86730 - DNA, 25 bp, probe
aacacaacaatttctgtactatgct

SEQ ID NO: 86731 - DNA, 25 bp, probe
caaggatcgagaaacacaacaattt

SEQ ID NO: 86732 - DNA, 25 bp, probe
atcctccagagaacgatttgtcttc

SEQ ID NO: 86733 - DNA, 25 bp, probe
caacaatttctgtactatgctaagc

SEQ ID NO: 86734 - DNA, 25 bp, probe
aaacacaacaatttctgtactatgc

SEQ ID NO: 86735 - DNA, 25 bp, probe
acacaacaatttctgtactatgcta

SEQ ID NO: 86736 - DNA, 25 bp, probe
cctccagagaacgatttgtcttcat

SEQ ID NO: 86737 - DNA, 25 bp, probe
cttactggtgagatgctgagttcct

SEQ ID NO: 86738 - DNA, 25 bp, probe
tcttactggtgagatgctgagttcc

SEQ ID NO: 86739 - DNA, 25 bp, probe
ggagttcttactggtgagatgctga

SEQ ID NO: 86740 - DNA, 25 bp, probe
acaaggatcgagaaacacaacaatt

SEQ ID NO: 86741 - DNA, 25 bp, probe
ttactggtgagatgctgagttcctc

SEQ ID NO: 86742 - DNA, 25 bp, probe
aaagacattacacccagacagactg

SEQ ID NO: 86743 - DNA, 25 bp, probe
gccaaagaaagacattacacccaga

SEQ ID NO: 86744 - DNA, 25 bp, probe
cacaaggatcgagaaacacaacaat

SEQ ID NO: 86745 - DNA, 25 bp, probe
gaagaacacaaggatcgagaaacac

SEQ ID NO: 86746 - DNA, 25 bp, probe
cacaacaatttctgtactatgctaa

SEQ ID NO: 86747 - DNA, 25 bp, probe
ccagagaacgatttgtcttcattgg

SEQ ID NO: 86748 - DNA, 25 bp, probe
acaacaatttctgtactatgctaag

SEQ ID NO: 86749 - DNA, 25 bp, probe
ctatgctaagcagagactcctgtag

SEQ ID NO: 86750 - DNA, 25 bp, probe
gaacacaaggatcgagaaacacaac

SEQ ID NO: 86751 - DNA, 25 bp, probe
ctaaggccaaagaaagacattacac

SEQ ID NO: 86752 - DNA, 25 bp, probe
gtactatgctaagcagagactcctg

SEQ ID NO: 86753 - DNA, 25 bp, probe
ctgtactatgctaagcagagactcc

SEQ ID NO: 86754 - DNA, 25 bp, probe
agaacacaaggatcgagaaacacaa

SEQ ID NO: 86755 - DNA, 25 bp, probe
aagaacacaaggatcgagaaacaca

SEQ ID NO: 86756 - DNA, 25 bp, probe
tcctccagagaacgatttgtcttca

SEQ ID NO: 86757 - DNA, 25 bp, probe
gcagcattatcggttccttaacaat

SEQ ID NO: 86758 - DNA, 25 bp, probe
cagcattatcggttccttaacaatg

SEQ ID NO: 86759 - DNA, 25 bp, probe
agcagcattatcggttccttaacaa

SEQ ID NO: 86760 - DNA, 25 bp, probe
ctgagcagcattatcggttccttaa

SEQ ID NO: 86761 - DNA, 25 bp, probe
agcattatcggttccttaacaatgg

SEQ ID NO: 86762 - DNA, 25 bp, probe
gagcagcattatcggttccttaaca

SEQ ID NO: 86763 - DNA, 25 bp, probe
tgagcagcattatcggttccttaac

SEQ ID NO: 86764 - DNA, 25 bp, probe
cctgagcagcattatcggttcctta

SEQ ID NO: 86765 - DNA, 25 bp, probe
gcattatcggttccttaacaatggg

SEQ ID NO: 86766 - DNA, 25 bp, probe
attatcggttccttaacaatggggc

SEQ ID NO: 86767 - DNA, 25 bp, probe
cattatcggttccttaacaatgggg

SEQ ID NO: 86768 - DNA, 25 bp, probe
aaagctgccagcaatcattctgtag

SEQ ID NO: 86769 - DNA, 25 bp, probe
aaaagctgccagcaatcattctgta

SEQ ID NO: 86770 - DNA, 25 bp, probe
ggttccttaacaatggggccaaaag

SEQ ID NO: 86771 - DNA, 25 bp, probe
ttatcggttccttaacaatggggcc

SEQ ID NO: 86772 - DNA, 25 bp, probe
gttccttaacaatggggccaaaagc

SEQ ID NO: 86773 - DNA, 25 bp, probe
caaaagctgccagcaatcattctgt

SEQ ID NO: 86774 - DNA, 25 bp, probe
ttccttaacaatggggccaaaagct

SEQ ID NO: 86775 - DNA, 25 bp, probe
gtgccttcttctcatattacggata

SEQ ID NO: 86776 - DNA, 25 bp, probe
tgccttcttctcatattacggatat

SEQ ID NO: 86777 - DNA, 25 bp, probe
agtgccttcttctcatattacggat

SEQ ID NO: 86778 - DNA, 25 bp, probe
atattacggatatggctgctactgt

SEQ ID NO: 86779 - DNA, 25 bp, probe
aagtgccttcttctcatattacgga

SEQ ID NO: 86780 - DNA, 25 bp, probe
tattacggatatggctgctactgtg

SEQ ID NO: 86781 - DNA, 25 bp, probe
tcttctcatattacggatatggctg

SEQ ID NO: 86782 - DNA, 25 bp, probe
gaagtgccttcttctcatattacgg

SEQ ID NO: 86783 - DNA, 25 bp, probe
ctcatattacggatatggctgctac

SEQ ID NO: 86784 - DNA, 25 bp, probe
tctcatattacggatatggctgcta

SEQ ID NO: 86785 - DNA, 25 bp, probe
ttcttctcatattacggatatggct

SEQ ID NO: 86786 - DNA, 25 bp, probe
catattacggatatggctgctactg

SEQ ID NO: 86787 - DNA, 25 bp, probe
tcatattacggatatggctgctact

SEQ ID NO: 86788 - DNA, 25 bp, probe
cttcttctcatattacggatatggc

SEQ ID NO: 86789 - DNA, 25 bp, probe
gccttcttctcatattacggatatg

SEQ ID NO: 86790 - DNA, 25 bp, probe
cgaagtgccttcttctcatattacg

SEQ ID NO: 86791 - DNA, 25 bp, probe
cttctcatattacggatatggctgc

SEQ ID NO: 86792 - DNA, 25 bp, probe
gcgaagtgccttcttctcatattac

SEQ ID NO: 86793 - DNA, 25 bp, probe
ttctcatattacggatatggctgct

SEQ ID NO: 86794 - DNA, 25 bp, probe
attacggatatggctgctactgtgg

SEQ ID NO: 86795 - DNA, 25 bp, probe
ccttcttctcatattacggatatgg

SEQ ID NO: 86796 - DNA, 25 bp, probe
tttcagaggagggtcaaacacatca

SEQ ID NO: 86797 - DNA, 25 bp, probe
ttcagaggagggtcaaacacatcac

SEQ ID NO: 86798 - DNA, 25 bp, probe
ggcgaagtgccttcttctcatatta

SEQ ID NO: 86799 - DNA, 25 bp, probe
cagctaccagttccacatcgtcaat

SEQ ID NO: 86800 - DNA, 25 bp, probe
agctaccagttccacatcgtcaatg

SEQ ID NO: 86801 - DNA, 25 bp, probe
gtttcagaggagggtcaaacacatc

SEQ ID NO: 86802 - DNA, 25 bp, probe
agtttcagaggagggtcaaacacat

SEQ ID NO: 86803 - DNA, 25 bp, probe
gttgaacagctaccagttccacatc

SEQ ID NO: 86804 - DNA, 25 bp, probe
tgttgaacagctaccagttccacat

SEQ ID NO: 86805 - DNA, 25 bp, probe
cagtttcagaggagggtcaaacaca

SEQ ID NO: 86806 - DNA, 25 bp, probe
ttgaacagctaccagttccacatcg

SEQ ID NO: 86807 - DNA, 25 bp, probe
ctcatctccctctccctacgagaag

SEQ ID NO: 86808 - DNA, 25 bp, probe
ctgtgttgaacagctaccagttcca

SEQ ID NO: 86809 - DNA, 25 bp, probe
gggcgaagtgccttcttctcatatt

SEQ ID NO: 86810 - DNA, 25 bp, probe
aaaacttcaagcagttctccagcca

SEQ ID NO: 86811 - DNA, 25 bp, probe
gagaaccatcaatacgaatacgagg

SEQ ID NO: 86812 - DNA, 25 bp, probe
ggagaaccatcaatacgaatacgag

SEQ ID NO: 86813 - DNA, 25 bp, probe
atcaatacgaatacgaggtccgaat

SEQ ID NO: 86814 - DNA, 25 bp, probe
gcttctgtctgtagaggcttcatat

SEQ ID NO: 86815 - DNA, 25 bp, probe
ggatgaggatacagagaggatcttc

SEQ ID NO: 86816 - DNA, 25 bp, probe
aggatgaggatacagagaggatctt

SEQ ID NO: 86817 - DNA, 25 bp, probe
tcaatacgaatacgaggtccgaatg

SEQ ID NO: 86818 - DNA, 25 bp, probe
catcaatacgaatacgaggtccgaa

SEQ ID NO: 86819 - DNA, 25 bp, probe
aagtctatcctatggcaagtctgac

SEQ ID NO: 86820 - DNA, 25 bp, probe
caggatgaggatacagagaggatct

SEQ ID NO: 86821 - DNA, 25 bp, probe
gaaagtctatcctatggcaagtctg

SEQ ID NO: 86822 - DNA, 25 bp, probe
tatcctatggcaagtctgacctctc

SEQ ID NO: 86823 - DNA, 25 bp, probe
ctatcctatggcaagtctgacctct

SEQ ID NO: 86824 - DNA, 25 bp, probe
tctatcctatggcaagtctgacctc

SEQ ID NO: 86825 - DNA, 25 bp, probe
gatgaggatacagagaggatcttcc

SEQ ID NO: 86826 - DNA, 25 bp, probe
gaaccatcaatacgaatacgaggtc

SEQ ID NO: 86827 - DNA, 25 bp, probe
aaagtctatcctatggcaagtctga

SEQ ID NO: 86828 - DNA, 25 bp, probe
gagactccagtttacatccagaaag

SEQ ID NO: 86829 - DNA, 25 bp, probe
aaatctgagaacactgaaagaaacc

SEQ ID NO: 86830 - DNA, 25 bp, probe
aatctgagaacactgaaagaaacca

SEQ ID NO: 86831 - DNA, 25 bp, probe
agaaccatcaatacgaatacgaggt

SEQ ID NO: 86832 - DNA, 25 bp, probe
agaaagtctatcctatggcaagtct

SEQ ID NO: 86833 - DNA, 25 bp, probe
cagaaagtctatcctatggcaagtc

SEQ ID NO: 86834 - DNA, 25 bp, probe
agagactccagtttacatccagaaa

SEQ ID NO: 86835 - DNA, 25 bp, probe
atgaggatacagagaggatcttcca

SEQ ID NO: 86836 - DNA, 25 bp, probe
atctgagaacactgaaagaaaccac

SEQ ID NO: 86837 - DNA, 25 bp, probe
cttctgtctgtagaggcttcatatg

SEQ ID NO: 86838 - DNA, 25 bp, probe
cagagactccagtttacatccagaa

SEQ ID NO: 86839 - DNA, 25 bp, probe
aggatacagagaggatcttccagag

SEQ ID NO: 86840 - DNA, 25 bp, probe
gaggatacagagaggatcttccaga

SEQ ID NO: 86841 - DNA, 25 bp, probe
agactccagtttacatccagaaagg

SEQ ID NO: 86842 - DNA, 25 bp, probe
tagtttgtcagagactccagtttac

SEQ ID NO: 86843 - DNA, 25 bp, probe
gtagtttgtcagagactccagttta

SEQ ID NO: 86844 - DNA, 25 bp, probe
tttgtcagagactccagtttacatc

SEQ ID NO: 86845 - DNA, 25 bp, probe
tgaggatacagagaggatcttccag

SEQ ID NO: 86846 - DNA, 25 bp, probe
gtttgtcagagactccagtttacat

SEQ ID NO: 86847 - DNA, 25 bp, probe
aaccatcaatacgaatacgaggtcc

SEQ ID NO: 86848 - DNA, 25 bp, probe
gggagaaccatcaatacgaatacga

SEQ ID NO: 86849 - DNA, 25 bp, probe
atgtatttgacagtgttcatcacag

SEQ ID NO: 86850 - DNA, 25 bp, probe
tctgagaacactgaaagaaaccact

SEQ ID NO: 86851 - DNA, 25 bp, probe
aatgtatttgacagtgttcatcaca

SEQ ID NO: 86852 - DNA, 25 bp, probe
ctgagaacactgaaagaaaccactc

SEQ ID NO: 86853 - DNA, 25 bp, probe
gtctatcctatggcaagtctgacct

SEQ ID NO: 86854 - DNA, 25 bp, probe
agtctatcctatggcaagtctgacc

SEQ ID NO: 86855 - DNA, 25 bp, probe
aggaatggatgtcgctaatcataat

SEQ ID NO: 86856 - DNA, 25 bp, probe
caggaatggatgtcgctaatcataa

SEQ ID NO: 86857 - DNA, 25 bp, probe
tgtgtgtatatgtatgtgtgtatgg

SEQ ID NO: 86858 - DNA, 25 bp, probe
ggaatggatgtcgctaatcataata

SEQ ID NO: 86859 - DNA, 25 bp, probe
cgttatgtgtgtatatgtatgtgtg

SEQ ID NO: 86860 - DNA, 25 bp, probe
tcgttatgtgtgtatatgtatgtgt

SEQ ID NO: 86861 - DNA, 25 bp, probe
atgtgtgtatatgtatgtgtgtatg

SEQ ID NO: 86862 - DNA, 25 bp, probe
tgagagacagagaaagagagagaat

SEQ ID NO: 86863 - DNA, 25 bp, probe
atatgtatgtgtgtatgggtgtgtg

SEQ ID NO: 86864 - DNA, 25 bp, probe
tatatgtatgtgtgtatgggtgtgt

SEQ ID NO: 86865 - DNA, 25 bp, probe
tgtatatgtatgtgtgtatgggtgt

SEQ ID NO: 86866 - DNA, 25 bp, probe
tgtgtatatgtatgtgtgtatgggt

SEQ ID NO: 86867 - DNA, 25 bp, probe
gaatggatgtcgctaatcataataa

SEQ ID NO: 86868 - DNA, 25 bp, probe
gtatatgtatgtgtgtatgggtgtg

SEQ ID NO: 86869 - DNA, 25 bp, probe
gtgtatatgtatgtgtgtatgggtg

SEQ ID NO: 86870 - DNA, 25 bp, probe
gtgtgtatatgtatgtgtgtatggg

SEQ ID NO: 86871 - DNA, 25 bp, probe
gtgagagacagagaaagagagagaa

SEQ ID NO: 86872 - DNA, 25 bp, probe
acttctttgtaatcgttatgtgtgt

SEQ ID NO: 86873 - DNA, 25 bp, probe
gagagacagagaaagagagagaatt

SEQ ID NO: 86874 - DNA, 25 bp, probe
gttatgtgtgtatatgtatgtgtgt

SEQ ID NO: 86875 - DNA, 25 bp, probe
atcgttatgtgtgtatatgtatgtg

SEQ ID NO: 86876 - DNA, 25 bp, probe
tatgtatgtgtgtatgggtgtgtgt

SEQ ID NO: 86877 - DNA, 25 bp, probe
ccaggaatggatgtcgctaatcata

SEQ ID NO: 86878 - DNA, 25 bp, probe
aacttctttgtaatcgttatgtgtg

SEQ ID NO: 86879 - DNA, 25 bp, probe
tgttaacttagcttgaaggatctgt

SEQ ID NO: 86880 - DNA, 25 bp, probe
gtgttaacttagcttgaaggatctg

SEQ ID NO: 86881 - DNA, 25 bp, probe
ttaccaggaatggatgtcgctaatc

SEQ ID NO: 86882 - DNA, 25 bp, probe
caacttctttgtaatcgttatgtgt

SEQ ID NO: 86883 - DNA, 25 bp, probe
tttgtgtgagagacagagaaagaga

SEQ ID NO: 86884 - DNA, 25 bp, probe
gtttgtgtgagagacagagaaagag

SEQ ID NO: 86885 - DNA, 25 bp, probe
gtatgtgtgtatgggtgtgtgtttg

SEQ ID NO: 86886 - DNA, 25 bp, probe
ttgtaatcgttatgtgtgtatatgt

SEQ ID NO: 86887 - DNA, 25 bp, probe
agtgttaacttagcttgaaggatct

SEQ ID NO: 86888 - DNA, 25 bp, probe
atgtatgtgtgtatgggtgtgtgtt

SEQ ID NO: 86889 - DNA, 25 bp, probe
gttaacttagcttgaaggatctgtt

SEQ ID NO: 86890 - DNA, 25 bp, probe
gacataaatgaggaaactccaaacc

SEQ ID NO: 86891 - DNA, 25 bp, probe
acataaatgaggaaactccaaacct

SEQ ID NO: 86892 - DNA, 25 bp, probe
cttctttgtaatcgttatgtgtgta

SEQ ID NO: 86893 - DNA, 25 bp, probe
ttgtgtgagagacagagaaagagag

SEQ ID NO: 86894 - DNA, 25 bp, probe
gtgtttgtgtgagagacagagaaag

SEQ ID NO: 86895 - DNA, 25 bp, probe
acctcctgttagctgttatttctat

SEQ ID NO: 86896 - DNA, 25 bp, probe
agacataaatgaggaaactccaaac

SEQ ID NO: 86897 - DNA, 25 bp, probe
gtgtgagagacagagaaagagagag

SEQ ID NO: 86898 - DNA, 25 bp, probe
tgtttgtgtgagagacagagaaaga

SEQ ID NO: 86899 - DNA, 25 bp, probe
ggctgaagaatgtagacaggtataa

SEQ ID NO: 86900 - DNA, 25 bp, probe
tggctgaagaatgtagacaggtata

SEQ ID NO: 86901 - DNA, 25 bp, probe
atggctgaagaatgtagacaggtat

SEQ ID NO: 86902 - DNA, 25 bp, probe
ctctgatggctgaagaatgtagaca

SEQ ID NO: 86903 - DNA, 25 bp, probe
tgagaattgtatgtcatgttagcaa

SEQ ID NO: 86904 - DNA, 25 bp, probe
gctgaagaatgtagacaggtataat

SEQ ID NO: 86905 - DNA, 25 bp, probe
gatggctgaagaatgtagacaggta

SEQ ID NO: 86906 - DNA, 25 bp, probe
cagatgttgaaactttgaatgtcct

SEQ ID NO: 86907 - DNA, 25 bp, probe
atattggttagaatttggctttggg

SEQ ID NO: 86908 - DNA, 25 bp, probe
agatgttgaaactttgaatgtcctt

SEQ ID NO: 86909 - DNA, 25 bp, probe
cctctgatggctgaagaatgtagac

SEQ ID NO: 86910 - DNA, 25 bp, probe
tctgatggctgaagaatgtagacag

SEQ ID NO: 86911 - DNA, 25 bp, probe
tattggttagaatttggctttggga

SEQ ID NO: 86912 - DNA, 25 bp, probe
aaatgataaggctctgaaatggaat

SEQ ID NO: 86913 - DNA, 25 bp, probe
cacctctgatggctgaagaatgtag

SEQ ID NO: 86914 - DNA, 25 bp, probe
tgaagaatgtagacaggtataatga

SEQ ID NO: 86915 - DNA, 25 bp, probe
gatgttgaaactttgaatgtccttt

SEQ ID NO: 86916 - DNA, 25 bp, probe
atgtagacaggtataatgatactgc

SEQ ID NO: 86917 - DNA, 25 bp, probe
ttagaatttggctttgggagaagag

SEQ ID NO: 86918 - DNA, 25 bp, probe
tcagatgttgaaactttgaatgtcc

SEQ ID NO: 86919 - DNA, 25 bp, probe
ccttcttgacatttatcacctctga

SEQ ID NO: 86920 - DNA, 25 bp, probe
tccttcttgacatttatcacctctg

SEQ ID NO: 86921 - DNA, 25 bp, probe
ttccttcttgacatttatcacctct

SEQ ID NO: 86922 - DNA, 25 bp, probe
acctctgatggctgaagaatgtaga

SEQ ID NO: 86923 - DNA, 25 bp, probe
gttagaatttggctttgggagaaga

SEQ ID NO: 86924 - DNA, 25 bp, probe
tctcagatgttgaaactttgaatgt

SEQ ID NO: 86925 - DNA, 25 bp, probe
tttccttcttgacatttatcacctc

SEQ ID NO: 86926 - DNA, 25 bp, probe
ctcagatgttgaaactttgaatgtc

SEQ ID NO: 86927 - DNA, 25 bp, probe
attggttagaatttggctttgggag

SEQ ID NO: 86928 - DNA, 25 bp, probe
tagaatttggctttgggagaagaga

SEQ ID NO: 86929 - DNA, 25 bp, probe
aatgataaggctctgaaatggaata

SEQ ID NO: 86930 - DNA, 25 bp, probe
tcacctctgatggctgaagaatgta

SEQ ID NO: 86931 - DNA, 25 bp, probe
ctgatggctgaagaatgtagacagg

SEQ ID NO: 86932 - DNA, 25 bp, probe
atgataaggctctgaaatggaatat

SEQ ID NO: 86933 - DNA, 25 bp, probe
gaattgtatgtcatgttagcaaacg

SEQ ID NO: 86934 - DNA, 25 bp, probe
ttctcagatgttgaaactttgaatg

SEQ ID NO: 86935 - DNA, 25 bp, probe
ggttagaatttggctttgggagaag

SEQ ID NO: 86936 - DNA, 25 bp, probe
aattgtatgtcatgttagcaaacgc

SEQ ID NO: 86937 - DNA, 25 bp, probe
ttatcacctctgatggctgaagaat

SEQ ID NO: 86938 - DNA, 25 bp, probe
gaatttggctttgggagaagagatg

SEQ ID NO: 86939 - DNA, 25 bp, probe
agaatttggctttgggagaagagat

SEQ ID NO: 86940 - DNA, 25 bp, probe
tatattggttagaatttggctttgg

SEQ ID NO: 86941 - DNA, 25 bp, probe
atgagaattgtatgtcatgttagca

SEQ ID NO: 86942 - DNA, 25 bp, probe
ctgaagaatgtagacaggtataatg

SEQ ID NO: 86943 - DNA, 25 bp, probe
gtatatgtaagtatgtgaatgtgcg

SEQ ID NO: 86944 - DNA, 25 bp, probe
ttagacattcctcgtcagtattagg

SEQ ID NO: 86945 - DNA, 25 bp, probe
gcacttgagcttctacaatctgata

SEQ ID NO: 86946 - DNA, 25 bp, probe
aaaccttcccttatcttcctactct

SEQ ID NO: 86947 - DNA, 25 bp, probe
tgtatatgtaagtatgtgaatgtgc

SEQ ID NO: 86948 - DNA, 25 bp, probe
aaccttcccttatcttcctactctg

SEQ ID NO: 86949 - DNA, 25 bp, probe
taaaccttcccttatcttcctactc

SEQ ID NO: 86950 - DNA, 25 bp, probe
aaccgagcatttatttaaccaacta

SEQ ID NO: 86951 - DNA, 25 bp, probe
taaccgagcatttatttaaccaact

SEQ ID NO: 86952 - DNA, 25 bp, probe
gtaaccgagcatttatttaaccaac

SEQ ID NO: 86953 - DNA, 25 bp, probe
cacttgagcttctacaatctgatat

SEQ ID NO: 86954 - DNA, 25 bp, probe
agagttgaattagtcatgcagtcat

SEQ ID NO: 86955 - DNA, 25 bp, probe
accgagcatttatttaaccaactat

SEQ ID NO: 86956 - DNA, 25 bp, probe
cttctttaggtaaccgagcatttat

SEQ ID NO: 86957 - DNA, 25 bp, probe
gagttgaattagtcatgcagtcata

SEQ ID NO: 86958 - DNA, 25 bp, probe
tgaagtatgtttgaactctccagtg

SEQ ID NO: 86959 - DNA, 25 bp, probe
tctttaggtaaccgagcatttattt

SEQ ID NO: 86960 - DNA, 25 bp, probe
ttctttaggtaaccgagcatttatt

SEQ ID NO: 86961 - DNA, 25 bp, probe
ataaaccttcccttatcttcctact

SEQ ID NO: 86962 - DNA, 25 bp, probe
agttgaattagtcatgcagtcatat

SEQ ID NO: 86963 - DNA, 25 bp, probe
ctgaagtatgtttgaactctccagt

SEQ ID NO: 86964 - DNA, 25 bp, probe
ttgaattagtcatgcagtcatatgg

SEQ ID NO: 86965 - DNA, 25 bp, probe
ctgctgaagtatgtttgaactctcc

SEQ ID NO: 86966 - DNA, 25 bp, probe
tgaattagtcatgcagtcatatggc

SEQ ID NO: 86967 - DNA, 25 bp, probe
gaagtatgtttgaactctccagtgc

SEQ ID NO: 86968 - DNA, 25 bp, probe
ccttctttaggtaaccgagcattta

SEQ ID NO: 86969 - DNA, 25 bp, probe
tgcacttgagcttctacaatctgat

SEQ ID NO: 86970 - DNA, 25 bp, probe
atgaaattaagtgatccaaagctgc

SEQ ID NO: 86971 - DNA, 25 bp, probe
aataaaccttcccttatcttcctac

SEQ ID NO: 86972 - DNA, 25 bp, probe
gttgaattagtcatgcagtcatatg

SEQ ID NO: 86973 - DNA, 25 bp, probe
tgctgaagtatgtttgaactctcca

SEQ ID NO: 86974 - DNA, 25 bp, probe
gctgctgaagtatgtttgaactctc

SEQ ID NO: 86975 - DNA, 25 bp, probe
gaaattaagtgatccaaagctgctg

SEQ ID NO: 86976 - DNA, 25 bp, probe
ggtaaccgagcatttatttaaccaa

SEQ ID NO: 86977 - DNA, 25 bp, probe
gctgaagtatgtttgaactctccag

SEQ ID NO: 86978 - DNA, 25 bp, probe
aggtaaccgagcatttatttaacca

SEQ ID NO: 86979 - DNA, 25 bp, probe
aattaagtgatccaaagctgctgaa

SEQ ID NO: 86980 - DNA, 25 bp, probe
aaattaagtgatccaaagctgctga

SEQ ID NO: 86981 - DNA, 25 bp, probe
tgaaattaagtgatccaaagctgct

SEQ ID NO: 86982 - DNA, 25 bp, probe
caaatgaaattaagtgatccaaagc

SEQ ID NO: 86983 - DNA, 25 bp, probe
tttatttaaccaactataccactgc

SEQ ID NO: 86984 - DNA, 25 bp, probe
ccgagcatttatttaaccaactata

SEQ ID NO: 86985 - DNA, 25 bp, probe
ttaggtaaccgagcatttatttaac

SEQ ID NO: 86986 - DNA, 25 bp, probe
tgccacgtctgtttaaattatttga

SEQ ID NO: 86987 - DNA, 25 bp, probe
acacatactgtgatgaccgactcag

SEQ ID NO: 86988 - DNA, 25 bp, probe
cacacatactgtgatgaccgactca

SEQ ID NO: 86989 - DNA, 25 bp, probe
ctgtacaccaaacttccaggaggag

SEQ ID NO: 86990 - DNA, 25 bp, probe
gacctgtacaccaaacttccaggag

SEQ ID NO: 86991 - DNA, 25 bp, probe
cagacctgtacaccaaacttccagg

SEQ ID NO: 86992 - DNA, 25 bp, probe
agacctgtacaccaaacttccagga

SEQ ID NO: 86993 - DNA, 25 bp, probe
aatgactgagtggtatgcttacaat

SEQ ID NO: 86994 - DNA, 25 bp, probe
atgactgagtggtatgcttacaatt

SEQ ID NO: 86995 - DNA, 25 bp, probe
tactgttcttcagcaactattgtac

SEQ ID NO: 86996 - DNA, 25 bp, probe
ttactgttcttcagcaactattgta

SEQ ID NO: 86997 - DNA, 25 bp, probe
gtcatttacctacttctttcccact

SEQ ID NO: 86998 - DNA, 25 bp, probe
ctgtcatttacctacttctttccca

SEQ ID NO: 86999 - DNA, 25 bp, probe
tctgtcatttacctacttctttccc

SEQ ID NO: 87000 - DNA, 25 bp, probe
tgtcatttacctacttctttcccac

SEQ ID NO: 87001 - DNA, 25 bp, probe
gctgtctgtcatttacctacttctt

SEQ ID NO: 87002 - DNA, 25 bp, probe
aatattccattgctctgtagttcaa

SEQ ID NO: 87003 - DNA, 25 bp, probe
taaatgactgagtggtatgcttaca

SEQ ID NO: 87004 - DNA, 25 bp, probe
aaatgactgagtggtatgcttacaa

SEQ ID NO: 87005 - DNA, 25 bp, probe
gtctgtcatttacctacttctttcc

SEQ ID NO: 87006 - DNA, 25 bp, probe
tcatttacctacttctttcccacta

SEQ ID NO: 87007 - DNA, 25 bp, probe
cattgctctgtagttcaaatctgtt

SEQ ID NO: 87008 - DNA, 25 bp, probe
ttaaatgactgagtggtatgcttac

SEQ ID NO: 87009 - DNA, 25 bp, probe
ttccattgctctgtagttcaaatct

SEQ ID NO: 87010 - DNA, 25 bp, probe
attccattgctctgtagttcaaatc

SEQ ID NO: 87011 - DNA, 25 bp, probe
tgtctgtcatttacctacttctttc

SEQ ID NO: 87012 - DNA, 25 bp, probe
ctgtctgtcatttacctacttcttt

SEQ ID NO: 87013 - DNA, 25 bp, probe
aaatgctgtagtgttgaatacttgg

SEQ ID NO: 87014 - DNA, 25 bp, probe
ttgctctgtagttcaaatctgttag

SEQ ID NO: 87015 - DNA, 25 bp, probe
tccattgctctgtagttcaaatctg

SEQ ID NO: 87016 - DNA, 25 bp, probe
gactgatattcaaatgctgtagtgt

SEQ ID NO: 87017 - DNA, 25 bp, probe
caaatgctgtagtgttgaatacttg

SEQ ID NO: 87018 - DNA, 25 bp, probe
catttacctacttctttcccactaa

SEQ ID NO: 87019 - DNA, 25 bp, probe
ccattgctctgtagttcaaatctgt

SEQ ID NO: 87020 - DNA, 25 bp, probe
gatgtgacattctaaatcttgggag

SEQ ID NO: 87021 - DNA, 25 bp, probe
agactgatattcaaatgctgtagtg

SEQ ID NO: 87022 - DNA, 25 bp, probe
atgtgacattctaaatcttgggaga

SEQ ID NO: 87023 - DNA, 25 bp, probe
acacatgatatttcggaattggttt

SEQ ID NO: 87024 - DNA, 25 bp, probe
gtacacatgatatttcggaattggt

SEQ ID NO: 87025 - DNA, 25 bp, probe
actgatattcaaatgctgtagtgtt

SEQ ID NO: 87026 - DNA, 25 bp, probe
attgctctgtagttcaaatctgtta

SEQ ID NO: 87027 - DNA, 25 bp, probe
tattccattgctctgtagttcaaat

SEQ ID NO: 87028 - DNA, 25 bp, probe
atattccattgctctgtagttcaaa

SEQ ID NO: 87029 - DNA, 25 bp, probe
agtacacatgatatttcggaattgg

SEQ ID NO: 87030 - DNA, 25 bp, probe
ctgatattcaaatgctgtagtgttg

SEQ ID NO: 87031 - DNA, 25 bp, probe
tacacatgatatttcggaattggtt

SEQ ID NO: 87032 - DNA, 25 bp, probe
aagactgatattcaaatgctgtagt

SEQ ID NO: 87033 - DNA, 25 bp, probe
cattaataccatgacatcttgctta

SEQ ID NO: 87034 - DNA, 25 bp, probe
tttactgttcttcagcaactattgt

SEQ ID NO: 87035 - DNA, 25 bp, probe
aggaacatgagatgtgacattctaa

SEQ ID NO: 87036 - DNA, 25 bp, probe
gtaggaacatgagatgtgacattct

SEQ ID NO: 87037 - DNA, 25 bp, probe
tgtaggtctcactgtaacaactatt

SEQ ID NO: 87038 - DNA, 25 bp, probe
gtgtaggtctcactgtaacaactat

SEQ ID NO: 87039 - DNA, 25 bp, probe
tgtgtaggtctcactgtaacaacta

SEQ ID NO: 87040 - DNA, 25 bp, probe
atgtgtgtaggtctcactgtaacaa

SEQ ID NO: 87041 - DNA, 25 bp, probe
aatgtgtgtaggtctcactgtaaca

SEQ ID NO: 87042 - DNA, 25 bp, probe
attctgtaaatgtgtgtaggtctca

SEQ ID NO: 87043 - DNA, 25 bp, probe
caaaggaacaattaaactggctgat

SEQ ID NO: 87044 - DNA, 25 bp, probe
tatggagttgtgtataagggtagac

SEQ ID NO: 87045 - DNA, 25 bp, probe
aaggaacaattaaactggctgattt

SEQ ID NO: 87046 - DNA, 25 bp, probe
aaaggaacaattaaactggctgatt

SEQ ID NO: 87047 - DNA, 25 bp, probe
atgacaaaggaacaattaaactggc

SEQ ID NO: 87048 - DNA, 25 bp, probe
ctatggagttgtgtataagggtaga

SEQ ID NO: 87049 - DNA, 25 bp, probe
gtgtgtaggtctcactgtaacaact

SEQ ID NO: 87050 - DNA, 25 bp, probe
gacaaaggaacaattaaactggctg

SEQ ID NO: 87051 - DNA, 25 bp, probe
ctcttgattgatgacaaaggaacaa

SEQ ID NO: 87052 - DNA, 25 bp, probe
gatgacaaaggaacaattaaactgg

SEQ ID NO: 87053 - DNA, 25 bp, probe
tctcttgattgatgacaaaggaaca

SEQ ID NO: 87054 - DNA, 25 bp, probe
aattctgtaaatgtgtgtaggtctc

SEQ ID NO: 87055 - DNA, 25 bp, probe
atctcttgattgatgacaaaggaac

SEQ ID NO: 87056 - DNA, 25 bp, probe
acaaaggaacaattaaactggctga

SEQ ID NO: 87057 - DNA, 25 bp, probe
tgacaaaggaacaattaaactggct

SEQ ID NO: 87058 - DNA, 25 bp, probe
ggatctaccatacccattgactaac

SEQ ID NO: 87059 - DNA, 25 bp, probe
tgtgtgtaggtctcactgtaacaac

SEQ ID NO: 87060 - DNA, 25 bp, probe
gatctaccatacccattgactaact

SEQ ID NO: 87061 - DNA, 25 bp, probe
tctaccatacccattgactaactat

SEQ ID NO: 87062 - DNA, 25 bp, probe
atctaccatacccattgactaacta

SEQ ID NO: 87063 - DNA, 25 bp, probe
gtaggtctcactgtaacaactattt

SEQ ID NO: 87064 - DNA, 25 bp, probe
tgatgacaaaggaacaattaaactg

SEQ ID NO: 87065 - DNA, 25 bp, probe
atcagactagaaagtgaagaggaag

SEQ ID NO: 87066 - DNA, 25 bp, probe
atggagttgtgtataagggtagaca

SEQ ID NO: 87067 - DNA, 25 bp, probe
aatcagactagaaagtgaagaggaa

SEQ ID NO: 87068 - DNA, 25 bp, probe
aaatcagactagaaagtgaagagga

SEQ ID NO: 87069 - DNA, 25 bp, probe
catggattcttcacttgttaagagt

SEQ ID NO: 87070 - DNA, 25 bp, probe
acatggattcttcacttgttaagag

SEQ ID NO: 87071 - DNA, 25 bp, probe
atggattcttcacttgttaagagtt

SEQ ID NO: 87072 - DNA, 25 bp, probe
tcagactagaaagtgaagaggaagg

SEQ ID NO: 87073 - DNA, 25 bp, probe
taggtctcactgtaacaactatttg

SEQ ID NO: 87074 - DNA, 25 bp, probe
gtaaatgtgtgtaggtctcactgta

SEQ ID NO: 87075 - DNA, 25 bp, probe
cctatggagttgtgtataagggtag

SEQ ID NO: 87076 - DNA, 25 bp, probe
ttctgtaaatgtgtgtaggtctcac

SEQ ID NO: 87077 - DNA, 25 bp, probe
taaatgtgtgtaggtctcactgtaa

SEQ ID NO: 87078 - DNA, 25 bp, probe
aaatgtgtgtaggtctcactgtaac

SEQ ID NO: 87079 - DNA, 25 bp, probe
taattctgtaaatgtgtgtaggtct

SEQ ID NO: 87080 - DNA, 25 bp, probe
ctgtaaatgtgtgtaggtctcactg

SEQ ID NO: 87081 - DNA, 25 bp, probe
aagaactcattcataggaaggtgtt

SEQ ID NO: 87082 - DNA, 25 bp, probe
aagatgccttaatccattccttgag

SEQ ID NO: 87083 - DNA, 25 bp, probe
cagacgattgttcttagacctccta

SEQ ID NO: 87084 - DNA, 25 bp, probe
gattagcctgtattctcttcagtga

SEQ ID NO: 87085 - DNA, 25 bp, probe
agattagcctgtattctcttcagtg

SEQ ID NO: 87086 - DNA, 25 bp, probe
cagattagcctgtattctcttcagt

SEQ ID NO: 87087 - DNA, 25 bp, probe
tcagattagcctgtattctcttcag

SEQ ID NO: 87088 - DNA, 25 bp, probe
agacgattgttcttagacctcctaa

SEQ ID NO: 87089 - DNA, 25 bp, probe
atcagattagcctgtattctcttca

SEQ ID NO: 87090 - DNA, 25 bp, probe
agtatataggtgctggatgtatgta

SEQ ID NO: 87091 - DNA, 25 bp, probe
cagtatataggtgctggatgtatgt

SEQ ID NO: 87092 - DNA, 25 bp, probe
attagcctgtattctcttcagtgaa

SEQ ID NO: 87093 - DNA, 25 bp, probe
acagaccttagttgaaatgatagca

SEQ ID NO: 87094 - DNA, 25 bp, probe
aatcagattagcctgtattctcttc

SEQ ID NO: 87095 - DNA, 25 bp, probe
agaccttagttgaaatgatagcaga

SEQ ID NO: 87096 - DNA, 25 bp, probe
cagaccttagttgaaatgatagcag

SEQ ID NO: 87097 - DNA, 25 bp, probe
gacagaccttagttgaaatgatagc

SEQ ID NO: 87098 - DNA, 25 bp, probe
tagcctgtattctcttcagtgaatt

SEQ ID NO: 87099 - DNA, 25 bp, probe
ttagcctgtattctcttcagtgaat

SEQ ID NO: 87100 - DNA, 25 bp, probe
tgtcagacgattgttcttagacctc

SEQ ID NO: 87101 - DNA, 25 bp, probe
ctgtcagacgattgttcttagacct

SEQ ID NO: 87102 - DNA, 25 bp, probe
tcagacgattgttcttagacctcct

SEQ ID NO: 87103 - DNA, 25 bp, probe
gtatataggtgctggatgtatgtaa

SEQ ID NO: 87104 - DNA, 25 bp, probe
gagttgcacattaatcagattagcc

SEQ ID NO: 87105 - DNA, 25 bp, probe
actcattcataggaaggtgtttcat

SEQ ID NO: 87106 - DNA, 25 bp, probe
aaagaactcattcataggaaggtgt

SEQ ID NO: 87107 - DNA, 25 bp, probe
aattggagaagatttatgtcagcac

SEQ ID NO: 87108 - DNA, 25 bp, probe
agttgcacattaatcagattagcct

SEQ ID NO: 87109 - DNA, 25 bp, probe
aagatccagcctcatacctacatca

SEQ ID NO: 87110 - DNA, 25 bp, probe
gaccttagttgaaatgatagcagaa

SEQ ID NO: 87111 - DNA, 25 bp, probe
ggacagaccttagttgaaatgatag

SEQ ID NO: 87112 - DNA, 25 bp, probe
aaagatgccttaatccattccttga

SEQ ID NO: 87113 - DNA, 25 bp, probe
gcacattaatcagattagcctgtat

SEQ ID NO: 87114 - DNA, 25 bp, probe
aactcattcataggaaggtgtttca

SEQ ID NO: 87115 - DNA, 25 bp, probe
agaactcattcataggaaggtgttt

SEQ ID NO: 87116 - DNA, 25 bp, probe
gaactcattcataggaaggtgtttc

SEQ ID NO: 87117 - DNA, 25 bp, probe
agggattgctttcatctaattctgg

SEQ ID NO: 87118 - DNA, 25 bp, probe
tgagttgcacattaatcagattagc

SEQ ID NO: 87119 - DNA, 25 bp, probe
atccagcctcatacctacatcagac

SEQ ID NO: 87120 - DNA, 25 bp, probe
aagggattgctttcatctaattctg

SEQ ID NO: 87121 - DNA, 25 bp, probe
ctcattcataggaaggtgtttcatt

SEQ ID NO: 87122 - DNA, 25 bp, probe
cttaatccattccttgaggacagac

SEQ ID NO: 87123 - DNA, 25 bp, probe
agatgccttaatccattccttgagg

SEQ ID NO: 87124 - DNA, 25 bp, probe
tcattcataggaaggtgtttcattt

SEQ ID NO: 87125 - DNA, 25 bp, probe
aagttattgaacagcttggaacacc

SEQ ID NO: 87126 - DNA, 25 bp, probe
cagtggaataaagttattgaacagc

SEQ ID NO: 87127 - DNA, 25 bp, probe
aaagttattgaacagcttggaacac

SEQ ID NO: 87128 - DNA, 25 bp, probe
ttattgaacagcttggaacaccatg

SEQ ID NO: 87129 - DNA, 25 bp, probe
gttattgaacagcttggaacaccat

SEQ ID NO: 87130 - DNA, 25 bp, probe
taaagttattgaacagcttggaaca

SEQ ID NO: 87131 - DNA, 25 bp, probe
ggaataaagttattgaacagcttgg

SEQ ID NO: 87132 - DNA, 25 bp, probe
agtggaataaagttattgaacagct

SEQ ID NO: 87133 - DNA, 25 bp, probe
aaacagacctaaatatgctggatat

SEQ ID NO: 87134 - DNA, 25 bp, probe
acagacctaaatatgctggatatag

SEQ ID NO: 87135 - DNA, 25 bp, probe
ataaagttattgaacagcttggaac

SEQ ID NO: 87136 - DNA, 25 bp, probe
tggaataaagttattgaacagcttg

SEQ ID NO: 87137 - DNA, 25 bp, probe
gtggaataaagttattgaacagctt

SEQ ID NO: 87138 - DNA, 25 bp, probe
ctggatatagctttgagaaactctt

SEQ ID NO: 87139 - DNA, 25 bp, probe
tcagtggaataaagttattgaacag

SEQ ID NO: 87140 - DNA, 25 bp, probe
agttattgaacagcttggaacacca

SEQ ID NO: 87141 - DNA, 25 bp, probe
cagacctaaatatgctggatatagc

SEQ ID NO: 87142 - DNA, 25 bp, probe
gaataaagttattgaacagcttgga

SEQ ID NO: 87143 - DNA, 25 bp, probe
tattgaacagcttggaacaccatgt

SEQ ID NO: 87144 - DNA, 25 bp, probe
cgttgaaaacagacctaaatatgct

SEQ ID NO: 87145 - DNA, 25 bp, probe
aacagacctaaatatgctggatata

SEQ ID NO: 87146 - DNA, 25 bp, probe
aataaagttattgaacagcttggaa

SEQ ID NO: 87147 - DNA, 25 bp, probe
atgctggatatagctttgagaaact

SEQ ID NO: 87148 - DNA, 25 bp, probe
gctggatatagctttgagaaactct

SEQ ID NO: 87149 - DNA, 25 bp, probe
tgctggatatagctttgagaaactc

SEQ ID NO: 87150 - DNA, 25 bp, probe
atcagtggaataaagttattgaaca

SEQ ID NO: 87151 - DNA, 25 bp, probe
tgaaaacagacctaaatatgctgga

SEQ ID NO: 87152 - DNA, 25 bp, probe
ttgaaaacagacctaaatatgctgg

SEQ ID NO: 87153 - DNA, 25 bp, probe
tatgctggatatagctttgagaaac

SEQ ID NO: 87154 - DNA, 25 bp, probe
agacctaaatatgctggatatagct

SEQ ID NO: 87155 - DNA, 25 bp, probe
gaaaacagacctaaatatgctggat

SEQ ID NO: 87156 - DNA, 25 bp, probe
gcaaccaacagtaaggacttacgtt

SEQ ID NO: 87157 - DNA, 25 bp, probe
gttgaaaacagacctaaatatgctg

SEQ ID NO: 87158 - DNA, 25 bp, probe
gacctaaatatgctggatatagctt

SEQ ID NO: 87159 - DNA, 25 bp, probe
gatcagtggaataaagttattgaac

SEQ ID NO: 87160 - DNA, 25 bp, probe
atatgctggatatagctttgagaaa

SEQ ID NO: 87161 - DNA, 25 bp, probe
aatatgctggatatagctttgagaa

SEQ ID NO: 87162 - DNA, 25 bp, probe
aaatatgctggatatagctttgaga

SEQ ID NO: 87163 - DNA, 25 bp, probe
caaccaacagtaaggacttacgttg

SEQ ID NO: 87164 - DNA, 25 bp, probe
attgaacagcttggaacaccatgtc

SEQ ID NO: 87165 - DNA, 25 bp, probe
accaacagtaaggacttacgttgaa

SEQ ID NO: 87166 - DNA, 25 bp, probe
aaccaacagtaaggacttacgttga

SEQ ID NO: 87167 - DNA, 25 bp, probe
ctgcaaccaacagtaaggacttacg

SEQ ID NO: 87168 - DNA, 25 bp, probe
aaaacagacctaaatatgctggata

SEQ ID NO: 87169 - DNA, 25 bp, probe
tacagagcaggcattgaagatatag

SEQ ID NO: 87170 - DNA, 25 bp, probe
ctacagagcaggcattgaagatata

SEQ ID NO: 87171 - DNA, 25 bp, probe
tacacagatgatacagaagaagacc

SEQ ID NO: 87172 - DNA, 25 bp, probe
aactaatagactctcagccattcag

SEQ ID NO: 87173 - DNA, 25 bp, probe
caactaatagactctcagccattca

SEQ ID NO: 87174 - DNA, 25 bp, probe
ataagccaactaatagactctcagc

SEQ ID NO: 87175 - DNA, 25 bp, probe
cagagcaggcattgaagatatagaa

SEQ ID NO: 87176 - DNA, 25 bp, probe
ccaactaatagactctcagccattc

SEQ ID NO: 87177 - DNA, 25 bp, probe
acacagatgatacagaagaagacct

SEQ ID NO: 87178 - DNA, 25 bp, probe
cagatgatacagaagaagaccttga

SEQ ID NO: 87179 - DNA, 25 bp, probe
acagatgatacagaagaagaccttg

SEQ ID NO: 87180 - DNA, 25 bp, probe
cacagatgatacagaagaagacctt

SEQ ID NO: 87181 - DNA, 25 bp, probe
ttcttatgattcactacagagcagg

SEQ ID NO: 87182 - DNA, 25 bp, probe
acttcttatgattcactacagagca

SEQ ID NO: 87183 - DNA, 25 bp, probe
acagagcaggcattgaagatataga

SEQ ID NO: 87184 - DNA, 25 bp, probe
agatgatacagaagaagaccttgat

SEQ ID NO: 87185 - DNA, 25 bp, probe
cacttcttatgattcactacagagc

SEQ ID NO: 87186 - DNA, 25 bp, probe
tcagcagcatatcagatgacttatt

SEQ ID NO: 87187 - DNA, 25 bp, probe
ttcagcagcatatcagatgacttat

SEQ ID NO: 87188 - DNA, 25 bp, probe
attcagcagcatatcagatgactta

SEQ ID NO: 87189 - DNA, 25 bp, probe
gctctaacacttcttatgattcact

SEQ ID NO: 87190 - DNA, 25 bp, probe
cttcttatgattcactacagagcag

SEQ ID NO: 87191 - DNA, 25 bp, probe
atcaggagttggaacacaataattc

SEQ ID NO: 87192 - DNA, 25 bp, probe
aagcaagtacacagatgatacagaa

SEQ ID NO: 87193 - DNA, 25 bp, probe
actacagagcaggcattgaagatat

SEQ ID NO: 87194 - DNA, 25 bp, probe
gcaagtacacagatgatacagaaga

SEQ ID NO: 87195 - DNA, 25 bp, probe
agcaagtacacagatgatacagaag

SEQ ID NO: 87196 - DNA, 25 bp, probe
taagccaactaatagactctcagcc

SEQ ID NO: 87197 - DNA, 25 bp, probe
taagcaagtacacagatgatacaga

SEQ ID NO: 87198 - DNA, 25 bp, probe
cattcagcagcatatcagatgactt

SEQ ID NO: 87199 - DNA, 25 bp, probe
taatagactctcagccattcagcag

SEQ ID NO: 87200 - DNA, 25 bp, probe
ctaatagactctcagccattcagca

SEQ ID NO: 87201 - DNA, 25 bp, probe
actaatagactctcagccattcagc

SEQ ID NO: 87202 - DNA, 25 bp, probe
gtacacagatgatacagaagaagac

SEQ ID NO: 87203 - DNA, 25 bp, probe
agtacacagatgatacagaagaaga

SEQ ID NO: 87204 - DNA, 25 bp, probe
gatcaggagttggaacacaataatt

SEQ ID NO: 87205 - DNA, 25 bp, probe
tatgattcactacagagcaggcatt

SEQ ID NO: 87206 - DNA, 25 bp, probe
ttatgattcactacagagcaggcat

SEQ ID NO: 87207 - DNA, 25 bp, probe
aataagccaactaatagactctcag

SEQ ID NO: 87208 - DNA, 25 bp, probe
ataagcaagtacacagatgatacag

SEQ ID NO: 87209 - DNA, 25 bp, probe
acacttcttatgattcactacagag

SEQ ID NO: 87210 - DNA, 25 bp, probe
caagtacacagatgatacagaagaa

SEQ ID NO: 87211 - DNA, 25 bp, probe
gccaactaatagactctcagccatt

SEQ ID NO: 87212 - DNA, 25 bp, probe
cactacagagcaggcattgaagata

SEQ ID NO: 87213 - DNA, 25 bp, probe
gttagaagtagcaatgacaatgacc

SEQ ID NO: 87214 - DNA, 25 bp, probe
tagaagtagcaatgacaatgaccaa

SEQ ID NO: 87215 - DNA, 25 bp, probe
ttagaagtagcaatgacaatgacca

SEQ ID NO: 87216 - DNA, 25 bp, probe
ctgctacacctctgattacaattct

SEQ ID NO: 87217 - DNA, 25 bp, probe
gctacacctctgattacaattctga

SEQ ID NO: 87218 - DNA, 25 bp, probe
tgctacacctctgattacaattctg

SEQ ID NO: 87219 - DNA, 25 bp, probe
actgctacacctctgattacaattc

SEQ ID NO: 87220 - DNA, 25 bp, probe
gactgctacacctctgattacaatt

SEQ ID NO: 87221 - DNA, 25 bp, probe
agaagtagcaatgacaatgaccaag

SEQ ID NO: 87222 - DNA, 25 bp, probe
ttactatgtggatggtggtatcagg

SEQ ID NO: 87223 - DNA, 25 bp, probe
tacacctctgattacaattctgatg

SEQ ID NO: 87224 - DNA, 25 bp, probe
acacctctgattacaattctgatgt

SEQ ID NO: 87225 - DNA, 25 bp, probe
acctctgattacaattctgatgtga

SEQ ID NO: 87226 - DNA, 25 bp, probe
tgtgttagaagtagcaatgacaatg

SEQ ID NO: 87227 - DNA, 25 bp, probe
tgttagaagtagcaatgacaatgac

SEQ ID NO: 87228 - DNA, 25 bp, probe
gtgttagaagtagcaatgacaatga

SEQ ID NO: 87229 - DNA, 25 bp, probe
ctgtgttagaagtagcaatgacaat

SEQ ID NO: 87230 - DNA, 25 bp, probe
ctacacctctgattacaattctgat

SEQ ID NO: 87231 - DNA, 25 bp, probe
ggactgctacacctctgattacaat

SEQ ID NO: 87232 - DNA, 25 bp, probe
gaagtagcaatgacaatgaccaagg

SEQ ID NO: 87233 - DNA, 25 bp, probe
cctctgattacaattctgatgtgaa

SEQ ID NO: 87234 - DNA, 25 bp, probe
cacctctgattacaattctgatgtg

SEQ ID NO: 87235 - DNA, 25 bp, probe
tagattctgaccatgactcataagc

SEQ ID NO: 87236 - DNA, 25 bp, probe
ttcttagattctgaccatgactcat

SEQ ID NO: 87237 - DNA, 25 bp, probe
aagtagcaatgacaatgaccaagga

SEQ ID NO: 87238 - DNA, 25 bp, probe
tcttagattctgaccatgactcata

SEQ ID NO: 87239 - DNA, 25 bp, probe
tgatgagaacagtatgaagaaaggg

SEQ ID NO: 87240 - DNA, 25 bp, probe
tttactatgtggatggtggtatcag

SEQ ID NO: 87241 - DNA, 25 bp, probe
ctttactatgtggatggtggtatca

SEQ ID NO: 87242 - DNA, 25 bp, probe
tctttactatgtggatggtggtatc

SEQ ID NO: 87243 - DNA, 25 bp, probe
atcaacttactcataaagggacagg

SEQ ID NO: 87244 - DNA, 25 bp, probe
cctgtgtttgtaatttaatgctgct

SEQ ID NO: 87245 - DNA, 25 bp, probe
tcctgtgtttgtaatttaatgctgc

SEQ ID NO: 87246 - DNA, 25 bp, probe
aatgacaatgaccaaggactgctac

SEQ ID NO: 87247 - DNA, 25 bp, probe
caatgacaatgaccaaggactgcta

SEQ ID NO: 87248 - DNA, 25 bp, probe
tagcaatgacaatgaccaaggactg

SEQ ID NO: 87249 - DNA, 25 bp, probe
gtagcaatgacaatgaccaaggact

SEQ ID NO: 87250 - DNA, 25 bp, probe
agtagcaatgacaatgaccaaggac

SEQ ID NO: 87251 - DNA, 25 bp, probe
atctttactatgtggatggtggtat

SEQ ID NO: 87252 - DNA, 25 bp, probe
agattctgaccatgactcataagct

SEQ ID NO: 87253 - DNA, 25 bp, probe
cctagatttagcacaatggagagat

SEQ ID NO: 87254 - DNA, 25 bp, probe
aacttactcataaagggacaggcta

SEQ ID NO: 87255 - DNA, 25 bp, probe
ttagattctgaccatgactcataag

SEQ ID NO: 87256 - DNA, 25 bp, probe
cttagattctgaccatgactcataa

SEQ ID NO: 87257 - DNA, 25 bp, probe
ttgacatcagtgcctacttctcctc

SEQ ID NO: 87258 - DNA, 25 bp, probe
gacatcagtgcctacttctcctctg

SEQ ID NO: 87259 - DNA, 25 bp, probe
tgacatcagtgcctacttctcctct

SEQ ID NO: 87260 - DNA, 25 bp, probe
tttgacatcagtgcctacttctcct

SEQ ID NO: 87261 - DNA, 25 bp, probe
attttgacatcagtgcctacttctc

SEQ ID NO: 87262 - DNA, 25 bp, probe
gattttgacatcagtgcctacttct

SEQ ID NO: 87263 - DNA, 25 bp, probe
ttttgacatcagtgcctacttctcc

SEQ ID NO: 87264 - DNA, 25 bp, probe
tgattttgacatcagtgcctacttc

SEQ ID NO: 87265 - DNA, 25 bp, probe
cacgacctccctgattttgacatca

SEQ ID NO: 87266 - DNA, 25 bp, probe
gtctctacaccattcccacctcttc

SEQ ID NO: 87267 - DNA, 25 bp, probe
gaagtctctacaccattcccacctc

SEQ ID NO: 87268 - DNA, 25 bp, probe
agtctctacaccattcccacctctt

SEQ ID NO: 87269 - DNA, 25 bp, probe
aagtctctacaccattcccacctct

SEQ ID NO: 87270 - DNA, 25 bp, probe
ctgaagtctctacaccattcccacc

SEQ ID NO: 87271 - DNA, 25 bp, probe
cctgaagtctctacaccattcccac

SEQ ID NO: 87272 - DNA, 25 bp, probe
tgaagtctctacaccattcccacct

SEQ ID NO: 87273 - DNA, 25 bp, probe
tctctacaccattcccacctcttcc

SEQ ID NO: 87274 - DNA, 25 bp, probe
ttaaagagttccacaagcagattac

SEQ ID NO: 87275 - DNA, 25 bp, probe
cttaaagagttccacaagcagatta

SEQ ID NO: 87276 - DNA, 25 bp, probe
taaagagttccacaagcagattact

SEQ ID NO: 87277 - DNA, 25 bp, probe
tcttaaagagttccacaagcagatt

SEQ ID NO: 87278 - DNA, 25 bp, probe
ttcttaaagagttccacaagcagat

SEQ ID NO: 87279 - DNA, 25 bp, probe
gttcttaaagagttccacaagcaga

SEQ ID NO: 87280 - DNA, 25 bp, probe
gatgttcttaaagagttccacaagc

SEQ ID NO: 87281 - DNA, 25 bp, probe
atgttcttaaagagttccacaagca

SEQ ID NO: 87282 - DNA, 25 bp, probe
aaagagttccacaagcagattactg

SEQ ID NO: 87283 - DNA, 25 bp, probe
tgttcttaaagagttccacaagcag

SEQ ID NO: 87284 - DNA, 25 bp, probe
ggatgttcttaaagagttccacaag

SEQ ID NO: 87285 - DNA, 25 bp, probe
caagatccggtcatacatccacatc

SEQ ID NO: 87286 - DNA, 25 bp, probe
aagatccggtcatacatccacatca

SEQ ID NO: 87287 - DNA, 25 bp, probe
aaggatgggacttttgtcatttcaa

SEQ ID NO: 87288 - DNA, 25 bp, probe
agatccggtcatacatccacatcag

SEQ ID NO: 87289 - DNA, 25 bp, probe
aaaggatgggacttttgtcatttca

SEQ ID NO: 87290 - DNA, 25 bp, probe
ccaagatccggtcatacatccacat

SEQ ID NO: 87291 - DNA, 25 bp, probe
atgggacttttgtcatttcaaagac

SEQ ID NO: 87292 - DNA, 25 bp, probe
gatgggacttttgtcatttcaaaga

SEQ ID NO: 87293 - DNA, 25 bp, probe
ggatgggacttttgtcatttcaaag

SEQ ID NO: 87294 - DNA, 25 bp, probe
caaaggatgggacttttgtcatttc

SEQ ID NO: 87295 - DNA, 25 bp, probe
aggatgggacttttgtcatttcaaa

SEQ ID NO: 87296 - DNA, 25 bp, probe
gatccggtcatacatccacatcagg

SEQ ID NO: 87297 - DNA, 25 bp, probe
ctggatgttcttaaagagttccaca

SEQ ID NO: 87298 - DNA, 25 bp, probe
gctggatgttcttaaagagttccac

SEQ ID NO: 87299 - DNA, 25 bp, probe
agctggatgttcttaaagagttcca

SEQ ID NO: 87300 - DNA, 25 bp, probe
gggacttttgtcatttcaaagacat

SEQ ID NO: 87301 - DNA, 25 bp, probe
ggacttttgtcatttcaaagacatg

SEQ ID NO: 87302 - DNA, 25 bp, probe
tgggacttttgtcatttcaaagaca

SEQ ID NO: 87303 - DNA, 25 bp, probe
gacttttgtcatttcaaagacatga

SEQ ID NO: 87304 - DNA, 25 bp, probe
atatactgattccactgagtccaac

SEQ ID NO: 87305 - DNA, 25 bp, probe
catatactgattccactgagtccaa

SEQ ID NO: 87306 - DNA, 25 bp, probe
tatactgattccactgagtccaaca

SEQ ID NO: 87307 - DNA, 25 bp, probe
atactgattccactgagtccaacaa

SEQ ID NO: 87308 - DNA, 25 bp, probe
gcatatactgattccactgagtcca

SEQ ID NO: 87309 - DNA, 25 bp, probe
atcttcccaccacattcttaacatt

SEQ ID NO: 87310 - DNA, 25 bp, probe
aatcttcccaccacattcttaacat

SEQ ID NO: 87311 - DNA, 25 bp, probe
tcttcccaccacattcttaacattg

SEQ ID NO: 87312 - DNA, 25 bp, probe
caatcttcccaccacattcttaaca

SEQ ID NO: 87313 - DNA, 25 bp, probe
ctgcatatactgattccactgagtc

SEQ ID NO: 87314 - DNA, 25 bp, probe
acctgcatatactgattccactgag

SEQ ID NO: 87315 - DNA, 25 bp, probe
ccaatcttcccaccacattcttaac

SEQ ID NO: 87316 - DNA, 25 bp, probe
cacctgcatatactgattccactga

SEQ ID NO: 87317 - DNA, 25 bp, probe
accaatcttcccaccacattcttaa

SEQ ID NO: 87318 - DNA, 25 bp, probe
tgcatatactgattccactgagtcc

SEQ ID NO: 87319 - DNA, 25 bp, probe
cctgcatatactgattccactgagt

SEQ ID NO: 87320 - DNA, 25 bp, probe
tactgattccactgagtccaacaaa

SEQ ID NO: 87321 - DNA, 25 bp, probe
tcacctgcatatactgattccactg

SEQ ID NO: 87322 - DNA, 25 bp, probe
cttcccaccacattcttaacattgc

SEQ ID NO: 87323 - DNA, 25 bp, probe
ttgggaagctcaatgatacaaacat

SEQ ID NO: 87324 - DNA, 25 bp, probe
caccacattcttaacattgcagcaa

SEQ ID NO: 87325 - DNA, 25 bp, probe
atcacctgcatatactgattccact

SEQ ID NO: 87326 - DNA, 25 bp, probe
acattcttaacattgcagcaatcac

SEQ ID NO: 87327 - DNA, 25 bp, probe
cacattcttaacattgcagcaatca

SEQ ID NO: 87328 - DNA, 25 bp, probe
attcttaacattgcagcaatcacct

SEQ ID NO: 87329 - DNA, 25 bp, probe
cattcttaacattgcagcaatcacc

SEQ ID NO: 87330 - DNA, 25 bp, probe
ccacattcttaacattgcagcaatc

SEQ ID NO: 87331 - DNA, 25 bp, probe
gggaagctcaatgatacaaacattt

SEQ ID NO: 87332 - DNA, 25 bp, probe
aacagtatattgggaagctcaatga

SEQ ID NO: 87333 - DNA, 25 bp, probe
acagtatattgggaagctcaatgat

SEQ ID NO: 87334 - DNA, 25 bp, probe
tattgggaagctcaatgatacaaac

SEQ ID NO: 87335 - DNA, 25 bp, probe
aaacagtatattgggaagctcaatg

SEQ ID NO: 87336 - DNA, 25 bp, probe
accacattcttaacattgcagcaat

SEQ ID NO: 87337 - DNA, 25 bp, probe
ggaagctcaatgatacaaacatttg

SEQ ID NO: 87338 - DNA, 25 bp, probe
tgggaagctcaatgatacaaacatt

SEQ ID NO: 87339 - DNA, 25 bp, probe
attgggaagctcaatgatacaaaca

SEQ ID NO: 87340 - DNA, 25 bp, probe
ctcagccagtatccatatatgtgaa

SEQ ID NO: 87341 - DNA, 25 bp, probe
atattgggaagctcaatgatacaaa

SEQ ID NO: 87342 - DNA, 25 bp, probe
gtatattgggaagctcaatgataca

SEQ ID NO: 87343 - DNA, 25 bp, probe
ttcttaacattgcagcaatcacctg

SEQ ID NO: 87344 - DNA, 25 bp, probe
agtatattgggaagctcaatgatac

SEQ ID NO: 87345 - DNA, 25 bp, probe
cagtatattgggaagctcaatgata

SEQ ID NO: 87346 - DNA, 25 bp, probe
ctgattccactgagtccaacaaaac

SEQ ID NO: 87347 - DNA, 25 bp, probe
ttcccaccacattcttaacattgca

SEQ ID NO: 87348 - DNA, 25 bp, probe
ctaccaacttcaaccacctagtaca

SEQ ID NO: 87349 - DNA, 25 bp, probe
taccaacttcaaccacctagtacac

SEQ ID NO: 87350 - DNA, 25 bp, probe
cctaccaacttcaaccacctagtac

SEQ ID NO: 87351 - DNA, 25 bp, probe
atccctgaaatctgatcttggtatt

SEQ ID NO: 87352 - DNA, 25 bp, probe
tccctgaaatctgatcttggtattt

SEQ ID NO: 87353 - DNA, 25 bp, probe
gcctaccaacttcaaccacctagta

SEQ ID NO: 87354 - DNA, 25 bp, probe
gatccctgaaatctgatcttggtat

SEQ ID NO: 87355 - DNA, 25 bp, probe
accaacttcaaccacctagtacacg

SEQ ID NO: 87356 - DNA, 25 bp, probe
ccctgaaatctgatcttggtatttt

SEQ ID NO: 87357 - DNA, 25 bp, probe
ccaacttcaaccacctagtacacgt

SEQ ID NO: 87358 - DNA, 25 bp, probe
cagtgaagaggaaaccctggacatc

SEQ ID NO: 87359 - DNA, 25 bp, probe
ctttggatccctgaaatctgatctt

SEQ ID NO: 87360 - DNA, 25 bp, probe
tttggatccctgaaatctgatcttg

SEQ ID NO: 87361 - DNA, 25 bp, probe
ggatccctgaaatctgatcttggta

SEQ ID NO: 87362 - DNA, 25 bp, probe
cctttggatccctgaaatctgatct

SEQ ID NO: 87363 - DNA, 25 bp, probe
ttggatccctgaaatctgatcttgg

SEQ ID NO: 87364 - DNA, 25 bp, probe
ccctttggatccctgaaatctgatc

SEQ ID NO: 87365 - DNA, 25 bp, probe
tggatccctgaaatctgatcttggt

SEQ ID NO: 87366 - DNA, 25 bp, probe
cccctttggatccctgaaatctgat

SEQ ID NO: 87367 - DNA, 25 bp, probe
aacctccctaatgcaggtctcagaa

SEQ ID NO: 87368 - DNA, 25 bp, probe
gacacaatcctagtcagctttgaac

SEQ ID NO: 87369 - DNA, 25 bp, probe
acacaatcctagtcagctttgaacg

SEQ ID NO: 87370 - DNA, 25 bp, probe
ggacacaatcctagtcagctttgaa

SEQ ID NO: 87371 - DNA, 25 bp, probe
ctttgaacgctgtgtgaggattgtc

SEQ ID NO: 87372 - DNA, 25 bp, probe
ctgtgtgaggattgtcaacatgcag

SEQ ID NO: 87373 - DNA, 25 bp, probe
agtttctgctgctgaagaacttctc

SEQ ID NO: 87374 - DNA, 25 bp, probe
ttctgctgctgaagaacttctccag

SEQ ID NO: 87375 - DNA, 25 bp, probe
cacaatcctagtcagctttgaacgc

SEQ ID NO: 87376 - DNA, 25 bp, probe
gtttctgctgctgaagaacttctcc

SEQ ID NO: 87377 - DNA, 25 bp, probe
gggacacaatcctagtcagctttga

SEQ ID NO: 87378 - DNA, 25 bp, probe
agggacacaatcctagtcagctttg

SEQ ID NO: 87379 - DNA, 25 bp, probe
cagggacacaatcctagtcagcttt

SEQ ID NO: 87380 - DNA, 25 bp, probe
tttctgctgctgaagaacttctcca

SEQ ID NO: 87381 - DNA, 25 bp, probe
ctttgatttccccatcgagactgtg

SEQ ID NO: 87382 - DNA, 25 bp, probe
acaatcctagtcagctttgaacgct

SEQ ID NO: 87383 - DNA, 25 bp, probe
cagaagtttctgctgctgaagaact

SEQ ID NO: 87384 - DNA, 25 bp, probe
gacctttgatttccccatcgagact

SEQ ID NO: 87385 - DNA, 25 bp, probe
ctgacctttgatttccccatcgaga

SEQ ID NO: 87386 - DNA, 25 bp, probe
cctttgatttccccatcgagactgt

SEQ ID NO: 87387 - DNA, 25 bp, probe
acctttgatttccccatcgagactg

SEQ ID NO: 87388 - DNA, 25 bp, probe
tgacctttgatttccccatcgagac

SEQ ID NO: 87389 - DNA, 25 bp, probe
ctgagctgacctttgatttccccat

SEQ ID NO: 87390 - DNA, 25 bp, probe
aagtttctgctgctgaagaacttct

SEQ ID NO: 87391 - DNA, 25 bp, probe
agaagtttctgctgctgaagaactt

SEQ ID NO: 87392 - DNA, 25 bp, probe
tgagctgacctttgatttccccatc

SEQ ID NO: 87393 - DNA, 25 bp, probe
tttgatttccccatcgagactgtgg

SEQ ID NO: 87394 - DNA, 25 bp, probe
cagcacacagatgaagaaggttatg

SEQ ID NO: 87395 - DNA, 25 bp, probe
gatgaagtcctgtactgctatgaag

SEQ ID NO: 87396 - DNA, 25 bp, probe
acagcacacagatgaagaaggttat

SEQ ID NO: 87397 - DNA, 25 bp, probe
cacacagatgaagaaggttatgtta

SEQ ID NO: 87398 - DNA, 25 bp, probe
gcacacagatgaagaaggttatgtt

SEQ ID NO: 87399 - DNA, 25 bp, probe
atgaagtcctgtactgctatgaagt

SEQ ID NO: 87400 - DNA, 25 bp, probe
aacagcacacagatgaagaaggtta

SEQ ID NO: 87401 - DNA, 25 bp, probe
acacagatgaagaaggttatgttaa

SEQ ID NO: 87402 - DNA, 25 bp, probe
agcacacagatgaagaaggttatgt

SEQ ID NO: 87403 - DNA, 25 bp, probe
tgaagtcctgtactgctatgaagtg

SEQ ID NO: 87404 - DNA, 25 bp, probe
ggatgaagtcctgtactgctatgaa

SEQ ID NO: 87405 - DNA, 25 bp, probe
gaagtcctgtactgctatgaagtgc

SEQ ID NO: 87406 - DNA, 25 bp, probe
caacagcacacagatgaagaaggtt

SEQ ID NO: 87407 - DNA, 25 bp, probe
atttaaacacaatcatggtgcctac

SEQ ID NO: 87408 - DNA, 25 bp, probe
gtatttaaacacaatcatggtgcct

SEQ ID NO: 87409 - DNA, 25 bp, probe
agtatttaaacacaatcatggtgcc

SEQ ID NO: 87410 - DNA, 25 bp, probe
cagtatttaaacacaatcatggtgc

SEQ ID NO: 87411 - DNA, 25 bp, probe
tatttaaacacaatcatggtgccta

SEQ ID NO: 87412 - DNA, 25 bp, probe
cacagatgaagaaggttatgttaac

SEQ ID NO: 87413 - DNA, 25 bp, probe
caacgacaaagaaaaggaagaattt

SEQ ID NO: 87414 - DNA, 25 bp, probe
gcaacgacaaagaaaaggaagaatt

SEQ ID NO: 87415 - DNA, 25 bp, probe
aacagtatttaaacacaatcatggt

SEQ ID NO: 87416 - DNA, 25 bp, probe
acagtatttaaacacaatcatggtg

SEQ ID NO: 87417 - DNA, 25 bp, probe
tttaaacacaatcatggtgcctacc

SEQ ID NO: 87418 - DNA, 25 bp, probe
ggcaacgacaaagaaaaggaagaat

SEQ ID NO: 87419 - DNA, 25 bp, probe
ctaccagttcttcagagaagcgttg

SEQ ID NO: 87420 - DNA, 25 bp, probe
aaaacattgcctccaaaatagccaa

SEQ ID NO: 87421 - DNA, 25 bp, probe
gggatgaagtcctgtactgctatga

SEQ ID NO: 87422 - DNA, 25 bp, probe
ggaagttcctcatacagatcctgca

SEQ ID NO: 87423 - DNA, 25 bp, probe
aaacattgcctccaaaatagccaac

SEQ ID NO: 87424 - DNA, 25 bp, probe
caaagaaaaggaagaatttcgggag

SEQ ID NO: 87425 - DNA, 25 bp, probe
gacaaagaaaaggaagaatttcggg

SEQ ID NO: 87426 - DNA, 25 bp, probe
acaaagaaaaggaagaatttcggga

SEQ ID NO: 87427 - DNA, 25 bp, probe
acgacaaagaaaaggaagaatttcg

SEQ ID NO: 87428 - DNA, 25 bp, probe
aacgacaaagaaaaggaagaatttc

SEQ ID NO: 87429 - DNA, 25 bp, probe
aaagaaaaggaagaatttcgggagg

SEQ ID NO: 87430 - DNA, 25 bp, probe
cgacaaagaaaaggaagaatttcgg

SEQ ID NO: 87431 - DNA, 25 bp, probe
taacagtatttaaacacaatcatgg

SEQ ID NO: 87432 - DNA, 25 bp, probe
aagtcctgtactgctatgaagtgca

SEQ ID NO: 87433 - DNA, 25 bp, probe
cctaccagttcttcagagaagcgtt

SEQ ID NO: 87434 - DNA, 25 bp, probe
ctatgaagtgcagttggaaagcaag

SEQ ID NO: 87435 - DNA, 25 bp, probe
ggtgcctaccagttcttcagagaag

SEQ ID NO: 87436 - DNA, 25 bp, probe
ctctctcaacggggttcgatttaag

SEQ ID NO: 87437 - DNA, 25 bp, probe
gggaagttcctcatacagatcctgc

SEQ ID NO: 87438 - DNA, 25 bp, probe
atcttcgtcaggatatgcttgttct

SEQ ID NO: 87439 - DNA, 25 bp, probe
gatcttcgtcaggatatgcttgttc

SEQ ID NO: 87440 - DNA, 25 bp, probe
gatgatcttcgtcaggatatgcttg

SEQ ID NO: 87441 - DNA, 25 bp, probe
agatgatcttcgtcaggatatgctt

SEQ ID NO: 87442 - DNA, 25 bp, probe
tggagatgatcttcgtcaggatatg

SEQ ID NO: 87443 - DNA, 25 bp, probe
ctggagatgatcttcgtcaggatat

SEQ ID NO: 87444 - DNA, 25 bp, probe
gagatgatcttcgtcaggatatgct

SEQ ID NO: 87445 - DNA, 25 bp, probe
cagcttattcaagtgatggacaata

SEQ ID NO: 87446 - DNA, 25 bp, probe
gctggctcacattatttatttcaca

SEQ ID NO: 87447 - DNA, 25 bp, probe
aggtcagtatagattagaaagtgcg

SEQ ID NO: 87448 - DNA, 25 bp, probe
atgatcttcgtcaggatatgcttgt

SEQ ID NO: 87449 - DNA, 25 bp, probe
atattatcagaaagcacagccaact

SEQ ID NO: 87450 - DNA, 25 bp, probe
tggctcacattatttatttcacaca

SEQ ID NO: 87451 - DNA, 25 bp, probe
atactttattacagagggtgggaaa

SEQ ID NO: 87452 - DNA, 25 bp, probe
tgatcttcgtcaggatatgcttgtt

SEQ ID NO: 87453 - DNA, 25 bp, probe
atgctttgccattgaagattacttt

SEQ ID NO: 87454 - DNA, 25 bp, probe
cgctggctcacattatttatttcac

SEQ ID NO: 87455 - DNA, 25 bp, probe
tgctttgccattgaagattactttc

SEQ ID NO: 87456 - DNA, 25 bp, probe
tggaatactttattacagagggtgg

SEQ ID NO: 87457 - DNA, 25 bp, probe
ggaatactttattacagagggtggg

SEQ ID NO: 87458 - DNA, 25 bp, probe
ctggctcacattatttatttcacac

SEQ ID NO: 87459 - DNA, 25 bp, probe
gaatactttattacagagggtggga

SEQ ID NO: 87460 - DNA, 25 bp, probe
agcttattcaagtgatggacaatat

SEQ ID NO: 87461 - DNA, 25 bp, probe
aatactttattacagagggtgggaa

SEQ ID NO: 87462 - DNA, 25 bp, probe
gcagcttattcaagtgatggacaat

SEQ ID NO: 87463 - DNA, 25 bp, probe
ttactttcatcaatgctaatccgat

SEQ ID NO: 87464 - DNA, 25 bp, probe
taataggctacgaaactttctccag

SEQ ID NO: 87465 - DNA, 25 bp, probe
gtaataggctacgaaactttctcca

SEQ ID NO: 87466 - DNA, 25 bp, probe
tcttcgtcaggatatgcttgttctg

SEQ ID NO: 87467 - DNA, 25 bp, probe
gcttattcaagtgatggacaatatt

SEQ ID NO: 87468 - DNA, 25 bp, probe
ggagatgatcttcgtcaggatatgc

SEQ ID NO: 87469 - DNA, 25 bp, probe
attactttcatcaatgctaatccga

SEQ ID NO: 87470 - DNA, 25 bp, probe
ggctcacattatttatttcacacat

SEQ ID NO: 87471 - DNA, 25 bp, probe
agtaataggctacgaaactttctcc

SEQ ID NO: 87472 - DNA, 25 bp, probe
aaggtcagtatagattagaaagtgc

SEQ ID NO: 87473 - DNA, 25 bp, probe
gaactttgctgtcgtgcttataata

SEQ ID NO: 87474 - DNA, 25 bp, probe
aactttgctgtcgtgcttataatat

SEQ ID NO: 87475 - DNA, 25 bp, probe
aatattatcagaaagcacagccaac

SEQ ID NO: 87476 - DNA, 25 bp, probe
atggaatactttattacagagggtg

SEQ ID NO: 87477 - DNA, 25 bp, probe
agaccaaggtcagtatagattagaa

SEQ ID NO: 87478 - DNA, 25 bp, probe
aagaccaaggtcagtatagattaga

SEQ ID NO: 87479 - DNA, 25 bp, probe
acacattcactagtaataggctacg

SEQ ID NO: 87480 - DNA, 25 bp, probe
cacattcactagtaataggctacga

SEQ ID NO: 87481 - DNA, 25 bp, probe
ttcacacattcactagtaataggct

SEQ ID NO: 87482 - DNA, 25 bp, probe
agtattcttagttgttcagttgcca

SEQ ID NO: 87483 - DNA, 25 bp, probe
tagtattcttagttgttcagttgcc

SEQ ID NO: 87484 - DNA, 25 bp, probe
gtattcttagttgttcagttgccaa

SEQ ID NO: 87485 - DNA, 25 bp, probe
tattcttagttgttcagttgccaag

SEQ ID NO: 87486 - DNA, 25 bp, probe
cttcattccaatctattgcttcacc

SEQ ID NO: 87487 - DNA, 25 bp, probe
tcattccaatctattgcttcaccat

SEQ ID NO: 87488 - DNA, 25 bp, probe
gtccttgagtgctcttgctattaac

SEQ ID NO: 87489 - DNA, 25 bp, probe
ttcattccaatctattgcttcacca

SEQ ID NO: 87490 - DNA, 25 bp, probe
gcttcattccaatctattgcttcac

SEQ ID NO: 87491 - DNA, 25 bp, probe
gtgcttcattccaatctattgcttc

SEQ ID NO: 87492 - DNA, 25 bp, probe
tgcttcattccaatctattgcttca

SEQ ID NO: 87493 - DNA, 25 bp, probe
tgtccttgagtgctcttgctattaa

SEQ ID NO: 87494 - DNA, 25 bp, probe
ttgtccttgagtgctcttgctatta

SEQ ID NO: 87495 - DNA, 25 bp, probe
attcttagttgttcagttgccaagg

SEQ ID NO: 87496 - DNA, 25 bp, probe
tgtgcttcattccaatctattgctt

SEQ ID NO: 87497 - DNA, 25 bp, probe
ttgtgcttcattccaatctattgct

SEQ ID NO: 87498 - DNA, 25 bp, probe
cattccaatctattgcttcaccatg

SEQ ID NO: 87499 - DNA, 25 bp, probe
ttagtattcttagttgttcagttgc

SEQ ID NO: 87500 - DNA, 25 bp, probe
tcttagttgttcagttgccaaggat

SEQ ID NO: 87501 - DNA, 25 bp, probe
agaagttagggtttaggcatcattt

SEQ ID NO: 87502 - DNA, 25 bp, probe
agttagaagttagggtttaggcatc

SEQ ID NO: 87503 - DNA, 25 bp, probe
gagttagaagttagggtttaggcat

SEQ ID NO: 87504 - DNA, 25 bp, probe
gttagaagttagggtttaggcatca

SEQ ID NO: 87505 - DNA, 25 bp, probe
ttcttagttgttcagttgccaagga

SEQ ID NO: 87506 - DNA, 25 bp, probe
tagaagttagggtttaggcatcatt

SEQ ID NO: 87507 - DNA, 25 bp, probe
ttagaagttagggtttaggcatcat

SEQ ID NO: 87508 - DNA, 25 bp, probe
ccataggagttagaagttagggttt

SEQ ID NO: 87509 - DNA, 25 bp, probe
cttagttgttcagttgccaaggatc

SEQ ID NO: 87510 - DNA, 25 bp, probe
tccttgagtgctcttgctattaacg

SEQ ID NO: 87511 - DNA, 25 bp, probe
attgtgcttcattccaatctattgc

SEQ ID NO: 87512 - DNA, 25 bp, probe
taggagttagaagttagggtttagg

SEQ ID NO: 87513 - DNA, 25 bp, probe
cttgtccttgagtgctcttgctatt

SEQ ID NO: 87514 - DNA, 25 bp, probe
aggagttagaagttagggtttaggc

SEQ ID NO: 87515 - DNA, 25 bp, probe
tttatgatttgtctctgtcaccctt

SEQ ID NO: 87516 - DNA, 25 bp, probe
ttatgatttgtctctgtcacccttg

SEQ ID NO: 87517 - DNA, 25 bp, probe
ggagttagaagttagggtttaggca

SEQ ID NO: 87518 - DNA, 25 bp, probe
tatgatttgtctctgtcacccttgt

SEQ ID NO: 87519 - DNA, 25 bp, probe
cttatgaggcaggtgagagatgttt

SEQ ID NO: 87520 - DNA, 25 bp, probe
tttggtcatagtgggtggatttgtt

SEQ ID NO: 87521 - DNA, 25 bp, probe
ttatgaggcaggtgagagatgtttg

SEQ ID NO: 87522 - DNA, 25 bp, probe
tcaggttatatccaatagtagagtt

SEQ ID NO: 87523 - DNA, 25 bp, probe
ttcaggttatatccaatagtagagt

SEQ ID NO: 87524 - DNA, 25 bp, probe
aggcaggtgagagatgtttgaattt

SEQ ID NO: 87525 - DNA, 25 bp, probe
caggttatatccaatagtagagttg

SEQ ID NO: 87526 - DNA, 25 bp, probe
ttcagtagtgagcagcatctagttt

SEQ ID NO: 87527 - DNA, 25 bp, probe
tttcagtagtgagcagcatctagtt

SEQ ID NO: 87528 - DNA, 25 bp, probe
tcagtagtgagcagcatctagtttc

SEQ ID NO: 87529 - DNA, 25 bp, probe
tgtgagtgtgtgtgtgtgtctgtag

SEQ ID NO: 87530 - DNA, 25 bp, probe
cagtagtgagcagcatctagtttcc

SEQ ID NO: 87531 - DNA, 25 bp, probe
gtgtgagtgtgtgtgtgtgtctgta

SEQ ID NO: 87532 - DNA, 25 bp, probe
ctgagagcgaattgtgtggagaact

SEQ ID NO: 87533 - DNA, 25 bp, probe
tcttttcagtagtgagcagcatcta

SEQ ID NO: 87534 - DNA, 25 bp, probe
cttttcagtagtgagcagcatctag

SEQ ID NO: 87535 - DNA, 25 bp, probe
tctgagagcgaattgtgtggagaac

SEQ ID NO: 87536 - DNA, 25 bp, probe
gtagtgagcagcatctagtttccct

SEQ ID NO: 87537 - DNA, 25 bp, probe
agtagtgagcagcatctagtttccc

SEQ ID NO: 87538 - DNA, 25 bp, probe
ttttcagtagtgagcagcatctagt

SEQ ID NO: 87539 - DNA, 25 bp, probe
agagcgaattgtgtggagaactcag

SEQ ID NO: 87540 - DNA, 25 bp, probe
gagagcgaattgtgtggagaactca

SEQ ID NO: 87541 - DNA, 25 bp, probe
tgagagcgaattgtgtggagaactc

SEQ ID NO: 87542 - DNA, 25 bp, probe
ctctgagagcgaattgtgtggagaa

SEQ ID NO: 87543 - DNA, 25 bp, probe
gagcgaattgtgtggagaactcagt

SEQ ID NO: 87544 - DNA, 25 bp, probe
tagtgagcagcatctagtttccctg

SEQ ID NO: 87545 - DNA, 25 bp, probe
ctcttttcagtagtgagcagcatct

SEQ ID NO: 87546 - DNA, 25 bp, probe
cctcttttcagtagtgagcagcatc

SEQ ID NO: 87547 - DNA, 25 bp, probe
cacttacctgcttgagctttctgtg

SEQ ID NO: 87548 - DNA, 25 bp, probe
ctcgaactggttgtagtgggaagtc

SEQ ID NO: 87549 - DNA, 25 bp, probe
gcctcttttcagtagtgagcagcat

SEQ ID NO: 87550 - DNA, 25 bp, probe
ttacctgcttgagctttctgtgcat

SEQ ID NO: 87551 - DNA, 25 bp, probe
tgccataatgacctattgtgtaaga

SEQ ID NO: 87552 - DNA, 25 bp, probe
attctggatacaactacctggcata

SEQ ID NO: 87553 - DNA, 25 bp, probe
tattctggatacaactacctggcat

SEQ ID NO: 87554 - DNA, 25 bp, probe
ttgccataatgacctattgtgtaag

SEQ ID NO: 87555 - DNA, 25 bp, probe
ttctggatacaactacctggcatat

SEQ ID NO: 87556 - DNA, 25 bp, probe
atattctggatacaactacctggca

SEQ ID NO: 87557 - DNA, 25 bp, probe
gccataatgacctattgtgtaagaa

SEQ ID NO: 87558 - DNA, 25 bp, probe
cagatagagaactacagagtcagtg

SEQ ID NO: 87559 - DNA, 25 bp, probe
tccagatagagaactacagagtcag

SEQ ID NO: 87560 - DNA, 25 bp, probe
atccagatagagaactacagagtca

SEQ ID NO: 87561 - DNA, 25 bp, probe
agatagagaactacagagtcagtgg

SEQ ID NO: 87562 - DNA, 25 bp, probe
ccagatagagaactacagagtcagt

SEQ ID NO: 87563 - DNA, 25 bp, probe
cattctagttgttcagtgtaacctt

SEQ ID NO: 87564 - DNA, 25 bp, probe
ttctctatgtagtctggcagtataa

SEQ ID NO: 87565 - DNA, 25 bp, probe
gcaggtgtgagtgatgtagactata

SEQ ID NO: 87566 - DNA, 25 bp, probe
acattctagttgttcagtgtaacct

SEQ ID NO: 87567 - DNA, 25 bp, probe
aatattctggatacaactacctggc

SEQ ID NO: 87568 - DNA, 25 bp, probe
gtatccagatagagaactacagagt

SEQ ID NO: 87569 - DNA, 25 bp, probe
tactcttcattcaagtcaatcagtt

SEQ ID NO: 87570 - DNA, 25 bp, probe
tatacctactgctatccgtatgtgg

SEQ ID NO: 87571 - DNA, 25 bp, probe
tatccagatagagaactacagagtc

SEQ ID NO: 87572 - DNA, 25 bp, probe
atatacctactgctatccgtatgtg

SEQ ID NO: 87573 - DNA, 25 bp, probe
gatagagaactacagagtcagtggc

SEQ ID NO: 87574 - DNA, 25 bp, probe
aatacattcactgtctctgttggtg

SEQ ID NO: 87575 - DNA, 25 bp, probe
atactcttcattcaagtcaatcagt

SEQ ID NO: 87576 - DNA, 25 bp, probe
tgttggtggtacatcttgttgaatt

SEQ ID NO: 87577 - DNA, 25 bp, probe
atagagaactacagagtcagtggct

SEQ ID NO: 87578 - DNA, 25 bp, probe
ctgttggtggtacatcttgttgaat

SEQ ID NO: 87579 - DNA, 25 bp, probe
aatatacctactgctatccgtatgt

SEQ ID NO: 87580 - DNA, 25 bp, probe
aagtgcctgagtaaagaagagattt

SEQ ID NO: 87581 - DNA, 25 bp, probe
aaagtgcctgagtaaagaagagatt

SEQ ID NO: 87582 - DNA, 25 bp, probe
aatccctgtttctctatgtagtctg

SEQ ID NO: 87583 - DNA, 25 bp, probe
attgagtttgatttccttgggtatg

SEQ ID NO: 87584 - DNA, 25 bp, probe
tgattcaagccaaatactccactat

SEQ ID NO: 87585 - DNA, 25 bp, probe
gtatgtggtggattagaaatgtgtt

SEQ ID NO: 87586 - DNA, 25 bp, probe
gtttctctatgtagtctggcagtat

SEQ ID NO: 87587 - DNA, 25 bp, probe
atccctgtttctctatgtagtctgg

SEQ ID NO: 87588 - DNA, 25 bp, probe
ctttgccataatgacctattgtgta

SEQ ID NO: 87589 - DNA, 25 bp, probe
caggtgtgagtgatgtagactatag

SEQ ID NO: 87590 - DNA, 25 bp, probe
cgtatgtggtggattagaaatgtgt

SEQ ID NO: 87591 - DNA, 25 bp, probe
aaatccctgtttctctatgtagtct

SEQ ID NO: 87592 - DNA, 25 bp, probe
tgtttctctatgtagtctggcagta

SEQ ID NO: 87593 - DNA, 25 bp, probe
aagaaatatacctactgctatccgt

SEQ ID NO: 87594 - DNA, 25 bp, probe
aattattctccagtagctgagcaat

SEQ ID NO: 87595 - DNA, 25 bp, probe
tgtagtggattctgcatatcatctt

SEQ ID NO: 87596 - DNA, 25 bp, probe
ttgtagtggattctgcatatcatct

SEQ ID NO: 87597 - DNA, 25 bp, probe
ccttgtagtggattctgcatatcat

SEQ ID NO: 87598 - DNA, 25 bp, probe
cttgtagtggattctgcatatcatc

SEQ ID NO: 87599 - DNA, 25 bp, probe
catactccttgaaatgtgactcttc

SEQ ID NO: 87600 - DNA, 25 bp, probe
accttgtagtggattctgcatatca

SEQ ID NO: 87601 - DNA, 25 bp, probe
tctcgtctgacatttgtttggaatc

SEQ ID NO: 87602 - DNA, 25 bp, probe
ctctcgtctgacatttgtttggaat

SEQ ID NO: 87603 - DNA, 25 bp, probe
caccttgtagtggattctgcatatc

SEQ ID NO: 87604 - DNA, 25 bp, probe
ctgcatatcatctttcccacctaaa

SEQ ID NO: 87605 - DNA, 25 bp, probe
ctcgtctgacatttgtttggaatcg

SEQ ID NO: 87606 - DNA, 25 bp, probe
tctgcatatcatctttcccacctaa

SEQ ID NO: 87607 - DNA, 25 bp, probe
ttctgcatatcatctttcccaccta

SEQ ID NO: 87608 - DNA, 25 bp, probe
gtagtggattctgcatatcatcttt

SEQ ID NO: 87609 - DNA, 25 bp, probe
tgtctgaatgcttacacaaataaat

SEQ ID NO: 87610 - DNA, 25 bp, probe
atgtctgaatgcttacacaaataaa

SEQ ID NO: 87611 - DNA, 25 bp, probe
aatgtctgaatgcttacacaaataa

SEQ ID NO: 87612 - DNA, 25 bp, probe
aaatgtctgaatgcttacacaaata

SEQ ID NO: 87613 - DNA, 25 bp, probe
gattctgcatatcatctttcccacc

SEQ ID NO: 87614 - DNA, 25 bp, probe
tagtggattctgcatatcatctttc

SEQ ID NO: 87615 - DNA, 25 bp, probe
cgtctgacatttgtttggaatcgtg

SEQ ID NO: 87616 - DNA, 25 bp, probe
tgtgatgagacactttggaagactc

SEQ ID NO: 87617 - DNA, 25 bp, probe
attctgcatatcatctttcccacct

SEQ ID NO: 87618 - DNA, 25 bp, probe
gtcctttccaatacgattttctgtt

SEQ ID NO: 87619 - DNA, 25 bp, probe
ccagatgtaccgtcctttccaatac

SEQ ID NO: 87620 - DNA, 25 bp, probe
tcgtctgacatttgtttggaatcgt

SEQ ID NO: 87621 - DNA, 25 bp, probe
gtctgaatgcttacacaaataaatt

SEQ ID NO: 87622 - DNA, 25 bp, probe
gtctgacatttgtttggaatcgtgc

SEQ ID NO: 87623 - DNA, 25 bp, probe
tactccttgaaatgtgactcttcag

SEQ ID NO: 87624 - DNA, 25 bp, probe
atactccttgaaatgtgactcttca

SEQ ID NO: 87625 - DNA, 25 bp, probe
agtggattctgcatatcatctttcc

SEQ ID NO: 87626 - DNA, 25 bp, probe
tcctttccaatacgattttctgttg

SEQ ID NO: 87627 - DNA, 25 bp, probe
atgtgtctaattttctgggtttgct

SEQ ID NO: 87628 - DNA, 25 bp, probe
gaaatgtgactcttcagaggacagg

SEQ ID NO: 87629 - DNA, 25 bp, probe
ttctgttgcaccttgtagtggattc

SEQ ID NO: 87630 - DNA, 25 bp, probe
cctttccaatacgattttctgttgc

SEQ ID NO: 87631 - DNA, 25 bp, probe
ctccttgaaatgtgactcttcagag

SEQ ID NO: 87632 - DNA, 25 bp, probe
ggattctgcatatcatctttcccac

SEQ ID NO: 87633 - DNA, 25 bp, probe
gtggattctgcatatcatctttccc

SEQ ID NO: 87634 - DNA, 25 bp, probe
gctctcgtctgacatttgtttggaa

SEQ ID NO: 87635 - DNA, 25 bp, probe
gtgatgagacactttggaagactcc

SEQ ID NO: 87636 - DNA, 25 bp, probe
cttgaaatgtgactcttcagaggac

SEQ ID NO: 87637 - DNA, 25 bp, probe
actccttgaaatgtgactcttcaga

SEQ ID NO: 87638 - DNA, 25 bp, probe
tgtctaattttctgggtttgctgtg

SEQ ID NO: 87639 - DNA, 25 bp, probe
tccctaacaccttatttctctctct

SEQ ID NO: 87640 - DNA, 25 bp, probe
gtccctaacaccttatttctctctc

SEQ ID NO: 87641 - DNA, 25 bp, probe
agtccctaacaccttatttctctct

SEQ ID NO: 87642 - DNA, 25 bp, probe
ttatttctctctctaaggcaggtct

SEQ ID NO: 87643 - DNA, 25 bp, probe
acatcctactgcatgaagaacataa

SEQ ID NO: 87644 - DNA, 25 bp, probe
aacatcctactgcatgaagaacata

SEQ ID NO: 87645 - DNA, 25 bp, probe
tcctactgcatgaagaacataactt

SEQ ID NO: 87646 - DNA, 25 bp, probe
atcctactgcatgaagaacataact

SEQ ID NO: 87647 - DNA, 25 bp, probe
catcctactgcatgaagaacataac

SEQ ID NO: 87648 - DNA, 25 bp, probe
caagtccctaacaccttatttctct

SEQ ID NO: 87649 - DNA, 25 bp, probe
taccaagtccctaacaccttatttc

SEQ ID NO: 87650 - DNA, 25 bp, probe
aagtccctaacaccttatttctctc

SEQ ID NO: 87651 - DNA, 25 bp, probe
tatttctctctctaaggcaggtctt

SEQ ID NO: 87652 - DNA, 25 bp, probe
ttaccaagtccctaacaccttattt

SEQ ID NO: 87653 - DNA, 25 bp, probe
cctatttagtgatggaatatgccct

SEQ ID NO: 87654 - DNA, 25 bp, probe
accctatttagtgatggaatatgcc

SEQ ID NO: 87655 - DNA, 25 bp, probe
tatttagtgatggaatatgccctcg

SEQ ID NO: 87656 - DNA, 25 bp, probe
ccctaacaccttatttctctctcta

SEQ ID NO: 87657 - DNA, 25 bp, probe
gaacatcattaaactcaaccaggtg

SEQ ID NO: 87658 - DNA, 25 bp, probe
ccaagtccctaacaccttatttctc

SEQ ID NO: 87659 - DNA, 25 bp, probe
atatagtcaactttggtttcagcac

SEQ ID NO: 87660 - DNA, 25 bp, probe
gaacatcctactgcatgaagaacat

SEQ ID NO: 87661 - DNA, 25 bp, probe
ccctatttagtgatggaatatgccc

SEQ ID NO: 87662 - DNA, 25 bp, probe
atttctctctctaaggcaggtcttt

SEQ ID NO: 87663 - DNA, 25 bp, probe
cacctgaacatcattaaactcaacc

SEQ ID NO: 87664 - DNA, 25 bp, probe
cctactgcatgaagaacataactta

SEQ ID NO: 87665 - DNA, 25 bp, probe
cgaatcacctgaacatcattaaact

SEQ ID NO: 87666 - DNA, 25 bp, probe
tcacctgaacatcattaaactcaac

SEQ ID NO: 87667 - DNA, 25 bp, probe
ccgaatcacctgaacatcattaaac

SEQ ID NO: 87668 - DNA, 25 bp, probe
accaagtccctaacaccttatttct

SEQ ID NO: 87669 - DNA, 25 bp, probe
tttatgggacttgctcttatgttgc

SEQ ID NO: 87670 - DNA, 25 bp, probe
aatatagtcaactttggtttcagca

SEQ ID NO: 87671 - DNA, 25 bp, probe
acctgaacatcattaaactcaacca

SEQ ID NO: 87672 - DNA, 25 bp, probe
ctatttagtgatggaatatgccctc

SEQ ID NO: 87673 - DNA, 25 bp, probe
aacatcattaaactcaaccaggtga

SEQ ID NO: 87674 - DNA, 25 bp, probe
tgaacatcattaaactcaaccaggt

SEQ ID NO: 87675 - DNA, 25 bp, probe
atcacctgaacatcattaaactcaa

SEQ ID NO: 87676 - DNA, 25 bp, probe
aatcacctgaacatcattaaactca

SEQ ID NO: 87677 - DNA, 25 bp, probe
cccgaatcacctgaacatcattaaa

SEQ ID NO: 87678 - DNA, 25 bp, probe
agaacatcctactgcatgaagaaca

SEQ ID NO: 87679 - DNA, 25 bp, probe
cttatttctctctctaaggcaggtc

SEQ ID NO: 87680 - DNA, 25 bp, probe
ctgaacatcattaaactcaaccagg

SEQ ID NO: 87681 - DNA, 25 bp, probe
cctgaacatcattaaactcaaccag

SEQ ID NO: 87682 - DNA, 25 bp, probe
aagtacatgctcctcaagaccattg

SEQ ID NO: 87683 - DNA, 25 bp, probe
ggaatacctctactaacaaccaatt

SEQ ID NO: 87684 - DNA, 25 bp, probe
caggaatacctctactaacaaccaa

SEQ ID NO: 87685 - DNA, 25 bp, probe
tcaggaatacctctactaacaacca

SEQ ID NO: 87686 - DNA, 25 bp, probe
atcaggaatacctctactaacaacc

SEQ ID NO: 87687 - DNA, 25 bp, probe
aggaatacctctactaacaaccaat

SEQ ID NO: 87688 - DNA, 25 bp, probe
ggatcaggaatacctctactaacaa

SEQ ID NO: 87689 - DNA, 25 bp, probe
ctcagaagatcctcaccaagttcaa

SEQ ID NO: 87690 - DNA, 25 bp, probe
gatcaggaatacctctactaacaac

SEQ ID NO: 87691 - DNA, 25 bp, probe
agtaaatgaactggaccaaatctca

SEQ ID NO: 87692 - DNA, 25 bp, probe
gtaaatgaactggaccaaatctcaa

SEQ ID NO: 87693 - DNA, 25 bp, probe
ggagtaaatgaactggaccaaatct

SEQ ID NO: 87694 - DNA, 25 bp, probe
gagtaaatgaactggaccaaatctc

SEQ ID NO: 87695 - DNA, 25 bp, probe
taaatgaactggaccaaatctcaaa

SEQ ID NO: 87696 - DNA, 25 bp, probe
gaagatcctcaccaagttcaaacag

SEQ ID NO: 87697 - DNA, 25 bp, probe
cagaagatcctcaccaagttcaaac

SEQ ID NO: 87698 - DNA, 25 bp, probe
tcagaagatcctcaccaagttcaaa

SEQ ID NO: 87699 - DNA, 25 bp, probe
agggatcaggaatacctctactaac

SEQ ID NO: 87700 - DNA, 25 bp, probe
aagggatcaggaatacctctactaa

SEQ ID NO: 87701 - DNA, 25 bp, probe
aaagggatcaggaatacctctacta

SEQ ID NO: 87702 - DNA, 25 bp, probe
agaacagcagaaacagtccctaaag

SEQ ID NO: 87703 - DNA, 25 bp, probe
gggatcaggaatacctctactaaca

SEQ ID NO: 87704 - DNA, 25 bp, probe
agaagatcctcaccaagttcaaaca

SEQ ID NO: 87705 - DNA, 25 bp, probe
ctggagtaaatgaactggaccaaat

SEQ ID NO: 87706 - DNA, 25 bp, probe
aagatcctcaccaagttcaaacagt

SEQ ID NO: 87707 - DNA, 25 bp, probe
tggagtaaatgaactggaccaaatc

SEQ ID NO: 87708 - DNA, 25 bp, probe
tcaaacagtcgagagctatgaattt

SEQ ID NO: 87709 - DNA, 25 bp, probe
cagaacagcagaaacagtccctaaa

SEQ ID NO: 87710 - DNA, 25 bp, probe
agatcctcaccaagttcaaacagtc

SEQ ID NO: 87711 - DNA, 25 bp, probe
caagttcaaacagtcgagagctatg

SEQ ID NO: 87712 - DNA, 25 bp, probe
gaatacctctactaacaaccaattt

SEQ ID NO: 87713 - DNA, 25 bp, probe
aatacctctactaacaaccaatttg

SEQ ID NO: 87714 - DNA, 25 bp, probe
aagttcaaacagtcgagagctatga

SEQ ID NO: 87715 - DNA, 25 bp, probe
gctcagaagatcctcaccaagttca

SEQ ID NO: 87716 - DNA, 25 bp, probe
ccaagaacagaggaaaacagagaag

SEQ ID NO: 87717 - DNA, 25 bp, probe
tatgtcatggaactgcccaaactaa

SEQ ID NO: 87718 - DNA, 25 bp, probe
cctggagtaaatgaactggaccaaa

SEQ ID NO: 87719 - DNA, 25 bp, probe
ccaagttcaaacagtcgagagctat

SEQ ID NO: 87720 - DNA, 25 bp, probe
aaatgaactggaccaaatctcaaaa

SEQ ID NO: 87721 - DNA, 25 bp, probe
gcagaaacagtccctaaagcaagag

SEQ ID NO: 87722 - DNA, 25 bp, probe
gaaacagtccctaaagcaagaggag

SEQ ID NO: 87723 - DNA, 25 bp, probe
caagaacagaggaaaacagagaagc

SEQ ID NO: 87724 - DNA, 25 bp, probe
ctatgtcatggaactgcccaaacta

SEQ ID NO: 87725 - DNA, 25 bp, probe
cagaaacagtccctaaagcaagagg

SEQ ID NO: 87726 - DNA, 25 bp, probe
acctctactaacaaccaatttgtcc

SEQ ID NO: 87727 - DNA, 25 bp, probe
aagaacctgatcctccagatgctac

SEQ ID NO: 87728 - DNA, 25 bp, probe
caagaacctgatcctccagatgcta

SEQ ID NO: 87729 - DNA, 25 bp, probe
aatccttgcaaattacctgacctga

SEQ ID NO: 87730 - DNA, 25 bp, probe
caatccttgcaaattacctgacctg

SEQ ID NO: 87731 - DNA, 25 bp, probe
caccaatccttgcaaattacctgac

SEQ ID NO: 87732 - DNA, 25 bp, probe
ccaatccttgcaaattacctgacct

SEQ ID NO: 87733 - DNA, 25 bp, probe
ataccatctcccaggagtgcaagaa

SEQ ID NO: 87734 - DNA, 25 bp, probe
accaatccttgcaaattacctgacc

SEQ ID NO: 87735 - DNA, 25 bp, probe
gcaccaatccttgcaaattacctga

SEQ ID NO: 87736 - DNA, 25 bp, probe
agcaccaatccttgcaaattacctg

SEQ ID NO: 87737 - DNA, 25 bp, probe
cagcaccaatccttgcaaattacct

SEQ ID NO: 87738 - DNA, 25 bp, probe
acagcaccaatccttgcaaattacc

SEQ ID NO: 87739 - DNA, 25 bp, probe
caagcaagaggaatgttattgaagc

SEQ ID NO: 87740 - DNA, 25 bp, probe
gcaagcaagaggaatgttattgaag

SEQ ID NO: 87741 - DNA, 25 bp, probe
attggcaagcaagaggaatgttatt

SEQ ID NO: 87742 - DNA, 25 bp, probe
aattggcaagcaagaggaatgttat

SEQ ID NO: 87743 - DNA, 25 bp, probe
caagaggaatgttattgaagccgtt

SEQ ID NO: 87744 - DNA, 25 bp, probe
aagcaagaggaatgttattgaagcc

SEQ ID NO: 87745 - DNA, 25 bp, probe
agagcctgaagtccatgatattgaa

SEQ ID NO: 87746 - DNA, 25 bp, probe
ggcaagcaagaggaatgttattgaa

SEQ ID NO: 87747 - DNA, 25 bp, probe
gaattggcaagcaagaggaatgtta

SEQ ID NO: 87748 - DNA, 25 bp, probe
ttggcaagcaagaggaatgttattg

SEQ ID NO: 87749 - DNA, 25 bp, probe
gaagccgtttacaatagactgaatc

SEQ ID NO: 87750 - DNA, 25 bp, probe
tgaagccgtttacaatagactgaat

SEQ ID NO: 87751 - DNA, 25 bp, probe
gaggaatgttattgaagccgtttac

SEQ ID NO: 87752 - DNA, 25 bp, probe
agaggaatgttattgaagccgttta

SEQ ID NO: 87753 - DNA, 25 bp, probe
atgtgatggtatctgggatgttatg

SEQ ID NO: 87754 - DNA, 25 bp, probe
attatccttgcatgtgatggtatct

SEQ ID NO: 87755 - DNA, 25 bp, probe
cattatccttgcatgtgatggtatc

SEQ ID NO: 87756 - DNA, 25 bp, probe
gatcagttcattatccttgcatgtg

SEQ ID NO: 87757 - DNA, 25 bp, probe
ttatccttgcatgtgatggtatctg

SEQ ID NO: 87758 - DNA, 25 bp, probe
ggtatctgggatgttatgggaaatg

SEQ ID NO: 87759 - DNA, 25 bp, probe
gccgtttacaatagactgaatcctt

SEQ ID NO: 87760 - DNA, 25 bp, probe
aagccgtttacaatagactgaatcc

SEQ ID NO: 87761 - DNA, 25 bp, probe
aagaggaatgttattgaagccgttt

SEQ ID NO: 87762 - DNA, 25 bp, probe
tcattatccttgcatgtgatggtat

SEQ ID NO: 87763 - DNA, 25 bp, probe
ttcattatccttgcatgtgatggta

SEQ ID NO: 87764 - DNA, 25 bp, probe
tggtatctgggatgttatgggaaat

SEQ ID NO: 87765 - DNA, 25 bp, probe
atggtatctgggatgttatgggaaa

SEQ ID NO: 87766 - DNA, 25 bp, probe
cagttcattatccttgcatgtgatg

SEQ ID NO: 87767 - DNA, 25 bp, probe
tcagttcattatccttgcatgtgat

SEQ ID NO: 87768 - DNA, 25 bp, probe
atcagttcattatccttgcatgtga

SEQ ID NO: 87769 - DNA, 25 bp, probe
ttgaagccgtttacaatagactgaa

SEQ ID NO: 87770 - DNA, 25 bp, probe
tggcaagcaagaggaatgttattga

SEQ ID NO: 87771 - DNA, 25 bp, probe
ccgtttacaatagactgaatcctta

SEQ ID NO: 87772 - DNA, 25 bp, probe
gatggtatctgggatgttatgggaa

SEQ ID NO: 87773 - DNA, 25 bp, probe
agccgtttacaatagactgaatcct

SEQ ID NO: 87774 - DNA, 25 bp, probe
cagagcctgaagtccatgatattga

SEQ ID NO: 87775 - DNA, 25 bp, probe
ggaatgttattgaagccgtttacaa

SEQ ID NO: 87776 - DNA, 25 bp, probe
agttcattatccttgcatgtgatgg

SEQ ID NO: 87777 - DNA, 25 bp, probe
tcactgatgaccttgagaaagtttg

SEQ ID NO: 87778 - DNA, 25 bp, probe
tgtgatggtatctgggatgttatgg

SEQ ID NO: 87779 - DNA, 25 bp, probe
gcctgaagtccatgatattgaaaga

SEQ ID NO: 87780 - DNA, 25 bp, probe
agcctgaagtccatgatattgaaag

SEQ ID NO: 87781 - DNA, 25 bp, probe
gagcctgaagtccatgatattgaaa

SEQ ID NO: 87782 - DNA, 25 bp, probe
catgtgatggtatctgggatgttat

SEQ ID NO: 87783 - DNA, 25 bp, probe
aaggtcattatctgttcattctggt

SEQ ID NO: 87784 - DNA, 25 bp, probe
aggtcattatctgttcattctggta

SEQ ID NO: 87785 - DNA, 25 bp, probe
gacttgaagagcaacatcatagagt

SEQ ID NO: 87786 - DNA, 25 bp, probe
tgacttgaagagcaacatcatagag

SEQ ID NO: 87787 - DNA, 25 bp, probe
ctgacttgaagagcaacatcataga

SEQ ID NO: 87788 - DNA, 25 bp, probe
acttgaagagcaacatcatagagtg

SEQ ID NO: 87789 - DNA, 25 bp, probe
ggtcattatctgttcattctggtac

SEQ ID NO: 87790 - DNA, 25 bp, probe
gaagagaacacatgaagaagaggat

SEQ ID NO: 87791 - DNA, 25 bp, probe
agagcaacatcatagagtgtgaatt

SEQ ID NO: 87792 - DNA, 25 bp, probe
aagagcaacatcatagagtgtgaat

SEQ ID NO: 87793 - DNA, 25 bp, probe
ttgaagagaacacatgaagaagagg

SEQ ID NO: 87794 - DNA, 25 bp, probe
agaacacatgaagaagaggatgatt

SEQ ID NO: 87795 - DNA, 25 bp, probe
gaagagcaacatcatagagtgtgaa

SEQ ID NO: 87796 - DNA, 25 bp, probe
cttgaagagcaacatcatagagtgt

SEQ ID NO: 87797 - DNA, 25 bp, probe
gagaacacatgaagaagaggatgat

SEQ ID NO: 87798 - DNA, 25 bp, probe
aagagaacacatgaagaagaggatg

SEQ ID NO: 87799 - DNA, 25 bp, probe
ttgaagagcaacatcatagagtgtg

SEQ ID NO: 87800 - DNA, 25 bp, probe
tgaagagaacacatgaagaagagga

SEQ ID NO: 87801 - DNA, 25 bp, probe
agagaacacatgaagaagaggatga

SEQ ID NO: 87802 - DNA, 25 bp, probe
tgaagagcaacatcatagagtgtga

SEQ ID NO: 87803 - DNA, 25 bp, probe
ccactccagatagaaaggtcattat

SEQ ID NO: 87804 - DNA, 25 bp, probe
aaaggtcattatctgttcattctgg

SEQ ID NO: 87805 - DNA, 25 bp, probe
aagatgttggacttctgcaatagat

SEQ ID NO: 87806 - DNA, 25 bp, probe
taagatgttggacttctgcaataga

SEQ ID NO: 87807 - DNA, 25 bp, probe
gacttctgcaatagatgacactgat

SEQ ID NO: 87808 - DNA, 25 bp, probe
gtgtgaatttctatttgggaaggag

SEQ ID NO: 87809 - DNA, 25 bp, probe
agtgtgaatttctatttgggaagga

SEQ ID NO: 87810 - DNA, 25 bp, probe
gagtgtgaatttctatttgggaagg

SEQ ID NO: 87811 - DNA, 25 bp, probe
acttctgcaatagatgacactgatg

SEQ ID NO: 87812 - DNA, 25 bp, probe
tgtgaatttctatttgggaaggaga

SEQ ID NO: 87813 - DNA, 25 bp, probe
gatgttggacttctgcaatagatga

SEQ ID NO: 87814 - DNA, 25 bp, probe
agatgttggacttctgcaatagatg

SEQ ID NO: 87815 - DNA, 25 bp, probe
ttaagatgttggacttctgcaatag

SEQ ID NO: 87816 - DNA, 25 bp, probe
atgttggacttctgcaatagatgac

SEQ ID NO: 87817 - DNA, 25 bp, probe
agagtgtgaatttctatttgggaag

SEQ ID NO: 87818 - DNA, 25 bp, probe
cttctgcaatagatgacactgatgg

SEQ ID NO: 87819 - DNA, 25 bp, probe
gcaacatcatagagtgtgaatttct

SEQ ID NO: 87820 - DNA, 25 bp, probe
agcaacatcatagagtgtgaatttc

SEQ ID NO: 87821 - DNA, 25 bp, probe
gagcaacatcatagagtgtgaattt

SEQ ID NO: 87822 - DNA, 25 bp, probe
tgatgtcaccactccagatagaaag

SEQ ID NO: 87823 - DNA, 25 bp, probe
acatacttctctgcaacttgttgag

SEQ ID NO: 87824 - DNA, 25 bp, probe
agacatacttctctgcaacttgttg

SEQ ID NO: 87825 - DNA, 25 bp, probe
tttgaagagaacacatgaagaagag

SEQ ID NO: 87826 - DNA, 25 bp, probe
gacatacttctctgcaacttgttga

SEQ ID NO: 87827 - DNA, 25 bp, probe
gaactcatctcaatacactggaacg

SEQ ID NO: 87828 - DNA, 25 bp, probe
cgaactcatctcaatacactggaac

SEQ ID NO: 87829 - DNA, 25 bp, probe
ccgaactcatctcaatacactggaa

SEQ ID NO: 87830 - DNA, 25 bp, probe
actaatcgaatgtctgctaatgctt

SEQ ID NO: 87831 - DNA, 25 bp, probe
cactaatcgaatgtctgctaatgct

SEQ ID NO: 87832 - DNA, 25 bp, probe
aataaatacaaggctcgtctcaaag

SEQ ID NO: 87833 - DNA, 25 bp, probe
gaataaatacaaggctcgtctcaaa

SEQ ID NO: 87834 - DNA, 25 bp, probe
acaaatgaataaatacaaggctcgt

SEQ ID NO: 87835 - DNA, 25 bp, probe
aatgaataaatacaaggctcgtctc

SEQ ID NO: 87836 - DNA, 25 bp, probe
ctttcatctaagtcaggattgctct

SEQ ID NO: 87837 - DNA, 25 bp, probe
tctttcatctaagtcaggattgctc

SEQ ID NO: 87838 - DNA, 25 bp, probe
atctttcatctaagtcaggattgct

SEQ ID NO: 87839 - DNA, 25 bp, probe
catctttcatctaagtcaggattgc

SEQ ID NO: 87840 - DNA, 25 bp, probe
caaatgaataaatacaaggctcgtc

SEQ ID NO: 87841 - DNA, 25 bp, probe
aatacaaggctcgtctcaaagatat

SEQ ID NO: 87842 - DNA, 25 bp, probe
aaatacaaggctcgtctcaaagata

SEQ ID NO: 87843 - DNA, 25 bp, probe
taaatacaaggctcgtctcaaagat

SEQ ID NO: 87844 - DNA, 25 bp, probe
ataaatacaaggctcgtctcaaaga

SEQ ID NO: 87845 - DNA, 25 bp, probe
aaatgaataaatacaaggctcgtct

SEQ ID NO: 87846 - DNA, 25 bp, probe
aactcatctcaatacactggaacgc

SEQ ID NO: 87847 - DNA, 25 bp, probe
cgtggtgtatactctgtgattgatc

SEQ ID NO: 87848 - DNA, 25 bp, probe
atgaataaatacaaggctcgtctca

SEQ ID NO: 87849 - DNA, 25 bp, probe
aacaaatgaataaatacaaggctcg

SEQ ID NO: 87850 - DNA, 25 bp, probe
tgaataaatacaaggctcgtctcaa

SEQ ID NO: 87851 - DNA, 25 bp, probe
ttcgtagatcaatgtttaactcagc

SEQ ID NO: 87852 - DNA, 25 bp, probe
tggaacaaatgaataaatacaaggc

SEQ ID NO: 87853 - DNA, 25 bp, probe
ttcatctaagtcaggattgctctgc

SEQ ID NO: 87854 - DNA, 25 bp, probe
gaacgcctcatctttcatctaagtc

SEQ ID NO: 87855 - DNA, 25 bp, probe
aactctcccgaactcatctcaatac

SEQ ID NO: 87856 - DNA, 25 bp, probe
caactctcccgaactcatctcaata

SEQ ID NO: 87857 - DNA, 25 bp, probe
acactaatcgaatgtctgctaatgc

SEQ ID NO: 87858 - DNA, 25 bp, probe
tcatctttcatctaagtcaggattg

SEQ ID NO: 87859 - DNA, 25 bp, probe
ggaacaaatgaataaatacaaggct

SEQ ID NO: 87860 - DNA, 25 bp, probe
gttgtcactgattcgtagatcaatg

SEQ ID NO: 87861 - DNA, 25 bp, probe
ttgtgtggaactgattgttgtggaa

SEQ ID NO: 87862 - DNA, 25 bp, probe
tgtcactgattcgtagatcaatgtt

SEQ ID NO: 87863 - DNA, 25 bp, probe
ttgtcactgattcgtagatcaatgt

SEQ ID NO: 87864 - DNA, 25 bp, probe
ttgaactctatgaggaatttcttcg

SEQ ID NO: 87865 - DNA, 25 bp, probe
ggttgtcactgattcgtagatcaat

SEQ ID NO: 87866 - DNA, 25 bp, probe
ctcatctttcatctaagtcaggatt

SEQ ID NO: 87867 - DNA, 25 bp, probe
tttcatctaagtcaggattgctctg

SEQ ID NO: 87868 - DNA, 25 bp, probe
aacgcctcatctttcatctaagtca

SEQ ID NO: 87869 - DNA, 25 bp, probe
ccgtggtgtatactctgtgattgat

SEQ ID NO: 87870 - DNA, 25 bp, probe
cctcatctttcatctaagtcaggat

SEQ ID NO: 87871 - DNA, 25 bp, probe
gtgatctgtagacttctggttgtat

SEQ ID NO: 87872 - DNA, 25 bp, probe
tgatctgtagacttctggttgtatt

SEQ ID NO: 87873 - DNA, 25 bp, probe
tatccaagtaccaatgctgttgtaa

SEQ ID NO: 87874 - DNA, 25 bp, probe
atatccaagtaccaatgctgttgta

SEQ ID NO: 87875 - DNA, 25 bp, probe
tactgtggtgatctgtagacttctg

SEQ ID NO: 87876 - DNA, 25 bp, probe
ggtgatctgtagacttctggttgta

SEQ ID NO: 87877 - DNA, 25 bp, probe
catatccaagtaccaatgctgttgt

SEQ ID NO: 87878 - DNA, 25 bp, probe
ccatatccaagtaccaatgctgttg

SEQ ID NO: 87879 - DNA, 25 bp, probe
gacatttgacatttggtggacttta

SEQ ID NO: 87880 - DNA, 25 bp, probe
tttcggactttgacatttgacattt

SEQ ID NO: 87881 - DNA, 25 bp, probe
ttgacatttggtggactttatcttg

SEQ ID NO: 87882 - DNA, 25 bp, probe
acatttgacatttggtggactttat

SEQ ID NO: 87883 - DNA, 25 bp, probe
ttcggactttgacatttgacatttg

SEQ ID NO: 87884 - DNA, 25 bp, probe
tttgacatttggtggactttatctt

SEQ ID NO: 87885 - DNA, 25 bp, probe
agtctgtctactgtggtgatctgta

SEQ ID NO: 87886 - DNA, 25 bp, probe
atttgacatttggtggactttatct

SEQ ID NO: 87887 - DNA, 25 bp, probe
catttgacatttggtggactttatc

SEQ ID NO: 87888 - DNA, 25 bp, probe
ctttgacatttgacatttggtggac

SEQ ID NO: 87889 - DNA, 25 bp, probe
gactttgacatttgacatttggtgg

SEQ ID NO: 87890 - DNA, 25 bp, probe
ggactttgacatttgacatttggtg

SEQ ID NO: 87891 - DNA, 25 bp, probe
tctgtagacttctggttgtatttct

SEQ ID NO: 87892 - DNA, 25 bp, probe
gacatttggtggactttatcttgct

SEQ ID NO: 87893 - DNA, 25 bp, probe
tgacatttgacatttggtggacttt

SEQ ID NO: 87894 - DNA, 25 bp, probe
ttgacatttgacatttggtggactt

SEQ ID NO: 87895 - DNA, 25 bp, probe
tttgacatttgacatttggtggact

SEQ ID NO: 87896 - DNA, 25 bp, probe
actttgacatttgacatttggtgga

SEQ ID NO: 87897 - DNA, 25 bp, probe
atactgtgtgggatacttagtggta

SEQ ID NO: 87898 - DNA, 25 bp, probe
tatactgtgtgggatacttagtggt

SEQ ID NO: 87899 - DNA, 25 bp, probe
gtggtgatctgtagacttctggttg

SEQ ID NO: 87900 - DNA, 25 bp, probe
acatttggtggactttatcttgctg

SEQ ID NO: 87901 - DNA, 25 bp, probe
tgacatttggtggactttatcttgc

SEQ ID NO: 87902 - DNA, 25 bp, probe
atctgtagacttctggttgtatttc

SEQ ID NO: 87903 - DNA, 25 bp, probe
ctactgtggtgatctgtagacttct

SEQ ID NO: 87904 - DNA, 25 bp, probe
tggtgatctgtagacttctggttgt

SEQ ID NO: 87905 - DNA, 25 bp, probe
tgtggtgatctgtagacttctggtt

SEQ ID NO: 87906 - DNA, 25 bp, probe
atccaagtaccaatgctgttgtaaa

SEQ ID NO: 87907 - DNA, 25 bp, probe
tcggactttgacatttgacatttgg

SEQ ID NO: 87908 - DNA, 25 bp, probe
tgggatacttagtggtatgtctctt

SEQ ID NO: 87909 - DNA, 25 bp, probe
tactgtgtgggatacttagtggtat

SEQ ID NO: 87910 - DNA, 25 bp, probe
catttggtggactttatcttgctgg

SEQ ID NO: 87911 - DNA, 25 bp, probe
ctcagcagttgacatccaaatctag

SEQ ID NO: 87912 - DNA, 25 bp, probe
gatctgtagacttctggttgtattt

SEQ ID NO: 87913 - DNA, 25 bp, probe
gggatacttagtggtatgtctcttt

SEQ ID NO: 87914 - DNA, 25 bp, probe
gtgggatacttagtggtatgtctct

SEQ ID NO: 87915 - DNA, 25 bp, probe
gcactctaaggagatcatctacagg

SEQ ID NO: 87916 - DNA, 25 bp, probe
acaaggtggttaggaaatatgaaga

SEQ ID NO: 87917 - DNA, 25 bp, probe
acagaacaaggtggttaggaaatat

SEQ ID NO: 87918 - DNA, 25 bp, probe
agaacaaggtggttaggaaatatga

SEQ ID NO: 87919 - DNA, 25 bp, probe
cagaacaaggtggttaggaaatatg

SEQ ID NO: 87920 - DNA, 25 bp, probe
gacagaacaaggtggttaggaaata

SEQ ID NO: 87921 - DNA, 25 bp, probe
aggtggttaggaaatatgaagaacg

SEQ ID NO: 87922 - DNA, 25 bp, probe
gttgacagaacaaggtggttaggaa

SEQ ID NO: 87923 - DNA, 25 bp, probe
caaggtggttaggaaatatgaagaa

SEQ ID NO: 87924 - DNA, 25 bp, probe
aacaaggtggttaggaaatatgaag

SEQ ID NO: 87925 - DNA, 25 bp, probe
gaacaaggtggttaggaaatatgaa

SEQ ID NO: 87926 - DNA, 25 bp, probe
aaggtggttaggaaatatgaagaac

SEQ ID NO: 87927 - DNA, 25 bp, probe
gtggttaggaaatatgaagaacggg

SEQ ID NO: 87928 - DNA, 25 bp, probe
ggtggttaggaaatatgaagaacgg

SEQ ID NO: 87929 - DNA, 25 bp, probe
tgcactctaaggagatcatctacag

SEQ ID NO: 87930 - DNA, 25 bp, probe
ctgcactctaaggagatcatctaca

SEQ ID NO: 87931 - DNA, 25 bp, probe
ctaaggagatcatctacagggactt

SEQ ID NO: 87932 - DNA, 25 bp, probe
taaggagatcatctacagggacttg

SEQ ID NO: 87933 - DNA, 25 bp, probe
tctaaggagatcatctacagggact

SEQ ID NO: 87934 - DNA, 25 bp, probe
tgacagaacaaggtggttaggaaat

SEQ ID NO: 87935 - DNA, 25 bp, probe
ctctaaggagatcatctacagggac

SEQ ID NO: 87936 - DNA, 25 bp, probe
atctcattaagaaactgctcgtggt

SEQ ID NO: 87937 - DNA, 25 bp, probe
actctaaggagatcatctacaggga

SEQ ID NO: 87938 - DNA, 25 bp, probe
cactctaaggagatcatctacaggg

SEQ ID NO: 87939 - DNA, 25 bp, probe
gatctcattaagaaactgctcgtgg

SEQ ID NO: 87940 - DNA, 25 bp, probe
ttgacagaacaaggtggttaggaaa

SEQ ID NO: 87941 - DNA, 25 bp, probe
cctgcactctaaggagatcatctac

SEQ ID NO: 87942 - DNA, 25 bp, probe
gtggttgacagaacaaggtggttag

SEQ ID NO: 87943 - DNA, 25 bp, probe
ctcattaagaaactgctcgtggttg

SEQ ID NO: 87944 - DNA, 25 bp, probe
tctcattaagaaactgctcgtggtt

SEQ ID NO: 87945 - DNA, 25 bp, probe
ggagatcatctacagggacttgaag

SEQ ID NO: 87946 - DNA, 25 bp, probe
cattaagaaactgctcgtggttgac

SEQ ID NO: 87947 - DNA, 25 bp, probe
aggagatcatctacagggacttgaa

SEQ ID NO: 87948 - DNA, 25 bp, probe
aaggagatcatctacagggacttga

SEQ ID NO: 87949 - DNA, 25 bp, probe
tcattaagaaactgctcgtggttga

SEQ ID NO: 87950 - DNA, 25 bp, probe
attaagaaactgctcgtggttgaca

SEQ ID NO: 87951 - DNA, 25 bp, probe
gagatcatctacagggacttgaagc

SEQ ID NO: 87952 - DNA, 25 bp, probe
cgaaggaagctcatggagtatgttc

SEQ ID NO: 87953 - DNA, 25 bp, probe
acaagatagatttccccagacattt

SEQ ID NO: 87954 - DNA, 25 bp, probe
gacaagatagatttccccagacatt

SEQ ID NO: 87955 - DNA, 25 bp, probe
agacaagatagatttccccagacat

SEQ ID NO: 87956 - DNA, 25 bp, probe
ggttgacagaacaaggtggttagga

SEQ ID NO: 87957 - DNA, 25 bp, probe
caagatagatttccccagacatttg

SEQ ID NO: 87958 - DNA, 25 bp, probe
catttggatttccatgtgaaagatc

SEQ ID NO: 87959 - DNA, 25 bp, probe
ccaattcatcacaactaactccatc

SEQ ID NO: 87960 - DNA, 25 bp, probe
ctcaccaattcatcacaactaactc

SEQ ID NO: 87961 - DNA, 25 bp, probe
caattcatcacaactaactccatcg

SEQ ID NO: 87962 - DNA, 25 bp, probe
accaattcatcacaactaactccat

SEQ ID NO: 87963 - DNA, 25 bp, probe
tcaccaattcatcacaactaactcc

SEQ ID NO: 87964 - DNA, 25 bp, probe
cctcaccaattcatcacaactaact

SEQ ID NO: 87965 - DNA, 25 bp, probe
gacctcaccaattcatcacaactaa

SEQ ID NO: 87966 - DNA, 25 bp, probe
aattcatcacaactaactccatcgg

SEQ ID NO: 87967 - DNA, 25 bp, probe
caccaattcatcacaactaactcca

SEQ ID NO: 87968 - DNA, 25 bp, probe
acctcaccaattcatcacaactaac

SEQ ID NO: 87969 - DNA, 25 bp, probe
agacctcaccaattcatcacaacta

SEQ ID NO: 87970 - DNA, 25 bp, probe
gccatagagagatccttccagaata

SEQ ID NO: 87971 - DNA, 25 bp, probe
ccatagagagatccttccagaatat

SEQ ID NO: 87972 - DNA, 25 bp, probe
gaagcaactagaggaggaagaagag

SEQ ID NO: 87973 - DNA, 25 bp, probe
gagaagcaactagaggaggaagaag

SEQ ID NO: 87974 - DNA, 25 bp, probe
cttccagaatatggtgtcattaacc

SEQ ID NO: 87975 - DNA, 25 bp, probe
ccttccagaatatggtgtcattaac

SEQ ID NO: 87976 - DNA, 25 bp, probe
tccttccagaatatggtgtcattaa

SEQ ID NO: 87977 - DNA, 25 bp, probe
agaagcaactagaggaggaagaaga

SEQ ID NO: 87978 - DNA, 25 bp, probe
atccttccagaatatggtgtcatta

SEQ ID NO: 87979 - DNA, 25 bp, probe
agccatagagagatccttccagaat

SEQ ID NO: 87980 - DNA, 25 bp, probe
gatccttccagaatatggtgtcatt

SEQ ID NO: 87981 - DNA, 25 bp, probe
tagagagatccttccagaatatggt

SEQ ID NO: 87982 - DNA, 25 bp, probe
agatccttccagaatatggtgtcat

SEQ ID NO: 87983 - DNA, 25 bp, probe
cagacctcaccaattcatcacaact

SEQ ID NO: 87984 - DNA, 25 bp, probe
agagagatccttccagaatatggtg

SEQ ID NO: 87985 - DNA, 25 bp, probe
attcatcacaactaactccatcgga

SEQ ID NO: 87986 - DNA, 25 bp, probe
ttcatcacaactaactccatcggaa

SEQ ID NO: 87987 - DNA, 25 bp, probe
agagatccttccagaatatggtgtc

SEQ ID NO: 87988 - DNA, 25 bp, probe
gagagatccttccagaatatggtgt

SEQ ID NO: 87989 - DNA, 25 bp, probe
atagagagatccttccagaatatgg

SEQ ID NO: 87990 - DNA, 25 bp, probe
gagatccttccagaatatggtgtca

SEQ ID NO: 87991 - DNA, 25 bp, probe
caactagaggaggaagaagaggagg

SEQ ID NO: 87992 - DNA, 25 bp, probe
gaggaagaagaggaggaggaagatg

SEQ ID NO: 87993 - DNA, 25 bp, probe
atcagccatagagagatccttccag

SEQ ID NO: 87994 - DNA, 25 bp, probe
tcatcacaactaactccatcggaag

SEQ ID NO: 87995 - DNA, 25 bp, probe
aactagaggaggaagaagaggagga

SEQ ID NO: 87996 - DNA, 25 bp, probe
catagagagatccttccagaatatg

SEQ ID NO: 87997 - DNA, 25 bp, probe
aagcaactagaggaggaagaagagg

SEQ ID NO: 87998 - DNA, 25 bp, probe
atgtatacctggatctgaacagaga

SEQ ID NO: 87999 - DNA, 25 bp, probe
aatgtatacctggatctgaacagag

SEQ ID NO: 88000 - DNA, 25 bp, probe
cagccatagagagatccttccagaa

SEQ ID NO: 88001 - DNA, 25 bp, probe
gggataaagatgttggtgtctacag

SEQ ID NO: 88002 - DNA, 25 bp, probe
catcagccatagagagatccttcca

SEQ ID NO: 88003 - DNA, 25 bp, probe
aaggatttgattacttactaaaggc

SEQ ID NO: 88004 - DNA, 25 bp, probe
cagaagagaacaaaaccaaaggatt

SEQ ID NO: 88005 - DNA, 25 bp, probe
gagacagaagagaacaaaaccaaag

SEQ ID NO: 88006 - DNA, 25 bp, probe
acagaagagaacaaaaccaaaggat

SEQ ID NO: 88007 - DNA, 25 bp, probe
agaagagaacaaaaccaaaggattt

SEQ ID NO: 88008 - DNA, 25 bp, probe
tgaaggagacagaagagaacaaaac

SEQ ID NO: 88009 - DNA, 25 bp, probe
gacagaagagaacaaaaccaaagga

SEQ ID NO: 88010 - DNA, 25 bp, probe
agacagaagagaacaaaaccaaagg

SEQ ID NO: 88011 - DNA, 25 bp, probe
ggagacagaagagaacaaaaccaaa

SEQ ID NO: 88012 - DNA, 25 bp, probe
gaaggagacagaagagaacaaaacc

SEQ ID NO: 88013 - DNA, 25 bp, probe
ctctgaaggagacagaagagaacaa

SEQ ID NO: 88014 - DNA, 25 bp, probe
ggatttgattacttactaaaggccg

SEQ ID NO: 88015 - DNA, 25 bp, probe
gatttgattacttactaaaggccgc

SEQ ID NO: 88016 - DNA, 25 bp, probe
atttgattacttactaaaggccgct

SEQ ID NO: 88017 - DNA, 25 bp, probe
aggagacagaagagaacaaaaccaa

SEQ ID NO: 88018 - DNA, 25 bp, probe
aaggagacagaagagaacaaaacca

SEQ ID NO: 88019 - DNA, 25 bp, probe
tttgattacttactaaaggccgctg

SEQ ID NO: 88020 - DNA, 25 bp, probe
aggatttgattacttactaaaggcc

SEQ ID NO: 88021 - DNA, 25 bp, probe
ctgaaggagacagaagagaacaaaa

SEQ ID NO: 88022 - DNA, 25 bp, probe
gattacttactaaaggccgctgaag

SEQ ID NO: 88023 - DNA, 25 bp, probe
tgattacttactaaaggccgctgaa

SEQ ID NO: 88024 - DNA, 25 bp, probe
ttgattacttactaaaggccgctga

SEQ ID NO: 88025 - DNA, 25 bp, probe
tctgaaggagacagaagagaacaaa

SEQ ID NO: 88026 - DNA, 25 bp, probe
aaaccaaaggatttgattacttact

SEQ ID NO: 88027 - DNA, 25 bp, probe
atcctagccgatgtctctctgaagg

SEQ ID NO: 88028 - DNA, 25 bp, probe
catcctagccgatgtctctctgaag

SEQ ID NO: 88029 - DNA, 25 bp, probe
aagagaacaaaaccaaaggatttga

SEQ ID NO: 88030 - DNA, 25 bp, probe
agagaacaaaaccaaaggatttgat

SEQ ID NO: 88031 - DNA, 25 bp, probe
gaagagaacaaaaccaaaggatttg

SEQ ID NO: 88032 - DNA, 25 bp, probe
attacttactaaaggccgctgaagc

SEQ ID NO: 88033 - DNA, 25 bp, probe
gagaacaaaaccaaaggatttgatt

SEQ ID NO: 88034 - DNA, 25 bp, probe
aaaggatttgattacttactaaagg

SEQ ID NO: 88035 - DNA, 25 bp, probe
accaaaggatttgattacttactaa

SEQ ID NO: 88036 - DNA, 25 bp, probe
aaccaaaggatttgattacttacta

SEQ ID NO: 88037 - DNA, 25 bp, probe
acaaaaccaaaggatttgattactt

SEQ ID NO: 88038 - DNA, 25 bp, probe
aacaaaaccaaaggatttgattact

SEQ ID NO: 88039 - DNA, 25 bp, probe
gaacaaaaccaaaggatttgattac

SEQ ID NO: 88040 - DNA, 25 bp, probe
agaacaaaaccaaaggatttgatta

SEQ ID NO: 88041 - DNA, 25 bp, probe
ttacttactaaaggccgctgaagct

SEQ ID NO: 88042 - DNA, 25 bp, probe
ctagccgatgtctctctgaaggaga

SEQ ID NO: 88043 - DNA, 25 bp, probe
ccaaaggatttgattacttactaaa

SEQ ID NO: 88044 - DNA, 25 bp, probe
tacttactaaaggccgctgaagctg

SEQ ID NO: 88045 - DNA, 25 bp, probe
aaccagtactaccaaaaggctgaag

SEQ ID NO: 88046 - DNA, 25 bp, probe
gcagagatcaggggacttgtatacc

SEQ ID NO: 88047 - DNA, 25 bp, probe
agaaggagaaggaggaactggacag

SEQ ID NO: 88048 - DNA, 25 bp, probe
catggagcagttccagaaggagaag

SEQ ID NO: 88049 - DNA, 25 bp, probe
aggtagatgacattgatgaagaagg

SEQ ID NO: 88050 - DNA, 25 bp, probe
tgaggtagatgacattgatgaagaa

SEQ ID NO: 88051 - DNA, 25 bp, probe
ggtatgaggtagatgacattgatga

SEQ ID NO: 88052 - DNA, 25 bp, probe
aggtatgaggtagatgacattgatg

SEQ ID NO: 88053 - DNA, 25 bp, probe
caggtatgaggtagatgacattgat

SEQ ID NO: 88054 - DNA, 25 bp, probe
gtagatgacattgatgaagaaggca

SEQ ID NO: 88055 - DNA, 25 bp, probe
gaggtagatgacattgatgaagaag

SEQ ID NO: 88056 - DNA, 25 bp, probe
atgaggtagatgacattgatgaaga

SEQ ID NO: 88057 - DNA, 25 bp, probe
acaggtatgaggtagatgacattga

SEQ ID NO: 88058 - DNA, 25 bp, probe
cacaggtatgaggtagatgacattg

SEQ ID NO: 88059 - DNA, 25 bp, probe
tagatgacattgatgaagaaggcaa

SEQ ID NO: 88060 - DNA, 25 bp, probe
ggtagatgacattgatgaagaaggc

SEQ ID NO: 88061 - DNA, 25 bp, probe
ccacaggtatgaggtagatgacatt

SEQ ID NO: 88062 - DNA, 25 bp, probe
gtatgaggtagatgacattgatgaa

SEQ ID NO: 88063 - DNA, 25 bp, probe
tatgaggtagatgacattgatgaag

SEQ ID NO: 88064 - DNA, 25 bp, probe
tccacaggtatgaggtagatgacat

SEQ ID NO: 88065 - DNA, 25 bp, probe
ttgtccacaggtatgaggtagatga

SEQ ID NO: 88066 - DNA, 25 bp, probe
gatgacattgatgaagaaggcaaag

SEQ ID NO: 88067 - DNA, 25 bp, probe
agatgacattgatgaagaaggcaaa

SEQ ID NO: 88068 - DNA, 25 bp, probe
tttgtccacaggtatgaggtagatg

SEQ ID NO: 88069 - DNA, 25 bp, probe
gtccacaggtatgaggtagatgaca

SEQ ID NO: 88070 - DNA, 25 bp, probe
tgtccacaggtatgaggtagatgac

SEQ ID NO: 88071 - DNA, 25 bp, probe
atgacattgatgaagaaggcaaagc

SEQ ID NO: 88072 - DNA, 25 bp, probe
ttttgtccacaggtatgaggtagat

SEQ ID NO: 88073 - DNA, 25 bp, probe
cttttgtccacaggtatgaggtaga

SEQ ID NO: 88074 - DNA, 25 bp, probe
ttttcctccttttgtccacaggtat

SEQ ID NO: 88075 - DNA, 25 bp, probe
attttcctccttttgtccacaggta

SEQ ID NO: 88076 - DNA, 25 bp, probe
ccttttgtccacaggtatgaggtag

SEQ ID NO: 88077 - DNA, 25 bp, probe
tttcctccttttgtccacaggtatg

SEQ ID NO: 88078 - DNA, 25 bp, probe
tccttttgtccacaggtatgaggta

SEQ ID NO: 88079 - DNA, 25 bp, probe
catcctgcattttcctccttttgtc

SEQ ID NO: 88080 - DNA, 25 bp, probe
ttcctccttttgtccacaggtatga

SEQ ID NO: 88081 - DNA, 25 bp, probe
cattttcctccttttgtccacaggt

SEQ ID NO: 88082 - DNA, 25 bp, probe
tcctccttttgtccacaggtatgag

SEQ ID NO: 88083 - DNA, 25 bp, probe
atcctgcattttcctccttttgtcc

SEQ ID NO: 88084 - DNA, 25 bp, probe
ctccttttgtccacaggtatgaggt

SEQ ID NO: 88085 - DNA, 25 bp, probe
tgcattttcctccttttgtccacag

SEQ ID NO: 88086 - DNA, 25 bp, probe
ctgcattttcctccttttgtccaca

SEQ ID NO: 88087 - DNA, 25 bp, probe
gcattttcctccttttgtccacagg

SEQ ID NO: 88088 - DNA, 25 bp, probe
tgacattgatgaagaaggcaaagcc

SEQ ID NO: 88089 - DNA, 25 bp, probe
cctgcattttcctccttttgtccac

SEQ ID NO: 88090 - DNA, 25 bp, probe
tcctgcattttcctccttttgtcca

SEQ ID NO: 88091 - DNA, 25 bp, probe
gacattgatgaagaaggcaaagccc

SEQ ID NO: 88092 - DNA, 25 bp, probe
gcatcctgcattttcctccttttgt

SEQ ID NO: 88093 - DNA, 25 bp, probe
cctccttttgtccacaggtatgagg

SEQ ID NO: 88094 - DNA, 25 bp, probe
aatggaaggatacggacctcttaaa

SEQ ID NO: 88095 - DNA, 25 bp, probe
aaatggaaggatacggacctcttaa

SEQ ID NO: 88096 - DNA, 25 bp, probe
taggctgtgaggaaatggaaggata

SEQ ID NO: 88097 - DNA, 25 bp, probe
atggaaggatacggacctcttaaag

SEQ ID NO: 88098 - DNA, 25 bp, probe
gaaatggaaggatacggacctctta

SEQ ID NO: 88099 - DNA, 25 bp, probe
ttaggctgtgaggaaatggaaggat

SEQ ID NO: 88100 - DNA, 25 bp, probe
gaaggatacggacctcttaaagcac

SEQ ID NO: 88101 - DNA, 25 bp, probe
ctgtgaggaaatggaaggatacgga

SEQ ID NO: 88102 - DNA, 25 bp, probe
tgtgaggaaatggaaggatacggac

SEQ ID NO: 88103 - DNA, 25 bp, probe
aggctgtgaggaaatggaaggatac

SEQ ID NO: 88104 - DNA, 25 bp, probe
aaggatacggacctcttaaagcaca

SEQ ID NO: 88105 - DNA, 25 bp, probe
gttaggctgtgaggaaatggaagga

SEQ ID NO: 88106 - DNA, 25 bp, probe
ggaaggatacggacctcttaaagca

SEQ ID NO: 88107 - DNA, 25 bp, probe
tggaaggatacggacctcttaaagc

SEQ ID NO: 88108 - DNA, 25 bp, probe
ggaaatggaaggatacggacctctt

SEQ ID NO: 88109 - DNA, 25 bp, probe
gttttagatgccacaaagcggttag

SEQ ID NO: 88110 - DNA, 25 bp, probe
cgtggagaaacttttggttttagat

SEQ ID NO: 88111 - DNA, 25 bp, probe
aggatacggacctcttaaagcacac

SEQ ID NO: 88112 - DNA, 25 bp, probe
aaacttttggttttagatgccacaa

SEQ ID NO: 88113 - DNA, 25 bp, probe
gagaaacttttggttttagatgcca

SEQ ID NO: 88114 - DNA, 25 bp, probe
tggagaaacttttggttttagatgc

SEQ ID NO: 88115 - DNA, 25 bp, probe
gtgaggaaatggaaggatacggacc

SEQ ID NO: 88116 - DNA, 25 bp, probe
agaaacttttggttttagatgccac

SEQ ID NO: 88117 - DNA, 25 bp, probe
ctcgtggagaaacttttggttttag

SEQ ID NO: 88118 - DNA, 25 bp, probe
gaaacttttggttttagatgccaca

SEQ ID NO: 88119 - DNA, 25 bp, probe
ggagaaacttttggttttagatgcc

SEQ ID NO: 88120 - DNA, 25 bp, probe
tcgtggagaaacttttggttttaga

SEQ ID NO: 88121 - DNA, 25 bp, probe
aacttttggttttagatgccacaaa

SEQ ID NO: 88122 - DNA, 25 bp, probe
gtggagaaacttttggttttagatg

SEQ ID NO: 88123 - DNA, 25 bp, probe
acttttggttttagatgccacaaag

SEQ ID NO: 88124 - DNA, 25 bp, probe
ggtgggtcattttctcctcatttcc

SEQ ID NO: 88125 - DNA, 25 bp, probe
gggtgggtcattttctcctcatttc

SEQ ID NO: 88126 - DNA, 25 bp, probe
gatacggacctcttaaagcacaccc

SEQ ID NO: 88127 - DNA, 25 bp, probe
ggatacggacctcttaaagcacacc

SEQ ID NO: 88128 - DNA, 25 bp, probe
cctcgtggagaaacttttggtttta

SEQ ID NO: 88129 - DNA, 25 bp, probe
gagtgttgtgtgcttgaacttttgg

SEQ ID NO: 88130 - DNA, 25 bp, probe
ttttagatgccacaaagcggttagg

SEQ ID NO: 88131 - DNA, 25 bp, probe
ggttaggctgtgaggaaatggaagg

SEQ ID NO: 88132 - DNA, 25 bp, probe
acctcttaaagcacacccgttcttc

SEQ ID NO: 88133 - DNA, 25 bp, probe
gacctcttaaagcacacccgttctt

SEQ ID NO: 88134 - DNA, 25 bp, probe
aggaaatggaaggatacggacctct

SEQ ID NO: 88135 - DNA, 25 bp, probe
ggtcattttctcctcatttccgtgg

SEQ ID NO: 88136 - DNA, 25 bp, probe
gggtcattttctcctcatttccgtg

SEQ ID NO: 88137 - DNA, 25 bp, probe
gtgggtcattttctcctcatttccg

SEQ ID NO: 88138 - DNA, 25 bp, probe
actatgtcattaaggaagcaactaa

SEQ ID NO: 88139 - DNA, 25 bp, probe
atgtcattaaggaagcaactaatct

SEQ ID NO: 88140 - DNA, 25 bp, probe
tgtcattaaggaagcaactaatcta

SEQ ID NO: 88141 - DNA, 25 bp, probe
gactatgtcattaaggaagcaacta

SEQ ID NO: 88142 - DNA, 25 bp, probe
gaagagagtgaaagccaagttagag

SEQ ID NO: 88143 - DNA, 25 bp, probe
gtcattaaggaagcaactaatctag

SEQ ID NO: 88144 - DNA, 25 bp, probe
tatgtcattaaggaagcaactaatc

SEQ ID NO: 88145 - DNA, 25 bp, probe
ctatgtcattaaggaagcaactaat

SEQ ID NO: 88146 - DNA, 25 bp, probe
agttgctgaacaggttgactatgtc

SEQ ID NO: 88147 - DNA, 25 bp, probe
aagagagtgaaagccaagttagagg

SEQ ID NO: 88148 - DNA, 25 bp, probe
ggaagagagtgaaagccaagttaga

SEQ ID NO: 88149 - DNA, 25 bp, probe
cagttgctgaacaggttgactatgt

SEQ ID NO: 88150 - DNA, 25 bp, probe
cagtgagtgtgtggaagagagtgaa

SEQ ID NO: 88151 - DNA, 25 bp, probe
gtgagtgtgtggaagagagtgaaag

SEQ ID NO: 88152 - DNA, 25 bp, probe
gagatgttgatccgaataggaggat

SEQ ID NO: 88153 - DNA, 25 bp, probe
cgagatgttgatccgaataggagga

SEQ ID NO: 88154 - DNA, 25 bp, probe
agatgttgatccgaataggaggatg

SEQ ID NO: 88155 - DNA, 25 bp, probe
agtgagtgtgtggaagagagtgaaa

SEQ ID NO: 88156 - DNA, 25 bp, probe
atgttgatccgaataggaggatgtc

SEQ ID NO: 88157 - DNA, 25 bp, probe
gatgttgatccgaataggaggatgt

SEQ ID NO: 88158 - DNA, 25 bp, probe
tggaagagagtgaaagccaagttag

SEQ ID NO: 88159 - DNA, 25 bp, probe
tcattaaggaagcaactaatctaga

SEQ ID NO: 88160 - DNA, 25 bp, probe
aagagagaaactcctatgcagtgag

SEQ ID NO: 88161 - DNA, 25 bp, probe
gtggaagagagtgaaagccaagtta

SEQ ID NO: 88162 - DNA, 25 bp, probe
agagagtgaaagccaagttagaggg

SEQ ID NO: 88163 - DNA, 25 bp, probe
caagagagaaactcctatgcagtga

SEQ ID NO: 88164 - DNA, 25 bp, probe
tgactatgtcattaaggaagcaact

SEQ ID NO: 88165 - DNA, 25 bp, probe
acaggttgactatgtcattaaggaa

SEQ ID NO: 88166 - DNA, 25 bp, probe
aacaggttgactatgtcattaagga

SEQ ID NO: 88167 - DNA, 25 bp, probe
aggttgactatgtcattaaggaagc

SEQ ID NO: 88168 - DNA, 25 bp, probe
gaacaggttgactatgtcattaagg

SEQ ID NO: 88169 - DNA, 25 bp, probe
ttgactatgtcattaaggaagcaac

SEQ ID NO: 88170 - DNA, 25 bp, probe
gttgactatgtcattaaggaagcaa

SEQ ID NO: 88171 - DNA, 25 bp, probe
ggttgactatgtcattaaggaagca

SEQ ID NO: 88172 - DNA, 25 bp, probe
caggttgactatgtcattaaggaag

SEQ ID NO: 88173 - DNA, 25 bp, probe
gctgaacaggttgactatgtcatta

SEQ ID NO: 88174 - DNA, 25 bp, probe
gatccgaataggaggatgtcagttg

SEQ ID NO: 88175 - DNA, 25 bp, probe
gttgatccgaataggaggatgtcag

SEQ ID NO: 88176 - DNA, 25 bp, probe
tgaacaggttgactatgtcattaag

SEQ ID NO: 88177 - DNA, 25 bp, probe
ctgaacaggttgactatgtcattaa

SEQ ID NO: 88178 - DNA, 25 bp, probe
tatgcagtgagtgtgtggaagagag

SEQ ID NO: 88179 - DNA, 25 bp, probe
ctatgcagtgagtgtgtggaagaga

SEQ ID NO: 88180 - DNA, 25 bp, probe
gaataggaggatgtcagttgctgaa

SEQ ID NO: 88181 - DNA, 25 bp, probe
aataggaggatgtcagttgctgaac

SEQ ID NO: 88182 - DNA, 25 bp, probe
gtcacagcccaagattatttggcag

SEQ ID NO: 88183 - DNA, 25 bp, probe
cagtacaaaacatgctggatattgc

SEQ ID NO: 88184 - DNA, 25 bp, probe
agtacaaaacatgctggatattgcg

SEQ ID NO: 88185 - DNA, 25 bp, probe
aaaacatgctggatattgcgtgatc

SEQ ID NO: 88186 - DNA, 25 bp, probe
tacaaaacatgctggatattgcgtg

SEQ ID NO: 88187 - DNA, 25 bp, probe
gtacaaaacatgctggatattgcgt

SEQ ID NO: 88188 - DNA, 25 bp, probe
caaaacatgctggatattgcgtgat

SEQ ID NO: 88189 - DNA, 25 bp, probe
aaacatgctggatattgcgtgatca

SEQ ID NO: 88190 - DNA, 25 bp, probe
acaaaacatgctggatattgcgtga

SEQ ID NO: 88191 - DNA, 25 bp, probe
ttagccaccagtacaaaacatgctg

SEQ ID NO: 88192 - DNA, 25 bp, probe
gttagccaccagtacaaaacatgct

SEQ ID NO: 88193 - DNA, 25 bp, probe
ccagtacaaaacatgctggatattg

SEQ ID NO: 88194 - DNA, 25 bp, probe
accagtacaaaacatgctggatatt

SEQ ID NO: 88195 - DNA, 25 bp, probe
tgttagccaccagtacaaaacatgc

SEQ ID NO: 88196 - DNA, 25 bp, probe
caccagtacaaaacatgctggatat

SEQ ID NO: 88197 - DNA, 25 bp, probe
ccaccagtacaaaacatgctggata

SEQ ID NO: 88198 - DNA, 25 bp, probe
gtgtacctgattctggaatatgctc

SEQ ID NO: 88199 - DNA, 25 bp, probe
acgataatagaggagttggcagatg

SEQ ID NO: 88200 - DNA, 25 bp, probe
cacgataatagaggagttggcagat

SEQ ID NO: 88201 - DNA, 25 bp, probe
ggtgtacctgattctggaatatgct

SEQ ID NO: 88202 - DNA, 25 bp, probe
tctgccacctcatttgtctttattt

SEQ ID NO: 88203 - DNA, 25 bp, probe
cacagccacgataatagaggagttg

SEQ ID NO: 88204 - DNA, 25 bp, probe
ctctgccacctcatttgtctttatt

SEQ ID NO: 88205 - DNA, 25 bp, probe
tgtacctgattctggaatatgctcc

SEQ ID NO: 88206 - DNA, 25 bp, probe
gcctgtataactatttccatgatgc

SEQ ID NO: 88207 - DNA, 25 bp, probe
cgcctgtataactatttccatgatg

SEQ ID NO: 88208 - DNA, 25 bp, probe
cgataatagaggagttggcagatgc

SEQ ID NO: 88209 - DNA, 25 bp, probe
gtataactatttccatgatgcacgc

SEQ ID NO: 88210 - DNA, 25 bp, probe
tgtataactatttccatgatgcacg

SEQ ID NO: 88211 - DNA, 25 bp, probe
tataactatttccatgatgcacgcc

SEQ ID NO: 88212 - DNA, 25 bp, probe
cctgtataactatttccatgatgca

SEQ ID NO: 88213 - DNA, 25 bp, probe
ctcccgtttctgtcctttctattgg

SEQ ID NO: 88214 - DNA, 25 bp, probe
cgggtgtacctgattctggaatatg

SEQ ID NO: 88215 - DNA, 25 bp, probe
gctctgccacctcatttgtctttat

SEQ ID NO: 88216 - DNA, 25 bp, probe
gggtgtacctgattctggaatatgc

SEQ ID NO: 88217 - DNA, 25 bp, probe
ctgccacctcatttgtctttatttt

SEQ ID NO: 88218 - DNA, 25 bp, probe
gcacagccacgataatagaggagtt

SEQ ID NO: 88219 - DNA, 25 bp, probe
ccacgataatagaggagttggcaga

SEQ ID NO: 88220 - DNA, 25 bp, probe
ctgtataactatttccatgatgcac

SEQ ID NO: 88221 - DNA, 25 bp, probe
cgtcaggaatttcagccaataggag

SEQ ID NO: 88222 - DNA, 25 bp, probe
gctcccgtttctgtcctttctattg

SEQ ID NO: 88223 - DNA, 25 bp, probe
acagccacgataatagaggagttgg

SEQ ID NO: 88224 - DNA, 25 bp, probe
gtcaggaatttcagccaataggagc

SEQ ID NO: 88225 - DNA, 25 bp, probe
tacctgattctggaatatgctccaa

SEQ ID NO: 88226 - DNA, 25 bp, probe
gcgcctgtataactatttccatgat

SEQ ID NO: 88227 - DNA, 25 bp, probe
ctctgttccctttgtgtgtgttcag

SEQ ID NO: 88228 - DNA, 25 bp, probe
ggctcccgtttctgtcctttctatt

SEQ ID NO: 88229 - DNA, 25 bp, probe
cagtgagacatcatggctacagcaa

SEQ ID NO: 88230 - DNA, 25 bp, probe
aggaatttcagccaataggagccag

SEQ ID NO: 88231 - DNA, 25 bp, probe
tcaggaatttcagccaataggagcc

SEQ ID NO: 88232 - DNA, 25 bp, probe
gtacctgattctggaatatgctcca

SEQ ID NO: 88233 - DNA, 25 bp, probe
ctgcgcctgtataactatttccatg

SEQ ID NO: 88234 - DNA, 25 bp, probe
gtgagacatcatggctacagcaaac

SEQ ID NO: 88235 - DNA, 25 bp, probe
ataactatttccatgatgcacgccg

SEQ ID NO: 88236 - DNA, 25 bp, probe
cctgtgtagcagtgagacatcatgg

SEQ ID NO: 88237 - DNA, 25 bp, probe
tgcgcctgtataactatttccatga

SEQ ID NO: 88238 - DNA, 25 bp, probe
acctgattctggaatatgctccaag

SEQ ID NO: 88239 - DNA, 25 bp, probe
agtgagacatcatggctacagcaaa

SEQ ID NO: 88240 - DNA, 25 bp, probe
caggaatttcagccaataggagcca

SEQ ID NO: 88241 - DNA, 25 bp, probe
atcatggctacagcaaaccaaacag

SEQ ID NO: 88242 - DNA, 25 bp, probe
ctaagcagattgtgtggaatgaatg

SEQ ID NO: 88243 - DNA, 25 bp, probe
taagcagattgtgtggaatgaatgg

SEQ ID NO: 88244 - DNA, 25 bp, probe
agattgtgtggaatgaatggaacat

SEQ ID NO: 88245 - DNA, 25 bp, probe
ggaatgaatggaacatggaggataa

SEQ ID NO: 88246 - DNA, 25 bp, probe
ctcctagaagttggtcatgctaatg

SEQ ID NO: 88247 - DNA, 25 bp, probe
gctaagcagattgtgtggaatgaat

SEQ ID NO: 88248 - DNA, 25 bp, probe
tggaatgaatggaacatggaggata

SEQ ID NO: 88249 - DNA, 25 bp, probe
cagattgtgtggaatgaatggaaca

SEQ ID NO: 88250 - DNA, 25 bp, probe
gattgtgtggaatgaatggaacatg

SEQ ID NO: 88251 - DNA, 25 bp, probe
gcagattgtgtggaatgaatggaac

SEQ ID NO: 88252 - DNA, 25 bp, probe
agcagattgtgtggaatgaatggaa

SEQ ID NO: 88253 - DNA, 25 bp, probe
aagcagattgtgtggaatgaatgga

SEQ ID NO: 88254 - DNA, 25 bp, probe
taatgatatagtgggacaggcagaa

SEQ ID NO: 88255 - DNA, 25 bp, probe
gctcctagaagttggtcatgctaat

SEQ ID NO: 88256 - DNA, 25 bp, probe
ctaatgatatagtgggacaggcaga

SEQ ID NO: 88257 - DNA, 25 bp, probe
attgtgtggaatgaatggaacatgg

SEQ ID NO: 88258 - DNA, 25 bp, probe
aagtttgatgagaataccaagactg

SEQ ID NO: 88259 - DNA, 25 bp, probe
caagtttgatgagaataccaagact

SEQ ID NO: 88260 - DNA, 25 bp, probe
atgaatggaacatggaggataaagt

SEQ ID NO: 88261 - DNA, 25 bp, probe
atgctaatgatatagtgggacaggc

SEQ ID NO: 88262 - DNA, 25 bp, probe
gtggaatgaatggaacatggaggat

SEQ ID NO: 88263 - DNA, 25 bp, probe
aatggaacatggaggataaagtcag

SEQ ID NO: 88264 - DNA, 25 bp, probe
gaatggaacatggaggataaagtca

SEQ ID NO: 88265 - DNA, 25 bp, probe
tgaatggaacatggaggataaagtc

SEQ ID NO: 88266 - DNA, 25 bp, probe
catgctaatgatatagtgggacagg

SEQ ID NO: 88267 - DNA, 25 bp, probe
aatgatatagtgggacaggcagaac

SEQ ID NO: 88268 - DNA, 25 bp, probe
cctagaagttggtcatgctaatgat

SEQ ID NO: 88269 - DNA, 25 bp, probe
gttggtcatgctaatgatatagtgg

SEQ ID NO: 88270 - DNA, 25 bp, probe
aatgaatggaacatggaggataaag

SEQ ID NO: 88271 - DNA, 25 bp, probe
gaatgaatggaacatggaggataaa

SEQ ID NO: 88272 - DNA, 25 bp, probe
tcctagaagttggtcatgctaatga

SEQ ID NO: 88273 - DNA, 25 bp, probe
ttgtgtggaatgaatggaacatgga

SEQ ID NO: 88274 - DNA, 25 bp, probe
gctaatgatatagtgggacaggcag

SEQ ID NO: 88275 - DNA, 25 bp, probe
ggctaagcagattgtgtggaatgaa

SEQ ID NO: 88276 - DNA, 25 bp, probe
agttggtcatgctaatgatatagtg

SEQ ID NO: 88277 - DNA, 25 bp, probe
agtttgatgagaataccaagactgg

SEQ ID NO: 88278 - DNA, 25 bp, probe
ctagaagttggtcatgctaatgata

SEQ ID NO: 88279 - DNA, 25 bp, probe
tgtgtggaatgaatggaacatggag

SEQ ID NO: 88280 - DNA, 25 bp, probe
aagttggtcatgctaatgatatagt

SEQ ID NO: 88281 - DNA, 25 bp, probe
atgatatagtgggacaggcagaact

SEQ ID NO: 88282 - DNA, 25 bp, probe
agaagttggtcatgctaatgatata

SEQ ID NO: 88283 - DNA, 25 bp, probe
tagaagttggtcatgctaatgatat

SEQ ID NO: 88284 - DNA, 25 bp, probe
gtttgatgagaataccaagactggc

SEQ ID NO: 88285 - DNA, 25 bp, probe
atggaacatggaggataaagtcagc

SEQ ID NO: 88286 - DNA, 25 bp, probe
aaccaaatgctgctgtttcttcaag

SEQ ID NO: 88287 - DNA, 25 bp, probe
cttcaagaggagaaagagaaaatcg

SEQ ID NO: 88288 - DNA, 25 bp, probe
caaatgctgctgtttcttcaagagg

SEQ ID NO: 88289 - DNA, 25 bp, probe
ccaaatgctgctgtttcttcaagag

SEQ ID NO: 88290 - DNA, 25 bp, probe
aaatgctgctgtttcttcaagagga

SEQ ID NO: 88291 - DNA, 25 bp, probe
ttcaagaggagaaagagaaaatcgc

SEQ ID NO: 88292 - DNA, 25 bp, probe
caagaggagaaagagaaaatcgctg

SEQ ID NO: 88293 - DNA, 25 bp, probe
tcaagaggagaaagagaaaatcgct

SEQ ID NO: 88294 - DNA, 25 bp, probe
aatgctgctgtttcttcaagaggag

SEQ ID NO: 88295 - DNA, 25 bp, probe
accaaatgctgctgtttcttcaaga

SEQ ID NO: 88296 - DNA, 25 bp, probe
aaaccaaatgctgctgtttcttcaa

SEQ ID NO: 88297 - DNA, 25 bp, probe
atgctgctgtttcttcaagaggaga

SEQ ID NO: 88298 - DNA, 25 bp, probe
aagaggagaaagagaaaatcgctgc

SEQ ID NO: 88299 - DNA, 25 bp, probe
tcttcaagaggagaaagagaaaatc

SEQ ID NO: 88300 - DNA, 25 bp, probe
ttcttcaagaggagaaagagaaaat

SEQ ID NO: 88301 - DNA, 25 bp, probe
tgtttcttcaagaggagaaagagaa

SEQ ID NO: 88302 - DNA, 25 bp, probe
ctgtttcttcaagaggagaaagaga

SEQ ID NO: 88303 - DNA, 25 bp, probe
gtttcttcaagaggagaaagagaaa

SEQ ID NO: 88304 - DNA, 25 bp, probe
tgctgctgtttcttcaagaggagaa

SEQ ID NO: 88305 - DNA, 25 bp, probe
gctgtttcttcaagaggagaaagag

SEQ ID NO: 88306 - DNA, 25 bp, probe
ctgctgtttcttcaagaggagaaag

SEQ ID NO: 88307 - DNA, 25 bp, probe
tgctgtttcttcaagaggagaaaga

SEQ ID NO: 88308 - DNA, 25 bp, probe
ccgatgaaaccaaatgctgctgttt

SEQ ID NO: 88309 - DNA, 25 bp, probe
agaggagaaagagaaaatcgctgca

SEQ ID NO: 88310 - DNA, 25 bp, probe
gctgctgtttcttcaagaggagaaa

SEQ ID NO: 88311 - DNA, 25 bp, probe
tttcttcaagaggagaaagagaaaa

SEQ ID NO: 88312 - DNA, 25 bp, probe
caagtacaatgagagcttccagttc

SEQ ID NO: 88313 - DNA, 25 bp, probe
aagtacaatgagagcttccagttca

SEQ ID NO: 88314 - DNA, 25 bp, probe
ttgcgaccaaatccaagaacaatag

SEQ ID NO: 88315 - DNA, 25 bp, probe
gacctgctaatcaagacctttgtac

SEQ ID NO: 88316 - DNA, 25 bp, probe
agtacaatgagagcttccagttcac

SEQ ID NO: 88317 - DNA, 25 bp, probe
ccaagtacaatgagagcttccagtt

SEQ ID NO: 88318 - DNA, 25 bp, probe
cgacctgctaatcaagacctttgta

SEQ ID NO: 88319 - DNA, 25 bp, probe
cgaccaaatccaagaacaatagctg

SEQ ID NO: 88320 - DNA, 25 bp, probe
gtacaatgagagcttccagttcacg

SEQ ID NO: 88321 - DNA, 25 bp, probe
tttgcgaccaaatccaagaacaata

SEQ ID NO: 88322 - DNA, 25 bp, probe
gaccaaatccaagaacaatagctgg

SEQ ID NO: 88323 - DNA, 25 bp, probe
tgcgaccaaatccaagaacaatagc

SEQ ID NO: 88324 - DNA, 25 bp, probe
aagtctctgtccatgttgagctgtt

SEQ ID NO: 88325 - DNA, 25 bp, probe
tgctaatcaagacctttgtacagac

SEQ ID NO: 88326 - DNA, 25 bp, probe
cgttcatcgaggtcaacatcattgg

SEQ ID NO: 88327 - DNA, 25 bp, probe
ccgttcatcgaggtcaacatcattg

SEQ ID NO: 88328 - DNA, 25 bp, probe
ctgctaatcaagacctttgtacaga

SEQ ID NO: 88329 - DNA, 25 bp, probe
agtctctgtccatgttgagctgttc

SEQ ID NO: 88330 - DNA, 25 bp, probe
gaagtctctgtccatgttgagctgt

SEQ ID NO: 88331 - DNA, 25 bp, probe
tgaagtctctgtccatgttgagctg

SEQ ID NO: 88332 - DNA, 25 bp, probe
gtgaagtctctgtccatgttgagct

SEQ ID NO: 88333 - DNA, 25 bp, probe
ctaatcaagacctttgtacagacgc

SEQ ID NO: 88334 - DNA, 25 bp, probe
gctaatcaagacctttgtacagacg

SEQ ID NO: 88335 - DNA, 25 bp, probe
gcgaccaaatccaagaacaatagct

SEQ ID NO: 88336 - DNA, 25 bp, probe
gtttgcgaccaaatccaagaacaat

SEQ ID NO: 88337 - DNA, 25 bp, probe
acctgctaatcaagacctttgtaca

SEQ ID NO: 88338 - DNA, 25 bp, probe
cctgctaatcaagacctttgtacag

SEQ ID NO: 88339 - DNA, 25 bp, probe
accaaatccaagaacaatagctggg

SEQ ID NO: 88340 - DNA, 25 bp, probe
taatcaagacctttgtacagacgca

SEQ ID NO: 88341 - DNA, 25 bp, probe
tctgtccatgttgagctgttcactc

SEQ ID NO: 88342 - DNA, 25 bp, probe
ctctgtccatgttgagctgttcact

SEQ ID NO: 88343 - DNA, 25 bp, probe
tctctgtccatgttgagctgttcac

SEQ ID NO: 88344 - DNA, 25 bp, probe
gtctctgtccatgttgagctgttca

SEQ ID NO: 88345 - DNA, 25 bp, probe
tcccaagtacaatgagagcttccag

SEQ ID NO: 88346 - DNA, 25 bp, probe
gttcatcgaggtcaacatcattggg

SEQ ID NO: 88347 - DNA, 25 bp, probe
caagtttgcgaccaaatccaagaac

SEQ ID NO: 88348 - DNA, 25 bp, probe
ccgacctgctaatcaagacctttgt

SEQ ID NO: 88349 - DNA, 25 bp, probe
accgacctgctaatcaagacctttg

SEQ ID NO: 88350 - DNA, 25 bp, probe
atcaagacctttgtacagacgcaat

SEQ ID NO: 88351 - DNA, 25 bp, probe
ctcccaagtacaatgagagcttcca

SEQ ID NO: 88352 - DNA, 25 bp, probe
cccaagtacaatgagagcttccagt

SEQ ID NO: 88353 - DNA, 25 bp, probe
aaatccaagaacaatagctgggctc

SEQ ID NO: 88354 - DNA, 25 bp, probe
tacaatgagagcttccagttcacgc

SEQ ID NO: 88355 - DNA, 25 bp, probe
aatcaagacctttgtacagacgcaa

SEQ ID NO: 88356 - DNA, 25 bp, probe
ctaaccttgtcctaatacgctatgt

SEQ ID NO: 88357 - DNA, 25 bp, probe
actaaccttgtcctaatacgctatg

SEQ ID NO: 88358 - DNA, 25 bp, probe
taaccttgtcctaatacgctatgtg

SEQ ID NO: 88359 - DNA, 25 bp, probe
cttgtcctaatacgctatgtgcttg

SEQ ID NO: 88360 - DNA, 25 bp, probe
gactaaccttgtcctaatacgctat

SEQ ID NO: 88361 - DNA, 25 bp, probe
tgactaaccttgtcctaatacgcta

SEQ ID NO: 88362 - DNA, 25 bp, probe
ttgactaaccttgtcctaatacgct

SEQ ID NO: 88363 - DNA, 25 bp, probe
gttgactaaccttgtcctaatacgc

SEQ ID NO: 88364 - DNA, 25 bp, probe
ccttgtcctaatacgctatgtgctt

SEQ ID NO: 88365 - DNA, 25 bp, probe
ttgtcctaatacgctatgtgcttgg

SEQ ID NO: 88366 - DNA, 25 bp, probe
aaccttgtcctaatacgctatgtgc

SEQ ID NO: 88367 - DNA, 25 bp, probe
accttgtcctaatacgctatgtgct

SEQ ID NO: 88368 - DNA, 25 bp, probe
atttcaatatagaactgttcagcag

SEQ ID NO: 88369 - DNA, 25 bp, probe
tggttgactaaccttgtcctaatac

SEQ ID NO: 88370 - DNA, 25 bp, probe
aatatagaactgttcagcagtcctg

SEQ ID NO: 88371 - DNA, 25 bp, probe
caatatagaactgttcagcagtcct

SEQ ID NO: 88372 - DNA, 25 bp, probe
cttggttgactaaccttgtcctaat

SEQ ID NO: 88373 - DNA, 25 bp, probe
tcaatatagaactgttcagcagtcc

SEQ ID NO: 88374 - DNA, 25 bp, probe
ttggttgactaaccttgtcctaata

SEQ ID NO: 88375 - DNA, 25 bp, probe
ggttgactaaccttgtcctaatacg

SEQ ID NO: 88376 - DNA, 25 bp, probe
ttcaatatagaactgttcagcagtc

SEQ ID NO: 88377 - DNA, 25 bp, probe
catgctgggttcagtatgggttaaa

SEQ ID NO: 88378 - DNA, 25 bp, probe
tgtcctaatacgctatgtgcttggc

SEQ ID NO: 88379 - DNA, 25 bp, probe
tatttcaatatagaactgttcagca

SEQ ID NO: 88380 - DNA, 25 bp, probe
gcttggttgactaaccttgtcctaa

SEQ ID NO: 88381 - DNA, 25 bp, probe
atgctgggttcagtatgggttaaaa

SEQ ID NO: 88382 - DNA, 25 bp, probe
acatgctgggttcagtatgggttaa

SEQ ID NO: 88383 - DNA, 25 bp, probe
atatagaactgttcagcagtcctgc

SEQ ID NO: 88384 - DNA, 25 bp, probe
tttcaatatagaactgttcagcagt

SEQ ID NO: 88385 - DNA, 25 bp, probe
gacatgctgggttcagtatgggtta

SEQ ID NO: 88386 - DNA, 25 bp, probe
tgcttggttgactaaccttgtccta

SEQ ID NO: 88387 - DNA, 25 bp, probe
ctgtgcttggttgactaaccttgtc

SEQ ID NO: 88388 - DNA, 25 bp, probe
gtgcttggttgactaaccttgtcct

SEQ ID NO: 88389 - DNA, 25 bp, probe
ctgagacatgctgggttcagtatgg

SEQ ID NO: 88390 - DNA, 25 bp, probe
cctgagacatgctgggttcagtatg

SEQ ID NO: 88391 - DNA, 25 bp, probe
aagctgtgcttggttgactaacctt

SEQ ID NO: 88392 - DNA, 25 bp, probe
gaaagctgtgcttggttgactaacc

SEQ ID NO: 88393 - DNA, 25 bp, probe
ggaaagctgtgcttggttgactaac

SEQ ID NO: 88394 - DNA, 25 bp, probe
aaagctgtgcttggttgactaacct

SEQ ID NO: 88395 - DNA, 25 bp, probe
tggagtggttcttgttcattgtaat

SEQ ID NO: 88396 - DNA, 25 bp, probe
tctgattgtcctgacctactgtata

SEQ ID NO: 88397 - DNA, 25 bp, probe
atctgattgtcctgacctactgtat

SEQ ID NO: 88398 - DNA, 25 bp, probe
atggagtggttcttgttcattgtaa

SEQ ID NO: 88399 - DNA, 25 bp, probe
tgattgtcctgacctactgtataag

SEQ ID NO: 88400 - DNA, 25 bp, probe
ctgattgtcctgacctactgtataa

SEQ ID NO: 88401 - DNA, 25 bp, probe
aatctgattgtcctgacctactgta

SEQ ID NO: 88402 - DNA, 25 bp, probe
gatggagtggttcttgttcattgta

SEQ ID NO: 88403 - DNA, 25 bp, probe
aggtgactcatattcttaatgttgc

SEQ ID NO: 88404 - DNA, 25 bp, probe
ggagtggttcttgttcattgtaatg

SEQ ID NO: 88405 - DNA, 25 bp, probe
gattgtcctgacctactgtataagt

SEQ ID NO: 88406 - DNA, 25 bp, probe
gagtggttcttgttcattgtaatgc

SEQ ID NO: 88407 - DNA, 25 bp, probe
taagtgtgacagaatacaggagaac

SEQ ID NO: 88408 - DNA, 25 bp, probe
aagcaataagtgtgacagaatacag

SEQ ID NO: 88409 - DNA, 25 bp, probe
gacagaatacaggagaacagttcat

SEQ ID NO: 88410 - DNA, 25 bp, probe
ataagtgtgacagaatacaggagaa

SEQ ID NO: 88411 - DNA, 25 bp, probe
aataagtgtgacagaatacaggaga

SEQ ID NO: 88412 - DNA, 25 bp, probe
caataagtgtgacagaatacaggag

SEQ ID NO: 88413 - DNA, 25 bp, probe
gcaataagtgtgacagaatacagga

SEQ ID NO: 88414 - DNA, 25 bp, probe
agcaataagtgtgacagaatacagg

SEQ ID NO: 88415 - DNA, 25 bp, probe
acagaatacaggagaacagttcatg

SEQ ID NO: 88416 - DNA, 25 bp, probe
attcatgttgtggaagaagtagagc

SEQ ID NO: 88417 - DNA, 25 bp, probe
aattcatgttgtggaagaagtagag

SEQ ID NO: 88418 - DNA, 25 bp, probe
gtgacagaatacaggagaacagttc

SEQ ID NO: 88419 - DNA, 25 bp, probe
tgtgacagaatacaggagaacagtt

SEQ ID NO: 88420 - DNA, 25 bp, probe
aagtgtgacagaatacaggagaaca

SEQ ID NO: 88421 - DNA, 25 bp, probe
agatggagtggttcttgttcattgt

SEQ ID NO: 88422 - DNA, 25 bp, probe
tgacagaatacaggagaacagttca

SEQ ID NO: 88423 - DNA, 25 bp, probe
cacttgtgtctcaatgaccaatcaa

SEQ ID NO: 88424 - DNA, 25 bp, probe
agtgtgacagaatacaggagaacag

SEQ ID NO: 88425 - DNA, 25 bp, probe
ctgctggatttgtttgtatttgttc

SEQ ID NO: 88426 - DNA, 25 bp, probe
tatcaagagggcaaagaaagcaata

SEQ ID NO: 88427 - DNA, 25 bp, probe
gtgtgacagaatacaggagaacagt

SEQ ID NO: 88428 - DNA, 25 bp, probe
tgctttcctcagtgactttacatat

SEQ ID NO: 88429 - DNA, 25 bp, probe
cctgctggatttgtttgtatttgtt

SEQ ID NO: 88430 - DNA, 25 bp, probe
caaagaaagcaataagtgtgacaga

SEQ ID NO: 88431 - DNA, 25 bp, probe
ggtgactcatattcttaatgttgca

SEQ ID NO: 88432 - DNA, 25 bp, probe
tctgaattgacttctatagccatct

SEQ ID NO: 88433 - DNA, 25 bp, probe
aaagaaagcaataagtgtgacagaa

SEQ ID NO: 88434 - DNA, 25 bp, probe
atatcaagagggcaaagaaagcaat

SEQ ID NO: 88435 - DNA, 25 bp, probe
aaatgctttcctcagtgactttaca

SEQ ID NO: 88436 - DNA, 25 bp, probe
atgctttcctcagtgactttacata

SEQ ID NO: 88437 - DNA, 25 bp, probe
aagaaagcaataagtgtgacagaat

SEQ ID NO: 88438 - DNA, 25 bp, probe
tacatatcaagagggcaaagaaagc

SEQ ID NO: 88439 - DNA, 25 bp, probe
ttatacctcatctctaacctgctaa

SEQ ID NO: 88440 - DNA, 25 bp, probe
ctcacatcagagactccattgttat

SEQ ID NO: 88441 - DNA, 25 bp, probe
tcacatcagagactccattgttatt

SEQ ID NO: 88442 - DNA, 25 bp, probe
agttatacctcatctctaacctgct

SEQ ID NO: 88443 - DNA, 25 bp, probe
aagttatacctcatctctaacctgc

SEQ ID NO: 88444 - DNA, 25 bp, probe
cctcacatcagagactccattgtta

SEQ ID NO: 88445 - DNA, 25 bp, probe
tcttcaattccactgagcacaagta

SEQ ID NO: 88446 - DNA, 25 bp, probe
gttatacctcatctctaacctgcta

SEQ ID NO: 88447 - DNA, 25 bp, probe
tacctcatctctaacctgctaaagt

SEQ ID NO: 88448 - DNA, 25 bp, probe
actaatgattcttacagggattggt

SEQ ID NO: 88449 - DNA, 25 bp, probe
atacctcatctctaacctgctaaag

SEQ ID NO: 88450 - DNA, 25 bp, probe
ggtcgatactaatgattcttacagg

SEQ ID NO: 88451 - DNA, 25 bp, probe
tccagcaaaccagtatttaaccata

SEQ ID NO: 88452 - DNA, 25 bp, probe
catctccagcaaaccagtatttaac

SEQ ID NO: 88453 - DNA, 25 bp, probe
tcatctccagcaaaccagtatttaa

SEQ ID NO: 88454 - DNA, 25 bp, probe
ctaatgattcttacagggattggtg

SEQ ID NO: 88455 - DNA, 25 bp, probe
ccagcaaaccagtatttaaccataa

SEQ ID NO: 88456 - DNA, 25 bp, probe
gtcatctccagcaaaccagtattta

SEQ ID NO: 88457 - DNA, 25 bp, probe
cttcaattccactgagcacaagtac

SEQ ID NO: 88458 - DNA, 25 bp, probe
gttatttatcttgtcatctccagca

SEQ ID NO: 88459 - DNA, 25 bp, probe
tgttatttatcttgtcatctccagc

SEQ ID NO: 88460 - DNA, 25 bp, probe
atctccagcaaaccagtatttaacc

SEQ ID NO: 88461 - DNA, 25 bp, probe
cctcatctctaacctgctaaagttt

SEQ ID NO: 88462 - DNA, 25 bp, probe
acaattccaaccatctttacattca

SEQ ID NO: 88463 - DNA, 25 bp, probe
ctcatctctaacctgctaaagtttg

SEQ ID NO: 88464 - DNA, 25 bp, probe
ctccagcaaaccagtatttaaccat

SEQ ID NO: 88465 - DNA, 25 bp, probe
atttatcttgtcatctccagcaaac

SEQ ID NO: 88466 - DNA, 25 bp, probe
atctctaacctgctaaagtttgaac

SEQ ID NO: 88467 - DNA, 25 bp, probe
catctctaacctgctaaagtttgaa

SEQ ID NO: 88468 - DNA, 25 bp, probe
tcatctctaacctgctaaagtttga

SEQ ID NO: 88469 - DNA, 25 bp, probe
acctcatctctaacctgctaaagtt

SEQ ID NO: 88470 - DNA, 25 bp, probe
ctttacctggttgtgtcttcaattc

SEQ ID NO: 88471 - DNA, 25 bp, probe
tatacctcatctctaacctgctaaa

SEQ ID NO: 88472 - DNA, 25 bp, probe
tttatcttgtcatctccagcaaacc

SEQ ID NO: 88473 - DNA, 25 bp, probe
ttcttacagggattggtgtttagag

SEQ ID NO: 88474 - DNA, 25 bp, probe
tgattcttacagggattggtgttta

SEQ ID NO: 88475 - DNA, 25 bp, probe
taatgattcttacagggattggtgt

SEQ ID NO: 88476 - DNA, 25 bp, probe
attcttacagggattggtgtttaga

SEQ ID NO: 88477 - DNA, 25 bp, probe
atgattcttacagggattggtgttt

SEQ ID NO: 88478 - DNA, 25 bp, probe
aatgattcttacagggattggtgtt

SEQ ID NO: 88479 - DNA, 25 bp, probe
caattccaaccatctttacattcaa

SEQ ID NO: 88480 - DNA, 25 bp, probe
ctattggacagacacactcatcctc

SEQ ID NO: 88481 - DNA, 25 bp, probe
gattcttacagggattggtgtttag

SEQ ID NO: 88482 - DNA, 25 bp, probe
gcaaaccagtatttaaccataatgt

SEQ ID NO: 88483 - DNA, 25 bp, probe
aagaaccaggagtgtagaggatgat

SEQ ID NO: 88484 - DNA, 25 bp, probe
gagacgtactaagtgcaagatatga

SEQ ID NO: 88485 - DNA, 25 bp, probe
agacgtactaagtgcaagatatgaa

SEQ ID NO: 88486 - DNA, 25 bp, probe
ggagacgtactaagtgcaagatatg

SEQ ID NO: 88487 - DNA, 25 bp, probe
tggagacgtactaagtgcaagatat

SEQ ID NO: 88488 - DNA, 25 bp, probe
aaccaggagtgtagaggatgatgag

SEQ ID NO: 88489 - DNA, 25 bp, probe
gaaccaggagtgtagaggatgatga

SEQ ID NO: 88490 - DNA, 25 bp, probe
agaaccaggagtgtagaggatgatg

SEQ ID NO: 88491 - DNA, 25 bp, probe
caggagtgtagaggatgatgaggag

SEQ ID NO: 88492 - DNA, 25 bp, probe
gtggagacgtactaagtgcaagata

SEQ ID NO: 88493 - DNA, 25 bp, probe
aaagaaccaggagtgtagaggatga

SEQ ID NO: 88494 - DNA, 25 bp, probe
atctgtcagagtggagacgtactaa

SEQ ID NO: 88495 - DNA, 25 bp, probe
gacgtactaagtgcaagatatgaaa

SEQ ID NO: 88496 - DNA, 25 bp, probe
aggagtgtagaggatgatgaggagg

SEQ ID NO: 88497 - DNA, 25 bp, probe
gatctgtcagagtggagacgtacta

SEQ ID NO: 88498 - DNA, 25 bp, probe
acgtactaagtgcaagatatgaaat

SEQ ID NO: 88499 - DNA, 25 bp, probe
ccaggagtgtagaggatgatgagga

SEQ ID NO: 88500 - DNA, 25 bp, probe
tctgtcagagtggagacgtactaag

SEQ ID NO: 88501 - DNA, 25 bp, probe
agtggagacgtactaagtgcaagat

SEQ ID NO: 88502 - DNA, 25 bp, probe
ctgtcagagtggagacgtactaagt

SEQ ID NO: 88503 - DNA, 25 bp, probe
accaggagtgtagaggatgatgagg

SEQ ID NO: 88504 - DNA, 25 bp, probe
cgtactaagtgcaagatatgaaatt

SEQ ID NO: 88505 - DNA, 25 bp, probe
tgtcagagtggagacgtactaagtg

SEQ ID NO: 88506 - DNA, 25 bp, probe
aagtgcaagatatgaaattgttgat

SEQ ID NO: 88507 - DNA, 25 bp, probe
gaaaagaaccaggagtgtagaggat

SEQ ID NO: 88508 - DNA, 25 bp, probe
aaaagaaccaggagtgtagaggatg

SEQ ID NO: 88509 - DNA, 25 bp, probe
aaggaaaagaaccaggagtgtagag

SEQ ID NO: 88510 - DNA, 25 bp, probe
gaaggaaaagaaccaggagtgtaga

SEQ ID NO: 88511 - DNA, 25 bp, probe
agagtggagacgtactaagtgcaag

SEQ ID NO: 88512 - DNA, 25 bp, probe
gagtggagacgtactaagtgcaaga

SEQ ID NO: 88513 - DNA, 25 bp, probe
taagtgcaagatatgaaattgttga

SEQ ID NO: 88514 - DNA, 25 bp, probe
gcaagatatgaaattgttgatactt

SEQ ID NO: 88515 - DNA, 25 bp, probe
gtgcaagatatgaaattgttgatac

SEQ ID NO: 88516 - DNA, 25 bp, probe
actaagtgcaagatatgaaattgtt

SEQ ID NO: 88517 - DNA, 25 bp, probe
tgcaagatatgaaattgttgatact

SEQ ID NO: 88518 - DNA, 25 bp, probe
agtgcaagatatgaaattgttgata

SEQ ID NO: 88519 - DNA, 25 bp, probe
ctaagtgcaagatatgaaattgttg

SEQ ID NO: 88520 - DNA, 25 bp, probe
cagagtggagacgtactaagtgcaa

SEQ ID NO: 88521 - DNA, 25 bp, probe
agtgtagaggatgatgaggagggtc

SEQ ID NO: 88522 - DNA, 25 bp, probe
gagtgtagaggatgatgaggagggt

SEQ ID NO: 88523 - DNA, 25 bp, probe
cgaaggaaaagaaccaggagtgtag

SEQ ID NO: 88524 - DNA, 25 bp, probe
tgatctgtcagagtggagacgtact

SEQ ID NO: 88525 - DNA, 25 bp, probe
tactaagtgcaagatatgaaattgt

SEQ ID NO: 88526 - DNA, 25 bp, probe
gtcagagtggagacgtactaagtgc

SEQ ID NO: 88527 - DNA, 25 bp, probe
ctgaagttggaggacaaactgaacc

SEQ ID NO: 88528 - DNA, 25 bp, probe
gctgaagttggaggacaaactgaac

SEQ ID NO: 88529 - DNA, 25 bp, probe
tgctgaagttggaggacaaactgaa

SEQ ID NO: 88530 - DNA, 25 bp, probe
gtatctgtatgaggttatgttgagg

SEQ ID NO: 88531 - DNA, 25 bp, probe
aatgtatgtaggaatcatgctggtt

SEQ ID NO: 88532 - DNA, 25 bp, probe
atgtatgtaggaatcatgctggttc

SEQ ID NO: 88533 - DNA, 25 bp, probe
tcaatgtatgtaggaatcatgctgg

SEQ ID NO: 88534 - DNA, 25 bp, probe
caatgtatgtaggaatcatgctggt

SEQ ID NO: 88535 - DNA, 25 bp, probe
gtatgtaggaatcatgctggttctc

SEQ ID NO: 88536 - DNA, 25 bp, probe
atcaatgtatgtaggaatcatgctg

SEQ ID NO: 88537 - DNA, 25 bp, probe
catcaatgtatgtaggaatcatgct

SEQ ID NO: 88538 - DNA, 25 bp, probe
agtatctgtatgaggttatgttgag

SEQ ID NO: 88539 - DNA, 25 bp, probe
gagtatctgtatgaggttatgttga

SEQ ID NO: 88540 - DNA, 25 bp, probe
tatgtaggaatcatgctggttctca

SEQ ID NO: 88541 - DNA, 25 bp, probe
tgtatgtaggaatcatgctggttct

SEQ ID NO: 88542 - DNA, 25 bp, probe
agagtatctgtatgaggttatgttg

SEQ ID NO: 88543 - DNA, 25 bp, probe
gtctaattacatattgaacttcggc

SEQ ID NO: 88544 - DNA, 25 bp, probe
aatggtggctgttgaggtaattaac

SEQ ID NO: 88545 - DNA, 25 bp, probe
tttattggaatgggagagtgatgat

SEQ ID NO: 88546 - DNA, 25 bp, probe
attgaagtagagaaagtgaggttgg

SEQ ID NO: 88547 - DNA, 25 bp, probe
tgattgaagtagagaaagtgaggtt

SEQ ID NO: 88548 - DNA, 25 bp, probe
tatctgtatgaggttatgttgaggg

SEQ ID NO: 88549 - DNA, 25 bp, probe
gattgaagtagagaaagtgaggttg

SEQ ID NO: 88550 - DNA, 25 bp, probe
atgattgaagtagagaaagtgaggt

SEQ ID NO: 88551 - DNA, 25 bp, probe
atctgtatgaggttatgttgagggt

SEQ ID NO: 88552 - DNA, 25 bp, probe
tttagccctttgtggttaatctctc

SEQ ID NO: 88553 - DNA, 25 bp, probe
ctttagccctttgtggttaatctct

SEQ ID NO: 88554 - DNA, 25 bp, probe
tctttagccctttgtggttaatctc

SEQ ID NO: 88555 - DNA, 25 bp, probe
ctctttagccctttgtggttaatct

SEQ ID NO: 88556 - DNA, 25 bp, probe
ccgtgaatcaacatttcttccttaa

SEQ ID NO: 88557 - DNA, 25 bp, probe
tccgtgaatcaacatttcttcctta

SEQ ID NO: 88558 - DNA, 25 bp, probe
gatccatactcggttctctctctga

SEQ ID NO: 88559 - DNA, 25 bp, probe
atccatactcggttctctctctgag

SEQ ID NO: 88560 - DNA, 25 bp, probe
ctaaatggtggctgttgaggtaatt

SEQ ID NO: 88561 - DNA, 25 bp, probe
tctgtatgaggttatgttgagggtc

SEQ ID NO: 88562 - DNA, 25 bp, probe
gaagtttagtttctcaggctcctac

SEQ ID NO: 88563 - DNA, 25 bp, probe
ttccgtgaatcaacatttcttcctt

SEQ ID NO: 88564 - DNA, 25 bp, probe
ttgttgggtttccgaagtttagttt

SEQ ID NO: 88565 - DNA, 25 bp, probe
cctggaatgactgagaaagtatgtt

SEQ ID NO: 88566 - DNA, 25 bp, probe
ttattggaatgggagagtgatgatc

SEQ ID NO: 88567 - DNA, 25 bp, probe
tgtcttgatctgtttcgtgtctaat

SEQ ID NO: 88568 - DNA, 25 bp, probe
gtatttgtcttgatctgtttcgtgt

SEQ ID NO: 88569 - DNA, 25 bp, probe
ttgtcttgatctgtttcgtgtctaa

SEQ ID NO: 88570 - DNA, 25 bp, probe
tttgtcttgatctgtttcgtgtcta

SEQ ID NO: 88571 - DNA, 25 bp, probe
tatttgtcttgatctgtttcgtgtc

SEQ ID NO: 88572 - DNA, 25 bp, probe
agtatttgtcttgatctgtttcgtg

SEQ ID NO: 88573 - DNA, 25 bp, probe
ttagccctttgtggttaatctctca

SEQ ID NO: 88574 - DNA, 25 bp, probe
ctgtgtacatcgtcacggaactcat

SEQ ID NO: 88575 - DNA, 25 bp, probe
tgtgtacatcgtcacggaactcatg

SEQ ID NO: 88576 - DNA, 25 bp, probe
agttctacttatgacacctcacttc

SEQ ID NO: 88577 - DNA, 25 bp, probe
cagttctacttatgacacctcactt

SEQ ID NO: 88578 - DNA, 25 bp, probe
ctcagttctacttatgacacctcac

SEQ ID NO: 88579 - DNA, 25 bp, probe
tctcagttctacttatgacacctca

SEQ ID NO: 88580 - DNA, 25 bp, probe
ttctcagttctacttatgacacctc

SEQ ID NO: 88581 - DNA, 25 bp, probe
gttctacttatgacacctcacttcc

SEQ ID NO: 88582 - DNA, 25 bp, probe
tcagttctacttatgacacctcact

SEQ ID NO: 88583 - DNA, 25 bp, probe
tccctctgtcttccttctttatact

SEQ ID NO: 88584 - DNA, 25 bp, probe
ctttccctctgtcttccttctttat

SEQ ID NO: 88585 - DNA, 25 bp, probe
ccctctgtcttccttctttatactt

SEQ ID NO: 88586 - DNA, 25 bp, probe
ttccctctgtcttccttctttatac

SEQ ID NO: 88587 - DNA, 25 bp, probe
ttaaagaaattcaatgtgggcaagg

SEQ ID NO: 88588 - DNA, 25 bp, probe
actttccctctgtcttccttcttta

SEQ ID NO: 88589 - DNA, 25 bp, probe
tttccctctgtcttccttctttata

SEQ ID NO: 88590 - DNA, 25 bp, probe
ctacttatgacacctcacttcccta

SEQ ID NO: 88591 - DNA, 25 bp, probe
tttctcagttctacttatgacacct

SEQ ID NO: 88592 - DNA, 25 bp, probe
tacttatgacacctcacttccctag

SEQ ID NO: 88593 - DNA, 25 bp, probe
cctctgtcttccttctttatacttt

SEQ ID NO: 88594 - DNA, 25 bp, probe
aaccattgagacttcagaagagcag

SEQ ID NO: 88595 - DNA, 25 bp, probe
ttctacttatgacacctcacttccc

SEQ ID NO: 88596 - DNA, 25 bp, probe
taaaccattgagacttcagaagagc

SEQ ID NO: 88597 - DNA, 25 bp, probe
cactttccctctgtcttccttcttt

SEQ ID NO: 88598 - DNA, 25 bp, probe
ttaaaccattgagacttcagaagag

SEQ ID NO: 88599 - DNA, 25 bp, probe
cattgagacttcagaagagcaggac

SEQ ID NO: 88600 - DNA, 25 bp, probe
cttatgacacctcacttccctagag

SEQ ID NO: 88601 - DNA, 25 bp, probe
tctacttatgacacctcacttccct

SEQ ID NO: 88602 - DNA, 25 bp, probe
tttaaagaaattcaatgtgggcaag

SEQ ID NO: 88603 - DNA, 25 bp, probe
taaagaaattcaatgtgggcaaggc

SEQ ID NO: 88604 - DNA, 25 bp, probe
gaaattcaatgtgggcaaggcatat

SEQ ID NO: 88605 - DNA, 25 bp, probe
cttcactttccctctgtcttccttc

SEQ ID NO: 88606 - DNA, 25 bp, probe
tatgacacctcacttccctagagaa

SEQ ID NO: 88607 - DNA, 25 bp, probe
ttatgacacctcacttccctagaga

SEQ ID NO: 88608 - DNA, 25 bp, probe
acttatgacacctcacttccctaga

SEQ ID NO: 88609 - DNA, 25 bp, probe
gacttcagaagagcaggacacaatg

SEQ ID NO: 88610 - DNA, 25 bp, probe
attgagacttcagaagagcaggaca

SEQ ID NO: 88611 - DNA, 25 bp, probe
agacttcagaagagcaggacacaat

SEQ ID NO: 88612 - DNA, 25 bp, probe
tcactttccctctgtcttccttctt

SEQ ID NO: 88613 - DNA, 25 bp, probe
ttcactttccctctgtcttccttct

SEQ ID NO: 88614 - DNA, 25 bp, probe
aaaccattgagacttcagaagagca

SEQ ID NO: 88615 - DNA, 25 bp, probe
tttaaaccattgagacttcagaaga

SEQ ID NO: 88616 - DNA, 25 bp, probe
agaaattcaatgtgggcaaggcata

SEQ ID NO: 88617 - DNA, 25 bp, probe
ttgtccttcactttccctctgtctt

SEQ ID NO: 88618 - DNA, 25 bp, probe
tttgtccttcactttccctctgtct

SEQ ID NO: 88619 - DNA, 25 bp, probe
gagacttcagaagagcaggacacaa

SEQ ID NO: 88620 - DNA, 25 bp, probe
cagttttcttcatctgtccagttgg

SEQ ID NO: 88621 - DNA, 25 bp, probe
agttttcttcatctgtccagttggg

SEQ ID NO: 88622 - DNA, 25 bp, probe
tttcttcatctgtccagttggggta

SEQ ID NO: 88623 - DNA, 25 bp, probe
atgtcaaaccctgaagtgatccgag

SEQ ID NO: 88624 - DNA, 25 bp, probe
gatgtcaaaccctgaagtgatccga

SEQ ID NO: 88625 - DNA, 25 bp, probe
ttcttcatctgtccagttggggtag

SEQ ID NO: 88626 - DNA, 25 bp, probe
gttttcttcatctgtccagttgggg

SEQ ID NO: 88627 - DNA, 25 bp, probe
ttttcttcatctgtccagttggggt

SEQ ID NO: 88628 - DNA, 25 bp, probe
gtttcaggccacagttttcttcatc

SEQ ID NO: 88629 - DNA, 25 bp, probe
tttcaggccacagttttcttcatct

SEQ ID NO: 88630 - DNA, 25 bp, probe
acagttttcttcatctgtccagttg

SEQ ID NO: 88631 - DNA, 25 bp, probe
cacagttttcttcatctgtccagtt

SEQ ID NO: 88632 - DNA, 25 bp, probe
catctgtccagttggggtaggtttg

SEQ ID NO: 88633 - DNA, 25 bp, probe
tcatctgtccagttggggtaggttt

SEQ ID NO: 88634 - DNA, 25 bp, probe
ttcatctgtccagttggggtaggtt

SEQ ID NO: 88635 - DNA, 25 bp, probe
ggtttcaggccacagttttcttcat

SEQ ID NO: 88636 - DNA, 25 bp, probe
ttcaggccacagttttcttcatctg

SEQ ID NO: 88637 - DNA, 25 bp, probe
ccacagttttcttcatctgtccagt

SEQ ID NO: 88638 - DNA, 25 bp, probe
gggatgtcaaaccctgaagtgatcc

SEQ ID NO: 88639 - DNA, 25 bp, probe
gccacagttttcttcatctgtccag

SEQ ID NO: 88640 - DNA, 25 bp, probe
caggccacagttttcttcatctgtc

SEQ ID NO: 88641 - DNA, 25 bp, probe
tcaggccacagttttcttcatctgt

SEQ ID NO: 88642 - DNA, 25 bp, probe
aggccacagttttcttcatctgtcc

SEQ ID NO: 88643 - DNA, 25 bp, probe
gattgtgacagcgtatgtgatgact

SEQ ID NO: 88644 - DNA, 25 bp, probe
attgtgacagcgtatgtgatgactg

SEQ ID NO: 88645 - DNA, 25 bp, probe
cgattgtgacagcgtatgtgatgac

SEQ ID NO: 88646 - DNA, 25 bp, probe
ctttaggcagcagcttgaagagttt

SEQ ID NO: 88647 - DNA, 25 bp, probe
tttaggcagcagcttgaagagtttg

SEQ ID NO: 88648 - DNA, 25 bp, probe
acgattgtgacagcgtatgtgatga

SEQ ID NO: 88649 - DNA, 25 bp, probe
cacgattgtgacagcgtatgtgatg

SEQ ID NO: 88650 - DNA, 25 bp, probe
tgacagcgtatgtgatgactgtgac

SEQ ID NO: 88651 - DNA, 25 bp, probe
gtgacagcgtatgtgatgactgtga

SEQ ID NO: 88652 - DNA, 25 bp, probe
ttgtgacagcgtatgtgatgactgt

SEQ ID NO: 88653 - DNA, 25 bp, probe
tgtgacagcgtatgtgatgactgtg

SEQ ID NO: 88654 - DNA, 25 bp, probe
agaactagagattgacgtggatgag

SEQ ID NO: 88655 - DNA, 25 bp, probe
cagaactagagattgacgtggatga

SEQ ID NO: 88656 - DNA, 25 bp, probe
ctcagaactagagattgacgtggat

SEQ ID NO: 88657 - DNA, 25 bp, probe
tcagaactagagattgacgtggatg

SEQ ID NO: 88658 - DNA, 25 bp, probe
gagaagtttgttcccacagattgtc

SEQ ID NO: 88659 - DNA, 25 bp, probe
gaactagagattgacgtggatgagc

SEQ ID NO: 88660 - DNA, 25 bp, probe
aactagagattgacgtggatgagct

SEQ ID NO: 88661 - DNA, 25 bp, probe
caagggaaggtcaccatcaagtatg

SEQ ID NO: 88662 - DNA, 25 bp, probe
aagggaaggtcaccatcaagtatga

SEQ ID NO: 88663 - DNA, 25 bp, probe
agaagtttgttcccacagattgtcc

SEQ ID NO: 88664 - DNA, 25 bp, probe
attctcgaaattggaggactccttt

SEQ ID NO: 88665 - DNA, 25 bp, probe
ggagaagtttgttcccacagattgt

SEQ ID NO: 88666 - DNA, 25 bp, probe
gaagaaaccagcattctcgaaattg

SEQ ID NO: 88667 - DNA, 25 bp, probe
agaagaaaccagcattctcgaaatt

SEQ ID NO: 88668 - DNA, 25 bp, probe
ccaagggaaggtcaccatcaagtat

SEQ ID NO: 88669 - DNA, 25 bp, probe
cattctcgaaattggaggactcctt

SEQ ID NO: 88670 - DNA, 25 bp, probe
cagaagaaaccagcattctcgaaat

SEQ ID NO: 88671 - DNA, 25 bp, probe
ttctcgaaattggaggactcctttg

SEQ ID NO: 88672 - DNA, 25 bp, probe
gaaaccagcattctcgaaattggag

SEQ ID NO: 88673 - DNA, 25 bp, probe
gaagtttgttcccacagattgtccc

SEQ ID NO: 88674 - DNA, 25 bp, probe
tctcagaactagagattgacgtgga

SEQ ID NO: 88675 - DNA, 25 bp, probe
aagaaaccagcattctcgaaattgg

SEQ ID NO: 88676 - DNA, 25 bp, probe
ctcgaaattggaggactcctttgag

SEQ ID NO: 88677 - DNA, 25 bp, probe
cagcattctcgaaattggaggactc

SEQ ID NO: 88678 - DNA, 25 bp, probe
tctcgaaattggaggactcctttga

SEQ ID NO: 88679 - DNA, 25 bp, probe
agaaaccagcattctcgaaattgga

SEQ ID NO: 88680 - DNA, 25 bp, probe
aaaccagcattctcgaaattggagg

SEQ ID NO: 88681 - DNA, 25 bp, probe
ccagaagaaaccagcattctcgaaa

SEQ ID NO: 88682 - DNA, 25 bp, probe
tcgaaattggaggactcctttgagg

SEQ ID NO: 88683 - DNA, 25 bp, probe
atcaagtatgaccccaaggagctac

SEQ ID NO: 88684 - DNA, 25 bp, probe
catcaagtatgaccccaaggagcta

SEQ ID NO: 88685 - DNA, 25 bp, probe
aaccagcattctcgaaattggagga

SEQ ID NO: 88686 - DNA, 25 bp, probe
gcattctcgaaattggaggactcct

SEQ ID NO: 88687 - DNA, 25 bp, probe
agcattctcgaaattggaggactcc

SEQ ID NO: 88688 - DNA, 25 bp, probe
actagagattgacgtggatgagctc

SEQ ID NO: 88689 - DNA, 25 bp, probe
caccatcaagtatgaccccaaggag

SEQ ID NO: 88690 - DNA, 25 bp, probe
ccagcattctcgaaattggaggact

SEQ ID NO: 88691 - DNA, 25 bp, probe
agggaaggtcaccatcaagtatgac

SEQ ID NO: 88692 - DNA, 25 bp, probe
agcttttctgggagaagtttgttcc

SEQ ID NO: 88693 - DNA, 25 bp, probe
accagcattctcgaaattggaggac

SEQ ID NO: 88694 - DNA, 25 bp, probe
tcaccatcaagtatgaccccaagga

SEQ ID NO: 88695 - DNA, 25 bp, probe
cccagaagaaaccagcattctcgaa

SEQ ID NO: 88696 - DNA, 25 bp, probe
ctagagattgacgtggatgagctcc

SEQ ID NO: 88697 - DNA, 25 bp, probe
aagtttgttcccacagattgtcccc

SEQ ID NO: 88698 - DNA, 25 bp, probe
ccatatcatccacatcgactttggc

SEQ ID NO: 88699 - DNA, 25 bp, probe
gccatatcatccacatcgactttgg

SEQ ID NO: 88700 - DNA, 25 bp, probe
ggccatatcatccacatcgactttg

SEQ ID NO: 88701 - DNA, 25 bp, probe
gggccatatcatccacatcgacttt

SEQ ID NO: 88702 - DNA, 25 bp, probe
gaagggccatatcatccacatcgac

SEQ ID NO: 88703 - DNA, 25 bp, probe
acaataattctggagatactggtgg

SEQ ID NO: 88704 - DNA, 25 bp, probe
caataattctggagatactggtgga

SEQ ID NO: 88705 - DNA, 25 bp, probe
ataattctggagatactggtggaag

SEQ ID NO: 88706 - DNA, 25 bp, probe
gacaataattctggagatactggtg

SEQ ID NO: 88707 - DNA, 25 bp, probe
aataattctggagatactggtggaa

SEQ ID NO: 88708 - DNA, 25 bp, probe
acagaagaagatcatcagtagcatt

SEQ ID NO: 88709 - DNA, 25 bp, probe
cacagaagaagatcatcagtagcat

SEQ ID NO: 88710 - DNA, 25 bp, probe
taattctggagatactggtggaagt

SEQ ID NO: 88711 - DNA, 25 bp, probe
agacaataattctggagatactggt

SEQ ID NO: 88712 - DNA, 25 bp, probe
aattctggagatactggtggaagtt

SEQ ID NO: 88713 - DNA, 25 bp, probe
aagttccaagtccaataagacactc

SEQ ID NO: 88714 - DNA, 25 bp, probe
gaagttccaagtccaataagacact

SEQ ID NO: 88715 - DNA, 25 bp, probe
gttccaagtccaataagacactcaa

SEQ ID NO: 88716 - DNA, 25 bp, probe
attctggagatactggtggaagttc

SEQ ID NO: 88717 - DNA, 25 bp, probe
cagaagaagatcatcagtagcatta

SEQ ID NO: 88718 - DNA, 25 bp, probe
ggagatgtccaatcaggatgtaatt

SEQ ID NO: 88719 - DNA, 25 bp, probe
agttccaagtccaataagacactca

SEQ ID NO: 88720 - DNA, 25 bp, probe
ccacagaagaagatcatcagtagca

SEQ ID NO: 88721 - DNA, 25 bp, probe
agaagaagatcatcagtagcattaa

SEQ ID NO: 88722 - DNA, 25 bp, probe
aatagccaagatttccacagatgac

SEQ ID NO: 88723 - DNA, 25 bp, probe
caatagccaagatttccacagatga

SEQ ID NO: 88724 - DNA, 25 bp, probe
acaatagccaagatttccacagatg

SEQ ID NO: 88725 - DNA, 25 bp, probe
cacaatagccaagatttccacagat

SEQ ID NO: 88726 - DNA, 25 bp, probe
ccaagtttgagcagattgttagtat

SEQ ID NO: 88727 - DNA, 25 bp, probe
cccaagtttgagcagattgttagta

SEQ ID NO: 88728 - DNA, 25 bp, probe
ggaagttccaagtccaataagacac

SEQ ID NO: 88729 - DNA, 25 bp, probe
agaagatcatcagtagcattaaagc

SEQ ID NO: 88730 - DNA, 25 bp, probe
atagccaagatttccacagatgaca

SEQ ID NO: 88731 - DNA, 25 bp, probe
gagatgtccaatcaggatgtaatta

SEQ ID NO: 88732 - DNA, 25 bp, probe
tccaagtccaataagacactcaaat

SEQ ID NO: 88733 - DNA, 25 bp, probe
tagccaagatttccacagatgacat

SEQ ID NO: 88734 - DNA, 25 bp, probe
ttccaagtccaataagacactcaaa

SEQ ID NO: 88735 - DNA, 25 bp, probe
gacacaatagccaagatttccacag

SEQ ID NO: 88736 - DNA, 25 bp, probe
agtttgagcagattgttagtattct

SEQ ID NO: 88737 - DNA, 25 bp, probe
gccacagaagaagatcatcagtagc

SEQ ID NO: 88738 - DNA, 25 bp, probe
ccaagatttccacagatgacatgaa

SEQ ID NO: 88739 - DNA, 25 bp, probe
acacaatagccaagatttccacaga

SEQ ID NO: 88740 - DNA, 25 bp, probe
aagtttgagcagattgttagtattc

SEQ ID NO: 88741 - DNA, 25 bp, probe
catcaaaccttcttctggaccaaag

SEQ ID NO: 88742 - DNA, 25 bp, probe
caagtttgagcagattgttagtatt

SEQ ID NO: 88743 - DNA, 25 bp, probe
gacccaagtttgagcagattgttag

SEQ ID NO: 88744 - DNA, 25 bp, probe
agatgtccaatcaggatgtaattaa

SEQ ID NO: 88745 - DNA, 25 bp, probe
tgtaattaaagctgtagatgagggc

SEQ ID NO: 88746 - DNA, 25 bp, probe
tgacacaatagccaagatttccaca

SEQ ID NO: 88747 - DNA, 25 bp, probe
cagcattacagaaccttggttattg

SEQ ID NO: 88748 - DNA, 25 bp, probe
gcattacagaaccttggttattgtt

SEQ ID NO: 88749 - DNA, 25 bp, probe
agcattacagaaccttggttattgt

SEQ ID NO: 88750 - DNA, 25 bp, probe
ccaggatagaatttgagagagtgaa

SEQ ID NO: 88751 - DNA, 25 bp, probe
tctccatttcctgtatcgctaattt

SEQ ID NO: 88752 - DNA, 25 bp, probe
ctctccatttcctgtatcgctaatt

SEQ ID NO: 88753 - DNA, 25 bp, probe
tgatttctccaagcacttaactttc

SEQ ID NO: 88754 - DNA, 25 bp, probe
gatttctccaagcacttaactttct

SEQ ID NO: 88755 - DNA, 25 bp, probe
tccaggatagaatttgagagagtga

SEQ ID NO: 88756 - DNA, 25 bp, probe
gtccaggatagaatttgagagagtg

SEQ ID NO: 88757 - DNA, 25 bp, probe
gtgtccaggatagaatttgagagag

SEQ ID NO: 88758 - DNA, 25 bp, probe
cactgagaattgctaatgatttccc

SEQ ID NO: 88759 - DNA, 25 bp, probe
gagtgaagaaattgccttgtagatg

SEQ ID NO: 88760 - DNA, 25 bp, probe
agagtgaagaaattgccttgtagat

SEQ ID NO: 88761 - DNA, 25 bp, probe
tttctccaagcacttaactttcttt

SEQ ID NO: 88762 - DNA, 25 bp, probe
actgagaattgctaatgatttccca

SEQ ID NO: 88763 - DNA, 25 bp, probe
tgtccaggatagaatttgagagagt

SEQ ID NO: 88764 - DNA, 25 bp, probe
agtgtccaggatagaatttgagaga

SEQ ID NO: 88765 - DNA, 25 bp, probe
cagtgtccaggatagaatttgagag

SEQ ID NO: 88766 - DNA, 25 bp, probe
ctgagaattgctaatgatttcccat

SEQ ID NO: 88767 - DNA, 25 bp, probe
ttctccaagcacttaactttctttg

SEQ ID NO: 88768 - DNA, 25 bp, probe
agtgaagaaattgccttgtagatgt

SEQ ID NO: 88769 - DNA, 25 bp, probe
atttctccaagcacttaactttctt

SEQ ID NO: 88770 - DNA, 25 bp, probe
gtgaagaaattgccttgtagatgtg

SEQ ID NO: 88771 - DNA, 25 bp, probe
ctccaagcacttaactttctttgac

SEQ ID NO: 88772 - DNA, 25 bp, probe
tctccaagcacttaactttctttga

SEQ ID NO: 88773 - DNA, 25 bp, probe
gagagtgaagaaattgccttgtaga

SEQ ID NO: 88774 - DNA, 25 bp, probe
agagagtgaagaaattgccttgtag

SEQ ID NO: 88775 - DNA, 25 bp, probe
gagagagtgaagaaattgccttgta

SEQ ID NO: 88776 - DNA, 25 bp, probe
tttgagagagtgaagaaattgcctt

SEQ ID NO: 88777 - DNA, 25 bp, probe
aagcgtgaacccatattgataagtg

SEQ ID NO: 88778 - DNA, 25 bp, probe
ttgatttctccaagcacttaacttt

SEQ ID NO: 88779 - DNA, 25 bp, probe
ccaagcacttaactttctttgactg

SEQ ID NO: 88780 - DNA, 25 bp, probe
tccaagcacttaactttctttgact

SEQ ID NO: 88781 - DNA, 25 bp, probe
aggatagaatttgagagagtgaaga

SEQ ID NO: 88782 - DNA, 25 bp, probe
caggatagaatttgagagagtgaag

SEQ ID NO: 88783 - DNA, 25 bp, probe
ctccatttcctgtatcgctaattta

SEQ ID NO: 88784 - DNA, 25 bp, probe
aaagcagtgtccaggatagaatttg

SEQ ID NO: 88785 - DNA, 25 bp, probe
caaagcagtgtccaggatagaattt

SEQ ID NO: 88786 - DNA, 25 bp, probe
aagaaattgccttgtagatgtggag

SEQ ID NO: 88787 - DNA, 25 bp, probe
gaagaaattgccttgtagatgtgga

SEQ ID NO: 88788 - DNA, 25 bp, probe
ccagcattacagaaccttggttatt

SEQ ID NO: 88789 - DNA, 25 bp, probe
gatttcccatgagatttgcttactt

SEQ ID NO: 88790 - DNA, 25 bp, probe
tgatttcccatgagatttgcttact

SEQ ID NO: 88791 - DNA, 25 bp, probe
agaccttcaattacatcaagcagag

SEQ ID NO: 88792 - DNA, 25 bp, probe
gagaccttcaattacatcaagcaga

SEQ ID NO: 88793 - DNA, 25 bp, probe
gttggtccagatatgtagtagcatt

SEQ ID NO: 88794 - DNA, 25 bp, probe
cttcaattacatcaagcagaggagg

SEQ ID NO: 88795 - DNA, 25 bp, probe
ttcaattacatcaagcagaggagga

SEQ ID NO: 88796 - DNA, 25 bp, probe
ggagaccttcaattacatcaagcag

SEQ ID NO: 88797 - DNA, 25 bp, probe
ggttggtccagatatgtagtagcat

SEQ ID NO: 88798 - DNA, 25 bp, probe
tcaattacatcaagcagaggaggag

SEQ ID NO: 88799 - DNA, 25 bp, probe
ccttcaattacatcaagcagaggag

SEQ ID NO: 88800 - DNA, 25 bp, probe
gaccttcaattacatcaagcagagg

SEQ ID NO: 88801 - DNA, 25 bp, probe
agtggttggtccagatatgtagtag

SEQ ID NO: 88802 - DNA, 25 bp, probe
gtagtagcatttgggacatctgaaa

SEQ ID NO: 88803 - DNA, 25 bp, probe
cagtggttggtccagatatgtagta

SEQ ID NO: 88804 - DNA, 25 bp, probe
accttcaattacatcaagcagagga

SEQ ID NO: 88805 - DNA, 25 bp, probe
aggagaccttcaattacatcaagca

SEQ ID NO: 88806 - DNA, 25 bp, probe
tggtccagatatgtagtagcatttg

SEQ ID NO: 88807 - DNA, 25 bp, probe
ttggtccagatatgtagtagcattt

SEQ ID NO: 88808 - DNA, 25 bp, probe
cagatatgtagtagcatttgggaca

SEQ ID NO: 88809 - DNA, 25 bp, probe
aactattccacaagatcgacatgct

SEQ ID NO: 88810 - DNA, 25 bp, probe
caattacatcaagcagaggaggagc

SEQ ID NO: 88811 - DNA, 25 bp, probe
tattccacaagatcgacatgctgta

SEQ ID NO: 88812 - DNA, 25 bp, probe
gtggttggtccagatatgtagtagc

SEQ ID NO: 88813 - DNA, 25 bp, probe
gacagtggttggtccagatatgtag

SEQ ID NO: 88814 - DNA, 25 bp, probe
tgtagtagcatttgggacatctgaa

SEQ ID NO: 88815 - DNA, 25 bp, probe
tggttggtccagatatgtagtagca

SEQ ID NO: 88816 - DNA, 25 bp, probe
aattacatcaagcagaggaggagca

SEQ ID NO: 88817 - DNA, 25 bp, probe
actattccacaagatcgacatgctg

SEQ ID NO: 88818 - DNA, 25 bp, probe
ccagatatgtagtagcatttgggac

SEQ ID NO: 88819 - DNA, 25 bp, probe
tccagatatgtagtagcatttggga

SEQ ID NO: 88820 - DNA, 25 bp, probe
gtccagatatgtagtagcatttggg

SEQ ID NO: 88821 - DNA, 25 bp, probe
ggtccagatatgtagtagcatttgg

SEQ ID NO: 88822 - DNA, 25 bp, probe
acagtggttggtccagatatgtagt

SEQ ID NO: 88823 - DNA, 25 bp, probe
aaactattccacaagatcgacatgc

SEQ ID NO: 88824 - DNA, 25 bp, probe
ctattccacaagatcgacatgctgt

SEQ ID NO: 88825 - DNA, 25 bp, probe
attccacaagatcgacatgctgtac

SEQ ID NO: 88826 - DNA, 25 bp, probe
tagtagcatttgggacatctgaaaa

SEQ ID NO: 88827 - DNA, 25 bp, probe
gaccttctactcagaatatcccgag

SEQ ID NO: 88828 - DNA, 25 bp, probe
ttcactgaaggtcatttgcagatac

SEQ ID NO: 88829 - DNA, 25 bp, probe
agtagcatttgggacatctgaaaag

SEQ ID NO: 88830 - DNA, 25 bp, probe
tatgtagtagcatttgggacatctg

SEQ ID NO: 88831 - DNA, 25 bp, probe
ctgaaggtcatttgcagatactgag

SEQ ID NO: 88832 - DNA, 25 bp, probe
atatgtagtagcatttgggacatct

SEQ ID NO: 88833 - DNA, 25 bp, probe
agatatgtagtagcatttgggacat

SEQ ID NO: 88834 - DNA, 25 bp, probe
aaggagaccttcaattacatcaagc

SEQ ID NO: 88835 - DNA, 25 bp, probe
cgatgacattgtgaggaagattgat

SEQ ID NO: 88836 - DNA, 25 bp, probe
gatgacattgtgaggaagattgatc

SEQ ID NO: 88837 - DNA, 25 bp, probe
gacgatgacattgtgaggaagattg

SEQ ID NO: 88838 - DNA, 25 bp, probe
tgaccagaacacagaggattatctc

SEQ ID NO: 88839 - DNA, 25 bp, probe
acgatgacattgtgaggaagattga

SEQ ID NO: 88840 - DNA, 25 bp, probe
tgacgatgacattgtgaggaagatt

SEQ ID NO: 88841 - DNA, 25 bp, probe
atgacgatgacattgtgaggaagat

SEQ ID NO: 88842 - DNA, 25 bp, probe
ctgaccagaacacagaggattatct

SEQ ID NO: 88843 - DNA, 25 bp, probe
gatgacgatgacattgtgaggaaga

SEQ ID NO: 88844 - DNA, 25 bp, probe
agatgacgatgacattgtgaggaag

SEQ ID NO: 88845 - DNA, 25 bp, probe
ggagaagattatggtttcagtgttg

SEQ ID NO: 88846 - DNA, 25 bp, probe
aggagaagattatggtttcagtgtt

SEQ ID NO: 88847 - DNA, 25 bp, probe
agaggagaagattatggtttcagtg

SEQ ID NO: 88848 - DNA, 25 bp, probe
gaggagaagattatggtttcagtgt

SEQ ID NO: 88849 - DNA, 25 bp, probe
aagaggagaagattatggtttcagt

SEQ ID NO: 88850 - DNA, 25 bp, probe
cagatgacgatgacattgtgaggaa

SEQ ID NO: 88851 - DNA, 25 bp, probe
gaagattatggtttcagtgttgact

SEQ ID NO: 88852 - DNA, 25 bp, probe
agaagattatggtttcagtgttgac

SEQ ID NO: 88853 - DNA, 25 bp, probe
cctgaccagaacacagaggattatc

SEQ ID NO: 88854 - DNA, 25 bp, probe
gagaagattatggtttcagtgttga

SEQ ID NO: 88855 - DNA, 25 bp, probe
ctcactccagatgacgatgacattg

SEQ ID NO: 88856 - DNA, 25 bp, probe
ctccagatgacgatgacattgtgag

SEQ ID NO: 88857 - DNA, 25 bp, probe
taagaggagaagattatggtttcag

SEQ ID NO: 88858 - DNA, 25 bp, probe
ggaaggtctccatttgatattgttg

SEQ ID NO: 88859 - DNA, 25 bp, probe
aggaaggtctccatttgatattgtt

SEQ ID NO: 88860 - DNA, 25 bp, probe
caggaaggtctccatttgatattgt

SEQ ID NO: 88861 - DNA, 25 bp, probe
gaaggtctccatttgatattgttgg

SEQ ID NO: 88862 - DNA, 25 bp, probe
actccagatgacgatgacattgtga

SEQ ID NO: 88863 - DNA, 25 bp, probe
cacagaggattatctcttccaagtt

SEQ ID NO: 88864 - DNA, 25 bp, probe
aacacagaggattatctcttccaag

SEQ ID NO: 88865 - DNA, 25 bp, probe
gaacacagaggattatctcttccaa

SEQ ID NO: 88866 - DNA, 25 bp, probe
cagaacacagaggattatctcttcc

SEQ ID NO: 88867 - DNA, 25 bp, probe
ccagaacacagaggattatctcttc

SEQ ID NO: 88868 - DNA, 25 bp, probe
aaggtctccatttgatattgttggg

SEQ ID NO: 88869 - DNA, 25 bp, probe
ttaagaggagaagattatggtttca

SEQ ID NO: 88870 - DNA, 25 bp, probe
agaacacagaggattatctcttcca

SEQ ID NO: 88871 - DNA, 25 bp, probe
tcactccagatgacgatgacattgt

SEQ ID NO: 88872 - DNA, 25 bp, probe
acacagaggattatctcttccaagt

SEQ ID NO: 88873 - DNA, 25 bp, probe
accagaacacagaggattatctctt

SEQ ID NO: 88874 - DNA, 25 bp, probe
gcaggaaggtctccatttgatattg

SEQ ID NO: 88875 - DNA, 25 bp, probe
gaccagaacacagaggattatctct

SEQ ID NO: 88876 - DNA, 25 bp, probe
atgacattgtgaggaagattgatca

SEQ ID NO: 88877 - DNA, 25 bp, probe
aggtctccatttgatattgttggga

SEQ ID NO: 88878 - DNA, 25 bp, probe
acagaggattatctcttccaagtta

SEQ ID NO: 88879 - DNA, 25 bp, probe
gaatctgaaggtgagaatctgagtt

SEQ ID NO: 88880 - DNA, 25 bp, probe
tagaatctgaaggtgagaatctgag

SEQ ID NO: 88881 - DNA, 25 bp, probe
agaatctgaaggtgagaatctgagt

SEQ ID NO: 88882 - DNA, 25 bp, probe
actagaatctgaaggtgagaatctg

SEQ ID NO: 88883 - DNA, 25 bp, probe
ctagaatctgaaggtgagaatctga

SEQ ID NO: 88884 - DNA, 25 bp, probe
aactagaatctgaaggtgagaatct

SEQ ID NO: 88885 - DNA, 25 bp, probe
agtttagattcccttgaagatgtgt

SEQ ID NO: 88886 - DNA, 25 bp, probe
gtttagattcccttgaagatgtgtc

SEQ ID NO: 88887 - DNA, 25 bp, probe
tgagtttagattcccttgaagatgt

SEQ ID NO: 88888 - DNA, 25 bp, probe
tttagattcccttgaagatgtgtcc

SEQ ID NO: 88889 - DNA, 25 bp, probe
gagtttagattcccttgaagatgtg

SEQ ID NO: 88890 - DNA, 25 bp, probe
ctgaaggtgagaatctgagtttaga

SEQ ID NO: 88891 - DNA, 25 bp, probe
tctgaaggtgagaatctgagtttag

SEQ ID NO: 88892 - DNA, 25 bp, probe
aatctgaaggtgagaatctgagttt

SEQ ID NO: 88893 - DNA, 25 bp, probe
ctgagtttagattcccttgaagatg

SEQ ID NO: 88894 - DNA, 25 bp, probe
atctgaaggtgagaatctgagttta

SEQ ID NO: 88895 - DNA, 25 bp, probe
tctgagtttagattcccttgaagat

SEQ ID NO: 88896 - DNA, 25 bp, probe
ttagattcccttgaagatgtgtccc

SEQ ID NO: 88897 - DNA, 25 bp, probe
aaactagaatctgaaggtgagaatc

SEQ ID NO: 88898 - DNA, 25 bp, probe
gagtttaagtgaccaccatcctgag

SEQ ID NO: 88899 - DNA, 25 bp, probe
tagattcccttgaagatgtgtccca

SEQ ID NO: 88900 - DNA, 25 bp, probe
tgaaggtgagaatctgagtttagat

SEQ ID NO: 88901 - DNA, 25 bp, probe
atctgagtttagattcccttgaaga

SEQ ID NO: 88902 - DNA, 25 bp, probe
agattcccttgaagatgtgtcccaa

SEQ ID NO: 88903 - DNA, 25 bp, probe
ttgtgagagccattggaagactgtc

SEQ ID NO: 88904 - DNA, 25 bp, probe
cttgtgagagccattggaagactgt

SEQ ID NO: 88905 - DNA, 25 bp, probe
aaaactagaatctgaaggtgagaat

SEQ ID NO: 88906 - DNA, 25 bp, probe
cacaagtgtggagtttaagtgacca

SEQ ID NO: 88907 - DNA, 25 bp, probe
agtttaagtgaccaccatcctgagc

SEQ ID NO: 88908 - DNA, 25 bp, probe
ggagtttaagtgaccaccatcctga

SEQ ID NO: 88909 - DNA, 25 bp, probe
gtgaccaccatcctgagcacatatc

SEQ ID NO: 88910 - DNA, 25 bp, probe
gtttaagtgaccaccatcctgagca

SEQ ID NO: 88911 - DNA, 25 bp, probe
aatgcttgtgagagccattggaaga

SEQ ID NO: 88912 - DNA, 25 bp, probe
tggagtttaagtgaccaccatcctg

SEQ ID NO: 88913 - DNA, 25 bp, probe
tttaagtgaccaccatcctgagcac

SEQ ID NO: 88914 - DNA, 25 bp, probe
aatctgagtttagattcccttgaag

SEQ ID NO: 88915 - DNA, 25 bp, probe
gattcccttgaagatgtgtcccaag

SEQ ID NO: 88916 - DNA, 25 bp, probe
gaaggtgagaatctgagtttagatt

SEQ ID NO: 88917 - DNA, 25 bp, probe
gaccaccatcctgagcacatatcag

SEQ ID NO: 88918 - DNA, 25 bp, probe
catggaagtcagttcctggctacac

SEQ ID NO: 88919 - DNA, 25 bp, probe
tgaagatgtgtcccaagctttcctt

SEQ ID NO: 88920 - DNA, 25 bp, probe
ttgaagatgtgtcccaagctttcct

SEQ ID NO: 88921 - DNA, 25 bp, probe
attcccttgaagatgtgtcccaagc

SEQ ID NO: 88922 - DNA, 25 bp, probe
cttgaagatgtgtcccaagctttcc

SEQ ID NO: 88923 - DNA, 25 bp, probe
gatacttacacaaggagaagaggat

SEQ ID NO: 88924 - DNA, 25 bp, probe
tacttacacaaggagaagaggattg

SEQ ID NO: 88925 - DNA, 25 bp, probe
atacttacacaaggagaagaggatt

SEQ ID NO: 88926 - DNA, 25 bp, probe
cgatacttacacaaggagaagagga

SEQ ID NO: 88927 - DNA, 25 bp, probe
ggagaagaggattgtccatagagat

SEQ ID NO: 88928 - DNA, 25 bp, probe
gcttagctcttcgatacttacacaa

SEQ ID NO: 88929 - DNA, 25 bp, probe
aaggagaagaggattgtccatagag

SEQ ID NO: 88930 - DNA, 25 bp, probe
ttcgatacttacacaaggagaagag

SEQ ID NO: 88931 - DNA, 25 bp, probe
ttagctcttcgatacttacacaagg

SEQ ID NO: 88932 - DNA, 25 bp, probe
gagaagaggattgtccatagagatc

SEQ ID NO: 88933 - DNA, 25 bp, probe
ctgtgcttagctcttcgatacttac

SEQ ID NO: 88934 - DNA, 25 bp, probe
caaggagaagaggattgtccataga

SEQ ID NO: 88935 - DNA, 25 bp, probe
tagctcttcgatacttacacaagga

SEQ ID NO: 88936 - DNA, 25 bp, probe
cttagctcttcgatacttacacaag

SEQ ID NO: 88937 - DNA, 25 bp, probe
gttccttgctggtttatttctttga

SEQ ID NO: 88938 - DNA, 25 bp, probe
ctcttcgatacttacacaaggagaa

SEQ ID NO: 88939 - DNA, 25 bp, probe
tcgatacttacacaaggagaagagg

SEQ ID NO: 88940 - DNA, 25 bp, probe
aggagaagaggattgtccatagaga

SEQ ID NO: 88941 - DNA, 25 bp, probe
ggttccttgctggtttatttctttg

SEQ ID NO: 88942 - DNA, 25 bp, probe
tgcttagctcttcgatacttacaca

SEQ ID NO: 88943 - DNA, 25 bp, probe
ttccttgctggtttatttctttgaa

SEQ ID NO: 88944 - DNA, 25 bp, probe
ggttatttctctttcacggaacaat

SEQ ID NO: 88945 - DNA, 25 bp, probe
gggataaggacaaagtaaccgttaa

SEQ ID NO: 88946 - DNA, 25 bp, probe
ggataaggacaaagtaaccgttaag

SEQ ID NO: 88947 - DNA, 25 bp, probe
tggttccttgctggtttatttcttt

SEQ ID NO: 88948 - DNA, 25 bp, probe
ttggttccttgctggtttatttctt

SEQ ID NO: 88949 - DNA, 25 bp, probe
acagtacagtgggttatttctcttt

SEQ ID NO: 88950 - DNA, 25 bp, probe
ctcaaggaaccacattcagtttata

SEQ ID NO: 88951 - DNA, 25 bp, probe
aggacaaagtaaccgttaagaatac

SEQ ID NO: 88952 - DNA, 25 bp, probe
gttatttctctttcacggaacaatc

SEQ ID NO: 88953 - DNA, 25 bp, probe
agtacagtgggttatttctctttca

SEQ ID NO: 88954 - DNA, 25 bp, probe
cttggttccttgctggtttatttct

SEQ ID NO: 88955 - DNA, 25 bp, probe
cagtacagtgggttatttctctttc

SEQ ID NO: 88956 - DNA, 25 bp, probe
gataaggacaaagtaaccgttaaga

SEQ ID NO: 88957 - DNA, 25 bp, probe
gctcaaggaaccacattcagtttat

SEQ ID NO: 88958 - DNA, 25 bp, probe
gggttatttctctttcacggaacaa

SEQ ID NO: 88959 - DNA, 25 bp, probe
tgtgcttagctcttcgatacttaca

SEQ ID NO: 88960 - DNA, 25 bp, probe
gtgcttagctcttcgatacttacac

SEQ ID NO: 88961 - DNA, 25 bp, probe
gctcttcgatacttacacaaggaga

SEQ ID NO: 88962 - DNA, 25 bp, probe
agctcttcgatacttacacaaggag

SEQ ID NO: 88963 - DNA, 25 bp, probe
cttagaaagaggactcacagtacag

SEQ ID NO: 88964 - DNA, 25 bp, probe
aaggacaaagtaaccgttaagaata

SEQ ID NO: 88965 - DNA, 25 bp, probe
taaggacaaagtaaccgttaagaat

SEQ ID NO: 88966 - DNA, 25 bp, probe
ataaggacaaagtaaccgttaagaa

SEQ ID NO: 88967 - DNA, 25 bp, probe
agagaacttcctataactgtgttgc

SEQ ID NO: 88968 - DNA, 25 bp, probe
gcagagaacttcctataactgtgtt

SEQ ID NO: 88969 - DNA, 25 bp, probe
cagagaacttcctataactgtgttg

SEQ ID NO: 88970 - DNA, 25 bp, probe
cagcagagaacttcctataactgtg

SEQ ID NO: 88971 - DNA, 25 bp, probe
agcagagaacttcctataactgtgt

SEQ ID NO: 88972 - DNA, 25 bp, probe
gagaacttcctataactgtgttgca

SEQ ID NO: 88973 - DNA, 25 bp, probe
acctttcccactttctaattcacag

SEQ ID NO: 88974 - DNA, 25 bp, probe
gacctttcccactttctaattcaca

SEQ ID NO: 88975 - DNA, 25 bp, probe
gcagcagagaacttcctataactgt

SEQ ID NO: 88976 - DNA, 25 bp, probe
cctttcccactttctaattcacaga

SEQ ID NO: 88977 - DNA, 25 bp, probe
cgacctttcccactttctaattcac

SEQ ID NO: 88978 - DNA, 25 bp, probe
gaggcagcagagaacttcctataac

SEQ ID NO: 88979 - DNA, 25 bp, probe
gaacttcctataactgtgttgcact

SEQ ID NO: 88980 - DNA, 25 bp, probe
agaacttcctataactgtgttgcac

SEQ ID NO: 88981 - DNA, 25 bp, probe
ggcagcagagaacttcctataactg

SEQ ID NO: 88982 - DNA, 25 bp, probe
aacttcctataactgtgttgcactg

SEQ ID NO: 88983 - DNA, 25 bp, probe
ttctaattcacagaagcatgaacac

SEQ ID NO: 88984 - DNA, 25 bp, probe
aggcagcagagaacttcctataact

SEQ ID NO: 88985 - DNA, 25 bp, probe
taattcacagaagcatgaacaccat

SEQ ID NO: 88986 - DNA, 25 bp, probe
actatgggtttagttcaacatttgc

SEQ ID NO: 88987 - DNA, 25 bp, probe
tctaattcacagaagcatgaacacc

SEQ ID NO: 88988 - DNA, 25 bp, probe
ctaattcacagaagcatgaacacca

SEQ ID NO: 88989 - DNA, 25 bp, probe
ccgacctttcccactttctaattca

SEQ ID NO: 88990 - DNA, 25 bp, probe
ctatgggtttagttcaacatttgca

SEQ ID NO: 88991 - DNA, 25 bp, probe
ttcctataactgtgttgcactggtt

SEQ ID NO: 88992 - DNA, 25 bp, probe
aattcacagaagcatgaacaccatc

SEQ ID NO: 88993 - DNA, 25 bp, probe
ggaggcagcagagaacttcctataa

SEQ ID NO: 88994 - DNA, 25 bp, probe
tttcccactttctaattcacagaag

SEQ ID NO: 88995 - DNA, 25 bp, probe
ctttcccactttctaattcacagaa

SEQ ID NO: 88996 - DNA, 25 bp, probe
cttcctataactgtgttgcactggt

SEQ ID NO: 88997 - DNA, 25 bp, probe
acttcctataactgtgttgcactgg

SEQ ID NO: 88998 - DNA, 25 bp, probe
ttcccactttctaattcacagaagc

SEQ ID NO: 88999 - DNA, 25 bp, probe
cactttctaattcacagaagcatga

SEQ ID NO: 89000 - DNA, 25 bp, probe
ccactttctaattcacagaagcatg

SEQ ID NO: 89001 - DNA, 25 bp, probe
cccactttctaattcacagaagcat

SEQ ID NO: 89002 - DNA, 25 bp, probe
tttctaattcacagaagcatgaaca

SEQ ID NO: 89003 - DNA, 25 bp, probe
tcccactttctaattcacagaagca

SEQ ID NO: 89004 - DNA, 25 bp, probe
caaagagagacaacactgaaaaggg

SEQ ID NO: 89005 - DNA, 25 bp, probe
actttctaattcacagaagcatgaa

SEQ ID NO: 89006 - DNA, 25 bp, probe
aagagagacaacactgaaaagggaa

SEQ ID NO: 89007 - DNA, 25 bp, probe
aaagagagacaacactgaaaaggga

SEQ ID NO: 89008 - DNA, 25 bp, probe
ctttctaattcacagaagcatgaac

SEQ ID NO: 89009 - DNA, 25 bp, probe
gccgacctttcccactttctaattc

SEQ ID NO: 89010 - DNA, 25 bp, probe
cctataactgtgttgcactggtttc

SEQ ID NO: 89011 - DNA, 25 bp, probe
aagaatatcacacatccagacctaa

SEQ ID NO: 89012 - DNA, 25 bp, probe
aatataattcagctctaccaggcag

SEQ ID NO: 89013 - DNA, 25 bp, probe
catctagtcatagaggaaggcaata

SEQ ID NO: 89014 - DNA, 25 bp, probe
atcatgttaaggcagattctgtcag

SEQ ID NO: 89015 - DNA, 25 bp, probe
gatcatgttaaggcagattctgtca

SEQ ID NO: 89016 - DNA, 25 bp, probe
gccacttaaagaatatcacacatcc

SEQ ID NO: 89017 - DNA, 25 bp, probe
ccatctagtcatagaggaaggcaat

SEQ ID NO: 89018 - DNA, 25 bp, probe
cttaaagaacatcacacatccagag

SEQ ID NO: 89019 - DNA, 25 bp, probe
aatatcacacatccagacctaaagc

SEQ ID NO: 89020 - DNA, 25 bp, probe
actgccacttaaagaatatcacaca

SEQ ID NO: 89021 - DNA, 25 bp, probe
agaatatcacacatccagacctaaa

SEQ ID NO: 89022 - DNA, 25 bp, probe
aaagaatatcacacatccagaccta

SEQ ID NO: 89023 - DNA, 25 bp, probe
taaagaatatcacacatccagacct

SEQ ID NO: 89024 - DNA, 25 bp, probe
tgccacttaaagaatatcacacatc

SEQ ID NO: 89025 - DNA, 25 bp, probe
ctgccacttaaagaatatcacacat

SEQ ID NO: 89026 - DNA, 25 bp, probe
gaatatcacacatccagacctaaag

SEQ ID NO: 89027 - DNA, 25 bp, probe
atctagtcatagaggaaggcaatat

SEQ ID NO: 89028 - DNA, 25 bp, probe
ggatcatgttaaggcagattctgtc

SEQ ID NO: 89029 - DNA, 25 bp, probe
ctggatcatgttaaggcagattctg

SEQ ID NO: 89030 - DNA, 25 bp, probe
ctagtcatagaggaaggcaatataa

SEQ ID NO: 89031 - DNA, 25 bp, probe
tactgccacttaaagaatatcacac

SEQ ID NO: 89032 - DNA, 25 bp, probe
aagaacatcacacatccagagctaa

SEQ ID NO: 89033 - DNA, 25 bp, probe
ccacttaaagaatatcacacatcca

SEQ ID NO: 89034 - DNA, 25 bp, probe
ttaaagaacatcacacatccagagc

SEQ ID NO: 89035 - DNA, 25 bp, probe
gcttaaagaacatcacacatccaga

SEQ ID NO: 89036 - DNA, 25 bp, probe
aaatcatagactttggctttagcac

SEQ ID NO: 89037 - DNA, 25 bp, probe
ttaaagaatatcacacatccagacc

SEQ ID NO: 89038 - DNA, 25 bp, probe
aatcatagactttggctttagcaca

SEQ ID NO: 89039 - DNA, 25 bp, probe
tggatcatgttaaggcagattctgt

SEQ ID NO: 89040 - DNA, 25 bp, probe
tctagtcatagaggaaggcaatata

SEQ ID NO: 89041 - DNA, 25 bp, probe
catagactttggctttagcacaata

SEQ ID NO: 89042 - DNA, 25 bp, probe
gtactgccacttaaagaatatcaca

SEQ ID NO: 89043 - DNA, 25 bp, probe
tcatagactttggctttagcacaat

SEQ ID NO: 89044 - DNA, 25 bp, probe
atcatagactttggctttagcacaa

SEQ ID NO: 89045 - DNA, 25 bp, probe
cctggatcatgttaaggcagattct

SEQ ID NO: 89046 - DNA, 25 bp, probe
aaagccacaaacccatctagtcata

SEQ ID NO: 89047 - DNA, 25 bp, probe
taaagccacaaacccatctagtcat

SEQ ID NO: 89048 - DNA, 25 bp, probe
cacttaaagaatatcacacatccag

SEQ ID NO: 89049 - DNA, 25 bp, probe
atagactttggctttagcacaatat

SEQ ID NO: 89050 - DNA, 25 bp, probe
acttaaagaatatcacacatccaga

SEQ ID NO: 89051 - DNA, 25 bp, probe
aaatataattcagctctaccaggca

SEQ ID NO: 89052 - DNA, 25 bp, probe
caaatataattcagctctaccaggc

SEQ ID NO: 89053 - DNA, 25 bp, probe
actttggctttagcacaatattcag

SEQ ID NO: 89054 - DNA, 25 bp, probe
gactttggctttagcacaatattca

SEQ ID NO: 89055 - DNA, 25 bp, probe
cagttcatagacaccatctgatagg

SEQ ID NO: 89056 - DNA, 25 bp, probe
actatcagttcatagacaccatctg

SEQ ID NO: 89057 - DNA, 25 bp, probe
ggcaggatttgtagtcagtatagtt

SEQ ID NO: 89058 - DNA, 25 bp, probe
gaggcaggatttgtagtcagtatag

SEQ ID NO: 89059 - DNA, 25 bp, probe
agactttccatcacccaaatatcat

SEQ ID NO: 89060 - DNA, 25 bp, probe
aagactttccatcacccaaatatca

SEQ ID NO: 89061 - DNA, 25 bp, probe
atttgtagtcagtatagttgggagg

SEQ ID NO: 89062 - DNA, 25 bp, probe
ggatttgtagtcagtatagttggga

SEQ ID NO: 89063 - DNA, 25 bp, probe
aggatttgtagtcagtatagttggg

SEQ ID NO: 89064 - DNA, 25 bp, probe
agaggcaggatttgtagtcagtata

SEQ ID NO: 89065 - DNA, 25 bp, probe
tagaggcaggatttgtagtcagtat

SEQ ID NO: 89066 - DNA, 25 bp, probe
gcaggatttgtagtcagtatagttg

SEQ ID NO: 89067 - DNA, 25 bp, probe
aggcaggatttgtagtcagtatagt

SEQ ID NO: 89068 - DNA, 25 bp, probe
ttagaggcaggatttgtagtcagta

SEQ ID NO: 89069 - DNA, 25 bp, probe
tttccatcacccaaatatcattcag

SEQ ID NO: 89070 - DNA, 25 bp, probe
ctttccatcacccaaatatcattca

SEQ ID NO: 89071 - DNA, 25 bp, probe
actttccatcacccaaatatcattc

SEQ ID NO: 89072 - DNA, 25 bp, probe
gactttccatcacccaaatatcatt

SEQ ID NO: 89073 - DNA, 25 bp, probe
gaagactttccatcacccaaatatc

SEQ ID NO: 89074 - DNA, 25 bp, probe
caggatttgtagtcagtatagttgg

SEQ ID NO: 89075 - DNA, 25 bp, probe
tttagaggcaggatttgtagtcagt

SEQ ID NO: 89076 - DNA, 25 bp, probe
ttccatcacccaaatatcattcagc

SEQ ID NO: 89077 - DNA, 25 bp, probe
tgaagactttccatcacccaaatat

SEQ ID NO: 89078 - DNA, 25 bp, probe
ttgaagactttccatcacccaaata

SEQ ID NO: 89079 - DNA, 25 bp, probe
gatttgtagtcagtatagttgggag

SEQ ID NO: 89080 - DNA, 25 bp, probe
atagacaccatctgatagggaactg

SEQ ID NO: 89081 - DNA, 25 bp, probe
catagacaccatctgatagggaact

SEQ ID NO: 89082 - DNA, 25 bp, probe
ttcatagacaccatctgatagggaa

SEQ ID NO: 89083 - DNA, 25 bp, probe
aatatcattcagctcttccaggtgg

SEQ ID NO: 89084 - DNA, 25 bp, probe
tttgtagtcagtatagttgggaggc

SEQ ID NO: 89085 - DNA, 25 bp, probe
tcatagacaccatctgatagggaac

SEQ ID NO: 89086 - DNA, 25 bp, probe
gttcatagacaccatctgataggga

SEQ ID NO: 89087 - DNA, 25 bp, probe
agttcatagacaccatctgataggg

SEQ ID NO: 89088 - DNA, 25 bp, probe
ttgcaccaccagatataccactatg

SEQ ID NO: 89089 - DNA, 25 bp, probe
gttgcaccaccagatataccactat

SEQ ID NO: 89090 - DNA, 25 bp, probe
cttgaagactttccatcacccaaat

SEQ ID NO: 89091 - DNA, 25 bp, probe
cacctcacttgacaaggagatacaa

SEQ ID NO: 89092 - DNA, 25 bp, probe
aactatcagttcatagacaccatct

SEQ ID NO: 89093 - DNA, 25 bp, probe
atcacccaaatatcattcagctctt

SEQ ID NO: 89094 - DNA, 25 bp, probe
aaatatcattcagctcttccaggtg

SEQ ID NO: 89095 - DNA, 25 bp, probe
caaatatcattcagctcttccaggt

SEQ ID NO: 89096 - DNA, 25 bp, probe
tcacccaaatatcattcagctcttc

SEQ ID NO: 89097 - DNA, 25 bp, probe
catcacccaaatatcattcagctct

SEQ ID NO: 89098 - DNA, 25 bp, probe
ttgtagtcagtatagttgggaggca

SEQ ID NO: 89099 - DNA, 25 bp, probe
ctacaggaggatgatgtggttgtca

SEQ ID NO: 89100 - DNA, 25 bp, probe
aaggaagacagtctcacagaggaag

SEQ ID NO: 89101 - DNA, 25 bp, probe
gaaatcggatctcaagtacccactg

SEQ ID NO: 89102 - DNA, 25 bp, probe
aatcggatctcaagtacccactgat

SEQ ID NO: 89103 - DNA, 25 bp, probe
agaaatcggatctcaagtacccact

SEQ ID NO: 89104 - DNA, 25 bp, probe
tacaggaggatgatgtggttgtcat

SEQ ID NO: 89105 - DNA, 25 bp, probe
aaatcggatctcaagtacccactga

SEQ ID NO: 89106 - DNA, 25 bp, probe
aactgatggactctgggatgtactg

SEQ ID NO: 89107 - DNA, 25 bp, probe
caactgatggactctgggatgtact

SEQ ID NO: 89108 - DNA, 25 bp, probe
aaaggaagacagtctcacagaggaa

SEQ ID NO: 89109 - DNA, 25 bp, probe
ggttactaggaacactggctgtctc

SEQ ID NO: 89110 - DNA, 25 bp, probe
gttactaggaacactggctgtctcc

SEQ ID NO: 89111 - DNA, 25 bp, probe
gaaaggaagacagtctcacagagga

SEQ ID NO: 89112 - DNA, 25 bp, probe
gctacaggaggatgatgtggttgtc

SEQ ID NO: 89113 - DNA, 25 bp, probe
gatctcaagtacccactgatccatg

SEQ ID NO: 89114 - DNA, 25 bp, probe
tacaaacgtgtggagaaatcggatc

SEQ ID NO: 89115 - DNA, 25 bp, probe
ctacaaacgtgtggagaaatcggat

SEQ ID NO: 89116 - DNA, 25 bp, probe
ctgatggactctgggatgtactgtc

SEQ ID NO: 89117 - DNA, 25 bp, probe
atacacagcacacagggaaaggaag

SEQ ID NO: 89118 - DNA, 25 bp, probe
gatacacagcacacagggaaaggaa

SEQ ID NO: 89119 - DNA, 25 bp, probe
tgtggagaaatcggatctcaagtac

SEQ ID NO: 89120 - DNA, 25 bp, probe
gtgtggagaaatcggatctcaagta

SEQ ID NO: 89121 - DNA, 25 bp, probe
atgacttgggacagaaggttttgtt

SEQ ID NO: 89122 - DNA, 25 bp, probe
actgatggactctgggatgtactgt

SEQ ID NO: 89123 - DNA, 25 bp, probe
gagctacaggaggatgatgtggttg

SEQ ID NO: 89124 - DNA, 25 bp, probe
aggaagacagtctcacagaggaagg

SEQ ID NO: 89125 - DNA, 25 bp, probe
ttgtcatggcaactgatggactctg

SEQ ID NO: 89126 - DNA, 25 bp, probe
tttgttcagggatcaccacatgagt

SEQ ID NO: 89127 - DNA, 25 bp, probe
ggaaaggaagacagtctcacagagg

SEQ ID NO: 89128 - DNA, 25 bp, probe
gggaaaggaagacagtctcacagag

SEQ ID NO: 89129 - DNA, 25 bp, probe
gatgacttgggacagaaggttttgt

SEQ ID NO: 89130 - DNA, 25 bp, probe
cagggaaaggaagacagtctcacag

SEQ ID NO: 89131 - DNA, 25 bp, probe
atcggatctcaagtacccactgatc

SEQ ID NO: 89132 - DNA, 25 bp, probe
gagaaatcggatctcaagtacccac

SEQ ID NO: 89133 - DNA, 25 bp, probe
gtggagaaatcggatctcaagtacc

SEQ ID NO: 89134 - DNA, 25 bp, probe
gacagaaggttttgttcagggatca

SEQ ID NO: 89135 - DNA, 25 bp, probe
acaggaggatgatgtggttgtcatg

SEQ ID NO: 89136 - DNA, 25 bp, probe
ggagctacaaacgtgtggagaaatc

SEQ ID NO: 89137 - DNA, 25 bp, probe
agggaaaggaagacagtctcacaga

SEQ ID NO: 89138 - DNA, 25 bp, probe
acttgggacagaaggttttgttcag

SEQ ID NO: 89139 - DNA, 25 bp, probe
gacttgggacagaaggttttgttca

SEQ ID NO: 89140 - DNA, 25 bp, probe
tgacttgggacagaaggttttgttc

SEQ ID NO: 89141 - DNA, 25 bp, probe
ggatgacttgggacagaaggttttg

SEQ ID NO: 89142 - DNA, 25 bp, probe
gcaactgatggactctgggatgtac

SEQ ID NO: 89143 - DNA, 25 bp, probe
ccttctccgatagtgaagatgaatc

SEQ ID NO: 89144 - DNA, 25 bp, probe
tccttctccgatagtgaagatgaat

SEQ ID NO: 89145 - DNA, 25 bp, probe
atccttctccgatagtgaagatgaa

SEQ ID NO: 89146 - DNA, 25 bp, probe
catccttctccgatagtgaagatga

SEQ ID NO: 89147 - DNA, 25 bp, probe
ctagttcttcctcccaacctgaatg

SEQ ID NO: 89148 - DNA, 25 bp, probe
tagttcttcctcccaacctgaatga

SEQ ID NO: 89149 - DNA, 25 bp, probe
ctattctgtactcgggctctgacta

SEQ ID NO: 89150 - DNA, 25 bp, probe
tattctgtactcgggctctgactac

SEQ ID NO: 89151 - DNA, 25 bp, probe
gcatccttctccgatagtgaagatg

SEQ ID NO: 89152 - DNA, 25 bp, probe
agcatccttctccgatagtgaagat

SEQ ID NO: 89153 - DNA, 25 bp, probe
gagcatccttctccgatagtgaaga

SEQ ID NO: 89154 - DNA, 25 bp, probe
gctagttcttcctcccaacctgaat

SEQ ID NO: 89155 - DNA, 25 bp, probe
agttcttcctcccaacctgaatgac

SEQ ID NO: 89156 - DNA, 25 bp, probe
gttcttcctcccaacctgaatgacc

SEQ ID NO: 89157 - DNA, 25 bp, probe
cctattctgtactcgggctctgact

SEQ ID NO: 89158 - DNA, 25 bp, probe
ttcttcctcccaacctgaatgacct

SEQ ID NO: 89159 - DNA, 25 bp, probe
attctgtactcgggctctgactaca

SEQ ID NO: 89160 - DNA, 25 bp, probe
agctagttcttcctcccaacctgaa

SEQ ID NO: 89161 - DNA, 25 bp, probe
attgatggtctggattccaccactt

SEQ ID NO: 89162 - DNA, 25 bp, probe
ggagcatccttctccgatagtgaag

SEQ ID NO: 89163 - DNA, 25 bp, probe
catggagcatccttctccgatagtg

SEQ ID NO: 89164 - DNA, 25 bp, probe
cattgatggtctggattccaccact

SEQ ID NO: 89165 - DNA, 25 bp, probe
atggagcatccttctccgatagtga

SEQ ID NO: 89166 - DNA, 25 bp, probe
ttgatggtctggattccaccacttg

SEQ ID NO: 89167 - DNA, 25 bp, probe
gaagcagctagttcttcctcccaac

SEQ ID NO: 89168 - DNA, 25 bp, probe
tggagcatccttctccgatagtgaa

SEQ ID NO: 89169 - DNA, 25 bp, probe
tactcgggctctgactacagaagtg

SEQ ID NO: 89170 - DNA, 25 bp, probe
gtactcgggctctgactacagaagt

SEQ ID NO: 89171 - DNA, 25 bp, probe
tgtactcgggctctgactacagaag

SEQ ID NO: 89172 - DNA, 25 bp, probe
ggaatggtgatgaagtgtaggaata

SEQ ID NO: 89173 - DNA, 25 bp, probe
ttatggaatggtgatgaagtgtagg

SEQ ID NO: 89174 - DNA, 25 bp, probe
agttatggaatggtgatgaagtgta

SEQ ID NO: 89175 - DNA, 25 bp, probe
gttatggaatggtgatgaagtgtag

SEQ ID NO: 89176 - DNA, 25 bp, probe
gagttatggaatggtgatgaagtgt

SEQ ID NO: 89177 - DNA, 25 bp, probe
tatggaatggtgatgaagtgtagga

SEQ ID NO: 89178 - DNA, 25 bp, probe
gaatggtgatgaagtgtaggaataa

SEQ ID NO: 89179 - DNA, 25 bp, probe
ggagttatggaatggtgatgaagtg

SEQ ID NO: 89180 - DNA, 25 bp, probe
ggtgaatctcttggaagtgtgtaag

SEQ ID NO: 89181 - DNA, 25 bp, probe
tggaatggtgatgaagtgtaggaat

SEQ ID NO: 89182 - DNA, 25 bp, probe
atggaatggtgatgaagtgtaggaa

SEQ ID NO: 89183 - DNA, 25 bp, probe
ttggaagaggtaatcaagagaggag

SEQ ID NO: 89184 - DNA, 25 bp, probe
gaagaggtaatcaagagaggaggtg

SEQ ID NO: 89185 - DNA, 25 bp, probe
ttgaccacacaattcttgatgactt

SEQ ID NO: 89186 - DNA, 25 bp, probe
tggtgaatctcttggaagtgtgtaa

SEQ ID NO: 89187 - DNA, 25 bp, probe
ttggtgaatctcttggaagtgtgta

SEQ ID NO: 89188 - DNA, 25 bp, probe
ggtaatcaagagaggaggtgaagat

SEQ ID NO: 89189 - DNA, 25 bp, probe
tgaccacacaattcttgatgacttg

SEQ ID NO: 89190 - DNA, 25 bp, probe
gttgaccacacaattcttgatgact

SEQ ID NO: 89191 - DNA, 25 bp, probe
gaggtaatcaagagaggaggtgaag

SEQ ID NO: 89192 - DNA, 25 bp, probe
aggtaatcaagagaggaggtgaaga

SEQ ID NO: 89193 - DNA, 25 bp, probe
agaggtaatcaagagaggaggtgaa

SEQ ID NO: 89194 - DNA, 25 bp, probe
aagaggtaatcaagagaggaggtga

SEQ ID NO: 89195 - DNA, 25 bp, probe
gtaatcaagagaggaggtgaagatt

SEQ ID NO: 89196 - DNA, 25 bp, probe
aatcaagagaggaggtgaagattag

SEQ ID NO: 89197 - DNA, 25 bp, probe
tgttgaccacacaattcttgatgac

SEQ ID NO: 89198 - DNA, 25 bp, probe
ggaagaggtaatcaagagaggaggt

SEQ ID NO: 89199 - DNA, 25 bp, probe
tggaagaggtaatcaagagaggagg

SEQ ID NO: 89200 - DNA, 25 bp, probe
tggtgatgaagtgtaggaataaaga

SEQ ID NO: 89201 - DNA, 25 bp, probe
cacacaattcttgatgacttggagc

SEQ ID NO: 89202 - DNA, 25 bp, probe
cttggtgaatctcttggaagtgtgt

SEQ ID NO: 89203 - DNA, 25 bp, probe
ataaagatactggaagaattgtggc

SEQ ID NO: 89204 - DNA, 25 bp, probe
atggtgatgaagtgtaggaataaag

SEQ ID NO: 89205 - DNA, 25 bp, probe
ctttggaagaggtaatcaagagagg

SEQ ID NO: 89206 - DNA, 25 bp, probe
tgaatctcttggaagtgtgtaagaa

SEQ ID NO: 89207 - DNA, 25 bp, probe
tttggaagaggtaatcaagagagga

SEQ ID NO: 89208 - DNA, 25 bp, probe
gtgaatctcttggaagtgtgtaaga

SEQ ID NO: 89209 - DNA, 25 bp, probe
gtcacagtcacaatgtattgcataa

SEQ ID NO: 89210 - DNA, 25 bp, probe
aagggagttatggaatggtgatgaa

SEQ ID NO: 89211 - DNA, 25 bp, probe
agttcttagaaagtgacgatgacaa

SEQ ID NO: 89212 - DNA, 25 bp, probe
aagttcttagaaagtgacgatgaca

SEQ ID NO: 89213 - DNA, 25 bp, probe
gaagttcttagaaagtgacgatgac

SEQ ID NO: 89214 - DNA, 25 bp, probe
gttcttagaaagtgacgatgacaaa

SEQ ID NO: 89215 - DNA, 25 bp, probe
ggtgatgaagtgtaggaataaagat

SEQ ID NO: 89216 - DNA, 25 bp, probe
atatcgtgcagtatcaagctaacaa

SEQ ID NO: 89217 - DNA, 25 bp, probe
tatcgtgcagtatcaagctaacaag

SEQ ID NO: 89218 - DNA, 25 bp, probe
catatcgtgcagtatcaagctaaca

SEQ ID NO: 89219 - DNA, 25 bp, probe
acatatcgtgcagtatcaagctaac

SEQ ID NO: 89220 - DNA, 25 bp, probe
cacatatcgtgcagtatcaagctaa

SEQ ID NO: 89221 - DNA, 25 bp, probe
gtgcagtatcaagctaacaagtgtg

SEQ ID NO: 89222 - DNA, 25 bp, probe
atcgtgcagtatcaagctaacaagt

SEQ ID NO: 89223 - DNA, 25 bp, probe
tgcagtatcaagctaacaagtgtgt

SEQ ID NO: 89224 - DNA, 25 bp, probe
ccacatatcgtgcagtatcaagcta

SEQ ID NO: 89225 - DNA, 25 bp, probe
tcgtgcagtatcaagctaacaagtg

SEQ ID NO: 89226 - DNA, 25 bp, probe
cgtgcagtatcaagctaacaagtgt

SEQ ID NO: 89227 - DNA, 25 bp, probe
gcagtatcaagctaacaagtgtgtt

SEQ ID NO: 89228 - DNA, 25 bp, probe
ttaaaatgtcgcttttcatctcctg

SEQ ID NO: 89229 - DNA, 25 bp, probe
gttaaaatgtcgcttttcatctcct

SEQ ID NO: 89230 - DNA, 25 bp, probe
tgtgttaaaatgtcgcttttcatct

SEQ ID NO: 89231 - DNA, 25 bp, probe
gtgtgttaaaatgtcgcttttcatc

SEQ ID NO: 89232 - DNA, 25 bp, probe
agtgtgttaaaatgtcgcttttcat

SEQ ID NO: 89233 - DNA, 25 bp, probe
caagtgtgttaaaatgtcgcttttc

SEQ ID NO: 89234 - DNA, 25 bp, probe
tgttaaaatgtcgcttttcatctcc

SEQ ID NO: 89235 - DNA, 25 bp, probe
gtgttaaaatgtcgcttttcatctc

SEQ ID NO: 89236 - DNA, 25 bp, probe
aagtgtgttaaaatgtcgcttttca

SEQ ID NO: 89237 - DNA, 25 bp, probe
acaagtgtgttaaaatgtcgctttt

SEQ ID NO: 89238 - DNA, 25 bp, probe
taaaatgtcgcttttcatctcctgt

SEQ ID NO: 89239 - DNA, 25 bp, probe
cagtatcaagctaacaagtgtgtta

SEQ ID NO: 89240 - DNA, 25 bp, probe
aaaatgtcgcttttcatctcctgtc

SEQ ID NO: 89241 - DNA, 25 bp, probe
agtatcaagctaacaagtgtgttaa

SEQ ID NO: 89242 - DNA, 25 bp, probe
aaatgtcgcttttcatctcctgtcc

SEQ ID NO: 89243 - DNA, 25 bp, probe
aacaagtgtgttaaaatgtcgcttt

SEQ ID NO: 89244 - DNA, 25 bp, probe
catttggagagcaagggttcatctc

SEQ ID NO: 89245 - DNA, 25 bp, probe
gtatcaagctaacaagtgtgttaaa

SEQ ID NO: 89246 - DNA, 25 bp, probe
atttggagagcaagggttcatctca

SEQ ID NO: 89247 - DNA, 25 bp, probe
cccacatatcgtgcagtatcaagct

SEQ ID NO: 89248 - DNA, 25 bp, probe
taacaagtgtgttaaaatgtcgctt

SEQ ID NO: 89249 - DNA, 25 bp, probe
ctaacaagtgtgttaaaatgtcgct

SEQ ID NO: 89250 - DNA, 25 bp, probe
aatgtcgcttttcatctcctgtccc

SEQ ID NO: 89251 - DNA, 25 bp, probe
agctaacaagtgtgttaaaatgtcg

SEQ ID NO: 89252 - DNA, 25 bp, probe
tttggagagcaagggttcatctcac

SEQ ID NO: 89253 - DNA, 25 bp, probe
caagctaacaagtgtgttaaaatgt

SEQ ID NO: 89254 - DNA, 25 bp, probe
gctaacaagtgtgttaaaatgtcgc

SEQ ID NO: 89255 - DNA, 25 bp, probe
aagctaacaagtgtgttaaaatgtc

SEQ ID NO: 89256 - DNA, 25 bp, probe
tcaagctaacaagtgtgttaaaatg

SEQ ID NO: 89257 - DNA, 25 bp, probe
accccacatatcgtgcagtatcaag

SEQ ID NO: 89258 - DNA, 25 bp, probe
gaccccacatatcgtgcagtatcaa

SEQ ID NO: 89259 - DNA, 25 bp, probe
atcaagctaacaagtgtgttaaaat

SEQ ID NO: 89260 - DNA, 25 bp, probe
tatcaagctaacaagtgtgttaaaa

SEQ ID NO: 89261 - DNA, 25 bp, probe
gagtgttggctgtgctattatagaa

SEQ ID NO: 89262 - DNA, 25 bp, probe
taagaggtcaacagtatggaaggag

SEQ ID NO: 89263 - DNA, 25 bp, probe
ctaagaggtcaacagtatggaagga

SEQ ID NO: 89264 - DNA, 25 bp, probe
atggagtgttggctgtgctattata

SEQ ID NO: 89265 - DNA, 25 bp, probe
tatggagtgttggctgtgctattat

SEQ ID NO: 89266 - DNA, 25 bp, probe
actaagaggtcaacagtatggaagg

SEQ ID NO: 89267 - DNA, 25 bp, probe
ttagaacttcaacctcaggacagac

SEQ ID NO: 89268 - DNA, 25 bp, probe
ggagtgttggctgtgctattataga

SEQ ID NO: 89269 - DNA, 25 bp, probe
aatctcttcattgaatggatggcag

SEQ ID NO: 89270 - DNA, 25 bp, probe
tggagtgttggctgtgctattatag

SEQ ID NO: 89271 - DNA, 25 bp, probe
gtatggagtgttggctgtgctatta

SEQ ID NO: 89272 - DNA, 25 bp, probe
tactaagaggtcaacagtatggaag

SEQ ID NO: 89273 - DNA, 25 bp, probe
gaggtactaagaggtcaacagtatg

SEQ ID NO: 89274 - DNA, 25 bp, probe
tgaggtactaagaggtcaacagtat

SEQ ID NO: 89275 - DNA, 25 bp, probe
gtactaagaggtcaacagtatggaa

SEQ ID NO: 89276 - DNA, 25 bp, probe
ctgaggtactaagaggtcaacagta

SEQ ID NO: 89277 - DNA, 25 bp, probe
gttggctgtgctattatagaaatgg

SEQ ID NO: 89278 - DNA, 25 bp, probe
agtgttggctgtgctattatagaaa

SEQ ID NO: 89279 - DNA, 25 bp, probe
gctgtgctattatagaaatggcttg

SEQ ID NO: 89280 - DNA, 25 bp, probe
tatggagccttcaaagaatcagtag

SEQ ID NO: 89281 - DNA, 25 bp, probe
ggagccttcaaagaatcagtagtta

SEQ ID NO: 89282 - DNA, 25 bp, probe
aatatggagccttcaaagaatcagt

SEQ ID NO: 89283 - DNA, 25 bp, probe
gtgctattatagaaatggcttgtgc

SEQ ID NO: 89284 - DNA, 25 bp, probe
tgtgctattatagaaatggcttgtg

SEQ ID NO: 89285 - DNA, 25 bp, probe
tgttggctgtgctattatagaaatg

SEQ ID NO: 89286 - DNA, 25 bp, probe
gtgttggctgtgctattatagaaat

SEQ ID NO: 89287 - DNA, 25 bp, probe
ggtactaagaggtcaacagtatgga

SEQ ID NO: 89288 - DNA, 25 bp, probe
aggtactaagaggtcaacagtatgg

SEQ ID NO: 89289 - DNA, 25 bp, probe
atatggagccttcaaagaatcagta

SEQ ID NO: 89290 - DNA, 25 bp, probe
agcactggtcagagactaagaattg

SEQ ID NO: 89291 - DNA, 25 bp, probe
cagcactggtcagagactaagaatt

SEQ ID NO: 89292 - DNA, 25 bp, probe
ctgtgctattatagaaatggcttgt

SEQ ID NO: 89293 - DNA, 25 bp, probe
aaatatggagccttcaaagaatcag

SEQ ID NO: 89294 - DNA, 25 bp, probe
agtatggaaggagctgtgatgtatg

SEQ ID NO: 89295 - DNA, 25 bp, probe
ggctgtgctattatagaaatggctt

SEQ ID NO: 89296 - DNA, 25 bp, probe
gagtaaatatggagccttcaaagaa

SEQ ID NO: 89297 - DNA, 25 bp, probe
tgagtaaatatggagccttcaaaga

SEQ ID NO: 89298 - DNA, 25 bp, probe
ctgagtaaatatggagccttcaaag

SEQ ID NO: 89299 - DNA, 25 bp, probe
ttggctgtgctattatagaaatggc

SEQ ID NO: 89300 - DNA, 25 bp, probe
tttagaacttcaacctcaggacaga

SEQ ID NO: 89301 - DNA, 25 bp, probe
gagccttcaaagaatcagtagttat

SEQ ID NO: 89302 - DNA, 25 bp, probe
tacaatctcttcattgaatggatgg

SEQ ID NO: 89303 - DNA, 25 bp, probe
ttgtttagaacttcaacctcaggac

SEQ ID NO: 89304 - DNA, 25 bp, probe
gtttagaacttcaacctcaggacag

SEQ ID NO: 89305 - DNA, 25 bp, probe
tgtaactaaccaagatgattgttgc

SEQ ID NO: 89306 - DNA, 25 bp, probe
taactaaccaagatgattgttgctg

SEQ ID NO: 89307 - DNA, 25 bp, probe
gtaactaaccaagatgattgttgct

SEQ ID NO: 89308 - DNA, 25 bp, probe
cactagactgcttgtaactaaccaa

SEQ ID NO: 89309 - DNA, 25 bp, probe
ccaagatgattgttgctgcttctaa

SEQ ID NO: 89310 - DNA, 25 bp, probe
taaccaagatgattgttgctgcttc

SEQ ID NO: 89311 - DNA, 25 bp, probe
ctaaccaagatgattgttgctgctt

SEQ ID NO: 89312 - DNA, 25 bp, probe
ttgtaactaaccaagatgattgttg

SEQ ID NO: 89313 - DNA, 25 bp, probe
aactaaccaagatgattgttgctgc

SEQ ID NO: 89314 - DNA, 25 bp, probe
tagaacatttgggcattacagaaga

SEQ ID NO: 89315 - DNA, 25 bp, probe
actttagaacatttgggcattacag

SEQ ID NO: 89316 - DNA, 25 bp, probe
cactttagaacatttgggcattaca

SEQ ID NO: 89317 - DNA, 25 bp, probe
ttagaacatttgggcattacagaag

SEQ ID NO: 89318 - DNA, 25 bp, probe
ctttagaacatttgggcattacaga

SEQ ID NO: 89319 - DNA, 25 bp, probe
atttgggcattacagaagagcatat

SEQ ID NO: 89320 - DNA, 25 bp, probe
tttgggcattacagaagagcatatt

SEQ ID NO: 89321 - DNA, 25 bp, probe
tttagaacatttgggcattacagaa

SEQ ID NO: 89322 - DNA, 25 bp, probe
taagatcctggacaagaccaagtta

SEQ ID NO: 89323 - DNA, 25 bp, probe
accaagatgattgttgctgcttcta

SEQ ID NO: 89324 - DNA, 25 bp, probe
cattaagatcctggacaagaccaag

SEQ ID NO: 89325 - DNA, 25 bp, probe
gcactttagaacatttgggcattac

SEQ ID NO: 89326 - DNA, 25 bp, probe
agcactttagaacatttgggcatta

SEQ ID NO: 89327 - DNA, 25 bp, probe
aagatgattgttgctgcttctaaat

SEQ ID NO: 89328 - DNA, 25 bp, probe
agaccctaaagaaagagacctcaaa

SEQ ID NO: 89329 - DNA, 25 bp, probe
agaacatttgggcattacagaagag

SEQ ID NO: 89330 - DNA, 25 bp, probe
caagatgattgttgctgcttctaaa

SEQ ID NO: 89331 - DNA, 25 bp, probe
agatgattgttgctgcttctaaatt

SEQ ID NO: 89332 - DNA, 25 bp, probe
atgatgctaccagaccctaaagaaa

SEQ ID NO: 89333 - DNA, 25 bp, probe
catttgggcattacagaagagcata

SEQ ID NO: 89334 - DNA, 25 bp, probe
ttgggcattacagaagagcatattc

SEQ ID NO: 89335 - DNA, 25 bp, probe
attaagatcctggacaagaccaagt

SEQ ID NO: 89336 - DNA, 25 bp, probe
actaaccaagatgattgttgctgct

SEQ ID NO: 89337 - DNA, 25 bp, probe
ttaagatcctggacaagaccaagtt

SEQ ID NO: 89338 - DNA, 25 bp, probe
tctacagagggataagacacacatc

SEQ ID NO: 89339 - DNA, 25 bp, probe
atgctaccagaccctaaagaaagag

SEQ ID NO: 89340 - DNA, 25 bp, probe
cagaccctaaagaaagagacctcaa

SEQ ID NO: 89341 - DNA, 25 bp, probe
ctaccagaccctaaagaaagagacc

SEQ ID NO: 89342 - DNA, 25 bp, probe
gatgctaccagaccctaaagaaaga

SEQ ID NO: 89343 - DNA, 25 bp, probe
aagcactttagaacatttgggcatt

SEQ ID NO: 89344 - DNA, 25 bp, probe
aagatcctggacaagaccaagttag

SEQ ID NO: 89345 - DNA, 25 bp, probe
taccagaccctaaagaaagagacct

SEQ ID NO: 89346 - DNA, 25 bp, probe
tgatgctaccagaccctaaagaaag

SEQ ID NO: 89347 - DNA, 25 bp, probe
ccattaagatcctggacaagaccaa

SEQ ID NO: 89348 - DNA, 25 bp, probe
gctaccagaccctaaagaaagagac

SEQ ID NO: 89349 - DNA, 25 bp, probe
aaggtaagaaggaagactgcatgtc

SEQ ID NO: 89350 - DNA, 25 bp, probe
gctctctggcttaagtttagaagtt

SEQ ID NO: 89351 - DNA, 25 bp, probe
gtaagaaggaagactgcatgtccaa

SEQ ID NO: 89352 - DNA, 25 bp, probe
aaaggtaagaaggaagactgcatgt

SEQ ID NO: 89353 - DNA, 25 bp, probe
caaacgaagtaacaaaaggaagcag

SEQ ID NO: 89354 - DNA, 25 bp, probe
ctctggcttaagtttagaagttagt

SEQ ID NO: 89355 - DNA, 25 bp, probe
tctctggcttaagtttagaagttag

SEQ ID NO: 89356 - DNA, 25 bp, probe
ctctctggcttaagtttagaagtta

SEQ ID NO: 89357 - DNA, 25 bp, probe
aggctctctggcttaagtttagaag

SEQ ID NO: 89358 - DNA, 25 bp, probe
aaacgaagtaacaaaaggaagcagg

SEQ ID NO: 89359 - DNA, 25 bp, probe
ggctctctggcttaagtttagaagt

SEQ ID NO: 89360 - DNA, 25 bp, probe
ctgcatgtccaaacgaagtaacaaa

SEQ ID NO: 89361 - DNA, 25 bp, probe
ccaaacgaagtaacaaaaggaagca

SEQ ID NO: 89362 - DNA, 25 bp, probe
taagaaggaagactgcatgtccaaa

SEQ ID NO: 89363 - DNA, 25 bp, probe
gtccaaacgaagtaacaaaaggaag

SEQ ID NO: 89364 - DNA, 25 bp, probe
atgtccaaacgaagtaacaaaagga

SEQ ID NO: 89365 - DNA, 25 bp, probe
caggctctctggcttaagtttagaa

SEQ ID NO: 89366 - DNA, 25 bp, probe
catgtccaaacgaagtaacaaaagg

SEQ ID NO: 89367 - DNA, 25 bp, probe
tgtccaaacgaagtaacaaaaggaa

SEQ ID NO: 89368 - DNA, 25 bp, probe
aagactgcatgtccaaacgaagtaa

SEQ ID NO: 89369 - DNA, 25 bp, probe
tctggcttaagtttagaagttagta

SEQ ID NO: 89370 - DNA, 25 bp, probe
gcatgtccaaacgaagtaacaaaag

SEQ ID NO: 89371 - DNA, 25 bp, probe
aaaaggtaagaaggaagactgcatg

SEQ ID NO: 89372 - DNA, 25 bp, probe
aggtaagaaggaagactgcatgtcc

SEQ ID NO: 89373 - DNA, 25 bp, probe
actgcatgtccaaacgaagtaacaa

SEQ ID NO: 89374 - DNA, 25 bp, probe
gaagactgcatgtccaaacgaagta

SEQ ID NO: 89375 - DNA, 25 bp, probe
tccaaacgaagtaacaaaaggaagc

SEQ ID NO: 89376 - DNA, 25 bp, probe
ggtaagaaggaagactgcatgtcca

SEQ ID NO: 89377 - DNA, 25 bp, probe
aagtaacaaaaggaagcaggctctc

SEQ ID NO: 89378 - DNA, 25 bp, probe
gaagtaacaaaaggaagcaggctct

SEQ ID NO: 89379 - DNA, 25 bp, probe
agactgcatgtccaaacgaagtaac

SEQ ID NO: 89380 - DNA, 25 bp, probe
aagaaggaagactgcatgtccaaac

SEQ ID NO: 89381 - DNA, 25 bp, probe
cagaaaggcaggctgaattgtgatc

SEQ ID NO: 89382 - DNA, 25 bp, probe
ctggcttaagtttagaagttagtat

SEQ ID NO: 89383 - DNA, 25 bp, probe
gactgcatgtccaaacgaagtaaca

SEQ ID NO: 89384 - DNA, 25 bp, probe
tgcatgtccaaacgaagtaacaaaa

SEQ ID NO: 89385 - DNA, 25 bp, probe
agtaacaaaaggaagcaggctctct

SEQ ID NO: 89386 - DNA, 25 bp, probe
aacgaagtaacaaaaggaagcaggc

SEQ ID NO: 89387 - DNA, 25 bp, probe
caccaactgtcttccttgcagaaag

SEQ ID NO: 89388 - DNA, 25 bp, probe
gtaacaaaaggaagcaggctctctg

SEQ ID NO: 89389 - DNA, 25 bp, probe
gcaggctctctggcttaagtttaga

SEQ ID NO: 89390 - DNA, 25 bp, probe
cgaagtaacaaaaggaagcaggctc

SEQ ID NO: 89391 - DNA, 25 bp, probe
acaccaactgtcttccttgcagaaa

SEQ ID NO: 89392 - DNA, 25 bp, probe
tggcttaagtttagaagttagtata

SEQ ID NO: 89393 - DNA, 25 bp, probe
agttgagagtagacaggttagagat

SEQ ID NO: 89394 - DNA, 25 bp, probe
ttgagagtagacaggttagagattg

SEQ ID NO: 89395 - DNA, 25 bp, probe
gttgagagtagacaggttagagatt

SEQ ID NO: 89396 - DNA, 25 bp, probe
cagttgagagtagacaggttagaga

SEQ ID NO: 89397 - DNA, 25 bp, probe
ttatcaaccaccacaatccattcat

SEQ ID NO: 89398 - DNA, 25 bp, probe
gagagtagacaggttagagattgtg

SEQ ID NO: 89399 - DNA, 25 bp, probe
tgagagtagacaggttagagattgt

SEQ ID NO: 89400 - DNA, 25 bp, probe
gaattgtactcttctgccatacctt

SEQ ID NO: 89401 - DNA, 25 bp, probe
aatataattggtctccttgatgctt

SEQ ID NO: 89402 - DNA, 25 bp, probe
gcagttgagagtagacaggttagag

SEQ ID NO: 89403 - DNA, 25 bp, probe
gaagagagacagcagttgagagtag

SEQ ID NO: 89404 - DNA, 25 bp, probe
gagtagacaggttagagattgtgga

SEQ ID NO: 89405 - DNA, 25 bp, probe
agagtagacaggttagagattgtgg

SEQ ID NO: 89406 - DNA, 25 bp, probe
agtagacaggttagagattgtggac

SEQ ID NO: 89407 - DNA, 25 bp, probe
tatcaaccaccacaatccattcatg

SEQ ID NO: 89408 - DNA, 25 bp, probe
cagcagttgagagtagacaggttag

SEQ ID NO: 89409 - DNA, 25 bp, probe
aatgaagagagacagcagttgagag

SEQ ID NO: 89410 - DNA, 25 bp, probe
ataatagtcttgtgctgacaccatc

SEQ ID NO: 89411 - DNA, 25 bp, probe
gataatagtcttgtgctgacaccat

SEQ ID NO: 89412 - DNA, 25 bp, probe
agcagttgagagtagacaggttaga

SEQ ID NO: 89413 - DNA, 25 bp, probe
aagagagacagcagttgagagtaga

SEQ ID NO: 89414 - DNA, 25 bp, probe
attagcagagttacttctaaggagt

SEQ ID NO: 89415 - DNA, 25 bp, probe
ccaatagagcttatacacatcaggt

SEQ ID NO: 89416 - DNA, 25 bp, probe
tgaagagagacagcagttgagagta

SEQ ID NO: 89417 - DNA, 25 bp, probe
atttatcaaccaccacaatccattc

SEQ ID NO: 89418 - DNA, 25 bp, probe
taatagtcttgtgctgacaccatca

SEQ ID NO: 89419 - DNA, 25 bp, probe
aatagagcttatacacatcaggttg

SEQ ID NO: 89420 - DNA, 25 bp, probe
caatagagcttatacacatcaggtt

SEQ ID NO: 89421 - DNA, 25 bp, probe
acagcagttgagagtagacaggtta

SEQ ID NO: 89422 - DNA, 25 bp, probe
gaatttatcaaccaccacaatccat

SEQ ID NO: 89423 - DNA, 25 bp, probe
gagaatttatcaaccaccacaatcc

SEQ ID NO: 89424 - DNA, 25 bp, probe
tttatcaaccaccacaatccattca

SEQ ID NO: 89425 - DNA, 25 bp, probe
cagaggtaaagaggaagcattgaaa

SEQ ID NO: 89426 - DNA, 25 bp, probe
tgagaaagcaaatgaagagagacag

SEQ ID NO: 89427 - DNA, 25 bp, probe
aatttatcaaccaccacaatccatt

SEQ ID NO: 89428 - DNA, 25 bp, probe
agaatttatcaaccaccacaatcca

SEQ ID NO: 89429 - DNA, 25 bp, probe
agagagacagcagttgagagtagac

SEQ ID NO: 89430 - DNA, 25 bp, probe
atagagcttatacacatcaggttgt

SEQ ID NO: 89431 - DNA, 25 bp, probe
atgaagagagacagcagttgagagt

SEQ ID NO: 89432 - DNA, 25 bp, probe
attgagaaagcaaatgaagagagac

SEQ ID NO: 89433 - DNA, 25 bp, probe
ttgagaaagcaaatgaagagagaca

SEQ ID NO: 89434 - DNA, 25 bp, probe
ataagaataccaaccaaattgtcgc

SEQ ID NO: 89435 - DNA, 25 bp, probe
ttagcagagttacttctaaggagta

SEQ ID NO: 89436 - DNA, 25 bp, probe
agagacagcagttgagagtagacag

SEQ ID NO: 89437 - DNA, 25 bp, probe
attaaggagaagagttggcgaataa

SEQ ID NO: 89438 - DNA, 25 bp, probe
gattaaggagaagagttggcgaata

SEQ ID NO: 89439 - DNA, 25 bp, probe
ttaaggagaagagttggcgaataag

SEQ ID NO: 89440 - DNA, 25 bp, probe
cctgagaatatcctgtgtgtgaatc

SEQ ID NO: 89441 - DNA, 25 bp, probe
ctgagaatatcctgtgtgtgaatcg

SEQ ID NO: 89442 - DNA, 25 bp, probe
taaggagaagagttggcgaataagt

SEQ ID NO: 89443 - DNA, 25 bp, probe
tgattaaggagaagagttggcgaat

SEQ ID NO: 89444 - DNA, 25 bp, probe
tgagaatatcctgtgtgtgaatcgg

SEQ ID NO: 89445 - DNA, 25 bp, probe
ctgattaaggagaagagttggcgaa

SEQ ID NO: 89446 - DNA, 25 bp, probe
gcctgagaatatcctgtgtgtgaat

SEQ ID NO: 89447 - DNA, 25 bp, probe
cttggacctgaagcctgagaatatc

SEQ ID NO: 89448 - DNA, 25 bp, probe
aaggagaagagttggcgaataagtg

SEQ ID NO: 89449 - DNA, 25 bp, probe
gaagaagaagaatcgtggctctgat

SEQ ID NO: 89450 - DNA, 25 bp, probe
cagaagatacaaacccagagagaag

SEQ ID NO: 89451 - DNA, 25 bp, probe
ctgaagcctgagaatatcctgtgtg

SEQ ID NO: 89452 - DNA, 25 bp, probe
aagaagaagaatcgtggctctgatg

SEQ ID NO: 89453 - DNA, 25 bp, probe
gaagcctgagaatatcctgtgtgtg

SEQ ID NO: 89454 - DNA, 25 bp, probe
ctcaatgcccagaagaagaagaatc

SEQ ID NO: 89455 - DNA, 25 bp, probe
ccagaagatacaaacccagagagaa

SEQ ID NO: 89456 - DNA, 25 bp, probe
acttggacctgaagcctgagaatat

SEQ ID NO: 89457 - DNA, 25 bp, probe
tctgattaaggagaagagttggcga

SEQ ID NO: 89458 - DNA, 25 bp, probe
agcctgagaatatcctgtgtgtgaa

SEQ ID NO: 89459 - DNA, 25 bp, probe
aagcctgagaatatcctgtgtgtga

SEQ ID NO: 89460 - DNA, 25 bp, probe
tgaagcctgagaatatcctgtgtgt

SEQ ID NO: 89461 - DNA, 25 bp, probe
agaagatacaaacccagagagaagc

SEQ ID NO: 89462 - DNA, 25 bp, probe
actcaatgcccagaagaagaagaat

SEQ ID NO: 89463 - DNA, 25 bp, probe
gacctgaagcctgagaatatcctgt

SEQ ID NO: 89464 - DNA, 25 bp, probe
agaagaagaagaatcgtggctctga

SEQ ID NO: 89465 - DNA, 25 bp, probe
gggtcatcgcctatatgctacttag

SEQ ID NO: 89466 - DNA, 25 bp, probe
cctgaagcctgagaatatcctgtgt

SEQ ID NO: 89467 - DNA, 25 bp, probe
acctgaagcctgagaatatcctgtg

SEQ ID NO: 89468 - DNA, 25 bp, probe
gactcaatgcccagaagaagaagaa

SEQ ID NO: 89469 - DNA, 25 bp, probe
ttctgattaaggagaagagttggcg

SEQ ID NO: 89470 - DNA, 25 bp, probe
cacttggacctgaagcctgagaata

SEQ ID NO: 89471 - DNA, 25 bp, probe
gagaatatcctgtgtgtgaatcggg

SEQ ID NO: 89472 - DNA, 25 bp, probe
tcaatgcccagaagaagaagaatcg

SEQ ID NO: 89473 - DNA, 25 bp, probe
gaagatacaaacccagagagaagct

SEQ ID NO: 89474 - DNA, 25 bp, probe
gtacattctccacttggacctgaag

SEQ ID NO: 89475 - DNA, 25 bp, probe
ctacaatttgacggagcttgatacc

SEQ ID NO: 89476 - DNA, 25 bp, probe
aatgcccagaagaagaagaatcgtg

SEQ ID NO: 89477 - DNA, 25 bp, probe
caatgcccagaagaagaagaatcgt

SEQ ID NO: 89478 - DNA, 25 bp, probe
cagactcaatgcccagaagaagaag

SEQ ID NO: 89479 - DNA, 25 bp, probe
ggtcatcgcctatatgctacttagc

SEQ ID NO: 89480 - DNA, 25 bp, probe
agactcaatgcccagaagaagaaga

SEQ ID NO: 89481 - DNA, 25 bp, probe
gtttgtcaaggtttggcagattact

SEQ ID NO: 89482 - DNA, 25 bp, probe
caaggtttggcagattactggatag

SEQ ID NO: 89483 - DNA, 25 bp, probe
tcaaggtttggcagattactggata

SEQ ID NO: 89484 - DNA, 25 bp, probe
tttgtcaaggtttggcagattactg

SEQ ID NO: 89485 - DNA, 25 bp, probe
ctgtgggtgtgttgtcatagagatg

SEQ ID NO: 89486 - DNA, 25 bp, probe
cgtttgtcaaggtttggcagattac

SEQ ID NO: 89487 - DNA, 25 bp, probe
tctgtgggtgtgttgtcatagagat

SEQ ID NO: 89488 - DNA, 25 bp, probe
tcgtttgtcaaggtttggcagatta

SEQ ID NO: 89489 - DNA, 25 bp, probe
gtcaaggtttggcagattactggat

SEQ ID NO: 89490 - DNA, 25 bp, probe
attcgtttgtcaaggtttggcagat

SEQ ID NO: 89491 - DNA, 25 bp, probe
ttgtcaaggtttggcagattactgg

SEQ ID NO: 89492 - DNA, 25 bp, probe
ttcgtttgtcaaggtttggcagatt

SEQ ID NO: 89493 - DNA, 25 bp, probe
gtctgtgggtgtgttgtcatagaga

SEQ ID NO: 89494 - DNA, 25 bp, probe
agtctgtgggtgtgttgtcatagag

SEQ ID NO: 89495 - DNA, 25 bp, probe
gagtctgtgggtgtgttgtcataga

SEQ ID NO: 89496 - DNA, 25 bp, probe
tgggtgtgttgtcatagagatggtg

SEQ ID NO: 89497 - DNA, 25 bp, probe
gtgggtgtgttgtcatagagatggt

SEQ ID NO: 89498 - DNA, 25 bp, probe
tgtgggtgtgttgtcatagagatgg

SEQ ID NO: 89499 - DNA, 25 bp, probe
tgtcaaggtttggcagattactgga

SEQ ID NO: 89500 - DNA, 25 bp, probe
cattcgtttgtcaaggtttggcaga

SEQ ID NO: 89501 - DNA, 25 bp, probe
ggagtctgtgggtgtgttgtcatag

SEQ ID NO: 89502 - DNA, 25 bp, probe
cgaccattcgtttgtcaaggtttgg

SEQ ID NO: 89503 - DNA, 25 bp, probe
attattggtggtggaatggcttata

SEQ ID NO: 89504 - DNA, 25 bp, probe
ttattggtggtggaatggcttatac

SEQ ID NO: 89505 - DNA, 25 bp, probe
gattattggtggtggaatggcttat

SEQ ID NO: 89506 - DNA, 25 bp, probe
tgattattggtggtggaatggctta

SEQ ID NO: 89507 - DNA, 25 bp, probe
taaggtactcaacaacatggagatt

SEQ ID NO: 89508 - DNA, 25 bp, probe
ttaaggtactcaacaacatggagat

SEQ ID NO: 89509 - DNA, 25 bp, probe
aaggtactcaacaacatggagattg

SEQ ID NO: 89510 - DNA, 25 bp, probe
tatttgaatgggatgcctttgctaa

SEQ ID NO: 89511 - DNA, 25 bp, probe
gtactcaacaacatggagattggtg

SEQ ID NO: 89512 - DNA, 25 bp, probe
ccgttaggagtatttgaatgggatg

SEQ ID NO: 89513 - DNA, 25 bp, probe
gccaaatggaacactgaagataaag

SEQ ID NO: 89514 - DNA, 25 bp, probe
gttaggagtatttgaatgggatgcc

SEQ ID NO: 89515 - DNA, 25 bp, probe
tgccaaatggaacactgaagataaa

SEQ ID NO: 89516 - DNA, 25 bp, probe
gtatttgaatgggatgcctttgcta

SEQ ID NO: 89517 - DNA, 25 bp, probe
cgttaggagtatttgaatgggatgc

SEQ ID NO: 89518 - DNA, 25 bp, probe
ccaaatggaacactgaagataaagt

SEQ ID NO: 89519 - DNA, 25 bp, probe
aggtactcaacaacatggagattgg

SEQ ID NO: 89520 - DNA, 25 bp, probe
aaatggaacactgaagataaagtca

SEQ ID NO: 89521 - DNA, 25 bp, probe
aaatatgctggacaaagtcaatgag

SEQ ID NO: 89522 - DNA, 25 bp, probe
tattggtggtggaatggcttatacc

SEQ ID NO: 89523 - DNA, 25 bp, probe
ggagtatttgaatgggatgcctttg

SEQ ID NO: 89524 - DNA, 25 bp, probe
agggagccaagatcgttaaagatat

SEQ ID NO: 89525 - DNA, 25 bp, probe
cttaaggtactcaacaacatggaga

SEQ ID NO: 89526 - DNA, 25 bp, probe
caaatggaacactgaagataaagtc

SEQ ID NO: 89527 - DNA, 25 bp, probe
ggtactcaacaacatggagattggt

SEQ ID NO: 89528 - DNA, 25 bp, probe
atttgaatgggatgcctttgctaag

SEQ ID NO: 89529 - DNA, 25 bp, probe
actgtagcatctggcatatctcctg

SEQ ID NO: 89530 - DNA, 25 bp, probe
cactgtagcatctggcatatctcct

SEQ ID NO: 89531 - DNA, 25 bp, probe
gagggagccaagatcgttaaagata

SEQ ID NO: 89532 - DNA, 25 bp, probe
gccgttaggagtatttgaatgggat

SEQ ID NO: 89533 - DNA, 25 bp, probe
taggagtatttgaatgggatgcctt

SEQ ID NO: 89534 - DNA, 25 bp, probe
ttaggagtatttgaatgggatgcct

SEQ ID NO: 89535 - DNA, 25 bp, probe
gagtatttgaatgggatgcctttgc

SEQ ID NO: 89536 - DNA, 25 bp, probe
tactcaacaacatggagattggtgc

SEQ ID NO: 89537 - DNA, 25 bp, probe
gtgccaaatggaacactgaagataa

SEQ ID NO: 89538 - DNA, 25 bp, probe
atgaaattgtgaaagccacttccaa

SEQ ID NO: 89539 - DNA, 25 bp, probe
agtatttgaatgggatgcctttgct

SEQ ID NO: 89540 - DNA, 25 bp, probe
ggagccaagatcgttaaagatatca

SEQ ID NO: 89541 - DNA, 25 bp, probe
aagaatcatgctcaagttgtggctc

SEQ ID NO: 89542 - DNA, 25 bp, probe
atggatgaaattgtgaaagccactt

SEQ ID NO: 89543 - DNA, 25 bp, probe
tggtcctgagagcaacaagaatcat

SEQ ID NO: 89544 - DNA, 25 bp, probe
agccaagatcgttaaagatatcatg

SEQ ID NO: 89545 - DNA, 25 bp, probe
gatgaaattgtgaaagccacttcca

SEQ ID NO: 89546 - DNA, 25 bp, probe
aggagtatttgaatgggatgccttt

SEQ ID NO: 89547 - DNA, 25 bp, probe
tagtgttgtcatctggtggattgtt

SEQ ID NO: 89548 - DNA, 25 bp, probe
acttctctctggtgttgatgacatt

SEQ ID NO: 89549 - DNA, 25 bp, probe
aacttctctctggtgttgatgacat

SEQ ID NO: 89550 - DNA, 25 bp, probe
aatggagtgacacaaggtgatagaa

SEQ ID NO: 89551 - DNA, 25 bp, probe
gtagtgttgtcatctggtggattgt

SEQ ID NO: 89552 - DNA, 25 bp, probe
tgtagtgttgtcatctggtggattg

SEQ ID NO: 89553 - DNA, 25 bp, probe
gtgtagtgttgtcatctggtggatt

SEQ ID NO: 89554 - DNA, 25 bp, probe
aacaaacgatattcttctcccatct

SEQ ID NO: 89555 - DNA, 25 bp, probe
acaaacgatattcttctcccatctc

SEQ ID NO: 89556 - DNA, 25 bp, probe
aaacaaacgatattcttctcccatc

SEQ ID NO: 89557 - DNA, 25 bp, probe
atggagtgacacaaggtgatagaag

SEQ ID NO: 89558 - DNA, 25 bp, probe
caaacgatattcttctcccatctcc

SEQ ID NO: 89559 - DNA, 25 bp, probe
gactacattcttcccatcctgctat

SEQ ID NO: 89560 - DNA, 25 bp, probe
atgaagcattacaggatgacagcag

SEQ ID NO: 89561 - DNA, 25 bp, probe
gattgtttgtgactacattcttccc

SEQ ID NO: 89562 - DNA, 25 bp, probe
gtggattgtttgtgactacattctt

SEQ ID NO: 89563 - DNA, 25 bp, probe
catctggtggattgtttgtgactac

SEQ ID NO: 89564 - DNA, 25 bp, probe
tggattgtttgtgactacattcttc

SEQ ID NO: 89565 - DNA, 25 bp, probe
ttgtttgtgactacattcttcccat

SEQ ID NO: 89566 - DNA, 25 bp, probe
attgtttgtgactacattcttccca

SEQ ID NO: 89567 - DNA, 25 bp, probe
aaacgatattcttctcccatctccc

SEQ ID NO: 89568 - DNA, 25 bp, probe
ggagtgacacaaggtgatagaagtc

SEQ ID NO: 89569 - DNA, 25 bp, probe
tgtttgtgactacattcttcccatc

SEQ ID NO: 89570 - DNA, 25 bp, probe
ttctctctggtgttgatgacatttc

SEQ ID NO: 89571 - DNA, 25 bp, probe
cttctctctggtgttgatgacattt

SEQ ID NO: 89572 - DNA, 25 bp, probe
ggtggattgtttgtgactacattct

SEQ ID NO: 89573 - DNA, 25 bp, probe
caaacttctctctggtgttgatgac

SEQ ID NO: 89574 - DNA, 25 bp, probe
tggtggattgtttgtgactacattc

SEQ ID NO: 89575 - DNA, 25 bp, probe
ctggtggattgtttgtgactacatt

SEQ ID NO: 89576 - DNA, 25 bp, probe
tgtgtagtgttgtcatctggtggat

SEQ ID NO: 89577 - DNA, 25 bp, probe
gagtgacacaaggtgatagaagtcg

SEQ ID NO: 89578 - DNA, 25 bp, probe
ggattgtttgtgactacattcttcc

SEQ ID NO: 89579 - DNA, 25 bp, probe
tcatctggtggattgtttgtgacta

SEQ ID NO: 89580 - DNA, 25 bp, probe
tttgtgactacattcttcccatcct

SEQ ID NO: 89581 - DNA, 25 bp, probe
gtttgtgactacattcttcccatcc

SEQ ID NO: 89582 - DNA, 25 bp, probe
tggagtgacacaaggtgatagaagt

SEQ ID NO: 89583 - DNA, 25 bp, probe
ctggtgttgatgacatttccataaa

SEQ ID NO: 89584 - DNA, 25 bp, probe
tctggtgttgatgacatttccataa

SEQ ID NO: 89585 - DNA, 25 bp, probe
catgaagcattacaggatgacagca

SEQ ID NO: 89586 - DNA, 25 bp, probe
tgactacattcttcccatcctgcta

SEQ ID NO: 89587 - DNA, 25 bp, probe
tggtgttgatgacatttccataaat

SEQ ID NO: 89588 - DNA, 25 bp, probe
ctctggtgttgatgacatttccata

SEQ ID NO: 89589 - DNA, 25 bp, probe
aaacttctctctggtgttgatgaca

SEQ ID NO: 89590 - DNA, 25 bp, probe
gttgtcatctggtggattgtttgtg

SEQ ID NO: 89591 - DNA, 25 bp, probe
ctgagaatgtggaatacctaaggat

SEQ ID NO: 89592 - DNA, 25 bp, probe
tgagtcatctattcaagcacttaca

SEQ ID NO: 89593 - DNA, 25 bp, probe
cagtagcattatgagtagtgtgaat

SEQ ID NO: 89594 - DNA, 25 bp, probe
gagtcatctattcaagcacttacag

SEQ ID NO: 89595 - DNA, 25 bp, probe
agtcatctattcaagcacttacagc

SEQ ID NO: 89596 - DNA, 25 bp, probe
gacagtagcattatgagtagtgtga

SEQ ID NO: 89597 - DNA, 25 bp, probe
tgacagtagcattatgagtagtgtg

SEQ ID NO: 89598 - DNA, 25 bp, probe
tgagaatgtggaatacctaaggata

SEQ ID NO: 89599 - DNA, 25 bp, probe
acagtagcattatgagtagtgtgaa

SEQ ID NO: 89600 - DNA, 25 bp, probe
ctacagttatgttcagtcacacaca

SEQ ID NO: 89601 - DNA, 25 bp, probe
atgacagtagcattatgagtagtgt

SEQ ID NO: 89602 - DNA, 25 bp, probe
gctgagaatgtggaatacctaagga

SEQ ID NO: 89603 - DNA, 25 bp, probe
tacagttatgttcagtcacacacac

SEQ ID NO: 89604 - DNA, 25 bp, probe
atgtggaatacctaaggataacacc

SEQ ID NO: 89605 - DNA, 25 bp, probe
cctacagttatgttcagtcacacac

SEQ ID NO: 89606 - DNA, 25 bp, probe
agtagcattatgagtagtgtgaatt

SEQ ID NO: 89607 - DNA, 25 bp, probe
agaatgtggaatacctaaggataac

SEQ ID NO: 89608 - DNA, 25 bp, probe
attggaagattcagctagttaggag

SEQ ID NO: 89609 - DNA, 25 bp, probe
gattggaagattcagctagttagga

SEQ ID NO: 89610 - DNA, 25 bp, probe
agattggaagattcagctagttagg

SEQ ID NO: 89611 - DNA, 25 bp, probe
tatcaagtcatggcaggtacagtag

SEQ ID NO: 89612 - DNA, 25 bp, probe
ttcagcctacagttatgttcagtca

SEQ ID NO: 89613 - DNA, 25 bp, probe
gtctctgccttgagtcatctattca

SEQ ID NO: 89614 - DNA, 25 bp, probe
tgtctctgccttgagtcatctattc

SEQ ID NO: 89615 - DNA, 25 bp, probe
ggaatacctaaggataacaccgctt

SEQ ID NO: 89616 - DNA, 25 bp, probe
attggaagattggaagattcagcta

SEQ ID NO: 89617 - DNA, 25 bp, probe
gagaatgtggaatacctaaggataa

SEQ ID NO: 89618 - DNA, 25 bp, probe
gtatcaagtcatggcaggtacagta

SEQ ID NO: 89619 - DNA, 25 bp, probe
ggaagattggaagattcagctagtt

SEQ ID NO: 89620 - DNA, 25 bp, probe
ttggaagattggaagattcagctag

SEQ ID NO: 89621 - DNA, 25 bp, probe
aattggaagattggaagattcagct

SEQ ID NO: 89622 - DNA, 25 bp, probe
gtgtctctgccttgagtcatctatt

SEQ ID NO: 89623 - DNA, 25 bp, probe
gaatgtggaatacctaaggataaca

SEQ ID NO: 89624 - DNA, 25 bp, probe
ttgtttgtcttccattccattgttt

SEQ ID NO: 89625 - DNA, 25 bp, probe
aatgtggaatacctaaggataacac

SEQ ID NO: 89626 - DNA, 25 bp, probe
cttgtttgtcttccattccattgtt

SEQ ID NO: 89627 - DNA, 25 bp, probe
tgtggaatacctaaggataacaccg

SEQ ID NO: 89628 - DNA, 25 bp, probe
gtcatggcaggtacagtaggataag

SEQ ID NO: 89629 - DNA, 25 bp, probe
aagattggaagattcagctagttag

SEQ ID NO: 89630 - DNA, 25 bp, probe
tggaagattggaagattcagctagt

SEQ ID NO: 89631 - DNA, 25 bp, probe
tcagcctacagttatgttcagtcac

SEQ ID NO: 89632 - DNA, 25 bp, probe
gaagattggaagattcagctagtta

SEQ ID NO: 89633 - DNA, 25 bp, probe
agctgagaatgtggaatacctaagg

SEQ ID NO: 89634 - DNA, 25 bp, probe
acttgtttgtcttccattccattgt

SEQ ID NO: 89635 - DNA, 25 bp, probe
ttctctctgccaatgtgatgtataa

SEQ ID NO: 89636 - DNA, 25 bp, probe
ctcaagaacatgatccaacctgatg

SEQ ID NO: 89637 - DNA, 25 bp, probe
gcaacatcaataaacaaacccaaag

SEQ ID NO: 89638 - DNA, 25 bp, probe
tctctctgccaatgtgatgtataaa

SEQ ID NO: 89639 - DNA, 25 bp, probe
tttctctctgccaatgtgatgtata

SEQ ID NO: 89640 - DNA, 25 bp, probe
cagacatatttgccttgggattaac

SEQ ID NO: 89641 - DNA, 25 bp, probe
agacatatttgccttgggattaaca

SEQ ID NO: 89642 - DNA, 25 bp, probe
aacatcaataaacaaacccaaagtg

SEQ ID NO: 89643 - DNA, 25 bp, probe
caacatcaataaacaaacccaaagt

SEQ ID NO: 89644 - DNA, 25 bp, probe
gtttctctctgccaatgtgatgtat

SEQ ID NO: 89645 - DNA, 25 bp, probe
gacatatttgccttgggattaacaa

SEQ ID NO: 89646 - DNA, 25 bp, probe
atagtcgcttcctggctaatgagat

SEQ ID NO: 89647 - DNA, 25 bp, probe
cgcaacatcaataaacaaacccaaa

SEQ ID NO: 89648 - DNA, 25 bp, probe
acatatttgccttgggattaacaat

SEQ ID NO: 89649 - DNA, 25 bp, probe
tagtcgcttcctggctaatgagatt

SEQ ID NO: 89650 - DNA, 25 bp, probe
aagtggaagaaggagatagtcgctt

SEQ ID NO: 89651 - DNA, 25 bp, probe
catatttgccttgggattaacaatt

SEQ ID NO: 89652 - DNA, 25 bp, probe
ttccagtctgctcaagaacatgatc

SEQ ID NO: 89653 - DNA, 25 bp, probe
acgcaacatcaataaacaaacccaa

SEQ ID NO: 89654 - DNA, 25 bp, probe
gatagtcgcttcctggctaatgaga

SEQ ID NO: 89655 - DNA, 25 bp, probe
agatagtcgcttcctggctaatgag

SEQ ID NO: 89656 - DNA, 25 bp, probe
gagatagtcgcttcctggctaatga

SEQ ID NO: 89657 - DNA, 25 bp, probe
gctcaagaacatgatccaacctgat

SEQ ID NO: 89658 - DNA, 25 bp, probe
agtctgctcaagaacatgatccaac

SEQ ID NO: 89659 - DNA, 25 bp, probe
cagtctgctcaagaacatgatccaa

SEQ ID NO: 89660 - DNA, 25 bp, probe
ataaacaaacccaaagtggaagaag

SEQ ID NO: 89661 - DNA, 25 bp, probe
caataaacaaacccaaagtggaaga

SEQ ID NO: 89662 - DNA, 25 bp, probe
tcaataaacaaacccaaagtggaag

SEQ ID NO: 89663 - DNA, 25 bp, probe
catcaataaacaaacccaaagtgga

SEQ ID NO: 89664 - DNA, 25 bp, probe
aaatgaagctgattggtttctctct

SEQ ID NO: 89665 - DNA, 25 bp, probe
acatcaataaacaaacccaaagtgg

SEQ ID NO: 89666 - DNA, 25 bp, probe
aataaacaaacccaaagtggaagaa

SEQ ID NO: 89667 - DNA, 25 bp, probe
atcaataaacaaacccaaagtggaa

SEQ ID NO: 89668 - DNA, 25 bp, probe
ggtttctctctgccaatgtgatgta

SEQ ID NO: 89669 - DNA, 25 bp, probe
tcaagaacatgatccaacctgatgc

SEQ ID NO: 89670 - DNA, 25 bp, probe
aatgaagctgattggtttctctctg

SEQ ID NO: 89671 - DNA, 25 bp, probe
aaacccaaagtggaagaaggagata

SEQ ID NO: 89672 - DNA, 25 bp, probe
taaacaaacccaaagtggaagaagg

SEQ ID NO: 89673 - DNA, 25 bp, probe
cacgcaacatcaataaacaaaccca

SEQ ID NO: 89674 - DNA, 25 bp, probe
caaagtggaagaaggagatagtcgc

SEQ ID NO: 89675 - DNA, 25 bp, probe
aaagtggaagaaggagatagtcgct

SEQ ID NO: 89676 - DNA, 25 bp, probe
aacccaaagtggaagaaggagatag

SEQ ID NO: 89677 - DNA, 25 bp, probe
tttccagtctgctcaagaacatgat

SEQ ID NO: 89678 - DNA, 25 bp, probe
ctgctcaagaacatgatccaacctg

SEQ ID NO: 89679 - DNA, 25 bp, probe
agaatctactatacttggttggcag

SEQ ID NO: 89680 - DNA, 25 bp, probe
aagaatctactatacttggttggca

SEQ ID NO: 89681 - DNA, 25 bp, probe
gaatctactatacttggttggcagc

SEQ ID NO: 89682 - DNA, 25 bp, probe
ctactatacttggttggcagcattc

SEQ ID NO: 89683 - DNA, 25 bp, probe
atctactatacttggttggcagcat

SEQ ID NO: 89684 - DNA, 25 bp, probe
tctactatacttggttggcagcatt

SEQ ID NO: 89685 - DNA, 25 bp, probe
aatctactatacttggttggcagca

SEQ ID NO: 89686 - DNA, 25 bp, probe
tactatacttggttggcagcattcc

SEQ ID NO: 89687 - DNA, 25 bp, probe
aaagaatctactatacttggttggc

SEQ ID NO: 89688 - DNA, 25 bp, probe
ctatacttggttggcagcattccat

SEQ ID NO: 89689 - DNA, 25 bp, probe
tatacttggttggcagcattccatg

SEQ ID NO: 89690 - DNA, 25 bp, probe
actatacttggttggcagcattcca

SEQ ID NO: 89691 - DNA, 25 bp, probe
taaagaatctactatacttggttgg

SEQ ID NO: 89692 - DNA, 25 bp, probe
atacttggttggcagcattccatga

SEQ ID NO: 89693 - DNA, 25 bp, probe
aaaagagagctccaaaccacggaaa

SEQ ID NO: 89694 - DNA, 25 bp, probe
caaggaggtttacctggaccgaaag

SEQ ID NO: 89695 - DNA, 25 bp, probe
atctagttgctctgaggatgaagtg

SEQ ID NO: 89696 - DNA, 25 bp, probe
gatgaggctgaaatgaacattgaag

SEQ ID NO: 89697 - DNA, 25 bp, probe
tgatgaggctgaaatgaacattgaa

SEQ ID NO: 89698 - DNA, 25 bp, probe
gtgatgaggctgaaatgaacattga

SEQ ID NO: 89699 - DNA, 25 bp, probe
agtgatgaggctgaaatgaacattg

SEQ ID NO: 89700 - DNA, 25 bp, probe
cagtgatgaggctgaaatgaacatt

SEQ ID NO: 89701 - DNA, 25 bp, probe
ctcattacgagaactggtcagcatg

SEQ ID NO: 89702 - DNA, 25 bp, probe
catctagttgctctgaggatgaagt

SEQ ID NO: 89703 - DNA, 25 bp, probe
ctaaacaccgttcttcagctctaac

SEQ ID NO: 89704 - DNA, 25 bp, probe
tctagttgctctgaggatgaagtgc

SEQ ID NO: 89705 - DNA, 25 bp, probe
cattacgagaactggtcagcatgtg

SEQ ID NO: 89706 - DNA, 25 bp, probe
ccatctagttgctctgaggatgaag

SEQ ID NO: 89707 - DNA, 25 bp, probe
tcattacgagaactggtcagcatgt

SEQ ID NO: 89708 - DNA, 25 bp, probe
cctcattacgagaactggtcagcat

SEQ ID NO: 89709 - DNA, 25 bp, probe
accatctagttgctctgaggatgaa

SEQ ID NO: 89710 - DNA, 25 bp, probe
atgaggctgaaatgaacattgaagc

SEQ ID NO: 89711 - DNA, 25 bp, probe
gagcctcattacgagaactggtcag

SEQ ID NO: 89712 - DNA, 25 bp, probe
ctagttgctctgaggatgaagtgcc

SEQ ID NO: 89713 - DNA, 25 bp, probe
gaccatctagttgctctgaggatga

SEQ ID NO: 89714 - DNA, 25 bp, probe
cactactccgagaagaagcttgaag

SEQ ID NO: 89715 - DNA, 25 bp, probe
ctctctacttcagtgatgaggctga

SEQ ID NO: 89716 - DNA, 25 bp, probe
tgctttggctgtcagtctagaaatg

SEQ ID NO: 89717 - DNA, 25 bp, probe
gtgctttggctgtcagtctagaaat

SEQ ID NO: 89718 - DNA, 25 bp, probe
ctttggctgtcagtctagaaatggg

SEQ ID NO: 89719 - DNA, 25 bp, probe
ggaccatctagttgctctgaggatg

SEQ ID NO: 89720 - DNA, 25 bp, probe
gctaaacaccgttcttcagctctaa

SEQ ID NO: 89721 - DNA, 25 bp, probe
tcagtgatgaggctgaaatgaacat

SEQ ID NO: 89722 - DNA, 25 bp, probe
tttggctgtcagtctagaaatggga

SEQ ID NO: 89723 - DNA, 25 bp, probe
gctttggctgtcagtctagaaatgg

SEQ ID NO: 89724 - DNA, 25 bp, probe
gggaccatctagttgctctgaggat

SEQ ID NO: 89725 - DNA, 25 bp, probe
ttggctgtcagtctagaaatgggag

SEQ ID NO: 89726 - DNA, 25 bp, probe
tgaaatgaacattgaagcccctgtc

SEQ ID NO: 89727 - DNA, 25 bp, probe
ctgaaatgaacattgaagcccctgt

SEQ ID NO: 89728 - DNA, 25 bp, probe
ctctgtgctttggctgtcagtctag

SEQ ID NO: 89729 - DNA, 25 bp, probe
ggctgtcagtctagaaatgggagtc

SEQ ID NO: 89730 - DNA, 25 bp, probe
tgtgctttggctgtcagtctagaaa

SEQ ID NO: 89731 - DNA, 25 bp, probe
gcactactccgagaagaagcttgaa

SEQ ID NO: 89732 - DNA, 25 bp, probe
ctgtcagtctagaaatgggagtcgc

SEQ ID NO: 89733 - DNA, 25 bp, probe
gctgtcagtctagaaatgggagtcg

SEQ ID NO: 89734 - DNA, 25 bp, probe
ctagaaatgggagtcgccctctcta

SEQ ID NO: 89735 - DNA, 25 bp, probe
gaaatgaacattgaagcccctgtcc

SEQ ID NO: 89736 - DNA, 25 bp, probe
cctctctacttcagtgatgaggctg

SEQ ID NO: 89737 - DNA, 25 bp, probe
tagaaatgggagtcgccctctctac

SEQ ID NO: 89738 - DNA, 25 bp, probe
tggctgtcagtctagaaatgggagt

SEQ ID NO: 89739 - DNA, 25 bp, probe
gatggatgttctgctcaatgataac

SEQ ID NO: 89740 - DNA, 25 bp, probe
gttctgctcaatgataacatctctt

SEQ ID NO: 89741 - DNA, 25 bp, probe
atgtggttattgtgatggaatactg

SEQ ID NO: 89742 - DNA, 25 bp, probe
tgatggatgttctgctcaatgataa

SEQ ID NO: 89743 - DNA, 25 bp, probe
gatgtggttattgtgatggaatact

SEQ ID NO: 89744 - DNA, 25 bp, probe
agatgtggttattgtgatggaatac

SEQ ID NO: 89745 - DNA, 25 bp, probe
cagatgtggttattgtgatggaata

SEQ ID NO: 89746 - DNA, 25 bp, probe
tgtggttattgtgatggaatactgc

SEQ ID NO: 89747 - DNA, 25 bp, probe
taatggtgacatagtgagtgtgaac

SEQ ID NO: 89748 - DNA, 25 bp, probe
gtaatggtgacatagtgagtgtgaa

SEQ ID NO: 89749 - DNA, 25 bp, probe
gtggttattgtgatggaatactgcc

SEQ ID NO: 89750 - DNA, 25 bp, probe
agtaatggtgacatagtgagtgtga

SEQ ID NO: 89751 - DNA, 25 bp, probe
cagtaatggtgacatagtgagtgtg

SEQ ID NO: 89752 - DNA, 25 bp, probe
gaatggattacgagcctcaatgttg

SEQ ID NO: 89753 - DNA, 25 bp, probe
aatggtgacatagtgagtgtgaact

SEQ ID NO: 89754 - DNA, 25 bp, probe
ccagatgtggttattgtgatggaat

SEQ ID NO: 89755 - DNA, 25 bp, probe
tttattgtttgtgaacctctgcttc

SEQ ID NO: 89756 - DNA, 25 bp, probe
gatttattgtttgtgaacctctgct

SEQ ID NO: 89757 - DNA, 25 bp, probe
tgatttattgtttgtgaacctctgc

SEQ ID NO: 89758 - DNA, 25 bp, probe
ggagtgatttattgtttgtgaacct

SEQ ID NO: 89759 - DNA, 25 bp, probe
atttattgtttgtgaacctctgctt

SEQ ID NO: 89760 - DNA, 25 bp, probe
gggagtgatttattgtttgtgaacc

SEQ ID NO: 89761 - DNA, 25 bp, probe
tctgctcaatgataacatctctttc

SEQ ID NO: 89762 - DNA, 25 bp, probe
ggaatggattacgagcctcaatgtt

SEQ ID NO: 89763 - DNA, 25 bp, probe
gtgatttattgtttgtgaacctctg

SEQ ID NO: 89764 - DNA, 25 bp, probe
agtgatttattgtttgtgaacctct

SEQ ID NO: 89765 - DNA, 25 bp, probe
ctgctcaatgataacatctctttca

SEQ ID NO: 89766 - DNA, 25 bp, probe
ccagtaatggtgacatagtgagtgt

SEQ ID NO: 89767 - DNA, 25 bp, probe
aatgataacatctctttcaactggg

SEQ ID NO: 89768 - DNA, 25 bp, probe
ttctgctcaatgataacatctcttt

SEQ ID NO: 89769 - DNA, 25 bp, probe
aatggattacgagcctcaatgttgg

SEQ ID NO: 89770 - DNA, 25 bp, probe
tgctcaatgataacatctctttcaa

SEQ ID NO: 89771 - DNA, 25 bp, probe
gctcaatgataacatctctttcaac

SEQ ID NO: 89772 - DNA, 25 bp, probe
gatggtctttctgtagaggactatg

SEQ ID NO: 89773 - DNA, 25 bp, probe
gagtgatttattgtttgtgaacctc

SEQ ID NO: 89774 - DNA, 25 bp, probe
ttgatggatgttctgctcaatgata

SEQ ID NO: 89775 - DNA, 25 bp, probe
atggtctttctgtagaggactatgg

SEQ ID NO: 89776 - DNA, 25 bp, probe
ttattgtttgtgaacctctgcttcg

SEQ ID NO: 89777 - DNA, 25 bp, probe
caatgataacatctctttcaactgg

SEQ ID NO: 89778 - DNA, 25 bp, probe
cgatggtctttctgtagaggactat

SEQ ID NO: 89779 - DNA, 25 bp, probe
ggagcagtaatggaagagatggtct

SEQ ID NO: 89780 - DNA, 25 bp, probe
gtggaatggattacgagcctcaatg

SEQ ID NO: 89781 - DNA, 25 bp, probe
gagcagtaatggaagagatggtctt

SEQ ID NO: 89782 - DNA, 25 bp, probe
cttgatggatgttctgctcaatgat

SEQ ID NO: 89783 - DNA, 25 bp, probe
aatcagcaatcttcagttcatctcc

SEQ ID NO: 89784 - DNA, 25 bp, probe
gactcattcatctcatagacaagca

SEQ ID NO: 89785 - DNA, 25 bp, probe
tcattcatctcatagacaagcacag

SEQ ID NO: 89786 - DNA, 25 bp, probe
ctcattcatctcatagacaagcaca

SEQ ID NO: 89787 - DNA, 25 bp, probe
actcattcatctcatagacaagcac

SEQ ID NO: 89788 - DNA, 25 bp, probe
tgactcattcatctcatagacaagc

SEQ ID NO: 89789 - DNA, 25 bp, probe
atcagcaatcttcagttcatctcct

SEQ ID NO: 89790 - DNA, 25 bp, probe
attcatctcatagacaagcacagga

SEQ ID NO: 89791 - DNA, 25 bp, probe
cattcatctcatagacaagcacagg

SEQ ID NO: 89792 - DNA, 25 bp, probe
tacttcaggcactagataacagtct

SEQ ID NO: 89793 - DNA, 25 bp, probe
ttcatctcatagacaagcacaggaa

SEQ ID NO: 89794 - DNA, 25 bp, probe
gttcatctcctgacacttagcattc

SEQ ID NO: 89795 - DNA, 25 bp, probe
ttcatctcctgacacttagcattct

SEQ ID NO: 89796 - DNA, 25 bp, probe
gtacttcaggcactagataacagtc

SEQ ID NO: 89797 - DNA, 25 bp, probe
agttcatctcctgacacttagcatt

SEQ ID NO: 89798 - DNA, 25 bp, probe
gtcatcagagccacaattacaacag

SEQ ID NO: 89799 - DNA, 25 bp, probe
ctcctgacacttagcattctggtag

SEQ ID NO: 89800 - DNA, 25 bp, probe
caagttcagccattaccaggtattc

SEQ ID NO: 89801 - DNA, 25 bp, probe
tcatctcctgacacttagcattctg

SEQ ID NO: 89802 - DNA, 25 bp, probe
tctcctgacacttagcattctggta

SEQ ID NO: 89803 - DNA, 25 bp, probe
catcagttgtctactcaggaaggtc

SEQ ID NO: 89804 - DNA, 25 bp, probe
caaatcagcaatcttcagttcatct

SEQ ID NO: 89805 - DNA, 25 bp, probe
gtcccataaatcaacagcaatcttt

SEQ ID NO: 89806 - DNA, 25 bp, probe
cctgacacttagcattctggtagac

SEQ ID NO: 89807 - DNA, 25 bp, probe
aaatcagcaatcttcagttcatctc

SEQ ID NO: 89808 - DNA, 25 bp, probe
atataatacagcctttagagcagcc

SEQ ID NO: 89809 - DNA, 25 bp, probe
cttccaaatcagcaatcttcagttc

SEQ ID NO: 89810 - DNA, 25 bp, probe
acttcaggcactagataacagtctg

SEQ ID NO: 89811 - DNA, 25 bp, probe
ccaaatcagcaatcttcagttcatc

SEQ ID NO: 89812 - DNA, 25 bp, probe
catctcctgacacttagcattctgg

SEQ ID NO: 89813 - DNA, 25 bp, probe
tcctgacacttagcattctggtaga

SEQ ID NO: 89814 - DNA, 25 bp, probe
tccaaatcagcaatcttcagttcat

SEQ ID NO: 89815 - DNA, 25 bp, probe
ttccaaatcagcaatcttcagttca

SEQ ID NO: 89816 - DNA, 25 bp, probe
tataatacagcctttagagcagcct

SEQ ID NO: 89817 - DNA, 25 bp, probe
cagttcatctcctgacacttagcat

SEQ ID NO: 89818 - DNA, 25 bp, probe
aagttcagccattaccaggtattcc

SEQ ID NO: 89819 - DNA, 25 bp, probe
ctgacacttagcattctggtagacg

SEQ ID NO: 89820 - DNA, 25 bp, probe
ggtcccataaatcaacagcaatctt

SEQ ID NO: 89821 - DNA, 25 bp, probe
aaggtcccataaatcaacagcaatc

SEQ ID NO: 89822 - DNA, 25 bp, probe
gaaggtcccataaatcaacagcaat

SEQ ID NO: 89823 - DNA, 25 bp, probe
atctcctgacacttagcattctggt

SEQ ID NO: 89824 - DNA, 25 bp, probe
caggcactagataacagtctgactt

SEQ ID NO: 89825 - DNA, 25 bp, probe
tcagcaatcttcagttcatctcctg

SEQ ID NO: 89826 - DNA, 25 bp, probe
gttcagccattaccaggtattccaa

SEQ ID NO: 89827 - DNA, 25 bp, probe
atcaactctaacaactcatccaaga

SEQ ID NO: 89828 - DNA, 25 bp, probe
gatcaactctaacaactcatccaag

SEQ ID NO: 89829 - DNA, 25 bp, probe
aagaagagaccaagacacataaaga

SEQ ID NO: 89830 - DNA, 25 bp, probe
agaagagaccaagacacataaagat

SEQ ID NO: 89831 - DNA, 25 bp, probe
aaagaagagaccaagacacataaag

SEQ ID NO: 89832 - DNA, 25 bp, probe
gaagagaccaagacacataaagatg

SEQ ID NO: 89833 - DNA, 25 bp, probe
ccaagaggaaagaactatttgaggc

SEQ ID NO: 89834 - DNA, 25 bp, probe
tccaagaggaaagaactatttgagg

SEQ ID NO: 89835 - DNA, 25 bp, probe
caactcatccaagaggaaagaacta

SEQ ID NO: 89836 - DNA, 25 bp, probe
taacaactcatccaagaggaaagaa

SEQ ID NO: 89837 - DNA, 25 bp, probe
ctaacaactcatccaagaggaaaga

SEQ ID NO: 89838 - DNA, 25 bp, probe
tctaacaactcatccaagaggaaag

SEQ ID NO: 89839 - DNA, 25 bp, probe
actcatccaagaggaaagaactatt

SEQ ID NO: 89840 - DNA, 25 bp, probe
aactcatccaagaggaaagaactat

SEQ ID NO: 89841 - DNA, 25 bp, probe
aacaactcatccaagaggaaagaac

SEQ ID NO: 89842 - DNA, 25 bp, probe
catccaagaggaaagaactatttga

SEQ ID NO: 89843 - DNA, 25 bp, probe
tcatccaagaggaaagaactatttg

SEQ ID NO: 89844 - DNA, 25 bp, probe
tcaactctaacaactcatccaagag

SEQ ID NO: 89845 - DNA, 25 bp, probe
catggcagacttcactgagaataaa

SEQ ID NO: 89846 - DNA, 25 bp, probe
cgaagaaggagacataaggcagttt

SEQ ID NO: 89847 - DNA, 25 bp, probe
cctctcaatgatcaactctaacaac

SEQ ID NO: 89848 - DNA, 25 bp, probe
atccaagaggaaagaactatttgag

SEQ ID NO: 89849 - DNA, 25 bp, probe
ctcatccaagaggaaagaactattt

SEQ ID NO: 89850 - DNA, 25 bp, probe
actctaacaactcatccaagaggaa

SEQ ID NO: 89851 - DNA, 25 bp, probe
aactctaacaactcatccaagagga

SEQ ID NO: 89852 - DNA, 25 bp, probe
caactctaacaactcatccaagagg

SEQ ID NO: 89853 - DNA, 25 bp, probe
acaactcatccaagaggaaagaact

SEQ ID NO: 89854 - DNA, 25 bp, probe
tgatcaactctaacaactcatccaa

SEQ ID NO: 89855 - DNA, 25 bp, probe
tctcaatgatcaactctaacaactc

SEQ ID NO: 89856 - DNA, 25 bp, probe
ctctcaatgatcaactctaacaact

SEQ ID NO: 89857 - DNA, 25 bp, probe
ccgaagaaggagacataaggcagtt

SEQ ID NO: 89858 - DNA, 25 bp, probe
ctcaatgatcaactctaacaactca

SEQ ID NO: 89859 - DNA, 25 bp, probe
aggaaggacacgtatgagagctatg

SEQ ID NO: 89860 - DNA, 25 bp, probe
caggaaggacacgtatgagagctat

SEQ ID NO: 89861 - DNA, 25 bp, probe
tcactgagaataaaagaagagacca

SEQ ID NO: 89862 - DNA, 25 bp, probe
gaagaaggagacataaggcagtttt

SEQ ID NO: 89863 - DNA, 25 bp, probe
gaataaaagaagagaccaagacaca

SEQ ID NO: 89864 - DNA, 25 bp, probe
cagtgcagatgaagagtttaccatg

SEQ ID NO: 89865 - DNA, 25 bp, probe
ctcacagtgcagatgaagagtttac

SEQ ID NO: 89866 - DNA, 25 bp, probe
aagagaccaagacacataaagatgt

SEQ ID NO: 89867 - DNA, 25 bp, probe
agaataaaagaagagaccaagacac

SEQ ID NO: 89868 - DNA, 25 bp, probe
cactgagaataaaagaagagaccaa

SEQ ID NO: 89869 - DNA, 25 bp, probe
aagaaggagacataaggcagttttc

SEQ ID NO: 89870 - DNA, 25 bp, probe
aaaagaagagaccaagacacataaa

SEQ ID NO: 89871 - DNA, 25 bp, probe
gtcatctcctacatcctgctgtgtg

SEQ ID NO: 89872 - DNA, 25 bp, probe
ctatgagtttgactctcctttctgg

SEQ ID NO: 89873 - DNA, 25 bp, probe
gctatgagtttgactctcctttctg

SEQ ID NO: 89874 - DNA, 25 bp, probe
tatgagtttgactctcctttctggg

SEQ ID NO: 89875 - DNA, 25 bp, probe
agctatgagtttgactctcctttct

SEQ ID NO: 89876 - DNA, 25 bp, probe
cagctatgagtttgactctcctttc

SEQ ID NO: 89877 - DNA, 25 bp, probe
ccagctatgagtttgactctccttt

SEQ ID NO: 89878 - DNA, 25 bp, probe
gccagctatgagtttgactctcctt

SEQ ID NO: 89879 - DNA, 25 bp, probe
aaaatccaggctgggaacatgctag

SEQ ID NO: 89880 - DNA, 25 bp, probe
acttagtgacacataatgacaacca

SEQ ID NO: 89881 - DNA, 25 bp, probe
cttagtgacacataatgacaaccaa

SEQ ID NO: 89882 - DNA, 25 bp, probe
aacttagtgacacataatgacaacc

SEQ ID NO: 89883 - DNA, 25 bp, probe
tgtattctctcaccagtaggactta

SEQ ID NO: 89884 - DNA, 25 bp, probe
accagtaacttagtgacacataatg

SEQ ID NO: 89885 - DNA, 25 bp, probe
gtattctctcaccagtaggacttaa

SEQ ID NO: 89886 - DNA, 25 bp, probe
ttccatacttaccaccgatctacaa

SEQ ID NO: 89887 - DNA, 25 bp, probe
ttaattctcaagaactaagcctgtg

SEQ ID NO: 89888 - DNA, 25 bp, probe
taattctcaagaactaagcctgtgc

SEQ ID NO: 89889 - DNA, 25 bp, probe
ccagtaacttagtgacacataatga

SEQ ID NO: 89890 - DNA, 25 bp, probe
gtgcttaatatgtgtaaggacttcc

SEQ ID NO: 89891 - DNA, 25 bp, probe
tccatacttaccaccgatctacaag

SEQ ID NO: 89892 - DNA, 25 bp, probe
ctgtattctctcaccagtaggactt

SEQ ID NO: 89893 - DNA, 25 bp, probe
gtaccagtaacttagtgacacataa

SEQ ID NO: 89894 - DNA, 25 bp, probe
agtgcttaatatgtgtaaggacttc

SEQ ID NO: 89895 - DNA, 25 bp, probe
agtaacttagtgacacataatgaca

SEQ ID NO: 89896 - DNA, 25 bp, probe
tgtagtgcttaatatgtgtaaggac

SEQ ID NO: 89897 - DNA, 25 bp, probe
actgtagtgcttaatatgtgtaagg

SEQ ID NO: 89898 - DNA, 25 bp, probe
ttgctggcacattaatcatagataa

SEQ ID NO: 89899 - DNA, 25 bp, probe
cagtaacttagtgacacataatgac

SEQ ID NO: 89900 - DNA, 25 bp, probe
gtagtgcttaatatgtgtaaggact

SEQ ID NO: 89901 - DNA, 25 bp, probe
ctgtagtgcttaatatgtgtaagga

SEQ ID NO: 89902 - DNA, 25 bp, probe
aatgtgaacgattacggtctttatg

SEQ ID NO: 89903 - DNA, 25 bp, probe
caatgtgaacgattacggtctttat

SEQ ID NO: 89904 - DNA, 25 bp, probe
atgtgaacgattacggtctttatga

SEQ ID NO: 89905 - DNA, 25 bp, probe
ccatacttaccaccgatctacaagg

SEQ ID NO: 89906 - DNA, 25 bp, probe
ctgttcttagagggtttccatactt

SEQ ID NO: 89907 - DNA, 25 bp, probe
attaattctcaagaactaagcctgt

SEQ ID NO: 89908 - DNA, 25 bp, probe
actgttcttagagggtttccatact

SEQ ID NO: 89909 - DNA, 25 bp, probe
cactgttcttagagggtttccatac

SEQ ID NO: 89910 - DNA, 25 bp, probe
tgcttaatatgtgtaaggacttcct

SEQ ID NO: 89911 - DNA, 25 bp, probe
taccagtaacttagtgacacataat

SEQ ID NO: 89912 - DNA, 25 bp, probe
cctttaatcagaactcattcccaga

SEQ ID NO: 89913 - DNA, 25 bp, probe
cagaacctggatgctattacacatg

SEQ ID NO: 89914 - DNA, 25 bp, probe
ttaatcagaactcattcccagaacc

SEQ ID NO: 89915 - DNA, 25 bp, probe
acctttaatcagaactcattcccag

SEQ ID NO: 89916 - DNA, 25 bp, probe
tacctttaatcagaactcattccca

SEQ ID NO: 89917 - DNA, 25 bp, probe
gcttaatatgtgtaaggacttcctc

SEQ ID NO: 89918 - DNA, 25 bp, probe
ctagaggcactatggacttcaggat

SEQ ID NO: 89919 - DNA, 25 bp, probe
taacttagtgacacataatgacaac

SEQ ID NO: 89920 - DNA, 25 bp, probe
gtaacttagtgacacataatgacaa

SEQ ID NO: 89921 - DNA, 25 bp, probe
tgttcttagagggtttccatactta

SEQ ID NO: 89922 - DNA, 25 bp, probe
aaagaaagattgatggacttagccc

SEQ ID NO: 89923 - DNA, 25 bp, probe
taatcagaactcattcccagaacct

SEQ ID NO: 89924 - DNA, 25 bp, probe
gactactggacttctatcaatggta

SEQ ID NO: 89925 - DNA, 25 bp, probe
gcaagactactggacttctatcaat

SEQ ID NO: 89926 - DNA, 25 bp, probe
agactactggacttctatcaatggt

SEQ ID NO: 89927 - DNA, 25 bp, probe
aagactactggacttctatcaatgg

SEQ ID NO: 89928 - DNA, 25 bp, probe
taggctaagtcaagatcaacattcc

SEQ ID NO: 89929 - DNA, 25 bp, probe
actggacttctatcaatggtactct

SEQ ID NO: 89930 - DNA, 25 bp, probe
caagactactggacttctatcaatg

SEQ ID NO: 89931 - DNA, 25 bp, probe
ctaggctaagtcaagatcaacattc

SEQ ID NO: 89932 - DNA, 25 bp, probe
actactggacttctatcaatggtac

SEQ ID NO: 89933 - DNA, 25 bp, probe
gctaggctaagtcaagatcaacatt

SEQ ID NO: 89934 - DNA, 25 bp, probe
tactggacttctatcaatggtactc

SEQ ID NO: 89935 - DNA, 25 bp, probe
ctactggacttctatcaatggtact

SEQ ID NO: 89936 - DNA, 25 bp, probe
ctggacttctatcaatggtactcta

SEQ ID NO: 89937 - DNA, 25 bp, probe
ggcaagactactggacttctatcaa

SEQ ID NO: 89938 - DNA, 25 bp, probe
gctaagtcaagatcaacattccagg

SEQ ID NO: 89939 - DNA, 25 bp, probe
ggctaagtcaagatcaacattccag

SEQ ID NO: 89940 - DNA, 25 bp, probe
tggacttctatcaatggtactctaa

SEQ ID NO: 89941 - DNA, 25 bp, probe
atcaatggtactctaatcagtcctt

SEQ ID NO: 89942 - DNA, 25 bp, probe
aggctaagtcaagatcaacattcca

SEQ ID NO: 89943 - DNA, 25 bp, probe
tcaatggtactctaatcagtcctta

SEQ ID NO: 89944 - DNA, 25 bp, probe
gtggcaagactactggacttctatc

SEQ ID NO: 89945 - DNA, 25 bp, probe
tatcaatggtactctaatcagtcct

SEQ ID NO: 89946 - DNA, 25 bp, probe
ctatcaatggtactctaatcagtcc

SEQ ID NO: 89947 - DNA, 25 bp, probe
tggcaagactactggacttctatca

SEQ ID NO: 89948 - DNA, 25 bp, probe
ggacttctatcaatggtactctaat

SEQ ID NO: 89949 - DNA, 25 bp, probe
ggttggtaatgttggatgatgaaac

SEQ ID NO: 89950 - DNA, 25 bp, probe
tctaatcagtccttattatcccagc

SEQ ID NO: 89951 - DNA, 25 bp, probe
tgtggcaagactactggacttctat

SEQ ID NO: 89952 - DNA, 25 bp, probe
atgtggcaagactactggacttcta

SEQ ID NO: 89953 - DNA, 25 bp, probe
gggttggtaatgttggatgatgaaa

SEQ ID NO: 89954 - DNA, 25 bp, probe
caatggtactctaatcagtccttat

SEQ ID NO: 89955 - DNA, 25 bp, probe
ctaagtcaagatcaacattccaggg

SEQ ID NO: 89956 - DNA, 25 bp, probe
tctatcaatggtactctaatcagtc

SEQ ID NO: 89957 - DNA, 25 bp, probe
agggttggtaatgttggatgatgaa

SEQ ID NO: 89958 - DNA, 25 bp, probe
taagtcaagatcaacattccagggt

SEQ ID NO: 89959 - DNA, 25 bp, probe
caatgtggcaagactactggacttc

SEQ ID NO: 89960 - DNA, 25 bp, probe
actctaatcagtccttattatccca

SEQ ID NO: 89961 - DNA, 25 bp, probe
acttctatcaatggtactctaatca

SEQ ID NO: 89962 - DNA, 25 bp, probe
ctatcccagtgtgtgtttaacattc

SEQ ID NO: 89963 - DNA, 25 bp, probe
tctatcccagtgtgtgtttaacatt

SEQ ID NO: 89964 - DNA, 25 bp, probe
aatcagtccttattatcccagcttg

SEQ ID NO: 89965 - DNA, 25 bp, probe
tatcccagtgtgtgtttaacattca

SEQ ID NO: 89966 - DNA, 25 bp, probe
ctctaatcagtccttattatcccag

SEQ ID NO: 89967 - DNA, 25 bp, probe
aatggtactctaatcagtccttatt

SEQ ID NO: 89968 - DNA, 25 bp, probe
atgttacttctagtgttcacctctg

SEQ ID NO: 89969 - DNA, 25 bp, probe
tgttacttctagtgttcacctctgt

SEQ ID NO: 89970 - DNA, 25 bp, probe
tatgttacttctagtgttcacctct

SEQ ID NO: 89971 - DNA, 25 bp, probe
gttacttctagtgttcacctctgtg

SEQ ID NO: 89972 - DNA, 25 bp, probe
ttatgttacttctagtgttcacctc

SEQ ID NO: 89973 - DNA, 25 bp, probe
ggctgaattatgtagacttgtgttt

SEQ ID NO: 89974 - DNA, 25 bp, probe
accaagacagaatgtatatgaagaa

SEQ ID NO: 89975 - DNA, 25 bp, probe
aaccaagacagaatgtatatgaaga

SEQ ID NO: 89976 - DNA, 25 bp, probe
agaaccaagacagaatgtatatgaa

SEQ ID NO: 89977 - DNA, 25 bp, probe
aagaaccaagacagaatgtatatga

SEQ ID NO: 89978 - DNA, 25 bp, probe
gggctgaattatgtagacttgtgtt

SEQ ID NO: 89979 - DNA, 25 bp, probe
cattatgttacttctagtgttcacc

SEQ ID NO: 89980 - DNA, 25 bp, probe
gaaccaagacagaatgtatatgaag

SEQ ID NO: 89981 - DNA, 25 bp, probe
ctttggatttgtgcctaaggaataa

SEQ ID NO: 89982 - DNA, 25 bp, probe
gctgaattatgtagacttgtgtttg

SEQ ID NO: 89983 - DNA, 25 bp, probe
tttggatttgtgcctaaggaataat

SEQ ID NO: 89984 - DNA, 25 bp, probe
attatgttacttctagtgttcacct

SEQ ID NO: 89985 - DNA, 25 bp, probe
ctgggctgaattatgtagacttgtg

SEQ ID NO: 89986 - DNA, 25 bp, probe
ttagatcgttacttggaaatggagc

SEQ ID NO: 89987 - DNA, 25 bp, probe
caaatatggctatgtatccgatccc

SEQ ID NO: 89988 - DNA, 25 bp, probe
ttcctgggctgaattatgtagactt

SEQ ID NO: 89989 - DNA, 25 bp, probe
tttcctgggctgaattatgtagact

SEQ ID NO: 89990 - DNA, 25 bp, probe
ttgacaaatatggctatgtatccga

SEQ ID NO: 89991 - DNA, 25 bp, probe
gatttgtgcctaaggaataatatgc

SEQ ID NO: 89992 - DNA, 25 bp, probe
tgacaaatatggctatgtatccgat

SEQ ID NO: 89993 - DNA, 25 bp, probe
aagaagtcttcaatacacacccatt

SEQ ID NO: 89994 - DNA, 25 bp, probe
aaagaagtcttcaatacacacccat

SEQ ID NO: 89995 - DNA, 25 bp, probe
attatgtagacttgtgtttgacagc

SEQ ID NO: 89996 - DNA, 25 bp, probe
tttagatcgttacttggaaatggag

SEQ ID NO: 89997 - DNA, 25 bp, probe
gctttggatttgtgcctaaggaata

SEQ ID NO: 89998 - DNA, 25 bp, probe
atcgttacttggaaatggagcctaa

SEQ ID NO: 89999 - DNA, 25 bp, probe
ttggatttgtgcctaaggaataata

SEQ ID NO: 90000 - DNA, 25 bp, probe
tgggctgaattatgtagacttgtgt

SEQ ID NO: 90001 - DNA, 25 bp, probe
attgacaaatatggctatgtatccg

SEQ ID NO: 90002 - DNA, 25 bp, probe
actattagcaggctttggatttgtg

SEQ ID NO: 90003 - DNA, 25 bp, probe
cactattagcaggctttggatttgt

SEQ ID NO: 90004 - DNA, 25 bp, probe
tcctgggctgaattatgtagacttg

SEQ ID NO: 90005 - DNA, 25 bp, probe
tggatttgtgcctaaggaataatat

SEQ ID NO: 90006 - DNA, 25 bp, probe
acaaatatggctatgtatccgatcc

SEQ ID NO: 90007 - DNA, 25 bp, probe
gacaaatatggctatgtatccgatc

SEQ ID NO: 90008 - DNA, 25 bp, probe
ggatttgtgcctaaggaataatatg

SEQ ID NO: 90009 - DNA, 25 bp, probe
cctgggctgaattatgtagacttgt

SEQ ID NO: 90010 - DNA, 25 bp, probe
gtttgacagctatgggtttatttct

SEQ ID NO: 90011 - DNA, 25 bp, probe
caagctggcttccaactataacatt

SEQ ID NO: 90012 - DNA, 25 bp, probe
ctagagaaccttgtgatgatgtcaa

SEQ ID NO: 90013 - DNA, 25 bp, probe
actggtgacaatagatgtgagttaa

SEQ ID NO: 90014 - DNA, 25 bp, probe
ataactggtgacaatagatgtgagt

SEQ ID NO: 90015 - DNA, 25 bp, probe
aataactggtgacaatagatgtgag

SEQ ID NO: 90016 - DNA, 25 bp, probe
cctagagaaccttgtgatgatgtca

SEQ ID NO: 90017 - DNA, 25 bp, probe
tatattacctgaactgaggacagaa

SEQ ID NO: 90018 - DNA, 25 bp, probe
ttatattacctgaactgaggacaga

SEQ ID NO: 90019 - DNA, 25 bp, probe
tcttatattacctgaactgaggaca

SEQ ID NO: 90020 - DNA, 25 bp, probe
atctgagtaaatggttctttgtgga

SEQ ID NO: 90021 - DNA, 25 bp, probe
ctgggaagataataactggtgacaa

SEQ ID NO: 90022 - DNA, 25 bp, probe
aactgggaagataataactggtgac

SEQ ID NO: 90023 - DNA, 25 bp, probe
gaactgggaagataataactggtga

SEQ ID NO: 90024 - DNA, 25 bp, probe
tgaactgggaagataataactggtg

SEQ ID NO: 90025 - DNA, 25 bp, probe
ctgaactgggaagataataactggt

SEQ ID NO: 90026 - DNA, 25 bp, probe
tgggaagataataactggtgacaat

SEQ ID NO: 90027 - DNA, 25 bp, probe
agatggattggtttgctgatatgat

SEQ ID NO: 90028 - DNA, 25 bp, probe
cttatattacctgaactgaggacag

SEQ ID NO: 90029 - DNA, 25 bp, probe
caactgaagtaggagactgactgtg

SEQ ID NO: 90030 - DNA, 25 bp, probe
tctgagtaaatggttctttgtggac

SEQ ID NO: 90031 - DNA, 25 bp, probe
gagatggattggtttgctgatatga

SEQ ID NO: 90032 - DNA, 25 bp, probe
ctgagatggattggtttgctgatat

SEQ ID NO: 90033 - DNA, 25 bp, probe
aactgaagtaggagactgactgtga

SEQ ID NO: 90034 - DNA, 25 bp, probe
ggaagataataactggtgacaatag

SEQ ID NO: 90035 - DNA, 25 bp, probe
actgggaagataataactggtgaca

SEQ ID NO: 90036 - DNA, 25 bp, probe
tgagatggattggtttgctgatatg

SEQ ID NO: 90037 - DNA, 25 bp, probe
gctgaactgggaagataataactgg

SEQ ID NO: 90038 - DNA, 25 bp, probe
tatctgagtaaatggttctttgtgg

SEQ ID NO: 90039 - DNA, 25 bp, probe
taataactggtgacaatagatgtga

SEQ ID NO: 90040 - DNA, 25 bp, probe
cagaacttggtttaggagaggaatt

SEQ ID NO: 90041 - DNA, 25 bp, probe
gcctagagaaccttgtgatgatgtc

SEQ ID NO: 90042 - DNA, 25 bp, probe
gaagagtctatgccttggaaatcaa

SEQ ID NO: 90043 - DNA, 25 bp, probe
ctgaagagtctatgccttggaaatc

SEQ ID NO: 90044 - DNA, 25 bp, probe
tcagaacttggtttaggagaggaat

SEQ ID NO: 90045 - DNA, 25 bp, probe
atcagaacttggtttaggagaggaa

SEQ ID NO: 90046 - DNA, 25 bp, probe
ctgaagtaggagactgactgtgagt

SEQ ID NO: 90047 - DNA, 25 bp, probe
actgaagtaggagactgactgtgag

SEQ ID NO: 90048 - DNA, 25 bp, probe
gatggattggtttgctgatatgatc

SEQ ID NO: 90049 - DNA, 25 bp, probe
actaccttggatgtggaagagtcat

SEQ ID NO: 90050 - DNA, 25 bp, probe
ttcttatattacctgaactgaggac

SEQ ID NO: 90051 - DNA, 25 bp, probe
tgatatgatcccagaaattaagcct

SEQ ID NO: 90052 - DNA, 25 bp, probe
ccagtttctatgaagagcaagtagc

SEQ ID NO: 90053 - DNA, 25 bp, probe
gccagtttctatgaagagcaagtag

SEQ ID NO: 90054 - DNA, 25 bp, probe
tagatactaaagtaaacccaggagg

SEQ ID NO: 90055 - DNA, 25 bp, probe
gggaagataataactggtgacaata

SEQ ID NO: 90056 - DNA, 25 bp, probe
cataagaggacgagaagatgttagt

SEQ ID NO: 90057 - DNA, 25 bp, probe
ccataagaggacgagaagatgttag

SEQ ID NO: 90058 - DNA, 25 bp, probe
aagaggacgagaagatgttagtaat

SEQ ID NO: 90059 - DNA, 25 bp, probe
accataagaggacgagaagatgtta

SEQ ID NO: 90060 - DNA, 25 bp, probe
taccataagaggacgagaagatgtt

SEQ ID NO: 90061 - DNA, 25 bp, probe
agaggacgagaagatgttagtaatt

SEQ ID NO: 90062 - DNA, 25 bp, probe
attgctgattggtgttaagttgcta

SEQ ID NO: 90063 - DNA, 25 bp, probe
ctaccataagaggacgagaagatgt

SEQ ID NO: 90064 - DNA, 25 bp, probe
taagaggacgagaagatgttagtaa

SEQ ID NO: 90065 - DNA, 25 bp, probe
ataagaggacgagaagatgttagta

SEQ ID NO: 90066 - DNA, 25 bp, probe
tacattgctgattggtgttaagttg

SEQ ID NO: 90067 - DNA, 25 bp, probe
ctacattgctgattggtgttaagtt

SEQ ID NO: 90068 - DNA, 25 bp, probe
gactacattgctgattggtgttaag

SEQ ID NO: 90069 - DNA, 25 bp, probe
actacattgctgattggtgttaagt

SEQ ID NO: 90070 - DNA, 25 bp, probe
tgactacattgctgattggtgttaa

SEQ ID NO: 90071 - DNA, 25 bp, probe
ttgactacattgctgattggtgtta

SEQ ID NO: 90072 - DNA, 25 bp, probe
ataatgagaaggctgttaagaagaa

SEQ ID NO: 90073 - DNA, 25 bp, probe
ttgctgattggtgttaagttgctag

SEQ ID NO: 90074 - DNA, 25 bp, probe
tatacctaccataagaggacgagaa

SEQ ID NO: 90075 - DNA, 25 bp, probe
ttatacctaccataagaggacgaga

SEQ ID NO: 90076 - DNA, 25 bp, probe
ctgattggtgttaagttgctagaca

SEQ ID NO: 90077 - DNA, 25 bp, probe
atacctaccataagaggacgagaag

SEQ ID NO: 90078 - DNA, 25 bp, probe
gctgattggtgttaagttgctagac

SEQ ID NO: 90079 - DNA, 25 bp, probe
cattgctgattggtgttaagttgct

SEQ ID NO: 90080 - DNA, 25 bp, probe
tacctaccataagaggacgagaaga

SEQ ID NO: 90081 - DNA, 25 bp, probe
tgctgattggtgttaagttgctaga

SEQ ID NO: 90082 - DNA, 25 bp, probe
cctaccataagaggacgagaagatg

SEQ ID NO: 90083 - DNA, 25 bp, probe
aaagccaccatttatacctaccata

SEQ ID NO: 90084 - DNA, 25 bp, probe
tataatgagaaggctgttaagaaga

SEQ ID NO: 90085 - DNA, 25 bp, probe
tgagaaggctgttaagaagaaatcc

SEQ ID NO: 90086 - DNA, 25 bp, probe
ctataatgagaaggctgttaagaag

SEQ ID NO: 90087 - DNA, 25 bp, probe
acctaccataagaggacgagaagat

SEQ ID NO: 90088 - DNA, 25 bp, probe
atgagaaggctgttaagaagaaatc

SEQ ID NO: 90089 - DNA, 25 bp, probe
gccaccatttatacctaccataaga

SEQ ID NO: 90090 - DNA, 25 bp, probe
agccaccatttatacctaccataag

SEQ ID NO: 90091 - DNA, 25 bp, probe
tctataatgagaaggctgttaagaa

SEQ ID NO: 90092 - DNA, 25 bp, probe
aagccaccatttatacctaccataa

SEQ ID NO: 90093 - DNA, 25 bp, probe
agtaaagccaccatttatacctacc

SEQ ID NO: 90094 - DNA, 25 bp, probe
atggagtttaagttgagtgaacatc

SEQ ID NO: 90095 - DNA, 25 bp, probe
gtaaagccaccatttatacctacca

SEQ ID NO: 90096 - DNA, 25 bp, probe
taaagccaccatttatacctaccat

SEQ ID NO: 90097 - DNA, 25 bp, probe
aatgagaaggctgttaagaagaaat

SEQ ID NO: 90098 - DNA, 25 bp, probe
tgaatttacctcagaagcacctatt

SEQ ID NO: 90099 - DNA, 25 bp, probe
gatgatgaatttacctcagaagcac

SEQ ID NO: 90100 - DNA, 25 bp, probe
acaataatgagttcactacagacga

SEQ ID NO: 90101 - DNA, 25 bp, probe
atgagttcactacagacgattaaca

SEQ ID NO: 90102 - DNA, 25 bp, probe
gagttcactacagacgattaacaca

SEQ ID NO: 90103 - DNA, 25 bp, probe
tgagttcactacagacgattaacac

SEQ ID NO: 90104 - DNA, 25 bp, probe
agttcactacagacgattaacacac

SEQ ID NO: 90105 - DNA, 25 bp, probe
caataatgagttcactacagacgat

SEQ ID NO: 90106 - DNA, 25 bp, probe
aatgagttcactacagacgattaac

SEQ ID NO: 90107 - DNA, 25 bp, probe
tacaataatgagttcactacagacg

SEQ ID NO: 90108 - DNA, 25 bp, probe
gttcactacagacgattaacacacc

SEQ ID NO: 90109 - DNA, 25 bp, probe
ttcactacagacgattaacacacca

SEQ ID NO: 90110 - DNA, 25 bp, probe
aataatgagttcactacagacgatt

SEQ ID NO: 90111 - DNA, 25 bp, probe
tactgcctagtgtattcaacagaag

SEQ ID NO: 90112 - DNA, 25 bp, probe
atactgcctagtgtattcaacagaa

SEQ ID NO: 90113 - DNA, 25 bp, probe
cctagtgtattcaacagaaggactg

SEQ ID NO: 90114 - DNA, 25 bp, probe
tctgtaattctattgtgcctatgat

SEQ ID NO: 90115 - DNA, 25 bp, probe
atctgtaattctattgtgcctatga

SEQ ID NO: 90116 - DNA, 25 bp, probe
ctacagacgattaacacaccacact

SEQ ID NO: 90117 - DNA, 25 bp, probe
tcactacagacgattaacacaccac

SEQ ID NO: 90118 - DNA, 25 bp, probe
taatgagttcactacagacgattaa

SEQ ID NO: 90119 - DNA, 25 bp, probe
actacagacgattaacacaccacac

SEQ ID NO: 90120 - DNA, 25 bp, probe
cactacagacgattaacacaccaca

SEQ ID NO: 90121 - DNA, 25 bp, probe
ttgctgtttggtgtaggtaaatcta

SEQ ID NO: 90122 - DNA, 25 bp, probe
ctttgctgtttggtgtaggtaaatc

SEQ ID NO: 90123 - DNA, 25 bp, probe
ataatgagttcactacagacgatta

SEQ ID NO: 90124 - DNA, 25 bp, probe
tttgctgtttggtgtaggtaaatct

SEQ ID NO: 90125 - DNA, 25 bp, probe
gcctagtgtattcaacagaaggact

SEQ ID NO: 90126 - DNA, 25 bp, probe
ctgcctagtgtattcaacagaagga

SEQ ID NO: 90127 - DNA, 25 bp, probe
gctgtttggtgtaggtaaatctagt

SEQ ID NO: 90128 - DNA, 25 bp, probe
tgctgtttggtgtaggtaaatctag

SEQ ID NO: 90129 - DNA, 25 bp, probe
aatctgtaattctattgtgcctatg

SEQ ID NO: 90130 - DNA, 25 bp, probe
ggtcatgtaacaggtaaccacaatt

SEQ ID NO: 90131 - DNA, 25 bp, probe
agtaggctttatgctgtgtttatgc

SEQ ID NO: 90132 - DNA, 25 bp, probe
tgcctagtgtattcaacagaaggac

SEQ ID NO: 90133 - DNA, 25 bp, probe
actgcctagtgtattcaacagaagg

SEQ ID NO: 90134 - DNA, 25 bp, probe
ctccaagatttcagaagccaagttt

SEQ ID NO: 90135 - DNA, 25 bp, probe
tacagacgattaacacaccacactg

SEQ ID NO: 90136 - DNA, 25 bp, probe
ctgtttggtgtaggtaaatctagtt

SEQ ID NO: 90137 - DNA, 25 bp, probe
tcagtaggctttatgctgtgtttat

SEQ ID NO: 90138 - DNA, 25 bp, probe
ttacaataatgagttcactacagac

SEQ ID NO: 90139 - DNA, 25 bp, probe
cagtaggctttatgctgtgtttatg

SEQ ID NO: 90140 - DNA, 25 bp, probe
ttcagtaggctttatgctgtgttta

SEQ ID NO: 90141 - DNA, 25 bp, probe
gctttgctgtttggtgtaggtaaat

SEQ ID NO: 90142 - DNA, 25 bp, probe
atttcagtaggctttatgctgtgtt

SEQ ID NO: 90143 - DNA, 25 bp, probe
aatttcagtaggctttatgctgtgt

SEQ ID NO: 90144 - DNA, 25 bp, probe
caactgacttaacaacattgctgtc

SEQ ID NO: 90145 - DNA, 25 bp, probe
ccaactgacttaacaacattgctgt

SEQ ID NO: 90146 - DNA, 25 bp, probe
tattatcggtgcaggtaggtcatta

SEQ ID NO: 90147 - DNA, 25 bp, probe
aggtaggtcattaacaccacttctt

SEQ ID NO: 90148 - DNA, 25 bp, probe
atgtctttcggttatcaagtgtttc

SEQ ID NO: 90149 - DNA, 25 bp, probe
gtctttcggttatcaagtgtttctg

SEQ ID NO: 90150 - DNA, 25 bp, probe
tgtctttcggttatcaagtgtttct

SEQ ID NO: 90151 - DNA, 25 bp, probe
ctgtctgagatgttctttctaccaa

SEQ ID NO: 90152 - DNA, 25 bp, probe
aacctgtctgagatgttctttctac

SEQ ID NO: 90153 - DNA, 25 bp, probe
tgtctgagatgttctttctaccaat

SEQ ID NO: 90154 - DNA, 25 bp, probe
aaacctgtctgagatgttctttcta

SEQ ID NO: 90155 - DNA, 25 bp, probe
aaacaacacacgagaagagttaaac

SEQ ID NO: 90156 - DNA, 25 bp, probe
gtctgagatgttctttctaccaatc

SEQ ID NO: 90157 - DNA, 25 bp, probe
cgatcatgcagatacaatgttggta

SEQ ID NO: 90158 - DNA, 25 bp, probe
aatgctgatattgatttcactggtc

SEQ ID NO: 90159 - DNA, 25 bp, probe
attatcggtgcaggtaggtcattaa

SEQ ID NO: 90160 - DNA, 25 bp, probe
ttattatcggtgcaggtaggtcatt

SEQ ID NO: 90161 - DNA, 25 bp, probe
tagttcagtgtttgttgagaatcca

SEQ ID NO: 90162 - DNA, 25 bp, probe
ttgccaactgacttaacaacattgc

SEQ ID NO: 90163 - DNA, 25 bp, probe
ttagttcagtgtttgttgagaatcc

SEQ ID NO: 90164 - DNA, 25 bp, probe
tatgtctttcggttatcaagtgttt

SEQ ID NO: 90165 - DNA, 25 bp, probe
tttgccaactgacttaacaacattg

SEQ ID NO: 90166 - DNA, 25 bp, probe
caggtaggtcattaacaccacttct

SEQ ID NO: 90167 - DNA, 25 bp, probe
gacttaacaacattgctgtcaggtg

SEQ ID NO: 90168 - DNA, 25 bp, probe
caatgttggtatttgagaggttagt

SEQ ID NO: 90169 - DNA, 25 bp, probe
agttcagtgtttgttgagaatccat

SEQ ID NO: 90170 - DNA, 25 bp, probe
atgttggtatttgagaggttagttt

SEQ ID NO: 90171 - DNA, 25 bp, probe
aatgttggtatttgagaggttagtt

SEQ ID NO: 90172 - DNA, 25 bp, probe
acaatgttggtatttgagaggttag

SEQ ID NO: 90173 - DNA, 25 bp, probe
atatgtctttcggttatcaagtgtt

SEQ ID NO: 90174 - DNA, 25 bp, probe
tgatattgatttcactggtccatct

SEQ ID NO: 90175 - DNA, 25 bp, probe
ctgatattgatttcactggtccatc

SEQ ID NO: 90176 - DNA, 25 bp, probe
atgctgatattgatttcactggtcc

SEQ ID NO: 90177 - DNA, 25 bp, probe
attctatttgctttattatcggtgc

SEQ ID NO: 90178 - DNA, 25 bp, probe
aaatgctgatattgatttcactggt

SEQ ID NO: 90179 - DNA, 25 bp, probe
tctttcggttatcaagtgtttctgc

SEQ ID NO: 90180 - DNA, 25 bp, probe
ttctaccaatctatatgtctttcgg

SEQ ID NO: 90181 - DNA, 25 bp, probe
cctgtctgagatgttctttctacca

SEQ ID NO: 90182 - DNA, 25 bp, probe
acctgtctgagatgttctttctacc

SEQ ID NO: 90183 - DNA, 25 bp, probe
gatcatgcagatacaatgttggtat

SEQ ID NO: 90184 - DNA, 25 bp, probe
acatttagttcagtgtttgttgaga

SEQ ID NO: 90185 - DNA, 25 bp, probe
gctgatattgatttcactggtccat

SEQ ID NO: 90186 - DNA, 25 bp, probe
tctaacctctgttctctcagtaaac

SEQ ID NO: 90187 - DNA, 25 bp, probe
aatttctaacctctgttctctcagt

SEQ ID NO: 90188 - DNA, 25 bp, probe
ttaagaactgaggaacctgagactc

SEQ ID NO: 90189 - DNA, 25 bp, probe
tccaggaatctcattcattcattca

SEQ ID NO: 90190 - DNA, 25 bp, probe
ccaggaatctcattcattcattcag

SEQ ID NO: 90191 - DNA, 25 bp, probe
caggaatctcattcattcattcagt

SEQ ID NO: 90192 - DNA, 25 bp, probe
ttattagctgtagagtccttggcaa

SEQ ID NO: 90193 - DNA, 25 bp, probe
tacttattagctgtagagtccttgg

SEQ ID NO: 90194 - DNA, 25 bp, probe
atttaagaactgaggaacctgagac

SEQ ID NO: 90195 - DNA, 25 bp, probe
catttaagaactgaggaacctgaga

SEQ ID NO: 90196 - DNA, 25 bp, probe
cttattagctgtagagtccttggca

SEQ ID NO: 90197 - DNA, 25 bp, probe
tattgagcatctagtataagtctgg

SEQ ID NO: 90198 - DNA, 25 bp, probe
aacttaactatcttccagggctctt

SEQ ID NO: 90199 - DNA, 25 bp, probe
aaacttaactatcttccagggctct

SEQ ID NO: 90200 - DNA, 25 bp, probe
attgagcatctagtataagtctggg

SEQ ID NO: 90201 - DNA, 25 bp, probe
tttaagaactgaggaacctgagact

SEQ ID NO: 90202 - DNA, 25 bp, probe
ccatttaagaactgaggaacctgag

SEQ ID NO: 90203 - DNA, 25 bp, probe
gttccaggaatctcattcattcatt

SEQ ID NO: 90204 - DNA, 25 bp, probe
ggttccaggaatctcattcattcat

SEQ ID NO: 90205 - DNA, 25 bp, probe
gctgcatatgttacaattctctcac

SEQ ID NO: 90206 - DNA, 25 bp, probe
ttccaggaatctcattcattcattc

SEQ ID NO: 90207 - DNA, 25 bp, probe
tgctgcatatgttacaattctctca

SEQ ID NO: 90208 - DNA, 25 bp, probe
acttaactatcttccagggctcttc

SEQ ID NO: 90209 - DNA, 25 bp, probe
ggcatcgtgtattccatatgtctat

SEQ ID NO: 90210 - DNA, 25 bp, probe
acttattagctgtagagtccttggc

SEQ ID NO: 90211 - DNA, 25 bp, probe
atgctgcatatgttacaattctctc

SEQ ID NO: 90212 - DNA, 25 bp, probe
ctgcatatgttacaattctctcact

SEQ ID NO: 90213 - DNA, 25 bp, probe
aatgctgcatatgttacaattctct

SEQ ID NO: 90214 - DNA, 25 bp, probe
aagcaatatatacccagactacact

SEQ ID NO: 90215 - DNA, 25 bp, probe
aggaatctcattcattcattcagta

SEQ ID NO: 90216 - DNA, 25 bp, probe
gatgagttgcatagctgatatgtca

SEQ ID NO: 90217 - DNA, 25 bp, probe
ttgagcatctagtataagtctgggc

SEQ ID NO: 90218 - DNA, 25 bp, probe
tgcatatgttacaattctctcactt

SEQ ID NO: 90219 - DNA, 25 bp, probe
cctaatgctgcatatgttacaattc

SEQ ID NO: 90220 - DNA, 25 bp, probe
cttaactatcttccagggctcttcc

SEQ ID NO: 90221 - DNA, 25 bp, probe
cccatttaagaactgaggaacctga

SEQ ID NO: 90222 - DNA, 25 bp, probe
ggatgagttgcatagctgatatgtc

SEQ ID NO: 90223 - DNA, 25 bp, probe
ctaactgggaggacattctgctaag

SEQ ID NO: 90224 - DNA, 25 bp, probe
aaagcaatatatacccagactacac

SEQ ID NO: 90225 - DNA, 25 bp, probe
gcatcgtgtattccatatgtctata

SEQ ID NO: 90226 - DNA, 25 bp, probe
agcaatatatacccagactacacta

SEQ ID NO: 90227 - DNA, 25 bp, probe
gagcatctagtataagtctgggcac

SEQ ID NO: 90228 - DNA, 25 bp, probe
ttaactatcttccagggctcttcca

SEQ ID NO: 90229 - DNA, 25 bp, probe
gcaatatatacccagactacactag

SEQ ID NO: 90230 - DNA, 25 bp, probe
ctagtataagtctgggcactggatg

SEQ ID NO: 90231 - DNA, 25 bp, probe
tctagtataagtctgggcactggat

SEQ ID NO: 90232 - DNA, 25 bp, probe
taacaaggtggcatctgaagcatta

SEQ ID NO: 90233 - DNA, 25 bp, probe
gattccacagagatcaatgttccac

SEQ ID NO: 90234 - DNA, 25 bp, probe
ttagcaaagtcctcaatggtaacaa

SEQ ID NO: 90235 - DNA, 25 bp, probe
acctgtataaactgaactgtgaaac

SEQ ID NO: 90236 - DNA, 25 bp, probe
ttcttagcaaagtcctcaatggtaa

SEQ ID NO: 90237 - DNA, 25 bp, probe
cctgtataaactgaactgtgaaact

SEQ ID NO: 90238 - DNA, 25 bp, probe
tagcaaagtcctcaatggtaacaag

SEQ ID NO: 90239 - DNA, 25 bp, probe
cttcttagcaaagtcctcaatggta

SEQ ID NO: 90240 - DNA, 25 bp, probe
aaggttctgctgacattaaatccaa

SEQ ID NO: 90241 - DNA, 25 bp, probe
aaaggttctgctgacattaaatcca

SEQ ID NO: 90242 - DNA, 25 bp, probe
tcttagcaaagtcctcaatggtaac

SEQ ID NO: 90243 - DNA, 25 bp, probe
aactgtttcggttatctctgtcttt

SEQ ID NO: 90244 - DNA, 25 bp, probe
attccacagagatcaatgttccaca

SEQ ID NO: 90245 - DNA, 25 bp, probe
cttagcaaagtcctcaatggtaaca

SEQ ID NO: 90246 - DNA, 25 bp, probe
tgtataaactgaactgtgaaactgt

SEQ ID NO: 90247 - DNA, 25 bp, probe
ggtgtacctgtataaactgaactgt

SEQ ID NO: 90248 - DNA, 25 bp, probe
tgtacctgtataaactgaactgtga

SEQ ID NO: 90249 - DNA, 25 bp, probe
gtgtacctgtataaactgaactgtg

SEQ ID NO: 90250 - DNA, 25 bp, probe
aaactgtttcggttatctctgtctt

SEQ ID NO: 90251 - DNA, 25 bp, probe
ctgtataaactgaactgtgaaactg

SEQ ID NO: 90252 - DNA, 25 bp, probe
aatggtaacaaggtggcatctgaag

SEQ ID NO: 90253 - DNA, 25 bp, probe
aggttctgctgacattaaatccaac

SEQ ID NO: 90254 - DNA, 25 bp, probe
cggtgtacctgtataaactgaactg

SEQ ID NO: 90255 - DNA, 25 bp, probe
gttctgctgacattaaatccaacca

SEQ ID NO: 90256 - DNA, 25 bp, probe
tacctgtataaactgaactgtgaaa

SEQ ID NO: 90257 - DNA, 25 bp, probe
aacaaggtggcatctgaagcattag

SEQ ID NO: 90258 - DNA, 25 bp, probe
ctggattccacagagatcaatgttc

SEQ ID NO: 90259 - DNA, 25 bp, probe
caatggtaacaaggtggcatctgaa

SEQ ID NO: 90260 - DNA, 25 bp, probe
gtacctgtataaactgaactgtgaa

SEQ ID NO: 90261 - DNA, 25 bp, probe
ttccacagagatcaatgttccacag

SEQ ID NO: 90262 - DNA, 25 bp, probe
ggattccacagagatcaatgttcca

SEQ ID NO: 90263 - DNA, 25 bp, probe
cattaaatccaaccagggaatcttc

SEQ ID NO: 90264 - DNA, 25 bp, probe
gtaacaaggtggcatctgaagcatt

SEQ ID NO: 90265 - DNA, 25 bp, probe
acattaaatccaaccagggaatctt

SEQ ID NO: 90266 - DNA, 25 bp, probe
gtataaactgaactgtgaaactgtt

SEQ ID NO: 90267 - DNA, 25 bp, probe
gacattaaatccaaccagggaatct

SEQ ID NO: 90268 - DNA, 25 bp, probe
ttctgctgacattaaatccaaccag

SEQ ID NO: 90269 - DNA, 25 bp, probe
tgacattaaatccaaccagggaatc

SEQ ID NO: 90270 - DNA, 25 bp, probe
ctgacattaaatccaaccagggaat

SEQ ID NO: 90271 - DNA, 25 bp, probe
tccaatgagtttactaatgactggg

SEQ ID NO: 90272 - DNA, 25 bp, probe
ctcaatggtaacaaggtggcatctg

SEQ ID NO: 90273 - DNA, 25 bp, probe
aagattaccttgaggttgtgttcaa

SEQ ID NO: 90274 - DNA, 25 bp, probe
atccaatgagtttactaatgactgg

SEQ ID NO: 90275 - DNA, 25 bp, probe
tggattccacagagatcaatgttcc

SEQ ID NO: 90276 - DNA, 25 bp, probe
atagaaatagaacactgcctctgag

SEQ ID NO: 90277 - DNA, 25 bp, probe
cgccctctgaaattaaagaaatgaa

SEQ ID NO: 90278 - DNA, 25 bp, probe
ttcgccctctgaaattaaagaaatg

SEQ ID NO: 90279 - DNA, 25 bp, probe
cttcgccctctgaaattaaagaaat

SEQ ID NO: 90280 - DNA, 25 bp, probe
tcgccctctgaaattaaagaaatga

SEQ ID NO: 90281 - DNA, 25 bp, probe
tatagaaatagaacactgcctctga

SEQ ID NO: 90282 - DNA, 25 bp, probe
tagaaatagaacactgcctctgagt

SEQ ID NO: 90283 - DNA, 25 bp, probe
tggaacaaatcgtttctcagaagta

SEQ ID NO: 90284 - DNA, 25 bp, probe
gaaatagaacactgcctctgagttt

SEQ ID NO: 90285 - DNA, 25 bp, probe
gacatccctgattctctctccattt

SEQ ID NO: 90286 - DNA, 25 bp, probe
ggaacaaatcgtttctcagaagtac

SEQ ID NO: 90287 - DNA, 25 bp, probe
acatccctgattctctctccatttg

SEQ ID NO: 90288 - DNA, 25 bp, probe
tttctgttcatcaccagtctgtaaa

SEQ ID NO: 90289 - DNA, 25 bp, probe
aatgagacctggaacaaatcgtttc

SEQ ID NO: 90290 - DNA, 25 bp, probe
gaatgagacctggaacaaatcgttt

SEQ ID NO: 90291 - DNA, 25 bp, probe
gccctctgaaattaaagaaatgaaa

SEQ ID NO: 90292 - DNA, 25 bp, probe
agaaatagaacactgcctctgagtt

SEQ ID NO: 90293 - DNA, 25 bp, probe
tgaaattagtttacctcatccatgc

SEQ ID NO: 90294 - DNA, 25 bp, probe
tcttgaaattagtttacctcatcca

SEQ ID NO: 90295 - DNA, 25 bp, probe
atgagacctggaacaaatcgtttct

SEQ ID NO: 90296 - DNA, 25 bp, probe
agacatccctgattctctctccatt

SEQ ID NO: 90297 - DNA, 25 bp, probe
ctggaacaaatcgtttctcagaagt

SEQ ID NO: 90298 - DNA, 25 bp, probe
ttacctcatccatgcactttaattg

SEQ ID NO: 90299 - DNA, 25 bp, probe
gtttacctcatccatgcactttaat

SEQ ID NO: 90300 - DNA, 25 bp, probe
aaattagtttacctcatccatgcac

SEQ ID NO: 90301 - DNA, 25 bp, probe
tgaatgagacctggaacaaatcgtt

SEQ ID NO: 90302 - DNA, 25 bp, probe
gaaattagtttacctcatccatgca

SEQ ID NO: 90303 - DNA, 25 bp, probe
tccatgcactttaattgaagaactg

SEQ ID NO: 90304 - DNA, 25 bp, probe
catccctgattctctctccatttgg

SEQ ID NO: 90305 - DNA, 25 bp, probe
ttgaatgagacctggaacaaatcgt

SEQ ID NO: 90306 - DNA, 25 bp, probe
ttcgtcttcgccctctgaaattaaa

SEQ ID NO: 90307 - DNA, 25 bp, probe
tttacctcatccatgcactttaatt

SEQ ID NO: 90308 - DNA, 25 bp, probe
atccatgcactttaattgaagaact

SEQ ID NO: 90309 - DNA, 25 bp, probe
catccatgcactttaattgaagaac

SEQ ID NO: 90310 - DNA, 25 bp, probe
ctcttgaaattagtttacctcatcc

SEQ ID NO: 90311 - DNA, 25 bp, probe
tacctcatccatgcactttaattga

SEQ ID NO: 90312 - DNA, 25 bp, probe
tagtttacctcatccatgcacttta

SEQ ID NO: 90313 - DNA, 25 bp, probe
attagtttacctcatccatgcactt

SEQ ID NO: 90314 - DNA, 25 bp, probe
aattagtttacctcatccatgcact

SEQ ID NO: 90315 - DNA, 25 bp, probe
ctcatccatgcactttaattgaaga

SEQ ID NO: 90316 - DNA, 25 bp, probe
cctcatccatgcactttaattgaag

SEQ ID NO: 90317 - DNA, 25 bp, probe
agtttacctcatccatgcactttaa

SEQ ID NO: 90318 - DNA, 25 bp, probe
ttagtttacctcatccatgcacttt

SEQ ID NO: 90319 - DNA, 25 bp, probe
cctggaacaaatcgtttctcagaag

SEQ ID NO: 90320 - DNA, 25 bp, probe
accagtgtgaataaagttagtgtgt

SEQ ID NO: 90321 - DNA, 25 bp, probe
ccagtgtgaataaagttagtgtgtt

SEQ ID NO: 90322 - DNA, 25 bp, probe
taccagtgtgaataaagttagtgtg

SEQ ID NO: 90323 - DNA, 25 bp, probe
gtaccagtgtgaataaagttagtgt

SEQ ID NO: 90324 - DNA, 25 bp, probe
tgtaccagtgtgaataaagttagtg

SEQ ID NO: 90325 - DNA, 25 bp, probe
ttgtaccagtgtgaataaagttagt

SEQ ID NO: 90326 - DNA, 25 bp, probe
ggaaaggacatgggtagcaattcta

SEQ ID NO: 90327 - DNA, 25 bp, probe
tttgtaccagtgtgaataaagttag

SEQ ID NO: 90328 - DNA, 25 bp, probe
gaaaggacatgggtagcaattctac

SEQ ID NO: 90329 - DNA, 25 bp, probe
gaggaaaggacatgggtagcaattc

SEQ ID NO: 90330 - DNA, 25 bp, probe
tagcaattctacccagagccttctc

SEQ ID NO: 90331 - DNA, 25 bp, probe
agaggaaaggacatgggtagcaatt

SEQ ID NO: 90332 - DNA, 25 bp, probe
aaactacttttgtaccagtgtgaat

SEQ ID NO: 90333 - DNA, 25 bp, probe
aggaaaggacatgggtagcaattct

SEQ ID NO: 90334 - DNA, 25 bp, probe
ctagaagagtcaggaagggaaagcc

SEQ ID NO: 90335 - DNA, 25 bp, probe
cattattgagcatgaccctcggatg

SEQ ID NO: 90336 - DNA, 25 bp, probe
aaaactacttttgtaccagtgtgaa

SEQ ID NO: 90337 - DNA, 25 bp, probe
actacttttgtaccagtgtgaataa

SEQ ID NO: 90338 - DNA, 25 bp, probe
aactacttttgtaccagtgtgaata

SEQ ID NO: 90339 - DNA, 25 bp, probe
gagaggaaaggacatgggtagcaat

SEQ ID NO: 90340 - DNA, 25 bp, probe
tagaagagtcaggaagggaaagcca

SEQ ID NO: 90341 - DNA, 25 bp, probe
cctagaagagtcaggaagggaaagc

SEQ ID NO: 90342 - DNA, 25 bp, probe
ctacttttgtaccagtgtgaataaa

SEQ ID NO: 90343 - DNA, 25 bp, probe
caattctacccagagccttctcctg

SEQ ID NO: 90344 - DNA, 25 bp, probe
ttttgtaccagtgtgaataaagtta

SEQ ID NO: 90345 - DNA, 25 bp, probe
cctatgctccagtatggaagaatgg

SEQ ID NO: 90346 - DNA, 25 bp, probe
gtagcaattctacccagagccttct

SEQ ID NO: 90347 - DNA, 25 bp, probe
cttttgtaccagtgtgaataaagtt

SEQ ID NO: 90348 - DNA, 25 bp, probe
ccattattgagcatgaccctcggat

SEQ ID NO: 90349 - DNA, 25 bp, probe
tacttttgtaccagtgtgaataaag

SEQ ID NO: 90350 - DNA, 25 bp, probe
tcctagaagagtcaggaagggaaag

SEQ ID NO: 90351 - DNA, 25 bp, probe
cataaaactgaaggtggagagcagc

SEQ ID NO: 90352 - DNA, 25 bp, probe
gcataaaactgaaggtggagagcag

SEQ ID NO: 90353 - DNA, 25 bp, probe
atctctgtgtacccactcctcactg

SEQ ID NO: 90354 - DNA, 25 bp, probe
catctctgtgtacccactcctcact

SEQ ID NO: 90355 - DNA, 25 bp, probe
ctatgctccagtatggaagaatggg

SEQ ID NO: 90356 - DNA, 25 bp, probe
ccctatgctccagtatggaagaatg

SEQ ID NO: 90357 - DNA, 25 bp, probe
attacatcaacgccagccccattat

SEQ ID NO: 90358 - DNA, 25 bp, probe
ttacatcaacgccagccccattatt

SEQ ID NO: 90359 - DNA, 25 bp, probe
ttctggcgcaagagaacatttctag

SEQ ID NO: 90360 - DNA, 25 bp, probe
cttctggcgcaagagaacatttcta

SEQ ID NO: 90361 - DNA, 25 bp, probe
ataaaactgaaggtggagagcagcc

SEQ ID NO: 90362 - DNA, 25 bp, probe
agttccctgaacatctgtgtgtgtc

SEQ ID NO: 90363 - DNA, 25 bp, probe
gagttccctgaacatctgtgtgtgt

SEQ ID NO: 90364 - DNA, 25 bp, probe
cagttgctgtgaaatagcccaattt

SEQ ID NO: 90365 - DNA, 25 bp, probe
gtcagtgcttaaatgggctccttct

SEQ ID NO: 90366 - DNA, 25 bp, probe
agtcagtgcttaaatgggctccttc

SEQ ID NO: 90367 - DNA, 25 bp, probe
ttctggaagcagttgctgtgaaata

SEQ ID NO: 90368 - DNA, 25 bp, probe
cagtcagtgcttaaatgggctcctt

SEQ ID NO: 90369 - DNA, 25 bp, probe
agttgctgtgaaatagcccaatttt

SEQ ID NO: 90370 - DNA, 25 bp, probe
tctggaagcagttgctgtgaaatag

SEQ ID NO: 90371 - DNA, 25 bp, probe
tcagtgcttaaatgggctccttctg

SEQ ID NO: 90372 - DNA, 25 bp, probe
gactgctaaaacaaatctgttggac

SEQ ID NO: 90373 - DNA, 25 bp, probe
agactgctaaaacaaatctgttgga

SEQ ID NO: 90374 - DNA, 25 bp, probe
tgcttaaatgggctccttctggaag

SEQ ID NO: 90375 - DNA, 25 bp, probe
cttctggaagcagttgctgtgaaat

SEQ ID NO: 90376 - DNA, 25 bp, probe
gtgcttaaatgggctccttctggaa

SEQ ID NO: 90377 - DNA, 25 bp, probe
cagactgctaaaacaaatctgttgg

SEQ ID NO: 90378 - DNA, 25 bp, probe
tgctaaaacaaatctgttggacgag

SEQ ID NO: 90379 - DNA, 25 bp, probe
ctgctaaaacaaatctgttggacga

SEQ ID NO: 90380 - DNA, 25 bp, probe
gcagttgctgtgaaatagcccaatt

SEQ ID NO: 90381 - DNA, 25 bp, probe
actgctaaaacaaatctgttggacg

SEQ ID NO: 90382 - DNA, 25 bp, probe
ctaaaacaaatctgttggacgagct

SEQ ID NO: 90383 - DNA, 25 bp, probe
cagacgaagtgacgttgagatcctc

SEQ ID NO: 90384 - DNA, 25 bp, probe
ttaaatgggctccttctggaagcag

SEQ ID NO: 90385 - DNA, 25 bp, probe
cttaaatgggctccttctggaagca

SEQ ID NO: 90386 - DNA, 25 bp, probe
ctgtgcagactgctaaaacaaatct

SEQ ID NO: 90387 - DNA, 25 bp, probe
ctggaagcagttgctgtgaaatagc

SEQ ID NO: 90388 - DNA, 25 bp, probe
gcagactgctaaaacaaatctgttg

SEQ ID NO: 90389 - DNA, 25 bp, probe
gctaaaacaaatctgttggacgagc

SEQ ID NO: 90390 - DNA, 25 bp, probe
tgcagactgctaaaacaaatctgtt

SEQ ID NO: 90391 - DNA, 25 bp, probe
gtgcagactgctaaaacaaatctgt

SEQ ID NO: 90392 - DNA, 25 bp, probe
tgtgcagactgctaaaacaaatctg

SEQ ID NO: 90393 - DNA, 25 bp, probe
gctgtgcagactgctaaaacaaatc

SEQ ID NO: 90394 - DNA, 25 bp, probe
ggctgtgcagactgctaaaacaaat

SEQ ID NO: 90395 - DNA, 25 bp, probe
taaaacaaatctgttggacgagctc

SEQ ID NO: 90396 - DNA, 25 bp, probe
aaaacaaatctgttggacgagctcc

SEQ ID NO: 90397 - DNA, 25 bp, probe
aaccagttaccacacatctatgata

SEQ ID NO: 90398 - DNA, 25 bp, probe
ctaaccagttaccacacatctatga

SEQ ID NO: 90399 - DNA, 25 bp, probe
accagttaccacacatctatgatat

SEQ ID NO: 90400 - DNA, 25 bp, probe
taaccagttaccacacatctatgat

SEQ ID NO: 90401 - DNA, 25 bp, probe
gctaaccagttaccacacatctatg

SEQ ID NO: 90402 - DNA, 25 bp, probe
tataacagatatggcagcttagagg

SEQ ID NO: 90403 - DNA, 25 bp, probe
ccagttaccacacatctatgatata

SEQ ID NO: 90404 - DNA, 25 bp, probe
ataacagatatggcagcttagaggt

SEQ ID NO: 90405 - DNA, 25 bp, probe
agctaaccagttaccacacatctat

SEQ ID NO: 90406 - DNA, 25 bp, probe
taagagctaaccagttaccacacat

SEQ ID NO: 90407 - DNA, 25 bp, probe
tgatataaccctaacacacacagaa

SEQ ID NO: 90408 - DNA, 25 bp, probe
ttaagagctaaccagttaccacaca

SEQ ID NO: 90409 - DNA, 25 bp, probe
ctataacagatatggcagcttagag

SEQ ID NO: 90410 - DNA, 25 bp, probe
atgatataaccctaacacacacaga

SEQ ID NO: 90411 - DNA, 25 bp, probe
ctgatataaattctgtgggtccgat

SEQ ID NO: 90412 - DNA, 25 bp, probe
gctttgtttggatgtaatttagggt

SEQ ID NO: 90413 - DNA, 25 bp, probe
tggctttgtttggatgtaatttagg

SEQ ID NO: 90414 - DNA, 25 bp, probe
tgttggctttgtttggatgtaattt

SEQ ID NO: 90415 - DNA, 25 bp, probe
ggctttgtttggatgtaatttaggg

SEQ ID NO: 90416 - DNA, 25 bp, probe
gtgggtccgataatatctttgtgat

SEQ ID NO: 90417 - DNA, 25 bp, probe
ttctgtgggtccgataatatctttg

SEQ ID NO: 90418 - DNA, 25 bp, probe
attctgtgggtccgataatatcttt

SEQ ID NO: 90419 - DNA, 25 bp, probe
aattctgtgggtccgataatatctt

SEQ ID NO: 90420 - DNA, 25 bp, probe
aaattctgtgggtccgataatatct

SEQ ID NO: 90421 - DNA, 25 bp, probe
gagctaaccagttaccacacatcta

SEQ ID NO: 90422 - DNA, 25 bp, probe
tgatataaattctgtgggtccgata

SEQ ID NO: 90423 - DNA, 25 bp, probe
gtgttggctttgtttggatgtaatt

SEQ ID NO: 90424 - DNA, 25 bp, probe
agatttgtaggaaggtctcattctt

SEQ ID NO: 90425 - DNA, 25 bp, probe
taacagatatggcagcttagaggtg

SEQ ID NO: 90426 - DNA, 25 bp, probe
tcattcttccaagctgagagtctag

SEQ ID NO: 90427 - DNA, 25 bp, probe
gttggctttgtttggatgtaattta

SEQ ID NO: 90428 - DNA, 25 bp, probe
gatataaccctaacacacacagaaa

SEQ ID NO: 90429 - DNA, 25 bp, probe
ctgtgggtccgataatatctttgtg

SEQ ID NO: 90430 - DNA, 25 bp, probe
tctgtgggtccgataatatctttgt

SEQ ID NO: 90431 - DNA, 25 bp, probe
ttggctttgtttggatgtaatttag

SEQ ID NO: 90432 - DNA, 25 bp, probe
ttctataacagatatggcagcttag

SEQ ID NO: 90433 - DNA, 25 bp, probe
tgtgggtccgataatatctttgtga

SEQ ID NO: 90434 - DNA, 25 bp, probe
accacacatctatgatataacccta

SEQ ID NO: 90435 - DNA, 25 bp, probe
taccacacatctatgatataaccct

SEQ ID NO: 90436 - DNA, 25 bp, probe
gatataaattctgtgggtccgataa

SEQ ID NO: 90437 - DNA, 25 bp, probe
taaattctgtgggtccgataatatc

SEQ ID NO: 90438 - DNA, 25 bp, probe
aagagctaaccagttaccacacatc

SEQ ID NO: 90439 - DNA, 25 bp, probe
tgggtccgataatatctttgtgata

SEQ ID NO: 90440 - DNA, 25 bp, probe
tatgatataaccctaacacacacag

SEQ ID NO: 90441 - DNA, 25 bp, probe
tcagagcagcagaaataaagtaact

SEQ ID NO: 90442 - DNA, 25 bp, probe
tagacattcagagcagcagaaataa

SEQ ID NO: 90443 - DNA, 25 bp, probe
ttcagagcagcagaaataaagtaac

SEQ ID NO: 90444 - DNA, 25 bp, probe
gacattcagagcagcagaaataaag

SEQ ID NO: 90445 - DNA, 25 bp, probe
gcggcttatgttctgaatttgttta

SEQ ID NO: 90446 - DNA, 25 bp, probe
cattcagagcagcagaaataaagta

SEQ ID NO: 90447 - DNA, 25 bp, probe
agacattcagagcagcagaaataaa

SEQ ID NO: 90448 - DNA, 25 bp, probe
acattcagagcagcagaaataaagt

SEQ ID NO: 90449 - DNA, 25 bp, probe
attcagagcagcagaaataaagtaa

SEQ ID NO: 90450 - DNA, 25 bp, probe
ctagacattcagagcagcagaaata

SEQ ID NO: 90451 - DNA, 25 bp, probe
cggcttatgttctgaatttgtttat

SEQ ID NO: 90452 - DNA, 25 bp, probe
cagagcagcagaaataaagtaactt

SEQ ID NO: 90453 - DNA, 25 bp, probe
cagaaagtcctagaactcagaagtg

SEQ ID NO: 90454 - DNA, 25 bp, probe
aagtcctagaactcagaagtgccat

SEQ ID NO: 90455 - DNA, 25 bp, probe
agcggcttatgttctgaatttgttt

SEQ ID NO: 90456 - DNA, 25 bp, probe
agagcagcagaaataaagtaactta

SEQ ID NO: 90457 - DNA, 25 bp, probe
gagcggcttatgttctgaatttgtt

SEQ ID NO: 90458 - DNA, 25 bp, probe
agaaagtcctagaactcagaagtgc

SEQ ID NO: 90459 - DNA, 25 bp, probe
gcagaaagtcctagaactcagaagt

SEQ ID NO: 90460 - DNA, 25 bp, probe
gtccaatcatgaggcacctaataat

SEQ ID NO: 90461 - DNA, 25 bp, probe
ggcttatgttctgaatttgtttatg

SEQ ID NO: 90462 - DNA, 25 bp, probe
tccaatcatgaggcacctaataatg

SEQ ID NO: 90463 - DNA, 25 bp, probe
tagaactcagaagtgccatgacctt

SEQ ID NO: 90464 - DNA, 25 bp, probe
cctagacattcagagcagcagaaat

SEQ ID NO: 90465 - DNA, 25 bp, probe
tgagaactgatcattagtgagactg

SEQ ID NO: 90466 - DNA, 25 bp, probe
ctgagcggcttatgttctgaatttg

SEQ ID NO: 90467 - DNA, 25 bp, probe
gagaactgatcattagtgagactgg

SEQ ID NO: 90468 - DNA, 25 bp, probe
ggcagaaagtcctagaactcagaag

SEQ ID NO: 90469 - DNA, 25 bp, probe
gagcagcagaaataaagtaacttat

SEQ ID NO: 90470 - DNA, 25 bp, probe
ctcagtgaagcctagacattcagag

SEQ ID NO: 90471 - DNA, 25 bp, probe
ctagaactcagaagtgccatgacct

SEQ ID NO: 90472 - DNA, 25 bp, probe
tcctagaactcagaagtgccatgac

SEQ ID NO: 90473 - DNA, 25 bp, probe
gtcctagaactcagaagtgccatga

SEQ ID NO: 90474 - DNA, 25 bp, probe
agtcctagaactcagaagtgccatg

SEQ ID NO: 90475 - DNA, 25 bp, probe
gaaagtcctagaactcagaagtgcc

SEQ ID NO: 90476 - DNA, 25 bp, probe
ctcacacttgtaaccacaggacttt

SEQ ID NO: 90477 - DNA, 25 bp, probe
gactggcattttagagacctgttaa

SEQ ID NO: 90478 - DNA, 25 bp, probe
tgagcggcttatgttctgaatttgt

SEQ ID NO: 90479 - DNA, 25 bp, probe
tctgaatttgtttatgagaactgat

SEQ ID NO: 90480 - DNA, 25 bp, probe
actggcattttagagacctgttaaa

SEQ ID NO: 90481 - DNA, 25 bp, probe
agactggcattttagagacctgtta

SEQ ID NO: 90482 - DNA, 25 bp, probe
tcacacttgtaaccacaggactttg

SEQ ID NO: 90483 - DNA, 25 bp, probe
gtttgagatggattaatggcctttg

SEQ ID NO: 90484 - DNA, 25 bp, probe
gcttatgttctgaatttgtttatga

SEQ ID NO: 90485 - DNA, 25 bp, probe
ttaggaggagagtaggtgagatgat

SEQ ID NO: 90486 - DNA, 25 bp, probe
ctaggaattagaagacagacaccat

SEQ ID NO: 90487 - DNA, 25 bp, probe
agattcctccttatgatgtatgcta

SEQ ID NO: 90488 - DNA, 25 bp, probe
atgtatgctaggttatggaagatgt

SEQ ID NO: 90489 - DNA, 25 bp, probe
aatctggaggagagaataatgatgt

SEQ ID NO: 90490 - DNA, 25 bp, probe
tgatgtatgctaggttatggaagat

SEQ ID NO: 90491 - DNA, 25 bp, probe
atgatgtatgctaggttatggaaga

SEQ ID NO: 90492 - DNA, 25 bp, probe
ctggaggagagaataatgatgtacc

SEQ ID NO: 90493 - DNA, 25 bp, probe
ggaggagagaataatgatgtaccaa

SEQ ID NO: 90494 - DNA, 25 bp, probe
gatgtatgctaggttatggaagatg

SEQ ID NO: 90495 - DNA, 25 bp, probe
gagattcctccttatgatgtatgct

SEQ ID NO: 90496 - DNA, 25 bp, probe
tgtatgctaggttatggaagatgta

SEQ ID NO: 90497 - DNA, 25 bp, probe
gagttaggaggagagtaggtgagat

SEQ ID NO: 90498 - DNA, 25 bp, probe
taggaattagaagacagacaccatg

SEQ ID NO: 90499 - DNA, 25 bp, probe
gttaggaggagagtaggtgagatga

SEQ ID NO: 90500 - DNA, 25 bp, probe
agttaggaggagagtaggtgagatg

SEQ ID NO: 90501 - DNA, 25 bp, probe
gattcctccttatgatgtatgctag

SEQ ID NO: 90502 - DNA, 25 bp, probe
atctggaggagagaataatgatgta

SEQ ID NO: 90503 - DNA, 25 bp, probe
tctggaggagagaataatgatgtac

SEQ ID NO: 90504 - DNA, 25 bp, probe
gctaggaattagaagacagacacca

SEQ ID NO: 90505 - DNA, 25 bp, probe
tgctaggaattagaagacagacacc

SEQ ID NO: 90506 - DNA, 25 bp, probe
taggaggagagtaggtgagatgatc

SEQ ID NO: 90507 - DNA, 25 bp, probe
ctgctaggaattagaagacagacac

SEQ ID NO: 90508 - DNA, 25 bp, probe
agcatcactctgttctagcattctt

SEQ ID NO: 90509 - DNA, 25 bp, probe
tcctccttatgatgtatgctaggtt

SEQ ID NO: 90510 - DNA, 25 bp, probe
ttcctccttatgatgtatgctaggt

SEQ ID NO: 90511 - DNA, 25 bp, probe
attcctccttatgatgtatgctagg

SEQ ID NO: 90512 - DNA, 25 bp, probe
gtatgctaggttatggaagatgtaa

SEQ ID NO: 90513 - DNA, 25 bp, probe
cctccttatgatgtatgctaggtta

SEQ ID NO: 90514 - DNA, 25 bp, probe
tatgatgtatgctaggttatggaag

SEQ ID NO: 90515 - DNA, 25 bp, probe
cttatgatgtatgctaggttatgga

SEQ ID NO: 90516 - DNA, 25 bp, probe
gaggagagaataatgatgtaccaat

SEQ ID NO: 90517 - DNA, 25 bp, probe
ccttatgatgtatgctaggttatgg

SEQ ID NO: 90518 - DNA, 25 bp, probe
cctgctaggaattagaagacagaca

SEQ ID NO: 90519 - DNA, 25 bp, probe
atgtaccaataagtggagattcctc

SEQ ID NO: 90520 - DNA, 25 bp, probe
gatgtaccaataagtggagattcct

SEQ ID NO: 90521 - DNA, 25 bp, probe
tgatgtaccaataagtggagattcc

SEQ ID NO: 90522 - DNA, 25 bp, probe
taatctggaggagagaataatgatg

SEQ ID NO: 90523 - DNA, 25 bp, probe
aggaattagaagacagacaccatgt

SEQ ID NO: 90524 - DNA, 25 bp, probe
gggaggtaggaatgaggtatagaaa

SEQ ID NO: 90525 - DNA, 25 bp, probe
tggaggagagaataatgatgtacca

SEQ ID NO: 90526 - DNA, 25 bp, probe
gagatggatttcagttgggagttag

SEQ ID NO: 90527 - DNA, 25 bp, probe
ttatgatgtatgctaggttatggaa

SEQ ID NO: 90528 - DNA, 25 bp, probe
ctaaacgactaaaggatttgttggg

SEQ ID NO: 90529 - DNA, 25 bp, probe
taaagagtcaagcatctaagcccag

SEQ ID NO: 90530 - DNA, 25 bp, probe
ctaaagagtcaagcatctaagccca

SEQ ID NO: 90531 - DNA, 25 bp, probe
cctaaagagtcaagcatctaagccc

SEQ ID NO: 90532 - DNA, 25 bp, probe
ccctaaagagtcaagcatctaagcc

SEQ ID NO: 90533 - DNA, 25 bp, probe
cccctaaagagtcaagcatctaagc

SEQ ID NO: 90534 - DNA, 25 bp, probe
aaagagtcaagcatctaagcccagg

SEQ ID NO: 90535 - DNA, 25 bp, probe
gtccagactcagtggatctgaagaa

SEQ ID NO: 90536 - DNA, 25 bp, probe
ctttggcttggctgttcgatttgag

SEQ ID NO: 90537 - DNA, 25 bp, probe
ctgtccagactcagtggatctgaag

SEQ ID NO: 90538 - DNA, 25 bp, probe
tgtccagactcagtggatctgaaga

SEQ ID NO: 90539 - DNA, 25 bp, probe
tctgtccagactcagtggatctgaa

SEQ ID NO: 90540 - DNA, 25 bp, probe
catctaagcccaggacatgagtgtc

SEQ ID NO: 90541 - DNA, 25 bp, probe
atctaagcccaggacatgagtgtct

SEQ ID NO: 90542 - DNA, 25 bp, probe
gtctgtccagactcagtggatctga

SEQ ID NO: 90543 - DNA, 25 bp, probe
acctggtaatgaaggaatacacatc

SEQ ID NO: 90544 - DNA, 25 bp, probe
cctggtaatgaaggaatacacatcc

SEQ ID NO: 90545 - DNA, 25 bp, probe
ctacctggtaatgaaggaatacaca

SEQ ID NO: 90546 - DNA, 25 bp, probe
ctgctacctggtaatgaaggaatac

SEQ ID NO: 90547 - DNA, 25 bp, probe
tctgctacctggtaatgaaggaata

SEQ ID NO: 90548 - DNA, 25 bp, probe
tacctggtaatgaaggaatacacat

SEQ ID NO: 90549 - DNA, 25 bp, probe
gctacctggtaatgaaggaatacac

SEQ ID NO: 90550 - DNA, 25 bp, probe
tgctacctggtaatgaaggaataca

SEQ ID NO: 90551 - DNA, 25 bp, probe
caataacaggaacatgagacttcgc

SEQ ID NO: 90552 - DNA, 25 bp, probe
gcaataacaggaacatgagacttcg

SEQ ID NO: 90553 - DNA, 25 bp, probe
tgcaataacaggaacatgagacttc

SEQ ID NO: 90554 - DNA, 25 bp, probe
ccacagttaggaccaataaacacta

SEQ ID NO: 90555 - DNA, 25 bp, probe
acagttaggaccaataaacactaca

SEQ ID NO: 90556 - DNA, 25 bp, probe
ataacaggaacatgagacttcgcaa

SEQ ID NO: 90557 - DNA, 25 bp, probe
aataacaggaacatgagacttcgca

SEQ ID NO: 90558 - DNA, 25 bp, probe
ctctgctacctggtaatgaaggaat

SEQ ID NO: 90559 - DNA, 25 bp, probe
agttaggaccaataaacactacagc

SEQ ID NO: 90560 - DNA, 25 bp, probe
cacagttaggaccaataaacactac

SEQ ID NO: 90561 - DNA, 25 bp, probe
ctgatgccacagttaggaccaataa

SEQ ID NO: 90562 - DNA, 25 bp, probe
cagttaggaccaataaacactacag

SEQ ID NO: 90563 - DNA, 25 bp, probe
aatcaagaatggcagggatctattt

SEQ ID NO: 90564 - DNA, 25 bp, probe
gatctcgtgactatactggcatttc

SEQ ID NO: 90565 - DNA, 25 bp, probe
caatcaagaatggcagggatctatt

SEQ ID NO: 90566 - DNA, 25 bp, probe
tgatgccacagttaggaccaataaa

SEQ ID NO: 90567 - DNA, 25 bp, probe
ctgcaataacaggaacatgagactt

SEQ ID NO: 90568 - DNA, 25 bp, probe
atctcgtgactatactggcatttca

SEQ ID NO: 90569 - DNA, 25 bp, probe
gaatcggactgtgactcttcagatg

SEQ ID NO: 90570 - DNA, 25 bp, probe
gatgccacagttaggaccaataaac

SEQ ID NO: 90571 - DNA, 25 bp, probe
tccaaatgaaattaagtctcactga

SEQ ID NO: 90572 - DNA, 25 bp, probe
atcctgaagatctcgtgactatact

SEQ ID NO: 90573 - DNA, 25 bp, probe
catcctgaagatctcgtgactatac

SEQ ID NO: 90574 - DNA, 25 bp, probe
acatcctgaagatctcgtgactata

SEQ ID NO: 90575 - DNA, 25 bp, probe
agaatcggactgtgactcttcagat

SEQ ID NO: 90576 - DNA, 25 bp, probe
tcaatcaagaatggcagggatctat

SEQ ID NO: 90577 - DNA, 25 bp, probe
atttcaatcaagaatggcagggatc

SEQ ID NO: 90578 - DNA, 25 bp, probe
tcctgaagatctcgtgactatactg

SEQ ID NO: 90579 - DNA, 25 bp, probe
ttaggaccaataaacactacagctc

SEQ ID NO: 90580 - DNA, 25 bp, probe
ttcaatcaagaatggcagggatcta

SEQ ID NO: 90581 - DNA, 25 bp, probe
tctgatgccacagttaggaccaata

SEQ ID NO: 90582 - DNA, 25 bp, probe
taggaccaataaacactacagctct

SEQ ID NO: 90583 - DNA, 25 bp, probe
tcgtgactatactggcatttcagat

SEQ ID NO: 90584 - DNA, 25 bp, probe
gtgactatactggcatttcagatcc

SEQ ID NO: 90585 - DNA, 25 bp, probe
aagatctcgtgactatactggcatt

SEQ ID NO: 90586 - DNA, 25 bp, probe
gttaggaccaataaacactacagct

SEQ ID NO: 90587 - DNA, 25 bp, probe
ttgtcatactaagtgtctcctgtaa

SEQ ID NO: 90588 - DNA, 25 bp, probe
tgtcatactaagtgtctcctgtaat

SEQ ID NO: 90589 - DNA, 25 bp, probe
gtcatactaagtgtctcctgtaatt

SEQ ID NO: 90590 - DNA, 25 bp, probe
ttccttcttgaagacgagtgacatt

SEQ ID NO: 90591 - DNA, 25 bp, probe
tttgtcatactaagtgtctcctgta

SEQ ID NO: 90592 - DNA, 25 bp, probe
tccttcttgaagacgagtgacattc

SEQ ID NO: 90593 - DNA, 25 bp, probe
caagatagccaaatgtgacatcaag

SEQ ID NO: 90594 - DNA, 25 bp, probe
tcacatgaatgttagtattctggaa

SEQ ID NO: 90595 - DNA, 25 bp, probe
aaagcaagatagccaaatgtgacat

SEQ ID NO: 90596 - DNA, 25 bp, probe
atcacatgaatgttagtattctgga

SEQ ID NO: 90597 - DNA, 25 bp, probe
ttcttgaagacgagtgacattcatc

SEQ ID NO: 90598 - DNA, 25 bp, probe
cttcttgaagacgagtgacattcat

SEQ ID NO: 90599 - DNA, 25 bp, probe
aagatagccaaatgtgacatcaagc

SEQ ID NO: 90600 - DNA, 25 bp, probe
aagcaagatagccaaatgtgacatc

SEQ ID NO: 90601 - DNA, 25 bp, probe
gcaagatagccaaatgtgacatcaa

SEQ ID NO: 90602 - DNA, 25 bp, probe
tcatactaagtgtctcctgtaattt

SEQ ID NO: 90603 - DNA, 25 bp, probe
catgtgagattggacagtttcagag

SEQ ID NO: 90604 - DNA, 25 bp, probe
tcttgaagacgagtgacattcatca

SEQ ID NO: 90605 - DNA, 25 bp, probe
aatcacatgaatgttagtattctgg

SEQ ID NO: 90606 - DNA, 25 bp, probe
attcttccaactcatgggataaagg

SEQ ID NO: 90607 - DNA, 25 bp, probe
gttcttcttcacaaggctgagagtg

SEQ ID NO: 90608 - DNA, 25 bp, probe
atgtgagattggacagtttcagagg

SEQ ID NO: 90609 - DNA, 25 bp, probe
aattcttccaactcatgggataaag

SEQ ID NO: 90610 - DNA, 25 bp, probe
atgatttgttctttccagaagagga

SEQ ID NO: 90611 - DNA, 25 bp, probe
gatgatttgttctttccagaagagg

SEQ ID NO: 90612 - DNA, 25 bp, probe
gatttgttctttccagaagaggaga

SEQ ID NO: 90613 - DNA, 25 bp, probe
ttgaggttcttcttcacaaggctga

SEQ ID NO: 90614 - DNA, 25 bp, probe
agcaagatagccaaatgtgacatca

SEQ ID NO: 90615 - DNA, 25 bp, probe
atttgttctttccagaagaggagac

SEQ ID NO: 90616 - DNA, 25 bp, probe
tgatttgttctttccagaagaggag

SEQ ID NO: 90617 - DNA, 25 bp, probe
aaattcttccaactcatgggataaa

SEQ ID NO: 90618 - DNA, 25 bp, probe
aaataaattcttccaactcatggga

SEQ ID NO: 90619 - DNA, 25 bp, probe
agaagaggagacaaaagcaagatag

SEQ ID NO: 90620 - DNA, 25 bp, probe
agatgatttgttctttccagaagag

SEQ ID NO: 90621 - DNA, 25 bp, probe
cagaagaggagacaaaagcaagata

SEQ ID NO: 90622 - DNA, 25 bp, probe
aggttcttcttcacaaggctgagag

SEQ ID NO: 90623 - DNA, 25 bp, probe
gaggttcttcttcacaaggctgaga

SEQ ID NO: 90624 - DNA, 25 bp, probe
aataaattcttccaactcatgggat

SEQ ID NO: 90625 - DNA, 25 bp, probe
ttttgtcatactaagtgtctcctgt

SEQ ID NO: 90626 - DNA, 25 bp, probe
gagacaaaagcaagatagccaaatg

SEQ ID NO: 90627 - DNA, 25 bp, probe
acttcagtgatccatgcatagaata

SEQ ID NO: 90628 - DNA, 25 bp, probe
aagatgatttgttctttccagaaga

SEQ ID NO: 90629 - DNA, 25 bp, probe
gcacatatctgattatattgaaagc

SEQ ID NO: 90630 - DNA, 25 bp, probe
ccttcttgaagacgagtgacattca

SEQ ID NO: 90631 - DNA, 25 bp, probe
cttacagagagtatccaatcggtat

SEQ ID NO: 90632 - DNA, 25 bp, probe
tcttacagagagtatccaatcggta

SEQ ID NO: 90633 - DNA, 25 bp, probe
cttcttacagagagtatccaatcgg

SEQ ID NO: 90634 - DNA, 25 bp, probe
ttacagagagtatccaatcggtatt

SEQ ID NO: 90635 - DNA, 25 bp, probe
tcttcttacagagagtatccaatcg

SEQ ID NO: 90636 - DNA, 25 bp, probe
ttcttacagagagtatccaatcggt

SEQ ID NO: 90637 - DNA, 25 bp, probe
gcttgtcagattcttcttacagaga

SEQ ID NO: 90638 - DNA, 25 bp, probe
ttgtcagattcttcttacagagagt

SEQ ID NO: 90639 - DNA, 25 bp, probe
agattcttcttacagagagtatcca

SEQ ID NO: 90640 - DNA, 25 bp, probe
cttgtcagattcttcttacagagag

SEQ ID NO: 90641 - DNA, 25 bp, probe
cagattcttcttacagagagtatcc

SEQ ID NO: 90642 - DNA, 25 bp, probe
tgtcagattcttcttacagagagta

SEQ ID NO: 90643 - DNA, 25 bp, probe
cagaactctccaactctctatcagc

SEQ ID NO: 90644 - DNA, 25 bp, probe
gcagaactctccaactctctatcag

SEQ ID NO: 90645 - DNA, 25 bp, probe
cagcagaactctccaactctctatc

SEQ ID NO: 90646 - DNA, 25 bp, probe
ttcttcttacagagagtatccaatc

SEQ ID NO: 90647 - DNA, 25 bp, probe
gattcttcttacagagagtatccaa

SEQ ID NO: 90648 - DNA, 25 bp, probe
agcagaactctccaactctctatca

SEQ ID NO: 90649 - DNA, 25 bp, probe
gtcagattcttcttacagagagtat

SEQ ID NO: 90650 - DNA, 25 bp, probe
gaactctccaactctctatcagctt

SEQ ID NO: 90651 - DNA, 25 bp, probe
gctactaactaactgggagacctta

SEQ ID NO: 90652 - DNA, 25 bp, probe
atcagcttgtcagattcttcttaca

SEQ ID NO: 90653 - DNA, 25 bp, probe
agcttgtcagattcttcttacagag

SEQ ID NO: 90654 - DNA, 25 bp, probe
agttggcatttcttgtttggaataa

SEQ ID NO: 90655 - DNA, 25 bp, probe
aagttggcatttcttgtttggaata

SEQ ID NO: 90656 - DNA, 25 bp, probe
cagcttgtcagattcttcttacaga

SEQ ID NO: 90657 - DNA, 25 bp, probe
tcagcttgtcagattcttcttacag

SEQ ID NO: 90658 - DNA, 25 bp, probe
tttattgggctgagttcacgaatta

SEQ ID NO: 90659 - DNA, 25 bp, probe
tttcaaccgagactatttctggatt

SEQ ID NO: 90660 - DNA, 25 bp, probe
tcagattcttcttacagagagtatc

SEQ ID NO: 90661 - DNA, 25 bp, probe
tacagagagtatccaatcggtattg

SEQ ID NO: 90662 - DNA, 25 bp, probe
gttggcatttcttgtttggaataaa

SEQ ID NO: 90663 - DNA, 25 bp, probe
tagatactttcttccttcactcacc

SEQ ID NO: 90664 - DNA, 25 bp, probe
ctttcaaccgagactatttctggat

SEQ ID NO: 90665 - DNA, 25 bp, probe
caagcattggatgactcatagaatg

SEQ ID NO: 90666 - DNA, 25 bp, probe
tgtcagcataatcgtcatcattatt

SEQ ID NO: 90667 - DNA, 25 bp, probe
ttgtcagcataatcgtcatcattat

SEQ ID NO: 90668 - DNA, 25 bp, probe
ttattgggctgagttcacgaattag

SEQ ID NO: 90669 - DNA, 25 bp, probe
ttcaaccgagactatttctggattg

SEQ ID NO: 90670 - DNA, 25 bp, probe
aagcattggatgactcatagaatgg

SEQ ID NO: 90671 - DNA, 25 bp, probe
tttgtcagcataatcgtcatcatta

SEQ ID NO: 90672 - DNA, 25 bp, probe
attcttcttacagagagtatccaat

SEQ ID NO: 90673 - DNA, 25 bp, probe
caggtgtccattcagatgagagttg

SEQ ID NO: 90674 - DNA, 25 bp, probe
agatttcctggttctgttcaagttg

SEQ ID NO: 90675 - DNA, 25 bp, probe
atctgttgtccaatcaaggcttctc

SEQ ID NO: 90676 - DNA, 25 bp, probe
gatctgttgtccaatcaaggcttct

SEQ ID NO: 90677 - DNA, 25 bp, probe
ctaactatgcctcgaacttcagtgt

SEQ ID NO: 90678 - DNA, 25 bp, probe
taactatgcctcgaacttcagtgtg

SEQ ID NO: 90679 - DNA, 25 bp, probe
gtctctgagaacgactttgaagatc

SEQ ID NO: 90680 - DNA, 25 bp, probe
cctaactatgcctcgaacttcagtg

SEQ ID NO: 90681 - DNA, 25 bp, probe
ctatgcctcgaacttcagtgtgatc

SEQ ID NO: 90682 - DNA, 25 bp, probe
aagatctgttgtccaatcaaggctt

SEQ ID NO: 90683 - DNA, 25 bp, probe
actatgcctcgaacttcagtgtgat

SEQ ID NO: 90684 - DNA, 25 bp, probe
ctgagaacgactttgaagatctgtt

SEQ ID NO: 90685 - DNA, 25 bp, probe
actttgaagatctgttgtccaatca

SEQ ID NO: 90686 - DNA, 25 bp, probe
tctgttgtccaatcaaggcttctcc

SEQ ID NO: 90687 - DNA, 25 bp, probe
ctctgagaacgactttgaagatctg

SEQ ID NO: 90688 - DNA, 25 bp, probe
tctctgagaacgactttgaagatct

SEQ ID NO: 90689 - DNA, 25 bp, probe
agatctgttgtccaatcaaggcttc

SEQ ID NO: 90690 - DNA, 25 bp, probe
gaagatctgttgtccaatcaaggct

SEQ ID NO: 90691 - DNA, 25 bp, probe
aactatgcctcgaacttcagtgtga

SEQ ID NO: 90692 - DNA, 25 bp, probe
gagaacgactttgaagatctgttgt

SEQ ID NO: 90693 - DNA, 25 bp, probe
tgagaacgactttgaagatctgttg

SEQ ID NO: 90694 - DNA, 25 bp, probe
aaagaccattgcagagatgaggaag

SEQ ID NO: 90695 - DNA, 25 bp, probe
gactttgaagatctgttgtccaatc

SEQ ID NO: 90696 - DNA, 25 bp, probe
ttgaagatctgttgtccaatcaagg

SEQ ID NO: 90697 - DNA, 25 bp, probe
tctgagaacgactttgaagatctgt

SEQ ID NO: 90698 - DNA, 25 bp, probe
tgaagatctgttgtccaatcaaggc

SEQ ID NO: 90699 - DNA, 25 bp, probe
caaagaccattgcagagatgaggaa

SEQ ID NO: 90700 - DNA, 25 bp, probe
agaacgactttgaagatctgttgtc

SEQ ID NO: 90701 - DNA, 25 bp, probe
tgttgtccaatcaaggcttctcctc

SEQ ID NO: 90702 - DNA, 25 bp, probe
ctgttgtccaatcaaggcttctcct

SEQ ID NO: 90703 - DNA, 25 bp, probe
cgactttgaagatctgttgtccaat

SEQ ID NO: 90704 - DNA, 25 bp, probe
tcaaaagccaaaagtctctgagaac

SEQ ID NO: 90705 - DNA, 25 bp, probe
gcctaactatgcctcgaacttcagt

SEQ ID NO: 90706 - DNA, 25 bp, probe
agtctctgagaacgactttgaagat

SEQ ID NO: 90707 - DNA, 25 bp, probe
gaacgactttgaagatctgttgtcc

SEQ ID NO: 90708 - DNA, 25 bp, probe
ttctcctccaggtctgacaagaaag

SEQ ID NO: 90709 - DNA, 25 bp, probe
cttctcctccaggtctgacaagaaa

SEQ ID NO: 90710 - DNA, 25 bp, probe
tttgaagatctgttgtccaatcaag

SEQ ID NO: 90711 - DNA, 25 bp, probe
ctttgaagatctgttgtccaatcaa

SEQ ID NO: 90712 - DNA, 25 bp, probe
acgactttgaagatctgttgtccaa

SEQ ID NO: 90713 - DNA, 25 bp, probe
aacgactttgaagatctgttgtcca

SEQ ID NO: 90714 - DNA, 25 bp, probe
aaaagccaaaagtctctgagaacga

SEQ ID NO: 90715 - DNA, 25 bp, probe
caaaagccaaaagtctctgagaacg

SEQ ID NO: 90716 - DNA, 25 bp, probe
aagaccattgcagagatgaggaagc

SEQ ID NO: 90717 - DNA, 25 bp, probe
tatgcctcgaacttcagtgtgatcg

SEQ ID NO: 90718 - DNA, 25 bp, probe
ctttgctcaaaagccaaaagtctct

SEQ ID NO: 90719 - DNA, 25 bp, probe
ctactgttctcatggtgttggcctc

SEQ ID NO: 90720 - DNA, 25 bp, probe
ctcccctactgttctcatggtgttg

SEQ ID NO: 90721 - DNA, 25 bp, probe
tggattgttggcagatatagttcat

SEQ ID NO: 90722 - DNA, 25 bp, probe
atggattgttggcagatatagttca

SEQ ID NO: 90723 - DNA, 25 bp, probe
ttgaccacacagtattagatgagtt

SEQ ID NO: 90724 - DNA, 25 bp, probe
attgaccacacagtattagatgagt

SEQ ID NO: 90725 - DNA, 25 bp, probe
aatggattgttggcagatatagttc

SEQ ID NO: 90726 - DNA, 25 bp, probe
accacacagtattagatgagttaca

SEQ ID NO: 90727 - DNA, 25 bp, probe
gcttaatggattgttggcagatata

SEQ ID NO: 90728 - DNA, 25 bp, probe
tgaccacacagtattagatgagtta

SEQ ID NO: 90729 - DNA, 25 bp, probe
aagaatcgtgttcatagtgtctgta

SEQ ID NO: 90730 - DNA, 25 bp, probe
agaatcgtgttcatagtgtctgtat

SEQ ID NO: 90731 - DNA, 25 bp, probe
gaccacacagtattagatgagttac

SEQ ID NO: 90732 - DNA, 25 bp, probe
ccacacagtattagatgagttacaa

SEQ ID NO: 90733 - DNA, 25 bp, probe
ggattgttggcagatatagttcatg

SEQ ID NO: 90734 - DNA, 25 bp, probe
gtagttcttcctcaagttcaacacc

SEQ ID NO: 90735 - DNA, 25 bp, probe
ggtagttcttcctcaagttcaacac

SEQ ID NO: 90736 - DNA, 25 bp, probe
taatggattgttggcagatatagtt

SEQ ID NO: 90737 - DNA, 25 bp, probe
ttaatggattgttggcagatatagt

SEQ ID NO: 90738 - DNA, 25 bp, probe
tattgaccacacagtattagatgag

SEQ ID NO: 90739 - DNA, 25 bp, probe
aatcgtgttcatagtgtctgtatgt

SEQ ID NO: 90740 - DNA, 25 bp, probe
tcgtgttcatagtgtctgtatgtaa

SEQ ID NO: 90741 - DNA, 25 bp, probe
gaatcgtgttcatagtgtctgtatg

SEQ ID NO: 90742 - DNA, 25 bp, probe
atcgtgttcatagtgtctgtatgta

SEQ ID NO: 90743 - DNA, 25 bp, probe
acacagtattagatgagttacaaca

SEQ ID NO: 90744 - DNA, 25 bp, probe
ggactagagagtaagcgacttagaa

SEQ ID NO: 90745 - DNA, 25 bp, probe
atggactagagagtaagcgacttag

SEQ ID NO: 90746 - DNA, 25 bp, probe
cttaatggattgttggcagatatag

SEQ ID NO: 90747 - DNA, 25 bp, probe
agcttaatggattgttggcagatat

SEQ ID NO: 90748 - DNA, 25 bp, probe
ttattgaccacacagtattagatga

SEQ ID NO: 90749 - DNA, 25 bp, probe
cacacagtattagatgagttacaac

SEQ ID NO: 90750 - DNA, 25 bp, probe
tattgtcatggactagagagtaagc

SEQ ID NO: 90751 - DNA, 25 bp, probe
acattattgtcatggactagagagt

SEQ ID NO: 90752 - DNA, 25 bp, probe
tggactagagagtaagcgacttaga

SEQ ID NO: 90753 - DNA, 25 bp, probe
catggactagagagtaagcgactta

SEQ ID NO: 90754 - DNA, 25 bp, probe
agtttctaaagcaatttcatcacga

SEQ ID NO: 90755 - DNA, 25 bp, probe
gtgtctgtatgtaaactgaacttga

SEQ ID NO: 90756 - DNA, 25 bp, probe
ttcaaagaatcgtgttcatagtgtc

SEQ ID NO: 90757 - DNA, 25 bp, probe
caaagaatcgtgttcatagtgtctg

SEQ ID NO: 90758 - DNA, 25 bp, probe
tcaaagaatcgtgttcatagtgtct

SEQ ID NO: 90759 - DNA, 25 bp, probe
gtcaggaattactaagctctgtgat

SEQ ID NO: 90760 - DNA, 25 bp, probe
aaagaatcgtgttcatagtgtctgt

SEQ ID NO: 90761 - DNA, 25 bp, probe
tttcaaagaatcgtgttcatagtgt

SEQ ID NO: 90762 - DNA, 25 bp, probe
tggtatttcaaagaatcgtgttcat

SEQ ID NO: 90763 - DNA, 25 bp, probe
atggtatttcaaagaatcgtgttca

SEQ ID NO: 90764 - DNA, 25 bp, probe
caacattattgtcatggactagaga

SEQ ID NO: 90765 - DNA, 25 bp, probe
agcagaactatccagtgttatctaa

SEQ ID NO: 90766 - DNA, 25 bp, probe
aagcagaactatccagtgttatcta

SEQ ID NO: 90767 - DNA, 25 bp, probe
tgatccatacatactataaggcact

SEQ ID NO: 90768 - DNA, 25 bp, probe
ctagaaggaagaggtgaaggatctg

SEQ ID NO: 90769 - DNA, 25 bp, probe
atgatccatacatactataaggcac

SEQ ID NO: 90770 - DNA, 25 bp, probe
gatccatacatactataaggcactt

SEQ ID NO: 90771 - DNA, 25 bp, probe
atctgaagaatgttggtgaaggcaa

SEQ ID NO: 90772 - DNA, 25 bp, probe
acagaatatcaccattgcagttcaa

SEQ ID NO: 90773 - DNA, 25 bp, probe
tgaaagcagaactatccagtgttat

SEQ ID NO: 90774 - DNA, 25 bp, probe
aaagcagaactatccagtgttatct

SEQ ID NO: 90775 - DNA, 25 bp, probe
gaaagcagaactatccagtgttatc

SEQ ID NO: 90776 - DNA, 25 bp, probe
tagaaggaagaggtgaaggatctgg

SEQ ID NO: 90777 - DNA, 25 bp, probe
cacagaatatcaccattgcagttca

SEQ ID NO: 90778 - DNA, 25 bp, probe
tatatcctcttctgttgaatgcagt

SEQ ID NO: 90779 - DNA, 25 bp, probe
atatcctcttctgttgaatgcagtc

SEQ ID NO: 90780 - DNA, 25 bp, probe
aatgatccatacatactataaggca

SEQ ID NO: 90781 - DNA, 25 bp, probe
ttcattctcgtgacattaggaaatt

SEQ ID NO: 90782 - DNA, 25 bp, probe
ctgaaagcagaactatccagtgtta

SEQ ID NO: 90783 - DNA, 25 bp, probe
tcatctgaagaatgttggtgaaggc

SEQ ID NO: 90784 - DNA, 25 bp, probe
ttatatcctcttctgttgaatgcag

SEQ ID NO: 90785 - DNA, 25 bp, probe
gcagaactatccagtgttatctaaa

SEQ ID NO: 90786 - DNA, 25 bp, probe
cctagaaggaagaggtgaaggatct

SEQ ID NO: 90787 - DNA, 25 bp, probe
aagaatgttggtgaaggcaagtctc

SEQ ID NO: 90788 - DNA, 25 bp, probe
gaagaatgttggtgaaggcaagtct

SEQ ID NO: 90789 - DNA, 25 bp, probe
tctgaagaatgttggtgaaggcaag

SEQ ID NO: 90790 - DNA, 25 bp, probe
catctgaagaatgttggtgaaggca

SEQ ID NO: 90791 - DNA, 25 bp, probe
ttcatctgaagaatgttggtgaagg

SEQ ID NO: 90792 - DNA, 25 bp, probe
gaaacttgttaaatgaaaggactct

SEQ ID NO: 90793 - DNA, 25 bp, probe
agaaacttgttaaatgaaaggactc

SEQ ID NO: 90794 - DNA, 25 bp, probe
aaggactctttaccctagaaggaag

SEQ ID NO: 90795 - DNA, 25 bp, probe
tataactctgaagcatgataaaggg

SEQ ID NO: 90796 - DNA, 25 bp, probe
tgaagaatgttggtgaaggcaagtc

SEQ ID NO: 90797 - DNA, 25 bp, probe
ctgaagaatgttggtgaaggcaagt

SEQ ID NO: 90798 - DNA, 25 bp, probe
tctcgtgacattaggaaatttagga

SEQ ID NO: 90799 - DNA, 25 bp, probe
gcagtccaaacatgaaaggaaataa

SEQ ID NO: 90800 - DNA, 25 bp, probe
tgagtatataaacaaatgaggcact

SEQ ID NO: 90801 - DNA, 25 bp, probe
atccatacatactataaggcacttt

SEQ ID NO: 90802 - DNA, 25 bp, probe
tttaccctagaaggaagaggtgaag

SEQ ID NO: 90803 - DNA, 25 bp, probe
ctttaccctagaaggaagaggtgaa

SEQ ID NO: 90804 - DNA, 25 bp, probe
aaacttgttaaatgaaaggactctt

SEQ ID NO: 90805 - DNA, 25 bp, probe
aagaaacttgttaaatgaaaggact

SEQ ID NO: 90806 - DNA, 25 bp, probe
tatcctcttctgttgaatgcagtcc

SEQ ID NO: 90807 - DNA, 25 bp, probe
actgtgttagaatttcataagcaat

SEQ ID NO: 90808 - DNA, 25 bp, probe
ctcgtgacattaggaaatttaggat

SEQ ID NO: 90809 - DNA, 25 bp, probe
attaaagggaaagaagggaatttgc

SEQ ID NO: 90810 - DNA, 25 bp, probe
ctcattaaagggaaagaagggaatt

SEQ ID NO: 90811 - DNA, 25 bp, probe
cattaaagggaaagaagggaatttg

SEQ ID NO: 90812 - DNA, 25 bp, probe
tcattaaagggaaagaagggaattt

SEQ ID NO: 90813 - DNA, 25 bp, probe
cctcattaaagggaaagaagggaat

SEQ ID NO: 90814 - DNA, 25 bp, probe
agtggaggtctgagaatgacgatac

SEQ ID NO: 90815 - DNA, 25 bp, probe
cagtggaggtctgagaatgacgata

SEQ ID NO: 90816 - DNA, 25 bp, probe
tcctcattaaagggaaagaagggaa

SEQ ID NO: 90817 - DNA, 25 bp, probe
ttaaagggaaagaagggaatttgca

SEQ ID NO: 90818 - DNA, 25 bp, probe
ctcctcattaaagggaaagaaggga

SEQ ID NO: 90819 - DNA, 25 bp, probe
cctcctcattaaagggaaagaaggg

SEQ ID NO: 90820 - DNA, 25 bp, probe
gtggaggtctgagaatgacgatacc

SEQ ID NO: 90821 - DNA, 25 bp, probe
ctctgtaccttcagtgatgtggctc

SEQ ID NO: 90822 - DNA, 25 bp, probe
ctgtaccttcagtgatgtggctcag

SEQ ID NO: 90823 - DNA, 25 bp, probe
taaagggaaagaagggaatttgcaa

SEQ ID NO: 90824 - DNA, 25 bp, probe
ctggactttccttgtctggactcac

SEQ ID NO: 90825 - DNA, 25 bp, probe
gagaatgacgatacccgtgactcag

SEQ ID NO: 90826 - DNA, 25 bp, probe
ctgagaatgacgatacccgtgactc

SEQ ID NO: 90827 - DNA, 25 bp, probe
tcagtggaggtctgagaatgacgat

SEQ ID NO: 90828 - DNA, 25 bp, probe
gtctgagaatgacgatacccgtgac

SEQ ID NO: 90829 - DNA, 25 bp, probe
tctgagaatgacgatacccgtgact

SEQ ID NO: 90830 - DNA, 25 bp, probe
tttggcctctgtaccttcagtgatg

SEQ ID NO: 90831 - DNA, 25 bp, probe
gtttggcctctgtaccttcagtgat

SEQ ID NO: 90832 - DNA, 25 bp, probe
aagtttggcctctgtaccttcagtg

SEQ ID NO: 90833 - DNA, 25 bp, probe
caagtttggcctctgtaccttcagt

SEQ ID NO: 90834 - DNA, 25 bp, probe
ctccaagtttggcctctgtaccttc

SEQ ID NO: 90835 - DNA, 25 bp, probe
cttctccaagtttggcctctgtacc

SEQ ID NO: 90836 - DNA, 25 bp, probe
acttctccaagtttggcctctgtac

SEQ ID NO: 90837 - DNA, 25 bp, probe
tgagaatgacgatacccgtgactca

SEQ ID NO: 90838 - DNA, 25 bp, probe
aacttctccaagtttggcctctgta

SEQ ID NO: 90839 - DNA, 25 bp, probe
gacaacttctccaagtttggcctct

SEQ ID NO: 90840 - DNA, 25 bp, probe
tagaagtcagtggattgaatgtctt

SEQ ID NO: 90841 - DNA, 25 bp, probe
ttagaagtcagtggattgaatgtct

SEQ ID NO: 90842 - DNA, 25 bp, probe
atcacattcattccataggtagctt

SEQ ID NO: 90843 - DNA, 25 bp, probe
gatcacattcattccataggtagct

SEQ ID NO: 90844 - DNA, 25 bp, probe
aataatccattgtttgaggtgcttg

SEQ ID NO: 90845 - DNA, 25 bp, probe
caggatacaaaccatagtaggcaat

SEQ ID NO: 90846 - DNA, 25 bp, probe
ggatacaaaccatagtaggcaatac

SEQ ID NO: 90847 - DNA, 25 bp, probe
aggatacaaaccatagtaggcaata

SEQ ID NO: 90848 - DNA, 25 bp, probe
gtagactccaggatacaaaccatag

SEQ ID NO: 90849 - DNA, 25 bp, probe
ttacattcattaaggtgcctcgttt

SEQ ID NO: 90850 - DNA, 25 bp, probe
tttacattcattaaggtgcctcgtt

SEQ ID NO: 90851 - DNA, 25 bp, probe
agaagtcagtggattgaatgtcttt

SEQ ID NO: 90852 - DNA, 25 bp, probe
acaaaccatagtaggcaatacaatt

SEQ ID NO: 90853 - DNA, 25 bp, probe
gatacaaaccatagtaggcaataca

SEQ ID NO: 90854 - DNA, 25 bp, probe
gactccaggatacaaaccatagtag

SEQ ID NO: 90855 - DNA, 25 bp, probe
agactccaggatacaaaccatagta

SEQ ID NO: 90856 - DNA, 25 bp, probe
tagactccaggatacaaaccatagt

SEQ ID NO: 90857 - DNA, 25 bp, probe
tttagaagtcagtggattgaatgtc

SEQ ID NO: 90858 - DNA, 25 bp, probe
actccaggatacaaaccatagtagg

SEQ ID NO: 90859 - DNA, 25 bp, probe
tacaaaccatagtaggcaatacaat

SEQ ID NO: 90860 - DNA, 25 bp, probe
atacaaaccatagtaggcaatacaa

SEQ ID NO: 90861 - DNA, 25 bp, probe
ccaggatacaaaccatagtaggcaa

SEQ ID NO: 90862 - DNA, 25 bp, probe
ataatccattgtttgaggtgcttgc

SEQ ID NO: 90863 - DNA, 25 bp, probe
caaaccatagtaggcaatacaattt

SEQ ID NO: 90864 - DNA, 25 bp, probe
tcacattcattccataggtagcttt

SEQ ID NO: 90865 - DNA, 25 bp, probe
ctccaggatacaaaccatagtaggc

SEQ ID NO: 90866 - DNA, 25 bp, probe
cattcattccataggtagctttacg

SEQ ID NO: 90867 - DNA, 25 bp, probe
tacttctcacagctcaaagataaca

SEQ ID NO: 90868 - DNA, 25 bp, probe
cttctcacagctcaaagataacagt

SEQ ID NO: 90869 - DNA, 25 bp, probe
acttctcacagctcaaagataacag

SEQ ID NO: 90870 - DNA, 25 bp, probe
aacgtgttaattgtgtggaatgaaa

SEQ ID NO: 90871 - DNA, 25 bp, probe
aaacgtgttaattgtgtggaatgaa

SEQ ID NO: 90872 - DNA, 25 bp, probe
attcattccataggtagctttacgt

SEQ ID NO: 90873 - DNA, 25 bp, probe
gagaaacgtgttaattgtgtggaat

SEQ ID NO: 90874 - DNA, 25 bp, probe
cacattcattccataggtagcttta

SEQ ID NO: 90875 - DNA, 25 bp, probe
gaaacgtgttaattgtgtggaatga

SEQ ID NO: 90876 - DNA, 25 bp, probe
agaaacgtgttaattgtgtggaatg

SEQ ID NO: 90877 - DNA, 25 bp, probe
attggagaaacgtgttaattgtgtg

SEQ ID NO: 90878 - DNA, 25 bp, probe
acattcattccataggtagctttac

SEQ ID NO: 90879 - DNA, 25 bp, probe
ttcattccataggtagctttacgtg

SEQ ID NO: 90880 - DNA, 25 bp, probe
tccaggatacaaaccatagtaggca

SEQ ID NO: 90881 - DNA, 25 bp, probe
atacttctcacagctcaaagataac

SEQ ID NO: 90882 - DNA, 25 bp, probe
caataatccattgtttgaggtgctt

SEQ ID NO: 90883 - DNA, 25 bp, probe
tgtagactccaggatacaaaccata

SEQ ID NO: 90884 - DNA, 25 bp, probe
ttctgaagtgtttgacatttaaccc

SEQ ID NO: 90885 - DNA, 25 bp, probe
tctgaagtgtttgacatttaaccca

SEQ ID NO: 90886 - DNA, 25 bp, probe
ctgaagtgtttgacatttaacccag

SEQ ID NO: 90887 - DNA, 25 bp, probe
tttcgtggaagttcagatgttgatc

SEQ ID NO: 90888 - DNA, 25 bp, probe
cttctgaagtgtttgacatttaacc

SEQ ID NO: 90889 - DNA, 25 bp, probe
tgaagtgtttgacatttaacccagc

SEQ ID NO: 90890 - DNA, 25 bp, probe
gtaacagatatcgatgaactaggca

SEQ ID NO: 90891 - DNA, 25 bp, probe
tgtaacagatatcgatgaactaggc

SEQ ID NO: 90892 - DNA, 25 bp, probe
taacagatatcgatgaactaggcaa

SEQ ID NO: 90893 - DNA, 25 bp, probe
gaagtgtttgacatttaacccagcc

SEQ ID NO: 90894 - DNA, 25 bp, probe
gacatttaacccagccaaaagaata

SEQ ID NO: 90895 - DNA, 25 bp, probe
gaagaagactggcctagagatgttg

SEQ ID NO: 90896 - DNA, 25 bp, probe
acatttaacccagccaaaagaatat

SEQ ID NO: 90897 - DNA, 25 bp, probe
agaagaagactggcctagagatgtt

SEQ ID NO: 90898 - DNA, 25 bp, probe
ttgtaacagatatcgatgaactagg

SEQ ID NO: 90899 - DNA, 25 bp, probe
catttaacccagccaaaagaatatc

SEQ ID NO: 90900 - DNA, 25 bp, probe
tgacatttaacccagccaaaagaat

SEQ ID NO: 90901 - DNA, 25 bp, probe
gatgaactaggcaaagacctacttc

SEQ ID NO: 90902 - DNA, 25 bp, probe
ttgagaagtttgtaacagatatcga

SEQ ID NO: 90903 - DNA, 25 bp, probe
atgaactaggcaaagacctacttct

SEQ ID NO: 90904 - DNA, 25 bp, probe
atttaacccagccaaaagaatatct

SEQ ID NO: 90905 - DNA, 25 bp, probe
gagaagaagactggcctagagatgt

SEQ ID NO: 90906 - DNA, 25 bp, probe
aactaggcaaagacctacttctgaa

SEQ ID NO: 90907 - DNA, 25 bp, probe
agtgtttgacatttaacccagccaa

SEQ ID NO: 90908 - DNA, 25 bp, probe
aagtgtttgacatttaacccagcca

SEQ ID NO: 90909 - DNA, 25 bp, probe
ttcattcaaaatctgcccaaccaat

SEQ ID NO: 90910 - DNA, 25 bp, probe
ttttcgtggaagttcagatgttgat

SEQ ID NO: 90911 - DNA, 25 bp, probe
ccaaccaattgagaagtttgtaaca

SEQ ID NO: 90912 - DNA, 25 bp, probe
ttgacatttaacccagccaaaagaa

SEQ ID NO: 90913 - DNA, 25 bp, probe
tttcattcaaaatctgcccaaccaa

SEQ ID NO: 90914 - DNA, 25 bp, probe
ttcgtggaagttcagatgttgatca

SEQ ID NO: 90915 - DNA, 25 bp, probe
cccaaccaattgagaagtttgtaac

SEQ ID NO: 90916 - DNA, 25 bp, probe
tcattcaaaatctgcccaaccaatt

SEQ ID NO: 90917 - DNA, 25 bp, probe
tttaacccagccaaaagaatatctg

SEQ ID NO: 90918 - DNA, 25 bp, probe
gaactaggcaaagacctacttctga

SEQ ID NO: 90919 - DNA, 25 bp, probe
caaccaattgagaagtttgtaacag

SEQ ID NO: 90920 - DNA, 25 bp, probe
actaggcaaagacctacttctgaag

SEQ ID NO: 90921 - DNA, 25 bp, probe
aaccaattgagaagtttgtaacaga

SEQ ID NO: 90922 - DNA, 25 bp, probe
tgaactaggcaaagacctacttctg

SEQ ID NO: 90923 - DNA, 25 bp, probe
accaattgagaagtttgtaacagat

SEQ ID NO: 90924 - DNA, 25 bp, probe
aaagaatatctgcctacagtgccct

SEQ ID NO: 90925 - DNA, 25 bp, probe
aacagatatcgatgaactaggcaaa

SEQ ID NO: 90926 - DNA, 25 bp, probe
agatatcgatgaactaggcaaagac

SEQ ID NO: 90927 - DNA, 25 bp, probe
cagatatcgatgaactaggcaaaga

SEQ ID NO: 90928 - DNA, 25 bp, probe
cattgctgacacatgagactaacac

SEQ ID NO: 90929 - DNA, 25 bp, probe
attgctgacacatgagactaacacg

SEQ ID NO: 90930 - DNA, 25 bp, probe
gcattgctgacacatgagactaaca

SEQ ID NO: 90931 - DNA, 25 bp, probe
aaaagatttcaataaaactgcctgg

SEQ ID NO: 90932 - DNA, 25 bp, probe
gatcactgaaccagacacagcattg

SEQ ID NO: 90933 - DNA, 25 bp, probe
aaagatttcaataaaactgcctggc

SEQ ID NO: 90934 - DNA, 25 bp, probe
aagatttcaataaaactgcctggct

SEQ ID NO: 90935 - DNA, 25 bp, probe
agcattgctgacacatgagactaac

SEQ ID NO: 90936 - DNA, 25 bp, probe
agatttcaataaaactgcctggctg

SEQ ID NO: 90937 - DNA, 25 bp, probe
ttgctgacacatgagactaacacgt

SEQ ID NO: 90938 - DNA, 25 bp, probe
gcaagatcaagctcttagacacacc

SEQ ID NO: 90939 - DNA, 25 bp, probe
ggcaagatcaagctcttagacacac

SEQ ID NO: 90940 - DNA, 25 bp, probe
gtggcaagatcaagctcttagacac

SEQ ID NO: 90941 - DNA, 25 bp, probe
agatcaagctcttagacacacccag

SEQ ID NO: 90942 - DNA, 25 bp, probe
tggcaagatcaagctcttagacaca

SEQ ID NO: 90943 - DNA, 25 bp, probe
ggatcactgaaccagacacagcatt

SEQ ID NO: 90944 - DNA, 25 bp, probe
gatttcaataaaactgcctggctgg

SEQ ID NO: 90945 - DNA, 25 bp, probe
caagatcaagctcttagacacaccc

SEQ ID NO: 90946 - DNA, 25 bp, probe
aagatcaagctcttagacacaccca

SEQ ID NO: 90947 - DNA, 25 bp, probe
ggtggcaagatcaagctcttagaca

SEQ ID NO: 90948 - DNA, 25 bp, probe
ttcaggacaccctgtaagaacagag

SEQ ID NO: 90949 - DNA, 25 bp, probe
cttcaggacaccctgtaagaacaga

SEQ ID NO: 90950 - DNA, 25 bp, probe
accctgtaagaacagagcacacttg

SEQ ID NO: 90951 - DNA, 25 bp, probe
caccctgtaagaacagagcacactt

SEQ ID NO: 90952 - DNA, 25 bp, probe
aaattacccagcacctggaatggat

SEQ ID NO: 90953 - DNA, 25 bp, probe
ccttcaggacaccctgtaagaacag

SEQ ID NO: 90954 - DNA, 25 bp, probe
aattacccagcacctggaatggatc

SEQ ID NO: 90955 - DNA, 25 bp, probe
atttcaataaaactgcctggctggc

SEQ ID NO: 90956 - DNA, 25 bp, probe
gaaattacccagcacctggaatgga

SEQ ID NO: 90957 - DNA, 25 bp, probe
aacatcatcaatctcttaggagcat

SEQ ID NO: 90958 - DNA, 25 bp, probe
atcatcaatctcttaggagcatgtg

SEQ ID NO: 90959 - DNA, 25 bp, probe
catcatcaatctcttaggagcatgt

SEQ ID NO: 90960 - DNA, 25 bp, probe
acatcatcaatctcttaggagcatg

SEQ ID NO: 90961 - DNA, 25 bp, probe
aatctcttaggagcatgtgaacatc

SEQ ID NO: 90962 - DNA, 25 bp, probe
atcaatctcttaggagcatgtgaac

SEQ ID NO: 90963 - DNA, 25 bp, probe
catcaatctcttaggagcatgtgaa

SEQ ID NO: 90964 - DNA, 25 bp, probe
caatctcttaggagcatgtgaacat

SEQ ID NO: 90965 - DNA, 25 bp, probe
tcatcaatctcttaggagcatgtga

SEQ ID NO: 90966 - DNA, 25 bp, probe
tttgatgagttgtgagtttaccttg

SEQ ID NO: 90967 - DNA, 25 bp, probe
tgatgagttgtgagtttaccttgta

SEQ ID NO: 90968 - DNA, 25 bp, probe
accatccaaacatcatcaatctctt

SEQ ID NO: 90969 - DNA, 25 bp, probe
ttgatgagttgtgagtttaccttgt

SEQ ID NO: 90970 - DNA, 25 bp, probe
tcaatctcttaggagcatgtgaaca

SEQ ID NO: 90971 - DNA, 25 bp, probe
atgagtgaataaatgtcttgcctac

SEQ ID NO: 90972 - DNA, 25 bp, probe
ccatccaaacatcatcaatctctta

SEQ ID NO: 90973 - DNA, 25 bp, probe
caccatccaaacatcatcaatctct

SEQ ID NO: 90974 - DNA, 25 bp, probe
gatgagttgtgagtttaccttgtat

SEQ ID NO: 90975 - DNA, 25 bp, probe
acaccatccaaacatcatcaatctc

SEQ ID NO: 90976 - DNA, 25 bp, probe
gacaccatccaaacatcatcaatct

SEQ ID NO: 90977 - DNA, 25 bp, probe
atccaaacatcatcaatctcttagg

SEQ ID NO: 90978 - DNA, 25 bp, probe
agtgaataaatgtcttgcctactca

SEQ ID NO: 90979 - DNA, 25 bp, probe
tgagtgaataaatgtcttgcctact

SEQ ID NO: 90980 - DNA, 25 bp, probe
gtgaataaatgtcttgcctactcaa

SEQ ID NO: 90981 - DNA, 25 bp, probe
aaacatcatcaatctcttaggagca

SEQ ID NO: 90982 - DNA, 25 bp, probe
tataccctctgtttccctttcactg

SEQ ID NO: 90983 - DNA, 25 bp, probe
caaacatcatcaatctcttaggagc

SEQ ID NO: 90984 - DNA, 25 bp, probe
ccaaacatcatcaatctcttaggag

SEQ ID NO: 90985 - DNA, 25 bp, probe
atctcttaggagcatgtgaacatcg

SEQ ID NO: 90986 - DNA, 25 bp, probe
tgaataaatgtcttgcctactcaaa

SEQ ID NO: 90987 - DNA, 25 bp, probe
ttaagaaataacagaaagcctgggt

SEQ ID NO: 90988 - DNA, 25 bp, probe
tttaagaaataacagaaagcctggg

SEQ ID NO: 90989 - DNA, 25 bp, probe
gccaaaggatgtgatatataagtgt

SEQ ID NO: 90990 - DNA, 25 bp, probe
tgccaaaggatgtgatatataagtg

SEQ ID NO: 90991 - DNA, 25 bp, probe
ttagtcatgtgaccactctgtcttg

SEQ ID NO: 90992 - DNA, 25 bp, probe
catccaaacatcatcaatctcttag

SEQ ID NO: 90993 - DNA, 25 bp, probe
catgagtgaataaatgtcttgccta

SEQ ID NO: 90994 - DNA, 25 bp, probe
ctgccaaaggatgtgatatataagt

SEQ ID NO: 90995 - DNA, 25 bp, probe
taagaaataacagaaagcctgggtg

SEQ ID NO: 90996 - DNA, 25 bp, probe
atgagttgtgagtttaccttgtata

SEQ ID NO: 90997 - DNA, 25 bp, probe
taccttgtatactgtaggcacactt

SEQ ID NO: 90998 - DNA, 25 bp, probe
ttaccttgtatactgtaggcacact

SEQ ID NO: 90999 - DNA, 25 bp, probe
tcattgcttacaagcctaagaatct

SEQ ID NO: 91000 - DNA, 25 bp, probe
ctcattgcttacaagcctaagaatc

SEQ ID NO: 91001 - DNA, 25 bp, probe
tggttagtacattctcagaggattc

SEQ ID NO: 91002 - DNA, 25 bp, probe
aaggagttggattgctgaattacaa

SEQ ID NO: 91003 - DNA, 25 bp, probe
ggttagtacattctcagaggattct

SEQ ID NO: 91004 - DNA, 25 bp, probe
cacttattcagaacattacatgcct

SEQ ID NO: 91005 - DNA, 25 bp, probe
tcacttattcagaacattacatgcc

SEQ ID NO: 91006 - DNA, 25 bp, probe
tattcagaacattacatgccttcaa

SEQ ID NO: 91007 - DNA, 25 bp, probe
ttattcagaacattacatgccttca

SEQ ID NO: 91008 - DNA, 25 bp, probe
acttattcagaacattacatgcctt

SEQ ID NO: 91009 - DNA, 25 bp, probe
ctggttagtacattctcagaggatt

SEQ ID NO: 91010 - DNA, 25 bp, probe
actcctggttagtacattctcagag

SEQ ID NO: 91011 - DNA, 25 bp, probe
cttattcagaacattacatgccttc

SEQ ID NO: 91012 - DNA, 25 bp, probe
cctggttagtacattctcagaggat

SEQ ID NO: 91013 - DNA, 25 bp, probe
attgtactataccagtaagtgccac

SEQ ID NO: 91014 - DNA, 25 bp, probe
gattgtactataccagtaagtgcca

SEQ ID NO: 91015 - DNA, 25 bp, probe
tactcctggttagtacattctcaga

SEQ ID NO: 91016 - DNA, 25 bp, probe
ggtcttaactttaggtaactctgct

SEQ ID NO: 91017 - DNA, 25 bp, probe
gctggtcttaactttaggtaactct

SEQ ID NO: 91018 - DNA, 25 bp, probe
ggattgtactataccagtaagtgcc

SEQ ID NO: 91019 - DNA, 25 bp, probe
tggtcttaactttaggtaactctgc

SEQ ID NO: 91020 - DNA, 25 bp, probe
tgctggtcttaactttaggtaactc

SEQ ID NO: 91021 - DNA, 25 bp, probe
ttgctggtcttaactttaggtaact

SEQ ID NO: 91022 - DNA, 25 bp, probe
atgattgctggtcttaactttaggt

SEQ ID NO: 91023 - DNA, 25 bp, probe
gatgattgctggtcttaactttagg

SEQ ID NO: 91024 - DNA, 25 bp, probe
tgattgctggtcttaactttaggta

SEQ ID NO: 91025 - DNA, 25 bp, probe
ttcacttattcagaacattacatgc

SEQ ID NO: 91026 - DNA, 25 bp, probe
ttactcctggttagtacattctcag

SEQ ID NO: 91027 - DNA, 25 bp, probe
cttaactttaggtaactctgctgtg

SEQ ID NO: 91028 - DNA, 25 bp, probe
tcttaactttaggtaactctgctgt

SEQ ID NO: 91029 - DNA, 25 bp, probe
gtcttaactttaggtaactctgctg

SEQ ID NO: 91030 - DNA, 25 bp, probe
gagttggattgctgaattacaatga

SEQ ID NO: 91031 - DNA, 25 bp, probe
ctcctggttagtacattctcagagg

SEQ ID NO: 91032 - DNA, 25 bp, probe
ttaactttaggtaactctgctgtgc

SEQ ID NO: 91033 - DNA, 25 bp, probe
attgctggtcttaactttaggtaac

SEQ ID NO: 91034 - DNA, 25 bp, probe
agttggattgctgaattacaatgaa

SEQ ID NO: 91035 - DNA, 25 bp, probe
aaaggagttggattgctgaattaca

SEQ ID NO: 91036 - DNA, 25 bp, probe
ggagttggattgctgaattacaatg

SEQ ID NO: 91037 - DNA, 25 bp, probe
aggagttggattgctgaattacaat

SEQ ID NO: 91038 - DNA, 25 bp, probe
gattgctggtcttaactttaggtaa

SEQ ID NO: 91039 - DNA, 25 bp, probe
ctggtcttaactttaggtaactctg

SEQ ID NO: 91040 - DNA, 25 bp, probe
caaaggagttggattgctgaattac

SEQ ID NO: 91041 - DNA, 25 bp, probe
taactttaggtaactctgctgtgct

SEQ ID NO: 91042 - DNA, 25 bp, probe
agaaagtgatttactcctggttagt

SEQ ID NO: 91043 - DNA, 25 bp, probe
ttgtactataccagtaagtgccact

SEQ ID NO: 91044 - DNA, 25 bp, probe
agatgattgctggtcttaactttag

SEQ ID NO: 91045 - DNA, 25 bp, probe
caccttatccagttagacacataca

SEQ ID NO: 91046 - DNA, 25 bp, probe
acaccttatccagttagacacatac

SEQ ID NO: 91047 - DNA, 25 bp, probe
cacaccttatccagttagacacata

SEQ ID NO: 91048 - DNA, 25 bp, probe
tccagttagacacatacataccaat

SEQ ID NO: 91049 - DNA, 25 bp, probe
atccagttagacacatacataccaa

SEQ ID NO: 91050 - DNA, 25 bp, probe
ccattgttacaggagattataggct

SEQ ID NO: 91051 - DNA, 25 bp, probe
tgccattgttacaggagattatagg

SEQ ID NO: 91052 - DNA, 25 bp, probe
ccagttagacacatacataccaatc

SEQ ID NO: 91053 - DNA, 25 bp, probe
accttatccagttagacacatacat

SEQ ID NO: 91054 - DNA, 25 bp, probe
gtgccattgttacaggagattatag

SEQ ID NO: 91055 - DNA, 25 bp, probe
tatccagttagacacatacatacca

SEQ ID NO: 91056 - DNA, 25 bp, probe
cagttagacacatacataccaatca

SEQ ID NO: 91057 - DNA, 25 bp, probe
tgttacaggagattataggctagtc

SEQ ID NO: 91058 - DNA, 25 bp, probe
tgtgccattgttacaggagattata

SEQ ID NO: 91059 - DNA, 25 bp, probe
tatgtgccattgttacaggagatta

SEQ ID NO: 91060 - DNA, 25 bp, probe
ttatatgtgccattgttacaggaga

SEQ ID NO: 91061 - DNA, 25 bp, probe
atgtgccattgttacaggagattat

SEQ ID NO: 91062 - DNA, 25 bp, probe
atatgtgccattgttacaggagatt

SEQ ID NO: 91063 - DNA, 25 bp, probe
tatatgtgccattgttacaggagat

SEQ ID NO: 91064 - DNA, 25 bp, probe
ttgttacaggagattataggctagt

SEQ ID NO: 91065 - DNA, 25 bp, probe
ccacaccttatccagttagacacat

SEQ ID NO: 91066 - DNA, 25 bp, probe
gttacaggagattataggctagtct

SEQ ID NO: 91067 - DNA, 25 bp, probe
attatatgtgccattgttacaggag

SEQ ID NO: 91068 - DNA, 25 bp, probe
ttatccagttagacacatacatacc

SEQ ID NO: 91069 - DNA, 25 bp, probe
cattgttacaggagattataggcta

SEQ ID NO: 91070 - DNA, 25 bp, probe
agttagacacatacataccaatcat

SEQ ID NO: 91071 - DNA, 25 bp, probe
caggagattataggctagtctgtaa

SEQ ID NO: 91072 - DNA, 25 bp, probe
ttacaggagattataggctagtctg

SEQ ID NO: 91073 - DNA, 25 bp, probe
ccttatccagttagacacatacata

SEQ ID NO: 91074 - DNA, 25 bp, probe
aagacttgttgagagatgtgacatg

SEQ ID NO: 91075 - DNA, 25 bp, probe
caagacttgttgagagatgtgacat

SEQ ID NO: 91076 - DNA, 25 bp, probe
agacacatacataccaatcattaga

SEQ ID NO: 91077 - DNA, 25 bp, probe
aggagattataggctagtctgtaat

SEQ ID NO: 91078 - DNA, 25 bp, probe
gttgagagatgtgacatggttcttg

SEQ ID NO: 91079 - DNA, 25 bp, probe
agagatgtgacatggttcttggatt

SEQ ID NO: 91080 - DNA, 25 bp, probe
attgttacaggagattataggctag

SEQ ID NO: 91081 - DNA, 25 bp, probe
tattatatgtgccattgttacagga

SEQ ID NO: 91082 - DNA, 25 bp, probe
cataccaatcattagaagaacaagt

SEQ ID NO: 91083 - DNA, 25 bp, probe
acataccaatcattagaagaacaag

SEQ ID NO: 91084 - DNA, 25 bp, probe
ccattaagagagaaggacaaacatt

SEQ ID NO: 91085 - DNA, 25 bp, probe
cttgttgagagatgtgacatggttc

SEQ ID NO: 91086 - DNA, 25 bp, probe
ggctttgaaactgaacaagataact

SEQ ID NO: 91087 - DNA, 25 bp, probe
aggctttgaaactgaacaagataac

SEQ ID NO: 91088 - DNA, 25 bp, probe
caaggctttgaaactgaacaagata

SEQ ID NO: 91089 - DNA, 25 bp, probe
ctgaagtctgtctctagctcctctg

SEQ ID NO: 91090 - DNA, 25 bp, probe
gaagtctgtctctagctcctctgtg

SEQ ID NO: 91091 - DNA, 25 bp, probe
aagtctgtctctagctcctctgtga

SEQ ID NO: 91092 - DNA, 25 bp, probe
tgaagtctgtctctagctcctctgt

SEQ ID NO: 91093 - DNA, 25 bp, probe
cctgaagtctgtctctagctcctct

SEQ ID NO: 91094 - DNA, 25 bp, probe
tctgtctctagctcctctgtgactc

SEQ ID NO: 91095 - DNA, 25 bp, probe
tgtctctagctcctctgtgactcag

SEQ ID NO: 91096 - DNA, 25 bp, probe
ctgtctctagctcctctgtgactca

SEQ ID NO: 91097 - DNA, 25 bp, probe
gtctgtctctagctcctctgtgact

SEQ ID NO: 91098 - DNA, 25 bp, probe
agtctgtctctagctcctctgtgac

SEQ ID NO: 91099 - DNA, 25 bp, probe
tgtgactcagaggggaaataccaac

SEQ ID NO: 91100 - DNA, 25 bp, probe
gattggctggtttccttcaacgtac

SEQ ID NO: 91101 - DNA, 25 bp, probe
gcagattttcttgggagagtcactc

SEQ ID NO: 91102 - DNA, 25 bp, probe
ctgtgactcagaggggaaataccaa

SEQ ID NO: 91103 - DNA, 25 bp, probe
gtctctagctcctctgtgactcaga

SEQ ID NO: 91104 - DNA, 25 bp, probe
gtgactcagaggggaaataccaacc

SEQ ID NO: 91105 - DNA, 25 bp, probe
agactcgcagattttcttgggagag

SEQ ID NO: 91106 - DNA, 25 bp, probe
gtggacaagactcgcagattttctt

SEQ ID NO: 91107 - DNA, 25 bp, probe
ctcgcagattttcttgggagagtca

SEQ ID NO: 91108 - DNA, 25 bp, probe
tcgcagattttcttgggagagtcac

SEQ ID NO: 91109 - DNA, 25 bp, probe
cgcagattttcttgggagagtcact

SEQ ID NO: 91110 - DNA, 25 bp, probe
aagactcgcagattttcttgggaga

SEQ ID NO: 91111 - DNA, 25 bp, probe
tgactcagaggggaaataccaacct

SEQ ID NO: 91112 - DNA, 25 bp, probe
gattttcttgggagagtcactccag

SEQ ID NO: 91113 - DNA, 25 bp, probe
cagattttcttgggagagtcactcc

SEQ ID NO: 91114 - DNA, 25 bp, probe
tctgtgactcagaggggaaatacca

SEQ ID NO: 91115 - DNA, 25 bp, probe
agattttcttgggagagtcactcca

SEQ ID NO: 91116 - DNA, 25 bp, probe
actcgcagattttcttgggagagtc

SEQ ID NO: 91117 - DNA, 25 bp, probe
gactcgcagattttcttgggagagt

SEQ ID NO: 91118 - DNA, 25 bp, probe
gactcagaggggaaataccaacctc

SEQ ID NO: 91119 - DNA, 25 bp, probe
attttcttgggagagtcactccagc

SEQ ID NO: 91120 - DNA, 25 bp, probe
atagcgtcataactagaactgaatt

SEQ ID NO: 91121 - DNA, 25 bp, probe
aatagcgtcataactagaactgaat

SEQ ID NO: 91122 - DNA, 25 bp, probe
tctccttagaagtggaagtagtgga

SEQ ID NO: 91123 - DNA, 25 bp, probe
taatagcgtcataactagaactgaa

SEQ ID NO: 91124 - DNA, 25 bp, probe
ttaatagcgtcataactagaactga

SEQ ID NO: 91125 - DNA, 25 bp, probe
agtgagactttgagggtgtatattt

SEQ ID NO: 91126 - DNA, 25 bp, probe
attggatttgtctttggtgaacatt

SEQ ID NO: 91127 - DNA, 25 bp, probe
gattggatttgtctttggtgaacat

SEQ ID NO: 91128 - DNA, 25 bp, probe
tggattggatttgtctttggtgaac

SEQ ID NO: 91129 - DNA, 25 bp, probe
gtggattggatttgtctttggtgaa

SEQ ID NO: 91130 - DNA, 25 bp, probe
ttctccttagaagtggaagtagtgg

SEQ ID NO: 91131 - DNA, 25 bp, probe
ttggatttgtctttggtgaacattg

SEQ ID NO: 91132 - DNA, 25 bp, probe
tagcgtcataactagaactgaattt

SEQ ID NO: 91133 - DNA, 25 bp, probe
ggattggatttgtctttggtgaaca

SEQ ID NO: 91134 - DNA, 25 bp, probe
tccttagaagtggaagtagtggagc

SEQ ID NO: 91135 - DNA, 25 bp, probe
ccttagaagtggaagtagtggagcc

SEQ ID NO: 91136 - DNA, 25 bp, probe
tggatttgtctttggtgaacattgc

SEQ ID NO: 91137 - DNA, 25 bp, probe
ctttgagggtgtatattttctgtgc

SEQ ID NO: 91138 - DNA, 25 bp, probe
aaatgtgactcaagacttccagagc

SEQ ID NO: 91139 - DNA, 25 bp, probe
ggtggattggatttgtctttggtga

SEQ ID NO: 91140 - DNA, 25 bp, probe
tttaatagcgtcataactagaactg

SEQ ID NO: 91141 - DNA, 25 bp, probe
actttgagggtgtatattttctgtg

SEQ ID NO: 91142 - DNA, 25 bp, probe
gactttgagggtgtatattttctgt

SEQ ID NO: 91143 - DNA, 25 bp, probe
gtgagactttgagggtgtatatttt

SEQ ID NO: 91144 - DNA, 25 bp, probe
aagtgagactttgagggtgtatatt

SEQ ID NO: 91145 - DNA, 25 bp, probe
gacttccagagcctcaaatgagaaa

SEQ ID NO: 91146 - DNA, 25 bp, probe
tgagactttgagggtgtatattttc

SEQ ID NO: 91147 - DNA, 25 bp, probe
ctcaagacttccagagcctcaaatg

SEQ ID NO: 91148 - DNA, 25 bp, probe
aatgtgactcaagacttccagagcc

SEQ ID NO: 91149 - DNA, 25 bp, probe
agactttgagggtgtatattttctg

SEQ ID NO: 91150 - DNA, 25 bp, probe
aaaatgtgactcaagacttccagag

SEQ ID NO: 91151 - DNA, 25 bp, probe
gagactttgagggtgtatattttct

SEQ ID NO: 91152 - DNA, 25 bp, probe
tcaagacttccagagcctcaaatga

SEQ ID NO: 91153 - DNA, 25 bp, probe
gcgtcataactagaactgaattttg

SEQ ID NO: 91154 - DNA, 25 bp, probe
agcgtcataactagaactgaatttt

SEQ ID NO: 91155 - DNA, 25 bp, probe
actcaagacttccagagcctcaaat

SEQ ID NO: 91156 - DNA, 25 bp, probe
ctgtctcagtttacattttcggtat

SEQ ID NO: 91157 - DNA, 25 bp, probe
caagacttccagagcctcaaatgag

SEQ ID NO: 91158 - DNA, 25 bp, probe
tgtagaaagtgatccatacttcaaa

SEQ ID NO: 91159 - DNA, 25 bp, probe
gagcctcaaatgagaaaatgtcttt

SEQ ID NO: 91160 - DNA, 25 bp, probe
cttagaagtggaagtagtggagccc

SEQ ID NO: 91161 - DNA, 25 bp, probe
cactgttaagccatgtgttccaagg

SEQ ID NO: 91162 - DNA, 25 bp, probe
ccactgttaagccatgtgttccaag

SEQ ID NO: 91163 - DNA, 25 bp, probe
agagcctcaaatgagaaaatgtctt

SEQ ID NO: 91164 - DNA, 25 bp, probe
ttgtagatggcgatgtgttatagac

SEQ ID NO: 91165 - DNA, 25 bp, probe
tgtagatggcgatgtgttatagacg

SEQ ID NO: 91166 - DNA, 25 bp, probe
gtagatggcgatgtgttatagacgg

SEQ ID NO: 91167 - DNA, 25 bp, probe
tagatggcgatgtgttatagacggt

SEQ ID NO: 91168 - DNA, 25 bp, probe
cgagtgtagctgtgaaatccatata

SEQ ID NO: 91169 - DNA, 25 bp, probe
gatgtgttatagacggtgctcactc

SEQ ID NO: 91170 - DNA, 25 bp, probe
gacactgatgagtttcactgtactg

SEQ ID NO: 91171 - DNA, 25 bp, probe
tgacactgatgagtttcactgtact

SEQ ID NO: 91172 - DNA, 25 bp, probe
ctgacatcatcattcttgtgggaga

SEQ ID NO: 91173 - DNA, 25 bp, probe
tcgagtgtagctgtgaaatccatat

SEQ ID NO: 91174 - DNA, 25 bp, probe
atcgagtgtagctgtgaaatccata

SEQ ID NO: 91175 - DNA, 25 bp, probe
gagtgtagctgtgaaatccatatat

SEQ ID NO: 91176 - DNA, 25 bp, probe
acatcatcattcttgtgggagacag

SEQ ID NO: 91177 - DNA, 25 bp, probe
gacatcatcattcttgtgggagaca

SEQ ID NO: 91178 - DNA, 25 bp, probe
tgacatcatcattcttgtgggagac

SEQ ID NO: 91179 - DNA, 25 bp, probe
agatggcgatgtgttatagacggtg

SEQ ID NO: 91180 - DNA, 25 bp, probe
ctgatgagtttcactgtactgcatg

SEQ ID NO: 91181 - DNA, 25 bp, probe
cctgacatcatcattcttgtgggag

SEQ ID NO: 91182 - DNA, 25 bp, probe
gatcgagtgtagctgtgaaatccat

SEQ ID NO: 91183 - DNA, 25 bp, probe
atgtgttatagacggtgctcactcc

SEQ ID NO: 91184 - DNA, 25 bp, probe
actgatgagtttcactgtactgcat

SEQ ID NO: 91185 - DNA, 25 bp, probe
agtgtagctgtgaaatccatatata

SEQ ID NO: 91186 - DNA, 25 bp, probe
acactgatgagtttcactgtactgc

SEQ ID NO: 91187 - DNA, 25 bp, probe
atgccctgacatcatcattcttgtg

SEQ ID NO: 91188 - DNA, 25 bp, probe
tgatgagtttcactgtactgcatgt

SEQ ID NO: 91189 - DNA, 25 bp, probe
gatgagtttcactgtactgcatgtg

SEQ ID NO: 91190 - DNA, 25 bp, probe
gacagcaagtgagcagagatgtact

SEQ ID NO: 91191 - DNA, 25 bp, probe
catcatcattcttgtgggagacagc

SEQ ID NO: 91192 - DNA, 25 bp, probe
cgatgtgttatagacggtgctcact

SEQ ID NO: 91193 - DNA, 25 bp, probe
gtggatcgagtgtagctgtgaaatc

SEQ ID NO: 91194 - DNA, 25 bp, probe
acagcaagtgagcagagatgtactg

SEQ ID NO: 91195 - DNA, 25 bp, probe
cactgatgagtttcactgtactgca

SEQ ID NO: 91196 - DNA, 25 bp, probe
cttacctttcctgatgccctgacat

SEQ ID NO: 91197 - DNA, 25 bp, probe
atcatcattcttgtgggagacagca

SEQ ID NO: 91198 - DNA, 25 bp, probe
gttatagacggtgctcactcccaag

SEQ ID NO: 91199 - DNA, 25 bp, probe
gtgtagctgtgaaatccatatatat

SEQ ID NO: 91200 - DNA, 25 bp, probe
gatgccctgacatcatcattcttgt

SEQ ID NO: 91201 - DNA, 25 bp, probe
tcatcattcttgtgggagacagcag

SEQ ID NO: 91202 - DNA, 25 bp, probe
gtgacactgatgagtttcactgtac

SEQ ID NO: 91203 - DNA, 25 bp, probe
ttcactgtactgcatgtgacttctc

SEQ ID NO: 91204 - DNA, 25 bp, probe
tgtgacactgatgagtttcactgta

SEQ ID NO: 91205 - DNA, 25 bp, probe
tgccctgacatcatcattcttgtgg

SEQ ID NO: 91206 - DNA, 25 bp, probe
cgtggatcgagtgtagctgtgaaat

SEQ ID NO: 91207 - DNA, 25 bp, probe
ccctgacatcatcattcttgtggga

SEQ ID NO: 91208 - DNA, 25 bp, probe
cagacatcaatgcagtgaatgaaca

SEQ ID NO: 91209 - DNA, 25 bp, probe
cgtgatattgtacagaagctattgc

SEQ ID NO: 91210 - DNA, 25 bp, probe
ccgtgatattgtacagaagctattg

SEQ ID NO: 91211 - DNA, 25 bp, probe
gtgatattgtacagaagctattgca

SEQ ID NO: 91212 - DNA, 25 bp, probe
gatattgtacagaagctattgcagt

SEQ ID NO: 91213 - DNA, 25 bp, probe
tgatattgtacagaagctattgcag

SEQ ID NO: 91214 - DNA, 25 bp, probe
tacagaagctattgcagtacaaggc

SEQ ID NO: 91215 - DNA, 25 bp, probe
gtacagaagctattgcagtacaagg

SEQ ID NO: 91216 - DNA, 25 bp, probe
atattgtacagaagctattgcagta

SEQ ID NO: 91217 - DNA, 25 bp, probe
tattgcagtacaaggcagacatcaa

SEQ ID NO: 91218 - DNA, 25 bp, probe
ctattgcagtacaaggcagacatca

SEQ ID NO: 91219 - DNA, 25 bp, probe
attgcagtacaaggcagacatcaat

SEQ ID NO: 91220 - DNA, 25 bp, probe
tattgtacagaagctattgcagtac

SEQ ID NO: 91221 - DNA, 25 bp, probe
gcagacatcaatgcagtgaatgaac

SEQ ID NO: 91222 - DNA, 25 bp, probe
ttgcagtacaaggcagacatcaatg

SEQ ID NO: 91223 - DNA, 25 bp, probe
gctattgcagtacaaggcagacatc

SEQ ID NO: 91224 - DNA, 25 bp, probe
gaagctattgcagtacaaggcagac

SEQ ID NO: 91225 - DNA, 25 bp, probe
cagaagctattgcagtacaaggcag

SEQ ID NO: 91226 - DNA, 25 bp, probe
ggcagacatcaatgcagtgaatgaa

SEQ ID NO: 91227 - DNA, 25 bp, probe
aaggcagacatcaatgcagtgaatg

SEQ ID NO: 91228 - DNA, 25 bp, probe
caaggcagacatcaatgcagtgaat

SEQ ID NO: 91229 - DNA, 25 bp, probe
agaagctattgcagtacaaggcaga

SEQ ID NO: 91230 - DNA, 25 bp, probe
cagtacaaggcagacatcaatgcag

SEQ ID NO: 91231 - DNA, 25 bp, probe
agctattgcagtacaaggcagacat

SEQ ID NO: 91232 - DNA, 25 bp, probe
gtacaaggcagacatcaatgcagtg

SEQ ID NO: 91233 - DNA, 25 bp, probe
tacaaggcagacatcaatgcagtga

SEQ ID NO: 91234 - DNA, 25 bp, probe
agtacaaggcagacatcaatgcagt

SEQ ID NO: 91235 - DNA, 25 bp, probe
aagctattgcagtacaaggcagaca

SEQ ID NO: 91236 - DNA, 25 bp, probe
acagaagctattgcagtacaaggca

SEQ ID NO: 91237 - DNA, 25 bp, probe
aggcagacatcaatgcagtgaatga

SEQ ID NO: 91238 - DNA, 25 bp, probe
aagccagaagccaaataaactcaaa

SEQ ID NO: 91239 - DNA, 25 bp, probe
gaagccagaagccaaataaactcaa

SEQ ID NO: 91240 - DNA, 25 bp, probe
cttaggaggagtcacagcatacact

SEQ ID NO: 91241 - DNA, 25 bp, probe
gtgaagccagaagccaaataaactc

SEQ ID NO: 91242 - DNA, 25 bp, probe
cagtgaagccagaagccaaataaac

SEQ ID NO: 91243 - DNA, 25 bp, probe
ttaggaggagtcacagcatacactg

SEQ ID NO: 91244 - DNA, 25 bp, probe
agtgaagccagaagccaaataaact

SEQ ID NO: 91245 - DNA, 25 bp, probe
tgaagccagaagccaaataaactca

SEQ ID NO: 91246 - DNA, 25 bp, probe
ccagaagccaaataaactcaaaagc

SEQ ID NO: 91247 - DNA, 25 bp, probe
gccagaagccaaataaactcaaaag

SEQ ID NO: 91248 - DNA, 25 bp, probe
agccagaagccaaataaactcaaaa

SEQ ID NO: 91249 - DNA, 25 bp, probe
ccagtgaagccagaagccaaataaa

SEQ ID NO: 91250 - DNA, 25 bp, probe
ccttaggaggagtcacagcatacac

SEQ ID NO: 91251 - DNA, 25 bp, probe
caaataaactcaaaagctgtctccc

SEQ ID NO: 91252 - DNA, 25 bp, probe
ccaaataaactcaaaagctgtctcc

SEQ ID NO: 91253 - DNA, 25 bp, probe
atccagtgaagccagaagccaaata

SEQ ID NO: 91254 - DNA, 25 bp, probe
gccaaataaactcaaaagctgtctc

SEQ ID NO: 91255 - DNA, 25 bp, probe
aaataaactcaaaagctgtctcccc

SEQ ID NO: 91256 - DNA, 25 bp, probe
tccagtgaagccagaagccaaataa

SEQ ID NO: 91257 - DNA, 25 bp, probe
gaggagtcacagcatacactggaac

SEQ ID NO: 91258 - DNA, 25 bp, probe
gtcacagcatacactggaacaggag

SEQ ID NO: 91259 - DNA, 25 bp, probe
gagtcacagcatacactggaacagg

SEQ ID NO: 91260 - DNA, 25 bp, probe
ggagtcacagcatacactggaacag

SEQ ID NO: 91261 - DNA, 25 bp, probe
taggaggagtcacagcatacactgg

SEQ ID NO: 91262 - DNA, 25 bp, probe
agaagccaaataaactcaaaagctg

SEQ ID NO: 91263 - DNA, 25 bp, probe
cagaagccaaataaactcaaaagct

SEQ ID NO: 91264 - DNA, 25 bp, probe
aagccaaataaactcaaaagctgtc

SEQ ID NO: 91265 - DNA, 25 bp, probe
gaagccaaataaactcaaaagctgt

SEQ ID NO: 91266 - DNA, 25 bp, probe
agccaaataaactcaaaagctgtct

SEQ ID NO: 91267 - DNA, 25 bp, probe
attgatccctggagctttgtgtcag

SEQ ID NO: 91268 - DNA, 25 bp, probe
cattgatccctggagctttgtgtca

SEQ ID NO: 91269 - DNA, 25 bp, probe
cacttttgaccaagtcctgctactg

SEQ ID NO: 91270 - DNA, 25 bp, probe
cacatttcctttctactctttctgc

SEQ ID NO: 91271 - DNA, 25 bp, probe
atttcctttctactctttctgccaa

SEQ ID NO: 91272 - DNA, 25 bp, probe
ccacatttcctttctactctttctg

SEQ ID NO: 91273 - DNA, 25 bp, probe
tccacatttcctttctactctttct

SEQ ID NO: 91274 - DNA, 25 bp, probe
ggaaacacggtatttaagagagaac

SEQ ID NO: 91275 - DNA, 25 bp, probe
gggaaacacggtatttaagagagaa

SEQ ID NO: 91276 - DNA, 25 bp, probe
gttccacatttcctttctactcttt

SEQ ID NO: 91277 - DNA, 25 bp, probe
catttcctttctactctttctgcca

SEQ ID NO: 91278 - DNA, 25 bp, probe
acatttcctttctactctttctgcc

SEQ ID NO: 91279 - DNA, 25 bp, probe
ttccacatttcctttctactctttc

SEQ ID NO: 91280 - DNA, 25 bp, probe
ctgggaaacacggtatttaagagag

SEQ ID NO: 91281 - DNA, 25 bp, probe
tttcctttctactctttctgccaag

SEQ ID NO: 91282 - DNA, 25 bp, probe
gaaacacggtatttaagagagaact

SEQ ID NO: 91283 - DNA, 25 bp, probe
tgggaaacacggtatttaagagaga

SEQ ID NO: 91284 - DNA, 25 bp, probe
tgttccacatttcctttctactctt

SEQ ID NO: 91285 - DNA, 25 bp, probe
ttgttccacatttcctttctactct

SEQ ID NO: 91286 - DNA, 25 bp, probe
tttgttccacatttcctttctactc

SEQ ID NO: 91287 - DNA, 25 bp, probe
cctgggaaacacggtatttaagaga

SEQ ID NO: 91288 - DNA, 25 bp, probe
aaacacggtatttaagagagaacta

SEQ ID NO: 91289 - DNA, 25 bp, probe
tcctgggaaacacggtatttaagag

SEQ ID NO: 91290 - DNA, 25 bp, probe
aacacggtatttaagagagaactat

SEQ ID NO: 91291 - DNA, 25 bp, probe
agaagtaatcctgagaaatgtttca

SEQ ID NO: 91292 - DNA, 25 bp, probe
gtcctgggaaacacggtatttaaga

SEQ ID NO: 91293 - DNA, 25 bp, probe
ttgtcctgggaaacacggtatttaa

SEQ ID NO: 91294 - DNA, 25 bp, probe
tttgtcctgggaaacacggtattta

SEQ ID NO: 91295 - DNA, 25 bp, probe
cagaagtaatcctgagaaatgtttc

SEQ ID NO: 91296 - DNA, 25 bp, probe
acacggtatttaagagagaactata

SEQ ID NO: 91297 - DNA, 25 bp, probe
tgaaggtcagaagtaatcctgagaa

SEQ ID NO: 91298 - DNA, 25 bp, probe
tgtcctgggaaacacggtatttaag

SEQ ID NO: 91299 - DNA, 25 bp, probe
atttgtcctgggaaacacggtattt

SEQ ID NO: 91300 - DNA, 25 bp, probe
ctgaaggtcagaagtaatcctgaga

SEQ ID NO: 91301 - DNA, 25 bp, probe
tattggtattaaagctggtttgttt

SEQ ID NO: 91302 - DNA, 25 bp, probe
ttcctttctactctttctgccaaga

SEQ ID NO: 91303 - DNA, 25 bp, probe
atattggtattaaagctggtttgtt

SEQ ID NO: 91304 - DNA, 25 bp, probe
ttccattttgttccacatttccttt

SEQ ID NO: 91305 - DNA, 25 bp, probe
attccattttgttccacatttcctt

SEQ ID NO: 91306 - DNA, 25 bp, probe
atccattccattttgttccacattt

SEQ ID NO: 91307 - DNA, 25 bp, probe
ccattttgttccacatttcctttct

SEQ ID NO: 91308 - DNA, 25 bp, probe
tccattttgttccacatttcctttc

SEQ ID NO: 91309 - DNA, 25 bp, probe
cattccattttgttccacatttcct

SEQ ID NO: 91310 - DNA, 25 bp, probe
tccattccattttgttccacatttc

SEQ ID NO: 91311 - DNA, 25 bp, probe
catccattccattttgttccacatt

SEQ ID NO: 91312 - DNA, 25 bp, probe
ttttgttccacatttcctttctact

SEQ ID NO: 91313 - DNA, 25 bp, probe
catttgtcctgggaaacacggtatt

SEQ ID NO: 91314 - DNA, 25 bp, probe
cacttctaagcactgagttaggagt

SEQ ID NO: 91315 - DNA, 25 bp, probe
atttctgcctcactttatgtcatct

SEQ ID NO: 91316 - DNA, 25 bp, probe
catttctgcctcactttatgtcatc

SEQ ID NO: 91317 - DNA, 25 bp, probe
tatgtcttaccagatagagttgcag

SEQ ID NO: 91318 - DNA, 25 bp, probe
tttctgcctcactttatgtcatctg

SEQ ID NO: 91319 - DNA, 25 bp, probe
ttatgtcttaccagatagagttgca

SEQ ID NO: 91320 - DNA, 25 bp, probe
ctcactttatgtcatctgcttctcc

SEQ ID NO: 91321 - DNA, 25 bp, probe
cctcactttatgtcatctgcttctc

SEQ ID NO: 91322 - DNA, 25 bp, probe
ccacttctaagcactgagttaggag

SEQ ID NO: 91323 - DNA, 25 bp, probe
tttatgtcttaccagatagagttgc

SEQ ID NO: 91324 - DNA, 25 bp, probe
atgtcttaccagatagagttgcagg

SEQ ID NO: 91325 - DNA, 25 bp, probe
tcactttatgtcatctgcttctccc

SEQ ID NO: 91326 - DNA, 25 bp, probe
ctcaactgtcactttatggactgtc

SEQ ID NO: 91327 - DNA, 25 bp, probe
ttatggactgtctgtgcaattacgt

SEQ ID NO: 91328 - DNA, 25 bp, probe
caactgtcactttatggactgtctg

SEQ ID NO: 91329 - DNA, 25 bp, probe
tcaactgtcactttatggactgtct

SEQ ID NO: 91330 - DNA, 25 bp, probe
aactgtcactttatggactgtctgt

SEQ ID NO: 91331 - DNA, 25 bp, probe
ctttatggactgtctgtgcaattac

SEQ ID NO: 91332 - DNA, 25 bp, probe
actttatggactgtctgtgcaatta

SEQ ID NO: 91333 - DNA, 25 bp, probe
gcctcactttatgtcatctgcttct

SEQ ID NO: 91334 - DNA, 25 bp, probe
tgcctcactttatgtcatctgcttc

SEQ ID NO: 91335 - DNA, 25 bp, probe
ctgcctcactttatgtcatctgctt

SEQ ID NO: 91336 - DNA, 25 bp, probe
ttctgcctcactttatgtcatctgc

SEQ ID NO: 91337 - DNA, 25 bp, probe
cctcaactgtcactttatggactgt

SEQ ID NO: 91338 - DNA, 25 bp, probe
tttatggactgtctgtgcaattacg

SEQ ID NO: 91339 - DNA, 25 bp, probe
actgtcactttatggactgtctgtg

SEQ ID NO: 91340 - DNA, 25 bp, probe
tatggactgtctgtgcaattacgtc

SEQ ID NO: 91341 - DNA, 25 bp, probe
actcccagacagagcagaagtattt

SEQ ID NO: 91342 - DNA, 25 bp, probe
ccctcaactgtcactttatggactg

SEQ ID NO: 91343 - DNA, 25 bp, probe
tctgcctcactttatgtcatctgct

SEQ ID NO: 91344 - DNA, 25 bp, probe
cttaccagatagagttgcagggaag

SEQ ID NO: 91345 - DNA, 25 bp, probe
cactttatggactgtctgtgcaatt

SEQ ID NO: 91346 - DNA, 25 bp, probe
ctgaagcatttctgcctcactttat

SEQ ID NO: 91347 - DNA, 25 bp, probe
aagcatttctgcctcactttatgtc

SEQ ID NO: 91348 - DNA, 25 bp, probe
gaagcatttctgcctcactttatgt

SEQ ID NO: 91349 - DNA, 25 bp, probe
tgaagcatttctgcctcactttatg

SEQ ID NO: 91350 - DNA, 25 bp, probe
cccacttctaagcactgagttagga

SEQ ID NO: 91351 - DNA, 25 bp, probe
tcttaccagatagagttgcagggaa

SEQ ID NO: 91352 - DNA, 25 bp, probe
gcatttctgcctcactttatgtcat

SEQ ID NO: 91353 - DNA, 25 bp, probe
cactcccagacagagcagaagtatt

SEQ ID NO: 91354 - DNA, 25 bp, probe
ttaaaataaaagtccacccagtgct

SEQ ID NO: 91355 - DNA, 25 bp, probe
acttctaagcactgagttaggagtg

SEQ ID NO: 91356 - DNA, 25 bp, probe
ctgtcactttatggactgtctgtgc

SEQ ID NO: 91357 - DNA, 25 bp, probe
tcactttatggactgtctgtgcaat

SEQ ID NO: 91358 - DNA, 25 bp, probe
ttagagaattgatggagaagagagg

SEQ ID NO: 91359 - DNA, 25 bp, probe
caggatgtagagtagtgttagatga

SEQ ID NO: 91360 - DNA, 25 bp, probe
gattgtaatgtcctctccatcatcc

SEQ ID NO: 91361 - DNA, 25 bp, probe
attgtaatgtcctctccatcatcct

SEQ ID NO: 91362 - DNA, 25 bp, probe
ccttagagaattgatggagaagaga

SEQ ID NO: 91363 - DNA, 25 bp, probe
tagagaattgatggagaagagaggc

SEQ ID NO: 91364 - DNA, 25 bp, probe
ttgtaatgtcctctccatcatcctc

SEQ ID NO: 91365 - DNA, 25 bp, probe
cataagcaatgccaagagaatgatc

SEQ ID NO: 91366 - DNA, 25 bp, probe
aggatgtagagtagtgttagatgat

SEQ ID NO: 91367 - DNA, 25 bp, probe
acaggatgtagagtagtgttagatg

SEQ ID NO: 91368 - DNA, 25 bp, probe
cttagagaattgatggagaagagag

SEQ ID NO: 91369 - DNA, 25 bp, probe
tgtagagtagtgttagatgatccaa

SEQ ID NO: 91370 - DNA, 25 bp, probe
gtaatgtcctctccatcatcctcag

SEQ ID NO: 91371 - DNA, 25 bp, probe
atgtagagtagtgttagatgatcca

SEQ ID NO: 91372 - DNA, 25 bp, probe
taatgtcctctccatcatcctcagt

SEQ ID NO: 91373 - DNA, 25 bp, probe
cctagaacatcagagttgtaccata

SEQ ID NO: 91374 - DNA, 25 bp, probe
ccataagcaatgccaagagaatgat

SEQ ID NO: 91375 - DNA, 25 bp, probe
atggaagttctaacaggatgtagag

SEQ ID NO: 91376 - DNA, 25 bp, probe
acctagaacatcagagttgtaccat

SEQ ID NO: 91377 - DNA, 25 bp, probe
tggaagttctaacaggatgtagagt

SEQ ID NO: 91378 - DNA, 25 bp, probe
tccttagagaattgatggagaagag

SEQ ID NO: 91379 - DNA, 25 bp, probe
gttctaacaggatgtagagtagtgt

SEQ ID NO: 91380 - DNA, 25 bp, probe
ggattgtaatgtcctctccatcatc

SEQ ID NO: 91381 - DNA, 25 bp, probe
agttctaacaggatgtagagtagtg

SEQ ID NO: 91382 - DNA, 25 bp, probe
aatggaagttctaacaggatgtaga

SEQ ID NO: 91383 - DNA, 25 bp, probe
ggaagttctaacaggatgtagagta

SEQ ID NO: 91384 - DNA, 25 bp, probe
tgtaatgtcctctccatcatcctca

SEQ ID NO: 91385 - DNA, 25 bp, probe
gatgtagagtagtgttagatgatcc

SEQ ID NO: 91386 - DNA, 25 bp, probe
ggatgtagagtagtgttagatgatc

SEQ ID NO: 91387 - DNA, 25 bp, probe
tacatgccagaagagtacatcagac

SEQ ID NO: 91388 - DNA, 25 bp, probe
aataatggaagttctaacaggatgt

SEQ ID NO: 91389 - DNA, 25 bp, probe
cacctagaacatcagagttgtacca

SEQ ID NO: 91390 - DNA, 25 bp, probe
taatggaagttctaacaggatgtag

SEQ ID NO: 91391 - DNA, 25 bp, probe
aagttctaacaggatgtagagtagt

SEQ ID NO: 91392 - DNA, 25 bp, probe
tccataagcaatgccaagagaatga

SEQ ID NO: 91393 - DNA, 25 bp, probe
cacgggttgtaggaaatgtctaatt

SEQ ID NO: 91394 - DNA, 25 bp, probe
ctccataagcaatgccaagagaatg

SEQ ID NO: 91395 - DNA, 25 bp, probe
ctagaacatcagagttgtaccataa

SEQ ID NO: 91396 - DNA, 25 bp, probe
gaagttctaacaggatgtagagtag

SEQ ID NO: 91397 - DNA, 25 bp, probe
tgtaataatggaagttctaacagga

SEQ ID NO: 91398 - DNA, 25 bp, probe
ccacctagaacatcagagttgtacc

SEQ ID NO: 91399 - DNA, 25 bp, probe
caagaacattcagttggattccatc

SEQ ID NO: 91400 - DNA, 25 bp, probe
agttgtaccataaatatgaccagca

SEQ ID NO: 91401 - DNA, 25 bp, probe
gttgtaccataaatatgaccagcag

SEQ ID NO: 91402 - DNA, 25 bp, probe
atcacagagatccagtctattcaag

SEQ ID NO: 91403 - DNA, 25 bp, probe
cagagtatcacagagatccagtcta

SEQ ID NO: 91404 - DNA, 25 bp, probe
agagtatcacagagatccagtctat

SEQ ID NO: 91405 - DNA, 25 bp, probe
aatccagagtatcacagagatccag

SEQ ID NO: 91406 - DNA, 25 bp, probe
gaatccagagtatcacagagatcca

SEQ ID NO: 91407 - DNA, 25 bp, probe
gtatcacagagatccagtctattca

SEQ ID NO: 91408 - DNA, 25 bp, probe
agtatcacagagatccagtctattc

SEQ ID NO: 91409 - DNA, 25 bp, probe
gagtatcacagagatccagtctatt

SEQ ID NO: 91410 - DNA, 25 bp, probe
agagatccagtctattcaaggcatt

SEQ ID NO: 91411 - DNA, 25 bp, probe
tcacagagatccagtctattcaagg

SEQ ID NO: 91412 - DNA, 25 bp, probe
gagatccagtctattcaaggcattg

SEQ ID NO: 91413 - DNA, 25 bp, probe
tgaatccagagtatcacagagatcc

SEQ ID NO: 91414 - DNA, 25 bp, probe
tatcacagagatccagtctattcaa

SEQ ID NO: 91415 - DNA, 25 bp, probe
atccagagtatcacagagatccagt

SEQ ID NO: 91416 - DNA, 25 bp, probe
cagagatccagtctattcaaggcat

SEQ ID NO: 91417 - DNA, 25 bp, probe
tccagagtatcacagagatccagtc

SEQ ID NO: 91418 - DNA, 25 bp, probe
ccagagtatcacagagatccagtct

SEQ ID NO: 91419 - DNA, 25 bp, probe
cacagagatccagtctattcaaggc

SEQ ID NO: 91420 - DNA, 25 bp, probe
tattcaaggcattgagaatgtacct

SEQ ID NO: 91421 - DNA, 25 bp, probe
ctattcaaggcattgagaatgtacc

SEQ ID NO: 91422 - DNA, 25 bp, probe
agtctattcaaggcattgagaatgt

SEQ ID NO: 91423 - DNA, 25 bp, probe
cagtctattcaaggcattgagaatg

SEQ ID NO: 91424 - DNA, 25 bp, probe
acagagatccagtctattcaaggca

SEQ ID NO: 91425 - DNA, 25 bp, probe
ccagtctattcaaggcattgagaat

SEQ ID NO: 91426 - DNA, 25 bp, probe
aaggcattgagaatgtacctgaaga

SEQ ID NO: 91427 - DNA, 25 bp, probe
caaggcattgagaatgtacctgaag

SEQ ID NO: 91428 - DNA, 25 bp, probe
tctattcaaggcattgagaatgtac

SEQ ID NO: 91429 - DNA, 25 bp, probe
gtctattcaaggcattgagaatgta

SEQ ID NO: 91430 - DNA, 25 bp, probe
gatccagtctattcaaggcattgag

SEQ ID NO: 91431 - DNA, 25 bp, probe
attcaaggcattgagaatgtacctg

SEQ ID NO: 91432 - DNA, 25 bp, probe
atccagtctattcaaggcattgaga

SEQ ID NO: 91433 - DNA, 25 bp, probe
agatccagtctattcaaggcattga

SEQ ID NO: 91434 - DNA, 25 bp, probe
aggcattgagaatgtacctgaagag

SEQ ID NO: 91435 - DNA, 25 bp, probe
tccagtctattcaaggcattgagaa

SEQ ID NO: 91436 - DNA, 25 bp, probe
tcaaggcattgagaatgtacctgaa

SEQ ID NO: 91437 - DNA, 25 bp, probe
ttcaaggcattgagaatgtacctga

SEQ ID NO: 91438 - DNA, 25 bp, probe
gcattgagaatgtacctgaagagct

SEQ ID NO: 91439 - DNA, 25 bp, probe
gtgaatccagagtatcacagagatc

SEQ ID NO: 91440 - DNA, 25 bp, probe
ggcattgagaatgtacctgaagagc

SEQ ID NO: 91441 - DNA, 25 bp, probe
atgtacctgaagagctcctggataa

SEQ ID NO: 91442 - DNA, 25 bp, probe
aatgtacctgaagagctcctggata

SEQ ID NO: 91443 - DNA, 25 bp, probe
attgagaatgtacctgaagagctcc

SEQ ID NO: 91444 - DNA, 25 bp, probe
cattgagaatgtacctgaagagctc

SEQ ID NO: 91445 - DNA, 25 bp, probe
ttgagaatgtacctgaagagctcct

SEQ ID NO: 91446 - DNA, 25 bp, probe
ttccttatattcagcaagcaacaag

SEQ ID NO: 91447 - DNA, 25 bp, probe
cattccttatattcagcaagcaaca

SEQ ID NO: 91448 - DNA, 25 bp, probe
ccattccttatattcagcaagcaac

SEQ ID NO: 91449 - DNA, 25 bp, probe
attccttatattcagcaagcaacaa

SEQ ID NO: 91450 - DNA, 25 bp, probe
tatattcagcaagcaacaaggcaat

SEQ ID NO: 91451 - DNA, 25 bp, probe
ttatattcagcaagcaacaaggcaa

SEQ ID NO: 91452 - DNA, 25 bp, probe
atattcagcaagcaacaaggcaata

SEQ ID NO: 91453 - DNA, 25 bp, probe
gttaggagactgatagcatgtgatg

SEQ ID NO: 91454 - DNA, 25 bp, probe
cttatattcagcaagcaacaaggca

SEQ ID NO: 91455 - DNA, 25 bp, probe
tattcagcaagcaacaaggcaatag

SEQ ID NO: 91456 - DNA, 25 bp, probe
ggttaggagactgatagcatgtgat

SEQ ID NO: 91457 - DNA, 25 bp, probe
ttaggagactgatagcatgtgatgg

SEQ ID NO: 91458 - DNA, 25 bp, probe
agccagggttgtctttatattcttt

SEQ ID NO: 91459 - DNA, 25 bp, probe
tttctgttccgtttactctgtttac

SEQ ID NO: 91460 - DNA, 25 bp, probe
gaggttaggagactgatagcatgtg

SEQ ID NO: 91461 - DNA, 25 bp, probe
tttgtcccaccatttatcttctctg

SEQ ID NO: 91462 - DNA, 25 bp, probe
aagccagggttgtctttatattctt

SEQ ID NO: 91463 - DNA, 25 bp, probe
gccagggttgtctttatattcttta

SEQ ID NO: 91464 - DNA, 25 bp, probe
aggttaggagactgatagcatgtga

SEQ ID NO: 91465 - DNA, 25 bp, probe
ctgaccaattcacctgataaactct

SEQ ID NO: 91466 - DNA, 25 bp, probe
gaccaattcacctgataaactctag

SEQ ID NO: 91467 - DNA, 25 bp, probe
cccattccttatattcagcaagcaa

SEQ ID NO: 91468 - DNA, 25 bp, probe
tgaccaattcacctgataaactcta

SEQ ID NO: 91469 - DNA, 25 bp, probe
gttccgtttactctgtttacacatt

SEQ ID NO: 91470 - DNA, 25 bp, probe
ttctgttccgtttactctgtttaca

SEQ ID NO: 91471 - DNA, 25 bp, probe
attcagcaagcaacaaggcaataga

SEQ ID NO: 91472 - DNA, 25 bp, probe
tgttccgtttactctgtttacacat

SEQ ID NO: 91473 - DNA, 25 bp, probe
cctgaccaattcacctgataaactc

SEQ ID NO: 91474 - DNA, 25 bp, probe
ttccgtttactctgtttacacattt

SEQ ID NO: 91475 - DNA, 25 bp, probe
tctgttccgtttactctgtttacac

SEQ ID NO: 91476 - DNA, 25 bp, probe
ctgttccgtttactctgtttacaca

SEQ ID NO: 91477 - DNA, 25 bp, probe
ggaggttaggagactgatagcatgt

SEQ ID NO: 91478 - DNA, 25 bp, probe
aattcacctgataaactctagggac

SEQ ID NO: 91479 - DNA, 25 bp, probe
caattcacctgataaactctaggga

SEQ ID NO: 91480 - DNA, 25 bp, probe
accaattcacctgataaactctagg

SEQ ID NO: 91481 - DNA, 25 bp, probe
attcacctgataaactctagggaca

SEQ ID NO: 91482 - DNA, 25 bp, probe
ccaattcacctgataaactctaggg

SEQ ID NO: 91483 - DNA, 25 bp, probe
ttcagcaagcaacaaggcaatagaa

SEQ ID NO: 91484 - DNA, 25 bp, probe
tttctcaggtggcaatgtaactcat

SEQ ID NO: 91485 - DNA, 25 bp, probe
ttctcaggtggcaatgtaactcatt

SEQ ID NO: 91486 - DNA, 25 bp, probe
ttgtcccaccatttatcttctctgc

SEQ ID NO: 91487 - DNA, 25 bp, probe
ttcacctgataaactctagggacac

SEQ ID NO: 91488 - DNA, 25 bp, probe
ccctgaccaattcacctgataaact

SEQ ID NO: 91489 - DNA, 25 bp, probe
aaagccagggttgtctttatattct

SEQ ID NO: 91490 - DNA, 25 bp, probe
ttatctgaccaatagtacacacaca

SEQ ID NO: 91491 - DNA, 25 bp, probe
cagtgtaacaacattatctgaccaa

SEQ ID NO: 91492 - DNA, 25 bp, probe
attatctgaccaatagtacacacac

SEQ ID NO: 91493 - DNA, 25 bp, probe
cattatctgaccaatagtacacaca

SEQ ID NO: 91494 - DNA, 25 bp, probe
acattatctgaccaatagtacacac

SEQ ID NO: 91495 - DNA, 25 bp, probe
tatctgaccaatagtacacacacag

SEQ ID NO: 91496 - DNA, 25 bp, probe
agtgtaacaacattatctgaccaat

SEQ ID NO: 91497 - DNA, 25 bp, probe
accaatagtacacacacagacacaa

SEQ ID NO: 91498 - DNA, 25 bp, probe
aacattatctgaccaatagtacaca

SEQ ID NO: 91499 - DNA, 25 bp, probe
acaacattatctgaccaatagtaca

SEQ ID NO: 91500 - DNA, 25 bp, probe
tacacacacagacacaaagtttaac

SEQ ID NO: 91501 - DNA, 25 bp, probe
gaccaatagtacacacacagacaca

SEQ ID NO: 91502 - DNA, 25 bp, probe
tgaccaatagtacacacacagacac

SEQ ID NO: 91503 - DNA, 25 bp, probe
caacattatctgaccaatagtacac

SEQ ID NO: 91504 - DNA, 25 bp, probe
actcccaaagattaacttccaactt

SEQ ID NO: 91505 - DNA, 25 bp, probe
aactcccaaagattaacttccaact

SEQ ID NO: 91506 - DNA, 25 bp, probe
aaactcccaaagattaacttccaac

SEQ ID NO: 91507 - DNA, 25 bp, probe
gcatttgtctttgtatgtggtgaat

SEQ ID NO: 91508 - DNA, 25 bp, probe
gtttgtgttgtggatttgctacttc

SEQ ID NO: 91509 - DNA, 25 bp, probe
gtaacaacattatctgaccaatagt

SEQ ID NO: 91510 - DNA, 25 bp, probe
gttgaagaaagtgagagttgttcct

SEQ ID NO: 91511 - DNA, 25 bp, probe
tagtggcttccaagttgtacctatt

SEQ ID NO: 91512 - DNA, 25 bp, probe
tgctacttccatagtttacttgaca

SEQ ID NO: 91513 - DNA, 25 bp, probe
gtacacacacagacacaaagtttaa

SEQ ID NO: 91514 - DNA, 25 bp, probe
caatagtacacacacagacacaaag

SEQ ID NO: 91515 - DNA, 25 bp, probe
atagtacacacacagacacaaagtt

SEQ ID NO: 91516 - DNA, 25 bp, probe
aatagtacacacacagacacaaagt

SEQ ID NO: 91517 - DNA, 25 bp, probe
tactcacatcagacacatcggtact

SEQ ID NO: 91518 - DNA, 25 bp, probe
acatgaatgacacaagtattctgaa

SEQ ID NO: 91519 - DNA, 25 bp, probe
ctcccaaagattaacttccaactta

SEQ ID NO: 91520 - DNA, 25 bp, probe
agtacacacacagacacaaagttta

SEQ ID NO: 91521 - DNA, 25 bp, probe
tagtacacacacagacacaaagttt

SEQ ID NO: 91522 - DNA, 25 bp, probe
ctgaccaatagtacacacacagaca

SEQ ID NO: 91523 - DNA, 25 bp, probe
agcatttgtctttgtatgtggtgaa

SEQ ID NO: 91524 - DNA, 25 bp, probe
aagcatttgtctttgtatgtggtga

SEQ ID NO: 91525 - DNA, 25 bp, probe
caagcatttgtctttgtatgtggtg

SEQ ID NO: 91526 - DNA, 25 bp, probe
tgagagttgttcctcctaccactac

SEQ ID NO: 91527 - DNA, 25 bp, probe
tctatgacttgactggtattaaagc

SEQ ID NO: 91528 - DNA, 25 bp, probe
catttgtctttgtatgtggtgaatt

SEQ ID NO: 91529 - DNA, 25 bp, probe
ttgaagaaagtgagagttgttcctc

SEQ ID NO: 91530 - DNA, 25 bp, probe
ttgctacttccatagtttacttgac

SEQ ID NO: 91531 - DNA, 25 bp, probe
aagaaagtgagagttgttcctccta

SEQ ID NO: 91532 - DNA, 25 bp, probe
ccaatagtacacacacagacacaaa

SEQ ID NO: 91533 - DNA, 25 bp, probe
gtgtaacaacattatctgaccaata

SEQ ID NO: 91534 - DNA, 25 bp, probe
tgttagcactgttgatgtatctgag

SEQ ID NO: 91535 - DNA, 25 bp, probe
ctgttagcactgttgatgtatctga

SEQ ID NO: 91536 - DNA, 25 bp, probe
actgttagcactgttgatgtatctg

SEQ ID NO: 91537 - DNA, 25 bp, probe
aactgttagcactgttgatgtatct

SEQ ID NO: 91538 - DNA, 25 bp, probe
agttccatctcctataatctgtcaa

SEQ ID NO: 91539 - DNA, 25 bp, probe
ttagcactgttgatgtatctgagtt

SEQ ID NO: 91540 - DNA, 25 bp, probe
tagcactgttgatgtatctgagttg

SEQ ID NO: 91541 - DNA, 25 bp, probe
gttagcactgttgatgtatctgagt

SEQ ID NO: 91542 - DNA, 25 bp, probe
tcctctgagttccatctcctataat

SEQ ID NO: 91543 - DNA, 25 bp, probe
atcctctgagttccatctcctataa

SEQ ID NO: 91544 - DNA, 25 bp, probe
catcctctgagttccatctcctata

SEQ ID NO: 91545 - DNA, 25 bp, probe
cctctgagttccatctcctataatc

SEQ ID NO: 91546 - DNA, 25 bp, probe
gaatgtatctgtgaagtagttctgt

SEQ ID NO: 91547 - DNA, 25 bp, probe
gagttccatctcctataatctgtca

SEQ ID NO: 91548 - DNA, 25 bp, probe
tgagttccatctcctataatctgtc

SEQ ID NO: 91549 - DNA, 25 bp, probe
ctgagttccatctcctataatctgt

SEQ ID NO: 91550 - DNA, 25 bp, probe
tctgagttccatctcctataatctg

SEQ ID NO: 91551 - DNA, 25 bp, probe
ctctgagttccatctcctataatct

SEQ ID NO: 91552 - DNA, 25 bp, probe
aatgtatctgtgaagtagttctgtt

SEQ ID NO: 91553 - DNA, 25 bp, probe
gttgatgtatctgagttgccaagac

SEQ ID NO: 91554 - DNA, 25 bp, probe
ctgttgatgtatctgagttgccaag

SEQ ID NO: 91555 - DNA, 25 bp, probe
tgttgatgtatctgagttgccaaga

SEQ ID NO: 91556 - DNA, 25 bp, probe
ctacagtgtggataagaccttgagc

SEQ ID NO: 91557 - DNA, 25 bp, probe
gctacagtgtggataagaccttgag

SEQ ID NO: 91558 - DNA, 25 bp, probe
aaatgccttagaaatgtaaactgcc

SEQ ID NO: 91559 - DNA, 25 bp, probe
actgttgatgtatctgagttgccaa

SEQ ID NO: 91560 - DNA, 25 bp, probe
tgatgtatctgagttgccaagacaa

SEQ ID NO: 91561 - DNA, 25 bp, probe
ttgatgtatctgagttgccaagaca

SEQ ID NO: 91562 - DNA, 25 bp, probe
tacatacggtcaggtttaacatttg

SEQ ID NO: 91563 - DNA, 25 bp, probe
tatctgtgaagtagttctgtttggt

SEQ ID NO: 91564 - DNA, 25 bp, probe
tgccttagaaatgtaaactgccata

SEQ ID NO: 91565 - DNA, 25 bp, probe
gccttagaaatgtaaactgccatat

SEQ ID NO: 91566 - DNA, 25 bp, probe
gtatctgtgaagtagttctgtttgg

SEQ ID NO: 91567 - DNA, 25 bp, probe
gttaaactgttagcactgttgatgt

SEQ ID NO: 91568 - DNA, 25 bp, probe
tgttaaactgttagcactgttgatg

SEQ ID NO: 91569 - DNA, 25 bp, probe
aatgccttagaaatgtaaactgcca

SEQ ID NO: 91570 - DNA, 25 bp, probe
aaactgttagcactgttgatgtatc

SEQ ID NO: 91571 - DNA, 25 bp, probe
ctgttaaactgttagcactgttgat

SEQ ID NO: 91572 - DNA, 25 bp, probe
atctgtgaagtagttctgtttggtg

SEQ ID NO: 91573 - DNA, 25 bp, probe
ggactatcagacctggttagatttg

SEQ ID NO: 91574 - DNA, 25 bp, probe
atgccttagaaatgtaaactgccat

SEQ ID NO: 91575 - DNA, 25 bp, probe
tgtatctgtgaagtagttctgtttg

SEQ ID NO: 91576 - DNA, 25 bp, probe
atacatacggtcaggtttaacattt

SEQ ID NO: 91577 - DNA, 25 bp, probe
aatacatacggtcaggtttaacatt

SEQ ID NO: 91578 - DNA, 25 bp, probe
attgagaacagcattgagatgatga

SEQ ID NO: 91579 - DNA, 25 bp, probe
ttgagaacagcattgagatgatgaa

SEQ ID NO: 91580 - DNA, 25 bp, probe
tattgagaacagcattgagatgatg

SEQ ID NO: 91581 - DNA, 25 bp, probe
gaacagcattgagatgatgaacaag

SEQ ID NO: 91582 - DNA, 25 bp, probe
ttacacagcaagttagtagttgagc

SEQ ID NO: 91583 - DNA, 25 bp, probe
agaacagcattgagatgatgaacaa

SEQ ID NO: 91584 - DNA, 25 bp, probe
gagaacagcattgagatgatgaaca

SEQ ID NO: 91585 - DNA, 25 bp, probe
tgagaacagcattgagatgatgaac

SEQ ID NO: 91586 - DNA, 25 bp, probe
ttattgagaacagcattgagatgat

SEQ ID NO: 91587 - DNA, 25 bp, probe
ttacttatactatgccagagaggaa

SEQ ID NO: 91588 - DNA, 25 bp, probe
aacagcattgagatgatgaacaagg

SEQ ID NO: 91589 - DNA, 25 bp, probe
caagttagtagttgagcctgaccat

SEQ ID NO: 91590 - DNA, 25 bp, probe
gcatttattgagaacagcattgaga

SEQ ID NO: 91591 - DNA, 25 bp, probe
tacacagcaagttagtagttgagcc

SEQ ID NO: 91592 - DNA, 25 bp, probe
acttatactatgccagagaggaaac

SEQ ID NO: 91593 - DNA, 25 bp, probe
cttatactatgccagagaggaaact

SEQ ID NO: 91594 - DNA, 25 bp, probe
aagttagtagttgagcctgaccatg

SEQ ID NO: 91595 - DNA, 25 bp, probe
gtaagggtttagcaaggttaagaga

SEQ ID NO: 91596 - DNA, 25 bp, probe
agtaagggtttagcaaggttaagag

SEQ ID NO: 91597 - DNA, 25 bp, probe
aagtaagggtttagcaaggttaaga

SEQ ID NO: 91598 - DNA, 25 bp, probe
gaagtaagggtttagcaaggttaag

SEQ ID NO: 91599 - DNA, 25 bp, probe
taagggtttagcaaggttaagagat

SEQ ID NO: 91600 - DNA, 25 bp, probe
ggaagtaagggtttagcaaggttaa

SEQ ID NO: 91601 - DNA, 25 bp, probe
actatgccagagaggaaactataaa

SEQ ID NO: 91602 - DNA, 25 bp, probe
gatgaggaagtaagggtttagcaag

SEQ ID NO: 91603 - DNA, 25 bp, probe
ttcagatgaggaagtaagggtttag

SEQ ID NO: 91604 - DNA, 25 bp, probe
ccaatttacacagcaagttagtagt

SEQ ID NO: 91605 - DNA, 25 bp, probe
aggaagtaagggtttagcaaggtta

SEQ ID NO: 91606 - DNA, 25 bp, probe
tttcagatgaggaagtaagggttta

SEQ ID NO: 91607 - DNA, 25 bp, probe
tccaatttacacagcaagttagtag

SEQ ID NO: 91608 - DNA, 25 bp, probe
agatgaggaagtaagggtttagcaa

SEQ ID NO: 91609 - DNA, 25 bp, probe
gttagtagttgagcctgaccatgag

SEQ ID NO: 91610 - DNA, 25 bp, probe
tttattgagaacagcattgagatga

SEQ ID NO: 91611 - DNA, 25 bp, probe
ctatgccagagaggaaactataaag

SEQ ID NO: 91612 - DNA, 25 bp, probe
atctatccaatttacacagcaagtt

SEQ ID NO: 91613 - DNA, 25 bp, probe
tttacacagcaagttagtagttgag

SEQ ID NO: 91614 - DNA, 25 bp, probe
aagggtttagcaaggttaagagatc

SEQ ID NO: 91615 - DNA, 25 bp, probe
tgccagagaggaaactataaagtaa

SEQ ID NO: 91616 - DNA, 25 bp, probe
atgccagagaggaaactataaagta

SEQ ID NO: 91617 - DNA, 25 bp, probe
tatgccagagaggaaactataaagt

SEQ ID NO: 91618 - DNA, 25 bp, probe
tatccaatttacacagcaagttagt

SEQ ID NO: 91619 - DNA, 25 bp, probe
gatctatccaatttacacagcaagt

SEQ ID NO: 91620 - DNA, 25 bp, probe
tactatgccagagaggaaactataa

SEQ ID NO: 91621 - DNA, 25 bp, probe
ttatactatgccagagaggaaacta

SEQ ID NO: 91622 - DNA, 25 bp, probe
agagagtccagaagtaattcagatg

SEQ ID NO: 91623 - DNA, 25 bp, probe
gagagtccagaagtaattcagatgc

SEQ ID NO: 91624 - DNA, 25 bp, probe
aagagagtccagaagtaattcagat

SEQ ID NO: 91625 - DNA, 25 bp, probe
agagtccagaagtaattcagatgct

SEQ ID NO: 91626 - DNA, 25 bp, probe
gagtccagaagtaattcagatgctg

SEQ ID NO: 91627 - DNA, 25 bp, probe
tccagaagtaattcagatgctgtga

SEQ ID NO: 91628 - DNA, 25 bp, probe
gtccagaagtaattcagatgctgtg

SEQ ID NO: 91629 - DNA, 25 bp, probe
agtccagaagtaattcagatgctgt

SEQ ID NO: 91630 - DNA, 25 bp, probe
tctgaactacaagaatcctgaccag

SEQ ID NO: 91631 - DNA, 25 bp, probe
accagaaagagagtccagaagtaat

SEQ ID NO: 91632 - DNA, 25 bp, probe
ccagaaagagagtccagaagtaatt

SEQ ID NO: 91633 - DNA, 25 bp, probe
gcccagaaggagttcataaagaata

SEQ ID NO: 91634 - DNA, 25 bp, probe
aaccagaaagagagtccagaagtaa

SEQ ID NO: 91635 - DNA, 25 bp, probe
atatattcacgagcatgagtatgtg

SEQ ID NO: 91636 - DNA, 25 bp, probe
gagtatgtgcatggagatatcaagg

SEQ ID NO: 91637 - DNA, 25 bp, probe
gagcaaattcagaaatggattcgta

SEQ ID NO: 91638 - DNA, 25 bp, probe
ctgaattaaagttctaccaacgagc

SEQ ID NO: 91639 - DNA, 25 bp, probe
gaaccagaaagagagtccagaagta

SEQ ID NO: 91640 - DNA, 25 bp, probe
cccagaaggagttcataaagaatac

SEQ ID NO: 91641 - DNA, 25 bp, probe
aaagagagtccagaagtaattcaga

SEQ ID NO: 91642 - DNA, 25 bp, probe
agaaagagagtccagaagtaattca

SEQ ID NO: 91643 - DNA, 25 bp, probe
tcttctgaactacaagaatcctgac

SEQ ID NO: 91644 - DNA, 25 bp, probe
cagagcaaattcagaaatggattcg

SEQ ID NO: 91645 - DNA, 25 bp, probe
tgagtatgtgcatggagatatcaag

SEQ ID NO: 91646 - DNA, 25 bp, probe
gaaagagagtccagaagtaattcag

SEQ ID NO: 91647 - DNA, 25 bp, probe
cagaaagagagtccagaagtaattc

SEQ ID NO: 91648 - DNA, 25 bp, probe
atgagtatgtgcatggagatatcaa

SEQ ID NO: 91649 - DNA, 25 bp, probe
cttctgaactacaagaatcctgacc

SEQ ID NO: 91650 - DNA, 25 bp, probe
gcctcaaatcttcttctgaactaca

SEQ ID NO: 91651 - DNA, 25 bp, probe
tttatgataatggatcgctttggga

SEQ ID NO: 91652 - DNA, 25 bp, probe
gtttatgataatggatcgctttggg

SEQ ID NO: 91653 - DNA, 25 bp, probe
ggtttatgataatggatcgctttgg

SEQ ID NO: 91654 - DNA, 25 bp, probe
tacaggtttatgataatggatcgct

SEQ ID NO: 91655 - DNA, 25 bp, probe
acaggtttatgataatggatcgctt

SEQ ID NO: 91656 - DNA, 25 bp, probe
aggtttatgataatggatcgctttg

SEQ ID NO: 91657 - DNA, 25 bp, probe
caggtttatgataatggatcgcttt

SEQ ID NO: 91658 - DNA, 25 bp, probe
agagcaaattcagaaatggattcgt

SEQ ID NO: 91659 - DNA, 25 bp, probe
ttatgataatggatcgctttgggag

SEQ ID NO: 91660 - DNA, 25 bp, probe
aagtacctgggtgttcctaagtatt

SEQ ID NO: 91661 - DNA, 25 bp, probe
agcaaattcagaaatggattcgtac

SEQ ID NO: 91662 - DNA, 25 bp, probe
actgaattaaagttctaccaacgag

SEQ ID NO: 91663 - DNA, 25 bp, probe
caaattcagaaatggattcgtaccc

SEQ ID NO: 91664 - DNA, 25 bp, probe
aagaaccagaaagagagtccagaag

SEQ ID NO: 91665 - DNA, 25 bp, probe
ccagaaggagttcataaagaataca

SEQ ID NO: 91666 - DNA, 25 bp, probe
gagtcaataaacatgatggaatgct

SEQ ID NO: 91667 - DNA, 25 bp, probe
ggagtcaataaacatgatggaatgc

SEQ ID NO: 91668 - DNA, 25 bp, probe
aggagtcaataaacatgatggaatg

SEQ ID NO: 91669 - DNA, 25 bp, probe
caggagtcaataaacatgatggaat

SEQ ID NO: 91670 - DNA, 25 bp, probe
agtcaataaacatgatggaatgcta

SEQ ID NO: 91671 - DNA, 25 bp, probe
gtcaataaacatgatggaatgctaa

SEQ ID NO: 91672 - DNA, 25 bp, probe
tcaataaacatgatggaatgctaaa

SEQ ID NO: 91673 - DNA, 25 bp, probe
gaaagaagtggtgcttgggatgttt

SEQ ID NO: 91674 - DNA, 25 bp, probe
aagaagtggtgcttgggatgtttta

SEQ ID NO: 91675 - DNA, 25 bp, probe
agaagtggtgcttgggatgttttac

SEQ ID NO: 91676 - DNA, 25 bp, probe
tgaaagaagtggtgcttgggatgtt

SEQ ID NO: 91677 - DNA, 25 bp, probe
aaagaagtggtgcttgggatgtttt

SEQ ID NO: 91678 - DNA, 25 bp, probe
caataaacatgatggaatgctaaaa

SEQ ID NO: 91679 - DNA, 25 bp, probe
gaagtggtgcttgggatgttttacc

SEQ ID NO: 91680 - DNA, 25 bp, probe
aagtggtgcttgggatgttttacct

SEQ ID NO: 91681 - DNA, 25 bp, probe
gatgttttacctgcacgaccagaac

SEQ ID NO: 91682 - DNA, 25 bp, probe
ccttagaacaagaaccttaccttca

SEQ ID NO: 91683 - DNA, 25 bp, probe
atcagccttagaacaagaaccttac

SEQ ID NO: 91684 - DNA, 25 bp, probe
catcagccttagaacaagaacctta

SEQ ID NO: 91685 - DNA, 25 bp, probe
ttagaacaagaaccttaccttcaag

SEQ ID NO: 91686 - DNA, 25 bp, probe
cttagaacaagaaccttaccttcaa

SEQ ID NO: 91687 - DNA, 25 bp, probe
gccttagaacaagaaccttaccttc

SEQ ID NO: 91688 - DNA, 25 bp, probe
agccttagaacaagaaccttacctt

SEQ ID NO: 91689 - DNA, 25 bp, probe
cagccttagaacaagaaccttacct

SEQ ID NO: 91690 - DNA, 25 bp, probe
tcagccttagaacaagaaccttacc

SEQ ID NO: 91691 - DNA, 25 bp, probe
gcatcagccttagaacaagaacctt

SEQ ID NO: 91692 - DNA, 25 bp, probe
aagtgaagaactctgtcgaaggatg

SEQ ID NO: 91693 - DNA, 25 bp, probe
caagtgaagaactctgtcgaaggat

SEQ ID NO: 91694 - DNA, 25 bp, probe
gtcgaaggatggaactttcagatat

SEQ ID NO: 91695 - DNA, 25 bp, probe
caaggagcaagtgaagaactctgtc

SEQ ID NO: 91696 - DNA, 25 bp, probe
cagcatcagccttagaacaagaacc

SEQ ID NO: 91697 - DNA, 25 bp, probe
ccagcatcagccttagaacaagaac

SEQ ID NO: 91698 - DNA, 25 bp, probe
gaagaactctgtcgaaggatggaac

SEQ ID NO: 91699 - DNA, 25 bp, probe
agcatcagccttagaacaagaacct

SEQ ID NO: 91700 - DNA, 25 bp, probe
gggaatagagattctccaggaattt

SEQ ID NO: 91701 - DNA, 25 bp, probe
agggaatagagattctccaggaatt

SEQ ID NO: 91702 - DNA, 25 bp, probe
aagggaatagagattctccaggaat

SEQ ID NO: 91703 - DNA, 25 bp, probe
aggatggaactttcagatatcaact

SEQ ID NO: 91704 - DNA, 25 bp, probe
aaagggaatagagattctccaggaa

SEQ ID NO: 91705 - DNA, 25 bp, probe
tcgaaggatggaactttcagatatc

SEQ ID NO: 91706 - DNA, 25 bp, probe
tgtcgaaggatggaactttcagata

SEQ ID NO: 91707 - DNA, 25 bp, probe
cgaaggatggaactttcagatatca

SEQ ID NO: 91708 - DNA, 25 bp, probe
tcaaggagcaagtgaagaactctgt

SEQ ID NO: 91709 - DNA, 25 bp, probe
aagaactctgtcgaaggatggaact

SEQ ID NO: 91710 - DNA, 25 bp, probe
tgaagaactctgtcgaaggatggaa

SEQ ID NO: 91711 - DNA, 25 bp, probe
ggaatagagattctccaggaatttc

SEQ ID NO: 91712 - DNA, 25 bp, probe
caaagggaatagagattctccagga

SEQ ID NO: 91713 - DNA, 25 bp, probe
aaggatggaactttcagatatcaac

SEQ ID NO: 91714 - DNA, 25 bp, probe
agaactctgtcgaaggatggaactt

SEQ ID NO: 91715 - DNA, 25 bp, probe
gaatagagattctccaggaatttcc

SEQ ID NO: 91716 - DNA, 25 bp, probe
gaaggatggaactttcagatatcaa

SEQ ID NO: 91717 - DNA, 25 bp, probe
tagaacaagaaccttaccttcaagg

SEQ ID NO: 91718 - DNA, 25 bp, probe
ggatggaactttcagatatcaacta

SEQ ID NO: 91719 - DNA, 25 bp, probe
gagaacccaaagggaatagagattc

SEQ ID NO: 91720 - DNA, 25 bp, probe
ttcaaggagcaagtgaagaactctg

SEQ ID NO: 91721 - DNA, 25 bp, probe
agaacccaaagggaatagagattct

SEQ ID NO: 91722 - DNA, 25 bp, probe
ccaaagggaatagagattctccagg

SEQ ID NO: 91723 - DNA, 25 bp, probe
gagcaagtgaagaactctgtcgaag

SEQ ID NO: 91724 - DNA, 25 bp, probe
gaacaagaaccttaccttcaaggag

SEQ ID NO: 91725 - DNA, 25 bp, probe
gaacccaaagggaatagagattctc

SEQ ID NO: 91726 - DNA, 25 bp, probe
ggcaattctggcaatcattaaagtg

SEQ ID NO: 91727 - DNA, 25 bp, probe
ctaactcatactttcccgttgacac

SEQ ID NO: 91728 - DNA, 25 bp, probe
taactcatactttcccgttgacact

SEQ ID NO: 91729 - DNA, 25 bp, probe
gggcaattctggcaatcattaaagt

SEQ ID NO: 91730 - DNA, 25 bp, probe
tgggcaattctggcaatcattaaag

SEQ ID NO: 91731 - DNA, 25 bp, probe
ctgggcaattctggcaatcattaaa

SEQ ID NO: 91732 - DNA, 25 bp, probe
catactttcccgttgacacttgatc

SEQ ID NO: 91733 - DNA, 25 bp, probe
tcatactttcccgttgacacttgat

SEQ ID NO: 91734 - DNA, 25 bp, probe
cctaactcatactttcccgttgaca

SEQ ID NO: 91735 - DNA, 25 bp, probe
ctcatctaagctcccacaatttctt

SEQ ID NO: 91736 - DNA, 25 bp, probe
aactcatactttcccgttgacactt

SEQ ID NO: 91737 - DNA, 25 bp, probe
cttgcctaactcatactttcccgtt

SEQ ID NO: 91738 - DNA, 25 bp, probe
catctaagctcccacaatttcttac

SEQ ID NO: 91739 - DNA, 25 bp, probe
tcatctaagctcccacaatttctta

SEQ ID NO: 91740 - DNA, 25 bp, probe
ctcatactttcccgttgacacttga

SEQ ID NO: 91741 - DNA, 25 bp, probe
atctaagctcccacaatttcttacg

SEQ ID NO: 91742 - DNA, 25 bp, probe
ttgcctaactcatactttcccgttg

SEQ ID NO: 91743 - DNA, 25 bp, probe
atactttcccgttgacacttgatcc

SEQ ID NO: 91744 - DNA, 25 bp, probe
actcatactttcccgttgacacttg

SEQ ID NO: 91745 - DNA, 25 bp, probe
gcctaactcatactttcccgttgac

SEQ ID NO: 91746 - DNA, 25 bp, probe
gcacacattttggagattgtatttt

SEQ ID NO: 91747 - DNA, 25 bp, probe
tctaagctcccacaatttcttacgg

SEQ ID NO: 91748 - DNA, 25 bp, probe
tgcctaactcatactttcccgttga

SEQ ID NO: 91749 - DNA, 25 bp, probe
gcaattctggcaatcattaaagtgc

SEQ ID NO: 91750 - DNA, 25 bp, probe
tactttcccgttgacacttgatcca

SEQ ID NO: 91751 - DNA, 25 bp, probe
ttctggcaatcattaaagtgcatag

SEQ ID NO: 91752 - DNA, 25 bp, probe
aattctggcaatcattaaagtgcat

SEQ ID NO: 91753 - DNA, 25 bp, probe
ctggcaatcattaaagtgcatagat

SEQ ID NO: 91754 - DNA, 25 bp, probe
tctggcaatcattaaagtgcataga

SEQ ID NO: 91755 - DNA, 25 bp, probe
tggcaatcattaaagtgcatagatt

SEQ ID NO: 91756 - DNA, 25 bp, probe
attctggcaatcattaaagtgcata

SEQ ID NO: 91757 - DNA, 25 bp, probe
caattctggcaatcattaaagtgca

SEQ ID NO: 91758 - DNA, 25 bp, probe
agactctctgccagtacacatttgt

SEQ ID NO: 91759 - DNA, 25 bp, probe
gctgggcaattctggcaatcattaa

SEQ ID NO: 91760 - DNA, 25 bp, probe
atttgtgtacagagtcctcatccag

SEQ ID NO: 91761 - DNA, 25 bp, probe
gtacttgcacacattttggagattg

SEQ ID NO: 91762 - DNA, 25 bp, probe
ggcaatcattaaagtgcatagattt

SEQ ID NO: 91763 - DNA, 25 bp, probe
catttgtgtacagagtcctcatcca

SEQ ID NO: 91764 - DNA, 25 bp, probe
cacacattttggagattgtattttc

SEQ ID NO: 91765 - DNA, 25 bp, probe
agacaattctctattttactgaagc

SEQ ID NO: 91766 - DNA, 25 bp, probe
acacattttggagattgtattttct

SEQ ID NO: 91767 - DNA, 25 bp, probe
tgcacacattttggagattgtattt

SEQ ID NO: 91768 - DNA, 25 bp, probe
ttgcacacattttggagattgtatt

SEQ ID NO: 91769 - DNA, 25 bp, probe
cacatttgtgtacagagtcctcatc

SEQ ID NO: 91770 - DNA, 25 bp, probe
atggcggcagttacatattattatt

SEQ ID NO: 91771 - DNA, 25 bp, probe
catagacctagatccacacttcaac

SEQ ID NO: 91772 - DNA, 25 bp, probe
tatcacatagacctagatccacact

SEQ ID NO: 91773 - DNA, 25 bp, probe
gtatcacatagacctagatccacac

SEQ ID NO: 91774 - DNA, 25 bp, probe
agtatcacatagacctagatccaca

SEQ ID NO: 91775 - DNA, 25 bp, probe
acatagacctagatccacacttcaa

SEQ ID NO: 91776 - DNA, 25 bp, probe
atcacatagacctagatccacactt

SEQ ID NO: 91777 - DNA, 25 bp, probe
agaatgttgttggttactgttgctc

SEQ ID NO: 91778 - DNA, 25 bp, probe
tcacatagacctagatccacacttc

SEQ ID NO: 91779 - DNA, 25 bp, probe
acctagatccacacttcaacgatat

SEQ ID NO: 91780 - DNA, 25 bp, probe
aagtatcacatagacctagatccac

SEQ ID NO: 91781 - DNA, 25 bp, probe
cacatagacctagatccacacttca

SEQ ID NO: 91782 - DNA, 25 bp, probe
catggcggcagttacatattattat

SEQ ID NO: 91783 - DNA, 25 bp, probe
gaagtatcacatagacctagatcca

SEQ ID NO: 91784 - DNA, 25 bp, probe
atctgaagaagtatcacatagacct

SEQ ID NO: 91785 - DNA, 25 bp, probe
atagacctagatccacacttcaacg

SEQ ID NO: 91786 - DNA, 25 bp, probe
gacctagatccacacttcaacgata

SEQ ID NO: 91787 - DNA, 25 bp, probe
agaagtatcacatagacctagatcc

SEQ ID NO: 91788 - DNA, 25 bp, probe
tatccatagtgagaacagacacctt

SEQ ID NO: 91789 - DNA, 25 bp, probe
ttatccatagtgagaacagacacct

SEQ ID NO: 91790 - DNA, 25 bp, probe
tctgaagaagtatcacatagaccta

SEQ ID NO: 91791 - DNA, 25 bp, probe
gcatggcggcagttacatattatta

SEQ ID NO: 91792 - DNA, 25 bp, probe
gaatgttgttggttactgttgctcc

SEQ ID NO: 91793 - DNA, 25 bp, probe
tgaagaagtatcacatagacctaga

SEQ ID NO: 91794 - DNA, 25 bp, probe
tatcaaacctcacttccgaatgtaa

SEQ ID NO: 91795 - DNA, 25 bp, probe
atatcaaacctcacttccgaatgta

SEQ ID NO: 91796 - DNA, 25 bp, probe
tatatcaaacctcacttccgaatgt

SEQ ID NO: 91797 - DNA, 25 bp, probe
gtatatcaaacctcacttccgaatg

SEQ ID NO: 91798 - DNA, 25 bp, probe
ctgaagaagtatcacatagacctag

SEQ ID NO: 91799 - DNA, 25 bp, probe
tagacctagatccacacttcaacga

SEQ ID NO: 91800 - DNA, 25 bp, probe
atcaaacctcacttccgaatgtaaa

SEQ ID NO: 91801 - DNA, 25 bp, probe
cgtatatcaaacctcacttccgaat

SEQ ID NO: 91802 - DNA, 25 bp, probe
atccatagtgagaacagacaccttg

SEQ ID NO: 91803 - DNA, 25 bp, probe
cagaatgttgttggttactgttgct

SEQ ID NO: 91804 - DNA, 25 bp, probe
tggcggcagttacatattattattt

SEQ ID NO: 91805 - DNA, 25 bp, probe
ctagatccacacttcaacgatatcc

SEQ ID NO: 91806 - DNA, 25 bp, probe
cctagatccacacttcaacgatatc

SEQ ID NO: 91807 - DNA, 25 bp, probe
ctcctcgtggactatcagatgtatg

SEQ ID NO: 91808 - DNA, 25 bp, probe
ttaagcaactctaccagatcctgac

SEQ ID NO: 91809 - DNA, 25 bp, probe
gaagaactgtatgggtatctgaaga

SEQ ID NO: 91810 - DNA, 25 bp, probe
agaactgtatgggtatctgaagaag

SEQ ID NO: 91811 - DNA, 25 bp, probe
agaagaactgtatgggtatctgaag

SEQ ID NO: 91812 - DNA, 25 bp, probe
tagatccacacttcaacgatatcct

SEQ ID NO: 91813 - DNA, 25 bp, probe
aagaactgtatgggtatctgaagaa

SEQ ID NO: 91814 - DNA, 25 bp, probe
ctatgactgcaataaggagttgttc

SEQ ID NO: 91815 - DNA, 25 bp, probe
ctctttcgtatctttcgtatgctgg

SEQ ID NO: 91816 - DNA, 25 bp, probe
gctatgactgcaataaggagttgtt

SEQ ID NO: 91817 - DNA, 25 bp, probe
gaagagttgagttccagttcagtcc

SEQ ID NO: 91818 - DNA, 25 bp, probe
agttccagttcagtcccaagttaaa

SEQ ID NO: 91819 - DNA, 25 bp, probe
gctctttcgtatctttcgtatgctg

SEQ ID NO: 91820 - DNA, 25 bp, probe
gttccagttcagtcccaagttaaac

SEQ ID NO: 91821 - DNA, 25 bp, probe
tatgactgcaataaggagttgttcc

SEQ ID NO: 91822 - DNA, 25 bp, probe
gagttccagttcagtcccaagttaa

SEQ ID NO: 91823 - DNA, 25 bp, probe
ttccagttcagtcccaagttaaaca

SEQ ID NO: 91824 - DNA, 25 bp, probe
attgaccagctctttcgtatctttc

SEQ ID NO: 91825 - DNA, 25 bp, probe
tctttcgtatctttcgtatgctggg

SEQ ID NO: 91826 - DNA, 25 bp, probe
gattgaccagctctttcgtatcttt

SEQ ID NO: 91827 - DNA, 25 bp, probe
gagttgttccttcacctgagatgtg

SEQ ID NO: 91828 - DNA, 25 bp, probe
aggacctgaagaagtacatggactc

SEQ ID NO: 91829 - DNA, 25 bp, probe
tccagttcagtcccaagttaaacag

SEQ ID NO: 91830 - DNA, 25 bp, probe
tgacaacaagaaataaacgtggtat

SEQ ID NO: 91831 - DNA, 25 bp, probe
ccagctctttcgtatctttcgtatg

SEQ ID NO: 91832 - DNA, 25 bp, probe
gacaacaagaaataaacgtggtatg

SEQ ID NO: 91833 - DNA, 25 bp, probe
agaaataaacgtggtatgttcctga

SEQ ID NO: 91834 - DNA, 25 bp, probe
gaaataaacgtggtatgttcctgaa

SEQ ID NO: 91835 - DNA, 25 bp, probe
aagaaataaacgtggtatgttcctg

SEQ ID NO: 91836 - DNA, 25 bp, probe
caagaaataaacgtggtatgttcct

SEQ ID NO: 91837 - DNA, 25 bp, probe
tttggttcatttctggcttgacaac

SEQ ID NO: 91838 - DNA, 25 bp, probe
aaataaacgtggtatgttcctgaaa

SEQ ID NO: 91839 - DNA, 25 bp, probe
ttgacaacaagaaataaacgtggta

SEQ ID NO: 91840 - DNA, 25 bp, probe
ggctatgactgcaataaggagttgt

SEQ ID NO: 91841 - DNA, 25 bp, probe
accagctctttcgtatctttcgtat

SEQ ID NO: 91842 - DNA, 25 bp, probe
gtttcctggtgactctgagattgac

SEQ ID NO: 91843 - DNA, 25 bp, probe
ctgtttcctggtgactctgagattg

SEQ ID NO: 91844 - DNA, 25 bp, probe
gaagctctatctggtgtttgagttc

SEQ ID NO: 91845 - DNA, 25 bp, probe
cagctctttcgtatctttcgtatgc

SEQ ID NO: 91846 - DNA, 25 bp, probe
acaagaaataaacgtggtatgttcc

SEQ ID NO: 91847 - DNA, 25 bp, probe
acaacaagaaataaacgtggtatgt

SEQ ID NO: 91848 - DNA, 25 bp, probe
gctctatctggtgtttgagttcctc

SEQ ID NO: 91849 - DNA, 25 bp, probe
agttcagtcccaagttaaacaggag

SEQ ID NO: 91850 - DNA, 25 bp, probe
tgtttcctggtgactctgagattga

SEQ ID NO: 91851 - DNA, 25 bp, probe
ttccttcacctgagatgtgcttctt

SEQ ID NO: 91852 - DNA, 25 bp, probe
gaccagctctttcgtatctttcgta

SEQ ID NO: 91853 - DNA, 25 bp, probe
gatgtgcttcttttggttcatttct

SEQ ID NO: 91854 - DNA, 25 bp, probe
ctgtggatatctggagcattggttg

SEQ ID NO: 91855 - DNA, 25 bp, probe
atgtgcttcttttggttcatttctg

SEQ ID NO: 91856 - DNA, 25 bp, probe
agatgtgcttcttttggttcatttc

SEQ ID NO: 91857 - DNA, 25 bp, probe
gagatgtgcttcttttggttcattt

SEQ ID NO: 91858 - DNA, 25 bp, probe
ggattgtaagttataggttctgagc

SEQ ID NO: 91859 - DNA, 25 bp, probe
atatgatggacacacaatggatgga

SEQ ID NO: 91860 - DNA, 25 bp, probe
agtatgtgctgtctcatgtcttatt

SEQ ID NO: 91861 - DNA, 25 bp, probe
aagtatgtgctgtctcatgtcttat

SEQ ID NO: 91862 - DNA, 25 bp, probe
gaagtatgtgctgtctcatgtctta

SEQ ID NO: 91863 - DNA, 25 bp, probe
gacacattatatctccaacaaggtg

SEQ ID NO: 91864 - DNA, 25 bp, probe
ggacacattatatctccaacaaggt

SEQ ID NO: 91865 - DNA, 25 bp, probe
ttgtaagttataggttctgagctga

SEQ ID NO: 91866 - DNA, 25 bp, probe
tatgatggacacacaatggatggac

SEQ ID NO: 91867 - DNA, 25 bp, probe
acattatatctccaacaaggtgtgg

SEQ ID NO: 91868 - DNA, 25 bp, probe
tgtaagttataggttctgagctgaa

SEQ ID NO: 91869 - DNA, 25 bp, probe
attgtaagttataggttctgagctg

SEQ ID NO: 91870 - DNA, 25 bp, probe
aataagattcagagcacttgggatt

SEQ ID NO: 91871 - DNA, 25 bp, probe
aaataagattcagagcacttgggat

SEQ ID NO: 91872 - DNA, 25 bp, probe
tgaagtatgtgctgtctcatgtctt

SEQ ID NO: 91873 - DNA, 25 bp, probe
acacacaatggatggacacattata

SEQ ID NO: 91874 - DNA, 25 bp, probe
tgggattgtaagttataggttctga

SEQ ID NO: 91875 - DNA, 25 bp, probe
aagaaataagattcagagcacttgg

SEQ ID NO: 91876 - DNA, 25 bp, probe
ataagattcagagcacttgggattg

SEQ ID NO: 91877 - DNA, 25 bp, probe
gaaataagattcagagcacttggga

SEQ ID NO: 91878 - DNA, 25 bp, probe
agaaataagattcagagcacttggg

SEQ ID NO: 91879 - DNA, 25 bp, probe
gattgtaagttataggttctgagct

SEQ ID NO: 91880 - DNA, 25 bp, probe
cacacaatggatggacacattatat

SEQ ID NO: 91881 - DNA, 25 bp, probe
acccaaaccaagtgtatgtattgat

SEQ ID NO: 91882 - DNA, 25 bp, probe
caatggatggacacattatatctcc

SEQ ID NO: 91883 - DNA, 25 bp, probe
cccaaaccaagtgtatgtattgatt

SEQ ID NO: 91884 - DNA, 25 bp, probe
tggtaagaaataagattcagagcac

SEQ ID NO: 91885 - DNA, 25 bp, probe
aacccaaaccaagtgtatgtattga

SEQ ID NO: 91886 - DNA, 25 bp, probe
caacccaaaccaagtgtatgtattg

SEQ ID NO: 91887 - DNA, 25 bp, probe
acacaatggatggacacattatatc

SEQ ID NO: 91888 - DNA, 25 bp, probe
cactctgaagtatgtgctgtctcat

SEQ ID NO: 91889 - DNA, 25 bp, probe
gggattgtaagttataggttctgag

SEQ ID NO: 91890 - DNA, 25 bp, probe
ctgaagtatgtgctgtctcatgtct

SEQ ID NO: 91891 - DNA, 25 bp, probe
tctgaagtatgtgctgtctcatgtc

SEQ ID NO: 91892 - DNA, 25 bp, probe
ctctgaagtatgtgctgtctcatgt

SEQ ID NO: 91893 - DNA, 25 bp, probe
actctgaagtatgtgctgtctcatg

SEQ ID NO: 91894 - DNA, 25 bp, probe
taattctgtaggtaaccatttgagc

SEQ ID NO: 91895 - DNA, 25 bp, probe
cacaatggatggacacattatatct

SEQ ID NO: 91896 - DNA, 25 bp, probe
gacacacaatggatggacacattat

SEQ ID NO: 91897 - DNA, 25 bp, probe
ttgggattgtaagttataggttctg

SEQ ID NO: 91898 - DNA, 25 bp, probe
ggtaagaaataagattcagagcact

SEQ ID NO: 91899 - DNA, 25 bp, probe
gtgtgggtggaaagatcaaattaac

SEQ ID NO: 91900 - DNA, 25 bp, probe
atggttaattgtgagcatcctcctg

SEQ ID NO: 91901 - DNA, 25 bp, probe
aaaggaaatgattactgtcaaacca

SEQ ID NO: 91902 - DNA, 25 bp, probe
aagaaggtgtgtaagtgaagtggtt

SEQ ID NO: 91903 - DNA, 25 bp, probe
aaggtgtgtaagtgaagtggttctc

SEQ ID NO: 91904 - DNA, 25 bp, probe
gaaggtgtgtaagtgaagtggttct

SEQ ID NO: 91905 - DNA, 25 bp, probe
agaaggtgtgtaagtgaagtggttc

SEQ ID NO: 91906 - DNA, 25 bp, probe
tgtgtaagtgaagtggttctcagtc

SEQ ID NO: 91907 - DNA, 25 bp, probe
gtgtgtaagtgaagtggttctcagt

SEQ ID NO: 91908 - DNA, 25 bp, probe
ctcaaacctcttccagatttctcta

SEQ ID NO: 91909 - DNA, 25 bp, probe
tcaaacctcttccagatttctctaa

SEQ ID NO: 91910 - DNA, 25 bp, probe
caaacctcttccagatttctctaag

SEQ ID NO: 91911 - DNA, 25 bp, probe
gtgtaagtgaagtggttctcagtcc

SEQ ID NO: 91912 - DNA, 25 bp, probe
ctgtgagagtgtcaagtgtgtaagg

SEQ ID NO: 91913 - DNA, 25 bp, probe
caaagaaggtgtgtaagtgaagtgg

SEQ ID NO: 91914 - DNA, 25 bp, probe
ccaaagaaggtgtgtaagtgaagtg

SEQ ID NO: 91915 - DNA, 25 bp, probe
tgggttgtagagaactctttgtaag

SEQ ID NO: 91916 - DNA, 25 bp, probe
ctgggttgtagagaactctttgtaa

SEQ ID NO: 91917 - DNA, 25 bp, probe
ggttgtagagaactctttgtaagca

SEQ ID NO: 91918 - DNA, 25 bp, probe
ggtgtgtaagtgaagtggttctcag

SEQ ID NO: 91919 - DNA, 25 bp, probe
tctgggttgtagagaactctttgta

SEQ ID NO: 91920 - DNA, 25 bp, probe
aaagaaggtgtgtaagtgaagtggt

SEQ ID NO: 91921 - DNA, 25 bp, probe
gttgtagagaactctttgtaagcaa

SEQ ID NO: 91922 - DNA, 25 bp, probe
cctcaaacctcttccagatttctct

SEQ ID NO: 91923 - DNA, 25 bp, probe
tcctcaaacctcttccagatttctc

SEQ ID NO: 91924 - DNA, 25 bp, probe
ctcctcaaacctcttccagatttct

SEQ ID NO: 91925 - DNA, 25 bp, probe
gggttgtagagaactctttgtaagc

SEQ ID NO: 91926 - DNA, 25 bp, probe
actcctcaaacctcttccagatttc

SEQ ID NO: 91927 - DNA, 25 bp, probe
gactcctcaaacctcttccagattt

SEQ ID NO: 91928 - DNA, 25 bp, probe
ctcatctgtaaaggtgaagggtgat

SEQ ID NO: 91929 - DNA, 25 bp, probe
aggtgtgtaagtgaagtggttctca

SEQ ID NO: 91930 - DNA, 25 bp, probe
gctgtgagagtgtcaagtgtgtaag

SEQ ID NO: 91931 - DNA, 25 bp, probe
ttgtagagaactctttgtaagcaat

SEQ ID NO: 91932 - DNA, 25 bp, probe
gtctgggttgtagagaactctttgt

SEQ ID NO: 91933 - DNA, 25 bp, probe
agtctgggttgtagagaactctttg

SEQ ID NO: 91934 - DNA, 25 bp, probe
agttccctcatctgtaaaggtgaag

SEQ ID NO: 91935 - DNA, 25 bp, probe
ctcaggactcacgtagcattaaatc

SEQ ID NO: 91936 - DNA, 25 bp, probe
tactcaggactcacgtagcattaaa

SEQ ID NO: 91937 - DNA, 25 bp, probe
gaacagtctgtggatggacatgatc

SEQ ID NO: 91938 - DNA, 25 bp, probe
tgtagagaactctttgtaagcaata

SEQ ID NO: 91939 - DNA, 25 bp, probe
gaccaaagaaggtgtgtaagtgaag

SEQ ID NO: 91940 - DNA, 25 bp, probe
caggactcacgtagcattaaatcag

SEQ ID NO: 91941 - DNA, 25 bp, probe
cagttccctcatctgtaaaggtgaa

SEQ ID NO: 91942 - DNA, 25 bp, probe
ctctttgtaagcaataaagtttggg

SEQ ID NO: 91943 - DNA, 25 bp, probe
tccagatttctctaagaatagcacc

SEQ ID NO: 91944 - DNA, 25 bp, probe
ctactcaggactcacgtagcattaa

SEQ ID NO: 91945 - DNA, 25 bp, probe
tgctgtgagagtgtcaagtgtgtaa

SEQ ID NO: 91946 - DNA, 25 bp, probe
tattctatcctctcctcttcctctc

SEQ ID NO: 91947 - DNA, 25 bp, probe
ttattctatcctctcctcttcctct

SEQ ID NO: 91948 - DNA, 25 bp, probe
cttgttagtgatgtggagttcctac

SEQ ID NO: 91949 - DNA, 25 bp, probe
attctatcctctcctcttcctctcc

SEQ ID NO: 91950 - DNA, 25 bp, probe
ttacttacctgcttgaatacttgaa

SEQ ID NO: 91951 - DNA, 25 bp, probe
acttacctgcttgaatacttgaata

SEQ ID NO: 91952 - DNA, 25 bp, probe
tacttacctgcttgaatacttgaat

SEQ ID NO: 91953 - DNA, 25 bp, probe
atcacctgtgttatctcagttgtag

SEQ ID NO: 91954 - DNA, 25 bp, probe
cagttatcacctgtgttatctcagt

SEQ ID NO: 91955 - DNA, 25 bp, probe
tcagttatcacctgtgttatctcag

SEQ ID NO: 91956 - DNA, 25 bp, probe
ttatcacctgtgttatctcagttgt

SEQ ID NO: 91957 - DNA, 25 bp, probe
gttatcacctgtgttatctcagttg

SEQ ID NO: 91958 - DNA, 25 bp, probe
agttatcacctgtgttatctcagtt

SEQ ID NO: 91959 - DNA, 25 bp, probe
ttcagttatcacctgtgttatctca

SEQ ID NO: 91960 - DNA, 25 bp, probe
cactgaattgttgtgtaatagcctt

SEQ ID NO: 91961 - DNA, 25 bp, probe
ctcactgaattgttgtgtaatagcc

SEQ ID NO: 91962 - DNA, 25 bp, probe
tcactgaattgttgtgtaatagcct

SEQ ID NO: 91963 - DNA, 25 bp, probe
actcactgaattgttgtgtaatagc

SEQ ID NO: 91964 - DNA, 25 bp, probe
ggttatacttccattatcaaggcta

SEQ ID NO: 91965 - DNA, 25 bp, probe
ggtacatattaagtggcttgttgag

SEQ ID NO: 91966 - DNA, 25 bp, probe
tatcacctgtgttatctcagttgta

SEQ ID NO: 91967 - DNA, 25 bp, probe
ttgttagtgatgtggagttcctaca

SEQ ID NO: 91968 - DNA, 25 bp, probe
gcttgttagtgatgtggagttccta

SEQ ID NO: 91969 - DNA, 25 bp, probe
catgttaattctgacagttcaccaa

SEQ ID NO: 91970 - DNA, 25 bp, probe
tcatgttaattctgacagttcacca

SEQ ID NO: 91971 - DNA, 25 bp, probe
ttcatgttaattctgacagttcacc

SEQ ID NO: 91972 - DNA, 25 bp, probe
tggttatacttccattatcaaggct

SEQ ID NO: 91973 - DNA, 25 bp, probe
ctggttatacttccattatcaaggc

SEQ ID NO: 91974 - DNA, 25 bp, probe
ttcctacgttgtgtattacttggtt

SEQ ID NO: 91975 - DNA, 25 bp, probe
atggttcctacgttgtgtattactt

SEQ ID NO: 91976 - DNA, 25 bp, probe
aatggttcctacgttgtgtattact

SEQ ID NO: 91977 - DNA, 25 bp, probe
ggtttattctatcctctcctcttcc

SEQ ID NO: 91978 - DNA, 25 bp, probe
tcacctgtgttatctcagttgtagg

SEQ ID NO: 91979 - DNA, 25 bp, probe
cctgcttgaatacttgaataaacca

SEQ ID NO: 91980 - DNA, 25 bp, probe
acctgcttgaatacttgaataaacc

SEQ ID NO: 91981 - DNA, 25 bp, probe
gttcctacgttgtgtattacttggt

SEQ ID NO: 91982 - DNA, 25 bp, probe
tggttcctacgttgtgtattacttg

SEQ ID NO: 91983 - DNA, 25 bp, probe
gaatggttcctacgttgtgtattac

SEQ ID NO: 91984 - DNA, 25 bp, probe
cttacctgcttgaatacttgaataa

SEQ ID NO: 91985 - DNA, 25 bp, probe
aaggcttgttagtgatgtggagttc

SEQ ID NO: 91986 - DNA, 25 bp, probe
gaataatggttctggttatacttcc

SEQ ID NO: 91987 - DNA, 25 bp, probe
gtttctacctctcatttgtaactgc

SEQ ID NO: 91988 - DNA, 25 bp, probe
gtttattctatcctctcctcttcct

SEQ ID NO: 91989 - DNA, 25 bp, probe
actgaattgttgtgtaatagccttt

SEQ ID NO: 91990 - DNA, 25 bp, probe
ctaatctgaccgttctattgtgtgg

SEQ ID NO: 91991 - DNA, 25 bp, probe
taatctgaccgttctattgtgtgga

SEQ ID NO: 91992 - DNA, 25 bp, probe
gctaatctgaccgttctattgtgtg

SEQ ID NO: 91993 - DNA, 25 bp, probe
aatctgaccgttctattgtgtggat

SEQ ID NO: 91994 - DNA, 25 bp, probe
atctgaccgttctattgtgtggatg

SEQ ID NO: 91995 - DNA, 25 bp, probe
gagctaatctgaccgttctattgtg

SEQ ID NO: 91996 - DNA, 25 bp, probe
ctacttgcctcatttccctatcttc

SEQ ID NO: 91997 - DNA, 25 bp, probe
atctacttgcctcatttccctatct

SEQ ID NO: 91998 - DNA, 25 bp, probe
tacttgcctcatttccctatcttct

SEQ ID NO: 91999 - DNA, 25 bp, probe
tctacttgcctcatttccctatctt

SEQ ID NO: 92000 - DNA, 25 bp, probe
aagggcaaggagtttattacaatgt

SEQ ID NO: 92001 - DNA, 25 bp, probe
taagggcaaggagtttattacaatg

SEQ ID NO: 92002 - DNA, 25 bp, probe
agctaatctgaccgttctattgtgt

SEQ ID NO: 92003 - DNA, 25 bp, probe
gggatattgccttatttgtctgtaa

SEQ ID NO: 92004 - DNA, 25 bp, probe
tttagacttcccactgttctgaaag

SEQ ID NO: 92005 - DNA, 25 bp, probe
ctttagacttcccactgttctgaaa

SEQ ID NO: 92006 - DNA, 25 bp, probe
taaactttagacttcccactgttct

SEQ ID NO: 92007 - DNA, 25 bp, probe
aggagctaatctgaccgttctattg

SEQ ID NO: 92008 - DNA, 25 bp, probe
agggcaaggagtttattacaatgta

SEQ ID NO: 92009 - DNA, 25 bp, probe
aaactttagacttcccactgttctg

SEQ ID NO: 92010 - DNA, 25 bp, probe
ggagctaatctgaccgttctattgt

SEQ ID NO: 92011 - DNA, 25 bp, probe
gggcaaggagtttattacaatgtat

SEQ ID NO: 92012 - DNA, 25 bp, probe
ttaagggcaaggagtttattacaat

SEQ ID NO: 92013 - DNA, 25 bp, probe
gatctacttgcctcatttccctatc

SEQ ID NO: 92014 - DNA, 25 bp, probe
ttctgaaaggagacattgctctatg

SEQ ID NO: 92015 - DNA, 25 bp, probe
gttctgaaaggagacattgctctat

SEQ ID NO: 92016 - DNA, 25 bp, probe
aatctgtttctctgctgtcaacttc

SEQ ID NO: 92017 - DNA, 25 bp, probe
gaatctgtttctctgctgtcaactt

SEQ ID NO: 92018 - DNA, 25 bp, probe
actttagacttcccactgttctgaa

SEQ ID NO: 92019 - DNA, 25 bp, probe
aactttagacttcccactgttctga

SEQ ID NO: 92020 - DNA, 25 bp, probe
ggatgaccacataagaaggcaattt

SEQ ID NO: 92021 - DNA, 25 bp, probe
ctgaccgttctattgtgtggatgac

SEQ ID NO: 92022 - DNA, 25 bp, probe
tctgaccgttctattgtgtggatga

SEQ ID NO: 92023 - DNA, 25 bp, probe
acttgcctcatttccctatcttctc

SEQ ID NO: 92024 - DNA, 25 bp, probe
tctctttgatctacttgcctcattt

SEQ ID NO: 92025 - DNA, 25 bp, probe
ctctttgatctacttgcctcatttc

SEQ ID NO: 92026 - DNA, 25 bp, probe
atctctttgatctacttgcctcatt

SEQ ID NO: 92027 - DNA, 25 bp, probe
tggatgaccacataagaaggcaatt

SEQ ID NO: 92028 - DNA, 25 bp, probe
tctttgatctacttgcctcatttcc

SEQ ID NO: 92029 - DNA, 25 bp, probe
ttatctctttgatctacttgcctca

SEQ ID NO: 92030 - DNA, 25 bp, probe
caggagctaatctgaccgttctatt

SEQ ID NO: 92031 - DNA, 25 bp, probe
aaagggtgtatagtgttcacaaact

SEQ ID NO: 92032 - DNA, 25 bp, probe
agggatattgccttatttgtctgta

SEQ ID NO: 92033 - DNA, 25 bp, probe
tgatctacttgcctcatttccctat

SEQ ID NO: 92034 - DNA, 25 bp, probe
ggtaataaggctttagaactgctga

SEQ ID NO: 92035 - DNA, 25 bp, probe
aggtaataaggctttagaactgctg

SEQ ID NO: 92036 - DNA, 25 bp, probe
gtaataaggctttagaactgctgat

SEQ ID NO: 92037 - DNA, 25 bp, probe
tctcaggtaataaggctttagaact

SEQ ID NO: 92038 - DNA, 25 bp, probe
aataaggctttagaactgctgataa

SEQ ID NO: 92039 - DNA, 25 bp, probe
caggtaataaggctttagaactgct

SEQ ID NO: 92040 - DNA, 25 bp, probe
tcaggtaataaggctttagaactgc

SEQ ID NO: 92041 - DNA, 25 bp, probe
ataaggctttagaactgctgataaa

SEQ ID NO: 92042 - DNA, 25 bp, probe
atctcaggtaataaggctttagaac

SEQ ID NO: 92043 - DNA, 25 bp, probe
ctcaggtaataaggctttagaactg

SEQ ID NO: 92044 - DNA, 25 bp, probe
taataaggctttagaactgctgata

SEQ ID NO: 92045 - DNA, 25 bp, probe
ctctctttaatctcacgtagccttt

SEQ ID NO: 92046 - DNA, 25 bp, probe
aatctcaggtaataaggctttagaa

SEQ ID NO: 92047 - DNA, 25 bp, probe
aaatctcaggtaataaggctttaga

SEQ ID NO: 92048 - DNA, 25 bp, probe
tctctctttaatctcacgtagcctt

SEQ ID NO: 92049 - DNA, 25 bp, probe
ttctctctttaatctcacgtagcct

SEQ ID NO: 92050 - DNA, 25 bp, probe
tttagaactgctgataaagcggatc

SEQ ID NO: 92051 - DNA, 25 bp, probe
ccaaaactcaaatctcctgtgaaat

SEQ ID NO: 92052 - DNA, 25 bp, probe
gacagatcatcagaaaagcccttac

SEQ ID NO: 92053 - DNA, 25 bp, probe
acagatcatcagaaaagcccttact

SEQ ID NO: 92054 - DNA, 25 bp, probe
taaatctcaggtaataaggctttag

SEQ ID NO: 92055 - DNA, 25 bp, probe
gccaaaactcaaatctcctgtgaaa

SEQ ID NO: 92056 - DNA, 25 bp, probe
taaggctttagaactgctgataaag

SEQ ID NO: 92057 - DNA, 25 bp, probe
ctttagaactgctgataaagcggat

SEQ ID NO: 92058 - DNA, 25 bp, probe
tctctttaatctcacgtagcctttt

SEQ ID NO: 92059 - DNA, 25 bp, probe
cagatcatcagaaaagcccttactg

SEQ ID NO: 92060 - DNA, 25 bp, probe
ggacagatcatcagaaaagccctta

SEQ ID NO: 92061 - DNA, 25 bp, probe
ttagaactgctgataaagcggatcg

SEQ ID NO: 92062 - DNA, 25 bp, probe
tataaatctcaggtaataaggcttt

SEQ ID NO: 92063 - DNA, 25 bp, probe
ataaatctcaggtaataaggcttta

SEQ ID NO: 92064 - DNA, 25 bp, probe
atataaatctcaggtaataaggctt

SEQ ID NO: 92065 - DNA, 25 bp, probe
aatataaatctcaggtaataaggct

SEQ ID NO: 92066 - DNA, 25 bp, probe
gaatataaatctcaggtaataaggc

SEQ ID NO: 92067 - DNA, 25 bp, probe
tagaactgctgataaagcggatcgt

SEQ ID NO: 92068 - DNA, 25 bp, probe
aggacagatcatcagaaaagccctt

SEQ ID NO: 92069 - DNA, 25 bp, probe
gaatgcaataaatcaaaataatggc

SEQ ID NO: 92070 - DNA, 25 bp, probe
aactgctgataaagcggatcgttct

SEQ ID NO: 92071 - DNA, 25 bp, probe
agaactgctgataaagcggatcgtt

SEQ ID NO: 92072 - DNA, 25 bp, probe
ctgctgataaagcggatcgttctca

SEQ ID NO: 92073 - DNA, 25 bp, probe
actgctgataaagcggatcgttctc

SEQ ID NO: 92074 - DNA, 25 bp, probe
gaactgctgataaagcggatcgttc

SEQ ID NO: 92075 - DNA, 25 bp, probe
caggacagatcatcagaaaagccct

SEQ ID NO: 92076 - DNA, 25 bp, probe
ttctgtcagggccaaaactcaaatc

SEQ ID NO: 92077 - DNA, 25 bp, probe
cttctgtcagggccaaaactcaaat

SEQ ID NO: 92078 - DNA, 25 bp, probe
tcctaagaagagtgctgtcattatt

SEQ ID NO: 92079 - DNA, 25 bp, probe
ttcctaagaagagtgctgtcattat

SEQ ID NO: 92080 - DNA, 25 bp, probe
gcttagtattgacactctctaccaa

SEQ ID NO: 92081 - DNA, 25 bp, probe
ctgcttagtattgacactctctacc

SEQ ID NO: 92082 - DNA, 25 bp, probe
cctgcttagtattgacactctctac

SEQ ID NO: 92083 - DNA, 25 bp, probe
taacctgcttagtattgacactctc

SEQ ID NO: 92084 - DNA, 25 bp, probe
gtaacctgcttagtattgacactct

SEQ ID NO: 92085 - DNA, 25 bp, probe
acctgcttagtattgacactctcta

SEQ ID NO: 92086 - DNA, 25 bp, probe
tgcttagtattgacactctctacca

SEQ ID NO: 92087 - DNA, 25 bp, probe
aacctgcttagtattgacactctct

SEQ ID NO: 92088 - DNA, 25 bp, probe
cgtaacctgcttagtattgacactc

SEQ ID NO: 92089 - DNA, 25 bp, probe
ttcgtcttcagtgtcttaatgtgga

SEQ ID NO: 92090 - DNA, 25 bp, probe
ttcagtgtcttaatgtggaagttaa

SEQ ID NO: 92091 - DNA, 25 bp, probe
tcgtcttcagtgtcttaatgtggaa

SEQ ID NO: 92092 - DNA, 25 bp, probe
ttagtattgacactctctaccaaga

SEQ ID NO: 92093 - DNA, 25 bp, probe
cttagtattgacactctctaccaag

SEQ ID NO: 92094 - DNA, 25 bp, probe
tcctcttatcaacaacttgtgacat

SEQ ID NO: 92095 - DNA, 25 bp, probe
ttcctcttatcaacaacttgtgaca

SEQ ID NO: 92096 - DNA, 25 bp, probe
cctcttatcaacaacttgtgacatg

SEQ ID NO: 92097 - DNA, 25 bp, probe
cttatcaacaacttgtgacatgaga

SEQ ID NO: 92098 - DNA, 25 bp, probe
tcttatcaacaacttgtgacatgag

SEQ ID NO: 92099 - DNA, 25 bp, probe
ctcttatcaacaacttgtgacatga

SEQ ID NO: 92100 - DNA, 25 bp, probe
tatcaacaacttgtgacatgagatt

SEQ ID NO: 92101 - DNA, 25 bp, probe
ttatcaacaacttgtgacatgagat

SEQ ID NO: 92102 - DNA, 25 bp, probe
gatttgaatagcagcattagtggtt

SEQ ID NO: 92103 - DNA, 25 bp, probe
aatctaatcaggaaagtaaggcagg

SEQ ID NO: 92104 - DNA, 25 bp, probe
tttgaatagcagcattagtggtttg

SEQ ID NO: 92105 - DNA, 25 bp, probe
cagatttgaatagcagcattagtgg

SEQ ID NO: 92106 - DNA, 25 bp, probe
acagatttgaatagcagcattagtg

SEQ ID NO: 92107 - DNA, 25 bp, probe
ctaatcaggaaagtaaggcaggaaa

SEQ ID NO: 92108 - DNA, 25 bp, probe
atttgaatagcagcattagtggttt

SEQ ID NO: 92109 - DNA, 25 bp, probe
agatttgaatagcagcattagtggt

SEQ ID NO: 92110 - DNA, 25 bp, probe
atctaatcaggaaagtaaggcagga

SEQ ID NO: 92111 - DNA, 25 bp, probe
aagaagagtgctgtcattatttcct

SEQ ID NO: 92112 - DNA, 25 bp, probe
ttgaatagcagcattagtggtttga

SEQ ID NO: 92113 - DNA, 25 bp, probe
tctaatcaggaaagtaaggcaggaa

SEQ ID NO: 92114 - DNA, 25 bp, probe
gtgctgtcattatttcctcttatca

SEQ ID NO: 92115 - DNA, 25 bp, probe
tctaaagtctatgtaatggtggtca

SEQ ID NO: 92116 - DNA, 25 bp, probe
aaatctaatcaggaaagtaaggcag

SEQ ID NO: 92117 - DNA, 25 bp, probe
cctaagaagagtgctgtcattattt

SEQ ID NO: 92118 - DNA, 25 bp, probe
agtgctgtcattatttcctcttatc

SEQ ID NO: 92119 - DNA, 25 bp, probe
gaatagcagcattagtggtttgagt

SEQ ID NO: 92120 - DNA, 25 bp, probe
tgaatagcagcattagtggtttgag

SEQ ID NO: 92121 - DNA, 25 bp, probe
tattctgaatattaacggtggtgaa

SEQ ID NO: 92122 - DNA, 25 bp, probe
gccttgaccaggagttcatatataa

SEQ ID NO: 92123 - DNA, 25 bp, probe
ccaacatccttcatcaatactttcc

SEQ ID NO: 92124 - DNA, 25 bp, probe
cccaacatccttcatcaatactttc

SEQ ID NO: 92125 - DNA, 25 bp, probe
tagagcaaatgtgttaggagagaag

SEQ ID NO: 92126 - DNA, 25 bp, probe
acccaacatccttcatcaatacttt

SEQ ID NO: 92127 - DNA, 25 bp, probe
atagagcaaatgtgttaggagagaa

SEQ ID NO: 92128 - DNA, 25 bp, probe
aacagaattaatcacactgaccaac

SEQ ID NO: 92129 - DNA, 25 bp, probe
gcaccttaaatctaatcagcaaact

SEQ ID NO: 92130 - DNA, 25 bp, probe
agcaccttaaatctaatcagcaaac

SEQ ID NO: 92131 - DNA, 25 bp, probe
cagcaccttaaatctaatcagcaaa

SEQ ID NO: 92132 - DNA, 25 bp, probe
acagaattaatcacactgaccaact

SEQ ID NO: 92133 - DNA, 25 bp, probe
tcacatcacagcaccttaaatctaa

SEQ ID NO: 92134 - DNA, 25 bp, probe
cagaattaatcacactgaccaactt

SEQ ID NO: 92135 - DNA, 25 bp, probe
gacccaacatccttcatcaatactt

SEQ ID NO: 92136 - DNA, 25 bp, probe
cacatcacagcaccttaaatctaat

SEQ ID NO: 92137 - DNA, 25 bp, probe
ctcacatcacagcaccttaaatcta

SEQ ID NO: 92138 - DNA, 25 bp, probe
catagtgtaggctaaggtgagtttg

SEQ ID NO: 92139 - DNA, 25 bp, probe
acagcaccttaaatctaatcagcaa

SEQ ID NO: 92140 - DNA, 25 bp, probe
aaatgtgttaggagagaaggtttca

SEQ ID NO: 92141 - DNA, 25 bp, probe
catagagcaaatgtgttaggagaga

SEQ ID NO: 92142 - DNA, 25 bp, probe
gtattctgaaactggaaactgaacc

SEQ ID NO: 92143 - DNA, 25 bp, probe
caaatgtgttaggagagaaggtttc

SEQ ID NO: 92144 - DNA, 25 bp, probe
aacatccttcatcaatactttcctg

SEQ ID NO: 92145 - DNA, 25 bp, probe
caacatccttcatcaatactttcct

SEQ ID NO: 92146 - DNA, 25 bp, probe
tacttaaatgttctcatctgtcgca

SEQ ID NO: 92147 - DNA, 25 bp, probe
tgtattctgaaactggaaactgaac

SEQ ID NO: 92148 - DNA, 25 bp, probe
ccttgaccaggagttcatatataac

SEQ ID NO: 92149 - DNA, 25 bp, probe
catcacagcaccttaaatctaatca

SEQ ID NO: 92150 - DNA, 25 bp, probe
acatcacagcaccttaaatctaatc

SEQ ID NO: 92151 - DNA, 25 bp, probe
atgtaaataggaagtgtttgggttt

SEQ ID NO: 92152 - DNA, 25 bp, probe
cttgtattctgaaactggaaactga

SEQ ID NO: 92153 - DNA, 25 bp, probe
tcttgtattctgaaactggaaactg

SEQ ID NO: 92154 - DNA, 25 bp, probe
tcacagcaccttaaatctaatcagc

SEQ ID NO: 92155 - DNA, 25 bp, probe
atcacagcaccttaaatctaatcag

SEQ ID NO: 92156 - DNA, 25 bp, probe
ccatagagcaaatgtgttaggagag

SEQ ID NO: 92157 - DNA, 25 bp, probe
gcaaatgtgttaggagagaaggttt

SEQ ID NO: 92158 - DNA, 25 bp, probe
cacagcaccttaaatctaatcagca

SEQ ID NO: 92159 - DNA, 25 bp, probe
acatccttcatcaatactttcctga

SEQ ID NO: 92160 - DNA, 25 bp, probe
ttgtattctgaaactggaaactgaa

SEQ ID NO: 92161 - DNA, 25 bp, probe
tccttcatcaatactttcctgagtt

SEQ ID NO: 92162 - DNA, 25 bp, probe
atccttcatcaatactttcctgagt

SEQ ID NO: 92163 - DNA, 25 bp, probe
catccttcatcaatactttcctgag

SEQ ID NO: 92164 - DNA, 25 bp, probe
ttcttgtattctgaaactggaaact

SEQ ID NO: 92165 - DNA, 25 bp, probe
agagcaatgtttcttgtattctgaa

SEQ ID NO: 92166 - DNA, 25 bp, probe
gccgcactgatggatatgtaataat

SEQ ID NO: 92167 - DNA, 25 bp, probe
ccgcactgatggatatgtaataata

SEQ ID NO: 92168 - DNA, 25 bp, probe
tgtccagtaacaagagttgattcat

SEQ ID NO: 92169 - DNA, 25 bp, probe
agccgcactgatggatatgtaataa

SEQ ID NO: 92170 - DNA, 25 bp, probe
aagccgcactgatggatatgtaata

SEQ ID NO: 92171 - DNA, 25 bp, probe
gtccagtaacaagagttgattcata

SEQ ID NO: 92172 - DNA, 25 bp, probe
gaacagccatcactatcaagatcag

SEQ ID NO: 92173 - DNA, 25 bp, probe
gtgtatcagataagaagcactggaa

SEQ ID NO: 92174 - DNA, 25 bp, probe
atgtgtatcagataagaagcactgg

SEQ ID NO: 92175 - DNA, 25 bp, probe
aatgtgtatcagataagaagcactg

SEQ ID NO: 92176 - DNA, 25 bp, probe
tgtgtatcagataagaagcactgga

SEQ ID NO: 92177 - DNA, 25 bp, probe
agtaatgtgtatcagataagaagca

SEQ ID NO: 92178 - DNA, 25 bp, probe
cactatcaagatcagctcatggaag

SEQ ID NO: 92179 - DNA, 25 bp, probe
tccagtaacaagagttgattcatat

SEQ ID NO: 92180 - DNA, 25 bp, probe
atcactatcaagatcagctcatgga

SEQ ID NO: 92181 - DNA, 25 bp, probe
cagtaatgtgtatcagataagaagc

SEQ ID NO: 92182 - DNA, 25 bp, probe
gcagtaatgtgtatcagataagaag

SEQ ID NO: 92183 - DNA, 25 bp, probe
tcactatcaagatcagctcatggaa

SEQ ID NO: 92184 - DNA, 25 bp, probe
catcactatcaagatcagctcatgg

SEQ ID NO: 92185 - DNA, 25 bp, probe
ccatcactatcaagatcagctcatg

SEQ ID NO: 92186 - DNA, 25 bp, probe
ggaacagccatcactatcaagatca

SEQ ID NO: 92187 - DNA, 25 bp, probe
ctatcaagatcagctcatggaagga

SEQ ID NO: 92188 - DNA, 25 bp, probe
caaactacctgctacaataatgact

SEQ ID NO: 92189 - DNA, 25 bp, probe
caaatatcacaggcttcagggttaa

SEQ ID NO: 92190 - DNA, 25 bp, probe
atttagaggtttgttggactttcat

SEQ ID NO: 92191 - DNA, 25 bp, probe
agaggtttgttggactttcataaat

SEQ ID NO: 92192 - DNA, 25 bp, probe
actatcaagatcagctcatggaagg

SEQ ID NO: 92193 - DNA, 25 bp, probe
aaatatcacaggcttcagggttaag

SEQ ID NO: 92194 - DNA, 25 bp, probe
tttgccaagccatattgagttattt

SEQ ID NO: 92195 - DNA, 25 bp, probe
cgcactgatggatatgtaataataa

SEQ ID NO: 92196 - DNA, 25 bp, probe
gtaagaggaagggactttcactttc

SEQ ID NO: 92197 - DNA, 25 bp, probe
ggtttgcctacaggtagattagatt

SEQ ID NO: 92198 - DNA, 25 bp, probe
tgttggacttgatggagaaattaaa

SEQ ID NO: 92199 - DNA, 25 bp, probe
taagaggaagggactttcactttca

SEQ ID NO: 92200 - DNA, 25 bp, probe
tatgagtaagaggaagggactttca

SEQ ID NO: 92201 - DNA, 25 bp, probe
atatcacaggcttcagggttaagat

SEQ ID NO: 92202 - DNA, 25 bp, probe
atgttggacttgatggagaaattaa

SEQ ID NO: 92203 - DNA, 25 bp, probe
atatgagtaagaggaagggactttc

SEQ ID NO: 92204 - DNA, 25 bp, probe
ttagaggtttgttggactttcataa

SEQ ID NO: 92205 - DNA, 25 bp, probe
tttagaggtttgttggactttcata

SEQ ID NO: 92206 - DNA, 25 bp, probe
tatttagaggtttgttggactttca

SEQ ID NO: 92207 - DNA, 25 bp, probe
tatcaagatcagctcatggaaggag

SEQ ID NO: 92208 - DNA, 25 bp, probe
taatgtgtatcagataagaagcact

SEQ ID NO: 92209 - DNA, 25 bp, probe
gtaatgtgtatcagataagaagcac

SEQ ID NO: 92210 - DNA, 25 bp, probe
cacctgtattctcatagcatccttg

SEQ ID NO: 92211 - DNA, 25 bp, probe
acctgtattctcatagcatccttgg

SEQ ID NO: 92212 - DNA, 25 bp, probe
ccacctgtattctcatagcatcctt

SEQ ID NO: 92213 - DNA, 25 bp, probe
cctgtattctcatagcatccttggc

SEQ ID NO: 92214 - DNA, 25 bp, probe
caacctctacatccaggaatgagtc

SEQ ID NO: 92215 - DNA, 25 bp, probe
cttctcgtaaagttgttcaatggct

SEQ ID NO: 92216 - DNA, 25 bp, probe
ttctcgtaaagttgttcaatggctg

SEQ ID NO: 92217 - DNA, 25 bp, probe
ccaataaacatgactttagcctctg

SEQ ID NO: 92218 - DNA, 25 bp, probe
caataaacatgactttagcctctgc

SEQ ID NO: 92219 - DNA, 25 bp, probe
cccaataaacatgactttagcctct

SEQ ID NO: 92220 - DNA, 25 bp, probe
tcccaataaacatgactttagcctc

SEQ ID NO: 92221 - DNA, 25 bp, probe
ctcccaataaacatgactttagcct

SEQ ID NO: 92222 - DNA, 25 bp, probe
tctcccaataaacatgactttagcc

SEQ ID NO: 92223 - DNA, 25 bp, probe
cccttctcgtaaagttgttcaatgg

SEQ ID NO: 92224 - DNA, 25 bp, probe
atctcccaataaacatgactttagc

SEQ ID NO: 92225 - DNA, 25 bp, probe
gttctcatgtctctctcaggaaaga

SEQ ID NO: 92226 - DNA, 25 bp, probe
ccttctcgtaaagttgttcaatggc

SEQ ID NO: 92227 - DNA, 25 bp, probe
gcccttctcgtaaagttgttcaatg

SEQ ID NO: 92228 - DNA, 25 bp, probe
aacctctacatccaggaatgagtcc

SEQ ID NO: 92229 - DNA, 25 bp, probe
aaagatgaagagaaagggatgtgcc

SEQ ID NO: 92230 - DNA, 25 bp, probe
tgcccttctcgtaaagttgttcaat

SEQ ID NO: 92231 - DNA, 25 bp, probe
catctcccaataaacatgactttag

SEQ ID NO: 92232 - DNA, 25 bp, probe
cgttctcatgtctctctcaggaaag

SEQ ID NO: 92233 - DNA, 25 bp, probe
gaaaagatgaagagaaagggatgtg

SEQ ID NO: 92234 - DNA, 25 bp, probe
aaggaaaagatgaagagaaagggat

SEQ ID NO: 92235 - DNA, 25 bp, probe
gaaggaaaagatgaagagaaaggga

SEQ ID NO: 92236 - DNA, 25 bp, probe
agaaggaaaagatgaagagaaaggg

SEQ ID NO: 92237 - DNA, 25 bp, probe
ctctacatccaggaatgagtcccta

SEQ ID NO: 92238 - DNA, 25 bp, probe
aggaaaagatgaagagaaagggatg

SEQ ID NO: 92239 - DNA, 25 bp, probe
cccaagaaggaaaagatgaagagaa

SEQ ID NO: 92240 - DNA, 25 bp, probe
ggaaaagatgaagagaaagggatgt

SEQ ID NO: 92241 - DNA, 25 bp, probe
tctacatccaggaatgagtccctag

SEQ ID NO: 92242 - DNA, 25 bp, probe
cccacctgtattctcatagcatcct

SEQ ID NO: 92243 - DNA, 25 bp, probe
ccaagaaggaaaagatgaagagaaa

SEQ ID NO: 92244 - DNA, 25 bp, probe
agcaacctctacatccaggaatgag

SEQ ID NO: 92245 - DNA, 25 bp, probe
aagaaggaaaagatgaagagaaagg

SEQ ID NO: 92246 - DNA, 25 bp, probe
cctcatctcccaataaacatgactt

SEQ ID NO: 92247 - DNA, 25 bp, probe
atgtgcccttctcgtaaagttgttc

SEQ ID NO: 92248 - DNA, 25 bp, probe
gatgtgcccttctcgtaaagttgtt

SEQ ID NO: 92249 - DNA, 25 bp, probe
aaaagatgaagagaaagggatgtgc

SEQ ID NO: 92250 - DNA, 25 bp, probe
ctcatctcccaataaacatgacttt

SEQ ID NO: 92251 - DNA, 25 bp, probe
gcaacctctacatccaggaatgagt

SEQ ID NO: 92252 - DNA, 25 bp, probe
tcctcatctcccaataaacatgact

SEQ ID NO: 92253 - DNA, 25 bp, probe
gtcctcatctcccaataaacatgac

SEQ ID NO: 92254 - DNA, 25 bp, probe
gattgtgaagacggacccatatatc

SEQ ID NO: 92255 - DNA, 25 bp, probe
cagattgtgaagacggacccatata

SEQ ID NO: 92256 - DNA, 25 bp, probe
agattgtgaagacggacccatatat

SEQ ID NO: 92257 - DNA, 25 bp, probe
atatatccctacctcccaccaccta

SEQ ID NO: 92258 - DNA, 25 bp, probe
attgtgaagacggacccatatatcc

SEQ ID NO: 92259 - DNA, 25 bp, probe
tatatccctacctcccaccacctag

SEQ ID NO: 92260 - DNA, 25 bp, probe
gagaggtccagagggttcctataag

SEQ ID NO: 92261 - DNA, 25 bp, probe
ttaaataaggaagaggcccagattg

SEQ ID NO: 92262 - DNA, 25 bp, probe
ggcctctaataaactgtgtcctata

SEQ ID NO: 92263 - DNA, 25 bp, probe
gtcagtgcaggttatgagatccttg

SEQ ID NO: 92264 - DNA, 25 bp, probe
tggcctctaataaactgtgtcctat

SEQ ID NO: 92265 - DNA, 25 bp, probe
atggcctctaataaactgtgtccta

SEQ ID NO: 92266 - DNA, 25 bp, probe
cttaaataaggaagaggcccagatt

SEQ ID NO: 92267 - DNA, 25 bp, probe
tttgctactttggttgtggtcactc

SEQ ID NO: 92268 - DNA, 25 bp, probe
ctgatggcctctaataaactgtgtc

SEQ ID NO: 92269 - DNA, 25 bp, probe
gtctgatggcctctaataaactgtg

SEQ ID NO: 92270 - DNA, 25 bp, probe
atttatggaaaacaagatgtctgcc

SEQ ID NO: 92271 - DNA, 25 bp, probe
tgaagacggacccatatatccctac

SEQ ID NO: 92272 - DNA, 25 bp, probe
gtgaagacggacccatatatcccta

SEQ ID NO: 92273 - DNA, 25 bp, probe
gcacgatttatggaaaacaagatgt

SEQ ID NO: 92274 - DNA, 25 bp, probe
tctgatggcctctaataaactgtgt

SEQ ID NO: 92275 - DNA, 25 bp, probe
taaataaggaagaggcccagattgt

SEQ ID NO: 92276 - DNA, 25 bp, probe
cacgatttatggaaaacaagatgtc

SEQ ID NO: 92277 - DNA, 25 bp, probe
gatttatggaaaacaagatgtctgc

SEQ ID NO: 92278 - DNA, 25 bp, probe
acgatttatggaaaacaagatgtct

SEQ ID NO: 92279 - DNA, 25 bp, probe
agctgcctgactctaactacaacac

SEQ ID NO: 92280 - DNA, 25 bp, probe
cgatttatggaaaacaagatgtctg

SEQ ID NO: 92281 - DNA, 25 bp, probe
gatggcctctaataaactgtgtcct

SEQ ID NO: 92282 - DNA, 25 bp, probe
ggtctgatggcctctaataaactgt

SEQ ID NO: 92283 - DNA, 25 bp, probe
ccagattgtgaagacggacccatat

SEQ ID NO: 92284 - DNA, 25 bp, probe
gctgcctgactctaactacaacacc

SEQ ID NO: 92285 - DNA, 25 bp, probe
gaggtcactcagggtcaatactcag

SEQ ID NO: 92286 - DNA, 25 bp, probe
cagaggtcactcagggtcaatactc

SEQ ID NO: 92287 - DNA, 25 bp, probe
ctcagaggtcactcagggtcaatac

SEQ ID NO: 92288 - DNA, 25 bp, probe
tgatggcctctaataaactgtgtcc

SEQ ID NO: 92289 - DNA, 25 bp, probe
gaagacggacccatatatccctacc

SEQ ID NO: 92290 - DNA, 25 bp, probe
ctgcacgatttatggaaaacaagat

SEQ ID NO: 92291 - DNA, 25 bp, probe
tgcacgatttatggaaaacaagatg

SEQ ID NO: 92292 - DNA, 25 bp, probe
ttatggaaaacaagatgtctgccaa

SEQ ID NO: 92293 - DNA, 25 bp, probe
tttatggaaaacaagatgtctgcca

SEQ ID NO: 92294 - DNA, 25 bp, probe
aatactcagggtcagtgcaggttat

SEQ ID NO: 92295 - DNA, 25 bp, probe
agaggtcactcagggtcaatactca

SEQ ID NO: 92296 - DNA, 25 bp, probe
tcagaggtcactcagggtcaatact

SEQ ID NO: 92297 - DNA, 25 bp, probe
catatatccctacctcccaccacct

SEQ ID NO: 92298 - DNA, 25 bp, probe
aatactatgattgagcacgatgaca

SEQ ID NO: 92299 - DNA, 25 bp, probe
atgaggaagaggaaggaactatgaa

SEQ ID NO: 92300 - DNA, 25 bp, probe
atactatgattgagcacgatgacac

SEQ ID NO: 92301 - DNA, 25 bp, probe
gatgaggaagaggaaggaactatga

SEQ ID NO: 92302 - DNA, 25 bp, probe
gactgatggagccaatactatgatt

SEQ ID NO: 92303 - DNA, 25 bp, probe
tgactgatggagccaatactatgat

SEQ ID NO: 92304 - DNA, 25 bp, probe
atgactgatggagccaatactatga

SEQ ID NO: 92305 - DNA, 25 bp, probe
ggatgaggaagaggaaggaactatg

SEQ ID NO: 92306 - DNA, 25 bp, probe
aggatgaggaagaggaaggaactat

SEQ ID NO: 92307 - DNA, 25 bp, probe
agtgtcaatactgcgagacttaatt

SEQ ID NO: 92308 - DNA, 25 bp, probe
gagtgtcaatactgcgagacttaat

SEQ ID NO: 92309 - DNA, 25 bp, probe
ggaatacagtgataggaacaccatt

SEQ ID NO: 92310 - DNA, 25 bp, probe
catgactgatggagccaatactatg

SEQ ID NO: 92311 - DNA, 25 bp, probe
gaggatgaggaagaggaaggaacta

SEQ ID NO: 92312 - DNA, 25 bp, probe
caagcggaatacagtgataggaaca

SEQ ID NO: 92313 - DNA, 25 bp, probe
gtgccatcttgatgtgtgtatgtac

SEQ ID NO: 92314 - DNA, 25 bp, probe
tactatgattgagcacgatgacacg

SEQ ID NO: 92315 - DNA, 25 bp, probe
tagcaggtcaacttacagataccat

SEQ ID NO: 92316 - DNA, 25 bp, probe
gtgtcaatactgcgagacttaatta

SEQ ID NO: 92317 - DNA, 25 bp, probe
tgaggaagaggaaggaactatgaaa

SEQ ID NO: 92318 - DNA, 25 bp, probe
caatactatgattgagcacgatgac

SEQ ID NO: 92319 - DNA, 25 bp, probe
tgatggagccaatactatgattgag

SEQ ID NO: 92320 - DNA, 25 bp, probe
ctgatggagccaatactatgattga

SEQ ID NO: 92321 - DNA, 25 bp, probe
gatggagcaggagattgaagagatc

SEQ ID NO: 92322 - DNA, 25 bp, probe
tgatggagcaggagattgaagagat

SEQ ID NO: 92323 - DNA, 25 bp, probe
atgatggagcaggagattgaagaga

SEQ ID NO: 92324 - DNA, 25 bp, probe
actgatggagccaatactatgattg

SEQ ID NO: 92325 - DNA, 25 bp, probe
ttatgctgatatccatccaatgagg

SEQ ID NO: 92326 - DNA, 25 bp, probe
ccttatgctgatatccatccaatga

SEQ ID NO: 92327 - DNA, 25 bp, probe
cggaatacagtgataggaacaccat

SEQ ID NO: 92328 - DNA, 25 bp, probe
ggagtgtcaatactgcgagacttaa

SEQ ID NO: 92329 - DNA, 25 bp, probe
acattggtcaggtatattatctcaa

SEQ ID NO: 92330 - DNA, 25 bp, probe
ccaatactatgattgagcacgatga

SEQ ID NO: 92331 - DNA, 25 bp, probe
cttatgctgatatccatccaatgag

SEQ ID NO: 92332 - DNA, 25 bp, probe
gaagtgattcaggaaattggataca

SEQ ID NO: 92333 - DNA, 25 bp, probe
gtagcaggtcaacttacagatacca

SEQ ID NO: 92334 - DNA, 25 bp, probe
aattggatacaactgtgtagcagac

SEQ ID NO: 92335 - DNA, 25 bp, probe
ccaagcggaatacagtgataggaac

SEQ ID NO: 92336 - DNA, 25 bp, probe
gtgattcaggaaattggatacaact

SEQ ID NO: 92337 - DNA, 25 bp, probe
agtgattcaggaaattggatacaac

SEQ ID NO: 92338 - DNA, 25 bp, probe
tggtcaggtatattatctcaaagga

SEQ ID NO: 92339 - DNA, 25 bp, probe
aggatggagactacgagtttcttaa

SEQ ID NO: 92340 - DNA, 25 bp, probe
actcagaagaggatgaaatggattc

SEQ ID NO: 92341 - DNA, 25 bp, probe
aactcagaagaggatgaaatggatt

SEQ ID NO: 92342 - DNA, 25 bp, probe
tcacttatcattcattcggtatggt

SEQ ID NO: 92343 - DNA, 25 bp, probe
cacttatcattcattcggtatggtt

SEQ ID NO: 92344 - DNA, 25 bp, probe
atcacttatcattcattcggtatgg

SEQ ID NO: 92345 - DNA, 25 bp, probe
aagacacacttattgattctgttgc

SEQ ID NO: 92346 - DNA, 25 bp, probe
cctcattccatcatcaccatctctt

SEQ ID NO: 92347 - DNA, 25 bp, probe
gctaagacacacttattgattctgt

SEQ ID NO: 92348 - DNA, 25 bp, probe
catcatcaccatctctttctcacta

SEQ ID NO: 92349 - DNA, 25 bp, probe
attccatcatcaccatctctttctc

SEQ ID NO: 92350 - DNA, 25 bp, probe
tgattacagagagcatttgggattt

SEQ ID NO: 92351 - DNA, 25 bp, probe
ttgattacagagagcatttgggatt

SEQ ID NO: 92352 - DNA, 25 bp, probe
gatcacttatcattcattcggtatg

SEQ ID NO: 92353 - DNA, 25 bp, probe
cattccatcatcaccatctctttct

SEQ ID NO: 92354 - DNA, 25 bp, probe
tcattccatcatcaccatctctttc

SEQ ID NO: 92355 - DNA, 25 bp, probe
ctcattccatcatcaccatctcttt

SEQ ID NO: 92356 - DNA, 25 bp, probe
gtgctgtcccttgtatttactttaa

SEQ ID NO: 92357 - DNA, 25 bp, probe
tttattgaaactgtggattcttgcc

SEQ ID NO: 92358 - DNA, 25 bp, probe
gttgattacagagagcatttgggat

SEQ ID NO: 92359 - DNA, 25 bp, probe
cgtgctgtcccttgtatttacttta

SEQ ID NO: 92360 - DNA, 25 bp, probe
ctcagagctaagacacacttattga

SEQ ID NO: 92361 - DNA, 25 bp, probe
tctcagagctaagacacacttattg

SEQ ID NO: 92362 - DNA, 25 bp, probe
ctctcagagctaagacacacttatt

SEQ ID NO: 92363 - DNA, 25 bp, probe
aaattggttgaatgtttctgtctgt

SEQ ID NO: 92364 - DNA, 25 bp, probe
tgtcccttgtatttactttaagcac

SEQ ID NO: 92365 - DNA, 25 bp, probe
aattggttgaatgtttctgtctgtg

SEQ ID NO: 92366 - DNA, 25 bp, probe
ccatctctttctcactaggttcttt

SEQ ID NO: 92367 - DNA, 25 bp, probe
tcagagctaagacacacttattgat

SEQ ID NO: 92368 - DNA, 25 bp, probe
atcatcaccatctctttctcactag

SEQ ID NO: 92369 - DNA, 25 bp, probe
ttccatcatcaccatctctttctca

SEQ ID NO: 92370 - DNA, 25 bp, probe
actgttgaagaaatagagaggaggg

SEQ ID NO: 92371 - DNA, 25 bp, probe
cccttgtatttactttaagcactga

SEQ ID NO: 92372 - DNA, 25 bp, probe
tcccttgtatttactttaagcactg

SEQ ID NO: 92373 - DNA, 25 bp, probe
gtcccttgtatttactttaagcact

SEQ ID NO: 92374 - DNA, 25 bp, probe
ctgtcccttgtatttactttaagca

SEQ ID NO: 92375 - DNA, 25 bp, probe
tgctgtcccttgtatttactttaag

SEQ ID NO: 92376 - DNA, 25 bp, probe
ggaacaggagaagaaatcaccaatt

SEQ ID NO: 92377 - DNA, 25 bp, probe
caaattggttgaatgtttctgtctg

SEQ ID NO: 92378 - DNA, 25 bp, probe
ctcaagggcataagttattgtgaac

SEQ ID NO: 92379 - DNA, 25 bp, probe
acacttattgattctgttgcacatt

SEQ ID NO: 92380 - DNA, 25 bp, probe
cacacttattgattctgttgcacat

SEQ ID NO: 92381 - DNA, 25 bp, probe
agctaagacacacttattgattctg

SEQ ID NO: 92382 - DNA, 25 bp, probe
cagagctaagacacacttattgatt

SEQ ID NO: 92383 - DNA, 25 bp, probe
catctctttctcactaggttctttc

SEQ ID NO: 92384 - DNA, 25 bp, probe
acttatcattcattcggtatggttt

SEQ ID NO: 92385 - DNA, 25 bp, probe
atttattgaaactgtggattcttgc

SEQ ID NO: 92386 - DNA, 25 bp, probe
cctgagttagactatttcccacatg

SEQ ID NO: 92387 - DNA, 25 bp, probe
gaggatttaaagtcagtcacaaagg

SEQ ID NO: 92388 - DNA, 25 bp, probe
gcctgagttagactatttcccacat

SEQ ID NO: 92389 - DNA, 25 bp, probe
gatttaaagtcagtcacaaaggctt

SEQ ID NO: 92390 - DNA, 25 bp, probe
agaggatttaaagtcagtcacaaag

SEQ ID NO: 92391 - DNA, 25 bp, probe
gagaggatttaaagtcagtcacaaa

SEQ ID NO: 92392 - DNA, 25 bp, probe
atttaaagtcagtcacaaaggcttg

SEQ ID NO: 92393 - DNA, 25 bp, probe
tgagaggatttaaagtcagtcacaa

SEQ ID NO: 92394 - DNA, 25 bp, probe
ggatttaaagtcagtcacaaaggct

SEQ ID NO: 92395 - DNA, 25 bp, probe
aggatttaaagtcagtcacaaaggc

SEQ ID NO: 92396 - DNA, 25 bp, probe
caggtgagaggatttaaagtcagtc

SEQ ID NO: 92397 - DNA, 25 bp, probe
aggtgagaggatttaaagtcagtca

SEQ ID NO: 92398 - DNA, 25 bp, probe
tttaaagtcagtcacaaaggcttgg

SEQ ID NO: 92399 - DNA, 25 bp, probe
gaagaggttctttgagacacagtac

SEQ ID NO: 92400 - DNA, 25 bp, probe
ttaaagtcagtcacaaaggcttggg

SEQ ID NO: 92401 - DNA, 25 bp, probe
ggaagaggttctttgagacacagta

SEQ ID NO: 92402 - DNA, 25 bp, probe
gcaggtgagaggatttaaagtcagt

SEQ ID NO: 92403 - DNA, 25 bp, probe
aagaggttctttgagacacagtacc

SEQ ID NO: 92404 - DNA, 25 bp, probe
ccactttgaagccatctctgttctg

SEQ ID NO: 92405 - DNA, 25 bp, probe
tgcaggtgagaggatttaaagtcag

SEQ ID NO: 92406 - DNA, 25 bp, probe
taaagtcagtcacaaaggcttggga

SEQ ID NO: 92407 - DNA, 25 bp, probe
tagactatttcccacatgttctctg

SEQ ID NO: 92408 - DNA, 25 bp, probe
gttagactatttcccacatgttctc

SEQ ID NO: 92409 - DNA, 25 bp, probe
ttagactatttcccacatgttctct

SEQ ID NO: 92410 - DNA, 25 bp, probe
ctgagttagactatttcccacatgt

SEQ ID NO: 92411 - DNA, 25 bp, probe
tgagttagactatttcccacatgtt

SEQ ID NO: 92412 - DNA, 25 bp, probe
cactttgaagccatctctgttctgc

SEQ ID NO: 92413 - DNA, 25 bp, probe
agttagactatttcccacatgttct

SEQ ID NO: 92414 - DNA, 25 bp, probe
caaaggcttgggaacaaaaggaatt

SEQ ID NO: 92415 - DNA, 25 bp, probe
gagttagactatttcccacatgttc

SEQ ID NO: 92416 - DNA, 25 bp, probe
gaggttctttgagacacagtaccct

SEQ ID NO: 92417 - DNA, 25 bp, probe
agaggttctttgagacacagtaccc

SEQ ID NO: 92418 - DNA, 25 bp, probe
cccactttgaagccatctctgttct

SEQ ID NO: 92419 - DNA, 25 bp, probe
gaagccacagcagaaatggaagaaa

SEQ ID NO: 92420 - DNA, 25 bp, probe
aggttctttgagacacagtaccctg

SEQ ID NO: 92421 - DNA, 25 bp, probe
gtgagaggatttaaagtcagtcaca

SEQ ID NO: 92422 - DNA, 25 bp, probe
aaagtcagtcacaaaggcttgggaa

SEQ ID NO: 92423 - DNA, 25 bp, probe
ggtgagaggatttaaagtcagtcac

SEQ ID NO: 92424 - DNA, 25 bp, probe
agactatttcccacatgttctctgc

SEQ ID NO: 92425 - DNA, 25 bp, probe
tatttcccacatgttctctgccttc

SEQ ID NO: 92426 - DNA, 25 bp, probe
ctatttcccacatgttctctgcctt

SEQ ID NO: 92427 - DNA, 25 bp, probe
acaaaggcttgggaacaaaaggaat

SEQ ID NO: 92428 - DNA, 25 bp, probe
tcagtcacaaaggcttgggaacaaa

SEQ ID NO: 92429 - DNA, 25 bp, probe
gagccattttgtcagtatccaggac

SEQ ID NO: 92430 - DNA, 25 bp, probe
gtcaagaggaagaagtctaacatct

SEQ ID NO: 92431 - DNA, 25 bp, probe
ggtcaagaggaagaagtctaacatc

SEQ ID NO: 92432 - DNA, 25 bp, probe
tggtcaagaggaagaagtctaacat

SEQ ID NO: 92433 - DNA, 25 bp, probe
tcaagaggaagaagtctaacatctc

SEQ ID NO: 92434 - DNA, 25 bp, probe
ctggtcaagaggaagaagtctaaca

SEQ ID NO: 92435 - DNA, 25 bp, probe
caagaggaagaagtctaacatctcc

SEQ ID NO: 92436 - DNA, 25 bp, probe
tgctttctttaattgttccttctga

SEQ ID NO: 92437 - DNA, 25 bp, probe
cctggtcaagaggaagaagtctaac

SEQ ID NO: 92438 - DNA, 25 bp, probe
ttgctttctttaattgttccttctg

SEQ ID NO: 92439 - DNA, 25 bp, probe
gttgctttctttaattgttccttct

SEQ ID NO: 92440 - DNA, 25 bp, probe
agttgctttctttaattgttccttc

SEQ ID NO: 92441 - DNA, 25 bp, probe
acctggtcaagaggaagaagtctaa

SEQ ID NO: 92442 - DNA, 25 bp, probe
ggagaggatctatgcttgtttgttt

SEQ ID NO: 92443 - DNA, 25 bp, probe
gctttctttaattgttccttctgaa

SEQ ID NO: 92444 - DNA, 25 bp, probe
agacacacacagtcattcatttctg

SEQ ID NO: 92445 - DNA, 25 bp, probe
cagacacacacagtcattcatttct

SEQ ID NO: 92446 - DNA, 25 bp, probe
tggagaggatctatgcttgtttgtt

SEQ ID NO: 92447 - DNA, 25 bp, probe
aagaggaagaagtctaacatctccc

SEQ ID NO: 92448 - DNA, 25 bp, probe
tagttgctttctttaattgttcctt

SEQ ID NO: 92449 - DNA, 25 bp, probe
catagttgctttctttaattgttcc

SEQ ID NO: 92450 - DNA, 25 bp, probe
ctggagaggatctatgcttgtttgt

SEQ ID NO: 92451 - DNA, 25 bp, probe
atagttgctttctttaattgttcct

SEQ ID NO: 92452 - DNA, 25 bp, probe
tgtaatccatatcatagttgctttc

SEQ ID NO: 92453 - DNA, 25 bp, probe
aatccatatcatagttgctttcttt

SEQ ID NO: 92454 - DNA, 25 bp, probe
gacctggtcaagaggaagaagtcta

SEQ ID NO: 92455 - DNA, 25 bp, probe
gtaatccatatcatagttgctttct

SEQ ID NO: 92456 - DNA, 25 bp, probe
cacctctctctcaacgatgcctatg

SEQ ID NO: 92457 - DNA, 25 bp, probe
gcagacacacacagtcattcatttc

SEQ ID NO: 92458 - DNA, 25 bp, probe
ctctctctcaacgatgcctatgacc

SEQ ID NO: 92459 - DNA, 25 bp, probe
cctctctctcaacgatgcctatgac

SEQ ID NO: 92460 - DNA, 25 bp, probe
ttgtaatccatatcatagttgcttt

SEQ ID NO: 92461 - DNA, 25 bp, probe
tttgtaatccatatcatagttgctt

SEQ ID NO: 92462 - DNA, 25 bp, probe
tcatagttgctttctttaattgttc

SEQ ID NO: 92463 - DNA, 25 bp, probe
ctctctcaacgatgcctatgacctg

SEQ ID NO: 92464 - DNA, 25 bp, probe
tccatatcatagttgctttctttaa

SEQ ID NO: 92465 - DNA, 25 bp, probe
gagaggatctatgcttgtttgtttt

SEQ ID NO: 92466 - DNA, 25 bp, probe
tctctctcaacgatgcctatgacct

SEQ ID NO: 92467 - DNA, 25 bp, probe
acctctctctcaacgatgcctatga

SEQ ID NO: 92468 - DNA, 25 bp, probe
cctggagaggatctatgcttgtttg

SEQ ID NO: 92469 - DNA, 25 bp, probe
atccatatcatagttgctttcttta

SEQ ID NO: 92470 - DNA, 25 bp, probe
taatccatatcatagttgctttctt

SEQ ID NO: 92471 - DNA, 25 bp, probe
ctttctttaattgttccttctgaat

SEQ ID NO: 92472 - DNA, 25 bp, probe
cagtcattcatttctgtccacaccc

SEQ ID NO: 92473 - DNA, 25 bp, probe
atcatagttgctttctttaattgtt

SEQ ID NO: 92474 - DNA, 25 bp, probe
actcttattctgatgatgtgtcacc

SEQ ID NO: 92475 - DNA, 25 bp, probe
ggactcttattctgatgatgtgtca

SEQ ID NO: 92476 - DNA, 25 bp, probe
gactcttattctgatgatgtgtcac

SEQ ID NO: 92477 - DNA, 25 bp, probe
tcattaccagtcattaaagtccagt

SEQ ID NO: 92478 - DNA, 25 bp, probe
gtcattaccagtcattaaagtccag

SEQ ID NO: 92479 - DNA, 25 bp, probe
gatagatggacatttgttgacttgg

SEQ ID NO: 92480 - DNA, 25 bp, probe
ggatagatggacatttgttgacttg

SEQ ID NO: 92481 - DNA, 25 bp, probe
atagatggacatttgttgacttggt

SEQ ID NO: 92482 - DNA, 25 bp, probe
ctgttatcccaagtgctcttattct

SEQ ID NO: 92483 - DNA, 25 bp, probe
tctgttatcccaagtgctcttattc

SEQ ID NO: 92484 - DNA, 25 bp, probe
ctctgttatcccaagtgctcttatt

SEQ ID NO: 92485 - DNA, 25 bp, probe
tagatggacatttgttgacttggtt

SEQ ID NO: 92486 - DNA, 25 bp, probe
taatttgggaaggaatggaagatgg

SEQ ID NO: 92487 - DNA, 25 bp, probe
tgttatcccaagtgctcttattctg

SEQ ID NO: 92488 - DNA, 25 bp, probe
gggatagatggacatttgttgactt

SEQ ID NO: 92489 - DNA, 25 bp, probe
ataatttgggaaggaatggaagatg

SEQ ID NO: 92490 - DNA, 25 bp, probe
gaaataaggcttgctgtttgttctc

SEQ ID NO: 92491 - DNA, 25 bp, probe
ctcttattctggtgagaagaacctt

SEQ ID NO: 92492 - DNA, 25 bp, probe
cataatttgggaaggaatggaagat

SEQ ID NO: 92493 - DNA, 25 bp, probe
agatggacatttgttgacttggttt

SEQ ID NO: 92494 - DNA, 25 bp, probe
tcctactaccaccacacaaacttag

SEQ ID NO: 92495 - DNA, 25 bp, probe
ctcctactaccaccacacaaactta

SEQ ID NO: 92496 - DNA, 25 bp, probe
agggatagatggacatttgttgact

SEQ ID NO: 92497 - DNA, 25 bp, probe
cagggatagatggacatttgttgac

SEQ ID NO: 92498 - DNA, 25 bp, probe
tactctgttatcccaagtgctctta

SEQ ID NO: 92499 - DNA, 25 bp, probe
tattctggtgagaagaaccttactt

SEQ ID NO: 92500 - DNA, 25 bp, probe
ttattctggtgagaagaaccttact

SEQ ID NO: 92501 - DNA, 25 bp, probe
accagtcattaaagtccagtattac

SEQ ID NO: 92502 - DNA, 25 bp, probe
cattaccagtcattaaagtccagta

SEQ ID NO: 92503 - DNA, 25 bp, probe
cttattctggtgagaagaaccttac

SEQ ID NO: 92504 - DNA, 25 bp, probe
taccaccacacaaacttagttcata

SEQ ID NO: 92505 - DNA, 25 bp, probe
accaccacacaaacttagttcatat

SEQ ID NO: 92506 - DNA, 25 bp, probe
ctcttattctgatgatgtgtcaccc

SEQ ID NO: 92507 - DNA, 25 bp, probe
tcttattctggtgagaagaacctta

SEQ ID NO: 92508 - DNA, 25 bp, probe
actctgttatcccaagtgctcttat

SEQ ID NO: 92509 - DNA, 25 bp, probe
gtgctcttattctggtgagaagaac

SEQ ID NO: 92510 - DNA, 25 bp, probe
agtgctcttattctggtgagaagaa

SEQ ID NO: 92511 - DNA, 25 bp, probe
aagtgctcttattctggtgagaaga

SEQ ID NO: 92512 - DNA, 25 bp, probe
caagtgctcttattctggtgagaag

SEQ ID NO: 92513 - DNA, 25 bp, probe
ctaccaccacacaaacttagttcat

SEQ ID NO: 92514 - DNA, 25 bp, probe
tactaaggtaagggattgaggatca

SEQ ID NO: 92515 - DNA, 25 bp, probe
cgggactcttattctgatgatgtgt

SEQ ID NO: 92516 - DNA, 25 bp, probe
gggactcttattctgatgatgtgtc

SEQ ID NO: 92517 - DNA, 25 bp, probe
aaataaggcttgctgtttgttctcc

SEQ ID NO: 92518 - DNA, 25 bp, probe
gaattgaaggaggatattggtgttg

SEQ ID NO: 92519 - DNA, 25 bp, probe
tgaattgaaggaggatattggtgtt

SEQ ID NO: 92520 - DNA, 25 bp, probe
atgaattgaaggaggatattggtgt

SEQ ID NO: 92521 - DNA, 25 bp, probe
aattgaaggaggatattggtgttgg

SEQ ID NO: 92522 - DNA, 25 bp, probe
ggtgaagtatatgaattgaaggagg

SEQ ID NO: 92523 - DNA, 25 bp, probe
cttcattgtcaaggagttgttcatc

SEQ ID NO: 92524 - DNA, 25 bp, probe
tcttcattgtcaaggagttgttcat

SEQ ID NO: 92525 - DNA, 25 bp, probe
atcttcattgtcaaggagttgttca

SEQ ID NO: 92526 - DNA, 25 bp, probe
actatcttcattgtcaaggagttgt

SEQ ID NO: 92527 - DNA, 25 bp, probe
tatcttcattgtcaaggagttgttc

SEQ ID NO: 92528 - DNA, 25 bp, probe
ctatcttcattgtcaaggagttgtt

SEQ ID NO: 92529 - DNA, 25 bp, probe
gaggagagttacttgaccgtattct

SEQ ID NO: 92530 - DNA, 25 bp, probe
tatgaattgaaggaggatattggtg

SEQ ID NO: 92531 - DNA, 25 bp, probe
tggtgaagtatatgaattgaaggag

SEQ ID NO: 92532 - DNA, 25 bp, probe
aaggagttgttcatcgtgatcttaa

SEQ ID NO: 92533 - DNA, 25 bp, probe
gtgaagtatatgaattgaaggagga

SEQ ID NO: 92534 - DNA, 25 bp, probe
gactatcttcattgtcaaggagttg

SEQ ID NO: 92535 - DNA, 25 bp, probe
ttcacaggtccacaatattcatact

SEQ ID NO: 92536 - DNA, 25 bp, probe
caaggagttgttcatcgtgatctta

SEQ ID NO: 92537 - DNA, 25 bp, probe
ttcattgtcaaggagttgttcatcg

SEQ ID NO: 92538 - DNA, 25 bp, probe
ttggtgaagtatatgaattgaagga

SEQ ID NO: 92539 - DNA, 25 bp, probe
ggaggagagttacttgaccgtattc

SEQ ID NO: 92540 - DNA, 25 bp, probe
tcacaggtccacaatattcatacta

SEQ ID NO: 92541 - DNA, 25 bp, probe
attcacaggtccacaatattcatac

SEQ ID NO: 92542 - DNA, 25 bp, probe
cattcacaggtccacaatattcata

SEQ ID NO: 92543 - DNA, 25 bp, probe
ccattcacaggtccacaatattcat

SEQ ID NO: 92544 - DNA, 25 bp, probe
aggaggagagttacttgaccgtatt

SEQ ID NO: 92545 - DNA, 25 bp, probe
aaggaggagagttacttgaccgtat

SEQ ID NO: 92546 - DNA, 25 bp, probe
gatattggtgttggctcctactctg

SEQ ID NO: 92547 - DNA, 25 bp, probe
atatgaattgaaggaggatattggt

SEQ ID NO: 92548 - DNA, 25 bp, probe
cacaggtccacaatattcatactat

SEQ ID NO: 92549 - DNA, 25 bp, probe
tacggatttaatgaaaggaggagag

SEQ ID NO: 92550 - DNA, 25 bp, probe
tgttacggatttaatgaaaggagga

SEQ ID NO: 92551 - DNA, 25 bp, probe
cattgtcaaggagttgttcatcgtg

SEQ ID NO: 92552 - DNA, 25 bp, probe
tcattgtcaaggagttgttcatcgt

SEQ ID NO: 92553 - DNA, 25 bp, probe
ttacggatttaatgaaaggaggaga

SEQ ID NO: 92554 - DNA, 25 bp, probe
gttacggatttaatgaaaggaggag

SEQ ID NO: 92555 - DNA, 25 bp, probe
cggatttaatgaaaggaggagagtt

SEQ ID NO: 92556 - DNA, 25 bp, probe
tgaagtatatgaattgaaggaggat

SEQ ID NO: 92557 - DNA, 25 bp, probe
acaggtccacaatattcatactatg

SEQ ID NO: 92558 - DNA, 25 bp, probe
catcgttgtctgctaaattacttga

SEQ ID NO: 92559 - DNA, 25 bp, probe
ttgttacggatttaatgaaaggagg

SEQ ID NO: 92560 - DNA, 25 bp, probe
ttgaaggatgtctttgatgatggta

SEQ ID NO: 92561 - DNA, 25 bp, probe
tgaaggatgtctttgatgatggtag

SEQ ID NO: 92562 - DNA, 25 bp, probe
cttacacagattagcagaagtcact

SEQ ID NO: 92563 - DNA, 25 bp, probe
tcttacacagattagcagaagtcac

SEQ ID NO: 92564 - DNA, 25 bp, probe
atgtgtatgtcataaggaaggcaat

SEQ ID NO: 92565 - DNA, 25 bp, probe
cctatctgaatgcctctgtcctatt

SEQ ID NO: 92566 - DNA, 25 bp, probe
tgtgtatgtcataaggaaggcaatg

SEQ ID NO: 92567 - DNA, 25 bp, probe
ttacacagattagcagaagtcactt

SEQ ID NO: 92568 - DNA, 25 bp, probe
tggtaggtactaatggtgattatgc

SEQ ID NO: 92569 - DNA, 25 bp, probe
ggtaggtactaatggtgattatgct

SEQ ID NO: 92570 - DNA, 25 bp, probe
taggtactaatggtgattatgctcc

SEQ ID NO: 92571 - DNA, 25 bp, probe
ctctggtaggtactaatggtgatta

SEQ ID NO: 92572 - DNA, 25 bp, probe
gctctggtaggtactaatggtgatt

SEQ ID NO: 92573 - DNA, 25 bp, probe
catgtgtatgtcataaggaaggcaa

SEQ ID NO: 92574 - DNA, 25 bp, probe
gtaggtactaatggtgattatgctc

SEQ ID NO: 92575 - DNA, 25 bp, probe
ctggtaggtactaatggtgattatg

SEQ ID NO: 92576 - DNA, 25 bp, probe
tctggtaggtactaatggtgattat

SEQ ID NO: 92577 - DNA, 25 bp, probe
ccattgctgctgtaataagaactgc

SEQ ID NO: 92578 - DNA, 25 bp, probe
gccattgctgctgtaataagaactg

SEQ ID NO: 92579 - DNA, 25 bp, probe
gtgtatcagttagtgcaggaagtaa

SEQ ID NO: 92580 - DNA, 25 bp, probe
ctatctgaatgcctctgtcctattt

SEQ ID NO: 92581 - DNA, 25 bp, probe
gaagtaaagaatgctggaaagttga

SEQ ID NO: 92582 - DNA, 25 bp, probe
gtgtatgtcataaggaaggcaatgc

SEQ ID NO: 92583 - DNA, 25 bp, probe
ggaagtaaagaatgctggaaagttg

SEQ ID NO: 92584 - DNA, 25 bp, probe
aggaagtaaagaatgctggaaagtt

SEQ ID NO: 92585 - DNA, 25 bp, probe
ggtactaatggtgattatgctccaa

SEQ ID NO: 92586 - DNA, 25 bp, probe
aagtaaagaatgctggaaagttgaa

SEQ ID NO: 92587 - DNA, 25 bp, probe
agtaaagaatgctggaaagttgaat

SEQ ID NO: 92588 - DNA, 25 bp, probe
gtaaagaatgctggaaagttgaatc

SEQ ID NO: 92589 - DNA, 25 bp, probe
taaagaatgctggaaagttgaatca

SEQ ID NO: 92590 - DNA, 25 bp, probe
aggtactaatggtgattatgctcca

SEQ ID NO: 92591 - DNA, 25 bp, probe
atcttacacagattagcagaagtca

SEQ ID NO: 92592 - DNA, 25 bp, probe
gtactaatggtgattatgctccaat

SEQ ID NO: 92593 - DNA, 25 bp, probe
ggtgtatcagttagtgcaggaagta

SEQ ID NO: 92594 - DNA, 25 bp, probe
tactaatggtgattatgctccaatt

SEQ ID NO: 92595 - DNA, 25 bp, probe
ttatttcataatggaccaggatcgg

SEQ ID NO: 92596 - DNA, 25 bp, probe
aaagaatgctggaaagttgaatcag

SEQ ID NO: 92597 - DNA, 25 bp, probe
gctggaaagttgaatcagaaattga

SEQ ID NO: 92598 - DNA, 25 bp, probe
atgctggaaagttgaatcagaaatt

SEQ ID NO: 92599 - DNA, 25 bp, probe
aatgctggaaagttgaatcagaaat

SEQ ID NO: 92600 - DNA, 25 bp, probe
gaatgctggaaagttgaatcagaaa

SEQ ID NO: 92601 - DNA, 25 bp, probe
ggctctggtaggtactaatggtgat

SEQ ID NO: 92602 - DNA, 25 bp, probe
tgctggaaagttgaatcagaaattg

SEQ ID NO: 92603 - DNA, 25 bp, probe
gtatgtcataaggaaggcaatgcag

SEQ ID NO: 92604 - DNA, 25 bp, probe
agaatgctggaaagttgaatcagaa

SEQ ID NO: 92605 - DNA, 25 bp, probe
aagaatgctggaaagttgaatcaga

SEQ ID NO: 92606 - DNA, 25 bp, probe
taagaaggaatgcgagtaaggattg

SEQ ID NO: 92607 - DNA, 25 bp, probe
gtaagaaggaatgcgagtaaggatt

SEQ ID NO: 92608 - DNA, 25 bp, probe
ttgaatcaagcaatatggaagcaac

SEQ ID NO: 92609 - DNA, 25 bp, probe
tgaatcaagcaatatggaagcaacc

SEQ ID NO: 92610 - DNA, 25 bp, probe
tgtgcttacctaacttgaacattag

SEQ ID NO: 92611 - DNA, 25 bp, probe
gcttacctaacttgaacattagagg

SEQ ID NO: 92612 - DNA, 25 bp, probe
gtgcttacctaacttgaacattaga

SEQ ID NO: 92613 - DNA, 25 bp, probe
cgtaagaaggaatgcgagtaaggat

SEQ ID NO: 92614 - DNA, 25 bp, probe
tgcttacctaacttgaacattagag

SEQ ID NO: 92615 - DNA, 25 bp, probe
tatgtctacctggcagatactcaga

SEQ ID NO: 92616 - DNA, 25 bp, probe
aagaaggaatgcgagtaaggattgg

SEQ ID NO: 92617 - DNA, 25 bp, probe
atcttcaccctcatcctttacattt

SEQ ID NO: 92618 - DNA, 25 bp, probe
agactgaaagagaaagataggagga

SEQ ID NO: 92619 - DNA, 25 bp, probe
gagggaaagactgaaagagaaagat

SEQ ID NO: 92620 - DNA, 25 bp, probe
acattagagggaaagactgaaagag

SEQ ID NO: 92621 - DNA, 25 bp, probe
tgaacattagagggaaagactgaaa

SEQ ID NO: 92622 - DNA, 25 bp, probe
ttgaacattagagggaaagactgaa

SEQ ID NO: 92623 - DNA, 25 bp, probe
ctaagataaagactgtggaaatgcc

SEQ ID NO: 92624 - DNA, 25 bp, probe
gctaagataaagactgtggaaatgc

SEQ ID NO: 92625 - DNA, 25 bp, probe
gtatgtctacctggcagatactcag

SEQ ID NO: 92626 - DNA, 25 bp, probe
tctgaccgattcctttatatttgct

SEQ ID NO: 92627 - DNA, 25 bp, probe
tgctctgaccgattcctttatattt

SEQ ID NO: 92628 - DNA, 25 bp, probe
ttgctctgaccgattcctttatatt

SEQ ID NO: 92629 - DNA, 25 bp, probe
tttgctctgaccgattcctttatat

SEQ ID NO: 92630 - DNA, 25 bp, probe
ctgaaagagaaagataggaggaacc

SEQ ID NO: 92631 - DNA, 25 bp, probe
actgaaagagaaagataggaggaac

SEQ ID NO: 92632 - DNA, 25 bp, probe
tagagggaaagactgaaagagaaag

SEQ ID NO: 92633 - DNA, 25 bp, probe
cattagagggaaagactgaaagaga

SEQ ID NO: 92634 - DNA, 25 bp, probe
ctgaccgattcctttatatttgctc

SEQ ID NO: 92635 - DNA, 25 bp, probe
ctctgaccgattcctttatatttgc

SEQ ID NO: 92636 - DNA, 25 bp, probe
gctctgaccgattcctttatatttg

SEQ ID NO: 92637 - DNA, 25 bp, probe
aacattagagggaaagactgaaaga

SEQ ID NO: 92638 - DNA, 25 bp, probe
gactgaaagagaaagataggaggaa

SEQ ID NO: 92639 - DNA, 25 bp, probe
aagactgaaagagaaagataggagg

SEQ ID NO: 92640 - DNA, 25 bp, probe
gaaagagaaagataggaggaaccac

SEQ ID NO: 92641 - DNA, 25 bp, probe
ttagagggaaagactgaaagagaaa

SEQ ID NO: 92642 - DNA, 25 bp, probe
gaacattagagggaaagactgaaag

SEQ ID NO: 92643 - DNA, 25 bp, probe
ccataaatgacactacttgataggc

SEQ ID NO: 92644 - DNA, 25 bp, probe
tatcttcaccctcatcctttacatt

SEQ ID NO: 92645 - DNA, 25 bp, probe
ttatcttcaccctcatcctttacat

SEQ ID NO: 92646 - DNA, 25 bp, probe
attatcttcaccctcatcctttaca

SEQ ID NO: 92647 - DNA, 25 bp, probe
tgaaagagaaagataggaggaacca

SEQ ID NO: 92648 - DNA, 25 bp, probe
ggaagcaaccagcaaattaactaat

SEQ ID NO: 92649 - DNA, 25 bp, probe
tgctatcaaattatcttcaccctca

SEQ ID NO: 92650 - DNA, 25 bp, probe
gtgatgtctttccttatgttgcttt

SEQ ID NO: 92651 - DNA, 25 bp, probe
gatgggtgatgtctttccttatgtt

SEQ ID NO: 92652 - DNA, 25 bp, probe
atgggtgatgtctttccttatgttg

SEQ ID NO: 92653 - DNA, 25 bp, probe
cgatttgagggtggagatatagata

SEQ ID NO: 92654 - DNA, 25 bp, probe
tagatgggtgatgtctttccttatg

SEQ ID NO: 92655 - DNA, 25 bp, probe
gaatagatgggtgatgtctttcctt

SEQ ID NO: 92656 - DNA, 25 bp, probe
ccgatttgagggtggagatatagat

SEQ ID NO: 92657 - DNA, 25 bp, probe
gagaatagatgggtgatgtctttcc

SEQ ID NO: 92658 - DNA, 25 bp, probe
aatagatgggtgatgtctttcctta

SEQ ID NO: 92659 - DNA, 25 bp, probe
agaatagatgggtgatgtctttcct

SEQ ID NO: 92660 - DNA, 25 bp, probe
ggtgatgtctttccttatgttgctt

SEQ ID NO: 92661 - DNA, 25 bp, probe
atagatgggtgatgtctttccttat

SEQ ID NO: 92662 - DNA, 25 bp, probe
tttcttcctatctctgtggctttca

SEQ ID NO: 92663 - DNA, 25 bp, probe
agatgggtgatgtctttccttatgt

SEQ ID NO: 92664 - DNA, 25 bp, probe
gaagtctgcgtaccaataaattgtg

SEQ ID NO: 92665 - DNA, 25 bp, probe
atgtattccatcgtgctggtagaag

SEQ ID NO: 92666 - DNA, 25 bp, probe
gtattccatcgtgctggtagaagag

SEQ ID NO: 92667 - DNA, 25 bp, probe
tgtgctaagtgctttacgaacattc

SEQ ID NO: 92668 - DNA, 25 bp, probe
ctgtgctaagtgctttacgaacatt

SEQ ID NO: 92669 - DNA, 25 bp, probe
tattccatcgtgctggtagaagagt

SEQ ID NO: 92670 - DNA, 25 bp, probe
gatttgagggtggagatatagataa

SEQ ID NO: 92671 - DNA, 25 bp, probe
tcttggttccaggctcttgaaatag

SEQ ID NO: 92672 - DNA, 25 bp, probe
ctcttggttccaggctcttgaaata

SEQ ID NO: 92673 - DNA, 25 bp, probe
catgtattccatcgtgctggtagaa

SEQ ID NO: 92674 - DNA, 25 bp, probe
gggtgatgtctttccttatgttgct

SEQ ID NO: 92675 - DNA, 25 bp, probe
atctacctggcttctcagttctttg

SEQ ID NO: 92676 - DNA, 25 bp, probe
aagtctgcgtaccaataaattgtgc

SEQ ID NO: 92677 - DNA, 25 bp, probe
cttggttccaggctcttgaaatagt

SEQ ID NO: 92678 - DNA, 25 bp, probe
ttctcagttctttggttggaaggag

SEQ ID NO: 92679 - DNA, 25 bp, probe
tgtattccatcgtgctggtagaaga

SEQ ID NO: 92680 - DNA, 25 bp, probe
gatctacctggcttctcagttcttt

SEQ ID NO: 92681 - DNA, 25 bp, probe
tgggtgatgtctttccttatgttgc

SEQ ID NO: 92682 - DNA, 25 bp, probe
tgaagagtctgggtagcttgtttag

SEQ ID NO: 92683 - DNA, 25 bp, probe
ctgaagagtctgggtagcttgttta

SEQ ID NO: 92684 - DNA, 25 bp, probe
ggatctacctggcttctcagttctt

SEQ ID NO: 92685 - DNA, 25 bp, probe
ttggttccaggctcttgaaatagtg

SEQ ID NO: 92686 - DNA, 25 bp, probe
tgcgtaccaataaattgtgcctttc

SEQ ID NO: 92687 - DNA, 25 bp, probe
ctgcgtaccaataaattgtgccttt

SEQ ID NO: 92688 - DNA, 25 bp, probe
tgatgtctttccttatgttgctttt

SEQ ID NO: 92689 - DNA, 25 bp, probe
ttttcttcctatctctgtggctttc

SEQ ID NO: 92690 - DNA, 25 bp, probe
cttttcttcctatctctgtggcttt

SEQ ID NO: 92691 - DNA, 25 bp, probe
gccgatttgagggtggagatataga

SEQ ID NO: 92692 - DNA, 25 bp, probe
atttgagggtggagatatagataat

SEQ ID NO: 92693 - DNA, 25 bp, probe
gaagagtctgggtagcttgtttagg

SEQ ID NO: 92694 - DNA, 25 bp, probe
tgctgtggttagacaatgtatatca

SEQ ID NO: 92695 - DNA, 25 bp, probe
gctgtggttagacaatgtatatcaa

SEQ ID NO: 92696 - DNA, 25 bp, probe
ttgctgtggttagacaatgtatatc

SEQ ID NO: 92697 - DNA, 25 bp, probe
tatccactccagtgagattatgatt

SEQ ID NO: 92698 - DNA, 25 bp, probe
atatccactccagtgagattatgat

SEQ ID NO: 92699 - DNA, 25 bp, probe
tgactcatttggactgaatttgaaa

SEQ ID NO: 92700 - DNA, 25 bp, probe
ttgactcatttggactgaatttgaa

SEQ ID NO: 92701 - DNA, 25 bp, probe
tttgactcatttggactgaatttga

SEQ ID NO: 92702 - DNA, 25 bp, probe
tttctttgactcatttggactgaat

SEQ ID NO: 92703 - DNA, 25 bp, probe
ctccagtgagattatgatttgtagc

SEQ ID NO: 92704 - DNA, 25 bp, probe
ctttgactcatttggactgaatttg

SEQ ID NO: 92705 - DNA, 25 bp, probe
tctttgactcatttggactgaattt

SEQ ID NO: 92706 - DNA, 25 bp, probe
ttctttgactcatttggactgaatt

SEQ ID NO: 92707 - DNA, 25 bp, probe
tattactgagcagcatataccctct

SEQ ID NO: 92708 - DNA, 25 bp, probe
atattactgagcagcatataccctc

SEQ ID NO: 92709 - DNA, 25 bp, probe
aatttgctgtggttagacaatgtat

SEQ ID NO: 92710 - DNA, 25 bp, probe
actacaactcctcaaattccaataa

SEQ ID NO: 92711 - DNA, 25 bp, probe
aactacaactcctcaaattccaata

SEQ ID NO: 92712 - DNA, 25 bp, probe
tatatccactccagtgagattatga

SEQ ID NO: 92713 - DNA, 25 bp, probe
aaagagaagaagaggacaggattgt

SEQ ID NO: 92714 - DNA, 25 bp, probe
attactgagcagcatataccctctc

SEQ ID NO: 92715 - DNA, 25 bp, probe
tttgctgtggttagacaatgtatat

SEQ ID NO: 92716 - DNA, 25 bp, probe
atttgctgtggttagacaatgtata

SEQ ID NO: 92717 - DNA, 25 bp, probe
tccagtgagattatgatttgtagct

SEQ ID NO: 92718 - DNA, 25 bp, probe
gactcatttggactgaatttgaaat

SEQ ID NO: 92719 - DNA, 25 bp, probe
actccagtgagattatgatttgtag

SEQ ID NO: 92720 - DNA, 25 bp, probe
tatattactgagcagcatataccct

SEQ ID NO: 92721 - DNA, 25 bp, probe
caccttgatttaaagccacagaata

SEQ ID NO: 92722 - DNA, 25 bp, probe
tacaccttgatttaaagccacagaa

SEQ ID NO: 92723 - DNA, 25 bp, probe
acttacatctaaagagctagggaga

SEQ ID NO: 92724 - DNA, 25 bp, probe
ccagtgagattatgatttgtagctt

SEQ ID NO: 92725 - DNA, 25 bp, probe
cttacatctaaagagctagggagag

SEQ ID NO: 92726 - DNA, 25 bp, probe
ttacatctaaagagctagggagagg

SEQ ID NO: 92727 - DNA, 25 bp, probe
ttatatccactccagtgagattatg

SEQ ID NO: 92728 - DNA, 25 bp, probe
tacacgagattgctgtgcttgaatt

SEQ ID NO: 92729 - DNA, 25 bp, probe
ttacacgagattgctgtgcttgaat

SEQ ID NO: 92730 - DNA, 25 bp, probe
ccgtgttattaatcttcatgaggtc

SEQ ID NO: 92731 - DNA, 25 bp, probe
acaccttgatttaaagccacagaat

SEQ ID NO: 92732 - DNA, 25 bp, probe
agccacagaatatattactgagcag

SEQ ID NO: 92733 - DNA, 25 bp, probe
aagccacagaatatattactgagca

SEQ ID NO: 92734 - DNA, 25 bp, probe
gtacaccttgatttaaagccacaga

SEQ ID NO: 92735 - DNA, 25 bp, probe
ctacaactcctcaaattccaataaa

SEQ ID NO: 92736 - DNA, 25 bp, probe
ccacagaatatattactgagcagca

SEQ ID NO: 92737 - DNA, 25 bp, probe
accttgatttaaagccacagaatat

SEQ ID NO: 92738 - DNA, 25 bp, probe
ctgactacatagctcctgagatcct

SEQ ID NO: 92739 - DNA, 25 bp, probe
tcctgactacatagctcctgagatc

SEQ ID NO: 92740 - DNA, 25 bp, probe
tgactacatagctcctgagatcctg

SEQ ID NO: 92741 - DNA, 25 bp, probe
ctcctgactacatagctcctgagat

SEQ ID NO: 92742 - DNA, 25 bp, probe
cctgactacatagctcctgagatcc

SEQ ID NO: 92743 - DNA, 25 bp, probe
cagcacccattcttcaaagagattg

SEQ ID NO: 92744 - DNA, 25 bp, probe
acaatgaggacgacctatttgagtc

SEQ ID NO: 92745 - DNA, 25 bp, probe
gacaatgaggacgacctatttgagt

SEQ ID NO: 92746 - DNA, 25 bp, probe
gactcctgactacatagctcctgag

SEQ ID NO: 92747 - DNA, 25 bp, probe
ttctgtgggactcctgactacatag

SEQ ID NO: 92748 - DNA, 25 bp, probe
gactacatagctcctgagatcctgc

SEQ ID NO: 92749 - DNA, 25 bp, probe
ttcaaaccacgcattaaaaccaaaa

SEQ ID NO: 92750 - DNA, 25 bp, probe
cctatttgagtccatcctccatgac

SEQ ID NO: 92751 - DNA, 25 bp, probe
gacctatttgagtccatcctccatg

SEQ ID NO: 92752 - DNA, 25 bp, probe
actcctgactacatagctcctgaga

SEQ ID NO: 92753 - DNA, 25 bp, probe
aaaccacgcattaaaaccaaaagag

SEQ ID NO: 92754 - DNA, 25 bp, probe
acctatttgagtccatcctccatga

SEQ ID NO: 92755 - DNA, 25 bp, probe
gttctgtgggactcctgactacata

SEQ ID NO: 92756 - DNA, 25 bp, probe
caaaccacgcattaaaaccaaaaga

SEQ ID NO: 92757 - DNA, 25 bp, probe
tcaaaccacgcattaaaaccaaaag

SEQ ID NO: 92758 - DNA, 25 bp, probe
cttcaaaccacgcattaaaaccaaa

SEQ ID NO: 92759 - DNA, 25 bp, probe
attcttcaaagagattgactgggtg

SEQ ID NO: 92760 - DNA, 25 bp, probe
cattcttcaaagagattgactgggt

SEQ ID NO: 92761 - DNA, 25 bp, probe
acccattcttcaaagagattgactg

SEQ ID NO: 92762 - DNA, 25 bp, probe
cacccattcttcaaagagattgact

SEQ ID NO: 92763 - DNA, 25 bp, probe
ctatttgagtccatcctccatgacg

SEQ ID NO: 92764 - DNA, 25 bp, probe
caaggaagggattctgaatggtgtg

SEQ ID NO: 92765 - DNA, 25 bp, probe
aaccacgcattaaaaccaaaagaga

SEQ ID NO: 92766 - DNA, 25 bp, probe
ccattcttcaaagagattgactggg

SEQ ID NO: 92767 - DNA, 25 bp, probe
cccattcttcaaagagattgactgg

SEQ ID NO: 92768 - DNA, 25 bp, probe
aaggaagggattctgaatggtgtga

SEQ ID NO: 92769 - DNA, 25 bp, probe
cgacaatgaggacgacctatttgag

SEQ ID NO: 92770 - DNA, 25 bp, probe
tatttgagtccatcctccatgacga

SEQ ID NO: 92771 - DNA, 25 bp, probe
gcagcacccattcttcaaagagatt

SEQ ID NO: 92772 - DNA, 25 bp, probe
ctgatgtacgagatgatggctggac

SEQ ID NO: 92773 - DNA, 25 bp, probe
atcaagcagcacccattcttcaaag

SEQ ID NO: 92774 - DNA, 25 bp, probe
cgacctatttgagtccatcctccat

SEQ ID NO: 92775 - DNA, 25 bp, probe
gatgtgcaaggaagggattctgaat

SEQ ID NO: 92776 - DNA, 25 bp, probe
accacgcattaaaaccaaaagagac

SEQ ID NO: 92777 - DNA, 25 bp, probe
gcacccattcttcaaagagattgac

SEQ ID NO: 92778 - DNA, 25 bp, probe
agcacccattcttcaaagagattga

SEQ ID NO: 92779 - DNA, 25 bp, probe
actacatagctcctgagatcctgca

SEQ ID NO: 92780 - DNA, 25 bp, probe
catcaagcagcacccattcttcaaa

SEQ ID NO: 92781 - DNA, 25 bp, probe
atgtgcaaggaagggattctgaatg

SEQ ID NO: 92782 - DNA, 25 bp, probe
tgattagaggagagagaacttgatt

SEQ ID NO: 92783 - DNA, 25 bp, probe
tatcacacaagtcttaccaattctg

SEQ ID NO: 92784 - DNA, 25 bp, probe
atgattagaggagagagaacttgat

SEQ ID NO: 92785 - DNA, 25 bp, probe
gattcttctaatgatggtcaactgc

SEQ ID NO: 92786 - DNA, 25 bp, probe
atgacaggaatgatctattaccagg

SEQ ID NO: 92787 - DNA, 25 bp, probe
aggaatgatctattaccaggtgact

SEQ ID NO: 92788 - DNA, 25 bp, probe
caggaatgatctattaccaggtgac

SEQ ID NO: 92789 - DNA, 25 bp, probe
gacaggaatgatctattaccaggtg

SEQ ID NO: 92790 - DNA, 25 bp, probe
attagaggagagagaacttgattca

SEQ ID NO: 92791 - DNA, 25 bp, probe
atcacacaagtcttaccaattctgc

SEQ ID NO: 92792 - DNA, 25 bp, probe
gatgtgaagttatcagttggaggag

SEQ ID NO: 92793 - DNA, 25 bp, probe
acaggaatgatctattaccaggtga

SEQ ID NO: 92794 - DNA, 25 bp, probe
tgacaggaatgatctattaccaggt

SEQ ID NO: 92795 - DNA, 25 bp, probe
gcagtgattcttctaatgatggtca

SEQ ID NO: 92796 - DNA, 25 bp, probe
ggaatgatctattaccaggtgacta

SEQ ID NO: 92797 - DNA, 25 bp, probe
ccatgattagaggagagagaacttg

SEQ ID NO: 92798 - DNA, 25 bp, probe
ccactacacagttgctatgatatgt

SEQ ID NO: 92799 - DNA, 25 bp, probe
tgattcttctaatgatggtcaactg

SEQ ID NO: 92800 - DNA, 25 bp, probe
gtgattcttctaatgatggtcaact

SEQ ID NO: 92801 - DNA, 25 bp, probe
agtgattcttctaatgatggtcaac

SEQ ID NO: 92802 - DNA, 25 bp, probe
cagtgattcttctaatgatggtcaa

SEQ ID NO: 92803 - DNA, 25 bp, probe
catgattagaggagagagaacttga

SEQ ID NO: 92804 - DNA, 25 bp, probe
gattagaggagagagaacttgattc

SEQ ID NO: 92805 - DNA, 25 bp, probe
gctatgatatgtaacaagtcacaca

SEQ ID NO: 92806 - DNA, 25 bp, probe
tgctatgatatgtaacaagtcacac

SEQ ID NO: 92807 - DNA, 25 bp, probe
ttagaggagagagaacttgattcaa

SEQ ID NO: 92808 - DNA, 25 bp, probe
atatcacacaagtcttaccaattct

SEQ ID NO: 92809 - DNA, 25 bp, probe
gaatgacaggaatgatctattacca

SEQ ID NO: 92810 - DNA, 25 bp, probe
tgaatgacaggaatgatctattacc

SEQ ID NO: 92811 - DNA, 25 bp, probe
acacagttgctatgatatgtaacaa

SEQ ID NO: 92812 - DNA, 25 bp, probe
gaatgatctattaccaggtgactag

SEQ ID NO: 92813 - DNA, 25 bp, probe
aatgacaggaatgatctattaccag

SEQ ID NO: 92814 - DNA, 25 bp, probe
gttgctatgatatgtaacaagtcac

SEQ ID NO: 92815 - DNA, 25 bp, probe
agttgctatgatatgtaacaagtca

SEQ ID NO: 92816 - DNA, 25 bp, probe
ttgctatgatatgtaacaagtcaca

SEQ ID NO: 92817 - DNA, 25 bp, probe
acagttgctatgatatgtaacaagt

SEQ ID NO: 92818 - DNA, 25 bp, probe
aagtcttaccaattctgcgtcacta

SEQ ID NO: 92819 - DNA, 25 bp, probe
cagttgctatgatatgtaacaagtc

SEQ ID NO: 92820 - DNA, 25 bp, probe
cacagttgctatgatatgtaacaag

SEQ ID NO: 92821 - DNA, 25 bp, probe
atgcagtgattcttctaatgatggt

SEQ ID NO: 92822 - DNA, 25 bp, probe
aaggcaaagtagttccagtgattta

SEQ ID NO: 92823 - DNA, 25 bp, probe
taaggcaaagtagttccagtgattt

SEQ ID NO: 92824 - DNA, 25 bp, probe
aatgcagtgattcttctaatgatgg

SEQ ID NO: 92825 - DNA, 25 bp, probe
taagctggataataagagaacgtgc

SEQ ID NO: 92826 - DNA, 25 bp, probe
ctggtcacgtttggaaagaatatta

SEQ ID NO: 92827 - DNA, 25 bp, probe
actggtcacgtttggaaagaatatt

SEQ ID NO: 92828 - DNA, 25 bp, probe
tggtcacgtttggaaagaatattaa

SEQ ID NO: 92829 - DNA, 25 bp, probe
tcagatgctaatactggagaccgtg

SEQ ID NO: 92830 - DNA, 25 bp, probe
gtcagatgctaatactggagaccgt

SEQ ID NO: 92831 - DNA, 25 bp, probe
cactggtcacgtttggaaagaatat

SEQ ID NO: 92832 - DNA, 25 bp, probe
ggtcacgtttggaaagaatattaaa

SEQ ID NO: 92833 - DNA, 25 bp, probe
ctaatactggagaccgtggacagac

SEQ ID NO: 92834 - DNA, 25 bp, probe
gatgctaatactggagaccgtggac

SEQ ID NO: 92835 - DNA, 25 bp, probe
agatgctaatactggagaccgtgga

SEQ ID NO: 92836 - DNA, 25 bp, probe
aaccaccagttacttgagtgtcact

SEQ ID NO: 92837 - DNA, 25 bp, probe
acactggtcacgtttggaaagaata

SEQ ID NO: 92838 - DNA, 25 bp, probe
aaaccaccagttacttgagtgtcac

SEQ ID NO: 92839 - DNA, 25 bp, probe
caaaccaatttcattgtattctcac

SEQ ID NO: 92840 - DNA, 25 bp, probe
accaatttcattgtattctcacttt

SEQ ID NO: 92841 - DNA, 25 bp, probe
aaccaatttcattgtattctcactt

SEQ ID NO: 92842 - DNA, 25 bp, probe
aaaccaatttcattgtattctcact

SEQ ID NO: 92843 - DNA, 25 bp, probe
cagatgctaatactggagaccgtgg

SEQ ID NO: 92844 - DNA, 25 bp, probe
gtggacagaccaataatgctgcttc

SEQ ID NO: 92845 - DNA, 25 bp, probe
tggacagaccaataatgctgcttct

SEQ ID NO: 92846 - DNA, 25 bp, probe
ccaatttcattgtattctcactttg

SEQ ID NO: 92847 - DNA, 25 bp, probe
cgtcagatgctaatactggagaccg

SEQ ID NO: 92848 - DNA, 25 bp, probe
atgctaatactggagaccgtggaca

SEQ ID NO: 92849 - DNA, 25 bp, probe
tcctgttcattttagtgttcaattt

SEQ ID NO: 92850 - DNA, 25 bp, probe
agcgtcagatgctaatactggagac

SEQ ID NO: 92851 - DNA, 25 bp, probe
cagcgtcagatgctaatactggaga

SEQ ID NO: 92852 - DNA, 25 bp, probe
aatcctgttcattttagtgttcaat

SEQ ID NO: 92853 - DNA, 25 bp, probe
atcctgttcattttagtgttcaatt

SEQ ID NO: 92854 - DNA, 25 bp, probe
gcgtcagatgctaatactggagacc

SEQ ID NO: 92855 - DNA, 25 bp, probe
tttcattgtattctcactttgaggg

SEQ ID NO: 92856 - DNA, 25 bp, probe
aacactggtcacgtttggaaagaat

SEQ ID NO: 92857 - DNA, 25 bp, probe
aaatcctgttcattttagtgttcaa

SEQ ID NO: 92858 - DNA, 25 bp, probe
cctgttcattttagtgttcaatttt

SEQ ID NO: 92859 - DNA, 25 bp, probe
acaaaccaatttcattgtattctca

SEQ ID NO: 92860 - DNA, 25 bp, probe
taatactggagaccgtggacagacc

SEQ ID NO: 92861 - DNA, 25 bp, probe
caatttcattgtattctcactttga

SEQ ID NO: 92862 - DNA, 25 bp, probe
ggagaccgtggacagaccaataatg

SEQ ID NO: 92863 - DNA, 25 bp, probe
aaaaccaccagttacttgagtgtca

SEQ ID NO: 92864 - DNA, 25 bp, probe
ttgttgttcttatttaaccttgtaa

SEQ ID NO: 92865 - DNA, 25 bp, probe
tgttgttcttatttaaccttgtaaa

SEQ ID NO: 92866 - DNA, 25 bp, probe
atttcattgtattctcactttgagg

SEQ ID NO: 92867 - DNA, 25 bp, probe
caacactggtcacgtttggaaagaa

SEQ ID NO: 92868 - DNA, 25 bp, probe
attgttgttcttatttaaccttgta

SEQ ID NO: 92869 - DNA, 25 bp, probe
tattgttgttcttatttaaccttgt

SEQ ID NO: 92870 - DNA, 25 bp, probe
caatatactgtgatgccttcctact

SEQ ID NO: 92871 - DNA, 25 bp, probe
aatatactgtgatgccttcctactc

SEQ ID NO: 92872 - DNA, 25 bp, probe
gaatcctaatgcttcttccttcaga

SEQ ID NO: 92873 - DNA, 25 bp, probe
ggagcagagagttcttacttattga

SEQ ID NO: 92874 - DNA, 25 bp, probe
tggagcagagagttcttacttattg

SEQ ID NO: 92875 - DNA, 25 bp, probe
gtggagcagagagttcttacttatt

SEQ ID NO: 92876 - DNA, 25 bp, probe
atatactgtgatgccttcctactca

SEQ ID NO: 92877 - DNA, 25 bp, probe
aatcaccttggaatcaatgtcagtt

SEQ ID NO: 92878 - DNA, 25 bp, probe
tatactgtgatgccttcctactcaa

SEQ ID NO: 92879 - DNA, 25 bp, probe
acttcaattcacaatcaccttggaa

SEQ ID NO: 92880 - DNA, 25 bp, probe
aacttcaattcacaatcaccttgga

SEQ ID NO: 92881 - DNA, 25 bp, probe
aaccaacaacagcatcttagaagaa

SEQ ID NO: 92882 - DNA, 25 bp, probe
caatcaccttggaatcaatgtcagt

SEQ ID NO: 92883 - DNA, 25 bp, probe
caggacatgagacatagatacagtg

SEQ ID NO: 92884 - DNA, 25 bp, probe
gtattatcctgcttccagacctatg

SEQ ID NO: 92885 - DNA, 25 bp, probe
agtattatcctgcttccagacctat

SEQ ID NO: 92886 - DNA, 25 bp, probe
ctaagtattatcctgcttccagacc

SEQ ID NO: 92887 - DNA, 25 bp, probe
gaaccaacaacagcatcttagaaga

SEQ ID NO: 92888 - DNA, 25 bp, probe
ggtggagcagagagttcttacttat

SEQ ID NO: 92889 - DNA, 25 bp, probe
tattatcctgcttccagacctatgt

SEQ ID NO: 92890 - DNA, 25 bp, probe
aagtattatcctgcttccagaccta

SEQ ID NO: 92891 - DNA, 25 bp, probe
taagtattatcctgcttccagacct

SEQ ID NO: 92892 - DNA, 25 bp, probe
ttcacaatcaccttggaatcaatgt

SEQ ID NO: 92893 - DNA, 25 bp, probe
ggaaccaacaacagcatcttagaag

SEQ ID NO: 92894 - DNA, 25 bp, probe
gagcagagagttcttacttattgaa

SEQ ID NO: 92895 - DNA, 25 bp, probe
gctaagtattatcctgcttccagac

SEQ ID NO: 92896 - DNA, 25 bp, probe
agcagagagttcttacttattgaag

SEQ ID NO: 92897 - DNA, 25 bp, probe
aggacatgagacatagatacagtgg

SEQ ID NO: 92898 - DNA, 25 bp, probe
atactgtgatgccttcctactcaag

SEQ ID NO: 92899 - DNA, 25 bp, probe
agagcaggacatgagacatagatac

SEQ ID NO: 92900 - DNA, 25 bp, probe
cagagcaggacatgagacatagata

SEQ ID NO: 92901 - DNA, 25 bp, probe
acaatcaccttggaatcaatgtcag

SEQ ID NO: 92902 - DNA, 25 bp, probe
tcacaatcaccttggaatcaatgtc

SEQ ID NO: 92903 - DNA, 25 bp, probe
tatgtcaccagtaccaatcagtcag

SEQ ID NO: 92904 - DNA, 25 bp, probe
ctatgtcaccagtaccaatcagtca

SEQ ID NO: 92905 - DNA, 25 bp, probe
agcaggacatgagacatagatacag

SEQ ID NO: 92906 - DNA, 25 bp, probe
gagcaggacatgagacatagataca

SEQ ID NO: 92907 - DNA, 25 bp, probe
cacaatcaccttggaatcaatgtca

SEQ ID NO: 92908 - DNA, 25 bp, probe
attatcctgcttccagacctatgtc

SEQ ID NO: 92909 - DNA, 25 bp, probe
attcacaatcaccttggaatcaatg

SEQ ID NO: 92910 - DNA, 25 bp, probe
ttcaattcacaatcaccttggaatc

SEQ ID NO: 92911 - DNA, 25 bp, probe
cttcaattcacaatcaccttggaat

SEQ ID NO: 92912 - DNA, 25 bp, probe
caattcacaatcaccttggaatcaa

SEQ ID NO: 92913 - DNA, 25 bp, probe
gcaggacatgagacatagatacagt

SEQ ID NO: 92914 - DNA, 25 bp, probe
ttctgagaatatgtgttcgtctgtt

SEQ ID NO: 92915 - DNA, 25 bp, probe
gtctgattctgctgctaattaagtc

SEQ ID NO: 92916 - DNA, 25 bp, probe
tgtctgattctgctgctaattaagt

SEQ ID NO: 92917 - DNA, 25 bp, probe
tgtacctaatgattattcagtgcgt

SEQ ID NO: 92918 - DNA, 25 bp, probe
catgtctgattctgctgctaattaa

SEQ ID NO: 92919 - DNA, 25 bp, probe
atgtctgattctgctgctaattaag

SEQ ID NO: 92920 - DNA, 25 bp, probe
atgtacctaatgattattcagtgcg

SEQ ID NO: 92921 - DNA, 25 bp, probe
tctgctgctaattaagtcaatcatt

SEQ ID NO: 92922 - DNA, 25 bp, probe
ttctgctgctaattaagtcaatcat

SEQ ID NO: 92923 - DNA, 25 bp, probe
attctgctgctaattaagtcaatca

SEQ ID NO: 92924 - DNA, 25 bp, probe
tctgattctgctgctaattaagtca

SEQ ID NO: 92925 - DNA, 25 bp, probe
ttcatgtctgattctgctgctaatt

SEQ ID NO: 92926 - DNA, 25 bp, probe
tcatgtctgattctgctgctaatta

SEQ ID NO: 92927 - DNA, 25 bp, probe
ctgattctgctgctaattaagtcaa

SEQ ID NO: 92928 - DNA, 25 bp, probe
gtacctaatgattattcagtgcgta

SEQ ID NO: 92929 - DNA, 25 bp, probe
aggaacagatgagacagtggctata

SEQ ID NO: 92930 - DNA, 25 bp, probe
tctgccatgtacctaatgattattc

SEQ ID NO: 92931 - DNA, 25 bp, probe
gccatgtacctaatgattattcagt

SEQ ID NO: 92932 - DNA, 25 bp, probe
tgccatgtacctaatgattattcag

SEQ ID NO: 92933 - DNA, 25 bp, probe
ctgccatgtacctaatgattattca

SEQ ID NO: 92934 - DNA, 25 bp, probe
tgactggattatgaagaatcaggag

SEQ ID NO: 92935 - DNA, 25 bp, probe
ggattatgaagaatcaggagaatgc

SEQ ID NO: 92936 - DNA, 25 bp, probe
gactggattatgaagaatcaggaga

SEQ ID NO: 92937 - DNA, 25 bp, probe
tgattctgctgctaattaagtcaat

SEQ ID NO: 92938 - DNA, 25 bp, probe
actggattatgaagaatcaggagaa

SEQ ID NO: 92939 - DNA, 25 bp, probe
atgactggattatgaagaatcagga

SEQ ID NO: 92940 - DNA, 25 bp, probe
acctaatgattattcagtgcgtata

SEQ ID NO: 92941 - DNA, 25 bp, probe
tacctaatgattattcagtgcgtat

SEQ ID NO: 92942 - DNA, 25 bp, probe
taattattcagtcactgcctggtac

SEQ ID NO: 92943 - DNA, 25 bp, probe
tatgtgttcgtctgtttgtttgttt

SEQ ID NO: 92944 - DNA, 25 bp, probe
atatgtgttcgtctgtttgtttgtt

SEQ ID NO: 92945 - DNA, 25 bp, probe
aatatgtgttcgtctgtttgtttgt

SEQ ID NO: 92946 - DNA, 25 bp, probe
ttctgccatgtacctaatgattatt

SEQ ID NO: 92947 - DNA, 25 bp, probe
aacagatgagacagtggctatagaa

SEQ ID NO: 92948 - DNA, 25 bp, probe
gggacctcagtttctttgtaagtaa

SEQ ID NO: 92949 - DNA, 25 bp, probe
gaatatgtgttcgtctgtttgtttg

SEQ ID NO: 92950 - DNA, 25 bp, probe
acagatgagacagtggctatagaag

SEQ ID NO: 92951 - DNA, 25 bp, probe
gaacagatgagacagtggctataga

SEQ ID NO: 92952 - DNA, 25 bp, probe
gagaatatgtgttcgtctgtttgtt

SEQ ID NO: 92953 - DNA, 25 bp, probe
ctgagaatatgtgttcgtctgtttg

SEQ ID NO: 92954 - DNA, 25 bp, probe
tctgagaatatgtgttcgtctgttt

SEQ ID NO: 92955 - DNA, 25 bp, probe
agaatatgtgttcgtctgtttgttt

SEQ ID NO: 92956 - DNA, 25 bp, probe
tggattatgaagaatcaggagaatg

SEQ ID NO: 92957 - DNA, 25 bp, probe
tacctttatcttcccatcccattaa

SEQ ID NO: 92958 - DNA, 25 bp, probe
tgattctcttaggataacagcagta

SEQ ID NO: 92959 - DNA, 25 bp, probe
ttctcttaggataacagcagtatcg

SEQ ID NO: 92960 - DNA, 25 bp, probe
tactgccttccagaatgttattgaa

SEQ ID NO: 92961 - DNA, 25 bp, probe
ctactgccttccagaatgttattga

SEQ ID NO: 92962 - DNA, 25 bp, probe
tctcttaggataacagcagtatcgg

SEQ ID NO: 92963 - DNA, 25 bp, probe
gattctcttaggataacagcagtat

SEQ ID NO: 92964 - DNA, 25 bp, probe
cctactgccttccagaatgttattg

SEQ ID NO: 92965 - DNA, 25 bp, probe
tcctactgccttccagaatgttatt

SEQ ID NO: 92966 - DNA, 25 bp, probe
ctcctactgccttccagaatgttat

SEQ ID NO: 92967 - DNA, 25 bp, probe
attctcttaggataacagcagtatc

SEQ ID NO: 92968 - DNA, 25 bp, probe
ctcttaggataacagcagtatcggc

SEQ ID NO: 92969 - DNA, 25 bp, probe
ttagtggttccacaagtaatgtcat

SEQ ID NO: 92970 - DNA, 25 bp, probe
tgtgggattcatcttcaaagactaa

SEQ ID NO: 92971 - DNA, 25 bp, probe
ctgtgggattcatcttcaaagacta

SEQ ID NO: 92972 - DNA, 25 bp, probe
tagtggttccacaagtaatgtcatg

SEQ ID NO: 92973 - DNA, 25 bp, probe
tctcctactgccttccagaatgtta

SEQ ID NO: 92974 - DNA, 25 bp, probe
gtgggattcatcttcaaagactaat

SEQ ID NO: 92975 - DNA, 25 bp, probe
actgccttccagaatgttattgaaa

SEQ ID NO: 92976 - DNA, 25 bp, probe
gtggttccacaagtaatgtcatgtt

SEQ ID NO: 92977 - DNA, 25 bp, probe
aacctttgtaccacagaatgttcat

SEQ ID NO: 92978 - DNA, 25 bp, probe
caaacctttgtaccacagaatgttc

SEQ ID NO: 92979 - DNA, 25 bp, probe
cctttgtaccacagaatgttcatct

SEQ ID NO: 92980 - DNA, 25 bp, probe
aaacctttgtaccacagaatgttca

SEQ ID NO: 92981 - DNA, 25 bp, probe
acctttgtaccacagaatgttcatc

SEQ ID NO: 92982 - DNA, 25 bp, probe
ggttccacaagtaatgtcatgtttg

SEQ ID NO: 92983 - DNA, 25 bp, probe
tggttccacaagtaatgtcatgttt

SEQ ID NO: 92984 - DNA, 25 bp, probe
ctgaactcagtaataaactccctgg

SEQ ID NO: 92985 - DNA, 25 bp, probe
agtggttccacaagtaatgtcatgt

SEQ ID NO: 92986 - DNA, 25 bp, probe
ccaaacctttgtaccacagaatgtt

SEQ ID NO: 92987 - DNA, 25 bp, probe
cctgtgggattcatcttcaaagact

SEQ ID NO: 92988 - DNA, 25 bp, probe
tgaactcagtaataaactccctggc

SEQ ID NO: 92989 - DNA, 25 bp, probe
tgggattcatcttcaaagactaatc

SEQ ID NO: 92990 - DNA, 25 bp, probe
ttgaactttgccaaacctttgtacc

SEQ ID NO: 92991 - DNA, 25 bp, probe
ttgtaccacagaatgttcatctgaa

SEQ ID NO: 92992 - DNA, 25 bp, probe
tttagtggttccacaagtaatgtca

SEQ ID NO: 92993 - DNA, 25 bp, probe
gaatgttattgaaaaggtgggactg

SEQ ID NO: 92994 - DNA, 25 bp, probe
agaatgttattgaaaaggtgggact

SEQ ID NO: 92995 - DNA, 25 bp, probe
cagaatgttattgaaaaggtgggac

SEQ ID NO: 92996 - DNA, 25 bp, probe
ttgtcctgtgggattcatcttcaaa

SEQ ID NO: 92997 - DNA, 25 bp, probe
atgttattgaaaaggtgggactgaa

SEQ ID NO: 92998 - DNA, 25 bp, probe
aatgttattgaaaaggtgggactga

SEQ ID NO: 92999 - DNA, 25 bp, probe
attcatcttcaaagactaatccaag

SEQ ID NO: 93000 - DNA, 25 bp, probe
ttcagcagtacatgttgaccttatt

SEQ ID NO: 93001 - DNA, 25 bp, probe
tgttccaagagccttttagtgatta

SEQ ID NO: 93002 - DNA, 25 bp, probe
ctaccacggagaatacatagaccag

SEQ ID NO: 93003 - DNA, 25 bp, probe
gttgtctaccacggagaatacatag

SEQ ID NO: 93004 - DNA, 25 bp, probe
agttgtctaccacggagaatacata

SEQ ID NO: 93005 - DNA, 25 bp, probe
ttgtctaccacggagaatacataga

SEQ ID NO: 93006 - DNA, 25 bp, probe
gagttgtctaccacggagaatacat

SEQ ID NO: 93007 - DNA, 25 bp, probe
taccacggagaatacatagaccagg

SEQ ID NO: 93008 - DNA, 25 bp, probe
atcaagtcactaagtcgcatcacag

SEQ ID NO: 93009 - DNA, 25 bp, probe
caatgtgccatcaagtcactaagtc

SEQ ID NO: 93010 - DNA, 25 bp, probe
tctaccacggagaatacatagacca

SEQ ID NO: 93011 - DNA, 25 bp, probe
catcaagtcactaagtcgcatcaca

SEQ ID NO: 93012 - DNA, 25 bp, probe
atccaatgtgccatcaagtcactaa

SEQ ID NO: 93013 - DNA, 25 bp, probe
aatccaatgtgccatcaagtcacta

SEQ ID NO: 93014 - DNA, 25 bp, probe
agtcactaagtcgcatcacagagat

SEQ ID NO: 93015 - DNA, 25 bp, probe
caagtcactaagtcgcatcacagag

SEQ ID NO: 93016 - DNA, 25 bp, probe
aagtcactaagtcgcatcacagaga

SEQ ID NO: 93017 - DNA, 25 bp, probe
tccaatgtgccatcaagtcactaag

SEQ ID NO: 93018 - DNA, 25 bp, probe
tcaagtcactaagtcgcatcacaga

SEQ ID NO: 93019 - DNA, 25 bp, probe
ccatcaagtcactaagtcgcatcac

SEQ ID NO: 93020 - DNA, 25 bp, probe
gaatcgaatccaatgtgccatcaag

SEQ ID NO: 93021 - DNA, 25 bp, probe
ccaatgtgccatcaagtcactaagt

SEQ ID NO: 93022 - DNA, 25 bp, probe
ttggagttgtctaccacggagaata

SEQ ID NO: 93023 - DNA, 25 bp, probe
ggagttgtctaccacggagaataca

SEQ ID NO: 93024 - DNA, 25 bp, probe
aatgtgccatcaagtcactaagtcg

SEQ ID NO: 93025 - DNA, 25 bp, probe
agaatcgaatccaatgtgccatcaa

SEQ ID NO: 93026 - DNA, 25 bp, probe
gaatccaatgtgccatcaagtcact

SEQ ID NO: 93027 - DNA, 25 bp, probe
atgtgctggctctcattggtatcat

SEQ ID NO: 93028 - DNA, 25 bp, probe
aatcgaatccaatgtgccatcaagt

SEQ ID NO: 93029 - DNA, 25 bp, probe
tggagttgtctaccacggagaatac

SEQ ID NO: 93030 - DNA, 25 bp, probe
ctggctctcattggtatcatgttgc

SEQ ID NO: 93031 - DNA, 25 bp, probe
gctggctctcattggtatcatgttg

SEQ ID NO: 93032 - DNA, 25 bp, probe
atcgaatccaatgtgccatcaagtc

SEQ ID NO: 93033 - DNA, 25 bp, probe
cagaatcgaatccaatgtgccatca

SEQ ID NO: 93034 - DNA, 25 bp, probe
tgctggctctcattggtatcatgtt

SEQ ID NO: 93035 - DNA, 25 bp, probe
ctctcattggtatcatgttgccacc

SEQ ID NO: 93036 - DNA, 25 bp, probe
gaatgtgctggctctcattggtatc

SEQ ID NO: 93037 - DNA, 25 bp, probe
cattggtatcatgttgccacctgag

SEQ ID NO: 93038 - DNA, 25 bp, probe
ctcattggtatcatgttgccacctg

SEQ ID NO: 93039 - DNA, 25 bp, probe
tctcattggtatcatgttgccacct

SEQ ID NO: 93040 - DNA, 25 bp, probe
gtcactaagtcgcatcacagagatg

SEQ ID NO: 93041 - DNA, 25 bp, probe
ccagaatcgaatccaatgtgccatc

SEQ ID NO: 93042 - DNA, 25 bp, probe
cgaatccaatgtgccatcaagtcac

SEQ ID NO: 93043 - DNA, 25 bp, probe
tcattggtatcatgttgccacctga

SEQ ID NO: 93044 - DNA, 25 bp, probe
gctctcattggtatcatgttgccac

SEQ ID NO: 93045 - DNA, 25 bp, probe
aatgtgctggctctcattggtatca

SEQ ID NO: 93046 - DNA, 25 bp, probe
agaggagatatggaacagaatgact

SEQ ID NO: 93047 - DNA, 25 bp, probe
cagaggagatatggaacagaatgac

SEQ ID NO: 93048 - DNA, 25 bp, probe
gaatgactctgacaaccgtagaata

SEQ ID NO: 93049 - DNA, 25 bp, probe
aatgactctgacaaccgtagaataa

SEQ ID NO: 93050 - DNA, 25 bp, probe
atgactctgacaaccgtagaataat

SEQ ID NO: 93051 - DNA, 25 bp, probe
tgactctgacaaccgtagaataatt

SEQ ID NO: 93052 - DNA, 25 bp, probe
aaccagttcagagaatcttaattgc

SEQ ID NO: 93053 - DNA, 25 bp, probe
ccgtagaataattcgctatccagat

SEQ ID NO: 93054 - DNA, 25 bp, probe
gacaaccgtagaataattcgctatc

SEQ ID NO: 93055 - DNA, 25 bp, probe
tgacaaccgtagaataattcgctat

SEQ ID NO: 93056 - DNA, 25 bp, probe
aaccgtagaataattcgctatccag

SEQ ID NO: 93057 - DNA, 25 bp, probe
caaccgtagaataattcgctatcca

SEQ ID NO: 93058 - DNA, 25 bp, probe
acaaccgtagaataattcgctatcc

SEQ ID NO: 93059 - DNA, 25 bp, probe
ctgacaaccgtagaataattcgcta

SEQ ID NO: 93060 - DNA, 25 bp, probe
actctgacaaccgtagaataattcg

SEQ ID NO: 93061 - DNA, 25 bp, probe
gactctgacaaccgtagaataattc

SEQ ID NO: 93062 - DNA, 25 bp, probe
gaggagatatggaacagaatgactc

SEQ ID NO: 93063 - DNA, 25 bp, probe
aggagatatggaacagaatgactct

SEQ ID NO: 93064 - DNA, 25 bp, probe
accgtagaataattcgctatccaga

SEQ ID NO: 93065 - DNA, 25 bp, probe
agaatgactctgacaaccgtagaat

SEQ ID NO: 93066 - DNA, 25 bp, probe
gcagaggagatatggaacagaatga

SEQ ID NO: 93067 - DNA, 25 bp, probe
ggtaacttgccacatgatattgatg

SEQ ID NO: 93068 - DNA, 25 bp, probe
gtaacttgccacatgatattgatga

SEQ ID NO: 93069 - DNA, 25 bp, probe
taacttgccacatgatattgatgaa

SEQ ID NO: 93070 - DNA, 25 bp, probe
ctctgacaaccgtagaataattcgc

SEQ ID NO: 93071 - DNA, 25 bp, probe
cgtagaataattcgctatccagata

SEQ ID NO: 93072 - DNA, 25 bp, probe
tctgacaaccgtagaataattcgct

SEQ ID NO: 93073 - DNA, 25 bp, probe
attcgctatccagatagtcatcaac

SEQ ID NO: 93074 - DNA, 25 bp, probe
aattcgctatccagatagtcatcaa

SEQ ID NO: 93075 - DNA, 25 bp, probe
ggcagaggagatatggaacagaatg

SEQ ID NO: 93076 - DNA, 25 bp, probe
aggcagaggagatatggaacagaat

SEQ ID NO: 93077 - DNA, 25 bp, probe
taattcgctatccagatagtcatca

SEQ ID NO: 93078 - DNA, 25 bp, probe
tcgctatccagatagtcatcaactt

SEQ ID NO: 93079 - DNA, 25 bp, probe
ttcgctatccagatagtcatcaact

SEQ ID NO: 93080 - DNA, 25 bp, probe
accagttcagagaatcttaattgca

SEQ ID NO: 93081 - DNA, 25 bp, probe
gaaccagttcagagaatcttaattg

SEQ ID NO: 93082 - DNA, 25 bp, probe
tggtaacttgccacatgatattgat

SEQ ID NO: 93083 - DNA, 25 bp, probe
ttggtaacttgccacatgatattga

SEQ ID NO: 93084 - DNA, 25 bp, probe
gttggtaacttgccacatgatattg

SEQ ID NO: 93085 - DNA, 25 bp, probe
tgttggtaacttgccacatgatatt

SEQ ID NO: 93086 - DNA, 25 bp, probe
ttgttggtaacttgccacatgatat

SEQ ID NO: 93087 - DNA, 25 bp, probe
gaataattcgctatccagatagtca

SEQ ID NO: 93088 - DNA, 25 bp, probe
ataattcgctatccagatagtcatc

SEQ ID NO: 93089 - DNA, 25 bp, probe
agaataattcgctatccagatagtc

SEQ ID NO: 93090 - DNA, 25 bp, probe
tcttcttccaatgatgcttactaca

SEQ ID NO: 93091 - DNA, 25 bp, probe
ggtcttcttccaatgatgcttacta

SEQ ID NO: 93092 - DNA, 25 bp, probe
cttcttccaatgatgcttactacag

SEQ ID NO: 93093 - DNA, 25 bp, probe
gtcttcttccaatgatgcttactac

SEQ ID NO: 93094 - DNA, 25 bp, probe
aatcagacacaattagagaagcctt

SEQ ID NO: 93095 - DNA, 25 bp, probe
tcttccaatgatgcttactacagaa

SEQ ID NO: 93096 - DNA, 25 bp, probe
ttcttccaatgatgcttactacaga

SEQ ID NO: 93097 - DNA, 25 bp, probe
tcatacagcactacttacttagaga

SEQ ID NO: 93098 - DNA, 25 bp, probe
cctagtcagatggatgtagatacag

SEQ ID NO: 93099 - DNA, 25 bp, probe
ttcatacagcactacttacttagag

SEQ ID NO: 93100 - DNA, 25 bp, probe
gcctagtcagatggatgtagataca

SEQ ID NO: 93101 - DNA, 25 bp, probe
atacagcactacttacttagagatg

SEQ ID NO: 93102 - DNA, 25 bp, probe
catacagcactacttacttagagat

SEQ ID NO: 93103 - DNA, 25 bp, probe
agtcagatggatgtagatacagatc

SEQ ID NO: 93104 - DNA, 25 bp, probe
gatccgcatgtgtctgtattcatac

SEQ ID NO: 93105 - DNA, 25 bp, probe
ctagtcagatggatgtagatacaga

SEQ ID NO: 93106 - DNA, 25 bp, probe
agatccgcatgtgtctgtattcata

SEQ ID NO: 93107 - DNA, 25 bp, probe
ctacagaaagcaaatcagacacaat

SEQ ID NO: 93108 - DNA, 25 bp, probe
tactacagaaagcaaatcagacaca

SEQ ID NO: 93109 - DNA, 25 bp, probe
ttactacagaaagcaaatcagacac

SEQ ID NO: 93110 - DNA, 25 bp, probe
tgaatggattaaatggcacctgtat

SEQ ID NO: 93111 - DNA, 25 bp, probe
gtgtgtgtctctatcttgcatctac

SEQ ID NO: 93112 - DNA, 25 bp, probe
atcagacacaattagagaagccttt

SEQ ID NO: 93113 - DNA, 25 bp, probe
aaatcagacacaattagagaagcct

SEQ ID NO: 93114 - DNA, 25 bp, probe
caaatcagacacaattagagaagcc

SEQ ID NO: 93115 - DNA, 25 bp, probe
actacagaaagcaaatcagacacaa

SEQ ID NO: 93116 - DNA, 25 bp, probe
ttgaatggattaaatggcacctgta

SEQ ID NO: 93117 - DNA, 25 bp, probe
acagaaagcaaatcagacacaatta

SEQ ID NO: 93118 - DNA, 25 bp, probe
tacagaaagcaaatcagacacaatt

SEQ ID NO: 93119 - DNA, 25 bp, probe
attcatacagcactacttacttaga

SEQ ID NO: 93120 - DNA, 25 bp, probe
tgtgtgtgtctctatcttgcatcta

SEQ ID NO: 93121 - DNA, 25 bp, probe
gcaaatcagacacaattagagaagc

SEQ ID NO: 93122 - DNA, 25 bp, probe
agcaaatcagacacaattagagaag

SEQ ID NO: 93123 - DNA, 25 bp, probe
gaatggattaaatggcacctgtata

SEQ ID NO: 93124 - DNA, 25 bp, probe
tagtcagatggatgtagatacagat

SEQ ID NO: 93125 - DNA, 25 bp, probe
cttactacagaaagcaaatcagaca

SEQ ID NO: 93126 - DNA, 25 bp, probe
ttccaatgatgcttactacagaaag

SEQ ID NO: 93127 - DNA, 25 bp, probe
cttccaatgatgcttactacagaaa

SEQ ID NO: 93128 - DNA, 25 bp, probe
cagaaagcaaatcagacacaattag

SEQ ID NO: 93129 - DNA, 25 bp, probe
aagcaaatcagacacaattagagaa

SEQ ID NO: 93130 - DNA, 25 bp, probe
aaagcaaatcagacacaattagaga

SEQ ID NO: 93131 - DNA, 25 bp, probe
agaaagcaaatcagacacaattaga

SEQ ID NO: 93132 - DNA, 25 bp, probe
tttgaatggattaaatggcacctgt

SEQ ID NO: 93133 - DNA, 25 bp, probe
tgtgtctctatcttgcatctacctg

SEQ ID NO: 93134 - DNA, 25 bp, probe
ggagaaagaggatttgattggaaag

SEQ ID NO: 93135 - DNA, 25 bp, probe
gagaaagaggatttgattggaaagc

SEQ ID NO: 93136 - DNA, 25 bp, probe
gaaagaggatttgattggaaagcag

SEQ ID NO: 93137 - DNA, 25 bp, probe
ttacgggagaaagaggatttgattg

SEQ ID NO: 93138 - DNA, 25 bp, probe
atgtctgtgataattcttacgggag

SEQ ID NO: 93139 - DNA, 25 bp, probe
agaaagaggatttgattggaaagca

SEQ ID NO: 93140 - DNA, 25 bp, probe
gggagaaagaggatttgattggaaa

SEQ ID NO: 93141 - DNA, 25 bp, probe
gaggatttgattggaaagcagtttg

SEQ ID NO: 93142 - DNA, 25 bp, probe
agaggatttgattggaaagcagttt

SEQ ID NO: 93143 - DNA, 25 bp, probe
aagaggatttgattggaaagcagtt

SEQ ID NO: 93144 - DNA, 25 bp, probe
aaagaggatttgattggaaagcagt

SEQ ID NO: 93145 - DNA, 25 bp, probe
cttacgggagaaagaggatttgatt

SEQ ID NO: 93146 - DNA, 25 bp, probe
aagtccttaggagtcttaacattgg

SEQ ID NO: 93147 - DNA, 25 bp, probe
ccaagtccttaggagtcttaacatt

SEQ ID NO: 93148 - DNA, 25 bp, probe
taccaagtccttaggagtcttaaca

SEQ ID NO: 93149 - DNA, 25 bp, probe
tatgtctgtgataattcttacggga

SEQ ID NO: 93150 - DNA, 25 bp, probe
accaagtccttaggagtcttaacat

SEQ ID NO: 93151 - DNA, 25 bp, probe
ataccaagtccttaggagtcttaac

SEQ ID NO: 93152 - DNA, 25 bp, probe
ctgtaattgttgaacgggtgattat

SEQ ID NO: 93153 - DNA, 25 bp, probe
tctgtaattgttgaacgggtgatta

SEQ ID NO: 93154 - DNA, 25 bp, probe
caagtccttaggagtcttaacattg

SEQ ID NO: 93155 - DNA, 25 bp, probe
tgtaattgttgaacgggtgattatt

SEQ ID NO: 93156 - DNA, 25 bp, probe
ttctgtaattgttgaacgggtgatt

SEQ ID NO: 93157 - DNA, 25 bp, probe
tttcttctgtaattgttgaacgggt

SEQ ID NO: 93158 - DNA, 25 bp, probe
tgtctgtgataattcttacgggaga

SEQ ID NO: 93159 - DNA, 25 bp, probe
aataccaagtccttaggagtcttaa

SEQ ID NO: 93160 - DNA, 25 bp, probe
ttaataccaagtccttaggagtctt

SEQ ID NO: 93161 - DNA, 25 bp, probe
atttgattggaaagcagtttgggaa

SEQ ID NO: 93162 - DNA, 25 bp, probe
cttctgtaattgttgaacgggtgat

SEQ ID NO: 93163 - DNA, 25 bp, probe
ttatgtctgtgataattcttacggg

SEQ ID NO: 93164 - DNA, 25 bp, probe
ccagcatctgtttatcaaatgacat

SEQ ID NO: 93165 - DNA, 25 bp, probe
ttcttctgtaattgttgaacgggtg

SEQ ID NO: 93166 - DNA, 25 bp, probe
attggaaagcagtttgggaagaaag

SEQ ID NO: 93167 - DNA, 25 bp, probe
gattggaaagcagtttgggaagaaa

SEQ ID NO: 93168 - DNA, 25 bp, probe
gatttgattggaaagcagtttggga

SEQ ID NO: 93169 - DNA, 25 bp, probe
aggatttgattggaaagcagtttgg

SEQ ID NO: 93170 - DNA, 25 bp, probe
tgaacgggtgattattattaactct

SEQ ID NO: 93171 - DNA, 25 bp, probe
agtccttaggagtcttaacattggc

SEQ ID NO: 93172 - DNA, 25 bp, probe
tacgggagaaagaggatttgattgg

SEQ ID NO: 93173 - DNA, 25 bp, probe
taataccaagtccttaggagtctta

SEQ ID NO: 93174 - DNA, 25 bp, probe
tttgattggaaagcagtttgggaag

SEQ ID NO: 93175 - DNA, 25 bp, probe
tgttgaacgggtgattattattaac

SEQ ID NO: 93176 - DNA, 25 bp, probe
aattgttgaacgggtgattattatt

SEQ ID NO: 93177 - DNA, 25 bp, probe
gtaattgttgaacgggtgattatta

SEQ ID NO: 93178 - DNA, 25 bp, probe
agtcaactgttcagatgtaagatgt

SEQ ID NO: 93179 - DNA, 25 bp, probe
aagagtcaactgttcagatgtaaga

SEQ ID NO: 93180 - DNA, 25 bp, probe
gagtcaactgttcagatgtaagatg

SEQ ID NO: 93181 - DNA, 25 bp, probe
agagtcaactgttcagatgtaagat

SEQ ID NO: 93182 - DNA, 25 bp, probe
agaagagtcaactgttcagatgtaa

SEQ ID NO: 93183 - DNA, 25 bp, probe
gaagagtcaactgttcagatgtaag

SEQ ID NO: 93184 - DNA, 25 bp, probe
atagaagagtcaactgttcagatgt

SEQ ID NO: 93185 - DNA, 25 bp, probe
gtcaactgttcagatgtaagatgtt

SEQ ID NO: 93186 - DNA, 25 bp, probe
tagaagagtcaactgttcagatgta

SEQ ID NO: 93187 - DNA, 25 bp, probe
tgtatagaagagtcaactgttcaga

SEQ ID NO: 93188 - DNA, 25 bp, probe
aataatgttaccaactgctgagatt

SEQ ID NO: 93189 - DNA, 25 bp, probe
ttgtatagaagagtcaactgttcag

SEQ ID NO: 93190 - DNA, 25 bp, probe
taataatgttaccaactgctgagat

SEQ ID NO: 93191 - DNA, 25 bp, probe
ataataatgttaccaactgctgaga

SEQ ID NO: 93192 - DNA, 25 bp, probe
tatagaagagtcaactgttcagatg

SEQ ID NO: 93193 - DNA, 25 bp, probe
gtatagaagagtcaactgttcagat

SEQ ID NO: 93194 - DNA, 25 bp, probe
actgctattgtaataagtgtcatct

SEQ ID NO: 93195 - DNA, 25 bp, probe
aataataatgttaccaactgctgag

SEQ ID NO: 93196 - DNA, 25 bp, probe
gaataataatgttaccaactgctga

SEQ ID NO: 93197 - DNA, 25 bp, probe
agaataataatgttaccaactgctg

SEQ ID NO: 93198 - DNA, 25 bp, probe
gtgggcattatacaaaggcatatta

SEQ ID NO: 93199 - DNA, 25 bp, probe
taagtgtcatcttgtgggcattata

SEQ ID NO: 93200 - DNA, 25 bp, probe
gctattgtaataagtgtcatcttgt

SEQ ID NO: 93201 - DNA, 25 bp, probe
tgctattgtaataagtgtcatcttg

SEQ ID NO: 93202 - DNA, 25 bp, probe
aataagtgtcatcttgtgggcatta

SEQ ID NO: 93203 - DNA, 25 bp, probe
taataagtgtcatcttgtgggcatt

SEQ ID NO: 93204 - DNA, 25 bp, probe
caactgctattgtaataagtgtcat

SEQ ID NO: 93205 - DNA, 25 bp, probe
ataagtgtcatcttgtgggcattat

SEQ ID NO: 93206 - DNA, 25 bp, probe
attgtaataagtgtcatcttgtggg

SEQ ID NO: 93207 - DNA, 25 bp, probe
aagtgtcatcttgtgggcattatac

SEQ ID NO: 93208 - DNA, 25 bp, probe
gtaataagtgtcatcttgtgggcat

SEQ ID NO: 93209 - DNA, 25 bp, probe
ctgctattgtaataagtgtcatctt

SEQ ID NO: 93210 - DNA, 25 bp, probe
aactgctattgtaataagtgtcatc

SEQ ID NO: 93211 - DNA, 25 bp, probe
ttgtaataagtgtcatcttgtgggc

SEQ ID NO: 93212 - DNA, 25 bp, probe
tgggcattatacaaaggcatattat

SEQ ID NO: 93213 - DNA, 25 bp, probe
tattgtaataagtgtcatcttgtgg

SEQ ID NO: 93214 - DNA, 25 bp, probe
ataatgttaccaactgctgagattt

SEQ ID NO: 93215 - DNA, 25 bp, probe
tgtgggcattatacaaaggcatatt

SEQ ID NO: 93216 - DNA, 25 bp, probe
aagaataataatgttaccaactgct

SEQ ID NO: 93217 - DNA, 25 bp, probe
tgtaataagtgtcatcttgtgggca

SEQ ID NO: 93218 - DNA, 25 bp, probe
tgtgactttgtaacaactgctattg

SEQ ID NO: 93219 - DNA, 25 bp, probe
ctttgggctactctgtttaaatctg

SEQ ID NO: 93220 - DNA, 25 bp, probe
actttgggctactctgtttaaatct

SEQ ID NO: 93221 - DNA, 25 bp, probe
ctctgtttaaatctgccactttctg

SEQ ID NO: 93222 - DNA, 25 bp, probe
ttggatacaggatacagtggtgaga

SEQ ID NO: 93223 - DNA, 25 bp, probe
gttggatacaggatacagtggtgag

SEQ ID NO: 93224 - DNA, 25 bp, probe
atacaggatacagtggtgagaggag

SEQ ID NO: 93225 - DNA, 25 bp, probe
gatacaggatacagtggtgagagga

SEQ ID NO: 93226 - DNA, 25 bp, probe
tggatacaggatacagtggtgagag

SEQ ID NO: 93227 - DNA, 25 bp, probe
tgtctgtctttctgtccaaatatct

SEQ ID NO: 93228 - DNA, 25 bp, probe
tgttgaatgataatagaaagcaccc

SEQ ID NO: 93229 - DNA, 25 bp, probe
gttgaatgataatagaaagcaccct

SEQ ID NO: 93230 - DNA, 25 bp, probe
gaattgtaacatctaaacctgccac

SEQ ID NO: 93231 - DNA, 25 bp, probe
atgtctgtctttctgtccaaatatc

SEQ ID NO: 93232 - DNA, 25 bp, probe
gcttcaactattatttgtcaggtcc

SEQ ID NO: 93233 - DNA, 25 bp, probe
agaattgtaacatctaaacctgcca

SEQ ID NO: 93234 - DNA, 25 bp, probe
aatagaaagcaccctaattgacttg

SEQ ID NO: 93235 - DNA, 25 bp, probe
aaatgtctgtctttctgtccaaata

SEQ ID NO: 93236 - DNA, 25 bp, probe
atagaaagcaccctaattgacttgg

SEQ ID NO: 93237 - DNA, 25 bp, probe
tgcttcaactattatttgtcaggtc

SEQ ID NO: 93238 - DNA, 25 bp, probe
aatgtctgtctttctgtccaaatat

SEQ ID NO: 93239 - DNA, 25 bp, probe
tatgagttccactgccagatttatg

SEQ ID NO: 93240 - DNA, 25 bp, probe
gtatgagttccactgccagatttat

SEQ ID NO: 93241 - DNA, 25 bp, probe
atgtctgtcagatagttagaattgt

SEQ ID NO: 93242 - DNA, 25 bp, probe
cttcaactattatttgtcaggtcca

SEQ ID NO: 93243 - DNA, 25 bp, probe
atgcttcaactattatttgtcaggt

SEQ ID NO: 93244 - DNA, 25 bp, probe
ctgtctttctgtccaaatatctact

SEQ ID NO: 93245 - DNA, 25 bp, probe
tctgtctttctgtccaaatatctac

SEQ ID NO: 93246 - DNA, 25 bp, probe
gtctgtctttctgtccaaatatcta

SEQ ID NO: 93247 - DNA, 25 bp, probe
gttgtatgagttccactgccagatt

SEQ ID NO: 93248 - DNA, 25 bp, probe
ggatacaggatacagtggtgagagg

SEQ ID NO: 93249 - DNA, 25 bp, probe
aattgtaacatctaaacctgccacg

SEQ ID NO: 93250 - DNA, 25 bp, probe
aggatgcttcaactattatttgtca

SEQ ID NO: 93251 - DNA, 25 bp, probe
tagaaagcaccctaattgacttgga

SEQ ID NO: 93252 - DNA, 25 bp, probe
tgttggatacaggatacagtggtga

SEQ ID NO: 93253 - DNA, 25 bp, probe
tgaaataggaaacagtcattggaat

SEQ ID NO: 93254 - DNA, 25 bp, probe
ttcaactattatttgtcaggtccaa

SEQ ID NO: 93255 - DNA, 25 bp, probe
gaaagcaccctaattgacttggaaa

SEQ ID NO: 93256 - DNA, 25 bp, probe
ttgttgaatgataatagaaagcacc

SEQ ID NO: 93257 - DNA, 25 bp, probe
gatgcttcaactattatttgtcagg

SEQ ID NO: 93258 - DNA, 25 bp, probe
ggatgcttcaactattatttgtcag

SEQ ID NO: 93259 - DNA, 25 bp, probe
aaggcttgttgtatgagttccactg

SEQ ID NO: 93260 - DNA, 25 bp, probe
ctgaaataggaaacagtcattggaa

SEQ ID NO: 93261 - DNA, 25 bp, probe
gaaataggaaacagtcattggaatg

SEQ ID NO: 93262 - DNA, 25 bp, probe
tgaatgataatagaaagcaccctaa

SEQ ID NO: 93263 - DNA, 25 bp, probe
ttgaatgataatagaaagcacccta

SEQ ID NO: 93264 - DNA, 25 bp, probe
gatttatgggatgcctggatcattc

SEQ ID NO: 93265 - DNA, 25 bp, probe
tgtatgagttccactgccagattta

SEQ ID NO: 93266 - DNA, 25 bp, probe
cagagagagagagagagagagagtg

SEQ ID NO: 93267 - DNA, 25 bp, probe
gtggataaccagtatcacttacaca

SEQ ID NO: 93268 - DNA, 25 bp, probe
tggataaccagtatcacttacacaa

SEQ ID NO: 93269 - DNA, 25 bp, probe
acttgatttggtttctgttgtgttt

SEQ ID NO: 93270 - DNA, 25 bp, probe
gacttgatttggtttctgttgtgtt

SEQ ID NO: 93271 - DNA, 25 bp, probe
gcagagagagagagagagagagagt

SEQ ID NO: 93272 - DNA, 25 bp, probe
tagtgacttgatttggtttctgttg

SEQ ID NO: 93273 - DNA, 25 bp, probe
ctgctttatagtgacttgatttggt

SEQ ID NO: 93274 - DNA, 25 bp, probe
gtgacttgatttggtttctgttgtg

SEQ ID NO: 93275 - DNA, 25 bp, probe
tgctttatagtgacttgatttggtt

SEQ ID NO: 93276 - DNA, 25 bp, probe
agtgacttgatttggtttctgttgt

SEQ ID NO: 93277 - DNA, 25 bp, probe
atagtgacttgatttggtttctgtt

SEQ ID NO: 93278 - DNA, 25 bp, probe
tgacttgatttggtttctgttgtgt

SEQ ID NO: 93279 - DNA, 25 bp, probe
gaaattattctgggtttaggtgtca

SEQ ID NO: 93280 - DNA, 25 bp, probe
tgaaattattctgggtttaggtgtc

SEQ ID NO: 93281 - DNA, 25 bp, probe
ctgaaattattctgggtttaggtgt

SEQ ID NO: 93282 - DNA, 25 bp, probe
gaacctttgctacaagaaattccag

SEQ ID NO: 93283 - DNA, 25 bp, probe
gaggaacctttgctacaagaaattc

SEQ ID NO: 93284 - DNA, 25 bp, probe
actgctttatagtgacttgatttgg

SEQ ID NO: 93285 - DNA, 25 bp, probe
tttgctacaagaaattccaggagaa

SEQ ID NO: 93286 - DNA, 25 bp, probe
aaccagtatcacttacacaaacaaa

SEQ ID NO: 93287 - DNA, 25 bp, probe
tgaggaacctttgctacaagaaatt

SEQ ID NO: 93288 - DNA, 25 bp, probe
ttgaggaacctttgctacaagaaat

SEQ ID NO: 93289 - DNA, 25 bp, probe
atttgaggaacctttgctacaagaa

SEQ ID NO: 93290 - DNA, 25 bp, probe
aatttgaggaacctttgctacaaga

SEQ ID NO: 93291 - DNA, 25 bp, probe
tctgaaattattctgggtttaggtg

SEQ ID NO: 93292 - DNA, 25 bp, probe
tttgaggaacctttgctacaagaaa

SEQ ID NO: 93293 - DNA, 25 bp, probe
ctttgctacaagaaattccaggaga

SEQ ID NO: 93294 - DNA, 25 bp, probe
ctctgaaattattctgggtttaggt

SEQ ID NO: 93295 - DNA, 25 bp, probe
acagttacccgtttcaatgttattt

SEQ ID NO: 93296 - DNA, 25 bp, probe
tatagtgacttgatttggtttctgt

SEQ ID NO: 93297 - DNA, 25 bp, probe
gctttatagtgacttgatttggttt

SEQ ID NO: 93298 - DNA, 25 bp, probe
ccaggagaatttatctactgagcaa

SEQ ID NO: 93299 - DNA, 25 bp, probe
ttccaggagaatttatctactgagc

SEQ ID NO: 93300 - DNA, 25 bp, probe
tccaggagaatttatctactgagca

SEQ ID NO: 93301 - DNA, 25 bp, probe
taaccagtatcacttacacaaacaa

SEQ ID NO: 93302 - DNA, 25 bp, probe
aattattctgggtttaggtgtcagc

SEQ ID NO: 93303 - DNA, 25 bp, probe
aaattattctgggtttaggtgtcag

SEQ ID NO: 93304 - DNA, 25 bp, probe
tacagttacccgtttcaatgttatt

SEQ ID NO: 93305 - DNA, 25 bp, probe
ataaccagtatcacttacacaaaca

SEQ ID NO: 93306 - DNA, 25 bp, probe
gtacagttacccgtttcaatgttat

SEQ ID NO: 93307 - DNA, 25 bp, probe
ggataaccagtatcacttacacaaa

SEQ ID NO: 93308 - DNA, 25 bp, probe
cctctgaaattattctgggtttagg

SEQ ID NO: 93309 - DNA, 25 bp, probe
ctacatcctgtttctccagaatgag

SEQ ID NO: 93310 - DNA, 25 bp, probe
atgtcctaattcttctgtcctgaga

SEQ ID NO: 93311 - DNA, 25 bp, probe
catgtcctaattcttctgtcctgag

SEQ ID NO: 93312 - DNA, 25 bp, probe
tgtcctgagaagcatgtaatgttaa

SEQ ID NO: 93313 - DNA, 25 bp, probe
cctgagaagcatgtaatgttaatgt

SEQ ID NO: 93314 - DNA, 25 bp, probe
ctgtcctgagaagcatgtaatgtta

SEQ ID NO: 93315 - DNA, 25 bp, probe
tcctgagaagcatgtaatgttaatg

SEQ ID NO: 93316 - DNA, 25 bp, probe
gtcctgagaagcatgtaatgttaat

SEQ ID NO: 93317 - DNA, 25 bp, probe
ctctcatctcaggtagaaggttgac

SEQ ID NO: 93318 - DNA, 25 bp, probe
acctcttacaattccattagctctg

SEQ ID NO: 93319 - DNA, 25 bp, probe
cacctcttacaattccattagctct

SEQ ID NO: 93320 - DNA, 25 bp, probe
aggtagaaggttgacacagttgtag

SEQ ID NO: 93321 - DNA, 25 bp, probe
caattccattagctctgttgtatcc

SEQ ID NO: 93322 - DNA, 25 bp, probe
ctcatctcaggtagaaggttgacac

SEQ ID NO: 93323 - DNA, 25 bp, probe
caggtagaaggttgacacagttgta

SEQ ID NO: 93324 - DNA, 25 bp, probe
tctgtcctgagaagcatgtaatgtt

SEQ ID NO: 93325 - DNA, 25 bp, probe
tctcatctcaggtagaaggttgaca

SEQ ID NO: 93326 - DNA, 25 bp, probe
tacacactgtcatgcttcatcattc

SEQ ID NO: 93327 - DNA, 25 bp, probe
ctacacactgtcatgcttcatcatt

SEQ ID NO: 93328 - DNA, 25 bp, probe
ctgagaagcatgtaatgttaatgtt

SEQ ID NO: 93329 - DNA, 25 bp, probe
cctcttacaattccattagctctgt

SEQ ID NO: 93330 - DNA, 25 bp, probe
agtgttgttgctctaggaagacatt

SEQ ID NO: 93331 - DNA, 25 bp, probe
gcacctcttacaattccattagctc

SEQ ID NO: 93332 - DNA, 25 bp, probe
atcagtgttgttgctctaggaagac

SEQ ID NO: 93333 - DNA, 25 bp, probe
gatcagtgttgttgctctaggaaga

SEQ ID NO: 93334 - DNA, 25 bp, probe
catctcaggtagaaggttgacacag

SEQ ID NO: 93335 - DNA, 25 bp, probe
catcctccagtaccttgcttcttac

SEQ ID NO: 93336 - DNA, 25 bp, probe
tcttacaattccattagctctgttg

SEQ ID NO: 93337 - DNA, 25 bp, probe
agaagagggtgtgtttgaaatcatc

SEQ ID NO: 93338 - DNA, 25 bp, probe
tcatcctccagtaccttgcttctta

SEQ ID NO: 93339 - DNA, 25 bp, probe
atctcaggtagaaggttgacacagt

SEQ ID NO: 93340 - DNA, 25 bp, probe
tcatctcaggtagaaggttgacaca

SEQ ID NO: 93341 - DNA, 25 bp, probe
ctcttacaattccattagctctgtt

SEQ ID NO: 93342 - DNA, 25 bp, probe
cagaagagggtgtgtttgaaatcat

SEQ ID NO: 93343 - DNA, 25 bp, probe
tgtcctaattcttctgtcctgagaa

SEQ ID NO: 93344 - DNA, 25 bp, probe
tcatcatttgtggcagtcccttata

SEQ ID NO: 93345 - DNA, 25 bp, probe
ggtagaaggttgacacagttgtagg

SEQ ID NO: 93346 - DNA, 25 bp, probe
ctcaggtagaaggttgacacagttg

SEQ ID NO: 93347 - DNA, 25 bp, probe
tctcaggtagaaggttgacacagtt

SEQ ID NO: 93348 - DNA, 25 bp, probe
ataaacagacaatatgtgagtgcct

SEQ ID NO: 93349 - DNA, 25 bp, probe
taaacagacaatatgtgagtgcctt

SEQ ID NO: 93350 - DNA, 25 bp, probe
cagtgttgttgctctaggaagacat

SEQ ID NO: 93351 - DNA, 25 bp, probe
atcatttgtggcagtcccttataat

SEQ ID NO: 93352 - DNA, 25 bp, probe
catttgtggcagtcccttataattg

SEQ ID NO: 93353 - DNA, 25 bp, probe
tcatttgtggcagtcccttataatt

SEQ ID NO: 93354 - DNA, 25 bp, probe
gaacatctactcagcagactactac

SEQ ID NO: 93355 - DNA, 25 bp, probe
acatctactcagcagactactacaa

SEQ ID NO: 93356 - DNA, 25 bp, probe
aacatctactcagcagactactaca

SEQ ID NO: 93357 - DNA, 25 bp, probe
ggaacatctactcagcagactacta

SEQ ID NO: 93358 - DNA, 25 bp, probe
gaactgtgagtgtctaaggttgaag

SEQ ID NO: 93359 - DNA, 25 bp, probe
aactgtgagtgtctaaggttgaaga

SEQ ID NO: 93360 - DNA, 25 bp, probe
aggaacatctactcagcagactact

SEQ ID NO: 93361 - DNA, 25 bp, probe
caggaacatctactcagcagactac

SEQ ID NO: 93362 - DNA, 25 bp, probe
ttataaccgctacactacagagtct

SEQ ID NO: 93363 - DNA, 25 bp, probe
cgtaagtttgttcaccgagatttag

SEQ ID NO: 93364 - DNA, 25 bp, probe
ggaactgtgagtgtctaaggttgaa

SEQ ID NO: 93365 - DNA, 25 bp, probe
gtaagtttgttcaccgagatttagc

SEQ ID NO: 93366 - DNA, 25 bp, probe
tataaccgctacactacagagtctg

SEQ ID NO: 93367 - DNA, 25 bp, probe
catctactcagcagactactacaaa

SEQ ID NO: 93368 - DNA, 25 bp, probe
tacaatctcatgcgtctatgttgga

SEQ ID NO: 93369 - DNA, 25 bp, probe
gtacaatctcatgcgtctatgttgg

SEQ ID NO: 93370 - DNA, 25 bp, probe
atctactcagcagactactacaaag

SEQ ID NO: 93371 - DNA, 25 bp, probe
taagtttgttcaccgagatttagcc

SEQ ID NO: 93372 - DNA, 25 bp, probe
ccaggaacatctactcagcagacta

SEQ ID NO: 93373 - DNA, 25 bp, probe
tctactcagcagactactacaaagc

SEQ ID NO: 93374 - DNA, 25 bp, probe
taaccgctacactacagagtctgat

SEQ ID NO: 93375 - DNA, 25 bp, probe
ataaccgctacactacagagtctga

SEQ ID NO: 93376 - DNA, 25 bp, probe
tttataaccgctacactacagagtc

SEQ ID NO: 93377 - DNA, 25 bp, probe
gcagactactacaaagctaatgaaa

SEQ ID NO: 93378 - DNA, 25 bp, probe
acaatctcatgcgtctatgttggag

SEQ ID NO: 93379 - DNA, 25 bp, probe
acgtaagtttgttcaccgagattta

SEQ ID NO: 93380 - DNA, 25 bp, probe
aagtttgttcaccgagatttagcca

SEQ ID NO: 93381 - DNA, 25 bp, probe
ctctccaggaacatctactcagcag

SEQ ID NO: 93382 - DNA, 25 bp, probe
cagtttcaccagtattcaccgaatt

SEQ ID NO: 93383 - DNA, 25 bp, probe
gacagacccagtttcaccagtattc

SEQ ID NO: 93384 - DNA, 25 bp, probe
cagacccagtttcaccagtattcac

SEQ ID NO: 93385 - DNA, 25 bp, probe
aacgtaagtttgttcaccgagattt

SEQ ID NO: 93386 - DNA, 25 bp, probe
agacagacccagtttcaccagtatt

SEQ ID NO: 93387 - DNA, 25 bp, probe
ctccaggaacatctactcagcagac

SEQ ID NO: 93388 - DNA, 25 bp, probe
ctgtacaatctcatgcgtctatgtt

SEQ ID NO: 93389 - DNA, 25 bp, probe
taatgaaaacgacgctatccctatc

SEQ ID NO: 93390 - DNA, 25 bp, probe
ctaatgaaaacgacgctatccctat

SEQ ID NO: 93391 - DNA, 25 bp, probe
tgtacaatctcatgcgtctatgttg

SEQ ID NO: 93392 - DNA, 25 bp, probe
tctccaggaacatctactcagcaga

SEQ ID NO: 93393 - DNA, 25 bp, probe
acagacccagtttcaccagtattca

SEQ ID NO: 93394 - DNA, 25 bp, probe
agtttgttcaccgagatttagccac

SEQ ID NO: 93395 - DNA, 25 bp, probe
ttacctctcagaacgtaagtttgtt

SEQ ID NO: 93396 - DNA, 25 bp, probe
aaccgctacactacagagtctgatg

SEQ ID NO: 93397 - DNA, 25 bp, probe
caatctcatgcgtctatgttggagc

SEQ ID NO: 93398 - DNA, 25 bp, probe
cctgaagactccacatactattatc

SEQ ID NO: 93399 - DNA, 25 bp, probe
accataagccaattaatagacgagt

SEQ ID NO: 93400 - DNA, 25 bp, probe
caccataagccaattaatagacgag

SEQ ID NO: 93401 - DNA, 25 bp, probe
ccataagccaattaatagacgagtt

SEQ ID NO: 93402 - DNA, 25 bp, probe
ctcgcaccataagccaattaataga

SEQ ID NO: 93403 - DNA, 25 bp, probe
tctcgcaccataagccaattaatag

SEQ ID NO: 93404 - DNA, 25 bp, probe
gcaccataagccaattaatagacga

SEQ ID NO: 93405 - DNA, 25 bp, probe
tcgcaccataagccaattaatagac

SEQ ID NO: 93406 - DNA, 25 bp, probe
gtctcgcaccataagccaattaata

SEQ ID NO: 93407 - DNA, 25 bp, probe
accctgaagactccacatactatta

SEQ ID NO: 93408 - DNA, 25 bp, probe
taaccctgaagactccacatactat

SEQ ID NO: 93409 - DNA, 25 bp, probe
ataaccctgaagactccacatacta

SEQ ID NO: 93410 - DNA, 25 bp, probe
aaataaccctgaagactccacatac

SEQ ID NO: 93411 - DNA, 25 bp, probe
ttaaataaccctgaagactccacat

SEQ ID NO: 93412 - DNA, 25 bp, probe
attaaataaccctgaagactccaca

SEQ ID NO: 93413 - DNA, 25 bp, probe
acattaaataaccctgaagactcca

SEQ ID NO: 93414 - DNA, 25 bp, probe
cattaaataaccctgaagactccac

SEQ ID NO: 93415 - DNA, 25 bp, probe
ccctgaagactccacatactattat

SEQ ID NO: 93416 - DNA, 25 bp, probe
aaccctgaagactccacatactatt

SEQ ID NO: 93417 - DNA, 25 bp, probe
aataaccctgaagactccacatact

SEQ ID NO: 93418 - DNA, 25 bp, probe
taaataaccctgaagactccacata

SEQ ID NO: 93419 - DNA, 25 bp, probe
ctgaagactccacatactattatct

SEQ ID NO: 93420 - DNA, 25 bp, probe
aacattaaataaccctgaagactcc

SEQ ID NO: 93421 - DNA, 25 bp, probe
cgcaccataagccaattaatagacg

SEQ ID NO: 93422 - DNA, 25 bp, probe
taatagacgagtttcttctcagcag

SEQ ID NO: 93423 - DNA, 25 bp, probe
ttaatagacgagtttcttctcagca

SEQ ID NO: 93424 - DNA, 25 bp, probe
tgtctcgcaccataagccaattaat

SEQ ID NO: 93425 - DNA, 25 bp, probe
aatagacgagtttcttctcagcagt

SEQ ID NO: 93426 - DNA, 25 bp, probe
actccacatactattatctacttca

SEQ ID NO: 93427 - DNA, 25 bp, probe
gccaattaatagacgagtttcttct

SEQ ID NO: 93428 - DNA, 25 bp, probe
agccaattaatagacgagtttcttc

SEQ ID NO: 93429 - DNA, 25 bp, probe
aagccaattaatagacgagtttctt

SEQ ID NO: 93430 - DNA, 25 bp, probe
acagcaactgaagtcactttatctg

SEQ ID NO: 93431 - DNA, 25 bp, probe
cacagcaactgaagtcactttatct

SEQ ID NO: 93432 - DNA, 25 bp, probe
aaacattaaataaccctgaagactc

SEQ ID NO: 93433 - DNA, 25 bp, probe
tcacagcaactgaagtcactttatc

SEQ ID NO: 93434 - DNA, 25 bp, probe
atagacgagtttcttctcagcagtg

SEQ ID NO: 93435 - DNA, 25 bp, probe
gtcacagcaactgaagtcactttat

SEQ ID NO: 93436 - DNA, 25 bp, probe
attaatagacgagtttcttctcagc

SEQ ID NO: 93437 - DNA, 25 bp, probe
caactgaagtcactttatctgggtg

SEQ ID NO: 93438 - DNA, 25 bp, probe
gactccacatactattatctacttc

SEQ ID NO: 93439 - DNA, 25 bp, probe
cagcaactgaagtcactttatctgg

SEQ ID NO: 93440 - DNA, 25 bp, probe
taagccaattaatagacgagtttct

SEQ ID NO: 93441 - DNA, 25 bp, probe
agactccacatactattatctactt

SEQ ID NO: 93442 - DNA, 25 bp, probe
cgctttctatacttaatcccatgtc

SEQ ID NO: 93443 - DNA, 25 bp, probe
ctatacttaatcccatgtcatgcga

SEQ ID NO: 93444 - DNA, 25 bp, probe
tctatacttaatcccatgtcatgcg

SEQ ID NO: 93445 - DNA, 25 bp, probe
gctttctatacttaatcccatgtca

SEQ ID NO: 93446 - DNA, 25 bp, probe
ttctatacttaatcccatgtcatgc

SEQ ID NO: 93447 - DNA, 25 bp, probe
tatacttaatcccatgtcatgcgac

SEQ ID NO: 93448 - DNA, 25 bp, probe
ggtattgcatattccatttacggtt

SEQ ID NO: 93449 - DNA, 25 bp, probe
aggtattgcatattccatttacggt

SEQ ID NO: 93450 - DNA, 25 bp, probe
taggtattgcatattccatttacgg

SEQ ID NO: 93451 - DNA, 25 bp, probe
tattgcatattccatttacggtttg

SEQ ID NO: 93452 - DNA, 25 bp, probe
gtattgcatattccatttacggttt

SEQ ID NO: 93453 - DNA, 25 bp, probe
gaggactgtttgagttcaggagttt

SEQ ID NO: 93454 - DNA, 25 bp, probe
tttgagttcaggagttttaagacca

SEQ ID NO: 93455 - DNA, 25 bp, probe
gtttgagttcaggagttttaagacc

SEQ ID NO: 93456 - DNA, 25 bp, probe
ttgagttcaggagttttaagaccag

SEQ ID NO: 93457 - DNA, 25 bp, probe
tgtttgagttcaggagttttaagac

SEQ ID NO: 93458 - DNA, 25 bp, probe
ctaggtattgcatattccatttacg

SEQ ID NO: 93459 - DNA, 25 bp, probe
gtatgtagcaaaaccagaatccctc

SEQ ID NO: 93460 - DNA, 25 bp, probe
attgcatattccatttacggtttgg

SEQ ID NO: 93461 - DNA, 25 bp, probe
tatgtagcaaaaccagaatccctca

SEQ ID NO: 93462 - DNA, 25 bp, probe
atacttaatcccatgtcatgcgacc

SEQ ID NO: 93463 - DNA, 25 bp, probe
gtgaaaccccatctctactaaaata

SEQ ID NO: 93464 - DNA, 25 bp, probe
actgtttgagttcaggagttttaag

SEQ ID NO: 93465 - DNA, 25 bp, probe
gactgtttgagttcaggagttttaa

SEQ ID NO: 93466 - DNA, 25 bp, probe
ctgtttgagttcaggagttttaaga

SEQ ID NO: 93467 - DNA, 25 bp, probe
ggactgtttgagttcaggagtttta

SEQ ID NO: 93468 - DNA, 25 bp, probe
tttctatacttaatcccatgtcatg

SEQ ID NO: 93469 - DNA, 25 bp, probe
ttgcatattccatttacggtttggg

SEQ ID NO: 93470 - DNA, 25 bp, probe
gagcacctgtaatgtcagctacttg

SEQ ID NO: 93471 - DNA, 25 bp, probe
ggtgaaaccccatctctactaaaat

SEQ ID NO: 93472 - DNA, 25 bp, probe
ctttctatacttaatcccatgtcat

SEQ ID NO: 93473 - DNA, 25 bp, probe
tgagttcaggagttttaagaccagc

SEQ ID NO: 93474 - DNA, 25 bp, probe
atgtagcaaaaccagaatccctcag

SEQ ID NO: 93475 - DNA, 25 bp, probe
cgtatgtagcaaaaccagaatccct

SEQ ID NO: 93476 - DNA, 25 bp, probe
gcgctttctatacttaatcccatgt

SEQ ID NO: 93477 - DNA, 25 bp, probe
tgaaaccccatctctactaaaatat

SEQ ID NO: 93478 - DNA, 25 bp, probe
aggactgtttgagttcaggagtttt

SEQ ID NO: 93479 - DNA, 25 bp, probe
tgcatattccatttacggtttggga

SEQ ID NO: 93480 - DNA, 25 bp, probe
ggcgctttctatacttaatcccatg

SEQ ID NO: 93481 - DNA, 25 bp, probe
aggcgctttctatacttaatcccat

SEQ ID NO: 93482 - DNA, 25 bp, probe
ggaggactgtttgagttcaggagtt

SEQ ID NO: 93483 - DNA, 25 bp, probe
gagttcaggagttttaagaccagcc

SEQ ID NO: 93484 - DNA, 25 bp, probe
ccctaggtattgcatattccattta

SEQ ID NO: 93485 - DNA, 25 bp, probe
acctgtaatgtcagctacttgggag

SEQ ID NO: 93486 - DNA, 25 bp, probe
ttatttaagctgttcattctggcaa

SEQ ID NO: 93487 - DNA, 25 bp, probe
tttatttaagctgttcattctggca

SEQ ID NO: 93488 - DNA, 25 bp, probe
tatttaagctgttcattctggcaat

SEQ ID NO: 93489 - DNA, 25 bp, probe
atttatttaagctgttcattctggc

SEQ ID NO: 93490 - DNA, 25 bp, probe
actgtctggtatttaaactgaaaca

SEQ ID NO: 93491 - DNA, 25 bp, probe
taatgcaaagaaaggtaaatggttt

SEQ ID NO: 93492 - DNA, 25 bp, probe
ataatgcaaagaaaggtaaatggtt

SEQ ID NO: 93493 - DNA, 25 bp, probe
atttaagctgttcattctggcaatg

SEQ ID NO: 93494 - DNA, 25 bp, probe
gccaggcccgttataaatgtatatt

SEQ ID NO: 93495 - DNA, 25 bp, probe
ctgtctggtatttaaactgaaacat

SEQ ID NO: 93496 - DNA, 25 bp, probe
tactgtctggtatttaaactgaaac

SEQ ID NO: 93497 - DNA, 25 bp, probe
ccaggcccgttataaatgtatatta

SEQ ID NO: 93498 - DNA, 25 bp, probe
agccaggcccgttataaatgtatat

SEQ ID NO: 93499 - DNA, 25 bp, probe
tctggtatttaaactgaaacatacg

SEQ ID NO: 93500 - DNA, 25 bp, probe
ctggtatttaaactgaaacatacgt

SEQ ID NO: 93501 - DNA, 25 bp, probe
tataatgcaaagaaaggtaaatggt

SEQ ID NO: 93502 - DNA, 25 bp, probe
aacatacgtttctaagcaatacgag

SEQ ID NO: 93503 - DNA, 25 bp, probe
aaacatacgtttctaagcaatacga

SEQ ID NO: 93504 - DNA, 25 bp, probe
acatacgtttctaagcaatacgagg

SEQ ID NO: 93505 - DNA, 25 bp, probe
cagccaggcccgttataaatgtata

SEQ ID NO: 93506 - DNA, 25 bp, probe
tggtatttaaactgaaacatacgtt

SEQ ID NO: 93507 - DNA, 25 bp, probe
attctggcaatgatttggcaacagt

SEQ ID NO: 93508 - DNA, 25 bp, probe
ttactgtctggtatttaaactgaaa

SEQ ID NO: 93509 - DNA, 25 bp, probe
aatgcaaagaaaggtaaatggtttt

SEQ ID NO: 93510 - DNA, 25 bp, probe
tttactgtctggtatttaaactgaa

SEQ ID NO: 93511 - DNA, 25 bp, probe
tgtctggtatttaaactgaaacata

SEQ ID NO: 93512 - DNA, 25 bp, probe
cattctggcaatgatttggcaacag

SEQ ID NO: 93513 - DNA, 25 bp, probe
catacgtttctaagcaatacgaggc

SEQ ID NO: 93514 - DNA, 25 bp, probe
taagctgttcattctggcaatgatt

SEQ ID NO: 93515 - DNA, 25 bp, probe
ttaagctgttcattctggcaatgat

SEQ ID NO: 93516 - DNA, 25 bp, probe
gtctggtatttaaactgaaacatac

SEQ ID NO: 93517 - DNA, 25 bp, probe
tatttatttaagctgttcattctgg

SEQ ID NO: 93518 - DNA, 25 bp, probe
atgcaaagaaaggtaaatggtttta

SEQ ID NO: 93519 - DNA, 25 bp, probe
atataatgcaaagaaaggtaaatgg

SEQ ID NO: 93520 - DNA, 25 bp, probe
caggcccgttataaatgtatattat

SEQ ID NO: 93521 - DNA, 25 bp, probe
ttctggcaatgatttggcaacagtg

SEQ ID NO: 93522 - DNA, 25 bp, probe
ggtatttaaactgaaacatacgttt

SEQ ID NO: 93523 - DNA, 25 bp, probe
ttctaagcaatacgaggccaccttc

SEQ ID NO: 93524 - DNA, 25 bp, probe
agaaaggtaaatggttttactggga

SEQ ID NO: 93525 - DNA, 25 bp, probe
tttaagctgttcattctggcaatga

SEQ ID NO: 93526 - DNA, 25 bp, probe
aagaaaggtaaatggttttactggg

SEQ ID NO: 93527 - DNA, 25 bp, probe
gaaaggtaaatggttttactgggat

SEQ ID NO: 93528 - DNA, 25 bp, probe
atacgtttctaagcaatacgaggcc

SEQ ID NO: 93529 - DNA, 25 bp, probe
ttttactgtctggtatttaaactga

SEQ ID NO: 93530 - DNA, 25 bp, probe
caaagagacggttaaatggtatcag

SEQ ID NO: 93531 - DNA, 25 bp, probe
aaagagacggttaaatggtatcagc

SEQ ID NO: 93532 - DNA, 25 bp, probe
agcaaagagacggttaaatggtatc

SEQ ID NO: 93533 - DNA, 25 bp, probe
gagcaaagagacggttaaatggtat

SEQ ID NO: 93534 - DNA, 25 bp, probe
gcaaagagacggttaaatggtatca

SEQ ID NO: 93535 - DNA, 25 bp, probe
tgagcaaagagacggttaaatggta

SEQ ID NO: 93536 - DNA, 25 bp, probe
cttgagcaaagagacggttaaatgg

SEQ ID NO: 93537 - DNA, 25 bp, probe
ttgagcaaagagacggttaaatggt

SEQ ID NO: 93538 - DNA, 25 bp, probe
aagagacggttaaatggtatcagct

SEQ ID NO: 93539 - DNA, 25 bp, probe
atagtctttgtgtgcttgctaaatg

SEQ ID NO: 93540 - DNA, 25 bp, probe
catagtctttgtgtgcttgctaaat

SEQ ID NO: 93541 - DNA, 25 bp, probe
tagttcctacccatagtctttgtgt

SEQ ID NO: 93542 - DNA, 25 bp, probe
tagtctttgtgtgcttgctaaatgg

SEQ ID NO: 93543 - DNA, 25 bp, probe
ccatagtctttgtgtgcttgctaaa

SEQ ID NO: 93544 - DNA, 25 bp, probe
agttcctacccatagtctttgtgtg

SEQ ID NO: 93545 - DNA, 25 bp, probe
ctttgtgtgcttgctaaatggtgta

SEQ ID NO: 93546 - DNA, 25 bp, probe
acacactttgtctagctcactttaa

SEQ ID NO: 93547 - DNA, 25 bp, probe
cacactttgtctagctcactttaaa

SEQ ID NO: 93548 - DNA, 25 bp, probe
tttgtgtgcttgctaaatggtgtac

SEQ ID NO: 93549 - DNA, 25 bp, probe
cacacactttgtctagctcacttta

SEQ ID NO: 93550 - DNA, 25 bp, probe
agtagttcctacccatagtctttgt

SEQ ID NO: 93551 - DNA, 25 bp, probe
cagtagttcctacccatagtctttg

SEQ ID NO: 93552 - DNA, 25 bp, probe
tcagtagttcctacccatagtcttt

SEQ ID NO: 93553 - DNA, 25 bp, probe
atcagtagttcctacccatagtctt

SEQ ID NO: 93554 - DNA, 25 bp, probe
cccatagtctttgtgtgcttgctaa

SEQ ID NO: 93555 - DNA, 25 bp, probe
gtagttcctacccatagtctttgtg

SEQ ID NO: 93556 - DNA, 25 bp, probe
agatcagtctggtcaacatggtgaa

SEQ ID NO: 93557 - DNA, 25 bp, probe
gatcagtagttcctacccatagtct

SEQ ID NO: 93558 - DNA, 25 bp, probe
gtctttgtgtgcttgctaaatggtg

SEQ ID NO: 93559 - DNA, 25 bp, probe
agtctttgtgtgcttgctaaatggt

SEQ ID NO: 93560 - DNA, 25 bp, probe
cctacccatagtctttgtgtgcttg

SEQ ID NO: 93561 - DNA, 25 bp, probe
gttcctacccatagtctttgtgtgc

SEQ ID NO: 93562 - DNA, 25 bp, probe
gttcgagatcagtctggtcaacatg

SEQ ID NO: 93563 - DNA, 25 bp, probe
agttcgagatcagtctggtcaacat

SEQ ID NO: 93564 - DNA, 25 bp, probe
tcctacccatagtctttgtgtgctt

SEQ ID NO: 93565 - DNA, 25 bp, probe
ttcctacccatagtctttgtgtgct

SEQ ID NO: 93566 - DNA, 25 bp, probe
ggatcagtagttcctacccatagtc

SEQ ID NO: 93567 - DNA, 25 bp, probe
tctttgtgtgcttgctaaatggtgt

SEQ ID NO: 93568 - DNA, 25 bp, probe
gagatcagtctggtcaacatggtga

SEQ ID NO: 93569 - DNA, 25 bp, probe
gatcagtctggtcaacatggtgaaa

SEQ ID NO: 93570 - DNA, 25 bp, probe
ctacccatagtctttgtgtgcttgc

SEQ ID NO: 93571 - DNA, 25 bp, probe
acacacactttgtctagctcacttt

SEQ ID NO: 93572 - DNA, 25 bp, probe
atcagtctggtcaacatggtgaaac

SEQ ID NO: 93573 - DNA, 25 bp, probe
gagttcgagatcagtctggtcaaca

SEQ ID NO: 93574 - DNA, 25 bp, probe
tacacacacactttgtctagctcac

SEQ ID NO: 93575 - DNA, 25 bp, probe
gtacacacacactttgtctagctca

SEQ ID NO: 93576 - DNA, 25 bp, probe
acccatagtctttgtgtgcttgcta

SEQ ID NO: 93577 - DNA, 25 bp, probe
tacccatagtctttgtgtgcttgct

SEQ ID NO: 93578 - DNA, 25 bp, probe
agggatcagtagttcctacccatag

SEQ ID NO: 93579 - DNA, 25 bp, probe
gggatcagtagttcctacccatagt

SEQ ID NO: 93580 - DNA, 25 bp, probe
cagggatcagtagttcctacccata

SEQ ID NO: 93581 - DNA, 25 bp, probe
ttcgagatcagtctggtcaacatgg

SEQ ID NO: 93582 - DNA, 25 bp, probe
cacacacactttgtctagctcactt

SEQ ID NO: 93583 - DNA, 25 bp, probe
gctggtagtatggattatgagatgg

SEQ ID NO: 93584 - DNA, 25 bp, probe
tgctggtagtatggattatgagatg

SEQ ID NO: 93585 - DNA, 25 bp, probe
tgatgctggtagtatggattatgag

SEQ ID NO: 93586 - DNA, 25 bp, probe
gatgctggtagtatggattatgaga

SEQ ID NO: 93587 - DNA, 25 bp, probe
ttgatgctggtagtatggattatga

SEQ ID NO: 93588 - DNA, 25 bp, probe
tggtagtatggattatgagatggac

SEQ ID NO: 93589 - DNA, 25 bp, probe
ctggtagtatggattatgagatgga

SEQ ID NO: 93590 - DNA, 25 bp, probe
atgctggtagtatggattatgagat

SEQ ID NO: 93591 - DNA, 25 bp, probe
gtatggattatgagatggactagcc

SEQ ID NO: 93592 - DNA, 25 bp, probe
ggtagtatggattatgagatggact

SEQ ID NO: 93593 - DNA, 25 bp, probe
agtatggattatgagatggactagc

SEQ ID NO: 93594 - DNA, 25 bp, probe
acatttgatgctggtagtatggatt

SEQ ID NO: 93595 - DNA, 25 bp, probe
gacatttgatgctggtagtatggat

SEQ ID NO: 93596 - DNA, 25 bp, probe
tttgatgctggtagtatggattatg

SEQ ID NO: 93597 - DNA, 25 bp, probe
tatggattatgagatggactagccc

SEQ ID NO: 93598 - DNA, 25 bp, probe
catttgatgctggtagtatggatta

SEQ ID NO: 93599 - DNA, 25 bp, probe
actacattctcaaacaagaggactt

SEQ ID NO: 93600 - DNA, 25 bp, probe
ctatacatcatatgcagaggaagct

SEQ ID NO: 93601 - DNA, 25 bp, probe
cactacattctcaaacaagaggact

SEQ ID NO: 93602 - DNA, 25 bp, probe
ccactacattctcaaacaagaggac

SEQ ID NO: 93603 - DNA, 25 bp, probe
atttgatgctggtagtatggattat

SEQ ID NO: 93604 - DNA, 25 bp, probe
ggacatttgatgctggtagtatgga

SEQ ID NO: 93605 - DNA, 25 bp, probe
cccactacattctcaaacaagagga

SEQ ID NO: 93606 - DNA, 25 bp, probe
tctgcccactacattctcaaacaag

SEQ ID NO: 93607 - DNA, 25 bp, probe
ctgcccactacattctcaaacaaga

SEQ ID NO: 93608 - DNA, 25 bp, probe
gtagtatggattatgagatggacta

SEQ ID NO: 93609 - DNA, 25 bp, probe
gtctgcccactacattctcaaacaa

SEQ ID NO: 93610 - DNA, 25 bp, probe
ccctcccctattacatacatctttc

SEQ ID NO: 93611 - DNA, 25 bp, probe
taccctcccctattacatacatctt

SEQ ID NO: 93612 - DNA, 25 bp, probe
ctaccctcccctattacatacatct

SEQ ID NO: 93613 - DNA, 25 bp, probe
tctaccctcccctattacatacatc

SEQ ID NO: 93614 - DNA, 25 bp, probe
ttctaccctcccctattacatacat

SEQ ID NO: 93615 - DNA, 25 bp, probe
cttctaccctcccctattacataca

SEQ ID NO: 93616 - DNA, 25 bp, probe
ctagtctgcccactacattctcaaa

SEQ ID NO: 93617 - DNA, 25 bp, probe
accctcccctattacatacatcttt

SEQ ID NO: 93618 - DNA, 25 bp, probe
tgcccactacattctcaaacaagag

SEQ ID NO: 93619 - DNA, 25 bp, probe
tatacatcatatgcagaggaagctt

SEQ ID NO: 93620 - DNA, 25 bp, probe
cctcccctattacatacatctttca

SEQ ID NO: 93621 - DNA, 25 bp, probe
tagtatggattatgagatggactag

SEQ ID NO: 93622 - DNA, 25 bp, probe
tagtctgcccactacattctcaaac

SEQ ID NO: 93623 - DNA, 25 bp, probe
gatctagtctgcccactacattctc

SEQ ID NO: 93624 - DNA, 25 bp, probe
gcttctaccctcccctattacatac

SEQ ID NO: 93625 - DNA, 25 bp, probe
atctagtctgcccactacattctca

SEQ ID NO: 93626 - DNA, 25 bp, probe
tgcttctaccctcccctattacata

SEQ ID NO: 93627 - DNA, 25 bp, probe
aagatatgttgtatgagtcgtcgtt

SEQ ID NO: 93628 - DNA, 25 bp, probe
agcacaactatattcttatgaagga

SEQ ID NO: 93629 - DNA, 25 bp, probe
gagcacaactatattcttatgaagg

SEQ ID NO: 93630 - DNA, 25 bp, probe
gatatgttgtatgagtcgtcgtttc

SEQ ID NO: 93631 - DNA, 25 bp, probe
tggtaaactgaagagcacaactata

SEQ ID NO: 93632 - DNA, 25 bp, probe
caaacaatccctttcataccacaaa

SEQ ID NO: 93633 - DNA, 25 bp, probe
atatgttgtatgagtcgtcgtttct

SEQ ID NO: 93634 - DNA, 25 bp, probe
agatatgttgtatgagtcgtcgttt

SEQ ID NO: 93635 - DNA, 25 bp, probe
aaagatatgttgtatgagtcgtcgt

SEQ ID NO: 93636 - DNA, 25 bp, probe
ccgtagttatgctaaatgatgtgga

SEQ ID NO: 93637 - DNA, 25 bp, probe
tccgtagttatgctaaatgatgtgg

SEQ ID NO: 93638 - DNA, 25 bp, probe
ctggtaaactgaagagcacaactat

SEQ ID NO: 93639 - DNA, 25 bp, probe
cgtagttatgctaaatgatgtggat

SEQ ID NO: 93640 - DNA, 25 bp, probe
tatgttgtatgagtcgtcgtttctg

SEQ ID NO: 93641 - DNA, 25 bp, probe
atccgtagttatgctaaatgatgtg

SEQ ID NO: 93642 - DNA, 25 bp, probe
gctttccaggactaacagataaatg

SEQ ID NO: 93643 - DNA, 25 bp, probe
attatcactgcacatccgtagttat

SEQ ID NO: 93644 - DNA, 25 bp, probe
cacatccgtagttatgctaaatgat

SEQ ID NO: 93645 - DNA, 25 bp, probe
caaagatatgttgtatgagtcgtcg

SEQ ID NO: 93646 - DNA, 25 bp, probe
gtcagatttgtattgtttccaaggg

SEQ ID NO: 93647 - DNA, 25 bp, probe
tgtcagatttgtattgtttccaagg

SEQ ID NO: 93648 - DNA, 25 bp, probe
gattatcactgcacatccgtagtta

SEQ ID NO: 93649 - DNA, 25 bp, probe
ggtaaactgaagagcacaactatat

SEQ ID NO: 93650 - DNA, 25 bp, probe
ttatcactgcacatccgtagttatg

SEQ ID NO: 93651 - DNA, 25 bp, probe
gcacaactatattcttatgaaggaa

SEQ ID NO: 93652 - DNA, 25 bp, probe
agatgaagacttctcaatatgctta

SEQ ID NO: 93653 - DNA, 25 bp, probe
ctgtcagatttgtattgtttccaag

SEQ ID NO: 93654 - DNA, 25 bp, probe
ttccaggactaacagataaatgtgt

SEQ ID NO: 93655 - DNA, 25 bp, probe
aaactgaagagcacaactatattct

SEQ ID NO: 93656 - DNA, 25 bp, probe
gtcgtttctgtcagatttgtattgt

SEQ ID NO: 93657 - DNA, 25 bp, probe
cctggatcagtacaagttctgctac

SEQ ID NO: 93658 - DNA, 25 bp, probe
gcaaacaatccctttcataccacaa

SEQ ID NO: 93659 - DNA, 25 bp, probe
tccaggactaacagataaatgtgta

SEQ ID NO: 93660 - DNA, 25 bp, probe
tcgtttctgtcagatttgtattgtt

SEQ ID NO: 93661 - DNA, 25 bp, probe
cgtcgtttctgtcagatttgtattg

SEQ ID NO: 93662 - DNA, 25 bp, probe
tcgtcgtttctgtcagatttgtatt

SEQ ID NO: 93663 - DNA, 25 bp, probe
gatcagtacaagttctgctacgagg

SEQ ID NO: 93664 - DNA, 25 bp, probe
ggatcagtacaagttctgctacgag

SEQ ID NO: 93665 - DNA, 25 bp, probe
tcctggatcagtacaagttctgcta

SEQ ID NO: 93666 - DNA, 25 bp, probe
tttccaggactaacagataaatgtg

SEQ ID NO: 93667 - DNA, 25 bp, probe
aactgaagagcacaactatattctt

SEQ ID NO: 93668 - DNA, 25 bp, probe
aatacttgaattctggctgatggtg

SEQ ID NO: 93669 - DNA, 25 bp, probe
tgaagcacagtgagtgacaatcatt

SEQ ID NO: 93670 - DNA, 25 bp, probe
agagcacaactatattcttatgaag

SEQ ID NO: 93671 - DNA, 25 bp, probe
tacttcagaaaccaaatcagtcttc

SEQ ID NO: 93672 - DNA, 25 bp, probe
ttacttcagaaaccaaatcagtctt

SEQ ID NO: 93673 - DNA, 25 bp, probe
tttacttcagaaaccaaatcagtct

SEQ ID NO: 93674 - DNA, 25 bp, probe
ccaaatcagtcttctataatctggg

SEQ ID NO: 93675 - DNA, 25 bp, probe
acttcagaaaccaaatcagtcttct

SEQ ID NO: 93676 - DNA, 25 bp, probe
accaaatcagtcttctataatctgg

SEQ ID NO: 93677 - DNA, 25 bp, probe
gaaggaatttgggtctggagttctg

SEQ ID NO: 93678 - DNA, 25 bp, probe
acaagttggaggtctaagtgacgag

SEQ ID NO: 93679 - DNA, 25 bp, probe
cttcagaaaccaaatcagtcttcta

SEQ ID NO: 93680 - DNA, 25 bp, probe
gccttgattttacttcagaaaccaa

SEQ ID NO: 93681 - DNA, 25 bp, probe
ttcagaaaccaaatcagtcttctat

SEQ ID NO: 93682 - DNA, 25 bp, probe
cacaagttggaggtctaagtgacga

SEQ ID NO: 93683 - DNA, 25 bp, probe
tgccttgattttacttcagaaacca

SEQ ID NO: 93684 - DNA, 25 bp, probe
atcctgccttgattttacttcagaa

SEQ ID NO: 93685 - DNA, 25 bp, probe
ctgccttgattttacttcagaaacc

SEQ ID NO: 93686 - DNA, 25 bp, probe
cctgccttgattttacttcagaaac

SEQ ID NO: 93687 - DNA, 25 bp, probe
tcctgccttgattttacttcagaaa

SEQ ID NO: 93688 - DNA, 25 bp, probe
aggagagggatgatagcttggattc

SEQ ID NO: 93689 - DNA, 25 bp, probe
gaggagagggatgatagcttggatt

SEQ ID NO: 93690 - DNA, 25 bp, probe
aatcagtcttctataatctggggtc

SEQ ID NO: 93691 - DNA, 25 bp, probe
aaccaaatcagtcttctataatctg

SEQ ID NO: 93692 - DNA, 25 bp, probe
aaatcagtcttctataatctggggt

SEQ ID NO: 93693 - DNA, 25 bp, probe
ccttgattttacttcagaaaccaaa

SEQ ID NO: 93694 - DNA, 25 bp, probe
atcagtcttctataatctggggtcg

SEQ ID NO: 93695 - DNA, 25 bp, probe
ctggattctgaggcaggaaggaatt

SEQ ID NO: 93696 - DNA, 25 bp, probe
caagttggaggtctaagtgacgagg

SEQ ID NO: 93697 - DNA, 25 bp, probe
tttattaaatcactgttctccccag

SEQ ID NO: 93698 - DNA, 25 bp, probe
caaatcagtcttctataatctgggg

SEQ ID NO: 93699 - DNA, 25 bp, probe
aaaccaaatcagtcttctataatct

SEQ ID NO: 93700 - DNA, 25 bp, probe
tcagaaaccaaatcagtcttctata

SEQ ID NO: 93701 - DNA, 25 bp, probe
ttttacttcagaaaccaaatcagtc

SEQ ID NO: 93702 - DNA, 25 bp, probe
gatcctgccttgattttacttcaga

SEQ ID NO: 93703 - DNA, 25 bp, probe
agtcttctataatctggggtcggag

SEQ ID NO: 93704 - DNA, 25 bp, probe
ggaaggaatttgggtctggagttct

SEQ ID NO: 93705 - DNA, 25 bp, probe
aggaaggaatttgggtctggagttc

SEQ ID NO: 93706 - DNA, 25 bp, probe
gaaaccaaatcagtcttctataatc

SEQ ID NO: 93707 - DNA, 25 bp, probe
gaatttgggtctggagttctggcta

SEQ ID NO: 93708 - DNA, 25 bp, probe
atttattaaatcactgttctcccca

SEQ ID NO: 93709 - DNA, 25 bp, probe
gattctgaggcaggaaggaatttgg

SEQ ID NO: 93710 - DNA, 25 bp, probe
ggattctgaggcaggaaggaatttg

SEQ ID NO: 93711 - DNA, 25 bp, probe
aatttgggtctggagttctggctac

SEQ ID NO: 93712 - DNA, 25 bp, probe
cagaaaccaaatcagtcttctataa

SEQ ID NO: 93713 - DNA, 25 bp, probe
gaaggaggagagggatgatagcttg

SEQ ID NO: 93714 - DNA, 25 bp, probe
aaggaatttgggtctggagttctgg

SEQ ID NO: 93715 - DNA, 25 bp, probe
aagactgaacttgaacactgacatt

SEQ ID NO: 93716 - DNA, 25 bp, probe
ctgacatctatgagaaggacctacg

SEQ ID NO: 93717 - DNA, 25 bp, probe
cattgctgatcttatccacaccatc

SEQ ID NO: 93718 - DNA, 25 bp, probe
cctgacatctatgagaaggacctac

SEQ ID NO: 93719 - DNA, 25 bp, probe
agactgaacttgaacactgacattt

SEQ ID NO: 93720 - DNA, 25 bp, probe
gtaacatccctgacatctatgagaa

SEQ ID NO: 93721 - DNA, 25 bp, probe
taacatccctgacatctatgagaag

SEQ ID NO: 93722 - DNA, 25 bp, probe
ggtaacatccctgacatctatgaga

SEQ ID NO: 93723 - DNA, 25 bp, probe
attgctgatcttatccacaccatcg

SEQ ID NO: 93724 - DNA, 25 bp, probe
ccattgctgatcttatccacaccat

SEQ ID NO: 93725 - DNA, 25 bp, probe
ttgaacgtagtaagccttaccttaa

SEQ ID NO: 93726 - DNA, 25 bp, probe
tgaacgtagtaagccttaccttaat

SEQ ID NO: 93727 - DNA, 25 bp, probe
taggtaacatccctgacatctatga

SEQ ID NO: 93728 - DNA, 25 bp, probe
gtaggtaacatccctgacatctatg

SEQ ID NO: 93729 - DNA, 25 bp, probe
ggtaggtaacatccctgacatctat

SEQ ID NO: 93730 - DNA, 25 bp, probe
attcagtacataaaggtgcctgtta

SEQ ID NO: 93731 - DNA, 25 bp, probe
tgacatctatgagaaggacctacgt

SEQ ID NO: 93732 - DNA, 25 bp, probe
aggtaacatccctgacatctatgag

SEQ ID NO: 93733 - DNA, 25 bp, probe
ttcagtacataaaggtgcctgttac

SEQ ID NO: 93734 - DNA, 25 bp, probe
acgtagtaagccttaccttaataga

SEQ ID NO: 93735 - DNA, 25 bp, probe
ctcatcaattacgaattcaagctgt

SEQ ID NO: 93736 - DNA, 25 bp, probe
acagctcatcaattacgaattcaag

SEQ ID NO: 93737 - DNA, 25 bp, probe
gaacagctcatcaattacgaattca

SEQ ID NO: 93738 - DNA, 25 bp, probe
tcatcaattacgaattcaagctgtt

SEQ ID NO: 93739 - DNA, 25 bp, probe
aacagctcatcaattacgaattcaa

SEQ ID NO: 93740 - DNA, 25 bp, probe
tgagaaggacctacgtatgatgata

SEQ ID NO: 93741 - DNA, 25 bp, probe
tatgagaaggacctacgtatgatga

SEQ ID NO: 93742 - DNA, 25 bp, probe
ctatgagaaggacctacgtatgatg

SEQ ID NO: 93743 - DNA, 25 bp, probe
ggaacagctcatcaattacgaattc

SEQ ID NO: 93744 - DNA, 25 bp, probe
atgagaaggacctacgtatgatgat

SEQ ID NO: 93745 - DNA, 25 bp, probe
cgtagtaagccttaccttaatagaa

SEQ ID NO: 93746 - DNA, 25 bp, probe
aacatccctgacatctatgagaagg

SEQ ID NO: 93747 - DNA, 25 bp, probe
cattcagtacataaaggtgcctgtt

SEQ ID NO: 93748 - DNA, 25 bp, probe
gagaaggacctacgtatgatgatat

SEQ ID NO: 93749 - DNA, 25 bp, probe
tctatgagaaggacctacgtatgat

SEQ ID NO: 93750 - DNA, 25 bp, probe
atctatgagaaggacctacgtatga

SEQ ID NO: 93751 - DNA, 25 bp, probe
catctatgagaaggacctacgtatg

SEQ ID NO: 93752 - DNA, 25 bp, probe
acatctatgagaaggacctacgtat

SEQ ID NO: 93753 - DNA, 25 bp, probe
agaaggacctacgtatgatgatatc

SEQ ID NO: 93754 - DNA, 25 bp, probe
gacatctatgagaaggacctacgta

SEQ ID NO: 93755 - DNA, 25 bp, probe
aacgtagtaagccttaccttaatag

SEQ ID NO: 93756 - DNA, 25 bp, probe
gaacgtagtaagccttaccttaata

SEQ ID NO: 93757 - DNA, 25 bp, probe
attcttcgagggcattcagtacata

SEQ ID NO: 93758 - DNA, 25 bp, probe
tattcttcgagggcattcagtacat

SEQ ID NO: 93759 - DNA, 25 bp, probe
ttacacacattggaggagtcgtatg

SEQ ID NO: 93760 - DNA, 25 bp, probe
aagttctgttgaggcttagtttgat

SEQ ID NO: 93761 - DNA, 25 bp, probe
gaagttctgttgaggcttagtttga

SEQ ID NO: 93762 - DNA, 25 bp, probe
ttgtaactgtgaaactatggcttaa

SEQ ID NO: 93763 - DNA, 25 bp, probe
attgtaactgtgaaactatggctta

SEQ ID NO: 93764 - DNA, 25 bp, probe
ttctgttgaggcttagtttgatctt

SEQ ID NO: 93765 - DNA, 25 bp, probe
tttacacacattggaggagtcgtat

SEQ ID NO: 93766 - DNA, 25 bp, probe
tctgttgaggcttagtttgatcttc

SEQ ID NO: 93767 - DNA, 25 bp, probe
aatgtcacaatcattcattgctcca

SEQ ID NO: 93768 - DNA, 25 bp, probe
gttgaggcttagtttgatcttccat

SEQ ID NO: 93769 - DNA, 25 bp, probe
gttctgttgaggcttagtttgatct

SEQ ID NO: 93770 - DNA, 25 bp, probe
agttctgttgaggcttagtttgatc

SEQ ID NO: 93771 - DNA, 25 bp, probe
ttgaggcttagtttgatcttccatg

SEQ ID NO: 93772 - DNA, 25 bp, probe
atgtcacaatcattcattgctccag

SEQ ID NO: 93773 - DNA, 25 bp, probe
ggaagttctgttgaggcttagtttg

SEQ ID NO: 93774 - DNA, 25 bp, probe
ctgttgaggcttagtttgatcttcc

SEQ ID NO: 93775 - DNA, 25 bp, probe
tgttgaggcttagtttgatcttcca

SEQ ID NO: 93776 - DNA, 25 bp, probe
tttctgtccatacttaaagaccaaa

SEQ ID NO: 93777 - DNA, 25 bp, probe
ttctgtccatacttaaagaccaaat

SEQ ID NO: 93778 - DNA, 25 bp, probe
ttaactttgcatcaggtctacacag

SEQ ID NO: 93779 - DNA, 25 bp, probe
gggaagttctgttgaggcttagttt

SEQ ID NO: 93780 - DNA, 25 bp, probe
ctttctgtccatacttaaagaccaa

SEQ ID NO: 93781 - DNA, 25 bp, probe
ttgtttctttctgtccatacttaaa

SEQ ID NO: 93782 - DNA, 25 bp, probe
tttgtttctttctgtccatacttaa

SEQ ID NO: 93783 - DNA, 25 bp, probe
taacaaaagcaagaagaaaagcaca

SEQ ID NO: 93784 - DNA, 25 bp, probe
cgttttgtttctttctgtccatact

SEQ ID NO: 93785 - DNA, 25 bp, probe
ctgtattttcaccaagccttttcat

SEQ ID NO: 93786 - DNA, 25 bp, probe
tttcaccaagccttttcataatcaa

SEQ ID NO: 93787 - DNA, 25 bp, probe
ttttcaccaagccttttcataatca

SEQ ID NO: 93788 - DNA, 25 bp, probe
ttaacaaaagcaagaagaaaagcac

SEQ ID NO: 93789 - DNA, 25 bp, probe
tacacacattggaggagtcgtatgc

SEQ ID NO: 93790 - DNA, 25 bp, probe
caccaagccttttcataatcaagtt

SEQ ID NO: 93791 - DNA, 25 bp, probe
ttcaccaagccttttcataatcaag

SEQ ID NO: 93792 - DNA, 25 bp, probe
tgtattttcaccaagccttttcata

SEQ ID NO: 93793 - DNA, 25 bp, probe
accaagccttttcataatcaagttt

SEQ ID NO: 93794 - DNA, 25 bp, probe
gggattcacttaacaaaagcaagaa

SEQ ID NO: 93795 - DNA, 25 bp, probe
gcagcctttgatttctccagttgta

SEQ ID NO: 93796 - DNA, 25 bp, probe
gccttttcataatcaagtttgcttt

SEQ ID NO: 93797 - DNA, 25 bp, probe
caagccttttcataatcaagtttgc

SEQ ID NO: 93798 - DNA, 25 bp, probe
tcaccaagccttttcataatcaagt

SEQ ID NO: 93799 - DNA, 25 bp, probe
cttaacaaaagcaagaagaaaagca

SEQ ID NO: 93800 - DNA, 25 bp, probe
acttaacaaaagcaagaagaaaagc

SEQ ID NO: 93801 - DNA, 25 bp, probe
ggattcacttaacaaaagcaagaag

SEQ ID NO: 93802 - DNA, 25 bp, probe
taactttgcatcaggtctacacagt

SEQ ID NO: 93803 - DNA, 25 bp, probe
atcgagaacaacactgagatagtct

SEQ ID NO: 93804 - DNA, 25 bp, probe
catcgagaacaacactgagatagtc

SEQ ID NO: 93805 - DNA, 25 bp, probe
accatcgagaacaacactgagatag

SEQ ID NO: 93806 - DNA, 25 bp, probe
tcgagaacaacactgagatagtctg

SEQ ID NO: 93807 - DNA, 25 bp, probe
caccatcgagaacaacactgagata

SEQ ID NO: 93808 - DNA, 25 bp, probe
cgagaacaacactgagatagtctgc

SEQ ID NO: 93809 - DNA, 25 bp, probe
ccatcgagaacaacactgagatagt

SEQ ID NO: 93810 - DNA, 25 bp, probe
gagaacaacactgagatagtctgca

SEQ ID NO: 93811 - DNA, 25 bp, probe
cctcaacaagacagagtgtgacaag

SEQ ID NO: 93812 - DNA, 25 bp, probe
gtctagcctgggtatgaagaagttc

SEQ ID NO: 93813 - DNA, 25 bp, probe
tctagcctgggtatgaagaagttct

SEQ ID NO: 93814 - DNA, 25 bp, probe
aaggtgctggatagatgcttctctg

SEQ ID NO: 93815 - DNA, 25 bp, probe
ctatgatcacaccatcgagaacaac

SEQ ID NO: 93816 - DNA, 25 bp, probe
ctcaacaagacagagtgtgacaagc

SEQ ID NO: 93817 - DNA, 25 bp, probe
actatgatcacaccatcgagaacaa

SEQ ID NO: 93818 - DNA, 25 bp, probe
acctcaacaagacagagtgtgacaa

SEQ ID NO: 93819 - DNA, 25 bp, probe
tatgatcacaccatcgagaacaaca

SEQ ID NO: 93820 - DNA, 25 bp, probe
aagacagagtgtgacaagcagacat

SEQ ID NO: 93821 - DNA, 25 bp, probe
gatcacaccatcgagaacaacactg

SEQ ID NO: 93822 - DNA, 25 bp, probe
caacaagacagagtgtgacaagcag

SEQ ID NO: 93823 - DNA, 25 bp, probe
acaccatcgagaacaacactgagat

SEQ ID NO: 93824 - DNA, 25 bp, probe
cactatgatcacaccatcgagaaca

SEQ ID NO: 93825 - DNA, 25 bp, probe
aacaagacagagtgtgacaagcaga

SEQ ID NO: 93826 - DNA, 25 bp, probe
gacctcaacaagacagagtgtgaca

SEQ ID NO: 93827 - DNA, 25 bp, probe
tgacctcaacaagacagagtgtgac

SEQ ID NO: 93828 - DNA, 25 bp, probe
gtgacctcaacaagacagagtgtga

SEQ ID NO: 93829 - DNA, 25 bp, probe
agtgacctcaacaagacagagtgtg

SEQ ID NO: 93830 - DNA, 25 bp, probe
cagtgacctcaacaagacagagtgt

SEQ ID NO: 93831 - DNA, 25 bp, probe
ggtctagcctgggtatgaagaagtt

SEQ ID NO: 93832 - DNA, 25 bp, probe
tcaacaagacagagtgtgacaagca

SEQ ID NO: 93833 - DNA, 25 bp, probe
taccgtggcttcctcaatgtctact

SEQ ID NO: 93834 - DNA, 25 bp, probe
ctagcctgggtatgaagaagttctt

SEQ ID NO: 93835 - DNA, 25 bp, probe
gtccttcaagaacctccaggtctag

SEQ ID NO: 93836 - DNA, 25 bp, probe
atcacaccatcgagaacaacactga

SEQ ID NO: 93837 - DNA, 25 bp, probe
ccactatgatcacaccatcgagaac

SEQ ID NO: 93838 - DNA, 25 bp, probe
aaaagaaggtgctggatagatgctt

SEQ ID NO: 93839 - DNA, 25 bp, probe
gtaccgtggcttcctcaatgtctac

SEQ ID NO: 93840 - DNA, 25 bp, probe
agtaccgtggcttcctcaatgtcta

SEQ ID NO: 93841 - DNA, 25 bp, probe
caagacagagtgtgacaagcagaca

SEQ ID NO: 93842 - DNA, 25 bp, probe
acaagacagagtgtgacaagcagac

SEQ ID NO: 93843 - DNA, 25 bp, probe
atgatcacaccatcgagaacaacac

SEQ ID NO: 93844 - DNA, 25 bp, probe
accactatgatcacaccatcgagaa

SEQ ID NO: 93845 - DNA, 25 bp, probe
tgctaccaggaactctttgaccaag

SEQ ID NO: 93846 - DNA, 25 bp, probe
agacagagtgtgacaagcagacatg

SEQ ID NO: 93847 - DNA, 25 bp, probe
agcgttttagtcgttttatgtttct

SEQ ID NO: 93848 - DNA, 25 bp, probe
cagtagcgttttagtcgttttatgt

SEQ ID NO: 93849 - DNA, 25 bp, probe
tcagtagcgttttagtcgttttatg

SEQ ID NO: 93850 - DNA, 25 bp, probe
tagcttgggtgagactgtttacaaa

SEQ ID NO: 93851 - DNA, 25 bp, probe
ttagcttgggtgagactgtttacaa

SEQ ID NO: 93852 - DNA, 25 bp, probe
ctcagtagcgttttagtcgttttat

SEQ ID NO: 93853 - DNA, 25 bp, probe
agtagcgttttagtcgttttatgtt

SEQ ID NO: 93854 - DNA, 25 bp, probe
cttagcttgggtgagactgtttaca

SEQ ID NO: 93855 - DNA, 25 bp, probe
gcgttttagtcgttttatgtttctt

SEQ ID NO: 93856 - DNA, 25 bp, probe
gtagcgttttagtcgttttatgttt

SEQ ID NO: 93857 - DNA, 25 bp, probe
tagcgttttagtcgttttatgtttc

SEQ ID NO: 93858 - DNA, 25 bp, probe
actcagtagcgttttagtcgtttta

SEQ ID NO: 93859 - DNA, 25 bp, probe
ccttagcttgggtgagactgtttac

SEQ ID NO: 93860 - DNA, 25 bp, probe
ttttagtcgttttatgtttctttgc

SEQ ID NO: 93861 - DNA, 25 bp, probe
cgttttagtcgttttatgtttcttt

SEQ ID NO: 93862 - DNA, 25 bp, probe
tttagtcgttttatgtttctttgca

SEQ ID NO: 93863 - DNA, 25 bp, probe
accttagcttgggtgagactgttta

SEQ ID NO: 93864 - DNA, 25 bp, probe
agcttgggtgagactgtttacaaaa

SEQ ID NO: 93865 - DNA, 25 bp, probe
gttttagtcgttttatgtttctttg

SEQ ID NO: 93866 - DNA, 25 bp, probe
gaccttagcttgggtgagactgttt

SEQ ID NO: 93867 - DNA, 25 bp, probe
gttgcagactcagtagcgttttagt

SEQ ID NO: 93868 - DNA, 25 bp, probe
gactcagtagcgttttagtcgtttt

SEQ ID NO: 93869 - DNA, 25 bp, probe
ggttgcagactcagtagcgttttag

SEQ ID NO: 93870 - DNA, 25 bp, probe
agactcagtagcgttttagtcgttt

SEQ ID NO: 93871 - DNA, 25 bp, probe
ttagtcgttttatgtttctttgcaa

SEQ ID NO: 93872 - DNA, 25 bp, probe
cagactcagtagcgttttagtcgtt

SEQ ID NO: 93873 - DNA, 25 bp, probe
ttgcagactcagtagcgttttagtc

SEQ ID NO: 93874 - DNA, 25 bp, probe
gggttgcagactcagtagcgtttta

SEQ ID NO: 93875 - DNA, 25 bp, probe
ttttaacttggggagaaacaccggg

SEQ ID NO: 93876 - DNA, 25 bp, probe
gcagactcagtagcgttttagtcgt

SEQ ID NO: 93877 - DNA, 25 bp, probe
tgcagactcagtagcgttttagtcg

SEQ ID NO: 93878 - DNA, 25 bp, probe
atgtaagtgcctataaccatgttct

SEQ ID NO: 93879 - DNA, 25 bp, probe
caatgtaagtgcctataaccatgtt

SEQ ID NO: 93880 - DNA, 25 bp, probe
tgtaagtgcctataaccatgttcta

SEQ ID NO: 93881 - DNA, 25 bp, probe
aatgtaagtgcctataaccatgttc

SEQ ID NO: 93882 - DNA, 25 bp, probe
cttagtgatgtgtgtgtgtctccat

SEQ ID NO: 93883 - DNA, 25 bp, probe
gtaagtgcctataaccatgttctat

SEQ ID NO: 93884 - DNA, 25 bp, probe
atgatagtttgtcctgtgtccttag

SEQ ID NO: 93885 - DNA, 25 bp, probe
atgatgtgtttgggatactgcttat

SEQ ID NO: 93886 - DNA, 25 bp, probe
ttatgatagtttgtcctgtgtcctt

SEQ ID NO: 93887 - DNA, 25 bp, probe
tttatgatagtttgtcctgtgtcct

SEQ ID NO: 93888 - DNA, 25 bp, probe
gatgtgtttgggatactgcttattt

SEQ ID NO: 93889 - DNA, 25 bp, probe
tgatgtgtttgggatactgcttatt

SEQ ID NO: 93890 - DNA, 25 bp, probe
agatgatgatgtgtttgggatactg

SEQ ID NO: 93891 - DNA, 25 bp, probe
tagatgatgatgtgtttgggatact

SEQ ID NO: 93892 - DNA, 25 bp, probe
gatagtttgtcctgtgtccttagtg

SEQ ID NO: 93893 - DNA, 25 bp, probe
ctgctgccatttgaattagaagaaa

SEQ ID NO: 93894 - DNA, 25 bp, probe
gatgatgtgtttgggatactgctta

SEQ ID NO: 93895 - DNA, 25 bp, probe
gtccttagtgatgtgtgtgtgtctc

SEQ ID NO: 93896 - DNA, 25 bp, probe
tagtttgtcctgtgtccttagtgat

SEQ ID NO: 93897 - DNA, 25 bp, probe
atagtttgtcctgtgtccttagtga

SEQ ID NO: 93898 - DNA, 25 bp, probe
tgatagtttgtcctgtgtccttagt

SEQ ID NO: 93899 - DNA, 25 bp, probe
tatgatagtttgtcctgtgtcctta

SEQ ID NO: 93900 - DNA, 25 bp, probe
atagatgatgatgtgtttgggatac

SEQ ID NO: 93901 - DNA, 25 bp, probe
aatatctgaccaagattcgccaatc

SEQ ID NO: 93902 - DNA, 25 bp, probe
tctgctgccatttgaattagaagaa

SEQ ID NO: 93903 - DNA, 25 bp, probe
caatatctgaccaagattcgccaat

SEQ ID NO: 93904 - DNA, 25 bp, probe
ctctgctgccatttgaattagaaga

SEQ ID NO: 93905 - DNA, 25 bp, probe
ttagtgatgtgtgtgtgtctccatg

SEQ ID NO: 93906 - DNA, 25 bp, probe
agtgcctataaccatgttctatatt

SEQ ID NO: 93907 - DNA, 25 bp, probe
aagtgcctataaccatgttctatat

SEQ ID NO: 93908 - DNA, 25 bp, probe
gatgatgatgtgtttgggatactgc

SEQ ID NO: 93909 - DNA, 25 bp, probe
gtgcctataaccatgttctatattc

SEQ ID NO: 93910 - DNA, 25 bp, probe
gtgtccttagtgatgtgtgtgtgtc

SEQ ID NO: 93911 - DNA, 25 bp, probe
ctgtgtccttagtgatgtgtgtgtg

SEQ ID NO: 93912 - DNA, 25 bp, probe
ttgtcctgtgtccttagtgatgtgt

SEQ ID NO: 93913 - DNA, 25 bp, probe
tagcaatgtaagtgcctataaccat

SEQ ID NO: 93914 - DNA, 25 bp, probe
atagcaatgtaagtgcctataacca

SEQ ID NO: 93915 - DNA, 25 bp, probe
tgcctataaccatgttctatattct

SEQ ID NO: 93916 - DNA, 25 bp, probe
gatagcaatgtaagtgcctataacc

SEQ ID NO: 93917 - DNA, 25 bp, probe
tgtccttagtgatgtgtgtgtgtct

SEQ ID NO: 93918 - DNA, 25 bp, probe
atgatgatgtgtttgggatactgct

SEQ ID NO: 93919 - DNA, 25 bp, probe
tcttattgaagtgaattcctgcatt

SEQ ID NO: 93920 - DNA, 25 bp, probe
ttcttattgaagtgaattcctgcat

SEQ ID NO: 93921 - DNA, 25 bp, probe
agtttgtcctgtgtccttagtgatg

SEQ ID NO: 93922 - DNA, 25 bp, probe
atacacacacaaggacctggattaa

SEQ ID NO: 93923 - DNA, 25 bp, probe
agaaccatctctaggcaactatcaa

SEQ ID NO: 93924 - DNA, 25 bp, probe
cctatgcttggagtcataagtgtta

SEQ ID NO: 93925 - DNA, 25 bp, probe
cagaaccatctctaggcaactatca

SEQ ID NO: 93926 - DNA, 25 bp, probe
catacacacacaaggacctggatta

SEQ ID NO: 93927 - DNA, 25 bp, probe
ccagaaccatctctaggcaactatc

SEQ ID NO: 93928 - DNA, 25 bp, probe
ctatgcttggagtcataagtgttat

SEQ ID NO: 93929 - DNA, 25 bp, probe
tgactaataaggaagatatgtgtgt

SEQ ID NO: 93930 - DNA, 25 bp, probe
atttggactataccctgagataagc

SEQ ID NO: 93931 - DNA, 25 bp, probe
gtgttatttggactataccctgaga

SEQ ID NO: 93932 - DNA, 25 bp, probe
aagaagcagaagttcaagtggacaa

SEQ ID NO: 93933 - DNA, 25 bp, probe
tccagaaccatctctaggcaactat

SEQ ID NO: 93934 - DNA, 25 bp, probe
tatgcttggagtcataagtgttatt

SEQ ID NO: 93935 - DNA, 25 bp, probe
gcttggagtcataagtgttatttgg

SEQ ID NO: 93936 - DNA, 25 bp, probe
tgcttggagtcataagtgttatttg

SEQ ID NO: 93937 - DNA, 25 bp, probe
tatttcatacacacacaaggacctg

SEQ ID NO: 93938 - DNA, 25 bp, probe
gaaccatctctaggcaactatcaaa

SEQ ID NO: 93939 - DNA, 25 bp, probe
tgttatttggactataccctgagat

SEQ ID NO: 93940 - DNA, 25 bp, probe
agtgttatttggactataccctgag

SEQ ID NO: 93941 - DNA, 25 bp, probe
cttggagtcataagtgttatttgga

SEQ ID NO: 93942 - DNA, 25 bp, probe
actggcttctttagagagtagtaag

SEQ ID NO: 93943 - DNA, 25 bp, probe
atgcttggagtcataagtgttattt

SEQ ID NO: 93944 - DNA, 25 bp, probe
aagcagaagttcaagtggacaaatt

SEQ ID NO: 93945 - DNA, 25 bp, probe
aagtgttatttggactataccctga

SEQ ID NO: 93946 - DNA, 25 bp, probe
cttatagatcaagtttggctccctt

SEQ ID NO: 93947 - DNA, 25 bp, probe
ctccagaaccatctctaggcaacta

SEQ ID NO: 93948 - DNA, 25 bp, probe
tacacacacaaggacctggattaaa

SEQ ID NO: 93949 - DNA, 25 bp, probe
ttctttagagagtagtaagcatggc

SEQ ID NO: 93950 - DNA, 25 bp, probe
gaagcagaagttcaagtggacaaat

SEQ ID NO: 93951 - DNA, 25 bp, probe
gcctatgcttggagtcataagtgtt

SEQ ID NO: 93952 - DNA, 25 bp, probe
ctactctccagaaccatctctaggc

SEQ ID NO: 93953 - DNA, 25 bp, probe
ttggagtcataagtgttatttggac

SEQ ID NO: 93954 - DNA, 25 bp, probe
gtatttcatacacacacaaggacct

SEQ ID NO: 93955 - DNA, 25 bp, probe
tttggactataccctgagataagct

SEQ ID NO: 93956 - DNA, 25 bp, probe
tcatacacacacaaggacctggatt

SEQ ID NO: 93957 - DNA, 25 bp, probe
ttcatacacacacaaggacctggat

SEQ ID NO: 93958 - DNA, 25 bp, probe
ccatgactaataaggaagatatgtg

SEQ ID NO: 93959 - DNA, 25 bp, probe
cttctttagagagtagtaagcatgg

SEQ ID NO: 93960 - DNA, 25 bp, probe
atgactaataaggaagatatgtgtg

SEQ ID NO: 93961 - DNA, 25 bp, probe
taagtgttatttggactataccctg

SEQ ID NO: 93962 - DNA, 25 bp, probe
gcagaagttcaagtggacaaattta

SEQ ID NO: 93963 - DNA, 25 bp, probe
ctgcctatgcttggagtcataagtg

SEQ ID NO: 93964 - DNA, 25 bp, probe
tcactggactctagcctacaacatg

SEQ ID NO: 93965 - DNA, 25 bp, probe
agaagcagaagttcaagtggacaaa

SEQ ID NO: 93966 - DNA, 25 bp, probe
ccatctggacatttaatgaaactga

SEQ ID NO: 93967 - DNA, 25 bp, probe
ggacatttaatgaaactgagagaca

SEQ ID NO: 93968 - DNA, 25 bp, probe
tggacatttaatgaaactgagagac

SEQ ID NO: 93969 - DNA, 25 bp, probe
ctggacatttaatgaaactgagaga

SEQ ID NO: 93970 - DNA, 25 bp, probe
tctggacatttaatgaaactgagag

SEQ ID NO: 93971 - DNA, 25 bp, probe
tttaatgaaactgagagacagaggc

SEQ ID NO: 93972 - DNA, 25 bp, probe
catctggacatttaatgaaactgag

SEQ ID NO: 93973 - DNA, 25 bp, probe
atctggacatttaatgaaactgaga

SEQ ID NO: 93974 - DNA, 25 bp, probe
taatgaaactgagagacagaggctt

SEQ ID NO: 93975 - DNA, 25 bp, probe
ttaatgaaactgagagacagaggct

SEQ ID NO: 93976 - DNA, 25 bp, probe
atttaatgaaactgagagacagagg

SEQ ID NO: 93977 - DNA, 25 bp, probe
acatttaatgaaactgagagacaga

SEQ ID NO: 93978 - DNA, 25 bp, probe
gacatttaatgaaactgagagacag

SEQ ID NO: 93979 - DNA, 25 bp, probe
tccatctggacatttaatgaaactg

SEQ ID NO: 93980 - DNA, 25 bp, probe
actccatctggacatttaatgaaac

SEQ ID NO: 93981 - DNA, 25 bp, probe
cactccatctggacatttaatgaaa

SEQ ID NO: 93982 - DNA, 25 bp, probe
catttaatgaaactgagagacagag

SEQ ID NO: 93983 - DNA, 25 bp, probe
ctccatctggacatttaatgaaact

SEQ ID NO: 93984 - DNA, 25 bp, probe
ccactccatctggacatttaatgaa

SEQ ID NO: 93985 - DNA, 25 bp, probe
aatgaaactgagagacagaggcttg

SEQ ID NO: 93986 - DNA, 25 bp, probe
tatgccactccatctggacatttaa

SEQ ID NO: 93987 - DNA, 25 bp, probe
ccctacccctgactcatatatactt

SEQ ID NO: 93988 - DNA, 25 bp, probe
ctccctacccctgactcatatatac

SEQ ID NO: 93989 - DNA, 25 bp, probe
tccctacccctgactcatatatact

SEQ ID NO: 93990 - DNA, 25 bp, probe
actccctacccctgactcatatata

SEQ ID NO: 93991 - DNA, 25 bp, probe
ctatgccactccatctggacattta

SEQ ID NO: 93992 - DNA, 25 bp, probe
atgccactccatctggacatttaat

SEQ ID NO: 93993 - DNA, 25 bp, probe
cctacccctgactcatatatacttt

SEQ ID NO: 93994 - DNA, 25 bp, probe
atgaaactgagagacagaggcttgt

SEQ ID NO: 93995 - DNA, 25 bp, probe
cactccctacccctgactcatatat

SEQ ID NO: 93996 - DNA, 25 bp, probe
gccactccatctggacatttaatga

SEQ ID NO: 93997 - DNA, 25 bp, probe
gaaactgagagacagaggcttgttt

SEQ ID NO: 93998 - DNA, 25 bp, probe
tgaaactgagagacagaggcttgtt

SEQ ID NO: 93999 - DNA, 25 bp, probe
ctacaagacctaccactcacccatg

SEQ ID NO: 94000 - DNA, 25 bp, probe
tgccactccatctggacatttaatg

SEQ ID NO: 94001 - DNA, 25 bp, probe
aaactgagagacagaggcttgtttg

SEQ ID NO: 94002 - DNA, 25 bp, probe
gagagacagaggcttgtttgctttg

SEQ ID NO: 94003 - DNA, 25 bp, probe
ctacccctgactcatatatactttt

SEQ ID NO: 94004 - DNA, 25 bp, probe
tgagagacagaggcttgtttgcttt

SEQ ID NO: 94005 - DNA, 25 bp, probe
cctacaagacctaccactcacccat

SEQ ID NO: 94006 - DNA, 25 bp, probe
ccactccctacccctgactcatata

SEQ ID NO: 94007 - DNA, 25 bp, probe
ctgagagacagaggcttgtttgctt

SEQ ID NO: 94008 - DNA, 25 bp, probe
cctatgccactccatctggacattt

SEQ ID NO: 94009 - DNA, 25 bp, probe
gtcctccctacaagacctaccactc

SEQ ID NO: 94010 - DNA, 25 bp, probe
acccaccaataatgaaatagacctt

SEQ ID NO: 94011 - DNA, 25 bp, probe
gctacccaccaataatgaaatagac

SEQ ID NO: 94012 - DNA, 25 bp, probe
cgctacccaccaataatgaaataga

SEQ ID NO: 94013 - DNA, 25 bp, probe
tacccaccaataatgaaatagacct

SEQ ID NO: 94014 - DNA, 25 bp, probe
cccaccaataatgaaatagaccttt

SEQ ID NO: 94015 - DNA, 25 bp, probe
ctacccaccaataatgaaatagacc

SEQ ID NO: 94016 - DNA, 25 bp, probe
ggatgatctcaacaagagctgtatt

SEQ ID NO: 94017 - DNA, 25 bp, probe
gctggtttctagttgaattggttat

SEQ ID NO: 94018 - DNA, 25 bp, probe
aggatgatctcaacaagagctgtat

SEQ ID NO: 94019 - DNA, 25 bp, probe
aaggatgatctcaacaagagctgta

SEQ ID NO: 94020 - DNA, 25 bp, probe
atatatttccattgtgaccagcagc

SEQ ID NO: 94021 - DNA, 25 bp, probe
aaacaaaggatgatctcaacaagag

SEQ ID NO: 94022 - DNA, 25 bp, probe
tggtttctagttgaattggttatct

SEQ ID NO: 94023 - DNA, 25 bp, probe
tctttgttagctggtttctagttga

SEQ ID NO: 94024 - DNA, 25 bp, probe
agttctttgttagctggtttctagt

SEQ ID NO: 94025 - DNA, 25 bp, probe
ttctttgttagctggtttctagttg

SEQ ID NO: 94026 - DNA, 25 bp, probe
gttctttgttagctggtttctagtt

SEQ ID NO: 94027 - DNA, 25 bp, probe
tatatttccattgtgaccagcagca

SEQ ID NO: 94028 - DNA, 25 bp, probe
gttagctggtttctagttgaattgg

SEQ ID NO: 94029 - DNA, 25 bp, probe
agctggtttctagttgaattggtta

SEQ ID NO: 94030 - DNA, 25 bp, probe
tagctggtttctagttgaattggtt

SEQ ID NO: 94031 - DNA, 25 bp, probe
ttagctggtttctagttgaattggt

SEQ ID NO: 94032 - DNA, 25 bp, probe
ctggtttctagttgaattggttatc

SEQ ID NO: 94033 - DNA, 25 bp, probe
tgttagctggtttctagttgaattg

SEQ ID NO: 94034 - DNA, 25 bp, probe
ctttgttagctggtttctagttgaa

SEQ ID NO: 94035 - DNA, 25 bp, probe
aacaaaggatgatctcaacaagagc

SEQ ID NO: 94036 - DNA, 25 bp, probe
ttgttagctggtttctagttgaatt

SEQ ID NO: 94037 - DNA, 25 bp, probe
tttgttagctggtttctagttgaat

SEQ ID NO: 94038 - DNA, 25 bp, probe
aaacctttgggaatggatatcagaa

SEQ ID NO: 94039 - DNA, 25 bp, probe
gaaacctttgggaatggatatcaga

SEQ ID NO: 94040 - DNA, 25 bp, probe
agaaacctttgggaatggatatcag

SEQ ID NO: 94041 - DNA, 25 bp, probe
tgggaatggatatcagaagatttgg

SEQ ID NO: 94042 - DNA, 25 bp, probe
tgaaagaaacctttgggaatggata

SEQ ID NO: 94043 - DNA, 25 bp, probe
cagttctttgttagctggtttctag

SEQ ID NO: 94044 - DNA, 25 bp, probe
gatgatctcaacaagagctgtattt

SEQ ID NO: 94045 - DNA, 25 bp, probe
cctttgggaatggatatcagaagat

SEQ ID NO: 94046 - DNA, 25 bp, probe
aagaaacctttgggaatggatatca

SEQ ID NO: 94047 - DNA, 25 bp, probe
acagttctttgttagctggtttcta

SEQ ID NO: 94048 - DNA, 25 bp, probe
tagacagttctttgttagctggttt

SEQ ID NO: 94049 - DNA, 25 bp, probe
ttagacagttctttgttagctggtt

SEQ ID NO: 94050 - DNA, 25 bp, probe
tttagacagttctttgttagctggt

SEQ ID NO: 94051 - DNA, 25 bp, probe
aacctttgggaatggatatcagaag

SEQ ID NO: 94052 - DNA, 25 bp, probe
gaaagaaacctttgggaatggatat

SEQ ID NO: 94053 - DNA, 25 bp, probe
atttagacagttctttgttagctgg

SEQ ID NO: 94054 - DNA, 25 bp, probe
tacttgttctacctggattgtcaac

SEQ ID NO: 94055 - DNA, 25 bp, probe
atgtacttgttctacctggattgtc

SEQ ID NO: 94056 - DNA, 25 bp, probe
tatgtacttgttctacctggattgt

SEQ ID NO: 94057 - DNA, 25 bp, probe
gtacttgttctacctggattgtcaa

SEQ ID NO: 94058 - DNA, 25 bp, probe
tgtacttgttctacctggattgtca

SEQ ID NO: 94059 - DNA, 25 bp, probe
gagagaaggtataggtgatcggatc

SEQ ID NO: 94060 - DNA, 25 bp, probe
gaaggtataggtgatcggatctgtt

SEQ ID NO: 94061 - DNA, 25 bp, probe
ttatgtacttgttctacctggattg

SEQ ID NO: 94062 - DNA, 25 bp, probe
tgagagaaggtataggtgatcggat

SEQ ID NO: 94063 - DNA, 25 bp, probe
gagaaggtataggtgatcggatctg

SEQ ID NO: 94064 - DNA, 25 bp, probe
agagaaggtataggtgatcggatct

SEQ ID NO: 94065 - DNA, 25 bp, probe
taagttgattctgagagtacaggtc

SEQ ID NO: 94066 - DNA, 25 bp, probe
ttgagagaaggtataggtgatcgga

SEQ ID NO: 94067 - DNA, 25 bp, probe
gtacaggtcagtaagcctcattatt

SEQ ID NO: 94068 - DNA, 25 bp, probe
ttaagttgattctgagagtacaggt

SEQ ID NO: 94069 - DNA, 25 bp, probe
agtacaggtcagtaagcctcattat

SEQ ID NO: 94070 - DNA, 25 bp, probe
aagttgattctgagagtacaggtca

SEQ ID NO: 94071 - DNA, 25 bp, probe
gttctacctggattgtcaacaactg

SEQ ID NO: 94072 - DNA, 25 bp, probe
atttcctcttgatttgtctgggtta

SEQ ID NO: 94073 - DNA, 25 bp, probe
agaaggtataggtgatcggatctgt

SEQ ID NO: 94074 - DNA, 25 bp, probe
tctacctggattgtcaacaactgaa

SEQ ID NO: 94075 - DNA, 25 bp, probe
ttctacctggattgtcaacaactga

SEQ ID NO: 94076 - DNA, 25 bp, probe
gagtacaggtcagtaagcctcatta

SEQ ID NO: 94077 - DNA, 25 bp, probe
tttcctcttgatttgtctgggttaa

SEQ ID NO: 94078 - DNA, 25 bp, probe
ttcctcttgatttgtctgggttaaa

SEQ ID NO: 94079 - DNA, 25 bp, probe
ggtcagtaagcctcattatttggaa

SEQ ID NO: 94080 - DNA, 25 bp, probe
tggaatttgagagaaggtataggtg

SEQ ID NO: 94081 - DNA, 25 bp, probe
gtcagtaagcctcattatttggaat

SEQ ID NO: 94082 - DNA, 25 bp, probe
ggaatttgagagaaggtataggtga

SEQ ID NO: 94083 - DNA, 25 bp, probe
ttggaatttgagagaaggtataggt

SEQ ID NO: 94084 - DNA, 25 bp, probe
catttcctcttgatttgtctgggtt

SEQ ID NO: 94085 - DNA, 25 bp, probe
atttgagagaaggtataggtgatcg

SEQ ID NO: 94086 - DNA, 25 bp, probe
tcagtaagcctcattatttggaatt

SEQ ID NO: 94087 - DNA, 25 bp, probe
aaggtataggtgatcggatctgttt

SEQ ID NO: 94088 - DNA, 25 bp, probe
tttggaatttgagagaaggtatagg

SEQ ID NO: 94089 - DNA, 25 bp, probe
aggtgatcggatctgtttcatttat

SEQ ID NO: 94090 - DNA, 25 bp, probe
ataggtgatcggatctgtttcattt

SEQ ID NO: 94091 - DNA, 25 bp, probe
gtataggtgatcggatctgtttcat

SEQ ID NO: 94092 - DNA, 25 bp, probe
tttgagagaaggtataggtgatcgg

SEQ ID NO: 94093 - DNA, 25 bp, probe
taggtgatcggatctgtttcattta

SEQ ID NO: 94094 - DNA, 25 bp, probe
tataggtgatcggatctgtttcatt

SEQ ID NO: 94095 - DNA, 25 bp, probe
aggtataggtgatcggatctgtttc

SEQ ID NO: 94096 - DNA, 25 bp, probe
ctggattgtcaacaactgaaagtac

SEQ ID NO: 94097 - DNA, 25 bp, probe
gaatttgagagaaggtataggtgat

SEQ ID NO: 94098 - DNA, 25 bp, probe
tctcagcactgttacaattcttcaa

SEQ ID NO: 94099 - DNA, 25 bp, probe
gtctcagcactgttacaattcttca

SEQ ID NO: 94100 - DNA, 25 bp, probe
agtctcagcactgttacaattcttc

SEQ ID NO: 94101 - DNA, 25 bp, probe
ttaccttatcgcattcatgtcagtc

SEQ ID NO: 94102 - DNA, 25 bp, probe
cttaccttatcgcattcatgtcagt

SEQ ID NO: 94103 - DNA, 25 bp, probe
atggaatctacaggcttaccttatc

SEQ ID NO: 94104 - DNA, 25 bp, probe
gatggaatctacaggcttaccttat

SEQ ID NO: 94105 - DNA, 25 bp, probe
cttatcgcattcatgtcagtctcag

SEQ ID NO: 94106 - DNA, 25 bp, probe
taccttatcgcattcatgtcagtct

SEQ ID NO: 94107 - DNA, 25 bp, probe
ggatggaatctacaggcttacctta

SEQ ID NO: 94108 - DNA, 25 bp, probe
atctacaggcttaccttatcgcatt

SEQ ID NO: 94109 - DNA, 25 bp, probe
aatctacaggcttaccttatcgcat

SEQ ID NO: 94110 - DNA, 25 bp, probe
gcttaccttatcgcattcatgtcag

SEQ ID NO: 94111 - DNA, 25 bp, probe
tggaatctacaggcttaccttatcg

SEQ ID NO: 94112 - DNA, 25 bp, probe
ttgaatcttctcttggtgaggcaat

SEQ ID NO: 94113 - DNA, 25 bp, probe
tacaggcttaccttatcgcattcat

SEQ ID NO: 94114 - DNA, 25 bp, probe
ctcagcactgttacaattcttcaaa

SEQ ID NO: 94115 - DNA, 25 bp, probe
ttctcggatggaatctacaggctta

SEQ ID NO: 94116 - DNA, 25 bp, probe
tctacaggcttaccttatcgcattc

SEQ ID NO: 94117 - DNA, 25 bp, probe
gaatctacaggcttaccttatcgca

SEQ ID NO: 94118 - DNA, 25 bp, probe
caggatttgaatcttctcttggtga

SEQ ID NO: 94119 - DNA, 25 bp, probe
gctcacttcagttcaagaaattgtt

SEQ ID NO: 94120 - DNA, 25 bp, probe
ccttatcgcattcatgtcagtctca

SEQ ID NO: 94121 - DNA, 25 bp, probe
accttatcgcattcatgtcagtctc

SEQ ID NO: 94122 - DNA, 25 bp, probe
ctacaggcttaccttatcgcattca

SEQ ID NO: 94123 - DNA, 25 bp, probe
ctcacttcagttcaagaaattgttc

SEQ ID NO: 94124 - DNA, 25 bp, probe
aggatttgaatcttctcttggtgag

SEQ ID NO: 94125 - DNA, 25 bp, probe
tgaatcttctcttggtgaggcaatg

SEQ ID NO: 94126 - DNA, 25 bp, probe
tctcggatggaatctacaggcttac

SEQ ID NO: 94127 - DNA, 25 bp, probe
gctccaggatttgaatcttctcttg

SEQ ID NO: 94128 - DNA, 25 bp, probe
ggaatctacaggcttaccttatcgc

SEQ ID NO: 94129 - DNA, 25 bp, probe
aaatctgagtgagggctatgaagtg

SEQ ID NO: 94130 - DNA, 25 bp, probe
ggatttgaatcttctcttggtgagg

SEQ ID NO: 94131 - DNA, 25 bp, probe
ttatcgcattcatgtcagtctcagc

SEQ ID NO: 94132 - DNA, 25 bp, probe
ggcttaccttatcgcattcatgtca

SEQ ID NO: 94133 - DNA, 25 bp, probe
gaaagctcacttcagttcaagaaat

SEQ ID NO: 94134 - DNA, 25 bp, probe
aaagctcacttcagttcaagaaatt

SEQ ID NO: 94135 - DNA, 25 bp, probe
aagctcacttcagttcaagaaattg

SEQ ID NO: 94136 - DNA, 25 bp, probe
gatttgaatcttctcttggtgaggc

SEQ ID NO: 94137 - DNA, 25 bp, probe
cttctcggatggaatctacaggctt

SEQ ID NO: 94138 - DNA, 25 bp, probe
ggctccaggatttgaatcttctctt

SEQ ID NO: 94139 - DNA, 25 bp, probe
gaatcttctcttggtgaggcaatgg

SEQ ID NO: 94140 - DNA, 25 bp, probe
ctccaggatttgaatcttctcttgg

SEQ ID NO: 94141 - DNA, 25 bp, probe
aggcttaccttatcgcattcatgtc

SEQ ID NO: 94142 - DNA, 25 bp, probe
agaatccatcagcaagaattaccat

SEQ ID NO: 94143 - DNA, 25 bp, probe
gaatccatcagcaagaattaccatt

SEQ ID NO: 94144 - DNA, 25 bp, probe
gagaatccatcagcaagaattacca

SEQ ID NO: 94145 - DNA, 25 bp, probe
aatcctggtgaatatagtgctgcta

SEQ ID NO: 94146 - DNA, 25 bp, probe
tagttgagaatccatcagcaagaat

SEQ ID NO: 94147 - DNA, 25 bp, probe
ttagttgagaatccatcagcaagaa

SEQ ID NO: 94148 - DNA, 25 bp, probe
atcttagttgagaatccatcagcaa

SEQ ID NO: 94149 - DNA, 25 bp, probe
aatcttagttgagaatccatcagca

SEQ ID NO: 94150 - DNA, 25 bp, probe
cttagttgagaatccatcagcaaga

SEQ ID NO: 94151 - DNA, 25 bp, probe
tcttagttgagaatccatcagcaag

SEQ ID NO: 94152 - DNA, 25 bp, probe
ttgagaatccatcagcaagaattac

SEQ ID NO: 94153 - DNA, 25 bp, probe
gttgagaatccatcagcaagaatta

SEQ ID NO: 94154 - DNA, 25 bp, probe
agttgagaatccatcagcaagaatt

SEQ ID NO: 94155 - DNA, 25 bp, probe
tgagaatccatcagcaagaattacc

SEQ ID NO: 94156 - DNA, 25 bp, probe
gtgctgctatgttgacattattctt

SEQ ID NO: 94157 - DNA, 25 bp, probe
gctgctatgttgacattattcttcc

SEQ ID NO: 94158 - DNA, 25 bp, probe
tgctgctatgttgacattattcttc

SEQ ID NO: 94159 - DNA, 25 bp, probe
tgaatatagtgctgctatgttgaca

SEQ ID NO: 94160 - DNA, 25 bp, probe
gtgaatatagtgctgctatgttgac

SEQ ID NO: 94161 - DNA, 25 bp, probe
agtgctgctatgttgacattattct

SEQ ID NO: 94162 - DNA, 25 bp, probe
tagtgctgctatgttgacattattc

SEQ ID NO: 94163 - DNA, 25 bp, probe
ggtgaatatagtgctgctatgttga

SEQ ID NO: 94164 - DNA, 25 bp, probe
ctggtgaatatagtgctgctatgtt

SEQ ID NO: 94165 - DNA, 25 bp, probe
tggtgaatatagtgctgctatgttg

SEQ ID NO: 94166 - DNA, 25 bp, probe
ctgctatgttgacattattcttcct

SEQ ID NO: 94167 - DNA, 25 bp, probe
atcctggtgaatatagtgctgctat

SEQ ID NO: 94168 - DNA, 25 bp, probe
gaatcctggtgaatatagtgctgct

SEQ ID NO: 94169 - DNA, 25 bp, probe
gaatatagtgctgctatgttgacat

SEQ ID NO: 94170 - DNA, 25 bp, probe
aatccatcagcaagaattaccattc

SEQ ID NO: 94171 - DNA, 25 bp, probe
tcctggtgaatatagtgctgctatg

SEQ ID NO: 94172 - DNA, 25 bp, probe
atagtgctgctatgttgacattatt

SEQ ID NO: 94173 - DNA, 25 bp, probe
aatatagtgctgctatgttgacatt

SEQ ID NO: 94174 - DNA, 25 bp, probe
caagaattaccattccagacatcaa

SEQ ID NO: 94175 - DNA, 25 bp, probe
agcaagaattaccattccagacatc

SEQ ID NO: 94176 - DNA, 25 bp, probe
atcagcaagaattaccattccagac

SEQ ID NO: 94177 - DNA, 25 bp, probe
catcagcaagaattaccattccaga

SEQ ID NO: 94178 - DNA, 25 bp, probe
atccatcagcaagaattaccattcc

SEQ ID NO: 94179 - DNA, 25 bp, probe
tgctatgttgacattattcttccta

SEQ ID NO: 94180 - DNA, 25 bp, probe
cctggtgaatatagtgctgctatgt

SEQ ID NO: 94181 - DNA, 25 bp, probe
gcaagaattaccattccagacatca

SEQ ID NO: 94182 - DNA, 25 bp, probe
cagcaagaattaccattccagacat

SEQ ID NO: 94183 - DNA, 25 bp, probe
ttctctccagtaaacagtgcttcta

SEQ ID NO: 94184 - DNA, 25 bp, probe
tatagtgctgctatgttgacattat

SEQ ID NO: 94185 - DNA, 25 bp, probe
atatagtgctgctatgttgacatta

SEQ ID NO: 94186 - DNA, 25 bp, probe
tgattcagctttaagatgttaccct

SEQ ID NO: 94187 - DNA, 25 bp, probe
gattcagctttaagatgttaccctt

SEQ ID NO: 94188 - DNA, 25 bp, probe
gtgtatcttttaatgttgtatgtct

SEQ ID NO: 94189 - DNA, 25 bp, probe
agtgtatcttttaatgttgtatgtc

SEQ ID NO: 94190 - DNA, 25 bp, probe
aactcatctgatgtctgaagaggag

SEQ ID NO: 94191 - DNA, 25 bp, probe
attcttctctttagacgacctcttc

SEQ ID NO: 94192 - DNA, 25 bp, probe
tatgttacccagagaactttccaaa

SEQ ID NO: 94193 - DNA, 25 bp, probe
ttatgttacccagagaactttccaa

SEQ ID NO: 94194 - DNA, 25 bp, probe
gttatgttacccagagaactttcca

SEQ ID NO: 94195 - DNA, 25 bp, probe
tgttatgttacccagagaactttcc

SEQ ID NO: 94196 - DNA, 25 bp, probe
accacatattcttctctttagacga

SEQ ID NO: 94197 - DNA, 25 bp, probe
cacatattcttctctttagacgacc

SEQ ID NO: 94198 - DNA, 25 bp, probe
ccacatattcttctctttagacgac

SEQ ID NO: 94199 - DNA, 25 bp, probe
ctcatctgatgtctgaagaggagtg

SEQ ID NO: 94200 - DNA, 25 bp, probe
ttacccagagaactttccaaacaag

SEQ ID NO: 94201 - DNA, 25 bp, probe
acatattcttctctttagacgacct

SEQ ID NO: 94202 - DNA, 25 bp, probe
atctgatgtctgaagaggagtggag

SEQ ID NO: 94203 - DNA, 25 bp, probe
atgttacccagagaactttccaaac

SEQ ID NO: 94204 - DNA, 25 bp, probe
taagtgcctgtttgagtttactgaa

SEQ ID NO: 94205 - DNA, 25 bp, probe
ttaagtgcctgtttgagtttactga

SEQ ID NO: 94206 - DNA, 25 bp, probe
atgttatgttacccagagaactttc

SEQ ID NO: 94207 - DNA, 25 bp, probe
tattcttctctttagacgacctctt

SEQ ID NO: 94208 - DNA, 25 bp, probe
aaccacatattcttctctttagacg

SEQ ID NO: 94209 - DNA, 25 bp, probe
gttacccagagaactttccaaacaa

SEQ ID NO: 94210 - DNA, 25 bp, probe
ttctctttagacgacctcttccaaa

SEQ ID NO: 94211 - DNA, 25 bp, probe
catattcttctctttagacgacctc

SEQ ID NO: 94212 - DNA, 25 bp, probe
ttcttctctttagacgacctcttcc

SEQ ID NO: 94213 - DNA, 25 bp, probe
atattcttctctttagacgacctct

SEQ ID NO: 94214 - DNA, 25 bp, probe
aagtgcctgtttgagtttactgaaa

SEQ ID NO: 94215 - DNA, 25 bp, probe
cttctctttagacgacctcttccaa

SEQ ID NO: 94216 - DNA, 25 bp, probe
tacaaatctttcatccatacctgtg

SEQ ID NO: 94217 - DNA, 25 bp, probe
agccagaaccacatattcttctctt

SEQ ID NO: 94218 - DNA, 25 bp, probe
atgagccagaaccacatattcttct

SEQ ID NO: 94219 - DNA, 25 bp, probe
tgcaagtaggttactgtaagatgtt

SEQ ID NO: 94220 - DNA, 25 bp, probe
ctgcaagtaggttactgtaagatgt

SEQ ID NO: 94221 - DNA, 25 bp, probe
actgcaagtaggttactgtaagatg

SEQ ID NO: 94222 - DNA, 25 bp, probe
aactgcaagtaggttactgtaagat

SEQ ID NO: 94223 - DNA, 25 bp, probe
catgttatgttacccagagaacttt

SEQ ID NO: 94224 - DNA, 25 bp, probe
gcatgttatgttacccagagaactt

SEQ ID NO: 94225 - DNA, 25 bp, probe
caactgcaagtaggttactgtaaga

SEQ ID NO: 94226 - DNA, 25 bp, probe
acaaatctttcatccatacctgtgc

SEQ ID NO: 94227 - DNA, 25 bp, probe
catgagccagaaccacatattcttc

SEQ ID NO: 94228 - DNA, 25 bp, probe
aaactcatctgatgtctgaagagga

SEQ ID NO: 94229 - DNA, 25 bp, probe
tacctgtgcatgagctgtattcttc

SEQ ID NO: 94230 - DNA, 25 bp, probe
gagccagaaccacatattcttctct

SEQ ID NO: 94231 - DNA, 25 bp, probe
gtacaaatctttcatccatacctgt

SEQ ID NO: 94232 - DNA, 25 bp, probe
catctgatgtctgaagaggagtgga

SEQ ID NO: 94233 - DNA, 25 bp, probe
tcttctctttagacgacctcttcca

SEQ ID NO: 94234 - DNA, 25 bp, probe
gcagtatctcttacatcagtagcat

SEQ ID NO: 94235 - DNA, 25 bp, probe
gagaatgtccaaggtgtagtcatac

SEQ ID NO: 94236 - DNA, 25 bp, probe
agagaatgtccaaggtgtagtcata

SEQ ID NO: 94237 - DNA, 25 bp, probe
accttagtcatcagatatgcttact

SEQ ID NO: 94238 - DNA, 25 bp, probe
aaccttagtcatcagatatgcttac

SEQ ID NO: 94239 - DNA, 25 bp, probe
cagtatctcttacatcagtagcatt

SEQ ID NO: 94240 - DNA, 25 bp, probe
gagagaatgtccaaggtgtagtcat

SEQ ID NO: 94241 - DNA, 25 bp, probe
caataacagatggtgctgctaattc

SEQ ID NO: 94242 - DNA, 25 bp, probe
tcaataacagatggtgctgctaatt

SEQ ID NO: 94243 - DNA, 25 bp, probe
ttcaataacagatggtgctgctaat

SEQ ID NO: 94244 - DNA, 25 bp, probe
aataacagatggtgctgctaattcc

SEQ ID NO: 94245 - DNA, 25 bp, probe
agagtctctgatacacagtaattgt

SEQ ID NO: 94246 - DNA, 25 bp, probe
atgcagtatctcttacatcagtagc

SEQ ID NO: 94247 - DNA, 25 bp, probe
acttgcttgtattgtaaatgtggat

SEQ ID NO: 94248 - DNA, 25 bp, probe
gctgctaattcccaacatttcttaa

SEQ ID NO: 94249 - DNA, 25 bp, probe
tgctatttcaataacagatggtgct

SEQ ID NO: 94250 - DNA, 25 bp, probe
ctgatgaagaagcatagacgaaatg

SEQ ID NO: 94251 - DNA, 25 bp, probe
agatgttagggtataagttgctgta

SEQ ID NO: 94252 - DNA, 25 bp, probe
tagatgttagggtataagttgctgt

SEQ ID NO: 94253 - DNA, 25 bp, probe
tgtagatgttagggtataagttgct

SEQ ID NO: 94254 - DNA, 25 bp, probe
taatgtttcttagagccaagtgtct

SEQ ID NO: 94255 - DNA, 25 bp, probe
gtagatgttagggtataagttgctg

SEQ ID NO: 94256 - DNA, 25 bp, probe
tgctgctaattcccaacatttctta

SEQ ID NO: 94257 - DNA, 25 bp, probe
ttaatgtttcttagagccaagtgtc

SEQ ID NO: 94258 - DNA, 25 bp, probe
cttaatgtttcttagagccaagtgt

SEQ ID NO: 94259 - DNA, 25 bp, probe
atgtttcttagagccaagtgtcttt

SEQ ID NO: 94260 - DNA, 25 bp, probe
aatgtttcttagagccaagtgtctt

SEQ ID NO: 94261 - DNA, 25 bp, probe
tttgtataagccacttgtcttgaaa

SEQ ID NO: 94262 - DNA, 25 bp, probe
cctgatgaagaagcatagacgaaat

SEQ ID NO: 94263 - DNA, 25 bp, probe
ttgctatttcaataacagatggtgc

SEQ ID NO: 94264 - DNA, 25 bp, probe
tacttgcttgtattgtaaatgtgga

SEQ ID NO: 94265 - DNA, 25 bp, probe
gaaagaactctgttaaactcaccat

SEQ ID NO: 94266 - DNA, 25 bp, probe
tcacttaatgtttcttagagccaag

SEQ ID NO: 94267 - DNA, 25 bp, probe
atttgtataagccacttgtcttgaa

SEQ ID NO: 94268 - DNA, 25 bp, probe
ggaaatcctttacttcatcaacaca

SEQ ID NO: 94269 - DNA, 25 bp, probe
tggaaatcctttacttcatcaacac

SEQ ID NO: 94270 - DNA, 25 bp, probe
atgaaagcccaagaaattgaaagaa

SEQ ID NO: 94271 - DNA, 25 bp, probe
aatgaaagcccaagaaattgaaaga

SEQ ID NO: 94272 - DNA, 25 bp, probe
ccttgctatttcaataacagatggt

SEQ ID NO: 94273 - DNA, 25 bp, probe
agaatgtccaaggtgtagtcatacc

SEQ ID NO: 94274 - DNA, 25 bp, probe
ttcacttaatgtttcttagagccaa

SEQ ID NO: 94275 - DNA, 25 bp, probe
tttcacttaatgtttcttagagcca

SEQ ID NO: 94276 - DNA, 25 bp, probe
tgatgaagaagcatagacgaaatgg

SEQ ID NO: 94277 - DNA, 25 bp, probe
caaatgaaagcccaagaaattgaaa

SEQ ID NO: 94278 - DNA, 25 bp, probe
gattactgtcagaactgtcagcatt

SEQ ID NO: 94279 - DNA, 25 bp, probe
ctcattgctccttctgactctgtaa

SEQ ID NO: 94280 - DNA, 25 bp, probe
tgattactgtcagaactgtcagcat

SEQ ID NO: 94281 - DNA, 25 bp, probe
ttgattactgtcagaactgtcagca

SEQ ID NO: 94282 - DNA, 25 bp, probe
cccttctatcagtagccagtgttaa

SEQ ID NO: 94283 - DNA, 25 bp, probe
taccctttgattactgtcagaactg

SEQ ID NO: 94284 - DNA, 25 bp, probe
cctttgattactgtcagaactgtca

SEQ ID NO: 94285 - DNA, 25 bp, probe
tcctcagaatgttgacctcttctag

SEQ ID NO: 94286 - DNA, 25 bp, probe
ctcctcagaatgttgacctcttcta

SEQ ID NO: 94287 - DNA, 25 bp, probe
ccctttgattactgtcagaactgtc

SEQ ID NO: 94288 - DNA, 25 bp, probe
gtaccctttgattactgtcagaact

SEQ ID NO: 94289 - DNA, 25 bp, probe
ccttctatcagtagccagtgttaac

SEQ ID NO: 94290 - DNA, 25 bp, probe
ctttgattactgtcagaactgtcag

SEQ ID NO: 94291 - DNA, 25 bp, probe
gtggagtgcagttcagaggttataa

SEQ ID NO: 94292 - DNA, 25 bp, probe
attactgtcagaactgtcagcattt

SEQ ID NO: 94293 - DNA, 25 bp, probe
tcattgctccttctgactctgtaaa

SEQ ID NO: 94294 - DNA, 25 bp, probe
tcccttctatcagtagccagtgtta

SEQ ID NO: 94295 - DNA, 25 bp, probe
cttctatcagtagccagtgttaact

SEQ ID NO: 94296 - DNA, 25 bp, probe
tttgattactgtcagaactgtcagc

SEQ ID NO: 94297 - DNA, 25 bp, probe
accctttgattactgtcagaactgt

SEQ ID NO: 94298 - DNA, 25 bp, probe
tctatcagtagccagtgttaactag

SEQ ID NO: 94299 - DNA, 25 bp, probe
ttactgtcagaactgtcagcatttg

SEQ ID NO: 94300 - DNA, 25 bp, probe
ctatcagtagccagtgttaactagt

SEQ ID NO: 94301 - DNA, 25 bp, probe
ttctatcagtagccagtgttaacta

SEQ ID NO: 94302 - DNA, 25 bp, probe
tgcagttcagaggttataaatagct

SEQ ID NO: 94303 - DNA, 25 bp, probe
gtgcagttcagaggttataaatagc

SEQ ID NO: 94304 - DNA, 25 bp, probe
ccttctatggatatgtgtgcaattt

SEQ ID NO: 94305 - DNA, 25 bp, probe
ggagtgcagttcagaggttataaat

SEQ ID NO: 94306 - DNA, 25 bp, probe
agtaccctttgattactgtcagaac

SEQ ID NO: 94307 - DNA, 25 bp, probe
acctcctcagaatgttgacctcttc

SEQ ID NO: 94308 - DNA, 25 bp, probe
gacctcctcagaatgttgacctctt

SEQ ID NO: 94309 - DNA, 25 bp, probe
aagtaccctttgattactgtcagaa

SEQ ID NO: 94310 - DNA, 25 bp, probe
cccttctatggatatgtgtgcaatt

SEQ ID NO: 94311 - DNA, 25 bp, probe
ttcagaggttataaatagctggcag

SEQ ID NO: 94312 - DNA, 25 bp, probe
agttcagaggttataaatagctggc

SEQ ID NO: 94313 - DNA, 25 bp, probe
gcagttcagaggttataaatagctg

SEQ ID NO: 94314 - DNA, 25 bp, probe
ttaagtggctcattgctccttctga

SEQ ID NO: 94315 - DNA, 25 bp, probe
gttcagaggttataaatagctggca

SEQ ID NO: 94316 - DNA, 25 bp, probe
aaagtaccctttgattactgtcaga

SEQ ID NO: 94317 - DNA, 25 bp, probe
agtgcagttcagaggttataaatag

SEQ ID NO: 94318 - DNA, 25 bp, probe
gagtgcagttcagaggttataaata

SEQ ID NO: 94319 - DNA, 25 bp, probe
tggagtgcagttcagaggttataaa

SEQ ID NO: 94320 - DNA, 25 bp, probe
cagttcagaggttataaatagctgg

SEQ ID NO: 94321 - DNA, 25 bp, probe
gctcattgctccttctgactctgta

SEQ ID NO: 94322 - DNA, 25 bp, probe
aattgtgaagcaggtgatagaagag

SEQ ID NO: 94323 - DNA, 25 bp, probe
agatgtgattgctcagtgtattctc

SEQ ID NO: 94324 - DNA, 25 bp, probe
gagatgtgattgctcagtgtattct

SEQ ID NO: 94325 - DNA, 25 bp, probe
ggtgattatctatgtgatgctgtgc

SEQ ID NO: 94326 - DNA, 25 bp, probe
gatgtgattgctcagtgtattctcc

SEQ ID NO: 94327 - DNA, 25 bp, probe
attatctatgtgatgctgtgcggat

SEQ ID NO: 94328 - DNA, 25 bp, probe
gtgattatctatgtgatgctgtgcg

SEQ ID NO: 94329 - DNA, 25 bp, probe
cgagatgtgattgctcagtgtattc

SEQ ID NO: 94330 - DNA, 25 bp, probe
ttatctatgtgatgctgtgcggata

SEQ ID NO: 94331 - DNA, 25 bp, probe
gtctatatccacgaccatgagaatg

SEQ ID NO: 94332 - DNA, 25 bp, probe
tgtctatatccacgaccatgagaat

SEQ ID NO: 94333 - DNA, 25 bp, probe
attgtgaagcaggtgatagaagagc

SEQ ID NO: 94334 - DNA, 25 bp, probe
cgactataccgacctttctgattag

SEQ ID NO: 94335 - DNA, 25 bp, probe
gattatctatgtgatgctgtgcgga

SEQ ID NO: 94336 - DNA, 25 bp, probe
taccgacctttctgattagtaaaca

SEQ ID NO: 94337 - DNA, 25 bp, probe
gaaattgtgaagcaggtgatagaag

SEQ ID NO: 94338 - DNA, 25 bp, probe
aaattgtgaagcaggtgatagaaga

SEQ ID NO: 94339 - DNA, 25 bp, probe
agaaattgtgaagcaggtgatagaa

SEQ ID NO: 94340 - DNA, 25 bp, probe
tatctatgtgatgctgtgcggatac

SEQ ID NO: 94341 - DNA, 25 bp, probe
aaagaaggcatcagaaggagaaatc

SEQ ID NO: 94342 - DNA, 25 bp, probe
caaagaaggcatcagaaggagaaat

SEQ ID NO: 94343 - DNA, 25 bp, probe
tgattatctatgtgatgctgtgcgg

SEQ ID NO: 94344 - DNA, 25 bp, probe
cagaaattgtgaagcaggtgataga

SEQ ID NO: 94345 - DNA, 25 bp, probe
gggtgattatctatgtgatgctgtg

SEQ ID NO: 94346 - DNA, 25 bp, probe
ccgactataccgacctttctgatta

SEQ ID NO: 94347 - DNA, 25 bp, probe
gtgtctatatccacgaccatgagaa

SEQ ID NO: 94348 - DNA, 25 bp, probe
ataccgacctttctgattagtaaac

SEQ ID NO: 94349 - DNA, 25 bp, probe
agaaatctggcatcatacctacctc

SEQ ID NO: 94350 - DNA, 25 bp, probe
gagaaatctggcatcatacctacct

SEQ ID NO: 94351 - DNA, 25 bp, probe
ccgagatgtgattgctcagtgtatt

SEQ ID NO: 94352 - DNA, 25 bp, probe
caaaggatatgcgaagaaagatcat

SEQ ID NO: 94353 - DNA, 25 bp, probe
attctgcggaagaggaagttacttg

SEQ ID NO: 94354 - DNA, 25 bp, probe
cattctgcggaagaggaagttactt

SEQ ID NO: 94355 - DNA, 25 bp, probe
gaaatctggcatcatacctacctca

SEQ ID NO: 94356 - DNA, 25 bp, probe
aagaaggcatcagaaggagaaatct

SEQ ID NO: 94357 - DNA, 25 bp, probe
ccaacatgagaatccaggatctgaa

SEQ ID NO: 94358 - DNA, 25 bp, probe
ccaaaggatatgcgaagaaagatca

SEQ ID NO: 94359 - DNA, 25 bp, probe
agtaaacagttgaatcaaggactct

SEQ ID NO: 94360 - DNA, 25 bp, probe
aaaggatatgcgaagaaagatcatg

SEQ ID NO: 94361 - DNA, 25 bp, probe
aaatctggcatcatacctacctcac

SEQ ID NO: 94362 - DNA, 25 bp, probe
ccgacctttctgattagtaaacagt

SEQ ID NO: 94363 - DNA, 25 bp, probe
accgacctttctgattagtaaacag

SEQ ID NO: 94364 - DNA, 25 bp, probe
atttgtaagatgacagatgatgctg

SEQ ID NO: 94365 - DNA, 25 bp, probe
ctacacttacaacaagagctgtgac

SEQ ID NO: 94366 - DNA, 25 bp, probe
tcgttcctgaatacaatcttgagta

SEQ ID NO: 94367 - DNA, 25 bp, probe
ttcgttcctgaatacaatcttgagt

SEQ ID NO: 94368 - DNA, 25 bp, probe
cttcgttcctgaatacaatcttgag

SEQ ID NO: 94369 - DNA, 25 bp, probe
acttcgttcctgaatacaatcttga

SEQ ID NO: 94370 - DNA, 25 bp, probe
cctgaatacaatcttgagtaactgg

SEQ ID NO: 94371 - DNA, 25 bp, probe
cgttcctgaatacaatcttgagtaa

SEQ ID NO: 94372 - DNA, 25 bp, probe
tcctgaatacaatcttgagtaactg

SEQ ID NO: 94373 - DNA, 25 bp, probe
atcagaagtgctggttagatagtaa

SEQ ID NO: 94374 - DNA, 25 bp, probe
aatcagaagtgctggttagatagta

SEQ ID NO: 94375 - DNA, 25 bp, probe
ttcctgaatacaatcttgagtaact

SEQ ID NO: 94376 - DNA, 25 bp, probe
gttcctgaatacaatcttgagtaac

SEQ ID NO: 94377 - DNA, 25 bp, probe
ttatgcaatggacctgattctagtt

SEQ ID NO: 94378 - DNA, 25 bp, probe
agttatgcaatggacctgattctag

SEQ ID NO: 94379 - DNA, 25 bp, probe
tctctttctaatcttgctggtttca

SEQ ID NO: 94380 - DNA, 25 bp, probe
tcattctctttctaatcttgctggt

SEQ ID NO: 94381 - DNA, 25 bp, probe
gttatgcaatggacctgattctagt

SEQ ID NO: 94382 - DNA, 25 bp, probe
ctcattctctttctaatcttgctgg

SEQ ID NO: 94383 - DNA, 25 bp, probe
cctcattctctttctaatcttgctg

SEQ ID NO: 94384 - DNA, 25 bp, probe
aaagaaaccaaagatttaagacggg

SEQ ID NO: 94385 - DNA, 25 bp, probe
ttctctttctaatcttgctggtttc

SEQ ID NO: 94386 - DNA, 25 bp, probe
cattctctttctaatcttgctggtt

SEQ ID NO: 94387 - DNA, 25 bp, probe
gcctcattctctttctaatcttgct

SEQ ID NO: 94388 - DNA, 25 bp, probe
tgaatacaatcttgagtaactggga

SEQ ID NO: 94389 - DNA, 25 bp, probe
ctgaatacaatcttgagtaactggg

SEQ ID NO: 94390 - DNA, 25 bp, probe
tctgggtgtaaagagtaaatatgcc

SEQ ID NO: 94391 - DNA, 25 bp, probe
gaaagaaaccaaagatttaagacgg

SEQ ID NO: 94392 - DNA, 25 bp, probe
ggaaagaaaccaaagatttaagacg

SEQ ID NO: 94393 - DNA, 25 bp, probe
attctctttctaatcttgctggttt

SEQ ID NO: 94394 - DNA, 25 bp, probe
ggttcttctaagcctttattgtccc

SEQ ID NO: 94395 - DNA, 25 bp, probe
ctctttctaatcttgctggtttcaa

SEQ ID NO: 94396 - DNA, 25 bp, probe
gccaaatggttccaataatgaatga

SEQ ID NO: 94397 - DNA, 25 bp, probe
agccaaatggttccaataatgaatg

SEQ ID NO: 94398 - DNA, 25 bp, probe
aagccaaatggttccaataatgaat

SEQ ID NO: 94399 - DNA, 25 bp, probe
caagccaaatggttccaataatgaa

SEQ ID NO: 94400 - DNA, 25 bp, probe
aatcttgagtaactgggaaagtctg

SEQ ID NO: 94401 - DNA, 25 bp, probe
caatcttgagtaactgggaaagtct

SEQ ID NO: 94402 - DNA, 25 bp, probe
tacaatcttgagtaactgggaaagt

SEQ ID NO: 94403 - DNA, 25 bp, probe
gcaatggacctgattctagtttatt

SEQ ID NO: 94404 - DNA, 25 bp, probe
atgttcaataagaaacccagccatt

SEQ ID NO: 94405 - DNA, 25 bp, probe
acaatcttgagtaactgggaaagtc

SEQ ID NO: 94406 - DNA, 25 bp, probe
ttctgggtgtaaagagtaaatatgc

SEQ ID NO: 94407 - DNA, 25 bp, probe
gaatacaatcttgagtaactgggaa

SEQ ID NO: 94408 - DNA, 25 bp, probe
atacaatcttgagtaactgggaaag

SEQ ID NO: 94409 - DNA, 25 bp, probe
atcttgagtaactgggaaagtctga

SEQ ID NO: 94410 - DNA, 25 bp, probe
gtatagtggtatgtgcctgtagtcc

SEQ ID NO: 94411 - DNA, 25 bp, probe
ggtatagtggtatgtgcctgtagtc

SEQ ID NO: 94412 - DNA, 25 bp, probe
caaagaagaatcaacagggacactt

SEQ ID NO: 94413 - DNA, 25 bp, probe
aattagctgggtatagtggtatgtg

SEQ ID NO: 94414 - DNA, 25 bp, probe
aaattagctgggtatagtggtatgt

SEQ ID NO: 94415 - DNA, 25 bp, probe
aatagatacctgtttgactttgagg

SEQ ID NO: 94416 - DNA, 25 bp, probe
tctcgttatttattggaggtattgt

SEQ ID NO: 94417 - DNA, 25 bp, probe
tatagtggtatgtgcctgtagtccc

SEQ ID NO: 94418 - DNA, 25 bp, probe
aaatagatacctgtttgactttgag

SEQ ID NO: 94419 - DNA, 25 bp, probe
attagctgggtatagtggtatgtgc

SEQ ID NO: 94420 - DNA, 25 bp, probe
aaagaagaatcaacagggacacttt

SEQ ID NO: 94421 - DNA, 25 bp, probe
gggtatagtggtatgtgcctgtagt

SEQ ID NO: 94422 - DNA, 25 bp, probe
tgggtatagtggtatgtgcctgtag

SEQ ID NO: 94423 - DNA, 25 bp, probe
ctgggtatagtggtatgtgcctgta

SEQ ID NO: 94424 - DNA, 25 bp, probe
aacacagtgagactccatctcttaa

SEQ ID NO: 94425 - DNA, 25 bp, probe
tcgttatttattggaggtattgttt

SEQ ID NO: 94426 - DNA, 25 bp, probe
ctcgttatttattggaggtattgtt

SEQ ID NO: 94427 - DNA, 25 bp, probe
gcaaagaagaatcaacagggacact

SEQ ID NO: 94428 - DNA, 25 bp, probe
caacacagtgagactccatctctta

SEQ ID NO: 94429 - DNA, 25 bp, probe
aagaagaatcaacagggacactttt

SEQ ID NO: 94430 - DNA, 25 bp, probe
atctcgttatttattggaggtattg

SEQ ID NO: 94431 - DNA, 25 bp, probe
cagtgtctctgtttaagtataatca

SEQ ID NO: 94432 - DNA, 25 bp, probe
acacagtgagactccatctcttaaa

SEQ ID NO: 94433 - DNA, 25 bp, probe
ttagctgggtatagtggtatgtgcc

SEQ ID NO: 94434 - DNA, 25 bp, probe
aaaattagctgggtatagtggtatg

SEQ ID NO: 94435 - DNA, 25 bp, probe
agtgtctctgtttaagtataatcag

SEQ ID NO: 94436 - DNA, 25 bp, probe
gatcatgtccttacactccagcctg

SEQ ID NO: 94437 - DNA, 25 bp, probe
cgttatttattggaggtattgttta

SEQ ID NO: 94438 - DNA, 25 bp, probe
tgcaaagaagaatcaacagggacac

SEQ ID NO: 94439 - DNA, 25 bp, probe
ctgcaaagaagaatcaacagggaca

SEQ ID NO: 94440 - DNA, 25 bp, probe
aaaatagatacctgtttgactttga

SEQ ID NO: 94441 - DNA, 25 bp, probe
ctgtttgactttgaggtagtccaga

SEQ ID NO: 94442 - DNA, 25 bp, probe
tatctcgttatttattggaggtatt

SEQ ID NO: 94443 - DNA, 25 bp, probe
aatatctcgttatttattggaggta

SEQ ID NO: 94444 - DNA, 25 bp, probe
tgtttgactttgaggtagtccagac

SEQ ID NO: 94445 - DNA, 25 bp, probe
tagctgggtatagtggtatgtgcct

SEQ ID NO: 94446 - DNA, 25 bp, probe
ttttaatgtgtgcaaaagcccaaag

SEQ ID NO: 94447 - DNA, 25 bp, probe
aaatatctcgttatttattggaggt

SEQ ID NO: 94448 - DNA, 25 bp, probe
atagatacctgtttgactttgaggt

SEQ ID NO: 94449 - DNA, 25 bp, probe
gtttgactttgaggtagtccagacc

SEQ ID NO: 94450 - DNA, 25 bp, probe
cctgtttgactttgaggtagtccag

SEQ ID NO: 94451 - DNA, 25 bp, probe
atatctcgttatttattggaggtat

SEQ ID NO: 94452 - DNA, 25 bp, probe
tcatctctgaaatatctcgttattt

SEQ ID NO: 94453 - DNA, 25 bp, probe
atagtggtatgtgcctgtagtccca

SEQ ID NO: 94454 - DNA, 25 bp, probe
agtgttggatattctgtgattgatt

SEQ ID NO: 94455 - DNA, 25 bp, probe
cagtgttggatattctgtgattgat

SEQ ID NO: 94456 - DNA, 25 bp, probe
ccagtgttggatattctgtgattga

SEQ ID NO: 94457 - DNA, 25 bp, probe
accagtgttggatattctgtgattg

SEQ ID NO: 94458 - DNA, 25 bp, probe
caccagtgttggatattctgtgatt

SEQ ID NO: 94459 - DNA, 25 bp, probe
gtgttggatattctgtgattgattt

SEQ ID NO: 94460 - DNA, 25 bp, probe
acaccagtgttggatattctgtgat

SEQ ID NO: 94461 - DNA, 25 bp, probe
tttctgtgtcctaagccctttcatg

SEQ ID NO: 94462 - DNA, 25 bp, probe
tattctgtgattgattttggtcctc

SEQ ID NO: 94463 - DNA, 25 bp, probe
acagtcttccttgcctttagagtga

SEQ ID NO: 94464 - DNA, 25 bp, probe
attctgtgattgattttggtcctcc

SEQ ID NO: 94465 - DNA, 25 bp, probe
tggatattctgtgattgattttggt

SEQ ID NO: 94466 - DNA, 25 bp, probe
cagtcttccttgcctttagagtgac

SEQ ID NO: 94467 - DNA, 25 bp, probe
atattctgtgattgattttggtcct

SEQ ID NO: 94468 - DNA, 25 bp, probe
gatattctgtgattgattttggtcc

SEQ ID NO: 94469 - DNA, 25 bp, probe
ggatattctgtgattgattttggtc

SEQ ID NO: 94470 - DNA, 25 bp, probe
cacagtcttccttgcctttagagtg

SEQ ID NO: 94471 - DNA, 25 bp, probe
ttctgtgattgattttggtcctcct

SEQ ID NO: 94472 - DNA, 25 bp, probe
ttggatattctgtgattgattttgg

SEQ ID NO: 94473 - DNA, 25 bp, probe
ttttctgtgtcctaagccctttcat

SEQ ID NO: 94474 - DNA, 25 bp, probe
tccacagtcttccttgcctttagag

SEQ ID NO: 94475 - DNA, 25 bp, probe
ctccacagtcttccttgcctttaga

SEQ ID NO: 94476 - DNA, 25 bp, probe
tctgtgattgattttggtcctcctc

SEQ ID NO: 94477 - DNA, 25 bp, probe
ccacagtcttccttgcctttagagt

SEQ ID NO: 94478 - DNA, 25 bp, probe
aacaccagtgttggatattctgtga

SEQ ID NO: 94479 - DNA, 25 bp, probe
tgttggatattctgtgattgatttt

SEQ ID NO: 94480 - DNA, 25 bp, probe
gttggatattctgtgattgattttg

SEQ ID NO: 94481 - DNA, 25 bp, probe
agtcttccttgcctttagagtgacc

SEQ ID NO: 94482 - DNA, 25 bp, probe
aatctggcttggttcgagataggag

SEQ ID NO: 94483 - DNA, 25 bp, probe
gaatctggcttggttcgagatagga

SEQ ID NO: 94484 - DNA, 25 bp, probe
cttttctgtgtcctaagccctttca

SEQ ID NO: 94485 - DNA, 25 bp, probe
tacagtaaagttgcaatgaagaggt

SEQ ID NO: 94486 - DNA, 25 bp, probe
atacagtaaagttgcaatgaagagg

SEQ ID NO: 94487 - DNA, 25 bp, probe
ctgtgattgattttggtcctcctcc

SEQ ID NO: 94488 - DNA, 25 bp, probe
cagtaaagttgcaatgaagaggttc

SEQ ID NO: 94489 - DNA, 25 bp, probe
cttccttgcctttagagtgaccctg

SEQ ID NO: 94490 - DNA, 25 bp, probe
cctccacagtcttccttgcctttag

SEQ ID NO: 94491 - DNA, 25 bp, probe
acagtaaagttgcaatgaagaggtt

SEQ ID NO: 94492 - DNA, 25 bp, probe
tatttatctgagcccacaggtggaa

SEQ ID NO: 94493 - DNA, 25 bp, probe
ttcgagataggagcttttctgtgtc

SEQ ID NO: 94494 - DNA, 25 bp, probe
cttggttcgagataggagcttttct

SEQ ID NO: 94495 - DNA, 25 bp, probe
cccacctatttatctgagcccacag

SEQ ID NO: 94496 - DNA, 25 bp, probe
aaacaccagtgttggatattctgtg

SEQ ID NO: 94497 - DNA, 25 bp, probe
caaacaccagtgttggatattctgt

SEQ ID NO: 94498 - DNA, 25 bp, probe
gtgtgactgactaccttgacttgaa

SEQ ID NO: 94499 - DNA, 25 bp, probe
tcctctcagtaatgaacaacagcat

SEQ ID NO: 94500 - DNA, 25 bp, probe
gaaataaagcgtcctctcagtaatg

SEQ ID NO: 94501 - DNA, 25 bp, probe
actaccttgacttgaaatgctcttt

SEQ ID NO: 94502 - DNA, 25 bp, probe
tgactgactaccttgacttgaaatg

SEQ ID NO: 94503 - DNA, 25 bp, probe
gtgactgactaccttgacttgaaat

SEQ ID NO: 94504 - DNA, 25 bp, probe
gactaccttgacttgaaatgctctt

SEQ ID NO: 94505 - DNA, 25 bp, probe
ctctcagtaatgaacaacagcattc

SEQ ID NO: 94506 - DNA, 25 bp, probe
gtcctctcagtaatgaacaacagca

SEQ ID NO: 94507 - DNA, 25 bp, probe
aataaagcgtcctctcagtaatgaa

SEQ ID NO: 94508 - DNA, 25 bp, probe
aaataaagcgtcctctcagtaatga

SEQ ID NO: 94509 - DNA, 25 bp, probe
ctgactaccttgacttgaaatgctc

SEQ ID NO: 94510 - DNA, 25 bp, probe
ataaagcgtcctctcagtaatgaac

SEQ ID NO: 94511 - DNA, 25 bp, probe
cctctcagtaatgaacaacagcatt

SEQ ID NO: 94512 - DNA, 25 bp, probe
gactgactaccttgacttgaaatgc

SEQ ID NO: 94513 - DNA, 25 bp, probe
tgtgactgactaccttgacttgaaa

SEQ ID NO: 94514 - DNA, 25 bp, probe
aagcgtcctctcagtaatgaacaac

SEQ ID NO: 94515 - DNA, 25 bp, probe
agtgtgactgactaccttgacttga

SEQ ID NO: 94516 - DNA, 25 bp, probe
tgactaccttgacttgaaatgctct

SEQ ID NO: 94517 - DNA, 25 bp, probe
tagcccaaactgagtacaacttaaa

SEQ ID NO: 94518 - DNA, 25 bp, probe
ttagcccaaactgagtacaacttaa

SEQ ID NO: 94519 - DNA, 25 bp, probe
actgactaccttgacttgaaatgct

SEQ ID NO: 94520 - DNA, 25 bp, probe
acaacttaaagtacctcttctaccc

SEQ ID NO: 94521 - DNA, 25 bp, probe
cttagcccaaactgagtacaactta

SEQ ID NO: 94522 - DNA, 25 bp, probe
cagtaatgaacaacagcattcagtt

SEQ ID NO: 94523 - DNA, 25 bp, probe
gaccaggagattgctaactgcttag

SEQ ID NO: 94524 - DNA, 25 bp, probe
ctcagtaatgaacaacagcattcag

SEQ ID NO: 94525 - DNA, 25 bp, probe
taaagcgtcctctcagtaatgaaca

SEQ ID NO: 94526 - DNA, 25 bp, probe
tctcagtaatgaacaacagcattca

SEQ ID NO: 94527 - DNA, 25 bp, probe
tcagtaatgaacaacagcattcagt

SEQ ID NO: 94528 - DNA, 25 bp, probe
agcccaaactgagtacaacttaaag

SEQ ID NO: 94529 - DNA, 25 bp, probe
agtaatgaacaacagcattcagtta

SEQ ID NO: 94530 - DNA, 25 bp, probe
cccaaactgagtacaacttaaagta

SEQ ID NO: 94531 - DNA, 25 bp, probe
caagtgtgaccaggagattgctaac

SEQ ID NO: 94532 - DNA, 25 bp, probe
ggaaataaagcgtcctctcagtaat

SEQ ID NO: 94533 - DNA, 25 bp, probe
gcccaaactgagtacaacttaaagt

SEQ ID NO: 94534 - DNA, 25 bp, probe
cgtcctctcagtaatgaacaacagc

SEQ ID NO: 94535 - DNA, 25 bp, probe
gcgtcctctcagtaatgaacaacag

SEQ ID NO: 94536 - DNA, 25 bp, probe
aagtgtgaccaggagattgctaact

SEQ ID NO: 94537 - DNA, 25 bp, probe
gtaatgaacaacagcattcagttat

SEQ ID NO: 94538 - DNA, 25 bp, probe
aaagcgtcctctcagtaatgaacaa

SEQ ID NO: 94539 - DNA, 25 bp, probe
tgaccaggagattgctaactgctta

SEQ ID NO: 94540 - DNA, 25 bp, probe
cattcagttatttgcagaagggaac

SEQ ID NO: 94541 - DNA, 25 bp, probe
agcgtcctctcagtaatgaacaaca

SEQ ID NO: 94542 - DNA, 25 bp, probe
gaaggtacagccattcagataagtg

SEQ ID NO: 94543 - DNA, 25 bp, probe
agttagatagtgctctgtgcctaag

SEQ ID NO: 94544 - DNA, 25 bp, probe
gccattcagataagtggaactattg

SEQ ID NO: 94545 - DNA, 25 bp, probe
agccattcagataagtggaactatt

SEQ ID NO: 94546 - DNA, 25 bp, probe
cagccattcagataagtggaactat

SEQ ID NO: 94547 - DNA, 25 bp, probe
cagttagatagtgctctgtgcctaa

SEQ ID NO: 94548 - DNA, 25 bp, probe
tgactgaaatgtatccctcgtttat

SEQ ID NO: 94549 - DNA, 25 bp, probe
cataatctttctttgctgtgactga

SEQ ID NO: 94550 - DNA, 25 bp, probe
gtgactgaaatgtatccctcgttta

SEQ ID NO: 94551 - DNA, 25 bp, probe
gactgaaatgtatccctcgtttatc

SEQ ID NO: 94552 - DNA, 25 bp, probe
attcagataagtggaactattgagt

SEQ ID NO: 94553 - DNA, 25 bp, probe
acagccattcagataagtggaacta

SEQ ID NO: 94554 - DNA, 25 bp, probe
tacagccattcagataagtggaact

SEQ ID NO: 94555 - DNA, 25 bp, probe
ttctttgctgtgactgaaatgtatc

SEQ ID NO: 94556 - DNA, 25 bp, probe
aagatgataccttaaactcccactg

SEQ ID NO: 94557 - DNA, 25 bp, probe
tccagcaaagatgataccttaaact

SEQ ID NO: 94558 - DNA, 25 bp, probe
tttgtttgtgattgctgctaaagtc

SEQ ID NO: 94559 - DNA, 25 bp, probe
aaatgtatccctcgtttatcatccc

SEQ ID NO: 94560 - DNA, 25 bp, probe
ctcattcaggaaatcaaatcagtct

SEQ ID NO: 94561 - DNA, 25 bp, probe
cagcaaagatgataccttaaactcc

SEQ ID NO: 94562 - DNA, 25 bp, probe
ccagcaaagatgataccttaaactc

SEQ ID NO: 94563 - DNA, 25 bp, probe
tgttccagcaaagatgataccttaa

SEQ ID NO: 94564 - DNA, 25 bp, probe
agcaaagatgataccttaaactccc

SEQ ID NO: 94565 - DNA, 25 bp, probe
gaaatgtatccctcgtttatcatcc

SEQ ID NO: 94566 - DNA, 25 bp, probe
caaagatgataccttaaactcccac

SEQ ID NO: 94567 - DNA, 25 bp, probe
gaaatgctccagtcacaccttatag

SEQ ID NO: 94568 - DNA, 25 bp, probe
aaagatgataccttaaactcccact

SEQ ID NO: 94569 - DNA, 25 bp, probe
ttccagcaaagatgataccttaaac

SEQ ID NO: 94570 - DNA, 25 bp, probe
gttccagcaaagatgataccttaaa

SEQ ID NO: 94571 - DNA, 25 bp, probe
gcaaagatgataccttaaactccca

SEQ ID NO: 94572 - DNA, 25 bp, probe
cattcagataagtggaactattgag

SEQ ID NO: 94573 - DNA, 25 bp, probe
tctttgctgtgactgaaatgtatcc

SEQ ID NO: 94574 - DNA, 25 bp, probe
ccattcagataagtggaactattga

SEQ ID NO: 94575 - DNA, 25 bp, probe
tcattcaggaaatcaaatcagtctt

SEQ ID NO: 94576 - DNA, 25 bp, probe
ataatctttctttgctgtgactgaa

SEQ ID NO: 94577 - DNA, 25 bp, probe
aaaggaaagcaatcacttctcactt

SEQ ID NO: 94578 - DNA, 25 bp, probe
gtacagccattcagataagtggaac

SEQ ID NO: 94579 - DNA, 25 bp, probe
gttagatagtgctctgtgcctaagg

SEQ ID NO: 94580 - DNA, 25 bp, probe
actgaaatgtatccctcgtttatca

SEQ ID NO: 94581 - DNA, 25 bp, probe
cattcaggaaatcaaatcagtcttc

SEQ ID NO: 94582 - DNA, 25 bp, probe
acataatctttctttgctgtgactg

SEQ ID NO: 94583 - DNA, 25 bp, probe
ttagatagtgctctgtgcctaaggt

SEQ ID NO: 94584 - DNA, 25 bp, probe
tgaaatgtatccctcgtttatcatc

SEQ ID NO: 94585 - DNA, 25 bp, probe
ctgaaatgtatccctcgtttatcat

SEQ ID NO: 94586 - DNA, 25 bp, probe
ccctctttctctttcttcctttact

SEQ ID NO: 94587 - DNA, 25 bp, probe
ctctttcttcctttactttcccttg

SEQ ID NO: 94588 - DNA, 25 bp, probe
tctctttcttcctttactttccctt

SEQ ID NO: 94589 - DNA, 25 bp, probe
ttctctttcttcctttactttccct

SEQ ID NO: 94590 - DNA, 25 bp, probe
tatttaatgtgaggtttggtctgga

SEQ ID NO: 94591 - DNA, 25 bp, probe
ttcttcctttactttcccttgcttt

SEQ ID NO: 94592 - DNA, 25 bp, probe
tttcttcctttactttcccttgctt

SEQ ID NO: 94593 - DNA, 25 bp, probe
tttcttactcctcctctttctctcc

SEQ ID NO: 94594 - DNA, 25 bp, probe
ttatttaatgtgaggtttggtctgg

SEQ ID NO: 94595 - DNA, 25 bp, probe
ctttcttcctttactttcccttgct

SEQ ID NO: 94596 - DNA, 25 bp, probe
tctttcttcctttactttcccttgc

SEQ ID NO: 94597 - DNA, 25 bp, probe
tttctctttcttcctttactttccc

SEQ ID NO: 94598 - DNA, 25 bp, probe
ttctttctatttgacttgtggttga

SEQ ID NO: 94599 - DNA, 25 bp, probe
acttctttctatttgacttgtggtt

SEQ ID NO: 94600 - DNA, 25 bp, probe
aacttctttctatttgacttgtggt

SEQ ID NO: 94601 - DNA, 25 bp, probe
cttctttctatttgacttgtggttg

SEQ ID NO: 94602 - DNA, 25 bp, probe
tctttctatttgacttgtggttgaa

SEQ ID NO: 94603 - DNA, 25 bp, probe
atttaatgtgaggtttggtctggac

SEQ ID NO: 94604 - DNA, 25 bp, probe
cctctttctctttcttcctttactt

SEQ ID NO: 94605 - DNA, 25 bp, probe
ctttctctttcttcctttactttcc

SEQ ID NO: 94606 - DNA, 25 bp, probe
tttaatgtgaggtttggtctggact

SEQ ID NO: 94607 - DNA, 25 bp, probe
ctttctatttgacttgtggttgaat

SEQ ID NO: 94608 - DNA, 25 bp, probe
tttatttaatgtgaggtttggtctg

SEQ ID NO: 94609 - DNA, 25 bp, probe
ttcttactcctcctctttctctccc

SEQ ID NO: 94610 - DNA, 25 bp, probe
tagctttatatatggacatggcagg

SEQ ID NO: 94611 - DNA, 25 bp, probe
cctagctttatatatggacatggca

SEQ ID NO: 94612 - DNA, 25 bp, probe
ccctagctttatatatggacatggc

SEQ ID NO: 94613 - DNA, 25 bp, probe
ctagctttatatatggacatggcag

SEQ ID NO: 94614 - DNA, 25 bp, probe
tttctatttgacttgtggttgaatt

SEQ ID NO: 94615 - DNA, 25 bp, probe
ttaatgtgaggtttggtctggactg

SEQ ID NO: 94616 - DNA, 25 bp, probe
taacttctttctatttgacttgtgg

SEQ ID NO: 94617 - DNA, 25 bp, probe
tggcattcttgtacagtgtatattg

SEQ ID NO: 94618 - DNA, 25 bp, probe
ggcattcttgtacagtgtatattga

SEQ ID NO: 94619 - DNA, 25 bp, probe
tctttctctttcttcctttactttc

SEQ ID NO: 94620 - DNA, 25 bp, probe
ctctttctctttcttcctttacttt

SEQ ID NO: 94621 - DNA, 25 bp, probe
atttatttaatgtgaggtttggtct

SEQ ID NO: 94622 - DNA, 25 bp, probe
tctatttgacttgtggttgaattaa

SEQ ID NO: 94623 - DNA, 25 bp, probe
aagctattcctttcccttcctcttc

SEQ ID NO: 94624 - DNA, 25 bp, probe
ttctatttgacttgtggttgaatta

SEQ ID NO: 94625 - DNA, 25 bp, probe
cctcttttcttactcctcctctttc

SEQ ID NO: 94626 - DNA, 25 bp, probe
cttgcttttccctcttttcttactc

SEQ ID NO: 94627 - DNA, 25 bp, probe
cctggcattcttgtacagtgtatat

SEQ ID NO: 94628 - DNA, 25 bp, probe
cttcctttactttcccttgcttttc

SEQ ID NO: 94629 - DNA, 25 bp, probe
ttttcttactcctcctctttctctc

SEQ ID NO: 94630 - DNA, 25 bp, probe
ataactggaagctgaggagaatatg

SEQ ID NO: 94631 - DNA, 25 bp, probe
gataactggaagctgaggagaatat

SEQ ID NO: 94632 - DNA, 25 bp, probe
tgataactggaagctgaggagaata

SEQ ID NO: 94633 - DNA, 25 bp, probe
atgataactggaagctgaggagaat

SEQ ID NO: 94634 - DNA, 25 bp, probe
aatgataactggaagctgaggagaa

SEQ ID NO: 94635 - DNA, 25 bp, probe
gtggcttgcgtaaataactgtttat

SEQ ID NO: 94636 - DNA, 25 bp, probe
taactggaagctgaggagaatatgc

SEQ ID NO: 94637 - DNA, 25 bp, probe
tgtggcttgcgtaaataactgttta

SEQ ID NO: 94638 - DNA, 25 bp, probe
cttgatctcttggatctcctcagat

SEQ ID NO: 94639 - DNA, 25 bp, probe
caaacattgttggttatcgtgcttt

SEQ ID NO: 94640 - DNA, 25 bp, probe
aaatgataactggaagctgaggaga

SEQ ID NO: 94641 - DNA, 25 bp, probe
caaatgataactggaagctgaggag

SEQ ID NO: 94642 - DNA, 25 bp, probe
gtgtggcttgcgtaaataactgttt

SEQ ID NO: 94643 - DNA, 25 bp, probe
atcaaatgataactggaagctgagg

SEQ ID NO: 94644 - DNA, 25 bp, probe
ctgaagtgtggcttgcgtaaataac

SEQ ID NO: 94645 - DNA, 25 bp, probe
aatttgtaccttaagcatttcccag

SEQ ID NO: 94646 - DNA, 25 bp, probe
tggcttgcgtaaataactgtttatt

SEQ ID NO: 94647 - DNA, 25 bp, probe
tatcaaatgataactggaagctgag

SEQ ID NO: 94648 - DNA, 25 bp, probe
gcttgcgtaaataactgtttattcc

SEQ ID NO: 94649 - DNA, 25 bp, probe
ggcttgcgtaaataactgtttattc

SEQ ID NO: 94650 - DNA, 25 bp, probe
tcaaatgataactggaagctgagga

SEQ ID NO: 94651 - DNA, 25 bp, probe
gaagtgtggcttgcgtaaataactg

SEQ ID NO: 94652 - DNA, 25 bp, probe
attgttggttatcgtgcttttactg

SEQ ID NO: 94653 - DNA, 25 bp, probe
cattgttggttatcgtgcttttact

SEQ ID NO: 94654 - DNA, 25 bp, probe
taatttgtaccttaagcatttccca

SEQ ID NO: 94655 - DNA, 25 bp, probe
acattgttggttatcgtgcttttac

SEQ ID NO: 94656 - DNA, 25 bp, probe
gttggttatcgtgcttttactgaag

SEQ ID NO: 94657 - DNA, 25 bp, probe
tgttggttatcgtgcttttactgaa

SEQ ID NO: 94658 - DNA, 25 bp, probe
ttgttggttatcgtgcttttactga

SEQ ID NO: 94659 - DNA, 25 bp, probe
tgaagtgtggcttgcgtaaataact

SEQ ID NO: 94660 - DNA, 25 bp, probe
atttgtaccttaagcatttcccagc

SEQ ID NO: 94661 - DNA, 25 bp, probe
cttgcgtaaataactgtttattcca

SEQ ID NO: 94662 - DNA, 25 bp, probe
agtgtggcttgcgtaaataactgtt

SEQ ID NO: 94663 - DNA, 25 bp, probe
aagtgtggcttgcgtaaataactgt

SEQ ID NO: 94664 - DNA, 25 bp, probe
tgcgtaaataactgtttattccaaa

SEQ ID NO: 94665 - DNA, 25 bp, probe
ttgcgtaaataactgtttattccaa

SEQ ID NO: 94666 - DNA, 25 bp, probe
aacattgttggttatcgtgctttta

SEQ ID NO: 94667 - DNA, 25 bp, probe
aaacattgttggttatcgtgctttt

SEQ ID NO: 94668 - DNA, 25 bp, probe
ttaatttgtaccttaagcatttccc

SEQ ID NO: 94669 - DNA, 25 bp, probe
aactggaagctgaggagaatatgcc

SEQ ID NO: 94670 - DNA, 25 bp, probe
gctgaagtgtggcttgcgtaaataa

SEQ ID NO: 94671 - DNA, 25 bp, probe
catccaaacattgttggttatcgtg

SEQ ID NO: 94672 - DNA, 25 bp, probe
ttatcaaatgataactggaagctga

SEQ ID NO: 94673 - DNA, 25 bp, probe
tttgtaccttaagcatttcccagct

SEQ ID NO: 94674 - DNA, 25 bp, probe
gaggatttccaagagcaaggatgaa

SEQ ID NO: 94675 - DNA, 25 bp, probe
aggatttccaagagcaaggatgaaa

SEQ ID NO: 94676 - DNA, 25 bp, probe
ctgaggatttccaagagcaaggatg

SEQ ID NO: 94677 - DNA, 25 bp, probe
tgaggatttccaagagcaaggatga

SEQ ID NO: 94678 - DNA, 25 bp, probe
gttcctgaggatttccaagagcaag

SEQ ID NO: 94679 - DNA, 25 bp, probe
ggatttccaagagcaaggatgaaaa

SEQ ID NO: 94680 - DNA, 25 bp, probe
caagcagttcctgaggatttccaag

SEQ ID NO: 94681 - DNA, 25 bp, probe
cctgaggatttccaagagcaaggat

SEQ ID NO: 94682 - DNA, 25 bp, probe
agttcctgaggatttccaagagcaa

SEQ ID NO: 94683 - DNA, 25 bp, probe
aagcagttcctgaggatttccaaga

SEQ ID NO: 94684 - DNA, 25 bp, probe
tcaagcagttcctgaggatttccaa

SEQ ID NO: 94685 - DNA, 25 bp, probe
agcagttcctgaggatttccaagag

SEQ ID NO: 94686 - DNA, 25 bp, probe
ttcctgaggatttccaagagcaagg

SEQ ID NO: 94687 - DNA, 25 bp, probe
cagttcctgaggatttccaagagca

SEQ ID NO: 94688 - DNA, 25 bp, probe
ttacatagaacacttcagacacagg

SEQ ID NO: 94689 - DNA, 25 bp, probe
ctgttgagttctgattgtgttgaag

SEQ ID NO: 94690 - DNA, 25 bp, probe
cgtatgaatctatgacagagcaatg

SEQ ID NO: 94691 - DNA, 25 bp, probe
tacatagaacacttcagacacagga

SEQ ID NO: 94692 - DNA, 25 bp, probe
tgttgagttctgattgtgttgaaga

SEQ ID NO: 94693 - DNA, 25 bp, probe
cattacatagaacacttcagacaca

SEQ ID NO: 94694 - DNA, 25 bp, probe
gcgtatgaatctatgacagagcaat

SEQ ID NO: 94695 - DNA, 25 bp, probe
cttctgaatcactgttgagttctga

SEQ ID NO: 94696 - DNA, 25 bp, probe
attacatagaacacttcagacacag

SEQ ID NO: 94697 - DNA, 25 bp, probe
tcattacatagaacacttcagacac

SEQ ID NO: 94698 - DNA, 25 bp, probe
actgttgagttctgattgtgttgaa

SEQ ID NO: 94699 - DNA, 25 bp, probe
ctgaactcttaggcacatcaattaa

SEQ ID NO: 94700 - DNA, 25 bp, probe
atagagcagatggatgtgacaatga

SEQ ID NO: 94701 - DNA, 25 bp, probe
acatagaacacttcagacacaggaa

SEQ ID NO: 94702 - DNA, 25 bp, probe
gtatgaatctatgacagagcaatgc

SEQ ID NO: 94703 - DNA, 25 bp, probe
gtaggatgttgcttctgaatcactg

SEQ ID NO: 94704 - DNA, 25 bp, probe
catagagcagatggatgtgacaatg

SEQ ID NO: 94705 - DNA, 25 bp, probe
gctgaactcttaggcacatcaatta

SEQ ID NO: 94706 - DNA, 25 bp, probe
gcgacatcttctcaaccttatcaag

SEQ ID NO: 94707 - DNA, 25 bp, probe
taggatgttgcttctgaatcactgt

SEQ ID NO: 94708 - DNA, 25 bp, probe
ttgcttctgaatcactgttgagttc

SEQ ID NO: 94709 - DNA, 25 bp, probe
tagagcagatggatgtgacaatgag

SEQ ID NO: 94710 - DNA, 25 bp, probe
atgttgcttctgaatcactgttgag

SEQ ID NO: 94711 - DNA, 25 bp, probe
gatgttgcttctgaatcactgttga

SEQ ID NO: 94712 - DNA, 25 bp, probe
atatgtggctccatctgtacttgaa

SEQ ID NO: 94713 - DNA, 25 bp, probe
gttgcttctgaatcactgttgagtt

SEQ ID NO: 94714 - DNA, 25 bp, probe
gtcattacatagaacacttcagaca

SEQ ID NO: 94715 - DNA, 25 bp, probe
tgtcattacatagaacacttcagac

SEQ ID NO: 94716 - DNA, 25 bp, probe
gcttctgaatcactgttgagttctg

SEQ ID NO: 94717 - DNA, 25 bp, probe
ggtaggatgttgcttctgaatcact

SEQ ID NO: 94718 - DNA, 25 bp, probe
ggatgttgcttctgaatcactgttg

SEQ ID NO: 94719 - DNA, 25 bp, probe
aggatgttgcttctgaatcactgtt

SEQ ID NO: 94720 - DNA, 25 bp, probe
tgcttctgaatcactgttgagttct

SEQ ID NO: 94721 - DNA, 25 bp, probe
cactgttgagttctgattgtgttga

SEQ ID NO: 94722 - DNA, 25 bp, probe
tcactgttgagttctgattgtgttg

SEQ ID NO: 94723 - DNA, 25 bp, probe
ctgattgtgttgaagaagggttatc

SEQ ID NO: 94724 - DNA, 25 bp, probe
acctgcgtatgaatctatgacagag

SEQ ID NO: 94725 - DNA, 25 bp, probe
cgaaattattggttggtgtgaagaa

SEQ ID NO: 94726 - DNA, 25 bp, probe
aattattggttggtgtgaagaaagc

SEQ ID NO: 94727 - DNA, 25 bp, probe
tgaactcttaggcacatcaattaat

SEQ ID NO: 94728 - DNA, 25 bp, probe
tattaagggtaggatgttgcttctg

SEQ ID NO: 94729 - DNA, 25 bp, probe
gtattaagggtaggatgttgcttct

SEQ ID NO: 94730 - DNA, 25 bp, probe
agtattaagggtaggatgttgcttc

SEQ ID NO: 94731 - DNA, 25 bp, probe
cagtattaagggtaggatgttgctt

SEQ ID NO: 94732 - DNA, 25 bp, probe
gcctaaatgagtcgtattacagttg

SEQ ID NO: 94733 - DNA, 25 bp, probe
cggcgaatttagtagatggtgtaat

SEQ ID NO: 94734 - DNA, 25 bp, probe
gctagaaacaagacgacctacaata

SEQ ID NO: 94735 - DNA, 25 bp, probe
cctaaatgagtcgtattacagttga

SEQ ID NO: 94736 - DNA, 25 bp, probe
tagaaacaagacgacctacaataaa

SEQ ID NO: 94737 - DNA, 25 bp, probe
ggcgaatttagtagatggtgtaatt

SEQ ID NO: 94738 - DNA, 25 bp, probe
ctagaaacaagacgacctacaataa

SEQ ID NO: 94739 - DNA, 25 bp, probe
gatacaactctggagtcctctgaga

SEQ ID NO: 94740 - DNA, 25 bp, probe
tgctagaaacaagacgacctacaat

SEQ ID NO: 94741 - DNA, 25 bp, probe
ctgaatttccctctctcataccctc

SEQ ID NO: 94742 - DNA, 25 bp, probe
catttgtcacccaagaactcttacc

SEQ ID NO: 94743 - DNA, 25 bp, probe
agtgctgaatttccctctctcatac

SEQ ID NO: 94744 - DNA, 25 bp, probe
aatttggtgaatttccacagaatga

SEQ ID NO: 94745 - DNA, 25 bp, probe
cagtgctgaatttccctctctcata

SEQ ID NO: 94746 - DNA, 25 bp, probe
atttggtgaatttccacagaatgat

SEQ ID NO: 94747 - DNA, 25 bp, probe
gaatttggtgaatttccacagaatg

SEQ ID NO: 94748 - DNA, 25 bp, probe
ttgctagaaacaagacgacctacaa

SEQ ID NO: 94749 - DNA, 25 bp, probe
tttgctagaaacaagacgacctaca

SEQ ID NO: 94750 - DNA, 25 bp, probe
tttgtcacccaagaactcttaccat

SEQ ID NO: 94751 - DNA, 25 bp, probe
atttgtcacccaagaactcttacca

SEQ ID NO: 94752 - DNA, 25 bp, probe
tttggtgaatttccacagaatgatc

SEQ ID NO: 94753 - DNA, 25 bp, probe
gcatttgtcacccaagaactcttac

SEQ ID NO: 94754 - DNA, 25 bp, probe
taaggtttcccaatcctcaactctg

SEQ ID NO: 94755 - DNA, 25 bp, probe
gtaaggtttcccaatcctcaactct

SEQ ID NO: 94756 - DNA, 25 bp, probe
ctaaatgagtcgtattacagttgac

SEQ ID NO: 94757 - DNA, 25 bp, probe
tcacccaagaactcttaccatgaag

SEQ ID NO: 94758 - DNA, 25 bp, probe
ttaccatgaagaccctcctactgtt

SEQ ID NO: 94759 - DNA, 25 bp, probe
gtgctgaatttccctctctcatacc

SEQ ID NO: 94760 - DNA, 25 bp, probe
gtcacccaagaactcttaccatgaa

SEQ ID NO: 94761 - DNA, 25 bp, probe
tgaatttccctctctcataccctcc

SEQ ID NO: 94762 - DNA, 25 bp, probe
ttgtcacccaagaactcttaccatg

SEQ ID NO: 94763 - DNA, 25 bp, probe
ggatacaactctggagtcctctgag

SEQ ID NO: 94764 - DNA, 25 bp, probe
tttagtagatggtgtaattcgaccc

SEQ ID NO: 94765 - DNA, 25 bp, probe
agaaacaagacgacctacaataaaa

SEQ ID NO: 94766 - DNA, 25 bp, probe
atcaagttgacgacaggaaaggaag

SEQ ID NO: 94767 - DNA, 25 bp, probe
gatcaagttgacgacaggaaaggaa

SEQ ID NO: 94768 - DNA, 25 bp, probe
tttggcctaaatgagtcgtattaca

SEQ ID NO: 94769 - DNA, 25 bp, probe
cttaccatgaagaccctcctactgt

SEQ ID NO: 94770 - DNA, 25 bp, probe
ggcctaaatgagtcgtattacagtt

SEQ ID NO: 94771 - DNA, 25 bp, probe
ttggcctaaatgagtcgtattacag

SEQ ID NO: 94772 - DNA, 25 bp, probe
taaatgagtcgtattacagttgacg

SEQ ID NO: 94773 - DNA, 25 bp, probe
taccatgaagaccctcctactgttg

SEQ ID NO: 94774 - DNA, 25 bp, probe
gaatttccctctctcataccctccc

SEQ ID NO: 94775 - DNA, 25 bp, probe
tactgacacgtaaggtttcccaatc

SEQ ID NO: 94776 - DNA, 25 bp, probe
ggatgagcagtaagtaagtaagtgt

SEQ ID NO: 94777 - DNA, 25 bp, probe
atgagcagtaagtaagtaagtgtgg

SEQ ID NO: 94778 - DNA, 25 bp, probe
gatgagcagtaagtaagtaagtgtg

SEQ ID NO: 94779 - DNA, 25 bp, probe
gacggatgagcagtaagtaagtaag

SEQ ID NO: 94780 - DNA, 25 bp, probe
cggatgagcagtaagtaagtaagtg

SEQ ID NO: 94781 - DNA, 25 bp, probe
acggatgagcagtaagtaagtaagt

SEQ ID NO: 94782 - DNA, 25 bp, probe
tgacggatgagcagtaagtaagtaa

SEQ ID NO: 94783 - DNA, 25 bp, probe
gtgacggatgagcagtaagtaagta

SEQ ID NO: 94784 - DNA, 25 bp, probe
aagtgacggatgagcagtaagtaag

SEQ ID NO: 94785 - DNA, 25 bp, probe
tagcctctcttacaggaattgtgaa

SEQ ID NO: 94786 - DNA, 25 bp, probe
ctgactagcctctcttacaggaatt

SEQ ID NO: 94787 - DNA, 25 bp, probe
ctagcctctcttacaggaattgtga

SEQ ID NO: 94788 - DNA, 25 bp, probe
gactagcctctcttacaggaattgt

SEQ ID NO: 94789 - DNA, 25 bp, probe
tgactagcctctcttacaggaattg

SEQ ID NO: 94790 - DNA, 25 bp, probe
ctcggtctactagcaacaacaactt

SEQ ID NO: 94791 - DNA, 25 bp, probe
actagcctctcttacaggaattgtg

SEQ ID NO: 94792 - DNA, 25 bp, probe
ggagaaccatcatttcacagttaaa

SEQ ID NO: 94793 - DNA, 25 bp, probe
gttctggaccagctactgaattatt

SEQ ID NO: 94794 - DNA, 25 bp, probe
gtctactagcaacaacaactttctt

SEQ ID NO: 94795 - DNA, 25 bp, probe
tctggaccagctactgaattattaa

SEQ ID NO: 94796 - DNA, 25 bp, probe
ttctggaccagctactgaattatta

SEQ ID NO: 94797 - DNA, 25 bp, probe
gggagaaccatcatttcacagttaa

SEQ ID NO: 94798 - DNA, 25 bp, probe
ggtctactagcaacaacaactttct

SEQ ID NO: 94799 - DNA, 25 bp, probe
agtgacggatgagcagtaagtaagt

SEQ ID NO: 94800 - DNA, 25 bp, probe
gttagggagaaccatcatttcacag

SEQ ID NO: 94801 - DNA, 25 bp, probe
tctactagcaacaacaactttcttg

SEQ ID NO: 94802 - DNA, 25 bp, probe
ttagggagaaccatcatttcacagt

SEQ ID NO: 94803 - DNA, 25 bp, probe
agggagaaccatcatttcacagtta

SEQ ID NO: 94804 - DNA, 25 bp, probe
tagggagaaccatcatttcacagtt

SEQ ID NO: 94805 - DNA, 25 bp, probe
tggaccagctactgaattattaatc

SEQ ID NO: 94806 - DNA, 25 bp, probe
ctggaccagctactgaattattaat

SEQ ID NO: 94807 - DNA, 25 bp, probe
tgagcagtaagtaagtaagtgtggg

SEQ ID NO: 94808 - DNA, 25 bp, probe
aaagtgacggatgagcagtaagtaa

SEQ ID NO: 94809 - DNA, 25 bp, probe
ctattgcctaaatcagcgtcaacat

SEQ ID NO: 94810 - DNA, 25 bp, probe
ggaccagctactgaattattaatct

SEQ ID NO: 94811 - DNA, 25 bp, probe
gaaagtgacggatgagcagtaagta

SEQ ID NO: 94812 - DNA, 25 bp, probe
cggtctactagcaacaacaactttc

SEQ ID NO: 94813 - DNA, 25 bp, probe
gcctctcttacaggaattgtgaaat

SEQ ID NO: 94814 - DNA, 25 bp, probe
cagttacgggagtgggaaattacat

SEQ ID NO: 94815 - DNA, 25 bp, probe
actgaattattaatctcacttagcg

SEQ ID NO: 94816 - DNA, 25 bp, probe
cgttctggaccagctactgaattat

SEQ ID NO: 94817 - DNA, 25 bp, probe
tcggtctactagcaacaacaacttt

SEQ ID NO: 94818 - DNA, 25 bp, probe
accagctactgaattattaatctca

SEQ ID NO: 94819 - DNA, 25 bp, probe
ttcagttacgggagtgggaaattac

SEQ ID NO: 94820 - DNA, 25 bp, probe
aatgactacactcaaggatgtgaac

SEQ ID NO: 94821 - DNA, 25 bp, probe
atgactacactcaaggatgtgaacc

SEQ ID NO: 94822 - DNA, 25 bp, probe
cgacgctacattgatgagtacagaa

SEQ ID NO: 94823 - DNA, 25 bp, probe
acagaaatgactacactcaaggatg

SEQ ID NO: 94824 - DNA, 25 bp, probe
acgctacattgatgagtacagaaat

SEQ ID NO: 94825 - DNA, 25 bp, probe
tacagaaatgactacactcaaggat

SEQ ID NO: 94826 - DNA, 25 bp, probe
gacgctacattgatgagtacagaaa

SEQ ID NO: 94827 - DNA, 25 bp, probe
cagaaatgactacactcaaggatgt

SEQ ID NO: 94828 - DNA, 25 bp, probe
gtacagaaatgactacactcaagga

SEQ ID NO: 94829 - DNA, 25 bp, probe
agtacagaaatgactacactcaagg

SEQ ID NO: 94830 - DNA, 25 bp, probe
tgatgagtacagaaatgactacact

SEQ ID NO: 94831 - DNA, 25 bp, probe
gactacactcaaggatgtgaacctg

SEQ ID NO: 94832 - DNA, 25 bp, probe
aaatgactacactcaaggatgtgaa

SEQ ID NO: 94833 - DNA, 25 bp, probe
gaaatgactacactcaaggatgtga

SEQ ID NO: 94834 - DNA, 25 bp, probe
agaaatgactacactcaaggatgtg

SEQ ID NO: 94835 - DNA, 25 bp, probe
ttgatgagtacagaaatgactacac

SEQ ID NO: 94836 - DNA, 25 bp, probe
tgactacactcaaggatgtgaacct

SEQ ID NO: 94837 - DNA, 25 bp, probe
attgatgagtacagaaatgactaca

SEQ ID NO: 94838 - DNA, 25 bp, probe
cgctacattgatgagtacagaaatg

SEQ ID NO: 94839 - DNA, 25 bp, probe
tcgacgctacattgatgagtacaga

SEQ ID NO: 94840 - DNA, 25 bp, probe
gctacattgatgagtacagaaatga

SEQ ID NO: 94841 - DNA, 25 bp, probe
ctacactcaaggatgtgaacctgga

SEQ ID NO: 94842 - DNA, 25 bp, probe
tacactcaaggatgtgaacctggac

SEQ ID NO: 94843 - DNA, 25 bp, probe
actacactcaaggatgtgaacctgg

SEQ ID NO: 94844 - DNA, 25 bp, probe
acattgatgagtacagaaatgacta

SEQ ID NO: 94845 - DNA, 25 bp, probe
tacattgatgagtacagaaatgact

SEQ ID NO: 94846 - DNA, 25 bp, probe
cattgatgagtacagaaatgactac

SEQ ID NO: 94847 - DNA, 25 bp, probe
ctacattgatgagtacagaaatgac

SEQ ID NO: 94848 - DNA, 25 bp, probe
gagtacagaaatgactacactcaag

SEQ ID NO: 94849 - DNA, 25 bp, probe
gatgagtacagaaatgactacactc

SEQ ID NO: 94850 - DNA, 25 bp, probe
gacatcgccaaagagaccatgaaag

SEQ ID NO: 94851 - DNA, 25 bp, probe
atgaaagccggtatcagaaccatag

SEQ ID NO: 94852 - DNA, 25 bp, probe
cactcaaggatgtgaacctggacat

SEQ ID NO: 94853 - DNA, 25 bp, probe
catgaaagccggtatcagaaccata

SEQ ID NO: 94854 - DNA, 25 bp, probe
tgaaagccggtatcagaaccatagt

SEQ ID NO: 94855 - DNA, 25 bp, probe
caaagagaccatgaaagccggtatc

SEQ ID NO: 94856 - DNA, 25 bp, probe
aaagagaccatgaaagccggtatca

SEQ ID NO: 94857 - DNA, 25 bp, probe
gagaccatgaaagccggtatcagaa

SEQ ID NO: 94858 - DNA, 25 bp, probe
aagagaccatgaaagccggtatcag

SEQ ID NO: 94859 - DNA, 25 bp, probe
agaccatgaaagccggtatcagaac

SEQ ID NO: 94860 - DNA, 25 bp, probe
ccatgaaagccggtatcagaaccat

SEQ ID NO: 94861 - DNA, 25 bp, probe
ccaaagagaccatgaaagccggtat

SEQ ID NO: 94862 - DNA, 25 bp, probe
agagaccatgaaagccggtatcaga

SEQ ID NO: 94863 - DNA, 25 bp, probe
tacttatggtaacacctaactgagc

SEQ ID NO: 94864 - DNA, 25 bp, probe
catagaactcagatgctgttacaga

SEQ ID NO: 94865 - DNA, 25 bp, probe
atagaactcagatgctgttacagaa

SEQ ID NO: 94866 - DNA, 25 bp, probe
atatacttgacactttctccttgct

SEQ ID NO: 94867 - DNA, 25 bp, probe
tatacttgacactttctccttgctg

SEQ ID NO: 94868 - DNA, 25 bp, probe
caaacagatgaaagaagaaagccag

SEQ ID NO: 94869 - DNA, 25 bp, probe
aagtcagatatttacagtgttggga

SEQ ID NO: 94870 - DNA, 25 bp, probe
agtcagatatttacagtgttgggat

SEQ ID NO: 94871 - DNA, 25 bp, probe
gaagtcagatatttacagtgttggg

SEQ ID NO: 94872 - DNA, 25 bp, probe
aatagtgaccgattacacacaccat

SEQ ID NO: 94873 - DNA, 25 bp, probe
cagatgaaagaagaaagccaggatt

SEQ ID NO: 94874 - DNA, 25 bp, probe
acagtgcttccaagtacatcttctc

SEQ ID NO: 94875 - DNA, 25 bp, probe
gacagtgcttccaagtacatcttct

SEQ ID NO: 94876 - DNA, 25 bp, probe
agatgaaagaagaaagccaggattc

SEQ ID NO: 94877 - DNA, 25 bp, probe
tgaagtcagatatttacagtgttgg

SEQ ID NO: 94878 - DNA, 25 bp, probe
ttatggtaacacctaactgagcctc

SEQ ID NO: 94879 - DNA, 25 bp, probe
cttatggtaacacctaactgagcct

SEQ ID NO: 94880 - DNA, 25 bp, probe
aaccaacaggctagtttatcttaca

SEQ ID NO: 94881 - DNA, 25 bp, probe
accaacaggctagtttatcttacat

SEQ ID NO: 94882 - DNA, 25 bp, probe
gctagtttatcttacatcagaccct

SEQ ID NO: 94883 - DNA, 25 bp, probe
aggctagtttatcttacatcagacc

SEQ ID NO: 94884 - DNA, 25 bp, probe
ttatagatcctaaattcacgcaccc

SEQ ID NO: 94885 - DNA, 25 bp, probe
ggctagtttatcttacatcagaccc

SEQ ID NO: 94886 - DNA, 25 bp, probe
aaacagatgaaagaagaaagccagg

SEQ ID NO: 94887 - DNA, 25 bp, probe
atagtgaccgattacacacaccatc

SEQ ID NO: 94888 - DNA, 25 bp, probe
acttatggtaacacctaactgagcc

SEQ ID NO: 94889 - DNA, 25 bp, probe
ccaacaggctagtttatcttacatc

SEQ ID NO: 94890 - DNA, 25 bp, probe
tcaaacagatgaaagaagaaagcca

SEQ ID NO: 94891 - DNA, 25 bp, probe
acaggctagtttatcttacatcaga

SEQ ID NO: 94892 - DNA, 25 bp, probe
gcctcactcacattaaatgattcac

SEQ ID NO: 94893 - DNA, 25 bp, probe
agcctcactcacattaaatgattca

SEQ ID NO: 94894 - DNA, 25 bp, probe
agtccagaactactgagacaggatt

SEQ ID NO: 94895 - DNA, 25 bp, probe
attatagatcctaaattcacgcacc

SEQ ID NO: 94896 - DNA, 25 bp, probe
gagcctcactcacattaaatgattc

SEQ ID NO: 94897 - DNA, 25 bp, probe
caggctagtttatcttacatcagac

SEQ ID NO: 94898 - DNA, 25 bp, probe
atagtttggttaagcatggacagag

SEQ ID NO: 94899 - DNA, 25 bp, probe
cagaactactgagacaggatttaca

SEQ ID NO: 94900 - DNA, 25 bp, probe
cctcactcacattaaatgattcact

SEQ ID NO: 94901 - DNA, 25 bp, probe
acagatgaaagaagaaagccaggat

SEQ ID NO: 94902 - DNA, 25 bp, probe
ccagaactactgagacaggatttac

SEQ ID NO: 94903 - DNA, 25 bp, probe
caacaggctagtttatcttacatca

SEQ ID NO: 94904 - DNA, 25 bp, probe
atacttatggtaacacctaactgag

SEQ ID NO: 94905 - DNA, 25 bp, probe
gtgaagtcagatatttacagtgttg

SEQ ID NO: 94906 - DNA, 25 bp, probe
tgagacaggatttacatgggtataa

SEQ ID NO: 94907 - DNA, 25 bp, probe
aagtcaacaataatggcagtaacag

SEQ ID NO: 94908 - DNA, 25 bp, probe
gaagtcaacaataatggcagtaaca

SEQ ID NO: 94909 - DNA, 25 bp, probe
tgaagtcaacaataatggcagtaac

SEQ ID NO: 94910 - DNA, 25 bp, probe
gtgaagtcaacaataatggcagtaa

SEQ ID NO: 94911 - DNA, 25 bp, probe
agtcaacaataatggcagtaacagg

SEQ ID NO: 94912 - DNA, 25 bp, probe
agatataggaatgaactgtctgtga

SEQ ID NO: 94913 - DNA, 25 bp, probe
gatataggaatgaactgtctgtgaa

SEQ ID NO: 94914 - DNA, 25 bp, probe
tgtgaagtcaacaataatggcagta

SEQ ID NO: 94915 - DNA, 25 bp, probe
aagatataggaatgaactgtctgtg

SEQ ID NO: 94916 - DNA, 25 bp, probe
ctgtgaagtcaacaataatggcagt

SEQ ID NO: 94917 - DNA, 25 bp, probe
actgtgaagtcaacaataatggcag

SEQ ID NO: 94918 - DNA, 25 bp, probe
taggaatgaactgtctgtgaaatgt

SEQ ID NO: 94919 - DNA, 25 bp, probe
ataggaatgaactgtctgtgaaatg

SEQ ID NO: 94920 - DNA, 25 bp, probe
ggaatgaactgtctgtgaaatgttt

SEQ ID NO: 94921 - DNA, 25 bp, probe
aggaatgaactgtctgtgaaatgtt

SEQ ID NO: 94922 - DNA, 25 bp, probe
gtcaacaataatggcagtaacaggg

SEQ ID NO: 94923 - DNA, 25 bp, probe
tcaagcctatggagtgaaattattt

SEQ ID NO: 94924 - DNA, 25 bp, probe
tataggaatgaactgtctgtgaaat

SEQ ID NO: 94925 - DNA, 25 bp, probe
atataggaatgaactgtctgtgaaa

SEQ ID NO: 94926 - DNA, 25 bp, probe
tgatttgtggtagggaagcagtatg

SEQ ID NO: 94927 - DNA, 25 bp, probe
gtaacagggcagttcattccaaatc

SEQ ID NO: 94928 - DNA, 25 bp, probe
aaagatataggaatgaactgtctgt

SEQ ID NO: 94929 - DNA, 25 bp, probe
agtaacagggcagttcattccaaat

SEQ ID NO: 94930 - DNA, 25 bp, probe
tggtgtctaaagatataggaatgaa

SEQ ID NO: 94931 - DNA, 25 bp, probe
ctgatttgtggtagggaagcagtat

SEQ ID NO: 94932 - DNA, 25 bp, probe
gatttgtggtagggaagcagtatgg

SEQ ID NO: 94933 - DNA, 25 bp, probe
ggtgtctaaagatataggaatgaac

SEQ ID NO: 94934 - DNA, 25 bp, probe
ctggactgtgaagtcaacaataatg

SEQ ID NO: 94935 - DNA, 25 bp, probe
gccaagggaaaatagagatgatgta

SEQ ID NO: 94936 - DNA, 25 bp, probe
atggtgtctaaagatataggaatga

SEQ ID NO: 94937 - DNA, 25 bp, probe
taacagggcagttcattccaaatcc

SEQ ID NO: 94938 - DNA, 25 bp, probe
atagagatgatgtaatttctttccg

SEQ ID NO: 94939 - DNA, 25 bp, probe
cgtgtgaaaactccctattctctta

SEQ ID NO: 94940 - DNA, 25 bp, probe
tggactgtgaagtcaacaataatgg

SEQ ID NO: 94941 - DNA, 25 bp, probe
aataatggcagtaacagggcagttc

SEQ ID NO: 94942 - DNA, 25 bp, probe
aacaataatggcagtaacagggcag

SEQ ID NO: 94943 - DNA, 25 bp, probe
tcaacaataatggcagtaacagggc

SEQ ID NO: 94944 - DNA, 25 bp, probe
gagccaagggaaaatagagatgatg

SEQ ID NO: 94945 - DNA, 25 bp, probe
cagtaacagggcagttcattccaaa

SEQ ID NO: 94946 - DNA, 25 bp, probe
gctggactgtgaagtcaacaataat

SEQ ID NO: 94947 - DNA, 25 bp, probe
caataatggcagtaacagggcagtt

SEQ ID NO: 94948 - DNA, 25 bp, probe
caacaataatggcagtaacagggca

SEQ ID NO: 94949 - DNA, 25 bp, probe
gactgtgaagtcaacaataatggca

SEQ ID NO: 94950 - DNA, 25 bp, probe
ccaagggaaaatagagatgatgtaa

SEQ ID NO: 94951 - DNA, 25 bp, probe
tgtttggttggttccattttctttt

SEQ ID NO: 94952 - DNA, 25 bp, probe
ttgtttggttggttccattttcttt

SEQ ID NO: 94953 - DNA, 25 bp, probe
tttgtttggttggttccattttctt

SEQ ID NO: 94954 - DNA, 25 bp, probe
ttttgtttggttggttccattttct

SEQ ID NO: 94955 - DNA, 25 bp, probe
caatgaactgttctagggaaagtgg

SEQ ID NO: 94956 - DNA, 25 bp, probe
gcaatgaactgttctagggaaagtg

SEQ ID NO: 94957 - DNA, 25 bp, probe
agcaatgaactgttctagggaaagt

SEQ ID NO: 94958 - DNA, 25 bp, probe
cagcaatgaactgttctagggaaag

SEQ ID NO: 94959 - DNA, 25 bp, probe
agcaattaaaacggactcatctctg

SEQ ID NO: 94960 - DNA, 25 bp, probe
cagcaattaaaacggactcatctct

SEQ ID NO: 94961 - DNA, 25 bp, probe
aatgaactgttctagggaaagtggc

SEQ ID NO: 94962 - DNA, 25 bp, probe
ccagcaatgaactgttctagggaaa

SEQ ID NO: 94963 - DNA, 25 bp, probe
gaactgttctagggaaagtggcttc

SEQ ID NO: 94964 - DNA, 25 bp, probe
gatcccagcaatgaactgttctagg

SEQ ID NO: 94965 - DNA, 25 bp, probe
caattaaaacggactcatctctggc

SEQ ID NO: 94966 - DNA, 25 bp, probe
gcaattaaaacggactcatctctgg

SEQ ID NO: 94967 - DNA, 25 bp, probe
ccagcaattaaaacggactcatctc

SEQ ID NO: 94968 - DNA, 25 bp, probe
atgaactgttctagggaaagtggct

SEQ ID NO: 94969 - DNA, 25 bp, probe
tgaactgttctagggaaagtggctt

SEQ ID NO: 94970 - DNA, 25 bp, probe
cccagcaattaaaacggactcatct

SEQ ID NO: 94971 - DNA, 25 bp, probe
cattgacctcatcaacaacctgctg

SEQ ID NO: 94972 - DNA, 25 bp, probe
ctccctgtttccccagcaattaaaa

SEQ ID NO: 94973 - DNA, 25 bp, probe
ccccagcaattaaaacggactcatc

SEQ ID NO: 94974 - DNA, 25 bp, probe
gatacatcacgcatgagagtgacga

SEQ ID NO: 94975 - DNA, 25 bp, probe
gagccattgacctcatcaacaacct

SEQ ID NO: 94976 - DNA, 25 bp, probe
ctggagccattgacctcatcaacaa

SEQ ID NO: 94977 - DNA, 25 bp, probe
tttccccagcaattaaaacggactc

SEQ ID NO: 94978 - DNA, 25 bp, probe
catcagtgttctctgaggtcctgtg

SEQ ID NO: 94979 - DNA, 25 bp, probe
atcccagcaatgaactgttctaggg

SEQ ID NO: 94980 - DNA, 25 bp, probe
atacatcacgcatgagagtgacgac

SEQ ID NO: 94981 - DNA, 25 bp, probe
aattaaaacggactcatctctggcc

SEQ ID NO: 94982 - DNA, 25 bp, probe
cccagcaatgaactgttctagggaa

SEQ ID NO: 94983 - DNA, 25 bp, probe
tccctgtttccccagcaattaaaac

SEQ ID NO: 94984 - DNA, 25 bp, probe
ggaagatgggagagcgatacatcac

SEQ ID NO: 94985 - DNA, 25 bp, probe
ggatcccagcaatgaactgttctag

SEQ ID NO: 94986 - DNA, 25 bp, probe
tccccagcaattaaaacggactcat

SEQ ID NO: 94987 - DNA, 25 bp, probe
gtttccccagcaattaaaacggact

SEQ ID NO: 94988 - DNA, 25 bp, probe
ctgtttccccagcaattaaaacgga

SEQ ID NO: 94989 - DNA, 25 bp, probe
gaagatgggagagcgatacatcacg

SEQ ID NO: 94990 - DNA, 25 bp, probe
aggatcccagcaatgaactgttcta

SEQ ID NO: 94991 - DNA, 25 bp, probe
tgtttccccagcaattaaaacggac

SEQ ID NO: 94992 - DNA, 25 bp, probe
ttccccagcaattaaaacggactca

SEQ ID NO: 94993 - DNA, 25 bp, probe
cctccctgtttccccagcaattaaa

SEQ ID NO: 94994 - DNA, 25 bp, probe
aactgttctagggaaagtggcttcc

SEQ ID NO: 94995 - DNA, 25 bp, probe
ctgttctagggaaagtggcttcctg

SEQ ID NO: 94996 - DNA, 25 bp, probe
cctgtttccccagcaattaaaacgg

SEQ ID NO: 94997 - DNA, 25 bp, probe
ccctgtttccccagcaattaaaacg

SEQ ID NO: 94998 - DNA, 25 bp, probe
attaaaacggactcatctctggccc

SEQ ID NO: 94999 - DNA, 25 bp, probe
tatatagtgtgagcagcaagtaacc

SEQ ID NO: 95000 - DNA, 25 bp, probe
tgtatatagtgtgagcagcaagtaa

SEQ ID NO: 95001 - DNA, 25 bp, probe
gtatatagtgtgagcagcaagtaac

SEQ ID NO: 95002 - DNA, 25 bp, probe
ctgtatatagtgtgagcagcaagta

SEQ ID NO: 95003 - DNA, 25 bp, probe
atctgtatatagtgtgagcagcaag

SEQ ID NO: 95004 - DNA, 25 bp, probe
catctgtatatagtgtgagcagcaa

SEQ ID NO: 95005 - DNA, 25 bp, probe
gcatctgtatatagtgtgagcagca

SEQ ID NO: 95006 - DNA, 25 bp, probe
tctgtatatagtgtgagcagcaagt

SEQ ID NO: 95007 - DNA, 25 bp, probe
ttgcttgcatctgtatatagtgtga

SEQ ID NO: 95008 - DNA, 25 bp, probe
cttgcttgcatctgtatatagtgtg

SEQ ID NO: 95009 - DNA, 25 bp, probe
tgcttgcatctgtatatagtgtgag

SEQ ID NO: 95010 - DNA, 25 bp, probe
ccttgcttgcatctgtatatagtgt

SEQ ID NO: 95011 - DNA, 25 bp, probe
ttctgaaagcactttaatgattccc

SEQ ID NO: 95012 - DNA, 25 bp, probe
tttactggtttgatttcactggagc

SEQ ID NO: 95013 - DNA, 25 bp, probe
tttctgaaagcactttaatgattcc

SEQ ID NO: 95014 - DNA, 25 bp, probe
atatagtgtgagcagcaagtaaccc

SEQ ID NO: 95015 - DNA, 25 bp, probe
tgttaataaagacaattcaaccagc

SEQ ID NO: 95016 - DNA, 25 bp, probe
gaacagctatgacatctacatccct

SEQ ID NO: 95017 - DNA, 25 bp, probe
cccttgcttgcatctgtatatagtg

SEQ ID NO: 95018 - DNA, 25 bp, probe
ttgcatctgtatatagtgtgagcag

SEQ ID NO: 95019 - DNA, 25 bp, probe
cttgcatctgtatatagtgtgagca

SEQ ID NO: 95020 - DNA, 25 bp, probe
tatagtgtgagcagcaagtaaccct

SEQ ID NO: 95021 - DNA, 25 bp, probe
gcttgcatctgtatatagtgtgagc

SEQ ID NO: 95022 - DNA, 25 bp, probe
gttaataaagacaattcaaccagct

SEQ ID NO: 95023 - DNA, 25 bp, probe
ttactggtttgatttcactggagcc

SEQ ID NO: 95024 - DNA, 25 bp, probe
gcttttgcttttactggtttgattt

SEQ ID NO: 95025 - DNA, 25 bp, probe
tgcatctgtatatagtgtgagcagc

SEQ ID NO: 95026 - DNA, 25 bp, probe
ttgcttttactggtttgatttcact

SEQ ID NO: 95027 - DNA, 25 bp, probe
ttttactggtttgatttcactggag

SEQ ID NO: 95028 - DNA, 25 bp, probe
cttttactggtttgatttcactgga

SEQ ID NO: 95029 - DNA, 25 bp, probe
tgcttttactggtttgatttcactg

SEQ ID NO: 95030 - DNA, 25 bp, probe
tttgcttttactggtttgatttcac

SEQ ID NO: 95031 - DNA, 25 bp, probe
gcttttactggtttgatttcactgg

SEQ ID NO: 95032 - DNA, 25 bp, probe
ggcttttgcttttactggtttgatt

SEQ ID NO: 95033 - DNA, 25 bp, probe
aatacgagcggattaagttcctggt

SEQ ID NO: 95034 - DNA, 25 bp, probe
aacagctatgacatctacatccctg

SEQ ID NO: 95035 - DNA, 25 bp, probe
ctcaaggtcatctatggctccagtg

SEQ ID NO: 95036 - DNA, 25 bp, probe
ttttgcttttactggtttgatttca

SEQ ID NO: 95037 - DNA, 25 bp, probe
gaaagcactttaatgattccccttc

SEQ ID NO: 95038 - DNA, 25 bp, probe
cctcaatgtagtggccttggatatc

SEQ ID NO: 95039 - DNA, 25 bp, probe
tgaaagcactttaatgattcccctt

SEQ ID NO: 95040 - DNA, 25 bp, probe
aaatacgagcggattaagttcctgg

SEQ ID NO: 95041 - DNA, 25 bp, probe
cttttgcttttactggtttgatttc

SEQ ID NO: 95042 - DNA, 25 bp, probe
ctgaaagcactttaatgattcccct

SEQ ID NO: 95043 - DNA, 25 bp, probe
caagcctgtgtatgaagaattgtcc

SEQ ID NO: 95044 - DNA, 25 bp, probe
gcaagcctgtgtatgaagaattgtc

SEQ ID NO: 95045 - DNA, 25 bp, probe
aagttccagatcctgacagagagaa

SEQ ID NO: 95046 - DNA, 25 bp, probe
ttccagatcctgacagagagaactg

SEQ ID NO: 95047 - DNA, 25 bp, probe
aagcctgtgtatgaagaattgtccc

SEQ ID NO: 95048 - DNA, 25 bp, probe
cgcaagcctgtgtatgaagaattgt

SEQ ID NO: 95049 - DNA, 25 bp, probe
ccgcaagcctgtgtatgaagaattg

SEQ ID NO: 95050 - DNA, 25 bp, probe
ctgttttgtgactgttacattgtgc

SEQ ID NO: 95051 - DNA, 25 bp, probe
gctgttttgtgactgttacattgtg

SEQ ID NO: 95052 - DNA, 25 bp, probe
gttccagatcctgacagagagaact

SEQ ID NO: 95053 - DNA, 25 bp, probe
agttccagatcctgacagagagaac

SEQ ID NO: 95054 - DNA, 25 bp, probe
ctggctgttttgtgactgttacatt

SEQ ID NO: 95055 - DNA, 25 bp, probe
ggctgttttgtgactgttacattgt

SEQ ID NO: 95056 - DNA, 25 bp, probe
tggctgttttgtgactgttacattg

SEQ ID NO: 95057 - DNA, 25 bp, probe
ctgacagagagaactgggaaggatc

SEQ ID NO: 95058 - DNA, 25 bp, probe
acattgtgcaggggtaattattagc

SEQ ID NO: 95059 - DNA, 25 bp, probe
tacattgtgcaggggtaattattag

SEQ ID NO: 95060 - DNA, 25 bp, probe
ctgtgtatgaagaattgtcccctgg

SEQ ID NO: 95061 - DNA, 25 bp, probe
cctgtgtatgaagaattgtcccctg

SEQ ID NO: 95062 - DNA, 25 bp, probe
aattattagcgtggcttttacactt

SEQ ID NO: 95063 - DNA, 25 bp, probe
gatcctgacagagagaactgggaag

SEQ ID NO: 95064 - DNA, 25 bp, probe
tattagcgtggcttttacacttaaa

SEQ ID NO: 95065 - DNA, 25 bp, probe
ttattagcgtggcttttacacttaa

SEQ ID NO: 95066 - DNA, 25 bp, probe
attagcgtggcttttacacttaaaa

SEQ ID NO: 95067 - DNA, 25 bp, probe
attattagcgtggcttttacactta

SEQ ID NO: 95068 - DNA, 25 bp, probe
ggtaattattagcgtggcttttaca

SEQ ID NO: 95069 - DNA, 25 bp, probe
gggtaattattagcgtggcttttac

SEQ ID NO: 95070 - DNA, 25 bp, probe
gttacattgtgcaggggtaattatt

SEQ ID NO: 95071 - DNA, 25 bp, probe
tgttacattgtgcaggggtaattat

SEQ ID NO: 95072 - DNA, 25 bp, probe
cattgtgcaggggtaattattagcg

SEQ ID NO: 95073 - DNA, 25 bp, probe
agatcctgacagagagaactgggaa

SEQ ID NO: 95074 - DNA, 25 bp, probe
gttttgtgactgttacattgtgcag

SEQ ID NO: 95075 - DNA, 25 bp, probe
gtaattattagcgtggcttttacac

SEQ ID NO: 95076 - DNA, 25 bp, probe
ggggtaattattagcgtggctttta

SEQ ID NO: 95077 - DNA, 25 bp, probe
ctgttacattgtgcaggggtaatta

SEQ ID NO: 95078 - DNA, 25 bp, probe
cagttgctctgtgttgcatactctc

SEQ ID NO: 95079 - DNA, 25 bp, probe
taattattagcgtggcttttacact

SEQ ID NO: 95080 - DNA, 25 bp, probe
tactccagttgctctgtgttgcata

SEQ ID NO: 95081 - DNA, 25 bp, probe
aagggagaaccagctcaagacattt

SEQ ID NO: 95082 - DNA, 25 bp, probe
attgtgcaggggtaattattagcgt

SEQ ID NO: 95083 - DNA, 25 bp, probe
tgttttgtgactgttacattgtgca

SEQ ID NO: 95084 - DNA, 25 bp, probe
tttgtgactgttacattgtgcaggg

SEQ ID NO: 95085 - DNA, 25 bp, probe
agctcaagacattttggaggatctg

SEQ ID NO: 95086 - DNA, 25 bp, probe
cagctcaagacattttggaggatct

SEQ ID NO: 95087 - DNA, 25 bp, probe
taccctttctcctgtgtaaatatgc

SEQ ID NO: 95088 - DNA, 25 bp, probe
ctgtaccctttctcctgtgtaaata

SEQ ID NO: 95089 - DNA, 25 bp, probe
tgtaccctttctcctgtgtaaatat

SEQ ID NO: 95090 - DNA, 25 bp, probe
gtaccctttctcctgtgtaaatatg

SEQ ID NO: 95091 - DNA, 25 bp, probe
cctgtaccctttctcctgtgtaaat

SEQ ID NO: 95092 - DNA, 25 bp, probe
tgcagtttatgtgtcatcaatgtac

SEQ ID NO: 95093 - DNA, 25 bp, probe
atgcagtttatgtgtcatcaatgta

SEQ ID NO: 95094 - DNA, 25 bp, probe
tatgcagtttatgtgtcatcaatgt

SEQ ID NO: 95095 - DNA, 25 bp, probe
accctttctcctgtgtaaatatgca

SEQ ID NO: 95096 - DNA, 25 bp, probe
ctttctcctgtgtaaatatgcagtt

SEQ ID NO: 95097 - DNA, 25 bp, probe
cctttctcctgtgtaaatatgcagt

SEQ ID NO: 95098 - DNA, 25 bp, probe
tttctcctgtgtaaatatgcagttt

SEQ ID NO: 95099 - DNA, 25 bp, probe
atatgcagtttatgtgtcatcaatg

SEQ ID NO: 95100 - DNA, 25 bp, probe
cctgtgtaaatatgcagtttatgtg

SEQ ID NO: 95101 - DNA, 25 bp, probe
ccctttctcctgtgtaaatatgcag

SEQ ID NO: 95102 - DNA, 25 bp, probe
tcctgtgtaaatatgcagtttatgt

SEQ ID NO: 95103 - DNA, 25 bp, probe
gtgtaaatatgcagtttatgtgtca

SEQ ID NO: 95104 - DNA, 25 bp, probe
tgtgtaaatatgcagtttatgtgtc

SEQ ID NO: 95105 - DNA, 25 bp, probe
aaatatgcagtttatgtgtcatcaa

SEQ ID NO: 95106 - DNA, 25 bp, probe
ttctcctgtgtaaatatgcagttta

SEQ ID NO: 95107 - DNA, 25 bp, probe
ctcctgtgtaaatatgcagtttatg

SEQ ID NO: 95108 - DNA, 25 bp, probe
tctcctgtgtaaatatgcagtttat

SEQ ID NO: 95109 - DNA, 25 bp, probe
aatatgcagtttatgtgtcatcaat

SEQ ID NO: 95110 - DNA, 25 bp, probe
ctgtgtaaatatgcagtttatgtgt

SEQ ID NO: 95111 - DNA, 25 bp, probe
tgtaaatatgcagtttatgtgtcat

SEQ ID NO: 95112 - DNA, 25 bp, probe
gcagtttatgtgtcatcaatgtaca

SEQ ID NO: 95113 - DNA, 25 bp, probe
taaatatgcagtttatgtgtcatca

SEQ ID NO: 95114 - DNA, 25 bp, probe
gcctgtaccctttctcctgtgtaaa

SEQ ID NO: 95115 - DNA, 25 bp, probe
gtaaatatgcagtttatgtgtcatc

SEQ ID NO: 95116 - DNA, 25 bp, probe
atgattgcctctgattcttgtaagt

SEQ ID NO: 95117 - DNA, 25 bp, probe
tgattgcctctgattcttgtaagtt

SEQ ID NO: 95118 - DNA, 25 bp, probe
aatgattgcctctgattcttgtaag

SEQ ID NO: 95119 - DNA, 25 bp, probe
caatgattgcctctgattcttgtaa

SEQ ID NO: 95120 - DNA, 25 bp, probe
ccaatgattgcctctgattcttgta

SEQ ID NO: 95121 - DNA, 25 bp, probe
attgcctctgattcttgtaagtttg

SEQ ID NO: 95122 - DNA, 25 bp, probe
ttaatcctgacattagctgacttgc

SEQ ID NO: 95123 - DNA, 25 bp, probe
gattgcctctgattcttgtaagttt

SEQ ID NO: 95124 - DNA, 25 bp, probe
tgattcttgtaagtttgagttccac

SEQ ID NO: 95125 - DNA, 25 bp, probe
ttgcctctgattcttgtaagtttga

SEQ ID NO: 95126 - DNA, 25 bp, probe
aatctacactcttgcattcttaggc

SEQ ID NO: 95127 - DNA, 25 bp, probe
gagttccacaagggctaatttattc

SEQ ID NO: 95128 - DNA, 25 bp, probe
ctgattcttgtaagtttgagttcca

SEQ ID NO: 95129 - DNA, 25 bp, probe
tgagttccacaagggctaatttatt

SEQ ID NO: 95130 - DNA, 25 bp, probe
tctgattcttgtaagtttgagttcc

SEQ ID NO: 95131 - DNA, 25 bp, probe
atttgttacctggaatggaacttga

SEQ ID NO: 95132 - DNA, 25 bp, probe
ggaatggaacttgaaagcaaataca

SEQ ID NO: 95133 - DNA, 25 bp, probe
tggaatggaacttgaaagcaaatac

SEQ ID NO: 95134 - DNA, 25 bp, probe
ctggaatggaacttgaaagcaaata

SEQ ID NO: 95135 - DNA, 25 bp, probe
ttgttacctggaatggaacttgaaa

SEQ ID NO: 95136 - DNA, 25 bp, probe
tttgttacctggaatggaacttgaa

SEQ ID NO: 95137 - DNA, 25 bp, probe
agttccacaagggctaatttattcc

SEQ ID NO: 95138 - DNA, 25 bp, probe
tatttgttacctggaatggaacttg

SEQ ID NO: 95139 - DNA, 25 bp, probe
aaccaagaatttagtttgccaatga

SEQ ID NO: 95140 - DNA, 25 bp, probe
ttgagttccacaagggctaatttat

SEQ ID NO: 95141 - DNA, 25 bp, probe
accaagaatttagtttgccaatgat

SEQ ID NO: 95142 - DNA, 25 bp, probe
tgttacctggaatggaacttgaaag

SEQ ID NO: 95143 - DNA, 25 bp, probe
tttgagttccacaagggctaattta

SEQ ID NO: 95144 - DNA, 25 bp, probe
gatttgttgattggcaatgaggata

SEQ ID NO: 95145 - DNA, 25 bp, probe
tttgttgattggcaatgaggataaa

SEQ ID NO: 95146 - DNA, 25 bp, probe
atttgttgattggcaatgaggataa

SEQ ID NO: 95147 - DNA, 25 bp, probe
aagaatttagtttgccaatgattgc

SEQ ID NO: 95148 - DNA, 25 bp, probe
ccaagaatttagtttgccaatgatt

SEQ ID NO: 95149 - DNA, 25 bp, probe
gaatggaacttgaaagcaaatacat

SEQ ID NO: 95150 - DNA, 25 bp, probe
gattcttgtaagtttgagttccaca

SEQ ID NO: 95151 - DNA, 25 bp, probe
atatttgttacctggaatggaactt

SEQ ID NO: 95152 - DNA, 25 bp, probe
cctctgattcttgtaagtttgagtt

SEQ ID NO: 95153 - DNA, 25 bp, probe
gcctctgattcttgtaagtttgagt

SEQ ID NO: 95154 - DNA, 25 bp, probe
tgcctctgattcttgtaagtttgag

SEQ ID NO: 95155 - DNA, 25 bp, probe
aatttagtttgccaatgattgcctc

SEQ ID NO: 95156 - DNA, 25 bp, probe
gaatttagtttgccaatgattgcct

SEQ ID NO: 95157 - DNA, 25 bp, probe
agaatttagtttgccaatgattgcc

SEQ ID NO: 95158 - DNA, 25 bp, probe
actaaagacatcagttcattggtca

SEQ ID NO: 95159 - DNA, 25 bp, probe
tctacaagtcagtaaaggaacaatt

SEQ ID NO: 95160 - DNA, 25 bp, probe
acactaagtcttctggaggttctat

SEQ ID NO: 95161 - DNA, 25 bp, probe
cactaagtcttctggaggttctatt

SEQ ID NO: 95162 - DNA, 25 bp, probe
cagatgtcagactaatcaggcttat

SEQ ID NO: 95163 - DNA, 25 bp, probe
agatgtcagactaatcaggcttatc

SEQ ID NO: 95164 - DNA, 25 bp, probe
gatgtcagactaatcaggcttatcc

SEQ ID NO: 95165 - DNA, 25 bp, probe
cacactaagtcttctggaggttcta

SEQ ID NO: 95166 - DNA, 25 bp, probe
acagatgtcagactaatcaggctta

SEQ ID NO: 95167 - DNA, 25 bp, probe
gtaagtcacactaagtcttctggag

SEQ ID NO: 95168 - DNA, 25 bp, probe
agtaagtcacactaagtcttctgga

SEQ ID NO: 95169 - DNA, 25 bp, probe
tcagactaatcaggcttatccgatg

SEQ ID NO: 95170 - DNA, 25 bp, probe
taagtcacactaagtcttctggagg

SEQ ID NO: 95171 - DNA, 25 bp, probe
gtcagactaatcaggcttatccgat

SEQ ID NO: 95172 - DNA, 25 bp, probe
ctaatcaggcttatccgatgtgcta

SEQ ID NO: 95173 - DNA, 25 bp, probe
agactaatcaggcttatccgatgtg

SEQ ID NO: 95174 - DNA, 25 bp, probe
cagactaatcaggcttatccgatgt

SEQ ID NO: 95175 - DNA, 25 bp, probe
atgtcagactaatcaggcttatccg

SEQ ID NO: 95176 - DNA, 25 bp, probe
taatcaggcttatccgatgtgctac

SEQ ID NO: 95177 - DNA, 25 bp, probe
tcacactaagtcttctggaggttct

SEQ ID NO: 95178 - DNA, 25 bp, probe
gtcacactaagtcttctggaggttc

SEQ ID NO: 95179 - DNA, 25 bp, probe
tagtaagtcacactaagtcttctgg

SEQ ID NO: 95180 - DNA, 25 bp, probe
gatggaaagcgtgtgaaatagtaag

SEQ ID NO: 95181 - DNA, 25 bp, probe
aagtcttctggaggttctatttacg

SEQ ID NO: 95182 - DNA, 25 bp, probe
agatggaaagcgtgtgaaatagtaa

SEQ ID NO: 95183 - DNA, 25 bp, probe
atggaaagcgtgtgaaatagtaagt

SEQ ID NO: 95184 - DNA, 25 bp, probe
gagatggaaagcgtgtgaaatagta

SEQ ID NO: 95185 - DNA, 25 bp, probe
tgtcagactaatcaggcttatccga

SEQ ID NO: 95186 - DNA, 25 bp, probe
gaggttctatttacgggtttggttt

SEQ ID NO: 95187 - DNA, 25 bp, probe
tggaaagcgtgtgaaatagtaagtc

SEQ ID NO: 95188 - DNA, 25 bp, probe
actaagtcttctggaggttctattt

SEQ ID NO: 95189 - DNA, 25 bp, probe
atgagatggaaagcgtgtgaaatag

SEQ ID NO: 95190 - DNA, 25 bp, probe
agtcttctggaggttctatttacgg

SEQ ID NO: 95191 - DNA, 25 bp, probe
agtcacactaagtcttctggaggtt

SEQ ID NO: 95192 - DNA, 25 bp, probe
aagtcacactaagtcttctggaggt

SEQ ID NO: 95193 - DNA, 25 bp, probe
ttctggaggttctatttacgggttt

SEQ ID NO: 95194 - DNA, 25 bp, probe
gactaatcaggcttatccgatgtgc

SEQ ID NO: 95195 - DNA, 25 bp, probe
ggaaagcgtgtgaaatagtaagtca

SEQ ID NO: 95196 - DNA, 25 bp, probe
cttctggaggttctatttacgggtt

SEQ ID NO: 95197 - DNA, 25 bp, probe
gacagatgtcagactaatcaggctt

SEQ ID NO: 95198 - DNA, 25 bp, probe
aagacagatgtcagactaatcaggc

SEQ ID NO: 95199 - DNA, 25 bp, probe
gagtttctggaaaggtactaggatt

SEQ ID NO: 95200 - DNA, 25 bp, probe
atagtaagtcacactaagtcttctg

SEQ ID NO: 95201 - DNA, 25 bp, probe
tctggaggttctatttacgggtttg

SEQ ID NO: 95202 - DNA, 25 bp, probe
agtttctggaaaggtactaggattt

SEQ ID NO: 95203 - DNA, 25 bp, probe
actaatcaggcttatccgatgtgct

SEQ ID NO: 95204 - DNA, 25 bp, probe
actggaatgattgataacctctctg

SEQ ID NO: 95205 - DNA, 25 bp, probe
tgcttggatactggaatgattgata

SEQ ID NO: 95206 - DNA, 25 bp, probe
tggatactggaatgattgataacct

SEQ ID NO: 95207 - DNA, 25 bp, probe
ctgcttggatactggaatgattgat

SEQ ID NO: 95208 - DNA, 25 bp, probe
gcttggatactggaatgattgataa

SEQ ID NO: 95209 - DNA, 25 bp, probe
attctgatgttgagattgacttgga

SEQ ID NO: 95210 - DNA, 25 bp, probe
gattctgatgttgagattgacttgg

SEQ ID NO: 95211 - DNA, 25 bp, probe
ctggaatgattgataacctctctgc

SEQ ID NO: 95212 - DNA, 25 bp, probe
ggatactggaatgattgataacctc

SEQ ID NO: 95213 - DNA, 25 bp, probe
tactggaatgattgataacctctct

SEQ ID NO: 95214 - DNA, 25 bp, probe
ttctgatgttgagattgacttggag

SEQ ID NO: 95215 - DNA, 25 bp, probe
ttggatactggaatgattgataacc

SEQ ID NO: 95216 - DNA, 25 bp, probe
agattctgatgttgagattgacttg

SEQ ID NO: 95217 - DNA, 25 bp, probe
gaatgattgataacctctctgccag

SEQ ID NO: 95218 - DNA, 25 bp, probe
gactgcttggatactggaatgattg

SEQ ID NO: 95219 - DNA, 25 bp, probe
actgcttggatactggaatgattga

SEQ ID NO: 95220 - DNA, 25 bp, probe
atactggaatgattgataacctctc

SEQ ID NO: 95221 - DNA, 25 bp, probe
gatactggaatgattgataacctct

SEQ ID NO: 95222 - DNA, 25 bp, probe
agcctgatgaagagtcttactgtaa

SEQ ID NO: 95223 - DNA, 25 bp, probe
aagcctgatgaagagtcttactgta

SEQ ID NO: 95224 - DNA, 25 bp, probe
ggaatgattgataacctctctgcca

SEQ ID NO: 95225 - DNA, 25 bp, probe
tggaatgattgataacctctctgcc

SEQ ID NO: 95226 - DNA, 25 bp, probe
caacaagcctgatgaagagtcttac

SEQ ID NO: 95227 - DNA, 25 bp, probe
cttggatactggaatgattgataac

SEQ ID NO: 95228 - DNA, 25 bp, probe
aacaagcctgatgaagagtcttact

SEQ ID NO: 95229 - DNA, 25 bp, probe
tcaacaagcctgatgaagagtctta

SEQ ID NO: 95230 - DNA, 25 bp, probe
ggactgcttggatactggaatgatt

SEQ ID NO: 95231 - DNA, 25 bp, probe
ccagattctgatgttgagattgact

SEQ ID NO: 95232 - DNA, 25 bp, probe
cagattctgatgttgagattgactt

SEQ ID NO: 95233 - DNA, 25 bp, probe
caagcctgatgaagagtcttactgt

SEQ ID NO: 95234 - DNA, 25 bp, probe
acaagcctgatgaagagtcttactg

SEQ ID NO: 95235 - DNA, 25 bp, probe
tgatgaagagtcttactgtaagcag

SEQ ID NO: 95236 - DNA, 25 bp, probe
ctgatgaagagtcttactgtaagca

SEQ ID NO: 95237 - DNA, 25 bp, probe
tctgatgttgagattgacttggagc

SEQ ID NO: 95238 - DNA, 25 bp, probe
aatgattgataacctctctgccagc

SEQ ID NO: 95239 - DNA, 25 bp, probe
cctgatgaagagtcttactgtaagc

SEQ ID NO: 95240 - DNA, 25 bp, probe
gcctgatgaagagtcttactgtaag

SEQ ID NO: 95241 - DNA, 25 bp, probe
tcagaatttgaacatatcagggact

SEQ ID NO: 95242 - DNA, 25 bp, probe
ggtcagaatttgaacatatcaggga

SEQ ID NO: 95243 - DNA, 25 bp, probe
aggtcagaatttgaacatatcaggg

SEQ ID NO: 95244 - DNA, 25 bp, probe
gaggtcagaatttgaacatatcagg

SEQ ID NO: 95245 - DNA, 25 bp, probe
gccagattctgatgttgagattgac

SEQ ID NO: 95246 - DNA, 25 bp, probe
ctgccagattctgatgttgagattg

SEQ ID NO: 95247 - DNA, 25 bp, probe
agctcaagagatgccttaagataat

SEQ ID NO: 95248 - DNA, 25 bp, probe
ctcataatagatgtggtgactctcc

SEQ ID NO: 95249 - DNA, 25 bp, probe
cctcataatagatgtggtgactctc

SEQ ID NO: 95250 - DNA, 25 bp, probe
cacactgagagaagtcctattgtaa

SEQ ID NO: 95251 - DNA, 25 bp, probe
cttgcctcataatagatgtggtgac

SEQ ID NO: 95252 - DNA, 25 bp, probe
acacactgagagaagtcctattgta

SEQ ID NO: 95253 - DNA, 25 bp, probe
ttgcctcataatagatgtggtgact

SEQ ID NO: 95254 - DNA, 25 bp, probe
gcctcataatagatgtggtgactct

SEQ ID NO: 95255 - DNA, 25 bp, probe
tcacacactgagagaagtcctattg

SEQ ID NO: 95256 - DNA, 25 bp, probe
gtcacacactgagagaagtcctatt

SEQ ID NO: 95257 - DNA, 25 bp, probe
tgcctcataatagatgtggtgactc

SEQ ID NO: 95258 - DNA, 25 bp, probe
ccttgcctcataatagatgtggtga

SEQ ID NO: 95259 - DNA, 25 bp, probe
cacacactgagagaagtcctattgt

SEQ ID NO: 95260 - DNA, 25 bp, probe
gagaagtcctattgtaaagaaacgg

SEQ ID NO: 95261 - DNA, 25 bp, probe
ttaacctgttcccttctctatcctt

SEQ ID NO: 95262 - DNA, 25 bp, probe
taacctgttcccttctctatccttc

SEQ ID NO: 95263 - DNA, 25 bp, probe
agagaagtcctattgtaaagaaacg

SEQ ID NO: 95264 - DNA, 25 bp, probe
tgtcacacactgagagaagtcctat

SEQ ID NO: 95265 - DNA, 25 bp, probe
tcataatagatgtggtgactctccc

SEQ ID NO: 95266 - DNA, 25 bp, probe
cactgagagaagtcctattgtaaag

SEQ ID NO: 95267 - DNA, 25 bp, probe
actgagagaagtcctattgtaaaga

SEQ ID NO: 95268 - DNA, 25 bp, probe
acactgagagaagtcctattgtaaa

SEQ ID NO: 95269 - DNA, 25 bp, probe
ctgagagaagtcctattgtaaagaa

SEQ ID NO: 95270 - DNA, 25 bp, probe
agaagtcctattgtaaagaaacgga

SEQ ID NO: 95271 - DNA, 25 bp, probe
gactcaggagaattgtagggattgg

SEQ ID NO: 95272 - DNA, 25 bp, probe
ggactcaggagaattgtagggattg

SEQ ID NO: 95273 - DNA, 25 bp, probe
cataatagatgtggtgactctcccg

SEQ ID NO: 95274 - DNA, 25 bp, probe
gaagtcctattgtaaagaaacggaa

SEQ ID NO: 95275 - DNA, 25 bp, probe
tgagagaagtcctattgtaaagaaa

SEQ ID NO: 95276 - DNA, 25 bp, probe
aagtcctattgtaaagaaacggaaa

SEQ ID NO: 95277 - DNA, 25 bp, probe
gagagaagtcctattgtaaagaaac

SEQ ID NO: 95278 - DNA, 25 bp, probe
ttatttcatagaaagtctcctgcgg

SEQ ID NO: 95279 - DNA, 25 bp, probe
cccttgcctcataatagatgtggtg

SEQ ID NO: 95280 - DNA, 25 bp, probe
tttatttcatagaaagtctcctgcg

SEQ ID NO: 95281 - DNA, 25 bp, probe
tctgatgacattcctggtgaagcaa

SEQ ID NO: 95282 - DNA, 25 bp, probe
aacctgttcccttctctatccttcc

SEQ ID NO: 95283 - DNA, 25 bp, probe
gggactcaggagaattgtagggatt

SEQ ID NO: 95284 - DNA, 25 bp, probe
cagtgcccttgcctcataatagatg

SEQ ID NO: 95285 - DNA, 25 bp, probe
actcaggagaattgtagggattggg

SEQ ID NO: 95286 - DNA, 25 bp, probe
tgatgacattcctggtgaagcaaag

SEQ ID NO: 95287 - DNA, 25 bp, probe
ctgatgacattcctggtgaagcaaa

SEQ ID NO: 95288 - DNA, 25 bp, probe
gtgcccttgcctcataatagatgtg

SEQ ID NO: 95289 - DNA, 25 bp, probe
agtgcccttgcctcataatagatgt

SEQ ID NO: 95290 - DNA, 25 bp, probe
gttaacctgttcccttctctatcct

SEQ ID NO: 95291 - DNA, 25 bp, probe
tatttcatagaaagtctcctgcggg

SEQ ID NO: 95292 - DNA, 25 bp, probe
tggaacatatacagagttgagagtt

SEQ ID NO: 95293 - DNA, 25 bp, probe
cttagttaatggaagactgagagca

SEQ ID NO: 95294 - DNA, 25 bp, probe
acttagttaatggaagactgagagc

SEQ ID NO: 95295 - DNA, 25 bp, probe
taggtagaggagacaagatgtagac

SEQ ID NO: 95296 - DNA, 25 bp, probe
gctaggtgttgaacttagttaatgg

SEQ ID NO: 95297 - DNA, 25 bp, probe
ggctaggtgttgaacttagttaatg

SEQ ID NO: 95298 - DNA, 25 bp, probe
aacctgtaattgccaagtcctctaa

SEQ ID NO: 95299 - DNA, 25 bp, probe
ttagttaatggaagactgagagcag

SEQ ID NO: 95300 - DNA, 25 bp, probe
cctggaacatatacagagttgagag

SEQ ID NO: 95301 - DNA, 25 bp, probe
ctggaacatatacagagttgagagt

SEQ ID NO: 95302 - DNA, 25 bp, probe
ctaggtagaggagacaagatgtaga

SEQ ID NO: 95303 - DNA, 25 bp, probe
tctaggtagaggagacaagatgtag

SEQ ID NO: 95304 - DNA, 25 bp, probe
catcctggaacatatacagagttga

SEQ ID NO: 95305 - DNA, 25 bp, probe
tcatcctggaacatatacagagttg

SEQ ID NO: 95306 - DNA, 25 bp, probe
ggtgttgaacttagttaatggaaga

SEQ ID NO: 95307 - DNA, 25 bp, probe
tcctggaacatatacagagttgaga

SEQ ID NO: 95308 - DNA, 25 bp, probe
atcctggaacatatacagagttgag

SEQ ID NO: 95309 - DNA, 25 bp, probe
ctcatcctggaacatatacagagtt

SEQ ID NO: 95310 - DNA, 25 bp, probe
tagttaatggaagactgagagcaga

SEQ ID NO: 95311 - DNA, 25 bp, probe
aggtgttgaacttagttaatggaag

SEQ ID NO: 95312 - DNA, 25 bp, probe
aagcaataggagtcaagttactggt

SEQ ID NO: 95313 - DNA, 25 bp, probe
acctgtaattgccaagtcctctaag

SEQ ID NO: 95314 - DNA, 25 bp, probe
gttaatggaagactgagagcagaac

SEQ ID NO: 95315 - DNA, 25 bp, probe
agttaatggaagactgagagcagaa

SEQ ID NO: 95316 - DNA, 25 bp, probe
tgtaattgccaagtcctctaaggta

SEQ ID NO: 95317 - DNA, 25 bp, probe
ttaatggaagactgagagcagaaca

SEQ ID NO: 95318 - DNA, 25 bp, probe
gtgttgaacttagttaatggaagac

SEQ ID NO: 95319 - DNA, 25 bp, probe
ctaggtgttgaacttagttaatgga

SEQ ID NO: 95320 - DNA, 25 bp, probe
agcaataggagtcaagttactggtg

SEQ ID NO: 95321 - DNA, 25 bp, probe
gctcatcctggaacatatacagagt

SEQ ID NO: 95322 - DNA, 25 bp, probe
tgaacttagttaatggaagactgag

SEQ ID NO: 95323 - DNA, 25 bp, probe
tgccaagtcctctaaggtactaatt

SEQ ID NO: 95324 - DNA, 25 bp, probe
ttgccaagtcctctaaggtactaat

SEQ ID NO: 95325 - DNA, 25 bp, probe
attgccaagtcctctaaggtactaa

SEQ ID NO: 95326 - DNA, 25 bp, probe
aattgccaagtcctctaaggtacta

SEQ ID NO: 95327 - DNA, 25 bp, probe
taattgccaagtcctctaaggtact

SEQ ID NO: 95328 - DNA, 25 bp, probe
gtaattgccaagtcctctaaggtac

SEQ ID NO: 95329 - DNA, 25 bp, probe
agtcaccatatccagtgttgtgtaa

SEQ ID NO: 95330 - DNA, 25 bp, probe
tgttgaacttagttaatggaagact

SEQ ID NO: 95331 - DNA, 25 bp, probe
aatatggctaaaccctttcctgatt

SEQ ID NO: 95332 - DNA, 25 bp, probe
ccatatccagtgttgtgtaaagaga

SEQ ID NO: 95333 - DNA, 25 bp, probe
agtgggattctatatttcgtgtcat

SEQ ID NO: 95334 - DNA, 25 bp, probe
accatatccagtgttgtgtaaagag

SEQ ID NO: 95335 - DNA, 25 bp, probe
taatggaagactgagagcagaacag

SEQ ID NO: 95336 - DNA, 25 bp, probe
tggtaatgttgaaggagttagtctg

SEQ ID NO: 95337 - DNA, 25 bp, probe
ttggtaatgttgaaggagttagtct

SEQ ID NO: 95338 - DNA, 25 bp, probe
atattatgcctgcctaagttctgaa

SEQ ID NO: 95339 - DNA, 25 bp, probe
ggtaatgttgaaggagttagtctgg

SEQ ID NO: 95340 - DNA, 25 bp, probe
tatattatgcctgcctaagttctga

SEQ ID NO: 95341 - DNA, 25 bp, probe
taatgttgaaggagttagtctggct

SEQ ID NO: 95342 - DNA, 25 bp, probe
gtaatgttgaaggagttagtctggc

SEQ ID NO: 95343 - DNA, 25 bp, probe
aagtattgactcttctaccaagttg

SEQ ID NO: 95344 - DNA, 25 bp, probe
tattatgcctgcctaagttctgaac

SEQ ID NO: 95345 - DNA, 25 bp, probe
aatgttgaaggagttagtctggctt

SEQ ID NO: 95346 - DNA, 25 bp, probe
atatattatgcctgcctaagttctg

SEQ ID NO: 95347 - DNA, 25 bp, probe
atattccaggcagctcaatgattat

SEQ ID NO: 95348 - DNA, 25 bp, probe
tattccaggcagctcaatgattatc

SEQ ID NO: 95349 - DNA, 25 bp, probe
gatattccaggcagctcaatgatta

SEQ ID NO: 95350 - DNA, 25 bp, probe
ccagtacatatattatgcctgccta

SEQ ID NO: 95351 - DNA, 25 bp, probe
ataggtgtttggtaatgttgaagga

SEQ ID NO: 95352 - DNA, 25 bp, probe
gataggtgtttggtaatgttgaagg

SEQ ID NO: 95353 - DNA, 25 bp, probe
ggataggtgtttggtaatgttgaag

SEQ ID NO: 95354 - DNA, 25 bp, probe
aggataggtgtttggtaatgttgaa

SEQ ID NO: 95355 - DNA, 25 bp, probe
aaggataggtgtttggtaatgttga

SEQ ID NO: 95356 - DNA, 25 bp, probe
gtgtttggtaatgttgaaggagtta

SEQ ID NO: 95357 - DNA, 25 bp, probe
gctattcgtcctgtaatctgtttct

SEQ ID NO: 95358 - DNA, 25 bp, probe
taggtgtttggtaatgttgaaggag

SEQ ID NO: 95359 - DNA, 25 bp, probe
gagaaagttgttgtggtgttgtatg

SEQ ID NO: 95360 - DNA, 25 bp, probe
gtttggtaatgttgaaggagttagt

SEQ ID NO: 95361 - DNA, 25 bp, probe
tgtttggtaatgttgaaggagttag

SEQ ID NO: 95362 - DNA, 25 bp, probe
tgagaaagttgttgtggtgttgtat

SEQ ID NO: 95363 - DNA, 25 bp, probe
tttggtaatgttgaaggagttagtc

SEQ ID NO: 95364 - DNA, 25 bp, probe
acatatattatgcctgcctaagttc

SEQ ID NO: 95365 - DNA, 25 bp, probe
atactatctgcttggatttggagag

SEQ ID NO: 95366 - DNA, 25 bp, probe
catactatctgcttggatttggaga

SEQ ID NO: 95367 - DNA, 25 bp, probe
caagttggtatgatattccaggcag

SEQ ID NO: 95368 - DNA, 25 bp, probe
ttgagaaagttgttgtggtgttgta

SEQ ID NO: 95369 - DNA, 25 bp, probe
caaggataggtgtttggtaatgttg

SEQ ID NO: 95370 - DNA, 25 bp, probe
catatattatgcctgcctaagttct

SEQ ID NO: 95371 - DNA, 25 bp, probe
agtattgactcttctaccaagttgg

SEQ ID NO: 95372 - DNA, 25 bp, probe
tctaggtgaagcatactccagtgtt

SEQ ID NO: 95373 - DNA, 25 bp, probe
atctgtttctaggtgaagcatactc

SEQ ID NO: 95374 - DNA, 25 bp, probe
tgtaatctgtttctaggtgaagcat

SEQ ID NO: 95375 - DNA, 25 bp, probe
aatctgtttctaggtgaagcatact

SEQ ID NO: 95376 - DNA, 25 bp, probe
tatgatattccaggcagctcaatga

SEQ ID NO: 95377 - DNA, 25 bp, probe
gtatgatattccaggcagctcaatg

SEQ ID NO: 95378 - DNA, 25 bp, probe
ctgtaatctgtttctaggtgaagca

SEQ ID NO: 95379 - DNA, 25 bp, probe
cagtacatatattatgcctgcctaa

SEQ ID NO: 95380 - DNA, 25 bp, probe
gctcttaaccattccagtctattac

SEQ ID NO: 95381 - DNA, 25 bp, probe
ggtgccttctgaatactgttattag

SEQ ID NO: 95382 - DNA, 25 bp, probe
gtgccttctgaatactgttattaga

SEQ ID NO: 95383 - DNA, 25 bp, probe
cagctcttaaccattccagtctatt

SEQ ID NO: 95384 - DNA, 25 bp, probe
accatgtatgttaatgtgaatctgt

SEQ ID NO: 95385 - DNA, 25 bp, probe
agctcttaaccattccagtctatta

SEQ ID NO: 95386 - DNA, 25 bp, probe
catgtatgttaatgtgaatctgtgg

SEQ ID NO: 95387 - DNA, 25 bp, probe
ccatgtatgttaatgtgaatctgtg

SEQ ID NO: 95388 - DNA, 25 bp, probe
ttaggtgatttgggatagggatagt

SEQ ID NO: 95389 - DNA, 25 bp, probe
gttaggtgatttgggatagggatag

SEQ ID NO: 95390 - DNA, 25 bp, probe
gtgatttgggatagggatagtgttt

SEQ ID NO: 95391 - DNA, 25 bp, probe
tgttaggtgatttgggatagggata

SEQ ID NO: 95392 - DNA, 25 bp, probe
ctcttaaccattccagtctattact

SEQ ID NO: 95393 - DNA, 25 bp, probe
taggtgatttgggatagggatagtg

SEQ ID NO: 95394 - DNA, 25 bp, probe
gcctggtatatgatagagattgata

SEQ ID NO: 95395 - DNA, 25 bp, probe
taatatgcctcattgtgcctttact

SEQ ID NO: 95396 - DNA, 25 bp, probe
catctagcctcgtaacttcactgtc

SEQ ID NO: 95397 - DNA, 25 bp, probe
ttaatatgcctcattgtgcctttac

SEQ ID NO: 95398 - DNA, 25 bp, probe
atgtatgttaatgtgaatctgtggg

SEQ ID NO: 95399 - DNA, 25 bp, probe
ttgttaggtgatttgggatagggat

SEQ ID NO: 95400 - DNA, 25 bp, probe
ccagctcttaaccattccagtctat

SEQ ID NO: 95401 - DNA, 25 bp, probe
gggtgccttctgaatactgttatta

SEQ ID NO: 95402 - DNA, 25 bp, probe
agaatcatttcgttgtgctcctaat

SEQ ID NO: 95403 - DNA, 25 bp, probe
acctagacatagacagtattaccta

SEQ ID NO: 95404 - DNA, 25 bp, probe
aaattctccctttgtaacctcagtg

SEQ ID NO: 95405 - DNA, 25 bp, probe
cataacattggatagtctagtctct

SEQ ID NO: 95406 - DNA, 25 bp, probe
tcataacattggatagtctagtctc

SEQ ID NO: 95407 - DNA, 25 bp, probe
tttgttaggtgatttgggataggga

SEQ ID NO: 95408 - DNA, 25 bp, probe
tacctagacatagacagtattacct

SEQ ID NO: 95409 - DNA, 25 bp, probe
ttaaccattccagtctattacttgg

SEQ ID NO: 95410 - DNA, 25 bp, probe
tttaatatgcctcattgtgccttta

SEQ ID NO: 95411 - DNA, 25 bp, probe
gtatgttaatgtgaatctgtgggca

SEQ ID NO: 95412 - DNA, 25 bp, probe
tgtatgttaatgtgaatctgtgggc

SEQ ID NO: 95413 - DNA, 25 bp, probe
cttaaccattccagtctattacttg

SEQ ID NO: 95414 - DNA, 25 bp, probe
ttatgcaacaaggaacgaatggtag

SEQ ID NO: 95415 - DNA, 25 bp, probe
atctagcctcgtaacttcactgtca

SEQ ID NO: 95416 - DNA, 25 bp, probe
tcttaaccattccagtctattactt

SEQ ID NO: 95417 - DNA, 25 bp, probe
ggtgatttgggatagggatagtgtt

SEQ ID NO: 95418 - DNA, 25 bp, probe
aatatgcctcattgtgcctttactg

SEQ ID NO: 95419 - DNA, 25 bp, probe
cagaatcatttcgttgtgctcctaa

SEQ ID NO: 95420 - DNA, 25 bp, probe
atctccacacgcagtatgaagataa

SEQ ID NO: 95421 - DNA, 25 bp, probe
ttatctccacacgcagtatgaagat

SEQ ID NO: 95422 - DNA, 25 bp, probe
tgtaccatgtatgttaatgtgaatc

SEQ ID NO: 95423 - DNA, 25 bp, probe
agttccatttgatgtcaataaagca

SEQ ID NO: 95424 - DNA, 25 bp, probe
ctactgacattcctaagagtggagg

SEQ ID NO: 95425 - DNA, 25 bp, probe
gctactgacattcctaagagtggag

SEQ ID NO: 95426 - DNA, 25 bp, probe
gagctactgacattcctaagagtgg

SEQ ID NO: 95427 - DNA, 25 bp, probe
cagtgaatgctagacagaaaccaag

SEQ ID NO: 95428 - DNA, 25 bp, probe
ggagctactgacattcctaagagtg

SEQ ID NO: 95429 - DNA, 25 bp, probe
agctactgacattcctaagagtgga

SEQ ID NO: 95430 - DNA, 25 bp, probe
aactgtactgtgtttcgcattaagc

SEQ ID NO: 95431 - DNA, 25 bp, probe
aaactgtactgtgtttcgcattaag

SEQ ID NO: 95432 - DNA, 25 bp, probe
atgagatgttattactgttttgggc

SEQ ID NO: 95433 - DNA, 25 bp, probe
gtttcgcattaagcacacacatctg

SEQ ID NO: 95434 - DNA, 25 bp, probe
agactccaaggagctactgacattc

SEQ ID NO: 95435 - DNA, 25 bp, probe
gagactccaaggagctactgacatt

SEQ ID NO: 95436 - DNA, 25 bp, probe
actgtactgtgtttcgcattaagca

SEQ ID NO: 95437 - DNA, 25 bp, probe
caaagtttacattgtcctgtagctt

SEQ ID NO: 95438 - DNA, 25 bp, probe
aaagtttacattgtcctgtagcttt

SEQ ID NO: 95439 - DNA, 25 bp, probe
gaacatgacccagcctgaaagatac

SEQ ID NO: 95440 - DNA, 25 bp, probe
gctagacagaaaccaagccattaat

SEQ ID NO: 95441 - DNA, 25 bp, probe
atgctagacagaaaccaagccatta

SEQ ID NO: 95442 - DNA, 25 bp, probe
ctgtactgtgtttcgcattaagcac

SEQ ID NO: 95443 - DNA, 25 bp, probe
aacaaagtttacattgtcctgtagc

SEQ ID NO: 95444 - DNA, 25 bp, probe
ggaaacaaagtttacattgtcctgt

SEQ ID NO: 95445 - DNA, 25 bp, probe
agtttacattgtcctgtagctttaa

SEQ ID NO: 95446 - DNA, 25 bp, probe
aagtttacattgtcctgtagcttta

SEQ ID NO: 95447 - DNA, 25 bp, probe
gggaaacaaagtttacattgtcctg

SEQ ID NO: 95448 - DNA, 25 bp, probe
agggaaacaaagtttacattgtcct

SEQ ID NO: 95449 - DNA, 25 bp, probe
cagggaaacaaagtttacattgtcc

SEQ ID NO: 95450 - DNA, 25 bp, probe
ccagggaaacaaagtttacattgtc

SEQ ID NO: 95451 - DNA, 25 bp, probe
tgctagacagaaaccaagccattaa

SEQ ID NO: 95452 - DNA, 25 bp, probe
aatgagatgttattactgttttggg

SEQ ID NO: 95453 - DNA, 25 bp, probe
aaggagctactgacattcctaagag

SEQ ID NO: 95454 - DNA, 25 bp, probe
cattgtcctgtagctttaaaaccac

SEQ ID NO: 95455 - DNA, 25 bp, probe
tgtttcgcattaagcacacacatct

SEQ ID NO: 95456 - DNA, 25 bp, probe
tgaaagatacaggggatcatgttaa

SEQ ID NO: 95457 - DNA, 25 bp, probe
tactgacattcctaagagtggagga

SEQ ID NO: 95458 - DNA, 25 bp, probe
caaggagctactgacattcctaaga

SEQ ID NO: 95459 - DNA, 25 bp, probe
ctgaaagatacaggggatcatgtta

SEQ ID NO: 95460 - DNA, 25 bp, probe
gtttacattgtcctgtagctttaaa

SEQ ID NO: 95461 - DNA, 25 bp, probe
acaaagtttacattgtcctgtagct

SEQ ID NO: 95462 - DNA, 25 bp, probe
aatgctagacagaaaccaagccatt

SEQ ID NO: 95463 - DNA, 25 bp, probe
aacatgacccagcctgaaagataca

SEQ ID NO: 95464 - DNA, 25 bp, probe
tttcgcattaagcacacacatctgg

SEQ ID NO: 95465 - DNA, 25 bp, probe
gaaagatacaggggatcatgttaaa

SEQ ID NO: 95466 - DNA, 25 bp, probe
aaacaaagtttacattgtcctgtag

SEQ ID NO: 95467 - DNA, 25 bp, probe
gaaacaaagtttacattgtcctgta

SEQ ID NO: 95468 - DNA, 25 bp, probe
tctgaatcacataagtaaggcatct

SEQ ID NO: 95469 - DNA, 25 bp, probe
ctctgaatcacataagtaaggcatc

SEQ ID NO: 95470 - DNA, 25 bp, probe
ctgaatcacataagtaaggcatctt

SEQ ID NO: 95471 - DNA, 25 bp, probe
ttgaataacttgatccacacacttg

SEQ ID NO: 95472 - DNA, 25 bp, probe
attgaataacttgatccacacactt

SEQ ID NO: 95473 - DNA, 25 bp, probe
aattgaataacttgatccacacact

SEQ ID NO: 95474 - DNA, 25 bp, probe
ttcagatcacagaagattcagagat

SEQ ID NO: 95475 - DNA, 25 bp, probe
attcagatcacagaagattcagaga

SEQ ID NO: 95476 - DNA, 25 bp, probe
cctctgaatcacataagtaaggcat

SEQ ID NO: 95477 - DNA, 25 bp, probe
aattcagatcacagaagattcagag

SEQ ID NO: 95478 - DNA, 25 bp, probe
tgaataacttgatccacacacttgc

SEQ ID NO: 95479 - DNA, 25 bp, probe
agtaatctgtatctgatccaggtga

SEQ ID NO: 95480 - DNA, 25 bp, probe
cagtaatctgtatctgatccaggtg

SEQ ID NO: 95481 - DNA, 25 bp, probe
gtaatctgtatctgatccaggtgac

SEQ ID NO: 95482 - DNA, 25 bp, probe
taatctgtatctgatccaggtgaca

SEQ ID NO: 95483 - DNA, 25 bp, probe
atccagtaatctgtatctgatccag

SEQ ID NO: 95484 - DNA, 25 bp, probe
tccagtaatctgtatctgatccagg

SEQ ID NO: 95485 - DNA, 25 bp, probe
ccagtaatctgtatctgatccaggt

SEQ ID NO: 95486 - DNA, 25 bp, probe
aatccagtaatctgtatctgatcca

SEQ ID NO: 95487 - DNA, 25 bp, probe
cataagtaaggcatctttgttgtca

SEQ ID NO: 95488 - DNA, 25 bp, probe
aatctgtatctgatccaggtgacac

SEQ ID NO: 95489 - DNA, 25 bp, probe
aaataaaggaaagtctggagtgttt

SEQ ID NO: 95490 - DNA, 25 bp, probe
ggaaacagtataatttgaccattgc

SEQ ID NO: 95491 - DNA, 25 bp, probe
ggttcagcaagaaatccagtaatct

SEQ ID NO: 95492 - DNA, 25 bp, probe
taataatcttcgtccacaagacaca

SEQ ID NO: 95493 - DNA, 25 bp, probe
gtgtataataatcttcgtccacaag

SEQ ID NO: 95494 - DNA, 25 bp, probe
ataagtaaggcatctttgttgtcaa

SEQ ID NO: 95495 - DNA, 25 bp, probe
gaataacttgatccacacacttgca

SEQ ID NO: 95496 - DNA, 25 bp, probe
ataataatcttcgtccacaagacac

SEQ ID NO: 95497 - DNA, 25 bp, probe
tgaatcacataagtaaggcatcttt

SEQ ID NO: 95498 - DNA, 25 bp, probe
tagggttcagcaagaaatccagtaa

SEQ ID NO: 95499 - DNA, 25 bp, probe
ttagggttcagcaagaaatccagta

SEQ ID NO: 95500 - DNA, 25 bp, probe
aataatcttcgtccacaagacacag

SEQ ID NO: 95501 - DNA, 25 bp, probe
cacataagtaaggcatctttgttgt

SEQ ID NO: 95502 - DNA, 25 bp, probe
acataagtaaggcatctttgttgtc

SEQ ID NO: 95503 - DNA, 25 bp, probe
tcacataagtaaggcatctttgttg

SEQ ID NO: 95504 - DNA, 25 bp, probe
gaatcacataagtaaggcatctttg

SEQ ID NO: 95505 - DNA, 25 bp, probe
aataacttgatccacacacttgcac

SEQ ID NO: 95506 - DNA, 25 bp, probe
gttcagcaagaaatccagtaatctg

SEQ ID NO: 95507 - DNA, 25 bp, probe
gaaacagtataatttgaccattgct

SEQ ID NO: 95508 - DNA, 25 bp, probe
tcagcaagaaatccagtaatctgta

SEQ ID NO: 95509 - DNA, 25 bp, probe
ttcagcaagaaatccagtaatctgt

SEQ ID NO: 95510 - DNA, 25 bp, probe
gggttcagcaagaaatccagtaatc

SEQ ID NO: 95511 - DNA, 25 bp, probe
tcagatcacagaagattcagagatc

SEQ ID NO: 95512 - DNA, 25 bp, probe
gcagcataggaacaataagaacaat

SEQ ID NO: 95513 - DNA, 25 bp, probe
agaagcagcataggaacaataagaa

SEQ ID NO: 95514 - DNA, 25 bp, probe
gaagcagcataggaacaataagaac

SEQ ID NO: 95515 - DNA, 25 bp, probe
gtagaagcagcataggaacaataag

SEQ ID NO: 95516 - DNA, 25 bp, probe
tagaagcagcataggaacaataaga

SEQ ID NO: 95517 - DNA, 25 bp, probe
agcagcataggaacaataagaacaa

SEQ ID NO: 95518 - DNA, 25 bp, probe
aagcagcataggaacaataagaaca

SEQ ID NO: 95519 - DNA, 25 bp, probe
taacattgtagaagcagcataggaa

SEQ ID NO: 95520 - DNA, 25 bp, probe
gtaacattgtagaagcagcatagga

SEQ ID NO: 95521 - DNA, 25 bp, probe
tgtaacattgtagaagcagcatagg

SEQ ID NO: 95522 - DNA, 25 bp, probe
aacattgtagaagcagcataggaac

SEQ ID NO: 95523 - DNA, 25 bp, probe
tgtagaagcagcataggaacaataa

SEQ ID NO: 95524 - DNA, 25 bp, probe
atgtaacattgtagaagcagcatag

SEQ ID NO: 95525 - DNA, 25 bp, probe
gatgtaacattgtagaagcagcata

SEQ ID NO: 95526 - DNA, 25 bp, probe
tgatgtaacattgtagaagcagcat

SEQ ID NO: 95527 - DNA, 25 bp, probe
agttgatgtaacattgtagaagcag

SEQ ID NO: 95528 - DNA, 25 bp, probe
aatccagcagtcattacttgtgatg

SEQ ID NO: 95529 - DNA, 25 bp, probe
caatccagcagtcattacttgtgat

SEQ ID NO: 95530 - DNA, 25 bp, probe
gttgatgtaacattgtagaagcagc

SEQ ID NO: 95531 - DNA, 25 bp, probe
ttgatgtaacattgtagaagcagca

SEQ ID NO: 95532 - DNA, 25 bp, probe
gcataggaacaataagaacaatagg

SEQ ID NO: 95533 - DNA, 25 bp, probe
tagttgatgtaacattgtagaagca

SEQ ID NO: 95534 - DNA, 25 bp, probe
cagcataggaacaataagaacaata

SEQ ID NO: 95535 - DNA, 25 bp, probe
acattgtagaagcagcataggaaca

SEQ ID NO: 95536 - DNA, 25 bp, probe
gaatctactatactttggttggcag

SEQ ID NO: 95537 - DNA, 25 bp, probe
agaatctactatactttggttggca

SEQ ID NO: 95538 - DNA, 25 bp, probe
aatctactatactttggttggcagc

SEQ ID NO: 95539 - DNA, 25 bp, probe
agcacaacaagatgaaattatggaa

SEQ ID NO: 95540 - DNA, 25 bp, probe
taacacttgtatttggaggctcttc

SEQ ID NO: 95541 - DNA, 25 bp, probe
ctaacacttgtatttggaggctctt

SEQ ID NO: 95542 - DNA, 25 bp, probe
ttctaacacttgtatttggaggctc

SEQ ID NO: 95543 - DNA, 25 bp, probe
cttctaacacttgtatttggaggct

SEQ ID NO: 95544 - DNA, 25 bp, probe
tactatactttggttggcagcattc

SEQ ID NO: 95545 - DNA, 25 bp, probe
ctactatactttggttggcagcatt

SEQ ID NO: 95546 - DNA, 25 bp, probe
cattacttgtgatgagctactcctg

SEQ ID NO: 95547 - DNA, 25 bp, probe
gtatttggaggctcttctgtgattt

SEQ ID NO: 95548 - DNA, 25 bp, probe
agcataggaacaataagaacaatag

SEQ ID NO: 95549 - DNA, 25 bp, probe
taagcatttcagttccaggagaata

SEQ ID NO: 95550 - DNA, 25 bp, probe
agcatttcagttccaggagaataaa

SEQ ID NO: 95551 - DNA, 25 bp, probe
aagcatttcagttccaggagaataa

SEQ ID NO: 95552 - DNA, 25 bp, probe
tagcacaacaagatgaaattatgga

SEQ ID NO: 95553 - DNA, 25 bp, probe
ctaagcatttcagttccaggagaat

SEQ ID NO: 95554 - DNA, 25 bp, probe
tctaacacttgtatttggaggctct

SEQ ID NO: 95555 - DNA, 25 bp, probe
gcacaacaagatgaaattatggaat

SEQ ID NO: 95556 - DNA, 25 bp, probe
caatcacaaggataatagagtagcc

SEQ ID NO: 95557 - DNA, 25 bp, probe
ccaatcacaaggataatagagtagc

SEQ ID NO: 95558 - DNA, 25 bp, probe
ggtgactagaacaacttgaagattg

SEQ ID NO: 95559 - DNA, 25 bp, probe
accaatcacaaggataatagagtag

SEQ ID NO: 95560 - DNA, 25 bp, probe
aatcacaaggataatagagtagcct

SEQ ID NO: 95561 - DNA, 25 bp, probe
aattaagacagcattgatctcctgg

SEQ ID NO: 95562 - DNA, 25 bp, probe
attaagacagcattgatctcctgga

SEQ ID NO: 95563 - DNA, 25 bp, probe
tcacaaggataatagagtagcctaa

SEQ ID NO: 95564 - DNA, 25 bp, probe
atcacaaggataatagagtagccta

SEQ ID NO: 95565 - DNA, 25 bp, probe
ataccaatcacaaggataatagagt

SEQ ID NO: 95566 - DNA, 25 bp, probe
caacttgaagattgtagcaataagc

SEQ ID NO: 95567 - DNA, 25 bp, probe
gggtgactagaacaacttgaagatt

SEQ ID NO: 95568 - DNA, 25 bp, probe
gcctctaaattaagacagcattgat

SEQ ID NO: 95569 - DNA, 25 bp, probe
tgagcctttattggtaaattctggt

SEQ ID NO: 95570 - DNA, 25 bp, probe
ttctaaggcaggaatttgagagttc

SEQ ID NO: 95571 - DNA, 25 bp, probe
ttgagcctttattggtaaattctgg

SEQ ID NO: 95572 - DNA, 25 bp, probe
aatggctaactgatgaattagaagc

SEQ ID NO: 95573 - DNA, 25 bp, probe
ggaatttgagagttcacagaaggat

SEQ ID NO: 95574 - DNA, 25 bp, probe
atttgggtgactagaacaacttgaa

SEQ ID NO: 95575 - DNA, 25 bp, probe
aatttgggtgactagaacaacttga

SEQ ID NO: 95576 - DNA, 25 bp, probe
atgccatgtttgcctctaaattaag

SEQ ID NO: 95577 - DNA, 25 bp, probe
gatgccatgtttgcctctaaattaa

SEQ ID NO: 95578 - DNA, 25 bp, probe
atgtttgcctctaaattaagacagc

SEQ ID NO: 95579 - DNA, 25 bp, probe
taatttgggtgactagaacaacttg

SEQ ID NO: 95580 - DNA, 25 bp, probe
gagcctttattggtaaattctggta

SEQ ID NO: 95581 - DNA, 25 bp, probe
aggtctcaaggttctcatttctcag

SEQ ID NO: 95582 - DNA, 25 bp, probe
tgggtgactagaacaacttgaagat

SEQ ID NO: 95583 - DNA, 25 bp, probe
tttgggtgactagaacaacttgaag

SEQ ID NO: 95584 - DNA, 25 bp, probe
aactctttgagcctttattggtaaa

SEQ ID NO: 95585 - DNA, 25 bp, probe
gaatttgagagttcacagaaggatc

SEQ ID NO: 95586 - DNA, 25 bp, probe
taccaatcacaaggataatagagta

SEQ ID NO: 95587 - DNA, 25 bp, probe
caggaatttgagagttcacagaagg

SEQ ID NO: 95588 - DNA, 25 bp, probe
actctttgagcctttattggtaaat

SEQ ID NO: 95589 - DNA, 25 bp, probe
tctcaaggttctcatttctcaggtg

SEQ ID NO: 95590 - DNA, 25 bp, probe
gtctcaaggttctcatttctcaggt

SEQ ID NO: 95591 - DNA, 25 bp, probe
caggtctcaaggttctcatttctca

SEQ ID NO: 95592 - DNA, 25 bp, probe
gccatgtttgcctctaaattaagac

SEQ ID NO: 95593 - DNA, 25 bp, probe
aggaatttgagagttcacagaagga

SEQ ID NO: 95594 - DNA, 25 bp, probe
ctaaggcaggaatttgagagttcac

SEQ ID NO: 95595 - DNA, 25 bp, probe
tctaaggcaggaatttgagagttca

SEQ ID NO: 95596 - DNA, 25 bp, probe
tgccatgtttgcctctaaattaaga

SEQ ID NO: 95597 - DNA, 25 bp, probe
agcctttattggtaaattctggtat

SEQ ID NO: 95598 - DNA, 25 bp, probe
ttaagacagcattgatctcctggag

SEQ ID NO: 95599 - DNA, 25 bp, probe
aatttgagagttcacagaaggatcg

SEQ ID NO: 95600 - DNA, 25 bp, probe
tctccaccttgttacacattatgtt

SEQ ID NO: 95601 - DNA, 25 bp, probe
tacacattatgttagagaggtagcg

SEQ ID NO: 95602 - DNA, 25 bp, probe
ctctccaccttgttacacattatgt

SEQ ID NO: 95603 - DNA, 25 bp, probe
cacattatgttagagaggtagcgag

SEQ ID NO: 95604 - DNA, 25 bp, probe
gctctccaccttgttacacattatg

SEQ ID NO: 95605 - DNA, 25 bp, probe
cgtgagaagatagaacaatgctata

SEQ ID NO: 95606 - DNA, 25 bp, probe
acacattatgttagagaggtagcga

SEQ ID NO: 95607 - DNA, 25 bp, probe
ctaattcctggcatgacactctagt

SEQ ID NO: 95608 - DNA, 25 bp, probe
gaactgaagacctccacattaagtg

SEQ ID NO: 95609 - DNA, 25 bp, probe
taaggtcttcttgtgtcctgatgaa

SEQ ID NO: 95610 - DNA, 25 bp, probe
ccaccttgttacacattatgttaga

SEQ ID NO: 95611 - DNA, 25 bp, probe
tccaccttgttacacattatgttag

SEQ ID NO: 95612 - DNA, 25 bp, probe
ctccaccttgttacacattatgtta

SEQ ID NO: 95613 - DNA, 25 bp, probe
aggacggttgtaagcagttgttatt

SEQ ID NO: 95614 - DNA, 25 bp, probe
atgtaaggtcttcttgtgtcctgat

SEQ ID NO: 95615 - DNA, 25 bp, probe
aacgtgagaagatagaacaatgcta

SEQ ID NO: 95616 - DNA, 25 bp, probe
taacgtgagaagatagaacaatgct

SEQ ID NO: 95617 - DNA, 25 bp, probe
gtaacgtgagaagatagaacaatgc

SEQ ID NO: 95618 - DNA, 25 bp, probe
tgtgcttgaaatgagaaactttgat

SEQ ID NO: 95619 - DNA, 25 bp, probe
atgtgcttgaaatgagaaactttga

SEQ ID NO: 95620 - DNA, 25 bp, probe
ttattctcctccctgttatctgcta

SEQ ID NO: 95621 - DNA, 25 bp, probe
ggtaacgtgagaagatagaacaatg

SEQ ID NO: 95622 - DNA, 25 bp, probe
cggttgtaagcagttgttatttagt

SEQ ID NO: 95623 - DNA, 25 bp, probe
acggttgtaagcagttgttatttag

SEQ ID NO: 95624 - DNA, 25 bp, probe
gacggttgtaagcagttgttattta

SEQ ID NO: 95625 - DNA, 25 bp, probe
tatggtgaggtgtggataaggctta

SEQ ID NO: 95626 - DNA, 25 bp, probe
tgtatgtagtagtttgggtgtgtat

SEQ ID NO: 95627 - DNA, 25 bp, probe
atgtatgtagtagtttgggtgtgta

SEQ ID NO: 95628 - DNA, 25 bp, probe
tatgtatgtagtagtttgggtgtgt

SEQ ID NO: 95629 - DNA, 25 bp, probe
tcttgctgtaactcagacattccaa

SEQ ID NO: 95630 - DNA, 25 bp, probe
gtaaggtcttcttgtgtcctgatga

SEQ ID NO: 95631 - DNA, 25 bp, probe
tgagattactttgtcccgcttattc

SEQ ID NO: 95632 - DNA, 25 bp, probe
attatgttagagaggtagcgagctg

SEQ ID NO: 95633 - DNA, 25 bp, probe
cattatgttagagaggtagcgagct

SEQ ID NO: 95634 - DNA, 25 bp, probe
gtgagattactttgtcccgcttatt

SEQ ID NO: 95635 - DNA, 25 bp, probe
gaggacggttgtaagcagttgttat

SEQ ID NO: 95636 - DNA, 25 bp, probe
cctaattcctggcatgacactctag

SEQ ID NO: 95637 - DNA, 25 bp, probe
acattatgttagagaggtagcgagc

SEQ ID NO: 95638 - DNA, 25 bp, probe
agattactttgtcccgcttattctc

SEQ ID NO: 95639 - DNA, 25 bp, probe
gagattactttgtcccgcttattct

SEQ ID NO: 95640 - DNA, 25 bp, probe
gtaactcagacattccaagggtatg

SEQ ID NO: 95641 - DNA, 25 bp, probe
cttattctcctccctgttatctgct

SEQ ID NO: 95642 - DNA, 25 bp, probe
ggttgtaagcagttgttatttagtg

SEQ ID NO: 95643 - DNA, 25 bp, probe
ttacacattatgttagagaggtagc

SEQ ID NO: 95644 - DNA, 25 bp, probe
ctatgcttagtgccaatagtaagtg

SEQ ID NO: 95645 - DNA, 25 bp, probe
gctatgcttagtgccaatagtaagt

SEQ ID NO: 95646 - DNA, 25 bp, probe
tatgcttagtgccaatagtaagtgg

SEQ ID NO: 95647 - DNA, 25 bp, probe
cttctactggcttgtaatttaggga

SEQ ID NO: 95648 - DNA, 25 bp, probe
tcttctactggcttgtaatttaggg

SEQ ID NO: 95649 - DNA, 25 bp, probe
cccatacttatatcaaggtcccaaa

SEQ ID NO: 95650 - DNA, 25 bp, probe
tctactggcttgtaatttagggaaa

SEQ ID NO: 95651 - DNA, 25 bp, probe
cattactttaacctccctcaacaag

SEQ ID NO: 95652 - DNA, 25 bp, probe
ttctactggcttgtaatttagggaa

SEQ ID NO: 95653 - DNA, 25 bp, probe
gcattactttaacctccctcaacaa

SEQ ID NO: 95654 - DNA, 25 bp, probe
aagcattactttaacctccctcaac

SEQ ID NO: 95655 - DNA, 25 bp, probe
caagcattactttaacctccctcaa

SEQ ID NO: 95656 - DNA, 25 bp, probe
ttcttctactggcttgtaatttagg

SEQ ID NO: 95657 - DNA, 25 bp, probe
agcattactttaacctccctcaaca

SEQ ID NO: 95658 - DNA, 25 bp, probe
cttccaagcattactttaacctccc

SEQ ID NO: 95659 - DNA, 25 bp, probe
ttccaagcattactttaacctccct

SEQ ID NO: 95660 - DNA, 25 bp, probe
attactttaacctccctcaacaagg

SEQ ID NO: 95661 - DNA, 25 bp, probe
tccaagcattactttaacctccctc

SEQ ID NO: 95662 - DNA, 25 bp, probe
agctatgcttagtgccaatagtaag

SEQ ID NO: 95663 - DNA, 25 bp, probe
acaagtgctgtctttgaaatggaaa

SEQ ID NO: 95664 - DNA, 25 bp, probe
aacaagtgctgtctttgaaatggaa

SEQ ID NO: 95665 - DNA, 25 bp, probe
aaacaagtgctgtctttgaaatgga

SEQ ID NO: 95666 - DNA, 25 bp, probe
ccaagcattactttaacctccctca

SEQ ID NO: 95667 - DNA, 25 bp, probe
tttgctgttgtttctataaatgact

SEQ ID NO: 95668 - DNA, 25 bp, probe
tttcttctactggcttgtaatttag

SEQ ID NO: 95669 - DNA, 25 bp, probe
ttgcatttgctgttgtttctataaa

SEQ ID NO: 95670 - DNA, 25 bp, probe
tttattgcatttgctgttgtttcta

SEQ ID NO: 95671 - DNA, 25 bp, probe
gtaagtggctatttgtaaagcagtg

SEQ ID NO: 95672 - DNA, 25 bp, probe
agtaagtggctatttgtaaagcagt

SEQ ID NO: 95673 - DNA, 25 bp, probe
taagtggctatttgtaaagcagtgt

SEQ ID NO: 95674 - DNA, 25 bp, probe
attgcatttgctgttgtttctataa

SEQ ID NO: 95675 - DNA, 25 bp, probe
ttattgcatttgctgttgtttctat

SEQ ID NO: 95676 - DNA, 25 bp, probe
ttgctgttgtttctataaatgacta

SEQ ID NO: 95677 - DNA, 25 bp, probe
tagtaagtggctatttgtaaagcag

SEQ ID NO: 95678 - DNA, 25 bp, probe
tacataaagtcatcaaagtggggta

SEQ ID NO: 95679 - DNA, 25 bp, probe
gcttttcttctactggcttgtaatt

SEQ ID NO: 95680 - DNA, 25 bp, probe
agacagcactttgaaaaccctaaat

SEQ ID NO: 95681 - DNA, 25 bp, probe
agtggctatttgtaaagcagtgttt

SEQ ID NO: 95682 - DNA, 25 bp, probe
aagtggctatttgtaaagcagtgtt

SEQ ID NO: 95683 - DNA, 25 bp, probe
tgctgttgtttctataaatgactat

SEQ ID NO: 95684 - DNA, 25 bp, probe
tactggcttgtaatttagggaaaac

SEQ ID NO: 95685 - DNA, 25 bp, probe
ctactggcttgtaatttagggaaaa

SEQ ID NO: 95686 - DNA, 25 bp, probe
atagtaagtggctatttgtaaagca

SEQ ID NO: 95687 - DNA, 25 bp, probe
aagacagcactttgaaaaccctaaa

SEQ ID NO: 95688 - DNA, 25 bp, probe
atgatgctaccagagtctacctaat

SEQ ID NO: 95689 - DNA, 25 bp, probe
catagagacattaagccagagaact

SEQ ID NO: 95690 - DNA, 25 bp, probe
tcatagagacattaagccagagaac

SEQ ID NO: 95691 - DNA, 25 bp, probe
gatgctaccagagtctacctaattc

SEQ ID NO: 95692 - DNA, 25 bp, probe
tgatgctaccagagtctacctaatt

SEQ ID NO: 95693 - DNA, 25 bp, probe
attcatagagacattaagccagaga

SEQ ID NO: 95694 - DNA, 25 bp, probe
atagagacattaagccagagaactt

SEQ ID NO: 95695 - DNA, 25 bp, probe
ttcatagagacattaagccagagaa

SEQ ID NO: 95696 - DNA, 25 bp, probe
atgctaccagagtctacctaattct

SEQ ID NO: 95697 - DNA, 25 bp, probe
acctgagtgagtgtgtaacttattg

SEQ ID NO: 95698 - DNA, 25 bp, probe
aataaccttcctagtacctgagtga

SEQ ID NO: 95699 - DNA, 25 bp, probe
caataaccttcctagtacctgagtg

SEQ ID NO: 95700 - DNA, 25 bp, probe
ataaccttcctagtacctgagtgag

SEQ ID NO: 95701 - DNA, 25 bp, probe
tacctgagtgagtgtgtaacttatt

SEQ ID NO: 95702 - DNA, 25 bp, probe
gagtctacctaattctggaatatgc

SEQ ID NO: 95703 - DNA, 25 bp, probe
cctgagtgagtgtgtaacttattgg

SEQ ID NO: 95704 - DNA, 25 bp, probe
gagacattaagccagagaacttact

SEQ ID NO: 95705 - DNA, 25 bp, probe
agagacattaagccagagaacttac

SEQ ID NO: 95706 - DNA, 25 bp, probe
gtacctgagtgagtgtgtaacttat

SEQ ID NO: 95707 - DNA, 25 bp, probe
agacattaagccagagaacttactt

SEQ ID NO: 95708 - DNA, 25 bp, probe
gacattaagccagagaacttacttc

SEQ ID NO: 95709 - DNA, 25 bp, probe
catgatgctaccagagtctacctaa

SEQ ID NO: 95710 - DNA, 25 bp, probe
agtacctgagtgagtgtgtaactta

SEQ ID NO: 95711 - DNA, 25 bp, probe
tagtacctgagtgagtgtgtaactt

SEQ ID NO: 95712 - DNA, 25 bp, probe
gcaataaccttcctagtacctgagt

SEQ ID NO: 95713 - DNA, 25 bp, probe
taaccttcctagtacctgagtgagt

SEQ ID NO: 95714 - DNA, 25 bp, probe
ctagtacctgagtgagtgtgtaact

SEQ ID NO: 95715 - DNA, 25 bp, probe
tattcatagagacattaagccagag

SEQ ID NO: 95716 - DNA, 25 bp, probe
cgaagagagttattcatagagacat

SEQ ID NO: 95717 - DNA, 25 bp, probe
cctagtacctgagtgagtgtgtaac

SEQ ID NO: 95718 - DNA, 25 bp, probe
tcctagtacctgagtgagtgtgtaa

SEQ ID NO: 95719 - DNA, 25 bp, probe
ttcctagtacctgagtgagtgtgta

SEQ ID NO: 95720 - DNA, 25 bp, probe
tagagacattaagccagagaactta

SEQ ID NO: 95721 - DNA, 25 bp, probe
agttattcatagagacattaagcca

SEQ ID NO: 95722 - DNA, 25 bp, probe
gttattcatagagacattaagccag

SEQ ID NO: 95723 - DNA, 25 bp, probe
tctacctaattctggaatatgcacc

SEQ ID NO: 95724 - DNA, 25 bp, probe
ttattcatagagacattaagccaga

SEQ ID NO: 95725 - DNA, 25 bp, probe
aaacacataccaagagacctacaaa

SEQ ID NO: 95726 - DNA, 25 bp, probe
caaacacataccaagagacctacaa

SEQ ID NO: 95727 - DNA, 25 bp, probe
gtctacctaattctggaatatgcac

SEQ ID NO: 95728 - DNA, 25 bp, probe
agtctacctaattctggaatatgca

SEQ ID NO: 95729 - DNA, 25 bp, probe
gagttattcatagagacattaagcc

SEQ ID NO: 95730 - DNA, 25 bp, probe
tcgaagagagttattcatagagaca

SEQ ID NO: 95731 - DNA, 25 bp, probe
ccttggagttctttgctatgaattt

SEQ ID NO: 95732 - DNA, 25 bp, probe
tttctttgctgaagtgagtagtgtg

SEQ ID NO: 95733 - DNA, 25 bp, probe
gtttctttgctgaagtgagtagtgt

SEQ ID NO: 95734 - DNA, 25 bp, probe
tctttgctgaagtgagtagtgtgat

SEQ ID NO: 95735 - DNA, 25 bp, probe
tgaagtgagtagtgtgatcctggag

SEQ ID NO: 95736 - DNA, 25 bp, probe
ctgaagtgagtagtgtgatcctgga

SEQ ID NO: 95737 - DNA, 25 bp, probe
ttctttgctgaagtgagtagtgtga

SEQ ID NO: 95738 - DNA, 25 bp, probe
ctcccttgaagccatagaatttagg

SEQ ID NO: 95739 - DNA, 25 bp, probe
ctttgctgaagtgagtagtgtgatc

SEQ ID NO: 95740 - DNA, 25 bp, probe
cgtttctttgctgaagtgagtagtg

SEQ ID NO: 95741 - DNA, 25 bp, probe
ttgctgaagtgagtagtgtgatcct

SEQ ID NO: 95742 - DNA, 25 bp, probe
gaagtgagtagtgtgatcctggagg

SEQ ID NO: 95743 - DNA, 25 bp, probe
tttgctgaagtgagtagtgtgatcc

SEQ ID NO: 95744 - DNA, 25 bp, probe
tccgtttctttgctgaagtgagtag

SEQ ID NO: 95745 - DNA, 25 bp, probe
aaatggcatttacgtttctctgatg

SEQ ID NO: 95746 - DNA, 25 bp, probe
tgctgaagtgagtagtgtgatcctg

SEQ ID NO: 95747 - DNA, 25 bp, probe
ccgtttctttgctgaagtgagtagt

SEQ ID NO: 95748 - DNA, 25 bp, probe
ctccgtttctttgctgaagtgagta

SEQ ID NO: 95749 - DNA, 25 bp, probe
gctcccttgaagccatagaatttag

SEQ ID NO: 95750 - DNA, 25 bp, probe
atttacgtttctctgatgctccctt

SEQ ID NO: 95751 - DNA, 25 bp, probe
tgctcccttgaagccatagaattta

SEQ ID NO: 95752 - DNA, 25 bp, probe
gaaatggcatttacgtttctctgat

SEQ ID NO: 95753 - DNA, 25 bp, probe
gctgaagtgagtagtgtgatcctgg

SEQ ID NO: 95754 - DNA, 25 bp, probe
catttacgtttctctgatgctccct

SEQ ID NO: 95755 - DNA, 25 bp, probe
atgctcccttgaagccatagaattt

SEQ ID NO: 95756 - DNA, 25 bp, probe
tttacgtttctctgatgctcccttg

SEQ ID NO: 95757 - DNA, 25 bp, probe
ttgctttaccaagtgtacagaaatg

SEQ ID NO: 95758 - DNA, 25 bp, probe
tttgctttaccaagtgtacagaaat

SEQ ID NO: 95759 - DNA, 25 bp, probe
ctatgactacctgcggaagctcttc

SEQ ID NO: 95760 - DNA, 25 bp, probe
gatgctcccttgaagccatagaatt

SEQ ID NO: 95761 - DNA, 25 bp, probe
gtgtacagaaatggcatttacgttt

SEQ ID NO: 95762 - DNA, 25 bp, probe
caagtgtacagaaatggcatttacg

SEQ ID NO: 95763 - DNA, 25 bp, probe
agtgtacagaaatggcatttacgtt

SEQ ID NO: 95764 - DNA, 25 bp, probe
aagtgtacagaaatggcatttacgt

SEQ ID NO: 95765 - DNA, 25 bp, probe
tcataaagtccagcttgtctccctc

SEQ ID NO: 95766 - DNA, 25 bp, probe
ccaagtgtacagaaatggcatttac

SEQ ID NO: 95767 - DNA, 25 bp, probe
ttacgtttctctgatgctcccttga

SEQ ID NO: 95768 - DNA, 25 bp, probe
accaagtgtacagaaatggcattta

SEQ ID NO: 95769 - DNA, 25 bp, probe
taccaagtgtacagaaatggcattt

SEQ ID NO: 95770 - DNA, 25 bp, probe
ttaccaagtgtacagaaatggcatt

SEQ ID NO: 95771 - DNA, 25 bp, probe
tttaccaagtgtacagaaatggcat

SEQ ID NO: 95772 - DNA, 25 bp, probe
tacgtttctctgatgctcccttgaa

SEQ ID NO: 95773 - DNA, 25 bp, probe
gtcataaagtccagcttgtctccct

SEQ ID NO: 95774 - DNA, 25 bp, probe
tgtacagaaatggcatttacgtttc

SEQ ID NO: 95775 - DNA, 25 bp, probe
ctttaccaagtgtacagaaatggca

SEQ ID NO: 95776 - DNA, 25 bp, probe
cagtgttagggtagcatgggattac

SEQ ID NO: 95777 - DNA, 25 bp, probe
actcccctcataacaatagacacat

SEQ ID NO: 95778 - DNA, 25 bp, probe
gtgttagggtagcatgggattacag

SEQ ID NO: 95779 - DNA, 25 bp, probe
gactcccctcataacaatagacaca

SEQ ID NO: 95780 - DNA, 25 bp, probe
agtgttagggtagcatgggattaca

SEQ ID NO: 95781 - DNA, 25 bp, probe
ctcccctcataacaatagacacatg

SEQ ID NO: 95782 - DNA, 25 bp, probe
ggactcccctcataacaatagacac

SEQ ID NO: 95783 - DNA, 25 bp, probe
tgttagggtagcatgggattacagg

SEQ ID NO: 95784 - DNA, 25 bp, probe
gttagggtagcatgggattacaggg

SEQ ID NO: 95785 - DNA, 25 bp, probe
ccagtgttagggtagcatgggatta

SEQ ID NO: 95786 - DNA, 25 bp, probe
atccctggtcaaccctcaaacattc

SEQ ID NO: 95787 - DNA, 25 bp, probe
cggactcccctcataacaatagaca

SEQ ID NO: 95788 - DNA, 25 bp, probe
catccctggtcaaccctcaaacatt

SEQ ID NO: 95789 - DNA, 25 bp, probe
tcccctcataacaatagacacatgt

SEQ ID NO: 95790 - DNA, 25 bp, probe
ccggactcccctcataacaatagac

SEQ ID NO: 95791 - DNA, 25 bp, probe
ttactcgttttgtccaacgtaaaag

SEQ ID NO: 95792 - DNA, 25 bp, probe
attactcgttttgtccaacgtaaaa

SEQ ID NO: 95793 - DNA, 25 bp, probe
ttttattactcgttttgtccaacgt

SEQ ID NO: 95794 - DNA, 25 bp, probe
tattactcgttttgtccaacgtaaa

SEQ ID NO: 95795 - DNA, 25 bp, probe
ttattactcgttttgtccaacgtaa

SEQ ID NO: 95796 - DNA, 25 bp, probe
tttattactcgttttgtccaacgta

SEQ ID NO: 95797 - DNA, 25 bp, probe
gactaatcttcatcaccactgtaga

SEQ ID NO: 95798 - DNA, 25 bp, probe
tgactaatcttcatcaccactgtag

SEQ ID NO: 95799 - DNA, 25 bp, probe
ctgactaatcttcatcaccactgta

SEQ ID NO: 95800 - DNA, 25 bp, probe
ttctagttcgttgagacttagtgac

SEQ ID NO: 95801 - DNA, 25 bp, probe
cttctagttcgttgagacttagtga

SEQ ID NO: 95802 - DNA, 25 bp, probe
acttctagttcgttgagacttagtg

SEQ ID NO: 95803 - DNA, 25 bp, probe
tagttcgttgagacttagtgaccat

SEQ ID NO: 95804 - DNA, 25 bp, probe
aattctcgtcacactacatagacat

SEQ ID NO: 95805 - DNA, 25 bp, probe
ttctcgtcacactacatagacataa

SEQ ID NO: 95806 - DNA, 25 bp, probe
tctcgtcacactacatagacataat

SEQ ID NO: 95807 - DNA, 25 bp, probe
attctcgtcacactacatagacata

SEQ ID NO: 95808 - DNA, 25 bp, probe
tctagttcgttgagacttagtgacc

SEQ ID NO: 95809 - DNA, 25 bp, probe
cgtcacactacatagacataattgt

SEQ ID NO: 95810 - DNA, 25 bp, probe
agttcgttgagacttagtgaccatt

SEQ ID NO: 95811 - DNA, 25 bp, probe
tcgtcacactacatagacataattg

SEQ ID NO: 95812 - DNA, 25 bp, probe
ctagttcgttgagacttagtgacca

SEQ ID NO: 95813 - DNA, 25 bp, probe
ctcgtcacactacatagacataatt

SEQ ID NO: 95814 - DNA, 25 bp, probe
ctgctgactaatcttcatcaccact

SEQ ID NO: 95815 - DNA, 25 bp, probe
tatagccaatacaaatcaaatgccg

SEQ ID NO: 95816 - DNA, 25 bp, probe
taacatcacacaataggaaacacca

SEQ ID NO: 95817 - DNA, 25 bp, probe
ttaacatcacacaataggaaacacc

SEQ ID NO: 95818 - DNA, 25 bp, probe
gctgactaatcttcatcaccactgt

SEQ ID NO: 95819 - DNA, 25 bp, probe
tgctgactaatcttcatcaccactg

SEQ ID NO: 95820 - DNA, 25 bp, probe
attgccatctattgaaattctcgtc

SEQ ID NO: 95821 - DNA, 25 bp, probe
catcacacaataggaaacaccactt

SEQ ID NO: 95822 - DNA, 25 bp, probe
actaatcttcatcaccactgtagat

SEQ ID NO: 95823 - DNA, 25 bp, probe
ttcgttgagacttagtgaccatttg

SEQ ID NO: 95824 - DNA, 25 bp, probe
gttcgttgagacttagtgaccattt

SEQ ID NO: 95825 - DNA, 25 bp, probe
atcacacaataggaaacaccacttc

SEQ ID NO: 95826 - DNA, 25 bp, probe
ccatctattgaaattctcgtcacac

SEQ ID NO: 95827 - DNA, 25 bp, probe
tgaaattctcgtcacactacataga

SEQ ID NO: 95828 - DNA, 25 bp, probe
aacatcacacaataggaaacaccac

SEQ ID NO: 95829 - DNA, 25 bp, probe
catctattgaaattctcgtcacact

SEQ ID NO: 95830 - DNA, 25 bp, probe
ttgccatctattgaaattctcgtca

SEQ ID NO: 95831 - DNA, 25 bp, probe
tagtgaccatttggcatcaagttaa

SEQ ID NO: 95832 - DNA, 25 bp, probe
ttagtgaccatttggcatcaagtta

SEQ ID NO: 95833 - DNA, 25 bp, probe
ttgaaattctcgtcacactacatag

SEQ ID NO: 95834 - DNA, 25 bp, probe
ctattgaaattctcgtcacactaca

SEQ ID NO: 95835 - DNA, 25 bp, probe
taaatgtttagttgccacagtgaac

SEQ ID NO: 95836 - DNA, 25 bp, probe
ggcatcaagttaacatcacacaata

SEQ ID NO: 95837 - DNA, 25 bp, probe
ttaaatgtttagttgccacagtgaa

SEQ ID NO: 95838 - DNA, 25 bp, probe
aattgccatctattgaaattctcgt

SEQ ID NO: 95839 - DNA, 25 bp, probe
tctattgaaattctcgtcacactac

SEQ ID NO: 95840 - DNA, 25 bp, probe
atatagccaatacaaatcaaatgcc

SEQ ID NO: 95841 - DNA, 25 bp, probe
aaaggttctaggtttcaaagatgct

SEQ ID NO: 95842 - DNA, 25 bp, probe
caaaggttctaggtttcaaagatgc

SEQ ID NO: 95843 - DNA, 25 bp, probe
tcaaaggttctaggtttcaaagatg

SEQ ID NO: 95844 - DNA, 25 bp, probe
gatgctgtgagtctttggttctaag

SEQ ID NO: 95845 - DNA, 25 bp, probe
aaggttctaggtttcaaagatgctg
